United States Patent Application Publication US 2005/0244851 A1 - sequence listing, part 81

SEQ ID NO: 3153354 - DNA, 25 bp, Homo sapien
gttttcatatgcttgccagtgctct

SEQ ID NO: 3153355 - DNA, 25 bp, Homo sapien
ctatcctaagcagagaagcactaag

SEQ ID NO: 3153356 - DNA, 25 bp, Homo sapien
tctgtttactttttactgagaaggc

SEQ ID NO: 3153357 - DNA, 25 bp, Homo sapien
tgatgggggacaaagctgtctcctc

SEQ ID NO: 3153358 - DNA, 25 bp, Homo sapien
tctttgatgggggacaaagctgtct

SEQ ID NO: 3153359 - DNA, 25 bp, Homo sapien
ttgatgggggacaaagctgtctcct

SEQ ID NO: 3153360 - DNA, 25 bp, Homo sapien
ctgtctttgatgggggacaaagctg

SEQ ID NO: 3153361 - DNA, 25 bp, Homo sapien
ctaatgatggcctgaaggtgtggtg

SEQ ID NO: 3153362 - DNA, 25 bp, Homo sapien
gtgtggtgaccctgtgtttatttcc

SEQ ID NO: 3153363 - DNA, 25 bp, Homo sapien
tctggctccaagatcattttcccat

SEQ ID NO: 3153364 - DNA, 25 bp, Homo sapien
cctgaaggtgtggtgaccctgtgtt

SEQ ID NO: 3153365 - DNA, 25 bp, Homo sapien
gaaacccagttatgcaatggttcag

SEQ ID NO: 3153366 - DNA, 25 bp, Homo sapien
gctgtgtctaaaggctgtagtctgc

SEQ ID NO: 3153367 - DNA, 25 bp, Homo sapien
tgcagagtccaagttatccaatggt

SEQ ID NO: 3153368 - DNA, 25 bp, Homo sapien
gtatgttttatatttcggctgtgtc

SEQ ID NO: 3153369 - DNA, 25 bp, Homo sapien
tggtggcacagtcatgtctgacaca

SEQ ID NO: 3153370 - DNA, 25 bp, Homo sapien
ctggtggcacagtcatgtctgacac

SEQ ID NO: 3153371 - DNA, 25 bp, Homo sapien
taattcaccactttcactagagatg

SEQ ID NO: 3153372 - DNA, 25 bp, Homo sapien
cagagaccttcaggaagctggaaag

SEQ ID NO: 3153373 - DNA, 25 bp, Homo sapien
tccccggtaagaagagacctccaga

SEQ ID NO: 3153374 - DNA, 25 bp, Homo sapien
gaaagaagcttccaatggtgagctc

SEQ ID NO: 3153375 - DNA, 25 bp, Homo sapien
atagccgagttttgaagaatgtcag

SEQ ID NO: 3153376 - DNA, 25 bp, Homo sapien
ggaaatagccgagttttgaagaatg

SEQ ID NO: 3153377 - DNA, 25 bp, Homo sapien
aaatagccgagttttgaagaatgtc

SEQ ID NO: 3153378 - DNA, 25 bp, Homo sapien
ctggggaaatagccgagttttgaag

SEQ ID NO: 3153379 - DNA, 25 bp, Homo sapien
tctcagagccatttgccgcctcact

SEQ ID NO: 3153380 - DNA, 25 bp, Homo sapien
ggtggggccgcgagcttcctgttgt

SEQ ID NO: 3153381 - DNA, 25 bp, Homo sapien
ttgctccctacgatcatcttcacag

SEQ ID NO: 3153382 - DNA, 25 bp, Homo sapien
ttgccgcctcactgcttgctcccta

SEQ ID NO: 3153383 - DNA, 25 bp, Homo sapien
ctgctgactagttccccagaacacc

SEQ ID NO: 3153384 - DNA, 25 bp, Homo sapien
tgactagttccccagaacacccggc

SEQ ID NO: 3153385 - DNA, 25 bp, Homo sapien
ctgactagttccccagaacacccgg

SEQ ID NO: 3153386 - DNA, 25 bp, Homo sapien
tgctgactagttccccagaacaccc

SEQ ID NO: 3153387 - DNA, 25 bp, Homo sapien
tctgatttaggcatggtaggctggc

SEQ ID NO: 3153388 - DNA, 25 bp, Homo sapien
gcagtccctcgtagaatgccaagag

SEQ ID NO: 3153389 - DNA, 25 bp, Homo sapien
aatccaggctgtttagcagtccctc

SEQ ID NO: 3153390 - DNA, 25 bp, Homo sapien
gagaactgcatgttactgatcccca

SEQ ID NO: 3153391 - DNA, 25 bp, Homo sapien
gaggtcctggagtgagacgcacagc

SEQ ID NO: 3153392 - DNA, 25 bp, Homo sapien
accacatgtatagtgcaggatcagc

SEQ ID NO: 3153393 - DNA, 25 bp, Homo sapien
ggaactgtcgctgccagacagtcat

SEQ ID NO: 3153394 - DNA, 25 bp, Homo sapien
gaaattctctgacaagtcgggaggc

SEQ ID NO: 3153395 - DNA, 25 bp, Homo sapien
tcttctaaagtgtgaaagacgtagg

SEQ ID NO: 3153396 - DNA, 25 bp, Homo sapien
aaagacgtaggccatcagggatgtg

SEQ ID NO: 3153397 - DNA, 25 bp, Homo sapien
catcagggatgtggcttggaacgtc

SEQ ID NO: 3153398 - DNA, 25 bp, Homo sapien
cagggatgtggcttggaacgtccat

SEQ ID NO: 3153399 - DNA, 25 bp, Homo sapien
ttcttcacacaccatagtttctttt

SEQ ID NO: 3153400 - DNA, 25 bp, Homo sapien
ttgacatcgtatgtgagcccgtttg

SEQ ID NO: 3153401 - DNA, 25 bp, Homo sapien
tcttcacacaccatagtttcttttc

SEQ ID NO: 3153402 - DNA, 25 bp, Homo sapien
ttctttgacatcgtatgtgagcccg

SEQ ID NO: 3153403 - DNA, 25 bp, Homo sapien
tcctgaagccacatgctacactgct

SEQ ID NO: 3153404 - DNA, 25 bp, Homo sapien
tggattgcacagtgaaattgttttc

SEQ ID NO: 3153405 - DNA, 25 bp, Homo sapien
gaagccacatgctacactgctttgt

SEQ ID NO: 3153406 - DNA, 25 bp, Homo sapien
tctcctggattgcacagtgaaattg

SEQ ID NO: 3153407 - DNA, 25 bp, Homo sapien
tgtgagcacctcttaaggtgcgtgc

SEQ ID NO: 3153408 - DNA, 25 bp, Homo sapien
gtcatctccaacacacatcctgtga

SEQ ID NO: 3153409 - DNA, 25 bp, Homo sapien
atcctgtgagcacctcttaaggtgc

SEQ ID NO: 3153410 - DNA, 25 bp, Homo sapien
agcacctcttaaggtgcgtgctact

SEQ ID NO: 3153411 - DNA, 25 bp, Homo sapien
ggtttatctggatgggcttttgtgc

SEQ ID NO: 3153412 - DNA, 25 bp, Homo sapien
aaaggggcaggtttatctggatggg

SEQ ID NO: 3153413 - DNA, 25 bp, Homo sapien
cctttctcacttctggaaaggggca

SEQ ID NO: 3153414 - DNA, 25 bp, Homo sapien
tggaaaggggcaggtttatctggat

SEQ ID NO: 3153415 - DNA, 25 bp, Homo sapien
ctcctgaggactgggtcagtattct

SEQ ID NO: 3153416 - DNA, 25 bp, Homo sapien
tcctcctgaggactgggtcagtatt

SEQ ID NO: 3153417 - DNA, 25 bp, Homo sapien
cctgaggactgggtcagtattctct

SEQ ID NO: 3153418 - DNA, 25 bp, Homo sapien
gaggactgggtcagtattctcttca

SEQ ID NO: 3153419 - DNA, 25 bp, Homo sapien
taagattggactaaacctagcgtct

SEQ ID NO: 3153420 - DNA, 25 bp, Homo sapien
aagtctatgacgttaggttgctccc

SEQ ID NO: 3153421 - DNA, 25 bp, Homo sapien
tctgccggacttagtaggtgataca

SEQ ID NO: 3153422 - DNA, 25 bp, Homo sapien
cattcaaggaaaacaatatgccctg

SEQ ID NO: 3153423 - DNA, 25 bp, Homo sapien
tccttcatgtttcactggcctgagc

SEQ ID NO: 3153424 - DNA, 25 bp, Homo sapien
ggtcacaagcccattccagattcta

SEQ ID NO: 3153425 - DNA, 25 bp, Homo sapien
cagaagtcttcacttgcagtggtga

SEQ ID NO: 3153426 - DNA, 25 bp, Homo sapien
tgtaaccgacatccagagacagagt

SEQ ID NO: 3153427 - DNA, 25 bp, Homo sapien
tggtggctgggtcagtaaggctgca

SEQ ID NO: 3153428 - DNA, 25 bp, Homo sapien
gaggatctgcagaacctgagcaaca

SEQ ID NO: 3153429 - DNA, 25 bp, Homo sapien
cactgcttgtcttcggttgtcctga

SEQ ID NO: 3153430 - DNA, 25 bp, Homo sapien
tgtcctgaggatctgcagaacctga

SEQ ID NO: 3153431 - DNA, 25 bp, Homo sapien
tcttcggttgtcctgaggatctgca

SEQ ID NO: 3153432 - DNA, 25 bp, Homo sapien
tggagaaaaagtccagccagagggc

SEQ ID NO: 3153433 - DNA, 25 bp, Homo sapien
tggaatgggtcagcaccatgagagc

SEQ ID NO: 3153434 - DNA, 25 bp, Homo sapien
gctgctggaattgcagaatggttcc

SEQ ID NO: 3153435 - DNA, 25 bp, Homo sapien
taactggtgtccacccttgtccttc

SEQ ID NO: 3153436 - DNA, 25 bp, Homo sapien
gtgcaagatccctctagagatgatc

SEQ ID NO: 3153437 - DNA, 25 bp, Homo sapien
tgttggggtcacctcactcttccag

SEQ ID NO: 3153438 - DNA, 25 bp, Homo sapien
tctagagatgatccaccaccagctt

SEQ ID NO: 3153439 - DNA, 25 bp, Homo sapien
ttgaggcaatgcctccttcgcctgg

SEQ ID NO: 3153440 - DNA, 25 bp, Homo sapien
tatgacctatcaagattttggaccg

SEQ ID NO: 3153441 - DNA, 25 bp, Homo sapien
cggtccaaaatcttgataggtcata

SEQ ID NO: 3153442 - DNA, 25 bp, Homo sapien
gtggaggaggacatggtcattttct

SEQ ID NO: 3153443 - DNA, 25 bp, Homo sapien
gcttctcggcacctctgtctcttcc

SEQ ID NO: 3153444 - DNA, 25 bp, Homo sapien
cctggaatgggatgctgtgaagcaa

SEQ ID NO: 3153445 - DNA, 25 bp, Homo sapien
atactggcttgctcgctttcccacg

SEQ ID NO: 3153446 - DNA, 25 bp, Homo sapien
gctgtgaagcaagcccactctgaag

SEQ ID NO: 3153447 - DNA, 25 bp, Homo sapien
actttgtaggagattcccgcaacag

SEQ ID NO: 3153448 - DNA, 25 bp, Homo sapien
tgtttatcacgaatgactttgtagg

SEQ ID NO: 3153449 - DNA, 25 bp, Homo sapien
gattcccgcaacagaaaggggcagg

SEQ ID NO: 3153450 - DNA, 25 bp, Homo sapien
cagtgtttatcacgaatgactttgt

SEQ ID NO: 3153451 - DNA, 25 bp, Homo sapien
aagcaaaaccttgctggctccttcc

SEQ ID NO: 3153452 - DNA, 25 bp, Homo sapien
gggtgcatccctgtgaccatcccca

SEQ ID NO: 3153453 - DNA, 25 bp, Homo sapien
gtcttggcaggcactaaacatgatg

SEQ ID NO: 3153454 - DNA, 25 bp, Homo sapien
gcaggcactaaacatgatggagccc

SEQ ID NO: 3153455 - DNA, 25 bp, Homo sapien
cccagatttgtttcgaggacgggct

SEQ ID NO: 3153456 - DNA, 25 bp, Homo sapien
agcatttccagatgtggaaccaagt

SEQ ID NO: 3153457 - DNA, 25 bp, Homo sapien
gtgtcagcataaatttccccagatt

SEQ ID NO: 3153458 - DNA, 25 bp, Homo sapien
gatttgtttcgaggacgggcttgtc

SEQ ID NO: 3153459 - DNA, 25 bp, Homo sapien
aaagatgtggtttatattagtgccc

SEQ ID NO: 3153460 - DNA, 25 bp, Homo sapien
ggaaagatgtggtttatattagtgc

SEQ ID NO: 3153461 - DNA, 25 bp, Homo sapien
aagatgtggtttatattagtgccct

SEQ ID NO: 3153462 - DNA, 25 bp, Homo sapien
gatgtggtttatattagtgccctgg

SEQ ID NO: 3153463 - DNA, 25 bp, Homo sapien
catttccaagctacagggacctgtg

SEQ ID NO: 3153464 - DNA, 25 bp, Homo sapien
tgaatccgtttcaactgtatctctt

SEQ ID NO: 3153465 - DNA, 25 bp, Homo sapien
tccccaaagctgtgacttcatttgt

SEQ ID NO: 3153466 - DNA, 25 bp, Homo sapien
taatggttgtgtcaatgagggagcc

SEQ ID NO: 3153467 - DNA, 25 bp, Homo sapien
gttgtgtcagggtagagagccttca

SEQ ID NO: 3153468 - DNA, 25 bp, Homo sapien
cagcgtcttgccgtataagtggatg

SEQ ID NO: 3153469 - DNA, 25 bp, Homo sapien
taagtggcattaggatggcacccag

SEQ ID NO: 3153470 - DNA, 25 bp, Homo sapien
catacttagaggtgtgcttggcgtt

SEQ ID NO: 3153471 - DNA, 25 bp, Homo sapien
ccacatctttctgtttcggattcca

SEQ ID NO: 3153472 - DNA, 25 bp, Homo sapien
atccacatctttctgtttcggattc

SEQ ID NO: 3153473 - DNA, 25 bp, Homo sapien
ttccactctgttaatctgatcctta

SEQ ID NO: 3153474 - DNA, 25 bp, Homo sapien
tgatccttattcttctccgcttcct

SEQ ID NO: 3153475 - DNA, 25 bp, Homo sapien
gaaatcaaagaacggctgactagtt

SEQ ID NO: 3153476 - DNA, 25 bp, Homo sapien
catgaaatcaaagaacggctgacta

SEQ ID NO: 3153477 - DNA, 25 bp, Homo sapien
atcaaagaacggctgactagtttaa

SEQ ID NO: 3153478 - DNA, 25 bp, Homo sapien
caaagaacggctgactagtttaaca

SEQ ID NO: 3153479 - DNA, 25 bp, Homo sapien
tctgagtgctgacccatgcactggg

SEQ ID NO: 3153480 - DNA, 25 bp, Homo sapien
tgctgacccatgcactgggatgaag

SEQ ID NO: 3153481 - DNA, 25 bp, Homo sapien
agtctctgagtgctgacccatgcac

SEQ ID NO: 3153482 - DNA, 25 bp, Homo sapien
gagtgctgacccatgcactgggatg

SEQ ID NO: 3153483 - DNA, 25 bp, Homo sapien
gccaacgcatgtcgtaaactgtata

SEQ ID NO: 3153484 - DNA, 25 bp, Homo sapien
aggaaaccctgaatgccaacgcatg

SEQ ID NO: 3153485 - DNA, 25 bp, Homo sapien
ccctgaatgccaacgcatgtcgtaa

SEQ ID NO: 3153486 - DNA, 25 bp, Homo sapien
cgtaaactgtataccactctgaaaa

SEQ ID NO: 3153487 - DNA, 25 bp, Homo sapien
aaactggttctaggacagcctggat

SEQ ID NO: 3153488 - DNA, 25 bp, Homo sapien
aggacagcctggattgccagtttgg

SEQ ID NO: 3153489 - DNA, 25 bp, Homo sapien
tccaaaaactggttctaggacagcc

SEQ ID NO: 3153490 - DNA, 25 bp, Homo sapien
caaaaactggttctaggacagcctg

SEQ ID NO: 3153491 - DNA, 25 bp, Homo sapien
tggcattcgccaggcccttttccaa

SEQ ID NO: 3153492 - DNA, 25 bp, Homo sapien
gaaatgatccttctctagacgtggc

SEQ ID NO: 3153493 - DNA, 25 bp, Homo sapien
gcagatcagatgtgttttggttctt

SEQ ID NO: 3153494 - DNA, 25 bp, Homo sapien
tatattaataggaacataacccaaa

SEQ ID NO: 3153495 - DNA, 25 bp, Homo sapien
ctctgcttgtcacaattgagtttcc

SEQ ID NO: 3153496 - DNA, 25 bp, Homo sapien
gaacagtcaggaaatgggtcccagg

SEQ ID NO: 3153497 - DNA, 25 bp, Homo sapien
tgatcagcacgaatggaacagtcag

SEQ ID NO: 3153498 - DNA, 25 bp, Homo sapien
acatggttaaagtcgtgatcagcac

SEQ ID NO: 3153499 - DNA, 25 bp, Homo sapien
tagaacgtgtgctttgattggcagc

SEQ ID NO: 3153500 - DNA, 25 bp, Homo sapien
gggacaaatatttagctccactgtg

SEQ ID NO: 3153501 - DNA, 25 bp, Homo sapien
tagggacaaatatttagctccactg

SEQ ID NO: 3153502 - DNA, 25 bp, Homo sapien
gacaaatatttagctccactgtgcc

SEQ ID NO: 3153503 - DNA, 25 bp, Homo sapien
ctagggacaaatatttagctccact

SEQ ID NO: 3153504 - DNA, 25 bp, Homo sapien
catcagggcgtacatgacaataggg

SEQ ID NO: 3153505 - DNA, 25 bp, Homo sapien
tacccaactaggcatcagggcgtac

SEQ ID NO: 3153506 - DNA, 25 bp, Homo sapien
aactaggcatcagggcgtacatgac

SEQ ID NO: 3153507 - DNA, 25 bp, Homo sapien
gtacatttgctgtgtacccaactag

SEQ ID NO: 3153508 - DNA, 25 bp, Homo sapien
gaggcaggataatcagttgcacctg

SEQ ID NO: 3153509 - DNA, 25 bp, Homo sapien
caggataatcagttgcacctgggag

SEQ ID NO: 3153510 - DNA, 25 bp, Homo sapien
ggataatcagttgcacctgggaggc

SEQ ID NO: 3153511 - DNA, 25 bp, Homo sapien
ggcaggataatcagttgcacctggg

SEQ ID NO: 3153512 - DNA, 25 bp, Homo sapien
aaattagctcccatcatgttcctgc

SEQ ID NO: 3153513 - DNA, 25 bp, Homo sapien
ctgacgttgaagctctctgcaggct

SEQ ID NO: 3153514 - DNA, 25 bp, Homo sapien
cctttgcgagtgtaagtgcgtggct

SEQ ID NO: 3153515 - DNA, 25 bp, Homo sapien
tggttgccttgggaatcaagtccac

SEQ ID NO: 3153516 - DNA, 25 bp, Homo sapien
tcttggtgagacagcagattccatc

SEQ ID NO: 3153517 - DNA, 25 bp, Homo sapien
aggccttctgattccatgctggaga

SEQ ID NO: 3153518 - DNA, 25 bp, Homo sapien
gcaggttaagtgactcagccagcaa

SEQ ID NO: 3153519 - DNA, 25 bp, Homo sapien
ccggagcggcaatcaaacatggcat

SEQ ID NO: 3153520 - DNA, 25 bp, Homo sapien
ctttaacaatgttgcggaccaaagc

SEQ ID NO: 3153521 - DNA, 25 bp, Homo sapien
cctctaaagccctttaacaatgttg

SEQ ID NO: 3153522 - DNA, 25 bp, Homo sapien
taaagccctttaacaatgttgcgga

SEQ ID NO: 3153523 - DNA, 25 bp, Homo sapien
tgtggaaggagacactctgcttcct

SEQ ID NO: 3153524 - DNA, 25 bp, Homo sapien
tctggatgtgaatgaggttcagaag

SEQ ID NO: 3153525 - DNA, 25 bp, Homo sapien
cactaattgagctgattgagggcaa

SEQ ID NO: 3153526 - DNA, 25 bp, Homo sapien
tgactcagccagaaataccgggttg

SEQ ID NO: 3153527 - DNA, 25 bp, Homo sapien
ttgcatattcaaattttccagcctc

SEQ ID NO: 3153528 - DNA, 25 bp, Homo sapien
ccaggtagctgatacatttgtaaac

SEQ ID NO: 3153529 - DNA, 25 bp, Homo sapien
aaccaggtagctgatacatttgtaa

SEQ ID NO: 3153530 - DNA, 25 bp, Homo sapien
gcaaaccaggtagctgatacatttg

SEQ ID NO: 3153531 - DNA, 25 bp, Homo sapien
atctgcaaaccaggtagctgataca

SEQ ID NO: 3153532 - DNA, 25 bp, Homo sapien
gactgtctgggtatagttgtgattc

SEQ ID NO: 3153533 - DNA, 25 bp, Homo sapien
agttatcctgctgctagatacctgc

SEQ ID NO: 3153534 - DNA, 25 bp, Homo sapien
tgctagatacctgccgccggaggag

SEQ ID NO: 3153535 - DNA, 25 bp, Homo sapien
gggagtggtcgccaaaccagatgaa

SEQ ID NO: 3153536 - DNA, 25 bp, Homo sapien
tctgccctggggcattcggagagat

SEQ ID NO: 3153537 - DNA, 25 bp, Homo sapien
ttttgtctggaaggatacgcagata

SEQ ID NO: 3153538 - DNA, 25 bp, Homo sapien
gatggctgggagaagataaggctga

SEQ ID NO: 3153539 - DNA, 25 bp, Homo sapien
cagatattacgggttaaaggatgag

SEQ ID NO: 3153540 - DNA, 25 bp, Homo sapien
gcagcaagatatagcgtgacattct

SEQ ID NO: 3153541 - DNA, 25 bp, Homo sapien
agggtcctggtagtggcccacatcc

SEQ ID NO: 3153542 - DNA, 25 bp, Homo sapien
cagaatgggaatggatctagtaacc

SEQ ID NO: 3153543 - DNA, 25 bp, Homo sapien
tcagccctgttagtaacggcaaagt

SEQ ID NO: 3153544 - DNA, 25 bp, Homo sapien
atcttggcttgggagtgattatttg

SEQ ID NO: 3153545 - DNA, 25 bp, Homo sapien
gaagacttagtctcaggccagtctc

SEQ ID NO: 3153546 - DNA, 25 bp, Homo sapien
tcacgctgattggactggcatccac

SEQ ID NO: 3153547 - DNA, 25 bp, Homo sapien
tcctgcatctaccaccgaagactta

SEQ ID NO: 3153548 - DNA, 25 bp, Homo sapien
agagtgttgcattcacatccggaat

SEQ ID NO: 3153549 - DNA, 25 bp, Homo sapien
taagagtgttgcattcacatccgga

SEQ ID NO: 3153550 - DNA, 25 bp, Homo sapien
ttttaagagtgttgcattcacatcc

SEQ ID NO: 3153551 - DNA, 25 bp, Homo sapien
ttaagagtgttgcattcacatccgg

SEQ ID NO: 3153552 - DNA, 25 bp, Homo sapien
tcatgcctgagatgctaccacagag

SEQ ID NO: 3153553 - DNA, 25 bp, Homo sapien
ctttcagcttgtactgggaagtaca

SEQ ID NO: 3153554 - DNA, 25 bp, Homo sapien
cctgagatgctaccacagagactgc

SEQ ID NO: 3153555 - DNA, 25 bp, Homo sapien
tccctgtgacatccgggacagccat

SEQ ID NO: 3153556 - DNA, 25 bp, Homo sapien
ctgtgccgtaggagtaaatttccca

SEQ ID NO: 3153557 - DNA, 25 bp, Homo sapien
tgccgtaggagtaaatttcccagtc

SEQ ID NO: 3153558 - DNA, 25 bp, Homo sapien
ccgtaggagtaaatttcccagtcat

SEQ ID NO: 3153559 - DNA, 25 bp, Homo sapien
cttcccctgtgccgtaggagtaaat

SEQ ID NO: 3153560 - DNA, 25 bp, Homo sapien
gagcatctcctacttggactatcct

SEQ ID NO: 3153561 - DNA, 25 bp, Homo sapien
gagtctcctatatcttcccatcgtc

SEQ ID NO: 3153562 - DNA, 25 bp, Homo sapien
tacttggactatcctgagtctccta

SEQ ID NO: 3153563 - DNA, 25 bp, Homo sapien
ctgagtctcctatatcttcccatcg

SEQ ID NO: 3153564 - DNA, 25 bp, Homo sapien
ggccttggagtatgcagaatctggt

SEQ ID NO: 3153565 - DNA, 25 bp, Homo sapien
taaggggccttggagtatgcagaat

SEQ ID NO: 3153566 - DNA, 25 bp, Homo sapien
cacgtaaggggccttggagtatgca

SEQ ID NO: 3153567 - DNA, 25 bp, Homo sapien
agtatgcagaatctggtttggaggt

SEQ ID NO: 3153568 - DNA, 25 bp, Homo sapien
agacggaggattttgcttctcttag

SEQ ID NO: 3153569 - DNA, 25 bp, Homo sapien
tcagacggaggattttgcttctctt

SEQ ID NO: 3153570 - DNA, 25 bp, Homo sapien
tttgcttctcttagctcttctgggg

SEQ ID NO: 3153571 - DNA, 25 bp, Homo sapien
tgcttctcttagctcttctggggtc

SEQ ID NO: 3153572 - DNA, 25 bp, Homo sapien
ctttcctgatgatggggagccagcc

SEQ ID NO: 3153573 - DNA, 25 bp, Homo sapien
tcagttttctgaggatttattttct

SEQ ID NO: 3153574 - DNA, 25 bp, Homo sapien
gaggcttctttcctgatgatgggga

SEQ ID NO: 3153575 - DNA, 25 bp, Homo sapien
ttttctttgaagcatgaggcttctt

SEQ ID NO: 3153576 - DNA, 25 bp, Homo sapien
tttgtccaattatcacatattcctc

SEQ ID NO: 3153577 - DNA, 25 bp, Homo sapien
actctttggtttacaagggtgaatg

SEQ ID NO: 3153578 - DNA, 25 bp, Homo sapien
gcaaaatgctgaaatctactggctg

SEQ ID NO: 3153579 - DNA, 25 bp, Homo sapien
ggtcaggaattgcacacagcttttt

SEQ ID NO: 3153580 - DNA, 25 bp, Homo sapien
tactggctgagagaaataactgcat

SEQ ID NO: 3153581 - DNA, 25 bp, Homo sapien
ttgtggcagtagaagcaaggcaaac

SEQ ID NO: 3153582 - DNA, 25 bp, Homo sapien
gtggcagtagaagcaaggcaaacat

SEQ ID NO: 3153583 - DNA, 25 bp, Homo sapien
gttgtggcagtagaagcaaggcaaa

SEQ ID NO: 3153584 - DNA, 25 bp, Homo sapien
cggttgtggcagtagaagcaaggca

SEQ ID NO: 3153585 - DNA, 25 bp, Homo sapien
gatgaagtgaccatacccggtatcc

SEQ ID NO: 3153586 - DNA, 25 bp, Homo sapien
tggccaccaagtctttataaacagg

SEQ ID NO: 3153587 - DNA, 25 bp, Homo sapien
tgttaagcagccttcaagagacata

SEQ ID NO: 3153588 - DNA, 25 bp, Homo sapien
cataacgtaccctcagactgcagag

SEQ ID NO: 3153589 - DNA, 25 bp, Homo sapien
tcccttacatggagatcaccttacc

SEQ ID NO: 3153590 - DNA, 25 bp, Homo sapien
aatatataactctggctatctgggt

SEQ ID NO: 3153591 - DNA, 25 bp, Homo sapien
tgatgtgacacatttagcttctaag

SEQ ID NO: 3153592 - DNA, 25 bp, Homo sapien
tgggttaaaatgatactccaaagcc

SEQ ID NO: 3153593 - DNA, 25 bp, Homo sapien
gtgtgcatttttgtcaatctttgca

SEQ ID NO: 3153594 - DNA, 25 bp, Homo sapien
taaataaccgcatgttctaagtgtg

SEQ ID NO: 3153595 - DNA, 25 bp, Homo sapien
gaacttagcataaaaagtggccagc

SEQ ID NO: 3153596 - DNA, 25 bp, Homo sapien
taatacttaagttattgtgctcttt

SEQ ID NO: 3153597 - DNA, 25 bp, Homo sapien
tgattttgagattcaacaatgttgt

SEQ ID NO: 3153598 - DNA, 25 bp, Homo sapien
actacagccttcccagacttcccag

SEQ ID NO: 3153599 - DNA, 25 bp, Homo sapien
cataagtatttctttgggtttggcg

SEQ ID NO: 3153600 - DNA, 25 bp, Homo sapien
ttaagtcctctaaaccaagaacatg

SEQ ID NO: 3153601 - DNA, 25 bp, Homo sapien
tctccatgtatttaggtctttgacg

SEQ ID NO: 3153602 - DNA, 25 bp, Homo sapien
gctttgtagttttttgcgtagcata

SEQ ID NO: 3153603 - DNA, 25 bp, Homo sapien
gttatattgagataagataattttc

SEQ ID NO: 3153604 - DNA, 25 bp, Homo sapien
ccattcctaaaatgttgtaaataga

SEQ ID NO: 3153605 - DNA, 25 bp, Homo sapien
ctgttatattgagataagataattt

SEQ ID NO: 3153606 - DNA, 25 bp, Homo sapien
tctgttatattgagataagataatt

SEQ ID NO: 3153607 - DNA, 25 bp, Homo sapien
ttatcaatggctgtcggaaaccact

SEQ ID NO: 3153608 - DNA, 25 bp, Homo sapien
ccacaggctataagttcttgagggc

SEQ ID NO: 3153609 - DNA, 25 bp, Homo sapien
tcttctctgcacctccgaacaaagg

SEQ ID NO: 3153610 - DNA, 25 bp, Homo sapien
cagtggtaactctaaaggatgtgtc

SEQ ID NO: 3153611 - DNA, 25 bp, Homo sapien
tggccactgtttctacataagggtg

SEQ ID NO: 3153612 - DNA, 25 bp, Homo sapien
cataagggtgaattctcagccacag

SEQ ID NO: 3153613 - DNA, 25 bp, Homo sapien
tcctccgtctttgggaagttgtcag

SEQ ID NO: 3153614 - DNA, 25 bp, Homo sapien
ttctaaggagctctgtgtggcttcc

SEQ ID NO: 3153615 - DNA, 25 bp, Homo sapien
tcagtacatcgtagcctgggtggct

SEQ ID NO: 3153616 - DNA, 25 bp, Homo sapien
caccttgagggctaggatatcaaca

SEQ ID NO: 3153617 - DNA, 25 bp, Homo sapien
ggcttcgtccttgtatatggttgtc

SEQ ID NO: 3153618 - DNA, 25 bp, Homo sapien
cacagagagatcgaaaactatctag

SEQ ID NO: 3153619 - DNA, 25 bp, Homo sapien
gattttgaccatcctagcaacgaga

SEQ ID NO: 3153620 - DNA, 25 bp, Homo sapien
aacatctgaccctttgacagtggca

SEQ ID NO: 3153621 - DNA, 25 bp, Homo sapien
gattaaatctgactggactgctctg

SEQ ID NO: 3153622 - DNA, 25 bp, Homo sapien
tatacatgagggtagggtcctgagc

SEQ ID NO: 3153623 - DNA, 25 bp, Homo sapien
tcacggatcctgaagctaagaagtt

SEQ ID NO: 3153624 - DNA, 25 bp, Homo sapien
agtccccagcaagccatggtttcga

SEQ ID NO: 3153625 - DNA, 25 bp, Homo sapien
tggtactgcccccatatctgtttcc

SEQ ID NO: 3153626 - DNA, 25 bp, Homo sapien
tgcgtcctcgctttcaacagtgagg

SEQ ID NO: 3153627 - DNA, 25 bp, Homo sapien
tcctggccgtccctacttgggactg

SEQ ID NO: 3153628 - DNA, 25 bp, Homo sapien
ttctatccctcggtttccgggcata

SEQ ID NO: 3153629 - DNA, 25 bp, Homo sapien
tccgggcatatgtttgttcagcagt

SEQ ID NO: 3153630 - DNA, 25 bp, Homo sapien
tcagcagttacattaacctcgccac

SEQ ID NO: 3153631 - DNA, 25 bp, Homo sapien
tatttatcttcggagaaggcaaggc

SEQ ID NO: 3153632 - DNA, 25 bp, Homo sapien
agggtggctgccaaactattgggac

SEQ ID NO: 3153633 - DNA, 25 bp, Homo sapien
aactattgggactatttatcttcgg

SEQ ID NO: 3153634 - DNA, 25 bp, Homo sapien
ggtggctgccaaactattgggacta

SEQ ID NO: 3153635 - DNA, 25 bp, Homo sapien
tggttagttcaggactgtccggcgc

SEQ ID NO: 3153636 - DNA, 25 bp, Homo sapien
gttcaggactgtccggcgcagaact

SEQ ID NO: 3153637 - DNA, 25 bp, Homo sapien
tcaggtggttagttcaggactgtcc

SEQ ID NO: 3153638 - DNA, 25 bp, Homo sapien
ggacttggcagaggtcattcaggtg

SEQ ID NO: 3153639 - DNA, 25 bp, Homo sapien
cagacacgggcagtcaagcccttgg

SEQ ID NO: 3153640 - DNA, 25 bp, Homo sapien
ataggctgcccgagtcacaacagaa

SEQ ID NO: 3153641 - DNA, 25 bp, Homo sapien
cctggcacgtgatgctgcggagtac

SEQ ID NO: 3153642 - DNA, 25 bp, Homo sapien
tcctctagtgttctaagctctgccc

SEQ ID NO: 3153643 - DNA, 25 bp, Homo sapien
aagtgacgcagagagggcacacgca

SEQ ID NO: 3153644 - DNA, 25 bp, Homo sapien
caagcgggatgaagaaatccggccc

SEQ ID NO: 3153645 - DNA, 25 bp, Homo sapien
gagtcgacatagaaggagcgcgaca

SEQ ID NO: 3153646 - DNA, 25 bp, Homo sapien
caggccgtgaggtgtccttgatgat

SEQ ID NO: 3153647 - DNA, 25 bp, Homo sapien
cccggcccctgcgcccccgctgccg

SEQ ID NO: 3153648 - DNA, 25 bp, Homo sapien
tgcgcccccgctgccggcgcccaca

SEQ ID NO: 3153649 - DNA, 25 bp, Homo sapien
gcccccgctgccggcgcccacagac

SEQ ID NO: 3153650 - DNA, 25 bp, Homo sapien
ccggcccctgcgcccccgctgccgg

SEQ ID NO: 3153651 - DNA, 25 bp, Homo sapien
tggcccttaagcagaggcagtgccc

SEQ ID NO: 3153652 - DNA, 25 bp, Homo sapien
gcgggcaaaactgcgcgtccccagg

SEQ ID NO: 3153653 - DNA, 25 bp, Homo sapien
gcgtccccaggagccgaagagaact

SEQ ID NO: 3153654 - DNA, 25 bp, Homo sapien
gagccgaagagaactggcccttaag

SEQ ID NO: 3153655 - DNA, 25 bp, Homo sapien
gtggtggtgatgatgcgcatggttc

SEQ ID NO: 3153656 - DNA, 25 bp, Homo sapien
tggtggtgatgatgcgcatggttca

SEQ ID NO: 3153657 - DNA, 25 bp, Homo sapien
ggtggtgatgatgcgcatggttcac

SEQ ID NO: 3153658 - DNA, 25 bp, Homo sapien
atctccgcgggtccgccacgttgta

SEQ ID NO: 3153659 - DNA, 25 bp, Homo sapien
gcagtggaatctccgcgggtccgcc

SEQ ID NO: 3153660 - DNA, 25 bp, Homo sapien
ccacgttgtaggtggtggcggtgca

SEQ ID NO: 3153661 - DNA, 25 bp, Homo sapien
cgttgtaggtggtggcggtgcagac

SEQ ID NO: 3153662 - DNA, 25 bp, Homo sapien
cgaaaggcgcggagcgcaggtgccc

SEQ ID NO: 3153663 - DNA, 25 bp, Homo sapien
tttgctccaggagcgcgaaaggcgc

SEQ ID NO: 3153664 - DNA, 25 bp, Homo sapien
ctccactggaggtggaaagtttgct

SEQ ID NO: 3153665 - DNA, 25 bp, Homo sapien
ggaaagtttgctccaggagcgcgaa

SEQ ID NO: 3153666 - DNA, 25 bp, Homo sapien
taaggctcgggcaaggtgctcccac

SEQ ID NO: 3153667 - DNA, 25 bp, Homo sapien
ggctcgggcaaggtgctcccacccc

SEQ ID NO: 3153668 - DNA, 25 bp, Homo sapien
ggtaaggctcgggcaaggtgctccc

SEQ ID NO: 3153669 - DNA, 25 bp, Homo sapien
gtaaggctcgggcaaggtgctccca

SEQ ID NO: 3153670 - DNA, 25 bp, Homo sapien
tgcgtgctagtgaacgccgtcctca

SEQ ID NO: 3153671 - DNA, 25 bp, Homo sapien
tcttgccattgggtacctggctggc

SEQ ID NO: 3153672 - DNA, 25 bp, Homo sapien
taagtggcgatttcaatcctccgga

SEQ ID NO: 3153673 - DNA, 25 bp, Homo sapien
tctccgacaggttcaggtaagtggc

SEQ ID NO: 3153674 - DNA, 25 bp, Homo sapien
ttgcagcccgcgtgactgttcctct

SEQ ID NO: 3153675 - DNA, 25 bp, Homo sapien
gcccgcgtgactgttcctctgcgtg

SEQ ID NO: 3153676 - DNA, 25 bp, Homo sapien
gcgtgactgttcctctgcgtgccct

SEQ ID NO: 3153677 - DNA, 25 bp, Homo sapien
gtgactgttcctctgcgtgcccttc

SEQ ID NO: 3153678 - DNA, 25 bp, Homo sapien
gagcgcgcgtagtgcacctggctcc

SEQ ID NO: 3153679 - DNA, 25 bp, Homo sapien
ccttgtcatcgttggctgaggccgg

SEQ ID NO: 3153680 - DNA, 25 bp, Homo sapien
ctgaggccggcgacagggagtcctc

SEQ ID NO: 3153681 - DNA, 25 bp, Homo sapien
gagtcctcatcctcggagcgcgcgt

SEQ ID NO: 3153682 - DNA, 25 bp, Homo sapien
ctgccaggagcgggggatgtgaggg

SEQ ID NO: 3153683 - DNA, 25 bp, Homo sapien
ggagcgggggatgtgagggaggagg

SEQ ID NO: 3153684 - DNA, 25 bp, Homo sapien
caggagcgggggatgtgagggagga

SEQ ID NO: 3153685 - DNA, 25 bp, Homo sapien
gccaggagcgggggatgtgagggag

SEQ ID NO: 3153686 - DNA, 25 bp, Homo sapien
gaagggtcaggtcccggcttgtcca

SEQ ID NO: 3153687 - DNA, 25 bp, Homo sapien
aatgagcaaggattctggcccctgg

SEQ ID NO: 3153688 - DNA, 25 bp, Homo sapien
ttgtccattccagaacttccaggtt

SEQ ID NO: 3153689 - DNA, 25 bp, Homo sapien
cagatgggaccactgcaatgagcaa

SEQ ID NO: 3153690 - DNA, 25 bp, Homo sapien
tcctctgttatacgacaagaatgag

SEQ ID NO: 3153691 - DNA, 25 bp, Homo sapien
tattcacatacaaagggacttccag

SEQ ID NO: 3153692 - DNA, 25 bp, Homo sapien
tctccccaggcgaaatttcagaaag

SEQ ID NO: 3153693 - DNA, 25 bp, Homo sapien
ggacttccagcgacttagattttaa

SEQ ID NO: 3153694 - DNA, 25 bp, Homo sapien
ggccatccaagcagatccaaaccat

SEQ ID NO: 3153695 - DNA, 25 bp, Homo sapien
acttccccaaagatcgaagcaagag

SEQ ID NO: 3153696 - DNA, 25 bp, Homo sapien
atccaagcagatccaaaccatctaa

SEQ ID NO: 3153697 - DNA, 25 bp, Homo sapien
ttccccaaagatcgaagcaagaggg

SEQ ID NO: 3153698 - DNA, 25 bp, Homo sapien
caaactgagaccaagctggcttctg

SEQ ID NO: 3153699 - DNA, 25 bp, Homo sapien
aaactgagaccaagctggcttctgc

SEQ ID NO: 3153700 - DNA, 25 bp, Homo sapien
ctgagaccaagctggcttctgctcc

SEQ ID NO: 3153701 - DNA, 25 bp, Homo sapien
aactgagaccaagctggcttctgct

SEQ ID NO: 3153702 - DNA, 25 bp, Homo sapien
ctaggaggattgagccatggccagg

SEQ ID NO: 3153703 - DNA, 25 bp, Homo sapien
ggaatggcagctttagcatcctcct

SEQ ID NO: 3153704 - DNA, 25 bp, Homo sapien
caccgatgatgcagtgggattccga

SEQ ID NO: 3153705 - DNA, 25 bp, Homo sapien
tgggattccgagatgcctgtgcccg

SEQ ID NO: 3153706 - DNA, 25 bp, Homo sapien
tgtgcccgcagtagatacccaagta

SEQ ID NO: 3153707 - DNA, 25 bp, Homo sapien
tatgatttcgataccacgctgttcg

SEQ ID NO: 3153708 - DNA, 25 bp, Homo sapien
cttgttttgacagttcaaatccagg

SEQ ID NO: 3153709 - DNA, 25 bp, Homo sapien
tgacagggctgcgttcagaatatct

SEQ ID NO: 3153710 - DNA, 25 bp, Homo sapien
ttgcttctcacgtaaggcccaagtg

SEQ ID NO: 3153711 - DNA, 25 bp, Homo sapien
ccggctgccagacaagcgaggcttt

SEQ ID NO: 3153712 - DNA, 25 bp, Homo sapien
tttccacgtgggcagaggcgacgtt

SEQ ID NO: 3153713 - DNA, 25 bp, Homo sapien
tttcctgcgccggtgatcaagggcg

SEQ ID NO: 3153714 - DNA, 25 bp, Homo sapien
cgacgttgttcaggtggcaaggatc

SEQ ID NO: 3153715 - DNA, 25 bp, Homo sapien
ttgcagccaagtaattccaaaagcc

SEQ ID NO: 3153716 - DNA, 25 bp, Homo sapien
tttccagcgatccacatatttagag

SEQ ID NO: 3153717 - DNA, 25 bp, Homo sapien
gccagcttcactcggagaaccctgt

SEQ ID NO: 3153718 - DNA, 25 bp, Homo sapien
ccatagaaattatacctggaagtag

SEQ ID NO: 3153719 - DNA, 25 bp, Homo sapien
tgatagtgtctattgaggttttgcg

SEQ ID NO: 3153720 - DNA, 25 bp, Homo sapien
tagtgtctattgaggttttgcgcat

SEQ ID NO: 3153721 - DNA, 25 bp, Homo sapien
gatagtgtctattgaggttttgcgc

SEQ ID NO: 3153722 - DNA, 25 bp, Homo sapien
atagtgtctattgaggttttgcgca

SEQ ID NO: 3153723 - DNA, 25 bp, Homo sapien
agtgctggattccagcctctgtgca

SEQ ID NO: 3153724 - DNA, 25 bp, Homo sapien
gtgctggattccagcctctgtgcat

SEQ ID NO: 3153725 - DNA, 25 bp, Homo sapien
ctgggactacaggcatgcatcacca

SEQ ID NO: 3153726 - DNA, 25 bp, Homo sapien
actcctgcctcagcctttcgagtag

SEQ ID NO: 3153727 - DNA, 25 bp, Homo sapien
gcatcaccatgcccagctaattttt

SEQ ID NO: 3153728 - DNA, 25 bp, Homo sapien
cgccttcctagttcaagcaatactc

SEQ ID NO: 3153729 - DNA, 25 bp, Homo sapien
tcccagaacaatggggactgcagaa

SEQ ID NO: 3153730 - DNA, 25 bp, Homo sapien
acaaggctctcagggggtagtcact

SEQ ID NO: 3153731 - DNA, 25 bp, Homo sapien
tttacaggatcccagaacaatgggg

SEQ ID NO: 3153732 - DNA, 25 bp, Homo sapien
caggagacaaggctctcagggggta

SEQ ID NO: 3153733 - DNA, 25 bp, Homo sapien
aaaatcagccttgcaccaatagaca

SEQ ID NO: 3153734 - DNA, 25 bp, Homo sapien
aaatcagccttgcaccaatagacat

SEQ ID NO: 3153735 - DNA, 25 bp, Homo sapien
ggagtttgcttgtcagatccagagc

SEQ ID NO: 3153736 - DNA, 25 bp, Homo sapien
caggagtttgcttgtcagatccaga

SEQ ID NO: 3153737 - DNA, 25 bp, Homo sapien
gtggcaggagtttgcttgtcagatc

SEQ ID NO: 3153738 - DNA, 25 bp, Homo sapien
aaagctataggtgttctgagtcatt

SEQ ID NO: 3153739 - DNA, 25 bp, Homo sapien
ttccactttctggcagagagaggaa

SEQ ID NO: 3153740 - DNA, 25 bp, Homo sapien
tgtttggagtcatcctcaggacact

SEQ ID NO: 3153741 - DNA, 25 bp, Homo sapien
cctaaaatctggtgcagttccaggc

SEQ ID NO: 3153742 - DNA, 25 bp, Homo sapien
tgaggttccacttgaaggtccgacg

SEQ ID NO: 3153743 - DNA, 25 bp, Homo sapien
caggccactccttaacaagcctgag

SEQ ID NO: 3153744 - DNA, 25 bp, Homo sapien
agggcgtctcccatctctaagcctc

SEQ ID NO: 3153745 - DNA, 25 bp, Homo sapien
caagtcagggcgtctcccatctcta

SEQ ID NO: 3153746 - DNA, 25 bp, Homo sapien
gtcagggcgtctcccatctctaagc

SEQ ID NO: 3153747 - DNA, 25 bp, Homo sapien
gggcgtctcccatctctaagcctcc

SEQ ID NO: 3153748 - DNA, 25 bp, Homo sapien
aagtccaccctgggcgagtccgcat

SEQ ID NO: 3153749 - DNA, 25 bp, Homo sapien
tccaccctgggcgagtccgcatttg

SEQ ID NO: 3153750 - DNA, 25 bp, Homo sapien
ccctgggcgagtccgcatttggtga

SEQ ID NO: 3153751 - DNA, 25 bp, Homo sapien
caccctgggcgagtccgcatttggt

SEQ ID NO: 3153752 - DNA, 25 bp, Homo sapien
agagggagcaagaggccacctcaga

SEQ ID NO: 3153753 - DNA, 25 bp, Homo sapien
ctagagggagcaagaggccacctca

SEQ ID NO: 3153754 - DNA, 25 bp, Homo sapien
gagggagcaagaggccacctcagaa

SEQ ID NO: 3153755 - DNA, 25 bp, Homo sapien
tagagggagcaagaggccacctcag

SEQ ID NO: 3153756 - DNA, 25 bp, Homo sapien
tggattgctcaaaaacgtagtcatg

SEQ ID NO: 3153757 - DNA, 25 bp, Homo sapien
taatgcggattcctcctcggagaaa

SEQ ID NO: 3153758 - DNA, 25 bp, Homo sapien
aacccgcctgcagtgatttctaaac

SEQ ID NO: 3153759 - DNA, 25 bp, Homo sapien
cactgcgcagtagatgtctaaatgg

SEQ ID NO: 3153760 - DNA, 25 bp, Homo sapien
ttcccgagatatccagccttctccc

SEQ ID NO: 3153761 - DNA, 25 bp, Homo sapien
acattcccgagatatccagccttct

SEQ ID NO: 3153762 - DNA, 25 bp, Homo sapien
cattcccgagatatccagccttctc

SEQ ID NO: 3153763 - DNA, 25 bp, Homo sapien
aacattcccgagatatccagccttc

SEQ ID NO: 3153764 - DNA, 25 bp, Homo sapien
gtaagtctcctgtcagatgcaacca

SEQ ID NO: 3153765 - DNA, 25 bp, Homo sapien
tttgtaagtctcctgtcagatgcaa

SEQ ID NO: 3153766 - DNA, 25 bp, Homo sapien
ttgtaagtctcctgtcagatgcaac

SEQ ID NO: 3153767 - DNA, 25 bp, Homo sapien
tgtaagtctcctgtcagatgcaacc

SEQ ID NO: 3153768 - DNA, 25 bp, Homo sapien
tcggaagctagctctaaggagtctc

SEQ ID NO: 3153769 - DNA, 25 bp, Homo sapien
taaggagtctctttgcacgctcaga

SEQ ID NO: 3153770 - DNA, 25 bp, Homo sapien
tttgcacgctcagaattcagaacgg

SEQ ID NO: 3153771 - DNA, 25 bp, Homo sapien
gctcagaattcagaacggcactagt

SEQ ID NO: 3153772 - DNA, 25 bp, Homo sapien
tctggaatagccgcctccctgggtc

SEQ ID NO: 3153773 - DNA, 25 bp, Homo sapien
cccctttaacccttggctgcatctg

SEQ ID NO: 3153774 - DNA, 25 bp, Homo sapien
ctggaatagccgcctccctgggtcc

SEQ ID NO: 3153775 - DNA, 25 bp, Homo sapien
tggaatagccgcctccctgggtcca

SEQ ID NO: 3153776 - DNA, 25 bp, Homo sapien
gctttgagggcgcttcccactgagt

SEQ ID NO: 3153777 - DNA, 25 bp, Homo sapien
gctccaccgccaattctactttcct

SEQ ID NO: 3153778 - DNA, 25 bp, Homo sapien
tggctttgagggcgcttcccactga

SEQ ID NO: 3153779 - DNA, 25 bp, Homo sapien
cttgaagaattcaggtccgtttgcc

SEQ ID NO: 3153780 - DNA, 25 bp, Homo sapien
tcaggagcaacctccggacaggagg

SEQ ID NO: 3153781 - DNA, 25 bp, Homo sapien
ccactgctcataggcgggtttgaat

SEQ ID NO: 3153782 - DNA, 25 bp, Homo sapien
agagactgtgcaaagaagagaggtc

SEQ ID NO: 3153783 - DNA, 25 bp, Homo sapien
gctaaaggtttccatgtgtgacatt

SEQ ID NO: 3153784 - DNA, 25 bp, Homo sapien
cgtttgaggaatcgtaccaccgcct

SEQ ID NO: 3153785 - DNA, 25 bp, Homo sapien
tccttggaattgacagctgagcccc

SEQ ID NO: 3153786 - DNA, 25 bp, Homo sapien
gccagtgtcgggaggaaacgatcct

SEQ ID NO: 3153787 - DNA, 25 bp, Homo sapien
gatgtcagcctcgaaaacagggcgc

SEQ ID NO: 3153788 - DNA, 25 bp, Homo sapien
ttctctcaaactccctgcgctccga

SEQ ID NO: 3153789 - DNA, 25 bp, Homo sapien
tcccagtgtccagattgcgccttcg

SEQ ID NO: 3153790 - DNA, 25 bp, Homo sapien
cctgcgctccgaatctcccagtgtc

SEQ ID NO: 3153791 - DNA, 25 bp, Homo sapien
gctttttgctcttacgcaatcaggg

SEQ ID NO: 3153792 - DNA, 25 bp, Homo sapien
cagtaatgggctcaaaaaccgcgtt

SEQ ID NO: 3153793 - DNA, 25 bp, Homo sapien
catggagtaaagagcgtgcccacgg

SEQ ID NO: 3153794 - DNA, 25 bp, Homo sapien
tcctccgatgttattccgcaatgaa

SEQ ID NO: 3153795 - DNA, 25 bp, Homo sapien
tccctgtagctccaacagtaatggg

SEQ ID NO: 3153796 - DNA, 25 bp, Homo sapien
ttccaggacccactgccaagaagag

SEQ ID NO: 3153797 - DNA, 25 bp, Homo sapien
cgcaggcgaggaatgaaaacactca

SEQ ID NO: 3153798 - DNA, 25 bp, Homo sapien
tggtgttcggcccagtattcacgaa

SEQ ID NO: 3153799 - DNA, 25 bp, Homo sapien
catttaaaacctgtcgccttccagg

SEQ ID NO: 3153800 - DNA, 25 bp, Homo sapien
cagagcagcgccgtccagtaatcac

SEQ ID NO: 3153801 - DNA, 25 bp, Homo sapien
agtaatcacgcgcattcggccggct

SEQ ID NO: 3153802 - DNA, 25 bp, Homo sapien
atctggccccgactctctcccagag

SEQ ID NO: 3153803 - DNA, 25 bp, Homo sapien
gccgtccagtaatcacgcgcattcg

SEQ ID NO: 3153804 - DNA, 25 bp, Homo sapien
tgtgcggttcgaaattcctcaaatc

SEQ ID NO: 3153805 - DNA, 25 bp, Homo sapien
ccagaactgagcgaaagcagagccc

SEQ ID NO: 3153806 - DNA, 25 bp, Homo sapien
cagaaatgattccaccgaggagggg

SEQ ID NO: 3153807 - DNA, 25 bp, Homo sapien
cacggagcacaatgagggccccttg

SEQ ID NO: 3153808 - DNA, 25 bp, Homo sapien
ctaacttcctcacaagaagttcggc

SEQ ID NO: 3153809 - DNA, 25 bp, Homo sapien
ccaagtcgtccctaacttcctcaca

SEQ ID NO: 3153810 - DNA, 25 bp, Homo sapien
ttcctcacaagaagttcggcacctt

SEQ ID NO: 3153811 - DNA, 25 bp, Homo sapien
ctcacaagaagttcggcaccttcct

SEQ ID NO: 3153812 - DNA, 25 bp, Homo sapien
cgcagccgggcggagttaatttcgt

SEQ ID NO: 3153813 - DNA, 25 bp, Homo sapien
gagttaatttcgtgtgtaaatctgg

SEQ ID NO: 3153814 - DNA, 25 bp, Homo sapien
cagaggaaggagaagtacgcacaga

SEQ ID NO: 3153815 - DNA, 25 bp, Homo sapien
cacagacggctctgaagccggcagg

SEQ ID NO: 3153816 - DNA, 25 bp, Homo sapien
ttcaatgccaaatggacgccgcccg

SEQ ID NO: 3153817 - DNA, 25 bp, Homo sapien
attcaatgccaaatggacgccgccc

SEQ ID NO: 3153818 - DNA, 25 bp, Homo sapien
caatgccaaatggacgccgcccgct

SEQ ID NO: 3153819 - DNA, 25 bp, Homo sapien
atgccaaatggacgccgcccgctcc

SEQ ID NO: 3153820 - DNA, 25 bp, Homo sapien
ccctcccggaatagaacagctgatc

SEQ ID NO: 3153821 - DNA, 25 bp, Homo sapien
ctgcgggagggatgcacaacgcaca

SEQ ID NO: 3153822 - DNA, 25 bp, Homo sapien
caacgtactcgggttgggccacact

SEQ ID NO: 3153823 - DNA, 25 bp, Homo sapien
ttcccgaccaagacgcgaggccagg

SEQ ID NO: 3153824 - DNA, 25 bp, Homo sapien
tagggacctgatatgggccccatcc

SEQ ID NO: 3153825 - DNA, 25 bp, Homo sapien
tctagttcttgtcaggagcgaccgc

SEQ ID NO: 3153826 - DNA, 25 bp, Homo sapien
gaggcgagtcggtccaaaacattga

SEQ ID NO: 3153827 - DNA, 25 bp, Homo sapien
tgtttgtccggtgagatgcactgcg

SEQ ID NO: 3153828 - DNA, 25 bp, Homo sapien
acccaaaactgcaagctccgaagca

SEQ ID NO: 3153829 - DNA, 25 bp, Homo sapien
gtcaaagcgagcctggtcggccttg

SEQ ID NO: 3153830 - DNA, 25 bp, Homo sapien
tgaacgaggtccagctgcacttggg

SEQ ID NO: 3153831 - DNA, 25 bp, Homo sapien
ctcatcttgagggttgtggaaagga

SEQ ID NO: 3153832 - DNA, 25 bp, Homo sapien
agtccgcgtcccgagaggaaactgg

SEQ ID NO: 3153833 - DNA, 25 bp, Homo sapien
cgccagacgtgtttgcagctggaaa

SEQ ID NO: 3153834 - DNA, 25 bp, Homo sapien
cagcaacgtataacctggtcgcagc

SEQ ID NO: 3153835 - DNA, 25 bp, Homo sapien
ttcggtcaccgatccggcttttagc

SEQ ID NO: 3153836 - DNA, 25 bp, Homo sapien
gccgccccaaggctgatgctgcggt

SEQ ID NO: 3153837 - DNA, 25 bp, Homo sapien
caaggctgatgctgcggttggaccc

SEQ ID NO: 3153838 - DNA, 25 bp, Homo sapien
gctgcggttggacccggcgagttag

SEQ ID NO: 3153839 - DNA, 25 bp, Homo sapien
ccccaaggctgatgctgcggttgga

SEQ ID NO: 3153840 - DNA, 25 bp, Homo sapien
gggttggcggcgatgcccagccgct

SEQ ID NO: 3153841 - DNA, 25 bp, Homo sapien
ctccaccaagtcctcggcggcttgg

SEQ ID NO: 3153842 - DNA, 25 bp, Homo sapien
gccgctgcgccccaggcacgacgct

SEQ ID NO: 3153843 - DNA, 25 bp, Homo sapien
acgctctgcgtttgcattgttttca

SEQ ID NO: 3153844 - DNA, 25 bp, Homo sapien
cacattgaattacaaggacgtccca

SEQ ID NO: 3153845 - DNA, 25 bp, Homo sapien
ggaggctctgcgctcggactgtcca

SEQ ID NO: 3153846 - DNA, 25 bp, Homo sapien
agagcctgcgaggagtccactggct

SEQ ID NO: 3153847 - DNA, 25 bp, Homo sapien
tgcgctccactgagatagcggcgcc

SEQ ID NO: 3153848 - DNA, 25 bp, Homo sapien
tgaaagcccgcggggtttaagcaga

SEQ ID NO: 3153849 - DNA, 25 bp, Homo sapien
gaaaatggctaaatctcctcgggac

SEQ ID NO: 3153850 - DNA, 25 bp, Homo sapien
cacagacgccgctgcgaggaattct

SEQ ID NO: 3153851 - DNA, 25 bp, Homo sapien
gtgcgtccacgggttgcgacacaga

SEQ ID NO: 3153852 - DNA, 25 bp, Homo sapien
cagtagttcttacgagtggccagca

SEQ ID NO: 3153853 - DNA, 25 bp, Homo sapien
cagatggcagtgttggtccaaggac

SEQ ID NO: 3153854 - DNA, 25 bp, Homo sapien
ttcctaatggtctccgcgaagccca

SEQ ID NO: 3153855 - DNA, 25 bp, Homo sapien
tcctaatggtctccgcgaagcccat

SEQ ID NO: 3153856 - DNA, 25 bp, Homo sapien
cttcctaatggtctccgcgaagccc

SEQ ID NO: 3153857 - DNA, 25 bp, Homo sapien
caaattctgagaaacatggcaccat

SEQ ID NO: 3153858 - DNA, 25 bp, Homo sapien
ggaatttcctcacctattagacctg

SEQ ID NO: 3153859 - DNA, 25 bp, Homo sapien
cataagaatccgtgagaacaacccc

SEQ ID NO: 3153860 - DNA, 25 bp, Homo sapien
tagacctgtagtgaggctctctggg

SEQ ID NO: 3153861 - DNA, 25 bp, Homo sapien
gagtctagggaagtcagttttgaac

SEQ ID NO: 3153862 - DNA, 25 bp, Homo sapien
aagatataaatctgagaggccttca

SEQ ID NO: 3153863 - DNA, 25 bp, Homo sapien
catagggcaccaaaatttagataga

SEQ ID NO: 3153864 - DNA, 25 bp, Homo sapien
gcaaaggctataccttttcaaggga

SEQ ID NO: 3153865 - DNA, 25 bp, Homo sapien
agaatatgcggcatttggttttttc

SEQ ID NO: 3153866 - DNA, 25 bp, Homo sapien
cccttcctgtgtccgtgttgttctc

SEQ ID NO: 3153867 - DNA, 25 bp, Homo sapien
aatatgcggcatttggttttttctt

SEQ ID NO: 3153868 - DNA, 25 bp, Homo sapien
cgaggtatatctcctaaaggtatcc

SEQ ID NO: 3153869 - DNA, 25 bp, Homo sapien
taagaccaggaacgccggatgggaa

SEQ ID NO: 3153870 - DNA, 25 bp, Homo sapien
agcctaagaccaggaacgccggatg

SEQ ID NO: 3153871 - DNA, 25 bp, Homo sapien
gaagacagcctaagaccaggaacgc

SEQ ID NO: 3153872 - DNA, 25 bp, Homo sapien
tgagaagacagcctaagaccaggaa

SEQ ID NO: 3153873 - DNA, 25 bp, Homo sapien
tctaatccagctctaatagaagcct

SEQ ID NO: 3153874 - DNA, 25 bp, Homo sapien
ctgaatttatctaatccagctctaa

SEQ ID NO: 3153875 - DNA, 25 bp, Homo sapien
ttatctaatccagctctaatagaag

SEQ ID NO: 3153876 - DNA, 25 bp, Homo sapien
gaatttatctaatccagctctaata

SEQ ID NO: 3153877 - DNA, 25 bp, Homo sapien
tctgatttccacatcggagctctct

SEQ ID NO: 3153878 - DNA, 25 bp, Homo sapien
agtgtacaaccctgtgtgggccgcc

SEQ ID NO: 3153879 - DNA, 25 bp, Homo sapien
ccaagaccgtcacaaaaaggccgct

SEQ ID NO: 3153880 - DNA, 25 bp, Homo sapien
aaagctggcagaggattaggctcag

SEQ ID NO: 3153881 - DNA, 25 bp, Homo sapien
gcctcacagatatagggccctacag

SEQ ID NO: 3153882 - DNA, 25 bp, Homo sapien
tcattcctagaggtacaaaggctac

SEQ ID NO: 3153883 - DNA, 25 bp, Homo sapien
tctttcctttgacggtggcctcaca

SEQ ID NO: 3153884 - DNA, 25 bp, Homo sapien
tacagtgaaggtcccattaaagccc

SEQ ID NO: 3153885 - DNA, 25 bp, Homo sapien
agaaggaaggagatgatacaagtac

SEQ ID NO: 3153886 - DNA, 25 bp, Homo sapien
taaagaaggaaggagatgatacaag

SEQ ID NO: 3153887 - DNA, 25 bp, Homo sapien
ttaaagaaggaaggagatgatacaa

SEQ ID NO: 3153888 - DNA, 25 bp, Homo sapien
aaagaaggaaggagatgatacaagt

SEQ ID NO: 3153889 - DNA, 25 bp, Homo sapien
tttagggccgccatagtcaggaatg

SEQ ID NO: 3153890 - DNA, 25 bp, Homo sapien
agaacaccgcattcctcagcagtgg

SEQ ID NO: 3153891 - DNA, 25 bp, Homo sapien
tgcatgggtaatcaagctttggcct

SEQ ID NO: 3153892 - DNA, 25 bp, Homo sapien
caagcgtactaactgtggacatcaa

SEQ ID NO: 3153893 - DNA, 25 bp, Homo sapien
cattgttaaaaacagcacaggtgac

SEQ ID NO: 3153894 - DNA, 25 bp, Homo sapien
ttatacacggttttaagagcttcca

SEQ ID NO: 3153895 - DNA, 25 bp, Homo sapien
ggtgaccacaatcgtttcccctgac

SEQ ID NO: 3153896 - DNA, 25 bp, Homo sapien
ccagggtaagtccattgaaggtcaa

SEQ ID NO: 3153897 - DNA, 25 bp, Homo sapien
tgaaaaagaaggcttacggcacact

SEQ ID NO: 3153898 - DNA, 25 bp, Homo sapien
tgacagaccgagctcaaatgcaggt

SEQ ID NO: 3153899 - DNA, 25 bp, Homo sapien
tatcttgtagccagagaaccttcct

SEQ ID NO: 3153900 - DNA, 25 bp, Homo sapien
gagaaactcagtgatgtgcccatca

SEQ ID NO: 3153901 - DNA, 25 bp, Homo sapien
catggacagaaatagtgactttctt

SEQ ID NO: 3153902 - DNA, 25 bp, Homo sapien
cctggcgggcagcacattcgtaatc

SEQ ID NO: 3153903 - DNA, 25 bp, Homo sapien
tgatggatgggactttgatttcttc

SEQ ID NO: 3153904 - DNA, 25 bp, Homo sapien
gaccgtcaaagtgtacaccaatttg

SEQ ID NO: 3153905 - DNA, 25 bp, Homo sapien
gatcccgagcagcatggacaactga

SEQ ID NO: 3153906 - DNA, 25 bp, Homo sapien
cacatatggatcccgagcagcatgg

SEQ ID NO: 3153907 - DNA, 25 bp, Homo sapien
catatggatcccgagcagcatggac

SEQ ID NO: 3153908 - DNA, 25 bp, Homo sapien
tatggatcccgagcagcatggacaa

SEQ ID NO: 3153909 - DNA, 25 bp, Homo sapien
ggcccgcacctctacaacaaaatgt

SEQ ID NO: 3153910 - DNA, 25 bp, Homo sapien
gacagcttccaactggctgaaggtg

SEQ ID NO: 3153911 - DNA, 25 bp, Homo sapien
gacttcatgcaggttgacagcttcc

SEQ ID NO: 3153912 - DNA, 25 bp, Homo sapien
cagagtcagattgtttttcagccag

SEQ ID NO: 3153913 - DNA, 25 bp, Homo sapien
tcaaaagtatagctcttcacagcat

SEQ ID NO: 3153914 - DNA, 25 bp, Homo sapien
tccttagcacggatcagctttaatt

SEQ ID NO: 3153915 - DNA, 25 bp, Homo sapien
tacaatagtataatggccactgtct

SEQ ID NO: 3153916 - DNA, 25 bp, Homo sapien
tgtcttcttccttagcacggatcag

SEQ ID NO: 3153917 - DNA, 25 bp, Homo sapien
gccatggtgatcatcgaccaagtcc

SEQ ID NO: 3153918 - DNA, 25 bp, Homo sapien
tggtgatcatcgaccaagtccagaa

SEQ ID NO: 3153919 - DNA, 25 bp, Homo sapien
tgatcatcgaccaagtccagaatgg

SEQ ID NO: 3153920 - DNA, 25 bp, Homo sapien
gatcatcgaccaagtccagaatgga

SEQ ID NO: 3153921 - DNA, 25 bp, Homo sapien
caatatcaggaagcggcgtgccttc

SEQ ID NO: 3153922 - DNA, 25 bp, Homo sapien
atccactcaatatcaggaagcggcg

SEQ ID NO: 3153923 - DNA, 25 bp, Homo sapien
tttgcatatcatccactcaatatca

SEQ ID NO: 3153924 - DNA, 25 bp, Homo sapien
gcatatcatccactcaatatcagga

SEQ ID NO: 3153925 - DNA, 25 bp, Homo sapien
cacgaaagaagaagacacatctgtt

SEQ ID NO: 3153926 - DNA, 25 bp, Homo sapien
ccaaaaccctatcttatagtcaata

SEQ ID NO: 3153927 - DNA, 25 bp, Homo sapien
aaatgtatttgacatcatttgtgtc

SEQ ID NO: 3153928 - DNA, 25 bp, Homo sapien
caaaaccctatcttatagtcaataa

SEQ ID NO: 3153929 - DNA, 25 bp, Homo sapien
catttgtgtcaagggagaaatattc

SEQ ID NO: 3153930 - DNA, 25 bp, Homo sapien
tccacggtactcctgtctcgggagt

SEQ ID NO: 3153931 - DNA, 25 bp, Homo sapien
aaggagattcttagccaggcatcgc

SEQ ID NO: 3153932 - DNA, 25 bp, Homo sapien
cactttggcgaaagtcacacggccc

SEQ ID NO: 3153933 - DNA, 25 bp, Homo sapien
gatctccgtgatgatgtttgagaca

SEQ ID NO: 3153934 - DNA, 25 bp, Homo sapien
gtttccaaatgacaaccaggacaat

SEQ ID NO: 3153935 - DNA, 25 bp, Homo sapien
gcagccaccgtgagttcagaacgca

SEQ ID NO: 3153936 - DNA, 25 bp, Homo sapien
ctgtttccaaatgacaaccaggaca

SEQ ID NO: 3153937 - DNA, 25 bp, Homo sapien
gactgcagcagccaccgtgagttca

SEQ ID NO: 3153938 - DNA, 25 bp, Homo sapien
ctgcatcgggtccacataaatatat

SEQ ID NO: 3153939 - DNA, 25 bp, Homo sapien
gattcaatgaccctccagcgaattt

SEQ ID NO: 3153940 - DNA, 25 bp, Homo sapien
ctgattgattcaatgaccctccagc

SEQ ID NO: 3153941 - DNA, 25 bp, Homo sapien
tccagcgaatttcatacctcggttt

SEQ ID NO: 3153942 - DNA, 25 bp, Homo sapien
ttggaaactcccatcttgagtcata

SEQ ID NO: 3153943 - DNA, 25 bp, Homo sapien
caagcactagtccatctcttggaaa

SEQ ID NO: 3153944 - DNA, 25 bp, Homo sapien
caaaaaaggaattgagcccacaggg

SEQ ID NO: 3153945 - DNA, 25 bp, Homo sapien
ctccaagtcatcgtgtcaaaaaagg

SEQ ID NO: 3153946 - DNA, 25 bp, Homo sapien
cctgtttggagtaatcataatgact

SEQ ID NO: 3153947 - DNA, 25 bp, Homo sapien
gacagctgggcgagtgtctttcctg

SEQ ID NO: 3153948 - DNA, 25 bp, Homo sapien
gttgggaccggcttaatccataggc

SEQ ID NO: 3153949 - DNA, 25 bp, Homo sapien
gaccggcttaatccataggctgttc

SEQ ID NO: 3153950 - DNA, 25 bp, Homo sapien
ttcccaaacgctccagaccccaaga

SEQ ID NO: 3153951 - DNA, 25 bp, Homo sapien
atgacaggttgggaccggcttaatc

SEQ ID NO: 3153952 - DNA, 25 bp, Homo sapien
ggcagcaagagcaatctaaataaac

SEQ ID NO: 3153953 - DNA, 25 bp, Homo sapien
aagaagcagatagctacttggcctc

SEQ ID NO: 3153954 - DNA, 25 bp, Homo sapien
gagtcaaaataatcaggacctagtc

SEQ ID NO: 3153955 - DNA, 25 bp, Homo sapien
catgctcaaaaaatccccgtgctca

SEQ ID NO: 3153956 - DNA, 25 bp, Homo sapien
tgtggccccaggtgagtcattatct

SEQ ID NO: 3153957 - DNA, 25 bp, Homo sapien
agtttacaatgttcaaatgtggccc

SEQ ID NO: 3153958 - DNA, 25 bp, Homo sapien
caatgttcaaatgtggccccaggtg

SEQ ID NO: 3153959 - DNA, 25 bp, Homo sapien
tgtttttcactggatctggccgtgg

SEQ ID NO: 3153960 - DNA, 25 bp, Homo sapien
tcaaaaaccaatgagcttccatcaa

SEQ ID NO: 3153961 - DNA, 25 bp, Homo sapien
gaggatttaagcctgattgaacagt

SEQ ID NO: 3153962 - DNA, 25 bp, Homo sapien
aatggctatgactggactggcaaca

SEQ ID NO: 3153963 - DNA, 25 bp, Homo sapien
tgtccagtgaaaatcctcactccag

SEQ ID NO: 3153964 - DNA, 25 bp, Homo sapien
gctcaggaagctatccctattctta

SEQ ID NO: 3153965 - DNA, 25 bp, Homo sapien
gtggtggctcaggaagctatcccta

SEQ ID NO: 3153966 - DNA, 25 bp, Homo sapien
tatgcaaatagttgaccaaatctcc

SEQ ID NO: 3153967 - DNA, 25 bp, Homo sapien
cagcagggttcaatccaaagatatc

SEQ ID NO: 3153968 - DNA, 25 bp, Homo sapien
tcagcaaggacctcgagcttggaga

SEQ ID NO: 3153969 - DNA, 25 bp, Homo sapien
aaggacctcgagcttggagatccac

SEQ ID NO: 3153970 - DNA, 25 bp, Homo sapien
tcgagcttggagatccacagacagt

SEQ ID NO: 3153971 - DNA, 25 bp, Homo sapien
agaactcaagcatccctggccagag

SEQ ID NO: 3153972 - DNA, 25 bp, Homo sapien
cattgacgtcatttataggtccagg

SEQ ID NO: 3153973 - DNA, 25 bp, Homo sapien
tacagagttctttatagccacttgt

SEQ ID NO: 3153974 - DNA, 25 bp, Homo sapien
tatagccacttgtagatttctgcag

SEQ ID NO: 3153975 - DNA, 25 bp, Homo sapien
gatttctgcagtagggatcactatc

SEQ ID NO: 3153976 - DNA, 25 bp, Homo sapien
ggatgtcggaatatttagaaacctc

SEQ ID NO: 3153977 - DNA, 25 bp, Homo sapien
catagagtgatctctggatgtcgga

SEQ ID NO: 3153978 - DNA, 25 bp, Homo sapien
tcttcttatatgaggctggacgatc

SEQ ID NO: 3153979 - DNA, 25 bp, Homo sapien
gacatactgtgtagtatcagcctgc

SEQ ID NO: 3153980 - DNA, 25 bp, Homo sapien
cacgtgggctgccaggttcacttac

SEQ ID NO: 3153981 - DNA, 25 bp, Homo sapien
ccaacacccagagtgagtatagaca

SEQ ID NO: 3153982 - DNA, 25 bp, Homo sapien
tacaggccacaaacctggaaacatg

SEQ ID NO: 3153983 - DNA, 25 bp, Homo sapien
gacctgcatttagagaccacgtggg

SEQ ID NO: 3153984 - DNA, 25 bp, Homo sapien
tgaatggaacttggaaccgcagaaa

SEQ ID NO: 3153985 - DNA, 25 bp, Homo sapien
caccctgagcagatgtgaagtgatc

SEQ ID NO: 3153986 - DNA, 25 bp, Homo sapien
ttaaaagcgcttggaagttcaccca

SEQ ID NO: 3153987 - DNA, 25 bp, Homo sapien
tgtccagggcagctcaacacttttt

SEQ ID NO: 3153988 - DNA, 25 bp, Homo sapien
gaagagtagctctagccattcacga

SEQ ID NO: 3153989 - DNA, 25 bp, Homo sapien
aggttcctctgacatctcgtgccaa

SEQ ID NO: 3153990 - DNA, 25 bp, Homo sapien
gatagtcacggaaggccagaaagca

SEQ ID NO: 3153991 - DNA, 25 bp, Homo sapien
tggtctgcctgccaacagggcttgg

SEQ ID NO: 3153992 - DNA, 25 bp, Homo sapien
tggagcacacatacaagctacatga

SEQ ID NO: 3153993 - DNA, 25 bp, Homo sapien
tacatggagcacacatacaagctac

SEQ ID NO: 3153994 - DNA, 25 bp, Homo sapien
taaacacacactaaaatcttccatg

SEQ ID NO: 3153995 - DNA, 25 bp, Homo sapien
gagcacacatacaagctacatgaaa

SEQ ID NO: 3153996 - DNA, 25 bp, Homo sapien
taggtgaagctcaacaaatccaata

SEQ ID NO: 3153997 - DNA, 25 bp, Homo sapien
aaaactccattcctcgggcaacttg

SEQ ID NO: 3153998 - DNA, 25 bp, Homo sapien
gccaaaaactccattcctcgggcaa

SEQ ID NO: 3153999 - DNA, 25 bp, Homo sapien
cctcgggcaacttgataggtgaagc

SEQ ID NO: 3154000 - DNA, 25 bp, Homo sapien
aatttttccttgtgccaggaggacg

SEQ ID NO: 3154001 - DNA, 25 bp, Homo sapien
acgttgcgagcagccagatcacggt

SEQ ID NO: 3154002 - DNA, 25 bp, Homo sapien
tcatgcatgatgtctctggccaggc

SEQ ID NO: 3154003 - DNA, 25 bp, Homo sapien
actgcctttcgacacatagttcgaa

SEQ ID NO: 3154004 - DNA, 25 bp, Homo sapien
accagtgagggaagtgaggacgtac

SEQ ID NO: 3154005 - DNA, 25 bp, Homo sapien
gagcctgaccagtgagggaagtgag

SEQ ID NO: 3154006 - DNA, 25 bp, Homo sapien
cctgaccagtgagggaagtgaggac

SEQ ID NO: 3154007 - DNA, 25 bp, Homo sapien
gatgagcctgaccagtgagggaagt

SEQ ID NO: 3154008 - DNA, 25 bp, Homo sapien
cagagcagaatgccataagaccaga

SEQ ID NO: 3154009 - DNA, 25 bp, Homo sapien
gagcagaatgccataagaccagaca

SEQ ID NO: 3154010 - DNA, 25 bp, Homo sapien
accagacatcactcagtgtggtgta

SEQ ID NO: 3154011 - DNA, 25 bp, Homo sapien
agaccagacatcactcagtgtggtg

SEQ ID NO: 3154012 - DNA, 25 bp, Homo sapien
cgtggtcaggcttggccatccggta

SEQ ID NO: 3154013 - DNA, 25 bp, Homo sapien
tggccatccggtacccactcttgat

SEQ ID NO: 3154014 - DNA, 25 bp, Homo sapien
aagtagaatccaccatcatgccggg

SEQ ID NO: 3154015 - DNA, 25 bp, Homo sapien
cggtacccactcttgatcttattgt

SEQ ID NO: 3154016 - DNA, 25 bp, Homo sapien
tctccggctcactgttccagcattt

SEQ ID NO: 3154017 - DNA, 25 bp, Homo sapien
tccacaatctcactcaggtggtaaa

SEQ ID NO: 3154018 - DNA, 25 bp, Homo sapien
tctccacaatctcactcaggtggta

SEQ ID NO: 3154019 - DNA, 25 bp, Homo sapien
gctcactgttccagcatttcaccat

SEQ ID NO: 3154020 - DNA, 25 bp, Homo sapien
ctttccacccacagatccaaacaca

SEQ ID NO: 3154021 - DNA, 25 bp, Homo sapien
tttccacccacagatccaaacacac

SEQ ID NO: 3154022 - DNA, 25 bp, Homo sapien
gtctcgtggagcaccgccatgaagc

SEQ ID NO: 3154023 - DNA, 25 bp, Homo sapien
ttcattcatcattgctactagggtc

SEQ ID NO: 3154024 - DNA, 25 bp, Homo sapien
ctggatcacacagtcttttgcctct

SEQ ID NO: 3154025 - DNA, 25 bp, Homo sapien
tgaagcccagccactggatcacaca

SEQ ID NO: 3154026 - DNA, 25 bp, Homo sapien
ggatggtcactcttcaggaagtcca

SEQ ID NO: 3154027 - DNA, 25 bp, Homo sapien
cctcgtttttgtaggtgacaccaat

SEQ ID NO: 3154028 - DNA, 25 bp, Homo sapien
cattgtctgagtccacacgcatgcg

SEQ ID NO: 3154029 - DNA, 25 bp, Homo sapien
cagaggaatgatgtagccactgtca

SEQ ID NO: 3154030 - DNA, 25 bp, Homo sapien
catgcaaagacagcggagaactggg

SEQ ID NO: 3154031 - DNA, 25 bp, Homo sapien
tgccaaagatctaacctgagtcagg

SEQ ID NO: 3154032 - DNA, 25 bp, Homo sapien
gacagtgcatacctcttgacagaag

SEQ ID NO: 3154033 - DNA, 25 bp, Homo sapien
caaaatgccgattgtgggaactcca

SEQ ID NO: 3154034 - DNA, 25 bp, Homo sapien
gatgaaggtggaactgctggaaccc

SEQ ID NO: 3154035 - DNA, 25 bp, Homo sapien
catgtcgatgtcttcaatggtctcg

SEQ ID NO: 3154036 - DNA, 25 bp, Homo sapien
aatggtctcgtcctctctcttgatg

SEQ ID NO: 3154037 - DNA, 25 bp, Homo sapien
gctggaacccgtctcaatggcactc

SEQ ID NO: 3154038 - DNA, 25 bp, Homo sapien
tactgaggcattgcaagaggcaaca

SEQ ID NO: 3154039 - DNA, 25 bp, Homo sapien
cattttgtacagattggcagaccac

SEQ ID NO: 3154040 - DNA, 25 bp, Homo sapien
tgtttccgaaaactggccgatcaga

SEQ ID NO: 3154041 - DNA, 25 bp, Homo sapien
tcatatttagaacgctccccgaggc

SEQ ID NO: 3154042 - DNA, 25 bp, Homo sapien
acattttgtattggtagaccctatc

SEQ ID NO: 3154043 - DNA, 25 bp, Homo sapien
caggggcattcgtaatacattttgt

SEQ ID NO: 3154044 - DNA, 25 bp, Homo sapien
tagtttttctcacacattcaccaca

SEQ ID NO: 3154045 - DNA, 25 bp, Homo sapien
caaaaacatgaacaggggcattcgt

SEQ ID NO: 3154046 - DNA, 25 bp, Homo sapien
ggaaggtcatgaccatctacagtaa

SEQ ID NO: 3154047 - DNA, 25 bp, Homo sapien
ggtcatgaccatctacagtaatgat

SEQ ID NO: 3154048 - DNA, 25 bp, Homo sapien
cagtaatgatcagctgcgctgcatt

SEQ ID NO: 3154049 - DNA, 25 bp, Homo sapien
taatgatcagctgcgctgcattttt

SEQ ID NO: 3154050 - DNA, 25 bp, Homo sapien
cctgagaagccttttcagccagcca

SEQ ID NO: 3154051 - DNA, 25 bp, Homo sapien
cagccagccagaagacagaacccat

SEQ ID NO: 3154052 - DNA, 25 bp, Homo sapien
tgaagaattggtactttcagagcct

SEQ ID NO: 3154053 - DNA, 25 bp, Homo sapien
tcatgcctgaagaattggtactttc

SEQ ID NO: 3154054 - DNA, 25 bp, Homo sapien
ccagcatgtcagtaaccaggtcttg

SEQ ID NO: 3154055 - DNA, 25 bp, Homo sapien
tagctggcttcgcacaccagaaagc

SEQ ID NO: 3154056 - DNA, 25 bp, Homo sapien
ccctaggaaacttgtccagcatgtc

SEQ ID NO: 3154057 - DNA, 25 bp, Homo sapien
taatttttatcgactattagctggc

SEQ ID NO: 3154058 - DNA, 25 bp, Homo sapien
gctaatgatgtgtgcatgtgccaga

SEQ ID NO: 3154059 - DNA, 25 bp, Homo sapien
gacttgcacaaacgttgggctgcca

SEQ ID NO: 3154060 - DNA, 25 bp, Homo sapien
gccgggatccttgagttacaacaga

SEQ ID NO: 3154061 - DNA, 25 bp, Homo sapien
ggctgccaaccactctgtgcctgtt

SEQ ID NO: 3154062 - DNA, 25 bp, Homo sapien
tgctttgctcacgagttcattcatt

SEQ ID NO: 3154063 - DNA, 25 bp, Homo sapien
tttgctttgctcacgagttcattca

SEQ ID NO: 3154064 - DNA, 25 bp, Homo sapien
gtttgctttgctcacgagttcattc

SEQ ID NO: 3154065 - DNA, 25 bp, Homo sapien
ctttgctcacgagttcattcatttt

SEQ ID NO: 3154066 - DNA, 25 bp, Homo sapien
gagacacagccgaaggagctaagtg

SEQ ID NO: 3154067 - DNA, 25 bp, Homo sapien
caaaattatccagattgtctgtcag

SEQ ID NO: 3154068 - DNA, 25 bp, Homo sapien
gccaagattggagccatgaacagga

SEQ ID NO: 3154069 - DNA, 25 bp, Homo sapien
tctggggaattcactgcatgaaatg

SEQ ID NO: 3154070 - DNA, 25 bp, Homo sapien
aggattccatgacacgtccccattc

SEQ ID NO: 3154071 - DNA, 25 bp, Homo sapien
tatgaactgggagcactctccagcc

SEQ ID NO: 3154072 - DNA, 25 bp, Homo sapien
gaccaggattccatgacacgtcccc

SEQ ID NO: 3154073 - DNA, 25 bp, Homo sapien
gtagtccccgcagggtatgaactgg

SEQ ID NO: 3154074 - DNA, 25 bp, Homo sapien
tttcataatggcagatgtggaggag

SEQ ID NO: 3154075 - DNA, 25 bp, Homo sapien
tcataatggcagatgtggaggaggg

SEQ ID NO: 3154076 - DNA, 25 bp, Homo sapien
ctttcataatggcagatgtggagga

SEQ ID NO: 3154077 - DNA, 25 bp, Homo sapien
ttcataatggcagatgtggaggagg

SEQ ID NO: 3154078 - DNA, 25 bp, Homo sapien
aaccacagacaccatcgaaggagca

SEQ ID NO: 3154079 - DNA, 25 bp, Homo sapien
ctaagacctggcaccctggtccaga

SEQ ID NO: 3154080 - DNA, 25 bp, Homo sapien
gaaggagcacatgatctgcatcggc

SEQ ID NO: 3154081 - DNA, 25 bp, Homo sapien
gcatcggctttcagtttctgcactg

SEQ ID NO: 3154082 - DNA, 25 bp, Homo sapien
tgtattttcgagagcaggaactgtg

SEQ ID NO: 3154083 - DNA, 25 bp, Homo sapien
tgtctcaagttctgaatttattccc

SEQ ID NO: 3154084 - DNA, 25 bp, Homo sapien
aagcaagaagcaggccaattgtctc

SEQ ID NO: 3154085 - DNA, 25 bp, Homo sapien
ggaaaacacagttgtattttcgaga

SEQ ID NO: 3154086 - DNA, 25 bp, Homo sapien
tatacaatgtggcagggtcaaccaa

SEQ ID NO: 3154087 - DNA, 25 bp, Homo sapien
catgaagcagagtggagtatacccg

SEQ ID NO: 3154088 - DNA, 25 bp, Homo sapien
tatacccgtgctgggatcgtccaaa

SEQ ID NO: 3154089 - DNA, 25 bp, Homo sapien
taggcagggagcaaaagactaccat

SEQ ID NO: 3154090 - DNA, 25 bp, Homo sapien
gcagggtccttccttagataagtct

SEQ ID NO: 3154091 - DNA, 25 bp, Homo sapien
tgaactttttaagcaaggtcaggaa

SEQ ID NO: 3154092 - DNA, 25 bp, Homo sapien
tgcagaatgaagcttcctcccataa

SEQ ID NO: 3154093 - DNA, 25 bp, Homo sapien
caaattccccttgtatgcactccta

SEQ ID NO: 3154094 - DNA, 25 bp, Homo sapien
tcaggccccatggtgttatcatttc

SEQ ID NO: 3154095 - DNA, 25 bp, Homo sapien
gaaatagcacgttctggcccatgtg

SEQ ID NO: 3154096 - DNA, 25 bp, Homo sapien
aaggaatattccataaggctgaggc

SEQ ID NO: 3154097 - DNA, 25 bp, Homo sapien
cttgtttgcatgaccctggaaacca

SEQ ID NO: 3154098 - DNA, 25 bp, Homo sapien
gatattgaagatttccctgagggct

SEQ ID NO: 3154099 - DNA, 25 bp, Homo sapien
ttctgtggctagcagaacatcttct

SEQ ID NO: 3154100 - DNA, 25 bp, Homo sapien
gagtttgataagtgagactttccca

SEQ ID NO: 3154101 - DNA, 25 bp, Homo sapien
ccatttccctgttctgtggctagca

SEQ ID NO: 3154102 - DNA, 25 bp, Homo sapien
caggtattccattgcttgtataaac

SEQ ID NO: 3154103 - DNA, 25 bp, Homo sapien
tagctgcaggtattccattgcttgt

SEQ ID NO: 3154104 - DNA, 25 bp, Homo sapien
cattcttaccagctatagctgcagg

SEQ ID NO: 3154105 - DNA, 25 bp, Homo sapien
taccagctatagctgcaggtattcc

SEQ ID NO: 3154106 - DNA, 25 bp, Homo sapien
atcatcaaacctgaaagaaagccag

SEQ ID NO: 3154107 - DNA, 25 bp, Homo sapien
tcagaaggacaaattggcttaaagc

SEQ ID NO: 3154108 - DNA, 25 bp, Homo sapien
ggcaaagatgatcagattaacttta

SEQ ID NO: 3154109 - DNA, 25 bp, Homo sapien
tacacaatatagtggtagtaataca

SEQ ID NO: 3154110 - DNA, 25 bp, Homo sapien
tcaatattgttaagttgagaacaac

SEQ ID NO: 3154111 - DNA, 25 bp, Homo sapien
tattgagcaaagctagctttatccc

SEQ ID NO: 3154112 - DNA, 25 bp, Homo sapien
gcaaagctagctttatcccaattta

SEQ ID NO: 3154113 - DNA, 25 bp, Homo sapien
gatgggccagctttattctaaatga

SEQ ID NO: 3154114 - DNA, 25 bp, Homo sapien
tgaaataggtcactattagaaaaga

SEQ ID NO: 3154115 - DNA, 25 bp, Homo sapien
ggagcgctggttgctcaaagttcca

SEQ ID NO: 3154116 - DNA, 25 bp, Homo sapien
cagctgtttttcctataagcggctc

SEQ ID NO: 3154117 - DNA, 25 bp, Homo sapien
catgctcattccgtgggcagaggag

SEQ ID NO: 3154118 - DNA, 25 bp, Homo sapien
aaaatcccagggcagtctacctgtc

SEQ ID NO: 3154119 - DNA, 25 bp, Homo sapien
ggtagtgtggtgtgccagtactcat

SEQ ID NO: 3154120 - DNA, 25 bp, Homo sapien
gccagtactcatagtgctcctcaaa

SEQ ID NO: 3154121 - DNA, 25 bp, Homo sapien
aaagtatttgtctgagtagtccacc

SEQ ID NO: 3154122 - DNA, 25 bp, Homo sapien
caaagtttgtttgggtagtgtggtg

SEQ ID NO: 3154123 - DNA, 25 bp, Homo sapien
tgctgagcactttgtgttccctcaa

SEQ ID NO: 3154124 - DNA, 25 bp, Homo sapien
tgagcactaatgagatcatatttgc

SEQ ID NO: 3154125 - DNA, 25 bp, Homo sapien
ccctcaataactggtgatacataaa

SEQ ID NO: 3154126 - DNA, 25 bp, Homo sapien
ttccctcagggctgtcgtgagcact

SEQ ID NO: 3154127 - DNA, 25 bp, Homo sapien
agggcttagccattctcctgtgttt

SEQ ID NO: 3154128 - DNA, 25 bp, Homo sapien
cctttttcagggcttagccattctc

SEQ ID NO: 3154129 - DNA, 25 bp, Homo sapien
gggtcactcctgatgaagtctcctt

SEQ ID NO: 3154130 - DNA, 25 bp, Homo sapien
ctgcctcaggtatctgccgagggtc

SEQ ID NO: 3154131 - DNA, 25 bp, Homo sapien
gctgtcttataaccttctacctcgt

SEQ ID NO: 3154132 - DNA, 25 bp, Homo sapien
cctcttccaccaaatgggctgtctt

SEQ ID NO: 3154133 - DNA, 25 bp, Homo sapien
cagatgagggtgcaactgccacagt

SEQ ID NO: 3154134 - DNA, 25 bp, Homo sapien
agaaacaccctcttccaccaaatgg

SEQ ID NO: 3154135 - DNA, 25 bp, Homo sapien
tatagcaagtgtacccgggcctcaa

SEQ ID NO: 3154136 - DNA, 25 bp, Homo sapien
tgctgaactctgtcttatttgctaa

SEQ ID NO: 3154137 - DNA, 25 bp, Homo sapien
gctgaactctgtcttatttgctaac

SEQ ID NO: 3154138 - DNA, 25 bp, Homo sapien
tttgctaacaagtccgtatagcaag

SEQ ID NO: 3154139 - DNA, 25 bp, Homo sapien
aatcaggcagactgcgaccgcctga

SEQ ID NO: 3154140 - DNA, 25 bp, Homo sapien
acaatcaggcagactgcgaccgcct

SEQ ID NO: 3154141 - DNA, 25 bp, Homo sapien
ggcagactgcgaccgcctgagctgt

SEQ ID NO: 3154142 - DNA, 25 bp, Homo sapien
aaaggggtcatgatgaagatctagg

SEQ ID NO: 3154143 - DNA, 25 bp, Homo sapien
cttgattccaggttctctaaggttg

SEQ ID NO: 3154144 - DNA, 25 bp, Homo sapien
caggttctctaaggttggaaatggt

SEQ ID NO: 3154145 - DNA, 25 bp, Homo sapien
agatttgatgtttgtctgcatcatt

SEQ ID NO: 3154146 - DNA, 25 bp, Homo sapien
tctctaaggttggaaatggtaggag

SEQ ID NO: 3154147 - DNA, 25 bp, Homo sapien
agtggtgcctgatgtgagagaatct

SEQ ID NO: 3154148 - DNA, 25 bp, Homo sapien
acagagaaagtgaatcaagatctcc

SEQ ID NO: 3154149 - DNA, 25 bp, Homo sapien
tgaagttaaaccatatgcacagaga

SEQ ID NO: 3154150 - DNA, 25 bp, Homo sapien
tgcctgatgtgagagaatcttttta

SEQ ID NO: 3154151 - DNA, 25 bp, Homo sapien
taaaacgttcatgcaaggtactgtc

SEQ ID NO: 3154152 - DNA, 25 bp, Homo sapien
caactagaagtttagctgaacctgc

SEQ ID NO: 3154153 - DNA, 25 bp, Homo sapien
tgaacctgctgccagactagtgctg

SEQ ID NO: 3154154 - DNA, 25 bp, Homo sapien
caccagcctgaagtaaaacgttcat

SEQ ID NO: 3154155 - DNA, 25 bp, Homo sapien
ctgcagcccttttgggaaggttctc

SEQ ID NO: 3154156 - DNA, 25 bp, Homo sapien
tcaactgcagcccttttgggaaggt

SEQ ID NO: 3154157 - DNA, 25 bp, Homo sapien
tggaatagtcatcaactgcagccct

SEQ ID NO: 3154158 - DNA, 25 bp, Homo sapien
tagtcatcaactgcagcccttttgg

SEQ ID NO: 3154159 - DNA, 25 bp, Homo sapien
ccaagtgcccacagttctgatgaat

SEQ ID NO: 3154160 - DNA, 25 bp, Homo sapien
cctccagcgttttgatccaagtgcc

SEQ ID NO: 3154161 - DNA, 25 bp, Homo sapien
tccaagtgcccacagttctgatgaa

SEQ ID NO: 3154162 - DNA, 25 bp, Homo sapien
cagcgttttgatccaagtgcccaca

SEQ ID NO: 3154163 - DNA, 25 bp, Homo sapien
agagcaattcctgtcaccactgggg

SEQ ID NO: 3154164 - DNA, 25 bp, Homo sapien
tcagtagctgggagcggagagcaat

SEQ ID NO: 3154165 - DNA, 25 bp, Homo sapien
ttacattcaatctctaaaggccctg

SEQ ID NO: 3154166 - DNA, 25 bp, Homo sapien
ggtctgagctcagcaacaatttttg

SEQ ID NO: 3154167 - DNA, 25 bp, Homo sapien
gacaggggacatttgtaaccctgga

SEQ ID NO: 3154168 - DNA, 25 bp, Homo sapien
acaagccccagtgcgtcctcatctt

SEQ ID NO: 3154169 - DNA, 25 bp, Homo sapien
ttaaaccacgctgccattctgggac

SEQ ID NO: 3154170 - DNA, 25 bp, Homo sapien
gaacaggaggatcccatgttcaggc

SEQ ID NO: 3154171 - DNA, 25 bp, Homo sapien
aggcttgagccaacttcccagagga

SEQ ID NO: 3154172 - DNA, 25 bp, Homo sapien
ggccacatgcaaggttccgaaggct

SEQ ID NO: 3154173 - DNA, 25 bp, Homo sapien
tccttcccaaggacgagtcacttgg

SEQ ID NO: 3154174 - DNA, 25 bp, Homo sapien
cccaaggacgagtcacttggcaggg

SEQ ID NO: 3154175 - DNA, 25 bp, Homo sapien
gggctgtccctgtgtttacagccca

SEQ ID NO: 3154176 - DNA, 25 bp, Homo sapien
ggctgtccctgtgtttacagcccat

SEQ ID NO: 3154177 - DNA, 25 bp, Homo sapien
tgggctgtccctgtgtttacagccc

SEQ ID NO: 3154178 - DNA, 25 bp, Homo sapien
ctgggctgtccctgtgtttacagcc

SEQ ID NO: 3154179 - DNA, 25 bp, Homo sapien
tttgctgcctatcactgtactccca

SEQ ID NO: 3154180 - DNA, 25 bp, Homo sapien
cctctccaagatcagggctaagctc

SEQ ID NO: 3154181 - DNA, 25 bp, Homo sapien
gcttgttttgctgcctatcactgta

SEQ ID NO: 3154182 - DNA, 25 bp, Homo sapien
aagctctctgagaaatctacagcaa

SEQ ID NO: 3154183 - DNA, 25 bp, Homo sapien
agacaataaaggtcgactgcccgcc

SEQ ID NO: 3154184 - DNA, 25 bp, Homo sapien
ctcgagcacgttcgggcgggaggag

SEQ ID NO: 3154185 - DNA, 25 bp, Homo sapien
acgccgctgctcgtggaggtggcat

SEQ ID NO: 3154186 - DNA, 25 bp, Homo sapien
ggaggaggctggacgccgctgctcg

SEQ ID NO: 3154187 - DNA, 25 bp, Homo sapien
tagctgcgatgggatccgagctctg

SEQ ID NO: 3154188 - DNA, 25 bp, Homo sapien
gatgggatccgagctctggtccacg

SEQ ID NO: 3154189 - DNA, 25 bp, Homo sapien
agctctcgcccaagtgcagcgagcg

SEQ ID NO: 3154190 - DNA, 25 bp, Homo sapien
ccagagccgcgagcggcgagcagca

SEQ ID NO: 3154191 - DNA, 25 bp, Homo sapien
gcagtaggagcagaacgcagagaaa

SEQ ID NO: 3154192 - DNA, 25 bp, Homo sapien
gagaaaatcccaggcgccgcgagcg

SEQ ID NO: 3154193 - DNA, 25 bp, Homo sapien
aggagcagaacgcagagaaaatccc

SEQ ID NO: 3154194 - DNA, 25 bp, Homo sapien
agcagaacgcagagaaaatcccagg

SEQ ID NO: 3154195 - DNA, 25 bp, Homo sapien
gagtctccccggaggctggaacgca

SEQ ID NO: 3154196 - DNA, 25 bp, Homo sapien
ggaacgcacgggcactgagggcccg

SEQ ID NO: 3154197 - DNA, 25 bp, Homo sapien
tctccggatgcaccctggcgggtac

SEQ ID NO: 3154198 - DNA, 25 bp, Homo sapien
acaggcttcgccgagtagtcgcacg

SEQ ID NO: 3154199 - DNA, 25 bp, Homo sapien
tgctgtccccattcccgaagaaccc

SEQ ID NO: 3154200 - DNA, 25 bp, Homo sapien
tagtcgacagtctcaaaaccgttca

SEQ ID NO: 3154201 - DNA, 25 bp, Homo sapien
agtcgacagtctcaaaaccgttcat

SEQ ID NO: 3154202 - DNA, 25 bp, Homo sapien
gtagtcgacagtctcaaaaccgttc

SEQ ID NO: 3154203 - DNA, 25 bp, Homo sapien
cggtagtcgacagtctcaaaaccgt

SEQ ID NO: 3154204 - DNA, 25 bp, Homo sapien
tgagaattccgctagagacaccgag

SEQ ID NO: 3154205 - DNA, 25 bp, Homo sapien
ttccgctagagacaccgaggttcat

SEQ ID NO: 3154206 - DNA, 25 bp, Homo sapien
gagacaccgaggttcatttcctcgt

SEQ ID NO: 3154207 - DNA, 25 bp, Homo sapien
caggccagctctgagaattccgcta

SEQ ID NO: 3154208 - DNA, 25 bp, Homo sapien
tctgaagaaaaagctgccacagcct

SEQ ID NO: 3154209 - DNA, 25 bp, Homo sapien
cagcaaatatcctccctggacagtc

SEQ ID NO: 3154210 - DNA, 25 bp, Homo sapien
ccatttgtagtgagtgaaaaacagc

SEQ ID NO: 3154211 - DNA, 25 bp, Homo sapien
taatccagtgagatcctctgagctg

SEQ ID NO: 3154212 - DNA, 25 bp, Homo sapien
gtgcactacatctgagagcccggag

SEQ ID NO: 3154213 - DNA, 25 bp, Homo sapien
tagaaatcggcctagcactgggtcc

SEQ ID NO: 3154214 - DNA, 25 bp, Homo sapien
caggatctgtatcttggaactcaaa

SEQ ID NO: 3154215 - DNA, 25 bp, Homo sapien
ctttggcagccagtcgggcacagat

SEQ ID NO: 3154216 - DNA, 25 bp, Homo sapien
gcctggcttttacacctagaaatcg

SEQ ID NO: 3154217 - DNA, 25 bp, Homo sapien
aataaaaaacactggcttcaaccag

SEQ ID NO: 3154218 - DNA, 25 bp, Homo sapien
tctagaataggaataaaaaacactg

SEQ ID NO: 3154219 - DNA, 25 bp, Homo sapien
aaaaacactggcttcaaccaggcca

SEQ ID NO: 3154220 - DNA, 25 bp, Homo sapien
cttcaaccaggccaaagtaaattga

SEQ ID NO: 3154221 - DNA, 25 bp, Homo sapien
ctacagctccggataacaagcagag

SEQ ID NO: 3154222 - DNA, 25 bp, Homo sapien
gctccggataacaagcagaggcaaa

SEQ ID NO: 3154223 - DNA, 25 bp, Homo sapien
tggtagaaacattcagggagcccct

SEQ ID NO: 3154224 - DNA, 25 bp, Homo sapien
tctggagttggtagaaacattcagg

SEQ ID NO: 3154225 - DNA, 25 bp, Homo sapien
catctgtgaagtttggggtcggggt

SEQ ID NO: 3154226 - DNA, 25 bp, Homo sapien
gtcggggtagcgagctcgtcccttc

SEQ ID NO: 3154227 - DNA, 25 bp, Homo sapien
tcggggtagcgagctcgtcccttct

SEQ ID NO: 3154228 - DNA, 25 bp, Homo sapien
tggggtcggggtagcgagctcgtcc

SEQ ID NO: 3154229 - DNA, 25 bp, Homo sapien
ccatccccgctgccgtaaatatgta

SEQ ID NO: 3154230 - DNA, 25 bp, Homo sapien
ttccagtgggttcttcccaacagcc

SEQ ID NO: 3154231 - DNA, 25 bp, Homo sapien
ccccgctgccgtaaatatgtagatt

SEQ ID NO: 3154232 - DNA, 25 bp, Homo sapien
accccatccccgctgccgtaaatat

SEQ ID NO: 3154233 - DNA, 25 bp, Homo sapien
ctcaagcttccagtgagtgtgtttt

SEQ ID NO: 3154234 - DNA, 25 bp, Homo sapien
gacccagcagcaacgactcaagctt

SEQ ID NO: 3154235 - DNA, 25 bp, Homo sapien
cagcagcaacgactcaagcttccag

SEQ ID NO: 3154236 - DNA, 25 bp, Homo sapien
gcaacgactcaagcttccagtgagt

SEQ ID NO: 3154237 - DNA, 25 bp, Homo sapien
gagtatgatcttcttccttggcgaa

SEQ ID NO: 3154238 - DNA, 25 bp, Homo sapien
gaaaaacagaatcgtgttgagtatg

SEQ ID NO: 3154239 - DNA, 25 bp, Homo sapien
cagaatcgtgttgagtatgatcttc

SEQ ID NO: 3154240 - DNA, 25 bp, Homo sapien
cttccttggcgaaataaagcacttc

SEQ ID NO: 3154241 - DNA, 25 bp, Homo sapien
tggtggagacggttcccctggactc

SEQ ID NO: 3154242 - DNA, 25 bp, Homo sapien
gcttaagccgtgtttgttggtgcac

SEQ ID NO: 3154243 - DNA, 25 bp, Homo sapien
cccggatcagtgcataacagcctaa

SEQ ID NO: 3154244 - DNA, 25 bp, Homo sapien
gtcgcccacgcggactattaagtct

SEQ ID NO: 3154245 - DNA, 25 bp, Homo sapien
ttaagagcaggatattaaattcttg

SEQ ID NO: 3154246 - DNA, 25 bp, Homo sapien
aatattttatctatggctcagtcat

SEQ ID NO: 3154247 - DNA, 25 bp, Homo sapien
tatctatggctcagtcatccatatg

SEQ ID NO: 3154248 - DNA, 25 bp, Homo sapien
tcagtcatccatatgtcatccaaaa

SEQ ID NO: 3154249 - DNA, 25 bp, Homo sapien
cagctacctacttcggaaaggacaa

SEQ ID NO: 3154250 - DNA, 25 bp, Homo sapien
tttgcagctacctacttcggaaagg

SEQ ID NO: 3154251 - DNA, 25 bp, Homo sapien
tatatctctttgcagctacctactt

SEQ ID NO: 3154252 - DNA, 25 bp, Homo sapien
ctctttgcagctacctacttcggaa

SEQ ID NO: 3154253 - DNA, 25 bp, Homo sapien
tagaagcatatccaaaatcagtagt

SEQ ID NO: 3154254 - DNA, 25 bp, Homo sapien
gcatatccaaaatcagtagttggaa

SEQ ID NO: 3154255 - DNA, 25 bp, Homo sapien
agcatatccaaaatcagtagttgga

SEQ ID NO: 3154256 - DNA, 25 bp, Homo sapien
ctatagaagcatatccaaaatcagt

SEQ ID NO: 3154257 - DNA, 25 bp, Homo sapien
ttttgatcatgatgcccgccttggg

SEQ ID NO: 3154258 - DNA, 25 bp, Homo sapien
cagagccgatggtaggcgcgtttca

SEQ ID NO: 3154259 - DNA, 25 bp, Homo sapien
tctttcccatacaaggagcggtcaa

SEQ ID NO: 3154260 - DNA, 25 bp, Homo sapien
cacagaacaatgcagacagagccga

SEQ ID NO: 3154261 - DNA, 25 bp, Homo sapien
agaagatagcttgctttggacacag

SEQ ID NO: 3154262 - DNA, 25 bp, Homo sapien
gacacaacaggcacagctttgaagg

SEQ ID NO: 3154263 - DNA, 25 bp, Homo sapien
cacgttgagtacacagaactagaca

SEQ ID NO: 3154264 - DNA, 25 bp, Homo sapien
acatcttttattgtgcacgtcactg

SEQ ID NO: 3154265 - DNA, 25 bp, Homo sapien
tgaaggcttatctaccagcaccagt

SEQ ID NO: 3154266 - DNA, 25 bp, Homo sapien
taacccttggaggtgcacactggga

SEQ ID NO: 3154267 - DNA, 25 bp, Homo sapien
gactcccttgcgcttaaacaatggc

SEQ ID NO: 3154268 - DNA, 25 bp, Homo sapien
ggatttccccaaagagctcctaaca

SEQ ID NO: 3154269 - DNA, 25 bp, Homo sapien
ggtaagtcaagagcatcactagtct

SEQ ID NO: 3154270 - DNA, 25 bp, Homo sapien
cacagcattgctatctatgacggtg

SEQ ID NO: 3154271 - DNA, 25 bp, Homo sapien
cacaaaagttgactgctgaagctga

SEQ ID NO: 3154272 - DNA, 25 bp, Homo sapien
gctttgctgttaactaatcgtgaga

SEQ ID NO: 3154273 - DNA, 25 bp, Homo sapien
tattatatttctcctgtagtttagt

SEQ ID NO: 3154274 - DNA, 25 bp, Homo sapien
ctattatatttctcctgtagtttag

SEQ ID NO: 3154275 - DNA, 25 bp, Homo sapien
tattggcataacacatgaacactcc

SEQ ID NO: 3154276 - DNA, 25 bp, Homo sapien
cgctgaactgatagtcaacgttgcc

SEQ ID NO: 3154277 - DNA, 25 bp, Homo sapien
tcataattgaagtcaccgtgatgcc

SEQ ID NO: 3154278 - DNA, 25 bp, Homo sapien
tactacttccaaggttgttgtgaca

SEQ ID NO: 3154279 - DNA, 25 bp, Homo sapien
atattactttcattctcagacttgg

SEQ ID NO: 3154280 - DNA, 25 bp, Homo sapien
tctccatcgtttacaaatactgtag

SEQ ID NO: 3154281 - DNA, 25 bp, Homo sapien
tctgttcatatagatccactgctgg

SEQ ID NO: 3154282 - DNA, 25 bp, Homo sapien
attctcagacttgggataatcttcc

SEQ ID NO: 3154283 - DNA, 25 bp, Homo sapien
tctttacttccagcgcagggttctc

SEQ ID NO: 3154284 - DNA, 25 bp, Homo sapien
gcccttgcgcaatccttggaagacg

SEQ ID NO: 3154285 - DNA, 25 bp, Homo sapien
caacttgccataggcggtgtgccaa

SEQ ID NO: 3154286 - DNA, 25 bp, Homo sapien
ttggaagacgttgaccgtgcagcca

SEQ ID NO: 3154287 - DNA, 25 bp, Homo sapien
cagcattgacgtcagaattggacac

SEQ ID NO: 3154288 - DNA, 25 bp, Homo sapien
atgtgtaagtgcctccttcggtgcc

SEQ ID NO: 3154289 - DNA, 25 bp, Homo sapien
gaattggacactaggaatgtgtaag

SEQ ID NO: 3154290 - DNA, 25 bp, Homo sapien
ttcggtgccttttaatctcgttaga

SEQ ID NO: 3154291 - DNA, 25 bp, Homo sapien
tgcaaggataccgatttacctacgg

SEQ ID NO: 3154292 - DNA, 25 bp, Homo sapien
tttgtccatgggtaatacactaagc

SEQ ID NO: 3154293 - DNA, 25 bp, Homo sapien
gaaaggttgagaagcatcacacaag

SEQ ID NO: 3154294 - DNA, 25 bp, Homo sapien
ccacaatgtattgggaatcttagaa

SEQ ID NO: 3154295 - DNA, 25 bp, Homo sapien
taattgctaacaacaggtaggatgt

SEQ ID NO: 3154296 - DNA, 25 bp, Homo sapien
gagttaatttggtgcacttcagcag

SEQ ID NO: 3154297 - DNA, 25 bp, Homo sapien
ggagcccttcagttctcaatgtctg

SEQ ID NO: 3154298 - DNA, 25 bp, Homo sapien
tctagctcaacattaaaggcatcct

SEQ ID NO: 3154299 - DNA, 25 bp, Homo sapien
accaatctattgtgggctctgggaa

SEQ ID NO: 3154300 - DNA, 25 bp, Homo sapien
cattcacgagcctgtcgtaagtcag

SEQ ID NO: 3154301 - DNA, 25 bp, Homo sapien
cctggacaaaaataccaatctattg

SEQ ID NO: 3154302 - DNA, 25 bp, Homo sapien
tgccacacattggagcatgccattc

SEQ ID NO: 3154303 - DNA, 25 bp, Homo sapien
gcaaaaagacttgggtgtgttctgt

SEQ ID NO: 3154304 - DNA, 25 bp, Homo sapien
gacagtcgtcttcttccagtgtagc

SEQ ID NO: 3154305 - DNA, 25 bp, Homo sapien
tggtacacacttgccactccctgtg

SEQ ID NO: 3154306 - DNA, 25 bp, Homo sapien
gaatgaatgcctgtaactacagggc

SEQ ID NO: 3154307 - DNA, 25 bp, Homo sapien
cactagctttccaaacggtggccca

SEQ ID NO: 3154308 - DNA, 25 bp, Homo sapien
cggtggcccagatgagtttagtgtc

SEQ ID NO: 3154309 - DNA, 25 bp, Homo sapien
gaagtcttgcccacatcgttgtaag

SEQ ID NO: 3154310 - DNA, 25 bp, Homo sapien
taagccttacattcaaccgtgccat

SEQ ID NO: 3154311 - DNA, 25 bp, Homo sapien
tacgattacgaaaccaatcagcaaa

SEQ ID NO: 3154312 - DNA, 25 bp, Homo sapien
ttgtaggtcagaatcatcacaataa

SEQ ID NO: 3154313 - DNA, 25 bp, Homo sapien
tcacaataatgcacatcatgccagc

SEQ ID NO: 3154314 - DNA, 25 bp, Homo sapien
tcatgccagctacgattacgaaacc

SEQ ID NO: 3154315 - DNA, 25 bp, Homo sapien
gggaaactcccatttgtgatcataa

SEQ ID NO: 3154316 - DNA, 25 bp, Homo sapien
tgtgatcataaggaagttgtgttgg

SEQ ID NO: 3154317 - DNA, 25 bp, Homo sapien
ggtctatgtaaacataattgtttcc

SEQ ID NO: 3154318 - DNA, 25 bp, Homo sapien
tccactgtacttcatacatgggttt

SEQ ID NO: 3154319 - DNA, 25 bp, Homo sapien
agcgacagtcatggccgcatctgac

SEQ ID NO: 3154320 - DNA, 25 bp, Homo sapien
cagtcatggccgcatctgacttaat

SEQ ID NO: 3154321 - DNA, 25 bp, Homo sapien
taagcagttgcctcaacaaccttcc

SEQ ID NO: 3154322 - DNA, 25 bp, Homo sapien
tctgacttaattaagccataagcag

SEQ ID NO: 3154323 - DNA, 25 bp, Homo sapien
ttaccaaggtaactcaggactttga

SEQ ID NO: 3154324 - DNA, 25 bp, Homo sapien
cagacatgagggcttcccgttctgt

SEQ ID NO: 3154325 - DNA, 25 bp, Homo sapien
actcaggactttgagttcagacatg

SEQ ID NO: 3154326 - DNA, 25 bp, Homo sapien
caatattcatgtgattaccaaggta

SEQ ID NO: 3154327 - DNA, 25 bp, Homo sapien
caggaagactcctttgaatgcagaa

SEQ ID NO: 3154328 - DNA, 25 bp, Homo sapien
gattcttataaagtgcagcttctgc

SEQ ID NO: 3154329 - DNA, 25 bp, Homo sapien
cagaagattcttataaagtgcagct

SEQ ID NO: 3154330 - DNA, 25 bp, Homo sapien
atgcagaagattcttataaagtgca

SEQ ID NO: 3154331 - DNA, 25 bp, Homo sapien
cagatctccttttgtcggccttggt

SEQ ID NO: 3154332 - DNA, 25 bp, Homo sapien
atctccttttgtcggccttggttgg

SEQ ID NO: 3154333 - DNA, 25 bp, Homo sapien
gccttggttgggacaacataagaaa

SEQ ID NO: 3154334 - DNA, 25 bp, Homo sapien
ttggttgggacaacataagaaactc

SEQ ID NO: 3154335 - DNA, 25 bp, Homo sapien
catgatggcgggagtcacatctctt

SEQ ID NO: 3154336 - DNA, 25 bp, Homo sapien
taagtctagggccaactcgtcatcc

SEQ ID NO: 3154337 - DNA, 25 bp, Homo sapien
tccatgatggcgggagtcacatctc

SEQ ID NO: 3154338 - DNA, 25 bp, Homo sapien
agtctagggccaactcgtcatcctc

SEQ ID NO: 3154339 - DNA, 25 bp, Homo sapien
caaatctttgtgatccgaccatgag

SEQ ID NO: 3154340 - DNA, 25 bp, Homo sapien
tgatgtctctggctagaccaaaatc

SEQ ID NO: 3154341 - DNA, 25 bp, Homo sapien
tgtgatccgaccatgagtaaggagg

SEQ ID NO: 3154342 - DNA, 25 bp, Homo sapien
aaccacataattagaatcattcttg

SEQ ID NO: 3154343 - DNA, 25 bp, Homo sapien
ccaaagaaaaatcccataggaccag

SEQ ID NO: 3154344 - DNA, 25 bp, Homo sapien
acgtcactttcaaacgtgtatacac

SEQ ID NO: 3154345 - DNA, 25 bp, Homo sapien
aagaaaaatcccataggaccagacg

SEQ ID NO: 3154346 - DNA, 25 bp, Homo sapien
ggaccagacgtcactttcaaacgtg

SEQ ID NO: 3154347 - DNA, 25 bp, Homo sapien
atttcagcaggtgcgtgttcagggc

SEQ ID NO: 3154348 - DNA, 25 bp, Homo sapien
catcttgtagaacttagaatcgacc

SEQ ID NO: 3154349 - DNA, 25 bp, Homo sapien
aatcgaccggcattccaggataggg

SEQ ID NO: 3154350 - DNA, 25 bp, Homo sapien
gctgagcatccggaagccttccttg

SEQ ID NO: 3154351 - DNA, 25 bp, Homo sapien
tctgaaatctgcttctcaattagct

SEQ ID NO: 3154352 - DNA, 25 bp, Homo sapien
gctgaacaatttgcttgaatgttgg

SEQ ID NO: 3154353 - DNA, 25 bp, Homo sapien
gaacaatttgcttgaatgttggtct

SEQ ID NO: 3154354 - DNA, 25 bp, Homo sapien
tgaacaatttgcttgaatgttggtc

SEQ ID NO: 3154355 - DNA, 25 bp, Homo sapien
aggaagcggtgctgccgacagaatt

SEQ ID NO: 3154356 - DNA, 25 bp, Homo sapien
gacagaattgatccgcacagaatgg

SEQ ID NO: 3154357 - DNA, 25 bp, Homo sapien
cacagaatggtctaccacgggcttc

SEQ ID NO: 3154358 - DNA, 25 bp, Homo sapien
tcagacatcgtcgtgcacaagcaga

SEQ ID NO: 3154359 - DNA, 25 bp, Homo sapien
catatatagatactggcccggtgtc

SEQ ID NO: 3154360 - DNA, 25 bp, Homo sapien
gaagtgcccctgaagtacctagaca

SEQ ID NO: 3154361 - DNA, 25 bp, Homo sapien
tatacaagtgctggctagggaggcc

SEQ ID NO: 3154362 - DNA, 25 bp, Homo sapien
taaaggaccctcttggactcagggc

SEQ ID NO: 3154363 - DNA, 25 bp, Homo sapien
tcaaacattaagccactgcaaagaa

SEQ ID NO: 3154364 - DNA, 25 bp, Homo sapien
ttcaaacattaagccactgcaaaga

SEQ ID NO: 3154365 - DNA, 25 bp, Homo sapien
tgtcaacaattggacaacatacagg

SEQ ID NO: 3154366 - DNA, 25 bp, Homo sapien
caacatcctttaaacttacgccgct

SEQ ID NO: 3154367 - DNA, 25 bp, Homo sapien
aatattttcaaggactcatgggctt

SEQ ID NO: 3154368 - DNA, 25 bp, Homo sapien
caggaataaaacacgtggaacacca

SEQ ID NO: 3154369 - DNA, 25 bp, Homo sapien
gtggagacgatcgtttccctcctgc

SEQ ID NO: 3154370 - DNA, 25 bp, Homo sapien
cgggcataggaaatggtgtttttct

SEQ ID NO: 3154371 - DNA, 25 bp, Homo sapien
gaagtgaagtggagacgatcgtttc

SEQ ID NO: 3154372 - DNA, 25 bp, Homo sapien
ttttctgtattacgttgtctagctc

SEQ ID NO: 3154373 - DNA, 25 bp, Homo sapien
taagatgccctggagggttgcagcc

SEQ ID NO: 3154374 - DNA, 25 bp, Homo sapien
caatttggcagaggcaggtaaaaaa

SEQ ID NO: 3154375 - DNA, 25 bp, Homo sapien
tccatttccaacaggcgagggcatc

SEQ ID NO: 3154376 - DNA, 25 bp, Homo sapien
aatttcaacacagcggttgccttgg

SEQ ID NO: 3154377 - DNA, 25 bp, Homo sapien
gtttctcaaatgcaaagaatccttc

SEQ ID NO: 3154378 - DNA, 25 bp, Homo sapien
ccagtggtcgtctatgtgtagtgac

SEQ ID NO: 3154379 - DNA, 25 bp, Homo sapien
tgcaaagaatccttccagtggtcgt

SEQ ID NO: 3154380 - DNA, 25 bp, Homo sapien
ctatgtgtagtgacgtgggcagccc

SEQ ID NO: 3154381 - DNA, 25 bp, Homo sapien
gaacaaagcaaccaggacccttgtg

SEQ ID NO: 3154382 - DNA, 25 bp, Homo sapien
tgtagcgtctgtttgacatctgcag

SEQ ID NO: 3154383 - DNA, 25 bp, Homo sapien
caaggtggagtgttcaagtgcatgc

SEQ ID NO: 3154384 - DNA, 25 bp, Homo sapien
catctgcagacatggttaggcctct

SEQ ID NO: 3154385 - DNA, 25 bp, Homo sapien
gatccccatgatggacacaggccat

SEQ ID NO: 3154386 - DNA, 25 bp, Homo sapien
gctgtggtgatgaaagtgacaggga

SEQ ID NO: 3154387 - DNA, 25 bp, Homo sapien
agggcaatgatccccatgatggaca

SEQ ID NO: 3154388 - DNA, 25 bp, Homo sapien
caaagagacttgtgctccaggaagt

SEQ ID NO: 3154389 - DNA, 25 bp, Homo sapien
gaaggagtcgtaccagctccttctt

SEQ ID NO: 3154390 - DNA, 25 bp, Homo sapien
gactattttcattggtgggctatta

SEQ ID NO: 3154391 - DNA, 25 bp, Homo sapien
ggagtcgtaccagctccttcttgta

SEQ ID NO: 3154392 - DNA, 25 bp, Homo sapien
ggtcctggactattttcattggtgg

SEQ ID NO: 3154393 - DNA, 25 bp, Homo sapien
ttcctgagagagctgcggaaaaacc

SEQ ID NO: 3154394 - DNA, 25 bp, Homo sapien
tgaatatgccactttctcccactgt

SEQ ID NO: 3154395 - DNA, 25 bp, Homo sapien
gaaaatgaatatgccactttctccc

SEQ ID NO: 3154396 - DNA, 25 bp, Homo sapien
gagagctgcggaaaaacctgacacc

SEQ ID NO: 3154397 - DNA, 25 bp, Homo sapien
tctgtttacaaatcgaccaactgcc

SEQ ID NO: 3154398 - DNA, 25 bp, Homo sapien
gaacatcattcgacaaagccaacgg

SEQ ID NO: 3154399 - DNA, 25 bp, Homo sapien
gccctcttccttgggtctagggctg

SEQ ID NO: 3154400 - DNA, 25 bp, Homo sapien
taaagacaacgtgcagcttttgaac

SEQ ID NO: 3154401 - DNA, 25 bp, Homo sapien
ctcacaacttttccaccatctgtct

SEQ ID NO: 3154402 - DNA, 25 bp, Homo sapien
ggtgctgttcatgcccctaagtagt

SEQ ID NO: 3154403 - DNA, 25 bp, Homo sapien
tggtggccctctgaaagtaatgctg

SEQ ID NO: 3154404 - DNA, 25 bp, Homo sapien
caaggtgactgctgtaccatgaggc

SEQ ID NO: 3154405 - DNA, 25 bp, Homo sapien
taatctgctattcggtaaagggcta

SEQ ID NO: 3154406 - DNA, 25 bp, Homo sapien
tgaggaaatctccacggacttgctg

SEQ ID NO: 3154407 - DNA, 25 bp, Homo sapien
gtgaggaaatctccacggacttgct

SEQ ID NO: 3154408 - DNA, 25 bp, Homo sapien
agtgaggaaatctccacggacttgc

SEQ ID NO: 3154409 - DNA, 25 bp, Homo sapien
ggatgacatctcagagaacccaaac

SEQ ID NO: 3154410 - DNA, 25 bp, Homo sapien
ttgaaattatctctgtgggatgaca

SEQ ID NO: 3154411 - DNA, 25 bp, Homo sapien
ttatctctgtgggatgacatctcag

SEQ ID NO: 3154412 - DNA, 25 bp, Homo sapien
caatccaggattgaaattatctctg

SEQ ID NO: 3154413 - DNA, 25 bp, Homo sapien
agaattgaatccaatttccatgaca

SEQ ID NO: 3154414 - DNA, 25 bp, Homo sapien
ttgttcccaagaacttggtacattc

SEQ ID NO: 3154415 - DNA, 25 bp, Homo sapien
aaacagaattgaatccaatttccat

SEQ ID NO: 3154416 - DNA, 25 bp, Homo sapien
cagaattgaatccaatttccatgac

SEQ ID NO: 3154417 - DNA, 25 bp, Homo sapien
gctccctctggagtgcattatccga

SEQ ID NO: 3154418 - DNA, 25 bp, Homo sapien
tctggagtgcattatccgattttgc

SEQ ID NO: 3154419 - DNA, 25 bp, Homo sapien
ttagagacccattaggcacacagcc

SEQ ID NO: 3154420 - DNA, 25 bp, Homo sapien
ttttgcttttagagacccattaggc

SEQ ID NO: 3154421 - DNA, 25 bp, Homo sapien
tagaaaagtaatcccccatgtcagc

SEQ ID NO: 3154422 - DNA, 25 bp, Homo sapien
tgataccgcagagatgtacatcctc

SEQ ID NO: 3154423 - DNA, 25 bp, Homo sapien
aagtaatcccccatgtcagctgctg

SEQ ID NO: 3154424 - DNA, 25 bp, Homo sapien
ctgggtgtgataccgcagagatgta

SEQ ID NO: 3154425 - DNA, 25 bp, Homo sapien
caaacgtttgttcaccaaccagcat

SEQ ID NO: 3154426 - DNA, 25 bp, Homo sapien
taacacacttggcataatagtagcc

SEQ ID NO: 3154427 - DNA, 25 bp, Homo sapien
tactccatggttcatggtaacacac

SEQ ID NO: 3154428 - DNA, 25 bp, Homo sapien
tccccaatacctgaggacaggaaag

SEQ ID NO: 3154429 - DNA, 25 bp, Homo sapien
ggttcatctctaggccccagttgaa

SEQ ID NO: 3154430 - DNA, 25 bp, Homo sapien
aggttcatctctaggccccagttga

SEQ ID NO: 3154431 - DNA, 25 bp, Homo sapien
gacaacagagacaacacgaactgga

SEQ ID NO: 3154432 - DNA, 25 bp, Homo sapien
agctagcccaagaggaagaggccct

SEQ ID NO: 3154433 - DNA, 25 bp, Homo sapien
ctggctcccacaagtgaaagtgatt

SEQ ID NO: 3154434 - DNA, 25 bp, Homo sapien
ttcaaagtctccacggacaacagag

SEQ ID NO: 3154435 - DNA, 25 bp, Homo sapien
tccataaaacgttctattaagcata

SEQ ID NO: 3154436 - DNA, 25 bp, Homo sapien
aatgtctctcggctcaactgtcagt

SEQ ID NO: 3154437 - DNA, 25 bp, Homo sapien
taaaacgttctattaagcataattc

SEQ ID NO: 3154438 - DNA, 25 bp, Homo sapien
ggcatccaaaatgtctctcggctca

SEQ ID NO: 3154439 - DNA, 25 bp, Homo sapien
aggagcgcgggatgctggcctttac

SEQ ID NO: 3154440 - DNA, 25 bp, Homo sapien
gagcgcgggatgctggcctttacac

SEQ ID NO: 3154441 - DNA, 25 bp, Homo sapien
cgcgggatgctggcctttacactgc

SEQ ID NO: 3154442 - DNA, 25 bp, Homo sapien
gcgcgggatgctggcctttacactg

SEQ ID NO: 3154443 - DNA, 25 bp, Homo sapien
ctgcagctcataccttctgggtggc

SEQ ID NO: 3154444 - DNA, 25 bp, Homo sapien
aggaaaagttggagaggcggctgac

SEQ ID NO: 3154445 - DNA, 25 bp, Homo sapien
aaaagttggagaggcggctgacctt

SEQ ID NO: 3154446 - DNA, 25 bp, Homo sapien
tgcagctcataccttctgggtggct

SEQ ID NO: 3154447 - DNA, 25 bp, Homo sapien
ctgtcaaatcataggcagctgcctt

SEQ ID NO: 3154448 - DNA, 25 bp, Homo sapien
catgaaagtggactgccttttccaa

SEQ ID NO: 3154449 - DNA, 25 bp, Homo sapien
atatcttgagggaagatatcctgtc

SEQ ID NO: 3154450 - DNA, 25 bp, Homo sapien
taatggaggaaatttaggcaatagg

SEQ ID NO: 3154451 - DNA, 25 bp, Homo sapien
gtccatagtgataatagcttttggg

SEQ ID NO: 3154452 - DNA, 25 bp, Homo sapien
tgaaatggtttgtttggtggaacaa

SEQ ID NO: 3154453 - DNA, 25 bp, Homo sapien
ttaaattggccataagagggctcca

SEQ ID NO: 3154454 - DNA, 25 bp, Homo sapien
gtgaaatgctattctggacacagta

SEQ ID NO: 3154455 - DNA, 25 bp, Homo sapien
tgttcttcttctgtaccaacatccc

SEQ ID NO: 3154456 - DNA, 25 bp, Homo sapien
ttcttcttctgtaccaacatcccca

SEQ ID NO: 3154457 - DNA, 25 bp, Homo sapien
ctctgtctggtaaatttgaggcaga

SEQ ID NO: 3154458 - DNA, 25 bp, Homo sapien
tcttcttctgtaccaacatccccaa

SEQ ID NO: 3154459 - DNA, 25 bp, Homo sapien
tctgctgtatggcagtagccccatc

SEQ ID NO: 3154460 - DNA, 25 bp, Homo sapien
ttttctgctgtatggcagtagcccc

SEQ ID NO: 3154461 - DNA, 25 bp, Homo sapien
ccgttttttaagactatgcatagac

SEQ ID NO: 3154462 - DNA, 25 bp, Homo sapien
tttctgctgtatggcagtagcccca

SEQ ID NO: 3154463 - DNA, 25 bp, Homo sapien
aaattgcgaacttctccaaggagac

SEQ ID NO: 3154464 - DNA, 25 bp, Homo sapien
tgtaacaaggcccagctttggtgat

SEQ ID NO: 3154465 - DNA, 25 bp, Homo sapien
gggacacttgaatacggttctctaa

SEQ ID NO: 3154466 - DNA, 25 bp, Homo sapien
tcggtatccagaggctattgctgcc

SEQ ID NO: 3154467 - DNA, 25 bp, Homo sapien
gtaccttatcgccatgcctcagaaa

SEQ ID NO: 3154468 - DNA, 25 bp, Homo sapien
gggtgtaccttatcgccatgcctca

SEQ ID NO: 3154469 - DNA, 25 bp, Homo sapien
gagataacacaaaattaggacagtt

SEQ ID NO: 3154470 - DNA, 25 bp, Homo sapien
agtctgcgccgggtgtaccttatcg

SEQ ID NO: 3154471 - DNA, 25 bp, Homo sapien
tgaaagaccttgttgtgggaacgat

SEQ ID NO: 3154472 - DNA, 25 bp, Homo sapien
gggaacgattaaacagagcagcatg

SEQ ID NO: 3154473 - DNA, 25 bp, Homo sapien
ccttgttgtgggaacgattaaacag

SEQ ID NO: 3154474 - DNA, 25 bp, Homo sapien
gattaaacagagcagcatgttggag

SEQ ID NO: 3154475 - DNA, 25 bp, Homo sapien
gtctaatccctcatcttcaatcagc

SEQ ID NO: 3154476 - DNA, 25 bp, Homo sapien
cttgatccttcttggagtctaatcc

SEQ ID NO: 3154477 - DNA, 25 bp, Homo sapien
tcttggagtctaatccctcatcttc

SEQ ID NO: 3154478 - DNA, 25 bp, Homo sapien
ccccaggttatgcaccgtttcagct

SEQ ID NO: 3154479 - DNA, 25 bp, Homo sapien
gagaaaagggttgatgccaataggc

SEQ ID NO: 3154480 - DNA, 25 bp, Homo sapien
tatgaactctcatgaagtcagaagg

SEQ ID NO: 3154481 - DNA, 25 bp, Homo sapien
agaaggtggcaagccagcaaacatg

SEQ ID NO: 3154482 - DNA, 25 bp, Homo sapien
cctgagaactgtcccttggtatgaa

SEQ ID NO: 3154483 - DNA, 25 bp, Homo sapien
gctcaacatcttcttaggtgagtac

SEQ ID NO: 3154484 - DNA, 25 bp, Homo sapien
ttggctcaacatcttcttaggtgag

SEQ ID NO: 3154485 - DNA, 25 bp, Homo sapien
ggctcaacatcttcttaggtgagta

SEQ ID NO: 3154486 - DNA, 25 bp, Homo sapien
tcttggctcaacatcttcttaggtg

SEQ ID NO: 3154487 - DNA, 25 bp, Homo sapien
tgtgggcttgctaggaaaacgaacc

SEQ ID NO: 3154488 - DNA, 25 bp, Homo sapien
cagctttgtgggcttgctaggaaaa

SEQ ID NO: 3154489 - DNA, 25 bp, Homo sapien
tgggcttgctaggaaaacgaaccat

SEQ ID NO: 3154490 - DNA, 25 bp, Homo sapien
gtcttgagggtatttccaaagtgaa

SEQ ID NO: 3154491 - DNA, 25 bp, Homo sapien
cctaatcccacacaaacaagtctct

SEQ ID NO: 3154492 - DNA, 25 bp, Homo sapien
caaacaagtctcttggctgtccctc

SEQ ID NO: 3154493 - DNA, 25 bp, Homo sapien
ccacacaaacaagtctcttggctgt

SEQ ID NO: 3154494 - DNA, 25 bp, Homo sapien
ggctgtccctctcttcaatttttac

SEQ ID NO: 3154495 - DNA, 25 bp, Homo sapien
tctccacctgctttctttctctgtc

SEQ ID NO: 3154496 - DNA, 25 bp, Homo sapien
tgtctctgaaacaatagtcagtttc

SEQ ID NO: 3154497 - DNA, 25 bp, Homo sapien
ctctccacctgctttctttctctgt

SEQ ID NO: 3154498 - DNA, 25 bp, Homo sapien
ctctgtctctgaaacaatagtcagt

SEQ ID NO: 3154499 - DNA, 25 bp, Homo sapien
tctgccatgaagaccctactgttag

SEQ ID NO: 3154500 - DNA, 25 bp, Homo sapien
ctgcacaggaacgaggaagagtctt

SEQ ID NO: 3154501 - DNA, 25 bp, Homo sapien
tagagcgaaatccttttttcactac

SEQ ID NO: 3154502 - DNA, 25 bp, Homo sapien
gcacaggaacgaggaagagtcttct

SEQ ID NO: 3154503 - DNA, 25 bp, Homo sapien
ctgctgtgaggatacagctggtgtg

SEQ ID NO: 3154504 - DNA, 25 bp, Homo sapien
aaggagcaagggatatttgagaagc

SEQ ID NO: 3154505 - DNA, 25 bp, Homo sapien
gctgtttgctcaactgcgattggtg

SEQ ID NO: 3154506 - DNA, 25 bp, Homo sapien
tggtgccactggtgtcatataaggg

SEQ ID NO: 3154507 - DNA, 25 bp, Homo sapien
aggcgaaagatttatacgatctgaa

SEQ ID NO: 3154508 - DNA, 25 bp, Homo sapien
aaaggcgaaagatttatacgatctg

SEQ ID NO: 3154509 - DNA, 25 bp, Homo sapien
tacgatctgaagagaaaccagagta

SEQ ID NO: 3154510 - DNA, 25 bp, Homo sapien
taaaaggcgaaagatttatacgatc

SEQ ID NO: 3154511 - DNA, 25 bp, Homo sapien
ttccacacttggatacaacagtgag

SEQ ID NO: 3154512 - DNA, 25 bp, Homo sapien
cttggaaaagaagagccatctgagc

SEQ ID NO: 3154513 - DNA, 25 bp, Homo sapien
agaagagccatctgagcaaagggca

SEQ ID NO: 3154514 - DNA, 25 bp, Homo sapien
gaaaagaagagccatctgagcaaag

SEQ ID NO: 3154515 - DNA, 25 bp, Homo sapien
gaagagccatctgagcaaagggcat

SEQ ID NO: 3154516 - DNA, 25 bp, Homo sapien
tgaggtagtacttcaatagggagaa

SEQ ID NO: 3154517 - DNA, 25 bp, Homo sapien
ctgaggtagtacttcaatagggaga

SEQ ID NO: 3154518 - DNA, 25 bp, Homo sapien
gagaattgaatcaccctctttagga

SEQ ID NO: 3154519 - DNA, 25 bp, Homo sapien
gaggtagtacttcaatagggagaat

SEQ ID NO: 3154520 - DNA, 25 bp, Homo sapien
ggtcctcactggtcaagattttgca

SEQ ID NO: 3154521 - DNA, 25 bp, Homo sapien
tcagtgactggtcctcactggtcaa

SEQ ID NO: 3154522 - DNA, 25 bp, Homo sapien
ctggtcaagattttgcaactgtgaa

SEQ ID NO: 3154523 - DNA, 25 bp, Homo sapien
actggtcctcactggtcaagatttt

SEQ ID NO: 3154524 - DNA, 25 bp, Homo sapien
gccttgtcagaaaccctggaggatt

SEQ ID NO: 3154525 - DNA, 25 bp, Homo sapien
cactgccttgtcagaaaccctggag

SEQ ID NO: 3154526 - DNA, 25 bp, Homo sapien
tccagggcgctgcaccccggagaac

SEQ ID NO: 3154527 - DNA, 25 bp, Homo sapien
ccccggagaacactgccttgtcaga

SEQ ID NO: 3154528 - DNA, 25 bp, Homo sapien
gaactggacagggagtccttcttcc

SEQ ID NO: 3154529 - DNA, 25 bp, Homo sapien
actggacagggagtccttcttcctt

SEQ ID NO: 3154530 - DNA, 25 bp, Homo sapien
tcacgaactggacagggagtccttc

SEQ ID NO: 3154531 - DNA, 25 bp, Homo sapien
tggacagggagtccttcttccttac

SEQ ID NO: 3154532 - DNA, 25 bp, Homo sapien
ctttaaggatttctgctccctcttc

SEQ ID NO: 3154533 - DNA, 25 bp, Homo sapien
ttctgctccctcttctaccttgttg

SEQ ID NO: 3154534 - DNA, 25 bp, Homo sapien
tccctcttctaccttgttggtttga

SEQ ID NO: 3154535 - DNA, 25 bp, Homo sapien
taaggatttctgctccctcttctac

SEQ ID NO: 3154536 - DNA, 25 bp, Homo sapien
tataggacacctcaaggtatactcc

SEQ ID NO: 3154537 - DNA, 25 bp, Homo sapien
ggaggtgtcctctatgctgatggag

SEQ ID NO: 3154538 - DNA, 25 bp, Homo sapien
cctctatgctgatggagggtacagc

SEQ ID NO: 3154539 - DNA, 25 bp, Homo sapien
tcaaggtatactccttgtgaaagaa

SEQ ID NO: 3154540 - DNA, 25 bp, Homo sapien
ttccaagcaagaacaacatcttgct

SEQ ID NO: 3154541 - DNA, 25 bp, Homo sapien
gcaagaacaacatcttgctcacact

SEQ ID NO: 3154542 - DNA, 25 bp, Homo sapien
tcttccaagcaagaacaacatcttg

SEQ ID NO: 3154543 - DNA, 25 bp, Homo sapien
aagaacaacatcttgctcacactta

SEQ ID NO: 3154544 - DNA, 25 bp, Homo sapien
aggtaaccctcccagctcaactttg

SEQ ID NO: 3154545 - DNA, 25 bp, Homo sapien
aacttggtgcagatagatgattata

SEQ ID NO: 3154546 - DNA, 25 bp, Homo sapien
ggtggtccttgctccatattaatgt

SEQ ID NO: 3154547 - DNA, 25 bp, Homo sapien
tatatagtgtattacagcccagagc

SEQ ID NO: 3154548 - DNA, 25 bp, Homo sapien
cgtctttaatccttaatgtgttaca

SEQ ID NO: 3154549 - DNA, 25 bp, Homo sapien
tccttaatgtgttacaaatatccaa

SEQ ID NO: 3154550 - DNA, 25 bp, Homo sapien
tctttcacgtctttaatccttaatg

SEQ ID NO: 3154551 - DNA, 25 bp, Homo sapien
gttacaaatatccaaagtcacctgg

SEQ ID NO: 3154552 - DNA, 25 bp, Homo sapien
tttctaatggatgaacatacagagt

SEQ ID NO: 3154553 - DNA, 25 bp, Homo sapien
gaaagaatacgttctatcatctcat

SEQ ID NO: 3154554 - DNA, 25 bp, Homo sapien
tgcccatgctgccttttacttttct

SEQ ID NO: 3154555 - DNA, 25 bp, Homo sapien
gtacagaaagaatacgttctatcat

SEQ ID NO: 3154556 - DNA, 25 bp, Homo sapien
tctactgatttttgcccttgttctg

SEQ ID NO: 3154557 - DNA, 25 bp, Homo sapien
gaaatgctgggaacaatgactataa

SEQ ID NO: 3154558 - DNA, 25 bp, Homo sapien
tttggtaccatagtgtgaaatgctg

SEQ ID NO: 3154559 - DNA, 25 bp, Homo sapien
cattttgtatcagtattatgtagca

SEQ ID NO: 3154560 - DNA, 25 bp, Homo sapien
cacaaaacataactaatggcctact

SEQ ID NO: 3154561 - DNA, 25 bp, Homo sapien
aacataactaatggcctactgttga

SEQ ID NO: 3154562 - DNA, 25 bp, Homo sapien
ataactaatggcctactgttgactg

SEQ ID NO: 3154563 - DNA, 25 bp, Homo sapien
acttccacaaaacataactaatggc

SEQ ID NO: 3154564 - DNA, 25 bp, Homo sapien
aatttgctaaagctggccctactgg

SEQ ID NO: 3154565 - DNA, 25 bp, Homo sapien
tatgatgtggttctgagtccgtctc

SEQ ID NO: 3154566 - DNA, 25 bp, Homo sapien
taaacctctgttggccattttcctg

SEQ ID NO: 3154567 - DNA, 25 bp, Homo sapien
ggcctagggctactgaccactgaaa

SEQ ID NO: 3154568 - DNA, 25 bp, Homo sapien
gacccggcccgttgttgtcttcatg

SEQ ID NO: 3154569 - DNA, 25 bp, Homo sapien
tgtcttcatgctcgaacacacttgc

SEQ ID NO: 3154570 - DNA, 25 bp, Homo sapien
ggatcggacggtacactcggttctg

SEQ ID NO: 3154571 - DNA, 25 bp, Homo sapien
caaagcgctgtggtccttggtgtaa

SEQ ID NO: 3154572 - DNA, 25 bp, Homo sapien
tttcgcccggctcgaggtgcaggat

SEQ ID NO: 3154573 - DNA, 25 bp, Homo sapien
ccgtcgccctgtggctctgcgtgga

SEQ ID NO: 3154574 - DNA, 25 bp, Homo sapien
tagacaggcgctgggagaaagaacc

SEQ ID NO: 3154575 - DNA, 25 bp, Homo sapien
gaaccggctcccgagttctgggcat

SEQ ID NO: 3154576 - DNA, 25 bp, Homo sapien
tgagtatccgcttctcccttgtggc

SEQ ID NO: 3154577 - DNA, 25 bp, Homo sapien
aagagggtcctgcactttgacgcgc

SEQ ID NO: 3154578 - DNA, 25 bp, Homo sapien
gctgcagattctcggccacttcaga

SEQ ID NO: 3154579 - DNA, 25 bp, Homo sapien
tgcgacccggcatacttggctgagt

SEQ ID NO: 3154580 - DNA, 25 bp, Homo sapien
cactccaatgaagccttttgacctg

SEQ ID NO: 3154581 - DNA, 25 bp, Homo sapien
caatgaagccttttgacctgttcat

SEQ ID NO: 3154582 - DNA, 25 bp, Homo sapien
tcatccactccaatgaagccttttg

SEQ ID NO: 3154583 - DNA, 25 bp, Homo sapien
tccaatgaagccttttgacctgttc

SEQ ID NO: 3154584 - DNA, 25 bp, Homo sapien
ttcttttgtcccttcttcttcactc

SEQ ID NO: 3154585 - DNA, 25 bp, Homo sapien
ttgtcccttcttcttcactctccat

SEQ ID NO: 3154586 - DNA, 25 bp, Homo sapien
cttcttttgtcccttcttcttcact

SEQ ID NO: 3154587 - DNA, 25 bp, Homo sapien
cttttgtcccttcttcttcactctc

SEQ ID NO: 3154588 - DNA, 25 bp, Homo sapien
tgcctgcatgccagaaatgagctgg

SEQ ID NO: 3154589 - DNA, 25 bp, Homo sapien
ggcaattgtgcctgctggtgcagca

SEQ ID NO: 3154590 - DNA, 25 bp, Homo sapien
agatcttcagcgctttgcagaaagg

SEQ ID NO: 3154591 - DNA, 25 bp, Homo sapien
ccagccccagctgaggcaattgtgc

SEQ ID NO: 3154592 - DNA, 25 bp, Homo sapien
cacagttgggtgaagtggactggtt

SEQ ID NO: 3154593 - DNA, 25 bp, Homo sapien
cagttgggtgaagtggactggttgg

SEQ ID NO: 3154594 - DNA, 25 bp, Homo sapien
acacagttgggtgaagtggactggt

SEQ ID NO: 3154595 - DNA, 25 bp, Homo sapien
ttgggtgaagtggactggttgggac

SEQ ID NO: 3154596 - DNA, 25 bp, Homo sapien
acacatcccgtttcttatctgcagc

SEQ ID NO: 3154597 - DNA, 25 bp, Homo sapien
tgtgaagactaggtgtcccttctgc

SEQ ID NO: 3154598 - DNA, 25 bp, Homo sapien
aatcacactgactttgcaaactgtc

SEQ ID NO: 3154599 - DNA, 25 bp, Homo sapien
ctgcagctctatggatgccaaattt

SEQ ID NO: 3154600 - DNA, 25 bp, Homo sapien
ggtaaacagcattgacgctgtgaag

SEQ ID NO: 3154601 - DNA, 25 bp, Homo sapien
atggtaaacagcattgacgctgtga

SEQ ID NO: 3154602 - DNA, 25 bp, Homo sapien
gaagaaatacctcaattaatgggca

SEQ ID NO: 3154603 - DNA, 25 bp, Homo sapien
tcaactctgaatcacatatccagct

SEQ ID NO: 3154604 - DNA, 25 bp, Homo sapien
taagcagccttattaccagcaaacc

SEQ ID NO: 3154605 - DNA, 25 bp, Homo sapien
gaatgttgaaaagtccttctgcagc

SEQ ID NO: 3154606 - DNA, 25 bp, Homo sapien
catcatttctcctaggctttgtgga

SEQ ID NO: 3154607 - DNA, 25 bp, Homo sapien
gggacttggagcctcaacatctgtt

SEQ ID NO: 3154608 - DNA, 25 bp, Homo sapien
tctctccagaggtgactgctgttac

SEQ ID NO: 3154609 - DNA, 25 bp, Homo sapien
ctctccagaggtgactgctgttacc

SEQ ID NO: 3154610 - DNA, 25 bp, Homo sapien
ccagagaggttcttctctccagagg

SEQ ID NO: 3154611 - DNA, 25 bp, Homo sapien
ccaggtatccagagaggttcttctc

SEQ ID NO: 3154612 - DNA, 25 bp, Homo sapien
cattccgctgattgggaaacggtag

SEQ ID NO: 3154613 - DNA, 25 bp, Homo sapien
acggtaggtcctctctcttggttgg

SEQ ID NO: 3154614 - DNA, 25 bp, Homo sapien
tgtctccctcaagatttaagaggtg

SEQ ID NO: 3154615 - DNA, 25 bp, Homo sapien
ccgcttgtctccctcaagatttaag

SEQ ID NO: 3154616 - DNA, 25 bp, Homo sapien
ttaacctcacttcagtcctgttgag

SEQ ID NO: 3154617 - DNA, 25 bp, Homo sapien
agagagtttaacctcacttcagtcc

SEQ ID NO: 3154618 - DNA, 25 bp, Homo sapien
ttgccactcggggaagaattagagg

SEQ ID NO: 3154619 - DNA, 25 bp, Homo sapien
ttagaggaagagagtttaacctcac

SEQ ID NO: 3154620 - DNA, 25 bp, Homo sapien
tgaaatcccacggatgcatcccatg

SEQ ID NO: 3154621 - DNA, 25 bp, Homo sapien
tgtgatcaggtcatgaacaatgcct

SEQ ID NO: 3154622 - DNA, 25 bp, Homo sapien
aatgccttgatgagtgtcctgatcg

SEQ ID NO: 3154623 - DNA, 25 bp, Homo sapien
tccaaatgaaagcatcgaggcagtc

SEQ ID NO: 3154624 - DNA, 25 bp, Homo sapien
gaatagtcaatgaatatcccatcct

SEQ ID NO: 3154625 - DNA, 25 bp, Homo sapien
tagtcaatgaatatcccatcctgtt

SEQ ID NO: 3154626 - DNA, 25 bp, Homo sapien
atagtcaatgaatatcccatcctgt

SEQ ID NO: 3154627 - DNA, 25 bp, Homo sapien
aatagtcaatgaatatcccatcctg

SEQ ID NO: 3154628 - DNA, 25 bp, Homo sapien
catttagctgcgttcttcagacccc

SEQ ID NO: 3154629 - DNA, 25 bp, Homo sapien
tactagtacgaatcctcagggtcag

SEQ ID NO: 3154630 - DNA, 25 bp, Homo sapien
tgagacagtggagtaggatctttcc

SEQ ID NO: 3154631 - DNA, 25 bp, Homo sapien
tagtgaggctgccacgactccttct

SEQ ID NO: 3154632 - DNA, 25 bp, Homo sapien
ggaagcagggcaaaagttagaagac

SEQ ID NO: 3154633 - DNA, 25 bp, Homo sapien
gactctggatctgaggagaactctc

SEQ ID NO: 3154634 - DNA, 25 bp, Homo sapien
gagaactctcaaattcactgtaagc

SEQ ID NO: 3154635 - DNA, 25 bp, Homo sapien
tattcacacgcttgtttgggatctg

SEQ ID NO: 3154636 - DNA, 25 bp, Homo sapien
agttttgattcatatgggttcacac

SEQ ID NO: 3154637 - DNA, 25 bp, Homo sapien
gtgtgaacccatatgaatcaaaact

SEQ ID NO: 3154638 - DNA, 25 bp, Homo sapien
tacatttcgaacaatatcaggtagt

SEQ ID NO: 3154639 - DNA, 25 bp, Homo sapien
tttattgacaatagaaccagccgat

SEQ ID NO: 3154640 - DNA, 25 bp, Homo sapien
tatcattttaccaattctagtacag

SEQ ID NO: 3154641 - DNA, 25 bp, Homo sapien
atacaagacttaccaaggtttactg

SEQ ID NO: 3154642 - DNA, 25 bp, Homo sapien
tcttatagtttgatggaccaggctg

SEQ ID NO: 3154643 - DNA, 25 bp, Homo sapien
caggtcttgaggctcctttcttata

SEQ ID NO: 3154644 - DNA, 25 bp, Homo sapien
gataagaagaagttgctaggctccc

SEQ ID NO: 3154645 - DNA, 25 bp, Homo sapien
cagtcacaggaccttgggcagtggc

SEQ ID NO: 3154646 - DNA, 25 bp, Homo sapien
tatggtgtatcattgaaaacaagct

SEQ ID NO: 3154647 - DNA, 25 bp, Homo sapien
ggtatggtgtatcattgaaaacaag

SEQ ID NO: 3154648 - DNA, 25 bp, Homo sapien
caggaaggtatggtgtatcattgaa

SEQ ID NO: 3154649 - DNA, 25 bp, Homo sapien
gaaggtatggtgtatcattgaaaac

SEQ ID NO: 3154650 - DNA, 25 bp, Homo sapien
attgtccctgattttaatcctgaaa

SEQ ID NO: 3154651 - DNA, 25 bp, Homo sapien
tgctgccccagaggattggttttcc

SEQ ID NO: 3154652 - DNA, 25 bp, Homo sapien
tgattgtccctgattttaatcctga

SEQ ID NO: 3154653 - DNA, 25 bp, Homo sapien
ttaactttgtaaccattgcttctat

SEQ ID NO: 3154654 - DNA, 25 bp, Homo sapien
ggttgcctgggttgcctcgctccat

SEQ ID NO: 3154655 - DNA, 25 bp, Homo sapien
tgggttgataactgggttgcctggg

SEQ ID NO: 3154656 - DNA, 25 bp, Homo sapien
tttgggttgataactgggttgcctg

SEQ ID NO: 3154657 - DNA, 25 bp, Homo sapien
tgggttgcctgggttgcctcgctcc

SEQ ID NO: 3154658 - DNA, 25 bp, Homo sapien
cctctctccttgtgtaccaggtcat

SEQ ID NO: 3154659 - DNA, 25 bp, Homo sapien
ccctctctccttgtgtaccaggtca

SEQ ID NO: 3154660 - DNA, 25 bp, Homo sapien
agagtctatgacatccacccacagg

SEQ ID NO: 3154661 - DNA, 25 bp, Homo sapien
aagtgagccttgtgccttgcagagc

SEQ ID NO: 3154662 - DNA, 25 bp, Homo sapien
gcactagagtctatgacatccaccc

SEQ ID NO: 3154663 - DNA, 25 bp, Homo sapien
cttgcagagcactagagtctatgac

SEQ ID NO: 3154664 - DNA, 25 bp, Homo sapien
aaatcatggtcttctttgtagattg

SEQ ID NO: 3154665 - DNA, 25 bp, Homo sapien
cttctttgtagattgcaattgggaa

SEQ ID NO: 3154666 - DNA, 25 bp, Homo sapien
ggtcttctttgtagattgcaattgg

SEQ ID NO: 3154667 - DNA, 25 bp, Homo sapien
tcatggtcttctttgtagattgcaa

SEQ ID NO: 3154668 - DNA, 25 bp, Homo sapien
gaataaaagcttggcttttgtatga

SEQ ID NO: 3154669 - DNA, 25 bp, Homo sapien
ggcttttgtatgactgcctttcata

SEQ ID NO: 3154670 - DNA, 25 bp, Homo sapien
ccttgtgaagtctggaactgttaat

SEQ ID NO: 3154671 - DNA, 25 bp, Homo sapien
cttctatactcaatggcaaggtgaa

SEQ ID NO: 3154672 - DNA, 25 bp, Homo sapien
ctcaagtccagagactagccaaatt

SEQ ID NO: 3154673 - DNA, 25 bp, Homo sapien
gtccagagactagccaaatttggtc

SEQ ID NO: 3154674 - DNA, 25 bp, Homo sapien
aagtccagagactagccaaatttgg

SEQ ID NO: 3154675 - DNA, 25 bp, Homo sapien
cagagactagccaaatttggtctac

SEQ ID NO: 3154676 - DNA, 25 bp, Homo sapien
tgctaggcttccaatgagcttccca

SEQ ID NO: 3154677 - DNA, 25 bp, Homo sapien
gatgtaatgtttccaagcgggtcga

SEQ ID NO: 3154678 - DNA, 25 bp, Homo sapien
ccaggacccttggtggaaacaggat

SEQ ID NO: 3154679 - DNA, 25 bp, Homo sapien
ccattgttctttagcagggatgcag

SEQ ID NO: 3154680 - DNA, 25 bp, Homo sapien
caggggtctagacttatctggaata

SEQ ID NO: 3154681 - DNA, 25 bp, Homo sapien
agacttatctggaataaattgggtg

SEQ ID NO: 3154682 - DNA, 25 bp, Homo sapien
gggtctagacttatctggaataaat

SEQ ID NO: 3154683 - DNA, 25 bp, Homo sapien
tcaggggtctagacttatctggaat

SEQ ID NO: 3154684 - DNA, 25 bp, Homo sapien
gatcccagaagcgttctttagttat

SEQ ID NO: 3154685 - DNA, 25 bp, Homo sapien
tattgtgagttttacatcatttgaa

SEQ ID NO: 3154686 - DNA, 25 bp, Homo sapien
gctgaactctcttgagtactcatga

SEQ ID NO: 3154687 - DNA, 25 bp, Homo sapien
tatttttcatcttccacgaatttgc

SEQ ID NO: 3154688 - DNA, 25 bp, Homo sapien
taataaaaagtcatagtccctagct

SEQ ID NO: 3154689 - DNA, 25 bp, Homo sapien
gagctaggctctgaatcaccaagca

SEQ ID NO: 3154690 - DNA, 25 bp, Homo sapien
aataactatcattcttggagacctg

SEQ ID NO: 3154691 - DNA, 25 bp, Homo sapien
gcttgcacagcttgtagtaagtggc

SEQ ID NO: 3154692 - DNA, 25 bp, Homo sapien
aataaagattgtttggggacagtca

SEQ ID NO: 3154693 - DNA, 25 bp, Homo sapien
ataaagattgtttggggacagtcat

SEQ ID NO: 3154694 - DNA, 25 bp, Homo sapien
taaagattgtttggggacagtcatg

SEQ ID NO: 3154695 - DNA, 25 bp, Homo sapien
cagaggcccgctgtggagaataaca

SEQ ID NO: 3154696 - DNA, 25 bp, Homo sapien
ggtcagaggcccgctgtggagaata

SEQ ID NO: 3154697 - DNA, 25 bp, Homo sapien
ggagtggtcagaggcccgctgtgga

SEQ ID NO: 3154698 - DNA, 25 bp, Homo sapien
gggagtggtcagaggcccgctgtgg

SEQ ID NO: 3154699 - DNA, 25 bp, Homo sapien
aaggtcaaggaagacatcgggcagg

SEQ ID NO: 3154700 - DNA, 25 bp, Homo sapien
ggtcaaggaagacatcgggcaggtg

SEQ ID NO: 3154701 - DNA, 25 bp, Homo sapien
aggtcaaggaagacatcgggcaggt

SEQ ID NO: 3154702 - DNA, 25 bp, Homo sapien
gtcaaggaagacatcgggcaggtga

SEQ ID NO: 3154703 - DNA, 25 bp, Homo sapien
acttgtgtgtcatccttcagcaggg

SEQ ID NO: 3154704 - DNA, 25 bp, Homo sapien
ccatgctaatcatcttctcttatca

SEQ ID NO: 3154705 - DNA, 25 bp, Homo sapien
atgaacttgtgtgtcatccttcagc

SEQ ID NO: 3154706 - DNA, 25 bp, Homo sapien
catgctaatcatcttctcttatcat

SEQ ID NO: 3154707 - DNA, 25 bp, Homo sapien
tctgtggtgctgctctgatacaaca

SEQ ID NO: 3154708 - DNA, 25 bp, Homo sapien
ctgtggtgctgctctgatacaacat

SEQ ID NO: 3154709 - DNA, 25 bp, Homo sapien
tattggtggcttgtgcgttgagttt

SEQ ID NO: 3154710 - DNA, 25 bp, Homo sapien
taacgcaggatgactggtgctttgt

SEQ ID NO: 3154711 - DNA, 25 bp, Homo sapien
ttcaattttatctaacgcaggatga

SEQ ID NO: 3154712 - DNA, 25 bp, Homo sapien
tgctttgtattggtggcttgtgcgt

SEQ ID NO: 3154713 - DNA, 25 bp, Homo sapien
gctagcccgcggaagagcggccact

SEQ ID NO: 3154714 - DNA, 25 bp, Homo sapien
agcccgcggaagagcggccactagc

SEQ ID NO: 3154715 - DNA, 25 bp, Homo sapien
tagcgcgcggcgcaccggtctcagc

SEQ ID NO: 3154716 - DNA, 25 bp, Homo sapien
gccttccgcgctgctggcgccccca

SEQ ID NO: 3154717 - DNA, 25 bp, Homo sapien
ggttcagcgccgagtgctcggcctc

SEQ ID NO: 3154718 - DNA, 25 bp, Homo sapien
gacatcaaaggctcggcaggcggcg

SEQ ID NO: 3154719 - DNA, 25 bp, Homo sapien
cttggttttcccatagcggatcagg

SEQ ID NO: 3154720 - DNA, 25 bp, Homo sapien
aggtcctggaagatcgcgcagcccg

SEQ ID NO: 3154721 - DNA, 25 bp, Homo sapien
ccaaggtgcaggttagggcgactca

SEQ ID NO: 3154722 - DNA, 25 bp, Homo sapien
ctgccaaggtgcaggttagggcgac

SEQ ID NO: 3154723 - DNA, 25 bp, Homo sapien
acctgccaaggtgcaggttagggcg

SEQ ID NO: 3154724 - DNA, 25 bp, Homo sapien
gccaaggtgcaggttagggcgactc

SEQ ID NO: 3154725 - DNA, 25 bp, Homo sapien
cagaatttttcgaaagtcaaatgga

SEQ ID NO: 3154726 - DNA, 25 bp, Homo sapien
aatccttcgctgaactgggttacag

SEQ ID NO: 3154727 - DNA, 25 bp, Homo sapien
ctgacgatttaatccttcgctgaac

SEQ ID NO: 3154728 - DNA, 25 bp, Homo sapien
tcaaatggagcttcgggacgggcct

SEQ ID NO: 3154729 - DNA, 25 bp, Homo sapien
gcatcatgatacatgttcgaggtca

SEQ ID NO: 3154730 - DNA, 25 bp, Homo sapien
gaaagtctgggcagctctttttgcc

SEQ ID NO: 3154731 - DNA, 25 bp, Homo sapien
tacattcactatgcaacccagagca

SEQ ID NO: 3154732 - DNA, 25 bp, Homo sapien
tcgaggtcacctgtttattcagagt

SEQ ID NO: 3154733 - DNA, 25 bp, Homo sapien
gtgttccctgctgctggggggctta

SEQ ID NO: 3154734 - DNA, 25 bp, Homo sapien
ctgctgctggggggcttaggcagga

SEQ ID NO: 3154735 - DNA, 25 bp, Homo sapien
ccctgctgctggggggcttaggcag

SEQ ID NO: 3154736 - DNA, 25 bp, Homo sapien
ttccctgctgctggggggcttaggc

SEQ ID NO: 3154737 - DNA, 25 bp, Homo sapien
agtacagaaaaatatgcctcagcct

SEQ ID NO: 3154738 - DNA, 25 bp, Homo sapien
tctcataaaaatgttaggccaggcc

SEQ ID NO: 3154739 - DNA, 25 bp, Homo sapien
tgtgcttgccctgctcactttttga

SEQ ID NO: 3154740 - DNA, 25 bp, Homo sapien
aaatgttaggccaggccagacacgg

SEQ ID NO: 3154741 - DNA, 25 bp, Homo sapien
attgagaaattggagcagaagtatg

SEQ ID NO: 3154742 - DNA, 25 bp, Homo sapien
attggagcagaagtatggagtggct

SEQ ID NO: 3154743 - DNA, 25 bp, Homo sapien
aaattggagcagaagtatggagtgg

SEQ ID NO: 3154744 - DNA, 25 bp, Homo sapien
ctgaaattgagaaattggagcagaa

SEQ ID NO: 3154745 - DNA, 25 bp, Homo sapien
accagacttagtgcagtcaatgatg

SEQ ID NO: 3154746 - DNA, 25 bp, Homo sapien
tccataaaagccaaaccagacttag

SEQ ID NO: 3154747 - DNA, 25 bp, Homo sapien
gccaaaccagacttagtgcagtcaa

SEQ ID NO: 3154748 - DNA, 25 bp, Homo sapien
tgataccaacctttatcaacttttc

SEQ ID NO: 3154749 - DNA, 25 bp, Homo sapien
gcctctctgaggttaacaagaacac

SEQ ID NO: 3154750 - DNA, 25 bp, Homo sapien
ggtaacagaattggactcaagttcc

SEQ ID NO: 3154751 - DNA, 25 bp, Homo sapien
aaagtttagttagcaatctctctga

SEQ ID NO: 3154752 - DNA, 25 bp, Homo sapien
tagaatctgaatcctataggtgttc

SEQ ID NO: 3154753 - DNA, 25 bp, Homo sapien
agcaggaagccattccacagcactg

SEQ ID NO: 3154754 - DNA, 25 bp, Homo sapien
tcagggacatcacggtcaggaggtc

SEQ ID NO: 3154755 - DNA, 25 bp, Homo sapien
gatgcaaactggaagcgttcctggt

SEQ ID NO: 3154756 - DNA, 25 bp, Homo sapien
tacttttagaggcatgctgagccca

SEQ ID NO: 3154757 - DNA, 25 bp, Homo sapien
tggtcctggcactaacagccagatg

SEQ ID NO: 3154758 - DNA, 25 bp, Homo sapien
gaatgcagacagtgccagctcccct

SEQ ID NO: 3154759 - DNA, 25 bp, Homo sapien
taagaatgcagacagtgccagctcc

SEQ ID NO: 3154760 - DNA, 25 bp, Homo sapien
aagaatgcagacagtgccagctccc

SEQ ID NO: 3154761 - DNA, 25 bp, Homo sapien
ctaagaatgcagacagtgccagctc

SEQ ID NO: 3154762 - DNA, 25 bp, Homo sapien
gaggcactcgaagagtcttcgtaag

SEQ ID NO: 3154763 - DNA, 25 bp, Homo sapien
ggccaacaaggacataatagacaag

SEQ ID NO: 3154764 - DNA, 25 bp, Homo sapien
gaagacactgacgtagaggcactcg

SEQ ID NO: 3154765 - DNA, 25 bp, Homo sapien
cacgacgtgaatcatgacattggag

SEQ ID NO: 3154766 - DNA, 25 bp, Homo sapien
catggtactggctggcagaatgcca

SEQ ID NO: 3154767 - DNA, 25 bp, Homo sapien
ttccatggtactggctggcagaatg

SEQ ID NO: 3154768 - DNA, 25 bp, Homo sapien
tcaccaagcgctctgcaaagttcct

SEQ ID NO: 3154769 - DNA, 25 bp, Homo sapien
ccttccatggtactggctggcagaa

SEQ ID NO: 3154770 - DNA, 25 bp, Homo sapien
aaaggagtgcttagaaagctatttt

SEQ ID NO: 3154771 - DNA, 25 bp, Homo sapien
gagtgcttagaaagctatttttgtg

SEQ ID NO: 3154772 - DNA, 25 bp, Homo sapien
aggagtgcttagaaagctatttttg

SEQ ID NO: 3154773 - DNA, 25 bp, Homo sapien
gaaaggagtgcttagaaagctattt

SEQ ID NO: 3154774 - DNA, 25 bp, Homo sapien
tgaccagatgaacatcatcatccca

SEQ ID NO: 3154775 - DNA, 25 bp, Homo sapien
gaaccaccgtgcttgcatcaataga

SEQ ID NO: 3154776 - DNA, 25 bp, Homo sapien
tggaaccaccgtgcttgcatcaata

SEQ ID NO: 3154777 - DNA, 25 bp, Homo sapien
ccaccgtgcttgcatcaatagattt

SEQ ID NO: 3154778 - DNA, 25 bp, Homo sapien
ggcagacagggcctgattaaagaag

SEQ ID NO: 3154779 - DNA, 25 bp, Homo sapien
tgctaagtagttaggggaagaaaca

SEQ ID NO: 3154780 - DNA, 25 bp, Homo sapien
aaggcagacagggcctgattaaaga

SEQ ID NO: 3154781 - DNA, 25 bp, Homo sapien
agacagggcctgattaaagaagaca

SEQ ID NO: 3154782 - DNA, 25 bp, Homo sapien
ggtttgcattcttcatgactgaggt

SEQ ID NO: 3154783 - DNA, 25 bp, Homo sapien
tgaaactgtactttgggctccagac

SEQ ID NO: 3154784 - DNA, 25 bp, Homo sapien
ctgccatgctcattcagtgaaaact

SEQ ID NO: 3154785 - DNA, 25 bp, Homo sapien
ttaggcattgaaaccatcacctggt

SEQ ID NO: 3154786 - DNA, 25 bp, Homo sapien
cagcttggagaagtctcatctactt

SEQ ID NO: 3154787 - DNA, 25 bp, Homo sapien
ctaggctaccgcagccattgatgat

SEQ ID NO: 3154788 - DNA, 25 bp, Homo sapien
attatatagtccattcctactaggc

SEQ ID NO: 3154789 - DNA, 25 bp, Homo sapien
gtccattcctactaggctaccgcag

SEQ ID NO: 3154790 - DNA, 25 bp, Homo sapien
gagaatcttacgctgcacaagtgtg

SEQ ID NO: 3154791 - DNA, 25 bp, Homo sapien
agagtgtgtcacttccgttcacgaa

SEQ ID NO: 3154792 - DNA, 25 bp, Homo sapien
taacacctcagccaataagccagag

SEQ ID NO: 3154793 - DNA, 25 bp, Homo sapien
gcttagctgactgtaataggacatc

SEQ ID NO: 3154794 - DNA, 25 bp, Homo sapien
gactgagccacaggttaatcttaag

SEQ ID NO: 3154795 - DNA, 25 bp, Homo sapien
catgtggaaattaagaccaaactgc

SEQ ID NO: 3154796 - DNA, 25 bp, Homo sapien
tgtgcttgacatgcatccgggagca

SEQ ID NO: 3154797 - DNA, 25 bp, Homo sapien
ggagagaaaatcctccatcagaatt

SEQ ID NO: 3154798 - DNA, 25 bp, Homo sapien
gatgctctccctttacgcacatgga

SEQ ID NO: 3154799 - DNA, 25 bp, Homo sapien
caatggttcttgagtttttaggcac

SEQ ID NO: 3154800 - DNA, 25 bp, Homo sapien
tgattctgacgctgcaagcactgca

SEQ ID NO: 3154801 - DNA, 25 bp, Homo sapien
taaaaatcgaatacagggcacagct

SEQ ID NO: 3154802 - DNA, 25 bp, Homo sapien
tttcctgtctttggagccgcagcca

SEQ ID NO: 3154803 - DNA, 25 bp, Homo sapien
gcaactgcacagcatatggtcctat

SEQ ID NO: 3154804 - DNA, 25 bp, Homo sapien
gcagccattgctgtcctgactgtta

SEQ ID NO: 3154805 - DNA, 25 bp, Homo sapien
aagcatgtgccccttctgagagtgc

SEQ ID NO: 3154806 - DNA, 25 bp, Homo sapien
tcaccgccatgaaaagtctgtggat

SEQ ID NO: 3154807 - DNA, 25 bp, Homo sapien
tagggtcaaaattacgtcagccaga

SEQ ID NO: 3154808 - DNA, 25 bp, Homo sapien
ttgcagccatggagtagaagaccct

SEQ ID NO: 3154809 - DNA, 25 bp, Homo sapien
tgttgatagtagagcttcaccgcca

SEQ ID NO: 3154810 - DNA, 25 bp, Homo sapien
gacaataatgggtgtttaactcacc

SEQ ID NO: 3154811 - DNA, 25 bp, Homo sapien
aaaacgtaagtgtcatcagggccag

SEQ ID NO: 3154812 - DNA, 25 bp, Homo sapien
gacatagtctggctcaaaaatacag

SEQ ID NO: 3154813 - DNA, 25 bp, Homo sapien
tctgagagacagagttcatctgact

SEQ ID NO: 3154814 - DNA, 25 bp, Homo sapien
ccctgctacttgggaggctgaggca

SEQ ID NO: 3154815 - DNA, 25 bp, Homo sapien
ggagatggcttgaacccgggaggtg

SEQ ID NO: 3154816 - DNA, 25 bp, Homo sapien
ggaggttgcagtgaactgagatcac

SEQ ID NO: 3154817 - DNA, 25 bp, Homo sapien
gggtgtggtgccgtgtgcctgtggt

SEQ ID NO: 3154818 - DNA, 25 bp, Homo sapien
tcaggcgtgctaaatcgaggctggc

SEQ ID NO: 3154819 - DNA, 25 bp, Homo sapien
gctttctcacaggaaggactcctgg

SEQ ID NO: 3154820 - DNA, 25 bp, Homo sapien
tagagcattggcgaactggcacagt

SEQ ID NO: 3154821 - DNA, 25 bp, Homo sapien
ccttgagggtttagagccatcatcc

SEQ ID NO: 3154822 - DNA, 25 bp, Homo sapien
cgcttagggagcagtcagcaccatc

SEQ ID NO: 3154823 - DNA, 25 bp, Homo sapien
tgcaagcagcgggagtgaggtgagg

SEQ ID NO: 3154824 - DNA, 25 bp, Homo sapien
aagtgccggcgacgggaagcctcga

SEQ ID NO: 3154825 - DNA, 25 bp, Homo sapien
tccggcggcggctaaactggagtca

SEQ ID NO: 3154826 - DNA, 25 bp, Homo sapien
gggcccacagcagcggaaccagaaa

SEQ ID NO: 3154827 - DNA, 25 bp, Homo sapien
cggtggctaaggtcttcatctgggc

SEQ ID NO: 3154828 - DNA, 25 bp, Homo sapien
cccacagcagcggaaccagaaagag

SEQ ID NO: 3154829 - DNA, 25 bp, Homo sapien
ttgttccggtggctaaggtcttcat

SEQ ID NO: 3154830 - DNA, 25 bp, Homo sapien
ccggctcggggccctgcacagccac

SEQ ID NO: 3154831 - DNA, 25 bp, Homo sapien
gccggctcggggccctgcacagcca

SEQ ID NO: 3154832 - DNA, 25 bp, Homo sapien
gggccggctcggggccctgcacagc

SEQ ID NO: 3154833 - DNA, 25 bp, Homo sapien
ccgggccggctcggggccctgcaca

SEQ ID NO: 3154834 - DNA, 25 bp, Homo sapien
tagttttggcatcccacatcgctgc

SEQ ID NO: 3154835 - DNA, 25 bp, Homo sapien
gaaatggccgatgtgatgatcctca

SEQ ID NO: 3154836 - DNA, 25 bp, Homo sapien
ttccctaaaggagcgggcaagacca

SEQ ID NO: 3154837 - DNA, 25 bp, Homo sapien
gatcaacgtttatagcgggctcctc

SEQ ID NO: 3154838 - DNA, 25 bp, Homo sapien
tgttaaaacgctgccaagtgactaa

SEQ ID NO: 3154839 - DNA, 25 bp, Homo sapien
gagaaatgttaaaacgctgccaagt

SEQ ID NO: 3154840 - DNA, 25 bp, Homo sapien
gtgactaaggactaattctattaac

SEQ ID NO: 3154841 - DNA, 25 bp, Homo sapien
gccaagtgactaaggactaattcta

SEQ ID NO: 3154842 - DNA, 25 bp, Homo sapien
aattagtggaggcaactcaccgacg

SEQ ID NO: 3154843 - DNA, 25 bp, Homo sapien
catatgagcaagaaagcggtggcta

SEQ ID NO: 3154844 - DNA, 25 bp, Homo sapien
gtttgagtgccacactggccgggat

SEQ ID NO: 3154845 - DNA, 25 bp, Homo sapien
tgaacatcactctcctaaaaaggct

SEQ ID NO: 3154846 - DNA, 25 bp, Homo sapien
ggaggatcaattagaggttgcagtg

SEQ ID NO: 3154847 - DNA, 25 bp, Homo sapien
ggaaaggaaagggtcagataaatca

SEQ ID NO: 3154848 - DNA, 25 bp, Homo sapien
gaaagggtcagataaatcaccctta

SEQ ID NO: 3154849 - DNA, 25 bp, Homo sapien
tgggaggatcaattagaggttgcag

SEQ ID NO: 3154850 - DNA, 25 bp, Homo sapien
taataaatgccaagaacagacaagg

SEQ ID NO: 3154851 - DNA, 25 bp, Homo sapien
caagatcaaagaactgcaccagcat

SEQ ID NO: 3154852 - DNA, 25 bp, Homo sapien
ggttctgctgaaactagcttctagc

SEQ ID NO: 3154853 - DNA, 25 bp, Homo sapien
tctggaatagacagatgagtaagcc

SEQ ID NO: 3154854 - DNA, 25 bp, Homo sapien
gagtcccggaattaactatatagtc

SEQ ID NO: 3154855 - DNA, 25 bp, Homo sapien
ttgctctccccaagtggactaaaga

SEQ ID NO: 3154856 - DNA, 25 bp, Homo sapien
taccatgggttatttactcgttgag

SEQ ID NO: 3154857 - DNA, 25 bp, Homo sapien
ggactaaagaccctggcttcacatg

SEQ ID NO: 3154858 - DNA, 25 bp, Homo sapien
tgcatgtagttgcaaagcaaatccg

SEQ ID NO: 3154859 - DNA, 25 bp, Homo sapien
tgaatgcctactaaccaaggagaga

SEQ ID NO: 3154860 - DNA, 25 bp, Homo sapien
tactcaatgtagaatgccctgttag

SEQ ID NO: 3154861 - DNA, 25 bp, Homo sapien
gtagaaggtactctcacagctgaaa

SEQ ID NO: 3154862 - DNA, 25 bp, Homo sapien
agtattaatataattaccttctgag

SEQ ID NO: 3154863 - DNA, 25 bp, Homo sapien
ttttttgatgacagcataccactaa

SEQ ID NO: 3154864 - DNA, 25 bp, Homo sapien
gacagcataccactaaataaattca

SEQ ID NO: 3154865 - DNA, 25 bp, Homo sapien
gaaggtaattatgagcaggcgtcct

SEQ ID NO: 3154866 - DNA, 25 bp, Homo sapien
catgatgaaactagagaagatgaag

SEQ ID NO: 3154867 - DNA, 25 bp, Homo sapien
aatctacagcttgctaccaagaaaa

SEQ ID NO: 3154868 - DNA, 25 bp, Homo sapien
aaacaaaatctacagcttgctacca

SEQ ID NO: 3154869 - DNA, 25 bp, Homo sapien
ctgcatcggaatctccatctataca

SEQ ID NO: 3154870 - DNA, 25 bp, Homo sapien
gacagtacaggcacagaagaatata

SEQ ID NO: 3154871 - DNA, 25 bp, Homo sapien
catacaggattagatgcagtgtgca

SEQ ID NO: 3154872 - DNA, 25 bp, Homo sapien
gaatatacttggatgcatacaggat

SEQ ID NO: 3154873 - DNA, 25 bp, Homo sapien
catcttgagagcaggattaacaact

SEQ ID NO: 3154874 - DNA, 25 bp, Homo sapien
gccttcgtgtcctcaataggctctt

SEQ ID NO: 3154875 - DNA, 25 bp, Homo sapien
tgaaagaggttatcagaaatggatc

SEQ ID NO: 3154876 - DNA, 25 bp, Homo sapien
ttagcctaggacagcctcaaggtat

SEQ ID NO: 3154877 - DNA, 25 bp, Homo sapien
tatgtagcctcaaggttgacagcct

SEQ ID NO: 3154878 - DNA, 25 bp, Homo sapien
gctgtagggctaccaatatggaagc

SEQ ID NO: 3154879 - DNA, 25 bp, Homo sapien
aacatcttatgccagctatggagga

SEQ ID NO: 3154880 - DNA, 25 bp, Homo sapien
gattcagtactagtcactcatggag

SEQ ID NO: 3154881 - DNA, 25 bp, Homo sapien
gacttcaggcaggtccaaccaaaaa

SEQ ID NO: 3154882 - DNA, 25 bp, Homo sapien
ccacataacggaatattatagagct

SEQ ID NO: 3154883 - DNA, 25 bp, Homo sapien
tatactaagtatgtgtacatgtgga

SEQ ID NO: 3154884 - DNA, 25 bp, Homo sapien
taaatggtagatccacataacggaa

SEQ ID NO: 3154885 - DNA, 25 bp, Homo sapien
aaataactaaatgtcggctgggctc

SEQ ID NO: 3154886 - DNA, 25 bp, Homo sapien
caaactgtgggcaatgagtatggga

SEQ ID NO: 3154887 - DNA, 25 bp, Homo sapien
catggctcatggttacagtgctggg

SEQ ID NO: 3154888 - DNA, 25 bp, Homo sapien
tgacaggcttttgctaaccacaagc

SEQ ID NO: 3154889 - DNA, 25 bp, Homo sapien
tggtaggtatttactcaccgcacac

SEQ ID NO: 3154890 - DNA, 25 bp, Homo sapien
gttccccaaatgaacctgcttctcc

SEQ ID NO: 3154891 - DNA, 25 bp, Homo sapien
caaaggtaggccacataatacaatt

SEQ ID NO: 3154892 - DNA, 25 bp, Homo sapien
aaatcatgcagccacaaaggtaggc

SEQ ID NO: 3154893 - DNA, 25 bp, Homo sapien
gagcagagtctaacaaaaaatcatg

SEQ ID NO: 3154894 - DNA, 25 bp, Homo sapien
taagggctacctatgtctcaaaggg

SEQ ID NO: 3154895 - DNA, 25 bp, Homo sapien
taaagccctttaggacagtgctcag

SEQ ID NO: 3154896 - DNA, 25 bp, Homo sapien
tgaccttgggccaataggtacaccc

SEQ ID NO: 3154897 - DNA, 25 bp, Homo sapien
ccaaggcattatcagttacggcgtg

SEQ ID NO: 3154898 - DNA, 25 bp, Homo sapien
caaattagtttgggtagcaggatct

SEQ ID NO: 3154899 - DNA, 25 bp, Homo sapien
ctttattggtatgaactggagctgc

SEQ ID NO: 3154900 - DNA, 25 bp, Homo sapien
aaaatgtcttatcacccaattcaga

SEQ ID NO: 3154901 - DNA, 25 bp, Homo sapien
taactgatatggcagcgacaaatgc

SEQ ID NO: 3154902 - DNA, 25 bp, Homo sapien
tgacaagcatgtcattagtcccaag

SEQ ID NO: 3154903 - DNA, 25 bp, Homo sapien
ccagcacggtcaggcggttatagcg

SEQ ID NO: 3154904 - DNA, 25 bp, Homo sapien
aaggcaagcattgcaccagccagca

SEQ ID NO: 3154905 - DNA, 25 bp, Homo sapien
tcaggcggttatagcgcattgccat

SEQ ID NO: 3154906 - DNA, 25 bp, Homo sapien
cacaaataaggtgtaagccaaattc

SEQ ID NO: 3154907 - DNA, 25 bp, Homo sapien
aatttcagacaactatgcgagaggg

SEQ ID NO: 3154908 - DNA, 25 bp, Homo sapien
gatacacaaggaaaggatacacaag

SEQ ID NO: 3154909 - DNA, 25 bp, Homo sapien
taattcagcgaactcatgagaggga

SEQ ID NO: 3154910 - DNA, 25 bp, Homo sapien
tttgtcatcgattagttgtatacac

SEQ ID NO: 3154911 - DNA, 25 bp, Homo sapien
taatatcagtacactgggaggctaa

SEQ ID NO: 3154912 - DNA, 25 bp, Homo sapien
tacctataatatcagtacactggga

SEQ ID NO: 3154913 - DNA, 25 bp, Homo sapien
ggcacacatacctataatatcagta

SEQ ID NO: 3154914 - DNA, 25 bp, Homo sapien
aaaaggatgggcaggcacacatacc

SEQ ID NO: 3154915 - DNA, 25 bp, Homo sapien
tagataagagtacaaatgctaaaac

SEQ ID NO: 3154916 - DNA, 25 bp, Homo sapien
tatgtgtgcattatatagcttataa

SEQ ID NO: 3154917 - DNA, 25 bp, Homo sapien
cacactatagacaggtatgtaaaca

SEQ ID NO: 3154918 - DNA, 25 bp, Homo sapien
caggtgaatctaggcaaaagttata

SEQ ID NO: 3154919 - DNA, 25 bp, Homo sapien
ataaacacatatgatttaacagttg

SEQ ID NO: 3154920 - DNA, 25 bp, Homo sapien
taaacacatatgatttaacagttga

SEQ ID NO: 3154921 - DNA, 25 bp, Homo sapien
aataaacacatatgatttaacagtt

SEQ ID NO: 3154922 - DNA, 25 bp, Homo sapien
aaataaacacatatgatttaacagt

SEQ ID NO: 3154923 - DNA, 25 bp, Homo sapien
aaagctccgccgagaaatggccagt

SEQ ID NO: 3154924 - DNA, 25 bp, Homo sapien
agtaaccttgcacctagatcttggg

SEQ ID NO: 3154925 - DNA, 25 bp, Homo sapien
ggacacagtttggagaggctctcac

SEQ ID NO: 3154926 - DNA, 25 bp, Homo sapien
catctcagtaacaaggagctcagta

SEQ ID NO: 3154927 - DNA, 25 bp, Homo sapien
taaaccattaggtctagcccaggcc

SEQ ID NO: 3154928 - DNA, 25 bp, Homo sapien
ccaatggtccagttgaagatggcac

SEQ ID NO: 3154929 - DNA, 25 bp, Homo sapien
gagtgtgtatcacgaccaagggaac

SEQ ID NO: 3154930 - DNA, 25 bp, Homo sapien
tttccaggcatgttcagtcagaggc

SEQ ID NO: 3154931 - DNA, 25 bp, Homo sapien
cctcatcagggctcatctttaagcc

SEQ ID NO: 3154932 - DNA, 25 bp, Homo sapien
aacatagtatgtatagaccctgggg

SEQ ID NO: 3154933 - DNA, 25 bp, Homo sapien
ggatgactgtggtggcatagccaaa

SEQ ID NO: 3154934 - DNA, 25 bp, Homo sapien
tcccgaagcattctaatgccaaaaa

SEQ ID NO: 3154935 - DNA, 25 bp, Homo sapien
aatgaaagtaagcacaggaagcaaa

SEQ ID NO: 3154936 - DNA, 25 bp, Homo sapien
ttcaacatctcccggtccatttaaa

SEQ ID NO: 3154937 - DNA, 25 bp, Homo sapien
tcaacatctcccggtccatttaaaa

SEQ ID NO: 3154938 - DNA, 25 bp, Homo sapien
caacatctcccggtccatttaaaag

SEQ ID NO: 3154939 - DNA, 25 bp, Homo sapien
gagcgatcaccccattctgctaaga

SEQ ID NO: 3154940 - DNA, 25 bp, Homo sapien
caattgtagttagttgagagcgatc

SEQ ID NO: 3154941 - DNA, 25 bp, Homo sapien
gaatgttaatgtaagagcttgaaca

SEQ ID NO: 3154942 - DNA, 25 bp, Homo sapien
tctctagctgccaatacaattgtag

SEQ ID NO: 3154943 - DNA, 25 bp, Homo sapien
ttcattttaaacagtctcctctcaa

SEQ ID NO: 3154944 - DNA, 25 bp, Homo sapien
agagagcagctgaattatcagatgt

SEQ ID NO: 3154945 - DNA, 25 bp, Homo sapien
ttatcagatgtaaaacagtcttgca

SEQ ID NO: 3154946 - DNA, 25 bp, Homo sapien
tcttgcatatgaaggaatgctgtgg

SEQ ID NO: 3154947 - DNA, 25 bp, Homo sapien
ggcccacttcagtgtgtccagtgtt

SEQ ID NO: 3154948 - DNA, 25 bp, Homo sapien
caagctaagatgacaagtaccacgg

SEQ ID NO: 3154949 - DNA, 25 bp, Homo sapien
gcccaactgagcttggttacaagaa

SEQ ID NO: 3154950 - DNA, 25 bp, Homo sapien
caagcccggctagctacacattttt

SEQ ID NO: 3154951 - DNA, 25 bp, Homo sapien
tattaaacaccaaaatggccttcaa

SEQ ID NO: 3154952 - DNA, 25 bp, Homo sapien
tcaagaagaatatagggtacagcca

SEQ ID NO: 3154953 - DNA, 25 bp, Homo sapien
tgaacaactgtgaagaaggccacag

SEQ ID NO: 3154954 - DNA, 25 bp, Homo sapien
gaaaagtggcagcagtattccattc

SEQ ID NO: 3154955 - DNA, 25 bp, Homo sapien
gacaggcgcctcatataaaaccttg

SEQ ID NO: 3154956 - DNA, 25 bp, Homo sapien
caactctggcaatctgagagccaat

SEQ ID NO: 3154957 - DNA, 25 bp, Homo sapien
tggcaatctgagagccaataaaagg

SEQ ID NO: 3154958 - DNA, 25 bp, Homo sapien
tcccaactctggcaatctgagagcc

SEQ ID NO: 3154959 - DNA, 25 bp, Homo sapien
ctctggcaatctgagagccaataaa

SEQ ID NO: 3154960 - DNA, 25 bp, Homo sapien
tgtctcgtaggtagggagcctcaag

SEQ ID NO: 3154961 - DNA, 25 bp, Homo sapien
gccatactgctagaatggaccaggg

SEQ ID NO: 3154962 - DNA, 25 bp, Homo sapien
tttcacacgtcactctatggcatag

SEQ ID NO: 3154963 - DNA, 25 bp, Homo sapien
gctgtcatgataactcaccctggta

SEQ ID NO: 3154964 - DNA, 25 bp, Homo sapien
ccccgcagggcagttagtatggaag

SEQ ID NO: 3154965 - DNA, 25 bp, Homo sapien
agctcattaaatatccccgcagggc

SEQ ID NO: 3154966 - DNA, 25 bp, Homo sapien
aagtgtggctaacactgaatgtgcc

SEQ ID NO: 3154967 - DNA, 25 bp, Homo sapien
aatgtgccatgtgggggaccatgct

SEQ ID NO: 3154968 - DNA, 25 bp, Homo sapien
caaaggacactaggattatgtgaaa

SEQ ID NO: 3154969 - DNA, 25 bp, Homo sapien
aaacgacagggatatattatttgcc

SEQ ID NO: 3154970 - DNA, 25 bp, Homo sapien
aaatggcctgaactagacaactgca

SEQ ID NO: 3154971 - DNA, 25 bp, Homo sapien
ggcctagaaccaattcaagtctcaa

SEQ ID NO: 3154972 - DNA, 25 bp, Homo sapien
gtgtattataaactgctacccatga

SEQ ID NO: 3154973 - DNA, 25 bp, Homo sapien
tttaggccgggcgtaatctcagcac

SEQ ID NO: 3154974 - DNA, 25 bp, Homo sapien
aaattggtacacacgaacaatgctc

SEQ ID NO: 3154975 - DNA, 25 bp, Homo sapien
aacaatgctcacaaaacggctggga

SEQ ID NO: 3154976 - DNA, 25 bp, Homo sapien
gatccactgcgatgctatggcaaca

SEQ ID NO: 3154977 - DNA, 25 bp, Homo sapien
atcagagccaagcagagtggagcca

SEQ ID NO: 3154978 - DNA, 25 bp, Homo sapien
tcctagcaagcacaagtggtcccag

SEQ ID NO: 3154979 - DNA, 25 bp, Homo sapien
agccctgggaagaaactgcgttgcc

SEQ ID NO: 3154980 - DNA, 25 bp, Homo sapien
gagggaggaccctatcatcttggag

SEQ ID NO: 3154981 - DNA, 25 bp, Homo sapien
tgcttcagaaatccgctaggccagg

SEQ ID NO: 3154982 - DNA, 25 bp, Homo sapien
agagcccttcagcatttcacaaaag

SEQ ID NO: 3154983 - DNA, 25 bp, Homo sapien
gggagaaggaacatgctaaatagaa

SEQ ID NO: 3154984 - DNA, 25 bp, Homo sapien
tgagcaaagcagacactcagattag

SEQ ID NO: 3154985 - DNA, 25 bp, Homo sapien
cagattagggggagaggggtatgta

SEQ ID NO: 3154986 - DNA, 25 bp, Homo sapien
tgtagtaaaagtttcccagaagata

SEQ ID NO: 3154987 - DNA, 25 bp, Homo sapien
agcagacactcagattagggggaga

SEQ ID NO: 3154988 - DNA, 25 bp, Homo sapien
tactgcttggtattaggagaaactc

SEQ ID NO: 3154989 - DNA, 25 bp, Homo sapien
ttcagaagcactaaaaatggtggcc

SEQ ID NO: 3154990 - DNA, 25 bp, Homo sapien
tggaagcaagcgtcacagcattaat

SEQ ID NO: 3154991 - DNA, 25 bp, Homo sapien
gacaactgctgcttgagaaccataa

SEQ ID NO: 3154992 - DNA, 25 bp, Homo sapien
aattactgccaatcccgtgcacagg

SEQ ID NO: 3154993 - DNA, 25 bp, Homo sapien
gtgctatcattcttcctccaattac

SEQ ID NO: 3154994 - DNA, 25 bp, Homo sapien
ttccacccacggctacaccataggg

SEQ ID NO: 3154995 - DNA, 25 bp, Homo sapien
gtgccccacagttccacccacggct

SEQ ID NO: 3154996 - DNA, 25 bp, Homo sapien
ggcttcacaggacatattcagcaga

SEQ ID NO: 3154997 - DNA, 25 bp, Homo sapien
cagtgctggcaagcaacagtagaac

SEQ ID NO: 3154998 - DNA, 25 bp, Homo sapien
ttcagcagaatcagtacatatggtc

SEQ ID NO: 3154999 - DNA, 25 bp, Homo sapien
gatgaggcggccaattattcttcca

SEQ ID NO: 3155000 - DNA, 25 bp, Homo sapien
acgccaaaaaaacgatgcctcctat

SEQ ID NO: 3155001 - DNA, 25 bp, Homo sapien
gaatcagggcttataaatagtgcag

SEQ ID NO: 3155002 - DNA, 25 bp, Homo sapien
aaaaccagaatcagggcttataaat

SEQ ID NO: 3155003 - DNA, 25 bp, Homo sapien
caaaaaaacgatgcctcctatgatt

SEQ ID NO: 3155004 - DNA, 25 bp, Homo sapien
cagacataataatgggtcaaactca

SEQ ID NO: 3155005 - DNA, 25 bp, Homo sapien
actgtttactggctcagggaaatgt

SEQ ID NO: 3155006 - DNA, 25 bp, Homo sapien
gcagacagttcttgttgtgccatgt

SEQ ID NO: 3155007 - DNA, 25 bp, Homo sapien
aaaattgcatggtagaccccactgc

SEQ ID NO: 3155008 - DNA, 25 bp, Homo sapien
caatggagcctattgcagtagcgat

SEQ ID NO: 3155009 - DNA, 25 bp, Homo sapien
tgttgttagcctacctccactcagg

SEQ ID NO: 3155010 - DNA, 25 bp, Homo sapien
caacggtgctatattaggttctctg

SEQ ID NO: 3155011 - DNA, 25 bp, Homo sapien
gagccaagcagtagcagtttttgta

SEQ ID NO: 3155012 - DNA, 25 bp, Homo sapien
tagtatagcctcatccgcatgggta

SEQ ID NO: 3155013 - DNA, 25 bp, Homo sapien
taataggaaccctctacatgcctcc

SEQ ID NO: 3155014 - DNA, 25 bp, Homo sapien
tttctagccaggacaagctgattgg

SEQ ID NO: 3155015 - DNA, 25 bp, Homo sapien
taatgtgcctattgtcagcctacca

SEQ ID NO: 3155016 - DNA, 25 bp, Homo sapien
gagcactgaagcagtccagctccat

SEQ ID NO: 3155017 - DNA, 25 bp, Homo sapien
tctgcttgacgctaggagcactgaa

SEQ ID NO: 3155018 - DNA, 25 bp, Homo sapien
gcactgaagcagtccagctccatca

SEQ ID NO: 3155019 - DNA, 25 bp, Homo sapien
tcattgccttaaagcagtctgcttg

SEQ ID NO: 3155020 - DNA, 25 bp, Homo sapien
catcttgaagtcattgtccggtttc

SEQ ID NO: 3155021 - DNA, 25 bp, Homo sapien
tcattgtccggtttccgtagcagtt

SEQ ID NO: 3155022 - DNA, 25 bp, Homo sapien
actcaccatcttgaagtcattgtcc

SEQ ID NO: 3155023 - DNA, 25 bp, Homo sapien
tgaagtcattgtccggtttccgtag

SEQ ID NO: 3155024 - DNA, 25 bp, Homo sapien
catttagtgaatcagacaggctctc

SEQ ID NO: 3155025 - DNA, 25 bp, Homo sapien
tataagacaaggcacatggctagct

SEQ ID NO: 3155026 - DNA, 25 bp, Homo sapien
aagactttagacgtgccattgggca

SEQ ID NO: 3155027 - DNA, 25 bp, Homo sapien
tagaccttaagcctatgctgcagac

SEQ ID NO: 3155028 - DNA, 25 bp, Homo sapien
accaattgtcttaagtctggccaac

SEQ ID NO: 3155029 - DNA, 25 bp, Homo sapien
tgttcaaggtactgtaggaagttcc

SEQ ID NO: 3155030 - DNA, 25 bp, Homo sapien
aattccacaaggcatgtcccaggta

SEQ ID NO: 3155031 - DNA, 25 bp, Homo sapien
tctgctggaagtactcatgtatggg

SEQ ID NO: 3155032 - DNA, 25 bp, Homo sapien
gaccttttccatcagagcaagcatg

SEQ ID NO: 3155033 - DNA, 25 bp, Homo sapien
acctcacttagtggttgctggcaca

SEQ ID NO: 3155034 - DNA, 25 bp, Homo sapien
cttgctggctgaaggctatcctcag

SEQ ID NO: 3155035 - DNA, 25 bp, Homo sapien
tcaaagttcaactgaggtggcatct

SEQ ID NO: 3155036 - DNA, 25 bp, Homo sapien
tcctagtttggtgagtcaagagtcc

SEQ ID NO: 3155037 - DNA, 25 bp, Homo sapien
gcacagtttagctggaccctctact

SEQ ID NO: 3155038 - DNA, 25 bp, Homo sapien
cactggctgggaaattatagtcaga

SEQ ID NO: 3155039 - DNA, 25 bp, Homo sapien
aatcttccctaaagacactggctgg

SEQ ID NO: 3155040 - DNA, 25 bp, Homo sapien
acactgaatagttacagctgtgcag

SEQ ID NO: 3155041 - DNA, 25 bp, Homo sapien
tattttaaacgaatgaccagacact

SEQ ID NO: 3155042 - DNA, 25 bp, Homo sapien
tggttatggatcgtttacagcagtg

SEQ ID NO: 3155043 - DNA, 25 bp, Homo sapien
tctagatgaacagatgagacacgta

SEQ ID NO: 3155044 - DNA, 25 bp, Homo sapien
taattgtggccctagaagagaagat

SEQ ID NO: 3155045 - DNA, 25 bp, Homo sapien
tgtagagtgagaagtacccacccaa

SEQ ID NO: 3155046 - DNA, 25 bp, Homo sapien
tttagcacaaggaaccactgaaggt

SEQ ID NO: 3155047 - DNA, 25 bp, Homo sapien
tatcagatttctagacactggccac

SEQ ID NO: 3155048 - DNA, 25 bp, Homo sapien
tctctaattcccacgggtagacata

SEQ ID NO: 3155049 - DNA, 25 bp, Homo sapien
ttcccacgggtagacataattgttc

SEQ ID NO: 3155050 - DNA, 25 bp, Homo sapien
cataattgttccttgcccagtgata

SEQ ID NO: 3155051 - DNA, 25 bp, Homo sapien
ggtagacataattgttccttgccca

SEQ ID NO: 3155052 - DNA, 25 bp, Homo sapien
taacaggtcacatctaaaggatcag

SEQ ID NO: 3155053 - DNA, 25 bp, Homo sapien
tatgacctaactagagacccaggga

SEQ ID NO: 3155054 - DNA, 25 bp, Homo sapien
gaaaagcctgttgagtgaccagtac

SEQ ID NO: 3155055 - DNA, 25 bp, Homo sapien
gaaaacaagggagtttccagagtga

SEQ ID NO: 3155056 - DNA, 25 bp, Homo sapien
tatgttgaaccttgctcaaatccca

SEQ ID NO: 3155057 - DNA, 25 bp, Homo sapien
tgaagtcatgtatatggtcctggct

SEQ ID NO: 3155058 - DNA, 25 bp, Homo sapien
tacaagttatatgtgtctgctcaga

SEQ ID NO: 3155059 - DNA, 25 bp, Homo sapien
tcataaagagtttgaaaatgttccc

SEQ ID NO: 3155060 - DNA, 25 bp, Homo sapien
caagtaaggtgaagagtgtgcaaca

SEQ ID NO: 3155061 - DNA, 25 bp, Homo sapien
tgagagccaggtttatcgagagaaa

SEQ ID NO: 3155062 - DNA, 25 bp, Homo sapien
tccagaagacactgcgaaaggattt

SEQ ID NO: 3155063 - DNA, 25 bp, Homo sapien
gacgatgtgtaccatgagttccaga

SEQ ID NO: 3155064 - DNA, 25 bp, Homo sapien
tgactgaaagtcgagtaagaattat

SEQ ID NO: 3155065 - DNA, 25 bp, Homo sapien
tgcaaatgactgaaagtcgagtaag

SEQ ID NO: 3155066 - DNA, 25 bp, Homo sapien
actgaaagtcgagtaagaattattt

SEQ ID NO: 3155067 - DNA, 25 bp, Homo sapien
aatgactgaaagtcgagtaagaatt

SEQ ID NO: 3155068 - DNA, 25 bp, Homo sapien
tgtctacactgcaccttttccccag

SEQ ID NO: 3155069 - DNA, 25 bp, Homo sapien
tctacactgcaccttttccccagac

SEQ ID NO: 3155070 - DNA, 25 bp, Homo sapien
gtctacactgcaccttttccccaga

SEQ ID NO: 3155071 - DNA, 25 bp, Homo sapien
atgtgaagcagtgtttctaaccttt

SEQ ID NO: 3155072 - DNA, 25 bp, Homo sapien
attgttgcctcattacggagttttt

SEQ ID NO: 3155073 - DNA, 25 bp, Homo sapien
tggaaattggatgtgaagcagtgtt

SEQ ID NO: 3155074 - DNA, 25 bp, Homo sapien
cctcattacggagtttttagagctt

SEQ ID NO: 3155075 - DNA, 25 bp, Homo sapien
tgtacccatcacctacttttagtga

SEQ ID NO: 3155076 - DNA, 25 bp, Homo sapien
tttactcaacaactctcgtttcatc

SEQ ID NO: 3155077 - DNA, 25 bp, Homo sapien
tatttctaaatatgattaccgcagt

SEQ ID NO: 3155078 - DNA, 25 bp, Homo sapien
tcgtttcatctatatcttaatctcc

SEQ ID NO: 3155079 - DNA, 25 bp, Homo sapien
ccagtatacagagtacttacaatgt

SEQ ID NO: 3155080 - DNA, 25 bp, Homo sapien
ctccagtatacagagtacttacaat

SEQ ID NO: 3155081 - DNA, 25 bp, Homo sapien
agtatacagagtacttacaatgtaa

SEQ ID NO: 3155082 - DNA, 25 bp, Homo sapien
tccagtatacagagtacttacaatg

SEQ ID NO: 3155083 - DNA, 25 bp, Homo sapien
accactgtatgatcttgtagatctt

SEQ ID NO: 3155084 - DNA, 25 bp, Homo sapien
tgcctccagtatgggctctgttatt

SEQ ID NO: 3155085 - DNA, 25 bp, Homo sapien
cttgaaaacggaatcatcttgaatg

SEQ ID NO: 3155086 - DNA, 25 bp, Homo sapien
ttgccattttgcctccagtatgggc

SEQ ID NO: 3155087 - DNA, 25 bp, Homo sapien
ctcggcttgcggctgccggtttaaa

SEQ ID NO: 3155088 - DNA, 25 bp, Homo sapien
ggcgcaatcacggactcggcttgcg

SEQ ID NO: 3155089 - DNA, 25 bp, Homo sapien
tcggcttgcggctgccggtttaaaa

SEQ ID NO: 3155090 - DNA, 25 bp, Homo sapien
tcacggactcggcttgcggctgccg

SEQ ID NO: 3155091 - DNA, 25 bp, Homo sapien
aaaatctaagctggcgtcggcagtg

SEQ ID NO: 3155092 - DNA, 25 bp, Homo sapien
gaaatccatgcaaattagggtcctg

SEQ ID NO: 3155093 - DNA, 25 bp, Homo sapien
gaggaaacacgaatgatgccactgg

SEQ ID NO: 3155094 - DNA, 25 bp, Homo sapien
cccgaagataagtagtagtcacacg

SEQ ID NO: 3155095 - DNA, 25 bp, Homo sapien
ggacagcattttctacgcagcatcg

SEQ ID NO: 3155096 - DNA, 25 bp, Homo sapien
gcagcatcgattgacccatgagaaa

SEQ ID NO: 3155097 - DNA, 25 bp, Homo sapien
tcaacacaggcgatggagcagtctt

SEQ ID NO: 3155098 - DNA, 25 bp, Homo sapien
ccaatgggaagcctctagcgggtat

SEQ ID NO: 3155099 - DNA, 25 bp, Homo sapien
cagccatatcagataggtagctaca

SEQ ID NO: 3155100 - DNA, 25 bp, Homo sapien
tattacatatgaggaggcgaaagat

SEQ ID NO: 3155101 - DNA, 25 bp, Homo sapien
gtcacagttttcactatcgagaaca

SEQ ID NO: 3155102 - DNA, 25 bp, Homo sapien
tatacagggctcaacataatccatg

SEQ ID NO: 3155103 - DNA, 25 bp, Homo sapien
ttaaactctccattgctgcctttgg

SEQ ID NO: 3155104 - DNA, 25 bp, Homo sapien
tcccaggatgtaactgacatttttg

SEQ ID NO: 3155105 - DNA, 25 bp, Homo sapien
gatacttgttcgtcttttctgtcca

SEQ ID NO: 3155106 - DNA, 25 bp, Homo sapien
gaacctttatgtgttcgtgaaaaca

SEQ ID NO: 3155107 - DNA, 25 bp, Homo sapien
ctccagttatgcctccatctgttct

SEQ ID NO: 3155108 - DNA, 25 bp, Homo sapien
tccagttatgcctccatctgttctc

SEQ ID NO: 3155109 - DNA, 25 bp, Homo sapien
tctccagttatgcctccatctgttc

SEQ ID NO: 3155110 - DNA, 25 bp, Homo sapien
cacaaaactcttgctgatgcacaag

SEQ ID NO: 3155111 - DNA, 25 bp, Homo sapien
ttaaggcaatgtggacgaagacagc

SEQ ID NO: 3155112 - DNA, 25 bp, Homo sapien
caagggtgtaggtggttaaggcaat

SEQ ID NO: 3155113 - DNA, 25 bp, Homo sapien
gatacaacaatactcttcccatgca

SEQ ID NO: 3155114 - DNA, 25 bp, Homo sapien
gacttgggttctcttacaatttgag

SEQ ID NO: 3155115 - DNA, 25 bp, Homo sapien
ttgggttctcttacaatttgagggc

SEQ ID NO: 3155116 - DNA, 25 bp, Homo sapien
tgggttctcttacaatttgagggct

SEQ ID NO: 3155117 - DNA, 25 bp, Homo sapien
cttgggttctcttacaatttgaggg

SEQ ID NO: 3155118 - DNA, 25 bp, Homo sapien
gtctctctttctatactggtctcct

SEQ ID NO: 3155119 - DNA, 25 bp, Homo sapien
ccactgtgatcaggacaggttttct

SEQ ID NO: 3155120 - DNA, 25 bp, Homo sapien
ccagggcagaatctgaatctagttt

SEQ ID NO: 3155121 - DNA, 25 bp, Homo sapien
ttatgtcacctatgatgttttacac

SEQ ID NO: 3155122 - DNA, 25 bp, Homo sapien
ggctgtaggtacatgtcatggtcac

SEQ ID NO: 3155123 - DNA, 25 bp, Homo sapien
cactcttccttactgggaggctgta

SEQ ID NO: 3155124 - DNA, 25 bp, Homo sapien
gtttccaacagaagaggcgatgggt

SEQ ID NO: 3155125 - DNA, 25 bp, Homo sapien
cagccatcttggacctcaagtctaa

SEQ ID NO: 3155126 - DNA, 25 bp, Homo sapien
tatggcacaaatggcctggcttgct

SEQ ID NO: 3155127 - DNA, 25 bp, Homo sapien
tatcatacttcttccgtcttgaggc

SEQ ID NO: 3155128 - DNA, 25 bp, Homo sapien
gcttgcttcttgtagggtatcatac

SEQ ID NO: 3155129 - DNA, 25 bp, Homo sapien
tctgggcttcttccatattggcatg

SEQ ID NO: 3155130 - DNA, 25 bp, Homo sapien
tatatgaaagttcttcgcttctctc

SEQ ID NO: 3155131 - DNA, 25 bp, Homo sapien
cccaaatccaggtcagcaaattcca

SEQ ID NO: 3155132 - DNA, 25 bp, Homo sapien
aaaacccaaatccaggtcagcaaat

SEQ ID NO: 3155133 - DNA, 25 bp, Homo sapien
tatgaaagttcttcgcttctctctc

SEQ ID NO: 3155134 - DNA, 25 bp, Homo sapien
gatctctaccatcttgttactttca

SEQ ID NO: 3155135 - DNA, 25 bp, Homo sapien
tggatctctaccatcttgttacttt

SEQ ID NO: 3155136 - DNA, 25 bp, Homo sapien
ggatctctaccatcttgttactttc

SEQ ID NO: 3155137 - DNA, 25 bp, Homo sapien
ctggatctctaccatcttgttactt

SEQ ID NO: 3155138 - DNA, 25 bp, Homo sapien
tgacccttatttccctcccataggc

SEQ ID NO: 3155139 - DNA, 25 bp, Homo sapien
tctagccctatactccaagttttgg

SEQ ID NO: 3155140 - DNA, 25 bp, Homo sapien
cctcttgactgcctccacacatcat

SEQ ID NO: 3155141 - DNA, 25 bp, Homo sapien
ccacacatcatttgcagagaggtct

SEQ ID NO: 3155142 - DNA, 25 bp, Homo sapien
cgtcttaatcaaagactcgtacact

SEQ ID NO: 3155143 - DNA, 25 bp, Homo sapien
gactcgtacactctatgcttactat

SEQ ID NO: 3155144 - DNA, 25 bp, Homo sapien
taatcaaagactcgtacactctatg

SEQ ID NO: 3155145 - DNA, 25 bp, Homo sapien
tcaaagactcgtacactctatgctt

SEQ ID NO: 3155146 - DNA, 25 bp, Homo sapien
ttagtttgacaacagattgccacag

SEQ ID NO: 3155147 - DNA, 25 bp, Homo sapien
gattgccacagaccataagatgttt

SEQ ID NO: 3155148 - DNA, 25 bp, Homo sapien
gttttcaggataatccatgtaaatc

SEQ ID NO: 3155149 - DNA, 25 bp, Homo sapien
tgtgctggtacatcagtaaccttag

SEQ ID NO: 3155150 - DNA, 25 bp, Homo sapien
tctgttttaacacatgaggcattcc

SEQ ID NO: 3155151 - DNA, 25 bp, Homo sapien
atagtttgccgaaaatagttctgcc

SEQ ID NO: 3155152 - DNA, 25 bp, Homo sapien
cagtgctgaatgtaggtaggacaca

SEQ ID NO: 3155153 - DNA, 25 bp, Homo sapien
tgagcatcatggatctctgtcagct

SEQ ID NO: 3155154 - DNA, 25 bp, Homo sapien
aaaatccaaagggtctctcggagag

SEQ ID NO: 3155155 - DNA, 25 bp, Homo sapien
tccacataggcatgatcggttccag

SEQ ID NO: 3155156 - DNA, 25 bp, Homo sapien
tcccctcggatgaggcggtgtggaa

SEQ ID NO: 3155157 - DNA, 25 bp, Homo sapien
gttccagctggagcgccaccgctag

SEQ ID NO: 3155158 - DNA, 25 bp, Homo sapien
gaaggtctgcgatcctccttcgcac

SEQ ID NO: 3155159 - DNA, 25 bp, Homo sapien
tgtgcggggtcaacgtggatcgcag

SEQ ID NO: 3155160 - DNA, 25 bp, Homo sapien
tccttcgcacctcggcttgtgcggg

SEQ ID NO: 3155161 - DNA, 25 bp, Homo sapien
gcgaaggtctgcgatcctccttcgc

SEQ ID NO: 3155162 - DNA, 25 bp, Homo sapien
ccttggaacaggctatgctaatctt

SEQ ID NO: 3155163 - DNA, 25 bp, Homo sapien
atccttggaacaggctatgctaatc

SEQ ID NO: 3155164 - DNA, 25 bp, Homo sapien
gtgtgtcatccttggaacaggctat

SEQ ID NO: 3155165 - DNA, 25 bp, Homo sapien
tgtcatccttggaacaggctatgct

SEQ ID NO: 3155166 - DNA, 25 bp, Homo sapien
cacttggcctgatgtcttggctcaa

SEQ ID NO: 3155167 - DNA, 25 bp, Homo sapien
ggtcagacccctcactgcggtatct

SEQ ID NO: 3155168 - DNA, 25 bp, Homo sapien
tctcgtttgggtttgcagctccttg

SEQ ID NO: 3155169 - DNA, 25 bp, Homo sapien
taacttctcattcctagccagagcc

SEQ ID NO: 3155170 - DNA, 25 bp, Homo sapien
gaactctatttcaataaactcgtac

SEQ ID NO: 3155171 - DNA, 25 bp, Homo sapien
tacagattctgcgagagtggcttaa

SEQ ID NO: 3155172 - DNA, 25 bp, Homo sapien
tgtcctggacggagaactctatttc

SEQ ID NO: 3155173 - DNA, 25 bp, Homo sapien
cacagaggtaatacctgtcctggac

SEQ ID NO: 3155174 - DNA, 25 bp, Homo sapien
tagtaagggctctagaattgggtct

SEQ ID NO: 3155175 - DNA, 25 bp, Homo sapien
taagggctctagaattgggtctagc

SEQ ID NO: 3155176 - DNA, 25 bp, Homo sapien
ctactatagtaagggctctagaatt

SEQ ID NO: 3155177 - DNA, 25 bp, Homo sapien
ctctagaattgggtctagcaaaggg

SEQ ID NO: 3155178 - DNA, 25 bp, Homo sapien
tccatcaatcatctgcagatcgttc

SEQ ID NO: 3155179 - DNA, 25 bp, Homo sapien
tctaaacctattctgtagtgtttca

SEQ ID NO: 3155180 - DNA, 25 bp, Homo sapien
tttcatctaaacctattctgtagtg

SEQ ID NO: 3155181 - DNA, 25 bp, Homo sapien
tgcagatcgttcaaagaccactttt

SEQ ID NO: 3155182 - DNA, 25 bp, Homo sapien
taaaagcatattctcataaggacca

SEQ ID NO: 3155183 - DNA, 25 bp, Homo sapien
tatttacagttcgagcaaaggcata

SEQ ID NO: 3155184 - DNA, 25 bp, Homo sapien
tcaaagttcacgatctgtaagtcct

SEQ ID NO: 3155185 - DNA, 25 bp, Homo sapien
caatccttattgttggaggaccaaa

SEQ ID NO: 3155186 - DNA, 25 bp, Homo sapien
gggccactaggatacgcccctcaat

SEQ ID NO: 3155187 - DNA, 25 bp, Homo sapien
tgtgccgaggcgggtcttccaaaac

SEQ ID NO: 3155188 - DNA, 25 bp, Homo sapien
actgagcctggctgtgccgaggcgg

SEQ ID NO: 3155189 - DNA, 25 bp, Homo sapien
caataaagcgttgaacgggaagcgg

SEQ ID NO: 3155190 - DNA, 25 bp, Homo sapien
tcagaaggagcggtgcccgacccca

SEQ ID NO: 3155191 - DNA, 25 bp, Homo sapien
gaccccaggcgtggagacagcagcc

SEQ ID NO: 3155192 - DNA, 25 bp, Homo sapien
ctgaggagccgccttagaccctggt

SEQ ID NO: 3155193 - DNA, 25 bp, Homo sapien
ggtgcctgtcagctcgtctgtccgc

SEQ ID NO: 3155194 - DNA, 25 bp, Homo sapien
ctcagcaggcgttcatcatttggtg

SEQ ID NO: 3155195 - DNA, 25 bp, Homo sapien
caatgctcagcaggcgttcatcatt

SEQ ID NO: 3155196 - DNA, 25 bp, Homo sapien
gctcagcaggcgttcatcatttggt

SEQ ID NO: 3155197 - DNA, 25 bp, Homo sapien
atgctcagcaggcgttcatcatttg

SEQ ID NO: 3155198 - DNA, 25 bp, Homo sapien
gaaagcacagaatcctaatagaagc

SEQ ID NO: 3155199 - DNA, 25 bp, Homo sapien
gcaagtatagctttcaggtgcctag

SEQ ID NO: 3155200 - DNA, 25 bp, Homo sapien
caacaagtgctatgaccgaggaaag

SEQ ID NO: 3155201 - DNA, 25 bp, Homo sapien
tagaagcatctaagtcagactagaa

SEQ ID NO: 3155202 - DNA, 25 bp, Homo sapien
tatcggatttcttgactttgaccac

SEQ ID NO: 3155203 - DNA, 25 bp, Homo sapien
tttgaccaccttaacctgcacaggg

SEQ ID NO: 3155204 - DNA, 25 bp, Homo sapien
tcgaagggcccatgcaatctgcctt

SEQ ID NO: 3155205 - DNA, 25 bp, Homo sapien
gcatctttggcatctaccacagcaa

SEQ ID NO: 3155206 - DNA, 25 bp, Homo sapien
tcatgacacaccactttaaaatcca

SEQ ID NO: 3155207 - DNA, 25 bp, Homo sapien
tcatgaagactaaggaaggatcact

SEQ ID NO: 3155208 - DNA, 25 bp, Homo sapien
tgaacacaggtcaaagaactgagaa

SEQ ID NO: 3155209 - DNA, 25 bp, Homo sapien
ctctagtttatgtagcttgtgcaca

SEQ ID NO: 3155210 - DNA, 25 bp, Homo sapien
tatcctggtgtactttctaagaaca

SEQ ID NO: 3155211 - DNA, 25 bp, Homo sapien
caaaggagctggatgaaaaaacaac

SEQ ID NO: 3155212 - DNA, 25 bp, Homo sapien
taatggctttgtggcttagcttcct

SEQ ID NO: 3155213 - DNA, 25 bp, Homo sapien
catcagtaagatgacaatggtctct

SEQ ID NO: 3155214 - DNA, 25 bp, Homo sapien
tcaaagtgtaaatcaaattcaggat

SEQ ID NO: 3155215 - DNA, 25 bp, Homo sapien
ttcttccggagatatcgctgattca

SEQ ID NO: 3155216 - DNA, 25 bp, Homo sapien
tgctgctggcaacccatttatatat

SEQ ID NO: 3155217 - DNA, 25 bp, Homo sapien
aagctgtgagctaacattgacaaaa

SEQ ID NO: 3155218 - DNA, 25 bp, Homo sapien
gatataattgattttacatatacat

SEQ ID NO: 3155219 - DNA, 25 bp, Homo sapien
cttaaagatataattgattttacat

SEQ ID NO: 3155220 - DNA, 25 bp, Homo sapien
agatataattgattttacatataca

SEQ ID NO: 3155221 - DNA, 25 bp, Homo sapien
aagatataattgattttacatatac

SEQ ID NO: 3155222 - DNA, 25 bp, Homo sapien
agcatcaagcctaaaatcagcagca

SEQ ID NO: 3155223 - DNA, 25 bp, Homo sapien
ctactggtggctgacatatgtgact

SEQ ID NO: 3155224 - DNA, 25 bp, Homo sapien
gccattcgaagcaaattaaaccacg

SEQ ID NO: 3155225 - DNA, 25 bp, Homo sapien
gggattcctacataagaccagcact

SEQ ID NO: 3155226 - DNA, 25 bp, Homo sapien
gagattgcatattcacagccttcca

SEQ ID NO: 3155227 - DNA, 25 bp, Homo sapien
ttttctgcaaaggcttccgcattcg

SEQ ID NO: 3155228 - DNA, 25 bp, Homo sapien
ccatcattatttcgatatcctgttc

SEQ ID NO: 3155229 - DNA, 25 bp, Homo sapien
taactcttggtattcatctactact

SEQ ID NO: 3155230 - DNA, 25 bp, Homo sapien
cacaaggaactctatctcagatagg

SEQ ID NO: 3155231 - DNA, 25 bp, Homo sapien
ttttcagatgccatgattgactgga

SEQ ID NO: 3155232 - DNA, 25 bp, Homo sapien
tcaatctgatctacctcctttagag

SEQ ID NO: 3155233 - DNA, 25 bp, Homo sapien
ggagcatttcctcataactgctcag

SEQ ID NO: 3155234 - DNA, 25 bp, Homo sapien
gaagggcctttatatgacctttggc

SEQ ID NO: 3155235 - DNA, 25 bp, Homo sapien
gacctttggccaagtccatgtggtt

SEQ ID NO: 3155236 - DNA, 25 bp, Homo sapien
gcaggcctcaatgcctctggaagaa

SEQ ID NO: 3155237 - DNA, 25 bp, Homo sapien
agagctacattcatgcactgcagaa

SEQ ID NO: 3155238 - DNA, 25 bp, Homo sapien
tggtcacatttttgtcatttctaat

SEQ ID NO: 3155239 - DNA, 25 bp, Homo sapien
attcttggtcacatttttgtcattt

SEQ ID NO: 3155240 - DNA, 25 bp, Homo sapien
tttttgtcatttctaatgaacatac

SEQ ID NO: 3155241 - DNA, 25 bp, Homo sapien
atttttgtcatttctaatgaacata

SEQ ID NO: 3155242 - DNA, 25 bp, Homo sapien
aaaaacattgttgaggtgactggcc

SEQ ID NO: 3155243 - DNA, 25 bp, Homo sapien
aaatcactgaatcgctgctgttgct

SEQ ID NO: 3155244 - DNA, 25 bp, Homo sapien
agtctccgggcaaaaagctctcgca

SEQ ID NO: 3155245 - DNA, 25 bp, Homo sapien
tgctgttgctgtttgactgccagaa

SEQ ID NO: 3155246 - DNA, 25 bp, Homo sapien
ctctcatattatattacagtgatta

SEQ ID NO: 3155247 - DNA, 25 bp, Homo sapien
agaagctaactactctttatgtaac

SEQ ID NO: 3155248 - DNA, 25 bp, Homo sapien
atgggcaagagcctataatttcagg

SEQ ID NO: 3155249 - DNA, 25 bp, Homo sapien
tgagtgtgtaagatctgaaagatct

SEQ ID NO: 3155250 - DNA, 25 bp, Homo sapien
tcattcttgatctttctagatacag

SEQ ID NO: 3155251 - DNA, 25 bp, Homo sapien
ttcttgatctttctagatacagaaa

SEQ ID NO: 3155252 - DNA, 25 bp, Homo sapien
cattcttgatctttctagatacaga

SEQ ID NO: 3155253 - DNA, 25 bp, Homo sapien
ttgatctttctagatacagaaatcc

SEQ ID NO: 3155254 - DNA, 25 bp, Homo sapien
tatcataatcctaattagtgtaaac

SEQ ID NO: 3155255 - DNA, 25 bp, Homo sapien
aaggcagagagtagttatcaaaata

SEQ ID NO: 3155256 - DNA, 25 bp, Homo sapien
aggcagagagtagttatcaaaataa

SEQ ID NO: 3155257 - DNA, 25 bp, Homo sapien
ggcagagagtagttatcaaaataaa

SEQ ID NO: 3155258 - DNA, 25 bp, Homo sapien
tctgagcaaagttccaacaaacctc

SEQ ID NO: 3155259 - DNA, 25 bp, Homo sapien
catgttgctaaaggcaaaagtagat

SEQ ID NO: 3155260 - DNA, 25 bp, Homo sapien
cagagatcatcaatccgtgtttaca

SEQ ID NO: 3155261 - DNA, 25 bp, Homo sapien
gctggtggtctgcaatacaggtttt

SEQ ID NO: 3155262 - DNA, 25 bp, Homo sapien
atttgaataaattttcaagatttgg

SEQ ID NO: 3155263 - DNA, 25 bp, Homo sapien
tgaataaattttcaagatttggaac

SEQ ID NO: 3155264 - DNA, 25 bp, Homo sapien
ttgaataaattttcaagatttggaa

SEQ ID NO: 3155265 - DNA, 25 bp, Homo sapien
attttcaagatttggaactccttct

SEQ ID NO: 3155266 - DNA, 25 bp, Homo sapien
tgtaatcaacagtacaaagaaacgt

SEQ ID NO: 3155267 - DNA, 25 bp, Homo sapien
atcaaatgaacattaccaccataag

SEQ ID NO: 3155268 - DNA, 25 bp, Homo sapien
aaatgtggccaagccaaaccaataa

SEQ ID NO: 3155269 - DNA, 25 bp, Homo sapien
gccaagccaaaccaataagacatag

SEQ ID NO: 3155270 - DNA, 25 bp, Homo sapien
caagagtcgaactctgatcatgacc

SEQ ID NO: 3155271 - DNA, 25 bp, Homo sapien
atggatgatgattgggtaaagtcag

SEQ ID NO: 3155272 - DNA, 25 bp, Homo sapien
gagcaaatctctatgaaatggatga

SEQ ID NO: 3155273 - DNA, 25 bp, Homo sapien
cagcttggcatatcggagcaaatct

SEQ ID NO: 3155274 - DNA, 25 bp, Homo sapien
taatctgtactctttagccactcca

SEQ ID NO: 3155275 - DNA, 25 bp, Homo sapien
tttccataatctgtactctttagcc

SEQ ID NO: 3155276 - DNA, 25 bp, Homo sapien
cataatctgtactctttagccactc

SEQ ID NO: 3155277 - DNA, 25 bp, Homo sapien
tccataatctgtactctttagccac

SEQ ID NO: 3155278 - DNA, 25 bp, Homo sapien
tattcagaatattaatcctcctaaa

SEQ ID NO: 3155279 - DNA, 25 bp, Homo sapien
cagcaaccaaattagatgatgaggt

SEQ ID NO: 3155280 - DNA, 25 bp, Homo sapien
tactcactgggaacacaattaggca

SEQ ID NO: 3155281 - DNA, 25 bp, Homo sapien
cattactaggttggctctaatcttg

SEQ ID NO: 3155282 - DNA, 25 bp, Homo sapien
tcaaatcacaggatgacgcaacatt

SEQ ID NO: 3155283 - DNA, 25 bp, Homo sapien
aatgcaaccatttgttgcttgtcta

SEQ ID NO: 3155284 - DNA, 25 bp, Homo sapien
tgttgcttgtctacctatgatctgg

SEQ ID NO: 3155285 - DNA, 25 bp, Homo sapien
ccatttgttgcttgtctacctatga

SEQ ID NO: 3155286 - DNA, 25 bp, Homo sapien
tgcttgtctacctatgatctggaag

SEQ ID NO: 3155287 - DNA, 25 bp, Homo sapien
gctttaaagatcaggtataccttcc

SEQ ID NO: 3155288 - DNA, 25 bp, Homo sapien
ttcttaaggatggaataacagggtc

SEQ ID NO: 3155289 - DNA, 25 bp, Homo sapien
ggtgtagcaccattaagtaaaccaa

SEQ ID NO: 3155290 - DNA, 25 bp, Homo sapien
agagttcctcaacagtgggagactg

SEQ ID NO: 3155291 - DNA, 25 bp, Homo sapien
catatagtcgggataaataatccat

SEQ ID NO: 3155292 - DNA, 25 bp, Homo sapien
tcatatagtcgggataaataatcca

SEQ ID NO: 3155293 - DNA, 25 bp, Homo sapien
atatagtcgggataaataatccatg

SEQ ID NO: 3155294 - DNA, 25 bp, Homo sapien
tatagtcgggataaataatccatgt

SEQ ID NO: 3155295 - DNA, 25 bp, Homo sapien
tcttgctttctttagttgtgccagt

SEQ ID NO: 3155296 - DNA, 25 bp, Homo sapien
gataatgaactgacatgcctaagct

SEQ ID NO: 3155297 - DNA, 25 bp, Homo sapien
tgaatacacaatcgctgtcacagtc

SEQ ID NO: 3155298 - DNA, 25 bp, Homo sapien
aatcaagccaacgttttagacctct

SEQ ID NO: 3155299 - DNA, 25 bp, Homo sapien
ggatctacctccaccttgcttaaga

SEQ ID NO: 3155300 - DNA, 25 bp, Homo sapien
atccttgcacagggacaatgctcat

SEQ ID NO: 3155301 - DNA, 25 bp, Homo sapien
tatagaacatttcacaaattagtgt

SEQ ID NO: 3155302 - DNA, 25 bp, Homo sapien
ccttgcacagggacaatgctcatct

SEQ ID NO: 3155303 - DNA, 25 bp, Homo sapien
tagaacatttcacaaattagtgtgt

SEQ ID NO: 3155304 - DNA, 25 bp, Homo sapien
ttgataaacccattacacgttgaaa

SEQ ID NO: 3155305 - DNA, 25 bp, Homo sapien
catgttaccaaggcttgtctcgacc

SEQ ID NO: 3155306 - DNA, 25 bp, Homo sapien
tttgataaacccattacacgttgaa

SEQ ID NO: 3155307 - DNA, 25 bp, Homo sapien
gcctatatcccttatcagcaagtga

SEQ ID NO: 3155308 - DNA, 25 bp, Homo sapien
tcacgactctttggaatcaacaagg

SEQ ID NO: 3155309 - DNA, 25 bp, Homo sapien
actgaaacatcaatcctgtgggaaa

SEQ ID NO: 3155310 - DNA, 25 bp, Homo sapien
caggatctcattaggttgacaaggc

SEQ ID NO: 3155311 - DNA, 25 bp, Homo sapien
tggctacctgaagctcaagggaata

SEQ ID NO: 3155312 - DNA, 25 bp, Homo sapien
caaggctggacattaaagtggcaaa

SEQ ID NO: 3155313 - DNA, 25 bp, Homo sapien
caaacagggatcacgctggagctac

SEQ ID NO: 3155314 - DNA, 25 bp, Homo sapien
ggagctactagctagccaatctgaa

SEQ ID NO: 3155315 - DNA, 25 bp, Homo sapien
caatcttgtattccctgaaaactcc

SEQ ID NO: 3155316 - DNA, 25 bp, Homo sapien
gttaaaactaattatcaagctgaat

SEQ ID NO: 3155317 - DNA, 25 bp, Homo sapien
tacttaatcactggctttgtgagtg

SEQ ID NO: 3155318 - DNA, 25 bp, Homo sapien
ggctttgtgagtgctcagaatgaaa

SEQ ID NO: 3155319 - DNA, 25 bp, Homo sapien
tctctgtttcctgtttgacagcact

SEQ ID NO: 3155320 - DNA, 25 bp, Homo sapien
catagaacgggactgaaagggacct

SEQ ID NO: 3155321 - DNA, 25 bp, Homo sapien
gaaactacacagatccatagaacgg

SEQ ID NO: 3155322 - DNA, 25 bp, Homo sapien
taaagtcgcctggtgatatcgctag

SEQ ID NO: 3155323 - DNA, 25 bp, Homo sapien
tgaggaccacgttagcatattagcc

SEQ ID NO: 3155324 - DNA, 25 bp, Homo sapien
gatgactgagatctgcgattccctg

SEQ ID NO: 3155325 - DNA, 25 bp, Homo sapien
tagaagtagatccagttaatttccc

SEQ ID NO: 3155326 - DNA, 25 bp, Homo sapien
gacatgtttcccatatccaacaggg

SEQ ID NO: 3155327 - DNA, 25 bp, Homo sapien
gaacactgagcttatttagactaga

SEQ ID NO: 3155328 - DNA, 25 bp, Homo sapien
cttatcaaatttggtcctgtcagca

SEQ ID NO: 3155329 - DNA, 25 bp, Homo sapien
tatcaaatttggtcctgtcagcaac

SEQ ID NO: 3155330 - DNA, 25 bp, Homo sapien
ttatcaaatttggtcctgtcagcaa

SEQ ID NO: 3155331 - DNA, 25 bp, Homo sapien
tttaatttagtacagagaaaggcca

SEQ ID NO: 3155332 - DNA, 25 bp, Homo sapien
cagattcgattcagttggaaagaca

SEQ ID NO: 3155333 - DNA, 25 bp, Homo sapien
gacatggttaatgcttaagagagcc

SEQ ID NO: 3155334 - DNA, 25 bp, Homo sapien
ccacaaactgctgttagaaaactaa

SEQ ID NO: 3155335 - DNA, 25 bp, Homo sapien
catagttccaggcatactttgatgt

SEQ ID NO: 3155336 - DNA, 25 bp, Homo sapien
agttcacttagtacctgttcaaaga

SEQ ID NO: 3155337 - DNA, 25 bp, Homo sapien
tacttatgaagtcctgttctgccag

SEQ ID NO: 3155338 - DNA, 25 bp, Homo sapien
tctgccagacataggggctccagtt

SEQ ID NO: 3155339 - DNA, 25 bp, Homo sapien
ctgcaaaaattattcaggcacttta

SEQ ID NO: 3155340 - DNA, 25 bp, Homo sapien
gcaaaaattattcaggcactttaca

SEQ ID NO: 3155341 - DNA, 25 bp, Homo sapien
aggcactttacataataaaagacca

SEQ ID NO: 3155342 - DNA, 25 bp, Homo sapien
tacataataaaagaccaacaatttg

SEQ ID NO: 3155343 - DNA, 25 bp, Homo sapien
cgtgataatgttcctccatccaggt

SEQ ID NO: 3155344 - DNA, 25 bp, Homo sapien
caggcagtggtgtgccacaattatg

SEQ ID NO: 3155345 - DNA, 25 bp, Homo sapien
ccacaattatgttgccgtgataatg

SEQ ID NO: 3155346 - DNA, 25 bp, Homo sapien
agatgaaacaggcagtggtgtgcca

SEQ ID NO: 3155347 - DNA, 25 bp, Homo sapien
cacatgatgactcattttgactaac

SEQ ID NO: 3155348 - DNA, 25 bp, Homo sapien
tgcaattaggttgttcagctctggc

SEQ ID NO: 3155349 - DNA, 25 bp, Homo sapien
cagctctggctcaatgcagcgaaat

SEQ ID NO: 3155350 - DNA, 25 bp, Homo sapien
cacattttgtgcagtccacacatga

SEQ ID NO: 3155351 - DNA, 25 bp, Homo sapien
agttggaattataggcatgtgctac

SEQ ID NO: 3155352 - DNA, 25 bp, Homo sapien
gagtagttggaattataggcatgtg

SEQ ID NO: 3155353 - DNA, 25 bp, Homo sapien
gaattataggcatgtgctaccacgc

SEQ ID NO: 3155354 - DNA, 25 bp, Homo sapien
gtagttggaattataggcatgtgct

SEQ ID NO: 3155355 - DNA, 25 bp, Homo sapien
aaagagggaggataggcatttccat

SEQ ID NO: 3155356 - DNA, 25 bp, Homo sapien
taggttcaaaacgatccacggattc

SEQ ID NO: 3155357 - DNA, 25 bp, Homo sapien
gcacctataggatccctccgggtaa

SEQ ID NO: 3155358 - DNA, 25 bp, Homo sapien
caaaatacaatcaaggccgtgaact

SEQ ID NO: 3155359 - DNA, 25 bp, Homo sapien
ggtgtatgctttatccaggtctcca

SEQ ID NO: 3155360 - DNA, 25 bp, Homo sapien
tcctctgataagtttggtgtatgct

SEQ ID NO: 3155361 - DNA, 25 bp, Homo sapien
ccacgacgctcagcatttttgaaga

SEQ ID NO: 3155362 - DNA, 25 bp, Homo sapien
tctgcaagtccagcaaattcttcaa

SEQ ID NO: 3155363 - DNA, 25 bp, Homo sapien
tttccatcataaccacatccctggg

SEQ ID NO: 3155364 - DNA, 25 bp, Homo sapien
gactgaaggtgatctgtgtattttt

SEQ ID NO: 3155365 - DNA, 25 bp, Homo sapien
atggtgaaagttttccatcataacc

SEQ ID NO: 3155366 - DNA, 25 bp, Homo sapien
gattttcaatcgagaaagagttgca

SEQ ID NO: 3155367 - DNA, 25 bp, Homo sapien
tttcaagaggttgtcctaaagagta

SEQ ID NO: 3155368 - DNA, 25 bp, Homo sapien
cgcgctattttactctaacttcaag

SEQ ID NO: 3155369 - DNA, 25 bp, Homo sapien
ctaacttcaagttaagagcttataa

SEQ ID NO: 3155370 - DNA, 25 bp, Homo sapien
acttcaagttaagagcttataaaag

SEQ ID NO: 3155371 - DNA, 25 bp, Homo sapien
tgagtcaccgcgctattttactcta

SEQ ID NO: 3155372 - DNA, 25 bp, Homo sapien
tcctaggaaagctcaaccaatttat

SEQ ID NO: 3155373 - DNA, 25 bp, Homo sapien
ttagtagtgattcagccccttgccc

SEQ ID NO: 3155374 - DNA, 25 bp, Homo sapien
acagtgtatgaggttgctacttcac

SEQ ID NO: 3155375 - DNA, 25 bp, Homo sapien
tatatacaaactgcttcctaggaaa

SEQ ID NO: 3155376 - DNA, 25 bp, Homo sapien
taatattgtagagttccttgtaatc

SEQ ID NO: 3155377 - DNA, 25 bp, Homo sapien
tacaaagtagtgtataatcaccatg

SEQ ID NO: 3155378 - DNA, 25 bp, Homo sapien
gaaacaatggctaagacctgcattt

SEQ ID NO: 3155379 - DNA, 25 bp, Homo sapien
caatcacttattaacatacttctga

SEQ ID NO: 3155380 - DNA, 25 bp, Homo sapien
ccttaatgactttacgaagttcttg

SEQ ID NO: 3155381 - DNA, 25 bp, Homo sapien
tgcaagttggtaacttacttcctcc

SEQ ID NO: 3155382 - DNA, 25 bp, Homo sapien
tcctttccagggtactccttaatga

SEQ ID NO: 3155383 - DNA, 25 bp, Homo sapien
tgttaaatgcaagttggtaacttac

SEQ ID NO: 3155384 - DNA, 25 bp, Homo sapien
tctggagccagattatgaacccatc

SEQ ID NO: 3155385 - DNA, 25 bp, Homo sapien
taaggatctttaagtcagatggtca

SEQ ID NO: 3155386 - DNA, 25 bp, Homo sapien
aatctggtctgtactctaatggaac

SEQ ID NO: 3155387 - DNA, 25 bp, Homo sapien
taatgcctcaccataatatagcaga

SEQ ID NO: 3155388 - DNA, 25 bp, Homo sapien
taacagcgagctatcaaaccttcaa

SEQ ID NO: 3155389 - DNA, 25 bp, Homo sapien
taacaccagatccaggataacagcg

SEQ ID NO: 3155390 - DNA, 25 bp, Homo sapien
catcttgcatggagtgccacaccac

SEQ ID NO: 3155391 - DNA, 25 bp, Homo sapien
ccttcaaagtgcttatactggcgta

SEQ ID NO: 3155392 - DNA, 25 bp, Homo sapien
taagttagtatgcaacctatagggc

SEQ ID NO: 3155393 - DNA, 25 bp, Homo sapien
taggacaaccactcaaacacaagca

SEQ ID NO: 3155394 - DNA, 25 bp, Homo sapien
gaaaatttcccatccagtcattgag

SEQ ID NO: 3155395 - DNA, 25 bp, Homo sapien
caaatgcattgctcataggacaacc

SEQ ID NO: 3155396 - DNA, 25 bp, Homo sapien
tactagtcacataatcctcaaaaat

SEQ ID NO: 3155397 - DNA, 25 bp, Homo sapien
actagtcacataatcctcaaaaatc

SEQ ID NO: 3155398 - DNA, 25 bp, Homo sapien
ttcacatttattactagtcacataa

SEQ ID NO: 3155399 - DNA, 25 bp, Homo sapien
tttcacatttattactagtcacata

SEQ ID NO: 3155400 - DNA, 25 bp, Homo sapien
cagcatatgatagacctaaaaatat

SEQ ID NO: 3155401 - DNA, 25 bp, Homo sapien
gacagcatatgatagacctaaaaat

SEQ ID NO: 3155402 - DNA, 25 bp, Homo sapien
aagacagcatatgatagacctaaaa

SEQ ID NO: 3155403 - DNA, 25 bp, Homo sapien
agcatatgatagacctaaaaatatt

SEQ ID NO: 3155404 - DNA, 25 bp, Homo sapien
acaatacttgtgagaggcgttcgaa

SEQ ID NO: 3155405 - DNA, 25 bp, Homo sapien
gttcgaagcagagcaaccccatctt

SEQ ID NO: 3155406 - DNA, 25 bp, Homo sapien
ccaagatcgcaaggagaatgacctc

SEQ ID NO: 3155407 - DNA, 25 bp, Homo sapien
caggaggctgggtattctaagtcac

SEQ ID NO: 3155408 - DNA, 25 bp, Homo sapien
aagtaatctaaaattcagcccctga

SEQ ID NO: 3155409 - DNA, 25 bp, Homo sapien
cataatacttaaagtaatctaaaat

SEQ ID NO: 3155410 - DNA, 25 bp, Homo sapien
gagcggcggacgattagcggctcgc

SEQ ID NO: 3155411 - DNA, 25 bp, Homo sapien
cagtttgaaaatggcgcggagggac

SEQ ID NO: 3155412 - DNA, 25 bp, Homo sapien
gcctccagccgcattgccctcaggc

SEQ ID NO: 3155413 - DNA, 25 bp, Homo sapien
ctagctccttccgtccaggcacggg

SEQ ID NO: 3155414 - DNA, 25 bp, Homo sapien
cagagtctggcggtatcccagctga

SEQ ID NO: 3155415 - DNA, 25 bp, Homo sapien
gtaaacactccactgtcagagtctg

SEQ ID NO: 3155416 - DNA, 25 bp, Homo sapien
atattaatatactttctctctacag

SEQ ID NO: 3155417 - DNA, 25 bp, Homo sapien
tgatccagccttttcctaatattaa

SEQ ID NO: 3155418 - DNA, 25 bp, Homo sapien
cagataattttgattgccgaaggct

SEQ ID NO: 3155419 - DNA, 25 bp, Homo sapien
tcagtttcattaactctaggtataa

SEQ ID NO: 3155420 - DNA, 25 bp, Homo sapien
acgtgttggtctgaatgttctctca

SEQ ID NO: 3155421 - DNA, 25 bp, Homo sapien
cattattttctctactcaatcttgc

SEQ ID NO: 3155422 - DNA, 25 bp, Homo sapien
gagtttgtactacagcatgcaaatt

SEQ ID NO: 3155423 - DNA, 25 bp, Homo sapien
gatcagctgtttcacgtgcacattt

SEQ ID NO: 3155424 - DNA, 25 bp, Homo sapien
ccaacagtttgagtttatgagcata

SEQ ID NO: 3155425 - DNA, 25 bp, Homo sapien
tttgtactacagcatgcaaattctt

SEQ ID NO: 3155426 - DNA, 25 bp, Homo sapien
ttgaggaactggatatgaactgact

SEQ ID NO: 3155427 - DNA, 25 bp, Homo sapien
tcatcaatttgcatacgctggcgcc

SEQ ID NO: 3155428 - DNA, 25 bp, Homo sapien
cttcagagggaggaaccggttcatc

SEQ ID NO: 3155429 - DNA, 25 bp, Homo sapien
aaagcaatacttcttttcttgccac

SEQ ID NO: 3155430 - DNA, 25 bp, Homo sapien
ctgcttgctatagtctctcacccca

SEQ ID NO: 3155431 - DNA, 25 bp, Homo sapien
tgctatagtctctcaccccactttc

SEQ ID NO: 3155432 - DNA, 25 bp, Homo sapien
tatagtctctcaccccactttccat

SEQ ID NO: 3155433 - DNA, 25 bp, Homo sapien
agtctctcaccccactttccatcat

SEQ ID NO: 3155434 - DNA, 25 bp, Homo sapien
tacctatctcaatccctactatgca

SEQ ID NO: 3155435 - DNA, 25 bp, Homo sapien
tcacagcatacctatctcaatccct

SEQ ID NO: 3155436 - DNA, 25 bp, Homo sapien
tatctcaatccctactatgcaagta

SEQ ID NO: 3155437 - DNA, 25 bp, Homo sapien
caatccctactatgcaagtaaataa

SEQ ID NO: 3155438 - DNA, 25 bp, Homo sapien
taagtaagtaaagccacctaagcca

SEQ ID NO: 3155439 - DNA, 25 bp, Homo sapien
aactttctaagagactggtgttcaa

SEQ ID NO: 3155440 - DNA, 25 bp, Homo sapien
gtctcctgagatgaaaacggtaata

SEQ ID NO: 3155441 - DNA, 25 bp, Homo sapien
gaggacttgtgcttatagagaaaac

SEQ ID NO: 3155442 - DNA, 25 bp, Homo sapien
gtaagaagtttatgttcataaagta

SEQ ID NO: 3155443 - DNA, 25 bp, Homo sapien
agagatggtaagaagtttatgttca

SEQ ID NO: 3155444 - DNA, 25 bp, Homo sapien
taagaagtttatgttcataaagtac

SEQ ID NO: 3155445 - DNA, 25 bp, Homo sapien
gatggtaagaagtttatgttcataa

SEQ ID NO: 3155446 - DNA, 25 bp, Homo sapien
gacagtcgttctatctctcgttctc

SEQ ID NO: 3155447 - DNA, 25 bp, Homo sapien
aggacatcaggggaccgaccaccat

SEQ ID NO: 3155448 - DNA, 25 bp, Homo sapien
aaagcaactgacagtcgttctatct

SEQ ID NO: 3155449 - DNA, 25 bp, Homo sapien
tttatttctagactccagagaaagg

SEQ ID NO: 3155450 - DNA, 25 bp, Homo sapien
cagccttaggtcaaatgcatggcaa

SEQ ID NO: 3155451 - DNA, 25 bp, Homo sapien
aagttcctgtgtcatactgcatgga

SEQ ID NO: 3155452 - DNA, 25 bp, Homo sapien
tatattctgtttgtagcccaggcaa

SEQ ID NO: 3155453 - DNA, 25 bp, Homo sapien
tatgggacagcactcctctagagct

SEQ ID NO: 3155454 - DNA, 25 bp, Homo sapien
tctcgtatacgcttctccaggtctt

SEQ ID NO: 3155455 - DNA, 25 bp, Homo sapien
agctctcgtatacgcttctccaggt

SEQ ID NO: 3155456 - DNA, 25 bp, Homo sapien
ctctcgtatacgcttctccaggtct

SEQ ID NO: 3155457 - DNA, 25 bp, Homo sapien
aagctctcgtatacgcttctccagg

SEQ ID NO: 3155458 - DNA, 25 bp, Homo sapien
tcagcagtctcaagcacttcttctt

SEQ ID NO: 3155459 - DNA, 25 bp, Homo sapien
tcagttaattcttggcagagttttt

SEQ ID NO: 3155460 - DNA, 25 bp, Homo sapien
cccaagctctttatcagcagtctca

SEQ ID NO: 3155461 - DNA, 25 bp, Homo sapien
ttccaactgctgtgctaactgatct

SEQ ID NO: 3155462 - DNA, 25 bp, Homo sapien
gtttcttcaagatcctgcatttcag

SEQ ID NO: 3155463 - DNA, 25 bp, Homo sapien
cttcaagatcctgcatttcagagag

SEQ ID NO: 3155464 - DNA, 25 bp, Homo sapien
tgtttcttcaagatcctgcatttca

SEQ ID NO: 3155465 - DNA, 25 bp, Homo sapien
ttcttcaagatcctgcatttcagag

SEQ ID NO: 3155466 - DNA, 25 bp, Homo sapien
tttcttactgaaaatgctggcaatt

SEQ ID NO: 3155467 - DNA, 25 bp, Homo sapien
aaattttcttactgaaaatgctggc

SEQ ID NO: 3155468 - DNA, 25 bp, Homo sapien
cctcagtctcccataaaaattttct

SEQ ID NO: 3155469 - DNA, 25 bp, Homo sapien
tgaaaatgctggcaattcaacatga

SEQ ID NO: 3155470 - DNA, 25 bp, Homo sapien
ttttctttctggcataagttcaatt

SEQ ID NO: 3155471 - DNA, 25 bp, Homo sapien
tccttttctttctggcataagttca

SEQ ID NO: 3155472 - DNA, 25 bp, Homo sapien
tttctttctggcataagttcaattc

SEQ ID NO: 3155473 - DNA, 25 bp, Homo sapien
ccttttctttctggcataagttcaa

SEQ ID NO: 3155474 - DNA, 25 bp, Homo sapien
cttgtagagcaagatcttcgctgta

SEQ ID NO: 3155475 - DNA, 25 bp, Homo sapien
tcacgtgcgctataacttgtagagc

SEQ ID NO: 3155476 - DNA, 25 bp, Homo sapien
tgtatctaaacgagaaggtgacctg

SEQ ID NO: 3155477 - DNA, 25 bp, Homo sapien
tattatatgttggagtctctctagc

SEQ ID NO: 3155478 - DNA, 25 bp, Homo sapien
aattagtaaattcggccaagtctga

SEQ ID NO: 3155479 - DNA, 25 bp, Homo sapien
gacaatggacacaagatcttcagga

SEQ ID NO: 3155480 - DNA, 25 bp, Homo sapien
ccttcctagtaggtggtacgagagg

SEQ ID NO: 3155481 - DNA, 25 bp, Homo sapien
aaaattcagccattagcctatgagg

SEQ ID NO: 3155482 - DNA, 25 bp, Homo sapien
ttctagggcggccaccatggctcac

SEQ ID NO: 3155483 - DNA, 25 bp, Homo sapien
tagggcggccaccatggctcacgtc

SEQ ID NO: 3155484 - DNA, 25 bp, Homo sapien
acgtctgtaatcccagcactttggg

SEQ ID NO: 3155485 - DNA, 25 bp, Homo sapien
cgtctgtaatcccagcactttggga

SEQ ID NO: 3155486 - DNA, 25 bp, Homo sapien
gatgaatttctgaattgtaatcacc

SEQ ID NO: 3155487 - DNA, 25 bp, Homo sapien
tacgctgaagttcatctctttctct

SEQ ID NO: 3155488 - DNA, 25 bp, Homo sapien
aacattggactgtatatcttccata

SEQ ID NO: 3155489 - DNA, 25 bp, Homo sapien
tttctcttgtgatctgatgaatttc

SEQ ID NO: 3155490 - DNA, 25 bp, Homo sapien
taagtcagataacgcaagttctttt

SEQ ID NO: 3155491 - DNA, 25 bp, Homo sapien
ttagggcagataattcttcctgagc

SEQ ID NO: 3155492 - DNA, 25 bp, Homo sapien
cctttcttagggcagataattcttc

SEQ ID NO: 3155493 - DNA, 25 bp, Homo sapien
ttaagtcagataacgcaagttcttt

SEQ ID NO: 3155494 - DNA, 25 bp, Homo sapien
tttctctaattctgattttccaaaa

SEQ ID NO: 3155495 - DNA, 25 bp, Homo sapien
tttccaaaaagactcacttcttcaa

SEQ ID NO: 3155496 - DNA, 25 bp, Homo sapien
ttttccaaaaagactcacttcttca

SEQ ID NO: 3155497 - DNA, 25 bp, Homo sapien
ttaattcatatttttcgctttcaag

SEQ ID NO: 3155498 - DNA, 25 bp, Homo sapien
catggctaaatttttgagcttggac

SEQ ID NO: 3155499 - DNA, 25 bp, Homo sapien
gatgagtcaccagccacatggctaa

SEQ ID NO: 3155500 - DNA, 25 bp, Homo sapien
aatttgttctctaacgactctattg

SEQ ID NO: 3155501 - DNA, 25 bp, Homo sapien
tcaactgaccgctgtagctgctcat

SEQ ID NO: 3155502 - DNA, 25 bp, Homo sapien
ggaaagtcggtgctgatagtcatca

SEQ ID NO: 3155503 - DNA, 25 bp, Homo sapien
gtattttaatttgtgcttgggctga

SEQ ID NO: 3155504 - DNA, 25 bp, Homo sapien
tgcttgggctgattcaagttcacct

SEQ ID NO: 3155505 - DNA, 25 bp, Homo sapien
cattacatgagcctcctcatcctgt

SEQ ID NO: 3155506 - DNA, 25 bp, Homo sapien
tattagctaggttttcttgcaaatt

SEQ ID NO: 3155507 - DNA, 25 bp, Homo sapien
ttttctttatcaataacaccaatgg

SEQ ID NO: 3155508 - DNA, 25 bp, Homo sapien
caataacaccaatggtctttttcat

SEQ ID NO: 3155509 - DNA, 25 bp, Homo sapien
cagatgattcacactctgagatcat

SEQ ID NO: 3155510 - DNA, 25 bp, Homo sapien
cctacttcatcgagttctttgtgag

SEQ ID NO: 3155511 - DNA, 25 bp, Homo sapien
aggctgtttatctcacgatctcgat

SEQ ID NO: 3155512 - DNA, 25 bp, Homo sapien
taaaagcgatttctctagatcttcc

SEQ ID NO: 3155513 - DNA, 25 bp, Homo sapien
ctgcatcaagctggcgccggaggct

SEQ ID NO: 3155514 - DNA, 25 bp, Homo sapien
tgttatgtatttatgaactctgctc

SEQ ID NO: 3155515 - DNA, 25 bp, Homo sapien
tctcccatcgtgacacctctgttat

SEQ ID NO: 3155516 - DNA, 25 bp, Homo sapien
gcagccattaagctctcccatcgtg

SEQ ID NO: 3155517 - DNA, 25 bp, Homo sapien
ccatcgtgacacctctgttatgtat

SEQ ID NO: 3155518 - DNA, 25 bp, Homo sapien
taagcagaggaccttgggttcccaa

SEQ ID NO: 3155519 - DNA, 25 bp, Homo sapien
tgagagggctgctgaccatttggtc

SEQ ID NO: 3155520 - DNA, 25 bp, Homo sapien
cctcctgccatagggtcctgaatgt

SEQ ID NO: 3155521 - DNA, 25 bp, Homo sapien
ggaaattgtatttgccttctccact

SEQ ID NO: 3155522 - DNA, 25 bp, Homo sapien
ctttcttgaggttgtctgagtcttg

SEQ ID NO: 3155523 - DNA, 25 bp, Homo sapien
gacaagcgttgagccactaagcaga

SEQ ID NO: 3155524 - DNA, 25 bp, Homo sapien
gatccgtgtgtaccatctttgtgat

SEQ ID NO: 3155525 - DNA, 25 bp, Homo sapien
aattattggacagtctcacctcctg

SEQ ID NO: 3155526 - DNA, 25 bp, Homo sapien
tttgctgtgtgttctggggcaacct

SEQ ID NO: 3155527 - DNA, 25 bp, Homo sapien
ctgagtcttgggtctatgccttgaa

SEQ ID NO: 3155528 - DNA, 25 bp, Homo sapien
gattcctgttgcctttatatccaaa

SEQ ID NO: 3155529 - DNA, 25 bp, Homo sapien
agtggagaaggcaaatacaatttcc

SEQ ID NO: 3155530 - DNA, 25 bp, Homo sapien
tttggatataaaggcaacaggaatc

SEQ ID NO: 3155531 - DNA, 25 bp, Homo sapien
acattcaggaccctatggcaggagg

SEQ ID NO: 3155532 - DNA, 25 bp, Homo sapien
aggttgccccagaacacacagcaaa

SEQ ID NO: 3155533 - DNA, 25 bp, Homo sapien
caggaggtgagactgtccaataatt

SEQ ID NO: 3155534 - DNA, 25 bp, Homo sapien
gaccaaatggtcagcagccctctca

SEQ ID NO: 3155535 - DNA, 25 bp, Homo sapien
atcacaaagatggtacacacggatc

SEQ ID NO: 3155536 - DNA, 25 bp, Homo sapien
ttgggaacccaaggtcctctgctta

SEQ ID NO: 3155537 - DNA, 25 bp, Homo sapien
ttcaaggcatagacccaagactcag

SEQ ID NO: 3155538 - DNA, 25 bp, Homo sapien
tctgcttagtggctcaacgcttgtc

SEQ ID NO: 3155539 - DNA, 25 bp, Homo sapien
caagactcagacaacctcaagaaag

SEQ ID NO: 3155540 - DNA, 25 bp, Homo sapien
cagcacggttatgaagcatctgaaa

SEQ ID NO: 3155541 - DNA, 25 bp, Homo sapien
gaagttccagtcgaactgagctgct

SEQ ID NO: 3155542 - DNA, 25 bp, Homo sapien
ctcctctcagtgtcaatagaaagaa

SEQ ID NO: 3155543 - DNA, 25 bp, Homo sapien
cctcagcttgatgggctttgacctc

SEQ ID NO: 3155544 - DNA, 25 bp, Homo sapien
tggattgcttgagcgatctgcctgc

SEQ ID NO: 3155545 - DNA, 25 bp, Homo sapien
gtggattgcttgagcgatctgcctg

SEQ ID NO: 3155546 - DNA, 25 bp, Homo sapien
actcctgagcgtagttttttggtgg

SEQ ID NO: 3155547 - DNA, 25 bp, Homo sapien
ttgaactcctgagcgtagttttttg

SEQ ID NO: 3155548 - DNA, 25 bp, Homo sapien
caaggtttttcgaattcaattgctg

SEQ ID NO: 3155549 - DNA, 25 bp, Homo sapien
gttctctaagagatgacaagtcatt

SEQ ID NO: 3155550 - DNA, 25 bp, Homo sapien
gctgggtcataatatctttgcctga

SEQ ID NO: 3155551 - DNA, 25 bp, Homo sapien
cttctaatcgagacatggcttttgc

SEQ ID NO: 3155552 - DNA, 25 bp, Homo sapien
ataaaacaatgtgccaagacaattt

SEQ ID NO: 3155553 - DNA, 25 bp, Homo sapien
taaaacaatgtgccaagacaattta

SEQ ID NO: 3155554 - DNA, 25 bp, Homo sapien
aaacaatgtgccaagacaatttatc

SEQ ID NO: 3155555 - DNA, 25 bp, Homo sapien
aaaacaatgtgccaagacaatttat

SEQ ID NO: 3155556 - DNA, 25 bp, Homo sapien
catcactacgtttgcctgagaaatc

SEQ ID NO: 3155557 - DNA, 25 bp, Homo sapien
aacattacccactttcatcactacg

SEQ ID NO: 3155558 - DNA, 25 bp, Homo sapien
tcataatctcctagatagccatcta

SEQ ID NO: 3155559 - DNA, 25 bp, Homo sapien
gcaaagaatcaagcagtcaaatctg

SEQ ID NO: 3155560 - DNA, 25 bp, Homo sapien
gcaatgagacccttctggttgaata

SEQ ID NO: 3155561 - DNA, 25 bp, Homo sapien
catggtaccttatcaagagacggtc

SEQ ID NO: 3155562 - DNA, 25 bp, Homo sapien
tctacttcggaagcactgaactgtt

SEQ ID NO: 3155563 - DNA, 25 bp, Homo sapien
tatttaaagtaatgcctccatctgg

SEQ ID NO: 3155564 - DNA, 25 bp, Homo sapien
aagtaagattacttcagtacaattt

SEQ ID NO: 3155565 - DNA, 25 bp, Homo sapien
tatctgacaatatagctctgtggaa

SEQ ID NO: 3155566 - DNA, 25 bp, Homo sapien
tctgacaatatagctctgtggaact

SEQ ID NO: 3155567 - DNA, 25 bp, Homo sapien
tttatctgacaatatagctctgtgg

SEQ ID NO: 3155568 - DNA, 25 bp, Homo sapien
gaggttaagtgagaatgaaattctt

SEQ ID NO: 3155569 - DNA, 25 bp, Homo sapien
gaggtttttaactgtatgtctctca

SEQ ID NO: 3155570 - DNA, 25 bp, Homo sapien
ttatctctgtttgtagccaacaatg

SEQ ID NO: 3155571 - DNA, 25 bp, Homo sapien
gttttttcagtaggtctgactctga

SEQ ID NO: 3155572 - DNA, 25 bp, Homo sapien
acctggcctatctttcatactctta

SEQ ID NO: 3155573 - DNA, 25 bp, Homo sapien
aagcaattgtctttgcataagttga

SEQ ID NO: 3155574 - DNA, 25 bp, Homo sapien
ttgcataagttgacttaagacactt

SEQ ID NO: 3155575 - DNA, 25 bp, Homo sapien
ggcctatctttcatactcttaacct

SEQ ID NO: 3155576 - DNA, 25 bp, Homo sapien
caacacgatgtttctcccgagtcag

SEQ ID NO: 3155577 - DNA, 25 bp, Homo sapien
tctacagcataagacacagccacct

SEQ ID NO: 3155578 - DNA, 25 bp, Homo sapien
aagatatacaggtctgcacctccca

SEQ ID NO: 3155579 - DNA, 25 bp, Homo sapien
cacggtacaacctctgtagtgaaga

SEQ ID NO: 3155580 - DNA, 25 bp, Homo sapien
ttcttgactcttgccttggaaagag

SEQ ID NO: 3155581 - DNA, 25 bp, Homo sapien
gtaacaccaagatgtaaagtgtctt

SEQ ID NO: 3155582 - DNA, 25 bp, Homo sapien
aaagctcattcttccatgtgtactc

SEQ ID NO: 3155583 - DNA, 25 bp, Homo sapien
gatgtaaagtgtcttcattggctct

SEQ ID NO: 3155584 - DNA, 25 bp, Homo sapien
gaagatcaagacctttcaacaagaa

SEQ ID NO: 3155585 - DNA, 25 bp, Homo sapien
tcaagacctttcaacaagaattctc

SEQ ID NO: 3155586 - DNA, 25 bp, Homo sapien
gatcaagacctttcaacaagaattc

SEQ ID NO: 3155587 - DNA, 25 bp, Homo sapien
aagagaagatcaagacctttcaaca

SEQ ID NO: 3155588 - DNA, 25 bp, Homo sapien
cagagcatcataatctgtttgtaac

SEQ ID NO: 3155589 - DNA, 25 bp, Homo sapien
ctgtttgtaactgtgccactttagc

SEQ ID NO: 3155590 - DNA, 25 bp, Homo sapien
gctcgaagcatggtgttttcccggc

SEQ ID NO: 3155591 - DNA, 25 bp, Homo sapien
cgttcgtatctttcagttgagatct

SEQ ID NO: 3155592 - DNA, 25 bp, Homo sapien
gcaagaccatgtcgacgcatctctt

SEQ ID NO: 3155593 - DNA, 25 bp, Homo sapien
agaccatgtcgacgcatctcttgga

SEQ ID NO: 3155594 - DNA, 25 bp, Homo sapien
gacgcatctcttggattgctcgttc

SEQ ID NO: 3155595 - DNA, 25 bp, Homo sapien
tgtcgacgcatctcttggattgctc

SEQ ID NO: 3155596 - DNA, 25 bp, Homo sapien
tctatgttcaggagaatgtgaagga

SEQ ID NO: 3155597 - DNA, 25 bp, Homo sapien
ttctatgttcaggagaatgtgaagg

SEQ ID NO: 3155598 - DNA, 25 bp, Homo sapien
caaataatatcctgtgatagctcat

SEQ ID NO: 3155599 - DNA, 25 bp, Homo sapien
caggttactactgtaccatgtgtac

SEQ ID NO: 3155600 - DNA, 25 bp, Homo sapien
ttatttgtagcctgaatttagccct

SEQ ID NO: 3155601 - DNA, 25 bp, Homo sapien
tgtgtactactgtttctatgctttg

SEQ ID NO: 3155602 - DNA, 25 bp, Homo sapien
cagcaacaagtacttcaaatatttc

SEQ ID NO: 3155603 - DNA, 25 bp, Homo sapien
tttcagcaacaagtacttcaaatat

SEQ ID NO: 3155604 - DNA, 25 bp, Homo sapien
agaggtagaatttgtgtccatgttc

SEQ ID NO: 3155605 - DNA, 25 bp, Homo sapien
taaaaatccacataggaactcattg

SEQ ID NO: 3155606 - DNA, 25 bp, Homo sapien
cacagttcggcgttaaaaatggcat

SEQ ID NO: 3155607 - DNA, 25 bp, Homo sapien
cacacaaaggagatgggatacataa

SEQ ID NO: 3155608 - DNA, 25 bp, Homo sapien
tccccttgacaacagacagtagatc

SEQ ID NO: 3155609 - DNA, 25 bp, Homo sapien
tccatatggtattgcaaacagtccc

SEQ ID NO: 3155610 - DNA, 25 bp, Homo sapien
aacaaaatatgtcttgctgttgctt

SEQ ID NO: 3155611 - DNA, 25 bp, Homo sapien
acaatatcatggttatgaaaacaac

SEQ ID NO: 3155612 - DNA, 25 bp, Homo sapien
ggcaaatctaggtcaagctccataa

SEQ ID NO: 3155613 - DNA, 25 bp, Homo sapien
gaaaacaacatttggcaggctatac

SEQ ID NO: 3155614 - DNA, 25 bp, Homo sapien
gcgcaagccgcgcgcaggttcctcc

SEQ ID NO: 3155615 - DNA, 25 bp, Homo sapien
ctgcggggatccaaagcgcgcaagc

SEQ ID NO: 3155616 - DNA, 25 bp, Homo sapien
gcaagccgcgcgcaggttcctccgg

SEQ ID NO: 3155617 - DNA, 25 bp, Homo sapien
gggatccaaagcgcgcaagccgcgc

SEQ ID NO: 3155618 - DNA, 25 bp, Homo sapien
tctccgcaagttcccggggtgcagc

SEQ ID NO: 3155619 - DNA, 25 bp, Homo sapien
aaggcaggcgaggtcccatattctc

SEQ ID NO: 3155620 - DNA, 25 bp, Homo sapien
gaggtcccatattctccgcaagttc

SEQ ID NO: 3155621 - DNA, 25 bp, Homo sapien
acaggatggcgaggcgcgggaagag

SEQ ID NO: 3155622 - DNA, 25 bp, Homo sapien
acaaagcaatgcagctccgggggcg

SEQ ID NO: 3155623 - DNA, 25 bp, Homo sapien
ctggttctggcccttgccgcggtcg

SEQ ID NO: 3155624 - DNA, 25 bp, Homo sapien
gccgcggtcgggaccgagccaggga

SEQ ID NO: 3155625 - DNA, 25 bp, Homo sapien
cccggacggtgaggtctggttctgg

SEQ ID NO: 3155626 - DNA, 25 bp, Homo sapien
gaatctcggaaagtaacagtccctg

SEQ ID NO: 3155627 - DNA, 25 bp, Homo sapien
ctgcatgacaacaaggaaaaggcta

SEQ ID NO: 3155628 - DNA, 25 bp, Homo sapien
gaaaaggctaagatacttctcccag

SEQ ID NO: 3155629 - DNA, 25 bp, Homo sapien
caagtaactacagagggcaggtggt

SEQ ID NO: 3155630 - DNA, 25 bp, Homo sapien
tctttcttgcaaggactcaatttgc

SEQ ID NO: 3155631 - DNA, 25 bp, Homo sapien
tactgcaggtacactccactgtcac

SEQ ID NO: 3155632 - DNA, 25 bp, Homo sapien
tgccctcttcctgtgttatcttaag

SEQ ID NO: 3155633 - DNA, 25 bp, Homo sapien
ttactgcaggtacactccactgtca

SEQ ID NO: 3155634 - DNA, 25 bp, Homo sapien
gtgtctcctgaaatgtgttctagtc

SEQ ID NO: 3155635 - DNA, 25 bp, Homo sapien
tcactcttaaagtgtctcctgaaat

SEQ ID NO: 3155636 - DNA, 25 bp, Homo sapien
ctttcactcttaaagtgtctcctga

SEQ ID NO: 3155637 - DNA, 25 bp, Homo sapien
ttcactcttaaagtgtctcctgaaa

SEQ ID NO: 3155638 - DNA, 25 bp, Homo sapien
cctaggaggagataacagagcacat

SEQ ID NO: 3155639 - DNA, 25 bp, Homo sapien
tggaaattcgtttcccagactcgcc

SEQ ID NO: 3155640 - DNA, 25 bp, Homo sapien
agagaaactccagctacactatgag

SEQ ID NO: 3155641 - DNA, 25 bp, Homo sapien
aacgcccagtgcaggatcatccctt

SEQ ID NO: 3155642 - DNA, 25 bp, Homo sapien
aagtgctccagaacttggtccttga

SEQ ID NO: 3155643 - DNA, 25 bp, Homo sapien
tcatcatcactacttcgcaggcttt

SEQ ID NO: 3155644 - DNA, 25 bp, Homo sapien
caggctggatctactataggtgcac

SEQ ID NO: 3155645 - DNA, 25 bp, Homo sapien
cccaagcctgtaaacattgaagtgc

SEQ ID NO: 3155646 - DNA, 25 bp, Homo sapien
cattcacggtggtatggccgtagag

SEQ ID NO: 3155647 - DNA, 25 bp, Homo sapien
gcattcacggtggtatggccgtaga

SEQ ID NO: 3155648 - DNA, 25 bp, Homo sapien
cagacgagatcgggcgcattcacgg

SEQ ID NO: 3155649 - DNA, 25 bp, Homo sapien
cgagatcgggcgcattcacggtggt

SEQ ID NO: 3155650 - DNA, 25 bp, Homo sapien
gggtcgaatccagcagacgatgtta

SEQ ID NO: 3155651 - DNA, 25 bp, Homo sapien
gttaaacagctttcacttacaggca

SEQ ID NO: 3155652 - DNA, 25 bp, Homo sapien
gaacgtcagtgcctgttgagaaagg

SEQ ID NO: 3155653 - DNA, 25 bp, Homo sapien
gagctcagacagagagaacgtcagt

SEQ ID NO: 3155654 - DNA, 25 bp, Homo sapien
tgtcagctccacaacctgtagcatt

SEQ ID NO: 3155655 - DNA, 25 bp, Homo sapien
gtggattaagggattgatacacaaa

SEQ ID NO: 3155656 - DNA, 25 bp, Homo sapien
agctccacaacctgtagcatttcct

SEQ ID NO: 3155657 - DNA, 25 bp, Homo sapien
gattaagggattgatacacaaatgt

SEQ ID NO: 3155658 - DNA, 25 bp, Homo sapien
tgggtatgtaacctgatttgcccct

SEQ ID NO: 3155659 - DNA, 25 bp, Homo sapien
gcgttcaatggaccttttcaatata

SEQ ID NO: 3155660 - DNA, 25 bp, Homo sapien
ttctgcatctattatgctgagcgtt

SEQ ID NO: 3155661 - DNA, 25 bp, Homo sapien
tatgctgagcgttcaatggaccttt

SEQ ID NO: 3155662 - DNA, 25 bp, Homo sapien
gcaccctgagtgactaattgtttca

SEQ ID NO: 3155663 - DNA, 25 bp, Homo sapien
tatgtatgcaacaccgattatcttc

SEQ ID NO: 3155664 - DNA, 25 bp, Homo sapien
tactgaattaggctggacgcagcgg

SEQ ID NO: 3155665 - DNA, 25 bp, Homo sapien
taaatcttctactgaattaggctgg

SEQ ID NO: 3155666 - DNA, 25 bp, Homo sapien
agtggtattaaacacgtccatgatg

SEQ ID NO: 3155667 - DNA, 25 bp, Homo sapien
cagtggtattaaacacgtccatgat

SEQ ID NO: 3155668 - DNA, 25 bp, Homo sapien
tcagtggtattaaacacgtccatga

SEQ ID NO: 3155669 - DNA, 25 bp, Homo sapien
ttcagtggtattaaacacgtccatg

SEQ ID NO: 3155670 - DNA, 25 bp, Homo sapien
gaagaatcactggaatctgggaggt

SEQ ID NO: 3155671 - DNA, 25 bp, Homo sapien
tgtaatcccaggtaacttggaaggc

SEQ ID NO: 3155672 - DNA, 25 bp, Homo sapien
tgaggcagaagaatcactggaatct

SEQ ID NO: 3155673 - DNA, 25 bp, Homo sapien
ggcagaagaatcactggaatctggg

SEQ ID NO: 3155674 - DNA, 25 bp, Homo sapien
tagtatcgctaatctcctcttgcac

SEQ ID NO: 3155675 - DNA, 25 bp, Homo sapien
tattcacagaagtgatcataactca

SEQ ID NO: 3155676 - DNA, 25 bp, Homo sapien
cctcttgcacaatacaaggacattt

SEQ ID NO: 3155677 - DNA, 25 bp, Homo sapien
ggtctacaatttggaggttatatgc

SEQ ID NO: 3155678 - DNA, 25 bp, Homo sapien
gagtatatcttgaaagcaatggtga

SEQ ID NO: 3155679 - DNA, 25 bp, Homo sapien
tctggagtatatcttgaaagcaatg

SEQ ID NO: 3155680 - DNA, 25 bp, Homo sapien
agttctggagtatatcttgaaagca

SEQ ID NO: 3155681 - DNA, 25 bp, Homo sapien
ctggagtatatcttgaaagcaatgg

SEQ ID NO: 3155682 - DNA, 25 bp, Homo sapien
ataaaagcaaattcggttgggtgca

SEQ ID NO: 3155683 - DNA, 25 bp, Homo sapien
taaaagcaaattcggttgggtgcag

SEQ ID NO: 3155684 - DNA, 25 bp, Homo sapien
aaaagcaaattcggttgggtgcagt

SEQ ID NO: 3155685 - DNA, 25 bp, Homo sapien
aaagcaaattcggttgggtgcagtg

SEQ ID NO: 3155686 - DNA, 25 bp, Homo sapien
ttggaatagcattccgtgaaatact

SEQ ID NO: 3155687 - DNA, 25 bp, Homo sapien
tggaatagcattccgtgaaatactc

SEQ ID NO: 3155688 - DNA, 25 bp, Homo sapien
tttggaatagcattccgtgaaatac

SEQ ID NO: 3155689 - DNA, 25 bp, Homo sapien
gaatagcattccgtgaaatactcat

SEQ ID NO: 3155690 - DNA, 25 bp, Homo sapien
aactcagctggaggcgcccagcaaa

SEQ ID NO: 3155691 - DNA, 25 bp, Homo sapien
gcgcccagcaaagcctctcagagga

SEQ ID NO: 3155692 - DNA, 25 bp, Homo sapien
aggcagcagccaactcagctggagg

SEQ ID NO: 3155693 - DNA, 25 bp, Homo sapien
cagaggaagggccactgaactgcac

SEQ ID NO: 3155694 - DNA, 25 bp, Homo sapien
taaagatgcgggtaggtcagactga

SEQ ID NO: 3155695 - DNA, 25 bp, Homo sapien
tgctctggaatctgcaaagaatggc

SEQ ID NO: 3155696 - DNA, 25 bp, Homo sapien
ggtcagactgacgatggcagaaagt

SEQ ID NO: 3155697 - DNA, 25 bp, Homo sapien
ccaggcagttggaggtaaagatgcg

SEQ ID NO: 3155698 - DNA, 25 bp, Homo sapien
ctgtaaccttaaataatttgacttg

SEQ ID NO: 3155699 - DNA, 25 bp, Homo sapien
tatattggcttgtgaagtttgttgc

SEQ ID NO: 3155700 - DNA, 25 bp, Homo sapien
caggaatgcctttgtagtgagcccc

SEQ ID NO: 3155701 - DNA, 25 bp, Homo sapien
ccatcaacaaaggtagtctgtaacc

SEQ ID NO: 3155702 - DNA, 25 bp, Homo sapien
cagtcaaaccagaaggcatgtgaca

SEQ ID NO: 3155703 - DNA, 25 bp, Homo sapien
gcaagccaagaagtgaagggtcctc

SEQ ID NO: 3155704 - DNA, 25 bp, Homo sapien
gtagctcaccagataaatacccctg

SEQ ID NO: 3155705 - DNA, 25 bp, Homo sapien
tcttcagagctacgtggattctacc

SEQ ID NO: 3155706 - DNA, 25 bp, Homo sapien
gttgaaccctaaacattactgccag

SEQ ID NO: 3155707 - DNA, 25 bp, Homo sapien
cctactcatgcatgacttgctgcag

SEQ ID NO: 3155708 - DNA, 25 bp, Homo sapien
tgatgactccccattattcatgtaa

SEQ ID NO: 3155709 - DNA, 25 bp, Homo sapien
ctgtcaccaccatgatgcagaatcc

SEQ ID NO: 3155710 - DNA, 25 bp, Homo sapien
cagtaagtatctgttcctcgtcagc

SEQ ID NO: 3155711 - DNA, 25 bp, Homo sapien
gttcctcgtcagctataatgaccat

SEQ ID NO: 3155712 - DNA, 25 bp, Homo sapien
tttgctcctccactgataactattc

SEQ ID NO: 3155713 - DNA, 25 bp, Homo sapien
tagtttcttcgatactgtgtcttcc

SEQ ID NO: 3155714 - DNA, 25 bp, Homo sapien
tggttttttaggaggcacagggcaa

SEQ ID NO: 3155715 - DNA, 25 bp, Homo sapien
tagaggaacataaagtgaacggacc

SEQ ID NO: 3155716 - DNA, 25 bp, Homo sapien
cttacaggctgaggcgatcccagag

SEQ ID NO: 3155717 - DNA, 25 bp, Homo sapien
aaattgaggcaagtcagacattttg

SEQ ID NO: 3155718 - DNA, 25 bp, Homo sapien
taaaggcttcggaggactaccaaga

SEQ ID NO: 3155719 - DNA, 25 bp, Homo sapien
aaggcttcggaggactaccaagaca

SEQ ID NO: 3155720 - DNA, 25 bp, Homo sapien
cttcggaggactaccaagacagcca

SEQ ID NO: 3155721 - DNA, 25 bp, Homo sapien
ggaggactaccaagacagccagggc

SEQ ID NO: 3155722 - DNA, 25 bp, Homo sapien
cattgaatacaactagaacagctgg

SEQ ID NO: 3155723 - DNA, 25 bp, Homo sapien
taacacaggccctttgcaaagctct

SEQ ID NO: 3155724 - DNA, 25 bp, Homo sapien
caggatggacaagggtgtcaagccc

SEQ ID NO: 3155725 - DNA, 25 bp, Homo sapien
tatgagggactagcttctagcagac

SEQ ID NO: 3155726 - DNA, 25 bp, Homo sapien
atgtcaggaaatggggtacattgct

SEQ ID NO: 3155727 - DNA, 25 bp, Homo sapien
gagaaagcctgggaatcactgctct

SEQ ID NO: 3155728 - DNA, 25 bp, Homo sapien
gcctgggaatcactgctcttgtaag

SEQ ID NO: 3155729 - DNA, 25 bp, Homo sapien
ggtacattgctgagaaagcctggga

SEQ ID NO: 3155730 - DNA, 25 bp, Homo sapien
ttaatagccacaggtctttttcttg

SEQ ID NO: 3155731 - DNA, 25 bp, Homo sapien
ttctccttgcaaaagggaaacttca

SEQ ID NO: 3155732 - DNA, 25 bp, Homo sapien
tgcaaaagggaaacttcaccttcag

SEQ ID NO: 3155733 - DNA, 25 bp, Homo sapien
cttgttggataattctccaccaaaa

SEQ ID NO: 3155734 - DNA, 25 bp, Homo sapien
ccatcacgcccagctgtttttgtgt

SEQ ID NO: 3155735 - DNA, 25 bp, Homo sapien
catcacgcccagctgtttttgtgtt

SEQ ID NO: 3155736 - DNA, 25 bp, Homo sapien
gggtgggtccttagtccaatatatc

SEQ ID NO: 3155737 - DNA, 25 bp, Homo sapien
aggaacgccgaggattgccaacaac

SEQ ID NO: 3155738 - DNA, 25 bp, Homo sapien
caggtgatgacagaggcggagactg

SEQ ID NO: 3155739 - DNA, 25 bp, Homo sapien
gctgcagcccaggaacgccgaggat

SEQ ID NO: 3155740 - DNA, 25 bp, Homo sapien
tttgattactgactctgatcttggg

SEQ ID NO: 3155741 - DNA, 25 bp, Homo sapien
agcccacctggctgttttgattact

SEQ ID NO: 3155742 - DNA, 25 bp, Homo sapien
tgtgagccatcgtgtcaagcccacc

SEQ ID NO: 3155743 - DNA, 25 bp, Homo sapien
tgattactgactctgatcttgggca

SEQ ID NO: 3155744 - DNA, 25 bp, Homo sapien
tgtagtctaacttcacaatcaacag

SEQ ID NO: 3155745 - DNA, 25 bp, Homo sapien
aaccaatgaccccagatttgcctgg

SEQ ID NO: 3155746 - DNA, 25 bp, Homo sapien
ccatgtagtctaacttcacaatcaa

SEQ ID NO: 3155747 - DNA, 25 bp, Homo sapien
gcagagaagtaattcaaaccaatga

SEQ ID NO: 3155748 - DNA, 25 bp, Homo sapien
cttatcctgatggagaaatttacct

SEQ ID NO: 3155749 - DNA, 25 bp, Homo sapien
tatcctgatggagaaatttacctac

SEQ ID NO: 3155750 - DNA, 25 bp, Homo sapien
ctgactcttatcctgatggagaaat

SEQ ID NO: 3155751 - DNA, 25 bp, Homo sapien
ctcttatcctgatggagaaatttac

SEQ ID NO: 3155752 - DNA, 25 bp, Homo sapien
catcagcactcacagcctcattatg

SEQ ID NO: 3155753 - DNA, 25 bp, Homo sapien
atcagcactcacagcctcattatgg

SEQ ID NO: 3155754 - DNA, 25 bp, Homo sapien
taactcagagcatcgtacctggcac

SEQ ID NO: 3155755 - DNA, 25 bp, Homo sapien
gaagttcatggtcaatgggctgcac

SEQ ID NO: 3155756 - DNA, 25 bp, Homo sapien
gaatgctagagccaacttcaaagac

SEQ ID NO: 3155757 - DNA, 25 bp, Homo sapien
caagtactaagtagttcagtgcata

SEQ ID NO: 3155758 - DNA, 25 bp, Homo sapien
caactggtcctcttacaagtatgag

SEQ ID NO: 3155759 - DNA, 25 bp, Homo sapien
caaaatagcacaagtgctccaggtg

SEQ ID NO: 3155760 - DNA, 25 bp, Homo sapien
caagagaattactctccaggtacaa

SEQ ID NO: 3155761 - DNA, 25 bp, Homo sapien
catcctgcagcgtcagaagctttgg

SEQ ID NO: 3155762 - DNA, 25 bp, Homo sapien
gtatatcccagtggtctctgtacca

SEQ ID NO: 3155763 - DNA, 25 bp, Homo sapien
cattttggacaactgtggctctttt

SEQ ID NO: 3155764 - DNA, 25 bp, Homo sapien
tatcggggcacgcttggtattccat

SEQ ID NO: 3155765 - DNA, 25 bp, Homo sapien
ttagaacagtttatcggggcacgct

SEQ ID NO: 3155766 - DNA, 25 bp, Homo sapien
gaaaattacctgagtcttaccaatc

SEQ ID NO: 3155767 - DNA, 25 bp, Homo sapien
cctttctaccctgaatgagaccatt

SEQ ID NO: 3155768 - DNA, 25 bp, Homo sapien
aaggtgaccaactattcaaatcgtg

SEQ ID NO: 3155769 - DNA, 25 bp, Homo sapien
ttctgctaatcaccaagtattggcc

SEQ ID NO: 3155770 - DNA, 25 bp, Homo sapien
atcacatgagttgcataaccttgac

SEQ ID NO: 3155771 - DNA, 25 bp, Homo sapien
aagatcacatgagttgcataacctt

SEQ ID NO: 3155772 - DNA, 25 bp, Homo sapien
agatcacatgagttgcataaccttg

SEQ ID NO: 3155773 - DNA, 25 bp, Homo sapien
gatcacatgagttgcataaccttga

SEQ ID NO: 3155774 - DNA, 25 bp, Homo sapien
tcttgtatctgcgtttctcctctct

SEQ ID NO: 3155775 - DNA, 25 bp, Homo sapien
ttcttgtatctgcgtttctcctctc

SEQ ID NO: 3155776 - DNA, 25 bp, Homo sapien
gttcttgtatctgcgtttctcctct

SEQ ID NO: 3155777 - DNA, 25 bp, Homo sapien
agttcttgtatctgcgtttctcctc

SEQ ID NO: 3155778 - DNA, 25 bp, Homo sapien
ttttggcaagggagacccagaagct

SEQ ID NO: 3155779 - DNA, 25 bp, Homo sapien
taagcgcttcctaagaggcagggag

SEQ ID NO: 3155780 - DNA, 25 bp, Homo sapien
gaattagcctcaatactgagccagg

SEQ ID NO: 3155781 - DNA, 25 bp, Homo sapien
gcagccggtctatgtggcccgtaaa

SEQ ID NO: 3155782 - DNA, 25 bp, Homo sapien
tgttcagaggcgatgacattctcca

SEQ ID NO: 3155783 - DNA, 25 bp, Homo sapien
cacatatatatggtgatccaagtcc

SEQ ID NO: 3155784 - DNA, 25 bp, Homo sapien
ccataagctacctacctgaagacag

SEQ ID NO: 3155785 - DNA, 25 bp, Homo sapien
cgacaaggaatttagtcagtacttg

SEQ ID NO: 3155786 - DNA, 25 bp, Homo sapien
tatcacggtgttttttgtccacgtc

SEQ ID NO: 3155787 - DNA, 25 bp, Homo sapien
cctttggcatatctctatcacggtg

SEQ ID NO: 3155788 - DNA, 25 bp, Homo sapien
tgccatttattataacccatttcat

SEQ ID NO: 3155789 - DNA, 25 bp, Homo sapien
catgctacagggcaatcctttggca

SEQ ID NO: 3155790 - DNA, 25 bp, Homo sapien
tctgcaaacctggtgggtgtgcgga

SEQ ID NO: 3155791 - DNA, 25 bp, Homo sapien
ctgacagcgtggcagggcatctgca

SEQ ID NO: 3155792 - DNA, 25 bp, Homo sapien
tgggtgtgcggatggacttaatcat

SEQ ID NO: 3155793 - DNA, 25 bp, Homo sapien
tgacagcgtggcagggcatctgcaa

SEQ ID NO: 3155794 - DNA, 25 bp, Homo sapien
caggctggacagctgataacgctct

SEQ ID NO: 3155795 - DNA, 25 bp, Homo sapien
gctgataacgctctgagctcctttc

SEQ ID NO: 3155796 - DNA, 25 bp, Homo sapien
aatggcaattactgtaacacggact

SEQ ID NO: 3155797 - DNA, 25 bp, Homo sapien
tactgtaacacggactttgcaggct

SEQ ID NO: 3155798 - DNA, 25 bp, Homo sapien
tgccagtcaaccactgccaaatcac

SEQ ID NO: 3155799 - DNA, 25 bp, Homo sapien
gagttactatcagctgccagtcaac

SEQ ID NO: 3155800 - DNA, 25 bp, Homo sapien
ctgagttactatcagctgccagtca

SEQ ID NO: 3155801 - DNA, 25 bp, Homo sapien
attcctgagttactatcagctgcca

SEQ ID NO: 3155802 - DNA, 25 bp, Homo sapien
cacccagctgactatcagaggcccc

SEQ ID NO: 3155803 - DNA, 25 bp, Homo sapien
tccacccagctgactatcagaggcc

SEQ ID NO: 3155804 - DNA, 25 bp, Homo sapien
cttccacccagctgactatcagagg

SEQ ID NO: 3155805 - DNA, 25 bp, Homo sapien
ttccacccagctgactatcagaggc

SEQ ID NO: 3155806 - DNA, 25 bp, Homo sapien
tcagtcctccgcctttggatacaaa

SEQ ID NO: 3155807 - DNA, 25 bp, Homo sapien
tcctccgcctttggatacaaattcc

SEQ ID NO: 3155808 - DNA, 25 bp, Homo sapien
ccgcctttggatacaaattccttca

SEQ ID NO: 3155809 - DNA, 25 bp, Homo sapien
ctttcagtcctccgcctttggatac

SEQ ID NO: 3155810 - DNA, 25 bp, Homo sapien
ctgtggattgtaaaacaaacacatg

SEQ ID NO: 3155811 - DNA, 25 bp, Homo sapien
gtgtggcagggctgcacttccaagc

SEQ ID NO: 3155812 - DNA, 25 bp, Homo sapien
gtaaaacaaacacatgctgcagtgt

SEQ ID NO: 3155813 - DNA, 25 bp, Homo sapien
agtgtggcagggctgcacttccaag

SEQ ID NO: 3155814 - DNA, 25 bp, Homo sapien
gacactctggtgagagtaactcttc

SEQ ID NO: 3155815 - DNA, 25 bp, Homo sapien
ctctggtgagagtaactcttcttcc

SEQ ID NO: 3155816 - DNA, 25 bp, Homo sapien
cactctggtgagagtaactcttctt

SEQ ID NO: 3155817 - DNA, 25 bp, Homo sapien
ctgacactctggtgagagtaactct

SEQ ID NO: 3155818 - DNA, 25 bp, Homo sapien
tctcctcatccgaagagaaggtccc

SEQ ID NO: 3155819 - DNA, 25 bp, Homo sapien
agggtctcctcatccgaagagaagg

SEQ ID NO: 3155820 - DNA, 25 bp, Homo sapien
ctcatccgaagagaaggtcccattg

SEQ ID NO: 3155821 - DNA, 25 bp, Homo sapien
tcctcatccgaagagaaggtcccat

SEQ ID NO: 3155822 - DNA, 25 bp, Homo sapien
acaactccctgtattgtgattctac

SEQ ID NO: 3155823 - DNA, 25 bp, Homo sapien
caaaggttgtcacaccccatggtcc

SEQ ID NO: 3155824 - DNA, 25 bp, Homo sapien
tggatggatgactcacttgcacaac

SEQ ID NO: 3155825 - DNA, 25 bp, Homo sapien
tgtgattctacttctccccaggagg

SEQ ID NO: 3155826 - DNA, 25 bp, Homo sapien
tgtaccttagcagagttcgtccgga

SEQ ID NO: 3155827 - DNA, 25 bp, Homo sapien
catggttaccagttccagctccaaa

SEQ ID NO: 3155828 - DNA, 25 bp, Homo sapien
aatagcctttgcgtggagatctcag

SEQ ID NO: 3155829 - DNA, 25 bp, Homo sapien
gcaatgccccattctttggtaccag

SEQ ID NO: 3155830 - DNA, 25 bp, Homo sapien
gcttgggttacacaatgcttctaaa

SEQ ID NO: 3155831 - DNA, 25 bp, Homo sapien
tatctgaaactccaacatctaggtc

SEQ ID NO: 3155832 - DNA, 25 bp, Homo sapien
gcatgcaggatcacggccaattaaa

SEQ ID NO: 3155833 - DNA, 25 bp, Homo sapien
tagcagttttactctggtgtagcag

SEQ ID NO: 3155834 - DNA, 25 bp, Homo sapien
ttttaaggagtcttgatatctagta

SEQ ID NO: 3155835 - DNA, 25 bp, Homo sapien
ataacacactatcttaattgctgta

SEQ ID NO: 3155836 - DNA, 25 bp, Homo sapien
aagcactttcagcattgtgtccctg

SEQ ID NO: 3155837 - DNA, 25 bp, Homo sapien
tcattcggcaagcactttcagcatt

SEQ ID NO: 3155838 - DNA, 25 bp, Homo sapien
ctttcagcattgtgtccctgtctgc

SEQ ID NO: 3155839 - DNA, 25 bp, Homo sapien
ggtcagccaaggagctgggtagaca

SEQ ID NO: 3155840 - DNA, 25 bp, Homo sapien
cattgcttgaactgtctgctcactt

SEQ ID NO: 3155841 - DNA, 25 bp, Homo sapien
aaaaatactgtcatgggaaaatgcc

SEQ ID NO: 3155842 - DNA, 25 bp, Homo sapien
tgcccgggttcccatagaatagttg

SEQ ID NO: 3155843 - DNA, 25 bp, Homo sapien
cccatcagggataaaaatactgtca

SEQ ID NO: 3155844 - DNA, 25 bp, Homo sapien
tggccagatgagagaattctatctg

SEQ ID NO: 3155845 - DNA, 25 bp, Homo sapien
ctgtcatttcaatcatatgtagtga

SEQ ID NO: 3155846 - DNA, 25 bp, Homo sapien
gtcaggctctaagtgcctctgctct

SEQ ID NO: 3155847 - DNA, 25 bp, Homo sapien
tctatctgccaagcagctaggcaga

SEQ ID NO: 3155848 - DNA, 25 bp, Homo sapien
tagatattgtcaaaatgagcgcaca

SEQ ID NO: 3155849 - DNA, 25 bp, Homo sapien
gcagcggaagcaaaactaggcagac

SEQ ID NO: 3155850 - DNA, 25 bp, Homo sapien
gctgaaaggaagcttgtgaatccat

SEQ ID NO: 3155851 - DNA, 25 bp, Homo sapien
gtgtttatgcaattgtcacttcggg

SEQ ID NO: 3155852 - DNA, 25 bp, Homo sapien
caagaccctaaaggttggtgcaact

SEQ ID NO: 3155853 - DNA, 25 bp, Homo sapien
tggagatcccaacatttcccagtgg

SEQ ID NO: 3155854 - DNA, 25 bp, Homo sapien
catgaaatgtaggaaccactgaggg

SEQ ID NO: 3155855 - DNA, 25 bp, Homo sapien
tgtggccacctaaccgtgacaaagg

SEQ ID NO: 3155856 - DNA, 25 bp, Homo sapien
gcacaactgatttctagactcaaca

SEQ ID NO: 3155857 - DNA, 25 bp, Homo sapien
aactgatttctagactcaacaccat

SEQ ID NO: 3155858 - DNA, 25 bp, Homo sapien
gaggcataccttgtgcacaactgat

SEQ ID NO: 3155859 - DNA, 25 bp, Homo sapien
ctagtgagcactgaggcataccttg

SEQ ID NO: 3155860 - DNA, 25 bp, Homo sapien
cagttcacaaccaccacaaccaggt

SEQ ID NO: 3155861 - DNA, 25 bp, Homo sapien
gttcacaaccaccacaaccaggttc

SEQ ID NO: 3155862 - DNA, 25 bp, Homo sapien
tgaagcagtgaagcagttcacaacc

SEQ ID NO: 3155863 - DNA, 25 bp, Homo sapien
agttcacaaccaccacaaccaggtt

SEQ ID NO: 3155864 - DNA, 25 bp, Homo sapien
gaccgctgcccaaacttgatattct

SEQ ID NO: 3155865 - DNA, 25 bp, Homo sapien
tcacaatttccatgggactggtcag

SEQ ID NO: 3155866 - DNA, 25 bp, Homo sapien
gaggacgatgtcctgctgagtcaca

SEQ ID NO: 3155867 - DNA, 25 bp, Homo sapien
gactggtcaggaacagatcctcttc

SEQ ID NO: 3155868 - DNA, 25 bp, Homo sapien
gattctatttatatactggttgact

SEQ ID NO: 3155869 - DNA, 25 bp, Homo sapien
cctctcattagggtgtaaactacag

SEQ ID NO: 3155870 - DNA, 25 bp, Homo sapien
tatatactggttgacttgtttgttg

SEQ ID NO: 3155871 - DNA, 25 bp, Homo sapien
gaatcttgctcacctctgtaatacc

SEQ ID NO: 3155872 - DNA, 25 bp, Homo sapien
cttagagaacttggcgtatcactgg

SEQ ID NO: 3155873 - DNA, 25 bp, Homo sapien
gagattcagaggacttagagaactt

SEQ ID NO: 3155874 - DNA, 25 bp, Homo sapien
acttagagaacttggcgtatcactg

SEQ ID NO: 3155875 - DNA, 25 bp, Homo sapien
tccagggagattcagaggacttaga

SEQ ID NO: 3155876 - DNA, 25 bp, Homo sapien
aagtacatgatcctttgaggaaagc

SEQ ID NO: 3155877 - DNA, 25 bp, Homo sapien
ccttgccatggaaacagatgctcca

SEQ ID NO: 3155878 - DNA, 25 bp, Homo sapien
gctccaacatctgtcactagtggca

SEQ ID NO: 3155879 - DNA, 25 bp, Homo sapien
tcaatcaattaacaggatcttgaag

SEQ ID NO: 3155880 - DNA, 25 bp, Homo sapien
caggccttgggagaatgcctggccc

SEQ ID NO: 3155881 - DNA, 25 bp, Homo sapien
gatcctgcttcctatactgtctgcc

SEQ ID NO: 3155882 - DNA, 25 bp, Homo sapien
aaaggagtcggagccaaatgtgaca

SEQ ID NO: 3155883 - DNA, 25 bp, Homo sapien
gatcggctcctacagaagaggtgcc

SEQ ID NO: 3155884 - DNA, 25 bp, Homo sapien
cagcttgtgcttggcggcactgttg

SEQ ID NO: 3155885 - DNA, 25 bp, Homo sapien
ttttggcttaacagccagcttgtgc

SEQ ID NO: 3155886 - DNA, 25 bp, Homo sapien
gttgacactttcgatggtgccagca

SEQ ID NO: 3155887 - DNA, 25 bp, Homo sapien
gggcaaggcgcctgtgcttctttga

SEQ ID NO: 3155888 - DNA, 25 bp, Homo sapien
ggattgggttcctcttcgtgccacg

SEQ ID NO: 3155889 - DNA, 25 bp, Homo sapien
aggccgccttgctcatgttgtggat

SEQ ID NO: 3155890 - DNA, 25 bp, Homo sapien
gcttgtcctcgcctgggtgtccgtt

SEQ ID NO: 3155891 - DNA, 25 bp, Homo sapien
tcttcctcggaatccagcggattgg

SEQ ID NO: 3155892 - DNA, 25 bp, Homo sapien
cgccctttccgcctctagaggcggc

SEQ ID NO: 3155893 - DNA, 25 bp, Homo sapien
tttccgcctctagaggcggctcctg

SEQ ID NO: 3155894 - DNA, 25 bp, Homo sapien
tctagaggcggctcctgcccctcgc

SEQ ID NO: 3155895 - DNA, 25 bp, Homo sapien
ctctagaggcggctcctgcccctcg

SEQ ID NO: 3155896 - DNA, 25 bp, Homo sapien
tccgcgtcctcccaacctggcgctt

SEQ ID NO: 3155897 - DNA, 25 bp, Homo sapien
gtcctcccaacctggcgcttccagg

SEQ ID NO: 3155898 - DNA, 25 bp, Homo sapien
cccaacctggcgcttccaggctccg

SEQ ID NO: 3155899 - DNA, 25 bp, Homo sapien
aacctggcgcttccaggctccgctg

SEQ ID NO: 3155900 - DNA, 25 bp, Homo sapien
cgctcctcctccgcctccaggcgct

SEQ ID NO: 3155901 - DNA, 25 bp, Homo sapien
ctcctccgcctccaggcgctcgcgc

SEQ ID NO: 3155902 - DNA, 25 bp, Homo sapien
tcctcctccgcctccaggcgctcgc

SEQ ID NO: 3155903 - DNA, 25 bp, Homo sapien
ctcctcctccgcctccaggcgctcg

SEQ ID NO: 3155904 - DNA, 25 bp, Homo sapien
cctccaacgcctcgggcggcccctg

SEQ ID NO: 3155905 - DNA, 25 bp, Homo sapien
tccaacgcctcgggcggcccctgca

SEQ ID NO: 3155906 - DNA, 25 bp, Homo sapien
tctcctccaacgcctcgggcggccc

SEQ ID NO: 3155907 - DNA, 25 bp, Homo sapien
agtctcctccaacgcctcgggcggc

SEQ ID NO: 3155908 - DNA, 25 bp, Homo sapien
cctccagtcctccaggtgcgcctgg

SEQ ID NO: 3155909 - DNA, 25 bp, Homo sapien
agctgccccctccagtcctccaggt

SEQ ID NO: 3155910 - DNA, 25 bp, Homo sapien
ccagtcctccaggtgcgcctggccc

SEQ ID NO: 3155911 - DNA, 25 bp, Homo sapien
cccctccagtcctccaggtgcgcct

SEQ ID NO: 3155912 - DNA, 25 bp, Homo sapien
cctctcctcaaagtcgttcagaagc

SEQ ID NO: 3155913 - DNA, 25 bp, Homo sapien
tcctcaaagtcgttcagaagctcac

SEQ ID NO: 3155914 - DNA, 25 bp, Homo sapien
ctcctcaaagtcgttcagaagctca

SEQ ID NO: 3155915 - DNA, 25 bp, Homo sapien
tctcctcaaagtcgttcagaagctc

SEQ ID NO: 3155916 - DNA, 25 bp, Homo sapien
ggctcctcggagtgttctctttgtc

SEQ ID NO: 3155917 - DNA, 25 bp, Homo sapien
ctcttcgccgctcggcctctgggtt

SEQ ID NO: 3155918 - DNA, 25 bp, Homo sapien
tacctggctcctcggagtgttctct

SEQ ID NO: 3155919 - DNA, 25 bp, Homo sapien
cctgctgctctcttcgccgctcggc

SEQ ID NO: 3155920 - DNA, 25 bp, Homo sapien
aggagaggctccgtgtccccttctt

SEQ ID NO: 3155921 - DNA, 25 bp, Homo sapien
gagaggctccgtgtccccttcttct

SEQ ID NO: 3155922 - DNA, 25 bp, Homo sapien
ggagaggctccgtgtccccttcttc

SEQ ID NO: 3155923 - DNA, 25 bp, Homo sapien
agccccgtgtcctttgcgggcgtca

SEQ ID NO: 3155924 - DNA, 25 bp, Homo sapien
gaatctgcttccctccggaggacac

SEQ ID NO: 3155925 - DNA, 25 bp, Homo sapien
caccttgcggccttgttcaagggcg

SEQ ID NO: 3155926 - DNA, 25 bp, Homo sapien
ctgcgcgcccgtgaccagaatggcg

SEQ ID NO: 3155927 - DNA, 25 bp, Homo sapien
tggcaaatttgcatccctcggtggt

SEQ ID NO: 3155928 - DNA, 25 bp, Homo sapien
gattctggaccgaatggaagcccat

SEQ ID NO: 3155929 - DNA, 25 bp, Homo sapien
caattttattccaaacggtgaggct

SEQ ID NO: 3155930 - DNA, 25 bp, Homo sapien
tgtgggccaccactttctgcggagg

SEQ ID NO: 3155931 - DNA, 25 bp, Homo sapien
gaagcaggtttcctctctgtcgcct

SEQ ID NO: 3155932 - DNA, 25 bp, Homo sapien
tcctcccggcctcgggtgtttgaga

SEQ ID NO: 3155933 - DNA, 25 bp, Homo sapien
gtggccggcggtcactgctctcctg

SEQ ID NO: 3155934 - DNA, 25 bp, Homo sapien
ccttggacggctcacttggctctgg

SEQ ID NO: 3155935 - DNA, 25 bp, Homo sapien
ccccaatcccaggtccacacaagtg

SEQ ID NO: 3155936 - DNA, 25 bp, Homo sapien
agaccagcagaaatctaccaatacc

SEQ ID NO: 3155937 - DNA, 25 bp, Homo sapien
gagaccagcagaaatctaccaatac

SEQ ID NO: 3155938 - DNA, 25 bp, Homo sapien
caatcccaggtccacacaagtgctt

SEQ ID NO: 3155939 - DNA, 25 bp, Homo sapien
cagcggctgagcagtttccactttc

SEQ ID NO: 3155940 - DNA, 25 bp, Homo sapien
ctctgtaagtttggagccatctaag

SEQ ID NO: 3155941 - DNA, 25 bp, Homo sapien
tgctaacgttatccacagcggctga

SEQ ID NO: 3155942 - DNA, 25 bp, Homo sapien
agccatctaaggagtgtctgctctg

SEQ ID NO: 3155943 - DNA, 25 bp, Homo sapien
ctgtcacagacgtaggaagagtatt

SEQ ID NO: 3155944 - DNA, 25 bp, Homo sapien
tcagctgttctctgcgctcaagcct

SEQ ID NO: 3155945 - DNA, 25 bp, Homo sapien
tcaagcctggacactgcagtctcgg

SEQ ID NO: 3155946 - DNA, 25 bp, Homo sapien
gagtattggcctttttcagctgttc

SEQ ID NO: 3155947 - DNA, 25 bp, Homo sapien
gggggagccgagtcggagatctcca

SEQ ID NO: 3155948 - DNA, 25 bp, Homo sapien
ctgggggagccgagtcggagatctc

SEQ ID NO: 3155949 - DNA, 25 bp, Homo sapien
tgggggagccgagtcggagatctcc

SEQ ID NO: 3155950 - DNA, 25 bp, Homo sapien
aataatctgtggacagtcgctccaa

SEQ ID NO: 3155951 - DNA, 25 bp, Homo sapien
gcagcatccggggtggaaaacctct

SEQ ID NO: 3155952 - DNA, 25 bp, Homo sapien
ttggtgacttcttttaccagcggcg

SEQ ID NO: 3155953 - DNA, 25 bp, Homo sapien
tggacagtcgctccaagcctttgct

SEQ ID NO: 3155954 - DNA, 25 bp, Homo sapien
tactgccctagatggagattctcag

SEQ ID NO: 3155955 - DNA, 25 bp, Homo sapien
agaactaggaggagctcgaggcacc

SEQ ID NO: 3155956 - DNA, 25 bp, Homo sapien
ccaggacctagggttgtgcaaatcc

SEQ ID NO: 3155957 - DNA, 25 bp, Homo sapien
gagggagcctacacatcataagaac

SEQ ID NO: 3155958 - DNA, 25 bp, Homo sapien
gggcacagtgatatcccagccaata

SEQ ID NO: 3155959 - DNA, 25 bp, Homo sapien
tagaagtaagtattgtgactgccct

SEQ ID NO: 3155960 - DNA, 25 bp, Homo sapien
cattagtatggaagacgtgcagtga

SEQ ID NO: 3155961 - DNA, 25 bp, Homo sapien
ccccatagtttgttgctcagaagac

SEQ ID NO: 3155962 - DNA, 25 bp, Homo sapien
caaaaggttttctaaggcaggatct

SEQ ID NO: 3155963 - DNA, 25 bp, Homo sapien
tatacatggtgatttcaggcattca

SEQ ID NO: 3155964 - DNA, 25 bp, Homo sapien
caggcattcattgttcctagcaatg

SEQ ID NO: 3155965 - DNA, 25 bp, Homo sapien
aaattttgatcttttgcgggcagcc

SEQ ID NO: 3155966 - DNA, 25 bp, Homo sapien
ttgtcagccactacttctcttcgag

SEQ ID NO: 3155967 - DNA, 25 bp, Homo sapien
taatgtatctacaggcaacaccaac

SEQ ID NO: 3155968 - DNA, 25 bp, Homo sapien
tatcaagtcaactgttttgtcagcc

SEQ ID NO: 3155969 - DNA, 25 bp, Homo sapien
tctcttcgagtattagcccttggtg

SEQ ID NO: 3155970 - DNA, 25 bp, Homo sapien
tgcttcttcacaacagcaggggcca

SEQ ID NO: 3155971 - DNA, 25 bp, Homo sapien
gcttcttcacaacagcaggggccag

SEQ ID NO: 3155972 - DNA, 25 bp, Homo sapien
tcttcacaacagcaggggccagagc

SEQ ID NO: 3155973 - DNA, 25 bp, Homo sapien
ccagagccaccttctttcccttggc

SEQ ID NO: 3155974 - DNA, 25 bp, Homo sapien
gctggatgtcttgctcagtgccaaa

SEQ ID NO: 3155975 - DNA, 25 bp, Homo sapien
atgtcttgctcagtgccaaaattct

SEQ ID NO: 3155976 - DNA, 25 bp, Homo sapien
tgggctggatgtcttgctcagtgcc

SEQ ID NO: 3155977 - DNA, 25 bp, Homo sapien
ggatgtcttgctcagtgccaaaatt

SEQ ID NO: 3155978 - DNA, 25 bp, Homo sapien
caacctgatagagcagggctatttc

SEQ ID NO: 3155979 - DNA, 25 bp, Homo sapien
gcaacctgatagagcagggctattt

SEQ ID NO: 3155980 - DNA, 25 bp, Homo sapien
ctgcaacctgatagagcagggctat

SEQ ID NO: 3155981 - DNA, 25 bp, Homo sapien
acctgatagagcagggctatttcac

SEQ ID NO: 3155982 - DNA, 25 bp, Homo sapien
cttattgagggatggctctctgccg

SEQ ID NO: 3155983 - DNA, 25 bp, Homo sapien
gttaatcgcaggaggcactttcagc

SEQ ID NO: 3155984 - DNA, 25 bp, Homo sapien
ctggttaatcgcaggaggcactttc

SEQ ID NO: 3155985 - DNA, 25 bp, Homo sapien
ggttaatcgcaggaggcactttcag

SEQ ID NO: 3155986 - DNA, 25 bp, Homo sapien
taatcgcaggaggcactttcagccg

SEQ ID NO: 3155987 - DNA, 25 bp, Homo sapien
ctttcttctcagcccaggtcaacag

SEQ ID NO: 3155988 - DNA, 25 bp, Homo sapien
cagcccaggtcaacagcctctgctt

SEQ ID NO: 3155989 - DNA, 25 bp, Homo sapien
acaggtggtctcttactggggacat

SEQ ID NO: 3155990 - DNA, 25 bp, Homo sapien
cttactggggacatcccctttgcca

SEQ ID NO: 3155991 - DNA, 25 bp, Homo sapien
gtgtgcagtcaccaccagctgagct

SEQ ID NO: 3155992 - DNA, 25 bp, Homo sapien
gtgcagtcaccaccagctgagcttt

SEQ ID NO: 3155993 - DNA, 25 bp, Homo sapien
tgtgcagtcaccaccagctgagctt

SEQ ID NO: 3155994 - DNA, 25 bp, Homo sapien
tagacatcccagtcttcccttcccc

SEQ ID NO: 3155995 - DNA, 25 bp, Homo sapien
gtggactagacatcccagtcttccc

SEQ ID NO: 3155996 - DNA, 25 bp, Homo sapien
gactagacatcccagtcttcccttc

SEQ ID NO: 3155997 - DNA, 25 bp, Homo sapien
tgtggactagacatcccagtcttcc

SEQ ID NO: 3155998 - DNA, 25 bp, Homo sapien
tccactagcttagccaaaacgcctt

SEQ ID NO: 3155999 - DNA, 25 bp, Homo sapien
cttccactagcttagccaaaacgcc

SEQ ID NO: 3156000 - DNA, 25 bp, Homo sapien
tgccgccccagtgacggtggatctc

SEQ ID NO: 3156001 - DNA, 25 bp, Homo sapien
acttgggagccaggacattgccgcc

SEQ ID NO: 3156002 - DNA, 25 bp, Homo sapien
gaccactgcctgacctcggatttga

SEQ ID NO: 3156003 - DNA, 25 bp, Homo sapien
caggaccactgcctgacctcggatt

SEQ ID NO: 3156004 - DNA, 25 bp, Homo sapien
ccactgcctgacctcggatttgata

SEQ ID NO: 3156005 - DNA, 25 bp, Homo sapien
actgcctgacctcggatttgataca

SEQ ID NO: 3156006 - DNA, 25 bp, Homo sapien
tatggtgcctcgctctgggatagct

SEQ ID NO: 3156007 - DNA, 25 bp, Homo sapien
cgcggaagatttacgtatggtgcct

SEQ ID NO: 3156008 - DNA, 25 bp, Homo sapien
tcaagttagcgcctcggcttcagga

SEQ ID NO: 3156009 - DNA, 25 bp, Homo sapien
tatccgcgacgagctatccgggaaa

SEQ ID NO: 3156010 - DNA, 25 bp, Homo sapien
caggaacgtcgtttgcaggcgtcac

SEQ ID NO: 3156011 - DNA, 25 bp, Homo sapien
gcgcctgagcagataaccaaaagtg

SEQ ID NO: 3156012 - DNA, 25 bp, Homo sapien
gcaagtacgaaagggttatggctcc

SEQ ID NO: 3156013 - DNA, 25 bp, Homo sapien
tccaaactggttagctccgaagtcc

SEQ ID NO: 3156014 - DNA, 25 bp, Homo sapien
gatgcagagctgtcttcgcagtccc

SEQ ID NO: 3156015 - DNA, 25 bp, Homo sapien
aagtatagttggcatgtggagatat

SEQ ID NO: 3156016 - DNA, 25 bp, Homo sapien
tttctcacgtactgttttgatgcag

SEQ ID NO: 3156017 - DNA, 25 bp, Homo sapien
tgtcaccaacaactacggctgcgag

SEQ ID NO: 3156018 - DNA, 25 bp, Homo sapien
caagaagacctgaactaaagtagca

SEQ ID NO: 3156019 - DNA, 25 bp, Homo sapien
tacatatgagcagataaggaccacc

SEQ ID NO: 3156020 - DNA, 25 bp, Homo sapien
tgatggtgtcatcccaacgtagaaa

SEQ ID NO: 3156021 - DNA, 25 bp, Homo sapien
ttttcaacaaacgtcccatgggctc

SEQ ID NO: 3156022 - DNA, 25 bp, Homo sapien
tcaggtagggtcaaggattttccaa

SEQ ID NO: 3156023 - DNA, 25 bp, Homo sapien
gacatgaatccctgctataagggtg

SEQ ID NO: 3156024 - DNA, 25 bp, Homo sapien
tagtttgggaaacaagcgcctaaga

SEQ ID NO: 3156025 - DNA, 25 bp, Homo sapien
caggaggacctaaccttgtttcagg

SEQ ID NO: 3156026 - DNA, 25 bp, Homo sapien
cagtgactcccttcaacatgagggc

SEQ ID NO: 3156027 - DNA, 25 bp, Homo sapien
gagtcactcgtattaaaaccctggc

SEQ ID NO: 3156028 - DNA, 25 bp, Homo sapien
cagtggactccaggtagacttagcc

SEQ ID NO: 3156029 - DNA, 25 bp, Homo sapien
gacagtgcctatggaacagacagaa

SEQ ID NO: 3156030 - DNA, 25 bp, Homo sapien
taagtaagcactacatcgtggcaag

SEQ ID NO: 3156031 - DNA, 25 bp, Homo sapien
aataggccatctcttatgaaccagg

SEQ ID NO: 3156032 - DNA, 25 bp, Homo sapien
tattaactaagtgaaaggcaccact

SEQ ID NO: 3156033 - DNA, 25 bp, Homo sapien
gcaagttcctaggaagcactatggg

SEQ ID NO: 3156034 - DNA, 25 bp, Homo sapien
ggatcaaagagacaaccactttggg

SEQ ID NO: 3156035 - DNA, 25 bp, Homo sapien
cagtgacacgggcaaattggcattt

SEQ ID NO: 3156036 - DNA, 25 bp, Homo sapien
gacagctctttaagcccacatgcag

SEQ ID NO: 3156037 - DNA, 25 bp, Homo sapien
acatgcagcagtgggtcagataacc

SEQ ID NO: 3156038 - DNA, 25 bp, Homo sapien
gcttgtctcactggaaaatatcctg

SEQ ID NO: 3156039 - DNA, 25 bp, Homo sapien
tattctctgttgacgcgtttcttcc

SEQ ID NO: 3156040 - DNA, 25 bp, Homo sapien
gctagcctttttaacctggtcagag

SEQ ID NO: 3156041 - DNA, 25 bp, Homo sapien
ggataccaaagtgcgataactgaac

SEQ ID NO: 3156042 - DNA, 25 bp, Homo sapien
tttccaaggtacacattcgagtagc

SEQ ID NO: 3156043 - DNA, 25 bp, Homo sapien
gaagagctcattgccaataaaccag

SEQ ID NO: 3156044 - DNA, 25 bp, Homo sapien
catagtcttaaaaaccttgtgtgca

SEQ ID NO: 3156045 - DNA, 25 bp, Homo sapien
tctcaacagtgagagtagtgggcat

SEQ ID NO: 3156046 - DNA, 25 bp, Homo sapien
tctaagggaaggtactctgtgtgct

SEQ ID NO: 3156047 - DNA, 25 bp, Homo sapien
gatattaccgtgaagtcttgcctgg

SEQ ID NO: 3156048 - DNA, 25 bp, Homo sapien
gaggatccatgtgctcttaaagtca

SEQ ID NO: 3156049 - DNA, 25 bp, Homo sapien
cattgcaggagacataccactttaa

SEQ ID NO: 3156050 - DNA, 25 bp, Homo sapien
tcaagaagctaatcaattggcagat

SEQ ID NO: 3156051 - DNA, 25 bp, Homo sapien
gatgggagttcggtgccaacattca

SEQ ID NO: 3156052 - DNA, 25 bp, Homo sapien
taaaatgctaggacagactgcctgg

SEQ ID NO: 3156053 - DNA, 25 bp, Homo sapien
tgacagaccaagtgcggtggttcat

SEQ ID NO: 3156054 - DNA, 25 bp, Homo sapien
tttttgtacttagcccagcactgtt

SEQ ID NO: 3156055 - DNA, 25 bp, Homo sapien
tgtatactcctaatgattgcagcct

SEQ ID NO: 3156056 - DNA, 25 bp, Homo sapien
cctgctccactctccatgttgaaag

SEQ ID NO: 3156057 - DNA, 25 bp, Homo sapien
ggttcatactgcaggattacatcca

SEQ ID NO: 3156058 - DNA, 25 bp, Homo sapien
catatggccacagaagtcctgaact

SEQ ID NO: 3156059 - DNA, 25 bp, Homo sapien
tgatcccaacagtggaaaaggcact

SEQ ID NO: 3156060 - DNA, 25 bp, Homo sapien
catgaggttgatcccaacagtggaa

SEQ ID NO: 3156061 - DNA, 25 bp, Homo sapien
cacttgcatgaggttgatcccaaca

SEQ ID NO: 3156062 - DNA, 25 bp, Homo sapien
tcttccgtgtatcacacaccaataa

SEQ ID NO: 3156063 - DNA, 25 bp, Homo sapien
caaacatacagatggtagtgaaaca

SEQ ID NO: 3156064 - DNA, 25 bp, Homo sapien
attttttcttaagttgctcattcca

SEQ ID NO: 3156065 - DNA, 25 bp, Homo sapien
gagtccagatttacgtccatagaaa

SEQ ID NO: 3156066 - DNA, 25 bp, Homo sapien
gaaaagagtctggaccaaacataca

SEQ ID NO: 3156067 - DNA, 25 bp, Homo sapien
ctagttccattggtctgacatgaga

SEQ ID NO: 3156068 - DNA, 25 bp, Homo sapien
tattgggtcccagaatagcatccaa

SEQ ID NO: 3156069 - DNA, 25 bp, Homo sapien
gaccagatgtctattagagccctga

SEQ ID NO: 3156070 - DNA, 25 bp, Homo sapien
tgtatgcttttatcagaccagatgt

SEQ ID NO: 3156071 - DNA, 25 bp, Homo sapien
ttagtcatgcctagatcttgagctg

SEQ ID NO: 3156072 - DNA, 25 bp, Homo sapien
gttaggtctacagcagcggtctcca

SEQ ID NO: 3156073 - DNA, 25 bp, Homo sapien
taaaatccggagacactgtggttag

SEQ ID NO: 3156074 - DNA, 25 bp, Homo sapien
cagactgtcttacaattgggactca

SEQ ID NO: 3156075 - DNA, 25 bp, Homo sapien
cccctggtctagagaagacacttgg

SEQ ID NO: 3156076 - DNA, 25 bp, Homo sapien
tatgtcttctgacttattactgact

SEQ ID NO: 3156077 - DNA, 25 bp, Homo sapien
gtcttctgacttattactgactgaa

SEQ ID NO: 3156078 - DNA, 25 bp, Homo sapien
tcctatgtcttctgacttattactg

SEQ ID NO: 3156079 - DNA, 25 bp, Homo sapien
ttatctgtatctcctatgtcttctg

SEQ ID NO: 3156080 - DNA, 25 bp, Homo sapien
tatatgaagctttggactgacagac

SEQ ID NO: 3156081 - DNA, 25 bp, Homo sapien
ggaacacagttcaggccatagcagt

SEQ ID NO: 3156082 - DNA, 25 bp, Homo sapien
gctgatgctgctacacttggagaaa

SEQ ID NO: 3156083 - DNA, 25 bp, Homo sapien
tgacaaaggccatagctgtgatgcc

SEQ ID NO: 3156084 - DNA, 25 bp, Homo sapien
catttgtaagtcttcggttttctga

SEQ ID NO: 3156085 - DNA, 25 bp, Homo sapien
cgtatgacattgtttccggtctctg

SEQ ID NO: 3156086 - DNA, 25 bp, Homo sapien
ccggcctctgtgttactcactgtta

SEQ ID NO: 3156087 - DNA, 25 bp, Homo sapien
tgtggccccttcaagcattcgctta

SEQ ID NO: 3156088 - DNA, 25 bp, Homo sapien
cggtctctgtctatcccaaactgca

SEQ ID NO: 3156089 - DNA, 25 bp, Homo sapien
aaagaatcattatgtgacatcattt

SEQ ID NO: 3156090 - DNA, 25 bp, Homo sapien
ttttaagggtcatttgagcatacaa

SEQ ID NO: 3156091 - DNA, 25 bp, Homo sapien
gagcatacaatagtgtaaggatttc

SEQ ID NO: 3156092 - DNA, 25 bp, Homo sapien
tgcaaagaggaatgtctagaatttt

SEQ ID NO: 3156093 - DNA, 25 bp, Homo sapien
tctcttgaagctcaaagttccttgg

SEQ ID NO: 3156094 - DNA, 25 bp, Homo sapien
ttctcttgaagctcaaagttccttg

SEQ ID NO: 3156095 - DNA, 25 bp, Homo sapien
gatttgtaatgatctcaggagcact

SEQ ID NO: 3156096 - DNA, 25 bp, Homo sapien
tggttctgttattacgctttgagga

SEQ ID NO: 3156097 - DNA, 25 bp, Homo sapien
ttcttaagagatttagacactggtt

SEQ ID NO: 3156098 - DNA, 25 bp, Homo sapien
cattctgtagaatcttttggttctg

SEQ ID NO: 3156099 - DNA, 25 bp, Homo sapien
gaaccttacaatgacaaacattttc

SEQ ID NO: 3156100 - DNA, 25 bp, Homo sapien
gttaggaattgaaccttacaatgac

SEQ ID NO: 3156101 - DNA, 25 bp, Homo sapien
tatcacttctcctggttaggaattg

SEQ ID NO: 3156102 - DNA, 25 bp, Homo sapien
tctcctggttaggaattgaacctta

SEQ ID NO: 3156103 - DNA, 25 bp, Homo sapien
atgttagcactggttggagttttag

SEQ ID NO: 3156104 - DNA, 25 bp, Homo sapien
tagcactggttggagttttagtacc

SEQ ID NO: 3156105 - DNA, 25 bp, Homo sapien
tgttagcactggttggagttttagt

SEQ ID NO: 3156106 - DNA, 25 bp, Homo sapien
ttagcactggttggagttttagtac

SEQ ID NO: 3156107 - DNA, 25 bp, Homo sapien
actacagttaaggaacttggcaata

SEQ ID NO: 3156108 - DNA, 25 bp, Homo sapien
gtataaacgcattccaaaagattag

SEQ ID NO: 3156109 - DNA, 25 bp, Homo sapien
aaatgggtgcaacacgtataaacgc

SEQ ID NO: 3156110 - DNA, 25 bp, Homo sapien
aataacacgtaacagcaaaatgggt

SEQ ID NO: 3156111 - DNA, 25 bp, Homo sapien
ctgcagcaccggtgagcaacagggt

SEQ ID NO: 3156112 - DNA, 25 bp, Homo sapien
ggtggcgggggcgtgcgtctccatc

SEQ ID NO: 3156113 - DNA, 25 bp, Homo sapien
ggcgtgcgtctccatctctcggagc

SEQ ID NO: 3156114 - DNA, 25 bp, Homo sapien
tccatctctcggagccgcttcccgc

SEQ ID NO: 3156115 - DNA, 25 bp, Homo sapien
gatccgagaggaatgtggcgtgttc

SEQ ID NO: 3156116 - DNA, 25 bp, Homo sapien
ccacgcagctggatgtaccgcatgt

SEQ ID NO: 3156117 - DNA, 25 bp, Homo sapien
cgcctcaggagagtggcccacgcag

SEQ ID NO: 3156118 - DNA, 25 bp, Homo sapien
tggcgtgttcgggtgcatcgcctca

SEQ ID NO: 3156119 - DNA, 25 bp, Homo sapien
gcagcggcaggtccttccacgtgct

SEQ ID NO: 3156120 - DNA, 25 bp, Homo sapien
ggcaggtccttccacgtgctttcgg

SEQ ID NO: 3156121 - DNA, 25 bp, Homo sapien
gtccttccacgtgctttcggcggcg

SEQ ID NO: 3156122 - DNA, 25 bp, Homo sapien
ttccacgtgctttcggcggcgacat

SEQ ID NO: 3156123 - DNA, 25 bp, Homo sapien
cttctgagctcgacgggccgagctg

SEQ ID NO: 3156124 - DNA, 25 bp, Homo sapien
aaggaagagcctgtcgcgagcgcga

SEQ ID NO: 3156125 - DNA, 25 bp, Homo sapien
tcgcgagcgcgagcttctgagctcg

SEQ ID NO: 3156126 - DNA, 25 bp, Homo sapien
agcttctgagctcgacgggccgagc

SEQ ID NO: 3156127 - DNA, 25 bp, Homo sapien
cagggaagggcatatgaaggctaaa

SEQ ID NO: 3156128 - DNA, 25 bp, Homo sapien
taagtccgttactcccattacgcta

SEQ ID NO: 3156129 - DNA, 25 bp, Homo sapien
cattacgctactgttgggtgctgga

SEQ ID NO: 3156130 - DNA, 25 bp, Homo sapien
aaataacggagatttccacgtgcag

SEQ ID NO: 3156131 - DNA, 25 bp, Homo sapien
tctgcggaagctcgcataccccggc

SEQ ID NO: 3156132 - DNA, 25 bp, Homo sapien
ggctgcgggagcgactcagaagttg

SEQ ID NO: 3156133 - DNA, 25 bp, Homo sapien
gcccggacaggcgaaaagtggcgcg

SEQ ID NO: 3156134 - DNA, 25 bp, Homo sapien
acaggcgaaaagtggcgcgcactgg

SEQ ID NO: 3156135 - DNA, 25 bp, Homo sapien
tgaaacgcggatatcggacgaaaca

SEQ ID NO: 3156136 - DNA, 25 bp, Homo sapien
tatgggcggagactgaaacgcggat

SEQ ID NO: 3156137 - DNA, 25 bp, Homo sapien
cggagactgaaacgcggatatcgga

SEQ ID NO: 3156138 - DNA, 25 bp, Homo sapien
ggatatcggacgaaacaacgcccca

SEQ ID NO: 3156139 - DNA, 25 bp, Homo sapien
cactcttttcgagctccgctacagc

SEQ ID NO: 3156140 - DNA, 25 bp, Homo sapien
tcttttcgagctccgctacagccgc

SEQ ID NO: 3156141 - DNA, 25 bp, Homo sapien
cgccactcttttcgagctccgctac

SEQ ID NO: 3156142 - DNA, 25 bp, Homo sapien
tggtcagagagcttcgctgggcggg

SEQ ID NO: 3156143 - DNA, 25 bp, Homo sapien
ccgcgccgggaagcgaggcagaact

SEQ ID NO: 3156144 - DNA, 25 bp, Homo sapien
accgcgccgggaagcgaggcagaac

SEQ ID NO: 3156145 - DNA, 25 bp, Homo sapien
gaccgcgccgggaagcgaggcagaa

SEQ ID NO: 3156146 - DNA, 25 bp, Homo sapien
cctggactgtctaacaattcgtaga

SEQ ID NO: 3156147 - DNA, 25 bp, Homo sapien
ttcctggactgtctaacaattcgta

SEQ ID NO: 3156148 - DNA, 25 bp, Homo sapien
tggactgtctaacaattcgtagact

SEQ ID NO: 3156149 - DNA, 25 bp, Homo sapien
gactgtctaacaattcgtagacttc

SEQ ID NO: 3156150 - DNA, 25 bp, Homo sapien
caattggaatcatttcacactgcgg

SEQ ID NO: 3156151 - DNA, 25 bp, Homo sapien
aatcatttcacactgcggtgcaatg

SEQ ID NO: 3156152 - DNA, 25 bp, Homo sapien
cacactgcggtgcaatgaaagctgt

SEQ ID NO: 3156153 - DNA, 25 bp, Homo sapien
gcggtgcaatgaaagctgtctcccc

SEQ ID NO: 3156154 - DNA, 25 bp, Homo sapien
gtatagtagtacaattaacttcaat

SEQ ID NO: 3156155 - DNA, 25 bp, Homo sapien
gaataaagtatagtagtacaattaa

SEQ ID NO: 3156156 - DNA, 25 bp, Homo sapien
aagtatagtagtacaattaacttca

SEQ ID NO: 3156157 - DNA, 25 bp, Homo sapien
ctgtgaataaagtatagtagtacaa

SEQ ID NO: 3156158 - DNA, 25 bp, Homo sapien
agtctggcctataagaagtccagca

SEQ ID NO: 3156159 - DNA, 25 bp, Homo sapien
gtctggcctataagaagtccagcaa

SEQ ID NO: 3156160 - DNA, 25 bp, Homo sapien
tctggcctataagaagtccagcaaa

SEQ ID NO: 3156161 - DNA, 25 bp, Homo sapien
acttcagtctggcctataagaagtc

SEQ ID NO: 3156162 - DNA, 25 bp, Homo sapien
tcaaatcctgttgttttatctgtac

SEQ ID NO: 3156163 - DNA, 25 bp, Homo sapien
aatcctgttgttttatctgtacttg

SEQ ID NO: 3156164 - DNA, 25 bp, Homo sapien
caaatcctgttgttttatctgtact

SEQ ID NO: 3156165 - DNA, 25 bp, Homo sapien
tttcaaatcctgttgttttatctgt

SEQ ID NO: 3156166 - DNA, 25 bp, Homo sapien
gtctccaggaatcattgtcaataac

SEQ ID NO: 3156167 - DNA, 25 bp, Homo sapien
ggaatcattgtcaataacatcagca

SEQ ID NO: 3156168 - DNA, 25 bp, Homo sapien
ctttctgttggcttcgatctcctga

SEQ ID NO: 3156169 - DNA, 25 bp, Homo sapien
cgatctcctgatggccagagtctcc

SEQ ID NO: 3156170 - DNA, 25 bp, Homo sapien
gactctagtaattgtgaagataccc

SEQ ID NO: 3156171 - DNA, 25 bp, Homo sapien
tcttctattaggataccagagacat

SEQ ID NO: 3156172 - DNA, 25 bp, Homo sapien
cctggtaacatgcaggagacttgga

SEQ ID NO: 3156173 - DNA, 25 bp, Homo sapien
cttggaatagagtcccagatctgtc

SEQ ID NO: 3156174 - DNA, 25 bp, Homo sapien
ctttaccatttggagcccttcagga

SEQ ID NO: 3156175 - DNA, 25 bp, Homo sapien
ttaccatttggagcccttcaggagt

SEQ ID NO: 3156176 - DNA, 25 bp, Homo sapien
tttaccatttggagcccttcaggag

SEQ ID NO: 3156177 - DNA, 25 bp, Homo sapien
acatacagttttactatagaaggtt

SEQ ID NO: 3156178 - DNA, 25 bp, Homo sapien
catacagttttactatagaaggttt

SEQ ID NO: 3156179 - DNA, 25 bp, Homo sapien
agtagagcccatcaacactacaacc

SEQ ID NO: 3156180 - DNA, 25 bp, Homo sapien
aacactacaaccctgcactgacttt

SEQ ID NO: 3156181 - DNA, 25 bp, Homo sapien
agaagtagagcccatcaacactaca

SEQ ID NO: 3156182 - DNA, 25 bp, Homo sapien
caacactacaaccctgcactgactt

SEQ ID NO: 3156183 - DNA, 25 bp, Homo sapien
tagaataccttaagctctttggagg

SEQ ID NO: 3156184 - DNA, 25 bp, Homo sapien
tggttgtaaacccagggctccatta

SEQ ID NO: 3156185 - DNA, 25 bp, Homo sapien
tggcaactaaagattcccgggagaa

SEQ ID NO: 3156186 - DNA, 25 bp, Homo sapien
attaagaaagcctagcggccaggcg

SEQ ID NO: 3156187 - DNA, 25 bp, Homo sapien
tctttcttgactgggtggtccctca

SEQ ID NO: 3156188 - DNA, 25 bp, Homo sapien
ccctcaactggtgcagggagaacca

SEQ ID NO: 3156189 - DNA, 25 bp, Homo sapien
tcagtgagggaatagctcataggcc

SEQ ID NO: 3156190 - DNA, 25 bp, Homo sapien
tagggacacgtcttcaaacaagagt

SEQ ID NO: 3156191 - DNA, 25 bp, Homo sapien
tgataactggatatgcagtgttccc

SEQ ID NO: 3156192 - DNA, 25 bp, Homo sapien
ataactggatatgcagtgttcccag

SEQ ID NO: 3156193 - DNA, 25 bp, Homo sapien
taactggatatgcagtgttcccaga

SEQ ID NO: 3156194 - DNA, 25 bp, Homo sapien
gacctccagagatctgcccacttca

SEQ ID NO: 3156195 - DNA, 25 bp, Homo sapien
tgacctccagagatctgcccacttc

SEQ ID NO: 3156196 - DNA, 25 bp, Homo sapien
ttgaaacttctgttcacatacacta

SEQ ID NO: 3156197 - DNA, 25 bp, Homo sapien
gaaacttctgttcacatacactatc

SEQ ID NO: 3156198 - DNA, 25 bp, Homo sapien
cacatacactatccctttcaatccc

SEQ ID NO: 3156199 - DNA, 25 bp, Homo sapien
cctttcaatccctggcgaagaacaa

SEQ ID NO: 3156200 - DNA, 25 bp, Homo sapien
caaatggttgcttaacccaaatatc

SEQ ID NO: 3156201 - DNA, 25 bp, Homo sapien
aaaatgcttgctcgcagtttgctcc

SEQ ID NO: 3156202 - DNA, 25 bp, Homo sapien
aggaaatccatgtgttcaaaatgct

SEQ ID NO: 3156203 - DNA, 25 bp, Homo sapien
tcaaaatgcttgctcgcagtttgct

SEQ ID NO: 3156204 - DNA, 25 bp, Homo sapien
tgcttgctcgcagtttgctccatac

SEQ ID NO: 3156205 - DNA, 25 bp, Homo sapien
gattttccttcagctaaattagaaa

SEQ ID NO: 3156206 - DNA, 25 bp, Homo sapien
ttattaatatggatctagagaagca

SEQ ID NO: 3156207 - DNA, 25 bp, Homo sapien
tttattaatatggatctagagaagc

SEQ ID NO: 3156208 - DNA, 25 bp, Homo sapien
caatagtagtgaccaccaatactta

SEQ ID NO: 3156209 - DNA, 25 bp, Homo sapien
ctgagggagttaagatcatttaatc

SEQ ID NO: 3156210 - DNA, 25 bp, Homo sapien
aaatgcaagtctggagaaatatagc

SEQ ID NO: 3156211 - DNA, 25 bp, Homo sapien
tagctgggagtcagtaatgccagtt

SEQ ID NO: 3156212 - DNA, 25 bp, Homo sapien
tgcaacagtgagtataccaagagct

SEQ ID NO: 3156213 - DNA, 25 bp, Homo sapien
gaaagtacaagtctagacaggcaca

SEQ ID NO: 3156214 - DNA, 25 bp, Homo sapien
tgttgaatttgaccctcacttgagg

SEQ ID NO: 3156215 - DNA, 25 bp, Homo sapien
tagctcggcatggtgctgcaagatt

SEQ ID NO: 3156216 - DNA, 25 bp, Homo sapien
taaaggtaccaatgtgtggcagtcc

SEQ ID NO: 3156217 - DNA, 25 bp, Homo sapien
tgataaaaacgtgggccttcagaga

SEQ ID NO: 3156218 - DNA, 25 bp, Homo sapien
tctctgacagatagctaagcatagc

SEQ ID NO: 3156219 - DNA, 25 bp, Homo sapien
ccatggataggcttcgggagaaccc

SEQ ID NO: 3156220 - DNA, 25 bp, Homo sapien
gaacttactactgaggacatgtgga

SEQ ID NO: 3156221 - DNA, 25 bp, Homo sapien
caatttgtaatggtcagtcctatcc

SEQ ID NO: 3156222 - DNA, 25 bp, Homo sapien
gacatgtggactctactaagaaact

SEQ ID NO: 3156223 - DNA, 25 bp, Homo sapien
caagctgaaatagcagtcagtgact

SEQ ID NO: 3156224 - DNA, 25 bp, Homo sapien
ggtcctcaaggcaaaactcagcttt

SEQ ID NO: 3156225 - DNA, 25 bp, Homo sapien
catgatgggccttacatatattgac

SEQ ID NO: 3156226 - DNA, 25 bp, Homo sapien
gatcatacatcatccctcacctggg

SEQ ID NO: 3156227 - DNA, 25 bp, Homo sapien
tgtcaagcctctgctcaaactgagt

SEQ ID NO: 3156228 - DNA, 25 bp, Homo sapien
cagtgtagttccaaacccgagggct

SEQ ID NO: 3156229 - DNA, 25 bp, Homo sapien
gaccagctatcaaggcatcccgtag

SEQ ID NO: 3156230 - DNA, 25 bp, Homo sapien
tcccgtagcctagtcaagttgacag

SEQ ID NO: 3156231 - DNA, 25 bp, Homo sapien
ttagatgacgctcacccacatgggt

SEQ ID NO: 3156232 - DNA, 25 bp, Homo sapien
tctaggtgctggagggtgtaattct

SEQ ID NO: 3156233 - DNA, 25 bp, Homo sapien
gctcactgcagtatccctaggatct

SEQ ID NO: 3156234 - DNA, 25 bp, Homo sapien
tctgaggccaaggaaccatatttac

SEQ ID NO: 3156235 - DNA, 25 bp, Homo sapien
tgatatggcatatggtgccctgcca

SEQ ID NO: 3156236 - DNA, 25 bp, Homo sapien
cagtctttctggttatacgttgaaa

SEQ ID NO: 3156237 - DNA, 25 bp, Homo sapien
tgacccaggatgaacctcactgcaa

SEQ ID NO: 3156238 - DNA, 25 bp, Homo sapien
tctggttgcatcctcttagaacagg

SEQ ID NO: 3156239 - DNA, 25 bp, Homo sapien
aacatttgatcttgcagactgggca

SEQ ID NO: 3156240 - DNA, 25 bp, Homo sapien
tgtttccaggagaccgccatggtcg

SEQ ID NO: 3156241 - DNA, 25 bp, Homo sapien
ccgccatggtcgaggcagcgtcctg

SEQ ID NO: 3156242 - DNA, 25 bp, Homo sapien
ggtcaccagtttcggctcaaagcag

SEQ ID NO: 3156243 - DNA, 25 bp, Homo sapien
agaaaagaggcgtcggactcctgga

SEQ ID NO: 3156244 - DNA, 25 bp, Homo sapien
cagccctaaggcagcatcagagatc

SEQ ID NO: 3156245 - DNA, 25 bp, Homo sapien
cgtcgccgagttgggagtgtcttca

SEQ ID NO: 3156246 - DNA, 25 bp, Homo sapien
gctctcgtggcaagaaatttgtgcg

SEQ ID NO: 3156247 - DNA, 25 bp, Homo sapien
tttgtgcggatagagttgatacacc

SEQ ID NO: 3156248 - DNA, 25 bp, Homo sapien
acaggatctccgaggcagccaagag

SEQ ID NO: 3156249 - DNA, 25 bp, Homo sapien
tgccccggaacaggatctccgaggc

SEQ ID NO: 3156250 - DNA, 25 bp, Homo sapien
ggaacaggatctccgaggcagccaa

SEQ ID NO: 3156251 - DNA, 25 bp, Homo sapien
cccggaacaggatctccgaggcagc

SEQ ID NO: 3156252 - DNA, 25 bp, Homo sapien
cttggaggagacgaggggcggggcg

SEQ ID NO: 3156253 - DNA, 25 bp, Homo sapien
acttcactccacagcgcaggtactg

SEQ ID NO: 3156254 - DNA, 25 bp, Homo sapien
tcttattgacggtcttgagagcgcg

SEQ ID NO: 3156255 - DNA, 25 bp, Homo sapien
aagtcgccgttctggccataccggt

SEQ ID NO: 3156256 - DNA, 25 bp, Homo sapien
agagcgcgcgtgaagtcgccgttct

SEQ ID NO: 3156257 - DNA, 25 bp, Homo sapien
gggcagttacgtcatctttgttgat

SEQ ID NO: 3156258 - DNA, 25 bp, Homo sapien
ccttgaaacttccattctggataag

SEQ ID NO: 3156259 - DNA, 25 bp, Homo sapien
taacactttggtgtgagtattgatg

SEQ ID NO: 3156260 - DNA, 25 bp, Homo sapien
ttggctaacactttggtgtgagtat

SEQ ID NO: 3156261 - DNA, 25 bp, Homo sapien
gcctgtactcgcaatatgccttttc

SEQ ID NO: 3156262 - DNA, 25 bp, Homo sapien
ctgtactcgcaatatgccttttcaa

SEQ ID NO: 3156263 - DNA, 25 bp, Homo sapien
cctgtactcgcaatatgccttttca

SEQ ID NO: 3156264 - DNA, 25 bp, Homo sapien
agcctgtactcgcaatatgcctttt

SEQ ID NO: 3156265 - DNA, 25 bp, Homo sapien
ctctatacactgctaagcattcatc

SEQ ID NO: 3156266 - DNA, 25 bp, Homo sapien
ctatacactgctaagcattcatcat

SEQ ID NO: 3156267 - DNA, 25 bp, Homo sapien
tctatacactgctaagcattcatca

SEQ ID NO: 3156268 - DNA, 25 bp, Homo sapien
ttttgtaggattttcatggcctggt

SEQ ID NO: 3156269 - DNA, 25 bp, Homo sapien
taggattttcatggcctggttcagc

SEQ ID NO: 3156270 - DNA, 25 bp, Homo sapien
atcagtgcacatgcagtgttgtagc

SEQ ID NO: 3156271 - DNA, 25 bp, Homo sapien
gctggccttggcctatcagtgcaca

SEQ ID NO: 3156272 - DNA, 25 bp, Homo sapien
tacaaagttatatgcacgttatatt

SEQ ID NO: 3156273 - DNA, 25 bp, Homo sapien
ctacaaagttatatgcacgttatat

SEQ ID NO: 3156274 - DNA, 25 bp, Homo sapien
caaagttatatgcacgttatattta

SEQ ID NO: 3156275 - DNA, 25 bp, Homo sapien
aagttatatgcacgttatatttaca

SEQ ID NO: 3156276 - DNA, 25 bp, Homo sapien
agacgacaggaacttggagaaattg

SEQ ID NO: 3156277 - DNA, 25 bp, Homo sapien
aaagacgacaggaacttggagaaat

SEQ ID NO: 3156278 - DNA, 25 bp, Homo sapien
aagacgacaggaacttggagaaatt

SEQ ID NO: 3156279 - DNA, 25 bp, Homo sapien
tgtcttctgataatgaacggcggca

SEQ ID NO: 3156280 - DNA, 25 bp, Homo sapien
tcttctgataatgaacggcggcaaa

SEQ ID NO: 3156281 - DNA, 25 bp, Homo sapien
tctgataatgaacggcggcaaagat

SEQ ID NO: 3156282 - DNA, 25 bp, Homo sapien
cttctgataatgaacggcggcaaag

SEQ ID NO: 3156283 - DNA, 25 bp, Homo sapien
tttccaaacccattatgcagttgtg

SEQ ID NO: 3156284 - DNA, 25 bp, Homo sapien
gtttccaaacccattatgcagttgt

SEQ ID NO: 3156285 - DNA, 25 bp, Homo sapien
gtcagatatgtttgtttccaaaccc

SEQ ID NO: 3156286 - DNA, 25 bp, Homo sapien
ttccaaacccattatgcagttgtgt

SEQ ID NO: 3156287 - DNA, 25 bp, Homo sapien
aacttcaaaagctggaactaattct

SEQ ID NO: 3156288 - DNA, 25 bp, Homo sapien
gatcctagaagaacatggtaacaag

SEQ ID NO: 3156289 - DNA, 25 bp, Homo sapien
taaccgatgctccagattaatccac

SEQ ID NO: 3156290 - DNA, 25 bp, Homo sapien
aagtagtagctctcttaaccgatgc

SEQ ID NO: 3156291 - DNA, 25 bp, Homo sapien
gaatataagccatctgaccatgaat

SEQ ID NO: 3156292 - DNA, 25 bp, Homo sapien
gattgtaaagttgcaaagcctcctc

SEQ ID NO: 3156293 - DNA, 25 bp, Homo sapien
aagcctcctctgttcgaccctgaag

SEQ ID NO: 3156294 - DNA, 25 bp, Homo sapien
accatgaatgatggccagttctgcc

SEQ ID NO: 3156295 - DNA, 25 bp, Homo sapien
agctagtaatcccacatctgttggt

SEQ ID NO: 3156296 - DNA, 25 bp, Homo sapien
gcaattacagctagtaatcccacat

SEQ ID NO: 3156297 - DNA, 25 bp, Homo sapien
tttgcaattacagctagtaatccca

SEQ ID NO: 3156298 - DNA, 25 bp, Homo sapien
tacagctagtaatcccacatctgtt

SEQ ID NO: 3156299 - DNA, 25 bp, Homo sapien
tttaatgtacagcaagaaactgcct

SEQ ID NO: 3156300 - DNA, 25 bp, Homo sapien
tgcaaatacatgataccactgtgct

SEQ ID NO: 3156301 - DNA, 25 bp, Homo sapien
catatctgtaccacttttgaaccca

SEQ ID NO: 3156302 - DNA, 25 bp, Homo sapien
tactgtcgagctccaaaccaatttg

SEQ ID NO: 3156303 - DNA, 25 bp, Homo sapien
aaaaaagggacagcacaaattgaag

SEQ ID NO: 3156304 - DNA, 25 bp, Homo sapien
tctcaaaggaggcttcctaggtata

SEQ ID NO: 3156305 - DNA, 25 bp, Homo sapien
taaaaaggcttaacaagtgaactgc

SEQ ID NO: 3156306 - DNA, 25 bp, Homo sapien
gcaatttctacaagctatgccctct

SEQ ID NO: 3156307 - DNA, 25 bp, Homo sapien
ttccgcattggttaatttcactttc

SEQ ID NO: 3156308 - DNA, 25 bp, Homo sapien
tccgcattggttaatttcactttct

SEQ ID NO: 3156309 - DNA, 25 bp, Homo sapien
ggcagcttggattaacacaggtaag

SEQ ID NO: 3156310 - DNA, 25 bp, Homo sapien
gattaacacaggtaagagatgctcg

SEQ ID NO: 3156311 - DNA, 25 bp, Homo sapien
tgtgctgcttttcacggcagagctg

SEQ ID NO: 3156312 - DNA, 25 bp, Homo sapien
ggcagatattttgcggcattgttca

SEQ ID NO: 3156313 - DNA, 25 bp, Homo sapien
gatgatcctaattgtacctgtccaa

SEQ ID NO: 3156314 - DNA, 25 bp, Homo sapien
aaagtcagtatctccataattgagg

SEQ ID NO: 3156315 - DNA, 25 bp, Homo sapien
ggagtagaactcactggagatcaga

SEQ ID NO: 3156316 - DNA, 25 bp, Homo sapien
gatcccctaactcaggttaaacaga

SEQ ID NO: 3156317 - DNA, 25 bp, Homo sapien
catttaatttacacaactaattgta

SEQ ID NO: 3156318 - DNA, 25 bp, Homo sapien
tacacaactaattgtatacattaca

SEQ ID NO: 3156319 - DNA, 25 bp, Homo sapien
ttaatttacacaactaattgtatac

SEQ ID NO: 3156320 - DNA, 25 bp, Homo sapien
ttgtatacattacaattacttagct

SEQ ID NO: 3156321 - DNA, 25 bp, Homo sapien
tcaactgtgccatggtcagcttaat

SEQ ID NO: 3156322 - DNA, 25 bp, Homo sapien
caactgtgccatggtcagcttaatt

SEQ ID NO: 3156323 - DNA, 25 bp, Homo sapien
ttcaactgtgccatggtcagcttaa

SEQ ID NO: 3156324 - DNA, 25 bp, Homo sapien
catgcctggtttatgctttaactcc

SEQ ID NO: 3156325 - DNA, 25 bp, Homo sapien
attagacatgctttagaaatattac

SEQ ID NO: 3156326 - DNA, 25 bp, Homo sapien
actcctctatgcttctcaatattag

SEQ ID NO: 3156327 - DNA, 25 bp, Homo sapien
gctttaactcctctatgcttctcaa

SEQ ID NO: 3156328 - DNA, 25 bp, Homo sapien
ggctctccgctaatacctgatttat

SEQ ID NO: 3156329 - DNA, 25 bp, Homo sapien
taaagcagtgccagttcacaaatgg

SEQ ID NO: 3156330 - DNA, 25 bp, Homo sapien
cagaagttgagaataagcccttaga

SEQ ID NO: 3156331 - DNA, 25 bp, Homo sapien
gaacaaccgtgttttccaaatatga

SEQ ID NO: 3156332 - DNA, 25 bp, Homo sapien
tgaagacctcaatggcactatcaat

SEQ ID NO: 3156333 - DNA, 25 bp, Homo sapien
gaagacctcaatggcactatcaata

SEQ ID NO: 3156334 - DNA, 25 bp, Homo sapien
tgtgaagacctcaatggcactatca

SEQ ID NO: 3156335 - DNA, 25 bp, Homo sapien
tgtgtgaagacctcaatggcactat

SEQ ID NO: 3156336 - DNA, 25 bp, Homo sapien
tcttccgcccatatttgagtttgaa

SEQ ID NO: 3156337 - DNA, 25 bp, Homo sapien
cttcttccgcccatatttgagtttg

SEQ ID NO: 3156338 - DNA, 25 bp, Homo sapien
gcagaaataagctgtgccagggtgt

SEQ ID NO: 3156339 - DNA, 25 bp, Homo sapien
gctttctctggatctacaagtgagt

SEQ ID NO: 3156340 - DNA, 25 bp, Homo sapien
ggatctacaagtgagtaagcagaaa

SEQ ID NO: 3156341 - DNA, 25 bp, Homo sapien
taagctgtgccagggtgtgaatatc

SEQ ID NO: 3156342 - DNA, 25 bp, Homo sapien
tccacccttcttccgaatgtatgta

SEQ ID NO: 3156343 - DNA, 25 bp, Homo sapien
ttccacccttcttccgaatgtatgt

SEQ ID NO: 3156344 - DNA, 25 bp, Homo sapien
ttattccttgtctaatttaaaatca

SEQ ID NO: 3156345 - DNA, 25 bp, Homo sapien
cagcattagagaacgttacaatgaa

SEQ ID NO: 3156346 - DNA, 25 bp, Homo sapien
atcagcattagagaacgttacaatg

SEQ ID NO: 3156347 - DNA, 25 bp, Homo sapien
gcattagagaacgttacaatgaaaa

SEQ ID NO: 3156348 - DNA, 25 bp, Homo sapien
tgtcctcaggaagaagtgactattc

SEQ ID NO: 3156349 - DNA, 25 bp, Homo sapien
agagtcaacacaatcatcttctcca

SEQ ID NO: 3156350 - DNA, 25 bp, Homo sapien
tcttcctcagagtcaacacaatcat

SEQ ID NO: 3156351 - DNA, 25 bp, Homo sapien
ttcctaacttcccactgtcctcagg

SEQ ID NO: 3156352 - DNA, 25 bp, Homo sapien
tttgcacaagcatgactacctagaa

SEQ ID NO: 3156353 - DNA, 25 bp, Homo sapien
gttgggcacttatcataaacatggt

SEQ ID NO: 3156354 - DNA, 25 bp, Homo sapien
ggtgacaattcgaaaacagattctg

SEQ ID NO: 3156355 - DNA, 25 bp, Homo sapien
gctctataagagttagttgggcact

SEQ ID NO: 3156356 - DNA, 25 bp, Homo sapien
ctgcatatggctagaatcctttccc

SEQ ID NO: 3156357 - DNA, 25 bp, Homo sapien
gtttgtttaaacgatgtctctaagc

SEQ ID NO: 3156358 - DNA, 25 bp, Homo sapien
taaacgatgtctctaagcctgggaa

SEQ ID NO: 3156359 - DNA, 25 bp, Homo sapien
cgatgtctctaagcctgggaataaa

SEQ ID NO: 3156360 - DNA, 25 bp, Homo sapien
caagatagtttgtttaaacgatgtc

SEQ ID NO: 3156361 - DNA, 25 bp, Homo sapien
taagaacgttctcgcattggcagcc

SEQ ID NO: 3156362 - DNA, 25 bp, Homo sapien
cccggtagtaagaacgttctcgcat

SEQ ID NO: 3156363 - DNA, 25 bp, Homo sapien
ggtagtaagaacgttctcgcattgg

SEQ ID NO: 3156364 - DNA, 25 bp, Homo sapien
tagtaagaacgttctcgcattggca

SEQ ID NO: 3156365 - DNA, 25 bp, Homo sapien
gtgggtgggctgctcacagttttac

SEQ ID NO: 3156366 - DNA, 25 bp, Homo sapien
gctgctcacagttttactggcatcc

SEQ ID NO: 3156367 - DNA, 25 bp, Homo sapien
gtgggctgctcacagttttactggc

SEQ ID NO: 3156368 - DNA, 25 bp, Homo sapien
gggtgggctgctcacagttttactg

SEQ ID NO: 3156369 - DNA, 25 bp, Homo sapien
tagaggcagatactgttgcagcact

SEQ ID NO: 3156370 - DNA, 25 bp, Homo sapien
gaggcagatactgttgcagcactgc

SEQ ID NO: 3156371 - DNA, 25 bp, Homo sapien
ggcagatactgttgcagcactgcca

SEQ ID NO: 3156372 - DNA, 25 bp, Homo sapien
ttgtagaggcagatactgttgcagc

SEQ ID NO: 3156373 - DNA, 25 bp, Homo sapien
tgtcactgacactagtttaaaaaca

SEQ ID NO: 3156374 - DNA, 25 bp, Homo sapien
tattatattcctagtgtcactgaca

SEQ ID NO: 3156375 - DNA, 25 bp, Homo sapien
tagtgtcactgacactagtttaaaa

SEQ ID NO: 3156376 - DNA, 25 bp, Homo sapien
ttattatattcctagtgtcactgac

SEQ ID NO: 3156377 - DNA, 25 bp, Homo sapien
ccatttagtgaagaacatcagtgta

SEQ ID NO: 3156378 - DNA, 25 bp, Homo sapien
ggatacaacagataccaagatgggt

SEQ ID NO: 3156379 - DNA, 25 bp, Homo sapien
ttaaagtgggacttgaacagaaaca

SEQ ID NO: 3156380 - DNA, 25 bp, Homo sapien
tgctcagaagattccactttcagtc

SEQ ID NO: 3156381 - DNA, 25 bp, Homo sapien
aaaagtatcccatattccagtatca

SEQ ID NO: 3156382 - DNA, 25 bp, Homo sapien
tgaaaagtatcccatattccagtat

SEQ ID NO: 3156383 - DNA, 25 bp, Homo sapien
gaaaagtatcccatattccagtatc

SEQ ID NO: 3156384 - DNA, 25 bp, Homo sapien
catggggcacaaaggagccatatat

SEQ ID NO: 3156385 - DNA, 25 bp, Homo sapien
ctgaaaatgacatggggcacaaagg

SEQ ID NO: 3156386 - DNA, 25 bp, Homo sapien
aaaatgacatggggcacaaaggagc

SEQ ID NO: 3156387 - DNA, 25 bp, Homo sapien
atgacatggggcacaaaggagccat

SEQ ID NO: 3156388 - DNA, 25 bp, Homo sapien
tgctgtatcagcatgctaccataat

SEQ ID NO: 3156389 - DNA, 25 bp, Homo sapien
catggtgctgtatcagcatgctacc

SEQ ID NO: 3156390 - DNA, 25 bp, Homo sapien
ctttcatggtgctgtatcagcatgc

SEQ ID NO: 3156391 - DNA, 25 bp, Homo sapien
gttctttcatggtgctgtatcagca

SEQ ID NO: 3156392 - DNA, 25 bp, Homo sapien
gagtatctatcaatgggccaaacag

SEQ ID NO: 3156393 - DNA, 25 bp, Homo sapien
gattgagacagtccaaacccatgtg

SEQ ID NO: 3156394 - DNA, 25 bp, Homo sapien
cacagcagcactttattaacaagga

SEQ ID NO: 3156395 - DNA, 25 bp, Homo sapien
taatactgcctggtatgcaactcag

SEQ ID NO: 3156396 - DNA, 25 bp, Homo sapien
ggcagcaccccatttctttcttgta

SEQ ID NO: 3156397 - DNA, 25 bp, Homo sapien
tcttgtaaaggaggaaagtctttca

SEQ ID NO: 3156398 - DNA, 25 bp, Homo sapien
ctttagatgccactgcaaattctgc

SEQ ID NO: 3156399 - DNA, 25 bp, Homo sapien
aagatctctttagatgccactgcaa

SEQ ID NO: 3156400 - DNA, 25 bp, Homo sapien
ctgctgtgccttgggtcaaaatttt

SEQ ID NO: 3156401 - DNA, 25 bp, Homo sapien
ctgccactattaccaaaagactgtt

SEQ ID NO: 3156402 - DNA, 25 bp, Homo sapien
cactattaccaaaagactgttctct

SEQ ID NO: 3156403 - DNA, 25 bp, Homo sapien
tggaatcctaaataagtaacagtta

SEQ ID NO: 3156404 - DNA, 25 bp, Homo sapien
taataataccaatgcctgtcaataa

SEQ ID NO: 3156405 - DNA, 25 bp, Homo sapien
tgtaccacagtgaatggatgtatcc

SEQ ID NO: 3156406 - DNA, 25 bp, Homo sapien
gtttatacttcatttgacaattaaa

SEQ ID NO: 3156407 - DNA, 25 bp, Homo sapien
tgcttagcaatgactaataatacca

SEQ ID NO: 3156408 - DNA, 25 bp, Homo sapien
gcgtcagaatccagaggttccggga

SEQ ID NO: 3156409 - DNA, 25 bp, Homo sapien
tgacgtctccggcttcaatcccgag

SEQ ID NO: 3156410 - DNA, 25 bp, Homo sapien
ggttccgggaggattctcagccttc

SEQ ID NO: 3156411 - DNA, 25 bp, Homo sapien
agtgtctccagactactacccagga

SEQ ID NO: 3156412 - DNA, 25 bp, Homo sapien
taagagccttccacgtgggccgcag

SEQ ID NO: 3156413 - DNA, 25 bp, Homo sapien
ggctaagagccttccacgtgggccg

SEQ ID NO: 3156414 - DNA, 25 bp, Homo sapien
gtggctaagagccttccacgtgggc

SEQ ID NO: 3156415 - DNA, 25 bp, Homo sapien
ctaagagccttccacgtgggccgca

SEQ ID NO: 3156416 - DNA, 25 bp, Homo sapien
ccaaccaggacgtgggacagttcgg

SEQ ID NO: 3156417 - DNA, 25 bp, Homo sapien
tgagcccagccaagcgaaaccaaga

SEQ ID NO: 3156418 - DNA, 25 bp, Homo sapien
aagggcggaggcgtacggatggatt

SEQ ID NO: 3156419 - DNA, 25 bp, Homo sapien
cagccgattcgctgaacccgcaggg

SEQ ID NO: 3156420 - DNA, 25 bp, Homo sapien
tctcttcttgtcccttaaattgttc

SEQ ID NO: 3156421 - DNA, 25 bp, Homo sapien
tgttctcccctttctcttcttgtcc

SEQ ID NO: 3156422 - DNA, 25 bp, Homo sapien
ctttctcttcttgtcccttaaattg

SEQ ID NO: 3156423 - DNA, 25 bp, Homo sapien
cttgttctcccctttctcttcttgt

SEQ ID NO: 3156424 - DNA, 25 bp, Homo sapien
ggtctcttaccagcggctcgagcgg

SEQ ID NO: 3156425 - DNA, 25 bp, Homo sapien
gctcgagcggggtccttgtcaaggt

SEQ ID NO: 3156426 - DNA, 25 bp, Homo sapien
actgggtctcttaccagcggctcga

SEQ ID NO: 3156427 - DNA, 25 bp, Homo sapien
ctgaacggccgacaaaagccttggg

SEQ ID NO: 3156428 - DNA, 25 bp, Homo sapien
ggcgcatctctttcatccataggta

SEQ ID NO: 3156429 - DNA, 25 bp, Homo sapien
gacccgactgaggttaagacacagg

SEQ ID NO: 3156430 - DNA, 25 bp, Homo sapien
ggcctccgacgtaacagagacagcg

SEQ ID NO: 3156431 - DNA, 25 bp, Homo sapien
tagtgttgcgcgctggacagatcta

SEQ ID NO: 3156432 - DNA, 25 bp, Homo sapien
tttgaagctagagagtgcaggacac

SEQ ID NO: 3156433 - DNA, 25 bp, Homo sapien
ttgaagctagagagtgcaggacact

SEQ ID NO: 3156434 - DNA, 25 bp, Homo sapien
tgtttgaagctagagagtgcaggac

SEQ ID NO: 3156435 - DNA, 25 bp, Homo sapien
ctctgtttgaagctagagagtgcag

SEQ ID NO: 3156436 - DNA, 25 bp, Homo sapien
caaactgcatggaaaccttgggtgg

SEQ ID NO: 3156437 - DNA, 25 bp, Homo sapien
tgcaaactgcatggaaaccttgggt

SEQ ID NO: 3156438 - DNA, 25 bp, Homo sapien
gcaaactgcatggaaaccttgggtg

SEQ ID NO: 3156439 - DNA, 25 bp, Homo sapien
tgatacttgacaggacaagtccatc

SEQ ID NO: 3156440 - DNA, 25 bp, Homo sapien
gtgccaacaccacgcattttagttt

SEQ ID NO: 3156441 - DNA, 25 bp, Homo sapien
cataggaggcaggaaactaatttca

SEQ ID NO: 3156442 - DNA, 25 bp, Homo sapien
tcacccatgtaaattttagcctcag

SEQ ID NO: 3156443 - DNA, 25 bp, Homo sapien
gctgcaattagctgatgaaggtatt

SEQ ID NO: 3156444 - DNA, 25 bp, Homo sapien
agaggaagtactgggtttgctgcaa

SEQ ID NO: 3156445 - DNA, 25 bp, Homo sapien
atttcttggcttcaggtaatcggct

SEQ ID NO: 3156446 - DNA, 25 bp, Homo sapien
caaagatcagcagcaatcccttgga

SEQ ID NO: 3156447 - DNA, 25 bp, Homo sapien
cttcatccggagtggaataagaata

SEQ ID NO: 3156448 - DNA, 25 bp, Homo sapien
actcttatttattgctctcagtgac

SEQ ID NO: 3156449 - DNA, 25 bp, Homo sapien
gttggttattttgcaatcctttcag

SEQ ID NO: 3156450 - DNA, 25 bp, Homo sapien
tggaataagaataggacaaagttgg

SEQ ID NO: 3156451 - DNA, 25 bp, Homo sapien
cctgtcatttcccacttcagataat

SEQ ID NO: 3156452 - DNA, 25 bp, Homo sapien
gccaaagcttcatggatatctgtaa

SEQ ID NO: 3156453 - DNA, 25 bp, Homo sapien
gcaatcaagtctttggcatcttgca

SEQ ID NO: 3156454 - DNA, 25 bp, Homo sapien
gccattcttagtcaggtaggttcca

SEQ ID NO: 3156455 - DNA, 25 bp, Homo sapien
gaaacctttggcttcaagcctgcca

SEQ ID NO: 3156456 - DNA, 25 bp, Homo sapien
tctcagtcgtgagccgcacagtggg

SEQ ID NO: 3156457 - DNA, 25 bp, Homo sapien
gtggaaacctttggcttcaagcctg

SEQ ID NO: 3156458 - DNA, 25 bp, Homo sapien
acactgatgacatctcagtcgtgag

SEQ ID NO: 3156459 - DNA, 25 bp, Homo sapien
atgttttggatccacagttcttgaa

SEQ ID NO: 3156460 - DNA, 25 bp, Homo sapien
cagttcttgaatccccagatgtgga

SEQ ID NO: 3156461 - DNA, 25 bp, Homo sapien
tatggagggctaactatatacatcc

SEQ ID NO: 3156462 - DNA, 25 bp, Homo sapien
aactatatacatcccatgcactgag

SEQ ID NO: 3156463 - DNA, 25 bp, Homo sapien
atagagatgctgttattatgttagc

SEQ ID NO: 3156464 - DNA, 25 bp, Homo sapien
tgtccgttggtattctcagggagac

SEQ ID NO: 3156465 - DNA, 25 bp, Homo sapien
actgattccaagatcctcacaggca

SEQ ID NO: 3156466 - DNA, 25 bp, Homo sapien
ggcaaatgtggatgctcaagctcct

SEQ ID NO: 3156467 - DNA, 25 bp, Homo sapien
taacaagctcctggaaaagaagccc

SEQ ID NO: 3156468 - DNA, 25 bp, Homo sapien
caagttggatttacagagtgtctgc

SEQ ID NO: 3156469 - DNA, 25 bp, Homo sapien
caaggcactatagttacaagttgga

SEQ ID NO: 3156470 - DNA, 25 bp, Homo sapien
cagatccacttaatggaaagacacc

SEQ ID NO: 3156471 - DNA, 25 bp, Homo sapien
taaagtctccaaggtcgtatgccac

SEQ ID NO: 3156472 - DNA, 25 bp, Homo sapien
tatgccaccccattaggcccattgg

SEQ ID NO: 3156473 - DNA, 25 bp, Homo sapien
ggctggcaacagacacgagattgtg

SEQ ID NO: 3156474 - DNA, 25 bp, Homo sapien
gaatgcttgtaagcccggaaggctg

SEQ ID NO: 3156475 - DNA, 25 bp, Homo sapien
ccttctgggcgcatctggggactaa

SEQ ID NO: 3156476 - DNA, 25 bp, Homo sapien
aaagccagagacaggtcggtggaga

SEQ ID NO: 3156477 - DNA, 25 bp, Homo sapien
tgtccagagcaaggattctcgcctg

SEQ ID NO: 3156478 - DNA, 25 bp, Homo sapien
taggagacgagatgctgaccctgtt

SEQ ID NO: 3156479 - DNA, 25 bp, Homo sapien
tgctctctgcgcgatacgataaggg

SEQ ID NO: 3156480 - DNA, 25 bp, Homo sapien
agaagcttctgtcgcgcgcgggact

SEQ ID NO: 3156481 - DNA, 25 bp, Homo sapien
aggcgcagtttgctctctgcgcgat

SEQ ID NO: 3156482 - DNA, 25 bp, Homo sapien
gggactcaccctcccgactggttgc

SEQ ID NO: 3156483 - DNA, 25 bp, Homo sapien
ctcggacggcgcagatgaacttaga

SEQ ID NO: 3156484 - DNA, 25 bp, Homo sapien
tcggacggcgcagatgaacttagaa

SEQ ID NO: 3156485 - DNA, 25 bp, Homo sapien
cggacggcgcagatgaacttagaaa

SEQ ID NO: 3156486 - DNA, 25 bp, Homo sapien
aacttagaaactcttggttctccat

SEQ ID NO: 3156487 - DNA, 25 bp, Homo sapien
tctggaagacttcggagcaagtgga

SEQ ID NO: 3156488 - DNA, 25 bp, Homo sapien
caagctctctgtgagtgtcgagaat

SEQ ID NO: 3156489 - DNA, 25 bp, Homo sapien
ggatatttctgttgagacctgccca

SEQ ID NO: 3156490 - DNA, 25 bp, Homo sapien
tcgagaatcctgagcacaatgggct

SEQ ID NO: 3156491 - DNA, 25 bp, Homo sapien
ttcgtaaggtgcataggagtcccgg

SEQ ID NO: 3156492 - DNA, 25 bp, Homo sapien
gagatcattactgcggcgctgggaa

SEQ ID NO: 3156493 - DNA, 25 bp, Homo sapien
aagcaactcggtttccttggcctcg

SEQ ID NO: 3156494 - DNA, 25 bp, Homo sapien
tcataggactcatgaggctcatcac

SEQ ID NO: 3156495 - DNA, 25 bp, Homo sapien
gaatataaggtgaggagagacagca

SEQ ID NO: 3156496 - DNA, 25 bp, Homo sapien
ttaacaaggcaagaatgacagaggg

SEQ ID NO: 3156497 - DNA, 25 bp, Homo sapien
gcaggcaagggttcgatttaacaag

SEQ ID NO: 3156498 - DNA, 25 bp, Homo sapien
tacagtatgactggcaagcagcact

SEQ ID NO: 3156499 - DNA, 25 bp, Homo sapien
cgaattttcctgacaaataaatggt

SEQ ID NO: 3156500 - DNA, 25 bp, Homo sapien
attttcctgacaaataaatggtgtt

SEQ ID NO: 3156501 - DNA, 25 bp, Homo sapien
gaattttcctgacaaataaatggtg

SEQ ID NO: 3156502 - DNA, 25 bp, Homo sapien
aattttcctgacaaataaatggtgt

SEQ ID NO: 3156503 - DNA, 25 bp, Homo sapien
ctccagacggcggagccagagcgcg

SEQ ID NO: 3156504 - DNA, 25 bp, Homo sapien
caccagggggcgcaggttggcagcg

SEQ ID NO: 3156505 - DNA, 25 bp, Homo sapien
cagggggcgcaggttggcagcggct

SEQ ID NO: 3156506 - DNA, 25 bp, Homo sapien
tgcggccggcaaccaggccaccagg

SEQ ID NO: 3156507 - DNA, 25 bp, Homo sapien
gatgacgtagttgtgcaggtccaca

SEQ ID NO: 3156508 - DNA, 25 bp, Homo sapien
gacacagaagcgcagcctgcgatgg

SEQ ID NO: 3156509 - DNA, 25 bp, Homo sapien
cagtgttgcagaggatgacgtagtt

SEQ ID NO: 3156510 - DNA, 25 bp, Homo sapien
acaagcgggtctggaactgctccac

SEQ ID NO: 3156511 - DNA, 25 bp, Homo sapien
tcagtggtataggacaggctcgatg

SEQ ID NO: 3156512 - DNA, 25 bp, Homo sapien
agtggtataggacaggctcgatggc

SEQ ID NO: 3156513 - DNA, 25 bp, Homo sapien
cagtggtataggacaggctcgatgg

SEQ ID NO: 3156514 - DNA, 25 bp, Homo sapien
catttccttacaaagtcacaggaaa

SEQ ID NO: 3156515 - DNA, 25 bp, Homo sapien
ccttacaaagtcacaggaaacagga

SEQ ID NO: 3156516 - DNA, 25 bp, Homo sapien
ttacaaagtcacaggaaacaggatt

SEQ ID NO: 3156517 - DNA, 25 bp, Homo sapien
acaaagtcacaggaaacaggatttg

SEQ ID NO: 3156518 - DNA, 25 bp, Homo sapien
aaatagcagctgattaattcaaaga

SEQ ID NO: 3156519 - DNA, 25 bp, Homo sapien
tagcagctgattaattcaaagagaa

SEQ ID NO: 3156520 - DNA, 25 bp, Homo sapien
aatagcagctgattaattcaaagag

SEQ ID NO: 3156521 - DNA, 25 bp, Homo sapien
agcagctgattaattcaaagagaat

SEQ ID NO: 3156522 - DNA, 25 bp, Homo sapien
tgctttttaggctttgaaagatttg

SEQ ID NO: 3156523 - DNA, 25 bp, Homo sapien
aaacagggcgaataggatcttgatt

SEQ ID NO: 3156524 - DNA, 25 bp, Homo sapien
tgggaaacagggcgaataggatctt

SEQ ID NO: 3156525 - DNA, 25 bp, Homo sapien
ggaaacagggcgaataggatcttga

SEQ ID NO: 3156526 - DNA, 25 bp, Homo sapien
gaaacagggcgaataggatcttgat

SEQ ID NO: 3156527 - DNA, 25 bp, Homo sapien
gctgggcaaggttctcaagtctttt

SEQ ID NO: 3156528 - DNA, 25 bp, Homo sapien
ggcaaggttctcaagtcttttggtc

SEQ ID NO: 3156529 - DNA, 25 bp, Homo sapien
aaggttctcaagtcttttggtcagc

SEQ ID NO: 3156530 - DNA, 25 bp, Homo sapien
tgggcaaggttctcaagtcttttgg

SEQ ID NO: 3156531 - DNA, 25 bp, Homo sapien
acaatgcaggaggagtgatctccca

SEQ ID NO: 3156532 - DNA, 25 bp, Homo sapien
tttgaatccattgggctgtgacagc

SEQ ID NO: 3156533 - DNA, 25 bp, Homo sapien
gcctctggatccttttggagggttg

SEQ ID NO: 3156534 - DNA, 25 bp, Homo sapien
ccaaattacagactctcttccacag

SEQ ID NO: 3156535 - DNA, 25 bp, Homo sapien
cagaagtcagaccattagcctaagg

SEQ ID NO: 3156536 - DNA, 25 bp, Homo sapien
ggttacatgtatgttcaagcagcag

SEQ ID NO: 3156537 - DNA, 25 bp, Homo sapien
gagcttaagccaatgaacaatggtt

SEQ ID NO: 3156538 - DNA, 25 bp, Homo sapien
caatccttcagtgctttaagtactt

SEQ ID NO: 3156539 - DNA, 25 bp, Homo sapien
ttttgaaggatgatagtttgggtct

SEQ ID NO: 3156540 - DNA, 25 bp, Homo sapien
agaaggatcagagattcgaagagaa

SEQ ID NO: 3156541 - DNA, 25 bp, Homo sapien
gctactgagagttgtaatatccggg

SEQ ID NO: 3156542 - DNA, 25 bp, Homo sapien
ttgggtctgtgcctttggctactga

SEQ ID NO: 3156543 - DNA, 25 bp, Homo sapien
tacaagtcaatcaggaactgtttct

SEQ ID NO: 3156544 - DNA, 25 bp, Homo sapien
gtcaatcaggaactgtttcttccac

SEQ ID NO: 3156545 - DNA, 25 bp, Homo sapien
ttacaagtcaatcaggaactgtttc

SEQ ID NO: 3156546 - DNA, 25 bp, Homo sapien
caagtcaatcaggaactgtttcttc

SEQ ID NO: 3156547 - DNA, 25 bp, Homo sapien
ggcactgctgctgtcccggccccac

SEQ ID NO: 3156548 - DNA, 25 bp, Homo sapien
cgatcccccagccaggcggcggccg

SEQ ID NO: 3156549 - DNA, 25 bp, Homo sapien
ggcgctgtccccgccggcactgctg

SEQ ID NO: 3156550 - DNA, 25 bp, Homo sapien
caggagcagccccaacgccctggca

SEQ ID NO: 3156551 - DNA, 25 bp, Homo sapien
tcttccattttcaagggtcttttca

SEQ ID NO: 3156552 - DNA, 25 bp, Homo sapien
gcagggaccgtcttctcgatcaatt

SEQ ID NO: 3156553 - DNA, 25 bp, Homo sapien
cagggccgatgtgcctccgagcgaa

SEQ ID NO: 3156554 - DNA, 25 bp, Homo sapien
gtgcctccgagcgaagtcgtcgtgt

SEQ ID NO: 3156555 - DNA, 25 bp, Homo sapien
tgaaatggcatgcagagttgcaagg

SEQ ID NO: 3156556 - DNA, 25 bp, Homo sapien
agtaagttccgcaaaatcgtctgtg

SEQ ID NO: 3156557 - DNA, 25 bp, Homo sapien
tcctgagttctccagtaagttccgc

SEQ ID NO: 3156558 - DNA, 25 bp, Homo sapien
catgcagagttgcaaggatttcatt

SEQ ID NO: 3156559 - DNA, 25 bp, Homo sapien
ggtctggtagttgagtaaactctcc

SEQ ID NO: 3156560 - DNA, 25 bp, Homo sapien
catggtctggtagttgagtaaactc

SEQ ID NO: 3156561 - DNA, 25 bp, Homo sapien
tctggtagttgagtaaactctccag

SEQ ID NO: 3156562 - DNA, 25 bp, Homo sapien
ggtagttgagtaaactctccagcct

SEQ ID NO: 3156563 - DNA, 25 bp, Homo sapien
tggccatgtccaggcctgtgatgtc

SEQ ID NO: 3156564 - DNA, 25 bp, Homo sapien
catgtccaggcctgtgatgtcacac

SEQ ID NO: 3156565 - DNA, 25 bp, Homo sapien
tgtgggtggcaatgggggtcaacaa

SEQ ID NO: 3156566 - DNA, 25 bp, Homo sapien
ctgtgggtggcaatgggggtcaaca

SEQ ID NO: 3156567 - DNA, 25 bp, Homo sapien
tgggtggcaatgggggtcaacaaaa

SEQ ID NO: 3156568 - DNA, 25 bp, Homo sapien
caacaaaaaatttcctcctcttgtg

SEQ ID NO: 3156569 - DNA, 25 bp, Homo sapien
catttcacagggtaacttcagctca

SEQ ID NO: 3156570 - DNA, 25 bp, Homo sapien
cttcccctccgtgtctgggtactgg

SEQ ID NO: 3156571 - DNA, 25 bp, Homo sapien
ttggctcgagtctggacaacagcta

SEQ ID NO: 3156572 - DNA, 25 bp, Homo sapien
aagtccatttcacagggtaacttca

SEQ ID NO: 3156573 - DNA, 25 bp, Homo sapien
agctgtacagatgttgctggtagcc

SEQ ID NO: 3156574 - DNA, 25 bp, Homo sapien
tagcaatatgctccagcccatggga

SEQ ID NO: 3156575 - DNA, 25 bp, Homo sapien
catgggaaccatggtagattgcaaa

SEQ ID NO: 3156576 - DNA, 25 bp, Homo sapien
tcattctcaccaagctttctcggac

SEQ ID NO: 3156577 - DNA, 25 bp, Homo sapien
gcaaaatcaaagtggcattatgtac

SEQ ID NO: 3156578 - DNA, 25 bp, Homo sapien
cttgagaccttctggcaaaatcaaa

SEQ ID NO: 3156579 - DNA, 25 bp, Homo sapien
tctggcaaaatcaaagtggcattat

SEQ ID NO: 3156580 - DNA, 25 bp, Homo sapien
ttgagaccttctggcaaaatcaaag

SEQ ID NO: 3156581 - DNA, 25 bp, Homo sapien
tcaaaaagccgaaaattgatctgcc

SEQ ID NO: 3156582 - DNA, 25 bp, Homo sapien
gccgaaaattgatctgccgctgagc

SEQ ID NO: 3156583 - DNA, 25 bp, Homo sapien
ttgatctgccgctgagcggccctgc

SEQ ID NO: 3156584 - DNA, 25 bp, Homo sapien
gccatcctcaaaaagccgaaaattg

SEQ ID NO: 3156585 - DNA, 25 bp, Homo sapien
gctttcagcaaccagttctgcagat

SEQ ID NO: 3156586 - DNA, 25 bp, Homo sapien
tcagcaaccagttctgcagatgact

SEQ ID NO: 3156587 - DNA, 25 bp, Homo sapien
gcaaccagttctgcagatgactcac

SEQ ID NO: 3156588 - DNA, 25 bp, Homo sapien
cccatgctttcagcaaccagttctg

SEQ ID NO: 3156589 - DNA, 25 bp, Homo sapien
cttgatgggtgaggaacgggctggt

SEQ ID NO: 3156590 - DNA, 25 bp, Homo sapien
tgatgggtgaggaacgggctggtcc

SEQ ID NO: 3156591 - DNA, 25 bp, Homo sapien
ctgttgaacacttgatgggtgagga

SEQ ID NO: 3156592 - DNA, 25 bp, Homo sapien
ttgaacacttgatgggtgaggaacg

SEQ ID NO: 3156593 - DNA, 25 bp, Homo sapien
ctgtgaacaagggaaatgtctttat

SEQ ID NO: 3156594 - DNA, 25 bp, Homo sapien
ccatgtgataggtgcgagttcagac

SEQ ID NO: 3156595 - DNA, 25 bp, Homo sapien
catgtgataggtgcgagttcagacg

SEQ ID NO: 3156596 - DNA, 25 bp, Homo sapien
tttccatgtgataggtgcgagttca

SEQ ID NO: 3156597 - DNA, 25 bp, Homo sapien
tccatgtgataggtgcgagttcaga

SEQ ID NO: 3156598 - DNA, 25 bp, Homo sapien
ctgtttggctggaaacagacctggt

SEQ ID NO: 3156599 - DNA, 25 bp, Homo sapien
tgtttggctggaaacagacctggtc

SEQ ID NO: 3156600 - DNA, 25 bp, Homo sapien
tttggctggaaacagacctggtcat

SEQ ID NO: 3156601 - DNA, 25 bp, Homo sapien
ggctggaaacagacctggtcataac

SEQ ID NO: 3156602 - DNA, 25 bp, Homo sapien
tctggtttaagtaggctcggatagt

SEQ ID NO: 3156603 - DNA, 25 bp, Homo sapien
tttaagtaggctcggatagtggcca

SEQ ID NO: 3156604 - DNA, 25 bp, Homo sapien
ggctcggatagtggccagtccagca

SEQ ID NO: 3156605 - DNA, 25 bp, Homo sapien
tctcctttctggtttaagtaggctc

SEQ ID NO: 3156606 - DNA, 25 bp, Homo sapien
actgatgttctcttcaaacacccca

SEQ ID NO: 3156607 - DNA, 25 bp, Homo sapien
tggtggatgggtatgtaatcatgat

SEQ ID NO: 3156608 - DNA, 25 bp, Homo sapien
cccattggtggatgggtatgtaatc

SEQ ID NO: 3156609 - DNA, 25 bp, Homo sapien
cactgatgttctcttcaaacacccc

SEQ ID NO: 3156610 - DNA, 25 bp, Homo sapien
atatttgccccgtctaggtagacct

SEQ ID NO: 3156611 - DNA, 25 bp, Homo sapien
tcatatttgccccgtctaggtagac

SEQ ID NO: 3156612 - DNA, 25 bp, Homo sapien
ttcatatttgccccgtctaggtaga

SEQ ID NO: 3156613 - DNA, 25 bp, Homo sapien
catatttgccccgtctaggtagacc

SEQ ID NO: 3156614 - DNA, 25 bp, Homo sapien
agtctccagggcgacagattcccac

SEQ ID NO: 3156615 - DNA, 25 bp, Homo sapien
gtgaagatttaggtgcgagacatca

SEQ ID NO: 3156616 - DNA, 25 bp, Homo sapien
gatttaggtgcgagacatcagaccc

SEQ ID NO: 3156617 - DNA, 25 bp, Homo sapien
gaagatttaggtgcgagacatcaga

SEQ ID NO: 3156618 - DNA, 25 bp, Homo sapien
gccaatgggccccatgccaggacca

SEQ ID NO: 3156619 - DNA, 25 bp, Homo sapien
gggccccatgccaggaccacctcct

SEQ ID NO: 3156620 - DNA, 25 bp, Homo sapien
caatgggccccatgccaggaccacc

SEQ ID NO: 3156621 - DNA, 25 bp, Homo sapien
aatgggccccatgccaggaccacct

SEQ ID NO: 3156622 - DNA, 25 bp, Homo sapien
aggacaggcatcctcattccgcttt

SEQ ID NO: 3156623 - DNA, 25 bp, Homo sapien
gacaggcatcctcattccgctttag

SEQ ID NO: 3156624 - DNA, 25 bp, Homo sapien
ggcatcctcattccgctttagtgaa

SEQ ID NO: 3156625 - DNA, 25 bp, Homo sapien
tcctcattccgctttagtgaaatga

SEQ ID NO: 3156626 - DNA, 25 bp, Homo sapien
gggtctcgtgtccaaaataaattca

SEQ ID NO: 3156627 - DNA, 25 bp, Homo sapien
tgcagactttttgaagggtctcgtg

SEQ ID NO: 3156628 - DNA, 25 bp, Homo sapien
tcctgccgaatgctgatcatggcat

SEQ ID NO: 3156629 - DNA, 25 bp, Homo sapien
taatatcgcagtttccgtggcttgt

SEQ ID NO: 3156630 - DNA, 25 bp, Homo sapien
gaagatataacgcaggtcagggagt

SEQ ID NO: 3156631 - DNA, 25 bp, Homo sapien
ccagtgggaagatataacgcaggtc

SEQ ID NO: 3156632 - DNA, 25 bp, Homo sapien
tcagggagtgtggagacatcttcag

SEQ ID NO: 3156633 - DNA, 25 bp, Homo sapien
gtggagacatcttcagcggattgac

SEQ ID NO: 3156634 - DNA, 25 bp, Homo sapien
tcacgaaggggagtgggaatgctgc

SEQ ID NO: 3156635 - DNA, 25 bp, Homo sapien
cgaaggggagtgggaatgctgccac

SEQ ID NO: 3156636 - DNA, 25 bp, Homo sapien
acgaaggggagtgggaatgctgcca

SEQ ID NO: 3156637 - DNA, 25 bp, Homo sapien
cacgaaggggagtgggaatgctgcc

SEQ ID NO: 3156638 - DNA, 25 bp, Homo sapien
ggtgggcaggtacaaaccaggtgct

SEQ ID NO: 3156639 - DNA, 25 bp, Homo sapien
actcataaacttccatgggtgggca

SEQ ID NO: 3156640 - DNA, 25 bp, Homo sapien
aggtacaaaccaggtgctgatctcc

SEQ ID NO: 3156641 - DNA, 25 bp, Homo sapien
ggtgctgatctccatatatgtcatc

SEQ ID NO: 3156642 - DNA, 25 bp, Homo sapien
ggagaggcaccaaatcagtccttta

SEQ ID NO: 3156643 - DNA, 25 bp, Homo sapien
cagtcctttaaacttagggagagag

SEQ ID NO: 3156644 - DNA, 25 bp, Homo sapien
atcagtcctttaaacttagggagag

SEQ ID NO: 3156645 - DNA, 25 bp, Homo sapien
ctggggagaggcaccaaatcagtcc

SEQ ID NO: 3156646 - DNA, 25 bp, Homo sapien
atataaaactcctacttgaggctgg

SEQ ID NO: 3156647 - DNA, 25 bp, Homo sapien
gtatataaaactcctacttgaggct

SEQ ID NO: 3156648 - DNA, 25 bp, Homo sapien
tatacacagtatataaaactcctac

SEQ ID NO: 3156649 - DNA, 25 bp, Homo sapien
cacagtatataaaactcctacttga

SEQ ID NO: 3156650 - DNA, 25 bp, Homo sapien
gctcccaatccaggcaactggcaca

SEQ ID NO: 3156651 - DNA, 25 bp, Homo sapien
gaaatgtgattacagattaggcata

SEQ ID NO: 3156652 - DNA, 25 bp, Homo sapien
cagatggcacagtccacatggactc

SEQ ID NO: 3156653 - DNA, 25 bp, Homo sapien
ttccaaccatcagcttcgactccct

SEQ ID NO: 3156654 - DNA, 25 bp, Homo sapien
tggagttgcaatcgcactcagggta

SEQ ID NO: 3156655 - DNA, 25 bp, Homo sapien
tctttgtctttcatagcacagaccc

SEQ ID NO: 3156656 - DNA, 25 bp, Homo sapien
tagcacagaccctctaacttgatcc

SEQ ID NO: 3156657 - DNA, 25 bp, Homo sapien
cttgggtgggcaagctctataattc

SEQ ID NO: 3156658 - DNA, 25 bp, Homo sapien
gagggaagccatcaaaggttccagg

SEQ ID NO: 3156659 - DNA, 25 bp, Homo sapien
ccatcaaaggttccaggctctgtgc

SEQ ID NO: 3156660 - DNA, 25 bp, Homo sapien
ctgcaattgatggtggggaatgtca

SEQ ID NO: 3156661 - DNA, 25 bp, Homo sapien
tgaagagggagggaagccatcaaag

SEQ ID NO: 3156662 - DNA, 25 bp, Homo sapien
tgaaaacccaattggaatagggcac

SEQ ID NO: 3156663 - DNA, 25 bp, Homo sapien
ttgaaaacccaattggaatagggca

SEQ ID NO: 3156664 - DNA, 25 bp, Homo sapien
tgaaactggccccacctcttttggc

SEQ ID NO: 3156665 - DNA, 25 bp, Homo sapien
gcctgacagtcacaagtcactttag

SEQ ID NO: 3156666 - DNA, 25 bp, Homo sapien
taagacactcgtccaagagtttctg

SEQ ID NO: 3156667 - DNA, 25 bp, Homo sapien
ctcagtttccttgaaacagggtgaa

SEQ ID NO: 3156668 - DNA, 25 bp, Homo sapien
cttatttggattagctagttcctga

SEQ ID NO: 3156669 - DNA, 25 bp, Homo sapien
ccaatgggcatcacggtcaggtaga

SEQ ID NO: 3156670 - DNA, 25 bp, Homo sapien
taggtttagctatcatggcagcagg

SEQ ID NO: 3156671 - DNA, 25 bp, Homo sapien
tgaacagacttggacttcgctagag

SEQ ID NO: 3156672 - DNA, 25 bp, Homo sapien
gattcagcgacaggttaacagcaac

SEQ ID NO: 3156673 - DNA, 25 bp, Homo sapien
taaactgacagtaccgcaacaggga

SEQ ID NO: 3156674 - DNA, 25 bp, Homo sapien
tgtgacaactcccagatcctttgag

SEQ ID NO: 3156675 - DNA, 25 bp, Homo sapien
cataatacacaatacgcacaggagc

SEQ ID NO: 3156676 - DNA, 25 bp, Homo sapien
ggtagcaggccccatataagtctga

SEQ ID NO: 3156677 - DNA, 25 bp, Homo sapien
taggagcagaaaggatcatgcctgg

SEQ ID NO: 3156678 - DNA, 25 bp, Homo sapien
tgtacatacagtcatgccaaatggg

SEQ ID NO: 3156679 - DNA, 25 bp, Homo sapien
tagcagtaacccgtgtggaccaggg

SEQ ID NO: 3156680 - DNA, 25 bp, Homo sapien
gattgtctgggaaacacaccttctg

SEQ ID NO: 3156681 - DNA, 25 bp, Homo sapien
tcacccatgggaggctatggccttt

SEQ ID NO: 3156682 - DNA, 25 bp, Homo sapien
aataactccggctatctggaagctg

SEQ ID NO: 3156683 - DNA, 25 bp, Homo sapien
gaggtatccaatgtctccaaaggtg

SEQ ID NO: 3156684 - DNA, 25 bp, Homo sapien
tccagcccacatgaaaaaacctgga

SEQ ID NO: 3156685 - DNA, 25 bp, Homo sapien
aaaacctggagccaaatactgccat

SEQ ID NO: 3156686 - DNA, 25 bp, Homo sapien
gaaaaaacctggagccaaatactgc

SEQ ID NO: 3156687 - DNA, 25 bp, Homo sapien
ggctccagcccacatgaaaaaacct

SEQ ID NO: 3156688 - DNA, 25 bp, Homo sapien
acgcaaaaccagtttggcggccacg

SEQ ID NO: 3156689 - DNA, 25 bp, Homo sapien
gaagcactagggtgcccagtgtctc

SEQ ID NO: 3156690 - DNA, 25 bp, Homo sapien
tgtctctccaagacgcaaaaccagt

SEQ ID NO: 3156691 - DNA, 25 bp, Homo sapien
actagggtgcccagtgtctctccaa

SEQ ID NO: 3156692 - DNA, 25 bp, Homo sapien
taatccatttagcaatccaggcctc

SEQ ID NO: 3156693 - DNA, 25 bp, Homo sapien
ggaatatagctgcattaacttggaa

SEQ ID NO: 3156694 - DNA, 25 bp, Homo sapien
taagtttgcttttgaccatcacctc

SEQ ID NO: 3156695 - DNA, 25 bp, Homo sapien
tggaaagaagcctgttgggccagaa

SEQ ID NO: 3156696 - DNA, 25 bp, Homo sapien
ctccttgttatcaccttcctcacta

SEQ ID NO: 3156697 - DNA, 25 bp, Homo sapien
cctccttgttatcaccttcctcact

SEQ ID NO: 3156698 - DNA, 25 bp, Homo sapien
tcctccttgttatcaccttcctcac

SEQ ID NO: 3156699 - DNA, 25 bp, Homo sapien
ttcctccttgttatcaccttcctca

SEQ ID NO: 3156700 - DNA, 25 bp, Homo sapien
cagaaagtctggactactgagagac

SEQ ID NO: 3156701 - DNA, 25 bp, Homo sapien
caggatgatccttaattctacaaaa

SEQ ID NO: 3156702 - DNA, 25 bp, Homo sapien
ctgttttcagtaagcggctacagaa

SEQ ID NO: 3156703 - DNA, 25 bp, Homo sapien
ttcctccaatggcttttcataatat

SEQ ID NO: 3156704 - DNA, 25 bp, Homo sapien
tggttcctagtgtttcatgggttcc

SEQ ID NO: 3156705 - DNA, 25 bp, Homo sapien
tactaagaagctccttggttcctag

SEQ ID NO: 3156706 - DNA, 25 bp, Homo sapien
agtgttcagcaaatcaggagcagag

SEQ ID NO: 3156707 - DNA, 25 bp, Homo sapien
tcccttgaagtagaaactaggcaca

SEQ ID NO: 3156708 - DNA, 25 bp, Homo sapien
tttgtttgacaaatctgaccccttc

SEQ ID NO: 3156709 - DNA, 25 bp, Homo sapien
tttcctctctgcaaactatttagaa

SEQ ID NO: 3156710 - DNA, 25 bp, Homo sapien
catttcttggtgtattaggacatta

SEQ ID NO: 3156711 - DNA, 25 bp, Homo sapien
ccatatcagaattctatttgcctca

SEQ ID NO: 3156712 - DNA, 25 bp, Homo sapien
aacaggtttgatagaggggcagcaa

SEQ ID NO: 3156713 - DNA, 25 bp, Homo sapien
caagcctgatgctgcaaatggaagg

SEQ ID NO: 3156714 - DNA, 25 bp, Homo sapien
gcagcaagcctgatgctgcaaatgg

SEQ ID NO: 3156715 - DNA, 25 bp, Homo sapien
agcaagcctgatgctgcaaatggaa

SEQ ID NO: 3156716 - DNA, 25 bp, Homo sapien
cccttcaatccaaatgtgccacttt

SEQ ID NO: 3156717 - DNA, 25 bp, Homo sapien
tgtgtgctcataggcgtaaataaac

SEQ ID NO: 3156718 - DNA, 25 bp, Homo sapien
ctcgagtgtgtgctcataggcgtaa

SEQ ID NO: 3156719 - DNA, 25 bp, Homo sapien
tgctcataggcgtaaataaacgtgc

SEQ ID NO: 3156720 - DNA, 25 bp, Homo sapien
cataggcgtaaataaacgtgctatc

SEQ ID NO: 3156721 - DNA, 25 bp, Homo sapien
tttagaaacatttccacggattgtc

SEQ ID NO: 3156722 - DNA, 25 bp, Homo sapien
tttccacggattgtcacacgagccc

SEQ ID NO: 3156723 - DNA, 25 bp, Homo sapien
actggctttttattcgcaagcccat

SEQ ID NO: 3156724 - DNA, 25 bp, Homo sapien
acggattgtcacacgagcccctaaa

SEQ ID NO: 3156725 - DNA, 25 bp, Homo sapien
tgagccattgaagaaaagagttccc

SEQ ID NO: 3156726 - DNA, 25 bp, Homo sapien
ggcattgttcctctcttgcggagga

SEQ ID NO: 3156727 - DNA, 25 bp, Homo sapien
tctcttgcggaggaacatcccacga

SEQ ID NO: 3156728 - DNA, 25 bp, Homo sapien
cttgatttgagccattgaagaaaag

SEQ ID NO: 3156729 - DNA, 25 bp, Homo sapien
tctgcttgcaagttcacaccttggg

SEQ ID NO: 3156730 - DNA, 25 bp, Homo sapien
tctctgggagttcgaactgccacag

SEQ ID NO: 3156731 - DNA, 25 bp, Homo sapien
ttctacgtgccagccaggttgggcc

SEQ ID NO: 3156732 - DNA, 25 bp, Homo sapien
cagcatctgcaaaattctcggcctc

SEQ ID NO: 3156733 - DNA, 25 bp, Homo sapien
gcaccgtgagtgttgctccccttgg

SEQ ID NO: 3156734 - DNA, 25 bp, Homo sapien
aattttctatggcactaagcaccgt

SEQ ID NO: 3156735 - DNA, 25 bp, Homo sapien
cttccccacggactcgtgggcaatt

SEQ ID NO: 3156736 - DNA, 25 bp, Homo sapien
cggactcgtgggcaattttctatgg

SEQ ID NO: 3156737 - DNA, 25 bp, Homo sapien
ttggcgtctgctcatgcttgcctgt

SEQ ID NO: 3156738 - DNA, 25 bp, Homo sapien
acaacatgcctgctcccagtgggca

SEQ ID NO: 3156739 - DNA, 25 bp, Homo sapien
ctaacaacatgcctgctcccagtgg

SEQ ID NO: 3156740 - DNA, 25 bp, Homo sapien
tggccatggtccttgtgtgcttggc

SEQ ID NO: 3156741 - DNA, 25 bp, Homo sapien
tatgcaggctagcaagagacttgaa

SEQ ID NO: 3156742 - DNA, 25 bp, Homo sapien
gcatctcagagcacgcatggggtga

SEQ ID NO: 3156743 - DNA, 25 bp, Homo sapien
tctgataatctggtggtatgcaggc

SEQ ID NO: 3156744 - DNA, 25 bp, Homo sapien
ttccagactttccaatggccaaact

SEQ ID NO: 3156745 - DNA, 25 bp, Homo sapien
taaaaacatgcaccatacaagattt

SEQ ID NO: 3156746 - DNA, 25 bp, Homo sapien
taacttgggctaaaatattctggaa

SEQ ID NO: 3156747 - DNA, 25 bp, Homo sapien
ggtccttagcaccttagatcagtat

SEQ ID NO: 3156748 - DNA, 25 bp, Homo sapien
gcaccttagatcagtataggaaaga

SEQ ID NO: 3156749 - DNA, 25 bp, Homo sapien
cgaagccaagtcctcgagtttcagg

SEQ ID NO: 3156750 - DNA, 25 bp, Homo sapien
tccgaagccaagtcctcgagtttca

SEQ ID NO: 3156751 - DNA, 25 bp, Homo sapien
cagttgatttctgcgaggtctttgc

SEQ ID NO: 3156752 - DNA, 25 bp, Homo sapien
cttcagttgatttctgcgaggtctt

SEQ ID NO: 3156753 - DNA, 25 bp, Homo sapien
taggatcaccagttagacatcagaa

SEQ ID NO: 3156754 - DNA, 25 bp, Homo sapien
caggaagtacttaagtcagctaatt

SEQ ID NO: 3156755 - DNA, 25 bp, Homo sapien
tggcgaaagatttaacatcaggaag

SEQ ID NO: 3156756 - DNA, 25 bp, Homo sapien
tctttggactcatagaaatggcgaa

SEQ ID NO: 3156757 - DNA, 25 bp, Homo sapien
tgacctcggtagtttcacgagtgtt

SEQ ID NO: 3156758 - DNA, 25 bp, Homo sapien
gtgctttgtttactcggttatactc

SEQ ID NO: 3156759 - DNA, 25 bp, Homo sapien
gctttgtttactcggttatactcaa

SEQ ID NO: 3156760 - DNA, 25 bp, Homo sapien
tctggtctaggaacaacctgttcat

SEQ ID NO: 3156761 - DNA, 25 bp, Homo sapien
tggtctaggaacaacctgttcattt

SEQ ID NO: 3156762 - DNA, 25 bp, Homo sapien
tgagcctcatgcttccaactccaag

SEQ ID NO: 3156763 - DNA, 25 bp, Homo sapien
tgctcgccaccagtcccggataatt

SEQ ID NO: 3156764 - DNA, 25 bp, Homo sapien
tagagaaaagagtcttccactcctg

SEQ ID NO: 3156765 - DNA, 25 bp, Homo sapien
gatgtgatgttgcaaacggctgagc

SEQ ID NO: 3156766 - DNA, 25 bp, Homo sapien
gcttcacactcacagggtgacagag

SEQ ID NO: 3156767 - DNA, 25 bp, Homo sapien
aaatggcttcgaccaagcagcagat

SEQ ID NO: 3156768 - DNA, 25 bp, Homo sapien
tggttgcttgatgagcaaagcgtgt

SEQ ID NO: 3156769 - DNA, 25 bp, Homo sapien
agcaaatggcttcgaccaagcagca

SEQ ID NO: 3156770 - DNA, 25 bp, Homo sapien
tgtcttggcagttgttgaaaaccag

SEQ ID NO: 3156771 - DNA, 25 bp, Homo sapien
gcattgtctagattactatagcttt

SEQ ID NO: 3156772 - DNA, 25 bp, Homo sapien
aaaccagttgaccataaacataagg

SEQ ID NO: 3156773 - DNA, 25 bp, Homo sapien
gtattgcattgtctagattactata

SEQ ID NO: 3156774 - DNA, 25 bp, Homo sapien
acaggtgagatcctgctactcatca

SEQ ID NO: 3156775 - DNA, 25 bp, Homo sapien
agcaccgggattttgacctgccctg

SEQ ID NO: 3156776 - DNA, 25 bp, Homo sapien
tactcatcagcaccgggattttgac

SEQ ID NO: 3156777 - DNA, 25 bp, Homo sapien
gatcctgctactcatcagcaccggg

SEQ ID NO: 3156778 - DNA, 25 bp, Homo sapien
ccatttcatgactgttattcaaaga

SEQ ID NO: 3156779 - DNA, 25 bp, Homo sapien
ttaaaaactgcacagtgtcttcttg

SEQ ID NO: 3156780 - DNA, 25 bp, Homo sapien
tgatgtgacttagagaagtactaac

SEQ ID NO: 3156781 - DNA, 25 bp, Homo sapien
tgtgtggtgccaagtggagttaaaa

SEQ ID NO: 3156782 - DNA, 25 bp, Homo sapien
gaattatgtccctttactattcaga

SEQ ID NO: 3156783 - DNA, 25 bp, Homo sapien
gcacgtagttgttagaaaatagcat

SEQ ID NO: 3156784 - DNA, 25 bp, Homo sapien
ccggaaactgacaatacagtctact

SEQ ID NO: 3156785 - DNA, 25 bp, Homo sapien
gagatgatggtagacttgcacgtag

SEQ ID NO: 3156786 - DNA, 25 bp, Homo sapien
tcttgaattgggcctcatgtagaaa

SEQ ID NO: 3156787 - DNA, 25 bp, Homo sapien
cagaaacatgtgtatctttcttgaa

SEQ ID NO: 3156788 - DNA, 25 bp, Homo sapien
cttgaattgggcctcatgtagaaaa

SEQ ID NO: 3156789 - DNA, 25 bp, Homo sapien
tttaagagggctctgaatgccgagg

SEQ ID NO: 3156790 - DNA, 25 bp, Homo sapien
gaatctccaattgtctgattctgga

SEQ ID NO: 3156791 - DNA, 25 bp, Homo sapien
tctggaaacctgtaggcactttcaa

SEQ ID NO: 3156792 - DNA, 25 bp, Homo sapien
agccaagttgctagaggcatccctg

SEQ ID NO: 3156793 - DNA, 25 bp, Homo sapien
tgattctgacggtgaagttctggct

SEQ ID NO: 3156794 - DNA, 25 bp, Homo sapien
gatccaacacgtatcagctttctga

SEQ ID NO: 3156795 - DNA, 25 bp, Homo sapien
tgccttgcaaggagtttttccaaac

SEQ ID NO: 3156796 - DNA, 25 bp, Homo sapien
ctgtctgtgggagcaattaagttcc

SEQ ID NO: 3156797 - DNA, 25 bp, Homo sapien
gaaaatctcaatagtatctctccct

SEQ ID NO: 3156798 - DNA, 25 bp, Homo sapien
aagtcctggtgagggatatttcaac

SEQ ID NO: 3156799 - DNA, 25 bp, Homo sapien
ggttctaagagcactaagtcctggt

SEQ ID NO: 3156800 - DNA, 25 bp, Homo sapien
tatttcaactgagccctagaacctg

SEQ ID NO: 3156801 - DNA, 25 bp, Homo sapien
agtgtcttactcattataggcatca

SEQ ID NO: 3156802 - DNA, 25 bp, Homo sapien
cattataggcatcaacagcttgagc

SEQ ID NO: 3156803 - DNA, 25 bp, Homo sapien
taggcatcaacagcttgagccaggg

SEQ ID NO: 3156804 - DNA, 25 bp, Homo sapien
ctgataactggaatagtgtcttact

SEQ ID NO: 3156805 - DNA, 25 bp, Homo sapien
gcggcagccgcacattccaacacag

SEQ ID NO: 3156806 - DNA, 25 bp, Homo sapien
gctgcgccgcgcacccagtccgcgc

SEQ ID NO: 3156807 - DNA, 25 bp, Homo sapien
tgctgcgccgcgagctcgcggcagc

SEQ ID NO: 3156808 - DNA, 25 bp, Homo sapien
attccaacacaggacgctgcgccgc

SEQ ID NO: 3156809 - DNA, 25 bp, Homo sapien
tccgggcctcgccctgccgtctcgg

SEQ ID NO: 3156810 - DNA, 25 bp, Homo sapien
ccgtcgtggaccaagaaggcccagg

SEQ ID NO: 3156811 - DNA, 25 bp, Homo sapien
ggtgctggggccgtcgtggaccaag

SEQ ID NO: 3156812 - DNA, 25 bp, Homo sapien
ggccgtcgtggaccaagaaggccca

SEQ ID NO: 3156813 - DNA, 25 bp, Homo sapien
ctggggccgtcgtggaccaagaagg

SEQ ID NO: 3156814 - DNA, 25 bp, Homo sapien
gcgaccctgagtcgccgctccttct

SEQ ID NO: 3156815 - DNA, 25 bp, Homo sapien
ctccttctccgactacttttctttg

SEQ ID NO: 3156816 - DNA, 25 bp, Homo sapien
gggcgggcgaccctgagtcgccgct

SEQ ID NO: 3156817 - DNA, 25 bp, Homo sapien
tgagtcgccgctccttctccgacta

SEQ ID NO: 3156818 - DNA, 25 bp, Homo sapien
cagggccggggaggctccgcgggcg

SEQ ID NO: 3156819 - DNA, 25 bp, Homo sapien
cgcgcagccggcgtccgggcttctc

SEQ ID NO: 3156820 - DNA, 25 bp, Homo sapien
cagccggcgtccgggcttctccgac

SEQ ID NO: 3156821 - DNA, 25 bp, Homo sapien
gggaggctccgcgggcgccctcgcg

SEQ ID NO: 3156822 - DNA, 25 bp, Homo sapien
aactcgcgggagtcgccccgacact

SEQ ID NO: 3156823 - DNA, 25 bp, Homo sapien
gggagtcgccccgacactcgtcctg

SEQ ID NO: 3156824 - DNA, 25 bp, Homo sapien
caactcgcgggagtcgccccgacac

SEQ ID NO: 3156825 - DNA, 25 bp, Homo sapien
agtcgccccgacactcgtcctgagc

SEQ ID NO: 3156826 - DNA, 25 bp, Homo sapien
aaataggcattcggccattttctca

SEQ ID NO: 3156827 - DNA, 25 bp, Homo sapien
gcgctctcgcttcctctcgcctcgg

SEQ ID NO: 3156828 - DNA, 25 bp, Homo sapien
cggcattcctaactgaaataggcat

SEQ ID NO: 3156829 - DNA, 25 bp, Homo sapien
ctctttgcaaactcgggcgctctcg

SEQ ID NO: 3156830 - DNA, 25 bp, Homo sapien
aggcacagcccgaaagcccaacgtg

SEQ ID NO: 3156831 - DNA, 25 bp, Homo sapien
ttaggaagaccgtccaggcacagcc

SEQ ID NO: 3156832 - DNA, 25 bp, Homo sapien
ctgcacgaattcctccgtgctgctg

SEQ ID NO: 3156833 - DNA, 25 bp, Homo sapien
cgaaagcccaacgtgctgcacgaat

SEQ ID NO: 3156834 - DNA, 25 bp, Homo sapien
tgtcccggggctgaacagcccaagc

SEQ ID NO: 3156835 - DNA, 25 bp, Homo sapien
agctattgggtaatttggcccaaca

SEQ ID NO: 3156836 - DNA, 25 bp, Homo sapien
atttggcccaacatcgacttttcta

SEQ ID NO: 3156837 - DNA, 25 bp, Homo sapien
taattgctccctaacccctaactgc

SEQ ID NO: 3156838 - DNA, 25 bp, Homo sapien
gtaaatatctggagcacctgatgcc

SEQ ID NO: 3156839 - DNA, 25 bp, Homo sapien
agcataataagctgaggtgcggcca

SEQ ID NO: 3156840 - DNA, 25 bp, Homo sapien
gattagtattgtagccgcagcggtc

SEQ ID NO: 3156841 - DNA, 25 bp, Homo sapien
gaggttcaccttttatatcagcaga

SEQ ID NO: 3156842 - DNA, 25 bp, Homo sapien
ttatggactagaaagcttctcttac

SEQ ID NO: 3156843 - DNA, 25 bp, Homo sapien
tttgaggcttttgttaagtgggcat

SEQ ID NO: 3156844 - DNA, 25 bp, Homo sapien
tcagaaactacactgcatcttaaat

SEQ ID NO: 3156845 - DNA, 25 bp, Homo sapien
catgtgcaaggttaatcactgagtt

SEQ ID NO: 3156846 - DNA, 25 bp, Homo sapien
tttaggaactcaatgctataagtca

SEQ ID NO: 3156847 - DNA, 25 bp, Homo sapien
tataaaagccacagggactgaagac

SEQ ID NO: 3156848 - DNA, 25 bp, Homo sapien
tactgaagaatttaagactcaaagg

SEQ ID NO: 3156849 - DNA, 25 bp, Homo sapien
catgcccaaccagtcatcaattttt

SEQ ID NO: 3156850 - DNA, 25 bp, Homo sapien
gactagaggccagtgatttaatact

SEQ ID NO: 3156851 - DNA, 25 bp, Homo sapien
gcttaaaacaatacttctgagtgag

SEQ ID NO: 3156852 - DNA, 25 bp, Homo sapien
taccatttgaaagtgttagcttaaa

SEQ ID NO: 3156853 - DNA, 25 bp, Homo sapien
cttaaaacaatacttctgagtgaga

SEQ ID NO: 3156854 - DNA, 25 bp, Homo sapien
tagcttaaaacaatacttctgagtg

SEQ ID NO: 3156855 - DNA, 25 bp, Homo sapien
tctgatgctattaacaccggttttt

SEQ ID NO: 3156856 - DNA, 25 bp, Homo sapien
ctgtctgatgctattaacaccggtt

SEQ ID NO: 3156857 - DNA, 25 bp, Homo sapien
tgtctgatgctattaacaccggttt

SEQ ID NO: 3156858 - DNA, 25 bp, Homo sapien
tgatgctattaacaccggtttttag

SEQ ID NO: 3156859 - DNA, 25 bp, Homo sapien
taaaaaactatcttgataaggtaca

SEQ ID NO: 3156860 - DNA, 25 bp, Homo sapien
tggctttgctgacaagaaaacaaca

SEQ ID NO: 3156861 - DNA, 25 bp, Homo sapien
ttccgaattctcacagcccttttaa

SEQ ID NO: 3156862 - DNA, 25 bp, Homo sapien
cacagtgatactgcatgttaataca

SEQ ID NO: 3156863 - DNA, 25 bp, Homo sapien
tgaatgagtacgcatatgtctagtt

SEQ ID NO: 3156864 - DNA, 25 bp, Homo sapien
tacgcatatgtctagttagatgagt

SEQ ID NO: 3156865 - DNA, 25 bp, Homo sapien
gtcttctgagaacttgagtaaggac

SEQ ID NO: 3156866 - DNA, 25 bp, Homo sapien
tctgagaacttgagtaaggacaaag

SEQ ID NO: 3156867 - DNA, 25 bp, Homo sapien
gatcacactctagtaaatattacca

SEQ ID NO: 3156868 - DNA, 25 bp, Homo sapien
attaccaaatggtatccatacccca

SEQ ID NO: 3156869 - DNA, 25 bp, Homo sapien
ccatctagatcacactctagtaaat

SEQ ID NO: 3156870 - DNA, 25 bp, Homo sapien
tagtaaatattaccaaatggtatcc

SEQ ID NO: 3156871 - DNA, 25 bp, Homo sapien
tacttcatgttgattagaggccaca

SEQ ID NO: 3156872 - DNA, 25 bp, Homo sapien
gaagctgcatagtcacatacagggc

SEQ ID NO: 3156873 - DNA, 25 bp, Homo sapien
cctgtcttgcatggcgggttacttc

SEQ ID NO: 3156874 - DNA, 25 bp, Homo sapien
aactgccgtgggttcacatgtagct

SEQ ID NO: 3156875 - DNA, 25 bp, Homo sapien
tttctctgctttgacggacttttca

SEQ ID NO: 3156876 - DNA, 25 bp, Homo sapien
gcaagtcagcctctcgttttttggt

SEQ ID NO: 3156877 - DNA, 25 bp, Homo sapien
tcattggtaatattatcaggcaagt

SEQ ID NO: 3156878 - DNA, 25 bp, Homo sapien
tctgctttgacggacttttcatttt

SEQ ID NO: 3156879 - DNA, 25 bp, Homo sapien
gctgtcaccctttggcacttcctga

SEQ ID NO: 3156880 - DNA, 25 bp, Homo sapien
tgaacaggctcgtcaggagcaggcc

SEQ ID NO: 3156881 - DNA, 25 bp, Homo sapien
cttctgaaccgcctctgtgggagca

SEQ ID NO: 3156882 - DNA, 25 bp, Homo sapien
gagcaagtacaatttgggcacccac

SEQ ID NO: 3156883 - DNA, 25 bp, Homo sapien
gcgtattcaagttttgtccagagga

SEQ ID NO: 3156884 - DNA, 25 bp, Homo sapien
gcagcaagaccaggtaggctctcat

SEQ ID NO: 3156885 - DNA, 25 bp, Homo sapien
taaagtttcaccctctggcgtattc

SEQ ID NO: 3156886 - DNA, 25 bp, Homo sapien
gattcgttgatattagcagcaagac

SEQ ID NO: 3156887 - DNA, 25 bp, Homo sapien
aaatctcccttagccgctttgactg

SEQ ID NO: 3156888 - DNA, 25 bp, Homo sapien
ccctttctgaaagaacgatcacaga

SEQ ID NO: 3156889 - DNA, 25 bp, Homo sapien
tagattcttgtggaactggccgagc

SEQ ID NO: 3156890 - DNA, 25 bp, Homo sapien
tgagactcatttgctgccattgtag

SEQ ID NO: 3156891 - DNA, 25 bp, Homo sapien
tgcccttgagctgcttcttcaagat

SEQ ID NO: 3156892 - DNA, 25 bp, Homo sapien
ttactcctgcccttgagctgcttct

SEQ ID NO: 3156893 - DNA, 25 bp, Homo sapien
gagctgcttcttcaagatagtacac

SEQ ID NO: 3156894 - DNA, 25 bp, Homo sapien
tactcctgcccttgagctgcttctt

SEQ ID NO: 3156895 - DNA, 25 bp, Homo sapien
gattgtcggagcctagaattcaaca

SEQ ID NO: 3156896 - DNA, 25 bp, Homo sapien
tagaaagaggctatcacacagacag

SEQ ID NO: 3156897 - DNA, 25 bp, Homo sapien
tatcctaggtttgccgcgtaatagc

SEQ ID NO: 3156898 - DNA, 25 bp, Homo sapien
taatataggcctgacaatcaagtcc

SEQ ID NO: 3156899 - DNA, 25 bp, Homo sapien
catagggtgacatgcaatgaggtct

SEQ ID NO: 3156900 - DNA, 25 bp, Homo sapien
gaaaagtaacacgtattgcactgct

SEQ ID NO: 3156901 - DNA, 25 bp, Homo sapien
gaccgggagggaacctatgtacaca

SEQ ID NO: 3156902 - DNA, 25 bp, Homo sapien
gaagtgacagtatactacaggcaag

SEQ ID NO: 3156903 - DNA, 25 bp, Homo sapien
ttcattgacttgagggaccacggcc

SEQ ID NO: 3156904 - DNA, 25 bp, Homo sapien
ttcctctggagttcattgacttgag

SEQ ID NO: 3156905 - DNA, 25 bp, Homo sapien
gtggacggatcttgcgctgcctgct

SEQ ID NO: 3156906 - DNA, 25 bp, Homo sapien
cttctggtatctccagaagagtcct

SEQ ID NO: 3156907 - DNA, 25 bp, Homo sapien
gtaagtcacttctaggtacagttgc

SEQ ID NO: 3156908 - DNA, 25 bp, Homo sapien
tacagttgctcatttgttcgttgaa

SEQ ID NO: 3156909 - DNA, 25 bp, Homo sapien
gtgtaactgtcccatgtacccacta

SEQ ID NO: 3156910 - DNA, 25 bp, Homo sapien
actaactcccccgttgggcatggag

SEQ ID NO: 3156911 - DNA, 25 bp, Homo sapien
tattgcagtgatgcctcaccttttc

SEQ ID NO: 3156912 - DNA, 25 bp, Homo sapien
tttaacatcatattgcagtgatgcc

SEQ ID NO: 3156913 - DNA, 25 bp, Homo sapien
cccttcatgtcatggagtttcatga

SEQ ID NO: 3156914 - DNA, 25 bp, Homo sapien
ttcatgatctgaatactcctaagtg

SEQ ID NO: 3156915 - DNA, 25 bp, Homo sapien
ggatacagcctcacaacagattcat

SEQ ID NO: 3156916 - DNA, 25 bp, Homo sapien
aattgctcatggacaactttgggcc

SEQ ID NO: 3156917 - DNA, 25 bp, Homo sapien
taggtacttttcttggcctcatcag

SEQ ID NO: 3156918 - DNA, 25 bp, Homo sapien
gattgactcaaatgtgcatccagga

SEQ ID NO: 3156919 - DNA, 25 bp, Homo sapien
gcgctggtggctccgcccctttgga

SEQ ID NO: 3156920 - DNA, 25 bp, Homo sapien
cgctggtggctccgcccctttggag

SEQ ID NO: 3156921 - DNA, 25 bp, Homo sapien
caggcaagggtcaccacgcccgggt

SEQ ID NO: 3156922 - DNA, 25 bp, Homo sapien
acaggcaagggtcaccacgcccggg

SEQ ID NO: 3156923 - DNA, 25 bp, Homo sapien
aaagttaggatctgcgcctgcgcaa

SEQ ID NO: 3156924 - DNA, 25 bp, Homo sapien
cacacgcgtaaattgtgggccgccg

SEQ ID NO: 3156925 - DNA, 25 bp, Homo sapien
caaattgtaggtcaagcttgggccg

SEQ ID NO: 3156926 - DNA, 25 bp, Homo sapien
tgccaaacggttctcgagctcctaa

SEQ ID NO: 3156927 - DNA, 25 bp, Homo sapien
tgtactcatttgcaatgagatgcca

SEQ ID NO: 3156928 - DNA, 25 bp, Homo sapien
catttgcaatgagatgccacttagt

SEQ ID NO: 3156929 - DNA, 25 bp, Homo sapien
tactcatttgcaatgagatgccact

SEQ ID NO: 3156930 - DNA, 25 bp, Homo sapien
tattgtactcatttgcaatgagatg

SEQ ID NO: 3156931 - DNA, 25 bp, Homo sapien
aaatccggggtgatttcatcatcat

SEQ ID NO: 3156932 - DNA, 25 bp, Homo sapien
ttcttgccacaaatccggggtgatt

SEQ ID NO: 3156933 - DNA, 25 bp, Homo sapien
tcttgccacaaatccggggtgattt

SEQ ID NO: 3156934 - DNA, 25 bp, Homo sapien
ccacaaatccggggtgatttcatca

SEQ ID NO: 3156935 - DNA, 25 bp, Homo sapien
gggcttcttgctacctttgcaacca

SEQ ID NO: 3156936 - DNA, 25 bp, Homo sapien
cctttgcaaccaaacatggcaactg

SEQ ID NO: 3156937 - DNA, 25 bp, Homo sapien
ttgctacctttgcaaccaaacatgg

SEQ ID NO: 3156938 - DNA, 25 bp, Homo sapien
tgcaaccaaacatggcaactgccgc

SEQ ID NO: 3156939 - DNA, 25 bp, Homo sapien
tgcaactcagtgataatttctagca

SEQ ID NO: 3156940 - DNA, 25 bp, Homo sapien
gttgcaactcagtgataatttctag

SEQ ID NO: 3156941 - DNA, 25 bp, Homo sapien
cagttgcaactcagtgataatttct

SEQ ID NO: 3156942 - DNA, 25 bp, Homo sapien
aaaatatttgagttcagtcagttgc

SEQ ID NO: 3156943 - DNA, 25 bp, Homo sapien
taggaggagcgtcttccacaattct

SEQ ID NO: 3156944 - DNA, 25 bp, Homo sapien
cagcctgtaggtctataggaggagc

SEQ ID NO: 3156945 - DNA, 25 bp, Homo sapien
actcatcaaaagaatccagctgttg

SEQ ID NO: 3156946 - DNA, 25 bp, Homo sapien
gaacagacatctgaataaactcatc

SEQ ID NO: 3156947 - DNA, 25 bp, Homo sapien
tgggcatcattggtgaaggagcacc

SEQ ID NO: 3156948 - DNA, 25 bp, Homo sapien
agataaatttgttcaaacttcagca

SEQ ID NO: 3156949 - DNA, 25 bp, Homo sapien
ccttaatctagcttcattgggcatc

SEQ ID NO: 3156950 - DNA, 25 bp, Homo sapien
gtgagattccttaatctagcttcat

SEQ ID NO: 3156951 - DNA, 25 bp, Homo sapien
tatatcaacataaagcggagcagaa

SEQ ID NO: 3156952 - DNA, 25 bp, Homo sapien
cacgatctgtcaagccattcaaaag

SEQ ID NO: 3156953 - DNA, 25 bp, Homo sapien
caaagggcattcatttaactcacaa

SEQ ID NO: 3156954 - DNA, 25 bp, Homo sapien
caaaaggcagtaagttgaccgcaac

SEQ ID NO: 3156955 - DNA, 25 bp, Homo sapien
ctctcctgtgtaggcatatttagaa

SEQ ID NO: 3156956 - DNA, 25 bp, Homo sapien
taacccatatagtactggtgggtcg

SEQ ID NO: 3156957 - DNA, 25 bp, Homo sapien
ctggtgggtcgggaagaattctcaa

SEQ ID NO: 3156958 - DNA, 25 bp, Homo sapien
aagacatgatctacactctcctgtg

SEQ ID NO: 3156959 - DNA, 25 bp, Homo sapien
tatctctgtcggacacaaaacctaa

SEQ ID NO: 3156960 - DNA, 25 bp, Homo sapien
tagagttgccacaatgcgctgacca

SEQ ID NO: 3156961 - DNA, 25 bp, Homo sapien
cctaatgctctgaacacaataatga

SEQ ID NO: 3156962 - DNA, 25 bp, Homo sapien
gaacttcttgcttgatatatggtag

SEQ ID NO: 3156963 - DNA, 25 bp, Homo sapien
tctgcgagcttccttaccaatgttt

SEQ ID NO: 3156964 - DNA, 25 bp, Homo sapien
tgctgtcattaactccagctgcctc

SEQ ID NO: 3156965 - DNA, 25 bp, Homo sapien
accaagctggtgtgcttctgcgagc

SEQ ID NO: 3156966 - DNA, 25 bp, Homo sapien
ggctgaaagctttcactacacagta

SEQ ID NO: 3156967 - DNA, 25 bp, Homo sapien
gagaattactggtgcccgggaagtc

SEQ ID NO: 3156968 - DNA, 25 bp, Homo sapien
aataataaggtatgtaactactggc

SEQ ID NO: 3156969 - DNA, 25 bp, Homo sapien
agcacttcaggagcccgaggatggt

SEQ ID NO: 3156970 - DNA, 25 bp, Homo sapien
ctacgaaaactccaggtcgggcctg

SEQ ID NO: 3156971 - DNA, 25 bp, Homo sapien
acatgctaacctacatattgttcca

SEQ ID NO: 3156972 - DNA, 25 bp, Homo sapien
gagacatgctaacctacatattgtt

SEQ ID NO: 3156973 - DNA, 25 bp, Homo sapien
tggaacccttctcatttgtgtctca

SEQ ID NO: 3156974 - DNA, 25 bp, Homo sapien
agagacatgctaacctacatattgt

SEQ ID NO: 3156975 - DNA, 25 bp, Homo sapien
ttctacagacacaggggtctcatta

SEQ ID NO: 3156976 - DNA, 25 bp, Homo sapien
tggcctcaaacgatctacccatgta

SEQ ID NO: 3156977 - DNA, 25 bp, Homo sapien
aacgatctacccatgtaggccttcc

SEQ ID NO: 3156978 - DNA, 25 bp, Homo sapien
tcaaacgatctacccatgtaggcct

SEQ ID NO: 3156979 - DNA, 25 bp, Homo sapien
tctctttagtaacaccaggctttgc

SEQ ID NO: 3156980 - DNA, 25 bp, Homo sapien
gacaccaacatgagggagcatttct

SEQ ID NO: 3156981 - DNA, 25 bp, Homo sapien
gcaacattctgttcttggatgacaa

SEQ ID NO: 3156982 - DNA, 25 bp, Homo sapien
tcttgaaccaatgaaatttagtgca

SEQ ID NO: 3156983 - DNA, 25 bp, Homo sapien
aataagaatgcaagcagcggcccag

SEQ ID NO: 3156984 - DNA, 25 bp, Homo sapien
aagaatgcaagcagcggcccagcaa

SEQ ID NO: 3156985 - DNA, 25 bp, Homo sapien
gcagcggcccagcaagatccaatct

SEQ ID NO: 3156986 - DNA, 25 bp, Homo sapien
ctcttgtttccatagtgatctctgt

SEQ ID NO: 3156987 - DNA, 25 bp, Homo sapien
gatccgtgttttaattgccaactcc

SEQ ID NO: 3156988 - DNA, 25 bp, Homo sapien
gagatactccagctctggcttgatg

SEQ ID NO: 3156989 - DNA, 25 bp, Homo sapien
caccccagtttccagtagctaaaga

SEQ ID NO: 3156990 - DNA, 25 bp, Homo sapien
taaagagtattttaggccatcagat

SEQ ID NO: 3156991 - DNA, 25 bp, Homo sapien
tggttctacctacctcgcaacttgg

SEQ ID NO: 3156992 - DNA, 25 bp, Homo sapien
tttgaaaacccagaactgctctagc

SEQ ID NO: 3156993 - DNA, 25 bp, Homo sapien
aagattcagttcaggtgttacctcc

SEQ ID NO: 3156994 - DNA, 25 bp, Homo sapien
ggcacatcacaggtcccaataacaa

SEQ ID NO: 3156995 - DNA, 25 bp, Homo sapien
agtcttctgtcgtggataagcagca

SEQ ID NO: 3156996 - DNA, 25 bp, Homo sapien
tgtcacagtaatagaccagcccatt

SEQ ID NO: 3156997 - DNA, 25 bp, Homo sapien
ttatggtctccaaacaaacactagg

SEQ ID NO: 3156998 - DNA, 25 bp, Homo sapien
tactttttccagactgaggcctctg

SEQ ID NO: 3156999 - DNA, 25 bp, Homo sapien
caacgtattatgcaactgtcttggt

SEQ ID NO: 3157000 - DNA, 25 bp, Homo sapien
gagtagacgcaaaagtcaggcggtt

SEQ ID NO: 3157001 - DNA, 25 bp, Homo sapien
tagcttgccgtctctaccaatagga

SEQ ID NO: 3157002 - DNA, 25 bp, Homo sapien
ccaataggagaatttaaacgacgca

SEQ ID NO: 3157003 - DNA, 25 bp, Homo sapien
gagatccaactgaaatatacgccat

SEQ ID NO: 3157004 - DNA, 25 bp, Homo sapien
tctaaattttccatactccattctt

SEQ ID NO: 3157005 - DNA, 25 bp, Homo sapien
tcttcacaagtcctacagcatggcc

SEQ ID NO: 3157006 - DNA, 25 bp, Homo sapien
ccagaattggagatggttgagatcc

SEQ ID NO: 3157007 - DNA, 25 bp, Homo sapien
gatctttatgtattccaacccagca

SEQ ID NO: 3157008 - DNA, 25 bp, Homo sapien
tcaatttccttagggtgttcataag

SEQ ID NO: 3157009 - DNA, 25 bp, Homo sapien
ggtgttcataagttgttcgggatct

SEQ ID NO: 3157010 - DNA, 25 bp, Homo sapien
caatgatgtccatctgacgtctcaa

SEQ ID NO: 3157011 - DNA, 25 bp, Homo sapien
aagcctgaactacattccgcaaaca

SEQ ID NO: 3157012 - DNA, 25 bp, Homo sapien
aaaaaacactcagggtctgctgctg

SEQ ID NO: 3157013 - DNA, 25 bp, Homo sapien
cactttcacccaaggtatagatttg

SEQ ID NO: 3157014 - DNA, 25 bp, Homo sapien
tttaggtacaaagaccagctactgg

SEQ ID NO: 3157015 - DNA, 25 bp, Homo sapien
ctcagccagcccaagttatgccatt

SEQ ID NO: 3157016 - DNA, 25 bp, Homo sapien
cagccagcccaagttatgccattac

SEQ ID NO: 3157017 - DNA, 25 bp, Homo sapien
gccagcccaagttatgccattacag

SEQ ID NO: 3157018 - DNA, 25 bp, Homo sapien
agcccaagttatgccattacaggca

SEQ ID NO: 3157019 - DNA, 25 bp, Homo sapien
gtgcaaatcttagtttaccattgtt

SEQ ID NO: 3157020 - DNA, 25 bp, Homo sapien
aatgtgcaaatcttagtttaccatt

SEQ ID NO: 3157021 - DNA, 25 bp, Homo sapien
tgtgcaaatcttagtttaccattgt

SEQ ID NO: 3157022 - DNA, 25 bp, Homo sapien
tgcaaatcttagtttaccattgttt

SEQ ID NO: 3157023 - DNA, 25 bp, Homo sapien
gaagtggtctacaaatacggcctgc

SEQ ID NO: 3157024 - DNA, 25 bp, Homo sapien
tttcaattggtcaatatgcctcttc

SEQ ID NO: 3157025 - DNA, 25 bp, Homo sapien
tacggcctgcatccgtatagatccg

SEQ ID NO: 3157026 - DNA, 25 bp, Homo sapien
gaatctccctctctcgaatatctct

SEQ ID NO: 3157027 - DNA, 25 bp, Homo sapien
cacacatttttctcactgcatgttt

SEQ ID NO: 3157028 - DNA, 25 bp, Homo sapien
catttttctcactgcatgtttttac

SEQ ID NO: 3157029 - DNA, 25 bp, Homo sapien
ttctatctcaatttttaatacacac

SEQ ID NO: 3157030 - DNA, 25 bp, Homo sapien
cacatttttctcactgcatgttttt

SEQ ID NO: 3157031 - DNA, 25 bp, Homo sapien
gggaataatagatgcacagacacca

SEQ ID NO: 3157032 - DNA, 25 bp, Homo sapien
ctggttatgatcaggaaagggaata

SEQ ID NO: 3157033 - DNA, 25 bp, Homo sapien
ggagtcattgcaagcatcactgttt

SEQ ID NO: 3157034 - DNA, 25 bp, Homo sapien
gagggatgaatctcacagtgtgtat

SEQ ID NO: 3157035 - DNA, 25 bp, Homo sapien
ggtgatgtaaactcccatagcctgc

SEQ ID NO: 3157036 - DNA, 25 bp, Homo sapien
tgctggcagctctctaaatcgtaga

SEQ ID NO: 3157037 - DNA, 25 bp, Homo sapien
tagaccgtgtagtcacaagtggctt

SEQ ID NO: 3157038 - DNA, 25 bp, Homo sapien
ttgaggataatagagaacatgggcc

SEQ ID NO: 3157039 - DNA, 25 bp, Homo sapien
aatgcttgggtgtttgttatcatgg

SEQ ID NO: 3157040 - DNA, 25 bp, Homo sapien
tatcatggtaactgccaaagtctat

SEQ ID NO: 3157041 - DNA, 25 bp, Homo sapien
ttgttatcatggtaactgccaaagt

SEQ ID NO: 3157042 - DNA, 25 bp, Homo sapien
ttgccataaatgcttgggtgtttgt

SEQ ID NO: 3157043 - DNA, 25 bp, Homo sapien
cagtgaatttaagagcatacattaa

SEQ ID NO: 3157044 - DNA, 25 bp, Homo sapien
ctgcagtgaatttaagagcatacat

SEQ ID NO: 3157045 - DNA, 25 bp, Homo sapien
tttaagagcatacattaaaacatca

SEQ ID NO: 3157046 - DNA, 25 bp, Homo sapien
gtgaatttaagagcatacattaaaa

SEQ ID NO: 3157047 - DNA, 25 bp, Homo sapien
tatccagtgtatgatgcaatggcca

SEQ ID NO: 3157048 - DNA, 25 bp, Homo sapien
tgaacgattcatgataacagagtct

SEQ ID NO: 3157049 - DNA, 25 bp, Homo sapien
gagtcttcctgattatatccagtgt

SEQ ID NO: 3157050 - DNA, 25 bp, Homo sapien
aagaagccgcggtctacagctgaac

SEQ ID NO: 3157051 - DNA, 25 bp, Homo sapien
tcttcttgatcaaatccttttttag

SEQ ID NO: 3157052 - DNA, 25 bp, Homo sapien
ctgttctttgtatgagcgatagaaa

SEQ ID NO: 3157053 - DNA, 25 bp, Homo sapien
tttgtatgagcgatagaaaacagac

SEQ ID NO: 3157054 - DNA, 25 bp, Homo sapien
catgtttcacgtgtaggcttctcaa

SEQ ID NO: 3157055 - DNA, 25 bp, Homo sapien
aatgctaggtatcctcttctcactg

SEQ ID NO: 3157056 - DNA, 25 bp, Homo sapien
gagagtatctatggatgccctctgt

SEQ ID NO: 3157057 - DNA, 25 bp, Homo sapien
actactacacagagccacccaatgg

SEQ ID NO: 3157058 - DNA, 25 bp, Homo sapien
cactggacatcaattcactactaca

SEQ ID NO: 3157059 - DNA, 25 bp, Homo sapien
tgtgaggaaatagacacggaatgtc

SEQ ID NO: 3157060 - DNA, 25 bp, Homo sapien
catgaatcagttccaagtcagagag

SEQ ID NO: 3157061 - DNA, 25 bp, Homo sapien
gaactctaatactacagcccacaca

SEQ ID NO: 3157062 - DNA, 25 bp, Homo sapien
ggccacaggagtctctataccatga

SEQ ID NO: 3157063 - DNA, 25 bp, Homo sapien
gaaaagtgctacagtctctcttggt

SEQ ID NO: 3157064 - DNA, 25 bp, Homo sapien
caatgcccgtctcgctagttctgag

SEQ ID NO: 3157065 - DNA, 25 bp, Homo sapien
tcctgatacacgaacccctggagct

SEQ ID NO: 3157066 - DNA, 25 bp, Homo sapien
cagcttgtcgtaaatggcatgcctc

SEQ ID NO: 3157067 - DNA, 25 bp, Homo sapien
tgaccatgtcgactagcaaatttgt

SEQ ID NO: 3157068 - DNA, 25 bp, Homo sapien
tacccttttgaccatgtcgactagc

SEQ ID NO: 3157069 - DNA, 25 bp, Homo sapien
atttgtctccaatctgtggaatcct

SEQ ID NO: 3157070 - DNA, 25 bp, Homo sapien
tctgtggaatcctaacagagcgtac

SEQ ID NO: 3157071 - DNA, 25 bp, Homo sapien
agtgaccaatagtcatacgagaggg

SEQ ID NO: 3157072 - DNA, 25 bp, Homo sapien
cccttgaaggcattcaattaagtga

SEQ ID NO: 3157073 - DNA, 25 bp, Homo sapien
catggggattgatgatgatatcagg

SEQ ID NO: 3157074 - DNA, 25 bp, Homo sapien
tatcaggggtgataccttcacaggt

SEQ ID NO: 3157075 - DNA, 25 bp, Homo sapien
agaaatcttctgcacgttaacagca

SEQ ID NO: 3157076 - DNA, 25 bp, Homo sapien
ttcctctgagatgatagccataatc

SEQ ID NO: 3157077 - DNA, 25 bp, Homo sapien
catcattaaatggagtggcatcacc

SEQ ID NO: 3157078 - DNA, 25 bp, Homo sapien
caatttcacccttgttagccgatac

SEQ ID NO: 3157079 - DNA, 25 bp, Homo sapien
aataggtcccctagcacgagagtga

SEQ ID NO: 3157080 - DNA, 25 bp, Homo sapien
gaccagtgaacccattgtacaggac

SEQ ID NO: 3157081 - DNA, 25 bp, Homo sapien
cgagagtgaatcttatcatccacca

SEQ ID NO: 3157082 - DNA, 25 bp, Homo sapien
gcttcaaacgctggtaataagtggg

SEQ ID NO: 3157083 - DNA, 25 bp, Homo sapien
ccaggtcattagagagattcgcaaa

SEQ ID NO: 3157084 - DNA, 25 bp, Homo sapien
tagaacttcctcatatacttaaata

SEQ ID NO: 3157085 - DNA, 25 bp, Homo sapien
ctttccaaccacttatttgcatgaa

SEQ ID NO: 3157086 - DNA, 25 bp, Homo sapien
gctgtttctattaagccaggtcatt

SEQ ID NO: 3157087 - DNA, 25 bp, Homo sapien
gctccatgggcaatctgacaatctc

SEQ ID NO: 3157088 - DNA, 25 bp, Homo sapien
gcagcccctgcattcatatgtatgg

SEQ ID NO: 3157089 - DNA, 25 bp, Homo sapien
ggcaatcgccattattccacaaaga

SEQ ID NO: 3157090 - DNA, 25 bp, Homo sapien
tgaacctgatatggatctgatgcct

SEQ ID NO: 3157091 - DNA, 25 bp, Homo sapien
gaaaaaacaaatggtaattagcaga

SEQ ID NO: 3157092 - DNA, 25 bp, Homo sapien
agaaaaaacaaatggtaattagcag

SEQ ID NO: 3157093 - DNA, 25 bp, Homo sapien
aaaaacaaatggtaattagcagaat

SEQ ID NO: 3157094 - DNA, 25 bp, Homo sapien
aaaacaaatggtaattagcagaatt

SEQ ID NO: 3157095 - DNA, 25 bp, Homo sapien
tagtttgcatgcgtaaggcattcgc

SEQ ID NO: 3157096 - DNA, 25 bp, Homo sapien
taagttcctgaaacaatagtttgca

SEQ ID NO: 3157097 - DNA, 25 bp, Homo sapien
tcgcggtgcaatactcatagacata

SEQ ID NO: 3157098 - DNA, 25 bp, Homo sapien
taaacactcatcattcgcggtgcaa

SEQ ID NO: 3157099 - DNA, 25 bp, Homo sapien
ttaattatcttgttgactcctgtaa

SEQ ID NO: 3157100 - DNA, 25 bp, Homo sapien
taattatcttgttgactcctgtaaa

SEQ ID NO: 3157101 - DNA, 25 bp, Homo sapien
tatttaattatcttgttgactcctg

SEQ ID NO: 3157102 - DNA, 25 bp, Homo sapien
cagaagaaaagcatgcatatcatta

SEQ ID NO: 3157103 - DNA, 25 bp, Homo sapien
gatgtacctttgatgcatcaaccaa

SEQ ID NO: 3157104 - DNA, 25 bp, Homo sapien
tatttggaaacactcaactacctgc

SEQ ID NO: 3157105 - DNA, 25 bp, Homo sapien
aggtgccgagctataaacctccaga

SEQ ID NO: 3157106 - DNA, 25 bp, Homo sapien
tagtctgcatggttaaaagtagtca

SEQ ID NO: 3157107 - DNA, 25 bp, Homo sapien
tgtccgagtgtacagggaacagcag

SEQ ID NO: 3157108 - DNA, 25 bp, Homo sapien
aacacgtgtctggttctcagggagc

SEQ ID NO: 3157109 - DNA, 25 bp, Homo sapien
tagctcctggtctaagagggtcacc

SEQ ID NO: 3157110 - DNA, 25 bp, Homo sapien
gggtcaccctatactgcactgtcgg

SEQ ID NO: 3157111 - DNA, 25 bp, Homo sapien
atgctaaaccatgcccttctacaaa

SEQ ID NO: 3157112 - DNA, 25 bp, Homo sapien
ccaatttgtaaataggtcacagtta

SEQ ID NO: 3157113 - DNA, 25 bp, Homo sapien
aaatgctaaaccatgcccttctaca

SEQ ID NO: 3157114 - DNA, 25 bp, Homo sapien
aacagctgaggaccaatttgtaaat

SEQ ID NO: 3157115 - DNA, 25 bp, Homo sapien
accatgggtacattgtaagggtagc

SEQ ID NO: 3157116 - DNA, 25 bp, Homo sapien
agctctagggagagcttatacctca

SEQ ID NO: 3157117 - DNA, 25 bp, Homo sapien
cgtgaggaacttcaccatgggtaca

SEQ ID NO: 3157118 - DNA, 25 bp, Homo sapien
ctcaggtcttcatatgctgtgccag

SEQ ID NO: 3157119 - DNA, 25 bp, Homo sapien
gcctgttcaacgagctatcaatgtt

SEQ ID NO: 3157120 - DNA, 25 bp, Homo sapien
caatgttgggtttgcctcgaaggct

SEQ ID NO: 3157121 - DNA, 25 bp, Homo sapien
cagagcttggcagcatgcctgttca

SEQ ID NO: 3157122 - DNA, 25 bp, Homo sapien
tcaatgttgggtttgcctcgaaggc

SEQ ID NO: 3157123 - DNA, 25 bp, Homo sapien
gattatgatcactcccgatcaactc

SEQ ID NO: 3157124 - DNA, 25 bp, Homo sapien
tttgtgcgatagagattatgatcac

SEQ ID NO: 3157125 - DNA, 25 bp, Homo sapien
tgatcactcccgatcaactccacag

SEQ ID NO: 3157126 - DNA, 25 bp, Homo sapien
ctttgtgcgatagagattatgatca

SEQ ID NO: 3157127 - DNA, 25 bp, Homo sapien
tgagtgacgcggcagttctgttccc

SEQ ID NO: 3157128 - DNA, 25 bp, Homo sapien
gattctgtgagtgacgcggcagttc

SEQ ID NO: 3157129 - DNA, 25 bp, Homo sapien
gtgacgcggcagttctgttcccttt

SEQ ID NO: 3157130 - DNA, 25 bp, Homo sapien
tgtgaatgcagagattctgtgagtg

SEQ ID NO: 3157131 - DNA, 25 bp, Homo sapien
ttatatcactggcccatcaagggta

SEQ ID NO: 3157132 - DNA, 25 bp, Homo sapien
tatcactggcccatcaagggtaagg

SEQ ID NO: 3157133 - DNA, 25 bp, Homo sapien
tcactggcccatcaagggtaagggt

SEQ ID NO: 3157134 - DNA, 25 bp, Homo sapien
ctggcccatcaagggtaagggtgtt

SEQ ID NO: 3157135 - DNA, 25 bp, Homo sapien
ggactaatacagctcccttccagga

SEQ ID NO: 3157136 - DNA, 25 bp, Homo sapien
caggacagggcccttcaccaaagaa

SEQ ID NO: 3157137 - DNA, 25 bp, Homo sapien
agacctggtggaaggtcattgaatc

SEQ ID NO: 3157138 - DNA, 25 bp, Homo sapien
gcagttcccctctgcatgctctctt

SEQ ID NO: 3157139 - DNA, 25 bp, Homo sapien
tccttaagagggctggcaaagcctt

SEQ ID NO: 3157140 - DNA, 25 bp, Homo sapien
tcaagccctttaatctccagcacat

SEQ ID NO: 3157141 - DNA, 25 bp, Homo sapien
caattgtcctttgtaaggcaggtat

SEQ ID NO: 3157142 - DNA, 25 bp, Homo sapien
gcacattcagcaacaattgtccttt

SEQ ID NO: 3157143 - DNA, 25 bp, Homo sapien
acctgcgagcaaggtgggcacgagc

SEQ ID NO: 3157144 - DNA, 25 bp, Homo sapien
tgggcacgagcgcttccctctccaa

SEQ ID NO: 3157145 - DNA, 25 bp, Homo sapien
cccagcgaagggcacatccgacggg

SEQ ID NO: 3157146 - DNA, 25 bp, Homo sapien
ggtcagcaagggcacctgcgagcaa

SEQ ID NO: 3157147 - DNA, 25 bp, Homo sapien
cacagctctcacacggattccagta

SEQ ID NO: 3157148 - DNA, 25 bp, Homo sapien
tcagcaagaactcaaaacaagggca

SEQ ID NO: 3157149 - DNA, 25 bp, Homo sapien
caggcccacggaggatttaatagat

SEQ ID NO: 3157150 - DNA, 25 bp, Homo sapien
tagatgaaaccctggatcgtctcga

SEQ ID NO: 3157151 - DNA, 25 bp, Homo sapien
gtaggagctgccaattgattttccc

SEQ ID NO: 3157152 - DNA, 25 bp, Homo sapien
taggagctgccaattgattttccct

SEQ ID NO: 3157153 - DNA, 25 bp, Homo sapien
ttcctgttccagcagttggcagagg

SEQ ID NO: 3157154 - DNA, 25 bp, Homo sapien
taaagacactctatagcgctcaaaa

SEQ ID NO: 3157155 - DNA, 25 bp, Homo sapien
aaaaaggaatgtgttctccctgaca

SEQ ID NO: 3157156 - DNA, 25 bp, Homo sapien
gcagaggaatgcgagcttcagtaca

SEQ ID NO: 3157157 - DNA, 25 bp, Homo sapien
caggatgatttgtagcaagagacaa

SEQ ID NO: 3157158 - DNA, 25 bp, Homo sapien
ggatgatttgtagcaagagacaaga

SEQ ID NO: 3157159 - DNA, 25 bp, Homo sapien
gatgatttgtagcaagagacaagac

SEQ ID NO: 3157160 - DNA, 25 bp, Homo sapien
gcaggatgatttgtagcaagagaca

SEQ ID NO: 3157161 - DNA, 25 bp, Homo sapien
tcctgtgggtgagtcacaagcccca

SEQ ID NO: 3157162 - DNA, 25 bp, Homo sapien
gcacttgctgtactcctgtgggtga

SEQ ID NO: 3157163 - DNA, 25 bp, Homo sapien
actcctgtgggtgagtcacaagccc

SEQ ID NO: 3157164 - DNA, 25 bp, Homo sapien
atgcacttgctgtactcctgtgggt

SEQ ID NO: 3157165 - DNA, 25 bp, Homo sapien
ctgggcttgcacatcagaagaccat

SEQ ID NO: 3157166 - DNA, 25 bp, Homo sapien
gaccatccaaataactgctgatgaa

SEQ ID NO: 3157167 - DNA, 25 bp, Homo sapien
aagaccatccaaataactgctgatg

SEQ ID NO: 3157168 - DNA, 25 bp, Homo sapien
ggcttgcacatcagaagaccatcca

SEQ ID NO: 3157169 - DNA, 25 bp, Homo sapien
aaatgtgtcggatgcttcctgctgc

SEQ ID NO: 3157170 - DNA, 25 bp, Homo sapien
tgtgtcggatgcttcctgctgcagt

SEQ ID NO: 3157171 - DNA, 25 bp, Homo sapien
acaaaaatgtgtcggatgcttcctg

SEQ ID NO: 3157172 - DNA, 25 bp, Homo sapien
cgtgagacaaaaatgtgtcggatgc

SEQ ID NO: 3157173 - DNA, 25 bp, Homo sapien
ctaccaaagtaaaagagaagtcatg

SEQ ID NO: 3157174 - DNA, 25 bp, Homo sapien
aagagaagtcatgggtaacttgtac

SEQ ID NO: 3157175 - DNA, 25 bp, Homo sapien
gagaagtcatgggtaacttgtacat

SEQ ID NO: 3157176 - DNA, 25 bp, Homo sapien
gaagtcatgggtaacttgtacatta

SEQ ID NO: 3157177 - DNA, 25 bp, Homo sapien
ttgttggtcccagctggcaggcatg

SEQ ID NO: 3157178 - DNA, 25 bp, Homo sapien
agtgcctcctctcctattgttggtc

SEQ ID NO: 3157179 - DNA, 25 bp, Homo sapien
tggctgcccatagcgttcttggaaa

SEQ ID NO: 3157180 - DNA, 25 bp, Homo sapien
caggcatgggctgacagtgcattca

SEQ ID NO: 3157181 - DNA, 25 bp, Homo sapien
ggccatgccttcataaaggtactgt

SEQ ID NO: 3157182 - DNA, 25 bp, Homo sapien
catgccttcataaaggtactgttgg

SEQ ID NO: 3157183 - DNA, 25 bp, Homo sapien
caggccatgccttcataaaggtact

SEQ ID NO: 3157184 - DNA, 25 bp, Homo sapien
tcaggccatgccttcataaaggtac

SEQ ID NO: 3157185 - DNA, 25 bp, Homo sapien
caacctagtttgtgggtcaggaaga

SEQ ID NO: 3157186 - DNA, 25 bp, Homo sapien
tgagagcttgtagcacatgaaccca

SEQ ID NO: 3157187 - DNA, 25 bp, Homo sapien
ggaaacatggtcctgtgagagcttg

SEQ ID NO: 3157188 - DNA, 25 bp, Homo sapien
ataaatgccctaatgaaggaaacat

SEQ ID NO: 3157189 - DNA, 25 bp, Homo sapien
gcagatggcagaggtactgaccaca

SEQ ID NO: 3157190 - DNA, 25 bp, Homo sapien
tgatcttgctaaagcctcctagagg

SEQ ID NO: 3157191 - DNA, 25 bp, Homo sapien
cagtggtctctaacccatgatgcgg

SEQ ID NO: 3157192 - DNA, 25 bp, Homo sapien
tcctagaggcctacacactgctgta

SEQ ID NO: 3157193 - DNA, 25 bp, Homo sapien
gacagaattgattggcctaaatgaa

SEQ ID NO: 3157194 - DNA, 25 bp, Homo sapien
ggctaagcagttgagtacccacttg

SEQ ID NO: 3157195 - DNA, 25 bp, Homo sapien
tttcatcgaatgaatttttgacaga

SEQ ID NO: 3157196 - DNA, 25 bp, Homo sapien
cacttggtactattttcatcgaatg

SEQ ID NO: 3157197 - DNA, 25 bp, Homo sapien
ctgctggtgcctccgtgctgtttcc

SEQ ID NO: 3157198 - DNA, 25 bp, Homo sapien
tatttggtaaccatcgcaggaattt

SEQ ID NO: 3157199 - DNA, 25 bp, Homo sapien
gatttatttggtaaccatcgcagga

SEQ ID NO: 3157200 - DNA, 25 bp, Homo sapien
ggtaaccatcgcaggaatttcagaa

SEQ ID NO: 3157201 - DNA, 25 bp, Homo sapien
caaatgtcttccctcatgcacaaga

SEQ ID NO: 3157202 - DNA, 25 bp, Homo sapien
cctcatgcacaagatttttcaacat

SEQ ID NO: 3157203 - DNA, 25 bp, Homo sapien
ccctcatgcacaagatttttcaaca

SEQ ID NO: 3157204 - DNA, 25 bp, Homo sapien
gtcttccctcatgcacaagattttt

SEQ ID NO: 3157205 - DNA, 25 bp, Homo sapien
ctctccaaatgggaaaagaattgct

SEQ ID NO: 3157206 - DNA, 25 bp, Homo sapien
tctccaaatgggaaaagaattgctt

SEQ ID NO: 3157207 - DNA, 25 bp, Homo sapien
gtctctccaaatgggaaaagaattg

SEQ ID NO: 3157208 - DNA, 25 bp, Homo sapien
ctccaaatgggaaaagaattgcttc

SEQ ID NO: 3157209 - DNA, 25 bp, Homo sapien
taatggtgtgacttccgcatgttgc

SEQ ID NO: 3157210 - DNA, 25 bp, Homo sapien
gcatgttgctagttgatcaggtctc

SEQ ID NO: 3157211 - DNA, 25 bp, Homo sapien
aaatagcttgtccacagttccctgg

SEQ ID NO: 3157212 - DNA, 25 bp, Homo sapien
ccctggatgctagcttagggcagca

SEQ ID NO: 3157213 - DNA, 25 bp, Homo sapien
cttcagacagcagatcaaggcaata

SEQ ID NO: 3157214 - DNA, 25 bp, Homo sapien
gacagcagatcaaggcaatataggt

SEQ ID NO: 3157215 - DNA, 25 bp, Homo sapien
cagacagcagatcaaggcaatatag

SEQ ID NO: 3157216 - DNA, 25 bp, Homo sapien
gcagatcaaggcaatataggtaata

SEQ ID NO: 3157217 - DNA, 25 bp, Homo sapien
ccgggcatgatggtaggtgcctgca

SEQ ID NO: 3157218 - DNA, 25 bp, Homo sapien
aagccgtggcgggtagatcatctga

SEQ ID NO: 3157219 - DNA, 25 bp, Homo sapien
ggaagccgtggcgggtagatcatct

SEQ ID NO: 3157220 - DNA, 25 bp, Homo sapien
tgggaagccgtggcgggtagatcat

SEQ ID NO: 3157221 - DNA, 25 bp, Homo sapien
aacacaagcaaagcactggcctgga

SEQ ID NO: 3157222 - DNA, 25 bp, Homo sapien
tcaaaggggattcgcaagacaccaa

SEQ ID NO: 3157223 - DNA, 25 bp, Homo sapien
cctaagatagtctggtagggcctga

SEQ ID NO: 3157224 - DNA, 25 bp, Homo sapien
gcctggaaaggcaccggcgtcaaag

SEQ ID NO: 3157225 - DNA, 25 bp, Homo sapien
tgctgctgcaaaaccatctcctggc

SEQ ID NO: 3157226 - DNA, 25 bp, Homo sapien
cccaaagcccagttcatagtcttct

SEQ ID NO: 3157227 - DNA, 25 bp, Homo sapien
tctgctgctgcaaaaccatctcctg

SEQ ID NO: 3157228 - DNA, 25 bp, Homo sapien
agcccagttcatagtcttctgctgc

SEQ ID NO: 3157229 - DNA, 25 bp, Homo sapien
tgtggatagccagaatacaaccaga

SEQ ID NO: 3157230 - DNA, 25 bp, Homo sapien
ctctttcagagtgtggatagccaga

SEQ ID NO: 3157231 - DNA, 25 bp, Homo sapien
cagagtgtggatagccagaatacaa

SEQ ID NO: 3157232 - DNA, 25 bp, Homo sapien
gatagccagaatacaaccagagatc

SEQ ID NO: 3157233 - DNA, 25 bp, Homo sapien
taggtatattggtaggatactcaaa

SEQ ID NO: 3157234 - DNA, 25 bp, Homo sapien
ggtggtaagcttctattttattgcc

SEQ ID NO: 3157235 - DNA, 25 bp, Homo sapien
cttagaaccaaatatgcagtcctct

SEQ ID NO: 3157236 - DNA, 25 bp, Homo sapien
tctagcaactgtatgagagcaggtg

SEQ ID NO: 3157237 - DNA, 25 bp, Homo sapien
tgaaacaacatgatccacagccttg

SEQ ID NO: 3157238 - DNA, 25 bp, Homo sapien
ggcgtctcatcatctgtctacaagg

SEQ ID NO: 3157239 - DNA, 25 bp, Homo sapien
caaaggaaccgctttcactcagctg

SEQ ID NO: 3157240 - DNA, 25 bp, Homo sapien
cactcagctgtactttggcgtctca

SEQ ID NO: 3157241 - DNA, 25 bp, Homo sapien
actgtgtgtccttcaaaatccctca

SEQ ID NO: 3157242 - DNA, 25 bp, Homo sapien
caaaatccctcatgcattgcctttg

SEQ ID NO: 3157243 - DNA, 25 bp, Homo sapien
ttcaaaatccctcatgcattgcctt

SEQ ID NO: 3157244 - DNA, 25 bp, Homo sapien
tcaaaatccctcatgcattgccttt

SEQ ID NO: 3157245 - DNA, 25 bp, Homo sapien
taaataaaagcgtttagtgagagta

SEQ ID NO: 3157246 - DNA, 25 bp, Homo sapien
aaaggaggcagcttcattgcccaga

SEQ ID NO: 3157247 - DNA, 25 bp, Homo sapien
gatccagtaatcagatggtctgcag

SEQ ID NO: 3157248 - DNA, 25 bp, Homo sapien
cagagaagcaatgacatagtttcac

SEQ ID NO: 3157249 - DNA, 25 bp, Homo sapien
cttgacggtcgagagaggagaaaaa

SEQ ID NO: 3157250 - DNA, 25 bp, Homo sapien
ccacaaaacgctaatatgaatatgc

SEQ ID NO: 3157251 - DNA, 25 bp, Homo sapien
tgcttgcccctgcagacaactgtgc

SEQ ID NO: 3157252 - DNA, 25 bp, Homo sapien
caactgtgctgatgggggacccttc

SEQ ID NO: 3157253 - DNA, 25 bp, Homo sapien
gctctccccgctgctaaaacatctc

SEQ ID NO: 3157254 - DNA, 25 bp, Homo sapien
ggactattgataccgcccatgagga

SEQ ID NO: 3157255 - DNA, 25 bp, Homo sapien
cctttggagagcaggccattgcttt

SEQ ID NO: 3157256 - DNA, 25 bp, Homo sapien
tgggcatgtagtagccgtcaggact

SEQ ID NO: 3157257 - DNA, 25 bp, Homo sapien
ctggaactgcagttccactccagca

SEQ ID NO: 3157258 - DNA, 25 bp, Homo sapien
cctgcaggaaaatcgtgggtgctac

SEQ ID NO: 3157259 - DNA, 25 bp, Homo sapien
caagcagttcttttgatctatgagt

SEQ ID NO: 3157260 - DNA, 25 bp, Homo sapien
cgtgggtgctactttcaagcagttc

SEQ ID NO: 3157261 - DNA, 25 bp, Homo sapien
caaaaatgcctgcaggaaaatcgtg

SEQ ID NO: 3157262 - DNA, 25 bp, Homo sapien
gcttggtgtacagcaattctcaaag

SEQ ID NO: 3157263 - DNA, 25 bp, Homo sapien
tgcttggtgtacagcaattctcaaa

SEQ ID NO: 3157264 - DNA, 25 bp, Homo sapien
ctctgcttgctgcctctggccttat

SEQ ID NO: 3157265 - DNA, 25 bp, Homo sapien
gggcagccctggcttgagctctgct

SEQ ID NO: 3157266 - DNA, 25 bp, Homo sapien
agccctggcttgagctctgcttgct

SEQ ID NO: 3157267 - DNA, 25 bp, Homo sapien
tggggcagccctggcttgagctctg

SEQ ID NO: 3157268 - DNA, 25 bp, Homo sapien
cttggcagaggcttaaatgggtcac

SEQ ID NO: 3157269 - DNA, 25 bp, Homo sapien
tagctcttggcagaggcttaaatgg

SEQ ID NO: 3157270 - DNA, 25 bp, Homo sapien
ccagtagctcttggcagaggcttaa

SEQ ID NO: 3157271 - DNA, 25 bp, Homo sapien
tccagtgccccagtagctcttggca

SEQ ID NO: 3157272 - DNA, 25 bp, Homo sapien
aagatcccccaactggtatgctttt

SEQ ID NO: 3157273 - DNA, 25 bp, Homo sapien
ttttgtgaccctgatgggggcactg

SEQ ID NO: 3157274 - DNA, 25 bp, Homo sapien
caagatcccccaactggtatgcttt

SEQ ID NO: 3157275 - DNA, 25 bp, Homo sapien
ggtatgcttttgtgaccctgatggg

SEQ ID NO: 3157276 - DNA, 25 bp, Homo sapien
atccacccagaggaattctggctta

SEQ ID NO: 3157277 - DNA, 25 bp, Homo sapien
tccacccagaggaattctggcttac

SEQ ID NO: 3157278 - DNA, 25 bp, Homo sapien
aattgtcatttaatcgtacccaagc

SEQ ID NO: 3157279 - DNA, 25 bp, Homo sapien
attgtcatttaatcgtacccaagca

SEQ ID NO: 3157280 - DNA, 25 bp, Homo sapien
aaattgtcatttaatcgtacccaag

SEQ ID NO: 3157281 - DNA, 25 bp, Homo sapien
taccgaaagctggaaatagcccttg

SEQ ID NO: 3157282 - DNA, 25 bp, Homo sapien
ggacagtgcaccatcggcttaggga

SEQ ID NO: 3157283 - DNA, 25 bp, Homo sapien
tcacttggaggaggataccgaaagc

SEQ ID NO: 3157284 - DNA, 25 bp, Homo sapien
gtcctaggaaaaagccactctccaa

SEQ ID NO: 3157285 - DNA, 25 bp, Homo sapien
gtgttacaggaatgtgttgggttcc

SEQ ID NO: 3157286 - DNA, 25 bp, Homo sapien
cattccaaatctgcagatgaaatgc

SEQ ID NO: 3157287 - DNA, 25 bp, Homo sapien
gaatgtgttgggttccttggaattc

SEQ ID NO: 3157288 - DNA, 25 bp, Homo sapien
catgtcatccactgacaaaaagaac

SEQ ID NO: 3157289 - DNA, 25 bp, Homo sapien
gccctttgaagtcagtgcgagctct

SEQ ID NO: 3157290 - DNA, 25 bp, Homo sapien
cctgtctatgatgtgtcccacaggg

SEQ ID NO: 3157291 - DNA, 25 bp, Homo sapien
tgcgagctctatgtgtgaatcagcc

SEQ ID NO: 3157292 - DNA, 25 bp, Homo sapien
aatcagcctcgtggaaagagaagcc

SEQ ID NO: 3157293 - DNA, 25 bp, Homo sapien
cagagttgctgttccagtggaggaa

SEQ ID NO: 3157294 - DNA, 25 bp, Homo sapien
tgttccagtggaggaaatagaacat

SEQ ID NO: 3157295 - DNA, 25 bp, Homo sapien
tctgccagagttgctgttccagtgg

SEQ ID NO: 3157296 - DNA, 25 bp, Homo sapien
ttgctgttccagtggaggaaataga

SEQ ID NO: 3157297 - DNA, 25 bp, Homo sapien
gtttgtttccacattgagaagagca

SEQ ID NO: 3157298 - DNA, 25 bp, Homo sapien
ttccacattgagaagagcatccagg

SEQ ID NO: 3157299 - DNA, 25 bp, Homo sapien
gtttccacattgagaagagcatcca

SEQ ID NO: 3157300 - DNA, 25 bp, Homo sapien
ttgtttccacattgagaagagcatc

SEQ ID NO: 3157301 - DNA, 25 bp, Homo sapien
ctatctggttgtgacctctccccat

SEQ ID NO: 3157302 - DNA, 25 bp, Homo sapien
tatgctcaactccttggtattaggt

SEQ ID NO: 3157303 - DNA, 25 bp, Homo sapien
gacctctccccataatatgccttta

SEQ ID NO: 3157304 - DNA, 25 bp, Homo sapien
gatgtttggcttaggggatctcctc

SEQ ID NO: 3157305 - DNA, 25 bp, Homo sapien
cagaaatccaggcagcgatggggaa

SEQ ID NO: 3157306 - DNA, 25 bp, Homo sapien
gagaaaagaatatccgcagagtctg

SEQ ID NO: 3157307 - DNA, 25 bp, Homo sapien
ctgagagagttgttgagtgtaacag

SEQ ID NO: 3157308 - DNA, 25 bp, Homo sapien
tttgccaggaggcatcagaaatcca

SEQ ID NO: 3157309 - DNA, 25 bp, Homo sapien
tccgatacagtaccggcatgccaaa

SEQ ID NO: 3157310 - DNA, 25 bp, Homo sapien
tacagtaccggcatgccaaactgtc

SEQ ID NO: 3157311 - DNA, 25 bp, Homo sapien
tttctccgatacagtaccggcatgc

SEQ ID NO: 3157312 - DNA, 25 bp, Homo sapien
catttctccgatacagtaccggcat

SEQ ID NO: 3157313 - DNA, 25 bp, Homo sapien
cttccaacgggtaaacagaatcctg

SEQ ID NO: 3157314 - DNA, 25 bp, Homo sapien
caacgggtaaacagaatcctgaaca

SEQ ID NO: 3157315 - DNA, 25 bp, Homo sapien
tgaatgagcttccaacgggtaaaca

SEQ ID NO: 3157316 - DNA, 25 bp, Homo sapien
acataaagggtttctgaattcctct

SEQ ID NO: 3157317 - DNA, 25 bp, Homo sapien
caacccttcaagtataacttggaga

SEQ ID NO: 3157318 - DNA, 25 bp, Homo sapien
tctgtctaaaggtatctgaaaaact

SEQ ID NO: 3157319 - DNA, 25 bp, Homo sapien
gagaatcacataggcaaagcttaag

SEQ ID NO: 3157320 - DNA, 25 bp, Homo sapien
cacacacaggtgtatccaggaagag

SEQ ID NO: 3157321 - DNA, 25 bp, Homo sapien
cacactctgcacacaatcatgtaaa

SEQ ID NO: 3157322 - DNA, 25 bp, Homo sapien
gtaaactatatctgcacccacatca

SEQ ID NO: 3157323 - DNA, 25 bp, Homo sapien
catttcccatacacactctgcacac

SEQ ID NO: 3157324 - DNA, 25 bp, Homo sapien
cacaatcatgtaaactatatctgca

SEQ ID NO: 3157325 - DNA, 25 bp, Homo sapien
gctgagtgagtccttaaagattgaa

SEQ ID NO: 3157326 - DNA, 25 bp, Homo sapien
tcactgcgtggctacagcaaggtat

SEQ ID NO: 3157327 - DNA, 25 bp, Homo sapien
tcatccagatttagagctgctactg

SEQ ID NO: 3157328 - DNA, 25 bp, Homo sapien
aagccagcaggactgaacaccttct

SEQ ID NO: 3157329 - DNA, 25 bp, Homo sapien
ttgtacatacagaaggcttgcttag

SEQ ID NO: 3157330 - DNA, 25 bp, Homo sapien
ctttgattcagagaattctttgtac

SEQ ID NO: 3157331 - DNA, 25 bp, Homo sapien
ttcagagaattctttgtacatacag

SEQ ID NO: 3157332 - DNA, 25 bp, Homo sapien
cagaaggcttgcttagttactacca

SEQ ID NO: 3157333 - DNA, 25 bp, Homo sapien
caggtaagattgaggtatggaagca

SEQ ID NO: 3157334 - DNA, 25 bp, Homo sapien
cacatgagcaggtaagattgaggta

SEQ ID NO: 3157335 - DNA, 25 bp, Homo sapien
attcacatgagcaggtaagattgag

SEQ ID NO: 3157336 - DNA, 25 bp, Homo sapien
gaattcacatgagcaggtaagattg

SEQ ID NO: 3157337 - DNA, 25 bp, Homo sapien
caaccaaatgttgagccagagagga

SEQ ID NO: 3157338 - DNA, 25 bp, Homo sapien
aattcagaggcagtccatttaatct

SEQ ID NO: 3157339 - DNA, 25 bp, Homo sapien
tcatcagctcaaacaatggcaactt

SEQ ID NO: 3157340 - DNA, 25 bp, Homo sapien
tgttataaagtaactggatttacag

SEQ ID NO: 3157341 - DNA, 25 bp, Homo sapien
ttcttgtggatgtgcttttgaacat

SEQ ID NO: 3157342 - DNA, 25 bp, Homo sapien
acattcttcctaaaagcaactgctg

SEQ ID NO: 3157343 - DNA, 25 bp, Homo sapien
atgcctggctgaacattcttgtgga

SEQ ID NO: 3157344 - DNA, 25 bp, Homo sapien
gatgtgcttttgaacattcttccta

SEQ ID NO: 3157345 - DNA, 25 bp, Homo sapien
cgcttaggtggagcgcctctatccc

SEQ ID NO: 3157346 - DNA, 25 bp, Homo sapien
ggaaaatccgcttaggtggagcgcc

SEQ ID NO: 3157347 - DNA, 25 bp, Homo sapien
tttgcaacttagcaggataagtttc

SEQ ID NO: 3157348 - DNA, 25 bp, Homo sapien
taattttgcaacttagcaggataag

SEQ ID NO: 3157349 - DNA, 25 bp, Homo sapien
gataatgtcccagtaatgcgtacag

SEQ ID NO: 3157350 - DNA, 25 bp, Homo sapien
tattgacttctggactggcatagcc

SEQ ID NO: 3157351 - DNA, 25 bp, Homo sapien
tgaactcagaagagccccaggctat

SEQ ID NO: 3157352 - DNA, 25 bp, Homo sapien
gaaatccccgctagtgcctgaaatg

SEQ ID NO: 3157353 - DNA, 25 bp, Homo sapien
cagcgtgttaccagcaatggcagca

SEQ ID NO: 3157354 - DNA, 25 bp, Homo sapien
ggcagcataatcctcagtgatcaca

SEQ ID NO: 3157355 - DNA, 25 bp, Homo sapien
ttttgtgaattttgccggtgagtca

SEQ ID NO: 3157356 - DNA, 25 bp, Homo sapien
gggtcaatgtgtgcttggcaagtcc

SEQ ID NO: 3157357 - DNA, 25 bp, Homo sapien
cctgactgctttgagatgggacatc

SEQ ID NO: 3157358 - DNA, 25 bp, Homo sapien
tgcctgactgctttgagatgggaca

SEQ ID NO: 3157359 - DNA, 25 bp, Homo sapien
gaaatattggctcttcttgggtctc

SEQ ID NO: 3157360 - DNA, 25 bp, Homo sapien
gcctgactgctttgagatgggacat

SEQ ID NO: 3157361 - DNA, 25 bp, Homo sapien
ctgagcctcggaacagcgggagcac

SEQ ID NO: 3157362 - DNA, 25 bp, Homo sapien
tcagaagctgatcaaaattccctgc

SEQ ID NO: 3157363 - DNA, 25 bp, Homo sapien
aagctgatcaaaattccctgcctcc

SEQ ID NO: 3157364 - DNA, 25 bp, Homo sapien
ttgacataacgtgaagtcctgtgct

SEQ ID NO: 3157365 - DNA, 25 bp, Homo sapien
cagaaacccgagctctgccatttga

SEQ ID NO: 3157366 - DNA, 25 bp, Homo sapien
ccatccccgaggtaatttgacacag

SEQ ID NO: 3157367 - DNA, 25 bp, Homo sapien
tctattaatgccatgtaagtctctc

SEQ ID NO: 3157368 - DNA, 25 bp, Homo sapien
gaggtaatttgacacagtctgggaa

SEQ ID NO: 3157369 - DNA, 25 bp, Homo sapien
ctattctaatctagaaccgatgatg

SEQ ID NO: 3157370 - DNA, 25 bp, Homo sapien
taatctagaaccgatgatgctggct

SEQ ID NO: 3157371 - DNA, 25 bp, Homo sapien
atctagaaccgatgatgctggctct

SEQ ID NO: 3157372 - DNA, 25 bp, Homo sapien
ttctaatctagaaccgatgatgctg

SEQ ID NO: 3157373 - DNA, 25 bp, Homo sapien
tgttttggccttgtgtggatgcagc

SEQ ID NO: 3157374 - DNA, 25 bp, Homo sapien
tagacaaaacagtcagcggagtgat

SEQ ID NO: 3157375 - DNA, 25 bp, Homo sapien
tcacagaggtagtttggttgctttg

SEQ ID NO: 3157376 - DNA, 25 bp, Homo sapien
taatcacccagaactcctcagtgac

SEQ ID NO: 3157377 - DNA, 25 bp, Homo sapien
ctgctccttggactaaaagtcaaga

SEQ ID NO: 3157378 - DNA, 25 bp, Homo sapien
tctgacacatgcacagggactgctc

SEQ ID NO: 3157379 - DNA, 25 bp, Homo sapien
gactccaacacaaatgagccatgtg

SEQ ID NO: 3157380 - DNA, 25 bp, Homo sapien
gaccttgaatgtgtcatctcaccct

SEQ ID NO: 3157381 - DNA, 25 bp, Homo sapien
gagatccagtcagtccaaggcaagg

SEQ ID NO: 3157382 - DNA, 25 bp, Homo sapien
tgagtggcaactcacatgcgtctcc

SEQ ID NO: 3157383 - DNA, 25 bp, Homo sapien
gcgtctcccgggcaaatttgataac

SEQ ID NO: 3157384 - DNA, 25 bp, Homo sapien
caagggagcgcatcaaaacagtcac

SEQ ID NO: 3157385 - DNA, 25 bp, Homo sapien
ctcagagtggcagcgtgaagcccct

SEQ ID NO: 3157386 - DNA, 25 bp, Homo sapien
tcagagtggcagcgtgaagcccctc

SEQ ID NO: 3157387 - DNA, 25 bp, Homo sapien
acactgtgaaccacaagctgggcat

SEQ ID NO: 3157388 - DNA, 25 bp, Homo sapien
ttcaccaagatggagcacactgtga

SEQ ID NO: 3157389 - DNA, 25 bp, Homo sapien
gttcaccaagatggagcacactgtg

SEQ ID NO: 3157390 - DNA, 25 bp, Homo sapien
gcacactgtgaaccacaagctgggc

SEQ ID NO: 3157391 - DNA, 25 bp, Homo sapien
cttgcttccctgcaccagccggctg

SEQ ID NO: 3157392 - DNA, 25 bp, Homo sapien
aggaggaccacaggaacggtcccat

SEQ ID NO: 3157393 - DNA, 25 bp, Homo sapien
cttccctgcaccagccggctgcagg

SEQ ID NO: 3157394 - DNA, 25 bp, Homo sapien
ggaccacaggaacggtcccatccag

SEQ ID NO: 3157395 - DNA, 25 bp, Homo sapien
gagacagaccttggatgaaagatca

SEQ ID NO: 3157396 - DNA, 25 bp, Homo sapien
taaaggctgccctcgtcagggtgct

SEQ ID NO: 3157397 - DNA, 25 bp, Homo sapien
cagcaagttgcactctggagacaga

SEQ ID NO: 3157398 - DNA, 25 bp, Homo sapien
taggtgacaaacaagcccattccat

SEQ ID NO: 3157399 - DNA, 25 bp, Homo sapien
gacaagagggcagggggaagagagg

SEQ ID NO: 3157400 - DNA, 25 bp, Homo sapien
tgacaagagggcagggggaagagag

SEQ ID NO: 3157401 - DNA, 25 bp, Homo sapien
ctgacaagagggcagggggaagaga

SEQ ID NO: 3157402 - DNA, 25 bp, Homo sapien
taagtgctagggccacacaacccag

SEQ ID NO: 3157403 - DNA, 25 bp, Homo sapien
tgctgcacccatgccaagaacagct

SEQ ID NO: 3157404 - DNA, 25 bp, Homo sapien
tgcacccatgccaagaacagctcaa

SEQ ID NO: 3157405 - DNA, 25 bp, Homo sapien
tgctgctgcacccatgccaagaaca

SEQ ID NO: 3157406 - DNA, 25 bp, Homo sapien
ctgctattgccagcaatttcggcgc

SEQ ID NO: 3157407 - DNA, 25 bp, Homo sapien
tgccagcaatttcggcgctctttca

SEQ ID NO: 3157408 - DNA, 25 bp, Homo sapien
aatttcggcgctctttcaacagtac

SEQ ID NO: 3157409 - DNA, 25 bp, Homo sapien
gcaatttcggcgctctttcaacagt

SEQ ID NO: 3157410 - DNA, 25 bp, Homo sapien
ttagtgtcatttctccccctttgat

SEQ ID NO: 3157411 - DNA, 25 bp, Homo sapien
gatgtcattttgtgtcactttattt

SEQ ID NO: 3157412 - DNA, 25 bp, Homo sapien
cattttgtgtcactttatttactga

SEQ ID NO: 3157413 - DNA, 25 bp, Homo sapien
tcatttctccccctttgatgtcatt

SEQ ID NO: 3157414 - DNA, 25 bp, Homo sapien
gaaggcacccgtgaggctgagcctt

SEQ ID NO: 3157415 - DNA, 25 bp, Homo sapien
gtgaggaaggcacccgtgaggctga

SEQ ID NO: 3157416 - DNA, 25 bp, Homo sapien
ggaaggcacccgtgaggctgagcct

SEQ ID NO: 3157417 - DNA, 25 bp, Homo sapien
aatcatcagtagtatccccttctct

SEQ ID NO: 3157418 - DNA, 25 bp, Homo sapien
cacagatctcttatccattccagca

SEQ ID NO: 3157419 - DNA, 25 bp, Homo sapien
aaatcatcagtagtatccccttctc

SEQ ID NO: 3157420 - DNA, 25 bp, Homo sapien
cataatgggatataagcctttactg

SEQ ID NO: 3157421 - DNA, 25 bp, Homo sapien
ataatgggatataagcctttactgt

SEQ ID NO: 3157422 - DNA, 25 bp, Homo sapien
caagatgtccctgaggtcatgggca

SEQ ID NO: 3157423 - DNA, 25 bp, Homo sapien
ctgggcaatgaaggagttagtaagc

SEQ ID NO: 3157424 - DNA, 25 bp, Homo sapien
agctgtcccttttctaagtagttat

SEQ ID NO: 3157425 - DNA, 25 bp, Homo sapien
tctacatatagcttccaagatgtcc

SEQ ID NO: 3157426 - DNA, 25 bp, Homo sapien
tcttcgttgataggctgagacacag

SEQ ID NO: 3157427 - DNA, 25 bp, Homo sapien
tggtaccctacctcggctttcaaga

SEQ ID NO: 3157428 - DNA, 25 bp, Homo sapien
aaaaagtacgttggcataaggcagc

SEQ ID NO: 3157429 - DNA, 25 bp, Homo sapien
aatgcagggcttggacatttgagca

SEQ ID NO: 3157430 - DNA, 25 bp, Homo sapien
ggctcatgtcctgaacctactgact

SEQ ID NO: 3157431 - DNA, 25 bp, Homo sapien
aaactccccaaaacggcacatcaga

SEQ ID NO: 3157432 - DNA, 25 bp, Homo sapien
atcagagcatctgggatcagaccgc

SEQ ID NO: 3157433 - DNA, 25 bp, Homo sapien
gttctcatactccaacaagacacag

SEQ ID NO: 3157434 - DNA, 25 bp, Homo sapien
acaaccattactgtttctcagtgtt

SEQ ID NO: 3157435 - DNA, 25 bp, Homo sapien
aaataatatggttaggagtgacttc

SEQ ID NO: 3157436 - DNA, 25 bp, Homo sapien
tatggttaggagtgacttcaaccat

SEQ ID NO: 3157437 - DNA, 25 bp, Homo sapien
ctgaaacaaccattactgtttctca

SEQ ID NO: 3157438 - DNA, 25 bp, Homo sapien
actgctataagcaacgtaatttatg

SEQ ID NO: 3157439 - DNA, 25 bp, Homo sapien
tccaacttgcttgctacttagaaat

SEQ ID NO: 3157440 - DNA, 25 bp, Homo sapien
tgtttaagaaacatagcctttatcc

SEQ ID NO: 3157441 - DNA, 25 bp, Homo sapien
taagcaacgtaatttatgtaaatag

SEQ ID NO: 3157442 - DNA, 25 bp, Homo sapien
tagggggagcgtgtagcaatgacca

SEQ ID NO: 3157443 - DNA, 25 bp, Homo sapien
cccaacatacatgagttaacatgct

SEQ ID NO: 3157444 - DNA, 25 bp, Homo sapien
gacactcatggttataaagtttggg

SEQ ID NO: 3157445 - DNA, 25 bp, Homo sapien
tgctccagtagttgacagatgcact

SEQ ID NO: 3157446 - DNA, 25 bp, Homo sapien
ccttcattggatgcctgtaaaagcc

SEQ ID NO: 3157447 - DNA, 25 bp, Homo sapien
tcccttcattggatgcctgtaaaag

SEQ ID NO: 3157448 - DNA, 25 bp, Homo sapien
tcattggatgcctgtaaaagccaaa

SEQ ID NO: 3157449 - DNA, 25 bp, Homo sapien
tggcttcccttcattggatgcctgt

SEQ ID NO: 3157450 - DNA, 25 bp, Homo sapien
cctgagtgatttcggatgtccccaa

SEQ ID NO: 3157451 - DNA, 25 bp, Homo sapien
tgttcaactggtcaccacaatcctg

SEQ ID NO: 3157452 - DNA, 25 bp, Homo sapien
ggatgtccccaaacaatcagtagtc

SEQ ID NO: 3157453 - DNA, 25 bp, Homo sapien
gggatataaatcactgcctgctttt

SEQ ID NO: 3157454 - DNA, 25 bp, Homo sapien
caggttctgactggtgactgagtgg

SEQ ID NO: 3157455 - DNA, 25 bp, Homo sapien
tgcaggttctgactggtgactgagt

SEQ ID NO: 3157456 - DNA, 25 bp, Homo sapien
aggttctgactggtgactgagtgga

SEQ ID NO: 3157457 - DNA, 25 bp, Homo sapien
gcaggttctgactggtgactgagtg

SEQ ID NO: 3157458 - DNA, 25 bp, Homo sapien
tggaacatgattgagattcctccca

SEQ ID NO: 3157459 - DNA, 25 bp, Homo sapien
cctcccattcttggaagttgcctga

SEQ ID NO: 3157460 - DNA, 25 bp, Homo sapien
tatcatcaacatacatagagaagac

SEQ ID NO: 3157461 - DNA, 25 bp, Homo sapien
actgtatcctataacaaccccttct

SEQ ID NO: 3157462 - DNA, 25 bp, Homo sapien
agggaactcttagcctccaagcttt

SEQ ID NO: 3157463 - DNA, 25 bp, Homo sapien
cttccaagggaactcttagcctcca

SEQ ID NO: 3157464 - DNA, 25 bp, Homo sapien
caggcagtagttcaacttccaaggg

SEQ ID NO: 3157465 - DNA, 25 bp, Homo sapien
agctttcctgctgtcggtgttcttg

SEQ ID NO: 3157466 - DNA, 25 bp, Homo sapien
cctatcagaagttgagaggctcgtt

SEQ ID NO: 3157467 - DNA, 25 bp, Homo sapien
atcagaagttgagaggctcgtttca

SEQ ID NO: 3157468 - DNA, 25 bp, Homo sapien
ctatcagaagttgagaggctcgttt

SEQ ID NO: 3157469 - DNA, 25 bp, Homo sapien
tatcagaagttgagaggctcgtttc

SEQ ID NO: 3157470 - DNA, 25 bp, Homo sapien
ccatgcctggtgtaaggacattcaa

SEQ ID NO: 3157471 - DNA, 25 bp, Homo sapien
aatgataatacgctgggagtggaag

SEQ ID NO: 3157472 - DNA, 25 bp, Homo sapien
tgtaaactaagaaacctgcctgtga

SEQ ID NO: 3157473 - DNA, 25 bp, Homo sapien
tgcctgtgagtaacttcaccttcga

SEQ ID NO: 3157474 - DNA, 25 bp, Homo sapien
ctttcgagctatctttgttggtgtc

SEQ ID NO: 3157475 - DNA, 25 bp, Homo sapien
ttatgcttggtccttgatatggata

SEQ ID NO: 3157476 - DNA, 25 bp, Homo sapien
tagactttcgagctatctttgttgg

SEQ ID NO: 3157477 - DNA, 25 bp, Homo sapien
ccttgatatggatagactttcgagc

SEQ ID NO: 3157478 - DNA, 25 bp, Homo sapien
cacaagagcacctttaactggaagg

SEQ ID NO: 3157479 - DNA, 25 bp, Homo sapien
agactggaaatgtgggaacctgaag

SEQ ID NO: 3157480 - DNA, 25 bp, Homo sapien
tgtgggaacctgaagtcctgattac

SEQ ID NO: 3157481 - DNA, 25 bp, Homo sapien
tttatttcttaatagtctgatagct

SEQ ID NO: 3157482 - DNA, 25 bp, Homo sapien
gagactgaacgctgaataaacttga

SEQ ID NO: 3157483 - DNA, 25 bp, Homo sapien
tgagactgaacgctgaataaacttg

SEQ ID NO: 3157484 - DNA, 25 bp, Homo sapien
gtttgcctacttccactttcctcca

SEQ ID NO: 3157485 - DNA, 25 bp, Homo sapien
tttgcctacttccactttcctccat

SEQ ID NO: 3157486 - DNA, 25 bp, Homo sapien
aaacagaggacacccatgtgtagcc

SEQ ID NO: 3157487 - DNA, 25 bp, Homo sapien
gacacccatgtgtagccttactcat

SEQ ID NO: 3157488 - DNA, 25 bp, Homo sapien
cagaggacacccatgtgtagcctta

SEQ ID NO: 3157489 - DNA, 25 bp, Homo sapien
cttaaacagaggacacccatgtgta

SEQ ID NO: 3157490 - DNA, 25 bp, Homo sapien
ggtaaaacgtaattcccatgatgtg

SEQ ID NO: 3157491 - DNA, 25 bp, Homo sapien
tgttgcacagatttgcccaggtatc

SEQ ID NO: 3157492 - DNA, 25 bp, Homo sapien
tgtgagaaggttcagcatagacccc

SEQ ID NO: 3157493 - DNA, 25 bp, Homo sapien
catagacccctacaatgccaatatc

SEQ ID NO: 3157494 - DNA, 25 bp, Homo sapien
ttgtggcaataatcaatagtttacc

SEQ ID NO: 3157495 - DNA, 25 bp, Homo sapien
tgaaattgtggcaataatcaatagt

SEQ ID NO: 3157496 - DNA, 25 bp, Homo sapien
gtggcaataatcaatagtttaccaa

SEQ ID NO: 3157497 - DNA, 25 bp, Homo sapien
aattgtggcaataatcaatagttta

SEQ ID NO: 3157498 - DNA, 25 bp, Homo sapien
cagggcttggctaaagctaatagga

SEQ ID NO: 3157499 - DNA, 25 bp, Homo sapien
atgctgttctaaccttgctcgcagg

SEQ ID NO: 3157500 - DNA, 25 bp, Homo sapien
aaccttgctcgcagggcttggctaa

SEQ ID NO: 3157501 - DNA, 25 bp, Homo sapien
taaagctaataggagcttctctcat

SEQ ID NO: 3157502 - DNA, 25 bp, Homo sapien
cattagcagtgtaattaatgggcat

SEQ ID NO: 3157503 - DNA, 25 bp, Homo sapien
accattagcagtgtaattaatgggc

SEQ ID NO: 3157504 - DNA, 25 bp, Homo sapien
gctgaccattagcagtgtaattaat

SEQ ID NO: 3157505 - DNA, 25 bp, Homo sapien
ttgctgaccattagcagtgtaatta

SEQ ID NO: 3157506 - DNA, 25 bp, Homo sapien
tgctcagcaatctccaaggcttcaa

SEQ ID NO: 3157507 - DNA, 25 bp, Homo sapien
tactcccacgagcaatagctgctga

SEQ ID NO: 3157508 - DNA, 25 bp, Homo sapien
tcagagctttccactaatacgacac

SEQ ID NO: 3157509 - DNA, 25 bp, Homo sapien
tagctgctgaccatctctcacatgt

SEQ ID NO: 3157510 - DNA, 25 bp, Homo sapien
ttcaacacaaacatgaaaacccgta

SEQ ID NO: 3157511 - DNA, 25 bp, Homo sapien
tcaacacaaacatgaaaacccgtaa

SEQ ID NO: 3157512 - DNA, 25 bp, Homo sapien
caaaactcggcaatcacttaaatga

SEQ ID NO: 3157513 - DNA, 25 bp, Homo sapien
ggcaatcacttaaatgagaagccat

SEQ ID NO: 3157514 - DNA, 25 bp, Homo sapien
ctcggcaatcacttaaatgagaagc

SEQ ID NO: 3157515 - DNA, 25 bp, Homo sapien
aactcggcaatcacttaaatgagaa

SEQ ID NO: 3157516 - DNA, 25 bp, Homo sapien
gatccgtcatcgtgtaaagggaacg

SEQ ID NO: 3157517 - DNA, 25 bp, Homo sapien
gacggatgctggttccctcagaaga

SEQ ID NO: 3157518 - DNA, 25 bp, Homo sapien
gggaacggtatttcgtgagaacaca

SEQ ID NO: 3157519 - DNA, 25 bp, Homo sapien
gactcatactcaaattcttcaggat

SEQ ID NO: 3157520 - DNA, 25 bp, Homo sapien
tgtcagcaatgctatgccaattgtt

SEQ ID NO: 3157521 - DNA, 25 bp, Homo sapien
gatagaagcttgatccagcacttgg

SEQ ID NO: 3157522 - DNA, 25 bp, Homo sapien
cacaggggagatagaagcttgatcc

SEQ ID NO: 3157523 - DNA, 25 bp, Homo sapien
gcaatgctatgccaattgtttacaa

SEQ ID NO: 3157524 - DNA, 25 bp, Homo sapien
tggcacacagccctagtcagtttcc

SEQ ID NO: 3157525 - DNA, 25 bp, Homo sapien
cagtttcctccgatcacttccattg

SEQ ID NO: 3157526 - DNA, 25 bp, Homo sapien
tccaagcagcgccacacgatattgt

SEQ ID NO: 3157527 - DNA, 25 bp, Homo sapien
cagcgccacacgatattgtggtcat

SEQ ID NO: 3157528 - DNA, 25 bp, Homo sapien
gaaggattgaaattagcagcccaca

SEQ ID NO: 3157529 - DNA, 25 bp, Homo sapien
gcacttgataacacttcttggtcca

SEQ ID NO: 3157530 - DNA, 25 bp, Homo sapien
ctaggagttaggcatgcacttgata

SEQ ID NO: 3157531 - DNA, 25 bp, Homo sapien
tgggtgccggttccttctcatgctt

SEQ ID NO: 3157532 - DNA, 25 bp, Homo sapien
gatgggtaggtaggatccatacatt

SEQ ID NO: 3157533 - DNA, 25 bp, Homo sapien
tttgatgggtaggtaggatccatac

SEQ ID NO: 3157534 - DNA, 25 bp, Homo sapien
taagcaccagggttttgatgggtag

SEQ ID NO: 3157535 - DNA, 25 bp, Homo sapien
ctgtgttatctgattaagcaccagg

SEQ ID NO: 3157536 - DNA, 25 bp, Homo sapien
ggccagcagcgtgcacatggtcagc

SEQ ID NO: 3157537 - DNA, 25 bp, Homo sapien
gtgcacatggtcagctgcagggacc

SEQ ID NO: 3157538 - DNA, 25 bp, Homo sapien
tgcagggaccagatgcatgtgaaag

SEQ ID NO: 3157539 - DNA, 25 bp, Homo sapien
ggtagacgcctagggccagcagcgt

SEQ ID NO: 3157540 - DNA, 25 bp, Homo sapien
tccaacttctaaagaatacctcctg

SEQ ID NO: 3157541 - DNA, 25 bp, Homo sapien
cgcggctggccaaagtctccaactt

SEQ ID NO: 3157542 - DNA, 25 bp, Homo sapien
acttctaaagaatacctcctgctgc

SEQ ID NO: 3157543 - DNA, 25 bp, Homo sapien
gtctccaacttctaaagaatacctc

SEQ ID NO: 3157544 - DNA, 25 bp, Homo sapien
ccaaaccttgtgatatctgtctgat

SEQ ID NO: 3157545 - DNA, 25 bp, Homo sapien
gaataacgatgttttaacaggactg

SEQ ID NO: 3157546 - DNA, 25 bp, Homo sapien
ctctgtgaagcaacactgagcatga

SEQ ID NO: 3157547 - DNA, 25 bp, Homo sapien
gaaaggatgacagatgtacaaggga

SEQ ID NO: 3157548 - DNA, 25 bp, Homo sapien
tttaggcttgccagagttcaacagg

SEQ ID NO: 3157549 - DNA, 25 bp, Homo sapien
cactttaggcttgccagagttcaac

SEQ ID NO: 3157550 - DNA, 25 bp, Homo sapien
tttctgacacactttaggcttgcca

SEQ ID NO: 3157551 - DNA, 25 bp, Homo sapien
tgacacactttaggcttgccagagt

SEQ ID NO: 3157552 - DNA, 25 bp, Homo sapien
cagtttctatgttagatcttgcctg

SEQ ID NO: 3157553 - DNA, 25 bp, Homo sapien
tgatttcaatactgtctgttaccga

SEQ ID NO: 3157554 - DNA, 25 bp, Homo sapien
tgttaccgaaatcccacagcaccaa

SEQ ID NO: 3157555 - DNA, 25 bp, Homo sapien
aaataaattgtaccaaacatgttga

SEQ ID NO: 3157556 - DNA, 25 bp, Homo sapien
catcttcctgtatcactgatgattt

SEQ ID NO: 3157557 - DNA, 25 bp, Homo sapien
tcatctgccgcgctaagtcaagtac

SEQ ID NO: 3157558 - DNA, 25 bp, Homo sapien
gccgcgctaagtcaagtacatacaa

SEQ ID NO: 3157559 - DNA, 25 bp, Homo sapien
ttctcagagctaagatgaccagaat

SEQ ID NO: 3157560 - DNA, 25 bp, Homo sapien
gaaggtcatacaatttctgtttaac

SEQ ID NO: 3157561 - DNA, 25 bp, Homo sapien
catccagtttgatacttgttctttg

SEQ ID NO: 3157562 - DNA, 25 bp, Homo sapien
tttgtttctgtatagcagatccagg

SEQ ID NO: 3157563 - DNA, 25 bp, Homo sapien
ttctgtttaacatccagtttgatac

SEQ ID NO: 3157564 - DNA, 25 bp, Homo sapien
gccgccagcaaaggcatctatggta

SEQ ID NO: 3157565 - DNA, 25 bp, Homo sapien
aaaaatgcaacagctcatcccttga

SEQ ID NO: 3157566 - DNA, 25 bp, Homo sapien
catgatcattatccctgagagccca

SEQ ID NO: 3157567 - DNA, 25 bp, Homo sapien
cagccactgaatctagcaaatttaa

SEQ ID NO: 3157568 - DNA, 25 bp, Homo sapien
tttggaaatatcacctgattccatc

SEQ ID NO: 3157569 - DNA, 25 bp, Homo sapien
acattttggaaatatcacctgattc

SEQ ID NO: 3157570 - DNA, 25 bp, Homo sapien
cattttggaaatatcacctgattcc

SEQ ID NO: 3157571 - DNA, 25 bp, Homo sapien
tggaaatatcacctgattccatcat

SEQ ID NO: 3157572 - DNA, 25 bp, Homo sapien
gtgtggaaacacaagaaactcatgg

SEQ ID NO: 3157573 - DNA, 25 bp, Homo sapien
gcaataactgtaatcagagtaccag

SEQ ID NO: 3157574 - DNA, 25 bp, Homo sapien
tcattgccagatactgaagccccag

SEQ ID NO: 3157575 - DNA, 25 bp, Homo sapien
ctttgatatagggagaaatactctc

SEQ ID NO: 3157576 - DNA, 25 bp, Homo sapien
ggactcgtcttgaggctccttgctt

SEQ ID NO: 3157577 - DNA, 25 bp, Homo sapien
tctcacgacttggaagtaggctgta

SEQ ID NO: 3157578 - DNA, 25 bp, Homo sapien
gagagtcgaaggagcatctcacgac

SEQ ID NO: 3157579 - DNA, 25 bp, Homo sapien
ggccctgatcctgactgttgagaga

SEQ ID NO: 3157580 - DNA, 25 bp, Homo sapien
tttcagccaacattgcccatttagc

SEQ ID NO: 3157581 - DNA, 25 bp, Homo sapien
gcaatttcattgagctatgtacatt

SEQ ID NO: 3157582 - DNA, 25 bp, Homo sapien
ttgagctatgtacattgatgtgtgc

SEQ ID NO: 3157583 - DNA, 25 bp, Homo sapien
ttcagccaacattgcccatttagca

SEQ ID NO: 3157584 - DNA, 25 bp, Homo sapien
gaggcagcaagcactgatgaatcaa

SEQ ID NO: 3157585 - DNA, 25 bp, Homo sapien
gagatctgatccaggttctcttcag

SEQ ID NO: 3157586 - DNA, 25 bp, Homo sapien
agcaagcactgatgaatcaaaataa

SEQ ID NO: 3157587 - DNA, 25 bp, Homo sapien
ggcagcaagcactgatgaatcaaaa

SEQ ID NO: 3157588 - DNA, 25 bp, Homo sapien
cacagtatacatatccccttgggat

SEQ ID NO: 3157589 - DNA, 25 bp, Homo sapien
tgagtgtgtctatcagtaactaact

SEQ ID NO: 3157590 - DNA, 25 bp, Homo sapien
gtaactaactccgtacaagtgatat

SEQ ID NO: 3157591 - DNA, 25 bp, Homo sapien
ccttgggataactgagaggagtaaa

SEQ ID NO: 3157592 - DNA, 25 bp, Homo sapien
agtggattttccagagttactgggt

SEQ ID NO: 3157593 - DNA, 25 bp, Homo sapien
cagtggattttccagagttactggg

SEQ ID NO: 3157594 - DNA, 25 bp, Homo sapien
ccgtatttctcttgaatgggttctg

SEQ ID NO: 3157595 - DNA, 25 bp, Homo sapien
ccacttgtggtaattgacctatttc

SEQ ID NO: 3157596 - DNA, 25 bp, Homo sapien
tgatcccagtaaagtgccgtatttc

SEQ ID NO: 3157597 - DNA, 25 bp, Homo sapien
gttccattccgaaattccacttgtg

SEQ ID NO: 3157598 - DNA, 25 bp, Homo sapien
cagaaactgcaggtgatgcacaatt

SEQ ID NO: 3157599 - DNA, 25 bp, Homo sapien
gaaactgcaggtgatgcacaattct

SEQ ID NO: 3157600 - DNA, 25 bp, Homo sapien
agaaactgcaggtgatgcacaattc

SEQ ID NO: 3157601 - DNA, 25 bp, Homo sapien
aaactgcaggtgatgcacaattctc

SEQ ID NO: 3157602 - DNA, 25 bp, Homo sapien
caagacacgtgtaatttgaagtatt

SEQ ID NO: 3157603 - DNA, 25 bp, Homo sapien
aagacacgtgtaatttgaagtattt

SEQ ID NO: 3157604 - DNA, 25 bp, Homo sapien
tcaagacacgtgtaatttgaagtat

SEQ ID NO: 3157605 - DNA, 25 bp, Homo sapien
cgcgttcttgatgcacactgtaaga

SEQ ID NO: 3157606 - DNA, 25 bp, Homo sapien
catctttggcgcgttcttgatgcac

SEQ ID NO: 3157607 - DNA, 25 bp, Homo sapien
ggcgcgttcttgatgcacactgtaa

SEQ ID NO: 3157608 - DNA, 25 bp, Homo sapien
aggaagcatctttggcgcgttcttg

SEQ ID NO: 3157609 - DNA, 25 bp, Homo sapien
tttagggcaatggaaagaattctag

SEQ ID NO: 3157610 - DNA, 25 bp, Homo sapien
aagaattctaggctgcctctttgca

SEQ ID NO: 3157611 - DNA, 25 bp, Homo sapien
tgcaaattctcttatcccaacaaat

SEQ ID NO: 3157612 - DNA, 25 bp, Homo sapien
gcctctttgcaaattctcttatccc

SEQ ID NO: 3157613 - DNA, 25 bp, Homo sapien
taagtctcccaaactcgaggcattg

SEQ ID NO: 3157614 - DNA, 25 bp, Homo sapien
caccaggttcctgacaagtaagtct

SEQ ID NO: 3157615 - DNA, 25 bp, Homo sapien
ctgtgatgtgttagcaccaggttcc

SEQ ID NO: 3157616 - DNA, 25 bp, Homo sapien
gacaagtaagtctcccaaactcgag

SEQ ID NO: 3157617 - DNA, 25 bp, Homo sapien
tccatgtgttggagcattatctcca

SEQ ID NO: 3157618 - DNA, 25 bp, Homo sapien
ctggaaacttaggaaggagtagact

SEQ ID NO: 3157619 - DNA, 25 bp, Homo sapien
gtactgaaaaattgccctgctttcc

SEQ ID NO: 3157620 - DNA, 25 bp, Homo sapien
taaactctgttggaggacggtctcc

SEQ ID NO: 3157621 - DNA, 25 bp, Homo sapien
agactaacagatgctttatgcctca

SEQ ID NO: 3157622 - DNA, 25 bp, Homo sapien
tttgatttgatagactaacagatgc

SEQ ID NO: 3157623 - DNA, 25 bp, Homo sapien
cttttttagatgttgcatccttcat

SEQ ID NO: 3157624 - DNA, 25 bp, Homo sapien
tgatagactaacagatgctttatgc

SEQ ID NO: 3157625 - DNA, 25 bp, Homo sapien
tcacattcttacaaggctaggcgat

SEQ ID NO: 3157626 - DNA, 25 bp, Homo sapien
ggctaggcgatggaaacagatccat

SEQ ID NO: 3157627 - DNA, 25 bp, Homo sapien
acagatccatcatagaagctggtcc

SEQ ID NO: 3157628 - DNA, 25 bp, Homo sapien
gatgagtcatcatggggtagcttcc

SEQ ID NO: 3157629 - DNA, 25 bp, Homo sapien
tggagttcccaagataatgtgttcc

SEQ ID NO: 3157630 - DNA, 25 bp, Homo sapien
ccatgggttgacatgtatgaatttt

SEQ ID NO: 3157631 - DNA, 25 bp, Homo sapien
tgcagtccctaccacccatgggttg

SEQ ID NO: 3157632 - DNA, 25 bp, Homo sapien
tccacaaccaagtatctgcagtccc

SEQ ID NO: 3157633 - DNA, 25 bp, Homo sapien
ctcttctcttaaagcatttgcctgg

SEQ ID NO: 3157634 - DNA, 25 bp, Homo sapien
gtgacttcctcttctcttaaagcat

SEQ ID NO: 3157635 - DNA, 25 bp, Homo sapien
tctcttaaagcatttgcctggtacc

SEQ ID NO: 3157636 - DNA, 25 bp, Homo sapien
cttcctcttctcttaaagcatttgc

SEQ ID NO: 3157637 - DNA, 25 bp, Homo sapien
agtctttctgctgttgccactaatg

SEQ ID NO: 3157638 - DNA, 25 bp, Homo sapien
cactgcaggccctaaagttaacttt

SEQ ID NO: 3157639 - DNA, 25 bp, Homo sapien
tcatctgagaaacgtgactccatct

SEQ ID NO: 3157640 - DNA, 25 bp, Homo sapien
gagcaccagtgcaattgccagtctt

SEQ ID NO: 3157641 - DNA, 25 bp, Homo sapien
tatactccctgaggcattagatgcc

SEQ ID NO: 3157642 - DNA, 25 bp, Homo sapien
gaaccaacatatatgacaggtctgg

SEQ ID NO: 3157643 - DNA, 25 bp, Homo sapien
gcaatccctgaatttcaacatgata

SEQ ID NO: 3157644 - DNA, 25 bp, Homo sapien
taaacttgagatgcttgaaattaaa

SEQ ID NO: 3157645 - DNA, 25 bp, Homo sapien
tcatctaccctatgacttacaataa

SEQ ID NO: 3157646 - DNA, 25 bp, Homo sapien
taaatatcatatcatctaccctatg

SEQ ID NO: 3157647 - DNA, 25 bp, Homo sapien
tttgagtccgccaggcaaggctctt

SEQ ID NO: 3157648 - DNA, 25 bp, Homo sapien
aattctgatttgagtccgccaggca

SEQ ID NO: 3157649 - DNA, 25 bp, Homo sapien
tgggtgtactgggtagcctgtggag

SEQ ID NO: 3157650 - DNA, 25 bp, Homo sapien
caagcgtgtacatgggtgtactggg

SEQ ID NO: 3157651 - DNA, 25 bp, Homo sapien
gcaagcgtgtacatgggtgtactgg

SEQ ID NO: 3157652 - DNA, 25 bp, Homo sapien
tactgggtagcctgtggagcgcagc

SEQ ID NO: 3157653 - DNA, 25 bp, Homo sapien
agcctctggcgcactctggccgcac

SEQ ID NO: 3157654 - DNA, 25 bp, Homo sapien
caggctggatataggcagtgctctg

SEQ ID NO: 3157655 - DNA, 25 bp, Homo sapien
tccatccggcagacatgcctggcgt

SEQ ID NO: 3157656 - DNA, 25 bp, Homo sapien
cctggccaggctggatataggcagt

SEQ ID NO: 3157657 - DNA, 25 bp, Homo sapien
tcaaaggacacccattagaagttgc

SEQ ID NO: 3157658 - DNA, 25 bp, Homo sapien
gctagcattacgtattttcaaagga

SEQ ID NO: 3157659 - DNA, 25 bp, Homo sapien
gaaatcagagctataaccttggaca

SEQ ID NO: 3157660 - DNA, 25 bp, Homo sapien
tagaagttgcatccaccaaccagaa

SEQ ID NO: 3157661 - DNA, 25 bp, Homo sapien
cccagaagaagaaatatggcaccaa

SEQ ID NO: 3157662 - DNA, 25 bp, Homo sapien
ggtagctatccttaaaatagaatgc

SEQ ID NO: 3157663 - DNA, 25 bp, Homo sapien
aaaggagggctgattctaatagcac

SEQ ID NO: 3157664 - DNA, 25 bp, Homo sapien
cacactctctagatatactgggcag

SEQ ID NO: 3157665 - DNA, 25 bp, Homo sapien
gcgttggtccccacaaggatggctg

SEQ ID NO: 3157666 - DNA, 25 bp, Homo sapien
tggctgaatacgagttaccttccat

SEQ ID NO: 3157667 - DNA, 25 bp, Homo sapien
taaagccatgttccttgatgatctg

SEQ ID NO: 3157668 - DNA, 25 bp, Homo sapien
ccatgttccttgatgatctgccctc

SEQ ID NO: 3157669 - DNA, 25 bp, Homo sapien
gtttaagacacttggctaaggtcat

SEQ ID NO: 3157670 - DNA, 25 bp, Homo sapien
aactggtttaagacacttggctaag

SEQ ID NO: 3157671 - DNA, 25 bp, Homo sapien
tggtttaagacacttggctaaggtc

SEQ ID NO: 3157672 - DNA, 25 bp, Homo sapien
gaaactggtttaagacacttggcta

SEQ ID NO: 3157673 - DNA, 25 bp, Homo sapien
gttaatgatataccagttttcaaag

SEQ ID NO: 3157674 - DNA, 25 bp, Homo sapien
ctgttaatgatataccagttttcaa

SEQ ID NO: 3157675 - DNA, 25 bp, Homo sapien
accagttttcaaaggttctatagct

SEQ ID NO: 3157676 - DNA, 25 bp, Homo sapien
ccagttttcaaaggttctatagctt

SEQ ID NO: 3157677 - DNA, 25 bp, Homo sapien
ttgtgtccctgctgctaattgggtg

SEQ ID NO: 3157678 - DNA, 25 bp, Homo sapien
gcagaaagaagtgggtttttgtgtc

SEQ ID NO: 3157679 - DNA, 25 bp, Homo sapien
tccctgctgctaattgggtgtgcaa

SEQ ID NO: 3157680 - DNA, 25 bp, Homo sapien
tgtgtccctgctgctaattgggtgt

SEQ ID NO: 3157681 - DNA, 25 bp, Homo sapien
ctaaagggcatactggtcaaatact

SEQ ID NO: 3157682 - DNA, 25 bp, Homo sapien
aatattaagtctttagaaagcagga

SEQ ID NO: 3157683 - DNA, 25 bp, Homo sapien
cctggaagactatcagttcaacaaa

SEQ ID NO: 3157684 - DNA, 25 bp, Homo sapien
aagcaggatatagggacaagcacta

SEQ ID NO: 3157685 - DNA, 25 bp, Homo sapien
tcggactagatgcagaaaaaattcg

SEQ ID NO: 3157686 - DNA, 25 bp, Homo sapien
taatgcccgaagtgcagtgtaaagc

SEQ ID NO: 3157687 - DNA, 25 bp, Homo sapien
catgagaagttgattgtaatgcccg

SEQ ID NO: 3157688 - DNA, 25 bp, Homo sapien
gcttcttggaatggcattcggacta

SEQ ID NO: 3157689 - DNA, 25 bp, Homo sapien
tgggaggctaggcctagcatctcct

SEQ ID NO: 3157690 - DNA, 25 bp, Homo sapien
tgggagctgattagattatgtccac

SEQ ID NO: 3157691 - DNA, 25 bp, Homo sapien
gctgggagctgattagattatgtcc

SEQ ID NO: 3157692 - DNA, 25 bp, Homo sapien
gagctgattagattatgtccaccag

SEQ ID NO: 3157693 - DNA, 25 bp, Homo sapien
gaggacgcatcaaactctccctgta

SEQ ID NO: 3157694 - DNA, 25 bp, Homo sapien
ccctgtacgcttagattaaaacgtg

SEQ ID NO: 3157695 - DNA, 25 bp, Homo sapien
catctctggccatttatgtagtggt

SEQ ID NO: 3157696 - DNA, 25 bp, Homo sapien
aaaacgtgggatatgtggaatagcc

SEQ ID NO: 3157697 - DNA, 25 bp, Homo sapien
acaaaactgctttgatacagttctt

SEQ ID NO: 3157698 - DNA, 25 bp, Homo sapien
aacaaaactgctttgatacagttct

SEQ ID NO: 3157699 - DNA, 25 bp, Homo sapien
ttgatacagttcttggatggtgggc

SEQ ID NO: 3157700 - DNA, 25 bp, Homo sapien
tgatacagttcttggatggtgggcc

SEQ ID NO: 3157701 - DNA, 25 bp, Homo sapien
ctgatacaggtaatatagcaagcat

SEQ ID NO: 3157702 - DNA, 25 bp, Homo sapien
tattagacgatcagctttagaccat

SEQ ID NO: 3157703 - DNA, 25 bp, Homo sapien
tcctggcacagatgatacgacttgc

SEQ ID NO: 3157704 - DNA, 25 bp, Homo sapien
tacgacttgcatgaactattagacg

SEQ ID NO: 3157705 - DNA, 25 bp, Homo sapien
tagaccattcactgtaccaccaggt

SEQ ID NO: 3157706 - DNA, 25 bp, Homo sapien
gcaagttctgtagaacagccagata

SEQ ID NO: 3157707 - DNA, 25 bp, Homo sapien
ttacaattcagggcaagttctgtag

SEQ ID NO: 3157708 - DNA, 25 bp, Homo sapien
gtagaacagccagataacaggaacg

SEQ ID NO: 3157709 - DNA, 25 bp, Homo sapien
cagccagataacaggaacgattgta

SEQ ID NO: 3157710 - DNA, 25 bp, Homo sapien
ttttcagtgtagcagcataatgtct

SEQ ID NO: 3157711 - DNA, 25 bp, Homo sapien
tagcagcataatgtctgaacttgca

SEQ ID NO: 3157712 - DNA, 25 bp, Homo sapien
tagacatcactcacggttttcagtg

SEQ ID NO: 3157713 - DNA, 25 bp, Homo sapien
actcacggttttcagtgtagcagca

SEQ ID NO: 3157714 - DNA, 25 bp, Homo sapien
ggcaaaacgggatcttcagaccatc

SEQ ID NO: 3157715 - DNA, 25 bp, Homo sapien
ttgccctccttggatgcaccaaaga

SEQ ID NO: 3157716 - DNA, 25 bp, Homo sapien
cagagagggatatttggcaaaacgg

SEQ ID NO: 3157717 - DNA, 25 bp, Homo sapien
gatgcaccaaagaagacatcaccta

SEQ ID NO: 3157718 - DNA, 25 bp, Homo sapien
ttctggtgttctggaattggacagg

SEQ ID NO: 3157719 - DNA, 25 bp, Homo sapien
ttagataacttgtaggataaacttg

SEQ ID NO: 3157720 - DNA, 25 bp, Homo sapien
gataaacttgtcataattctggtgt

SEQ ID NO: 3157721 - DNA, 25 bp, Homo sapien
gttctggaattggacaggagaatac

SEQ ID NO: 3157722 - DNA, 25 bp, Homo sapien
tctatcacaaaagcatcagtcatgg

SEQ ID NO: 3157723 - DNA, 25 bp, Homo sapien
tcacagttgctgaacgcaaagccct

SEQ ID NO: 3157724 - DNA, 25 bp, Homo sapien
tatcttgagcatccactcctgagcc

SEQ ID NO: 3157725 - DNA, 25 bp, Homo sapien
tatttcctgatgcaaagaggccatg

SEQ ID NO: 3157726 - DNA, 25 bp, Homo sapien
cacggagtgagtggttctgtcctgc

SEQ ID NO: 3157727 - DNA, 25 bp, Homo sapien
aagaacgcagtatccggaccagggt

SEQ ID NO: 3157728 - DNA, 25 bp, Homo sapien
gaggcaatgccccaaactacttcag

SEQ ID NO: 3157729 - DNA, 25 bp, Homo sapien
cagggtgcacggtggagtcactaat

SEQ ID NO: 3157730 - DNA, 25 bp, Homo sapien
cccattgctgtgcatcaagaagtag

SEQ ID NO: 3157731 - DNA, 25 bp, Homo sapien
tagtgtttaaggtcagatatatgtt

SEQ ID NO: 3157732 - DNA, 25 bp, Homo sapien
agacgtgcatgttcaggttcctccc

SEQ ID NO: 3157733 - DNA, 25 bp, Homo sapien
ttgatgagtatgttgaggaagatcc

SEQ ID NO: 3157734 - DNA, 25 bp, Homo sapien
tggtcagaatccttcctaatgagca

SEQ ID NO: 3157735 - DNA, 25 bp, Homo sapien
tctccggggtccgtagataaagtga

SEQ ID NO: 3157736 - DNA, 25 bp, Homo sapien
taaagtgaacgtaattgtcagaatc

SEQ ID NO: 3157737 - DNA, 25 bp, Homo sapien
ctaatgagcacagctcttctccggg

SEQ ID NO: 3157738 - DNA, 25 bp, Homo sapien
gacgccaaattctacaatgtccctg

SEQ ID NO: 3157739 - DNA, 25 bp, Homo sapien
agggcaatctaagacgccaaattct

SEQ ID NO: 3157740 - DNA, 25 bp, Homo sapien
gccaaattctacaatgtccctgatc

SEQ ID NO: 3157741 - DNA, 25 bp, Homo sapien
ttggcaatggtaagggcaatctaag

SEQ ID NO: 3157742 - DNA, 25 bp, Homo sapien
ggttgtcatgactacggttcttcag

SEQ ID NO: 3157743 - DNA, 25 bp, Homo sapien
actttacgcaggtcttggatacagc

SEQ ID NO: 3157744 - DNA, 25 bp, Homo sapien
gctctgggctcaatgtagtcttgaa

SEQ ID NO: 3157745 - DNA, 25 bp, Homo sapien
ccaggagctgccgaaggttgtcatg

SEQ ID NO: 3157746 - DNA, 25 bp, Homo sapien
gatatggtaatcttagagttgcgtg

SEQ ID NO: 3157747 - DNA, 25 bp, Homo sapien
tgacaaggaaaagatatggtaatct

SEQ ID NO: 3157748 - DNA, 25 bp, Homo sapien
agagttgcgtgtttgaaaatgttca

SEQ ID NO: 3157749 - DNA, 25 bp, Homo sapien
cttggcgcatcgacatgacaaggaa

SEQ ID NO: 3157750 - DNA, 25 bp, Homo sapien
tgtgtatactccaaacccgttcttg

SEQ ID NO: 3157751 - DNA, 25 bp, Homo sapien
gcacgcacttgaaacaaggtggtaa

SEQ ID NO: 3157752 - DNA, 25 bp, Homo sapien
gattgcctgatgtgaacttccctgg

SEQ ID NO: 3157753 - DNA, 25 bp, Homo sapien
tcttggctccacgacttgagtggga

SEQ ID NO: 3157754 - DNA, 25 bp, Homo sapien
tgttaatccagcagacgaactttcc

SEQ ID NO: 3157755 - DNA, 25 bp, Homo sapien
ccagcaggtgtgattttgttaatcc

SEQ ID NO: 3157756 - DNA, 25 bp, Homo sapien
cagcagacgaactttccaaaaaata

SEQ ID NO: 3157757 - DNA, 25 bp, Homo sapien
tgtgattttgttaatccagcagacg

SEQ ID NO: 3157758 - DNA, 25 bp, Homo sapien
tcccttgcttgacagctgggtgaca

SEQ ID NO: 3157759 - DNA, 25 bp, Homo sapien
ctgggtgacagcttaaggtggtccc

SEQ ID NO: 3157760 - DNA, 25 bp, Homo sapien
tttgtcccttgcttgacagctgggt

SEQ ID NO: 3157761 - DNA, 25 bp, Homo sapien
tgggtgacagcttaaggtggtccct

SEQ ID NO: 3157762 - DNA, 25 bp, Homo sapien
agtaagagaagccttgaattcagtt

SEQ ID NO: 3157763 - DNA, 25 bp, Homo sapien
caatatttgagggtaggaagcatcc

SEQ ID NO: 3157764 - DNA, 25 bp, Homo sapien
atatttgagggtaggaagcatccag

SEQ ID NO: 3157765 - DNA, 25 bp, Homo sapien
aatatttgagggtaggaagcatcca

SEQ ID NO: 3157766 - DNA, 25 bp, Homo sapien
cttctgcctgacatgttttgcctcc

SEQ ID NO: 3157767 - DNA, 25 bp, Homo sapien
tttgcttctgcctgacatgttttgc

SEQ ID NO: 3157768 - DNA, 25 bp, Homo sapien
tgcttgacatgataagcttgcccct

SEQ ID NO: 3157769 - DNA, 25 bp, Homo sapien
catcaaatgaccctctggcttttgg

SEQ ID NO: 3157770 - DNA, 25 bp, Homo sapien
gatgtctagattctggcaaaataac

SEQ ID NO: 3157771 - DNA, 25 bp, Homo sapien
tatctatactgctcttgatgtctag

SEQ ID NO: 3157772 - DNA, 25 bp, Homo sapien
tgacattagccttcatgcaaactcc

SEQ ID NO: 3157773 - DNA, 25 bp, Homo sapien
ttagccttcatgcaaactccttcac

SEQ ID NO: 3157774 - DNA, 25 bp, Homo sapien
gaagattgacattagccttcatgca

SEQ ID NO: 3157775 - DNA, 25 bp, Homo sapien
ggttgtagaagattgacattagcct

SEQ ID NO: 3157776 - DNA, 25 bp, Homo sapien
tcctggtagcgctttcagaaactga

SEQ ID NO: 3157777 - DNA, 25 bp, Homo sapien
gggtgttaagcaactgcaagcagct

SEQ ID NO: 3157778 - DNA, 25 bp, Homo sapien
tcaaggattgttccctccaagggtg

SEQ ID NO: 3157779 - DNA, 25 bp, Homo sapien
tccataaccaacaagaagaggccct

SEQ ID NO: 3157780 - DNA, 25 bp, Homo sapien
gtcctactttgaacgcatgaatttc

SEQ ID NO: 3157781 - DNA, 25 bp, Homo sapien
tactttgaacgcatgaatttcatta

SEQ ID NO: 3157782 - DNA, 25 bp, Homo sapien
tagaaactgtcctactttgaacgca

SEQ ID NO: 3157783 - DNA, 25 bp, Homo sapien
aactgtcctactttgaacgcatgaa

SEQ ID NO: 3157784 - DNA, 25 bp, Homo sapien
gcaaaacattcatatccctggcttc

SEQ ID NO: 3157785 - DNA, 25 bp, Homo sapien
tcatgatgtcatgtggatgtaagct

SEQ ID NO: 3157786 - DNA, 25 bp, Homo sapien
cactgaaaaagccagatgtgctatc

SEQ ID NO: 3157787 - DNA, 25 bp, Homo sapien
tacctcttgcctaaactgtgctgga

SEQ ID NO: 3157788 - DNA, 25 bp, Homo sapien
aatctggagtggttaactgccccat

SEQ ID NO: 3157789 - DNA, 25 bp, Homo sapien
gacaaacttgtaatctggagtggtt

SEQ ID NO: 3157790 - DNA, 25 bp, Homo sapien
tctaagacaaacttgtaatctggag

SEQ ID NO: 3157791 - DNA, 25 bp, Homo sapien
cttgtaatctggagtggttaactgc

SEQ ID NO: 3157792 - DNA, 25 bp, Homo sapien
gatagcttccccgtctttcaatttc

SEQ ID NO: 3157793 - DNA, 25 bp, Homo sapien
tatccagttagtttcgggcccagga

SEQ ID NO: 3157794 - DNA, 25 bp, Homo sapien
tttcactgatagcttccccgtcttt

SEQ ID NO: 3157795 - DNA, 25 bp, Homo sapien
attttgcttgcatccatatatccag

SEQ ID NO: 3157796 - DNA, 25 bp, Homo sapien
taaacacatggctagcaaaaaaggt

SEQ ID NO: 3157797 - DNA, 25 bp, Homo sapien
ggtgttcgctctgaatatagctatg

SEQ ID NO: 3157798 - DNA, 25 bp, Homo sapien
tgcatccacctttgaagtacagagc

SEQ ID NO: 3157799 - DNA, 25 bp, Homo sapien
gaggtacacagttcatctcattgga

SEQ ID NO: 3157800 - DNA, 25 bp, Homo sapien
tcttttatgatggtgcttggagaat

SEQ ID NO: 3157801 - DNA, 25 bp, Homo sapien
cagtgatattcccttatcacttgtt

SEQ ID NO: 3157802 - DNA, 25 bp, Homo sapien
tattcccttatcacttgttccatct

SEQ ID NO: 3157803 - DNA, 25 bp, Homo sapien
tcccttatcacttgttccatcttgt

SEQ ID NO: 3157804 - DNA, 25 bp, Homo sapien
gttccatcttgttctgtcttgtaca

SEQ ID NO: 3157805 - DNA, 25 bp, Homo sapien
tcaattaggatgaaagcggacccct

SEQ ID NO: 3157806 - DNA, 25 bp, Homo sapien
tcaaaggctggcgatgtgtagccct

SEQ ID NO: 3157807 - DNA, 25 bp, Homo sapien
taatcagtggtaccagggttggcaa

SEQ ID NO: 3157808 - DNA, 25 bp, Homo sapien
caagcaaggcttcagcgaatagctc

SEQ ID NO: 3157809 - DNA, 25 bp, Homo sapien
gaagggagctacttcagttagatgg

SEQ ID NO: 3157810 - DNA, 25 bp, Homo sapien
ggaaagaagggagctacttcagtta

SEQ ID NO: 3157811 - DNA, 25 bp, Homo sapien
aaagaagggagctacttcagttaga

SEQ ID NO: 3157812 - DNA, 25 bp, Homo sapien
cttcagttagatggaaactattcat

SEQ ID NO: 3157813 - DNA, 25 bp, Homo sapien
cagtctctgcttggatgttgctttc

SEQ ID NO: 3157814 - DNA, 25 bp, Homo sapien
agtctctgcttggatgttgctttct

SEQ ID NO: 3157815 - DNA, 25 bp, Homo sapien
tcttgggagccgtggatagctcctt

SEQ ID NO: 3157816 - DNA, 25 bp, Homo sapien
ggatagctccttcatacctgaccat

SEQ ID NO: 3157817 - DNA, 25 bp, Homo sapien
ggagccgtggatagctccttcatac

SEQ ID NO: 3157818 - DNA, 25 bp, Homo sapien
ttggtcttgggagccgtggatagct

SEQ ID NO: 3157819 - DNA, 25 bp, Homo sapien
caacctgtggtaagacgtttcaacg

SEQ ID NO: 3157820 - DNA, 25 bp, Homo sapien
tcaggattgagggaataaatacgcc

SEQ ID NO: 3157821 - DNA, 25 bp, Homo sapien
taaatacgccaaacacatgtccctg

SEQ ID NO: 3157822 - DNA, 25 bp, Homo sapien
cgtttcaacgaaagagctgctttcc

SEQ ID NO: 3157823 - DNA, 25 bp, Homo sapien
ttctctttcctatcctcacgtcaaa

SEQ ID NO: 3157824 - DNA, 25 bp, Homo sapien
tagtcaacctccaggattgaccctc

SEQ ID NO: 3157825 - DNA, 25 bp, Homo sapien
tcatattactataagttctgttgct

SEQ ID NO: 3157826 - DNA, 25 bp, Homo sapien
ttttgtctgtaattcctacaattca

SEQ ID NO: 3157827 - DNA, 25 bp, Homo sapien
acctgcaagctgaggagaaaggaag

SEQ ID NO: 3157828 - DNA, 25 bp, Homo sapien
ctcacacaatcacaaggtcaggtcc

SEQ ID NO: 3157829 - DNA, 25 bp, Homo sapien
ttgactcacacaatcacaaggtcag

SEQ ID NO: 3157830 - DNA, 25 bp, Homo sapien
cacaatcacaaggtcaggtcccaca

SEQ ID NO: 3157831 - DNA, 25 bp, Homo sapien
cagaaaacgctggataaattcaact

SEQ ID NO: 3157832 - DNA, 25 bp, Homo sapien
tcagaaaacgctggataaattcaac

SEQ ID NO: 3157833 - DNA, 25 bp, Homo sapien
agaaaacgctggataaattcaactt

SEQ ID NO: 3157834 - DNA, 25 bp, Homo sapien
tagctgtggtacagactgtgaacca

SEQ ID NO: 3157835 - DNA, 25 bp, Homo sapien
agctgtggtacagactgtgaaccac

SEQ ID NO: 3157836 - DNA, 25 bp, Homo sapien
aatgtgacccggtgacttcaaatgc

SEQ ID NO: 3157837 - DNA, 25 bp, Homo sapien
caaaatataatgtgacccggtgact

SEQ ID NO: 3157838 - DNA, 25 bp, Homo sapien
tgcccaaaatataatgtgacccggt

SEQ ID NO: 3157839 - DNA, 25 bp, Homo sapien
atgtgcccaaaatataatgtgaccc

SEQ ID NO: 3157840 - DNA, 25 bp, Homo sapien
cactgcaaagttgtgtactacttgc

SEQ ID NO: 3157841 - DNA, 25 bp, Homo sapien
tactacttgcttaaggtatacctta

SEQ ID NO: 3157842 - DNA, 25 bp, Homo sapien
ggtataccttagaagctaggctcaa

SEQ ID NO: 3157843 - DNA, 25 bp, Homo sapien
tcctgaagaattgtgtaagaacact

SEQ ID NO: 3157844 - DNA, 25 bp, Homo sapien
gaaaaatgcaggagaaaatacttcc

SEQ ID NO: 3157845 - DNA, 25 bp, Homo sapien
tttctgaaaaatgcaggagaaaata

SEQ ID NO: 3157846 - DNA, 25 bp, Homo sapien
tctgaaaaatgcaggagaaaatact

SEQ ID NO: 3157847 - DNA, 25 bp, Homo sapien
acttttctgaaaaatgcaggagaaa

SEQ ID NO: 3157848 - DNA, 25 bp, Homo sapien
taatgttgatagagtgggttctcag

SEQ ID NO: 3157849 - DNA, 25 bp, Homo sapien
caggaactgccgctgtttaatgttg

SEQ ID NO: 3157850 - DNA, 25 bp, Homo sapien
taaaaacttacaggaactgccgctg

SEQ ID NO: 3157851 - DNA, 25 bp, Homo sapien
aatttaggtgaaactgtatgaagac

SEQ ID NO: 3157852 - DNA, 25 bp, Homo sapien
gaaggtcctaaagcaacagcaccaa

SEQ ID NO: 3157853 - DNA, 25 bp, Homo sapien
tggaggtatagctacagtgcagacc

SEQ ID NO: 3157854 - DNA, 25 bp, Homo sapien
tgaagtctcatgacctgctgtctcc

SEQ ID NO: 3157855 - DNA, 25 bp, Homo sapien
ggtgttttaatcagcgttctccaga

SEQ ID NO: 3157856 - DNA, 25 bp, Homo sapien
caataatgttgccacatctgctcat

SEQ ID NO: 3157857 - DNA, 25 bp, Homo sapien
ttcaaagtattaatacgtcagagga

SEQ ID NO: 3157858 - DNA, 25 bp, Homo sapien
catctgctcatgtaatatctctcta

SEQ ID NO: 3157859 - DNA, 25 bp, Homo sapien
tattacacttgtcataatcacttat

SEQ ID NO: 3157860 - DNA, 25 bp, Homo sapien
ttgctcaatacaactctctgctctg

SEQ ID NO: 3157861 - DNA, 25 bp, Homo sapien
cccctctctgcagaaaactgttcca

SEQ ID NO: 3157862 - DNA, 25 bp, Homo sapien
ctcctccatttggagccaataaaag

SEQ ID NO: 3157863 - DNA, 25 bp, Homo sapien
tcatactcacaaaacaattatcact

SEQ ID NO: 3157864 - DNA, 25 bp, Homo sapien
tcaaataaatccgtggaccagactg

SEQ ID NO: 3157865 - DNA, 25 bp, Homo sapien
gcagcctagcattggtgacaatcaa

SEQ ID NO: 3157866 - DNA, 25 bp, Homo sapien
gaaaaatagccaacctgatacagca

SEQ ID NO: 3157867 - DNA, 25 bp, Homo sapien
gtttaaaccctgacaagcaagctac

SEQ ID NO: 3157868 - DNA, 25 bp, Homo sapien
atctgtatggttgtattgtcaatca

SEQ ID NO: 3157869 - DNA, 25 bp, Homo sapien
gatctgtatggttgtattgtcaatc

SEQ ID NO: 3157870 - DNA, 25 bp, Homo sapien
tctgtatggttgtattgtcaatcat

SEQ ID NO: 3157871 - DNA, 25 bp, Homo sapien
atggtgaatactgacggcaaggagg

SEQ ID NO: 3157872 - DNA, 25 bp, Homo sapien
ttacactataattactacttcccat

SEQ ID NO: 3157873 - DNA, 25 bp, Homo sapien
gtacctatcaagcttttacatgttt

SEQ ID NO: 3157874 - DNA, 25 bp, Homo sapien
tatgctgtataccaaatattgtacc

SEQ ID NO: 3157875 - DNA, 25 bp, Homo sapien
caaattccgccatttaaatagagtc

SEQ ID NO: 3157876 - DNA, 25 bp, Homo sapien
agaataatagttgtaccaggcatgc

SEQ ID NO: 3157877 - DNA, 25 bp, Homo sapien
aagaataatagttgtaccaggcatg

SEQ ID NO: 3157878 - DNA, 25 bp, Homo sapien
agaggttggcgctgagttactttgc

SEQ ID NO: 3157879 - DNA, 25 bp, Homo sapien
cacagggcactattgaacctttcag

SEQ ID NO: 3157880 - DNA, 25 bp, Homo sapien
gcagttcagaggatacacagggcac

SEQ ID NO: 3157881 - DNA, 25 bp, Homo sapien
tttgccaattaacacctgggcctgc

SEQ ID NO: 3157882 - DNA, 25 bp, Homo sapien
tgattttaattctcatcattcctca

SEQ ID NO: 3157883 - DNA, 25 bp, Homo sapien
ttaattctcatcattcctcagtcct

SEQ ID NO: 3157884 - DNA, 25 bp, Homo sapien
gattttaattctcatcattcctcag

SEQ ID NO: 3157885 - DNA, 25 bp, Homo sapien
ccatgattttaattctcatcattcc

SEQ ID NO: 3157886 - DNA, 25 bp, Homo sapien
gcactgactgcacttaagtgtcaga

SEQ ID NO: 3157887 - DNA, 25 bp, Homo sapien
cccctgcttgagtgctggacaccag

SEQ ID NO: 3157888 - DNA, 25 bp, Homo sapien
aaggcactccttgcgtgcagccctg

SEQ ID NO: 3157889 - DNA, 25 bp, Homo sapien
tggacaccagtgtctgcaaggcact

SEQ ID NO: 3157890 - DNA, 25 bp, Homo sapien
ataaccacaaattcaataacaccca

SEQ ID NO: 3157891 - DNA, 25 bp, Homo sapien
ccagagaggatgaaaaataaccaca

SEQ ID NO: 3157892 - DNA, 25 bp, Homo sapien
taaccacaaattcaataacacccat

SEQ ID NO: 3157893 - DNA, 25 bp, Homo sapien
cctccagagaggatgaaaaataacc

SEQ ID NO: 3157894 - DNA, 25 bp, Homo sapien
gcacctagaagagttgccctacctc

SEQ ID NO: 3157895 - DNA, 25 bp, Homo sapien
tcatggcacctagaagagttgccct

SEQ ID NO: 3157896 - DNA, 25 bp, Homo sapien
catggcacctagaagagttgcccta

SEQ ID NO: 3157897 - DNA, 25 bp, Homo sapien
tggcacctagaagagttgccctacc

SEQ ID NO: 3157898 - DNA, 25 bp, Homo sapien
gaagttcccaagtacatagtgccta

SEQ ID NO: 3157899 - DNA, 25 bp, Homo sapien
aaaatgatttgactattcagatccc

SEQ ID NO: 3157900 - DNA, 25 bp, Homo sapien
ggaatatccaagaatcacttgctca

SEQ ID NO: 3157901 - DNA, 25 bp, Homo sapien
tacatgcagataaagcactcgaaaa

SEQ ID NO: 3157902 - DNA, 25 bp, Homo sapien
caaaaggctagctaatctgggaatt

SEQ ID NO: 3157903 - DNA, 25 bp, Homo sapien
tgagatgtcttcctacttgccagct

SEQ ID NO: 3157904 - DNA, 25 bp, Homo sapien
aatttgaggtgttatgctgaagccc

SEQ ID NO: 3157905 - DNA, 25 bp, Homo sapien
tgggcttcagtgacacaattgacaa

SEQ ID NO: 3157906 - DNA, 25 bp, Homo sapien
tactgatgtatttggtcttctgaat

SEQ ID NO: 3157907 - DNA, 25 bp, Homo sapien
actgatgtatttggtcttctgaata

SEQ ID NO: 3157908 - DNA, 25 bp, Homo sapien
gaatacttgctattcctatgaccat

SEQ ID NO: 3157909 - DNA, 25 bp, Homo sapien
tgaatacttgctattcctatgacca

SEQ ID NO: 3157910 - DNA, 25 bp, Homo sapien
agagaatcccacatgaatgttgtgg

SEQ ID NO: 3157911 - DNA, 25 bp, Homo sapien
gagagaatcccacatgaatgttgtg

SEQ ID NO: 3157912 - DNA, 25 bp, Homo sapien
taaggcaaggtcattgtcttcagct

SEQ ID NO: 3157913 - DNA, 25 bp, Homo sapien
catttttgccgtcagtgaattgccg

SEQ ID NO: 3157914 - DNA, 25 bp, Homo sapien
ccccagtctgctgaagaagaatggt

SEQ ID NO: 3157915 - DNA, 25 bp, Homo sapien
gccgtcagtgaattgccggaataca

SEQ ID NO: 3157916 - DNA, 25 bp, Homo sapien
ttcagggtgaacttccctaaacgca

SEQ ID NO: 3157917 - DNA, 25 bp, Homo sapien
tgaacttccctaaacgcaagtacaa

SEQ ID NO: 3157918 - DNA, 25 bp, Homo sapien
ttaaagacacagtgaagatatttct

SEQ ID NO: 3157919 - DNA, 25 bp, Homo sapien
tcattaaagacacagtgaagatatt

SEQ ID NO: 3157920 - DNA, 25 bp, Homo sapien
ttagatcaagttattttgagaaaat

SEQ ID NO: 3157921 - DNA, 25 bp, Homo sapien
tcaatctgtcattcttgtttgataa

SEQ ID NO: 3157922 - DNA, 25 bp, Homo sapien
gtcaatctgtcattcttgtttgata

SEQ ID NO: 3157923 - DNA, 25 bp, Homo sapien
tactggaatgtcatctctaatgtaa

SEQ ID NO: 3157924 - DNA, 25 bp, Homo sapien
gaatgtcatctctaatgtaacaaag

SEQ ID NO: 3157925 - DNA, 25 bp, Homo sapien
ctggaatgtcatctctaatgtaaca

SEQ ID NO: 3157926 - DNA, 25 bp, Homo sapien
tttactggaatgtcatctctaatgt

SEQ ID NO: 3157927 - DNA, 25 bp, Homo sapien
cagctaaatgcagaatggtgacttt

SEQ ID NO: 3157928 - DNA, 25 bp, Homo sapien
ctaaatgcagaatggtgactttttt

SEQ ID NO: 3157929 - DNA, 25 bp, Homo sapien
gctaaatgcagaatggtgacttttt

SEQ ID NO: 3157930 - DNA, 25 bp, Homo sapien
tacagctaaatgcagaatggtgact

SEQ ID NO: 3157931 - DNA, 25 bp, Homo sapien
cataattaaatgctggaagagatac

SEQ ID NO: 3157932 - DNA, 25 bp, Homo sapien
gagatacagaaacaatgactagtgt

SEQ ID NO: 3157933 - DNA, 25 bp, Homo sapien
gggtagatcacttgatctcaggaaa

SEQ ID NO: 3157934 - DNA, 25 bp, Homo sapien
tagattcagccctggatttcaaggc

SEQ ID NO: 3157935 - DNA, 25 bp, Homo sapien
tccttgatgaatttctatgactcct

SEQ ID NO: 3157936 - DNA, 25 bp, Homo sapien
tctatgactcctctttcaagtactc

SEQ ID NO: 3157937 - DNA, 25 bp, Homo sapien
gaatttctatgactcctctttcaag

SEQ ID NO: 3157938 - DNA, 25 bp, Homo sapien
ctcctctttcaagtactccataaat

SEQ ID NO: 3157939 - DNA, 25 bp, Homo sapien
tcattggtggaagatcttcaggtcc

SEQ ID NO: 3157940 - DNA, 25 bp, Homo sapien
gatttcattggtggaagatcttcag

SEQ ID NO: 3157941 - DNA, 25 bp, Homo sapien
tcaagaggatttcattggtggaaga

SEQ ID NO: 3157942 - DNA, 25 bp, Homo sapien
ggaagatcttcaggtcctgataaac

SEQ ID NO: 3157943 - DNA, 25 bp, Homo sapien
ttggtttaagatctgcgagacactc

SEQ ID NO: 3157944 - DNA, 25 bp, Homo sapien
tctgcgagacactcatatctttcct

SEQ ID NO: 3157945 - DNA, 25 bp, Homo sapien
taagatctgcgagacactcatatct

SEQ ID NO: 3157946 - DNA, 25 bp, Homo sapien
ctttccttggtgagttctgggtatg

SEQ ID NO: 3157947 - DNA, 25 bp, Homo sapien
attagcatggacagcttgtgttgga

SEQ ID NO: 3157948 - DNA, 25 bp, Homo sapien
aaattagcatggacagcttgtgttg

SEQ ID NO: 3157949 - DNA, 25 bp, Homo sapien
ttgtgttggagccagggcctgataa

SEQ ID NO: 3157950 - DNA, 25 bp, Homo sapien
cagcttgtgttggagccagggcctg

SEQ ID NO: 3157951 - DNA, 25 bp, Homo sapien
tgatataaattccaacctttggccc

SEQ ID NO: 3157952 - DNA, 25 bp, Homo sapien
gatataaattccaacctttggccca

SEQ ID NO: 3157953 - DNA, 25 bp, Homo sapien
ttggcattcctgtttggtgaatgcc

SEQ ID NO: 3157954 - DNA, 25 bp, Homo sapien
tgcagctcttgccagaaacatttgg

SEQ ID NO: 3157955 - DNA, 25 bp, Homo sapien
ctcttgccagaaacatttggcattc

SEQ ID NO: 3157956 - DNA, 25 bp, Homo sapien
cagctcttgccagaaacatttggca

SEQ ID NO: 3157957 - DNA, 25 bp, Homo sapien
atatcacctaaatgtggggtatctc

SEQ ID NO: 3157958 - DNA, 25 bp, Homo sapien
aaatatcacctaaatgtggggtatc

SEQ ID NO: 3157959 - DNA, 25 bp, Homo sapien
aatatcacctaaatgtggggtatct

SEQ ID NO: 3157960 - DNA, 25 bp, Homo sapien
taccaatgtttgtaaagatcagctc

SEQ ID NO: 3157961 - DNA, 25 bp, Homo sapien
ggtgatcacaaccatgcatgttcaa

SEQ ID NO: 3157962 - DNA, 25 bp, Homo sapien
taaaatgactacaattcgggctacc

SEQ ID NO: 3157963 - DNA, 25 bp, Homo sapien
tcgggctaccacctgaataagttta

SEQ ID NO: 3157964 - DNA, 25 bp, Homo sapien
cttgttgtcatagttgttgtagtgg

SEQ ID NO: 3157965 - DNA, 25 bp, Homo sapien
tgtagtggttttctgaaattcgaac

SEQ ID NO: 3157966 - DNA, 25 bp, Homo sapien
tctgaaattcgaacatgggtctgta

SEQ ID NO: 3157967 - DNA, 25 bp, Homo sapien
tggttgggagtcttgttgtcatagt

SEQ ID NO: 3157968 - DNA, 25 bp, Homo sapien
ataatgccaatgagcttatcatcca

SEQ ID NO: 3157969 - DNA, 25 bp, Homo sapien
caatgagcttatcatccatcttaat

SEQ ID NO: 3157970 - DNA, 25 bp, Homo sapien
gccaatgagcttatcatccatctta

SEQ ID NO: 3157971 - DNA, 25 bp, Homo sapien
aatgccaatgagcttatcatccatc

SEQ ID NO: 3157972 - DNA, 25 bp, Homo sapien
gctgactgagacctctttcagaaga

SEQ ID NO: 3157973 - DNA, 25 bp, Homo sapien
ttcagaagaaccttatgatgtccag

SEQ ID NO: 3157974 - DNA, 25 bp, Homo sapien
cttatgatgtccagttctcaactcc

SEQ ID NO: 3157975 - DNA, 25 bp, Homo sapien
ccacagtcattaatagatcaatgct

SEQ ID NO: 3157976 - DNA, 25 bp, Homo sapien
ctagtcaaatgaagtggtgagagtg

SEQ ID NO: 3157977 - DNA, 25 bp, Homo sapien
gtcaaatgaagtggtgagagtgaag

SEQ ID NO: 3157978 - DNA, 25 bp, Homo sapien
gactagtcaaatgaagtggtgagag

SEQ ID NO: 3157979 - DNA, 25 bp, Homo sapien
caaatgaagtggtgagagtgaagaa

SEQ ID NO: 3157980 - DNA, 25 bp, Homo sapien
tggttcgcaaagttacatgtcatct

SEQ ID NO: 3157981 - DNA, 25 bp, Homo sapien
catggtccatactaatcttctttgt

SEQ ID NO: 3157982 - DNA, 25 bp, Homo sapien
aatatggaatggttcgcaaagttac

SEQ ID NO: 3157983 - DNA, 25 bp, Homo sapien
tgttcatggtccatactaatcttct

SEQ ID NO: 3157984 - DNA, 25 bp, Homo sapien
tctgtgcttatcagaccaactatga

SEQ ID NO: 3157985 - DNA, 25 bp, Homo sapien
gccttctgtgcttatcagaccaact

SEQ ID NO: 3157986 - DNA, 25 bp, Homo sapien
cagaccaactatgaatgattcagag

SEQ ID NO: 3157987 - DNA, 25 bp, Homo sapien
gcttatcagaccaactatgaatgat

SEQ ID NO: 3157988 - DNA, 25 bp, Homo sapien
gctggccttctagagacttatctat

SEQ ID NO: 3157989 - DNA, 25 bp, Homo sapien
tgattatgggaaggtaaagccggta

SEQ ID NO: 3157990 - DNA, 25 bp, Homo sapien
agcgtgctggccttctagagactta

SEQ ID NO: 3157991 - DNA, 25 bp, Homo sapien
tcctggtcctcaaatccacgatttc

SEQ ID NO: 3157992 - DNA, 25 bp, Homo sapien
tcttaacggactgtgaatgtcttgc

SEQ ID NO: 3157993 - DNA, 25 bp, Homo sapien
taacggactgtgaatgtcttgcttg

SEQ ID NO: 3157994 - DNA, 25 bp, Homo sapien
gaagactcttaacggactgtgaatg

SEQ ID NO: 3157995 - DNA, 25 bp, Homo sapien
ttgtcccagaagactcttaacggac

SEQ ID NO: 3157996 - DNA, 25 bp, Homo sapien
cttgacagatattcttgcgtgctct

SEQ ID NO: 3157997 - DNA, 25 bp, Homo sapien
gacagatattcttgcgtgctctatt

SEQ ID NO: 3157998 - DNA, 25 bp, Homo sapien
tattcttgcgtgctctatttatttc

SEQ ID NO: 3157999 - DNA, 25 bp, Homo sapien
gatattcttgcgtgctctatttatt

SEQ ID NO: 3158000 - DNA, 25 bp, Homo sapien
tgttgattcatcatccttgctctct

SEQ ID NO: 3158001 - DNA, 25 bp, Homo sapien
ttaggcaaacttcaagacttgttga

SEQ ID NO: 3158002 - DNA, 25 bp, Homo sapien
ttgttgattcatcatccttgctctc

SEQ ID NO: 3158003 - DNA, 25 bp, Homo sapien
tgagtgcacagagtgacagcaccca

SEQ ID NO: 3158004 - DNA, 25 bp, Homo sapien
cagagacttcagagggcaattccca

SEQ ID NO: 3158005 - DNA, 25 bp, Homo sapien
tctgggagaccatgaatgaggtgct

SEQ ID NO: 3158006 - DNA, 25 bp, Homo sapien
aaaggaggccactctgtgtacttgc

SEQ ID NO: 3158007 - DNA, 25 bp, Homo sapien
ctttcatagctctgctctggaataa

SEQ ID NO: 3158008 - DNA, 25 bp, Homo sapien
ctctgctctggaataaggtctactt

SEQ ID NO: 3158009 - DNA, 25 bp, Homo sapien
aataaggtctactttaacaatgatc

SEQ ID NO: 3158010 - DNA, 25 bp, Homo sapien
tactttaacaatgatcaagactggg

SEQ ID NO: 3158011 - DNA, 25 bp, Homo sapien
tatttgtcatttgtagagaccatca

SEQ ID NO: 3158012 - DNA, 25 bp, Homo sapien
atttgtcatttgtagagaccatcat

SEQ ID NO: 3158013 - DNA, 25 bp, Homo sapien
ggcaggccagaaaggctttaatgaa

SEQ ID NO: 3158014 - DNA, 25 bp, Homo sapien
aagcctgaagcccacgttatggtag

SEQ ID NO: 3158015 - DNA, 25 bp, Homo sapien
gaaggggtagtatctcctaccagtg

SEQ ID NO: 3158016 - DNA, 25 bp, Homo sapien
ccacgttatggtaggactcctcata

SEQ ID NO: 3158017 - DNA, 25 bp, Homo sapien
gctcttgatactgatgttggccaac

SEQ ID NO: 3158018 - DNA, 25 bp, Homo sapien
cgtgcttaatggcaaaattagtttt

SEQ ID NO: 3158019 - DNA, 25 bp, Homo sapien
gttcgtgcttaatggcaaaattagt

SEQ ID NO: 3158020 - DNA, 25 bp, Homo sapien
ttcgtgcttaatggcaaaattagtt

SEQ ID NO: 3158021 - DNA, 25 bp, Homo sapien
tgcttaatggcaaaattagttttat

SEQ ID NO: 3158022 - DNA, 25 bp, Homo sapien
cttcttcaacattctgacaattccc

SEQ ID NO: 3158023 - DNA, 25 bp, Homo sapien
caaatttcatggaaagctcttcgat

SEQ ID NO: 3158024 - DNA, 25 bp, Homo sapien
gctcttcgataatccagttcatccg

SEQ ID NO: 3158025 - DNA, 25 bp, Homo sapien
tgtccagtgacaactcttcaacagg

SEQ ID NO: 3158026 - DNA, 25 bp, Homo sapien
tgtttcattctatagattctacacc

SEQ ID NO: 3158027 - DNA, 25 bp, Homo sapien
gattctacaccttaacatggagagg

SEQ ID NO: 3158028 - DNA, 25 bp, Homo sapien
taggcataagtcacggcgcttggtc

SEQ ID NO: 3158029 - DNA, 25 bp, Homo sapien
catggagaggtcgttttatgatata

SEQ ID NO: 3158030 - DNA, 25 bp, Homo sapien
cttggaaagtaattgcactcttcca

SEQ ID NO: 3158031 - DNA, 25 bp, Homo sapien
gaaagtaattgcactcttccatgca

SEQ ID NO: 3158032 - DNA, 25 bp, Homo sapien
tcttccatgcacttggtcaaaggtg

SEQ ID NO: 3158033 - DNA, 25 bp, Homo sapien
cacttggtcaaaggtgtatgacttc

SEQ ID NO: 3158034 - DNA, 25 bp, Homo sapien
gtttattctgatcttgttcagtttc

SEQ ID NO: 3158035 - DNA, 25 bp, Homo sapien
tgccttcattaacttctatcgccat

SEQ ID NO: 3158036 - DNA, 25 bp, Homo sapien
gctgccttcattaacttctatcgcc

SEQ ID NO: 3158037 - DNA, 25 bp, Homo sapien
ctgctgccttcattaacttctatcg

SEQ ID NO: 3158038 - DNA, 25 bp, Homo sapien
ttgctgctgccttcattaacttcta

SEQ ID NO: 3158039 - DNA, 25 bp, Homo sapien
agtgttgttccggggaagatagtag

SEQ ID NO: 3158040 - DNA, 25 bp, Homo sapien
atgtaggagagagtgttgttccggg

SEQ ID NO: 3158041 - DNA, 25 bp, Homo sapien
agagatgtaggagagagtgttgttc

SEQ ID NO: 3158042 - DNA, 25 bp, Homo sapien
agatgtaggagagagtgttgttccg

SEQ ID NO: 3158043 - DNA, 25 bp, Homo sapien
cgagtgtgcctgtggaagatgatga

SEQ ID NO: 3158044 - DNA, 25 bp, Homo sapien
gattatctgctccaggaacaattct

SEQ ID NO: 3158045 - DNA, 25 bp, Homo sapien
gctcttgattatctgctccaggaac

SEQ ID NO: 3158046 - DNA, 25 bp, Homo sapien
ttacagatggcgagtgtgcctgtgg

SEQ ID NO: 3158047 - DNA, 25 bp, Homo sapien
tctcatggcagatggtggagcacaa

SEQ ID NO: 3158048 - DNA, 25 bp, Homo sapien
gagcacaaggtctgcaaggaaccca

SEQ ID NO: 3158049 - DNA, 25 bp, Homo sapien
cagatggtggagcacaaggtctgca

SEQ ID NO: 3158050 - DNA, 25 bp, Homo sapien
gctcttctcatggcagatggtggag

SEQ ID NO: 3158051 - DNA, 25 bp, Homo sapien
ggtagatgcacttaaggagtttaaa

SEQ ID NO: 3158052 - DNA, 25 bp, Homo sapien
gtccgatttgtctgaaaccactggg

SEQ ID NO: 3158053 - DNA, 25 bp, Homo sapien
tctgggtagatgcacttaaggagtt

SEQ ID NO: 3158054 - DNA, 25 bp, Homo sapien
ttaaatggtccgatttgtctgaaac

SEQ ID NO: 3158055 - DNA, 25 bp, Homo sapien
tccgttcagtttggcattccctcat

SEQ ID NO: 3158056 - DNA, 25 bp, Homo sapien
caggtttatggttccgttcagtttg

SEQ ID NO: 3158057 - DNA, 25 bp, Homo sapien
gtttatggttccgttcagtttggca

SEQ ID NO: 3158058 - DNA, 25 bp, Homo sapien
tggttccgttcagtttggcattccc

SEQ ID NO: 3158059 - DNA, 25 bp, Homo sapien
catttctccatagtattattacttc

SEQ ID NO: 3158060 - DNA, 25 bp, Homo sapien
gattactgtgttgatcattggatcc

SEQ ID NO: 3158061 - DNA, 25 bp, Homo sapien
tattacttctgtgccactcagttca

SEQ ID NO: 3158062 - DNA, 25 bp, Homo sapien
ttcaccaatagcacagaaatgatta

SEQ ID NO: 3158063 - DNA, 25 bp, Homo sapien
cttccatgaagcaatcttttctcat

SEQ ID NO: 3158064 - DNA, 25 bp, Homo sapien
ttccctgagctcttccatgaagcaa

SEQ ID NO: 3158065 - DNA, 25 bp, Homo sapien
gagctcttccatgaagcaatctttt

SEQ ID NO: 3158066 - DNA, 25 bp, Homo sapien
tatttccctgagctcttccatgaag

SEQ ID NO: 3158067 - DNA, 25 bp, Homo sapien
cattctgacccctgcaagggctgag

SEQ ID NO: 3158068 - DNA, 25 bp, Homo sapien
cttgaactataaactgctctccttt

SEQ ID NO: 3158069 - DNA, 25 bp, Homo sapien
tcactaacacattcaacaacaaagg

SEQ ID NO: 3158070 - DNA, 25 bp, Homo sapien
ggctgcctttactgtcaatgccaaa

SEQ ID NO: 3158071 - DNA, 25 bp, Homo sapien
gtatgttctccagtagctctatcag

SEQ ID NO: 3158072 - DNA, 25 bp, Homo sapien
gggcttccacgtggagcctctcaca

SEQ ID NO: 3158073 - DNA, 25 bp, Homo sapien
ctggtcaagttctacacctatgggc

SEQ ID NO: 3158074 - DNA, 25 bp, Homo sapien
agttggacatctggatagatgcatc

SEQ ID NO: 3158075 - DNA, 25 bp, Homo sapien
tccacatccaggatgattagcattc

SEQ ID NO: 3158076 - DNA, 25 bp, Homo sapien
tgtcttgcccggatccacatccagg

SEQ ID NO: 3158077 - DNA, 25 bp, Homo sapien
aagacaacacactgtcttgcccgga

SEQ ID NO: 3158078 - DNA, 25 bp, Homo sapien
catccaggatgattagcattccttt

SEQ ID NO: 3158079 - DNA, 25 bp, Homo sapien
gctgcataagtatcgtaagtccata

SEQ ID NO: 3158080 - DNA, 25 bp, Homo sapien
tctggaatctgtaaggacaagggcc

SEQ ID NO: 3158081 - DNA, 25 bp, Homo sapien
gtaatgctgactctgtttagctgca

SEQ ID NO: 3158082 - DNA, 25 bp, Homo sapien
gccatgtctatgtgtatcccagtat

SEQ ID NO: 3158083 - DNA, 25 bp, Homo sapien
taactggatccatataatgcctaag

SEQ ID NO: 3158084 - DNA, 25 bp, Homo sapien
tacccgtggtagtgcttacatggct

SEQ ID NO: 3158085 - DNA, 25 bp, Homo sapien
tcaaggacctatcctagtatgaagc

SEQ ID NO: 3158086 - DNA, 25 bp, Homo sapien
tacaatgcctacatgatttaactgg

SEQ ID NO: 3158087 - DNA, 25 bp, Homo sapien
ctccaaatccatgtacttctggatg

SEQ ID NO: 3158088 - DNA, 25 bp, Homo sapien
gatgtactttcggatatctgtggaa

SEQ ID NO: 3158089 - DNA, 25 bp, Homo sapien
tgtggaatctaggtcatactctgaa

SEQ ID NO: 3158090 - DNA, 25 bp, Homo sapien
tccagttgatgtactttcggatatc

SEQ ID NO: 3158091 - DNA, 25 bp, Homo sapien
gaacttttgtgtctctcctctttac

SEQ ID NO: 3158092 - DNA, 25 bp, Homo sapien
catgcgaaggtaaagtacagagcat

SEQ ID NO: 3158093 - DNA, 25 bp, Homo sapien
gagcattctttcttaagggcttcag

SEQ ID NO: 3158094 - DNA, 25 bp, Homo sapien
ggattctgaagttcatgcgaaggta

SEQ ID NO: 3158095 - DNA, 25 bp, Homo sapien
gaagttcatgcgaaggtaaagtaca

SEQ ID NO: 3158096 - DNA, 25 bp, Homo sapien
agagcattgtttggctgaatatcac

SEQ ID NO: 3158097 - DNA, 25 bp, Homo sapien
caggagttttatgggatctagagca

SEQ ID NO: 3158098 - DNA, 25 bp, Homo sapien
tatgggatctagagcattgtttggc

SEQ ID NO: 3158099 - DNA, 25 bp, Homo sapien
tccaggagttttatgggatctagag

SEQ ID NO: 3158100 - DNA, 25 bp, Homo sapien
gaatctccacagtccgttttgggtc

SEQ ID NO: 3158101 - DNA, 25 bp, Homo sapien
cacagtccgttttgggtccagaggc

SEQ ID NO: 3158102 - DNA, 25 bp, Homo sapien
cttgaatctccacagtccgttttgg

SEQ ID NO: 3158103 - DNA, 25 bp, Homo sapien
tctccacagtccgttttgggtccag

SEQ ID NO: 3158104 - DNA, 25 bp, Homo sapien
agttctgtgatggaggtttcctgaa

SEQ ID NO: 3158105 - DNA, 25 bp, Homo sapien
aagataaatggaccttctgaccaag

SEQ ID NO: 3158106 - DNA, 25 bp, Homo sapien
caaataacgctgaactcaatatctg

SEQ ID NO: 3158107 - DNA, 25 bp, Homo sapien
gggctgacacatttgatatgtggct

SEQ ID NO: 3158108 - DNA, 25 bp, Homo sapien
ccaaccacatgagtaccactgagag

SEQ ID NO: 3158109 - DNA, 25 bp, Homo sapien
accactgagagttttaccagcgctg

SEQ ID NO: 3158110 - DNA, 25 bp, Homo sapien
tactatgcagccaggaaagtgtttc

SEQ ID NO: 3158111 - DNA, 25 bp, Homo sapien
cagcgctgtcccgaggttaactata

SEQ ID NO: 3158112 - DNA, 25 bp, Homo sapien
gtttggtaatgatgacgagatttgc

SEQ ID NO: 3158113 - DNA, 25 bp, Homo sapien
gatttgctaaaccagcttttcctgc

SEQ ID NO: 3158114 - DNA, 25 bp, Homo sapien
gctgttctagaatctgttaaagtca

SEQ ID NO: 3158115 - DNA, 25 bp, Homo sapien
ctgctgttctagaatctgttaaagt

SEQ ID NO: 3158116 - DNA, 25 bp, Homo sapien
tgttgtgcatgacaagcgtattggg

SEQ ID NO: 3158117 - DNA, 25 bp, Homo sapien
caagggtgttgtgcatgacaagaat

SEQ ID NO: 3158118 - DNA, 25 bp, Homo sapien
aagcgtattgggtattggtgtctgc

SEQ ID NO: 3158119 - DNA, 25 bp, Homo sapien
cagatatagattgtcttgtgcatga

SEQ ID NO: 3158120 - DNA, 25 bp, Homo sapien
atatcactgccgatcccacagatat

SEQ ID NO: 3158121 - DNA, 25 bp, Homo sapien
tatcactgccgatcccacagatata

SEQ ID NO: 3158122 - DNA, 25 bp, Homo sapien
taacattctcttcatctgtgggcat

SEQ ID NO: 3158123 - DNA, 25 bp, Homo sapien
ctttttaacattctcttcatctgtg

SEQ ID NO: 3158124 - DNA, 25 bp, Homo sapien
ttaacattctcttcatctgtgggca

SEQ ID NO: 3158125 - DNA, 25 bp, Homo sapien
ttttaacattctcttcatctgtggg

SEQ ID NO: 3158126 - DNA, 25 bp, Homo sapien
gtccacttgaaggtaatctgttcct

SEQ ID NO: 3158127 - DNA, 25 bp, Homo sapien
ccacttgaaggtaatctgttcctct

SEQ ID NO: 3158128 - DNA, 25 bp, Homo sapien
atagtccacttgaaggtaatctgtt

SEQ ID NO: 3158129 - DNA, 25 bp, Homo sapien
tagtccacttgaaggtaatctgttc

SEQ ID NO: 3158130 - DNA, 25 bp, Homo sapien
ggtagcacagatagcaatgcagatc

SEQ ID NO: 3158131 - DNA, 25 bp, Homo sapien
ttagtagccaggtagcacagatagc

SEQ ID NO: 3158132 - DNA, 25 bp, Homo sapien
ctaaaatattatgatctgaacataa

SEQ ID NO: 3158133 - DNA, 25 bp, Homo sapien
tgtattctgcgttatagaatttgtc

SEQ ID NO: 3158134 - DNA, 25 bp, Homo sapien
acctgttgttactggtaatttcact

SEQ ID NO: 3158135 - DNA, 25 bp, Homo sapien
tgttacaaccctgctttagtttgca

SEQ ID NO: 3158136 - DNA, 25 bp, Homo sapien
tcttgtactgtggttgatgtgatgg

SEQ ID NO: 3158137 - DNA, 25 bp, Homo sapien
tgatgggagagggaatttagaacct

SEQ ID NO: 3158138 - DNA, 25 bp, Homo sapien
tgaatattggtcctgcacttagctt

SEQ ID NO: 3158139 - DNA, 25 bp, Homo sapien
ccagtaaagctgtcagaaggactct

SEQ ID NO: 3158140 - DNA, 25 bp, Homo sapien
ggactctgcttcagctccaaagtaa

SEQ ID NO: 3158141 - DNA, 25 bp, Homo sapien
ctatcaagtgtgctgcgaaaagtaa

SEQ ID NO: 3158142 - DNA, 25 bp, Homo sapien
agtggaatatttggggcctagagta

SEQ ID NO: 3158143 - DNA, 25 bp, Homo sapien
atatttggggcctagagtagatgac

SEQ ID NO: 3158144 - DNA, 25 bp, Homo sapien
tggggcctagagtagatgactgact

SEQ ID NO: 3158145 - DNA, 25 bp, Homo sapien
tttggggcctagagtagatgactga

SEQ ID NO: 3158146 - DNA, 25 bp, Homo sapien
tcatgaggcacctgtggatgtacct

SEQ ID NO: 3158147 - DNA, 25 bp, Homo sapien
tactgacagtcataagcccttgaaa

SEQ ID NO: 3158148 - DNA, 25 bp, Homo sapien
tctgggttctcgagcaatgataaca

SEQ ID NO: 3158149 - DNA, 25 bp, Homo sapien
gaagatgaacagcttgcctctgggt

SEQ ID NO: 3158150 - DNA, 25 bp, Homo sapien
tcctctaggatcaggcatatcctgg

SEQ ID NO: 3158151 - DNA, 25 bp, Homo sapien
ttacttgcttgtatactgagcccaa

SEQ ID NO: 3158152 - DNA, 25 bp, Homo sapien
cccaaaaataagactggaatgcttg

SEQ ID NO: 3158153 - DNA, 25 bp, Homo sapien
tgcttgagtcgaaccataaagcatg

SEQ ID NO: 3158154 - DNA, 25 bp, Homo sapien
gcttgtatactgagcccaaaaataa

SEQ ID NO: 3158155 - DNA, 25 bp, Homo sapien
gttatgtgctgtcccgttctggcta

SEQ ID NO: 3158156 - DNA, 25 bp, Homo sapien
gattagcattacgtgataaatggac

SEQ ID NO: 3158157 - DNA, 25 bp, Homo sapien
tctgtatgaccagacatctgtgagt

SEQ ID NO: 3158158 - DNA, 25 bp, Homo sapien
ggctatccatcaaatccagaacaga

SEQ ID NO: 3158159 - DNA, 25 bp, Homo sapien
tctccgatgttcatcaagagtaacc

SEQ ID NO: 3158160 - DNA, 25 bp, Homo sapien
gaagtctccgatgttcatcaagagt

SEQ ID NO: 3158161 - DNA, 25 bp, Homo sapien
ttcatcaagagtaaccacttccttg

SEQ ID NO: 3158162 - DNA, 25 bp, Homo sapien
gatgttcatcaagagtaaccacttc

SEQ ID NO: 3158163 - DNA, 25 bp, Homo sapien
gtttttctttggcacacaggtcata

SEQ ID NO: 3158164 - DNA, 25 bp, Homo sapien
taccatctgattctgcggctctgtg

SEQ ID NO: 3158165 - DNA, 25 bp, Homo sapien
ctctgtgcccgtgggtggacatctg

SEQ ID NO: 3158166 - DNA, 25 bp, Homo sapien
catctggaatagttggcttaaataa

SEQ ID NO: 3158167 - DNA, 25 bp, Homo sapien
gctaacatcttaatgtggatactta

SEQ ID NO: 3158168 - DNA, 25 bp, Homo sapien
tgttgttctgttgctaacatcttaa

SEQ ID NO: 3158169 - DNA, 25 bp, Homo sapien
ctatgtactctgataaagaagttga

SEQ ID NO: 3158170 - DNA, 25 bp, Homo sapien
gttcctactatgtactctgataaag

SEQ ID NO: 3158171 - DNA, 25 bp, Homo sapien
ctggtggcattagaggatgtttgca

SEQ ID NO: 3158172 - DNA, 25 bp, Homo sapien
tgtttgcagacattgacgttgtcag

SEQ ID NO: 3158173 - DNA, 25 bp, Homo sapien
caggtattgctctgaaatgtcttga

SEQ ID NO: 3158174 - DNA, 25 bp, Homo sapien
gacgttgtcagaatacttatccttt

SEQ ID NO: 3158175 - DNA, 25 bp, Homo sapien
caacctagatgttgggcagctaggc

SEQ ID NO: 3158176 - DNA, 25 bp, Homo sapien
gcagctaggctgaattggcttggca

SEQ ID NO: 3158177 - DNA, 25 bp, Homo sapien
tatgtctccatcactagagatttgt

SEQ ID NO: 3158178 - DNA, 25 bp, Homo sapien
tgcctgtcaaagtcactatgtctcc

SEQ ID NO: 3158179 - DNA, 25 bp, Homo sapien
gtggacttggtcacaaatgagtcag

SEQ ID NO: 3158180 - DNA, 25 bp, Homo sapien
tagaagggccagttgtttctcaaaa

SEQ ID NO: 3158181 - DNA, 25 bp, Homo sapien
tcagtgccctgtggaagcgttgaca

SEQ ID NO: 3158182 - DNA, 25 bp, Homo sapien
ggtgatagtacaatatccagtggaa

SEQ ID NO: 3158183 - DNA, 25 bp, Homo sapien
gcgggctctggtattctcagtgcca

SEQ ID NO: 3158184 - DNA, 25 bp, Homo sapien
ctgcgggctctggtattctcagtgc

SEQ ID NO: 3158185 - DNA, 25 bp, Homo sapien
gggctctggtattctcagtgccaca

SEQ ID NO: 3158186 - DNA, 25 bp, Homo sapien
gctctggtattctcagtgccacagg

SEQ ID NO: 3158187 - DNA, 25 bp, Homo sapien
cttcttccttcagatttactgattc

SEQ ID NO: 3158188 - DNA, 25 bp, Homo sapien
ttcttcttccttcagatttactgat

SEQ ID NO: 3158189 - DNA, 25 bp, Homo sapien
tcattcttcttccttcagatttact

SEQ ID NO: 3158190 - DNA, 25 bp, Homo sapien
tcttccttcagatttactgattctc

SEQ ID NO: 3158191 - DNA, 25 bp, Homo sapien
gattctgtcagtataagctctgctt

SEQ ID NO: 3158192 - DNA, 25 bp, Homo sapien
tgtaattgggcagcccttttatctg

SEQ ID NO: 3158193 - DNA, 25 bp, Homo sapien
tgccaacccgaatggaacatacatc

SEQ ID NO: 3158194 - DNA, 25 bp, Homo sapien
ataataagttgaactgccaacccga

SEQ ID NO: 3158195 - DNA, 25 bp, Homo sapien
gtcccacactggtgactcattgtca

SEQ ID NO: 3158196 - DNA, 25 bp, Homo sapien
tcttatctactatgattcctgatcc

SEQ ID NO: 3158197 - DNA, 25 bp, Homo sapien
catgttccctttcttaactatagtc

SEQ ID NO: 3158198 - DNA, 25 bp, Homo sapien
tttatgatcctactcatgtatccca

SEQ ID NO: 3158199 - DNA, 25 bp, Homo sapien
ctaagcccagatccgttgggcctga

SEQ ID NO: 3158200 - DNA, 25 bp, Homo sapien
tgattaatgctgagtaccttatggt

SEQ ID NO: 3158201 - DNA, 25 bp, Homo sapien
aagcccagatccgttgggcctgatt

SEQ ID NO: 3158202 - DNA, 25 bp, Homo sapien
cccagatccgttgggcctgattaat

SEQ ID NO: 3158203 - DNA, 25 bp, Homo sapien
tgaaagtcggcttgttctgtaagat

SEQ ID NO: 3158204 - DNA, 25 bp, Homo sapien
catggtatttttatcactatgaggg

SEQ ID NO: 3158205 - DNA, 25 bp, Homo sapien
tctaggtattcatctgaactcatag

SEQ ID NO: 3158206 - DNA, 25 bp, Homo sapien
tcagaataccctgaaagtcggcttg

SEQ ID NO: 3158207 - DNA, 25 bp, Homo sapien
gaaaattggcagtcgaggtaaggac

SEQ ID NO: 3158208 - DNA, 25 bp, Homo sapien
taaggactggaccagctatgctggc

SEQ ID NO: 3158209 - DNA, 25 bp, Homo sapien
gataactcaggagcaattgcagctg

SEQ ID NO: 3158210 - DNA, 25 bp, Homo sapien
gctggcagaaggagctaaccttaag

SEQ ID NO: 3158211 - DNA, 25 bp, Homo sapien
tcatttcttttcttgtgtagtatca

SEQ ID NO: 3158212 - DNA, 25 bp, Homo sapien
catttcttttcttgtgtagtatcaa

SEQ ID NO: 3158213 - DNA, 25 bp, Homo sapien
ttcttttcttgtgtagtatcaattt

SEQ ID NO: 3158214 - DNA, 25 bp, Homo sapien
atttcttttcttgtgtagtatcaat

SEQ ID NO: 3158215 - DNA, 25 bp, Homo sapien
caaaggcttattagattcatcacag

SEQ ID NO: 3158216 - DNA, 25 bp, Homo sapien
tatttaaacgggacttgcagatggt

SEQ ID NO: 3158217 - DNA, 25 bp, Homo sapien
cacatgtctgtaaatagtagcttca

SEQ ID NO: 3158218 - DNA, 25 bp, Homo sapien
taccctggtcaatattcatagatgc

SEQ ID NO: 3158219 - DNA, 25 bp, Homo sapien
aatttcctagagtccagcctctggc

SEQ ID NO: 3158220 - DNA, 25 bp, Homo sapien
gaatcacaataccacaagcatcaca

SEQ ID NO: 3158221 - DNA, 25 bp, Homo sapien
cacactgctatactactgtcttttg

SEQ ID NO: 3158222 - DNA, 25 bp, Homo sapien
taaattaaatgcataacacactgct

SEQ ID NO: 3158223 - DNA, 25 bp, Homo sapien
tagtttgatacaggtatcccctggg

SEQ ID NO: 3158224 - DNA, 25 bp, Homo sapien
agttggtggcacttctaggccagtc

SEQ ID NO: 3158225 - DNA, 25 bp, Homo sapien
cacaccagtggtgcacattcgatat

SEQ ID NO: 3158226 - DNA, 25 bp, Homo sapien
gcagtatgcctgattggtgaccaca

SEQ ID NO: 3158227 - DNA, 25 bp, Homo sapien
caaaacccggatatggagtgctcgt

SEQ ID NO: 3158228 - DNA, 25 bp, Homo sapien
gggctccacctagcagttcggcaaa

SEQ ID NO: 3158229 - DNA, 25 bp, Homo sapien
agtccgagaaaaaccagcagcagcg

SEQ ID NO: 3158230 - DNA, 25 bp, Homo sapien
ccagcggcaagagctccgagagccg

SEQ ID NO: 3158231 - DNA, 25 bp, Homo sapien
tctttctcttcttcgactccccaag

SEQ ID NO: 3158232 - DNA, 25 bp, Homo sapien
atgtgggagcttcatcgcgcggccc

SEQ ID NO: 3158233 - DNA, 25 bp, Homo sapien
tttctcttcttcgactccccaagag

SEQ ID NO: 3158234 - DNA, 25 bp, Homo sapien
tctcttcttcgactccccaagagcg

SEQ ID NO: 3158235 - DNA, 25 bp, Homo sapien
gccggagcgagagccacacaaactc

SEQ ID NO: 3158236 - DNA, 25 bp, Homo sapien
agggggcgcgcagacagagcgggcg

SEQ ID NO: 3158237 - DNA, 25 bp, Homo sapien
cacaaactccttccccggtgcacgg

SEQ ID NO: 3158238 - DNA, 25 bp, Homo sapien
gggtggatgattagctcgccggccg

SEQ ID NO: 3158239 - DNA, 25 bp, Homo sapien
gcctcggagcgggagcgatggaata

SEQ ID NO: 3158240 - DNA, 25 bp, Homo sapien
tggcttctccgccaaaccgtcctcc

SEQ ID NO: 3158241 - DNA, 25 bp, Homo sapien
aggctctctcccagccgagggtccc

SEQ ID NO: 3158242 - DNA, 25 bp, Homo sapien
gagggtcccctctcaagcccgcaac

SEQ ID NO: 3158243 - DNA, 25 bp, Homo sapien
gtttccacaatccagccattgagcc

SEQ ID NO: 3158244 - DNA, 25 bp, Homo sapien
agttgctcaacaacctgaaggcggg

SEQ ID NO: 3158245 - DNA, 25 bp, Homo sapien
tgagatcgtcccatcagttgctcaa

SEQ ID NO: 3158246 - DNA, 25 bp, Homo sapien
cgtaaacgccggtccctgagatcgt

SEQ ID NO: 3158247 - DNA, 25 bp, Homo sapien
cagttccagcctgacggagaaaagt

SEQ ID NO: 3158248 - DNA, 25 bp, Homo sapien
agcggcaccagttccagcctgacgg

SEQ ID NO: 3158249 - DNA, 25 bp, Homo sapien
tgacggagaaaagtcgccctcctgt

SEQ ID NO: 3158250 - DNA, 25 bp, Homo sapien
agaaaagtcgccctcctgtccgctt

SEQ ID NO: 3158251 - DNA, 25 bp, Homo sapien
tctcctcagagaagcgccgaggtgc

SEQ ID NO: 3158252 - DNA, 25 bp, Homo sapien
gctgggtcgcggcagctcagacgct

SEQ ID NO: 3158253 - DNA, 25 bp, Homo sapien
ttctctcctacctgtaacccgccaa

SEQ ID NO: 3158254 - DNA, 25 bp, Homo sapien
aagcttctgagctccgacgtgggac

SEQ ID NO: 3158255 - DNA, 25 bp, Homo sapien
gcctcctcaaaccagattttccagt

SEQ ID NO: 3158256 - DNA, 25 bp, Homo sapien
gatttcaataagcaagctcagctcc

SEQ ID NO: 3158257 - DNA, 25 bp, Homo sapien
ccagttaagaggatcccaggcgatt

SEQ ID NO: 3158258 - DNA, 25 bp, Homo sapien
gggacacggcaaggtttcctcgcca

SEQ ID NO: 3158259 - DNA, 25 bp, Homo sapien
gtacattgtcattgtacagtggctc

SEQ ID NO: 3158260 - DNA, 25 bp, Homo sapien
tgtacattgtcattgtacagtggct

SEQ ID NO: 3158261 - DNA, 25 bp, Homo sapien
ctatatttaaaccttgaagatcagc

SEQ ID NO: 3158262 - DNA, 25 bp, Homo sapien
aatgtactcaatgcctagacggtct

SEQ ID NO: 3158263 - DNA, 25 bp, Homo sapien
tccagctctctttgtgccagcaaac

SEQ ID NO: 3158264 - DNA, 25 bp, Homo sapien
tctctttgtgccagcaaacctgtgt

SEQ ID NO: 3158265 - DNA, 25 bp, Homo sapien
tggtggactcaattcttcatggaga

SEQ ID NO: 3158266 - DNA, 25 bp, Homo sapien
cgaggtccgttcaagagcagtgaaa

SEQ ID NO: 3158267 - DNA, 25 bp, Homo sapien
tgaacttaagagatacgaggtccgt

SEQ ID NO: 3158268 - DNA, 25 bp, Homo sapien
tggaaatattagacacatggtggac

SEQ ID NO: 3158269 - DNA, 25 bp, Homo sapien
gcatccagcctgtacctaactctta

SEQ ID NO: 3158270 - DNA, 25 bp, Homo sapien
ccagattagtcaccgactcctgggt

SEQ ID NO: 3158271 - DNA, 25 bp, Homo sapien
tgggcatgcaccctaatgcctgctt

SEQ ID NO: 3158272 - DNA, 25 bp, Homo sapien
gaggttacacctagcaaaacttgtg

SEQ ID NO: 3158273 - DNA, 25 bp, Homo sapien
acaatgctcagggttcgtgcagaca

SEQ ID NO: 3158274 - DNA, 25 bp, Homo sapien
aatgatgcatgtttataccccagga

SEQ ID NO: 3158275 - DNA, 25 bp, Homo sapien
cagaaatggttgtgtgtcgccatcc

SEQ ID NO: 3158276 - DNA, 25 bp, Homo sapien
tccaggaagcggcataggtaacaac

SEQ ID NO: 3158277 - DNA, 25 bp, Homo sapien
tgctagaggaaactctaagtctctc

SEQ ID NO: 3158278 - DNA, 25 bp, Homo sapien
caagaggtccactagtacaaacatg

SEQ ID NO: 3158279 - DNA, 25 bp, Homo sapien
gatgaccgtattaaaatcaaccctg

SEQ ID NO: 3158280 - DNA, 25 bp, Homo sapien
tgcagaaacctgtaattcgaagaca

SEQ ID NO: 3158281 - DNA, 25 bp, Homo sapien
tgtaactggagtcagctaataaact

SEQ ID NO: 3158282 - DNA, 25 bp, Homo sapien
cactgaagtccataacctacaaata

SEQ ID NO: 3158283 - DNA, 25 bp, Homo sapien
tgaagtccataacctacaaatattt

SEQ ID NO: 3158284 - DNA, 25 bp, Homo sapien
taataaactttcacagccaaaggtc

SEQ ID NO: 3158285 - DNA, 25 bp, Homo sapien
gatagatttatcaaccctgtggcaa

SEQ ID NO: 3158286 - DNA, 25 bp, Homo sapien
tcctcaggtagattgatagcttcag

SEQ ID NO: 3158287 - DNA, 25 bp, Homo sapien
tgtaacccacttgaggctgccttgg

SEQ ID NO: 3158288 - DNA, 25 bp, Homo sapien
ggcaccaaacatcacaagaacctgt

SEQ ID NO: 3158289 - DNA, 25 bp, Homo sapien
gcacactgagtcaacaacctaaagg

SEQ ID NO: 3158290 - DNA, 25 bp, Homo sapien
gaaggcccaggtatgttttcagaaa

SEQ ID NO: 3158291 - DNA, 25 bp, Homo sapien
ggcaaacatccaggcgcaatcacct

SEQ ID NO: 3158292 - DNA, 25 bp, Homo sapien
tgcatgacacaccttaacctcagtg

SEQ ID NO: 3158293 - DNA, 25 bp, Homo sapien
gcgatgtggccaagtaatttccact

SEQ ID NO: 3158294 - DNA, 25 bp, Homo sapien
ctgtgcgatgtggccaagtaatttc

SEQ ID NO: 3158295 - DNA, 25 bp, Homo sapien
aatttccactcctgtatcttggctt

SEQ ID NO: 3158296 - DNA, 25 bp, Homo sapien
atttccactcctgtatcttggcttc

SEQ ID NO: 3158297 - DNA, 25 bp, Homo sapien
cagcaaaacgtaaatttgaatatga

SEQ ID NO: 3158298 - DNA, 25 bp, Homo sapien
aatatatcaagattgcattcaacaa

SEQ ID NO: 3158299 - DNA, 25 bp, Homo sapien
catgtttgtcttagaatctaacctc

SEQ ID NO: 3158300 - DNA, 25 bp, Homo sapien
agctattcgttatctacttaataaa

SEQ ID NO: 3158301 - DNA, 25 bp, Homo sapien
cagtgcagctcccttggggccaaaa

SEQ ID NO: 3158302 - DNA, 25 bp, Homo sapien
tcagtgcagctcccttggggccaaa

SEQ ID NO: 3158303 - DNA, 25 bp, Homo sapien
agtgcagctcccttggggccaaaaa

SEQ ID NO: 3158304 - DNA, 25 bp, Homo sapien
cagctgggaaaagacactatattgc

SEQ ID NO: 3158305 - DNA, 25 bp, Homo sapien
caatgccacaaaatacgccacaagg

SEQ ID NO: 3158306 - DNA, 25 bp, Homo sapien
aaacagatggtagcaattcaatgcc

SEQ ID NO: 3158307 - DNA, 25 bp, Homo sapien
ggaccggccatctaagcagtgactt

SEQ ID NO: 3158308 - DNA, 25 bp, Homo sapien
ttgccctaatctctcctgcatttgc

SEQ ID NO: 3158309 - DNA, 25 bp, Homo sapien
tttgccctaatctctcctgcatttg

SEQ ID NO: 3158310 - DNA, 25 bp, Homo sapien
tgccctaatctctcctgcatttgct

SEQ ID NO: 3158311 - DNA, 25 bp, Homo sapien
gatcttaactctaaatgggtgcctt

SEQ ID NO: 3158312 - DNA, 25 bp, Homo sapien
gagtggacagatagccagtcatgcc

SEQ ID NO: 3158313 - DNA, 25 bp, Homo sapien
catgaatacataccttgagtggaca

SEQ ID NO: 3158314 - DNA, 25 bp, Homo sapien
tcaagttactagaattcctccgctg

SEQ ID NO: 3158315 - DNA, 25 bp, Homo sapien
tccaaggaagtggttccaggaccac

SEQ ID NO: 3158316 - DNA, 25 bp, Homo sapien
taatggcataggcagtaatctttcc

SEQ ID NO: 3158317 - DNA, 25 bp, Homo sapien
catacactttgtcacctctagataa

SEQ ID NO: 3158318 - DNA, 25 bp, Homo sapien
gtgtgtattgatccaggcaaaatct

SEQ ID NO: 3158319 - DNA, 25 bp, Homo sapien
tcatgagaaactattgttcagcttc

SEQ ID NO: 3158320 - DNA, 25 bp, Homo sapien
ggacaaagcaggacaacgtgagatt

SEQ ID NO: 3158321 - DNA, 25 bp, Homo sapien
gggcccatagacagcttagagatac

SEQ ID NO: 3158322 - DNA, 25 bp, Homo sapien
tcatcagataatggagacggccact

SEQ ID NO: 3158323 - DNA, 25 bp, Homo sapien
gacggccactaagtgacggaaggat

SEQ ID NO: 3158324 - DNA, 25 bp, Homo sapien
ttctgcctgaaaggtttactactgg

SEQ ID NO: 3158325 - DNA, 25 bp, Homo sapien
tgaaaggtttactactggcaggaac

SEQ ID NO: 3158326 - DNA, 25 bp, Homo sapien
ttactactggcaggaacttccagca

SEQ ID NO: 3158327 - DNA, 25 bp, Homo sapien
gtttactactggcaggaacttccag

SEQ ID NO: 3158328 - DNA, 25 bp, Homo sapien
gaattcatccttcagtacaatttgc

SEQ ID NO: 3158329 - DNA, 25 bp, Homo sapien
tgctatctaccttaaatgcacctca

SEQ ID NO: 3158330 - DNA, 25 bp, Homo sapien
ttcacaaacgtatctgtcacagagt

SEQ ID NO: 3158331 - DNA, 25 bp, Homo sapien
catacttcatgttcattagctgata

SEQ ID NO: 3158332 - DNA, 25 bp, Homo sapien
tgcaaaaggtgtaaggtatgtgtct

SEQ ID NO: 3158333 - DNA, 25 bp, Homo sapien
taccctctgccccatagatgcatag

SEQ ID NO: 3158334 - DNA, 25 bp, Homo sapien
cacagaaaacctgagtggaaggtac

SEQ ID NO: 3158335 - DNA, 25 bp, Homo sapien
atctagttattgcagcaccagctgt

SEQ ID NO: 3158336 - DNA, 25 bp, Homo sapien
aaaacccagtcgtaatggagtgcca

SEQ ID NO: 3158337 - DNA, 25 bp, Homo sapien
tacagtgaatgtacccaccatgaat

SEQ ID NO: 3158338 - DNA, 25 bp, Homo sapien
ctggcaggttgacagaggaccaaca

SEQ ID NO: 3158339 - DNA, 25 bp, Homo sapien
caaagggcagttatcccacagagag

SEQ ID NO: 3158340 - DNA, 25 bp, Homo sapien
caccgctttatggaagtatggaaca

SEQ ID NO: 3158341 - DNA, 25 bp, Homo sapien
ttatggaagtatggaacagagtggt

SEQ ID NO: 3158342 - DNA, 25 bp, Homo sapien
ccgctttatggaagtatggaacaga

SEQ ID NO: 3158343 - DNA, 25 bp, Homo sapien
caaacaccgctttatggaagtatgg

SEQ ID NO: 3158344 - DNA, 25 bp, Homo sapien
ctgctgtagcaacccaagcatgttg

SEQ ID NO: 3158345 - DNA, 25 bp, Homo sapien
cagtctgctgtagcaacccaagcat

SEQ ID NO: 3158346 - DNA, 25 bp, Homo sapien
ttctccagtctgctgtagcaaccca

SEQ ID NO: 3158347 - DNA, 25 bp, Homo sapien
tccagtctgctgtagcaacccaagc

SEQ ID NO: 3158348 - DNA, 25 bp, Homo sapien
tatgatataacaaggacttttttcc

SEQ ID NO: 3158349 - DNA, 25 bp, Homo sapien
gagagagagtatgtgtttaagagta

SEQ ID NO: 3158350 - DNA, 25 bp, Homo sapien
ggcagtcttctaagtactactctga

SEQ ID NO: 3158351 - DNA, 25 bp, Homo sapien
gaaccttgcaggttaatgctctgcc

SEQ ID NO: 3158352 - DNA, 25 bp, Homo sapien
ttctcctggtaagggaacaagtctc

SEQ ID NO: 3158353 - DNA, 25 bp, Homo sapien
ggtaagggaacaagtctcacaagat

SEQ ID NO: 3158354 - DNA, 25 bp, Homo sapien
tgagatttaggattaatatggtttg

SEQ ID NO: 3158355 - DNA, 25 bp, Homo sapien
ggggaaccctgtgggagataactga

SEQ ID NO: 3158356 - DNA, 25 bp, Homo sapien
tcttccaatagcaggttgttgtcca

SEQ ID NO: 3158357 - DNA, 25 bp, Homo sapien
tccttaaaccacatgaaccattatc

SEQ ID NO: 3158358 - DNA, 25 bp, Homo sapien
cacatgaaccattatctgctagttt

SEQ ID NO: 3158359 - DNA, 25 bp, Homo sapien
ttgggaatgataagtgagcactggc

SEQ ID NO: 3158360 - DNA, 25 bp, Homo sapien
gaaagttgaaaccagagactgacct

SEQ ID NO: 3158361 - DNA, 25 bp, Homo sapien
tgaaataaactgtcctagagaagca

SEQ ID NO: 3158362 - DNA, 25 bp, Homo sapien
tcaaggcagaatagagactcaaggt

SEQ ID NO: 3158363 - DNA, 25 bp, Homo sapien
gacttggcaaggtcatgctgataaa

SEQ ID NO: 3158364 - DNA, 25 bp, Homo sapien
tttgctcttcaattgctaaaaatcc

SEQ ID NO: 3158365 - DNA, 25 bp, Homo sapien
tgctcttcaattgctaaaaatccat

SEQ ID NO: 3158366 - DNA, 25 bp, Homo sapien
gctcttcaattgctaaaaatccatg

SEQ ID NO: 3158367 - DNA, 25 bp, Homo sapien
aatttgctcttcaattgctaaaaat

SEQ ID NO: 3158368 - DNA, 25 bp, Homo sapien
gcccatagccagtttttacatccca

SEQ ID NO: 3158369 - DNA, 25 bp, Homo sapien
ggcactaactatatacagctgacag

SEQ ID NO: 3158370 - DNA, 25 bp, Homo sapien
aattaatgtgcttttaccctgccca

SEQ ID NO: 3158371 - DNA, 25 bp, Homo sapien
ttctgacagccacgatatctccaag

SEQ ID NO: 3158372 - DNA, 25 bp, Homo sapien
tcaattagcattagcacaatgtgcc

SEQ ID NO: 3158373 - DNA, 25 bp, Homo sapien
taagccagctgagaaagcacctgaa

SEQ ID NO: 3158374 - DNA, 25 bp, Homo sapien
tgtgcctttcacaagccatataagc

SEQ ID NO: 3158375 - DNA, 25 bp, Homo sapien
tcatagggaattactgctgcaatac

SEQ ID NO: 3158376 - DNA, 25 bp, Homo sapien
tactcgtttgttcaactggagcaaa

SEQ ID NO: 3158377 - DNA, 25 bp, Homo sapien
tcttaatcagcactccagtagaagc

SEQ ID NO: 3158378 - DNA, 25 bp, Homo sapien
taaagagctgtgactactatagcct

SEQ ID NO: 3158379 - DNA, 25 bp, Homo sapien
cacattgccagttattcacagggaa

SEQ ID NO: 3158380 - DNA, 25 bp, Homo sapien
cagagaccactaggtgattacccag

SEQ ID NO: 3158381 - DNA, 25 bp, Homo sapien
gaacaaagatttggccctactgaga

SEQ ID NO: 3158382 - DNA, 25 bp, Homo sapien
gaagaaatgcacacaagatgacccc

SEQ ID NO: 3158383 - DNA, 25 bp, Homo sapien
cagacaattgctatggcagagacca

SEQ ID NO: 3158384 - DNA, 25 bp, Homo sapien
tatgatgaaaggcaacattacctgt

SEQ ID NO: 3158385 - DNA, 25 bp, Homo sapien
tagaaatatgtagccatataggata

SEQ ID NO: 3158386 - DNA, 25 bp, Homo sapien
tctcatcagctagactattgcactc

SEQ ID NO: 3158387 - DNA, 25 bp, Homo sapien
gacaaggttggttgattctcttcca

SEQ ID NO: 3158388 - DNA, 25 bp, Homo sapien
cttgaagaagcacctgctatccaag

SEQ ID NO: 3158389 - DNA, 25 bp, Homo sapien
agacaaccatttcccctgacaaagg

SEQ ID NO: 3158390 - DNA, 25 bp, Homo sapien
gaaagacaaccatttcccctgacaa

SEQ ID NO: 3158391 - DNA, 25 bp, Homo sapien
aagcacctgctatccaaggaggaca

SEQ ID NO: 3158392 - DNA, 25 bp, Homo sapien
aacagcttctacacaggatcccaaa

SEQ ID NO: 3158393 - DNA, 25 bp, Homo sapien
tgagaacagcttctacacaggatcc

SEQ ID NO: 3158394 - DNA, 25 bp, Homo sapien
ggtgttcaatgagaacagcttctac

SEQ ID NO: 3158395 - DNA, 25 bp, Homo sapien
ttaaactgtttggtgttcaatgaga

SEQ ID NO: 3158396 - DNA, 25 bp, Homo sapien
ctattctggagctattgtctccaat

SEQ ID NO: 3158397 - DNA, 25 bp, Homo sapien
tattctggagctattgtctccaatc

SEQ ID NO: 3158398 - DNA, 25 bp, Homo sapien
tgacacccacttccacagcaaactt

SEQ ID NO: 3158399 - DNA, 25 bp, Homo sapien
agcaaacttcaggtatttttcaagg

SEQ ID NO: 3158400 - DNA, 25 bp, Homo sapien
aagctgacacccacttccacagcaa

SEQ ID NO: 3158401 - DNA, 25 bp, Homo sapien
ttccacagcaaacttcaggtatttt

SEQ ID NO: 3158402 - DNA, 25 bp, Homo sapien
aacagaaacaccaatatcccaaatc

SEQ ID NO: 3158403 - DNA, 25 bp, Homo sapien
tgtctactcaggtatggagtattcc

SEQ ID NO: 3158404 - DNA, 25 bp, Homo sapien
tgtgaaacaaaatacgtatatttct

SEQ ID NO: 3158405 - DNA, 25 bp, Homo sapien
ccaagactgatgatttttcttcaaa

SEQ ID NO: 3158406 - DNA, 25 bp, Homo sapien
attattggagctaagagcatcatga

SEQ ID NO: 3158407 - DNA, 25 bp, Homo sapien
ttattggagctaagagcatcatgaa

SEQ ID NO: 3158408 - DNA, 25 bp, Homo sapien
aattattggagctaagagcatcatg

SEQ ID NO: 3158409 - DNA, 25 bp, Homo sapien
ttctttttctgtgaagacgctataa

SEQ ID NO: 3158410 - DNA, 25 bp, Homo sapien
tttttctgtgaagacgctataaaac

SEQ ID NO: 3158411 - DNA, 25 bp, Homo sapien
ttttctttttctgtgaagacgctat

SEQ ID NO: 3158412 - DNA, 25 bp, Homo sapien
tctttttctgtgaagacgctataaa

SEQ ID NO: 3158413 - DNA, 25 bp, Homo sapien
gaaaggctctctcccacagcacctt

SEQ ID NO: 3158414 - DNA, 25 bp, Homo sapien
aaggctctctcccacagcaccttca

SEQ ID NO: 3158415 - DNA, 25 bp, Homo sapien
aggctctctcccacagcaccttcat

SEQ ID NO: 3158416 - DNA, 25 bp, Homo sapien
ctgaaaggctctctcccacagcacc

SEQ ID NO: 3158417 - DNA, 25 bp, Homo sapien
gaccgcagggcgcaccatcagaccc

SEQ ID NO: 3158418 - DNA, 25 bp, Homo sapien
ggaccgcagggcgcaccatcagacc

SEQ ID NO: 3158419 - DNA, 25 bp, Homo sapien
tcagcgtgtcgcaatggagcagcaa

SEQ ID NO: 3158420 - DNA, 25 bp, Homo sapien
tgcgctgcaatctgtgctccttggg

SEQ ID NO: 3158421 - DNA, 25 bp, Homo sapien
gcaagggcaggatgtcgttcactgt

SEQ ID NO: 3158422 - DNA, 25 bp, Homo sapien
tggaccgcgaactcctctggtagct

SEQ ID NO: 3158423 - DNA, 25 bp, Homo sapien
ctatggtattgcatggcctcgccca

SEQ ID NO: 3158424 - DNA, 25 bp, Homo sapien
tggcctcgcccaccactttgctgcc

SEQ ID NO: 3158425 - DNA, 25 bp, Homo sapien
catggcctcgcccaccactttgctg

SEQ ID NO: 3158426 - DNA, 25 bp, Homo sapien
atggtattgcatggcctcgcccacc

SEQ ID NO: 3158427 - DNA, 25 bp, Homo sapien
cattggattcctacttgcctgtttg

SEQ ID NO: 3158428 - DNA, 25 bp, Homo sapien
ggattcctacttgcctgtttggcta

SEQ ID NO: 3158429 - DNA, 25 bp, Homo sapien
ctttcattggattcctacttgcctg

SEQ ID NO: 3158430 - DNA, 25 bp, Homo sapien
ggctgctttcattggattcctactt

SEQ ID NO: 3158431 - DNA, 25 bp, Homo sapien
taagaggcgagaaggcaagtaccag

SEQ ID NO: 3158432 - DNA, 25 bp, Homo sapien
gaaggcaagtaccagttggttgttg

SEQ ID NO: 3158433 - DNA, 25 bp, Homo sapien
gaaatctgaactaagaggcgagaag

SEQ ID NO: 3158434 - DNA, 25 bp, Homo sapien
ttagaaatctgaactaagaggcgag

SEQ ID NO: 3158435 - DNA, 25 bp, Homo sapien
caatgatgtcagagaaactatttct

SEQ ID NO: 3158436 - DNA, 25 bp, Homo sapien
ccctggggtcaatgatgtcagagaa

SEQ ID NO: 3158437 - DNA, 25 bp, Homo sapien
cagagaaactatttctgaaaagagc

SEQ ID NO: 3158438 - DNA, 25 bp, Homo sapien
ctgacccctggggtcaatgatgtca

SEQ ID NO: 3158439 - DNA, 25 bp, Homo sapien
atctgtgtaccaaattcctctgaca

SEQ ID NO: 3158440 - DNA, 25 bp, Homo sapien
aaataatctgtgtaccaaattcctc

SEQ ID NO: 3158441 - DNA, 25 bp, Homo sapien
ataatctgtgtaccaaattcctctg

SEQ ID NO: 3158442 - DNA, 25 bp, Homo sapien
taatctgtgtaccaaattcctctga

SEQ ID NO: 3158443 - DNA, 25 bp, Homo sapien
atacaaagtctaatagtgtattctt

SEQ ID NO: 3158444 - DNA, 25 bp, Homo sapien
tacaaagtctaatagtgtattcttg

SEQ ID NO: 3158445 - DNA, 25 bp, Homo sapien
tatacaaagtctaatagtgtattct

SEQ ID NO: 3158446 - DNA, 25 bp, Homo sapien
tacaattcaaatggctcaggcgcaa

SEQ ID NO: 3158447 - DNA, 25 bp, Homo sapien
tttctaaaagtgactggaggcaact

SEQ ID NO: 3158448 - DNA, 25 bp, Homo sapien
aaatgtgcaatatgtacctacgaac

SEQ ID NO: 3158449 - DNA, 25 bp, Homo sapien
gatctgtccaggcaatttagtaaca

SEQ ID NO: 3158450 - DNA, 25 bp, Homo sapien
aatgcaaactgaaggctttctggta

SEQ ID NO: 3158451 - DNA, 25 bp, Homo sapien
ggctttctggtaaattccacactta

SEQ ID NO: 3158452 - DNA, 25 bp, Homo sapien
caaactgaaggctttctggtaaatt

SEQ ID NO: 3158453 - DNA, 25 bp, Homo sapien
tctggtaaattccacacttagacat

SEQ ID NO: 3158454 - DNA, 25 bp, Homo sapien
gatttgtttaccagtgttgaaacta

SEQ ID NO: 3158455 - DNA, 25 bp, Homo sapien
ctctgatttgtttaccagtgttgaa

SEQ ID NO: 3158456 - DNA, 25 bp, Homo sapien
ttgtttaccagtgttgaaactactg

SEQ ID NO: 3158457 - DNA, 25 bp, Homo sapien
ctgatttgtttaccagtgttgaaac

SEQ ID NO: 3158458 - DNA, 25 bp, Homo sapien
gatttggttctagcagcacattagg

SEQ ID NO: 3158459 - DNA, 25 bp, Homo sapien
gagtaataccctgaaagatttgagg

SEQ ID NO: 3158460 - DNA, 25 bp, Homo sapien
taatatgcctgagacaagcaagatg

SEQ ID NO: 3158461 - DNA, 25 bp, Homo sapien
taatttccgattgtgagagacagaa

SEQ ID NO: 3158462 - DNA, 25 bp, Homo sapien
ctgccaaaaggaagaggaagaaaag

SEQ ID NO: 3158463 - DNA, 25 bp, Homo sapien
aaggaagaggaagaaaagagatgcc

SEQ ID NO: 3158464 - DNA, 25 bp, Homo sapien
ggaagaggaagaaaagagatgccat

SEQ ID NO: 3158465 - DNA, 25 bp, Homo sapien
aaaaggaagaggaagaaaagagatg

SEQ ID NO: 3158466 - DNA, 25 bp, Homo sapien
tgtcatcagtcctgccatagttggc

SEQ ID NO: 3158467 - DNA, 25 bp, Homo sapien
gcatctggcagataacatcggatat

SEQ ID NO: 3158468 - DNA, 25 bp, Homo sapien
tatcatgatgacgtctgttcctgga

SEQ ID NO: 3158469 - DNA, 25 bp, Homo sapien
tgttcctggacagcgaagctctata

SEQ ID NO: 3158470 - DNA, 25 bp, Homo sapien
cagaagtaaagcatggacgattggt

SEQ ID NO: 3158471 - DNA, 25 bp, Homo sapien
tctggaaagcaatgaagaaagtggc

SEQ ID NO: 3158472 - DNA, 25 bp, Homo sapien
gaaagtggcttctctagaccatata

SEQ ID NO: 3158473 - DNA, 25 bp, Homo sapien
cagaatggcatgagagcacacgtga

SEQ ID NO: 3158474 - DNA, 25 bp, Homo sapien
tcccagacaagcaaaaggtgagtga

SEQ ID NO: 3158475 - DNA, 25 bp, Homo sapien
ccagacaggtaatgctaaagggagt

SEQ ID NO: 3158476 - DNA, 25 bp, Homo sapien
acttgtaccctaggatagtatatcc

SEQ ID NO: 3158477 - DNA, 25 bp, Homo sapien
gctccaatgtatctgacaacagttt

SEQ ID NO: 3158478 - DNA, 25 bp, Homo sapien
tgggcttcatgaacacaatatcaaa

SEQ ID NO: 3158479 - DNA, 25 bp, Homo sapien
caaaaactggtcgaatggtagaata

SEQ ID NO: 3158480 - DNA, 25 bp, Homo sapien
caaagtttattgttctccatgggaa

SEQ ID NO: 3158481 - DNA, 25 bp, Homo sapien
cttgttcccaaaactatgaccaaag

SEQ ID NO: 3158482 - DNA, 25 bp, Homo sapien
gaactaacagcattgttagatgttc

SEQ ID NO: 3158483 - DNA, 25 bp, Homo sapien
tttatgctgttaacttgatcaatgg

SEQ ID NO: 3158484 - DNA, 25 bp, Homo sapien
aacttgatcaatggaagaactaaca

SEQ ID NO: 3158485 - DNA, 25 bp, Homo sapien
cattgttagatgttcggcctctgcc

SEQ ID NO: 3158486 - DNA, 25 bp, Homo sapien
tcaagttgcagcactgctattccat

SEQ ID NO: 3158487 - DNA, 25 bp, Homo sapien
tcacagttggaatcttgcacgcagc

SEQ ID NO: 3158488 - DNA, 25 bp, Homo sapien
cattttgaaacagtatacatgcctc

SEQ ID NO: 3158489 - DNA, 25 bp, Homo sapien
cgctaaagtttggacaaattcatac

SEQ ID NO: 3158490 - DNA, 25 bp, Homo sapien
cacagagttcaaacggttgatatag

SEQ ID NO: 3158491 - DNA, 25 bp, Homo sapien
ctagcagtaagctccagaaattaaa

SEQ ID NO: 3158492 - DNA, 25 bp, Homo sapien
tccataacacagagttcaaacggtt

SEQ ID NO: 3158493 - DNA, 25 bp, Homo sapien
gtaagctccagaaattaaatttgcc

SEQ ID NO: 3158494 - DNA, 25 bp, Homo sapien
ggcttctttcggagtctgacttaca

SEQ ID NO: 3158495 - DNA, 25 bp, Homo sapien
cccggcttcaagtacctaggcttct

SEQ ID NO: 3158496 - DNA, 25 bp, Homo sapien
tctagctattatcgcctgtcctgtg

SEQ ID NO: 3158497 - DNA, 25 bp, Homo sapien
taactcccttagacattcagatgaa

SEQ ID NO: 3158498 - DNA, 25 bp, Homo sapien
tctccaacaactctaaacactaaga

SEQ ID NO: 3158499 - DNA, 25 bp, Homo sapien
gatactgtatactggggtcagctgg

SEQ ID NO: 3158500 - DNA, 25 bp, Homo sapien
ccaacaactctaaacactaagaaat

SEQ ID NO: 3158501 - DNA, 25 bp, Homo sapien
aaatttgcagcaaggatactgtata

SEQ ID NO: 3158502 - DNA, 25 bp, Homo sapien
tgctaagattcttatacagggctct

SEQ ID NO: 3158503 - DNA, 25 bp, Homo sapien
gaatgagttgaatttcggcaaagca

SEQ ID NO: 3158504 - DNA, 25 bp, Homo sapien
gaatttcggcaaagcagttcccacc

SEQ ID NO: 3158505 - DNA, 25 bp, Homo sapien
gttgaatttcggcaaagcagttccc

SEQ ID NO: 3158506 - DNA, 25 bp, Homo sapien
tcatcaagcatttgatcctctgcaa

SEQ ID NO: 3158507 - DNA, 25 bp, Homo sapien
aacctccagtgtctttcatcaagca

SEQ ID NO: 3158508 - DNA, 25 bp, Homo sapien
tacagtaagagcactgaattgctgc

SEQ ID NO: 3158509 - DNA, 25 bp, Homo sapien
gtgttgatttgcatacagtaagagc

SEQ ID NO: 3158510 - DNA, 25 bp, Homo sapien
attgtgctcttagattagaaggcac

SEQ ID NO: 3158511 - DNA, 25 bp, Homo sapien
gtgctcttagattagaaggcacagg

SEQ ID NO: 3158512 - DNA, 25 bp, Homo sapien
tgtgctcttagattagaaggcacag

SEQ ID NO: 3158513 - DNA, 25 bp, Homo sapien
tcattgtgctcttagattagaaggc

SEQ ID NO: 3158514 - DNA, 25 bp, Homo sapien
ctgggaagagtaagggctttcaggg

SEQ ID NO: 3158515 - DNA, 25 bp, Homo sapien
tgggaagagtaagggctttcagggc

SEQ ID NO: 3158516 - DNA, 25 bp, Homo sapien
ggaagagtaagggctttcagggcag

SEQ ID NO: 3158517 - DNA, 25 bp, Homo sapien
gggaagagtaagggctttcagggca

SEQ ID NO: 3158518 - DNA, 25 bp, Homo sapien
gaacattggccacatgagtcactgc

SEQ ID NO: 3158519 - DNA, 25 bp, Homo sapien
taaggacctggctacctaaaggaga

SEQ ID NO: 3158520 - DNA, 25 bp, Homo sapien
gcatgcagttgcctcttaaggacct

SEQ ID NO: 3158521 - DNA, 25 bp, Homo sapien
cgatcatcttaggacctgagaggca

SEQ ID NO: 3158522 - DNA, 25 bp, Homo sapien
aggtatttataggttcctggacacg

SEQ ID NO: 3158523 - DNA, 25 bp, Homo sapien
tcaaggtatttataggttcctggac

SEQ ID NO: 3158524 - DNA, 25 bp, Homo sapien
ttataggttcctggacacgggtctg

SEQ ID NO: 3158525 - DNA, 25 bp, Homo sapien
taggttcctggacacgggtctggaa

SEQ ID NO: 3158526 - DNA, 25 bp, Homo sapien
taatcacaagtaaatgccgtaggag

SEQ ID NO: 3158527 - DNA, 25 bp, Homo sapien
gacctggagaattggtataacactc

SEQ ID NO: 3158528 - DNA, 25 bp, Homo sapien
ttgacagcagatgaagcttagatac

SEQ ID NO: 3158529 - DNA, 25 bp, Homo sapien
cacctcttatctgcttggacctgga

SEQ ID NO: 3158530 - DNA, 25 bp, Homo sapien
ttagagttctggcatgctgtatctt

SEQ ID NO: 3158531 - DNA, 25 bp, Homo sapien
tagagttctggcatgctgtatcttt

SEQ ID NO: 3158532 - DNA, 25 bp, Homo sapien
cagttagagttctggcatgctgtat

SEQ ID NO: 3158533 - DNA, 25 bp, Homo sapien
agttagagttctggcatgctgtatc

SEQ ID NO: 3158534 - DNA, 25 bp, Homo sapien
tcgaagttagcccttgaatagcctt

SEQ ID NO: 3158535 - DNA, 25 bp, Homo sapien
cacctgatgattgggacttgaacca

SEQ ID NO: 3158536 - DNA, 25 bp, Homo sapien
tagaggtctaacatttacgcattcc

SEQ ID NO: 3158537 - DNA, 25 bp, Homo sapien
aactcctcctgcaggcataaaagag

SEQ ID NO: 3158538 - DNA, 25 bp, Homo sapien
tctgctaaatatgtgtgtgtgtgtg

SEQ ID NO: 3158539 - DNA, 25 bp, Homo sapien
agaggcatctgctaaatatgtgtgt

SEQ ID NO: 3158540 - DNA, 25 bp, Homo sapien
cagaggcatctgctaaatatgtgtg

SEQ ID NO: 3158541 - DNA, 25 bp, Homo sapien
catgcaacacttagaatagatgctc

SEQ ID NO: 3158542 - DNA, 25 bp, Homo sapien
gaccaattggccaagcatgcaacac

SEQ ID NO: 3158543 - DNA, 25 bp, Homo sapien
ccttagttatggcaatagagtggaa

SEQ ID NO: 3158544 - DNA, 25 bp, Homo sapien
tatgttactgcctctagagccatgc

SEQ ID NO: 3158545 - DNA, 25 bp, Homo sapien
gcatagctgttattgttcatttcca

SEQ ID NO: 3158546 - DNA, 25 bp, Homo sapien
cataagctatatcctgtggttagaa

SEQ ID NO: 3158547 - DNA, 25 bp, Homo sapien
ttagaaaaggtatggatcagagagc

SEQ ID NO: 3158548 - DNA, 25 bp, Homo sapien
tagtctagtccaatatcctgaattc

SEQ ID NO: 3158549 - DNA, 25 bp, Homo sapien
gaaagttgcaaataaggttatcaaa

SEQ ID NO: 3158550 - DNA, 25 bp, Homo sapien
caaaagttctgcttagaaagttgca

SEQ ID NO: 3158551 - DNA, 25 bp, Homo sapien
ggttatcaaattttagatccttcat

SEQ ID NO: 3158552 - DNA, 25 bp, Homo sapien
tctgcttagaaagttgcaaataagg

SEQ ID NO: 3158553 - DNA, 25 bp, Homo sapien
gagtatagaattccgctgaacctac

SEQ ID NO: 3158554 - DNA, 25 bp, Homo sapien
tatagaattccgctgaacctaccat

SEQ ID NO: 3158555 - DNA, 25 bp, Homo sapien
ttggagtatagaattccgctgaacc

SEQ ID NO: 3158556 - DNA, 25 bp, Homo sapien
ggagtatagaattccgctgaaccta

SEQ ID NO: 3158557 - DNA, 25 bp, Homo sapien
caaacaaatgttcactctggtatac

SEQ ID NO: 3158558 - DNA, 25 bp, Homo sapien
ccccagattggtggtcggactcaaa

SEQ ID NO: 3158559 - DNA, 25 bp, Homo sapien
gatgcctgcagagggtctttgcacc

SEQ ID NO: 3158560 - DNA, 25 bp, Homo sapien
tactccttttagtagtccaggacaa

SEQ ID NO: 3158561 - DNA, 25 bp, Homo sapien
gggttgtaatccacagctgcaatgt

SEQ ID NO: 3158562 - DNA, 25 bp, Homo sapien
tgaattaggaaagggtacatccacc

SEQ ID NO: 3158563 - DNA, 25 bp, Homo sapien
tcagatttgcctccccatcggtaag

SEQ ID NO: 3158564 - DNA, 25 bp, Homo sapien
aaactttactatgttcctggtgcgc

SEQ ID NO: 3158565 - DNA, 25 bp, Homo sapien
cataaaatgaacttgctgagaacaa

SEQ ID NO: 3158566 - DNA, 25 bp, Homo sapien
aacataaaatgaacttgctgagaac

SEQ ID NO: 3158567 - DNA, 25 bp, Homo sapien
aaatgaacttgctgagaacaaacag

SEQ ID NO: 3158568 - DNA, 25 bp, Homo sapien
gaacttgctgagaacaaacagtaaa

SEQ ID NO: 3158569 - DNA, 25 bp, Homo sapien
gccaattcaacgtaatatcagcatt

SEQ ID NO: 3158570 - DNA, 25 bp, Homo sapien
gactgaagcctctccatgattagag

SEQ ID NO: 3158571 - DNA, 25 bp, Homo sapien
gaaacaagtgctgtcactctgactg

SEQ ID NO: 3158572 - DNA, 25 bp, Homo sapien
ctgtacagcggtgagtcagacaata

SEQ ID NO: 3158573 - DNA, 25 bp, Homo sapien
tcagcctgctaccaacagatggtaa

SEQ ID NO: 3158574 - DNA, 25 bp, Homo sapien
tacactttgggtctacagatttagg

SEQ ID NO: 3158575 - DNA, 25 bp, Homo sapien
gatggtaacgacaaatacactttgg

SEQ ID NO: 3158576 - DNA, 25 bp, Homo sapien
tacatagacacataggacccaaaat

SEQ ID NO: 3158577 - DNA, 25 bp, Homo sapien
tagatttgatagttctgtatctggt

SEQ ID NO: 3158578 - DNA, 25 bp, Homo sapien
atttgatagttctgtatctggtgct

SEQ ID NO: 3158579 - DNA, 25 bp, Homo sapien
gatttgatagttctgtatctggtgc

SEQ ID NO: 3158580 - DNA, 25 bp, Homo sapien
ctagatttgatagttctgtatctgg

SEQ ID NO: 3158581 - DNA, 25 bp, Homo sapien
aatttcacaagctttggctgtgctc

SEQ ID NO: 3158582 - DNA, 25 bp, Homo sapien
ttcacaagctttggctgtgctccct

SEQ ID NO: 3158583 - DNA, 25 bp, Homo sapien
tggcaatggaatagctcttgcaaat

SEQ ID NO: 3158584 - DNA, 25 bp, Homo sapien
tgtgaagtggcaatggaatagctct

SEQ ID NO: 3158585 - DNA, 25 bp, Homo sapien
cagtagtgcttctctcatcaaaagg

SEQ ID NO: 3158586 - DNA, 25 bp, Homo sapien
aacaaggttcgatgaatatacccac

SEQ ID NO: 3158587 - DNA, 25 bp, Homo sapien
tgtccttacaaacaactggtgaaag

SEQ ID NO: 3158588 - DNA, 25 bp, Homo sapien
ggattcactcaatattaggctgtca

SEQ ID NO: 3158589 - DNA, 25 bp, Homo sapien
attcagttaagtgtaatctatatgc

SEQ ID NO: 3158590 - DNA, 25 bp, Homo sapien
tcagattcagtctaaggtgggacct

SEQ ID NO: 3158591 - DNA, 25 bp, Homo sapien
tgttacaagtagattgctgggctcc

SEQ ID NO: 3158592 - DNA, 25 bp, Homo sapien
cacccccccgcagagtttcagattc

SEQ ID NO: 3158593 - DNA, 25 bp, Homo sapien
gaattatctgaactgcttaggcatg

SEQ ID NO: 3158594 - DNA, 25 bp, Homo sapien
gaatctcaacaacaggaagctttta

SEQ ID NO: 3158595 - DNA, 25 bp, Homo sapien
aactgaaggagccaccacctaatgg

SEQ ID NO: 3158596 - DNA, 25 bp, Homo sapien
caaccaatgtggtcttttcagaaag

SEQ ID NO: 3158597 - DNA, 25 bp, Homo sapien
tcaatatcacatatgaactggaaag

SEQ ID NO: 3158598 - DNA, 25 bp, Homo sapien
gctgtctaatcattcttgaggtgtt

SEQ ID NO: 3158599 - DNA, 25 bp, Homo sapien
aatgcaagaattctaatcagtagtt

SEQ ID NO: 3158600 - DNA, 25 bp, Homo sapien
ctaatcagtagttgctgtctaatca

SEQ ID NO: 3158601 - DNA, 25 bp, Homo sapien
aaagaagtccaacagatacgctggg

SEQ ID NO: 3158602 - DNA, 25 bp, Homo sapien
atacgctggggtggaaaaatgctga

SEQ ID NO: 3158603 - DNA, 25 bp, Homo sapien
tggggtggaaaaatgctgagcctct

SEQ ID NO: 3158604 - DNA, 25 bp, Homo sapien
acagaaagaagtccaacagatacgc

SEQ ID NO: 3158605 - DNA, 25 bp, Homo sapien
aaaatagaggctatccagagttagc

SEQ ID NO: 3158606 - DNA, 25 bp, Homo sapien
ttattattagaacaggcatctcgtc

SEQ ID NO: 3158607 - DNA, 25 bp, Homo sapien
cctcagaatctaccttcagggcatt

SEQ ID NO: 3158608 - DNA, 25 bp, Homo sapien
tatctttgatctagagagacccagc

SEQ ID NO: 3158609 - DNA, 25 bp, Homo sapien
acttgatttggccatgtaaggataa

SEQ ID NO: 3158610 - DNA, 25 bp, Homo sapien
catgtaaggataaaaggcaagggct

SEQ ID NO: 3158611 - DNA, 25 bp, Homo sapien
gcttaaattctctgtaggcacaagg

SEQ ID NO: 3158612 - DNA, 25 bp, Homo sapien
gcacaaggcttttgaggaactgaaa

SEQ ID NO: 3158613 - DNA, 25 bp, Homo sapien
agacaccagagttgtaaccaaaact

SEQ ID NO: 3158614 - DNA, 25 bp, Homo sapien
ctaagacaccagagttgtaaccaaa

SEQ ID NO: 3158615 - DNA, 25 bp, Homo sapien
ccagagttgtaaccaaaactctgat

SEQ ID NO: 3158616 - DNA, 25 bp, Homo sapien
caccagagttgtaaccaaaactctg

SEQ ID NO: 3158617 - DNA, 25 bp, Homo sapien
acctgaatgtgggaagttccttgca

SEQ ID NO: 3158618 - DNA, 25 bp, Homo sapien
ggaagttccttgcaaaggtattgca

SEQ ID NO: 3158619 - DNA, 25 bp, Homo sapien
tgcccccaaagacctgaatgtggga

SEQ ID NO: 3158620 - DNA, 25 bp, Homo sapien
tccttgcaaaggtattgcaaggctt

SEQ ID NO: 3158621 - DNA, 25 bp, Homo sapien
tcaaggtgaattggcggagaaatgt

SEQ ID NO: 3158622 - DNA, 25 bp, Homo sapien
gagtcaaggtgaattggcggagaaa

SEQ ID NO: 3158623 - DNA, 25 bp, Homo sapien
gctcagagtcaaggtgaattggcgg

SEQ ID NO: 3158624 - DNA, 25 bp, Homo sapien
gtgaattggcggagaaatgtatgaa

SEQ ID NO: 3158625 - DNA, 25 bp, Homo sapien
tggaatggctgtacttatctactgc

SEQ ID NO: 3158626 - DNA, 25 bp, Homo sapien
cgattgaattttgggcctgcatggt

SEQ ID NO: 3158627 - DNA, 25 bp, Homo sapien
cctgcatggtggttgtagccccttc

SEQ ID NO: 3158628 - DNA, 25 bp, Homo sapien
aggtttaatgactacccgattgaat

SEQ ID NO: 3158629 - DNA, 25 bp, Homo sapien
gatgccagcagggaacattacttct

SEQ ID NO: 3158630 - DNA, 25 bp, Homo sapien
tagagttgtggagttagctcactgc

SEQ ID NO: 3158631 - DNA, 25 bp, Homo sapien
gaatatagacatggtggagttctga

SEQ ID NO: 3158632 - DNA, 25 bp, Homo sapien
ctgggtgccagagtagaatctgtct

SEQ ID NO: 3158633 - DNA, 25 bp, Homo sapien
tgccatcggtcatgacaatgatact

SEQ ID NO: 3158634 - DNA, 25 bp, Homo sapien
tgtttccagtgtgagtgccatcggt

SEQ ID NO: 3158635 - DNA, 25 bp, Homo sapien
taatattatgacacagacacgatct

SEQ ID NO: 3158636 - DNA, 25 bp, Homo sapien
tctttaagcctataggcctggcaga

SEQ ID NO: 3158637 - DNA, 25 bp, Homo sapien
tccagagctggtacaaaagcagcca

SEQ ID NO: 3158638 - DNA, 25 bp, Homo sapien
gcaccacacctgacatactagtgaa

SEQ ID NO: 3158639 - DNA, 25 bp, Homo sapien
cttcccagcatgctggaattgcagg

SEQ ID NO: 3158640 - DNA, 25 bp, Homo sapien
taataggattaggtctgttagtgac

SEQ ID NO: 3158641 - DNA, 25 bp, Homo sapien
tacagtttagaaagatgatagttcc

SEQ ID NO: 3158642 - DNA, 25 bp, Homo sapien
gggtttccctagagccagcattcag

SEQ ID NO: 3158643 - DNA, 25 bp, Homo sapien
gatagttcctagtttattacacaaa

SEQ ID NO: 3158644 - DNA, 25 bp, Homo sapien
aactaagtcaactacatgaatctga

SEQ ID NO: 3158645 - DNA, 25 bp, Homo sapien
cctgaactacagttgacaatgccaa

SEQ ID NO: 3158646 - DNA, 25 bp, Homo sapien
tgaaacatcgttccaatgcctgtga

SEQ ID NO: 3158647 - DNA, 25 bp, Homo sapien
aaagtgggccatgccggctgaaaca

SEQ ID NO: 3158648 - DNA, 25 bp, Homo sapien
cctgtgatttggctgatctagactc

SEQ ID NO: 3158649 - DNA, 25 bp, Homo sapien
gctatctgtccttgacgagtcttaa

SEQ ID NO: 3158650 - DNA, 25 bp, Homo sapien
ctagtactccggtttcttcttcctg

SEQ ID NO: 3158651 - DNA, 25 bp, Homo sapien
gtcttaaaccacatgatttctcggg

SEQ ID NO: 3158652 - DNA, 25 bp, Homo sapien
caagtacctcgacagctggagatgg

SEQ ID NO: 3158653 - DNA, 25 bp, Homo sapien
ccaaggagaagaacagttgctgaga

SEQ ID NO: 3158654 - DNA, 25 bp, Homo sapien
gcaaggcatagataagttgatacac

SEQ ID NO: 3158655 - DNA, 25 bp, Homo sapien
cccaaattccatcaggagcaaggca

SEQ ID NO: 3158656 - DNA, 25 bp, Homo sapien
tctgtgttatatgattgacccaagg

SEQ ID NO: 3158657 - DNA, 25 bp, Homo sapien
caaccaagtaaaagagtaggcagag

SEQ ID NO: 3158658 - DNA, 25 bp, Homo sapien
taagctatccatggtttaaccagtg

SEQ ID NO: 3158659 - DNA, 25 bp, Homo sapien
taactgagtgtaaggctgtgaagcc

SEQ ID NO: 3158660 - DNA, 25 bp, Homo sapien
gatgaattctatgaaagacagctgg

SEQ ID NO: 3158661 - DNA, 25 bp, Homo sapien
tcgccaagtgttgcagtgtgtgcct

SEQ ID NO: 3158662 - DNA, 25 bp, Homo sapien
aaaatctggtgcactaccactctgg

SEQ ID NO: 3158663 - DNA, 25 bp, Homo sapien
tcttgggccttacataaatcagaca

SEQ ID NO: 3158664 - DNA, 25 bp, Homo sapien
cagtcttcccggcaggctgtgtaaa

SEQ ID NO: 3158665 - DNA, 25 bp, Homo sapien
ctgttttcttccacttggcctgatt

SEQ ID NO: 3158666 - DNA, 25 bp, Homo sapien
tgttttcttccacttggcctgattg

SEQ ID NO: 3158667 - DNA, 25 bp, Homo sapien
gggttgtatagcaagtacattgaca

SEQ ID NO: 3158668 - DNA, 25 bp, Homo sapien
gtatagcaagtacattgacactaat

SEQ ID NO: 3158669 - DNA, 25 bp, Homo sapien
ggttgtatagcaagtacattgacac

SEQ ID NO: 3158670 - DNA, 25 bp, Homo sapien
ttgtatagcaagtacattgacacta

SEQ ID NO: 3158671 - DNA, 25 bp, Homo sapien
cttgttcaaactccgggcagcacta

SEQ ID NO: 3158672 - DNA, 25 bp, Homo sapien
gggtcaagttccgaagctgtacatc

SEQ ID NO: 3158673 - DNA, 25 bp, Homo sapien
ccatggcccggacagagtaggtgat

SEQ ID NO: 3158674 - DNA, 25 bp, Homo sapien
taggaggcctaccagctggtccatg

SEQ ID NO: 3158675 - DNA, 25 bp, Homo sapien
caggaatattagtctggcaatgtca

SEQ ID NO: 3158676 - DNA, 25 bp, Homo sapien
tctactacacaaatgccagtcaggg

SEQ ID NO: 3158677 - DNA, 25 bp, Homo sapien
taccctagtaagacacagaagaact

SEQ ID NO: 3158678 - DNA, 25 bp, Homo sapien
tgatgactgaaattcttaccctagt

SEQ ID NO: 3158679 - DNA, 25 bp, Homo sapien
ttatattccatcaggcaactggttg

SEQ ID NO: 3158680 - DNA, 25 bp, Homo sapien
tatattccatcaggcaactggttgt

SEQ ID NO: 3158681 - DNA, 25 bp, Homo sapien
ttccatcaggcaactggttgtgatt

SEQ ID NO: 3158682 - DNA, 25 bp, Homo sapien
tattccatcaggcaactggttgtga

SEQ ID NO: 3158683 - DNA, 25 bp, Homo sapien
gtttgcaggactctaaaccctccag

SEQ ID NO: 3158684 - DNA, 25 bp, Homo sapien
cacgattgatttgtactgagttgac

SEQ ID NO: 3158685 - DNA, 25 bp, Homo sapien
tgcaagtaaattgccagggctgtca

SEQ ID NO: 3158686 - DNA, 25 bp, Homo sapien
gaagcagttacccagatgccttttg

SEQ ID NO: 3158687 - DNA, 25 bp, Homo sapien
ggctctgcaagagcgctctcttttc

SEQ ID NO: 3158688 - DNA, 25 bp, Homo sapien
taggctctgcaagagcgctctcttt

SEQ ID NO: 3158689 - DNA, 25 bp, Homo sapien
tctgcaagagcgctctcttttctga

SEQ ID NO: 3158690 - DNA, 25 bp, Homo sapien
acataggctctgcaagagcgctctc

SEQ ID NO: 3158691 - DNA, 25 bp, Homo sapien
tgatcactcgtagtcaggtctctcc

SEQ ID NO: 3158692 - DNA, 25 bp, Homo sapien
tggctgaaggaggttgttaactgtc

SEQ ID NO: 3158693 - DNA, 25 bp, Homo sapien
tggccgcacgcagctgatcactcgt

SEQ ID NO: 3158694 - DNA, 25 bp, Homo sapien
tcaggtctctccatgcattcaaagc

SEQ ID NO: 3158695 - DNA, 25 bp, Homo sapien
tttcctccacagtatgaagcaacat

SEQ ID NO: 3158696 - DNA, 25 bp, Homo sapien
ctttcctccacagtatgaagcaaca

SEQ ID NO: 3158697 - DNA, 25 bp, Homo sapien
actttcctccacagtatgaagcaac

SEQ ID NO: 3158698 - DNA, 25 bp, Homo sapien
cactttcctccacagtatgaagcaa

SEQ ID NO: 3158699 - DNA, 25 bp, Homo sapien
tctgtattctccctgacaatgtcag

SEQ ID NO: 3158700 - DNA, 25 bp, Homo sapien
aaaaggttatcagccagcacaaaag

SEQ ID NO: 3158701 - DNA, 25 bp, Homo sapien
tgtcagtcttcaaaaggttatcagc

SEQ ID NO: 3158702 - DNA, 25 bp, Homo sapien
tcttcaaaaggttatcagccagcac

SEQ ID NO: 3158703 - DNA, 25 bp, Homo sapien
cctaaaccattgcagtatttctgaa

SEQ ID NO: 3158704 - DNA, 25 bp, Homo sapien
caaagagatatcagtgctcattgag

SEQ ID NO: 3158705 - DNA, 25 bp, Homo sapien
catacctaagctacaataatttcct

SEQ ID NO: 3158706 - DNA, 25 bp, Homo sapien
cagtgctcattgagaaacataccta

SEQ ID NO: 3158707 - DNA, 25 bp, Homo sapien
tgcagacagctggatagtgcttcca

SEQ ID NO: 3158708 - DNA, 25 bp, Homo sapien
tccatggcccatgttttctggaaat

SEQ ID NO: 3158709 - DNA, 25 bp, Homo sapien
tgctttaaggtatttgcagacagct

SEQ ID NO: 3158710 - DNA, 25 bp, Homo sapien
tgtgctcagtcttgcaacttccaat

SEQ ID NO: 3158711 - DNA, 25 bp, Homo sapien
atgaactgatgcaagttcaattccc

SEQ ID NO: 3158712 - DNA, 25 bp, Homo sapien
tcaattccctcaagcttaaaaaata

SEQ ID NO: 3158713 - DNA, 25 bp, Homo sapien
gatgcaagttcaattccctcaagct

SEQ ID NO: 3158714 - DNA, 25 bp, Homo sapien
aaagaaatgaactgatgcaagttca

SEQ ID NO: 3158715 - DNA, 25 bp, Homo sapien
ggacgcattcaaagcagtgtgtaga

SEQ ID NO: 3158716 - DNA, 25 bp, Homo sapien
ctctgggacgcattcaaagcagtgt

SEQ ID NO: 3158717 - DNA, 25 bp, Homo sapien
tgggacgcattcaaagcagtgtgta

SEQ ID NO: 3158718 - DNA, 25 bp, Homo sapien
tctgggacgcattcaaagcagtgtg

SEQ ID NO: 3158719 - DNA, 25 bp, Homo sapien
gaaatggaactctcgtacgcttctg

SEQ ID NO: 3158720 - DNA, 25 bp, Homo sapien
gaaaagaccgaccacactaatgttg

SEQ ID NO: 3158721 - DNA, 25 bp, Homo sapien
tcccaggtaaccgaaaacatatatc

SEQ ID NO: 3158722 - DNA, 25 bp, Homo sapien
taaataaaggaaaggccaatagaca

SEQ ID NO: 3158723 - DNA, 25 bp, Homo sapien
tctccgtggataaataaggacccaa

SEQ ID NO: 3158724 - DNA, 25 bp, Homo sapien
taacagtaaataccacaggatcagc

SEQ ID NO: 3158725 - DNA, 25 bp, Homo sapien
ggacccaagttgttatacaggacaa

SEQ ID NO: 3158726 - DNA, 25 bp, Homo sapien
gatttgtggacaaagcttccgttcc

SEQ ID NO: 3158727 - DNA, 25 bp, Homo sapien
ggtggttacaagagcatgtagtatg

SEQ ID NO: 3158728 - DNA, 25 bp, Homo sapien
taacttccacatgtgccatcagtac

SEQ ID NO: 3158729 - DNA, 25 bp, Homo sapien
gccgacagccttgtgttgaccaata

SEQ ID NO: 3158730 - DNA, 25 bp, Homo sapien
tcattgtacgcttggagtagctcca

SEQ ID NO: 3158731 - DNA, 25 bp, Homo sapien
gggaattaaaagatcggtgtttgca

SEQ ID NO: 3158732 - DNA, 25 bp, Homo sapien
gaattaaaagatcggtgtttgcaag

SEQ ID NO: 3158733 - DNA, 25 bp, Homo sapien
attaaaagatcggtgtttgcaagtg

SEQ ID NO: 3158734 - DNA, 25 bp, Homo sapien
ttaaaagatcggtgtttgcaagtgt

SEQ ID NO: 3158735 - DNA, 25 bp, Homo sapien
ctgagtacagttacttttttctgat

SEQ ID NO: 3158736 - DNA, 25 bp, Homo sapien
tttctgattcaaaggttgcaactaa

SEQ ID NO: 3158737 - DNA, 25 bp, Homo sapien
tctgattcaaaggttgcaactaaaa

SEQ ID NO: 3158738 - DNA, 25 bp, Homo sapien
tgattcaaaggttgcaactaaaaag

SEQ ID NO: 3158739 - DNA, 25 bp, Homo sapien
tgagaatcaagcaccaacgtttagc

SEQ ID NO: 3158740 - DNA, 25 bp, Homo sapien
caccaacgtttagcacagcagtctt

SEQ ID NO: 3158741 - DNA, 25 bp, Homo sapien
ctgaatagagggctatttgctctct

SEQ ID NO: 3158742 - DNA, 25 bp, Homo sapien
gaaagatgctgcgattgagaatcaa

SEQ ID NO: 3158743 - DNA, 25 bp, Homo sapien
aaaagccataagttgcgcttatgca

SEQ ID NO: 3158744 - DNA, 25 bp, Homo sapien
ttgcgcttatgcataaccaattaca

SEQ ID NO: 3158745 - DNA, 25 bp, Homo sapien
ccataagttgcgcttatgcataacc

SEQ ID NO: 3158746 - DNA, 25 bp, Homo sapien
atgaaaaagccataagttgcgctta

SEQ ID NO: 3158747 - DNA, 25 bp, Homo sapien
ggaggtcatggaccgcatcactgtg

SEQ ID NO: 3158748 - DNA, 25 bp, Homo sapien
gatggtgttacggtcactctggagc

SEQ ID NO: 3158749 - DNA, 25 bp, Homo sapien
aatcaggagacaaacaagggacagc

SEQ ID NO: 3158750 - DNA, 25 bp, Homo sapien
tcggttgatcccaatcaggaagagc

SEQ ID NO: 3158751 - DNA, 25 bp, Homo sapien
tcatcagttgtcacaagtgtacctc

SEQ ID NO: 3158752 - DNA, 25 bp, Homo sapien
aatggaaaactgagtaaggcctgaa

SEQ ID NO: 3158753 - DNA, 25 bp, Homo sapien
tattggcgctactgaaaagctggaa

SEQ ID NO: 3158754 - DNA, 25 bp, Homo sapien
ccagagaatgtacaatccctagagt

SEQ ID NO: 3158755 - DNA, 25 bp, Homo sapien
aatctggaaaagctacttactaaat

SEQ ID NO: 3158756 - DNA, 25 bp, Homo sapien
gagacagagagatgccaatctggaa

SEQ ID NO: 3158757 - DNA, 25 bp, Homo sapien
agacagagagatgccaatctggaaa

SEQ ID NO: 3158758 - DNA, 25 bp, Homo sapien
gccaatctggaaaagctacttacta

SEQ ID NO: 3158759 - DNA, 25 bp, Homo sapien
gcacagatgacatcttggaagcaac

SEQ ID NO: 3158760 - DNA, 25 bp, Homo sapien
tatcaagtcaaaaaaggcatggagg

SEQ ID NO: 3158761 - DNA, 25 bp, Homo sapien
cacaaattgtgctccctggttttac

SEQ ID NO: 3158762 - DNA, 25 bp, Homo sapien
cagacaacgggatattatttagcac

SEQ ID NO: 3158763 - DNA, 25 bp, Homo sapien
cagaaaaggatacctcgctagcaag

SEQ ID NO: 3158764 - DNA, 25 bp, Homo sapien
ccagaaaacagcattaagtaagcga

SEQ ID NO: 3158765 - DNA, 25 bp, Homo sapien
gaaagctggtcctaaacactatgtg

SEQ ID NO: 3158766 - DNA, 25 bp, Homo sapien
taaagacaagttttgctgagctgca

SEQ ID NO: 3158767 - DNA, 25 bp, Homo sapien
tgtaacagggcagcgaaaacagcac

SEQ ID NO: 3158768 - DNA, 25 bp, Homo sapien
cacaatgagtgcaggcatcccatag

SEQ ID NO: 3158769 - DNA, 25 bp, Homo sapien
ccaggtgaaggcagccaagaagaag

SEQ ID NO: 3158770 - DNA, 25 bp, Homo sapien
tcccatagccgaccagataaaagta

SEQ ID NO: 3158771 - DNA, 25 bp, Homo sapien
tggccactgatggtgttttgaaaca

SEQ ID NO: 3158772 - DNA, 25 bp, Homo sapien
cagcattctaagtagctttatagac

SEQ ID NO: 3158773 - DNA, 25 bp, Homo sapien
cttgccttgaatctaaacctcatgg

SEQ ID NO: 3158774 - DNA, 25 bp, Homo sapien
catcagaggtctatcttggtttact

SEQ ID NO: 3158775 - DNA, 25 bp, Homo sapien
ttaaatgctgaattatgtgcccaat

SEQ ID NO: 3158776 - DNA, 25 bp, Homo sapien
tctgacagcactattgatggagtaa

SEQ ID NO: 3158777 - DNA, 25 bp, Homo sapien
tattgatggagtaagataattagcc

SEQ ID NO: 3158778 - DNA, 25 bp, Homo sapien
gaattatgtgcccaatttctgacag

SEQ ID NO: 3158779 - DNA, 25 bp, Homo sapien
ctccaaatgaagtaggtgtcaagtc

SEQ ID NO: 3158780 - DNA, 25 bp, Homo sapien
tccaaatgaagtaggtgtcaagtcg

SEQ ID NO: 3158781 - DNA, 25 bp, Homo sapien
caaatgaagtaggtgtcaagtcgga

SEQ ID NO: 3158782 - DNA, 25 bp, Homo sapien
aaactccaaatgaagtaggtgtcaa

SEQ ID NO: 3158783 - DNA, 25 bp, Homo sapien
cattttatataaagcaatcccaagg

SEQ ID NO: 3158784 - DNA, 25 bp, Homo sapien
gcaatcccaaggaagattacattaa

SEQ ID NO: 3158785 - DNA, 25 bp, Homo sapien
gcctgattcaggtttcagtatagca

SEQ ID NO: 3158786 - DNA, 25 bp, Homo sapien
ttgatgttatcaagacagcctgatt

SEQ ID NO: 3158787 - DNA, 25 bp, Homo sapien
tcagtgacttttcttcccaagtcat

SEQ ID NO: 3158788 - DNA, 25 bp, Homo sapien
ctcagtgacttttcttcccaagtca

SEQ ID NO: 3158789 - DNA, 25 bp, Homo sapien
ctgtcaatttcttgtacagctccca

SEQ ID NO: 3158790 - DNA, 25 bp, Homo sapien
tgctgctccctttgattcttggctt

SEQ ID NO: 3158791 - DNA, 25 bp, Homo sapien
acagctcccaaactcatccccagct

SEQ ID NO: 3158792 - DNA, 25 bp, Homo sapien
caatttcttgtacagctcccaaact

SEQ ID NO: 3158793 - DNA, 25 bp, Homo sapien
ttccacagacagcctccctcagccc

SEQ ID NO: 3158794 - DNA, 25 bp, Homo sapien
ctgtttacaaataccgtacctactg

SEQ ID NO: 3158795 - DNA, 25 bp, Homo sapien
tgtttacaaataccgtacctactgc

SEQ ID NO: 3158796 - DNA, 25 bp, Homo sapien
ttgatgaagggtctgttatcctcat

SEQ ID NO: 3158797 - DNA, 25 bp, Homo sapien
gatgaagggtctgttatcctcatag

SEQ ID NO: 3158798 - DNA, 25 bp, Homo sapien
tgatgaagggtctgttatcctcata

SEQ ID NO: 3158799 - DNA, 25 bp, Homo sapien
agagataggccatgatgactgtgct

SEQ ID NO: 3158800 - DNA, 25 bp, Homo sapien
caaaggcccaggtcaatcctaatag

SEQ ID NO: 3158801 - DNA, 25 bp, Homo sapien
gaagagctattgcacctataaccca

SEQ ID NO: 3158802 - DNA, 25 bp, Homo sapien
tcaatcctaataggcagagaagagc

SEQ ID NO: 3158803 - DNA, 25 bp, Homo sapien
ccctgaaccaatggaactctctgta

SEQ ID NO: 3158804 - DNA, 25 bp, Homo sapien
tgtggagtagcgtccaggagttcga

SEQ ID NO: 3158805 - DNA, 25 bp, Homo sapien
gtacttttgccactacagcaatgtg

SEQ ID NO: 3158806 - DNA, 25 bp, Homo sapien
cagcaatgtgttcgcaggcatttcc

SEQ ID NO: 3158807 - DNA, 25 bp, Homo sapien
gactgctttcgaaccgtgtcattcc

SEQ ID NO: 3158808 - DNA, 25 bp, Homo sapien
ttatgtctccagtaataaaggaaga

SEQ ID NO: 3158809 - DNA, 25 bp, Homo sapien
actctgactgctttcgaaccgtgtc

SEQ ID NO: 3158810 - DNA, 25 bp, Homo sapien
ctctgttgagtgacgctgaactgtt

SEQ ID NO: 3158811 - DNA, 25 bp, Homo sapien
ctaaatatgatacacacgcctgaat

SEQ ID NO: 3158812 - DNA, 25 bp, Homo sapien
tgatacacacgcctgaatgcaggga

SEQ ID NO: 3158813 - DNA, 25 bp, Homo sapien
gatacacacgcctgaatgcagggaa

SEQ ID NO: 3158814 - DNA, 25 bp, Homo sapien
atatgatacacacgcctgaatgcag

SEQ ID NO: 3158815 - DNA, 25 bp, Homo sapien
tcattttgccacttgaatggagact

SEQ ID NO: 3158816 - DNA, 25 bp, Homo sapien
atctgagcctattttgcctttgtgt

SEQ ID NO: 3158817 - DNA, 25 bp, Homo sapien
gaacgctgttgcctcatttacacag

SEQ ID NO: 3158818 - DNA, 25 bp, Homo sapien
ttaattatctgactcagcatctcac

SEQ ID NO: 3158819 - DNA, 25 bp, Homo sapien
ttatagggattgttagtaccatgcg

SEQ ID NO: 3158820 - DNA, 25 bp, Homo sapien
gacagaagggttgttacagaccgcc

SEQ ID NO: 3158821 - DNA, 25 bp, Homo sapien
catgcggacgaagcagagcattgct

SEQ ID NO: 3158822 - DNA, 25 bp, Homo sapien
tgcgttgtacatgctgacagaaggg

SEQ ID NO: 3158823 - DNA, 25 bp, Homo sapien
gagccacctatatttcatgtaagat

SEQ ID NO: 3158824 - DNA, 25 bp, Homo sapien
tgtaagatttcaccttgccagtaag

SEQ ID NO: 3158825 - DNA, 25 bp, Homo sapien
cgagccacctatatttcatgtaaga

SEQ ID NO: 3158826 - DNA, 25 bp, Homo sapien
tcatgtaagatttcaccttgccagt

SEQ ID NO: 3158827 - DNA, 25 bp, Homo sapien
tgccccaaaattcatgagtctgggt

SEQ ID NO: 3158828 - DNA, 25 bp, Homo sapien
aaacaacaagtaagcttacagcgac

SEQ ID NO: 3158829 - DNA, 25 bp, Homo sapien
cagcgacagtagaagaaacatgagt

SEQ ID NO: 3158830 - DNA, 25 bp, Homo sapien
taaaaagcaaattgatgatatgcag

SEQ ID NO: 3158831 - DNA, 25 bp, Homo sapien
aatgtttagctttactcccatactt

SEQ ID NO: 3158832 - DNA, 25 bp, Homo sapien
gatatgcttgatggctatggttgga

SEQ ID NO: 3158833 - DNA, 25 bp, Homo sapien
caatgcattaggtacgggctgaaaa

SEQ ID NO: 3158834 - DNA, 25 bp, Homo sapien
gttggatggctgatgcattgaaaca

SEQ ID NO: 3158835 - DNA, 25 bp, Homo sapien
ggtgatagcttttgcagaagctgct

SEQ ID NO: 3158836 - DNA, 25 bp, Homo sapien
tataatgagtgatggatttgtgtgc

SEQ ID NO: 3158837 - DNA, 25 bp, Homo sapien
gttattatataccatcccatcagag

SEQ ID NO: 3158838 - DNA, 25 bp, Homo sapien
tattgctaacttgtgaaaatatagc

SEQ ID NO: 3158839 - DNA, 25 bp, Homo sapien
cacttcaaatgcaaccacaaaatga

SEQ ID NO: 3158840 - DNA, 25 bp, Homo sapien
aagcaaaaacattcattgactatga

SEQ ID NO: 3158841 - DNA, 25 bp, Homo sapien
ttatatccaacaagccatagaacac

SEQ ID NO: 3158842 - DNA, 25 bp, Homo sapien
aaagattacaagatactatgacatt

SEQ ID NO: 3158843 - DNA, 25 bp, Homo sapien
tatccaacaagccatagaacacaca

SEQ ID NO: 3158844 - DNA, 25 bp, Homo sapien
ccattcagtggtagagtatccatga

SEQ ID NO: 3158845 - DNA, 25 bp, Homo sapien
cattcagtggtagagtatccatgac

SEQ ID NO: 3158846 - DNA, 25 bp, Homo sapien
acacagttgctcaggtattcgccgc

SEQ ID NO: 3158847 - DNA, 25 bp, Homo sapien
gttctgttcactggagcgctcatgg

SEQ ID NO: 3158848 - DNA, 25 bp, Homo sapien
tggtaacactctctgtggcggccac

SEQ ID NO: 3158849 - DNA, 25 bp, Homo sapien
tataaatccatcactgctgccgcga

SEQ ID NO: 3158850 - DNA, 25 bp, Homo sapien
tacattaacaggactcaaattctgg

SEQ ID NO: 3158851 - DNA, 25 bp, Homo sapien
tcaacaaggccacaatgagtgccat

SEQ ID NO: 3158852 - DNA, 25 bp, Homo sapien
tcaactcagaacagtcaacaaggtg

SEQ ID NO: 3158853 - DNA, 25 bp, Homo sapien
tgtgagtgaccaaaaaccctatgtg

SEQ ID NO: 3158854 - DNA, 25 bp, Homo sapien
tgaccttccaatgcttacgagggag

SEQ ID NO: 3158855 - DNA, 25 bp, Homo sapien
tttgcattacaacagacgtgccctg

SEQ ID NO: 3158856 - DNA, 25 bp, Homo sapien
ctaaaaagtggtagtgcaggtgccc

SEQ ID NO: 3158857 - DNA, 25 bp, Homo sapien
gcaggtgcccacttgttgatcagac

SEQ ID NO: 3158858 - DNA, 25 bp, Homo sapien
aagctgaattgaggtagtttcccca

SEQ ID NO: 3158859 - DNA, 25 bp, Homo sapien
taaaggtaagcatagtgactgcagc

SEQ ID NO: 3158860 - DNA, 25 bp, Homo sapien
tgccatagtgtggtgtgagaaaacc

SEQ ID NO: 3158861 - DNA, 25 bp, Homo sapien
agccttggacgtgctaatattgcca

SEQ ID NO: 3158862 - DNA, 25 bp, Homo sapien
ttaattacggttacataatacttgc

SEQ ID NO: 3158863 - DNA, 25 bp, Homo sapien
taagcaggtcataaatgtctcagga

SEQ ID NO: 3158864 - DNA, 25 bp, Homo sapien
aaaattgagtcacaaaaggtggtag

SEQ ID NO: 3158865 - DNA, 25 bp, Homo sapien
caacccttgctagtgtaaacaggac

SEQ ID NO: 3158866 - DNA, 25 bp, Homo sapien
tatagtggaaacaagaagggacgcc

SEQ ID NO: 3158867 - DNA, 25 bp, Homo sapien
cacaaaatttggactttgccgcaaa

SEQ ID NO: 3158868 - DNA, 25 bp, Homo sapien
tccctgataaagtgtcatgtgaact

SEQ ID NO: 3158869 - DNA, 25 bp, Homo sapien
catgaggtccattagctagtgtccc

SEQ ID NO: 3158870 - DNA, 25 bp, Homo sapien
aaaaagcaagctagtcaataacatt

SEQ ID NO: 3158871 - DNA, 25 bp, Homo sapien
aaaagcaagctagtcaataacattt

SEQ ID NO: 3158872 - DNA, 25 bp, Homo sapien
aaaaaagcaagctagtcaataacat

SEQ ID NO: 3158873 - DNA, 25 bp, Homo sapien
taaaaaaagcaagctagtcaataac

SEQ ID NO: 3158874 - DNA, 25 bp, Homo sapien
atccaagcagtagcacttcggtaca

SEQ ID NO: 3158875 - DNA, 25 bp, Homo sapien
ggtacagtactgatagacaacttct

SEQ ID NO: 3158876 - DNA, 25 bp, Homo sapien
gatatagattagtctggagttgatc

SEQ ID NO: 3158877 - DNA, 25 bp, Homo sapien
gattagtctggagttgatctttaga

SEQ ID NO: 3158878 - DNA, 25 bp, Homo sapien
tgctagatgtgaaagaagtgctgac

SEQ ID NO: 3158879 - DNA, 25 bp, Homo sapien
tgaaatactgtaacgggacacaaat

SEQ ID NO: 3158880 - DNA, 25 bp, Homo sapien
ccttggtctacaatgtactgggaac

SEQ ID NO: 3158881 - DNA, 25 bp, Homo sapien
taaaccaaagagagtgtaatcagtg

SEQ ID NO: 3158882 - DNA, 25 bp, Homo sapien
tatcccaatagagatttgttcatgt

SEQ ID NO: 3158883 - DNA, 25 bp, Homo sapien
tgttcatgtatagtctttcttgatt

SEQ ID NO: 3158884 - DNA, 25 bp, Homo sapien
agagacttgtttatcccaatagaga

SEQ ID NO: 3158885 - DNA, 25 bp, Homo sapien
acttgtttatcccaatagagatttg

SEQ ID NO: 3158886 - DNA, 25 bp, Homo sapien
tggtttctgctcttccgttgttcat

SEQ ID NO: 3158887 - DNA, 25 bp, Homo sapien
acttgtttggtttctgctcttccgt

SEQ ID NO: 3158888 - DNA, 25 bp, Homo sapien
cataagtttgctaacttgtttggtt

SEQ ID NO: 3158889 - DNA, 25 bp, Homo sapien
tgtttggtttctgctcttccgttgt

SEQ ID NO: 3158890 - DNA, 25 bp, Homo sapien
cccgtggaattagcagaatgaaatc

SEQ ID NO: 3158891 - DNA, 25 bp, Homo sapien
taactctagtttaggtcctgtcacc

SEQ ID NO: 3158892 - DNA, 25 bp, Homo sapien
tagagccagcagattagagagtgaa

SEQ ID NO: 3158893 - DNA, 25 bp, Homo sapien
ggagtactttgataacccaccatgt

SEQ ID NO: 3158894 - DNA, 25 bp, Homo sapien
gtctgctttactttcctcttctttc

SEQ ID NO: 3158895 - DNA, 25 bp, Homo sapien
tgctttactttcctcttctttcaaa

SEQ ID NO: 3158896 - DNA, 25 bp, Homo sapien
agtctgctttactttcctcttcttt

SEQ ID NO: 3158897 - DNA, 25 bp, Homo sapien
agaagtctgctttactttcctcttc

SEQ ID NO: 3158898 - DNA, 25 bp, Homo sapien
ttctagttcacaggcaaaggtcagc

SEQ ID NO: 3158899 - DNA, 25 bp, Homo sapien
tgagaatcctaagcgaccaaagcca

SEQ ID NO: 3158900 - DNA, 25 bp, Homo sapien
tccagaggactaggcactaattagc

SEQ ID NO: 3158901 - DNA, 25 bp, Homo sapien
tctgtagatcaaagagtggagcatc

SEQ ID NO: 3158902 - DNA, 25 bp, Homo sapien
tttggaccagaggttcgttgatgac

SEQ ID NO: 3158903 - DNA, 25 bp, Homo sapien
cagaggttcgttgatgactgactgt

SEQ ID NO: 3158904 - DNA, 25 bp, Homo sapien
tggaccagaggttcgttgatgactg

SEQ ID NO: 3158905 - DNA, 25 bp, Homo sapien
gaccagaggttcgttgatgactgac

SEQ ID NO: 3158906 - DNA, 25 bp, Homo sapien
actttacaagcagaagagagtggag

SEQ ID NO: 3158907 - DNA, 25 bp, Homo sapien
gaaacagaatcctcagattcaccaa

SEQ ID NO: 3158908 - DNA, 25 bp, Homo sapien
gaatcctcagattcaccaatgttga

SEQ ID NO: 3158909 - DNA, 25 bp, Homo sapien
ctctctgcagaaactttacaagcag

SEQ ID NO: 3158910 - DNA, 25 bp, Homo sapien
aactgcaggctggtaatgagaaagc

SEQ ID NO: 3158911 - DNA, 25 bp, Homo sapien
gaagctcttctgataactgcaggct

SEQ ID NO: 3158912 - DNA, 25 bp, Homo sapien
ttttcataatgattacaacctcgag

SEQ ID NO: 3158913 - DNA, 25 bp, Homo sapien
caacctcgagaggaagctcttctga

SEQ ID NO: 3158914 - DNA, 25 bp, Homo sapien
gagtttacctctaataatcttcact

SEQ ID NO: 3158915 - DNA, 25 bp, Homo sapien
tagatctactctttgtgttcgttcc

SEQ ID NO: 3158916 - DNA, 25 bp, Homo sapien
cacttgtcactacacttagatctac

SEQ ID NO: 3158917 - DNA, 25 bp, Homo sapien
cgtgtaaccacctgctaaaactcat

SEQ ID NO: 3158918 - DNA, 25 bp, Homo sapien
cactggtagaatctggttcacaatg

SEQ ID NO: 3158919 - DNA, 25 bp, Homo sapien
gagaaatttttgtcactggtagaat

SEQ ID NO: 3158920 - DNA, 25 bp, Homo sapien
ggttcacaatgaatgaaatggcagg

SEQ ID NO: 3158921 - DNA, 25 bp, Homo sapien
ttcacaatgaatgaaatggcaggca

SEQ ID NO: 3158922 - DNA, 25 bp, Homo sapien
tccattagtaacttcttttagcctg

SEQ ID NO: 3158923 - DNA, 25 bp, Homo sapien
ttttagcctgttggtactcttcgac

SEQ ID NO: 3158924 - DNA, 25 bp, Homo sapien
cttcgacttaatagcagataaaggc

SEQ ID NO: 3158925 - DNA, 25 bp, Homo sapien
taagcagaaatccatccttttggtc

SEQ ID NO: 3158926 - DNA, 25 bp, Homo sapien
ctgtggaatcctccatggcaaaacc

SEQ ID NO: 3158927 - DNA, 25 bp, Homo sapien
gctgtggaatcctccatggcaaaac

SEQ ID NO: 3158928 - DNA, 25 bp, Homo sapien
taggtcctctggcagtcagtctcag

SEQ ID NO: 3158929 - DNA, 25 bp, Homo sapien
cagattactttaggcccctggtgac

SEQ ID NO: 3158930 - DNA, 25 bp, Homo sapien
gagattttgtagacctctgacagtg

SEQ ID NO: 3158931 - DNA, 25 bp, Homo sapien
tctgacagtggatatagagcagtgc

SEQ ID NO: 3158932 - DNA, 25 bp, Homo sapien
caaaagaggatggaacagcctgcat

SEQ ID NO: 3158933 - DNA, 25 bp, Homo sapien
tcaattggatgcctagaagcccacc

SEQ ID NO: 3158934 - DNA, 25 bp, Homo sapien
tgaagtgcactctccaaagcaatag

SEQ ID NO: 3158935 - DNA, 25 bp, Homo sapien
tgtaaagaccaaaataacgtatcgc

SEQ ID NO: 3158936 - DNA, 25 bp, Homo sapien
ccaggtgctcaccaatcctcctctg

SEQ ID NO: 3158937 - DNA, 25 bp, Homo sapien
tgccggaagtgacttgtcaatcttc

SEQ ID NO: 3158938 - DNA, 25 bp, Homo sapien
ctgctctgccggaagtgacttgtca

SEQ ID NO: 3158939 - DNA, 25 bp, Homo sapien
ggaagtgacttgtcaatcttccagg

SEQ ID NO: 3158940 - DNA, 25 bp, Homo sapien
tttgtcctcataattccgtttacaa

SEQ ID NO: 3158941 - DNA, 25 bp, Homo sapien
ccttcttcattacctgtaacatttg

SEQ ID NO: 3158942 - DNA, 25 bp, Homo sapien
ttgtcctcataattccgtttacaac

SEQ ID NO: 3158943 - DNA, 25 bp, Homo sapien
aacatttgaataagaaatgttgtcc

SEQ ID NO: 3158944 - DNA, 25 bp, Homo sapien
gagtctagaactgagttgtctggca

SEQ ID NO: 3158945 - DNA, 25 bp, Homo sapien
caatcaggtcttcggagtctagaac

SEQ ID NO: 3158946 - DNA, 25 bp, Homo sapien
cttcggagtctagaactgagttgtc

SEQ ID NO: 3158947 - DNA, 25 bp, Homo sapien
gatatatttcaatcaggtcttcgga

SEQ ID NO: 3158948 - DNA, 25 bp, Homo sapien
cctgaagacatcagaacggagctct

SEQ ID NO: 3158949 - DNA, 25 bp, Homo sapien
caaaagcccttagaggcccagttgt

SEQ ID NO: 3158950 - DNA, 25 bp, Homo sapien
tcttggatctataccacataggaca

SEQ ID NO: 3158951 - DNA, 25 bp, Homo sapien
tactccctcttctaatgcttgaatg

SEQ ID NO: 3158952 - DNA, 25 bp, Homo sapien
cacctgtgtatattagcctgataga

SEQ ID NO: 3158953 - DNA, 25 bp, Homo sapien
tcctgtacctgacaaagtgacctac

SEQ ID NO: 3158954 - DNA, 25 bp, Homo sapien
gaagggctaatgataccaatgggaa

SEQ ID NO: 3158955 - DNA, 25 bp, Homo sapien
tggtagcccttccttcagtgcaaac

SEQ ID NO: 3158956 - DNA, 25 bp, Homo sapien
ccaagctttgatacatttccagcca

SEQ ID NO: 3158957 - DNA, 25 bp, Homo sapien
gtatttcctccaagctttgatacat

SEQ ID NO: 3158958 - DNA, 25 bp, Homo sapien
ctgtcattgtatttcctccaagctt

SEQ ID NO: 3158959 - DNA, 25 bp, Homo sapien
caagctttgatacatttccagccat

SEQ ID NO: 3158960 - DNA, 25 bp, Homo sapien
aggcaaatgtgaaggatgactttct

SEQ ID NO: 3158961 - DNA, 25 bp, Homo sapien
ggatggtattgacatgcactgatgc

SEQ ID NO: 3158962 - DNA, 25 bp, Homo sapien
caaatgtgaaggatgactttcttgt

SEQ ID NO: 3158963 - DNA, 25 bp, Homo sapien
aacttggatggtattgacatgcact

SEQ ID NO: 3158964 - DNA, 25 bp, Homo sapien
acctcgcaggctttgtgaaaacacc

SEQ ID NO: 3158965 - DNA, 25 bp, Homo sapien
tatgcagttcagatgcccattggcc

SEQ ID NO: 3158966 - DNA, 25 bp, Homo sapien
gaatagagctacacagagaccggaa

SEQ ID NO: 3158967 - DNA, 25 bp, Homo sapien
gcagcgtcagtaaggttgtaatcag

SEQ ID NO: 3158968 - DNA, 25 bp, Homo sapien
cacagtccttgggtctaacgtgacg

SEQ ID NO: 3158969 - DNA, 25 bp, Homo sapien
tcctcatcgggcattttaagccact

SEQ ID NO: 3158970 - DNA, 25 bp, Homo sapien
taacgtgacgttccttgtttcctca

SEQ ID NO: 3158971 - DNA, 25 bp, Homo sapien
tactattgccgcttgctctgtccat

SEQ ID NO: 3158972 - DNA, 25 bp, Homo sapien
gtttgaatgagtactctgtgggaaa

SEQ ID NO: 3158973 - DNA, 25 bp, Homo sapien
tttgaatgagtactctgtgggaaag

SEQ ID NO: 3158974 - DNA, 25 bp, Homo sapien
caatgttcaggtgataggtctttgt

SEQ ID NO: 3158975 - DNA, 25 bp, Homo sapien
tcatcaatgttcaggtgataggtct

SEQ ID NO: 3158976 - DNA, 25 bp, Homo sapien
ttcaggtaagtcaggccaaagggga

SEQ ID NO: 3158977 - DNA, 25 bp, Homo sapien
tcttcaggtaagtcaggccaaaggg

SEQ ID NO: 3158978 - DNA, 25 bp, Homo sapien
tcaggtaagtcaggccaaaggggat

SEQ ID NO: 3158979 - DNA, 25 bp, Homo sapien
cttcaggtaagtcaggccaaagggg

SEQ ID NO: 3158980 - DNA, 25 bp, Homo sapien
ggtccgcccggagatcagtcgtgca

SEQ ID NO: 3158981 - DNA, 25 bp, Homo sapien
agtctttctggcgagagattcacca

SEQ ID NO: 3158982 - DNA, 25 bp, Homo sapien
caggtccgcccggagatcagtcgtg

SEQ ID NO: 3158983 - DNA, 25 bp, Homo sapien
tggcgagagattcaccacgtgcagt

SEQ ID NO: 3158984 - DNA, 25 bp, Homo sapien
cgagtcctgccgattccaattccaa

SEQ ID NO: 3158985 - DNA, 25 bp, Homo sapien
ggctgctccgaggacaaaggcgcca

SEQ ID NO: 3158986 - DNA, 25 bp, Homo sapien
gagtcctgccgattccaattccaat

SEQ ID NO: 3158987 - DNA, 25 bp, Homo sapien
ggacaaaggcgccagcagaggcccc

SEQ ID NO: 3158988 - DNA, 25 bp, Homo sapien
tctttttctctcctttccttgtcat

SEQ ID NO: 3158989 - DNA, 25 bp, Homo sapien
ctcctcaatctctttgtcctctttc

SEQ ID NO: 3158990 - DNA, 25 bp, Homo sapien
tctttgtcctctttctttttctctc

SEQ ID NO: 3158991 - DNA, 25 bp, Homo sapien
ttctttttctctcctttccttgtca

SEQ ID NO: 3158992 - DNA, 25 bp, Homo sapien
ttagccctttggcttggattggaga

SEQ ID NO: 3158993 - DNA, 25 bp, Homo sapien
tagccctttggcttggattggagac

SEQ ID NO: 3158994 - DNA, 25 bp, Homo sapien
tcccttggaggttaatttccagcat

SEQ ID NO: 3158995 - DNA, 25 bp, Homo sapien
ttcccttggaggttaatttccagca

SEQ ID NO: 3158996 - DNA, 25 bp, Homo sapien
cagtgcctagagtaaggagatttga

SEQ ID NO: 3158997 - DNA, 25 bp, Homo sapien
agtgcctagagtaaggagatttgaa

SEQ ID NO: 3158998 - DNA, 25 bp, Homo sapien
gattctcgttctctctatactgctg

SEQ ID NO: 3158999 - DNA, 25 bp, Homo sapien
caatcatcgcctaagttcagttcca

SEQ ID NO: 3159000 - DNA, 25 bp, Homo sapien
tactgctgtactttcactatcccac

SEQ ID NO: 3159001 - DNA, 25 bp, Homo sapien
tctctcaagtctagattctcgttct

SEQ ID NO: 3159002 - DNA, 25 bp, Homo sapien
actctttccaataatctaccactat

SEQ ID NO: 3159003 - DNA, 25 bp, Homo sapien
agggttcttgtcactaacctcatcc

SEQ ID NO: 3159004 - DNA, 25 bp, Homo sapien
tctttccaataatctaccactattt

SEQ ID NO: 3159005 - DNA, 25 bp, Homo sapien
gttcttgtcactaacctcatccatt

SEQ ID NO: 3159006 - DNA, 25 bp, Homo sapien
agctcattggtgcaaatgttgtgta

SEQ ID NO: 3159007 - DNA, 25 bp, Homo sapien
gctcattggtgcaaatgttgtgtac

SEQ ID NO: 3159008 - DNA, 25 bp, Homo sapien
cagctcattggtgcaaatgttgtgt

SEQ ID NO: 3159009 - DNA, 25 bp, Homo sapien
tttgcaatgactgcatccttactca

SEQ ID NO: 3159010 - DNA, 25 bp, Homo sapien
gactgcatccttactcaagatggat

SEQ ID NO: 3159011 - DNA, 25 bp, Homo sapien
gcaatgactgcatccttactcaaga

SEQ ID NO: 3159012 - DNA, 25 bp, Homo sapien
tggaatttgcaatgactgcatcctt

SEQ ID NO: 3159013 - DNA, 25 bp, Homo sapien
tcactgcttttcgatgggggatttt

SEQ ID NO: 3159014 - DNA, 25 bp, Homo sapien
gactatctatctctagcaagtccaa

SEQ ID NO: 3159015 - DNA, 25 bp, Homo sapien
ttttagttccccttgactatctatc

SEQ ID NO: 3159016 - DNA, 25 bp, Homo sapien
ctatctctagcaagtccaatgaaaa

SEQ ID NO: 3159017 - DNA, 25 bp, Homo sapien
tgtcactgaagcagcccacgtgatc

SEQ ID NO: 3159018 - DNA, 25 bp, Homo sapien
ccacgtgatctcttacaccctgtga

SEQ ID NO: 3159019 - DNA, 25 bp, Homo sapien
cacgtgatctcttacaccctgtgat

SEQ ID NO: 3159020 - DNA, 25 bp, Homo sapien
atccaaccacttaccgtgtcactga

SEQ ID NO: 3159021 - DNA, 25 bp, Homo sapien
ctctcataaaacctgatttcttggt

SEQ ID NO: 3159022 - DNA, 25 bp, Homo sapien
cctgatttcttggtaatcagcattt

SEQ ID NO: 3159023 - DNA, 25 bp, Homo sapien
tcttggtaatcagcatttctgacac

SEQ ID NO: 3159024 - DNA, 25 bp, Homo sapien
aaaacctgatttcttggtaatcagc

SEQ ID NO: 3159025 - DNA, 25 bp, Homo sapien
gcagcggggagggcatgtgccagga

SEQ ID NO: 3159026 - DNA, 25 bp, Homo sapien
cagcggggagggcatgtgccaggat

SEQ ID NO: 3159027 - DNA, 25 bp, Homo sapien
gcaggtttagctaacaaccgctccg

SEQ ID NO: 3159028 - DNA, 25 bp, Homo sapien
caggtttagctaacaaccgctccga

SEQ ID NO: 3159029 - DNA, 25 bp, Homo sapien
tccaaatctctgaagcgtttttcaa

SEQ ID NO: 3159030 - DNA, 25 bp, Homo sapien
aatgtggccactaggatgatatgaa

SEQ ID NO: 3159031 - DNA, 25 bp, Homo sapien
ggatgatatgaaatttccagggatc

SEQ ID NO: 3159032 - DNA, 25 bp, Homo sapien
gaagcgtttttcaaccacactgaac

SEQ ID NO: 3159033 - DNA, 25 bp, Homo sapien
tgacaggtattctgtctagccaaag

SEQ ID NO: 3159034 - DNA, 25 bp, Homo sapien
caaagggtcggcataatgtttggca

SEQ ID NO: 3159035 - DNA, 25 bp, Homo sapien
tgcaaacccacaaactctgtgaagt

SEQ ID NO: 3159036 - DNA, 25 bp, Homo sapien
cggcataatgtttggcaagaatcaa

SEQ ID NO: 3159037 - DNA, 25 bp, Homo sapien
tctgaactgccctcaggcttggaaa

SEQ ID NO: 3159038 - DNA, 25 bp, Homo sapien
caggcttggaaagcatgtggttcat

SEQ ID NO: 3159039 - DNA, 25 bp, Homo sapien
ttctgaactgccctcaggcttggaa

SEQ ID NO: 3159040 - DNA, 25 bp, Homo sapien
cttttctgaactgccctcaggcttg

SEQ ID NO: 3159041 - DNA, 25 bp, Homo sapien
cacaactgcttctcgaaaacatgag

SEQ ID NO: 3159042 - DNA, 25 bp, Homo sapien
gttgccaccacaactgcttctcgaa

SEQ ID NO: 3159043 - DNA, 25 bp, Homo sapien
agcaagaagcttcgctgcccacgtt

SEQ ID NO: 3159044 - DNA, 25 bp, Homo sapien
tttatcactatggaagctgtcacct

SEQ ID NO: 3159045 - DNA, 25 bp, Homo sapien
tcaatgtgttcactcaagtaattac

SEQ ID NO: 3159046 - DNA, 25 bp, Homo sapien
agtgctttttcaatgtgttcactca

SEQ ID NO: 3159047 - DNA, 25 bp, Homo sapien
tgtgttcactcaagtaattacatac

SEQ ID NO: 3159048 - DNA, 25 bp, Homo sapien
gctttttcaatgtgttcactcaagt

SEQ ID NO: 3159049 - DNA, 25 bp, Homo sapien
tgcctgctgaatcttaaatatgagc

SEQ ID NO: 3159050 - DNA, 25 bp, Homo sapien
aaatatgagcaactgctgagcttct

SEQ ID NO: 3159051 - DNA, 25 bp, Homo sapien
gcaactgctgagcttctgtttgctc

SEQ ID NO: 3159052 - DNA, 25 bp, Homo sapien
gtgtgcctgctgaatcttaaatatg

SEQ ID NO: 3159053 - DNA, 25 bp, Homo sapien
ggattggacctatagataatgtcaa

SEQ ID NO: 3159054 - DNA, 25 bp, Homo sapien
gacctatagataatgtcaaagcaga

SEQ ID NO: 3159055 - DNA, 25 bp, Homo sapien
ttgaggattggacctatagataatg

SEQ ID NO: 3159056 - DNA, 25 bp, Homo sapien
ttggacctatagataatgtcaaagc

SEQ ID NO: 3159057 - DNA, 25 bp, Homo sapien
tgtatcagtatctcttttactcact

SEQ ID NO: 3159058 - DNA, 25 bp, Homo sapien
gtaagtccactcacatttgtatcag

SEQ ID NO: 3159059 - DNA, 25 bp, Homo sapien
ttaagtcaatgtaagtccactcaca

SEQ ID NO: 3159060 - DNA, 25 bp, Homo sapien
cacatttgtatcagtatctctttta

SEQ ID NO: 3159061 - DNA, 25 bp, Homo sapien
tgtatatttgcggatactgtttaac

SEQ ID NO: 3159062 - DNA, 25 bp, Homo sapien
tatatttgcggatactgtttaacat

SEQ ID NO: 3159063 - DNA, 25 bp, Homo sapien
ccatgtgtatatttgcggatactgt

SEQ ID NO: 3159064 - DNA, 25 bp, Homo sapien
tctccatgtgtatatttgcggatac

SEQ ID NO: 3159065 - DNA, 25 bp, Homo sapien
ctggactcgtaaacctgctttctga

SEQ ID NO: 3159066 - DNA, 25 bp, Homo sapien
aatgatgtctcaaccacctcgtcca

SEQ ID NO: 3159067 - DNA, 25 bp, Homo sapien
cactaaagcaatgaatcaagggcaa

SEQ ID NO: 3159068 - DNA, 25 bp, Homo sapien
catcaatgatgtctcaaccacctcg

SEQ ID NO: 3159069 - DNA, 25 bp, Homo sapien
tctacttctttcaaatccacctcac

SEQ ID NO: 3159070 - DNA, 25 bp, Homo sapien
tacttctttcaaatccacctcaccc

SEQ ID NO: 3159071 - DNA, 25 bp, Homo sapien
cttctttcaaatccacctcacccat

SEQ ID NO: 3159072 - DNA, 25 bp, Homo sapien
acttctttcaaatccacctcaccca

SEQ ID NO: 3159073 - DNA, 25 bp, Homo sapien
ttttcaacttggtaatgtctacatt

SEQ ID NO: 3159074 - DNA, 25 bp, Homo sapien
acttggtaatgtctacatttaggag

SEQ ID NO: 3159075 - DNA, 25 bp, Homo sapien
aaaaaagctattgtggtttcatata

SEQ ID NO: 3159076 - DNA, 25 bp, Homo sapien
gtaatttactgcagtaatactgaaa

SEQ ID NO: 3159077 - DNA, 25 bp, Homo sapien
tatttcttcataagtcccggatatg

SEQ ID NO: 3159078 - DNA, 25 bp, Homo sapien
ttatttcttcataagtcccggatat

SEQ ID NO: 3159079 - DNA, 25 bp, Homo sapien
gaagcgaagccgcaaacgcctgtca

SEQ ID NO: 3159080 - DNA, 25 bp, Homo sapien
ccatgaagcgaagccgcaaacgcct

SEQ ID NO: 3159081 - DNA, 25 bp, Homo sapien
cgaagccgcaaacgcctgtcagctg

SEQ ID NO: 3159082 - DNA, 25 bp, Homo sapien
aagcgaagccgcaaacgcctgtcag

SEQ ID NO: 3159083 - DNA, 25 bp, Homo sapien
ctggatgccgtctccgcgtcacatg

SEQ ID NO: 3159084 - DNA, 25 bp, Homo sapien
ccggctgagaggctcgccccgcact

SEQ ID NO: 3159085 - DNA, 25 bp, Homo sapien
gctgagaggctcgccccgcactgga

SEQ ID NO: 3159086 - DNA, 25 bp, Homo sapien
cccgcactggatgccgtctccgcgt

SEQ ID NO: 3159087 - DNA, 25 bp, Homo sapien
cgaagagctcggccatcgtagccat

SEQ ID NO: 3159088 - DNA, 25 bp, Homo sapien
tccatgcaagacgttcaatatattc

SEQ ID NO: 3159089 - DNA, 25 bp, Homo sapien
atctgccacaaaagcctcctcgaag

SEQ ID NO: 3159090 - DNA, 25 bp, Homo sapien
gttctccatgcaagacgttcaatat

SEQ ID NO: 3159091 - DNA, 25 bp, Homo sapien
tcatccattatctggagttcctgaa

SEQ ID NO: 3159092 - DNA, 25 bp, Homo sapien
ttccaataatcttttaggatcaaaa

SEQ ID NO: 3159093 - DNA, 25 bp, Homo sapien
attcttccaataatcttttaggatc

SEQ ID NO: 3159094 - DNA, 25 bp, Homo sapien
gaatcctttcatccattatctggag

SEQ ID NO: 3159095 - DNA, 25 bp, Homo sapien
ttcttggcaaattccttggcttctt

SEQ ID NO: 3159096 - DNA, 25 bp, Homo sapien
ttggcaaattccttggcttctttct

SEQ ID NO: 3159097 - DNA, 25 bp, Homo sapien
gcaaattccttggcttctttctgac

SEQ ID NO: 3159098 - DNA, 25 bp, Homo sapien
cttcttggcaaattccttggcttct

SEQ ID NO: 3159099 - DNA, 25 bp, Homo sapien
tgctacatagctaatgtgctcatct

SEQ ID NO: 3159100 - DNA, 25 bp, Homo sapien
agctaatgtgctcatctagttcttg

SEQ ID NO: 3159101 - DNA, 25 bp, Homo sapien
catagctaatgtgctcatctagttc

SEQ ID NO: 3159102 - DNA, 25 bp, Homo sapien
tacatagctaatgtgctcatctagt

SEQ ID NO: 3159103 - DNA, 25 bp, Homo sapien
tgtctgggtgtgtttacccctctaa

SEQ ID NO: 3159104 - DNA, 25 bp, Homo sapien
ctgcccattgtctgggtgtgtttac

SEQ ID NO: 3159105 - DNA, 25 bp, Homo sapien
ccattgtctgggtgtgtttacccct

SEQ ID NO: 3159106 - DNA, 25 bp, Homo sapien
cattgtctgggtgtgtttacccctc

SEQ ID NO: 3159107 - DNA, 25 bp, Homo sapien
tttgtatagacatcaacacaaaggg

SEQ ID NO: 3159108 - DNA, 25 bp, Homo sapien
gctttgtatagacatcaacacaaag

SEQ ID NO: 3159109 - DNA, 25 bp, Homo sapien
tgctttgtatagacatcaacacaaa

SEQ ID NO: 3159110 - DNA, 25 bp, Homo sapien
tcgttgacagagtattgcagcatct

SEQ ID NO: 3159111 - DNA, 25 bp, Homo sapien
taagtttagccaggactatttctgg

SEQ ID NO: 3159112 - DNA, 25 bp, Homo sapien
tactgaagatatctccaactcgttt

SEQ ID NO: 3159113 - DNA, 25 bp, Homo sapien
caggactatttctgggttactgaag

SEQ ID NO: 3159114 - DNA, 25 bp, Homo sapien
ttttgaataagtttagccaggacta

SEQ ID NO: 3159115 - DNA, 25 bp, Homo sapien
gcgctgtaggatcatagcacttctg

SEQ ID NO: 3159116 - DNA, 25 bp, Homo sapien
tgtgccaatggatctcttttgatgg

SEQ ID NO: 3159117 - DNA, 25 bp, Homo sapien
tttcgaatcataatagcgctgtagg

SEQ ID NO: 3159118 - DNA, 25 bp, Homo sapien
gtctccacctcaatatagttctcca

SEQ ID NO: 3159119 - DNA, 25 bp, Homo sapien
tcagctacatcgcaaactgccaaca

SEQ ID NO: 3159120 - DNA, 25 bp, Homo sapien
tacatcgcaaactgccaacatgcca

SEQ ID NO: 3159121 - DNA, 25 bp, Homo sapien
tattcagctacatcgcaaactgcca

SEQ ID NO: 3159122 - DNA, 25 bp, Homo sapien
tcctatattcagctacatcgcaaac

SEQ ID NO: 3159123 - DNA, 25 bp, Homo sapien
ccattaattatgtacaagtaggaat

SEQ ID NO: 3159124 - DNA, 25 bp, Homo sapien
actcaattatgacaaaagttagcat

SEQ ID NO: 3159125 - DNA, 25 bp, Homo sapien
aaatactcaattatgacaaaagtta

SEQ ID NO: 3159126 - DNA, 25 bp, Homo sapien
tactcaattatgacaaaagttagca

SEQ ID NO: 3159127 - DNA, 25 bp, Homo sapien
atactcaattatgacaaaagttagc

SEQ ID NO: 3159128 - DNA, 25 bp, Homo sapien
tcctgattcaacaagtggcaaattc

SEQ ID NO: 3159129 - DNA, 25 bp, Homo sapien
aatcctgattcaacaagtggcaaat

SEQ ID NO: 3159130 - DNA, 25 bp, Homo sapien
caacaagtggcaaattctgacagaa

SEQ ID NO: 3159131 - DNA, 25 bp, Homo sapien
gattcaacaagtggcaaattctgac

SEQ ID NO: 3159132 - DNA, 25 bp, Homo sapien
accaccacggagcagcgtacataaa

SEQ ID NO: 3159133 - DNA, 25 bp, Homo sapien
catttaaccatcacgtgagtcacat

SEQ ID NO: 3159134 - DNA, 25 bp, Homo sapien
aagggaagcatggaacaataaagtt

SEQ ID NO: 3159135 - DNA, 25 bp, Homo sapien
aaggccagagttaccctgacaggtc

SEQ ID NO: 3159136 - DNA, 25 bp, Homo sapien
gaatgtggttgtaatgcttcaggca

SEQ ID NO: 3159137 - DNA, 25 bp, Homo sapien
aatgtggttgtaatgcttcaggcat

SEQ ID NO: 3159138 - DNA, 25 bp, Homo sapien
taaataaaagttaggaggtgcaata

SEQ ID NO: 3159139 - DNA, 25 bp, Homo sapien
taaaagttaggaggtgcaatattac

SEQ ID NO: 3159140 - DNA, 25 bp, Homo sapien
ttaggaggtgcaatattacttttta

SEQ ID NO: 3159141 - DNA, 25 bp, Homo sapien
aaagttaggaggtgcaatattactt

SEQ ID NO: 3159142 - DNA, 25 bp, Homo sapien
ctgaggcttagggattgtatttgaa

SEQ ID NO: 3159143 - DNA, 25 bp, Homo sapien
actgaggcttagggattgtatttga

SEQ ID NO: 3159144 - DNA, 25 bp, Homo sapien
aggcttagggattgtatttgaaggg

SEQ ID NO: 3159145 - DNA, 25 bp, Homo sapien
tgaggcttagggattgtatttgaag

SEQ ID NO: 3159146 - DNA, 25 bp, Homo sapien
cccatttgccactataggaatatgc

SEQ ID NO: 3159147 - DNA, 25 bp, Homo sapien
catttgccactataggaatatgcac

SEQ ID NO: 3159148 - DNA, 25 bp, Homo sapien
cccccatttgccactataggaatat

SEQ ID NO: 3159149 - DNA, 25 bp, Homo sapien
ttacccccatttgccactataggaa

SEQ ID NO: 3159150 - DNA, 25 bp, Homo sapien
tataaatgtccatgagggaggattt

SEQ ID NO: 3159151 - DNA, 25 bp, Homo sapien
gtcttcatataaatgtccatgaggg

SEQ ID NO: 3159152 - DNA, 25 bp, Homo sapien
tttctgtgtcttcatataaatgtcc

SEQ ID NO: 3159153 - DNA, 25 bp, Homo sapien
catataaatgtccatgagggaggat

SEQ ID NO: 3159154 - DNA, 25 bp, Homo sapien
caatggggtcatctttaacataggc

SEQ ID NO: 3159155 - DNA, 25 bp, Homo sapien
ttctaaggcaagattggtagggctg

SEQ ID NO: 3159156 - DNA, 25 bp, Homo sapien
catcctttaactcaagcagggtaga

SEQ ID NO: 3159157 - DNA, 25 bp, Homo sapien
taggcaaggctgatgtcataatttc

SEQ ID NO: 3159158 - DNA, 25 bp, Homo sapien
tcagtgttttgcaaaatatgcctga

SEQ ID NO: 3159159 - DNA, 25 bp, Homo sapien
cagtgttttgcaaaatatgcctgac

SEQ ID NO: 3159160 - DNA, 25 bp, Homo sapien
catgtaggattcttgaattctggac

SEQ ID NO: 3159161 - DNA, 25 bp, Homo sapien
ctgtacagaatgcttgttgcaagga

SEQ ID NO: 3159162 - DNA, 25 bp, Homo sapien
tttgcaaaacataattactgtacag

SEQ ID NO: 3159163 - DNA, 25 bp, Homo sapien
ctgaagaacatctagtttgcaaaac

SEQ ID NO: 3159164 - DNA, 25 bp, Homo sapien
tagcaatgttaagtccagtagcaat

SEQ ID NO: 3159165 - DNA, 25 bp, Homo sapien
cacagtgcactactcaatttgacag

SEQ ID NO: 3159166 - DNA, 25 bp, Homo sapien
catcctgtggtcttgaaacatggct

SEQ ID NO: 3159167 - DNA, 25 bp, Homo sapien
gatagtgacatacagttctctccaa

SEQ ID NO: 3159168 - DNA, 25 bp, Homo sapien
aggtctaaccagaaaccgatgaaag

SEQ ID NO: 3159169 - DNA, 25 bp, Homo sapien
taaccagaaaccgatgaaagcattt

SEQ ID NO: 3159170 - DNA, 25 bp, Homo sapien
tctaaccagaaaccgatgaaagcat

SEQ ID NO: 3159171 - DNA, 25 bp, Homo sapien
gtctaaccagaaaccgatgaaagca

SEQ ID NO: 3159172 - DNA, 25 bp, Homo sapien
tccagtgtgatctttgtagggaatg

SEQ ID NO: 3159173 - DNA, 25 bp, Homo sapien
tgataacagctgtaactgattttct

SEQ ID NO: 3159174 - DNA, 25 bp, Homo sapien
attgcaagtccttttcgtagttttg

SEQ ID NO: 3159175 - DNA, 25 bp, Homo sapien
aatcagcctccttatcaacactgta

SEQ ID NO: 3159176 - DNA, 25 bp, Homo sapien
tgtaacaggatccatctggttcctc

SEQ ID NO: 3159177 - DNA, 25 bp, Homo sapien
ctgtaacaggatccatctggttcct

SEQ ID NO: 3159178 - DNA, 25 bp, Homo sapien
aggggcatgggcagtccacgcacat

SEQ ID NO: 3159179 - DNA, 25 bp, Homo sapien
caggggcatgggcagtccacgcaca

SEQ ID NO: 3159180 - DNA, 25 bp, Homo sapien
agagccagacaccaagcgccgggag

SEQ ID NO: 3159181 - DNA, 25 bp, Homo sapien
tgccggcccaatcctctcggcagcg

SEQ ID NO: 3159182 - DNA, 25 bp, Homo sapien
gggagccccaaccagtagccctgag

SEQ ID NO: 3159183 - DNA, 25 bp, Homo sapien
agggcaccgactggctccggctggg

SEQ ID NO: 3159184 - DNA, 25 bp, Homo sapien
tagtgagcaaatatcgtccctctgc

SEQ ID NO: 3159185 - DNA, 25 bp, Homo sapien
ggcagacaccgggtagtgagcaaat

SEQ ID NO: 3159186 - DNA, 25 bp, Homo sapien
agggagcccaacttgcccgtctcac

SEQ ID NO: 3159187 - DNA, 25 bp, Homo sapien
agaatgagcggcagacaccgggtag

SEQ ID NO: 3159188 - DNA, 25 bp, Homo sapien
ggccggttcaccctggccaacagcg

SEQ ID NO: 3159189 - DNA, 25 bp, Homo sapien
gggcatgctgcgtgtaggcaccacc

SEQ ID NO: 3159190 - DNA, 25 bp, Homo sapien
gtgtaggcaccaccagggaggatgg

SEQ ID NO: 3159191 - DNA, 25 bp, Homo sapien
actttgccctcatgttcggccaggg

SEQ ID NO: 3159192 - DNA, 25 bp, Homo sapien
ttgtgcgccagatgcagcgccaagg

SEQ ID NO: 3159193 - DNA, 25 bp, Homo sapien
gccttgtgcgccagatgcagcgcca

SEQ ID NO: 3159194 - DNA, 25 bp, Homo sapien
gcgccttgtgcgccagatgcagcgc

SEQ ID NO: 3159195 - DNA, 25 bp, Homo sapien
ccttgtgcgccagatgcagcgccaa

SEQ ID NO: 3159196 - DNA, 25 bp, Homo sapien
tgcctccagggtttccagcgctggc

SEQ ID NO: 3159197 - DNA, 25 bp, Homo sapien
gagggaaccgaactctgcctccagg

SEQ ID NO: 3159198 - DNA, 25 bp, Homo sapien
cgcttttccttagggccagctgccg

SEQ ID NO: 3159199 - DNA, 25 bp, Homo sapien
ggtgttcgccaattctccatatcct

SEQ ID NO: 3159200 - DNA, 25 bp, Homo sapien
gctttttatttccttggctgaggac

SEQ ID NO: 3159201 - DNA, 25 bp, Homo sapien
cttggctgaggacgctctgatatcc

SEQ ID NO: 3159202 - DNA, 25 bp, Homo sapien
tttccttggctgaggacgctctgat

SEQ ID NO: 3159203 - DNA, 25 bp, Homo sapien
tgatatccagtgttcactaattcac

SEQ ID NO: 3159204 - DNA, 25 bp, Homo sapien
ctgtaccatcatcatagtaatacat

SEQ ID NO: 3159205 - DNA, 25 bp, Homo sapien
ccatcatcatagtaatacatcatac

SEQ ID NO: 3159206 - DNA, 25 bp, Homo sapien
gtaatacatcatactggtattaagt

SEQ ID NO: 3159207 - DNA, 25 bp, Homo sapien
tagtaatacatcatactggtattaa

SEQ ID NO: 3159208 - DNA, 25 bp, Homo sapien
cagtgcctctgtgataaggtttgta

SEQ ID NO: 3159209 - DNA, 25 bp, Homo sapien
cgaagaaagtagtctctttccgaat

SEQ ID NO: 3159210 - DNA, 25 bp, Homo sapien
tgttcacccctctttcctcgaagaa

SEQ ID NO: 3159211 - DNA, 25 bp, Homo sapien
gagaagtctgtttgtggtacgttgc

SEQ ID NO: 3159212 - DNA, 25 bp, Homo sapien
cttaacatttagagctgaatactta

SEQ ID NO: 3159213 - DNA, 25 bp, Homo sapien
gatgctcacataattggcatcctta

SEQ ID NO: 3159214 - DNA, 25 bp, Homo sapien
tgaataaaatgtcaggacctaactc

SEQ ID NO: 3159215 - DNA, 25 bp, Homo sapien
tgaattaacacttccaccattaatg

SEQ ID NO: 3159216 - DNA, 25 bp, Homo sapien
gccatttggcctgttaaggaacaaa

SEQ ID NO: 3159217 - DNA, 25 bp, Homo sapien
tatcatctacaacgctgacctgtgt

SEQ ID NO: 3159218 - DNA, 25 bp, Homo sapien
gaatttacacctgcagccatttggc

SEQ ID NO: 3159219 - DNA, 25 bp, Homo sapien
tccatgagccgatagaatttctaac

SEQ ID NO: 3159220 - DNA, 25 bp, Homo sapien
agcaattgaattgcgcattgttacc

SEQ ID NO: 3159221 - DNA, 25 bp, Homo sapien
tgtgccagtgctgttgattgaaaac

SEQ ID NO: 3159222 - DNA, 25 bp, Homo sapien
taccaattttagcagtctgctgtgc

SEQ ID NO: 3159223 - DNA, 25 bp, Homo sapien
ttggaagcttgagtaaatctcagca

SEQ ID NO: 3159224 - DNA, 25 bp, Homo sapien
ttgaggtcatttttacaatttgaac

SEQ ID NO: 3159225 - DNA, 25 bp, Homo sapien
cacgaattatatgagcgtacttcat

SEQ ID NO: 3159226 - DNA, 25 bp, Homo sapien
caatttgaacacgaattatatgagc

SEQ ID NO: 3159227 - DNA, 25 bp, Homo sapien
ggtcatttttacaatttgaacacga

SEQ ID NO: 3159228 - DNA, 25 bp, Homo sapien
tgcagcagtaagaaagacatctaac

SEQ ID NO: 3159229 - DNA, 25 bp, Homo sapien
ggtagtctaactctttgtattcttg

SEQ ID NO: 3159230 - DNA, 25 bp, Homo sapien
tactatacatcttgctaggttttgc

SEQ ID NO: 3159231 - DNA, 25 bp, Homo sapien
tgaaagaatacagcatctttctgtt

SEQ ID NO: 3159232 - DNA, 25 bp, Homo sapien
ctttagacccagatactgcgttctg

SEQ ID NO: 3159233 - DNA, 25 bp, Homo sapien
gatactgcgttctgctcttattcat

SEQ ID NO: 3159234 - DNA, 25 bp, Homo sapien
cccagatactgcgttctgctcttat

SEQ ID NO: 3159235 - DNA, 25 bp, Homo sapien
tagacccagatactgcgttctgctc

SEQ ID NO: 3159236 - DNA, 25 bp, Homo sapien
tcaccttacatccaccagatggcag

SEQ ID NO: 3159237 - DNA, 25 bp, Homo sapien
tatttccctccatgtttctgataag

SEQ ID NO: 3159238 - DNA, 25 bp, Homo sapien
tctccttgtgtaaacatccattgct

SEQ ID NO: 3159239 - DNA, 25 bp, Homo sapien
cagatggcaggttatgcttacttcg

SEQ ID NO: 3159240 - DNA, 25 bp, Homo sapien
aacttctttctcacgtttgtatgac

SEQ ID NO: 3159241 - DNA, 25 bp, Homo sapien
cgtttgtatgacttcttcagattca

SEQ ID NO: 3159242 - DNA, 25 bp, Homo sapien
tctcaacttctttctcacgtttgta

SEQ ID NO: 3159243 - DNA, 25 bp, Homo sapien
tctcacgtttgtatgacttcttcag

SEQ ID NO: 3159244 - DNA, 25 bp, Homo sapien
agacttttcaaacacagcattttct

SEQ ID NO: 3159245 - DNA, 25 bp, Homo sapien
tttcaacagacttttcaaacacagc

SEQ ID NO: 3159246 - DNA, 25 bp, Homo sapien
cttttcaaacacagcattttcttac

SEQ ID NO: 3159247 - DNA, 25 bp, Homo sapien
ctttcaacagacttttcaaacacag

SEQ ID NO: 3159248 - DNA, 25 bp, Homo sapien
tgataactggccaaaaaactcatct

SEQ ID NO: 3159249 - DNA, 25 bp, Homo sapien
tattaagccttggagcacattcaac

SEQ ID NO: 3159250 - DNA, 25 bp, Homo sapien
ggctggacaagagagtacatagaca

SEQ ID NO: 3159251 - DNA, 25 bp, Homo sapien
tacacagtattgagcccatcagcaa

SEQ ID NO: 3159252 - DNA, 25 bp, Homo sapien
tgacagtccgaaataaaaaccactg

SEQ ID NO: 3159253 - DNA, 25 bp, Homo sapien
ctgagttataccattccctttgaca

SEQ ID NO: 3159254 - DNA, 25 bp, Homo sapien
agttataccattccctttgacagtc

SEQ ID NO: 3159255 - DNA, 25 bp, Homo sapien
taaaaaccactgacccttgacattc

SEQ ID NO: 3159256 - DNA, 25 bp, Homo sapien
catttggctgcatctgaatattcat

SEQ ID NO: 3159257 - DNA, 25 bp, Homo sapien
agagaaggagcaggatcatttggct

SEQ ID NO: 3159258 - DNA, 25 bp, Homo sapien
gaaggagcaggatcatttggctgca

SEQ ID NO: 3159259 - DNA, 25 bp, Homo sapien
gcaggatcatttggctgcatctgaa

SEQ ID NO: 3159260 - DNA, 25 bp, Homo sapien
aggaacaattcgtgtgttggcttcc

SEQ ID NO: 3159261 - DNA, 25 bp, Homo sapien
ggaacaattcgtgtgttggcttcct

SEQ ID NO: 3159262 - DNA, 25 bp, Homo sapien
caaggaacaattcgtgtgttggctt

SEQ ID NO: 3159263 - DNA, 25 bp, Homo sapien
aaggaacaattcgtgtgttggcttc

SEQ ID NO: 3159264 - DNA, 25 bp, Homo sapien
caaagttgtagagtttgctgacatc

SEQ ID NO: 3159265 - DNA, 25 bp, Homo sapien
gcataaccttatgaagatcaaagtt

SEQ ID NO: 3159266 - DNA, 25 bp, Homo sapien
acagctgtcccattaatttcaaaag

SEQ ID NO: 3159267 - DNA, 25 bp, Homo sapien
gcttcacagcagaacttattactcc

SEQ ID NO: 3159268 - DNA, 25 bp, Homo sapien
ccaagaaagaagtcaatatctactt

SEQ ID NO: 3159269 - DNA, 25 bp, Homo sapien
gaatttaccaagaaagaagtcaata

SEQ ID NO: 3159270 - DNA, 25 bp, Homo sapien
tttaccaagaaagaagtcaatatct

SEQ ID NO: 3159271 - DNA, 25 bp, Homo sapien
gaaagaagtcaatatctacttttgc

SEQ ID NO: 3159272 - DNA, 25 bp, Homo sapien
cacccaagacccctggagaaaactg

SEQ ID NO: 3159273 - DNA, 25 bp, Homo sapien
tcaattgtagcagccttcacccaag

SEQ ID NO: 3159274 - DNA, 25 bp, Homo sapien
actgatgttcaagagtagaatttct

SEQ ID NO: 3159275 - DNA, 25 bp, Homo sapien
gagaaaactgatgttcaagagtaga

SEQ ID NO: 3159276 - DNA, 25 bp, Homo sapien
tctgctattactgcagttgctaatc

SEQ ID NO: 3159277 - DNA, 25 bp, Homo sapien
tgtttacttaagatttcaatgagaa

SEQ ID NO: 3159278 - DNA, 25 bp, Homo sapien
gggaatcctgatgaagttgggcccc

SEQ ID NO: 3159279 - DNA, 25 bp, Homo sapien
ccccagaagtgttggcgctcttcac

SEQ ID NO: 3159280 - DNA, 25 bp, Homo sapien
gatcgggatggtgtcaccacccaca

SEQ ID NO: 3159281 - DNA, 25 bp, Homo sapien
tcactttcacagtccgatgatcggg

SEQ ID NO: 3159282 - DNA, 25 bp, Homo sapien
gaaattgttcatgtaagaaggcccc

SEQ ID NO: 3159283 - DNA, 25 bp, Homo sapien
tgtggtcctcatttgcagtggagtg

SEQ ID NO: 3159284 - DNA, 25 bp, Homo sapien
tgactagcaatgtaatcaactcaag

SEQ ID NO: 3159285 - DNA, 25 bp, Homo sapien
aatgctgttgtagtttgtggtcctc

SEQ ID NO: 3159286 - DNA, 25 bp, Homo sapien
tcagatatgttcgggtatcacaaat

SEQ ID NO: 3159287 - DNA, 25 bp, Homo sapien
accattaaatcattagaaatttcag

SEQ ID NO: 3159288 - DNA, 25 bp, Homo sapien
cattaaatcattagaaatttcagct

SEQ ID NO: 3159289 - DNA, 25 bp, Homo sapien
ttcagcttcatcacttggataagca

SEQ ID NO: 3159290 - DNA, 25 bp, Homo sapien
aaatttcagcttcatcacttggata

SEQ ID NO: 3159291 - DNA, 25 bp, Homo sapien
gtccaggctagacactctaatgtca

SEQ ID NO: 3159292 - DNA, 25 bp, Homo sapien
gaggcctgtagcagcccagccaggc

SEQ ID NO: 3159293 - DNA, 25 bp, Homo sapien
ctcaggggaggcctgtagcagccca

SEQ ID NO: 3159294 - DNA, 25 bp, Homo sapien
aatgtcattgggcaagttgtcctgg

SEQ ID NO: 3159295 - DNA, 25 bp, Homo sapien
acttctcttgatacttcttctcggt

SEQ ID NO: 3159296 - DNA, 25 bp, Homo sapien
tgatacttcttctcggtaaggccct

SEQ ID NO: 3159297 - DNA, 25 bp, Homo sapien
tcttctcggtaaggcccttggccaa

SEQ ID NO: 3159298 - DNA, 25 bp, Homo sapien
tcttgatacttcttctcggtaaggc

SEQ ID NO: 3159299 - DNA, 25 bp, Homo sapien
ctagcctgaagtgtcgaagccttag

SEQ ID NO: 3159300 - DNA, 25 bp, Homo sapien
tgaagtgtcgaagccttagctccag

SEQ ID NO: 3159301 - DNA, 25 bp, Homo sapien
cagaggcccctggtcggcctcactc

SEQ ID NO: 3159302 - DNA, 25 bp, Homo sapien
tggtcggcctcactcctaggatcac

SEQ ID NO: 3159303 - DNA, 25 bp, Homo sapien
agccaggtgttgtaggatctgaggt

SEQ ID NO: 3159304 - DNA, 25 bp, Homo sapien
aagagccaggtgttgtaggatctga

SEQ ID NO: 3159305 - DNA, 25 bp, Homo sapien
tctttgaagagccaggtgttgtagg

SEQ ID NO: 3159306 - DNA, 25 bp, Homo sapien
tgaagagccaggtgttgtaggatct

SEQ ID NO: 3159307 - DNA, 25 bp, Homo sapien
ctcatagtcgggcttcccttctccg

SEQ ID NO: 3159308 - DNA, 25 bp, Homo sapien
tagtcgggcttcccttctccgttga

SEQ ID NO: 3159309 - DNA, 25 bp, Homo sapien
catagtcgggcttcccttctccgtt

SEQ ID NO: 3159310 - DNA, 25 bp, Homo sapien
tcatagtcgggcttcccttctccgt

SEQ ID NO: 3159311 - DNA, 25 bp, Homo sapien
gcttccccggaattcgtagctcttc

SEQ ID NO: 3159312 - DNA, 25 bp, Homo sapien
tccccggaattcgtagctcttcagc

SEQ ID NO: 3159313 - DNA, 25 bp, Homo sapien
ttccccggaattcgtagctcttcag

SEQ ID NO: 3159314 - DNA, 25 bp, Homo sapien
atggcttccccggaattcgtagctc

SEQ ID NO: 3159315 - DNA, 25 bp, Homo sapien
cttggctttctccatctgctccact

SEQ ID NO: 3159316 - DNA, 25 bp, Homo sapien
tggctttctccatctgctccactgc

SEQ ID NO: 3159317 - DNA, 25 bp, Homo sapien
ctttctccatctgctccactgcctt

SEQ ID NO: 3159318 - DNA, 25 bp, Homo sapien
gctttctccatctgctccactgcct

SEQ ID NO: 3159319 - DNA, 25 bp, Homo sapien
aagcactgtgtatactgggccagca

SEQ ID NO: 3159320 - DNA, 25 bp, Homo sapien
ctagaaacaggagcccctattgtgg

SEQ ID NO: 3159321 - DNA, 25 bp, Homo sapien
aacaggagcccctattgtgggcctc

SEQ ID NO: 3159322 - DNA, 25 bp, Homo sapien
cctggtagccgttggctgcatatgc

SEQ ID NO: 3159323 - DNA, 25 bp, Homo sapien
gccttgttcactatggctacgaaac

SEQ ID NO: 3159324 - DNA, 25 bp, Homo sapien
tggccaccagccgctcaaacttgac

SEQ ID NO: 3159325 - DNA, 25 bp, Homo sapien
ggccaccagccgctcaaacttgacg

SEQ ID NO: 3159326 - DNA, 25 bp, Homo sapien
caccagccgctcaaacttgacgctc

SEQ ID NO: 3159327 - DNA, 25 bp, Homo sapien
tctgcgctggccaccagccgctcaa

SEQ ID NO: 3159328 - DNA, 25 bp, Homo sapien
cagaaccagcgaagtcaagaacatc

SEQ ID NO: 3159329 - DNA, 25 bp, Homo sapien
gccagaaccagcgaagtcaagaaca

SEQ ID NO: 3159330 - DNA, 25 bp, Homo sapien
gaaccagcgaagtcaagaacatcct

SEQ ID NO: 3159331 - DNA, 25 bp, Homo sapien
gatgccagaaccagcgaagtcaaga

SEQ ID NO: 3159332 - DNA, 25 bp, Homo sapien
ctcctccaggaaggtgagcttatcc

SEQ ID NO: 3159333 - DNA, 25 bp, Homo sapien
cctccaggaaggtgagcttatcctg

SEQ ID NO: 3159334 - DNA, 25 bp, Homo sapien
cagaggatgtacaggtccttgtcat

SEQ ID NO: 3159335 - DNA, 25 bp, Homo sapien
acaggtccttgtcattctcctccag

SEQ ID NO: 3159336 - DNA, 25 bp, Homo sapien
tcctggtcaaagttgaatgctcctt

SEQ ID NO: 3159337 - DNA, 25 bp, Homo sapien
tctgaatctgctctccagtctctgg

SEQ ID NO: 3159338 - DNA, 25 bp, Homo sapien
aatctgctctccagtctctgggttg

SEQ ID NO: 3159339 - DNA, 25 bp, Homo sapien
gctctccagtctctgggttgatcac

SEQ ID NO: 3159340 - DNA, 25 bp, Homo sapien
ctgctctccagtctctgggttgatc

SEQ ID NO: 3159341 - DNA, 25 bp, Homo sapien
tggcactcttcgtaggtggagtcga

SEQ ID NO: 3159342 - DNA, 25 bp, Homo sapien
gcctggcactcttcgtaggtggagt

SEQ ID NO: 3159343 - DNA, 25 bp, Homo sapien
cctggcactcttcgtaggtggagtc

SEQ ID NO: 3159344 - DNA, 25 bp, Homo sapien
ctggcactcttcgtaggtggagtcg

SEQ ID NO: 3159345 - DNA, 25 bp, Homo sapien
ggagtgatggtaatgagtccgtcac

SEQ ID NO: 3159346 - DNA, 25 bp, Homo sapien
tgatggtaatgagtccgtcactagc

SEQ ID NO: 3159347 - DNA, 25 bp, Homo sapien
taatgagtccgtcactagcctcctg

SEQ ID NO: 3159348 - DNA, 25 bp, Homo sapien
cgtcactagcctcctgtttactttt

SEQ ID NO: 3159349 - DNA, 25 bp, Homo sapien
ctggcatccgggtgtccatcagagc

SEQ ID NO: 3159350 - DNA, 25 bp, Homo sapien
accctggcatccgggtgtccatcag

SEQ ID NO: 3159351 - DNA, 25 bp, Homo sapien
ggaccctggcatccgggtgtccatc

SEQ ID NO: 3159352 - DNA, 25 bp, Homo sapien
gcagtcgaggcggaccctggcatcc

SEQ ID NO: 3159353 - DNA, 25 bp, Homo sapien
cctctagggcaggtttgcccccaga

SEQ ID NO: 3159354 - DNA, 25 bp, Homo sapien
ggcaggtttgcccccagaccggatc

SEQ ID NO: 3159355 - DNA, 25 bp, Homo sapien
ccctctagggcaggtttgcccccag

SEQ ID NO: 3159356 - DNA, 25 bp, Homo sapien
tgtacatggcccactctccggccac

SEQ ID NO: 3159357 - DNA, 25 bp, Homo sapien
tacatggcccactctccggccacat

SEQ ID NO: 3159358 - DNA, 25 bp, Homo sapien
ttgtacatggcccactctccggcca

SEQ ID NO: 3159359 - DNA, 25 bp, Homo sapien
cgcttgtacatggcccactctccgg

SEQ ID NO: 3159360 - DNA, 25 bp, Homo sapien
ctgagattccttacgctgacgtacc

SEQ ID NO: 3159361 - DNA, 25 bp, Homo sapien
ggagaaggatccgatgatgccagca

SEQ ID NO: 3159362 - DNA, 25 bp, Homo sapien
aatgctcggagaaggatccgatgat

SEQ ID NO: 3159363 - DNA, 25 bp, Homo sapien
tgacgtaccttgtccctgagggtga

SEQ ID NO: 3159364 - DNA, 25 bp, Homo sapien
agggtgagcgttgacaggaaatctc

SEQ ID NO: 3159365 - DNA, 25 bp, Homo sapien
ggtgagcgttgacaggaaatctctg

SEQ ID NO: 3159366 - DNA, 25 bp, Homo sapien
tgatggacccacctcagaggagtga

SEQ ID NO: 3159367 - DNA, 25 bp, Homo sapien
ccacctcagaggagtgaactgaggg

SEQ ID NO: 3159368 - DNA, 25 bp, Homo sapien
acaatggcttttgggatcttttctc

SEQ ID NO: 3159369 - DNA, 25 bp, Homo sapien
aagatgtaaaagtctctactccctg

SEQ ID NO: 3159370 - DNA, 25 bp, Homo sapien
gcttctaacaatggcttttgggatc

SEQ ID NO: 3159371 - DNA, 25 bp, Homo sapien
taaaagtctctactccctgtattaa

SEQ ID NO: 3159372 - DNA, 25 bp, Homo sapien
tctggggtagaacctgtgagcaaca

SEQ ID NO: 3159373 - DNA, 25 bp, Homo sapien
tctaagagattctccagtttctggg

SEQ ID NO: 3159374 - DNA, 25 bp, Homo sapien
gattctccagtttctggggtagaac

SEQ ID NO: 3159375 - DNA, 25 bp, Homo sapien
ccagtttctggggtagaacctgtga

SEQ ID NO: 3159376 - DNA, 25 bp, Homo sapien
gacagccagccctttgtgtggacat

SEQ ID NO: 3159377 - DNA, 25 bp, Homo sapien
gatcaaattctgtgagcttgtcaat

SEQ ID NO: 3159378 - DNA, 25 bp, Homo sapien
tctttctcggtttgcatcaagtgct

SEQ ID NO: 3159379 - DNA, 25 bp, Homo sapien
caagtgctctgaagtgatcaaattc

SEQ ID NO: 3159380 - DNA, 25 bp, Homo sapien
ctttaatcacttttccggctttgtg

SEQ ID NO: 3159381 - DNA, 25 bp, Homo sapien
tcacttttccggctttgtgaaagga

SEQ ID NO: 3159382 - DNA, 25 bp, Homo sapien
aatcacttttccggctttgtgaaag

SEQ ID NO: 3159383 - DNA, 25 bp, Homo sapien
ttaatcacttttccggctttgtgaa

SEQ ID NO: 3159384 - DNA, 25 bp, Homo sapien
tttgatcatctcaatgccttcactc

SEQ ID NO: 3159385 - DNA, 25 bp, Homo sapien
gatcatctcaatgccttcactcttc

SEQ ID NO: 3159386 - DNA, 25 bp, Homo sapien
ctgtctttgatcatctcaatgcctt

SEQ ID NO: 3159387 - DNA, 25 bp, Homo sapien
tgtctttgatcatctcaatgccttc

SEQ ID NO: 3159388 - DNA, 25 bp, Homo sapien
tatgatactttatacccaaggtgtg

SEQ ID NO: 3159389 - DNA, 25 bp, Homo sapien
cccaaggtgtgctgtatgggacgat

SEQ ID NO: 3159390 - DNA, 25 bp, Homo sapien
tgtatgggacgattgtctgaggaca

SEQ ID NO: 3159391 - DNA, 25 bp, Homo sapien
tcacctggaatagtgcaggattatg

SEQ ID NO: 3159392 - DNA, 25 bp, Homo sapien
gtttctcccttttcacatcaaagac

SEQ ID NO: 3159393 - DNA, 25 bp, Homo sapien
ctgttaaattcttgatttggtttct

SEQ ID NO: 3159394 - DNA, 25 bp, Homo sapien
tgttaaattcttgatttggtttctc

SEQ ID NO: 3159395 - DNA, 25 bp, Homo sapien
atcttcctccattttgcaattaata

SEQ ID NO: 3159396 - DNA, 25 bp, Homo sapien
ttttgcaattaataacttcccaagc

SEQ ID NO: 3159397 - DNA, 25 bp, Homo sapien
cctccattttgcaattaataacttc

SEQ ID NO: 3159398 - DNA, 25 bp, Homo sapien
tcagacatttggctcatcttcctcc

SEQ ID NO: 3159399 - DNA, 25 bp, Homo sapien
gaaatcaatatcctgcacaagtgtc

SEQ ID NO: 3159400 - DNA, 25 bp, Homo sapien
ggtgactaccctgaactgtatccgg

SEQ ID NO: 3159401 - DNA, 25 bp, Homo sapien
cagtcgttcactggacatagcacat

SEQ ID NO: 3159402 - DNA, 25 bp, Homo sapien
tctggttcttacctcacggccatag

SEQ ID NO: 3159403 - DNA, 25 bp, Homo sapien
tcagagagaaaggacttaacttcac

SEQ ID NO: 3159404 - DNA, 25 bp, Homo sapien
aattctaatttaaactactctctgt

SEQ ID NO: 3159405 - DNA, 25 bp, Homo sapien
cagagagaaaggacttaacttcacc

SEQ ID NO: 3159406 - DNA, 25 bp, Homo sapien
agagaaaggacttaacttcaccatc

SEQ ID NO: 3159407 - DNA, 25 bp, Homo sapien
ttcctacatggattgtaactatgac

SEQ ID NO: 3159408 - DNA, 25 bp, Homo sapien
tattcctacatggattgtaactatg

SEQ ID NO: 3159409 - DNA, 25 bp, Homo sapien
tacatggattgtaactatgactaat

SEQ ID NO: 3159410 - DNA, 25 bp, Homo sapien
cctacatggattgtaactatgacta

SEQ ID NO: 3159411 - DNA, 25 bp, Homo sapien
cttcactgtgttttgtgaaccttga

SEQ ID NO: 3159412 - DNA, 25 bp, Homo sapien
ttccttaaccgtgcattctctcctg

SEQ ID NO: 3159413 - DNA, 25 bp, Homo sapien
attccttaaccgtgcattctctcct

SEQ ID NO: 3159414 - DNA, 25 bp, Homo sapien
acacagctgccatgttttactctaa

SEQ ID NO: 3159415 - DNA, 25 bp, Homo sapien
taaataaggccgatgttgcaggtgc

SEQ ID NO: 3159416 - DNA, 25 bp, Homo sapien
gggaaagactattacaaacacatca

SEQ ID NO: 3159417 - DNA, 25 bp, Homo sapien
tgctaaggttaggagggcacaccaa

SEQ ID NO: 3159418 - DNA, 25 bp, Homo sapien
cagtaatgagaatgacaagtgaggt

SEQ ID NO: 3159419 - DNA, 25 bp, Homo sapien
cataaagccatagaagttgctgctg

SEQ ID NO: 3159420 - DNA, 25 bp, Homo sapien
gaaacactgtgccttgacctatggc

SEQ ID NO: 3159421 - DNA, 25 bp, Homo sapien
tatgtggtctgaatcagtaatgaga

SEQ ID NO: 3159422 - DNA, 25 bp, Homo sapien
cagccactggctgccagaaactcac

SEQ ID NO: 3159423 - DNA, 25 bp, Homo sapien
cagaggtgatcagttgcttcaagat

SEQ ID NO: 3159424 - DNA, 25 bp, Homo sapien
tcagaggtgatcagttgcttcaaga

SEQ ID NO: 3159425 - DNA, 25 bp, Homo sapien
caagatgaagctgaatattttcttc

SEQ ID NO: 3159426 - DNA, 25 bp, Homo sapien
cctccagatggccaagtaagttcat

SEQ ID NO: 3159427 - DNA, 25 bp, Homo sapien
caagcattcttaagtctatggagag

SEQ ID NO: 3159428 - DNA, 25 bp, Homo sapien
catgtctgactctaacttcaagaag

SEQ ID NO: 3159429 - DNA, 25 bp, Homo sapien
tgtgaagttattggcacagtcctcc

SEQ ID NO: 3159430 - DNA, 25 bp, Homo sapien
gagagcagtactctcagttttcttt

SEQ ID NO: 3159431 - DNA, 25 bp, Homo sapien
tgttgcattgtataaggagggcttt

SEQ ID NO: 3159432 - DNA, 25 bp, Homo sapien
gtttctcttttcactagaggtgaga

SEQ ID NO: 3159433 - DNA, 25 bp, Homo sapien
gataagtgaacacacttaacgtcca

SEQ ID NO: 3159434 - DNA, 25 bp, Homo sapien
taaatcgagtgtcccttagcagtgc

SEQ ID NO: 3159435 - DNA, 25 bp, Homo sapien
gatgttctgactctcgtgcagcaga

SEQ ID NO: 3159436 - DNA, 25 bp, Homo sapien
gttctcctgactacgtaactttgta

SEQ ID NO: 3159437 - DNA, 25 bp, Homo sapien
actttgtacttattccatcttgagt

SEQ ID NO: 3159438 - DNA, 25 bp, Homo sapien
aaccgcaacttctacttctagccat

SEQ ID NO: 3159439 - DNA, 25 bp, Homo sapien
cgcaacttctacttctagccataag

SEQ ID NO: 3159440 - DNA, 25 bp, Homo sapien
cttctacttctagccataagggcat

SEQ ID NO: 3159441 - DNA, 25 bp, Homo sapien
caacttctacttctagccataaggg

SEQ ID NO: 3159442 - DNA, 25 bp, Homo sapien
taaaagcttctctagaaatgactgg

SEQ ID NO: 3159443 - DNA, 25 bp, Homo sapien
attatcttaaaagcttctctagaaa

SEQ ID NO: 3159444 - DNA, 25 bp, Homo sapien
aagcttctctagaaatgactggctc

SEQ ID NO: 3159445 - DNA, 25 bp, Homo sapien
gaaatgactggctcctcattcacca

SEQ ID NO: 3159446 - DNA, 25 bp, Homo sapien
tggggccttccattcttccaaggac

SEQ ID NO: 3159447 - DNA, 25 bp, Homo sapien
taatgagtctccgaagaccttgctt

SEQ ID NO: 3159448 - DNA, 25 bp, Homo sapien
atttttctaatggtcctaatgagtc

SEQ ID NO: 3159449 - DNA, 25 bp, Homo sapien
aagaccttgcttcttgtcttgtttc

SEQ ID NO: 3159450 - DNA, 25 bp, Homo sapien
taatggtcctaatgagtctccgaag

SEQ ID NO: 3159451 - DNA, 25 bp, Homo sapien
aagaatctcttggtcctttcggata

SEQ ID NO: 3159452 - DNA, 25 bp, Homo sapien
gtcctttcggatataaatatctaga

SEQ ID NO: 3159453 - DNA, 25 bp, Homo sapien
cctttcggatataaatatctagaac

SEQ ID NO: 3159454 - DNA, 25 bp, Homo sapien
ttgataagaatctcttggtcctttc

SEQ ID NO: 3159455 - DNA, 25 bp, Homo sapien
gggcaatgactaatattttggtcaa

SEQ ID NO: 3159456 - DNA, 25 bp, Homo sapien
gggtaggttcagatacagggaagaa

SEQ ID NO: 3159457 - DNA, 25 bp, Homo sapien
ggccatgatgataagggcaatgact

SEQ ID NO: 3159458 - DNA, 25 bp, Homo sapien
cattgggtaggttcagatacaggga

SEQ ID NO: 3159459 - DNA, 25 bp, Homo sapien
ctctataatcaagaagctgggtcat

SEQ ID NO: 3159460 - DNA, 25 bp, Homo sapien
tctctataatcaagaagctgggtca

SEQ ID NO: 3159461 - DNA, 25 bp, Homo sapien
ttctctataatcaagaagctgggtc

SEQ ID NO: 3159462 - DNA, 25 bp, Homo sapien
tttctctataatcaagaagctgggt

SEQ ID NO: 3159463 - DNA, 25 bp, Homo sapien
ttaactgtgcagaaacacaagaggt

SEQ ID NO: 3159464 - DNA, 25 bp, Homo sapien
agttctgctttgaggaggatctgca

SEQ ID NO: 3159465 - DNA, 25 bp, Homo sapien
aattacataggctttcttctgcaac

SEQ ID NO: 3159466 - DNA, 25 bp, Homo sapien
ggatctgcagaatcaatatttaact

SEQ ID NO: 3159467 - DNA, 25 bp, Homo sapien
tttgctttgctcttcgtgctgtaaa

SEQ ID NO: 3159468 - DNA, 25 bp, Homo sapien
gctttgctcttcgtgctgtaaaatt

SEQ ID NO: 3159469 - DNA, 25 bp, Homo sapien
ttgctcttcgtgctgtaaaatttac

SEQ ID NO: 3159470 - DNA, 25 bp, Homo sapien
gctcttcgtgctgtaaaatttacat

SEQ ID NO: 3159471 - DNA, 25 bp, Homo sapien
tacagattttctggtctgtgaccaa

SEQ ID NO: 3159472 - DNA, 25 bp, Homo sapien
tgtgaccaaggctgtataccagaga

SEQ ID NO: 3159473 - DNA, 25 bp, Homo sapien
cctggcatccaattccgtaagtact

SEQ ID NO: 3159474 - DNA, 25 bp, Homo sapien
ttccgtaagtactgtgaattccact

SEQ ID NO: 3159475 - DNA, 25 bp, Homo sapien
caggacgggctaattgatcaggatc

SEQ ID NO: 3159476 - DNA, 25 bp, Homo sapien
ttgatcaggatctttgccactaaaa

SEQ ID NO: 3159477 - DNA, 25 bp, Homo sapien
gctaattgatcaggatctttgccac

SEQ ID NO: 3159478 - DNA, 25 bp, Homo sapien
atggctcttcaggacgggctaattg

SEQ ID NO: 3159479 - DNA, 25 bp, Homo sapien
taatatctatgcatatgaatggtaa

SEQ ID NO: 3159480 - DNA, 25 bp, Homo sapien
ccactcactaaattaatatctatgc

SEQ ID NO: 3159481 - DNA, 25 bp, Homo sapien
tcttccttgatgaagtaccttccaa

SEQ ID NO: 3159482 - DNA, 25 bp, Homo sapien
ttccttgatgaagtaccttccaatt

SEQ ID NO: 3159483 - DNA, 25 bp, Homo sapien
tggaaactaagtgccacccatagcg

SEQ ID NO: 3159484 - DNA, 25 bp, Homo sapien
gaataagttgtcgagagccaaatgc

SEQ ID NO: 3159485 - DNA, 25 bp, Homo sapien
tactgatgaagctaggtgatttggc

SEQ ID NO: 3159486 - DNA, 25 bp, Homo sapien
gaactaaccaattgaagtagggcag

SEQ ID NO: 3159487 - DNA, 25 bp, Homo sapien
gcccctgcaatctgtaggtttgttt

SEQ ID NO: 3159488 - DNA, 25 bp, Homo sapien
aagcccctgcaatctgtaggtttgt

SEQ ID NO: 3159489 - DNA, 25 bp, Homo sapien
tatgaagcccctgcaatctgtaggt

SEQ ID NO: 3159490 - DNA, 25 bp, Homo sapien
tgaagcccctgcaatctgtaggttt

SEQ ID NO: 3159491 - DNA, 25 bp, Homo sapien
gcaggaactgtcatgatgtttccaa

SEQ ID NO: 3159492 - DNA, 25 bp, Homo sapien
cgcaggaactgtcatgatgtttcca

SEQ ID NO: 3159493 - DNA, 25 bp, Homo sapien
ctttgcccactagttctttgctcca

SEQ ID NO: 3159494 - DNA, 25 bp, Homo sapien
ctacctcctttgcccactagttctt

SEQ ID NO: 3159495 - DNA, 25 bp, Homo sapien
acctcctttgcccactagttctttg

SEQ ID NO: 3159496 - DNA, 25 bp, Homo sapien
tcctttgcccactagttctttgctc

SEQ ID NO: 3159497 - DNA, 25 bp, Homo sapien
caaaggactgttaagagtctccggg

SEQ ID NO: 3159498 - DNA, 25 bp, Homo sapien
tatgtttagtcgtacagctggtgca

SEQ ID NO: 3159499 - DNA, 25 bp, Homo sapien
agtctccgggattttggctggtgcc

SEQ ID NO: 3159500 - DNA, 25 bp, Homo sapien
tatggcagtaatgcagcaaaggact

SEQ ID NO: 3159501 - DNA, 25 bp, Homo sapien
caactttgagtatcagtctctgcat

SEQ ID NO: 3159502 - DNA, 25 bp, Homo sapien
ggctgccaactttgagtatcagtct

SEQ ID NO: 3159503 - DNA, 25 bp, Homo sapien
gccaactttgagtatcagtctctgc

SEQ ID NO: 3159504 - DNA, 25 bp, Homo sapien
tgccaactttgagtatcagtctctg

SEQ ID NO: 3159505 - DNA, 25 bp, Homo sapien
atctgaataaatgttgttccccact

SEQ ID NO: 3159506 - DNA, 25 bp, Homo sapien
atattctttcacagagttattcatg

SEQ ID NO: 3159507 - DNA, 25 bp, Homo sapien
tttattcccaggcaattgttgagag

SEQ ID NO: 3159508 - DNA, 25 bp, Homo sapien
tcacagagttattcatgtaaaggat

SEQ ID NO: 3159509 - DNA, 25 bp, Homo sapien
tattcccaggcaattgttgagagtg

SEQ ID NO: 3159510 - DNA, 25 bp, Homo sapien
gagtgtgggcactctcattttagcc

SEQ ID NO: 3159511 - DNA, 25 bp, Homo sapien
agtgtgggcactctcattttagcca

SEQ ID NO: 3159512 - DNA, 25 bp, Homo sapien
gcctgggttgagagtgtgggcactc

SEQ ID NO: 3159513 - DNA, 25 bp, Homo sapien
aaaaacataacagcatacacctgca

SEQ ID NO: 3159514 - DNA, 25 bp, Homo sapien
aaaacataacagcatacacctgcat

SEQ ID NO: 3159515 - DNA, 25 bp, Homo sapien
cagaactagaagaatctcccttgtg

SEQ ID NO: 3159516 - DNA, 25 bp, Homo sapien
ctagaagaatctcccttgtgttctg

SEQ ID NO: 3159517 - DNA, 25 bp, Homo sapien
aatctcccttgtgttctggtagttg

SEQ ID NO: 3159518 - DNA, 25 bp, Homo sapien
gaagaatctcccttgtgttctggta

SEQ ID NO: 3159519 - DNA, 25 bp, Homo sapien
tttgggttagtggaacttatggcat

SEQ ID NO: 3159520 - DNA, 25 bp, Homo sapien
ctttgggttagtggaacttatggca

SEQ ID NO: 3159521 - DNA, 25 bp, Homo sapien
catctcgtagtacatgcaccgtttt

SEQ ID NO: 3159522 - DNA, 25 bp, Homo sapien
ttttagcctgtgtgtagcacacatc

SEQ ID NO: 3159523 - DNA, 25 bp, Homo sapien
gtagtacatgcaccgttttaggtca

SEQ ID NO: 3159524 - DNA, 25 bp, Homo sapien
taggtcattagagggcttcttcacc

SEQ ID NO: 3159525 - DNA, 25 bp, Homo sapien
gacagaggagaaatagctccttgtg

SEQ ID NO: 3159526 - DNA, 25 bp, Homo sapien
ggagaaatagctccttgtggcaaca

SEQ ID NO: 3159527 - DNA, 25 bp, Homo sapien
ttttttggtcaatgtcctggaagac

SEQ ID NO: 3159528 - DNA, 25 bp, Homo sapien
ccttgtggcaacaattttttggtca

SEQ ID NO: 3159529 - DNA, 25 bp, Homo sapien
gatgtaattgaccttatgatcatgc

SEQ ID NO: 3159530 - DNA, 25 bp, Homo sapien
ccttatgatcatgccagcattgttc

SEQ ID NO: 3159531 - DNA, 25 bp, Homo sapien
tatgatcatgccagcattgttcttg

SEQ ID NO: 3159532 - DNA, 25 bp, Homo sapien
tgttaagatgtaattgaccttatga

SEQ ID NO: 3159533 - DNA, 25 bp, Homo sapien
tctttgttattttctgatgatgaga

SEQ ID NO: 3159534 - DNA, 25 bp, Homo sapien
tatctttgttattttctgatgatga

SEQ ID NO: 3159535 - DNA, 25 bp, Homo sapien
cattaagaatggtatctttgttatt

SEQ ID NO: 3159536 - DNA, 25 bp, Homo sapien
tttgttattttctgatgatgagaga

SEQ ID NO: 3159537 - DNA, 25 bp, Homo sapien
tgcacaagcattggagaagccaagg

SEQ ID NO: 3159538 - DNA, 25 bp, Homo sapien
gcacaagcattggagaagccaagga

SEQ ID NO: 3159539 - DNA, 25 bp, Homo sapien
caccagtcagaactatcgaccataa

SEQ ID NO: 3159540 - DNA, 25 bp, Homo sapien
tgcaatagaaaatcaaggtatgtgt

SEQ ID NO: 3159541 - DNA, 25 bp, Homo sapien
gaaaagtggagatatgcaatagaaa

SEQ ID NO: 3159542 - DNA, 25 bp, Homo sapien
tgtgttgtaccaccagtcagaacta

SEQ ID NO: 3159543 - DNA, 25 bp, Homo sapien
catgggctttacatattcctttgtc

SEQ ID NO: 3159544 - DNA, 25 bp, Homo sapien
ctgcaaactttcatgccacactgtt

SEQ ID NO: 3159545 - DNA, 25 bp, Homo sapien
tcatgggctttacatattcctttgt

SEQ ID NO: 3159546 - DNA, 25 bp, Homo sapien
gtccatactcatgcctaattttcct

SEQ ID NO: 3159547 - DNA, 25 bp, Homo sapien
caatatatttgcataacagttcgtc

SEQ ID NO: 3159548 - DNA, 25 bp, Homo sapien
agaaagccactcagagttgcatctg

SEQ ID NO: 3159549 - DNA, 25 bp, Homo sapien
gggactagtgcaatagcacaagtat

SEQ ID NO: 3159550 - DNA, 25 bp, Homo sapien
cagaagtaaagattatatgaccagg

SEQ ID NO: 3159551 - DNA, 25 bp, Homo sapien
taccttttggatacatattattgac

SEQ ID NO: 3159552 - DNA, 25 bp, Homo sapien
tctgagttctttgtcactaggtaga

SEQ ID NO: 3159553 - DNA, 25 bp, Homo sapien
cactaggtagactattatttttgcc

SEQ ID NO: 3159554 - DNA, 25 bp, Homo sapien
gaaaatgccaatctcatctgcaagt

SEQ ID NO: 3159555 - DNA, 25 bp, Homo sapien
tgtagtgaggccataatccaaggca

SEQ ID NO: 3159556 - DNA, 25 bp, Homo sapien
taaagagactgtcaaacaacaagta

SEQ ID NO: 3159557 - DNA, 25 bp, Homo sapien
gccttctttgcaatcttggtgatca

SEQ ID NO: 3159558 - DNA, 25 bp, Homo sapien
taacagggtaccaccatttatcacc

SEQ ID NO: 3159559 - DNA, 25 bp, Homo sapien
aaaggacctgaaaccaaccactcag

SEQ ID NO: 3159560 - DNA, 25 bp, Homo sapien
tacacatgatatgaacattgagcag

SEQ ID NO: 3159561 - DNA, 25 bp, Homo sapien
tcataccgataactaaaaggacctg

SEQ ID NO: 3159562 - DNA, 25 bp, Homo sapien
cacaagagtgccatttataaagtac

SEQ ID NO: 3159563 - DNA, 25 bp, Homo sapien
tgcttgtgtacattacttggtactc

SEQ ID NO: 3159564 - DNA, 25 bp, Homo sapien
tcctcattggtcacaagagtgccat

SEQ ID NO: 3159565 - DNA, 25 bp, Homo sapien
tacattacttggtactctgaaattc

SEQ ID NO: 3159566 - DNA, 25 bp, Homo sapien
cgcccaacccccgcccccactgcat

SEQ ID NO: 3159567 - DNA, 25 bp, Homo sapien
tttgttcctatcagtttccaaagcc

SEQ ID NO: 3159568 - DNA, 25 bp, Homo sapien
gctccagtgtatccaagcctttgga

SEQ ID NO: 3159569 - DNA, 25 bp, Homo sapien
tcctgctccagtgtatccaagcctt

SEQ ID NO: 3159570 - DNA, 25 bp, Homo sapien
ctgctccagtgtatccaagcctttg

SEQ ID NO: 3159571 - DNA, 25 bp, Homo sapien
cacctctgaagacacccatagggag

SEQ ID NO: 3159572 - DNA, 25 bp, Homo sapien
agaaccctcctcaaggtggtatcgc

SEQ ID NO: 3159573 - DNA, 25 bp, Homo sapien
cactaaaaatggctccggagacaag

SEQ ID NO: 3159574 - DNA, 25 bp, Homo sapien
cttggtaagttgcacacaaagcagc

SEQ ID NO: 3159575 - DNA, 25 bp, Homo sapien
gcttcctaaagaatttttcattatc

SEQ ID NO: 3159576 - DNA, 25 bp, Homo sapien
gaatttttcattatcttatcttgct

SEQ ID NO: 3159577 - DNA, 25 bp, Homo sapien
tctttgcttcctaaagaatttttca

SEQ ID NO: 3159578 - DNA, 25 bp, Homo sapien
tgtattctttgcttcctaaagaatt

SEQ ID NO: 3159579 - DNA, 25 bp, Homo sapien
attgccacaagtagcattgccgttt

SEQ ID NO: 3159580 - DNA, 25 bp, Homo sapien
cagaaagccaaaaacgagaacttcg

SEQ ID NO: 3159581 - DNA, 25 bp, Homo sapien
tgcctgggcccgttggtttggtata

SEQ ID NO: 3159582 - DNA, 25 bp, Homo sapien
tgaagaacgtggtttcttaatttgc

SEQ ID NO: 3159583 - DNA, 25 bp, Homo sapien
tcaccacctcttttttgttgatcat

SEQ ID NO: 3159584 - DNA, 25 bp, Homo sapien
ttcaccacctcttttttgttgatca

SEQ ID NO: 3159585 - DNA, 25 bp, Homo sapien
ttcttcactgatagttcctggtttc

SEQ ID NO: 3159586 - DNA, 25 bp, Homo sapien
tcttcttcactgatagttcctggtt

SEQ ID NO: 3159587 - DNA, 25 bp, Homo sapien
cctggtttctgatatgtgagagatt

SEQ ID NO: 3159588 - DNA, 25 bp, Homo sapien
ttcctggtttctgatatgtgagaga

SEQ ID NO: 3159589 - DNA, 25 bp, Homo sapien
cgatttagtgcactcctcttgctgt

SEQ ID NO: 3159590 - DNA, 25 bp, Homo sapien
tccgagcattaatgccagaatggtc

SEQ ID NO: 3159591 - DNA, 25 bp, Homo sapien
gaagtgatttaagtgctcgatttag

SEQ ID NO: 3159592 - DNA, 25 bp, Homo sapien
cagaatggtctttaaattggttatg

SEQ ID NO: 3159593 - DNA, 25 bp, Homo sapien
acatctcagtatatcctctttatga

SEQ ID NO: 3159594 - DNA, 25 bp, Homo sapien
gacatctcagtatatcctctttatg

SEQ ID NO: 3159595 - DNA, 25 bp, Homo sapien
ctcagtatatcctctttatgatcag

SEQ ID NO: 3159596 - DNA, 25 bp, Homo sapien
tcagtatatcctctttatgatcaga

SEQ ID NO: 3159597 - DNA, 25 bp, Homo sapien
tcttctgtgtcttgtgattcagcat

SEQ ID NO: 3159598 - DNA, 25 bp, Homo sapien
cagcattttctctcatgtctccatc

SEQ ID NO: 3159599 - DNA, 25 bp, Homo sapien
tgtgtcttgtgattcagcattttct

SEQ ID NO: 3159600 - DNA, 25 bp, Homo sapien
cattcttctgtgtcttgtgattcag

SEQ ID NO: 3159601 - DNA, 25 bp, Homo sapien
cctatgagattgtcaaaagggccaa

SEQ ID NO: 3159602 - DNA, 25 bp, Homo sapien
taatatttaactgtgaccctccagc

SEQ ID NO: 3159603 - DNA, 25 bp, Homo sapien
tggatcatctcagtccagtttcagg

SEQ ID NO: 3159604 - DNA, 25 bp, Homo sapien
gattcaggacctatagtactagtag

SEQ ID NO: 3159605 - DNA, 25 bp, Homo sapien
tatctagggtatagatctttctcat

SEQ ID NO: 3159606 - DNA, 25 bp, Homo sapien
ggctactgatattttatctagggta

SEQ ID NO: 3159607 - DNA, 25 bp, Homo sapien
ttatctagggtatagatctttctca

SEQ ID NO: 3159608 - DNA, 25 bp, Homo sapien
ttttcagaaatggtgtgtcagtaga

SEQ ID NO: 3159609 - DNA, 25 bp, Homo sapien
tttttcagaaatggtgtgtcagtag

SEQ ID NO: 3159610 - DNA, 25 bp, Homo sapien
tgtgtcagtagaaagatgtgtgtcc

SEQ ID NO: 3159611 - DNA, 25 bp, Homo sapien
atggtgtgtcagtagaaagatgtgt

SEQ ID NO: 3159612 - DNA, 25 bp, Homo sapien
tgccaaatggggatctaaagtaagt

SEQ ID NO: 3159613 - DNA, 25 bp, Homo sapien
taaagtaagtatcagccaaatggct

SEQ ID NO: 3159614 - DNA, 25 bp, Homo sapien
tcatcagccatcaacgccttagcag

SEQ ID NO: 3159615 - DNA, 25 bp, Homo sapien
aaaattcagcaacttttgaacaagg

SEQ ID NO: 3159616 - DNA, 25 bp, Homo sapien
gcaagatgggaaagagcttcttttt

SEQ ID NO: 3159617 - DNA, 25 bp, Homo sapien
catcttgcaagatgggaaagagctt

SEQ ID NO: 3159618 - DNA, 25 bp, Homo sapien
cacccgccatcttgcaagatgggaa

SEQ ID NO: 3159619 - DNA, 25 bp, Homo sapien
cttgcaagatgggaaagagcttctt

SEQ ID NO: 3159620 - DNA, 25 bp, Homo sapien
ctgcaacggggcttccccttcttgg

SEQ ID NO: 3159621 - DNA, 25 bp, Homo sapien
accagcatcagtcttcttggcttcg

SEQ ID NO: 3159622 - DNA, 25 bp, Homo sapien
atcagtcttcttggcttcgggtttc

SEQ ID NO: 3159623 - DNA, 25 bp, Homo sapien
cagcatcagtcttcttggcttcggg

SEQ ID NO: 3159624 - DNA, 25 bp, Homo sapien
tcaaccttggatttagcggctgagt

SEQ ID NO: 3159625 - DNA, 25 bp, Homo sapien
ttttcaaccttggatttagcggctg

SEQ ID NO: 3159626 - DNA, 25 bp, Homo sapien
agttgcaagaaccttctccttcttt

SEQ ID NO: 3159627 - DNA, 25 bp, Homo sapien
ggtaccgccgttcttgtcaccacca

SEQ ID NO: 3159628 - DNA, 25 bp, Homo sapien
agctttcgaggcacatcttcagtag

SEQ ID NO: 3159629 - DNA, 25 bp, Homo sapien
tcaacagctttcgaggcacatcttc

SEQ ID NO: 3159630 - DNA, 25 bp, Homo sapien
tgctgactgaagggtttttttttgc

SEQ ID NO: 3159631 - DNA, 25 bp, Homo sapien
tttttttttgccgtggctcaacagc

SEQ ID NO: 3159632 - DNA, 25 bp, Homo sapien
aagtaataagccactagccagctgc

SEQ ID NO: 3159633 - DNA, 25 bp, Homo sapien
tgcccctgtggcgtccagtgaggat

SEQ ID NO: 3159634 - DNA, 25 bp, Homo sapien
tcagaatggtcccgggggtaatgct

SEQ ID NO: 3159635 - DNA, 25 bp, Homo sapien
tcttgcccctgtggcgtccagtgag

SEQ ID NO: 3159636 - DNA, 25 bp, Homo sapien
gtgttcttcatagaggaactcgatt

SEQ ID NO: 3159637 - DNA, 25 bp, Homo sapien
ctggtgtgttcttcatagaggaact

SEQ ID NO: 3159638 - DNA, 25 bp, Homo sapien
tgtgttcttcatagaggaactcgat

SEQ ID NO: 3159639 - DNA, 25 bp, Homo sapien
ggtgtgttcttcatagaggaactcg

SEQ ID NO: 3159640 - DNA, 25 bp, Homo sapien
gaagtaagcatcagtaagatgtttt

SEQ ID NO: 3159641 - DNA, 25 bp, Homo sapien
ttacattgctgatatcgattttggt

SEQ ID NO: 3159642 - DNA, 25 bp, Homo sapien
cattgctgatatcgattttggttga

SEQ ID NO: 3159643 - DNA, 25 bp, Homo sapien
ttttacattgctgatatcgattttg

SEQ ID NO: 3159644 - DNA, 25 bp, Homo sapien
tcttgcgctgctccgtaatctcata

SEQ ID NO: 3159645 - DNA, 25 bp, Homo sapien
tgcgctgctccgtaatctcatattt

SEQ ID NO: 3159646 - DNA, 25 bp, Homo sapien
gctgctccgtaatctcatatttccc

SEQ ID NO: 3159647 - DNA, 25 bp, Homo sapien
aatcttgcgctgctccgtaatctca

SEQ ID NO: 3159648 - DNA, 25 bp, Homo sapien
acacagatcgcaactagccctggag

SEQ ID NO: 3159649 - DNA, 25 bp, Homo sapien
gcaaacacagatcgcaactagccct

SEQ ID NO: 3159650 - DNA, 25 bp, Homo sapien
gggcaaacacagatcgcaactagcc

SEQ ID NO: 3159651 - DNA, 25 bp, Homo sapien
gtagtcagctatttaattaggttct

SEQ ID NO: 3159652 - DNA, 25 bp, Homo sapien
aatatctagggtcaaatgcatgcat

SEQ ID NO: 3159653 - DNA, 25 bp, Homo sapien
taaaagacctgatgattcctgaact

SEQ ID NO: 3159654 - DNA, 25 bp, Homo sapien
gaaacagtacagcaaacagagggag

SEQ ID NO: 3159655 - DNA, 25 bp, Homo sapien
gacatgttccatattgttaccgtga

SEQ ID NO: 3159656 - DNA, 25 bp, Homo sapien
ttctacagagaagatgccccaatca

SEQ ID NO: 3159657 - DNA, 25 bp, Homo sapien
caatcaaggctaaatcaagcgtcac

SEQ ID NO: 3159658 - DNA, 25 bp, Homo sapien
catacactaatccttcagatctgtg

SEQ ID NO: 3159659 - DNA, 25 bp, Homo sapien
tgttagtccacatacaccttgatgg

SEQ ID NO: 3159660 - DNA, 25 bp, Homo sapien
gcgttctgacagaatgcaatgcagt

SEQ ID NO: 3159661 - DNA, 25 bp, Homo sapien
tctacacaagtacatctgaaagttt

SEQ ID NO: 3159662 - DNA, 25 bp, Homo sapien
aaacattctgctggtgatagtcaca

SEQ ID NO: 3159663 - DNA, 25 bp, Homo sapien
caaaagcaggagttataagcaatcc

SEQ ID NO: 3159664 - DNA, 25 bp, Homo sapien
cagtaaataaaagttcttgcccctg

SEQ ID NO: 3159665 - DNA, 25 bp, Homo sapien
ctgtctgtaggcagcatgtcgcaca

SEQ ID NO: 3159666 - DNA, 25 bp, Homo sapien
aataaaagttcttgcccctgtctgt

SEQ ID NO: 3159667 - DNA, 25 bp, Homo sapien
ccctgtctgtaggcagcatgtcgca

SEQ ID NO: 3159668 - DNA, 25 bp, Homo sapien
acagacttgtaccagatgcatattt

SEQ ID NO: 3159669 - DNA, 25 bp, Homo sapien
gcatatttcccagtataatttccac

SEQ ID NO: 3159670 - DNA, 25 bp, Homo sapien
ttcccagtataatttccacaatctc

SEQ ID NO: 3159671 - DNA, 25 bp, Homo sapien
cttgtaccagatgcatatttcccag

SEQ ID NO: 3159672 - DNA, 25 bp, Homo sapien
atcacagtgagttttgccagaacct

SEQ ID NO: 3159673 - DNA, 25 bp, Homo sapien
agcatttgaactctgctgatctcgt

SEQ ID NO: 3159674 - DNA, 25 bp, Homo sapien
gaactctgctgatctcgtattttgt

SEQ ID NO: 3159675 - DNA, 25 bp, Homo sapien
tgagttttgccagaaccttattttg

SEQ ID NO: 3159676 - DNA, 25 bp, Homo sapien
ctagtttcgaaccatggtatttgat

SEQ ID NO: 3159677 - DNA, 25 bp, Homo sapien
tagtttcgaaccatggtatttgatg

SEQ ID NO: 3159678 - DNA, 25 bp, Homo sapien
tttcgaaccatggtatttgatgtct

SEQ ID NO: 3159679 - DNA, 25 bp, Homo sapien
gtttcgaaccatggtatttgatgtc

SEQ ID NO: 3159680 - DNA, 25 bp, Homo sapien
taaagacggaaaagacctgctctgg

SEQ ID NO: 3159681 - DNA, 25 bp, Homo sapien
agtgtcgctgctaggaagttgccgc

SEQ ID NO: 3159682 - DNA, 25 bp, Homo sapien
cattgtcacactcaagccaaggtgg

SEQ ID NO: 3159683 - DNA, 25 bp, Homo sapien
gtatagcgaaggacagaaggcgccc

SEQ ID NO: 3159684 - DNA, 25 bp, Homo sapien
cagatctgcactagcaaccagaact

SEQ ID NO: 3159685 - DNA, 25 bp, Homo sapien
tgatccgagtccagatctgcactag

SEQ ID NO: 3159686 - DNA, 25 bp, Homo sapien
ccaggaccctctcgacacccttgat

SEQ ID NO: 3159687 - DNA, 25 bp, Homo sapien
tcgacacccttgatccgagtccaga

SEQ ID NO: 3159688 - DNA, 25 bp, Homo sapien
agtttcaacctcgacttcgcagccg

SEQ ID NO: 3159689 - DNA, 25 bp, Homo sapien
caggagcgcgccttggcggtgcagt

SEQ ID NO: 3159690 - DNA, 25 bp, Homo sapien
tttgcttttgctcgctgctctcctg

SEQ ID NO: 3159691 - DNA, 25 bp, Homo sapien
ttcagcactcagcccgcagctattt

SEQ ID NO: 3159692 - DNA, 25 bp, Homo sapien
ctgcgagcagcagagggcgggggag

SEQ ID NO: 3159693 - DNA, 25 bp, Homo sapien
aaggcagcctccagattacttccct

SEQ ID NO: 3159694 - DNA, 25 bp, Homo sapien
gacttcgtcgaagcaactcacactt

SEQ ID NO: 3159695 - DNA, 25 bp, Homo sapien
tccgtgggtgtgtgacttcgtcgaa

SEQ ID NO: 3159696 - DNA, 25 bp, Homo sapien
cagattacttccctccgtgggtgtg

SEQ ID NO: 3159697 - DNA, 25 bp, Homo sapien
atgccaaacggagggacccgcgtct

SEQ ID NO: 3159698 - DNA, 25 bp, Homo sapien
cgcgtctctaagggccgccggctga

SEQ ID NO: 3159699 - DNA, 25 bp, Homo sapien
aggcaagatgccaaacggagggacc

SEQ ID NO: 3159700 - DNA, 25 bp, Homo sapien
tctctaagggccgccggctgagctg

SEQ ID NO: 3159701 - DNA, 25 bp, Homo sapien
atgtgacgacaaggttgttgatgcc

SEQ ID NO: 3159702 - DNA, 25 bp, Homo sapien
cgaatgcgcggcgatgtgacgacaa

SEQ ID NO: 3159703 - DNA, 25 bp, Homo sapien
gcgatgtgacgacaaggttgttgat

SEQ ID NO: 3159704 - DNA, 25 bp, Homo sapien
agcagagcctgcgaatgcgcggcga

SEQ ID NO: 3159705 - DNA, 25 bp, Homo sapien
cagcggtaagcggtatgggtgttta

SEQ ID NO: 3159706 - DNA, 25 bp, Homo sapien
cctgaatttatttgaccgaggctaa

SEQ ID NO: 3159707 - DNA, 25 bp, Homo sapien
tgtcgtgtatctgcatatcgtccaa

SEQ ID NO: 3159708 - DNA, 25 bp, Homo sapien
aatcgccacctatgaaagtacctgg

SEQ ID NO: 3159709 - DNA, 25 bp, Homo sapien
tgaaatctcaaacagagctaccgcc

SEQ ID NO: 3159710 - DNA, 25 bp, Homo sapien
ggctctagatatgtcaaaactggtg

SEQ ID NO: 3159711 - DNA, 25 bp, Homo sapien
gcctgtgtactaaaattgtccttca

SEQ ID NO: 3159712 - DNA, 25 bp, Homo sapien
tattaggtgtgaacggaagcccaag

SEQ ID NO: 3159713 - DNA, 25 bp, Homo sapien
tattgtggagacaaacaaggctcta

SEQ ID NO: 3159714 - DNA, 25 bp, Homo sapien
tccattcggagcacattataataaa

SEQ ID NO: 3159715 - DNA, 25 bp, Homo sapien
catccattcggagcacattataata

SEQ ID NO: 3159716 - DNA, 25 bp, Homo sapien
ccattcggagcacattataataaaa

SEQ ID NO: 3159717 - DNA, 25 bp, Homo sapien
ttcatccattcggagcacattataa

SEQ ID NO: 3159718 - DNA, 25 bp, Homo sapien
tcactttacgaaaattatgtatttc

SEQ ID NO: 3159719 - DNA, 25 bp, Homo sapien
tattgggggccaacgaaagctattg

SEQ ID NO: 3159720 - DNA, 25 bp, Homo sapien
tccttagacttgttcactgtggatg

SEQ ID NO: 3159721 - DNA, 25 bp, Homo sapien
gggccaacgaaagctattgtcctta

SEQ ID NO: 3159722 - DNA, 25 bp, Homo sapien
cgaaagctattgtccttagacttgt

SEQ ID NO: 3159723 - DNA, 25 bp, Homo sapien
tttttatggccatctcatgacttca

SEQ ID NO: 3159724 - DNA, 25 bp, Homo sapien
tctgaaatatcatgtccatgtgcct

SEQ ID NO: 3159725 - DNA, 25 bp, Homo sapien
tttggccattttaccagtcctctga

SEQ ID NO: 3159726 - DNA, 25 bp, Homo sapien
ctctttctggaaactaatagcgtct

SEQ ID NO: 3159727 - DNA, 25 bp, Homo sapien
atagccttccttagttgatatttca

SEQ ID NO: 3159728 - DNA, 25 bp, Homo sapien
aatagccttccttagttgatatttc

SEQ ID NO: 3159729 - DNA, 25 bp, Homo sapien
gaatagccttccttagttgatattt

SEQ ID NO: 3159730 - DNA, 25 bp, Homo sapien
tgaatagccttccttagttgatatt

SEQ ID NO: 3159731 - DNA, 25 bp, Homo sapien
aatcctgcgacatgccctggtgtgt

SEQ ID NO: 3159732 - DNA, 25 bp, Homo sapien
gcattaggtctttgtcctcatgctg

SEQ ID NO: 3159733 - DNA, 25 bp, Homo sapien
cccttgcccccaatcctgcgacatg

SEQ ID NO: 3159734 - DNA, 25 bp, Homo sapien
taggtctttgtcctcatgctgtctc

SEQ ID NO: 3159735 - DNA, 25 bp, Homo sapien
cctttttgagtggtcagcatgtcac

SEQ ID NO: 3159736 - DNA, 25 bp, Homo sapien
cccagggtatgtatactccagttag

SEQ ID NO: 3159737 - DNA, 25 bp, Homo sapien
tgtgataagcatgtaaccgaatcct

SEQ ID NO: 3159738 - DNA, 25 bp, Homo sapien
tagaagacaactggtctaaggaggc

SEQ ID NO: 3159739 - DNA, 25 bp, Homo sapien
aatacagtcagagatatgcacacac

SEQ ID NO: 3159740 - DNA, 25 bp, Homo sapien
tatcctttcatagagtaaatcagtg

SEQ ID NO: 3159741 - DNA, 25 bp, Homo sapien
gagtaaatcagtgtagatcatgaca

SEQ ID NO: 3159742 - DNA, 25 bp, Homo sapien
ccgtagtccatttgtgtgaccagga

SEQ ID NO: 3159743 - DNA, 25 bp, Homo sapien
tttattgtgtagtccagaaagagga

SEQ ID NO: 3159744 - DNA, 25 bp, Homo sapien
gggatgctgcttcacagggtaatct

SEQ ID NO: 3159745 - DNA, 25 bp, Homo sapien
aaattgtagcttccccactctaagg

SEQ ID NO: 3159746 - DNA, 25 bp, Homo sapien
taaactggatttaagtggtgaggcc

SEQ ID NO: 3159747 - DNA, 25 bp, Homo sapien
tatgagccagagtagctaactgatt

SEQ ID NO: 3159748 - DNA, 25 bp, Homo sapien
actgatttaacacagagatgactaa

SEQ ID NO: 3159749 - DNA, 25 bp, Homo sapien
tgatgtatgagccagagtagctaac

SEQ ID NO: 3159750 - DNA, 25 bp, Homo sapien
agaagatgatgtatgagccagagta

SEQ ID NO: 3159751 - DNA, 25 bp, Homo sapien
tctatttctgtgtctcgcacattta

SEQ ID NO: 3159752 - DNA, 25 bp, Homo sapien
ctatttctgtgtctcgcacatttaa

SEQ ID NO: 3159753 - DNA, 25 bp, Homo sapien
ttaattggctaatgctgtaatgtgg

SEQ ID NO: 3159754 - DNA, 25 bp, Homo sapien
taatgctgtaatgtggcatctgtca

SEQ ID NO: 3159755 - DNA, 25 bp, Homo sapien
ggctaatgctgtaatgtggcatctg

SEQ ID NO: 3159756 - DNA, 25 bp, Homo sapien
catcagcatcctcatataaactcac

SEQ ID NO: 3159757 - DNA, 25 bp, Homo sapien
gaaaggaactgcctcacaataaata

SEQ ID NO: 3159758 - DNA, 25 bp, Homo sapien
cccctgatctttgacaagaataatg

SEQ ID NO: 3159759 - DNA, 25 bp, Homo sapien
catattcatcctaatggagagaaaa

SEQ ID NO: 3159760 - DNA, 25 bp, Homo sapien
agatttaggaggcaccagaacaaaa

SEQ ID NO: 3159761 - DNA, 25 bp, Homo sapien
tgaacaaagcggcagccaccagttt

SEQ ID NO: 3159762 - DNA, 25 bp, Homo sapien
ttgcaaaagacccagtggcatcacc

SEQ ID NO: 3159763 - DNA, 25 bp, Homo sapien
gatgcctcaagggataggctgtaca

SEQ ID NO: 3159764 - DNA, 25 bp, Homo sapien
ggctgtacacagattagtatgacta

SEQ ID NO: 3159765 - DNA, 25 bp, Homo sapien
tatctttaagagatatgttcaggaa

SEQ ID NO: 3159766 - DNA, 25 bp, Homo sapien
tttaagagatatgttcaggaaggca

SEQ ID NO: 3159767 - DNA, 25 bp, Homo sapien
tctgctcagtcttcctttcaggtca

SEQ ID NO: 3159768 - DNA, 25 bp, Homo sapien
tcagtcttcctttcaggtcaatatc

SEQ ID NO: 3159769 - DNA, 25 bp, Homo sapien
tgacattgattattccaccctggtt

SEQ ID NO: 3159770 - DNA, 25 bp, Homo sapien
cattgattattccaccctggttatc

SEQ ID NO: 3159771 - DNA, 25 bp, Homo sapien
gattattccaccctggttatcttgg

SEQ ID NO: 3159772 - DNA, 25 bp, Homo sapien
tctgatatgaaatagtctgctcatt

SEQ ID NO: 3159773 - DNA, 25 bp, Homo sapien
gaaagattgcagagccttacccaga

SEQ ID NO: 3159774 - DNA, 25 bp, Homo sapien
tcaaggtctcagttgttggaaacca

SEQ ID NO: 3159775 - DNA, 25 bp, Homo sapien
tctctgtgaaacataggaaccatca

SEQ ID NO: 3159776 - DNA, 25 bp, Homo sapien
ggagtaggttatgttctcagcacca

SEQ ID NO: 3159777 - DNA, 25 bp, Homo sapien
ggtagagtgagaaatttaattcagc

SEQ ID NO: 3159778 - DNA, 25 bp, Homo sapien
gattgctaccattttggaggaggct

SEQ ID NO: 3159779 - DNA, 25 bp, Homo sapien
gagaattaatttccggatggcagat

SEQ ID NO: 3159780 - DNA, 25 bp, Homo sapien
gaaagaccatttgttcactaaagga

SEQ ID NO: 3159781 - DNA, 25 bp, Homo sapien
gcaaaaaagtcagagccttgaaaaa

SEQ ID NO: 3159782 - DNA, 25 bp, Homo sapien
gctattctgggagccattctgacaa

SEQ ID NO: 3159783 - DNA, 25 bp, Homo sapien
taatttctaattttgggtgtgcacc

SEQ ID NO: 3159784 - DNA, 25 bp, Homo sapien
cgagacaattacgaaaatgcttatt

SEQ ID NO: 3159785 - DNA, 25 bp, Homo sapien
ttctcattaacaagctggtgattct

SEQ ID NO: 3159786 - DNA, 25 bp, Homo sapien
tggaatattagcaactctgatgtgc

SEQ ID NO: 3159787 - DNA, 25 bp, Homo sapien
ttccgtacagacagttttctcatta

SEQ ID NO: 3159788 - DNA, 25 bp, Homo sapien
gtgattctggaatattagcaactct

SEQ ID NO: 3159789 - DNA, 25 bp, Homo sapien
ccagttagccttgcaggcttatgca

SEQ ID NO: 3159790 - DNA, 25 bp, Homo sapien
gctaaacagcagttaactgcattta

SEQ ID NO: 3159791 - DNA, 25 bp, Homo sapien
tactctctccagttagccttgcagg

SEQ ID NO: 3159792 - DNA, 25 bp, Homo sapien
gcatttaggcaactactctctccag

SEQ ID NO: 3159793 - DNA, 25 bp, Homo sapien
agacattttatgaactctgaagtta

SEQ ID NO: 3159794 - DNA, 25 bp, Homo sapien
tgaagttattggctggtttctttgt

SEQ ID NO: 3159795 - DNA, 25 bp, Homo sapien
tgaactctgaagttattggctggtt

SEQ ID NO: 3159796 - DNA, 25 bp, Homo sapien
ttagacattttatgaactctgaagt

SEQ ID NO: 3159797 - DNA, 25 bp, Homo sapien
caacatttgatactttctgtgtatc

SEQ ID NO: 3159798 - DNA, 25 bp, Homo sapien
ccacaacatttgatactttctgtgt

SEQ ID NO: 3159799 - DNA, 25 bp, Homo sapien
tcagggcattagcatgtccacaaca

SEQ ID NO: 3159800 - DNA, 25 bp, Homo sapien
gcattagcatgtccacaacatttga

SEQ ID NO: 3159801 - DNA, 25 bp, Homo sapien
cagaaggaacagtttgaagtgaaca

SEQ ID NO: 3159802 - DNA, 25 bp, Homo sapien
tcaagaactagaggtcgctaccact

SEQ ID NO: 3159803 - DNA, 25 bp, Homo sapien
gcctgtgtcctttaagcctgcattg

SEQ ID NO: 3159804 - DNA, 25 bp, Homo sapien
aacaagagggtaaatgctagtgcca

SEQ ID NO: 3159805 - DNA, 25 bp, Homo sapien
tcattgttcagcttctacttatgag

SEQ ID NO: 3159806 - DNA, 25 bp, Homo sapien
tctcattgttcagcttctacttatg

SEQ ID NO: 3159807 - DNA, 25 bp, Homo sapien
attgttcagcttctacttatgagtg

SEQ ID NO: 3159808 - DNA, 25 bp, Homo sapien
cattgttcagcttctacttatgagt

SEQ ID NO: 3159809 - DNA, 25 bp, Homo sapien
taagaagcacatcacgtaaggaaga

SEQ ID NO: 3159810 - DNA, 25 bp, Homo sapien
gaaaatgctcatgtgaatgctctgc

SEQ ID NO: 3159811 - DNA, 25 bp, Homo sapien
aacttacaattgagggattccagca

SEQ ID NO: 3159812 - DNA, 25 bp, Homo sapien
ccaggtccagagtacaaagatagct

SEQ ID NO: 3159813 - DNA, 25 bp, Homo sapien
taaccagatggtatgtctacgcaat

SEQ ID NO: 3159814 - DNA, 25 bp, Homo sapien
tcaaatagtgtgaggaagactttca

SEQ ID NO: 3159815 - DNA, 25 bp, Homo sapien
taagagacaatctaagagctcagtg

SEQ ID NO: 3159816 - DNA, 25 bp, Homo sapien
gaattttatctattaacacagggag

SEQ ID NO: 3159817 - DNA, 25 bp, Homo sapien
atttgtggtctggaagttcttgtcc

SEQ ID NO: 3159818 - DNA, 25 bp, Homo sapien
ttttccatttgtggtctggaagttc

SEQ ID NO: 3159819 - DNA, 25 bp, Homo sapien
tccatttgtggtctggaagttcttg

SEQ ID NO: 3159820 - DNA, 25 bp, Homo sapien
tggtctggaagttcttgtcctccat

SEQ ID NO: 3159821 - DNA, 25 bp, Homo sapien
gatctcttcaagtactctctcaata

SEQ ID NO: 3159822 - DNA, 25 bp, Homo sapien
taagatctcttcaagtactctctca

SEQ ID NO: 3159823 - DNA, 25 bp, Homo sapien
tcttcaagtactctctcaataacaa

SEQ ID NO: 3159824 - DNA, 25 bp, Homo sapien
ctcttcaagtactctctcaataaca

SEQ ID NO: 3159825 - DNA, 25 bp, Homo sapien
ccttcacatctggtgaagcaacaca

SEQ ID NO: 3159826 - DNA, 25 bp, Homo sapien
taacacgacatgaggaggaccattt

SEQ ID NO: 3159827 - DNA, 25 bp, Homo sapien
acacaaagcaggtcagcaccagacg

SEQ ID NO: 3159828 - DNA, 25 bp, Homo sapien
agtgctcagaattgccattttgagg

SEQ ID NO: 3159829 - DNA, 25 bp, Homo sapien
tgtgctttgtcatcaatgtactttt

SEQ ID NO: 3159830 - DNA, 25 bp, Homo sapien
gtgctttgtcatcaatgtacttttc

SEQ ID NO: 3159831 - DNA, 25 bp, Homo sapien
tcttctggtctcctatttgatttgc

SEQ ID NO: 3159832 - DNA, 25 bp, Homo sapien
cttcttatagcagaactgtagcttc

SEQ ID NO: 3159833 - DNA, 25 bp, Homo sapien
gatttgccacgattgacttgcttct

SEQ ID NO: 3159834 - DNA, 25 bp, Homo sapien
tgacttgcttcttatagcagaactg

SEQ ID NO: 3159835 - DNA, 25 bp, Homo sapien
ttttggtggagcacaagataaccca

SEQ ID NO: 3159836 - DNA, 25 bp, Homo sapien
gagaggtgtatgcatttcaggtttt

SEQ ID NO: 3159837 - DNA, 25 bp, Homo sapien
tttggtggagcacaagataacccac

SEQ ID NO: 3159838 - DNA, 25 bp, Homo sapien
ctggagagaggtgtatgcatttcag

SEQ ID NO: 3159839 - DNA, 25 bp, Homo sapien
gggtaccgcagtggattgaatcgaa

SEQ ID NO: 3159840 - DNA, 25 bp, Homo sapien
catgtggccacgaatgaatcatttg

SEQ ID NO: 3159841 - DNA, 25 bp, Homo sapien
catttgacctctgtgctgtatgaca

SEQ ID NO: 3159842 - DNA, 25 bp, Homo sapien
tatacagttctggatgggtaccgca

SEQ ID NO: 3159843 - DNA, 25 bp, Homo sapien
caagatgaggctaagcttcttcagg

SEQ ID NO: 3159844 - DNA, 25 bp, Homo sapien
atgaggctaagcttcttcaggaaaa

SEQ ID NO: 3159845 - DNA, 25 bp, Homo sapien
gatctgcttcagtactcaagatgag

SEQ ID NO: 3159846 - DNA, 25 bp, Homo sapien
gcttcagtactcaagatgaggctaa

SEQ ID NO: 3159847 - DNA, 25 bp, Homo sapien
gcactgtgaatgtgccacataagag

SEQ ID NO: 3159848 - DNA, 25 bp, Homo sapien
gctccaagtgaatagcatgtgtcag

SEQ ID NO: 3159849 - DNA, 25 bp, Homo sapien
gagctgctccaagtgaatagcatgt

SEQ ID NO: 3159850 - DNA, 25 bp, Homo sapien
caagtgaatagcatgtgtcaggagc

SEQ ID NO: 3159851 - DNA, 25 bp, Homo sapien
gattcatttgacagattctaatcaa

SEQ ID NO: 3159852 - DNA, 25 bp, Homo sapien
attggccatgtgcattgaattgtct

SEQ ID NO: 3159853 - DNA, 25 bp, Homo sapien
tatttcagacttccaggtaagggag

SEQ ID NO: 3159854 - DNA, 25 bp, Homo sapien
ctacgtatcatcatcagttatttca

SEQ ID NO: 3159855 - DNA, 25 bp, Homo sapien
ggtaagggagtgattggccatgtgc

SEQ ID NO: 3159856 - DNA, 25 bp, Homo sapien
aatgccacttgctaatggctgcttc

SEQ ID NO: 3159857 - DNA, 25 bp, Homo sapien
gacaatgccacttgctaatggctgc

SEQ ID NO: 3159858 - DNA, 25 bp, Homo sapien
atgccacttgctaatggctgcttct

SEQ ID NO: 3159859 - DNA, 25 bp, Homo sapien
caatgccacttgctaatggctgctt

SEQ ID NO: 3159860 - DNA, 25 bp, Homo sapien
cattcagaatcacatccctctctta

SEQ ID NO: 3159861 - DNA, 25 bp, Homo sapien
tatatgcattcagaatcacatccct

SEQ ID NO: 3159862 - DNA, 25 bp, Homo sapien
ttgagtttctcatatatgcattcag

SEQ ID NO: 3159863 - DNA, 25 bp, Homo sapien
tatattttgagtttctcatatatgc

SEQ ID NO: 3159864 - DNA, 25 bp, Homo sapien
tagggcagtcaatgccaagtgaaat

SEQ ID NO: 3159865 - DNA, 25 bp, Homo sapien
caattgtgccagcagttggaatgcc

SEQ ID NO: 3159866 - DNA, 25 bp, Homo sapien
gccagcagttggaatgccatatgga

SEQ ID NO: 3159867 - DNA, 25 bp, Homo sapien
gtaatagggcagtcaatgccaagtg

SEQ ID NO: 3159868 - DNA, 25 bp, Homo sapien
tcagataaccgtgtaacagcagaat

SEQ ID NO: 3159869 - DNA, 25 bp, Homo sapien
tagcagctatcaagtcagataaccg

SEQ ID NO: 3159870 - DNA, 25 bp, Homo sapien
ccagcatacggtgataacatggatg

SEQ ID NO: 3159871 - DNA, 25 bp, Homo sapien
aagtgttgaatattgcgtgttaccc

SEQ ID NO: 3159872 - DNA, 25 bp, Homo sapien
gcaccaatgtttttggttcctaaga

SEQ ID NO: 3159873 - DNA, 25 bp, Homo sapien
agaccaacagaaaactcttatcctt

SEQ ID NO: 3159874 - DNA, 25 bp, Homo sapien
ttgcaccaatgtttttggttcctaa

SEQ ID NO: 3159875 - DNA, 25 bp, Homo sapien
tcctaagaccaacagaaaactctta

SEQ ID NO: 3159876 - DNA, 25 bp, Homo sapien
ggtagtaccctttacacagagtatc

SEQ ID NO: 3159877 - DNA, 25 bp, Homo sapien
tgcccttccaaccttggtacttcat

SEQ ID NO: 3159878 - DNA, 25 bp, Homo sapien
cctcctgcttgatacatgtttgtag

SEQ ID NO: 3159879 - DNA, 25 bp, Homo sapien
tgtttcagtttcattgcccttccaa

SEQ ID NO: 3159880 - DNA, 25 bp, Homo sapien
gagtcaacatttagtatgctgtaaa

SEQ ID NO: 3159881 - DNA, 25 bp, Homo sapien
agccattgcatctcagagtcaacat

SEQ ID NO: 3159882 - DNA, 25 bp, Homo sapien
taaatatcttcatcaggaagttggt

SEQ ID NO: 3159883 - DNA, 25 bp, Homo sapien
tcaggaagttggtagttctggtaga

SEQ ID NO: 3159884 - DNA, 25 bp, Homo sapien
ctgttgataggagagaaggttggac

SEQ ID NO: 3159885 - DNA, 25 bp, Homo sapien
tgtccagtgaagaccagcggtggtc

SEQ ID NO: 3159886 - DNA, 25 bp, Homo sapien
ggtcgggttactgggatggctctca

SEQ ID NO: 3159887 - DNA, 25 bp, Homo sapien
gataggagagaaggttggacagtgt

SEQ ID NO: 3159888 - DNA, 25 bp, Homo sapien
tggtcgggcacggaggtctcgttgc

SEQ ID NO: 3159889 - DNA, 25 bp, Homo sapien
gtctcgttgcggatgtggatcacgg

SEQ ID NO: 3159890 - DNA, 25 bp, Homo sapien
gcctagacttcacggagtaagcgaa

SEQ ID NO: 3159891 - DNA, 25 bp, Homo sapien
ggagcagggttgtaggccaccccca

SEQ ID NO: 3159892 - DNA, 25 bp, Homo sapien
tgggcgccagtcaggtcgccaacca

SEQ ID NO: 3159893 - DNA, 25 bp, Homo sapien
ggcctgggcgccagtcaggtcgcca

SEQ ID NO: 3159894 - DNA, 25 bp, Homo sapien
cataggcctgggcgccagtcaggtc

SEQ ID NO: 3159895 - DNA, 25 bp, Homo sapien
ggcataggcctgggcgccagtcagg

SEQ ID NO: 3159896 - DNA, 25 bp, Homo sapien
tcctgatctattgataggcttggaa

SEQ ID NO: 3159897 - DNA, 25 bp, Homo sapien
ctgacacaggactcggctccggggg

SEQ ID NO: 3159898 - DNA, 25 bp, Homo sapien
ctgatctattgataggcttggaaga

SEQ ID NO: 3159899 - DNA, 25 bp, Homo sapien
tgcctcctgatctattgataggctt

SEQ ID NO: 3159900 - DNA, 25 bp, Homo sapien
gtcttttcgtctatgctactgggca

SEQ ID NO: 3159901 - DNA, 25 bp, Homo sapien
gagattcaggagtcaccactttctt

SEQ ID NO: 3159902 - DNA, 25 bp, Homo sapien
tcgtagggaagtggtgccagtactc

SEQ ID NO: 3159903 - DNA, 25 bp, Homo sapien
ccgggttttattacatcatctagga

SEQ ID NO: 3159904 - DNA, 25 bp, Homo sapien
cctccacctttcaaagtctgagaaa

SEQ ID NO: 3159905 - DNA, 25 bp, Homo sapien
tacatctgccagttcaatcctttcc

SEQ ID NO: 3159906 - DNA, 25 bp, Homo sapien
cagttcaatcctttccacagtagcc

SEQ ID NO: 3159907 - DNA, 25 bp, Homo sapien
tctgagaaaatacatctgccagttc

SEQ ID NO: 3159908 - DNA, 25 bp, Homo sapien
cagggatggacaaggcattgggatc

SEQ ID NO: 3159909 - DNA, 25 bp, Homo sapien
caagcctgagacaatgagtggattt

SEQ ID NO: 3159910 - DNA, 25 bp, Homo sapien
tgccaccttatgtagatgaaaacac

SEQ ID NO: 3159911 - DNA, 25 bp, Homo sapien
cattgggatcatgggagtaatcaga

SEQ ID NO: 3159912 - DNA, 25 bp, Homo sapien
gttgctatgactatggtgagtctga

SEQ ID NO: 3159913 - DNA, 25 bp, Homo sapien
tgcacatccgcctattagggttgct

SEQ ID NO: 3159914 - DNA, 25 bp, Homo sapien
tgtggtccaatgcacatccgcctat

SEQ ID NO: 3159915 - DNA, 25 bp, Homo sapien
cctgcaaatgatgtggtccaatgca

SEQ ID NO: 3159916 - DNA, 25 bp, Homo sapien
cagcaagggctgaatatgccattaa

SEQ ID NO: 3159917 - DNA, 25 bp, Homo sapien
gccattaatggccatgcaataggct

SEQ ID NO: 3159918 - DNA, 25 bp, Homo sapien
gcaataggcttatctgggctcacaa

SEQ ID NO: 3159919 - DNA, 25 bp, Homo sapien
tatggttaccaaagacaagaggcaa

SEQ ID NO: 3159920 - DNA, 25 bp, Homo sapien
aacaagttcctccagttatggccca

SEQ ID NO: 3159921 - DNA, 25 bp, Homo sapien
gtgtcagtcccatatactcggcctg

SEQ ID NO: 3159922 - DNA, 25 bp, Homo sapien
tcacaacaggaccaatctaactgca

SEQ ID NO: 3159923 - DNA, 25 bp, Homo sapien
gaatccaggtgttgatctttctggc

SEQ ID NO: 3159924 - DNA, 25 bp, Homo sapien
gaggagcagagcttgatgagaccca

SEQ ID NO: 3159925 - DNA, 25 bp, Homo sapien
ttttctatgggctccaaagacacac

SEQ ID NO: 3159926 - DNA, 25 bp, Homo sapien
tgatgcctgggaagtgctatcctca

SEQ ID NO: 3159927 - DNA, 25 bp, Homo sapien
gacccaagtggaagtggcttttcta

SEQ ID NO: 3159928 - DNA, 25 bp, Homo sapien
ctgttttgcagatgataccacttaa

SEQ ID NO: 3159929 - DNA, 25 bp, Homo sapien
ttcaaaacctacttctagatcaaga

SEQ ID NO: 3159930 - DNA, 25 bp, Homo sapien
cagaaaagttctggcaatttaagga

SEQ ID NO: 3159931 - DNA, 25 bp, Homo sapien
gattacttgtgcctatgtgttatca

SEQ ID NO: 3159932 - DNA, 25 bp, Homo sapien
cagagcagctggcaagttgttaaaa

SEQ ID NO: 3159933 - DNA, 25 bp, Homo sapien
gacatctccattccttgcctattca

SEQ ID NO: 3159934 - DNA, 25 bp, Homo sapien
aaaagaatagctacttcgtaggcag

SEQ ID NO: 3159935 - DNA, 25 bp, Homo sapien
tatactggctctcttaaaactaagt

SEQ ID NO: 3159936 - DNA, 25 bp, Homo sapien
ctgtgtcatactggtaaatccaaac

SEQ ID NO: 3159937 - DNA, 25 bp, Homo sapien
actggtaaatccaaactggcttctg

SEQ ID NO: 3159938 - DNA, 25 bp, Homo sapien
caaactggcttctggttaccacttt

SEQ ID NO: 3159939 - DNA, 25 bp, Homo sapien
tggttaccactttctgggacagatt

SEQ ID NO: 3159940 - DNA, 25 bp, Homo sapien
gagggcttttgctaataagtgaaat

SEQ ID NO: 3159941 - DNA, 25 bp, Homo sapien
agagggcttttgctaataagtgaaa

SEQ ID NO: 3159942 - DNA, 25 bp, Homo sapien
ataagtgaaatttcggcgaaattcg

SEQ ID NO: 3159943 - DNA, 25 bp, Homo sapien
tgaaatttcggcgaaattcggagaa

SEQ ID NO: 3159944 - DNA, 25 bp, Homo sapien
gttgtttctcccatctggaagttcc

SEQ ID NO: 3159945 - DNA, 25 bp, Homo sapien
ctggggttgtttctcccatctggaa

SEQ ID NO: 3159946 - DNA, 25 bp, Homo sapien
cccatctggaagttcctgtcactac

SEQ ID NO: 3159947 - DNA, 25 bp, Homo sapien
atctggaagttcctgtcactaccat

SEQ ID NO: 3159948 - DNA, 25 bp, Homo sapien
ctgctgctgattaacaggatactta

SEQ ID NO: 3159949 - DNA, 25 bp, Homo sapien
gatttctgaaatgctaaccacttat

SEQ ID NO: 3159950 - DNA, 25 bp, Homo sapien
aatgatgataatagcgctgctgctg

SEQ ID NO: 3159951 - DNA, 25 bp, Homo sapien
ccttcatcaactgctgggaattttc

SEQ ID NO: 3159952 - DNA, 25 bp, Homo sapien
ataatcacacttatagttgctgtcc

SEQ ID NO: 3159953 - DNA, 25 bp, Homo sapien
aatcacacttatagttgctgtcctt

SEQ ID NO: 3159954 - DNA, 25 bp, Homo sapien
tataatcacacttatagttgctgtc

SEQ ID NO: 3159955 - DNA, 25 bp, Homo sapien
taatcacacttatagttgctgtcct

SEQ ID NO: 3159956 - DNA, 25 bp, Homo sapien
taaatagacaaaatacttgaataca

SEQ ID NO: 3159957 - DNA, 25 bp, Homo sapien
aaatagacaaaatacttgaatacat

SEQ ID NO: 3159958 - DNA, 25 bp, Homo sapien
gaaaatggtaattgagtacataaaa

SEQ ID NO: 3159959 - DNA, 25 bp, Homo sapien
gactccaccggattttcattgttga

SEQ ID NO: 3159960 - DNA, 25 bp, Homo sapien
gtgactccaccggattttcattgtt

SEQ ID NO: 3159961 - DNA, 25 bp, Homo sapien
ggtagtgactccaccggattttcat

SEQ ID NO: 3159962 - DNA, 25 bp, Homo sapien
cagatggtagtgactccaccggatt

SEQ ID NO: 3159963 - DNA, 25 bp, Homo sapien
ttgtcttattgttactatgacatcc

SEQ ID NO: 3159964 - DNA, 25 bp, Homo sapien
gttactatgacatccatattaaatg

SEQ ID NO: 3159965 - DNA, 25 bp, Homo sapien
catccatattaaatgttgctacacc

SEQ ID NO: 3159966 - DNA, 25 bp, Homo sapien
gtcttattgttactatgacatccat

SEQ ID NO: 3159967 - DNA, 25 bp, Homo sapien
ccttcaacaaggcaatctgatccat

SEQ ID NO: 3159968 - DNA, 25 bp, Homo sapien
ccaaaactcctcttagagacatgac

SEQ ID NO: 3159969 - DNA, 25 bp, Homo sapien
gacatgactcccacttttactactg

SEQ ID NO: 3159970 - DNA, 25 bp, Homo sapien
tactactgccttctctgcgtattcc

SEQ ID NO: 3159971 - DNA, 25 bp, Homo sapien
tttccagcataatcccctttgcatt

SEQ ID NO: 3159972 - DNA, 25 bp, Homo sapien
cattgggttacaacagatgtgattt

SEQ ID NO: 3159973 - DNA, 25 bp, Homo sapien
tgaagcacctttaaaactgttggcc

SEQ ID NO: 3159974 - DNA, 25 bp, Homo sapien
gctggaccctgaaacacttccggaa

SEQ ID NO: 3159975 - DNA, 25 bp, Homo sapien
tgatcacttggcactagccacttgg

SEQ ID NO: 3159976 - DNA, 25 bp, Homo sapien
cattgaaatgcaatgaatagtgtgc

SEQ ID NO: 3159977 - DNA, 25 bp, Homo sapien
gatgtgaaaccgaagtgttccatcc

SEQ ID NO: 3159978 - DNA, 25 bp, Homo sapien
aatagtgtgcagcttgctgatggtg

SEQ ID NO: 3159979 - DNA, 25 bp, Homo sapien
ttattcatagggcaaggtatcaatc

SEQ ID NO: 3159980 - DNA, 25 bp, Homo sapien
tattcatagggcaaggtatcaatct

SEQ ID NO: 3159981 - DNA, 25 bp, Homo sapien
ttataagcaacatgtgtcgccggtc

SEQ ID NO: 3159982 - DNA, 25 bp, Homo sapien
ccaaggtgggctctttgtgtttata

SEQ ID NO: 3159983 - DNA, 25 bp, Homo sapien
agcaacatgtgtcgccggtcttcag

SEQ ID NO: 3159984 - DNA, 25 bp, Homo sapien
caaggtgggctctttgtgtttataa

SEQ ID NO: 3159985 - DNA, 25 bp, Homo sapien
tccatactcttttagaaggcttttc

SEQ ID NO: 3159986 - DNA, 25 bp, Homo sapien
ggtggtttagttggcctcagattca

SEQ ID NO: 3159987 - DNA, 25 bp, Homo sapien
tagatctctggtggtttagttggcc

SEQ ID NO: 3159988 - DNA, 25 bp, Homo sapien
gttttattaatgtggtgagattgtc

SEQ ID NO: 3159989 - DNA, 25 bp, Homo sapien
ttagttggcctcagattcagttgtg

SEQ ID NO: 3159990 - DNA, 25 bp, Homo sapien
taatatacctttcatgtcatgtaac

SEQ ID NO: 3159991 - DNA, 25 bp, Homo sapien
tgaatagtgagtttgaatttaagac

SEQ ID NO: 3159992 - DNA, 25 bp, Homo sapien
tgtccttctacattgcttctgttga

SEQ ID NO: 3159993 - DNA, 25 bp, Homo sapien
tcatgtaacctatttgtccttctac

SEQ ID NO: 3159994 - DNA, 25 bp, Homo sapien
ttctgaacccatgggcacatcccca

SEQ ID NO: 3159995 - DNA, 25 bp, Homo sapien
tctgaacccatgggcacatccccat

SEQ ID NO: 3159996 - DNA, 25 bp, Homo sapien
ctgccacaacgtcatctacaattgc

SEQ ID NO: 3159997 - DNA, 25 bp, Homo sapien
cacaacgtcatctacaattgctcta

SEQ ID NO: 3159998 - DNA, 25 bp, Homo sapien
tacaattgctctatttaacacaagg

SEQ ID NO: 3159999 - DNA, 25 bp, Homo sapien
ttgctctatttaacacaaggtgtat

SEQ ID NO: 3160000 - DNA, 25 bp, Homo sapien
cagtgaaactgatgattaatagatt

SEQ ID NO: 3160001 - DNA, 25 bp, Homo sapien
ggccagtgaaactgatgattaatag

SEQ ID NO: 3160002 - DNA, 25 bp, Homo sapien
aaggccagtgaaactgatgattaat

SEQ ID NO: 3160003 - DNA, 25 bp, Homo sapien
ccagtgaaactgatgattaatagat

SEQ ID NO: 3160004 - DNA, 25 bp, Homo sapien
cactaatgtcaccatttgtgaaggc

SEQ ID NO: 3160005 - DNA, 25 bp, Homo sapien
tccagctcggattaccagtgccact

SEQ ID NO: 3160006 - DNA, 25 bp, Homo sapien
gaaggctttttagggacttgcagat

SEQ ID NO: 3160007 - DNA, 25 bp, Homo sapien
gccacagaacaatatcgaagctgat

SEQ ID NO: 3160008 - DNA, 25 bp, Homo sapien
gtgacttgtacatagtgaacactca

SEQ ID NO: 3160009 - DNA, 25 bp, Homo sapien
tcttcaagaccccattcaagtgtag

SEQ ID NO: 3160010 - DNA, 25 bp, Homo sapien
acttgcagctcccaaagtgacttgt

SEQ ID NO: 3160011 - DNA, 25 bp, Homo sapien
tctgatagattgtaagctccccaag

SEQ ID NO: 3160012 - DNA, 25 bp, Homo sapien
tgacaaagattgtaatgagaattgg

SEQ ID NO: 3160013 - DNA, 25 bp, Homo sapien
aatgagaattggtatgaacataacc

SEQ ID NO: 3160014 - DNA, 25 bp, Homo sapien
tcattgcagtgacaaagattgtaat

SEQ ID NO: 3160015 - DNA, 25 bp, Homo sapien
gattgtaatgagaattggtatgaac

SEQ ID NO: 3160016 - DNA, 25 bp, Homo sapien
tcactttctcgaaatggaatagtcc

SEQ ID NO: 3160017 - DNA, 25 bp, Homo sapien
ttcttataccactagggtgccattc

SEQ ID NO: 3160018 - DNA, 25 bp, Homo sapien
taggcagaatccaccaatttttcac

SEQ ID NO: 3160019 - DNA, 25 bp, Homo sapien
cactagggtgccattcagtaaattg

SEQ ID NO: 3160020 - DNA, 25 bp, Homo sapien
tatccatcatctgctaagtaactcg

SEQ ID NO: 3160021 - DNA, 25 bp, Homo sapien
gcagtgacatgcatgaatctcaaaa

SEQ ID NO: 3160022 - DNA, 25 bp, Homo sapien
atcagttcaagattgccagaggctg

SEQ ID NO: 3160023 - DNA, 25 bp, Homo sapien
tgatctatatcttggccaggtatgg

SEQ ID NO: 3160024 - DNA, 25 bp, Homo sapien
ctttgttgatgcaggtggagaaatc

SEQ ID NO: 3160025 - DNA, 25 bp, Homo sapien
aaggcacaactgtctccgttttgca

SEQ ID NO: 3160026 - DNA, 25 bp, Homo sapien
ctgagcatccacaaagcttccttct

SEQ ID NO: 3160027 - DNA, 25 bp, Homo sapien
ggcagctgagcatccacaaagcttc

SEQ ID NO: 3160028 - DNA, 25 bp, Homo sapien
atacgctttcaaatattcagggtaa

SEQ ID NO: 3160029 - DNA, 25 bp, Homo sapien
aaaatacgctttcaaatattcaggg

SEQ ID NO: 3160030 - DNA, 25 bp, Homo sapien
aatacgctttcaaatattcagggta

SEQ ID NO: 3160031 - DNA, 25 bp, Homo sapien
tacgctttcaaatattcagggtaaa

SEQ ID NO: 3160032 - DNA, 25 bp, Homo sapien
ctctgtatcttcttggtctgggcct

SEQ ID NO: 3160033 - DNA, 25 bp, Homo sapien
ggcttgtcttgacttctactctctg

SEQ ID NO: 3160034 - DNA, 25 bp, Homo sapien
ttggtctgggcctttgtagcttcat

SEQ ID NO: 3160035 - DNA, 25 bp, Homo sapien
tgacttctactctctggatttctct

SEQ ID NO: 3160036 - DNA, 25 bp, Homo sapien
ttgaaaatgctgcctaagagaagca

SEQ ID NO: 3160037 - DNA, 25 bp, Homo sapien
gaaaatgctgcctaagagaagcacc

SEQ ID NO: 3160038 - DNA, 25 bp, Homo sapien
aaaatgctgcctaagagaagcacca

SEQ ID NO: 3160039 - DNA, 25 bp, Homo sapien
aatgctgcctaagagaagcaccaaa

SEQ ID NO: 3160040 - DNA, 25 bp, Homo sapien
aaggtggtcatacaggtgaagagct

SEQ ID NO: 3160041 - DNA, 25 bp, Homo sapien
tcaaggtggtcatacaggtgaagag

SEQ ID NO: 3160042 - DNA, 25 bp, Homo sapien
ggtggtcatacaggtgaagagctgt

SEQ ID NO: 3160043 - DNA, 25 bp, Homo sapien
agttcaaggtggtcatacaggtgaa

SEQ ID NO: 3160044 - DNA, 25 bp, Homo sapien
gatgcaattaactgctttggtgttt

SEQ ID NO: 3160045 - DNA, 25 bp, Homo sapien
ggtgtttaatcccaatgaagaatta

SEQ ID NO: 3160046 - DNA, 25 bp, Homo sapien
gctttggtgtttaatcccaatgaag

SEQ ID NO: 3160047 - DNA, 25 bp, Homo sapien
taactgctttggtgtttaatcccaa

SEQ ID NO: 3160048 - DNA, 25 bp, Homo sapien
tggcagctgggtgctgcaaggatgc

SEQ ID NO: 3160049 - DNA, 25 bp, Homo sapien
caaggccgaaattgttggtttctgt

SEQ ID NO: 3160050 - DNA, 25 bp, Homo sapien
gccaagcactgcaaggccgaaattg

SEQ ID NO: 3160051 - DNA, 25 bp, Homo sapien
cactgcaaggccgaaattgttggtt

SEQ ID NO: 3160052 - DNA, 25 bp, Homo sapien
ttaagggagcttcaggaaagagaat

SEQ ID NO: 3160053 - DNA, 25 bp, Homo sapien
gctctcagtccccgaagaccccacc

SEQ ID NO: 3160054 - DNA, 25 bp, Homo sapien
ctgctctcagtccccgaagacccca

SEQ ID NO: 3160055 - DNA, 25 bp, Homo sapien
tgctctcagtccccgaagaccccac

SEQ ID NO: 3160056 - DNA, 25 bp, Homo sapien
ctcagtccccgaagaccccaccctg

SEQ ID NO: 3160057 - DNA, 25 bp, Homo sapien
aaactcgccgcagtttcatcggctt

SEQ ID NO: 3160058 - DNA, 25 bp, Homo sapien
ggttccagattgtttggtcctcctg

SEQ ID NO: 3160059 - DNA, 25 bp, Homo sapien
tttggttccagattgtttggtcctc

SEQ ID NO: 3160060 - DNA, 25 bp, Homo sapien
gattgtttggtcctcctgtcaggga

SEQ ID NO: 3160061 - DNA, 25 bp, Homo sapien
tccagattgtttggtcctcctgtca

SEQ ID NO: 3160062 - DNA, 25 bp, Homo sapien
tattcttctccgttgtcagtaaaat

SEQ ID NO: 3160063 - DNA, 25 bp, Homo sapien
ttattcttctccgttgtcagtaaaa

SEQ ID NO: 3160064 - DNA, 25 bp, Homo sapien
gaatctctttgatcatcatactttt

SEQ ID NO: 3160065 - DNA, 25 bp, Homo sapien
aatctctttgatcatcatactttta

SEQ ID NO: 3160066 - DNA, 25 bp, Homo sapien
tagaatctctttgatcatcatactt

SEQ ID NO: 3160067 - DNA, 25 bp, Homo sapien
attagaatctctttgatcatcatac

SEQ ID NO: 3160068 - DNA, 25 bp, Homo sapien
tagagtatgctgctaatataaacct

SEQ ID NO: 3160069 - DNA, 25 bp, Homo sapien
agagtatgctgctaatataaacctt

SEQ ID NO: 3160070 - DNA, 25 bp, Homo sapien
ttttgaaagtggtagagtatgctgc

SEQ ID NO: 3160071 - DNA, 25 bp, Homo sapien
tactgtgtgatactcagaatacaca

SEQ ID NO: 3160072 - DNA, 25 bp, Homo sapien
aatgccatacctggagaaactttgc

SEQ ID NO: 3160073 - DNA, 25 bp, Homo sapien
gatataactttgaaccaatggtcaa

SEQ ID NO: 3160074 - DNA, 25 bp, Homo sapien
gaattcagagaagcccctttcacta

SEQ ID NO: 3160075 - DNA, 25 bp, Homo sapien
tgagagtaactcatcttagaaattg

SEQ ID NO: 3160076 - DNA, 25 bp, Homo sapien
cagcatcttgagagtaactcatctt

SEQ ID NO: 3160077 - DNA, 25 bp, Homo sapien
tcttgagagtaactcatcttagaaa

SEQ ID NO: 3160078 - DNA, 25 bp, Homo sapien
gtaactcatcttagaaattgactca

SEQ ID NO: 3160079 - DNA, 25 bp, Homo sapien
tgccattattaacaagactgtctgg

SEQ ID NO: 3160080 - DNA, 25 bp, Homo sapien
ttgtcaatcaaagcccaccttgcac

SEQ ID NO: 3160081 - DNA, 25 bp, Homo sapien
gagggactgaaaggatttgccatta

SEQ ID NO: 3160082 - DNA, 25 bp, Homo sapien
aaagcccaccttgcaccaaagaggg

SEQ ID NO: 3160083 - DNA, 25 bp, Homo sapien
gactttcaaacaattactactctgg

SEQ ID NO: 3160084 - DNA, 25 bp, Homo sapien
taccctagagaattttgtacctgaa

SEQ ID NO: 3160085 - DNA, 25 bp, Homo sapien
gacactcaacaatgtaataccctag

SEQ ID NO: 3160086 - DNA, 25 bp, Homo sapien
gtttatctattctatgtcccttcaa

SEQ ID NO: 3160087 - DNA, 25 bp, Homo sapien
attggtaggatgattgtagttgtga

SEQ ID NO: 3160088 - DNA, 25 bp, Homo sapien
cagaagcagacacattagcaagcat

SEQ ID NO: 3160089 - DNA, 25 bp, Homo sapien
ctacagaagcagacacattagcaag

SEQ ID NO: 3160090 - DNA, 25 bp, Homo sapien
acagaagcagacacattagcaagca

SEQ ID NO: 3160091 - DNA, 25 bp, Homo sapien
tacagaagcagacacattagcaagc

SEQ ID NO: 3160092 - DNA, 25 bp, Homo sapien
cattctgcattcacgtaggtttgga

SEQ ID NO: 3160093 - DNA, 25 bp, Homo sapien
gattttgtataagcttccaggacaa

SEQ ID NO: 3160094 - DNA, 25 bp, Homo sapien
ttgtgcccttttccataaggaacaa

SEQ ID NO: 3160095 - DNA, 25 bp, Homo sapien
aagcttccaggacaaagaaactttg

SEQ ID NO: 3160096 - DNA, 25 bp, Homo sapien
tttcaccttcaacgccctgcacagc

SEQ ID NO: 3160097 - DNA, 25 bp, Homo sapien
accttcaacgccctgcacagcaagc

SEQ ID NO: 3160098 - DNA, 25 bp, Homo sapien
agctttcaccttcaacgccctgcac

SEQ ID NO: 3160099 - DNA, 25 bp, Homo sapien
caacgccctgcacagcaagcctgtg

SEQ ID NO: 3160100 - DNA, 25 bp, Homo sapien
ttctttttgtctgacatttctgcat

SEQ ID NO: 3160101 - DNA, 25 bp, Homo sapien
cctatagccttttatctttacacat

SEQ ID NO: 3160102 - DNA, 25 bp, Homo sapien
tagccttttatctttacacatttct

SEQ ID NO: 3160103 - DNA, 25 bp, Homo sapien
tatagccttttatctttacacattt

SEQ ID NO: 3160104 - DNA, 25 bp, Homo sapien
tctgagctgatagaagagttgaggt

SEQ ID NO: 3160105 - DNA, 25 bp, Homo sapien
tgactgtctactgcccgaggtgtgc

SEQ ID NO: 3160106 - DNA, 25 bp, Homo sapien
cgaggtgtgcctctaacagggagac

SEQ ID NO: 3160107 - DNA, 25 bp, Homo sapien
agactacatgagagccgctggctga

SEQ ID NO: 3160108 - DNA, 25 bp, Homo sapien
acggaaaccctctgcgtttaagcag

SEQ ID NO: 3160109 - DNA, 25 bp, Homo sapien
gaaaccctctgcgtttaagcagtcc

SEQ ID NO: 3160110 - DNA, 25 bp, Homo sapien
aaccctctgcgtttaagcagtccat

SEQ ID NO: 3160111 - DNA, 25 bp, Homo sapien
ctgaatgattctcttcacggaaacc

SEQ ID NO: 3160112 - DNA, 25 bp, Homo sapien
gatacaagtaataccatcaagtgtg

SEQ ID NO: 3160113 - DNA, 25 bp, Homo sapien
gttccgatggatacaagtaatacca

SEQ ID NO: 3160114 - DNA, 25 bp, Homo sapien
caagtgtgtaataacttgagaaagt

SEQ ID NO: 3160115 - DNA, 25 bp, Homo sapien
acctctgctgtggttccgatggata

SEQ ID NO: 3160116 - DNA, 25 bp, Homo sapien
gcttcaatcagataactccttgtgt

SEQ ID NO: 3160117 - DNA, 25 bp, Homo sapien
aactccttgtgtaggcagcttttaa

SEQ ID NO: 3160118 - DNA, 25 bp, Homo sapien
ttggcagcaggctctagcttcaatc

SEQ ID NO: 3160119 - DNA, 25 bp, Homo sapien
aatgcgtattatgtagttggcagca

SEQ ID NO: 3160120 - DNA, 25 bp, Homo sapien
tttttcttgtatctgaactgacgtt

SEQ ID NO: 3160121 - DNA, 25 bp, Homo sapien
cagttctttccagatcccttcccat

SEQ ID NO: 3160122 - DNA, 25 bp, Homo sapien
aactcttcagttctttccagatccc

SEQ ID NO: 3160123 - DNA, 25 bp, Homo sapien
ttcagttctttccagatcccttccc

SEQ ID NO: 3160124 - DNA, 25 bp, Homo sapien
tcttcagttctttccagatcccttc

SEQ ID NO: 3160125 - DNA, 25 bp, Homo sapien
atcttgtcttctgagtccacgtcca

SEQ ID NO: 3160126 - DNA, 25 bp, Homo sapien
tcttgtcttctgagtccacgtccat

SEQ ID NO: 3160127 - DNA, 25 bp, Homo sapien
aatcttgtcttctgagtccacgtcc

SEQ ID NO: 3160128 - DNA, 25 bp, Homo sapien
aagtggagggatgcctctgtcccct

SEQ ID NO: 3160129 - DNA, 25 bp, Homo sapien
gaaagtggagggatgcctctgtccc

SEQ ID NO: 3160130 - DNA, 25 bp, Homo sapien
cccagtgacccatggaaagtggagg

SEQ ID NO: 3160131 - DNA, 25 bp, Homo sapien
tacccagtgacccatggaaagtgga

SEQ ID NO: 3160132 - DNA, 25 bp, Homo sapien
ccactctctgctgaacatggctgct

SEQ ID NO: 3160133 - DNA, 25 bp, Homo sapien
tgctgccaccactaagagtgctgtc

SEQ ID NO: 3160134 - DNA, 25 bp, Homo sapien
cttggcggagcctactaatgtcagg

SEQ ID NO: 3160135 - DNA, 25 bp, Homo sapien
gctgccactgccacatgtatgctga

SEQ ID NO: 3160136 - DNA, 25 bp, Homo sapien
tgaagcttcaattgtctaacatgac

SEQ ID NO: 3160137 - DNA, 25 bp, Homo sapien
ttactggagaatggcacagttcata

SEQ ID NO: 3160138 - DNA, 25 bp, Homo sapien
taacatgacaaactgtgtgacgcca

SEQ ID NO: 3160139 - DNA, 25 bp, Homo sapien
tcaattatgaaagcttcctggcagt

SEQ ID NO: 3160140 - DNA, 25 bp, Homo sapien
tcctaattcttgaatcagacctgaa

SEQ ID NO: 3160141 - DNA, 25 bp, Homo sapien
ccatgtgcataggtggagaaagcca

SEQ ID NO: 3160142 - DNA, 25 bp, Homo sapien
tgatgtccattgctcccaaaggccc

SEQ ID NO: 3160143 - DNA, 25 bp, Homo sapien
gacctgaaatatacagtcctgtctc

SEQ ID NO: 3160144 - DNA, 25 bp, Homo sapien
gtgaagagagcttgatttcacagag

SEQ ID NO: 3160145 - DNA, 25 bp, Homo sapien
ggagaagtgaagagagcttgatttc

SEQ ID NO: 3160146 - DNA, 25 bp, Homo sapien
aagtgaagagagcttgatttcacag

SEQ ID NO: 3160147 - DNA, 25 bp, Homo sapien
gaagagagcttgatttcacagagca

SEQ ID NO: 3160148 - DNA, 25 bp, Homo sapien
tttgagccaggtccgttgctaccat

SEQ ID NO: 3160149 - DNA, 25 bp, Homo sapien
acttctggggatttgagccaggtcc

SEQ ID NO: 3160150 - DNA, 25 bp, Homo sapien
gatttgagccaggtccgttgctacc

SEQ ID NO: 3160151 - DNA, 25 bp, Homo sapien
gggatttgagccaggtccgttgcta

SEQ ID NO: 3160152 - DNA, 25 bp, Homo sapien
ggagaaagagcagtcagtcctttgg

SEQ ID NO: 3160153 - DNA, 25 bp, Homo sapien
ctgtttgaggagaaagagcagtcag

SEQ ID NO: 3160154 - DNA, 25 bp, Homo sapien
ttgaggagaaagagcagtcagtcct

SEQ ID NO: 3160155 - DNA, 25 bp, Homo sapien
gaggagaaagagcagtcagtccttt

SEQ ID NO: 3160156 - DNA, 25 bp, Homo sapien
cctacccaggcttgtctagtctttt

SEQ ID NO: 3160157 - DNA, 25 bp, Homo sapien
cacttgtgctaaaggtttacttgaa

SEQ ID NO: 3160158 - DNA, 25 bp, Homo sapien
gtctagtcttttggaggcactctgg

SEQ ID NO: 3160159 - DNA, 25 bp, Homo sapien
ttcttcttgcacttgtgctaaaggt

SEQ ID NO: 3160160 - DNA, 25 bp, Homo sapien
ttcatgatattttgcagaacagttc

SEQ ID NO: 3160161 - DNA, 25 bp, Homo sapien
ttgtcatggacacagtgttcttttc

SEQ ID NO: 3160162 - DNA, 25 bp, Homo sapien
tgggttgtcatggacacagtgttct

SEQ ID NO: 3160163 - DNA, 25 bp, Homo sapien
tgctgggttgtcatggacacagtgt

SEQ ID NO: 3160164 - DNA, 25 bp, Homo sapien
tgcattctaacacttcacagacagc

SEQ ID NO: 3160165 - DNA, 25 bp, Homo sapien
tcaagcacacaattgcattctaaca

SEQ ID NO: 3160166 - DNA, 25 bp, Homo sapien
ggagctatttgcgtcctcattttaa

SEQ ID NO: 3160167 - DNA, 25 bp, Homo sapien
ccctgtggaggctgataaggaaaat

SEQ ID NO: 3160168 - DNA, 25 bp, Homo sapien
tgaatgaagtaagggcgatgtagaa

SEQ ID NO: 3160169 - DNA, 25 bp, Homo sapien
gagggtagctttcaggctctctcct

SEQ ID NO: 3160170 - DNA, 25 bp, Homo sapien
taagggcgatgtagaaaatgaccat

SEQ ID NO: 3160171 - DNA, 25 bp, Homo sapien
gactctgcccatgagggtagctttc

SEQ ID NO: 3160172 - DNA, 25 bp, Homo sapien
gcagatgtgaaaacctctttttgtg

SEQ ID NO: 3160173 - DNA, 25 bp, Homo sapien
cagatgtgaaaacctctttttgtga

SEQ ID NO: 3160174 - DNA, 25 bp, Homo sapien
gaggatatttggacctctttgaggc

SEQ ID NO: 3160175 - DNA, 25 bp, Homo sapien
tgcaagaggatatttggacctcttt

SEQ ID NO: 3160176 - DNA, 25 bp, Homo sapien
caagaggatatttggacctctttga

SEQ ID NO: 3160177 - DNA, 25 bp, Homo sapien
ctgcaagaggatatttggacctctt

SEQ ID NO: 3160178 - DNA, 25 bp, Homo sapien
ttcatccaagcacccgcagaactat

SEQ ID NO: 3160179 - DNA, 25 bp, Homo sapien
gctttcatagacaccagtgcttttc

SEQ ID NO: 3160180 - DNA, 25 bp, Homo sapien
cacctattctttgcgctttcataga

SEQ ID NO: 3160181 - DNA, 25 bp, Homo sapien
ttggcacctattctttgcgctttca

SEQ ID NO: 3160182 - DNA, 25 bp, Homo sapien
tgagatttggaaggtaggtgtaaac

SEQ ID NO: 3160183 - DNA, 25 bp, Homo sapien
taggtgtaaacagggggccattctc

SEQ ID NO: 3160184 - DNA, 25 bp, Homo sapien
agatttggaaggtaggtgtaaacag

SEQ ID NO: 3160185 - DNA, 25 bp, Homo sapien
gtgtaaacagggggccattctccag

SEQ ID NO: 3160186 - DNA, 25 bp, Homo sapien
gatggccacaagtagtcctagttac

SEQ ID NO: 3160187 - DNA, 25 bp, Homo sapien
gccacaagtagtcctagttacacat

SEQ ID NO: 3160188 - DNA, 25 bp, Homo sapien
gaagatggccacaagtagtcctagt

SEQ ID NO: 3160189 - DNA, 25 bp, Homo sapien
gaggaagatggccacaagtagtcct

SEQ ID NO: 3160190 - DNA, 25 bp, Homo sapien
gaatgtcttgctctggatgtcctac

SEQ ID NO: 3160191 - DNA, 25 bp, Homo sapien
gtactccctcttaaatgctcaacag

SEQ ID NO: 3160192 - DNA, 25 bp, Homo sapien
cctatggcctatgttggatatataa

SEQ ID NO: 3160193 - DNA, 25 bp, Homo sapien
gccaagtgttatccattcagattgc

SEQ ID NO: 3160194 - DNA, 25 bp, Homo sapien
catccttaaatgatcgatttttgtc

SEQ ID NO: 3160195 - DNA, 25 bp, Homo sapien
tgtgtaagtacaggtaaccctttga

SEQ ID NO: 3160196 - DNA, 25 bp, Homo sapien
gctggaccaaatggactgtatttta

SEQ ID NO: 3160197 - DNA, 25 bp, Homo sapien
tgtgaaatctccgtagtattttcca

SEQ ID NO: 3160198 - DNA, 25 bp, Homo sapien
ctcgccatagagacagcagccggcg

SEQ ID NO: 3160199 - DNA, 25 bp, Homo sapien
gtagacacctctcgcccagcgaggg

SEQ ID NO: 3160200 - DNA, 25 bp, Homo sapien
ttgtgtcgctgagctcgcgctcctc

SEQ ID NO: 3160201 - DNA, 25 bp, Homo sapien
ggaaaggcgagcaggagctgcgctg

SEQ ID NO: 3160202 - DNA, 25 bp, Homo sapien
gttgcaagcccaaacttcacaaatt

SEQ ID NO: 3160203 - DNA, 25 bp, Homo sapien
cgtgtccatagcaacgtaattatat

SEQ ID NO: 3160204 - DNA, 25 bp, Homo sapien
gcaacgtaattatattttcggataa

SEQ ID NO: 3160205 - DNA, 25 bp, Homo sapien
tagcaacgtaattatattttcggat

SEQ ID NO: 3160206 - DNA, 25 bp, Homo sapien
ctcgtgtccatagcaacgtaattat

SEQ ID NO: 3160207 - DNA, 25 bp, Homo sapien
cattacaccgcaatagttggtattg

SEQ ID NO: 3160208 - DNA, 25 bp, Homo sapien
attacaccgcaatagttggtattga

SEQ ID NO: 3160209 - DNA, 25 bp, Homo sapien
tacattacaccgcaatagttggtat

SEQ ID NO: 3160210 - DNA, 25 bp, Homo sapien
tacaccgcaatagttggtattgata

SEQ ID NO: 3160211 - DNA, 25 bp, Homo sapien
tcattcataaatgtcagccctagct

SEQ ID NO: 3160212 - DNA, 25 bp, Homo sapien
ccctagctgaattatctttaacaag

SEQ ID NO: 3160213 - DNA, 25 bp, Homo sapien
tgaagttcctggagggtattctcct

SEQ ID NO: 3160214 - DNA, 25 bp, Homo sapien
tggagggtattctccttgctcattc

SEQ ID NO: 3160215 - DNA, 25 bp, Homo sapien
ctttgcagccaacgagggtaaagga

SEQ ID NO: 3160216 - DNA, 25 bp, Homo sapien
ttgcagccaacgagggtaaaggacc

SEQ ID NO: 3160217 - DNA, 25 bp, Homo sapien
cagccaacgagggtaaaggacccag

SEQ ID NO: 3160218 - DNA, 25 bp, Homo sapien
gcagccaacgagggtaaaggaccca

SEQ ID NO: 3160219 - DNA, 25 bp, Homo sapien
cacaatatcgtctaaaaggaaggca

SEQ ID NO: 3160220 - DNA, 25 bp, Homo sapien
ttagctgcagacatatattctttgg

SEQ ID NO: 3160221 - DNA, 25 bp, Homo sapien
gaaaaggatctgtcttgataacgat

SEQ ID NO: 3160222 - DNA, 25 bp, Homo sapien
tcgtgattagtggagtactatctcc

SEQ ID NO: 3160223 - DNA, 25 bp, Homo sapien
gatgagtcggatcaaagttttgcca

SEQ ID NO: 3160224 - DNA, 25 bp, Homo sapien
cagtcccattgttaggcatgcggca

SEQ ID NO: 3160225 - DNA, 25 bp, Homo sapien
gcagggtctctgaaacaacgcacaa

SEQ ID NO: 3160226 - DNA, 25 bp, Homo sapien
tcctcccgatgatacgaagttgata

SEQ ID NO: 3160227 - DNA, 25 bp, Homo sapien
ggttatactagcaaccagtccaggg

SEQ ID NO: 3160228 - DNA, 25 bp, Homo sapien
ccatctatgattgtagaagcgggac

SEQ ID NO: 3160229 - DNA, 25 bp, Homo sapien
taaggagtgctccatggccgagagt

SEQ ID NO: 3160230 - DNA, 25 bp, Homo sapien
ttcatgtgggtcataccgcctgcca

SEQ ID NO: 3160231 - DNA, 25 bp, Homo sapien
cttttgttacagcacatagttgccc

SEQ ID NO: 3160232 - DNA, 25 bp, Homo sapien
tgagatttggttacttatgttaggg

SEQ ID NO: 3160233 - DNA, 25 bp, Homo sapien
tgacgagttgttttgattgtattcc

SEQ ID NO: 3160234 - DNA, 25 bp, Homo sapien
atgtataggttctttcctgtgttat

SEQ ID NO: 3160235 - DNA, 25 bp, Homo sapien
cagaccttaacaactcatagcgtgg

SEQ ID NO: 3160236 - DNA, 25 bp, Homo sapien
catggtttcagcttacagggtcttt

SEQ ID NO: 3160237 - DNA, 25 bp, Homo sapien
cactcagggtaatttaagtcctctc

SEQ ID NO: 3160238 - DNA, 25 bp, Homo sapien
attacttgccaattttcactcaggg

SEQ ID NO: 3160239 - DNA, 25 bp, Homo sapien
tggtttctcgtctcaaacaaaatga

SEQ ID NO: 3160240 - DNA, 25 bp, Homo sapien
tctgtgagaggaaaaggcaactgtt

SEQ ID NO: 3160241 - DNA, 25 bp, Homo sapien
ttctgtgagaggaaaaggcaactgt

SEQ ID NO: 3160242 - DNA, 25 bp, Homo sapien
tgtggtttggtttctcgtctcaaac

SEQ ID NO: 3160243 - DNA, 25 bp, Homo sapien
caaaggtagagcagtaatctttaac

SEQ ID NO: 3160244 - DNA, 25 bp, Homo sapien
ccggtatcctgaccgcttgattaat

SEQ ID NO: 3160245 - DNA, 25 bp, Homo sapien
tttcctggaagatcctgcgaggggc

SEQ ID NO: 3160246 - DNA, 25 bp, Homo sapien
tcctgaccgcttgattaataaaaaa

SEQ ID NO: 3160247 - DNA, 25 bp, Homo sapien
ttttcaagtactctaattatcacca

SEQ ID NO: 3160248 - DNA, 25 bp, Homo sapien
gcactttgctgccaattgcttggaa

SEQ ID NO: 3160249 - DNA, 25 bp, Homo sapien
tgccaattgcttggaaattccactt

SEQ ID NO: 3160250 - DNA, 25 bp, Homo sapien
aattccacttattttgcttagattt

SEQ ID NO: 3160251 - DNA, 25 bp, Homo sapien
tattatactctttttgtcggtataa

SEQ ID NO: 3160252 - DNA, 25 bp, Homo sapien
gaaaagagtagttcctctcaactct

SEQ ID NO: 3160253 - DNA, 25 bp, Homo sapien
aactctgtccagtaatgctcatact

SEQ ID NO: 3160254 - DNA, 25 bp, Homo sapien
aaaagagtagttcctctcaactctg

SEQ ID NO: 3160255 - DNA, 25 bp, Homo sapien
tgtgaggtctactatgtctaatttg

SEQ ID NO: 3160256 - DNA, 25 bp, Homo sapien
cttcagttgtacttcctctttcggc

SEQ ID NO: 3160257 - DNA, 25 bp, Homo sapien
tctgctcagtaaggcatgtgaggtc

SEQ ID NO: 3160258 - DNA, 25 bp, Homo sapien
ctctttcggcaaaacaagggtgaat

SEQ ID NO: 3160259 - DNA, 25 bp, Homo sapien
taccaggtcagggttggtagctcat

SEQ ID NO: 3160260 - DNA, 25 bp, Homo sapien
cattagcagttaaaatggactggct

SEQ ID NO: 3160261 - DNA, 25 bp, Homo sapien
tgtcagaagacatacagctgtaatc

SEQ ID NO: 3160262 - DNA, 25 bp, Homo sapien
tcaggacaaccaaatttgatagtag

SEQ ID NO: 3160263 - DNA, 25 bp, Homo sapien
tccattcttccccactttctgtgtt

SEQ ID NO: 3160264 - DNA, 25 bp, Homo sapien
agaatgaagcctctccattcttccc

SEQ ID NO: 3160265 - DNA, 25 bp, Homo sapien
tctgttactgtaagaatgaagcctc

SEQ ID NO: 3160266 - DNA, 25 bp, Homo sapien
tactgtaagaatgaagcctctccat

SEQ ID NO: 3160267 - DNA, 25 bp, Homo sapien
gcatagggttcagtacatccacata

SEQ ID NO: 3160268 - DNA, 25 bp, Homo sapien
gagtgacacgttttggggaactgac

SEQ ID NO: 3160269 - DNA, 25 bp, Homo sapien
tccacggacgtactctgctctgtct

SEQ ID NO: 3160270 - DNA, 25 bp, Homo sapien
tctttttccacggacgtactctgct

SEQ ID NO: 3160271 - DNA, 25 bp, Homo sapien
tcccaaagaagggttcttctggagc

SEQ ID NO: 3160272 - DNA, 25 bp, Homo sapien
ccaaagaagggttcttctggagcat

SEQ ID NO: 3160273 - DNA, 25 bp, Homo sapien
gcctctttccgggacactgtataaa

SEQ ID NO: 3160274 - DNA, 25 bp, Homo sapien
caaagaagggttcttctggagcatc

SEQ ID NO: 3160275 - DNA, 25 bp, Homo sapien
gatggagtagtttctactgtcacta

SEQ ID NO: 3160276 - DNA, 25 bp, Homo sapien
tcctgccgaatagtgatggagtagt

SEQ ID NO: 3160277 - DNA, 25 bp, Homo sapien
tgccgaatagtgatggagtagtttc

SEQ ID NO: 3160278 - DNA, 25 bp, Homo sapien
ctatctcctgccgaatagtgatgga

SEQ ID NO: 3160279 - DNA, 25 bp, Homo sapien
caagagtcatctggtaatttggcat

SEQ ID NO: 3160280 - DNA, 25 bp, Homo sapien
taggtaaaggtggatgatagtctac

SEQ ID NO: 3160281 - DNA, 25 bp, Homo sapien
ttgtttattcctgagaacaagtatt

SEQ ID NO: 3160282 - DNA, 25 bp, Homo sapien
tgagaacaagtattccctcccacag

SEQ ID NO: 3160283 - DNA, 25 bp, Homo sapien
aacagctttatgtcttatgaattca

SEQ ID NO: 3160284 - DNA, 25 bp, Homo sapien
gttctgttgtaagaacagctttatg

SEQ ID NO: 3160285 - DNA, 25 bp, Homo sapien
agccatgaagttctgttgtaagaac

SEQ ID NO: 3160286 - DNA, 25 bp, Homo sapien
gctttatgtcttatgaattcacgca

SEQ ID NO: 3160287 - DNA, 25 bp, Homo sapien
caatgaaacaaatggttagtctcca

SEQ ID NO: 3160288 - DNA, 25 bp, Homo sapien
tacaatgaaacaaatggttagtctc

SEQ ID NO: 3160289 - DNA, 25 bp, Homo sapien
gtataatcaacctatgttgtcatga

SEQ ID NO: 3160290 - DNA, 25 bp, Homo sapien
tcacctgtataatcaacctatgttg

SEQ ID NO: 3160291 - DNA, 25 bp, Homo sapien
caatagtgtagttttgtcctacgct

SEQ ID NO: 3160292 - DNA, 25 bp, Homo sapien
ccagttcaatagtgtagttttgtcc

SEQ ID NO: 3160293 - DNA, 25 bp, Homo sapien
cactttgtagtgcttgattcttgga

SEQ ID NO: 3160294 - DNA, 25 bp, Homo sapien
ttttgtcctacgctcatcactttgt

SEQ ID NO: 3160295 - DNA, 25 bp, Homo sapien
aatggtcttaaatttcctcgagtct

SEQ ID NO: 3160296 - DNA, 25 bp, Homo sapien
tggtcttaaatttcctcgagtctcc

SEQ ID NO: 3160297 - DNA, 25 bp, Homo sapien
tgttttcatcagttgaacatataaa

SEQ ID NO: 3160298 - DNA, 25 bp, Homo sapien
aatcaatgacactgaaaaggtttgg

SEQ ID NO: 3160299 - DNA, 25 bp, Homo sapien
caaggtgcagtactttggcagtgac

SEQ ID NO: 3160300 - DNA, 25 bp, Homo sapien
agaaaatttagccttccagccagag

SEQ ID NO: 3160301 - DNA, 25 bp, Homo sapien
gcacaggtgtcattaataagctcca

SEQ ID NO: 3160302 - DNA, 25 bp, Homo sapien
ttcttggagagattgggcaactgca

SEQ ID NO: 3160303 - DNA, 25 bp, Homo sapien
ttctcccttccatactgggttcttg

SEQ ID NO: 3160304 - DNA, 25 bp, Homo sapien
ctcccttccatactgggttcttgac

SEQ ID NO: 3160305 - DNA, 25 bp, Homo sapien
acttctcccttccatactgggttct

SEQ ID NO: 3160306 - DNA, 25 bp, Homo sapien
catgcaatgtgtggatttttcttca

SEQ ID NO: 3160307 - DNA, 25 bp, Homo sapien
caagatatacaaaggagctttcaca

SEQ ID NO: 3160308 - DNA, 25 bp, Homo sapien
tacaaaggagctttcacattgtatt

SEQ ID NO: 3160309 - DNA, 25 bp, Homo sapien
gatatacaaaggagctttcacattg

SEQ ID NO: 3160310 - DNA, 25 bp, Homo sapien
tatacaaaggagctttcacattgta

SEQ ID NO: 3160311 - DNA, 25 bp, Homo sapien
gtatatctgcaggttaccaccacag

SEQ ID NO: 3160312 - DNA, 25 bp, Homo sapien
gacttggtaatcagtatcaggagaa

SEQ ID NO: 3160313 - DNA, 25 bp, Homo sapien
aagggctcctctagtacatttcatg

SEQ ID NO: 3160314 - DNA, 25 bp, Homo sapien
ttttcaacttatgtcagtgcatggg

SEQ ID NO: 3160315 - DNA, 25 bp, Homo sapien
ttcttagttgattgtgtgattccca

SEQ ID NO: 3160316 - DNA, 25 bp, Homo sapien
ccatctttgtaaggaaataatgggc

SEQ ID NO: 3160317 - DNA, 25 bp, Homo sapien
gaactccaggtacttataatcaggc

SEQ ID NO: 3160318 - DNA, 25 bp, Homo sapien
taatcaggctcatcgtacttacgac

SEQ ID NO: 3160319 - DNA, 25 bp, Homo sapien
acaagtcaagaagccggattttcaa

SEQ ID NO: 3160320 - DNA, 25 bp, Homo sapien
cacaagtcaagaagccggattttca

SEQ ID NO: 3160321 - DNA, 25 bp, Homo sapien
tccttgagttgtcaatggctgtttt

SEQ ID NO: 3160322 - DNA, 25 bp, Homo sapien
ctctccttgagttgtcaatggctgt

SEQ ID NO: 3160323 - DNA, 25 bp, Homo sapien
tatagtgttaccacctatgtgtgta

SEQ ID NO: 3160324 - DNA, 25 bp, Homo sapien
gcactcagcttagtagaatatattg

SEQ ID NO: 3160325 - DNA, 25 bp, Homo sapien
gattgattcatgttggttgtagctg

SEQ ID NO: 3160326 - DNA, 25 bp, Homo sapien
taaagcaactatataactagcactc

SEQ ID NO: 3160327 - DNA, 25 bp, Homo sapien
tccaggaatatcaaggctctgtggc

SEQ ID NO: 3160328 - DNA, 25 bp, Homo sapien
cagttggagagaaatagtcgtgacc

SEQ ID NO: 3160329 - DNA, 25 bp, Homo sapien
tctactaagctagaaagccagggtg

SEQ ID NO: 3160330 - DNA, 25 bp, Homo sapien
cacactctggtgatattcatggaac

SEQ ID NO: 3160331 - DNA, 25 bp, Homo sapien
gagaatccgtgaatgtgaacagaca

SEQ ID NO: 3160332 - DNA, 25 bp, Homo sapien
cacacgtggctatgatcacaagcaa

SEQ ID NO: 3160333 - DNA, 25 bp, Homo sapien
agatgaagatttgccgggacctcca

SEQ ID NO: 3160334 - DNA, 25 bp, Homo sapien
caaatagtgtttggcatcctgcacc

SEQ ID NO: 3160335 - DNA, 25 bp, Homo sapien
actttcccttaactgtttgcatatt

SEQ ID NO: 3160336 - DNA, 25 bp, Homo sapien
tccagaagtccatgtccaaagtctt

SEQ ID NO: 3160337 - DNA, 25 bp, Homo sapien
cgtttcaaaacacagtcacaccttt

SEQ ID NO: 3160338 - DNA, 25 bp, Homo sapien
gaactgccaggttcttacaaaacca

SEQ ID NO: 3160339 - DNA, 25 bp, Homo sapien
tcactcactgattacctccacgtgg

SEQ ID NO: 3160340 - DNA, 25 bp, Homo sapien
gaactggaaccatatttacatggag

SEQ ID NO: 3160341 - DNA, 25 bp, Homo sapien
gaggcatagctgtccaagttaagac

SEQ ID NO: 3160342 - DNA, 25 bp, Homo sapien
gcagaagagacaaataactactcag

SEQ ID NO: 3160343 - DNA, 25 bp, Homo sapien
tattggtgacaccacagaactggaa

SEQ ID NO: 3160344 - DNA, 25 bp, Homo sapien
tcattactgattgaggtgccacctt

SEQ ID NO: 3160345 - DNA, 25 bp, Homo sapien
tgcaataggtattctcccagttgtc

SEQ ID NO: 3160346 - DNA, 25 bp, Homo sapien
tttatctgagaaattatgagcatct

SEQ ID NO: 3160347 - DNA, 25 bp, Homo sapien
gtttattaaccagtaccatattata

SEQ ID NO: 3160348 - DNA, 25 bp, Homo sapien
taatgtaacaatgctggacttgcag

SEQ ID NO: 3160349 - DNA, 25 bp, Homo sapien
aagtgtcatttaactgcaaagtacc

SEQ ID NO: 3160350 - DNA, 25 bp, Homo sapien
cattcactgctatatggtcacttag

SEQ ID NO: 3160351 - DNA, 25 bp, Homo sapien
ggtcacttagtatgagtcagctgta

SEQ ID NO: 3160352 - DNA, 25 bp, Homo sapien
agccatcgcaccctactacacccaa

SEQ ID NO: 3160353 - DNA, 25 bp, Homo sapien
catcgcaccctactacacccaaaca

SEQ ID NO: 3160354 - DNA, 25 bp, Homo sapien
cattttatttatgcccgtttataat

SEQ ID NO: 3160355 - DNA, 25 bp, Homo sapien
cgcaccctactacacccaaacattt

SEQ ID NO: 3160356 - DNA, 25 bp, Homo sapien
gggaattatctctgcttgccagtgt

SEQ ID NO: 3160357 - DNA, 25 bp, Homo sapien
tacagatacgttttttgaaggccat

SEQ ID NO: 3160358 - DNA, 25 bp, Homo sapien
tgtttagtacagatacgttttttga

SEQ ID NO: 3160359 - DNA, 25 bp, Homo sapien
tgggaattatctctgcttgccagtg

SEQ ID NO: 3160360 - DNA, 25 bp, Homo sapien
aaagaaagctaggagcgccactgtg

SEQ ID NO: 3160361 - DNA, 25 bp, Homo sapien
gagcttccccgactggtgccaagca

SEQ ID NO: 3160362 - DNA, 25 bp, Homo sapien
ctccggtcgagagcgagttctggtc

SEQ ID NO: 3160363 - DNA, 25 bp, Homo sapien
gagagcgagttctggtctcggtcac

SEQ ID NO: 3160364 - DNA, 25 bp, Homo sapien
gagggctttctcagttctggctggg

SEQ ID NO: 3160365 - DNA, 25 bp, Homo sapien
gttctggctgggattcgggatcctc

SEQ ID NO: 3160366 - DNA, 25 bp, Homo sapien
tctggctgggattcgggatcctcct

SEQ ID NO: 3160367 - DNA, 25 bp, Homo sapien
ttctggctgggattcgggatcctcc

SEQ ID NO: 3160368 - DNA, 25 bp, Homo sapien
tctcaggcggcaatggaaggatccg

SEQ ID NO: 3160369 - DNA, 25 bp, Homo sapien
agaggacgagaagggcgaaggtgag

SEQ ID NO: 3160370 - DNA, 25 bp, Homo sapien
ttccagtagccggcggcggtgtctc

SEQ ID NO: 3160371 - DNA, 25 bp, Homo sapien
tgggacccaggctccgggtttctgc

SEQ ID NO: 3160372 - DNA, 25 bp, Homo sapien
cagcacgccatgcggccacacccaa

SEQ ID NO: 3160373 - DNA, 25 bp, Homo sapien
agcacgccatgcggccacacccaaa

SEQ ID NO: 3160374 - DNA, 25 bp, Homo sapien
caagggtgacgcgtaacttctggac

SEQ ID NO: 3160375 - DNA, 25 bp, Homo sapien
ggatgccagtcgcaacagtaacgcc

SEQ ID NO: 3160376 - DNA, 25 bp, Homo sapien
catttcgcgggttactagagtcctg

SEQ ID NO: 3160377 - DNA, 25 bp, Homo sapien
tacatctgccggatgcggatgccag

SEQ ID NO: 3160378 - DNA, 25 bp, Homo sapien
tcacaacagacatcctcgaagggca

SEQ ID NO: 3160379 - DNA, 25 bp, Homo sapien
gatacaaagagcgatgctgtctcct

SEQ ID NO: 3160380 - DNA, 25 bp, Homo sapien
tccgttccactaggatggtcaagct

SEQ ID NO: 3160381 - DNA, 25 bp, Homo sapien
tccatttagggatgaccggctcagg

SEQ ID NO: 3160382 - DNA, 25 bp, Homo sapien
ctggagaagaggtcggtgggctgct

SEQ ID NO: 3160383 - DNA, 25 bp, Homo sapien
aacctgaggcaattgtcatataggc

SEQ ID NO: 3160384 - DNA, 25 bp, Homo sapien
tgctgtcgtgggcaactcgggcaac

SEQ ID NO: 3160385 - DNA, 25 bp, Homo sapien
gcaactcgggcaacctgaggcaatt

SEQ ID NO: 3160386 - DNA, 25 bp, Homo sapien
ctaatgtcagtacataacagtgact

SEQ ID NO: 3160387 - DNA, 25 bp, Homo sapien
aaaactaggttgtaactaatgtcag

SEQ ID NO: 3160388 - DNA, 25 bp, Homo sapien
ttttgcacgttattctcaagtacac

SEQ ID NO: 3160389 - DNA, 25 bp, Homo sapien
ttacaaagtgtacagagggagggac

SEQ ID NO: 3160390 - DNA, 25 bp, Homo sapien
tccatggcaaggtttaggagacaat

SEQ ID NO: 3160391 - DNA, 25 bp, Homo sapien
caatgaactcgatggttgcagtgga

SEQ ID NO: 3160392 - DNA, 25 bp, Homo sapien
gtgggtccagcttgtagctcatgga

SEQ ID NO: 3160393 - DNA, 25 bp, Homo sapien
ttgcagtggagaagtcaatgtcagc

SEQ ID NO: 3160394 - DNA, 25 bp, Homo sapien
cacagagcttgatgggaatttgtca

SEQ ID NO: 3160395 - DNA, 25 bp, Homo sapien
tatcctctggaagagagttgcccgg

SEQ ID NO: 3160396 - DNA, 25 bp, Homo sapien
aagccggtggtgagcagttgtacaa

SEQ ID NO: 3160397 - DNA, 25 bp, Homo sapien
ggatctggcccagatgcacgcctgt

SEQ ID NO: 3160398 - DNA, 25 bp, Homo sapien
tcatctgccgaaaactggtgtctaa

SEQ ID NO: 3160399 - DNA, 25 bp, Homo sapien
tgtaaggcccactaggatgttgatt

SEQ ID NO: 3160400 - DNA, 25 bp, Homo sapien
gatggaccctctctctgctactgtg

SEQ ID NO: 3160401 - DNA, 25 bp, Homo sapien
gaatatgcccacatgtgtaaggccc

SEQ ID NO: 3160402 - DNA, 25 bp, Homo sapien
gccagaatcctgcttcagtaatctt

SEQ ID NO: 3160403 - DNA, 25 bp, Homo sapien
tattacaatgagattgtagtgagaa

SEQ ID NO: 3160404 - DNA, 25 bp, Homo sapien
gattgtagtgagaaaaacttggtga

SEQ ID NO: 3160405 - DNA, 25 bp, Homo sapien
aacttggtgaaagctcagcactgaa

SEQ ID NO: 3160406 - DNA, 25 bp, Homo sapien
gaagtaacaagtacaagcagctgag

SEQ ID NO: 3160407 - DNA, 25 bp, Homo sapien
gaagtcggcactaagtacaggtcac

SEQ ID NO: 3160408 - DNA, 25 bp, Homo sapien
tcttctctgcacctacacagtgagg

SEQ ID NO: 3160409 - DNA, 25 bp, Homo sapien
taggcaatgtttaggcagggtcttc

SEQ ID NO: 3160410 - DNA, 25 bp, Homo sapien
ggctctagcagcacaacggagcaga

SEQ ID NO: 3160411 - DNA, 25 bp, Homo sapien
tggctctagcagcacaacggagcag

SEQ ID NO: 3160412 - DNA, 25 bp, Homo sapien
caaagtttaataggcttgtggctct

SEQ ID NO: 3160413 - DNA, 25 bp, Homo sapien
agtttaataggcttgtggctctagc

SEQ ID NO: 3160414 - DNA, 25 bp, Homo sapien
gtgactataacccatgacacagccc

SEQ ID NO: 3160415 - DNA, 25 bp, Homo sapien
gatgaagcctccaaggtagtcagct

SEQ ID NO: 3160416 - DNA, 25 bp, Homo sapien
cggagtgcggagcttccagtttata

SEQ ID NO: 3160417 - DNA, 25 bp, Homo sapien
tattctaagccaaatttgagtgact

SEQ ID NO: 3160418 - DNA, 25 bp, Homo sapien
tacttccctccgtgtatatatccag

SEQ ID NO: 3160419 - DNA, 25 bp, Homo sapien
ggtgccttgaatgtcaatatatcaa

SEQ ID NO: 3160420 - DNA, 25 bp, Homo sapien
gcacccaatacacaataaccttaag

SEQ ID NO: 3160421 - DNA, 25 bp, Homo sapien
tcagttgattataggagcaaaattc

SEQ ID NO: 3160422 - DNA, 25 bp, Homo sapien
ggctttgggactttgacaatgtaac

SEQ ID NO: 3160423 - DNA, 25 bp, Homo sapien
ttgcacttaaagtaaaatctggatt

SEQ ID NO: 3160424 - DNA, 25 bp, Homo sapien
gaaaggctttgggactttgacaatg

SEQ ID NO: 3160425 - DNA, 25 bp, Homo sapien
tccccattgcacttaaagtaaaatc

SEQ ID NO: 3160426 - DNA, 25 bp, Homo sapien
aggctgaccacatggctgggttctg

SEQ ID NO: 3160427 - DNA, 25 bp, Homo sapien
ctgtgaagtccgagatcaggctgac

SEQ ID NO: 3160428 - DNA, 25 bp, Homo sapien
tcaggctgaccacatggctgggttc

SEQ ID NO: 3160429 - DNA, 25 bp, Homo sapien
gttctggtgagggccattgtggctt

SEQ ID NO: 3160430 - DNA, 25 bp, Homo sapien
gaatcatgctactataaagaaacat

SEQ ID NO: 3160431 - DNA, 25 bp, Homo sapien
atgctactataaagaaacatgcatg

SEQ ID NO: 3160432 - DNA, 25 bp, Homo sapien
gctactataaagaaacatgcatgca

SEQ ID NO: 3160433 - DNA, 25 bp, Homo sapien
ttatgaatcatgctactataaagaa

SEQ ID NO: 3160434 - DNA, 25 bp, Homo sapien
caaggtagtgagtcaggagattgcc

SEQ ID NO: 3160435 - DNA, 25 bp, Homo sapien
gactgacttgggatagaccatgtga

SEQ ID NO: 3160436 - DNA, 25 bp, Homo sapien
ggagattgccaagcaccagggaact

SEQ ID NO: 3160437 - DNA, 25 bp, Homo sapien
aataccatagactgtagatgcgtgg

SEQ ID NO: 3160438 - DNA, 25 bp, Homo sapien
ggacacatgactgaccctaaacaaa

SEQ ID NO: 3160439 - DNA, 25 bp, Homo sapien
cagtacttccccttaaattggctag

SEQ ID NO: 3160440 - DNA, 25 bp, Homo sapien
tgatgtatagcggataggttctgcc

SEQ ID NO: 3160441 - DNA, 25 bp, Homo sapien
aaactaaatgaagccctgaagcaca

SEQ ID NO: 3160442 - DNA, 25 bp, Homo sapien
ttcgaaatcttgactcaggggttct

SEQ ID NO: 3160443 - DNA, 25 bp, Homo sapien
tactgactactcaatgttgctggaa

SEQ ID NO: 3160444 - DNA, 25 bp, Homo sapien
cattttcagtcatgtgctaagccaa

SEQ ID NO: 3160445 - DNA, 25 bp, Homo sapien
tgaaaagagcaaggcctcaaggcac

SEQ ID NO: 3160446 - DNA, 25 bp, Homo sapien
ggtaggcagcctgactgtaaaaagt

SEQ ID NO: 3160447 - DNA, 25 bp, Homo sapien
tgtcacaagaactcctatcaaactc

SEQ ID NO: 3160448 - DNA, 25 bp, Homo sapien
aaaactcacccctcatgtagcatac

SEQ ID NO: 3160449 - DNA, 25 bp, Homo sapien
tttgtggtgttagcaaaaaactcac

SEQ ID NO: 3160450 - DNA, 25 bp, Homo sapien
tgtagcatactacctacgcttggga

SEQ ID NO: 3160451 - DNA, 25 bp, Homo sapien
ttatcacacaggtacaatatgccta

SEQ ID NO: 3160452 - DNA, 25 bp, Homo sapien
tacatgctaggttcacagaacaggc

SEQ ID NO: 3160453 - DNA, 25 bp, Homo sapien
gtggaaatctcagtatatcagtata

SEQ ID NO: 3160454 - DNA, 25 bp, Homo sapien
caacatagtactgtgctactagcag

SEQ ID NO: 3160455 - DNA, 25 bp, Homo sapien
cctaagtggtcccaatttgaaatga

SEQ ID NO: 3160456 - DNA, 25 bp, Homo sapien
tcccaatttgaaatgatcagataac

SEQ ID NO: 3160457 - DNA, 25 bp, Homo sapien
taagtggtcccaatttgaaatgatc

SEQ ID NO: 3160458 - DNA, 25 bp, Homo sapien
caacacagaaaaagttcctaagtgg

SEQ ID NO: 3160459 - DNA, 25 bp, Homo sapien
tgccccacaggagaagaccaatgca

SEQ ID NO: 3160460 - DNA, 25 bp, Homo sapien
aatttcctcttggtaggcatgtgcc

SEQ ID NO: 3160461 - DNA, 25 bp, Homo sapien
tgggtccaccaatggtccatgaaga

SEQ ID NO: 3160462 - DNA, 25 bp, Homo sapien
taattttcgaatgatcttgcctgag

SEQ ID NO: 3160463 - DNA, 25 bp, Homo sapien
ggtgttttcaactgtctatgcatac

SEQ ID NO: 3160464 - DNA, 25 bp, Homo sapien
catgtgttaaaggtggtcagagtac

SEQ ID NO: 3160465 - DNA, 25 bp, Homo sapien
cccctgtcactcctctatgctaagt

SEQ ID NO: 3160466 - DNA, 25 bp, Homo sapien
acttcttccgtattattgtgagccc

SEQ ID NO: 3160467 - DNA, 25 bp, Homo sapien
ttttgagcccaaatatgcagccagg

SEQ ID NO: 3160468 - DNA, 25 bp, Homo sapien
gactaacctacatgactttaagaaa

SEQ ID NO: 3160469 - DNA, 25 bp, Homo sapien
taaacatcgaaggtatgtactgtga

SEQ ID NO: 3160470 - DNA, 25 bp, Homo sapien
caaacaacctgcagtaagtaaagaa

SEQ ID NO: 3160471 - DNA, 25 bp, Homo sapien
tctacctcccaagctcaaccgattc

SEQ ID NO: 3160472 - DNA, 25 bp, Homo sapien
cacctacctgcccagcctaattgtt

SEQ ID NO: 3160473 - DNA, 25 bp, Homo sapien
agccacctacctgcccagcctaatt

SEQ ID NO: 3160474 - DNA, 25 bp, Homo sapien
ctctacctcccaagctcaaccgatt

SEQ ID NO: 3160475 - DNA, 25 bp, Homo sapien
tcttgtcaacaagatgcccggagcc

SEQ ID NO: 3160476 - DNA, 25 bp, Homo sapien
gactgaaagctgctcaatgagaaga

SEQ ID NO: 3160477 - DNA, 25 bp, Homo sapien
tgaaaggcacaattagtatgatcgt

SEQ ID NO: 3160478 - DNA, 25 bp, Homo sapien
ccatgttatacaatacggcttttga

SEQ ID NO: 3160479 - DNA, 25 bp, Homo sapien
tatgatctttaaaagctgcttcttt

SEQ ID NO: 3160480 - DNA, 25 bp, Homo sapien
atggccagccaaaagccccttttct

SEQ ID NO: 3160481 - DNA, 25 bp, Homo sapien
accatggccagccaaaagccccttt

SEQ ID NO: 3160482 - DNA, 25 bp, Homo sapien
aaatgaatatgatctttaaaagctg

SEQ ID NO: 3160483 - DNA, 25 bp, Homo sapien
tagaaaggccacgagtaaatatgca

SEQ ID NO: 3160484 - DNA, 25 bp, Homo sapien
caggaaacctcacgagtggaccctt

SEQ ID NO: 3160485 - DNA, 25 bp, Homo sapien
tctaacttgaagagagcctctgggt

SEQ ID NO: 3160486 - DNA, 25 bp, Homo sapien
tatccaactaaagacgcaaagcagg

SEQ ID NO: 3160487 - DNA, 25 bp, Homo sapien
gggagaactccctcctgtttgatgt

SEQ ID NO: 3160488 - DNA, 25 bp, Homo sapien
tccttgtctggttttctctcagaat

SEQ ID NO: 3160489 - DNA, 25 bp, Homo sapien
tctctcagaataatactggcttcat

SEQ ID NO: 3160490 - DNA, 25 bp, Homo sapien
ttggggagaactccctcctgtttga

SEQ ID NO: 3160491 - DNA, 25 bp, Homo sapien
gaacctgaacagctgtgttactcat

SEQ ID NO: 3160492 - DNA, 25 bp, Homo sapien
cccttgtctgaagaaggaaatccta

SEQ ID NO: 3160493 - DNA, 25 bp, Homo sapien
cttcccttgtctgaagaaggaaatc

SEQ ID NO: 3160494 - DNA, 25 bp, Homo sapien
ccgtagggcccaggaacctgaacag

SEQ ID NO: 3160495 - DNA, 25 bp, Homo sapien
tctgttagacactattatccatagc

SEQ ID NO: 3160496 - DNA, 25 bp, Homo sapien
tagacactattatccatagcaattc

SEQ ID NO: 3160497 - DNA, 25 bp, Homo sapien
gaggcatcatctgtattagttggag

SEQ ID NO: 3160498 - DNA, 25 bp, Homo sapien
gcaattctccagctacctttgaggc

SEQ ID NO: 3160499 - DNA, 25 bp, Homo sapien
tgaagtaaaccacctctgaattctg

SEQ ID NO: 3160500 - DNA, 25 bp, Homo sapien
catgaagtaaaccacctctgaattc

SEQ ID NO: 3160501 - DNA, 25 bp, Homo sapien
cctcatgaagtaaaccacctctgaa

SEQ ID NO: 3160502 - DNA, 25 bp, Homo sapien
gaagtaaaccacctctgaattctgg

SEQ ID NO: 3160503 - DNA, 25 bp, Homo sapien
caatcactctctttggtatttactt

SEQ ID NO: 3160504 - DNA, 25 bp, Homo sapien
gatccagcaatcactctctttggta

SEQ ID NO: 3160505 - DNA, 25 bp, Homo sapien
tcactctctttggtatttacttaaa

SEQ ID NO: 3160506 - DNA, 25 bp, Homo sapien
tccagcaatcactctctttggtatt

SEQ ID NO: 3160507 - DNA, 25 bp, Homo sapien
tgaggcccttccttgttgaatttgt

SEQ ID NO: 3160508 - DNA, 25 bp, Homo sapien
gatatccatgattatattcctctga

SEQ ID NO: 3160509 - DNA, 25 bp, Homo sapien
tccaaatgaccatgatcgatatcca

SEQ ID NO: 3160510 - DNA, 25 bp, Homo sapien
tcacatatctgagtacttccaaatg

SEQ ID NO: 3160511 - DNA, 25 bp, Homo sapien
ttcacgaacgacagccaaaatttgg

SEQ ID NO: 3160512 - DNA, 25 bp, Homo sapien
catgtttgttgtagcatggttcacg

SEQ ID NO: 3160513 - DNA, 25 bp, Homo sapien
taggtatatgccctccttccaaaaa

SEQ ID NO: 3160514 - DNA, 25 bp, Homo sapien
gaaaatgtggtactcggccagacat

SEQ ID NO: 3160515 - DNA, 25 bp, Homo sapien
agcaaaggaaacaatcaaaaaagag

SEQ ID NO: 3160516 - DNA, 25 bp, Homo sapien
gcaaaggaaacaatcaaaaaagaga

SEQ ID NO: 3160517 - DNA, 25 bp, Homo sapien
cagcaaaggaaacaatcaaaaaaga

SEQ ID NO: 3160518 - DNA, 25 bp, Homo sapien
aaaattcttgagcgataatacccca

SEQ ID NO: 3160519 - DNA, 25 bp, Homo sapien
aattcttgagcgataataccccaca

SEQ ID NO: 3160520 - DNA, 25 bp, Homo sapien
tcttgagcgataataccccacaagc

SEQ ID NO: 3160521 - DNA, 25 bp, Homo sapien
aaattcttgagcgataataccccac

SEQ ID NO: 3160522 - DNA, 25 bp, Homo sapien
gccatctctatgcataaagggtttg

SEQ ID NO: 3160523 - DNA, 25 bp, Homo sapien
cctggtaaatgcaaaactttctgat

SEQ ID NO: 3160524 - DNA, 25 bp, Homo sapien
tatactacataccaacagcatgcaa

SEQ ID NO: 3160525 - DNA, 25 bp, Homo sapien
tataaaattttcctggtaaatgcaa

SEQ ID NO: 3160526 - DNA, 25 bp, Homo sapien
ttgtatgacactggatccaactgct

SEQ ID NO: 3160527 - DNA, 25 bp, Homo sapien
tccaatagacacagcacttaaagat

SEQ ID NO: 3160528 - DNA, 25 bp, Homo sapien
ccaagaaggccaaaaagccttctgt

SEQ ID NO: 3160529 - DNA, 25 bp, Homo sapien
cagttaggcttgaccccaagaaggc

SEQ ID NO: 3160530 - DNA, 25 bp, Homo sapien
gctgtctgtgccacaggggtctgcc

SEQ ID NO: 3160531 - DNA, 25 bp, Homo sapien
ttactgtgaataaggatcatctgta

SEQ ID NO: 3160532 - DNA, 25 bp, Homo sapien
gaataaggatcatctgtactctggg

SEQ ID NO: 3160533 - DNA, 25 bp, Homo sapien
tgtgaataaggatcatctgtactct

SEQ ID NO: 3160534 - DNA, 25 bp, Homo sapien
aatgaaaggcgagggtttggctaca

SEQ ID NO: 3160535 - DNA, 25 bp, Homo sapien
gcttcctttcgctgctagcatagta

SEQ ID NO: 3160536 - DNA, 25 bp, Homo sapien
gttctagaatacatggtctccctcc

SEQ ID NO: 3160537 - DNA, 25 bp, Homo sapien
gtgggtggtccaagatataactaga

SEQ ID NO: 3160538 - DNA, 25 bp, Homo sapien
aacaaaatgtgggtctagattgctc

SEQ ID NO: 3160539 - DNA, 25 bp, Homo sapien
cttaacaaaatgtgggtctagattg

SEQ ID NO: 3160540 - DNA, 25 bp, Homo sapien
ttaacaaaatgtgggtctagattgc

SEQ ID NO: 3160541 - DNA, 25 bp, Homo sapien
caaaatgtgggtctagattgctcat

SEQ ID NO: 3160542 - DNA, 25 bp, Homo sapien
tgctggcagaatggactgccaggcc

SEQ ID NO: 3160543 - DNA, 25 bp, Homo sapien
gccactgtctttgtgggtgtatcag

SEQ ID NO: 3160544 - DNA, 25 bp, Homo sapien
gtatcagtctgccaggtagttcctg

SEQ ID NO: 3160545 - DNA, 25 bp, Homo sapien
aagggctttcggctgtcactgctgc

SEQ ID NO: 3160546 - DNA, 25 bp, Homo sapien
gaacgtttcatacatttttgtgtca

SEQ ID NO: 3160547 - DNA, 25 bp, Homo sapien
cttgtgtaggggccaggataatctt

SEQ ID NO: 3160548 - DNA, 25 bp, Homo sapien
catccttgtgtaggggccaggataa

SEQ ID NO: 3160549 - DNA, 25 bp, Homo sapien
aatattatggaacgtttcatacatt

SEQ ID NO: 3160550 - DNA, 25 bp, Homo sapien
aggattcgatgtcgtaggtggatct

SEQ ID NO: 3160551 - DNA, 25 bp, Homo sapien
tacttttaggcctttaggccatctg

SEQ ID NO: 3160552 - DNA, 25 bp, Homo sapien
gttgcgcaaaagtctctcctggagc

SEQ ID NO: 3160553 - DNA, 25 bp, Homo sapien
gctgcgccaagtcctcgggagcttg

SEQ ID NO: 3160554 - DNA, 25 bp, Homo sapien
cctggagcttcaacatttcccgcag

SEQ ID NO: 3160555 - DNA, 25 bp, Homo sapien
agccgcggggcagcaagcacattct

SEQ ID NO: 3160556 - DNA, 25 bp, Homo sapien
ctttgtcgggcaatttgcaaatgaa

SEQ ID NO: 3160557 - DNA, 25 bp, Homo sapien
tttgtcgggcaatttgcaaatgaat

SEQ ID NO: 3160558 - DNA, 25 bp, Homo sapien
caccttcaagagtaggacgtccaag

SEQ ID NO: 3160559 - DNA, 25 bp, Homo sapien
gggtgatgctcactagcttcagatg

SEQ ID NO: 3160560 - DNA, 25 bp, Homo sapien
gcttcagatgaaggtggtaccctgt

SEQ ID NO: 3160561 - DNA, 25 bp, Homo sapien
aagctgggcccttattcactgtgta

SEQ ID NO: 3160562 - DNA, 25 bp, Homo sapien
tgtcaataaaaaggttgtcaaagct

SEQ ID NO: 3160563 - DNA, 25 bp, Homo sapien
gtcaataaaaaggttgtcaaagctg

SEQ ID NO: 3160564 - DNA, 25 bp, Homo sapien
ctgtcaataaaaaggttgtcaaagc

SEQ ID NO: 3160565 - DNA, 25 bp, Homo sapien
gctgtttctgaagtgccaaggattc

SEQ ID NO: 3160566 - DNA, 25 bp, Homo sapien
tcaagatgctgcttatccctgcgcc

SEQ ID NO: 3160567 - DNA, 25 bp, Homo sapien
catatggtgaagtggtagaagccga

SEQ ID NO: 3160568 - DNA, 25 bp, Homo sapien
gattcttctatggagagcagctgcg

SEQ ID NO: 3160569 - DNA, 25 bp, Homo sapien
gacactgatcttgatactagttaga

SEQ ID NO: 3160570 - DNA, 25 bp, Homo sapien
tccctcaacaatatctgacactgat

SEQ ID NO: 3160571 - DNA, 25 bp, Homo sapien
caacgtcagtgatttaggagattat

SEQ ID NO: 3160572 - DNA, 25 bp, Homo sapien
ttttaataccatgtggttaaacaca

SEQ ID NO: 3160573 - DNA, 25 bp, Homo sapien
ggcaagacctcctctgcatctagtt

SEQ ID NO: 3160574 - DNA, 25 bp, Homo sapien
taaatgaacatgatctctgcagtga

SEQ ID NO: 3160575 - DNA, 25 bp, Homo sapien
cacagagattttggagtgctggcaa

SEQ ID NO: 3160576 - DNA, 25 bp, Homo sapien
caatatatgacaaaggacggacatt

SEQ ID NO: 3160577 - DNA, 25 bp, Homo sapien
ctctatcagtaatttctgtcattat

SEQ ID NO: 3160578 - DNA, 25 bp, Homo sapien
ggctaccaatccaacaaactctcag

SEQ ID NO: 3160579 - DNA, 25 bp, Homo sapien
aactctcagccctaggtcaatctca

SEQ ID NO: 3160580 - DNA, 25 bp, Homo sapien
tagtccttagcttgcaggctaccaa

SEQ ID NO: 3160581 - DNA, 25 bp, Homo sapien
taggtcaatctcataattcagtggc

SEQ ID NO: 3160582 - DNA, 25 bp, Homo sapien
catataatacctggagcatgtgaga

SEQ ID NO: 3160583 - DNA, 25 bp, Homo sapien
ctcatataatacctggagcatgtga

SEQ ID NO: 3160584 - DNA, 25 bp, Homo sapien
tataatacctggagcatgtgagatt

SEQ ID NO: 3160585 - DNA, 25 bp, Homo sapien
tcatataatacctggagcatgtgag

SEQ ID NO: 3160586 - DNA, 25 bp, Homo sapien
cagagtagatatccttttgatgtcc

SEQ ID NO: 3160587 - DNA, 25 bp, Homo sapien
aatggatcatagtttttagccttcg

SEQ ID NO: 3160588 - DNA, 25 bp, Homo sapien
aatttctctagcgacaacttccaga

SEQ ID NO: 3160589 - DNA, 25 bp, Homo sapien
tgatgtccctggtcttacaggaaac

SEQ ID NO: 3160590 - DNA, 25 bp, Homo sapien
tataaaacatagtttggccagtccc

SEQ ID NO: 3160591 - DNA, 25 bp, Homo sapien
aaagtcactgtgctggtcccttgca

SEQ ID NO: 3160592 - DNA, 25 bp, Homo sapien
caagtacgtagatggcaggcgttgc

SEQ ID NO: 3160593 - DNA, 25 bp, Homo sapien
tctaatggcgaagggtttcagtcac

SEQ ID NO: 3160594 - DNA, 25 bp, Homo sapien
ggagaagaactcaatcactggactg

SEQ ID NO: 3160595 - DNA, 25 bp, Homo sapien
catgtcagtctctcgaagacgggtc

SEQ ID NO: 3160596 - DNA, 25 bp, Homo sapien
cagagggcggccaaatccagtatac

SEQ ID NO: 3160597 - DNA, 25 bp, Homo sapien
gcaagatatccatccgcagagggcg

SEQ ID NO: 3160598 - DNA, 25 bp, Homo sapien
gagacatgggattagcaaaccttgg

SEQ ID NO: 3160599 - DNA, 25 bp, Homo sapien
gagccagtgacatgaactgtaaaga

SEQ ID NO: 3160600 - DNA, 25 bp, Homo sapien
tttacccctgtaggaagagccagtg

SEQ ID NO: 3160601 - DNA, 25 bp, Homo sapien
tagacacaggtattgtgactcacag

SEQ ID NO: 3160602 - DNA, 25 bp, Homo sapien
cagaagttggggcaagggtgtgggt

SEQ ID NO: 3160603 - DNA, 25 bp, Homo sapien
gaagttggggcaagggtgtgggtgc

SEQ ID NO: 3160604 - DNA, 25 bp, Homo sapien
tttttatggtacagtccaaagagtc

SEQ ID NO: 3160605 - DNA, 25 bp, Homo sapien
tcctttttatggtacagtccaaaga

SEQ ID NO: 3160606 - DNA, 25 bp, Homo sapien
taagtggatcctgacatcaccagga

SEQ ID NO: 3160607 - DNA, 25 bp, Homo sapien
ccaggatggcccaaatttatgtgat

SEQ ID NO: 3160608 - DNA, 25 bp, Homo sapien
tgctgggccatctttctcaatactg

SEQ ID NO: 3160609 - DNA, 25 bp, Homo sapien
gaggaatccttatcttgatgctgtg

SEQ ID NO: 3160610 - DNA, 25 bp, Homo sapien
tcacggaggtgattcttcccagaaa

SEQ ID NO: 3160611 - DNA, 25 bp, Homo sapien
gctcaggtcagacaaggacaattct

SEQ ID NO: 3160612 - DNA, 25 bp, Homo sapien
catagcggagcattatctagtacca

SEQ ID NO: 3160613 - DNA, 25 bp, Homo sapien
tagaccagtggatctgcccagggaa

SEQ ID NO: 3160614 - DNA, 25 bp, Homo sapien
gccactgtatgccttttaaatggga

SEQ ID NO: 3160615 - DNA, 25 bp, Homo sapien
taaatgggacatttagaccattgac

SEQ ID NO: 3160616 - DNA, 25 bp, Homo sapien
ttgaaggcagcagattgtagaatct

SEQ ID NO: 3160617 - DNA, 25 bp, Homo sapien
tagtggctttatgatgtctgtgggc

SEQ ID NO: 3160618 - DNA, 25 bp, Homo sapien
atcagatggtgactgaatagaagct

SEQ ID NO: 3160619 - DNA, 25 bp, Homo sapien
tcactaaacctgtcaaacttgtttc

SEQ ID NO: 3160620 - DNA, 25 bp, Homo sapien
cactcactaaacctgtcaaacttgt

SEQ ID NO: 3160621 - DNA, 25 bp, Homo sapien
gatggtgactgaatagaagctgccc

SEQ ID NO: 3160622 - DNA, 25 bp, Homo sapien
ctctatgcggatattgacaattact

SEQ ID NO: 3160623 - DNA, 25 bp, Homo sapien
tcatcacaagttgcacattctgagc

SEQ ID NO: 3160624 - DNA, 25 bp, Homo sapien
cattctgagccctctactacttgga

SEQ ID NO: 3160625 - DNA, 25 bp, Homo sapien
tactacttggagcttctctatgcgg

SEQ ID NO: 3160626 - DNA, 25 bp, Homo sapien
tagaatggtctaggaaggcacacta

SEQ ID NO: 3160627 - DNA, 25 bp, Homo sapien
tgcttgagcaccactgaaaacaggg

SEQ ID NO: 3160628 - DNA, 25 bp, Homo sapien
cattctagggtgagatcataccaag

SEQ ID NO: 3160629 - DNA, 25 bp, Homo sapien
tcataccaagatagaatagttgtcc

SEQ ID NO: 3160630 - DNA, 25 bp, Homo sapien
tgctgacggcggcttccacttcggt

SEQ ID NO: 3160631 - DNA, 25 bp, Homo sapien
tgccggtggaccaggctgctgacgg

SEQ ID NO: 3160632 - DNA, 25 bp, Homo sapien
taggtaagggaagcccgcagctgcc

SEQ ID NO: 3160633 - DNA, 25 bp, Homo sapien
cagggtcacgtcgtcgcggtagaaa

SEQ ID NO: 3160634 - DNA, 25 bp, Homo sapien
tcaagttcatactgagaagttctaa

SEQ ID NO: 3160635 - DNA, 25 bp, Homo sapien
ctgaaagatttcaagttcatactga

SEQ ID NO: 3160636 - DNA, 25 bp, Homo sapien
aagatttcaagttcatactgagaag

SEQ ID NO: 3160637 - DNA, 25 bp, Homo sapien
tttcaagttcatactgagaagttct

SEQ ID NO: 3160638 - DNA, 25 bp, Homo sapien
cagggagtcatcacctttatgctga

SEQ ID NO: 3160639 - DNA, 25 bp, Homo sapien
tgatgttttcttattaccagcattt

SEQ ID NO: 3160640 - DNA, 25 bp, Homo sapien
gatgttttcttattaccagcatttc

SEQ ID NO: 3160641 - DNA, 25 bp, Homo sapien
ctgatgttttcttattaccagcatt

SEQ ID NO: 3160642 - DNA, 25 bp, Homo sapien
cttcatggaggtagtcatggtgtcc

SEQ ID NO: 3160643 - DNA, 25 bp, Homo sapien
tcatggaggtagtcatggtgtccag

SEQ ID NO: 3160644 - DNA, 25 bp, Homo sapien
ttcatggaggtagtcatggtgtcca

SEQ ID NO: 3160645 - DNA, 25 bp, Homo sapien
ggcttcatggaggtagtcatggtgt

SEQ ID NO: 3160646 - DNA, 25 bp, Homo sapien
tggaactatgagttaattaagcccc

SEQ ID NO: 3160647 - DNA, 25 bp, Homo sapien
cttgcatagttctttatagtagtgt

SEQ ID NO: 3160648 - DNA, 25 bp, Homo sapien
aattactcagtcttgcatagttctt

SEQ ID NO: 3160649 - DNA, 25 bp, Homo sapien
tactcagtcttgcatagttctttat

SEQ ID NO: 3160650 - DNA, 25 bp, Homo sapien
catgactttacttatggatttggac

SEQ ID NO: 3160651 - DNA, 25 bp, Homo sapien
ttgtaacgaatgtaacacatcctct

SEQ ID NO: 3160652 - DNA, 25 bp, Homo sapien
tctaattgtaatcccatgatgtggg

SEQ ID NO: 3160653 - DNA, 25 bp, Homo sapien
aaggtgcatcctttactaaagatga

SEQ ID NO: 3160654 - DNA, 25 bp, Homo sapien
ctgtattttggcacctttaagacat

SEQ ID NO: 3160655 - DNA, 25 bp, Homo sapien
ctgagcctggcccaagaaacgtttt

SEQ ID NO: 3160656 - DNA, 25 bp, Homo sapien
caaacctcaatccttatattctgtg

SEQ ID NO: 3160657 - DNA, 25 bp, Homo sapien
ttttggcacctttaagacatggctg

SEQ ID NO: 3160658 - DNA, 25 bp, Homo sapien
caaggactatattccatgggccaca

SEQ ID NO: 3160659 - DNA, 25 bp, Homo sapien
actatattccatgggccacagcggc

SEQ ID NO: 3160660 - DNA, 25 bp, Homo sapien
ttccatgggccacagcggcacattt

SEQ ID NO: 3160661 - DNA, 25 bp, Homo sapien
tatattcatccaaggactatattcc

SEQ ID NO: 3160662 - DNA, 25 bp, Homo sapien
agtataaccagaatattcccaaaga

SEQ ID NO: 3160663 - DNA, 25 bp, Homo sapien
ataaccagaatattcccaaagaata

SEQ ID NO: 3160664 - DNA, 25 bp, Homo sapien
taaccagaatattcccaaagaatat

SEQ ID NO: 3160665 - DNA, 25 bp, Homo sapien
tgcatgaacgacatcagaccttgat

SEQ ID NO: 3160666 - DNA, 25 bp, Homo sapien
gactgtacacaaaggatatttttaa

SEQ ID NO: 3160667 - DNA, 25 bp, Homo sapien
tccaaagggaccaatggcatttgca

SEQ ID NO: 3160668 - DNA, 25 bp, Homo sapien
ggaccaatggcatttgcatgaacga

SEQ ID NO: 3160669 - DNA, 25 bp, Homo sapien
ttaattctgacagaataacagctcc

SEQ ID NO: 3160670 - DNA, 25 bp, Homo sapien
tgacagaataacagctccataggaa

SEQ ID NO: 3160671 - DNA, 25 bp, Homo sapien
gacagaataacagctccataggaag

SEQ ID NO: 3160672 - DNA, 25 bp, Homo sapien
ttctgacagaataacagctccatag

SEQ ID NO: 3160673 - DNA, 25 bp, Homo sapien
tgtctccatgaatgtcatcgaacca

SEQ ID NO: 3160674 - DNA, 25 bp, Homo sapien
gtctccatgaatgtcatcgaaccac

SEQ ID NO: 3160675 - DNA, 25 bp, Homo sapien
tctcagataattgtagtgcattttc

SEQ ID NO: 3160676 - DNA, 25 bp, Homo sapien
ataccagtagtttcgaatgagccac

SEQ ID NO: 3160677 - DNA, 25 bp, Homo sapien
aggtttgcagtagagtcttacaaca

SEQ ID NO: 3160678 - DNA, 25 bp, Homo sapien
gagtgggcgaggaaattccaaatac

SEQ ID NO: 3160679 - DNA, 25 bp, Homo sapien
tggaggataagtcagtattgaatgt

SEQ ID NO: 3160680 - DNA, 25 bp, Homo sapien
gataagtcagtattgaatgtattaa

SEQ ID NO: 3160681 - DNA, 25 bp, Homo sapien
gaggataagtcagtattgaatgtat

SEQ ID NO: 3160682 - DNA, 25 bp, Homo sapien
aaatggaggataagtcagtattgaa

SEQ ID NO: 3160683 - DNA, 25 bp, Homo sapien
ccattttaatcagatagaggtaaac

SEQ ID NO: 3160684 - DNA, 25 bp, Homo sapien
tagaggtaaacactggaaactccat

SEQ ID NO: 3160685 - DNA, 25 bp, Homo sapien
tttaatcagatagaggtaaacactg

SEQ ID NO: 3160686 - DNA, 25 bp, Homo sapien
tcagatagaggtaaacactggaaac

SEQ ID NO: 3160687 - DNA, 25 bp, Homo sapien
tcaatcgaagtgtgtggaagagtca

SEQ ID NO: 3160688 - DNA, 25 bp, Homo sapien
acagttccgacgctattgtgagcca

SEQ ID NO: 3160689 - DNA, 25 bp, Homo sapien
atttgtgtcaggaaacgtactccca

SEQ ID NO: 3160690 - DNA, 25 bp, Homo sapien
actgtactcagttcccgagggtcaa

SEQ ID NO: 3160691 - DNA, 25 bp, Homo sapien
gatgattgccactatactgctatta

SEQ ID NO: 3160692 - DNA, 25 bp, Homo sapien
tccaacttggtaacaatagctgatg

SEQ ID NO: 3160693 - DNA, 25 bp, Homo sapien
cactttccctttatatgcatgaaga

SEQ ID NO: 3160694 - DNA, 25 bp, Homo sapien
cttgccaacattatcactttccctt

SEQ ID NO: 3160695 - DNA, 25 bp, Homo sapien
gagaccgccctagagataacagacg

SEQ ID NO: 3160696 - DNA, 25 bp, Homo sapien
gatgatttccttcgtcgcacacaag

SEQ ID NO: 3160697 - DNA, 25 bp, Homo sapien
tgcgtggcagcggaagacgattccc

SEQ ID NO: 3160698 - DNA, 25 bp, Homo sapien
caagctgttgtcagtggccggagaa

SEQ ID NO: 3160699 - DNA, 25 bp, Homo sapien
catgttttgattggactagtctgca

SEQ ID NO: 3160700 - DNA, 25 bp, Homo sapien
tgagtttcaccagagaccaggttaa

SEQ ID NO: 3160701 - DNA, 25 bp, Homo sapien
catcatagcatgagttggcagagaa

SEQ ID NO: 3160702 - DNA, 25 bp, Homo sapien
taggcgtcgaccagaagattatgat

SEQ ID NO: 3160703 - DNA, 25 bp, Homo sapien
ctctgtagtcagtaaagtttcacct

SEQ ID NO: 3160704 - DNA, 25 bp, Homo sapien
cagtaaagaacagccctctgtagtc

SEQ ID NO: 3160705 - DNA, 25 bp, Homo sapien
tgaaagcagttggtactcagacaaa

SEQ ID NO: 3160706 - DNA, 25 bp, Homo sapien
taacccgatttatggaagacagtaa

SEQ ID NO: 3160707 - DNA, 25 bp, Homo sapien
cactgtcgagtaggtaggaggaaac

SEQ ID NO: 3160708 - DNA, 25 bp, Homo sapien
ccagatgctggcagtacctgtggac

SEQ ID NO: 3160709 - DNA, 25 bp, Homo sapien
cgtgatgtgttaaccctattgccaa

SEQ ID NO: 3160710 - DNA, 25 bp, Homo sapien
tttttggcctaaaaggactgagcac

SEQ ID NO: 3160711 - DNA, 25 bp, Homo sapien
tcacggaggaatctagcagccaact

SEQ ID NO: 3160712 - DNA, 25 bp, Homo sapien
gcaactgtcaaggaagttaatcttc

SEQ ID NO: 3160713 - DNA, 25 bp, Homo sapien
cacgtgattatactttcacggagga

SEQ ID NO: 3160714 - DNA, 25 bp, Homo sapien
gccaactgtggaatctatcagccag

SEQ ID NO: 3160715 - DNA, 25 bp, Homo sapien
tgacggacgggcccgtgcttctgcc

SEQ ID NO: 3160716 - DNA, 25 bp, Homo sapien
cggcgcccgcgcgagtcgcgtctaa

SEQ ID NO: 3160717 - DNA, 25 bp, Homo sapien
tggcagcggcggaaaccgaagggga

SEQ ID NO: 3160718 - DNA, 25 bp, Homo sapien
cgcgcgagtcgcgtctaagcggcgg

SEQ ID NO: 3160719 - DNA, 25 bp, Homo sapien
gaagcaggctccattttagcgccgc

SEQ ID NO: 3160720 - DNA, 25 bp, Homo sapien
gaagcgtaaacagcgcagggcattt

SEQ ID NO: 3160721 - DNA, 25 bp, Homo sapien
catttcgggagcgggattgtttcgc

SEQ ID NO: 3160722 - DNA, 25 bp, Homo sapien
tcccagagaggaacgaagcgtaaac

SEQ ID NO: 3160723 - DNA, 25 bp, Homo sapien
gttccgccaatcagatgcaccgtgt

SEQ ID NO: 3160724 - DNA, 25 bp, Homo sapien
caatggcagcctcgggcttctagcg

SEQ ID NO: 3160725 - DNA, 25 bp, Homo sapien
gcctttggatcgcaggactacccat

SEQ ID NO: 3160726 - DNA, 25 bp, Homo sapien
cccagatatcttcgcagggagggct

SEQ ID NO: 3160727 - DNA, 25 bp, Homo sapien
taagctttccgtgccttagaggtta

SEQ ID NO: 3160728 - DNA, 25 bp, Homo sapien
cattacaatcaacatcgaataagct

SEQ ID NO: 3160729 - DNA, 25 bp, Homo sapien
tcaacatcgaataagctttccgtgc

SEQ ID NO: 3160730 - DNA, 25 bp, Homo sapien
cgaataagctttccgtgccttagag

SEQ ID NO: 3160731 - DNA, 25 bp, Homo sapien
gtcgggacaggttgtacacgggctc

SEQ ID NO: 3160732 - DNA, 25 bp, Homo sapien
tcgggacaggttgtacacgggctcg

SEQ ID NO: 3160733 - DNA, 25 bp, Homo sapien
agtcgggacaggttgtacacgggct

SEQ ID NO: 3160734 - DNA, 25 bp, Homo sapien
tgcaggagtcactggcggcacagga

SEQ ID NO: 3160735 - DNA, 25 bp, Homo sapien
aggtgcaggagtcactggcggcaca

SEQ ID NO: 3160736 - DNA, 25 bp, Homo sapien
agtcactggcggcacaggagcagtt

SEQ ID NO: 3160737 - DNA, 25 bp, Homo sapien
gcaggagtcactggcggcacaggag

SEQ ID NO: 3160738 - DNA, 25 bp, Homo sapien
tccaggtttgtagaggtcgcgttat

SEQ ID NO: 3160739 - DNA, 25 bp, Homo sapien
tgtagcaaacgtcagggtcagggtt

SEQ ID NO: 3160740 - DNA, 25 bp, Homo sapien
tagaggtcgcgttatttacatctgg

SEQ ID NO: 3160741 - DNA, 25 bp, Homo sapien
gtttgtagaggtcgcgttatttaca

SEQ ID NO: 3160742 - DNA, 25 bp, Homo sapien
ctgttttattatcattcacattatt

SEQ ID NO: 3160743 - DNA, 25 bp, Homo sapien
agtcaaagctgttttattatcattc

SEQ ID NO: 3160744 - DNA, 25 bp, Homo sapien
agctgttttattatcattcacatta

SEQ ID NO: 3160745 - DNA, 25 bp, Homo sapien
tcaaagctgttttattatcattcac

SEQ ID NO: 3160746 - DNA, 25 bp, Homo sapien
attccaccttgatttcagtccctaa

SEQ ID NO: 3160747 - DNA, 25 bp, Homo sapien
atttttaattccaccttgatttcag

SEQ ID NO: 3160748 - DNA, 25 bp, Homo sapien
ccttgatttcagtccctaatgtcat

SEQ ID NO: 3160749 - DNA, 25 bp, Homo sapien
tccaccttgatttcagtccctaatg

SEQ ID NO: 3160750 - DNA, 25 bp, Homo sapien
tctcaacagaaccagtctgacaagt

SEQ ID NO: 3160751 - DNA, 25 bp, Homo sapien
tgtgaatccagctctatcaatgact

SEQ ID NO: 3160752 - DNA, 25 bp, Homo sapien
gaaggtcgaggtctacatccaagtg

SEQ ID NO: 3160753 - DNA, 25 bp, Homo sapien
aagagtcctgtgaaggtcgaggtct

SEQ ID NO: 3160754 - DNA, 25 bp, Homo sapien
cacaagcactaaaaccatcaggcat

SEQ ID NO: 3160755 - DNA, 25 bp, Homo sapien
cacgactgttcaatctacctctttc

SEQ ID NO: 3160756 - DNA, 25 bp, Homo sapien
tcacaagcactaaaaccatcaggca

SEQ ID NO: 3160757 - DNA, 25 bp, Homo sapien
tgcttcacgactgttcaatctacct

SEQ ID NO: 3160758 - DNA, 25 bp, Homo sapien
cttgacaattacgttctaatatatt

SEQ ID NO: 3160759 - DNA, 25 bp, Homo sapien
tgacaattacgttctaatatattgg

SEQ ID NO: 3160760 - DNA, 25 bp, Homo sapien
gacaattacgttctaatatattggc

SEQ ID NO: 3160761 - DNA, 25 bp, Homo sapien
caattacgttctaatatattggcat

SEQ ID NO: 3160762 - DNA, 25 bp, Homo sapien
tcacaactattttagtgacatgctc

SEQ ID NO: 3160763 - DNA, 25 bp, Homo sapien
caactattttagtgacatgctctcc

SEQ ID NO: 3160764 - DNA, 25 bp, Homo sapien
cattactcacaactattttagtgac

SEQ ID NO: 3160765 - DNA, 25 bp, Homo sapien
ctttccacattactcacaactattt

SEQ ID NO: 3160766 - DNA, 25 bp, Homo sapien
tatgaagatgacgaggccgataacc

SEQ ID NO: 3160767 - DNA, 25 bp, Homo sapien
aatgaacagtgagtccaatgcacac

SEQ ID NO: 3160768 - DNA, 25 bp, Homo sapien
tgcacactgccaggacaatcaggga

SEQ ID NO: 3160769 - DNA, 25 bp, Homo sapien
tctcacataatgaacagtgagtcca

SEQ ID NO: 3160770 - DNA, 25 bp, Homo sapien
tggccagggtgacatgaaattcagg

SEQ ID NO: 3160771 - DNA, 25 bp, Homo sapien
caggcaggtacctggaaatatacat

SEQ ID NO: 3160772 - DNA, 25 bp, Homo sapien
tctctgccaaactcagcatatagtt

SEQ ID NO: 3160773 - DNA, 25 bp, Homo sapien
gtttgtcagttgtaaatgacaatgt

SEQ ID NO: 3160774 - DNA, 25 bp, Homo sapien
aaattgttagaagcctctctgccaa

SEQ ID NO: 3160775 - DNA, 25 bp, Homo sapien
tctgtaaaattgttagaagcctctc

SEQ ID NO: 3160776 - DNA, 25 bp, Homo sapien
gataacctgagacttgacaaattct

SEQ ID NO: 3160777 - DNA, 25 bp, Homo sapien
aattcttcccttaatggagatttat

SEQ ID NO: 3160778 - DNA, 25 bp, Homo sapien
tcttcccttaatggagatttataaa

SEQ ID NO: 3160779 - DNA, 25 bp, Homo sapien
cttgataacctgagacttgacaaat

SEQ ID NO: 3160780 - DNA, 25 bp, Homo sapien
cagcatatgagccaacactccatgc

SEQ ID NO: 3160781 - DNA, 25 bp, Homo sapien
atcaacagcatatgagccaacactc

SEQ ID NO: 3160782 - DNA, 25 bp, Homo sapien
gcatatgagccaacactccatgctt

SEQ ID NO: 3160783 - DNA, 25 bp, Homo sapien
caaatcaacagcatatgagccaaca

SEQ ID NO: 3160784 - DNA, 25 bp, Homo sapien
tactttagggggtcctacagcatct

SEQ ID NO: 3160785 - DNA, 25 bp, Homo sapien
gggtcctacagcatcttgcagcttt

SEQ ID NO: 3160786 - DNA, 25 bp, Homo sapien
gatctactttagggggtcctacagc

SEQ ID NO: 3160787 - DNA, 25 bp, Homo sapien
tagggggtcctacagcatcttgcag

SEQ ID NO: 3160788 - DNA, 25 bp, Homo sapien
cttcattaggacaaatttagttcca

SEQ ID NO: 3160789 - DNA, 25 bp, Homo sapien
tggcaagaccccagaattaaaggac

SEQ ID NO: 3160790 - DNA, 25 bp, Homo sapien
ttcacttataattggattctatagc

SEQ ID NO: 3160791 - DNA, 25 bp, Homo sapien
aagtgccaagatcaaacctaacatg

SEQ ID NO: 3160792 - DNA, 25 bp, Homo sapien
tggtttagatagctgtctgtttctg

SEQ ID NO: 3160793 - DNA, 25 bp, Homo sapien
atggtttagatagctgtctgtttct

SEQ ID NO: 3160794 - DNA, 25 bp, Homo sapien
aatggtttagatagctgtctgtttc

SEQ ID NO: 3160795 - DNA, 25 bp, Homo sapien
ggtttagatagctgtctgtttctgt

SEQ ID NO: 3160796 - DNA, 25 bp, Homo sapien
caacgatcctgagactctgacctag

SEQ ID NO: 3160797 - DNA, 25 bp, Homo sapien
agtgagcagcactcacaagccatgt

SEQ ID NO: 3160798 - DNA, 25 bp, Homo sapien
caagccatgtggcattaattaaggt

SEQ ID NO: 3160799 - DNA, 25 bp, Homo sapien
taattaaggttgctccacagcgatg

SEQ ID NO: 3160800 - DNA, 25 bp, Homo sapien
tggacaattattctccggagacccc

SEQ ID NO: 3160801 - DNA, 25 bp, Homo sapien
catcacctggttgaaactcatagga

SEQ ID NO: 3160802 - DNA, 25 bp, Homo sapien
cataggatgcatcagggagacaaac

SEQ ID NO: 3160803 - DNA, 25 bp, Homo sapien
tagggaacagggctagaaagctctg

SEQ ID NO: 3160804 - DNA, 25 bp, Homo sapien
ggcgtcattgtaagcttgaggttca

SEQ ID NO: 3160805 - DNA, 25 bp, Homo sapien
cattgcaagttgtagcgtctatgag

SEQ ID NO: 3160806 - DNA, 25 bp, Homo sapien
taacattctaggagttatggcgtca

SEQ ID NO: 3160807 - DNA, 25 bp, Homo sapien
gagagtcacctgtgcttgtcgaaga

SEQ ID NO: 3160808 - DNA, 25 bp, Homo sapien
ccagcaaggtaccagatatctctag

SEQ ID NO: 3160809 - DNA, 25 bp, Homo sapien
tagtataaacaccaggcttgttggg

SEQ ID NO: 3160810 - DNA, 25 bp, Homo sapien
ttgaagtaatccagtcccgcaaggc

SEQ ID NO: 3160811 - DNA, 25 bp, Homo sapien
tagcatctgaactaaccagtggtcc

SEQ ID NO: 3160812 - DNA, 25 bp, Homo sapien
gaagtgattggtattctgctgtctt

SEQ ID NO: 3160813 - DNA, 25 bp, Homo sapien
tagttcccatacttcctaaatgatg

SEQ ID NO: 3160814 - DNA, 25 bp, Homo sapien
gaacaagtacattgcatgaagtttg

SEQ ID NO: 3160815 - DNA, 25 bp, Homo sapien
tgttgacatcctcagtaacaatgtt

SEQ ID NO: 3160816 - DNA, 25 bp, Homo sapien
cccatgtcagtgtccttgatgtagg

SEQ ID NO: 3160817 - DNA, 25 bp, Homo sapien
ttcaatagtgttggggggtgacact

SEQ ID NO: 3160818 - DNA, 25 bp, Homo sapien
ttaggcttttaagagtgaggagagc

SEQ ID NO: 3160819 - DNA, 25 bp, Homo sapien
tggacaggtttagatgggaggtggt

SEQ ID NO: 3160820 - DNA, 25 bp, Homo sapien
cagttaaatcactatcataggccag

SEQ ID NO: 3160821 - DNA, 25 bp, Homo sapien
caggagtaactaactgtggtcgagg

SEQ ID NO: 3160822 - DNA, 25 bp, Homo sapien
catgagtgagtctggcctgtacaat

SEQ ID NO: 3160823 - DNA, 25 bp, Homo sapien
ttgtaataccatcgcagtatcagcc

SEQ ID NO: 3160824 - DNA, 25 bp, Homo sapien
ggaagcctcccacgttcagtccatg

SEQ ID NO: 3160825 - DNA, 25 bp, Homo sapien
agcctcccacgttcagtccatggac

SEQ ID NO: 3160826 - DNA, 25 bp, Homo sapien
ggggaagcctcccacgttcagtcca

SEQ ID NO: 3160827 - DNA, 25 bp, Homo sapien
gaagcctcccacgttcagtccatgg

SEQ ID NO: 3160828 - DNA, 25 bp, Homo sapien
tgtaggacatgtctggtgatgctag

SEQ ID NO: 3160829 - DNA, 25 bp, Homo sapien
tgtaagtggtttacacactacaatt

SEQ ID NO: 3160830 - DNA, 25 bp, Homo sapien
tactggatgcagtatttttgattgg

SEQ ID NO: 3160831 - DNA, 25 bp, Homo sapien
cagtctgtctggaaagtctttatct

SEQ ID NO: 3160832 - DNA, 25 bp, Homo sapien
tttctcttaccttgtcttctcacaa

SEQ ID NO: 3160833 - DNA, 25 bp, Homo sapien
tacaccaatctaatgtatatttggc

SEQ ID NO: 3160834 - DNA, 25 bp, Homo sapien
ggcctcttcacacaatcctgtattt

SEQ ID NO: 3160835 - DNA, 25 bp, Homo sapien
ttctaactatccatttgtctaacct

SEQ ID NO: 3160836 - DNA, 25 bp, Homo sapien
actacacccacttcagacccgtgag

SEQ ID NO: 3160837 - DNA, 25 bp, Homo sapien
cctattaaatcttcccaggatgcca

SEQ ID NO: 3160838 - DNA, 25 bp, Homo sapien
gttgtcctattaaatcttcccagga

SEQ ID NO: 3160839 - DNA, 25 bp, Homo sapien
ttcagacccgtgagcctcaaagtgt

SEQ ID NO: 3160840 - DNA, 25 bp, Homo sapien
gtcgggacaggttgtacacgggctc

SEQ ID NO: 3160841 - DNA, 25 bp, Homo sapien
tcgggacaggttgtacacgggctcg

SEQ ID NO: 3160842 - DNA, 25 bp, Homo sapien
agtcgggacaggttgtacacgggct

SEQ ID NO: 3160843 - DNA, 25 bp, Homo sapien
tgcaggagtcactggcggcacagga

SEQ ID NO: 3160844 - DNA, 25 bp, Homo sapien
gcaggagtcactggcggcacaggag

SEQ ID NO: 3160845 - DNA, 25 bp, Homo sapien
agtcactggcggcacaggagcagtt

SEQ ID NO: 3160846 - DNA, 25 bp, Homo sapien
aggtgcaggagtcactggcggcaca

SEQ ID NO: 3160847 - DNA, 25 bp, Homo sapien
tgcacttgtccgacgcccctttgca

SEQ ID NO: 3160848 - DNA, 25 bp, Homo sapien
cttgtccgacgcccctttgcagatg

SEQ ID NO: 3160849 - DNA, 25 bp, Homo sapien
cagcagctgcacttgtccgacgccc

SEQ ID NO: 3160850 - DNA, 25 bp, Homo sapien
agctgcacttgtccgacgccccttt

SEQ ID NO: 3160851 - DNA, 25 bp, Homo sapien
tgtagcaaacgtcagggtcagggtt

SEQ ID NO: 3160852 - DNA, 25 bp, Homo sapien
tccaggtttgtagaggtcgcgttat

SEQ ID NO: 3160853 - DNA, 25 bp, Homo sapien
gtttgtagaggtcgcgttatttaca

SEQ ID NO: 3160854 - DNA, 25 bp, Homo sapien
tagaggtcgcgttatttacatctgg

SEQ ID NO: 3160855 - DNA, 25 bp, Homo sapien
agtcaaagctgttttattatcattc

SEQ ID NO: 3160856 - DNA, 25 bp, Homo sapien
tcaaagctgttttattatcattcac

SEQ ID NO: 3160857 - DNA, 25 bp, Homo sapien
agctgttttattatcattcacatta

SEQ ID NO: 3160858 - DNA, 25 bp, Homo sapien
ctgttttattatcattcacattatt

SEQ ID NO: 3160859 - DNA, 25 bp, Homo sapien
atttttaattccaccttgatttcag

SEQ ID NO: 3160860 - DNA, 25 bp, Homo sapien
tccaccttgatttcagtccctaatg

SEQ ID NO: 3160861 - DNA, 25 bp, Homo sapien
attccaccttgatttcagtccctaa

SEQ ID NO: 3160862 - DNA, 25 bp, Homo sapien
ccttgatttcagtccctaatgtcat

SEQ ID NO: 3160863 - DNA, 25 bp, Homo sapien
tgtgaatccagctctatcaatgact

SEQ ID NO: 3160864 - DNA, 25 bp, Homo sapien
tctcaacagaaccagtctgacaagt

SEQ ID NO: 3160865 - DNA, 25 bp, Homo sapien
aagagtcctgtgaaggtcgaggtct

SEQ ID NO: 3160866 - DNA, 25 bp, Homo sapien
gaaggtcgaggtctacatccaagtg

SEQ ID NO: 3160867 - DNA, 25 bp, Homo sapien
cacaagcactaaaaccatcaggcat

SEQ ID NO: 3160868 - DNA, 25 bp, Homo sapien
tcacaagcactaaaaccatcaggca

SEQ ID NO: 3160869 - DNA, 25 bp, Homo sapien
cacgactgttcaatctacctctttc

SEQ ID NO: 3160870 - DNA, 25 bp, Homo sapien
tgcttcacgactgttcaatctacct

SEQ ID NO: 3160871 - DNA, 25 bp, Homo sapien
tcacaactattttagtgacatgctc

SEQ ID NO: 3160872 - DNA, 25 bp, Homo sapien
cattactcacaactattttagtgac

SEQ ID NO: 3160873 - DNA, 25 bp, Homo sapien
ctttccacattactcacaactattt

SEQ ID NO: 3160874 - DNA, 25 bp, Homo sapien
caactattttagtgacatgctctcc

SEQ ID NO: 3160875 - DNA, 25 bp, Homo sapien
tatgaagatgacgaggccgataacc

SEQ ID NO: 3160876 - DNA, 25 bp, Homo sapien
tgcacactgccaggacaatcaggga

SEQ ID NO: 3160877 - DNA, 25 bp, Homo sapien
aatgaacagtgagtccaatgcacac

SEQ ID NO: 3160878 - DNA, 25 bp, Homo sapien
tctcacataatgaacagtgagtcca

SEQ ID NO: 3160879 - DNA, 25 bp, Homo sapien
caggcaggtacctggaaatatacat

SEQ ID NO: 3160880 - DNA, 25 bp, Homo sapien
tggccagggtgacatgaaattcagg

SEQ ID NO: 3160881 - DNA, 25 bp, Homo sapien
aaattgttagaagcctctctgccaa

SEQ ID NO: 3160882 - DNA, 25 bp, Homo sapien
tctctgccaaactcagcatatagtt

SEQ ID NO: 3160883 - DNA, 25 bp, Homo sapien
gtttgtcagttgtaaatgacaatgt

SEQ ID NO: 3160884 - DNA, 25 bp, Homo sapien
tctgtaaaattgttagaagcctctc

SEQ ID NO: 3160885 - DNA, 25 bp, Homo sapien
gataacctgagacttgacaaattct

SEQ ID NO: 3160886 - DNA, 25 bp, Homo sapien
aattcttcccttaatggagatttat

SEQ ID NO: 3160887 - DNA, 25 bp, Homo sapien
tcttcccttaatggagatttataaa

SEQ ID NO: 3160888 - DNA, 25 bp, Homo sapien
cttgataacctgagacttgacaaat

SEQ ID NO: 3160889 - DNA, 25 bp, Homo sapien
caaatcaacagcatatgagccaaca

SEQ ID NO: 3160890 - DNA, 25 bp, Homo sapien
gcatatgagccaacactccatgctt

SEQ ID NO: 3160891 - DNA, 25 bp, Homo sapien
cagcatatgagccaacactccatgc

SEQ ID NO: 3160892 - DNA, 25 bp, Homo sapien
atcaacagcatatgagccaacactc

SEQ ID NO: 3160893 - DNA, 25 bp, Homo sapien
tactttagggggtcctacagcatct

SEQ ID NO: 3160894 - DNA, 25 bp, Homo sapien
tagggggtcctacagcatcttgcag

SEQ ID NO: 3160895 - DNA, 25 bp, Homo sapien
gggtcctacagcatcttgcagcttt

SEQ ID NO: 3160896 - DNA, 25 bp, Homo sapien
gatctactttagggggtcctacagc

SEQ ID NO: 3160897 - DNA, 25 bp, Homo sapien
atggtttagatagctgtctgtttct

SEQ ID NO: 3160898 - DNA, 25 bp, Homo sapien
aatggtttagatagctgtctgtttc

SEQ ID NO: 3160899 - DNA, 25 bp, Homo sapien
ggtttagatagctgtctgtttctgt

SEQ ID NO: 3160900 - DNA, 25 bp, Homo sapien
tggtttagatagctgtctgtttctg

SEQ ID NO: 3160901 - DNA, 25 bp, Homo sapien
cttcaggtaatgctatttcaataaa

SEQ ID NO: 3160902 - DNA, 25 bp, Homo sapien
caacgatcctgagactctgacctag

SEQ ID NO: 3160903 - DNA, 25 bp, Homo sapien
agtgagcagcactcacaagccatgt

SEQ ID NO: 3160904 - DNA, 25 bp, Homo sapien
caagccatgtggcattaattaaggt

SEQ ID NO: 3160905 - DNA, 25 bp, Homo sapien
taattaaggttgctccacagcgatg

SEQ ID NO: 3160906 - DNA, 25 bp, Homo sapien
tggacaattattctccggagacccc

SEQ ID NO: 3160907 - DNA, 25 bp, Homo sapien
cataggatgcatcagggagacaaac

SEQ ID NO: 3160908 - DNA, 25 bp, Homo sapien
catcacctggttgaaactcatagga

SEQ ID NO: 3160909 - DNA, 25 bp, Homo sapien
tagggaacagggctagaaagctctg

SEQ ID NO: 3160910 - DNA, 25 bp, Homo sapien
cattgcaagttgtagcgtctatgag

SEQ ID NO: 3160911 - DNA, 25 bp, Homo sapien
ggcgtcattgtaagcttgaggttca

SEQ ID NO: 3160912 - DNA, 25 bp, Homo sapien
taacattctaggagttatggcgtca

SEQ ID NO: 3160913 - DNA, 25 bp, Homo sapien
gagagtcacctgtgcttgtcgaaga

SEQ ID NO: 3160914 - DNA, 25 bp, Homo sapien
tagcatctgaactaaccagtggtcc

SEQ ID NO: 3160915 - DNA, 25 bp, Homo sapien
tagtataaacaccaggcttgttggg

SEQ ID NO: 3160916 - DNA, 25 bp, Homo sapien
ccagcaaggtaccagatatctctag

SEQ ID NO: 3160917 - DNA, 25 bp, Homo sapien
ttgaagtaatccagtcccgcaaggc

SEQ ID NO: 3160918 - DNA, 25 bp, Homo sapien
tctagagaacaaatgaatacaggct

SEQ ID NO: 3160919 - DNA, 25 bp, Homo sapien
gcaggatgcttatgtgcggaacaga

SEQ ID NO: 3160920 - DNA, 25 bp, Homo sapien
cagagttgatctggcagaagcagga

SEQ ID NO: 3160921 - DNA, 25 bp, Homo sapien
caactattgctcacagatgacagag

SEQ ID NO: 3160922 - DNA, 25 bp, Homo sapien
gctctttaagggtgatgtggatggg

SEQ ID NO: 3160923 - DNA, 25 bp, Homo sapien
agaagcctgttagaagccttggagg

SEQ ID NO: 3160924 - DNA, 25 bp, Homo sapien
gttaactacaggtgcgggataagga

SEQ ID NO: 3160925 - DNA, 25 bp, Homo sapien
tgtggtgctctgtgaccgagggtgt

SEQ ID NO: 3160926 - DNA, 25 bp, Homo sapien
gatttctttgacttagtacaatgtc

SEQ ID NO: 3160927 - DNA, 25 bp, Homo sapien
taattttgagaagatactaggagtg

SEQ ID NO: 3160928 - DNA, 25 bp, Homo sapien
ttgataaacctccagtcctagggaa

SEQ ID NO: 3160929 - DNA, 25 bp, Homo sapien
caatgtcttttattagtttcaccca

SEQ ID NO: 3160930 - DNA, 25 bp, Homo sapien
atgcctggccagtagcatatcattt

SEQ ID NO: 3160931 - DNA, 25 bp, Homo sapien
catgcctggccagtagcatatcatt

SEQ ID NO: 3160932 - DNA, 25 bp, Homo sapien
tctttgtatattcccggcagcacat

SEQ ID NO: 3160933 - DNA, 25 bp, Homo sapien
ctcttctttgtatattcccggcagc

SEQ ID NO: 3160934 - DNA, 25 bp, Homo sapien
cttctttgtatattcccggcagcac

SEQ ID NO: 3160935 - DNA, 25 bp, Homo sapien
gtatattcccggcagcacatcagga

SEQ ID NO: 3160936 - DNA, 25 bp, Homo sapien
cagagaaagcaccacaataccatct

SEQ ID NO: 3160937 - DNA, 25 bp, Homo sapien
acattttgaaacagtgaccccagag

SEQ ID NO: 3160938 - DNA, 25 bp, Homo sapien
ccatgaactctggacaaaattttcc

SEQ ID NO: 3160939 - DNA, 25 bp, Homo sapien
gcaatgatattaaccttttcctctg

SEQ ID NO: 3160940 - DNA, 25 bp, Homo sapien
tatcaggattggaggttttactgac

SEQ ID NO: 3160941 - DNA, 25 bp, Homo sapien
ttatcaggattggaggttttactga

SEQ ID NO: 3160942 - DNA, 25 bp, Homo sapien
gggtatgtagacgtactgtgtaaac

SEQ ID NO: 3160943 - DNA, 25 bp, Homo sapien
taatgtgtacttgttgcctattaag

SEQ ID NO: 3160944 - DNA, 25 bp, Homo sapien
gacgtactgtgtaaacactaaaaga

SEQ ID NO: 3160945 - DNA, 25 bp, Homo sapien
cactaaaagatatagtaggacattt

SEQ ID NO: 3160946 - DNA, 25 bp, Homo sapien
caatcatacagcttagtgctggttc

SEQ ID NO: 3160947 - DNA, 25 bp, Homo sapien
ccaatcatacagcttagtgctggtt

SEQ ID NO: 3160948 - DNA, 25 bp, Homo sapien
atccaatcatacagcttagtgctgg

SEQ ID NO: 3160949 - DNA, 25 bp, Homo sapien
tccaatcatacagcttagtgctggt

SEQ ID NO: 3160950 - DNA, 25 bp, Homo sapien
tcaaacactgagtaaatcttcgctt

SEQ ID NO: 3160951 - DNA, 25 bp, Homo sapien
ggtgaattcttgataatctcatagc

SEQ ID NO: 3160952 - DNA, 25 bp, Homo sapien
taatctcatagcatcctccttgtaa

SEQ ID NO: 3160953 - DNA, 25 bp, Homo sapien
tgataatctcatagcatcctccttg

SEQ ID NO: 3160954 - DNA, 25 bp, Homo sapien
tcttgataatctcatagcatcctcc

SEQ ID NO: 3160955 - DNA, 25 bp, Homo sapien
gagactgctctatccagggtcttta

SEQ ID NO: 3160956 - DNA, 25 bp, Homo sapien
tccaggagactgctctatccagggt

SEQ ID NO: 3160957 - DNA, 25 bp, Homo sapien
ctgctctatccagggtctttatggg

SEQ ID NO: 3160958 - DNA, 25 bp, Homo sapien
ctctatccagggtctttatgggttg

SEQ ID NO: 3160959 - DNA, 25 bp, Homo sapien
gcaaactattctgagtgtaatgctc

SEQ ID NO: 3160960 - DNA, 25 bp, Homo sapien
aacaccaggaatcagcatactgaag

SEQ ID NO: 3160961 - DNA, 25 bp, Homo sapien
taagtgacagaagagagtaaggaca

SEQ ID NO: 3160962 - DNA, 25 bp, Homo sapien
cattgtctgagatcagtaatgctgg

SEQ ID NO: 3160963 - DNA, 25 bp, Homo sapien
tataaaatcagcaattaaaaccaca

SEQ ID NO: 3160964 - DNA, 25 bp, Homo sapien
taaaatcagcaattaaaaccacata

SEQ ID NO: 3160965 - DNA, 25 bp, Homo sapien
attaaaaccacatatttctaatggt

SEQ ID NO: 3160966 - DNA, 25 bp, Homo sapien
tttataaaatcagcaattaaaacca

SEQ ID NO: 3160967 - DNA, 25 bp, Homo sapien
aagcacagttacctcttggtgtttc

SEQ ID NO: 3160968 - DNA, 25 bp, Homo sapien
aaggtgacaagcacagttacctctt

SEQ ID NO: 3160969 - DNA, 25 bp, Homo sapien
gacaagcacagttacctcttggtgt

SEQ ID NO: 3160970 - DNA, 25 bp, Homo sapien
ggtgacaagcacagttacctcttgg

SEQ ID NO: 3160971 - DNA, 25 bp, Homo sapien
ttatgtcattaattgcccacaggat

SEQ ID NO: 3160972 - DNA, 25 bp, Homo sapien
gttgtatcagcagaactgtagtcca

SEQ ID NO: 3160973 - DNA, 25 bp, Homo sapien
aatctcttaaccaattgcatgatga

SEQ ID NO: 3160974 - DNA, 25 bp, Homo sapien
tctaattatgtcattaattgcccac

SEQ ID NO: 3160975 - DNA, 25 bp, Homo sapien
aaaactgatcccacttcttcatatt

SEQ ID NO: 3160976 - DNA, 25 bp, Homo sapien
gatcccacttcttcatattaaatat

SEQ ID NO: 3160977 - DNA, 25 bp, Homo sapien
aaacttcactgtaaaactgatccca

SEQ ID NO: 3160978 - DNA, 25 bp, Homo sapien
aataaagcacatagagcatattttt

SEQ ID NO: 3160979 - DNA, 25 bp, Homo sapien
aacatttggtaagaatggatgagga

SEQ ID NO: 3160980 - DNA, 25 bp, Homo sapien
tgtcagctttcctcattgtctcaga

SEQ ID NO: 3160981 - DNA, 25 bp, Homo sapien
cctcattgtctcagataatgtagtg

SEQ ID NO: 3160982 - DNA, 25 bp, Homo sapien
ccaggagtttcgcataagccatatg

SEQ ID NO: 3160983 - DNA, 25 bp, Homo sapien
ggtttggcaggtttgcagtggagtc

SEQ ID NO: 3160984 - DNA, 25 bp, Homo sapien
aggggtttggcaggtttgcagtgga

SEQ ID NO: 3160985 - DNA, 25 bp, Homo sapien
gtaggggtttggcaggtttgcagtg

SEQ ID NO: 3160986 - DNA, 25 bp, Homo sapien
gggtttggcaggtttgcagtggagt

SEQ ID NO: 3160987 - DNA, 25 bp, Homo sapien
cagtcatttctactgaaatttgaag

SEQ ID NO: 3160988 - DNA, 25 bp, Homo sapien
ttctactgaaatttgaagccaacaa

SEQ ID NO: 3160989 - DNA, 25 bp, Homo sapien
tatacagtcatttctactgaaattt

SEQ ID NO: 3160990 - DNA, 25 bp, Homo sapien
gtcatttctactgaaatttgaagcc

SEQ ID NO: 3160991 - DNA, 25 bp, Homo sapien
tcacaaccattgactttcattcaat

SEQ ID NO: 3160992 - DNA, 25 bp, Homo sapien
accattgactttcattcaatgcttt

SEQ ID NO: 3160993 - DNA, 25 bp, Homo sapien
cacaaccattgactttcattcaatg

SEQ ID NO: 3160994 - DNA, 25 bp, Homo sapien
caaccattgactttcattcaatgct

SEQ ID NO: 3160995 - DNA, 25 bp, Homo sapien
tgtcatgttactgaccattgacccc

SEQ ID NO: 3160996 - DNA, 25 bp, Homo sapien
gtcatgttactgaccattgacccca

SEQ ID NO: 3160997 - DNA, 25 bp, Homo sapien
tcatgttactgaccattgaccccag

SEQ ID NO: 3160998 - DNA, 25 bp, Homo sapien
tctgaggctggataatatggcaaac

SEQ ID NO: 3160999 - DNA, 25 bp, Homo sapien
tgaacatcattcagataggcctatg

SEQ ID NO: 3161000 - DNA, 25 bp, Homo sapien
agtgtgtacagtgccctcaggaatt

SEQ ID NO: 3161001 - DNA, 25 bp, Homo sapien
gttattgtgctactgaagtcaccca

SEQ ID NO: 3161002 - DNA, 25 bp, Homo sapien
ccacattttatactggacaggatcc

SEQ ID NO: 3161003 - DNA, 25 bp, Homo sapien
ccattgggaggggttgttaatctgg

SEQ ID NO: 3161004 - DNA, 25 bp, Homo sapien
cattgggaggggttgttaatctggt

SEQ ID NO: 3161005 - DNA, 25 bp, Homo sapien
acattttatactggacaggatccac

SEQ ID NO: 3161006 - DNA, 25 bp, Homo sapien
tatgttctatggagggggcatctga

SEQ ID NO: 3161007 - DNA, 25 bp, Homo sapien
tgttctatggagggggcatctgaac

SEQ ID NO: 3161008 - DNA, 25 bp, Homo sapien
atgttctatggagggggcatctgaa

SEQ ID NO: 3161009 - DNA, 25 bp, Homo sapien
tcaatatatctacttgtctgtaagt

SEQ ID NO: 3161010 - DNA, 25 bp, Homo sapien
gttattatattacagcctgttgtcc

SEQ ID NO: 3161011 - DNA, 25 bp, Homo sapien
caatttagtaatgacctatatgttt

SEQ ID NO: 3161012 - DNA, 25 bp, Homo sapien
gtcctttgattgacaaaatagcaag

SEQ ID NO: 3161013 - DNA, 25 bp, Homo sapien
ctaaggcatctggtttattcccatc

SEQ ID NO: 3161014 - DNA, 25 bp, Homo sapien
tattcccatcaaatctccaaagaac

SEQ ID NO: 3161015 - DNA, 25 bp, Homo sapien
aggcatctggtttattcccatcaaa

SEQ ID NO: 3161016 - DNA, 25 bp, Homo sapien
tggtttattcccatcaaatctccaa

SEQ ID NO: 3161017 - DNA, 25 bp, Homo sapien
gggtatccacttgtacagtcgagta

SEQ ID NO: 3161018 - DNA, 25 bp, Homo sapien
tatccacttgtacagtcgagtattg

SEQ ID NO: 3161019 - DNA, 25 bp, Homo sapien
cacttgtacagtcgagtattgagac

SEQ ID NO: 3161020 - DNA, 25 bp, Homo sapien
tctggggtatccacttgtacagtcg

SEQ ID NO: 3161021 - DNA, 25 bp, Homo sapien
atatatccagtattgttcaccagag

SEQ ID NO: 3161022 - DNA, 25 bp, Homo sapien
tatccagtattgttcaccagagtgt

SEQ ID NO: 3161023 - DNA, 25 bp, Homo sapien
tatatccagtattgttcaccagagt

SEQ ID NO: 3161024 - DNA, 25 bp, Homo sapien
taatatatccagtattgttcaccag

SEQ ID NO: 3161025 - DNA, 25 bp, Homo sapien
cagtgcattcagcaggtctgtactc

SEQ ID NO: 3161026 - DNA, 25 bp, Homo sapien
tgtactcgacattgtgttgaagtcc

SEQ ID NO: 3161027 - DNA, 25 bp, Homo sapien
gtgttgaagtccactctaacagctg

SEQ ID NO: 3161028 - DNA, 25 bp, Homo sapien
tcagcaggtctgtactcgacattgt

SEQ ID NO: 3161029 - DNA, 25 bp, Homo sapien
gacatgcctcatagctagtcacttg

SEQ ID NO: 3161030 - DNA, 25 bp, Homo sapien
tgcaactaaagtgagattatggcac

SEQ ID NO: 3161031 - DNA, 25 bp, Homo sapien
ccctgtagccagaatgatgttttgc

SEQ ID NO: 3161032 - DNA, 25 bp, Homo sapien
tggcactcccctgattaagattttt

SEQ ID NO: 3161033 - DNA, 25 bp, Homo sapien
tcttgataatttcataatattctct

SEQ ID NO: 3161034 - DNA, 25 bp, Homo sapien
cttcactggttgatcatgttgaatt

SEQ ID NO: 3161035 - DNA, 25 bp, Homo sapien
ttcttgataatttcataatattctc

SEQ ID NO: 3161036 - DNA, 25 bp, Homo sapien
cactggttgatcatgttgaattctt

SEQ ID NO: 3161037 - DNA, 25 bp, Homo sapien
gcaggaacccaatcacatccaaaga

SEQ ID NO: 3161038 - DNA, 25 bp, Homo sapien
caggaacccaatcacatccaaagag

SEQ ID NO: 3161039 - DNA, 25 bp, Homo sapien
tccttttctagcaaacttccagaaa

SEQ ID NO: 3161040 - DNA, 25 bp, Homo sapien
tgatgataaatagcacggttgccac

SEQ ID NO: 3161041 - DNA, 25 bp, Homo sapien
atgataaatagcacggttgccacac

SEQ ID NO: 3161042 - DNA, 25 bp, Homo sapien
tgtgatgataaatagcacggttgcc

SEQ ID NO: 3161043 - DNA, 25 bp, Homo sapien
ttattgctggaatcaactgaagtat

SEQ ID NO: 3161044 - DNA, 25 bp, Homo sapien
tatttattgctggaatcaactgaag

SEQ ID NO: 3161045 - DNA, 25 bp, Homo sapien
atttattgctggaatcaactgaagt

SEQ ID NO: 3161046 - DNA, 25 bp, Homo sapien
cctcttgagcttagtaagttgaggc

SEQ ID NO: 3161047 - DNA, 25 bp, Homo sapien
caacatttcatataattagggagca

SEQ ID NO: 3161048 - DNA, 25 bp, Homo sapien
tttcagagcattaagtgattcttct

SEQ ID NO: 3161049 - DNA, 25 bp, Homo sapien
tgttagtgactctttcatccctgaa

SEQ ID NO: 3161050 - DNA, 25 bp, Homo sapien
catgcaggttgcaagagttaggaca

SEQ ID NO: 3161051 - DNA, 25 bp, Homo sapien
gaataatccttagtcaggtaaggtg

SEQ ID NO: 3161052 - DNA, 25 bp, Homo sapien
gataatcacattgaatcagggcata

SEQ ID NO: 3161053 - DNA, 25 bp, Homo sapien
catataatgggtagttaagaccaag

SEQ ID NO: 3161054 - DNA, 25 bp, Homo sapien
tattaaatgagctgcacatttctca

SEQ ID NO: 3161055 - DNA, 25 bp, Homo sapien
tattctatgtggcattgcatcttta

SEQ ID NO: 3161056 - DNA, 25 bp, Homo sapien
tctggagtcagttgtgcaaaacctt

SEQ ID NO: 3161057 - DNA, 25 bp, Homo sapien
cctcagaaaatagggatgatataac

SEQ ID NO: 3161058 - DNA, 25 bp, Homo sapien
acgaagccccgggatcaagcggtct

SEQ ID NO: 3161059 - DNA, 25 bp, Homo sapien
gatcaagcggtcttctggattgagt

SEQ ID NO: 3161060 - DNA, 25 bp, Homo sapien
tcaaggattcatcatgatcagccaa

SEQ ID NO: 3161061 - DNA, 25 bp, Homo sapien
tgatcagccaacgaagccccgggat

SEQ ID NO: 3161062 - DNA, 25 bp, Homo sapien
catagaaagttctctaaccagtttc

SEQ ID NO: 3161063 - DNA, 25 bp, Homo sapien
tgggacatagaaagttctctaacca

SEQ ID NO: 3161064 - DNA, 25 bp, Homo sapien
aataattacatcttgggacatagaa

SEQ ID NO: 3161065 - DNA, 25 bp, Homo sapien
taattacatcttgggacatagaaag

SEQ ID NO: 3161066 - DNA, 25 bp, Homo sapien
ttgaatatcagtttttgttagtttc

SEQ ID NO: 3161067 - DNA, 25 bp, Homo sapien
cttgaatatcagtttttgttagttt

SEQ ID NO: 3161068 - DNA, 25 bp, Homo sapien
ctctccagttttgcctcactcagta

SEQ ID NO: 3161069 - DNA, 25 bp, Homo sapien
aacgccacaaacctctccagttttg

SEQ ID NO: 3161070 - DNA, 25 bp, Homo sapien
tttgcctcactcagtataagctggg

SEQ ID NO: 3161071 - DNA, 25 bp, Homo sapien
cagttttgcctcactcagtataagc

SEQ ID NO: 3161072 - DNA, 25 bp, Homo sapien
taatcaagctggtgtctatttgatt

SEQ ID NO: 3161073 - DNA, 25 bp, Homo sapien
atcaagctggtgtctatttgatttt

SEQ ID NO: 3161074 - DNA, 25 bp, Homo sapien
aatcaagctggtgtctatttgattt

SEQ ID NO: 3161075 - DNA, 25 bp, Homo sapien
ttaatcaagctggtgtctatttgat

SEQ ID NO: 3161076 - DNA, 25 bp, Homo sapien
tcatgcgccctctggacaagctcat

SEQ ID NO: 3161077 - DNA, 25 bp, Homo sapien
atgcgccctctggacaagctcatcc

SEQ ID NO: 3161078 - DNA, 25 bp, Homo sapien
gcgccctctggacaagctcatccag

SEQ ID NO: 3161079 - DNA, 25 bp, Homo sapien
gccctctggacaagctcatccagga

SEQ ID NO: 3161080 - DNA, 25 bp, Homo sapien
aacaacaggtatgtaggaaggcaga

SEQ ID NO: 3161081 - DNA, 25 bp, Homo sapien
acaacaggtatgtaggaaggcagaa

SEQ ID NO: 3161082 - DNA, 25 bp, Homo sapien
caacaggtatgtaggaaggcagaaa

SEQ ID NO: 3161083 - DNA, 25 bp, Homo sapien
ttttgaataagccatatgtatgtca

SEQ ID NO: 3161084 - DNA, 25 bp, Homo sapien
tccattgtctcagataaggtagtgg

SEQ ID NO: 3161085 - DNA, 25 bp, Homo sapien
tgaataagccatatgtatgtcagct

SEQ ID NO: 3161086 - DNA, 25 bp, Homo sapien
ggagttttgaataagccatatgtat

SEQ ID NO: 3161087 - DNA, 25 bp, Homo sapien
tgaaaaaagaatttgttccatcaca

SEQ ID NO: 3161088 - DNA, 25 bp, Homo sapien
ccatcacaaaagagtaacagcacag

SEQ ID NO: 3161089 - DNA, 25 bp, Homo sapien
tttgttccatcacaaaagagtaaca

SEQ ID NO: 3161090 - DNA, 25 bp, Homo sapien
aagaatttgttccatcacaaaagag

SEQ ID NO: 3161091 - DNA, 25 bp, Homo sapien
ccagagctctggataaattcttcca

SEQ ID NO: 3161092 - DNA, 25 bp, Homo sapien
ttctccagagctctggataaattct

SEQ ID NO: 3161093 - DNA, 25 bp, Homo sapien
ttttctccagagctctggataaatt

SEQ ID NO: 3161094 - DNA, 25 bp, Homo sapien
ctccagagctctggataaattcttc

SEQ ID NO: 3161095 - DNA, 25 bp, Homo sapien
tcttcagacatgttgctgatcattg

SEQ ID NO: 3161096 - DNA, 25 bp, Homo sapien
cagacatgttgctgatcattgaccc

SEQ ID NO: 3161097 - DNA, 25 bp, Homo sapien
tatccttctgtggatcttggcaagg

SEQ ID NO: 3161098 - DNA, 25 bp, Homo sapien
cgtaaggaactttatctatccttct

SEQ ID NO: 3161099 - DNA, 25 bp, Homo sapien
atgagaaatgcacaacaaaacacgc

SEQ ID NO: 3161100 - DNA, 25 bp, Homo sapien
agaaatgcacaacaaaacacgcaag

SEQ ID NO: 3161101 - DNA, 25 bp, Homo sapien
acaaaacacgcaagtgacagtgttt

SEQ ID NO: 3161102 - DNA, 25 bp, Homo sapien
caaaacacgcaagtgacagtgtttt

SEQ ID NO: 3161103 - DNA, 25 bp, Homo sapien
aatgtgcaccatatggatcccatgg

SEQ ID NO: 3161104 - DNA, 25 bp, Homo sapien
ttgatctgcaagcaatggaatgtgc

SEQ ID NO: 3161105 - DNA, 25 bp, Homo sapien
caatggaatgtgcaccatatggatc

SEQ ID NO: 3161106 - DNA, 25 bp, Homo sapien
actagacattgtgcggaagtccaat

SEQ ID NO: 3161107 - DNA, 25 bp, Homo sapien
agcctgtgaggtcctgggctgcaac

SEQ ID NO: 3161108 - DNA, 25 bp, Homo sapien
gaggtcctgggctgcaacccgaggt

SEQ ID NO: 3161109 - DNA, 25 bp, Homo sapien
ggttgcttggctcctttacagcaca

SEQ ID NO: 3161110 - DNA, 25 bp, Homo sapien
cccgaggttgcttggctcctttaca

SEQ ID NO: 3161111 - DNA, 25 bp, Homo sapien
gggcactccacaaggcaggcttaag

SEQ ID NO: 3161112 - DNA, 25 bp, Homo sapien
ctgcgagggcctgctacctgcttct

SEQ ID NO: 3161113 - DNA, 25 bp, Homo sapien
tagaaagaagggacttattcagctg

SEQ ID NO: 3161114 - DNA, 25 bp, Homo sapien
gttgtagaaagaagggacttattca

SEQ ID NO: 3161115 - DNA, 25 bp, Homo sapien
tctctaaggaatgctgtctcctccc

SEQ ID NO: 3161116 - DNA, 25 bp, Homo sapien
cttattcagcagagtacctagtaaa

SEQ ID NO: 3161117 - DNA, 25 bp, Homo sapien
tttcaggtctctaaggaatgctgtc

SEQ ID NO: 3161118 - DNA, 25 bp, Homo sapien
tgactgattgataacctttcgaaaa

SEQ ID NO: 3161119 - DNA, 25 bp, Homo sapien
ggaagttcagctgaagtccttaatg

SEQ ID NO: 3161120 - DNA, 25 bp, Homo sapien
gggaggcttacagtgagtcataaca

SEQ ID NO: 3161121 - DNA, 25 bp, Homo sapien
gatcagtccttaatcatgggaggct

SEQ ID NO: 3161122 - DNA, 25 bp, Homo sapien
cttacagtgagtcataacacgcatc

SEQ ID NO: 3161123 - DNA, 25 bp, Homo sapien
gccattgatctcctgttacggtttt

SEQ ID NO: 3161124 - DNA, 25 bp, Homo sapien
ggccattgatctcctgttacggttt

SEQ ID NO: 3161125 - DNA, 25 bp, Homo sapien
tgacgattcttcaagcttcggccgt

SEQ ID NO: 3161126 - DNA, 25 bp, Homo sapien
gaggcagtctgaagccagtctattc

SEQ ID NO: 3161127 - DNA, 25 bp, Homo sapien
tctcattgcaggatcattcgggtca

SEQ ID NO: 3161128 - DNA, 25 bp, Homo sapien
cagtgacggcatcctaatacgggtc

SEQ ID NO: 3161129 - DNA, 25 bp, Homo sapien
tggaattcaatagaaggcatcacta

SEQ ID NO: 3161130 - DNA, 25 bp, Homo sapien
tacttgtttagagccatcagtggag

SEQ ID NO: 3161131 - DNA, 25 bp, Homo sapien
ggttctgttaacgatggattctgtg

SEQ ID NO: 3161132 - DNA, 25 bp, Homo sapien
gatgcctcctgtaaatggaattcaa

SEQ ID NO: 3161133 - DNA, 25 bp, Homo sapien
taacttgatgtaggcttacagtggc

SEQ ID NO: 3161134 - DNA, 25 bp, Homo sapien
tcactaggtgcccagacagctgtag

SEQ ID NO: 3161135 - DNA, 25 bp, Homo sapien
caggcgtctcatgaccttcgcagta

SEQ ID NO: 3161136 - DNA, 25 bp, Homo sapien
tgacttaacatccagagattgggcc

SEQ ID NO: 3161137 - DNA, 25 bp, Homo sapien
tctaaatctacatggctaagtgggt

SEQ ID NO: 3161138 - DNA, 25 bp, Homo sapien
cactctaaagccttgacagattctg

SEQ ID NO: 3161139 - DNA, 25 bp, Homo sapien
cagattctgtctaccttaagggcag

SEQ ID NO: 3161140 - DNA, 25 bp, Homo sapien
cagattacatggaaagcctaaactc

SEQ ID NO: 3161141 - DNA, 25 bp, Homo sapien
gtaattgttaggcagacataattct

SEQ ID NO: 3161142 - DNA, 25 bp, Homo sapien
ttaagtaattgttaggcagacataa

SEQ ID NO: 3161143 - DNA, 25 bp, Homo sapien
caatcatgatgtttcatacatagtg

SEQ ID NO: 3161144 - DNA, 25 bp, Homo sapien
tgttaggcagacataattctagtat

SEQ ID NO: 3161145 - DNA, 25 bp, Homo sapien
tgtggatgacctaagaatagatgat

SEQ ID NO: 3161146 - DNA, 25 bp, Homo sapien
tacattccattggatccatcatgag

SEQ ID NO: 3161147 - DNA, 25 bp, Homo sapien
accctagggattccatgatagattc

SEQ ID NO: 3161148 - DNA, 25 bp, Homo sapien
tagattctctcatacattccattgg

SEQ ID NO: 3161149 - DNA, 25 bp, Homo sapien
catgcagtccagcacatccatagag

SEQ ID NO: 3161150 - DNA, 25 bp, Homo sapien
tgagactgttggtaggtggctccat

SEQ ID NO: 3161151 - DNA, 25 bp, Homo sapien
caaagagagtaacaattgccatgca

SEQ ID NO: 3161152 - DNA, 25 bp, Homo sapien
ctttctcgccttaacaacttttgat

SEQ ID NO: 3161153 - DNA, 25 bp, Homo sapien
taaatggcatgattttctgtatcat

SEQ ID NO: 3161154 - DNA, 25 bp, Homo sapien
gatacatagtggtgacattaaatgg

SEQ ID NO: 3161155 - DNA, 25 bp, Homo sapien
cttgatacatagtggtgacattaaa

SEQ ID NO: 3161156 - DNA, 25 bp, Homo sapien
catagtggtgacattaaatggcatg

SEQ ID NO: 3161157 - DNA, 25 bp, Homo sapien
tgtaccttacataatgtttaacaaa

SEQ ID NO: 3161158 - DNA, 25 bp, Homo sapien
ttgtaccttacataatgtttaacaa

SEQ ID NO: 3161159 - DNA, 25 bp, Homo sapien
attgtaccttacataatgtttaaca

SEQ ID NO: 3161160 - DNA, 25 bp, Homo sapien
attaaaattgtaccttacataatgt

SEQ ID NO: 3161161 - DNA, 25 bp, Homo sapien
gaatctttggcaggtatttttataa

SEQ ID NO: 3161162 - DNA, 25 bp, Homo sapien
ctgaatctttggcaggtatttttat

SEQ ID NO: 3161163 - DNA, 25 bp, Homo sapien
tgaatctttggcaggtatttttata

SEQ ID NO: 3161164 - DNA, 25 bp, Homo sapien
catctttgccagagatctggacaaa

SEQ ID NO: 3161165 - DNA, 25 bp, Homo sapien
tctgaagcaatgagatcagccttct

SEQ ID NO: 3161166 - DNA, 25 bp, Homo sapien
gagaaaacaccacagtgccatcttt

SEQ ID NO: 3161167 - DNA, 25 bp, Homo sapien
tgggccaagtctgaagcaatgagat

SEQ ID NO: 3161168 - DNA, 25 bp, Homo sapien
tataaggattggacgttgtactcac

SEQ ID NO: 3161169 - DNA, 25 bp, Homo sapien
gctgcttataaggattggacgttgt

SEQ ID NO: 3161170 - DNA, 25 bp, Homo sapien
tgtaaatggctgcttataaggattg

SEQ ID NO: 3161171 - DNA, 25 bp, Homo sapien
tcactgtgtaaatggctgcttataa

SEQ ID NO: 3161172 - DNA, 25 bp, Homo sapien
gtgcaatgcaatgcttgttttccag

SEQ ID NO: 3161173 - DNA, 25 bp, Homo sapien
aatgcaatgcttgttttccagttgc

SEQ ID NO: 3161174 - DNA, 25 bp, Homo sapien
gcaatgcaatgcttgttttccagtt

SEQ ID NO: 3161175 - DNA, 25 bp, Homo sapien
tggtgcaatgcaatgcttgttttcc

SEQ ID NO: 3161176 - DNA, 25 bp, Homo sapien
caaaagctcagttgtattagcaaaa

SEQ ID NO: 3161177 - DNA, 25 bp, Homo sapien
ctttctagttatgtcaccaaatatt

SEQ ID NO: 3161178 - DNA, 25 bp, Homo sapien
attttaagagcggatgagttgttgg

SEQ ID NO: 3161179 - DNA, 25 bp, Homo sapien
atttcaattttaagagcggatgagt

SEQ ID NO: 3161180 - DNA, 25 bp, Homo sapien
tgttactgattgaaaaaaatactta

SEQ ID NO: 3161181 - DNA, 25 bp, Homo sapien
catgttactgattgaaaaaaatact

SEQ ID NO: 3161182 - DNA, 25 bp, Homo sapien
atgttactgattgaaaaaaatactt

SEQ ID NO: 3161183 - DNA, 25 bp, Homo sapien
tcatgttactgattgaaaaaaatac

SEQ ID NO: 3161184 - DNA, 25 bp, Homo sapien
atttggtaagagtggatatggaaac

SEQ ID NO: 3161185 - DNA, 25 bp, Homo sapien
ttggtaagagtggatatggaaactg

SEQ ID NO: 3161186 - DNA, 25 bp, Homo sapien
tttggtaagagtggatatggaaact

SEQ ID NO: 3161187 - DNA, 25 bp, Homo sapien
gggtttggcaggtttgcagtggagt

SEQ ID NO: 3161188 - DNA, 25 bp, Homo sapien
ggggtttggcaggtttgcagtggag

SEQ ID NO: 3161189 - DNA, 25 bp, Homo sapien
ggtttggcaggtttgcagtggagtc

SEQ ID NO: 3161190 - DNA, 25 bp, Homo sapien
aggggtttggcaggtttgcagtgga

SEQ ID NO: 3161191 - DNA, 25 bp, Homo sapien
tattgcgtgtgattgcagttgcctg

SEQ ID NO: 3161192 - DNA, 25 bp, Homo sapien
tgaaggaatcgagcctctttacaga

SEQ ID NO: 3161193 - DNA, 25 bp, Homo sapien
tcatcactgatatggactggttgtt

SEQ ID NO: 3161194 - DNA, 25 bp, Homo sapien
tctcactagcttgatgcccagagcc

SEQ ID NO: 3161195 - DNA, 25 bp, Homo sapien
gtcatgttactgaccattgacccca

SEQ ID NO: 3161196 - DNA, 25 bp, Homo sapien
tgtcatgttactgaccattgacccc

SEQ ID NO: 3161197 - DNA, 25 bp, Homo sapien
tcatgttactgaccattgaccccag

SEQ ID NO: 3161198 - DNA, 25 bp, Homo sapien
ctaaggtatctggtttattcccatc

SEQ ID NO: 3161199 - DNA, 25 bp, Homo sapien
tggtttattcccatcaaatctccac

SEQ ID NO: 3161200 - DNA, 25 bp, Homo sapien
aaggtatctggtttattcccatcaa

SEQ ID NO: 3161201 - DNA, 25 bp, Homo sapien
ggtatctggtttattcccatcaaat

SEQ ID NO: 3161202 - DNA, 25 bp, Homo sapien
gggtatccacttgtagagccgagta

SEQ ID NO: 3161203 - DNA, 25 bp, Homo sapien
gtatccacttgtagagccgagtatt

SEQ ID NO: 3161204 - DNA, 25 bp, Homo sapien
tccacttgtagagccgagtattgag

SEQ ID NO: 3161205 - DNA, 25 bp, Homo sapien
ttctggggtatccacttgtagagcc

SEQ ID NO: 3161206 - DNA, 25 bp, Homo sapien
cagtatttgttcaccagagtcttac

SEQ ID NO: 3161207 - DNA, 25 bp, Homo sapien
tcagtatttgttcaccagagtctta

SEQ ID NO: 3161208 - DNA, 25 bp, Homo sapien
gatgaattttagcaaaattactcat

SEQ ID NO: 3161209 - DNA, 25 bp, Homo sapien
tggatgaattttagcaaaattactc

SEQ ID NO: 3161210 - DNA, 25 bp, Homo sapien
attggatgaattttagcaaaattac

SEQ ID NO: 3161211 - DNA, 25 bp, Homo sapien
ctaggattggatgaattttagcaaa

SEQ ID NO: 3161212 - DNA, 25 bp, Homo sapien
gtctgtactcgacattgtgttgaag

SEQ ID NO: 3161213 - DNA, 25 bp, Homo sapien
tgtactcgacattgtgttgaagtcc

SEQ ID NO: 3161214 - DNA, 25 bp, Homo sapien
ctgtactcgacattgtgttgaagtc

SEQ ID NO: 3161215 - DNA, 25 bp, Homo sapien
tctgtactcgacattgtgttgaagt

SEQ ID NO: 3161216 - DNA, 25 bp, Homo sapien
cattttacacccactaagaaggctg

SEQ ID NO: 3161217 - DNA, 25 bp, Homo sapien
taatgaaaatgcaatccaagaccag

SEQ ID NO: 3161218 - DNA, 25 bp, Homo sapien
cagtaggcacgtatgaagattctca

SEQ ID NO: 3161219 - DNA, 25 bp, Homo sapien
taaaatttagtgcacccagagtggg

SEQ ID NO: 3161220 - DNA, 25 bp, Homo sapien
tcttgataatttcataacattctct

SEQ ID NO: 3161221 - DNA, 25 bp, Homo sapien
cttcactggttgatcatgttgaatt

SEQ ID NO: 3161222 - DNA, 25 bp, Homo sapien
gataatttcataacattctctttat

SEQ ID NO: 3161223 - DNA, 25 bp, Homo sapien
cactggttgatcatgttgaattctt

SEQ ID NO: 3161224 - DNA, 25 bp, Homo sapien
atccagaagactgctcgatccaggg

SEQ ID NO: 3161225 - DNA, 25 bp, Homo sapien
tcaatccagaagactgctcgatcca

SEQ ID NO: 3161226 - DNA, 25 bp, Homo sapien
aatccagaagactgctcgatccagg

SEQ ID NO: 3161227 - DNA, 25 bp, Homo sapien
caatccagaagactgctcgatccag

SEQ ID NO: 3161228 - DNA, 25 bp, Homo sapien
agacaacattttgtgacgataaata

SEQ ID NO: 3161229 - DNA, 25 bp, Homo sapien
cattttgtgacgataaatatcacag

SEQ ID NO: 3161230 - DNA, 25 bp, Homo sapien
aacattttgtgacgataaatatcac

SEQ ID NO: 3161231 - DNA, 25 bp, Homo sapien
caacattttgtgacgataaatatca

SEQ ID NO: 3161232 - DNA, 25 bp, Homo sapien
taaactgaagtagtctcacctatca

SEQ ID NO: 3161233 - DNA, 25 bp, Homo sapien
gtagtctcacctatcaggttttcca

SEQ ID NO: 3161234 - DNA, 25 bp, Homo sapien
ggaataaactgaagtagtctcacct

SEQ ID NO: 3161235 - DNA, 25 bp, Homo sapien
tgaagtagtctcacctatcaggttt

SEQ ID NO: 3161236 - DNA, 25 bp, Homo sapien
tttcttcattgccacaaaatatttc

SEQ ID NO: 3161237 - DNA, 25 bp, Homo sapien
caaaatatttctaaccatgaactgg

SEQ ID NO: 3161238 - DNA, 25 bp, Homo sapien
ctaaccatgaactgggtggtaaatc

SEQ ID NO: 3161239 - DNA, 25 bp, Homo sapien
attttccgtagtgttttcttcattg

SEQ ID NO: 3161240 - DNA, 25 bp, Homo sapien
taaagctgcatgcattataaaagcc

SEQ ID NO: 3161241 - DNA, 25 bp, Homo sapien
gagagactttctgtacaatttaact

SEQ ID NO: 3161242 - DNA, 25 bp, Homo sapien
tgacttaagctctaaaacagtaaac

SEQ ID NO: 3161243 - DNA, 25 bp, Homo sapien
aaaaatagaattggctcatgaaacc

SEQ ID NO: 3161244 - DNA, 25 bp, Homo sapien
tagagacccggaccgagaatgagca

SEQ ID NO: 3161245 - DNA, 25 bp, Homo sapien
tatgtgcagcgggtagatgttacca

SEQ ID NO: 3161246 - DNA, 25 bp, Homo sapien
gatcgaagtaagtcctcctgcagta

SEQ ID NO: 3161247 - DNA, 25 bp, Homo sapien
tgaccacggcaagtgatagagaccc

SEQ ID NO: 3161248 - DNA, 25 bp, Homo sapien
gttctctgcaatggctacattcaaa

SEQ ID NO: 3161249 - DNA, 25 bp, Homo sapien
ttcaaacatttgttggaggtacacg

SEQ ID NO: 3161250 - DNA, 25 bp, Homo sapien
tggaattacacgtatttttcgagat

SEQ ID NO: 3161251 - DNA, 25 bp, Homo sapien
tgacactagcgaattaataatatga

SEQ ID NO: 3161252 - DNA, 25 bp, Homo sapien
caagagaccatagtttgtcagccct

SEQ ID NO: 3161253 - DNA, 25 bp, Homo sapien
tgtgctaaacgccaatgaataatgc

SEQ ID NO: 3161254 - DNA, 25 bp, Homo sapien
tagaatgatgccaacacataatgcc

SEQ ID NO: 3161255 - DNA, 25 bp, Homo sapien
gctgaccagatttgaccaagagacc

SEQ ID NO: 3161256 - DNA, 25 bp, Homo sapien
cattttcgatcgttgaagatgtcaa

SEQ ID NO: 3161257 - DNA, 25 bp, Homo sapien
tagcataccaactttggaaacagaa

SEQ ID NO: 3161258 - DNA, 25 bp, Homo sapien
tggaaaatatagcaggatgttaacg

SEQ ID NO: 3161259 - DNA, 25 bp, Homo sapien
tgttctcgagaagttgttggctgaa

SEQ ID NO: 3161260 - DNA, 25 bp, Homo sapien
ggacaagggtatcagcaacattttc

SEQ ID NO: 3161261 - DNA, 25 bp, Homo sapien
tgcaacatgaaaatctgcaaggaca

SEQ ID NO: 3161262 - DNA, 25 bp, Homo sapien
cattttctactgagggattactaca

SEQ ID NO: 3161263 - DNA, 25 bp, Homo sapien
aaagcttcctcacacaagaccttca

SEQ ID NO: 3161264 - DNA, 25 bp, Homo sapien
acccaagttgttgaagtacactgca

SEQ ID NO: 3161265 - DNA, 25 bp, Homo sapien
cccaagttgttgaagtacactgcac

SEQ ID NO: 3161266 - DNA, 25 bp, Homo sapien
tgaacaaacttgccgggttgatctg

SEQ ID NO: 3161267 - DNA, 25 bp, Homo sapien
tgtttttgagtctactcttaacagc

SEQ ID NO: 3161268 - DNA, 25 bp, Homo sapien
taaatcctctcataggtgtcattgg

SEQ ID NO: 3161269 - DNA, 25 bp, Homo sapien
aaacttgccgggttgatctgcaaac

SEQ ID NO: 3161270 - DNA, 25 bp, Homo sapien
ggtgaggttgttcgcaggtggcagc

SEQ ID NO: 3161271 - DNA, 25 bp, Homo sapien
tggcagcaagtatttggctcctttg

SEQ ID NO: 3161272 - DNA, 25 bp, Homo sapien
agccaggtgaggttgttcgcaggtg

SEQ ID NO: 3161273 - DNA, 25 bp, Homo sapien
ggtggcagcaagtatttggctcctt

SEQ ID NO: 3161274 - DNA, 25 bp, Homo sapien
tgaaccagggcggaagccataagat

SEQ ID NO: 3161275 - DNA, 25 bp, Homo sapien
aaccagggcggaagccataagatca

SEQ ID NO: 3161276 - DNA, 25 bp, Homo sapien
aatctgaaccagggcggaagccata

SEQ ID NO: 3161277 - DNA, 25 bp, Homo sapien
agggcggaagccataagatcagcct

SEQ ID NO: 3161278 - DNA, 25 bp, Homo sapien
cttataaggattggaggttctactg

SEQ ID NO: 3161279 - DNA, 25 bp, Homo sapien
tgtgtgaatagcttcttataaggat

SEQ ID NO: 3161280 - DNA, 25 bp, Homo sapien
gaatagcttcttataaggattggag

SEQ ID NO: 3161281 - DNA, 25 bp, Homo sapien
gcttcttataaggattggaggttct

SEQ ID NO: 3161282 - DNA, 25 bp, Homo sapien
tcaagttccaggtggaaagccatac

SEQ ID NO: 3161283 - DNA, 25 bp, Homo sapien
gctgagtattgcttcctaatgtagt

SEQ ID NO: 3161284 - DNA, 25 bp, Homo sapien
agtattgcttcctaatgtagttggt

SEQ ID NO: 3161285 - DNA, 25 bp, Homo sapien
tggctttcatatgagaggtcttatc

SEQ ID NO: 3161286 - DNA, 25 bp, Homo sapien
cttatcaggctgatcaccagacatg

SEQ ID NO: 3161287 - DNA, 25 bp, Homo sapien
tatctcatttatatcaccttgagtg

SEQ ID NO: 3161288 - DNA, 25 bp, Homo sapien
catgtatctcatttatatcaccttg

SEQ ID NO: 3161289 - DNA, 25 bp, Homo sapien
aattctgcccgtgtaattgtattca

SEQ ID NO: 3161290 - DNA, 25 bp, Homo sapien
cattagcaactgttctcaaagacct

SEQ ID NO: 3161291 - DNA, 25 bp, Homo sapien
tctcaaagacctaagcaattctgcc

SEQ ID NO: 3161292 - DNA, 25 bp, Homo sapien
aaaggatcattagcaactgttctca

SEQ ID NO: 3161293 - DNA, 25 bp, Homo sapien
tcaatccaggggctttacaggttga

SEQ ID NO: 3161294 - DNA, 25 bp, Homo sapien
ggtgaattcttgataatctcatagc

SEQ ID NO: 3161295 - DNA, 25 bp, Homo sapien
gggctttacaggttgatcatggtga

SEQ ID NO: 3161296 - DNA, 25 bp, Homo sapien
taatctcatagcattctgtttataa

SEQ ID NO: 3161297 - DNA, 25 bp, Homo sapien
ttcacaactagcacagaagagttgc

SEQ ID NO: 3161298 - DNA, 25 bp, Homo sapien
agaattcacaactagcacagaagag

SEQ ID NO: 3161299 - DNA, 25 bp, Homo sapien
acagaattcacaactagcacagaag

SEQ ID NO: 3161300 - DNA, 25 bp, Homo sapien
gaattcacaactagcacagaagagt

SEQ ID NO: 3161301 - DNA, 25 bp, Homo sapien
gaccttgacattaagccaatggctc

SEQ ID NO: 3161302 - DNA, 25 bp, Homo sapien
ccaatggctcatgtcacagggccac

SEQ ID NO: 3161303 - DNA, 25 bp, Homo sapien
tgatctcctctagaatgaccttgac

SEQ ID NO: 3161304 - DNA, 25 bp, Homo sapien
tcatggcccctcactatgatctcct

SEQ ID NO: 3161305 - DNA, 25 bp, Homo sapien
ggcttcctgtagtcaattaacaaag

SEQ ID NO: 3161306 - DNA, 25 bp, Homo sapien
ttaacaaagactttgagtgagtcaa

SEQ ID NO: 3161307 - DNA, 25 bp, Homo sapien
taattttataactgattgccaggtt

SEQ ID NO: 3161308 - DNA, 25 bp, Homo sapien
aattttataactgattgccaggttg

SEQ ID NO: 3161309 - DNA, 25 bp, Homo sapien
ttaattttataactgattgccaggt

SEQ ID NO: 3161310 - DNA, 25 bp, Homo sapien
tgatgccttactctaacactcttcc

SEQ ID NO: 3161311 - DNA, 25 bp, Homo sapien
ctgatgccttactctaacactcttc

SEQ ID NO: 3161312 - DNA, 25 bp, Homo sapien
gatgccttactctaacactcttccc

SEQ ID NO: 3161313 - DNA, 25 bp, Homo sapien
tatgaggggagccattgcagaaaac

SEQ ID NO: 3161314 - DNA, 25 bp, Homo sapien
aggggagccattgcagaaaacaggc

SEQ ID NO: 3161315 - DNA, 25 bp, Homo sapien
tccaacaaatgtatgaggggagcca

SEQ ID NO: 3161316 - DNA, 25 bp, Homo sapien
aatgtatgaggggagccattgcaga

SEQ ID NO: 3161317 - DNA, 25 bp, Homo sapien
aatggctttcagccactgaacacat

SEQ ID NO: 3161318 - DNA, 25 bp, Homo sapien
gctttcagccactgaacacatgtac

SEQ ID NO: 3161319 - DNA, 25 bp, Homo sapien
tggctttcagccactgaacacatgt

SEQ ID NO: 3161320 - DNA, 25 bp, Homo sapien
ttaaatggctttcagccactgaaca

SEQ ID NO: 3161321 - DNA, 25 bp, Homo sapien
ggaaaaagagattagttatgtctga

SEQ ID NO: 3161322 - DNA, 25 bp, Homo sapien
gggaaaaagagattagttatgtctg

SEQ ID NO: 3161323 - DNA, 25 bp, Homo sapien
agaagggaaaaagagattagttatg

SEQ ID NO: 3161324 - DNA, 25 bp, Homo sapien
agggaaaaagagattagttatgtct

SEQ ID NO: 3161325 - DNA, 25 bp, Homo sapien
taccactctttggatgtgattgggt

SEQ ID NO: 3161326 - DNA, 25 bp, Homo sapien
accactctttggatgtgattgggtt

SEQ ID NO: 3161327 - DNA, 25 bp, Homo sapien
cagtaccactctttggatgtgattg

SEQ ID NO: 3161328 - DNA, 25 bp, Homo sapien
gtaccactctttggatgtgattggg

SEQ ID NO: 3161329 - DNA, 25 bp, Homo sapien
aagcccctggatcgagcagtcttct

SEQ ID NO: 3161330 - DNA, 25 bp, Homo sapien
agcccctggatcgagcagtcttctg

SEQ ID NO: 3161331 - DNA, 25 bp, Homo sapien
ctttcttacagcacttaaaatggct

SEQ ID NO: 3161332 - DNA, 25 bp, Homo sapien
tgataattctcacatcgcattttca

SEQ ID NO: 3161333 - DNA, 25 bp, Homo sapien
ttcttacagcacttaaaatggctca

SEQ ID NO: 3161334 - DNA, 25 bp, Homo sapien
tttaggaacttacagatgataattc

SEQ ID NO: 3161335 - DNA, 25 bp, Homo sapien
aagcaaatcagtaaagctttctgga

SEQ ID NO: 3161336 - DNA, 25 bp, Homo sapien
gctttctggatgaacttgtctcaac

SEQ ID NO: 3161337 - DNA, 25 bp, Homo sapien
cagatgatgtctgccttatgacaag

SEQ ID NO: 3161338 - DNA, 25 bp, Homo sapien
tgaacttgtctcaacatcataggtg

SEQ ID NO: 3161339 - DNA, 25 bp, Homo sapien
ggaagacccactaccttatttgaga

SEQ ID NO: 3161340 - DNA, 25 bp, Homo sapien
caatgggaaaagctgacatatggct

SEQ ID NO: 3161341 - DNA, 25 bp, Homo sapien
cattagagatgtcgcttaacctcat

SEQ ID NO: 3161342 - DNA, 25 bp, Homo sapien
gagtatactgacttgacattagaga

SEQ ID NO: 3161343 - DNA, 25 bp, Homo sapien
aacatacggtttgtgtacagtctcc

SEQ ID NO: 3161344 - DNA, 25 bp, Homo sapien
tggtcagacattcgaaaagatagct

SEQ ID NO: 3161345 - DNA, 25 bp, Homo sapien
gctggctgcgctacttaacatacgg

SEQ ID NO: 3161346 - DNA, 25 bp, Homo sapien
tactcctggctacacaattgaaagg

SEQ ID NO: 3161347 - DNA, 25 bp, Homo sapien
gaatgatcgcattgcaccaggatga

SEQ ID NO: 3161348 - DNA, 25 bp, Homo sapien
cttattctgtgtcaagggctctgca

SEQ ID NO: 3161349 - DNA, 25 bp, Homo sapien
cagtatgtaccaagaactctgtgga

SEQ ID NO: 3161350 - DNA, 25 bp, Homo sapien
cataaaacagggtacttgcaaggtc

SEQ ID NO: 3161351 - DNA, 25 bp, Homo sapien
taccaaagctgacttcttgggcctc

SEQ ID NO: 3161352 - DNA, 25 bp, Homo sapien
ccaatggctcatgtcacagggccac

SEQ ID NO: 3161353 - DNA, 25 bp, Homo sapien
tgatctcctctagaatgaccttgac

SEQ ID NO: 3161354 - DNA, 25 bp, Homo sapien
atgaccttgacattaagccaatggc

SEQ ID NO: 3161355 - DNA, 25 bp, Homo sapien
ccttgacattaagccaatggctcat

SEQ ID NO: 3161356 - DNA, 25 bp, Homo sapien
ttaacaaagactttgagtgagtcaa

SEQ ID NO: 3161357 - DNA, 25 bp, Homo sapien
ttgtagataatgctctcacacatca

SEQ ID NO: 3161358 - DNA, 25 bp, Homo sapien
ctgattgtagataatgctctcacac

SEQ ID NO: 3161359 - DNA, 25 bp, Homo sapien
gattgtagataatgctctcacacat

SEQ ID NO: 3161360 - DNA, 25 bp, Homo sapien
tgtagataatgctctcacacatcat

SEQ ID NO: 3161361 - DNA, 25 bp, Homo sapien
ctatgagtgctacatcgtagttggt

SEQ ID NO: 3161362 - DNA, 25 bp, Homo sapien
aatcacagggtctatgagtgctaca

SEQ ID NO: 3161363 - DNA, 25 bp, Homo sapien
ggtctatgagtgctacatcgtagtt

SEQ ID NO: 3161364 - DNA, 25 bp, Homo sapien
cagggtctatgagtgctacatcgta

SEQ ID NO: 3161365 - DNA, 25 bp, Homo sapien
gagaaaacaacccaatatcatcttc

SEQ ID NO: 3161366 - DNA, 25 bp, Homo sapien
tcccctgaactctggacaacatttt

SEQ ID NO: 3161367 - DNA, 25 bp, Homo sapien
gacaacattttccatttccggaaga

SEQ ID NO: 3161368 - DNA, 25 bp, Homo sapien
acatttggaaacagtgaccccagag

SEQ ID NO: 3161369 - DNA, 25 bp, Homo sapien
gcaagggctgaagcaatgatattag

SEQ ID NO: 3161370 - DNA, 25 bp, Homo sapien
gaagcaatgatattagccttttctt

SEQ ID NO: 3161371 - DNA, 25 bp, Homo sapien
gggctgaagcaatgatattagcctt

SEQ ID NO: 3161372 - DNA, 25 bp, Homo sapien
gggcaagggctgaagcaatgatatt

SEQ ID NO: 3161373 - DNA, 25 bp, Homo sapien
gctgcttatcaggaatggaggtttt

SEQ ID NO: 3161374 - DNA, 25 bp, Homo sapien
ctgcttatcaggaatggaggtttta

SEQ ID NO: 3161375 - DNA, 25 bp, Homo sapien
cattctggggtatcccatcatacag

SEQ ID NO: 3161376 - DNA, 25 bp, Homo sapien
tcccatcatacagccgagtattggt

SEQ ID NO: 3161377 - DNA, 25 bp, Homo sapien
gatcattctggggtatcccatcata

SEQ ID NO: 3161378 - DNA, 25 bp, Homo sapien
caagaagatcattctggggtatccc

SEQ ID NO: 3161379 - DNA, 25 bp, Homo sapien
tcatggtaaatagcttcatagatca

SEQ ID NO: 3161380 - DNA, 25 bp, Homo sapien
gggaactcccaccatagggacctca

SEQ ID NO: 3161381 - DNA, 25 bp, Homo sapien
ctgatcaccaaataggggaactccc

SEQ ID NO: 3161382 - DNA, 25 bp, Homo sapien
ccatagggacctcatggtaaatagc

SEQ ID NO: 3161383 - DNA, 25 bp, Homo sapien
tctcaaaaccctgagtaaatctttg

SEQ ID NO: 3161384 - DNA, 25 bp, Homo sapien
aaaaccctgagtaaatctttgcttg

SEQ ID NO: 3161385 - DNA, 25 bp, Homo sapien
gccttcatgtgagctatggcatcaa

SEQ ID NO: 3161386 - DNA, 25 bp, Homo sapien
gaatcgttaatgactgttctcaaaa

SEQ ID NO: 3161387 - DNA, 25 bp, Homo sapien
aactcgatccagaagtctgcctgat

SEQ ID NO: 3161388 - DNA, 25 bp, Homo sapien
catctatagagtagtgctggaacca

SEQ ID NO: 3161389 - DNA, 25 bp, Homo sapien
gcaggaacccaatcacatctataga

SEQ ID NO: 3161390 - DNA, 25 bp, Homo sapien
acccaatcacatctatagagtagtg

SEQ ID NO: 3161391 - DNA, 25 bp, Homo sapien
aatcacatctatagagtagtgctgg

SEQ ID NO: 3161392 - DNA, 25 bp, Homo sapien
aataaacaacatcttgtggccaaga

SEQ ID NO: 3161393 - DNA, 25 bp, Homo sapien
caggaaaataaacaacatcttgtgg

SEQ ID NO: 3161394 - DNA, 25 bp, Homo sapien
acatcttgtggccaagaatatagca

SEQ ID NO: 3161395 - DNA, 25 bp, Homo sapien
gccaagaatatagcagttgacacac

SEQ ID NO: 3161396 - DNA, 25 bp, Homo sapien
agaagaactgaagtccacttcagag

SEQ ID NO: 3161397 - DNA, 25 bp, Homo sapien
taacaaccgagatgtatcagcagaa

SEQ ID NO: 3161398 - DNA, 25 bp, Homo sapien
aaagtaacaaccgagatgtatcagc

SEQ ID NO: 3161399 - DNA, 25 bp, Homo sapien
acaaccgagatgtatcagcagaaga

SEQ ID NO: 3161400 - DNA, 25 bp, Homo sapien
tgtattcaccggtccacaccagcac

SEQ ID NO: 3161401 - DNA, 25 bp, Homo sapien
aatggctgtattcaccggtccacac

SEQ ID NO: 3161402 - DNA, 25 bp, Homo sapien
tggctgtattcaccggtccacacca

SEQ ID NO: 3161403 - DNA, 25 bp, Homo sapien
ccaatggctgtattcaccggtccac

SEQ ID NO: 3161404 - DNA, 25 bp, Homo sapien
tgcaaaaatgatgtcaaatcttgac

SEQ ID NO: 3161405 - DNA, 25 bp, Homo sapien
aaaatgatgtcaaatcttgactctt

SEQ ID NO: 3161406 - DNA, 25 bp, Homo sapien
tatgtcatgaaattcccacaggatt

SEQ ID NO: 3161407 - DNA, 25 bp, Homo sapien
tacagaagtttctaaatatgtcatg

SEQ ID NO: 3161408 - DNA, 25 bp, Homo sapien
caaacggtatgttaagtagcgcagc

SEQ ID NO: 3161409 - DNA, 25 bp, Homo sapien
tgaagcagagactgtacacaaacgg

SEQ ID NO: 3161410 - DNA, 25 bp, Homo sapien
caattgtgtagccaggagtgaagca

SEQ ID NO: 3161411 - DNA, 25 bp, Homo sapien
tccactgtgcctttcaattgtgtag

SEQ ID NO: 3161412 - DNA, 25 bp, Homo sapien
aataaagcacatagatcatgttttt

SEQ ID NO: 3161413 - DNA, 25 bp, Homo sapien
gtcaaaataaagcacatagatcatg

SEQ ID NO: 3161414 - DNA, 25 bp, Homo sapien
aaagcacatagatcatgttttttac

SEQ ID NO: 3161415 - DNA, 25 bp, Homo sapien
caaaataaagcacatagatcatgtt

SEQ ID NO: 3161416 - DNA, 25 bp, Homo sapien
aactgatcccacttcttcatatcac

SEQ ID NO: 3161417 - DNA, 25 bp, Homo sapien
aaacttcactgtaaaactgatccca

SEQ ID NO: 3161418 - DNA, 25 bp, Homo sapien
cactgtaaaactgatcccacttctt

SEQ ID NO: 3161419 - DNA, 25 bp, Homo sapien
cttcttcatatcacacatttggaac

SEQ ID NO: 3161420 - DNA, 25 bp, Homo sapien
taagttagatcttcaagttcccgat

SEQ ID NO: 3161421 - DNA, 25 bp, Homo sapien
caaataagttagatcttcaagttcc

SEQ ID NO: 3161422 - DNA, 25 bp, Homo sapien
gatcttcaagttcccgattaaacaa

SEQ ID NO: 3161423 - DNA, 25 bp, Homo sapien
agttagatcttcaagttcccgatta

SEQ ID NO: 3161424 - DNA, 25 bp, Homo sapien
tgaggaaattgaaaactccaggagt

SEQ ID NO: 3161425 - DNA, 25 bp, Homo sapien
caatgtttggtaagaatggatgagg

SEQ ID NO: 3161426 - DNA, 25 bp, Homo sapien
ccccattgtctcaaataaggtagtg

SEQ ID NO: 3161427 - DNA, 25 bp, Homo sapien
ctccaggagtttcgcataagccata

SEQ ID NO: 3161428 - DNA, 25 bp, Homo sapien
gggtttggcaggtttgcagtggagt

SEQ ID NO: 3161429 - DNA, 25 bp, Homo sapien
gtaggggtttggcaggtttgcagtg

SEQ ID NO: 3161430 - DNA, 25 bp, Homo sapien
ggtttggcaggtttgcagtggagtc

SEQ ID NO: 3161431 - DNA, 25 bp, Homo sapien
aggggtttggcaggtttgcagtgga

SEQ ID NO: 3161432 - DNA, 25 bp, Homo sapien
tctactgaaacttcgaagccaacaa

SEQ ID NO: 3161433 - DNA, 25 bp, Homo sapien
ctgaaacttcgaagccaacaaaata

SEQ ID NO: 3161434 - DNA, 25 bp, Homo sapien
actgaaacttcgaagccaacaaaat

SEQ ID NO: 3161435 - DNA, 25 bp, Homo sapien
ttctactgaaacttcgaagccaaca

SEQ ID NO: 3161436 - DNA, 25 bp, Homo sapien
atgttacttatcactgaccccagag

SEQ ID NO: 3161437 - DNA, 25 bp, Homo sapien
cctttctgctgtcatgttacttatc

SEQ ID NO: 3161438 - DNA, 25 bp, Homo sapien
gttgcaattacgttggccctttctg

SEQ ID NO: 3161439 - DNA, 25 bp, Homo sapien
attttcaccagagctctgtacaaat

SEQ ID NO: 3161440 - DNA, 25 bp, Homo sapien
cttgtgggaccatattttatactgt

SEQ ID NO: 3161441 - DNA, 25 bp, Homo sapien
tttgactccttcctatatttcctac

SEQ ID NO: 3161442 - DNA, 25 bp, Homo sapien
tatgttctatggaggggacatctaa

SEQ ID NO: 3161443 - DNA, 25 bp, Homo sapien
gggacatctaaacctgttcccctgc

SEQ ID NO: 3161444 - DNA, 25 bp, Homo sapien
ctatggaggggacatctaaacctgt

SEQ ID NO: 3161445 - DNA, 25 bp, Homo sapien
ggcatctggtttattcccatcaaat

SEQ ID NO: 3161446 - DNA, 25 bp, Homo sapien
ctaaggcatctggtttattcccatc

SEQ ID NO: 3161447 - DNA, 25 bp, Homo sapien
tggtttattcccatcaaatctccac

SEQ ID NO: 3161448 - DNA, 25 bp, Homo sapien
aaggcatctggtttattcccatcaa

SEQ ID NO: 3161449 - DNA, 25 bp, Homo sapien
gggtatccacttatacagccgagta

SEQ ID NO: 3161450 - DNA, 25 bp, Homo sapien
aaggtcattctggggtatccactta

SEQ ID NO: 3161451 - DNA, 25 bp, Homo sapien
ggtcattctggggtatccacttata

SEQ ID NO: 3161452 - DNA, 25 bp, Homo sapien
cacttatacagccgagtattgagac

SEQ ID NO: 3161453 - DNA, 25 bp, Homo sapien
ctaatatatccagtatttgttcacc

SEQ ID NO: 3161454 - DNA, 25 bp, Homo sapien
tatatccagtatttgttcaccagag

SEQ ID NO: 3161455 - DNA, 25 bp, Homo sapien
tatccagtatttgttcaccagagtg

SEQ ID NO: 3161456 - DNA, 25 bp, Homo sapien
aatatatccagtatttgttcaccag

SEQ ID NO: 3161457 - DNA, 25 bp, Homo sapien
ctaggattggatgaattttagcaaa

SEQ ID NO: 3161458 - DNA, 25 bp, Homo sapien
gatgaattttagcaaaattattcat

SEQ ID NO: 3161459 - DNA, 25 bp, Homo sapien
attggatgaattttagcaaaattat

SEQ ID NO: 3161460 - DNA, 25 bp, Homo sapien
tggatgaattttagcaaaattattc

SEQ ID NO: 3161461 - DNA, 25 bp, Homo sapien
cagtgcattcagcaggtctgtactc

SEQ ID NO: 3161462 - DNA, 25 bp, Homo sapien
agcaggtctgtactcgacattgtgt

SEQ ID NO: 3161463 - DNA, 25 bp, Homo sapien
gcattcagcaggtctgtactcgaca

SEQ ID NO: 3161464 - DNA, 25 bp, Homo sapien
ttcagcaggtctgtactcgacattg

SEQ ID NO: 3161465 - DNA, 25 bp, Homo sapien
ctggttgatcatgttgaattattga

SEQ ID NO: 3161466 - DNA, 25 bp, Homo sapien
ttactggttgatcatgttgaattat

SEQ ID NO: 3161467 - DNA, 25 bp, Homo sapien
ctttactggttgatcatgttgaatt

SEQ ID NO: 3161468 - DNA, 25 bp, Homo sapien
actggttgatcatgttgaattattg

SEQ ID NO: 3161469 - DNA, 25 bp, Homo sapien
cacgggctgcaactcgaaggtgttt

SEQ ID NO: 3161470 - DNA, 25 bp, Homo sapien
ttcaatccagaagactgctcgatgc

SEQ ID NO: 3161471 - DNA, 25 bp, Homo sapien
ggcacatcacaaattcaatccagaa

SEQ ID NO: 3161472 - DNA, 25 bp, Homo sapien
cagaaacccaatcacatccaaagag

SEQ ID NO: 3161473 - DNA, 25 bp, Homo sapien
caaaactttgtgacgacaaatatca

SEQ ID NO: 3161474 - DNA, 25 bp, Homo sapien
gacaaaactttgtgacgacaaatat

SEQ ID NO: 3161475 - DNA, 25 bp, Homo sapien
cagacaaaactttgtgacgacaaat

SEQ ID NO: 3161476 - DNA, 25 bp, Homo sapien
aactttgtgacgacaaatatcacag

SEQ ID NO: 3161477 - DNA, 25 bp, Homo sapien
gctggaataaactgatgtcaaccca

SEQ ID NO: 3161478 - DNA, 25 bp, Homo sapien
ggaataaactgatgtcaacccatct

SEQ ID NO: 3161479 - DNA, 25 bp, Homo sapien
gatgtcaacccatctatctggtttt

SEQ ID NO: 3161480 - DNA, 25 bp, Homo sapien
aactgatgtcaacccatctatctgg

SEQ ID NO: 3161481 - DNA, 25 bp, Homo sapien
actaaatccaaggtgccagatggtt

SEQ ID NO: 3161482 - DNA, 25 bp, Homo sapien
aatccaaggtgccagatggtttaga

SEQ ID NO: 3161483 - DNA, 25 bp, Homo sapien
gatctcctctagaatgaccttgaca

SEQ ID NO: 3161484 - DNA, 25 bp, Homo sapien
ctcatggcccctcactatgatctcc

SEQ ID NO: 3161485 - DNA, 25 bp, Homo sapien
ggcccctcactatgatctcctctag

SEQ ID NO: 3161486 - DNA, 25 bp, Homo sapien
ccaatggctcatgtcacagggccac

SEQ ID NO: 3161487 - DNA, 25 bp, Homo sapien
ggcttcctgtagtcaattaacaaag

SEQ ID NO: 3161488 - DNA, 25 bp, Homo sapien
gattgtagataatgctctcaaacat

SEQ ID NO: 3161489 - DNA, 25 bp, Homo sapien
ctgattgtagataatgctctcaaac

SEQ ID NO: 3161490 - DNA, 25 bp, Homo sapien
tgattgtagataatgctctcaaaca

SEQ ID NO: 3161491 - DNA, 25 bp, Homo sapien
ttacatcgtagttggtttcctgtag

SEQ ID NO: 3161492 - DNA, 25 bp, Homo sapien
agtgtgagcacaaaagggactggaa

SEQ ID NO: 3161493 - DNA, 25 bp, Homo sapien
gagaagttctaagtgtgagcacaaa

SEQ ID NO: 3161494 - DNA, 25 bp, Homo sapien
actccatattgcctcttagagaagt

SEQ ID NO: 3161495 - DNA, 25 bp, Homo sapien
cttagagaagttctaagtgtgagca

SEQ ID NO: 3161496 - DNA, 25 bp, Homo sapien
tctggaagataaaaatttctctgca

SEQ ID NO: 3161497 - DNA, 25 bp, Homo sapien
ttctggaagataaaaatttctctgc

SEQ ID NO: 3161498 - DNA, 25 bp, Homo sapien
ctggaagataaaaatttctctgcat

SEQ ID NO: 3161499 - DNA, 25 bp, Homo sapien
gagaaaagaacccaatatcctcttc

SEQ ID NO: 3161500 - DNA, 25 bp, Homo sapien
gttttgaaacagtgacctcagagaa

SEQ ID NO: 3161501 - DNA, 25 bp, Homo sapien
tcccctgaactctggacaacatttt

SEQ ID NO: 3161502 - DNA, 25 bp, Homo sapien
taacgttttgaaacagtgacctcag

SEQ ID NO: 3161503 - DNA, 25 bp, Homo sapien
tgggcaagggctgaagcaatattag

SEQ ID NO: 3161504 - DNA, 25 bp, Homo sapien
gggctgaagcaatattagccttttc

SEQ ID NO: 3161505 - DNA, 25 bp, Homo sapien
aagggctgaagcaatattagccttt

SEQ ID NO: 3161506 - DNA, 25 bp, Homo sapien
gctgaagcaatattagccttttctt

SEQ ID NO: 3161507 - DNA, 25 bp, Homo sapien
gctgcttatcaggaatggaggtttt

SEQ ID NO: 3161508 - DNA, 25 bp, Homo sapien
ctgcttatcaggaatggaggtttta

SEQ ID NO: 3161509 - DNA, 25 bp, Homo sapien
gtggatagttttttcccattgtatc

SEQ ID NO: 3161510 - DNA, 25 bp, Homo sapien
atgtggatagttttttcccattgta

SEQ ID NO: 3161511 - DNA, 25 bp, Homo sapien
tggatagttttttcccattgtatct

SEQ ID NO: 3161512 - DNA, 25 bp, Homo sapien
ctaatgtggatagttttttcccatt

SEQ ID NO: 3161513 - DNA, 25 bp, Homo sapien
tatcccatcagacagtcgagtattg

SEQ ID NO: 3161514 - DNA, 25 bp, Homo sapien
cattctggggtatcccatcagacag

SEQ ID NO: 3161515 - DNA, 25 bp, Homo sapien
ccatcagacagtcgagtattggttc

SEQ ID NO: 3161516 - DNA, 25 bp, Homo sapien
tggggtatcccatcagacagtcgag

SEQ ID NO: 3161517 - DNA, 25 bp, Homo sapien
ggcatcattgtgatcaccaaatagg

SEQ ID NO: 3161518 - DNA, 25 bp, Homo sapien
tgatcatggtgaatccctgataaac

SEQ ID NO: 3161519 - DNA, 25 bp, Homo sapien
gatccagaagtttgctcgatcaggg

SEQ ID NO: 3161520 - DNA, 25 bp, Homo sapien
aataggaagggaacatgttttcact

SEQ ID NO: 3161521 - DNA, 25 bp, Homo sapien
cccatcaggtcttccctaaatttgg

SEQ ID NO: 3161522 - DNA, 25 bp, Homo sapien
tatgctcaacctaaagtgaacatgg

SEQ ID NO: 3161523 - DNA, 25 bp, Homo sapien
cccttgttggatacttagaatctgc

SEQ ID NO: 3161524 - DNA, 25 bp, Homo sapien
ggtgtcccaggtacaatgagtgtgc

SEQ ID NO: 3161525 - DNA, 25 bp, Homo sapien
gagtgtgcaacctaaaaagccccag

SEQ ID NO: 3161526 - DNA, 25 bp, Homo sapien
aatttaagagtggatgcatcattgg

SEQ ID NO: 3161527 - DNA, 25 bp, Homo sapien
ttcaaatttaagagtggatgcatca

SEQ ID NO: 3161528 - DNA, 25 bp, Homo sapien
atttaagagtggatgcatcattggg

SEQ ID NO: 3161529 - DNA, 25 bp, Homo sapien
cttcaaatttaagagtggatgcatc

SEQ ID NO: 3161530 - DNA, 25 bp, Homo sapien
ctgttgcatgacgatattctcaaat

SEQ ID NO: 3161531 - DNA, 25 bp, Homo sapien
gcatgacgatattctcaaattcagt

SEQ ID NO: 3161532 - DNA, 25 bp, Homo sapien
gttgcatgacgatattctcaaattc

SEQ ID NO: 3161533 - DNA, 25 bp, Homo sapien
gacgatattctcaaattcagtttta

SEQ ID NO: 3161534 - DNA, 25 bp, Homo sapien
aaagctatcttttcgaatgtctgac

SEQ ID NO: 3161535 - DNA, 25 bp, Homo sapien
cagaagtttctaaatatgtcatata

SEQ ID NO: 3161536 - DNA, 25 bp, Homo sapien
tgtcatataattcccacaggatttc

SEQ ID NO: 3161537 - DNA, 25 bp, Homo sapien
tataaccaaaagctatcttttcgaa

SEQ ID NO: 3161538 - DNA, 25 bp, Homo sapien
gggtatgttaaatagctcagccagc

SEQ ID NO: 3161539 - DNA, 25 bp, Homo sapien
tacacaaagggtatgttaaatagct

SEQ ID NO: 3161540 - DNA, 25 bp, Homo sapien
caaagggtatgttaaatagctcagc

SEQ ID NO: 3161541 - DNA, 25 bp, Homo sapien
cagcagctcaccacaaggaaaagaa

SEQ ID NO: 3161542 - DNA, 25 bp, Homo sapien
gagggaaaatcagtcctccactgtg

SEQ ID NO: 3161543 - DNA, 25 bp, Homo sapien
actgtgtagccaggagtaaagcgga

SEQ ID NO: 3161544 - DNA, 25 bp, Homo sapien
tgcctttcaactgtgtagccaggag

SEQ ID NO: 3161545 - DNA, 25 bp, Homo sapien
taacaataggtatgtaggaaggagg

SEQ ID NO: 3161546 - DNA, 25 bp, Homo sapien
aaacttcactgtaaaactgatccca

SEQ ID NO: 3161547 - DNA, 25 bp, Homo sapien
ttcatatcacacatttggaaccaaa

SEQ ID NO: 3161548 - DNA, 25 bp, Homo sapien
aactgatcccacttcttcatatcac

SEQ ID NO: 3161549 - DNA, 25 bp, Homo sapien
aaatcacatagatcatattttttac

SEQ ID NO: 3161550 - DNA, 25 bp, Homo sapien
tctactgaaacttcgaagccaacaa

SEQ ID NO: 3161551 - DNA, 25 bp, Homo sapien
ctgaaacttcgaagccaacaaaata

SEQ ID NO: 3161552 - DNA, 25 bp, Homo sapien
actatagactcatttctactgaaac

SEQ ID NO: 3161553 - DNA, 25 bp, Homo sapien
ttctactgaaacttcgaagccaaca

SEQ ID NO: 3161554 - DNA, 25 bp, Homo sapien
gtttcatcacaaaagagtatcacca

SEQ ID NO: 3161555 - DNA, 25 bp, Homo sapien
aaaaaattgtttcatcacaaaagag

SEQ ID NO: 3161556 - DNA, 25 bp, Homo sapien
acaaaagagtatcaccacagcaggc

SEQ ID NO: 3161557 - DNA, 25 bp, Homo sapien
caccacagcaggcactactaaagaa

SEQ ID NO: 3161558 - DNA, 25 bp, Homo sapien
cctttctgctgtcatgttacttatg

SEQ ID NO: 3161559 - DNA, 25 bp, Homo sapien
ggccagggctgttgcaattacattg

SEQ ID NO: 3161560 - DNA, 25 bp, Homo sapien
tcatgttacttatgattgaccccag

SEQ ID NO: 3161561 - DNA, 25 bp, Homo sapien
cagggctgttgcaattacattggcc

SEQ ID NO: 3161562 - DNA, 25 bp, Homo sapien
cacattttatactggacaggatcca

SEQ ID NO: 3161563 - DNA, 25 bp, Homo sapien
acattttatactggacaggatccac

SEQ ID NO: 3161564 - DNA, 25 bp, Homo sapien
ccacattttatactggacaggatcc

SEQ ID NO: 3161565 - DNA, 25 bp, Homo sapien
atgttctatggaggggacatctgaa

SEQ ID NO: 3161566 - DNA, 25 bp, Homo sapien
tgttctatggaggggacatctgaac

SEQ ID NO: 3161567 - DNA, 25 bp, Homo sapien
tatgttctatggaggggacatctga

SEQ ID NO: 3161568 - DNA, 25 bp, Homo sapien
tgggatatccactcgtacagccaag

SEQ ID NO: 3161569 - DNA, 25 bp, Homo sapien
gggatatccactcgtacagccaagt

SEQ ID NO: 3161570 - DNA, 25 bp, Homo sapien
atatccactcgtacagccaagtatt

SEQ ID NO: 3161571 - DNA, 25 bp, Homo sapien
ggatatccactcgtacagccaagta

SEQ ID NO: 3161572 - DNA, 25 bp, Homo sapien
tatatccagtatttgttcaccaaag

SEQ ID NO: 3161573 - DNA, 25 bp, Homo sapien
aatatatccagtatttgttcaccaa

SEQ ID NO: 3161574 - DNA, 25 bp, Homo sapien
tatccagtatttgttcaccaaagtg

SEQ ID NO: 3161575 - DNA, 25 bp, Homo sapien
ccagtatttgttcaccaaagtgtta

SEQ ID NO: 3161576 - DNA, 25 bp, Homo sapien
tctagataacacattgaactaattt

SEQ ID NO: 3161577 - DNA, 25 bp, Homo sapien
tttctagataacacattgaactaat

SEQ ID NO: 3161578 - DNA, 25 bp, Homo sapien
ttctagataacacattgaactaatt

SEQ ID NO: 3161579 - DNA, 25 bp, Homo sapien
tagattgcctcatagatgccattgg

SEQ ID NO: 3161580 - DNA, 25 bp, Homo sapien
atagggatcccatggtagattgcct

SEQ ID NO: 3161581 - DNA, 25 bp, Homo sapien
ccatggtagattgcctcatagatgc

SEQ ID NO: 3161582 - DNA, 25 bp, Homo sapien
gatcccatggtagattgcctcatag

SEQ ID NO: 3161583 - DNA, 25 bp, Homo sapien
tgataatttcataacactctcttta

SEQ ID NO: 3161584 - DNA, 25 bp, Homo sapien
taatttcataacactctctttatat

SEQ ID NO: 3161585 - DNA, 25 bp, Homo sapien
cttgataatttcataacactctctt

SEQ ID NO: 3161586 - DNA, 25 bp, Homo sapien
gataatttcataacactctctttat

SEQ ID NO: 3161587 - DNA, 25 bp, Homo sapien
tggctcctttgtggcgcatgacaaa

SEQ ID NO: 3161588 - DNA, 25 bp, Homo sapien
tcaatccagaagactgctcgatcca

SEQ ID NO: 3161589 - DNA, 25 bp, Homo sapien
atccagaagactgctcgatccaggg

SEQ ID NO: 3161590 - DNA, 25 bp, Homo sapien
ttggctcctttgtggcgcatgacaa

SEQ ID NO: 3161591 - DNA, 25 bp, Homo sapien
atgataaatgtcacagttgccacac

SEQ ID NO: 3161592 - DNA, 25 bp, Homo sapien
ttgtgatgataaatgtcacagttgc

SEQ ID NO: 3161593 - DNA, 25 bp, Homo sapien
gtgatgataaatgtcacagttgcca

SEQ ID NO: 3161594 - DNA, 25 bp, Homo sapien
gatgataaatgtcacagttgccaca

SEQ ID NO: 3161595 - DNA, 25 bp, Homo sapien
taaacttccagaaacaaaacagaca

SEQ ID NO: 3161596 - DNA, 25 bp, Homo sapien
cttccagaaacaaaacagacaacac

SEQ ID NO: 3161597 - DNA, 25 bp, Homo sapien
acttccagaaacaaaacagacaaca

SEQ ID NO: 3161598 - DNA, 25 bp, Homo sapien
gaaaatgcaacagacttttcacctt

SEQ ID NO: 3161599 - DNA, 25 bp, Homo sapien
aatgcaacagacttttcacctttct

SEQ ID NO: 3161600 - DNA, 25 bp, Homo sapien
caacagacttttcacctttctacaa

SEQ ID NO: 3161601 - DNA, 25 bp, Homo sapien
agaaaatgcaacagacttttcacct

SEQ ID NO: 3161602 - DNA, 25 bp, Homo sapien
cagaagaactgaagcccatttcaga

SEQ ID NO: 3161603 - DNA, 25 bp, Homo sapien
gaactgaagcccatttcagaaccat

SEQ ID NO: 3161604 - DNA, 25 bp, Homo sapien
gtatcagcagaagaactgaagccca

SEQ ID NO: 3161605 - DNA, 25 bp, Homo sapien
tcagcagaagaactgaagcccattt

SEQ ID NO: 3161606 - DNA, 25 bp, Homo sapien
caaaccagcacctttccacaactcc

SEQ ID NO: 3161607 - DNA, 25 bp, Homo sapien
ccaaaccagcacctttccacaactc

SEQ ID NO: 3161608 - DNA, 25 bp, Homo sapien
ctgtggcccaaaccagcacctttcc

SEQ ID NO: 3161609 - DNA, 25 bp, Homo sapien
tggcccaaaccagcacctttccaca

SEQ ID NO: 3161610 - DNA, 25 bp, Homo sapien
agatgccagtacagtcacctcatga

SEQ ID NO: 3161611 - DNA, 25 bp, Homo sapien
aagatgccagtacagtcacctcatg

SEQ ID NO: 3161612 - DNA, 25 bp, Homo sapien
agcatttcttgttcttgtgaaaaat

SEQ ID NO: 3161613 - DNA, 25 bp, Homo sapien
ccaaaatgtatcttttggaatgtct

SEQ ID NO: 3161614 - DNA, 25 bp, Homo sapien
tcttgttcttgtgaaaaatataacc

SEQ ID NO: 3161615 - DNA, 25 bp, Homo sapien
ataaccaaaatgtatcttttggaat

SEQ ID NO: 3161616 - DNA, 25 bp, Homo sapien
aaacgatgtcaaatcttgactctaa

SEQ ID NO: 3161617 - DNA, 25 bp, Homo sapien
ttgaaatgagatctttacagaattt

SEQ ID NO: 3161618 - DNA, 25 bp, Homo sapien
cttatttgaaatgagatctttacag

SEQ ID NO: 3161619 - DNA, 25 bp, Homo sapien
tgcaaaaacgatgtcaaatcttgac

SEQ ID NO: 3161620 - DNA, 25 bp, Homo sapien
gtacacaaagggtatgttaagtagc

SEQ ID NO: 3161621 - DNA, 25 bp, Homo sapien
gggtatgttaagtagcgcagccagc

SEQ ID NO: 3161622 - DNA, 25 bp, Homo sapien
cacaaagggtatgttaagtagcgca

SEQ ID NO: 3161623 - DNA, 25 bp, Homo sapien
caaagggtatgttaagtagcgcagc

SEQ ID NO: 3161624 - DNA, 25 bp, Homo sapien
gagggaaaatcagtcctccactgtg

SEQ ID NO: 3161625 - DNA, 25 bp, Homo sapien
taacaataggtatgtaggaaggagg

SEQ ID NO: 3161626 - DNA, 25 bp, Homo sapien
tgcctttcaactgtgtagccaggag

SEQ ID NO: 3161627 - DNA, 25 bp, Homo sapien
actgtgtagccaggagtaaagcgga

SEQ ID NO: 3161628 - DNA, 25 bp, Homo sapien
catatcacatatttggaaccaaaag

SEQ ID NO: 3161629 - DNA, 25 bp, Homo sapien
aaatcacatagatcatattttttac

SEQ ID NO: 3161630 - DNA, 25 bp, Homo sapien
aaacttcactgtaaaactgatccca

SEQ ID NO: 3161631 - DNA, 25 bp, Homo sapien
aactgatcccacttcttcatatcac

SEQ ID NO: 3161632 - DNA, 25 bp, Homo sapien
gtctcaaataaggtagtgggtcttc

SEQ ID NO: 3161633 - DNA, 25 bp, Homo sapien
tgtctcaaataaggtagtgggtctt

SEQ ID NO: 3161634 - DNA, 25 bp, Homo sapien
tttggtaagaatggatgaggaaact

SEQ ID NO: 3161635 - DNA, 25 bp, Homo sapien
tgaggaaactgaaaattccaggagt

SEQ ID NO: 3161636 - DNA, 25 bp, Homo sapien
aggtttgcagtgaaatcctccaaca

SEQ ID NO: 3161637 - DNA, 25 bp, Homo sapien
gaaaattccaggagtttcgcataag

SEQ ID NO: 3161638 - DNA, 25 bp, Homo sapien
tctactgaaacttcgaagccaacaa

SEQ ID NO: 3161639 - DNA, 25 bp, Homo sapien
ctgaaacttcgaagccaacaaaata

SEQ ID NO: 3161640 - DNA, 25 bp, Homo sapien
actatagactcatttctactgaaac

SEQ ID NO: 3161641 - DNA, 25 bp, Homo sapien
ttctactgaaacttcgaagccaaca

SEQ ID NO: 3161642 - DNA, 25 bp, Homo sapien
gtcatgttactgaccattgacccca

SEQ ID NO: 3161643 - DNA, 25 bp, Homo sapien
tgtcatgttactgaccattgacccc

SEQ ID NO: 3161644 - DNA, 25 bp, Homo sapien
tcatgttactgaccattgaccccag

SEQ ID NO: 3161645 - DNA, 25 bp, Homo sapien
ccacattttatactggacaggatcc

SEQ ID NO: 3161646 - DNA, 25 bp, Homo sapien
acattttatactggacaggatccac

SEQ ID NO: 3161647 - DNA, 25 bp, Homo sapien
cacattttatactggacaggatcca

SEQ ID NO: 3161648 - DNA, 25 bp, Homo sapien
acagccgagtattgagacctaaagc

SEQ ID NO: 3161649 - DNA, 25 bp, Homo sapien
gagacctaaagcatctggtttattc

SEQ ID NO: 3161650 - DNA, 25 bp, Homo sapien
tgtacagccgagtattgagacctaa

SEQ ID NO: 3161651 - DNA, 25 bp, Homo sapien
cttgtacagccgagtattgagacct

SEQ ID NO: 3161652 - DNA, 25 bp, Homo sapien
aatatatccagtatttgttcaccag

SEQ ID NO: 3161653 - DNA, 25 bp, Homo sapien
ctaatatatccagtatttgttcacc

SEQ ID NO: 3161654 - DNA, 25 bp, Homo sapien
tatatccagtatttgttcaccagag

SEQ ID NO: 3161655 - DNA, 25 bp, Homo sapien
tatccagtatttgttcaccagagtg

SEQ ID NO: 3161656 - DNA, 25 bp, Homo sapien
tctagataacacattgaactaattt

SEQ ID NO: 3161657 - DNA, 25 bp, Homo sapien
ttctagataacacattgaactaatt

SEQ ID NO: 3161658 - DNA, 25 bp, Homo sapien
tttctagataacacattgaactaat

SEQ ID NO: 3161659 - DNA, 25 bp, Homo sapien
atagattgcctcatagatgccactt

SEQ ID NO: 3161660 - DNA, 25 bp, Homo sapien
gatgccacttgctccaccatgagtt

SEQ ID NO: 3161661 - DNA, 25 bp, Homo sapien
agggatcccatgatagattgcctca

SEQ ID NO: 3161662 - DNA, 25 bp, Homo sapien
catgagttataaaagctctggtttt

SEQ ID NO: 3161663 - DNA, 25 bp, Homo sapien
aatgttatcaggttgatcccaaaac

SEQ ID NO: 3161664 - DNA, 25 bp, Homo sapien
gtgagcaatgttatcaggttgatcc

SEQ ID NO: 3161665 - DNA, 25 bp, Homo sapien
agcaatgttatcaggttgatcccaa

SEQ ID NO: 3161666 - DNA, 25 bp, Homo sapien
gagcaatgttatcaggttgatccca

SEQ ID NO: 3161667 - DNA, 25 bp, Homo sapien
ttcagcaggtctgtactcgacattg

SEQ ID NO: 3161668 - DNA, 25 bp, Homo sapien
agcaggtctgtactcgacattgtgt

SEQ ID NO: 3161669 - DNA, 25 bp, Homo sapien
gcattcagcaggtctgtactcgaca

SEQ ID NO: 3161670 - DNA, 25 bp, Homo sapien
cagtgcattcagcaggtctgtactc

SEQ ID NO: 3161671 - DNA, 25 bp, Homo sapien
tggctcctttgtggcgcatgacaaa

SEQ ID NO: 3161672 - DNA, 25 bp, Homo sapien
tcaatccagaagactgctcgatcca

SEQ ID NO: 3161673 - DNA, 25 bp, Homo sapien
atccagaagactgctcgatccaggg

SEQ ID NO: 3161674 - DNA, 25 bp, Homo sapien
ttggctcctttgtggcgcatgacaa

SEQ ID NO: 3161675 - DNA, 25 bp, Homo sapien
atgataaatgtcacagttgccacac

SEQ ID NO: 3161676 - DNA, 25 bp, Homo sapien
gatgataaatgtcacagttgccaca

SEQ ID NO: 3161677 - DNA, 25 bp, Homo sapien
gtgatgataaatgtcacagttgcca

SEQ ID NO: 3161678 - DNA, 25 bp, Homo sapien
ttgtgatgataaatgtcacagttgc

SEQ ID NO: 3161679 - DNA, 25 bp, Homo sapien
cttccagaaacaaaacagacaacac

SEQ ID NO: 3161680 - DNA, 25 bp, Homo sapien
tcttcacttttctagtaaacttcca

SEQ ID NO: 3161681 - DNA, 25 bp, Homo sapien
cttcacttttctagtaaacttccag

SEQ ID NO: 3161682 - DNA, 25 bp, Homo sapien
acttccagaaacaaaacagacaaca

SEQ ID NO: 3161683 - DNA, 25 bp, Homo sapien
ggcgtgcgagtgcagtggggggtcc

SEQ ID NO: 3161684 - DNA, 25 bp, Homo sapien
cgtgcgagtgcagtggggggtcctc

SEQ ID NO: 3161685 - DNA, 25 bp, Homo sapien
gcgtgcgagtgcagtggggggtcct

SEQ ID NO: 3161686 - DNA, 25 bp, Homo sapien
gtgcgagtgcagtggggggtcctcc

SEQ ID NO: 3161687 - DNA, 25 bp, Homo sapien
ttgccggcagtcgagagtggacggc

SEQ ID NO: 3161688 - DNA, 25 bp, Homo sapien
caggctgttgccggcagtcgagagt

SEQ ID NO: 3161689 - DNA, 25 bp, Homo sapien
gctgttgccggcagtcgagagtgga

SEQ ID NO: 3161690 - DNA, 25 bp, Homo sapien
ccggcagtcgagagtggacggcagc

SEQ ID NO: 3161691 - DNA, 25 bp, Homo sapien
gatggcgctggagcgttgggaggct

SEQ ID NO: 3161692 - DNA, 25 bp, Homo sapien
ggatggcgctggagcgttgggaggc

SEQ ID NO: 3161693 - DNA, 25 bp, Homo sapien
ccgaatcaactagccctgaaaatgg

SEQ ID NO: 3161694 - DNA, 25 bp, Homo sapien
tggcgctggagcgttgggaggctac

SEQ ID NO: 3161695 - DNA, 25 bp, Homo sapien
tggtggtgatgctccagtagtagaa

SEQ ID NO: 3161696 - DNA, 25 bp, Homo sapien
gacaggccacactccatgacaaaat

SEQ ID NO: 3161697 - DNA, 25 bp, Homo sapien
atagggcatggtgtccacggcagca

SEQ ID NO: 3161698 - DNA, 25 bp, Homo sapien
gtagtagaaggacaggccacactcc

SEQ ID NO: 3161699 - DNA, 25 bp, Homo sapien
ccaccatagggatcccatggtagat

SEQ ID NO: 3161700 - DNA, 25 bp, Homo sapien
cccaccatagggatcccatggtaga

SEQ ID NO: 3161701 - DNA, 25 bp, Homo sapien
gcaaatttgtagatgacatcgtttt

SEQ ID NO: 3161702 - DNA, 25 bp, Homo sapien
ttatgcattgagcaaatttgtagat

SEQ ID NO: 3161703 - DNA, 25 bp, Homo sapien
gatgacatcgtttttgagtctactg

SEQ ID NO: 3161704 - DNA, 25 bp, Homo sapien
agcaaatttgtagatgacatcgttt

SEQ ID NO: 3161705 - DNA, 25 bp, Homo sapien
tctccagagaaaaaattgtcttcat

SEQ ID NO: 3161706 - DNA, 25 bp, Homo sapien
tttctccagagaaaaaattgtcttc

SEQ ID NO: 3161707 - DNA, 25 bp, Homo sapien
ttctccagagaaaaaattgtcttca

SEQ ID NO: 3161708 - DNA, 25 bp, Homo sapien
ccagggccgaagtgataagatcagc

SEQ ID NO: 3161709 - DNA, 25 bp, Homo sapien
ggccgaagtgataagatcagctttt

SEQ ID NO: 3161710 - DNA, 25 bp, Homo sapien
gggccgaagtgataagatcagcttt

SEQ ID NO: 3161711 - DNA, 25 bp, Homo sapien
cagggccgaagtgataagatcagct

SEQ ID NO: 3161712 - DNA, 25 bp, Homo sapien
tagagctgagtattggcacctaatg

SEQ ID NO: 3161713 - DNA, 25 bp, Homo sapien
gctgagtattggcacctaatgtagt

SEQ ID NO: 3161714 - DNA, 25 bp, Homo sapien
agtattggcacctaatgtagttggt

SEQ ID NO: 3161715 - DNA, 25 bp, Homo sapien
tggaataatatgtgaccattgaagg

SEQ ID NO: 3161716 - DNA, 25 bp, Homo sapien
aaatttcagttgcatccattggatg

SEQ ID NO: 3161717 - DNA, 25 bp, Homo sapien
tggatggaataatatgtgaccattg

SEQ ID NO: 3161718 - DNA, 25 bp, Homo sapien
atagatacagaagtacgtggatgtg

SEQ ID NO: 3161719 - DNA, 25 bp, Homo sapien
tccatagagggataattatgttctc

SEQ ID NO: 3161720 - DNA, 25 bp, Homo sapien
ctgattgctccatagagggataatt

SEQ ID NO: 3161721 - DNA, 25 bp, Homo sapien
tgttatctgtcacaccagctttttc

SEQ ID NO: 3161722 - DNA, 25 bp, Homo sapien
cctgtatgttatctgtcacaccagc

SEQ ID NO: 3161723 - DNA, 25 bp, Homo sapien
tgtgaattctttccgttagccacac

SEQ ID NO: 3161724 - DNA, 25 bp, Homo sapien
tgcctagatcctgccaaagcttttg

SEQ ID NO: 3161725 - DNA, 25 bp, Homo sapien
gatcctgccaaagcttttgtcttac

SEQ ID NO: 3161726 - DNA, 25 bp, Homo sapien
ttagccacactctgcctagatcctg

SEQ ID NO: 3161727 - DNA, 25 bp, Homo sapien
ggtgatgatctgggcacaaagaaca

SEQ ID NO: 3161728 - DNA, 25 bp, Homo sapien
atgatctgggcacaaagaacaaatt

SEQ ID NO: 3161729 - DNA, 25 bp, Homo sapien
tgatgatctgggcacaaagaacaaa

SEQ ID NO: 3161730 - DNA, 25 bp, Homo sapien
tgatacatattgactgaactaatga

SEQ ID NO: 3161731 - DNA, 25 bp, Homo sapien
caagagaagaaactctccatcaacc

SEQ ID NO: 3161732 - DNA, 25 bp, Homo sapien
ttaacagttggtggacataatgtct

SEQ ID NO: 3161733 - DNA, 25 bp, Homo sapien
agttggtggacataatgtcttcatt

SEQ ID NO: 3161734 - DNA, 25 bp, Homo sapien
acagttggtggacataatgtcttca

SEQ ID NO: 3161735 - DNA, 25 bp, Homo sapien
taacagttggtggacataatgtctt

SEQ ID NO: 3161736 - DNA, 25 bp, Homo sapien
cctgcatagtagttgaggagcaaga

SEQ ID NO: 3161737 - DNA, 25 bp, Homo sapien
tctatatggcaatctagtgaatctc

SEQ ID NO: 3161738 - DNA, 25 bp, Homo sapien
tcagccacacaaggtccatttgacc

SEQ ID NO: 3161739 - DNA, 25 bp, Homo sapien
ttctgtgacagacctccaagaaaca

SEQ ID NO: 3161740 - DNA, 25 bp, Homo sapien
tgctcaatctttgggtctgcgccgt

SEQ ID NO: 3161741 - DNA, 25 bp, Homo sapien
caggcctcacctagttcacatgcta

SEQ ID NO: 3161742 - DNA, 25 bp, Homo sapien
taaaagcaggccatccgagccagct

SEQ ID NO: 3161743 - DNA, 25 bp, Homo sapien
cactaggagaagtacggctgcctct

SEQ ID NO: 3161744 - DNA, 25 bp, Homo sapien
caagccatggttctcaagctgaagg

SEQ ID NO: 3161745 - DNA, 25 bp, Homo sapien
ctttctgagccacaactgaggtagc

SEQ ID NO: 3161746 - DNA, 25 bp, Homo sapien
tagttgtttatatccccatgtgcag

SEQ ID NO: 3161747 - DNA, 25 bp, Homo sapien
tgccaagttatatgccaagccatgg

SEQ ID NO: 3161748 - DNA, 25 bp, Homo sapien
cgtaagcagtcactgctcccagttc

SEQ ID NO: 3161749 - DNA, 25 bp, Homo sapien
cactggccatgtcccgtaagcagtc

SEQ ID NO: 3161750 - DNA, 25 bp, Homo sapien
ggcccaggatggagcagatcgtggg

SEQ ID NO: 3161751 - DNA, 25 bp, Homo sapien
ggtgcagttgctgcgccactggcca

SEQ ID NO: 3161752 - DNA, 25 bp, Homo sapien
ccatatctgctatgacagaatcttc

SEQ ID NO: 3161753 - DNA, 25 bp, Homo sapien
gatttacccagtgatagtcgtgcag

SEQ ID NO: 3161754 - DNA, 25 bp, Homo sapien
aaagtaatgtgtaacaagtctcagg

SEQ ID NO: 3161755 - DNA, 25 bp, Homo sapien
tagtccacaattaatcaactgtccc

SEQ ID NO: 3161756 - DNA, 25 bp, Homo sapien
cattgcacacttacacgaatgatca

SEQ ID NO: 3161757 - DNA, 25 bp, Homo sapien
attgcacacttacacgaatgatcat

SEQ ID NO: 3161758 - DNA, 25 bp, Homo sapien
ttatgacaaatacaacggtcgaggg

SEQ ID NO: 3161759 - DNA, 25 bp, Homo sapien
acatctcccatgtacagcagttctt

SEQ ID NO: 3161760 - DNA, 25 bp, Homo sapien
gtcgagggggaaagctaaatcagaa

SEQ ID NO: 3161761 - DNA, 25 bp, Homo sapien
ctaaacatctcccatgtacagcagt

SEQ ID NO: 3161762 - DNA, 25 bp, Homo sapien
cctatgggaatgatgtagtaacaca

SEQ ID NO: 3161763 - DNA, 25 bp, Homo sapien
tgagctgtacatgcatatgagaaat

SEQ ID NO: 3161764 - DNA, 25 bp, Homo sapien
catgcacaactataacctatgggaa

SEQ ID NO: 3161765 - DNA, 25 bp, Homo sapien
ctggcccaggtaacatgtttattga

SEQ ID NO: 3161766 - DNA, 25 bp, Homo sapien
tgtttcttacctcccacaagtggtg

SEQ ID NO: 3161767 - DNA, 25 bp, Homo sapien
ccctattggaataaatggcagcaca

SEQ ID NO: 3161768 - DNA, 25 bp, Homo sapien
gcccggccgcccttagttatcttga

SEQ ID NO: 3161769 - DNA, 25 bp, Homo sapien
catttagtctggtagataggtctca

SEQ ID NO: 3161770 - DNA, 25 bp, Homo sapien
taactgctgtaataccttctgtgga

SEQ ID NO: 3161771 - DNA, 25 bp, Homo sapien
caacagggtaagtgcaggtaactgc

SEQ ID NO: 3161772 - DNA, 25 bp, Homo sapien
tggactactggtaccctaaccatag

SEQ ID NO: 3161773 - DNA, 25 bp, Homo sapien
tatgaccagatatcctcagttccat

SEQ ID NO: 3161774 - DNA, 25 bp, Homo sapien
tcaaatcattatgatcatgaactgt

SEQ ID NO: 3161775 - DNA, 25 bp, Homo sapien
tgaactgtttcaatccaagtacctt

SEQ ID NO: 3161776 - DNA, 25 bp, Homo sapien
ctctttcctggatgctacaacgtac

SEQ ID NO: 3161777 - DNA, 25 bp, Homo sapien
tacaacgtactcctgttgtttcaaa

SEQ ID NO: 3161778 - DNA, 25 bp, Homo sapien
cttaagcccaagtctggagagaagc

SEQ ID NO: 3161779 - DNA, 25 bp, Homo sapien
gacaggtgagaatgagaagcctcat

SEQ ID NO: 3161780 - DNA, 25 bp, Homo sapien
caagacaggtgagaatgagaagcct

SEQ ID NO: 3161781 - DNA, 25 bp, Homo sapien
aagacaggtgagaatgagaagcctc

SEQ ID NO: 3161782 - DNA, 25 bp, Homo sapien
acaagacaggtgagaatgagaagcc

SEQ ID NO: 3161783 - DNA, 25 bp, Homo sapien
aggcgttctgggtatctaagaggaa

SEQ ID NO: 3161784 - DNA, 25 bp, Homo sapien
tgaaggcgttctgggtatctaagag

SEQ ID NO: 3161785 - DNA, 25 bp, Homo sapien
ctgaaggcgttctgggtatctaaga

SEQ ID NO: 3161786 - DNA, 25 bp, Homo sapien
cgttctgggtatctaagaggaagtt

SEQ ID NO: 3161787 - DNA, 25 bp, Homo sapien
tgagaaactttccttctttgataat

SEQ ID NO: 3161788 - DNA, 25 bp, Homo sapien
agaagaagcctgagaaactttcctt

SEQ ID NO: 3161789 - DNA, 25 bp, Homo sapien
cagaagaagcctgagaaactttcct

SEQ ID NO: 3161790 - DNA, 25 bp, Homo sapien
gcctgagaaactttccttctttgat

SEQ ID NO: 3161791 - DNA, 25 bp, Homo sapien
gtttttctctcagaatgtttctctg

SEQ ID NO: 3161792 - DNA, 25 bp, Homo sapien
cttgatttcatcagtctgtttttct

SEQ ID NO: 3161793 - DNA, 25 bp, Homo sapien
tttcatcagtctgtttttctctcag

SEQ ID NO: 3161794 - DNA, 25 bp, Homo sapien
gatttcatcagtctgtttttctctc

SEQ ID NO: 3161795 - DNA, 25 bp, Homo sapien
actcgatgaactgatgctggattcc

SEQ ID NO: 3161796 - DNA, 25 bp, Homo sapien
atgaactgatgctggattccatctt

SEQ ID NO: 3161797 - DNA, 25 bp, Homo sapien
ctcactcgatgaactgatgctggat

SEQ ID NO: 3161798 - DNA, 25 bp, Homo sapien
cgatgaactgatgctggattccatc

SEQ ID NO: 3161799 - DNA, 25 bp, Homo sapien
gatcccatcagactagttacaataa

SEQ ID NO: 3161800 - DNA, 25 bp, Homo sapien
cacatacgtgtaaaaggtagagcta

SEQ ID NO: 3161801 - DNA, 25 bp, Homo sapien
tgtaaccagatctatagactgccac

SEQ ID NO: 3161802 - DNA, 25 bp, Homo sapien
tgaacggttcaacatcacatacgtg

SEQ ID NO: 3161803 - DNA, 25 bp, Homo sapien
gctgaagttggttgtattcgttcag

SEQ ID NO: 3161804 - DNA, 25 bp, Homo sapien
tattcgttcagtctacaaaactgtt

SEQ ID NO: 3161805 - DNA, 25 bp, Homo sapien
agttggttgtattcgttcagtctac

SEQ ID NO: 3161806 - DNA, 25 bp, Homo sapien
ggttgtattcgttcagtctacaaaa

SEQ ID NO: 3161807 - DNA, 25 bp, Homo sapien
tttcattcattctgcgaatttgctc

SEQ ID NO: 3161808 - DNA, 25 bp, Homo sapien
cttggacatggctgttttcattcat

SEQ ID NO: 3161809 - DNA, 25 bp, Homo sapien
cacttggacatggctgttttcattc

SEQ ID NO: 3161810 - DNA, 25 bp, Homo sapien
tggacatggctgttttcattcattc

SEQ ID NO: 3161811 - DNA, 25 bp, Homo sapien
ataattttcatgagcagtgggattg

SEQ ID NO: 3161812 - DNA, 25 bp, Homo sapien
caccactgtagcatgacgttatttt

SEQ ID NO: 3161813 - DNA, 25 bp, Homo sapien
gattggagatgtcggaaaacggtgg

SEQ ID NO: 3161814 - DNA, 25 bp, Homo sapien
actgcatgatttgtggatagtacca

SEQ ID NO: 3161815 - DNA, 25 bp, Homo sapien
tgtattagaagggaagtttccacca

SEQ ID NO: 3161816 - DNA, 25 bp, Homo sapien
taatgtattagaagggaagtttcca

SEQ ID NO: 3161817 - DNA, 25 bp, Homo sapien
aattgatggcacttacagaactggc

SEQ ID NO: 3161818 - DNA, 25 bp, Homo sapien
gattaggtgccctccatatggcaag

SEQ ID NO: 3161819 - DNA, 25 bp, Homo sapien
ctaaaacaacagtccagtcttcaga

SEQ ID NO: 3161820 - DNA, 25 bp, Homo sapien
tatggcaagacacaactgaaattta

SEQ ID NO: 3161821 - DNA, 25 bp, Homo sapien
aagagatgatgtgctaccctagagg

SEQ ID NO: 3161822 - DNA, 25 bp, Homo sapien
gaagtagtgaagttgaagtgaagct

SEQ ID NO: 3161823 - DNA, 25 bp, Homo sapien
tttactcaagatgagactacagaag

SEQ ID NO: 3161824 - DNA, 25 bp, Homo sapien
agtgaagcttcaagagatgatgtgc

SEQ ID NO: 3161825 - DNA, 25 bp, Homo sapien
ggaagcaacactctagattaagaca

SEQ ID NO: 3161826 - DNA, 25 bp, Homo sapien
tagatgccagtacgtagacaaggaa

SEQ ID NO: 3161827 - DNA, 25 bp, Homo sapien
aaacagtaaggcagtaaagcatgac

SEQ ID NO: 3161828 - DNA, 25 bp, Homo sapien
catttgcaaaaaagagaacgtatgc

SEQ ID NO: 3161829 - DNA, 25 bp, Homo sapien
gatttgcctcagttattcaaactga

SEQ ID NO: 3161830 - DNA, 25 bp, Homo sapien
aaagcagaactcatgatttatggca

SEQ ID NO: 3161831 - DNA, 25 bp, Homo sapien
ccttatctgggactgtgatatgtta

SEQ ID NO: 3161832 - DNA, 25 bp, Homo sapien
taattgccacaagagttacaaataa

SEQ ID NO: 3161833 - DNA, 25 bp, Homo sapien
tgcattcgcccatcaaaagtttatt

SEQ ID NO: 3161834 - DNA, 25 bp, Homo sapien
caaaatgtagggaagatagaactgg

SEQ ID NO: 3161835 - DNA, 25 bp, Homo sapien
gagacacactccagatagaaagaca

SEQ ID NO: 3161836 - DNA, 25 bp, Homo sapien
ttatactacgctccaaagcactggg

SEQ ID NO: 3161837 - DNA, 25 bp, Homo sapien
tgaaggcaaagacaaggaacttcat

SEQ ID NO: 3161838 - DNA, 25 bp, Homo sapien
ggaaaccatgagagccaagatgaag

SEQ ID NO: 3161839 - DNA, 25 bp, Homo sapien
ccatgagagccaagatgaaggcaaa

SEQ ID NO: 3161840 - DNA, 25 bp, Homo sapien
aaccatgagagccaagatgaaggca

SEQ ID NO: 3161841 - DNA, 25 bp, Homo sapien
caagtgcacctagttcattcctgag

SEQ ID NO: 3161842 - DNA, 25 bp, Homo sapien
tgtaggcaaatcatcgatagacact

SEQ ID NO: 3161843 - DNA, 25 bp, Homo sapien
tgaactcagcagctacagttgtgag

SEQ ID NO: 3161844 - DNA, 25 bp, Homo sapien
gaacacaaggaatagagagactctt

SEQ ID NO: 3161845 - DNA, 25 bp, Homo sapien
aattcaatacaaatgtagggaggac

SEQ ID NO: 3161846 - DNA, 25 bp, Homo sapien
ttcaatacaaatgtagggaggacaa

SEQ ID NO: 3161847 - DNA, 25 bp, Homo sapien
attcaatacaaatgtagggaggaca

SEQ ID NO: 3161848 - DNA, 25 bp, Homo sapien
ccgaatcttccaattctacgcaaaa

SEQ ID NO: 3161849 - DNA, 25 bp, Homo sapien
aatcttccaattctacgcaaaaatt

SEQ ID NO: 3161850 - DNA, 25 bp, Homo sapien
accgaatcttccaattctacgcaaa

SEQ ID NO: 3161851 - DNA, 25 bp, Homo sapien
cgaatcttccaattctacgcaaaaa

SEQ ID NO: 3161852 - DNA, 25 bp, Homo sapien
catactgggacatcaagatacatac

SEQ ID NO: 3161853 - DNA, 25 bp, Homo sapien
tggtttcttcaggttggcactatga

SEQ ID NO: 3161854 - DNA, 25 bp, Homo sapien
tggactacacagcattatcagagaa

SEQ ID NO: 3161855 - DNA, 25 bp, Homo sapien
gattataggctatcactccaaagag

SEQ ID NO: 3161856 - DNA, 25 bp, Homo sapien
cgtttttattagaagcttagattgt

SEQ ID NO: 3161857 - DNA, 25 bp, Homo sapien
cagtgcaagcgtttttattagaagc

SEQ ID NO: 3161858 - DNA, 25 bp, Homo sapien
aattgagataatgacagtgcaagcg

SEQ ID NO: 3161859 - DNA, 25 bp, Homo sapien
ggaacttacatattacttataagat

SEQ ID NO: 3161860 - DNA, 25 bp, Homo sapien
tgggtatagtggttgttctggaact

SEQ ID NO: 3161861 - DNA, 25 bp, Homo sapien
tattgttggtattgtggttggtatg

SEQ ID NO: 3161862 - DNA, 25 bp, Homo sapien
gaactggctgataagggccataccc

SEQ ID NO: 3161863 - DNA, 25 bp, Homo sapien
taaaaggtatattgttggtattgtg

SEQ ID NO: 3161864 - DNA, 25 bp, Homo sapien
taatcatgtcctgcagttactgatg

SEQ ID NO: 3161865 - DNA, 25 bp, Homo sapien
aataatcatgtcctgcagttactga

SEQ ID NO: 3161866 - DNA, 25 bp, Homo sapien
tcatgtcctgcagttactgatgata

SEQ ID NO: 3161867 - DNA, 25 bp, Homo sapien
ctcaataatcatgtcctgcagttac

SEQ ID NO: 3161868 - DNA, 25 bp, Homo sapien
tcccagatggttcccagatggaagc

SEQ ID NO: 3161869 - DNA, 25 bp, Homo sapien
catttcaaggagctatacagctggc

SEQ ID NO: 3161870 - DNA, 25 bp, Homo sapien
aaactagtagttgtcagggccagca

SEQ ID NO: 3161871 - DNA, 25 bp, Homo sapien
gccttctaaccatagcaggacagag

SEQ ID NO: 3161872 - DNA, 25 bp, Homo sapien
gacaattgaaaaggcaagtatcctg

SEQ ID NO: 3161873 - DNA, 25 bp, Homo sapien
tatcctgaaacaaagagtatacagt

SEQ ID NO: 3161874 - DNA, 25 bp, Homo sapien
tagaagtcgtatttgccaatcaagc

SEQ ID NO: 3161875 - DNA, 25 bp, Homo sapien
gaaacagtactgaacacagcttaac

SEQ ID NO: 3161876 - DNA, 25 bp, Homo sapien
cattgctgaaaaactaatggagggc

SEQ ID NO: 3161877 - DNA, 25 bp, Homo sapien
caaagacttaacatgggccacaaag

SEQ ID NO: 3161878 - DNA, 25 bp, Homo sapien
tagatggtttacatgcagagtgcct

SEQ ID NO: 3161879 - DNA, 25 bp, Homo sapien
cagatttctgtaaggcccaagtgtg

SEQ ID NO: 3161880 - DNA, 25 bp, Homo sapien
gatgtcttaaggatgcaacccatga

SEQ ID NO: 3161881 - DNA, 25 bp, Homo sapien
tcccacacatgaactgcagactttg

SEQ ID NO: 3161882 - DNA, 25 bp, Homo sapien
tcatatttatgctgggctttcctcc

SEQ ID NO: 3161883 - DNA, 25 bp, Homo sapien
gaaaagatcccctagacaacactga

SEQ ID NO: 3161884 - DNA, 25 bp, Homo sapien
tatttcccttgtaattgaaaggcat

SEQ ID NO: 3161885 - DNA, 25 bp, Homo sapien
tgatatttcccttgtaattgaaagg

SEQ ID NO: 3161886 - DNA, 25 bp, Homo sapien
cagtgtattgccacaactgtgataa

SEQ ID NO: 3161887 - DNA, 25 bp, Homo sapien
taaggcagtagctattgatatttcc

SEQ ID NO: 3161888 - DNA, 25 bp, Homo sapien
tcaagagatgtcctttcctagatgg

SEQ ID NO: 3161889 - DNA, 25 bp, Homo sapien
gtctcaagagatgtcctttcctaga

SEQ ID NO: 3161890 - DNA, 25 bp, Homo sapien
caagagatgtcctttcctagatggc

SEQ ID NO: 3161891 - DNA, 25 bp, Homo sapien
ctcaagagatgtcctttcctagatg

SEQ ID NO: 3161892 - DNA, 25 bp, Homo sapien
tatcaggtatctaggcaaggaaata

SEQ ID NO: 3161893 - DNA, 25 bp, Homo sapien
gagaagactaattgttatacagtat

SEQ ID NO: 3161894 - DNA, 25 bp, Homo sapien
attagattgtacttgaacatgttac

SEQ ID NO: 3161895 - DNA, 25 bp, Homo sapien
cataggaattgagatctagaagtca

SEQ ID NO: 3161896 - DNA, 25 bp, Homo sapien
agtgtgtgacaccatgacaagctaa

SEQ ID NO: 3161897 - DNA, 25 bp, Homo sapien
cttggatcttcggtgtgagcccagg

SEQ ID NO: 3161898 - DNA, 25 bp, Homo sapien
tactgatgacactatgcttcaaagc

SEQ ID NO: 3161899 - DNA, 25 bp, Homo sapien
tgagcccagggcatagcttcattaa

SEQ ID NO: 3161900 - DNA, 25 bp, Homo sapien
ggaaagcatgagagccaagattaaa

SEQ ID NO: 3161901 - DNA, 25 bp, Homo sapien
agcatgagagccaagattaaagcaa

SEQ ID NO: 3161902 - DNA, 25 bp, Homo sapien
tgagagccaagattaaagcaaaaac

SEQ ID NO: 3161903 - DNA, 25 bp, Homo sapien
agtcatggaaagcatgagagccaag

SEQ ID NO: 3161904 - DNA, 25 bp, Homo sapien
taattgtacttgagtgttcgcaggt

SEQ ID NO: 3161905 - DNA, 25 bp, Homo sapien
gctgggaactcatgacacttaacag

SEQ ID NO: 3161906 - DNA, 25 bp, Homo sapien
cagatttctaacttcaggtggtcta

SEQ ID NO: 3161907 - DNA, 25 bp, Homo sapien
agatccttgggataagtactgagaa

SEQ ID NO: 3161908 - DNA, 25 bp, Homo sapien
gagtgaagggtaaacttctctataa

SEQ ID NO: 3161909 - DNA, 25 bp, Homo sapien
catctttaaaatgagtgaagggtaa

SEQ ID NO: 3161910 - DNA, 25 bp, Homo sapien
caagaatatgtgtaaaaattgactt

SEQ ID NO: 3161911 - DNA, 25 bp, Homo sapien
gaggcattctttggatgatgacatg

SEQ ID NO: 3161912 - DNA, 25 bp, Homo sapien
tatatgattaattatcaagttttcc

SEQ ID NO: 3161913 - DNA, 25 bp, Homo sapien
gattaattatcaagttttccagtaa

SEQ ID NO: 3161914 - DNA, 25 bp, Homo sapien
ttcaatatatgattaattatcaagt

SEQ ID NO: 3161915 - DNA, 25 bp, Homo sapien
tgattaattatcaagttttccagta

SEQ ID NO: 3161916 - DNA, 25 bp, Homo sapien
tgggtagcctctatgcttcattagg

SEQ ID NO: 3161917 - DNA, 25 bp, Homo sapien
tagaaaccacattacatgggtagcc

SEQ ID NO: 3161918 - DNA, 25 bp, Homo sapien
tttgcccaacattgagtataacggg

SEQ ID NO: 3161919 - DNA, 25 bp, Homo sapien
tggaacactgattataggcaacctc

SEQ ID NO: 3161920 - DNA, 25 bp, Homo sapien
aatttgatctatagcctcgatgtga

SEQ ID NO: 3161921 - DNA, 25 bp, Homo sapien
gataatttgatctatagcctcgatg

SEQ ID NO: 3161922 - DNA, 25 bp, Homo sapien
acagataatttgatctatagcctcg

SEQ ID NO: 3161923 - DNA, 25 bp, Homo sapien
gatctatagcctcgatgtgaatgat

SEQ ID NO: 3161924 - DNA, 25 bp, Homo sapien
aatcatgccccgtgattactgaaga

SEQ ID NO: 3161925 - DNA, 25 bp, Homo sapien
tcatgccccgtgattactgaagata

SEQ ID NO: 3161926 - DNA, 25 bp, Homo sapien
ccataatcatgccccgtgattactg

SEQ ID NO: 3161927 - DNA, 25 bp, Homo sapien
taatcatgccccgtgattactgaag

SEQ ID NO: 3161928 - DNA, 25 bp, Homo sapien
ggaatgattgttggcttaatggctt

SEQ ID NO: 3161929 - DNA, 25 bp, Homo sapien
ctggaatgattgttggcttaatggc

SEQ ID NO: 3161930 - DNA, 25 bp, Homo sapien
taaactggaatgattgttggcttaa

SEQ ID NO: 3161931 - DNA, 25 bp, Homo sapien
aactggaatgattgttggcttaatg

SEQ ID NO: 3161932 - DNA, 25 bp, Homo sapien
caatctctaagttacctgttcactc

SEQ ID NO: 3161933 - DNA, 25 bp, Homo sapien
cgtagatcagatagcaagcagagac

SEQ ID NO: 3161934 - DNA, 25 bp, Homo sapien
tccttttaatgaccgcatagtgttc

SEQ ID NO: 3161935 - DNA, 25 bp, Homo sapien
tgcaataaacatatctaggcatatg

SEQ ID NO: 3161936 - DNA, 25 bp, Homo sapien
gatcagccctctatgttaccttctg

SEQ ID NO: 3161937 - DNA, 25 bp, Homo sapien
tattgatcagccctctatgttacct

SEQ ID NO: 3161938 - DNA, 25 bp, Homo sapien
tggtttgctgcactattgatcagcc

SEQ ID NO: 3161939 - DNA, 25 bp, Homo sapien
gtggtttgctgcactattgatcagc

SEQ ID NO: 3161940 - DNA, 25 bp, Homo sapien
tcatgaaactagttgtcagggtcag

SEQ ID NO: 3161941 - DNA, 25 bp, Homo sapien
tcagggtcaggataaaaacacaggg

SEQ ID NO: 3161942 - DNA, 25 bp, Homo sapien
ctcatgagttcccagatggcggttg

SEQ ID NO: 3161943 - DNA, 25 bp, Homo sapien
cagatttagtggcagagaaacccat

SEQ ID NO: 3161944 - DNA, 25 bp, Homo sapien
aaataacactttatcgcccaaattg

SEQ ID NO: 3161945 - DNA, 25 bp, Homo sapien
ttatcgcccaaattgatattcctgt

SEQ ID NO: 3161946 - DNA, 25 bp, Homo sapien
aataacactttatcgcccaaattga

SEQ ID NO: 3161947 - DNA, 25 bp, Homo sapien
cactttatcgcccaaattgatattc

SEQ ID NO: 3161948 - DNA, 25 bp, Homo sapien
cagtggtagtgtgatgcggtatgac

SEQ ID NO: 3161949 - DNA, 25 bp, Homo sapien
acaaatgagaatacacgagtccaaa

SEQ ID NO: 3161950 - DNA, 25 bp, Homo sapien
tgagaatacacgagtccaaagcgaa

SEQ ID NO: 3161951 - DNA, 25 bp, Homo sapien
gagtccaaagcgaatttgccagtca

SEQ ID NO: 3161952 - DNA, 25 bp, Homo sapien
taattaggaagggaagtatcctgaa

SEQ ID NO: 3161953 - DNA, 25 bp, Homo sapien
cacagaattcactaaatcatggtat

SEQ ID NO: 3161954 - DNA, 25 bp, Homo sapien
ttaggaagggaagtatcctgaaaca

SEQ ID NO: 3161955 - DNA, 25 bp, Homo sapien
atgataattaggaagggaagtatcc

SEQ ID NO: 3161956 - DNA, 25 bp, Homo sapien
ctgaagtgaagtctcaagagatgtc

SEQ ID NO: 3161957 - DNA, 25 bp, Homo sapien
gagtcaagaagtcagtgaagctgaa

SEQ ID NO: 3161958 - DNA, 25 bp, Homo sapien
aagctgaagtgaagtctcaagagat

SEQ ID NO: 3161959 - DNA, 25 bp, Homo sapien
cttttactcaagaggagagtcaaga

SEQ ID NO: 3161960 - DNA, 25 bp, Homo sapien
tatttaggcaaatacgcaattcaag

SEQ ID NO: 3161961 - DNA, 25 bp, Homo sapien
tcataggaattgagatctggaagtc

SEQ ID NO: 3161962 - DNA, 25 bp, Homo sapien
cattacagcatcagggcaaataact

SEQ ID NO: 3161963 - DNA, 25 bp, Homo sapien
tcttcagatcccgagtacaaaattg

SEQ ID NO: 3161964 - DNA, 25 bp, Homo sapien
gaccacttaggttgttgtgacacta

SEQ ID NO: 3161965 - DNA, 25 bp, Homo sapien
cagttcaacacatagggaggacaaa

SEQ ID NO: 3161966 - DNA, 25 bp, Homo sapien
cagaatccacagatggtgtaaccct

SEQ ID NO: 3161967 - DNA, 25 bp, Homo sapien
tcaacaaagttagcctcatctggga

SEQ ID NO: 3161968 - DNA, 25 bp, Homo sapien
atcatgagagccaagactaaagcaa

SEQ ID NO: 3161969 - DNA, 25 bp, Homo sapien
catgagagccaagactaaagcaaag

SEQ ID NO: 3161970 - DNA, 25 bp, Homo sapien
gagagccaagactaaagcaaagaca

SEQ ID NO: 3161971 - DNA, 25 bp, Homo sapien
catggaaatcatgagagccaagact

SEQ ID NO: 3161972 - DNA, 25 bp, Homo sapien
gaaaagattaaaaattcaatatatg

SEQ ID NO: 3161973 - DNA, 25 bp, Homo sapien
caatatatgtttatttatcaagttt

SEQ ID NO: 3161974 - DNA, 25 bp, Homo sapien
attcaatatatgtttatttatcaag

SEQ ID NO: 3161975 - DNA, 25 bp, Homo sapien
tatatgtttatttatcaagttttcc

SEQ ID NO: 3161976 - DNA, 25 bp, Homo sapien
ggaattttcttctatacccatgatg

SEQ ID NO: 3161977 - DNA, 25 bp, Homo sapien
gaattttcttctatacccatgatgt

SEQ ID NO: 3161978 - DNA, 25 bp, Homo sapien
atggaattttcttctatacccatga

SEQ ID NO: 3161979 - DNA, 25 bp, Homo sapien
tggaattttcttctatacccatgat

SEQ ID NO: 3161980 - DNA, 25 bp, Homo sapien
aactgtcattaaaagcttagattgc

SEQ ID NO: 3161981 - DNA, 25 bp, Homo sapien
acctccaagctactattttgctcac

SEQ ID NO: 3161982 - DNA, 25 bp, Homo sapien
gattgctaaagttgttaagaccttg

SEQ ID NO: 3161983 - DNA, 25 bp, Homo sapien
taagaccttgtattttatctacata

SEQ ID NO: 3161984 - DNA, 25 bp, Homo sapien
gataatttgatccatagtccccata

SEQ ID NO: 3161985 - DNA, 25 bp, Homo sapien
catatagataatttgatccatagtc

SEQ ID NO: 3161986 - DNA, 25 bp, Homo sapien
tagataatttgatccatagtcccca

SEQ ID NO: 3161987 - DNA, 25 bp, Homo sapien
aatttgatccatagtccccataaaa

SEQ ID NO: 3161988 - DNA, 25 bp, Homo sapien
taatcatgccccatgattactaagg

SEQ ID NO: 3161989 - DNA, 25 bp, Homo sapien
agtctttgccaacggctgtcctgaa

SEQ ID NO: 3161990 - DNA, 25 bp, Homo sapien
aatatcagatggcaagcagagaccc

SEQ ID NO: 3161991 - DNA, 25 bp, Homo sapien
tgttgacacttctagaaagacaagc

SEQ ID NO: 3161992 - DNA, 25 bp, Homo sapien
tacacttcaaggagctaacccatgc

SEQ ID NO: 3161993 - DNA, 25 bp, Homo sapien
ttttttatgagttcccagatggtgg

SEQ ID NO: 3161994 - DNA, 25 bp, Homo sapien
gaacagaagctttccctcggaggca

SEQ ID NO: 3161995 - DNA, 25 bp, Homo sapien
gaactcagcatcttaacactggtga

SEQ ID NO: 3161996 - DNA, 25 bp, Homo sapien
tacaccttccagaacaagggcttct

SEQ ID NO: 3161997 - DNA, 25 bp, Homo sapien
cagaattcactaaatcatggtcttt

SEQ ID NO: 3161998 - DNA, 25 bp, Homo sapien
tgataattaggaagggaagtatcat

SEQ ID NO: 3161999 - DNA, 25 bp, Homo sapien
cagtggtagtgtgatgcggtatgat

SEQ ID NO: 3162000 - DNA, 25 bp, Homo sapien
cacagaattcactaaatcatggtct

SEQ ID NO: 3162001 - DNA, 25 bp, Homo sapien
caaatagaagaccagtggactacac

SEQ ID NO: 3162002 - DNA, 25 bp, Homo sapien
ccaaatagaagaccagtggactaca

SEQ ID NO: 3162003 - DNA, 25 bp, Homo sapien
tataaaatatctcacccttgaagtg

SEQ ID NO: 3162004 - DNA, 25 bp, Homo sapien
tacagagggtgtgtctatacaggca

SEQ ID NO: 3162005 - DNA, 25 bp, Homo sapien
ggataatttaaagcttacccaatga

SEQ ID NO: 3162006 - DNA, 25 bp, Homo sapien
tgataacaaaatgggcttatgatcc

SEQ ID NO: 3162007 - DNA, 25 bp, Homo sapien
atgatgtgccagagcaacagccaaa

SEQ ID NO: 3162008 - DNA, 25 bp, Homo sapien
tgatgtgccagagcaacagccaaaa

SEQ ID NO: 3162009 - DNA, 25 bp, Homo sapien
atgtgccagagcaacagccaaaagg

SEQ ID NO: 3162010 - DNA, 25 bp, Homo sapien
gatgtgccagagcaacagccaaaag

SEQ ID NO: 3162011 - DNA, 25 bp, Homo sapien
tcactggaagaggaggagtgcttta

SEQ ID NO: 3162012 - DNA, 25 bp, Homo sapien
ctcactggaagaggaggagtgcttt

SEQ ID NO: 3162013 - DNA, 25 bp, Homo sapien
actggaagaggaggagtgctttatc

SEQ ID NO: 3162014 - DNA, 25 bp, Homo sapien
tggaagaggaggagtgctttatctc

SEQ ID NO: 3162015 - DNA, 25 bp, Homo sapien
atcgtatctattttatttgcagttt

SEQ ID NO: 3162016 - DNA, 25 bp, Homo sapien
catcgtatctattttatttgcagtt

SEQ ID NO: 3162017 - DNA, 25 bp, Homo sapien
tcgtatctattttatttgcagtttc

SEQ ID NO: 3162018 - DNA, 25 bp, Homo sapien
cactggataaactgctagaagattg

SEQ ID NO: 3162019 - DNA, 25 bp, Homo sapien
cccactggataaactgctagaagat

SEQ ID NO: 3162020 - DNA, 25 bp, Homo sapien
ccactggataaactgctagaagatt

SEQ ID NO: 3162021 - DNA, 25 bp, Homo sapien
taaatagctttacttgaatgacata

SEQ ID NO: 3162022 - DNA, 25 bp, Homo sapien
tagtgataattgtctctacataatt

SEQ ID NO: 3162023 - DNA, 25 bp, Homo sapien
gctttacttgaatgacatagtgata

SEQ ID NO: 3162024 - DNA, 25 bp, Homo sapien
gaatgacatagtgataattgtctct

SEQ ID NO: 3162025 - DNA, 25 bp, Homo sapien
gatccttccttccttagtcagttca

SEQ ID NO: 3162026 - DNA, 25 bp, Homo sapien
tccttccttccttagtcagttcatt

SEQ ID NO: 3162027 - DNA, 25 bp, Homo sapien
ttccttccttagtcagttcattgtt

SEQ ID NO: 3162028 - DNA, 25 bp, Homo sapien
ccttccttccttagtcagttcattg

SEQ ID NO: 3162029 - DNA, 25 bp, Homo sapien
tccacaggctcatagactacaaggg

SEQ ID NO: 3162030 - DNA, 25 bp, Homo sapien
ttcctgaatgtgattccacaggctc

SEQ ID NO: 3162031 - DNA, 25 bp, Homo sapien
taaatgggaatatatgggtaggtgt

SEQ ID NO: 3162032 - DNA, 25 bp, Homo sapien
gaatgtgattccacaggctcataga

SEQ ID NO: 3162033 - DNA, 25 bp, Homo sapien
gcagcagttaattcaagaatcttac

SEQ ID NO: 3162034 - DNA, 25 bp, Homo sapien
tcaagctcaaattgcagcagttaat

SEQ ID NO: 3162035 - DNA, 25 bp, Homo sapien
ctcaaattgcagcagttaattcaag

SEQ ID NO: 3162036 - DNA, 25 bp, Homo sapien
gcagttaattcaagaatcttacatg

SEQ ID NO: 3162037 - DNA, 25 bp, Homo sapien
tgttttggcaactgatatacagttc

SEQ ID NO: 3162038 - DNA, 25 bp, Homo sapien
cagttctatatttcagagatagtgg

SEQ ID NO: 3162039 - DNA, 25 bp, Homo sapien
ctggcatatccaacacaaattaaaa

SEQ ID NO: 3162040 - DNA, 25 bp, Homo sapien
tatgataccacaattcagatctggc

SEQ ID NO: 3162041 - DNA, 25 bp, Homo sapien
taaatggcagataagaagtctaagc

SEQ ID NO: 3162042 - DNA, 25 bp, Homo sapien
cctaaatggcagataagaagtctaa

SEQ ID NO: 3162043 - DNA, 25 bp, Homo sapien
cttatttcctaaatggcagataaga

SEQ ID NO: 3162044 - DNA, 25 bp, Homo sapien
ttcctaaatggcagataagaagtct

SEQ ID NO: 3162045 - DNA, 25 bp, Homo sapien
tgctttgcaagagcaatagccaaaa

SEQ ID NO: 3162046 - DNA, 25 bp, Homo sapien
gctttgcaagagcaatagccaaaag

SEQ ID NO: 3162047 - DNA, 25 bp, Homo sapien
atgctttgcaagagcaatagccaaa

SEQ ID NO: 3162048 - DNA, 25 bp, Homo sapien
ctcgctggaggagtgatgctccata

SEQ ID NO: 3162049 - DNA, 25 bp, Homo sapien
cgctggaggagtgatgctccatatt

SEQ ID NO: 3162050 - DNA, 25 bp, Homo sapien
tcgctggaggagtgatgctccatat

SEQ ID NO: 3162051 - DNA, 25 bp, Homo sapien
tgactatattcttgacctgcttaaa

SEQ ID NO: 3162052 - DNA, 25 bp, Homo sapien
ctatattcttgacctgcttaaattt

SEQ ID NO: 3162053 - DNA, 25 bp, Homo sapien
atgactatattcttgacctgcttaa

SEQ ID NO: 3162054 - DNA, 25 bp, Homo sapien
gactatattcttgacctgcttaaat

SEQ ID NO: 3162055 - DNA, 25 bp, Homo sapien
tacaggaagtagaacaattgtcctt

SEQ ID NO: 3162056 - DNA, 25 bp, Homo sapien
ttacaggaagtagaacaattgtcct

SEQ ID NO: 3162057 - DNA, 25 bp, Homo sapien
cttacaggaagtagaacaattgtcc

SEQ ID NO: 3162058 - DNA, 25 bp, Homo sapien
catttcattcatgttttttgtggtt

SEQ ID NO: 3162059 - DNA, 25 bp, Homo sapien
atttcattcatgttttttgtggttt

SEQ ID NO: 3162060 - DNA, 25 bp, Homo sapien
tttcattcatgttttttgtggtttc

SEQ ID NO: 3162061 - DNA, 25 bp, Homo sapien
tttgatccacagtgtgcttaacttc

SEQ ID NO: 3162062 - DNA, 25 bp, Homo sapien
gcttttgatccacagtgtgcttaac

SEQ ID NO: 3162063 - DNA, 25 bp, Homo sapien
tgttttacgtagtgcttttgatcca

SEQ ID NO: 3162064 - DNA, 25 bp, Homo sapien
agttgttttacgtagtgcttttgat

SEQ ID NO: 3162065 - DNA, 25 bp, Homo sapien
gctgtcctgcgtggttcctaacagg

SEQ ID NO: 3162066 - DNA, 25 bp, Homo sapien
tcctgctgtcctgcgtggttcctaa

SEQ ID NO: 3162067 - DNA, 25 bp, Homo sapien
cctcctgctgtcctgcgtggttcct

SEQ ID NO: 3162068 - DNA, 25 bp, Homo sapien
ctgctgtcctgcgtggttcctaaca

SEQ ID NO: 3162069 - DNA, 25 bp, Homo sapien
gataaggaacctgaagaaatgggag

SEQ ID NO: 3162070 - DNA, 25 bp, Homo sapien
acttgtcttatgctgatctcctggg

SEQ ID NO: 3162071 - DNA, 25 bp, Homo sapien
gaagttccacttctgataaaatggg

SEQ ID NO: 3162072 - DNA, 25 bp, Homo sapien
tgggaggaagttccacttctgataa

SEQ ID NO: 3162073 - DNA, 25 bp, Homo sapien
ctgactggtatgtataactacatcc

SEQ ID NO: 3162074 - DNA, 25 bp, Homo sapien
tgtataactacatcctttttctcct

SEQ ID NO: 3162075 - DNA, 25 bp, Homo sapien
gactggtatgtataactacatcctt

SEQ ID NO: 3162076 - DNA, 25 bp, Homo sapien
ggtatgtataactacatcctttttc

SEQ ID NO: 3162077 - DNA, 25 bp, Homo sapien
atatcaacagtcttttttggtgttt

SEQ ID NO: 3162078 - DNA, 25 bp, Homo sapien
tatcaacagtcttttttggtgtttc

SEQ ID NO: 3162079 - DNA, 25 bp, Homo sapien
catatcaacagtcttttttggtgtt

SEQ ID NO: 3162080 - DNA, 25 bp, Homo sapien
tttcttcttcagtcagctcagtttt

SEQ ID NO: 3162081 - DNA, 25 bp, Homo sapien
ttcttttcttcttcagtcagctcag

SEQ ID NO: 3162082 - DNA, 25 bp, Homo sapien
cagatgtttttggtcattcttttct

SEQ ID NO: 3162083 - DNA, 25 bp, Homo sapien
cttttcttcttcagtcagctcagtt

SEQ ID NO: 3162084 - DNA, 25 bp, Homo sapien
gcttttacatattggggcaaggtga

SEQ ID NO: 3162085 - DNA, 25 bp, Homo sapien
tttgtgatattgataaacagctttt

SEQ ID NO: 3162086 - DNA, 25 bp, Homo sapien
cagagtggggataacttggtaagca

SEQ ID NO: 3162087 - DNA, 25 bp, Homo sapien
tgataaacagcttttacatattggg

SEQ ID NO: 3162088 - DNA, 25 bp, Homo sapien
aagtaaagtaggagcagttaattca

SEQ ID NO: 3162089 - DNA, 25 bp, Homo sapien
agtaaagtaggagcagttaattcaa

SEQ ID NO: 3162090 - DNA, 25 bp, Homo sapien
caaagtaaagtaggagcagttaatt

SEQ ID NO: 3162091 - DNA, 25 bp, Homo sapien
taactatctgtgttcatgcttgatg

SEQ ID NO: 3162092 - DNA, 25 bp, Homo sapien
catgcttgatggagtcaatacagtc

SEQ ID NO: 3162093 - DNA, 25 bp, Homo sapien
gatggagtcaatacagtctatgagg

SEQ ID NO: 3162094 - DNA, 25 bp, Homo sapien
tctgtgttcatgcttgatggagtca

SEQ ID NO: 3162095 - DNA, 25 bp, Homo sapien
taatgaaaccacaatgcaaacccaa

SEQ ID NO: 3162096 - DNA, 25 bp, Homo sapien
cataagcctgtccaaacatgctggt

SEQ ID NO: 3162097 - DNA, 25 bp, Homo sapien
aatatggtagattttccaggcaaac

SEQ ID NO: 3162098 - DNA, 25 bp, Homo sapien
tcttgggaagggtatacacaattca

SEQ ID NO: 3162099 - DNA, 25 bp, Homo sapien
cctaggaaaggattagagaccctga

SEQ ID NO: 3162100 - DNA, 25 bp, Homo sapien
tgactggctaatcgatagacttgac

SEQ ID NO: 3162101 - DNA, 25 bp, Homo sapien
gagaccctgaggatatgtcgtagaa

SEQ ID NO: 3162102 - DNA, 25 bp, Homo sapien
gatcacatagataatttcagcacag

SEQ ID NO: 3162103 - DNA, 25 bp, Homo sapien
tgcaaactagtggatgcagctcttg

SEQ ID NO: 3162104 - DNA, 25 bp, Homo sapien
tgcagctcttggtcttgacgtggac

SEQ ID NO: 3162105 - DNA, 25 bp, Homo sapien
ggatgcagctcttggtcttgacgtg

SEQ ID NO: 3162106 - DNA, 25 bp, Homo sapien
cttgtttccagggtgcaaactagtg

SEQ ID NO: 3162107 - DNA, 25 bp, Homo sapien
acgaaagaatacatggcttttttag

SEQ ID NO: 3162108 - DNA, 25 bp, Homo sapien
tagtctgtctaggaagacccttaac

SEQ ID NO: 3162109 - DNA, 25 bp, Homo sapien
taacagaatagttggccctgctatt

SEQ ID NO: 3162110 - DNA, 25 bp, Homo sapien
aagaatacatggcttttttagtctg

SEQ ID NO: 3162111 - DNA, 25 bp, Homo sapien
acaatgcaggcccaaaggagaagct

SEQ ID NO: 3162112 - DNA, 25 bp, Homo sapien
aacacatacaatgcaggcccaaagg

SEQ ID NO: 3162113 - DNA, 25 bp, Homo sapien
aaagcaacacatacaatgcaggccc

SEQ ID NO: 3162114 - DNA, 25 bp, Homo sapien
acatacaatgcaggcccaaaggaga

SEQ ID NO: 3162115 - DNA, 25 bp, Homo sapien
taagataatctacgtgggatcctgc

SEQ ID NO: 3162116 - DNA, 25 bp, Homo sapien
tgtccatctatgtctctctgctgct

SEQ ID NO: 3162117 - DNA, 25 bp, Homo sapien
tactttatcataagcacaaatgcct

SEQ ID NO: 3162118 - DNA, 25 bp, Homo sapien
aaagtctgacactacaaatctcatg

SEQ ID NO: 3162119 - DNA, 25 bp, Homo sapien
gcacttcacagccataggaagccca

SEQ ID NO: 3162120 - DNA, 25 bp, Homo sapien
tcacagccataggaagcccaatcca

SEQ ID NO: 3162121 - DNA, 25 bp, Homo sapien
ctccagcaatggcacttcacagcca

SEQ ID NO: 3162122 - DNA, 25 bp, Homo sapien
cagccataggaagcccaatccagca

SEQ ID NO: 3162123 - DNA, 25 bp, Homo sapien
cactaaaggtatgatgtgcatttac

SEQ ID NO: 3162124 - DNA, 25 bp, Homo sapien
caagtatccctaatgtctgtacata

SEQ ID NO: 3162125 - DNA, 25 bp, Homo sapien
ggccattgcattacactatattacg

SEQ ID NO: 3162126 - DNA, 25 bp, Homo sapien
tacgttacagtccactaaaggtatg

SEQ ID NO: 3162127 - DNA, 25 bp, Homo sapien
aataaatgtagattgtccctcaggg

SEQ ID NO: 3162128 - DNA, 25 bp, Homo sapien
taaaatgtgtaccttctctgtgcca

SEQ ID NO: 3162129 - DNA, 25 bp, Homo sapien
tgcattgtggatcatagagccctag

SEQ ID NO: 3162130 - DNA, 25 bp, Homo sapien
tctcacgagtcatattgccagagcc

SEQ ID NO: 3162131 - DNA, 25 bp, Homo sapien
cactgggcgataataaagaggaggt

SEQ ID NO: 3162132 - DNA, 25 bp, Homo sapien
tggtaaattccgtatgccataagga

SEQ ID NO: 3162133 - DNA, 25 bp, Homo sapien
gtcagtgtaagtattcccagggtaa

SEQ ID NO: 3162134 - DNA, 25 bp, Homo sapien
gggactgtattcactgggcgataat

SEQ ID NO: 3162135 - DNA, 25 bp, Homo sapien
agtagctaagggaaaaccacggatg

SEQ ID NO: 3162136 - DNA, 25 bp, Homo sapien
tagaatccagggatacgaaggtaac

SEQ ID NO: 3162137 - DNA, 25 bp, Homo sapien
aaccacggatgtgatagacataggg

SEQ ID NO: 3162138 - DNA, 25 bp, Homo sapien
ggagaagttagaatccagggatacg

SEQ ID NO: 3162139 - DNA, 25 bp, Homo sapien
caataggtggggcagcgggtgctgc

SEQ ID NO: 3162140 - DNA, 25 bp, Homo sapien
ataggtggggcagcgggtgctgcag

SEQ ID NO: 3162141 - DNA, 25 bp, Homo sapien
tgcaataggtggggcagcgggtgct

SEQ ID NO: 3162142 - DNA, 25 bp, Homo sapien
ctgcaataggtggggcagcgggtgc

SEQ ID NO: 3162143 - DNA, 25 bp, Homo sapien
tacaggtgtggctgtaagaggtgca

SEQ ID NO: 3162144 - DNA, 25 bp, Homo sapien
ctacaggtgtggctgtaagaggtgc

SEQ ID NO: 3162145 - DNA, 25 bp, Homo sapien
aggctcagctgctacaggtgtggct

SEQ ID NO: 3162146 - DNA, 25 bp, Homo sapien
agcaggctcagctgctacaggtgtg

SEQ ID NO: 3162147 - DNA, 25 bp, Homo sapien
agctccaacaggtgcctctgcagca

SEQ ID NO: 3162148 - DNA, 25 bp, Homo sapien
ctgcaacaggtgcctctgcagcagg

SEQ ID NO: 3162149 - DNA, 25 bp, Homo sapien
caggctcagctccaacaggtgcctc

SEQ ID NO: 3162150 - DNA, 25 bp, Homo sapien
ggctcagctccaacaggtgcctctg

SEQ ID NO: 3162151 - DNA, 25 bp, Homo sapien
ctcagctggtgaaggttcctctgca

SEQ ID NO: 3162152 - DNA, 25 bp, Homo sapien
agcaggcttggctgtagcaggctca

SEQ ID NO: 3162153 - DNA, 25 bp, Homo sapien
caggctcagctggtgaaggttcctc

SEQ ID NO: 3162154 - DNA, 25 bp, Homo sapien
tagcaggctcagctggtgaaggttc

SEQ ID NO: 3162155 - DNA, 25 bp, Homo sapien
gctgacgtttacaggcagagtacct

SEQ ID NO: 3162156 - DNA, 25 bp, Homo sapien
ccatggcttggtgcaagggaaaaca

SEQ ID NO: 3162157 - DNA, 25 bp, Homo sapien
acaggaagcaaggtaggtggtctct

SEQ ID NO: 3162158 - DNA, 25 bp, Homo sapien
taaaatagcctaattccttgggtca

SEQ ID NO: 3162159 - DNA, 25 bp, Homo sapien
tgaacccatggtactcttctagaga

SEQ ID NO: 3162160 - DNA, 25 bp, Homo sapien
aatgaacccatggtactcttctaga

SEQ ID NO: 3162161 - DNA, 25 bp, Homo sapien
agaaatgaacccatggtactcttct

SEQ ID NO: 3162162 - DNA, 25 bp, Homo sapien
gaacccatggtactcttctagagaa

SEQ ID NO: 3162163 - DNA, 25 bp, Homo sapien
tagtcattcatacatcagggcaaag

SEQ ID NO: 3162164 - DNA, 25 bp, Homo sapien
ccatagcgtagttttcatccagacc

SEQ ID NO: 3162165 - DNA, 25 bp, Homo sapien
tccaggctaggctgaatgattgcca

SEQ ID NO: 3162166 - DNA, 25 bp, Homo sapien
ttaataggctattctggcagggcac

SEQ ID NO: 3162167 - DNA, 25 bp, Homo sapien
ccagtggctaaagggaacgctatac

SEQ ID NO: 3162168 - DNA, 25 bp, Homo sapien
tactttcacaactgacagagcagaa

SEQ ID NO: 3162169 - DNA, 25 bp, Homo sapien
tagaagaaaggatgtatagtgggcc

SEQ ID NO: 3162170 - DNA, 25 bp, Homo sapien
tagtgggccatctggcaatcactgg

SEQ ID NO: 3162171 - DNA, 25 bp, Homo sapien
aaaaatgaagatctgttgtatgcca

SEQ ID NO: 3162172 - DNA, 25 bp, Homo sapien
ttttcttctgaaggtaggtgttcaa

SEQ ID NO: 3162173 - DNA, 25 bp, Homo sapien
tcatcacttaaatcaaggtcactta

SEQ ID NO: 3162174 - DNA, 25 bp, Homo sapien
ctgttgtatgccagaggattcagtg

SEQ ID NO: 3162175 - DNA, 25 bp, Homo sapien
tttaatatgaacgttgttttgatca

SEQ ID NO: 3162176 - DNA, 25 bp, Homo sapien
tatagttaggtgtttaatatgaacg

SEQ ID NO: 3162177 - DNA, 25 bp, Homo sapien
cgttgttttgatcatattcatggtc

SEQ ID NO: 3162178 - DNA, 25 bp, Homo sapien
ctattctatagttaggtgtttaata

SEQ ID NO: 3162179 - DNA, 25 bp, Homo sapien
gctcccaggaatccaagaagaatta

SEQ ID NO: 3162180 - DNA, 25 bp, Homo sapien
caatgtggctcccaggaatccaaga

SEQ ID NO: 3162181 - DNA, 25 bp, Homo sapien
tggggctgacaatgtggctcccagg

SEQ ID NO: 3162182 - DNA, 25 bp, Homo sapien
gaatccaagaagaattataattttc

SEQ ID NO: 3162183 - DNA, 25 bp, Homo sapien
ctcattgctattgctggcagacatg

SEQ ID NO: 3162184 - DNA, 25 bp, Homo sapien
ttgctggcagacatgagacgctgtg

SEQ ID NO: 3162185 - DNA, 25 bp, Homo sapien
gcagacatgagacgctgtgggataa

SEQ ID NO: 3162186 - DNA, 25 bp, Homo sapien
tgctattgctggcagacatgagacg

SEQ ID NO: 3162187 - DNA, 25 bp, Homo sapien
caaaagttgaccattattaagatta

SEQ ID NO: 3162188 - DNA, 25 bp, Homo sapien
gcaaaagttgaccattattaagatt

SEQ ID NO: 3162189 - DNA, 25 bp, Homo sapien
gcaaatgctaaattcccgatggcca

SEQ ID NO: 3162190 - DNA, 25 bp, Homo sapien
aaggacagcatcttgattcattttg

SEQ ID NO: 3162191 - DNA, 25 bp, Homo sapien
attcccgatggccatgagaaatatg

SEQ ID NO: 3162192 - DNA, 25 bp, Homo sapien
ttgaaccaagcaaataatacgaagc

SEQ ID NO: 3162193 - DNA, 25 bp, Homo sapien
gtggaatccatgaattaagtgggcc

SEQ ID NO: 3162194 - DNA, 25 bp, Homo sapien
ttgggagcagtccagcaaactggtc

SEQ ID NO: 3162195 - DNA, 25 bp, Homo sapien
gagtcctggaatttgagcctgctgc

SEQ ID NO: 3162196 - DNA, 25 bp, Homo sapien
caaactggtctagagctgataaaga

SEQ ID NO: 3162197 - DNA, 25 bp, Homo sapien
cctggttgtgtctgaggcggtgttt

SEQ ID NO: 3162198 - DNA, 25 bp, Homo sapien
aagggatcaacttggcctgcctggg

SEQ ID NO: 3162199 - DNA, 25 bp, Homo sapien
tgggctccttgggcaaaactggcct

SEQ ID NO: 3162200 - DNA, 25 bp, Homo sapien
aggcggtgtttgaagctgtaaggga

SEQ ID NO: 3162201 - DNA, 25 bp, Homo sapien
ttttgaaggagaatacatagggcat

SEQ ID NO: 3162202 - DNA, 25 bp, Homo sapien
cattttgaaggagaatacatagggc

SEQ ID NO: 3162203 - DNA, 25 bp, Homo sapien
gcattttgaaggagaatacataggg

SEQ ID NO: 3162204 - DNA, 25 bp, Homo sapien
attttgaaggagaatacatagggca

SEQ ID NO: 3162205 - DNA, 25 bp, Homo sapien
ttctgcagaatgtggtattagatgt

SEQ ID NO: 3162206 - DNA, 25 bp, Homo sapien
tatttttgagaatcatcattctgca

SEQ ID NO: 3162207 - DNA, 25 bp, Homo sapien
tttttgagaatcatcattctgcaga

SEQ ID NO: 3162208 - DNA, 25 bp, Homo sapien
tctgcagaatgtggtattagatgtt

SEQ ID NO: 3162209 - DNA, 25 bp, Homo sapien
taaaaagagaaggatacaagagatt

SEQ ID NO: 3162210 - DNA, 25 bp, Homo sapien
aaaagagaaggatacaagagattcc

SEQ ID NO: 3162211 - DNA, 25 bp, Homo sapien
aaaaagagaaggatacaagagattc

SEQ ID NO: 3162212 - DNA, 25 bp, Homo sapien
aaagagaaggatacaagagattcca

SEQ ID NO: 3162213 - DNA, 25 bp, Homo sapien
atgtaaactggatagtattgaaaca

SEQ ID NO: 3162214 - DNA, 25 bp, Homo sapien
tcccagggtaggaccatgtaaactg

SEQ ID NO: 3162215 - DNA, 25 bp, Homo sapien
taggaccatgtaaactggatagtat

SEQ ID NO: 3162216 - DNA, 25 bp, Homo sapien
gaccttggaactgtttgctgaggtt

SEQ ID NO: 3162217 - DNA, 25 bp, Homo sapien
ggccttgattctattgaagtccact

SEQ ID NO: 3162218 - DNA, 25 bp, Homo sapien
tttcattggctaaaaatccagccct

SEQ ID NO: 3162219 - DNA, 25 bp, Homo sapien
ttcgaggttattcagctttttggcc

SEQ ID NO: 3162220 - DNA, 25 bp, Homo sapien
caaatgatttatagccgagaacact

SEQ ID NO: 3162221 - DNA, 25 bp, Homo sapien
agttgtggaatgtatccaaattgag

SEQ ID NO: 3162222 - DNA, 25 bp, Homo sapien
ttgtggaatgtatccaaattgagca

SEQ ID NO: 3162223 - DNA, 25 bp, Homo sapien
tgtggaatgtatccaaattgagcat

SEQ ID NO: 3162224 - DNA, 25 bp, Homo sapien
tggaatgtatccaaattgagcatag

SEQ ID NO: 3162225 - DNA, 25 bp, Homo sapien
ggggatcaaaagctagttgctgctg

SEQ ID NO: 3162226 - DNA, 25 bp, Homo sapien
tgtgcctagttggggatcaaaagct

SEQ ID NO: 3162227 - DNA, 25 bp, Homo sapien
atcaaaagctagttgctgctgtcct

SEQ ID NO: 3162228 - DNA, 25 bp, Homo sapien
ggatcaaaagctagttgctgctgtc

SEQ ID NO: 3162229 - DNA, 25 bp, Homo sapien
aaacattggttgtgctgggttttgg

SEQ ID NO: 3162230 - DNA, 25 bp, Homo sapien
tgtaaatatggtatctcttctcctg

SEQ ID NO: 3162231 - DNA, 25 bp, Homo sapien
aagttgagggcatgaaaactcctgc

SEQ ID NO: 3162232 - DNA, 25 bp, Homo sapien
tgtcatgtctaaagttgatcgcttc

SEQ ID NO: 3162233 - DNA, 25 bp, Homo sapien
atggttcccttaggctgtcagtctt

SEQ ID NO: 3162234 - DNA, 25 bp, Homo sapien
gttcccttaggctgtcagtcttgtc

SEQ ID NO: 3162235 - DNA, 25 bp, Homo sapien
ggttcccttaggctgtcagtcttgt

SEQ ID NO: 3162236 - DNA, 25 bp, Homo sapien
ttatggttcccttaggctgtcagtc

SEQ ID NO: 3162237 - DNA, 25 bp, Homo sapien
atgtctgaatgatcagggcaacttc

SEQ ID NO: 3162238 - DNA, 25 bp, Homo sapien
aaaatgtctgaatgatcagggcaac

SEQ ID NO: 3162239 - DNA, 25 bp, Homo sapien
caaaatgtctgaatgatcagggcaa

SEQ ID NO: 3162240 - DNA, 25 bp, Homo sapien
aaatgtctgaatgatcagggcaact

SEQ ID NO: 3162241 - DNA, 25 bp, Homo sapien
caatgataggatatttgaagagaca

SEQ ID NO: 3162242 - DNA, 25 bp, Homo sapien
taagacaagactcattacatgattg

SEQ ID NO: 3162243 - DNA, 25 bp, Homo sapien
tattccaaagaactgatactagtat

SEQ ID NO: 3162244 - DNA, 25 bp, Homo sapien
tactagtattgaggaagctaatagc

SEQ ID NO: 3162245 - DNA, 25 bp, Homo sapien
caacactcatcatacatccaatgac

SEQ ID NO: 3162246 - DNA, 25 bp, Homo sapien
tacttcatcagttccaatcacaaca

SEQ ID NO: 3162247 - DNA, 25 bp, Homo sapien
gcatcatttactaatgcaattatcc

SEQ ID NO: 3162248 - DNA, 25 bp, Homo sapien
tcttcatgggtactaccattttgca

SEQ ID NO: 3162249 - DNA, 25 bp, Homo sapien
atccagagttgacagcttcaccttg

SEQ ID NO: 3162250 - DNA, 25 bp, Homo sapien
aatccagagttgacagcttcacctt

SEQ ID NO: 3162251 - DNA, 25 bp, Homo sapien
gaatctgaagaggtgtcaattccca

SEQ ID NO: 3162252 - DNA, 25 bp, Homo sapien
ttgtagaatctgaagaggtgtcaat

SEQ ID NO: 3162253 - DNA, 25 bp, Homo sapien
aatctgaagaggtgtcaattcccaa

SEQ ID NO: 3162254 - DNA, 25 bp, Homo sapien
tagaatctgaagaggtgtcaattcc

SEQ ID NO: 3162255 - DNA, 25 bp, Homo sapien
tatgagaaatggcaagtgactggcc

SEQ ID NO: 3162256 - DNA, 25 bp, Homo sapien
ctgttttatatactcaaaggtataa

SEQ ID NO: 3162257 - DNA, 25 bp, Homo sapien
gccctggaatattgtagctgtttta

SEQ ID NO: 3162258 - DNA, 25 bp, Homo sapien
tctttctctctgacgctgttatgag

SEQ ID NO: 3162259 - DNA, 25 bp, Homo sapien
cagccactgccaagatggctgtgat

SEQ ID NO: 3162260 - DNA, 25 bp, Homo sapien
ctgtgatcaggaggagaactttctt

SEQ ID NO: 3162261 - DNA, 25 bp, Homo sapien
gccactgccaagatggctgtgatca

SEQ ID NO: 3162262 - DNA, 25 bp, Homo sapien
atggctgtgatcaggaggagaactt

SEQ ID NO: 3162263 - DNA, 25 bp, Homo sapien
tttctcgttcctggtcttgagagac

SEQ ID NO: 3162264 - DNA, 25 bp, Homo sapien
tttttctcgttcctggtcttgagag

SEQ ID NO: 3162265 - DNA, 25 bp, Homo sapien
cttttttctcgttcctggtcttgag

SEQ ID NO: 3162266 - DNA, 25 bp, Homo sapien
tcttttttctcgttcctggtcttga

SEQ ID NO: 3162267 - DNA, 25 bp, Homo sapien
cgaaatggatatgggtaagggaaca

SEQ ID NO: 3162268 - DNA, 25 bp, Homo sapien
taaaccatggaaatcttggaaatgg

SEQ ID NO: 3162269 - DNA, 25 bp, Homo sapien
aatggaattggtggaagtgggcgaa

SEQ ID NO: 3162270 - DNA, 25 bp, Homo sapien
gaagctaattcatcgctgtcactga

SEQ ID NO: 3162271 - DNA, 25 bp, Homo sapien
cagattcaggtattggaataggaaa

SEQ ID NO: 3162272 - DNA, 25 bp, Homo sapien
gggcagattcaggtattggaatagg

SEQ ID NO: 3162273 - DNA, 25 bp, Homo sapien
aaggggagttgtaggggcagattca

SEQ ID NO: 3162274 - DNA, 25 bp, Homo sapien
tcaggtattggaataggaaaattac

SEQ ID NO: 3162275 - DNA, 25 bp, Homo sapien
caggtttatcgtgacttttccttct

SEQ ID NO: 3162276 - DNA, 25 bp, Homo sapien
atatctagttcaaggactgggaaac

SEQ ID NO: 3162277 - DNA, 25 bp, Homo sapien
cagtcctctgggttctaatttaatc

SEQ ID NO: 3162278 - DNA, 25 bp, Homo sapien
ttatagtagattagatctatagtct

SEQ ID NO: 3162279 - DNA, 25 bp, Homo sapien
agcaaaggtctttagtggtaagtag

SEQ ID NO: 3162280 - DNA, 25 bp, Homo sapien
ttaaagaagatcactaaagatattg

SEQ ID NO: 3162281 - DNA, 25 bp, Homo sapien
gagaatgctgtgtgctatttcaatt

SEQ ID NO: 3162282 - DNA, 25 bp, Homo sapien
tgattcttcaaggaagtggctcaat

SEQ ID NO: 3162283 - DNA, 25 bp, Homo sapien
ctaaagatattgactagagaatgct

SEQ ID NO: 3162284 - DNA, 25 bp, Homo sapien
acttttgtcacatgctgtaggacag

SEQ ID NO: 3162285 - DNA, 25 bp, Homo sapien
aaggcttattgtgcaagtagaatct

SEQ ID NO: 3162286 - DNA, 25 bp, Homo sapien
gataatcaacttatggagacaaagg

SEQ ID NO: 3162287 - DNA, 25 bp, Homo sapien
gagacaaaggcagtcattctgaccc

SEQ ID NO: 3162288 - DNA, 25 bp, Homo sapien
ttggcctgtcagctgtagagaagac

SEQ ID NO: 3162289 - DNA, 25 bp, Homo sapien
cagtaggttgagttggcctgtcagc

SEQ ID NO: 3162290 - DNA, 25 bp, Homo sapien
caggtcttggttggcagtaggttga

SEQ ID NO: 3162291 - DNA, 25 bp, Homo sapien
cagtcaggtcttggttggcagtagg

SEQ ID NO: 3162292 - DNA, 25 bp, Homo sapien
aaaaggcagggttaatgccagggca

SEQ ID NO: 3162293 - DNA, 25 bp, Homo sapien
cagggttaatgccagggcattgaca

SEQ ID NO: 3162294 - DNA, 25 bp, Homo sapien
aaggcagggttaatgccagggcatt

SEQ ID NO: 3162295 - DNA, 25 bp, Homo sapien
caaaaaaggcagggttaatgccagg

SEQ ID NO: 3162296 - DNA, 25 bp, Homo sapien
gtttctggttttgaacctccacagc

SEQ ID NO: 3162297 - DNA, 25 bp, Homo sapien
tgtttctggttttgaacctccacag

SEQ ID NO: 3162298 - DNA, 25 bp, Homo sapien
ttgtttctggttttgaacctccaca

SEQ ID NO: 3162299 - DNA, 25 bp, Homo sapien
tgctggttgtttctggttttgaacc

SEQ ID NO: 3162300 - DNA, 25 bp, Homo sapien
atagaatggtctttcatcattctca

SEQ ID NO: 3162301 - DNA, 25 bp, Homo sapien
ttctgatagaatggtctttcatcat

SEQ ID NO: 3162302 - DNA, 25 bp, Homo sapien
agaatggtctttcatcattctcatg

SEQ ID NO: 3162303 - DNA, 25 bp, Homo sapien
atggtctttcatcattctcatggca

SEQ ID NO: 3162304 - DNA, 25 bp, Homo sapien
tgccgtaggtggagtaactgcaact

SEQ ID NO: 3162305 - DNA, 25 bp, Homo sapien
gagtgactacactgtccaccgttgg

SEQ ID NO: 3162306 - DNA, 25 bp, Homo sapien
gcaggtttgggcgacgtaccacagt

SEQ ID NO: 3162307 - DNA, 25 bp, Homo sapien
gcatgtggcctaactacagctgggt

SEQ ID NO: 3162308 - DNA, 25 bp, Homo sapien
ctgcgttgtgttctttgatatttcc

SEQ ID NO: 3162309 - DNA, 25 bp, Homo sapien
gcgttgtgttctttgatatttcctt

SEQ ID NO: 3162310 - DNA, 25 bp, Homo sapien
tgtgttctttgatatttccttggtg

SEQ ID NO: 3162311 - DNA, 25 bp, Homo sapien
tgttctttgatatttccttggtgtt

SEQ ID NO: 3162312 - DNA, 25 bp, Homo sapien
aatcagttggctttattgtgcaaga

SEQ ID NO: 3162313 - DNA, 25 bp, Homo sapien
agtagtaatttggtttcagcaagtc

SEQ ID NO: 3162314 - DNA, 25 bp, Homo sapien
atcagttggctttattgtgcaagaa

SEQ ID NO: 3162315 - DNA, 25 bp, Homo sapien
tgaagtagtaatttggtttcagcaa

SEQ ID NO: 3162316 - DNA, 25 bp, Homo sapien
ttatagcagttttggtgagagatgc

SEQ ID NO: 3162317 - DNA, 25 bp, Homo sapien
tatagatttggtaacttttgactgt

SEQ ID NO: 3162318 - DNA, 25 bp, Homo sapien
tgatgtcctcttgggtatagatttg

SEQ ID NO: 3162319 - DNA, 25 bp, Homo sapien
tgtttaggcttagcagctgtcttcc

SEQ ID NO: 3162320 - DNA, 25 bp, Homo sapien
tttgccaaagtgcagctttcgcagc

SEQ ID NO: 3162321 - DNA, 25 bp, Homo sapien
tgtttgccaaagtgcagctttcgca

SEQ ID NO: 3162322 - DNA, 25 bp, Homo sapien
gtttgccaaagtgcagctttcgcag

SEQ ID NO: 3162323 - DNA, 25 bp, Homo sapien
ctgtttttgaagtggagctgtagcc

SEQ ID NO: 3162324 - DNA, 25 bp, Homo sapien
gatgtaggaactagaggctcctcac

SEQ ID NO: 3162325 - DNA, 25 bp, Homo sapien
gtgttacctgtggaaactttagatg

SEQ ID NO: 3162326 - DNA, 25 bp, Homo sapien
gctgtagcctgggaaattgttttgg

SEQ ID NO: 3162327 - DNA, 25 bp, Homo sapien
cgaggacttaaagggcccatcttct

SEQ ID NO: 3162328 - DNA, 25 bp, Homo sapien
tcaagtaagttggagacgaggactt

SEQ ID NO: 3162329 - DNA, 25 bp, Homo sapien
tcgatgtggacaaggtatgggctta

SEQ ID NO: 3162330 - DNA, 25 bp, Homo sapien
tattgaacatgaggatggtggatga

SEQ ID NO: 3162331 - DNA, 25 bp, Homo sapien
tcattattatctccaatggctgccg

SEQ ID NO: 3162332 - DNA, 25 bp, Homo sapien
taatttgagacatgctagtagtgat

SEQ ID NO: 3162333 - DNA, 25 bp, Homo sapien
cagagtgggtgatgattgagataca

SEQ ID NO: 3162334 - DNA, 25 bp, Homo sapien
cttgcctggtggtagtgtaatctgc

SEQ ID NO: 3162335 - DNA, 25 bp, Homo sapien
tcgtaggtatactcttcagggacag

SEQ ID NO: 3162336 - DNA, 25 bp, Homo sapien
tagagcctccatagtgatttcagtg

SEQ ID NO: 3162337 - DNA, 25 bp, Homo sapien
tggtcccaggcagagtcatgtcgag

SEQ ID NO: 3162338 - DNA, 25 bp, Homo sapien
tattggtggcactggtagcatcatc

SEQ ID NO: 3162339 - DNA, 25 bp, Homo sapien
gtggaactttcagcaagctctgggt

SEQ ID NO: 3162340 - DNA, 25 bp, Homo sapien
tggtggaactttcagcaagctctgg

SEQ ID NO: 3162341 - DNA, 25 bp, Homo sapien
ttatggtggaactttcagcaagctc

SEQ ID NO: 3162342 - DNA, 25 bp, Homo sapien
tatggtggaactttcagcaagctct

SEQ ID NO: 3162343 - DNA, 25 bp, Homo sapien
cccgatgtatgcattgggacctgat

SEQ ID NO: 3162344 - DNA, 25 bp, Homo sapien
aggtgtttgaaggaatagtgatagc

SEQ ID NO: 3162345 - DNA, 25 bp, Homo sapien
tagtgatagcttggaggaaaggacc

SEQ ID NO: 3162346 - DNA, 25 bp, Homo sapien
ggatttctcagtccaattacccttg

SEQ ID NO: 3162347 - DNA, 25 bp, Homo sapien
ctattgcactgaggatatatgattt

SEQ ID NO: 3162348 - DNA, 25 bp, Homo sapien
catcttgtttacgtttataatcacc

SEQ ID NO: 3162349 - DNA, 25 bp, Homo sapien
cacctaaagagggagctcttggttt

SEQ ID NO: 3162350 - DNA, 25 bp, Homo sapien
aaaacctttgaggtaatctgagagc

SEQ ID NO: 3162351 - DNA, 25 bp, Homo sapien
tgtgctgaagtaactgcataagcat

SEQ ID NO: 3162352 - DNA, 25 bp, Homo sapien
taggcactgtggatgtagcacctgt

SEQ ID NO: 3162353 - DNA, 25 bp, Homo sapien
tggtggcaccaatccctagggttgt

SEQ ID NO: 3162354 - DNA, 25 bp, Homo sapien
caacaggtgtggagactataggagc

SEQ ID NO: 3162355 - DNA, 25 bp, Homo sapien
tccgaggatgaggttgtagcacacg

SEQ ID NO: 3162356 - DNA, 25 bp, Homo sapien
tattgctgtggacttagacgattgt

SEQ ID NO: 3162357 - DNA, 25 bp, Homo sapien
cattgctgttgccttagttggatct

SEQ ID NO: 3162358 - DNA, 25 bp, Homo sapien
gctttagctactgctgcctgattta

SEQ ID NO: 3162359 - DNA, 25 bp, Homo sapien
tcttttgcctgatttgactgttcct

SEQ ID NO: 3162360 - DNA, 25 bp, Homo sapien
cagatttggtctttgcaagatgtgt

SEQ ID NO: 3162361 - DNA, 25 bp, Homo sapien
gaaatgcagattgtccttttttaga

SEQ ID NO: 3162362 - DNA, 25 bp, Homo sapien
tttccattttgcctgctaaaggagg

SEQ ID NO: 3162363 - DNA, 25 bp, Homo sapien
gtgtcttgaacagatttagatcctt

SEQ ID NO: 3162364 - DNA, 25 bp, Homo sapien
aacagaggcatgagaatgtgataac

SEQ ID NO: 3162365 - DNA, 25 bp, Homo sapien
gaacagaggcatgagaatgtgataa

SEQ ID NO: 3162366 - DNA, 25 bp, Homo sapien
ttacagaaaggtggtttatgaaatg

SEQ ID NO: 3162367 - DNA, 25 bp, Homo sapien
tggtttacagaaaggtggtttatga

SEQ ID NO: 3162368 - DNA, 25 bp, Homo sapien
gaaatgattgatgccgttggtgatg

SEQ ID NO: 3162369 - DNA, 25 bp, Homo sapien
tggtttatgaaatgattgatgccgt

SEQ ID NO: 3162370 - DNA, 25 bp, Homo sapien
cgtagagtcagttgcaccagttgtg

SEQ ID NO: 3162371 - DNA, 25 bp, Homo sapien
caatgaggcagcaccactggtagtg

SEQ ID NO: 3162372 - DNA, 25 bp, Homo sapien
gcttgcagggttgtggagccacctc

SEQ ID NO: 3162373 - DNA, 25 bp, Homo sapien
ggtggtggcacccaatgcagctatt

SEQ ID NO: 3162374 - DNA, 25 bp, Homo sapien
cactgtggctgaagttgtagccata

SEQ ID NO: 3162375 - DNA, 25 bp, Homo sapien
gtagcactgtggctgaagttgtagc

SEQ ID NO: 3162376 - DNA, 25 bp, Homo sapien
agtaccggatatggctgtgctggca

SEQ ID NO: 3162377 - DNA, 25 bp, Homo sapien
agttgttgtggcagtaccggatatg

SEQ ID NO: 3162378 - DNA, 25 bp, Homo sapien
ctgggtggtagtttcactcagggtg

SEQ ID NO: 3162379 - DNA, 25 bp, Homo sapien
tgggtggtagtttcactcagggtgg

SEQ ID NO: 3162380 - DNA, 25 bp, Homo sapien
tcagggtggtcaacacaccaggctc

SEQ ID NO: 3162381 - DNA, 25 bp, Homo sapien
gcagaaggttcaattgtggcatctt

SEQ ID NO: 3162382 - DNA, 25 bp, Homo sapien
ctgctgaggacgtagggttagctat

SEQ ID NO: 3162383 - DNA, 25 bp, Homo sapien
gcaatagctgttgtcctggtagctg

SEQ ID NO: 3162384 - DNA, 25 bp, Homo sapien
cagcttcggtgattgtgtcatttgc

SEQ ID NO: 3162385 - DNA, 25 bp, Homo sapien
ctacggttgtagtggtagatcctac

SEQ ID NO: 3162386 - DNA, 25 bp, Homo sapien
acataaaccactggagttgtggagg

SEQ ID NO: 3162387 - DNA, 25 bp, Homo sapien
gacataaaccactggagttgtggag

SEQ ID NO: 3162388 - DNA, 25 bp, Homo sapien
tgtcccctggacttgtagcatcagg

SEQ ID NO: 3162389 - DNA, 25 bp, Homo sapien
tggctgctacaggaattacggttgt

SEQ ID NO: 3162390 - DNA, 25 bp, Homo sapien
gtaccagaagacgtgttaccagtgc

SEQ ID NO: 3162391 - DNA, 25 bp, Homo sapien
ggcaacacttgtggaggctgcagtt

SEQ ID NO: 3162392 - DNA, 25 bp, Homo sapien
gtagcttccttcagtagtggcctca

SEQ ID NO: 3162393 - DNA, 25 bp, Homo sapien
gatgaggctgtatttgtggtgacca

SEQ ID NO: 3162394 - DNA, 25 bp, Homo sapien
cagatagtgcagcagaggtggttcc

SEQ ID NO: 3162395 - DNA, 25 bp, Homo sapien
cattgtgatagctggagcactgtag

SEQ ID NO: 3162396 - DNA, 25 bp, Homo sapien
tggtcacagtcaggactaggatctt

SEQ ID NO: 3162397 - DNA, 25 bp, Homo sapien
agatggtcacagtcaggactaggat

SEQ ID NO: 3162398 - DNA, 25 bp, Homo sapien
tcacagtcaggactaggatcttcat

SEQ ID NO: 3162399 - DNA, 25 bp, Homo sapien
gatggtcacagtcaggactaggatc

SEQ ID NO: 3162400 - DNA, 25 bp, Homo sapien
gactgaacttgctggatagctgtct

SEQ ID NO: 3162401 - DNA, 25 bp, Homo sapien
ttgtttttatgatggatgagactga

SEQ ID NO: 3162402 - DNA, 25 bp, Homo sapien
tagaccctgagtagctatctgaatc

SEQ ID NO: 3162403 - DNA, 25 bp, Homo sapien
gacaaaggcagattggcagacaaat

SEQ ID NO: 3162404 - DNA, 25 bp, Homo sapien
tgttgggtgccaagttggaaattgt

SEQ ID NO: 3162405 - DNA, 25 bp, Homo sapien
gggtgccaagttggaaattgtggta

SEQ ID NO: 3162406 - DNA, 25 bp, Homo sapien
ggaaggtgttgggtgccaagttgga

SEQ ID NO: 3162407 - DNA, 25 bp, Homo sapien
gaaggtgttgggtgccaagttggaa

SEQ ID NO: 3162408 - DNA, 25 bp, Homo sapien
gattagtggcatcatatagaacatc

SEQ ID NO: 3162409 - DNA, 25 bp, Homo sapien
cttccccaggagtagtaaagtatct

SEQ ID NO: 3162410 - DNA, 25 bp, Homo sapien
tacttcagcagtaggtataatacta

SEQ ID NO: 3162411 - DNA, 25 bp, Homo sapien
aaagccactgtcttccgattcaagg

SEQ ID NO: 3162412 - DNA, 25 bp, Homo sapien
aaatgctaggtggaaggaagacagt

SEQ ID NO: 3162413 - DNA, 25 bp, Homo sapien
agtctagggtaatacgttcttccag

SEQ ID NO: 3162414 - DNA, 25 bp, Homo sapien
ggtgttccaggcaacatttgggttc

SEQ ID NO: 3162415 - DNA, 25 bp, Homo sapien
gaagacagtgccatctactgctttc

SEQ ID NO: 3162416 - DNA, 25 bp, Homo sapien
gaagcccagtttgttgcaactttag

SEQ ID NO: 3162417 - DNA, 25 bp, Homo sapien
gatagacatcttggaaatcagcagg

SEQ ID NO: 3162418 - DNA, 25 bp, Homo sapien
tctggaactgttaaggccatctcct

SEQ ID NO: 3162419 - DNA, 25 bp, Homo sapien
tgaggtggcagctattgaagcccag

SEQ ID NO: 3162420 - DNA, 25 bp, Homo sapien
gaggaattagcaattaataaggtac

SEQ ID NO: 3162421 - DNA, 25 bp, Homo sapien
taatggtagaggaattagcaattaa

SEQ ID NO: 3162422 - DNA, 25 bp, Homo sapien
tggtagaggaattagcaattaataa

SEQ ID NO: 3162423 - DNA, 25 bp, Homo sapien
tagaggaattagcaattaataaggt

SEQ ID NO: 3162424 - DNA, 25 bp, Homo sapien
gagaatgaatgaaaggggcaaccga

SEQ ID NO: 3162425 - DNA, 25 bp, Homo sapien
acaagttttgggacctctgccaaag

SEQ ID NO: 3162426 - DNA, 25 bp, Homo sapien
caagttttgggacctctgccaaaga

SEQ ID NO: 3162427 - DNA, 25 bp, Homo sapien
gtgatgatggctattgtcaaagctt

SEQ ID NO: 3162428 - DNA, 25 bp, Homo sapien
agacagtgatgatggctattgtcaa

SEQ ID NO: 3162429 - DNA, 25 bp, Homo sapien
cagtgatgatggctattgtcaaagc

SEQ ID NO: 3162430 - DNA, 25 bp, Homo sapien
ttgagagacagtgatgatggctatt

SEQ ID NO: 3162431 - DNA, 25 bp, Homo sapien
cctttttcaagtgtgtcttcttctt

SEQ ID NO: 3162432 - DNA, 25 bp, Homo sapien
cataatgcttacctcattttgggaa

SEQ ID NO: 3162433 - DNA, 25 bp, Homo sapien
tgcaataggtatagcataaatataa

SEQ ID NO: 3162434 - DNA, 25 bp, Homo sapien
tttattgggatataaaatatggtgt

SEQ ID NO: 3162435 - DNA, 25 bp, Homo sapien
tttgccagagtagtcccaagctgaa

SEQ ID NO: 3162436 - DNA, 25 bp, Homo sapien
tacagaagactccttgaggcctcat

SEQ ID NO: 3162437 - DNA, 25 bp, Homo sapien
tctcaaattcaggtcggtcagctct

SEQ ID NO: 3162438 - DNA, 25 bp, Homo sapien
cactatgatcagtagggatagcacc

SEQ ID NO: 3162439 - DNA, 25 bp, Homo sapien
tatcatgatcctttgaaggggtcac

SEQ ID NO: 3162440 - DNA, 25 bp, Homo sapien
tgtgatgatgtctgccaactgcagg

SEQ ID NO: 3162441 - DNA, 25 bp, Homo sapien
gatagtccccacttggtaggcaaca

SEQ ID NO: 3162442 - DNA, 25 bp, Homo sapien
gggtcacttcagctaaatccatttc

SEQ ID NO: 3162443 - DNA, 25 bp, Homo sapien
taaggatgaaaggatcaactcccac

SEQ ID NO: 3162444 - DNA, 25 bp, Homo sapien
gcaggatctaccagaggaataggaa

SEQ ID NO: 3162445 - DNA, 25 bp, Homo sapien
atcattttcaccaagaggaagtgcc

SEQ ID NO: 3162446 - DNA, 25 bp, Homo sapien
gagctgacaccatctaccttaggca

SEQ ID NO: 3162447 - DNA, 25 bp, Homo sapien
ttccctgttggaaaaaacacatctg

SEQ ID NO: 3162448 - DNA, 25 bp, Homo sapien
cataagagtttgtgatggacctctc

SEQ ID NO: 3162449 - DNA, 25 bp, Homo sapien
gaaatggtttcttcgtcagatagac

SEQ ID NO: 3162450 - DNA, 25 bp, Homo sapien
agagaaccatcatcgagcccagtgg

SEQ ID NO: 3162451 - DNA, 25 bp, Homo sapien
tacttctctggagctcaacatttgg

SEQ ID NO: 3162452 - DNA, 25 bp, Homo sapien
cagtagataagggagtatgagatcc

SEQ ID NO: 3162453 - DNA, 25 bp, Homo sapien
ctttcaatggattctcagtgacatg

SEQ ID NO: 3162454 - DNA, 25 bp, Homo sapien
ctttgtcagaatcagggtttacttc

SEQ ID NO: 3162455 - DNA, 25 bp, Homo sapien
gggtgaatcatcattctgggtgact

SEQ ID NO: 3162456 - DNA, 25 bp, Homo sapien
ctttccatagggcttggcaatataa

SEQ ID NO: 3162457 - DNA, 25 bp, Homo sapien
cacttccacttgggctgttgtcttc

SEQ ID NO: 3162458 - DNA, 25 bp, Homo sapien
catgaagaataatcatgatgtcact

SEQ ID NO: 3162459 - DNA, 25 bp, Homo sapien
tgcttggccgtgtgatccagtggaa

SEQ ID NO: 3162460 - DNA, 25 bp, Homo sapien
cagccatagtgtgagtcgtttccat

SEQ ID NO: 3162461 - DNA, 25 bp, Homo sapien
cattagggctgaggattacactttc

SEQ ID NO: 3162462 - DNA, 25 bp, Homo sapien
gctcttccgaagtgtgctggtctca

SEQ ID NO: 3162463 - DNA, 25 bp, Homo sapien
ttctgtgtggaaatcttttactaaa

SEQ ID NO: 3162464 - DNA, 25 bp, Homo sapien
tctgtgtggaaatcttttactaaaa

SEQ ID NO: 3162465 - DNA, 25 bp, Homo sapien
aaaattagcatattcaatcattgtc

SEQ ID NO: 3162466 - DNA, 25 bp, Homo sapien
gccaaggagtgaggcttgaagtcca

SEQ ID NO: 3162467 - DNA, 25 bp, Homo sapien
ctgcagttggaaatttagttgaggc

SEQ ID NO: 3162468 - DNA, 25 bp, Homo sapien
agttggaaatttagttgaggccaag

SEQ ID NO: 3162469 - DNA, 25 bp, Homo sapien
gcagttggaaatttagttgaggcca

SEQ ID NO: 3162470 - DNA, 25 bp, Homo sapien
tatagatcctatgctgagagattct

SEQ ID NO: 3162471 - DNA, 25 bp, Homo sapien
tctccatagctagactgagatctgt

SEQ ID NO: 3162472 - DNA, 25 bp, Homo sapien
aatttagcagctggatcgtcttgat

SEQ ID NO: 3162473 - DNA, 25 bp, Homo sapien
cacttgtggagaggctattaagctc

SEQ ID NO: 3162474 - DNA, 25 bp, Homo sapien
gaaaagttaatatggaatcaattga

SEQ ID NO: 3162475 - DNA, 25 bp, Homo sapien
aatatggaatcaattgaagagattc

SEQ ID NO: 3162476 - DNA, 25 bp, Homo sapien
aaagttaatatggaatcaattgaag

SEQ ID NO: 3162477 - DNA, 25 bp, Homo sapien
gttaatatggaatcaattgaagaga

SEQ ID NO: 3162478 - DNA, 25 bp, Homo sapien
gaagagctttgatcattagacctag

SEQ ID NO: 3162479 - DNA, 25 bp, Homo sapien
catggtaggccataagttccagtgg

SEQ ID NO: 3162480 - DNA, 25 bp, Homo sapien
cagtgggagtgtctataatggtccc

SEQ ID NO: 3162481 - DNA, 25 bp, Homo sapien
taatggtcccttctttggtagtgac

SEQ ID NO: 3162482 - DNA, 25 bp, Homo sapien
ggaactacttcaattgatatatctt

SEQ ID NO: 3162483 - DNA, 25 bp, Homo sapien
aaaggaactacttcaattgatatat

SEQ ID NO: 3162484 - DNA, 25 bp, Homo sapien
ctataaatgtcttgtccccatatct

SEQ ID NO: 3162485 - DNA, 25 bp, Homo sapien
gtcttgtccccatatctactattat

SEQ ID NO: 3162486 - DNA, 25 bp, Homo sapien
tattcaagggcactgtcaacaggca

SEQ ID NO: 3162487 - DNA, 25 bp, Homo sapien
ccactggtgcaaagacatcattatc

SEQ ID NO: 3162488 - DNA, 25 bp, Homo sapien
tatggtctcttctataaggagaaca

SEQ ID NO: 3162489 - DNA, 25 bp, Homo sapien
gaggctgcagcaccggcatagaatt

SEQ ID NO: 3162490 - DNA, 25 bp, Homo sapien
gaagagttggtctccattgcaggcc

SEQ ID NO: 3162491 - DNA, 25 bp, Homo sapien
cacagtgctggttggctcattcata

SEQ ID NO: 3162492 - DNA, 25 bp, Homo sapien
ggagttatctctcattaggccaggg

SEQ ID NO: 3162493 - DNA, 25 bp, Homo sapien
cttgctggagtgtttgtgctggacc

SEQ ID NO: 3162494 - DNA, 25 bp, Homo sapien
tctttagcttcgaactctgatgatg

SEQ ID NO: 3162495 - DNA, 25 bp, Homo sapien
cactgtggtatatagtgcttgagac

SEQ ID NO: 3162496 - DNA, 25 bp, Homo sapien
tctaattccaagacagagttatctg

SEQ ID NO: 3162497 - DNA, 25 bp, Homo sapien
tttagagagactatctgaagcagcc

SEQ ID NO: 3162498 - DNA, 25 bp, Homo sapien
ctatttaggaattatagcttggtac

SEQ ID NO: 3162499 - DNA, 25 bp, Homo sapien
tcaaatggcagaggcatcaatatca

SEQ ID NO: 3162500 - DNA, 25 bp, Homo sapien
tacagaccaatggaagagcattcag

SEQ ID NO: 3162501 - DNA, 25 bp, Homo sapien
tttcaggtactccaacagacgtagg

SEQ ID NO: 3162502 - DNA, 25 bp, Homo sapien
taggctccgatgctgttgaaattaa

SEQ ID NO: 3162503 - DNA, 25 bp, Homo sapien
cttgcttctggactcagtggtatct

SEQ ID NO: 3162504 - DNA, 25 bp, Homo sapien
ggcactgtgcactctcacaggtctt

SEQ ID NO: 3162505 - DNA, 25 bp, Homo sapien
ctggactcagtggtatctctaggca

SEQ ID NO: 3162506 - DNA, 25 bp, Homo sapien
cactgtgcactctcacaggtcttgc

SEQ ID NO: 3162507 - DNA, 25 bp, Homo sapien
gttggaggatgagaataaattttgg

SEQ ID NO: 3162508 - DNA, 25 bp, Homo sapien
ggaggatgagaataaattttgggca

SEQ ID NO: 3162509 - DNA, 25 bp, Homo sapien
agaataaattttgggcaaaccatct

SEQ ID NO: 3162510 - DNA, 25 bp, Homo sapien
aaattttgggcaaaccatcttcagc

SEQ ID NO: 3162511 - DNA, 25 bp, Homo sapien
catttactgaagtgacgtggtctcc

SEQ ID NO: 3162512 - DNA, 25 bp, Homo sapien
gcctcatcagcagggacattggatt

SEQ ID NO: 3162513 - DNA, 25 bp, Homo sapien
cactgctgtcctttagtgtgccaga

SEQ ID NO: 3162514 - DNA, 25 bp, Homo sapien
tagtgccagtcagagaggtaatttc

SEQ ID NO: 3162515 - DNA, 25 bp, Homo sapien
tcagcagaggtagtgagttcaaaca

SEQ ID NO: 3162516 - DNA, 25 bp, Homo sapien
cagtaagcaaaacagaatgggtctc

SEQ ID NO: 3162517 - DNA, 25 bp, Homo sapien
cgaagtcatatctggattcaacagc

SEQ ID NO: 3162518 - DNA, 25 bp, Homo sapien
cagagtcagttaatgtagccacagc

SEQ ID NO: 3162519 - DNA, 25 bp, Homo sapien
tgaactcatcgggttcttctttcag

SEQ ID NO: 3162520 - DNA, 25 bp, Homo sapien
tcagtagttcaaagatatccgtttc

SEQ ID NO: 3162521 - DNA, 25 bp, Homo sapien
cagttgtggaggtgtcttccttata

SEQ ID NO: 3162522 - DNA, 25 bp, Homo sapien
gtatctaatacagaggtagttccag

SEQ ID NO: 3162523 - DNA, 25 bp, Homo sapien
ttcttagatgttaaggctagctggc

SEQ ID NO: 3162524 - DNA, 25 bp, Homo sapien
ggctagactattgcacaattctaca

SEQ ID NO: 3162525 - DNA, 25 bp, Homo sapien
caattctacatggtatcccttttgt

SEQ ID NO: 3162526 - DNA, 25 bp, Homo sapien
tctacatggtatcccttttgttgct

SEQ ID NO: 3162527 - DNA, 25 bp, Homo sapien
ccatttaagtagtctgtgccagaaa

SEQ ID NO: 3162528 - DNA, 25 bp, Homo sapien
gagtcataagaagagtgtgatattc

SEQ ID NO: 3162529 - DNA, 25 bp, Homo sapien
aaaacagacccatttaagtagtctg

SEQ ID NO: 3162530 - DNA, 25 bp, Homo sapien
tgaagatttatgtccttgaatcgct

SEQ ID NO: 3162531 - DNA, 25 bp, Homo sapien
gagctagtttaactttgggaatctc

SEQ ID NO: 3162532 - DNA, 25 bp, Homo sapien
tcctcagggtaacgttctttcttca

SEQ ID NO: 3162533 - DNA, 25 bp, Homo sapien
tcttggtgccttgaagttatgagtg

SEQ ID NO: 3162534 - DNA, 25 bp, Homo sapien
gttatgagtgttctttaatgcatcc

SEQ ID NO: 3162535 - DNA, 25 bp, Homo sapien
ttcatagttattaataacaccaagt

SEQ ID NO: 3162536 - DNA, 25 bp, Homo sapien
tattaataacaccaagtgccttcat

SEQ ID NO: 3162537 - DNA, 25 bp, Homo sapien
tagttattaataacaccaagtgcct

SEQ ID NO: 3162538 - DNA, 25 bp, Homo sapien
catagttattaataacaccaagtgc

SEQ ID NO: 3162539 - DNA, 25 bp, Homo sapien
tcccataattagcagtgcccataag

SEQ ID NO: 3162540 - DNA, 25 bp, Homo sapien
gcagtgcccataagacactgtttgt

SEQ ID NO: 3162541 - DNA, 25 bp, Homo sapien
cataattagcagtgcccataagaca

SEQ ID NO: 3162542 - DNA, 25 bp, Homo sapien
ggcagttcccataattagcagtgcc

SEQ ID NO: 3162543 - DNA, 25 bp, Homo sapien
gatgggaaatcatcctggctgcatt

SEQ ID NO: 3162544 - DNA, 25 bp, Homo sapien
ctggaatagggtttttcatgggatg

SEQ ID NO: 3162545 - DNA, 25 bp, Homo sapien
tggtccaaagaagttctggaatagg

SEQ ID NO: 3162546 - DNA, 25 bp, Homo sapien
atgagtggtccaaagaagttctgga

SEQ ID NO: 3162547 - DNA, 25 bp, Homo sapien
ttgtgttttcttatgcgcatcaaca

SEQ ID NO: 3162548 - DNA, 25 bp, Homo sapien
gtgttttcttatgcgcatcaacaga

SEQ ID NO: 3162549 - DNA, 25 bp, Homo sapien
tgtgttttcttatgcgcatcaacag

SEQ ID NO: 3162550 - DNA, 25 bp, Homo sapien
tttgtgttttcttatgcgcatcaac

SEQ ID NO: 3162551 - DNA, 25 bp, Homo sapien
ccgtggtggccacaacagttgcagg

SEQ ID NO: 3162552 - DNA, 25 bp, Homo sapien
cattctcaggtggttgtgtaggtcc

SEQ ID NO: 3162553 - DNA, 25 bp, Homo sapien
tcagctgggttagactcagttgccg

SEQ ID NO: 3162554 - DNA, 25 bp, Homo sapien
cagttgccgcagtgtttgtgacagc

SEQ ID NO: 3162555 - DNA, 25 bp, Homo sapien
tgtggaaatattgttgtgtaggata

SEQ ID NO: 3162556 - DNA, 25 bp, Homo sapien
ttgtgtaggatatcaataatgccac

SEQ ID NO: 3162557 - DNA, 25 bp, Homo sapien
taggatatcaataatgccactgaac

SEQ ID NO: 3162558 - DNA, 25 bp, Homo sapien
tgtaggatatcaataatgccactga

SEQ ID NO: 3162559 - DNA, 25 bp, Homo sapien
tctacattgtaatggatcactggct

SEQ ID NO: 3162560 - DNA, 25 bp, Homo sapien
ggttgtgaccaacaaagaatttgag

SEQ ID NO: 3162561 - DNA, 25 bp, Homo sapien
tttgaagtcgaggtgtgatctacat

SEQ ID NO: 3162562 - DNA, 25 bp, Homo sapien
tggcaaaaccaacggacaatttctg

SEQ ID NO: 3162563 - DNA, 25 bp, Homo sapien
ctttgcgtgaggatctgtcttagag

SEQ ID NO: 3162564 - DNA, 25 bp, Homo sapien
gagttgattaacctgctggtcaaaa

SEQ ID NO: 3162565 - DNA, 25 bp, Homo sapien
tctgtcttagagttgattaacctgc

SEQ ID NO: 3162566 - DNA, 25 bp, Homo sapien
gattaacctgctggtcaaaatgact

SEQ ID NO: 3162567 - DNA, 25 bp, Homo sapien
aacacgctgcaagagcccaaaggcc

SEQ ID NO: 3162568 - DNA, 25 bp, Homo sapien
aggcccaagatccaagtcagtgatt

SEQ ID NO: 3162569 - DNA, 25 bp, Homo sapien
tgtgaaacacgctgcaagagcccaa

SEQ ID NO: 3162570 - DNA, 25 bp, Homo sapien
ggcccaagatccaagtcagtgattt

SEQ ID NO: 3162571 - DNA, 25 bp, Homo sapien
gatggggtggtggaacaaatcctgt

SEQ ID NO: 3162572 - DNA, 25 bp, Homo sapien
aggaagagagtgtgattgaattctc

SEQ ID NO: 3162573 - DNA, 25 bp, Homo sapien
gtgtgattgaattctccctggacca

SEQ ID NO: 3162574 - DNA, 25 bp, Homo sapien
gagagtgtgattgaattctccctgg

SEQ ID NO: 3162575 - DNA, 25 bp, Homo sapien
gtccaggtggatagggtcttggttg

SEQ ID NO: 3162576 - DNA, 25 bp, Homo sapien
caggtggatagggtcttggttggga

SEQ ID NO: 3162577 - DNA, 25 bp, Homo sapien
gaggtccaggtggatagggtcttgg

SEQ ID NO: 3162578 - DNA, 25 bp, Homo sapien
gaaaaatggaggtccaggtggatag

SEQ ID NO: 3162579 - DNA, 25 bp, Homo sapien
tgcaggagtagggagggcaggatca

SEQ ID NO: 3162580 - DNA, 25 bp, Homo sapien
gggcaggatcagttggagaatttac

SEQ ID NO: 3162581 - DNA, 25 bp, Homo sapien
tagggtgcaggagtagggagggcag

SEQ ID NO: 3162582 - DNA, 25 bp, Homo sapien
ggagggcaggatcagttggagaatt

SEQ ID NO: 3162583 - DNA, 25 bp, Homo sapien
tctaaggttcaagtccaagtgtctc

SEQ ID NO: 3162584 - DNA, 25 bp, Homo sapien
tgggttgccatactgaagagggcat

SEQ ID NO: 3162585 - DNA, 25 bp, Homo sapien
gcagtgatcagatggtactcaggaa

SEQ ID NO: 3162586 - DNA, 25 bp, Homo sapien
ggccaggctctgttagcactaatat

SEQ ID NO: 3162587 - DNA, 25 bp, Homo sapien
catgtcagctaagtacacaggacct

SEQ ID NO: 3162588 - DNA, 25 bp, Homo sapien
tgtcagctaagtacacaggaccttg

SEQ ID NO: 3162589 - DNA, 25 bp, Homo sapien
tattaagaagaatcacacatactca

SEQ ID NO: 3162590 - DNA, 25 bp, Homo sapien
cagctaagtacacaggaccttgttg

SEQ ID NO: 3162591 - DNA, 25 bp, Homo sapien
acgctggcaaaaccgaaagacaatt

SEQ ID NO: 3162592 - DNA, 25 bp, Homo sapien
aagtcaaagtgggatctacattgta

SEQ ID NO: 3162593 - DNA, 25 bp, Homo sapien
gtttgtcaaaagctgaatatctctt

SEQ ID NO: 3162594 - DNA, 25 bp, Homo sapien
tctgagtggtttgtgaccagaaaga

SEQ ID NO: 3162595 - DNA, 25 bp, Homo sapien
acaagaaatcttagctcttatatat

SEQ ID NO: 3162596 - DNA, 25 bp, Homo sapien
cttgccagttgaaagacggcaaata

SEQ ID NO: 3162597 - DNA, 25 bp, Homo sapien
gacaagaaatcttagctcttatata

SEQ ID NO: 3162598 - DNA, 25 bp, Homo sapien
tgccagttgaaagacggcaaataaa

SEQ ID NO: 3162599 - DNA, 25 bp, Homo sapien
tgtgaggatctgtcttacagttgat

SEQ ID NO: 3162600 - DNA, 25 bp, Homo sapien
ctttgtgtgaggatctgtcttacag

SEQ ID NO: 3162601 - DNA, 25 bp, Homo sapien
tcttacagttgattaatctgctggt

SEQ ID NO: 3162602 - DNA, 25 bp, Homo sapien
gattaatctgctggtcaaaatgact

SEQ ID NO: 3162603 - DNA, 25 bp, Homo sapien
gggaaagcaactccatacaccatgg

SEQ ID NO: 3162604 - DNA, 25 bp, Homo sapien
aaatccatatatcagagaccaaggc

SEQ ID NO: 3162605 - DNA, 25 bp, Homo sapien
caggtattctactctcaattgggtc

SEQ ID NO: 3162606 - DNA, 25 bp, Homo sapien
caccctgttggatatagtctaaaag

SEQ ID NO: 3162607 - DNA, 25 bp, Homo sapien
tgtgaaacacgctgcaagagcccaa

SEQ ID NO: 3162608 - DNA, 25 bp, Homo sapien
aacacgctgcaagagcccaaaggcc

SEQ ID NO: 3162609 - DNA, 25 bp, Homo sapien
aggcccaagatccaagtcagtgatt

SEQ ID NO: 3162610 - DNA, 25 bp, Homo sapien
ggcccaagatccaagtcagtgattt

SEQ ID NO: 3162611 - DNA, 25 bp, Homo sapien
gcagccatcagacatgtgtggttat

SEQ ID NO: 3162612 - DNA, 25 bp, Homo sapien
aatgatccataaactacatgctggg

SEQ ID NO: 3162613 - DNA, 25 bp, Homo sapien
taggtgactctggtgtaaatgatcc

SEQ ID NO: 3162614 - DNA, 25 bp, Homo sapien
taccacagacttgagctgtccagta

SEQ ID NO: 3162615 - DNA, 25 bp, Homo sapien
gcaactggctaaaggtaacgaactc

SEQ ID NO: 3162616 - DNA, 25 bp, Homo sapien
tgattagctccctttccgcaactgg

SEQ ID NO: 3162617 - DNA, 25 bp, Homo sapien
gaagaaacactacgctctcgaagga

SEQ ID NO: 3162618 - DNA, 25 bp, Homo sapien
tctcgaaggactataattggcacta

SEQ ID NO: 3162619 - DNA, 25 bp, Homo sapien
caatggtagaggatgtcacaagcac

SEQ ID NO: 3162620 - DNA, 25 bp, Homo sapien
caaccatggagtcattgatagctag

SEQ ID NO: 3162621 - DNA, 25 bp, Homo sapien
gatttactggccacacaaccatgga

SEQ ID NO: 3162622 - DNA, 25 bp, Homo sapien
gaaagttagcgtccttcagtgctgc

SEQ ID NO: 3162623 - DNA, 25 bp, Homo sapien
tacatggtagactggctatagcagc

SEQ ID NO: 3162624 - DNA, 25 bp, Homo sapien
caaggagttacaatacaaggcagga

SEQ ID NO: 3162625 - DNA, 25 bp, Homo sapien
tacgtaggctctcaatgaaagcagg

SEQ ID NO: 3162626 - DNA, 25 bp, Homo sapien
aattgtgagagacgtcatgagcacc

SEQ ID NO: 3162627 - DNA, 25 bp, Homo sapien
aaatatccctggaccatagggtgcg

SEQ ID NO: 3162628 - DNA, 25 bp, Homo sapien
tatccctggaccatagggtgcggga

SEQ ID NO: 3162629 - DNA, 25 bp, Homo sapien
tcctgggccaaaaggttgaggagga

SEQ ID NO: 3162630 - DNA, 25 bp, Homo sapien
aatcctgggccaaaaggttgaggag

SEQ ID NO: 3162631 - DNA, 25 bp, Homo sapien
tgcaggagtagggagggtaggatca

SEQ ID NO: 3162632 - DNA, 25 bp, Homo sapien
aggctgtggataacctggggcatca

SEQ ID NO: 3162633 - DNA, 25 bp, Homo sapien
cagttgttcatatttggggtgcagg

SEQ ID NO: 3162634 - DNA, 25 bp, Homo sapien
agttgttcatatttggggtgcagga

SEQ ID NO: 3162635 - DNA, 25 bp, Homo sapien
tctaagattatttctccccaaagct

SEQ ID NO: 3162636 - DNA, 25 bp, Homo sapien
ttctaagattatttctccccaaagc

SEQ ID NO: 3162637 - DNA, 25 bp, Homo sapien
gtagaagcagtagttacaagggtag

SEQ ID NO: 3162638 - DNA, 25 bp, Homo sapien
taagattatttctccccaaagctca

SEQ ID NO: 3162639 - DNA, 25 bp, Homo sapien
tcaattctttatttttgcctcattg

SEQ ID NO: 3162640 - DNA, 25 bp, Homo sapien
aattctttatttttgcctcattggt

SEQ ID NO: 3162641 - DNA, 25 bp, Homo sapien
ttctttatttttgcctcattggtat

SEQ ID NO: 3162642 - DNA, 25 bp, Homo sapien
gtgctcaattctttatttttgcctc

SEQ ID NO: 3162643 - DNA, 25 bp, Homo sapien
aaaaatgttggctttgatgacaaca

SEQ ID NO: 3162644 - DNA, 25 bp, Homo sapien
gaaaaatgttggctttgatgacaac

SEQ ID NO: 3162645 - DNA, 25 bp, Homo sapien
gctgaaattcagcacatggccatgc

SEQ ID NO: 3162646 - DNA, 25 bp, Homo sapien
catgtcccagtatgcataaaggtga

SEQ ID NO: 3162647 - DNA, 25 bp, Homo sapien
tggccatgcataattgcaaggaagg

SEQ ID NO: 3162648 - DNA, 25 bp, Homo sapien
cagagggagtgtttcagcaatttgt

SEQ ID NO: 3162649 - DNA, 25 bp, Homo sapien
ttactcttgccagatactcaattta

SEQ ID NO: 3162650 - DNA, 25 bp, Homo sapien
gcttaatcttactcttgccagatac

SEQ ID NO: 3162651 - DNA, 25 bp, Homo sapien
ttaatcttactcttgccagatactc

SEQ ID NO: 3162652 - DNA, 25 bp, Homo sapien
aatcttactcttgccagatactcaa

SEQ ID NO: 3162653 - DNA, 25 bp, Homo sapien
aacatgaaataagagccaacaggcc

SEQ ID NO: 3162654 - DNA, 25 bp, Homo sapien
agccaacaggcccaagaagaaagtt

SEQ ID NO: 3162655 - DNA, 25 bp, Homo sapien
caacaggcccaagaagaaagttaat

SEQ ID NO: 3162656 - DNA, 25 bp, Homo sapien
tgtgaaacatgaaataagagccaac

SEQ ID NO: 3162657 - DNA, 25 bp, Homo sapien
tgtcccttcatgcttagcaaccgct

SEQ ID NO: 3162658 - DNA, 25 bp, Homo sapien
gtcccttcatgcttagcaaccgctg

SEQ ID NO: 3162659 - DNA, 25 bp, Homo sapien
tcccttcatgcttagcaaccgctga

SEQ ID NO: 3162660 - DNA, 25 bp, Homo sapien
gcgtaatcctttcccgtgacaacat

SEQ ID NO: 3162661 - DNA, 25 bp, Homo sapien
acatggcaaggagcgtaatcctttc

SEQ ID NO: 3162662 - DNA, 25 bp, Homo sapien
gcaaggagcgtaatcctttcccgtg

SEQ ID NO: 3162663 - DNA, 25 bp, Homo sapien
tgcacatggcaaggagcgtaatcct

SEQ ID NO: 3162664 - DNA, 25 bp, Homo sapien
ttaggccatgatacgtgagaacttc

SEQ ID NO: 3162665 - DNA, 25 bp, Homo sapien
caatctctaatggtagcaacactag

SEQ ID NO: 3162666 - DNA, 25 bp, Homo sapien
tattctagcgaccatcagaagacca

SEQ ID NO: 3162667 - DNA, 25 bp, Homo sapien
tacttccatggtgatgaacattgct

SEQ ID NO: 3162668 - DNA, 25 bp, Homo sapien
attaggatatactaagccataagtc

SEQ ID NO: 3162669 - DNA, 25 bp, Homo sapien
tactaagccataagtcatgtatttc

SEQ ID NO: 3162670 - DNA, 25 bp, Homo sapien
gccataagtcatgtatttcactgag

SEQ ID NO: 3162671 - DNA, 25 bp, Homo sapien
gatatactaagccataagtcatgta

SEQ ID NO: 3162672 - DNA, 25 bp, Homo sapien
ccatcttggcctgtagagtggaggt

SEQ ID NO: 3162673 - DNA, 25 bp, Homo sapien
aattaagtcttgagtcatagggagg

SEQ ID NO: 3162674 - DNA, 25 bp, Homo sapien
gcagctggccaggtagatatggtct

SEQ ID NO: 3162675 - DNA, 25 bp, Homo sapien
caggtagatatggtcttctggagaa

SEQ ID NO: 3162676 - DNA, 25 bp, Homo sapien
taataggtcctacatagtaaggtct

SEQ ID NO: 3162677 - DNA, 25 bp, Homo sapien
gagtcgaggttgtctaatagattcc

SEQ ID NO: 3162678 - DNA, 25 bp, Homo sapien
gaatgactgcttggctaaatcgaga

SEQ ID NO: 3162679 - DNA, 25 bp, Homo sapien
tgattgttgtatctgcggtggtgat

SEQ ID NO: 3162680 - DNA, 25 bp, Homo sapien
gttggaagtcgtaacttggacagtg

SEQ ID NO: 3162681 - DNA, 25 bp, Homo sapien
ggtactgttgaggagctgatcgtca

SEQ ID NO: 3162682 - DNA, 25 bp, Homo sapien
tgagcaatactgtgtgaggacggtt

SEQ ID NO: 3162683 - DNA, 25 bp, Homo sapien
aaaggctgggctgcttaatatagtt

SEQ ID NO: 3162684 - DNA, 25 bp, Homo sapien
ggttccatcaaaatcattgcagttt

SEQ ID NO: 3162685 - DNA, 25 bp, Homo sapien
tgctggttagatcagggttggttcc

SEQ ID NO: 3162686 - DNA, 25 bp, Homo sapien
tatttagtgtgctggttagatcagg

SEQ ID NO: 3162687 - DNA, 25 bp, Homo sapien
ttctaagatatcagagcagtttgga

SEQ ID NO: 3162688 - DNA, 25 bp, Homo sapien
ggtacttccaacttgactggtagta

SEQ ID NO: 3162689 - DNA, 25 bp, Homo sapien
tgacatctgtggaagcaagtgtgct

SEQ ID NO: 3162690 - DNA, 25 bp, Homo sapien
tgcaatcatatctgtggcaaaagtc

SEQ ID NO: 3162691 - DNA, 25 bp, Homo sapien
tcagatcaatagctatggtgacatc

SEQ ID NO: 3162692 - DNA, 25 bp, Homo sapien
agctgtgaaattggttaataagtgc

SEQ ID NO: 3162693 - DNA, 25 bp, Homo sapien
attggttaataagtgcatattcatc

SEQ ID NO: 3162694 - DNA, 25 bp, Homo sapien
ctcaaagctgtgaaattggttaata

SEQ ID NO: 3162695 - DNA, 25 bp, Homo sapien
ctgtgaaattggttaataagtgcat

SEQ ID NO: 3162696 - DNA, 25 bp, Homo sapien
caagaggtgagctgacaggaatctc

SEQ ID NO: 3162697 - DNA, 25 bp, Homo sapien
tatagcctcagatatggactttgtg

SEQ ID NO: 3162698 - DNA, 25 bp, Homo sapien
tgtagtcgatcttgtagcagtggtt

SEQ ID NO: 3162699 - DNA, 25 bp, Homo sapien
catcagataaggtagctatagcctc

SEQ ID NO: 3162700 - DNA, 25 bp, Homo sapien
cagatagagctgaagtagaggactg

SEQ ID NO: 3162701 - DNA, 25 bp, Homo sapien
ttgtgatagttgtaaggagtaggct

SEQ ID NO: 3162702 - DNA, 25 bp, Homo sapien
tgttggtcactctcaatgtggtaga

SEQ ID NO: 3162703 - DNA, 25 bp, Homo sapien
gttgagtcaaatcgggtggctgcaa

SEQ ID NO: 3162704 - DNA, 25 bp, Homo sapien
agcacaagagaattttcaggtttta

SEQ ID NO: 3162705 - DNA, 25 bp, Homo sapien
agaagagaaagcacaagagaatttt

SEQ ID NO: 3162706 - DNA, 25 bp, Homo sapien
ctagaagcaaaagaagagaaagcac

SEQ ID NO: 3162707 - DNA, 25 bp, Homo sapien
tagaagcaaaagaagagaaagcaca

SEQ ID NO: 3162708 - DNA, 25 bp, Homo sapien
tgcttttagccaatcctttgaggat

SEQ ID NO: 3162709 - DNA, 25 bp, Homo sapien
tttcttcttagggtgttcaatccag

SEQ ID NO: 3162710 - DNA, 25 bp, Homo sapien
tcaatccagttgcttgcttttagcc

SEQ ID NO: 3162711 - DNA, 25 bp, Homo sapien
ttcttagggtgttcaatccagttgc

SEQ ID NO: 3162712 - DNA, 25 bp, Homo sapien
gaagcaagcactcagtgcacagatg

SEQ ID NO: 3162713 - DNA, 25 bp, Homo sapien
tgcacacaaacagcggcagagtttt

SEQ ID NO: 3162714 - DNA, 25 bp, Homo sapien
cgagaagcaagcactcagtgcacag

SEQ ID NO: 3162715 - DNA, 25 bp, Homo sapien
acagatgcacacaaacagcggcaga

SEQ ID NO: 3162716 - DNA, 25 bp, Homo sapien
gaggatgttgcaaagaatgtccaga

SEQ ID NO: 3162717 - DNA, 25 bp, Homo sapien
gagcctcacgaaggcccctctttga

SEQ ID NO: 3162718 - DNA, 25 bp, Homo sapien
tctgactgaagcaggattgagggcc

SEQ ID NO: 3162719 - DNA, 25 bp, Homo sapien
tatgaaacatgctgcaacagaccag

SEQ ID NO: 3162720 - DNA, 25 bp, Homo sapien
gatgccttctgtgacgtagttcatg

SEQ ID NO: 3162721 - DNA, 25 bp, Homo sapien
ccttctgtgacgtagttcatgatcc

SEQ ID NO: 3162722 - DNA, 25 bp, Homo sapien
gtgatgatgccttctgtgacgtagt

SEQ ID NO: 3162723 - DNA, 25 bp, Homo sapien
ttctgtgacgtagttcatgatccct

SEQ ID NO: 3162724 - DNA, 25 bp, Homo sapien
ggaagcttaggcctacagcgtttgt

SEQ ID NO: 3162725 - DNA, 25 bp, Homo sapien
cggcttctggtgagctagcagtcca

SEQ ID NO: 3162726 - DNA, 25 bp, Homo sapien
gactttctaatgaacggcttctggt

SEQ ID NO: 3162727 - DNA, 25 bp, Homo sapien
cagcgtttgtgcagacatttatagg

SEQ ID NO: 3162728 - DNA, 25 bp, Homo sapien
ctggtgaggatttgggaatttgggg

SEQ ID NO: 3162729 - DNA, 25 bp, Homo sapien
tatttttatctggatgtttaggtgg

SEQ ID NO: 3162730 - DNA, 25 bp, Homo sapien
cagatggaatttgggttgtagccac

SEQ ID NO: 3162731 - DNA, 25 bp, Homo sapien
agccactaaggtagggttgaccaca

SEQ ID NO: 3162732 - DNA, 25 bp, Homo sapien
tagggttgaccacactgctattttt

SEQ ID NO: 3162733 - DNA, 25 bp, Homo sapien
tacagaagagcttgtgttaacattt

SEQ ID NO: 3162734 - DNA, 25 bp, Homo sapien
cattttctcttgaagatatggtggt

SEQ ID NO: 3162735 - DNA, 25 bp, Homo sapien
tcttgaagatatggtggtggcattc

SEQ ID NO: 3162736 - DNA, 25 bp, Homo sapien
aattcactggtgctaatgtagctac

SEQ ID NO: 3162737 - DNA, 25 bp, Homo sapien
tggtgtagttgcagaaggtgtgggt

SEQ ID NO: 3162738 - DNA, 25 bp, Homo sapien
agtggagctggtgtagttgcagaag

SEQ ID NO: 3162739 - DNA, 25 bp, Homo sapien
atagtggagctggtgtagttgcaga

SEQ ID NO: 3162740 - DNA, 25 bp, Homo sapien
gagctggtgtagttgcagaaggtgt

SEQ ID NO: 3162741 - DNA, 25 bp, Homo sapien
ggcggatgatgggtctagggtagtt

SEQ ID NO: 3162742 - DNA, 25 bp, Homo sapien
agctgaggcggatgatgggtctagg

SEQ ID NO: 3162743 - DNA, 25 bp, Homo sapien
ggagctgaggcggatgatgggtcta

SEQ ID NO: 3162744 - DNA, 25 bp, Homo sapien
atgatgggtctagggtagttgcaga

SEQ ID NO: 3162745 - DNA, 25 bp, Homo sapien
taattctgtttagtagattcttcat

SEQ ID NO: 3162746 - DNA, 25 bp, Homo sapien
tgaccgaagtagtagtctggtgtgt

SEQ ID NO: 3162747 - DNA, 25 bp, Homo sapien
tgtgtgggtgcagctgaagtttcag

SEQ ID NO: 3162748 - DNA, 25 bp, Homo sapien
agtagtttgagtagtgaccgaagta

SEQ ID NO: 3162749 - DNA, 25 bp, Homo sapien
aaatagtgccagtcttggttcgtgc

SEQ ID NO: 3162750 - DNA, 25 bp, Homo sapien
tcagtaggctatctctgtaggatcc

SEQ ID NO: 3162751 - DNA, 25 bp, Homo sapien
catctggcttgtgggatagaggcat

SEQ ID NO: 3162752 - DNA, 25 bp, Homo sapien
tggttcgtgcttggctgacagactt

SEQ ID NO: 3162753 - DNA, 25 bp, Homo sapien
tcaaaagcgtacctaattagttcca

SEQ ID NO: 3162754 - DNA, 25 bp, Homo sapien
cagttagggactcatgcaaatattt

SEQ ID NO: 3162755 - DNA, 25 bp, Homo sapien
tgccaggcagttagggactcatgca

SEQ ID NO: 3162756 - DNA, 25 bp, Homo sapien
caaaagcgtacctaattagttccat

SEQ ID NO: 3162757 - DNA, 25 bp, Homo sapien
aagctggaagtcattacccgaagtc

SEQ ID NO: 3162758 - DNA, 25 bp, Homo sapien
gctggaagtcattacccgaagtcca

SEQ ID NO: 3162759 - DNA, 25 bp, Homo sapien
agctggaagtcattacccgaagtcc

SEQ ID NO: 3162760 - DNA, 25 bp, Homo sapien
tctttgcattgccaagcctacctgc

SEQ ID NO: 3162761 - DNA, 25 bp, Homo sapien
tgcagaacccctatggttccctttc

SEQ ID NO: 3162762 - DNA, 25 bp, Homo sapien
ccaaaggccaaagtcggggagagca

SEQ ID NO: 3162763 - DNA, 25 bp, Homo sapien
gagcagattgcagaacccctatggt

SEQ ID NO: 3162764 - DNA, 25 bp, Homo sapien
ctgggctttcgagggaagcaactct

SEQ ID NO: 3162765 - DNA, 25 bp, Homo sapien
gaggaagtgctcctcagattgtatt

SEQ ID NO: 3162766 - DNA, 25 bp, Homo sapien
tctttgcatctcagagagaagcacc

SEQ ID NO: 3162767 - DNA, 25 bp, Homo sapien
tcagattgtatttcatagctgggct

SEQ ID NO: 3162768 - DNA, 25 bp, Homo sapien
ggtgctcacaaaatcggtggcaaaa

SEQ ID NO: 3162769 - DNA, 25 bp, Homo sapien
tgcattactgggagtgcatccacag

SEQ ID NO: 3162770 - DNA, 25 bp, Homo sapien
gattctcagcctcacacgctcaaga

SEQ ID NO: 3162771 - DNA, 25 bp, Homo sapien
cacgttgatgatactcacttgagtc

SEQ ID NO: 3162772 - DNA, 25 bp, Homo sapien
tctgtcaaggccacgccgtgggact

SEQ ID NO: 3162773 - DNA, 25 bp, Homo sapien
gaacagtgtctgcacttcagcgagg

SEQ ID NO: 3162774 - DNA, 25 bp, Homo sapien
ccaccagagggtgcctctgtcaagg

SEQ ID NO: 3162775 - DNA, 25 bp, Homo sapien
catatctgtcttcgccaaaaatggg

SEQ ID NO: 3162776 - DNA, 25 bp, Homo sapien
tgataattggaaacgacattcagca

SEQ ID NO: 3162777 - DNA, 25 bp, Homo sapien
taattggaaacgacattcagcattt

SEQ ID NO: 3162778 - DNA, 25 bp, Homo sapien
gataattggaaacgacattcagcat

SEQ ID NO: 3162779 - DNA, 25 bp, Homo sapien
cttgataattggaaacgacattcag

SEQ ID NO: 3162780 - DNA, 25 bp, Homo sapien
tttttgagatatgccccagagggag

SEQ ID NO: 3162781 - DNA, 25 bp, Homo sapien
cacctggaatttttgagatatgccc

SEQ ID NO: 3162782 - DNA, 25 bp, Homo sapien
cctgtgtcgcaccaggatttgggat

SEQ ID NO: 3162783 - DNA, 25 bp, Homo sapien
gaccatttcaatgatgagcctgtgt

SEQ ID NO: 3162784 - DNA, 25 bp, Homo sapien
ttgggtccacgaggcaaaatgtaca

SEQ ID NO: 3162785 - DNA, 25 bp, Homo sapien
gtacaatactcaaggtccagttggt

SEQ ID NO: 3162786 - DNA, 25 bp, Homo sapien
acaatactcaaggtccagttggttt

SEQ ID NO: 3162787 - DNA, 25 bp, Homo sapien
ctttgggtccacgaggcaaaatgta

SEQ ID NO: 3162788 - DNA, 25 bp, Homo sapien
gacaaaacagtagaatcgtactcct

SEQ ID NO: 3162789 - DNA, 25 bp, Homo sapien
aaaacagtagaatcgtactcctcat

SEQ ID NO: 3162790 - DNA, 25 bp, Homo sapien
caaaacagtagaatcgtactcctca

SEQ ID NO: 3162791 - DNA, 25 bp, Homo sapien
agacaaaacagtagaatcgtactcc

SEQ ID NO: 3162792 - DNA, 25 bp, Homo sapien
tggtttggtagtgttccctgatccg

SEQ ID NO: 3162793 - DNA, 25 bp, Homo sapien
gtgttccctgatccggagccagttt

SEQ ID NO: 3162794 - DNA, 25 bp, Homo sapien
ctgatccggagccagttttgtggga

SEQ ID NO: 3162795 - DNA, 25 bp, Homo sapien
tgctgttggtttggtagtgttccct

SEQ ID NO: 3162796 - DNA, 25 bp, Homo sapien
tctgtgttaatggtatcagacttaa

SEQ ID NO: 3162797 - DNA, 25 bp, Homo sapien
gagcatctgtgttaatggtatcaga

SEQ ID NO: 3162798 - DNA, 25 bp, Homo sapien
gtgttaatggtatcagacttaaaga

SEQ ID NO: 3162799 - DNA, 25 bp, Homo sapien
taatggtatcagacttaaagaagga

SEQ ID NO: 3162800 - DNA, 25 bp, Homo sapien
tgggtgggtctgggtaccaggtgtc

SEQ ID NO: 3162801 - DNA, 25 bp, Homo sapien
attcaaccctcccagggtcaatggg

SEQ ID NO: 3162802 - DNA, 25 bp, Homo sapien
ggtgggtctgggtaccaggtgtcat

SEQ ID NO: 3162803 - DNA, 25 bp, Homo sapien
tgggtctgggtaccaggtgtcattc

SEQ ID NO: 3162804 - DNA, 25 bp, Homo sapien
gttgtgtgacaaaaattggtaacac

SEQ ID NO: 3162805 - DNA, 25 bp, Homo sapien
ccaagttgtgtgacaaaaattggta

SEQ ID NO: 3162806 - DNA, 25 bp, Homo sapien
ctgggctccaagttgtgtgacaaaa

SEQ ID NO: 3162807 - DNA, 25 bp, Homo sapien
gctccaagttgtgtgacaaaaattg

SEQ ID NO: 3162808 - DNA, 25 bp, Homo sapien
attcctctgagcttaggatagtgcc

SEQ ID NO: 3162809 - DNA, 25 bp, Homo sapien
caattcctctgagcttaggatagtg

SEQ ID NO: 3162810 - DNA, 25 bp, Homo sapien
aattcctctgagcttaggatagtgc

SEQ ID NO: 3162811 - DNA, 25 bp, Homo sapien
gaacaaggaatggatgatgaggctc

SEQ ID NO: 3162812 - DNA, 25 bp, Homo sapien
cccgggaacaaggaatggatgatga

SEQ ID NO: 3162813 - DNA, 25 bp, Homo sapien
acaaggaatggatgatgaggctcgt

SEQ ID NO: 3162814 - DNA, 25 bp, Homo sapien
ctcccgggaacaaggaatggatgat

SEQ ID NO: 3162815 - DNA, 25 bp, Homo sapien
ctggattagcccctgcctgactggt

SEQ ID NO: 3162816 - DNA, 25 bp, Homo sapien
gggtggtcactgcaaagtcgtcatc

SEQ ID NO: 3162817 - DNA, 25 bp, Homo sapien
cctcgatggcatgtgtgctcctttg

SEQ ID NO: 3162818 - DNA, 25 bp, Homo sapien
gggtggcaggatttacacctgctcc

SEQ ID NO: 3162819 - DNA, 25 bp, Homo sapien
ccaatgtgtctcaatctattccata

SEQ ID NO: 3162820 - DNA, 25 bp, Homo sapien
ttcttctaagactatccaatgtgtc

SEQ ID NO: 3162821 - DNA, 25 bp, Homo sapien
aaagttgggattctctacatagaac

SEQ ID NO: 3162822 - DNA, 25 bp, Homo sapien
tcacatgtatcaccaaattcgaggc

SEQ ID NO: 3162823 - DNA, 25 bp, Homo sapien
taggtcaagatcggggagagtatgg

SEQ ID NO: 3162824 - DNA, 25 bp, Homo sapien
gtcaagatcggggagagtatggaag

SEQ ID NO: 3162825 - DNA, 25 bp, Homo sapien
ggtcaagatcggggagagtatggaa

SEQ ID NO: 3162826 - DNA, 25 bp, Homo sapien
tcaagatcggggagagtatggaagt

SEQ ID NO: 3162827 - DNA, 25 bp, Homo sapien
caagaatgtacaacacagtcctggt

SEQ ID NO: 3162828 - DNA, 25 bp, Homo sapien
tgcaactcatatagatccctcaggg

SEQ ID NO: 3162829 - DNA, 25 bp, Homo sapien
tcctggtcagagtcatgtcttgcaa

SEQ ID NO: 3162830 - DNA, 25 bp, Homo sapien
tagctgatcaatcacacaaatagtg

SEQ ID NO: 3162831 - DNA, 25 bp, Homo sapien
gcaatgtcaccagggtgttgaagca

SEQ ID NO: 3162832 - DNA, 25 bp, Homo sapien
cttgcaagagttggtgctttttctt

SEQ ID NO: 3162833 - DNA, 25 bp, Homo sapien
tcttgcaagagttggtgctttttct

SEQ ID NO: 3162834 - DNA, 25 bp, Homo sapien
gctcaaaaggatcaaactccttgga

SEQ ID NO: 3162835 - DNA, 25 bp, Homo sapien
aggatcaaactccttggatacaaaa

SEQ ID NO: 3162836 - DNA, 25 bp, Homo sapien
aaaggatcaaactccttggatacaa

SEQ ID NO: 3162837 - DNA, 25 bp, Homo sapien
caaaaggatcaaactccttggatac

SEQ ID NO: 3162838 - DNA, 25 bp, Homo sapien
cttgtaaggcatatgggacacttga

SEQ ID NO: 3162839 - DNA, 25 bp, Homo sapien
ggacacttgatcgatccttacattg

SEQ ID NO: 3162840 - DNA, 25 bp, Homo sapien
gcatatgggacacttgatcgatcct

SEQ ID NO: 3162841 - DNA, 25 bp, Homo sapien
taaggcatatgggacacttgatcga

SEQ ID NO: 3162842 - DNA, 25 bp, Homo sapien
tctcagggcctgatgatgccaacca

SEQ ID NO: 3162843 - DNA, 25 bp, Homo sapien
gctctcagggcctgatgatgccaac

SEQ ID NO: 3162844 - DNA, 25 bp, Homo sapien
ctctcagggcctgatgatgccaacc

SEQ ID NO: 3162845 - DNA, 25 bp, Homo sapien
ttccaggaggcataggatcagtatc

SEQ ID NO: 3162846 - DNA, 25 bp, Homo sapien
tcatttccaggaggcataggatcag

SEQ ID NO: 3162847 - DNA, 25 bp, Homo sapien
ccaggaggcataggatcagtatcag

SEQ ID NO: 3162848 - DNA, 25 bp, Homo sapien
gcaaaactcatttccaggaggcata

SEQ ID NO: 3162849 - DNA, 25 bp, Homo sapien
gactcaataggactaaaccactgga

SEQ ID NO: 3162850 - DNA, 25 bp, Homo sapien
taaatcaagtgagtctatgcgtgga

SEQ ID NO: 3162851 - DNA, 25 bp, Homo sapien
tctgggacacactctaaagactgac

SEQ ID NO: 3162852 - DNA, 25 bp, Homo sapien
cacttaccgcttttggattgcaaga

SEQ ID NO: 3162853 - DNA, 25 bp, Homo sapien
tgagtcttattggtacaaaacttcc

SEQ ID NO: 3162854 - DNA, 25 bp, Homo sapien
ggatattgctccagtacatacgggc

SEQ ID NO: 3162855 - DNA, 25 bp, Homo sapien
tacatacgggctacctgagaggcca

SEQ ID NO: 3162856 - DNA, 25 bp, Homo sapien
tccttcaatgcccattgggcgtagg

SEQ ID NO: 3162857 - DNA, 25 bp, Homo sapien
gccatacccggtgttccagattgct

SEQ ID NO: 3162858 - DNA, 25 bp, Homo sapien
atacccggtgttccagattgctgag

SEQ ID NO: 3162859 - DNA, 25 bp, Homo sapien
tcaaggctcaaactagccatacccg

SEQ ID NO: 3162860 - DNA, 25 bp, Homo sapien
aaggctcaaactagccatacccggt

SEQ ID NO: 3162861 - DNA, 25 bp, Homo sapien
tgtgtttaatctctgcagacttccc

SEQ ID NO: 3162862 - DNA, 25 bp, Homo sapien
gtgtttaatctctgcagacttccca

SEQ ID NO: 3162863 - DNA, 25 bp, Homo sapien
tgattttccaaagccgtatctagaa

SEQ ID NO: 3162864 - DNA, 25 bp, Homo sapien
gcctcatccatggaagagaggaatg

SEQ ID NO: 3162865 - DNA, 25 bp, Homo sapien
gaccgtgcatccacaaagaattaaa

SEQ ID NO: 3162866 - DNA, 25 bp, Homo sapien
catccatggaagagaggaatgtggt

SEQ ID NO: 3162867 - DNA, 25 bp, Homo sapien
tgggggatgcacaggcaaagaatat

SEQ ID NO: 3162868 - DNA, 25 bp, Homo sapien
gatgcacaggcaaagaatattcata

SEQ ID NO: 3162869 - DNA, 25 bp, Homo sapien
gggatgcacaggcaaagaatattca

SEQ ID NO: 3162870 - DNA, 25 bp, Homo sapien
ggtgggggatgcacaggcaaagaat

SEQ ID NO: 3162871 - DNA, 25 bp, Homo sapien
ggcagatgtcccaggtgaattggag

SEQ ID NO: 3162872 - DNA, 25 bp, Homo sapien
gactggagaaaaggtttcagtcctg

SEQ ID NO: 3162873 - DNA, 25 bp, Homo sapien
tggcttatctgatggtgccacctgc

SEQ ID NO: 3162874 - DNA, 25 bp, Homo sapien
tgctgtggcctggttggtggttgca

SEQ ID NO: 3162875 - DNA, 25 bp, Homo sapien
ttgtggatcagcaaaatctactggg

SEQ ID NO: 3162876 - DNA, 25 bp, Homo sapien
gtggatcagcaaaatctactgggag

SEQ ID NO: 3162877 - DNA, 25 bp, Homo sapien
tgatggaccttgtggatcagcaaaa

SEQ ID NO: 3162878 - DNA, 25 bp, Homo sapien
ccttgtggatcagcaaaatctactg

SEQ ID NO: 3162879 - DNA, 25 bp, Homo sapien
cacaagggtggttagttgtcatgaa

SEQ ID NO: 3162880 - DNA, 25 bp, Homo sapien
ccacaagggtggttagttgtcatga

SEQ ID NO: 3162881 - DNA, 25 bp, Homo sapien
ggccacaagggtggttagttgtcat

SEQ ID NO: 3162882 - DNA, 25 bp, Homo sapien
caagggtggttagttgtcatgaaat

SEQ ID NO: 3162883 - DNA, 25 bp, Homo sapien
ccaatgccaattagaagctgtaata

SEQ ID NO: 3162884 - DNA, 25 bp, Homo sapien
gaactttgttagcttgcctttgaaa

SEQ ID NO: 3162885 - DNA, 25 bp, Homo sapien
cagggagatctcaagaagcaagata

SEQ ID NO: 3162886 - DNA, 25 bp, Homo sapien
tcatgttcagtatcaaaaaggctca

SEQ ID NO: 3162887 - DNA, 25 bp, Homo sapien
aaatacagctttaacctgagaagaa

SEQ ID NO: 3162888 - DNA, 25 bp, Homo sapien
caagttatctagtttaggaaaagag

SEQ ID NO: 3162889 - DNA, 25 bp, Homo sapien
aagaggttccaagcctgcaccgaag

SEQ ID NO: 3162890 - DNA, 25 bp, Homo sapien
aggttccaagcctgcaccgaagcac

SEQ ID NO: 3162891 - DNA, 25 bp, Homo sapien
caagcctgcaccgaagcaccaacat

SEQ ID NO: 3162892 - DNA, 25 bp, Homo sapien
taccaagaagccctagaaagaccag

SEQ ID NO: 3162893 - DNA, 25 bp, Homo sapien
tggcatagcaacagaattaccaaga

SEQ ID NO: 3162894 - DNA, 25 bp, Homo sapien
caagaagccctagaaagaccaggag

SEQ ID NO: 3162895 - DNA, 25 bp, Homo sapien
tagcaacagaattaccaagaagccc

SEQ ID NO: 3162896 - DNA, 25 bp, Homo sapien
atcagttgaaataagctcaacaatt

SEQ ID NO: 3162897 - DNA, 25 bp, Homo sapien
catcagttgaaataagctcaacaat

SEQ ID NO: 3162898 - DNA, 25 bp, Homo sapien
aatccaggcattcggggcatgtgca

SEQ ID NO: 3162899 - DNA, 25 bp, Homo sapien
gctaaatccaggcattcggggcatg

SEQ ID NO: 3162900 - DNA, 25 bp, Homo sapien
ttactgctaaatccaggcattcggg

SEQ ID NO: 3162901 - DNA, 25 bp, Homo sapien
taaatccaggcattcggggcatgtg

SEQ ID NO: 3162902 - DNA, 25 bp, Homo sapien
aagttgaattgattataccgcatca

SEQ ID NO: 3162903 - DNA, 25 bp, Homo sapien
tcataaagttgaattgattataccg

SEQ ID NO: 3162904 - DNA, 25 bp, Homo sapien
taaagttgaattgattataccgcat

SEQ ID NO: 3162905 - DNA, 25 bp, Homo sapien
atgtgggccgttcataaagttgaat

SEQ ID NO: 3162906 - DNA, 25 bp, Homo sapien
tccaaagaagggccccaggtgtgcc

SEQ ID NO: 3162907 - DNA, 25 bp, Homo sapien
caaagaagggccccaggtgtgccat

SEQ ID NO: 3162908 - DNA, 25 bp, Homo sapien
ttccaaagaagggccccaggtgtgc

SEQ ID NO: 3162909 - DNA, 25 bp, Homo sapien
ctgagggagaccgtttccaaagaag

SEQ ID NO: 3162910 - DNA, 25 bp, Homo sapien
tgacgtttgggtgctgaggatttcc

SEQ ID NO: 3162911 - DNA, 25 bp, Homo sapien
gtgctgaggatttccgtggatgcca

SEQ ID NO: 3162912 - DNA, 25 bp, Homo sapien
gatttccgtggatgccatgtgttgg

SEQ ID NO: 3162913 - DNA, 25 bp, Homo sapien
cttgttatgacgtttgggtgctgag

SEQ ID NO: 3162914 - DNA, 25 bp, Homo sapien
gaggttgattatgtgatggctgctt

SEQ ID NO: 3162915 - DNA, 25 bp, Homo sapien
gagcttcctcttcgggctgaggttg

SEQ ID NO: 3162916 - DNA, 25 bp, Homo sapien
ctgaggttgattatgtgatggctgc

SEQ ID NO: 3162917 - DNA, 25 bp, Homo sapien
gatggctgcttcaaaggccgctttt

SEQ ID NO: 3162918 - DNA, 25 bp, Homo sapien
tgataggggaatagcccatttccaa

SEQ ID NO: 3162919 - DNA, 25 bp, Homo sapien
tagcccatttccaaatggtgggaat

SEQ ID NO: 3162920 - DNA, 25 bp, Homo sapien
tggaatttgccatggtggttgttga

SEQ ID NO: 3162921 - DNA, 25 bp, Homo sapien
tggttgttgataggggaatagccca

SEQ ID NO: 3162922 - DNA, 25 bp, Homo sapien
ctgagaagtgaaaaacacagtgaac

SEQ ID NO: 3162923 - DNA, 25 bp, Homo sapien
ttgctgattggtgggcgtccataac

SEQ ID NO: 3162924 - DNA, 25 bp, Homo sapien
caagcaaagaagttccaccgaggac

SEQ ID NO: 3162925 - DNA, 25 bp, Homo sapien
tgggactggcatataaccctcagag

SEQ ID NO: 3162926 - DNA, 25 bp, Homo sapien
tccctggcctgaagcgttgactgca

SEQ ID NO: 3162927 - DNA, 25 bp, Homo sapien
tttcattgcgaacaacagggccagg

SEQ ID NO: 3162928 - DNA, 25 bp, Homo sapien
tggtccagcggcattattaacgtag

SEQ ID NO: 3162929 - DNA, 25 bp, Homo sapien
tagtagcccctgctctctataggtg

SEQ ID NO: 3162930 - DNA, 25 bp, Homo sapien
tcatccgggctccatgggtaaaatt

SEQ ID NO: 3162931 - DNA, 25 bp, Homo sapien
cccttgggcttgtatcctgtggtcc

SEQ ID NO: 3162932 - DNA, 25 bp, Homo sapien
tgctcaggagtaaggtcaacagttc

SEQ ID NO: 3162933 - DNA, 25 bp, Homo sapien
ggttctccccaggtgcaagaccata

SEQ ID NO: 3162934 - DNA, 25 bp, Homo sapien
tgtggagctaccagcacagcaagag

SEQ ID NO: 3162935 - DNA, 25 bp, Homo sapien
ggtgtaccaataacaagctgctcag

SEQ ID NO: 3162936 - DNA, 25 bp, Homo sapien
taggcctgaagtagtaagcagtctt

SEQ ID NO: 3162937 - DNA, 25 bp, Homo sapien
cctgaagtagtaagcagtcttgtac

SEQ ID NO: 3162938 - DNA, 25 bp, Homo sapien
ggcctgaagtagtaagcagtcttgt

SEQ ID NO: 3162939 - DNA, 25 bp, Homo sapien
ctaggcctgaagtagtaagcagtct

SEQ ID NO: 3162940 - DNA, 25 bp, Homo sapien
ctttcaggaaaagcagactacggtg

SEQ ID NO: 3162941 - DNA, 25 bp, Homo sapien
ggtgatccccagaggcctaatctca

SEQ ID NO: 3162942 - DNA, 25 bp, Homo sapien
tataaagctacggagtggtggctca

SEQ ID NO: 3162943 - DNA, 25 bp, Homo sapien
tgctctaggcaagggacatccagat

SEQ ID NO: 3162944 - DNA, 25 bp, Homo sapien
ctagatgtaggaactcatcacagaa

SEQ ID NO: 3162945 - DNA, 25 bp, Homo sapien
tcacagaagtgtagtagtagcggta

SEQ ID NO: 3162946 - DNA, 25 bp, Homo sapien
ggttacttttagagcctccgatatc

SEQ ID NO: 3162947 - DNA, 25 bp, Homo sapien
gatgctaagacaagagggttacttt

SEQ ID NO: 3162948 - DNA, 25 bp, Homo sapien
gtctcccctcactagagtgtaatct

SEQ ID NO: 3162949 - DNA, 25 bp, Homo sapien
tcactagagtgtaatctccacgaag

SEQ ID NO: 3162950 - DNA, 25 bp, Homo sapien
tctccacgaaggcacgcacttttgc

SEQ ID NO: 3162951 - DNA, 25 bp, Homo sapien
tgtcatgtttatggtctgtctcccc

SEQ ID NO: 3162952 - DNA, 25 bp, Homo sapien
tcagatagttactgctacccagagc

SEQ ID NO: 3162953 - DNA, 25 bp, Homo sapien
ggtacgtattctctagcacagtctg

SEQ ID NO: 3162954 - DNA, 25 bp, Homo sapien
cactcgtatatggtggtgagaccaa

SEQ ID NO: 3162955 - DNA, 25 bp, Homo sapien
tgatgaagacagtgctacagagacc

SEQ ID NO: 3162956 - DNA, 25 bp, Homo sapien
gaggacattgtggagagaaacatcc

SEQ ID NO: 3162957 - DNA, 25 bp, Homo sapien
cattgtggagagaaacatccgaatt

SEQ ID NO: 3162958 - DNA, 25 bp, Homo sapien
ttgtggagagaaacatccgaattat

SEQ ID NO: 3162959 - DNA, 25 bp, Homo sapien
gacattgtggagagaaacatccgaa

SEQ ID NO: 3162960 - DNA, 25 bp, Homo sapien
agatgaaaggattgttcttgttgac

SEQ ID NO: 3162961 - DNA, 25 bp, Homo sapien
caggatcatccgttcttccgaagat

SEQ ID NO: 3162962 - DNA, 25 bp, Homo sapien
aagtgtgcccggattacttccagga

SEQ ID NO: 3162963 - DNA, 25 bp, Homo sapien
caaatgtaagtgtgcccggattact

SEQ ID NO: 3162964 - DNA, 25 bp, Homo sapien
ttgcaatacttatcaaggtcaggtg

SEQ ID NO: 3162965 - DNA, 25 bp, Homo sapien
caatacttatcaaggtcaggtgcgg

SEQ ID NO: 3162966 - DNA, 25 bp, Homo sapien
ttattccttgcaatacttatcaagg

SEQ ID NO: 3162967 - DNA, 25 bp, Homo sapien
ccttgcaatacttatcaaggtcagg

SEQ ID NO: 3162968 - DNA, 25 bp, Homo sapien
gttgccagcataggtaattctcttc

SEQ ID NO: 3162969 - DNA, 25 bp, Homo sapien
tagtccagatcctatgttgccagca

SEQ ID NO: 3162970 - DNA, 25 bp, Homo sapien
ccagtactacaagtggttctagtca

SEQ ID NO: 3162971 - DNA, 25 bp, Homo sapien
tcagatgatccctagagcacacaag

SEQ ID NO: 3162972 - DNA, 25 bp, Homo sapien
catctgatattgctctttatgaaca

SEQ ID NO: 3162973 - DNA, 25 bp, Homo sapien
tttggggtgccatctgatattgctc

SEQ ID NO: 3162974 - DNA, 25 bp, Homo sapien
tcccttttggtgttctttcatatcc

SEQ ID NO: 3162975 - DNA, 25 bp, Homo sapien
ttcatatccttttttggggtgccat

SEQ ID NO: 3162976 - DNA, 25 bp, Homo sapien
cagttaaggactgtataatcaggta

SEQ ID NO: 3162977 - DNA, 25 bp, Homo sapien
tacagacaatagtgatgaatcagcc

SEQ ID NO: 3162978 - DNA, 25 bp, Homo sapien
tactgtttgttgtagaatgctacag

SEQ ID NO: 3162979 - DNA, 25 bp, Homo sapien
ggcagtgtatgatgtaaacccggtg

SEQ ID NO: 3162980 - DNA, 25 bp, Homo sapien
gcagactcctgatcggctactggaa

SEQ ID NO: 3162981 - DNA, 25 bp, Homo sapien
tttacagcgactccggactttcggc

SEQ ID NO: 3162982 - DNA, 25 bp, Homo sapien
taactcgtggctctaaacagcagcg

SEQ ID NO: 3162983 - DNA, 25 bp, Homo sapien
tgacttcggcgcaggaatcaggcgc

SEQ ID NO: 3162984 - DNA, 25 bp, Homo sapien
gggacctgccttggctcgcacagct

SEQ ID NO: 3162985 - DNA, 25 bp, Homo sapien
aaatcatctccattttcgtcggtga

SEQ ID NO: 3162986 - DNA, 25 bp, Homo sapien
cattttcgtcggtgagcgtgggacc

SEQ ID NO: 3162987 - DNA, 25 bp, Homo sapien
cagctgcccacttagctgctccgcg

SEQ ID NO: 3162988 - DNA, 25 bp, Homo sapien
ccgggatcgtgcctcatgaaagtca

SEQ ID NO: 3162989 - DNA, 25 bp, Homo sapien
gaggcctcagcttcactttgcacgg

SEQ ID NO: 3162990 - DNA, 25 bp, Homo sapien
gacttggaaccatagtccgtgtcat

SEQ ID NO: 3162991 - DNA, 25 bp, Homo sapien
tcatcgtccatatctagggctagca

SEQ ID NO: 3162992 - DNA, 25 bp, Homo sapien
cttgggctaggcgccgctgaatgat

SEQ ID NO: 3162993 - DNA, 25 bp, Homo sapien
tgcaaaggcctcaacccaggcgaca

SEQ ID NO: 3162994 - DNA, 25 bp, Homo sapien
ttgcaaaggcctcaacccaggcgac

SEQ ID NO: 3162995 - DNA, 25 bp, Homo sapien
gcagcgcttgggctaggcgccgctg

SEQ ID NO: 3162996 - DNA, 25 bp, Homo sapien
cttggtcctcaagtattggcttcct

SEQ ID NO: 3162997 - DNA, 25 bp, Homo sapien
gaaactttagccaaatccttcacga

SEQ ID NO: 3162998 - DNA, 25 bp, Homo sapien
aagagttctggtgattcctttcgca

SEQ ID NO: 3162999 - DNA, 25 bp, Homo sapien
caagtagaggttgtacttggtcctc

SEQ ID NO: 3163000 - DNA, 25 bp, Homo sapien
ttctgatccacaacggacagcttgt

SEQ ID NO: 3163001 - DNA, 25 bp, Homo sapien
gatcaaatttcggtaggtaacaagc

SEQ ID NO: 3163002 - DNA, 25 bp, Homo sapien
tctttacgaacttcacgaacctggc

SEQ ID NO: 3163003 - DNA, 25 bp, Homo sapien
tttttaactcctgcacgaatgccag

SEQ ID NO: 3163004 - DNA, 25 bp, Homo sapien
taaaaatttattgatccaaaactgc

SEQ ID NO: 3163005 - DNA, 25 bp, Homo sapien
tccaaaactgccaaaaaccttatgc

SEQ ID NO: 3163006 - DNA, 25 bp, Homo sapien
aaatttattgatccaaaactgccaa

SEQ ID NO: 3163007 - DNA, 25 bp, Homo sapien
gccaaaaaccttatgctaagcaaaa

SEQ ID NO: 3163008 - DNA, 25 bp, Homo sapien
tgaactgtgaaatttccctaagcta

SEQ ID NO: 3163009 - DNA, 25 bp, Homo sapien
gataactgtcaaagatgcattctct

SEQ ID NO: 3163010 - DNA, 25 bp, Homo sapien
tctggcccaataattatagttaggt

SEQ ID NO: 3163011 - DNA, 25 bp, Homo sapien
cagaactattttataggctgcctta

SEQ ID NO: 3163012 - DNA, 25 bp, Homo sapien
gtttcattcctatgcttttaaacca

SEQ ID NO: 3163013 - DNA, 25 bp, Homo sapien
cctatgcttttaaaccacacagaac

SEQ ID NO: 3163014 - DNA, 25 bp, Homo sapien
tttaaaccacacagaacatatgaaa

SEQ ID NO: 3163015 - DNA, 25 bp, Homo sapien
ttttaaaccacacagaacatatgaa

SEQ ID NO: 3163016 - DNA, 25 bp, Homo sapien
ggtctgagaagcgaataaaatttac

SEQ ID NO: 3163017 - DNA, 25 bp, Homo sapien
aaactggcttagagaaattggccca

SEQ ID NO: 3163018 - DNA, 25 bp, Homo sapien
tgccaaaaactttgaccattaggta

SEQ ID NO: 3163019 - DNA, 25 bp, Homo sapien
tattttgtgtaagatacgtgaatca

SEQ ID NO: 3163020 - DNA, 25 bp, Homo sapien
gagcatctccctatactgttttaaa

SEQ ID NO: 3163021 - DNA, 25 bp, Homo sapien
gcactataattaagaatcgagctct

SEQ ID NO: 3163022 - DNA, 25 bp, Homo sapien
tgttttaaagtgacaacatccaagc

SEQ ID NO: 3163023 - DNA, 25 bp, Homo sapien
taaaggtggatggtactccaagttc

SEQ ID NO: 3163024 - DNA, 25 bp, Homo sapien
tatcatccttgtacgggaaccatgc

SEQ ID NO: 3163025 - DNA, 25 bp, Homo sapien
gtgtatcatccttgtacgggaacca

SEQ ID NO: 3163026 - DNA, 25 bp, Homo sapien
gtatcatccttgtacgggaaccatg

SEQ ID NO: 3163027 - DNA, 25 bp, Homo sapien
tgtgtatcatccttgtacgggaacc

SEQ ID NO: 3163028 - DNA, 25 bp, Homo sapien
ccctgtgtagaggaagttgtacttc

SEQ ID NO: 3163029 - DNA, 25 bp, Homo sapien
cagcccttccctgtgtagaggaagt

SEQ ID NO: 3163030 - DNA, 25 bp, Homo sapien
ttccctgtgtagaggaagttgtact

SEQ ID NO: 3163031 - DNA, 25 bp, Homo sapien
gcccttccctgtgtagaggaagttg

SEQ ID NO: 3163032 - DNA, 25 bp, Homo sapien
aatcaaacagcttagaatttatacg

SEQ ID NO: 3163033 - DNA, 25 bp, Homo sapien
caattacaggtcgacagttttctct

SEQ ID NO: 3163034 - DNA, 25 bp, Homo sapien
aaatgtcaattacaggtcgacagtt

SEQ ID NO: 3163035 - DNA, 25 bp, Homo sapien
gcttagaatttatacgacaaatgtc

SEQ ID NO: 3163036 - DNA, 25 bp, Homo sapien
ctagtgccgcgggtgcgcatgagtg

SEQ ID NO: 3163037 - DNA, 25 bp, Homo sapien
caaccgttgattcactgtttggagt

SEQ ID NO: 3163038 - DNA, 25 bp, Homo sapien
tggagtattgagctctttatgtgag

SEQ ID NO: 3163039 - DNA, 25 bp, Homo sapien
tatgtgagaaaccaaaggtgggtgt

SEQ ID NO: 3163040 - DNA, 25 bp, Homo sapien
tcttttgttcccgtcttgtgcgctg

SEQ ID NO: 3163041 - DNA, 25 bp, Homo sapien
aaactgtaccatttgcctttcacac

SEQ ID NO: 3163042 - DNA, 25 bp, Homo sapien
taaactgtaccatttgcctttcaca

SEQ ID NO: 3163043 - DNA, 25 bp, Homo sapien
gcggcgttttgtcgtgtaaccgcca

SEQ ID NO: 3163044 - DNA, 25 bp, Homo sapien
ctggcggcgttttgtcgtgtaaccg

SEQ ID NO: 3163045 - DNA, 25 bp, Homo sapien
taaccgccaactttatcggtagcac

SEQ ID NO: 3163046 - DNA, 25 bp, Homo sapien
tatcggtagcacgaaggcacaaaga

SEQ ID NO: 3163047 - DNA, 25 bp, Homo sapien
ccctgtaaggcggtcaggtgtgtct

SEQ ID NO: 3163048 - DNA, 25 bp, Homo sapien
gaaaagtggaagacctggcgaaata

SEQ ID NO: 3163049 - DNA, 25 bp, Homo sapien
cccgctgggccctgtaaggcggtca

SEQ ID NO: 3163050 - DNA, 25 bp, Homo sapien
gtgtgtctagtgcttgaaaagtgga

SEQ ID NO: 3163051 - DNA, 25 bp, Homo sapien
cagagggtcagggcgaggagccgcc

SEQ ID NO: 3163052 - DNA, 25 bp, Homo sapien
tcgccgcagcctccgattcgcgccc

SEQ ID NO: 3163053 - DNA, 25 bp, Homo sapien
cgcagcctccgattcgcgcccgggc

SEQ ID NO: 3163054 - DNA, 25 bp, Homo sapien
ccgccgctcgggtagctcagcagca

SEQ ID NO: 3163055 - DNA, 25 bp, Homo sapien
agtcgggctccgactgcccggcggg

SEQ ID NO: 3163056 - DNA, 25 bp, Homo sapien
gcaactttcggcaccagcggtgggc

SEQ ID NO: 3163057 - DNA, 25 bp, Homo sapien
tccatcgccggggtacagcaggaag

SEQ ID NO: 3163058 - DNA, 25 bp, Homo sapien
agagcatgggtttagcagaaaagca

SEQ ID NO: 3163059 - DNA, 25 bp, Homo sapien
tacttgggataaatcgagcttccgc

SEQ ID NO: 3163060 - DNA, 25 bp, Homo sapien
gaaaagcaatctgggtcaactgcat

SEQ ID NO: 3163061 - DNA, 25 bp, Homo sapien
ggcattcagtttggcgcacacaaac

SEQ ID NO: 3163062 - DNA, 25 bp, Homo sapien
tcacaagacgatctctaacggcagg

SEQ ID NO: 3163063 - DNA, 25 bp, Homo sapien
tggacactgccttaactgggagaga

SEQ ID NO: 3163064 - DNA, 25 bp, Homo sapien
taaaagtattacaccatggcctgca

SEQ ID NO: 3163065 - DNA, 25 bp, Homo sapien
tagtgggtagtcatagtaacgctgc

SEQ ID NO: 3163066 - DNA, 25 bp, Homo sapien
caggaacatcaaggttagtgagcaa

SEQ ID NO: 3163067 - DNA, 25 bp, Homo sapien
gaatttggccttgtcacaaaccaca

SEQ ID NO: 3163068 - DNA, 25 bp, Homo sapien
cattgagtcttcagcacgaacagtt

SEQ ID NO: 3163069 - DNA, 25 bp, Homo sapien
gaatttcccagatctaccagtttga

SEQ ID NO: 3163070 - DNA, 25 bp, Homo sapien
cagggtgttgaccaaaatggctgac

SEQ ID NO: 3163071 - DNA, 25 bp, Homo sapien
taggattggccgtgcgcagtaagca

SEQ ID NO: 3163072 - DNA, 25 bp, Homo sapien
aatggctgactaatgaactgaactg

SEQ ID NO: 3163073 - DNA, 25 bp, Homo sapien
tgaacgtagggcaagcaattcccag

SEQ ID NO: 3163074 - DNA, 25 bp, Homo sapien
tttaaatcccgcacagctgatgctg

SEQ ID NO: 3163075 - DNA, 25 bp, Homo sapien
tagacagttcctaccacatagcaaa

SEQ ID NO: 3163076 - DNA, 25 bp, Homo sapien
aataagatgatgcttgtcttctccc

SEQ ID NO: 3163077 - DNA, 25 bp, Homo sapien
aaaatctggcctcgatatgagtaag

SEQ ID NO: 3163078 - DNA, 25 bp, Homo sapien
atcggtcggaggcgtcagagcagac

SEQ ID NO: 3163079 - DNA, 25 bp, Homo sapien
tcggtcggaggcgtcagagcagaca

SEQ ID NO: 3163080 - DNA, 25 bp, Homo sapien
cggtcggaggcgtcagagcagacat

SEQ ID NO: 3163081 - DNA, 25 bp, Homo sapien
ccatccatggacactcggaatttgc

SEQ ID NO: 3163082 - DNA, 25 bp, Homo sapien
gtgtaagtgagatgtcatccagctc

SEQ ID NO: 3163083 - DNA, 25 bp, Homo sapien
aggtgtaagtgagatgtcatccagc

SEQ ID NO: 3163084 - DNA, 25 bp, Homo sapien
ggacactcggaatttgcaaaggtag

SEQ ID NO: 3163085 - DNA, 25 bp, Homo sapien
tcccccataacaatgaggatgctgg

SEQ ID NO: 3163086 - DNA, 25 bp, Homo sapien
gatgcaaggttttcaggactgttaa

SEQ ID NO: 3163087 - DNA, 25 bp, Homo sapien
ggtgaaatactagcggacaggatct

SEQ ID NO: 3163088 - DNA, 25 bp, Homo sapien
gactgttaacagttgagagtgtagg

SEQ ID NO: 3163089 - DNA, 25 bp, Homo sapien
acaaagaactctaaacgagtatcca

SEQ ID NO: 3163090 - DNA, 25 bp, Homo sapien
caaagaactctaaacgagtatccag

SEQ ID NO: 3163091 - DNA, 25 bp, Homo sapien
gacaaagaactctaaacgagtatcc

SEQ ID NO: 3163092 - DNA, 25 bp, Homo sapien
cctcatataatggtgaggataccat

SEQ ID NO: 3163093 - DNA, 25 bp, Homo sapien
taatcatatttaacctttccaggca

SEQ ID NO: 3163094 - DNA, 25 bp, Homo sapien
gatgtgataagtgacctcaaatgtt

SEQ ID NO: 3163095 - DNA, 25 bp, Homo sapien
gataccattaccaaataccctggtg

SEQ ID NO: 3163096 - DNA, 25 bp, Homo sapien
agagtcctggaaaaaagtcgcaagt

SEQ ID NO: 3163097 - DNA, 25 bp, Homo sapien
gaaaaaagtcgcaagtcaagagacc

SEQ ID NO: 3163098 - DNA, 25 bp, Homo sapien
caaatggatcataatagttaccaca

SEQ ID NO: 3163099 - DNA, 25 bp, Homo sapien
cagaggtactgacagtggaaatctc

SEQ ID NO: 3163100 - DNA, 25 bp, Homo sapien
atttctcctcatatgcaagcgtttt

SEQ ID NO: 3163101 - DNA, 25 bp, Homo sapien
tcctcatatgcaagcgttttttgtt

SEQ ID NO: 3163102 - DNA, 25 bp, Homo sapien
ttttcatcagtataaggacagagaa

SEQ ID NO: 3163103 - DNA, 25 bp, Homo sapien
taaggacagagaataaaccttagct

SEQ ID NO: 3163104 - DNA, 25 bp, Homo sapien
taggtacaattcacctatggtcttc

SEQ ID NO: 3163105 - DNA, 25 bp, Homo sapien
agctgatgtcttataacttgtgcac

SEQ ID NO: 3163106 - DNA, 25 bp, Homo sapien
agacacacccaaaatgactgctttg

SEQ ID NO: 3163107 - DNA, 25 bp, Homo sapien
tgtgcacataacgaaacatacagcc

SEQ ID NO: 3163108 - DNA, 25 bp, Homo sapien
tatgaagaattcaaatggcgctgct

SEQ ID NO: 3163109 - DNA, 25 bp, Homo sapien
tgtataactctcaaattggacggga

SEQ ID NO: 3163110 - DNA, 25 bp, Homo sapien
gcttatccataggaatcctgctcca

SEQ ID NO: 3163111 - DNA, 25 bp, Homo sapien
ggcgctgctaaaaacgcttacatga

SEQ ID NO: 3163112 - DNA, 25 bp, Homo sapien
cctctatagttgattacaggtcttg

SEQ ID NO: 3163113 - DNA, 25 bp, Homo sapien
tccaaatcctctatagttgattaca

SEQ ID NO: 3163114 - DNA, 25 bp, Homo sapien
gatttctttaatcagcagacataca

SEQ ID NO: 3163115 - DNA, 25 bp, Homo sapien
aatcctctatagttgattacaggtc

SEQ ID NO: 3163116 - DNA, 25 bp, Homo sapien
tatctgtagtcacttgagacaacaa

SEQ ID NO: 3163117 - DNA, 25 bp, Homo sapien
catcttaattcaaggggtatctgta

SEQ ID NO: 3163118 - DNA, 25 bp, Homo sapien
cataaccccatcttaattcaagggg

SEQ ID NO: 3163119 - DNA, 25 bp, Homo sapien
ggtaaacgtgttataaactgagtca

SEQ ID NO: 3163120 - DNA, 25 bp, Homo sapien
gagctagcaatacgccaggtgatcc

SEQ ID NO: 3163121 - DNA, 25 bp, Homo sapien
ggtgatcctctctcacgatgctgcg

SEQ ID NO: 3163122 - DNA, 25 bp, Homo sapien
cacagacagtccctggcttatgagg

SEQ ID NO: 3163123 - DNA, 25 bp, Homo sapien
gccagatgattttgcgcaactgttg

SEQ ID NO: 3163124 - DNA, 25 bp, Homo sapien
tgagactgtattaaaagctacaacc

SEQ ID NO: 3163125 - DNA, 25 bp, Homo sapien
tgtcccataggcttctgagactgta

SEQ ID NO: 3163126 - DNA, 25 bp, Homo sapien
gatgaaccgtgtccagaaaactttg

SEQ ID NO: 3163127 - DNA, 25 bp, Homo sapien
cttgaaagggtgactagccaggtta

SEQ ID NO: 3163128 - DNA, 25 bp, Homo sapien
gatcttggttggtactcaggcttgg

SEQ ID NO: 3163129 - DNA, 25 bp, Homo sapien
ggcttgggaatctgacaacgtgaat

SEQ ID NO: 3163130 - DNA, 25 bp, Homo sapien
tgttctcagacgacagcacttgctc

SEQ ID NO: 3163131 - DNA, 25 bp, Homo sapien
tgttctctggaaaagctcaaatacc

SEQ ID NO: 3163132 - DNA, 25 bp, Homo sapien
aaaatgtcatgcaagcccagaaaga

SEQ ID NO: 3163133 - DNA, 25 bp, Homo sapien
gcgcatttgctccaccaaatctgtc

SEQ ID NO: 3163134 - DNA, 25 bp, Homo sapien
tgtatcatcgcgcatttgctccacc

SEQ ID NO: 3163135 - DNA, 25 bp, Homo sapien
cttctgtatcatcgcgcatttgctc

SEQ ID NO: 3163136 - DNA, 25 bp, Homo sapien
tcatcgcgcatttgctccaccaaat

SEQ ID NO: 3163137 - DNA, 25 bp, Homo sapien
ccaggtcaaggtttagctgctggcc

SEQ ID NO: 3163138 - DNA, 25 bp, Homo sapien
aggtcaaggtttagctgctggcctc

SEQ ID NO: 3163139 - DNA, 25 bp, Homo sapien
caggtcaaggtttagctgctggcct

SEQ ID NO: 3163140 - DNA, 25 bp, Homo sapien
tccaggtcaaggtttagctgctggc

SEQ ID NO: 3163141 - DNA, 25 bp, Homo sapien
gaagtcatatagctaacagtgacag

SEQ ID NO: 3163142 - DNA, 25 bp, Homo sapien
tgaaaacaaatcatgtcaccaaggt

SEQ ID NO: 3163143 - DNA, 25 bp, Homo sapien
gatgtgtaaaagcttttggctgggc

SEQ ID NO: 3163144 - DNA, 25 bp, Homo sapien
gaaaagcttactctatgttgggaat

SEQ ID NO: 3163145 - DNA, 25 bp, Homo sapien
aatatattgctcattgtaaatgaac

SEQ ID NO: 3163146 - DNA, 25 bp, Homo sapien
aaagtatggctatttagtcttgcta

SEQ ID NO: 3163147 - DNA, 25 bp, Homo sapien
tgaggcaagagatatgctaattacc

SEQ ID NO: 3163148 - DNA, 25 bp, Homo sapien
tatacatgagccaaaatgtcagtct

SEQ ID NO: 3163149 - DNA, 25 bp, Homo sapien
tcatgaggttcatgcgttcattagc

SEQ ID NO: 3163150 - DNA, 25 bp, Homo sapien
catgaggttcatgcgttcattagcc

SEQ ID NO: 3163151 - DNA, 25 bp, Homo sapien
tgaggttcatgcgttcattagccat

SEQ ID NO: 3163152 - DNA, 25 bp, Homo sapien
gttcatgaggttcatgcgttcatta

SEQ ID NO: 3163153 - DNA, 25 bp, Homo sapien
ggtgcatagtcagagtcaagagtcc

SEQ ID NO: 3163154 - DNA, 25 bp, Homo sapien
gtgcatagtcagagtcaagagtcct

SEQ ID NO: 3163155 - DNA, 25 bp, Homo sapien
tgcatagtcagagtcaagagtcctc

SEQ ID NO: 3163156 - DNA, 25 bp, Homo sapien
taaccctgctcctataaaagactgc

SEQ ID NO: 3163157 - DNA, 25 bp, Homo sapien
taaagccctataagtccattgagtc

SEQ ID NO: 3163158 - DNA, 25 bp, Homo sapien
tgattacttataatggcccctccaa

SEQ ID NO: 3163159 - DNA, 25 bp, Homo sapien
caagtcatgtctcattctgggcagg

SEQ ID NO: 3163160 - DNA, 25 bp, Homo sapien
ttcacaaacagtttgtggcctagcc

SEQ ID NO: 3163161 - DNA, 25 bp, Homo sapien
tctttcacaaacagtttgtggccta

SEQ ID NO: 3163162 - DNA, 25 bp, Homo sapien
tttcacaaacagtttgtggcctagc

SEQ ID NO: 3163163 - DNA, 25 bp, Homo sapien
cttctttcacaaacagtttgtggcc

SEQ ID NO: 3163164 - DNA, 25 bp, Homo sapien
taagtcctggaagatctttaacact

SEQ ID NO: 3163165 - DNA, 25 bp, Homo sapien
ttctaccagttctagaggcccccag

SEQ ID NO: 3163166 - DNA, 25 bp, Homo sapien
cacttgctgttatctctgcggcttc

SEQ ID NO: 3163167 - DNA, 25 bp, Homo sapien
cccagaaggatttattttgtccgag

SEQ ID NO: 3163168 - DNA, 25 bp, Homo sapien
ggctcttcctctacctactggtgtc

SEQ ID NO: 3163169 - DNA, 25 bp, Homo sapien
caggctcttcctctacctactggtg

SEQ ID NO: 3163170 - DNA, 25 bp, Homo sapien
cattaatgccaaacgaagccaggct

SEQ ID NO: 3163171 - DNA, 25 bp, Homo sapien
tcttttgcattaatgccaaacgaag

SEQ ID NO: 3163172 - DNA, 25 bp, Homo sapien
tatttgaatttaatgctacatgtca

SEQ ID NO: 3163173 - DNA, 25 bp, Homo sapien
atttgaatttaatgctacatgtcaa

SEQ ID NO: 3163174 - DNA, 25 bp, Homo sapien
caatgacattcagacccaccaacag

SEQ ID NO: 3163175 - DNA, 25 bp, Homo sapien
caccaacagaccagcaattatggct

SEQ ID NO: 3163176 - DNA, 25 bp, Homo sapien
cttcttccatcatgagggcattggg

SEQ ID NO: 3163177 - DNA, 25 bp, Homo sapien
tttcatacagaaattggcatcaatg

SEQ ID NO: 3163178 - DNA, 25 bp, Homo sapien
cacccatgggaatgagtctctttcc

SEQ ID NO: 3163179 - DNA, 25 bp, Homo sapien
gagtgacacccatgggaatgagtct

SEQ ID NO: 3163180 - DNA, 25 bp, Homo sapien
tgacacccatgggaatgagtctctt

SEQ ID NO: 3163181 - DNA, 25 bp, Homo sapien
cagagtgacacccatgggaatgagt

SEQ ID NO: 3163182 - DNA, 25 bp, Homo sapien
ttttgggccaaacagccaggttgtg

SEQ ID NO: 3163183 - DNA, 25 bp, Homo sapien
tggcaaccctgcgtcatgcaagtat

SEQ ID NO: 3163184 - DNA, 25 bp, Homo sapien
taccatgtggaatgccttactctgt

SEQ ID NO: 3163185 - DNA, 25 bp, Homo sapien
gctccatgaactacgcccatataag

SEQ ID NO: 3163186 - DNA, 25 bp, Homo sapien
ctttactgctgttcccgtccttgag

SEQ ID NO: 3163187 - DNA, 25 bp, Homo sapien
cccgtccttgagatacattgaaaaa

SEQ ID NO: 3163188 - DNA, 25 bp, Homo sapien
ttcccgtccttgagatacattgaaa

SEQ ID NO: 3163189 - DNA, 25 bp, Homo sapien
cgtccttgagatacattgaaaaatc

SEQ ID NO: 3163190 - DNA, 25 bp, Homo sapien
tcttctacatagttcttctggtcca

SEQ ID NO: 3163191 - DNA, 25 bp, Homo sapien
cagaattgcagtaatctgaccgtct

SEQ ID NO: 3163192 - DNA, 25 bp, Homo sapien
ttcttctggtccagaattgcagtaa

SEQ ID NO: 3163193 - DNA, 25 bp, Homo sapien
tcagttcttctacatagttcttctg

SEQ ID NO: 3163194 - DNA, 25 bp, Homo sapien
ttgacctctaggcttacaaaaggct

SEQ ID NO: 3163195 - DNA, 25 bp, Homo sapien
gagttcattccctacagaataaact

SEQ ID NO: 3163196 - DNA, 25 bp, Homo sapien
taaatacttacatgcaccaaaccct

SEQ ID NO: 3163197 - DNA, 25 bp, Homo sapien
caaccctttatgttaggtattctca

SEQ ID NO: 3163198 - DNA, 25 bp, Homo sapien
ctaatgcatctacttttgcctgaag

SEQ ID NO: 3163199 - DNA, 25 bp, Homo sapien
ctgtcagtttagtgttggatttttc

SEQ ID NO: 3163200 - DNA, 25 bp, Homo sapien
ctcctctgtcagtttagtgttggat

SEQ ID NO: 3163201 - DNA, 25 bp, Homo sapien
ttctaatgcatctacttttgcctga

SEQ ID NO: 3163202 - DNA, 25 bp, Homo sapien
ttcttcttgtaaggtaatgatcctg

SEQ ID NO: 3163203 - DNA, 25 bp, Homo sapien
tgatcctgttgtttgcaactgcaag

SEQ ID NO: 3163204 - DNA, 25 bp, Homo sapien
tcttcttgtaaggtaatgatcctgt

SEQ ID NO: 3163205 - DNA, 25 bp, Homo sapien
taaggtaatgatcctgttgtttgca

SEQ ID NO: 3163206 - DNA, 25 bp, Homo sapien
tggattccagtatgtaggaactttc

SEQ ID NO: 3163207 - DNA, 25 bp, Homo sapien
tacaggccagctgcttaaaatagtc

SEQ ID NO: 3163208 - DNA, 25 bp, Homo sapien
gctgtgaagccacgaagcatcttgt

SEQ ID NO: 3163209 - DNA, 25 bp, Homo sapien
tctctaaacagatgtaggtggctgt

SEQ ID NO: 3163210 - DNA, 25 bp, Homo sapien
cttgtagaaaaaggcgcataaccct

SEQ ID NO: 3163211 - DNA, 25 bp, Homo sapien
gaaaagataaataacattgtacata

SEQ ID NO: 3163212 - DNA, 25 bp, Homo sapien
acattgtacatatttaaggatttaa

SEQ ID NO: 3163213 - DNA, 25 bp, Homo sapien
cttgaaaagataaataacattgtac

SEQ ID NO: 3163214 - DNA, 25 bp, Homo sapien
cattgtacatatttaaggatttaat

SEQ ID NO: 3163215 - DNA, 25 bp, Homo sapien
ttcacttagtgcttgcccttctgca

SEQ ID NO: 3163216 - DNA, 25 bp, Homo sapien
tcacttagtgcttgcccttctgcag

SEQ ID NO: 3163217 - DNA, 25 bp, Homo sapien
cacttagtgcttgcccttctgcagt

SEQ ID NO: 3163218 - DNA, 25 bp, Homo sapien
acttagtgcttgcccttctgcagtt

SEQ ID NO: 3163219 - DNA, 25 bp, Homo sapien
gccatggcgcttggcctgtaataat

SEQ ID NO: 3163220 - DNA, 25 bp, Homo sapien
tatactatctaaactccaggaagag

SEQ ID NO: 3163221 - DNA, 25 bp, Homo sapien
aatataataacactagcacctggat

SEQ ID NO: 3163222 - DNA, 25 bp, Homo sapien
ggcatgtactatcaagcatggttaa

SEQ ID NO: 3163223 - DNA, 25 bp, Homo sapien
tgagccaccacactcggccgctaac

SEQ ID NO: 3163224 - DNA, 25 bp, Homo sapien
tgtgagccaccacactcggccgcta

SEQ ID NO: 3163225 - DNA, 25 bp, Homo sapien
agccaccacactcggccgctaacag

SEQ ID NO: 3163226 - DNA, 25 bp, Homo sapien
gttgaccaggctggtgtgaattcct

SEQ ID NO: 3163227 - DNA, 25 bp, Homo sapien
aaactctcaggtctgaatattctgg

SEQ ID NO: 3163228 - DNA, 25 bp, Homo sapien
agtaaattgcttacactctgttcct

SEQ ID NO: 3163229 - DNA, 25 bp, Homo sapien
tgttccttcaactaagtacaaacca

SEQ ID NO: 3163230 - DNA, 25 bp, Homo sapien
ggcaaaatagcttaagctaccattc

SEQ ID NO: 3163231 - DNA, 25 bp, Homo sapien
atcttcatagccaattccatctcct

SEQ ID NO: 3163232 - DNA, 25 bp, Homo sapien
gctgctgccgaagagataccagggc

SEQ ID NO: 3163233 - DNA, 25 bp, Homo sapien
cagccatctgattagtcttctcttc

SEQ ID NO: 3163234 - DNA, 25 bp, Homo sapien
gcactgcgacagatctaatacggga

SEQ ID NO: 3163235 - DNA, 25 bp, Homo sapien
gggagcttacactcgcatcggagga

SEQ ID NO: 3163236 - DNA, 25 bp, Homo sapien
gaagctacagaactacccaggagaa

SEQ ID NO: 3163237 - DNA, 25 bp, Homo sapien
tagatactggtggaagatagctgcc

SEQ ID NO: 3163238 - DNA, 25 bp, Homo sapien
gcactatttaaggtctttgcctgtt

SEQ ID NO: 3163239 - DNA, 25 bp, Homo sapien
gctgcactatttaaggtctttgcct

SEQ ID NO: 3163240 - DNA, 25 bp, Homo sapien
tgctgcactatttaaggtctttgcc

SEQ ID NO: 3163241 - DNA, 25 bp, Homo sapien
atttgctgcactatttaaggtcttt

SEQ ID NO: 3163242 - DNA, 25 bp, Homo sapien
taagttgtgatatcggacttgcgac

SEQ ID NO: 3163243 - DNA, 25 bp, Homo sapien
tggtgacattttatatagaatcaga

SEQ ID NO: 3163244 - DNA, 25 bp, Homo sapien
gacttgcgacgtgaccaacttaaaa

SEQ ID NO: 3163245 - DNA, 25 bp, Homo sapien
gcttaaatgtagtaactttcagatt

SEQ ID NO: 3163246 - DNA, 25 bp, Homo sapien
gcactgggcctgtttaagactctga

SEQ ID NO: 3163247 - DNA, 25 bp, Homo sapien
aacatgaggagggtttccccaggcg

SEQ ID NO: 3163248 - DNA, 25 bp, Homo sapien
catgaacaatgcaccgagaatctgg

SEQ ID NO: 3163249 - DNA, 25 bp, Homo sapien
caaggactgggttgtaaaggcatca

SEQ ID NO: 3163250 - DNA, 25 bp, Homo sapien
agaaaagtaagatgaaggtgaacca

SEQ ID NO: 3163251 - DNA, 25 bp, Homo sapien
agtaagatgaaggtgaaccaggcag

SEQ ID NO: 3163252 - DNA, 25 bp, Homo sapien
aaataacccaaggaagaatgcacag

SEQ ID NO: 3163253 - DNA, 25 bp, Homo sapien
aataacccaaggaagaatgcacaga

SEQ ID NO: 3163254 - DNA, 25 bp, Homo sapien
cacatgaacttgtgataaaaaacaa

SEQ ID NO: 3163255 - DNA, 25 bp, Homo sapien
gccacatgaacttgtgataaaaaac

SEQ ID NO: 3163256 - DNA, 25 bp, Homo sapien
ccacatgaacttgtgataaaaaaca

SEQ ID NO: 3163257 - DNA, 25 bp, Homo sapien
ttccagctgcagactgttgatcttg

SEQ ID NO: 3163258 - DNA, 25 bp, Homo sapien
actcagcagattggcggcttcgctc

SEQ ID NO: 3163259 - DNA, 25 bp, Homo sapien
tccagctgcagactgttgatcttgt

SEQ ID NO: 3163260 - DNA, 25 bp, Homo sapien
gtccaactcagcagattggcggctt

SEQ ID NO: 3163261 - DNA, 25 bp, Homo sapien
tacgaatggttaagggcttgctgtc

SEQ ID NO: 3163262 - DNA, 25 bp, Homo sapien
ggctggaagtcatgagacccctttt

SEQ ID NO: 3163263 - DNA, 25 bp, Homo sapien
catgtgaagtgcctaaagtatctgg

SEQ ID NO: 3163264 - DNA, 25 bp, Homo sapien
taagaattacccatgaccaccctgt

SEQ ID NO: 3163265 - DNA, 25 bp, Homo sapien
gatgctcctgtcgttttgtaatctt

SEQ ID NO: 3163266 - DNA, 25 bp, Homo sapien
tgctcctgtcgttttgtaatcttct

SEQ ID NO: 3163267 - DNA, 25 bp, Homo sapien
ggatgctcctgtcgttttgtaatct

SEQ ID NO: 3163268 - DNA, 25 bp, Homo sapien
gggatgctcctgtcgttttgtaatc

SEQ ID NO: 3163269 - DNA, 25 bp, Homo sapien
gaaatcaagttggagaaagtatcct

SEQ ID NO: 3163270 - DNA, 25 bp, Homo sapien
gccactaagtatgtgatctgtaaag

SEQ ID NO: 3163271 - DNA, 25 bp, Homo sapien
tatctacatacttgaggacacagcc

SEQ ID NO: 3163272 - DNA, 25 bp, Homo sapien
tgacaggactatcaaggtagcctct

SEQ ID NO: 3163273 - DNA, 25 bp, Homo sapien
ggttggagagggattattatactat

SEQ ID NO: 3163274 - DNA, 25 bp, Homo sapien
acagaagcaaatccacattgaggaa

SEQ ID NO: 3163275 - DNA, 25 bp, Homo sapien
gggttggagagggattattatacta

SEQ ID NO: 3163276 - DNA, 25 bp, Homo sapien
agcaaatccacattgaggaaaattc

SEQ ID NO: 3163277 - DNA, 25 bp, Homo sapien
caggaaagcttcaacagagagtgct

SEQ ID NO: 3163278 - DNA, 25 bp, Homo sapien
cacaaaaatgcccaggaaagcttca

SEQ ID NO: 3163279 - DNA, 25 bp, Homo sapien
ggagatgtaacaacttcatagtaca

SEQ ID NO: 3163280 - DNA, 25 bp, Homo sapien
gcagacgggtcaaaagcaaaggtca

SEQ ID NO: 3163281 - DNA, 25 bp, Homo sapien
taagccctgcctgggcaaattttgt

SEQ ID NO: 3163282 - DNA, 25 bp, Homo sapien
gagaggtcaatacttatcctcctgg

SEQ ID NO: 3163283 - DNA, 25 bp, Homo sapien
tgcccatgtgcatccaaaagtggaa

SEQ ID NO: 3163284 - DNA, 25 bp, Homo sapien
attataggtgcacgcagcaaggccc

SEQ ID NO: 3163285 - DNA, 25 bp, Homo sapien
taatcctctggacgttcaatcaagt

SEQ ID NO: 3163286 - DNA, 25 bp, Homo sapien
tagggaagggatctaactttcaagc

SEQ ID NO: 3163287 - DNA, 25 bp, Homo sapien
caaggatggccatatacagcagact

SEQ ID NO: 3163288 - DNA, 25 bp, Homo sapien
caatcaagttgatgccccagtgcca

SEQ ID NO: 3163289 - DNA, 25 bp, Homo sapien
ttagtttaacattttcctcttgcat

SEQ ID NO: 3163290 - DNA, 25 bp, Homo sapien
cctcttgcattttgtgcttcccatc

SEQ ID NO: 3163291 - DNA, 25 bp, Homo sapien
tttcctcttgcattttgtgcttccc

SEQ ID NO: 3163292 - DNA, 25 bp, Homo sapien
ctgtggctttcttccaggggctttt

SEQ ID NO: 3163293 - DNA, 25 bp, Homo sapien
tcatcatgagcaaatcagacagagt

SEQ ID NO: 3163294 - DNA, 25 bp, Homo sapien
tcagtgtctggtcggtgtcaatgcc

SEQ ID NO: 3163295 - DNA, 25 bp, Homo sapien
tagcacagaggtagaaacaagtcat

SEQ ID NO: 3163296 - DNA, 25 bp, Homo sapien
cagaatgtcatgtaactggacctcc

SEQ ID NO: 3163297 - DNA, 25 bp, Homo sapien
accatgctctttgggagcaaggcca

SEQ ID NO: 3163298 - DNA, 25 bp, Homo sapien
gaaagggacatttaggccaagcacc

SEQ ID NO: 3163299 - DNA, 25 bp, Homo sapien
gggacagctgtatagttctctcaaa

SEQ ID NO: 3163300 - DNA, 25 bp, Homo sapien
tcttaaggtgacgaagcctggctag

SEQ ID NO: 3163301 - DNA, 25 bp, Homo sapien
cggttacagggaaaatgcactacag

SEQ ID NO: 3163302 - DNA, 25 bp, Homo sapien
agcaaagcccgctctcggttacagg

SEQ ID NO: 3163303 - DNA, 25 bp, Homo sapien
ttcttcatgagggactaagctgagc

SEQ ID NO: 3163304 - DNA, 25 bp, Homo sapien
gctaactccgatgttccagcatgga

SEQ ID NO: 3163305 - DNA, 25 bp, Homo sapien
ctgtaggtcttttatattacttaga

SEQ ID NO: 3163306 - DNA, 25 bp, Homo sapien
tgacttattatataagggttcccat

SEQ ID NO: 3163307 - DNA, 25 bp, Homo sapien
tgaatcactagaatctgacccttga

SEQ ID NO: 3163308 - DNA, 25 bp, Homo sapien
ttcaaacaagaaatactgtaggtct

SEQ ID NO: 3163309 - DNA, 25 bp, Homo sapien
tgttcatccatagggtggggttgca

SEQ ID NO: 3163310 - DNA, 25 bp, Homo sapien
ctgttcatccatagggtggggttgc

SEQ ID NO: 3163311 - DNA, 25 bp, Homo sapien
ttcatccatagggtggggttgcagc

SEQ ID NO: 3163312 - DNA, 25 bp, Homo sapien
gttcatccatagggtggggttgcag

SEQ ID NO: 3163313 - DNA, 25 bp, Homo sapien
tggctaggcacggtacaaccaactt

SEQ ID NO: 3163314 - DNA, 25 bp, Homo sapien
ttgctggctaggcacggtacaacca

SEQ ID NO: 3163315 - DNA, 25 bp, Homo sapien
cttatttgctggctaggcacggtac

SEQ ID NO: 3163316 - DNA, 25 bp, Homo sapien
taggcacggtacaaccaacttcata

SEQ ID NO: 3163317 - DNA, 25 bp, Homo sapien
aaagctgtgctacttcctgtgtgag

SEQ ID NO: 3163318 - DNA, 25 bp, Homo sapien
tattgttagaaggatggcacactgt

SEQ ID NO: 3163319 - DNA, 25 bp, Homo sapien
tacatatttgttcagggtattgtta

SEQ ID NO: 3163320 - DNA, 25 bp, Homo sapien
gtgagcttcaggcaatacatatttg

SEQ ID NO: 3163321 - DNA, 25 bp, Homo sapien
caattataaataggtagtcctacca

SEQ ID NO: 3163322 - DNA, 25 bp, Homo sapien
tataatcacactatagactatctgg

SEQ ID NO: 3163323 - DNA, 25 bp, Homo sapien
cctaccaccataatacaactcggat

SEQ ID NO: 3163324 - DNA, 25 bp, Homo sapien
ctaaaccacacagggagctggttag

SEQ ID NO: 3163325 - DNA, 25 bp, Homo sapien
tggcttttcagagagcagcagctga

SEQ ID NO: 3163326 - DNA, 25 bp, Homo sapien
ctgtggcttttcagagagcagcagc

SEQ ID NO: 3163327 - DNA, 25 bp, Homo sapien
tgtggcttttcagagagcagcagct

SEQ ID NO: 3163328 - DNA, 25 bp, Homo sapien
gcttttcagagagcagcagctgatc

SEQ ID NO: 3163329 - DNA, 25 bp, Homo sapien
tgccgtcttcctggcatagctgaca

SEQ ID NO: 3163330 - DNA, 25 bp, Homo sapien
cgtcttcctggcatagctgacacaa

SEQ ID NO: 3163331 - DNA, 25 bp, Homo sapien
gccgtcttcctggcatagctgacac

SEQ ID NO: 3163332 - DNA, 25 bp, Homo sapien
ccgtcttcctggcatagctgacaca

SEQ ID NO: 3163333 - DNA, 25 bp, Homo sapien
tgcactctgcactctatgcgggaaa

SEQ ID NO: 3163334 - DNA, 25 bp, Homo sapien
gctgctgtagacatccctatgaaaa

SEQ ID NO: 3163335 - DNA, 25 bp, Homo sapien
ccgcgcctggctatttatgtttatt

SEQ ID NO: 3163336 - DNA, 25 bp, Homo sapien
caggtacccagtaaatgcttgcccc

SEQ ID NO: 3163337 - DNA, 25 bp, Homo sapien
ggtagtatctgaacacaggcccaat

SEQ ID NO: 3163338 - DNA, 25 bp, Homo sapien
tggtatacacaaagctccaagggtc

SEQ ID NO: 3163339 - DNA, 25 bp, Homo sapien
taatggtcaagcacagagagcaaga

SEQ ID NO: 3163340 - DNA, 25 bp, Homo sapien
gaagtcactatagcaatgtcagcag

SEQ ID NO: 3163341 - DNA, 25 bp, Homo sapien
gacagggattgcaaactcgctcaag

SEQ ID NO: 3163342 - DNA, 25 bp, Homo sapien
tgcaaactcgctcaagcttgatact

SEQ ID NO: 3163343 - DNA, 25 bp, Homo sapien
tcaagcttgatacttgaaggaagag

SEQ ID NO: 3163344 - DNA, 25 bp, Homo sapien
agcttgatacttgaaggaagaggca

SEQ ID NO: 3163345 - DNA, 25 bp, Homo sapien
tgatgggctggtagaatattgcttc

SEQ ID NO: 3163346 - DNA, 25 bp, Homo sapien
tatgatgggctggtagaatattgct

SEQ ID NO: 3163347 - DNA, 25 bp, Homo sapien
ttatgatgggctggtagaatattgc

SEQ ID NO: 3163348 - DNA, 25 bp, Homo sapien
gatgggctggtagaatattgcttca

SEQ ID NO: 3163349 - DNA, 25 bp, Homo sapien
cagaggagcctgcataaacgttttg

SEQ ID NO: 3163350 - DNA, 25 bp, Homo sapien
tctccctggacctagtaaattccta

SEQ ID NO: 3163351 - DNA, 25 bp, Homo sapien
tgagcaaaatttccagtaaccccaa

SEQ ID NO: 3163352 - DNA, 25 bp, Homo sapien
tagttgactctaagaactgggctct

SEQ ID NO: 3163353 - DNA, 25 bp, Homo sapien
ccattatgacttggaaaggaagatg

SEQ ID NO: 3163354 - DNA, 25 bp, Homo sapien
tcctattaaatccaccccagtatca

SEQ ID NO: 3163355 - DNA, 25 bp, Homo sapien
tcttttccctgagattgggttcaca

SEQ ID NO: 3163356 - DNA, 25 bp, Homo sapien
caatgtttatactaacagcacctgg

SEQ ID NO: 3163357 - DNA, 25 bp, Homo sapien
ggatgactgtattgcccttttcaag

SEQ ID NO: 3163358 - DNA, 25 bp, Homo sapien
accaggctgagcaaccaatgagacc

SEQ ID NO: 3163359 - DNA, 25 bp, Homo sapien
tctcggcactgtggaagtcaaggtg

SEQ ID NO: 3163360 - DNA, 25 bp, Homo sapien
tattccgagctaactgttctcagcc

SEQ ID NO: 3163361 - DNA, 25 bp, Homo sapien
caggctgacttttggaataacaact

SEQ ID NO: 3163362 - DNA, 25 bp, Homo sapien
taacaggctgacttttggaataaca

SEQ ID NO: 3163363 - DNA, 25 bp, Homo sapien
ggctgacttttggaataacaactct

SEQ ID NO: 3163364 - DNA, 25 bp, Homo sapien
aacaggctgacttttggaataacaa

SEQ ID NO: 3163365 - DNA, 25 bp, Homo sapien
cccctgtcaaaaatctgactatatg

SEQ ID NO: 3163366 - DNA, 25 bp, Homo sapien
ttttcttccaaccttagtggatgga

SEQ ID NO: 3163367 - DNA, 25 bp, Homo sapien
tagtggatggagctagttcttgatg

SEQ ID NO: 3163368 - DNA, 25 bp, Homo sapien
taaattttgagatcagtaagtgaag

SEQ ID NO: 3163369 - DNA, 25 bp, Homo sapien
ttctgtataggagagatgctaccgc

SEQ ID NO: 3163370 - DNA, 25 bp, Homo sapien
ctcgaaaggtggagagttaagctct

SEQ ID NO: 3163371 - DNA, 25 bp, Homo sapien
cacatggactcatgggtacttactt

SEQ ID NO: 3163372 - DNA, 25 bp, Homo sapien
taagcacaatccatactcgaaaggt

SEQ ID NO: 3163373 - DNA, 25 bp, Homo sapien
agcccagtcgtcacgcttatgaact

SEQ ID NO: 3163374 - DNA, 25 bp, Homo sapien
gtgtgaaagcccagtcgtcacgctt

SEQ ID NO: 3163375 - DNA, 25 bp, Homo sapien
tgggtaatgtcctgatgtaacaagg

SEQ ID NO: 3163376 - DNA, 25 bp, Homo sapien
atgggtaatgtcctgatgtaacaag

SEQ ID NO: 3163377 - DNA, 25 bp, Homo sapien
cctgttctcagggtgacgactgcca

SEQ ID NO: 3163378 - DNA, 25 bp, Homo sapien
gctaaaggcgtataacggtggtgcc

SEQ ID NO: 3163379 - DNA, 25 bp, Homo sapien
gaatttaaaccagctctagatagga

SEQ ID NO: 3163380 - DNA, 25 bp, Homo sapien
tgcccaggtttctgacaggtgatac

SEQ ID NO: 3163381 - DNA, 25 bp, Homo sapien
attaactatatcaaaagctgggtag

SEQ ID NO: 3163382 - DNA, 25 bp, Homo sapien
ctaaagatttaataggactttacat

SEQ ID NO: 3163383 - DNA, 25 bp, Homo sapien
tttaataggactttacatactttga

SEQ ID NO: 3163384 - DNA, 25 bp, Homo sapien
ttattaactatatcaaaagctgggt

SEQ ID NO: 3163385 - DNA, 25 bp, Homo sapien
cagttgtattatgcttgggagctca

SEQ ID NO: 3163386 - DNA, 25 bp, Homo sapien
tgtggttcgtttgagaggacttcct

SEQ ID NO: 3163387 - DNA, 25 bp, Homo sapien
tcttcgcctgtggtaaatgatggtg

SEQ ID NO: 3163388 - DNA, 25 bp, Homo sapien
ggatgccttaatgaagagcttgcag

SEQ ID NO: 3163389 - DNA, 25 bp, Homo sapien
aaatattctagcaaagaaaataagg

SEQ ID NO: 3163390 - DNA, 25 bp, Homo sapien
aaacaagactgaaaagtgttgacaa

SEQ ID NO: 3163391 - DNA, 25 bp, Homo sapien
gctgcacaaccagtctttgtgtatg

SEQ ID NO: 3163392 - DNA, 25 bp, Homo sapien
tgttgacaatttatgaagttctgga

SEQ ID NO: 3163393 - DNA, 25 bp, Homo sapien
tagtagatacgggatgtcgccaggt

SEQ ID NO: 3163394 - DNA, 25 bp, Homo sapien
tgatctgttaggaagggctaaccca

SEQ ID NO: 3163395 - DNA, 25 bp, Homo sapien
gagcgtgtgaccttttgggactaca

SEQ ID NO: 3163396 - DNA, 25 bp, Homo sapien
gtgtgagtcatattcccaccactgc

SEQ ID NO: 3163397 - DNA, 25 bp, Homo sapien
tcagaaacagctgaattagttacag

SEQ ID NO: 3163398 - DNA, 25 bp, Homo sapien
tccaaggactcaaatatggaagtac

SEQ ID NO: 3163399 - DNA, 25 bp, Homo sapien
gcactattgttataacctctaagtt

SEQ ID NO: 3163400 - DNA, 25 bp, Homo sapien
taatacttcccgtgaatcttcggag

SEQ ID NO: 3163401 - DNA, 25 bp, Homo sapien
catatgtgcttctgaagccgagcac

SEQ ID NO: 3163402 - DNA, 25 bp, Homo sapien
tttagcatatgtgcttctgaagccg

SEQ ID NO: 3163403 - DNA, 25 bp, Homo sapien
tgtatcgttctaattattttagcat

SEQ ID NO: 3163404 - DNA, 25 bp, Homo sapien
tagcatatgtgcttctgaagccgag

SEQ ID NO: 3163405 - DNA, 25 bp, Homo sapien
caatatcactgtgttgcaggaaata

SEQ ID NO: 3163406 - DNA, 25 bp, Homo sapien
gccactcaacggagcagtcagaaca

SEQ ID NO: 3163407 - DNA, 25 bp, Homo sapien
agacagacagagaaacggccactca

SEQ ID NO: 3163408 - DNA, 25 bp, Homo sapien
gaggcttagctttcggcctgtctca

SEQ ID NO: 3163409 - DNA, 25 bp, Homo sapien
tgctggtagagggacttatctttga

SEQ ID NO: 3163410 - DNA, 25 bp, Homo sapien
cgcaaattcttaagatagggcaaca

SEQ ID NO: 3163411 - DNA, 25 bp, Homo sapien
caatgatgtttgatagccttttaca

SEQ ID NO: 3163412 - DNA, 25 bp, Homo sapien
aagatctgtcctttatgcaatgatg

SEQ ID NO: 3163413 - DNA, 25 bp, Homo sapien
taaatgtgtttatgttaccttccta

SEQ ID NO: 3163414 - DNA, 25 bp, Homo sapien
tttatgttaccttcctatttcagtg

SEQ ID NO: 3163415 - DNA, 25 bp, Homo sapien
tccttaagatgcattcacccagtgc

SEQ ID NO: 3163416 - DNA, 25 bp, Homo sapien
gatgcattcacccagtgcacccaaa

SEQ ID NO: 3163417 - DNA, 25 bp, Homo sapien
taaatagataaatatgtgtctaata

SEQ ID NO: 3163418 - DNA, 25 bp, Homo sapien
tctaatatttggcagcttaaatata

SEQ ID NO: 3163419 - DNA, 25 bp, Homo sapien
gtctaatatttggcagcttaaatat

SEQ ID NO: 3163420 - DNA, 25 bp, Homo sapien
ttcggctcagctagttccaatggca

SEQ ID NO: 3163421 - DNA, 25 bp, Homo sapien
gctcggtggccgcaactagttcggc

SEQ ID NO: 3163422 - DNA, 25 bp, Homo sapien
ggaaaggcgaatggaacaggagaca

SEQ ID NO: 3163423 - DNA, 25 bp, Homo sapien
gccgagagccggctgctcggtggcc

SEQ ID NO: 3163424 - DNA, 25 bp, Homo sapien
actaaacatggaatgagtgcatcac

SEQ ID NO: 3163425 - DNA, 25 bp, Homo sapien
caacgaagccttcaaaggagttatt

SEQ ID NO: 3163426 - DNA, 25 bp, Homo sapien
gaggacctgaggcttatctactgcc

SEQ ID NO: 3163427 - DNA, 25 bp, Homo sapien
cacgttcccctccactcgtctggaa

SEQ ID NO: 3163428 - DNA, 25 bp, Homo sapien
tctacaggactcagtttgacattcc

SEQ ID NO: 3163429 - DNA, 25 bp, Homo sapien
ctctacaggactcagtttgacattc

SEQ ID NO: 3163430 - DNA, 25 bp, Homo sapien
cagttccacgatccccaataggtag

SEQ ID NO: 3163431 - DNA, 25 bp, Homo sapien
taggtagggactatgcctcaagcca

SEQ ID NO: 3163432 - DNA, 25 bp, Homo sapien
gaaggcacggaacataaggccaact

SEQ ID NO: 3163433 - DNA, 25 bp, Homo sapien
tacatagggcatactcgaagtaact

SEQ ID NO: 3163434 - DNA, 25 bp, Homo sapien
taatgacagtgtttatacaggactc

SEQ ID NO: 3163435 - DNA, 25 bp, Homo sapien
tacaggactctggtttatgaaaagc

SEQ ID NO: 3163436 - DNA, 25 bp, Homo sapien
cacttcgcttttacacacaggaggt

SEQ ID NO: 3163437 - DNA, 25 bp, Homo sapien
caaacagtttatacactgggcttgg

SEQ ID NO: 3163438 - DNA, 25 bp, Homo sapien
ggcggcaaatctgaccacaccatgt

SEQ ID NO: 3163439 - DNA, 25 bp, Homo sapien
gcaaaagagttaccagacactggaa

SEQ ID NO: 3163440 - DNA, 25 bp, Homo sapien
gcttctaacatgagagacgacacca

SEQ ID NO: 3163441 - DNA, 25 bp, Homo sapien
tcataccaggagttcttcaaggaaa

SEQ ID NO: 3163442 - DNA, 25 bp, Homo sapien
tattctatggagagggcaaaacaga

SEQ ID NO: 3163443 - DNA, 25 bp, Homo sapien
gagacacaggtatagttgcaggcaa

SEQ ID NO: 3163444 - DNA, 25 bp, Homo sapien
cctaaacaatctacacagtgggctt

SEQ ID NO: 3163445 - DNA, 25 bp, Homo sapien
catagatcccacaaaagatttaggg

SEQ ID NO: 3163446 - DNA, 25 bp, Homo sapien
taagttgcagcagataaaagtgaca

SEQ ID NO: 3163447 - DNA, 25 bp, Homo sapien
tacttctgcagtcatagtaagacaa

SEQ ID NO: 3163448 - DNA, 25 bp, Homo sapien
taagaaacagccactactactgtgt

SEQ ID NO: 3163449 - DNA, 25 bp, Homo sapien
gccaagagagatatgatagccagat

SEQ ID NO: 3163450 - DNA, 25 bp, Homo sapien
ataatccgacaatatgaaccttctc

SEQ ID NO: 3163451 - DNA, 25 bp, Homo sapien
tttgagtctttcataatccgacaat

SEQ ID NO: 3163452 - DNA, 25 bp, Homo sapien
gagtctttcataatccgacaatatg

SEQ ID NO: 3163453 - DNA, 25 bp, Homo sapien
tcataatccgacaatatgaaccttc

SEQ ID NO: 3163454 - DNA, 25 bp, Homo sapien
accaataaaacgagttgtcaatctc

SEQ ID NO: 3163455 - DNA, 25 bp, Homo sapien
ttgccatgtgacgtacctgctctcc

SEQ ID NO: 3163456 - DNA, 25 bp, Homo sapien
atttgacaacaatcttaaaatatta

SEQ ID NO: 3163457 - DNA, 25 bp, Homo sapien
ttaaaatattacagacactaccaat

SEQ ID NO: 3163458 - DNA, 25 bp, Homo sapien
taagacgggttaaggatgccttctc

SEQ ID NO: 3163459 - DNA, 25 bp, Homo sapien
gaaatgtttctaaggcatcactgca

SEQ ID NO: 3163460 - DNA, 25 bp, Homo sapien
taatacagaagccagcccgatagga

SEQ ID NO: 3163461 - DNA, 25 bp, Homo sapien
gaagcttccctgatatcctaagacg

SEQ ID NO: 3163462 - DNA, 25 bp, Homo sapien
tgagtaaattacatttgaagcaccc

SEQ ID NO: 3163463 - DNA, 25 bp, Homo sapien
gagcaaacgctcaatataatgtgaa

SEQ ID NO: 3163464 - DNA, 25 bp, Homo sapien
tgaggcagcaatcacagagcaaacg

SEQ ID NO: 3163465 - DNA, 25 bp, Homo sapien
gaagcaccctagttttgaggcagca

SEQ ID NO: 3163466 - DNA, 25 bp, Homo sapien
cctagccaactagccagggatgtga

SEQ ID NO: 3163467 - DNA, 25 bp, Homo sapien
aattcaacaataagagcctgagcaa

SEQ ID NO: 3163468 - DNA, 25 bp, Homo sapien
tctacgactcacttgtcagggactc

SEQ ID NO: 3163469 - DNA, 25 bp, Homo sapien
agacccagtgtcttgatcctgcctt

SEQ ID NO: 3163470 - DNA, 25 bp, Homo sapien
tgctatccgcagttcagaaatcgag

SEQ ID NO: 3163471 - DNA, 25 bp, Homo sapien
caggtggtattgctactattgttac

SEQ ID NO: 3163472 - DNA, 25 bp, Homo sapien
tttcatccacgctttcagaaaggca

SEQ ID NO: 3163473 - DNA, 25 bp, Homo sapien
gataaccttgtttcaagacagacag

SEQ ID NO: 3163474 - DNA, 25 bp, Homo sapien
aattcccctcctataccatctctaa

SEQ ID NO: 3163475 - DNA, 25 bp, Homo sapien
tcttaatcttcaaaccacctaattc

SEQ ID NO: 3163476 - DNA, 25 bp, Homo sapien
tgctgggaatagatacatcttaatc

SEQ ID NO: 3163477 - DNA, 25 bp, Homo sapien
cacctaattcccctcctataccatc

SEQ ID NO: 3163478 - DNA, 25 bp, Homo sapien
aacactacagatcaggtattcgata

SEQ ID NO: 3163479 - DNA, 25 bp, Homo sapien
cactacagatcaggtattcgataaa

SEQ ID NO: 3163480 - DNA, 25 bp, Homo sapien
acactacagatcaggtattcgataa

SEQ ID NO: 3163481 - DNA, 25 bp, Homo sapien
ctttcattcacatcagtagctcctt

SEQ ID NO: 3163482 - DNA, 25 bp, Homo sapien
ttcattcacatcagtagctccttcc

SEQ ID NO: 3163483 - DNA, 25 bp, Homo sapien
tcattcacatcagtagctccttcca

SEQ ID NO: 3163484 - DNA, 25 bp, Homo sapien
cattcacatcagtagctccttccat

SEQ ID NO: 3163485 - DNA, 25 bp, Homo sapien
catagtgtacttaataatgtttttc

SEQ ID NO: 3163486 - DNA, 25 bp, Homo sapien
cacagtagcatagtgtacttaataa

SEQ ID NO: 3163487 - DNA, 25 bp, Homo sapien
gcttttacacagtagcatagtgtac

SEQ ID NO: 3163488 - DNA, 25 bp, Homo sapien
atttgcttttacacagtagcatagt

SEQ ID NO: 3163489 - DNA, 25 bp, Homo sapien
gttgccactgccaagtgtggcttct

SEQ ID NO: 3163490 - DNA, 25 bp, Homo sapien
gacagccatccgaaggttgccactg

SEQ ID NO: 3163491 - DNA, 25 bp, Homo sapien
cgtgttttaagagctcatactggtg

SEQ ID NO: 3163492 - DNA, 25 bp, Homo sapien
ttcattgagatcttccccttcagga

SEQ ID NO: 3163493 - DNA, 25 bp, Homo sapien
catcttagaaatacggcaggcctca

SEQ ID NO: 3163494 - DNA, 25 bp, Homo sapien
cgtacacatatattggagattcatt

SEQ ID NO: 3163495 - DNA, 25 bp, Homo sapien
gactctactgtaatatagaagctct

SEQ ID NO: 3163496 - DNA, 25 bp, Homo sapien
tatatttaaaagtcagactctactg

SEQ ID NO: 3163497 - DNA, 25 bp, Homo sapien
tactatcaccggtttcaggaatcca

SEQ ID NO: 3163498 - DNA, 25 bp, Homo sapien
taagagaggtacagacactcagttg

SEQ ID NO: 3163499 - DNA, 25 bp, Homo sapien
tgtatccctagcagataagagaggt

SEQ ID NO: 3163500 - DNA, 25 bp, Homo sapien
aacacagtgtacagaaggttcagta

SEQ ID NO: 3163501 - DNA, 25 bp, Homo sapien
gactggaagtatctgtcctgactcc

SEQ ID NO: 3163502 - DNA, 25 bp, Homo sapien
gccaatgcacctagtctctccttat

SEQ ID NO: 3163503 - DNA, 25 bp, Homo sapien
ttactcctctatgaacctgaaatgt

SEQ ID NO: 3163504 - DNA, 25 bp, Homo sapien
ttacactttcacctattatttggat

SEQ ID NO: 3163505 - DNA, 25 bp, Homo sapien
gagttttgactaattcgtgaagcct

SEQ ID NO: 3163506 - DNA, 25 bp, Homo sapien
gggagagatctcaactacagtgatg

SEQ ID NO: 3163507 - DNA, 25 bp, Homo sapien
gatcagctgcctatttatatggacc

SEQ ID NO: 3163508 - DNA, 25 bp, Homo sapien
acagtgatgaatgcaagagtccttg

SEQ ID NO: 3163509 - DNA, 25 bp, Homo sapien
tcatgtgctcctaggtcaagtctgt

SEQ ID NO: 3163510 - DNA, 25 bp, Homo sapien
gctttctagccagattccaccatgg

SEQ ID NO: 3163511 - DNA, 25 bp, Homo sapien
tatatactcttaggtgcttaggtca

SEQ ID NO: 3163512 - DNA, 25 bp, Homo sapien
gccgagcccaattccctttattgta

SEQ ID NO: 3163513 - DNA, 25 bp, Homo sapien
ccataaagcatgttgatctgattga

SEQ ID NO: 3163514 - DNA, 25 bp, Homo sapien
ctgtacagaagtctgtgatagttcc

SEQ ID NO: 3163515 - DNA, 25 bp, Homo sapien
ttctgtacagaagtctgtgatagtt

SEQ ID NO: 3163516 - DNA, 25 bp, Homo sapien
tccataaagcatgttgatctgattg

SEQ ID NO: 3163517 - DNA, 25 bp, Homo sapien
tacaaaccccatacaaagtccacag

SEQ ID NO: 3163518 - DNA, 25 bp, Homo sapien
ctccaaagtaaacagtcccgtgacg

SEQ ID NO: 3163519 - DNA, 25 bp, Homo sapien
agtccacagaagacgtttctccaaa

SEQ ID NO: 3163520 - DNA, 25 bp, Homo sapien
ttctccaaagtaaacagtcccgtga

SEQ ID NO: 3163521 - DNA, 25 bp, Homo sapien
agagtttgggctaaatgacaggtca

SEQ ID NO: 3163522 - DNA, 25 bp, Homo sapien
agtttgggctaaatgacaggtcagt

SEQ ID NO: 3163523 - DNA, 25 bp, Homo sapien
tgggctaaatgacaggtcagtgagc

SEQ ID NO: 3163524 - DNA, 25 bp, Homo sapien
ttgggctaaatgacaggtcagtgag

SEQ ID NO: 3163525 - DNA, 25 bp, Homo sapien
gatggaaataacgtctcatcatcca

SEQ ID NO: 3163526 - DNA, 25 bp, Homo sapien
tatactttggtgcagagcacttaat

SEQ ID NO: 3163527 - DNA, 25 bp, Homo sapien
tatgttcgttccatctgcccaatga

SEQ ID NO: 3163528 - DNA, 25 bp, Homo sapien
tcatccaactggtcctgaacccaag

SEQ ID NO: 3163529 - DNA, 25 bp, Homo sapien
gaactctccaactagatatagtgga

SEQ ID NO: 3163530 - DNA, 25 bp, Homo sapien
gaataggaataaccctccatctaga

SEQ ID NO: 3163531 - DNA, 25 bp, Homo sapien
cactggatagaagccatatgaactt

SEQ ID NO: 3163532 - DNA, 25 bp, Homo sapien
aaaagcaaagtcactcagccgatga

SEQ ID NO: 3163533 - DNA, 25 bp, Homo sapien
tgatgataaatgtgagcataaaccc

SEQ ID NO: 3163534 - DNA, 25 bp, Homo sapien
gcgtttgagtatagtttttgccaca

SEQ ID NO: 3163535 - DNA, 25 bp, Homo sapien
tgtgagcataaaccctaaagaggcg

SEQ ID NO: 3163536 - DNA, 25 bp, Homo sapien
agatgtatttagatgtgcttcctcc

SEQ ID NO: 3163537 - DNA, 25 bp, Homo sapien
gactaatggccctctggcacagaaa

SEQ ID NO: 3163538 - DNA, 25 bp, Homo sapien
gagtccgctaataaagatccagggc

SEQ ID NO: 3163539 - DNA, 25 bp, Homo sapien
tccatatggcctgttaactgaagca

SEQ ID NO: 3163540 - DNA, 25 bp, Homo sapien
gactacagagatatggcaaattcca

SEQ ID NO: 3163541 - DNA, 25 bp, Homo sapien
tgtgatactggatgttaactacttc

SEQ ID NO: 3163542 - DNA, 25 bp, Homo sapien
gcctgacacaaagtaacaataaatg

SEQ ID NO: 3163543 - DNA, 25 bp, Homo sapien
gcactcctgatgttatgcttttaca

SEQ ID NO: 3163544 - DNA, 25 bp, Homo sapien
taactacttcatgtaatgcctgaca

SEQ ID NO: 3163545 - DNA, 25 bp, Homo sapien
ttatctgtcttttgaggtgagtttt

SEQ ID NO: 3163546 - DNA, 25 bp, Homo sapien
tggagtggtgcaagttctcttctat

SEQ ID NO: 3163547 - DNA, 25 bp, Homo sapien
tacttgcacagtgtaaatgccgccc

SEQ ID NO: 3163548 - DNA, 25 bp, Homo sapien
ttatcaaaacctgtctcagagaggg

SEQ ID NO: 3163549 - DNA, 25 bp, Homo sapien
tgcaaaatggtaagaaacgcccacc

SEQ ID NO: 3163550 - DNA, 25 bp, Homo sapien
gaaatactctaagcaggcacctgag

SEQ ID NO: 3163551 - DNA, 25 bp, Homo sapien
catggccaaacgtaactatttattc

SEQ ID NO: 3163552 - DNA, 25 bp, Homo sapien
tcatggccaaacgtaactatttatt

SEQ ID NO: 3163553 - DNA, 25 bp, Homo sapien
cattaagtagtggttacacagccca

SEQ ID NO: 3163554 - DNA, 25 bp, Homo sapien
taacatactagaagagcataggagc

SEQ ID NO: 3163555 - DNA, 25 bp, Homo sapien
gagccatcagatgtatacagcttag

SEQ ID NO: 3163556 - DNA, 25 bp, Homo sapien
cacagcccatgagtttgtctacaca

SEQ ID NO: 3163557 - DNA, 25 bp, Homo sapien
ccatttgatttggatgcacgaccat

SEQ ID NO: 3163558 - DNA, 25 bp, Homo sapien
gggtttgactttggcgcgcggaggc

SEQ ID NO: 3163559 - DNA, 25 bp, Homo sapien
ctgccgggtcagctagtgagctcac

SEQ ID NO: 3163560 - DNA, 25 bp, Homo sapien
tttggcgcgcggaggcagctgagga

SEQ ID NO: 3163561 - DNA, 25 bp, Homo sapien
ctcaagccgcgctccctagctgccc

SEQ ID NO: 3163562 - DNA, 25 bp, Homo sapien
aggcggccacgggtgcgcgcactgg

SEQ ID NO: 3163563 - DNA, 25 bp, Homo sapien
gcggcgccgctaagccagatcctga

SEQ ID NO: 3163564 - DNA, 25 bp, Homo sapien
actggagctcgcggcgccgctaagc

SEQ ID NO: 3163565 - DNA, 25 bp, Homo sapien
ggtgcgcgcactggagctcgcggcg

SEQ ID NO: 3163566 - DNA, 25 bp, Homo sapien
cccagagctcgtccggcaaagaggg

SEQ ID NO: 3163567 - DNA, 25 bp, Homo sapien
ccttagtcttgtggcggcccagagc

SEQ ID NO: 3163568 - DNA, 25 bp, Homo sapien
gcggcccagagctcgtccggcaaag

SEQ ID NO: 3163569 - DNA, 25 bp, Homo sapien
tccttagtcttgtggcggcccagag

SEQ ID NO: 3163570 - DNA, 25 bp, Homo sapien
ttcttgatgcgggtcccctcagagc

SEQ ID NO: 3163571 - DNA, 25 bp, Homo sapien
agacgggcagcttctcttgggcggg

SEQ ID NO: 3163572 - DNA, 25 bp, Homo sapien
gagctggctgagaaagacgggcagc

SEQ ID NO: 3163573 - DNA, 25 bp, Homo sapien
cgatgttcccttcgatggagatttt

SEQ ID NO: 3163574 - DNA, 25 bp, Homo sapien
gcggcgaagggaagcttcagccact

SEQ ID NO: 3163575 - DNA, 25 bp, Homo sapien
agccttgcgtcccacatttccggag

SEQ ID NO: 3163576 - DNA, 25 bp, Homo sapien
ccactgccgcgacaccccagccttg

SEQ ID NO: 3163577 - DNA, 25 bp, Homo sapien
cgagttgctgcagagagatgcggcg

SEQ ID NO: 3163578 - DNA, 25 bp, Homo sapien
tcaaaacgttttcgagttagcaaca

SEQ ID NO: 3163579 - DNA, 25 bp, Homo sapien
gtagttggagctacaggcgtgatcc

SEQ ID NO: 3163580 - DNA, 25 bp, Homo sapien
gctaggactaaacgtgcatgctaac

SEQ ID NO: 3163581 - DNA, 25 bp, Homo sapien
tgcaggcccggtgttaacagatctt

SEQ ID NO: 3163582 - DNA, 25 bp, Homo sapien
ctttgacttgcagaactatatttaa

SEQ ID NO: 3163583 - DNA, 25 bp, Homo sapien
caacaggttcaggaaccacttccca

SEQ ID NO: 3163584 - DNA, 25 bp, Homo sapien
cacacaattgtttaaggatattcac

SEQ ID NO: 3163585 - DNA, 25 bp, Homo sapien
ccatctggcaacaggttcaggaacc

SEQ ID NO: 3163586 - DNA, 25 bp, Homo sapien
cacttcccaatcttcacacaattgt

SEQ ID NO: 3163587 - DNA, 25 bp, Homo sapien
agagatcagaggtaccaaaggccca

SEQ ID NO: 3163588 - DNA, 25 bp, Homo sapien
caaagtaggactgaccttgccaagg

SEQ ID NO: 3163589 - DNA, 25 bp, Homo sapien
cagagacagcttcctaacagactgc

SEQ ID NO: 3163590 - DNA, 25 bp, Homo sapien
tatagcaacatttcggccactaggt

SEQ ID NO: 3163591 - DNA, 25 bp, Homo sapien
catctgaagaacattcccaccattt

SEQ ID NO: 3163592 - DNA, 25 bp, Homo sapien
cattcccaccatttttctgagacat

SEQ ID NO: 3163593 - DNA, 25 bp, Homo sapien
gaagaacattcccaccatttttctg

SEQ ID NO: 3163594 - DNA, 25 bp, Homo sapien
gaacattcccaccatttttctgaga

SEQ ID NO: 3163595 - DNA, 25 bp, Homo sapien
cacagatcgttcaaaaaataataca

SEQ ID NO: 3163596 - DNA, 25 bp, Homo sapien
tttgagcttgccattcagagaggca

SEQ ID NO: 3163597 - DNA, 25 bp, Homo sapien
gaccatcgttcaggtttctcataca

SEQ ID NO: 3163598 - DNA, 25 bp, Homo sapien
gaggcaagctgagctcttattcgac

SEQ ID NO: 3163599 - DNA, 25 bp, Homo sapien
attcatccagtcatgccagtcttga

SEQ ID NO: 3163600 - DNA, 25 bp, Homo sapien
ttggccaaattggttattcatccag

SEQ ID NO: 3163601 - DNA, 25 bp, Homo sapien
ctctggagtggcttgaagataaatg

SEQ ID NO: 3163602 - DNA, 25 bp, Homo sapien
taaatgattccatccaattcaaggc

SEQ ID NO: 3163603 - DNA, 25 bp, Homo sapien
tcttccccgtaaatatattctatgt

SEQ ID NO: 3163604 - DNA, 25 bp, Homo sapien
gagccagctttcatgtttataatga

SEQ ID NO: 3163605 - DNA, 25 bp, Homo sapien
tatgcaggagccagctttcatgttt

SEQ ID NO: 3163606 - DNA, 25 bp, Homo sapien
ttcttccccgtaaatatattctatg

SEQ ID NO: 3163607 - DNA, 25 bp, Homo sapien
gcacctcttgaagataatcgaagtt

SEQ ID NO: 3163608 - DNA, 25 bp, Homo sapien
cagtgttaagataggcacctcttga

SEQ ID NO: 3163609 - DNA, 25 bp, Homo sapien
cctcttgaagataatcgaagttggt

SEQ ID NO: 3163610 - DNA, 25 bp, Homo sapien
aacatccagtgttaagataggcacc

SEQ ID NO: 3163611 - DNA, 25 bp, Homo sapien
tgaacctagcctactgaccataatg

SEQ ID NO: 3163612 - DNA, 25 bp, Homo sapien
taataagcacaatagttcaagcaac

SEQ ID NO: 3163613 - DNA, 25 bp, Homo sapien
gagccactgcatctatcaatctaag

SEQ ID NO: 3163614 - DNA, 25 bp, Homo sapien
tgtgcagaaaatcatgtaaggagtc

SEQ ID NO: 3163615 - DNA, 25 bp, Homo sapien
ctgaggcagaactggttgaacctgg

SEQ ID NO: 3163616 - DNA, 25 bp, Homo sapien
attgtgccattgcactccagcctgg

SEQ ID NO: 3163617 - DNA, 25 bp, Homo sapien
tggagatggcagtgagccaagattg

SEQ ID NO: 3163618 - DNA, 25 bp, Homo sapien
ctccagcctgggcgacggagcaaga

SEQ ID NO: 3163619 - DNA, 25 bp, Homo sapien
tttgcaaagatcagtgcgtctggac

SEQ ID NO: 3163620 - DNA, 25 bp, Homo sapien
gaaactggtcaccaacgaagtgaga

SEQ ID NO: 3163621 - DNA, 25 bp, Homo sapien
aaaagccaacctgctgaggaagaca

SEQ ID NO: 3163622 - DNA, 25 bp, Homo sapien
tagtcactatgctgatactggaacc

SEQ ID NO: 3163623 - DNA, 25 bp, Homo sapien
ctgcaaagattcgtgggagaagtgt

SEQ ID NO: 3163624 - DNA, 25 bp, Homo sapien
gagtagtcgcacaataactcactgc

SEQ ID NO: 3163625 - DNA, 25 bp, Homo sapien
caacggactaatgcatgcaggctgc

SEQ ID NO: 3163626 - DNA, 25 bp, Homo sapien
agaagtgtggtttcctaagagtagt

SEQ ID NO: 3163627 - DNA, 25 bp, Homo sapien
tgaatcactttctatatcatctgtc

SEQ ID NO: 3163628 - DNA, 25 bp, Homo sapien
taagcttctctgtgtacattattac

SEQ ID NO: 3163629 - DNA, 25 bp, Homo sapien
tccgggtagttccatagaatagtaa

SEQ ID NO: 3163630 - DNA, 25 bp, Homo sapien
catctgtccaagttccgggtagttc

SEQ ID NO: 3163631 - DNA, 25 bp, Homo sapien
aaccatgcccttggaggaagatctg

SEQ ID NO: 3163632 - DNA, 25 bp, Homo sapien
tgtccgaagagtctgaagtgctgat

SEQ ID NO: 3163633 - DNA, 25 bp, Homo sapien
tgctgatgggattttgccggcagcc

SEQ ID NO: 3163634 - DNA, 25 bp, Homo sapien
ttaactgtccgaagagtctgaagtg

SEQ ID NO: 3163635 - DNA, 25 bp, Homo sapien
tcttctgaatgatgcacgctcaaga

SEQ ID NO: 3163636 - DNA, 25 bp, Homo sapien
gcaatgtcgtctgaaaaatcaaaga

SEQ ID NO: 3163637 - DNA, 25 bp, Homo sapien
tcaagagttgccaaatgagatgggc

SEQ ID NO: 3163638 - DNA, 25 bp, Homo sapien
cagccaaataggacctcctagccaa

SEQ ID NO: 3163639 - DNA, 25 bp, Homo sapien
ccagcactttgcccatatcaggaat

SEQ ID NO: 3163640 - DNA, 25 bp, Homo sapien
agcactttgcccatatcaggaatca

SEQ ID NO: 3163641 - DNA, 25 bp, Homo sapien
cagcactttgcccatatcaggaatc

SEQ ID NO: 3163642 - DNA, 25 bp, Homo sapien
gcactttgcccatatcaggaatcat

SEQ ID NO: 3163643 - DNA, 25 bp, Homo sapien
tctttcaattgcatccgtgtatttt

SEQ ID NO: 3163644 - DNA, 25 bp, Homo sapien
aacagcctttctctgaacaactctg

SEQ ID NO: 3163645 - DNA, 25 bp, Homo sapien
caactctgactaattgtttcacaat

SEQ ID NO: 3163646 - DNA, 25 bp, Homo sapien
aattgcatccgtgtattttggctgc

SEQ ID NO: 3163647 - DNA, 25 bp, Homo sapien
catctttagagggacggcgaaagtg

SEQ ID NO: 3163648 - DNA, 25 bp, Homo sapien
cagtgatctcgagcttttaggatga

SEQ ID NO: 3163649 - DNA, 25 bp, Homo sapien
tttaagtcacgcagttcccagtgat

SEQ ID NO: 3163650 - DNA, 25 bp, Homo sapien
tctttagagggacggcgaaagtgca

SEQ ID NO: 3163651 - DNA, 25 bp, Homo sapien
acaacagcctccttggcggcaccct

SEQ ID NO: 3163652 - DNA, 25 bp, Homo sapien
ttggcggcaccctgtggaattctat

SEQ ID NO: 3163653 - DNA, 25 bp, Homo sapien
tctatgccacagagttggcctggtg

SEQ ID NO: 3163654 - DNA, 25 bp, Homo sapien
gagttggcctggtgatgccctgcat

SEQ ID NO: 3163655 - DNA, 25 bp, Homo sapien
aaaatatggctttaaggcaggtggg

SEQ ID NO: 3163656 - DNA, 25 bp, Homo sapien
gtgtaatatccaaaaggcagacacc

SEQ ID NO: 3163657 - DNA, 25 bp, Homo sapien
caaagaagctggtcgctgtttcatc

SEQ ID NO: 3163658 - DNA, 25 bp, Homo sapien
gggtgttaacttccctgatctatag

SEQ ID NO: 3163659 - DNA, 25 bp, Homo sapien
agcctgcacgcaaagccacgttaat

SEQ ID NO: 3163660 - DNA, 25 bp, Homo sapien
gaaagttggcaccacttggtccttg

SEQ ID NO: 3163661 - DNA, 25 bp, Homo sapien
tccttgatggataaagtatgacctc

SEQ ID NO: 3163662 - DNA, 25 bp, Homo sapien
ggtacataaagaaagttggcaccac

SEQ ID NO: 3163663 - DNA, 25 bp, Homo sapien
ggaattctcccatagatcagcataa

SEQ ID NO: 3163664 - DNA, 25 bp, Homo sapien
tctcccatagatcagcataacacag

SEQ ID NO: 3163665 - DNA, 25 bp, Homo sapien
catagatcagcataacacaggacac

SEQ ID NO: 3163666 - DNA, 25 bp, Homo sapien
aggaattctcccatagatcagcata

SEQ ID NO: 3163667 - DNA, 25 bp, Homo sapien
tagtcacaactttgccgcctgggtg

SEQ ID NO: 3163668 - DNA, 25 bp, Homo sapien
gccgagccgcgggaagttgtctgcg

SEQ ID NO: 3163669 - DNA, 25 bp, Homo sapien
ccgcgcccaagtagtcacaactttg

SEQ ID NO: 3163670 - DNA, 25 bp, Homo sapien
gccgcggaatccctggaggcgcgag

SEQ ID NO: 3163671 - DNA, 25 bp, Homo sapien
ctggggtctggcttccgtcgctcct

SEQ ID NO: 3163672 - DNA, 25 bp, Homo sapien
ctcctggggtctggcttccgtcgct

SEQ ID NO: 3163673 - DNA, 25 bp, Homo sapien
tcctggggtctggcttccgtcgctc

SEQ ID NO: 3163674 - DNA, 25 bp, Homo sapien
cctggggtctggcttccgtcgctcc

SEQ ID NO: 3163675 - DNA, 25 bp, Homo sapien
gagggagaagcagaccacccaaact

SEQ ID NO: 3163676 - DNA, 25 bp, Homo sapien
cagttgcgcgcaggggacttagcag

SEQ ID NO: 3163677 - DNA, 25 bp, Homo sapien
gggagaagcagaccacccaaactct

SEQ ID NO: 3163678 - DNA, 25 bp, Homo sapien
gagaagcagaccacccaaactcttc

SEQ ID NO: 3163679 - DNA, 25 bp, Homo sapien
gaagacgtcttcaatatattaagag

SEQ ID NO: 3163680 - DNA, 25 bp, Homo sapien
tacagcggtgttaaacataacatac

SEQ ID NO: 3163681 - DNA, 25 bp, Homo sapien
tgtcacccatagaatattacagcgg

SEQ ID NO: 3163682 - DNA, 25 bp, Homo sapien
catagaagtccatatcccacaagtt

SEQ ID NO: 3163683 - DNA, 25 bp, Homo sapien
cccatgagtttacttatcaggtgga

SEQ ID NO: 3163684 - DNA, 25 bp, Homo sapien
ggataaagtttcgaagatccagact

SEQ ID NO: 3163685 - DNA, 25 bp, Homo sapien
tatgtaaagcattgaggacaagttc

SEQ ID NO: 3163686 - DNA, 25 bp, Homo sapien
ccattggtcattgggcaatacaaca

SEQ ID NO: 3163687 - DNA, 25 bp, Homo sapien
taaagtggtgttcattgggggaagc

SEQ ID NO: 3163688 - DNA, 25 bp, Homo sapien
ctgcacccattaggtaaaggccttt

SEQ ID NO: 3163689 - DNA, 25 bp, Homo sapien
aaagtggtgttcattgggggaagct

SEQ ID NO: 3163690 - DNA, 25 bp, Homo sapien
gtgctgcacccattaggtaaaggcc

SEQ ID NO: 3163691 - DNA, 25 bp, Homo sapien
cccagtcagacataattctgcctag

SEQ ID NO: 3163692 - DNA, 25 bp, Homo sapien
gtcagacataattctgcctagatcc

SEQ ID NO: 3163693 - DNA, 25 bp, Homo sapien
cagacataattctgcctagatccat

SEQ ID NO: 3163694 - DNA, 25 bp, Homo sapien
taattctgcctagatccattcctga

SEQ ID NO: 3163695 - DNA, 25 bp, Homo sapien
tgattccatcccaaaaggcatcggg

SEQ ID NO: 3163696 - DNA, 25 bp, Homo sapien
cacttaacgatgctgcacatggatc

SEQ ID NO: 3163697 - DNA, 25 bp, Homo sapien
tgtagaggatccactccggagcttg

SEQ ID NO: 3163698 - DNA, 25 bp, Homo sapien
catggatcaagttcatagcagggct

SEQ ID NO: 3163699 - DNA, 25 bp, Homo sapien
ctgggcaggttaacctgcaagctgt

SEQ ID NO: 3163700 - DNA, 25 bp, Homo sapien
aaggaagcccctctgtccaggacag

SEQ ID NO: 3163701 - DNA, 25 bp, Homo sapien
acttcttcttcatcacacacatgct

SEQ ID NO: 3163702 - DNA, 25 bp, Homo sapien
tgtccaggacagcttcatcctccat

SEQ ID NO: 3163703 - DNA, 25 bp, Homo sapien
atcacacacatgcttgaggaaggaa

SEQ ID NO: 3163704 - DNA, 25 bp, Homo sapien
tagagacatatgtatgtcaacagac

SEQ ID NO: 3163705 - DNA, 25 bp, Homo sapien
ctatagagacatatgtatgtcaaca

SEQ ID NO: 3163706 - DNA, 25 bp, Homo sapien
gagacatatgtatgtcaacagacac

SEQ ID NO: 3163707 - DNA, 25 bp, Homo sapien
agacatatgtatgtcaacagacact

SEQ ID NO: 3163708 - DNA, 25 bp, Homo sapien
ctgcaactgttcttaccattttgat

SEQ ID NO: 3163709 - DNA, 25 bp, Homo sapien
gcaactgttcttaccattttgatcg

SEQ ID NO: 3163710 - DNA, 25 bp, Homo sapien
caactgttcttaccattttgatcgg

SEQ ID NO: 3163711 - DNA, 25 bp, Homo sapien
tgcaactgttcttaccattttgatc

SEQ ID NO: 3163712 - DNA, 25 bp, Homo sapien
ctacgtatgtgatacatctctaaaa

SEQ ID NO: 3163713 - DNA, 25 bp, Homo sapien
ccaacgagacagaatagagccaaaa

SEQ ID NO: 3163714 - DNA, 25 bp, Homo sapien
cagaagcaagggcttggcaatctcc

SEQ ID NO: 3163715 - DNA, 25 bp, Homo sapien
tgccaatctgcaggaaacaggtctg

SEQ ID NO: 3163716 - DNA, 25 bp, Homo sapien
gttttagccatcctacagagttgag

SEQ ID NO: 3163717 - DNA, 25 bp, Homo sapien
ctagaggagggcaaaagagtcaacc

SEQ ID NO: 3163718 - DNA, 25 bp, Homo sapien
tagaggagggcaaaagagtcaacct

SEQ ID NO: 3163719 - DNA, 25 bp, Homo sapien
ctctggagccattcaaattaaggtg

SEQ ID NO: 3163720 - DNA, 25 bp, Homo sapien
taactctggagccattcaaattaag

SEQ ID NO: 3163721 - DNA, 25 bp, Homo sapien
ggagccattcaaattaaggtggctt

SEQ ID NO: 3163722 - DNA, 25 bp, Homo sapien
ctggagccattcaaattaaggtggc

SEQ ID NO: 3163723 - DNA, 25 bp, Homo sapien
cacatcgtgatgataggcatcctct

SEQ ID NO: 3163724 - DNA, 25 bp, Homo sapien
tggtgccattttgttcacatcgtga

SEQ ID NO: 3163725 - DNA, 25 bp, Homo sapien
acacaggtgtgggagcgttcagaat

SEQ ID NO: 3163726 - DNA, 25 bp, Homo sapien
ggttttccctgtgcacttccacaca

SEQ ID NO: 3163727 - DNA, 25 bp, Homo sapien
tcttgtgacgtctccttctcctgta

SEQ ID NO: 3163728 - DNA, 25 bp, Homo sapien
tctcctgtaactcttcggcacatgg

SEQ ID NO: 3163729 - DNA, 25 bp, Homo sapien
ggactccgatgtaaatggtatggtg

SEQ ID NO: 3163730 - DNA, 25 bp, Homo sapien
tgtctttctcttgtgacgtctcctt

SEQ ID NO: 3163731 - DNA, 25 bp, Homo sapien
ttgtcagagtagttctcagagattc

SEQ ID NO: 3163732 - DNA, 25 bp, Homo sapien
gatttgtcagagtagttctcagaga

SEQ ID NO: 3163733 - DNA, 25 bp, Homo sapien
cagagtagttctcagagattctctc

SEQ ID NO: 3163734 - DNA, 25 bp, Homo sapien
ctgatttgtcagagtagttctcaga

SEQ ID NO: 3163735 - DNA, 25 bp, Homo sapien
tccttctcaaagatgtgggagtgag

SEQ ID NO: 3163736 - DNA, 25 bp, Homo sapien
agaggcaccaacgctcagagagtac

SEQ ID NO: 3163737 - DNA, 25 bp, Homo sapien
agagaggcaccaacgctcagagagt

SEQ ID NO: 3163738 - DNA, 25 bp, Homo sapien
cttctcaaagatgtgggagtgaggc

SEQ ID NO: 3163739 - DNA, 25 bp, Homo sapien
gctttgtttcctaccatcttacaca

SEQ ID NO: 3163740 - DNA, 25 bp, Homo sapien
acaaagtagcctgtgatgcccccat

SEQ ID NO: 3163741 - DNA, 25 bp, Homo sapien
tgatgcccccataagtatccctgga

SEQ ID NO: 3163742 - DNA, 25 bp, Homo sapien
ttcaggatctctacagtcacaaagt

SEQ ID NO: 3163743 - DNA, 25 bp, Homo sapien
aatccatcagttctggtacacatcc

SEQ ID NO: 3163744 - DNA, 25 bp, Homo sapien
tcacagaacaatgttcactagcata

SEQ ID NO: 3163745 - DNA, 25 bp, Homo sapien
gttcactagcataaatccatcagtt

SEQ ID NO: 3163746 - DNA, 25 bp, Homo sapien
cataaatccatcagttctggtacac

SEQ ID NO: 3163747 - DNA, 25 bp, Homo sapien
acctctgccccttgaagtccttgtt

SEQ ID NO: 3163748 - DNA, 25 bp, Homo sapien
gagcagcacaagagacagcacctct

SEQ ID NO: 3163749 - DNA, 25 bp, Homo sapien
ctggtggcagtattccacaaaaaag

SEQ ID NO: 3163750 - DNA, 25 bp, Homo sapien
ttacaactgccgactaaattcaagg

SEQ ID NO: 3163751 - DNA, 25 bp, Homo sapien
caccatgcaaagcaactggctctct

SEQ ID NO: 3163752 - DNA, 25 bp, Homo sapien
tattcctgaaagctgactgctgaga

SEQ ID NO: 3163753 - DNA, 25 bp, Homo sapien
taaaggagtagtaatgaatctggca

SEQ ID NO: 3163754 - DNA, 25 bp, Homo sapien
tccacacatggaacggaccaccatg

SEQ ID NO: 3163755 - DNA, 25 bp, Homo sapien
gcacctgacacctgagactactgag

SEQ ID NO: 3163756 - DNA, 25 bp, Homo sapien
aaatgattacaagaccaaggtgcac

SEQ ID NO: 3163757 - DNA, 25 bp, Homo sapien
gcctaatcagattccccattgaggg

SEQ ID NO: 3163758 - DNA, 25 bp, Homo sapien
caaagtgtctaagtcagggaacatc

SEQ ID NO: 3163759 - DNA, 25 bp, Homo sapien
ccttgatgcagtgcttaaggctttg

SEQ ID NO: 3163760 - DNA, 25 bp, Homo sapien
tgttgattccttgatgcagtgctta

SEQ ID NO: 3163761 - DNA, 25 bp, Homo sapien
gattccttgatgcagtgcttaaggc

SEQ ID NO: 3163762 - DNA, 25 bp, Homo sapien
gatgcagtgcttaaggctttggtca

SEQ ID NO: 3163763 - DNA, 25 bp, Homo sapien
aaatatctaaccctatgccctacta

SEQ ID NO: 3163764 - DNA, 25 bp, Homo sapien
gcaaatatctaaccctatgccctac

SEQ ID NO: 3163765 - DNA, 25 bp, Homo sapien
tatctaaccctatgccctactaact

SEQ ID NO: 3163766 - DNA, 25 bp, Homo sapien
taagcaaatatctaaccctatgccc

SEQ ID NO: 3163767 - DNA, 25 bp, Homo sapien
attgtacagtcaggtttctcagtgc

SEQ ID NO: 3163768 - DNA, 25 bp, Homo sapien
ttattgtacagtcaggtttctcagt

SEQ ID NO: 3163769 - DNA, 25 bp, Homo sapien
ttcctaacacttgcccacttgcctg

SEQ ID NO: 3163770 - DNA, 25 bp, Homo sapien
ttttcctaacacttgcccacttgcc

SEQ ID NO: 3163771 - DNA, 25 bp, Homo sapien
tatgatgagtttaccaaggtctcca

SEQ ID NO: 3163772 - DNA, 25 bp, Homo sapien
tcaacccatgatctaatatgatgag

SEQ ID NO: 3163773 - DNA, 25 bp, Homo sapien
catgatctaatatgatgagtttacc

SEQ ID NO: 3163774 - DNA, 25 bp, Homo sapien
ctaatatgatgagtttaccaaggtc

SEQ ID NO: 3163775 - DNA, 25 bp, Homo sapien
tgccactgggtgcaactaagcttag

SEQ ID NO: 3163776 - DNA, 25 bp, Homo sapien
ggagacgcaaactcataccatgatc

SEQ ID NO: 3163777 - DNA, 25 bp, Homo sapien
cacaaaggctgtagcagcatgcctc

SEQ ID NO: 3163778 - DNA, 25 bp, Homo sapien
tcagagtgtctacctggagacgcaa

SEQ ID NO: 3163779 - DNA, 25 bp, Homo sapien
tagaaaggcagtctagccacagcca

SEQ ID NO: 3163780 - DNA, 25 bp, Homo sapien
gcagagctcaagtaccacgctggga

SEQ ID NO: 3163781 - DNA, 25 bp, Homo sapien
tgttgagttacgtccagtccttagc

SEQ ID NO: 3163782 - DNA, 25 bp, Homo sapien
aggcatgcaggtcagggacccacgt

SEQ ID NO: 3163783 - DNA, 25 bp, Homo sapien
agtaagtgctacgtggtgctcagaa

SEQ ID NO: 3163784 - DNA, 25 bp, Homo sapien
tggtccatagctgagttcaagttgt

SEQ ID NO: 3163785 - DNA, 25 bp, Homo sapien
ccatagctgagttcaagttgtgaat

SEQ ID NO: 3163786 - DNA, 25 bp, Homo sapien
ttagagtaagtgctacgtggtgctc

SEQ ID NO: 3163787 - DNA, 25 bp, Homo sapien
gtccctcttcttctattgtttgtaa

SEQ ID NO: 3163788 - DNA, 25 bp, Homo sapien
cctcttcttctattgtttgtaataa

SEQ ID NO: 3163789 - DNA, 25 bp, Homo sapien
ccctcttcttctattgtttgtaata

SEQ ID NO: 3163790 - DNA, 25 bp, Homo sapien
tccctcttcttctattgtttgtaat

SEQ ID NO: 3163791 - DNA, 25 bp, Homo sapien
tctctattcctttggttctgaactg

SEQ ID NO: 3163792 - DNA, 25 bp, Homo sapien
gacagcactccaattctgtgtgatg

SEQ ID NO: 3163793 - DNA, 25 bp, Homo sapien
tctgaactgtatcttggttctccac

SEQ ID NO: 3163794 - DNA, 25 bp, Homo sapien
ttagccctcagatgagctgaggtct

SEQ ID NO: 3163795 - DNA, 25 bp, Homo sapien
aaacattggctggacaaccctgagg

SEQ ID NO: 3163796 - DNA, 25 bp, Homo sapien
gctggacaaccctgaggaaagtgga

SEQ ID NO: 3163797 - DNA, 25 bp, Homo sapien
gaaaatactgtggttaaacattggc

SEQ ID NO: 3163798 - DNA, 25 bp, Homo sapien
tactgtggttaaacattggctggac

SEQ ID NO: 3163799 - DNA, 25 bp, Homo sapien
aagatgaatcggatgcgttctgcag

SEQ ID NO: 3163800 - DNA, 25 bp, Homo sapien
agctcatccagttccgtgaagagct

SEQ ID NO: 3163801 - DNA, 25 bp, Homo sapien
tctcccaagatgaatcggatgcgtt

SEQ ID NO: 3163802 - DNA, 25 bp, Homo sapien
atccagttccgtgaagagctgaggg

SEQ ID NO: 3163803 - DNA, 25 bp, Homo sapien
gacattcttaatggaagcacaggct

SEQ ID NO: 3163804 - DNA, 25 bp, Homo sapien
tccaaacgatttttcaggtctgata

SEQ ID NO: 3163805 - DNA, 25 bp, Homo sapien
ttttaccatattcaacttgtgctct

SEQ ID NO: 3163806 - DNA, 25 bp, Homo sapien
tctgataagtctaccctttttacca

SEQ ID NO: 3163807 - DNA, 25 bp, Homo sapien
tcctcagctcaaataaactatgaag

SEQ ID NO: 3163808 - DNA, 25 bp, Homo sapien
tttctccatacatgtcctcagctca

SEQ ID NO: 3163809 - DNA, 25 bp, Homo sapien
gagaagaagcctcccgatcaagcat

SEQ ID NO: 3163810 - DNA, 25 bp, Homo sapien
atcaagcatgatggatcctttctcc

SEQ ID NO: 3163811 - DNA, 25 bp, Homo sapien
tgcagtgtgcctaccctgggattat

SEQ ID NO: 3163812 - DNA, 25 bp, Homo sapien
tatccttcagatctaggtgtgccaa

SEQ ID NO: 3163813 - DNA, 25 bp, Homo sapien
aagatgtggatcaaagacctgcaga

SEQ ID NO: 3163814 - DNA, 25 bp, Homo sapien
cactggacctgtagggatggctgca

SEQ ID NO: 3163815 - DNA, 25 bp, Homo sapien
catcatgctgaacaccttgggcaca

SEQ ID NO: 3163816 - DNA, 25 bp, Homo sapien
ggaagtccagacactagatttctag

SEQ ID NO: 3163817 - DNA, 25 bp, Homo sapien
gattgtaggcagaagtcaagcccct

SEQ ID NO: 3163818 - DNA, 25 bp, Homo sapien
cagggatccagcaagacattacggg

SEQ ID NO: 3163819 - DNA, 25 bp, Homo sapien
gacgttccagtataatctggtactc

SEQ ID NO: 3163820 - DNA, 25 bp, Homo sapien
tttggccattcgctaaagacgttcc

SEQ ID NO: 3163821 - DNA, 25 bp, Homo sapien
tctctttggccattcgctaaagacg

SEQ ID NO: 3163822 - DNA, 25 bp, Homo sapien
ctaaagacgttccagtataatctgg

SEQ ID NO: 3163823 - DNA, 25 bp, Homo sapien
caataggcctgtctcaatctgatgg

SEQ ID NO: 3163824 - DNA, 25 bp, Homo sapien
ggtaaacatcctacttgcactggag

SEQ ID NO: 3163825 - DNA, 25 bp, Homo sapien
ttccggagcaaagtataggtcacct

SEQ ID NO: 3163826 - DNA, 25 bp, Homo sapien
caatgtcagccagggaccgaaggtt

SEQ ID NO: 3163827 - DNA, 25 bp, Homo sapien
gagacggtgtaaaggtgagtgaaat

SEQ ID NO: 3163828 - DNA, 25 bp, Homo sapien
aaaacaaagatgacaggagacggtg

SEQ ID NO: 3163829 - DNA, 25 bp, Homo sapien
aacaaagatgacaggagacggtgta

SEQ ID NO: 3163830 - DNA, 25 bp, Homo sapien
caaagatgacaggagacggtgtaaa

SEQ ID NO: 3163831 - DNA, 25 bp, Homo sapien
aggcaaggaactgatctttatggta

SEQ ID NO: 3163832 - DNA, 25 bp, Homo sapien
gcaaggaactgatctttatggtaat

SEQ ID NO: 3163833 - DNA, 25 bp, Homo sapien
ggcaaggaactgatctttatggtaa

SEQ ID NO: 3163834 - DNA, 25 bp, Homo sapien
tactgagagagattgacccttggag

SEQ ID NO: 3163835 - DNA, 25 bp, Homo sapien
tggcagtatgaatgcaccaaagcac

SEQ ID NO: 3163836 - DNA, 25 bp, Homo sapien
ggctctcaccagtcagtaaatttgc

SEQ ID NO: 3163837 - DNA, 25 bp, Homo sapien
caaagtaggccttcaatgtcaaaca

SEQ ID NO: 3163838 - DNA, 25 bp, Homo sapien
cttcgattgctcccagagcaacatg

SEQ ID NO: 3163839 - DNA, 25 bp, Homo sapien
tccctctcctatatctctttcacag

SEQ ID NO: 3163840 - DNA, 25 bp, Homo sapien
ctctttcacagggagcaggatgtgg

SEQ ID NO: 3163841 - DNA, 25 bp, Homo sapien
ccagatctgcacctacacttcgatt

SEQ ID NO: 3163842 - DNA, 25 bp, Homo sapien
ccaggacttgtgagcaggccatctg

SEQ ID NO: 3163843 - DNA, 25 bp, Homo sapien
tgtcttctctttgcaatctgaattt

SEQ ID NO: 3163844 - DNA, 25 bp, Homo sapien
taattgtttcccataattgaagttc

SEQ ID NO: 3163845 - DNA, 25 bp, Homo sapien
aaagctgtaaataaagccaggactt

SEQ ID NO: 3163846 - DNA, 25 bp, Homo sapien
ccgcactcgggggtcatcatccaag

SEQ ID NO: 3163847 - DNA, 25 bp, Homo sapien
cacgctgggagtgcgccgcactcgg

SEQ ID NO: 3163848 - DNA, 25 bp, Homo sapien
tcatccaaggtgcgggttgctaggc

SEQ ID NO: 3163849 - DNA, 25 bp, Homo sapien
aggcagggcactgagttctcaagcg

SEQ ID NO: 3163850 - DNA, 25 bp, Homo sapien
tcctggaagggtagagtttatcaac

SEQ ID NO: 3163851 - DNA, 25 bp, Homo sapien
ggtaaatcttccattgtgaggcaca

SEQ ID NO: 3163852 - DNA, 25 bp, Homo sapien
tatcaacaaaaacatggaggtagga

SEQ ID NO: 3163853 - DNA, 25 bp, Homo sapien
ttggataggtatactggaaaaggca

SEQ ID NO: 3163854 - DNA, 25 bp, Homo sapien
tttcatcaaagtaaaattcgacagt

SEQ ID NO: 3163855 - DNA, 25 bp, Homo sapien
gaaagaaaagcctcgtttctgaaga

SEQ ID NO: 3163856 - DNA, 25 bp, Homo sapien
catcaaagtaaaattcgacagtttg

SEQ ID NO: 3163857 - DNA, 25 bp, Homo sapien
aaagaaaagcctcgtttctgaagat

SEQ ID NO: 3163858 - DNA, 25 bp, Homo sapien
gaatggctctttctgaggcaaaagc

SEQ ID NO: 3163859 - DNA, 25 bp, Homo sapien
aagactgcacttcgatttgtaacca

SEQ ID NO: 3163860 - DNA, 25 bp, Homo sapien
tcacagcccataatagtaagtgtgc

SEQ ID NO: 3163861 - DNA, 25 bp, Homo sapien
taaccatggttactgcttgcatcac

SEQ ID NO: 3163862 - DNA, 25 bp, Homo sapien
cgggggcagtagaggagaagacagc

SEQ ID NO: 3163863 - DNA, 25 bp, Homo sapien
gcgacagagcgggggcagtagagga

SEQ ID NO: 3163864 - DNA, 25 bp, Homo sapien
ttttctgactggaaggcgacagagc

SEQ ID NO: 3163865 - DNA, 25 bp, Homo sapien
ctgctacaggcattatttttctgac

SEQ ID NO: 3163866 - DNA, 25 bp, Homo sapien
cacaaacacctctggacccataatg

SEQ ID NO: 3163867 - DNA, 25 bp, Homo sapien
gacactgtagaccaaagtgctgtaa

SEQ ID NO: 3163868 - DNA, 25 bp, Homo sapien
gagcacaaacacctctggacccata

SEQ ID NO: 3163869 - DNA, 25 bp, Homo sapien
tgaagacactgtagaccaaagtgct

SEQ ID NO: 3163870 - DNA, 25 bp, Homo sapien
ttcttgggcaagtggtgtttcatcc

SEQ ID NO: 3163871 - DNA, 25 bp, Homo sapien
ccataatgagccaatagagaaccca

SEQ ID NO: 3163872 - DNA, 25 bp, Homo sapien
gaaccagtctcaagtgcataatcat

SEQ ID NO: 3163873 - DNA, 25 bp, Homo sapien
tccactcaaagctacaaccagcagg

SEQ ID NO: 3163874 - DNA, 25 bp, Homo sapien
ctgtggctagccgattatctcagca

SEQ ID NO: 3163875 - DNA, 25 bp, Homo sapien
cttgcttaagccaacgtttataagg

SEQ ID NO: 3163876 - DNA, 25 bp, Homo sapien
aatccttgcttaagccaacgtttat

SEQ ID NO: 3163877 - DNA, 25 bp, Homo sapien
cctacctgtggctagccgattatct

SEQ ID NO: 3163878 - DNA, 25 bp, Homo sapien
ctgcagagagcggctgtttcctcat

SEQ ID NO: 3163879 - DNA, 25 bp, Homo sapien
tgcagagagcggctgtttcctcatc

SEQ ID NO: 3163880 - DNA, 25 bp, Homo sapien
gtcattcagactggaggaagtcaga

SEQ ID NO: 3163881 - DNA, 25 bp, Homo sapien
gtccttctccggtttatcagaaatg

SEQ ID NO: 3163882 - DNA, 25 bp, Homo sapien
tcagaaatgtcattcagactggagg

SEQ ID NO: 3163883 - DNA, 25 bp, Homo sapien
ttctccggtttatcagaaatgtcat

SEQ ID NO: 3163884 - DNA, 25 bp, Homo sapien
gagagtatacgtccatcaaagatta

SEQ ID NO: 3163885 - DNA, 25 bp, Homo sapien
tcctggtattggcatactggcagaa

SEQ ID NO: 3163886 - DNA, 25 bp, Homo sapien
gagtgttcatcacaaggtattgctg

SEQ ID NO: 3163887 - DNA, 25 bp, Homo sapien
gattattgttgacagcatgctactg

SEQ ID NO: 3163888 - DNA, 25 bp, Homo sapien
tctcttgtgaggataattgacattc

SEQ ID NO: 3163889 - DNA, 25 bp, Homo sapien
ctacctggaggttttatctgcataa

SEQ ID NO: 3163890 - DNA, 25 bp, Homo sapien
aaattccagccttactttagtacag

SEQ ID NO: 3163891 - DNA, 25 bp, Homo sapien
catcatatggcacatagaaggccct

SEQ ID NO: 3163892 - DNA, 25 bp, Homo sapien
atattgctggcatccctctgacgga

SEQ ID NO: 3163893 - DNA, 25 bp, Homo sapien
ggaccattggcctatctgtagctga

SEQ ID NO: 3163894 - DNA, 25 bp, Homo sapien
gacagcatagggactcaagtattcc

SEQ ID NO: 3163895 - DNA, 25 bp, Homo sapien
cataggtggattcttggacagcata

SEQ ID NO: 3163896 - DNA, 25 bp, Homo sapien
cttgtgggcacaggaacttcagtca

SEQ ID NO: 3163897 - DNA, 25 bp, Homo sapien
caatgaaaggagtatccaaaaagtc

SEQ ID NO: 3163898 - DNA, 25 bp, Homo sapien
tccccaacaagcacgttggaagctt

SEQ ID NO: 3163899 - DNA, 25 bp, Homo sapien
gcatcacgtggcaattttttcatga

SEQ ID NO: 3163900 - DNA, 25 bp, Homo sapien
gataacatcatatgcctgcccagct

SEQ ID NO: 3163901 - DNA, 25 bp, Homo sapien
tatgaccctctgcagtaaagaaagt

SEQ ID NO: 3163902 - DNA, 25 bp, Homo sapien
taagtcttccataggtcactctggg

SEQ ID NO: 3163903 - DNA, 25 bp, Homo sapien
ggaagagcccaagatctgtgcctag

SEQ ID NO: 3163904 - DNA, 25 bp, Homo sapien
caatggctctgccaatctcgtggta

SEQ ID NO: 3163905 - DNA, 25 bp, Homo sapien
taggacctaagagaatgaacaagaa

SEQ ID NO: 3163906 - DNA, 25 bp, Homo sapien
tctgccaatctcgtggtaggacttg

SEQ ID NO: 3163907 - DNA, 25 bp, Homo sapien
tctcgtggtaggacttggctttccc

SEQ ID NO: 3163908 - DNA, 25 bp, Homo sapien
tcatcaataccagcaatcaggtcgt

SEQ ID NO: 3163909 - DNA, 25 bp, Homo sapien
cccaggtggaaggacgatgacttca

SEQ ID NO: 3163910 - DNA, 25 bp, Homo sapien
gaggctctatcctaattgctggatc

SEQ ID NO: 3163911 - DNA, 25 bp, Homo sapien
tggaagactcttaggaggctctatc

SEQ ID NO: 3163912 - DNA, 25 bp, Homo sapien
ctccatcatggggcgtatccccatt

SEQ ID NO: 3163913 - DNA, 25 bp, Homo sapien
tccatcatggggcgtatccccattc

SEQ ID NO: 3163914 - DNA, 25 bp, Homo sapien
ctctccacctgagtacatattcttt

SEQ ID NO: 3163915 - DNA, 25 bp, Homo sapien
acctccatcatggggcgtatcccca

SEQ ID NO: 3163916 - DNA, 25 bp, Homo sapien
aatgaagagaattgccgaaagagct

SEQ ID NO: 3163917 - DNA, 25 bp, Homo sapien
tcactggcaaaaaatggcgctttcc

SEQ ID NO: 3163918 - DNA, 25 bp, Homo sapien
caagcagtcctccaaaagtgatagc

SEQ ID NO: 3163919 - DNA, 25 bp, Homo sapien
tacagttgccagataaatgaagaga

SEQ ID NO: 3163920 - DNA, 25 bp, Homo sapien
aaggcaatctgggctgtactatttg

SEQ ID NO: 3163921 - DNA, 25 bp, Homo sapien
gaaggcaatctgggctgtactattt

SEQ ID NO: 3163922 - DNA, 25 bp, Homo sapien
caaagagcatgtcttggagtcaggg

SEQ ID NO: 3163923 - DNA, 25 bp, Homo sapien
ttaaatattagatgacagccgggca

SEQ ID NO: 3163924 - DNA, 25 bp, Homo sapien
ccaggtggctcagcacaaagagcat

SEQ ID NO: 3163925 - DNA, 25 bp, Homo sapien
tttaacctacctatgcttcctggag

SEQ ID NO: 3163926 - DNA, 25 bp, Homo sapien
taaacttagagatgtttccagtatt

SEQ ID NO: 3163927 - DNA, 25 bp, Homo sapien
acttagagatgtttccagtatttct

SEQ ID NO: 3163928 - DNA, 25 bp, Homo sapien
tttccagtatttctgagaaaagaac

SEQ ID NO: 3163929 - DNA, 25 bp, Homo sapien
ccagtatttctgagaaaagaactat

SEQ ID NO: 3163930 - DNA, 25 bp, Homo sapien
ctcaaaaactaggacaggtccggtg

SEQ ID NO: 3163931 - DNA, 25 bp, Homo sapien
tagtgagtggttgaccagcaaaaag

SEQ ID NO: 3163932 - DNA, 25 bp, Homo sapien
tcagaatagtgagtggttgaccagc

SEQ ID NO: 3163933 - DNA, 25 bp, Homo sapien
ggtccggtgctgctcagaatagtga

SEQ ID NO: 3163934 - DNA, 25 bp, Homo sapien
gaaaggaacttgcttagtgaaagga

SEQ ID NO: 3163935 - DNA, 25 bp, Homo sapien
ttgagattaaaataacgcttgccac

SEQ ID NO: 3163936 - DNA, 25 bp, Homo sapien
acttttggaaatagtgatctaccca

SEQ ID NO: 3163937 - DNA, 25 bp, Homo sapien
tagattaaggctctgatcacatttc

SEQ ID NO: 3163938 - DNA, 25 bp, Homo sapien
cagcagactgcctttgaacttccac

SEQ ID NO: 3163939 - DNA, 25 bp, Homo sapien
tcctggttctacagcagacagcctt

SEQ ID NO: 3163940 - DNA, 25 bp, Homo sapien
aaaagattgaccttccccagggcag

SEQ ID NO: 3163941 - DNA, 25 bp, Homo sapien
cctggttctacagcagacagccttc

SEQ ID NO: 3163942 - DNA, 25 bp, Homo sapien
gagagtgttgtagcccactttgaag

SEQ ID NO: 3163943 - DNA, 25 bp, Homo sapien
gaagtattgaaccaagaagctggca

SEQ ID NO: 3163944 - DNA, 25 bp, Homo sapien
tggcatcagtggctaccaaaatgag

SEQ ID NO: 3163945 - DNA, 25 bp, Homo sapien
ggaccacaggccaatccaaaggcga

SEQ ID NO: 3163946 - DNA, 25 bp, Homo sapien
tcaggcaatgagacatcaaattcag

SEQ ID NO: 3163947 - DNA, 25 bp, Homo sapien
caaattcagtagcagagtttttcag

SEQ ID NO: 3163948 - DNA, 25 bp, Homo sapien
taaacacaaagcgtaatgccctcac

SEQ ID NO: 3163949 - DNA, 25 bp, Homo sapien
aatttgcaagcatggagcctacacc

SEQ ID NO: 3163950 - DNA, 25 bp, Homo sapien
taatacatgtatccaggtttcccca

SEQ ID NO: 3163951 - DNA, 25 bp, Homo sapien
gcagcaaaggataggtttgtcacat

SEQ ID NO: 3163952 - DNA, 25 bp, Homo sapien
gaagacattcctacaccaataaaga

SEQ ID NO: 3163953 - DNA, 25 bp, Homo sapien
tctaccagtaggcaattccaatctg

SEQ ID NO: 3163954 - DNA, 25 bp, Homo sapien
gctgagctactgtggagatattgag

SEQ ID NO: 3163955 - DNA, 25 bp, Homo sapien
taatgattgagattttcaccacaac

SEQ ID NO: 3163956 - DNA, 25 bp, Homo sapien
taatctacaggcactcttcacaagt

SEQ ID NO: 3163957 - DNA, 25 bp, Homo sapien
ctacgatggtgtgctggaagttaaa

SEQ ID NO: 3163958 - DNA, 25 bp, Homo sapien
aggttgatcgttttccatacttgga

SEQ ID NO: 3163959 - DNA, 25 bp, Homo sapien
cccatgtatcagattttagctgatt

SEQ ID NO: 3163960 - DNA, 25 bp, Homo sapien
cctccttcccatgtatcagatttta

SEQ ID NO: 3163961 - DNA, 25 bp, Homo sapien
agagagcttccacaggttgatcgtt

SEQ ID NO: 3163962 - DNA, 25 bp, Homo sapien
tcagtagaagacatagttggcaaat

SEQ ID NO: 3163963 - DNA, 25 bp, Homo sapien
ccagtgtggtgtcattagatattga

SEQ ID NO: 3163964 - DNA, 25 bp, Homo sapien
agacatagttggcaaatactctggg

SEQ ID NO: 3163965 - DNA, 25 bp, Homo sapien
catgtcagtagaagacatagttggc

SEQ ID NO: 3163966 - DNA, 25 bp, Homo sapien
tccttcatctgacaggatgtactga

SEQ ID NO: 3163967 - DNA, 25 bp, Homo sapien
caggatgtactgaaggcctgtgaga

SEQ ID NO: 3163968 - DNA, 25 bp, Homo sapien
tctgacaggatgtactgaaggcctg

SEQ ID NO: 3163969 - DNA, 25 bp, Homo sapien
gcctgtgagagcaagccttgctggc

SEQ ID NO: 3163970 - DNA, 25 bp, Homo sapien
gatagaccagatgggctgaagcaga

SEQ ID NO: 3163971 - DNA, 25 bp, Homo sapien
gatctaacagcggatagaccagatg

SEQ ID NO: 3163972 - DNA, 25 bp, Homo sapien
ctgtgtggggatctaacagcggata

SEQ ID NO: 3163973 - DNA, 25 bp, Homo sapien
taacagcggatagaccagatgggct

SEQ ID NO: 3163974 - DNA, 25 bp, Homo sapien
tgcccagtcaaaggtagtattatgg

SEQ ID NO: 3163975 - DNA, 25 bp, Homo sapien
tattttgaacactccttcttcgaca

SEQ ID NO: 3163976 - DNA, 25 bp, Homo sapien
cttcttcgacaaaaatgcccagtca

SEQ ID NO: 3163977 - DNA, 25 bp, Homo sapien
gaagaggtgtaggttcccaagaaga

SEQ ID NO: 3163978 - DNA, 25 bp, Homo sapien
catggggcatcttcacccatgagga

SEQ ID NO: 3163979 - DNA, 25 bp, Homo sapien
ccatggggcatcttcacccatgagg

SEQ ID NO: 3163980 - DNA, 25 bp, Homo sapien
cccatggggcatcttcacccatgag

SEQ ID NO: 3163981 - DNA, 25 bp, Homo sapien
tccataaactggacgccctgcaaaa

SEQ ID NO: 3163982 - DNA, 25 bp, Homo sapien
cagctttccataaactggacgccct

SEQ ID NO: 3163983 - DNA, 25 bp, Homo sapien
tctcagctttccataaactggacgc

SEQ ID NO: 3163984 - DNA, 25 bp, Homo sapien
gctttccataaactggacgccctgc

SEQ ID NO: 3163985 - DNA, 25 bp, Homo sapien
tctgcttctttagttggtagaggag

SEQ ID NO: 3163986 - DNA, 25 bp, Homo sapien
gacttgcttgaccaaagtcactacc

SEQ ID NO: 3163987 - DNA, 25 bp, Homo sapien
caattctgcttctttagttggtaga

SEQ ID NO: 3163988 - DNA, 25 bp, Homo sapien
tgcttgaccaaagtcactaccaggc

SEQ ID NO: 3163989 - DNA, 25 bp, Homo sapien
tctattacacaaaagatgagaatgg

SEQ ID NO: 3163990 - DNA, 25 bp, Homo sapien
gataatggcaaaatcactgatcagt

SEQ ID NO: 3163991 - DNA, 25 bp, Homo sapien
gggtgtccacgcctactagggcatc

SEQ ID NO: 3163992 - DNA, 25 bp, Homo sapien
gatgagaatggacaagataatggca

SEQ ID NO: 3163993 - DNA, 25 bp, Homo sapien
tcagtatagtgaccaacaaagccgg

SEQ ID NO: 3163994 - DNA, 25 bp, Homo sapien
tacaatcacagctgtaatttgttgg

SEQ ID NO: 3163995 - DNA, 25 bp, Homo sapien
agccgggatagcagcagcaaggcac

SEQ ID NO: 3163996 - DNA, 25 bp, Homo sapien
tgttggtccatgaaaatcagtatag

SEQ ID NO: 3163997 - DNA, 25 bp, Homo sapien
tggagatgaccgtagcagctacata

SEQ ID NO: 3163998 - DNA, 25 bp, Homo sapien
tacataccacggaagagccatgagg

SEQ ID NO: 3163999 - DNA, 25 bp, Homo sapien
gagcatataaccatgaggatggcca

SEQ ID NO: 3164000 - DNA, 25 bp, Homo sapien
catcttcaaactgtcgatgtgagca

SEQ ID NO: 3164001 - DNA, 25 bp, Homo sapien
caagatgggagccataaagactgac

SEQ ID NO: 3164002 - DNA, 25 bp, Homo sapien
ttcaagatgggagccataaagactg

SEQ ID NO: 3164003 - DNA, 25 bp, Homo sapien
agatgggagccataaagactgacag

SEQ ID NO: 3164004 - DNA, 25 bp, Homo sapien
gatgggagccataaagactgacaga

SEQ ID NO: 3164005 - DNA, 25 bp, Homo sapien
taaagcatttggcagcagattcaat

SEQ ID NO: 3164006 - DNA, 25 bp, Homo sapien
taaaaggtaacactgtcattaggct

SEQ ID NO: 3164007 - DNA, 25 bp, Homo sapien
tgatgtgctggtgcctataggataa

SEQ ID NO: 3164008 - DNA, 25 bp, Homo sapien
taggataacggaagaacataaagca

SEQ ID NO: 3164009 - DNA, 25 bp, Homo sapien
acacagaactaagctgtttaaccag

SEQ ID NO: 3164010 - DNA, 25 bp, Homo sapien
acagaactaagctgtttaaccagcc

SEQ ID NO: 3164011 - DNA, 25 bp, Homo sapien
cacagaactaagctgtttaaccagc

SEQ ID NO: 3164012 - DNA, 25 bp, Homo sapien
ggaacacaccatagagtacaggcat

SEQ ID NO: 3164013 - DNA, 25 bp, Homo sapien
caggaacacaccatagagtacaggc

SEQ ID NO: 3164014 - DNA, 25 bp, Homo sapien
caccattaagggatgctactcccat

SEQ ID NO: 3164015 - DNA, 25 bp, Homo sapien
gctactcccatatacaggaacacac

SEQ ID NO: 3164016 - DNA, 25 bp, Homo sapien
tagcagccaccgttgacttgaggat

SEQ ID NO: 3164017 - DNA, 25 bp, Homo sapien
tgaagtcaggctgatgcttcagagg

SEQ ID NO: 3164018 - DNA, 25 bp, Homo sapien
gactctgcgcagaggaacatgacgc

SEQ ID NO: 3164019 - DNA, 25 bp, Homo sapien
gaagcagcttcagacgatccatgaa

SEQ ID NO: 3164020 - DNA, 25 bp, Homo sapien
tataatctcacaggtacgttcaatt

SEQ ID NO: 3164021 - DNA, 25 bp, Homo sapien
atctcacaggtacgttcaattaaag

SEQ ID NO: 3164022 - DNA, 25 bp, Homo sapien
ctcacaggtacgttcaattaaagga

SEQ ID NO: 3164023 - DNA, 25 bp, Homo sapien
cacaggtacgttcaattaaaggaat

SEQ ID NO: 3164024 - DNA, 25 bp, Homo sapien
gaggtagtccatgccttttctgaca

SEQ ID NO: 3164025 - DNA, 25 bp, Homo sapien
gggagaagaggtagtccatgccttt

SEQ ID NO: 3164026 - DNA, 25 bp, Homo sapien
gaagctgaggtcgtgctgggagaag

SEQ ID NO: 3164027 - DNA, 25 bp, Homo sapien
ttttctgacagctacaagtgccaag

SEQ ID NO: 3164028 - DNA, 25 bp, Homo sapien
tactgattacagatccctgctggag

SEQ ID NO: 3164029 - DNA, 25 bp, Homo sapien
catagaactttggtggagagcctac

SEQ ID NO: 3164030 - DNA, 25 bp, Homo sapien
tatctcaaatataagccctgggtta

SEQ ID NO: 3164031 - DNA, 25 bp, Homo sapien
gaggaggaccctctggactatgaca

SEQ ID NO: 3164032 - DNA, 25 bp, Homo sapien
ccatgatgtccattggaattttaat

SEQ ID NO: 3164033 - DNA, 25 bp, Homo sapien
taatacttggaactttttctgagta

SEQ ID NO: 3164034 - DNA, 25 bp, Homo sapien
taggaaaggttgctgttccatgatg

SEQ ID NO: 3164035 - DNA, 25 bp, Homo sapien
gtcagaaggtttgctatcgcttagg

SEQ ID NO: 3164036 - DNA, 25 bp, Homo sapien
tgaagcttagggtatgtaaaaacaa

SEQ ID NO: 3164037 - DNA, 25 bp, Homo sapien
tgcaattctcaataccaacagaaaa

SEQ ID NO: 3164038 - DNA, 25 bp, Homo sapien
tgagggaaagttaatgcagatggcc

SEQ ID NO: 3164039 - DNA, 25 bp, Homo sapien
tctctgtaagtgcaaatcatattca

SEQ ID NO: 3164040 - DNA, 25 bp, Homo sapien
tccatgagcctcaaattctggctag

SEQ ID NO: 3164041 - DNA, 25 bp, Homo sapien
tcagtattcctaggtttgcctgctg

SEQ ID NO: 3164042 - DNA, 25 bp, Homo sapien
ctaagactctagtgtgatgaagaca

SEQ ID NO: 3164043 - DNA, 25 bp, Homo sapien
ctttaggttttctgggatggatcac

SEQ ID NO: 3164044 - DNA, 25 bp, Homo sapien
tcagcatgatgtgtggcgttcaagg

SEQ ID NO: 3164045 - DNA, 25 bp, Homo sapien
tgtggcgttcaaggaatgttggtga

SEQ ID NO: 3164046 - DNA, 25 bp, Homo sapien
tgatgtgtggcgttcaaggaatgtt

SEQ ID NO: 3164047 - DNA, 25 bp, Homo sapien
agcatgatgtgtggcgttcaaggaa

SEQ ID NO: 3164048 - DNA, 25 bp, Homo sapien
tggcataccgagtgactgaaggaaa

SEQ ID NO: 3164049 - DNA, 25 bp, Homo sapien
ttggcataccgagtgactgaaggaa

SEQ ID NO: 3164050 - DNA, 25 bp, Homo sapien
cttggcataccgagtgactgaagga

SEQ ID NO: 3164051 - DNA, 25 bp, Homo sapien
gcataccgagtgactgaaggaaagg

SEQ ID NO: 3164052 - DNA, 25 bp, Homo sapien
caagttctattctaatttgaggcac

SEQ ID NO: 3164053 - DNA, 25 bp, Homo sapien
tctattctaatttgaggcacaactt

SEQ ID NO: 3164054 - DNA, 25 bp, Homo sapien
tattctaatttgaggcacaactttt

SEQ ID NO: 3164055 - DNA, 25 bp, Homo sapien
gttctattctaatttgaggcacaac

SEQ ID NO: 3164056 - DNA, 25 bp, Homo sapien
ggcctgtgaccaaaaactgagacga

SEQ ID NO: 3164057 - DNA, 25 bp, Homo sapien
tccagtcctggagagctctataagt

SEQ ID NO: 3164058 - DNA, 25 bp, Homo sapien
agagagagcgctgtattatttggcc

SEQ ID NO: 3164059 - DNA, 25 bp, Homo sapien
taaggaacggtgcactattgtcttg

SEQ ID NO: 3164060 - DNA, 25 bp, Homo sapien
aaataagtggcaggttaggccccat

SEQ ID NO: 3164061 - DNA, 25 bp, Homo sapien
tttatctccggaagtcacatcatgg

SEQ ID NO: 3164062 - DNA, 25 bp, Homo sapien
taagtcagttaagtcctctccccag

SEQ ID NO: 3164063 - DNA, 25 bp, Homo sapien
cacttgattgtacccagccatttgg

SEQ ID NO: 3164064 - DNA, 25 bp, Homo sapien
cacaggattgttcgtgtctctttcc

SEQ ID NO: 3164065 - DNA, 25 bp, Homo sapien
ggattgttcgtgtctctttcctgtg

SEQ ID NO: 3164066 - DNA, 25 bp, Homo sapien
gggattgggcacaggattgttcgtg

SEQ ID NO: 3164067 - DNA, 25 bp, Homo sapien
tgggcacaggattgttcgtgtctct

SEQ ID NO: 3164068 - DNA, 25 bp, Homo sapien
gtcacatgtccacttttggaccaat

SEQ ID NO: 3164069 - DNA, 25 bp, Homo sapien
cacatgtccacttttggaccaatac

SEQ ID NO: 3164070 - DNA, 25 bp, Homo sapien
gatatcacggctcattattcaagca

SEQ ID NO: 3164071 - DNA, 25 bp, Homo sapien
aagttgtgatatcacggctcattat

SEQ ID NO: 3164072 - DNA, 25 bp, Homo sapien
tctcatgtcttccactgtctgcagg

SEQ ID NO: 3164073 - DNA, 25 bp, Homo sapien
tctccaaccatctctcatgtcttcc

SEQ ID NO: 3164074 - DNA, 25 bp, Homo sapien
acttaagcaactaatggaaattttg

SEQ ID NO: 3164075 - DNA, 25 bp, Homo sapien
ggctcatgtagctgtaaaagatatt

SEQ ID NO: 3164076 - DNA, 25 bp, Homo sapien
taatctcttgtttgactatggcata

SEQ ID NO: 3164077 - DNA, 25 bp, Homo sapien
atatatgtactaagtgcaagtcaga

SEQ ID NO: 3164078 - DNA, 25 bp, Homo sapien
aaggaaaattgttgaaggttatctg

SEQ ID NO: 3164079 - DNA, 25 bp, Homo sapien
ggaaaattgttgaaggttatctgca

SEQ ID NO: 3164080 - DNA, 25 bp, Homo sapien
aggaaaattgttgaaggttatctgc

SEQ ID NO: 3164081 - DNA, 25 bp, Homo sapien
ggaacacagaagcattaccattttt

SEQ ID NO: 3164082 - DNA, 25 bp, Homo sapien
ctccagtaagtcagaggaacacaga

SEQ ID NO: 3164083 - DNA, 25 bp, Homo sapien
ttttctccagtaagtcagaggaaca

SEQ ID NO: 3164084 - DNA, 25 bp, Homo sapien
ttctccagtaagtcagaggaacaca

SEQ ID NO: 3164085 - DNA, 25 bp, Homo sapien
tacttctgtcctagagaacgctgac

SEQ ID NO: 3164086 - DNA, 25 bp, Homo sapien
gaggttttgagactcacactgagcc

SEQ ID NO: 3164087 - DNA, 25 bp, Homo sapien
caatcagctgctaggtagaagaagg

SEQ ID NO: 3164088 - DNA, 25 bp, Homo sapien
tggactgggagacgcagattcaccc

SEQ ID NO: 3164089 - DNA, 25 bp, Homo sapien
ctctcctttcattcttttctctatg

SEQ ID NO: 3164090 - DNA, 25 bp, Homo sapien
ctcctttcattcttttctctatgct

SEQ ID NO: 3164091 - DNA, 25 bp, Homo sapien
tttcattcttttctctatgctgcat

SEQ ID NO: 3164092 - DNA, 25 bp, Homo sapien
cctttcattcttttctctatgctgc

SEQ ID NO: 3164093 - DNA, 25 bp, Homo sapien
gccaaatgtggggtgtaagagccta

SEQ ID NO: 3164094 - DNA, 25 bp, Homo sapien
gcctaatgggagtaaagagagtgcc

SEQ ID NO: 3164095 - DNA, 25 bp, Homo sapien
gagagtgcctgcatgggtgccgtga

SEQ ID NO: 3164096 - DNA, 25 bp, Homo sapien
ccgtgatgtggcagtagccaggaat

SEQ ID NO: 3164097 - DNA, 25 bp, Homo sapien
tccaggtcaggtaaggaggatgtct

SEQ ID NO: 3164098 - DNA, 25 bp, Homo sapien
tagcccaggtgcaggatctcaaagc

SEQ ID NO: 3164099 - DNA, 25 bp, Homo sapien
gccaagcagggtaaggaagacaccc

SEQ ID NO: 3164100 - DNA, 25 bp, Homo sapien
caaagcccaagcagcatgaggaggg

SEQ ID NO: 3164101 - DNA, 25 bp, Homo sapien
tatccttgttaaccttctctctcga

SEQ ID NO: 3164102 - DNA, 25 bp, Homo sapien
tccttgttaaccttctctctcgatg

SEQ ID NO: 3164103 - DNA, 25 bp, Homo sapien
ttttagaattagtgcaatgtggtgc

SEQ ID NO: 3164104 - DNA, 25 bp, Homo sapien
cttgttaaccttctctctcgatgat

SEQ ID NO: 3164105 - DNA, 25 bp, Homo sapien
aatgttgttgtaaactgctgacctc

SEQ ID NO: 3164106 - DNA, 25 bp, Homo sapien
ttgttgtaaactgctgacctcatgc

SEQ ID NO: 3164107 - DNA, 25 bp, Homo sapien
gttgtaaactgctgacctcatgcat

SEQ ID NO: 3164108 - DNA, 25 bp, Homo sapien
caaatgttgttgtaaactgctgacc

SEQ ID NO: 3164109 - DNA, 25 bp, Homo sapien
ctcttataaagtaatcctcacaaga

SEQ ID NO: 3164110 - DNA, 25 bp, Homo sapien
tcttataaagtaatcctcacaagat

SEQ ID NO: 3164111 - DNA, 25 bp, Homo sapien
cctcttataaagtaatcctcacaag

SEQ ID NO: 3164112 - DNA, 25 bp, Homo sapien
ttagctccatccaaatcaccagggc

SEQ ID NO: 3164113 - DNA, 25 bp, Homo sapien
caattcctggtctgaatactgcctc

SEQ ID NO: 3164114 - DNA, 25 bp, Homo sapien
tgatcgagatggaggtccagcccag

SEQ ID NO: 3164115 - DNA, 25 bp, Homo sapien
aagatggtggtgaaattcaacctcc

SEQ ID NO: 3164116 - DNA, 25 bp, Homo sapien
aacttgtgatagctgaagttcctgg

SEQ ID NO: 3164117 - DNA, 25 bp, Homo sapien
gaacagaacttgtgatagctgaagt

SEQ ID NO: 3164118 - DNA, 25 bp, Homo sapien
gaacttgtgatagctgaagttcctg

SEQ ID NO: 3164119 - DNA, 25 bp, Homo sapien
cagaacttgtgatagctgaagttcc

SEQ ID NO: 3164120 - DNA, 25 bp, Homo sapien
tgccctttctagaacctgattctcc

SEQ ID NO: 3164121 - DNA, 25 bp, Homo sapien
ctgccctttctagaacctgattctc

SEQ ID NO: 3164122 - DNA, 25 bp, Homo sapien
tagtaaagtttcattatcctcagac

SEQ ID NO: 3164123 - DNA, 25 bp, Homo sapien
ttagtaaagtttcattatcctcaga

SEQ ID NO: 3164124 - DNA, 25 bp, Homo sapien
aaagtttcattatcctcagacataa

SEQ ID NO: 3164125 - DNA, 25 bp, Homo sapien
gtaaagtttcattatcctcagacat

SEQ ID NO: 3164126 - DNA, 25 bp, Homo sapien
caagaactcctcaaaggcaacatga

SEQ ID NO: 3164127 - DNA, 25 bp, Homo sapien
gccccagaaagcttgaagtgccact

SEQ ID NO: 3164128 - DNA, 25 bp, Homo sapien
ccagaaagcttgaagtgccactgcc

SEQ ID NO: 3164129 - DNA, 25 bp, Homo sapien
gaaagcttgaagtgccactgcccac

SEQ ID NO: 3164130 - DNA, 25 bp, Homo sapien
agctcttgttcataatcttcaaaag

SEQ ID NO: 3164131 - DNA, 25 bp, Homo sapien
ggtcatggacataagatctttagga

SEQ ID NO: 3164132 - DNA, 25 bp, Homo sapien
tcctgatattgcatagctcttgttc

SEQ ID NO: 3164133 - DNA, 25 bp, Homo sapien
taagatctttaggacaactgaggcc

SEQ ID NO: 3164134 - DNA, 25 bp, Homo sapien
gcttttggtattgtcgtcattatta

SEQ ID NO: 3164135 - DNA, 25 bp, Homo sapien
attattattccggtgacagctaggg

SEQ ID NO: 3164136 - DNA, 25 bp, Homo sapien
cagctaggggtgtgggaaaattgat

SEQ ID NO: 3164137 - DNA, 25 bp, Homo sapien
attattattattccggtgacagcta

SEQ ID NO: 3164138 - DNA, 25 bp, Homo sapien
tataggtgctttctgatactttatt

SEQ ID NO: 3164139 - DNA, 25 bp, Homo sapien
ttacttgccccacgcctttcttcca

SEQ ID NO: 3164140 - DNA, 25 bp, Homo sapien
tcttcagaagcagtataggtgcttt

SEQ ID NO: 3164141 - DNA, 25 bp, Homo sapien
cttcagaagcagtataggtgctttc

SEQ ID NO: 3164142 - DNA, 25 bp, Homo sapien
gaacagattcgtgtcccttattgca

SEQ ID NO: 3164143 - DNA, 25 bp, Homo sapien
cagcacagagagttgctcacactgt

SEQ ID NO: 3164144 - DNA, 25 bp, Homo sapien
ctttggaagcaagtagtagtccctc

SEQ ID NO: 3164145 - DNA, 25 bp, Homo sapien
cacactgtgagagaaacataggaac

SEQ ID NO: 3164146 - DNA, 25 bp, Homo sapien
gagtttaaagacagggctcatcaag

SEQ ID NO: 3164147 - DNA, 25 bp, Homo sapien
gaatccaggtttactggtcccctgc

SEQ ID NO: 3164148 - DNA, 25 bp, Homo sapien
gaagaatatcctgtagtcctgaagc

SEQ ID NO: 3164149 - DNA, 25 bp, Homo sapien
tttataaatgcaggaccaacggatc

SEQ ID NO: 3164150 - DNA, 25 bp, Homo sapien
aatctatctgcaggaacttgagtca

SEQ ID NO: 3164151 - DNA, 25 bp, Homo sapien
tacagggccctctactaaagaagga

SEQ ID NO: 3164152 - DNA, 25 bp, Homo sapien
caagtgggtggccaattaaaacagc

SEQ ID NO: 3164153 - DNA, 25 bp, Homo sapien
tagcttagcaacattcttaccccag

SEQ ID NO: 3164154 - DNA, 25 bp, Homo sapien
aatatactgattaatagtggccagt

SEQ ID NO: 3164155 - DNA, 25 bp, Homo sapien
acctgggacaattagtgagacctaa

SEQ ID NO: 3164156 - DNA, 25 bp, Homo sapien
catgggtgatgcacctgaccagaca

SEQ ID NO: 3164157 - DNA, 25 bp, Homo sapien
ttaacaagcagataccatgggtgat

SEQ ID NO: 3164158 - DNA, 25 bp, Homo sapien
taaagagaatctgaacgaagagaac

SEQ ID NO: 3164159 - DNA, 25 bp, Homo sapien
gagtttttagaagactgtcgcagca

SEQ ID NO: 3164160 - DNA, 25 bp, Homo sapien
gagaacaccagacaaaatcattctg

SEQ ID NO: 3164161 - DNA, 25 bp, Homo sapien
ggtcatttctacaggagtactgcaa

SEQ ID NO: 3164162 - DNA, 25 bp, Homo sapien
taagaaatggtttgttatcgaagca

SEQ ID NO: 3164163 - DNA, 25 bp, Homo sapien
gttcaaattgattatgatcatacag

SEQ ID NO: 3164164 - DNA, 25 bp, Homo sapien
ttagctcccttatgttcaaattgat

SEQ ID NO: 3164165 - DNA, 25 bp, Homo sapien
gcagtagccaagtctctccaaaagg

SEQ ID NO: 3164166 - DNA, 25 bp, Homo sapien
tatttacttagtagtaattcaggag

SEQ ID NO: 3164167 - DNA, 25 bp, Homo sapien
tgggatgttgtctgtttgttctcct

SEQ ID NO: 3164168 - DNA, 25 bp, Homo sapien
gatgttgtctgtttgttctccttgg

SEQ ID NO: 3164169 - DNA, 25 bp, Homo sapien
ctgggatgttgtctgtttgttctcc

SEQ ID NO: 3164170 - DNA, 25 bp, Homo sapien
ttcgggtgtagattttagatctttc

SEQ ID NO: 3164171 - DNA, 25 bp, Homo sapien
gggtgtagattttagatctttccca

SEQ ID NO: 3164172 - DNA, 25 bp, Homo sapien
gtgtagattttagatctttcccact

SEQ ID NO: 3164173 - DNA, 25 bp, Homo sapien
atgttcgggtgtagattttagatct

SEQ ID NO: 3164174 - DNA, 25 bp, Homo sapien
aacactgacctatgtgacccccaaa

SEQ ID NO: 3164175 - DNA, 25 bp, Homo sapien
ctctccttgctttgatattagcggc

SEQ ID NO: 3164176 - DNA, 25 bp, Homo sapien
gatattagcggcaaatccaaacatc

SEQ ID NO: 3164177 - DNA, 25 bp, Homo sapien
cttgctttgatattagcggcaaatc

SEQ ID NO: 3164178 - DNA, 25 bp, Homo sapien
ctggggtggagagctgaaattccat

SEQ ID NO: 3164179 - DNA, 25 bp, Homo sapien
cttcccatgtatctaccatcaagcc

SEQ ID NO: 3164180 - DNA, 25 bp, Homo sapien
ttcccatgtatctaccatcaagccc

SEQ ID NO: 3164181 - DNA, 25 bp, Homo sapien
cccatgtatctaccatcaagcccat

SEQ ID NO: 3164182 - DNA, 25 bp, Homo sapien
tcccatgtatctaccatcaagccca

SEQ ID NO: 3164183 - DNA, 25 bp, Homo sapien
tgcctttgtccaaagcttcctacct

SEQ ID NO: 3164184 - DNA, 25 bp, Homo sapien
tgtccaaagcttcctacctgttctc

SEQ ID NO: 3164185 - DNA, 25 bp, Homo sapien
cactttcttgtattacaggtaagaa

SEQ ID NO: 3164186 - DNA, 25 bp, Homo sapien
tcactttcttgtattacaggtaaga

SEQ ID NO: 3164187 - DNA, 25 bp, Homo sapien
tgaatcttgagcaaggatagccaca

SEQ ID NO: 3164188 - DNA, 25 bp, Homo sapien
cagcagccctggtagtagggaaagt

SEQ ID NO: 3164189 - DNA, 25 bp, Homo sapien
tagtagggaaagtgaatcttgagca

SEQ ID NO: 3164190 - DNA, 25 bp, Homo sapien
cctggtagtagggaaagtgaatctt

SEQ ID NO: 3164191 - DNA, 25 bp, Homo sapien
tttggtgtatttgggctcatcttct

SEQ ID NO: 3164192 - DNA, 25 bp, Homo sapien
gcaatagcagtcatagtacccctac

SEQ ID NO: 3164193 - DNA, 25 bp, Homo sapien
aatagcagtcatagtacccctacca

SEQ ID NO: 3164194 - DNA, 25 bp, Homo sapien
ccttgccttatcacgatctgaagca

SEQ ID NO: 3164195 - DNA, 25 bp, Homo sapien
ttgcctccttgccttatcacgatct

SEQ ID NO: 3164196 - DNA, 25 bp, Homo sapien
cttcagcagatacatcagcatctcc

SEQ ID NO: 3164197 - DNA, 25 bp, Homo sapien
tcttgtgaacatatggatccagtga

SEQ ID NO: 3164198 - DNA, 25 bp, Homo sapien
cactgaacaatccttccttagcagg

SEQ ID NO: 3164199 - DNA, 25 bp, Homo sapien
ccttagcaggcttaaagagcttttt

SEQ ID NO: 3164200 - DNA, 25 bp, Homo sapien
ttggcctgtttctatgtgataatcc

SEQ ID NO: 3164201 - DNA, 25 bp, Homo sapien
cagccaacttaacatgggagggaca

SEQ ID NO: 3164202 - DNA, 25 bp, Homo sapien
gtaggtgaattgtaaccatctgcac

SEQ ID NO: 3164203 - DNA, 25 bp, Homo sapien
tctgagaccgggactatcgtgaatt

SEQ ID NO: 3164204 - DNA, 25 bp, Homo sapien
ccgtggtcggagctcagcaacacag

SEQ ID NO: 3164205 - DNA, 25 bp, Homo sapien
atccgagcgcggcaaagaaaaggaa

SEQ ID NO: 3164206 - DNA, 25 bp, Homo sapien
ggcacccaggtacattcttgtgaaa

SEQ ID NO: 3164207 - DNA, 25 bp, Homo sapien
cttgtgaaactcagaatccgagcgc

SEQ ID NO: 3164208 - DNA, 25 bp, Homo sapien
cgctaaggggcacccaggtacattc

SEQ ID NO: 3164209 - DNA, 25 bp, Homo sapien
tggacgctgagtgctctgcgctccc

SEQ ID NO: 3164210 - DNA, 25 bp, Homo sapien
ccgcctccttgtccggtgcagatga

SEQ ID NO: 3164211 - DNA, 25 bp, Homo sapien
ttttcgcagtctgccggctcaatcc

SEQ ID NO: 3164212 - DNA, 25 bp, Homo sapien
ggctcaatcccagccgacgtctgtc

SEQ ID NO: 3164213 - DNA, 25 bp, Homo sapien
gcaacaggttctgtccctgctccgg

SEQ ID NO: 3164214 - DNA, 25 bp, Homo sapien
accaagcccgtctgcagcaacaggt

SEQ ID NO: 3164215 - DNA, 25 bp, Homo sapien
gcggcaggaaccagaatccaccaag

SEQ ID NO: 3164216 - DNA, 25 bp, Homo sapien
aggaaccagaatccaccaagcccgt

SEQ ID NO: 3164217 - DNA, 25 bp, Homo sapien
agcgccccacatcccttgaccaggt

SEQ ID NO: 3164218 - DNA, 25 bp, Homo sapien
tttaaggtgaagaaagcgccccaca

SEQ ID NO: 3164219 - DNA, 25 bp, Homo sapien
ttacaacacaatacagccccggaga

SEQ ID NO: 3164220 - DNA, 25 bp, Homo sapien
caacacaatacagccccggagaggg

SEQ ID NO: 3164221 - DNA, 25 bp, Homo sapien
gaggcaactaagaaaggaaattggc

SEQ ID NO: 3164222 - DNA, 25 bp, Homo sapien
gaatgcaaaatgcaaggaatgaata

SEQ ID NO: 3164223 - DNA, 25 bp, Homo sapien
cttgtttgcttcgacgtaggcagca

SEQ ID NO: 3164224 - DNA, 25 bp, Homo sapien
cagcaagttagtgtagaatgcaaaa

SEQ ID NO: 3164225 - DNA, 25 bp, Homo sapien
gaataattgcttctgatttgtatgt

SEQ ID NO: 3164226 - DNA, 25 bp, Homo sapien
ctcttttcctagtactgtcactcat

SEQ ID NO: 3164227 - DNA, 25 bp, Homo sapien
tgatggatggaattacttttaccat

SEQ ID NO: 3164228 - DNA, 25 bp, Homo sapien
cttttcctagtactgtcactcatga

SEQ ID NO: 3164229 - DNA, 25 bp, Homo sapien
tcactcatgatggatggaattactt

SEQ ID NO: 3164230 - DNA, 25 bp, Homo sapien
tggccactggacaacttggatgcat

SEQ ID NO: 3164231 - DNA, 25 bp, Homo sapien
ttaggctgcaagcatccctccagca

SEQ ID NO: 3164232 - DNA, 25 bp, Homo sapien
gatgcattgatattgtgctctgtcc

SEQ ID NO: 3164233 - DNA, 25 bp, Homo sapien
tcttttcatatttggcagtcaggtt

SEQ ID NO: 3164234 - DNA, 25 bp, Homo sapien
gatctacatgcttcactcttattaa

SEQ ID NO: 3164235 - DNA, 25 bp, Homo sapien
tacatgcttcactcttattaagaca

SEQ ID NO: 3164236 - DNA, 25 bp, Homo sapien
taacatcctaatttcgcaactgagg

SEQ ID NO: 3164237 - DNA, 25 bp, Homo sapien
gtcaaaagctataattaacatccta

SEQ ID NO: 3164238 - DNA, 25 bp, Homo sapien
tggtaagtcactcctctaaagctac

SEQ ID NO: 3164239 - DNA, 25 bp, Homo sapien
gaaatgctccaaggtttctgatgag

SEQ ID NO: 3164240 - DNA, 25 bp, Homo sapien
accttagttcctcttatccataggg

SEQ ID NO: 3164241 - DNA, 25 bp, Homo sapien
gataaatagggacctactgctgcca

SEQ ID NO: 3164242 - DNA, 25 bp, Homo sapien
cagtgtatgaggatggttgaatttt

SEQ ID NO: 3164243 - DNA, 25 bp, Homo sapien
cctttatatttaatcaacctttcat

SEQ ID NO: 3164244 - DNA, 25 bp, Homo sapien
acctttcattagatttggcagctaa

SEQ ID NO: 3164245 - DNA, 25 bp, Homo sapien
aatcaacctttcattagatttggca

SEQ ID NO: 3164246 - DNA, 25 bp, Homo sapien
ctgtaaggcagacgcaagtccactg

SEQ ID NO: 3164247 - DNA, 25 bp, Homo sapien
ccaaagtattcggcttgtatattaa

SEQ ID NO: 3164248 - DNA, 25 bp, Homo sapien
tgtgttctccaaagtattcggcttg

SEQ ID NO: 3164249 - DNA, 25 bp, Homo sapien
agtattcggcttgtatattaaactc

SEQ ID NO: 3164250 - DNA, 25 bp, Homo sapien
tctgctgtcataaaccagccaacca

SEQ ID NO: 3164251 - DNA, 25 bp, Homo sapien
atgtgtcgctcatccctagcttcgc

SEQ ID NO: 3164252 - DNA, 25 bp, Homo sapien
gttggcgagtgacaccaactctcct

SEQ ID NO: 3164253 - DNA, 25 bp, Homo sapien
aaagactctaggagtgtcagttggc

SEQ ID NO: 3164254 - DNA, 25 bp, Homo sapien
aatgaagattgctgccacttgaggc

SEQ ID NO: 3164255 - DNA, 25 bp, Homo sapien
tgtgtcattgacattccagatggga

SEQ ID NO: 3164256 - DNA, 25 bp, Homo sapien
ccatcatgcacaaaaagaagatcag

SEQ ID NO: 3164257 - DNA, 25 bp, Homo sapien
ccagcagtgttataggcatgcagaa

SEQ ID NO: 3164258 - DNA, 25 bp, Homo sapien
ttgcaactaacgtaaagactgaagc

SEQ ID NO: 3164259 - DNA, 25 bp, Homo sapien
tatctacagcaattgcaactaacgt

SEQ ID NO: 3164260 - DNA, 25 bp, Homo sapien
gcacatcgtgtttccaaatggccat

SEQ ID NO: 3164261 - DNA, 25 bp, Homo sapien
gactgaagctgcgacagatattccc

SEQ ID NO: 3164262 - DNA, 25 bp, Homo sapien
gagctcaaactcaacctctacatcg

SEQ ID NO: 3164263 - DNA, 25 bp, Homo sapien
ttggcttcagagctcaaactcaacc

SEQ ID NO: 3164264 - DNA, 25 bp, Homo sapien
atcgtcctctttagatgggtagctc

SEQ ID NO: 3164265 - DNA, 25 bp, Homo sapien
tcaacctctacatcgtcctctttag

SEQ ID NO: 3164266 - DNA, 25 bp, Homo sapien
gacataatggtgatggctaggaccc

SEQ ID NO: 3164267 - DNA, 25 bp, Homo sapien
gcacagtggtgtagatcttcctcat

SEQ ID NO: 3164268 - DNA, 25 bp, Homo sapien
catttggagaaaggtcagcgtagtc

SEQ ID NO: 3164269 - DNA, 25 bp, Homo sapien
tgagagcatcattagagtccacagg

SEQ ID NO: 3164270 - DNA, 25 bp, Homo sapien
taattcttccatcactaattcctgt

SEQ ID NO: 3164271 - DNA, 25 bp, Homo sapien
ttaaatctcactgctgttagtagtt

SEQ ID NO: 3164272 - DNA, 25 bp, Homo sapien
attcttccatcactaattcctgttg

SEQ ID NO: 3164273 - DNA, 25 bp, Homo sapien
ctcactgctgttagtagtttctttt

SEQ ID NO: 3164274 - DNA, 25 bp, Homo sapien
gcaaacatgtctaagtcactctacg

SEQ ID NO: 3164275 - DNA, 25 bp, Homo sapien
gaaaaatttgaagtgcaaagccaca

SEQ ID NO: 3164276 - DNA, 25 bp, Homo sapien
taaatatataatgcgtagtagagtt

SEQ ID NO: 3164277 - DNA, 25 bp, Homo sapien
gttaggattatcacactagctcttt

SEQ ID NO: 3164278 - DNA, 25 bp, Homo sapien
acgcacgcgtgcaggcttgatttga

SEQ ID NO: 3164279 - DNA, 25 bp, Homo sapien
tcatcaccatttggggaaaatacac

SEQ ID NO: 3164280 - DNA, 25 bp, Homo sapien
ggcttgatttgacgcatacacaaat

SEQ ID NO: 3164281 - DNA, 25 bp, Homo sapien
cacatgcacgcacgcgtgcaggctt

SEQ ID NO: 3164282 - DNA, 25 bp, Homo sapien
cttagataaaaaaggctctaattct

SEQ ID NO: 3164283 - DNA, 25 bp, Homo sapien
ccagaatcttgattaactttcacaa

SEQ ID NO: 3164284 - DNA, 25 bp, Homo sapien
ataaaaaaggctctaattcttcctg

SEQ ID NO: 3164285 - DNA, 25 bp, Homo sapien
tcttcctgtccagaatcttgattaa

SEQ ID NO: 3164286 - DNA, 25 bp, Homo sapien
ttcttccaatatctgtggaagagct

SEQ ID NO: 3164287 - DNA, 25 bp, Homo sapien
agtatacccttgtcttggtattcca

SEQ ID NO: 3164288 - DNA, 25 bp, Homo sapien
ggcttctttatagggactgctgatt

SEQ ID NO: 3164289 - DNA, 25 bp, Homo sapien
tagggactgctgattgaattcttcc

SEQ ID NO: 3164290 - DNA, 25 bp, Homo sapien
catatattgcttgtgcctgctcagc

SEQ ID NO: 3164291 - DNA, 25 bp, Homo sapien
tccgatgtgtcttaaagggtctccc

SEQ ID NO: 3164292 - DNA, 25 bp, Homo sapien
gtaatgccctcatttttccgatgtg

SEQ ID NO: 3164293 - DNA, 25 bp, Homo sapien
tccagtttcctagtagtaatgccct

SEQ ID NO: 3164294 - DNA, 25 bp, Homo sapien
gcaggcatactcaccaacgtccaag

SEQ ID NO: 3164295 - DNA, 25 bp, Homo sapien
ggcatactcaccaacgtccaagtct

SEQ ID NO: 3164296 - DNA, 25 bp, Homo sapien
tcaccaacgtccaagtctgtgccat

SEQ ID NO: 3164297 - DNA, 25 bp, Homo sapien
tactcaccaacgtccaagtctgtgc

SEQ ID NO: 3164298 - DNA, 25 bp, Homo sapien
ttgagccaagtgtccaaccctggtc

SEQ ID NO: 3164299 - DNA, 25 bp, Homo sapien
cctggtccactcaatcatgtccagg

SEQ ID NO: 3164300 - DNA, 25 bp, Homo sapien
ttcccccaagatgatgagatcatga

SEQ ID NO: 3164301 - DNA, 25 bp, Homo sapien
ccccaagatgatgagatcatgattc

SEQ ID NO: 3164302 - DNA, 25 bp, Homo sapien
tgtgaccactctgtgaccagtgtgc

SEQ ID NO: 3164303 - DNA, 25 bp, Homo sapien
tgcagtgactgaaagactgtgggac

SEQ ID NO: 3164304 - DNA, 25 bp, Homo sapien
tccagcttccatgcttccagcagtg

SEQ ID NO: 3164305 - DNA, 25 bp, Homo sapien
tgtgggacatctcgtagccagcttc

SEQ ID NO: 3164306 - DNA, 25 bp, Homo sapien
acataggacatacatttctcggctt

SEQ ID NO: 3164307 - DNA, 25 bp, Homo sapien
cataggacatacatttctcggcttt

SEQ ID NO: 3164308 - DNA, 25 bp, Homo sapien
ataggacatacatttctcggctttg

SEQ ID NO: 3164309 - DNA, 25 bp, Homo sapien
ctttatggccttaaactctctactc

SEQ ID NO: 3164310 - DNA, 25 bp, Homo sapien
cactctttcattttgtagctcttca

SEQ ID NO: 3164311 - DNA, 25 bp, Homo sapien
cccactctttcattttgtagctctt

SEQ ID NO: 3164312 - DNA, 25 bp, Homo sapien
caacccactctttcattttgtagct

SEQ ID NO: 3164313 - DNA, 25 bp, Homo sapien
aacccactctttcattttgtagctc

SEQ ID NO: 3164314 - DNA, 25 bp, Homo sapien
gaaatacatttgatgctcattcata

SEQ ID NO: 3164315 - DNA, 25 bp, Homo sapien
attttctatttgtgtagctgctacc

SEQ ID NO: 3164316 - DNA, 25 bp, Homo sapien
ttcatagcatctgtactagcctctg

SEQ ID NO: 3164317 - DNA, 25 bp, Homo sapien
aaatgacagtctctagccaagcaca

SEQ ID NO: 3164318 - DNA, 25 bp, Homo sapien
ttcctcaatgcgctgtattcaaaag

SEQ ID NO: 3164319 - DNA, 25 bp, Homo sapien
cttgtttcctcaatgcgctgtattc

SEQ ID NO: 3164320 - DNA, 25 bp, Homo sapien
tcaatgcgctgtattcaaaagatcc

SEQ ID NO: 3164321 - DNA, 25 bp, Homo sapien
tgtttcctcaatgcgctgtattcaa

SEQ ID NO: 3164322 - DNA, 25 bp, Homo sapien
ggtgagtctccacttttaagataat

SEQ ID NO: 3164323 - DNA, 25 bp, Homo sapien
gcaaaattactatgctcacgctttg

SEQ ID NO: 3164324 - DNA, 25 bp, Homo sapien
caaaattactatgctcacgctttgt

SEQ ID NO: 3164325 - DNA, 25 bp, Homo sapien
aaaattactatgctcacgctttgtt

SEQ ID NO: 3164326 - DNA, 25 bp, Homo sapien
tatacttctgacctttgggctttct

SEQ ID NO: 3164327 - DNA, 25 bp, Homo sapien
gtgtgcatacatctcatccacaggg

SEQ ID NO: 3164328 - DNA, 25 bp, Homo sapien
aaagatggtcacacaaacagtttcc

SEQ ID NO: 3164329 - DNA, 25 bp, Homo sapien
tttgttgtactgagagcacgtacca

SEQ ID NO: 3164330 - DNA, 25 bp, Homo sapien
gattcaataggtgcttcttctcagg

SEQ ID NO: 3164331 - DNA, 25 bp, Homo sapien
tgggaggtccaaatgcatatgctgc

SEQ ID NO: 3164332 - DNA, 25 bp, Homo sapien
caaaagctcgtgtggatcactcccg

SEQ ID NO: 3164333 - DNA, 25 bp, Homo sapien
tagggagtaccctctgagaaagtca

SEQ ID NO: 3164334 - DNA, 25 bp, Homo sapien
ttgttgctaggtgaatgaaatttac

SEQ ID NO: 3164335 - DNA, 25 bp, Homo sapien
agtccctcggagtgcatataaatgt

SEQ ID NO: 3164336 - DNA, 25 bp, Homo sapien
aaatttaccatgatgagtccctcgg

SEQ ID NO: 3164337 - DNA, 25 bp, Homo sapien
catgatgagtccctcggagtgcata

SEQ ID NO: 3164338 - DNA, 25 bp, Homo sapien
ttcacaagttattgcaacagtctgc

SEQ ID NO: 3164339 - DNA, 25 bp, Homo sapien
cagtctgcatgagctggttggttta

SEQ ID NO: 3164340 - DNA, 25 bp, Homo sapien
cagatgtctgcggtacttggtagta

SEQ ID NO: 3164341 - DNA, 25 bp, Homo sapien
gagctactcaaatgtgcccaaatca

SEQ ID NO: 3164342 - DNA, 25 bp, Homo sapien
cactctccaactggataatttcagg

SEQ ID NO: 3164343 - DNA, 25 bp, Homo sapien
gagtcaggcagacaactttaggcaa

SEQ ID NO: 3164344 - DNA, 25 bp, Homo sapien
gcctgttagacccaaaatactgacc

SEQ ID NO: 3164345 - DNA, 25 bp, Homo sapien
gacaactttaggcaagacagacaga

SEQ ID NO: 3164346 - DNA, 25 bp, Homo sapien
cttataagcactgtgtgagacagca

SEQ ID NO: 3164347 - DNA, 25 bp, Homo sapien
catgctttgtgacattaaagcttat

SEQ ID NO: 3164348 - DNA, 25 bp, Homo sapien
aagcttataagcactgtgtgagaca

SEQ ID NO: 3164349 - DNA, 25 bp, Homo sapien
tgtgacattaaagcttataagcact

SEQ ID NO: 3164350 - DNA, 25 bp, Homo sapien
ctcgcataaagcctgaagggtgaga

SEQ ID NO: 3164351 - DNA, 25 bp, Homo sapien
ggatggtttactgagtcatagtttt

SEQ ID NO: 3164352 - DNA, 25 bp, Homo sapien
catatttactaagggttgccaaagg

SEQ ID NO: 3164353 - DNA, 25 bp, Homo sapien
gggaaggaagacagtgcctcgcata

SEQ ID NO: 3164354 - DNA, 25 bp, Homo sapien
gaattcagtattctggtgggcagtg

SEQ ID NO: 3164355 - DNA, 25 bp, Homo sapien
tgcaaagcagcaccatcagtttttt

SEQ ID NO: 3164356 - DNA, 25 bp, Homo sapien
atgcaaagcagcaccatcagttttt

SEQ ID NO: 3164357 - DNA, 25 bp, Homo sapien
cctgttgagtcatggcgagctttgg

SEQ ID NO: 3164358 - DNA, 25 bp, Homo sapien
tcttggccctttgtgaaagcacatg

SEQ ID NO: 3164359 - DNA, 25 bp, Homo sapien
cagaattcacgcaagagacagaggc

SEQ ID NO: 3164360 - DNA, 25 bp, Homo sapien
tcagacatggtgtagaaaggaagac

SEQ ID NO: 3164361 - DNA, 25 bp, Homo sapien
cagaaatggcaatgttttgggtgaa

SEQ ID NO: 3164362 - DNA, 25 bp, Homo sapien
catgtatccacagcacatgcgtgtg

SEQ ID NO: 3164363 - DNA, 25 bp, Homo sapien
gatacctgtgactcagactggctaa

SEQ ID NO: 3164364 - DNA, 25 bp, Homo sapien
taaatgaaaccaacatccacccagt

SEQ ID NO: 3164365 - DNA, 25 bp, Homo sapien
tatccagttggtaagcagtacccac

SEQ ID NO: 3164366 - DNA, 25 bp, Homo sapien
ttctaccgggcatcttcctgatata

SEQ ID NO: 3164367 - DNA, 25 bp, Homo sapien
gaggattcagttaggttattctcac

SEQ ID NO: 3164368 - DNA, 25 bp, Homo sapien
catatgagtcttctaccgggcatct

SEQ ID NO: 3164369 - DNA, 25 bp, Homo sapien
cagttaggttattctcactaccctc

SEQ ID NO: 3164370 - DNA, 25 bp, Homo sapien
tcataaaggcaagcgtagaagtggc

SEQ ID NO: 3164371 - DNA, 25 bp, Homo sapien
tgtgttacatgagagccagtgacct

SEQ ID NO: 3164372 - DNA, 25 bp, Homo sapien
agacacggtcgcataggttccaggg

SEQ ID NO: 3164373 - DNA, 25 bp, Homo sapien
ttgttccagagggtatgggccaaga

SEQ ID NO: 3164374 - DNA, 25 bp, Homo sapien
gctttagctattgcccctgagaaga

SEQ ID NO: 3164375 - DNA, 25 bp, Homo sapien
ctttagctattgcccctgagaagat

SEQ ID NO: 3164376 - DNA, 25 bp, Homo sapien
agctttagctattgcccctgagaag

SEQ ID NO: 3164377 - DNA, 25 bp, Homo sapien
tgataccagcagagacttggaaaga

SEQ ID NO: 3164378 - DNA, 25 bp, Homo sapien
taaaaaggtcattgacataactggc

SEQ ID NO: 3164379 - DNA, 25 bp, Homo sapien
cataactggctgtggttgataccag

SEQ ID NO: 3164380 - DNA, 25 bp, Homo sapien
gagaacctccaacataatcagctga

SEQ ID NO: 3164381 - DNA, 25 bp, Homo sapien
ctttgctttccgttgtttgatttct

SEQ ID NO: 3164382 - DNA, 25 bp, Homo sapien
ttgctccatggttgttctaataagt

SEQ ID NO: 3164383 - DNA, 25 bp, Homo sapien
tctttgctttccgttgtttgatttc

SEQ ID NO: 3164384 - DNA, 25 bp, Homo sapien
ttttgctccatggttgttctaataa

SEQ ID NO: 3164385 - DNA, 25 bp, Homo sapien
tatagtcgggttgctttccctgtgc

SEQ ID NO: 3164386 - DNA, 25 bp, Homo sapien
atagtcgggttgctttccctgtgcc

SEQ ID NO: 3164387 - DNA, 25 bp, Homo sapien
ggatatagtcgggttgctttccctg

SEQ ID NO: 3164388 - DNA, 25 bp, Homo sapien
ctctggatatagtcgggttgctttc

SEQ ID NO: 3164389 - DNA, 25 bp, Homo sapien
tggctcctggagcatacttatgacc

SEQ ID NO: 3164390 - DNA, 25 bp, Homo sapien
gaaggcaattgtaccgttcagtgca

SEQ ID NO: 3164391 - DNA, 25 bp, Homo sapien
tgttttctagcagaggggtgccttg

SEQ ID NO: 3164392 - DNA, 25 bp, Homo sapien
gaggggtgccttgcatgctcttcca

SEQ ID NO: 3164393 - DNA, 25 bp, Homo sapien
atctgagagcagagataccacagct

SEQ ID NO: 3164394 - DNA, 25 bp, Homo sapien
catctgagagcagagataccacagc

SEQ ID NO: 3164395 - DNA, 25 bp, Homo sapien
aagcagagtgtgctttagattaaag

SEQ ID NO: 3164396 - DNA, 25 bp, Homo sapien
gcagagtgtgctttagattaaagcc

SEQ ID NO: 3164397 - DNA, 25 bp, Homo sapien
gtgctttagattaaagcctctggca

SEQ ID NO: 3164398 - DNA, 25 bp, Homo sapien
gagtgtgctttagattaaagcctct

SEQ ID NO: 3164399 - DNA, 25 bp, Homo sapien
tttgtctttttgttgaaggctctcc

SEQ ID NO: 3164400 - DNA, 25 bp, Homo sapien
tcccttcccataattcttctctttg

SEQ ID NO: 3164401 - DNA, 25 bp, Homo sapien
ttcctgaaaggacttcaggagacca

SEQ ID NO: 3164402 - DNA, 25 bp, Homo sapien
ggctctcctttttagttattcctga

SEQ ID NO: 3164403 - DNA, 25 bp, Homo sapien
ttcatcttgcctttgctcatttttt

SEQ ID NO: 3164404 - DNA, 25 bp, Homo sapien
catcttgcctttgctcatttttttt

SEQ ID NO: 3164405 - DNA, 25 bp, Homo sapien
tttcatcttgcctttgctcattttt

SEQ ID NO: 3164406 - DNA, 25 bp, Homo sapien
gtttcatcttgcctttgctcatttt

SEQ ID NO: 3164407 - DNA, 25 bp, Homo sapien
ccagagctcggccttgtaaccctgt

SEQ ID NO: 3164408 - DNA, 25 bp, Homo sapien
cccctctaggtttcaggattcttag

SEQ ID NO: 3164409 - DNA, 25 bp, Homo sapien
aagtttcttcgtaatggaatgtcag

SEQ ID NO: 3164410 - DNA, 25 bp, Homo sapien
gagggttctcaagccaagtacagaa

SEQ ID NO: 3164411 - DNA, 25 bp, Homo sapien
cattttccatctcatctactttcac

SEQ ID NO: 3164412 - DNA, 25 bp, Homo sapien
tgtttgcataagttcttttttcctc

SEQ ID NO: 3164413 - DNA, 25 bp, Homo sapien
catctcatctactttcacgtacaag

SEQ ID NO: 3164414 - DNA, 25 bp, Homo sapien
tttccatctcatctactttcacgta

SEQ ID NO: 3164415 - DNA, 25 bp, Homo sapien
gacctaactgctattacagctttgg

SEQ ID NO: 3164416 - DNA, 25 bp, Homo sapien
tgtgtacttgaaggcttcagaggac

SEQ ID NO: 3164417 - DNA, 25 bp, Homo sapien
tcagaggacctaactgctattacag

SEQ ID NO: 3164418 - DNA, 25 bp, Homo sapien
tattacagctttggaagatgtttca

SEQ ID NO: 3164419 - DNA, 25 bp, Homo sapien
tgtgacagctctttgagagttttgt

SEQ ID NO: 3164420 - DNA, 25 bp, Homo sapien
catgtgacagctctttgagagtttt

SEQ ID NO: 3164421 - DNA, 25 bp, Homo sapien
gctctttgagagttttgttttcatg

SEQ ID NO: 3164422 - DNA, 25 bp, Homo sapien
gacagctctttgagagttttgtttt

SEQ ID NO: 3164423 - DNA, 25 bp, Homo sapien
tccaggaactttaatttcctgtgcc

SEQ ID NO: 3164424 - DNA, 25 bp, Homo sapien
catggacttgtaaactgtccagcca

SEQ ID NO: 3164425 - DNA, 25 bp, Homo sapien
ccaggaactttaatttcctgtgcca

SEQ ID NO: 3164426 - DNA, 25 bp, Homo sapien
ccatggacttgtaaactgtccagcc

SEQ ID NO: 3164427 - DNA, 25 bp, Homo sapien
cggtctgggcgcttgaatgaagttc

SEQ ID NO: 3164428 - DNA, 25 bp, Homo sapien
tgactcacggttttttcgggcagcc

SEQ ID NO: 3164429 - DNA, 25 bp, Homo sapien
gggagagatccagtagacacgtgtc

SEQ ID NO: 3164430 - DNA, 25 bp, Homo sapien
gagtcgggttcctggagctttctct

SEQ ID NO: 3164431 - DNA, 25 bp, Homo sapien
gaccaatggtgctcgaaaagcctcg

SEQ ID NO: 3164432 - DNA, 25 bp, Homo sapien
gagatagttggaaagcccctcgtcc

SEQ ID NO: 3164433 - DNA, 25 bp, Homo sapien
tgtgcccgcttacagcaccttctcg

SEQ ID NO: 3164434 - DNA, 25 bp, Homo sapien
aaaagcctcgaaaaagctgctttgg

SEQ ID NO: 3164435 - DNA, 25 bp, Homo sapien
gggagctccggacgccttattagcg

SEQ ID NO: 3164436 - DNA, 25 bp, Homo sapien
ttattagcgccccgcgggtcgccag

SEQ ID NO: 3164437 - DNA, 25 bp, Homo sapien
gagcggtctccaatcctgacacggt

SEQ ID NO: 3164438 - DNA, 25 bp, Homo sapien
gttcgggccccgcatgacgtgggcg

SEQ ID NO: 3164439 - DNA, 25 bp, Homo sapien
tcccgccagtcgggaccggtggcgc

SEQ ID NO: 3164440 - DNA, 25 bp, Homo sapien
ccagtcgggaccggtggcgcccctg

SEQ ID NO: 3164441 - DNA, 25 bp, Homo sapien
cagtcgggaccggtggcgcccctgg

SEQ ID NO: 3164442 - DNA, 25 bp, Homo sapien
cgcgtcccgccagtcgggaccggtg

SEQ ID NO: 3164443 - DNA, 25 bp, Homo sapien
gatcaccgcgtggttaagatctgga

SEQ ID NO: 3164444 - DNA, 25 bp, Homo sapien
tccagggcttctcttcggggagaat

SEQ ID NO: 3164445 - DNA, 25 bp, Homo sapien
cctgccaaaacgtgggaggtgactg

SEQ ID NO: 3164446 - DNA, 25 bp, Homo sapien
actggtgcctggaagggagatcacc

SEQ ID NO: 3164447 - DNA, 25 bp, Homo sapien
gataacttaatctgggtgtgaggaa

SEQ ID NO: 3164448 - DNA, 25 bp, Homo sapien
gaagagtcgctgaggcctgtgtact

SEQ ID NO: 3164449 - DNA, 25 bp, Homo sapien
ggaagagtcgctgaggcctgtgtac

SEQ ID NO: 3164450 - DNA, 25 bp, Homo sapien
tgataacttaatctgggtgtgagga

SEQ ID NO: 3164451 - DNA, 25 bp, Homo sapien
tgtgtccaagcctttgtgtcttggt

SEQ ID NO: 3164452 - DNA, 25 bp, Homo sapien
ctttgccctccaagaccctgctctc

SEQ ID NO: 3164453 - DNA, 25 bp, Homo sapien
gtccaagcctttgtgtcttggtggg

SEQ ID NO: 3164454 - DNA, 25 bp, Homo sapien
cctgtgtccaagcctttgtgtcttg

SEQ ID NO: 3164455 - DNA, 25 bp, Homo sapien
taacttgagaatgttgtgcccttcc

SEQ ID NO: 3164456 - DNA, 25 bp, Homo sapien
gggcctgccgtcaggcttttcatcc

SEQ ID NO: 3164457 - DNA, 25 bp, Homo sapien
taccccagtgcattttgtgtgcaag

SEQ ID NO: 3164458 - DNA, 25 bp, Homo sapien
agcaggtctggcgagcagttcacag

SEQ ID NO: 3164459 - DNA, 25 bp, Homo sapien
cggattgactttatcagcccagcag

SEQ ID NO: 3164460 - DNA, 25 bp, Homo sapien
cctgttgcctgatttgctaaggatg

SEQ ID NO: 3164461 - DNA, 25 bp, Homo sapien
gcccagcaggcatctacgcatgatt

SEQ ID NO: 3164462 - DNA, 25 bp, Homo sapien
tgatttgctaaggatgtgtcttcca

SEQ ID NO: 3164463 - DNA, 25 bp, Homo sapien
ggcctcacttgagctggcatcatgc

SEQ ID NO: 3164464 - DNA, 25 bp, Homo sapien
gggcctcacttgagctggcatcatg

SEQ ID NO: 3164465 - DNA, 25 bp, Homo sapien
tgccccaaagtgtgctgcttgaggc

SEQ ID NO: 3164466 - DNA, 25 bp, Homo sapien
ggggtcatgccacccatgaaatcct

SEQ ID NO: 3164467 - DNA, 25 bp, Homo sapien
ggtgatatgccaaccaagtttctct

SEQ ID NO: 3164468 - DNA, 25 bp, Homo sapien
tttccaagcaggtgatatgccaacc

SEQ ID NO: 3164469 - DNA, 25 bp, Homo sapien
tgcctaatggtaagagaatttcctc

SEQ ID NO: 3164470 - DNA, 25 bp, Homo sapien
gaagtcccgctttctgtatttgttc

SEQ ID NO: 3164471 - DNA, 25 bp, Homo sapien
agaagtcccgctttctgtatttgtt

SEQ ID NO: 3164472 - DNA, 25 bp, Homo sapien
aagaagtcccgctttctgtatttgt

SEQ ID NO: 3164473 - DNA, 25 bp, Homo sapien
ttttcttaatctagaagaatggttc

SEQ ID NO: 3164474 - DNA, 25 bp, Homo sapien
tcttaatctagaagaatggttcttg

SEQ ID NO: 3164475 - DNA, 25 bp, Homo sapien
tctagaagaatggttcttgaaattc

SEQ ID NO: 3164476 - DNA, 25 bp, Homo sapien
tctgctctttgtctgtattccttct

SEQ ID NO: 3164477 - DNA, 25 bp, Homo sapien
gaaacaagaagggctgaatgttgag

SEQ ID NO: 3164478 - DNA, 25 bp, Homo sapien
aacaagaagggctgaatgttgagtc

SEQ ID NO: 3164479 - DNA, 25 bp, Homo sapien
acaagaagggctgaatgttgagtca

SEQ ID NO: 3164480 - DNA, 25 bp, Homo sapien
tcagaaacaagaagggctgaatgtt

SEQ ID NO: 3164481 - DNA, 25 bp, Homo sapien
actgatggtgatggactactaggca

SEQ ID NO: 3164482 - DNA, 25 bp, Homo sapien
ccagcctaccctttgtgccatggag

SEQ ID NO: 3164483 - DNA, 25 bp, Homo sapien
tactaggcaaagctcatattttcca

SEQ ID NO: 3164484 - DNA, 25 bp, Homo sapien
ggtgggtggattcataccagcctac

SEQ ID NO: 3164485 - DNA, 25 bp, Homo sapien
gctgtcacatttggaaagccgcagc

SEQ ID NO: 3164486 - DNA, 25 bp, Homo sapien
ttttctttgtctgcctgctgttcca

SEQ ID NO: 3164487 - DNA, 25 bp, Homo sapien
ttggaaagccgcagccagtcagaga

SEQ ID NO: 3164488 - DNA, 25 bp, Homo sapien
gccatttggttagaaaagctgtcac

SEQ ID NO: 3164489 - DNA, 25 bp, Homo sapien
ctctttggttttacaactctcatcc

SEQ ID NO: 3164490 - DNA, 25 bp, Homo sapien
tctttggttttacaactctcatcca

SEQ ID NO: 3164491 - DNA, 25 bp, Homo sapien
ttgaagtcttgcaccagtaggtatg

SEQ ID NO: 3164492 - DNA, 25 bp, Homo sapien
gaagtcttgcaccagtaggtatgca

SEQ ID NO: 3164493 - DNA, 25 bp, Homo sapien
aagtcttgcaccagtaggtatgcat

SEQ ID NO: 3164494 - DNA, 25 bp, Homo sapien
tgaagtcttgcaccagtaggtatgc

SEQ ID NO: 3164495 - DNA, 25 bp, Homo sapien
aaagttggctgatgttcctttctga

SEQ ID NO: 3164496 - DNA, 25 bp, Homo sapien
agagatagacatttagaaactgggc

SEQ ID NO: 3164497 - DNA, 25 bp, Homo sapien
gatgtgtgctgactgccttgatggc

SEQ ID NO: 3164498 - DNA, 25 bp, Homo sapien
gatggcagtctgcaattgtgctcct

SEQ ID NO: 3164499 - DNA, 25 bp, Homo sapien
tattaaaatggagtgacaagaagaa

SEQ ID NO: 3164500 - DNA, 25 bp, Homo sapien
attaaaatggagtgacaagaagaat

SEQ ID NO: 3164501 - DNA, 25 bp, Homo sapien
cactattaaaatggagtgacaagaa

SEQ ID NO: 3164502 - DNA, 25 bp, Homo sapien
cacactattaaaatggagtgacaag

SEQ ID NO: 3164503 - DNA, 25 bp, Homo sapien
taacaaatgatacattctggcaatt

SEQ ID NO: 3164504 - DNA, 25 bp, Homo sapien
taagctacagttgaaattcactctc

SEQ ID NO: 3164505 - DNA, 25 bp, Homo sapien
taattcccgtttctgtaagctacag

SEQ ID NO: 3164506 - DNA, 25 bp, Homo sapien
ttgattgattgtaaggagactccat

SEQ ID NO: 3164507 - DNA, 25 bp, Homo sapien
gctgccatcccagagttataggaag

SEQ ID NO: 3164508 - DNA, 25 bp, Homo sapien
ggaactggagccatgcctactctat

SEQ ID NO: 3164509 - DNA, 25 bp, Homo sapien
tgtgagctacttgacccaagtcttc

SEQ ID NO: 3164510 - DNA, 25 bp, Homo sapien
tgatggtaattcctctttaggccga

SEQ ID NO: 3164511 - DNA, 25 bp, Homo sapien
cactgattggaaagtagtgcaatcc

SEQ ID NO: 3164512 - DNA, 25 bp, Homo sapien
ggtgtgttgtgtacgcattagtagt

SEQ ID NO: 3164513 - DNA, 25 bp, Homo sapien
tacgcattagtagtactgccctcac

SEQ ID NO: 3164514 - DNA, 25 bp, Homo sapien
gattggaaagtagtgcaatcccaag

SEQ ID NO: 3164515 - DNA, 25 bp, Homo sapien
atttcttctagatggatttctgaac

SEQ ID NO: 3164516 - DNA, 25 bp, Homo sapien
ctatttcttctagatggatttctga

SEQ ID NO: 3164517 - DNA, 25 bp, Homo sapien
ttcttctagatggatttctgaactt

SEQ ID NO: 3164518 - DNA, 25 bp, Homo sapien
attttcccctttgccccagaatgca

SEQ ID NO: 3164519 - DNA, 25 bp, Homo sapien
caggttctgggtgatactttttcac

SEQ ID NO: 3164520 - DNA, 25 bp, Homo sapien
gagactgtccttaaagctgggcatg

SEQ ID NO: 3164521 - DNA, 25 bp, Homo sapien
tgatccgtggcagaaaggagactgt

SEQ ID NO: 3164522 - DNA, 25 bp, Homo sapien
cactaactgtatagctagtgagtcc

SEQ ID NO: 3164523 - DNA, 25 bp, Homo sapien
gagaattgcttaacaagttggccag

SEQ ID NO: 3164524 - DNA, 25 bp, Homo sapien
ggccagcaatggtagaagcatgact

SEQ ID NO: 3164525 - DNA, 25 bp, Homo sapien
gggaatggatgcttgtttgctggaa

SEQ ID NO: 3164526 - DNA, 25 bp, Homo sapien
ggaaagagaccaccaacaaaagtga

SEQ ID NO: 3164527 - DNA, 25 bp, Homo sapien
gatggtgggctattctcagactgaa

SEQ ID NO: 3164528 - DNA, 25 bp, Homo sapien
aaactgtgctcccatgcgttggaga

SEQ ID NO: 3164529 - DNA, 25 bp, Homo sapien
gtatctccataaaccagttcatttg

SEQ ID NO: 3164530 - DNA, 25 bp, Homo sapien
tatctatttgttgaagatggtgggc

SEQ ID NO: 3164531 - DNA, 25 bp, Homo sapien
atgtagccctgagggtcacaggctg

SEQ ID NO: 3164532 - DNA, 25 bp, Homo sapien
aatgtagccctgagggtcacaggct

SEQ ID NO: 3164533 - DNA, 25 bp, Homo sapien
ctagcatctgttattgtagcagcct

SEQ ID NO: 3164534 - DNA, 25 bp, Homo sapien
gcatctgttattgtagcagcctgca

SEQ ID NO: 3164535 - DNA, 25 bp, Homo sapien
ctgttattgtagcagcctgcagtac

SEQ ID NO: 3164536 - DNA, 25 bp, Homo sapien
taactttctctgctagcatctgtta

SEQ ID NO: 3164537 - DNA, 25 bp, Homo sapien
aacgatggttggatgccacgaagta

SEQ ID NO: 3164538 - DNA, 25 bp, Homo sapien
accttctctccttttgtacaacact

SEQ ID NO: 3164539 - DNA, 25 bp, Homo sapien
aaccatatgcatgttgtcaggccca

SEQ ID NO: 3164540 - DNA, 25 bp, Homo sapien
aaaaacgatggttggatgccacgaa

SEQ ID NO: 3164541 - DNA, 25 bp, Homo sapien
gtgaatcataagatccaatgacagc

SEQ ID NO: 3164542 - DNA, 25 bp, Homo sapien
tcaaagtgaatcataagatccaatg

SEQ ID NO: 3164543 - DNA, 25 bp, Homo sapien
tctatccaggacgtcagttaattca

SEQ ID NO: 3164544 - DNA, 25 bp, Homo sapien
agagagaagtctatccaggacgtca

SEQ ID NO: 3164545 - DNA, 25 bp, Homo sapien
tacaagttcctagtcctggtttctg

SEQ ID NO: 3164546 - DNA, 25 bp, Homo sapien
ccagaaccagtacttgcacaagtgc

SEQ ID NO: 3164547 - DNA, 25 bp, Homo sapien
tacagaggtaagaattctgcttccc

SEQ ID NO: 3164548 - DNA, 25 bp, Homo sapien
gatggtggcaattaagactaggttc

SEQ ID NO: 3164549 - DNA, 25 bp, Homo sapien
tcactcagggttttcgatcgcacga

SEQ ID NO: 3164550 - DNA, 25 bp, Homo sapien
tctgcagtacatgcgaacggctggt

SEQ ID NO: 3164551 - DNA, 25 bp, Homo sapien
ggtgctgtcacgctgcctttggcag

SEQ ID NO: 3164552 - DNA, 25 bp, Homo sapien
ccagtgtgggcagtggcaccagtct

SEQ ID NO: 3164553 - DNA, 25 bp, Homo sapien
tgaacatttgtgactgcccattccc

SEQ ID NO: 3164554 - DNA, 25 bp, Homo sapien
gatcctgaagttttagaatggcaaa

SEQ ID NO: 3164555 - DNA, 25 bp, Homo sapien
gcttctgagcaaacacggaaattta

SEQ ID NO: 3164556 - DNA, 25 bp, Homo sapien
catcatccgttttaccttagttagc

SEQ ID NO: 3164557 - DNA, 25 bp, Homo sapien
catttcaggaggtcagatgtacgga

SEQ ID NO: 3164558 - DNA, 25 bp, Homo sapien
ccccgcttagtttgttgactccgtg

SEQ ID NO: 3164559 - DNA, 25 bp, Homo sapien
ggactcgccatatggttctgtaaca

SEQ ID NO: 3164560 - DNA, 25 bp, Homo sapien
tgaatgcctggccataagcagtcct

SEQ ID NO: 3164561 - DNA, 25 bp, Homo sapien
cattaaaagacctcacagtgttccc

SEQ ID NO: 3164562 - DNA, 25 bp, Homo sapien
tactgccccagtgacttaccctatg

SEQ ID NO: 3164563 - DNA, 25 bp, Homo sapien
tgggccctttagcacattgtttgaa

SEQ ID NO: 3164564 - DNA, 25 bp, Homo sapien
caacaagttctgctccagtggcggt

SEQ ID NO: 3164565 - DNA, 25 bp, Homo sapien
gctgtaatatcaatgctattcggga

SEQ ID NO: 3164566 - DNA, 25 bp, Homo sapien
tattcgggagtttactggtgcacac

SEQ ID NO: 3164567 - DNA, 25 bp, Homo sapien
gacaagactggagaccggataatca

SEQ ID NO: 3164568 - DNA, 25 bp, Homo sapien
caaagaaagtatctgttccatcaac

SEQ ID NO: 3164569 - DNA, 25 bp, Homo sapien
cagtagcaagtcctaagcgtgggca

SEQ ID NO: 3164570 - DNA, 25 bp, Homo sapien
ggaccagtaattctctatctacttg

SEQ ID NO: 3164571 - DNA, 25 bp, Homo sapien
agtgaagggaccagtaattctctat

SEQ ID NO: 3164572 - DNA, 25 bp, Homo sapien
aatgggaagttaacagtagcaagtc

SEQ ID NO: 3164573 - DNA, 25 bp, Homo sapien
gtgctgtcccggaactcaccagagg

SEQ ID NO: 3164574 - DNA, 25 bp, Homo sapien
tgctggtagcggcagcaataacgga

SEQ ID NO: 3164575 - DNA, 25 bp, Homo sapien
cttacttttagagctccgtgccatg

SEQ ID NO: 3164576 - DNA, 25 bp, Homo sapien
tgttagtttcagctaccgcctgcaa

SEQ ID NO: 3164577 - DNA, 25 bp, Homo sapien
aaagggctacccctgactgactctg

SEQ ID NO: 3164578 - DNA, 25 bp, Homo sapien
cagattatcaaaacgccggctttaa

SEQ ID NO: 3164579 - DNA, 25 bp, Homo sapien
ttcccattggagttgctttctcctg

SEQ ID NO: 3164580 - DNA, 25 bp, Homo sapien
gaggtttaccagtgttgatctggcc

SEQ ID NO: 3164581 - DNA, 25 bp, Homo sapien
gtcttcctctgattatgcctttcag

SEQ ID NO: 3164582 - DNA, 25 bp, Homo sapien
tatgcctttcagaagcctcatttgt

SEQ ID NO: 3164583 - DNA, 25 bp, Homo sapien
taggtgaccttgcatcctgagaaaa

SEQ ID NO: 3164584 - DNA, 25 bp, Homo sapien
tgaacctcagtaactaaacgtgtcg

SEQ ID NO: 3164585 - DNA, 25 bp, Homo sapien
tacttgaaatgtgtgacaacgaacc

SEQ ID NO: 3164586 - DNA, 25 bp, Homo sapien
caacgaacccttttatgctgacagt

SEQ ID NO: 3164587 - DNA, 25 bp, Homo sapien
tacattctggcttcatcgctggagt

SEQ ID NO: 3164588 - DNA, 25 bp, Homo sapien
gactggtccaagttgagattctcca

SEQ ID NO: 3164589 - DNA, 25 bp, Homo sapien
cattgggatattagagtttggctca

SEQ ID NO: 3164590 - DNA, 25 bp, Homo sapien
ttctccatacgtaagttattcctcg

SEQ ID NO: 3164591 - DNA, 25 bp, Homo sapien
taaccttgtcactcgctctgaaagc

SEQ ID NO: 3164592 - DNA, 25 bp, Homo sapien
taaaattggacatagctttgctgag

SEQ ID NO: 3164593 - DNA, 25 bp, Homo sapien
tataatggcattgagaaaacttgag

SEQ ID NO: 3164594 - DNA, 25 bp, Homo sapien
taagagctatgatcttgagccagtc

SEQ ID NO: 3164595 - DNA, 25 bp, Homo sapien
aaaaaagatgtaggccatatacaat

SEQ ID NO: 3164596 - DNA, 25 bp, Homo sapien
tgaaataacttactggcgaaattac

SEQ ID NO: 3164597 - DNA, 25 bp, Homo sapien
gcactggtgatatgctttagaatac

SEQ ID NO: 3164598 - DNA, 25 bp, Homo sapien
taataatagtaacgaaatctcaagt

SEQ ID NO: 3164599 - DNA, 25 bp, Homo sapien
tagggatatctgaaagagcaacagt

SEQ ID NO: 3164600 - DNA, 25 bp, Homo sapien
gaatgctgcatgctttatagggata

SEQ ID NO: 3164601 - DNA, 25 bp, Homo sapien
gcttggattaagcaccactgaatta

SEQ ID NO: 3164602 - DNA, 25 bp, Homo sapien
gcagttctgaatggttttcagatta

SEQ ID NO: 3164603 - DNA, 25 bp, Homo sapien
taacacagtaaatagacccctcagg

SEQ ID NO: 3164604 - DNA, 25 bp, Homo sapien
gaatcggctagacttatatcagtgt

SEQ ID NO: 3164605 - DNA, 25 bp, Homo sapien
aaaacttatggacccgaaggccatg

SEQ ID NO: 3164606 - DNA, 25 bp, Homo sapien
tgttgacatttacgatgatggtgca

SEQ ID NO: 3164607 - DNA, 25 bp, Homo sapien
caaagagaattataagcctgtgtta

SEQ ID NO: 3164608 - DNA, 25 bp, Homo sapien
gatgactgccagatagtgtccatgt

SEQ ID NO: 3164609 - DNA, 25 bp, Homo sapien
gcttgggaatataacttactgtgca

SEQ ID NO: 3164610 - DNA, 25 bp, Homo sapien
gcctgaaaattgctccaagcagctt

SEQ ID NO: 3164611 - DNA, 25 bp, Homo sapien
ccaattgctctgttgtgcctataag

SEQ ID NO: 3164612 - DNA, 25 bp, Homo sapien
agtagacctactgtgctgtggcaaa

SEQ ID NO: 3164613 - DNA, 25 bp, Homo sapien
tgcctataagccacatcgtactgta

SEQ ID NO: 3164614 - DNA, 25 bp, Homo sapien
ggaagtctttccaagtcccaattgc

SEQ ID NO: 3164615 - DNA, 25 bp, Homo sapien
gacaagaacatccactggttctcat

SEQ ID NO: 3164616 - DNA, 25 bp, Homo sapien
tgaatgtggtgctgacaagaacatc

SEQ ID NO: 3164617 - DNA, 25 bp, Homo sapien
accagcatacgcgtgtgtatacaca

SEQ ID NO: 3164618 - DNA, 25 bp, Homo sapien
catacctacaatacatatattcaca

SEQ ID NO: 3164619 - DNA, 25 bp, Homo sapien
gctatgtaacaaataactgcagaaa

SEQ ID NO: 3164620 - DNA, 25 bp, Homo sapien
gaaattactactattgggccaggtg

SEQ ID NO: 3164621 - DNA, 25 bp, Homo sapien
tgctatgtaacaaataactgcagaa

SEQ ID NO: 3164622 - DNA, 25 bp, Homo sapien
taaagaaattactactattgggcca

SEQ ID NO: 3164623 - DNA, 25 bp, Homo sapien
tgcccttgatgctatcttgagttac

SEQ ID NO: 3164624 - DNA, 25 bp, Homo sapien
attttccatgcccttgatgctatct

SEQ ID NO: 3164625 - DNA, 25 bp, Homo sapien
ccttgatgctatcttgagttacttg

SEQ ID NO: 3164626 - DNA, 25 bp, Homo sapien
tccatgcccttgatgctatcttgag

SEQ ID NO: 3164627 - DNA, 25 bp, Homo sapien
tcagggaccccagaccattaaggaa

SEQ ID NO: 3164628 - DNA, 25 bp, Homo sapien
tattgtttaaagattgaattaagtc

SEQ ID NO: 3164629 - DNA, 25 bp, Homo sapien
attgtttaaagattgaattaagtca

SEQ ID NO: 3164630 - DNA, 25 bp, Homo sapien
ttaaagattgaattaagtcataatt

SEQ ID NO: 3164631 - DNA, 25 bp, Homo sapien
tgatattgtttaaagattgaattaa

SEQ ID NO: 3164632 - DNA, 25 bp, Homo sapien
tgtccccagtaatcacaacagtagc

SEQ ID NO: 3164633 - DNA, 25 bp, Homo sapien
aaaggtttctgtcatataagagagc

SEQ ID NO: 3164634 - DNA, 25 bp, Homo sapien
gaatttaaggttacagtggcaatga

SEQ ID NO: 3164635 - DNA, 25 bp, Homo sapien
cattgaggagttattgaccatcctt

SEQ ID NO: 3164636 - DNA, 25 bp, Homo sapien
gaatgctgttttagaccctcctata

SEQ ID NO: 3164637 - DNA, 25 bp, Homo sapien
tcatgctgttaggtaagtgtgacat

SEQ ID NO: 3164638 - DNA, 25 bp, Homo sapien
tggaataaatgggaatgtcactctt

SEQ ID NO: 3164639 - DNA, 25 bp, Homo sapien
tgtagattacctcttacagtaagtg

SEQ ID NO: 3164640 - DNA, 25 bp, Homo sapien
gttgtctctttctttctctgtgcca

SEQ ID NO: 3164641 - DNA, 25 bp, Homo sapien
ttgtctctttctttctctgtgccat

SEQ ID NO: 3164642 - DNA, 25 bp, Homo sapien
tgttgtctctttctttctctgtgcc

SEQ ID NO: 3164643 - DNA, 25 bp, Homo sapien
gttagtgttagaaatgcctttgacc

SEQ ID NO: 3164644 - DNA, 25 bp, Homo sapien
agtgttagaaatgcctttgacccca

SEQ ID NO: 3164645 - DNA, 25 bp, Homo sapien
acagttagtgttagaaatgcctttg

SEQ ID NO: 3164646 - DNA, 25 bp, Homo sapien
tagtgttagaaatgcctttgacccc

SEQ ID NO: 3164647 - DNA, 25 bp, Homo sapien
gagtatctggagttgcagcgtgagc

SEQ ID NO: 3164648 - DNA, 25 bp, Homo sapien
ctgagtatctggagttgcagcgtga

SEQ ID NO: 3164649 - DNA, 25 bp, Homo sapien
gtatctggagttgcagcgtgagcca

SEQ ID NO: 3164650 - DNA, 25 bp, Homo sapien
tatctggagttgcagcgtgagccac

SEQ ID NO: 3164651 - DNA, 25 bp, Homo sapien
tattggcacattcggcttgtataag

SEQ ID NO: 3164652 - DNA, 25 bp, Homo sapien
cggccattgaagacaagttggtcac

SEQ ID NO: 3164653 - DNA, 25 bp, Homo sapien
tataaggggagacgcttttttgcag

SEQ ID NO: 3164654 - DNA, 25 bp, Homo sapien
cttttttgcagttggacggccattg

SEQ ID NO: 3164655 - DNA, 25 bp, Homo sapien
tctgagccacactgcgcactgcaat

SEQ ID NO: 3164656 - DNA, 25 bp, Homo sapien
aggtctgagccacactgcgcactgc

SEQ ID NO: 3164657 - DNA, 25 bp, Homo sapien
ctgagccacactgcgcactgcaatc

SEQ ID NO: 3164658 - DNA, 25 bp, Homo sapien
gtctgagccacactgcgcactgcaa

SEQ ID NO: 3164659 - DNA, 25 bp, Homo sapien
gcagtaacaacagcgaggaagaaga

SEQ ID NO: 3164660 - DNA, 25 bp, Homo sapien
cagtaacaacagcgaggaagaagag

SEQ ID NO: 3164661 - DNA, 25 bp, Homo sapien
agcagtaacaacagcgaggaagaag

SEQ ID NO: 3164662 - DNA, 25 bp, Homo sapien
ggaagaggaggtttctgaggcaagg

SEQ ID NO: 3164663 - DNA, 25 bp, Homo sapien
gatggtgcgagtctgcgacctgctc

SEQ ID NO: 3164664 - DNA, 25 bp, Homo sapien
tcggcctcgtctcctcgtgggatgg

SEQ ID NO: 3164665 - DNA, 25 bp, Homo sapien
agcagcagagctcgctcggcctcgt

SEQ ID NO: 3164666 - DNA, 25 bp, Homo sapien
caccacaaggccaagcgtaaccgga

SEQ ID NO: 3164667 - DNA, 25 bp, Homo sapien
cgttccccttcggaagctgccccag

SEQ ID NO: 3164668 - DNA, 25 bp, Homo sapien
tcgcgggcgctctggttgcaatcgc

SEQ ID NO: 3164669 - DNA, 25 bp, Homo sapien
tgtgcgggaaatagcgaggaaagag

SEQ ID NO: 3164670 - DNA, 25 bp, Homo sapien
tctcctctggttctcccgacacccg

SEQ ID NO: 3164671 - DNA, 25 bp, Homo sapien
ctgcacttccgcctgcggctgcgtt

SEQ ID NO: 3164672 - DNA, 25 bp, Homo sapien
ctcaggcgacggctgatggcgtcac

SEQ ID NO: 3164673 - DNA, 25 bp, Homo sapien
cacccgcgcgccacggctcaggcga

SEQ ID NO: 3164674 - DNA, 25 bp, Homo sapien
tcactttcgcctttcggccacccgc

SEQ ID NO: 3164675 - DNA, 25 bp, Homo sapien
aaagtgtctggaccgcgcttccgca

SEQ ID NO: 3164676 - DNA, 25 bp, Homo sapien
ggcctcccgtcagcaaagtgtctgg

SEQ ID NO: 3164677 - DNA, 25 bp, Homo sapien
cacctcccggatctggcggaccggc

SEQ ID NO: 3164678 - DNA, 25 bp, Homo sapien
gcttccgcacctcacactgcccggg

SEQ ID NO: 3164679 - DNA, 25 bp, Homo sapien
acacacgtgtaaactcaggtagagg

SEQ ID NO: 3164680 - DNA, 25 bp, Homo sapien
aaagctctatctctcgatttggcgg

SEQ ID NO: 3164681 - DNA, 25 bp, Homo sapien
gaggatgtctatgagccgagcttaa

SEQ ID NO: 3164682 - DNA, 25 bp, Homo sapien
tccaagctgaatcgaagagggccgg

SEQ ID NO: 3164683 - DNA, 25 bp, Homo sapien
ctgtaaagcccctggaaacaagaga

SEQ ID NO: 3164684 - DNA, 25 bp, Homo sapien
tccacaaattatgcgcacagtaggc

SEQ ID NO: 3164685 - DNA, 25 bp, Homo sapien
caattctgccttggtactctgtaga

SEQ ID NO: 3164686 - DNA, 25 bp, Homo sapien
aaatggcaactatgtcagctgagac

SEQ ID NO: 3164687 - DNA, 25 bp, Homo sapien
cattcgttgatactggagaaaaggc

SEQ ID NO: 3164688 - DNA, 25 bp, Homo sapien
tttggtagcacagcacgatagacac

SEQ ID NO: 3164689 - DNA, 25 bp, Homo sapien
tgcagagggctgacaagtcaatttc

SEQ ID NO: 3164690 - DNA, 25 bp, Homo sapien
tcatatatgaacagggagtctctca

SEQ ID NO: 3164691 - DNA, 25 bp, Homo sapien
ggtcaccatgctcaaaggcatcaag

SEQ ID NO: 3164692 - DNA, 25 bp, Homo sapien
ggttattgttttagcagtactccac

SEQ ID NO: 3164693 - DNA, 25 bp, Homo sapien
caatacatagttttgaaggtcacca

SEQ ID NO: 3164694 - DNA, 25 bp, Homo sapien
taattggctagaagttaatcacggc

SEQ ID NO: 3164695 - DNA, 25 bp, Homo sapien
gtccagtctttagtacagctcctta

SEQ ID NO: 3164696 - DNA, 25 bp, Homo sapien
ggcccatctccttgaaactgaagaa

SEQ ID NO: 3164697 - DNA, 25 bp, Homo sapien
tagtggtaactcagggacagataac

SEQ ID NO: 3164698 - DNA, 25 bp, Homo sapien
tgcttctggtaactacacccaaagt

SEQ ID NO: 3164699 - DNA, 25 bp, Homo sapien
gaataggagtgcatcacttctcaca

SEQ ID NO: 3164700 - DNA, 25 bp, Homo sapien
tactggaacaggctcaaagtctagg

SEQ ID NO: 3164701 - DNA, 25 bp, Homo sapien
catatacctaattgcaagagaggca

SEQ ID NO: 3164702 - DNA, 25 bp, Homo sapien
cagaacataccctgtcccaaaggag

SEQ ID NO: 3164703 - DNA, 25 bp, Homo sapien
cattcttaggcaggttcactcgaca

SEQ ID NO: 3164704 - DNA, 25 bp, Homo sapien
tcgacatgatgaccaaaggccagat

SEQ ID NO: 3164705 - DNA, 25 bp, Homo sapien
gacaggtctttattagggcacgctc

SEQ ID NO: 3164706 - DNA, 25 bp, Homo sapien
tatgagctgtagcacaagtgtccct

SEQ ID NO: 3164707 - DNA, 25 bp, Homo sapien
ttcaattttctctagtgtacccaga

SEQ ID NO: 3164708 - DNA, 25 bp, Homo sapien
ttgataatcagtattaagcagtttg

SEQ ID NO: 3164709 - DNA, 25 bp, Homo sapien
gacatgagacagatacagttaagac

SEQ ID NO: 3164710 - DNA, 25 bp, Homo sapien
gaagtaaaatatacctgtaacatga

SEQ ID NO: 3164711 - DNA, 25 bp, Homo sapien
taagaagtataactcccttcattca

SEQ ID NO: 3164712 - DNA, 25 bp, Homo sapien
agaagtataactcccttcattcaca

SEQ ID NO: 3164713 - DNA, 25 bp, Homo sapien
attgtagtagtggttctagccagtg

SEQ ID NO: 3164714 - DNA, 25 bp, Homo sapien
aaataagaagtataactcccttcat

SEQ ID NO: 3164715 - DNA, 25 bp, Homo sapien
ctgtcagatcaggagcagcaggcat

SEQ ID NO: 3164716 - DNA, 25 bp, Homo sapien
tccaccccacaatggtctgtggaaa

SEQ ID NO: 3164717 - DNA, 25 bp, Homo sapien
caggctgcagatcagtactggaggt

SEQ ID NO: 3164718 - DNA, 25 bp, Homo sapien
tgataatgtactatggcaggggtcc

SEQ ID NO: 3164719 - DNA, 25 bp, Homo sapien
aggatcactagaacccaggaggtga

SEQ ID NO: 3164720 - DNA, 25 bp, Homo sapien
ctaggtgtgatggcacacacttgta

SEQ ID NO: 3164721 - DNA, 25 bp, Homo sapien
tagctaggtgtgatggcacacactt

SEQ ID NO: 3164722 - DNA, 25 bp, Homo sapien
ttagctaggtgtgatggcacacact

SEQ ID NO: 3164723 - DNA, 25 bp, Homo sapien
tcatagtgaacagatcagggcaggc

SEQ ID NO: 3164724 - DNA, 25 bp, Homo sapien
gagaacctcctaccaaagagaagtg

SEQ ID NO: 3164725 - DNA, 25 bp, Homo sapien
cggttaatttaaggcacagagctgg

SEQ ID NO: 3164726 - DNA, 25 bp, Homo sapien
tatggagtgagtgcagatctggaac

SEQ ID NO: 3164727 - DNA, 25 bp, Homo sapien
cagaattctcttgggccatagggta

SEQ ID NO: 3164728 - DNA, 25 bp, Homo sapien
gtaactactttactagatgttccca

SEQ ID NO: 3164729 - DNA, 25 bp, Homo sapien
agcccagaattctcttgggccatag

SEQ ID NO: 3164730 - DNA, 25 bp, Homo sapien
atagggtaactactttactagatgt

SEQ ID NO: 3164731 - DNA, 25 bp, Homo sapien
ctgacagtgtatctttaatccataa

SEQ ID NO: 3164732 - DNA, 25 bp, Homo sapien
gacagtgtatctttaatccataacc

SEQ ID NO: 3164733 - DNA, 25 bp, Homo sapien
tttaatccataacctcaccacaggg

SEQ ID NO: 3164734 - DNA, 25 bp, Homo sapien
cataacctcaccacagggctagtac

SEQ ID NO: 3164735 - DNA, 25 bp, Homo sapien
gaaactcttactgtgtggtgctgct

SEQ ID NO: 3164736 - DNA, 25 bp, Homo sapien
tactagatggttggtgccttaagcc

SEQ ID NO: 3164737 - DNA, 25 bp, Homo sapien
cacacttggtgtcaggcacactggg

SEQ ID NO: 3164738 - DNA, 25 bp, Homo sapien
caacacttcttgtgcattgaggcag

SEQ ID NO: 3164739 - DNA, 25 bp, Homo sapien
aggagatagagacatcatcactggt

SEQ ID NO: 3164740 - DNA, 25 bp, Homo sapien
atgagatgctatctcactccagtta

SEQ ID NO: 3164741 - DNA, 25 bp, Homo sapien
aagactgtggcaattccttaaggat

SEQ ID NO: 3164742 - DNA, 25 bp, Homo sapien
tcagccattgtgaaagactgtggca

SEQ ID NO: 3164743 - DNA, 25 bp, Homo sapien
ttccgtgatatcagttgttatgtct

SEQ ID NO: 3164744 - DNA, 25 bp, Homo sapien
cacacctagtcagatgaggacttat

SEQ ID NO: 3164745 - DNA, 25 bp, Homo sapien
tccaatttgttggcacctagttgct

SEQ ID NO: 3164746 - DNA, 25 bp, Homo sapien
tcatagctcaatcttagtaagttgg

SEQ ID NO: 3164747 - DNA, 25 bp, Homo sapien
gtggcaagcacgacaatggaatgat

SEQ ID NO: 3164748 - DNA, 25 bp, Homo sapien
tgagttttatcccttactgtgaggt

SEQ ID NO: 3164749 - DNA, 25 bp, Homo sapien
cagaatcaggcagatcaggttaaaa

SEQ ID NO: 3164750 - DNA, 25 bp, Homo sapien
aatggaatgatggtgcaggctccag

SEQ ID NO: 3164751 - DNA, 25 bp, Homo sapien
cccagaattgatagaactcatggat

SEQ ID NO: 3164752 - DNA, 25 bp, Homo sapien
tgttctctgtcccagaattgataga

SEQ ID NO: 3164753 - DNA, 25 bp, Homo sapien
gatagaactcatggatatcaatttt

SEQ ID NO: 3164754 - DNA, 25 bp, Homo sapien
tatcaattttagcaagcctcaaaga

SEQ ID NO: 3164755 - DNA, 25 bp, Homo sapien
cttggcaaattcctcgctgtccctc

SEQ ID NO: 3164756 - DNA, 25 bp, Homo sapien
tggcaaattcctcgctgtccctcca

SEQ ID NO: 3164757 - DNA, 25 bp, Homo sapien
ttggcaaattcctcgctgtccctcc

SEQ ID NO: 3164758 - DNA, 25 bp, Homo sapien
ggcaaattcctcgctgtccctccat

SEQ ID NO: 3164759 - DNA, 25 bp, Homo sapien
tatcatgatactctataaaaacctt

SEQ ID NO: 3164760 - DNA, 25 bp, Homo sapien
tatttgggtaatactcacatttgac

SEQ ID NO: 3164761 - DNA, 25 bp, Homo sapien
tgtactacaagtccaacactggtag

SEQ ID NO: 3164762 - DNA, 25 bp, Homo sapien
gaaatcataatgtgttaagcctctt

SEQ ID NO: 3164763 - DNA, 25 bp, Homo sapien
ctgctgacaaaaatagaatttggtg

SEQ ID NO: 3164764 - DNA, 25 bp, Homo sapien
ctgacaaaaatagaatttggtgctg

SEQ ID NO: 3164765 - DNA, 25 bp, Homo sapien
gacaaaaatagaatttggtgctgaa

SEQ ID NO: 3164766 - DNA, 25 bp, Homo sapien
caaaaatagaatttggtgctgaacc

SEQ ID NO: 3164767 - DNA, 25 bp, Homo sapien
atgccagccggtaggacaaagagga

SEQ ID NO: 3164768 - DNA, 25 bp, Homo sapien
cttcagcttccatgccagccggtag

SEQ ID NO: 3164769 - DNA, 25 bp, Homo sapien
agcttccatgccagccggtaggaca

SEQ ID NO: 3164770 - DNA, 25 bp, Homo sapien
ctgactcagattcagtggcttcttc

SEQ ID NO: 3164771 - DNA, 25 bp, Homo sapien
atctcagagaaattgttctaaatgt

SEQ ID NO: 3164772 - DNA, 25 bp, Homo sapien
ttatctcagagaaattgttctaaat

SEQ ID NO: 3164773 - DNA, 25 bp, Homo sapien
tctcagagaaattgttctaaatgtg

SEQ ID NO: 3164774 - DNA, 25 bp, Homo sapien
tatctcagagaaattgttctaaatg

SEQ ID NO: 3164775 - DNA, 25 bp, Homo sapien
tagatagcagctatcaataactggt

SEQ ID NO: 3164776 - DNA, 25 bp, Homo sapien
tgaggctcatataggatgcaaacag

SEQ ID NO: 3164777 - DNA, 25 bp, Homo sapien
ttcaagacagtccttgagactcagt

SEQ ID NO: 3164778 - DNA, 25 bp, Homo sapien
aaacttcctgtcatggagacaaggc

SEQ ID NO: 3164779 - DNA, 25 bp, Homo sapien
agctggaaggcaatgtcacaatctt

SEQ ID NO: 3164780 - DNA, 25 bp, Homo sapien
gttgcctaagctggaaggcaatgtc

SEQ ID NO: 3164781 - DNA, 25 bp, Homo sapien
cctaagctggaaggcaatgtcacaa

SEQ ID NO: 3164782 - DNA, 25 bp, Homo sapien
taagctggaaggcaatgtcacaatc

SEQ ID NO: 3164783 - DNA, 25 bp, Homo sapien
taatgaatcaaatccagcgcaggag

SEQ ID NO: 3164784 - DNA, 25 bp, Homo sapien
acatagaagggatcaagtgggtttt

SEQ ID NO: 3164785 - DNA, 25 bp, Homo sapien
aatattaatgaatcaaatccagcgc

SEQ ID NO: 3164786 - DNA, 25 bp, Homo sapien
tccagcgcaggagatgaacatagaa

SEQ ID NO: 3164787 - DNA, 25 bp, Homo sapien
gattaaatgtaatcagacagcaagt

SEQ ID NO: 3164788 - DNA, 25 bp, Homo sapien
tgacagctgaggttgtatgcaagtt

SEQ ID NO: 3164789 - DNA, 25 bp, Homo sapien
gagccatcacgtctttgaccctgaa

SEQ ID NO: 3164790 - DNA, 25 bp, Homo sapien
gacagcaagtgagtatcaatgatag

SEQ ID NO: 3164791 - DNA, 25 bp, Homo sapien
ctttggctttgtgccccccagtcag

SEQ ID NO: 3164792 - DNA, 25 bp, Homo sapien
cagtcagctgttcagtctgtccggc

SEQ ID NO: 3164793 - DNA, 25 bp, Homo sapien
cattggcgtttataccaaccaaatc

SEQ ID NO: 3164794 - DNA, 25 bp, Homo sapien
ataccaaccaaatcttttggagttg

SEQ ID NO: 3164795 - DNA, 25 bp, Homo sapien
tgtttcatctataactcaccttttt

SEQ ID NO: 3164796 - DNA, 25 bp, Homo sapien
ttcctgctcctacaataattcactt

SEQ ID NO: 3164797 - DNA, 25 bp, Homo sapien
taagtgagagtatatactattcagt

SEQ ID NO: 3164798 - DNA, 25 bp, Homo sapien
tatgattaatcccatgacccagctt

SEQ ID NO: 3164799 - DNA, 25 bp, Homo sapien
ctagtgcttgtcttcagatgtgtac

SEQ ID NO: 3164800 - DNA, 25 bp, Homo sapien
tgttccacctatttattctgtcggg

SEQ ID NO: 3164801 - DNA, 25 bp, Homo sapien
gatgtgtactgctcctgaagcgtgg

SEQ ID NO: 3164802 - DNA, 25 bp, Homo sapien
gaaagtggcaggtatacactagtgc

SEQ ID NO: 3164803 - DNA, 25 bp, Homo sapien
ttcagtatgatattgtttctgagtt

SEQ ID NO: 3164804 - DNA, 25 bp, Homo sapien
gagagagggcatcccatttcaaagg

SEQ ID NO: 3164805 - DNA, 25 bp, Homo sapien
gatattgtttctgagtttgtcataa

SEQ ID NO: 3164806 - DNA, 25 bp, Homo sapien
gctgctgaattttgttgaagacctt

SEQ ID NO: 3164807 - DNA, 25 bp, Homo sapien
ttaggtacacctcctagtgctttcc

SEQ ID NO: 3164808 - DNA, 25 bp, Homo sapien
cccccaagcccacaacatgccccgg

SEQ ID NO: 3164809 - DNA, 25 bp, Homo sapien
tcccccaagcccacaacatgccccg

SEQ ID NO: 3164810 - DNA, 25 bp, Homo sapien
catttacattaggtacacctcctag

SEQ ID NO: 3164811 - DNA, 25 bp, Homo sapien
ctttcagtaccttcaattggtttca

SEQ ID NO: 3164812 - DNA, 25 bp, Homo sapien
catgatgaaagagtccctctccttg

SEQ ID NO: 3164813 - DNA, 25 bp, Homo sapien
ttccatgatgaaagagtccctctcc

SEQ ID NO: 3164814 - DNA, 25 bp, Homo sapien
tgaaagagtccctctccttgacttt

SEQ ID NO: 3164815 - DNA, 25 bp, Homo sapien
atgaaagagtccctctccttgactt

SEQ ID NO: 3164816 - DNA, 25 bp, Homo sapien
tgacagaagagaaaagctaggacaa

SEQ ID NO: 3164817 - DNA, 25 bp, Homo sapien
agaagagaaaagctaggacaaacgg

SEQ ID NO: 3164818 - DNA, 25 bp, Homo sapien
tgtgccaaaggcgtgtggggttgac

SEQ ID NO: 3164819 - DNA, 25 bp, Homo sapien
cagaagagaaaagctaggacaaacg

SEQ ID NO: 3164820 - DNA, 25 bp, Homo sapien
tctttaaaccgatgagcaacctcac

SEQ ID NO: 3164821 - DNA, 25 bp, Homo sapien
caaatctttaaaccgatgagcaacc

SEQ ID NO: 3164822 - DNA, 25 bp, Homo sapien
cttctcccaaatctttaaaccgatg

SEQ ID NO: 3164823 - DNA, 25 bp, Homo sapien
aaccgatgagcaacctcactcttgt

SEQ ID NO: 3164824 - DNA, 25 bp, Homo sapien
tgactcatcagcaacacatgttttt

SEQ ID NO: 3164825 - DNA, 25 bp, Homo sapien
acatgatcttcaaatggacactgct

SEQ ID NO: 3164826 - DNA, 25 bp, Homo sapien
tgatcttcaaatggacactgctgaa

SEQ ID NO: 3164827 - DNA, 25 bp, Homo sapien
tcagctgactcatcagcaacacatg

SEQ ID NO: 3164828 - DNA, 25 bp, Homo sapien
cctttgaaatgcttgggattacttc

SEQ ID NO: 3164829 - DNA, 25 bp, Homo sapien
gaaatgcttgggattacttcaaaca

SEQ ID NO: 3164830 - DNA, 25 bp, Homo sapien
aaaattcctttgaaatgcttgggat

SEQ ID NO: 3164831 - DNA, 25 bp, Homo sapien
gacacttaataataattgagaaaac

SEQ ID NO: 3164832 - DNA, 25 bp, Homo sapien
gccattgaaaactgaggagtaacac

SEQ ID NO: 3164833 - DNA, 25 bp, Homo sapien
caggtttcagttgctggacagtacc

SEQ ID NO: 3164834 - DNA, 25 bp, Homo sapien
cagtgataaaaactggccttgccca

SEQ ID NO: 3164835 - DNA, 25 bp, Homo sapien
tctgctgtgagggagaggtacataa

SEQ ID NO: 3164836 - DNA, 25 bp, Homo sapien
tcttgttttgcacagcagtcagcca

SEQ ID NO: 3164837 - DNA, 25 bp, Homo sapien
ccatttcaccataggtttcacgaag

SEQ ID NO: 3164838 - DNA, 25 bp, Homo sapien
ggaggtttgggttgtcatctttgtg

SEQ ID NO: 3164839 - DNA, 25 bp, Homo sapien
ggtttcacgaagagttgcaactgtg

SEQ ID NO: 3164840 - DNA, 25 bp, Homo sapien
ttcattgtcatgaaaagcagtgcac

SEQ ID NO: 3164841 - DNA, 25 bp, Homo sapien
agtgcacatcacatcaacctctggt

SEQ ID NO: 3164842 - DNA, 25 bp, Homo sapien
acatcacatcaacctctggtctcac

SEQ ID NO: 3164843 - DNA, 25 bp, Homo sapien
gaaaagcagtgcacatcacatcaac

SEQ ID NO: 3164844 - DNA, 25 bp, Homo sapien
gctgtgtagaattttgtggtatcaa

SEQ ID NO: 3164845 - DNA, 25 bp, Homo sapien
taatttttatagagtgttggcctat

SEQ ID NO: 3164846 - DNA, 25 bp, Homo sapien
agtgttggcctatggagttactcca

SEQ ID NO: 3164847 - DNA, 25 bp, Homo sapien
acaaaacttccaagtcttaatgttg

SEQ ID NO: 3164848 - DNA, 25 bp, Homo sapien
agtaaggatgtcttctggcaatttc

SEQ ID NO: 3164849 - DNA, 25 bp, Homo sapien
gtaaggatgtcttctggcaatttca

SEQ ID NO: 3164850 - DNA, 25 bp, Homo sapien
tcagcagcttggcaacattctgtaa

SEQ ID NO: 3164851 - DNA, 25 bp, Homo sapien
cttggcaacattctgtaaaagcagc

SEQ ID NO: 3164852 - DNA, 25 bp, Homo sapien
agctttatcagcagcttggcaacat

SEQ ID NO: 3164853 - DNA, 25 bp, Homo sapien
caacaggcaggcagctttatcagca

SEQ ID NO: 3164854 - DNA, 25 bp, Homo sapien
caaaatcaggttggataatgaactc

SEQ ID NO: 3164855 - DNA, 25 bp, Homo sapien
gagagtgtaggccttcaaagatgaa

SEQ ID NO: 3164856 - DNA, 25 bp, Homo sapien
gaccatgtcggaaagtttgtatcag

SEQ ID NO: 3164857 - DNA, 25 bp, Homo sapien
cactcaggttccctaaatctagcca

SEQ ID NO: 3164858 - DNA, 25 bp, Homo sapien
ctctgacagatcatcattggcaaat

SEQ ID NO: 3164859 - DNA, 25 bp, Homo sapien
aactgtggccccttgctgtgcaatt

SEQ ID NO: 3164860 - DNA, 25 bp, Homo sapien
caacatcagtaaactcctcagaaaa

SEQ ID NO: 3164861 - DNA, 25 bp, Homo sapien
tatggaatgaatgcatgaactcagg

SEQ ID NO: 3164862 - DNA, 25 bp, Homo sapien
gtatttcactatagtgatcaccacc

SEQ ID NO: 3164863 - DNA, 25 bp, Homo sapien
ggagactggcacacttgagtctctg

SEQ ID NO: 3164864 - DNA, 25 bp, Homo sapien
tttggcagacgaagccttcccttca

SEQ ID NO: 3164865 - DNA, 25 bp, Homo sapien
tttggagactggcacacttgagtct

SEQ ID NO: 3164866 - DNA, 25 bp, Homo sapien
tcccttcatcccgaagttcatcgag

SEQ ID NO: 3164867 - DNA, 25 bp, Homo sapien
ctttggtaagatctgtcactaactt

SEQ ID NO: 3164868 - DNA, 25 bp, Homo sapien
ggcagcattccgtgtggactttggt

SEQ ID NO: 3164869 - DNA, 25 bp, Homo sapien
tgtggactttggtaagatctgtcac

SEQ ID NO: 3164870 - DNA, 25 bp, Homo sapien
tccgtgtggactttggtaagatctg

SEQ ID NO: 3164871 - DNA, 25 bp, Homo sapien
tagactaatcagtagcaggtgctca

SEQ ID NO: 3164872 - DNA, 25 bp, Homo sapien
taccaaaaagcatatcgacgactct

SEQ ID NO: 3164873 - DNA, 25 bp, Homo sapien
agaaaggtaccaccaccataggcag

SEQ ID NO: 3164874 - DNA, 25 bp, Homo sapien
gaagataggacagacgaaagcacag

SEQ ID NO: 3164875 - DNA, 25 bp, Homo sapien
ttcggcaatgcagtgggatttttcc

SEQ ID NO: 3164876 - DNA, 25 bp, Homo sapien
tgcctcagcatagtttttgcaaaca

SEQ ID NO: 3164877 - DNA, 25 bp, Homo sapien
ggcaagtcagcaggcatctcatcat

SEQ ID NO: 3164878 - DNA, 25 bp, Homo sapien
cacagatatacttggcaaggtccgc

SEQ ID NO: 3164879 - DNA, 25 bp, Homo sapien
gccttagtctccttctcggtagaat

SEQ ID NO: 3164880 - DNA, 25 bp, Homo sapien
tgagttgcctaccatattgccatta

SEQ ID NO: 3164881 - DNA, 25 bp, Homo sapien
taatttgactaaaccccatgcagta

SEQ ID NO: 3164882 - DNA, 25 bp, Homo sapien
aatagtatctgtctcggaaggtgga

SEQ ID NO: 3164883 - DNA, 25 bp, Homo sapien
cagcagcagcacgacagagtaatca

SEQ ID NO: 3164884 - DNA, 25 bp, Homo sapien
ggatgccttcttgcatattcataca

SEQ ID NO: 3164885 - DNA, 25 bp, Homo sapien
cacgacagagtaatcaggatgcctt

SEQ ID NO: 3164886 - DNA, 25 bp, Homo sapien
agagtaatcaggatgccttcttgca

SEQ ID NO: 3164887 - DNA, 25 bp, Homo sapien
catgaggatctgcagcggcacagca

SEQ ID NO: 3164888 - DNA, 25 bp, Homo sapien
atgaggatctgcagcggcacagcac

SEQ ID NO: 3164889 - DNA, 25 bp, Homo sapien
cagcacttctctagagtggtttcat

SEQ ID NO: 3164890 - DNA, 25 bp, Homo sapien
tatgcctcaggatcagatgcaggtt

SEQ ID NO: 3164891 - DNA, 25 bp, Homo sapien
tagagctgctctgtaaaccaggtaa

SEQ ID NO: 3164892 - DNA, 25 bp, Homo sapien
tagatgaatatcaatgccgctctgt

SEQ ID NO: 3164893 - DNA, 25 bp, Homo sapien
cattacatatgctagtgggaaccct

SEQ ID NO: 3164894 - DNA, 25 bp, Homo sapien
gaatttgtactctccaagctgctca

SEQ ID NO: 3164895 - DNA, 25 bp, Homo sapien
aaaagctcacaattttgtttgatta

SEQ ID NO: 3164896 - DNA, 25 bp, Homo sapien
tctgaggctcttccacaagaggttt

SEQ ID NO: 3164897 - DNA, 25 bp, Homo sapien
tcttccacaagaggtttaaattcat

SEQ ID NO: 3164898 - DNA, 25 bp, Homo sapien
gagaacaatttttagactacattca

SEQ ID NO: 3164899 - DNA, 25 bp, Homo sapien
tacatacttccaatcttaagagaac

SEQ ID NO: 3164900 - DNA, 25 bp, Homo sapien
taaaagttctatgctaggtggctca

SEQ ID NO: 3164901 - DNA, 25 bp, Homo sapien
tagactacattcaaatatagacctc

SEQ ID NO: 3164902 - DNA, 25 bp, Homo sapien
tgagcgacatctattcaaggcctac

SEQ ID NO: 3164903 - DNA, 25 bp, Homo sapien
ccttcaagggacatgctcagttctg

SEQ ID NO: 3164904 - DNA, 25 bp, Homo sapien
ggtgcatctcccaaacaacctgaat

SEQ ID NO: 3164905 - DNA, 25 bp, Homo sapien
ggtttaaccatcaaagactaggtgc

SEQ ID NO: 3164906 - DNA, 25 bp, Homo sapien
taaaacctggagagagcttcatatg

SEQ ID NO: 3164907 - DNA, 25 bp, Homo sapien
aacacttggccggaatcaactaaga

SEQ ID NO: 3164908 - DNA, 25 bp, Homo sapien
tagtggagggtagaaaacattctcc

SEQ ID NO: 3164909 - DNA, 25 bp, Homo sapien
cctgtaccacttgcataatcttggg

SEQ ID NO: 3164910 - DNA, 25 bp, Homo sapien
tgctgcccacttttcctaggtttct

SEQ ID NO: 3164911 - DNA, 25 bp, Homo sapien
gagacctctacaagagttggagttg

SEQ ID NO: 3164912 - DNA, 25 bp, Homo sapien
tagtcttctgcacagggcattcttt

SEQ ID NO: 3164913 - DNA, 25 bp, Homo sapien
gatgtttacaacatttgctgcccac

SEQ ID NO: 3164914 - DNA, 25 bp, Homo sapien
caggagagcagaaattcaaaagagg

SEQ ID NO: 3164915 - DNA, 25 bp, Homo sapien
gcctgttcaccaaggattctgtgca

SEQ ID NO: 3164916 - DNA, 25 bp, Homo sapien
tatgtttcatcgacttccagagctg

SEQ ID NO: 3164917 - DNA, 25 bp, Homo sapien
gagctgaaaagcatggtcgcctgtt

SEQ ID NO: 3164918 - DNA, 25 bp, Homo sapien
tactggcgttttctcatgcaacaca

SEQ ID NO: 3164919 - DNA, 25 bp, Homo sapien
catgcagtaatgaaatactcctcac

SEQ ID NO: 3164920 - DNA, 25 bp, Homo sapien
aaaagttgctagcttgaattgacag

SEQ ID NO: 3164921 - DNA, 25 bp, Homo sapien
tttattctgggtactcttatcagca

SEQ ID NO: 3164922 - DNA, 25 bp, Homo sapien
tatcagcataataagggcaacactc

SEQ ID NO: 3164923 - DNA, 25 bp, Homo sapien
tatccaaactcatgggagctgctgg

SEQ ID NO: 3164924 - DNA, 25 bp, Homo sapien
caatagggagttgagcttcagggct

SEQ ID NO: 3164925 - DNA, 25 bp, Homo sapien
gattacagcccacaagagatgacag

SEQ ID NO: 3164926 - DNA, 25 bp, Homo sapien
gggctcaggcataccgctataagtc

SEQ ID NO: 3164927 - DNA, 25 bp, Homo sapien
gccttgcagcacttctctacaaaag

SEQ ID NO: 3164928 - DNA, 25 bp, Homo sapien
tctacaaaagctgcgaaatcatcca

SEQ ID NO: 3164929 - DNA, 25 bp, Homo sapien
gtgtttcacgagctcaacaagtgca

SEQ ID NO: 3164930 - DNA, 25 bp, Homo sapien
aaagcaggtctccttatcgtcagcc

SEQ ID NO: 3164931 - DNA, 25 bp, Homo sapien
cacaatagagcaggagataaaaaca

SEQ ID NO: 3164932 - DNA, 25 bp, Homo sapien
aagttactgtcaggccataaagggc

SEQ ID NO: 3164933 - DNA, 25 bp, Homo sapien
tggacggaagctcacggacatagtt

SEQ ID NO: 3164934 - DNA, 25 bp, Homo sapien
tgtttgtaaaataagatccctgtcc

SEQ ID NO: 3164935 - DNA, 25 bp, Homo sapien
cttgacttgcagcaacaagtttttt

SEQ ID NO: 3164936 - DNA, 25 bp, Homo sapien
tgacttgcagcaacaagttttttac

SEQ ID NO: 3164937 - DNA, 25 bp, Homo sapien
gacttgcagcaacaagttttttacc

SEQ ID NO: 3164938 - DNA, 25 bp, Homo sapien
ttgacttgcagcaacaagtttttta

SEQ ID NO: 3164939 - DNA, 25 bp, Homo sapien
cctgtcctagacttacggctgctga

SEQ ID NO: 3164940 - DNA, 25 bp, Homo sapien
aagttcacagaaggtagatccatca

SEQ ID NO: 3164941 - DNA, 25 bp, Homo sapien
ggttcagcctaattcccagagtatt

SEQ ID NO: 3164942 - DNA, 25 bp, Homo sapien
tacttggatggctctgtgtaccgca

SEQ ID NO: 3164943 - DNA, 25 bp, Homo sapien
cattttctttctcttattctcatgg

SEQ ID NO: 3164944 - DNA, 25 bp, Homo sapien
ttttctttctcttattctcatggta

SEQ ID NO: 3164945 - DNA, 25 bp, Homo sapien
tcattttctttctcttattctcatg

SEQ ID NO: 3164946 - DNA, 25 bp, Homo sapien
ttctttctcttattctcatggtagg

SEQ ID NO: 3164947 - DNA, 25 bp, Homo sapien
gacagggtgttggctttacaccaac

SEQ ID NO: 3164948 - DNA, 25 bp, Homo sapien
cagggtgttggctttacaccaacga

SEQ ID NO: 3164949 - DNA, 25 bp, Homo sapien
aaacagatgaataagcttttgatct

SEQ ID NO: 3164950 - DNA, 25 bp, Homo sapien
gaaaaacagatgaataagcttttga

SEQ ID NO: 3164951 - DNA, 25 bp, Homo sapien
cagaattttcaggatagcaacacat

SEQ ID NO: 3164952 - DNA, 25 bp, Homo sapien
taattagcccacaagaaactagaaa

SEQ ID NO: 3164953 - DNA, 25 bp, Homo sapien
tggaacttccacagaacctacagaa

SEQ ID NO: 3164954 - DNA, 25 bp, Homo sapien
aactagaaatcctctaccgaagtgg

SEQ ID NO: 3164955 - DNA, 25 bp, Homo sapien
cccaagtgttatgagacagacatcc

SEQ ID NO: 3164956 - DNA, 25 bp, Homo sapien
taaaacaagccccatagaacagata

SEQ ID NO: 3164957 - DNA, 25 bp, Homo sapien
tccagcccatagtctgtcccttaat

SEQ ID NO: 3164958 - DNA, 25 bp, Homo sapien
cagtgaaccctgttgcaagttgcca

SEQ ID NO: 3164959 - DNA, 25 bp, Homo sapien
accatccttgtctatccgtttggat

SEQ ID NO: 3164960 - DNA, 25 bp, Homo sapien
gcaccatccttgtctatccgtttgg

SEQ ID NO: 3164961 - DNA, 25 bp, Homo sapien
atccgtttggattccaggatagtat

SEQ ID NO: 3164962 - DNA, 25 bp, Homo sapien
acaaagtgcagttcttctactcttc

SEQ ID NO: 3164963 - DNA, 25 bp, Homo sapien
tggcagtggtggaagcacaatatgg

SEQ ID NO: 3164964 - DNA, 25 bp, Homo sapien
agtggtggaagcacaatatggaaaa

SEQ ID NO: 3164965 - DNA, 25 bp, Homo sapien
ggaaaatcatgctgaaattctttta

SEQ ID NO: 3164966 - DNA, 25 bp, Homo sapien
tggaaaatcatgctgaaattctttt

SEQ ID NO: 3164967 - DNA, 25 bp, Homo sapien
tctatgcagtgttctggattcagta

SEQ ID NO: 3164968 - DNA, 25 bp, Homo sapien
ttctatgcagtgttctggattcagt

SEQ ID NO: 3164969 - DNA, 25 bp, Homo sapien
aaaaaattgattccacccacttcat

SEQ ID NO: 3164970 - DNA, 25 bp, Homo sapien
aggtcagctaaacttatctctgcag

SEQ ID NO: 3164971 - DNA, 25 bp, Homo sapien
tatctctgcagtacattggtaagaa

SEQ ID NO: 3164972 - DNA, 25 bp, Homo sapien
tacattggtaagaatccaatatgga

SEQ ID NO: 3164973 - DNA, 25 bp, Homo sapien
tcagctaaacttatctctgcagtac

SEQ ID NO: 3164974 - DNA, 25 bp, Homo sapien
atctccagtgggtttctcaattgca

SEQ ID NO: 3164975 - DNA, 25 bp, Homo sapien
aattgcagtcaatgcatctttcacc

SEQ ID NO: 3164976 - DNA, 25 bp, Homo sapien
tgcttacttccttgtaagtggcttc

SEQ ID NO: 3164977 - DNA, 25 bp, Homo sapien
cttccttgtaagtggcttcttgaac

SEQ ID NO: 3164978 - DNA, 25 bp, Homo sapien
gcagtctgaatgtccgtacttctcc

SEQ ID NO: 3164979 - DNA, 25 bp, Homo sapien
acttggaaaagtgggatcgatgctg

SEQ ID NO: 3164980 - DNA, 25 bp, Homo sapien
gcagcagtctgaatgtccgtacttc

SEQ ID NO: 3164981 - DNA, 25 bp, Homo sapien
atcgatgctggagtgggctttttgt

SEQ ID NO: 3164982 - DNA, 25 bp, Homo sapien
tgcagcaagatggaattattttgtc

SEQ ID NO: 3164983 - DNA, 25 bp, Homo sapien
aattgtaggtgcatacaggaaggga

SEQ ID NO: 3164984 - DNA, 25 bp, Homo sapien
ctttgtttggaagcattcaactgca

SEQ ID NO: 3164985 - DNA, 25 bp, Homo sapien
tattttgtcatagcgagcagcccaa

SEQ ID NO: 3164986 - DNA, 25 bp, Homo sapien
catgcatgttgatttaacaagctgc

SEQ ID NO: 3164987 - DNA, 25 bp, Homo sapien
tgcatgttgatttaacaagctgctt

SEQ ID NO: 3164988 - DNA, 25 bp, Homo sapien
ttcattactgcacatgcatgttgat

SEQ ID NO: 3164989 - DNA, 25 bp, Homo sapien
tttcattactgcacatgcatgttga

SEQ ID NO: 3164990 - DNA, 25 bp, Homo sapien
tctcctctgcaacagtgctcatgta

SEQ ID NO: 3164991 - DNA, 25 bp, Homo sapien
caggactagtttctggatttcagta

SEQ ID NO: 3164992 - DNA, 25 bp, Homo sapien
aactttggtaaacttctgactcagt

SEQ ID NO: 3164993 - DNA, 25 bp, Homo sapien
gtgctcatgtacatgggccacatcc

SEQ ID NO: 3164994 - DNA, 25 bp, Homo sapien
caaggcagtccctaactccaaggag

SEQ ID NO: 3164995 - DNA, 25 bp, Homo sapien
tttaaaacaagtgtctgtcatagtg

SEQ ID NO: 3164996 - DNA, 25 bp, Homo sapien
catagtggctagcagatagaaagta

SEQ ID NO: 3164997 - DNA, 25 bp, Homo sapien
aaggcagtccctaactccaaggagg

SEQ ID NO: 3164998 - DNA, 25 bp, Homo sapien
ctttatcagaacatactgcagtgac

SEQ ID NO: 3164999 - DNA, 25 bp, Homo sapien
caactggtatcataacatggagagc

SEQ ID NO: 3165000 - DNA, 25 bp, Homo sapien
cctaaacaacacttgcaactggtat

SEQ ID NO: 3165001 - DNA, 25 bp, Homo sapien
actttctgctccacgagaaattccg

SEQ ID NO: 3165002 - DNA, 25 bp, Homo sapien
gaaattccgtaagaatgataatcat

SEQ ID NO: 3165003 - DNA, 25 bp, Homo sapien
aaaatctctatctcctaaaaacctg

SEQ ID NO: 3165004 - DNA, 25 bp, Homo sapien
agatagaccttcaggtttttcatca

SEQ ID NO: 3165005 - DNA, 25 bp, Homo sapien
tctgcatgaattatacattgaccac

SEQ ID NO: 3165006 - DNA, 25 bp, Homo sapien
acgttccagcgtggtcagtttgcag

SEQ ID NO: 3165007 - DNA, 25 bp, Homo sapien
taactcctggtatcctttagcaact

SEQ ID NO: 3165008 - DNA, 25 bp, Homo sapien
agcaagctgaggatgtcttcttgaa

SEQ ID NO: 3165009 - DNA, 25 bp, Homo sapien
tggcattcaagagggttttcagtct

SEQ ID NO: 3165010 - DNA, 25 bp, Homo sapien
ttagaattactgagacagcaagctg

SEQ ID NO: 3165011 - DNA, 25 bp, Homo sapien
gctttgccaatgcttggctctcctg

SEQ ID NO: 3165012 - DNA, 25 bp, Homo sapien
gaagaggccgcagcttcgctttgcc

SEQ ID NO: 3165013 - DNA, 25 bp, Homo sapien
cattttgtaagtaatattctcctag

SEQ ID NO: 3165014 - DNA, 25 bp, Homo sapien
tgcttggctctcctggatgtatttc

SEQ ID NO: 3165015 - DNA, 25 bp, Homo sapien
ttttaactaagtcctgctgagtcat

SEQ ID NO: 3165016 - DNA, 25 bp, Homo sapien
cattttttaactaagtcctgctgag

SEQ ID NO: 3165017 - DNA, 25 bp, Homo sapien
aagcattttttaactaagtcctgct

SEQ ID NO: 3165018 - DNA, 25 bp, Homo sapien
ttttttaactaagtcctgctgagtc

SEQ ID NO: 3165019 - DNA, 25 bp, Homo sapien
ggctttctttgtgtaagcaacgaga

SEQ ID NO: 3165020 - DNA, 25 bp, Homo sapien
gccatcagctccgacgaggtcagct

SEQ ID NO: 3165021 - DNA, 25 bp, Homo sapien
tccctcgccacaggccaatagtttg

SEQ ID NO: 3165022 - DNA, 25 bp, Homo sapien
tgtcctcactgagttggcaacaagt

SEQ ID NO: 3165023 - DNA, 25 bp, Homo sapien
gagcttggcacagatccttatggaa

SEQ ID NO: 3165024 - DNA, 25 bp, Homo sapien
tgtttgcagcgctacaccctgagct

SEQ ID NO: 3165025 - DNA, 25 bp, Homo sapien
gaacttgtcatcagagaatgcagga

SEQ ID NO: 3165026 - DNA, 25 bp, Homo sapien
gagggacatatgtttcatccaccac

SEQ ID NO: 3165027 - DNA, 25 bp, Homo sapien
tactttcagtagaaagattgaggct

SEQ ID NO: 3165028 - DNA, 25 bp, Homo sapien
catacttgaccatacttatgtgtag

SEQ ID NO: 3165029 - DNA, 25 bp, Homo sapien
tcagtagaaagattgaggctgaaag

SEQ ID NO: 3165030 - DNA, 25 bp, Homo sapien
caggttgtggataaaacactatttc

SEQ ID NO: 3165031 - DNA, 25 bp, Homo sapien
gaaatctgcaatgacagcctcaagt

SEQ ID NO: 3165032 - DNA, 25 bp, Homo sapien
ggcttttgcttcacaaggttaatga

SEQ ID NO: 3165033 - DNA, 25 bp, Homo sapien
caagttgttcctctgttatttgtgg

SEQ ID NO: 3165034 - DNA, 25 bp, Homo sapien
tgagaaatctgcaatgacagcctca

SEQ ID NO: 3165035 - DNA, 25 bp, Homo sapien
aactcccaaagcagcacgagttttt

SEQ ID NO: 3165036 - DNA, 25 bp, Homo sapien
tcccaaagcagcacgagtttttgaa

SEQ ID NO: 3165037 - DNA, 25 bp, Homo sapien
caaagcagcacgagtttttgaaatc

SEQ ID NO: 3165038 - DNA, 25 bp, Homo sapien
aaagcagcacgagtttttgaaatca

SEQ ID NO: 3165039 - DNA, 25 bp, Homo sapien
gagaattaatggcactcctcatgat

SEQ ID NO: 3165040 - DNA, 25 bp, Homo sapien
tattggatacgtaggaaagtcttct

SEQ ID NO: 3165041 - DNA, 25 bp, Homo sapien
gcatagttgagccactaatttaaca

SEQ ID NO: 3165042 - DNA, 25 bp, Homo sapien
ctaataggtgcagtaagtaactggt

SEQ ID NO: 3165043 - DNA, 25 bp, Homo sapien
gttcacaccgaatgaaagactcgtt

SEQ ID NO: 3165044 - DNA, 25 bp, Homo sapien
caccgaatgaaagactcgttttgtc

SEQ ID NO: 3165045 - DNA, 25 bp, Homo sapien
tgaaagactcgttttgtcttctctt

SEQ ID NO: 3165046 - DNA, 25 bp, Homo sapien
gagaaaagttcacaccgaatgaaag

SEQ ID NO: 3165047 - DNA, 25 bp, Homo sapien
aattatcgataacttttcataaata

SEQ ID NO: 3165048 - DNA, 25 bp, Homo sapien
cgataacttttcataaataagcaaa

SEQ ID NO: 3165049 - DNA, 25 bp, Homo sapien
tatcgataacttttcataaataagc

SEQ ID NO: 3165050 - DNA, 25 bp, Homo sapien
aacttttcataaataagcaaacttg

SEQ ID NO: 3165051 - DNA, 25 bp, Homo sapien
tcaagtttttatatcattctttcac

SEQ ID NO: 3165052 - DNA, 25 bp, Homo sapien
gaaagtaatgttgttgaggaaaatc

SEQ ID NO: 3165053 - DNA, 25 bp, Homo sapien
agtaatgttgttgaggaaaatcaag

SEQ ID NO: 3165054 - DNA, 25 bp, Homo sapien
taatgttgttgaggaaaatcaagtt

SEQ ID NO: 3165055 - DNA, 25 bp, Homo sapien
ctatatcccgaggttgtgtgggcag

SEQ ID NO: 3165056 - DNA, 25 bp, Homo sapien
tgggcagggttagggattcagtcaa

SEQ ID NO: 3165057 - DNA, 25 bp, Homo sapien
gcagggttagggattcagtcaaaaa

SEQ ID NO: 3165058 - DNA, 25 bp, Homo sapien
tgtgtgggcagggttagggattcag

SEQ ID NO: 3165059 - DNA, 25 bp, Homo sapien
tgatatgaagattaactaatggctg

SEQ ID NO: 3165060 - DNA, 25 bp, Homo sapien
ggctgattcaatgccataacagagc

SEQ ID NO: 3165061 - DNA, 25 bp, Homo sapien
atcatttatgactagagaagtgata

SEQ ID NO: 3165062 - DNA, 25 bp, Homo sapien
cataacagagcctgatgagagatgc

SEQ ID NO: 3165063 - DNA, 25 bp, Homo sapien
tattatcttctataaatttttgagt

SEQ ID NO: 3165064 - DNA, 25 bp, Homo sapien
tctataaatttttgagtactattga

SEQ ID NO: 3165065 - DNA, 25 bp, Homo sapien
aatttttgagtactattgaagttct

SEQ ID NO: 3165066 - DNA, 25 bp, Homo sapien
ataaatttttgagtactattgaagt

SEQ ID NO: 3165067 - DNA, 25 bp, Homo sapien
ctgcaacagttcacatggggtatac

SEQ ID NO: 3165068 - DNA, 25 bp, Homo sapien
tatacaaagatcagttgcagagttt

SEQ ID NO: 3165069 - DNA, 25 bp, Homo sapien
caaagatcagttgcagagtttccat

SEQ ID NO: 3165070 - DNA, 25 bp, Homo sapien
agttcacatggggtatacaaagatc

SEQ ID NO: 3165071 - DNA, 25 bp, Homo sapien
ttcttcaaaggttgcttcctgaaca

SEQ ID NO: 3165072 - DNA, 25 bp, Homo sapien
tcttcaaaggttgcttcctgaacat

SEQ ID NO: 3165073 - DNA, 25 bp, Homo sapien
cttcaaaggttgcttcctgaacata

SEQ ID NO: 3165074 - DNA, 25 bp, Homo sapien
tctgggagcgtcttgtcagccatac

SEQ ID NO: 3165075 - DNA, 25 bp, Homo sapien
cactctgggagcgtcttgtcagcca

SEQ ID NO: 3165076 - DNA, 25 bp, Homo sapien
tcttgtcagccatacatctgtcttt

SEQ ID NO: 3165077 - DNA, 25 bp, Homo sapien
gagcgtcttgtcagccatacatctg

SEQ ID NO: 3165078 - DNA, 25 bp, Homo sapien
ctcccaaggtgatgacatgctggta

SEQ ID NO: 3165079 - DNA, 25 bp, Homo sapien
gtcttgtcacaagacacttccacct

SEQ ID NO: 3165080 - DNA, 25 bp, Homo sapien
cctccagccaaagtgtcctaaatag

SEQ ID NO: 3165081 - DNA, 25 bp, Homo sapien
caggtgtgccaaatcaaagcatttt

SEQ ID NO: 3165082 - DNA, 25 bp, Homo sapien
tagtcatggtaaagtaaagcttctg

SEQ ID NO: 3165083 - DNA, 25 bp, Homo sapien
ctaattttcccaccattaccaacag

SEQ ID NO: 3165084 - DNA, 25 bp, Homo sapien
ttttcccaccattaccaacagagct

SEQ ID NO: 3165085 - DNA, 25 bp, Homo sapien
tgactaattttcccaccattaccaa

SEQ ID NO: 3165086 - DNA, 25 bp, Homo sapien
ggcatttctcttcgggatccagggt

SEQ ID NO: 3165087 - DNA, 25 bp, Homo sapien
ctctgttactttcataagcctggca

SEQ ID NO: 3165088 - DNA, 25 bp, Homo sapien
cagcccctccatagcacatattttt

SEQ ID NO: 3165089 - DNA, 25 bp, Homo sapien
ggaggcagaaatcccacatcagatt

SEQ ID NO: 3165090 - DNA, 25 bp, Homo sapien
ggttccttctggcaacttcatataa

SEQ ID NO: 3165091 - DNA, 25 bp, Homo sapien
cttgtttgaaggcagttgactttgt

SEQ ID NO: 3165092 - DNA, 25 bp, Homo sapien
tcacaacatgatttggccacctcct

SEQ ID NO: 3165093 - DNA, 25 bp, Homo sapien
aacagcaacagttagaagtgtaggg

SEQ ID NO: 3165094 - DNA, 25 bp, Homo sapien
caaatttcaaaagtgccccacagac

SEQ ID NO: 3165095 - DNA, 25 bp, Homo sapien
tcaaaagtgccccacagacatgttt

SEQ ID NO: 3165096 - DNA, 25 bp, Homo sapien
tccaaatttcaaaagtgccccacag

SEQ ID NO: 3165097 - DNA, 25 bp, Homo sapien
tttcaaaagtgccccacagacatgt

SEQ ID NO: 3165098 - DNA, 25 bp, Homo sapien
caagagaaataagctccttaaattc

SEQ ID NO: 3165099 - DNA, 25 bp, Homo sapien
cgtgtcacggatgcactgcacaaca

SEQ ID NO: 3165100 - DNA, 25 bp, Homo sapien
gcatccatcatagttggaagaaaca

SEQ ID NO: 3165101 - DNA, 25 bp, Homo sapien
aatttttgactgagtatcgcaatat

SEQ ID NO: 3165102 - DNA, 25 bp, Homo sapien
aagacatctcttgtacatcatagtg

SEQ ID NO: 3165103 - DNA, 25 bp, Homo sapien
aggaatacattcaagacatctcttg

SEQ ID NO: 3165104 - DNA, 25 bp, Homo sapien
gctaagatttggagtattctcacca

SEQ ID NO: 3165105 - DNA, 25 bp, Homo sapien
aattcataccactatattgagtact

SEQ ID NO: 3165106 - DNA, 25 bp, Homo sapien
tacaggtgcaacctatcatactcag

SEQ ID NO: 3165107 - DNA, 25 bp, Homo sapien
tcactgtactgtatcctcgaactcc

SEQ ID NO: 3165108 - DNA, 25 bp, Homo sapien
gccccgcatgcatgagctactttga

SEQ ID NO: 3165109 - DNA, 25 bp, Homo sapien
actatgccaacaatattcgtaccaa

SEQ ID NO: 3165110 - DNA, 25 bp, Homo sapien
cagcaactaccagatgacgattcat

SEQ ID NO: 3165111 - DNA, 25 bp, Homo sapien
gacaagtgagtgaactacagcaact

SEQ ID NO: 3165112 - DNA, 25 bp, Homo sapien
tataagaagctattccactcatggt

SEQ ID NO: 3165113 - DNA, 25 bp, Homo sapien
gcaaatactgctcaaatggacaact

SEQ ID NO: 3165114 - DNA, 25 bp, Homo sapien
tgagttaattatgcactggccgcgc

SEQ ID NO: 3165115 - DNA, 25 bp, Homo sapien
gtgtctgggtcagcatctcgttctt

SEQ ID NO: 3165116 - DNA, 25 bp, Homo sapien
gaacaaatatggttcataaccttgc

SEQ ID NO: 3165117 - DNA, 25 bp, Homo sapien
gagataaatcctttggtctatcatc

SEQ ID NO: 3165118 - DNA, 25 bp, Homo sapien
tcactgttactctatcatttctccc

SEQ ID NO: 3165119 - DNA, 25 bp, Homo sapien
cactctgacttggtgtgctcactgt

SEQ ID NO: 3165120 - DNA, 25 bp, Homo sapien
gtgctcactgttactctatcatttc

SEQ ID NO: 3165121 - DNA, 25 bp, Homo sapien
gctcactgttactctatcatttctc

SEQ ID NO: 3165122 - DNA, 25 bp, Homo sapien
ctgcaatgtgtaaaattttgtatat

SEQ ID NO: 3165123 - DNA, 25 bp, Homo sapien
tggtcacagagtaatttaagaggac

SEQ ID NO: 3165124 - DNA, 25 bp, Homo sapien
atactgactctgctttcaaaagcta

SEQ ID NO: 3165125 - DNA, 25 bp, Homo sapien
tattttgtaatccagtcagatctaa

SEQ ID NO: 3165126 - DNA, 25 bp, Homo sapien
gtatagacaggtctggatgtctcct

SEQ ID NO: 3165127 - DNA, 25 bp, Homo sapien
tctggtatagacaggtctggatgtc

SEQ ID NO: 3165128 - DNA, 25 bp, Homo sapien
caggtctggatgtctccttgagtat

SEQ ID NO: 3165129 - DNA, 25 bp, Homo sapien
aaaagctctggtatagacaggtctg

SEQ ID NO: 3165130 - DNA, 25 bp, Homo sapien
ctcagttgtctcattgaatttgtct

SEQ ID NO: 3165131 - DNA, 25 bp, Homo sapien
ctggaaatgtttacattcttgttgt

SEQ ID NO: 3165132 - DNA, 25 bp, Homo sapien
cagttgtctcattgaatttgtcttc

SEQ ID NO: 3165133 - DNA, 25 bp, Homo sapien
tcttgttgtaccatcttgaggcttt

SEQ ID NO: 3165134 - DNA, 25 bp, Homo sapien
gcttcgagggattatgtattcaatt

SEQ ID NO: 3165135 - DNA, 25 bp, Homo sapien
tatgtattcaattctagtggcaagt

SEQ ID NO: 3165136 - DNA, 25 bp, Homo sapien
aattctagtggcaagtgttagccca

SEQ ID NO: 3165137 - DNA, 25 bp, Homo sapien
gttagcccacttgtgcaaacaacat

SEQ ID NO: 3165138 - DNA, 25 bp, Homo sapien
tgtgacagttcaataggcattcttg

SEQ ID NO: 3165139 - DNA, 25 bp, Homo sapien
tcaataggcattcttgactttaaaa

SEQ ID NO: 3165140 - DNA, 25 bp, Homo sapien
tatgaatcggccataactgaaaaac

SEQ ID NO: 3165141 - DNA, 25 bp, Homo sapien
ttcttccaagagtttatgaatcggc

SEQ ID NO: 3165142 - DNA, 25 bp, Homo sapien
ctgaaagaacatttgtctgtttggt

SEQ ID NO: 3165143 - DNA, 25 bp, Homo sapien
tgaaagaacatttgtctgtttggtt

SEQ ID NO: 3165144 - DNA, 25 bp, Homo sapien
tacagcaagtagtgaaagctgtcac

SEQ ID NO: 3165145 - DNA, 25 bp, Homo sapien
gcaaactcttcacttagcgtacagc

SEQ ID NO: 3165146 - DNA, 25 bp, Homo sapien
caccagttcttcagtggagagttgg

SEQ ID NO: 3165147 - DNA, 25 bp, Homo sapien
aagctgtcaccattttctcgccaag

SEQ ID NO: 3165148 - DNA, 25 bp, Homo sapien
taaataaatcttgagagaaaggtgg

SEQ ID NO: 3165149 - DNA, 25 bp, Homo sapien
cacatgtctgcgtgaaaggtaaata

SEQ ID NO: 3165150 - DNA, 25 bp, Homo sapien
ggcacatatgttttatcagctttca

SEQ ID NO: 3165151 - DNA, 25 bp, Homo sapien
cctcattctgagattgacacatgtc

SEQ ID NO: 3165152 - DNA, 25 bp, Homo sapien
catgcttcagcttcactaagttgac

SEQ ID NO: 3165153 - DNA, 25 bp, Homo sapien
catttgcgaaatttgtaaacaaaga

SEQ ID NO: 3165154 - DNA, 25 bp, Homo sapien
ctctgctttgcagcacttatccact

SEQ ID NO: 3165155 - DNA, 25 bp, Homo sapien
cagcttcactaagttgacaagaaac

SEQ ID NO: 3165156 - DNA, 25 bp, Homo sapien
aatgaatcacgtgtgtgagtttgtc

SEQ ID NO: 3165157 - DNA, 25 bp, Homo sapien
ccagaatgaatcacgtgtgtgagtt

SEQ ID NO: 3165158 - DNA, 25 bp, Homo sapien
caaccagaatgaatcacgtgtgtga

SEQ ID NO: 3165159 - DNA, 25 bp, Homo sapien
ctcacaaccagaatgaatcacgtgt

SEQ ID NO: 3165160 - DNA, 25 bp, Homo sapien
tttctttacatatctccagcagctg

SEQ ID NO: 3165161 - DNA, 25 bp, Homo sapien
tctttacatatctccagcagctggc

SEQ ID NO: 3165162 - DNA, 25 bp, Homo sapien
ttctttacatatctccagcagctgg

SEQ ID NO: 3165163 - DNA, 25 bp, Homo sapien
agattattggaaagggtcactgagg

SEQ ID NO: 3165164 - DNA, 25 bp, Homo sapien
gaaagggtcactgaggtctgtctgc

SEQ ID NO: 3165165 - DNA, 25 bp, Homo sapien
aaaagattattggaaagggtcactg

SEQ ID NO: 3165166 - DNA, 25 bp, Homo sapien
aagggtcactgaggtctgtctgccc

SEQ ID NO: 3165167 - DNA, 25 bp, Homo sapien
ttttgttcacgtaaatgctgtagca

SEQ ID NO: 3165168 - DNA, 25 bp, Homo sapien
caggtcttacataagccacaaaggg

SEQ ID NO: 3165169 - DNA, 25 bp, Homo sapien
actcctatatctacgcaacattttg

SEQ ID NO: 3165170 - DNA, 25 bp, Homo sapien
tgaggtccaggtctctcttcactga

SEQ ID NO: 3165171 - DNA, 25 bp, Homo sapien
gatagaaagtcgagtatttgaaaaa

SEQ ID NO: 3165172 - DNA, 25 bp, Homo sapien
gaaatgcgattcatcaccacacaga

SEQ ID NO: 3165173 - DNA, 25 bp, Homo sapien
gcgattcatcaccacacagatagga

SEQ ID NO: 3165174 - DNA, 25 bp, Homo sapien
tgcgattcatcaccacacagatagg

SEQ ID NO: 3165175 - DNA, 25 bp, Homo sapien
tcaggaaatgcgattcatcaccaca

SEQ ID NO: 3165176 - DNA, 25 bp, Homo sapien
aatgtattatttcaggtgacagtta

SEQ ID NO: 3165177 - DNA, 25 bp, Homo sapien
attgcttgctgcaatgtattatttc

SEQ ID NO: 3165178 - DNA, 25 bp, Homo sapien
attatttcaggtgacagttacagaa

SEQ ID NO: 3165179 - DNA, 25 bp, Homo sapien
tgtattatttcaggtgacagttaca

SEQ ID NO: 3165180 - DNA, 25 bp, Homo sapien
gaagactatctttggcaggtctcca

SEQ ID NO: 3165181 - DNA, 25 bp, Homo sapien
tgaaggatgctagagagcccaccaa

SEQ ID NO: 3165182 - DNA, 25 bp, Homo sapien
agttttgggacacataggcttgtca

SEQ ID NO: 3165183 - DNA, 25 bp, Homo sapien
tatccttagtgctgttcccttgaaa

SEQ ID NO: 3165184 - DNA, 25 bp, Homo sapien
tataaacattaataccttgccaggc

SEQ ID NO: 3165185 - DNA, 25 bp, Homo sapien
aattaaggtttagcattggatataa

SEQ ID NO: 3165186 - DNA, 25 bp, Homo sapien
cggtgtttcacacatcttggatcac

SEQ ID NO: 3165187 - DNA, 25 bp, Homo sapien
tgccaggcttaattcggcaaagtcg

SEQ ID NO: 3165188 - DNA, 25 bp, Homo sapien
taaggatgcttaccagataccaaat

SEQ ID NO: 3165189 - DNA, 25 bp, Homo sapien
gaatgtagagccatcccagattccg

SEQ ID NO: 3165190 - DNA, 25 bp, Homo sapien
ttttcaccatgttaagacacctcag

SEQ ID NO: 3165191 - DNA, 25 bp, Homo sapien
gcaccttctatggaccagaatgtag

SEQ ID NO: 3165192 - DNA, 25 bp, Homo sapien
caactttctaactgtggtttgtact

SEQ ID NO: 3165193 - DNA, 25 bp, Homo sapien
tgaaggtaaccatgtgacttaaagg

SEQ ID NO: 3165194 - DNA, 25 bp, Homo sapien
gtgacttaaaggtcctgtgcttctc

SEQ ID NO: 3165195 - DNA, 25 bp, Homo sapien
tgtgcttctcattgaaatctctcaa

SEQ ID NO: 3165196 - DNA, 25 bp, Homo sapien
gatttttctatgtctactcagagtc

SEQ ID NO: 3165197 - DNA, 25 bp, Homo sapien
aagataggtaggatttagccccaag

SEQ ID NO: 3165198 - DNA, 25 bp, Homo sapien
gaataggtcagtatttatcaagaat

SEQ ID NO: 3165199 - DNA, 25 bp, Homo sapien
tgaggcaataataacgccaaagatt

SEQ ID NO: 3165200 - DNA, 25 bp, Homo sapien
ttagcaggactagcatagacacggt

SEQ ID NO: 3165201 - DNA, 25 bp, Homo sapien
tctggctcactcctaaaggagcttc

SEQ ID NO: 3165202 - DNA, 25 bp, Homo sapien
ggacaggataagcaagaggttaacc

SEQ ID NO: 3165203 - DNA, 25 bp, Homo sapien
cctttaatcacttacagggacagga

SEQ ID NO: 3165204 - DNA, 25 bp, Homo sapien
tttaatgactatatgacttgcccgg

SEQ ID NO: 3165205 - DNA, 25 bp, Homo sapien
caagttgacataggaatagcatttc

SEQ ID NO: 3165206 - DNA, 25 bp, Homo sapien
cttggcaacatgactaaacagctgt

SEQ ID NO: 3165207 - DNA, 25 bp, Homo sapien
catgccaggagagtaagtctataca

SEQ ID NO: 3165208 - DNA, 25 bp, Homo sapien
gaggtaaggtgtatatactgtctcc

SEQ ID NO: 3165209 - DNA, 25 bp, Homo sapien
gcaaaggtggctacaacaatatctc

SEQ ID NO: 3165210 - DNA, 25 bp, Homo sapien
tacagagagactttgacaatcctcc

SEQ ID NO: 3165211 - DNA, 25 bp, Homo sapien
tatactatgctcttcttacagagag

SEQ ID NO: 3165212 - DNA, 25 bp, Homo sapien
ccggaatctcaagcatttagaacat

SEQ ID NO: 3165213 - DNA, 25 bp, Homo sapien
tatattagtgaactccctcatcccc

SEQ ID NO: 3165214 - DNA, 25 bp, Homo sapien
caaagatcacttgttccggaatctc

SEQ ID NO: 3165215 - DNA, 25 bp, Homo sapien
aatcaaaagttcagagagccaccag

SEQ ID NO: 3165216 - DNA, 25 bp, Homo sapien
gataaaaattgtgtttctcttcgaa

SEQ ID NO: 3165217 - DNA, 25 bp, Homo sapien
aagataaaaattgtgtttctcttcg

SEQ ID NO: 3165218 - DNA, 25 bp, Homo sapien
caaagataaaaattgtgtttctctt

SEQ ID NO: 3165219 - DNA, 25 bp, Homo sapien
acaaagataaaaattgtgtttctct

SEQ ID NO: 3165220 - DNA, 25 bp, Homo sapien
tctcctccagcctttacaatgcaga

SEQ ID NO: 3165221 - DNA, 25 bp, Homo sapien
agaaaaattcagtaagtgcctgaat

SEQ ID NO: 3165222 - DNA, 25 bp, Homo sapien
aaattcagtaagtgcctgaatctga

SEQ ID NO: 3165223 - DNA, 25 bp, Homo sapien
tcagtaagtgcctgaatctgaacat

SEQ ID NO: 3165224 - DNA, 25 bp, Homo sapien
tgacaattgagcaacatccctgaaa

SEQ ID NO: 3165225 - DNA, 25 bp, Homo sapien
tctctggaaatagggagtctgggcc

SEQ ID NO: 3165226 - DNA, 25 bp, Homo sapien
gatgcttgggtttcccttgcttctg

SEQ ID NO: 3165227 - DNA, 25 bp, Homo sapien
cctgccctgtaaggagaactgagct

SEQ ID NO: 3165228 - DNA, 25 bp, Homo sapien
cacatataatggtttagaagaaaga

SEQ ID NO: 3165229 - DNA, 25 bp, Homo sapien
agaaagaagagggactggctccaga

SEQ ID NO: 3165230 - DNA, 25 bp, Homo sapien
tgggtgtgaataagctagtctctac

SEQ ID NO: 3165231 - DNA, 25 bp, Homo sapien
gaagttagcttgaaacagctgaaga

SEQ ID NO: 3165232 - DNA, 25 bp, Homo sapien
tttatccctggcaaactgagagaac

SEQ ID NO: 3165233 - DNA, 25 bp, Homo sapien
ttctctgcttgaccatactcaagtg

SEQ ID NO: 3165234 - DNA, 25 bp, Homo sapien
tagtgactcactctaacaaagaaag

SEQ ID NO: 3165235 - DNA, 25 bp, Homo sapien
tattgttcccgtgtttagcccaaca

SEQ ID NO: 3165236 - DNA, 25 bp, Homo sapien
ctgagttaatatgccttccccttgg

SEQ ID NO: 3165237 - DNA, 25 bp, Homo sapien
tgaccttgctggataggatagcctg

SEQ ID NO: 3165238 - DNA, 25 bp, Homo sapien
tgaagtctgagttcccatatggcaa

SEQ ID NO: 3165239 - DNA, 25 bp, Homo sapien
gcccttgtggtcattcgagtttgca

SEQ ID NO: 3165240 - DNA, 25 bp, Homo sapien
gggcttaagaggttctcccgtctca

SEQ ID NO: 3165241 - DNA, 25 bp, Homo sapien
cacagctatagcattccaaagggtt

SEQ ID NO: 3165242 - DNA, 25 bp, Homo sapien
aatcactggaactgccaactttgga

SEQ ID NO: 3165243 - DNA, 25 bp, Homo sapien
gcatttggaaacctggaaagctaga

SEQ ID NO: 3165244 - DNA, 25 bp, Homo sapien
agctgtttcttatggtagtggaact

SEQ ID NO: 3165245 - DNA, 25 bp, Homo sapien
tatggtagtggaacttggtcttctc

SEQ ID NO: 3165246 - DNA, 25 bp, Homo sapien
tacattctttttggcctgtttccat

SEQ ID NO: 3165247 - DNA, 25 bp, Homo sapien
ttctctacattctttttggcctgtt

SEQ ID NO: 3165248 - DNA, 25 bp, Homo sapien
tagtgcccaggagagctaccatgga

SEQ ID NO: 3165249 - DNA, 25 bp, Homo sapien
ttccccatggcgcaggagtagtgcc

SEQ ID NO: 3165250 - DNA, 25 bp, Homo sapien
gagtttcataagctcctctcagagg

SEQ ID NO: 3165251 - DNA, 25 bp, Homo sapien
tataagcagtgagtagcaacagcct

SEQ ID NO: 3165252 - DNA, 25 bp, Homo sapien
tattaatggtaaagaatgtgtcaca

SEQ ID NO: 3165253 - DNA, 25 bp, Homo sapien
agaagtgtttgttgtagtacgccgc

SEQ ID NO: 3165254 - DNA, 25 bp, Homo sapien
tgtacctaatattgtgtcttgtgcg

SEQ ID NO: 3165255 - DNA, 25 bp, Homo sapien
tacatagcaatgtatagctcataca

SEQ ID NO: 3165256 - DNA, 25 bp, Homo sapien
cattggctatgatgctcaccacagc

SEQ ID NO: 3165257 - DNA, 25 bp, Homo sapien
acagcccttcttatcataacagacc

SEQ ID NO: 3165258 - DNA, 25 bp, Homo sapien
ggctccccacattggctatgatgct

SEQ ID NO: 3165259 - DNA, 25 bp, Homo sapien
tatcataacagacctctttcctatc

SEQ ID NO: 3165260 - DNA, 25 bp, Homo sapien
ggcaggcaatgtgaaaaactcagct

SEQ ID NO: 3165261 - DNA, 25 bp, Homo sapien
aaaggtgctccatatttcccaagtg

SEQ ID NO: 3165262 - DNA, 25 bp, Homo sapien
cttactggagcatggcacacttttc

SEQ ID NO: 3165263 - DNA, 25 bp, Homo sapien
taggcatcctacaggactcagaggg

SEQ ID NO: 3165264 - DNA, 25 bp, Homo sapien
tgtaactactgccacactgcccaac

SEQ ID NO: 3165265 - DNA, 25 bp, Homo sapien
cttcccctgattgctgtgagtctat

SEQ ID NO: 3165266 - DNA, 25 bp, Homo sapien
cctgattgctgtgagtctatttcca

SEQ ID NO: 3165267 - DNA, 25 bp, Homo sapien
gcccaacttcccctgattgctgtga

SEQ ID NO: 3165268 - DNA, 25 bp, Homo sapien
tggcagtcaccaacaatcatctcat

SEQ ID NO: 3165269 - DNA, 25 bp, Homo sapien
caacaatcatctcatctttgagcac

SEQ ID NO: 3165270 - DNA, 25 bp, Homo sapien
caaggctagattctgcatggcagtc

SEQ ID NO: 3165271 - DNA, 25 bp, Homo sapien
tctcttcacttacgtctccttcatg

SEQ ID NO: 3165272 - DNA, 25 bp, Homo sapien
gacctaggcattttcgtgttggaag

SEQ ID NO: 3165273 - DNA, 25 bp, Homo sapien
tagaaccaggtgctatgccagttat

SEQ ID NO: 3165274 - DNA, 25 bp, Homo sapien
gaatgacatatatacccagcgcttg

SEQ ID NO: 3165275 - DNA, 25 bp, Homo sapien
aatgctagggcttgaccaggtgatg

SEQ ID NO: 3165276 - DNA, 25 bp, Homo sapien
gatgttggctactcattgccagtga

SEQ ID NO: 3165277 - DNA, 25 bp, Homo sapien
ggatgggcaccagcagaatctacta

SEQ ID NO: 3165278 - DNA, 25 bp, Homo sapien
cagctgatagtgaaaagccagattc

SEQ ID NO: 3165279 - DNA, 25 bp, Homo sapien
tggagtggacaacaaggattagaac

SEQ ID NO: 3165280 - DNA, 25 bp, Homo sapien
ttatggagtgctccggtggcttttt

SEQ ID NO: 3165281 - DNA, 25 bp, Homo sapien
tggagtgctccggtggctttttata

SEQ ID NO: 3165282 - DNA, 25 bp, Homo sapien
tatggagtgctccggtggcttttta

SEQ ID NO: 3165283 - DNA, 25 bp, Homo sapien
gagtgctccggtggctttttatatc

SEQ ID NO: 3165284 - DNA, 25 bp, Homo sapien
tctgctgtctctgaaagtttgtgcc

SEQ ID NO: 3165285 - DNA, 25 bp, Homo sapien
tcctggctcttgtcctagaagcttg

SEQ ID NO: 3165286 - DNA, 25 bp, Homo sapien
agaagcttgtgtgctctgctgtctc

SEQ ID NO: 3165287 - DNA, 25 bp, Homo sapien
gtttacacacagtgagatggttcct

SEQ ID NO: 3165288 - DNA, 25 bp, Homo sapien
cacacagagctgcagaaatcaggaa

SEQ ID NO: 3165289 - DNA, 25 bp, Homo sapien
tgccaagagagccacggccagcttg

SEQ ID NO: 3165290 - DNA, 25 bp, Homo sapien
aatcaggaaggctgccaagagagcc

SEQ ID NO: 3165291 - DNA, 25 bp, Homo sapien
gagagccacggccagcttggaagtc

SEQ ID NO: 3165292 - DNA, 25 bp, Homo sapien
aatttaacattaattgactgctaag

SEQ ID NO: 3165293 - DNA, 25 bp, Homo sapien
acgctgtaggtcagaaagatgtgct

SEQ ID NO: 3165294 - DNA, 25 bp, Homo sapien
aattgactgctaagattatattctg

SEQ ID NO: 3165295 - DNA, 25 bp, Homo sapien
taggaaaacgctgtaggtcagaaag

SEQ ID NO: 3165296 - DNA, 25 bp, Homo sapien
gtggttctcaataggacatactata

SEQ ID NO: 3165297 - DNA, 25 bp, Homo sapien
cataatataggtaaccgtggttctc

SEQ ID NO: 3165298 - DNA, 25 bp, Homo sapien
tgcatgctacatggtataaattata

SEQ ID NO: 3165299 - DNA, 25 bp, Homo sapien
gaattgtctgagttaccttgctcaa

SEQ ID NO: 3165300 - DNA, 25 bp, Homo sapien
tatgcactgacatctaagttcttta

SEQ ID NO: 3165301 - DNA, 25 bp, Homo sapien
tctgtgttggcgcagtgtggtccac

SEQ ID NO: 3165302 - DNA, 25 bp, Homo sapien
ttagcactccttggcaaaactgcac

SEQ ID NO: 3165303 - DNA, 25 bp, Homo sapien
aggtttggagtatgtctttatgcac

SEQ ID NO: 3165304 - DNA, 25 bp, Homo sapien
ccttggggtccagacagagctctct

SEQ ID NO: 3165305 - DNA, 25 bp, Homo sapien
ccctctgcacccagttttccttggg

SEQ ID NO: 3165306 - DNA, 25 bp, Homo sapien
tcaaaaacttctccacaaccctctg

SEQ ID NO: 3165307 - DNA, 25 bp, Homo sapien
tttccttggggtccagacagagctc

SEQ ID NO: 3165308 - DNA, 25 bp, Homo sapien
ggtctttctggtcatgagtacaaca

SEQ ID NO: 3165309 - DNA, 25 bp, Homo sapien
tcatctaaaataggacactactggg

SEQ ID NO: 3165310 - DNA, 25 bp, Homo sapien
caaaaaggcagatacctaatgacga

SEQ ID NO: 3165311 - DNA, 25 bp, Homo sapien
ttcctgggcaaactatgtatggtct

SEQ ID NO: 3165312 - DNA, 25 bp, Homo sapien
taccaacacagctggcaatgacaag

SEQ ID NO: 3165313 - DNA, 25 bp, Homo sapien
taaagttcggatattctcttggccc

SEQ ID NO: 3165314 - DNA, 25 bp, Homo sapien
caaggacttgtggatcctggctagc

SEQ ID NO: 3165315 - DNA, 25 bp, Homo sapien
tattctcccgtgcaatatctaggaa

SEQ ID NO: 3165316 - DNA, 25 bp, Homo sapien
gcattccacagaatttggcttgcca

SEQ ID NO: 3165317 - DNA, 25 bp, Homo sapien
agaatttggcttgccaagttctgtg

SEQ ID NO: 3165318 - DNA, 25 bp, Homo sapien
caaactggcattccacagaatttgg

SEQ ID NO: 3165319 - DNA, 25 bp, Homo sapien
taggaggatggtggtccaaactggc

SEQ ID NO: 3165320 - DNA, 25 bp, Homo sapien
ccactgttaccgcaagaacttcgtc

SEQ ID NO: 3165321 - DNA, 25 bp, Homo sapien
cagactcaagctcagacttagccca

SEQ ID NO: 3165322 - DNA, 25 bp, Homo sapien
ttatcctgccactgttaccgcaaga

SEQ ID NO: 3165323 - DNA, 25 bp, Homo sapien
gaacttcgtcagactcaagctcaga

SEQ ID NO: 3165324 - DNA, 25 bp, Homo sapien
tgcactttcttctcctccttcctcc

SEQ ID NO: 3165325 - DNA, 25 bp, Homo sapien
cctttgcactttcttctcctccttc

SEQ ID NO: 3165326 - DNA, 25 bp, Homo sapien
tttgcactttcttctcctccttcct

SEQ ID NO: 3165327 - DNA, 25 bp, Homo sapien
tggtgtaaaggcctttgcactttct

SEQ ID NO: 3165328 - DNA, 25 bp, Homo sapien
tggaacacacaatactggatgatgg

SEQ ID NO: 3165329 - DNA, 25 bp, Homo sapien
gttgttctgaaccatccttatgctg

SEQ ID NO: 3165330 - DNA, 25 bp, Homo sapien
aacaggatgtggtgtaacatgacac

SEQ ID NO: 3165331 - DNA, 25 bp, Homo sapien
cagtaaatcccctgctgaatcaggc

SEQ ID NO: 3165332 - DNA, 25 bp, Homo sapien
tgaagttaccgtgagtaggactgcc

SEQ ID NO: 3165333 - DNA, 25 bp, Homo sapien
tatgaagttaccgtgagtaggactg

SEQ ID NO: 3165334 - DNA, 25 bp, Homo sapien
aagttaccgtgagtaggactgccaa

SEQ ID NO: 3165335 - DNA, 25 bp, Homo sapien
ctatgaagttaccgtgagtaggact

SEQ ID NO: 3165336 - DNA, 25 bp, Homo sapien
tccctcccgactggcaggaaactca

SEQ ID NO: 3165337 - DNA, 25 bp, Homo sapien
tgcattcatccctcccgactggcag

SEQ ID NO: 3165338 - DNA, 25 bp, Homo sapien
attcatccctcccgactggcaggaa

SEQ ID NO: 3165339 - DNA, 25 bp, Homo sapien
ttcatccctcccgactggcaggaaa

SEQ ID NO: 3165340 - DNA, 25 bp, Homo sapien
tggtcaagagagggttcgcgggttc

SEQ ID NO: 3165341 - DNA, 25 bp, Homo sapien
aagagagggttcgcgggttcctgag

SEQ ID NO: 3165342 - DNA, 25 bp, Homo sapien
agtggtcaagagagggttcgcgggt

SEQ ID NO: 3165343 - DNA, 25 bp, Homo sapien
tcaagagagggttcgcgggttcctg

SEQ ID NO: 3165344 - DNA, 25 bp, Homo sapien
ccgcgcggctggacgggaggctcat

SEQ ID NO: 3165345 - DNA, 25 bp, Homo sapien
gcagcgcgagcagcgcgcacaagga

SEQ ID NO: 3165346 - DNA, 25 bp, Homo sapien
ggccccggcggcgtcagcaggagca

SEQ ID NO: 3165347 - DNA, 25 bp, Homo sapien
agcagcgcgcacaaggagcccgaag

SEQ ID NO: 3165348 - DNA, 25 bp, Homo sapien
tcagcgtaacgcgtaaacaagtgca

SEQ ID NO: 3165349 - DNA, 25 bp, Homo sapien
tgcaacgcagctctgtcagcacagc

SEQ ID NO: 3165350 - DNA, 25 bp, Homo sapien
gcctgcggggaacacctgcagttta

SEQ ID NO: 3165351 - DNA, 25 bp, Homo sapien
acctgcagtttaccaatcgttttgg

SEQ ID NO: 3165352 - DNA, 25 bp, Homo sapien
cttccgggtccagacaaacttgctt

SEQ ID NO: 3165353 - DNA, 25 bp, Homo sapien
aacttgcttcccgttcttcagggag

SEQ ID NO: 3165354 - DNA, 25 bp, Homo sapien
ttctggatgactttctttagaaaag

SEQ ID NO: 3165355 - DNA, 25 bp, Homo sapien
ggcttccgggtccagacaaacttgc

SEQ ID NO: 3165356 - DNA, 25 bp, Homo sapien
tgagtaagaacaacaggatacctcc

SEQ ID NO: 3165357 - DNA, 25 bp, Homo sapien
gataacggtatgacacacccagtgt

SEQ ID NO: 3165358 - DNA, 25 bp, Homo sapien
aaaactgctccgctgaagactgggc

SEQ ID NO: 3165359 - DNA, 25 bp, Homo sapien
acttcagggagaagcgtaggctttc

SEQ ID NO: 3165360 - DNA, 25 bp, Homo sapien
taaaagatccacaatagatatctga

SEQ ID NO: 3165361 - DNA, 25 bp, Homo sapien
caatagatatctgaaaatcttagca

SEQ ID NO: 3165362 - DNA, 25 bp, Homo sapien
tccacaatagatatctgaaaatctt

SEQ ID NO: 3165363 - DNA, 25 bp, Homo sapien
tttaaaagatccacaatagatatct

SEQ ID NO: 3165364 - DNA, 25 bp, Homo sapien
tcttttattgtttctccaaatgaca

SEQ ID NO: 3165365 - DNA, 25 bp, Homo sapien
agtaccaaaaaccaacatgacacac

SEQ ID NO: 3165366 - DNA, 25 bp, Homo sapien
atgacaatacaagtaccaaaaacca

SEQ ID NO: 3165367 - DNA, 25 bp, Homo sapien
ttattgtttctccaaatgacaatac

SEQ ID NO: 3165368 - DNA, 25 bp, Homo sapien
ccagagccagaagacttgcacatga

SEQ ID NO: 3165369 - DNA, 25 bp, Homo sapien
gagccagaagacttgcacatgaggg

SEQ ID NO: 3165370 - DNA, 25 bp, Homo sapien
cagagccagaagacttgcacatgag

SEQ ID NO: 3165371 - DNA, 25 bp, Homo sapien
agccagaagacttgcacatgagggt

SEQ ID NO: 3165372 - DNA, 25 bp, Homo sapien
ctgttacaggaaggggtggctttga

SEQ ID NO: 3165373 - DNA, 25 bp, Homo sapien
tacaggaaggggtggctttgagtct

SEQ ID NO: 3165374 - DNA, 25 bp, Homo sapien
ggaaggggtggctttgagtctgagg

SEQ ID NO: 3165375 - DNA, 25 bp, Homo sapien
gggtggctttgagtctgaggctcat

SEQ ID NO: 3165376 - DNA, 25 bp, Homo sapien
ctgcagggcatgaaatggtctggca

SEQ ID NO: 3165377 - DNA, 25 bp, Homo sapien
ctcttgctttgcccattggtgcagg

SEQ ID NO: 3165378 - DNA, 25 bp, Homo sapien
tctcttgctttgcccattggtgcag

SEQ ID NO: 3165379 - DNA, 25 bp, Homo sapien
tcttgctttgcccattggtgcagga

SEQ ID NO: 3165380 - DNA, 25 bp, Homo sapien
cttgctttgcccattggtgcaggaa

SEQ ID NO: 3165381 - DNA, 25 bp, Homo sapien
cacacgcagcacagttcaatgtaca

SEQ ID NO: 3165382 - DNA, 25 bp, Homo sapien
acacacgcagcacagttcaatgtac

SEQ ID NO: 3165383 - DNA, 25 bp, Homo sapien
ctcctgacctgaccacttccaaatg

SEQ ID NO: 3165384 - DNA, 25 bp, Homo sapien
ggggctcctgacctgaccacttcca

SEQ ID NO: 3165385 - DNA, 25 bp, Homo sapien
tgaacagattaagcacctgacccat

SEQ ID NO: 3165386 - DNA, 25 bp, Homo sapien
ctggactatcttcttgattctggga

SEQ ID NO: 3165387 - DNA, 25 bp, Homo sapien
aggtttggcagaaagtgaacagatt

SEQ ID NO: 3165388 - DNA, 25 bp, Homo sapien
ataagaattcaaaaaagtcaaggct

SEQ ID NO: 3165389 - DNA, 25 bp, Homo sapien
tttctgtcatcttttaactagcctt

SEQ ID NO: 3165390 - DNA, 25 bp, Homo sapien
gagagaatggaaacatacctggatt

SEQ ID NO: 3165391 - DNA, 25 bp, Homo sapien
tcatcttttaactagccttctcaga

SEQ ID NO: 3165392 - DNA, 25 bp, Homo sapien
tgagagagaatggaaacatacctgg

SEQ ID NO: 3165393 - DNA, 25 bp, Homo sapien
tttatcccccgtcactgtcccactg

SEQ ID NO: 3165394 - DNA, 25 bp, Homo sapien
tcttttatcccccgtcactgtccca

SEQ ID NO: 3165395 - DNA, 25 bp, Homo sapien
gcttcttttatcccccgtcactgtc

SEQ ID NO: 3165396 - DNA, 25 bp, Homo sapien
caggatcccagtgcgcagggaaagt

SEQ ID NO: 3165397 - DNA, 25 bp, Homo sapien
gcagctgaggttccagcaggatccc

SEQ ID NO: 3165398 - DNA, 25 bp, Homo sapien
cagtgcgcagggaaagtcgggctgg

SEQ ID NO: 3165399 - DNA, 25 bp, Homo sapien
gaaagtcgggctggggttctgcagg

SEQ ID NO: 3165400 - DNA, 25 bp, Homo sapien
cgggtgaggcgggacctggctgcgg

SEQ ID NO: 3165401 - DNA, 25 bp, Homo sapien
aacagcatctcctggcgggtggcgc

SEQ ID NO: 3165402 - DNA, 25 bp, Homo sapien
gagcagcaacgccaagaacagcatc

SEQ ID NO: 3165403 - DNA, 25 bp, Homo sapien
tggcgaaggcgaccacaactggcag

SEQ ID NO: 3165404 - DNA, 25 bp, Homo sapien
ctggtgatgtgcctgggacggacct

SEQ ID NO: 3165405 - DNA, 25 bp, Homo sapien
tggggtccggccttgatcacctcca

SEQ ID NO: 3165406 - DNA, 25 bp, Homo sapien
gcagtggggtccggccttgatcacc

SEQ ID NO: 3165407 - DNA, 25 bp, Homo sapien
tggtgatgtgcctgggacggacctg

SEQ ID NO: 3165408 - DNA, 25 bp, Homo sapien
tctccaaatgttccttaatgatttt

SEQ ID NO: 3165409 - DNA, 25 bp, Homo sapien
tttcctcccattcttcagcgtggct

SEQ ID NO: 3165410 - DNA, 25 bp, Homo sapien
gggcttgcagatccaagcaaatttt

SEQ ID NO: 3165411 - DNA, 25 bp, Homo sapien
gattttcttgtacagcagggcttgc

SEQ ID NO: 3165412 - DNA, 25 bp, Homo sapien
gaaatagattgactataccacaact

SEQ ID NO: 3165413 - DNA, 25 bp, Homo sapien
gcaagctaattgtaacattcaaggt

SEQ ID NO: 3165414 - DNA, 25 bp, Homo sapien
gagctactaatatttattggcaagc

SEQ ID NO: 3165415 - DNA, 25 bp, Homo sapien
tagattgaaagtgcacacttaggca

SEQ ID NO: 3165416 - DNA, 25 bp, Homo sapien
ggaacgccggatcccacatagagtc

SEQ ID NO: 3165417 - DNA, 25 bp, Homo sapien
gcagcagacatgcattcggatgaaa

SEQ ID NO: 3165418 - DNA, 25 bp, Homo sapien
tgtctttggactgcatagcacatga

SEQ ID NO: 3165419 - DNA, 25 bp, Homo sapien
tgggtacctggtgtgcaagcaccct

SEQ ID NO: 3165420 - DNA, 25 bp, Homo sapien
tcagcaggcgggtctggcggctgtg

SEQ ID NO: 3165421 - DNA, 25 bp, Homo sapien
ggctcagcaggcgggtctggcggct

SEQ ID NO: 3165422 - DNA, 25 bp, Homo sapien
ctgctgcgcgccggccagcggctac

SEQ ID NO: 3165423 - DNA, 25 bp, Homo sapien
cggcggagagagcagcgcgggccat

SEQ ID NO: 3165424 - DNA, 25 bp, Homo sapien
agcagcagtgccactcgcaggagcc

SEQ ID NO: 3165425 - DNA, 25 bp, Homo sapien
ccactcgcaggagccggggattgct

SEQ ID NO: 3165426 - DNA, 25 bp, Homo sapien
gtgcctaccccagccgcgtccggcc

SEQ ID NO: 3165427 - DNA, 25 bp, Homo sapien
ctgagcgaggctgtcggcgctgggt

SEQ ID NO: 3165428 - DNA, 25 bp, Homo sapien
tgtcggcgctgggtgcctaccccag

SEQ ID NO: 3165429 - DNA, 25 bp, Homo sapien
aggctgtcggcgctgggtgcctacc

SEQ ID NO: 3165430 - DNA, 25 bp, Homo sapien
gggtgaattccctgcagggtctgca

SEQ ID NO: 3165431 - DNA, 25 bp, Homo sapien
gtctgcaagcactggcagcgcagtt

SEQ ID NO: 3165432 - DNA, 25 bp, Homo sapien
ttcttggggtgaattccctgcaggg

SEQ ID NO: 3165433 - DNA, 25 bp, Homo sapien
atgacttcggtttgggcgcagtggg

SEQ ID NO: 3165434 - DNA, 25 bp, Homo sapien
ggaccccggcggtggcagaggcagc

SEQ ID NO: 3165435 - DNA, 25 bp, Homo sapien
gagggaagggaatctcgtgaggcag

SEQ ID NO: 3165436 - DNA, 25 bp, Homo sapien
agcaggagggtctgggaccccggcg

SEQ ID NO: 3165437 - DNA, 25 bp, Homo sapien
gggaatctcgtgaggcaggaggtcg

SEQ ID NO: 3165438 - DNA, 25 bp, Homo sapien
ggatgcaggattgaggcaagctttc

SEQ ID NO: 3165439 - DNA, 25 bp, Homo sapien
gcaggattgaggcaagctttccgcc

SEQ ID NO: 3165440 - DNA, 25 bp, Homo sapien
gattgaggcaagctttccgcccatt

SEQ ID NO: 3165441 - DNA, 25 bp, Homo sapien
aggattgaggcaagctttccgccca

SEQ ID NO: 3165442 - DNA, 25 bp, Homo sapien
taagcgatgctcaaacacattaggc

SEQ ID NO: 3165443 - DNA, 25 bp, Homo sapien
ctgttcctataagggcagggcctcc

SEQ ID NO: 3165444 - DNA, 25 bp, Homo sapien
tccttcaggaacagccaccagtgag

SEQ ID NO: 3165445 - DNA, 25 bp, Homo sapien
taggcacaatccaggtggcctctgc

SEQ ID NO: 3165446 - DNA, 25 bp, Homo sapien
gatgtgcacatacattcccctgcct

SEQ ID NO: 3165447 - DNA, 25 bp, Homo sapien
ggacagtgtgcaggtagagttaatc

SEQ ID NO: 3165448 - DNA, 25 bp, Homo sapien
gcccctttgttctaagccagaaaca

SEQ ID NO: 3165449 - DNA, 25 bp, Homo sapien
ttggatccgccagcctctatcacag

SEQ ID NO: 3165450 - DNA, 25 bp, Homo sapien
aaggcaaccgctctatgaggtccca

SEQ ID NO: 3165451 - DNA, 25 bp, Homo sapien
gacagcattgaatacagagttcccc

SEQ ID NO: 3165452 - DNA, 25 bp, Homo sapien
acagcattgaatacagagttcccca

SEQ ID NO: 3165453 - DNA, 25 bp, Homo sapien
ttccccagaaggcaaccgctctatg

SEQ ID NO: 3165454 - DNA, 25 bp, Homo sapien
tatgactctgctataaacacaacaa

SEQ ID NO: 3165455 - DNA, 25 bp, Homo sapien
aacacaacaactacaatttcttggt

SEQ ID NO: 3165456 - DNA, 25 bp, Homo sapien
acacaacaactacaatttcttggtt

SEQ ID NO: 3165457 - DNA, 25 bp, Homo sapien
ttggactccgtggcccacagagttg

SEQ ID NO: 3165458 - DNA, 25 bp, Homo sapien
cttggactccgtggcccacagagtt

SEQ ID NO: 3165459 - DNA, 25 bp, Homo sapien
caagggctgtgtttcatgaacatcc

SEQ ID NO: 3165460 - DNA, 25 bp, Homo sapien
actgtgatgtttgctcccctccgat

SEQ ID NO: 3165461 - DNA, 25 bp, Homo sapien
cctccgatccacaatagactctgaa

SEQ ID NO: 3165462 - DNA, 25 bp, Homo sapien
ctcaaagtgcctgaaatttagtgca

SEQ ID NO: 3165463 - DNA, 25 bp, Homo sapien
taagagtttatcaggaaaaattgca

SEQ ID NO: 3165464 - DNA, 25 bp, Homo sapien
gaacctagagctttgtcacttctct

SEQ ID NO: 3165465 - DNA, 25 bp, Homo sapien
aaattgcaaagtcaacaactgtcaa

SEQ ID NO: 3165466 - DNA, 25 bp, Homo sapien
attcttgtatctctggaacctagag

SEQ ID NO: 3165467 - DNA, 25 bp, Homo sapien
aactgggataaatcgatagggatgt

SEQ ID NO: 3165468 - DNA, 25 bp, Homo sapien
tcgatagggatgttctcttatcttc

SEQ ID NO: 3165469 - DNA, 25 bp, Homo sapien
ctgggataaatcgatagggatgttc

SEQ ID NO: 3165470 - DNA, 25 bp, Homo sapien
gataaatcgatagggatgttctctt

SEQ ID NO: 3165471 - DNA, 25 bp, Homo sapien
cacaaggtggccccaaatccatatt

SEQ ID NO: 3165472 - DNA, 25 bp, Homo sapien
acaaggtggccccaaatccatattc

SEQ ID NO: 3165473 - DNA, 25 bp, Homo sapien
tcacaaggtggccccaaatccatat

SEQ ID NO: 3165474 - DNA, 25 bp, Homo sapien
caaggtggccccaaatccatattct

SEQ ID NO: 3165475 - DNA, 25 bp, Homo sapien
aggaaaatttgcttggacctgcaag

SEQ ID NO: 3165476 - DNA, 25 bp, Homo sapien
ttagctactagctgcctacgtgtgt

SEQ ID NO: 3165477 - DNA, 25 bp, Homo sapien
gcaagccccgctgtacaagaaaata

SEQ ID NO: 3165478 - DNA, 25 bp, Homo sapien
acgtgtgtgcatttgctatatagca

SEQ ID NO: 3165479 - DNA, 25 bp, Homo sapien
caagacgattgcttacacggttgca

SEQ ID NO: 3165480 - DNA, 25 bp, Homo sapien
cataggtgccacatctcaataggaa

SEQ ID NO: 3165481 - DNA, 25 bp, Homo sapien
gccagttcagattcacgggtatgaa

SEQ ID NO: 3165482 - DNA, 25 bp, Homo sapien
tatattgatcaaaaccagccacagg

SEQ ID NO: 3165483 - DNA, 25 bp, Homo sapien
ggtgagcattggctttagcttaaag

SEQ ID NO: 3165484 - DNA, 25 bp, Homo sapien
tagattctctttagctacgaaagtc

SEQ ID NO: 3165485 - DNA, 25 bp, Homo sapien
tttcttgataacttattgcagcttc

SEQ ID NO: 3165486 - DNA, 25 bp, Homo sapien
gaagccaggcatagattctctttag

SEQ ID NO: 3165487 - DNA, 25 bp, Homo sapien
actataggaacgtgctaccatgcca

SEQ ID NO: 3165488 - DNA, 25 bp, Homo sapien
aaacttagtgtggatgcccaactgg

SEQ ID NO: 3165489 - DNA, 25 bp, Homo sapien
agtgtggatgcccaactggcatagt

SEQ ID NO: 3165490 - DNA, 25 bp, Homo sapien
acttagtgtggatgcccaactggca

SEQ ID NO: 3165491 - DNA, 25 bp, Homo sapien
gaaatgcaagcaattagtggatcac

SEQ ID NO: 3165492 - DNA, 25 bp, Homo sapien
taaactaatatttagtgggagacca

SEQ ID NO: 3165493 - DNA, 25 bp, Homo sapien
tgtgtcagccaccttgataaatgac

SEQ ID NO: 3165494 - DNA, 25 bp, Homo sapien
tgactatttcttacgagggttctac

SEQ ID NO: 3165495 - DNA, 25 bp, Homo sapien
ggagttggtctcagcaggaccccat

SEQ ID NO: 3165496 - DNA, 25 bp, Homo sapien
gacgaagtaatgtaagccactgctt

SEQ ID NO: 3165497 - DNA, 25 bp, Homo sapien
ctgtgctatcgcctcatcagggaag

SEQ ID NO: 3165498 - DNA, 25 bp, Homo sapien
tgcgctgcgtgtatgtgaagtcaac

SEQ ID NO: 3165499 - DNA, 25 bp, Homo sapien
gaaacatctttaacttcggcttctg

SEQ ID NO: 3165500 - DNA, 25 bp, Homo sapien
cagactcaatgccaccctgcagctg

SEQ ID NO: 3165501 - DNA, 25 bp, Homo sapien
gcagctgtgccagatcactttgtgc

SEQ ID NO: 3165502 - DNA, 25 bp, Homo sapien
gcttctgcaccataagcctcagact

SEQ ID NO: 3165503 - DNA, 25 bp, Homo sapien
tgctttgtacagcagaaaataaatc

SEQ ID NO: 3165504 - DNA, 25 bp, Homo sapien
tcctgtaagtagcgaagatgtcggg

SEQ ID NO: 3165505 - DNA, 25 bp, Homo sapien
aggtgctttgtacagcagaaaataa

SEQ ID NO: 3165506 - DNA, 25 bp, Homo sapien
ctttgtacagcagaaaataaatcct

SEQ ID NO: 3165507 - DNA, 25 bp, Homo sapien
tgcgcccaaaccgaagtcatgtaag

SEQ ID NO: 3165508 - DNA, 25 bp, Homo sapien
aacccagggttagctgcaggactga

SEQ ID NO: 3165509 - DNA, 25 bp, Homo sapien
cacactcaagaatgggcagaaagct

SEQ ID NO: 3165510 - DNA, 25 bp, Homo sapien
aagtgaggcccagtatgacaaagag

SEQ ID NO: 3165511 - DNA, 25 bp, Homo sapien
tgctatagtgcatcataggatatgc

SEQ ID NO: 3165512 - DNA, 25 bp, Homo sapien
tagtgcatcataggatatgctcatc

SEQ ID NO: 3165513 - DNA, 25 bp, Homo sapien
cttgcttgagtgctatagtgcatca

SEQ ID NO: 3165514 - DNA, 25 bp, Homo sapien
tgagtgctatagtgcatcataggat

SEQ ID NO: 3165515 - DNA, 25 bp, Homo sapien
cacagctggtcaattacagggctga

SEQ ID NO: 3165516 - DNA, 25 bp, Homo sapien
gcctctcacatagctttgaggggga

SEQ ID NO: 3165517 - DNA, 25 bp, Homo sapien
ggtccggtaggctacctgctctcca

SEQ ID NO: 3165518 - DNA, 25 bp, Homo sapien
gctgaaatggtgaactgtaggtccg

SEQ ID NO: 3165519 - DNA, 25 bp, Homo sapien
caagaaagcagtagagcaacagcca

SEQ ID NO: 3165520 - DNA, 25 bp, Homo sapien
agtccctagacactggagtgcttag

SEQ ID NO: 3165521 - DNA, 25 bp, Homo sapien
tagaagtcatatttacactggattg

SEQ ID NO: 3165522 - DNA, 25 bp, Homo sapien
tacagaaagcatgcaactgccaaga

SEQ ID NO: 3165523 - DNA, 25 bp, Homo sapien
tccttcagactatctgcacaacctt

SEQ ID NO: 3165524 - DNA, 25 bp, Homo sapien
caggcagaggtctcttcatgaataa

SEQ ID NO: 3165525 - DNA, 25 bp, Homo sapien
tatctgcacaaccttcttaaatttg

SEQ ID NO: 3165526 - DNA, 25 bp, Homo sapien
aatttgctgtatgttcaggcagagg

SEQ ID NO: 3165527 - DNA, 25 bp, Homo sapien
attggagtaatgagctcaaatccgt

SEQ ID NO: 3165528 - DNA, 25 bp, Homo sapien
caaatccgtgtttccatgctgcacc

SEQ ID NO: 3165529 - DNA, 25 bp, Homo sapien
taatgagctcaaatccgtgtttcca

SEQ ID NO: 3165530 - DNA, 25 bp, Homo sapien
gctcaaatccgtgtttccatgctgc

SEQ ID NO: 3165531 - DNA, 25 bp, Homo sapien
tattctgccatacctctccaggaat

SEQ ID NO: 3165532 - DNA, 25 bp, Homo sapien
ggtgctgaaattacatactagaagt

SEQ ID NO: 3165533 - DNA, 25 bp, Homo sapien
tccatgtactcatggcatatggcca

SEQ ID NO: 3165534 - DNA, 25 bp, Homo sapien
tgaggaatacagataaggacagcag

SEQ ID NO: 3165535 - DNA, 25 bp, Homo sapien
ccgcggatccccggcttccggactg

SEQ ID NO: 3165536 - DNA, 25 bp, Homo sapien
cggcttccggactggggctccacct

SEQ ID NO: 3165537 - DNA, 25 bp, Homo sapien
ctcccgcgactccagtcctcgcggc

SEQ ID NO: 3165538 - DNA, 25 bp, Homo sapien
ccacctcccgcgactccagtcctcg

SEQ ID NO: 3165539 - DNA, 25 bp, Homo sapien
cccttacggagggtgctgtgcttct

SEQ ID NO: 3165540 - DNA, 25 bp, Homo sapien
ctgtgcttctgcccaacgccggcgc

SEQ ID NO: 3165541 - DNA, 25 bp, Homo sapien
gctgctccgaaagccccggaacgca

SEQ ID NO: 3165542 - DNA, 25 bp, Homo sapien
cccggtgcccttacggagggtgctg

SEQ ID NO: 3165543 - DNA, 25 bp, Homo sapien
cggctccgcacccggcgcccgcagc

SEQ ID NO: 3165544 - DNA, 25 bp, Homo sapien
agcggctccgcacccggcgcccgca

SEQ ID NO: 3165545 - DNA, 25 bp, Homo sapien
tccgcacccggcgcccgcagccctc

SEQ ID NO: 3165546 - DNA, 25 bp, Homo sapien
cgccagcggctccgcacccggcgcc

SEQ ID NO: 3165547 - DNA, 25 bp, Homo sapien
caatgaaagcgcatttctggaagcc

SEQ ID NO: 3165548 - DNA, 25 bp, Homo sapien
taaattcagacactcgagactaaga

SEQ ID NO: 3165549 - DNA, 25 bp, Homo sapien
ggcactggcggatacaaaaactcga

SEQ ID NO: 3165550 - DNA, 25 bp, Homo sapien
cttttctagggattgtgctgggcac

SEQ ID NO: 3165551 - DNA, 25 bp, Homo sapien
ctgaaaagcacccctaaaacaactg

SEQ ID NO: 3165552 - DNA, 25 bp, Homo sapien
tgaaaagcacccctaaaacaactga

SEQ ID NO: 3165553 - DNA, 25 bp, Homo sapien
ccgccttatcttaacttgcctagtg

SEQ ID NO: 3165554 - DNA, 25 bp, Homo sapien
caccttcagagatggtattcagtac

SEQ ID NO: 3165555 - DNA, 25 bp, Homo sapien
gcatcaacacactgtccgaattcct

SEQ ID NO: 3165556 - DNA, 25 bp, Homo sapien
gagaaaagagacaccaataagcatc

SEQ ID NO: 3165557 - DNA, 25 bp, Homo sapien
ctggaagatggaatctcttctctct

SEQ ID NO: 3165558 - DNA, 25 bp, Homo sapien
agatggaatctcttctctctgctgg

SEQ ID NO: 3165559 - DNA, 25 bp, Homo sapien
ctctggaagatggaatctcttctct

SEQ ID NO: 3165560 - DNA, 25 bp, Homo sapien
atggaatctcttctctctgctggtc

SEQ ID NO: 3165561 - DNA, 25 bp, Homo sapien
ttaaaacagtcaatatcactgggat

SEQ ID NO: 3165562 - DNA, 25 bp, Homo sapien
cacagctcagaaatggtgataaatc

SEQ ID NO: 3165563 - DNA, 25 bp, Homo sapien
tccattattataggcatgtggccaa

SEQ ID NO: 3165564 - DNA, 25 bp, Homo sapien
tcaattaaggccctacacagctcag

SEQ ID NO: 3165565 - DNA, 25 bp, Homo sapien
tgggatgggctgctatcagactcct

SEQ ID NO: 3165566 - DNA, 25 bp, Homo sapien
tcaggtagaataagccaaagcgggt

SEQ ID NO: 3165567 - DNA, 25 bp, Homo sapien
tacagcaggaaggtaggaacactac

SEQ ID NO: 3165568 - DNA, 25 bp, Homo sapien
aattatacagccgatgccagtgcga

SEQ ID NO: 3165569 - DNA, 25 bp, Homo sapien
ccatgggattccttgaaagagtacg

SEQ ID NO: 3165570 - DNA, 25 bp, Homo sapien
tgtaacattaagtggagcagctggc

SEQ ID NO: 3165571 - DNA, 25 bp, Homo sapien
gagtacgtgcccatgaaaagatcat

SEQ ID NO: 3165572 - DNA, 25 bp, Homo sapien
tgttgtctcagatccaaagtgaatt

SEQ ID NO: 3165573 - DNA, 25 bp, Homo sapien
tgaattctatccataaggtcccagg

SEQ ID NO: 3165574 - DNA, 25 bp, Homo sapien
agaagttagtaacctccaatccaag

SEQ ID NO: 3165575 - DNA, 25 bp, Homo sapien
tgtggtatctgcctcaactttgtga

SEQ ID NO: 3165576 - DNA, 25 bp, Homo sapien
aacaggatctagtggtaggtctaac

SEQ ID NO: 3165577 - DNA, 25 bp, Homo sapien
taacaattccaagctctacccaggc

SEQ ID NO: 3165578 - DNA, 25 bp, Homo sapien
tacccaggccctaacatacagttta

SEQ ID NO: 3165579 - DNA, 25 bp, Homo sapien
ccaatcaccagtatagggagtcttt

SEQ ID NO: 3165580 - DNA, 25 bp, Homo sapien
tatcttagggcatatcttcgatgtc

SEQ ID NO: 3165581 - DNA, 25 bp, Homo sapien
cctactgctgggctagccacgaaat

SEQ ID NO: 3165582 - DNA, 25 bp, Homo sapien
tacatagtgaccttgccattaatgc

SEQ ID NO: 3165583 - DNA, 25 bp, Homo sapien
taattttcattacattcgtgcccct

SEQ ID NO: 3165584 - DNA, 25 bp, Homo sapien
gatgtgccctgtcattacttgctca

SEQ ID NO: 3165585 - DNA, 25 bp, Homo sapien
ccaaggactgctggcaataaccaga

SEQ ID NO: 3165586 - DNA, 25 bp, Homo sapien
tgcaaactccttaggaacaccaagg

SEQ ID NO: 3165587 - DNA, 25 bp, Homo sapien
tagtcgacagagtgtgggcctacag

SEQ ID NO: 3165588 - DNA, 25 bp, Homo sapien
gagggaagacaaccatttaacaaca

SEQ ID NO: 3165589 - DNA, 25 bp, Homo sapien
cagtacaaatctgcgtgacctggag

SEQ ID NO: 3165590 - DNA, 25 bp, Homo sapien
tcagtcaccgtagagactcagcaag

SEQ ID NO: 3165591 - DNA, 25 bp, Homo sapien
tgaggtgctaagtcagctcgctaac

SEQ ID NO: 3165592 - DNA, 25 bp, Homo sapien
ttacagcagacatgatacagcctgg

SEQ ID NO: 3165593 - DNA, 25 bp, Homo sapien
cccaggcatggccccggacaacagc

SEQ ID NO: 3165594 - DNA, 25 bp, Homo sapien
aaaatgttattccatggccccaggc

SEQ ID NO: 3165595 - DNA, 25 bp, Homo sapien
tggccccggacaacagctgtgagtc

SEQ ID NO: 3165596 - DNA, 25 bp, Homo sapien
aggcatggccccggacaacagctgt

SEQ ID NO: 3165597 - DNA, 25 bp, Homo sapien
tcggttcctgatataataatggctt

SEQ ID NO: 3165598 - DNA, 25 bp, Homo sapien
ggttcctgatataataatggcttca

SEQ ID NO: 3165599 - DNA, 25 bp, Homo sapien
ttcggttcctgatataataatggct

SEQ ID NO: 3165600 - DNA, 25 bp, Homo sapien
tcctgatataataatggcttcatgt

SEQ ID NO: 3165601 - DNA, 25 bp, Homo sapien
ttctgtttccaagggaaacccatga

SEQ ID NO: 3165602 - DNA, 25 bp, Homo sapien
gcagaggcagctcttatcttattcc

SEQ ID NO: 3165603 - DNA, 25 bp, Homo sapien
tatctcccactaaaattatactgag

SEQ ID NO: 3165604 - DNA, 25 bp, Homo sapien
gattccacacctcgctgtatttctt

SEQ ID NO: 3165605 - DNA, 25 bp, Homo sapien
attcaattgatcagttacgtccaaa

SEQ ID NO: 3165606 - DNA, 25 bp, Homo sapien
tttagaatgagctcactacaaatac

SEQ ID NO: 3165607 - DNA, 25 bp, Homo sapien
cagttacgtccaaaagttcttcctg

SEQ ID NO: 3165608 - DNA, 25 bp, Homo sapien
acatccttaggttttagaatgagct

SEQ ID NO: 3165609 - DNA, 25 bp, Homo sapien
tagtggtaactgaactaatataccg

SEQ ID NO: 3165610 - DNA, 25 bp, Homo sapien
taactgaactaatataccgctgact

SEQ ID NO: 3165611 - DNA, 25 bp, Homo sapien
ctggtagtggtaactgaactaatat

SEQ ID NO: 3165612 - DNA, 25 bp, Homo sapien
ctaatataccgctgactcttgggtc

SEQ ID NO: 3165613 - DNA, 25 bp, Homo sapien
cttattaacttgatgatttttgtca

SEQ ID NO: 3165614 - DNA, 25 bp, Homo sapien
tgagattcttattaacttgatgatt

SEQ ID NO: 3165615 - DNA, 25 bp, Homo sapien
tatctgccagagcatttttctcagg

SEQ ID NO: 3165616 - DNA, 25 bp, Homo sapien
tcattaatgtaagcattatctgcca

SEQ ID NO: 3165617 - DNA, 25 bp, Homo sapien
caaatcctgaacaaagttgcacagc

SEQ ID NO: 3165618 - DNA, 25 bp, Homo sapien
tatatcccgagcatttcaaatcctg

SEQ ID NO: 3165619 - DNA, 25 bp, Homo sapien
aaatcctgaacaaagttgcacagct

SEQ ID NO: 3165620 - DNA, 25 bp, Homo sapien
ttatatcccgagcatttcaaatcct

SEQ ID NO: 3165621 - DNA, 25 bp, Homo sapien
ggacaaagagcaagcctgtgtactc

SEQ ID NO: 3165622 - DNA, 25 bp, Homo sapien
ctactggacaaagagcaagcctgtg

SEQ ID NO: 3165623 - DNA, 25 bp, Homo sapien
tactggacaaagagcaagcctgtgt

SEQ ID NO: 3165624 - DNA, 25 bp, Homo sapien
ctggacaaagagcaagcctgtgtac

SEQ ID NO: 3165625 - DNA, 25 bp, Homo sapien
tctctgcacggtcaggacaggagta

SEQ ID NO: 3165626 - DNA, 25 bp, Homo sapien
gaaagcatctgcattcggtcatttt

SEQ ID NO: 3165627 - DNA, 25 bp, Homo sapien
gtgaccacttattgataagaatctc

SEQ ID NO: 3165628 - DNA, 25 bp, Homo sapien
ttgataagaatctctgcacggtcag

SEQ ID NO: 3165629 - DNA, 25 bp, Homo sapien
gactatggtacgaaggatgctacac

SEQ ID NO: 3165630 - DNA, 25 bp, Homo sapien
catctactggtaaggattgctgtga

SEQ ID NO: 3165631 - DNA, 25 bp, Homo sapien
tacaaagcgggtaagcaagcatctc

SEQ ID NO: 3165632 - DNA, 25 bp, Homo sapien
tcttgacaacgctctggtacttact

SEQ ID NO: 3165633 - DNA, 25 bp, Homo sapien
tgaataaactggaaggtgctaatcc

SEQ ID NO: 3165634 - DNA, 25 bp, Homo sapien
ttgaataaactggaaggtgctaatc

SEQ ID NO: 3165635 - DNA, 25 bp, Homo sapien
cttgaataaactggaaggtgctaat

SEQ ID NO: 3165636 - DNA, 25 bp, Homo sapien
taaatctgcgccatgaactcaaact

SEQ ID NO: 3165637 - DNA, 25 bp, Homo sapien
ttatgttaaatctgcgccatgaact

SEQ ID NO: 3165638 - DNA, 25 bp, Homo sapien
cctttttatgcctactaattattcg

SEQ ID NO: 3165639 - DNA, 25 bp, Homo sapien
tatgcctactaattattcgattatt

SEQ ID NO: 3165640 - DNA, 25 bp, Homo sapien
gcagtgacatttacgctaagatcta

SEQ ID NO: 3165641 - DNA, 25 bp, Homo sapien
tagtgaagaggtaagaggctaacac

SEQ ID NO: 3165642 - DNA, 25 bp, Homo sapien
aatatgcattcctaacgtggcctgt

SEQ ID NO: 3165643 - DNA, 25 bp, Homo sapien
ggcatgggctggaaaagcttcccca

SEQ ID NO: 3165644 - DNA, 25 bp, Homo sapien
ggaggagggcacaacagcttttaac

SEQ ID NO: 3165645 - DNA, 25 bp, Homo sapien
tacctagtttccaagaacaatgcaa

SEQ ID NO: 3165646 - DNA, 25 bp, Homo sapien
tctattgtccagtagtcacatgggc

SEQ ID NO: 3165647 - DNA, 25 bp, Homo sapien
tcatgtcaagtccaataagaattct

SEQ ID NO: 3165648 - DNA, 25 bp, Homo sapien
tcatgagcttgagagtttggtgagc

SEQ ID NO: 3165649 - DNA, 25 bp, Homo sapien
caggtagttaccacttccagagctc

SEQ ID NO: 3165650 - DNA, 25 bp, Homo sapien
tgttcctttgtatgtaatgccctcc

SEQ ID NO: 3165651 - DNA, 25 bp, Homo sapien
tatcatttccatctaggtgaaggac

SEQ ID NO: 3165652 - DNA, 25 bp, Homo sapien
tatagttaaggtgtagtttcatgta

SEQ ID NO: 3165653 - DNA, 25 bp, Homo sapien
tggcatatatttcccaatcttttgc

SEQ ID NO: 3165654 - DNA, 25 bp, Homo sapien
taacctccctgtgtccttatagtta

SEQ ID NO: 3165655 - DNA, 25 bp, Homo sapien
caacatacagttgggacttgatttt

SEQ ID NO: 3165656 - DNA, 25 bp, Homo sapien
ttagtaacagagtaatgctggcttc

SEQ ID NO: 3165657 - DNA, 25 bp, Homo sapien
tcttcatgaaggataccgactcata

SEQ ID NO: 3165658 - DNA, 25 bp, Homo sapien
tctggacatagagctttcattgtgg

SEQ ID NO: 3165659 - DNA, 25 bp, Homo sapien
tagacatggtaatagtggacatcct

SEQ ID NO: 3165660 - DNA, 25 bp, Homo sapien
tgaacatggttcgagcagctggcta

SEQ ID NO: 3165661 - DNA, 25 bp, Homo sapien
tgtgggccacgattggtttacacct

SEQ ID NO: 3165662 - DNA, 25 bp, Homo sapien
tgctacttgccaagaaaacctggag

SEQ ID NO: 3165663 - DNA, 25 bp, Homo sapien
gaacaattaacgaattgggcagccc

SEQ ID NO: 3165664 - DNA, 25 bp, Homo sapien
ggcaggtatgagagaatgctgatca

SEQ ID NO: 3165665 - DNA, 25 bp, Homo sapien
catattgttcgctcatcaacgtggt

SEQ ID NO: 3165666 - DNA, 25 bp, Homo sapien
gctgatcaaggcacaatcttccaat

SEQ ID NO: 3165667 - DNA, 25 bp, Homo sapien
gataatatgaaatccatctacatct

SEQ ID NO: 3165668 - DNA, 25 bp, Homo sapien
ctacgttcttggatcttccagccac

SEQ ID NO: 3165669 - DNA, 25 bp, Homo sapien
cctacgttcttggatcttccagcca

SEQ ID NO: 3165670 - DNA, 25 bp, Homo sapien
ccctacgttcttggatcttccagcc

SEQ ID NO: 3165671 - DNA, 25 bp, Homo sapien
tcctggccgttcatgctctccatca

SEQ ID NO: 3165672 - DNA, 25 bp, Homo sapien
agtgtgtaaaagcatggcaataggc

SEQ ID NO: 3165673 - DNA, 25 bp, Homo sapien
tgtgtaaaagcatggcaataggcat

SEQ ID NO: 3165674 - DNA, 25 bp, Homo sapien
atcagtgtgtaaaagcatggcaata

SEQ ID NO: 3165675 - DNA, 25 bp, Homo sapien
cagttgtatccttctagagtgcata

SEQ ID NO: 3165676 - DNA, 25 bp, Homo sapien
tcacagttgtatccttctagagtgc

SEQ ID NO: 3165677 - DNA, 25 bp, Homo sapien
cacagttgtatccttctagagtgca

SEQ ID NO: 3165678 - DNA, 25 bp, Homo sapien
agttgtatccttctagagtgcatat

SEQ ID NO: 3165679 - DNA, 25 bp, Homo sapien
caatctgactctgtgaaagtaataa

SEQ ID NO: 3165680 - DNA, 25 bp, Homo sapien
gcaatctgactctgtgaaagtaata

SEQ ID NO: 3165681 - DNA, 25 bp, Homo sapien
gaaagcaatctgactctgtgaaagt

SEQ ID NO: 3165682 - DNA, 25 bp, Homo sapien
aagcaatctgactctgtgaaagtaa

SEQ ID NO: 3165683 - DNA, 25 bp, Homo sapien
tatctgccagctgcgtatgaatctt

SEQ ID NO: 3165684 - DNA, 25 bp, Homo sapien
gataatatctgccagctgcgtatga

SEQ ID NO: 3165685 - DNA, 25 bp, Homo sapien
aatatctgccagctgcgtatgaatc

SEQ ID NO: 3165686 - DNA, 25 bp, Homo sapien
tctttgggggtgtatctgtgagcta

SEQ ID NO: 3165687 - DNA, 25 bp, Homo sapien
tagcatggtgtatggccaacttggc

SEQ ID NO: 3165688 - DNA, 25 bp, Homo sapien
ggatgcttgtgggacagcctcaaca

SEQ ID NO: 3165689 - DNA, 25 bp, Homo sapien
tcttgcaagtggattgtgatcaccc

SEQ ID NO: 3165690 - DNA, 25 bp, Homo sapien
gcgccctctggtggtaagaaaatac

SEQ ID NO: 3165691 - DNA, 25 bp, Homo sapien
ggttcattcgtcatgctggaaggga

SEQ ID NO: 3165692 - DNA, 25 bp, Homo sapien
gaattttacagacttaggatagcct

SEQ ID NO: 3165693 - DNA, 25 bp, Homo sapien
taaagcagatacgagaaagcccaat

SEQ ID NO: 3165694 - DNA, 25 bp, Homo sapien
gatagcctacagtttccttaaagca

SEQ ID NO: 3165695 - DNA, 25 bp, Homo sapien
ttctaagacttgataatatgattgg

SEQ ID NO: 3165696 - DNA, 25 bp, Homo sapien
tgagccctaggataatgtttgatgg

SEQ ID NO: 3165697 - DNA, 25 bp, Homo sapien
taagacttgataatatgattggaga

SEQ ID NO: 3165698 - DNA, 25 bp, Homo sapien
gaaaaccctattgagccctaggata

SEQ ID NO: 3165699 - DNA, 25 bp, Homo sapien
tgagtgaagccatgaaatgtgctgg

SEQ ID NO: 3165700 - DNA, 25 bp, Homo sapien
gatatggaaaggactatagtatgag

SEQ ID NO: 3165701 - DNA, 25 bp, Homo sapien
taagtgagcaagttgtactcccggg

SEQ ID NO: 3165702 - DNA, 25 bp, Homo sapien
tactcccgggttgcatgagctgtgg

SEQ ID NO: 3165703 - DNA, 25 bp, Homo sapien
gagaccaagctcacaatcagcaagt

SEQ ID NO: 3165704 - DNA, 25 bp, Homo sapien
catcaatgaacagattgagattcag

SEQ ID NO: 3165705 - DNA, 25 bp, Homo sapien
gaaggaacccttaagtggagtagca

SEQ ID NO: 3165706 - DNA, 25 bp, Homo sapien
gcattttcactactctgtaccatga

SEQ ID NO: 3165707 - DNA, 25 bp, Homo sapien
ggcatgggttgtgagggccagaata

SEQ ID NO: 3165708 - DNA, 25 bp, Homo sapien
cttagtaacttaggctttgggcatg

SEQ ID NO: 3165709 - DNA, 25 bp, Homo sapien
tgggcatgggttgtgagggccagaa

SEQ ID NO: 3165710 - DNA, 25 bp, Homo sapien
agctttgcttacttagtaacttagg

SEQ ID NO: 3165711 - DNA, 25 bp, Homo sapien
tatacatgcatggacccaaatagaa

SEQ ID NO: 3165712 - DNA, 25 bp, Homo sapien
tagtgctacatctattagcatgggc

SEQ ID NO: 3165713 - DNA, 25 bp, Homo sapien
tagcatgggcaaacttgaaagtcat

SEQ ID NO: 3165714 - DNA, 25 bp, Homo sapien
tcttcccaagcccatgatatacatg

SEQ ID NO: 3165715 - DNA, 25 bp, Homo sapien
gtatatcctgaccaactaccctggg

SEQ ID NO: 3165716 - DNA, 25 bp, Homo sapien
tttgcagagcttccactataacgtc

SEQ ID NO: 3165717 - DNA, 25 bp, Homo sapien
actccttttgatatggtgcaccaca

SEQ ID NO: 3165718 - DNA, 25 bp, Homo sapien
agtacacatggagggattctcactc

SEQ ID NO: 3165719 - DNA, 25 bp, Homo sapien
caggagttggagaggtcctgggcaa

SEQ ID NO: 3165720 - DNA, 25 bp, Homo sapien
ggagttggagaggtcctgggcaaaa

SEQ ID NO: 3165721 - DNA, 25 bp, Homo sapien
gagttggagaggtcctgggcaaaat

SEQ ID NO: 3165722 - DNA, 25 bp, Homo sapien
gttggagaggtcctgggcaaaatgg

SEQ ID NO: 3165723 - DNA, 25 bp, Homo sapien
gaacaaagaacatgtgagattgcct

SEQ ID NO: 3165724 - DNA, 25 bp, Homo sapien
tacaggacaatattatacccaggat

SEQ ID NO: 3165725 - DNA, 25 bp, Homo sapien
taaaatacttatatagtgccgggtg

SEQ ID NO: 3165726 - DNA, 25 bp, Homo sapien
caaaagggtccctcatgttgcctta

SEQ ID NO: 3165727 - DNA, 25 bp, Homo sapien
tgactttggaacctattactagact

SEQ ID NO: 3165728 - DNA, 25 bp, Homo sapien
gtgactttggaacctattactagac

SEQ ID NO: 3165729 - DNA, 25 bp, Homo sapien
cttgcctgtggactagcttcacagc

SEQ ID NO: 3165730 - DNA, 25 bp, Homo sapien
ttgcctgtggactagcttcacagct

SEQ ID NO: 3165731 - DNA, 25 bp, Homo sapien
cctgtggactagcttcacagcttca

SEQ ID NO: 3165732 - DNA, 25 bp, Homo sapien
tgcctgtggactagcttcacagctt

SEQ ID NO: 3165733 - DNA, 25 bp, Homo sapien
tcaaacttcaacacaaacttaatgg

SEQ ID NO: 3165734 - DNA, 25 bp, Homo sapien
aacttcaacacaaacttaatggcct

SEQ ID NO: 3165735 - DNA, 25 bp, Homo sapien
ttcaacacaaacttaatggccttta

SEQ ID NO: 3165736 - DNA, 25 bp, Homo sapien
caaacttcaacacaaacttaatggc

SEQ ID NO: 3165737 - DNA, 25 bp, Homo sapien
tcccctgccacttaacagtgacttt

SEQ ID NO: 3165738 - DNA, 25 bp, Homo sapien
agagaaagtgttgggtacaacctag

SEQ ID NO: 3165739 - DNA, 25 bp, Homo sapien
tctttatcccattgtagttctagaa

SEQ ID NO: 3165740 - DNA, 25 bp, Homo sapien
ttagttgtaggaggacaaatcccca

SEQ ID NO: 3165741 - DNA, 25 bp, Homo sapien
gggactgatccttacaaaggtcttg

SEQ ID NO: 3165742 - DNA, 25 bp, Homo sapien
gcttcttatctctcttggaaccacg

SEQ ID NO: 3165743 - DNA, 25 bp, Homo sapien
tattagaaaactgtcgaccaatgca

SEQ ID NO: 3165744 - DNA, 25 bp, Homo sapien
tttactctaggccagcggtgggact

SEQ ID NO: 3165745 - DNA, 25 bp, Homo sapien
gttccaggagacaagaagtattagt

SEQ ID NO: 3165746 - DNA, 25 bp, Homo sapien
attggctgggagcatagctaaggct

SEQ ID NO: 3165747 - DNA, 25 bp, Homo sapien
tagttaccagcctcttaatgcttgg

SEQ ID NO: 3165748 - DNA, 25 bp, Homo sapien
ggctgtcaactggaacacatatgca

SEQ ID NO: 3165749 - DNA, 25 bp, Homo sapien
tttgaatcacgatgtccgtatatga

SEQ ID NO: 3165750 - DNA, 25 bp, Homo sapien
tttctttgaatcacgatgtccgtat

SEQ ID NO: 3165751 - DNA, 25 bp, Homo sapien
cacgatgtccgtatatgattctgaa

SEQ ID NO: 3165752 - DNA, 25 bp, Homo sapien
tgtccgtatatgattctgaaaggtg

SEQ ID NO: 3165753 - DNA, 25 bp, Homo sapien
catcacagggatacctgcttgagca

SEQ ID NO: 3165754 - DNA, 25 bp, Homo sapien
tgacatcacagggatacctgcttga

SEQ ID NO: 3165755 - DNA, 25 bp, Homo sapien
cacagggatacctgcttgagcagca

SEQ ID NO: 3165756 - DNA, 25 bp, Homo sapien
gcagcatccttttgtatgtcacata

SEQ ID NO: 3165757 - DNA, 25 bp, Homo sapien
atcagacgtaatcaactttggaata

SEQ ID NO: 3165758 - DNA, 25 bp, Homo sapien
tcagacgtaatcaactttggaatac

SEQ ID NO: 3165759 - DNA, 25 bp, Homo sapien
ggatcgtggacatagttgataccca

SEQ ID NO: 3165760 - DNA, 25 bp, Homo sapien
cacatctccaactaattttgtcttt

SEQ ID NO: 3165761 - DNA, 25 bp, Homo sapien
tagttgatacccacatcaattacag

SEQ ID NO: 3165762 - DNA, 25 bp, Homo sapien
tcctgtcactggatcgtggacatag

SEQ ID NO: 3165763 - DNA, 25 bp, Homo sapien
acctatcaaaagatattggtttatt

SEQ ID NO: 3165764 - DNA, 25 bp, Homo sapien
tcacctatcaaaagatattggttta

SEQ ID NO: 3165765 - DNA, 25 bp, Homo sapien
cacctatcaaaagatattggtttat

SEQ ID NO: 3165766 - DNA, 25 bp, Homo sapien
attgagatgttcattatcgtggcat

SEQ ID NO: 3165767 - DNA, 25 bp, Homo sapien
ttgagatgttcattatcgtggcatc

SEQ ID NO: 3165768 - DNA, 25 bp, Homo sapien
cagaaaagctgcaagattgatggac

SEQ ID NO: 3165769 - DNA, 25 bp, Homo sapien
gaaaagctgcaagattgatggacac

SEQ ID NO: 3165770 - DNA, 25 bp, Homo sapien
agagaaaacataaatccgatatggg

SEQ ID NO: 3165771 - DNA, 25 bp, Homo sapien
tcagagaaagatttgtaaagctgca

SEQ ID NO: 3165772 - DNA, 25 bp, Homo sapien
cagtgtctggttatgtagaggctca

SEQ ID NO: 3165773 - DNA, 25 bp, Homo sapien
gacatggaagaggtaggcagtgtct

SEQ ID NO: 3165774 - DNA, 25 bp, Homo sapien
taatgaagtgagtttaatatctggg

SEQ ID NO: 3165775 - DNA, 25 bp, Homo sapien
gagatgcaggagtaaagacagagtt

SEQ ID NO: 3165776 - DNA, 25 bp, Homo sapien
catgtttgatgttctgaaaagcatc

SEQ ID NO: 3165777 - DNA, 25 bp, Homo sapien
tgaaaagcatcttccccaatcatgc

SEQ ID NO: 3165778 - DNA, 25 bp, Homo sapien
gatgttctgaaaagcatcttcccca

SEQ ID NO: 3165779 - DNA, 25 bp, Homo sapien
ctattcatgtttgatgttctgaaaa

SEQ ID NO: 3165780 - DNA, 25 bp, Homo sapien
actttgaaaggtaaagcagctttga

SEQ ID NO: 3165781 - DNA, 25 bp, Homo sapien
gtattatcatgacctaaacgagtag

SEQ ID NO: 3165782 - DNA, 25 bp, Homo sapien
tatatcagaaaacctattgtgggta

SEQ ID NO: 3165783 - DNA, 25 bp, Homo sapien
ccattccaatgcaactgtattatca

SEQ ID NO: 3165784 - DNA, 25 bp, Homo sapien
cctggaactggagtgataaagccag

SEQ ID NO: 3165785 - DNA, 25 bp, Homo sapien
agcattgccactgtcatgggtccca

SEQ ID NO: 3165786 - DNA, 25 bp, Homo sapien
gaagcattgccactgtcatgggtcc

SEQ ID NO: 3165787 - DNA, 25 bp, Homo sapien
cattgccactgtcatgggtcccaca

SEQ ID NO: 3165788 - DNA, 25 bp, Homo sapien
aagggtgttcttcagaagcattgcc

SEQ ID NO: 3165789 - DNA, 25 bp, Homo sapien
tagtaaatgatttttttagctgcca

SEQ ID NO: 3165790 - DNA, 25 bp, Homo sapien
agtaaatgatttttttagctgccag

SEQ ID NO: 3165791 - DNA, 25 bp, Homo sapien
ctagtaaatgatttttttagctgcc

SEQ ID NO: 3165792 - DNA, 25 bp, Homo sapien
tacacactgataaagacatgcgctg

SEQ ID NO: 3165793 - DNA, 25 bp, Homo sapien
tatgggtaaccatttggctgacagg

SEQ ID NO: 3165794 - DNA, 25 bp, Homo sapien
tacataaacatactgggatttgggc

SEQ ID NO: 3165795 - DNA, 25 bp, Homo sapien
gaaacattgcatctactttgaggaa

SEQ ID NO: 3165796 - DNA, 25 bp, Homo sapien
atggctcccacttaacaatctttac

SEQ ID NO: 3165797 - DNA, 25 bp, Homo sapien
ggaaagtccactcccttcacatctt

SEQ ID NO: 3165798 - DNA, 25 bp, Homo sapien
tcctctcacccaaaagtcctttctc

SEQ ID NO: 3165799 - DNA, 25 bp, Homo sapien
taacaatctttacaggaaagtccac

SEQ ID NO: 3165800 - DNA, 25 bp, Homo sapien
tctttctcttatccttctagactga

SEQ ID NO: 3165801 - DNA, 25 bp, Homo sapien
tttctcttatccttctagactgacg

SEQ ID NO: 3165802 - DNA, 25 bp, Homo sapien
tcctgtagttgcttaactttctttc

SEQ ID NO: 3165803 - DNA, 25 bp, Homo sapien
tgtagttgcttaactttctttctct

SEQ ID NO: 3165804 - DNA, 25 bp, Homo sapien
ctgatattggaactcccaaagccat

SEQ ID NO: 3165805 - DNA, 25 bp, Homo sapien
agatagactgatattggaactccca

SEQ ID NO: 3165806 - DNA, 25 bp, Homo sapien
tgaataaaagatagactgatattgg

SEQ ID NO: 3165807 - DNA, 25 bp, Homo sapien
tagactgatattggaactcccaaag

SEQ ID NO: 3165808 - DNA, 25 bp, Homo sapien
tcacggctgcctcttcggtcagtgc

SEQ ID NO: 3165809 - DNA, 25 bp, Homo sapien
gctgtgattggaggtgttacagtca

SEQ ID NO: 3165810 - DNA, 25 bp, Homo sapien
ggtgttacagtcacggctgcctctt

SEQ ID NO: 3165811 - DNA, 25 bp, Homo sapien
gctgcctcttcggtcagtgctgtca

SEQ ID NO: 3165812 - DNA, 25 bp, Homo sapien
tctgttttgttaactgtccagttac

SEQ ID NO: 3165813 - DNA, 25 bp, Homo sapien
ttctgttttgttaactgtccagtta

SEQ ID NO: 3165814 - DNA, 25 bp, Homo sapien
cttctgttttgttaactgtccagtt

SEQ ID NO: 3165815 - DNA, 25 bp, Homo sapien
caagcaccgttgatgcagtaactgt

SEQ ID NO: 3165816 - DNA, 25 bp, Homo sapien
tctctagctcatggtggaatgcaca

SEQ ID NO: 3165817 - DNA, 25 bp, Homo sapien
tccaggcaaaggtgtgagaacttca

SEQ ID NO: 3165818 - DNA, 25 bp, Homo sapien
cagtaactgttatgatcttccaggc

SEQ ID NO: 3165819 - DNA, 25 bp, Homo sapien
ttctccagtataaccagtaaaacac

SEQ ID NO: 3165820 - DNA, 25 bp, Homo sapien
tttctccagtataaccagtaaaaca

SEQ ID NO: 3165821 - DNA, 25 bp, Homo sapien
tatttttcataagaatccacagcat

SEQ ID NO: 3165822 - DNA, 25 bp, Homo sapien
tccacagcatatgaagttaaagtca

SEQ ID NO: 3165823 - DNA, 25 bp, Homo sapien
caatcccaattgcaatgtatttttc

SEQ ID NO: 3165824 - DNA, 25 bp, Homo sapien
accacttaatagtaatccaacacca

SEQ ID NO: 3165825 - DNA, 25 bp, Homo sapien
tgcctgacacattatagggcctgaa

SEQ ID NO: 3165826 - DNA, 25 bp, Homo sapien
tagaaactttttgccagattacagc

SEQ ID NO: 3165827 - DNA, 25 bp, Homo sapien
gaagggagactgtacgtttgaactc

SEQ ID NO: 3165828 - DNA, 25 bp, Homo sapien
aggcaaatttttaccactcgtctgg

SEQ ID NO: 3165829 - DNA, 25 bp, Homo sapien
catctaggtggtaaaaaacgctggg

SEQ ID NO: 3165830 - DNA, 25 bp, Homo sapien
tgaagaacccaagcgaggcattgct

SEQ ID NO: 3165831 - DNA, 25 bp, Homo sapien
tgagcaaatagacttagagaggccc

SEQ ID NO: 3165832 - DNA, 25 bp, Homo sapien
gcaaagtctaaaggccaacgctgaa

SEQ ID NO: 3165833 - DNA, 25 bp, Homo sapien
cacatgctgtggtctggtgaaaaaa

SEQ ID NO: 3165834 - DNA, 25 bp, Homo sapien
gagacttccaggatttcggtccaaa

SEQ ID NO: 3165835 - DNA, 25 bp, Homo sapien
tccctctatgtgcaaatctgttaac

SEQ ID NO: 3165836 - DNA, 25 bp, Homo sapien
gtccaaatgaatggtcaccaggtaa

SEQ ID NO: 3165837 - DNA, 25 bp, Homo sapien
tggttatcataagccacactctgag

SEQ ID NO: 3165838 - DNA, 25 bp, Homo sapien
tctagctccataggaatgtcagaga

SEQ ID NO: 3165839 - DNA, 25 bp, Homo sapien
cattgacagatgtggttctagctcc

SEQ ID NO: 3165840 - DNA, 25 bp, Homo sapien
gtttccatacaatctcacagggtag

SEQ ID NO: 3165841 - DNA, 25 bp, Homo sapien
ggttaacaaatctaggtcatcagac

SEQ ID NO: 3165842 - DNA, 25 bp, Homo sapien
acaaatctaggtcatcagacaccat

SEQ ID NO: 3165843 - DNA, 25 bp, Homo sapien
taacaaatctaggtcatcagacacc

SEQ ID NO: 3165844 - DNA, 25 bp, Homo sapien
atggttaacaaatctaggtcatcag

SEQ ID NO: 3165845 - DNA, 25 bp, Homo sapien
tcattctcataaaggtttcaatttt

SEQ ID NO: 3165846 - DNA, 25 bp, Homo sapien
atttttcatgacagttttaagagac

SEQ ID NO: 3165847 - DNA, 25 bp, Homo sapien
ttgttcattatgtaaccttgcagca

SEQ ID NO: 3165848 - DNA, 25 bp, Homo sapien
caggcagctatacttgggtatttct

SEQ ID NO: 3165849 - DNA, 25 bp, Homo sapien
gccagtctcgtgaacattagagcac

SEQ ID NO: 3165850 - DNA, 25 bp, Homo sapien
tctatatagctacctgtaacgccag

SEQ ID NO: 3165851 - DNA, 25 bp, Homo sapien
tcccatgtaccgtgggtctccaaaa

SEQ ID NO: 3165852 - DNA, 25 bp, Homo sapien
cctggaccatgttaggttacttgac

SEQ ID NO: 3165853 - DNA, 25 bp, Homo sapien
ctggagagcggctgtcagcctagaa

SEQ ID NO: 3165854 - DNA, 25 bp, Homo sapien
agcagacgggctcgcggcagtggct

SEQ ID NO: 3165855 - DNA, 25 bp, Homo sapien
cagggcgggagcagacgggctcgcg

SEQ ID NO: 3165856 - DNA, 25 bp, Homo sapien
ccacgttggctgtgtccctctgaca

SEQ ID NO: 3165857 - DNA, 25 bp, Homo sapien
gcgggcgctggggcttggcggaggg

SEQ ID NO: 3165858 - DNA, 25 bp, Homo sapien
cgggcgctggggcttggcggagggc

SEQ ID NO: 3165859 - DNA, 25 bp, Homo sapien
agcgcagggaccctgccggcacaga

SEQ ID NO: 3165860 - DNA, 25 bp, Homo sapien
gcagcgcagggaccctgccggcaca

SEQ ID NO: 3165861 - DNA, 25 bp, Homo sapien
cagcagcgcagggaccctgccggca

SEQ ID NO: 3165862 - DNA, 25 bp, Homo sapien
aggcagagcagcagcgcagggaccc

SEQ ID NO: 3165863 - DNA, 25 bp, Homo sapien
ttatttctcttgtgtctggagctca

SEQ ID NO: 3165864 - DNA, 25 bp, Homo sapien
gctcagccaactggcactggcgcat

SEQ ID NO: 3165865 - DNA, 25 bp, Homo sapien
gcactggcgcataccagctcctccg

SEQ ID NO: 3165866 - DNA, 25 bp, Homo sapien
gccaactggcactggcgcataccag

SEQ ID NO: 3165867 - DNA, 25 bp, Homo sapien
tttccctgcaactgagctgccttat

SEQ ID NO: 3165868 - DNA, 25 bp, Homo sapien
ttccctgcaactgagctgccttatc

SEQ ID NO: 3165869 - DNA, 25 bp, Homo sapien
tccctgcaactgagctgccttatct

SEQ ID NO: 3165870 - DNA, 25 bp, Homo sapien
tcgtgacgctcccttggacacagtc

SEQ ID NO: 3165871 - DNA, 25 bp, Homo sapien
cattgtcagttgaacagagttgaaa

SEQ ID NO: 3165872 - DNA, 25 bp, Homo sapien
gttgcacgtgcttacatccttgaca

SEQ ID NO: 3165873 - DNA, 25 bp, Homo sapien
gaattgcctccaattgcaacctgca

SEQ ID NO: 3165874 - DNA, 25 bp, Homo sapien
acagtttcctcggtacaaattggag

SEQ ID NO: 3165875 - DNA, 25 bp, Homo sapien
ttgtactgaggactgcctgtagaag

SEQ ID NO: 3165876 - DNA, 25 bp, Homo sapien
gttatcactggactctcctgggata

SEQ ID NO: 3165877 - DNA, 25 bp, Homo sapien
gaaagttgaatatattctgcagcct

SEQ ID NO: 3165878 - DNA, 25 bp, Homo sapien
gtggaaagttgaatatattctgcag

SEQ ID NO: 3165879 - DNA, 25 bp, Homo sapien
aagttgaatatattctgcagccttc

SEQ ID NO: 3165880 - DNA, 25 bp, Homo sapien
gttgaatatattctgcagccttcat

SEQ ID NO: 3165881 - DNA, 25 bp, Homo sapien
aaacaatagccattcatgtcagagc

SEQ ID NO: 3165882 - DNA, 25 bp, Homo sapien
tattgacacttgagccacacgtgga

SEQ ID NO: 3165883 - DNA, 25 bp, Homo sapien
tcatgtccaccagatagatgcactg

SEQ ID NO: 3165884 - DNA, 25 bp, Homo sapien
cacacgtggattgtcttctgtctga

SEQ ID NO: 3165885 - DNA, 25 bp, Homo sapien
gggtaggtactctaaaagctcagac

SEQ ID NO: 3165886 - DNA, 25 bp, Homo sapien
catcttggcaagtgtgagaagcatc

SEQ ID NO: 3165887 - DNA, 25 bp, Homo sapien
gggttccatgcacactatttgaggg

SEQ ID NO: 3165888 - DNA, 25 bp, Homo sapien
gcgtccggcctggaatcaattctta

SEQ ID NO: 3165889 - DNA, 25 bp, Homo sapien
caaaatttgctaaagattgtaaaga

SEQ ID NO: 3165890 - DNA, 25 bp, Homo sapien
gaccagtaatgataaaagggctcca

SEQ ID NO: 3165891 - DNA, 25 bp, Homo sapien
taaggactaacatcacactgtaatg

SEQ ID NO: 3165892 - DNA, 25 bp, Homo sapien
tcaaagattgagttagaccagtaat

SEQ ID NO: 3165893 - DNA, 25 bp, Homo sapien
taataagaatcacggtcaaagccac

SEQ ID NO: 3165894 - DNA, 25 bp, Homo sapien
tcggacaccagtataacccacttca

SEQ ID NO: 3165895 - DNA, 25 bp, Homo sapien
aaaagaagtgttcacatcggacacc

SEQ ID NO: 3165896 - DNA, 25 bp, Homo sapien
ggaaccgacgactgtgataagaaac

SEQ ID NO: 3165897 - DNA, 25 bp, Homo sapien
tcagacttgcggcaactctggatcc

SEQ ID NO: 3165898 - DNA, 25 bp, Homo sapien
cctgaggtaactctctcatattcct

SEQ ID NO: 3165899 - DNA, 25 bp, Homo sapien
tctggatcccctgaggtaactctct

SEQ ID NO: 3165900 - DNA, 25 bp, Homo sapien
ggcaactctggatcccctgaggtaa

SEQ ID NO: 3165901 - DNA, 25 bp, Homo sapien
caattcttgagctatgacctgggaa

SEQ ID NO: 3165902 - DNA, 25 bp, Homo sapien
taatgttagaattcagcaaagcccc

SEQ ID NO: 3165903 - DNA, 25 bp, Homo sapien
ccagggccaggactttagatgacag

SEQ ID NO: 3165904 - DNA, 25 bp, Homo sapien
tagcattcgatgaaggagcctccca

SEQ ID NO: 3165905 - DNA, 25 bp, Homo sapien
ctttggagtgtttaacttgaagtga

SEQ ID NO: 3165906 - DNA, 25 bp, Homo sapien
ctggtctaccctgcagacaaggtgc

SEQ ID NO: 3165907 - DNA, 25 bp, Homo sapien
gttgtgatatcctgcatggacaagg

SEQ ID NO: 3165908 - DNA, 25 bp, Homo sapien
acccacttgggaacactttgatgca

SEQ ID NO: 3165909 - DNA, 25 bp, Homo sapien
ctttgatgcattggctatgattgtc

SEQ ID NO: 3165910 - DNA, 25 bp, Homo sapien
ttctctttacagaggctgttgtgat

SEQ ID NO: 3165911 - DNA, 25 bp, Homo sapien
acctgtgatcctgtggacgacctga

SEQ ID NO: 3165912 - DNA, 25 bp, Homo sapien
agccctggtatcacttgggttccct

SEQ ID NO: 3165913 - DNA, 25 bp, Homo sapien
tgatcctgtggacgacctgaagtac

SEQ ID NO: 3165914 - DNA, 25 bp, Homo sapien
ctgaagccctggtatcacttgggtt

SEQ ID NO: 3165915 - DNA, 25 bp, Homo sapien
tgtggcttttgcagagcaagaactg

SEQ ID NO: 3165916 - DNA, 25 bp, Homo sapien
gctgagggcagtggatgattatata

SEQ ID NO: 3165917 - DNA, 25 bp, Homo sapien
tcaaggctcaactatactttcacgg

SEQ ID NO: 3165918 - DNA, 25 bp, Homo sapien
gtctctgtttaagtggaccttcgta

SEQ ID NO: 3165919 - DNA, 25 bp, Homo sapien
ctttataggctcagccgggaggggg

SEQ ID NO: 3165920 - DNA, 25 bp, Homo sapien
ccgctttataggctcagccgggagg

SEQ ID NO: 3165921 - DNA, 25 bp, Homo sapien
tttataggctcagccgggagggggc

SEQ ID NO: 3165922 - DNA, 25 bp, Homo sapien
ctgccgctttataggctcagccggg

SEQ ID NO: 3165923 - DNA, 25 bp, Homo sapien
ctcgggctgtcccgggacctctggg

SEQ ID NO: 3165924 - DNA, 25 bp, Homo sapien
cctcgggctgtcccgggacctctgg

SEQ ID NO: 3165925 - DNA, 25 bp, Homo sapien
ctgccgccaaaacgagcgggtgttg

SEQ ID NO: 3165926 - DNA, 25 bp, Homo sapien
ttggaagagcgagtggagaccggga

SEQ ID NO: 3165927 - DNA, 25 bp, Homo sapien
agagcgagtggagaccgggagtgtg

SEQ ID NO: 3165928 - DNA, 25 bp, Homo sapien
gggtgttggaagagcgagtggagac

SEQ ID NO: 3165929 - DNA, 25 bp, Homo sapien
ctggggcaactcggtctctgggaca

SEQ ID NO: 3165930 - DNA, 25 bp, Homo sapien
gggcaactcggtctctgggacacga

SEQ ID NO: 3165931 - DNA, 25 bp, Homo sapien
ggcaactcggtctctgggacacgag

SEQ ID NO: 3165932 - DNA, 25 bp, Homo sapien
tggggcaactcggtctctgggacac

SEQ ID NO: 3165933 - DNA, 25 bp, Homo sapien
tggtccttcgcagcggcggcgtctc

SEQ ID NO: 3165934 - DNA, 25 bp, Homo sapien
cttcgcagcggcggcgtctcggtct

SEQ ID NO: 3165935 - DNA, 25 bp, Homo sapien
tccttcgcagcggcggcgtctcggt

SEQ ID NO: 3165936 - DNA, 25 bp, Homo sapien
gtccttcgcagcggcggcgtctcgg

SEQ ID NO: 3165937 - DNA, 25 bp, Homo sapien
atcaagagcgacagcaccaccggcg

SEQ ID NO: 3165938 - DNA, 25 bp, Homo sapien
ctgagccgagtatcaagagcgacag

SEQ ID NO: 3165939 - DNA, 25 bp, Homo sapien
agtatcaagagcgacagcaccaccg

SEQ ID NO: 3165940 - DNA, 25 bp, Homo sapien
ccgagtatcaagagcgacagcacca

SEQ ID NO: 3165941 - DNA, 25 bp, Homo sapien
cgaggacggttcactactagaaggc

SEQ ID NO: 3165942 - DNA, 25 bp, Homo sapien
aatggttcacgcttcccagagtagg

SEQ ID NO: 3165943 - DNA, 25 bp, Homo sapien
gagtagtcatagtcggctcccgagg

SEQ ID NO: 3165944 - DNA, 25 bp, Homo sapien
ccagagtaggtgtcattgaggtcca

SEQ ID NO: 3165945 - DNA, 25 bp, Homo sapien
tggtactttcactccaagcaaaggg

SEQ ID NO: 3165946 - DNA, 25 bp, Homo sapien
ttggtactttcactccaagcaaagg

SEQ ID NO: 3165947 - DNA, 25 bp, Homo sapien
ggtactttcactccaagcaaagggc

SEQ ID NO: 3165948 - DNA, 25 bp, Homo sapien
tttggtactttcactccaagcaaag

SEQ ID NO: 3165949 - DNA, 25 bp, Homo sapien
taccacttgatgtcccttcaccagt

SEQ ID NO: 3165950 - DNA, 25 bp, Homo sapien
tggtaccacttgatgtcccttcacc

SEQ ID NO: 3165951 - DNA, 25 bp, Homo sapien
tgtccctctggtaccacttgatgtc

SEQ ID NO: 3165952 - DNA, 25 bp, Homo sapien
cctctggtaccacttgatgtccctt

SEQ ID NO: 3165953 - DNA, 25 bp, Homo sapien
gatgtcatagcagtgagcgctcaca

SEQ ID NO: 3165954 - DNA, 25 bp, Homo sapien
ggtaacagccatgcgtgcctcatta

SEQ ID NO: 3165955 - DNA, 25 bp, Homo sapien
ccatggagctcattttcgtggtcaa

SEQ ID NO: 3165956 - DNA, 25 bp, Homo sapien
tgagtactacttgcaggtggaaaaa

SEQ ID NO: 3165957 - DNA, 25 bp, Homo sapien
ctgaagtattttcactttccgtctt

SEQ ID NO: 3165958 - DNA, 25 bp, Homo sapien
tgaagtattttcactttccgtcttg

SEQ ID NO: 3165959 - DNA, 25 bp, Homo sapien
attacatggatttttcttctttctg

SEQ ID NO: 3165960 - DNA, 25 bp, Homo sapien
cattacatggatttttcttctttct

SEQ ID NO: 3165961 - DNA, 25 bp, Homo sapien
ttgcatgttactgcttccaggtgct

SEQ ID NO: 3165962 - DNA, 25 bp, Homo sapien
tgcatgttactgcttccaggtgctc

SEQ ID NO: 3165963 - DNA, 25 bp, Homo sapien
gttactgcttccaggtgctctatat

SEQ ID NO: 3165964 - DNA, 25 bp, Homo sapien
catgttactgcttccaggtgctcta

SEQ ID NO: 3165965 - DNA, 25 bp, Homo sapien
ttcaccgaaatattcttgctgacat

SEQ ID NO: 3165966 - DNA, 25 bp, Homo sapien
cgttcaccgaaatattcttgctgac

SEQ ID NO: 3165967 - DNA, 25 bp, Homo sapien
gttcaccgaaatattcttgctgaca

SEQ ID NO: 3165968 - DNA, 25 bp, Homo sapien
ataaaggcagctatggctgctaatg

SEQ ID NO: 3165969 - DNA, 25 bp, Homo sapien
ttttgataaactactgtcaatcatg

SEQ ID NO: 3165970 - DNA, 25 bp, Homo sapien
tggctgctaatgcaatttttgataa

SEQ ID NO: 3165971 - DNA, 25 bp, Homo sapien
tcatgctgtgagttttcatggactt

SEQ ID NO: 3165972 - DNA, 25 bp, Homo sapien
cttgacactaaacctaaacctggct

SEQ ID NO: 3165973 - DNA, 25 bp, Homo sapien
gaacttagtacagctgccatgcaca

SEQ ID NO: 3165974 - DNA, 25 bp, Homo sapien
cttcatgagtagtgatagaccagca

SEQ ID NO: 3165975 - DNA, 25 bp, Homo sapien
aacaggcttacaaaacaagttgagc

SEQ ID NO: 3165976 - DNA, 25 bp, Homo sapien
tccattctcttgtcgaagtttcttt

SEQ ID NO: 3165977 - DNA, 25 bp, Homo sapien
atttccattctcttgtcgaagtttc

SEQ ID NO: 3165978 - DNA, 25 bp, Homo sapien
tctcttgtcgaagtttctttcgttc

SEQ ID NO: 3165979 - DNA, 25 bp, Homo sapien
gtcgaagtttctttcgttcctcagc

SEQ ID NO: 3165980 - DNA, 25 bp, Homo sapien
tcagtgcaagcacccgcaactgtgg

SEQ ID NO: 3165981 - DNA, 25 bp, Homo sapien
gtgcccagccctcaagtaactctta

SEQ ID NO: 3165982 - DNA, 25 bp, Homo sapien
gagctcaacctatcatcacaactgt

SEQ ID NO: 3165983 - DNA, 25 bp, Homo sapien
catgccctcacattatcagtgcaag

SEQ ID NO: 3165984 - DNA, 25 bp, Homo sapien
cccattttatgaattattgagctaa

SEQ ID NO: 3165985 - DNA, 25 bp, Homo sapien
tactgagtttagcattggtatgaat

SEQ ID NO: 3165986 - DNA, 25 bp, Homo sapien
taaaaaatctcagtggcaaataacc

SEQ ID NO: 3165987 - DNA, 25 bp, Homo sapien
ctaaaataattctgggatctatgct

SEQ ID NO: 3165988 - DNA, 25 bp, Homo sapien
taccttcgtgcacctttatatacag

SEQ ID NO: 3165989 - DNA, 25 bp, Homo sapien
tccactggaaagaggaccgactcat

SEQ ID NO: 3165990 - DNA, 25 bp, Homo sapien
tatggctatgacttggcagtgactc

SEQ ID NO: 3165991 - DNA, 25 bp, Homo sapien
aaaagggtccattgtcttatgatcc

SEQ ID NO: 3165992 - DNA, 25 bp, Homo sapien
gggcacctgacgatccagaaaaatg

SEQ ID NO: 3165993 - DNA, 25 bp, Homo sapien
tgtccgggcacctgacgatccagaa

SEQ ID NO: 3165994 - DNA, 25 bp, Homo sapien
tccgggcacctgacgatccagaaaa

SEQ ID NO: 3165995 - DNA, 25 bp, Homo sapien
gcacctgacgatccagaaaaatgct

SEQ ID NO: 3165996 - DNA, 25 bp, Homo sapien
tccagttggagtgtgactgcagaaa

SEQ ID NO: 3165997 - DNA, 25 bp, Homo sapien
cttggatgtatgcacaaggctccag

SEQ ID NO: 3165998 - DNA, 25 bp, Homo sapien
cctttcatgattcattgcctgacag

SEQ ID NO: 3165999 - DNA, 25 bp, Homo sapien
gacagtgtgggaacactacatctgg

SEQ ID NO: 3166000 - DNA, 25 bp, Homo sapien
tgaagatttctgtccccgataaaaa

SEQ ID NO: 3166001 - DNA, 25 bp, Homo sapien
gcattgtgctctcttaatgttgaag

SEQ ID NO: 3166002 - DNA, 25 bp, Homo sapien
tatctgtgcaatagcagcattgtgc

SEQ ID NO: 3166003 - DNA, 25 bp, Homo sapien
tcggtacctagaattcctggataac

SEQ ID NO: 3166004 - DNA, 25 bp, Homo sapien
tgtgcaatttttagtgcgtttacta

SEQ ID NO: 3166005 - DNA, 25 bp, Homo sapien
ccacttggtccttggtccagaggtg

SEQ ID NO: 3166006 - DNA, 25 bp, Homo sapien
gtgcgtttactaattctgagttcta

SEQ ID NO: 3166007 - DNA, 25 bp, Homo sapien
tgcttaggtatgttttactaccaat

SEQ ID NO: 3166008 - DNA, 25 bp, Homo sapien
gacctggtgttccaaaggcatgggc

SEQ ID NO: 3166009 - DNA, 25 bp, Homo sapien
aggaactggtgttccaaaagcagct

SEQ ID NO: 3166010 - DNA, 25 bp, Homo sapien
ggaactggtgttccaaaagcagctg

SEQ ID NO: 3166011 - DNA, 25 bp, Homo sapien
aaggaactggtgttccaaaagcagc

SEQ ID NO: 3166012 - DNA, 25 bp, Homo sapien
atttctatggctgcctcagcaccag

SEQ ID NO: 3166013 - DNA, 25 bp, Homo sapien
ttctgaactattgtagttttgaaat

SEQ ID NO: 3166014 - DNA, 25 bp, Homo sapien
tatggctgcctcagcaccagaaaat

SEQ ID NO: 3166015 - DNA, 25 bp, Homo sapien
aattttccatttctatggctgcctc

SEQ ID NO: 3166016 - DNA, 25 bp, Homo sapien
agaattcaaagttctggatcagacc

SEQ ID NO: 3166017 - DNA, 25 bp, Homo sapien
gagcctttgggaagtattgaaacac

SEQ ID NO: 3166018 - DNA, 25 bp, Homo sapien
taaaaaatatcacggcctccattga

SEQ ID NO: 3166019 - DNA, 25 bp, Homo sapien
ttctcttacactttcaggtgggcct

SEQ ID NO: 3166020 - DNA, 25 bp, Homo sapien
taataatgcttcagacaggtaaact

SEQ ID NO: 3166021 - DNA, 25 bp, Homo sapien
ccagacaaggtacagctaacaataa

SEQ ID NO: 3166022 - DNA, 25 bp, Homo sapien
ataataatgcttcagacaggtaaac

SEQ ID NO: 3166023 - DNA, 25 bp, Homo sapien
gagagccagacaaggtacagctaac

SEQ ID NO: 3166024 - DNA, 25 bp, Homo sapien
gactcaatcccaagatgtaagtgcc

SEQ ID NO: 3166025 - DNA, 25 bp, Homo sapien
agttggcaggacatgaatctggacc

SEQ ID NO: 3166026 - DNA, 25 bp, Homo sapien
tctgaagctagagatacccctaaac

SEQ ID NO: 3166027 - DNA, 25 bp, Homo sapien
gaagacagagaatcacagtggcatt

SEQ ID NO: 3166028 - DNA, 25 bp, Homo sapien
gttaatgaatgcgtgaatcagccac

SEQ ID NO: 3166029 - DNA, 25 bp, Homo sapien
caaagtagagtgacatgggtgcatt

SEQ ID NO: 3166030 - DNA, 25 bp, Homo sapien
cattctctgcataattggtgtcaag

SEQ ID NO: 3166031 - DNA, 25 bp, Homo sapien
caagatgcaatgaagtctgctgatc

SEQ ID NO: 3166032 - DNA, 25 bp, Homo sapien
agcatgggcacttggacgcctagtt

SEQ ID NO: 3166033 - DNA, 25 bp, Homo sapien
gcatgggcacttggacgcctagttt

SEQ ID NO: 3166034 - DNA, 25 bp, Homo sapien
tgttcattagtccacacttgttgag

SEQ ID NO: 3166035 - DNA, 25 bp, Homo sapien
gggatgttcacttggccgttgttca

SEQ ID NO: 3166036 - DNA, 25 bp, Homo sapien
ggtgtttcctcatcccatgggcatg

SEQ ID NO: 3166037 - DNA, 25 bp, Homo sapien
gagtcttctgttgttccagaatgaa

SEQ ID NO: 3166038 - DNA, 25 bp, Homo sapien
tagtcatccacataatagagaagta

SEQ ID NO: 3166039 - DNA, 25 bp, Homo sapien
tgagactctttaagtccttcatgag

SEQ ID NO: 3166040 - DNA, 25 bp, Homo sapien
gtagacactcacttggcatcccatg

SEQ ID NO: 3166041 - DNA, 25 bp, Homo sapien
gctacccaactggaccaactgtaga

SEQ ID NO: 3166042 - DNA, 25 bp, Homo sapien
tttcttgtagcctcagaaaggaggt

SEQ ID NO: 3166043 - DNA, 25 bp, Homo sapien
cttgtagcctcagaaaggaggttgg

SEQ ID NO: 3166044 - DNA, 25 bp, Homo sapien
ttcttgtagcctcagaaaggaggtt

SEQ ID NO: 3166045 - DNA, 25 bp, Homo sapien
tataagtcttctgagtcagattctt

SEQ ID NO: 3166046 - DNA, 25 bp, Homo sapien
gagtcagattcttaataattaactt

SEQ ID NO: 3166047 - DNA, 25 bp, Homo sapien
gttataagtcttctgagtcagattc

SEQ ID NO: 3166048 - DNA, 25 bp, Homo sapien
gtcagattcttaataattaacttca

SEQ ID NO: 3166049 - DNA, 25 bp, Homo sapien
ttttgctgagtatggtcagtgattt

SEQ ID NO: 3166050 - DNA, 25 bp, Homo sapien
tttggccagtgctgaactaatgttt

SEQ ID NO: 3166051 - DNA, 25 bp, Homo sapien
atccgatctactgggttttaccctg

SEQ ID NO: 3166052 - DNA, 25 bp, Homo sapien
gatttttatactgttatccgatcta

SEQ ID NO: 3166053 - DNA, 25 bp, Homo sapien
tgtattctaggggaatccttgggaa

SEQ ID NO: 3166054 - DNA, 25 bp, Homo sapien
cttgtattctaggggaatccttggg

SEQ ID NO: 3166055 - DNA, 25 bp, Homo sapien
tattctaggggaatccttgggaaca

SEQ ID NO: 3166056 - DNA, 25 bp, Homo sapien
tctaggggaatccttgggaacacag

SEQ ID NO: 3166057 - DNA, 25 bp, Homo sapien
tcagttcaactacgctctctgacat

SEQ ID NO: 3166058 - DNA, 25 bp, Homo sapien
tatgattggcgtttaagtaatttca

SEQ ID NO: 3166059 - DNA, 25 bp, Homo sapien
ctatgattggcgtttaagtaatttc

SEQ ID NO: 3166060 - DNA, 25 bp, Homo sapien
tcaaattcagttcaactacgctctc

SEQ ID NO: 3166061 - DNA, 25 bp, Homo sapien
taggagaatgcgatctggagcgccg

SEQ ID NO: 3166062 - DNA, 25 bp, Homo sapien
aaaggtgaggagagcccactttctt

SEQ ID NO: 3166063 - DNA, 25 bp, Homo sapien
tcttggtaggaggttgtaggagaat

SEQ ID NO: 3166064 - DNA, 25 bp, Homo sapien
aatgcgatctggagcgccgaaaggt

SEQ ID NO: 3166065 - DNA, 25 bp, Homo sapien
ctggaaaacgagctttgtctcttct

SEQ ID NO: 3166066 - DNA, 25 bp, Homo sapien
tctggaaaacgagctttgtctcttc

SEQ ID NO: 3166067 - DNA, 25 bp, Homo sapien
ttctggaaaacgagctttgtctctt

SEQ ID NO: 3166068 - DNA, 25 bp, Homo sapien
gctcctctccaaatgattcccttac

SEQ ID NO: 3166069 - DNA, 25 bp, Homo sapien
aaatgattcccttacatctccccta

SEQ ID NO: 3166070 - DNA, 25 bp, Homo sapien
tctccaaatgattcccttacatctc

SEQ ID NO: 3166071 - DNA, 25 bp, Homo sapien
tacatctcccctaccacccaggcat

SEQ ID NO: 3166072 - DNA, 25 bp, Homo sapien
ggaaccagaagtctgcaggtgcttg

SEQ ID NO: 3166073 - DNA, 25 bp, Homo sapien
agggcaggctcataccacaaggcaa

SEQ ID NO: 3166074 - DNA, 25 bp, Homo sapien
cagggcaggctcataccacaaggca

SEQ ID NO: 3166075 - DNA, 25 bp, Homo sapien
gcaggctcataccacaaggcaagga

SEQ ID NO: 3166076 - DNA, 25 bp, Homo sapien
gggaggcagatttgctggcattcct

SEQ ID NO: 3166077 - DNA, 25 bp, Homo sapien
gaagggaggcagatttgctggcatt

SEQ ID NO: 3166078 - DNA, 25 bp, Homo sapien
tggaagggaggcagatttgctggca

SEQ ID NO: 3166079 - DNA, 25 bp, Homo sapien
agggaggcagatttgctggcattcc

SEQ ID NO: 3166080 - DNA, 25 bp, Homo sapien
tctgccttctctggtcagacatttc

SEQ ID NO: 3166081 - DNA, 25 bp, Homo sapien
aattcttggtgaaatcttttctctg

SEQ ID NO: 3166082 - DNA, 25 bp, Homo sapien
ttgtccacagctgatttccaagttt

SEQ ID NO: 3166083 - DNA, 25 bp, Homo sapien
gaaaagctttgtccacagctgattt

SEQ ID NO: 3166084 - DNA, 25 bp, Homo sapien
aattataaggcagtctgcctgtatg

SEQ ID NO: 3166085 - DNA, 25 bp, Homo sapien
tataaggcagtctgcctgtatgtgg

SEQ ID NO: 3166086 - DNA, 25 bp, Homo sapien
aattcaattataaggcagtctgcct

SEQ ID NO: 3166087 - DNA, 25 bp, Homo sapien
tcaattataaggcagtctgcctgta

SEQ ID NO: 3166088 - DNA, 25 bp, Homo sapien
ggcatagggtaccatccagagctgc

SEQ ID NO: 3166089 - DNA, 25 bp, Homo sapien
ggagtatgggcatagggtaccatcc

SEQ ID NO: 3166090 - DNA, 25 bp, Homo sapien
gaaacttgacatgcatatactgagg

SEQ ID NO: 3166091 - DNA, 25 bp, Homo sapien
taacacttgttaagtaagaaccaga

SEQ ID NO: 3166092 - DNA, 25 bp, Homo sapien
tatgcttctgcaatgatctgtgaca

SEQ ID NO: 3166093 - DNA, 25 bp, Homo sapien
gtgacagcttttgaagatgtttggg

SEQ ID NO: 3166094 - DNA, 25 bp, Homo sapien
gatgtttgggggtttgtgtttcaca

SEQ ID NO: 3166095 - DNA, 25 bp, Homo sapien
ctgtgacagcttttgaagatgtttg

SEQ ID NO: 3166096 - DNA, 25 bp, Homo sapien
tggcagtttggacttttgtgatgaa

SEQ ID NO: 3166097 - DNA, 25 bp, Homo sapien
cagtttggacttttgtgatgaagga

SEQ ID NO: 3166098 - DNA, 25 bp, Homo sapien
ctcctgcaatccagggatgttcctt

SEQ ID NO: 3166099 - DNA, 25 bp, Homo sapien
tgcaatccagggatgttcctttctt

SEQ ID NO: 3166100 - DNA, 25 bp, Homo sapien
aagaaagttactgtgtgtatcccac

SEQ ID NO: 3166101 - DNA, 25 bp, Homo sapien
tccaggctgttgctaacgaatgtca

SEQ ID NO: 3166102 - DNA, 25 bp, Homo sapien
gcagctatggccagtaagagttctt

SEQ ID NO: 3166103 - DNA, 25 bp, Homo sapien
tctcctgggaacctaggcagaagtt

SEQ ID NO: 3166104 - DNA, 25 bp, Homo sapien
tacgtggagacctagggagattctg

SEQ ID NO: 3166105 - DNA, 25 bp, Homo sapien
taggcctctaatgccctgcagtaca

SEQ ID NO: 3166106 - DNA, 25 bp, Homo sapien
tgcagtacaactcttctacgtggag

SEQ ID NO: 3166107 - DNA, 25 bp, Homo sapien
cattggagcagtgttgaccctcaaa

SEQ ID NO: 3166108 - DNA, 25 bp, Homo sapien
tccatagagatagaggcagaaaagt

SEQ ID NO: 3166109 - DNA, 25 bp, Homo sapien
ccatagagatagaggcagaaaagtg

SEQ ID NO: 3166110 - DNA, 25 bp, Homo sapien
catagagatagaggcagaaaagtgc

SEQ ID NO: 3166111 - DNA, 25 bp, Homo sapien
ctgtgatgaaggctacattggagca

SEQ ID NO: 3166112 - DNA, 25 bp, Homo sapien
cttccttgccctcgtcttgttttat

SEQ ID NO: 3166113 - DNA, 25 bp, Homo sapien
caaggtgtgagagagttgacttgtt

SEQ ID NO: 3166114 - DNA, 25 bp, Homo sapien
tagagattcttaaaagtcttgcaag

SEQ ID NO: 3166115 - DNA, 25 bp, Homo sapien
gataggcaaaaagggctgatatgct

SEQ ID NO: 3166116 - DNA, 25 bp, Homo sapien
ctgcaaaacagggaggtatggataa

SEQ ID NO: 3166117 - DNA, 25 bp, Homo sapien
tgaaaggatcagacaacagattgtg

SEQ ID NO: 3166118 - DNA, 25 bp, Homo sapien
gagctcccagtgtagggcctgaaag

SEQ ID NO: 3166119 - DNA, 25 bp, Homo sapien
agcttgctctctgcatcatggtcat

SEQ ID NO: 3166120 - DNA, 25 bp, Homo sapien
tcttcaaagcttgctctctgcatca

SEQ ID NO: 3166121 - DNA, 25 bp, Homo sapien
caaagcttgctctctgcatcatggt

SEQ ID NO: 3166122 - DNA, 25 bp, Homo sapien
cttcaaagcttgctctctgcatcat

SEQ ID NO: 3166123 - DNA, 25 bp, Homo sapien
tggtagtatagaccaagaagcatat

SEQ ID NO: 3166124 - DNA, 25 bp, Homo sapien
ggtagtatagaccaagaagcatatc

SEQ ID NO: 3166125 - DNA, 25 bp, Homo sapien
gtggtagtatagaccaagaagcata

SEQ ID NO: 3166126 - DNA, 25 bp, Homo sapien
ctcctctcaaaacctgataaaatac

SEQ ID NO: 3166127 - DNA, 25 bp, Homo sapien
taaatgtaattcaggaaatatccag

SEQ ID NO: 3166128 - DNA, 25 bp, Homo sapien
tctgctggcatgagtcaagagagac

SEQ ID NO: 3166129 - DNA, 25 bp, Homo sapien
atctgggtggtccagatatgaccct

SEQ ID NO: 3166130 - DNA, 25 bp, Homo sapien
gatatgaccctccttcgacttccat

SEQ ID NO: 3166131 - DNA, 25 bp, Homo sapien
aagccagaggcatcagtaagagcag

SEQ ID NO: 3166132 - DNA, 25 bp, Homo sapien
tcaggtgagaactttgatgtcttcc

SEQ ID NO: 3166133 - DNA, 25 bp, Homo sapien
cagaggcatcagtaagagcagctgt

SEQ ID NO: 3166134 - DNA, 25 bp, Homo sapien
ccacacctctatttgcaaagccaga

SEQ ID NO: 3166135 - DNA, 25 bp, Homo sapien
caaagaagaaggatagggctttcct

SEQ ID NO: 3166136 - DNA, 25 bp, Homo sapien
cttcctccaaagaagaaggataggg

SEQ ID NO: 3166137 - DNA, 25 bp, Homo sapien
tcctccaaagaagaaggatagggct

SEQ ID NO: 3166138 - DNA, 25 bp, Homo sapien
agaaggatagggctttccttttcat

SEQ ID NO: 3166139 - DNA, 25 bp, Homo sapien
gaagaaataactgtgcacgctcaag

SEQ ID NO: 3166140 - DNA, 25 bp, Homo sapien
gaaacccatgaagtaacatgaagaa

SEQ ID NO: 3166141 - DNA, 25 bp, Homo sapien
atgttttatactaactcccctcaca

SEQ ID NO: 3166142 - DNA, 25 bp, Homo sapien
ctcacatttgcacatgaaacccatg

SEQ ID NO: 3166143 - DNA, 25 bp, Homo sapien
ctcttcacagtatattttatggaat

SEQ ID NO: 3166144 - DNA, 25 bp, Homo sapien
ttcacagtatattttatggaatttt

SEQ ID NO: 3166145 - DNA, 25 bp, Homo sapien
cacagtatattttatggaatttttc

SEQ ID NO: 3166146 - DNA, 25 bp, Homo sapien
tggaatttttctgtaaagtatacat

SEQ ID NO: 3166147 - DNA, 25 bp, Homo sapien
ggaaggggagatatctatctgcagc

SEQ ID NO: 3166148 - DNA, 25 bp, Homo sapien
catctgcgttcagggcctgatgatt

SEQ ID NO: 3166149 - DNA, 25 bp, Homo sapien
tgaatgatatgggtacgtaaggaag

SEQ ID NO: 3166150 - DNA, 25 bp, Homo sapien
ttagtagttgaatgatatgggtacg

SEQ ID NO: 3166151 - DNA, 25 bp, Homo sapien
tttgactgttgtctgcacatgcacc

SEQ ID NO: 3166152 - DNA, 25 bp, Homo sapien
tggacaccaggaacatatacacttt

SEQ ID NO: 3166153 - DNA, 25 bp, Homo sapien
catagaattcgggacactcagtgcc

SEQ ID NO: 3166154 - DNA, 25 bp, Homo sapien
cccactctctgagagattcatagaa

SEQ ID NO: 3166155 - DNA, 25 bp, Homo sapien
tgtcagtccacaagcaccattgttg

SEQ ID NO: 3166156 - DNA, 25 bp, Homo sapien
tggtcccatgtgtaggcacttgctc

SEQ ID NO: 3166157 - DNA, 25 bp, Homo sapien
tgactgttggttctgagtggtccca

SEQ ID NO: 3166158 - DNA, 25 bp, Homo sapien
gtatgtgtatgttcagcctgtggtc

SEQ ID NO: 3166159 - DNA, 25 bp, Homo sapien
cttctttgcttggtgacttcctgtt

SEQ ID NO: 3166160 - DNA, 25 bp, Homo sapien
agcagccactcttctttgcttggtg

SEQ ID NO: 3166161 - DNA, 25 bp, Homo sapien
tcacagcagccactcttctttgctt

SEQ ID NO: 3166162 - DNA, 25 bp, Homo sapien
ctttgcttggtgacttcctgtttag

SEQ ID NO: 3166163 - DNA, 25 bp, Homo sapien
gcatcactgtgctagctatcatgaa

SEQ ID NO: 3166164 - DNA, 25 bp, Homo sapien
gagaacagctctaccatatctttgg

SEQ ID NO: 3166165 - DNA, 25 bp, Homo sapien
tccaattgcatttggctggtgcagc

SEQ ID NO: 3166166 - DNA, 25 bp, Homo sapien
tgaagctttctgcatgtctcaggca

SEQ ID NO: 3166167 - DNA, 25 bp, Homo sapien
aatttccagtgacttcgaaagcgcc

SEQ ID NO: 3166168 - DNA, 25 bp, Homo sapien
gatgtttaataccatggcttctgag

SEQ ID NO: 3166169 - DNA, 25 bp, Homo sapien
ggtactctagtcaacaccttgctaa

SEQ ID NO: 3166170 - DNA, 25 bp, Homo sapien
tgctaatctactgaaattgctgtgg

SEQ ID NO: 3166171 - DNA, 25 bp, Homo sapien
tgtaaatccttttatcaacacatat

SEQ ID NO: 3166172 - DNA, 25 bp, Homo sapien
gaagatgtcgatctgcatttcattg

SEQ ID NO: 3166173 - DNA, 25 bp, Homo sapien
ggaatttattgttccagagttctag

SEQ ID NO: 3166174 - DNA, 25 bp, Homo sapien
ccaaaatgaagatgtcgatctgcat

SEQ ID NO: 3166175 - DNA, 25 bp, Homo sapien
aggaatttattgttccagagttcta

SEQ ID NO: 3166176 - DNA, 25 bp, Homo sapien
agtctcgtctcttcacattataatc

SEQ ID NO: 3166177 - DNA, 25 bp, Homo sapien
caagttagctcactcctggtctttc

SEQ ID NO: 3166178 - DNA, 25 bp, Homo sapien
ataatcatcatgtgtgatgtcaggg

SEQ ID NO: 3166179 - DNA, 25 bp, Homo sapien
tccttggtatcattcaagttagctc

SEQ ID NO: 3166180 - DNA, 25 bp, Homo sapien
caaagccgtcatctcctgatatctt

SEQ ID NO: 3166181 - DNA, 25 bp, Homo sapien
tatcttgacaagtgctctttccact

SEQ ID NO: 3166182 - DNA, 25 bp, Homo sapien
ttagtgacagaactcacaaagccgt

SEQ ID NO: 3166183 - DNA, 25 bp, Homo sapien
actggttagtgacagaactcacaaa

SEQ ID NO: 3166184 - DNA, 25 bp, Homo sapien
tgtatgtaggggtagctctttttgg

SEQ ID NO: 3166185 - DNA, 25 bp, Homo sapien
cccactttgacgtctgtatgtaggg

SEQ ID NO: 3166186 - DNA, 25 bp, Homo sapien
caagcccactttgacgtctgtatgt

SEQ ID NO: 3166187 - DNA, 25 bp, Homo sapien
gcccactttgacgtctgtatgtagg

SEQ ID NO: 3166188 - DNA, 25 bp, Homo sapien
caaaagcaacattatatccctccat

SEQ ID NO: 3166189 - DNA, 25 bp, Homo sapien
agcaacattatatccctccatttca

SEQ ID NO: 3166190 - DNA, 25 bp, Homo sapien
tttcaaaagcaacattatatccctc

SEQ ID NO: 3166191 - DNA, 25 bp, Homo sapien
aagcaacattatatccctccatttc

SEQ ID NO: 3166192 - DNA, 25 bp, Homo sapien
cttgtttttcgccttccgtggctat

SEQ ID NO: 3166193 - DNA, 25 bp, Homo sapien
agaccgtatgtggaattcagtcccc

SEQ ID NO: 3166194 - DNA, 25 bp, Homo sapien
gctatcctattttctatgccatgca

SEQ ID NO: 3166195 - DNA, 25 bp, Homo sapien
tatgccatgcacagaccgtatgtgg

SEQ ID NO: 3166196 - DNA, 25 bp, Homo sapien
cccctgaagcaatcagggtgcaaga

SEQ ID NO: 3166197 - DNA, 25 bp, Homo sapien
caatcagggtgcaagaggtcactgg

SEQ ID NO: 3166198 - DNA, 25 bp, Homo sapien
cactggtggtgaaacgaatagatgt

SEQ ID NO: 3166199 - DNA, 25 bp, Homo sapien
gctgatgagcacaataaatctgccc

SEQ ID NO: 3166200 - DNA, 25 bp, Homo sapien
tagtccatgcagttcacttccctgc

SEQ ID NO: 3166201 - DNA, 25 bp, Homo sapien
ctagtccatgcagttcacttccctg

SEQ ID NO: 3166202 - DNA, 25 bp, Homo sapien
atggatgtctctatacccactgaag

SEQ ID NO: 3166203 - DNA, 25 bp, Homo sapien
tagcctggtatttggtgcccagccc

SEQ ID NO: 3166204 - DNA, 25 bp, Homo sapien
gcactgggcgctggtagcgactcct

SEQ ID NO: 3166205 - DNA, 25 bp, Homo sapien
caaacgaggcgaacgcagcgcagct

SEQ ID NO: 3166206 - DNA, 25 bp, Homo sapien
tttgcggactgacagagcgcactgg

SEQ ID NO: 3166207 - DNA, 25 bp, Homo sapien
gagcgaagagagtcttgtagaccat

SEQ ID NO: 3166208 - DNA, 25 bp, Homo sapien
gatgcaaagagcgaagagagtcttg

SEQ ID NO: 3166209 - DNA, 25 bp, Homo sapien
agttaagatgcaaagagcgaagaga

SEQ ID NO: 3166210 - DNA, 25 bp, Homo sapien
caaagagcgaagagagtcttgtaga

SEQ ID NO: 3166211 - DNA, 25 bp, Homo sapien
cttcatctgtaacttgagaggacaa

SEQ ID NO: 3166212 - DNA, 25 bp, Homo sapien
tctgtaacttgagaggacaatgtct

SEQ ID NO: 3166213 - DNA, 25 bp, Homo sapien
tcatctgtaacttgagaggacaatg

SEQ ID NO: 3166214 - DNA, 25 bp, Homo sapien
catctgtaacttgagaggacaatgt

SEQ ID NO: 3166215 - DNA, 25 bp, Homo sapien
aaagtgctgtgtctttgagcacctt

SEQ ID NO: 3166216 - DNA, 25 bp, Homo sapien
agtttttgtacagtagatcttccac

SEQ ID NO: 3166217 - DNA, 25 bp, Homo sapien
gaatataataatatagtgattttgg

SEQ ID NO: 3166218 - DNA, 25 bp, Homo sapien
tttgtacagtagatcttccactggg

SEQ ID NO: 3166219 - DNA, 25 bp, Homo sapien
ctaggctgggaaaagattgggatca

SEQ ID NO: 3166220 - DNA, 25 bp, Homo sapien
ccccactagtgcaagtaggtgatgg

SEQ ID NO: 3166221 - DNA, 25 bp, Homo sapien
gttttggtaggagcagacaccatcc

SEQ ID NO: 3166222 - DNA, 25 bp, Homo sapien
taccagtaacttcaaggagctacat

SEQ ID NO: 3166223 - DNA, 25 bp, Homo sapien
acagggcgtgcatgttgtcaatatc

SEQ ID NO: 3166224 - DNA, 25 bp, Homo sapien
cctgtagtttcatgggaaggtgatg

SEQ ID NO: 3166225 - DNA, 25 bp, Homo sapien
ctcagagacagggcgtgcatgttgt

SEQ ID NO: 3166226 - DNA, 25 bp, Homo sapien
tccctgtagtttcatgggaaggtga

SEQ ID NO: 3166227 - DNA, 25 bp, Homo sapien
tgcagatgctcaggcaatcccagag

SEQ ID NO: 3166228 - DNA, 25 bp, Homo sapien
cagtagaccacaatcttgcagatgc

SEQ ID NO: 3166229 - DNA, 25 bp, Homo sapien
acaaatacataactcagtgccaaat

SEQ ID NO: 3166230 - DNA, 25 bp, Homo sapien
tgtttagggcaaaaatcagggctcc

SEQ ID NO: 3166231 - DNA, 25 bp, Homo sapien
agttgtatgttgtttgggccctgca

SEQ ID NO: 3166232 - DNA, 25 bp, Homo sapien
tctactagctttgcaacattgggca

SEQ ID NO: 3166233 - DNA, 25 bp, Homo sapien
taaggatgaaatggaccacccactg

SEQ ID NO: 3166234 - DNA, 25 bp, Homo sapien
tatgccaaaatgcaaggcctagctg

SEQ ID NO: 3166235 - DNA, 25 bp, Homo sapien
ggctttgcattctggcagctgtcat

SEQ ID NO: 3166236 - DNA, 25 bp, Homo sapien
tggctttgcattctggcagctgtca

SEQ ID NO: 3166237 - DNA, 25 bp, Homo sapien
tttccacatgtcactttagttatgg

SEQ ID NO: 3166238 - DNA, 25 bp, Homo sapien
tttccactcttttccacatgtcact

SEQ ID NO: 3166239 - DNA, 25 bp, Homo sapien
acatgtcactttagttatggccaca

SEQ ID NO: 3166240 - DNA, 25 bp, Homo sapien
cactcttttccacatgtcactttag

SEQ ID NO: 3166241 - DNA, 25 bp, Homo sapien
gagggctatccattctgcacttatg

SEQ ID NO: 3166242 - DNA, 25 bp, Homo sapien
ggctgttccatgtcttgagggctat

SEQ ID NO: 3166243 - DNA, 25 bp, Homo sapien
ttatgcacagggatataagggatat

SEQ ID NO: 3166244 - DNA, 25 bp, Homo sapien
taagggatatggacctcctggctgg

SEQ ID NO: 3166245 - DNA, 25 bp, Homo sapien
cagtgttttgtggagagctagtcca

SEQ ID NO: 3166246 - DNA, 25 bp, Homo sapien
caccgagttgttgtgagtgccgttg

SEQ ID NO: 3166247 - DNA, 25 bp, Homo sapien
caaaggagctgatgtaggcagactc

SEQ ID NO: 3166248 - DNA, 25 bp, Homo sapien
gatgctgtaactgggagcaccgagt

SEQ ID NO: 3166249 - DNA, 25 bp, Homo sapien
ggactccaccgcttgttgacgagaa

SEQ ID NO: 3166250 - DNA, 25 bp, Homo sapien
tagtaacggaggcagaaaagacctc

SEQ ID NO: 3166251 - DNA, 25 bp, Homo sapien
caacgtggttgttaagtggactcca

SEQ ID NO: 3166252 - DNA, 25 bp, Homo sapien
tgcttcaggagtgcccgagctgtgt

SEQ ID NO: 3166253 - DNA, 25 bp, Homo sapien
acttaatgcatgttctacttcctgc

SEQ ID NO: 3166254 - DNA, 25 bp, Homo sapien
tcctgcatgatcaccctgggaaagg

SEQ ID NO: 3166255 - DNA, 25 bp, Homo sapien
tcctctgtcggggactctggtgcag

SEQ ID NO: 3166256 - DNA, 25 bp, Homo sapien
gtctatgagctcacacatcactttg

SEQ ID NO: 3166257 - DNA, 25 bp, Homo sapien
gatatcgcatcaaagtcaacaccaa

SEQ ID NO: 3166258 - DNA, 25 bp, Homo sapien
tcaacaccaactctgctccaggaac

SEQ ID NO: 3166259 - DNA, 25 bp, Homo sapien
caggaaccaatgtcagagatgttac

SEQ ID NO: 3166260 - DNA, 25 bp, Homo sapien
ttaagatatcgcatcaaagtcaaca

SEQ ID NO: 3166261 - DNA, 25 bp, Homo sapien
ctggggagcgcacatttgcaattaa

SEQ ID NO: 3166262 - DNA, 25 bp, Homo sapien
tgacggcacagttcttggttaccat

SEQ ID NO: 3166263 - DNA, 25 bp, Homo sapien
accaggcacacatgacggcacagtt

SEQ ID NO: 3166264 - DNA, 25 bp, Homo sapien
tgcaattaatgcaaaccaggcacac

SEQ ID NO: 3166265 - DNA, 25 bp, Homo sapien
tggtgtgtagagacccaataggcag

SEQ ID NO: 3166266 - DNA, 25 bp, Homo sapien
caagtgtcaggccccgggaaccatt

SEQ ID NO: 3166267 - DNA, 25 bp, Homo sapien
tgtggtgtgtagagacccaataggc

SEQ ID NO: 3166268 - DNA, 25 bp, Homo sapien
aggtttcaccactccatggcggaga

SEQ ID NO: 3166269 - DNA, 25 bp, Homo sapien
gtgatggcttgggtcctcttgtaca

SEQ ID NO: 3166270 - DNA, 25 bp, Homo sapien
tgtgtgatggcttgggtcctcttgt

SEQ ID NO: 3166271 - DNA, 25 bp, Homo sapien
tgatggcttgggtcctcttgtacat

SEQ ID NO: 3166272 - DNA, 25 bp, Homo sapien
gtgtgatggcttgggtcctcttgta

SEQ ID NO: 3166273 - DNA, 25 bp, Homo sapien
tcaatattcttgcgcttttctttcc

SEQ ID NO: 3166274 - DNA, 25 bp, Homo sapien
tttcaatattcttgcgcttttcttt

SEQ ID NO: 3166275 - DNA, 25 bp, Homo sapien
ttcaatattcttgcgcttttctttc

SEQ ID NO: 3166276 - DNA, 25 bp, Homo sapien
ggatgaacccaaacaacctctgaag

SEQ ID NO: 3166277 - DNA, 25 bp, Homo sapien
aagaagttgttgttactctgagaga

SEQ ID NO: 3166278 - DNA, 25 bp, Homo sapien
tatccatagatgactcctgagctac

SEQ ID NO: 3166279 - DNA, 25 bp, Homo sapien
tgagtgtctcactgctatccataga

SEQ ID NO: 3166280 - DNA, 25 bp, Homo sapien
aagagagcatgggcagggtaacttc

SEQ ID NO: 3166281 - DNA, 25 bp, Homo sapien
agagagcatgggcagggtaacttct

SEQ ID NO: 3166282 - DNA, 25 bp, Homo sapien
caagagagcatgggcagggtaactt

SEQ ID NO: 3166283 - DNA, 25 bp, Homo sapien
gagagcatgggcagggtaacttctt

SEQ ID NO: 3166284 - DNA, 25 bp, Homo sapien
gggcatcacagtttgagaacatgaa

SEQ ID NO: 3166285 - DNA, 25 bp, Homo sapien
ggcatcacagtttgagaacatgaag

SEQ ID NO: 3166286 - DNA, 25 bp, Homo sapien
ctgagggcatcacagtttgagaaca

SEQ ID NO: 3166287 - DNA, 25 bp, Homo sapien
gagggcatcacagtttgagaacatg

SEQ ID NO: 3166288 - DNA, 25 bp, Homo sapien
agaagcagctggtaaccatcagccc

SEQ ID NO: 3166289 - DNA, 25 bp, Homo sapien
agcagctggtaaccatcagccctgg

SEQ ID NO: 3166290 - DNA, 25 bp, Homo sapien
ctggtaaccatcagccctgggaagt

SEQ ID NO: 3166291 - DNA, 25 bp, Homo sapien
agctggtaaccatcagccctgggaa

SEQ ID NO: 3166292 - DNA, 25 bp, Homo sapien
cacttctaagagtttgtacagccca

SEQ ID NO: 3166293 - DNA, 25 bp, Homo sapien
gatagcctatatgaccagagctgga

SEQ ID NO: 3166294 - DNA, 25 bp, Homo sapien
tacagcccaatataaggccaaatgg

SEQ ID NO: 3166295 - DNA, 25 bp, Homo sapien
gccatgggaacaagagtcctccaaa

SEQ ID NO: 3166296 - DNA, 25 bp, Homo sapien
ttctgaacactcacagatccatttc

SEQ ID NO: 3166297 - DNA, 25 bp, Homo sapien
gtgcgtagtatccaccttctgcctg

SEQ ID NO: 3166298 - DNA, 25 bp, Homo sapien
tgactttggcgtgcgtagtatccac

SEQ ID NO: 3166299 - DNA, 25 bp, Homo sapien
ggcatcatgtgactttggcgtgcgt

SEQ ID NO: 3166300 - DNA, 25 bp, Homo sapien
gatacatgaggatacggggcatcat

SEQ ID NO: 3166301 - DNA, 25 bp, Homo sapien
acggcaatgactgtcacggtaatgg

SEQ ID NO: 3166302 - DNA, 25 bp, Homo sapien
tgactgtcacggtaatggcggcgat

SEQ ID NO: 3166303 - DNA, 25 bp, Homo sapien
ctgtcacggtaatggcggcgatgct

SEQ ID NO: 3166304 - DNA, 25 bp, Homo sapien
caatgactgtcacggtaatggcggc

SEQ ID NO: 3166305 - DNA, 25 bp, Homo sapien
ggccctattctagcacctggttgat

SEQ ID NO: 3166306 - DNA, 25 bp, Homo sapien
gaaaacttaccatctatcaggccct

SEQ ID NO: 3166307 - DNA, 25 bp, Homo sapien
gatgatcaggaaggtctcactaaga

SEQ ID NO: 3166308 - DNA, 25 bp, Homo sapien
taaactgaacagatcaaaatccctg

SEQ ID NO: 3166309 - DNA, 25 bp, Homo sapien
aaacaccctgtcaatgacaactctt

SEQ ID NO: 3166310 - DNA, 25 bp, Homo sapien
gagagggaaagttgtgacgctctca

SEQ ID NO: 3166311 - DNA, 25 bp, Homo sapien
ggagagggaaagttgtgacgctctc

SEQ ID NO: 3166312 - DNA, 25 bp, Homo sapien
agggagagggaaagttgtgacgctc

SEQ ID NO: 3166313 - DNA, 25 bp, Homo sapien
gggagagggaaagttgtgacgctct

SEQ ID NO: 3166314 - DNA, 25 bp, Homo sapien
gcccatctgaggacagcgtaatgcc

SEQ ID NO: 3166315 - DNA, 25 bp, Homo sapien
tgaggacagcgtaatgccctgcact

SEQ ID NO: 3166316 - DNA, 25 bp, Homo sapien
tctgaggacagcgtaatgccctgca

SEQ ID NO: 3166317 - DNA, 25 bp, Homo sapien
catctgaggacagcgtaatgccctg

SEQ ID NO: 3166318 - DNA, 25 bp, Homo sapien
tcgtacagagggttgttgtagtttc

SEQ ID NO: 3166319 - DNA, 25 bp, Homo sapien
caggacccgtagtcatggtcgtcca

SEQ ID NO: 3166320 - DNA, 25 bp, Homo sapien
caaaagtcttccataggaggaatgc

SEQ ID NO: 3166321 - DNA, 25 bp, Homo sapien
ttaggagtcatcgtacagagggttg

SEQ ID NO: 3166322 - DNA, 25 bp, Homo sapien
caacctgagagattctgccccgtga

SEQ ID NO: 3166323 - DNA, 25 bp, Homo sapien
gagcagacatcctttacagagacag

SEQ ID NO: 3166324 - DNA, 25 bp, Homo sapien
ggtataaagcaaacggtctctgggc

SEQ ID NO: 3166325 - DNA, 25 bp, Homo sapien
cagggtgaaatcctcgtagagctca

SEQ ID NO: 3166326 - DNA, 25 bp, Homo sapien
gatttacggcagaggcagcattcag

SEQ ID NO: 3166327 - DNA, 25 bp, Homo sapien
gctgaatatatctgctctaggccca

SEQ ID NO: 3166328 - DNA, 25 bp, Homo sapien
gttgtcgccatgaaataaagctctc

SEQ ID NO: 3166329 - DNA, 25 bp, Homo sapien
ttgccaaactgaaagccctgtgatg

SEQ ID NO: 3166330 - DNA, 25 bp, Homo sapien
tggttgtttagacccactggagcca

SEQ ID NO: 3166331 - DNA, 25 bp, Homo sapien
tttaggcagacctggacaggtgctc

SEQ ID NO: 3166332 - DNA, 25 bp, Homo sapien
catcatctgcagtcgatggccgaga

SEQ ID NO: 3166333 - DNA, 25 bp, Homo sapien
gaaatgaagacacagacgtgcaggg

SEQ ID NO: 3166334 - DNA, 25 bp, Homo sapien
aaatggaaaccatggctgtggcacc

SEQ ID NO: 3166335 - DNA, 25 bp, Homo sapien
gagtctttgagacctatgtcctagg

SEQ ID NO: 3166336 - DNA, 25 bp, Homo sapien
tcctggatgtgagggattgaaccat

SEQ ID NO: 3166337 - DNA, 25 bp, Homo sapien
gatgtggctaggacacaactgtcat

SEQ ID NO: 3166338 - DNA, 25 bp, Homo sapien
gagggtgcgactgctttcaaaagat

SEQ ID NO: 3166339 - DNA, 25 bp, Homo sapien
tctgccaggtcatcagttctgaggg

SEQ ID NO: 3166340 - DNA, 25 bp, Homo sapien
agggtgcgactgctttcaaaagatc

SEQ ID NO: 3166341 - DNA, 25 bp, Homo sapien
gggtgcgactgctttcaaaagatcc

SEQ ID NO: 3166342 - DNA, 25 bp, Homo sapien
gccaagggctgagaatggttctgaa

SEQ ID NO: 3166343 - DNA, 25 bp, Homo sapien
aagggctgagaatggttctgaatcc

SEQ ID NO: 3166344 - DNA, 25 bp, Homo sapien
gggctgagaatggttctgaatccct

SEQ ID NO: 3166345 - DNA, 25 bp, Homo sapien
aagccaagggctgagaatggttctg

SEQ ID NO: 3166346 - DNA, 25 bp, Homo sapien
tgttcagaaggaggatgggacaacc

SEQ ID NO: 3166347 - DNA, 25 bp, Homo sapien
ggcctcaggttgtgttcccttgagt

SEQ ID NO: 3166348 - DNA, 25 bp, Homo sapien
ggacaacccgtcagacagtccctgg

SEQ ID NO: 3166349 - DNA, 25 bp, Homo sapien
ccttgagtagagctgcttgatgaac

SEQ ID NO: 3166350 - DNA, 25 bp, Homo sapien
tgagggggcttgccagtgccttcca

SEQ ID NO: 3166351 - DNA, 25 bp, Homo sapien
tttgatcccattattgagggggctt

SEQ ID NO: 3166352 - DNA, 25 bp, Homo sapien
agtgccttccaggtgagaatcagac

SEQ ID NO: 3166353 - DNA, 25 bp, Homo sapien
caggtgagaatcagacacaagttca

SEQ ID NO: 3166354 - DNA, 25 bp, Homo sapien
ccagggtagtggaaagagtgtcctt

SEQ ID NO: 3166355 - DNA, 25 bp, Homo sapien
tctgaccaaactccagggtagtgga

SEQ ID NO: 3166356 - DNA, 25 bp, Homo sapien
agtggaaagagtgtccttttgcctc

SEQ ID NO: 3166357 - DNA, 25 bp, Homo sapien
gatgtctgaccaaactccagggtag

SEQ ID NO: 3166358 - DNA, 25 bp, Homo sapien
catggaagattgcattaggaaggta

SEQ ID NO: 3166359 - DNA, 25 bp, Homo sapien
tgaagtctacaaaggcatctacaac

SEQ ID NO: 3166360 - DNA, 25 bp, Homo sapien
acagtgacatcttcgtttggtccac

SEQ ID NO: 3166361 - DNA, 25 bp, Homo sapien
tggtccactgtgaagtctacaaagg

SEQ ID NO: 3166362 - DNA, 25 bp, Homo sapien
tgcaatgatgcccatgcacaccgtt

SEQ ID NO: 3166363 - DNA, 25 bp, Homo sapien
gcctctatcacctttcaaagatatg

SEQ ID NO: 3166364 - DNA, 25 bp, Homo sapien
gtatgtatggctctgctgttatcac

SEQ ID NO: 3166365 - DNA, 25 bp, Homo sapien
gtgctgctccggattgcctctatca

SEQ ID NO: 3166366 - DNA, 25 bp, Homo sapien
gggagagctgcttatgttgagctct

SEQ ID NO: 3166367 - DNA, 25 bp, Homo sapien
gagagctgcttatgttgagctcttg

SEQ ID NO: 3166368 - DNA, 25 bp, Homo sapien
gctctttgatctccttccttattgt

SEQ ID NO: 3166369 - DNA, 25 bp, Homo sapien
gagctgcttatgttgagctcttgga

SEQ ID NO: 3166370 - DNA, 25 bp, Homo sapien
cagatgacagcggagtgagaagaat

SEQ ID NO: 3166371 - DNA, 25 bp, Homo sapien
ggaattggtgcgagtttcccagaga

SEQ ID NO: 3166372 - DNA, 25 bp, Homo sapien
tcccagagagcttgtacttgtccag

SEQ ID NO: 3166373 - DNA, 25 bp, Homo sapien
cagatgttggaaggaattggtgcga

SEQ ID NO: 3166374 - DNA, 25 bp, Homo sapien
atcatttgaagatgacttgaagaac

SEQ ID NO: 3166375 - DNA, 25 bp, Homo sapien
gtggccacttgcaggtctactcagt

SEQ ID NO: 3166376 - DNA, 25 bp, Homo sapien
tgggaagtcacaaagccatacctcc

SEQ ID NO: 3166377 - DNA, 25 bp, Homo sapien
ttcaggacagtcagttaggagatgg

SEQ ID NO: 3166378 - DNA, 25 bp, Homo sapien
atacagtatcttcctgggtgacaga

SEQ ID NO: 3166379 - DNA, 25 bp, Homo sapien
tacagtatcttcctgggtgacagac

SEQ ID NO: 3166380 - DNA, 25 bp, Homo sapien
gccaatgagatgggctcttcagcct

SEQ ID NO: 3166381 - DNA, 25 bp, Homo sapien
aatgagatgggctcttcagcctctg

SEQ ID NO: 3166382 - DNA, 25 bp, Homo sapien
aaaattccatagacccacagtccac

SEQ ID NO: 3166383 - DNA, 25 bp, Homo sapien
cactgtcacaataatagccatctct

SEQ ID NO: 3166384 - DNA, 25 bp, Homo sapien
ataccacaacttctaccatttcaat

SEQ ID NO: 3166385 - DNA, 25 bp, Homo sapien
ctgtcacaataatagccatctctgc

SEQ ID NO: 3166386 - DNA, 25 bp, Homo sapien
tctgtctacaggaagcttggcctgc

SEQ ID NO: 3166387 - DNA, 25 bp, Homo sapien
taaggtctgacaccatggtgctggc

SEQ ID NO: 3166388 - DNA, 25 bp, Homo sapien
tgctatacccacagcctgaatgtgg

SEQ ID NO: 3166389 - DNA, 25 bp, Homo sapien
tgggctgggataaggtctgacacca

SEQ ID NO: 3166390 - DNA, 25 bp, Homo sapien
atgatctccagcagaggctctgcag

SEQ ID NO: 3166391 - DNA, 25 bp, Homo sapien
atctccagcagaggctctgcagagc

SEQ ID NO: 3166392 - DNA, 25 bp, Homo sapien
cattgatgatctccagcagaggctc

SEQ ID NO: 3166393 - DNA, 25 bp, Homo sapien
attgatgatctccagcagaggctct

SEQ ID NO: 3166394 - DNA, 25 bp, Homo sapien
gaatttcctcagaggacagagtctg

SEQ ID NO: 3166395 - DNA, 25 bp, Homo sapien
taagaatttcctcagaggacagagt

SEQ ID NO: 3166396 - DNA, 25 bp, Homo sapien
tcctcagaggacagagtctggaaca

SEQ ID NO: 3166397 - DNA, 25 bp, Homo sapien
gaggacagagtctggaacaccctgt

SEQ ID NO: 3166398 - DNA, 25 bp, Homo sapien
tgccttcttgaataaagtctaatcc

SEQ ID NO: 3166399 - DNA, 25 bp, Homo sapien
catgccttcttgaataaagtctaat

SEQ ID NO: 3166400 - DNA, 25 bp, Homo sapien
atgccttcttgaataaagtctaatc

SEQ ID NO: 3166401 - DNA, 25 bp, Homo sapien
gcacataacagagaactgagagttt

SEQ ID NO: 3166402 - DNA, 25 bp, Homo sapien
ctgctcagtgatgccatcaatgatt

SEQ ID NO: 3166403 - DNA, 25 bp, Homo sapien
ttgcacataacagagaactgagagt

SEQ ID NO: 3166404 - DNA, 25 bp, Homo sapien
gtattgcacataacagagaactgag

SEQ ID NO: 3166405 - DNA, 25 bp, Homo sapien
caatggtgactatagtgttttggaa

SEQ ID NO: 3166406 - DNA, 25 bp, Homo sapien
cataggtcccagtttcaatggtgac

SEQ ID NO: 3166407 - DNA, 25 bp, Homo sapien
cccagtttcaatggtgactatagtg

SEQ ID NO: 3166408 - DNA, 25 bp, Homo sapien
caatccataggtcccagtttcaatg

SEQ ID NO: 3166409 - DNA, 25 bp, Homo sapien
gagaccttggccaccattcttataa

SEQ ID NO: 3166410 - DNA, 25 bp, Homo sapien
ccaacatcccttctgactggttcat

SEQ ID NO: 3166411 - DNA, 25 bp, Homo sapien
tcatgtccattgtgtgaggagtcca

SEQ ID NO: 3166412 - DNA, 25 bp, Homo sapien
tattatgtagggtggcatgcagcca

SEQ ID NO: 3166413 - DNA, 25 bp, Homo sapien
catagcttctctctacacaatgtga

SEQ ID NO: 3166414 - DNA, 25 bp, Homo sapien
tccaagagctcaaagggagacaaat

SEQ ID NO: 3166415 - DNA, 25 bp, Homo sapien
gacacaggttttggttcagatacat

SEQ ID NO: 3166416 - DNA, 25 bp, Homo sapien
tccattcagaagagtaggaatgcgc

SEQ ID NO: 3166417 - DNA, 25 bp, Homo sapien
gcctcttaggccaggagaattccct

SEQ ID NO: 3166418 - DNA, 25 bp, Homo sapien
cagccctgacatatagcatggattc

SEQ ID NO: 3166419 - DNA, 25 bp, Homo sapien
cagtactgtaggaggttaggctttc

SEQ ID NO: 3166420 - DNA, 25 bp, Homo sapien
tgagtactgtctgctggtttgaacc

SEQ ID NO: 3166421 - DNA, 25 bp, Homo sapien
tgaggaagatacagaatccatgctt

SEQ ID NO: 3166422 - DNA, 25 bp, Homo sapien
tgtaacaacgctttattttcagcaa

SEQ ID NO: 3166423 - DNA, 25 bp, Homo sapien
atggacaagcgccatgggcttggcc

SEQ ID NO: 3166424 - DNA, 25 bp, Homo sapien
ccctgaagcgatggggacttgagct

SEQ ID NO: 3166425 - DNA, 25 bp, Homo sapien
tctggtggacatccagagactttta

SEQ ID NO: 3166426 - DNA, 25 bp, Homo sapien
catgccacactgtattcgatgattt

SEQ ID NO: 3166427 - DNA, 25 bp, Homo sapien
cagagacttttacattgagacagcc

SEQ ID NO: 3166428 - DNA, 25 bp, Homo sapien
tgtggatggcattcctgcagcatcc

SEQ ID NO: 3166429 - DNA, 25 bp, Homo sapien
cagagaagcaatgccataaacaggc

SEQ ID NO: 3166430 - DNA, 25 bp, Homo sapien
gaatagtaattgtcactgatctcat

SEQ ID NO: 3166431 - DNA, 25 bp, Homo sapien
ttgtcactgatctcataacttgtcc

SEQ ID NO: 3166432 - DNA, 25 bp, Homo sapien
gaagcaatgccataaacaggcctca

SEQ ID NO: 3166433 - DNA, 25 bp, Homo sapien
tctgtagggtgcctcagtatgcctc

SEQ ID NO: 3166434 - DNA, 25 bp, Homo sapien
ccttggtgattctgtagggtgcctc

SEQ ID NO: 3166435 - DNA, 25 bp, Homo sapien
ggtgcctcagtatgcctctttgctg

SEQ ID NO: 3166436 - DNA, 25 bp, Homo sapien
cttctccttggtgattctgtagggt

SEQ ID NO: 3166437 - DNA, 25 bp, Homo sapien
gacagatgggtgatgtctgcatgtt

SEQ ID NO: 3166438 - DNA, 25 bp, Homo sapien
gtgaaattagagacagatgggtgat

SEQ ID NO: 3166439 - DNA, 25 bp, Homo sapien
aaattagagacagatgggtgatgtc

SEQ ID NO: 3166440 - DNA, 25 bp, Homo sapien
ttagagacagatgggtgatgtctgc

SEQ ID NO: 3166441 - DNA, 25 bp, Homo sapien
gagatggtcccgcaagcattagcaa

SEQ ID NO: 3166442 - DNA, 25 bp, Homo sapien
tattctttggtctactcggcctccg

SEQ ID NO: 3166443 - DNA, 25 bp, Homo sapien
tattttggaaggcatgccagtagct

SEQ ID NO: 3166444 - DNA, 25 bp, Homo sapien
ggagggatttattcacaaggtagac

SEQ ID NO: 3166445 - DNA, 25 bp, Homo sapien
tcagggagtcatgccagccatgagc

SEQ ID NO: 3166446 - DNA, 25 bp, Homo sapien
gggctgggaaagattttcaggcaga

SEQ ID NO: 3166447 - DNA, 25 bp, Homo sapien
atcagctgaacctttcagaactgca

SEQ ID NO: 3166448 - DNA, 25 bp, Homo sapien
gctgaacctttcagaactgcagcag

SEQ ID NO: 3166449 - DNA, 25 bp, Homo sapien
agatgatgacctgcccatgtttcta

SEQ ID NO: 3166450 - DNA, 25 bp, Homo sapien
gagatgatgacctgcccatgtttct

SEQ ID NO: 3166451 - DNA, 25 bp, Homo sapien
gatgatgacctgcccatgtttctac

SEQ ID NO: 3166452 - DNA, 25 bp, Homo sapien
atctaccagtgagtgggggcctagc

SEQ ID NO: 3166453 - DNA, 25 bp, Homo sapien
aaagatcaggatctaccagtgagtg

SEQ ID NO: 3166454 - DNA, 25 bp, Homo sapien
agatcaggatctaccagtgagtggg

SEQ ID NO: 3166455 - DNA, 25 bp, Homo sapien
ttaaagatcaggatctaccagtgag

SEQ ID NO: 3166456 - DNA, 25 bp, Homo sapien
cacccagtgattatacatgatttcc

SEQ ID NO: 3166457 - DNA, 25 bp, Homo sapien
agcattcacccagtgattatacatg

SEQ ID NO: 3166458 - DNA, 25 bp, Homo sapien
tgattatacatgatttcctcttgtg

SEQ ID NO: 3166459 - DNA, 25 bp, Homo sapien
aatcctataccagcattcacccagt

SEQ ID NO: 3166460 - DNA, 25 bp, Homo sapien
gtactcagcccagtcaccctcttgg

SEQ ID NO: 3166461 - DNA, 25 bp, Homo sapien
tactcagcccagtcaccctcttggt

SEQ ID NO: 3166462 - DNA, 25 bp, Homo sapien
tgtactcagcccagtcaccctcttg

SEQ ID NO: 3166463 - DNA, 25 bp, Homo sapien
gcagtgttctggtcaatcaatcagt

SEQ ID NO: 3166464 - DNA, 25 bp, Homo sapien
tcatatgcttgagcagcagtgttct

SEQ ID NO: 3166465 - DNA, 25 bp, Homo sapien
cctctcatatgcttgagcagcagtg

SEQ ID NO: 3166466 - DNA, 25 bp, Homo sapien
cagccagatctatatcctctcatat

SEQ ID NO: 3166467 - DNA, 25 bp, Homo sapien
tttgcagttattgactcagtcctga

SEQ ID NO: 3166468 - DNA, 25 bp, Homo sapien
tcctgataatgaccgtgcaataggg

SEQ ID NO: 3166469 - DNA, 25 bp, Homo sapien
ggtgaagaaattagcccctgctcat

SEQ ID NO: 3166470 - DNA, 25 bp, Homo sapien
tctagagtcgggctggcaaacttgt

SEQ ID NO: 3166471 - DNA, 25 bp, Homo sapien
tatatcctggagaacagtgccccaa

SEQ ID NO: 3166472 - DNA, 25 bp, Homo sapien
tcttcattgagggattgagcactca

SEQ ID NO: 3166473 - DNA, 25 bp, Homo sapien
gaaatcctatggtcatgggcccact

SEQ ID NO: 3166474 - DNA, 25 bp, Homo sapien
tgttgatcctgtgtagacctgccat

SEQ ID NO: 3166475 - DNA, 25 bp, Homo sapien
aacatttgccccatagggcactggc

SEQ ID NO: 3166476 - DNA, 25 bp, Homo sapien
cccatagggcactggctcccttgca

SEQ ID NO: 3166477 - DNA, 25 bp, Homo sapien
tttctgtctcttaacatttgcccca

SEQ ID NO: 3166478 - DNA, 25 bp, Homo sapien
atttgccccatagggcactggctcc

SEQ ID NO: 3166479 - DNA, 25 bp, Homo sapien
cctcacaccactgcgatgaactcat

SEQ ID NO: 3166480 - DNA, 25 bp, Homo sapien
gcctcacaccactgcgatgaactca

SEQ ID NO: 3166481 - DNA, 25 bp, Homo sapien
tggaagaagaaagtctttactgggc

SEQ ID NO: 3166482 - DNA, 25 bp, Homo sapien
agaaagtctttactgggccctgtgg

SEQ ID NO: 3166483 - DNA, 25 bp, Homo sapien
tctttactgggccctgtggtcttgc

SEQ ID NO: 3166484 - DNA, 25 bp, Homo sapien
agaagaaagtctttactgggccctg

SEQ ID NO: 3166485 - DNA, 25 bp, Homo sapien
ggagattaggtaagactgggctagg

SEQ ID NO: 3166486 - DNA, 25 bp, Homo sapien
agattaggtaagactgggctagggc

SEQ ID NO: 3166487 - DNA, 25 bp, Homo sapien
gagattaggtaagactgggctaggg

SEQ ID NO: 3166488 - DNA, 25 bp, Homo sapien
gattaggtaagactgggctagggct

SEQ ID NO: 3166489 - DNA, 25 bp, Homo sapien
caagaactgtccaattataaagccc

SEQ ID NO: 3166490 - DNA, 25 bp, Homo sapien
tggacaagaactgtccaattataaa

SEQ ID NO: 3166491 - DNA, 25 bp, Homo sapien
ctgtccaattataaagcccacaggg

SEQ ID NO: 3166492 - DNA, 25 bp, Homo sapien
gaactgtccaattataaagcccaca

SEQ ID NO: 3166493 - DNA, 25 bp, Homo sapien
taaaggacagctcttgtggagctat

SEQ ID NO: 3166494 - DNA, 25 bp, Homo sapien
tataggctgcctaaacttaacacca

SEQ ID NO: 3166495 - DNA, 25 bp, Homo sapien
tcttcagggacagtatgtgtgacca

SEQ ID NO: 3166496 - DNA, 25 bp, Homo sapien
aatcagacgttgagttaaaggacag

SEQ ID NO: 3166497 - DNA, 25 bp, Homo sapien
tagccaccaccttgaatgctgttaa

SEQ ID NO: 3166498 - DNA, 25 bp, Homo sapien
cagctggatgctctgttgcgtatct

SEQ ID NO: 3166499 - DNA, 25 bp, Homo sapien
gctctgttgcgtatcttcctacttg

SEQ ID NO: 3166500 - DNA, 25 bp, Homo sapien
catacaacatatccagtgaaggtca

SEQ ID NO: 3166501 - DNA, 25 bp, Homo sapien
ccagagctcagctgtagtatgcgtc

SEQ ID NO: 3166502 - DNA, 25 bp, Homo sapien
cagctgtagtatgcgtccccaccat

SEQ ID NO: 3166503 - DNA, 25 bp, Homo sapien
aaatggaaaacttcctgtccagagc

SEQ ID NO: 3166504 - DNA, 25 bp, Homo sapien
taaaatggaaaacttcctgtccaga

SEQ ID NO: 3166505 - DNA, 25 bp, Homo sapien
aagacaatcaccctcaccgatgtgg

SEQ ID NO: 3166506 - DNA, 25 bp, Homo sapien
ttaacttgactaagccagaggatgc

SEQ ID NO: 3166507 - DNA, 25 bp, Homo sapien
gatggctggccaaacattacttctg

SEQ ID NO: 3166508 - DNA, 25 bp, Homo sapien
ctgggtgagtctgagagtgtttcca

SEQ ID NO: 3166509 - DNA, 25 bp, Homo sapien
agagaggcagcgtggaatgaaggga

SEQ ID NO: 3166510 - DNA, 25 bp, Homo sapien
ctcatcaggttcttgcagcaatatc

SEQ ID NO: 3166511 - DNA, 25 bp, Homo sapien
cagcgtggaatgaagggagccatgg

SEQ ID NO: 3166512 - DNA, 25 bp, Homo sapien
agcaatatccaaggccgagagaggc

SEQ ID NO: 3166513 - DNA, 25 bp, Homo sapien
tttggcataggatacttgtggaggc

SEQ ID NO: 3166514 - DNA, 25 bp, Homo sapien
gctctgctacttttacagttaaatc

SEQ ID NO: 3166515 - DNA, 25 bp, Homo sapien
cttttacagttaaatcccatacctg

SEQ ID NO: 3166516 - DNA, 25 bp, Homo sapien
tccataccagggctttgtctttggc

SEQ ID NO: 3166517 - DNA, 25 bp, Homo sapien
agttgggccactcctcggcatggtt

SEQ ID NO: 3166518 - DNA, 25 bp, Homo sapien
tgggccactcctcggcatggttgcc

SEQ ID NO: 3166519 - DNA, 25 bp, Homo sapien
ttgggccactcctcggcatggttgc

SEQ ID NO: 3166520 - DNA, 25 bp, Homo sapien
gttgggccactcctcggcatggttg

SEQ ID NO: 3166521 - DNA, 25 bp, Homo sapien
ctctgacatcctgatccatggggat

SEQ ID NO: 3166522 - DNA, 25 bp, Homo sapien
caggctctgacatcctgatccatgg

SEQ ID NO: 3166523 - DNA, 25 bp, Homo sapien
gctctgacatcctgatccatgggga

SEQ ID NO: 3166524 - DNA, 25 bp, Homo sapien
aggctctgacatcctgatccatggg

SEQ ID NO: 3166525 - DNA, 25 bp, Homo sapien
gaccatcaatactttacagtggctc

SEQ ID NO: 3166526 - DNA, 25 bp, Homo sapien
cagaccatcaatactttacagtggc

SEQ ID NO: 3166527 - DNA, 25 bp, Homo sapien
tcaatactttacagtggctcccagt

SEQ ID NO: 3166528 - DNA, 25 bp, Homo sapien
catcaatactttacagtggctccca

SEQ ID NO: 3166529 - DNA, 25 bp, Homo sapien
tacccttacagctgaccttggaagc

SEQ ID NO: 3166530 - DNA, 25 bp, Homo sapien
cttacagctgaccttggaagccatt

SEQ ID NO: 3166531 - DNA, 25 bp, Homo sapien
acagctgaccttggaagccattttc

SEQ ID NO: 3166532 - DNA, 25 bp, Homo sapien
cttacccttacagctgaccttggaa

SEQ ID NO: 3166533 - DNA, 25 bp, Homo sapien
cacatagtcgctgactgaagacctt

SEQ ID NO: 3166534 - DNA, 25 bp, Homo sapien
tcctccccacagggtaggatctacc

SEQ ID NO: 3166535 - DNA, 25 bp, Homo sapien
ttcctccccacagggtaggatctac

SEQ ID NO: 3166536 - DNA, 25 bp, Homo sapien
ccacatagtcgctgactgaagacct

SEQ ID NO: 3166537 - DNA, 25 bp, Homo sapien
ccaaggccaaactgagtttgttctt

SEQ ID NO: 3166538 - DNA, 25 bp, Homo sapien
tcttccttgctctaaattgaacata

SEQ ID NO: 3166539 - DNA, 25 bp, Homo sapien
gaaaagagattgtggcttggaacca

SEQ ID NO: 3166540 - DNA, 25 bp, Homo sapien
ggcttggaaccaaggccaaactgag

SEQ ID NO: 3166541 - DNA, 25 bp, Homo sapien
tttgaatcaagttctgaatcaattg

SEQ ID NO: 3166542 - DNA, 25 bp, Homo sapien
tgagagtcagatattgatgataaag

SEQ ID NO: 3166543 - DNA, 25 bp, Homo sapien
ctgaatcaattgtgtagtagatatg

SEQ ID NO: 3166544 - DNA, 25 bp, Homo sapien
tgtagtagatatgagagtcagatat

SEQ ID NO: 3166545 - DNA, 25 bp, Homo sapien
tattacaagtacgtaaggattcagg

SEQ ID NO: 3166546 - DNA, 25 bp, Homo sapien
catagctctatattgaatgaaagcc

SEQ ID NO: 3166547 - DNA, 25 bp, Homo sapien
gatgtgttttgtactagtgtcacag

SEQ ID NO: 3166548 - DNA, 25 bp, Homo sapien
tcagggtctcttgatagacttatca

SEQ ID NO: 3166549 - DNA, 25 bp, Homo sapien
ggatctccaattgcatgtgttaaaa

SEQ ID NO: 3166550 - DNA, 25 bp, Homo sapien
tgcttcctaccttagggatctccaa

SEQ ID NO: 3166551 - DNA, 25 bp, Homo sapien
caaagaacgatttgcaaggtgggta

SEQ ID NO: 3166552 - DNA, 25 bp, Homo sapien
tgataataggttcagaccaaccttg

SEQ ID NO: 3166553 - DNA, 25 bp, Homo sapien
gggaagtgattaggcttgcacagtg

SEQ ID NO: 3166554 - DNA, 25 bp, Homo sapien
tgggaagtgattaggcttgcacagt

SEQ ID NO: 3166555 - DNA, 25 bp, Homo sapien
ccgggtcacgtgcttaggagccata

SEQ ID NO: 3166556 - DNA, 25 bp, Homo sapien
catattgtcgctagtggccgctggg

SEQ ID NO: 3166557 - DNA, 25 bp, Homo sapien
gactgcgactaacgtcaacgacgga

SEQ ID NO: 3166558 - DNA, 25 bp, Homo sapien
ttttggcaaggcgataagccccacc

SEQ ID NO: 3166559 - DNA, 25 bp, Homo sapien
aacgatgcgcccagtgagcgtcctt

SEQ ID NO: 3166560 - DNA, 25 bp, Homo sapien
tcgcgccgaactacgccctgagatt

SEQ ID NO: 3166561 - DNA, 25 bp, Homo sapien
ggaggacccgtcacaggtaacgatg

SEQ ID NO: 3166562 - DNA, 25 bp, Homo sapien
gcacttcgaggtgccagcgagcacc

SEQ ID NO: 3166563 - DNA, 25 bp, Homo sapien
agccttttgcacactaactcctacc

SEQ ID NO: 3166564 - DNA, 25 bp, Homo sapien
ggcttgcatcgcttccccagggaag

SEQ ID NO: 3166565 - DNA, 25 bp, Homo sapien
tccaccttctaacaggtaccatgtt

SEQ ID NO: 3166566 - DNA, 25 bp, Homo sapien
gtaccatgttctttgtgccacaaag

SEQ ID NO: 3166567 - DNA, 25 bp, Homo sapien
aatttggcaagcagcgagaagcaca

SEQ ID NO: 3166568 - DNA, 25 bp, Homo sapien
gaaatgtcagtccttttaacttcga

SEQ ID NO: 3166569 - DNA, 25 bp, Homo sapien
tggcaagcagcgagaagcacatcca

SEQ ID NO: 3166570 - DNA, 25 bp, Homo sapien
catccaatggcggagcagcatttca

SEQ ID NO: 3166571 - DNA, 25 bp, Homo sapien
tgtcttcttaaagtgcctcgaacac

SEQ ID NO: 3166572 - DNA, 25 bp, Homo sapien
caaagatagaaggtatgactccagg

SEQ ID NO: 3166573 - DNA, 25 bp, Homo sapien
ttttaggctcccaaatgccggctgc

SEQ ID NO: 3166574 - DNA, 25 bp, Homo sapien
ctgtaggtgatatggagaatcaaag

SEQ ID NO: 3166575 - DNA, 25 bp, Homo sapien
tgagtggttactggtaaaatactcc

SEQ ID NO: 3166576 - DNA, 25 bp, Homo sapien
ggtaaacagtatctcataaacaaac

SEQ ID NO: 3166577 - DNA, 25 bp, Homo sapien
tgctaattcctaaagtcagcccact

SEQ ID NO: 3166578 - DNA, 25 bp, Homo sapien
agcaagagtggtgaaggttcttcaa

SEQ ID NO: 3166579 - DNA, 25 bp, Homo sapien
caagatggtgattgtagttagtggc

SEQ ID NO: 3166580 - DNA, 25 bp, Homo sapien
catgaggaagcaccaacaagatggt

SEQ ID NO: 3166581 - DNA, 25 bp, Homo sapien
tagttagtggctggaacggttttga

SEQ ID NO: 3166582 - DNA, 25 bp, Homo sapien
aaatgaactgggattggaattcttc

SEQ ID NO: 3166583 - DNA, 25 bp, Homo sapien
tgagctcagcaagtaatttacttac

SEQ ID NO: 3166584 - DNA, 25 bp, Homo sapien
taaaagaattaacatgagctcagca

SEQ ID NO: 3166585 - DNA, 25 bp, Homo sapien
atcttaaaagaattaacatgagctc

SEQ ID NO: 3166586 - DNA, 25 bp, Homo sapien
catgagctcagcaagtaatttactt

SEQ ID NO: 3166587 - DNA, 25 bp, Homo sapien
gacattcatcctttaattccctgat

SEQ ID NO: 3166588 - DNA, 25 bp, Homo sapien
gaaagtgtccagtctatttgctgtt

SEQ ID NO: 3166589 - DNA, 25 bp, Homo sapien
tgtttcttggctgatcagacattca

SEQ ID NO: 3166590 - DNA, 25 bp, Homo sapien
tgtatcctctagctcgccgatcaca

SEQ ID NO: 3166591 - DNA, 25 bp, Homo sapien
aaatatagtcctgttctatgctctc

SEQ ID NO: 3166592 - DNA, 25 bp, Homo sapien
aatatagtcctgttctatgctctcc

SEQ ID NO: 3166593 - DNA, 25 bp, Homo sapien
gatctgtcagagcaaccaaccattt

SEQ ID NO: 3166594 - DNA, 25 bp, Homo sapien
taacatcttacaatagtgacctggc

SEQ ID NO: 3166595 - DNA, 25 bp, Homo sapien
caggtttggtgtattctaagcagcc

SEQ ID NO: 3166596 - DNA, 25 bp, Homo sapien
gagaaaaattccacgtatcaagcgc

SEQ ID NO: 3166597 - DNA, 25 bp, Homo sapien
taatagattttctctctctcaatta

SEQ ID NO: 3166598 - DNA, 25 bp, Homo sapien
aataaattataatagattttctctc

SEQ ID NO: 3166599 - DNA, 25 bp, Homo sapien
aaattataatagattttctctctct

SEQ ID NO: 3166600 - DNA, 25 bp, Homo sapien
caaataaattataatagattttctc

SEQ ID NO: 3166601 - DNA, 25 bp, Homo sapien
gaccgtatatcctcttaattgaccc

SEQ ID NO: 3166602 - DNA, 25 bp, Homo sapien
attaggtgcataaatattaggaccg

SEQ ID NO: 3166603 - DNA, 25 bp, Homo sapien
taattgaccctttcatcattgtgaa

SEQ ID NO: 3166604 - DNA, 25 bp, Homo sapien
tatttaaactagctgtggccaggcg

SEQ ID NO: 3166605 - DNA, 25 bp, Homo sapien
gaagagggtagtcaacaagaggcat

SEQ ID NO: 3166606 - DNA, 25 bp, Homo sapien
ctatgaagagggtagtcaacaagag

SEQ ID NO: 3166607 - DNA, 25 bp, Homo sapien
attaaatgaagtttgaggcagcaat

SEQ ID NO: 3166608 - DNA, 25 bp, Homo sapien
atgaagagggtagtcaacaagaggc

SEQ ID NO: 3166609 - DNA, 25 bp, Homo sapien
tatgatcagaagcacagctagcagg

SEQ ID NO: 3166610 - DNA, 25 bp, Homo sapien
tctgcatcaggcacaattctatgat

SEQ ID NO: 3166611 - DNA, 25 bp, Homo sapien
tcgtttcaatctctgtcagctcctg

SEQ ID NO: 3166612 - DNA, 25 bp, Homo sapien
tatcttgagcgtgttctccaaaggg

SEQ ID NO: 3166613 - DNA, 25 bp, Homo sapien
tctttcagctgtgtagcctggcaac

SEQ ID NO: 3166614 - DNA, 25 bp, Homo sapien
tcatgaacagtcctcacgtagccct

SEQ ID NO: 3166615 - DNA, 25 bp, Homo sapien
tagccctcacgtggcacatacagag

SEQ ID NO: 3166616 - DNA, 25 bp, Homo sapien
tgtttcattccatgggcacgccacg

SEQ ID NO: 3166617 - DNA, 25 bp, Homo sapien
tgaataaagattggcaccttataaa

SEQ ID NO: 3166618 - DNA, 25 bp, Homo sapien
taaagattggcaccttataaatgtt

SEQ ID NO: 3166619 - DNA, 25 bp, Homo sapien
gtgctttgaataaagattggcacct

SEQ ID NO: 3166620 - DNA, 25 bp, Homo sapien
gctttgaataaagattggcacctta

SEQ ID NO: 3166621 - DNA, 25 bp, Homo sapien
aaaaaacagagtcctaggccagatg

SEQ ID NO: 3166622 - DNA, 25 bp, Homo sapien
aacagagtcctaggccagatgtggt

SEQ ID NO: 3166623 - DNA, 25 bp, Homo sapien
tgggcgacggagtgatgagccgaga

SEQ ID NO: 3166624 - DNA, 25 bp, Homo sapien
agatgtggtggtggggactcacacc

SEQ ID NO: 3166625 - DNA, 25 bp, Homo sapien
cattacaatgtttggagggagatta

SEQ ID NO: 3166626 - DNA, 25 bp, Homo sapien
tacaatgtttggagggagattattg

SEQ ID NO: 3166627 - DNA, 25 bp, Homo sapien
ccattacaatgtttggagggagatt

SEQ ID NO: 3166628 - DNA, 25 bp, Homo sapien
ttaagtgagatggaagctagcagcc

SEQ ID NO: 3166629 - DNA, 25 bp, Homo sapien
caaggtgagctgctggtaagtccaa

SEQ ID NO: 3166630 - DNA, 25 bp, Homo sapien
taaagatgaaacctcttaggccagc

SEQ ID NO: 3166631 - DNA, 25 bp, Homo sapien
tctgtggtcacaactgcggacgctg

SEQ ID NO: 3166632 - DNA, 25 bp, Homo sapien
tttagctctcttggttgtgccctgc

SEQ ID NO: 3166633 - DNA, 25 bp, Homo sapien
tgctttctggatttgggctcagggc

SEQ ID NO: 3166634 - DNA, 25 bp, Homo sapien
tgcatgttgacgcacctggttgtcc

SEQ ID NO: 3166635 - DNA, 25 bp, Homo sapien
tggttgtccagcaagtctgcgtcag

SEQ ID NO: 3166636 - DNA, 25 bp, Homo sapien
atcttgattagttttagccccaggg

SEQ ID NO: 3166637 - DNA, 25 bp, Homo sapien
caaatagttgtgaaaggcatggagg

SEQ ID NO: 3166638 - DNA, 25 bp, Homo sapien
cttgattagttttagccccagggct

SEQ ID NO: 3166639 - DNA, 25 bp, Homo sapien
cactcagcaaatagttgtgaaaggc

SEQ ID NO: 3166640 - DNA, 25 bp, Homo sapien
catcttggcatgtgaacttgtccca

SEQ ID NO: 3166641 - DNA, 25 bp, Homo sapien
gaagatgatattctggtgggcaccg

SEQ ID NO: 3166642 - DNA, 25 bp, Homo sapien
cagtgactgtaggatcttgtggttc

SEQ ID NO: 3166643 - DNA, 25 bp, Homo sapien
gacaatcaacgttcctgtgaaaaag

SEQ ID NO: 3166644 - DNA, 25 bp, Homo sapien
agtcactgcgttgaacctgatgttg

SEQ ID NO: 3166645 - DNA, 25 bp, Homo sapien
gcagtcactgcgttgaacctgatgt

SEQ ID NO: 3166646 - DNA, 25 bp, Homo sapien
tgagcagtcactgcgttgaacctga

SEQ ID NO: 3166647 - DNA, 25 bp, Homo sapien
ctgagcagtcactgcgttgaacctg

SEQ ID NO: 3166648 - DNA, 25 bp, Homo sapien
gtaggagaagcagtgtctgcgagcc

SEQ ID NO: 3166649 - DNA, 25 bp, Homo sapien
ttctgccacagttaccaccaaccag

SEQ ID NO: 3166650 - DNA, 25 bp, Homo sapien
gttaccaccaaccagcataccagta

SEQ ID NO: 3166651 - DNA, 25 bp, Homo sapien
aggagaagcagtgtctgcgagccat

SEQ ID NO: 3166652 - DNA, 25 bp, Homo sapien
ttaagatgtgcggattttggccggg

SEQ ID NO: 3166653 - DNA, 25 bp, Homo sapien
ctttaagatgtgcggattttggccg

SEQ ID NO: 3166654 - DNA, 25 bp, Homo sapien
ctgtggctcatgcctgtaatcccag

SEQ ID NO: 3166655 - DNA, 25 bp, Homo sapien
aagatgtgcggattttggccgggcg

SEQ ID NO: 3166656 - DNA, 25 bp, Homo sapien
tgtctttgtgatgggctgggccctt

SEQ ID NO: 3166657 - DNA, 25 bp, Homo sapien
tagcgtccgcattattttgtgaatc

SEQ ID NO: 3166658 - DNA, 25 bp, Homo sapien
tctccaggaggcgtaaatacctctt

SEQ ID NO: 3166659 - DNA, 25 bp, Homo sapien
gggtgagtgtaaagatctggcagtc

SEQ ID NO: 3166660 - DNA, 25 bp, Homo sapien
acctaaaatggattctgggccttcg

SEQ ID NO: 3166661 - DNA, 25 bp, Homo sapien
acaccttgaagggacgaaaggtctg

SEQ ID NO: 3166662 - DNA, 25 bp, Homo sapien
caccttgaagggacgaaaggtctgt

SEQ ID NO: 3166663 - DNA, 25 bp, Homo sapien
ctaaaatggattctgggccttcgtg

SEQ ID NO: 3166664 - DNA, 25 bp, Homo sapien
tataagtaaggtaacggtgtggcca

SEQ ID NO: 3166665 - DNA, 25 bp, Homo sapien
tctctggagtcttcttctggggaaa

SEQ ID NO: 3166666 - DNA, 25 bp, Homo sapien
tcagctttcctcagatgagcttcct

SEQ ID NO: 3166667 - DNA, 25 bp, Homo sapien
cagctttcctcagatgagcttcctc

SEQ ID NO: 3166668 - DNA, 25 bp, Homo sapien
gcttcctctctggagtcttcttctg

SEQ ID NO: 3166669 - DNA, 25 bp, Homo sapien
aacgtggttattgtccaattttgca

SEQ ID NO: 3166670 - DNA, 25 bp, Homo sapien
ttttgcaaccatcaataacctatga

SEQ ID NO: 3166671 - DNA, 25 bp, Homo sapien
cactgctgacaaagagaacagtttc

SEQ ID NO: 3166672 - DNA, 25 bp, Homo sapien
tatcctgtgaccataagaggttgag

SEQ ID NO: 3166673 - DNA, 25 bp, Homo sapien
tatgttacaggcaagataagtggca

SEQ ID NO: 3166674 - DNA, 25 bp, Homo sapien
ttccaatgagtataaaaacggtgtc

SEQ ID NO: 3166675 - DNA, 25 bp, Homo sapien
catattgcaccctgagaatacaagg

SEQ ID NO: 3166676 - DNA, 25 bp, Homo sapien
ccaggcttggtagcgagcacctata

SEQ ID NO: 3166677 - DNA, 25 bp, Homo sapien
ttgttggcatgacgttgttcatagc

SEQ ID NO: 3166678 - DNA, 25 bp, Homo sapien
tggcatgacgttgttcatagcattc

SEQ ID NO: 3166679 - DNA, 25 bp, Homo sapien
gttggcatgacgttgttcatagcat

SEQ ID NO: 3166680 - DNA, 25 bp, Homo sapien
aaatatacagtgctattcagatttt

SEQ ID NO: 3166681 - DNA, 25 bp, Homo sapien
gatattacttcattacttcatggtg

SEQ ID NO: 3166682 - DNA, 25 bp, Homo sapien
tcattacttcatggtggtggccagg

SEQ ID NO: 3166683 - DNA, 25 bp, Homo sapien
tccttagaaactgggattacttcat

SEQ ID NO: 3166684 - DNA, 25 bp, Homo sapien
ggattacttcattgatattacttca

SEQ ID NO: 3166685 - DNA, 25 bp, Homo sapien
tacaaaccatctctggcctgtgtgc

SEQ ID NO: 3166686 - DNA, 25 bp, Homo sapien
catctttcaagtaccagttctggcc

SEQ ID NO: 3166687 - DNA, 25 bp, Homo sapien
tctggcctacctgcacattctggtg

SEQ ID NO: 3166688 - DNA, 25 bp, Homo sapien
ccatcaccatgtgggaggtctgtta

SEQ ID NO: 3166689 - DNA, 25 bp, Homo sapien
ttccaccttgcctcgcctactaatc

SEQ ID NO: 3166690 - DNA, 25 bp, Homo sapien
caaggtccctcctaacgtcaggtct

SEQ ID NO: 3166691 - DNA, 25 bp, Homo sapien
ggtccctcctaacgtcaggtctgtc

SEQ ID NO: 3166692 - DNA, 25 bp, Homo sapien
tccctcctaacgtcaggtctgtcat

SEQ ID NO: 3166693 - DNA, 25 bp, Homo sapien
cagtcttgctcagtcgtggattgag

SEQ ID NO: 3166694 - DNA, 25 bp, Homo sapien
gtgttgtgcgtgtcctccagatccc

SEQ ID NO: 3166695 - DNA, 25 bp, Homo sapien
ttaaggcaagttttatcgcaagccc

SEQ ID NO: 3166696 - DNA, 25 bp, Homo sapien
catttggctgccatacgcgggtgtt

SEQ ID NO: 3166697 - DNA, 25 bp, Homo sapien
gcatcacttgttcgccaaatccagt

SEQ ID NO: 3166698 - DNA, 25 bp, Homo sapien
aaagcatcacttgttcgccaaatcc

SEQ ID NO: 3166699 - DNA, 25 bp, Homo sapien
agcatcacttgttcgccaaatccag

SEQ ID NO: 3166700 - DNA, 25 bp, Homo sapien
ctaaagcatcacttgttcgccaaat

SEQ ID NO: 3166701 - DNA, 25 bp, Homo sapien
gctataaggatgaacagaggaatgg

SEQ ID NO: 3166702 - DNA, 25 bp, Homo sapien
tgctataaggatgaacagaggaatg

SEQ ID NO: 3166703 - DNA, 25 bp, Homo sapien
tttgctataaggatgaacagaggaa

SEQ ID NO: 3166704 - DNA, 25 bp, Homo sapien
ttttgctataaggatgaacagagga

SEQ ID NO: 3166705 - DNA, 25 bp, Homo sapien
gggagaaaccagaataaccattgct

SEQ ID NO: 3166706 - DNA, 25 bp, Homo sapien
ggagaaaccagaataaccattgctt

SEQ ID NO: 3166707 - DNA, 25 bp, Homo sapien
agaaaccagaataaccattgcttca

SEQ ID NO: 3166708 - DNA, 25 bp, Homo sapien
ggggagaaaccagaataaccattgc

SEQ ID NO: 3166709 - DNA, 25 bp, Homo sapien
ggatattgccctgccatccatgaaa

SEQ ID NO: 3166710 - DNA, 25 bp, Homo sapien
taatagaaaagtagagcaaagagcc

SEQ ID NO: 3166711 - DNA, 25 bp, Homo sapien
tgacactattgcaaccaaattggct

SEQ ID NO: 3166712 - DNA, 25 bp, Homo sapien
tgttcacctgcagtactgtggagtt

SEQ ID NO: 3166713 - DNA, 25 bp, Homo sapien
gctctggaagaggaaccgggcaaat

SEQ ID NO: 3166714 - DNA, 25 bp, Homo sapien
cgtgatcgtgatggaagaggacctc

SEQ ID NO: 3166715 - DNA, 25 bp, Homo sapien
tgaacttaaaaggacatgcccactg

SEQ ID NO: 3166716 - DNA, 25 bp, Homo sapien
tattaggcgcaatgatcgaggtccc

SEQ ID NO: 3166717 - DNA, 25 bp, Homo sapien
gaacttcgcatcaataccaagggtg

SEQ ID NO: 3166718 - DNA, 25 bp, Homo sapien
tatcactgtgtgtagaagcttgcga

SEQ ID NO: 3166719 - DNA, 25 bp, Homo sapien
gattgcctgcttgagtaaacgtacc

SEQ ID NO: 3166720 - DNA, 25 bp, Homo sapien
caggcgggcaggctacttggtatct

SEQ ID NO: 3166721 - DNA, 25 bp, Homo sapien
tttctgtgcacggaaacagaatccg

SEQ ID NO: 3166722 - DNA, 25 bp, Homo sapien
ggcctccgggcaccatttctgtgca

SEQ ID NO: 3166723 - DNA, 25 bp, Homo sapien
acgcagatgcgaaagtggcggcctc

SEQ ID NO: 3166724 - DNA, 25 bp, Homo sapien
aaaagaggttgtgtcgacggaggca

SEQ ID NO: 3166725 - DNA, 25 bp, Homo sapien
tgccggctccctacggtgccgtgtg

SEQ ID NO: 3166726 - DNA, 25 bp, Homo sapien
cgaaggcgcgctgatggaagcttaa

SEQ ID NO: 3166727 - DNA, 25 bp, Homo sapien
gaagaccagtctttcctctaggtga

SEQ ID NO: 3166728 - DNA, 25 bp, Homo sapien
cagagacattgttcttgccggctcc

SEQ ID NO: 3166729 - DNA, 25 bp, Homo sapien
ccgccgttggctggaggtgtgtacg

SEQ ID NO: 3166730 - DNA, 25 bp, Homo sapien
tcggtgtggtggtcggaaagggaca

SEQ ID NO: 3166731 - DNA, 25 bp, Homo sapien
tggaggtgtgtacgggcgccgggag

SEQ ID NO: 3166732 - DNA, 25 bp, Homo sapien
cgccgccgccgttggctggaggtgt

SEQ ID NO: 3166733 - DNA, 25 bp, Homo sapien
cagctctcgcttgcgcgatcaggaa

SEQ ID NO: 3166734 - DNA, 25 bp, Homo sapien
tgcttgtgacgtcaaatcagcggac

SEQ ID NO: 3166735 - DNA, 25 bp, Homo sapien
ttgtgaggcagacgaactcgcggct

SEQ ID NO: 3166736 - DNA, 25 bp, Homo sapien
taagctcgtctacagcagcaacctg

SEQ ID NO: 3166737 - DNA, 25 bp, Homo sapien
caaactgaggtcattgattaacaga

SEQ ID NO: 3166738 - DNA, 25 bp, Homo sapien
gacatagacccattttagaagacaa

SEQ ID NO: 3166739 - DNA, 25 bp, Homo sapien
ggaaatatatcgaaaaagagcatgg

SEQ ID NO: 3166740 - DNA, 25 bp, Homo sapien
tacagggaggttctgtgcaaccttc

SEQ ID NO: 3166741 - DNA, 25 bp, Homo sapien
ttatggatcatccaaggtttttgcc

SEQ ID NO: 3166742 - DNA, 25 bp, Homo sapien
tgtcttgctgctccagtttccttca

SEQ ID NO: 3166743 - DNA, 25 bp, Homo sapien
tcttctcacagtcctgcctttcttg

SEQ ID NO: 3166744 - DNA, 25 bp, Homo sapien
cttgtcttgctgctccagtttcctt

SEQ ID NO: 3166745 - DNA, 25 bp, Homo sapien
cacagtcctgcctttcttgtcttgc

SEQ ID NO: 3166746 - DNA, 25 bp, Homo sapien
ccctgacaaccaaatcctgttgtgt

SEQ ID NO: 3166747 - DNA, 25 bp, Homo sapien
tacagtggttgagtcttctggatac

SEQ ID NO: 3166748 - DNA, 25 bp, Homo sapien
tcttctggatactggctcttgagcc

SEQ ID NO: 3166749 - DNA, 25 bp, Homo sapien
ctgagttcctatctacagtggttga

SEQ ID NO: 3166750 - DNA, 25 bp, Homo sapien
cttagacttcttagcccagcttctg

SEQ ID NO: 3166751 - DNA, 25 bp, Homo sapien
ccagcttctgtcttgaccctcagac

SEQ ID NO: 3166752 - DNA, 25 bp, Homo sapien
tgtcttgaccctcagaccctagaca

SEQ ID NO: 3166753 - DNA, 25 bp, Homo sapien
ttagacttcttagcccagcttctgt

SEQ ID NO: 3166754 - DNA, 25 bp, Homo sapien
gacgacaatgatgattgggaacaac

SEQ ID NO: 3166755 - DNA, 25 bp, Homo sapien
tgctagaaagctggcagttgtctgc

SEQ ID NO: 3166756 - DNA, 25 bp, Homo sapien
catctaatgttttttaccaaggcca

SEQ ID NO: 3166757 - DNA, 25 bp, Homo sapien
tagtcctctttccatgacgacaatg

SEQ ID NO: 3166758 - DNA, 25 bp, Homo sapien
tctggtgctcccatatgcctctagc

SEQ ID NO: 3166759 - DNA, 25 bp, Homo sapien
acctcttgctatcttgtatccccag

SEQ ID NO: 3166760 - DNA, 25 bp, Homo sapien
tgagataccctagaaacatcgtggt

SEQ ID NO: 3166761 - DNA, 25 bp, Homo sapien
tccattgtcttaaactcacctcttg

SEQ ID NO: 3166762 - DNA, 25 bp, Homo sapien
tcctttggccaacgtgacaggtaag

SEQ ID NO: 3166763 - DNA, 25 bp, Homo sapien
acttgcagggtgtttaatcgtcgcc

SEQ ID NO: 3166764 - DNA, 25 bp, Homo sapien
gcattgtggctttctgatcccggta

SEQ ID NO: 3166765 - DNA, 25 bp, Homo sapien
tagactacgcgtttcgacttgcagg

SEQ ID NO: 3166766 - DNA, 25 bp, Homo sapien
agcagcggccaagatgcgcatgcgc

SEQ ID NO: 3166767 - DNA, 25 bp, Homo sapien
tcccgcactctacacactcctactg

SEQ ID NO: 3166768 - DNA, 25 bp, Homo sapien
taagcccggaaacagccgccagcag

SEQ ID NO: 3166769 - DNA, 25 bp, Homo sapien
ctgggccccaatcccgcactctaca

SEQ ID NO: 3166770 - DNA, 25 bp, Homo sapien
ccattaccccgcggaggaaattcat

SEQ ID NO: 3166771 - DNA, 25 bp, Homo sapien
tgtgtgctggggtccggcactctga

SEQ ID NO: 3166772 - DNA, 25 bp, Homo sapien
gtccggcactctgaccccccattac

SEQ ID NO: 3166773 - DNA, 25 bp, Homo sapien
gtgctggggtccggcactctgaccc

SEQ ID NO: 3166774 - DNA, 25 bp, Homo sapien
cctccatggtgggacgctggaggtg

SEQ ID NO: 3166775 - DNA, 25 bp, Homo sapien
gggaggcggcatgtggatgccccct

SEQ ID NO: 3166776 - DNA, 25 bp, Homo sapien
ggtgaccttcgggtctccgagtgct

SEQ ID NO: 3166777 - DNA, 25 bp, Homo sapien
tccgagtgctccgtccccgtccctg

SEQ ID NO: 3166778 - DNA, 25 bp, Homo sapien
tgagctgggggcgtgattgaataac

SEQ ID NO: 3166779 - DNA, 25 bp, Homo sapien
tggacgtgtccccaaagcagtttga

SEQ ID NO: 3166780 - DNA, 25 bp, Homo sapien
tcattaggagttcaggcagaaagcg

SEQ ID NO: 3166781 - DNA, 25 bp, Homo sapien
cagtttgagcgcttaagatccctac

SEQ ID NO: 3166782 - DNA, 25 bp, Homo sapien
tatatttgggtgagcccgaaaagcc

SEQ ID NO: 3166783 - DNA, 25 bp, Homo sapien
cagtaactacttaactgacaggaaa

SEQ ID NO: 3166784 - DNA, 25 bp, Homo sapien
taagcacggacctaaagatgggagc

SEQ ID NO: 3166785 - DNA, 25 bp, Homo sapien
cctgggtgatggttatacatcaaac

SEQ ID NO: 3166786 - DNA, 25 bp, Homo sapien
tatgcacttgcatattcactggagc

SEQ ID NO: 3166787 - DNA, 25 bp, Homo sapien
aatacgcatggcctacgtaacgaca

SEQ ID NO: 3166788 - DNA, 25 bp, Homo sapien
gcactgccaggcttatgaaagtatg

SEQ ID NO: 3166789 - DNA, 25 bp, Homo sapien
gcacagacgtcccatatgatgataa

SEQ ID NO: 3166790 - DNA, 25 bp, Homo sapien
tcaacaatggaccactgcacagacg

SEQ ID NO: 3166791 - DNA, 25 bp, Homo sapien
taaatttccatgtctggatgctctt

SEQ ID NO: 3166792 - DNA, 25 bp, Homo sapien
tccatgtctggatgctcttcaatca

SEQ ID NO: 3166793 - DNA, 25 bp, Homo sapien
tggtgtatagagctacttgtctcaa

SEQ ID NO: 3166794 - DNA, 25 bp, Homo sapien
ctttggttggtgtatagagctactt

SEQ ID NO: 3166795 - DNA, 25 bp, Homo sapien
gacagtcctgatgcatccaattcgc

SEQ ID NO: 3166796 - DNA, 25 bp, Homo sapien
cgagattagacaggcagtacacaga

SEQ ID NO: 3166797 - DNA, 25 bp, Homo sapien
ggaaagtctctctcactatctaagg

SEQ ID NO: 3166798 - DNA, 25 bp, Homo sapien
tcctaactgttatggacaagcagct

SEQ ID NO: 3166799 - DNA, 25 bp, Homo sapien
ttaacactcatagaataaagaagat

SEQ ID NO: 3166800 - DNA, 25 bp, Homo sapien
tgaaagacaataaagaccactttac

SEQ ID NO: 3166801 - DNA, 25 bp, Homo sapien
aaatatgcgtgtgatttaacactca

SEQ ID NO: 3166802 - DNA, 25 bp, Homo sapien
tgtataatcatcacactaatctgct

SEQ ID NO: 3166803 - DNA, 25 bp, Homo sapien
gtgtccaaagcataacctattattt

SEQ ID NO: 3166804 - DNA, 25 bp, Homo sapien
aagcataacctattatttcagaatc

SEQ ID NO: 3166805 - DNA, 25 bp, Homo sapien
ttatattatatagtgtgtccaaagc

SEQ ID NO: 3166806 - DNA, 25 bp, Homo sapien
tattatatagtgtgtccaaagcata

SEQ ID NO: 3166807 - DNA, 25 bp, Homo sapien
gcctgtctcggtgtcccgaagtact

SEQ ID NO: 3166808 - DNA, 25 bp, Homo sapien
aagcatcatgcagatgtaaatgcaa

SEQ ID NO: 3166809 - DNA, 25 bp, Homo sapien
tgcctaaaagcatcatgcagatgta

SEQ ID NO: 3166810 - DNA, 25 bp, Homo sapien
tattatcagaaactatgcctaaaag

SEQ ID NO: 3166811 - DNA, 25 bp, Homo sapien
ccagaagaaacagtacttgacagtg

SEQ ID NO: 3166812 - DNA, 25 bp, Homo sapien
cctagatgaaatcaacaagggaggg

SEQ ID NO: 3166813 - DNA, 25 bp, Homo sapien
gaaagccaggagacttcgcagactg

SEQ ID NO: 3166814 - DNA, 25 bp, Homo sapien
tgccctgtggcattctaatattaag

SEQ ID NO: 3166815 - DNA, 25 bp, Homo sapien
tactaatgataggtagaatcccctc

SEQ ID NO: 3166816 - DNA, 25 bp, Homo sapien
tcacaaattgatctacagtcaacag

SEQ ID NO: 3166817 - DNA, 25 bp, Homo sapien
ctgtgttcttgtattagaaggtaca

SEQ ID NO: 3166818 - DNA, 25 bp, Homo sapien
caattctgagcaacaaagttagaag

SEQ ID NO: 3166819 - DNA, 25 bp, Homo sapien
gaatcccaaattctcagttgaccct

SEQ ID NO: 3166820 - DNA, 25 bp, Homo sapien
atttctgtaaattggcttcccaaat

SEQ ID NO: 3166821 - DNA, 25 bp, Homo sapien
cctgctgcttaatgaaaatttctgt

SEQ ID NO: 3166822 - DNA, 25 bp, Homo sapien
aagataacagaagagtgacattttc

SEQ ID NO: 3166823 - DNA, 25 bp, Homo sapien
ggcttcccaaatcttcactctgtct

SEQ ID NO: 3166824 - DNA, 25 bp, Homo sapien
tcacaccaggccagcggacatggaa

SEQ ID NO: 3166825 - DNA, 25 bp, Homo sapien
gagaagtaagaagcttcacaccagg

SEQ ID NO: 3166826 - DNA, 25 bp, Homo sapien
gcacctgaggccctagttgttttaa

SEQ ID NO: 3166827 - DNA, 25 bp, Homo sapien
caggccagcggacatggaaatcaaa

SEQ ID NO: 3166828 - DNA, 25 bp, Homo sapien
tacgtataacttccctggaatccgc

SEQ ID NO: 3166829 - DNA, 25 bp, Homo sapien
aacttccctggaatccgctagtaag

SEQ ID NO: 3166830 - DNA, 25 bp, Homo sapien
atcattacgtataacttccctggaa

SEQ ID NO: 3166831 - DNA, 25 bp, Homo sapien
ccctggaatccgctagtaagtccat

SEQ ID NO: 3166832 - DNA, 25 bp, Homo sapien
cattgcttcttgttagtgcctgcag

SEQ ID NO: 3166833 - DNA, 25 bp, Homo sapien
tcccctcctctgaaataatgtccag

SEQ ID NO: 3166834 - DNA, 25 bp, Homo sapien
caacaattttctggattgcaccatt

SEQ ID NO: 3166835 - DNA, 25 bp, Homo sapien
cagtagtctctcgaaagcattttca

SEQ ID NO: 3166836 - DNA, 25 bp, Homo sapien
ggtcactttctgtgcagaccagcca

SEQ ID NO: 3166837 - DNA, 25 bp, Homo sapien
cttcaaaccaaggtttcatacgttg

SEQ ID NO: 3166838 - DNA, 25 bp, Homo sapien
catacgttgaatatatgagccttct

SEQ ID NO: 3166839 - DNA, 25 bp, Homo sapien
tggtcactttctgtgcagaccagcc

SEQ ID NO: 3166840 - DNA, 25 bp, Homo sapien
agccttctggcagctactggtagca

SEQ ID NO: 3166841 - DNA, 25 bp, Homo sapien
ccattaggatagtacaaagctgctg

SEQ ID NO: 3166842 - DNA, 25 bp, Homo sapien
tgggagataccaatacacgaacaag

SEQ ID NO: 3166843 - DNA, 25 bp, Homo sapien
ctcagtcaggatatcagcaggaacc

SEQ ID NO: 3166844 - DNA, 25 bp, Homo sapien
gacttacagtaaggacaattgaggc

SEQ ID NO: 3166845 - DNA, 25 bp, Homo sapien
taggatccagataatcaaggaagcc

SEQ ID NO: 3166846 - DNA, 25 bp, Homo sapien
tataggactctatttggcttagcag

SEQ ID NO: 3166847 - DNA, 25 bp, Homo sapien
tataggtaagcaacagagaatgcca

SEQ ID NO: 3166848 - DNA, 25 bp, Homo sapien
aaattaagtcaagaaggaaaatatg

SEQ ID NO: 3166849 - DNA, 25 bp, Homo sapien
ttagagaaattaagtcaagaaggaa

SEQ ID NO: 3166850 - DNA, 25 bp, Homo sapien
aatcttatatcccactttttaagtg

SEQ ID NO: 3166851 - DNA, 25 bp, Homo sapien
cttatatcccactttttaagtgcca

SEQ ID NO: 3166852 - DNA, 25 bp, Homo sapien
tagtcttggtttacttggcagcctc

SEQ ID NO: 3166853 - DNA, 25 bp, Homo sapien
tacttggcagcctcgaataacttct

SEQ ID NO: 3166854 - DNA, 25 bp, Homo sapien
cagatgcaaagtagtcttggtttac

SEQ ID NO: 3166855 - DNA, 25 bp, Homo sapien
ggcagcctcgaataacttctgatac

SEQ ID NO: 3166856 - DNA, 25 bp, Homo sapien
tgtggacgacatgatatctgaatct

SEQ ID NO: 3166857 - DNA, 25 bp, Homo sapien
caccagcaagttaagtatttccatc

SEQ ID NO: 3166858 - DNA, 25 bp, Homo sapien
cttaaggcatacagctaggatgtgg

SEQ ID NO: 3166859 - DNA, 25 bp, Homo sapien
gaatcataaccagaacaccagcaag

SEQ ID NO: 3166860 - DNA, 25 bp, Homo sapien
caaatggctgcctttcattaaccat

SEQ ID NO: 3166861 - DNA, 25 bp, Homo sapien
tggtagaaggtaaaagtgttgacac

SEQ ID NO: 3166862 - DNA, 25 bp, Homo sapien
gaaacaatagagaacagcacagcgc

SEQ ID NO: 3166863 - DNA, 25 bp, Homo sapien
catgagaagtactacaattgccggt

SEQ ID NO: 3166864 - DNA, 25 bp, Homo sapien
aaagcttggaagacaatgatttact

SEQ ID NO: 3166865 - DNA, 25 bp, Homo sapien
aagcttggaagacaatgatttactt

SEQ ID NO: 3166866 - DNA, 25 bp, Homo sapien
aaaagcttggaagacaatgatttac

SEQ ID NO: 3166867 - DNA, 25 bp, Homo sapien
taaaagcttggaagacaatgattta

SEQ ID NO: 3166868 - DNA, 25 bp, Homo sapien
atagagtctcactcttgttgcccag

SEQ ID NO: 3166869 - DNA, 25 bp, Homo sapien
catgtagctaggactaccggtgtgt

SEQ ID NO: 3166870 - DNA, 25 bp, Homo sapien
ctcagtctcccccatagctgggatt

SEQ ID NO: 3166871 - DNA, 25 bp, Homo sapien
atgcctggctagtattttttttgag

SEQ ID NO: 3166872 - DNA, 25 bp, Homo sapien
tccacataataactggccagctgaa

SEQ ID NO: 3166873 - DNA, 25 bp, Homo sapien
gagggttgccaatacttgtagcaag

SEQ ID NO: 3166874 - DNA, 25 bp, Homo sapien
gcaagttgaaccctgagcaactgtt

SEQ ID NO: 3166875 - DNA, 25 bp, Homo sapien
ggcattttcttgcaacgcatgggca

SEQ ID NO: 3166876 - DNA, 25 bp, Homo sapien
ctgttgttaacagatagcaacatga

SEQ ID NO: 3166877 - DNA, 25 bp, Homo sapien
aataatctagtataaaaatcatcat

SEQ ID NO: 3166878 - DNA, 25 bp, Homo sapien
aaataatctagtataaaaatcatca

SEQ ID NO: 3166879 - DNA, 25 bp, Homo sapien
aatggaggctaaaactgtaatttga

SEQ ID NO: 3166880 - DNA, 25 bp, Homo sapien
tgtgaaccattgaggagatttgaga

SEQ ID NO: 3166881 - DNA, 25 bp, Homo sapien
actgtaatttgagagcattctcggg

SEQ ID NO: 3166882 - DNA, 25 bp, Homo sapien
aaactgtaatttgagagcattctcg

SEQ ID NO: 3166883 - DNA, 25 bp, Homo sapien
aaagtgagattaactagggacactg

SEQ ID NO: 3166884 - DNA, 25 bp, Homo sapien
gaataatggatcacgaacaagcagg

SEQ ID NO: 3166885 - DNA, 25 bp, Homo sapien
tgggacaactggagagctatctaga

SEQ ID NO: 3166886 - DNA, 25 bp, Homo sapien
tcatacagttcgctgagaaaaacag

SEQ ID NO: 3166887 - DNA, 25 bp, Homo sapien
taggagactcaacatcacaaaggtg

SEQ ID NO: 3166888 - DNA, 25 bp, Homo sapien
gaacatcctatcaaatcactggctg

SEQ ID NO: 3166889 - DNA, 25 bp, Homo sapien
caaatgatttgccaggtaagcactg

SEQ ID NO: 3166890 - DNA, 25 bp, Homo sapien
cactgccaactgactatgtgccaca

SEQ ID NO: 3166891 - DNA, 25 bp, Homo sapien
gctgcacttcctaaaatgaacagag

SEQ ID NO: 3166892 - DNA, 25 bp, Homo sapien
tattgtatgcaccacaggctgcact

SEQ ID NO: 3166893 - DNA, 25 bp, Homo sapien
catgttcagaggcatatactgggtt

SEQ ID NO: 3166894 - DNA, 25 bp, Homo sapien
aattcagtcatcacacaccagatga

SEQ ID NO: 3166895 - DNA, 25 bp, Homo sapien
tgaagaaaatgcgttactgcaatgg

SEQ ID NO: 3166896 - DNA, 25 bp, Homo sapien
gaacattggctgaattgtgaagaaa

SEQ ID NO: 3166897 - DNA, 25 bp, Homo sapien
gcaacattaataatccaactcttgt

SEQ ID NO: 3166898 - DNA, 25 bp, Homo sapien
gacaattgcttagccaggtacaaag

SEQ ID NO: 3166899 - DNA, 25 bp, Homo sapien
tacttcacataagagttcccataag

SEQ ID NO: 3166900 - DNA, 25 bp, Homo sapien
ttgttaaggaggctaaggattgaaa

SEQ ID NO: 3166901 - DNA, 25 bp, Homo sapien
gctaaggattgaaaatatctagtac

SEQ ID NO: 3166902 - DNA, 25 bp, Homo sapien
tagccgggttgtggttgcgcacacc

SEQ ID NO: 3166903 - DNA, 25 bp, Homo sapien
tcatgtagctctcaagtgagttatc

SEQ ID NO: 3166904 - DNA, 25 bp, Homo sapien
aataaatcgaaatgcccaacaaaag

SEQ ID NO: 3166905 - DNA, 25 bp, Homo sapien
cacataagccttggaccaactgctc

SEQ ID NO: 3166906 - DNA, 25 bp, Homo sapien
aatgcccaacaaaagggcacataag

SEQ ID NO: 3166907 - DNA, 25 bp, Homo sapien
ctacggagataagcatattgagatg

SEQ ID NO: 3166908 - DNA, 25 bp, Homo sapien
aatcctagtttctctatgaaattct

SEQ ID NO: 3166909 - DNA, 25 bp, Homo sapien
tgtttgctaataaatcctagtttct

SEQ ID NO: 3166910 - DNA, 25 bp, Homo sapien
tcttttaccagcttcgtaaactcat

SEQ ID NO: 3166911 - DNA, 25 bp, Homo sapien
ccagcttcgtaaactcatgatcaaa

SEQ ID NO: 3166912 - DNA, 25 bp, Homo sapien
ctgctctcgaatcatatttttgtag

SEQ ID NO: 3166913 - DNA, 25 bp, Homo sapien
tcttcactggacttataaatagcct

SEQ ID NO: 3166914 - DNA, 25 bp, Homo sapien
gagtcacaatattgtcatgctgttc

SEQ ID NO: 3166915 - DNA, 25 bp, Homo sapien
tcactggacttataaatagccttag

SEQ ID NO: 3166916 - DNA, 25 bp, Homo sapien
cttgctgtgtgactgccgtctggag

SEQ ID NO: 3166917 - DNA, 25 bp, Homo sapien
tgctgtgtgactgccgtctggagct

SEQ ID NO: 3166918 - DNA, 25 bp, Homo sapien
cattttaatgtagaaacctgctgcc

SEQ ID NO: 3166919 - DNA, 25 bp, Homo sapien
gccttaattcctcaagttggagatc

SEQ ID NO: 3166920 - DNA, 25 bp, Homo sapien
ttcattcaattactttggcagcact

SEQ ID NO: 3166921 - DNA, 25 bp, Homo sapien
atttttgaagtagaagattcaaata

SEQ ID NO: 3166922 - DNA, 25 bp, Homo sapien
catttttgaagtagaagattcaaat

SEQ ID NO: 3166923 - DNA, 25 bp, Homo sapien
tcttcattcaattactttggcagca

SEQ ID NO: 3166924 - DNA, 25 bp, Homo sapien
taccaatttcttctggctgaatgcc

SEQ ID NO: 3166925 - DNA, 25 bp, Homo sapien
cagctggctttgtaaaagttcctga

SEQ ID NO: 3166926 - DNA, 25 bp, Homo sapien
catagagtccttttcagtcagctgg

SEQ ID NO: 3166927 - DNA, 25 bp, Homo sapien
tgtaagaaccttgatgctgattgtc

SEQ ID NO: 3166928 - DNA, 25 bp, Homo sapien
gctgaaactattgctgaagactgtt

SEQ ID NO: 3166929 - DNA, 25 bp, Homo sapien
ctgaagactgttcatttgtgccaga

SEQ ID NO: 3166930 - DNA, 25 bp, Homo sapien
gaatctctagctgaaactattgctg

SEQ ID NO: 3166931 - DNA, 25 bp, Homo sapien
tctgcaacttgttcagaatctctag

SEQ ID NO: 3166932 - DNA, 25 bp, Homo sapien
taactgagactttaaagttgccagt

SEQ ID NO: 3166933 - DNA, 25 bp, Homo sapien
acagattgtgagtttaactgagact

SEQ ID NO: 3166934 - DNA, 25 bp, Homo sapien
cacagattgtgagtttaactgagac

SEQ ID NO: 3166935 - DNA, 25 bp, Homo sapien
acatcagtagttttggtggctatta

SEQ ID NO: 3166936 - DNA, 25 bp, Homo sapien
ggctattatagtctcggtctctcct

SEQ ID NO: 3166937 - DNA, 25 bp, Homo sapien
ctccttgtacctcaactgattttgc

SEQ ID NO: 3166938 - DNA, 25 bp, Homo sapien
actctttggtctcttgtaataatgc

SEQ ID NO: 3166939 - DNA, 25 bp, Homo sapien
tattttctgatcttgatcggccaag

SEQ ID NO: 3166940 - DNA, 25 bp, Homo sapien
gagcaccaagagatcatcttgttct

SEQ ID NO: 3166941 - DNA, 25 bp, Homo sapien
ccttgagtttattcttcaatgacag

SEQ ID NO: 3166942 - DNA, 25 bp, Homo sapien
gaatccagctgctctttaatggcag

SEQ ID NO: 3166943 - DNA, 25 bp, Homo sapien
gaaaaagacgtatttaatattgtga

SEQ ID NO: 3166944 - DNA, 25 bp, Homo sapien
acgtatttaatattgtgaaaatctg

SEQ ID NO: 3166945 - DNA, 25 bp, Homo sapien
atttaatattgtgaaaatctgttca

SEQ ID NO: 3166946 - DNA, 25 bp, Homo sapien
tatttaatattgtgaaaatctgttc

SEQ ID NO: 3166947 - DNA, 25 bp, Homo sapien
ctagatatgatctagatccttgcca

SEQ ID NO: 3166948 - DNA, 25 bp, Homo sapien
tcttggtctccagattcaagttcat

SEQ ID NO: 3166949 - DNA, 25 bp, Homo sapien
tccagattcaagttcatcctcttct

SEQ ID NO: 3166950 - DNA, 25 bp, Homo sapien
tatgatctagatccttgccaggatc

SEQ ID NO: 3166951 - DNA, 25 bp, Homo sapien
catggaggtaaaccaaagtttagag

SEQ ID NO: 3166952 - DNA, 25 bp, Homo sapien
taaggttttcaacatgggtggcaac

SEQ ID NO: 3166953 - DNA, 25 bp, Homo sapien
tcatcaactaaggactcaaatgctg

SEQ ID NO: 3166954 - DNA, 25 bp, Homo sapien
ggctgatgatatgcactaactccca

SEQ ID NO: 3166955 - DNA, 25 bp, Homo sapien
gcaatcacattagatggagggctga

SEQ ID NO: 3166956 - DNA, 25 bp, Homo sapien
cacttgcctcatcttttattaagaa

SEQ ID NO: 3166957 - DNA, 25 bp, Homo sapien
gatgtaaacaaagggaaccatgacc

SEQ ID NO: 3166958 - DNA, 25 bp, Homo sapien
tgtaaacaaagggaaccatgaccaa

SEQ ID NO: 3166959 - DNA, 25 bp, Homo sapien
taagatgtaaacaaagggaaccatg

SEQ ID NO: 3166960 - DNA, 25 bp, Homo sapien
catccacagctctgtggcattcgta

SEQ ID NO: 3166961 - DNA, 25 bp, Homo sapien
atttcatccacagctctgtggcatt

SEQ ID NO: 3166962 - DNA, 25 bp, Homo sapien
tccacagctctgtggcattcgtatt

SEQ ID NO: 3166963 - DNA, 25 bp, Homo sapien
ttcatccacagctctgtggcattcg

SEQ ID NO: 3166964 - DNA, 25 bp, Homo sapien
attggccagcttgtggtggggaaac

SEQ ID NO: 3166965 - DNA, 25 bp, Homo sapien
ttgtggtggggaaacagcaccattc

SEQ ID NO: 3166966 - DNA, 25 bp, Homo sapien
tgtggtggggaaacagcaccattcc

SEQ ID NO: 3166967 - DNA, 25 bp, Homo sapien
ggtggggaaacagcaccattcccac

SEQ ID NO: 3166968 - DNA, 25 bp, Homo sapien
gcattgattgaggtcctgggaattc

SEQ ID NO: 3166969 - DNA, 25 bp, Homo sapien
tcggccaatgtttatggagtgccca

SEQ ID NO: 3166970 - DNA, 25 bp, Homo sapien
tgccctcatagcacttacatccatt

SEQ ID NO: 3166971 - DNA, 25 bp, Homo sapien
tgcttcatcctactctgcagataca

SEQ ID NO: 3166972 - DNA, 25 bp, Homo sapien
tctggttctcacctattctatggga

SEQ ID NO: 3166973 - DNA, 25 bp, Homo sapien
ttgatcatatagcttgggctcctgg

SEQ ID NO: 3166974 - DNA, 25 bp, Homo sapien
tacagggtcatatgtgaattttaga

SEQ ID NO: 3166975 - DNA, 25 bp, Homo sapien
tgtatgggatataggagagaacccc

SEQ ID NO: 3166976 - DNA, 25 bp, Homo sapien
caaaatgtgagactccagcatattt

SEQ ID NO: 3166977 - DNA, 25 bp, Homo sapien
cagaagaatgaatggcatttactgt

SEQ ID NO: 3166978 - DNA, 25 bp, Homo sapien
aatctctgacatgtagtaattcgtc

SEQ ID NO: 3166979 - DNA, 25 bp, Homo sapien
tgctgatagggtacctcagggtgaa

SEQ ID NO: 3166980 - DNA, 25 bp, Homo sapien
gatacatcttctgggactatcagct

SEQ ID NO: 3166981 - DNA, 25 bp, Homo sapien
tctgggactatcagctttttcaaaa

SEQ ID NO: 3166982 - DNA, 25 bp, Homo sapien
tatgccaagacacaagctaaacatg

SEQ ID NO: 3166983 - DNA, 25 bp, Homo sapien
tccttggacttgatgatatgccaag

SEQ ID NO: 3166984 - DNA, 25 bp, Homo sapien
gcgggtgtgtgccaaaagatcacat

SEQ ID NO: 3166985 - DNA, 25 bp, Homo sapien
tatctgcaaagacccgtatatccaa

SEQ ID NO: 3166986 - DNA, 25 bp, Homo sapien
gtagctgcaactggtcagggtccca

SEQ ID NO: 3166987 - DNA, 25 bp, Homo sapien
tccagtcccacaagaatgagaatgc

SEQ ID NO: 3166988 - DNA, 25 bp, Homo sapien
accttaggaacctgtgcactgctga

SEQ ID NO: 3166989 - DNA, 25 bp, Homo sapien
caaatttactccttggtgtcagggc

SEQ ID NO: 3166990 - DNA, 25 bp, Homo sapien
tcaaatttactccttggtgtcaggg

SEQ ID NO: 3166991 - DNA, 25 bp, Homo sapien
gggccaccttaggaacctgtgcact

SEQ ID NO: 3166992 - DNA, 25 bp, Homo sapien
gccctgcagtaatgtgttcgtttcc

SEQ ID NO: 3166993 - DNA, 25 bp, Homo sapien
ctcaaaagagcaagatgtcctgtca

SEQ ID NO: 3166994 - DNA, 25 bp, Homo sapien
tgctggccccgcaaatagtaaggta

SEQ ID NO: 3166995 - DNA, 25 bp, Homo sapien
tacagcgaaccatattgcagagacc

SEQ ID NO: 3166996 - DNA, 25 bp, Homo sapien
tcacccactcattgcagtgactggc

SEQ ID NO: 3166997 - DNA, 25 bp, Homo sapien
gtgactggcgtgcatgccggcggcc

SEQ ID NO: 3166998 - DNA, 25 bp, Homo sapien
tcaaggtagagcctgaatcacccac

SEQ ID NO: 3166999 - DNA, 25 bp, Homo sapien
cactgctctgcgagttccctcagaa

SEQ ID NO: 3167000 - DNA, 25 bp, Homo sapien
gaaaccgatccaacctagagaccat

SEQ ID NO: 3167001 - DNA, 25 bp, Homo sapien
tgtgatatcctctggacatggtggc

SEQ ID NO: 3167002 - DNA, 25 bp, Homo sapien
tgagtagtatcagcagcccatagag

SEQ ID NO: 3167003 - DNA, 25 bp, Homo sapien
gatcattcaggtaaaggcactcatt

SEQ ID NO: 3167004 - DNA, 25 bp, Homo sapien
tccaagctgggacgtggctttcttg

SEQ ID NO: 3167005 - DNA, 25 bp, Homo sapien
caagccctttattgtggatatacca

SEQ ID NO: 3167006 - DNA, 25 bp, Homo sapien
tgttcttgccctaagccagtccaag

SEQ ID NO: 3167007 - DNA, 25 bp, Homo sapien
tgattatgtgctcacacagagttcc

SEQ ID NO: 3167008 - DNA, 25 bp, Homo sapien
catcttctaacaaggagggtctgct

SEQ ID NO: 3167009 - DNA, 25 bp, Homo sapien
gaacaatgccgggttgcaaacctag

SEQ ID NO: 3167010 - DNA, 25 bp, Homo sapien
gcaggtgaccctagcagtgccagtt

SEQ ID NO: 3167011 - DNA, 25 bp, Homo sapien
taataggacttcttaccaggagagg

SEQ ID NO: 3167012 - DNA, 25 bp, Homo sapien
ggaaatactaagaaccctgcaagat

SEQ ID NO: 3167013 - DNA, 25 bp, Homo sapien
actaagaaccctgcaagatgttttc

SEQ ID NO: 3167014 - DNA, 25 bp, Homo sapien
atactaagaaccctgcaagatgttt

SEQ ID NO: 3167015 - DNA, 25 bp, Homo sapien
aaatactaagaaccctgcaagatgt

SEQ ID NO: 3167016 - DNA, 25 bp, Homo sapien
tctacccagggataatgacatagtt

SEQ ID NO: 3167017 - DNA, 25 bp, Homo sapien
aaatctagatatggcttcaccaagg

SEQ ID NO: 3167018 - DNA, 25 bp, Homo sapien
gccctgattattgtcacccagttta

SEQ ID NO: 3167019 - DNA, 25 bp, Homo sapien
tctaaaaatgtgattatgccctgat

SEQ ID NO: 3167020 - DNA, 25 bp, Homo sapien
tgctctgctcagtgcgaaatcctga

SEQ ID NO: 3167021 - DNA, 25 bp, Homo sapien
tgaacctgcgggttggtactgagca

SEQ ID NO: 3167022 - DNA, 25 bp, Homo sapien
ccacagagggtagctttgtcccatt

SEQ ID NO: 3167023 - DNA, 25 bp, Homo sapien
tatcccaggccattgggagactggc

SEQ ID NO: 3167024 - DNA, 25 bp, Homo sapien
gatttgagtaataacatccatgctc

SEQ ID NO: 3167025 - DNA, 25 bp, Homo sapien
ctctactgcaatagtatgatctcag

SEQ ID NO: 3167026 - DNA, 25 bp, Homo sapien
ctgagttcttggagagactgatttg

SEQ ID NO: 3167027 - DNA, 25 bp, Homo sapien
ctcctgctaggactgttaattgaac

SEQ ID NO: 3167028 - DNA, 25 bp, Homo sapien
gaactctatttcgaaccaagcctgt

SEQ ID NO: 3167029 - DNA, 25 bp, Homo sapien
tacaaccttgcgaagtgggtccagg

SEQ ID NO: 3167030 - DNA, 25 bp, Homo sapien
gagatcaagccatatcctcaggcct

SEQ ID NO: 3167031 - DNA, 25 bp, Homo sapien
tctccgctaatgaaatgagctggca

SEQ ID NO: 3167032 - DNA, 25 bp, Homo sapien
ccaaagtgcaggtagctatatacgt

SEQ ID NO: 3167033 - DNA, 25 bp, Homo sapien
tataagtcagcacagttccaaagtg

SEQ ID NO: 3167034 - DNA, 25 bp, Homo sapien
tctggagcagatggtgccaaccgtc

SEQ ID NO: 3167035 - DNA, 25 bp, Homo sapien
taccccacaagtttggccactgttc

SEQ ID NO: 3167036 - DNA, 25 bp, Homo sapien
actgccttaagtataaatagtacct

SEQ ID NO: 3167037 - DNA, 25 bp, Homo sapien
ctgccttaagtataaatagtacctt

SEQ ID NO: 3167038 - DNA, 25 bp, Homo sapien
gcaaaacgaatgagctgtaacccct

SEQ ID NO: 3167039 - DNA, 25 bp, Homo sapien
acagcttagctgtgagggtggacac

SEQ ID NO: 3167040 - DNA, 25 bp, Homo sapien
tgtattgtgaaaactgctgaacatg

SEQ ID NO: 3167041 - DNA, 25 bp, Homo sapien
gaggccttatggactaactctgtga

SEQ ID NO: 3167042 - DNA, 25 bp, Homo sapien
ggcactacgagatgcacttttgaaa

SEQ ID NO: 3167043 - DNA, 25 bp, Homo sapien
gcactacgagatgcacttttgaaaa

SEQ ID NO: 3167044 - DNA, 25 bp, Homo sapien
actacgagatgcacttttgaaaaag

SEQ ID NO: 3167045 - DNA, 25 bp, Homo sapien
cactacgagatgcacttttgaaaaa

SEQ ID NO: 3167046 - DNA, 25 bp, Homo sapien
ttccagttcgacaaataaagagaag

SEQ ID NO: 3167047 - DNA, 25 bp, Homo sapien
actttatgatgatgcggtatagcca

SEQ ID NO: 3167048 - DNA, 25 bp, Homo sapien
gtatagccagaatgtccggtcaaaa

SEQ ID NO: 3167049 - DNA, 25 bp, Homo sapien
ttccgagaaaaacaggtgagttcca

SEQ ID NO: 3167050 - DNA, 25 bp, Homo sapien
tacacatactgttagactagatgcc

SEQ ID NO: 3167051 - DNA, 25 bp, Homo sapien
tttgatctcgtgactggtgctgctc

SEQ ID NO: 3167052 - DNA, 25 bp, Homo sapien
caaatgttagttgcaagagtttctc

SEQ ID NO: 3167053 - DNA, 25 bp, Homo sapien
tgacttccagatccctctagtagga

SEQ ID NO: 3167054 - DNA, 25 bp, Homo sapien
gaggccggtgtacctgtttgcccca

SEQ ID NO: 3167055 - DNA, 25 bp, Homo sapien
tcctggctgacattcccttcacgag

SEQ ID NO: 3167056 - DNA, 25 bp, Homo sapien
gtttgccccacttgttgtgaatgtc

SEQ ID NO: 3167057 - DNA, 25 bp, Homo sapien
gacagtcagtttgagcatttcatca

SEQ ID NO: 3167058 - DNA, 25 bp, Homo sapien
gcagatgtctcttttgtatggagcc

SEQ ID NO: 3167059 - DNA, 25 bp, Homo sapien
tatcagccctgatagatttgtccag

SEQ ID NO: 3167060 - DNA, 25 bp, Homo sapien
gatgagaagcgagggcctgtaccaa

SEQ ID NO: 3167061 - DNA, 25 bp, Homo sapien
caaaagttttcgctgcccacaggag

SEQ ID NO: 3167062 - DNA, 25 bp, Homo sapien
gaagcacgtggtaaaacacttgcgg

SEQ ID NO: 3167063 - DNA, 25 bp, Homo sapien
gaaaaggactttatagatcagccag

SEQ ID NO: 3167064 - DNA, 25 bp, Homo sapien
gatggcaaccagaccattgtctcag

SEQ ID NO: 3167065 - DNA, 25 bp, Homo sapien
atcttcaggacactcactacaggga

SEQ ID NO: 3167066 - DNA, 25 bp, Homo sapien
cgcataattctacccttgagtgaca

SEQ ID NO: 3167067 - DNA, 25 bp, Homo sapien
catgaacattttctcgtgtcagtaa

SEQ ID NO: 3167068 - DNA, 25 bp, Homo sapien
tactgtggcagtattgtgtctgtaa

SEQ ID NO: 3167069 - DNA, 25 bp, Homo sapien
aatcttccttacttgcttcgtgtgc

SEQ ID NO: 3167070 - DNA, 25 bp, Homo sapien
gtacccagcggcaacacgagcagca

SEQ ID NO: 3167071 - DNA, 25 bp, Homo sapien
agcagcacgagcgagcgtcgagacc

SEQ ID NO: 3167072 - DNA, 25 bp, Homo sapien
ttcgcctccggctggatcagcactg

SEQ ID NO: 3167073 - DNA, 25 bp, Homo sapien
gcactggcagcaaacgtacccagcg

SEQ ID NO: 3167074 - DNA, 25 bp, Homo sapien
cattagcatttggatcccctacgga

SEQ ID NO: 3167075 - DNA, 25 bp, Homo sapien
tttcaccacgaagtagggtcaggcg

SEQ ID NO: 3167076 - DNA, 25 bp, Homo sapien
tactaacaacagctgccgagaggag

SEQ ID NO: 3167077 - DNA, 25 bp, Homo sapien
tgtgaaacctgcaaaacgggcctct

SEQ ID NO: 3167078 - DNA, 25 bp, Homo sapien
taaactacgtagacacaaggaaatg

SEQ ID NO: 3167079 - DNA, 25 bp, Homo sapien
tctggcaagcaatctgtcaaaatgt

SEQ ID NO: 3167080 - DNA, 25 bp, Homo sapien
gatacatctacatactgatagccca

SEQ ID NO: 3167081 - DNA, 25 bp, Homo sapien
cacagaactgagaatgaagaggcta

SEQ ID NO: 3167082 - DNA, 25 bp, Homo sapien
tcccagtccacagaaatcactgatg

SEQ ID NO: 3167083 - DNA, 25 bp, Homo sapien
ctttccaaggcatattctgcaccag

SEQ ID NO: 3167084 - DNA, 25 bp, Homo sapien
taagcataacagtttccgggaaagc

SEQ ID NO: 3167085 - DNA, 25 bp, Homo sapien
tcagggcagactgttccttttttca

SEQ ID NO: 3167086 - DNA, 25 bp, Homo sapien
tgtcgagtgcagtcattttccaggc

SEQ ID NO: 3167087 - DNA, 25 bp, Homo sapien
cactgttcctggctcacatacatac

SEQ ID NO: 3167088 - DNA, 25 bp, Homo sapien
tgaagttgttttgtacaacccactg

SEQ ID NO: 3167089 - DNA, 25 bp, Homo sapien
caactaaaggccatgcacagagctg

SEQ ID NO: 3167090 - DNA, 25 bp, Homo sapien
agactttgaccaactcagatgggat

SEQ ID NO: 3167091 - DNA, 25 bp, Homo sapien
tacaattgttagcatgccatcagaa

SEQ ID NO: 3167092 - DNA, 25 bp, Homo sapien
gtttccaacacagttgccatctaca

SEQ ID NO: 3167093 - DNA, 25 bp, Homo sapien
gatgggatcccctagtttccaacac

SEQ ID NO: 3167094 - DNA, 25 bp, Homo sapien
agtttaagtgatgctaggcctcaaa

SEQ ID NO: 3167095 - DNA, 25 bp, Homo sapien
gatgctaggcctcaaactgactccc

SEQ ID NO: 3167096 - DNA, 25 bp, Homo sapien
tgactccccactctcagttgtggta

SEQ ID NO: 3167097 - DNA, 25 bp, Homo sapien
gactccccactctcagttgtggtaa

SEQ ID NO: 3167098 - DNA, 25 bp, Homo sapien
ggtgactatttcaaaatgtcccgtc

SEQ ID NO: 3167099 - DNA, 25 bp, Homo sapien
gtgactatttcaaaatgtcccgtct

SEQ ID NO: 3167100 - DNA, 25 bp, Homo sapien
gactatttcaaaatgtcccgtcttc

SEQ ID NO: 3167101 - DNA, 25 bp, Homo sapien
ctatttcaaaatgtcccgtcttcat

SEQ ID NO: 3167102 - DNA, 25 bp, Homo sapien
atgtccactagaatcatggttgcca

SEQ ID NO: 3167103 - DNA, 25 bp, Homo sapien
ccactagaatcatggttgccagcag

SEQ ID NO: 3167104 - DNA, 25 bp, Homo sapien
actagaatcatggttgccagcagca

SEQ ID NO: 3167105 - DNA, 25 bp, Homo sapien
gtccactagaatcatggttgccagc

SEQ ID NO: 3167106 - DNA, 25 bp, Homo sapien
tcttaaccaaactgttctgttgcct

SEQ ID NO: 3167107 - DNA, 25 bp, Homo sapien
tgcccggccgtcttgtcctcttaac

SEQ ID NO: 3167108 - DNA, 25 bp, Homo sapien
gtgcccggccgtcttgtcctcttaa

SEQ ID NO: 3167109 - DNA, 25 bp, Homo sapien
taatcttctcgagattggccagcca

SEQ ID NO: 3167110 - DNA, 25 bp, Homo sapien
aacacagtgagctggtcattagcag

SEQ ID NO: 3167111 - DNA, 25 bp, Homo sapien
ttcggaaatatatgccatcagggct

SEQ ID NO: 3167112 - DNA, 25 bp, Homo sapien
agatttgagtctttcgggctgccca

SEQ ID NO: 3167113 - DNA, 25 bp, Homo sapien
tactccagggagtttttgatcctga

SEQ ID NO: 3167114 - DNA, 25 bp, Homo sapien
ctgcctgtctttaaaggttactcca

SEQ ID NO: 3167115 - DNA, 25 bp, Homo sapien
tgcctgtctttaaaggttactccag

SEQ ID NO: 3167116 - DNA, 25 bp, Homo sapien
ttactccagggagtttttgatcctg

SEQ ID NO: 3167117 - DNA, 25 bp, Homo sapien
ctaggttctcaatacagttttcggt

SEQ ID NO: 3167118 - DNA, 25 bp, Homo sapien
gtagacatagatgggttgaaaatat

SEQ ID NO: 3167119 - DNA, 25 bp, Homo sapien
cagggttgtagacatagatgggttg

SEQ ID NO: 3167120 - DNA, 25 bp, Homo sapien
ggttgtagacatagatgggttgaaa

SEQ ID NO: 3167121 - DNA, 25 bp, Homo sapien
ttgtagacatagatgggttgaaaat

SEQ ID NO: 3167122 - DNA, 25 bp, Homo sapien
gagccaccatgcccaaccaagatta

SEQ ID NO: 3167123 - DNA, 25 bp, Homo sapien
accatgcccaaccaagattattttt

SEQ ID NO: 3167124 - DNA, 25 bp, Homo sapien
caccatgcccaaccaagattatttt

SEQ ID NO: 3167125 - DNA, 25 bp, Homo sapien
gccaccatgcccaaccaagattatt

SEQ ID NO: 3167126 - DNA, 25 bp, Homo sapien
caggaaatatgactataaagaacca

SEQ ID NO: 3167127 - DNA, 25 bp, Homo sapien
tattttcaggaaatatgactataaa

SEQ ID NO: 3167128 - DNA, 25 bp, Homo sapien
ttcaggaaatatgactataaagaac

SEQ ID NO: 3167129 - DNA, 25 bp, Homo sapien
ggaaatatgactataaagaaccatt

SEQ ID NO: 3167130 - DNA, 25 bp, Homo sapien
ggtcttcaagcttctggtttttctc

SEQ ID NO: 3167131 - DNA, 25 bp, Homo sapien
tatggtcttcaagcttctggttttt

SEQ ID NO: 3167132 - DNA, 25 bp, Homo sapien
tcttcaagcttctggtttttctcac

SEQ ID NO: 3167133 - DNA, 25 bp, Homo sapien
atggtcttcaagcttctggtttttc

SEQ ID NO: 3167134 - DNA, 25 bp, Homo sapien
acgcctggccaagcccccagaattt

SEQ ID NO: 3167135 - DNA, 25 bp, Homo sapien
tggccaagcccccagaatttataaa

SEQ ID NO: 3167136 - DNA, 25 bp, Homo sapien
tgtttccaggctacagtgctgtggc

SEQ ID NO: 3167137 - DNA, 25 bp, Homo sapien
caagcccccagaatttataaaaatg

SEQ ID NO: 3167138 - DNA, 25 bp, Homo sapien
aagctcatcagttttaacgaaggaa

SEQ ID NO: 3167139 - DNA, 25 bp, Homo sapien
gtcttcaagcttccagtttttctca

SEQ ID NO: 3167140 - DNA, 25 bp, Homo sapien
catggtcttcaagcttccagttttt

SEQ ID NO: 3167141 - DNA, 25 bp, Homo sapien
tcttcaagcttccagtttttctcac

SEQ ID NO: 3167142 - DNA, 25 bp, Homo sapien
tggtcttcaagcttccagtttttct

SEQ ID NO: 3167143 - DNA, 25 bp, Homo sapien
tatgaaaatattcccacctgtaaag

SEQ ID NO: 3167144 - DNA, 25 bp, Homo sapien
cacctgtaaagggaggtatcttgta

SEQ ID NO: 3167145 - DNA, 25 bp, Homo sapien
ggcagttactatagctacagcaaaa

SEQ ID NO: 3167146 - DNA, 25 bp, Homo sapien
ttaacaatggaacaaaagaattggc

SEQ ID NO: 3167147 - DNA, 25 bp, Homo sapien
catggtcttcaagcttctggttttt

SEQ ID NO: 3167148 - DNA, 25 bp, Homo sapien
atggtcttcaagcttctggtttttc

SEQ ID NO: 3167149 - DNA, 25 bp, Homo sapien
tcttcaagcttctggtttttctcac

SEQ ID NO: 3167150 - DNA, 25 bp, Homo sapien
ggtcttcaagcttctggtttttctc

SEQ ID NO: 3167151 - DNA, 25 bp, Homo sapien
gagagtctctaatataccaaaccag

SEQ ID NO: 3167152 - DNA, 25 bp, Homo sapien
cagtaagctaaggtgagctctgcct

SEQ ID NO: 3167153 - DNA, 25 bp, Homo sapien
gagctgctatgtcatttttctaaag

SEQ ID NO: 3167154 - DNA, 25 bp, Homo sapien
gtaaagggagatatattgcaaaatg

SEQ ID NO: 3167155 - DNA, 25 bp, Homo sapien
caggtatttgggtgggttcaaggat

SEQ ID NO: 3167156 - DNA, 25 bp, Homo sapien
tgggtgggttcaaggattttcacac

SEQ ID NO: 3167157 - DNA, 25 bp, Homo sapien
ttgggtgggttcaaggattttcaca

SEQ ID NO: 3167158 - DNA, 25 bp, Homo sapien
gatacaggcaatgagatgttagcca

SEQ ID NO: 3167159 - DNA, 25 bp, Homo sapien
cactgagcatgtttatgccaggaga

SEQ ID NO: 3167160 - DNA, 25 bp, Homo sapien
gaatatcgtgttttgttacctggag

SEQ ID NO: 3167161 - DNA, 25 bp, Homo sapien
tagaggagtcttctgccatagcact

SEQ ID NO: 3167162 - DNA, 25 bp, Homo sapien
caggtagtggaaaaggttctggaat

SEQ ID NO: 3167163 - DNA, 25 bp, Homo sapien
caattatgaggcatagaaagtccca

SEQ ID NO: 3167164 - DNA, 25 bp, Homo sapien
catatctaatggtgactgtactccc

SEQ ID NO: 3167165 - DNA, 25 bp, Homo sapien
cagcagcgttacgtgaagttcagca

SEQ ID NO: 3167166 - DNA, 25 bp, Homo sapien
cagtggcttgcaccctgagattcca

SEQ ID NO: 3167167 - DNA, 25 bp, Homo sapien
gacttagaatccatggtgcctccac

SEQ ID NO: 3167168 - DNA, 25 bp, Homo sapien
gaagcctgcctcattctggaataga

SEQ ID NO: 3167169 - DNA, 25 bp, Homo sapien
tggcccagagaaccgtaatagcagc

SEQ ID NO: 3167170 - DNA, 25 bp, Homo sapien
cggaaagtgtacagcccagatgtct

SEQ ID NO: 3167171 - DNA, 25 bp, Homo sapien
taaatctgtcctaactggcaagcca

SEQ ID NO: 3167172 - DNA, 25 bp, Homo sapien
tagtctgtaaaaaagtgggcctcta

SEQ ID NO: 3167173 - DNA, 25 bp, Homo sapien
tatgggaacagacacacaacgctct

SEQ ID NO: 3167174 - DNA, 25 bp, Homo sapien
gctacacatagctttccaggagagg

SEQ ID NO: 3167175 - DNA, 25 bp, Homo sapien
tacatattgaacttagattcccaag

SEQ ID NO: 3167176 - DNA, 25 bp, Homo sapien
caaacttggttatctctgtgagtgg

SEQ ID NO: 3167177 - DNA, 25 bp, Homo sapien
gattcccaagtacattaatacctac

SEQ ID NO: 3167178 - DNA, 25 bp, Homo sapien
tacttcttagtcttattagccaggt

SEQ ID NO: 3167179 - DNA, 25 bp, Homo sapien
attgttgatatttccttgactttta

SEQ ID NO: 3167180 - DNA, 25 bp, Homo sapien
taggattgttgatatttccttgact

SEQ ID NO: 3167181 - DNA, 25 bp, Homo sapien
ttgatatttccttgacttttatctt

SEQ ID NO: 3167182 - DNA, 25 bp, Homo sapien
tgttgatatttccttgacttttatc

SEQ ID NO: 3167183 - DNA, 25 bp, Homo sapien
cagaagcaggcatttatcaactgag

SEQ ID NO: 3167184 - DNA, 25 bp, Homo sapien
ctttttctatattacagaagcaggc

SEQ ID NO: 3167185 - DNA, 25 bp, Homo sapien
actgaggaaatgagatacttcttac

SEQ ID NO: 3167186 - DNA, 25 bp, Homo sapien
tatcaactgaggaaatgagatactt

SEQ ID NO: 3167187 - DNA, 25 bp, Homo sapien
tgtaaacatcggtctactttagaca

SEQ ID NO: 3167188 - DNA, 25 bp, Homo sapien
agttctggaccatgaaaaattgacc

SEQ ID NO: 3167189 - DNA, 25 bp, Homo sapien
taatcaaactcagaacctaaagcag

SEQ ID NO: 3167190 - DNA, 25 bp, Homo sapien
ggatagatatcctgcagtgctctag

SEQ ID NO: 3167191 - DNA, 25 bp, Homo sapien
caagggtcgactatatatcatcaag

SEQ ID NO: 3167192 - DNA, 25 bp, Homo sapien
ggactggttctagaacccctgagga

SEQ ID NO: 3167193 - DNA, 25 bp, Homo sapien
tatcatcaagatctgctacgctagg

SEQ ID NO: 3167194 - DNA, 25 bp, Homo sapien
gccacatatggtctgtgtgcacaaa

SEQ ID NO: 3167195 - DNA, 25 bp, Homo sapien
gataaaaataattgattagcacata

SEQ ID NO: 3167196 - DNA, 25 bp, Homo sapien
aaaagataaaaataattgattagca

SEQ ID NO: 3167197 - DNA, 25 bp, Homo sapien
aagataaaaataattgattagcaca

SEQ ID NO: 3167198 - DNA, 25 bp, Homo sapien
ataaaaataattgattagcacatat

SEQ ID NO: 3167199 - DNA, 25 bp, Homo sapien
tgggcaacatagcgagaccccatct

SEQ ID NO: 3167200 - DNA, 25 bp, Homo sapien
ttgagaccaggagtttgagcctggg

SEQ ID NO: 3167201 - DNA, 25 bp, Homo sapien
cctgggcaacatagcgagaccccat

SEQ ID NO: 3167202 - DNA, 25 bp, Homo sapien
agcctgggcaacatagcgagacccc

SEQ ID NO: 3167203 - DNA, 25 bp, Homo sapien
cagttgacccttaatacgggtgttg

SEQ ID NO: 3167204 - DNA, 25 bp, Homo sapien
gcctaccattaactggaagccttac

SEQ ID NO: 3167205 - DNA, 25 bp, Homo sapien
ccccacacaatgaaaacctacatgt

SEQ ID NO: 3167206 - DNA, 25 bp, Homo sapien
acagatttcaggctatatttccata

SEQ ID NO: 3167207 - DNA, 25 bp, Homo sapien
aggatggcttttgggacctggaaca

SEQ ID NO: 3167208 - DNA, 25 bp, Homo sapien
tgaccatcccaaactgtggaagcag

SEQ ID NO: 3167209 - DNA, 25 bp, Homo sapien
ctgtggaagcagcagtttgcccgag

SEQ ID NO: 3167210 - DNA, 25 bp, Homo sapien
cccgaggatgcagaaggatggcttt

SEQ ID NO: 3167211 - DNA, 25 bp, Homo sapien
tccagtgactttggccaacacgtaa

SEQ ID NO: 3167212 - DNA, 25 bp, Homo sapien
gacatatatctggaccaactttctg

SEQ ID NO: 3167213 - DNA, 25 bp, Homo sapien
gatctcctgtggatccctatagtta

SEQ ID NO: 3167214 - DNA, 25 bp, Homo sapien
taatcagaagtatacagttttcggg

SEQ ID NO: 3167215 - DNA, 25 bp, Homo sapien
tactgcatcagaccttccttaagaa

SEQ ID NO: 3167216 - DNA, 25 bp, Homo sapien
gaatgaaaccgaccacatggaggga

SEQ ID NO: 3167217 - DNA, 25 bp, Homo sapien
tctgaaatagtcacctcacagctct

SEQ ID NO: 3167218 - DNA, 25 bp, Homo sapien
tattgtccattgagcctgtactctg

SEQ ID NO: 3167219 - DNA, 25 bp, Homo sapien
gaagttctgagtgccttagtgaggc

SEQ ID NO: 3167220 - DNA, 25 bp, Homo sapien
tcaactgtaagttctcaaaggcaca

SEQ ID NO: 3167221 - DNA, 25 bp, Homo sapien
gatgcctgtaagatcttcccaattg

SEQ ID NO: 3167222 - DNA, 25 bp, Homo sapien
gatagagggctttttgaactagtcc

SEQ ID NO: 3167223 - DNA, 25 bp, Homo sapien
gaaactgcacaattgagccatgtag

SEQ ID NO: 3167224 - DNA, 25 bp, Homo sapien
tattgggatgatgtggaaactgcac

SEQ ID NO: 3167225 - DNA, 25 bp, Homo sapien
gaacctgacttgctacagtctggac

SEQ ID NO: 3167226 - DNA, 25 bp, Homo sapien
caccatggaggatgagggcttagct

SEQ ID NO: 3167227 - DNA, 25 bp, Homo sapien
gagcttaactcacttctctcaggga

SEQ ID NO: 3167228 - DNA, 25 bp, Homo sapien
cttgcggcagttatcttagaaagac

SEQ ID NO: 3167229 - DNA, 25 bp, Homo sapien
gattgtaagcactgtcatgatcaca

SEQ ID NO: 3167230 - DNA, 25 bp, Homo sapien
tcactaatggtcaagtggaacaagc

SEQ ID NO: 3167231 - DNA, 25 bp, Homo sapien
gttaggaccagaagcagagacacca

SEQ ID NO: 3167232 - DNA, 25 bp, Homo sapien
tcactgaatagagaaacgtgtgccc

SEQ ID NO: 3167233 - DNA, 25 bp, Homo sapien
ctaagacagggaattgggagccatc

SEQ ID NO: 3167234 - DNA, 25 bp, Homo sapien
cacggcgctggcaagtgataggaac

SEQ ID NO: 3167235 - DNA, 25 bp, Homo sapien
attgtgatgggtctcctcagcttta

SEQ ID NO: 3167236 - DNA, 25 bp, Homo sapien
tgctctgggattgtgatgggtctcc

SEQ ID NO: 3167237 - DNA, 25 bp, Homo sapien
tgatgggtctcctcagctttaaatt

SEQ ID NO: 3167238 - DNA, 25 bp, Homo sapien
gagtgcagtggatagttgggaagtt

SEQ ID NO: 3167239 - DNA, 25 bp, Homo sapien
tggtaattctacctaataacgacac

SEQ ID NO: 3167240 - DNA, 25 bp, Homo sapien
ttcagtgggctctgtttataatggt

SEQ ID NO: 3167241 - DNA, 25 bp, Homo sapien
taacgacacctattctacatctatt

SEQ ID NO: 3167242 - DNA, 25 bp, Homo sapien
tcaatagactggcagcctactgtga

SEQ ID NO: 3167243 - DNA, 25 bp, Homo sapien
taaggcataacacatgtgaactttg

SEQ ID NO: 3167244 - DNA, 25 bp, Homo sapien
ccagactgcggaaatgcttttcttt

SEQ ID NO: 3167245 - DNA, 25 bp, Homo sapien
cccagactgcggaaatgcttttctt

SEQ ID NO: 3167246 - DNA, 25 bp, Homo sapien
cagactgcggaaatgcttttctttc

SEQ ID NO: 3167247 - DNA, 25 bp, Homo sapien
ggtcttcgacgcctctgcggcggct

SEQ ID NO: 3167248 - DNA, 25 bp, Homo sapien
cagaatgggccgatgctgcttctac

SEQ ID NO: 3167249 - DNA, 25 bp, Homo sapien
tgctggtgaccagcgtcacgctgct

SEQ ID NO: 3167250 - DNA, 25 bp, Homo sapien
tccttgcagttggatccctggcggg

SEQ ID NO: 3167251 - DNA, 25 bp, Homo sapien
gaggccctcagacctatctgcggaa

SEQ ID NO: 3167252 - DNA, 25 bp, Homo sapien
ggtcatccaggcagaacatgcttgc

SEQ ID NO: 3167253 - DNA, 25 bp, Homo sapien
acttgcgagcgcctctagagcaggg

SEQ ID NO: 3167254 - DNA, 25 bp, Homo sapien
caggcacctggtagaagcacttgct

SEQ ID NO: 3167255 - DNA, 25 bp, Homo sapien
aggctggacaagacgcacggcacag

SEQ ID NO: 3167256 - DNA, 25 bp, Homo sapien
caagacgcacggcacagacatctgc

SEQ ID NO: 3167257 - DNA, 25 bp, Homo sapien
cagacatctgcattggatgagggcc

SEQ ID NO: 3167258 - DNA, 25 bp, Homo sapien
tctgcaggctggacaagacgcacgg

SEQ ID NO: 3167259 - DNA, 25 bp, Homo sapien
tagttccgtgtttcaataagtctgc

SEQ ID NO: 3167260 - DNA, 25 bp, Homo sapien
tagacagggacatgggtaacttcac

SEQ ID NO: 3167261 - DNA, 25 bp, Homo sapien
tggtatatgagctctcctctgggat

SEQ ID NO: 3167262 - DNA, 25 bp, Homo sapien
ttagttagacaacactacgcttgtg

SEQ ID NO: 3167263 - DNA, 25 bp, Homo sapien
tatgattcggttccagaggagaaag

SEQ ID NO: 3167264 - DNA, 25 bp, Homo sapien
ggctgtatgattcggttccagagga

SEQ ID NO: 3167265 - DNA, 25 bp, Homo sapien
tgtatgattcggttccagaggagaa

SEQ ID NO: 3167266 - DNA, 25 bp, Homo sapien
gctgggctgtatgattcggttccag

SEQ ID NO: 3167267 - DNA, 25 bp, Homo sapien
atgtgggttctatcagggtgctgca

SEQ ID NO: 3167268 - DNA, 25 bp, Homo sapien
ggtcaaagtccaaagacatcttgat

SEQ ID NO: 3167269 - DNA, 25 bp, Homo sapien
gtctctctaatgtgtaaatgtctcc

SEQ ID NO: 3167270 - DNA, 25 bp, Homo sapien
ggctgggttataggccacggtcact

SEQ ID NO: 3167271 - DNA, 25 bp, Homo sapien
gcacaaccaccgctgccggtatttg

SEQ ID NO: 3167272 - DNA, 25 bp, Homo sapien
ccgttgctaggacaccgcacaacca

SEQ ID NO: 3167273 - DNA, 25 bp, Homo sapien
ttctccgacgcctggggacgtggac

SEQ ID NO: 3167274 - DNA, 25 bp, Homo sapien
ccgtccgggcttgggcggtgtgtgt

SEQ ID NO: 3167275 - DNA, 25 bp, Homo sapien
ctggacctgcagttcacgccctcgc

SEQ ID NO: 3167276 - DNA, 25 bp, Homo sapien
acctgcagttcacgccctcgcgcac

SEQ ID NO: 3167277 - DNA, 25 bp, Homo sapien
gcagttcacgccctcgcgcaccggg

SEQ ID NO: 3167278 - DNA, 25 bp, Homo sapien
tggacctgcagttcacgccctcgcg

SEQ ID NO: 3167279 - DNA, 25 bp, Homo sapien
cctaacatcggatacagggctccag

SEQ ID NO: 3167280 - DNA, 25 bp, Homo sapien
ggcagcagatgcctaacatcggata

SEQ ID NO: 3167281 - DNA, 25 bp, Homo sapien
acagccgccatctggataccaaagg

SEQ ID NO: 3167282 - DNA, 25 bp, Homo sapien
gccccggggcatctggcgaacagtt

SEQ ID NO: 3167283 - DNA, 25 bp, Homo sapien
ggaaggtagatagattctctttgta

SEQ ID NO: 3167284 - DNA, 25 bp, Homo sapien
gaaggtagatagattctctttgtac

SEQ ID NO: 3167285 - DNA, 25 bp, Homo sapien
tggaaggtagatagattctctttgt

SEQ ID NO: 3167286 - DNA, 25 bp, Homo sapien
cagcccgttcttgtgctttgtgaaa

SEQ ID NO: 3167287 - DNA, 25 bp, Homo sapien
gcccgttcttgtgctttgtgaaaca

SEQ ID NO: 3167288 - DNA, 25 bp, Homo sapien
ttcagcccgttcttgtgctttgtga

SEQ ID NO: 3167289 - DNA, 25 bp, Homo sapien
gaacttcagcccgttcttgtgcttt

SEQ ID NO: 3167290 - DNA, 25 bp, Homo sapien
cttccagattcaggtagagcgctaa

SEQ ID NO: 3167291 - DNA, 25 bp, Homo sapien
ctggcgagagcttggaaagcacgtc

SEQ ID NO: 3167292 - DNA, 25 bp, Homo sapien
agaccagtgcaaggcgggcagccct

SEQ ID NO: 3167293 - DNA, 25 bp, Homo sapien
tgagtcaccagaccagtgcaaggcg

SEQ ID NO: 3167294 - DNA, 25 bp, Homo sapien
ctttgtaaattgaagggcttcacag

SEQ ID NO: 3167295 - DNA, 25 bp, Homo sapien
agcagtgtgcatgttgctgctgatt

SEQ ID NO: 3167296 - DNA, 25 bp, Homo sapien
tctttgtaaattgaagggcttcaca

SEQ ID NO: 3167297 - DNA, 25 bp, Homo sapien
gcagtgtgcatgttgctgctgattg

SEQ ID NO: 3167298 - DNA, 25 bp, Homo sapien
ccagcttccggtcaggatcaagcac

SEQ ID NO: 3167299 - DNA, 25 bp, Homo sapien
tccggtcaggatcaagcacttccag

SEQ ID NO: 3167300 - DNA, 25 bp, Homo sapien
gcttccggtcaggatcaagcacttc

SEQ ID NO: 3167301 - DNA, 25 bp, Homo sapien
ggtcaggatcaagcacttccagcac

SEQ ID NO: 3167302 - DNA, 25 bp, Homo sapien
cccaggtagacttgggtagaatgtt

SEQ ID NO: 3167303 - DNA, 25 bp, Homo sapien
tcccaggtagacttgggtagaatgt

SEQ ID NO: 3167304 - DNA, 25 bp, Homo sapien
aagcttcgtgggttccttcattcct

SEQ ID NO: 3167305 - DNA, 25 bp, Homo sapien
gtcccaggtagacttgggtagaatg

SEQ ID NO: 3167306 - DNA, 25 bp, Homo sapien
catgggccatcttgctcctcatgga

SEQ ID NO: 3167307 - DNA, 25 bp, Homo sapien
gaggaaaggcagaactgagacaagc

SEQ ID NO: 3167308 - DNA, 25 bp, Homo sapien
ggaagcaaggagaaattgtgcttcc

SEQ ID NO: 3167309 - DNA, 25 bp, Homo sapien
gagacaagcacgtccagttaccctt

SEQ ID NO: 3167310 - DNA, 25 bp, Homo sapien
gtagccaaaatatccccttcactga

SEQ ID NO: 3167311 - DNA, 25 bp, Homo sapien
ccttcactgataacagcagccatga

SEQ ID NO: 3167312 - DNA, 25 bp, Homo sapien
gaggacttgctaactgacactcaga

SEQ ID NO: 3167313 - DNA, 25 bp, Homo sapien
gatagacgacatggctttaggtcca

SEQ ID NO: 3167314 - DNA, 25 bp, Homo sapien
gcttgaagtctaccaaagcctcagg

SEQ ID NO: 3167315 - DNA, 25 bp, Homo sapien
aaatccagctcagttaaggtctggc

SEQ ID NO: 3167316 - DNA, 25 bp, Homo sapien
gcctgttaaggacaatgctgctatg

SEQ ID NO: 3167317 - DNA, 25 bp, Homo sapien
caggcaaccttgacaagtaggagtc

SEQ ID NO: 3167318 - DNA, 25 bp, Homo sapien
tgcgtttgacacagacgtcttcttg

SEQ ID NO: 3167319 - DNA, 25 bp, Homo sapien
gtttgacacagacgtcttcttggaa

SEQ ID NO: 3167320 - DNA, 25 bp, Homo sapien
ctgcgtttgacacagacgtcttctt

SEQ ID NO: 3167321 - DNA, 25 bp, Homo sapien
gcgtttgacacagacgtcttcttgg

SEQ ID NO: 3167322 - DNA, 25 bp, Homo sapien
ggacgaggaccattttcatggagca

SEQ ID NO: 3167323 - DNA, 25 bp, Homo sapien
aagaccaggacgaggaccattttca

SEQ ID NO: 3167324 - DNA, 25 bp, Homo sapien
ccaggacgaggaccattttcatgga

SEQ ID NO: 3167325 - DNA, 25 bp, Homo sapien
atgaagaccaggacgaggaccattt

SEQ ID NO: 3167326 - DNA, 25 bp, Homo sapien
aaagtagtaacccacttgcagaagt

SEQ ID NO: 3167327 - DNA, 25 bp, Homo sapien
cttgcagaagtcactaactgctttg

SEQ ID NO: 3167328 - DNA, 25 bp, Homo sapien
taacccacttgcagaagtcactaac

SEQ ID NO: 3167329 - DNA, 25 bp, Homo sapien
agaagtcactaactgctttgcatac

SEQ ID NO: 3167330 - DNA, 25 bp, Homo sapien
taataaaagcaactttgagcttgac

SEQ ID NO: 3167331 - DNA, 25 bp, Homo sapien
gaaaatgattcctttacgactttga

SEQ ID NO: 3167332 - DNA, 25 bp, Homo sapien
gagtacctgccagagtacttctagg

SEQ ID NO: 3167333 - DNA, 25 bp, Homo sapien
tagcagcaagtttgcaacctttcca

SEQ ID NO: 3167334 - DNA, 25 bp, Homo sapien
gaatatcacattgcatgaattgagg

SEQ ID NO: 3167335 - DNA, 25 bp, Homo sapien
gaattgagggcaatcggtgaaatgc

SEQ ID NO: 3167336 - DNA, 25 bp, Homo sapien
ctggaagaatatcacattgcatgaa

SEQ ID NO: 3167337 - DNA, 25 bp, Homo sapien
tgaattgagggcaatcggtgaaatg

SEQ ID NO: 3167338 - DNA, 25 bp, Homo sapien
tgtggagcgcatcatggcttggttt

SEQ ID NO: 3167339 - DNA, 25 bp, Homo sapien
tgaactcttcatcgatgtccgaaat

SEQ ID NO: 3167340 - DNA, 25 bp, Homo sapien
tgtttcaagatgaactcttcatcga

SEQ ID NO: 3167341 - DNA, 25 bp, Homo sapien
ctgatttagcttcatcgtgtggagc

SEQ ID NO: 3167342 - DNA, 25 bp, Homo sapien
tggagtttcctctcatagcctagtt

SEQ ID NO: 3167343 - DNA, 25 bp, Homo sapien
gtctcctgcagtttactgagcccca

SEQ ID NO: 3167344 - DNA, 25 bp, Homo sapien
gtttctggagtttcctctcatagcc

SEQ ID NO: 3167345 - DNA, 25 bp, Homo sapien
cactacgctttagctccagaggaac

SEQ ID NO: 3167346 - DNA, 25 bp, Homo sapien
cggtctggtccccttctgcaattac

SEQ ID NO: 3167347 - DNA, 25 bp, Homo sapien
tgattttcggtctggtccccttctg

SEQ ID NO: 3167348 - DNA, 25 bp, Homo sapien
taaaaaaccagtacccatgacacat

SEQ ID NO: 3167349 - DNA, 25 bp, Homo sapien
caagaactttaagacttcaatacaa

SEQ ID NO: 3167350 - DNA, 25 bp, Homo sapien
tcttcacccactttggcttataagg

SEQ ID NO: 3167351 - DNA, 25 bp, Homo sapien
cagaggctcgtctactctttgcttt

SEQ ID NO: 3167352 - DNA, 25 bp, Homo sapien
tatgtgagacctcagggtcaaccag

SEQ ID NO: 3167353 - DNA, 25 bp, Homo sapien
gggttcaaataccatgctccatacc

SEQ ID NO: 3167354 - DNA, 25 bp, Homo sapien
taaaatgaccatccttcctgtctta

SEQ ID NO: 3167355 - DNA, 25 bp, Homo sapien
tctgaagaagacaattgatgagtga

SEQ ID NO: 3167356 - DNA, 25 bp, Homo sapien
tttgtatcatacctcacacctgaaa

SEQ ID NO: 3167357 - DNA, 25 bp, Homo sapien
tgttttcacgtctgttatctaggag

SEQ ID NO: 3167358 - DNA, 25 bp, Homo sapien
acaattccattgttatgcatcctcc

SEQ ID NO: 3167359 - DNA, 25 bp, Homo sapien
ccctgtgtctaaactgcctgataaa

SEQ ID NO: 3167360 - DNA, 25 bp, Homo sapien
tagtcgataatgtaaatcattcctc

SEQ ID NO: 3167361 - DNA, 25 bp, Homo sapien
gataaacaatcttttactatacgag

SEQ ID NO: 3167362 - DNA, 25 bp, Homo sapien
gcgtcttgtaaactggggtgccaca

SEQ ID NO: 3167363 - DNA, 25 bp, Homo sapien
ctgcgtcttgtaaactggggtgcca

SEQ ID NO: 3167364 - DNA, 25 bp, Homo sapien
cagtgcctgcgtcttgtaaactggg

SEQ ID NO: 3167365 - DNA, 25 bp, Homo sapien
gtcttgtaaactggggtgccacagc

SEQ ID NO: 3167366 - DNA, 25 bp, Homo sapien
tagtcaaaactcacgagttcccaga

SEQ ID NO: 3167367 - DNA, 25 bp, Homo sapien
gggtcagccatcagaagcttgattt

SEQ ID NO: 3167368 - DNA, 25 bp, Homo sapien
aagagtacccacatttgaagaaagg

SEQ ID NO: 3167369 - DNA, 25 bp, Homo sapien
catattaaggatgggcaacacattt

SEQ ID NO: 3167370 - DNA, 25 bp, Homo sapien
taaaggcaactgttccgtgaaggtc

SEQ ID NO: 3167371 - DNA, 25 bp, Homo sapien
aggcaactgttccgtgaaggtctgc

SEQ ID NO: 3167372 - DNA, 25 bp, Homo sapien
aaaggcaactgttccgtgaaggtct

SEQ ID NO: 3167373 - DNA, 25 bp, Homo sapien
aaggcaactgttccgtgaaggtctg

SEQ ID NO: 3167374 - DNA, 25 bp, Homo sapien
ctcagcagggccttctgaaaggacc

SEQ ID NO: 3167375 - DNA, 25 bp, Homo sapien
gccttctgaaaggaccctttactca

SEQ ID NO: 3167376 - DNA, 25 bp, Homo sapien
tcaacaactgtgagccatgaagccc

SEQ ID NO: 3167377 - DNA, 25 bp, Homo sapien
gaagcccctcagcagggccttctga

SEQ ID NO: 3167378 - DNA, 25 bp, Homo sapien
tataggatgtaagaataaagggaca

SEQ ID NO: 3167379 - DNA, 25 bp, Homo sapien
gggcatcatttctctagtcaatgtg

SEQ ID NO: 3167380 - DNA, 25 bp, Homo sapien
tgttctcagaggactctgttgtgac

SEQ ID NO: 3167381 - DNA, 25 bp, Homo sapien
aatattgtagggttttgagtgacag

SEQ ID NO: 3167382 - DNA, 25 bp, Homo sapien
tgcttgagttcgttttataggagtc

SEQ ID NO: 3167383 - DNA, 25 bp, Homo sapien
ttacatgcacgtttacattccttcc

SEQ ID NO: 3167384 - DNA, 25 bp, Homo sapien
tcccgatatacatattctcaaggaa

SEQ ID NO: 3167385 - DNA, 25 bp, Homo sapien
tataggagtcttattacatgcacgt

SEQ ID NO: 3167386 - DNA, 25 bp, Homo sapien
agtgggacactcatcataaactctg

SEQ ID NO: 3167387 - DNA, 25 bp, Homo sapien
gagaaatagccaagtacgtagtaat

SEQ ID NO: 3167388 - DNA, 25 bp, Homo sapien
tcaaagttgaacatccacagtggga

SEQ ID NO: 3167389 - DNA, 25 bp, Homo sapien
cctatataatattcacgtgccacaa

SEQ ID NO: 3167390 - DNA, 25 bp, Homo sapien
ggctcatagctctacagggtgtaca

SEQ ID NO: 3167391 - DNA, 25 bp, Homo sapien
catatccacccatggcaatgcggac

SEQ ID NO: 3167392 - DNA, 25 bp, Homo sapien
caagctgcaacataagatttagcgg

SEQ ID NO: 3167393 - DNA, 25 bp, Homo sapien
tcttccactcgtggcaaaaggcaaa

SEQ ID NO: 3167394 - DNA, 25 bp, Homo sapien
gctggggcccctccaggatgaagct

SEQ ID NO: 3167395 - DNA, 25 bp, Homo sapien
tggggcccctccaggatgaagcttc

SEQ ID NO: 3167396 - DNA, 25 bp, Homo sapien
ggctggcatcaggctggggcccctc

SEQ ID NO: 3167397 - DNA, 25 bp, Homo sapien
gggcccctccaggatgaagcttcca

SEQ ID NO: 3167398 - DNA, 25 bp, Homo sapien
ccgcctttggcacaccaaagtgctg

SEQ ID NO: 3167399 - DNA, 25 bp, Homo sapien
gtttgctaagttaagacatcatttg

SEQ ID NO: 3167400 - DNA, 25 bp, Homo sapien
taccttatgtgaagctagaacattg

SEQ ID NO: 3167401 - DNA, 25 bp, Homo sapien
tatgtcttgaaactgttgaactggg

SEQ ID NO: 3167402 - DNA, 25 bp, Homo sapien
accattgctcatgccccaggagaaa

SEQ ID NO: 3167403 - DNA, 25 bp, Homo sapien
gcctattctgcccacagtgaaagca

SEQ ID NO: 3167404 - DNA, 25 bp, Homo sapien
tagtactttgttactctggcgtcaa

SEQ ID NO: 3167405 - DNA, 25 bp, Homo sapien
tttataccctgcacacctaccttgg

SEQ ID NO: 3167406 - DNA, 25 bp, Homo sapien
aaactgggagccctagtggaagctc

SEQ ID NO: 3167407 - DNA, 25 bp, Homo sapien
tttacggtttctgcgccgggcactc

SEQ ID NO: 3167408 - DNA, 25 bp, Homo sapien
agcagcaacgcggtcagctagaggc

SEQ ID NO: 3167409 - DNA, 25 bp, Homo sapien
gtcccgcgtgaagaacccaagtgcg

SEQ ID NO: 3167410 - DNA, 25 bp, Homo sapien
gatggcctcccggaatcgcagctcc

SEQ ID NO: 3167411 - DNA, 25 bp, Homo sapien
cgcagcagccaaacgaaaagtgctc

SEQ ID NO: 3167412 - DNA, 25 bp, Homo sapien
ggtccagggctcagtccgctgctgc

SEQ ID NO: 3167413 - DNA, 25 bp, Homo sapien
ccaagaggggcgtctttctcctgct

SEQ ID NO: 3167414 - DNA, 25 bp, Homo sapien
tgctcccttcctcgatgaacctcaa

SEQ ID NO: 3167415 - DNA, 25 bp, Homo sapien
gggatggcccagtccccttaggaga

SEQ ID NO: 3167416 - DNA, 25 bp, Homo sapien
ttaggagagcccgtccgcaggaatg

SEQ ID NO: 3167417 - DNA, 25 bp, Homo sapien
atgggcccctaggaaagctccaggt

SEQ ID NO: 3167418 - DNA, 25 bp, Homo sapien
aatcacagtaaaggcacacgggcag

SEQ ID NO: 3167419 - DNA, 25 bp, Homo sapien
aattctactcatcagggttgggtcc

SEQ ID NO: 3167420 - DNA, 25 bp, Homo sapien
taagtgaactgtctaggcatcccag

SEQ ID NO: 3167421 - DNA, 25 bp, Homo sapien
cgaagaggcttgtaggatcccctaa

SEQ ID NO: 3167422 - DNA, 25 bp, Homo sapien
tgtcaccttggggagatacggagaa

SEQ ID NO: 3167423 - DNA, 25 bp, Homo sapien
caccttggggagatacggagaacag

SEQ ID NO: 3167424 - DNA, 25 bp, Homo sapien
ccttggggagatacggagaacagta

SEQ ID NO: 3167425 - DNA, 25 bp, Homo sapien
tcaccttggggagatacggagaaca

SEQ ID NO: 3167426 - DNA, 25 bp, Homo sapien
caaagggctgcgtggctacgttaca

SEQ ID NO: 3167427 - DNA, 25 bp, Homo sapien
gaagagtacacttgttctcccaggg

SEQ ID NO: 3167428 - DNA, 25 bp, Homo sapien
taagttgcttggctcctatcatcaa

SEQ ID NO: 3167429 - DNA, 25 bp, Homo sapien
tggcatgcagccaagttaagttgct

SEQ ID NO: 3167430 - DNA, 25 bp, Homo sapien
aaatgaagtggtaagctgtagaggc

SEQ ID NO: 3167431 - DNA, 25 bp, Homo sapien
catgtatatctgacaacaaaaggga

SEQ ID NO: 3167432 - DNA, 25 bp, Homo sapien
caggagtatcagtgtgccagcacaa

SEQ ID NO: 3167433 - DNA, 25 bp, Homo sapien
taattaaccagtatgctcccaacac

SEQ ID NO: 3167434 - DNA, 25 bp, Homo sapien
cttccctggaaggattctgcaatct

SEQ ID NO: 3167435 - DNA, 25 bp, Homo sapien
aactcctagagttactggtctcaga

SEQ ID NO: 3167436 - DNA, 25 bp, Homo sapien
tcccataggagattcaaggctttca

SEQ ID NO: 3167437 - DNA, 25 bp, Homo sapien
ggtcaacccggtcctgactgttcaa

SEQ ID NO: 3167438 - DNA, 25 bp, Homo sapien
gaatgagaccagaacccatccttgt

SEQ ID NO: 3167439 - DNA, 25 bp, Homo sapien
gaaccactttatcctcatggccagt

SEQ ID NO: 3167440 - DNA, 25 bp, Homo sapien
tggccagtttctaggaatctattgc

SEQ ID NO: 3167441 - DNA, 25 bp, Homo sapien
gaattgcacatcagtgcttgtgaca

SEQ ID NO: 3167442 - DNA, 25 bp, Homo sapien
tagcacataacaacgcctggcagat

SEQ ID NO: 3167443 - DNA, 25 bp, Homo sapien
taaaggctcaagcttgaaccctggg

SEQ ID NO: 3167444 - DNA, 25 bp, Homo sapien
gagagatggtcctacagatgctccc

SEQ ID NO: 3167445 - DNA, 25 bp, Homo sapien
taaatgatgggtgcatccctccctg

SEQ ID NO: 3167446 - DNA, 25 bp, Homo sapien
caagtacaggcgtgctgaatttccc

SEQ ID NO: 3167447 - DNA, 25 bp, Homo sapien
agtgctatgagccaaaaactgtcaa

SEQ ID NO: 3167448 - DNA, 25 bp, Homo sapien
gccttctgcagagcttactggtaca

SEQ ID NO: 3167449 - DNA, 25 bp, Homo sapien
tccctccagtcaaaggtgaactttg

SEQ ID NO: 3167450 - DNA, 25 bp, Homo sapien
acctcttgggcggaggcagattcca

SEQ ID NO: 3167451 - DNA, 25 bp, Homo sapien
tccagcagattgagggagcagagac

SEQ ID NO: 3167452 - DNA, 25 bp, Homo sapien
tactaaaatgactcgttgcttgcct

SEQ ID NO: 3167453 - DNA, 25 bp, Homo sapien
tgttactcgtaattagtgccctgtg

SEQ ID NO: 3167454 - DNA, 25 bp, Homo sapien
cagtaacatcagctcttcgttggca

SEQ ID NO: 3167455 - DNA, 25 bp, Homo sapien
acatcagctcttcgttggcataaac

SEQ ID NO: 3167456 - DNA, 25 bp, Homo sapien
taacatcagctcttcgttggcataa

SEQ ID NO: 3167457 - DNA, 25 bp, Homo sapien
catcagctcttcgttggcataaacc

SEQ ID NO: 3167458 - DNA, 25 bp, Homo sapien
gaagcgagggatcaacattcaggtc

SEQ ID NO: 3167459 - DNA, 25 bp, Homo sapien
ctgaagcgagggatcaacattcagg

SEQ ID NO: 3167460 - DNA, 25 bp, Homo sapien
gagggatcaacattcaggtccagag

SEQ ID NO: 3167461 - DNA, 25 bp, Homo sapien
gcgagggatcaacattcaggtccag

SEQ ID NO: 3167462 - DNA, 25 bp, Homo sapien
ttgtgtgcactgtaaatttgacttt

SEQ ID NO: 3167463 - DNA, 25 bp, Homo sapien
gactttatctctctcactgagcaca

SEQ ID NO: 3167464 - DNA, 25 bp, Homo sapien
tttgtgtgcactgtaaatttgactt

SEQ ID NO: 3167465 - DNA, 25 bp, Homo sapien
cactgagcacatcaggtatgtcaac

SEQ ID NO: 3167466 - DNA, 25 bp, Homo sapien
gtttcaataagagtgtcatgtagcc

SEQ ID NO: 3167467 - DNA, 25 bp, Homo sapien
ataagagtgtcatgtagccacacaa

SEQ ID NO: 3167468 - DNA, 25 bp, Homo sapien
caataagagtgtcatgtagccacac

SEQ ID NO: 3167469 - DNA, 25 bp, Homo sapien
tcaataagagtgtcatgtagccaca

SEQ ID NO: 3167470 - DNA, 25 bp, Homo sapien
tctcgaggaccattgaagtcgggct

SEQ ID NO: 3167471 - DNA, 25 bp, Homo sapien
tctctcgaggaccattgaagtcggg

SEQ ID NO: 3167472 - DNA, 25 bp, Homo sapien
tcgaggaccattgaagtcgggcttc

SEQ ID NO: 3167473 - DNA, 25 bp, Homo sapien
gaggaccattgaagtcgggcttcat

SEQ ID NO: 3167474 - DNA, 25 bp, Homo sapien
ttaggcttccagttcttgtttcatc

SEQ ID NO: 3167475 - DNA, 25 bp, Homo sapien
tcttctttggtcatagacccttcac

SEQ ID NO: 3167476 - DNA, 25 bp, Homo sapien
aaattcttctttggtcatagaccct

SEQ ID NO: 3167477 - DNA, 25 bp, Homo sapien
acttaggcttccagttcttgtttca

SEQ ID NO: 3167478 - DNA, 25 bp, Homo sapien
gtggatatagacatcggcaacaatt

SEQ ID NO: 3167479 - DNA, 25 bp, Homo sapien
tgtggatatagacatcggcaacaat

SEQ ID NO: 3167480 - DNA, 25 bp, Homo sapien
tggatatagacatcggcaacaattt

SEQ ID NO: 3167481 - DNA, 25 bp, Homo sapien
ggatatagacatcggcaacaatttt

SEQ ID NO: 3167482 - DNA, 25 bp, Homo sapien
aagtttgtcaaatagcacagcaacc

SEQ ID NO: 3167483 - DNA, 25 bp, Homo sapien
ttcctaagtttgtcaaatagcacag

SEQ ID NO: 3167484 - DNA, 25 bp, Homo sapien
ccttcaataggtactttttgatgac

SEQ ID NO: 3167485 - DNA, 25 bp, Homo sapien
aaatagcacagcaaccttcaatagg

SEQ ID NO: 3167486 - DNA, 25 bp, Homo sapien
tgagggctttggtgtgtctgtataa

SEQ ID NO: 3167487 - DNA, 25 bp, Homo sapien
gcatgtagtatcgttggagctctgt

SEQ ID NO: 3167488 - DNA, 25 bp, Homo sapien
tataagagatccttagcagcttcga

SEQ ID NO: 3167489 - DNA, 25 bp, Homo sapien
agctttgtttgagttctcataatca

SEQ ID NO: 3167490 - DNA, 25 bp, Homo sapien
gcctcagccaatttgacgtctttgc

SEQ ID NO: 3167491 - DNA, 25 bp, Homo sapien
tggaaagctgttcaaatttcaggca

SEQ ID NO: 3167492 - DNA, 25 bp, Homo sapien
gcaaaagggagtcattgttcctggc

SEQ ID NO: 3167493 - DNA, 25 bp, Homo sapien
ctggtgtgcctcagccaatttgacg

SEQ ID NO: 3167494 - DNA, 25 bp, Homo sapien
gatgcttggctttctttcacattca

SEQ ID NO: 3167495 - DNA, 25 bp, Homo sapien
gttaaagctaataaatcttccatgg

SEQ ID NO: 3167496 - DNA, 25 bp, Homo sapien
tcttccatggtaatgatttaagtgc

SEQ ID NO: 3167497 - DNA, 25 bp, Homo sapien
gatttaagtgcaagtgatgcttggc

SEQ ID NO: 3167498 - DNA, 25 bp, Homo sapien
agcagaataagcgtctgtgggaccg

SEQ ID NO: 3167499 - DNA, 25 bp, Homo sapien
cagaataagcgtctgtgggaccgag

SEQ ID NO: 3167500 - DNA, 25 bp, Homo sapien
gaataagcgtctgtgggaccgagac

SEQ ID NO: 3167501 - DNA, 25 bp, Homo sapien
aagcgtctgtgggaccgagacacag

SEQ ID NO: 3167502 - DNA, 25 bp, Homo sapien
cagttggttttataccaactctagt

SEQ ID NO: 3167503 - DNA, 25 bp, Homo sapien
agttggttttataccaactctagtg

SEQ ID NO: 3167504 - DNA, 25 bp, Homo sapien
gttggttttataccaactctagtga

SEQ ID NO: 3167505 - DNA, 25 bp, Homo sapien
ttggttttataccaactctagtgac

SEQ ID NO: 3167506 - DNA, 25 bp, Homo sapien
gatcagttctgtaagatccccagtc

SEQ ID NO: 3167507 - DNA, 25 bp, Homo sapien
tctagaagaatgtagatcagttctg

SEQ ID NO: 3167508 - DNA, 25 bp, Homo sapien
tcagttctgtaagatccccagtctc

SEQ ID NO: 3167509 - DNA, 25 bp, Homo sapien
aatgtagatcagttctgtaagatcc

SEQ ID NO: 3167510 - DNA, 25 bp, Homo sapien
aattaaaattgggccaatagcatat

SEQ ID NO: 3167511 - DNA, 25 bp, Homo sapien
ccaatgagatctgtgccactaaaat

SEQ ID NO: 3167512 - DNA, 25 bp, Homo sapien
gcccggccactataggctattttta

SEQ ID NO: 3167513 - DNA, 25 bp, Homo sapien
catgatttagataagtgctataggc

SEQ ID NO: 3167514 - DNA, 25 bp, Homo sapien
ctgagacgagccaagtcccttctgg

SEQ ID NO: 3167515 - DNA, 25 bp, Homo sapien
gcattaatgcaaaagtcttcagtcc

SEQ ID NO: 3167516 - DNA, 25 bp, Homo sapien
gacgagccaagtcccttctggctat

SEQ ID NO: 3167517 - DNA, 25 bp, Homo sapien
gagccaagtcccttctggctatgag

SEQ ID NO: 3167518 - DNA, 25 bp, Homo sapien
ttgtgtgtatatcaagtaagagttg

SEQ ID NO: 3167519 - DNA, 25 bp, Homo sapien
tcattattgattatccattgtgtgt

SEQ ID NO: 3167520 - DNA, 25 bp, Homo sapien
gctgaatcattattgattatccatt

SEQ ID NO: 3167521 - DNA, 25 bp, Homo sapien
ccattgtgtgtatatcaagtaagag

SEQ ID NO: 3167522 - DNA, 25 bp, Homo sapien
acacaatgagttctggaaagtctcc

SEQ ID NO: 3167523 - DNA, 25 bp, Homo sapien
aagtctccatccttttccacagcac

SEQ ID NO: 3167524 - DNA, 25 bp, Homo sapien
gcaacacaatgagttctggaaagtc

SEQ ID NO: 3167525 - DNA, 25 bp, Homo sapien
tccatccttttccacagcactctgc

SEQ ID NO: 3167526 - DNA, 25 bp, Homo sapien
gaatggtgttaaatgccggcgcaag

SEQ ID NO: 3167527 - DNA, 25 bp, Homo sapien
gacagcctcgcatccaagacggaat

SEQ ID NO: 3167528 - DNA, 25 bp, Homo sapien
aagagaatcaccgagtaacctgccc

SEQ ID NO: 3167529 - DNA, 25 bp, Homo sapien
ggtggcgctgaaacctggaccttga

SEQ ID NO: 3167530 - DNA, 25 bp, Homo sapien
gggctcttctctgctctatttccat

SEQ ID NO: 3167531 - DNA, 25 bp, Homo sapien
ggaaatgctgttcctctgagagcca

SEQ ID NO: 3167532 - DNA, 25 bp, Homo sapien
tccttcaaggttctgctcacacctg

SEQ ID NO: 3167533 - DNA, 25 bp, Homo sapien
ggctgctccctgtctccttcaaggt

SEQ ID NO: 3167534 - DNA, 25 bp, Homo sapien
gaagcaaactcaggcaagcagtgct

SEQ ID NO: 3167535 - DNA, 25 bp, Homo sapien
aaaacttccttcagtggcgctctga

SEQ ID NO: 3167536 - DNA, 25 bp, Homo sapien
taaggcaaagtgaggcattgcaacc

SEQ ID NO: 3167537 - DNA, 25 bp, Homo sapien
tgtcccgaagagacagagaagctgt

SEQ ID NO: 3167538 - DNA, 25 bp, Homo sapien
aatgtaccttcccttggtggccgtg

SEQ ID NO: 3167539 - DNA, 25 bp, Homo sapien
ggaatgcctccagataaatgtacct

SEQ ID NO: 3167540 - DNA, 25 bp, Homo sapien
ggcactaggcttgtggaagtcttca

SEQ ID NO: 3167541 - DNA, 25 bp, Homo sapien
gattaatggttctccgtgctccagg

SEQ ID NO: 3167542 - DNA, 25 bp, Homo sapien
gggtctacaccaactgtccttctta

SEQ ID NO: 3167543 - DNA, 25 bp, Homo sapien
agtagtactttgcagggcctgagtt

SEQ ID NO: 3167544 - DNA, 25 bp, Homo sapien
tgatagtaatgctttcaagggagtg

SEQ ID NO: 3167545 - DNA, 25 bp, Homo sapien
gaaatttgcaatatgtgttggccca

SEQ ID NO: 3167546 - DNA, 25 bp, Homo sapien
accatataagaaaattaggctgggt

SEQ ID NO: 3167547 - DNA, 25 bp, Homo sapien
taccatataagaaaattaggctggg

SEQ ID NO: 3167548 - DNA, 25 bp, Homo sapien
cttataccatataagaaaattaggc

SEQ ID NO: 3167549 - DNA, 25 bp, Homo sapien
tataccatataagaaaattaggctg

SEQ ID NO: 3167550 - DNA, 25 bp, Homo sapien
ccaaggaggcaaaaagcatgcatga

SEQ ID NO: 3167551 - DNA, 25 bp, Homo sapien
tgttataacggcatacagacagaca

SEQ ID NO: 3167552 - DNA, 25 bp, Homo sapien
gacacaaactgaaaggcactctgca

SEQ ID NO: 3167553 - DNA, 25 bp, Homo sapien
aaagttctagtcagagcaattggca

SEQ ID NO: 3167554 - DNA, 25 bp, Homo sapien
tgtcagtatcagtatgttccgcctg

SEQ ID NO: 3167555 - DNA, 25 bp, Homo sapien
gtatgttccgcctgattcccgttca

SEQ ID NO: 3167556 - DNA, 25 bp, Homo sapien
tttcttgtgccacacatgtgtcagt

SEQ ID NO: 3167557 - DNA, 25 bp, Homo sapien
gccacacatgtgtcagtatcagtat

SEQ ID NO: 3167558 - DNA, 25 bp, Homo sapien
tatcttgcacattggacatcaaagg

SEQ ID NO: 3167559 - DNA, 25 bp, Homo sapien
ctatttgccaaattctgtatcttgc

SEQ ID NO: 3167560 - DNA, 25 bp, Homo sapien
ctgtatcttgcacattggacatcaa

SEQ ID NO: 3167561 - DNA, 25 bp, Homo sapien
tatttgccaaattctgtatcttgca

SEQ ID NO: 3167562 - DNA, 25 bp, Homo sapien
tcattgagatgattaggagacaagg

SEQ ID NO: 3167563 - DNA, 25 bp, Homo sapien
gatccaataagggtggaactctcct

SEQ ID NO: 3167564 - DNA, 25 bp, Homo sapien
tacataggaggatgatggaatgaga

SEQ ID NO: 3167565 - DNA, 25 bp, Homo sapien
caaggacagcaagtcgaaatacata

SEQ ID NO: 3167566 - DNA, 25 bp, Homo sapien
tacagagttgtggaactaggaccac

SEQ ID NO: 3167567 - DNA, 25 bp, Homo sapien
caattcctggccatatggtaagtcc

SEQ ID NO: 3167568 - DNA, 25 bp, Homo sapien
aaagagacctcatatccactcgcag

SEQ ID NO: 3167569 - DNA, 25 bp, Homo sapien
caccatcagttaacaaaaatgtggg

SEQ ID NO: 3167570 - DNA, 25 bp, Homo sapien
caaagatattgcaattgaccaggct

SEQ ID NO: 3167571 - DNA, 25 bp, Homo sapien
caaattctgatggtcttacaaggga

SEQ ID NO: 3167572 - DNA, 25 bp, Homo sapien
gaactaataaggtagggacatggca

SEQ ID NO: 3167573 - DNA, 25 bp, Homo sapien
tgactcagaccattcagttcaggga

SEQ ID NO: 3167574 - DNA, 25 bp, Homo sapien
ccagtgtcctccataacttcgacat

SEQ ID NO: 3167575 - DNA, 25 bp, Homo sapien
caaaactctgttcaaccggctgtca

SEQ ID NO: 3167576 - DNA, 25 bp, Homo sapien
tgtcactgctcatggaaacgcttcc

SEQ ID NO: 3167577 - DNA, 25 bp, Homo sapien
tgttcccaagcacagttggcactgt

SEQ ID NO: 3167578 - DNA, 25 bp, Homo sapien
gctgactctgacactatccttcaaa

SEQ ID NO: 3167579 - DNA, 25 bp, Homo sapien
cccttgttccaactattctggccaa

SEQ ID NO: 3167580 - DNA, 25 bp, Homo sapien
tgttccaactattctggccaactgg

SEQ ID NO: 3167581 - DNA, 25 bp, Homo sapien
ttgttccaactattctggccaactg

SEQ ID NO: 3167582 - DNA, 25 bp, Homo sapien
tccaactattctggccaactggcag

SEQ ID NO: 3167583 - DNA, 25 bp, Homo sapien
ccaattagtttgtcttcaggcttct

SEQ ID NO: 3167584 - DNA, 25 bp, Homo sapien
tcttccaattagtttgtcttcaggc

SEQ ID NO: 3167585 - DNA, 25 bp, Homo sapien
cagtcttccaattagtttgtcttca

SEQ ID NO: 3167586 - DNA, 25 bp, Homo sapien
ttccaattagtttgtcttcaggctt

SEQ ID NO: 3167587 - DNA, 25 bp, Homo sapien
tacaggcacgggaattaaagatctc

SEQ ID NO: 3167588 - DNA, 25 bp, Homo sapien
acagcctcccgtgtgtgatggtccc

SEQ ID NO: 3167589 - DNA, 25 bp, Homo sapien
caatctggtcctctctgctacatgt

SEQ ID NO: 3167590 - DNA, 25 bp, Homo sapien
catttatggaagcttgtacaggcac

SEQ ID NO: 3167591 - DNA, 25 bp, Homo sapien
tattgaagagacttcatgagaaatc

SEQ ID NO: 3167592 - DNA, 25 bp, Homo sapien
gttattgaagagacttcatgagaaa

SEQ ID NO: 3167593 - DNA, 25 bp, Homo sapien
cttggactgtgaagttattgaagag

SEQ ID NO: 3167594 - DNA, 25 bp, Homo sapien
tggactgtgaagttattgaagagac

SEQ ID NO: 3167595 - DNA, 25 bp, Homo sapien
agagatgcgacagccacgagtgagc

SEQ ID NO: 3167596 - DNA, 25 bp, Homo sapien
gcgacagccacgagtgagctttccc

SEQ ID NO: 3167597 - DNA, 25 bp, Homo sapien
tggagggagagatgcgacagccacg

SEQ ID NO: 3167598 - DNA, 25 bp, Homo sapien
gcctggggtctgtccggctatcccg

SEQ ID NO: 3167599 - DNA, 25 bp, Homo sapien
ctgcagtttggagctcagggtgtct

SEQ ID NO: 3167600 - DNA, 25 bp, Homo sapien
tgcagtttggagctcagggtgtctg

SEQ ID NO: 3167601 - DNA, 25 bp, Homo sapien
tgtaggatcctttcaccagggaaac

SEQ ID NO: 3167602 - DNA, 25 bp, Homo sapien
gagggtcttgtaggatcctttcacc

SEQ ID NO: 3167603 - DNA, 25 bp, Homo sapien
cttgtaggatcctttcaccagggaa

SEQ ID NO: 3167604 - DNA, 25 bp, Homo sapien
ggtcttgtaggatcctttcaccagg

SEQ ID NO: 3167605 - DNA, 25 bp, Homo sapien
caggatccatacatggaggtttaaa

SEQ ID NO: 3167606 - DNA, 25 bp, Homo sapien
aaaaaaggcaggatccatacatgga

SEQ ID NO: 3167607 - DNA, 25 bp, Homo sapien
tggaggtttaaagccaagctaccaa

SEQ ID NO: 3167608 - DNA, 25 bp, Homo sapien
catggaggtttaaagccaagctacc

SEQ ID NO: 3167609 - DNA, 25 bp, Homo sapien
ctctctggacacaaggaatggcccc

SEQ ID NO: 3167610 - DNA, 25 bp, Homo sapien
tattagaaggcctaccagaagccac

SEQ ID NO: 3167611 - DNA, 25 bp, Homo sapien
gaatccggtgcctatgctttgagcc

SEQ ID NO: 3167612 - DNA, 25 bp, Homo sapien
aatatttgggcctagcgcttagcag

SEQ ID NO: 3167613 - DNA, 25 bp, Homo sapien
ccacaaggtctgagacagtcatgac

SEQ ID NO: 3167614 - DNA, 25 bp, Homo sapien
ccaaaatgagtcagtgtagtagcat

SEQ ID NO: 3167615 - DNA, 25 bp, Homo sapien
tgagacagtcatgaccaattctgga

SEQ ID NO: 3167616 - DNA, 25 bp, Homo sapien
tggacctgtaagctgggtactagcc

SEQ ID NO: 3167617 - DNA, 25 bp, Homo sapien
agtggatcctagcaaatactggtgc

SEQ ID NO: 3167618 - DNA, 25 bp, Homo sapien
tactggtgcctacagaactattctc

SEQ ID NO: 3167619 - DNA, 25 bp, Homo sapien
gcccctattaggaagatggaccatc

SEQ ID NO: 3167620 - DNA, 25 bp, Homo sapien
tggatgtgaatctctggccgcctgg

SEQ ID NO: 3167621 - DNA, 25 bp, Homo sapien
tctctggaggcgtgttgataatccc

SEQ ID NO: 3167622 - DNA, 25 bp, Homo sapien
gccagattaatccagcgcaaagagg

SEQ ID NO: 3167623 - DNA, 25 bp, Homo sapien
aatctcaggacgatgacgtgtgcca

SEQ ID NO: 3167624 - DNA, 25 bp, Homo sapien
tgtgtcagatgtaaaggcagcctcc

SEQ ID NO: 3167625 - DNA, 25 bp, Homo sapien
acaggcatgagccaccgcacccagc

SEQ ID NO: 3167626 - DNA, 25 bp, Homo sapien
ctgacctcataatctgccagcctca

SEQ ID NO: 3167627 - DNA, 25 bp, Homo sapien
acctcataatctgccagcctcagcc

SEQ ID NO: 3167628 - DNA, 25 bp, Homo sapien
caggcatgagccaccgcacccagcc

SEQ ID NO: 3167629 - DNA, 25 bp, Homo sapien
cctagctgatgcatccaaatttaaa

SEQ ID NO: 3167630 - DNA, 25 bp, Homo sapien
gctgatgcatccaaatttaaaactg

SEQ ID NO: 3167631 - DNA, 25 bp, Homo sapien
tgatgcatccaaatttaaaactggg

SEQ ID NO: 3167632 - DNA, 25 bp, Homo sapien
ctgtcctagctgatgcatccaaatt

SEQ ID NO: 3167633 - DNA, 25 bp, Homo sapien
taaagtttccaatacagggctacac

SEQ ID NO: 3167634 - DNA, 25 bp, Homo sapien
ccccacatctattaaattagactct

SEQ ID NO: 3167635 - DNA, 25 bp, Homo sapien
tattaaattagactctctgaggctg

SEQ ID NO: 3167636 - DNA, 25 bp, Homo sapien
ggtctggaggcagacctggactcaa

SEQ ID NO: 3167637 - DNA, 25 bp, Homo sapien
atataagattaaggcaaaaaggagc

SEQ ID NO: 3167638 - DNA, 25 bp, Homo sapien
cttggctggtgctagaaaacctgac

SEQ ID NO: 3167639 - DNA, 25 bp, Homo sapien
tatgtatgccctgagagagcaggct

SEQ ID NO: 3167640 - DNA, 25 bp, Homo sapien
tctgtggtttactagacctgtgacc

SEQ ID NO: 3167641 - DNA, 25 bp, Homo sapien
caaaggatttgcgagttaaatagac

SEQ ID NO: 3167642 - DNA, 25 bp, Homo sapien
gccgttttgatgcaagttgtctaaa

SEQ ID NO: 3167643 - DNA, 25 bp, Homo sapien
ttaaatagacaccacagccgttttg

SEQ ID NO: 3167644 - DNA, 25 bp, Homo sapien
gaagaggtacaaaggatttgcgagt

SEQ ID NO: 3167645 - DNA, 25 bp, Homo sapien
agagcatgtccactcccttagggct

SEQ ID NO: 3167646 - DNA, 25 bp, Homo sapien
aagagcatgtccactcccttagggc

SEQ ID NO: 3167647 - DNA, 25 bp, Homo sapien
agctgcaggattcagcgttggaggc

SEQ ID NO: 3167648 - DNA, 25 bp, Homo sapien
ctgcaggattcagcgttggaggcca

SEQ ID NO: 3167649 - DNA, 25 bp, Homo sapien
gattcagcgttggaggccagcagtg

SEQ ID NO: 3167650 - DNA, 25 bp, Homo sapien
caggattcagcgttggaggccagca

SEQ ID NO: 3167651 - DNA, 25 bp, Homo sapien
caatcacttgcagagggttaggcca

SEQ ID NO: 3167652 - DNA, 25 bp, Homo sapien
aactgcagaccaagatgaatagcct

SEQ ID NO: 3167653 - DNA, 25 bp, Homo sapien
tgtgatcaaaaacaaacgcatctgt

SEQ ID NO: 3167654 - DNA, 25 bp, Homo sapien
ccactgattagcacgtgaccttgaa

SEQ ID NO: 3167655 - DNA, 25 bp, Homo sapien
cagcctctatgtcactctttaggga

SEQ ID NO: 3167656 - DNA, 25 bp, Homo sapien
tgttgaacattttacagccagcaag

SEQ ID NO: 3167657 - DNA, 25 bp, Homo sapien
caccagctttgtgattgcaggcaaa

SEQ ID NO: 3167658 - DNA, 25 bp, Homo sapien
gaaatgggtacctatctgatgtgag

SEQ ID NO: 3167659 - DNA, 25 bp, Homo sapien
atagtccagctctgtccaatttaag

SEQ ID NO: 3167660 - DNA, 25 bp, Homo sapien
caacatcctcaacaggttgtgttgg

SEQ ID NO: 3167661 - DNA, 25 bp, Homo sapien
aacatcctcaacaggttgtgttggc

SEQ ID NO: 3167662 - DNA, 25 bp, Homo sapien
tttaagctcacttcagatccactct

SEQ ID NO: 3167663 - DNA, 25 bp, Homo sapien
tgtgaagaccattaaagcgaaggta

SEQ ID NO: 3167664 - DNA, 25 bp, Homo sapien
cacagcgtcggcagctttatctgcc

SEQ ID NO: 3167665 - DNA, 25 bp, Homo sapien
ccagccctggcgagtcgggcttctt

SEQ ID NO: 3167666 - DNA, 25 bp, Homo sapien
gcgtcggcagctttatctgcccttc

SEQ ID NO: 3167667 - DNA, 25 bp, Homo sapien
tgtcgtgctgtggtgtcctgcccgt

SEQ ID NO: 3167668 - DNA, 25 bp, Homo sapien
caacaagtgtcgctctagggtcctc

SEQ ID NO: 3167669 - DNA, 25 bp, Homo sapien
tgggctgccctgattagccaaacac

SEQ ID NO: 3167670 - DNA, 25 bp, Homo sapien
tgagaaccggtttccaccgcgctgg

SEQ ID NO: 3167671 - DNA, 25 bp, Homo sapien
tagaggcacggttctggcccaggaa

SEQ ID NO: 3167672 - DNA, 25 bp, Homo sapien
aaggctggcccaccgcgggggcttg

SEQ ID NO: 3167673 - DNA, 25 bp, Homo sapien
cctcagttatctgttggtcatttct

SEQ ID NO: 3167674 - DNA, 25 bp, Homo sapien
ggaggtggcctagaggcacggttct

SEQ ID NO: 3167675 - DNA, 25 bp, Homo sapien
tatctgacagcccaaaaccttggtg

SEQ ID NO: 3167676 - DNA, 25 bp, Homo sapien
ggcatttctgccaacatcgacggag

SEQ ID NO: 3167677 - DNA, 25 bp, Homo sapien
gatttcatcacaaaggcctaacttg

SEQ ID NO: 3167678 - DNA, 25 bp, Homo sapien
gaaaaagtgcccgttgcctgagagg

SEQ ID NO: 3167679 - DNA, 25 bp, Homo sapien
aacataaaggatgagaagagtgagc

SEQ ID NO: 3167680 - DNA, 25 bp, Homo sapien
caatcaatacaatccaattttgctg

SEQ ID NO: 3167681 - DNA, 25 bp, Homo sapien
taaaggatgagaagagtgagccaac

SEQ ID NO: 3167682 - DNA, 25 bp, Homo sapien
tgagaagagtgagccaaccaatcaa

SEQ ID NO: 3167683 - DNA, 25 bp, Homo sapien
taaatgtaggtgcttgcatttataa

SEQ ID NO: 3167684 - DNA, 25 bp, Homo sapien
aaatgtaggtgcttgcatttataat

SEQ ID NO: 3167685 - DNA, 25 bp, Homo sapien
ttaaatgtaggtgcttgcatttata

SEQ ID NO: 3167686 - DNA, 25 bp, Homo sapien
aatgtaggtgcttgcatttataatc

SEQ ID NO: 3167687 - DNA, 25 bp, Homo sapien
cagaagcacgttcttaagcatctca

SEQ ID NO: 3167688 - DNA, 25 bp, Homo sapien
ggatggtccctgaagtatgtgtcaa

SEQ ID NO: 3167689 - DNA, 25 bp, Homo sapien
gttacaaatacggtgacagcaaccc

SEQ ID NO: 3167690 - DNA, 25 bp, Homo sapien
cagagcatagttaaggattaatcag

SEQ ID NO: 3167691 - DNA, 25 bp, Homo sapien
tgtccacagcaccagtagggaccct

SEQ ID NO: 3167692 - DNA, 25 bp, Homo sapien
tcaccagacagcagtcagggagcct

SEQ ID NO: 3167693 - DNA, 25 bp, Homo sapien
tgcgtggctttcttgtgccccattg

SEQ ID NO: 3167694 - DNA, 25 bp, Homo sapien
gccccattgtgtattgtgctgtcca

SEQ ID NO: 3167695 - DNA, 25 bp, Homo sapien
taaaccagtcagtccaactaagaag

SEQ ID NO: 3167696 - DNA, 25 bp, Homo sapien
ggagtctcttgatcacttgtggaac

SEQ ID NO: 3167697 - DNA, 25 bp, Homo sapien
tctcaatgggatcagatgatatgcc

SEQ ID NO: 3167698 - DNA, 25 bp, Homo sapien
gctctgcggctatcatttgggcttc

SEQ ID NO: 3167699 - DNA, 25 bp, Homo sapien
tatagacgccattcagattcaagga

SEQ ID NO: 3167700 - DNA, 25 bp, Homo sapien
taacaatgcaggaatcagatttgca

SEQ ID NO: 3167701 - DNA, 25 bp, Homo sapien
cagattcaaggatcttttcccaagt

SEQ ID NO: 3167702 - DNA, 25 bp, Homo sapien
ttgcagatgaggcactgtgctctga

SEQ ID NO: 3167703 - DNA, 25 bp, Homo sapien
aagtgcctcaaaaggtaatcttgct

SEQ ID NO: 3167704 - DNA, 25 bp, Homo sapien
agtgcctcaaaaggtaatcttgctt

SEQ ID NO: 3167705 - DNA, 25 bp, Homo sapien
tgtgacaatattggaaactgcaaac

SEQ ID NO: 3167706 - DNA, 25 bp, Homo sapien
agcatcatcggtgttgggaactggg

SEQ ID NO: 3167707 - DNA, 25 bp, Homo sapien
cagtagcgatgtgacaatattggaa

SEQ ID NO: 3167708 - DNA, 25 bp, Homo sapien
ggcagccagcagtagcgatgtgaca

SEQ ID NO: 3167709 - DNA, 25 bp, Homo sapien
tgtaataagtactgcagaaatgttt

SEQ ID NO: 3167710 - DNA, 25 bp, Homo sapien
gaaaaaacagctccagtccactctg

SEQ ID NO: 3167711 - DNA, 25 bp, Homo sapien
tcactgagaatgtaataagtactgc

SEQ ID NO: 3167712 - DNA, 25 bp, Homo sapien
agaaaaaacagctccagtccactct

SEQ ID NO: 3167713 - DNA, 25 bp, Homo sapien
gagctgttcacattgcggctggtgc

SEQ ID NO: 3167714 - DNA, 25 bp, Homo sapien
gcaaggctgagagtgtcaggtgata

SEQ ID NO: 3167715 - DNA, 25 bp, Homo sapien
tcagctataggcagagctgttcaca

SEQ ID NO: 3167716 - DNA, 25 bp, Homo sapien
cacattgcggctggtgcgacctggt

SEQ ID NO: 3167717 - DNA, 25 bp, Homo sapien
aatagatctgtcactgaacgttttg

SEQ ID NO: 3167718 - DNA, 25 bp, Homo sapien
gaataaacatcttggatttcagctt

SEQ ID NO: 3167719 - DNA, 25 bp, Homo sapien
caagttcactaatagatctgtcact

SEQ ID NO: 3167720 - DNA, 25 bp, Homo sapien
ttcctgtcctctcttgacaagttca

SEQ ID NO: 3167721 - DNA, 25 bp, Homo sapien
cacgtttcggcatcagttggcttaa

SEQ ID NO: 3167722 - DNA, 25 bp, Homo sapien
cttttggttgaaggcggtactgaca

SEQ ID NO: 3167723 - DNA, 25 bp, Homo sapien
tcagtcgaagtcacaggtaacacgg

SEQ ID NO: 3167724 - DNA, 25 bp, Homo sapien
aaatgtgctagaactttgtgcctcc

SEQ ID NO: 3167725 - DNA, 25 bp, Homo sapien
ggtctagtctaagacagagccagga

SEQ ID NO: 3167726 - DNA, 25 bp, Homo sapien
ttagattttacaggactatccaggt

SEQ ID NO: 3167727 - DNA, 25 bp, Homo sapien
taatctatgatctgccatgctcagt

SEQ ID NO: 3167728 - DNA, 25 bp, Homo sapien
tagcctgtgcgggtaatactcatcc

SEQ ID NO: 3167729 - DNA, 25 bp, Homo sapien
ctagtcccttcagatcacataatgg

SEQ ID NO: 3167730 - DNA, 25 bp, Homo sapien
ccagggaaaagtgccccttcatcct

SEQ ID NO: 3167731 - DNA, 25 bp, Homo sapien
caggatgcttaagggttttaatcct

SEQ ID NO: 3167732 - DNA, 25 bp, Homo sapien
tgataaggtgctgttctgctgaccc

SEQ ID NO: 3167733 - DNA, 25 bp, Homo sapien
agatccaagctgcggtgagtcaaga

SEQ ID NO: 3167734 - DNA, 25 bp, Homo sapien
gagatccaagctgcggtgagtcaag

SEQ ID NO: 3167735 - DNA, 25 bp, Homo sapien
caggagatccaagctgcggtgagtc

SEQ ID NO: 3167736 - DNA, 25 bp, Homo sapien
ggagatccaagctgcggtgagtcaa

SEQ ID NO: 3167737 - DNA, 25 bp, Homo sapien
tgccaccacatagagactcaccaag

SEQ ID NO: 3167738 - DNA, 25 bp, Homo sapien
gtgtgccaccacatagagactcacc

SEQ ID NO: 3167739 - DNA, 25 bp, Homo sapien
caccacatagagactcaccaagtta

SEQ ID NO: 3167740 - DNA, 25 bp, Homo sapien
acatagagactcaccaagttagcca

SEQ ID NO: 3167741 - DNA, 25 bp, Homo sapien
gatctgatccgcatagcactcattc

SEQ ID NO: 3167742 - DNA, 25 bp, Homo sapien
tcttgatctgatccgcatagcactc

SEQ ID NO: 3167743 - DNA, 25 bp, Homo sapien
tgatctgatccgcatagcactcatt

SEQ ID NO: 3167744 - DNA, 25 bp, Homo sapien
ctctcttgatctgatccgcatagca

SEQ ID NO: 3167745 - DNA, 25 bp, Homo sapien
ggtcccaagtctgggaagcatcaga

SEQ ID NO: 3167746 - DNA, 25 bp, Homo sapien
atgtttcgttgtcttcttgagtttt

SEQ ID NO: 3167747 - DNA, 25 bp, Homo sapien
ttttgggtcccaagtctgggaagca

SEQ ID NO: 3167748 - DNA, 25 bp, Homo sapien
cttgagttttgggtcccaagtctgg

SEQ ID NO: 3167749 - DNA, 25 bp, Homo sapien
tgcagattcaccagcagcaaggagc

SEQ ID NO: 3167750 - DNA, 25 bp, Homo sapien
tgatgccaaccagctcagagacaga

SEQ ID NO: 3167751 - DNA, 25 bp, Homo sapien
ggtggttccaacttagcctgcagct

SEQ ID NO: 3167752 - DNA, 25 bp, Homo sapien
cttgcaggcaactctaggtggttcc

SEQ ID NO: 3167753 - DNA, 25 bp, Homo sapien
tccgtgcatcggctagggtgtgccc

SEQ ID NO: 3167754 - DNA, 25 bp, Homo sapien
gcatcggctagggtgtgcccttctt

SEQ ID NO: 3167755 - DNA, 25 bp, Homo sapien
caaatgttacttccgtgcatcggct

SEQ ID NO: 3167756 - DNA, 25 bp, Homo sapien
ctgtgacatgcaaatgttacttccg

SEQ ID NO: 3167757 - DNA, 25 bp, Homo sapien
ttgtggtaagctgagatgatgccat

SEQ ID NO: 3167758 - DNA, 25 bp, Homo sapien
gaatccgggagagaggttgtggtaa

SEQ ID NO: 3167759 - DNA, 25 bp, Homo sapien
atgatgccattgcactccagcctgg

SEQ ID NO: 3167760 - DNA, 25 bp, Homo sapien
cagcctgggcaacaagagcaaaaac

SEQ ID NO: 3167761 - DNA, 25 bp, Homo sapien
gaaacagccgaaatgaagctgctcc

SEQ ID NO: 3167762 - DNA, 25 bp, Homo sapien
tgggacgtggagaccaccacttcac

SEQ ID NO: 3167763 - DNA, 25 bp, Homo sapien
ggttcgagtcctaggaggcatcctc

SEQ ID NO: 3167764 - DNA, 25 bp, Homo sapien
tggtcgacagctccactcatggcgt

SEQ ID NO: 3167765 - DNA, 25 bp, Homo sapien
caaactcgaggctaacagtgaccgg

SEQ ID NO: 3167766 - DNA, 25 bp, Homo sapien
gtgttgtgctgggtggggtagatac

SEQ ID NO: 3167767 - DNA, 25 bp, Homo sapien
tcatctacttaaataggctcttttg

SEQ ID NO: 3167768 - DNA, 25 bp, Homo sapien
actccttttaaggatgttctcccag

SEQ ID NO: 3167769 - DNA, 25 bp, Homo sapien
tccttttaaggatgttctcccagaa

SEQ ID NO: 3167770 - DNA, 25 bp, Homo sapien
aggatgttctcccagaattatctat

SEQ ID NO: 3167771 - DNA, 25 bp, Homo sapien
taaggatgttctcccagaattatct

SEQ ID NO: 3167772 - DNA, 25 bp, Homo sapien
gaacttaaatcctcaacctagtata

SEQ ID NO: 3167773 - DNA, 25 bp, Homo sapien
aatcctcaacctagtataatgatca

SEQ ID NO: 3167774 - DNA, 25 bp, Homo sapien
tatcaacggccttacataaatgttt

SEQ ID NO: 3167775 - DNA, 25 bp, Homo sapien
gattaagacttctcaccatctatca

SEQ ID NO: 3167776 - DNA, 25 bp, Homo sapien
ggaccaggtgttgaccactagcttg

SEQ ID NO: 3167777 - DNA, 25 bp, Homo sapien
tagcttgtcttacttgggcccggag

SEQ ID NO: 3167778 - DNA, 25 bp, Homo sapien
ttgaccagaagggaacacccagctg

SEQ ID NO: 3167779 - DNA, 25 bp, Homo sapien
cacagtcggtggatgctaagcagat

SEQ ID NO: 3167780 - DNA, 25 bp, Homo sapien
agcggtggacaagggagagggggcg

SEQ ID NO: 3167781 - DNA, 25 bp, Homo sapien
ctgcagcggtggacaagggagaggg

SEQ ID NO: 3167782 - DNA, 25 bp, Homo sapien
ggacaagggagagggggcgtgacat

SEQ ID NO: 3167783 - DNA, 25 bp, Homo sapien
tggacaagggagagggggcgtgaca

SEQ ID NO: 3167784 - DNA, 25 bp, Homo sapien
aggagcacacaagcagcaccaggag

SEQ ID NO: 3167785 - DNA, 25 bp, Homo sapien
aaggagcacacaagcagcaccagga

SEQ ID NO: 3167786 - DNA, 25 bp, Homo sapien
cgaaggagcacacaagcagcaccag

SEQ ID NO: 3167787 - DNA, 25 bp, Homo sapien
gaaggagcacacaagcagcaccagg

SEQ ID NO: 3167788 - DNA, 25 bp, Homo sapien
cggccatggggagcgccggagtctc

SEQ ID NO: 3167789 - DNA, 25 bp, Homo sapien
catggggagcgccggagtctcctca

SEQ ID NO: 3167790 - DNA, 25 bp, Homo sapien
cttttcgccggccatggggagcgcc

SEQ ID NO: 3167791 - DNA, 25 bp, Homo sapien
ttcgccggccatggggagcgccgga

SEQ ID NO: 3167792 - DNA, 25 bp, Homo sapien
ccacagaactatcctgccccgccac

SEQ ID NO: 3167793 - DNA, 25 bp, Homo sapien
tgcaccacagaactatcctgccccg

SEQ ID NO: 3167794 - DNA, 25 bp, Homo sapien
gcaccacagaactatcctgccccgc

SEQ ID NO: 3167795 - DNA, 25 bp, Homo sapien
aactgcaccacagaactatcctgcc

SEQ ID NO: 3167796 - DNA, 25 bp, Homo sapien
ttatctctggtctatgttcatattc

SEQ ID NO: 3167797 - DNA, 25 bp, Homo sapien
tcctcatgtgtaggaatgaataaat

SEQ ID NO: 3167798 - DNA, 25 bp, Homo sapien
tcatgtgtaggaatgaataaatctg

SEQ ID NO: 3167799 - DNA, 25 bp, Homo sapien
attcatgtctgaagggaacattggt

SEQ ID NO: 3167800 - DNA, 25 bp, Homo sapien
ttttacaagcatgccctggtttccc

SEQ ID NO: 3167801 - DNA, 25 bp, Homo sapien
aatgcctctgatcctcatccaaaag

SEQ ID NO: 3167802 - DNA, 25 bp, Homo sapien
tggtctcgctctccaagggtcagag

SEQ ID NO: 3167803 - DNA, 25 bp, Homo sapien
taacgccaatctctgctatggaaat

SEQ ID NO: 3167804 - DNA, 25 bp, Homo sapien
tggaagaaagtgaagtgtgcttggt

SEQ ID NO: 3167805 - DNA, 25 bp, Homo sapien
gaagtgtgcttggtatgtgaagggc

SEQ ID NO: 3167806 - DNA, 25 bp, Homo sapien
aaagtgaagtgtgcttggtatgtga

SEQ ID NO: 3167807 - DNA, 25 bp, Homo sapien
agtgtgcttggtatgtgaagggcat

SEQ ID NO: 3167808 - DNA, 25 bp, Homo sapien
tgaagctctcaacagggttgatgtg

SEQ ID NO: 3167809 - DNA, 25 bp, Homo sapien
ttgatgtgaattactaacagctgcc

SEQ ID NO: 3167810 - DNA, 25 bp, Homo sapien
acctcctgttagtggcgacaacctt

SEQ ID NO: 3167811 - DNA, 25 bp, Homo sapien
ttctggttgtttgcgctggagaaag

SEQ ID NO: 3167812 - DNA, 25 bp, Homo sapien
catgaacttgctaactaagaggagg

SEQ ID NO: 3167813 - DNA, 25 bp, Homo sapien
aagtgacatcactagggcatgggca

SEQ ID NO: 3167814 - DNA, 25 bp, Homo sapien
cacaggacatgcttgggagaggttc

SEQ ID NO: 3167815 - DNA, 25 bp, Homo sapien
cacaggccagttgtggaactgcaag

SEQ ID NO: 3167816 - DNA, 25 bp, Homo sapien
gattcctaatccatctgaaaaggct

SEQ ID NO: 3167817 - DNA, 25 bp, Homo sapien
aagagggcacagattcctaatccat

SEQ ID NO: 3167818 - DNA, 25 bp, Homo sapien
agataccaacatcccgacaccagac

SEQ ID NO: 3167819 - DNA, 25 bp, Homo sapien
aggcaaattgtttctggtaatccaa

SEQ ID NO: 3167820 - DNA, 25 bp, Homo sapien
ttttcaatgttgacaccttagagaa

SEQ ID NO: 3167821 - DNA, 25 bp, Homo sapien
tataagttgaaagtcagttttagga

SEQ ID NO: 3167822 - DNA, 25 bp, Homo sapien
ctgctctatactgttcttttcaatg

SEQ ID NO: 3167823 - DNA, 25 bp, Homo sapien
gacaccttagagaaacaacttatat

SEQ ID NO: 3167824 - DNA, 25 bp, Homo sapien
agactgaggtgtgcaaggtcccgca

SEQ ID NO: 3167825 - DNA, 25 bp, Homo sapien
gactgaggtgtgcaaggtcccgcag

SEQ ID NO: 3167826 - DNA, 25 bp, Homo sapien
ccagactgaggtgtgcaaggtcccg

SEQ ID NO: 3167827 - DNA, 25 bp, Homo sapien
tgcacagaggtacaccagactgagg

SEQ ID NO: 3167828 - DNA, 25 bp, Homo sapien
tggtacctccgttctccttgtctgt

SEQ ID NO: 3167829 - DNA, 25 bp, Homo sapien
ccacaagacgaaagaatgacctgaa

SEQ ID NO: 3167830 - DNA, 25 bp, Homo sapien
gaaatagttacacatatcaagtgtg

SEQ ID NO: 3167831 - DNA, 25 bp, Homo sapien
gacgaaagaatgacctgaaatagtt

SEQ ID NO: 3167832 - DNA, 25 bp, Homo sapien
tctgattagacaagagacgtgattc

SEQ ID NO: 3167833 - DNA, 25 bp, Homo sapien
tggtgaatgccgctgaagccttcct

SEQ ID NO: 3167834 - DNA, 25 bp, Homo sapien
cagtgtaagtcacagcagagatgca

SEQ ID NO: 3167835 - DNA, 25 bp, Homo sapien
gattctttcggtcgtcatgactgta

SEQ ID NO: 3167836 - DNA, 25 bp, Homo sapien
gcaaagaaggctccctaaggtttga

SEQ ID NO: 3167837 - DNA, 25 bp, Homo sapien
gctcaggaccggatttgcatttcaa

SEQ ID NO: 3167838 - DNA, 25 bp, Homo sapien
gcccaacgcgctcaacaatgggcgg

SEQ ID NO: 3167839 - DNA, 25 bp, Homo sapien
gggctccaggccgacgccaagttca

SEQ ID NO: 3167840 - DNA, 25 bp, Homo sapien
attgattttggtcaaaggtctgtat

SEQ ID NO: 3167841 - DNA, 25 bp, Homo sapien
tgattttggtcaaaggtctgtatgg

SEQ ID NO: 3167842 - DNA, 25 bp, Homo sapien
attttggtcaaaggtctgtatgggt

SEQ ID NO: 3167843 - DNA, 25 bp, Homo sapien
aagaataattgattttggtcaaagg

SEQ ID NO: 3167844 - DNA, 25 bp, Homo sapien
acagtggttagaattacaggatact

SEQ ID NO: 3167845 - DNA, 25 bp, Homo sapien
cagtggttagaattacaggatactt

SEQ ID NO: 3167846 - DNA, 25 bp, Homo sapien
tgtcaaggcaattgaggtcacacag

SEQ ID NO: 3167847 - DNA, 25 bp, Homo sapien
gaacccctctcagtgatcctgcagg

SEQ ID NO: 3167848 - DNA, 25 bp, Homo sapien
cctagaaagtgaacccctctcagtg

SEQ ID NO: 3167849 - DNA, 25 bp, Homo sapien
tgacatgaccttccctagaaagtga

SEQ ID NO: 3167850 - DNA, 25 bp, Homo sapien
gaaagtgaacccctctcagtgatcc

SEQ ID NO: 3167851 - DNA, 25 bp, Homo sapien
gaccacctcacaggtggacttgtga

SEQ ID NO: 3167852 - DNA, 25 bp, Homo sapien
caatgtcagagaggaccacctcaca

SEQ ID NO: 3167853 - DNA, 25 bp, Homo sapien
gggtaaggagcaacggacaatgtca

SEQ ID NO: 3167854 - DNA, 25 bp, Homo sapien
taaggagcaacggacaatgtcagag

SEQ ID NO: 3167855 - DNA, 25 bp, Homo sapien
tttttgttcacaaataagtcgactg

SEQ ID NO: 3167856 - DNA, 25 bp, Homo sapien
cataggtcaaattctaataggcagc

SEQ ID NO: 3167857 - DNA, 25 bp, Homo sapien
tttgttcacaaataagtcgactgac

SEQ ID NO: 3167858 - DNA, 25 bp, Homo sapien
ctcacaaagcataggtcaaattcta

SEQ ID NO: 3167859 - DNA, 25 bp, Homo sapien
ctggtttcagtccagtgtctccaaa

SEQ ID NO: 3167860 - DNA, 25 bp, Homo sapien
accatctggtttcagtccagtgtct

SEQ ID NO: 3167861 - DNA, 25 bp, Homo sapien
catctggtttcagtccagtgtctcc

SEQ ID NO: 3167862 - DNA, 25 bp, Homo sapien
tctggtttcagtccagtgtctccaa

SEQ ID NO: 3167863 - DNA, 25 bp, Homo sapien
gagccccttcgacaaacagctggta

SEQ ID NO: 3167864 - DNA, 25 bp, Homo sapien
tagacaggatgcatttatacagggc

SEQ ID NO: 3167865 - DNA, 25 bp, Homo sapien
tgatccatctcattagcggcaggct

SEQ ID NO: 3167866 - DNA, 25 bp, Homo sapien
cagggctaagtttgtcctcagaatc

SEQ ID NO: 3167867 - DNA, 25 bp, Homo sapien
ggcaccagtatctgcatggcctggg

SEQ ID NO: 3167868 - DNA, 25 bp, Homo sapien
caccagtatctgcatggcctgggtc

SEQ ID NO: 3167869 - DNA, 25 bp, Homo sapien
ctgacgaagttagaggcaccagtat

SEQ ID NO: 3167870 - DNA, 25 bp, Homo sapien
gacgaagttagaggcaccagtatct

SEQ ID NO: 3167871 - DNA, 25 bp, Homo sapien
tgcttcagccgaagtttaacccctc

SEQ ID NO: 3167872 - DNA, 25 bp, Homo sapien
tcagccgaagtttaacccctcctga

SEQ ID NO: 3167873 - DNA, 25 bp, Homo sapien
ctgaccacgctgctttcctgtgctg

SEQ ID NO: 3167874 - DNA, 25 bp, Homo sapien
ctgtgcttcagccgaagtttaaccc

SEQ ID NO: 3167875 - DNA, 25 bp, Homo sapien
catcttgatttactttatgaagcat

SEQ ID NO: 3167876 - DNA, 25 bp, Homo sapien
tcatcttgatttactttatgaagca

SEQ ID NO: 3167877 - DNA, 25 bp, Homo sapien
tagcctatagcttagaaatgctgga

SEQ ID NO: 3167878 - DNA, 25 bp, Homo sapien
gctggcatcttgaacaatagcctat

SEQ ID NO: 3167879 - DNA, 25 bp, Homo sapien
gaaggtgacccttaatgactccctg

SEQ ID NO: 3167880 - DNA, 25 bp, Homo sapien
ggaattctatttttgtgggcaagag

SEQ ID NO: 3167881 - DNA, 25 bp, Homo sapien
tagcaaccctctggccaattggatg

SEQ ID NO: 3167882 - DNA, 25 bp, Homo sapien
tgaatcgccttgaacttgcccagct

SEQ ID NO: 3167883 - DNA, 25 bp, Homo sapien
tgtgcctccagttggacggcctgaa

SEQ ID NO: 3167884 - DNA, 25 bp, Homo sapien
tcagtcgtggaataaaaagccattc

SEQ ID NO: 3167885 - DNA, 25 bp, Homo sapien
acacacgggatcgggctccagggat

SEQ ID NO: 3167886 - DNA, 25 bp, Homo sapien
aagtgagggaggtgacacacgggat

SEQ ID NO: 3167887 - DNA, 25 bp, Homo sapien
tacattatttgtactgaaacatcat

SEQ ID NO: 3167888 - DNA, 25 bp, Homo sapien
cactatacattatttgtactgaaac

SEQ ID NO: 3167889 - DNA, 25 bp, Homo sapien
ggaagggatgggattcaaacactca

SEQ ID NO: 3167890 - DNA, 25 bp, Homo sapien
cagtgctgttgagatagaagaaagg

SEQ ID NO: 3167891 - DNA, 25 bp, Homo sapien
caagtaggtagcacgaaaagttgag

SEQ ID NO: 3167892 - DNA, 25 bp, Homo sapien
ggacctcgtacccaatgtcctctgt

SEQ ID NO: 3167893 - DNA, 25 bp, Homo sapien
caagtgtctataaggcagagagcgt

SEQ ID NO: 3167894 - DNA, 25 bp, Homo sapien
aatgagaagttcaagcaagtgtcta

SEQ ID NO: 3167895 - DNA, 25 bp, Homo sapien
gagaagttcaagcaagtgtctataa

SEQ ID NO: 3167896 - DNA, 25 bp, Homo sapien
gtctataaggcagagagcgtgcaga

SEQ ID NO: 3167897 - DNA, 25 bp, Homo sapien
cttgaggagaatgaacagggagaca

SEQ ID NO: 3167898 - DNA, 25 bp, Homo sapien
caagttaagtatgggagtctcacag

SEQ ID NO: 3167899 - DNA, 25 bp, Homo sapien
aacacagggcctttgagagaagata

SEQ ID NO: 3167900 - DNA, 25 bp, Homo sapien
catgcgaatgagtgcctgtgggact

SEQ ID NO: 3167901 - DNA, 25 bp, Homo sapien
catggtcacagcctttcggaccctg

SEQ ID NO: 3167902 - DNA, 25 bp, Homo sapien
tggtcacagcctttcggaccctggc

SEQ ID NO: 3167903 - DNA, 25 bp, Homo sapien
tcacagcctttcggaccctggccat

SEQ ID NO: 3167904 - DNA, 25 bp, Homo sapien
ggtcacagcctttcggaccctggcc

SEQ ID NO: 3167905 - DNA, 25 bp, Homo sapien
ttagttgtgtgccacgagtgaggtc

SEQ ID NO: 3167906 - DNA, 25 bp, Homo sapien
gcttctccccagatttagttgtgtg

SEQ ID NO: 3167907 - DNA, 25 bp, Homo sapien
aaggagggccgatcataccctgaga

SEQ ID NO: 3167908 - DNA, 25 bp, Homo sapien
atcatgctggcatcgggttgcttct

SEQ ID NO: 3167909 - DNA, 25 bp, Homo sapien
aatggggttaatactactgtatctg

SEQ ID NO: 3167910 - DNA, 25 bp, Homo sapien
aaatggggttaatactactgtatct

SEQ ID NO: 3167911 - DNA, 25 bp, Homo sapien
gcacccagccgcaagcttcaatttc

SEQ ID NO: 3167912 - DNA, 25 bp, Homo sapien
catggtttgtttgtgctgcaccaca

SEQ ID NO: 3167913 - DNA, 25 bp, Homo sapien
ggggtcaagccctctgccaaagctg

SEQ ID NO: 3167914 - DNA, 25 bp, Homo sapien
cctgccgctgccaagatcagatccc

SEQ ID NO: 3167915 - DNA, 25 bp, Homo sapien
tggaactcagcatgggggtcaagcc

SEQ ID NO: 3167916 - DNA, 25 bp, Homo sapien
tttgccattgatgccaccaaaatgg

SEQ ID NO: 3167917 - DNA, 25 bp, Homo sapien
attacctttgccattgatgccacca

SEQ ID NO: 3167918 - DNA, 25 bp, Homo sapien
gggaatacaggcactgatatcactc

SEQ ID NO: 3167919 - DNA, 25 bp, Homo sapien
tgatatcactcactaggacaagttc

SEQ ID NO: 3167920 - DNA, 25 bp, Homo sapien
gaagaaagacaaagcagtcagtacc

SEQ ID NO: 3167921 - DNA, 25 bp, Homo sapien
caaagcagtcagtaccactgagctg

SEQ ID NO: 3167922 - DNA, 25 bp, Homo sapien
cagtcagtaccactgagctgttatc

SEQ ID NO: 3167923 - DNA, 25 bp, Homo sapien
agacaaagcagtcagtaccactgag

SEQ ID NO: 3167924 - DNA, 25 bp, Homo sapien
ctggtcagggctccgccttagataa

SEQ ID NO: 3167925 - DNA, 25 bp, Homo sapien
ctgcactggtcagggctccgcctta

SEQ ID NO: 3167926 - DNA, 25 bp, Homo sapien
tgggagctgcactggtcagggctcc

SEQ ID NO: 3167927 - DNA, 25 bp, Homo sapien
tcagggctccgccttagataagcat

SEQ ID NO: 3167928 - DNA, 25 bp, Homo sapien
agatgacagggtgggtatgccccac

SEQ ID NO: 3167929 - DNA, 25 bp, Homo sapien
gctgtaagccgagtctctcttgtta

SEQ ID NO: 3167930 - DNA, 25 bp, Homo sapien
gaagtggctgagctggtcaatgctg

SEQ ID NO: 3167931 - DNA, 25 bp, Homo sapien
ctaggatgctagaactggtggagaa

SEQ ID NO: 3167932 - DNA, 25 bp, Homo sapien
gaggccacctcgagcagaagtattg

SEQ ID NO: 3167933 - DNA, 25 bp, Homo sapien
tcttgacatagcgaatatctgcctg

SEQ ID NO: 3167934 - DNA, 25 bp, Homo sapien
gaaggttgtccgtggcagtctccaa

SEQ ID NO: 3167935 - DNA, 25 bp, Homo sapien
tgaccatttgctgaggctcgggcct

SEQ ID NO: 3167936 - DNA, 25 bp, Homo sapien
gctgggccgctcacggtgccgaaat

SEQ ID NO: 3167937 - DNA, 25 bp, Homo sapien
gaaatgctgcgtaactgtcactccg

SEQ ID NO: 3167938 - DNA, 25 bp, Homo sapien
tgaggccggcagagccgtttctgat

SEQ ID NO: 3167939 - DNA, 25 bp, Homo sapien
tgatcaaggctagaccaggagctgg

SEQ ID NO: 3167940 - DNA, 25 bp, Homo sapien
acttcagggagcctaaagagtttgc

SEQ ID NO: 3167941 - DNA, 25 bp, Homo sapien
tcctctatgaatggagacttcaggg

SEQ ID NO: 3167942 - DNA, 25 bp, Homo sapien
tccttggccagtgcagggtagagca

SEQ ID NO: 3167943 - DNA, 25 bp, Homo sapien
cataccgttgctactcacagaaggc

SEQ ID NO: 3167944 - DNA, 25 bp, Homo sapien
tttggaggggacatacttggctgta

SEQ ID NO: 3167945 - DNA, 25 bp, Homo sapien
gggacagcaagtcatgttctaaggg

SEQ ID NO: 3167946 - DNA, 25 bp, Homo sapien
aggggacatacttggctgtagcttc

SEQ ID NO: 3167947 - DNA, 25 bp, Homo sapien
tggggacagcaagtcatgttctaag

SEQ ID NO: 3167948 - DNA, 25 bp, Homo sapien
ctctttctctcattggaatgtgggc

SEQ ID NO: 3167949 - DNA, 25 bp, Homo sapien
gctctttctctcattggaatgtggg

SEQ ID NO: 3167950 - DNA, 25 bp, Homo sapien
aggtgtgagatgtctcttcagggag

SEQ ID NO: 3167951 - DNA, 25 bp, Homo sapien
ttggggaggtgtgagatgtctcttc

SEQ ID NO: 3167952 - DNA, 25 bp, Homo sapien
gcctgagcctgagggcatttgaggc

SEQ ID NO: 3167953 - DNA, 25 bp, Homo sapien
agcctgagggcatttgaggctgtgg

SEQ ID NO: 3167954 - DNA, 25 bp, Homo sapien
ggatgagaagatggtttgttactgt

SEQ ID NO: 3167955 - DNA, 25 bp, Homo sapien
atgagaagatggtttgttactgtgg

SEQ ID NO: 3167956 - DNA, 25 bp, Homo sapien
ggtctgtgctgttgaaagaagccga

SEQ ID NO: 3167957 - DNA, 25 bp, Homo sapien
tcttctgccttggtgttgactgcac

SEQ ID NO: 3167958 - DNA, 25 bp, Homo sapien
ccagaggttggcattgtggtcttcc

SEQ ID NO: 3167959 - DNA, 25 bp, Homo sapien
gggcaggcggctcttcgggacttgg

SEQ ID NO: 3167960 - DNA, 25 bp, Homo sapien
ccctgaagagccgaggcgctgcctg

SEQ ID NO: 3167961 - DNA, 25 bp, Homo sapien
ggccccctccggcccagactggatg

SEQ ID NO: 3167962 - DNA, 25 bp, Homo sapien
aagccctgaagagccgaggcgctgc

SEQ ID NO: 3167963 - DNA, 25 bp, Homo sapien
cagactggatgtgtgcgggtgcgag

SEQ ID NO: 3167964 - DNA, 25 bp, Homo sapien
agagccgcccacactcggtctctgg

SEQ ID NO: 3167965 - DNA, 25 bp, Homo sapien
ttgagacggtcctgtggggcctata

SEQ ID NO: 3167966 - DNA, 25 bp, Homo sapien
gggcctatagttatggccaaaacca

SEQ ID NO: 3167967 - DNA, 25 bp, Homo sapien
cgctgctcgaatttggagaccttct

SEQ ID NO: 3167968 - DNA, 25 bp, Homo sapien
cccgtttttgaagtgctgctccccg

SEQ ID NO: 3167969 - DNA, 25 bp, Homo sapien
ccccgttgcctaggggttcagctga

SEQ ID NO: 3167970 - DNA, 25 bp, Homo sapien
tgtctcctcgaagtcattcccagaa

SEQ ID NO: 3167971 - DNA, 25 bp, Homo sapien
tgactcagagaaacgaatgtgtgct

SEQ ID NO: 3167972 - DNA, 25 bp, Homo sapien
aagacacgggactgtgcgtccttga

SEQ ID NO: 3167973 - DNA, 25 bp, Homo sapien
tctcgacgtcgaaaggaggtggccc

SEQ ID NO: 3167974 - DNA, 25 bp, Homo sapien
ccttgatgctgttccggtaggcgcg

SEQ ID NO: 3167975 - DNA, 25 bp, Homo sapien
tctctggctcgctggagagctggaa

SEQ ID NO: 3167976 - DNA, 25 bp, Homo sapien
gccaggtcgccctcagcaggggtca

SEQ ID NO: 3167977 - DNA, 25 bp, Homo sapien
cacgggcctggccaggtcgccctca

SEQ ID NO: 3167978 - DNA, 25 bp, Homo sapien
tctccgggcggcagggggcacgggc

SEQ ID NO: 3167979 - DNA, 25 bp, Homo sapien
ctctccgggcggcagggggcacggg

SEQ ID NO: 3167980 - DNA, 25 bp, Homo sapien
gcgggagatgacctggacctcacat

SEQ ID NO: 3167981 - DNA, 25 bp, Homo sapien
gaaacgcatcccatttctctgcggg

SEQ ID NO: 3167982 - DNA, 25 bp, Homo sapien
ttgccatcgcgctcgaagagacggc

SEQ ID NO: 3167983 - DNA, 25 bp, Homo sapien
gcttgccggtcttgcgctggatgta

SEQ ID NO: 3167984 - DNA, 25 bp, Homo sapien
tatgcgtgtgatagagtgcagcaaa

SEQ ID NO: 3167985 - DNA, 25 bp, Homo sapien
gaatctttctttgtctgaactggtt

SEQ ID NO: 3167986 - DNA, 25 bp, Homo sapien
ggtaagagcaagtagcatttgttgc

SEQ ID NO: 3167987 - DNA, 25 bp, Homo sapien
aaaatcctgccctataagcatctga

SEQ ID NO: 3167988 - DNA, 25 bp, Homo sapien
ggaccagccaaataacatggatcct

SEQ ID NO: 3167989 - DNA, 25 bp, Homo sapien
gaccagccaaataacatggatcctt

SEQ ID NO: 3167990 - DNA, 25 bp, Homo sapien
accagccaaataacatggatccttc

SEQ ID NO: 3167991 - DNA, 25 bp, Homo sapien
tggatgagatcagccacacaggagg

SEQ ID NO: 3167992 - DNA, 25 bp, Homo sapien
cagatgtgatgctctgcacacagag

SEQ ID NO: 3167993 - DNA, 25 bp, Homo sapien
gaaatgcccgttcttccctagcact

SEQ ID NO: 3167994 - DNA, 25 bp, Homo sapien
gtgaagctgttcatgaaatgcccgt

SEQ ID NO: 3167995 - DNA, 25 bp, Homo sapien
aagtcctcaacctcaccttgaatac

SEQ ID NO: 3167996 - DNA, 25 bp, Homo sapien
gtcctcaacctcaccttgaatactt

SEQ ID NO: 3167997 - DNA, 25 bp, Homo sapien
caaagtcctcaacctcaccttgaat

SEQ ID NO: 3167998 - DNA, 25 bp, Homo sapien
aaagtcctcaacctcaccttgaata

SEQ ID NO: 3167999 - DNA, 25 bp, Homo sapien
catgtcctgaaattatcaatatcct

SEQ ID NO: 3168000 - DNA, 25 bp, Homo sapien
gcagctgcacctatgctaatgtcaa

SEQ ID NO: 3168001 - DNA, 25 bp, Homo sapien
ttcagcaagcactaggcatgcagct

SEQ ID NO: 3168002 - DNA, 25 bp, Homo sapien
gacagctgagaattacatgtcctga

SEQ ID NO: 3168003 - DNA, 25 bp, Homo sapien
ctctccatagagaagtgtagccact

SEQ ID NO: 3168004 - DNA, 25 bp, Homo sapien
ttcctggtggcttcccgctggggat

SEQ ID NO: 3168005 - DNA, 25 bp, Homo sapien
cgctggggatgctcttcacttctgt

SEQ ID NO: 3168006 - DNA, 25 bp, Homo sapien
catagagaagtgtagccactctgca

SEQ ID NO: 3168007 - DNA, 25 bp, Homo sapien
ctttcattcagacatggtttcttta

SEQ ID NO: 3168008 - DNA, 25 bp, Homo sapien
agtccctttcattcagacatggttt

SEQ ID NO: 3168009 - DNA, 25 bp, Homo sapien
cagtccctttcattcagacatggtt

SEQ ID NO: 3168010 - DNA, 25 bp, Homo sapien
tccctttcattcagacatggtttct

SEQ ID NO: 3168011 - DNA, 25 bp, Homo sapien
ctctctgatgcaacccctcccttcc

SEQ ID NO: 3168012 - DNA, 25 bp, Homo sapien
ctctctctctgatgcaacccctccc

SEQ ID NO: 3168013 - DNA, 25 bp, Homo sapien
tgaagaaaggggcaaacatgcagcc

SEQ ID NO: 3168014 - DNA, 25 bp, Homo sapien
aaaggggcaaacatgcagcccaatg

SEQ ID NO: 3168015 - DNA, 25 bp, Homo sapien
aagaaaggggcaaacatgcagccca

SEQ ID NO: 3168016 - DNA, 25 bp, Homo sapien
ggggcaaacatgcagcccaatgctc

SEQ ID NO: 3168017 - DNA, 25 bp, Homo sapien
gcacacagacaggagggttacagct

SEQ ID NO: 3168018 - DNA, 25 bp, Homo sapien
ccctgtctgaccgtcctgtgagcag

SEQ ID NO: 3168019 - DNA, 25 bp, Homo sapien
cagggttccaggacattcactagga

SEQ ID NO: 3168020 - DNA, 25 bp, Homo sapien
taggaacggaggaatcaccaatggc

SEQ ID NO: 3168021 - DNA, 25 bp, Homo sapien
ggcctctttctgaacaactgagtga

SEQ ID NO: 3168022 - DNA, 25 bp, Homo sapien
tctgggtcagaagtgctgcataaac

SEQ ID NO: 3168023 - DNA, 25 bp, Homo sapien
tcccgcaggacagactcagatattc

SEQ ID NO: 3168024 - DNA, 25 bp, Homo sapien
ctttgctcgagaaggaggtggccac

SEQ ID NO: 3168025 - DNA, 25 bp, Homo sapien
cagatattcggagggagatcctccc

SEQ ID NO: 3168026 - DNA, 25 bp, Homo sapien
ttggggtgcggatccctcacaaaca

SEQ ID NO: 3168027 - DNA, 25 bp, Homo sapien
gccttggggtgcggatccctcacaa

SEQ ID NO: 3168028 - DNA, 25 bp, Homo sapien
ccttggggtgcggatccctcacaaa

SEQ ID NO: 3168029 - DNA, 25 bp, Homo sapien
tggggtgcggatccctcacaaacac

SEQ ID NO: 3168030 - DNA, 25 bp, Homo sapien
gtggcccctcgggatcctcactgtc

SEQ ID NO: 3168031 - DNA, 25 bp, Homo sapien
ggagggaagtcatccatgctataca

SEQ ID NO: 3168032 - DNA, 25 bp, Homo sapien
cagctgcgcctcacatacagtgtgg

SEQ ID NO: 3168033 - DNA, 25 bp, Homo sapien
gaagtcatccatgctatacaccggg

SEQ ID NO: 3168034 - DNA, 25 bp, Homo sapien
gacactggtccaactacctcctgag

SEQ ID NO: 3168035 - DNA, 25 bp, Homo sapien
taagcctatcctgtccccagaagtg

SEQ ID NO: 3168036 - DNA, 25 bp, Homo sapien
ggttcagtatcaagagacccactta

SEQ ID NO: 3168037 - DNA, 25 bp, Homo sapien
tgaggcaaacagatcaacagtgtcc

SEQ ID NO: 3168038 - DNA, 25 bp, Homo sapien
tgtctgactacctaccacatgggct

SEQ ID NO: 3168039 - DNA, 25 bp, Homo sapien
tcagcctctgaacccttgatagaag

SEQ ID NO: 3168040 - DNA, 25 bp, Homo sapien
caagttgggcgtgaacgctcatgaa

SEQ ID NO: 3168041 - DNA, 25 bp, Homo sapien
caggcatgtgcctttcccttgcaat

SEQ ID NO: 3168042 - DNA, 25 bp, Homo sapien
cttggtggacaatttccttggccaa

SEQ ID NO: 3168043 - DNA, 25 bp, Homo sapien
aaatgtctgctagagatttgtcttg

SEQ ID NO: 3168044 - DNA, 25 bp, Homo sapien
caaaatgtctgctagagatttgtct

SEQ ID NO: 3168045 - DNA, 25 bp, Homo sapien
catcaggtccattgttgtcttcagc

SEQ ID NO: 3168046 - DNA, 25 bp, Homo sapien
tcttgccttcacatcctgaagagct

SEQ ID NO: 3168047 - DNA, 25 bp, Homo sapien
gcaagttcacatctcggggaaacaa

SEQ ID NO: 3168048 - DNA, 25 bp, Homo sapien
ctgacagttctctgtatggccttcc

SEQ ID NO: 3168049 - DNA, 25 bp, Homo sapien
cagttctctgtatggccttcctctt

SEQ ID NO: 3168050 - DNA, 25 bp, Homo sapien
cagaaccggcaagtacacctttgct

SEQ ID NO: 3168051 - DNA, 25 bp, Homo sapien
ctgatacagaaccggcaagtacacc

SEQ ID NO: 3168052 - DNA, 25 bp, Homo sapien
atacagaaccggcaagtacaccttt

SEQ ID NO: 3168053 - DNA, 25 bp, Homo sapien
accggcaagtacacctttgctgagc

SEQ ID NO: 3168054 - DNA, 25 bp, Homo sapien
ttcccctctcagtcttggcaagacg

SEQ ID NO: 3168055 - DNA, 25 bp, Homo sapien
ttggcaagacgttggccacgctcac

SEQ ID NO: 3168056 - DNA, 25 bp, Homo sapien
tctcagtcttggcaagacgttggcc

SEQ ID NO: 3168057 - DNA, 25 bp, Homo sapien
cagtcttggcaagacgttggccacg

SEQ ID NO: 3168058 - DNA, 25 bp, Homo sapien
acacgtgttacatggctggctcaag

SEQ ID NO: 3168059 - DNA, 25 bp, Homo sapien
tttggtccttcagccagtggtcaga

SEQ ID NO: 3168060 - DNA, 25 bp, Homo sapien
gattttcaggatttgcgccaacacc

SEQ ID NO: 3168061 - DNA, 25 bp, Homo sapien
ggtccccatagtacccagtggattg

SEQ ID NO: 3168062 - DNA, 25 bp, Homo sapien
taaccaacatgctcactgcttcctt

SEQ ID NO: 3168063 - DNA, 25 bp, Homo sapien
ttaaccaacatgctcactgcttcct

SEQ ID NO: 3168064 - DNA, 25 bp, Homo sapien
attttgttcagtagctcagccttgg

SEQ ID NO: 3168065 - DNA, 25 bp, Homo sapien
tttgttcagtagctcagccttggga

SEQ ID NO: 3168066 - DNA, 25 bp, Homo sapien
gattttgttcagtagctcagccttg

SEQ ID NO: 3168067 - DNA, 25 bp, Homo sapien
ttttgttcagtagctcagccttggg

SEQ ID NO: 3168068 - DNA, 25 bp, Homo sapien
agcccctctggtgctatagagaaag

SEQ ID NO: 3168069 - DNA, 25 bp, Homo sapien
cctctggtgctatagagaaagtgga

SEQ ID NO: 3168070 - DNA, 25 bp, Homo sapien
tccaggctcagcaagaagcaagcaa

SEQ ID NO: 3168071 - DNA, 25 bp, Homo sapien
cacacatgcctgagctgcatagaga

SEQ ID NO: 3168072 - DNA, 25 bp, Homo sapien
tcactgtgatatcagcgcatatgga

SEQ ID NO: 3168073 - DNA, 25 bp, Homo sapien
actgtgatatcagcgcatatggaga

SEQ ID NO: 3168074 - DNA, 25 bp, Homo sapien
gtgatatcagcgcatatggagaaaa

SEQ ID NO: 3168075 - DNA, 25 bp, Homo sapien
tatcagcgcatatggagaaaatggc

SEQ ID NO: 3168076 - DNA, 25 bp, Homo sapien
ggacattctcaacacgggctagacg

SEQ ID NO: 3168077 - DNA, 25 bp, Homo sapien
tcaccaaggccgctaaggacattct

SEQ ID NO: 3168078 - DNA, 25 bp, Homo sapien
gggcttgcagagctcgctgatcaga

SEQ ID NO: 3168079 - DNA, 25 bp, Homo sapien
tctcccagggcgttgttgagcttga

SEQ ID NO: 3168080 - DNA, 25 bp, Homo sapien
tcattttcacgaagtgctggtagtc

SEQ ID NO: 3168081 - DNA, 25 bp, Homo sapien
ctgaaaggtaattggccaagatgcc

SEQ ID NO: 3168082 - DNA, 25 bp, Homo sapien
tgaggagcgtggacttcattttcac

SEQ ID NO: 3168083 - DNA, 25 bp, Homo sapien
ggcatcctcatgctgaccagccagg

SEQ ID NO: 3168084 - DNA, 25 bp, Homo sapien
ggccccagccttgggaatgaaatct

SEQ ID NO: 3168085 - DNA, 25 bp, Homo sapien
tcgtgaggtttgggggcagagccag

SEQ ID NO: 3168086 - DNA, 25 bp, Homo sapien
ccttgggaatgaaatctgagggcag

SEQ ID NO: 3168087 - DNA, 25 bp, Homo sapien
cagccttgggaatgaaatctgaggg

SEQ ID NO: 3168088 - DNA, 25 bp, Homo sapien
taaagtggagaggttaatgttggga

SEQ ID NO: 3168089 - DNA, 25 bp, Homo sapien
gggaaaataccactgaaagtacagc

SEQ ID NO: 3168090 - DNA, 25 bp, Homo sapien
ataccactgaaagtacagcccccag

SEQ ID NO: 3168091 - DNA, 25 bp, Homo sapien
gaaaataccactgaaagtacagccc

SEQ ID NO: 3168092 - DNA, 25 bp, Homo sapien
gggtacgtgtccagcagcattcgag

SEQ ID NO: 3168093 - DNA, 25 bp, Homo sapien
ccatactcagtccagtggaagcgca

SEQ ID NO: 3168094 - DNA, 25 bp, Homo sapien
tggaagcgcagaatgcctgctcgtg

SEQ ID NO: 3168095 - DNA, 25 bp, Homo sapien
gagctctcagaagatcaatcaggaa

SEQ ID NO: 3168096 - DNA, 25 bp, Homo sapien
tccccaccagtgataatgacatgaa

SEQ ID NO: 3168097 - DNA, 25 bp, Homo sapien
gacatgaagcactaggaaatgatgc

SEQ ID NO: 3168098 - DNA, 25 bp, Homo sapien
ttttgttggattctggacgtcctcc

SEQ ID NO: 3168099 - DNA, 25 bp, Homo sapien
gaacagcatgggctccgtttgaatt

SEQ ID NO: 3168100 - DNA, 25 bp, Homo sapien
tcagtcttcagaggttaaggaggca

SEQ ID NO: 3168101 - DNA, 25 bp, Homo sapien
tcgtaagcccaaatcaacaaaggtg

SEQ ID NO: 3168102 - DNA, 25 bp, Homo sapien
gcctgggatgtactacctgctcaaa

SEQ ID NO: 3168103 - DNA, 25 bp, Homo sapien
agctgtaaacatagcctggctgcca

SEQ ID NO: 3168104 - DNA, 25 bp, Homo sapien
tatgcatcccaaagagttaaggcag

SEQ ID NO: 3168105 - DNA, 25 bp, Homo sapien
tattcctgtgtagaaaagccccttc

SEQ ID NO: 3168106 - DNA, 25 bp, Homo sapien
ggttaagtggccaccgcaagaaaca

SEQ ID NO: 3168107 - DNA, 25 bp, Homo sapien
tcaaaggacctcagttaagcccaca

SEQ ID NO: 3168108 - DNA, 25 bp, Homo sapien
gatgcagatcgtatcctgaccacac

SEQ ID NO: 3168109 - DNA, 25 bp, Homo sapien
tattgtgatcataacagtaggaact

SEQ ID NO: 3168110 - DNA, 25 bp, Homo sapien
aatgcagtttccagcagacttggtt

SEQ ID NO: 3168111 - DNA, 25 bp, Homo sapien
tacagatgattggtagtggctctca

SEQ ID NO: 3168112 - DNA, 25 bp, Homo sapien
aacttgagccctgaaagattcctgc

SEQ ID NO: 3168113 - DNA, 25 bp, Homo sapien
ggccttctgccaacactggctcctc

SEQ ID NO: 3168114 - DNA, 25 bp, Homo sapien
agtgcccggaaggccttctgccaac

SEQ ID NO: 3168115 - DNA, 25 bp, Homo sapien
gccctgaaagattcctgctgcatca

SEQ ID NO: 3168116 - DNA, 25 bp, Homo sapien
tacagtcagcacgatgttaagctct

SEQ ID NO: 3168117 - DNA, 25 bp, Homo sapien
gaacaatgtgtctgtgacggctatc

SEQ ID NO: 3168118 - DNA, 25 bp, Homo sapien
caatcaagtgtctgtgtaatgggca

SEQ ID NO: 3168119 - DNA, 25 bp, Homo sapien
ggctcagctctggaataacccttca

SEQ ID NO: 3168120 - DNA, 25 bp, Homo sapien
tcttaaatcggcctgaatctaaatc

SEQ ID NO: 3168121 - DNA, 25 bp, Homo sapien
cttagacatgctcttaaatcggcct

SEQ ID NO: 3168122 - DNA, 25 bp, Homo sapien
catgctcttaaatcggcctgaatct

SEQ ID NO: 3168123 - DNA, 25 bp, Homo sapien
taaatcggcctgaatctaaatctat

SEQ ID NO: 3168124 - DNA, 25 bp, Homo sapien
ccgcttgatttgtcagtgccgccaa

SEQ ID NO: 3168125 - DNA, 25 bp, Homo sapien
ttgatttgtcagtgccgccaacagc

SEQ ID NO: 3168126 - DNA, 25 bp, Homo sapien
aaaggtagggatcagccgctggtct

SEQ ID NO: 3168127 - DNA, 25 bp, Homo sapien
tcagcaaggacagtcggtagggcct

SEQ ID NO: 3168128 - DNA, 25 bp, Homo sapien
cagaggtcggagaccttgctaagct

SEQ ID NO: 3168129 - DNA, 25 bp, Homo sapien
tgcttttaggcgcagcagcaaggag

SEQ ID NO: 3168130 - DNA, 25 bp, Homo sapien
cctgggattgcttttaggcgcagca

SEQ ID NO: 3168131 - DNA, 25 bp, Homo sapien
tcacgtttcggaccctgagagtaag

SEQ ID NO: 3168132 - DNA, 25 bp, Homo sapien
gtagcggagctcgatccttccagag

SEQ ID NO: 3168133 - DNA, 25 bp, Homo sapien
gcccggcagacgctcatcattaaga

SEQ ID NO: 3168134 - DNA, 25 bp, Homo sapien
ggccagaaatgttgcgattccgaac

SEQ ID NO: 3168135 - DNA, 25 bp, Homo sapien
aatgtttccccttggcgctaatgcg

SEQ ID NO: 3168136 - DNA, 25 bp, Homo sapien
gcttgtgtggcaacaaacaaccaga

SEQ ID NO: 3168137 - DNA, 25 bp, Homo sapien
ccagaaacactctcgtgcacattca

SEQ ID NO: 3168138 - DNA, 25 bp, Homo sapien
ctctgaggcttgaggatatacccag

SEQ ID NO: 3168139 - DNA, 25 bp, Homo sapien
tcttcacacgttaggcaagttttcc

SEQ ID NO: 3168140 - DNA, 25 bp, Homo sapien
ctacttttggagacactgaattggc

SEQ ID NO: 3168141 - DNA, 25 bp, Homo sapien
tttggagacactgaattggccttac

SEQ ID NO: 3168142 - DNA, 25 bp, Homo sapien
cctacagctacaatcttcagacact

SEQ ID NO: 3168143 - DNA, 25 bp, Homo sapien
caatcttcagacactacttttggag

SEQ ID NO: 3168144 - DNA, 25 bp, Homo sapien
ggtatgacctttgcttaactcctca

SEQ ID NO: 3168145 - DNA, 25 bp, Homo sapien
ctgcctgctcatctcttgggtcact

SEQ ID NO: 3168146 - DNA, 25 bp, Homo sapien
tctcttgggtcactggtatgacctt

SEQ ID NO: 3168147 - DNA, 25 bp, Homo sapien
ggtcactggtatgacctttgcttaa

SEQ ID NO: 3168148 - DNA, 25 bp, Homo sapien
gctgcagagtcgaggtgcataacca

SEQ ID NO: 3168149 - DNA, 25 bp, Homo sapien
aaggctgcagagtcgaggtgcataa

SEQ ID NO: 3168150 - DNA, 25 bp, Homo sapien
ggctgcagagtcgaggtgcataacc

SEQ ID NO: 3168151 - DNA, 25 bp, Homo sapien
aggctgcagagtcgaggtgcataac

SEQ ID NO: 3168152 - DNA, 25 bp, Homo sapien
cagtaggcgagcccaaggtccccgg

SEQ ID NO: 3168153 - DNA, 25 bp, Homo sapien
catgctgcttagtgcagggcaggca

SEQ ID NO: 3168154 - DNA, 25 bp, Homo sapien
cctatgtaccttgccgttcccgttg

SEQ ID NO: 3168155 - DNA, 25 bp, Homo sapien
ttggcaccaggctcatgctgcttag

SEQ ID NO: 3168156 - DNA, 25 bp, Homo sapien
gctgggatgaattagcagagctgcc

SEQ ID NO: 3168157 - DNA, 25 bp, Homo sapien
agctgggatgaattagcagagctgc

SEQ ID NO: 3168158 - DNA, 25 bp, Homo sapien
ggagctgggatgaattagcagagct

SEQ ID NO: 3168159 - DNA, 25 bp, Homo sapien
tgggatgaattagcagagctgcctg

SEQ ID NO: 3168160 - DNA, 25 bp, Homo sapien
cagtactctgtacatcttgggaact

SEQ ID NO: 3168161 - DNA, 25 bp, Homo sapien
ccactgtgctctgtattgagtagcc

SEQ ID NO: 3168162 - DNA, 25 bp, Homo sapien
caattcaatttagcacacatcgcca

SEQ ID NO: 3168163 - DNA, 25 bp, Homo sapien
ggacacgtcctctgaagcaaacttt

SEQ ID NO: 3168164 - DNA, 25 bp, Homo sapien
agctgagcgtggatccaggaagagg

SEQ ID NO: 3168165 - DNA, 25 bp, Homo sapien
aggagagctgagcgtggatccagga

SEQ ID NO: 3168166 - DNA, 25 bp, Homo sapien
gagagctgagcgtggatccaggaag

SEQ ID NO: 3168167 - DNA, 25 bp, Homo sapien
agagctgagcgtggatccaggaaga

SEQ ID NO: 3168168 - DNA, 25 bp, Homo sapien
gtaggcatgcatttcaaatcccttg

SEQ ID NO: 3168169 - DNA, 25 bp, Homo sapien
aggcatgcatttcaaatcccttgta

SEQ ID NO: 3168170 - DNA, 25 bp, Homo sapien
taggcatgcatttcaaatcccttgt

SEQ ID NO: 3168171 - DNA, 25 bp, Homo sapien
gaagtaggcatgcatttcaaatccc

SEQ ID NO: 3168172 - DNA, 25 bp, Homo sapien
tctgcccagttacacgtttgttagc

SEQ ID NO: 3168173 - DNA, 25 bp, Homo sapien
tgttctctcataagccatcctgtgc

SEQ ID NO: 3168174 - DNA, 25 bp, Homo sapien
ttttggagccaacttctggagacag

SEQ ID NO: 3168175 - DNA, 25 bp, Homo sapien
gtgccctgaacttctttctgcccag

SEQ ID NO: 3168176 - DNA, 25 bp, Homo sapien
gcacctgctgttacatcactttttt

SEQ ID NO: 3168177 - DNA, 25 bp, Homo sapien
cacctgctgttacatcacttttttc

SEQ ID NO: 3168178 - DNA, 25 bp, Homo sapien
acctgctgttacatcacttttttct

SEQ ID NO: 3168179 - DNA, 25 bp, Homo sapien
tcactgtgcttactgagatcacctt

SEQ ID NO: 3168180 - DNA, 25 bp, Homo sapien
tctcaactgttatggctgcttcaag

SEQ ID NO: 3168181 - DNA, 25 bp, Homo sapien
gcctctgctgagctaaggaggaata

SEQ ID NO: 3168182 - DNA, 25 bp, Homo sapien
ccagggaactgccagatttgtcaaa

SEQ ID NO: 3168183 - DNA, 25 bp, Homo sapien
aggatgtgtgttttccagtgatctt

SEQ ID NO: 3168184 - DNA, 25 bp, Homo sapien
tgaggatgtgtgttttccagtgatc

SEQ ID NO: 3168185 - DNA, 25 bp, Homo sapien
gaggatgtgtgttttccagtgatct

SEQ ID NO: 3168186 - DNA, 25 bp, Homo sapien
cttgaggatgtgtgttttccagtga

SEQ ID NO: 3168187 - DNA, 25 bp, Homo sapien
cacatggctcttggtagaggcctca

SEQ ID NO: 3168188 - DNA, 25 bp, Homo sapien
tctgaagggtggttctcggatggct

SEQ ID NO: 3168189 - DNA, 25 bp, Homo sapien
tccccatctagagggctgactgaat

SEQ ID NO: 3168190 - DNA, 25 bp, Homo sapien
caagacgtcagtcatggctgtagtc

SEQ ID NO: 3168191 - DNA, 25 bp, Homo sapien
cttggatctaggtgttttcctgcta

SEQ ID NO: 3168192 - DNA, 25 bp, Homo sapien
gtctcttggatctaggtgttttcct

SEQ ID NO: 3168193 - DNA, 25 bp, Homo sapien
ctcttggatctaggtgttttcctgc

SEQ ID NO: 3168194 - DNA, 25 bp, Homo sapien
tggatctaggtgttttcctgctaaa

SEQ ID NO: 3168195 - DNA, 25 bp, Homo sapien
ctctgctgatgaggagacccttact

SEQ ID NO: 3168196 - DNA, 25 bp, Homo sapien
tactgatcattataggctcctcgag

SEQ ID NO: 3168197 - DNA, 25 bp, Homo sapien
gaatgaagttcaccaagtaccttct

SEQ ID NO: 3168198 - DNA, 25 bp, Homo sapien
gacagcttcaccagggtgaatgaag

SEQ ID NO: 3168199 - DNA, 25 bp, Homo sapien
gccctgttcctttgtattatgcctg

SEQ ID NO: 3168200 - DNA, 25 bp, Homo sapien
cctgttcctttgtattatgcctgaa

SEQ ID NO: 3168201 - DNA, 25 bp, Homo sapien
ttatgcctgaaatggggcctgtgaa

SEQ ID NO: 3168202 - DNA, 25 bp, Homo sapien
tcctttgtattatgcctgaaatggg

SEQ ID NO: 3168203 - DNA, 25 bp, Homo sapien
tgtctggagcatgcaataggacctc

SEQ ID NO: 3168204 - DNA, 25 bp, Homo sapien
tggaagagggaacactgatcggaat

SEQ ID NO: 3168205 - DNA, 25 bp, Homo sapien
aatttgtcccctcacgctgcagtgt

SEQ ID NO: 3168206 - DNA, 25 bp, Homo sapien
tccttgaggagagcaacgtcatcag

SEQ ID NO: 3168207 - DNA, 25 bp, Homo sapien
ttcaaagtgtgatcacagcactgag

SEQ ID NO: 3168208 - DNA, 25 bp, Homo sapien
ttctgcatctaactcagcgtcctca

SEQ ID NO: 3168209 - DNA, 25 bp, Homo sapien
ctttctgcatctaactcagcgtcct

SEQ ID NO: 3168210 - DNA, 25 bp, Homo sapien
ggacttcaaagtgtgatcacagcac

SEQ ID NO: 3168211 - DNA, 25 bp, Homo sapien
tccaaatgtgtgaaagcgcattgaa

SEQ ID NO: 3168212 - DNA, 25 bp, Homo sapien
ttcttccaaatgtgtgaaagcgcat

SEQ ID NO: 3168213 - DNA, 25 bp, Homo sapien
caaatgtgtgaaagcgcattgaaat

SEQ ID NO: 3168214 - DNA, 25 bp, Homo sapien
cttccaaatgtgtgaaagcgcattg

SEQ ID NO: 3168215 - DNA, 25 bp, Homo sapien
gctgacctttacaatgtccttgcac

SEQ ID NO: 3168216 - DNA, 25 bp, Homo sapien
cttgcacagtctgaacatcatcctt

SEQ ID NO: 3168217 - DNA, 25 bp, Homo sapien
ccttgagtacgtggccaatttgctg

SEQ ID NO: 3168218 - DNA, 25 bp, Homo sapien
tcctgtaaaccttgagtacgtggcc

SEQ ID NO: 3168219 - DNA, 25 bp, Homo sapien
taccaggactatctaagccgctaaa

SEQ ID NO: 3168220 - DNA, 25 bp, Homo sapien
cagtaagggttaagagaatgcatcc

SEQ ID NO: 3168221 - DNA, 25 bp, Homo sapien
tggaaactccctgtgtaacaaacag

SEQ ID NO: 3168222 - DNA, 25 bp, Homo sapien
ggagagcacagttcgatttaagaga

SEQ ID NO: 3168223 - DNA, 25 bp, Homo sapien
aagggcggcggatcgaagggcagtc

SEQ ID NO: 3168224 - DNA, 25 bp, Homo sapien
ttgcaatggactcccgggcagcgac

SEQ ID NO: 3168225 - DNA, 25 bp, Homo sapien
aacctggctgtactgccgggagagc

SEQ ID NO: 3168226 - DNA, 25 bp, Homo sapien
aggagaagccggcacgggctctgcc

SEQ ID NO: 3168227 - DNA, 25 bp, Homo sapien
cctgcaatattctcaatcttggtaa

SEQ ID NO: 3168228 - DNA, 25 bp, Homo sapien
tagtttggatatctgtacccaccca

SEQ ID NO: 3168229 - DNA, 25 bp, Homo sapien
tgagctccagacttatatgtccaat

SEQ ID NO: 3168230 - DNA, 25 bp, Homo sapien
taatcccatagctttaaaataccac

SEQ ID NO: 3168231 - DNA, 25 bp, Homo sapien
tcttggggtataaggttactcacac

SEQ ID NO: 3168232 - DNA, 25 bp, Homo sapien
ctcacactaatgtctgctggagcca

SEQ ID NO: 3168233 - DNA, 25 bp, Homo sapien
gggtataaggttactcacactaatg

SEQ ID NO: 3168234 - DNA, 25 bp, Homo sapien
taaggttactcacactaatgtctgc

SEQ ID NO: 3168235 - DNA, 25 bp, Homo sapien
tctagagagcctggatgtactgcgg

SEQ ID NO: 3168236 - DNA, 25 bp, Homo sapien
ggacagagacaacacaacagactat

SEQ ID NO: 3168237 - DNA, 25 bp, Homo sapien
ttattattataggaggaacacgtgc

SEQ ID NO: 3168238 - DNA, 25 bp, Homo sapien
tcccttgatttcgtgacagctgagc

SEQ ID NO: 3168239 - DNA, 25 bp, Homo sapien
agttgagtatccctacataaaatgc

SEQ ID NO: 3168240 - DNA, 25 bp, Homo sapien
caatcacaaatgaccatatagttta

SEQ ID NO: 3168241 - DNA, 25 bp, Homo sapien
gggggtagggaggaatggtgaatga

SEQ ID NO: 3168242 - DNA, 25 bp, Homo sapien
ggtagggaggaatggtgaatgactg

SEQ ID NO: 3168243 - DNA, 25 bp, Homo sapien
gctgggcccacaggtgtaagacaac

SEQ ID NO: 3168244 - DNA, 25 bp, Homo sapien
ccttggctggactgccgtggtatga

SEQ ID NO: 3168245 - DNA, 25 bp, Homo sapien
tgagatgtcattcctggcccatacc

SEQ ID NO: 3168246 - DNA, 25 bp, Homo sapien
ggcaggcaatcatacatcaaacgag

SEQ ID NO: 3168247 - DNA, 25 bp, Homo sapien
tattatcaataacaggcatatgtgc

SEQ ID NO: 3168248 - DNA, 25 bp, Homo sapien
aactggcagcacaggtttctttttt

SEQ ID NO: 3168249 - DNA, 25 bp, Homo sapien
tagtctaggcctacacatggtgcag

SEQ ID NO: 3168250 - DNA, 25 bp, Homo sapien
ttacctcctatgataaccatgcctc

SEQ ID NO: 3168251 - DNA, 25 bp, Homo sapien
tccctggttactgaatattagattg

SEQ ID NO: 3168252 - DNA, 25 bp, Homo sapien
tattccctggttactgaatattaga

SEQ ID NO: 3168253 - DNA, 25 bp, Homo sapien
tggctgcaaaattgtccatcatatg

SEQ ID NO: 3168254 - DNA, 25 bp, Homo sapien
caaaattgtccatcatatgagggca

SEQ ID NO: 3168255 - DNA, 25 bp, Homo sapien
ggtcagtttcccctggctctggcat

SEQ ID NO: 3168256 - DNA, 25 bp, Homo sapien
agccctggagctgggtcagtttccc

SEQ ID NO: 3168257 - DNA, 25 bp, Homo sapien
actctgtttggcagccagccctgga

SEQ ID NO: 3168258 - DNA, 25 bp, Homo sapien
tggcttgctggccactctgtttggc

SEQ ID NO: 3168259 - DNA, 25 bp, Homo sapien
tgcctccctcaaccaaaggaagcag

SEQ ID NO: 3168260 - DNA, 25 bp, Homo sapien
gacgtgttctgttagccagatccac

SEQ ID NO: 3168261 - DNA, 25 bp, Homo sapien
gaagcaacagcgatggaacaaagag

SEQ ID NO: 3168262 - DNA, 25 bp, Homo sapien
cctttggagccttaactcaagagac

SEQ ID NO: 3168263 - DNA, 25 bp, Homo sapien
tgggcggactcagacgtgcagagca

SEQ ID NO: 3168264 - DNA, 25 bp, Homo sapien
caacctcttcaatttctgccctcta

SEQ ID NO: 3168265 - DNA, 25 bp, Homo sapien
atttattcagtctgtgggcggactc

SEQ ID NO: 3168266 - DNA, 25 bp, Homo sapien
gccctctagactccaaatcttttga

SEQ ID NO: 3168267 - DNA, 25 bp, Homo sapien
acagctgtggaaccgccagagaaaa

SEQ ID NO: 3168268 - DNA, 25 bp, Homo sapien
gggcttggtcaccccgtctgaattc

SEQ ID NO: 3168269 - DNA, 25 bp, Homo sapien
gccttgggctaagggtcagtcgtcc

SEQ ID NO: 3168270 - DNA, 25 bp, Homo sapien
ctggatttcgctggtaggtgggcta

SEQ ID NO: 3168271 - DNA, 25 bp, Homo sapien
ccccgctgaagaattaaggcagcca

SEQ ID NO: 3168272 - DNA, 25 bp, Homo sapien
aaggcagccattggttgctctaggg

SEQ ID NO: 3168273 - DNA, 25 bp, Homo sapien
ggcgcgtgggactgagaactcctcc

SEQ ID NO: 3168274 - DNA, 25 bp, Homo sapien
gacttcattcgatcgctggcgacag

SEQ ID NO: 3168275 - DNA, 25 bp, Homo sapien
aagctgtcactgtggcgcgcgggca

SEQ ID NO: 3168276 - DNA, 25 bp, Homo sapien
tggagaggaagagccgtagtagtcg

SEQ ID NO: 3168277 - DNA, 25 bp, Homo sapien
gtcgcccaccgcttcccttgagaag

SEQ ID NO: 3168278 - DNA, 25 bp, Homo sapien
gtagtcgctgctgccttcggccgac

SEQ ID NO: 3168279 - DNA, 25 bp, Homo sapien
tcctcgtctccgcactggaagaatt

SEQ ID NO: 3168280 - DNA, 25 bp, Homo sapien
tgcggaccaccaggcggagcggtgg

SEQ ID NO: 3168281 - DNA, 25 bp, Homo sapien
ccacccggagaagccggcctggaag

SEQ ID NO: 3168282 - DNA, 25 bp, Homo sapien
tgggcgaccgaagtgcggctgggct

SEQ ID NO: 3168283 - DNA, 25 bp, Homo sapien
agccagcggcatctgctccccccac

SEQ ID NO: 3168284 - DNA, 25 bp, Homo sapien
agcggcatctgctccccccacgccg

SEQ ID NO: 3168285 - DNA, 25 bp, Homo sapien
ctgctcgccggcgtcccgctggcag

SEQ ID NO: 3168286 - DNA, 25 bp, Homo sapien
gctcgccggcgtcccgctggcagcc

SEQ ID NO: 3168287 - DNA, 25 bp, Homo sapien
gctccggctcgcctccctcgcgcct

SEQ ID NO: 3168288 - DNA, 25 bp, Homo sapien
ctcgcgcctccctcgcggctgcgct

SEQ ID NO: 3168289 - DNA, 25 bp, Homo sapien
cgggctccggctcgcctccctcgcg

SEQ ID NO: 3168290 - DNA, 25 bp, Homo sapien
cggctcgcctccctcgcgcctccct

SEQ ID NO: 3168291 - DNA, 25 bp, Homo sapien
ctgcgcccgggtgctttacgccgac

SEQ ID NO: 3168292 - DNA, 25 bp, Homo sapien
gacggtctccccacggccacggcca

SEQ ID NO: 3168293 - DNA, 25 bp, Homo sapien
acggtctccccacggccacggccat

SEQ ID NO: 3168294 - DNA, 25 bp, Homo sapien
aacgtctttgaaagcaccgcgggca

SEQ ID NO: 3168295 - DNA, 25 bp, Homo sapien
cgatatgaccgctgtgttttctgac

SEQ ID NO: 3168296 - DNA, 25 bp, Homo sapien
tcgaattagaatccgcaaagggacc

SEQ ID NO: 3168297 - DNA, 25 bp, Homo sapien
ggcagccgaaccaccaaatcgaatt

SEQ ID NO: 3168298 - DNA, 25 bp, Homo sapien
ttccagtgacaacagagtgcgcaga

SEQ ID NO: 3168299 - DNA, 25 bp, Homo sapien
ccgacttggtgttggatgtgattac

SEQ ID NO: 3168300 - DNA, 25 bp, Homo sapien
tgattacggccacacaactaaacct

SEQ ID NO: 3168301 - DNA, 25 bp, Homo sapien
taagctcacatatggttggccgact

SEQ ID NO: 3168302 - DNA, 25 bp, Homo sapien
gaatttcattttagatcgcccagca

SEQ ID NO: 3168303 - DNA, 25 bp, Homo sapien
cattggcgtcgatcctaaaaagagg

SEQ ID NO: 3168304 - DNA, 25 bp, Homo sapien
caggtcaagcctggaacaatgtgaa

SEQ ID NO: 3168305 - DNA, 25 bp, Homo sapien
tcctacccagtcacagttcagcagg

SEQ ID NO: 3168306 - DNA, 25 bp, Homo sapien
gaaaaactgaagactatggcaccat

SEQ ID NO: 3168307 - DNA, 25 bp, Homo sapien
ggcagactcaaccagcaaatgtgtt

SEQ ID NO: 3168308 - DNA, 25 bp, Homo sapien
tggaaatcagattgcaaattggcag

SEQ ID NO: 3168309 - DNA, 25 bp, Homo sapien
tttaactgaagaatgtgggttgcct

SEQ ID NO: 3168310 - DNA, 25 bp, Homo sapien
ggatccaccggccatctttagttaa

SEQ ID NO: 3168311 - DNA, 25 bp, Homo sapien
gggcagctgtgacaaccatttggca

SEQ ID NO: 3168312 - DNA, 25 bp, Homo sapien
taagaagacaatgcagagctgtatg

SEQ ID NO: 3168313 - DNA, 25 bp, Homo sapien
gaagctcataaagtcttggcatctt

SEQ ID NO: 3168314 - DNA, 25 bp, Homo sapien
cactgggtgaatgaactgtgtttct

SEQ ID NO: 3168315 - DNA, 25 bp, Homo sapien
tgccttaggttccaagctgtttgct

SEQ ID NO: 3168316 - DNA, 25 bp, Homo sapien
aaatcacagagcattaattgcctgc

SEQ ID NO: 3168317 - DNA, 25 bp, Homo sapien
tgcctgccccaactaaaaaggctgg

SEQ ID NO: 3168318 - DNA, 25 bp, Homo sapien
aaaatgtgtaacatcacatttgggc

SEQ ID NO: 3168319 - DNA, 25 bp, Homo sapien
taaaaatgtgtaacatcacatttgg

SEQ ID NO: 3168320 - DNA, 25 bp, Homo sapien
cggtttcttctcatctactttttat

SEQ ID NO: 3168321 - DNA, 25 bp, Homo sapien
aatgtgtaacatcacatttgggcac

SEQ ID NO: 3168322 - DNA, 25 bp, Homo sapien
tatgaacaccaccaatatgagaggg

SEQ ID NO: 3168323 - DNA, 25 bp, Homo sapien
tatgggtcttaagcaggtcactcac

SEQ ID NO: 3168324 - DNA, 25 bp, Homo sapien
gcattaaagtgtacatcctcgcaga

SEQ ID NO: 3168325 - DNA, 25 bp, Homo sapien
tccagggtcctaaacacaagatcgg

SEQ ID NO: 3168326 - DNA, 25 bp, Homo sapien
tccttataacttgtgaagtagatac

SEQ ID NO: 3168327 - DNA, 25 bp, Homo sapien
cttataacttgtgaagtagatacta

SEQ ID NO: 3168328 - DNA, 25 bp, Homo sapien
gaaccagcattcaaaccagttttgc

SEQ ID NO: 3168329 - DNA, 25 bp, Homo sapien
taaagttcaattcatggcagaacca

SEQ ID NO: 3168330 - DNA, 25 bp, Homo sapien
cctctttctccctggtttaagcaat

SEQ ID NO: 3168331 - DNA, 25 bp, Homo sapien
ctgcaacctctttctccctggttta

SEQ ID NO: 3168332 - DNA, 25 bp, Homo sapien
tccagcctcagcatcccaactagct

SEQ ID NO: 3168333 - DNA, 25 bp, Homo sapien
tctttctccctggtttaagcaattc

SEQ ID NO: 3168334 - DNA, 25 bp, Homo sapien
aactttgggcatggtgtagctggac

SEQ ID NO: 3168335 - DNA, 25 bp, Homo sapien
gatgtgggcagactcaattccttgc

SEQ ID NO: 3168336 - DNA, 25 bp, Homo sapien
tagcagtcagtttcataggtcacaa

SEQ ID NO: 3168337 - DNA, 25 bp, Homo sapien
aaaagtcactgacggttccaagcca

SEQ ID NO: 3168338 - DNA, 25 bp, Homo sapien
aacactaatgagcaaagcaagcggg

SEQ ID NO: 3168339 - DNA, 25 bp, Homo sapien
tacagattctgcagtactccaagga

SEQ ID NO: 3168340 - DNA, 25 bp, Homo sapien
cacgtgtgcattccagggacgctta

SEQ ID NO: 3168341 - DNA, 25 bp, Homo sapien
ggcacgacccaattagaaacagatg

SEQ ID NO: 3168342 - DNA, 25 bp, Homo sapien
ctaatgcctgtaacagccgaacatt

SEQ ID NO: 3168343 - DNA, 25 bp, Homo sapien
acagccgaacattacaaagtgctga

SEQ ID NO: 3168344 - DNA, 25 bp, Homo sapien
taacagccgaacattacaaagtgct

SEQ ID NO: 3168345 - DNA, 25 bp, Homo sapien
cctgtaacagccgaacattacaaag

SEQ ID NO: 3168346 - DNA, 25 bp, Homo sapien
aacatctcggtggaactcagcctat

SEQ ID NO: 3168347 - DNA, 25 bp, Homo sapien
caggtatccgaagtgaacagagccc

SEQ ID NO: 3168348 - DNA, 25 bp, Homo sapien
tacttcaaggtataagagagtcccc

SEQ ID NO: 3168349 - DNA, 25 bp, Homo sapien
ttcctactgtacagcatggcccagg

SEQ ID NO: 3168350 - DNA, 25 bp, Homo sapien
ctgctggagttttgcagagtttacc

SEQ ID NO: 3168351 - DNA, 25 bp, Homo sapien
gttttgcagagtttaccgatgtaga

SEQ ID NO: 3168352 - DNA, 25 bp, Homo sapien
tgtagctcctagcacaggctctgta

SEQ ID NO: 3168353 - DNA, 25 bp, Homo sapien
cattagttttacaggtttcttgagt

SEQ ID NO: 3168354 - DNA, 25 bp, Homo sapien
gcaatttcaggggagaaagatttga

SEQ ID NO: 3168355 - DNA, 25 bp, Homo sapien
gaaagatttgagtgtccatgaacca

SEQ ID NO: 3168356 - DNA, 25 bp, Homo sapien
ctgcaatttcaggggagaaagattt

SEQ ID NO: 3168357 - DNA, 25 bp, Homo sapien
tgcaatttcaggggagaaagatttg

SEQ ID NO: 3168358 - DNA, 25 bp, Homo sapien
cagacaaagacaagtttcgaagctc

SEQ ID NO: 3168359 - DNA, 25 bp, Homo sapien
gaaacagaatccttgagaagtagac

SEQ ID NO: 3168360 - DNA, 25 bp, Homo sapien
tcaaatcccacatggccagacaaag

SEQ ID NO: 3168361 - DNA, 25 bp, Homo sapien
gaagtagacttgttgaccagctggt

SEQ ID NO: 3168362 - DNA, 25 bp, Homo sapien
ctgttttcaattcctgttctctcat

SEQ ID NO: 3168363 - DNA, 25 bp, Homo sapien
cttctggcttttaaccgaacacctg

SEQ ID NO: 3168364 - DNA, 25 bp, Homo sapien
tgtcaacaatggttaacttcagccg

SEQ ID NO: 3168365 - DNA, 25 bp, Homo sapien
tggtctccaaatcccacggtgtcaa

SEQ ID NO: 3168366 - DNA, 25 bp, Homo sapien
ttgaacaaagtgtccattaacgtgg

SEQ ID NO: 3168367 - DNA, 25 bp, Homo sapien
ttcatgtccccccaaaatcccaaga

SEQ ID NO: 3168368 - DNA, 25 bp, Homo sapien
catccattcatgtccccccaaaatc

SEQ ID NO: 3168369 - DNA, 25 bp, Homo sapien
tcatccattcatgtccccccaaaat

SEQ ID NO: 3168370 - DNA, 25 bp, Homo sapien
tgtccccccaaaatcccaagatgta

SEQ ID NO: 3168371 - DNA, 25 bp, Homo sapien
gccaagtggttttgtactcctcatc

SEQ ID NO: 3168372 - DNA, 25 bp, Homo sapien
atcatcatcctgtagatgagatgaa

SEQ ID NO: 3168373 - DNA, 25 bp, Homo sapien
agtggttttgtactcctcatcatca

SEQ ID NO: 3168374 - DNA, 25 bp, Homo sapien
catcatcctgtagatgagatgaatt

SEQ ID NO: 3168375 - DNA, 25 bp, Homo sapien
aatatattctactatcggcttatag

SEQ ID NO: 3168376 - DNA, 25 bp, Homo sapien
ggactttagtgaatgtccagtaggg

SEQ ID NO: 3168377 - DNA, 25 bp, Homo sapien
catggtagttgaagagagaacgttt

SEQ ID NO: 3168378 - DNA, 25 bp, Homo sapien
ccagctttttcatggtgaccagatc

SEQ ID NO: 3168379 - DNA, 25 bp, Homo sapien
tggatgataatcagaatggcagcaa

SEQ ID NO: 3168380 - DNA, 25 bp, Homo sapien
agagtggatgataatcagaatggca

SEQ ID NO: 3168381 - DNA, 25 bp, Homo sapien
gatctaaaaggagagtggatgataa

SEQ ID NO: 3168382 - DNA, 25 bp, Homo sapien
agaagatctaaaaggagagtggatg

SEQ ID NO: 3168383 - DNA, 25 bp, Homo sapien
ggctaatggcacagctcccagggag

SEQ ID NO: 3168384 - DNA, 25 bp, Homo sapien
aatgtctgtggagaatggggcactc

SEQ ID NO: 3168385 - DNA, 25 bp, Homo sapien
aatggggcactcttgagaacaggga

SEQ ID NO: 3168386 - DNA, 25 bp, Homo sapien
tgcccgtgatctctccactatcatg

SEQ ID NO: 3168387 - DNA, 25 bp, Homo sapien
gtcagcttttgcaattattggaatg

SEQ ID NO: 3168388 - DNA, 25 bp, Homo sapien
tctgccaccgtttcttcatcagtgg

SEQ ID NO: 3168389 - DNA, 25 bp, Homo sapien
gggaaactgatatatctggacccca

SEQ ID NO: 3168390 - DNA, 25 bp, Homo sapien
cagttcattcttggcaatggtgtca

SEQ ID NO: 3168391 - DNA, 25 bp, Homo sapien
gttcccatttgacttgaggacttac

SEQ ID NO: 3168392 - DNA, 25 bp, Homo sapien
ttgttcccatttgacttgaggactt

SEQ ID NO: 3168393 - DNA, 25 bp, Homo sapien
tgttcccatttgacttgaggactta

SEQ ID NO: 3168394 - DNA, 25 bp, Homo sapien
cactggcgatgggaactcactactt

SEQ ID NO: 3168395 - DNA, 25 bp, Homo sapien
gaaatccatggatgccgaggctgat

SEQ ID NO: 3168396 - DNA, 25 bp, Homo sapien
gacttgagcatcaaccggcaggatg

SEQ ID NO: 3168397 - DNA, 25 bp, Homo sapien
gaagggcaggatccaatcaccaaag

SEQ ID NO: 3168398 - DNA, 25 bp, Homo sapien
cggtgctgccaaccactgcaaatgg

SEQ ID NO: 3168399 - DNA, 25 bp, Homo sapien
ctcttcggtgctgccaaccactgca

SEQ ID NO: 3168400 - DNA, 25 bp, Homo sapien
cttcggtgctgccaaccactgcaaa

SEQ ID NO: 3168401 - DNA, 25 bp, Homo sapien
cacctcttcggtgctgccaaccact

SEQ ID NO: 3168402 - DNA, 25 bp, Homo sapien
tcttcaagcttacagcgtcggtaca

SEQ ID NO: 3168403 - DNA, 25 bp, Homo sapien
cgcggatcagcatctctcgaagttt

SEQ ID NO: 3168404 - DNA, 25 bp, Homo sapien
cgtcggtacaattcatagtggcggg

SEQ ID NO: 3168405 - DNA, 25 bp, Homo sapien
tcgaagtttcacaaaatcgcaatga

SEQ ID NO: 3168406 - DNA, 25 bp, Homo sapien
taaaagcatctagtggagggcaggc

SEQ ID NO: 3168407 - DNA, 25 bp, Homo sapien
tggtgattcacacagcacgattctc

SEQ ID NO: 3168408 - DNA, 25 bp, Homo sapien
tggagtggagcaatacacatgtgaa

SEQ ID NO: 3168409 - DNA, 25 bp, Homo sapien
gggcaggccagagtatgatcatctc

SEQ ID NO: 3168410 - DNA, 25 bp, Homo sapien
cattcctttttgcttcatatgtctc

SEQ ID NO: 3168411 - DNA, 25 bp, Homo sapien
caggaattcattcctttttgcttca

SEQ ID NO: 3168412 - DNA, 25 bp, Homo sapien
tcttctgcagttctcccaggaattc

SEQ ID NO: 3168413 - DNA, 25 bp, Homo sapien
tttcttctgcagttctcccaggaat

SEQ ID NO: 3168414 - DNA, 25 bp, Homo sapien
ctgcctccttaagttcagcttcttt

SEQ ID NO: 3168415 - DNA, 25 bp, Homo sapien
tctgcctccttaagttcagcttctt

SEQ ID NO: 3168416 - DNA, 25 bp, Homo sapien
ttggtgtgtccgctttagaaggtca

SEQ ID NO: 3168417 - DNA, 25 bp, Homo sapien
ttcttcttggtgtgtccgctttaga

SEQ ID NO: 3168418 - DNA, 25 bp, Homo sapien
ggtgtgtccgctttagaaggtcaaa

SEQ ID NO: 3168419 - DNA, 25 bp, Homo sapien
ttcttggtgtgtccgctttagaagg

SEQ ID NO: 3168420 - DNA, 25 bp, Homo sapien
ctccaggcctgattgcttggtcaat

SEQ ID NO: 3168421 - DNA, 25 bp, Homo sapien
ctagtgttggtgtggaagatgctac

SEQ ID NO: 3168422 - DNA, 25 bp, Homo sapien
tcttctttgagactcctagtgttgg

SEQ ID NO: 3168423 - DNA, 25 bp, Homo sapien
ttaggatgctctctatcaagagtca

SEQ ID NO: 3168424 - DNA, 25 bp, Homo sapien
gaattttgaggaaactagtggccac

SEQ ID NO: 3168425 - DNA, 25 bp, Homo sapien
gaatctgaccctttggcacatgaca

SEQ ID NO: 3168426 - DNA, 25 bp, Homo sapien
cgtacattagacaaaggagggtggc

SEQ ID NO: 3168427 - DNA, 25 bp, Homo sapien
tgtaaggcgaaagagcaacacttcc

SEQ ID NO: 3168428 - DNA, 25 bp, Homo sapien
catgcatagctacaaagggttttct

SEQ ID NO: 3168429 - DNA, 25 bp, Homo sapien
ctgtaatctgagtctctgcatggga

SEQ ID NO: 3168430 - DNA, 25 bp, Homo sapien
cattagtgttagatgctctcccgac

SEQ ID NO: 3168431 - DNA, 25 bp, Homo sapien
taacaaaggtacaatgcccaatggc

SEQ ID NO: 3168432 - DNA, 25 bp, Homo sapien
taaaggcacgtctagtatacacgaa

SEQ ID NO: 3168433 - DNA, 25 bp, Homo sapien
taacattgctggtcttttggaaaca

SEQ ID NO: 3168434 - DNA, 25 bp, Homo sapien
cttgaacctttatgcactgagtgcc

SEQ ID NO: 3168435 - DNA, 25 bp, Homo sapien
cattgtcaggtgcaaaacctggcga

SEQ ID NO: 3168436 - DNA, 25 bp, Homo sapien
ggcagtgccagggttagttctactt

SEQ ID NO: 3168437 - DNA, 25 bp, Homo sapien
tcatgccactacaggtcaaggagaa

SEQ ID NO: 3168438 - DNA, 25 bp, Homo sapien
caccactgtggtatagccgcaaaca

SEQ ID NO: 3168439 - DNA, 25 bp, Homo sapien
aagtgacttcgtggccagagatggc

SEQ ID NO: 3168440 - DNA, 25 bp, Homo sapien
taacaggcctgcttcgtgctgccat

SEQ ID NO: 3168441 - DNA, 25 bp, Homo sapien
tactttccggaaacagagtccagct

SEQ ID NO: 3168442 - DNA, 25 bp, Homo sapien
tgcaaaagcaggtgaatgcgggaac

SEQ ID NO: 3168443 - DNA, 25 bp, Homo sapien
tgcacagagcattcgcggttattcc

SEQ ID NO: 3168444 - DNA, 25 bp, Homo sapien
tgtgagaggatcaaggatgcaccag

SEQ ID NO: 3168445 - DNA, 25 bp, Homo sapien
taagcccactgggaacaaactgagg

SEQ ID NO: 3168446 - DNA, 25 bp, Homo sapien
cttacgggtcatgttgtggtccttc

SEQ ID NO: 3168447 - DNA, 25 bp, Homo sapien
caaggcctcgctcaaatttgtgcta

SEQ ID NO: 3168448 - DNA, 25 bp, Homo sapien
tctaatccctgatgaggcaagggcc

SEQ ID NO: 3168449 - DNA, 25 bp, Homo sapien
cacacaagcggtggttggaacaagc

SEQ ID NO: 3168450 - DNA, 25 bp, Homo sapien
gaatgttggtccagtagctcctaaa

SEQ ID NO: 3168451 - DNA, 25 bp, Homo sapien
ggtttgaatcaacatgccagctact

SEQ ID NO: 3168452 - DNA, 25 bp, Homo sapien
aaagcacatccaattagatttgagg

SEQ ID NO: 3168453 - DNA, 25 bp, Homo sapien
tcatttattccgtgcagagccaagg

SEQ ID NO: 3168454 - DNA, 25 bp, Homo sapien
atttgagggtatcatttattccgtg

SEQ ID NO: 3168455 - DNA, 25 bp, Homo sapien
tgcaaaggcgaaagcacatccaatt

SEQ ID NO: 3168456 - DNA, 25 bp, Homo sapien
ccagctagttatgtaggcccctcaa

SEQ ID NO: 3168457 - DNA, 25 bp, Homo sapien
gaagctgagacctgacaattccaga

SEQ ID NO: 3168458 - DNA, 25 bp, Homo sapien
gagctatccaatgatgcccatgagg

SEQ ID NO: 3168459 - DNA, 25 bp, Homo sapien
gacgtgggtcggtaacagctgaaaa

SEQ ID NO: 3168460 - DNA, 25 bp, Homo sapien
tgaagtacaggacaccacatggcac

SEQ ID NO: 3168461 - DNA, 25 bp, Homo sapien
tttgaagtctaccacacgaggcagg

SEQ ID NO: 3168462 - DNA, 25 bp, Homo sapien
cacatggcacgtatctttgagaaac

SEQ ID NO: 3168463 - DNA, 25 bp, Homo sapien
gaaactggtgtaacccagacggcag

SEQ ID NO: 3168464 - DNA, 25 bp, Homo sapien
gaacagcagtgtgtcagttaatggg

SEQ ID NO: 3168465 - DNA, 25 bp, Homo sapien
agctgtgaaagaacagcagtgtgtc

SEQ ID NO: 3168466 - DNA, 25 bp, Homo sapien
aaggagcttctctacaacaagctgt

SEQ ID NO: 3168467 - DNA, 25 bp, Homo sapien
aggagcttctctacaacaagctgtg

SEQ ID NO: 3168468 - DNA, 25 bp, Homo sapien
ccattaggagagagtagggcttgtc

SEQ ID NO: 3168469 - DNA, 25 bp, Homo sapien
caggttagggtacacgctgtcttca

SEQ ID NO: 3168470 - DNA, 25 bp, Homo sapien
tgaggtaactcttccccaacacgtg

SEQ ID NO: 3168471 - DNA, 25 bp, Homo sapien
caacacgtgtgaacagacagctcct

SEQ ID NO: 3168472 - DNA, 25 bp, Homo sapien
tgacttaaacttcactcaagtgagc

SEQ ID NO: 3168473 - DNA, 25 bp, Homo sapien
ttttgataccaaaagtaagctgaat

SEQ ID NO: 3168474 - DNA, 25 bp, Homo sapien
agaaaagtcatctacccaacaccgg

SEQ ID NO: 3168475 - DNA, 25 bp, Homo sapien
tctctctcaagaggcagatggtcag

SEQ ID NO: 3168476 - DNA, 25 bp, Homo sapien
tattaacttcctctactctgggagc

SEQ ID NO: 3168477 - DNA, 25 bp, Homo sapien
tctaagtaaagaaagcagcttgcca

SEQ ID NO: 3168478 - DNA, 25 bp, Homo sapien
gacagtagtctcacacaacaggaac

SEQ ID NO: 3168479 - DNA, 25 bp, Homo sapien
gattcaagaggcagggactgttgct

SEQ ID NO: 3168480 - DNA, 25 bp, Homo sapien
tacacgtgtgctgggctaatctcaa

SEQ ID NO: 3168481 - DNA, 25 bp, Homo sapien
ccagaggtgtacatgatcaggttcc

SEQ ID NO: 3168482 - DNA, 25 bp, Homo sapien
cataatctgggccaatagcaggcca

SEQ ID NO: 3168483 - DNA, 25 bp, Homo sapien
taactggactgaggctaacgtactg

SEQ ID NO: 3168484 - DNA, 25 bp, Homo sapien
cttgctggagattgacctgaaagac

SEQ ID NO: 3168485 - DNA, 25 bp, Homo sapien
gatggcatccttcgcaaaaactaga

SEQ ID NO: 3168486 - DNA, 25 bp, Homo sapien
ttcaagcactaggaactctgaagtg

SEQ ID NO: 3168487 - DNA, 25 bp, Homo sapien
ttcaccagccctgggtatgccagtt

SEQ ID NO: 3168488 - DNA, 25 bp, Homo sapien
gaaatcttttgtacctcacgtgatg

SEQ ID NO: 3168489 - DNA, 25 bp, Homo sapien
tatggaatgttattctgctccccgt

SEQ ID NO: 3168490 - DNA, 25 bp, Homo sapien
taggaaagggagatgagtagacacc

SEQ ID NO: 3168491 - DNA, 25 bp, Homo sapien
tgttataatagcctttgcctccccg

SEQ ID NO: 3168492 - DNA, 25 bp, Homo sapien
aaagcagtttgaatagccctaggcc

SEQ ID NO: 3168493 - DNA, 25 bp, Homo sapien
tttgttaggcaataggacactccag

SEQ ID NO: 3168494 - DNA, 25 bp, Homo sapien
gccaactttaggcaagcagccacga

SEQ ID NO: 3168495 - DNA, 25 bp, Homo sapien
tagtgcatggctaaatccccagtac

SEQ ID NO: 3168496 - DNA, 25 bp, Homo sapien
cagtctgaaaaaggtattgcagtca

SEQ ID NO: 3168497 - DNA, 25 bp, Homo sapien
aggacacttaggtttgttgaaagca

SEQ ID NO: 3168498 - DNA, 25 bp, Homo sapien
ggaattgtcccatattaatcagaga

SEQ ID NO: 3168499 - DNA, 25 bp, Homo sapien
taaaagtggcatgtaattaggacac

SEQ ID NO: 3168500 - DNA, 25 bp, Homo sapien
ccataatgtaacgtagcttgccccg

SEQ ID NO: 3168501 - DNA, 25 bp, Homo sapien
tgtaacgtagcttgccccgtcaaaa

SEQ ID NO: 3168502 - DNA, 25 bp, Homo sapien
tttttctgccataatgtaacgtagc

SEQ ID NO: 3168503 - DNA, 25 bp, Homo sapien
gcttgccccgtcaaaaattcaatta

SEQ ID NO: 3168504 - DNA, 25 bp, Homo sapien
gaaggaaatataccttaacaggctg

SEQ ID NO: 3168505 - DNA, 25 bp, Homo sapien
caacaagtgctacctttgagtgtaa

SEQ ID NO: 3168506 - DNA, 25 bp, Homo sapien
actactttgggaatgagaacatgca

SEQ ID NO: 3168507 - DNA, 25 bp, Homo sapien
aacaggctgatttggagtgagccag

SEQ ID NO: 3168508 - DNA, 25 bp, Homo sapien
tctatgatggaatcaaacggctcta

SEQ ID NO: 3168509 - DNA, 25 bp, Homo sapien
cagaagtgccagtcagaggtacagc

SEQ ID NO: 3168510 - DNA, 25 bp, Homo sapien
ccagtgggtgcaagcagacctctac

SEQ ID NO: 3168511 - DNA, 25 bp, Homo sapien
caccctggtgacctgtgacaaagga

SEQ ID NO: 3168512 - DNA, 25 bp, Homo sapien
ttgatccattgtcgggagcttgtgg

SEQ ID NO: 3168513 - DNA, 25 bp, Homo sapien
cccagttgatccattgtcgggagct

SEQ ID NO: 3168514 - DNA, 25 bp, Homo sapien
agctcccagttgatccattgtcggg

SEQ ID NO: 3168515 - DNA, 25 bp, Homo sapien
cagttgatccattgtcgggagcttg

SEQ ID NO: 3168516 - DNA, 25 bp, Homo sapien
cattagagtacttgtctggtgtcga

SEQ ID NO: 3168517 - DNA, 25 bp, Homo sapien
ggtggctgtggtcagactattccag

SEQ ID NO: 3168518 - DNA, 25 bp, Homo sapien
tccactggatctcaagaaggaacaa

SEQ ID NO: 3168519 - DNA, 25 bp, Homo sapien
gatccatctggacctaccatttatg

SEQ ID NO: 3168520 - DNA, 25 bp, Homo sapien
ttcaggtagggaacaccaggtctaa

SEQ ID NO: 3168521 - DNA, 25 bp, Homo sapien
ccagtgtcttggtttgaggagagtc

SEQ ID NO: 3168522 - DNA, 25 bp, Homo sapien
aaattatttgcgacatgattcccag

SEQ ID NO: 3168523 - DNA, 25 bp, Homo sapien
tgtttagacgtgtgacaaggccaca

SEQ ID NO: 3168524 - DNA, 25 bp, Homo sapien
gaagccaaataattacggagtgtaa

SEQ ID NO: 3168525 - DNA, 25 bp, Homo sapien
gaaaaatgtactgtccaagaaagga

SEQ ID NO: 3168526 - DNA, 25 bp, Homo sapien
tgatagaaactacaacaatgtgttc

SEQ ID NO: 3168527 - DNA, 25 bp, Homo sapien
gacacttactaaacatgacaggacc

SEQ ID NO: 3168528 - DNA, 25 bp, Homo sapien
caacctttacccagaaacatttgct

SEQ ID NO: 3168529 - DNA, 25 bp, Homo sapien
gaagtaattcaatggctggccaaac

SEQ ID NO: 3168530 - DNA, 25 bp, Homo sapien
tgaagtaattcaatggctggccaaa

SEQ ID NO: 3168531 - DNA, 25 bp, Homo sapien
tcaacctttacccagaaacatttgc

SEQ ID NO: 3168532 - DNA, 25 bp, Homo sapien
tgaacgacagggtaagtgagactcc

SEQ ID NO: 3168533 - DNA, 25 bp, Homo sapien
gcgcgcgcatgtgtgatttttagat

SEQ ID NO: 3168534 - DNA, 25 bp, Homo sapien
gaatgataatttgggctggacgcag

SEQ ID NO: 3168535 - DNA, 25 bp, Homo sapien
aaattcctgcccttatgttgtgaca

SEQ ID NO: 3168536 - DNA, 25 bp, Homo sapien
agtgaatgtgcggaaaatgccttca

SEQ ID NO: 3168537 - DNA, 25 bp, Homo sapien
aatgtgcggaaaatgccttcaaatc

SEQ ID NO: 3168538 - DNA, 25 bp, Homo sapien
tggaaagtgaatgtgcggaaaatgc

SEQ ID NO: 3168539 - DNA, 25 bp, Homo sapien
gaaaaggcaatcactagggaagcac

SEQ ID NO: 3168540 - DNA, 25 bp, Homo sapien
aggcagatccaaaggatatcatgaa

SEQ ID NO: 3168541 - DNA, 25 bp, Homo sapien
ggcagatccaaaggatatcatgaag

SEQ ID NO: 3168542 - DNA, 25 bp, Homo sapien
agatccaaaggatatcatgaagttt

SEQ ID NO: 3168543 - DNA, 25 bp, Homo sapien
gcagatccaaaggatatcatgaagt

SEQ ID NO: 3168544 - DNA, 25 bp, Homo sapien
tacaggtacatagttgagaaagtca

SEQ ID NO: 3168545 - DNA, 25 bp, Homo sapien
tccttgtcccgttatttagcatcac

SEQ ID NO: 3168546 - DNA, 25 bp, Homo sapien
cagcattctcctacgctaggccttt

SEQ ID NO: 3168547 - DNA, 25 bp, Homo sapien
aaaattcttagagcccatgaatctg

SEQ ID NO: 3168548 - DNA, 25 bp, Homo sapien
cactagtgacagtcggttgttggga

SEQ ID NO: 3168549 - DNA, 25 bp, Homo sapien
aacatctcagcagtatgcaacaggg

SEQ ID NO: 3168550 - DNA, 25 bp, Homo sapien
tcttgaaacctagtgaaggaacttg

SEQ ID NO: 3168551 - DNA, 25 bp, Homo sapien
gaaattatagtgagcttgcctacca

SEQ ID NO: 3168552 - DNA, 25 bp, Homo sapien
gttctgggatcacaagcaggtgcca

SEQ ID NO: 3168553 - DNA, 25 bp, Homo sapien
tagttttctagtgatgtctgtctgg

SEQ ID NO: 3168554 - DNA, 25 bp, Homo sapien
ggtagcagggtaataactggcttca

SEQ ID NO: 3168555 - DNA, 25 bp, Homo sapien
ttctgaatcttaaaacaagcttgca

SEQ ID NO: 3168556 - DNA, 25 bp, Homo sapien
actgtgaggcctacagctctgccgg

SEQ ID NO: 3168557 - DNA, 25 bp, Homo sapien
ctccgcgcgcctatgagaatgaggt

SEQ ID NO: 3168558 - DNA, 25 bp, Homo sapien
atgaccccgcgtcaccactgtgagg

SEQ ID NO: 3168559 - DNA, 25 bp, Homo sapien
ggaactaattcgctgaccgacccag

SEQ ID NO: 3168560 - DNA, 25 bp, Homo sapien
caagctgctgtaaagctggaccaca

SEQ ID NO: 3168561 - DNA, 25 bp, Homo sapien
tctctgtactttcgttggaccggga

SEQ ID NO: 3168562 - DNA, 25 bp, Homo sapien
ggtgaaacatgcaagatccctgccg

SEQ ID NO: 3168563 - DNA, 25 bp, Homo sapien
tttagaacgtctcagcttcggagcc

SEQ ID NO: 3168564 - DNA, 25 bp, Homo sapien
tactgaagaacaagaatgtccatat

SEQ ID NO: 3168565 - DNA, 25 bp, Homo sapien
aacaagaatgtccatattggctgtg

SEQ ID NO: 3168566 - DNA, 25 bp, Homo sapien
aagtgaattaaagtatggtcttaca

SEQ ID NO: 3168567 - DNA, 25 bp, Homo sapien
gaatgtccatattggctgtgcacag

SEQ ID NO: 3168568 - DNA, 25 bp, Homo sapien
atggtagtctaactttactatttag

SEQ ID NO: 3168569 - DNA, 25 bp, Homo sapien
cacacctagaaatgccgtgtagaat

SEQ ID NO: 3168570 - DNA, 25 bp, Homo sapien
aactaccacacctagaaatgccgtg

SEQ ID NO: 3168571 - DNA, 25 bp, Homo sapien
tgccgtgtagaatggtagtctaact

SEQ ID NO: 3168572 - DNA, 25 bp, Homo sapien
tcagtctctacctttgccttatgcc

SEQ ID NO: 3168573 - DNA, 25 bp, Homo sapien
aacagtaacctcatgaaagatgctg

SEQ ID NO: 3168574 - DNA, 25 bp, Homo sapien
gaaccacccagctagagctcttgag

SEQ ID NO: 3168575 - DNA, 25 bp, Homo sapien
gctgcagacctgtgtggatttgcca

SEQ ID NO: 3168576 - DNA, 25 bp, Homo sapien
aggactccggcaccgcgcgaggcag

SEQ ID NO: 3168577 - DNA, 25 bp, Homo sapien
actgcttggaggccgaagccacggc

SEQ ID NO: 3168578 - DNA, 25 bp, Homo sapien
cgaagctaagaccgtggcgaccgag

SEQ ID NO: 3168579 - DNA, 25 bp, Homo sapien
gaggcgctggcacggcccctcaact

SEQ ID NO: 3168580 - DNA, 25 bp, Homo sapien
actgaaagacttagatcccttccgt

SEQ ID NO: 3168581 - DNA, 25 bp, Homo sapien
tcttccttctctagcgtgggaatct

SEQ ID NO: 3168582 - DNA, 25 bp, Homo sapien
gcgtgggaatcttaccaactgaaag

SEQ ID NO: 3168583 - DNA, 25 bp, Homo sapien
gaaagacttagatcccttccgtatg

SEQ ID NO: 3168584 - DNA, 25 bp, Homo sapien
catttctacaacagatggctttggc

SEQ ID NO: 3168585 - DNA, 25 bp, Homo sapien
cctgtccttgcaaatctgaactctg

SEQ ID NO: 3168586 - DNA, 25 bp, Homo sapien
tccttgcaaatctgaactctgtgcc

SEQ ID NO: 3168587 - DNA, 25 bp, Homo sapien
ttgtttttatatcgccctgtccttg

SEQ ID NO: 3168588 - DNA, 25 bp, Homo sapien
tatcagtcttggagccctctgattg

SEQ ID NO: 3168589 - DNA, 25 bp, Homo sapien
tgccttggggccttagcaactccag

SEQ ID NO: 3168590 - DNA, 25 bp, Homo sapien
ggctttctccgtagcctgagcctct

SEQ ID NO: 3168591 - DNA, 25 bp, Homo sapien
tggggccttagcaactccagggtct

SEQ ID NO: 3168592 - DNA, 25 bp, Homo sapien
tctctgattggatgcgggtggggcg

SEQ ID NO: 3168593 - DNA, 25 bp, Homo sapien
aaagtagccggctctctgattggat

SEQ ID NO: 3168594 - DNA, 25 bp, Homo sapien
ccaaagtagccggctctctgattgg

SEQ ID NO: 3168595 - DNA, 25 bp, Homo sapien
gattggatgcgggtggggcgatggg

SEQ ID NO: 3168596 - DNA, 25 bp, Homo sapien
cgccgcggcgcaacgccggccgcgg

SEQ ID NO: 3168597 - DNA, 25 bp, Homo sapien
cgcggaagaccagcccaccgccgca

SEQ ID NO: 3168598 - DNA, 25 bp, Homo sapien
gccgcggcgcaacgccggccgcgga

SEQ ID NO: 3168599 - DNA, 25 bp, Homo sapien
ggaagaccagcccaccgccgcaccc

SEQ ID NO: 3168600 - DNA, 25 bp, Homo sapien
gggacccaccgcctcagcggtgccc

SEQ ID NO: 3168601 - DNA, 25 bp, Homo sapien
gtccggcatccgacccttcctccca

SEQ ID NO: 3168602 - DNA, 25 bp, Homo sapien
tcgcggtccgcacggactgggcgca

SEQ ID NO: 3168603 - DNA, 25 bp, Homo sapien
gcgcagcgggggcttccaaacctgt

SEQ ID NO: 3168604 - DNA, 25 bp, Homo sapien
tcgctccagcggatgaggagcaggc

SEQ ID NO: 3168605 - DNA, 25 bp, Homo sapien
gtcgctccagcggatgaggagcagg

SEQ ID NO: 3168606 - DNA, 25 bp, Homo sapien
tggtcgctccagcggatgaggagca

SEQ ID NO: 3168607 - DNA, 25 bp, Homo sapien
cctggtcgctccagcggatgaggag

SEQ ID NO: 3168608 - DNA, 25 bp, Homo sapien
cgagaggcggatacccccgtcccag

SEQ ID NO: 3168609 - DNA, 25 bp, Homo sapien
aggagccgtggtcaggtccgccggc

SEQ ID NO: 3168610 - DNA, 25 bp, Homo sapien
aagggaccagtcacgtccgccagag

SEQ ID NO: 3168611 - DNA, 25 bp, Homo sapien
ccagcgctgggtaagaccggccagc

SEQ ID NO: 3168612 - DNA, 25 bp, Homo sapien
acaccccgacaaggagcgggtgaag

SEQ ID NO: 3168613 - DNA, 25 bp, Homo sapien
tgcagtaaagacaccacacagagaa

SEQ ID NO: 3168614 - DNA, 25 bp, Homo sapien
ctgcagtaaagacaccacacagaga

SEQ ID NO: 3168615 - DNA, 25 bp, Homo sapien
cagtaaagacaccacacagagaatg

SEQ ID NO: 3168616 - DNA, 25 bp, Homo sapien
taaagacaccacacagagaatgtaa

SEQ ID NO: 3168617 - DNA, 25 bp, Homo sapien
cccgagaagttggaccccttcatga

SEQ ID NO: 3168618 - DNA, 25 bp, Homo sapien
ccttcatgacctgccaagtgctctg

SEQ ID NO: 3168619 - DNA, 25 bp, Homo sapien
caggtagacgttcaacaacccgaga

SEQ ID NO: 3168620 - DNA, 25 bp, Homo sapien
tcagccctttttctcgaggttggaa

SEQ ID NO: 3168621 - DNA, 25 bp, Homo sapien
catcagctgcttgagcaagttatct

SEQ ID NO: 3168622 - DNA, 25 bp, Homo sapien
cagctgcttgagcaagttatctttt

SEQ ID NO: 3168623 - DNA, 25 bp, Homo sapien
gctgcttgagcaagttatcttttct

SEQ ID NO: 3168624 - DNA, 25 bp, Homo sapien
cccatcagctgcttgagcaagttat

SEQ ID NO: 3168625 - DNA, 25 bp, Homo sapien
ctgcaataaaaaccaagaaccaagg

SEQ ID NO: 3168626 - DNA, 25 bp, Homo sapien
caatcctggacacaaagtgttatca

SEQ ID NO: 3168627 - DNA, 25 bp, Homo sapien
caaaagtttcagtgcaagatccaaa

SEQ ID NO: 3168628 - DNA, 25 bp, Homo sapien
aactttggcatttctcaatcctgga

SEQ ID NO: 3168629 - DNA, 25 bp, Homo sapien
cataagagccaagaacctgtccaaa

SEQ ID NO: 3168630 - DNA, 25 bp, Homo sapien
ttccatccgttttatgtcagaagca

SEQ ID NO: 3168631 - DNA, 25 bp, Homo sapien
tagtagcttccaattcatagtgcaa

SEQ ID NO: 3168632 - DNA, 25 bp, Homo sapien
ctaatccggatcacatcatgagtgg

SEQ ID NO: 3168633 - DNA, 25 bp, Homo sapien
gaacagactccaatgcaagacaaat

SEQ ID NO: 3168634 - DNA, 25 bp, Homo sapien
gcttttgaaaagatgagtcggcagt

SEQ ID NO: 3168635 - DNA, 25 bp, Homo sapien
ctagtttatcaaggctcagtatttc

SEQ ID NO: 3168636 - DNA, 25 bp, Homo sapien
tcagctgagcttctagtttatcaag

SEQ ID NO: 3168637 - DNA, 25 bp, Homo sapien
gagtcggcagttgcaagctttcagc

SEQ ID NO: 3168638 - DNA, 25 bp, Homo sapien
gtttccacttccaaattgagaaggc

SEQ ID NO: 3168639 - DNA, 25 bp, Homo sapien
aagtttccacttccaaattgagaag

SEQ ID NO: 3168640 - DNA, 25 bp, Homo sapien
tcaaagtttccacttccaaattgag

SEQ ID NO: 3168641 - DNA, 25 bp, Homo sapien
tccacttccaaattgagaaggcaca

SEQ ID NO: 3168642 - DNA, 25 bp, Homo sapien
cactgaagatggttccagctatcac

SEQ ID NO: 3168643 - DNA, 25 bp, Homo sapien
gtttatttcaacgaatcaattttca

SEQ ID NO: 3168644 - DNA, 25 bp, Homo sapien
gcttcacatgcacatattttcacca

SEQ ID NO: 3168645 - DNA, 25 bp, Homo sapien
cttcggaatgccttcagtttatttc

SEQ ID NO: 3168646 - DNA, 25 bp, Homo sapien
gaatactcggctaggcatttagaaa

SEQ ID NO: 3168647 - DNA, 25 bp, Homo sapien
caacttcttaagatctggtttgcaa

SEQ ID NO: 3168648 - DNA, 25 bp, Homo sapien
ctcaggtatcgttggcagctcagga

SEQ ID NO: 3168649 - DNA, 25 bp, Homo sapien
ggctgtgcgccttgaaacgatccaa

SEQ ID NO: 3168650 - DNA, 25 bp, Homo sapien
tatagaagtcttccccatcagtggt

SEQ ID NO: 3168651 - DNA, 25 bp, Homo sapien
ctggccctttatctctacggcataa

SEQ ID NO: 3168652 - DNA, 25 bp, Homo sapien
gctcttagtgtaggtgcttgctttc

SEQ ID NO: 3168653 - DNA, 25 bp, Homo sapien
ttaattagtcaaggaacctgcctac

SEQ ID NO: 3168654 - DNA, 25 bp, Homo sapien
tctccacaactcatatcttcacaag

SEQ ID NO: 3168655 - DNA, 25 bp, Homo sapien
aagttgaaaaagaaggtgcactctt

SEQ ID NO: 3168656 - DNA, 25 bp, Homo sapien
ggtgcactcttgatcactgggagga

SEQ ID NO: 3168657 - DNA, 25 bp, Homo sapien
gctgctgagactctcctctccacaa

SEQ ID NO: 3168658 - DNA, 25 bp, Homo sapien
gaatgaaaactaagagccctagcct

SEQ ID NO: 3168659 - DNA, 25 bp, Homo sapien
taatggtttaagaggcactacccca

SEQ ID NO: 3168660 - DNA, 25 bp, Homo sapien
ttaaggattatccactgtccctgct

SEQ ID NO: 3168661 - DNA, 25 bp, Homo sapien
cactaccccatttgatggcttagga

SEQ ID NO: 3168662 - DNA, 25 bp, Homo sapien
gactagactatcacacacaaggtaa

SEQ ID NO: 3168663 - DNA, 25 bp, Homo sapien
ccaacggatgttgacttaccagtaa

SEQ ID NO: 3168664 - DNA, 25 bp, Homo sapien
tggctgtatcaccacacagatttgc

SEQ ID NO: 3168665 - DNA, 25 bp, Homo sapien
aactataatactacaaacactcggg

SEQ ID NO: 3168666 - DNA, 25 bp, Homo sapien
tgaaaggtcaaatctctcgccaagt

SEQ ID NO: 3168667 - DNA, 25 bp, Homo sapien
gagtcttgagatttggtaagcccca

SEQ ID NO: 3168668 - DNA, 25 bp, Homo sapien
tggcacaggagggtataaccaggct

SEQ ID NO: 3168669 - DNA, 25 bp, Homo sapien
ttaatgagtccatcccacaaagagg

SEQ ID NO: 3168670 - DNA, 25 bp, Homo sapien
gaatctaagtgggttgtctcaataa

SEQ ID NO: 3168671 - DNA, 25 bp, Homo sapien
tatatgaatctaagtgggttgtctc

SEQ ID NO: 3168672 - DNA, 25 bp, Homo sapien
gggttgtctcaataagctgacaatt

SEQ ID NO: 3168673 - DNA, 25 bp, Homo sapien
cttgtccttgtccatatatgaatct

SEQ ID NO: 3168674 - DNA, 25 bp, Homo sapien
gctgcacttcagtaagcaaagccat

SEQ ID NO: 3168675 - DNA, 25 bp, Homo sapien
aagagcagcatgtaggcacagggat

SEQ ID NO: 3168676 - DNA, 25 bp, Homo sapien
tgattgggatcgactgagtagttcc

SEQ ID NO: 3168677 - DNA, 25 bp, Homo sapien
tccacttgtggacgggaagagcagc

SEQ ID NO: 3168678 - DNA, 25 bp, Homo sapien
tgaggtctatgtgctagcgcatcca

SEQ ID NO: 3168679 - DNA, 25 bp, Homo sapien
tctcagatgtagtgggcctgggaaa

SEQ ID NO: 3168680 - DNA, 25 bp, Homo sapien
ttctaagccgcagtacgaagttgga

SEQ ID NO: 3168681 - DNA, 25 bp, Homo sapien
aaatcaagctgggtcttctaagccg

SEQ ID NO: 3168682 - DNA, 25 bp, Homo sapien
ctgtgtttattagggaatacccttg

SEQ ID NO: 3168683 - DNA, 25 bp, Homo sapien
ccagcacgttgggcggttgaagcca

SEQ ID NO: 3168684 - DNA, 25 bp, Homo sapien
tgaagccagacgatcacctgagcac

SEQ ID NO: 3168685 - DNA, 25 bp, Homo sapien
ttattgagcgcatatcagccactgt

SEQ ID NO: 3168686 - DNA, 25 bp, Homo sapien
cttctgattaccgttcaatttccca

SEQ ID NO: 3168687 - DNA, 25 bp, Homo sapien
tggaccttctgattaccgttcaatt

SEQ ID NO: 3168688 - DNA, 25 bp, Homo sapien
atggaccttctgattaccgttcaat

SEQ ID NO: 3168689 - DNA, 25 bp, Homo sapien
gattaccgttcaatttcccatgtat

SEQ ID NO: 3168690 - DNA, 25 bp, Homo sapien
tggaatgagctgagatcgggccact

SEQ ID NO: 3168691 - DNA, 25 bp, Homo sapien
acctggtaggtggaggttggaatga

SEQ ID NO: 3168692 - DNA, 25 bp, Homo sapien
ctggtaggtggaggttggaatgagc

SEQ ID NO: 3168693 - DNA, 25 bp, Homo sapien
tgaacctggtaggtggaggttggaa

SEQ ID NO: 3168694 - DNA, 25 bp, Homo sapien
cctccaggtatcaagacggcattca

SEQ ID NO: 3168695 - DNA, 25 bp, Homo sapien
ggtgtgctgcgaagatctcccttta

SEQ ID NO: 3168696 - DNA, 25 bp, Homo sapien
tagaaaacaaatagccggtgcacgt

SEQ ID NO: 3168697 - DNA, 25 bp, Homo sapien
caataccgtacaagctgggagtgct

SEQ ID NO: 3168698 - DNA, 25 bp, Homo sapien
tctttgaaatgagactaccagtggc

SEQ ID NO: 3168699 - DNA, 25 bp, Homo sapien
ctcatatgttagaagaggtccccta

SEQ ID NO: 3168700 - DNA, 25 bp, Homo sapien
taccagtggcagcattggaaggtca

SEQ ID NO: 3168701 - DNA, 25 bp, Homo sapien
gaaggtcacagcacttcctcaggaa

SEQ ID NO: 3168702 - DNA, 25 bp, Homo sapien
ttcaatgtcataccctggatgggat

SEQ ID NO: 3168703 - DNA, 25 bp, Homo sapien
cagaagacactatagagacgtgatg

SEQ ID NO: 3168704 - DNA, 25 bp, Homo sapien
ctatagagacgtgatgagtaagttc

SEQ ID NO: 3168705 - DNA, 25 bp, Homo sapien
gagtaagttcaatgtcataccctgg

SEQ ID NO: 3168706 - DNA, 25 bp, Homo sapien
ttctggaaagtcattccacttgtac

SEQ ID NO: 3168707 - DNA, 25 bp, Homo sapien
atgtttctggaaagtcattccactt

SEQ ID NO: 3168708 - DNA, 25 bp, Homo sapien
ctggaaagtcattccacttgtacat

SEQ ID NO: 3168709 - DNA, 25 bp, Homo sapien
gtttctggaaagtcattccacttgt

SEQ ID NO: 3168710 - DNA, 25 bp, Homo sapien
tcagtaagttagctataagagtggc

SEQ ID NO: 3168711 - DNA, 25 bp, Homo sapien
gctgcgcttgctttaaacgtagaac

SEQ ID NO: 3168712 - DNA, 25 bp, Homo sapien
tcttggagtttacgtaacttcagta

SEQ ID NO: 3168713 - DNA, 25 bp, Homo sapien
ctaaacccgtgtatttctcttggag

SEQ ID NO: 3168714 - DNA, 25 bp, Homo sapien
cagcataaaggtgccctactgcttg

SEQ ID NO: 3168715 - DNA, 25 bp, Homo sapien
tagtagttgcaggttgcagcataaa

SEQ ID NO: 3168716 - DNA, 25 bp, Homo sapien
tactgcttgggctaggtgatctaac

SEQ ID NO: 3168717 - DNA, 25 bp, Homo sapien
tgcaggttgcagcataaaggtgccc

SEQ ID NO: 3168718 - DNA, 25 bp, Homo sapien
ccaaaggacacaccagggcaagcac

SEQ ID NO: 3168719 - DNA, 25 bp, Homo sapien
accagggcaagcaccaacccaaagc

SEQ ID NO: 3168720 - DNA, 25 bp, Homo sapien
ccagggcaagcaccaacccaaagca

SEQ ID NO: 3168721 - DNA, 25 bp, Homo sapien
cccaaaggacacaccagggcaagca

SEQ ID NO: 3168722 - DNA, 25 bp, Homo sapien
cattttggactccttaaaccagtag

SEQ ID NO: 3168723 - DNA, 25 bp, Homo sapien
tgctgttactaggtggcagcaggaa

SEQ ID NO: 3168724 - DNA, 25 bp, Homo sapien
tctgctttgctgatagtaattagcc

SEQ ID NO: 3168725 - DNA, 25 bp, Homo sapien
ccctatcatggtgagtttgcattgc

SEQ ID NO: 3168726 - DNA, 25 bp, Homo sapien
caggcgatagacaagttctggcttt

SEQ ID NO: 3168727 - DNA, 25 bp, Homo sapien
cctgctccaggcgatagacaagttc

SEQ ID NO: 3168728 - DNA, 25 bp, Homo sapien
aacctgcaacaggtacctagaaaag

SEQ ID NO: 3168729 - DNA, 25 bp, Homo sapien
gcaacaggtacctagaaaagccctg

SEQ ID NO: 3168730 - DNA, 25 bp, Homo sapien
acagaagattcaccgactgttcccc

SEQ ID NO: 3168731 - DNA, 25 bp, Homo sapien
gaagattcaccgactgttcccccaa

SEQ ID NO: 3168732 - DNA, 25 bp, Homo sapien
agaagattcaccgactgttccccca

SEQ ID NO: 3168733 - DNA, 25 bp, Homo sapien
tacagaagattcaccgactgttccc

SEQ ID NO: 3168734 - DNA, 25 bp, Homo sapien
tagaactccgatctgtccctttggt

SEQ ID NO: 3168735 - DNA, 25 bp, Homo sapien
tagttagttgtctgttcatggcccc

SEQ ID NO: 3168736 - DNA, 25 bp, Homo sapien
tattgacccagacgaactcatgatt

SEQ ID NO: 3168737 - DNA, 25 bp, Homo sapien
caaagtcatccttaagaggtggctc

SEQ ID NO: 3168738 - DNA, 25 bp, Homo sapien
tccaagacctgagaagtgtagtgag

SEQ ID NO: 3168739 - DNA, 25 bp, Homo sapien
tatctacggtctacatagagtccaa

SEQ ID NO: 3168740 - DNA, 25 bp, Homo sapien
gaactagcattactgaatcagagag

SEQ ID NO: 3168741 - DNA, 25 bp, Homo sapien
ccagatatccatcttgccaccaggg

SEQ ID NO: 3168742 - DNA, 25 bp, Homo sapien
ttctggatttccttgatattcctct

SEQ ID NO: 3168743 - DNA, 25 bp, Homo sapien
gatttccttgatattcctctattca

SEQ ID NO: 3168744 - DNA, 25 bp, Homo sapien
ctggatttccttgatattcctctat

SEQ ID NO: 3168745 - DNA, 25 bp, Homo sapien
ggatttccttgatattcctctattc

SEQ ID NO: 3168746 - DNA, 25 bp, Homo sapien
gtaagaaatgacttcttgccacagc

SEQ ID NO: 3168747 - DNA, 25 bp, Homo sapien
acagccagcatatttctctaccagc

SEQ ID NO: 3168748 - DNA, 25 bp, Homo sapien
tgccacagccagcatatttctctac

SEQ ID NO: 3168749 - DNA, 25 bp, Homo sapien
cacattccccttaaggtcacaggat

SEQ ID NO: 3168750 - DNA, 25 bp, Homo sapien
ggcacactgctattgaagggcatga

SEQ ID NO: 3168751 - DNA, 25 bp, Homo sapien
aagttctcatccctatgaaggtcag

SEQ ID NO: 3168752 - DNA, 25 bp, Homo sapien
taagtgccacacctttgtagatctc

SEQ ID NO: 3168753 - DNA, 25 bp, Homo sapien
gaaggtcagtccaattgatgtccca

SEQ ID NO: 3168754 - DNA, 25 bp, Homo sapien
cagtaggcagcttctgctgtacagc

SEQ ID NO: 3168755 - DNA, 25 bp, Homo sapien
gctgtacagcaagattcatgcaaaa

SEQ ID NO: 3168756 - DNA, 25 bp, Homo sapien
taccactgttattcctgcacagcaa

SEQ ID NO: 3168757 - DNA, 25 bp, Homo sapien
catttcttggccaataccactgtta

SEQ ID NO: 3168758 - DNA, 25 bp, Homo sapien
ggagaagcacatcagtacttccatg

SEQ ID NO: 3168759 - DNA, 25 bp, Homo sapien
tagtaagcctccctgagcagagagc

SEQ ID NO: 3168760 - DNA, 25 bp, Homo sapien
gacatgggactcaggtagtaagcct

SEQ ID NO: 3168761 - DNA, 25 bp, Homo sapien
gcaaaagggaatactcaaggagaag

SEQ ID NO: 3168762 - DNA, 25 bp, Homo sapien
gctgccaccagtcgtggttcaacag

SEQ ID NO: 3168763 - DNA, 25 bp, Homo sapien
gtacagttactacagcgaccatggc

SEQ ID NO: 3168764 - DNA, 25 bp, Homo sapien
cagtcgtggttcaacagtacagtta

SEQ ID NO: 3168765 - DNA, 25 bp, Homo sapien
cagtacagttactacagcgaccatg

SEQ ID NO: 3168766 - DNA, 25 bp, Homo sapien
tggtcccaggaagtcattcatgagc

SEQ ID NO: 3168767 - DNA, 25 bp, Homo sapien
gtctacttccaaagaatctacccca

SEQ ID NO: 3168768 - DNA, 25 bp, Homo sapien
tcagattctcatcaagtctacttcc

SEQ ID NO: 3168769 - DNA, 25 bp, Homo sapien
gacttactcaacttctgggcagcca

SEQ ID NO: 3168770 - DNA, 25 bp, Homo sapien
gtagttgtggtttctatagcttaga

SEQ ID NO: 3168771 - DNA, 25 bp, Homo sapien
ctctgctcataggagcgatttccag

SEQ ID NO: 3168772 - DNA, 25 bp, Homo sapien
ctcataggagcgatttccagggtct

SEQ ID NO: 3168773 - DNA, 25 bp, Homo sapien
gatttccagggtctttagcaatgtg

SEQ ID NO: 3168774 - DNA, 25 bp, Homo sapien
ggtatcagctatcactttgtagtac

SEQ ID NO: 3168775 - DNA, 25 bp, Homo sapien
cggtatcagctatcactttgtagta

SEQ ID NO: 3168776 - DNA, 25 bp, Homo sapien
tcacttggaagggttatcttttgta

SEQ ID NO: 3168777 - DNA, 25 bp, Homo sapien
agaacctgatgagggtctgccctgg

SEQ ID NO: 3168778 - DNA, 25 bp, Homo sapien
aggacagaacctgatgagggtctgc

SEQ ID NO: 3168779 - DNA, 25 bp, Homo sapien
tccagatcctgcacgctagaactct

SEQ ID NO: 3168780 - DNA, 25 bp, Homo sapien
tggggttgactgtctacacttgact

SEQ ID NO: 3168781 - DNA, 25 bp, Homo sapien
tcaactgctagcaattgaggaaagc

SEQ ID NO: 3168782 - DNA, 25 bp, Homo sapien
catctaatccctcagcaagcccatg

SEQ ID NO: 3168783 - DNA, 25 bp, Homo sapien
aaagcacgggtgactcatcatctaa

SEQ ID NO: 3168784 - DNA, 25 bp, Homo sapien
ccttcagagggcagggaattgccac

SEQ ID NO: 3168785 - DNA, 25 bp, Homo sapien
gcttctgctcctactctattggtcc

SEQ ID NO: 3168786 - DNA, 25 bp, Homo sapien
tcctggagatttgttaggtcttctg

SEQ ID NO: 3168787 - DNA, 25 bp, Homo sapien
ccatcctggcctgttgctacaaggt

SEQ ID NO: 3168788 - DNA, 25 bp, Homo sapien
tttccacagaaagggaacaagtgtc

SEQ ID NO: 3168789 - DNA, 25 bp, Homo sapien
tgtaacttcactgccacatgaggct

SEQ ID NO: 3168790 - DNA, 25 bp, Homo sapien
tctgtaacttcactgccacatgagg

SEQ ID NO: 3168791 - DNA, 25 bp, Homo sapien
taacttcactgccacatgaggcttc

SEQ ID NO: 3168792 - DNA, 25 bp, Homo sapien
ctgtaacttcactgccacatgaggc

SEQ ID NO: 3168793 - DNA, 25 bp, Homo sapien
tctgacatcaggcaatgtggggtcc

SEQ ID NO: 3168794 - DNA, 25 bp, Homo sapien
ttgaaacctttctgtggcaagcctc

SEQ ID NO: 3168795 - DNA, 25 bp, Homo sapien
ctctgttgaaacctttctgtggcaa

SEQ ID NO: 3168796 - DNA, 25 bp, Homo sapien
aaacctttctgtggcaagcctctga

SEQ ID NO: 3168797 - DNA, 25 bp, Homo sapien
aaggcatgtgtgaaacatagtagag

SEQ ID NO: 3168798 - DNA, 25 bp, Homo sapien
ccaagaggacaaggcttcggaagag

SEQ ID NO: 3168799 - DNA, 25 bp, Homo sapien
tagtagaggtgtgaagaagattcct

SEQ ID NO: 3168800 - DNA, 25 bp, Homo sapien
cagtcatttgattggcaatgaccaa

SEQ ID NO: 3168801 - DNA, 25 bp, Homo sapien
gccaccaactcttgctttgccttcc

SEQ ID NO: 3168802 - DNA, 25 bp, Homo sapien
ctgccaccaactcttgctttgcctt

SEQ ID NO: 3168803 - DNA, 25 bp, Homo sapien
tgccaccaactcttgctttgccttc

SEQ ID NO: 3168804 - DNA, 25 bp, Homo sapien
ccaccaactcttgctttgccttccc

SEQ ID NO: 3168805 - DNA, 25 bp, Homo sapien
tctgtgaacctccatagagaagatc

SEQ ID NO: 3168806 - DNA, 25 bp, Homo sapien
gctggtcattagaacacacttccct

SEQ ID NO: 3168807 - DNA, 25 bp, Homo sapien
ggctctttccaactgacgcttgtgt

SEQ ID NO: 3168808 - DNA, 25 bp, Homo sapien
caggagtcaactgtgctggtcatta

SEQ ID NO: 3168809 - DNA, 25 bp, Homo sapien
aaaaaccaatagcatcacaggtcta

SEQ ID NO: 3168810 - DNA, 25 bp, Homo sapien
actcgctcagtacagggagtcttac

SEQ ID NO: 3168811 - DNA, 25 bp, Homo sapien
ctaaagacactacggatttcaactc

SEQ ID NO: 3168812 - DNA, 25 bp, Homo sapien
aatagcatcacaggtctaaagacac

SEQ ID NO: 3168813 - DNA, 25 bp, Homo sapien
cagagaagtggtagcaactaacctc

SEQ ID NO: 3168814 - DNA, 25 bp, Homo sapien
agagaagtggtagcaactaacctca

SEQ ID NO: 3168815 - DNA, 25 bp, Homo sapien
cctgaagcctctgcagaatgttctt

SEQ ID NO: 3168816 - DNA, 25 bp, Homo sapien
tcctgaagcctctgcagaatgttct

SEQ ID NO: 3168817 - DNA, 25 bp, Homo sapien
gaagcctctgcagaatgttcttcct

SEQ ID NO: 3168818 - DNA, 25 bp, Homo sapien
tgttcttccttcttgggcccaacca

SEQ ID NO: 3168819 - DNA, 25 bp, Homo sapien
ctgaggactggttcaatccactcaa

SEQ ID NO: 3168820 - DNA, 25 bp, Homo sapien
accatcctgcaattagtattttcat

SEQ ID NO: 3168821 - DNA, 25 bp, Homo sapien
tgaggactggttcaatccactcaag

SEQ ID NO: 3168822 - DNA, 25 bp, Homo sapien
taccatcctgcaattagtattttca

SEQ ID NO: 3168823 - DNA, 25 bp, Homo sapien
tgacagcgatagagaggaggattct

SEQ ID NO: 3168824 - DNA, 25 bp, Homo sapien
tagagaggaggattctagcaaagcc

SEQ ID NO: 3168825 - DNA, 25 bp, Homo sapien
cagcgatagagaggaggattctagc

SEQ ID NO: 3168826 - DNA, 25 bp, Homo sapien
aggaggattctagcaaagcccaggg

SEQ ID NO: 3168827 - DNA, 25 bp, Homo sapien
aagagacacttgaagatgtaagtgc

SEQ ID NO: 3168828 - DNA, 25 bp, Homo sapien
caaggtggggtaaagagacacttga

SEQ ID NO: 3168829 - DNA, 25 bp, Homo sapien
atgtaagtgcctgagctggtgaaca

SEQ ID NO: 3168830 - DNA, 25 bp, Homo sapien
gagacacttgaagatgtaagtgcct

SEQ ID NO: 3168831 - DNA, 25 bp, Homo sapien
tctgggaatgtaccatgctgctcct

SEQ ID NO: 3168832 - DNA, 25 bp, Homo sapien
ctgggaatgtaccatgctgctcctg

SEQ ID NO: 3168833 - DNA, 25 bp, Homo sapien
tgtaatgttttctacacccaagaga

SEQ ID NO: 3168834 - DNA, 25 bp, Homo sapien
taatgttttctacacccaagagaaa

SEQ ID NO: 3168835 - DNA, 25 bp, Homo sapien
tgtcccacactcacattgtttactg

SEQ ID NO: 3168836 - DNA, 25 bp, Homo sapien
acaaggcccatgtcccacactcaca

SEQ ID NO: 3168837 - DNA, 25 bp, Homo sapien
ggcccatgtcccacactcacattgt

SEQ ID NO: 3168838 - DNA, 25 bp, Homo sapien
gtgctctgctgtgtcccacaaggcc

SEQ ID NO: 3168839 - DNA, 25 bp, Homo sapien
gcacacaagtgcaggggagattgat

SEQ ID NO: 3168840 - DNA, 25 bp, Homo sapien
cagcaaattcagctgcacacaagtg

SEQ ID NO: 3168841 - DNA, 25 bp, Homo sapien
gcaaattcagctgcacacaagtgca

SEQ ID NO: 3168842 - DNA, 25 bp, Homo sapien
aattcagctgcacacaagtgcaggg

SEQ ID NO: 3168843 - DNA, 25 bp, Homo sapien
gcattatgacactagattccggtga

SEQ ID NO: 3168844 - DNA, 25 bp, Homo sapien
tcaaaagggtcgcaaggcatgcaat

SEQ ID NO: 3168845 - DNA, 25 bp, Homo sapien
tagtggatggttcctcaccaagagc

SEQ ID NO: 3168846 - DNA, 25 bp, Homo sapien
gaatgcctgctcatcatattagcca

SEQ ID NO: 3168847 - DNA, 25 bp, Homo sapien
cttccctggataggttttcaaagag

SEQ ID NO: 3168848 - DNA, 25 bp, Homo sapien
tgcccatctggcctcgatgcttatt

SEQ ID NO: 3168849 - DNA, 25 bp, Homo sapien
ctgtgcttccctggataggttttca

SEQ ID NO: 3168850 - DNA, 25 bp, Homo sapien
ttcgagtgcctgttccaggcagtag

SEQ ID NO: 3168851 - DNA, 25 bp, Homo sapien
gtggtgtaagaatccgcaactgtcc

SEQ ID NO: 3168852 - DNA, 25 bp, Homo sapien
attgagtgcccccatgtccatgacg

SEQ ID NO: 3168853 - DNA, 25 bp, Homo sapien
taagaatccgcaactgtccattctc

SEQ ID NO: 3168854 - DNA, 25 bp, Homo sapien
ccccaccaggtggtgtaagaatccg

SEQ ID NO: 3168855 - DNA, 25 bp, Homo sapien
tgccgtagttggcaggtcaagcccc

SEQ ID NO: 3168856 - DNA, 25 bp, Homo sapien
cagaacatgcaggtgactgccgtag

SEQ ID NO: 3168857 - DNA, 25 bp, Homo sapien
actcccccagaacatgcaggtgact

SEQ ID NO: 3168858 - DNA, 25 bp, Homo sapien
catgcaggtgactgccgtagttggc

SEQ ID NO: 3168859 - DNA, 25 bp, Homo sapien
cactgaatgcgtaaagttgttctgc

SEQ ID NO: 3168860 - DNA, 25 bp, Homo sapien
tccaggctttctcagggatcgttgg

SEQ ID NO: 3168861 - DNA, 25 bp, Homo sapien
cgttggctctgagtatggatcctcc

SEQ ID NO: 3168862 - DNA, 25 bp, Homo sapien
gaagctgctcatttgaggccccaac

SEQ ID NO: 3168863 - DNA, 25 bp, Homo sapien
tctcacaaggcctacaccttatgct

SEQ ID NO: 3168864 - DNA, 25 bp, Homo sapien
gctcacattgcttaattcactgcac

SEQ ID NO: 3168865 - DNA, 25 bp, Homo sapien
cacatgagcgcaaggaggatgctga

SEQ ID NO: 3168866 - DNA, 25 bp, Homo sapien
gatggtcttccatgtgctctgtgtt

SEQ ID NO: 3168867 - DNA, 25 bp, Homo sapien
tagctctgctcgagccatcagaatc

SEQ ID NO: 3168868 - DNA, 25 bp, Homo sapien
aaggatcctataatagctctgctcg

SEQ ID NO: 3168869 - DNA, 25 bp, Homo sapien
cgaggagcctgggataaggatccta

SEQ ID NO: 3168870 - DNA, 25 bp, Homo sapien
ggagcctgggataaggatcctataa

SEQ ID NO: 3168871 - DNA, 25 bp, Homo sapien
gagtaacaagaactgtagcttccag

SEQ ID NO: 3168872 - DNA, 25 bp, Homo sapien
aacgcggtcccctcatatctgtagc

SEQ ID NO: 3168873 - DNA, 25 bp, Homo sapien
tgtggtaggcatacaaacgcggtcc

SEQ ID NO: 3168874 - DNA, 25 bp, Homo sapien
tggtcatgtggtaggcatacaaacg

SEQ ID NO: 3168875 - DNA, 25 bp, Homo sapien
ggggctaggacttgaagcacttcct

SEQ ID NO: 3168876 - DNA, 25 bp, Homo sapien
aggggctaggacttgaagcacttcc

SEQ ID NO: 3168877 - DNA, 25 bp, Homo sapien
gggctaggacttgaagcacttcctc

SEQ ID NO: 3168878 - DNA, 25 bp, Homo sapien
tcacttggaagagagcaccagggaa

SEQ ID NO: 3168879 - DNA, 25 bp, Homo sapien
cttggaagagagcaccagggaatgg

SEQ ID NO: 3168880 - DNA, 25 bp, Homo sapien
cacttggaagagagcaccagggaat

SEQ ID NO: 3168881 - DNA, 25 bp, Homo sapien
acttggaagagagcaccagggaatg

SEQ ID NO: 3168882 - DNA, 25 bp, Homo sapien
ggatgccaggcaggatcccaacaaa

SEQ ID NO: 3168883 - DNA, 25 bp, Homo sapien
gccacatatctgtcttcccacaagt

SEQ ID NO: 3168884 - DNA, 25 bp, Homo sapien
acatatctgtcttcccacaagtggg

SEQ ID NO: 3168885 - DNA, 25 bp, Homo sapien
ctttactggtatatcttccatgaga

SEQ ID NO: 3168886 - DNA, 25 bp, Homo sapien
cagccggccatctcaactttaacag

SEQ ID NO: 3168887 - DNA, 25 bp, Homo sapien
tggtagagtcattcctcccttaggc

SEQ ID NO: 3168888 - DNA, 25 bp, Homo sapien
ctccttgtgtagcagtccagtttcc

SEQ ID NO: 3168889 - DNA, 25 bp, Homo sapien
ggaacaatcgccctaaccagtacag

SEQ ID NO: 3168890 - DNA, 25 bp, Homo sapien
tgtggaagttggcaaggcaagccca

SEQ ID NO: 3168891 - DNA, 25 bp, Homo sapien
tatccacagatagggaaggctttca

SEQ ID NO: 3168892 - DNA, 25 bp, Homo sapien
ggcaagcccattatccacagatagg

SEQ ID NO: 3168893 - DNA, 25 bp, Homo sapien
gttttatgcaattgtggaagttggc

SEQ ID NO: 3168894 - DNA, 25 bp, Homo sapien
gtcccagtcctgtaacggcagctct

SEQ ID NO: 3168895 - DNA, 25 bp, Homo sapien
ctgatgcccctcttggctgcacatt

SEQ ID NO: 3168896 - DNA, 25 bp, Homo sapien
gggtcccagtcctgtaacggcagct

SEQ ID NO: 3168897 - DNA, 25 bp, Homo sapien
gatgcccctcttggctgcacattac

SEQ ID NO: 3168898 - DNA, 25 bp, Homo sapien
ggcttctggtggtcatgcatgatca

SEQ ID NO: 3168899 - DNA, 25 bp, Homo sapien
tggcttctggtggtcatgcatgatc

SEQ ID NO: 3168900 - DNA, 25 bp, Homo sapien
gcttctggtggtcatgcatgatcac

SEQ ID NO: 3168901 - DNA, 25 bp, Homo sapien
gcttatcacttgtcactctgttgga

SEQ ID NO: 3168902 - DNA, 25 bp, Homo sapien
tggacatagctctttcatggtgacc

SEQ ID NO: 3168903 - DNA, 25 bp, Homo sapien
tgataactgcatccaacatgttggt

SEQ ID NO: 3168904 - DNA, 25 bp, Homo sapien
cagacctgctcccttgaatttgaag

SEQ ID NO: 3168905 - DNA, 25 bp, Homo sapien
gatctggttccctccttagtgctgg

SEQ ID NO: 3168906 - DNA, 25 bp, Homo sapien
gccactaatcccatgacaactgaaa

SEQ ID NO: 3168907 - DNA, 25 bp, Homo sapien
aaagttattcatggccttggattcc

SEQ ID NO: 3168908 - DNA, 25 bp, Homo sapien
tgctggcttctctcctagacgtttt

SEQ ID NO: 3168909 - DNA, 25 bp, Homo sapien
tcttgaggaggggtctgtatgcttc

SEQ ID NO: 3168910 - DNA, 25 bp, Homo sapien
gacttttcacaaatagtaactcctc

SEQ ID NO: 3168911 - DNA, 25 bp, Homo sapien
tctcagacttttcacaaatagtaac

SEQ ID NO: 3168912 - DNA, 25 bp, Homo sapien
caaatagtaactcctcagctcttcc

SEQ ID NO: 3168913 - DNA, 25 bp, Homo sapien
gttaggtgtatctctaggtattttg

SEQ ID NO: 3168914 - DNA, 25 bp, Homo sapien
ttgtagtcctccttagagatctttt

SEQ ID NO: 3168915 - DNA, 25 bp, Homo sapien
ctgcatggttaggtgtatctctagg

SEQ ID NO: 3168916 - DNA, 25 bp, Homo sapien
atgttttgtagtcctccttagagat

SEQ ID NO: 3168917 - DNA, 25 bp, Homo sapien
cagcaggaatgggactcttgaaggt

SEQ ID NO: 3168918 - DNA, 25 bp, Homo sapien
ccagttagcaggaagcctaattcac

SEQ ID NO: 3168919 - DNA, 25 bp, Homo sapien
tggtctgtcaactgctggttgtaca

SEQ ID NO: 3168920 - DNA, 25 bp, Homo sapien
caagtctgctcagatgatggtctgt

SEQ ID NO: 3168921 - DNA, 25 bp, Homo sapien
tgatgtcctagaaatgagtggctgg

SEQ ID NO: 3168922 - DNA, 25 bp, Homo sapien
aatgtcctggatcagttgtgctcgg

SEQ ID NO: 3168923 - DNA, 25 bp, Homo sapien
tgaggatgatgtcctagaaatgagt

SEQ ID NO: 3168924 - DNA, 25 bp, Homo sapien
cagttgtgctcggaagcctctgggt

SEQ ID NO: 3168925 - DNA, 25 bp, Homo sapien
tcctcctatcctgctagtggattcc

SEQ ID NO: 3168926 - DNA, 25 bp, Homo sapien
aaggctccccgtaggaatgcaaagc

SEQ ID NO: 3168927 - DNA, 25 bp, Homo sapien
agggcaagtgtttgactgacagtct

SEQ ID NO: 3168928 - DNA, 25 bp, Homo sapien
tttgaaggctccccgtaggaatgca

SEQ ID NO: 3168929 - DNA, 25 bp, Homo sapien
tctgtcacgtgggttatttgaaggc

SEQ ID NO: 3168930 - DNA, 25 bp, Homo sapien
ctgcatctggttcctctaaggctgg

SEQ ID NO: 3168931 - DNA, 25 bp, Homo sapien
tgagggctggagttctaagaggcag

SEQ ID NO: 3168932 - DNA, 25 bp, Homo sapien
ggctggagttctaagaggcaggaaa

SEQ ID NO: 3168933 - DNA, 25 bp, Homo sapien
aggtgagggctggagttctaagagg

SEQ ID NO: 3168934 - DNA, 25 bp, Homo sapien
ttagcagagtcagttttttcaaaca

SEQ ID NO: 3168935 - DNA, 25 bp, Homo sapien
cattagcagagtcagttttttcaaa

SEQ ID NO: 3168936 - DNA, 25 bp, Homo sapien
tcattagcagagtcagttttttcaa

SEQ ID NO: 3168937 - DNA, 25 bp, Homo sapien
attagcagagtcagttttttcaaac

SEQ ID NO: 3168938 - DNA, 25 bp, Homo sapien
ggcacagtgctccaacaatgattct

SEQ ID NO: 3168939 - DNA, 25 bp, Homo sapien
cattccttagtataacttggaaaca

SEQ ID NO: 3168940 - DNA, 25 bp, Homo sapien
ccaaacccttgatttgagactcaga

SEQ ID NO: 3168941 - DNA, 25 bp, Homo sapien
gagactcagaacaaatagaacatac

SEQ ID NO: 3168942 - DNA, 25 bp, Homo sapien
gaagtggatcttcaaggtgctccat

SEQ ID NO: 3168943 - DNA, 25 bp, Homo sapien
ggaagtggatcttcaaggtgctcca

SEQ ID NO: 3168944 - DNA, 25 bp, Homo sapien
tgaaagaaccttccatgctcatggg

SEQ ID NO: 3168945 - DNA, 25 bp, Homo sapien
gatggtatatctagaaaatcccaat

SEQ ID NO: 3168946 - DNA, 25 bp, Homo sapien
tgatggtatatctagaaaatcccaa

SEQ ID NO: 3168947 - DNA, 25 bp, Homo sapien
ggtatatctagaaaatcccaatgtc

SEQ ID NO: 3168948 - DNA, 25 bp, Homo sapien
caggccaacattcagattagggaaa

SEQ ID NO: 3168949 - DNA, 25 bp, Homo sapien
ggccaacattcagattagggaaata

SEQ ID NO: 3168950 - DNA, 25 bp, Homo sapien
gcaggccaacattcagattagggaa

SEQ ID NO: 3168951 - DNA, 25 bp, Homo sapien
ccaacattcagattagggaaataca

SEQ ID NO: 3168952 - DNA, 25 bp, Homo sapien
tgtaattccagtaatcttgctgtag

SEQ ID NO: 3168953 - DNA, 25 bp, Homo sapien
tgccagaaaggtagttactgctgtt

SEQ ID NO: 3168954 - DNA, 25 bp, Homo sapien
aatgccagaaaggtagttactgctg

SEQ ID NO: 3168955 - DNA, 25 bp, Homo sapien
ttccagtaatcttgctgtagcatgc

SEQ ID NO: 3168956 - DNA, 25 bp, Homo sapien
tataggaaggtgtgccttcatcacc

SEQ ID NO: 3168957 - DNA, 25 bp, Homo sapien
gtttatcccataaggccatttgctg

SEQ ID NO: 3168958 - DNA, 25 bp, Homo sapien
ccatttgctgaagcgggacggaaga

SEQ ID NO: 3168959 - DNA, 25 bp, Homo sapien
cacttcctgctgacacatactttta

SEQ ID NO: 3168960 - DNA, 25 bp, Homo sapien
gatgttacccttgagtaagtcgttg

SEQ ID NO: 3168961 - DNA, 25 bp, Homo sapien
cccttgagtaagtcgttggttctag

SEQ ID NO: 3168962 - DNA, 25 bp, Homo sapien
tgagtaagtcgttggttctagtcac

SEQ ID NO: 3168963 - DNA, 25 bp, Homo sapien
aagtcgttggttctagtcaccagca

SEQ ID NO: 3168964 - DNA, 25 bp, Homo sapien
ttcagagcactgttgactaacttgt

SEQ ID NO: 3168965 - DNA, 25 bp, Homo sapien
gggaaggctgttcaagtttcaatac

SEQ ID NO: 3168966 - DNA, 25 bp, Homo sapien
ggctgttcaagtttcaatactaggt

SEQ ID NO: 3168967 - DNA, 25 bp, Homo sapien
ttgacaagggatgtctgggctgcat

SEQ ID NO: 3168968 - DNA, 25 bp, Homo sapien
cgtacttgcggcatatgggagatgc

SEQ ID NO: 3168969 - DNA, 25 bp, Homo sapien
aatgtatatgtaggtgtttgggata

SEQ ID NO: 3168970 - DNA, 25 bp, Homo sapien
ctgggccacgtacttgcggcatatg

SEQ ID NO: 3168971 - DNA, 25 bp, Homo sapien
tgcggcatatgggagatgcgaatat

SEQ ID NO: 3168972 - DNA, 25 bp, Homo sapien
tgctttttcctcctatggaaactgg

SEQ ID NO: 3168973 - DNA, 25 bp, Homo sapien
taggctgctttttcctcctatggaa

SEQ ID NO: 3168974 - DNA, 25 bp, Homo sapien
gctgctttttcctcctatggaaact

SEQ ID NO: 3168975 - DNA, 25 bp, Homo sapien
cttaggctgctttttcctcctatgg

SEQ ID NO: 3168976 - DNA, 25 bp, Homo sapien
gccaaaagaacagaccttcaagagg

SEQ ID NO: 3168977 - DNA, 25 bp, Homo sapien
ccaaaagaacagaccttcaagaggg

SEQ ID NO: 3168978 - DNA, 25 bp, Homo sapien
ttggtgtgggaagaatcgatgaggg

SEQ ID NO: 3168979 - DNA, 25 bp, Homo sapien
tgtgggaagaatcgatgagggaaaa

SEQ ID NO: 3168980 - DNA, 25 bp, Homo sapien
gttggtgtgggaagaatcgatgagg

SEQ ID NO: 3168981 - DNA, 25 bp, Homo sapien
gaatcaagagacctagatttaacag

SEQ ID NO: 3168982 - DNA, 25 bp, Homo sapien
ttttcaccagaatcaagagacctag

SEQ ID NO: 3168983 - DNA, 25 bp, Homo sapien
tagatttaacagctcattcttctta

SEQ ID NO: 3168984 - DNA, 25 bp, Homo sapien
gagacctagatttaacagctcattc

SEQ ID NO: 3168985 - DNA, 25 bp, Homo sapien
tgcccaactggtgataccactgtga

SEQ ID NO: 3168986 - DNA, 25 bp, Homo sapien
caactggtgataccactgtgacata

SEQ ID NO: 3168987 - DNA, 25 bp, Homo sapien
ggtgataccactgtgacatatgttc

SEQ ID NO: 3168988 - DNA, 25 bp, Homo sapien
agctttttgcccaactggtgatacc

SEQ ID NO: 3168989 - DNA, 25 bp, Homo sapien
ccacctctggggtagcactcgtcct

SEQ ID NO: 3168990 - DNA, 25 bp, Homo sapien
tcaagctaccacctctggggtagca

SEQ ID NO: 3168991 - DNA, 25 bp, Homo sapien
gctaccacctctggggtagcactcg

SEQ ID NO: 3168992 - DNA, 25 bp, Homo sapien
acctctggggtagcactcgtcctca

SEQ ID NO: 3168993 - DNA, 25 bp, Homo sapien
tgccaaagttccgaagagaaatgag

SEQ ID NO: 3168994 - DNA, 25 bp, Homo sapien
cttgccaaagttccgaagagaaatg

SEQ ID NO: 3168995 - DNA, 25 bp, Homo sapien
aagagaaatgagagggcagggattc

SEQ ID NO: 3168996 - DNA, 25 bp, Homo sapien
agaaatgagagggcagggattctct

SEQ ID NO: 3168997 - DNA, 25 bp, Homo sapien
aagcctggtcatctcccgcagtgtc

SEQ ID NO: 3168998 - DNA, 25 bp, Homo sapien
tactgtcaagacaggcaagcctggt

SEQ ID NO: 3168999 - DNA, 25 bp, Homo sapien
aaaacaggctgactcaatggttccc

SEQ ID NO: 3169000 - DNA, 25 bp, Homo sapien
cacagaagacttgctttgccagaca

SEQ ID NO: 3169001 - DNA, 25 bp, Homo sapien
gattctgaaccaacggcttccgcaa

SEQ ID NO: 3169002 - DNA, 25 bp, Homo sapien
aaatcttcagctgctaccacaggag

SEQ ID NO: 3169003 - DNA, 25 bp, Homo sapien
tctctgttaactctatggatgtggc

SEQ ID NO: 3169004 - DNA, 25 bp, Homo sapien
cagagtctccctaatacagtgcaaa

SEQ ID NO: 3169005 - DNA, 25 bp, Homo sapien
ctggaggtagagttcagacttgagc

SEQ ID NO: 3169006 - DNA, 25 bp, Homo sapien
ggtagagttcagacttgagctctga

SEQ ID NO: 3169007 - DNA, 25 bp, Homo sapien
tctgtctggaggtagagttcagact

SEQ ID NO: 3169008 - DNA, 25 bp, Homo sapien
agagttcagacttgagctctgagtc

SEQ ID NO: 3169009 - DNA, 25 bp, Homo sapien
agaagcagagatgtcgagatgaact

SEQ ID NO: 3169010 - DNA, 25 bp, Homo sapien
ctgctgaccagcagcatgagaagca

SEQ ID NO: 3169011 - DNA, 25 bp, Homo sapien
gcagagatgtcgagatgaacttcat

SEQ ID NO: 3169012 - DNA, 25 bp, Homo sapien
gaggctgctgaccagcagcatgaga

SEQ ID NO: 3169013 - DNA, 25 bp, Homo sapien
gcttgtgtaatagacctccagaaca

SEQ ID NO: 3169014 - DNA, 25 bp, Homo sapien
taaagactgagctctcttggacaca

SEQ ID NO: 3169015 - DNA, 25 bp, Homo sapien
gggcaagatttgaattcgatcaatg

SEQ ID NO: 3169016 - DNA, 25 bp, Homo sapien
caatgaagcgtctagggataaagac

SEQ ID NO: 3169017 - DNA, 25 bp, Homo sapien
cattctttgtatccattcagcttga

SEQ ID NO: 3169018 - DNA, 25 bp, Homo sapien
gcttgagggtccacacacacaattg

SEQ ID NO: 3169019 - DNA, 25 bp, Homo sapien
tccatcattctttgtatccattcag

SEQ ID NO: 3169020 - DNA, 25 bp, Homo sapien
tctttgtatccattcagcttgaggg

SEQ ID NO: 3169021 - DNA, 25 bp, Homo sapien
cactggaactggtagagttgaagaa

SEQ ID NO: 3169022 - DNA, 25 bp, Homo sapien
aacactggaactggtagagttgaag

SEQ ID NO: 3169023 - DNA, 25 bp, Homo sapien
ctggaactggtagagttgaagaact

SEQ ID NO: 3169024 - DNA, 25 bp, Homo sapien
tggaactggtagagttgaagaactt

SEQ ID NO: 3169025 - DNA, 25 bp, Homo sapien
caaactccaagtgtatatagggtgc

SEQ ID NO: 3169026 - DNA, 25 bp, Homo sapien
gaagaagcttgagtttgccccatca

SEQ ID NO: 3169027 - DNA, 25 bp, Homo sapien
taaagaattagataccagagtcccc

SEQ ID NO: 3169028 - DNA, 25 bp, Homo sapien
catggattcctttgcctcttgacag

SEQ ID NO: 3169029 - DNA, 25 bp, Homo sapien
aagcctgaacgtcctggagctccca

SEQ ID NO: 3169030 - DNA, 25 bp, Homo sapien
ccagcggaagcctgaacgtcctgga

SEQ ID NO: 3169031 - DNA, 25 bp, Homo sapien
tcaatccagcggaagcctgaacgtc

SEQ ID NO: 3169032 - DNA, 25 bp, Homo sapien
gcggaagcctgaacgtcctggagct

SEQ ID NO: 3169033 - DNA, 25 bp, Homo sapien
gtctcagaccaggctgaacatcccc

SEQ ID NO: 3169034 - DNA, 25 bp, Homo sapien
ctcagaccaggctgaacatccccaa

SEQ ID NO: 3169035 - DNA, 25 bp, Homo sapien
tctcagaccaggctgaacatcccca

SEQ ID NO: 3169036 - DNA, 25 bp, Homo sapien
tgtctcagaccaggctgaacatccc

SEQ ID NO: 3169037 - DNA, 25 bp, Homo sapien
aagaacctccttgaaacggctgcag

SEQ ID NO: 3169038 - DNA, 25 bp, Homo sapien
cagggaatccggtccaacgttaatg

SEQ ID NO: 3169039 - DNA, 25 bp, Homo sapien
aacgttaatgtcaccgccctcactg

SEQ ID NO: 3169040 - DNA, 25 bp, Homo sapien
tttccttgtccgcaatccctgggag

SEQ ID NO: 3169041 - DNA, 25 bp, Homo sapien
caccattcaccactggatgccagca

SEQ ID NO: 3169042 - DNA, 25 bp, Homo sapien
tgatgtttccacattacaccattca

SEQ ID NO: 3169043 - DNA, 25 bp, Homo sapien
cagcagagcactgcggcttgaagtc

SEQ ID NO: 3169044 - DNA, 25 bp, Homo sapien
cattcaccactggatgccagcagag

SEQ ID NO: 3169045 - DNA, 25 bp, Homo sapien
tcctgggtcagttctagggtacact

SEQ ID NO: 3169046 - DNA, 25 bp, Homo sapien
ctgggtcagttctagggtacactgc

SEQ ID NO: 3169047 - DNA, 25 bp, Homo sapien
gggtcagttctagggtacactgcat

SEQ ID NO: 3169048 - DNA, 25 bp, Homo sapien
tcagttctagggtacactgcattac

SEQ ID NO: 3169049 - DNA, 25 bp, Homo sapien
ctagacatcattctccttgtcttgc

SEQ ID NO: 3169050 - DNA, 25 bp, Homo sapien
catcattctccttgtcttgccagtc

SEQ ID NO: 3169051 - DNA, 25 bp, Homo sapien
gacatcattctccttgtcttgccag

SEQ ID NO: 3169052 - DNA, 25 bp, Homo sapien
tagacatcattctccttgtcttgcc

SEQ ID NO: 3169053 - DNA, 25 bp, Homo sapien
tggactgcatgtcaccgtttcctcc

SEQ ID NO: 3169054 - DNA, 25 bp, Homo sapien
catgaacaacgaagttagttaatgc

SEQ ID NO: 3169055 - DNA, 25 bp, Homo sapien
aagactttggactgcatgtcaccgt

SEQ ID NO: 3169056 - DNA, 25 bp, Homo sapien
caacgaagttagttaatgctggcaa

SEQ ID NO: 3169057 - DNA, 25 bp, Homo sapien
atgaggctctgggacagtgatacat

SEQ ID NO: 3169058 - DNA, 25 bp, Homo sapien
tctgccagctgggttaagaggactt

SEQ ID NO: 3169059 - DNA, 25 bp, Homo sapien
cagacgctgttggaaggcactcctt

SEQ ID NO: 3169060 - DNA, 25 bp, Homo sapien
tgctaacagaaccttaaactgggaa

SEQ ID NO: 3169061 - DNA, 25 bp, Homo sapien
aaactgggaatctaaatcaatcggc

SEQ ID NO: 3169062 - DNA, 25 bp, Homo sapien
gagtctgtgtagctgcttgccactt

SEQ ID NO: 3169063 - DNA, 25 bp, Homo sapien
agtctgtgtagctgcttgccacttc

SEQ ID NO: 3169064 - DNA, 25 bp, Homo sapien
cgagtctgtgtagctgcttgccact

SEQ ID NO: 3169065 - DNA, 25 bp, Homo sapien
tgctctattctgctgttctattccc

SEQ ID NO: 3169066 - DNA, 25 bp, Homo sapien
gataaaatgggagaagtatttgctc

SEQ ID NO: 3169067 - DNA, 25 bp, Homo sapien
aatgggagaagtatttgctctattc

SEQ ID NO: 3169068 - DNA, 25 bp, Homo sapien
tctattctgctgttctattcccctt

SEQ ID NO: 3169069 - DNA, 25 bp, Homo sapien
cttccaatggaattgtgtattcagg

SEQ ID NO: 3169070 - DNA, 25 bp, Homo sapien
tgcgttaggctcttaagtttcccaa

SEQ ID NO: 3169071 - DNA, 25 bp, Homo sapien
tcattcctgtttatgcgttaggctc

SEQ ID NO: 3169072 - DNA, 25 bp, Homo sapien
ggtgacatggtggtatacatgtgtg

SEQ ID NO: 3169073 - DNA, 25 bp, Homo sapien
tcaggaacttaatccatggtgacat

SEQ ID NO: 3169074 - DNA, 25 bp, Homo sapien
ggctgctgaaatgatagtctataaa

SEQ ID NO: 3169075 - DNA, 25 bp, Homo sapien
tctgctattattgtgcaaatcctga

SEQ ID NO: 3169076 - DNA, 25 bp, Homo sapien
tattattgtgcaaatcctgagcctg

SEQ ID NO: 3169077 - DNA, 25 bp, Homo sapien
ctttgtggctctgctattattgtgc

SEQ ID NO: 3169078 - DNA, 25 bp, Homo sapien
tgtggctctgctattattgtgcaaa

SEQ ID NO: 3169079 - DNA, 25 bp, Homo sapien
ttaagagacctttgtgatgaggcat

SEQ ID NO: 3169080 - DNA, 25 bp, Homo sapien
cacagaagcctttgtgttggccagc

SEQ ID NO: 3169081 - DNA, 25 bp, Homo sapien
ggccagcctttaggaagtcctccaa

SEQ ID NO: 3169082 - DNA, 25 bp, Homo sapien
cactctcatgtgaagtgaatcttga

SEQ ID NO: 3169083 - DNA, 25 bp, Homo sapien
ccagtgtgagaaggctgtcactgac

SEQ ID NO: 3169084 - DNA, 25 bp, Homo sapien
tttgtgcagtataaacctctgcttt

SEQ ID NO: 3169085 - DNA, 25 bp, Homo sapien
ggtttttgactctttatttgtgcag

SEQ ID NO: 3169086 - DNA, 25 bp, Homo sapien
ttggtttttgactctttatttgtgc

SEQ ID NO: 3169087 - DNA, 25 bp, Homo sapien
tctgcttttaggttgatacgtctct

SEQ ID NO: 3169088 - DNA, 25 bp, Homo sapien
tacaaagtgtgcgtgcaaaaggaca

SEQ ID NO: 3169089 - DNA, 25 bp, Homo sapien
tttctctctataagggccagggtgt

SEQ ID NO: 3169090 - DNA, 25 bp, Homo sapien
caagtgccaactaattgtccatggg

SEQ ID NO: 3169091 - DNA, 25 bp, Homo sapien
gattggttactgctcacacatgatg

SEQ ID NO: 3169092 - DNA, 25 bp, Homo sapien
tcaatagaactacttggaatatttt

SEQ ID NO: 3169093 - DNA, 25 bp, Homo sapien
tagaactacttggaatattttgaga

SEQ ID NO: 3169094 - DNA, 25 bp, Homo sapien
gaaggttgaatgtttcatctttggc

SEQ ID NO: 3169095 - DNA, 25 bp, Homo sapien
ttttgagaaggttgaatgtttcatc

SEQ ID NO: 3169096 - DNA, 25 bp, Homo sapien
gatttggatggctgtgttactgcac

SEQ ID NO: 3169097 - DNA, 25 bp, Homo sapien
tgttcagggttatgagtgacaaatt

SEQ ID NO: 3169098 - DNA, 25 bp, Homo sapien
cagcactgagatgtgcactatgggc

SEQ ID NO: 3169099 - DNA, 25 bp, Homo sapien
tgtgaaattcctgagcggtgctctg

SEQ ID NO: 3169100 - DNA, 25 bp, Homo sapien
gtcctacaccaggaaatagggtgat

SEQ ID NO: 3169101 - DNA, 25 bp, Homo sapien
tggcagttccttgtggcatacattt

SEQ ID NO: 3169102 - DNA, 25 bp, Homo sapien
caagctttaacccagttggcagttc

SEQ ID NO: 3169103 - DNA, 25 bp, Homo sapien
tgtaaatgtctctattaaaccccag

SEQ ID NO: 3169104 - DNA, 25 bp, Homo sapien
gaaacaacccttaagatgacagatt

SEQ ID NO: 3169105 - DNA, 25 bp, Homo sapien
gcaatgtgagcaatatttcctacca

SEQ ID NO: 3169106 - DNA, 25 bp, Homo sapien
taaaagtgcctagtgatagaggcgt

SEQ ID NO: 3169107 - DNA, 25 bp, Homo sapien
gcaaattgattacctgaagcatagt

SEQ ID NO: 3169108 - DNA, 25 bp, Homo sapien
aggatgcccacggaatgaatttttc

SEQ ID NO: 3169109 - DNA, 25 bp, Homo sapien
aaagtaagtaatctgtattgccaca

SEQ ID NO: 3169110 - DNA, 25 bp, Homo sapien
gaaaacagatgttatatgacctatg

SEQ ID NO: 3169111 - DNA, 25 bp, Homo sapien
agaatgtggtatgtttaggatgccc

SEQ ID NO: 3169112 - DNA, 25 bp, Homo sapien
aatcataagttccagcatagtggcc

SEQ ID NO: 3169113 - DNA, 25 bp, Homo sapien
tctttatcgtaagacgcccttcttc

SEQ ID NO: 3169114 - DNA, 25 bp, Homo sapien
aaaattaaatatctcggccgggcat

SEQ ID NO: 3169115 - DNA, 25 bp, Homo sapien
tccccactccttcacataaagtaag

SEQ ID NO: 3169116 - DNA, 25 bp, Homo sapien
tcatattttcagtttagcatagcta

SEQ ID NO: 3169117 - DNA, 25 bp, Homo sapien
ccactgcctggcctattaattttac

SEQ ID NO: 3169118 - DNA, 25 bp, Homo sapien
ttctcatattttcagtttagcatag

SEQ ID NO: 3169119 - DNA, 25 bp, Homo sapien
accactgcctggcctattaatttta

SEQ ID NO: 3169120 - DNA, 25 bp, Homo sapien
gtgggccccgtacagacttctgctt

SEQ ID NO: 3169121 - DNA, 25 bp, Homo sapien
tctgtgggccccgtacagacttctg

SEQ ID NO: 3169122 - DNA, 25 bp, Homo sapien
gctgtcttaagaactctgtcatgag

SEQ ID NO: 3169123 - DNA, 25 bp, Homo sapien
caacactaggaaccacaactggaca

SEQ ID NO: 3169124 - DNA, 25 bp, Homo sapien
tgttgaacatagagtagtcccaccc

SEQ ID NO: 3169125 - DNA, 25 bp, Homo sapien
gaagatatccttgcgaaactcatag

SEQ ID NO: 3169126 - DNA, 25 bp, Homo sapien
taataggcaggtatactaaacagtg

SEQ ID NO: 3169127 - DNA, 25 bp, Homo sapien
gctcttaaatttaggcctgtgatcc

SEQ ID NO: 3169128 - DNA, 25 bp, Homo sapien
cacacccatcctgaacatattactt

SEQ ID NO: 3169129 - DNA, 25 bp, Homo sapien
ttgtttatactagcctaggctggag

SEQ ID NO: 3169130 - DNA, 25 bp, Homo sapien
tttgaccttgtttatactagcctag

SEQ ID NO: 3169131 - DNA, 25 bp, Homo sapien
ccttgtttatactagcctaggctgg

SEQ ID NO: 3169132 - DNA, 25 bp, Homo sapien
ctttctgctcaatacaaagcaccac

SEQ ID NO: 3169133 - DNA, 25 bp, Homo sapien
tctgctcaatacaaagcaccacctt

SEQ ID NO: 3169134 - DNA, 25 bp, Homo sapien
tgctcaatacaaagcaccaccttct

SEQ ID NO: 3169135 - DNA, 25 bp, Homo sapien
tcaatacaaagcaccaccttcttgg

SEQ ID NO: 3169136 - DNA, 25 bp, Homo sapien
gttagatgtctgcacaacttctctg

SEQ ID NO: 3169137 - DNA, 25 bp, Homo sapien
tcagtctagttaaaatctggtccag

SEQ ID NO: 3169138 - DNA, 25 bp, Homo sapien
tatgttcagattcccgtctagccac

SEQ ID NO: 3169139 - DNA, 25 bp, Homo sapien
aaattctctagcataccatctggcc

SEQ ID NO: 3169140 - DNA, 25 bp, Homo sapien
taatagatactgcaagatgtagctc

SEQ ID NO: 3169141 - DNA, 25 bp, Homo sapien
tatcagtactactattaaagacatt

SEQ ID NO: 3169142 - DNA, 25 bp, Homo sapien
aaagacattgggaaccatggaatga

SEQ ID NO: 3169143 - DNA, 25 bp, Homo sapien
caggttggtggcagtttgaaattaa

SEQ ID NO: 3169144 - DNA, 25 bp, Homo sapien
ggtacttgtagtccttgctttatga

SEQ ID NO: 3169145 - DNA, 25 bp, Homo sapien
tggtacttgtagtccttgctttatg

SEQ ID NO: 3169146 - DNA, 25 bp, Homo sapien
gctcctctagcattctgtgcattct

SEQ ID NO: 3169147 - DNA, 25 bp, Homo sapien
ttctgtgctcctctagcattctgtg

SEQ ID NO: 3169148 - DNA, 25 bp, Homo sapien
aggaggaaaatattgaatgttccaa

SEQ ID NO: 3169149 - DNA, 25 bp, Homo sapien
ggaaaatattgaatgttccaaatgc

SEQ ID NO: 3169150 - DNA, 25 bp, Homo sapien
tattgaatgttccaaatgcaaagaa

SEQ ID NO: 3169151 - DNA, 25 bp, Homo sapien
aatattgaatgttccaaatgcaaag

SEQ ID NO: 3169152 - DNA, 25 bp, Homo sapien
catcagtccacatgcacatttggag

SEQ ID NO: 3169153 - DNA, 25 bp, Homo sapien
catttggagagcacttaatctttta

SEQ ID NO: 3169154 - DNA, 25 bp, Homo sapien
ttttgagcagtggaagtatcctttc

SEQ ID NO: 3169155 - DNA, 25 bp, Homo sapien
tttcttactgaatagcttgatagct

SEQ ID NO: 3169156 - DNA, 25 bp, Homo sapien
gagaattgtgaaatgtggattagaa

SEQ ID NO: 3169157 - DNA, 25 bp, Homo sapien
tgagagagtgttaggattgagtttt

SEQ ID NO: 3169158 - DNA, 25 bp, Homo sapien
cagtgtgcggaaagtagtgagctat

SEQ ID NO: 3169159 - DNA, 25 bp, Homo sapien
gaagttcatttcctagattgttgag

SEQ ID NO: 3169160 - DNA, 25 bp, Homo sapien
gaggcgaaggcttattttggcgttc

SEQ ID NO: 3169161 - DNA, 25 bp, Homo sapien
ttttggcgttccaactgcaagcctt

SEQ ID NO: 3169162 - DNA, 25 bp, Homo sapien
ctccgcgtctcctgagaggcgaagg

SEQ ID NO: 3169163 - DNA, 25 bp, Homo sapien
gcttattttggcgttccaactgcaa

SEQ ID NO: 3169164 - DNA, 25 bp, Homo sapien
gactcgccgattgccgtcgccgtgg

SEQ ID NO: 3169165 - DNA, 25 bp, Homo sapien
ggtcggaggcgggactcgccgattg

SEQ ID NO: 3169166 - DNA, 25 bp, Homo sapien
aggtgagggtcggaggcgggactcg

SEQ ID NO: 3169167 - DNA, 25 bp, Homo sapien
ggaggcgggactcgccgattgccgt

SEQ ID NO: 3169168 - DNA, 25 bp, Homo sapien
agctggcgtctctgttcaacctcgg

SEQ ID NO: 3169169 - DNA, 25 bp, Homo sapien
tctgcgtggctctcggagcagtagc

SEQ ID NO: 3169170 - DNA, 25 bp, Homo sapien
gcaccgaaagctggcgtctctgttc

SEQ ID NO: 3169171 - DNA, 25 bp, Homo sapien
gtgtgtgagcgggagcgaaggcacc

SEQ ID NO: 3169172 - DNA, 25 bp, Homo sapien
accgatatcgcccggacgcctctcc

SEQ ID NO: 3169173 - DNA, 25 bp, Homo sapien
ataccgatatcgcccggacgcctct

SEQ ID NO: 3169174 - DNA, 25 bp, Homo sapien
cgatatcgcccggacgcctctcccc

SEQ ID NO: 3169175 - DNA, 25 bp, Homo sapien
tcaataccgatatcgcccggacgcc

SEQ ID NO: 3169176 - DNA, 25 bp, Homo sapien
tcctcgttctcgcactctctgcacc

SEQ ID NO: 3169177 - DNA, 25 bp, Homo sapien
ctcctcgttctcgcactctctgcac

SEQ ID NO: 3169178 - DNA, 25 bp, Homo sapien
gagtgactgactcccgccagcccct

SEQ ID NO: 3169179 - DNA, 25 bp, Homo sapien
ctccgcgccggggagtgactgactc

SEQ ID NO: 3169180 - DNA, 25 bp, Homo sapien
ggagtgactgactcccgccagcccc

SEQ ID NO: 3169181 - DNA, 25 bp, Homo sapien
aaccctccgcgccggggagtgactg

SEQ ID NO: 3169182 - DNA, 25 bp, Homo sapien
tatcgctgagcgtcacaggttcttt

SEQ ID NO: 3169183 - DNA, 25 bp, Homo sapien
gacctacgctctgcttcgctgtcag

SEQ ID NO: 3169184 - DNA, 25 bp, Homo sapien
cctttgacgatacaacttacagatg

SEQ ID NO: 3169185 - DNA, 25 bp, Homo sapien
gtgcagtaaacagcgcccacacaag

SEQ ID NO: 3169186 - DNA, 25 bp, Homo sapien
gtctacaacgagaagggagaattag

SEQ ID NO: 3169187 - DNA, 25 bp, Homo sapien
agctacaaacaacaaactaaagtct

SEQ ID NO: 3169188 - DNA, 25 bp, Homo sapien
tcacagccaggttcaccaagtaaac

SEQ ID NO: 3169189 - DNA, 25 bp, Homo sapien
gatggcatggataagctacaaacaa

SEQ ID NO: 3169190 - DNA, 25 bp, Homo sapien
tgcaaccaacgcaacgtgcttagtg

SEQ ID NO: 3169191 - DNA, 25 bp, Homo sapien
gcaacgtgcttagtgtgctaaacac

SEQ ID NO: 3169192 - DNA, 25 bp, Homo sapien
ccccaagagatgaaggcattttaca

SEQ ID NO: 3169193 - DNA, 25 bp, Homo sapien
ggcctaagatgaattgcaaccaacg

SEQ ID NO: 3169194 - DNA, 25 bp, Homo sapien
gaaaagaaaatagtctgtcgtcttg

SEQ ID NO: 3169195 - DNA, 25 bp, Homo sapien
actgaggggcttttttactcactca

SEQ ID NO: 3169196 - DNA, 25 bp, Homo sapien
agtctgtcgtcttgtgaactgaggg

SEQ ID NO: 3169197 - DNA, 25 bp, Homo sapien
cataggtagaaaagaaaatagtctg

SEQ ID NO: 3169198 - DNA, 25 bp, Homo sapien
tcacagaagatggtgtggggctggt

SEQ ID NO: 3169199 - DNA, 25 bp, Homo sapien
caagatgccattgaggcaggtccac

SEQ ID NO: 3169200 - DNA, 25 bp, Homo sapien
cctgaagtgacttgcttggctttgc

SEQ ID NO: 3169201 - DNA, 25 bp, Homo sapien
gagacttcttccaggcttaaggcca

SEQ ID NO: 3169202 - DNA, 25 bp, Homo sapien
tctccctgggagagtgtttgtgtgc

SEQ ID NO: 3169203 - DNA, 25 bp, Homo sapien
attaagtggtagatgtagggtagta

SEQ ID NO: 3169204 - DNA, 25 bp, Homo sapien
tattaagtggtagatgtagggtagt

SEQ ID NO: 3169205 - DNA, 25 bp, Homo sapien
gtggtagatgtagggtagtagtggt

SEQ ID NO: 3169206 - DNA, 25 bp, Homo sapien
taagtggtagatgtagggtagtagt

SEQ ID NO: 3169207 - DNA, 25 bp, Homo sapien
gattgcgttcacgaaattgttccta

SEQ ID NO: 3169208 - DNA, 25 bp, Homo sapien
ggttccgttctagaatccgcaaaga

SEQ ID NO: 3169209 - DNA, 25 bp, Homo sapien
catgttgggcactccggattgcgtt

SEQ ID NO: 3169210 - DNA, 25 bp, Homo sapien
aaaatgagctttgctgccggcgtgg

SEQ ID NO: 3169211 - DNA, 25 bp, Homo sapien
tggaaaggctatgcctttgatgatg

SEQ ID NO: 3169212 - DNA, 25 bp, Homo sapien
cttggaaaggctatgcctttgatga

SEQ ID NO: 3169213 - DNA, 25 bp, Homo sapien
ttggaaaggctatgcctttgatgat

SEQ ID NO: 3169214 - DNA, 25 bp, Homo sapien
gaacaaagtgatgtctgataaacca

SEQ ID NO: 3169215 - DNA, 25 bp, Homo sapien
cactcggatgtttacagaacaagaa

SEQ ID NO: 3169216 - DNA, 25 bp, Homo sapien
agaacaagaacaaagtgatgtctga

SEQ ID NO: 3169217 - DNA, 25 bp, Homo sapien
gcaaaatgtctgttgggcactcgga

SEQ ID NO: 3169218 - DNA, 25 bp, Homo sapien
tctccacctcatatatctgtctcgg

SEQ ID NO: 3169219 - DNA, 25 bp, Homo sapien
tcccagtgccatatccagtgtcaaa

SEQ ID NO: 3169220 - DNA, 25 bp, Homo sapien
tctgtctcgggtataagcgttttaa

SEQ ID NO: 3169221 - DNA, 25 bp, Homo sapien
ctcaggttcgccttccatataggga

SEQ ID NO: 3169222 - DNA, 25 bp, Homo sapien
gatttcggaagcaaatgggtatggc

SEQ ID NO: 3169223 - DNA, 25 bp, Homo sapien
ctctgtaaatacagcaactttattg

SEQ ID NO: 3169224 - DNA, 25 bp, Homo sapien
ggtatggcaaactaagaacactggt

SEQ ID NO: 3169225 - DNA, 25 bp, Homo sapien
gaacactggtaaatggctccacgtt

SEQ ID NO: 3169226 - DNA, 25 bp, Homo sapien
cattttcttccgctattttgacctc

SEQ ID NO: 3169227 - DNA, 25 bp, Homo sapien
ccgctattttgacctctgatgcatt

SEQ ID NO: 3169228 - DNA, 25 bp, Homo sapien
tgtatcagactagtgcctcctgcaa

SEQ ID NO: 3169229 - DNA, 25 bp, Homo sapien
tcttccgctattttgacctctgatg

SEQ ID NO: 3169230 - DNA, 25 bp, Homo sapien
tacgtaaaagtctgcaacaatttca

SEQ ID NO: 3169231 - DNA, 25 bp, Homo sapien
ccttaatcgattaagttcaggcatt

SEQ ID NO: 3169232 - DNA, 25 bp, Homo sapien
tcttccttaatcgattaagttcagg

SEQ ID NO: 3169233 - DNA, 25 bp, Homo sapien
tttctggaacagctacgtaaaagtc

SEQ ID NO: 3169234 - DNA, 25 bp, Homo sapien
tatcttttggacaagtctgctggga

SEQ ID NO: 3169235 - DNA, 25 bp, Homo sapien
tgatacaacaccaaattcctcacgg

SEQ ID NO: 3169236 - DNA, 25 bp, Homo sapien
tggacaagacatcgagtggagcact

SEQ ID NO: 3169237 - DNA, 25 bp, Homo sapien
gcagtgtcctgctcatatgtggata

SEQ ID NO: 3169238 - DNA, 25 bp, Homo sapien
gaactttaatatccatgagtctcac

SEQ ID NO: 3169239 - DNA, 25 bp, Homo sapien
ctatgagttaaaaatgctacacatt

SEQ ID NO: 3169240 - DNA, 25 bp, Homo sapien
cattacaagaactttaatatccatg

SEQ ID NO: 3169241 - DNA, 25 bp, Homo sapien
tgctacacattacaagaactttaat

SEQ ID NO: 3169242 - DNA, 25 bp, Homo sapien
ttatataaccaaaacttctgattgt

SEQ ID NO: 3169243 - DNA, 25 bp, Homo sapien
acttctgattgttccaataatgcaa

SEQ ID NO: 3169244 - DNA, 25 bp, Homo sapien
tcccttatataaccaaaacttctga

SEQ ID NO: 3169245 - DNA, 25 bp, Homo sapien
tgattgttccaataatgcaaacaaa

SEQ ID NO: 3169246 - DNA, 25 bp, Homo sapien
ttaggactgcatacattacctcctg

SEQ ID NO: 3169247 - DNA, 25 bp, Homo sapien
cctgtgataactgagagagcaatat

SEQ ID NO: 3169248 - DNA, 25 bp, Homo sapien
gaaaaagctgtaaggaatactaatg

SEQ ID NO: 3169249 - DNA, 25 bp, Homo sapien
cattacctcctgaaagaagttgcaa

SEQ ID NO: 3169250 - DNA, 25 bp, Homo sapien
cagctaggccaagatgactaagagt

SEQ ID NO: 3169251 - DNA, 25 bp, Homo sapien
agctgcatcccacaagttctgacat

SEQ ID NO: 3169252 - DNA, 25 bp, Homo sapien
taactcagttgcaaatcagaacaca

SEQ ID NO: 3169253 - DNA, 25 bp, Homo sapien
taactcagcaaatggtctaccatgg

SEQ ID NO: 3169254 - DNA, 25 bp, Homo sapien
tgcacagcttccgttaaatttcctc

SEQ ID NO: 3169255 - DNA, 25 bp, Homo sapien
taaaatagcttagtatcatctggga

SEQ ID NO: 3169256 - DNA, 25 bp, Homo sapien
catgcatggaccttgtatcctataa

SEQ ID NO: 3169257 - DNA, 25 bp, Homo sapien
gaattcctgaactcacgaaaccgtc

SEQ ID NO: 3169258 - DNA, 25 bp, Homo sapien
cgcccagccacgtatattcttttgt

SEQ ID NO: 3169259 - DNA, 25 bp, Homo sapien
gacagtcttactgagttatgagttc

SEQ ID NO: 3169260 - DNA, 25 bp, Homo sapien
tcttttgtacaatacctactcaact

SEQ ID NO: 3169261 - DNA, 25 bp, Homo sapien
ttcttgttcagagctatgtgtggca

SEQ ID NO: 3169262 - DNA, 25 bp, Homo sapien
tgccactgaagagacatcactccca

SEQ ID NO: 3169263 - DNA, 25 bp, Homo sapien
taagtgaaagcaactacccataggc

SEQ ID NO: 3169264 - DNA, 25 bp, Homo sapien
gaactcattacatagagagcacggc

SEQ ID NO: 3169265 - DNA, 25 bp, Homo sapien
cagttgttcagttggctcaggagca

SEQ ID NO: 3169266 - DNA, 25 bp, Homo sapien
caagctgcaatgctgtgagctgcca

SEQ ID NO: 3169267 - DNA, 25 bp, Homo sapien
gatccatcgcccattgagtctaaga

SEQ ID NO: 3169268 - DNA, 25 bp, Homo sapien
ccaactgtgtaagtctgcaagcaga

SEQ ID NO: 3169269 - DNA, 25 bp, Homo sapien
gagcagactcaagctaacagccagc

SEQ ID NO: 3169270 - DNA, 25 bp, Homo sapien
tgttgctattttggtctggagaaag

SEQ ID NO: 3169271 - DNA, 25 bp, Homo sapien
tattttggtctggagaaagttctcc

SEQ ID NO: 3169272 - DNA, 25 bp, Homo sapien
agcattttggggatgtcacggccaa

SEQ ID NO: 3169273 - DNA, 25 bp, Homo sapien
ttggggatgtcacggccaatggaat

SEQ ID NO: 3169274 - DNA, 25 bp, Homo sapien
tacatatctatctcgcctacgagaa

SEQ ID NO: 3169275 - DNA, 25 bp, Homo sapien
ttatttacatatctatctcgcctac

SEQ ID NO: 3169276 - DNA, 25 bp, Homo sapien
tatctatctcgcctacgagaagtat

SEQ ID NO: 3169277 - DNA, 25 bp, Homo sapien
tatctcgcctacgagaagtattttt

SEQ ID NO: 3169278 - DNA, 25 bp, Homo sapien
catctacacgtctatcccatgaagg

SEQ ID NO: 3169279 - DNA, 25 bp, Homo sapien
tattgttagcctcataagggtttcc

SEQ ID NO: 3169280 - DNA, 25 bp, Homo sapien
cgaatgagtcatgaattcctgatgg

SEQ ID NO: 3169281 - DNA, 25 bp, Homo sapien
cattatctagagtaacgcctggcat

SEQ ID NO: 3169282 - DNA, 25 bp, Homo sapien
tttatcagctgccaggttgacaata

SEQ ID NO: 3169283 - DNA, 25 bp, Homo sapien
gctgccaggttgacaatacgcttgc

SEQ ID NO: 3169284 - DNA, 25 bp, Homo sapien
gacaatacgcttgccacaaaaccat

SEQ ID NO: 3169285 - DNA, 25 bp, Homo sapien
aggttgacaatacgcttgccacaaa

SEQ ID NO: 3169286 - DNA, 25 bp, Homo sapien
tatttgccaaaatctgtaatgggag

SEQ ID NO: 3169287 - DNA, 25 bp, Homo sapien
ctaatgacactcataaggaattatc

SEQ ID NO: 3169288 - DNA, 25 bp, Homo sapien
taaggaattatctttcagatccact

SEQ ID NO: 3169289 - DNA, 25 bp, Homo sapien
tttaataattcataacatggcctta

SEQ ID NO: 3169290 - DNA, 25 bp, Homo sapien
ataatcaacacccaacccaagaggc

SEQ ID NO: 3169291 - DNA, 25 bp, Homo sapien
ggaaagtctccaagaggttcatctg

SEQ ID NO: 3169292 - DNA, 25 bp, Homo sapien
aggttcatctgtaaagactgggtgg

SEQ ID NO: 3169293 - DNA, 25 bp, Homo sapien
ttcatctgtaaagactgggtggtac

SEQ ID NO: 3169294 - DNA, 25 bp, Homo sapien
tttatgccaatccttaactagaagt

SEQ ID NO: 3169295 - DNA, 25 bp, Homo sapien
ttatgccaatccttaactagaagtt

SEQ ID NO: 3169296 - DNA, 25 bp, Homo sapien
acattaatgatgagaaagcaagaag

SEQ ID NO: 3169297 - DNA, 25 bp, Homo sapien
tatacataacattaatgatgagaaa

SEQ ID NO: 3169298 - DNA, 25 bp, Homo sapien
cataacattaatgatgagaaagcaa

SEQ ID NO: 3169299 - DNA, 25 bp, Homo sapien
tacataacattaatgatgagaaagc

SEQ ID NO: 3169300 - DNA, 25 bp, Homo sapien
tgcttgcagattggcagctatctgg

SEQ ID NO: 3169301 - DNA, 25 bp, Homo sapien
cattaataactgcttgcagattggc

SEQ ID NO: 3169302 - DNA, 25 bp, Homo sapien
gattggcagctatctggtcacttga

SEQ ID NO: 3169303 - DNA, 25 bp, Homo sapien
taactgcttgcagattggcagctat

SEQ ID NO: 3169304 - DNA, 25 bp, Homo sapien
aacatgccacctttgggatgcggga

SEQ ID NO: 3169305 - DNA, 25 bp, Homo sapien
tagaactcatgtcatattttcagtg

SEQ ID NO: 3169306 - DNA, 25 bp, Homo sapien
ccgaagtacccagagaatccatgca

SEQ ID NO: 3169307 - DNA, 25 bp, Homo sapien
ggacctgctgtacaaatatacaaca

SEQ ID NO: 3169308 - DNA, 25 bp, Homo sapien
tctcaggcatatttctagtcacaaa

SEQ ID NO: 3169309 - DNA, 25 bp, Homo sapien
ggtcctcacttaatattgtcactag

SEQ ID NO: 3169310 - DNA, 25 bp, Homo sapien
tgtaccgtaggctaattaataagag

SEQ ID NO: 3169311 - DNA, 25 bp, Homo sapien
tatatcgcaataccacctcatgagc

SEQ ID NO: 3169312 - DNA, 25 bp, Homo sapien
ctacgaaggaaagcacgtaccacaa

SEQ ID NO: 3169313 - DNA, 25 bp, Homo sapien
ttgttgaactacgaaggaaagcacg

SEQ ID NO: 3169314 - DNA, 25 bp, Homo sapien
tgaactacgaaggaaagcacgtacc

SEQ ID NO: 3169315 - DNA, 25 bp, Homo sapien
cttcacttgttgaactacgaaggaa

SEQ ID NO: 3169316 - DNA, 25 bp, Homo sapien
ggcaacaatggatcaatcttcagta

SEQ ID NO: 3169317 - DNA, 25 bp, Homo sapien
caatggatcaatcttcagtaataaa

SEQ ID NO: 3169318 - DNA, 25 bp, Homo sapien
ttctttaggcaacaatggatcaatc

SEQ ID NO: 3169319 - DNA, 25 bp, Homo sapien
tttaggcaacaatggatcaatcttc

SEQ ID NO: 3169320 - DNA, 25 bp, Homo sapien
aaatgactgtacgatttttcaatgt

SEQ ID NO: 3169321 - DNA, 25 bp, Homo sapien
tcttattcttgaaatgactgtacga

SEQ ID NO: 3169322 - DNA, 25 bp, Homo sapien
caagtatgatcaataacaagacatc

SEQ ID NO: 3169323 - DNA, 25 bp, Homo sapien
aaaccactgaaagtaatttcacaat

SEQ ID NO: 3169324 - DNA, 25 bp, Homo sapien
ggcacaaagaacacatatgatgaca

SEQ ID NO: 3169325 - DNA, 25 bp, Homo sapien
tgctcctcctgacaagatggcacaa

SEQ ID NO: 3169326 - DNA, 25 bp, Homo sapien
tcagaaaactctgaggagctgactg

SEQ ID NO: 3169327 - DNA, 25 bp, Homo sapien
tcttggtttcttaggatctacttta

SEQ ID NO: 3169328 - DNA, 25 bp, Homo sapien
tctttcataatgggctttacctacc

SEQ ID NO: 3169329 - DNA, 25 bp, Homo sapien
aaggcctcttgagtgtattgggatc

SEQ ID NO: 3169330 - DNA, 25 bp, Homo sapien
aaaaggctgaagaaggcctcttgag

SEQ ID NO: 3169331 - DNA, 25 bp, Homo sapien
cataatgggctttacctacctttgt

SEQ ID NO: 3169332 - DNA, 25 bp, Homo sapien
actggcaccttgatccctgctgatc

SEQ ID NO: 3169333 - DNA, 25 bp, Homo sapien
tagagatccccaggtcgggatgacc

SEQ ID NO: 3169334 - DNA, 25 bp, Homo sapien
tgttgcttcgtaaggatgttcccgc

SEQ ID NO: 3169335 - DNA, 25 bp, Homo sapien
tctgtatgtgaaccactgccttttc

SEQ ID NO: 3169336 - DNA, 25 bp, Homo sapien
tattgaacttggcatggaattttca

SEQ ID NO: 3169337 - DNA, 25 bp, Homo sapien
attgaacttggcatggaattttcac

SEQ ID NO: 3169338 - DNA, 25 bp, Homo sapien
ttattgaacttggcatggaattttc

SEQ ID NO: 3169339 - DNA, 25 bp, Homo sapien
ggagtgagataaacactacaatccc

SEQ ID NO: 3169340 - DNA, 25 bp, Homo sapien
gtgagataaacactacaatccccat

SEQ ID NO: 3169341 - DNA, 25 bp, Homo sapien
gagataaacactacaatccccatat

SEQ ID NO: 3169342 - DNA, 25 bp, Homo sapien
gagtgagataaacactacaatcccc

SEQ ID NO: 3169343 - DNA, 25 bp, Homo sapien
cattttaaggaatgggacttatcta

SEQ ID NO: 3169344 - DNA, 25 bp, Homo sapien
ccaaatctagaagtactacagacca

SEQ ID NO: 3169345 - DNA, 25 bp, Homo sapien
aataaatatgaagggataagggctc

SEQ ID NO: 3169346 - DNA, 25 bp, Homo sapien
ttggaggtattggactgagagcacc

SEQ ID NO: 3169347 - DNA, 25 bp, Homo sapien
ctgggagtgttcttgcagtcgtagt

SEQ ID NO: 3169348 - DNA, 25 bp, Homo sapien
tcttgcagtcgtagtgcatttgttc

SEQ ID NO: 3169349 - DNA, 25 bp, Homo sapien
ggagtgttcttgcagtcgtagtgca

SEQ ID NO: 3169350 - DNA, 25 bp, Homo sapien
tcgtagtgcatttgttctgctttgt

SEQ ID NO: 3169351 - DNA, 25 bp, Homo sapien
tgattggcccagagaagaaacgtct

SEQ ID NO: 3169352 - DNA, 25 bp, Homo sapien
gaaacgtctcgggtccctcaattga

SEQ ID NO: 3169353 - DNA, 25 bp, Homo sapien
ttgattccccgccaggactgactga

SEQ ID NO: 3169354 - DNA, 25 bp, Homo sapien
tataggaccgaataaaaatagctgg

SEQ ID NO: 3169355 - DNA, 25 bp, Homo sapien
acggaggaaaaagctagcgaggctg

SEQ ID NO: 3169356 - DNA, 25 bp, Homo sapien
tgcagggtagaggtgcaatgattac

SEQ ID NO: 3169357 - DNA, 25 bp, Homo sapien
caaactcaaggccactctggcgaga

SEQ ID NO: 3169358 - DNA, 25 bp, Homo sapien
agagcctggaaacgcccaaaatacg

SEQ ID NO: 3169359 - DNA, 25 bp, Homo sapien
tccgcgctgaacaccccggaggagg

SEQ ID NO: 3169360 - DNA, 25 bp, Homo sapien
ctccgcgctgaacaccccggaggag

SEQ ID NO: 3169361 - DNA, 25 bp, Homo sapien
ccgcgctgaacaccccggaggaggt

SEQ ID NO: 3169362 - DNA, 25 bp, Homo sapien
ggttcaattcactcgctgctcaggc

SEQ ID NO: 3169363 - DNA, 25 bp, Homo sapien
ggtccccgacagtggaaatcctggc

SEQ ID NO: 3169364 - DNA, 25 bp, Homo sapien
ggtcactggccgatgggatcttcca

SEQ ID NO: 3169365 - DNA, 25 bp, Homo sapien
aaatctcgccggaaagttgctggtc

SEQ ID NO: 3169366 - DNA, 25 bp, Homo sapien
tcggaatgatgaggcaatactgcaa

SEQ ID NO: 3169367 - DNA, 25 bp, Homo sapien
tgcaaattccgccaacgctagggcc

SEQ ID NO: 3169368 - DNA, 25 bp, Homo sapien
aaattccgccaacgctagggccagc

SEQ ID NO: 3169369 - DNA, 25 bp, Homo sapien
actgcaaattccgccaacgctaggg

SEQ ID NO: 3169370 - DNA, 25 bp, Homo sapien
gtgctccatgcagttgctttccctt

SEQ ID NO: 3169371 - DNA, 25 bp, Homo sapien
agatgtcacctccatcggccaccca

SEQ ID NO: 3169372 - DNA, 25 bp, Homo sapien
tcagagttttggttccgacaagctg

SEQ ID NO: 3169373 - DNA, 25 bp, Homo sapien
caagcaatctgccaaagagcgcacc

SEQ ID NO: 3169374 - DNA, 25 bp, Homo sapien
gagcgcaccctgcaggctcttaata

SEQ ID NO: 3169375 - DNA, 25 bp, Homo sapien
cctgcaggctcttaataataatgcc

SEQ ID NO: 3169376 - DNA, 25 bp, Homo sapien
ccaacaaggaatcctgatagacaca

SEQ ID NO: 3169377 - DNA, 25 bp, Homo sapien
acaaggaatcctgatagacacaagc

SEQ ID NO: 3169378 - DNA, 25 bp, Homo sapien
aaggaatcctgatagacacaagcac

SEQ ID NO: 3169379 - DNA, 25 bp, Homo sapien
cgccaacaaggaatcctgatagaca

SEQ ID NO: 3169380 - DNA, 25 bp, Homo sapien
aaaccaagtatgtaaagaatgacct

SEQ ID NO: 3169381 - DNA, 25 bp, Homo sapien
gaaaccaagtatgtaaagaatgacc

SEQ ID NO: 3169382 - DNA, 25 bp, Homo sapien
agaaaccaagtatgtaaagaatgac

SEQ ID NO: 3169383 - DNA, 25 bp, Homo sapien
accaagtatgtaaagaatgacctac

SEQ ID NO: 3169384 - DNA, 25 bp, Homo sapien
cacccagggtgagaaccattcatga

SEQ ID NO: 3169385 - DNA, 25 bp, Homo sapien
gatactgggctaaggaatcttggag

SEQ ID NO: 3169386 - DNA, 25 bp, Homo sapien
gaaagctctactacacgatactggg

SEQ ID NO: 3169387 - DNA, 25 bp, Homo sapien
cagttcctcagtatcgtcagccaca

SEQ ID NO: 3169388 - DNA, 25 bp, Homo sapien
taacacatgaccttagatgtctgaa

SEQ ID NO: 3169389 - DNA, 25 bp, Homo sapien
tcagcgttgaagctcttttccaggg

SEQ ID NO: 3169390 - DNA, 25 bp, Homo sapien
tctcagggaacctgttgttgccctt

SEQ ID NO: 3169391 - DNA, 25 bp, Homo sapien
taggccccaaacaaatcaaggtatg

SEQ ID NO: 3169392 - DNA, 25 bp, Homo sapien
tttcagagcctattagtttattcag

SEQ ID NO: 3169393 - DNA, 25 bp, Homo sapien
tatacccagtctcaaaactgaggca

SEQ ID NO: 3169394 - DNA, 25 bp, Homo sapien
gtgaagaagctcagaattcctcaaa

SEQ ID NO: 3169395 - DNA, 25 bp, Homo sapien
tccaccctagagcaatgagggcctt

SEQ ID NO: 3169396 - DNA, 25 bp, Homo sapien
gctccgggctgtagggcactatgac

SEQ ID NO: 3169397 - DNA, 25 bp, Homo sapien
taatacagcctaccacatgccggtc

SEQ ID NO: 3169398 - DNA, 25 bp, Homo sapien
gagacctgagttgtgcgtagcttaa

SEQ ID NO: 3169399 - DNA, 25 bp, Homo sapien
tcccatgctgttcgcgtctgtgata

SEQ ID NO: 3169400 - DNA, 25 bp, Homo sapien
gagtctatagctccagaaccaccag

SEQ ID NO: 3169401 - DNA, 25 bp, Homo sapien
aaactcagatcatatggctctaagg

SEQ ID NO: 3169402 - DNA, 25 bp, Homo sapien
gaaaggtcagctctcaactcagaaa

SEQ ID NO: 3169403 - DNA, 25 bp, Homo sapien
caaggcataggaattctaacttgcc

SEQ ID NO: 3169404 - DNA, 25 bp, Homo sapien
tcctgggaagagtgtgatgatctta

SEQ ID NO: 3169405 - DNA, 25 bp, Homo sapien
tactagaaagcaatgagctgtttcc

SEQ ID NO: 3169406 - DNA, 25 bp, Homo sapien
tgagctacacatgaagatccagaaa

SEQ ID NO: 3169407 - DNA, 25 bp, Homo sapien
gatactgatatactccagatgtgga

SEQ ID NO: 3169408 - DNA, 25 bp, Homo sapien
tgaaaccacttccagaggccaagat

SEQ ID NO: 3169409 - DNA, 25 bp, Homo sapien
tggcggtaacttggttcatgtgaaa

SEQ ID NO: 3169410 - DNA, 25 bp, Homo sapien
cttgtgttgagtgccaaagttatgc

SEQ ID NO: 3169411 - DNA, 25 bp, Homo sapien
gaactgtagtgaatctggcggtaac

SEQ ID NO: 3169412 - DNA, 25 bp, Homo sapien
tagcagcagtacctcaagaagttcc

SEQ ID NO: 3169413 - DNA, 25 bp, Homo sapien
aaatgtttggattaggtgatgaccc

SEQ ID NO: 3169414 - DNA, 25 bp, Homo sapien
tttcaaagcccgtgattcctttgtg

SEQ ID NO: 3169415 - DNA, 25 bp, Homo sapien
ttaaaaccataggtatatactgagg

SEQ ID NO: 3169416 - DNA, 25 bp, Homo sapien
aggtgatgacccaaaagatcctttc

SEQ ID NO: 3169417 - DNA, 25 bp, Homo sapien
caggcaagggattggaggcagaccc

SEQ ID NO: 3169418 - DNA, 25 bp, Homo sapien
ttacgtgatgggcaatttggcacca

SEQ ID NO: 3169419 - DNA, 25 bp, Homo sapien
gtgatgggcaatttggcaccagagc

SEQ ID NO: 3169420 - DNA, 25 bp, Homo sapien
gcagacccacccttcggcctgaaac

SEQ ID NO: 3169421 - DNA, 25 bp, Homo sapien
tgagcctccatctgagagcttgaac

SEQ ID NO: 3169422 - DNA, 25 bp, Homo sapien
tctcccaagtaagccgtagtcccat

SEQ ID NO: 3169423 - DNA, 25 bp, Homo sapien
tcattatctgcaaccctgacggatc

SEQ ID NO: 3169424 - DNA, 25 bp, Homo sapien
gaaagtctagagcatttaccagccc

SEQ ID NO: 3169425 - DNA, 25 bp, Homo sapien
caataacatatcatcttagggtggt

SEQ ID NO: 3169426 - DNA, 25 bp, Homo sapien
tcaatcattaaaggagactgtcaca

SEQ ID NO: 3169427 - DNA, 25 bp, Homo sapien
caaacatgaccgaaaacccactgga

SEQ ID NO: 3169428 - DNA, 25 bp, Homo sapien
tagggtggttctgttccagccaaca

SEQ ID NO: 3169429 - DNA, 25 bp, Homo sapien
aataagctcctagaatgccacgggt

SEQ ID NO: 3169430 - DNA, 25 bp, Homo sapien
tttcatctgaccacacgaagcacag

SEQ ID NO: 3169431 - DNA, 25 bp, Homo sapien
tgagctaacagagatcccattgatg

SEQ ID NO: 3169432 - DNA, 25 bp, Homo sapien
tgtttgctcagacgtaaaagatacc

SEQ ID NO: 3169433 - DNA, 25 bp, Homo sapien
tcagctcactataacatctgctttc

SEQ ID NO: 3169434 - DNA, 25 bp, Homo sapien
catctgctttctgggttccagcaat

SEQ ID NO: 3169435 - DNA, 25 bp, Homo sapien
acatctgctttctgggttccagcaa

SEQ ID NO: 3169436 - DNA, 25 bp, Homo sapien
cactataacatctgctttctgggtt

SEQ ID NO: 3169437 - DNA, 25 bp, Homo sapien
ttcaagagcatagttagtaaatggc

SEQ ID NO: 3169438 - DNA, 25 bp, Homo sapien
tctgtgtaactcctgaacctatgcc

SEQ ID NO: 3169439 - DNA, 25 bp, Homo sapien
tatgtgcaggactttattaacttta

SEQ ID NO: 3169440 - DNA, 25 bp, Homo sapien
gatcaatattactatctcatcccca

SEQ ID NO: 3169441 - DNA, 25 bp, Homo sapien
cactattacaacataatagatgaaa

SEQ ID NO: 3169442 - DNA, 25 bp, Homo sapien
tctgatcatcagttatcactattac

SEQ ID NO: 3169443 - DNA, 25 bp, Homo sapien
gaaaacgacaatgagagtgttctga

SEQ ID NO: 3169444 - DNA, 25 bp, Homo sapien
tgaaaacgacaatgagagtgttctg

SEQ ID NO: 3169445 - DNA, 25 bp, Homo sapien
cgggaggtgacaagactcctccatt

SEQ ID NO: 3169446 - DNA, 25 bp, Homo sapien
tcctccgggaggtgacaagactcct

SEQ ID NO: 3169447 - DNA, 25 bp, Homo sapien
gaggtgacaagactcctccatttca

SEQ ID NO: 3169448 - DNA, 25 bp, Homo sapien
tccgggaggtgacaagactcctcca

SEQ ID NO: 3169449 - DNA, 25 bp, Homo sapien
ggctgctgaaagatggaccaccaat

SEQ ID NO: 3169450 - DNA, 25 bp, Homo sapien
tagcccagttggtagaagacacact

SEQ ID NO: 3169451 - DNA, 25 bp, Homo sapien
gaactatggactactcacagaagcc

SEQ ID NO: 3169452 - DNA, 25 bp, Homo sapien
gggacgccaaaacaactcctgtgca

SEQ ID NO: 3169453 - DNA, 25 bp, Homo sapien
acaccttttttcctcatcagcgaca

SEQ ID NO: 3169454 - DNA, 25 bp, Homo sapien
tgaatcctcagaagagaggccctgg

SEQ ID NO: 3169455 - DNA, 25 bp, Homo sapien
gaggccctggaagtttgcaaaaata

SEQ ID NO: 3169456 - DNA, 25 bp, Homo sapien
gcaaaaatatcttcaatgctgtttg

SEQ ID NO: 3169457 - DNA, 25 bp, Homo sapien
tgcaagtatccctgagatatgaaaa

SEQ ID NO: 3169458 - DNA, 25 bp, Homo sapien
gctgccataccaggcaaacctattt

SEQ ID NO: 3169459 - DNA, 25 bp, Homo sapien
ttctcagggcatgcaagtatccctg

SEQ ID NO: 3169460 - DNA, 25 bp, Homo sapien
aatgacacatgagccatccctatgg

SEQ ID NO: 3169461 - DNA, 25 bp, Homo sapien
ggcccctgattgactgctttagaga

SEQ ID NO: 3169462 - DNA, 25 bp, Homo sapien
atccagaaaggcaggtttactgatt

SEQ ID NO: 3169463 - DNA, 25 bp, Homo sapien
gatagccatcaggtgtaccccaaac

SEQ ID NO: 3169464 - DNA, 25 bp, Homo sapien
gggaaagacacctttgacatagtca

SEQ ID NO: 3169465 - DNA, 25 bp, Homo sapien
agtaactttgaaaccaactatctca

SEQ ID NO: 3169466 - DNA, 25 bp, Homo sapien
ctatctcatagcttccacagatacc

SEQ ID NO: 3169467 - DNA, 25 bp, Homo sapien
actatctcatagcttccacagatac

SEQ ID NO: 3169468 - DNA, 25 bp, Homo sapien
tatctcatagcttccacagatacct

SEQ ID NO: 3169469 - DNA, 25 bp, Homo sapien
cctcatgctgaatccacatttcagt

SEQ ID NO: 3169470 - DNA, 25 bp, Homo sapien
gaatccacatttcagttgtgcccat

SEQ ID NO: 3169471 - DNA, 25 bp, Homo sapien
ctttcctcatgctgaatccacattt

SEQ ID NO: 3169472 - DNA, 25 bp, Homo sapien
gctgaatccacatttcagttgtgcc

SEQ ID NO: 3169473 - DNA, 25 bp, Homo sapien
gataacaatatcaccatggcaacgg

SEQ ID NO: 3169474 - DNA, 25 bp, Homo sapien
tctcaaaggcacattgagggtttct

SEQ ID NO: 3169475 - DNA, 25 bp, Homo sapien
caaacagcaggtttgcagataacaa

SEQ ID NO: 3169476 - DNA, 25 bp, Homo sapien
aacggcagctctggcatgaatcggg

SEQ ID NO: 3169477 - DNA, 25 bp, Homo sapien
ctgaagttctcataggtaactttta

SEQ ID NO: 3169478 - DNA, 25 bp, Homo sapien
tgaagttctcataggtaacttttac

SEQ ID NO: 3169479 - DNA, 25 bp, Homo sapien
actcaggacagcattggttggcagc

SEQ ID NO: 3169480 - DNA, 25 bp, Homo sapien
cattggttggcagctatttgaagca

SEQ ID NO: 3169481 - DNA, 25 bp, Homo sapien
cacactcaggacagcattggttggc

SEQ ID NO: 3169482 - DNA, 25 bp, Homo sapien
gttggcagctatttgaagcacttct

SEQ ID NO: 3169483 - DNA, 25 bp, Homo sapien
tcaacacaagtttaacattcagctt

SEQ ID NO: 3169484 - DNA, 25 bp, Homo sapien
aaaaaactctcatcaacacaagttt

SEQ ID NO: 3169485 - DNA, 25 bp, Homo sapien
agatcctccacaatccaggcaaaga

SEQ ID NO: 3169486 - DNA, 25 bp, Homo sapien
cattcagcttttcccttgtcagaga

SEQ ID NO: 3169487 - DNA, 25 bp, Homo sapien
gcacacactacatggagaagaggcc

SEQ ID NO: 3169488 - DNA, 25 bp, Homo sapien
cacacactacatggagaagaggccc

SEQ ID NO: 3169489 - DNA, 25 bp, Homo sapien
ctcctggtgtccacatgacagcggt

SEQ ID NO: 3169490 - DNA, 25 bp, Homo sapien
cctggtgtccacatgacagcggtgg

SEQ ID NO: 3169491 - DNA, 25 bp, Homo sapien
tgtccacatgacagcggtgggcatg

SEQ ID NO: 3169492 - DNA, 25 bp, Homo sapien
catggttggggggtacatcggactt

SEQ ID NO: 3169493 - DNA, 25 bp, Homo sapien
aacacatggccttcataggaacagg

SEQ ID NO: 3169494 - DNA, 25 bp, Homo sapien
cacatggccttcataggaacagggt

SEQ ID NO: 3169495 - DNA, 25 bp, Homo sapien
acatggccttcataggaacagggtt

SEQ ID NO: 3169496 - DNA, 25 bp, Homo sapien
acacatggccttcataggaacaggg

SEQ ID NO: 3169497 - DNA, 25 bp, Homo sapien
actgggcaaccccatttctacacag

SEQ ID NO: 3169498 - DNA, 25 bp, Homo sapien
ttctacacagacatttggcacaccg

SEQ ID NO: 3169499 - DNA, 25 bp, Homo sapien
gacatttggcacaccggctcagccg

SEQ ID NO: 3169500 - DNA, 25 bp, Homo sapien
tacacagacatttggcacaccggct

SEQ ID NO: 3169501 - DNA, 25 bp, Homo sapien
cgtgaaggctgcatgctgaggttgt

SEQ ID NO: 3169502 - DNA, 25 bp, Homo sapien
tgaaggctgcatgctgaggttgtct

SEQ ID NO: 3169503 - DNA, 25 bp, Homo sapien
ccgtgaaggctgcatgctgaggttg

SEQ ID NO: 3169504 - DNA, 25 bp, Homo sapien
aaggctgcatgctgaggttgtcttc

SEQ ID NO: 3169505 - DNA, 25 bp, Homo sapien
agagcaggatcttgcagagcactgc

SEQ ID NO: 3169506 - DNA, 25 bp, Homo sapien
tttccagggactcggactacagtct

SEQ ID NO: 3169507 - DNA, 25 bp, Homo sapien
gagcactgcgggcaacattttccag

SEQ ID NO: 3169508 - DNA, 25 bp, Homo sapien
cagggactcggactacagtctcatc

SEQ ID NO: 3169509 - DNA, 25 bp, Homo sapien
ggcattttcgctccactgctcacca

SEQ ID NO: 3169510 - DNA, 25 bp, Homo sapien
tcaccccggtcacatatacacgtgg

SEQ ID NO: 3169511 - DNA, 25 bp, Homo sapien
cacatatacacgtggtgcaggcatt

SEQ ID NO: 3169512 - DNA, 25 bp, Homo sapien
tatacacgtggtgcaggcattttcg

SEQ ID NO: 3169513 - DNA, 25 bp, Homo sapien
aggcaggcctgcttgtgacacctga

SEQ ID NO: 3169514 - DNA, 25 bp, Homo sapien
ctttccgcatctcaggggcaggcag

SEQ ID NO: 3169515 - DNA, 25 bp, Homo sapien
ggcaggcctgcttgtgacacctgac

SEQ ID NO: 3169516 - DNA, 25 bp, Homo sapien
ttcgtcctggtaccgcacaactcca

SEQ ID NO: 3169517 - DNA, 25 bp, Homo sapien
gcacaactccatcataggagcagct

SEQ ID NO: 3169518 - DNA, 25 bp, Homo sapien
ccatgacgccgagccctgctctgac

SEQ ID NO: 3169519 - DNA, 25 bp, Homo sapien
tcacagcattgcccatgacgccgag

SEQ ID NO: 3169520 - DNA, 25 bp, Homo sapien
tgcagaactcacaggccgagccctt

SEQ ID NO: 3169521 - DNA, 25 bp, Homo sapien
tccactttggcacactctccagtct

SEQ ID NO: 3169522 - DNA, 25 bp, Homo sapien
ggcacactccactttggcacactct

SEQ ID NO: 3169523 - DNA, 25 bp, Homo sapien
ccgggcacactccactttggcacac

SEQ ID NO: 3169524 - DNA, 25 bp, Homo sapien
gaaatgcattcaggacaacactttc

SEQ ID NO: 3169525 - DNA, 25 bp, Homo sapien
aaatgcattcaggacaacactttcc

SEQ ID NO: 3169526 - DNA, 25 bp, Homo sapien
tacgtttaacttcactagcatttga

SEQ ID NO: 3169527 - DNA, 25 bp, Homo sapien
atacgtttaacttcactagcatttg

SEQ ID NO: 3169528 - DNA, 25 bp, Homo sapien
tcacacaccttgcaagggccatctt

SEQ ID NO: 3169529 - DNA, 25 bp, Homo sapien
tcggcactcacacaccttgcaaggg

SEQ ID NO: 3169530 - DNA, 25 bp, Homo sapien
cctcggcactcacacaccttgcaag

SEQ ID NO: 3169531 - DNA, 25 bp, Homo sapien
gcactcacacaccttgcaagggcca

SEQ ID NO: 3169532 - DNA, 25 bp, Homo sapien
actggacatggtgggcaagagggct

SEQ ID NO: 3169533 - DNA, 25 bp, Homo sapien
catggtgggcaagagggctcgtagc

SEQ ID NO: 3169534 - DNA, 25 bp, Homo sapien
ggcaagagggctcgtagcaagttac

SEQ ID NO: 3169535 - DNA, 25 bp, Homo sapien
tgggcaagagggctcgtagcaagtt

SEQ ID NO: 3169536 - DNA, 25 bp, Homo sapien
ctgatgtgcagtctggacagcactg

SEQ ID NO: 3169537 - DNA, 25 bp, Homo sapien
agtctggacagcactgtcccttcac

SEQ ID NO: 3169538 - DNA, 25 bp, Homo sapien
gtgcagtctggacagcactgtccct

SEQ ID NO: 3169539 - DNA, 25 bp, Homo sapien
tgcagtctggacagcactgtccctt

SEQ ID NO: 3169540 - DNA, 25 bp, Homo sapien
tggagactgagagcatgtcaaacaa

SEQ ID NO: 3169541 - DNA, 25 bp, Homo sapien
tctgcagtaacttggtaggatcttg

SEQ ID NO: 3169542 - DNA, 25 bp, Homo sapien
tccattctgcagtaacttggtagga

SEQ ID NO: 3169543 - DNA, 25 bp, Homo sapien
tgtcaaacaatctggatggcaatga

SEQ ID NO: 3169544 - DNA, 25 bp, Homo sapien
gagactgccagcttggtaaaaaccc

SEQ ID NO: 3169545 - DNA, 25 bp, Homo sapien
aacagagactgccagcttggtaaaa

SEQ ID NO: 3169546 - DNA, 25 bp, Homo sapien
tgccagcttggtaaaaacccagtcc

SEQ ID NO: 3169547 - DNA, 25 bp, Homo sapien
tggtaaaaacccagtccacagctgt

SEQ ID NO: 3169548 - DNA, 25 bp, Homo sapien
tgtcttccaataagcaccaaaatac

SEQ ID NO: 3169549 - DNA, 25 bp, Homo sapien
ctgcacaggaatggcgatcttggta

SEQ ID NO: 3169550 - DNA, 25 bp, Homo sapien
ctggcaggatgagcactccagccca

SEQ ID NO: 3169551 - DNA, 25 bp, Homo sapien
gaagccgtccccacaggtaggcaca

SEQ ID NO: 3169552 - DNA, 25 bp, Homo sapien
gcgatcttggtagaagccgtcccca

SEQ ID NO: 3169553 - DNA, 25 bp, Homo sapien
tcctggtgtccccagatcacttggt

SEQ ID NO: 3169554 - DNA, 25 bp, Homo sapien
gtccccagatcacttggtggggtca

SEQ ID NO: 3169555 - DNA, 25 bp, Homo sapien
tccccagatcacttggtggggtcag

SEQ ID NO: 3169556 - DNA, 25 bp, Homo sapien
tggtgtccccagatcacttggtggg

SEQ ID NO: 3169557 - DNA, 25 bp, Homo sapien
ccaaactcggaagctattctgcctt

SEQ ID NO: 3169558 - DNA, 25 bp, Homo sapien
gatgctgaggatatagacatgcagg

SEQ ID NO: 3169559 - DNA, 25 bp, Homo sapien
gatatttctgtagacaccaaagagc

SEQ ID NO: 3169560 - DNA, 25 bp, Homo sapien
gaactttgtgcagcccttgatgctg

SEQ ID NO: 3169561 - DNA, 25 bp, Homo sapien
tgacaaggagcaaatagtggaagcc

SEQ ID NO: 3169562 - DNA, 25 bp, Homo sapien
tatcaaaaattattccagagggcca

SEQ ID NO: 3169563 - DNA, 25 bp, Homo sapien
gacacgacccaagttttgaagacag

SEQ ID NO: 3169564 - DNA, 25 bp, Homo sapien
tgaggccaccactagccagaaattg

SEQ ID NO: 3169565 - DNA, 25 bp, Homo sapien
ccagtggcccctgttaattaaatgc

SEQ ID NO: 3169566 - DNA, 25 bp, Homo sapien
taaccatgattgtgatacagctgaa

SEQ ID NO: 3169567 - DNA, 25 bp, Homo sapien
agctgaatgatttacccgtcttgag

SEQ ID NO: 3169568 - DNA, 25 bp, Homo sapien
gcaagacattcagctcatcaggagt

SEQ ID NO: 3169569 - DNA, 25 bp, Homo sapien
ctcagcacgtggaggggatctctgc

SEQ ID NO: 3169570 - DNA, 25 bp, Homo sapien
ccatctctcagcacgtggaggggat

SEQ ID NO: 3169571 - DNA, 25 bp, Homo sapien
agtgcttctccgttgggccccagca

SEQ ID NO: 3169572 - DNA, 25 bp, Homo sapien
caagcagtgcttctccgttgggccc

SEQ ID NO: 3169573 - DNA, 25 bp, Homo sapien
ggcaatgtccacaggggtagccagc

SEQ ID NO: 3169574 - DNA, 25 bp, Homo sapien
tccacaggggtagccagctcatcta

SEQ ID NO: 3169575 - DNA, 25 bp, Homo sapien
tgtcaggatgcctgcagacctggca

SEQ ID NO: 3169576 - DNA, 25 bp, Homo sapien
agacctggcaatgtccacaggggta

SEQ ID NO: 3169577 - DNA, 25 bp, Homo sapien
gccggtctttatcttgaatagtatt

SEQ ID NO: 3169578 - DNA, 25 bp, Homo sapien
ggtctttatcttgaatagtattaat

SEQ ID NO: 3169579 - DNA, 25 bp, Homo sapien
cagccggtctttatcttgaatagta

SEQ ID NO: 3169580 - DNA, 25 bp, Homo sapien
ccggtctttatcttgaatagtatta

SEQ ID NO: 3169581 - DNA, 25 bp, Homo sapien
tttgcacctgccagtggcatcagca

SEQ ID NO: 3169582 - DNA, 25 bp, Homo sapien
tctcagtacaggtaagacacctggg

SEQ ID NO: 3169583 - DNA, 25 bp, Homo sapien
catagtacccgccagggcattcaga

SEQ ID NO: 3169584 - DNA, 25 bp, Homo sapien
cagtggcatcagcatagtacccgcc

SEQ ID NO: 3169585 - DNA, 25 bp, Homo sapien
gacagtggccttgacgcagagcctt

SEQ ID NO: 3169586 - DNA, 25 bp, Homo sapien
actccatggtcagagtagaaaccct

SEQ ID NO: 3169587 - DNA, 25 bp, Homo sapien
agactccatggtcagagtagaaacc

SEQ ID NO: 3169588 - DNA, 25 bp, Homo sapien
gcagacagtggccttgacgcagagc

SEQ ID NO: 3169589 - DNA, 25 bp, Homo sapien
agtacagtgagagggtgcgggaccc

SEQ ID NO: 3169590 - DNA, 25 bp, Homo sapien
cttacacccagtacagtgagagggt

SEQ ID NO: 3169591 - DNA, 25 bp, Homo sapien
ggtgcgggacccatacaagccaggc

SEQ ID NO: 3169592 - DNA, 25 bp, Homo sapien
ggacccatacaagccaggcaggagg

SEQ ID NO: 3169593 - DNA, 25 bp, Homo sapien
tatgccagtgctctccaagtaaaaa

SEQ ID NO: 3169594 - DNA, 25 bp, Homo sapien
tccaagtaaaaatgggctctacact

SEQ ID NO: 3169595 - DNA, 25 bp, Homo sapien
aatgggctctacactgggctagaca

SEQ ID NO: 3169596 - DNA, 25 bp, Homo sapien
gggatgcccacgtcagacagctgct

SEQ ID NO: 3169597 - DNA, 25 bp, Homo sapien
ttttttcacgtagctttagagtcaa

SEQ ID NO: 3169598 - DNA, 25 bp, Homo sapien
tctaaattctgacagaagtccagat

SEQ ID NO: 3169599 - DNA, 25 bp, Homo sapien
tcaattctctgtagatgatatgcca

SEQ ID NO: 3169600 - DNA, 25 bp, Homo sapien
tcctcaaccactcatagatggcctg

SEQ ID NO: 3169601 - DNA, 25 bp, Homo sapien
agccacatcaccctccactttggca

SEQ ID NO: 3169602 - DNA, 25 bp, Homo sapien
tccctaaggaaagagccacatcacc

SEQ ID NO: 3169603 - DNA, 25 bp, Homo sapien
tctgtggggtccctaaggaaagagc

SEQ ID NO: 3169604 - DNA, 25 bp, Homo sapien
tggggtccctaaggaaagagccaca

SEQ ID NO: 3169605 - DNA, 25 bp, Homo sapien
ctgcacatctgaaacaggactggtg

SEQ ID NO: 3169606 - DNA, 25 bp, Homo sapien
catctgaaacaggactggtggcaag

SEQ ID NO: 3169607 - DNA, 25 bp, Homo sapien
tgcacatctgaaacaggactggtgg

SEQ ID NO: 3169608 - DNA, 25 bp, Homo sapien
cacatctgaaacaggactggtggca

SEQ ID NO: 3169609 - DNA, 25 bp, Homo sapien
gtgcaactaccttcctggtgaaagt

SEQ ID NO: 3169610 - DNA, 25 bp, Homo sapien
ctgtgcaactaccttcctggtgaaa

SEQ ID NO: 3169611 - DNA, 25 bp, Homo sapien
gtctgtgcagttatgtgggcttttc

SEQ ID NO: 3169612 - DNA, 25 bp, Homo sapien
cacagtctgtgcagttatgtgggct

SEQ ID NO: 3169613 - DNA, 25 bp, Homo sapien
tgcattgacgctgccaagggagcag

SEQ ID NO: 3169614 - DNA, 25 bp, Homo sapien
gtaaggtgtaagcaataaggataag

SEQ ID NO: 3169615 - DNA, 25 bp, Homo sapien
gctgcattgacgctgccaagggagc

SEQ ID NO: 3169616 - DNA, 25 bp, Homo sapien
ataagggtggcaaagaatcagaggc

SEQ ID NO: 3169617 - DNA, 25 bp, Homo sapien
gaggttgaggaactgctcttccctg

SEQ ID NO: 3169618 - DNA, 25 bp, Homo sapien
cactgcctgcaggttgggtgacact

SEQ ID NO: 3169619 - DNA, 25 bp, Homo sapien
agcacagtatcccacgaggttgagg

SEQ ID NO: 3169620 - DNA, 25 bp, Homo sapien
gctggtcctgcagttaccattggta

SEQ ID NO: 3169621 - DNA, 25 bp, Homo sapien
taagcctggtatgaagagccccggc

SEQ ID NO: 3169622 - DNA, 25 bp, Homo sapien
gtgatttccgaggagtccacaggag

SEQ ID NO: 3169623 - DNA, 25 bp, Homo sapien
aaatgcccaaggagaagcagtaaca

SEQ ID NO: 3169624 - DNA, 25 bp, Homo sapien
caaagagcccccttaagcctggtat

SEQ ID NO: 3169625 - DNA, 25 bp, Homo sapien
ctaaaaggcttgcacagtctctaca

SEQ ID NO: 3169626 - DNA, 25 bp, Homo sapien
ttccgctccgaatccagcattctgg

SEQ ID NO: 3169627 - DNA, 25 bp, Homo sapien
agtctctacacttgggcttccgctc

SEQ ID NO: 3169628 - DNA, 25 bp, Homo sapien
tgcagccctgtgcttgacagtttgg

SEQ ID NO: 3169629 - DNA, 25 bp, Homo sapien
cccaaatttatctggccaggaggtt

SEQ ID NO: 3169630 - DNA, 25 bp, Homo sapien
tatgtaaccgagtcaatcccaaatt

SEQ ID NO: 3169631 - DNA, 25 bp, Homo sapien
cactggctaaccctgtaagaggcta

SEQ ID NO: 3169632 - DNA, 25 bp, Homo sapien
tcaattcagtgctcgggaaatgatg

SEQ ID NO: 3169633 - DNA, 25 bp, Homo sapien
tcgcgcacagtgcgcacacacactg

SEQ ID NO: 3169634 - DNA, 25 bp, Homo sapien
cgcacagtgcgcacacacactggcc

SEQ ID NO: 3169635 - DNA, 25 bp, Homo sapien
tcggctcgcgcacagtgcgcacaca

SEQ ID NO: 3169636 - DNA, 25 bp, Homo sapien
cttcggctcgcgcacagtgcgcaca

SEQ ID NO: 3169637 - DNA, 25 bp, Homo sapien
tcaacccttattactcttctgaagt

SEQ ID NO: 3169638 - DNA, 25 bp, Homo sapien
tgcttttcaacccttattactcttc

SEQ ID NO: 3169639 - DNA, 25 bp, Homo sapien
gcagtgcttttcaacccttattact

SEQ ID NO: 3169640 - DNA, 25 bp, Homo sapien
cttttcaacccttattactcttctg

SEQ ID NO: 3169641 - DNA, 25 bp, Homo sapien
gcacagagaaggcacgggtgctcat

SEQ ID NO: 3169642 - DNA, 25 bp, Homo sapien
ggggagcacagagaaggcacgggtg

SEQ ID NO: 3169643 - DNA, 25 bp, Homo sapien
ggagcacagagaaggcacgggtgct

SEQ ID NO: 3169644 - DNA, 25 bp, Homo sapien
agcacagagaaggcacgggtgctca

SEQ ID NO: 3169645 - DNA, 25 bp, Homo sapien
cagcaggtagtgggcattctggcac

SEQ ID NO: 3169646 - DNA, 25 bp, Homo sapien
agtcaggaacacagtggtccccgag

SEQ ID NO: 3169647 - DNA, 25 bp, Homo sapien
ccagtgttgtggagatcagctgcac

SEQ ID NO: 3169648 - DNA, 25 bp, Homo sapien
tctctctgcatagtatcctgaaggg

SEQ ID NO: 3169649 - DNA, 25 bp, Homo sapien
cgaggttggtgtcacatgaggagca

SEQ ID NO: 3169650 - DNA, 25 bp, Homo sapien
gctggcaaacatgattgtcatcaag

SEQ ID NO: 3169651 - DNA, 25 bp, Homo sapien
tcatcaagatagtgcccagggaagc

SEQ ID NO: 3169652 - DNA, 25 bp, Homo sapien
tgccagtgtgggacagcacgaggtt

SEQ ID NO: 3169653 - DNA, 25 bp, Homo sapien
gaacctcgcatttctttcaatggct

SEQ ID NO: 3169654 - DNA, 25 bp, Homo sapien
aataaaggctaccaggtgagaagat

SEQ ID NO: 3169655 - DNA, 25 bp, Homo sapien
aagatggaagtaagaacctcgcatt

SEQ ID NO: 3169656 - DNA, 25 bp, Homo sapien
aaaataaaggctaccaggtgagaag

SEQ ID NO: 3169657 - DNA, 25 bp, Homo sapien
tgtaggtctaagaaatggtcatcca

SEQ ID NO: 3169658 - DNA, 25 bp, Homo sapien
cctacttcaatactccattggctct

SEQ ID NO: 3169659 - DNA, 25 bp, Homo sapien
gtaggtctaagaaatggtcatccac

SEQ ID NO: 3169660 - DNA, 25 bp, Homo sapien
gtcatccactcctacttcaatactc

SEQ ID NO: 3169661 - DNA, 25 bp, Homo sapien
agtggcagagtcgaccagaaaccac

SEQ ID NO: 3169662 - DNA, 25 bp, Homo sapien
aaagtggcagagtcgaccagaaacc

SEQ ID NO: 3169663 - DNA, 25 bp, Homo sapien
gagggaagctgggatgtgctgtaac

SEQ ID NO: 3169664 - DNA, 25 bp, Homo sapien
aggtcagtgacccccacagcaagtg

SEQ ID NO: 3169665 - DNA, 25 bp, Homo sapien
gacgcagacatcttggtgtggccac

SEQ ID NO: 3169666 - DNA, 25 bp, Homo sapien
actgacgcagacatcttggtgtggc

SEQ ID NO: 3169667 - DNA, 25 bp, Homo sapien
tgacgcagacatcttggtgtggcca

SEQ ID NO: 3169668 - DNA, 25 bp, Homo sapien
ctgacgcagacatcttggtgtggcc

SEQ ID NO: 3169669 - DNA, 25 bp, Homo sapien
ggtattacattcagaccccacaaag

SEQ ID NO: 3169670 - DNA, 25 bp, Homo sapien
cagttctgtaggtaccaacgtccct

SEQ ID NO: 3169671 - DNA, 25 bp, Homo sapien
cagagcagttctgtaggtaccaacg

SEQ ID NO: 3169672 - DNA, 25 bp, Homo sapien
gtccctcgggttctcagcttccgtg

SEQ ID NO: 3169673 - DNA, 25 bp, Homo sapien
cagcttccacagtgtgtgttgcatg

SEQ ID NO: 3169674 - DNA, 25 bp, Homo sapien
cacagcttccacagtgtgtgttgca

SEQ ID NO: 3169675 - DNA, 25 bp, Homo sapien
ctgtgaatcacagcttccacagtgt

SEQ ID NO: 3169676 - DNA, 25 bp, Homo sapien
atcacagcttccacagtgtgtgttg

SEQ ID NO: 3169677 - DNA, 25 bp, Homo sapien
caaagagcagaaccttgtttggatc

SEQ ID NO: 3169678 - DNA, 25 bp, Homo sapien
cgtattgacattccccaaagagcag

SEQ ID NO: 3169679 - DNA, 25 bp, Homo sapien
tttgcacgtgttggtggagaagtca

SEQ ID NO: 3169680 - DNA, 25 bp, Homo sapien
ttggatctcggcaggaggtacagct

SEQ ID NO: 3169681 - DNA, 25 bp, Homo sapien
ttcaaagtgtgtaagccccgagaat

SEQ ID NO: 3169682 - DNA, 25 bp, Homo sapien
gctgagcactaccattcaaagtgtg

SEQ ID NO: 3169683 - DNA, 25 bp, Homo sapien
caaagtgtgtaagccccgagaattc

SEQ ID NO: 3169684 - DNA, 25 bp, Homo sapien
tgctttcctgttgctgagcactacc

SEQ ID NO: 3169685 - DNA, 25 bp, Homo sapien
gaaagtctgcattagattatcttcc

SEQ ID NO: 3169686 - DNA, 25 bp, Homo sapien
tcatttatgaggactctgtctgcag

SEQ ID NO: 3169687 - DNA, 25 bp, Homo sapien
ctcagacccagcagttcatttatga

SEQ ID NO: 3169688 - DNA, 25 bp, Homo sapien
aaaagaaagtctgcattagattatc

SEQ ID NO: 3169689 - DNA, 25 bp, Homo sapien
cctggagaacatagccatccatgca

SEQ ID NO: 3169690 - DNA, 25 bp, Homo sapien
gaggcccgagtcctggtaaaatgat

SEQ ID NO: 3169691 - DNA, 25 bp, Homo sapien
gcaggcagtctgttttcaggggccc

SEQ ID NO: 3169692 - DNA, 25 bp, Homo sapien
catccatgcactgcaggcagtctgt

SEQ ID NO: 3169693 - DNA, 25 bp, Homo sapien
tgctttgcatgatctgcaaagtacc

SEQ ID NO: 3169694 - DNA, 25 bp, Homo sapien
acactcatggggaccttggcactgg

SEQ ID NO: 3169695 - DNA, 25 bp, Homo sapien
tttgtgctttgcatgatctgcaaag

SEQ ID NO: 3169696 - DNA, 25 bp, Homo sapien
gagaaatggccctttgcagcgggta

SEQ ID NO: 3169697 - DNA, 25 bp, Homo sapien
cagaacatgtttcattagaggtgtg

SEQ ID NO: 3169698 - DNA, 25 bp, Homo sapien
tcattagaggtgtggacagaaaagc

SEQ ID NO: 3169699 - DNA, 25 bp, Homo sapien
cagaggtgacaacggtccctgtggc

SEQ ID NO: 3169700 - DNA, 25 bp, Homo sapien
tcagaaagaacccatggtcacagag

SEQ ID NO: 3169701 - DNA, 25 bp, Homo sapien
tttccagctaaaacggccagccttg

SEQ ID NO: 3169702 - DNA, 25 bp, Homo sapien
catgaaataggagatcttcgaccct

SEQ ID NO: 3169703 - DNA, 25 bp, Homo sapien
gagcactagctgaccattggtggga

SEQ ID NO: 3169704 - DNA, 25 bp, Homo sapien
tattgaaccaattgggaggatcagg

SEQ ID NO: 3169705 - DNA, 25 bp, Homo sapien
gcttgtatgttgatcagctgtggct

SEQ ID NO: 3169706 - DNA, 25 bp, Homo sapien
actgctggtcactaattttcaggaa

SEQ ID NO: 3169707 - DNA, 25 bp, Homo sapien
tgaaaatgcttgtatgttgatcagc

SEQ ID NO: 3169708 - DNA, 25 bp, Homo sapien
agaagaactgctggtcactaatttt

SEQ ID NO: 3169709 - DNA, 25 bp, Homo sapien
gattgtggaaaaacacacaagccac

SEQ ID NO: 3169710 - DNA, 25 bp, Homo sapien
cacttggggaaccatgggaactcac

SEQ ID NO: 3169711 - DNA, 25 bp, Homo sapien
cacaagccacacttggggaaccatg

SEQ ID NO: 3169712 - DNA, 25 bp, Homo sapien
ttgattgtggaaaaacacacaagcc

SEQ ID NO: 3169713 - DNA, 25 bp, Homo sapien
ggcacggtcttcacttggaacagta

SEQ ID NO: 3169714 - DNA, 25 bp, Homo sapien
tcatctcggatgtcaagcatctggg

SEQ ID NO: 3169715 - DNA, 25 bp, Homo sapien
caacatcggatgtgctgtctgaacc

SEQ ID NO: 3169716 - DNA, 25 bp, Homo sapien
tcatgagcatagtggagaaggcctc

SEQ ID NO: 3169717 - DNA, 25 bp, Homo sapien
ggtgcaaagaaactgtaactctagg

SEQ ID NO: 3169718 - DNA, 25 bp, Homo sapien
cagatcaagggtgctcctaactaga

SEQ ID NO: 3169719 - DNA, 25 bp, Homo sapien
cctaactagatatatagtgccctct

SEQ ID NO: 3169720 - DNA, 25 bp, Homo sapien
cgtagaagttcacatctaggtgcaa

SEQ ID NO: 3169721 - DNA, 25 bp, Homo sapien
gggtagtcttgtgtaatcttgtaga

SEQ ID NO: 3169722 - DNA, 25 bp, Homo sapien
tctggaacccacaccatcgaattag

SEQ ID NO: 3169723 - DNA, 25 bp, Homo sapien
ttagccacaagctgaagacccctgt

SEQ ID NO: 3169724 - DNA, 25 bp, Homo sapien
ggagcctcggcctgtaagattctgt

SEQ ID NO: 3169725 - DNA, 25 bp, Homo sapien
ggcatattcactagaaggaccacct

SEQ ID NO: 3169726 - DNA, 25 bp, Homo sapien
gggtagctgtcctcccatcaggcag

SEQ ID NO: 3169727 - DNA, 25 bp, Homo sapien
tacgatgccttcattgatgtcctgc

SEQ ID NO: 3169728 - DNA, 25 bp, Homo sapien
tgagtgcctgtaccatacgatgcct

SEQ ID NO: 3169729 - DNA, 25 bp, Homo sapien
acactttaggtgcttcaggtgtctg

SEQ ID NO: 3169730 - DNA, 25 bp, Homo sapien
ctgtggtaagatcgcgatgttgaac

SEQ ID NO: 3169731 - DNA, 25 bp, Homo sapien
agagacactttaggtgcttcaggtg

SEQ ID NO: 3169732 - DNA, 25 bp, Homo sapien
gtgtctgtggtaagatcgcgatgtt

SEQ ID NO: 3169733 - DNA, 25 bp, Homo sapien
gggttttggcattacagcactcacc

SEQ ID NO: 3169734 - DNA, 25 bp, Homo sapien
cacggaggagttgctaattgtctca

SEQ ID NO: 3169735 - DNA, 25 bp, Homo sapien
tcccaccagcatacgaggctttctg

SEQ ID NO: 3169736 - DNA, 25 bp, Homo sapien
tctgtgatagcttgatgacctcctt

SEQ ID NO: 3169737 - DNA, 25 bp, Homo sapien
tgtgttttcatcaactctatagtga

SEQ ID NO: 3169738 - DNA, 25 bp, Homo sapien
tataggattaagtttgagaaccctg

SEQ ID NO: 3169739 - DNA, 25 bp, Homo sapien
ccttagttgtgatgcgtgagatttt

SEQ ID NO: 3169740 - DNA, 25 bp, Homo sapien
tgggtgagcgcaatctgtgttttca

SEQ ID NO: 3169741 - DNA, 25 bp, Homo sapien
gagggaatgaggctgaataacagtc

SEQ ID NO: 3169742 - DNA, 25 bp, Homo sapien
agagtgatgttgtagacaatctttc

SEQ ID NO: 3169743 - DNA, 25 bp, Homo sapien
gaggtagagtgatgttgtagacaat

SEQ ID NO: 3169744 - DNA, 25 bp, Homo sapien
gctgaataacagtcaggccatcttc

SEQ ID NO: 3169745 - DNA, 25 bp, Homo sapien
cgtgaaataccggataggagagtga

SEQ ID NO: 3169746 - DNA, 25 bp, Homo sapien
taatatcctcttgcgtgaaataccg

SEQ ID NO: 3169747 - DNA, 25 bp, Homo sapien
cggtacatgactttgccctggttaa

SEQ ID NO: 3169748 - DNA, 25 bp, Homo sapien
ttgccctggttaatatcctcttgcg

SEQ ID NO: 3169749 - DNA, 25 bp, Homo sapien
tggaatttcactgattctgggagac

SEQ ID NO: 3169750 - DNA, 25 bp, Homo sapien
gtgaagtggaatttcactgattctg

SEQ ID NO: 3169751 - DNA, 25 bp, Homo sapien
ctgtgaagtggaatttcactgattc

SEQ ID NO: 3169752 - DNA, 25 bp, Homo sapien
agtggaatttcactgattctgggag

SEQ ID NO: 3169753 - DNA, 25 bp, Homo sapien
gctgatcactgggaagtaagtgaat

SEQ ID NO: 3169754 - DNA, 25 bp, Homo sapien
ggcagttgctgatcactgggaagta

SEQ ID NO: 3169755 - DNA, 25 bp, Homo sapien
aagtaagtgaatggtgaggaccatc

SEQ ID NO: 3169756 - DNA, 25 bp, Homo sapien
accatctccggacttgtgtgttctc

SEQ ID NO: 3169757 - DNA, 25 bp, Homo sapien
ctctatgttcttctcgccgctctat

SEQ ID NO: 3169758 - DNA, 25 bp, Homo sapien
tatattttagtgatggcatcaaagc

SEQ ID NO: 3169759 - DNA, 25 bp, Homo sapien
gcaaactcccggaaaatcagttctg

SEQ ID NO: 3169760 - DNA, 25 bp, Homo sapien
taaatagaaacaagagccgccattg

SEQ ID NO: 3169761 - DNA, 25 bp, Homo sapien
gtggccatcggccttcggaactcag

SEQ ID NO: 3169762 - DNA, 25 bp, Homo sapien
aagaagcacaccatgctgtggaggt

SEQ ID NO: 3169763 - DNA, 25 bp, Homo sapien
cggccttcggaactcagctgtatgc

SEQ ID NO: 3169764 - DNA, 25 bp, Homo sapien
cacaccatgctgtggaggtctccga

SEQ ID NO: 3169765 - DNA, 25 bp, Homo sapien
caaagacgctttgctctcgtctgag

SEQ ID NO: 3169766 - DNA, 25 bp, Homo sapien
tgctctcgtctgagacacataacaa

SEQ ID NO: 3169767 - DNA, 25 bp, Homo sapien
gtctgagacacataacaactgattg

SEQ ID NO: 3169768 - DNA, 25 bp, Homo sapien
caactgattgtagagcaaaaaatcc

SEQ ID NO: 3169769 - DNA, 25 bp, Homo sapien
aaaacaaattgcaaacgagttgctt

SEQ ID NO: 3169770 - DNA, 25 bp, Homo sapien
ccatgctgtcttcccgggtagagga

SEQ ID NO: 3169771 - DNA, 25 bp, Homo sapien
tctgacagggacacctctactctca

SEQ ID NO: 3169772 - DNA, 25 bp, Homo sapien
tggcaacagtaatgctcagagagga

SEQ ID NO: 3169773 - DNA, 25 bp, Homo sapien
tcgaggccctcggtcttctgacagg

SEQ ID NO: 3169774 - DNA, 25 bp, Homo sapien
aacttgggcttttatggcactaggc

SEQ ID NO: 3169775 - DNA, 25 bp, Homo sapien
tagacctgagacagaaactgatgac

SEQ ID NO: 3169776 - DNA, 25 bp, Homo sapien
tttacgtgaccatatacctgctgcc

SEQ ID NO: 3169777 - DNA, 25 bp, Homo sapien
tgaatggagcttaaacaatgggaac

SEQ ID NO: 3169778 - DNA, 25 bp, Homo sapien
cacctcagatcctgagattcttaag

SEQ ID NO: 3169779 - DNA, 25 bp, Homo sapien
tcttaagagagtaccatatgagggc

SEQ ID NO: 3169780 - DNA, 25 bp, Homo sapien
ccatatgagggcagataatttaact

SEQ ID NO: 3169781 - DNA, 25 bp, Homo sapien
actgaatccagatctctgggtcggg

SEQ ID NO: 3169782 - DNA, 25 bp, Homo sapien
ctgattttcttgttattgatgtctt

SEQ ID NO: 3169783 - DNA, 25 bp, Homo sapien
gattttcttgttattgatgtcttcc

SEQ ID NO: 3169784 - DNA, 25 bp, Homo sapien
ttttcttgttattgatgtcttccat

SEQ ID NO: 3169785 - DNA, 25 bp, Homo sapien
attttcttgttattgatgtcttcca

SEQ ID NO: 3169786 - DNA, 25 bp, Homo sapien
ggttgtggtccatgtcagagacaga

SEQ ID NO: 3169787 - DNA, 25 bp, Homo sapien
ccagatgaccatcagtttcaaacac

SEQ ID NO: 3169788 - DNA, 25 bp, Homo sapien
gcaaaagcaatgactggaggtggat

SEQ ID NO: 3169789 - DNA, 25 bp, Homo sapien
gcaggagtgatcatgatggtaaata

SEQ ID NO: 3169790 - DNA, 25 bp, Homo sapien
ggcagagcacttagtttaatgatgg

SEQ ID NO: 3169791 - DNA, 25 bp, Homo sapien
gccatatttgggcagagcacttagt

SEQ ID NO: 3169792 - DNA, 25 bp, Homo sapien
tggcatctctctggaggttgtcatc

SEQ ID NO: 3169793 - DNA, 25 bp, Homo sapien
cctgtgttctcaatgcagccatatt

SEQ ID NO: 3169794 - DNA, 25 bp, Homo sapien
catctccatctttagctggaagcaa

SEQ ID NO: 3169795 - DNA, 25 bp, Homo sapien
catctttagctggaagcaaggtcct

SEQ ID NO: 3169796 - DNA, 25 bp, Homo sapien
tccatctttagctggaagcaaggtc

SEQ ID NO: 3169797 - DNA, 25 bp, Homo sapien
ctttagctggaagcaaggtcctcct

SEQ ID NO: 3169798 - DNA, 25 bp, Homo sapien
tgataaccaccagagtgttcagggc

SEQ ID NO: 3169799 - DNA, 25 bp, Homo sapien
tctcaattgccagtcacagaaggtc

SEQ ID NO: 3169800 - DNA, 25 bp, Homo sapien
gccatgagctgtctcaattgccagt

SEQ ID NO: 3169801 - DNA, 25 bp, Homo sapien
gggccatggacagtacatcccttct

SEQ ID NO: 3169802 - DNA, 25 bp, Homo sapien
gaaatgatgcctctaggtcactggc

SEQ ID NO: 3169803 - DNA, 25 bp, Homo sapien
ctaaaaatatcatgggttggctcaa

SEQ ID NO: 3169804 - DNA, 25 bp, Homo sapien
cactggcagtttcagggccaaaacg

SEQ ID NO: 3169805 - DNA, 25 bp, Homo sapien
aatgtagttttccaggacgtcttga

SEQ ID NO: 3169806 - DNA, 25 bp, Homo sapien
tattgtggtcaagggctcaaccttt

SEQ ID NO: 3169807 - DNA, 25 bp, Homo sapien
aatattgtggtcaagggctcaacct

SEQ ID NO: 3169808 - DNA, 25 bp, Homo sapien
tgaaatattgtggtcaagggctcaa

SEQ ID NO: 3169809 - DNA, 25 bp, Homo sapien
gtgtgaaatattgtggtcaagggct

SEQ ID NO: 3169810 - DNA, 25 bp, Homo sapien
gaaagtgtgggtctctaaagctgtc

SEQ ID NO: 3169811 - DNA, 25 bp, Homo sapien
cactgacccttaagagtgcagaggg

SEQ ID NO: 3169812 - DNA, 25 bp, Homo sapien
aatgctaagcataccacagtacctg

SEQ ID NO: 3169813 - DNA, 25 bp, Homo sapien
tctctctcggtagagcaagcctgtg

SEQ ID NO: 3169814 - DNA, 25 bp, Homo sapien
atcctgggaggctcatcgttcttcc

SEQ ID NO: 3169815 - DNA, 25 bp, Homo sapien
catcctgggaggctcatcgttcttc

SEQ ID NO: 3169816 - DNA, 25 bp, Homo sapien
aaatgagctcattatctggggtgtc

SEQ ID NO: 3169817 - DNA, 25 bp, Homo sapien
cgtggtcaggcttttttgtcaatac

SEQ ID NO: 3169818 - DNA, 25 bp, Homo sapien
gaattgcttatcaccactcccgagc

SEQ ID NO: 3169819 - DNA, 25 bp, Homo sapien
ttatctggggtgtccaggtcttgca

SEQ ID NO: 3169820 - DNA, 25 bp, Homo sapien
agaactttagccaataactggagag

SEQ ID NO: 3169821 - DNA, 25 bp, Homo sapien
gaactttagccaataactggagaga

SEQ ID NO: 3169822 - DNA, 25 bp, Homo sapien
cagaactttagccaataactggaga

SEQ ID NO: 3169823 - DNA, 25 bp, Homo sapien
gaggctcagaagcagtttgcctcca

SEQ ID NO: 3169824 - DNA, 25 bp, Homo sapien
ccagggacactaggcacatacccaa

SEQ ID NO: 3169825 - DNA, 25 bp, Homo sapien
tggaactcatccacgaccatgccag

SEQ ID NO: 3169826 - DNA, 25 bp, Homo sapien
ctaggatatcctggtaggtgaaggt

SEQ ID NO: 3169827 - DNA, 25 bp, Homo sapien
ccagcccagctaggatatcctggta

SEQ ID NO: 3169828 - DNA, 25 bp, Homo sapien
ccttggtttatagccaagtgaggtg

SEQ ID NO: 3169829 - DNA, 25 bp, Homo sapien
gctgtaggccttggtttatagccaa

SEQ ID NO: 3169830 - DNA, 25 bp, Homo sapien
tatagccaagtgaggtgtgtcactt

SEQ ID NO: 3169831 - DNA, 25 bp, Homo sapien
tgctgagagctgtaggccttggttt

SEQ ID NO: 3169832 - DNA, 25 bp, Homo sapien
cctttgaacgggatgtcaaatgatt

SEQ ID NO: 3169833 - DNA, 25 bp, Homo sapien
cccaacatttcctttgaacgggatg

SEQ ID NO: 3169834 - DNA, 25 bp, Homo sapien
aagagaacggaagagagtaggttat

SEQ ID NO: 3169835 - DNA, 25 bp, Homo sapien
gaagagagtaggttattccccaaca

SEQ ID NO: 3169836 - DNA, 25 bp, Homo sapien
tgcttcatcatctgcaggcgccctg

SEQ ID NO: 3169837 - DNA, 25 bp, Homo sapien
catgatgtacataacctgatggtca

SEQ ID NO: 3169838 - DNA, 25 bp, Homo sapien
agtgctgttctgtgatgcgtgctac

SEQ ID NO: 3169839 - DNA, 25 bp, Homo sapien
tctgcctgggtgaaacttcggatgg

SEQ ID NO: 3169840 - DNA, 25 bp, Homo sapien
gcagtccacggaagcctggtaggca

SEQ ID NO: 3169841 - DNA, 25 bp, Homo sapien
catttcaaccaagaaagatagggct

SEQ ID NO: 3169842 - DNA, 25 bp, Homo sapien
tttactagtgtaggtgcagtccacg

SEQ ID NO: 3169843 - DNA, 25 bp, Homo sapien
gctgcaaatgccaccaatgctaagt

SEQ ID NO: 3169844 - DNA, 25 bp, Homo sapien
aaatgacttgtcaatcaatctgttg

SEQ ID NO: 3169845 - DNA, 25 bp, Homo sapien
tgtaggcccactgtcctggtcagtg

SEQ ID NO: 3169846 - DNA, 25 bp, Homo sapien
gatcaattctgtaggcccactgtcc

SEQ ID NO: 3169847 - DNA, 25 bp, Homo sapien
gattctgtagatcaattctgtaggc

SEQ ID NO: 3169848 - DNA, 25 bp, Homo sapien
tctgtagatcaattctgtaggccca

SEQ ID NO: 3169849 - DNA, 25 bp, Homo sapien
ggatgagttgcctaacacaacagcc

SEQ ID NO: 3169850 - DNA, 25 bp, Homo sapien
ttgaaggctctgcacggtgtggatg

SEQ ID NO: 3169851 - DNA, 25 bp, Homo sapien
cacaacagccaagtctgccctttca

SEQ ID NO: 3169852 - DNA, 25 bp, Homo sapien
caatggcagtgccttgaggaagctc

SEQ ID NO: 3169853 - DNA, 25 bp, Homo sapien
tgttgagagctgtctcttggagctc

SEQ ID NO: 3169854 - DNA, 25 bp, Homo sapien
ctgaaatgagtaaggtgttgagagt

SEQ ID NO: 3169855 - DNA, 25 bp, Homo sapien
ttgagagttgtgttgtgttgagagc

SEQ ID NO: 3169856 - DNA, 25 bp, Homo sapien
cttctgaatgaagcacgtggggtga

SEQ ID NO: 3169857 - DNA, 25 bp, Homo sapien
taagtgctgtacacaaggcttttct

SEQ ID NO: 3169858 - DNA, 25 bp, Homo sapien
attaagaagatttgggggctgacca

SEQ ID NO: 3169859 - DNA, 25 bp, Homo sapien
gagacctacctctggtaccccctgc

SEQ ID NO: 3169860 - DNA, 25 bp, Homo sapien
acagaggctgcatgaagctaagtgc

SEQ ID NO: 3169861 - DNA, 25 bp, Homo sapien
ctggggcatgagcaattattccaca

SEQ ID NO: 3169862 - DNA, 25 bp, Homo sapien
gggcatgagcaattattccacacca

SEQ ID NO: 3169863 - DNA, 25 bp, Homo sapien
ggggcatgagcaattattccacacc

SEQ ID NO: 3169864 - DNA, 25 bp, Homo sapien
gcatgagcaattattccacaccaaa

SEQ ID NO: 3169865 - DNA, 25 bp, Homo sapien
gactccatcagacagtgtaaagctg

SEQ ID NO: 3169866 - DNA, 25 bp, Homo sapien
gcttgagtaaaggaactaatctgga

SEQ ID NO: 3169867 - DNA, 25 bp, Homo sapien
gaacatttcgtgaagtcagatcagc

SEQ ID NO: 3169868 - DNA, 25 bp, Homo sapien
tctcagcctcactagaatggacata

SEQ ID NO: 3169869 - DNA, 25 bp, Homo sapien
tgcacccgcattcctaagttctgta

SEQ ID NO: 3169870 - DNA, 25 bp, Homo sapien
tgtgtcagcatccaccgccttaagc

SEQ ID NO: 3169871 - DNA, 25 bp, Homo sapien
gccttaagctcaaactctgtgatgg

SEQ ID NO: 3169872 - DNA, 25 bp, Homo sapien
tgtacgacgggcagcgaatcatcga

SEQ ID NO: 3169873 - DNA, 25 bp, Homo sapien
tgaggtggaaatgctgcccattgct

SEQ ID NO: 3169874 - DNA, 25 bp, Homo sapien
attgctggttcgctcgatggtgcca

SEQ ID NO: 3169875 - DNA, 25 bp, Homo sapien
cagtgaaggtgaaccggtccttgag

SEQ ID NO: 3169876 - DNA, 25 bp, Homo sapien
catggctgtagctgacccggttctg

SEQ ID NO: 3169877 - DNA, 25 bp, Homo sapien
ttcccaggcgaggtttatgaactac

SEQ ID NO: 3169878 - DNA, 25 bp, Homo sapien
gacacagatgtaggggtgcccccag

SEQ ID NO: 3169879 - DNA, 25 bp, Homo sapien
ggcccacctttcaccagaattgaag

SEQ ID NO: 3169880 - DNA, 25 bp, Homo sapien
cccaggcgaggtttatgaactacag

SEQ ID NO: 3169881 - DNA, 25 bp, Homo sapien
tgaagtatgtcaggtccagggccta

SEQ ID NO: 3169882 - DNA, 25 bp, Homo sapien
ggatgggcaactgagcccgttccca

SEQ ID NO: 3169883 - DNA, 25 bp, Homo sapien
tacacagctgtaacctctgaagtct

SEQ ID NO: 3169884 - DNA, 25 bp, Homo sapien
catcccttatcatcctggcacaagg

SEQ ID NO: 3169885 - DNA, 25 bp, Homo sapien
actggagtcccaggttggtgacaat

SEQ ID NO: 3169886 - DNA, 25 bp, Homo sapien
taccgggaggatgtctactcggaac

SEQ ID NO: 3169887 - DNA, 25 bp, Homo sapien
tgccatccatgtattccagccactg

SEQ ID NO: 3169888 - DNA, 25 bp, Homo sapien
ggtgacaattctaggcgtgccatca

SEQ ID NO: 3169889 - DNA, 25 bp, Homo sapien
tagggcccgtcgttatctcatagac

SEQ ID NO: 3169890 - DNA, 25 bp, Homo sapien
tgtctgggtccatggtcagcagttc

SEQ ID NO: 3169891 - DNA, 25 bp, Homo sapien
ccttcttggtgatcaggttggttgc

SEQ ID NO: 3169892 - DNA, 25 bp, Homo sapien
tctcatagacaagctgcgcgtcctc

SEQ ID NO: 3169893 - DNA, 25 bp, Homo sapien
tgtgcaacacataacgaatcaaccc

SEQ ID NO: 3169894 - DNA, 25 bp, Homo sapien
tttaaagctgatgagtgaccactgg

SEQ ID NO: 3169895 - DNA, 25 bp, Homo sapien
tgaccactggatatggaagacattg

SEQ ID NO: 3169896 - DNA, 25 bp, Homo sapien
agacattgtcgctgaccacattggg

SEQ ID NO: 3169897 - DNA, 25 bp, Homo sapien
ggcatattggttcaggttcccagtc

SEQ ID NO: 3169898 - DNA, 25 bp, Homo sapien
gcgacacaggacgatggcatattgg

SEQ ID NO: 3169899 - DNA, 25 bp, Homo sapien
gtgacactgacagaccctgccttct

SEQ ID NO: 3169900 - DNA, 25 bp, Homo sapien
tactctacatagtcctgttgcccag

SEQ ID NO: 3169901 - DNA, 25 bp, Homo sapien
aaacacgtcatcatcgttgatgaca

SEQ ID NO: 3169902 - DNA, 25 bp, Homo sapien
catcgttgatgacaatggtgcagga

SEQ ID NO: 3169903 - DNA, 25 bp, Homo sapien
catcatcgttgatgacaatggtgca

SEQ ID NO: 3169904 - DNA, 25 bp, Homo sapien
ggtgtcctctcgctcatcaaactgg

SEQ ID NO: 3169905 - DNA, 25 bp, Homo sapien
aaaaccagcgctctcgttaacccag

SEQ ID NO: 3169906 - DNA, 25 bp, Homo sapien
tgaattcccctaacagggcataagc

SEQ ID NO: 3169907 - DNA, 25 bp, Homo sapien
tgtgggttcatcctcggtatcgttg

SEQ ID NO: 3169908 - DNA, 25 bp, Homo sapien
tatcgttgataatgaccttcgcctg

SEQ ID NO: 3169909 - DNA, 25 bp, Homo sapien
ccatagctgacttagggactgtgta

SEQ ID NO: 3169910 - DNA, 25 bp, Homo sapien
tcaataagcatgacatcacaggtgg

SEQ ID NO: 3169911 - DNA, 25 bp, Homo sapien
cctgattctagagcatagaggctac

SEQ ID NO: 3169912 - DNA, 25 bp, Homo sapien
cgaatatcacacgactcgcggcaga

SEQ ID NO: 3169913 - DNA, 25 bp, Homo sapien
aatgcgggcattgtcagaggcatct

SEQ ID NO: 3169914 - DNA, 25 bp, Homo sapien
ccagggacacagtcgaggcatcgtt

SEQ ID NO: 3169915 - DNA, 25 bp, Homo sapien
ggaccactaatgagcaccttggctg

SEQ ID NO: 3169916 - DNA, 25 bp, Homo sapien
tcactgacagtgaaagccgtgttgc

SEQ ID NO: 3169917 - DNA, 25 bp, Homo sapien
gagcttttctaatctagcttcagtg

SEQ ID NO: 3169918 - DNA, 25 bp, Homo sapien
aggtgaaggcctagaggtgtcacta

SEQ ID NO: 3169919 - DNA, 25 bp, Homo sapien
aatagtggcagcttttagccctttg

SEQ ID NO: 3169920 - DNA, 25 bp, Homo sapien
agtgatgctcctatggcccatctga

SEQ ID NO: 3169921 - DNA, 25 bp, Homo sapien
gaattaagattcatagagattttaa

SEQ ID NO: 3169922 - DNA, 25 bp, Homo sapien
ctgaattaagattcatagagatttt

SEQ ID NO: 3169923 - DNA, 25 bp, Homo sapien
attaagattcatagagattttaatg

SEQ ID NO: 3169924 - DNA, 25 bp, Homo sapien
taagattcatagagattttaatggt

SEQ ID NO: 3169925 - DNA, 25 bp, Homo sapien
catggcggataactggaatctttac

SEQ ID NO: 3169926 - DNA, 25 bp, Homo sapien
ccgagagctgggaacgtagtcaact

SEQ ID NO: 3169927 - DNA, 25 bp, Homo sapien
tagagaggtcagtaccatggcggat

SEQ ID NO: 3169928 - DNA, 25 bp, Homo sapien
gtagtcaactcctggtgtggcagaa

SEQ ID NO: 3169929 - DNA, 25 bp, Homo sapien
cattaattgcaatgactgcctggaa

SEQ ID NO: 3169930 - DNA, 25 bp, Homo sapien
agggtttggtcagttcggctccttg

SEQ ID NO: 3169931 - DNA, 25 bp, Homo sapien
tccagtccttcaattaccggatact

SEQ ID NO: 3169932 - DNA, 25 bp, Homo sapien
ctgagtgtcatccaagatagtcaag

SEQ ID NO: 3169933 - DNA, 25 bp, Homo sapien
gaaagacagacgcaccattagtgga

SEQ ID NO: 3169934 - DNA, 25 bp, Homo sapien
agacagaaagacagacgcaccatta

SEQ ID NO: 3169935 - DNA, 25 bp, Homo sapien
gacagacgcaccattagtggaagac

SEQ ID NO: 3169936 - DNA, 25 bp, Homo sapien
cgcaccattagtggaagacagggaa

SEQ ID NO: 3169937 - DNA, 25 bp, Homo sapien
agtgatagggacatgcaggacaccc

SEQ ID NO: 3169938 - DNA, 25 bp, Homo sapien
tcaggtctccgctccgagtgatagg

SEQ ID NO: 3169939 - DNA, 25 bp, Homo sapien
gaaatgtaatccgtgaagagtctgc

SEQ ID NO: 3169940 - DNA, 25 bp, Homo sapien
tccatgacctgagcggaatggctct

SEQ ID NO: 3169941 - DNA, 25 bp, Homo sapien
atctttcagccaccaccaatccact

SEQ ID NO: 3169942 - DNA, 25 bp, Homo sapien
ctcatctttcagccaccaccaatcc

SEQ ID NO: 3169943 - DNA, 25 bp, Homo sapien
ctttcagccaccaccaatccactta

SEQ ID NO: 3169944 - DNA, 25 bp, Homo sapien
tcatctttcagccaccaccaatcca

SEQ ID NO: 3169945 - DNA, 25 bp, Homo sapien
tcatcgtggatatagaccgtacagt

SEQ ID NO: 3169946 - DNA, 25 bp, Homo sapien
catggagtcatcgtggatatagacc

SEQ ID NO: 3169947 - DNA, 25 bp, Homo sapien
ggatatagaccgtacagttcttcac

SEQ ID NO: 3169948 - DNA, 25 bp, Homo sapien
ctggctcaaacatggagtcatcgtg

SEQ ID NO: 3169949 - DNA, 25 bp, Homo sapien
tggtggccatgttattctttccaat

SEQ ID NO: 3169950 - DNA, 25 bp, Homo sapien
agtggtttccaagaggaaggccgag

SEQ ID NO: 3169951 - DNA, 25 bp, Homo sapien
tgttattctttccaattctagctcc

SEQ ID NO: 3169952 - DNA, 25 bp, Homo sapien
caattctagctccactccagtggtt

SEQ ID NO: 3169953 - DNA, 25 bp, Homo sapien
cgggttcccggacttggtatgcagc

SEQ ID NO: 3169954 - DNA, 25 bp, Homo sapien
cgtgctgcagcgaaccttggaggtc

SEQ ID NO: 3169955 - DNA, 25 bp, Homo sapien
gtcctgttctgatcccctctgcgga

SEQ ID NO: 3169956 - DNA, 25 bp, Homo sapien
tgttcagaatcgcaatggcatctgg

SEQ ID NO: 3169957 - DNA, 25 bp, Homo sapien
gaacttcaagactcggctctttggg

SEQ ID NO: 3169958 - DNA, 25 bp, Homo sapien
ggactgaacttcaagactcggctct

SEQ ID NO: 3169959 - DNA, 25 bp, Homo sapien
cgggactgaacttcaagactcggct

SEQ ID NO: 3169960 - DNA, 25 bp, Homo sapien
caagactcggctctttgggtaataa

SEQ ID NO: 3169961 - DNA, 25 bp, Homo sapien
agtgagaaagattcatgccattccc

SEQ ID NO: 3169962 - DNA, 25 bp, Homo sapien
gccattcccggtcttcattggacag

SEQ ID NO: 3169963 - DNA, 25 bp, Homo sapien
gattcatgccattcccggtcttcat

SEQ ID NO: 3169964 - DNA, 25 bp, Homo sapien
cggtcttcattggacaggatctcaa

SEQ ID NO: 3169965 - DNA, 25 bp, Homo sapien
gcagtagtcacatccccaagaactg

SEQ ID NO: 3169966 - DNA, 25 bp, Homo sapien
agtagtcacatccccaagaactgct

SEQ ID NO: 3169967 - DNA, 25 bp, Homo sapien
cagtagtcacatccccaagaactgc

SEQ ID NO: 3169968 - DNA, 25 bp, Homo sapien
tgctggcaatatgaggctccctgct

SEQ ID NO: 3169969 - DNA, 25 bp, Homo sapien
gggtggtgctggcaatatgaggctc

SEQ ID NO: 3169970 - DNA, 25 bp, Homo sapien
ggtgctggcaatatgaggctccctg

SEQ ID NO: 3169971 - DNA, 25 bp, Homo sapien
gctgcctcctggtctagaattgtca

SEQ ID NO: 3169972 - DNA, 25 bp, Homo sapien
gctccttcatgacagcgtatctggg

SEQ ID NO: 3169973 - DNA, 25 bp, Homo sapien
ggtgacacagaccagtgggtagcct

SEQ ID NO: 3169974 - DNA, 25 bp, Homo sapien
acagatgtctggttgatgccggcct

SEQ ID NO: 3169975 - DNA, 25 bp, Homo sapien
tcttccacatggtcatagtcagcaa

SEQ ID NO: 3169976 - DNA, 25 bp, Homo sapien
tggtaacaatgttgctccttaaggg

SEQ ID NO: 3169977 - DNA, 25 bp, Homo sapien
ccttggccacacaacgcacatggaa

SEQ ID NO: 3169978 - DNA, 25 bp, Homo sapien
tagcactgtctgttccaatggtaac

SEQ ID NO: 3169979 - DNA, 25 bp, Homo sapien
cacatggaacctccggctgaagtaa

SEQ ID NO: 3169980 - DNA, 25 bp, Homo sapien
tgaaggactgagcctggaagcctct

SEQ ID NO: 3169981 - DNA, 25 bp, Homo sapien
ctgttcggatgctccttatgtttga

SEQ ID NO: 3169982 - DNA, 25 bp, Homo sapien
gctccttatgtttgacatccaggta

SEQ ID NO: 3169983 - DNA, 25 bp, Homo sapien
ccaggtatttcaaggttgcgatgaa

SEQ ID NO: 3169984 - DNA, 25 bp, Homo sapien
tcaatctatgtgtggtggaaggcac

SEQ ID NO: 3169985 - DNA, 25 bp, Homo sapien
aatctatgtgtggtggaaggcacca

SEQ ID NO: 3169986 - DNA, 25 bp, Homo sapien
atctatgtgtggtggaaggcaccac

SEQ ID NO: 3169987 - DNA, 25 bp, Homo sapien
caatctatgtgtggtggaaggcacc

SEQ ID NO: 3169988 - DNA, 25 bp, Homo sapien
taggagtgcctcttagatgccaaga

SEQ ID NO: 3169989 - DNA, 25 bp, Homo sapien
tattgtaggacagtagggttccggc

SEQ ID NO: 3169990 - DNA, 25 bp, Homo sapien
gattgtcctgggaaacacacaaagg

SEQ ID NO: 3169991 - DNA, 25 bp, Homo sapien
caagaagcactatactggcagaaga

SEQ ID NO: 3169992 - DNA, 25 bp, Homo sapien
tgtgggatctgcaccgaaatgtgga

SEQ ID NO: 3169993 - DNA, 25 bp, Homo sapien
cctctcaggtcataggtggtaacta

SEQ ID NO: 3169994 - DNA, 25 bp, Homo sapien
taactaaattggagcagacgtgctg

SEQ ID NO: 3169995 - DNA, 25 bp, Homo sapien
tagaaaatgtaagttgtgcaacggc

SEQ ID NO: 3169996 - DNA, 25 bp, Homo sapien
tggaagtcagcggttacagagcccc

SEQ ID NO: 3169997 - DNA, 25 bp, Homo sapien
ataagcatcaaaggtccacacgcag

SEQ ID NO: 3169998 - DNA, 25 bp, Homo sapien
gctggatggtcttcggctctcgcac

SEQ ID NO: 3169999 - DNA, 25 bp, Homo sapien
cccagggcagtgctatcatagacca

SEQ ID NO: 3170000 - DNA, 25 bp, Homo sapien
ctgcacgtacttcagtaatttcctg

SEQ ID NO: 3170001 - DNA, 25 bp, Homo sapien
ctcagagctgcacgtacttcagtaa

SEQ ID NO: 3170002 - DNA, 25 bp, Homo sapien
gagctgcacgtacttcagtaatttc

SEQ ID NO: 3170003 - DNA, 25 bp, Homo sapien
cagagctgcacgtacttcagtaatt

SEQ ID NO: 3170004 - DNA, 25 bp, Homo sapien
gacacatatagaggcacgtgcactg

SEQ ID NO: 3170005 - DNA, 25 bp, Homo sapien
ctccagagaacagtgtcatagaaga

SEQ ID NO: 3170006 - DNA, 25 bp, Homo sapien
cgtgcactgtcaagaaggactgggc

SEQ ID NO: 3170007 - DNA, 25 bp, Homo sapien
tgtcacatagatgtaggacacatat

SEQ ID NO: 3170008 - DNA, 25 bp, Homo sapien
gaattcaatgacaagacggccatcc

SEQ ID NO: 3170009 - DNA, 25 bp, Homo sapien
gacggccatcctctcgaatgtagat

SEQ ID NO: 3170010 - DNA, 25 bp, Homo sapien
tttggcatgggtcttgaattcaatg

SEQ ID NO: 3170011 - DNA, 25 bp, Homo sapien
ctctgaatttggcatgggtcttgaa

SEQ ID NO: 3170012 - DNA, 25 bp, Homo sapien
gaatcaaaagtctgagcgctccata

SEQ ID NO: 3170013 - DNA, 25 bp, Homo sapien
gcgctccataatagctgcaagtcaa

SEQ ID NO: 3170014 - DNA, 25 bp, Homo sapien
caatacgaaagatttcacttctggg

SEQ ID NO: 3170015 - DNA, 25 bp, Homo sapien
cctaggtggtctggagtcaatacga

SEQ ID NO: 3170016 - DNA, 25 bp, Homo sapien
ggtgtactctcctgagtagtccttc

SEQ ID NO: 3170017 - DNA, 25 bp, Homo sapien
tctctcctgggtcaacccatggctg

SEQ ID NO: 3170018 - DNA, 25 bp, Homo sapien
tgcactgtgcaagggatcaggtaga

SEQ ID NO: 3170019 - DNA, 25 bp, Homo sapien
aggtagatggtgtactctcctgagt

SEQ ID NO: 3170020 - DNA, 25 bp, Homo sapien
agtgttaagtgaatacacaactggc

SEQ ID NO: 3170021 - DNA, 25 bp, Homo sapien
ggaacaccttctcattattgcagag

SEQ ID NO: 3170022 - DNA, 25 bp, Homo sapien
catatcagatgtattgggatccatt

SEQ ID NO: 3170023 - DNA, 25 bp, Homo sapien
catttctgctagtgacatatcagat

SEQ ID NO: 3170024 - DNA, 25 bp, Homo sapien
ccttgcccgtacaaagatagacttt

SEQ ID NO: 3170025 - DNA, 25 bp, Homo sapien
gtccccgtgggatcaaagaaaggca

SEQ ID NO: 3170026 - DNA, 25 bp, Homo sapien
agtactcggccataaaggatttgac

SEQ ID NO: 3170027 - DNA, 25 bp, Homo sapien
tttggctgaatgcatccatactggg

SEQ ID NO: 3170028 - DNA, 25 bp, Homo sapien
cagttacaggcatgtcattagcaac

SEQ ID NO: 3170029 - DNA, 25 bp, Homo sapien
cgcgcccggacctctgatggttttt

SEQ ID NO: 3170030 - DNA, 25 bp, Homo sapien
taatacactaactctgggaacccac

SEQ ID NO: 3170031 - DNA, 25 bp, Homo sapien
gcacttcttgctgcccctatgtgaa

SEQ ID NO: 3170032 - DNA, 25 bp, Homo sapien
gcaagatttagaaagatggttccac

SEQ ID NO: 3170033 - DNA, 25 bp, Homo sapien
tatgtgctgtgaagccctctccata

SEQ ID NO: 3170034 - DNA, 25 bp, Homo sapien
ctatattggtaggtggcagtgactg

SEQ ID NO: 3170035 - DNA, 25 bp, Homo sapien
agtactcatcactcctggctttagg

SEQ ID NO: 3170036 - DNA, 25 bp, Homo sapien
tcagttacctctggctgattgcggt

SEQ ID NO: 3170037 - DNA, 25 bp, Homo sapien
agtacttatcagttacctctggctg

SEQ ID NO: 3170038 - DNA, 25 bp, Homo sapien
acctggcatgttactgaccacatgg

SEQ ID NO: 3170039 - DNA, 25 bp, Homo sapien
tactgaccacatggaaatcaggcaa

SEQ ID NO: 3170040 - DNA, 25 bp, Homo sapien
tcttaagcttctgttcttctcacca

SEQ ID NO: 3170041 - DNA, 25 bp, Homo sapien
aagcttctgttcttctcaccaaact

SEQ ID NO: 3170042 - DNA, 25 bp, Homo sapien
ggtcttaagcttctgttcttctcac

SEQ ID NO: 3170043 - DNA, 25 bp, Homo sapien
gcttctgttcttctcaccaaactca

SEQ ID NO: 3170044 - DNA, 25 bp, Homo sapien
atcaaggatcagctggccatcgggc

SEQ ID NO: 3170045 - DNA, 25 bp, Homo sapien
tttgaacgtgtaagccgcctcaggc

SEQ ID NO: 3170046 - DNA, 25 bp, Homo sapien
tagatgacctggagataccactggt

SEQ ID NO: 3170047 - DNA, 25 bp, Homo sapien
gatgttgacgttccgcacagtgcag

SEQ ID NO: 3170048 - DNA, 25 bp, Homo sapien
aaacttctgttccatcttgtaaatt

SEQ ID NO: 3170049 - DNA, 25 bp, Homo sapien
catcttgtaaattgttgtgaactct

SEQ ID NO: 3170050 - DNA, 25 bp, Homo sapien
cttgtaaattgttgtgaactctgac

SEQ ID NO: 3170051 - DNA, 25 bp, Homo sapien
cttctgttccatcttgtaaattgtt

SEQ ID NO: 3170052 - DNA, 25 bp, Homo sapien
tgaaaggcgtggctcacaaaggtcc

SEQ ID NO: 3170053 - DNA, 25 bp, Homo sapien
tctgttacaggaacgggcaaagacc

SEQ ID NO: 3170054 - DNA, 25 bp, Homo sapien
caattagaggccaaggagcatacgc

SEQ ID NO: 3170055 - DNA, 25 bp, Homo sapien
taatgggccaaatggaagttcgctc

SEQ ID NO: 3170056 - DNA, 25 bp, Homo sapien
gtctttagtccttcccactctagct

SEQ ID NO: 3170057 - DNA, 25 bp, Homo sapien
tggggctcagtctttagtccttccc

SEQ ID NO: 3170058 - DNA, 25 bp, Homo sapien
ggctcagtctttagtccttcccact

SEQ ID NO: 3170059 - DNA, 25 bp, Homo sapien
tcagtctttagtccttcccactcta

SEQ ID NO: 3170060 - DNA, 25 bp, Homo sapien
cagtctgagcaggtgtgtagtatcc

SEQ ID NO: 3170061 - DNA, 25 bp, Homo sapien
tccactagagaagtactggcattca

SEQ ID NO: 3170062 - DNA, 25 bp, Homo sapien
ggtacaataaaagggcagcaaagca

SEQ ID NO: 3170063 - DNA, 25 bp, Homo sapien
caaatacctatagcagactgagact

SEQ ID NO: 3170064 - DNA, 25 bp, Homo sapien
tgaacacagttaatgagcgtctcag

SEQ ID NO: 3170065 - DNA, 25 bp, Homo sapien
gaagaccgcttcaaatttagaatga

SEQ ID NO: 3170066 - DNA, 25 bp, Homo sapien
tggcatcttaatggcaatgtctata

SEQ ID NO: 3170067 - DNA, 25 bp, Homo sapien
agcgtctcagattcaccctcattag

SEQ ID NO: 3170068 - DNA, 25 bp, Homo sapien
aagacctatgataatctggaaacat

SEQ ID NO: 3170069 - DNA, 25 bp, Homo sapien
ccaaagacctatgataatctggaaa

SEQ ID NO: 3170070 - DNA, 25 bp, Homo sapien
gacctatgataatctggaaacatat

SEQ ID NO: 3170071 - DNA, 25 bp, Homo sapien
cctatgataatctggaaacatataa

SEQ ID NO: 3170072 - DNA, 25 bp, Homo sapien
gggctctatccctgtacacaggcgc

SEQ ID NO: 3170073 - DNA, 25 bp, Homo sapien
cttttctccctacgccctcatttcg

SEQ ID NO: 3170074 - DNA, 25 bp, Homo sapien
tacgccctcatttcgctctcggttt

SEQ ID NO: 3170075 - DNA, 25 bp, Homo sapien
gctccctcaccggtctctaagcttc

SEQ ID NO: 3170076 - DNA, 25 bp, Homo sapien
taaactgcgaacaaactgcgagcga

SEQ ID NO: 3170077 - DNA, 25 bp, Homo sapien
caaactgcgagcgaaggtgtcagcc

SEQ ID NO: 3170078 - DNA, 25 bp, Homo sapien
tgtgcgagtaaactgcgaacaaact

SEQ ID NO: 3170079 - DNA, 25 bp, Homo sapien
gctggctccgggtccggatcgcgac

SEQ ID NO: 3170080 - DNA, 25 bp, Homo sapien
caggactgaggtccctccagctccc

SEQ ID NO: 3170081 - DNA, 25 bp, Homo sapien
tgcaggactgaggtccctccagctc

SEQ ID NO: 3170082 - DNA, 25 bp, Homo sapien
gaaatgcaggactgaggtccctcca

SEQ ID NO: 3170083 - DNA, 25 bp, Homo sapien
aatgcaggactgaggtccctccagc

SEQ ID NO: 3170084 - DNA, 25 bp, Homo sapien
gctgtaataagcgaagctttcaggg

SEQ ID NO: 3170085 - DNA, 25 bp, Homo sapien
ataagcgaagctttcagggagcgag

SEQ ID NO: 3170086 - DNA, 25 bp, Homo sapien
gacagctgagtatcagcttgggccc

SEQ ID NO: 3170087 - DNA, 25 bp, Homo sapien
aagacctgggtgacccacccatggc

SEQ ID NO: 3170088 - DNA, 25 bp, Homo sapien
gatgggtgcgattccaagtccacag

SEQ ID NO: 3170089 - DNA, 25 bp, Homo sapien
ccgaggaaccttccgactcccagct

SEQ ID NO: 3170090 - DNA, 25 bp, Homo sapien
gagatggctaagtggatcccttacg

SEQ ID NO: 3170091 - DNA, 25 bp, Homo sapien
agacctctgagccagccccgtctgc

SEQ ID NO: 3170092 - DNA, 25 bp, Homo sapien
gctgccttcagttggattccttgtg

SEQ ID NO: 3170093 - DNA, 25 bp, Homo sapien
agctgccttcagttggattccttgt

SEQ ID NO: 3170094 - DNA, 25 bp, Homo sapien
ctgccttcagttggattccttgtgc

SEQ ID NO: 3170095 - DNA, 25 bp, Homo sapien
tagctgccttcagttggattccttg

SEQ ID NO: 3170096 - DNA, 25 bp, Homo sapien
tatcccacctttgccttgagctgag

SEQ ID NO: 3170097 - DNA, 25 bp, Homo sapien
gatatcccacctttgccttgagctg

SEQ ID NO: 3170098 - DNA, 25 bp, Homo sapien
cccacctttgccttgagctgagatc

SEQ ID NO: 3170099 - DNA, 25 bp, Homo sapien
cacctttgccttgagctgagatcac

SEQ ID NO: 3170100 - DNA, 25 bp, Homo sapien
gcatcttccccactccaagaatatt

SEQ ID NO: 3170101 - DNA, 25 bp, Homo sapien
catggaagttattttattgtaagga

SEQ ID NO: 3170102 - DNA, 25 bp, Homo sapien
ctgccatcgcaccgggctatttttg

SEQ ID NO: 3170103 - DNA, 25 bp, Homo sapien
gtattttatccacatggaagttatt

SEQ ID NO: 3170104 - DNA, 25 bp, Homo sapien
tctctgagccactcataagtattag

SEQ ID NO: 3170105 - DNA, 25 bp, Homo sapien
agttgttcctaatgtttgctctctg

SEQ ID NO: 3170106 - DNA, 25 bp, Homo sapien
tccatagcagttctgagttgttcct

SEQ ID NO: 3170107 - DNA, 25 bp, Homo sapien
taggagcccttctttggctagggcc

SEQ ID NO: 3170108 - DNA, 25 bp, Homo sapien
ctttgaacccaggaacaacagcatc

SEQ ID NO: 3170109 - DNA, 25 bp, Homo sapien
aactctttgaacccaggaacaacag

SEQ ID NO: 3170110 - DNA, 25 bp, Homo sapien
ggtcagatcccagttgttcatgcat

SEQ ID NO: 3170111 - DNA, 25 bp, Homo sapien
tacatgtgtaagaagctcccaggtg

SEQ ID NO: 3170112 - DNA, 25 bp, Homo sapien
gcagtctctgtaccacctggagtga

SEQ ID NO: 3170113 - DNA, 25 bp, Homo sapien
tctacacagctagttgcaggcagag

SEQ ID NO: 3170114 - DNA, 25 bp, Homo sapien
aggctgcagtgagctgtgattgtgt

SEQ ID NO: 3170115 - DNA, 25 bp, Homo sapien
ttgtgtcactgcactgtagtctagg

SEQ ID NO: 3170116 - DNA, 25 bp, Homo sapien
gtgtcactgcactgtagtctaggtg

SEQ ID NO: 3170117 - DNA, 25 bp, Homo sapien
gaggaccacttgagcgcagaaggtc

SEQ ID NO: 3170118 - DNA, 25 bp, Homo sapien
cagcatccactgatgggctaaagtc

SEQ ID NO: 3170119 - DNA, 25 bp, Homo sapien
gcatccactgatgggctaaagtctg

SEQ ID NO: 3170120 - DNA, 25 bp, Homo sapien
ctgatgggctaaagtctggataatc

SEQ ID NO: 3170121 - DNA, 25 bp, Homo sapien
tccactgatgggctaaagtctggat

SEQ ID NO: 3170122 - DNA, 25 bp, Homo sapien
gagcaaaaggaagtcttgtacattg

SEQ ID NO: 3170123 - DNA, 25 bp, Homo sapien
tgaagagaagcatccccatcaatgt

SEQ ID NO: 3170124 - DNA, 25 bp, Homo sapien
tcagagagcagtatggcaaaatttc

SEQ ID NO: 3170125 - DNA, 25 bp, Homo sapien
ggcaaaatttctagttgatttgaag

SEQ ID NO: 3170126 - DNA, 25 bp, Homo sapien
ccttaacaatcagctgccgctgtgc

SEQ ID NO: 3170127 - DNA, 25 bp, Homo sapien
ccatatgctgcttgatattccttaa

SEQ ID NO: 3170128 - DNA, 25 bp, Homo sapien
gccgctgtgcatttgacctctcagt

SEQ ID NO: 3170129 - DNA, 25 bp, Homo sapien
gacctctcagtcagaatgctgatga

SEQ ID NO: 3170130 - DNA, 25 bp, Homo sapien
catgagatgctcaaagtggccagag

SEQ ID NO: 3170131 - DNA, 25 bp, Homo sapien
agagagatcacccttcaagtcatct

SEQ ID NO: 3170132 - DNA, 25 bp, Homo sapien
tctttagctgctttgcatcaaagac

SEQ ID NO: 3170133 - DNA, 25 bp, Homo sapien
actgctggtggagtcactagggcca

SEQ ID NO: 3170134 - DNA, 25 bp, Homo sapien
gccacagagttagacaggagctgca

SEQ ID NO: 3170135 - DNA, 25 bp, Homo sapien
gatgacttggtcaaaccctgggcag

SEQ ID NO: 3170136 - DNA, 25 bp, Homo sapien
tgggagagtccagaccaaaagggca

SEQ ID NO: 3170137 - DNA, 25 bp, Homo sapien
gaagcctattgatatggaccagtca

SEQ ID NO: 3170138 - DNA, 25 bp, Homo sapien
tgtataataggcttgagagatatcc

SEQ ID NO: 3170139 - DNA, 25 bp, Homo sapien
aaggcatcttcgtttgttcccgcgc

SEQ ID NO: 3170140 - DNA, 25 bp, Homo sapien
taggcttgagagatatccttcattt

SEQ ID NO: 3170141 - DNA, 25 bp, Homo sapien
gtcctggtagttaagatttcaatca

SEQ ID NO: 3170142 - DNA, 25 bp, Homo sapien
aagtcaacagagctttccggaagtc

SEQ ID NO: 3170143 - DNA, 25 bp, Homo sapien
gccaaagtcaacagagctttccgga

SEQ ID NO: 3170144 - DNA, 25 bp, Homo sapien
tcggaactaatgtcatctccaagac

SEQ ID NO: 3170145 - DNA, 25 bp, Homo sapien
gaagtcaccagatgtttcggaacta

SEQ ID NO: 3170146 - DNA, 25 bp, Homo sapien
ctttataataaaagtcataagcctt

SEQ ID NO: 3170147 - DNA, 25 bp, Homo sapien
tctttataataaaagtcataagcct

SEQ ID NO: 3170148 - DNA, 25 bp, Homo sapien
catctttataataaaagtcataagc

SEQ ID NO: 3170149 - DNA, 25 bp, Homo sapien
atctttataataaaagtcataagcc

SEQ ID NO: 3170150 - DNA, 25 bp, Homo sapien
gctgtgaatacacctcatccttgac

SEQ ID NO: 3170151 - DNA, 25 bp, Homo sapien
ctgtgaatacacctcatccttgacc

SEQ ID NO: 3170152 - DNA, 25 bp, Homo sapien
gtttggccagatgctcatccacttt

SEQ ID NO: 3170153 - DNA, 25 bp, Homo sapien
tttggccagatgctcatccactttc

SEQ ID NO: 3170154 - DNA, 25 bp, Homo sapien
taattgaggaaagctccttaaacac

SEQ ID NO: 3170155 - DNA, 25 bp, Homo sapien
tgtcttcatccgtgccccatctgtt

SEQ ID NO: 3170156 - DNA, 25 bp, Homo sapien
ccttaaacacaggatctcagtgaat

SEQ ID NO: 3170157 - DNA, 25 bp, Homo sapien
ctcagtgaatttgtcttcatccgtg

SEQ ID NO: 3170158 - DNA, 25 bp, Homo sapien
tgttccgtcaactcagcataagctt

SEQ ID NO: 3170159 - DNA, 25 bp, Homo sapien
catgtaatagctggtctgacgataa

SEQ ID NO: 3170160 - DNA, 25 bp, Homo sapien
tctgtaaactagcatctggaagcca

SEQ ID NO: 3170161 - DNA, 25 bp, Homo sapien
tccagaacagttctaggagatgcca

SEQ ID NO: 3170162 - DNA, 25 bp, Homo sapien
tgccccaagcaaaacctgtacatat

SEQ ID NO: 3170163 - DNA, 25 bp, Homo sapien
tatgcagaagatcaagtagcaagct

SEQ ID NO: 3170164 - DNA, 25 bp, Homo sapien
tacatatgtcaccaagtatacaggc

SEQ ID NO: 3170165 - DNA, 25 bp, Homo sapien
catttcctaaggtggcatggcctac

SEQ ID NO: 3170166 - DNA, 25 bp, Homo sapien
cacaatgtccttttggctgatattt

SEQ ID NO: 3170167 - DNA, 25 bp, Homo sapien
ccacaatgtccttttggctgatatt

SEQ ID NO: 3170168 - DNA, 25 bp, Homo sapien
cgtgtttcctgtcaatccccagtga

SEQ ID NO: 3170169 - DNA, 25 bp, Homo sapien
aatgcagaacatgcctctgttgcag

SEQ ID NO: 3170170 - DNA, 25 bp, Homo sapien
tccccagtgatcatgcccttgtgct

SEQ ID NO: 3170171 - DNA, 25 bp, Homo sapien
gctgtccactgccagacgtgtttcc

SEQ ID NO: 3170172 - DNA, 25 bp, Homo sapien
cagacaccccgaacacctacgcttt

SEQ ID NO: 3170173 - DNA, 25 bp, Homo sapien
aactcccacagcgactgactcatct

SEQ ID NO: 3170174 - DNA, 25 bp, Homo sapien
agcgactgactcatctctggatccc

SEQ ID NO: 3170175 - DNA, 25 bp, Homo sapien
gaacacctacgctttccctgataac

SEQ ID NO: 3170176 - DNA, 25 bp, Homo sapien
gatgcagtctttcggctaaaaaggc

SEQ ID NO: 3170177 - DNA, 25 bp, Homo sapien
cttcaaggctcgatgcagtctttcg

SEQ ID NO: 3170178 - DNA, 25 bp, Homo sapien
ggctcgatgcagtctttcggctaaa

SEQ ID NO: 3170179 - DNA, 25 bp, Homo sapien
tcaaggctcgatgcagtctttcggc

SEQ ID NO: 3170180 - DNA, 25 bp, Homo sapien
gaactctgttcgaatgtccaaaagg

SEQ ID NO: 3170181 - DNA, 25 bp, Homo sapien
gatctggacaccattattcggttca

SEQ ID NO: 3170182 - DNA, 25 bp, Homo sapien
tagggaatagccataatgcttcttg

SEQ ID NO: 3170183 - DNA, 25 bp, Homo sapien
caaaaggtcaatttctgatctggac

SEQ ID NO: 3170184 - DNA, 25 bp, Homo sapien
ttaagctcagacaacacatttatac

SEQ ID NO: 3170185 - DNA, 25 bp, Homo sapien
catttatacattgacaaggagagag

SEQ ID NO: 3170186 - DNA, 25 bp, Homo sapien
taagggatattttgctgctactatt

SEQ ID NO: 3170187 - DNA, 25 bp, Homo sapien
gaagaaaaattagtggctagtacac

SEQ ID NO: 3170188 - DNA, 25 bp, Homo sapien
tttcagaaacaaccatctaaaaaga

SEQ ID NO: 3170189 - DNA, 25 bp, Homo sapien
caaccatctaaaaagatcctgttct

SEQ ID NO: 3170190 - DNA, 25 bp, Homo sapien
tacttaataatatgtgttaggtggt

SEQ ID NO: 3170191 - DNA, 25 bp, Homo sapien
ggaactctatcccatgaatttcaga

SEQ ID NO: 3170192 - DNA, 25 bp, Homo sapien
aaggtgtcaatggacaaagaaatgt

SEQ ID NO: 3170193 - DNA, 25 bp, Homo sapien
aaaggtgtcaatggacaaagaaatg

SEQ ID NO: 3170194 - DNA, 25 bp, Homo sapien
ttaccccctgagaaaggtgtcaatg

SEQ ID NO: 3170195 - DNA, 25 bp, Homo sapien
ccctgagaaaggtgtcaatggacaa

SEQ ID NO: 3170196 - DNA, 25 bp, Homo sapien
taaagtagtaagaggtacacattgg

SEQ ID NO: 3170197 - DNA, 25 bp, Homo sapien
tgtctatgaaggaaaactaccaaaa

SEQ ID NO: 3170198 - DNA, 25 bp, Homo sapien
ataaagtagtaagaggtacacattg

SEQ ID NO: 3170199 - DNA, 25 bp, Homo sapien
tattagaatgttctactggctccct

SEQ ID NO: 3170200 - DNA, 25 bp, Homo sapien
catgactttctcatagaagcctttc

SEQ ID NO: 3170201 - DNA, 25 bp, Homo sapien
ggctcccttacctccatacattttg

SEQ ID NO: 3170202 - DNA, 25 bp, Homo sapien
atcatgactttctcatagaagcctt

SEQ ID NO: 3170203 - DNA, 25 bp, Homo sapien
tctgcaatagcagagctgacaagtc

SEQ ID NO: 3170204 - DNA, 25 bp, Homo sapien
caattaggcgttctaccagttagtc

SEQ ID NO: 3170205 - DNA, 25 bp, Homo sapien
tttcatagtaagacacaataggcct

SEQ ID NO: 3170206 - DNA, 25 bp, Homo sapien
tcttacatggctcaaagacatctca

SEQ ID NO: 3170207 - DNA, 25 bp, Homo sapien
gagtgtgatttcatagtctccagaa

SEQ ID NO: 3170208 - DNA, 25 bp, Homo sapien
tttttaagagtgtgatttcatagtc

SEQ ID NO: 3170209 - DNA, 25 bp, Homo sapien
ttaagagtgtgatttcatagtctcc

SEQ ID NO: 3170210 - DNA, 25 bp, Homo sapien
aagagtgtgatttcatagtctccag

SEQ ID NO: 3170211 - DNA, 25 bp, Homo sapien
tgcttgttctcttaaatagtatgag

SEQ ID NO: 3170212 - DNA, 25 bp, Homo sapien
tgggaaagcccatcgtggacctttg

SEQ ID NO: 3170213 - DNA, 25 bp, Homo sapien
tgttgttgttatagaacaatgaaaa

SEQ ID NO: 3170214 - DNA, 25 bp, Homo sapien
ttatgagctgctacattataaatga

SEQ ID NO: 3170215 - DNA, 25 bp, Homo sapien
tatttaatggagtagaactataaag

SEQ ID NO: 3170216 - DNA, 25 bp, Homo sapien
tggagtagaactataaagattctta

SEQ ID NO: 3170217 - DNA, 25 bp, Homo sapien
ttatatttaatggagtagaactata

SEQ ID NO: 3170218 - DNA, 25 bp, Homo sapien
ttaatggagtagaactataaagatt

SEQ ID NO: 3170219 - DNA, 25 bp, Homo sapien
tttaaaatattagttgttggcacca

SEQ ID NO: 3170220 - DNA, 25 bp, Homo sapien
caggcatcaaacaatgttggcaagc

SEQ ID NO: 3170221 - DNA, 25 bp, Homo sapien
tagttgttggcaccaggcatcaaac

SEQ ID NO: 3170222 - DNA, 25 bp, Homo sapien
ggcaccaggcatcaaacaatgttgg

SEQ ID NO: 3170223 - DNA, 25 bp, Homo sapien
gatgcaaggccgtggggttcacttt

SEQ ID NO: 3170224 - DNA, 25 bp, Homo sapien
atagaagaagtttccaacagtttag

SEQ ID NO: 3170225 - DNA, 25 bp, Homo sapien
ggttttgccattgggatgcaaggcc

SEQ ID NO: 3170226 - DNA, 25 bp, Homo sapien
tagaagaagtttccaacagtttaga

SEQ ID NO: 3170227 - DNA, 25 bp, Homo sapien
aacgacatgacccttagaagctgcc

SEQ ID NO: 3170228 - DNA, 25 bp, Homo sapien
ctgaatggtttcagtactgctactg

SEQ ID NO: 3170229 - DNA, 25 bp, Homo sapien
gccaaatcctcgttgctgaatggtt

SEQ ID NO: 3170230 - DNA, 25 bp, Homo sapien
ttagaagctgccaaatcctcgttgc

SEQ ID NO: 3170231 - DNA, 25 bp, Homo sapien
gagtgtccctttcggtcacaagttc

SEQ ID NO: 3170232 - DNA, 25 bp, Homo sapien
ccaagaaatctgggcaacttattgt

SEQ ID NO: 3170233 - DNA, 25 bp, Homo sapien
tttggagtgtccctttcggtcacaa

SEQ ID NO: 3170234 - DNA, 25 bp, Homo sapien
gatggcattcattccacatgccagg

SEQ ID NO: 3170235 - DNA, 25 bp, Homo sapien
tgaaggtgtagttggtttattgtca

SEQ ID NO: 3170236 - DNA, 25 bp, Homo sapien
gaaggtgtagttggtttattgtcag

SEQ ID NO: 3170237 - DNA, 25 bp, Homo sapien
tggctgaacgccctgatcagtgtca

SEQ ID NO: 3170238 - DNA, 25 bp, Homo sapien
tcatgatccaggtggctgaacgccc

SEQ ID NO: 3170239 - DNA, 25 bp, Homo sapien
tgaacgccctgatcagtgtcacaga

SEQ ID NO: 3170240 - DNA, 25 bp, Homo sapien
tcagtgtcacagaggtcacctggag

SEQ ID NO: 3170241 - DNA, 25 bp, Homo sapien
cagatggtaatgtgctcatgtctta

SEQ ID NO: 3170242 - DNA, 25 bp, Homo sapien
tcagcacgcatatgaactatgaaag

SEQ ID NO: 3170243 - DNA, 25 bp, Homo sapien
tgaacccccaatcagcacgcatatg

SEQ ID NO: 3170244 - DNA, 25 bp, Homo sapien
acatctcacaccagagcatgaaccc

SEQ ID NO: 3170245 - DNA, 25 bp, Homo sapien
gtgacagcagcaatttggctctatg

SEQ ID NO: 3170246 - DNA, 25 bp, Homo sapien
tctatgcccttggacaatgcagggt

SEQ ID NO: 3170247 - DNA, 25 bp, Homo sapien
caatttggctctatgcccttggaca

SEQ ID NO: 3170248 - DNA, 25 bp, Homo sapien
ccttggacaatgcagggtgtggcta

SEQ ID NO: 3170249 - DNA, 25 bp, Homo sapien
tctgcgttggtaagtagatccacgt

SEQ ID NO: 3170250 - DNA, 25 bp, Homo sapien
cagtgagaacgagaagggctttaca

SEQ ID NO: 3170251 - DNA, 25 bp, Homo sapien
ggtcagcctgactcaaacctgtgtt

SEQ ID NO: 3170252 - DNA, 25 bp, Homo sapien
gttccttattgaaatgcctggctct

SEQ ID NO: 3170253 - DNA, 25 bp, Homo sapien
cgtggctctttcctaaacagggact

SEQ ID NO: 3170254 - DNA, 25 bp, Homo sapien
atctttgtggtagggtaaacataca

SEQ ID NO: 3170255 - DNA, 25 bp, Homo sapien
ggactttagtatcctggctcagaga

SEQ ID NO: 3170256 - DNA, 25 bp, Homo sapien
tagggtaaacatacaacgtggctct

SEQ ID NO: 3170257 - DNA, 25 bp, Homo sapien
ttctaggccatattcaaagatgtcc

SEQ ID NO: 3170258 - DNA, 25 bp, Homo sapien
gacaagcttggtctaggtcctatac

SEQ ID NO: 3170259 - DNA, 25 bp, Homo sapien
ctcagttagctagtggatggaattc

SEQ ID NO: 3170260 - DNA, 25 bp, Homo sapien
taagtcagggtgttcaaggcttccc

SEQ ID NO: 3170261 - DNA, 25 bp, Homo sapien
ttgttaaggctcaagttacgggcca

SEQ ID NO: 3170262 - DNA, 25 bp, Homo sapien
gacattctactgagcacacctctgg

SEQ ID NO: 3170263 - DNA, 25 bp, Homo sapien
ggtaatgggcagcaaaatgcccaga

SEQ ID NO: 3170264 - DNA, 25 bp, Homo sapien
gaattgttgctatgtccctttgcca

SEQ ID NO: 3170265 - DNA, 25 bp, Homo sapien
ttagaccattcggatgcctttctgg

SEQ ID NO: 3170266 - DNA, 25 bp, Homo sapien
agaccattcggatgcctttctggag

SEQ ID NO: 3170267 - DNA, 25 bp, Homo sapien
tagaccattcggatgcctttctgga

SEQ ID NO: 3170268 - DNA, 25 bp, Homo sapien
tctattactgacagatggatggcat

SEQ ID NO: 3170269 - DNA, 25 bp, Homo sapien
atctattactgacagatggatggca

SEQ ID NO: 3170270 - DNA, 25 bp, Homo sapien
aatctattactgacagatggatggc

SEQ ID NO: 3170271 - DNA, 25 bp, Homo sapien
ctgtggatctctgaatgacaaggga

SEQ ID NO: 3170272 - DNA, 25 bp, Homo sapien
cactcttctgcatacatctcattgg

SEQ ID NO: 3170273 - DNA, 25 bp, Homo sapien
ggcttggttatgtcacaaggatcca

SEQ ID NO: 3170274 - DNA, 25 bp, Homo sapien
tgatggctataggatggctaaagca

SEQ ID NO: 3170275 - DNA, 25 bp, Homo sapien
ccctaaccaggctataagctcaatg

SEQ ID NO: 3170276 - DNA, 25 bp, Homo sapien
gctcaatgagggcaaggactatatg

SEQ ID NO: 3170277 - DNA, 25 bp, Homo sapien
gactctatgcctatttagtgcctgg

SEQ ID NO: 3170278 - DNA, 25 bp, Homo sapien
aatgctatttcacagcactctactg

SEQ ID NO: 3170279 - DNA, 25 bp, Homo sapien
ccatgctgcctcatctcttagattg

SEQ ID NO: 3170280 - DNA, 25 bp, Homo sapien
tagattgttagacctggactcccaa

SEQ ID NO: 3170281 - DNA, 25 bp, Homo sapien
tttgatggagctaggatgaggatcc

SEQ ID NO: 3170282 - DNA, 25 bp, Homo sapien
ggatcctggtctcctaaccaggtag

SEQ ID NO: 3170283 - DNA, 25 bp, Homo sapien
tatcctaccacagtaccatatactg

SEQ ID NO: 3170284 - DNA, 25 bp, Homo sapien
gtcttcctaccacatgtaccctggt

SEQ ID NO: 3170285 - DNA, 25 bp, Homo sapien
ctaccacatgtaccctggtatccta

SEQ ID NO: 3170286 - DNA, 25 bp, Homo sapien
ggagaaataatgaaagacacctatt

SEQ ID NO: 3170287 - DNA, 25 bp, Homo sapien
ctgtgggacatgtccagccttctga

SEQ ID NO: 3170288 - DNA, 25 bp, Homo sapien
tcatccaccattagtgggccatcag

SEQ ID NO: 3170289 - DNA, 25 bp, Homo sapien
taaataaggagcatgtcgtatgtcc

SEQ ID NO: 3170290 - DNA, 25 bp, Homo sapien
gtactcattaacacgccaaaggata

SEQ ID NO: 3170291 - DNA, 25 bp, Homo sapien
tcttgtaaagaaggcgcaaaagcca

SEQ ID NO: 3170292 - DNA, 25 bp, Homo sapien
gccctgagtcaggctcgcagagcat

SEQ ID NO: 3170293 - DNA, 25 bp, Homo sapien
ggccctgagtcaggctcgcagagca

SEQ ID NO: 3170294 - DNA, 25 bp, Homo sapien
tggccctgagtcaggctcgcagagc

SEQ ID NO: 3170295 - DNA, 25 bp, Homo sapien
gagaattgcagacttggtggcccca

SEQ ID NO: 3170296 - DNA, 25 bp, Homo sapien
tattgttttggctaacccagcagac

SEQ ID NO: 3170297 - DNA, 25 bp, Homo sapien
gaaggagtccatatccagtcacctg

SEQ ID NO: 3170298 - DNA, 25 bp, Homo sapien
gcacatgatgccgagaattgcagca

SEQ ID NO: 3170299 - DNA, 25 bp, Homo sapien
aattaagaaacatggagtgcctgcc

SEQ ID NO: 3170300 - DNA, 25 bp, Homo sapien
cagtcaactgatgaggagacaagac

SEQ ID NO: 3170301 - DNA, 25 bp, Homo sapien
caaagggagagctaacagagtgatg

SEQ ID NO: 3170302 - DNA, 25 bp, Homo sapien
gaaggactgctgttgtctcaccacc

SEQ ID NO: 3170303 - DNA, 25 bp, Homo sapien
tcacctgggagaaaccatgttcaaa

SEQ ID NO: 3170304 - DNA, 25 bp, Homo sapien
tttacgtgttccttaggctggcacc

SEQ ID NO: 3170305 - DNA, 25 bp, Homo sapien
gctgtgagccaccaatactaaccat

SEQ ID NO: 3170306 - DNA, 25 bp, Homo sapien
tgttcaaaacatgtggaccactgcc

SEQ ID NO: 3170307 - DNA, 25 bp, Homo sapien
taaggaaatcactctctagtaaggg

SEQ ID NO: 3170308 - DNA, 25 bp, Homo sapien
aggttgacacatctcgcctgtaagg

SEQ ID NO: 3170309 - DNA, 25 bp, Homo sapien
aagtcattcccttccagtcaacaag

SEQ ID NO: 3170310 - DNA, 25 bp, Homo sapien
tgtgggctatagaaggttgacacat

SEQ ID NO: 3170311 - DNA, 25 bp, Homo sapien
taatgtagatgagagctctgaagcc

SEQ ID NO: 3170312 - DNA, 25 bp, Homo sapien
cagatatgatcgcttcagagggtcc

SEQ ID NO: 3170313 - DNA, 25 bp, Homo sapien
tatgtttaatgagaccctccccacc

SEQ ID NO: 3170314 - DNA, 25 bp, Homo sapien
gactagtggcacatgctaagcattc

SEQ ID NO: 3170315 - DNA, 25 bp, Homo sapien
catccatattattggatatagcagt

SEQ ID NO: 3170316 - DNA, 25 bp, Homo sapien
ttcatccatattattggatatagca

SEQ ID NO: 3170317 - DNA, 25 bp, Homo sapien
gattcatccatattattggatatag

SEQ ID NO: 3170318 - DNA, 25 bp, Homo sapien
agattcatccatattattggatata

SEQ ID NO: 3170319 - DNA, 25 bp, Homo sapien
tatgattagcacagacaaatgtcct

SEQ ID NO: 3170320 - DNA, 25 bp, Homo sapien
tccagcagctgtacatccattatct

SEQ ID NO: 3170321 - DNA, 25 bp, Homo sapien
cataacagcttattagataggtcca

SEQ ID NO: 3170322 - DNA, 25 bp, Homo sapien
tgatggaaggtcttgaaccctgctt

SEQ ID NO: 3170323 - DNA, 25 bp, Homo sapien
aagtttccaatacagtgtctcttgc

SEQ ID NO: 3170324 - DNA, 25 bp, Homo sapien
gaaagcccattctctagtcctattt

SEQ ID NO: 3170325 - DNA, 25 bp, Homo sapien
cagtgtctcttgcatggaaggtatt

SEQ ID NO: 3170326 - DNA, 25 bp, Homo sapien
caggcctgcttcttctaggaaacct

SEQ ID NO: 3170327 - DNA, 25 bp, Homo sapien
aatcgtgtccgactgacccctcaaa

SEQ ID NO: 3170328 - DNA, 25 bp, Homo sapien
tgccaatcgtgtccgactgacccct

SEQ ID NO: 3170329 - DNA, 25 bp, Homo sapien
ctgccaatcgtgtccgactgacccc

SEQ ID NO: 3170330 - DNA, 25 bp, Homo sapien
ccaatcgtgtccgactgacccctca

SEQ ID NO: 3170331 - DNA, 25 bp, Homo sapien
ggctgcatgctgcaatcttatgaca

SEQ ID NO: 3170332 - DNA, 25 bp, Homo sapien
tggtgctatgaacatggctgcatgc

SEQ ID NO: 3170333 - DNA, 25 bp, Homo sapien
gcaatcttatgacacagtccagcaa

SEQ ID NO: 3170334 - DNA, 25 bp, Homo sapien
aaaggattcggcgtggtgctatgaa

SEQ ID NO: 3170335 - DNA, 25 bp, Homo sapien
atgccacaatatgagataccctcac

SEQ ID NO: 3170336 - DNA, 25 bp, Homo sapien
tgtcacctcatcatgatcaactccg

SEQ ID NO: 3170337 - DNA, 25 bp, Homo sapien
gactcaaaatgtcagcagcgacaat

SEQ ID NO: 3170338 - DNA, 25 bp, Homo sapien
tcaactccgcaccagatacagaggg

SEQ ID NO: 3170339 - DNA, 25 bp, Homo sapien
gcacgggttccacttcggaaatgac

SEQ ID NO: 3170340 - DNA, 25 bp, Homo sapien
cggaaatgaccccgaagggagtctg

SEQ ID NO: 3170341 - DNA, 25 bp, Homo sapien
cagaaaggcggagtgaccgagcacg

SEQ ID NO: 3170342 - DNA, 25 bp, Homo sapien
ggagtgaccgagcacgggttccact

SEQ ID NO: 3170343 - DNA, 25 bp, Homo sapien
gaccagcatttgacctctgagggag

SEQ ID NO: 3170344 - DNA, 25 bp, Homo sapien
actccagaaggaccagcatttgacc

SEQ ID NO: 3170345 - DNA, 25 bp, Homo sapien
ggccttaaataggatagaagctgct

SEQ ID NO: 3170346 - DNA, 25 bp, Homo sapien
aagcaaggccttaaataggatagaa

SEQ ID NO: 3170347 - DNA, 25 bp, Homo sapien
gcctagacaatgttaagacaacata

SEQ ID NO: 3170348 - DNA, 25 bp, Homo sapien
cagcctagacaatgttaagacaaca

SEQ ID NO: 3170349 - DNA, 25 bp, Homo sapien
ggagactggggcgaaataattgctt

SEQ ID NO: 3170350 - DNA, 25 bp, Homo sapien
gacaatgttaagacaacatagtgac

SEQ ID NO: 3170351 - DNA, 25 bp, Homo sapien
gatgctgacatttgtctgacagcat

SEQ ID NO: 3170352 - DNA, 25 bp, Homo sapien
gctatccatatgcattatctgatgc

SEQ ID NO: 3170353 - DNA, 25 bp, Homo sapien
tatctgatgctgacatttgtctgac

SEQ ID NO: 3170354 - DNA, 25 bp, Homo sapien
tatgcattatctgatgctgacattt

SEQ ID NO: 3170355 - DNA, 25 bp, Homo sapien
gaagcttgacggtgatcatgatggt

SEQ ID NO: 3170356 - DNA, 25 bp, Homo sapien
tgatggtgatggtcatgtcatgcat

SEQ ID NO: 3170357 - DNA, 25 bp, Homo sapien
gcttgacggtgatcatgatggtgat

SEQ ID NO: 3170358 - DNA, 25 bp, Homo sapien
ttctccaataagaagcttgacggtg

SEQ ID NO: 3170359 - DNA, 25 bp, Homo sapien
tgatgaaaagttttgacatgaatgt

SEQ ID NO: 3170360 - DNA, 25 bp, Homo sapien
tagctgtaacaggtgttgatctatg

SEQ ID NO: 3170361 - DNA, 25 bp, Homo sapien
aacaggtgttgatctatgatgaaaa

SEQ ID NO: 3170362 - DNA, 25 bp, Homo sapien
aataaaacagtagctgtaacaggtg

SEQ ID NO: 3170363 - DNA, 25 bp, Homo sapien
tgatcatgcataatattgagcagga

SEQ ID NO: 3170364 - DNA, 25 bp, Homo sapien
caaattttccataacaagcaggtgt

SEQ ID NO: 3170365 - DNA, 25 bp, Homo sapien
ctgaaaggtggatttacggataatt

SEQ ID NO: 3170366 - DNA, 25 bp, Homo sapien
ggcatcaatgtatatatcaatcata

SEQ ID NO: 3170367 - DNA, 25 bp, Homo sapien
ctgccaaggttgttgtggctgatga

SEQ ID NO: 3170368 - DNA, 25 bp, Homo sapien
ggttgttgtggctgatgagaacttc

SEQ ID NO: 3170369 - DNA, 25 bp, Homo sapien
ttgttgtggctgatgagaacttccc

SEQ ID NO: 3170370 - DNA, 25 bp, Homo sapien
gttgtggctgatgagaacttcccat

SEQ ID NO: 3170371 - DNA, 25 bp, Homo sapien
aagcagaaattagaggttgagaact

SEQ ID NO: 3170372 - DNA, 25 bp, Homo sapien
gatccagcggtcgttaaatggccag

SEQ ID NO: 3170373 - DNA, 25 bp, Homo sapien
aaataaggtagctgcttgccaagat

SEQ ID NO: 3170374 - DNA, 25 bp, Homo sapien
ggttgagaactgctagaacttctcc

SEQ ID NO: 3170375 - DNA, 25 bp, Homo sapien
cacctgtgatgccagtggagaccat

SEQ ID NO: 3170376 - DNA, 25 bp, Homo sapien
gaaatgttgacttctacccctgcct

SEQ ID NO: 3170377 - DNA, 25 bp, Homo sapien
gaaagtctagtggaaagtcaggcct

SEQ ID NO: 3170378 - DNA, 25 bp, Homo sapien
tcctgccagggtggtatcagataaa

SEQ ID NO: 3170379 - DNA, 25 bp, Homo sapien
cttgaacactgtcttttcctcctca

SEQ ID NO: 3170380 - DNA, 25 bp, Homo sapien
tttcctcctcaccatccactttagg

SEQ ID NO: 3170381 - DNA, 25 bp, Homo sapien
cctcctcaccatccactttaggcat

SEQ ID NO: 3170382 - DNA, 25 bp, Homo sapien
ttttcctcctcaccatccactttag

SEQ ID NO: 3170383 - DNA, 25 bp, Homo sapien
tttcactcttttcgttcttgctgtt

SEQ ID NO: 3170384 - DNA, 25 bp, Homo sapien
ccttttcactcttttcgttcttgct

SEQ ID NO: 3170385 - DNA, 25 bp, Homo sapien
tcttttcgttcttgctgtttcccta

SEQ ID NO: 3170386 - DNA, 25 bp, Homo sapien
cttttcactcttttcgttcttgctg

SEQ ID NO: 3170387 - DNA, 25 bp, Homo sapien
ttctgcatctcaagactgtgcctgc

SEQ ID NO: 3170388 - DNA, 25 bp, Homo sapien
cagagactttctgccgcatgtacag

SEQ ID NO: 3170389 - DNA, 25 bp, Homo sapien
ttggcaccggtgacgcggttactag

SEQ ID NO: 3170390 - DNA, 25 bp, Homo sapien
tacaggtccacaagctcgccgctgt

SEQ ID NO: 3170391 - DNA, 25 bp, Homo sapien
cctcatgacagggatagctttctcc

SEQ ID NO: 3170392 - DNA, 25 bp, Homo sapien
cagggatagctttctccctagagaa

SEQ ID NO: 3170393 - DNA, 25 bp, Homo sapien
cttgtcctcacacctcatgacaggg

SEQ ID NO: 3170394 - DNA, 25 bp, Homo sapien
gataggggagttctgcaccttgtcc

SEQ ID NO: 3170395 - DNA, 25 bp, Homo sapien
cacaaaagaagataggcacacacac

SEQ ID NO: 3170396 - DNA, 25 bp, Homo sapien
cctggaactgttttctaatgtggca

SEQ ID NO: 3170397 - DNA, 25 bp, Homo sapien
gactccagtatgcaccttctatgaa

SEQ ID NO: 3170398 - DNA, 25 bp, Homo sapien
aataaattgtatctgcaggactcca

SEQ ID NO: 3170399 - DNA, 25 bp, Homo sapien
caggacggaactggagtggattcca

SEQ ID NO: 3170400 - DNA, 25 bp, Homo sapien
tcgcccaccctgagcgtaggaggtg

SEQ ID NO: 3170401 - DNA, 25 bp, Homo sapien
tcgcgctctgtagcggacgcttgtg

SEQ ID NO: 3170402 - DNA, 25 bp, Homo sapien
actggacttctaaaccggctcggtg

SEQ ID NO: 3170403 - DNA, 25 bp, Homo sapien
taggggcttaaaaatgccgccaaca

SEQ ID NO: 3170404 - DNA, 25 bp, Homo sapien
agcgtgcaagggcaagtccccggcc

SEQ ID NO: 3170405 - DNA, 25 bp, Homo sapien
tcacattccgcgctccccaagcgca

SEQ ID NO: 3170406 - DNA, 25 bp, Homo sapien
gctgcggcccgccaagcctcacatt

SEQ ID NO: 3170407 - DNA, 25 bp, Homo sapien
ctggagggcgcagggagcgtgcaag

SEQ ID NO: 3170408 - DNA, 25 bp, Homo sapien
ctggtggcggccgaccgcgaacacc

SEQ ID NO: 3170409 - DNA, 25 bp, Homo sapien
cgctgccgccctccgacttgggcat

SEQ ID NO: 3170410 - DNA, 25 bp, Homo sapien
gccctccgacttgggcatccgagag

SEQ ID NO: 3170411 - DNA, 25 bp, Homo sapien
cgacttgggcatccgagagaacttc

SEQ ID NO: 3170412 - DNA, 25 bp, Homo sapien
ttcggccagcgactcttccagggtg

SEQ ID NO: 3170413 - DNA, 25 bp, Homo sapien
cttcggccagcgactcttccagggt

SEQ ID NO: 3170414 - DNA, 25 bp, Homo sapien
cgctcggagaactgaatccactctt

SEQ ID NO: 3170415 - DNA, 25 bp, Homo sapien
tctgagcaatggttcacgaaacaat

SEQ ID NO: 3170416 - DNA, 25 bp, Homo sapien
tcaaaggccaatgaagcatgcagca

SEQ ID NO: 3170417 - DNA, 25 bp, Homo sapien
cacatcaacgtctaacgctcggaga

SEQ ID NO: 3170418 - DNA, 25 bp, Homo sapien
tccagttttcacggtgactttttgc

SEQ ID NO: 3170419 - DNA, 25 bp, Homo sapien
ttgtgaacagcagctttcaggaatc

SEQ ID NO: 3170420 - DNA, 25 bp, Homo sapien
gaatctaacaccatagtaggagcag

SEQ ID NO: 3170421 - DNA, 25 bp, Homo sapien
gctttcaggaatctaacaccatagt

SEQ ID NO: 3170422 - DNA, 25 bp, Homo sapien
tgttcaaggagcaaagactacagag

SEQ ID NO: 3170423 - DNA, 25 bp, Homo sapien
gagtctactgacgtgcacattctag

SEQ ID NO: 3170424 - DNA, 25 bp, Homo sapien
gaaaacagtccctaagcgtagtgct

SEQ ID NO: 3170425 - DNA, 25 bp, Homo sapien
cattgaggcatgatttacagagctg

SEQ ID NO: 3170426 - DNA, 25 bp, Homo sapien
gagtcctctggcctaagtacaaaac

SEQ ID NO: 3170427 - DNA, 25 bp, Homo sapien
taggcaagtacaagattcagtcacg

SEQ ID NO: 3170428 - DNA, 25 bp, Homo sapien
ttgatggtccagtaaagagccctcc

SEQ ID NO: 3170429 - DNA, 25 bp, Homo sapien
tcagtcacggaccaacagggagtgg

SEQ ID NO: 3170430 - DNA, 25 bp, Homo sapien
tactcggtcatctcacctaaactgc

SEQ ID NO: 3170431 - DNA, 25 bp, Homo sapien
aaaaagttattatggcacactgcga

SEQ ID NO: 3170432 - DNA, 25 bp, Homo sapien
tgagaactgattacataagccaaga

SEQ ID NO: 3170433 - DNA, 25 bp, Homo sapien
cgttttaaatgggacaccgtatgtg

SEQ ID NO: 3170434 - DNA, 25 bp, Homo sapien
tttcctaattctggtcctatatatg

SEQ ID NO: 3170435 - DNA, 25 bp, Homo sapien
ctgtggagtagaaagttctctagac

SEQ ID NO: 3170436 - DNA, 25 bp, Homo sapien
tatttccatgtgtgtcagcacggtc

SEQ ID NO: 3170437 - DNA, 25 bp, Homo sapien
cctatatatgtttgtatgtccactt

SEQ ID NO: 3170438 - DNA, 25 bp, Homo sapien
tatctgaagcactaggtaggtattc

SEQ ID NO: 3170439 - DNA, 25 bp, Homo sapien
cttatctgaagcactaggtaggtat

SEQ ID NO: 3170440 - DNA, 25 bp, Homo sapien
tgggaattctgttaactgcagctga

SEQ ID NO: 3170441 - DNA, 25 bp, Homo sapien
gtgcctggctgggaattctgttaac

SEQ ID NO: 3170442 - DNA, 25 bp, Homo sapien
caatgcacatcggattccaccgtga

SEQ ID NO: 3170443 - DNA, 25 bp, Homo sapien
gacatacattcgcttcaatgcacat

SEQ ID NO: 3170444 - DNA, 25 bp, Homo sapien
aggtctggcatgttattgacataca

SEQ ID NO: 3170445 - DNA, 25 bp, Homo sapien
cacgaggaaaactgtggagaatcca

SEQ ID NO: 3170446 - DNA, 25 bp, Homo sapien
cagtgtatggagttagagggccaac

SEQ ID NO: 3170447 - DNA, 25 bp, Homo sapien
accgggctttgcttatgcaatggaa

SEQ ID NO: 3170448 - DNA, 25 bp, Homo sapien
tcagaccaaggaacacaatgtacag

SEQ ID NO: 3170449 - DNA, 25 bp, Homo sapien
gagggccaactatcatttcttcaga

SEQ ID NO: 3170450 - DNA, 25 bp, Homo sapien
gaacaagtcagtgcccatcagaaga

SEQ ID NO: 3170451 - DNA, 25 bp, Homo sapien
gaagaactcccttccagattgggaa

SEQ ID NO: 3170452 - DNA, 25 bp, Homo sapien
gacagacagagactaccaatggcta

SEQ ID NO: 3170453 - DNA, 25 bp, Homo sapien
ggcagtaatcaatggcctggccaca

SEQ ID NO: 3170454 - DNA, 25 bp, Homo sapien
gagcactgagcatatgtaaccctag

SEQ ID NO: 3170455 - DNA, 25 bp, Homo sapien
gaatgcacaggaacagtaaacacag

SEQ ID NO: 3170456 - DNA, 25 bp, Homo sapien
gccttgccattaattacagaggtca

SEQ ID NO: 3170457 - DNA, 25 bp, Homo sapien
gcatggagcaagtttataggcacca

SEQ ID NO: 3170458 - DNA, 25 bp, Homo sapien
tcatcttgaggtaaatcttttcacc

SEQ ID NO: 3170459 - DNA, 25 bp, Homo sapien
tctctaatctagctaaggaatacag

SEQ ID NO: 3170460 - DNA, 25 bp, Homo sapien
caaaaaagttgacagaccaccattc

SEQ ID NO: 3170461 - DNA, 25 bp, Homo sapien
cacaagatttgagtgtgctgctcct

SEQ ID NO: 3170462 - DNA, 25 bp, Homo sapien
taattgaattaacagcacagtccaa

SEQ ID NO: 3170463 - DNA, 25 bp, Homo sapien
taaggacttcccatacattatcact

SEQ ID NO: 3170464 - DNA, 25 bp, Homo sapien
cattatcactaattgaattaacagc

SEQ ID NO: 3170465 - DNA, 25 bp, Homo sapien
ctcgacaatattccattaagataag

SEQ ID NO: 3170466 - DNA, 25 bp, Homo sapien
tctgtaaaacccgtctgtagcttct

SEQ ID NO: 3170467 - DNA, 25 bp, Homo sapien
tattggagtcttacactgatgcaac

SEQ ID NO: 3170468 - DNA, 25 bp, Homo sapien
cagatcccggtgaattattggagtc

SEQ ID NO: 3170469 - DNA, 25 bp, Homo sapien
gatgcaaccttgcaacagcttcaca

SEQ ID NO: 3170470 - DNA, 25 bp, Homo sapien
aagaaatttattagtggcactgcca

SEQ ID NO: 3170471 - DNA, 25 bp, Homo sapien
cttctactacattaactccatcttt

SEQ ID NO: 3170472 - DNA, 25 bp, Homo sapien
agtacatagttcccaccatcattca

SEQ ID NO: 3170473 - DNA, 25 bp, Homo sapien
acaaagtacatagttcccaccatca

SEQ ID NO: 3170474 - DNA, 25 bp, Homo sapien
tttccctccataaaggttgatcatt

SEQ ID NO: 3170475 - DNA, 25 bp, Homo sapien
ggtttccctccataaaggttgatca

SEQ ID NO: 3170476 - DNA, 25 bp, Homo sapien
gtttccctccataaaggttgatcat

SEQ ID NO: 3170477 - DNA, 25 bp, Homo sapien
ttccctccataaaggttgatcattt

SEQ ID NO: 3170478 - DNA, 25 bp, Homo sapien
tattaagcaatgtatgttacgggag

SEQ ID NO: 3170479 - DNA, 25 bp, Homo sapien
tacgggagtaacgagaattgtctgg

SEQ ID NO: 3170480 - DNA, 25 bp, Homo sapien
gcaacctgactctcaccaaaaggaa

SEQ ID NO: 3170481 - DNA, 25 bp, Homo sapien
gaagttgccatcacagatagcaacc

SEQ ID NO: 3170482 - DNA, 25 bp, Homo sapien
ttaaccctaatcgaaccagtcacag

SEQ ID NO: 3170483 - DNA, 25 bp, Homo sapien
tcctggtttcccacaatatgggtat

SEQ ID NO: 3170484 - DNA, 25 bp, Homo sapien
gccatgagttgataaccagtgaggt

SEQ ID NO: 3170485 - DNA, 25 bp, Homo sapien
catgaaaatttattgcactgctctg

SEQ ID NO: 3170486 - DNA, 25 bp, Homo sapien
gaacagctctacactagaagtatga

SEQ ID NO: 3170487 - DNA, 25 bp, Homo sapien
gaattattcaagaaagttccaaggc

SEQ ID NO: 3170488 - DNA, 25 bp, Homo sapien
cccaagctaagggtagatcaatcac

SEQ ID NO: 3170489 - DNA, 25 bp, Homo sapien
gatcagtgatgattctagcaaactt

SEQ ID NO: 3170490 - DNA, 25 bp, Homo sapien
gatgttggagactggacaatccttt

SEQ ID NO: 3170491 - DNA, 25 bp, Homo sapien
tccggatctggttcaagcatgaacc

SEQ ID NO: 3170492 - DNA, 25 bp, Homo sapien
tatcaggtctatgttccggatctgg

SEQ ID NO: 3170493 - DNA, 25 bp, Homo sapien
tctatgttccggatctggttcaagc

SEQ ID NO: 3170494 - DNA, 25 bp, Homo sapien
tcagttaacagtgctccgtgtctca

SEQ ID NO: 3170495 - DNA, 25 bp, Homo sapien
gctccgtgtctcagtaattgtttac

SEQ ID NO: 3170496 - DNA, 25 bp, Homo sapien
taacagtgctccgtgtctcagtaat

SEQ ID NO: 3170497 - DNA, 25 bp, Homo sapien
cagtgctccgtgtctcagtaattgt

SEQ ID NO: 3170498 - DNA, 25 bp, Homo sapien
ttcaggaagagctgaaggaatagaa

SEQ ID NO: 3170499 - DNA, 25 bp, Homo sapien
gaagagctgaaggaatagaagaatt

SEQ ID NO: 3170500 - DNA, 25 bp, Homo sapien
cggttcaggaagagctgaaggaata

SEQ ID NO: 3170501 - DNA, 25 bp, Homo sapien
aggaagagctgaaggaatagaagaa

SEQ ID NO: 3170502 - DNA, 25 bp, Homo sapien
tagcagctgcttcactagcagtcat

SEQ ID NO: 3170503 - DNA, 25 bp, Homo sapien
ctagcagctgcttcactagcagtca

SEQ ID NO: 3170504 - DNA, 25 bp, Homo sapien
tttatttggcttttcctagcagctg

SEQ ID NO: 3170505 - DNA, 25 bp, Homo sapien
atttggcttttcctagcagctgctt

SEQ ID NO: 3170506 - DNA, 25 bp, Homo sapien
tttggtctatggttaccgaattcac

SEQ ID NO: 3170507 - DNA, 25 bp, Homo sapien
tttctgttggtccaatggtatctgt

SEQ ID NO: 3170508 - DNA, 25 bp, Homo sapien
gtcttggtgcaattgaggtttctgt

SEQ ID NO: 3170509 - DNA, 25 bp, Homo sapien
ccgaattcaccaggagcaaggactt

SEQ ID NO: 3170510 - DNA, 25 bp, Homo sapien
ttaagaggatgaggttggcggggct

SEQ ID NO: 3170511 - DNA, 25 bp, Homo sapien
gatgaggttggcggggctctattac

SEQ ID NO: 3170512 - DNA, 25 bp, Homo sapien
gaggatgaggttggcggggctctat

SEQ ID NO: 3170513 - DNA, 25 bp, Homo sapien
agaggatgaggttggcggggctcta

SEQ ID NO: 3170514 - DNA, 25 bp, Homo sapien
aataggactcaaatcaggttcgtga

SEQ ID NO: 3170515 - DNA, 25 bp, Homo sapien
cactcttaaccattagggtatcctc

SEQ ID NO: 3170516 - DNA, 25 bp, Homo sapien
tcgtgagactcaaaacgtacactct

SEQ ID NO: 3170517 - DNA, 25 bp, Homo sapien
tatcaaaggcataccgtgtatcagg

SEQ ID NO: 3170518 - DNA, 25 bp, Homo sapien
cttcttgacagtatccaatacagag

SEQ ID NO: 3170519 - DNA, 25 bp, Homo sapien
ttcatatgccctcttcttgacagta

SEQ ID NO: 3170520 - DNA, 25 bp, Homo sapien
tatccaatacagagcaaagcctact

SEQ ID NO: 3170521 - DNA, 25 bp, Homo sapien
tatgccctcttcttgacagtatcca

SEQ ID NO: 3170522 - DNA, 25 bp, Homo sapien
cgaactaatacgtatgtatagtatg

SEQ ID NO: 3170523 - DNA, 25 bp, Homo sapien
aatacgtatgtatagtatgactcca

SEQ ID NO: 3170524 - DNA, 25 bp, Homo sapien
aaaacgaactaatacgtatgtatag

SEQ ID NO: 3170525 - DNA, 25 bp, Homo sapien
ctaatacgtatgtatagtatgactc

SEQ ID NO: 3170526 - DNA, 25 bp, Homo sapien
taatggatctattaacactgtctcc

SEQ ID NO: 3170527 - DNA, 25 bp, Homo sapien
aatgcaactgttcaatcctagaaga

SEQ ID NO: 3170528 - DNA, 25 bp, Homo sapien
tagtatcctcaaacgtcctcagacc

SEQ ID NO: 3170529 - DNA, 25 bp, Homo sapien
cagacctaagtacaacagctttatg

SEQ ID NO: 3170530 - DNA, 25 bp, Homo sapien
ctaaagacaggtccaaacacttaca

SEQ ID NO: 3170531 - DNA, 25 bp, Homo sapien
gacaggtccaaacacttacattaac

SEQ ID NO: 3170532 - DNA, 25 bp, Homo sapien
aaaagctggatttcaacatgctcat

SEQ ID NO: 3170533 - DNA, 25 bp, Homo sapien
taatttaactaaggcatttatatcc

SEQ ID NO: 3170534 - DNA, 25 bp, Homo sapien
ctgacccaataaaatttcagggcca

SEQ ID NO: 3170535 - DNA, 25 bp, Homo sapien
tgaggaggtccctgacccaataaaa

SEQ ID NO: 3170536 - DNA, 25 bp, Homo sapien
aatggagttgctgtaatctccaatc

SEQ ID NO: 3170537 - DNA, 25 bp, Homo sapien
caatctccctgctgtagttgctgga

SEQ ID NO: 3170538 - DNA, 25 bp, Homo sapien
ctccctgctgtagttgctggagtac

SEQ ID NO: 3170539 - DNA, 25 bp, Homo sapien
ctccaatctccctgctgtagttgct

SEQ ID NO: 3170540 - DNA, 25 bp, Homo sapien
tataagcatcttgaagtaggtggtg

SEQ ID NO: 3170541 - DNA, 25 bp, Homo sapien
ttaaaaattgttgttgaagcatctg

SEQ ID NO: 3170542 - DNA, 25 bp, Homo sapien
gatataccgaatgcattaaaaattg

SEQ ID NO: 3170543 - DNA, 25 bp, Homo sapien
agaaggttgtggttgatataccgaa

SEQ ID NO: 3170544 - DNA, 25 bp, Homo sapien
cattgtaggatactgtgatgcagaa

SEQ ID NO: 3170545 - DNA, 25 bp, Homo sapien
taaaggtaggctcacttggccagaa

SEQ ID NO: 3170546 - DNA, 25 bp, Homo sapien
aaagcactgtcagcactgcatctat

SEQ ID NO: 3170547 - DNA, 25 bp, Homo sapien
ttggccagaatcaaaaatcctcttt

SEQ ID NO: 3170548 - DNA, 25 bp, Homo sapien
tatacaaaacaatgctccagtccta

SEQ ID NO: 3170549 - DNA, 25 bp, Homo sapien
aactaaggctggtgagaactcttga

SEQ ID NO: 3170550 - DNA, 25 bp, Homo sapien
ctattggcactataggaggagtcca

SEQ ID NO: 3170551 - DNA, 25 bp, Homo sapien
ggaggtaagatattcaggtgatgcc

SEQ ID NO: 3170552 - DNA, 25 bp, Homo sapien
ttgagacggctgatgttgagctagc

SEQ ID NO: 3170553 - DNA, 25 bp, Homo sapien
tacaaatagcagttagcagaattaa

SEQ ID NO: 3170554 - DNA, 25 bp, Homo sapien
ctacaaatagcagttagcagaatta

SEQ ID NO: 3170555 - DNA, 25 bp, Homo sapien
gagagctcattgccattgccaccaa

SEQ ID NO: 3170556 - DNA, 25 bp, Homo sapien
ctcattgccattgccaccaaacagg

SEQ ID NO: 3170557 - DNA, 25 bp, Homo sapien
ctaaccgttgagagctcattgccat

SEQ ID NO: 3170558 - DNA, 25 bp, Homo sapien
cgttgagagctcattgccattgcca

SEQ ID NO: 3170559 - DNA, 25 bp, Homo sapien
gatttgtgaaatttgcaatggcctc

SEQ ID NO: 3170560 - DNA, 25 bp, Homo sapien
tagttcctcttctgttaacttagag

SEQ ID NO: 3170561 - DNA, 25 bp, Homo sapien
aaggattccaccctgacatatcagg

SEQ ID NO: 3170562 - DNA, 25 bp, Homo sapien
catatcaggtggattgctgatgttc

SEQ ID NO: 3170563 - DNA, 25 bp, Homo sapien
agcaaaataagccttcaagtgtccc

SEQ ID NO: 3170564 - DNA, 25 bp, Homo sapien
caaaataagccttcaagtgtccctt

SEQ ID NO: 3170565 - DNA, 25 bp, Homo sapien
gaagcaaaataagccttcaagtgtc

SEQ ID NO: 3170566 - DNA, 25 bp, Homo sapien
actgtgaagcaaaataagccttcaa

SEQ ID NO: 3170567 - DNA, 25 bp, Homo sapien
aagcaactgatttctaatgcacaca

SEQ ID NO: 3170568 - DNA, 25 bp, Homo sapien
ttagcatactatcagcaatattggg

SEQ ID NO: 3170569 - DNA, 25 bp, Homo sapien
tatgtataagaagatggcctgaatt

SEQ ID NO: 3170570 - DNA, 25 bp, Homo sapien
ttggccttgctgaataataatagag

SEQ ID NO: 3170571 - DNA, 25 bp, Homo sapien
aatattttctattgagtgtgcagaa

SEQ ID NO: 3170572 - DNA, 25 bp, Homo sapien
tttcaaagggcatctcagacccaca

SEQ ID NO: 3170573 - DNA, 25 bp, Homo sapien
ggcattttcaaagggcatctcagac

SEQ ID NO: 3170574 - DNA, 25 bp, Homo sapien
aaagggcatctcagacccacaatat

SEQ ID NO: 3170575 - DNA, 25 bp, Homo sapien
cataatgtagtagcccatgttttct

SEQ ID NO: 3170576 - DNA, 25 bp, Homo sapien
tatgtcaccactcattaaaaggaca

SEQ ID NO: 3170577 - DNA, 25 bp, Homo sapien
tttgccatatcaggacaacaaagca

SEQ ID NO: 3170578 - DNA, 25 bp, Homo sapien
gcagcccttttatgtcaccactcat

SEQ ID NO: 3170579 - DNA, 25 bp, Homo sapien
ttatctacatactctagaagtgagc

SEQ ID NO: 3170580 - DNA, 25 bp, Homo sapien
ggcaacctactcaaaacactcacat

SEQ ID NO: 3170581 - DNA, 25 bp, Homo sapien
taaaatatgtgtggcgaagcttgac

SEQ ID NO: 3170582 - DNA, 25 bp, Homo sapien
tagaaacctttattaacggctcaga

SEQ ID NO: 3170583 - DNA, 25 bp, Homo sapien
aaatatggaagatactgctctatgc

SEQ ID NO: 3170584 - DNA, 25 bp, Homo sapien
taatgagtcccagcttataaaactg

SEQ ID NO: 3170585 - DNA, 25 bp, Homo sapien
ggtatattacatccatcagtctgtg

SEQ ID NO: 3170586 - DNA, 25 bp, Homo sapien
gttctttaaatcctcatgcactggg

SEQ ID NO: 3170587 - DNA, 25 bp, Homo sapien
gaactgtaaaaccagtaattatgcc

SEQ ID NO: 3170588 - DNA, 25 bp, Homo sapien
ttatggaggaactgtaaaaccagta

SEQ ID NO: 3170589 - DNA, 25 bp, Homo sapien
aaccagtaattatgccttgtatcag

SEQ ID NO: 3170590 - DNA, 25 bp, Homo sapien
atgccttgtatcagaatccacctgg

SEQ ID NO: 3170591 - DNA, 25 bp, Homo sapien
agcagaaagtgagtctacattctta

SEQ ID NO: 3170592 - DNA, 25 bp, Homo sapien
aggatggttatgtggagcagaaagt

SEQ ID NO: 3170593 - DNA, 25 bp, Homo sapien
gaggatggttatgtggagcagaaag

SEQ ID NO: 3170594 - DNA, 25 bp, Homo sapien
caagagagcatgtacaaactaggaa

SEQ ID NO: 3170595 - DNA, 25 bp, Homo sapien
tgtagctaactaacatcagagtctt

SEQ ID NO: 3170596 - DNA, 25 bp, Homo sapien
tcatttatgccaatgcacgatccta

SEQ ID NO: 3170597 - DNA, 25 bp, Homo sapien
gaacatggccgacagttaccatgaa

SEQ ID NO: 3170598 - DNA, 25 bp, Homo sapien
aaaaactatcctgtatattccagat

SEQ ID NO: 3170599 - DNA, 25 bp, Homo sapien
tattccagataaccaaacaagtctg

SEQ ID NO: 3170600 - DNA, 25 bp, Homo sapien
aaagctgttcaatgtactcagcaga

SEQ ID NO: 3170601 - DNA, 25 bp, Homo sapien
taattctgtagttttcaaatggtgt

SEQ ID NO: 3170602 - DNA, 25 bp, Homo sapien
tactgggcaggattcaaagatagac

SEQ ID NO: 3170603 - DNA, 25 bp, Homo sapien
gcagcaatcgagctcaaacctgtga

SEQ ID NO: 3170604 - DNA, 25 bp, Homo sapien
tacctactgggttgtatactgggca

SEQ ID NO: 3170605 - DNA, 25 bp, Homo sapien
cctgtgaacatgttgcgaagtacaa

SEQ ID NO: 3170606 - DNA, 25 bp, Homo sapien
gcttagaacttcctctcatgcatat

SEQ ID NO: 3170607 - DNA, 25 bp, Homo sapien
agcaaagcttagaacttcctctcat

SEQ ID NO: 3170608 - DNA, 25 bp, Homo sapien
aggcagcaaagcttagaacttcctc

SEQ ID NO: 3170609 - DNA, 25 bp, Homo sapien
aaagcttagaacttcctctcatgca

SEQ ID NO: 3170610 - DNA, 25 bp, Homo sapien
gctaaaatactatgaagcagtgcct

SEQ ID NO: 3170611 - DNA, 25 bp, Homo sapien
gaagaaacctaccacagttcacaca

SEQ ID NO: 3170612 - DNA, 25 bp, Homo sapien
cacagttcacacataaaggatcaga

SEQ ID NO: 3170613 - DNA, 25 bp, Homo sapien
cagatgctacaaatgtccatggtgg

SEQ ID NO: 3170614 - DNA, 25 bp, Homo sapien
caggtgtacgtttttgtattgtgcc

SEQ ID NO: 3170615 - DNA, 25 bp, Homo sapien
tcatttacttcaagggaatcctcaa

SEQ ID NO: 3170616 - DNA, 25 bp, Homo sapien
gaaatctgtaccttaaaccctatgc

SEQ ID NO: 3170617 - DNA, 25 bp, Homo sapien
taaactatgtggcaaattcagcata

SEQ ID NO: 3170618 - DNA, 25 bp, Homo sapien
gcttctgcttgtagtccaggcttct

SEQ ID NO: 3170619 - DNA, 25 bp, Homo sapien
gtgcattgcagtccagaactactgg

SEQ ID NO: 3170620 - DNA, 25 bp, Homo sapien
tgcattgcagtccagaactactggg

SEQ ID NO: 3170621 - DNA, 25 bp, Homo sapien
tagccttgcacagtccaaacaagga

SEQ ID NO: 3170622 - DNA, 25 bp, Homo sapien
gctaatctgactctagtgatctgga

SEQ ID NO: 3170623 - DNA, 25 bp, Homo sapien
cattcagcaaggtattgtatggcat

SEQ ID NO: 3170624 - DNA, 25 bp, Homo sapien
gaaaatttcagacatcatagccttg

SEQ ID NO: 3170625 - DNA, 25 bp, Homo sapien
gaatgagtggcgtgatagaaaccca

SEQ ID NO: 3170626 - DNA, 25 bp, Homo sapien
gagatcaacaagcatgaacagcctg

SEQ ID NO: 3170627 - DNA, 25 bp, Homo sapien
tcctctaaggccatgataagcagcg

SEQ ID NO: 3170628 - DNA, 25 bp, Homo sapien
gactaaagggcatacctcggaagaa

SEQ ID NO: 3170629 - DNA, 25 bp, Homo sapien
gacttattcatatctggaccctaca

SEQ ID NO: 3170630 - DNA, 25 bp, Homo sapien
tggcattacaaatccctcatacgag

SEQ ID NO: 3170631 - DNA, 25 bp, Homo sapien
ctcatacgagttcccttagaggaaa

SEQ ID NO: 3170632 - DNA, 25 bp, Homo sapien
cacacagaatgtagtagactagcaa

SEQ ID NO: 3170633 - DNA, 25 bp, Homo sapien
ttccagtccgctgatctttagatgc

SEQ ID NO: 3170634 - DNA, 25 bp, Homo sapien
cacttgaccctgtactgaggttttc

SEQ ID NO: 3170635 - DNA, 25 bp, Homo sapien
ttaccgttcttgatagggtttgcag

SEQ ID NO: 3170636 - DNA, 25 bp, Homo sapien
tagatgctggacttgttttaccgtt

SEQ ID NO: 3170637 - DNA, 25 bp, Homo sapien
ctttagcctgctcataatcagaatc

SEQ ID NO: 3170638 - DNA, 25 bp, Homo sapien
taaccagggatagtatgtgcctcag

SEQ ID NO: 3170639 - DNA, 25 bp, Homo sapien
gggatagtatgtgcctcaggcccca

SEQ ID NO: 3170640 - DNA, 25 bp, Homo sapien
gggataaccagggatagtatgtgcc

SEQ ID NO: 3170641 - DNA, 25 bp, Homo sapien
gggacagcgccaaatacatcaaact

SEQ ID NO: 3170642 - DNA, 25 bp, Homo sapien
ttttgctgctggctccccgttattt

SEQ ID NO: 3170643 - DNA, 25 bp, Homo sapien
ttgctgctggctccccgttatttca

SEQ ID NO: 3170644 - DNA, 25 bp, Homo sapien
gctggctccccgttatttcatcaaa

SEQ ID NO: 3170645 - DNA, 25 bp, Homo sapien
gctgctggctccccgttatttcatc

SEQ ID NO: 3170646 - DNA, 25 bp, Homo sapien
gggtccaacaggctctcctcaggtt

SEQ ID NO: 3170647 - DNA, 25 bp, Homo sapien
tatctttcccatcagtcagtgcaac

SEQ ID NO: 3170648 - DNA, 25 bp, Homo sapien
tactttgagagtctcggcggcccac

SEQ ID NO: 3170649 - DNA, 25 bp, Homo sapien
tagtgaattttgtcttggccgccct

SEQ ID NO: 3170650 - DNA, 25 bp, Homo sapien
tcaaattcataaaactgttcacact

SEQ ID NO: 3170651 - DNA, 25 bp, Homo sapien
ttaagaatgaatgctataaagagct

SEQ ID NO: 3170652 - DNA, 25 bp, Homo sapien
gagttaatgccgagaatccatcaga

SEQ ID NO: 3170653 - DNA, 25 bp, Homo sapien
tgaaacaggagttaatgccgagaat

SEQ ID NO: 3170654 - DNA, 25 bp, Homo sapien
tgatgtcagtagcagaaacccttag

SEQ ID NO: 3170655 - DNA, 25 bp, Homo sapien
tcagcatagaagagtgggctccacc

SEQ ID NO: 3170656 - DNA, 25 bp, Homo sapien
gtacccaagcgcctcaaaactagtg

SEQ ID NO: 3170657 - DNA, 25 bp, Homo sapien
taggcaaatagcttatcccattggg

SEQ ID NO: 3170658 - DNA, 25 bp, Homo sapien
gctatatttgaggactgaagttact

SEQ ID NO: 3170659 - DNA, 25 bp, Homo sapien
gaataagcagtgtaaaggcaataaa

SEQ ID NO: 3170660 - DNA, 25 bp, Homo sapien
ggagactgagtctatctcataattg

SEQ ID NO: 3170661 - DNA, 25 bp, Homo sapien
tagtgcttaattagatatggcaggg

SEQ ID NO: 3170662 - DNA, 25 bp, Homo sapien
tttgcagtccctgtattagtatatg

SEQ ID NO: 3170663 - DNA, 25 bp, Homo sapien
gaatatggattgctgttaactagaa

SEQ ID NO: 3170664 - DNA, 25 bp, Homo sapien
tgtacaggtctttctgtagggaaaa

SEQ ID NO: 3170665 - DNA, 25 bp, Homo sapien
aagacactgagtagttacacttaag

SEQ ID NO: 3170666 - DNA, 25 bp, Homo sapien
tctgaataacaacgatgaatgggaa

SEQ ID NO: 3170667 - DNA, 25 bp, Homo sapien
gcttaatgcaagctaggatagtgat

SEQ ID NO: 3170668 - DNA, 25 bp, Homo sapien
tttccttaggaagggctcatgtcca

SEQ ID NO: 3170669 - DNA, 25 bp, Homo sapien
cctaatcaaggcaagtgttgtttca

SEQ ID NO: 3170670 - DNA, 25 bp, Homo sapien
tgatgagggacatcaggaatcctcc

SEQ ID NO: 3170671 - DNA, 25 bp, Homo sapien
ggaatcctcctatctgtgaaaacat

SEQ ID NO: 3170672 - DNA, 25 bp, Homo sapien
gattttattagaagaggagggacca

SEQ ID NO: 3170673 - DNA, 25 bp, Homo sapien
gcagcatagtagaaaacagttgggt

SEQ ID NO: 3170674 - DNA, 25 bp, Homo sapien
cacagtgcttgctatgatcctggca

SEQ ID NO: 3170675 - DNA, 25 bp, Homo sapien
tacctcacgcagcaatggcaaaggc

SEQ ID NO: 3170676 - DNA, 25 bp, Homo sapien
cactgggtttggctcaatggaggaa

SEQ ID NO: 3170677 - DNA, 25 bp, Homo sapien
ctttcattctagtactggcgtcagg

SEQ ID NO: 3170678 - DNA, 25 bp, Homo sapien
tactgggctgctatgtctcaggagt

SEQ ID NO: 3170679 - DNA, 25 bp, Homo sapien
tagaagagtctcgtataagcataaa

SEQ ID NO: 3170680 - DNA, 25 bp, Homo sapien
aaaaacatgtcgaagatggatggca

SEQ ID NO: 3170681 - DNA, 25 bp, Homo sapien
cctgccatcggtcagaaaaaacatg

SEQ ID NO: 3170682 - DNA, 25 bp, Homo sapien
aaatgcagcaactattacttctaat

SEQ ID NO: 3170683 - DNA, 25 bp, Homo sapien
aaatccacttgtattcgcctgtagc

SEQ ID NO: 3170684 - DNA, 25 bp, Homo sapien
ctcatatgcaaacgaagaccccagg

SEQ ID NO: 3170685 - DNA, 25 bp, Homo sapien
tgtagctctgtgctttcggctcttc

SEQ ID NO: 3170686 - DNA, 25 bp, Homo sapien
ggcaggaggatcgcttgaggccagg

SEQ ID NO: 3170687 - DNA, 25 bp, Homo sapien
tgaccaaagttactcaggaagtgga

SEQ ID NO: 3170688 - DNA, 25 bp, Homo sapien
ctgtagtgagccatgtttgcaccac

SEQ ID NO: 3170689 - DNA, 25 bp, Homo sapien
ctgtgaccaaagttactcaggaagt

SEQ ID NO: 3170690 - DNA, 25 bp, Homo sapien
cagcctgggcaacatagggaaaccg

SEQ ID NO: 3170691 - DNA, 25 bp, Homo sapien
ccagcattttgccaaggcaggagga

SEQ ID NO: 3170692 - DNA, 25 bp, Homo sapien
tcacttgagaccaggagttcaagac

SEQ ID NO: 3170693 - DNA, 25 bp, Homo sapien
tgggcaacatagggaaaccgtgtct

SEQ ID NO: 3170694 - DNA, 25 bp, Homo sapien
gctaagagctggaggtatgaacatg

SEQ ID NO: 3170695 - DNA, 25 bp, Homo sapien
tgttaacagacgaaaaagccatggg

SEQ ID NO: 3170696 - DNA, 25 bp, Homo sapien
gtgtccacggtgtctcaagtttgta

SEQ ID NO: 3170697 - DNA, 25 bp, Homo sapien
tgaacatgaatgaaatatggcccct

SEQ ID NO: 3170698 - DNA, 25 bp, Homo sapien
gaaaatcactgacacatataattag

SEQ ID NO: 3170699 - DNA, 25 bp, Homo sapien
tcttctttcagctatgccataacat

SEQ ID NO: 3170700 - DNA, 25 bp, Homo sapien
gaagatagtacgaagaacttccacc

SEQ ID NO: 3170701 - DNA, 25 bp, Homo sapien
cctctactatgattctgagaaagat

SEQ ID NO: 3170702 - DNA, 25 bp, Homo sapien
gcaacacccccagacaggtttgtgg

SEQ ID NO: 3170703 - DNA, 25 bp, Homo sapien
tttgtggggttcaaaggcagagaca

SEQ ID NO: 3170704 - DNA, 25 bp, Homo sapien
gaacatgcatcaacaacaaacccag

SEQ ID NO: 3170705 - DNA, 25 bp, Homo sapien
aaacccagagccattctttggatca

SEQ ID NO: 3170706 - DNA, 25 bp, Homo sapien
gatccttgaggcatgtgaaccttcc

SEQ ID NO: 3170707 - DNA, 25 bp, Homo sapien
caggcacagaggaggactatactga

SEQ ID NO: 3170708 - DNA, 25 bp, Homo sapien
gaggaggactatactgaagactgag

SEQ ID NO: 3170709 - DNA, 25 bp, Homo sapien
ttaccacaggtcttcaccaggcaca

SEQ ID NO: 3170710 - DNA, 25 bp, Homo sapien
gctgtgaaacgctgagctgtttctt

SEQ ID NO: 3170711 - DNA, 25 bp, Homo sapien
tagctgtgaaacgctgagctgtttc

SEQ ID NO: 3170712 - DNA, 25 bp, Homo sapien
ctgtgaaacgctgagctgtttctta

SEQ ID NO: 3170713 - DNA, 25 bp, Homo sapien
agctgtgaaacgctgagctgtttct

SEQ ID NO: 3170714 - DNA, 25 bp, Homo sapien
accattggagttgctgtcaccacag

SEQ ID NO: 3170715 - DNA, 25 bp, Homo sapien
gctctgccacattctctacggtcac

SEQ ID NO: 3170716 - DNA, 25 bp, Homo sapien
tctacggtcaccaccattggagttg

SEQ ID NO: 3170717 - DNA, 25 bp, Homo sapien
gcccctttactgacacatccaaata

SEQ ID NO: 3170718 - DNA, 25 bp, Homo sapien
tcagctgggagcctataaatttggt

SEQ ID NO: 3170719 - DNA, 25 bp, Homo sapien
ctggtttctgctaactcagctggga

SEQ ID NO: 3170720 - DNA, 25 bp, Homo sapien
ggagagctaggcctacaaccttctt

SEQ ID NO: 3170721 - DNA, 25 bp, Homo sapien
gcctataaatttggtgaagctgtat

SEQ ID NO: 3170722 - DNA, 25 bp, Homo sapien
cagagagcggaaactgatatgccaa

SEQ ID NO: 3170723 - DNA, 25 bp, Homo sapien
tagcaagggaaaaagaacgtggctg

SEQ ID NO: 3170724 - DNA, 25 bp, Homo sapien
tactactgtatgagagaatccactg

SEQ ID NO: 3170725 - DNA, 25 bp, Homo sapien
tcttctaataggacagaccacctag

SEQ ID NO: 3170726 - DNA, 25 bp, Homo sapien
gactaaggagcaagagatgtgtgca

SEQ ID NO: 3170727 - DNA, 25 bp, Homo sapien
acaaccagattcactcatacgagag

SEQ ID NO: 3170728 - DNA, 25 bp, Homo sapien
ctgcgattcctacagacaagatggg

SEQ ID NO: 3170729 - DNA, 25 bp, Homo sapien
catacgagagttacatgtccacaag

SEQ ID NO: 3170730 - DNA, 25 bp, Homo sapien
gcaaacacggtacaaggcaactcag

SEQ ID NO: 3170731 - DNA, 25 bp, Homo sapien
ggaatgtcataacccgcaaagtctt

SEQ ID NO: 3170732 - DNA, 25 bp, Homo sapien
aatcagccgatagcagccatttcca

SEQ ID NO: 3170733 - DNA, 25 bp, Homo sapien
tctcccctatgaaactgaagtgtca

SEQ ID NO: 3170734 - DNA, 25 bp, Homo sapien
catataactgtagataatgagccta

SEQ ID NO: 3170735 - DNA, 25 bp, Homo sapien
tctcatccctaaaagaatgggtaag

SEQ ID NO: 3170736 - DNA, 25 bp, Homo sapien
gcttccggattaagcttggtcaaaa

SEQ ID NO: 3170737 - DNA, 25 bp, Homo sapien
tcagacactgctgacttttcaaagt

SEQ ID NO: 3170738 - DNA, 25 bp, Homo sapien
ttttcagtcctaatgtcacacagct

SEQ ID NO: 3170739 - DNA, 25 bp, Homo sapien
caagcaagtagctgcaagagaaaca

SEQ ID NO: 3170740 - DNA, 25 bp, Homo sapien
tcatctttggaatgcaacatattgc

SEQ ID NO: 3170741 - DNA, 25 bp, Homo sapien
ggcagcaagcaccactccttgttgt

SEQ ID NO: 3170742 - DNA, 25 bp, Homo sapien
agttcatgcagagtatgtttctccc

SEQ ID NO: 3170743 - DNA, 25 bp, Homo sapien
taagttctgatttatcacgaagctt

SEQ ID NO: 3170744 - DNA, 25 bp, Homo sapien
gcttgtctgggtctttgcttcgtcc

SEQ ID NO: 3170745 - DNA, 25 bp, Homo sapien
gactagcctctagcatccctgctgt

SEQ ID NO: 3170746 - DNA, 25 bp, Homo sapien
tgtgccagttggctgctatcttcca

SEQ ID NO: 3170747 - DNA, 25 bp, Homo sapien
tttcctttcagccaactgttgtact

SEQ ID NO: 3170748 - DNA, 25 bp, Homo sapien
tgtacttcctgttatgtgccagttg

SEQ ID NO: 3170749 - DNA, 25 bp, Homo sapien
ctttcagccaactgttgtacttcct

SEQ ID NO: 3170750 - DNA, 25 bp, Homo sapien
tgcaacttgtacaccgtccacaaat

SEQ ID NO: 3170751 - DNA, 25 bp, Homo sapien
gctgattccatgactgcaacttgta

SEQ ID NO: 3170752 - DNA, 25 bp, Homo sapien
tccatgactgcaacttgtacaccgt

SEQ ID NO: 3170753 - DNA, 25 bp, Homo sapien
cattctgactggtcaatttggatga

SEQ ID NO: 3170754 - DNA, 25 bp, Homo sapien
ctagtgcttcacatagtcgtgcagc

SEQ ID NO: 3170755 - DNA, 25 bp, Homo sapien
agtcgtgcagccaaacagtccctga

SEQ ID NO: 3170756 - DNA, 25 bp, Homo sapien
tccctgagtctctaagtccagcctg

SEQ ID NO: 3170757 - DNA, 25 bp, Homo sapien
gccaaacagtccctgagtctctaag

SEQ ID NO: 3170758 - DNA, 25 bp, Homo sapien
ctgtctgggaccactgccaacatat

SEQ ID NO: 3170759 - DNA, 25 bp, Homo sapien
ttccacaactggtgtcctccttgaa

SEQ ID NO: 3170760 - DNA, 25 bp, Homo sapien
tcctgtctgggaccactgccaacat

SEQ ID NO: 3170761 - DNA, 25 bp, Homo sapien
ttagaagtaccttcctcctgtctgg

SEQ ID NO: 3170762 - DNA, 25 bp, Homo sapien
tcagccagagatgaacctctcatca

SEQ ID NO: 3170763 - DNA, 25 bp, Homo sapien
ttaaggccattaccctcagccagag

SEQ ID NO: 3170764 - DNA, 25 bp, Homo sapien
cagtgattgaattggagcgatccca

SEQ ID NO: 3170765 - DNA, 25 bp, Homo sapien
tctcatcatggcgatgacagtgaca

SEQ ID NO: 3170766 - DNA, 25 bp, Homo sapien
acaatggtaatgagtgataatatcc

SEQ ID NO: 3170767 - DNA, 25 bp, Homo sapien
tgataatatccaacgtgatcctgga

SEQ ID NO: 3170768 - DNA, 25 bp, Homo sapien
gagtaactattagtttaatcatcct

SEQ ID NO: 3170769 - DNA, 25 bp, Homo sapien
tcagaagtgtctccgagtaactatt

SEQ ID NO: 3170770 - DNA, 25 bp, Homo sapien
tcttcagtcaatgtgatatgggtgt

SEQ ID NO: 3170771 - DNA, 25 bp, Homo sapien
taatagccaacacaactcactatgc

SEQ ID NO: 3170772 - DNA, 25 bp, Homo sapien
tgccatatgatatacagctgttagg

SEQ ID NO: 3170773 - DNA, 25 bp, Homo sapien
gagagggtaaataacctgccatatg

SEQ ID NO: 3170774 - DNA, 25 bp, Homo sapien
ccacacagactcatatcaatatagc

SEQ ID NO: 3170775 - DNA, 25 bp, Homo sapien
acacagactcatatcaatatagcca

SEQ ID NO: 3170776 - DNA, 25 bp, Homo sapien
ctttccacacagactcatatcaata

SEQ ID NO: 3170777 - DNA, 25 bp, Homo sapien
tccacacagactcatatcaatatag

SEQ ID NO: 3170778 - DNA, 25 bp, Homo sapien
tagacattaattcttatgctattgg

SEQ ID NO: 3170779 - DNA, 25 bp, Homo sapien
ttatttcagcatcatagtagacatt

SEQ ID NO: 3170780 - DNA, 25 bp, Homo sapien
tagacagcagagtagttttaccagt

SEQ ID NO: 3170781 - DNA, 25 bp, Homo sapien
tgacattattcccaggcacaccaca

SEQ ID NO: 3170782 - DNA, 25 bp, Homo sapien
tcttctctcatgtgatagttcagca

SEQ ID NO: 3170783 - DNA, 25 bp, Homo sapien
gtaattgagtacatctggctcagca

SEQ ID NO: 3170784 - DNA, 25 bp, Homo sapien
ggccagcttgactgtagtgtgcaag

SEQ ID NO: 3170785 - DNA, 25 bp, Homo sapien
tctaggtccatctctttaagggcca

SEQ ID NO: 3170786 - DNA, 25 bp, Homo sapien
taatcggctcttgtgactcaaaatt

SEQ ID NO: 3170787 - DNA, 25 bp, Homo sapien
tattttatcagttggagtcgagaaa

SEQ ID NO: 3170788 - DNA, 25 bp, Homo sapien
tcagttggagtcgagaaaaactttc

SEQ ID NO: 3170789 - DNA, 25 bp, Homo sapien
tggttgttgccaccagactgagatt

SEQ ID NO: 3170790 - DNA, 25 bp, Homo sapien
tctctgagaaggaatacggagaaac

SEQ ID NO: 3170791 - DNA, 25 bp, Homo sapien
gatgtgttgaggctttttctctgag

SEQ ID NO: 3170792 - DNA, 25 bp, Homo sapien
aagccatttgtgttactgtagaaaa

SEQ ID NO: 3170793 - DNA, 25 bp, Homo sapien
gaatacggagaaaccaggtctacta

SEQ ID NO: 3170794 - DNA, 25 bp, Homo sapien
ttagtgtgaatggtgctgtaataaa

SEQ ID NO: 3170795 - DNA, 25 bp, Homo sapien
tgcgtgcacgtacctttataataaa

SEQ ID NO: 3170796 - DNA, 25 bp, Homo sapien
ttattagtgtgaatggtgctgtaat

SEQ ID NO: 3170797 - DNA, 25 bp, Homo sapien
atgcgtgcacgtacctttataataa

SEQ ID NO: 3170798 - DNA, 25 bp, Homo sapien
tgtgccttgttcagactggtttttc

SEQ ID NO: 3170799 - DNA, 25 bp, Homo sapien
cttgttcagactggtttttcaccat

SEQ ID NO: 3170800 - DNA, 25 bp, Homo sapien
gccttgttcagactggtttttcacc

SEQ ID NO: 3170801 - DNA, 25 bp, Homo sapien
tgccttgttcagactggtttttcac

SEQ ID NO: 3170802 - DNA, 25 bp, Homo sapien
gatgagagaatttacagcaaccaaa

SEQ ID NO: 3170803 - DNA, 25 bp, Homo sapien
caagagacctacactgttgcacagg

SEQ ID NO: 3170804 - DNA, 25 bp, Homo sapien
tgcagagctgcctatgggctactgg

SEQ ID NO: 3170805 - DNA, 25 bp, Homo sapien
tgcacaggctttcatgagcgtatgt

SEQ ID NO: 3170806 - DNA, 25 bp, Homo sapien
taaaaagttagcagaggtttgcaga

SEQ ID NO: 3170807 - DNA, 25 bp, Homo sapien
gacagagacctgtgagaagaaatgt

SEQ ID NO: 3170808 - DNA, 25 bp, Homo sapien
ttacttgtattgagggacagagacc

SEQ ID NO: 3170809 - DNA, 25 bp, Homo sapien
taagggtccatgtagcctagctaat

SEQ ID NO: 3170810 - DNA, 25 bp, Homo sapien
tttaaggatagccagacctacccag

SEQ ID NO: 3170811 - DNA, 25 bp, Homo sapien
atagggtttaaggatagccagacct

SEQ ID NO: 3170812 - DNA, 25 bp, Homo sapien
ctccaaacctgagaatgaaatatgt

SEQ ID NO: 3170813 - DNA, 25 bp, Homo sapien
cctaaaagtcgatgtgatcagaata

SEQ ID NO: 3170814 - DNA, 25 bp, Homo sapien
catgcctatttttataccagtacca

SEQ ID NO: 3170815 - DNA, 25 bp, Homo sapien
acatgcctatttttataccagtacc

SEQ ID NO: 3170816 - DNA, 25 bp, Homo sapien
tgcctatttttataccagtaccatg

SEQ ID NO: 3170817 - DNA, 25 bp, Homo sapien
cctatttttataccagtaccatgct

SEQ ID NO: 3170818 - DNA, 25 bp, Homo sapien
gagagccaagctgtttagcagtgtt

SEQ ID NO: 3170819 - DNA, 25 bp, Homo sapien
gctatttgtcaccagttgagagcca

SEQ ID NO: 3170820 - DNA, 25 bp, Homo sapien
aggagattttgtgttctttatcaca

SEQ ID NO: 3170821 - DNA, 25 bp, Homo sapien
ctgactgactggcacgagggaagca

SEQ ID NO: 3170822 - DNA, 25 bp, Homo sapien
gctttgctaaacaatccggttgaaa

SEQ ID NO: 3170823 - DNA, 25 bp, Homo sapien
ttactgtgagtgttccctccgtgtg

SEQ ID NO: 3170824 - DNA, 25 bp, Homo sapien
gtgcaagcacacaattacgttcata

SEQ ID NO: 3170825 - DNA, 25 bp, Homo sapien
aagacattaggcagttgttccccag

SEQ ID NO: 3170826 - DNA, 25 bp, Homo sapien
tcattctttgcataccctgggcctc

SEQ ID NO: 3170827 - DNA, 25 bp, Homo sapien
tctcattctttgcataccctgggcc

SEQ ID NO: 3170828 - DNA, 25 bp, Homo sapien
attctttgcataccctgggcctcca

SEQ ID NO: 3170829 - DNA, 25 bp, Homo sapien
ctctcattctttgcataccctgggc

SEQ ID NO: 3170830 - DNA, 25 bp, Homo sapien
ctagagaagagcgaaggatatggac

SEQ ID NO: 3170831 - DNA, 25 bp, Homo sapien
gacagcttgaaaaagctaccccagg

SEQ ID NO: 3170832 - DNA, 25 bp, Homo sapien
aataacagttgagcaagattgcctc

SEQ ID NO: 3170833 - DNA, 25 bp, Homo sapien
ccccttgtgtacatgaaggagaggc

SEQ ID NO: 3170834 - DNA, 25 bp, Homo sapien
tgttctcccccacgagaatatcttc

SEQ ID NO: 3170835 - DNA, 25 bp, Homo sapien
tcttagtggttctattctcagtatc

SEQ ID NO: 3170836 - DNA, 25 bp, Homo sapien
agccgttgttctcccccacgagaat

SEQ ID NO: 3170837 - DNA, 25 bp, Homo sapien
cacctctttgccttggccatgcttc

SEQ ID NO: 3170838 - DNA, 25 bp, Homo sapien
ttatccacggaaaataaaggacatg

SEQ ID NO: 3170839 - DNA, 25 bp, Homo sapien
tattgagcattgtggccagaactcc

SEQ ID NO: 3170840 - DNA, 25 bp, Homo sapien
tcactgctagtagaaatacatcagc

SEQ ID NO: 3170841 - DNA, 25 bp, Homo sapien
tattttgtgatgcatacacttagcc

SEQ ID NO: 3170842 - DNA, 25 bp, Homo sapien
tcaatcatggccaccgcgtgtgtaa

SEQ ID NO: 3170843 - DNA, 25 bp, Homo sapien
gccaccgcgtgtgtaatttcttcct

SEQ ID NO: 3170844 - DNA, 25 bp, Homo sapien
gtctccttcccgttcactgtagtca

SEQ ID NO: 3170845 - DNA, 25 bp, Homo sapien
cgttcactgtagtcaatcatggcca

SEQ ID NO: 3170846 - DNA, 25 bp, Homo sapien
tcatcataagttcggtgttttattc

SEQ ID NO: 3170847 - DNA, 25 bp, Homo sapien
caacttcagccccagattttaatgt

SEQ ID NO: 3170848 - DNA, 25 bp, Homo sapien
tgtcatcataagttcggtgttttat

SEQ ID NO: 3170849 - DNA, 25 bp, Homo sapien
acttcagccccagattttaatgtaa

SEQ ID NO: 3170850 - DNA, 25 bp, Homo sapien
catatggcggcagcaagaagcagtt

SEQ ID NO: 3170851 - DNA, 25 bp, Homo sapien
tcatatggcggcagcaagaagcagt

SEQ ID NO: 3170852 - DNA, 25 bp, Homo sapien
tcttcatatggcggcagcaagaagc

SEQ ID NO: 3170853 - DNA, 25 bp, Homo sapien
ttcatatggcggcagcaagaagcag

SEQ ID NO: 3170854 - DNA, 25 bp, Homo sapien
gagtcctacaactagccaaaaatag

SEQ ID NO: 3170855 - DNA, 25 bp, Homo sapien
gaagcagttctagtttgagtcctac

SEQ ID NO: 3170856 - DNA, 25 bp, Homo sapien
tctaccacatggctacaacatattc

SEQ ID NO: 3170857 - DNA, 25 bp, Homo sapien
tgtgattacacaggacccacctaga

SEQ ID NO: 3170858 - DNA, 25 bp, Homo sapien
ggctcagctagatattctgtttcaa

SEQ ID NO: 3170859 - DNA, 25 bp, Homo sapien
gagcagatgacaaggagaagcttct

SEQ ID NO: 3170860 - DNA, 25 bp, Homo sapien
gtgttatccaggctagggagcagat

SEQ ID NO: 3170861 - DNA, 25 bp, Homo sapien
tctgtttcaagtgttccatgtgtta

SEQ ID NO: 3170862 - DNA, 25 bp, Homo sapien
aggcatacagaatggtataacgcac

SEQ ID NO: 3170863 - DNA, 25 bp, Homo sapien
tacagtgtgcactattgggtgacag

SEQ ID NO: 3170864 - DNA, 25 bp, Homo sapien
tggtataacgcacactggagactca

SEQ ID NO: 3170865 - DNA, 25 bp, Homo sapien
taattattatgtacagtgtgcacta

SEQ ID NO: 3170866 - DNA, 25 bp, Homo sapien
aagttagagcccttgattctcgcaa

SEQ ID NO: 3170867 - DNA, 25 bp, Homo sapien
tatgttgcaccctagcagctaagtc

SEQ ID NO: 3170868 - DNA, 25 bp, Homo sapien
gaaatgatttagctagggagaggcc

SEQ ID NO: 3170869 - DNA, 25 bp, Homo sapien
cactgaggatcatattacaactggc

SEQ ID NO: 3170870 - DNA, 25 bp, Homo sapien
gatgtctaacatatatagaagcata

SEQ ID NO: 3170871 - DNA, 25 bp, Homo sapien
cccagggtatattaagatgtctaac

SEQ ID NO: 3170872 - DNA, 25 bp, Homo sapien
tcttaaacaccatcttacgctgccg

SEQ ID NO: 3170873 - DNA, 25 bp, Homo sapien
atagtagtctaggtggtggaagcta

SEQ ID NO: 3170874 - DNA, 25 bp, Homo sapien
tcgcctctttcagggaagcatattg

SEQ ID NO: 3170875 - DNA, 25 bp, Homo sapien
tcctgcaaagtgagccattcaggca

SEQ ID NO: 3170876 - DNA, 25 bp, Homo sapien
gtgagccattcaggcattgcatctt

SEQ ID NO: 3170877 - DNA, 25 bp, Homo sapien
tgcatcttctgaaatttcctcgcct

SEQ ID NO: 3170878 - DNA, 25 bp, Homo sapien
ggctcactgtactggagagtaggaa

SEQ ID NO: 3170879 - DNA, 25 bp, Homo sapien
tatttggctcactgtactggagagt

SEQ ID NO: 3170880 - DNA, 25 bp, Homo sapien
tactggagagtaggaagtctaagat

SEQ ID NO: 3170881 - DNA, 25 bp, Homo sapien
tcactgtactggagagtaggaagtc

SEQ ID NO: 3170882 - DNA, 25 bp, Homo sapien
cagtgggatggccttgttacttaaa

SEQ ID NO: 3170883 - DNA, 25 bp, Homo sapien
gctgctggtaggcttacaaaatcca

SEQ ID NO: 3170884 - DNA, 25 bp, Homo sapien
gcaggcctcacctaaaaaacagtgt

SEQ ID NO: 3170885 - DNA, 25 bp, Homo sapien
gagcaataggcacacagtaaacggc

SEQ ID NO: 3170886 - DNA, 25 bp, Homo sapien
ctagggcttatgtccccaaagggat

SEQ ID NO: 3170887 - DNA, 25 bp, Homo sapien
aagacagctagtggcagtccaggca

SEQ ID NO: 3170888 - DNA, 25 bp, Homo sapien
tgtgggtgctctcaactctagggct

SEQ ID NO: 3170889 - DNA, 25 bp, Homo sapien
ccagagtcagggaagcgtgaatcct

SEQ ID NO: 3170890 - DNA, 25 bp, Homo sapien
gctgaagctgttttcgttcacactt

SEQ ID NO: 3170891 - DNA, 25 bp, Homo sapien
tttcaagctgaagctgttttcgttc

SEQ ID NO: 3170892 - DNA, 25 bp, Homo sapien
caagctgaagctgttttcgttcaca

SEQ ID NO: 3170893 - DNA, 25 bp, Homo sapien
gaagctgttttcgttcacacttggg

SEQ ID NO: 3170894 - DNA, 25 bp, Homo sapien
tagatattctaaacctgagggggaa

SEQ ID NO: 3170895 - DNA, 25 bp, Homo sapien
tacaaattcttcaaattgaaataag

SEQ ID NO: 3170896 - DNA, 25 bp, Homo sapien
cttcaaattgaaataagaagtcctt

SEQ ID NO: 3170897 - DNA, 25 bp, Homo sapien
gaatttagatattctaaacctgagg

SEQ ID NO: 3170898 - DNA, 25 bp, Homo sapien
gagcactgagtaagcgagactcccg

SEQ ID NO: 3170899 - DNA, 25 bp, Homo sapien
gcactgagtaagcgagactcccgtc

SEQ ID NO: 3170900 - DNA, 25 bp, Homo sapien
cctagacgggatgatggcccgggaa

SEQ ID NO: 3170901 - DNA, 25 bp, Homo sapien
agcactgagtaagcgagactcccgt

SEQ ID NO: 3170902 - DNA, 25 bp, Homo sapien
gatttaatcgcattttcgaagtgtg

SEQ ID NO: 3170903 - DNA, 25 bp, Homo sapien
cagtggatttagttccactccaggc

SEQ ID NO: 3170904 - DNA, 25 bp, Homo sapien
gaagtaatcaggttcaactgatgga

SEQ ID NO: 3170905 - DNA, 25 bp, Homo sapien
tcgaagtgtgttaaataagtctgtt

SEQ ID NO: 3170906 - DNA, 25 bp, Homo sapien
tctgcaccactaccattgacgtttg

SEQ ID NO: 3170907 - DNA, 25 bp, Homo sapien
taagccatatgcacctctgaactcc

SEQ ID NO: 3170908 - DNA, 25 bp, Homo sapien
gctctgattcccttgagagagggtg

SEQ ID NO: 3170909 - DNA, 25 bp, Homo sapien
tagctccctggactagctctgattc

SEQ ID NO: 3170910 - DNA, 25 bp, Homo sapien
ttctctgcagacaggttgtcccact

SEQ ID NO: 3170911 - DNA, 25 bp, Homo sapien
tttctagccaagtaaagacagtgtt

SEQ ID NO: 3170912 - DNA, 25 bp, Homo sapien
ccaatgtttctagccaagtaaagac

SEQ ID NO: 3170913 - DNA, 25 bp, Homo sapien
tgtttctagccaagtaaagacagtg

SEQ ID NO: 3170914 - DNA, 25 bp, Homo sapien
tcccccaatgtttctagccaagtaa

SEQ ID NO: 3170915 - DNA, 25 bp, Homo sapien
cctgaggtgcctgaactagcaattc

SEQ ID NO: 3170916 - DNA, 25 bp, Homo sapien
ctgaggtgcctgaactagcaattcc

SEQ ID NO: 3170917 - DNA, 25 bp, Homo sapien
ccctgaggtgcctgaactagcaatt

SEQ ID NO: 3170918 - DNA, 25 bp, Homo sapien
cagttgcaaggaccagcacgccaaa

SEQ ID NO: 3170919 - DNA, 25 bp, Homo sapien
ggattcttctgtgttggagagtgca

SEQ ID NO: 3170920 - DNA, 25 bp, Homo sapien
cttgtgcaaaaggattcttctgtgt

SEQ ID NO: 3170921 - DNA, 25 bp, Homo sapien
gagtgcaaaaccgtcagcttctgtg

SEQ ID NO: 3170922 - DNA, 25 bp, Homo sapien
tcgaaaggtggaatctatggagtcc

SEQ ID NO: 3170923 - DNA, 25 bp, Homo sapien
tatggagtcctttgaatctcggctg

SEQ ID NO: 3170924 - DNA, 25 bp, Homo sapien
tctgggcctaattcctaagaggact

SEQ ID NO: 3170925 - DNA, 25 bp, Homo sapien
gatatgccacaatcttgctttgcca

SEQ ID NO: 3170926 - DNA, 25 bp, Homo sapien
tattttttccatggagacaacttca

SEQ ID NO: 3170927 - DNA, 25 bp, Homo sapien
gacaacttcagaatctaatacaact

SEQ ID NO: 3170928 - DNA, 25 bp, Homo sapien
tccttgccgatacaacattgaccca

SEQ ID NO: 3170929 - DNA, 25 bp, Homo sapien
ttcttccagactagtttaaagtgac

SEQ ID NO: 3170930 - DNA, 25 bp, Homo sapien
cacattatagatattagggttaaaa

SEQ ID NO: 3170931 - DNA, 25 bp, Homo sapien
attaaaacacattatagatattagg

SEQ ID NO: 3170932 - DNA, 25 bp, Homo sapien
ttttattgaccacaaaagaagacaa

SEQ ID NO: 3170933 - DNA, 25 bp, Homo sapien
tatcacatagttttattgaccacaa

SEQ ID NO: 3170934 - DNA, 25 bp, Homo sapien
ctggtcaccatcacaagttgtcaag

SEQ ID NO: 3170935 - DNA, 25 bp, Homo sapien
ttgtcaaggccaagatagaggctgc

SEQ ID NO: 3170936 - DNA, 25 bp, Homo sapien
cacaagttgtcaaggccaagataga

SEQ ID NO: 3170937 - DNA, 25 bp, Homo sapien
caccatcacaagttgtcaaggccaa

SEQ ID NO: 3170938 - DNA, 25 bp, Homo sapien
tcagtttggagatgtcgggtgacaa

SEQ ID NO: 3170939 - DNA, 25 bp, Homo sapien
tatgtaaggaacaaatccaggtcaa

SEQ ID NO: 3170940 - DNA, 25 bp, Homo sapien
aatcagattggtcctctacccctgg

SEQ ID NO: 3170941 - DNA, 25 bp, Homo sapien
tgagtttaacccatgaaccaccaga

SEQ ID NO: 3170942 - DNA, 25 bp, Homo sapien
tatgagaagatagcctgatagcctc

SEQ ID NO: 3170943 - DNA, 25 bp, Homo sapien
tcatgaagactaggcactggtgtgt

SEQ ID NO: 3170944 - DNA, 25 bp, Homo sapien
cagggttgggcataagcatcatgaa

SEQ ID NO: 3170945 - DNA, 25 bp, Homo sapien
tctgctggacaaatgatgggtctat

SEQ ID NO: 3170946 - DNA, 25 bp, Homo sapien
tggtcatatgtcagaggtgattcag

SEQ ID NO: 3170947 - DNA, 25 bp, Homo sapien
ctggtcatatgtcagaggtgattca

SEQ ID NO: 3170948 - DNA, 25 bp, Homo sapien
ggtcatatgtcagaggtgattcaga

SEQ ID NO: 3170949 - DNA, 25 bp, Homo sapien
aggtgattcagaaaagacatgggtc

SEQ ID NO: 3170950 - DNA, 25 bp, Homo sapien
gactatttggacatagcacctttaa

SEQ ID NO: 3170951 - DNA, 25 bp, Homo sapien
gaacttctaattcctactctctgag

SEQ ID NO: 3170952 - DNA, 25 bp, Homo sapien
ttaggatgggcccaaatctgatttg

SEQ ID NO: 3170953 - DNA, 25 bp, Homo sapien
agaggagattagacacagatgacac

SEQ ID NO: 3170954 - DNA, 25 bp, Homo sapien
ctgtggtcttaaacatgttgtattc

SEQ ID NO: 3170955 - DNA, 25 bp, Homo sapien
tgttctgtggtcttaaacatgttgt

SEQ ID NO: 3170956 - DNA, 25 bp, Homo sapien
cagatgttctgtggtcttaaacatg

SEQ ID NO: 3170957 - DNA, 25 bp, Homo sapien
ctatgcagatgttctgtggtcttaa

SEQ ID NO: 3170958 - DNA, 25 bp, Homo sapien
cagttgggagcacattcatctctta

SEQ ID NO: 3170959 - DNA, 25 bp, Homo sapien
tcttaaacagttctgtcaactggga

SEQ ID NO: 3170960 - DNA, 25 bp, Homo sapien
gaaaatagattctcccgatcatatg

SEQ ID NO: 3170961 - DNA, 25 bp, Homo sapien
gataaatactgtgaccgtaatccca

SEQ ID NO: 3170962 - DNA, 25 bp, Homo sapien
tcatataaatcggtacatttcaggg

SEQ ID NO: 3170963 - DNA, 25 bp, Homo sapien
cttgccggccttgtggtaataagac

SEQ ID NO: 3170964 - DNA, 25 bp, Homo sapien
tattggatggctgatgaactggaaa

SEQ ID NO: 3170965 - DNA, 25 bp, Homo sapien
aagcacaggcagcagtactaactca

SEQ ID NO: 3170966 - DNA, 25 bp, Homo sapien
caataaaagtggatagagatctttc

SEQ ID NO: 3170967 - DNA, 25 bp, Homo sapien
agatctttcatatcagggacagggc

SEQ ID NO: 3170968 - DNA, 25 bp, Homo sapien
gaaagtaatcttccgggaattatgc

SEQ ID NO: 3170969 - DNA, 25 bp, Homo sapien
ttcatatcagggacagggcttagct

SEQ ID NO: 3170970 - DNA, 25 bp, Homo sapien
gggaacctcaagagggtcaggagat

SEQ ID NO: 3170971 - DNA, 25 bp, Homo sapien
aaggattacacataaaccaaatctg

SEQ ID NO: 3170972 - DNA, 25 bp, Homo sapien
ggagataatgaagattatacctcaa

SEQ ID NO: 3170973 - DNA, 25 bp, Homo sapien
agtaatatagattgggggaacctca

SEQ ID NO: 3170974 - DNA, 25 bp, Homo sapien
cttttggaccttttgtttgagacat

SEQ ID NO: 3170975 - DNA, 25 bp, Homo sapien
gcttttggaccttttgtttgagaca

SEQ ID NO: 3170976 - DNA, 25 bp, Homo sapien
tagcttttggaccttttgtttgaga

SEQ ID NO: 3170977 - DNA, 25 bp, Homo sapien
tgttgtgacaggaattctttgctga

SEQ ID NO: 3170978 - DNA, 25 bp, Homo sapien
ttctttaatgttgtgacaggaattc

SEQ ID NO: 3170979 - DNA, 25 bp, Homo sapien
taatgttgtgacaggaattctttgc

SEQ ID NO: 3170980 - DNA, 25 bp, Homo sapien
caattgcatccctgaagactgtcca

SEQ ID NO: 3170981 - DNA, 25 bp, Homo sapien
ttactatatctattagggttaacca

SEQ ID NO: 3170982 - DNA, 25 bp, Homo sapien
ctatatctattagggttaaccatgg

SEQ ID NO: 3170983 - DNA, 25 bp, Homo sapien
actatatctattagggttaaccatg

SEQ ID NO: 3170984 - DNA, 25 bp, Homo sapien
atatctattagggttaaccatggtt

SEQ ID NO: 3170985 - DNA, 25 bp, Homo sapien
tccaatgtttattttagtctcacac

SEQ ID NO: 3170986 - DNA, 25 bp, Homo sapien
atgtttattttagtctcacacaaac

SEQ ID NO: 3170987 - DNA, 25 bp, Homo sapien
caatgtttattttagtctcacacaa

SEQ ID NO: 3170988 - DNA, 25 bp, Homo sapien
cttctccaatgtttattttagtctc

SEQ ID NO: 3170989 - DNA, 25 bp, Homo sapien
gctacacaggcagaatatgccgaag

SEQ ID NO: 3170990 - DNA, 25 bp, Homo sapien
tattagatgggagtaggatagctac

SEQ ID NO: 3170991 - DNA, 25 bp, Homo sapien
catcttcagcttcagggttactgac

SEQ ID NO: 3170992 - DNA, 25 bp, Homo sapien
tatgccgaagaagtccctagtaaac

SEQ ID NO: 3170993 - DNA, 25 bp, Homo sapien
ccattaattgtttacacgagcagtc

SEQ ID NO: 3170994 - DNA, 25 bp, Homo sapien
tcaattaatcctgtcatagaagggc

SEQ ID NO: 3170995 - DNA, 25 bp, Homo sapien
tagaagggcatcgtaaactgtgtgc

SEQ ID NO: 3170996 - DNA, 25 bp, Homo sapien
ttatcacatcattacaccagctggc

SEQ ID NO: 3170997 - DNA, 25 bp, Homo sapien
cttatgacccctagaaagtccctgg

SEQ ID NO: 3170998 - DNA, 25 bp, Homo sapien
catgcttttcagaaaggaagatccg

SEQ ID NO: 3170999 - DNA, 25 bp, Homo sapien
taagacagagccttctgggttttct

SEQ ID NO: 3171000 - DNA, 25 bp, Homo sapien
cagaaaggaagatccgagctccagc

SEQ ID NO: 3171001 - DNA, 25 bp, Homo sapien
cagtcccactcatcagggtggagcc

SEQ ID NO: 3171002 - DNA, 25 bp, Homo sapien
cttgctgtgacgttgcatggtggaa

SEQ ID NO: 3171003 - DNA, 25 bp, Homo sapien
agggaaattgtagatcaaggggcca

SEQ ID NO: 3171004 - DNA, 25 bp, Homo sapien
cagaaggtaagaggggactaacttg

SEQ ID NO: 3171005 - DNA, 25 bp, Homo sapien
ttcgcaaattaagtctcaatgttct

SEQ ID NO: 3171006 - DNA, 25 bp, Homo sapien
gcaaattaagtctcaatgttctttc

SEQ ID NO: 3171007 - DNA, 25 bp, Homo sapien
tcgcaaattaagtctcaatgttctt

SEQ ID NO: 3171008 - DNA, 25 bp, Homo sapien
cgcaaattaagtctcaatgttcttt

SEQ ID NO: 3171009 - DNA, 25 bp, Homo sapien
tggtatggctctcaacagctggtcc

SEQ ID NO: 3171010 - DNA, 25 bp, Homo sapien
tacgttaggtgatttgtggtccaag

SEQ ID NO: 3171011 - DNA, 25 bp, Homo sapien
agaagaggtcttccaggcgattgga

SEQ ID NO: 3171012 - DNA, 25 bp, Homo sapien
tgagtaataaaccacggtagcttgc

SEQ ID NO: 3171013 - DNA, 25 bp, Homo sapien
ctcctcggtctccagtctaattttt

SEQ ID NO: 3171014 - DNA, 25 bp, Homo sapien
ggacttgttatcagttggatggcgt

SEQ ID NO: 3171015 - DNA, 25 bp, Homo sapien
tatgttggtaaaacacagcaggact

SEQ ID NO: 3171016 - DNA, 25 bp, Homo sapien
ttttatgttggtaaaacacagcagg

SEQ ID NO: 3171017 - DNA, 25 bp, Homo sapien
tccatactgccttgtaaattgtaaa

SEQ ID NO: 3171018 - DNA, 25 bp, Homo sapien
gtaaacacagaagttgtcaacatta

SEQ ID NO: 3171019 - DNA, 25 bp, Homo sapien
ttactccatactgccttgtaaattg

SEQ ID NO: 3171020 - DNA, 25 bp, Homo sapien
ttgtaaacacagaagttgtcaacat

SEQ ID NO: 3171021 - DNA, 25 bp, Homo sapien
cactgcagcatccttgaaagcttag

SEQ ID NO: 3171022 - DNA, 25 bp, Homo sapien
aagacaagtgctctccacccagtga

SEQ ID NO: 3171023 - DNA, 25 bp, Homo sapien
ccagtgaagccggagactggcacca

SEQ ID NO: 3171024 - DNA, 25 bp, Homo sapien
gaaagcttagcatcggttctgagcc

SEQ ID NO: 3171025 - DNA, 25 bp, Homo sapien
attacagccaaagatgcttcaattt

SEQ ID NO: 3171026 - DNA, 25 bp, Homo sapien
gaattacagccaaagatgcttcaat

SEQ ID NO: 3171027 - DNA, 25 bp, Homo sapien
aattacagccaaagatgcttcaatt

SEQ ID NO: 3171028 - DNA, 25 bp, Homo sapien
aagaaaggctgcaagcatcctaaaa

SEQ ID NO: 3171029 - DNA, 25 bp, Homo sapien
gaaaggctgcaagcatcctaaaagt

SEQ ID NO: 3171030 - DNA, 25 bp, Homo sapien
aaggctgcaagcatcctaaaagtac

SEQ ID NO: 3171031 - DNA, 25 bp, Homo sapien
tcaaagaaaggctgcaagcatccta

SEQ ID NO: 3171032 - DNA, 25 bp, Homo sapien
agtgggaaaagaactgcaggcactc

SEQ ID NO: 3171033 - DNA, 25 bp, Homo sapien
gtgggaaaagaactgcaggcactct

SEQ ID NO: 3171034 - DNA, 25 bp, Homo sapien
aagtgggaaaagaactgcaggcact

SEQ ID NO: 3171035 - DNA, 25 bp, Homo sapien
aaactgagtgcctgaagtgtgagag

SEQ ID NO: 3171036 - DNA, 25 bp, Homo sapien
ccaaacatacatcggccctggagaa

SEQ ID NO: 3171037 - DNA, 25 bp, Homo sapien
cctgaaaatccagaagacgggagaa

SEQ ID NO: 3171038 - DNA, 25 bp, Homo sapien
aaataagcggcttgccactgaaaac

SEQ ID NO: 3171039 - DNA, 25 bp, Homo sapien
gattagatggtgtcccccaagattg

SEQ ID NO: 3171040 - DNA, 25 bp, Homo sapien
tggtgtcccccaagattgagtatgg

SEQ ID NO: 3171041 - DNA, 25 bp, Homo sapien
accatcacggaatcctttccaaatc

SEQ ID NO: 3171042 - DNA, 25 bp, Homo sapien
gattgagtatgggtttgtgtctccc

SEQ ID NO: 3171043 - DNA, 25 bp, Homo sapien
acttctttctctattcatcctagtg

SEQ ID NO: 3171044 - DNA, 25 bp, Homo sapien
atttagcgctgggaagaaacccaga

SEQ ID NO: 3171045 - DNA, 25 bp, Homo sapien
aaatgtaacacttctttctctattc

SEQ ID NO: 3171046 - DNA, 25 bp, Homo sapien
cctagtgaatccagtcgacaggatt

SEQ ID NO: 3171047 - DNA, 25 bp, Homo sapien
ggacccggttgcttccttcttggca

SEQ ID NO: 3171048 - DNA, 25 bp, Homo sapien
caggctagatctgcgtgggcatgta

SEQ ID NO: 3171049 - DNA, 25 bp, Homo sapien
gggcatgtaccagtttgtgagattc

SEQ ID NO: 3171050 - DNA, 25 bp, Homo sapien
tcagaactcagtggctttgcaacag

SEQ ID NO: 3171051 - DNA, 25 bp, Homo sapien
gcacagtatagatgttcagtcagcc

SEQ ID NO: 3171052 - DNA, 25 bp, Homo sapien
tgaaaatggttcctatccaaatagg

SEQ ID NO: 3171053 - DNA, 25 bp, Homo sapien
gagtaaatgagctgttgaaaattgg

SEQ ID NO: 3171054 - DNA, 25 bp, Homo sapien
tcctcgccgtgtactgcacagtata

SEQ ID NO: 3171055 - DNA, 25 bp, Homo sapien
ttttgtcattgacaagatacaagat

SEQ ID NO: 3171056 - DNA, 25 bp, Homo sapien
tattttctgctaattagttgtaaac

SEQ ID NO: 3171057 - DNA, 25 bp, Homo sapien
attgacaagatacaagataaaacag

SEQ ID NO: 3171058 - DNA, 25 bp, Homo sapien
gacaagatacaagataaaacagaga

SEQ ID NO: 3171059 - DNA, 25 bp, Homo sapien
gcacatgcctgagcattcttggact

SEQ ID NO: 3171060 - DNA, 25 bp, Homo sapien
acattatggatccacactgtttgcc

SEQ ID NO: 3171061 - DNA, 25 bp, Homo sapien
cattcttggactctttcttgtgcct

SEQ ID NO: 3171062 - DNA, 25 bp, Homo sapien
taaacattatggatccacactgttt

SEQ ID NO: 3171063 - DNA, 25 bp, Homo sapien
gagatcgacgatacgtcctgttgta

SEQ ID NO: 3171064 - DNA, 25 bp, Homo sapien
cagtcatcgcgaacagaaatttgaa

SEQ ID NO: 3171065 - DNA, 25 bp, Homo sapien
gaaatttgaaagtacgccttgcagg

SEQ ID NO: 3171066 - DNA, 25 bp, Homo sapien
gaaatctgactaaacgagatcgacg

SEQ ID NO: 3171067 - DNA, 25 bp, Homo sapien
gataaatgacacgatttcctccact

SEQ ID NO: 3171068 - DNA, 25 bp, Homo sapien
tcctccactcttctcaaaagacaag

SEQ ID NO: 3171069 - DNA, 25 bp, Homo sapien
aatgacacgatttcctccactcttc

SEQ ID NO: 3171070 - DNA, 25 bp, Homo sapien
taaatgacacgatttcctccactct

SEQ ID NO: 3171071 - DNA, 25 bp, Homo sapien
cataagttgggttacattcactgca

SEQ ID NO: 3171072 - DNA, 25 bp, Homo sapien
tcgagttgttgaggagattgtcaga

SEQ ID NO: 3171073 - DNA, 25 bp, Homo sapien
gtttccagccacagattggtcttcg

SEQ ID NO: 3171074 - DNA, 25 bp, Homo sapien
agcatcctgatgcttatcacctgga

SEQ ID NO: 3171075 - DNA, 25 bp, Homo sapien
ccccaggccagttttcgtgatacag

SEQ ID NO: 3171076 - DNA, 25 bp, Homo sapien
tgggccgccggcagaatcaactgtt

SEQ ID NO: 3171077 - DNA, 25 bp, Homo sapien
ttccgggcatttccagaaggcatct

SEQ ID NO: 3171078 - DNA, 25 bp, Homo sapien
gcccgtaggctagctgattcactga

SEQ ID NO: 3171079 - DNA, 25 bp, Homo sapien
ttcaacctgtccttggctgacattg

SEQ ID NO: 3171080 - DNA, 25 bp, Homo sapien
ttgtggacatgcaatcgcatagcag

SEQ ID NO: 3171081 - DNA, 25 bp, Homo sapien
tgacattggtttcacctcggccatg

SEQ ID NO: 3171082 - DNA, 25 bp, Homo sapien
ttggtttcacctcggccatggttcc

SEQ ID NO: 3171083 - DNA, 25 bp, Homo sapien
gctgtttctgaccatgccaaggtgg

SEQ ID NO: 3171084 - DNA, 25 bp, Homo sapien
cctccttcactagtcaactgctgtt

SEQ ID NO: 3171085 - DNA, 25 bp, Homo sapien
tcctccttcactagtcaactgctgt

SEQ ID NO: 3171086 - DNA, 25 bp, Homo sapien
gtttctgaccatgccaaggtggaac

SEQ ID NO: 3171087 - DNA, 25 bp, Homo sapien
tgctgtgagaaactactgcttgctg

SEQ ID NO: 3171088 - DNA, 25 bp, Homo sapien
gatgctgtgagaaactactgcttgc

SEQ ID NO: 3171089 - DNA, 25 bp, Homo sapien
ctggatgctgtgagaaactactgct

SEQ ID NO: 3171090 - DNA, 25 bp, Homo sapien
tatgctggatgctgtgagaaactac

SEQ ID NO: 3171091 - DNA, 25 bp, Homo sapien
tagtccagtagtcagccctatgcca

SEQ ID NO: 3171092 - DNA, 25 bp, Homo sapien
cagagatgtaatcctgtcagcctcc

SEQ ID NO: 3171093 - DNA, 25 bp, Homo sapien
ggtttaatagcaacctcatcaatgg

SEQ ID NO: 3171094 - DNA, 25 bp, Homo sapien
tgtaggacaagttaaacaaagccag

SEQ ID NO: 3171095 - DNA, 25 bp, Homo sapien
tatgcaagacattttgctaataggt

SEQ ID NO: 3171096 - DNA, 25 bp, Homo sapien
gatagctccatgttgcagcagtgat

SEQ ID NO: 3171097 - DNA, 25 bp, Homo sapien
tgtgcttggatgataataactgtca

SEQ ID NO: 3171098 - DNA, 25 bp, Homo sapien
tggcaggatgacactctatgcaaga

SEQ ID NO: 3171099 - DNA, 25 bp, Homo sapien
ggtttaatagttcatcccacctgag

SEQ ID NO: 3171100 - DNA, 25 bp, Homo sapien
gagcacaaggactggccatgtgact

SEQ ID NO: 3171101 - DNA, 25 bp, Homo sapien
tgttctcctaacaattgagcttgct

SEQ ID NO: 3171102 - DNA, 25 bp, Homo sapien
caaagctgctgatcttcaatccata

SEQ ID NO: 3171103 - DNA, 25 bp, Homo sapien
ccgcatgttgccaatgccaattaaa

SEQ ID NO: 3171104 - DNA, 25 bp, Homo sapien
tgtaatctcgaaagaaaatatgctt

SEQ ID NO: 3171105 - DNA, 25 bp, Homo sapien
aagttcagctcgatggaggggccaa

SEQ ID NO: 3171106 - DNA, 25 bp, Homo sapien
caactgatgattgtaatctcgaaag

SEQ ID NO: 3171107 - DNA, 25 bp, Homo sapien
tttcctgtgaccaggtatacctgta

SEQ ID NO: 3171108 - DNA, 25 bp, Homo sapien
tattggctggattataaatcctttc

SEQ ID NO: 3171109 - DNA, 25 bp, Homo sapien
tgatggcattgatgttcagagaacc

SEQ ID NO: 3171110 - DNA, 25 bp, Homo sapien
aaatcctttcaggaaatgtgtgcac

SEQ ID NO: 3171111 - DNA, 25 bp, Homo sapien
taatcttggcgaattgttacactgt

SEQ ID NO: 3171112 - DNA, 25 bp, Homo sapien
taggcccctgacagaaagccattct

SEQ ID NO: 3171113 - DNA, 25 bp, Homo sapien
catgatcaaggtttcacggtgagaa

SEQ ID NO: 3171114 - DNA, 25 bp, Homo sapien
tctcgtcagtactctagaaaatgtg

SEQ ID NO: 3171115 - DNA, 25 bp, Homo sapien
gaaagcatatgactgaatttcagta

SEQ ID NO: 3171116 - DNA, 25 bp, Homo sapien
agaaagacacttctcgactccctgg

SEQ ID NO: 3171117 - DNA, 25 bp, Homo sapien
ttctcgactccctgggaagaaagca

SEQ ID NO: 3171118 - DNA, 25 bp, Homo sapien
gaatttcagtagttcaatttttaca

SEQ ID NO: 3171119 - DNA, 25 bp, Homo sapien
ctattgctccattggaatgacttga

SEQ ID NO: 3171120 - DNA, 25 bp, Homo sapien
tccattggaatgacttgattgatca

SEQ ID NO: 3171121 - DNA, 25 bp, Homo sapien
actggctattgctccattggaatga

SEQ ID NO: 3171122 - DNA, 25 bp, Homo sapien
tggctattgctccattggaatgact

SEQ ID NO: 3171123 - DNA, 25 bp, Homo sapien
agggttatgtctgtcactgaagcga

SEQ ID NO: 3171124 - DNA, 25 bp, Homo sapien
ggtaacgttctgtgcaataataatg

SEQ ID NO: 3171125 - DNA, 25 bp, Homo sapien
tgctgccgacccaccagggttatgt

SEQ ID NO: 3171126 - DNA, 25 bp, Homo sapien
taatgctcccaaaaccatttgcaaa

SEQ ID NO: 3171127 - DNA, 25 bp, Homo sapien
ctgcagcatatgtttggagtgactt

SEQ ID NO: 3171128 - DNA, 25 bp, Homo sapien
gtgactttgggctgtagacattttc

SEQ ID NO: 3171129 - DNA, 25 bp, Homo sapien
aagcctcccattgtcttgcccgtgt

SEQ ID NO: 3171130 - DNA, 25 bp, Homo sapien
tgcccgtgtcatttactaagatctc

SEQ ID NO: 3171131 - DNA, 25 bp, Homo sapien
tcctcagcctctatttctatgtcac

SEQ ID NO: 3171132 - DNA, 25 bp, Homo sapien
ttctatgtcactaaatgaggtctga

SEQ ID NO: 3171133 - DNA, 25 bp, Homo sapien
acatcctcagcctctatttctatgt

SEQ ID NO: 3171134 - DNA, 25 bp, Homo sapien
ctaaatgaggtctgaagttctttct

SEQ ID NO: 3171135 - DNA, 25 bp, Homo sapien
ggaaagactgatctgcctctctgag

SEQ ID NO: 3171136 - DNA, 25 bp, Homo sapien
gaaagactgatctgcctctctgagc

SEQ ID NO: 3171137 - DNA, 25 bp, Homo sapien
cagggtgctagaaataaatgcagtt

SEQ ID NO: 3171138 - DNA, 25 bp, Homo sapien
gaataaactgttatctgacattgct

SEQ ID NO: 3171139 - DNA, 25 bp, Homo sapien
tctccttgagattcactgacttggg

SEQ ID NO: 3171140 - DNA, 25 bp, Homo sapien
tatctgacattgctggacagggtgc

SEQ ID NO: 3171141 - DNA, 25 bp, Homo sapien
ttcaccatcacgaacgtcagtctac

SEQ ID NO: 3171142 - DNA, 25 bp, Homo sapien
gtagactgacgttcgtgatggtgaa

SEQ ID NO: 3171143 - DNA, 25 bp, Homo sapien
gaaccttaattgcccatgtcccagt

SEQ ID NO: 3171144 - DNA, 25 bp, Homo sapien
accttaattgcccatgtcccagtgc

SEQ ID NO: 3171145 - DNA, 25 bp, Homo sapien
aaccttaattgcccatgtcccagtg

SEQ ID NO: 3171146 - DNA, 25 bp, Homo sapien
tggacctatacatgcagagaggtgg

SEQ ID NO: 3171147 - DNA, 25 bp, Homo sapien
tccaattagggaagtggtcaacttc

SEQ ID NO: 3171148 - DNA, 25 bp, Homo sapien
tcttggaactgactgagtaggcttt

SEQ ID NO: 3171149 - DNA, 25 bp, Homo sapien
tttcagtttgttgtcctccatggac

SEQ ID NO: 3171150 - DNA, 25 bp, Homo sapien
tctgaaatctctaggtaaaagatct

SEQ ID NO: 3171151 - DNA, 25 bp, Homo sapien
ctgaaatctctaggtaaaagatctc

SEQ ID NO: 3171152 - DNA, 25 bp, Homo sapien
aatctctaggtaaaagatctcattg

SEQ ID NO: 3171153 - DNA, 25 bp, Homo sapien
gaaatctctaggtaaaagatctcat

SEQ ID NO: 3171154 - DNA, 25 bp, Homo sapien
acccatccacaagcaagggatgtgt

SEQ ID NO: 3171155 - DNA, 25 bp, Homo sapien
cccatccacaagcaagggatgtgtt

SEQ ID NO: 3171156 - DNA, 25 bp, Homo sapien
tacccatccacaagcaagggatgtg

SEQ ID NO: 3171157 - DNA, 25 bp, Homo sapien
caaatatctattaacgtggagaaaa

SEQ ID NO: 3171158 - DNA, 25 bp, Homo sapien
ggattatctggtactgaatgtgcaa

SEQ ID NO: 3171159 - DNA, 25 bp, Homo sapien
taatatagccaatacagactgatgc

SEQ ID NO: 3171160 - DNA, 25 bp, Homo sapien
catgctcaaatatctattaacgtgg

SEQ ID NO: 3171161 - DNA, 25 bp, Homo sapien
gagaactgccctttcaaaattgaca

SEQ ID NO: 3171162 - DNA, 25 bp, Homo sapien
tcatggaagtttatgccagctggtg

SEQ ID NO: 3171163 - DNA, 25 bp, Homo sapien
gctggatctgagcatacatctgtcc

SEQ ID NO: 3171164 - DNA, 25 bp, Homo sapien
aaaatcttctaaccaagccggcaca

SEQ ID NO: 3171165 - DNA, 25 bp, Homo sapien
gccaatctccttatcttcaatcagc

SEQ ID NO: 3171166 - DNA, 25 bp, Homo sapien
tgtaaccctaatgctcctttgccag

SEQ ID NO: 3171167 - DNA, 25 bp, Homo sapien
cctttgccaggatacttaacactgt

SEQ ID NO: 3171168 - DNA, 25 bp, Homo sapien
cagctgacgagcaacttcaattcta

SEQ ID NO: 3171169 - DNA, 25 bp, Homo sapien
ttcaaaaccagcaaacggtagtaga

SEQ ID NO: 3171170 - DNA, 25 bp, Homo sapien
caaaaccagcaaacggtagtagatt

SEQ ID NO: 3171171 - DNA, 25 bp, Homo sapien
aaccagcaaacggtagtagatttca

SEQ ID NO: 3171172 - DNA, 25 bp, Homo sapien
cattttcaaaaccagcaaacggtag

SEQ ID NO: 3171173 - DNA, 25 bp, Homo sapien
cctgtaaagacaaaagtaatgctag

SEQ ID NO: 3171174 - DNA, 25 bp, Homo sapien
gtgattctctctgctcatatgaatc

SEQ ID NO: 3171175 - DNA, 25 bp, Homo sapien
tccataagctgccagcaacagacag

SEQ ID NO: 3171176 - DNA, 25 bp, Homo sapien
aagacaaaagtaatgctagttctgt

SEQ ID NO: 3171177 - DNA, 25 bp, Homo sapien
cttatcatagtttataggtctaatt

SEQ ID NO: 3171178 - DNA, 25 bp, Homo sapien
aatgtgccattacctatttaaccta

SEQ ID NO: 3171179 - DNA, 25 bp, Homo sapien
ccaattctagttctttaatgtgcca

SEQ ID NO: 3171180 - DNA, 25 bp, Homo sapien
gctttgtaggtctattgtcaaaaca

SEQ ID NO: 3171181 - DNA, 25 bp, Homo sapien
cccttttgtcctcttctgcccccat

SEQ ID NO: 3171182 - DNA, 25 bp, Homo sapien
atgcccaggttgtacccaggtccca

SEQ ID NO: 3171183 - DNA, 25 bp, Homo sapien
gaatcacatgcccaggttgtaccca

SEQ ID NO: 3171184 - DNA, 25 bp, Homo sapien
catgattgatgaagtcagaatcaca

SEQ ID NO: 3171185 - DNA, 25 bp, Homo sapien
cataggatgtgataccatgattgat

SEQ ID NO: 3171186 - DNA, 25 bp, Homo sapien
tgcataaaaaattacatatatacat

SEQ ID NO: 3171187 - DNA, 25 bp, Homo sapien
gcataaaaaattacatatatacata

SEQ ID NO: 3171188 - DNA, 25 bp, Homo sapien
cataaaaaattacatatatacatac

SEQ ID NO: 3171189 - DNA, 25 bp, Homo sapien
cttgcataaaaaattacatatatac

SEQ ID NO: 3171190 - DNA, 25 bp, Homo sapien
gtcataaatagcctccttgagttca

SEQ ID NO: 3171191 - DNA, 25 bp, Homo sapien
ctccttgagttcatgtcgtcccatt

SEQ ID NO: 3171192 - DNA, 25 bp, Homo sapien
tcataaatagcctccttgagttcat

SEQ ID NO: 3171193 - DNA, 25 bp, Homo sapien
ggtcataaatagcctccttgagttc

SEQ ID NO: 3171194 - DNA, 25 bp, Homo sapien
tcgcatcgtgaaaagggactcatat

SEQ ID NO: 3171195 - DNA, 25 bp, Homo sapien
caggattcaagcagtgtaaccagga

SEQ ID NO: 3171196 - DNA, 25 bp, Homo sapien
ttaaaagacatgacatcgcatcgtg

SEQ ID NO: 3171197 - DNA, 25 bp, Homo sapien
caggactccagtataggactgacag

SEQ ID NO: 3171198 - DNA, 25 bp, Homo sapien
cccagttttggcttcaggatggtcc

SEQ ID NO: 3171199 - DNA, 25 bp, Homo sapien
gaacaatgttgtcacttagaggccc

SEQ ID NO: 3171200 - DNA, 25 bp, Homo sapien
tgtgaacagagcaacggcatagggc

SEQ ID NO: 3171201 - DNA, 25 bp, Homo sapien
tgcaatttgctgatgggcccaagct

SEQ ID NO: 3171202 - DNA, 25 bp, Homo sapien
tatgctgaatttcgctttggagcaa

SEQ ID NO: 3171203 - DNA, 25 bp, Homo sapien
caagatggacctgccttatgctgaa

SEQ ID NO: 3171204 - DNA, 25 bp, Homo sapien
aacccctttggatagagttcaagat

SEQ ID NO: 3171205 - DNA, 25 bp, Homo sapien
gcaaattgttagtcacaggtgccag

SEQ ID NO: 3171206 - DNA, 25 bp, Homo sapien
gaacccttatctactgccacggctg

SEQ ID NO: 3171207 - DNA, 25 bp, Homo sapien
ggtgaagacccctcaagtgacacta

SEQ ID NO: 3171208 - DNA, 25 bp, Homo sapien
gaaataaaatttccggcatctgagg

SEQ ID NO: 3171209 - DNA, 25 bp, Homo sapien
ggttaacttgccctagattgtgcag

SEQ ID NO: 3171210 - DNA, 25 bp, Homo sapien
gttgtagacttccagcttctcactg

SEQ ID NO: 3171211 - DNA, 25 bp, Homo sapien
ttctgggttgtagacttccagcttc

SEQ ID NO: 3171212 - DNA, 25 bp, Homo sapien
ctctcttctgggttgtagacttcca

SEQ ID NO: 3171213 - DNA, 25 bp, Homo sapien
gggttgtagacttccagcttctcac

SEQ ID NO: 3171214 - DNA, 25 bp, Homo sapien
gaacaaaagggaggctcatgtggct

SEQ ID NO: 3171215 - DNA, 25 bp, Homo sapien
tctggttagagggaatagcaagttc

SEQ ID NO: 3171216 - DNA, 25 bp, Homo sapien
taatgaaataccatagaccaggttg

SEQ ID NO: 3171217 - DNA, 25 bp, Homo sapien
cagcatggtgaataggatagggatc

SEQ ID NO: 3171218 - DNA, 25 bp, Homo sapien
ctgtcagattctgattcttctccca

SEQ ID NO: 3171219 - DNA, 25 bp, Homo sapien
tgtcagattctgattcttctcccat

SEQ ID NO: 3171220 - DNA, 25 bp, Homo sapien
gagagtatctcattttgctgccaca

SEQ ID NO: 3171221 - DNA, 25 bp, Homo sapien
gacatatacagtgctaatttggcca

SEQ ID NO: 3171222 - DNA, 25 bp, Homo sapien
tagcatgaatcctgagtggcccatt

SEQ ID NO: 3171223 - DNA, 25 bp, Homo sapien
ccctagataaactgtgcggctgaga

SEQ ID NO: 3171224 - DNA, 25 bp, Homo sapien
cactggctggctggatccaaagtca

SEQ ID NO: 3171225 - DNA, 25 bp, Homo sapien
gtatagacaatgaccagtggctggg

SEQ ID NO: 3171226 - DNA, 25 bp, Homo sapien
ggagggtcgctatcacaaaacattg

SEQ ID NO: 3171227 - DNA, 25 bp, Homo sapien
cattggaagggagaaggcgaacatt

SEQ ID NO: 3171228 - DNA, 25 bp, Homo sapien
tgcctcaaggtattggtagcaagca

SEQ ID NO: 3171229 - DNA, 25 bp, Homo sapien
aaatgtagacaagatgcctcaaggt

SEQ ID NO: 3171230 - DNA, 25 bp, Homo sapien
tgtagacaagatgcctcaaggtatt

SEQ ID NO: 3171231 - DNA, 25 bp, Homo sapien
ctcaaggtattggtagcaagcaaga

SEQ ID NO: 3171232 - DNA, 25 bp, Homo sapien
tggtatatagaacggaagtggtcac

SEQ ID NO: 3171233 - DNA, 25 bp, Homo sapien
gatacttaataccaagctttggaag

SEQ ID NO: 3171234 - DNA, 25 bp, Homo sapien
actatccagttgcttaaagttaaca

SEQ ID NO: 3171235 - DNA, 25 bp, Homo sapien
gaatctcacttgttaaactatccag

SEQ ID NO: 3171236 - DNA, 25 bp, Homo sapien
cttgggagacccactttcaaactga

SEQ ID NO: 3171237 - DNA, 25 bp, Homo sapien
ggccaatgacttgcaatctgagagg

SEQ ID NO: 3171238 - DNA, 25 bp, Homo sapien
gcctgcagacttggactggccaatg

SEQ ID NO: 3171239 - DNA, 25 bp, Homo sapien
tgggagacccactttcaaactgatt

SEQ ID NO: 3171240 - DNA, 25 bp, Homo sapien
gctaccaggctttgtatagtaagat

SEQ ID NO: 3171241 - DNA, 25 bp, Homo sapien
gatttataggtgactgctaccaggc

SEQ ID NO: 3171242 - DNA, 25 bp, Homo sapien
gccttctgtttgaccacatcttcta

SEQ ID NO: 3171243 - DNA, 25 bp, Homo sapien
tttccacagatatgacaaagatgtt

SEQ ID NO: 3171244 - DNA, 25 bp, Homo sapien
gctttctccttggaactgacaccaa

SEQ ID NO: 3171245 - DNA, 25 bp, Homo sapien
tgtagttcagccacttccctattaa

SEQ ID NO: 3171246 - DNA, 25 bp, Homo sapien
ccctattaattgatgggccacacat

SEQ ID NO: 3171247 - DNA, 25 bp, Homo sapien
gctcctctccgatgcctacttgttt

SEQ ID NO: 3171248 - DNA, 25 bp, Homo sapien
aacttaacttgttcatagacaccac

SEQ ID NO: 3171249 - DNA, 25 bp, Homo sapien
tgcttaaaacttaacttgttcatag

SEQ ID NO: 3171250 - DNA, 25 bp, Homo sapien
ggtatagttcgtctttttctcataa

SEQ ID NO: 3171251 - DNA, 25 bp, Homo sapien
agaacagctgaatgacattaatatt

SEQ ID NO: 3171252 - DNA, 25 bp, Homo sapien
caccttctgtgagttagccctggcc

SEQ ID NO: 3171253 - DNA, 25 bp, Homo sapien
ggttggcgctggcattcttttacta

SEQ ID NO: 3171254 - DNA, 25 bp, Homo sapien
gccctggccaaatgactggcattta

SEQ ID NO: 3171255 - DNA, 25 bp, Homo sapien
catttatgcattagtgccatctgtg

SEQ ID NO: 3171256 - DNA, 25 bp, Homo sapien
aacttttgcaaagtgttgaaatatc

SEQ ID NO: 3171257 - DNA, 25 bp, Homo sapien
tgccttcagacttagcaagagaact

SEQ ID NO: 3171258 - DNA, 25 bp, Homo sapien
taatcaaactcatgataacttttgc

SEQ ID NO: 3171259 - DNA, 25 bp, Homo sapien
aatggtcaataattatgtttataat

SEQ ID NO: 3171260 - DNA, 25 bp, Homo sapien
aatccagtccttgtcatcattaatg

SEQ ID NO: 3171261 - DNA, 25 bp, Homo sapien
gctgcagctgaatccagtccttgtc

SEQ ID NO: 3171262 - DNA, 25 bp, Homo sapien
gcatttgacactttatcctagccat

SEQ ID NO: 3171263 - DNA, 25 bp, Homo sapien
tcattaatgacctgcatttgacact

SEQ ID NO: 3171264 - DNA, 25 bp, Homo sapien
ttttccaggaagaccatagcgataa

SEQ ID NO: 3171265 - DNA, 25 bp, Homo sapien
cgataaggattatgacagtatggtc

SEQ ID NO: 3171266 - DNA, 25 bp, Homo sapien
ggattatgacagtatggtcacccac

SEQ ID NO: 3171267 - DNA, 25 bp, Homo sapien
gaccatagcgataaggattatgaca

SEQ ID NO: 3171268 - DNA, 25 bp, Homo sapien
taatgtagtttgactccgttgcggt

SEQ ID NO: 3171269 - DNA, 25 bp, Homo sapien
cagcaggtacagatcgaagtctcca

SEQ ID NO: 3171270 - DNA, 25 bp, Homo sapien
taagccgtggactcttttgaaaggc

SEQ ID NO: 3171271 - DNA, 25 bp, Homo sapien
gctgcgctcccaaacttgccttagg

SEQ ID NO: 3171272 - DNA, 25 bp, Homo sapien
tcaaagcgggcgagcagtctcccgc

SEQ ID NO: 3171273 - DNA, 25 bp, Homo sapien
ccgcgcgtccaggtgtaagctagca

SEQ ID NO: 3171274 - DNA, 25 bp, Homo sapien
acatgaatgtttcagcgcggcgcgc

SEQ ID NO: 3171275 - DNA, 25 bp, Homo sapien
attgcggcgggaagtcctccgagac

SEQ ID NO: 3171276 - DNA, 25 bp, Homo sapien
cagcctcctcagacaaaatggtaca

SEQ ID NO: 3171277 - DNA, 25 bp, Homo sapien
tacagtcaggagtggtgagaaacct

SEQ ID NO: 3171278 - DNA, 25 bp, Homo sapien
ctctgagatgtgaactaaaggacca

SEQ ID NO: 3171279 - DNA, 25 bp, Homo sapien
aataagagcctgttcctctaggaca

SEQ ID NO: 3171280 - DNA, 25 bp, Homo sapien
gttttagagaccctgtgattcacaa

SEQ ID NO: 3171281 - DNA, 25 bp, Homo sapien
tttttagcagactatcagcacaagt

SEQ ID NO: 3171282 - DNA, 25 bp, Homo sapien
ccaatagctattttgcctagacgga

SEQ ID NO: 3171283 - DNA, 25 bp, Homo sapien
tgccctctgagaacaaccatcggtt

SEQ ID NO: 3171284 - DNA, 25 bp, Homo sapien
gctattcataagatattgcgctata

SEQ ID NO: 3171285 - DNA, 25 bp, Homo sapien
tctggtccaatatgccttataggta

SEQ ID NO: 3171286 - DNA, 25 bp, Homo sapien
tcaaataacttctcagtaagctctg

SEQ ID NO: 3171287 - DNA, 25 bp, Homo sapien
tatgttatagtcataatggccatgc

SEQ ID NO: 3171288 - DNA, 25 bp, Homo sapien
ggcatccggtactatgtaaatgcat

SEQ ID NO: 3171289 - DNA, 25 bp, Homo sapien
gcatggcatccggtactatgtaaat

SEQ ID NO: 3171290 - DNA, 25 bp, Homo sapien
tttcagcatggcatccggtactatg

SEQ ID NO: 3171291 - DNA, 25 bp, Homo sapien
atgctttcagcatggcatccggtac

SEQ ID NO: 3171292 - DNA, 25 bp, Homo sapien
tcttgtgtggatgagaatgaatctc

SEQ ID NO: 3171293 - DNA, 25 bp, Homo sapien
tgagaatgaatctcatcaggagcca

SEQ ID NO: 3171294 - DNA, 25 bp, Homo sapien
atgaatctcatcaggagccagagcc

SEQ ID NO: 3171295 - DNA, 25 bp, Homo sapien
tttcttgtgtggatgagaatgaatc

SEQ ID NO: 3171296 - DNA, 25 bp, Homo sapien
ctggacaagtgagtgtgcgagggag

SEQ ID NO: 3171297 - DNA, 25 bp, Homo sapien
gaggaactcctttcgcgagctgtcg

SEQ ID NO: 3171298 - DNA, 25 bp, Homo sapien
gactggatcgcgcttccactgggat

SEQ ID NO: 3171299 - DNA, 25 bp, Homo sapien
ggattcgtcaagagttccggcggca

SEQ ID NO: 3171300 - DNA, 25 bp, Homo sapien
tctgcaggaactctccggaatcggg

SEQ ID NO: 3171301 - DNA, 25 bp, Homo sapien
ttttgcggtttttctccagcggaga

SEQ ID NO: 3171302 - DNA, 25 bp, Homo sapien
tttgcggtttttctccagcggagaa

SEQ ID NO: 3171303 - DNA, 25 bp, Homo sapien
tgcggtttttctccagcggagaagc

SEQ ID NO: 3171304 - DNA, 25 bp, Homo sapien
tttctctagaaagtagtttcatggc

SEQ ID NO: 3171305 - DNA, 25 bp, Homo sapien
aaactgaatgggactacaatcagtt

SEQ ID NO: 3171306 - DNA, 25 bp, Homo sapien
aactgaatgggactacaatcagttc

SEQ ID NO: 3171307 - DNA, 25 bp, Homo sapien
actgaatgggactacaatcagttct

SEQ ID NO: 3171308 - DNA, 25 bp, Homo sapien
ggtttattctgatgtcccagaagca

SEQ ID NO: 3171309 - DNA, 25 bp, Homo sapien
gggatggcacctccatctaccacag

SEQ ID NO: 3171310 - DNA, 25 bp, Homo sapien
tctaccacagccttggtttattctg

SEQ ID NO: 3171311 - DNA, 25 bp, Homo sapien
tcccagaagcaatgttagcgagtgc

SEQ ID NO: 3171312 - DNA, 25 bp, Homo sapien
gcaagagctcctgcatcgatcacaa

SEQ ID NO: 3171313 - DNA, 25 bp, Homo sapien
caaactaaggtagaaagaatttgct

SEQ ID NO: 3171314 - DNA, 25 bp, Homo sapien
cggaaaactaaaccatcacctgcaa

SEQ ID NO: 3171315 - DNA, 25 bp, Homo sapien
tgtcagttcgtttatttggaccatc

SEQ ID NO: 3171316 - DNA, 25 bp, Homo sapien
tgctgtatctcatcctgagggtcag

SEQ ID NO: 3171317 - DNA, 25 bp, Homo sapien
atggttttattaggccacaatgaat

SEQ ID NO: 3171318 - DNA, 25 bp, Homo sapien
ggccacaatgaatgaggtatacagc

SEQ ID NO: 3171319 - DNA, 25 bp, Homo sapien
caatgaatgaggtatacagcctgtt

SEQ ID NO: 3171320 - DNA, 25 bp, Homo sapien
tgaatgaggtatacagcctgttcaa

SEQ ID NO: 3171321 - DNA, 25 bp, Homo sapien
gcagcctgaaagatgttcgaaatgg

SEQ ID NO: 3171322 - DNA, 25 bp, Homo sapien
agcagcctgaaagatgttcgaaatg

SEQ ID NO: 3171323 - DNA, 25 bp, Homo sapien
acaacaaatacatacctcagctaca

SEQ ID NO: 3171324 - DNA, 25 bp, Homo sapien
acacaacaaatacatacctcagcta

SEQ ID NO: 3171325 - DNA, 25 bp, Homo sapien
acagaaataagaaacccattcagag

SEQ ID NO: 3171326 - DNA, 25 bp, Homo sapien
ataagaaacccattcagaggacaag

SEQ ID NO: 3171327 - DNA, 25 bp, Homo sapien
tgtgctctgctgcaacagccctact

SEQ ID NO: 3171328 - DNA, 25 bp, Homo sapien
tgacaccctgcgtggggatgacccc

SEQ ID NO: 3171329 - DNA, 25 bp, Homo sapien
cctggttgggtttatatacctcagc

SEQ ID NO: 3171330 - DNA, 25 bp, Homo sapien
tgggttcttgtaccctgtgctctgc

SEQ ID NO: 3171331 - DNA, 25 bp, Homo sapien
ggaaattggcacatctgcttttcag

SEQ ID NO: 3171332 - DNA, 25 bp, Homo sapien
tgttgatccaactgtgaggctgcct

SEQ ID NO: 3171333 - DNA, 25 bp, Homo sapien
taacgtgacaatgaattacacatcc

SEQ ID NO: 3171334 - DNA, 25 bp, Homo sapien
gcagttctaatgcagctcgatgtgt

SEQ ID NO: 3171335 - DNA, 25 bp, Homo sapien
aatctggattaagcttataaatagg

SEQ ID NO: 3171336 - DNA, 25 bp, Homo sapien
gaggaaatctggattaagcttataa

SEQ ID NO: 3171337 - DNA, 25 bp, Homo sapien
tccagttctctaagtttctccataa

SEQ ID NO: 3171338 - DNA, 25 bp, Homo sapien
ggaaatctggattaagcttataaat

SEQ ID NO: 3171339 - DNA, 25 bp, Homo sapien
ctgtactatcaccatccccattcat

SEQ ID NO: 3171340 - DNA, 25 bp, Homo sapien
tgaactgctaaaaccctttaggagc

SEQ ID NO: 3171341 - DNA, 25 bp, Homo sapien
ctttaggagcctgattgaagaagcc

SEQ ID NO: 3171342 - DNA, 25 bp, Homo sapien
taaaaccctttaggagcctgattga

SEQ ID NO: 3171343 - DNA, 25 bp, Homo sapien
ctgcttgaactgctaaaacccttta

SEQ ID NO: 3171344 - DNA, 25 bp, Homo sapien
tttcgttgcctgagcttcacacttc

SEQ ID NO: 3171345 - DNA, 25 bp, Homo sapien
ttcgttgcctgagcttcacacttct

SEQ ID NO: 3171346 - DNA, 25 bp, Homo sapien
tcgttgcctgagcttcacacttctt

SEQ ID NO: 3171347 - DNA, 25 bp, Homo sapien
atgcttacggtagccagtttttctg

SEQ ID NO: 3171348 - DNA, 25 bp, Homo sapien
cacttcgggatgcttacggtagcca

SEQ ID NO: 3171349 - DNA, 25 bp, Homo sapien
tccacttcgggatgcttacggtagc

SEQ ID NO: 3171350 - DNA, 25 bp, Homo sapien
tcgggatgcttacggtagccagttt

SEQ ID NO: 3171351 - DNA, 25 bp, Homo sapien
cagttgtgctaattaaggtctctcc

SEQ ID NO: 3171352 - DNA, 25 bp, Homo sapien
tcctagaccaggagaagcttcatca

SEQ ID NO: 3171353 - DNA, 25 bp, Homo sapien
cacagggtaagtagagttgcccaag

SEQ ID NO: 3171354 - DNA, 25 bp, Homo sapien
aaggccactagcaatagtttcccag

SEQ ID NO: 3171355 - DNA, 25 bp, Homo sapien
caagattggcgccacgtaagtgggt

SEQ ID NO: 3171356 - DNA, 25 bp, Homo sapien
gtcaagattggcgccacgtaagtgg

SEQ ID NO: 3171357 - DNA, 25 bp, Homo sapien
gaagtcaagattggcgccacgtaag

SEQ ID NO: 3171358 - DNA, 25 bp, Homo sapien
gattggcgccacgtaagtgggttcc

SEQ ID NO: 3171359 - DNA, 25 bp, Homo sapien
gatttatgatgtagatcacatcact

SEQ ID NO: 3171360 - DNA, 25 bp, Homo sapien
cagatttatgatgtagatcacatca

SEQ ID NO: 3171361 - DNA, 25 bp, Homo sapien
ttatgatgtagatcacatcactttt

SEQ ID NO: 3171362 - DNA, 25 bp, Homo sapien
tcagatttatgatgtagatcacatc

SEQ ID NO: 3171363 - DNA, 25 bp, Homo sapien
agccagtattcctggaggatataac

SEQ ID NO: 3171364 - DNA, 25 bp, Homo sapien
ctagccagtattcctggaggatata

SEQ ID NO: 3171365 - DNA, 25 bp, Homo sapien
tattcctggaggatataacactgac

SEQ ID NO: 3171366 - DNA, 25 bp, Homo sapien
agtattcctggaggatataacactg

SEQ ID NO: 3171367 - DNA, 25 bp, Homo sapien
taagataagatgtctccgtgagagg

SEQ ID NO: 3171368 - DNA, 25 bp, Homo sapien
ggttaagataagatgtctccgtgag

SEQ ID NO: 3171369 - DNA, 25 bp, Homo sapien
taggttaagataagatgtctccgtg

SEQ ID NO: 3171370 - DNA, 25 bp, Homo sapien
ggtaggttaagataagatgtctccg

SEQ ID NO: 3171371 - DNA, 25 bp, Homo sapien
gaaaatcctccttagtcacagcgtt

SEQ ID NO: 3171372 - DNA, 25 bp, Homo sapien
gtgcacctgcacatctttagaccag

SEQ ID NO: 3171373 - DNA, 25 bp, Homo sapien
gtcttttgtggcaggccaagcgctc

SEQ ID NO: 3171374 - DNA, 25 bp, Homo sapien
tttgtggcaggccaagcgctccagt

SEQ ID NO: 3171375 - DNA, 25 bp, Homo sapien
gcagcatgccaaagctctgacagag

SEQ ID NO: 3171376 - DNA, 25 bp, Homo sapien
ggcttctactctgcagcatgccaaa

SEQ ID NO: 3171377 - DNA, 25 bp, Homo sapien
ggcattcattagcacggggcttcta

SEQ ID NO: 3171378 - DNA, 25 bp, Homo sapien
tctgacagagatgcccgctgccaat

SEQ ID NO: 3171379 - DNA, 25 bp, Homo sapien
tccccacccctcagctgtcttgtgt

SEQ ID NO: 3171380 - DNA, 25 bp, Homo sapien
cagctgtcttgtgtccggcagaatg

SEQ ID NO: 3171381 - DNA, 25 bp, Homo sapien
tgtgtccggcagaatggcattatgt

SEQ ID NO: 3171382 - DNA, 25 bp, Homo sapien
cagaatggcattatgtaaaagatct

SEQ ID NO: 3171383 - DNA, 25 bp, Homo sapien
ccttggggataaacacgctccagtt

SEQ ID NO: 3171384 - DNA, 25 bp, Homo sapien
ggaagctcatccttgcacgtttaga

SEQ ID NO: 3171385 - DNA, 25 bp, Homo sapien
gatggggtgtaggaagctcatcctt

SEQ ID NO: 3171386 - DNA, 25 bp, Homo sapien
tggggataaacacgctccagtttcc

SEQ ID NO: 3171387 - DNA, 25 bp, Homo sapien
cgctgtccgtcagaagtggtttgct

SEQ ID NO: 3171388 - DNA, 25 bp, Homo sapien
ccaaacggcacggatttctggacgc

SEQ ID NO: 3171389 - DNA, 25 bp, Homo sapien
actccaggaaacattgctccccaaa

SEQ ID NO: 3171390 - DNA, 25 bp, Homo sapien
ggacgcctccaccttaagacagcta

SEQ ID NO: 3171391 - DNA, 25 bp, Homo sapien
cgcgagccgagcgcaaggagaagcc

SEQ ID NO: 3171392 - DNA, 25 bp, Homo sapien
gcgagccgagcgcaaggagaagcca

SEQ ID NO: 3171393 - DNA, 25 bp, Homo sapien
ctgggagggagggagcgaccgccgg

SEQ ID NO: 3171394 - DNA, 25 bp, Homo sapien
gggagggagcgaccgccggctgctg

SEQ ID NO: 3171395 - DNA, 25 bp, Homo sapien
ggagggagggagcgaccgccggctg

SEQ ID NO: 3171396 - DNA, 25 bp, Homo sapien
agggagggagcgaccgccggctgct

SEQ ID NO: 3171397 - DNA, 25 bp, Homo sapien
gcctcgcgaaatggccccggtctct

SEQ ID NO: 3171398 - DNA, 25 bp, Homo sapien
gcccgtccgcctcgcgaaatggccc

SEQ ID NO: 3171399 - DNA, 25 bp, Homo sapien
accccaatcggagcctgccgaggag

SEQ ID NO: 3171400 - DNA, 25 bp, Homo sapien
tccccgggagcgcagctactgcggg

SEQ ID NO: 3171401 - DNA, 25 bp, Homo sapien
cgctttccagcggaagggggcatct

SEQ ID NO: 3171402 - DNA, 25 bp, Homo sapien
ctttccagcggaagggggcatcttt

SEQ ID NO: 3171403 - DNA, 25 bp, Homo sapien
gggggcatctttgcggcagaggcag

SEQ ID NO: 3171404 - DNA, 25 bp, Homo sapien
aagggggcatctttgcggcagaggc

SEQ ID NO: 3171405 - DNA, 25 bp, Homo sapien
tgctttcgcgagcacccagggaggc

SEQ ID NO: 3171406 - DNA, 25 bp, Homo sapien
aaagaatgacttcaacctctgagag

SEQ ID NO: 3171407 - DNA, 25 bp, Homo sapien
caatcaaacagtcgccgtgccccgt

SEQ ID NO: 3171408 - DNA, 25 bp, Homo sapien
tcagggctgctttcgcgagcaccca

SEQ ID NO: 3171409 - DNA, 25 bp, Homo sapien
acccaacgacctcggcgcacgggcg

SEQ ID NO: 3171410 - DNA, 25 bp, Homo sapien
gctctctgggtctaaaacccaacga

SEQ ID NO: 3171411 - DNA, 25 bp, Homo sapien
tctgggggcactgtgggtacgcgcc

SEQ ID NO: 3171412 - DNA, 25 bp, Homo sapien
ggcactgtgggtacgcgccagaaca

SEQ ID NO: 3171413 - DNA, 25 bp, Homo sapien
tgcatccgctggtggttgtgattaa

SEQ ID NO: 3171414 - DNA, 25 bp, Homo sapien
ttttgcatccgctggtggttgtgat

SEQ ID NO: 3171415 - DNA, 25 bp, Homo sapien
catccgctggtggttgtgattaatt

SEQ ID NO: 3171416 - DNA, 25 bp, Homo sapien
attttgcatccgctggtggttgtga

SEQ ID NO: 3171417 - DNA, 25 bp, Homo sapien
gaagtgcaccctattatttcgctaa

SEQ ID NO: 3171418 - DNA, 25 bp, Homo sapien
gagatcgcatttgctcgtgtaaggg

SEQ ID NO: 3171419 - DNA, 25 bp, Homo sapien
cgctaatgagttgcgggtctcctca

SEQ ID NO: 3171420 - DNA, 25 bp, Homo sapien
caagtctagtaggtcagagatcgca

SEQ ID NO: 3171421 - DNA, 25 bp, Homo sapien
tttgccgccgcccctgacgattttc

SEQ ID NO: 3171422 - DNA, 25 bp, Homo sapien
ggctccttgccggtgagtctgctcc

SEQ ID NO: 3171423 - DNA, 25 bp, Homo sapien
tgccgccgcccctgacgattttccg

SEQ ID NO: 3171424 - DNA, 25 bp, Homo sapien
gctccttgccggtgagtctgctcca

SEQ ID NO: 3171425 - DNA, 25 bp, Homo sapien
cccttcctccaatccccatcactca

SEQ ID NO: 3171426 - DNA, 25 bp, Homo sapien
ccttcctccaatccccatcactcac

SEQ ID NO: 3171427 - DNA, 25 bp, Homo sapien
tctcaagtgcgagaaaaaggcccca

SEQ ID NO: 3171428 - DNA, 25 bp, Homo sapien
aaaagctaagcgtcacaggagtctc

SEQ ID NO: 3171429 - DNA, 25 bp, Homo sapien
tagggaggcctctgaaagtaacagg

SEQ ID NO: 3171430 - DNA, 25 bp, Homo sapien
caggagtctctccacctagtgcagt

SEQ ID NO: 3171431 - DNA, 25 bp, Homo sapien
agcttggcaggacgaggtaactgat

SEQ ID NO: 3171432 - DNA, 25 bp, Homo sapien
aactgatgcccggaggcagcagcta

SEQ ID NO: 3171433 - DNA, 25 bp, Homo sapien
ttgtgcagggcgagttccccccgtg

SEQ ID NO: 3171434 - DNA, 25 bp, Homo sapien
ccgcacgctggcttcgagcggagcc

SEQ ID NO: 3171435 - DNA, 25 bp, Homo sapien
ccagcgagggctgaggatttcccga

SEQ ID NO: 3171436 - DNA, 25 bp, Homo sapien
acccagcgagggctgaggatttccc

SEQ ID NO: 3171437 - DNA, 25 bp, Homo sapien
tgacccagcgagggctgaggatttc

SEQ ID NO: 3171438 - DNA, 25 bp, Homo sapien
tccaagtgacccagcgagggctgag

SEQ ID NO: 3171439 - DNA, 25 bp, Homo sapien
aacaaaacaagccatcgtctgcccg

SEQ ID NO: 3171440 - DNA, 25 bp, Homo sapien
gtctgcccggcgtcgcccttgtaga

SEQ ID NO: 3171441 - DNA, 25 bp, Homo sapien
cgcacagtgcgcaaaccgtgaatgt

SEQ ID NO: 3171442 - DNA, 25 bp, Homo sapien
caagcggtgcgcttggtacgctcca

SEQ ID NO: 3171443 - DNA, 25 bp, Homo sapien
tgcagagaaggccaaatcacggact

SEQ ID NO: 3171444 - DNA, 25 bp, Homo sapien
tagtgaaaggtacagcgacagaact

SEQ ID NO: 3171445 - DNA, 25 bp, Homo sapien
gacacagatcacatcgtttgagctg

SEQ ID NO: 3171446 - DNA, 25 bp, Homo sapien
gattcaccaaagagtgcagagccct

SEQ ID NO: 3171447 - DNA, 25 bp, Homo sapien
ggcaagaataggcaaggattgtaac

SEQ ID NO: 3171448 - DNA, 25 bp, Homo sapien
cttgaacttgctgagcgaaaagatg

SEQ ID NO: 3171449 - DNA, 25 bp, Homo sapien
caaggattgtaacatatttgttctc

SEQ ID NO: 3171450 - DNA, 25 bp, Homo sapien
gagcgaaaagatgcttcccaggctg

SEQ ID NO: 3171451 - DNA, 25 bp, Homo sapien
acttgtgttggagttcagctgagaa

SEQ ID NO: 3171452 - DNA, 25 bp, Homo sapien
cctggatctgggttgtagtgaactg

SEQ ID NO: 3171453 - DNA, 25 bp, Homo sapien
tagtgaactggcttaatggcctctg

SEQ ID NO: 3171454 - DNA, 25 bp, Homo sapien
gaagggctagcaaaccgaagtgaca

SEQ ID NO: 3171455 - DNA, 25 bp, Homo sapien
tggagagaggttgataaatgacacc

SEQ ID NO: 3171456 - DNA, 25 bp, Homo sapien
gctggagagaggttgataaatgaca

SEQ ID NO: 3171457 - DNA, 25 bp, Homo sapien
ggttgataaatgacaccccaggtgg

SEQ ID NO: 3171458 - DNA, 25 bp, Homo sapien
agaggttgataaatgacaccccagg

SEQ ID NO: 3171459 - DNA, 25 bp, Homo sapien
tgttccactttagcaaggctctttg

SEQ ID NO: 3171460 - DNA, 25 bp, Homo sapien
cttgttccactttagcaaggctctt

SEQ ID NO: 3171461 - DNA, 25 bp, Homo sapien
gggtattgaggctttgacagcctgg

SEQ ID NO: 3171462 - DNA, 25 bp, Homo sapien
catgttagtttgatcctctcccagc

SEQ ID NO: 3171463 - DNA, 25 bp, Homo sapien
tctggaactcagtggggtattgagg

SEQ ID NO: 3171464 - DNA, 25 bp, Homo sapien
tcagtggggtattgaggctttgaca

SEQ ID NO: 3171465 - DNA, 25 bp, Homo sapien
tgagtggtatagacagtttctcaac

SEQ ID NO: 3171466 - DNA, 25 bp, Homo sapien
aagaaaggcctttgagtggtataga

SEQ ID NO: 3171467 - DNA, 25 bp, Homo sapien
aggataaatcggattgtgtagctag

SEQ ID NO: 3171468 - DNA, 25 bp, Homo sapien
tgtcagcattaggataaatcggatt

SEQ ID NO: 3171469 - DNA, 25 bp, Homo sapien
ttaacagcctgcaagttgactcctt

SEQ ID NO: 3171470 - DNA, 25 bp, Homo sapien
aacaccacgtcgctggggaatctcg

SEQ ID NO: 3171471 - DNA, 25 bp, Homo sapien
gaatctcgggcttctttttcacagt

SEQ ID NO: 3171472 - DNA, 25 bp, Homo sapien
cagctgatgctaatgacttgaggtc

SEQ ID NO: 3171473 - DNA, 25 bp, Homo sapien
gagcctcgtttgtgcgctaagccac

SEQ ID NO: 3171474 - DNA, 25 bp, Homo sapien
cgctaagccacttagaggcgctgac

SEQ ID NO: 3171475 - DNA, 25 bp, Homo sapien
ttgccgaggccgtctcgggagcctc

SEQ ID NO: 3171476 - DNA, 25 bp, Homo sapien
gccgtctcgggagcctcgtttgtgc

SEQ ID NO: 3171477 - DNA, 25 bp, Homo sapien
tctctcttcaggagcgccaacacta

SEQ ID NO: 3171478 - DNA, 25 bp, Homo sapien
tgcggttagctccagggattctcta

SEQ ID NO: 3171479 - DNA, 25 bp, Homo sapien
tgatttgcgcagctagttgcctggg

SEQ ID NO: 3171480 - DNA, 25 bp, Homo sapien
gataaacgggcgtcgtctctcttca

SEQ ID NO: 3171481 - DNA, 25 bp, Homo sapien
gcagacacacactttttgtttgctg

SEQ ID NO: 3171482 - DNA, 25 bp, Homo sapien
cacacactttttgtttgctgcacat

SEQ ID NO: 3171483 - DNA, 25 bp, Homo sapien
cacgcagacacacactttttgtttg

SEQ ID NO: 3171484 - DNA, 25 bp, Homo sapien
tggcacgcagacacacactttttgt

SEQ ID NO: 3171485 - DNA, 25 bp, Homo sapien
acggagaaacggagagagttgtaca

SEQ ID NO: 3171486 - DNA, 25 bp, Homo sapien
gagagagttgtacagatggacccga

SEQ ID NO: 3171487 - DNA, 25 bp, Homo sapien
agagacggagaaacggagagagttg

SEQ ID NO: 3171488 - DNA, 25 bp, Homo sapien
aacggagagagttgtacagatggac

SEQ ID NO: 3171489 - DNA, 25 bp, Homo sapien
ccttttgcctattgtatcagtgtat

SEQ ID NO: 3171490 - DNA, 25 bp, Homo sapien
gatgcaatcgagtgtttccttttgc

SEQ ID NO: 3171491 - DNA, 25 bp, Homo sapien
ccatgtcaagaggtgttggtgttgc

SEQ ID NO: 3171492 - DNA, 25 bp, Homo sapien
aaggccacctggaaccgggaagatg

SEQ ID NO: 3171493 - DNA, 25 bp, Homo sapien
ggctttctgaaagccggtcgctgct

SEQ ID NO: 3171494 - DNA, 25 bp, Homo sapien
taggcccaggttcttatccgcctgc

SEQ ID NO: 3171495 - DNA, 25 bp, Homo sapien
tattactggcagtagacagcccctc

SEQ ID NO: 3171496 - DNA, 25 bp, Homo sapien
tctggataataaggagacggaagac

SEQ ID NO: 3171497 - DNA, 25 bp, Homo sapien
taacaatacggcaaaaaggtcctca

SEQ ID NO: 3171498 - DNA, 25 bp, Homo sapien
caagcatttcattgtgccgggaggt

SEQ ID NO: 3171499 - DNA, 25 bp, Homo sapien
tcacaataaccgctgggcaagagcc

SEQ ID NO: 3171500 - DNA, 25 bp, Homo sapien
gtcacttcgggcaacagcagggaca

SEQ ID NO: 3171501 - DNA, 25 bp, Homo sapien
tgcttagtatttcagactaatcaaa

SEQ ID NO: 3171502 - DNA, 25 bp, Homo sapien
taaccagttaaccttacacgtgtga

SEQ ID NO: 3171503 - DNA, 25 bp, Homo sapien
tgttgttccctaataatgtcactgt

SEQ ID NO: 3171504 - DNA, 25 bp, Homo sapien
tgaactagctgcattgcttagtatt

SEQ ID NO: 3171505 - DNA, 25 bp, Homo sapien
aatgtcagggccactaattctgtgt

SEQ ID NO: 3171506 - DNA, 25 bp, Homo sapien
tttagaaagtaatgccccaatgccc

SEQ ID NO: 3171507 - DNA, 25 bp, Homo sapien
cctacaagaagggacgtatgtctgc

SEQ ID NO: 3171508 - DNA, 25 bp, Homo sapien
gatgagagtgaatcccggttacctt

SEQ ID NO: 3171509 - DNA, 25 bp, Homo sapien
cgcaggtggtgtaaacgctggtaaa

SEQ ID NO: 3171510 - DNA, 25 bp, Homo sapien
gaaagctatgctgtcatatagggaa

SEQ ID NO: 3171511 - DNA, 25 bp, Homo sapien
ggacacagggaccaaatatagcatt

SEQ ID NO: 3171512 - DNA, 25 bp, Homo sapien
tatagggaagtatggctcaggacac

SEQ ID NO: 3171513 - DNA, 25 bp, Homo sapien
actagtaactcctcgtctttggcaa

SEQ ID NO: 3171514 - DNA, 25 bp, Homo sapien
tatctctggccgattggaccaaccg

SEQ ID NO: 3171515 - DNA, 25 bp, Homo sapien
gagagcggtagaacagctgtccgtt

SEQ ID NO: 3171516 - DNA, 25 bp, Homo sapien
gaggaaccatttgctgctgaggtgt

SEQ ID NO: 3171517 - DNA, 25 bp, Homo sapien
taactcagtcagttctttcccgtac

SEQ ID NO: 3171518 - DNA, 25 bp, Homo sapien
agagtaactcagtcagttctttccc

SEQ ID NO: 3171519 - DNA, 25 bp, Homo sapien
ggggcagagcaagagtaactcagtc

SEQ ID NO: 3171520 - DNA, 25 bp, Homo sapien
gagcaagagtaactcagtcagttct

SEQ ID NO: 3171521 - DNA, 25 bp, Homo sapien
agaaaggcgcgccaacgcgccgggt

SEQ ID NO: 3171522 - DNA, 25 bp, Homo sapien
aatcttcctatgagacacccgaagg

SEQ ID NO: 3171523 - DNA, 25 bp, Homo sapien
tgcgtctctcccccgctagttaagg

SEQ ID NO: 3171524 - DNA, 25 bp, Homo sapien
tgagacacccgaagggaagaaaggc

SEQ ID NO: 3171525 - DNA, 25 bp, Homo sapien
atatcagcgctgtgaagtctcttgg

SEQ ID NO: 3171526 - DNA, 25 bp, Homo sapien
caaactggaaacgttggctgcattc

SEQ ID NO: 3171527 - DNA, 25 bp, Homo sapien
ggaaacgcagatgcgccacataggg

SEQ ID NO: 3171528 - DNA, 25 bp, Homo sapien
acgccgccgccttgttcgtcttggg

SEQ ID NO: 3171529 - DNA, 25 bp, Homo sapien
tctgtggatggcttcgcgctgctgc

SEQ ID NO: 3171530 - DNA, 25 bp, Homo sapien
cagcggatgggttgctgctttccgg

SEQ ID NO: 3171531 - DNA, 25 bp, Homo sapien
ctgccgctaccgctgctgaggctct

SEQ ID NO: 3171532 - DNA, 25 bp, Homo sapien
tgcctccccgggagttttccagctc

SEQ ID NO: 3171533 - DNA, 25 bp, Homo sapien
atgccgtcgggactcagctccgcct

SEQ ID NO: 3171534 - DNA, 25 bp, Homo sapien
cgtggcgatgccgtcgggactcagc

SEQ ID NO: 3171535 - DNA, 25 bp, Homo sapien
gatgccgtcgggactcagctccgcc

SEQ ID NO: 3171536 - DNA, 25 bp, Homo sapien
gccgcccgtggcgatgccgtcggga

SEQ ID NO: 3171537 - DNA, 25 bp, Homo sapien
aagaggcggccgttctcttccaggc

SEQ ID NO: 3171538 - DNA, 25 bp, Homo sapien
aagtagctgcccgaggctcggtact

SEQ ID NO: 3171539 - DNA, 25 bp, Homo sapien
gctcggtactgctgcggtgtgcaca

SEQ ID NO: 3171540 - DNA, 25 bp, Homo sapien
gtctcgggacttggcggcgcgaaga

SEQ ID NO: 3171541 - DNA, 25 bp, Homo sapien
aggactgccgccctcgagccggctg

SEQ ID NO: 3171542 - DNA, 25 bp, Homo sapien
ctgccgccctcgagccggctgggca

SEQ ID NO: 3171543 - DNA, 25 bp, Homo sapien
cccctcgcaggactgccgccctcga

SEQ ID NO: 3171544 - DNA, 25 bp, Homo sapien
cctcgcaggactgccgccctcgagc

SEQ ID NO: 3171545 - DNA, 25 bp, Homo sapien
gctgcccgcgctgcccagctgcggc

SEQ ID NO: 3171546 - DNA, 25 bp, Homo sapien
tggtgctgcccgcgctgcccagctg

SEQ ID NO: 3171547 - DNA, 25 bp, Homo sapien
ctggtgctgcccgcgctgcccagct

SEQ ID NO: 3171548 - DNA, 25 bp, Homo sapien
gtgctgcccgcgctgcccagctgcg

SEQ ID NO: 3171549 - DNA, 25 bp, Homo sapien
cccgcgccgcctgcggccccggcgc

SEQ ID NO: 3171550 - DNA, 25 bp, Homo sapien
cccgcccgcgccgcctgcggccccg

SEQ ID NO: 3171551 - DNA, 25 bp, Homo sapien
ctcgtccgacgcggcgccctggccc

SEQ ID NO: 3171552 - DNA, 25 bp, Homo sapien
cgcgccgcctgcggccccggcgccc

SEQ ID NO: 3171553 - DNA, 25 bp, Homo sapien
ctggctgcgagaaggcgcttttgcg

SEQ ID NO: 3171554 - DNA, 25 bp, Homo sapien
gtggcatggctcgagcgcgcccagc

SEQ ID NO: 3171555 - DNA, 25 bp, Homo sapien
ccgtcggcggggtggcatggctcga

SEQ ID NO: 3171556 - DNA, 25 bp, Homo sapien
ccgcggcggcgggatagagtctggt

SEQ ID NO: 3171557 - DNA, 25 bp, Homo sapien
gatagagtctggtggggcccacgcc

SEQ ID NO: 3171558 - DNA, 25 bp, Homo sapien
tctgcttaggcaggccgccgccgcc

SEQ ID NO: 3171559 - DNA, 25 bp, Homo sapien
gccgccgctcggcagggacccgcaa

SEQ ID NO: 3171560 - DNA, 25 bp, Homo sapien
aggaaggggctctgcttaggcaggc

SEQ ID NO: 3171561 - DNA, 25 bp, Homo sapien
ccgccgctcggcagggacccgcaac

SEQ ID NO: 3171562 - DNA, 25 bp, Homo sapien
ctgcagcggcagcggagctcttggg

SEQ ID NO: 3171563 - DNA, 25 bp, Homo sapien
gggccccgcggccgccgccgcagcc

SEQ ID NO: 3171564 - DNA, 25 bp, Homo sapien
cccgcggccgccgccgcagccgcgg

SEQ ID NO: 3171565 - DNA, 25 bp, Homo sapien
gccccgcggccgccgccgcagccgc

SEQ ID NO: 3171566 - DNA, 25 bp, Homo sapien
ctgcaagggccccgcggccgccgcc

SEQ ID NO: 3171567 - DNA, 25 bp, Homo sapien
agcgtgagcgccgagggcagctgca

SEQ ID NO: 3171568 - DNA, 25 bp, Homo sapien
agcgaggtgaaggagggcggcagca

SEQ ID NO: 3171569 - DNA, 25 bp, Homo sapien
agcagcgtgagcgccgagggcagct

SEQ ID NO: 3171570 - DNA, 25 bp, Homo sapien
ctgcgcgggcagacacagcgaggtg

SEQ ID NO: 3171571 - DNA, 25 bp, Homo sapien
ttcaccaagggctccatcgcatact

SEQ ID NO: 3171572 - DNA, 25 bp, Homo sapien
tactcctttttgtggtgcgacctca

SEQ ID NO: 3171573 - DNA, 25 bp, Homo sapien
tgcgacctcatatggtacaccaggt

SEQ ID NO: 3171574 - DNA, 25 bp, Homo sapien
tacaccaggtcggaggtcatgcgga

SEQ ID NO: 3171575 - DNA, 25 bp, Homo sapien
aattatgcgaggtcatgtgcctgga

SEQ ID NO: 3171576 - DNA, 25 bp, Homo sapien
ttatgcgaggtcatgtgcctggaga

SEQ ID NO: 3171577 - DNA, 25 bp, Homo sapien
tcaattatgcgaggtcatgtgcctg

SEQ ID NO: 3171578 - DNA, 25 bp, Homo sapien
tatgcgaggtcatgtgcctggagag

SEQ ID NO: 3171579 - DNA, 25 bp, Homo sapien
tgtgtgtcccgggtaaatatttgaa

SEQ ID NO: 3171580 - DNA, 25 bp, Homo sapien
tcgcgtgtttattcctgcaggtggc

SEQ ID NO: 3171581 - DNA, 25 bp, Homo sapien
tatgtgtctttgtgcagggtttcgg

SEQ ID NO: 3171582 - DNA, 25 bp, Homo sapien
tggcttaactgtgcttgcgcgcgcg

SEQ ID NO: 3171583 - DNA, 25 bp, Homo sapien
gtatagtccttaactacaacgataa

SEQ ID NO: 3171584 - DNA, 25 bp, Homo sapien
tatagtccttaactacaacgataaa

SEQ ID NO: 3171585 - DNA, 25 bp, Homo sapien
aagtatagtccttaactacaacgat

SEQ ID NO: 3171586 - DNA, 25 bp, Homo sapien
agtatagtccttaactacaacgata

SEQ ID NO: 3171587 - DNA, 25 bp, Homo sapien
tgatcaagatgcacaacactttcca

SEQ ID NO: 3171588 - DNA, 25 bp, Homo sapien
gctgctgaaaagaatgctggtgtcc

SEQ ID NO: 3171589 - DNA, 25 bp, Homo sapien
gatgctaattatcctgctgctgaaa

SEQ ID NO: 3171590 - DNA, 25 bp, Homo sapien
tcttttaggctcaaaattggcttag

SEQ ID NO: 3171591 - DNA, 25 bp, Homo sapien
acagttgtccatgcctttagaagga

SEQ ID NO: 3171592 - DNA, 25 bp, Homo sapien
caggacgcgttttttgcagaggcta

SEQ ID NO: 3171593 - DNA, 25 bp, Homo sapien
tgcattgtaatgtttcaggacgcgt

SEQ ID NO: 3171594 - DNA, 25 bp, Homo sapien
gggccttgcaatacatagaccatga

SEQ ID NO: 3171595 - DNA, 25 bp, Homo sapien
ttttatgtctaatggttactggtcg

SEQ ID NO: 3171596 - DNA, 25 bp, Homo sapien
catacacctagactttctacactca

SEQ ID NO: 3171597 - DNA, 25 bp, Homo sapien
aagagtacagaagtacttttcataa

SEQ ID NO: 3171598 - DNA, 25 bp, Homo sapien
tggttactggtcgtatcacatacac

SEQ ID NO: 3171599 - DNA, 25 bp, Homo sapien
tttgctccagagatctagtgtccca

SEQ ID NO: 3171600 - DNA, 25 bp, Homo sapien
tgcaaagcctgtaatgagaccttgt

SEQ ID NO: 3171601 - DNA, 25 bp, Homo sapien
ttagtcggcctatcagacattgtga

SEQ ID NO: 3171602 - DNA, 25 bp, Homo sapien
ggatctgtggatgcaatttgcctcc

SEQ ID NO: 3171603 - DNA, 25 bp, Homo sapien
tttttctagacctcatttcatccct

SEQ ID NO: 3171604 - DNA, 25 bp, Homo sapien
ccctgtctgaatcctcagtggaaag

SEQ ID NO: 3171605 - DNA, 25 bp, Homo sapien
tcctcagtggaaagtaaagctgctt

SEQ ID NO: 3171606 - DNA, 25 bp, Homo sapien
atttcatccctgtctgaatcctcag

SEQ ID NO: 3171607 - DNA, 25 bp, Homo sapien
ctgtagccccaagcgcagggtcagt

SEQ ID NO: 3171608 - DNA, 25 bp, Homo sapien
tgaggccagggagtcggaatcttct

SEQ ID NO: 3171609 - DNA, 25 bp, Homo sapien
tctgggcagacatgcctggagttct

SEQ ID NO: 3171610 - DNA, 25 bp, Homo sapien
tcttccactgattgggatgcaacaa

SEQ ID NO: 3171611 - DNA, 25 bp, Homo sapien
gccgcagagcttatgagtgggcctc

SEQ ID NO: 3171612 - DNA, 25 bp, Homo sapien
gcacgactgcggctgcaatacgcgg

SEQ ID NO: 3171613 - DNA, 25 bp, Homo sapien
aaagagacatgtgtgcgtcccttcc

SEQ ID NO: 3171614 - DNA, 25 bp, Homo sapien
tccacatgcctgtgggcgtaagctg

SEQ ID NO: 3171615 - DNA, 25 bp, Homo sapien
cggaggaggagaactgcgtttccca

SEQ ID NO: 3171616 - DNA, 25 bp, Homo sapien
ggagatcctgccctcgaaattggag

SEQ ID NO: 3171617 - DNA, 25 bp, Homo sapien
gagcaggctgcaccgccctagaagt

SEQ ID NO: 3171618 - DNA, 25 bp, Homo sapien
aaagtccaggccgactggcgacgga

SEQ ID NO: 3171619 - DNA, 25 bp, Homo sapien
cctccgtgcagtcatcagctggcag

SEQ ID NO: 3171620 - DNA, 25 bp, Homo sapien
gcctccgtgcagtcatcagctggca

SEQ ID NO: 3171621 - DNA, 25 bp, Homo sapien
gaagcagcagtagttgactagcagg

SEQ ID NO: 3171622 - DNA, 25 bp, Homo sapien
ctccgtgcagtcatcagctggcaga

SEQ ID NO: 3171623 - DNA, 25 bp, Homo sapien
cctggtgctcctttggccccacctc

SEQ ID NO: 3171624 - DNA, 25 bp, Homo sapien
ttatacctggtgctcctttggcccc

SEQ ID NO: 3171625 - DNA, 25 bp, Homo sapien
ggcctgagtcctaggtgaatggaca

SEQ ID NO: 3171626 - DNA, 25 bp, Homo sapien
tacctggtgctcctttggccccacc

SEQ ID NO: 3171627 - DNA, 25 bp, Homo sapien
tacaaccgctcagaatgcatcttgc

SEQ ID NO: 3171628 - DNA, 25 bp, Homo sapien
tgcatcttgcatcctttagtagcca

SEQ ID NO: 3171629 - DNA, 25 bp, Homo sapien
cttgtctcactagtggatacaaccg

SEQ ID NO: 3171630 - DNA, 25 bp, Homo sapien
tagtggatacaaccgctcagaatgc

SEQ ID NO: 3171631 - DNA, 25 bp, Homo sapien
gcaccatttctcagctgtaacccga

SEQ ID NO: 3171632 - DNA, 25 bp, Homo sapien
cagagcagtctgaggagtctgcacc

SEQ ID NO: 3171633 - DNA, 25 bp, Homo sapien
tgaaaattacgtagccagagcagtc

SEQ ID NO: 3171634 - DNA, 25 bp, Homo sapien
aattatctacctgtaagtcccctgc

SEQ ID NO: 3171635 - DNA, 25 bp, Homo sapien
agatgacaagggcacagagtgtgct

SEQ ID NO: 3171636 - DNA, 25 bp, Homo sapien
atgacaagggcacagagtgtgctgt

SEQ ID NO: 3171637 - DNA, 25 bp, Homo sapien
tgacaagggcacagagtgtgctgtt

SEQ ID NO: 3171638 - DNA, 25 bp, Homo sapien
gacaagggcacagagtgtgctgttg

SEQ ID NO: 3171639 - DNA, 25 bp, Homo sapien
gggagatgttggcaaggtaccggag

SEQ ID NO: 3171640 - DNA, 25 bp, Homo sapien
cgcatggccggcattgaaggcagta

SEQ ID NO: 3171641 - DNA, 25 bp, Homo sapien
ctcctgaaggcgcatggccggcatt

SEQ ID NO: 3171642 - DNA, 25 bp, Homo sapien
gagatgttggcaaggtaccggagca

SEQ ID NO: 3171643 - DNA, 25 bp, Homo sapien
catctcaaggacagatgacttgata

SEQ ID NO: 3171644 - DNA, 25 bp, Homo sapien
ggacagatgacttgatatttcccag

SEQ ID NO: 3171645 - DNA, 25 bp, Homo sapien
caaggacagatgacttgatatttcc

SEQ ID NO: 3171646 - DNA, 25 bp, Homo sapien
cagatgacttgatatttcccagatg

SEQ ID NO: 3171647 - DNA, 25 bp, Homo sapien
tagtcatcattttatcttccaaact

SEQ ID NO: 3171648 - DNA, 25 bp, Homo sapien
tcattttatcttccaaacttttcat

SEQ ID NO: 3171649 - DNA, 25 bp, Homo sapien
gagtggattagtcatcattttatct

SEQ ID NO: 3171650 - DNA, 25 bp, Homo sapien
aagagtggattagtcatcattttat

SEQ ID NO: 3171651 - DNA, 25 bp, Homo sapien
gatgaaacgctcttgaattctcttg

SEQ ID NO: 3171652 - DNA, 25 bp, Homo sapien
catcattgatatgtagcagcccagt

SEQ ID NO: 3171653 - DNA, 25 bp, Homo sapien
cattgatatgtagcagcccagtcat

SEQ ID NO: 3171654 - DNA, 25 bp, Homo sapien
tccacgatgaaacgctcttgaattc

SEQ ID NO: 3171655 - DNA, 25 bp, Homo sapien
tagttttaatgttgtgatcatttgc

SEQ ID NO: 3171656 - DNA, 25 bp, Homo sapien
gatcatttgctcgtattatgacaat

SEQ ID NO: 3171657 - DNA, 25 bp, Homo sapien
taatgttgtgatcatttgctcgtat

SEQ ID NO: 3171658 - DNA, 25 bp, Homo sapien
catttgctcgtattatgacaatcat

SEQ ID NO: 3171659 - DNA, 25 bp, Homo sapien
tctgagctttaagatgactgtacag

SEQ ID NO: 3171660 - DNA, 25 bp, Homo sapien
gagctttaagatgactgtacagttt

SEQ ID NO: 3171661 - DNA, 25 bp, Homo sapien
gttctgagctttaagatgactgtac

SEQ ID NO: 3171662 - DNA, 25 bp, Homo sapien
gcctgttctgagctttaagatgact

SEQ ID NO: 3171663 - DNA, 25 bp, Homo sapien
taacctctggttggaacccagaagc

SEQ ID NO: 3171664 - DNA, 25 bp, Homo sapien
tctccaggtcatgcgcggattcgag

SEQ ID NO: 3171665 - DNA, 25 bp, Homo sapien
tgaactccacccaaaagagcgcaag

SEQ ID NO: 3171666 - DNA, 25 bp, Homo sapien
taagcctcggagcttggtccagatc

SEQ ID NO: 3171667 - DNA, 25 bp, Homo sapien
ggacatctcagctttccccattaag

SEQ ID NO: 3171668 - DNA, 25 bp, Homo sapien
atgccacgcaaatacacagcccatt

SEQ ID NO: 3171669 - DNA, 25 bp, Homo sapien
taagccacattgatgctgctgaatg

SEQ ID NO: 3171670 - DNA, 25 bp, Homo sapien
gatgattgtaggatggttctgaacc

SEQ ID NO: 3171671 - DNA, 25 bp, Homo sapien
ctgtggcaaagctgtcagggtttaa

SEQ ID NO: 3171672 - DNA, 25 bp, Homo sapien
gaatggtctacttgactgaaatcac

SEQ ID NO: 3171673 - DNA, 25 bp, Homo sapien
cagtatctctcagaatggtctactt

SEQ ID NO: 3171674 - DNA, 25 bp, Homo sapien
agacattgagaacagtcacagtatc

SEQ ID NO: 3171675 - DNA, 25 bp, Homo sapien
cattgagaacagtcacagtatctct

SEQ ID NO: 3171676 - DNA, 25 bp, Homo sapien
tcttccaccgccagagtaacatcaa

SEQ ID NO: 3171677 - DNA, 25 bp, Homo sapien
gtaacatcaaagtacttgtaaaaca

SEQ ID NO: 3171678 - DNA, 25 bp, Homo sapien
taatgaaacgcatataaaacaatgc

SEQ ID NO: 3171679 - DNA, 25 bp, Homo sapien
catctcaataatgaaacgcatataa

SEQ ID NO: 3171680 - DNA, 25 bp, Homo sapien
tgaatgattaatgacgtgcgcgctg

SEQ ID NO: 3171681 - DNA, 25 bp, Homo sapien
gactgagggaccgacctcagtgaat

SEQ ID NO: 3171682 - DNA, 25 bp, Homo sapien
ccagacctgccattgactgagggac

SEQ ID NO: 3171683 - DNA, 25 bp, Homo sapien
gcgcgctggatttcaacctcaggaa

SEQ ID NO: 3171684 - DNA, 25 bp, Homo sapien
tggaaacgagctcggcgttagcagc

SEQ ID NO: 3171685 - DNA, 25 bp, Homo sapien
tctgggagcccttggagaaatgcgt

SEQ ID NO: 3171686 - DNA, 25 bp, Homo sapien
ttgtgactgggcaacgcactcttgc

SEQ ID NO: 3171687 - DNA, 25 bp, Homo sapien
cagggattcgcagcccaacttggga

SEQ ID NO: 3171688 - DNA, 25 bp, Homo sapien
tccgcgctggcaccgggatatttat

SEQ ID NO: 3171689 - DNA, 25 bp, Homo sapien
cagtgatctcactgctccgtgcacg

SEQ ID NO: 3171690 - DNA, 25 bp, Homo sapien
agtgatctcactgctccgtgcacgc

SEQ ID NO: 3171691 - DNA, 25 bp, Homo sapien
gctggcaccgggatatttataacgc

SEQ ID NO: 3171692 - DNA, 25 bp, Homo sapien
ggggagaggggaagagagaggccac

SEQ ID NO: 3171693 - DNA, 25 bp, Homo sapien
gagaaggggagaggggaagagagag

SEQ ID NO: 3171694 - DNA, 25 bp, Homo sapien
gaagagaaggggagaggggaagaga

SEQ ID NO: 3171695 - DNA, 25 bp, Homo sapien
gaaggggagaggggaagagagaggc

SEQ ID NO: 3171696 - DNA, 25 bp, Homo sapien
gggtcctaagtgcatcttgtagggc

SEQ ID NO: 3171697 - DNA, 25 bp, Homo sapien
ccgcctcgccgcaccgggtggacat

SEQ ID NO: 3171698 - DNA, 25 bp, Homo sapien
cctgtgcggctgcgtgcctctggct

SEQ ID NO: 3171699 - DNA, 25 bp, Homo sapien
ccagccgcgggggtcctaagtgcat

SEQ ID NO: 3171700 - DNA, 25 bp, Homo sapien
ggaggaggaggaaggacaagctcat

SEQ ID NO: 3171701 - DNA, 25 bp, Homo sapien
aggaggaggaggaaggacaagctca

SEQ ID NO: 3171702 - DNA, 25 bp, Homo sapien
ttaacatattggcttcgtgggatcc

SEQ ID NO: 3171703 - DNA, 25 bp, Homo sapien
tctgcagatggaaaccgatgcccac

SEQ ID NO: 3171704 - DNA, 25 bp, Homo sapien
gatccattgactttgccatccgggt

SEQ ID NO: 3171705 - DNA, 25 bp, Homo sapien
gctgctggagcctctagggttccta

SEQ ID NO: 3171706 - DNA, 25 bp, Homo sapien
aaaccagaggagtggctgcgatggt

SEQ ID NO: 3171707 - DNA, 25 bp, Homo sapien
agagaaaccagaggagtggctgcga

SEQ ID NO: 3171708 - DNA, 25 bp, Homo sapien
ctagaggcagtgaagagaaaccaga

SEQ ID NO: 3171709 - DNA, 25 bp, Homo sapien
agaaaccagaggagtggctgcgatg

SEQ ID NO: 3171710 - DNA, 25 bp, Homo sapien
cgatctggccctactgagcaaaagc

SEQ ID NO: 3171711 - DNA, 25 bp, Homo sapien
aacccgcgctggaagagcgatctgg

SEQ ID NO: 3171712 - DNA, 25 bp, Homo sapien
tactgagcaaaagccccacagagat

SEQ ID NO: 3171713 - DNA, 25 bp, Homo sapien
gggctctgcctggtggaccaacccg

SEQ ID NO: 3171714 - DNA, 25 bp, Homo sapien
gctacatttccggtctccctgggta

SEQ ID NO: 3171715 - DNA, 25 bp, Homo sapien
cctggctacatttccggtctccctg

SEQ ID NO: 3171716 - DNA, 25 bp, Homo sapien
ggctgacactgaaaccaggtgactg

SEQ ID NO: 3171717 - DNA, 25 bp, Homo sapien
aggctgacactgaaaccaggtgact

SEQ ID NO: 3171718 - DNA, 25 bp, Homo sapien
ctgagatggagcaagttaggaacat

SEQ ID NO: 3171719 - DNA, 25 bp, Homo sapien
ccaaatcttcagaccgccggtggtg

SEQ ID NO: 3171720 - DNA, 25 bp, Homo sapien
tctggagcctgtgtaagaaggagcc

SEQ ID NO: 3171721 - DNA, 25 bp, Homo sapien
cccaatggcccgtggagtctttggt

SEQ ID NO: 3171722 - DNA, 25 bp, Homo sapien
cggtggtgtccacgctcctctggag

SEQ ID NO: 3171723 - DNA, 25 bp, Homo sapien
ctcgtattcctacaatcccctgaga

SEQ ID NO: 3171724 - DNA, 25 bp, Homo sapien
tcctcgtattcctacaatcccctga

SEQ ID NO: 3171725 - DNA, 25 bp, Homo sapien
gtattcctacaatcccctgagacac

SEQ ID NO: 3171726 - DNA, 25 bp, Homo sapien
tgttgctgaaaactcctcgtattcc

SEQ ID NO: 3171727 - DNA, 25 bp, Homo sapien
taaccgtgaaagaaagttctggctg

SEQ ID NO: 3171728 - DNA, 25 bp, Homo sapien
gaatctttggcttgatagggctagg

SEQ ID NO: 3171729 - DNA, 25 bp, Homo sapien
tatccaaagcgaaacttgagtctgt

SEQ ID NO: 3171730 - DNA, 25 bp, Homo sapien
tcttgaaaacgctccctgaacttgc

SEQ ID NO: 3171731 - DNA, 25 bp, Homo sapien
gagtgtgctccctgtattagtacaa

SEQ ID NO: 3171732 - DNA, 25 bp, Homo sapien
tatacaacttatgcattgacgtggc

SEQ ID NO: 3171733 - DNA, 25 bp, Homo sapien
tatacagtgggatagcagagagtca

SEQ ID NO: 3171734 - DNA, 25 bp, Homo sapien
tccagctgttcaagaatgagggcaa

SEQ ID NO: 3171735 - DNA, 25 bp, Homo sapien
tgcaaggagggatctcagaaaacat

SEQ ID NO: 3171736 - DNA, 25 bp, Homo sapien
gacagaaaattgtgtcctgagctat

SEQ ID NO: 3171737 - DNA, 25 bp, Homo sapien
tatcttatttggaggcatgatgtca

SEQ ID NO: 3171738 - DNA, 25 bp, Homo sapien
tctagaagacttcatgtagaatggg

SEQ ID NO: 3171739 - DNA, 25 bp, Homo sapien
ttttgtccgataaatcttattcagc

SEQ ID NO: 3171740 - DNA, 25 bp, Homo sapien
tttgtccgataaatcttattcagca

SEQ ID NO: 3171741 - DNA, 25 bp, Homo sapien
ttgtccgataaatcttattcagcac

SEQ ID NO: 3171742 - DNA, 25 bp, Homo sapien
agcacatgtatacatcctaaaagca

SEQ ID NO: 3171743 - DNA, 25 bp, Homo sapien
tcagccataattgcactcaggaagg

SEQ ID NO: 3171744 - DNA, 25 bp, Homo sapien
gggaaagggacaagcacatctagaa

SEQ ID NO: 3171745 - DNA, 25 bp, Homo sapien
cccacagagggaacgacagagaatt

SEQ ID NO: 3171746 - DNA, 25 bp, Homo sapien
tgagaaacacattggagctggacct

SEQ ID NO: 3171747 - DNA, 25 bp, Homo sapien
ctttacgcccacggcatgaagctgt

SEQ ID NO: 3171748 - DNA, 25 bp, Homo sapien
cccacggcatgaagctgtgaccaca

SEQ ID NO: 3171749 - DNA, 25 bp, Homo sapien
cacagaggcagaaacttgcagggtg

SEQ ID NO: 3171750 - DNA, 25 bp, Homo sapien
gaaacttgcagggtggtcttctgag

SEQ ID NO: 3171751 - DNA, 25 bp, Homo sapien
caaaagttgatattgtagaagcagg

SEQ ID NO: 3171752 - DNA, 25 bp, Homo sapien
ggtagtggaacagtaattaccagag

SEQ ID NO: 3171753 - DNA, 25 bp, Homo sapien
gaatcaaattagtgtccaacaatgg

SEQ ID NO: 3171754 - DNA, 25 bp, Homo sapien
aagcaggtagtggaacagtaattac

SEQ ID NO: 3171755 - DNA, 25 bp, Homo sapien
tgtccaactgccgtgactgttgact

SEQ ID NO: 3171756 - DNA, 25 bp, Homo sapien
tccaactgccgtgactgttgacttc

SEQ ID NO: 3171757 - DNA, 25 bp, Homo sapien
tcatagaagaaagatatccagtgtg

SEQ ID NO: 3171758 - DNA, 25 bp, Homo sapien
tagaagaaagatatccagtgtgtcc

SEQ ID NO: 3171759 - DNA, 25 bp, Homo sapien
tcctttcttgtaaaatgcaaaagtg

SEQ ID NO: 3171760 - DNA, 25 bp, Homo sapien
attcctttcttgtaaaatgcaaaag

SEQ ID NO: 3171761 - DNA, 25 bp, Homo sapien
tattcctttcttgtaaaatgcaaaa

SEQ ID NO: 3171762 - DNA, 25 bp, Homo sapien
ttattcctttcttgtaaaatgcaaa

SEQ ID NO: 3171763 - DNA, 25 bp, Homo sapien
ttgaaagtaggagtttttcaatgga

SEQ ID NO: 3171764 - DNA, 25 bp, Homo sapien
ttttcattttcattatctgccttgt

SEQ ID NO: 3171765 - DNA, 25 bp, Homo sapien
taggagtttttcaatggatttttca

SEQ ID NO: 3171766 - DNA, 25 bp, Homo sapien
ggatttttcattttcattatctgcc

SEQ ID NO: 3171767 - DNA, 25 bp, Homo sapien
aggcagtactttccacggccaaagg

SEQ ID NO: 3171768 - DNA, 25 bp, Homo sapien
caggcagtactttccacggccaaag

SEQ ID NO: 3171769 - DNA, 25 bp, Homo sapien
ttccactttgcaggtacaatccttc

SEQ ID NO: 3171770 - DNA, 25 bp, Homo sapien
tgcaggtacaatccttcaggcagta

SEQ ID NO: 3171771 - DNA, 25 bp, Homo sapien
ttccccatctccttgggtatcaggc

SEQ ID NO: 3171772 - DNA, 25 bp, Homo sapien
tccccatctccttgggtatcaggcc

SEQ ID NO: 3171773 - DNA, 25 bp, Homo sapien
tctccttgggtatcaggcccaggca

SEQ ID NO: 3171774 - DNA, 25 bp, Homo sapien
ccatctccttgggtatcaggcccag

SEQ ID NO: 3171775 - DNA, 25 bp, Homo sapien
cttccaggatctaatatcgacagtt

SEQ ID NO: 3171776 - DNA, 25 bp, Homo sapien
taatatcgacagttgcagaaagaac

SEQ ID NO: 3171777 - DNA, 25 bp, Homo sapien
cagttgcagaaagaactgctttaca

SEQ ID NO: 3171778 - DNA, 25 bp, Homo sapien
caggatctaatatcgacagttgcag

SEQ ID NO: 3171779 - DNA, 25 bp, Homo sapien
aacctggaatttagcaccgatccca

SEQ ID NO: 3171780 - DNA, 25 bp, Homo sapien
taagtttcggcaagcttctcttttc

SEQ ID NO: 3171781 - DNA, 25 bp, Homo sapien
gacctgtgcctgagaaatgaaaggg

SEQ ID NO: 3171782 - DNA, 25 bp, Homo sapien
cattgcaaggcttttgttatgatca

SEQ ID NO: 3171783 - DNA, 25 bp, Homo sapien
gagaggtgcaaactgcaatccaaag

SEQ ID NO: 3171784 - DNA, 25 bp, Homo sapien
gacactgcctacatacttagacaaa

SEQ ID NO: 3171785 - DNA, 25 bp, Homo sapien
tatgcaagacaaaaataccgagaca

SEQ ID NO: 3171786 - DNA, 25 bp, Homo sapien
actgttgagcaaccagagaggtgca

SEQ ID NO: 3171787 - DNA, 25 bp, Homo sapien
tgagctttggacgttaatcccaccc

SEQ ID NO: 3171788 - DNA, 25 bp, Homo sapien
ctcactcctgtgaaaactttctgga

SEQ ID NO: 3171789 - DNA, 25 bp, Homo sapien
cacttcgttcctgccaatcagttga

SEQ ID NO: 3171790 - DNA, 25 bp, Homo sapien
caatcagttgaagccggtgtgagct

SEQ ID NO: 3171791 - DNA, 25 bp, Homo sapien
tgcggtatcctcggccgaagcgtcc

SEQ ID NO: 3171792 - DNA, 25 bp, Homo sapien
attgagtgacaatattgtccaaggc

SEQ ID NO: 3171793 - DNA, 25 bp, Homo sapien
caggtagtacaagtccacagtagtg

SEQ ID NO: 3171794 - DNA, 25 bp, Homo sapien
tgatctgcgagtccaggaaatcttc

SEQ ID NO: 3171795 - DNA, 25 bp, Homo sapien
ggaaatcttcataggcgttgaattg

SEQ ID NO: 3171796 - DNA, 25 bp, Homo sapien
tgtcgcggtcccgaaaccgcggcgc

SEQ ID NO: 3171797 - DNA, 25 bp, Homo sapien
cgtttctgcgctgggtgactctagg

SEQ ID NO: 3171798 - DNA, 25 bp, Homo sapien
tcgccagcggctttagtgtcgcggt

SEQ ID NO: 3171799 - DNA, 25 bp, Homo sapien
gtaaggacgcggcaattcacctcgc

SEQ ID NO: 3171800 - DNA, 25 bp, Homo sapien
caccaactggcgggccagggtttca

SEQ ID NO: 3171801 - DNA, 25 bp, Homo sapien
tctatagccgctttccttgcttcaa

SEQ ID NO: 3171802 - DNA, 25 bp, Homo sapien
tcggtagcctagctccaccaactgg

SEQ ID NO: 3171803 - DNA, 25 bp, Homo sapien
tctctccagtccctcggtagcctag

SEQ ID NO: 3171804 - DNA, 25 bp, Homo sapien
gagtcagctgacaccttctggttct

SEQ ID NO: 3171805 - DNA, 25 bp, Homo sapien
ctagctaggagtagtagagtcagct

SEQ ID NO: 3171806 - DNA, 25 bp, Homo sapien
tcagcctcagcaattgagctcatga

SEQ ID NO: 3171807 - DNA, 25 bp, Homo sapien
cagcaattgagctcatgacatattg

SEQ ID NO: 3171808 - DNA, 25 bp, Homo sapien
aatgcagaaactcaaagatataaaa

SEQ ID NO: 3171809 - DNA, 25 bp, Homo sapien
tttctcccatttacaccagagccct

SEQ ID NO: 3171810 - DNA, 25 bp, Homo sapien
ttttattccttaggaatgcagaaac

SEQ ID NO: 3171811 - DNA, 25 bp, Homo sapien
ctcggtgtccaccattcttatccat

SEQ ID NO: 3171812 - DNA, 25 bp, Homo sapien
gaggagatcagagatacccatggaa

SEQ ID NO: 3171813 - DNA, 25 bp, Homo sapien
catggaaataccctttgatctctgc

SEQ ID NO: 3171814 - DNA, 25 bp, Homo sapien
tgcttctgctgaattctagcttcta

SEQ ID NO: 3171815 - DNA, 25 bp, Homo sapien
gaattctagcttctatccttggata

SEQ ID NO: 3171816 - DNA, 25 bp, Homo sapien
accccgcaccgggaatctcagaaga

SEQ ID NO: 3171817 - DNA, 25 bp, Homo sapien
gatcaggtgattgttaacggtctct

SEQ ID NO: 3171818 - DNA, 25 bp, Homo sapien
ctaggaatgctaaactggtaaggaa

SEQ ID NO: 3171819 - DNA, 25 bp, Homo sapien
cccactactaggtatgttacagtag

SEQ ID NO: 3171820 - DNA, 25 bp, Homo sapien
aagttatttcatcttgttgtttttg

SEQ ID NO: 3171821 - DNA, 25 bp, Homo sapien
tttcatcttgttgtttttgctcctc

SEQ ID NO: 3171822 - DNA, 25 bp, Homo sapien
cctccttcttcttatgtaaacattt

SEQ ID NO: 3171823 - DNA, 25 bp, Homo sapien
ctcctccttcttcttatgtaaacat

SEQ ID NO: 3171824 - DNA, 25 bp, Homo sapien
cctcaatgtaaacacaggtgtgtgg

SEQ ID NO: 3171825 - DNA, 25 bp, Homo sapien
aaaccgaaagctgcgagtgaaggat

SEQ ID NO: 3171826 - DNA, 25 bp, Homo sapien
agtgtggcttgccatggctgaaagc

SEQ ID NO: 3171827 - DNA, 25 bp, Homo sapien
tcagtgctgccaaggcctcaatgta

SEQ ID NO: 3171828 - DNA, 25 bp, Homo sapien
tcttgttggaaaattaaggtccaca

SEQ ID NO: 3171829 - DNA, 25 bp, Homo sapien
aatagtaaaaataccttcagagaca

SEQ ID NO: 3171830 - DNA, 25 bp, Homo sapien
tcaaaaccacaagatgaaattgttt

SEQ ID NO: 3171831 - DNA, 25 bp, Homo sapien
ttcaatggcagctcccaattcaaaa

SEQ ID NO: 3171832 - DNA, 25 bp, Homo sapien
tcaggtaatgcgtgagaagctgcag

SEQ ID NO: 3171833 - DNA, 25 bp, Homo sapien
atcaggtaatgcgtgagaagctgca

SEQ ID NO: 3171834 - DNA, 25 bp, Homo sapien
agatcaggtaatgcgtgagaagctg

SEQ ID NO: 3171835 - DNA, 25 bp, Homo sapien
caagatcaggtaatgcgtgagaagc

SEQ ID NO: 3171836 - DNA, 25 bp, Homo sapien
agcacaaaggtgagtaaggtaacct

SEQ ID NO: 3171837 - DNA, 25 bp, Homo sapien
tctggagagctgtgttccacaatac

SEQ ID NO: 3171838 - DNA, 25 bp, Homo sapien
atttggcccgttctggtgtctggag

SEQ ID NO: 3171839 - DNA, 25 bp, Homo sapien
tcatttggcccgttctggtgtctgg

SEQ ID NO: 3171840 - DNA, 25 bp, Homo sapien
tggagagctgtgttccacaatacac

SEQ ID NO: 3171841 - DNA, 25 bp, Homo sapien
tgcccagaccaatgtaaagaagcct

SEQ ID NO: 3171842 - DNA, 25 bp, Homo sapien
tacatgatgtgagatgacagtccat

SEQ ID NO: 3171843 - DNA, 25 bp, Homo sapien
ggcactttatcccattactgagcag

SEQ ID NO: 3171844 - DNA, 25 bp, Homo sapien
taaatcagagcatataagggttcct

SEQ ID NO: 3171845 - DNA, 25 bp, Homo sapien
gaaaacatttaacaggtcgaggcca

SEQ ID NO: 3171846 - DNA, 25 bp, Homo sapien
caggtcgaggccacggaaaagacat

SEQ ID NO: 3171847 - DNA, 25 bp, Homo sapien
ctggcacagttacatctgttctatg

SEQ ID NO: 3171848 - DNA, 25 bp, Homo sapien
catttaacaggtcgaggccacggaa

SEQ ID NO: 3171849 - DNA, 25 bp, Homo sapien
ggctcttcaatgttcagagcagagg

SEQ ID NO: 3171850 - DNA, 25 bp, Homo sapien
aggctcttcaatgttcagagcagag

SEQ ID NO: 3171851 - DNA, 25 bp, Homo sapien
atgggggcaacgctttaccagagga

SEQ ID NO: 3171852 - DNA, 25 bp, Homo sapien
tgggggcaacgctttaccagaggaa

SEQ ID NO: 3171853 - DNA, 25 bp, Homo sapien
ctctcattgccagggccgtcagaaa

SEQ ID NO: 3171854 - DNA, 25 bp, Homo sapien
tcttgtaggtctttaccagcacttg

SEQ ID NO: 3171855 - DNA, 25 bp, Homo sapien
attgccagggccgtcagaaaattat

SEQ ID NO: 3171856 - DNA, 25 bp, Homo sapien
gttttccactgcgattgtcttcttc

SEQ ID NO: 3171857 - DNA, 25 bp, Homo sapien
aagctgttggatgaaatgtacttac

SEQ ID NO: 3171858 - DNA, 25 bp, Homo sapien
ttaagctgttggatgaaatgtactt

SEQ ID NO: 3171859 - DNA, 25 bp, Homo sapien
taagctgttggatgaaatgtactta

SEQ ID NO: 3171860 - DNA, 25 bp, Homo sapien
ttaatattaattgtgcatttagtgt

SEQ ID NO: 3171861 - DNA, 25 bp, Homo sapien
tattaattgtgcatttagtgtatac

SEQ ID NO: 3171862 - DNA, 25 bp, Homo sapien
taatattaattgtgcatttagtgta

SEQ ID NO: 3171863 - DNA, 25 bp, Homo sapien
taattgtgcatttagtgtatacatt

SEQ ID NO: 3171864 - DNA, 25 bp, Homo sapien
gtagctctgtccacactactgagca

SEQ ID NO: 3171865 - DNA, 25 bp, Homo sapien
cttagacctggctgttgcccatctc

SEQ ID NO: 3171866 - DNA, 25 bp, Homo sapien
gcaacatagcccttagacctggctg

SEQ ID NO: 3171867 - DNA, 25 bp, Homo sapien
cacactactgagcacagcaacatag

SEQ ID NO: 3171868 - DNA, 25 bp, Homo sapien
ctcacttttcccaccccgaacagca

SEQ ID NO: 3171869 - DNA, 25 bp, Homo sapien
tctcacttttcccaccccgaacagc

SEQ ID NO: 3171870 - DNA, 25 bp, Homo sapien
tttcccaccccgaacagcatgtgac

SEQ ID NO: 3171871 - DNA, 25 bp, Homo sapien
ccaccccgaacagcatgtgacctct

SEQ ID NO: 3171872 - DNA, 25 bp, Homo sapien
ttccagttgccagttctatccagtt

SEQ ID NO: 3171873 - DNA, 25 bp, Homo sapien
ccagttcattgtgtcctcgaagtaa

SEQ ID NO: 3171874 - DNA, 25 bp, Homo sapien
tgccagttctatccagttcattgtg

SEQ ID NO: 3171875 - DNA, 25 bp, Homo sapien
tgtgtcctcgaagtaataaactgta

SEQ ID NO: 3171876 - DNA, 25 bp, Homo sapien
tcgttttttgattgttgtccctgca

SEQ ID NO: 3171877 - DNA, 25 bp, Homo sapien
gacgtgcaattcatactcttgtaaa

SEQ ID NO: 3171878 - DNA, 25 bp, Homo sapien
ctgcgtttctgatgtgacgtgcaat

SEQ ID NO: 3171879 - DNA, 25 bp, Homo sapien
ttaatatctatccatcctgcgtttc

SEQ ID NO: 3171880 - DNA, 25 bp, Homo sapien
agttgcttcttcaagatatgagcag

SEQ ID NO: 3171881 - DNA, 25 bp, Homo sapien
gttgcttcttcaagatatgagcagc

SEQ ID NO: 3171882 - DNA, 25 bp, Homo sapien
ttgcttcttcaagatatgagcagca

SEQ ID NO: 3171883 - DNA, 25 bp, Homo sapien
tgcttcttcaagatatgagcagcat

SEQ ID NO: 3171884 - DNA, 25 bp, Homo sapien
aggaaacttttccataagcagtact

SEQ ID NO: 3171885 - DNA, 25 bp, Homo sapien
gaaacttttccataagcagtactta

SEQ ID NO: 3171886 - DNA, 25 bp, Homo sapien
agccgagatggtgccattgcactcc

SEQ ID NO: 3171887 - DNA, 25 bp, Homo sapien
ccaggaggcagaggttgcagtgagc

SEQ ID NO: 3171888 - DNA, 25 bp, Homo sapien
gaagcaggaaaattccttgaaccca

SEQ ID NO: 3171889 - DNA, 25 bp, Homo sapien
cgagatggtgccattgcactccagc

SEQ ID NO: 3171890 - DNA, 25 bp, Homo sapien
aaaaccagggatcacaataagcaca

SEQ ID NO: 3171891 - DNA, 25 bp, Homo sapien
gcctcatgttgtaaatgtctgtgaa

SEQ ID NO: 3171892 - DNA, 25 bp, Homo sapien
cattagaggtattgaaacttgcatc

SEQ ID NO: 3171893 - DNA, 25 bp, Homo sapien
cccagggtggaaacactatgatgca

SEQ ID NO: 3171894 - DNA, 25 bp, Homo sapien
ttggtgtcaatttgatgttgtccac

SEQ ID NO: 3171895 - DNA, 25 bp, Homo sapien
tggtgtcaatttgatgttgtccact

SEQ ID NO: 3171896 - DNA, 25 bp, Homo sapien
gaagtctcccttatcttcttagtga

SEQ ID NO: 3171897 - DNA, 25 bp, Homo sapien
tcttcttagtgagaagtaaactcac

SEQ ID NO: 3171898 - DNA, 25 bp, Homo sapien
cagtttaaaccgcactttctaggtg

SEQ ID NO: 3171899 - DNA, 25 bp, Homo sapien
ctttctaggtgaagtctcccttatc

SEQ ID NO: 3171900 - DNA, 25 bp, Homo sapien
ctaaccctagccctgtactgtacct

SEQ ID NO: 3171901 - DNA, 25 bp, Homo sapien
agccctgtactgtaccttttaagag

SEQ ID NO: 3171902 - DNA, 25 bp, Homo sapien
agatgggtagagacatttaggtctc

SEQ ID NO: 3171903 - DNA, 25 bp, Homo sapien
agacatttaggtctcaggtagttca

SEQ ID NO: 3171904 - DNA, 25 bp, Homo sapien
taagcaccagagaggaatgagggag

SEQ ID NO: 3171905 - DNA, 25 bp, Homo sapien
agcaccagagaggaatgagggagca

SEQ ID NO: 3171906 - DNA, 25 bp, Homo sapien
aagcaccagagaggaatgagggagc

SEQ ID NO: 3171907 - DNA, 25 bp, Homo sapien
ctaagcaccagagaggaatgaggga

SEQ ID NO: 3171908 - DNA, 25 bp, Homo sapien
gaggcgagtcggatttgagaactca

SEQ ID NO: 3171909 - DNA, 25 bp, Homo sapien
taaggcataggcacgtcaactttgc

SEQ ID NO: 3171910 - DNA, 25 bp, Homo sapien
catgagtatgcaattccagggcaat

SEQ ID NO: 3171911 - DNA, 25 bp, Homo sapien
tcaactttgcattggaggcgagtcg

SEQ ID NO: 3171912 - DNA, 25 bp, Homo sapien
ctaaacatgaaaagtaaacaccagt

SEQ ID NO: 3171913 - DNA, 25 bp, Homo sapien
catgaaaagtaaacaccagtaccag

SEQ ID NO: 3171914 - DNA, 25 bp, Homo sapien
gaaaagtaaacaccagtaccagcca

SEQ ID NO: 3171915 - DNA, 25 bp, Homo sapien
gaagcactaaacatgaaaagtaaac

SEQ ID NO: 3171916 - DNA, 25 bp, Homo sapien
tgcaattggcaaggtttcagttccc

SEQ ID NO: 3171917 - DNA, 25 bp, Homo sapien
tatgacataatgaatgtaacacttc

SEQ ID NO: 3171918 - DNA, 25 bp, Homo sapien
ccttatcagatgtgtgtggtatgac

SEQ ID NO: 3171919 - DNA, 25 bp, Homo sapien
gttcccaagcacagggtcacatttc

SEQ ID NO: 3171920 - DNA, 25 bp, Homo sapien
aggataggtgctgtgctttttagag

SEQ ID NO: 3171921 - DNA, 25 bp, Homo sapien
aggaggataggtgctgtgcttttta

SEQ ID NO: 3171922 - DNA, 25 bp, Homo sapien
tggaggaggataggtgctgtgcttt

SEQ ID NO: 3171923 - DNA, 25 bp, Homo sapien
gataggtgctgtgctttttagagtt

SEQ ID NO: 3171924 - DNA, 25 bp, Homo sapien
taaaatagattgttgaccatgacca

SEQ ID NO: 3171925 - DNA, 25 bp, Homo sapien
taagctactggtcaaatatgacagc

SEQ ID NO: 3171926 - DNA, 25 bp, Homo sapien
aagcaccaggtgcatgtagctgcca

SEQ ID NO: 3171927 - DNA, 25 bp, Homo sapien
ccaaatgtcctctacagaggtgaaa

SEQ ID NO: 3171928 - DNA, 25 bp, Homo sapien
tcagagtacacaggcagggaaaaaa

SEQ ID NO: 3171929 - DNA, 25 bp, Homo sapien
ctgcccggaggtcaggtcatacaca

SEQ ID NO: 3171930 - DNA, 25 bp, Homo sapien
agagctccagcaagggattcacctg

SEQ ID NO: 3171931 - DNA, 25 bp, Homo sapien
gggatacactgatacactgcctgcc

SEQ ID NO: 3171932 - DNA, 25 bp, Homo sapien
ccattaaagcttgaaatggccagtg

SEQ ID NO: 3171933 - DNA, 25 bp, Homo sapien
tattttacaagccattattgggcat

SEQ ID NO: 3171934 - DNA, 25 bp, Homo sapien
tggaaaccagaatgcttgactcctt

SEQ ID NO: 3171935 - DNA, 25 bp, Homo sapien
gggcatttccgcatgcatgcctcca

SEQ ID NO: 3171936 - DNA, 25 bp, Homo sapien
taagacatccaggaaatggaaaggc

SEQ ID NO: 3171937 - DNA, 25 bp, Homo sapien
aggaaatggaaaggcagtggcagca

SEQ ID NO: 3171938 - DNA, 25 bp, Homo sapien
aatggaaaggcagtggcagcacatc

SEQ ID NO: 3171939 - DNA, 25 bp, Homo sapien
gtggcagcacatctgttaagttcat

SEQ ID NO: 3171940 - DNA, 25 bp, Homo sapien
cagcaggtctcttgatcagaatttg

SEQ ID NO: 3171941 - DNA, 25 bp, Homo sapien
aatgaaggtataaagcacagcaggt

SEQ ID NO: 3171942 - DNA, 25 bp, Homo sapien
ctcttgatcagaatttgagatgaag

SEQ ID NO: 3171943 - DNA, 25 bp, Homo sapien
tgaaggcacgctgtccttggagtct

SEQ ID NO: 3171944 - DNA, 25 bp, Homo sapien
caacggtcacttttattatccactt

SEQ ID NO: 3171945 - DNA, 25 bp, Homo sapien
tactccccctcaagttcaacggtca

SEQ ID NO: 3171946 - DNA, 25 bp, Homo sapien
gttcaacggtcacttttattatcca

SEQ ID NO: 3171947 - DNA, 25 bp, Homo sapien
cctcaagttcaacggtcacttttat

SEQ ID NO: 3171948 - DNA, 25 bp, Homo sapien
tgtccaagaaggaagtactataagg

SEQ ID NO: 3171949 - DNA, 25 bp, Homo sapien
gtccaagaaggaagtactataagga

SEQ ID NO: 3171950 - DNA, 25 bp, Homo sapien
ctgtccaagaaggaagtactataag

SEQ ID NO: 3171951 - DNA, 25 bp, Homo sapien
ccagagaagctggccagtataaact

SEQ ID NO: 3171952 - DNA, 25 bp, Homo sapien
cagagaagctggccagtataaactg

SEQ ID NO: 3171953 - DNA, 25 bp, Homo sapien
ttcttgccctttatggataatggct

SEQ ID NO: 3171954 - DNA, 25 bp, Homo sapien
gcatgattcaagatgggttccagta

SEQ ID NO: 3171955 - DNA, 25 bp, Homo sapien
ctttcggtccatagcatgattcaag

SEQ ID NO: 3171956 - DNA, 25 bp, Homo sapien
tggggaggtcacagactttcggtcc

SEQ ID NO: 3171957 - DNA, 25 bp, Homo sapien
tcctaatactatcacttagggagtg

SEQ ID NO: 3171958 - DNA, 25 bp, Homo sapien
aaggagatcaaacccgtggccttgg

SEQ ID NO: 3171959 - DNA, 25 bp, Homo sapien
agatcaaacccgtggccttggccat

SEQ ID NO: 3171960 - DNA, 25 bp, Homo sapien
cataaaggagatcaaacccgtggcc

SEQ ID NO: 3171961 - DNA, 25 bp, Homo sapien
aggccataaaggagatcaaacccgt

SEQ ID NO: 3171962 - DNA, 25 bp, Homo sapien
cacaaagcagatacaactgaccagg

SEQ ID NO: 3171963 - DNA, 25 bp, Homo sapien
cagatacaactgaccaggtagtggt

SEQ ID NO: 3171964 - DNA, 25 bp, Homo sapien
ccaggtagtggtaggatacttccct

SEQ ID NO: 3171965 - DNA, 25 bp, Homo sapien
ggatacttccctgagtggccacaaa

SEQ ID NO: 3171966 - DNA, 25 bp, Homo sapien
agtcctttacaactgactctccagc

SEQ ID NO: 3171967 - DNA, 25 bp, Homo sapien
cctttacaactgactctccagcaat

SEQ ID NO: 3171968 - DNA, 25 bp, Homo sapien
tccagcaatgcagcttctcaactca

SEQ ID NO: 3171969 - DNA, 25 bp, Homo sapien
ccagcaatgcagcttctcaactcac

SEQ ID NO: 3171970 - DNA, 25 bp, Homo sapien
ttatgatcaatcaggtctgtgatca

SEQ ID NO: 3171971 - DNA, 25 bp, Homo sapien
tcaagtcacttagtgcaattgtttt

SEQ ID NO: 3171972 - DNA, 25 bp, Homo sapien
tgcaattgttttatgatcaatcagg

SEQ ID NO: 3171973 - DNA, 25 bp, Homo sapien
cacttagtgcaattgttttatgatc

SEQ ID NO: 3171974 - DNA, 25 bp, Homo sapien
ccagccggccatcagtaacaagtct

SEQ ID NO: 3171975 - DNA, 25 bp, Homo sapien
tttccccttggatgaacaatcctgc

SEQ ID NO: 3171976 - DNA, 25 bp, Homo sapien
tattattcgtgtgctgtgtacaggg

SEQ ID NO: 3171977 - DNA, 25 bp, Homo sapien
aatcctgcactgtgagtactctgca

SEQ ID NO: 3171978 - DNA, 25 bp, Homo sapien
gcagaggtagattccactgtttact

SEQ ID NO: 3171979 - DNA, 25 bp, Homo sapien
actttggtagacagctttctgtgca

SEQ ID NO: 3171980 - DNA, 25 bp, Homo sapien
cacatctacagaggaagctttttcc

SEQ ID NO: 3171981 - DNA, 25 bp, Homo sapien
taaaatacgtccaataatcaagcac

SEQ ID NO: 3171982 - DNA, 25 bp, Homo sapien
aatgtcagtgctaaagagatccacc

SEQ ID NO: 3171983 - DNA, 25 bp, Homo sapien
tttaactgagaaggttgagatgaag

SEQ ID NO: 3171984 - DNA, 25 bp, Homo sapien
aaattccctcctggatttaactgag

SEQ ID NO: 3171985 - DNA, 25 bp, Homo sapien
gttgtcttgtgtatcacagtaggag

SEQ ID NO: 3171986 - DNA, 25 bp, Homo sapien
cttttcactatcatcactaaagggc

SEQ ID NO: 3171987 - DNA, 25 bp, Homo sapien
ttttcactatcatcactaaagggca

SEQ ID NO: 3171988 - DNA, 25 bp, Homo sapien
tttcactatcatcactaaagggcat

SEQ ID NO: 3171989 - DNA, 25 bp, Homo sapien
agtattaccattttctcctccctca

SEQ ID NO: 3171990 - DNA, 25 bp, Homo sapien
gtattaccattttctcctccctcat

SEQ ID NO: 3171991 - DNA, 25 bp, Homo sapien
tgtgggcatagtcgatgtatcctga

SEQ ID NO: 3171992 - DNA, 25 bp, Homo sapien
cttatatctgtaggccttggaagaa

SEQ ID NO: 3171993 - DNA, 25 bp, Homo sapien
caaaatcttccgtctttagcctgtg

SEQ ID NO: 3171994 - DNA, 25 bp, Homo sapien
tgtatcctgatatctcttgcccatg

SEQ ID NO: 3171995 - DNA, 25 bp, Homo sapien
ggtgatgccatttgccaagacaggt

SEQ ID NO: 3171996 - DNA, 25 bp, Homo sapien
caggtgacacagaagcaatagcagg

SEQ ID NO: 3171997 - DNA, 25 bp, Homo sapien
taatagatgctaacaccattgggtg

SEQ ID NO: 3171998 - DNA, 25 bp, Homo sapien
gggcgatagtcagtacagagcatca

SEQ ID NO: 3171999 - DNA, 25 bp, Homo sapien
gactgacgcagttcaaccttgtaac

SEQ ID NO: 3172000 - DNA, 25 bp, Homo sapien
cataatcatctcagactgacgcagt

SEQ ID NO: 3172001 - DNA, 25 bp, Homo sapien
tcaaccttgtaaccacggtatggaa

SEQ ID NO: 3172002 - DNA, 25 bp, Homo sapien
tcatctcagactgacgcagttcaac

SEQ ID NO: 3172003 - DNA, 25 bp, Homo sapien
cctgtctaagtattatggctaggac

SEQ ID NO: 3172004 - DNA, 25 bp, Homo sapien
tgatattagctgtggatctgacata

SEQ ID NO: 3172005 - DNA, 25 bp, Homo sapien
ttgatatgaggtattacactgactg

SEQ ID NO: 3172006 - DNA, 25 bp, Homo sapien
tatcatgttcctgatataagaggga

SEQ ID NO: 3172007 - DNA, 25 bp, Homo sapien
atgttttggaccattgggatatcag

SEQ ID NO: 3172008 - DNA, 25 bp, Homo sapien
cagtagaagaatttatgagagttga

SEQ ID NO: 3172009 - DNA, 25 bp, Homo sapien
ttttggaccattgggatatcagtag

SEQ ID NO: 3172010 - DNA, 25 bp, Homo sapien
gaccattgggatatcagtagaagaa

SEQ ID NO: 3172011 - DNA, 25 bp, Homo sapien
gagtgcatgtagatcagcagccagc

SEQ ID NO: 3172012 - DNA, 25 bp, Homo sapien
ggcccacccgtgagctctatggaaa

SEQ ID NO: 3172013 - DNA, 25 bp, Homo sapien
agagaagacacacaatcccaggact

SEQ ID NO: 3172014 - DNA, 25 bp, Homo sapien
ttaaatacttcagggcattgccatg

SEQ ID NO: 3172015 - DNA, 25 bp, Homo sapien
gtatctgaaaagtaagccttctgga

SEQ ID NO: 3172016 - DNA, 25 bp, Homo sapien
cggcaatcacttgatagttgggact

SEQ ID NO: 3172017 - DNA, 25 bp, Homo sapien
gcaatatcagcgtcccagttgtaaa

SEQ ID NO: 3172018 - DNA, 25 bp, Homo sapien
gttgggacttgaattactaacagca

SEQ ID NO: 3172019 - DNA, 25 bp, Homo sapien
gaggggtattagaattctgggtaca

SEQ ID NO: 3172020 - DNA, 25 bp, Homo sapien
atgcgtggcctactggctccctggt

SEQ ID NO: 3172021 - DNA, 25 bp, Homo sapien
agaatctcccttctctgaatgacgc

SEQ ID NO: 3172022 - DNA, 25 bp, Homo sapien
ggatcgggggaagcacatgcgtggc

SEQ ID NO: 3172023 - DNA, 25 bp, Homo sapien
taagactacactgtgagaataggga

SEQ ID NO: 3172024 - DNA, 25 bp, Homo sapien
tatgtgtgtggctattggaagttgc

SEQ ID NO: 3172025 - DNA, 25 bp, Homo sapien
gcaattcttaattatcagcccctag

SEQ ID NO: 3172026 - DNA, 25 bp, Homo sapien
tcttgagacttactaaggaccctaa

SEQ ID NO: 3172027 - DNA, 25 bp, Homo sapien
aagtttaggtaaagctgatgctcag

SEQ ID NO: 3172028 - DNA, 25 bp, Homo sapien
caaacacatgtgacttcagggtaat

SEQ ID NO: 3172029 - DNA, 25 bp, Homo sapien
tccatggtgggttttacataaagca

SEQ ID NO: 3172030 - DNA, 25 bp, Homo sapien
gaattcctagcgaaaggctttacaa

SEQ ID NO: 3172031 - DNA, 25 bp, Homo sapien
tctgtcaggatagtgattctagtag

SEQ ID NO: 3172032 - DNA, 25 bp, Homo sapien
tgattctagtagagttgtcacctgg

SEQ ID NO: 3172033 - DNA, 25 bp, Homo sapien
cagcttgtacgtagagttctgtcag

SEQ ID NO: 3172034 - DNA, 25 bp, Homo sapien
aaatgacagcttgtacgtagagttc

SEQ ID NO: 3172035 - DNA, 25 bp, Homo sapien
tattaggaaattaacatgttggtac

SEQ ID NO: 3172036 - DNA, 25 bp, Homo sapien
ttgttctaatttgccttccagctac

SEQ ID NO: 3172037 - DNA, 25 bp, Homo sapien
ttctaatttgctctgtctacggaat

SEQ ID NO: 3172038 - DNA, 25 bp, Homo sapien
tttgctctgtctacggaatttattt

SEQ ID NO: 3172039 - DNA, 25 bp, Homo sapien
tatagaataaggatctacttcagaa

SEQ ID NO: 3172040 - DNA, 25 bp, Homo sapien
ttaccttcactgtcatgatcttgac

SEQ ID NO: 3172041 - DNA, 25 bp, Homo sapien
caaattccctttatagaataaggat

SEQ ID NO: 3172042 - DNA, 25 bp, Homo sapien
ccttcactgtcatgatcttgacact

SEQ ID NO: 3172043 - DNA, 25 bp, Homo sapien
tatactaccaagaccttttcccatg

SEQ ID NO: 3172044 - DNA, 25 bp, Homo sapien
tttagttaaactatacaaggactca

SEQ ID NO: 3172045 - DNA, 25 bp, Homo sapien
tgatcacgaaacatctcagactaac

SEQ ID NO: 3172046 - DNA, 25 bp, Homo sapien
caaggactcatagaagtgattgtta

SEQ ID NO: 3172047 - DNA, 25 bp, Homo sapien
ctaatctcctctccttgcagccaaa

SEQ ID NO: 3172048 - DNA, 25 bp, Homo sapien
taatctcctctccttgcagccaaac

SEQ ID NO: 3172049 - DNA, 25 bp, Homo sapien
aatctcctctccttgcagccaaacc

SEQ ID NO: 3172050 - DNA, 25 bp, Homo sapien
ggagtaaccagagaactggcagcgg

SEQ ID NO: 3172051 - DNA, 25 bp, Homo sapien
tcgtcctcgccctcttagcttgcac

SEQ ID NO: 3172052 - DNA, 25 bp, Homo sapien
gagagagagacttagttctttcgct

SEQ ID NO: 3172053 - DNA, 25 bp, Homo sapien
gttctttcgctctctagctgatctg

SEQ ID NO: 3172054 - DNA, 25 bp, Homo sapien
gagccgagggttgaactccaaacca

SEQ ID NO: 3172055 - DNA, 25 bp, Homo sapien
cgcgcgagggactaggactagctct

SEQ ID NO: 3172056 - DNA, 25 bp, Homo sapien
cactccaacgctgagaaagagctgt

SEQ ID NO: 3172057 - DNA, 25 bp, Homo sapien
tgtggcccgggtgttttcaagatct

SEQ ID NO: 3172058 - DNA, 25 bp, Homo sapien
tggaccgtgctgtacctgtcataga

SEQ ID NO: 3172059 - DNA, 25 bp, Homo sapien
tcagagaccttgtcttgcggctgca

SEQ ID NO: 3172060 - DNA, 25 bp, Homo sapien
catagagccgcagcatgtgttcaga

SEQ ID NO: 3172061 - DNA, 25 bp, Homo sapien
ccgaaagctgcgaaccgtgttgcct

SEQ ID NO: 3172062 - DNA, 25 bp, Homo sapien
gggcggagaaaggtccctaggcagc

SEQ ID NO: 3172063 - DNA, 25 bp, Homo sapien
aaggtccctaggcagcgccaccaag

SEQ ID NO: 3172064 - DNA, 25 bp, Homo sapien
aggagatgcagctggcgacacgcgg

SEQ ID NO: 3172065 - DNA, 25 bp, Homo sapien
gggtgtgactggacggaggaatcca

SEQ ID NO: 3172066 - DNA, 25 bp, Homo sapien
tgcaatatctggagaagcgactggg

SEQ ID NO: 3172067 - DNA, 25 bp, Homo sapien
gggaaggcgtcttattcaagtatga

SEQ ID NO: 3172068 - DNA, 25 bp, Homo sapien
aagtatgatttctctcgggtcctgg

SEQ ID NO: 3172069 - DNA, 25 bp, Homo sapien
tagtacagtaacacaaagggcgcga

SEQ ID NO: 3172070 - DNA, 25 bp, Homo sapien
taaaccatttgtttatggataggcc

SEQ ID NO: 3172071 - DNA, 25 bp, Homo sapien
aataaaccatttgtttatggatagg

SEQ ID NO: 3172072 - DNA, 25 bp, Homo sapien
ataaaccatttgtttatggataggc

SEQ ID NO: 3172073 - DNA, 25 bp, Homo sapien
aaccatttgtttatggataggccca

SEQ ID NO: 3172074 - DNA, 25 bp, Homo sapien
tacagaaatacagtgtggcagacaa

SEQ ID NO: 3172075 - DNA, 25 bp, Homo sapien
ttctgctgaatttgagggtccatgc

SEQ ID NO: 3172076 - DNA, 25 bp, Homo sapien
tcctctgagcatgatgggagcatcc

SEQ ID NO: 3172077 - DNA, 25 bp, Homo sapien
tccagacactggacaactcaggctg

SEQ ID NO: 3172078 - DNA, 25 bp, Homo sapien
tccgctcaatggaaagggcagctct

SEQ ID NO: 3172079 - DNA, 25 bp, Homo sapien
gaggtatctcctggcgcaattccga

SEQ ID NO: 3172080 - DNA, 25 bp, Homo sapien
ttctggctcagaaatggcggcatca

SEQ ID NO: 3172081 - DNA, 25 bp, Homo sapien
gcagcaagaccccagtagagcgctt

SEQ ID NO: 3172082 - DNA, 25 bp, Homo sapien
ggaaataggaagtaagtacaggaca

SEQ ID NO: 3172083 - DNA, 25 bp, Homo sapien
aatggaaataggaagtaagtacagg

SEQ ID NO: 3172084 - DNA, 25 bp, Homo sapien
tggaaataggaagtaagtacaggac

SEQ ID NO: 3172085 - DNA, 25 bp, Homo sapien
ctaatggaaataggaagtaagtaca

SEQ ID NO: 3172086 - DNA, 25 bp, Homo sapien
cacgtagtggatttcatgaggccag

SEQ ID NO: 3172087 - DNA, 25 bp, Homo sapien
ggacaggtgcaggttcacacacaac

SEQ ID NO: 3172088 - DNA, 25 bp, Homo sapien
caaccatgtggctgaatatgcacca

SEQ ID NO: 3172089 - DNA, 25 bp, Homo sapien
ggacaacttagctcacaagagggta

SEQ ID NO: 3172090 - DNA, 25 bp, Homo sapien
ggaagtgcaccaataagcttaactg

SEQ ID NO: 3172091 - DNA, 25 bp, Homo sapien
taaactgctacaagctgagaatgga

SEQ ID NO: 3172092 - DNA, 25 bp, Homo sapien
tcagaccttatggattttcgaggag

SEQ ID NO: 3172093 - DNA, 25 bp, Homo sapien
aacagtcacttgaacttgccgtgca

SEQ ID NO: 3172094 - DNA, 25 bp, Homo sapien
cctaatgtagcagcttcatttggct

SEQ ID NO: 3172095 - DNA, 25 bp, Homo sapien
cttcatttggctgcatgtttcccat

SEQ ID NO: 3172096 - DNA, 25 bp, Homo sapien
taatgtagcagcttcatttggctgc

SEQ ID NO: 3172097 - DNA, 25 bp, Homo sapien
ccctaatgtagcagcttcatttggc

SEQ ID NO: 3172098 - DNA, 25 bp, Homo sapien
caaaggtatagaacttggcattaac

SEQ ID NO: 3172099 - DNA, 25 bp, Homo sapien
gcattaactgtatgggtatttttca

SEQ ID NO: 3172100 - DNA, 25 bp, Homo sapien
gaggcaaaggtatagaacttggcat

SEQ ID NO: 3172101 - DNA, 25 bp, Homo sapien
tggcattaactgtatgggtattttt

SEQ ID NO: 3172102 - DNA, 25 bp, Homo sapien
acagctctcactatactctggatgg

SEQ ID NO: 3172103 - DNA, 25 bp, Homo sapien
tatctgcaagcgcaagactctactg

SEQ ID NO: 3172104 - DNA, 25 bp, Homo sapien
tcatgttagggtatactttaagcac

SEQ ID NO: 3172105 - DNA, 25 bp, Homo sapien
ggacatcttttctggtacacagcaa

SEQ ID NO: 3172106 - DNA, 25 bp, Homo sapien
ccaacaatgatctacggcctgaaag

SEQ ID NO: 3172107 - DNA, 25 bp, Homo sapien
ttaagcaaaccatcctacagagggc

SEQ ID NO: 3172108 - DNA, 25 bp, Homo sapien
gagccaaaagccctgatctatgtga

SEQ ID NO: 3172109 - DNA, 25 bp, Homo sapien
tgaaccaccataattagctacaggc

SEQ ID NO: 3172110 - DNA, 25 bp, Homo sapien
tagctatgcctaacccaactttgat

SEQ ID NO: 3172111 - DNA, 25 bp, Homo sapien
cacatcaggtgtgcatagctatgcc

SEQ ID NO: 3172112 - DNA, 25 bp, Homo sapien
gaagtatccttcacagtttcactgc

SEQ ID NO: 3172113 - DNA, 25 bp, Homo sapien
tctaagtggatttgactaaagaacc

SEQ ID NO: 3172114 - DNA, 25 bp, Homo sapien
ctggctgacgtaagaggaatttgat

SEQ ID NO: 3172115 - DNA, 25 bp, Homo sapien
ctgacgtaagaggaatttgatagct

SEQ ID NO: 3172116 - DNA, 25 bp, Homo sapien
tggctgacgtaagaggaatttgata

SEQ ID NO: 3172117 - DNA, 25 bp, Homo sapien
cgtaagaggaatttgatagcttcca

SEQ ID NO: 3172118 - DNA, 25 bp, Homo sapien
gacaaatgcaatcgttcagaattct

SEQ ID NO: 3172119 - DNA, 25 bp, Homo sapien
gctgagaacagggatgtgcagatta

SEQ ID NO: 3172120 - DNA, 25 bp, Homo sapien
ttttgggcaggaataaatgacgctg

SEQ ID NO: 3172121 - DNA, 25 bp, Homo sapien
tatttcagtgtagcaacagccgtca

SEQ ID NO: 3172122 - DNA, 25 bp, Homo sapien
aaataaccattgctgcatagacggg

SEQ ID NO: 3172123 - DNA, 25 bp, Homo sapien
tagagagtcttttgcccggtatctg

SEQ ID NO: 3172124 - DNA, 25 bp, Homo sapien
gagactgaaccattgaataatccca

SEQ ID NO: 3172125 - DNA, 25 bp, Homo sapien
catagacgggagctactgttactgt

SEQ ID NO: 3172126 - DNA, 25 bp, Homo sapien
ggcagttatgcagtatggaaggtaa

SEQ ID NO: 3172127 - DNA, 25 bp, Homo sapien
ttatgcagtatggaaggtaagagtg

SEQ ID NO: 3172128 - DNA, 25 bp, Homo sapien
cagttatgcagtatggaaggtaaga

SEQ ID NO: 3172129 - DNA, 25 bp, Homo sapien
ctggcagttatgcagtatggaaggt

SEQ ID NO: 3172130 - DNA, 25 bp, Homo sapien
gcattgtagttcctgataatctaag

SEQ ID NO: 3172131 - DNA, 25 bp, Homo sapien
gagtgatgaatggaggaatgctttc

SEQ ID NO: 3172132 - DNA, 25 bp, Homo sapien
gttgttgacatgttgttgacaacaa

SEQ ID NO: 3172133 - DNA, 25 bp, Homo sapien
acaatgatggttgtcattccttcat

SEQ ID NO: 3172134 - DNA, 25 bp, Homo sapien
tcagattcacctacttagtttcaaa

SEQ ID NO: 3172135 - DNA, 25 bp, Homo sapien
gcttcttacctcttagtctacttct

SEQ ID NO: 3172136 - DNA, 25 bp, Homo sapien
gattcacctacttagtttcaaatcc

SEQ ID NO: 3172137 - DNA, 25 bp, Homo sapien
aaattagttgcttcttacctcttag

SEQ ID NO: 3172138 - DNA, 25 bp, Homo sapien
tttttgtgtagaaaaagatcaccag

SEQ ID NO: 3172139 - DNA, 25 bp, Homo sapien
ctttttgtgtagaaaaagatcacca

SEQ ID NO: 3172140 - DNA, 25 bp, Homo sapien
atttatttaatggaagtacggagtg

SEQ ID NO: 3172141 - DNA, 25 bp, Homo sapien
tgtgtactctaaagactctggcttc

SEQ ID NO: 3172142 - DNA, 25 bp, Homo sapien
gaagtacggagtgtgtactctaaag

SEQ ID NO: 3172143 - DNA, 25 bp, Homo sapien
tatttaatggaagtacggagtgtgt

SEQ ID NO: 3172144 - DNA, 25 bp, Homo sapien
gtgaccttcacaaatatgccttacc

SEQ ID NO: 3172145 - DNA, 25 bp, Homo sapien
gacttgcctaaggttccgcagttag

SEQ ID NO: 3172146 - DNA, 25 bp, Homo sapien
ggcattccagctctactagattttg

SEQ ID NO: 3172147 - DNA, 25 bp, Homo sapien
aaagttgctgcctcttatgctcaca

SEQ ID NO: 3172148 - DNA, 25 bp, Homo sapien
acagtcatacccttgaagatcagtg

SEQ ID NO: 3172149 - DNA, 25 bp, Homo sapien
tagggtgactgacgttttccaactc

SEQ ID NO: 3172150 - DNA, 25 bp, Homo sapien
gaagaaaatagagatgcgtatcctg

SEQ ID NO: 3172151 - DNA, 25 bp, Homo sapien
catgggatgacctcatttttgtcac

SEQ ID NO: 3172152 - DNA, 25 bp, Homo sapien
tgtgctatcagctttcttgcattca

SEQ ID NO: 3172153 - DNA, 25 bp, Homo sapien
tccatccatcacacatttcagcctg

SEQ ID NO: 3172154 - DNA, 25 bp, Homo sapien
cagtttcattattcattactctcct

SEQ ID NO: 3172155 - DNA, 25 bp, Homo sapien
gtcccttgactgtgctatcagcttt

SEQ ID NO: 3172156 - DNA, 25 bp, Homo sapien
ttgcttgtgctgttcgagtgtggac

SEQ ID NO: 3172157 - DNA, 25 bp, Homo sapien
tggacgtgtgtacgcgttgcattcg

SEQ ID NO: 3172158 - DNA, 25 bp, Homo sapien
aatgcgttgcgcgatgtgcgcctct

SEQ ID NO: 3172159 - DNA, 25 bp, Homo sapien
cgtgtgcatgctgtgaatgcgttgc

SEQ ID NO: 3172160 - DNA, 25 bp, Homo sapien
agccaggcggcagcaccgacgccgc

SEQ ID NO: 3172161 - DNA, 25 bp, Homo sapien
gcatgtccagggtacgtgcgcctgt

SEQ ID NO: 3172162 - DNA, 25 bp, Homo sapien
gggcgcgtcgacgagctgcttcggg

SEQ ID NO: 3172163 - DNA, 25 bp, Homo sapien
ggtcacatgtcttcgtagaaaggca

SEQ ID NO: 3172164 - DNA, 25 bp, Homo sapien
gtgaactggcaaactagatgtaagt

SEQ ID NO: 3172165 - DNA, 25 bp, Homo sapien
ccttgtcctccgtgaatttgctggt

SEQ ID NO: 3172166 - DNA, 25 bp, Homo sapien
ctgtgaaacacttgggctgcttggg

SEQ ID NO: 3172167 - DNA, 25 bp, Homo sapien
gcaagaaacagaaagtgggcaaaac

SEQ ID NO: 3172168 - DNA, 25 bp, Homo sapien
ttctgtgaaacacttgggctgcttg

SEQ ID NO: 3172169 - DNA, 25 bp, Homo sapien
acacttgggctgcttggggactttt

SEQ ID NO: 3172170 - DNA, 25 bp, Homo sapien
gggcttgggagtctgaattaagtat

SEQ ID NO: 3172171 - DNA, 25 bp, Homo sapien
tggaaacattactggatctcttcct

SEQ ID NO: 3172172 - DNA, 25 bp, Homo sapien
atggaaacattactggatctcttcc

SEQ ID NO: 3172173 - DNA, 25 bp, Homo sapien
gagtctgaattaagtatggaaacat

SEQ ID NO: 3172174 - DNA, 25 bp, Homo sapien
caacttggggatctgtcctggacag

SEQ ID NO: 3172175 - DNA, 25 bp, Homo sapien
taacaacttggggatctgtcctgga

SEQ ID NO: 3172176 - DNA, 25 bp, Homo sapien
aacaacttggggatctgtcctggac

SEQ ID NO: 3172177 - DNA, 25 bp, Homo sapien
gttaacaacttggggatctgtcctg

SEQ ID NO: 3172178 - DNA, 25 bp, Homo sapien
gaatgggttgcatgtatgctggtcc

SEQ ID NO: 3172179 - DNA, 25 bp, Homo sapien
gcaaggaggtaagaataaggtgaat

SEQ ID NO: 3172180 - DNA, 25 bp, Homo sapien
tacggcaagatagagaagtaggcaa

SEQ ID NO: 3172181 - DNA, 25 bp, Homo sapien
ggatcatcaatagcctgtgccactc

SEQ ID NO: 3172182 - DNA, 25 bp, Homo sapien
tggttttcctgagactgggtgtagt

SEQ ID NO: 3172183 - DNA, 25 bp, Homo sapien
tcctggttttcctgagactgggtgt

SEQ ID NO: 3172184 - DNA, 25 bp, Homo sapien
cagtcgttgacaaagtttccatcac

SEQ ID NO: 3172185 - DNA, 25 bp, Homo sapien
tttcctgagactgggtgtagtttga

SEQ ID NO: 3172186 - DNA, 25 bp, Homo sapien
tttatctgatctgaaaagaaactgg

SEQ ID NO: 3172187 - DNA, 25 bp, Homo sapien
cctcaaaaattgatttaagactcag

SEQ ID NO: 3172188 - DNA, 25 bp, Homo sapien
gagttgttcctcttcatgaaaatca

SEQ ID NO: 3172189 - DNA, 25 bp, Homo sapien
gagaaaaatttatctgatctgaaaa

SEQ ID NO: 3172190 - DNA, 25 bp, Homo sapien
catgtccactgatggatcactgctt

SEQ ID NO: 3172191 - DNA, 25 bp, Homo sapien
cactgcttagggtttctagtccctg

SEQ ID NO: 3172192 - DNA, 25 bp, Homo sapien
tctgtccctggtcagcacaacagga

SEQ ID NO: 3172193 - DNA, 25 bp, Homo sapien
tttccttggtcccatgtccactgat

SEQ ID NO: 3172194 - DNA, 25 bp, Homo sapien
gatttctggctgatatgtagatctc

SEQ ID NO: 3172195 - DNA, 25 bp, Homo sapien
gcatttataccctcttcaagagaag

SEQ ID NO: 3172196 - DNA, 25 bp, Homo sapien
tctccccatgagacctgagtgtggc

SEQ ID NO: 3172197 - DNA, 25 bp, Homo sapien
ccaggatccgttcacatcttccttt

SEQ ID NO: 3172198 - DNA, 25 bp, Homo sapien
gcactgagctctacatacatccaga

SEQ ID NO: 3172199 - DNA, 25 bp, Homo sapien
aggatagccttcagacatcaacagg

SEQ ID NO: 3172200 - DNA, 25 bp, Homo sapien
catccagagtaatcgtagaagacct

SEQ ID NO: 3172201 - DNA, 25 bp, Homo sapien
tttgatctagattccaaggatagcc

SEQ ID NO: 3172202 - DNA, 25 bp, Homo sapien
tacataatcccctgatgatctcctg

SEQ ID NO: 3172203 - DNA, 25 bp, Homo sapien
tgatctcctggattgatctcttcca

SEQ ID NO: 3172204 - DNA, 25 bp, Homo sapien
cctcttaggtgcagtactggtacca

SEQ ID NO: 3172205 - DNA, 25 bp, Homo sapien
tctctcagttcccacctgcatggtc

SEQ ID NO: 3172206 - DNA, 25 bp, Homo sapien
cctctcagggaggtacaatgcccat

SEQ ID NO: 3172207 - DNA, 25 bp, Homo sapien
tacgtgtgataggaaaagttgtaaa

SEQ ID NO: 3172208 - DNA, 25 bp, Homo sapien
tctatattttgacccacctctcagg

SEQ ID NO: 3172209 - DNA, 25 bp, Homo sapien
tacaatgcccattgacttcaaagga

SEQ ID NO: 3172210 - DNA, 25 bp, Homo sapien
ttggaggaaattgcttgggctaggg

SEQ ID NO: 3172211 - DNA, 25 bp, Homo sapien
tggaggaaattgcttgggctagggt

SEQ ID NO: 3172212 - DNA, 25 bp, Homo sapien
aaatctagagcagttcctagaccac

SEQ ID NO: 3172213 - DNA, 25 bp, Homo sapien
tttaaatctagagcagttcctagac

SEQ ID NO: 3172214 - DNA, 25 bp, Homo sapien
ctagaccaccttgaacgtcccacat

SEQ ID NO: 3172215 - DNA, 25 bp, Homo sapien
ttcctagaccaccttgaacgtccca

SEQ ID NO: 3172216 - DNA, 25 bp, Homo sapien
cgtcacttcctgtgctttggaggta

SEQ ID NO: 3172217 - DNA, 25 bp, Homo sapien
gatggcactgtgtgatcaggacttt

SEQ ID NO: 3172218 - DNA, 25 bp, Homo sapien
tctgctgctccagtatcaggtttcc

SEQ ID NO: 3172219 - DNA, 25 bp, Homo sapien
aatgaagccttcctccagcgtcact

SEQ ID NO: 3172220 - DNA, 25 bp, Homo sapien
gatggagaaggtttgcacaggctct

SEQ ID NO: 3172221 - DNA, 25 bp, Homo sapien
cacagccagtgagtaaaagaaccgc

SEQ ID NO: 3172222 - DNA, 25 bp, Homo sapien
tctagtccagagcttgtagtcctgg

SEQ ID NO: 3172223 - DNA, 25 bp, Homo sapien
aaagaaccgctgacctctagtccag

SEQ ID NO: 3172224 - DNA, 25 bp, Homo sapien
tcatttactgttttttctagcatac

SEQ ID NO: 3172225 - DNA, 25 bp, Homo sapien
tctctttccaactgctgtccacatg

SEQ ID NO: 3172226 - DNA, 25 bp, Homo sapien
tggctttggcacctctgtcatttct

SEQ ID NO: 3172227 - DNA, 25 bp, Homo sapien
tcttcacttcacctggctttggcac

SEQ ID NO: 3172228 - DNA, 25 bp, Homo sapien
gagctgtttacaactgaccactgtg

SEQ ID NO: 3172229 - DNA, 25 bp, Homo sapien
gagaagttacctgtccccactatag

SEQ ID NO: 3172230 - DNA, 25 bp, Homo sapien
gatcttgggaaaacccatggcataa

SEQ ID NO: 3172231 - DNA, 25 bp, Homo sapien
taagtaagtctgtagtcgctctgca

SEQ ID NO: 3172232 - DNA, 25 bp, Homo sapien
gttggctgctggttagcaaactcct

SEQ ID NO: 3172233 - DNA, 25 bp, Homo sapien
taatgaagctcaacactgtggtagg

SEQ ID NO: 3172234 - DNA, 25 bp, Homo sapien
gctcaatcagtattgccagagaggg

SEQ ID NO: 3172235 - DNA, 25 bp, Homo sapien
catttgctgctaatgggacttgccc

SEQ ID NO: 3172236 - DNA, 25 bp, Homo sapien
cagcgttatattatgcctctcaagc

SEQ ID NO: 3172237 - DNA, 25 bp, Homo sapien
ctgattaacaagtttcttgttggca

SEQ ID NO: 3172238 - DNA, 25 bp, Homo sapien
tgacagatatcagggtttacaaaca

SEQ ID NO: 3172239 - DNA, 25 bp, Homo sapien
ttttctggtgaagatgagatcagcc

SEQ ID NO: 3172240 - DNA, 25 bp, Homo sapien
taatcctctgacactgccgagggtg

SEQ ID NO: 3172241 - DNA, 25 bp, Homo sapien
tcagcaccatgtgacgacggtcagg

SEQ ID NO: 3172242 - DNA, 25 bp, Homo sapien
cacaaggagattgtctagacggcga

SEQ ID NO: 3172243 - DNA, 25 bp, Homo sapien
tctaatggccgaagggagggtctct

SEQ ID NO: 3172244 - DNA, 25 bp, Homo sapien
agataatgaccccaggttcaaacca

SEQ ID NO: 3172245 - DNA, 25 bp, Homo sapien
taatgaccccaggttcaaaccaatc

SEQ ID NO: 3172246 - DNA, 25 bp, Homo sapien
agagataatgaccccaggttcaaac

SEQ ID NO: 3172247 - DNA, 25 bp, Homo sapien
gataatgaccccaggttcaaaccaa

SEQ ID NO: 3172248 - DNA, 25 bp, Homo sapien
gatgaactgccttgggggatgcatt

SEQ ID NO: 3172249 - DNA, 25 bp, Homo sapien
gcatttgaagtaactgctggacatc

SEQ ID NO: 3172250 - DNA, 25 bp, Homo sapien
attattatagttacatggaagatga

SEQ ID NO: 3172251 - DNA, 25 bp, Homo sapien
gggatgcatttgaagtaactgctgg

SEQ ID NO: 3172252 - DNA, 25 bp, Homo sapien
gacggttccaacagctgcttgtctg

SEQ ID NO: 3172253 - DNA, 25 bp, Homo sapien
tgtgactggtagagctaacacttgt

SEQ ID NO: 3172254 - DNA, 25 bp, Homo sapien
tctttgaactagaaggaactttgac

SEQ ID NO: 3172255 - DNA, 25 bp, Homo sapien
acacttgtttcctgatgtggacggt

SEQ ID NO: 3172256 - DNA, 25 bp, Homo sapien
ttcctgacctttgtttcttgaggcc

SEQ ID NO: 3172257 - DNA, 25 bp, Homo sapien
cttcctgacctttgtttcttgaggc

SEQ ID NO: 3172258 - DNA, 25 bp, Homo sapien
aggcctgtgcttttaaggaaatcat

SEQ ID NO: 3172259 - DNA, 25 bp, Homo sapien
cttgaggcctgtgcttttaaggaaa

SEQ ID NO: 3172260 - DNA, 25 bp, Homo sapien
gcctttggtcattcttgcccttgtg

SEQ ID NO: 3172261 - DNA, 25 bp, Homo sapien
tcttcttggtcaaccccaggctttg

SEQ ID NO: 3172262 - DNA, 25 bp, Homo sapien
tacagttctgctgcgataatctgaa

SEQ ID NO: 3172263 - DNA, 25 bp, Homo sapien
gctgcgataatctgaatttgccatg

SEQ ID NO: 3172264 - DNA, 25 bp, Homo sapien
tggcaaccatagcttgaactgactg

SEQ ID NO: 3172265 - DNA, 25 bp, Homo sapien
tgtggataatgaccccactctcttg

SEQ ID NO: 3172266 - DNA, 25 bp, Homo sapien
ttttgtccaataggtctggactctg

SEQ ID NO: 3172267 - DNA, 25 bp, Homo sapien
gaactgactgcactgttctttctct

SEQ ID NO: 3172268 - DNA, 25 bp, Homo sapien
gctgtggccttggactgtctgacca

SEQ ID NO: 3172269 - DNA, 25 bp, Homo sapien
accaccaggattggagttgttgtag

SEQ ID NO: 3172270 - DNA, 25 bp, Homo sapien
ggactgtctgaccaccaggattgga

SEQ ID NO: 3172271 - DNA, 25 bp, Homo sapien
ggctgtggccttggactgtctgacc

SEQ ID NO: 3172272 - DNA, 25 bp, Homo sapien
ggatagagccgcttacacaaatgcc

SEQ ID NO: 3172273 - DNA, 25 bp, Homo sapien
gaattggcaagctcttagggataga

SEQ ID NO: 3172274 - DNA, 25 bp, Homo sapien
tactcagttacaagactggtgctca

SEQ ID NO: 3172275 - DNA, 25 bp, Homo sapien
gaatggaccctttttatgctagaga

SEQ ID NO: 3172276 - DNA, 25 bp, Homo sapien
agctgggcctcgaggagcagcggga

SEQ ID NO: 3172277 - DNA, 25 bp, Homo sapien
gaggctgtggctctttgctgagcat

SEQ ID NO: 3172278 - DNA, 25 bp, Homo sapien
agccacagctgggcctcgaggagca

SEQ ID NO: 3172279 - DNA, 25 bp, Homo sapien
ggagaggctgtggctctttgctgag

SEQ ID NO: 3172280 - DNA, 25 bp, Homo sapien
ctatggatgcctgtagagatttatc

SEQ ID NO: 3172281 - DNA, 25 bp, Homo sapien
ttcaattcgctgatgcttgggagct

SEQ ID NO: 3172282 - DNA, 25 bp, Homo sapien
tcagtaaagcatattcccaaattct

SEQ ID NO: 3172283 - DNA, 25 bp, Homo sapien
ttgggagctgtctctatggatgcct

SEQ ID NO: 3172284 - DNA, 25 bp, Homo sapien
aactggtaattgcaaaatccacctc

SEQ ID NO: 3172285 - DNA, 25 bp, Homo sapien
tttgtatggtcattcctttcaggca

SEQ ID NO: 3172286 - DNA, 25 bp, Homo sapien
aaagtttgtgttgattgtggcaagg

SEQ ID NO: 3172287 - DNA, 25 bp, Homo sapien
tatgccagggaagtgtatgcttgtt

SEQ ID NO: 3172288 - DNA, 25 bp, Homo sapien
agaaccaaacaggttttgcattagg

SEQ ID NO: 3172289 - DNA, 25 bp, Homo sapien
ccaaacaggttttgcattagggctg

SEQ ID NO: 3172290 - DNA, 25 bp, Homo sapien
accaaacaggttttgcattagggct

SEQ ID NO: 3172291 - DNA, 25 bp, Homo sapien
tgagaaccaaacaggttttgcatta

SEQ ID NO: 3172292 - DNA, 25 bp, Homo sapien
tagctgcacctgatactgccttgcc

SEQ ID NO: 3172293 - DNA, 25 bp, Homo sapien
caagtcagagcctgtaggtagcaga

SEQ ID NO: 3172294 - DNA, 25 bp, Homo sapien
tgatataattcagcaccacctcgat

SEQ ID NO: 3172295 - DNA, 25 bp, Homo sapien
gatctttgagtgtgccatatacctg

SEQ ID NO: 3172296 - DNA, 25 bp, Homo sapien
tggtttagcgacatcacagtgtctg

SEQ ID NO: 3172297 - DNA, 25 bp, Homo sapien
cttataggtggtttagcgacatcac

SEQ ID NO: 3172298 - DNA, 25 bp, Homo sapien
ttagcgacatcacagtgtctgtcat

SEQ ID NO: 3172299 - DNA, 25 bp, Homo sapien
aggtggtttagcgacatcacagtgt

SEQ ID NO: 3172300 - DNA, 25 bp, Homo sapien
gaatgttgaactctgctgactggag

SEQ ID NO: 3172301 - DNA, 25 bp, Homo sapien
tgactggagtgaggcggcgttggga

SEQ ID NO: 3172302 - DNA, 25 bp, Homo sapien
tgaggcggcgttgggagagtatagg

SEQ ID NO: 3172303 - DNA, 25 bp, Homo sapien
tctctgctcataaggaggaatgttg

SEQ ID NO: 3172304 - DNA, 25 bp, Homo sapien
gttgctaactgttccagtattcaca

SEQ ID NO: 3172305 - DNA, 25 bp, Homo sapien
ctgttccagtattcacagccttgcc

SEQ ID NO: 3172306 - DNA, 25 bp, Homo sapien
agaatgtgttgctaactgttccagt

SEQ ID NO: 3172307 - DNA, 25 bp, Homo sapien
gctaactgttccagtattcacagcc

SEQ ID NO: 3172308 - DNA, 25 bp, Homo sapien
tttgatccgagagtccctgtcctca

SEQ ID NO: 3172309 - DNA, 25 bp, Homo sapien
gaaaactttgatccgagagtccctg

SEQ ID NO: 3172310 - DNA, 25 bp, Homo sapien
tagtaggactttctcgggcaaaatg

SEQ ID NO: 3172311 - DNA, 25 bp, Homo sapien
ctgagaaaactttgatccgagagtc

SEQ ID NO: 3172312 - DNA, 25 bp, Homo sapien
taagttcaccaaaaactgtactcga

SEQ ID NO: 3172313 - DNA, 25 bp, Homo sapien
ctaagttcaccaaaaactgtactcg

SEQ ID NO: 3172314 - DNA, 25 bp, Homo sapien
atttcatgtgccttgctatgaaccc

SEQ ID NO: 3172315 - DNA, 25 bp, Homo sapien
ttgctatgaacccaactctgcttca

SEQ ID NO: 3172316 - DNA, 25 bp, Homo sapien
agtgtctattgcttcatgattttgc

SEQ ID NO: 3172317 - DNA, 25 bp, Homo sapien
tcatgtgccttgctatgaacccaac

SEQ ID NO: 3172318 - DNA, 25 bp, Homo sapien
gcctgtatagtcacatgatttttgg

SEQ ID NO: 3172319 - DNA, 25 bp, Homo sapien
cagtatcttattaggatcactgtag

SEQ ID NO: 3172320 - DNA, 25 bp, Homo sapien
ggtatagatgtcttgtgtttgtcac

SEQ ID NO: 3172321 - DNA, 25 bp, Homo sapien
tgtttgtcactcgtattcacatatg

SEQ ID NO: 3172322 - DNA, 25 bp, Homo sapien
tctgcagctacgactaggcctgcct

SEQ ID NO: 3172323 - DNA, 25 bp, Homo sapien
gcagctacgactaggcctgcctctg

SEQ ID NO: 3172324 - DNA, 25 bp, Homo sapien
tttgtttctgcagctacgactaggc

SEQ ID NO: 3172325 - DNA, 25 bp, Homo sapien
gtttctgcagctacgactaggcctg

SEQ ID NO: 3172326 - DNA, 25 bp, Homo sapien
cattgaccgtaacttttggaattgg

SEQ ID NO: 3172327 - DNA, 25 bp, Homo sapien
tggaattggatacctgaacatcgtt

SEQ ID NO: 3172328 - DNA, 25 bp, Homo sapien
cccaaagataccattgaccgtaact

SEQ ID NO: 3172329 - DNA, 25 bp, Homo sapien
caggaggaatatcatctcctagaac

SEQ ID NO: 3172330 - DNA, 25 bp, Homo sapien
catcctgctttcagtgtcacttaga

SEQ ID NO: 3172331 - DNA, 25 bp, Homo sapien
tgcatcctgctttcagtgtcactta

SEQ ID NO: 3172332 - DNA, 25 bp, Homo sapien
tcctgctttcagtgtcacttagagt

SEQ ID NO: 3172333 - DNA, 25 bp, Homo sapien
gcatcctgctttcagtgtcacttag

SEQ ID NO: 3172334 - DNA, 25 bp, Homo sapien
cttttcctctggagcatttcctaca

SEQ ID NO: 3172335 - DNA, 25 bp, Homo sapien
tcatctgactccatgaggccagtgt

SEQ ID NO: 3172336 - DNA, 25 bp, Homo sapien
tagtcatagtgtaaaatggctgttc

SEQ ID NO: 3172337 - DNA, 25 bp, Homo sapien
tcatcaggccagttgaagtatggcc

SEQ ID NO: 3172338 - DNA, 25 bp, Homo sapien
aaaacctgtctgagggatagcattt

SEQ ID NO: 3172339 - DNA, 25 bp, Homo sapien
cccaagtactttgactgaactctgc

SEQ ID NO: 3172340 - DNA, 25 bp, Homo sapien
ccccaagtactttgactgaactctg

SEQ ID NO: 3172341 - DNA, 25 bp, Homo sapien
ttccccaagtactttgactgaactc

SEQ ID NO: 3172342 - DNA, 25 bp, Homo sapien
ccaagtactttgactgaactctgcc

SEQ ID NO: 3172343 - DNA, 25 bp, Homo sapien
aatattcagagatatctactccttt

SEQ ID NO: 3172344 - DNA, 25 bp, Homo sapien
agagatatctactcctttaaggaac

SEQ ID NO: 3172345 - DNA, 25 bp, Homo sapien
ttcagagatatctactcctttaagg

SEQ ID NO: 3172346 - DNA, 25 bp, Homo sapien
gatatctactcctttaaggaactgg

SEQ ID NO: 3172347 - DNA, 25 bp, Homo sapien
ttctgaagatcagaagagggttgtg

SEQ ID NO: 3172348 - DNA, 25 bp, Homo sapien
ctgaagatcagaagagggttgtgct

SEQ ID NO: 3172349 - DNA, 25 bp, Homo sapien
tctgaagatcagaagagggttgtgc

SEQ ID NO: 3172350 - DNA, 25 bp, Homo sapien
gacgataatgctgcctttactgctc

SEQ ID NO: 3172351 - DNA, 25 bp, Homo sapien
tactagacgataatgctgcctttac

SEQ ID NO: 3172352 - DNA, 25 bp, Homo sapien
tacattactagacgataatgctgcc

SEQ ID NO: 3172353 - DNA, 25 bp, Homo sapien
catttacattactagacgataatgc

SEQ ID NO: 3172354 - DNA, 25 bp, Homo sapien
gtagaaatagtaatgtcacaccagt

SEQ ID NO: 3172355 - DNA, 25 bp, Homo sapien
tgctaacatagctgaatctgacctt

SEQ ID NO: 3172356 - DNA, 25 bp, Homo sapien
cacagataatacttccaacaaaagc

SEQ ID NO: 3172357 - DNA, 25 bp, Homo sapien
taatggaataacagaggcttggact

SEQ ID NO: 3172358 - DNA, 25 bp, Homo sapien
actgatagggttgccataaagcagg

SEQ ID NO: 3172359 - DNA, 25 bp, Homo sapien
caccactgatagggttgccataaag

SEQ ID NO: 3172360 - DNA, 25 bp, Homo sapien
ccactgatagggttgccataaagca

SEQ ID NO: 3172361 - DNA, 25 bp, Homo sapien
tagggttgccataaagcaggtcctt

SEQ ID NO: 3172362 - DNA, 25 bp, Homo sapien
cttcgccttttctgtcttccccact

SEQ ID NO: 3172363 - DNA, 25 bp, Homo sapien
tctgtcttccccactccttctctcc

SEQ ID NO: 3172364 - DNA, 25 bp, Homo sapien
ttctgtcttccccactccttctctc

SEQ ID NO: 3172365 - DNA, 25 bp, Homo sapien
cttttctgtcttccccactccttct

SEQ ID NO: 3172366 - DNA, 25 bp, Homo sapien
gccttccattaagactgcttctttc

SEQ ID NO: 3172367 - DNA, 25 bp, Homo sapien
tgaaacacacaacaaggttggaaga

SEQ ID NO: 3172368 - DNA, 25 bp, Homo sapien
ggtgatttggcagtgccttccatta

SEQ ID NO: 3172369 - DNA, 25 bp, Homo sapien
ggtcagctgtctgggtgatttggca

SEQ ID NO: 3172370 - DNA, 25 bp, Homo sapien
cactccacgtgaatcttctgacccg

SEQ ID NO: 3172371 - DNA, 25 bp, Homo sapien
ctccccatttgccttgtgggccgtc

SEQ ID NO: 3172372 - DNA, 25 bp, Homo sapien
gttccaatctatcagacatgattac

SEQ ID NO: 3172373 - DNA, 25 bp, Homo sapien
gcagttccaatctatcagacatgat

SEQ ID NO: 3172374 - DNA, 25 bp, Homo sapien
cagcagttccaatctatcagacatg

SEQ ID NO: 3172375 - DNA, 25 bp, Homo sapien
cagttccaatctatcagacatgatt

SEQ ID NO: 3172376 - DNA, 25 bp, Homo sapien
tactgcagcagttccgcattaggct

SEQ ID NO: 3172377 - DNA, 25 bp, Homo sapien
taacggctaagacaggaaccggtgc

SEQ ID NO: 3172378 - DNA, 25 bp, Homo sapien
caaaaggcgtggtttccataacaga

SEQ ID NO: 3172379 - DNA, 25 bp, Homo sapien
taatgtaatgtgaccctactgcagc

SEQ ID NO: 3172380 - DNA, 25 bp, Homo sapien
cacaaaggcataaaacaaggttcac

SEQ ID NO: 3172381 - DNA, 25 bp, Homo sapien
taaaacaaggttcaccagcagatgc

SEQ ID NO: 3172382 - DNA, 25 bp, Homo sapien
aaaggcataaaacaaggttcaccag

SEQ ID NO: 3172383 - DNA, 25 bp, Homo sapien
tgtccccacaaaggcataaaacaag

SEQ ID NO: 3172384 - DNA, 25 bp, Homo sapien
ctagagcttcttgaaagtggatgac

SEQ ID NO: 3172385 - DNA, 25 bp, Homo sapien
ttttggctcgaccatctagagcttc

SEQ ID NO: 3172386 - DNA, 25 bp, Homo sapien
cctggattttggctcgaccatctag

SEQ ID NO: 3172387 - DNA, 25 bp, Homo sapien
gcttcttgaaagtggatgacagtca

SEQ ID NO: 3172388 - DNA, 25 bp, Homo sapien
ggacttggtcttgggcagcataatt

SEQ ID NO: 3172389 - DNA, 25 bp, Homo sapien
aaatcagggtattgacttggacttg

SEQ ID NO: 3172390 - DNA, 25 bp, Homo sapien
gctagcaacgtaaggacatttcttc

SEQ ID NO: 3172391 - DNA, 25 bp, Homo sapien
taatttttgctagcaacgtaaggac

SEQ ID NO: 3172392 - DNA, 25 bp, Homo sapien
ctgtattggcatcagcccactcctg

SEQ ID NO: 3172393 - DNA, 25 bp, Homo sapien
tatactttaggtgtagccagtgagt

SEQ ID NO: 3172394 - DNA, 25 bp, Homo sapien
actcctgaggatcacattgtccttg

SEQ ID NO: 3172395 - DNA, 25 bp, Homo sapien
tccatcagggaagcacgtgccttgt

SEQ ID NO: 3172396 - DNA, 25 bp, Homo sapien
caattctctgaaagcgttcgcagtg

SEQ ID NO: 3172397 - DNA, 25 bp, Homo sapien
atgggagtagggcaggatgctggtg

SEQ ID NO: 3172398 - DNA, 25 bp, Homo sapien
ttctgggcatgggagtagggcagga

SEQ ID NO: 3172399 - DNA, 25 bp, Homo sapien
gtgctgctgaacaggagaactcgga

SEQ ID NO: 3172400 - DNA, 25 bp, Homo sapien
tgctgaacaggagaactcggagcat

SEQ ID NO: 3172401 - DNA, 25 bp, Homo sapien
gacatttgtgagcttgtgagcccac

SEQ ID NO: 3172402 - DNA, 25 bp, Homo sapien
tgcccttagaacattagttgccagg

SEQ ID NO: 3172403 - DNA, 25 bp, Homo sapien
tcatccagggttgacttaagaccat

SEQ ID NO: 3172404 - DNA, 25 bp, Homo sapien
gccaggtcatatcgtgcagagcaaa

SEQ ID NO: 3172405 - DNA, 25 bp, Homo sapien
ccctacaccctcttaaataattcat

SEQ ID NO: 3172406 - DNA, 25 bp, Homo sapien
gccctacaccctcttaaataattca

SEQ ID NO: 3172407 - DNA, 25 bp, Homo sapien
cacttattagaagcacatgtgtagt

SEQ ID NO: 3172408 - DNA, 25 bp, Homo sapien
tcagaattgcacttattagaagcac

SEQ ID NO: 3172409 - DNA, 25 bp, Homo sapien
tcttcagaattgcacttattagaag

SEQ ID NO: 3172410 - DNA, 25 bp, Homo sapien
gaattgcacttattagaagcacatg

SEQ ID NO: 3172411 - DNA, 25 bp, Homo sapien
gcttgggcttcactgctgtctgagc

SEQ ID NO: 3172412 - DNA, 25 bp, Homo sapien
gagaagtcctgtcattttagtgcgc

SEQ ID NO: 3172413 - DNA, 25 bp, Homo sapien
tctgagcttgtcctgcttttctgag

SEQ ID NO: 3172414 - DNA, 25 bp, Homo sapien
tagtgcgctctgagtgaatggcttg

SEQ ID NO: 3172415 - DNA, 25 bp, Homo sapien
gagatgtgtacagacggtaaacttc

SEQ ID NO: 3172416 - DNA, 25 bp, Homo sapien
ggtatgagatgtgtacagacggtaa

SEQ ID NO: 3172417 - DNA, 25 bp, Homo sapien
ttgagggtatgagatgtgtacagac

SEQ ID NO: 3172418 - DNA, 25 bp, Homo sapien
ctggttgagggtatgagatgtgtac

SEQ ID NO: 3172419 - DNA, 25 bp, Homo sapien
tattttcctgtatctcaaaggttac

SEQ ID NO: 3172420 - DNA, 25 bp, Homo sapien
cttattttcctgtatctcaaaggtt

SEQ ID NO: 3172421 - DNA, 25 bp, Homo sapien
ctgcttattttcctgtatctcaaag

SEQ ID NO: 3172422 - DNA, 25 bp, Homo sapien
tgcttattttcctgtatctcaaagg

SEQ ID NO: 3172423 - DNA, 25 bp, Homo sapien
gactggaagtccacgtgccaggcaa

SEQ ID NO: 3172424 - DNA, 25 bp, Homo sapien
tattctcaaccccagtcacggagga

SEQ ID NO: 3172425 - DNA, 25 bp, Homo sapien
tggagtcccgtggactggaagtcca

SEQ ID NO: 3172426 - DNA, 25 bp, Homo sapien
caggcaaaaggctctctctgcttca

SEQ ID NO: 3172427 - DNA, 25 bp, Homo sapien
gctcagtagtctgctcttgtttgga

SEQ ID NO: 3172428 - DNA, 25 bp, Homo sapien
aaatctgctcagtagtctgctcttg

SEQ ID NO: 3172429 - DNA, 25 bp, Homo sapien
gtgtcccaaatctgctcagtagtct

SEQ ID NO: 3172430 - DNA, 25 bp, Homo sapien
tctgctcttgtttggagttgagggt

SEQ ID NO: 3172431 - DNA, 25 bp, Homo sapien
ttaagctggaagaatagctggaatg

SEQ ID NO: 3172432 - DNA, 25 bp, Homo sapien
tcctgagttgtttgtggagcccttg

SEQ ID NO: 3172433 - DNA, 25 bp, Homo sapien
cctcctgagttgtttgtggagccct

SEQ ID NO: 3172434 - DNA, 25 bp, Homo sapien
cctgagttgtttgtggagcccttga

SEQ ID NO: 3172435 - DNA, 25 bp, Homo sapien
ctgagttgtttgtggagcccttgat

SEQ ID NO: 3172436 - DNA, 25 bp, Homo sapien
aagggatatctccacatcggtcagg

SEQ ID NO: 3172437 - DNA, 25 bp, Homo sapien
tacatctatataaagctttgggata

SEQ ID NO: 3172438 - DNA, 25 bp, Homo sapien
taaagctttgggatatactgtaaaa

SEQ ID NO: 3172439 - DNA, 25 bp, Homo sapien
cagggtccagatgctaagagctata

SEQ ID NO: 3172440 - DNA, 25 bp, Homo sapien
aatcatcgttacctgagatataaca

SEQ ID NO: 3172441 - DNA, 25 bp, Homo sapien
taaaatcatcgttacctgagatata

SEQ ID NO: 3172442 - DNA, 25 bp, Homo sapien
tagtgtgttaaaatcatcgttacct

SEQ ID NO: 3172443 - DNA, 25 bp, Homo sapien
tgtgttaaaatcatcgttacctgag

SEQ ID NO: 3172444 - DNA, 25 bp, Homo sapien
gaatgtagctgccttatgctgtgct

SEQ ID NO: 3172445 - DNA, 25 bp, Homo sapien
ggccctggactgaatgtagctgcct

SEQ ID NO: 3172446 - DNA, 25 bp, Homo sapien
gactgaatgtagctgccttatgctg

SEQ ID NO: 3172447 - DNA, 25 bp, Homo sapien
gtagctgccttatgctgtgctttta

SEQ ID NO: 3172448 - DNA, 25 bp, Homo sapien
cacccatttctgctgacaaaatctt

SEQ ID NO: 3172449 - DNA, 25 bp, Homo sapien
catttctgctgacaaaatcttcagg

SEQ ID NO: 3172450 - DNA, 25 bp, Homo sapien
cccatttctgctgacaaaatcttca

SEQ ID NO: 3172451 - DNA, 25 bp, Homo sapien
atttctgctgacaaaatcttcaggt

SEQ ID NO: 3172452 - DNA, 25 bp, Homo sapien
ggaattgattgccaactttcttaca

SEQ ID NO: 3172453 - DNA, 25 bp, Homo sapien
gattgccaactttcttacaacttgc

SEQ ID NO: 3172454 - DNA, 25 bp, Homo sapien
caccttggaattgattgccaacttt

SEQ ID NO: 3172455 - DNA, 25 bp, Homo sapien
caactttcttacaacttgcccttct

SEQ ID NO: 3172456 - DNA, 25 bp, Homo sapien
ctgctgaagtagtcaactctgttct

SEQ ID NO: 3172457 - DNA, 25 bp, Homo sapien
ggtcaaagtatctgaggaatcctgg

SEQ ID NO: 3172458 - DNA, 25 bp, Homo sapien
tcattaagcactggattgattggat

SEQ ID NO: 3172459 - DNA, 25 bp, Homo sapien
tcctttgcccattcaaggatttcct

SEQ ID NO: 3172460 - DNA, 25 bp, Homo sapien
cagtcagagtgccacatctatcctc

SEQ ID NO: 3172461 - DNA, 25 bp, Homo sapien
cttgtgcccaggcagggtgactgga

SEQ ID NO: 3172462 - DNA, 25 bp, Homo sapien
gtgcccaggcagggtgactggaatt

SEQ ID NO: 3172463 - DNA, 25 bp, Homo sapien
ccaggcagggtgactggaattttac

SEQ ID NO: 3172464 - DNA, 25 bp, Homo sapien
cccaggcagggtgactggaatttta

SEQ ID NO: 3172465 - DNA, 25 bp, Homo sapien
ttcttcataagctctaggggccagc

SEQ ID NO: 3172466 - DNA, 25 bp, Homo sapien
gttcagagaccccttgggagaaagc

SEQ ID NO: 3172467 - DNA, 25 bp, Homo sapien
tgttcagagaccccttgggagaaag

SEQ ID NO: 3172468 - DNA, 25 bp, Homo sapien
ctggcttcttcataagctctagggg

SEQ ID NO: 3172469 - DNA, 25 bp, Homo sapien
gaccagagccccttgttggcatgag

SEQ ID NO: 3172470 - DNA, 25 bp, Homo sapien
ggatgctctcctccattcagggaag

SEQ ID NO: 3172471 - DNA, 25 bp, Homo sapien
agttttgccccgttctccactgtgg

SEQ ID NO: 3172472 - DNA, 25 bp, Homo sapien
caatggttaccagtacctcttggac

SEQ ID NO: 3172473 - DNA, 25 bp, Homo sapien
ctctgtgaggttgcaagctctatac

SEQ ID NO: 3172474 - DNA, 25 bp, Homo sapien
gagctctgtgaggttgcaagctcta

SEQ ID NO: 3172475 - DNA, 25 bp, Homo sapien
agctctgtgaggttgcaagctctat

SEQ ID NO: 3172476 - DNA, 25 bp, Homo sapien
gctctgtgaggttgcaagctctata

SEQ ID NO: 3172477 - DNA, 25 bp, Homo sapien
tgcagagggcccttgccagcgacct

SEQ ID NO: 3172478 - DNA, 25 bp, Homo sapien
tccacctgtctccatgggaaagaca

SEQ ID NO: 3172479 - DNA, 25 bp, Homo sapien
gggaaagacaggtgccatgtccttt

SEQ ID NO: 3172480 - DNA, 25 bp, Homo sapien
aacagagttgcctgtggaaagaact

SEQ ID NO: 3172481 - DNA, 25 bp, Homo sapien
ttctgtgtttacaaaaggagttgtc

SEQ ID NO: 3172482 - DNA, 25 bp, Homo sapien
tgccacggactgtgcacctggtcct

SEQ ID NO: 3172483 - DNA, 25 bp, Homo sapien
cagtgtttcagggagagggctattt

SEQ ID NO: 3172484 - DNA, 25 bp, Homo sapien
tctgtgtttacaaaaggagttgtcc

SEQ ID NO: 3172485 - DNA, 25 bp, Homo sapien
tctcctctggtatgacagaatgcca

SEQ ID NO: 3172486 - DNA, 25 bp, Homo sapien
aagtcagccgtgtcagcgggaggaa

SEQ ID NO: 3172487 - DNA, 25 bp, Homo sapien
agttctcctctggtatgacagaatg

SEQ ID NO: 3172488 - DNA, 25 bp, Homo sapien
cgtgtcagcgggaggaaattcctca

SEQ ID NO: 3172489 - DNA, 25 bp, Homo sapien
cctcttttaatgtctagatggtgtt

SEQ ID NO: 3172490 - DNA, 25 bp, Homo sapien
tgaaactatattgtgtctggcttcc

SEQ ID NO: 3172491 - DNA, 25 bp, Homo sapien
tccacaaagctggttgggcagattc

SEQ ID NO: 3172492 - DNA, 25 bp, Homo sapien
ttaatgtctagatggtgttcagtga

SEQ ID NO: 3172493 - DNA, 25 bp, Homo sapien
taaatatatacatggcttcagctac

SEQ ID NO: 3172494 - DNA, 25 bp, Homo sapien
tctttgaaggaggggttggctttgc

SEQ ID NO: 3172495 - DNA, 25 bp, Homo sapien
cagctacttccccagcatcatactc

SEQ ID NO: 3172496 - DNA, 25 bp, Homo sapien
ttggctttgcttggagatataaata

SEQ ID NO: 3172497 - DNA, 25 bp, Homo sapien
tacatgtccaggtctaataaattac

SEQ ID NO: 3172498 - DNA, 25 bp, Homo sapien
ttacatgtccaggtctaataaatta

SEQ ID NO: 3172499 - DNA, 25 bp, Homo sapien
catggattccaggaacaatgaatgt

SEQ ID NO: 3172500 - DNA, 25 bp, Homo sapien
gattccaggaacaatgaatgtgtga

SEQ ID NO: 3172501 - DNA, 25 bp, Homo sapien
tattggaactgatagcagaagtcct

SEQ ID NO: 3172502 - DNA, 25 bp, Homo sapien
atttattggaactgatagcagaagt

SEQ ID NO: 3172503 - DNA, 25 bp, Homo sapien
cctcaacaagctgactgatctttgc

SEQ ID NO: 3172504 - DNA, 25 bp, Homo sapien
caagctgactgatctttgcaagaca

SEQ ID NO: 3172505 - DNA, 25 bp, Homo sapien
catggccctttaaggttcacttgca

SEQ ID NO: 3172506 - DNA, 25 bp, Homo sapien
gatctttgcaagacatggcccttta

SEQ ID NO: 3172507 - DNA, 25 bp, Homo sapien
ttctttactgctttcagggccaggc

SEQ ID NO: 3172508 - DNA, 25 bp, Homo sapien
ggagcagctccattgatatcctggg

SEQ ID NO: 3172509 - DNA, 25 bp, Homo sapien
gcttaaaacccagtagccctctgct

SEQ ID NO: 3172510 - DNA, 25 bp, Homo sapien
gccctctgctgtcatgtgcttaaca

SEQ ID NO: 3172511 - DNA, 25 bp, Homo sapien
ctgggtttaggtagtaattctgtat

SEQ ID NO: 3172512 - DNA, 25 bp, Homo sapien
cctgctctgcaccatagtcgaactt

SEQ ID NO: 3172513 - DNA, 25 bp, Homo sapien
ccactataagggctagtactgggtt

SEQ ID NO: 3172514 - DNA, 25 bp, Homo sapien
tctgtatacagcctgctttgttaca

SEQ ID NO: 3172515 - DNA, 25 bp, Homo sapien
tgtaactggaagtagccacatgacc

SEQ ID NO: 3172516 - DNA, 25 bp, Homo sapien
tcatgtaactggaagtagccacatg

SEQ ID NO: 3172517 - DNA, 25 bp, Homo sapien
ttcatgtaactggaagtagccacat

SEQ ID NO: 3172518 - DNA, 25 bp, Homo sapien
atgtaactggaagtagccacatgac

SEQ ID NO: 3172519 - DNA, 25 bp, Homo sapien
aatggcaggattatgatgggaagag

SEQ ID NO: 3172520 - DNA, 25 bp, Homo sapien
ttaaaagcaacagagggaataggag

SEQ ID NO: 3172521 - DNA, 25 bp, Homo sapien
gatattctggtgtcatgtaaactga

SEQ ID NO: 3172522 - DNA, 25 bp, Homo sapien
ctgtggaaagagtgctcgatattct

SEQ ID NO: 3172523 - DNA, 25 bp, Homo sapien
aaactgtctccaaaacggatgaagg

SEQ ID NO: 3172524 - DNA, 25 bp, Homo sapien
tatgatttagttcacagttaaaact

SEQ ID NO: 3172525 - DNA, 25 bp, Homo sapien
cttatgatttagttcacagttaaaa

SEQ ID NO: 3172526 - DNA, 25 bp, Homo sapien
caaaacggatgaaggttgactttct

SEQ ID NO: 3172527 - DNA, 25 bp, Homo sapien
ttctctctggtgacccatctacttc

SEQ ID NO: 3172528 - DNA, 25 bp, Homo sapien
gaagcacttagctgtgtcccggctt

SEQ ID NO: 3172529 - DNA, 25 bp, Homo sapien
ctcatcagtgcctccctttggaagc

SEQ ID NO: 3172530 - DNA, 25 bp, Homo sapien
gctcctagcctgtctggattctgtg

SEQ ID NO: 3172531 - DNA, 25 bp, Homo sapien
tccagctgggctaaggaagcagtag

SEQ ID NO: 3172532 - DNA, 25 bp, Homo sapien
gaagcagtagccagacccagcctct

SEQ ID NO: 3172533 - DNA, 25 bp, Homo sapien
ctccagctgggctaaggaagcagta

SEQ ID NO: 3172534 - DNA, 25 bp, Homo sapien
taaggaagcagtagccagacccagc

SEQ ID NO: 3172535 - DNA, 25 bp, Homo sapien
ctccctgttttctctcgtatgtcta

SEQ ID NO: 3172536 - DNA, 25 bp, Homo sapien
cgtatgtctaacctccacttgacct

SEQ ID NO: 3172537 - DNA, 25 bp, Homo sapien
cttgtctctgagtctggatccttac

SEQ ID NO: 3172538 - DNA, 25 bp, Homo sapien
tctacctcttgtctctgagtctgga

SEQ ID NO: 3172539 - DNA, 25 bp, Homo sapien
gatttctggcaggaatcaaccaatg

SEQ ID NO: 3172540 - DNA, 25 bp, Homo sapien
ggcaggaatcaaccaatggaaggtt

SEQ ID NO: 3172541 - DNA, 25 bp, Homo sapien
tgtcagttgatttctggcaggaatc

SEQ ID NO: 3172542 - DNA, 25 bp, Homo sapien
ttgtcagttgatttctggcaggaat

SEQ ID NO: 3172543 - DNA, 25 bp, Homo sapien
tgcagagcagccctttaagatgttt

SEQ ID NO: 3172544 - DNA, 25 bp, Homo sapien
gcagagcagccctttaagatgtttt

SEQ ID NO: 3172545 - DNA, 25 bp, Homo sapien
ttgcagagcagccctttaagatgtt

SEQ ID NO: 3172546 - DNA, 25 bp, Homo sapien
gaagcagagagtgaggaggagaggg

SEQ ID NO: 3172547 - DNA, 25 bp, Homo sapien
tgaagcagagagtgaggaggagagg

SEQ ID NO: 3172548 - DNA, 25 bp, Homo sapien
ctgaagcagagagtgaggaggagag

SEQ ID NO: 3172549 - DNA, 25 bp, Homo sapien
taagagcctttatcagcagagccat

SEQ ID NO: 3172550 - DNA, 25 bp, Homo sapien
gccttcctagccatcattatactaa

SEQ ID NO: 3172551 - DNA, 25 bp, Homo sapien
catgtttttcctttgcgatgctcca

SEQ ID NO: 3172552 - DNA, 25 bp, Homo sapien
ctccatgaaatggtaaagagcccag

SEQ ID NO: 3172553 - DNA, 25 bp, Homo sapien
gcttacgttacagtcaagcatctca

SEQ ID NO: 3172554 - DNA, 25 bp, Homo sapien
tcccaaagatagactgcatgttcag

SEQ ID NO: 3172555 - DNA, 25 bp, Homo sapien
ctgagacatcccaaagatagactgc

SEQ ID NO: 3172556 - DNA, 25 bp, Homo sapien
gcatgttcagatttgcttacgttac

SEQ ID NO: 3172557 - DNA, 25 bp, Homo sapien
ttctctcccttaattttcaaacatc

SEQ ID NO: 3172558 - DNA, 25 bp, Homo sapien
cttctctcccttaattttcaaacat

SEQ ID NO: 3172559 - DNA, 25 bp, Homo sapien
actggctccggtcaagggtctcctt

SEQ ID NO: 3172560 - DNA, 25 bp, Homo sapien
ccactggctccggtcaagggtctcc

SEQ ID NO: 3172561 - DNA, 25 bp, Homo sapien
tatcccactggctccggtcaagggt

SEQ ID NO: 3172562 - DNA, 25 bp, Homo sapien
caaggtgtgtactccccccatatcc

SEQ ID NO: 3172563 - DNA, 25 bp, Homo sapien
aagatcctcatgagaaaattccaag

SEQ ID NO: 3172564 - DNA, 25 bp, Homo sapien
catagacatgtggtcaagatcttgt

SEQ ID NO: 3172565 - DNA, 25 bp, Homo sapien
tgtagtggtggtgtccaagatcctc

SEQ ID NO: 3172566 - DNA, 25 bp, Homo sapien
ccttggaggtcagcaaggtgtagtg

SEQ ID NO: 3172567 - DNA, 25 bp, Homo sapien
ttccttctttcttttgaggcagtta

SEQ ID NO: 3172568 - DNA, 25 bp, Homo sapien
cttctttcttttgaggcagttattc

SEQ ID NO: 3172569 - DNA, 25 bp, Homo sapien
ccttctttcttttgaggcagttatt

SEQ ID NO: 3172570 - DNA, 25 bp, Homo sapien
tctttcttttgaggcagttattcat

SEQ ID NO: 3172571 - DNA, 25 bp, Homo sapien
gtgaagaggacaactgtgctgtcat

SEQ ID NO: 3172572 - DNA, 25 bp, Homo sapien
ctgtgaagaggacaactgtgctgtc

SEQ ID NO: 3172573 - DNA, 25 bp, Homo sapien
tgtgaagaggacaactgtgctgtca

SEQ ID NO: 3172574 - DNA, 25 bp, Homo sapien
ccaagttgcgggcatgatggcttca

SEQ ID NO: 3172575 - DNA, 25 bp, Homo sapien
tcctattgatgatgagcacacgact

SEQ ID NO: 3172576 - DNA, 25 bp, Homo sapien
tcaaggttacttcgtggagctggag

SEQ ID NO: 3172577 - DNA, 25 bp, Homo sapien
ctggagcactggctgcgaaggccct

SEQ ID NO: 3172578 - DNA, 25 bp, Homo sapien
gaaggacatatccagttgcgagtgc

SEQ ID NO: 3172579 - DNA, 25 bp, Homo sapien
acaaagtgctctaggcagccagtac

SEQ ID NO: 3172580 - DNA, 25 bp, Homo sapien
ttcaacgataggatggcgaagccag

SEQ ID NO: 3172581 - DNA, 25 bp, Homo sapien
gatatagcgtttgtgctcaccagcc

SEQ ID NO: 3172582 - DNA, 25 bp, Homo sapien
ggagtgcctctacatgtctgctgct

SEQ ID NO: 3172583 - DNA, 25 bp, Homo sapien
ggaagtggcttgagctcagcatctc

SEQ ID NO: 3172584 - DNA, 25 bp, Homo sapien
tcgcatattacttagctggagcagc

SEQ ID NO: 3172585 - DNA, 25 bp, Homo sapien
cacttggatttcctaggagtgcctc

SEQ ID NO: 3172586 - DNA, 25 bp, Homo sapien
tagatgaggcatccaatgcgatgga

SEQ ID NO: 3172587 - DNA, 25 bp, Homo sapien
ccaatgcgatggaactagtttgaat

SEQ ID NO: 3172588 - DNA, 25 bp, Homo sapien
tatatccttgtttagatgaggcatc

SEQ ID NO: 3172589 - DNA, 25 bp, Homo sapien
ggcatccaatgcgatggaactagtt

SEQ ID NO: 3172590 - DNA, 25 bp, Homo sapien
ctcacttcttgtcccagcacagccc

SEQ ID NO: 3172591 - DNA, 25 bp, Homo sapien
tcacttcttgtcccagcacagccca

SEQ ID NO: 3172592 - DNA, 25 bp, Homo sapien
cacttcttgtcccagcacagcccat

SEQ ID NO: 3172593 - DNA, 25 bp, Homo sapien
ttgggtgcctggaaatatgggaatt

SEQ ID NO: 3172594 - DNA, 25 bp, Homo sapien
ggaaagtaatgatgccgtacttctc

SEQ ID NO: 3172595 - DNA, 25 bp, Homo sapien
tttgaacttgactggaagtcaagtg

SEQ ID NO: 3172596 - DNA, 25 bp, Homo sapien
gaatttactttcatggagattattt

SEQ ID NO: 3172597 - DNA, 25 bp, Homo sapien
ttgttcccatccttctctatagctg

SEQ ID NO: 3172598 - DNA, 25 bp, Homo sapien
tgctactctacccaagatcttgtcc

SEQ ID NO: 3172599 - DNA, 25 bp, Homo sapien
tctatagctgctactctacccaaga

SEQ ID NO: 3172600 - DNA, 25 bp, Homo sapien
catccttctctatagctgctactct

SEQ ID NO: 3172601 - DNA, 25 bp, Homo sapien
agaaccctgctcctagagtccaatc

SEQ ID NO: 3172602 - DNA, 25 bp, Homo sapien
ccctgctcctagagtccaatcccac

SEQ ID NO: 3172603 - DNA, 25 bp, Homo sapien
tgctcctagagtccaatcccactta

SEQ ID NO: 3172604 - DNA, 25 bp, Homo sapien
cagaaccctgctcctagagtccaat

SEQ ID NO: 3172605 - DNA, 25 bp, Homo sapien
cctagagaaagaatgggcttgctgt

SEQ ID NO: 3172606 - DNA, 25 bp, Homo sapien
gaataatgattgtgccacaccaagg

SEQ ID NO: 3172607 - DNA, 25 bp, Homo sapien
gatatttggaataatgattgtgcca

SEQ ID NO: 3172608 - DNA, 25 bp, Homo sapien
gcagagcacctagagaaagaatggg

SEQ ID NO: 3172609 - DNA, 25 bp, Homo sapien
ttgcacaccaagttgttgagaacaa

SEQ ID NO: 3172610 - DNA, 25 bp, Homo sapien
aagtttgcacaccaagttgttgaga

SEQ ID NO: 3172611 - DNA, 25 bp, Homo sapien
tcttagtaaagtatttaagtttgca

SEQ ID NO: 3172612 - DNA, 25 bp, Homo sapien
gtaaagtatttaagtttgcacacca

SEQ ID NO: 3172613 - DNA, 25 bp, Homo sapien
ggttagaatgtggacaataaagtag

SEQ ID NO: 3172614 - DNA, 25 bp, Homo sapien
tggttagaatgtggacaataaagta

SEQ ID NO: 3172615 - DNA, 25 bp, Homo sapien
tttggttagaatgtggacaataaag

SEQ ID NO: 3172616 - DNA, 25 bp, Homo sapien
cattttggttagaatgtggacaata

SEQ ID NO: 3172617 - DNA, 25 bp, Homo sapien
aagttcatctaattgctcacagctg

SEQ ID NO: 3172618 - DNA, 25 bp, Homo sapien
caaatagcaactcctaaggcaagtt

SEQ ID NO: 3172619 - DNA, 25 bp, Homo sapien
aatcaggtgaacaaatagcaactcc

SEQ ID NO: 3172620 - DNA, 25 bp, Homo sapien
gggatttgccaaatcaggtgaacaa

SEQ ID NO: 3172621 - DNA, 25 bp, Homo sapien
ccagcacagggcaaactccattaaa

SEQ ID NO: 3172622 - DNA, 25 bp, Homo sapien
ctccattaaagttaacttgtgtctt

SEQ ID NO: 3172623 - DNA, 25 bp, Homo sapien
cacagggcaaactccattaaagtta

SEQ ID NO: 3172624 - DNA, 25 bp, Homo sapien
atctccagcacagggcaaactccat

SEQ ID NO: 3172625 - DNA, 25 bp, Homo sapien
ctaggcggagacctggacctctgga

SEQ ID NO: 3172626 - DNA, 25 bp, Homo sapien
tttccacctggccatcgggcgggac

SEQ ID NO: 3172627 - DNA, 25 bp, Homo sapien
tggacctcagtgaatcttttttggg

SEQ ID NO: 3172628 - DNA, 25 bp, Homo sapien
tggacctctggagacgggtttctca

SEQ ID NO: 3172629 - DNA, 25 bp, Homo sapien
ggcggcgccggccagtgcaggagct

SEQ ID NO: 3172630 - DNA, 25 bp, Homo sapien
gcggcgccggccagtgcaggagctc

SEQ ID NO: 3172631 - DNA, 25 bp, Homo sapien
cggcgccggccagtgcaggagctcc

SEQ ID NO: 3172632 - DNA, 25 bp, Homo sapien
ggcgccggccagtgcaggagctcct

SEQ ID NO: 3172633 - DNA, 25 bp, Homo sapien
ctccgaggcttagggagctttctcc

SEQ ID NO: 3172634 - DNA, 25 bp, Homo sapien
agttcctcctccgaggcttagggag

SEQ ID NO: 3172635 - DNA, 25 bp, Homo sapien
tttcactggtttgggataatgtgag

SEQ ID NO: 3172636 - DNA, 25 bp, Homo sapien
cctcctccgaggcttagggagcttt

SEQ ID NO: 3172637 - DNA, 25 bp, Homo sapien
ttttccatattagagaatgtctcct

SEQ ID NO: 3172638 - DNA, 25 bp, Homo sapien
aaggttaggtctatctgtttgctca

SEQ ID NO: 3172639 - DNA, 25 bp, Homo sapien
tgaccattagctgattagactgacc

SEQ ID NO: 3172640 - DNA, 25 bp, Homo sapien
tatactgcaaagattctcccaggga

SEQ ID NO: 3172641 - DNA, 25 bp, Homo sapien
tgacctttatgctctttgatctctg

SEQ ID NO: 3172642 - DNA, 25 bp, Homo sapien
ctgtgacctttatgctctttgatct

SEQ ID NO: 3172643 - DNA, 25 bp, Homo sapien
tgtgacctttatgctctttgatctc

SEQ ID NO: 3172644 - DNA, 25 bp, Homo sapien
gtgacctttatgctctttgatctct

SEQ ID NO: 3172645 - DNA, 25 bp, Homo sapien
cgagtatcaaacacagagcagatct

SEQ ID NO: 3172646 - DNA, 25 bp, Homo sapien
gtatcaaacacagagcagatctgga

SEQ ID NO: 3172647 - DNA, 25 bp, Homo sapien
gagtatcaaacacagagcagatctg

SEQ ID NO: 3172648 - DNA, 25 bp, Homo sapien
atcaaacacagagcagatctggacc

SEQ ID NO: 3172649 - DNA, 25 bp, Homo sapien
gggcaaaccactcaagctccctgtg

SEQ ID NO: 3172650 - DNA, 25 bp, Homo sapien
cagagtctgagtgatttgtaggcat

SEQ ID NO: 3172651 - DNA, 25 bp, Homo sapien
tctgcagtgttgtatcaggagggca

SEQ ID NO: 3172652 - DNA, 25 bp, Homo sapien
aatattccttgtatgagcttcgacc

SEQ ID NO: 3172653 - DNA, 25 bp, Homo sapien
cagtgccatgtgtgcaaacttcact

SEQ ID NO: 3172654 - DNA, 25 bp, Homo sapien
gcagaatcagtgccatgtgtgcaaa

SEQ ID NO: 3172655 - DNA, 25 bp, Homo sapien
gtgccatgtgtgcaaacttcactgt

SEQ ID NO: 3172656 - DNA, 25 bp, Homo sapien
gaatcagtgccatgtgtgcaaactt

SEQ ID NO: 3172657 - DNA, 25 bp, Homo sapien
gatgaatgccagataagtttctgta

SEQ ID NO: 3172658 - DNA, 25 bp, Homo sapien
ctgtatcgacagtttggtaaaagaa

SEQ ID NO: 3172659 - DNA, 25 bp, Homo sapien
gccagataagtttctgtataaaata

SEQ ID NO: 3172660 - DNA, 25 bp, Homo sapien
ttggtctcctccattaacagtaggt

SEQ ID NO: 3172661 - DNA, 25 bp, Homo sapien
atatggcagaagggtaatgcaaatt

SEQ ID NO: 3172662 - DNA, 25 bp, Homo sapien
gaacatatggcagaagggtaatgca

SEQ ID NO: 3172663 - DNA, 25 bp, Homo sapien
aacatatggcagaagggtaatgcaa

SEQ ID NO: 3172664 - DNA, 25 bp, Homo sapien
catatggcagaagggtaatgcaaat

SEQ ID NO: 3172665 - DNA, 25 bp, Homo sapien
tgtctgtctcatggcaattactctg

SEQ ID NO: 3172666 - DNA, 25 bp, Homo sapien
tgtttgtcctgagagtggttcctac

SEQ ID NO: 3172667 - DNA, 25 bp, Homo sapien
tactctgatactacaagatggcaac

SEQ ID NO: 3172668 - DNA, 25 bp, Homo sapien
tggttcctacatggctgatgcccac

SEQ ID NO: 3172669 - DNA, 25 bp, Homo sapien
gccacagtgaatccattacttgttc

SEQ ID NO: 3172670 - DNA, 25 bp, Homo sapien
tgagccacagtgaatccattacttg

SEQ ID NO: 3172671 - DNA, 25 bp, Homo sapien
ccctgagccacagtgaatccattac

SEQ ID NO: 3172672 - DNA, 25 bp, Homo sapien
cagtgaatccattacttgttcccat

SEQ ID NO: 3172673 - DNA, 25 bp, Homo sapien
atgtctcatgacactgcagttctta

SEQ ID NO: 3172674 - DNA, 25 bp, Homo sapien
catgacactgcagttcttacttaaa

SEQ ID NO: 3172675 - DNA, 25 bp, Homo sapien
tgacactgcagttcttacttaaatt

SEQ ID NO: 3172676 - DNA, 25 bp, Homo sapien
gaagatgtctcatgacactgcagtt

SEQ ID NO: 3172677 - DNA, 25 bp, Homo sapien
gcctttggccgcatactcatttcca

SEQ ID NO: 3172678 - DNA, 25 bp, Homo sapien
ccagcttcactcatgacaacagttc

SEQ ID NO: 3172679 - DNA, 25 bp, Homo sapien
agattttgcctttggccgcatactc

SEQ ID NO: 3172680 - DNA, 25 bp, Homo sapien
cactcatgacaacagttctcttttt

SEQ ID NO: 3172681 - DNA, 25 bp, Homo sapien
ggttctcataattcctactccaaga

SEQ ID NO: 3172682 - DNA, 25 bp, Homo sapien
tcagtcctggttaggcaaggggtcc

SEQ ID NO: 3172683 - DNA, 25 bp, Homo sapien
ggaattctcgtttcaccagatcctc

SEQ ID NO: 3172684 - DNA, 25 bp, Homo sapien
tactccaagaaccagttaggaattc

SEQ ID NO: 3172685 - DNA, 25 bp, Homo sapien
gttctggttcattcggatcatggcc

SEQ ID NO: 3172686 - DNA, 25 bp, Homo sapien
gcagtttcacagcttagactaccaa

SEQ ID NO: 3172687 - DNA, 25 bp, Homo sapien
caactgttctggttcattcggatca

SEQ ID NO: 3172688 - DNA, 25 bp, Homo sapien
cagcttagactaccaatcaacagtt

SEQ ID NO: 3172689 - DNA, 25 bp, Homo sapien
cacaaaatgaaagcccctggaacgt

SEQ ID NO: 3172690 - DNA, 25 bp, Homo sapien
gaacgtttggtttggaggtctctca

SEQ ID NO: 3172691 - DNA, 25 bp, Homo sapien
aacgtttggtttggaggtctctcat

SEQ ID NO: 3172692 - DNA, 25 bp, Homo sapien
tcaacacaagaataagtcacaaaat

SEQ ID NO: 3172693 - DNA, 25 bp, Homo sapien
taaacgcccatcaacctcgtgtggt

SEQ ID NO: 3172694 - DNA, 25 bp, Homo sapien
tctttggttccactaaacgcccatc

SEQ ID NO: 3172695 - DNA, 25 bp, Homo sapien
actaaacgcccatcaacctcgtgtg

SEQ ID NO: 3172696 - DNA, 25 bp, Homo sapien
ccactaaacgcccatcaacctcgtg

SEQ ID NO: 3172697 - DNA, 25 bp, Homo sapien
gctttacagaatcctctgtagaaac

SEQ ID NO: 3172698 - DNA, 25 bp, Homo sapien
ccaggctttacagaatcctctgtag

SEQ ID NO: 3172699 - DNA, 25 bp, Homo sapien
caggctttacagaatcctctgtaga

SEQ ID NO: 3172700 - DNA, 25 bp, Homo sapien
ttagagaccaggctttacagaatcc

SEQ ID NO: 3172701 - DNA, 25 bp, Homo sapien
ttctcttttttccattctgcctatc

SEQ ID NO: 3172702 - DNA, 25 bp, Homo sapien
tatcagctgtatcatgatcattaaa

SEQ ID NO: 3172703 - DNA, 25 bp, Homo sapien
ttctgcctatcttccataacttcta

SEQ ID NO: 3172704 - DNA, 25 bp, Homo sapien
gtccatgacccctctgtgacccagc

SEQ ID NO: 3172705 - DNA, 25 bp, Homo sapien
tcctccatgactacctctgctgcca

SEQ ID NO: 3172706 - DNA, 25 bp, Homo sapien
ctccaagtccattatatccaccatc

SEQ ID NO: 3172707 - DNA, 25 bp, Homo sapien
cctcctccatgactacctctgctgc

SEQ ID NO: 3172708 - DNA, 25 bp, Homo sapien
tcacctcctccatgactacctctgc

SEQ ID NO: 3172709 - DNA, 25 bp, Homo sapien
ggagaacagattccccttaaactga

SEQ ID NO: 3172710 - DNA, 25 bp, Homo sapien
agcacccattcatgtcatggtttgg

SEQ ID NO: 3172711 - DNA, 25 bp, Homo sapien
tggaaatggggagaacagattcccc

SEQ ID NO: 3172712 - DNA, 25 bp, Homo sapien
taaactgaaagtcagcaggtgtttc

SEQ ID NO: 3172713 - DNA, 25 bp, Homo sapien
aactttactcttatggtgggccagg

SEQ ID NO: 3172714 - DNA, 25 bp, Homo sapien
ctcagggcaccgaaagagagcgttc

SEQ ID NO: 3172715 - DNA, 25 bp, Homo sapien
cacatagtctttccattagggtagc

SEQ ID NO: 3172716 - DNA, 25 bp, Homo sapien
ggtacttgctaataccccattgggc

SEQ ID NO: 3172717 - DNA, 25 bp, Homo sapien
ttcatcgtaatactggcatattgca

SEQ ID NO: 3172718 - DNA, 25 bp, Homo sapien
tactggcatattgcattcttcttga

SEQ ID NO: 3172719 - DNA, 25 bp, Homo sapien
tttgctgattcatcgtaatactggc

SEQ ID NO: 3172720 - DNA, 25 bp, Homo sapien
ggcatattgcattcttcttgaccac

SEQ ID NO: 3172721 - DNA, 25 bp, Homo sapien
tatatgtgctgccaaagtgagcaca

SEQ ID NO: 3172722 - DNA, 25 bp, Homo sapien
taatcttctttgtgtcattccaatt

SEQ ID NO: 3172723 - DNA, 25 bp, Homo sapien
ttagtatatgtgctgccaaagtgag

SEQ ID NO: 3172724 - DNA, 25 bp, Homo sapien
gagtcgtccttgtgcaggtgccatg

SEQ ID NO: 3172725 - DNA, 25 bp, Homo sapien
atctcactggtacacggctgcttcc

SEQ ID NO: 3172726 - DNA, 25 bp, Homo sapien
cagggagtttgatcaggacgaggca

SEQ ID NO: 3172727 - DNA, 25 bp, Homo sapien
ctgcctggaacccttaggcacatct

SEQ ID NO: 3172728 - DNA, 25 bp, Homo sapien
ccgtaggataagcagggagtttgat

SEQ ID NO: 3172729 - DNA, 25 bp, Homo sapien
ctgtactccccttccagtgccaatt

SEQ ID NO: 3172730 - DNA, 25 bp, Homo sapien
ccttccagtgccaatttgctcagac

SEQ ID NO: 3172731 - DNA, 25 bp, Homo sapien
ccccttccagtgccaatttgctcag

SEQ ID NO: 3172732 - DNA, 25 bp, Homo sapien
gtactccccttccagtgccaatttg

SEQ ID NO: 3172733 - DNA, 25 bp, Homo sapien
tccagttgtaccagcaagtggtgga

SEQ ID NO: 3172734 - DNA, 25 bp, Homo sapien
tgtctcccttagttacacaatgtgg

SEQ ID NO: 3172735 - DNA, 25 bp, Homo sapien
aatagagcatttaggtgagggtaag

SEQ ID NO: 3172736 - DNA, 25 bp, Homo sapien
taaggggtgaggctcctctgttcct

SEQ ID NO: 3172737 - DNA, 25 bp, Homo sapien
aatcaggtgctagtgcctctttgac

SEQ ID NO: 3172738 - DNA, 25 bp, Homo sapien
taatcaggtgctagtgcctctttga

SEQ ID NO: 3172739 - DNA, 25 bp, Homo sapien
ttaatcaggtgctagtgcctctttg

SEQ ID NO: 3172740 - DNA, 25 bp, Homo sapien
tcaaaaacatcctttaggcacagca

SEQ ID NO: 3172741 - DNA, 25 bp, Homo sapien
ccacaggccagctctatatgtaggt

SEQ ID NO: 3172742 - DNA, 25 bp, Homo sapien
taggtgggatagaaaatggcccaaa

SEQ ID NO: 3172743 - DNA, 25 bp, Homo sapien
ccagctctatatgtaggtgggatag

SEQ ID NO: 3172744 - DNA, 25 bp, Homo sapien
catgagtcgttttcctaaacctggg

SEQ ID NO: 3172745 - DNA, 25 bp, Homo sapien
acctctgggcttctgttagactggc

SEQ ID NO: 3172746 - DNA, 25 bp, Homo sapien
ttctgcttagcatgagtcgttttcc

SEQ ID NO: 3172747 - DNA, 25 bp, Homo sapien
ggctgactctaagcccaggtttcat

SEQ ID NO: 3172748 - DNA, 25 bp, Homo sapien
agttttccccgatttctgcagcacc

SEQ ID NO: 3172749 - DNA, 25 bp, Homo sapien
gttttccccgatttctgcagcacct

SEQ ID NO: 3172750 - DNA, 25 bp, Homo sapien
ccttgtatagttgtggccttctgcc

SEQ ID NO: 3172751 - DNA, 25 bp, Homo sapien
aggtccttgtatagttgtggccttc

SEQ ID NO: 3172752 - DNA, 25 bp, Homo sapien
cttcaggtccttgtatagttgtggc

SEQ ID NO: 3172753 - DNA, 25 bp, Homo sapien
cctcatgaccatcccactcactgct

SEQ ID NO: 3172754 - DNA, 25 bp, Homo sapien
tattctctatgatggccttcagctc

SEQ ID NO: 3172755 - DNA, 25 bp, Homo sapien
ggagatcattattctctatgatggc

SEQ ID NO: 3172756 - DNA, 25 bp, Homo sapien
cattattctctatgatggccttcag

SEQ ID NO: 3172757 - DNA, 25 bp, Homo sapien
cacatagagccagtatgactattat

SEQ ID NO: 3172758 - DNA, 25 bp, Homo sapien
gctgaactgggtaatgtacttttcc

SEQ ID NO: 3172759 - DNA, 25 bp, Homo sapien
actgtcacagtccacgagtttccac

SEQ ID NO: 3172760 - DNA, 25 bp, Homo sapien
tcacagcccgatcagcaagtttctc

SEQ ID NO: 3172761 - DNA, 25 bp, Homo sapien
cggagagattgtggttcagtttgct

SEQ ID NO: 3172762 - DNA, 25 bp, Homo sapien
tcggagagattgtggttcagtttgc

SEQ ID NO: 3172763 - DNA, 25 bp, Homo sapien
agagattgtggttcagtttgctcat

SEQ ID NO: 3172764 - DNA, 25 bp, Homo sapien
cacctcggagagattgtggttcagt

SEQ ID NO: 3172765 - DNA, 25 bp, Homo sapien
tcaccacaaagactttactggaatg

SEQ ID NO: 3172766 - DNA, 25 bp, Homo sapien
gaaatgactaaagagcgcctgctgc

SEQ ID NO: 3172767 - DNA, 25 bp, Homo sapien
tgctgctgcttgatagtctcttcac

SEQ ID NO: 3172768 - DNA, 25 bp, Homo sapien
gactttactggaatgttgcttctcc

SEQ ID NO: 3172769 - DNA, 25 bp, Homo sapien
tcagatttgtcacctgcggtgcggg

SEQ ID NO: 3172770 - DNA, 25 bp, Homo sapien
cttctgcggcagatgataaagggtg

SEQ ID NO: 3172771 - DNA, 25 bp, Homo sapien
tgtcctgaagggcttagggctccac

SEQ ID NO: 3172772 - DNA, 25 bp, Homo sapien
ccgttgcaggttagtagaggctctt

SEQ ID NO: 3172773 - DNA, 25 bp, Homo sapien
gagttgtgcattttcacttgtagat

SEQ ID NO: 3172774 - DNA, 25 bp, Homo sapien
tcagagttgtgcattttcacttgta

SEQ ID NO: 3172775 - DNA, 25 bp, Homo sapien
gttgtgcattttcacttgtagatac

SEQ ID NO: 3172776 - DNA, 25 bp, Homo sapien
cagagttgtgcattttcacttgtag

SEQ ID NO: 3172777 - DNA, 25 bp, Homo sapien
caagtgtctgtgtctatagatactt

SEQ ID NO: 3172778 - DNA, 25 bp, Homo sapien
ctctggacccaaccgtccgggacag

SEQ ID NO: 3172779 - DNA, 25 bp, Homo sapien
tctggacccaaccgtccgggacagc

SEQ ID NO: 3172780 - DNA, 25 bp, Homo sapien
cgggacagcctcggggcggtgaccg

SEQ ID NO: 3172781 - DNA, 25 bp, Homo sapien
cgtccgggacagcctcggggcggtg

SEQ ID NO: 3172782 - DNA, 25 bp, Homo sapien
gtgtcagctccgctaggaccgctcg

SEQ ID NO: 3172783 - DNA, 25 bp, Homo sapien
cggccattagcaatgcagctgtaca

SEQ ID NO: 3172784 - DNA, 25 bp, Homo sapien
gctaggaccgctcggccattagcaa

SEQ ID NO: 3172785 - DNA, 25 bp, Homo sapien
tggtaagaacctccagtcagtgtca

SEQ ID NO: 3172786 - DNA, 25 bp, Homo sapien
gagcaggttccggaccacctcgcag

SEQ ID NO: 3172787 - DNA, 25 bp, Homo sapien
ggcagccgccgggacgccagcctct

SEQ ID NO: 3172788 - DNA, 25 bp, Homo sapien
ggcggtggcgtggatccggaggtac

SEQ ID NO: 3172789 - DNA, 25 bp, Homo sapien
gcgggagcttgtgtcccccgagcag

SEQ ID NO: 3172790 - DNA, 25 bp, Homo sapien
cagcgccagctctgtcccctaggtg

SEQ ID NO: 3172791 - DNA, 25 bp, Homo sapien
agcgccagctctgtcccctaggtgg

SEQ ID NO: 3172792 - DNA, 25 bp, Homo sapien
tgggttcaaatagccaccaaaccca

SEQ ID NO: 3172793 - DNA, 25 bp, Homo sapien
agctctaagaagcactaatctaagc

SEQ ID NO: 3172794 - DNA, 25 bp, Homo sapien
taagaagcactaatctaagcacttt

SEQ ID NO: 3172795 - DNA, 25 bp, Homo sapien
gctctaagaagcactaatctaagca

SEQ ID NO: 3172796 - DNA, 25 bp, Homo sapien
tctaagaagcactaatctaagcact

SEQ ID NO: 3172797 - DNA, 25 bp, Homo sapien
ctgtagcacatacataagtgattcc

SEQ ID NO: 3172798 - DNA, 25 bp, Homo sapien
gcacatacataagtgattccatcaa

SEQ ID NO: 3172799 - DNA, 25 bp, Homo sapien
cataagtgattccatcaataaagac

SEQ ID NO: 3172800 - DNA, 25 bp, Homo sapien
tgattccatcaataaagacagtatg

SEQ ID NO: 3172801 - DNA, 25 bp, Homo sapien
tgcagatggtgtcacagaatccaaa

SEQ ID NO: 3172802 - DNA, 25 bp, Homo sapien
taagaaatgcagatggtgtcacaga

SEQ ID NO: 3172803 - DNA, 25 bp, Homo sapien
gatggtgtcacagaatccaaagcat

SEQ ID NO: 3172804 - DNA, 25 bp, Homo sapien
ttttaagaaatgcagatggtgtcac

SEQ ID NO: 3172805 - DNA, 25 bp, Homo sapien
gagaaaaatgttcttgtgacatcaa

SEQ ID NO: 3172806 - DNA, 25 bp, Homo sapien
cttaacagttgtttggagatcatct

SEQ ID NO: 3172807 - DNA, 25 bp, Homo sapien
tgtggaaatggtgcggtcaccttga

SEQ ID NO: 3172808 - DNA, 25 bp, Homo sapien
cacttgacggctcattgtggaaatg

SEQ ID NO: 3172809 - DNA, 25 bp, Homo sapien
gagatcatctgttctatcaaggaag

SEQ ID NO: 3172810 - DNA, 25 bp, Homo sapien
ggctcgggagtagagacagccatca

SEQ ID NO: 3172811 - DNA, 25 bp, Homo sapien
ccaggctcgggagtagagacagcca

SEQ ID NO: 3172812 - DNA, 25 bp, Homo sapien
gggagtagagacagccatcaaccat

SEQ ID NO: 3172813 - DNA, 25 bp, Homo sapien
tgtgctgggcatactgaatacaaag

SEQ ID NO: 3172814 - DNA, 25 bp, Homo sapien
gcctaaggaactttttgagtcactc

SEQ ID NO: 3172815 - DNA, 25 bp, Homo sapien
gattattagtatgtgtgcctaagga

SEQ ID NO: 3172816 - DNA, 25 bp, Homo sapien
catttgttggaagcttcttgagttc

SEQ ID NO: 3172817 - DNA, 25 bp, Homo sapien
tagcattcagggaattgatacccat

SEQ ID NO: 3172818 - DNA, 25 bp, Homo sapien
tcagagggacccaacgtcatacttc

SEQ ID NO: 3172819 - DNA, 25 bp, Homo sapien
cactgggcttttaacacaagacttg

SEQ ID NO: 3172820 - DNA, 25 bp, Homo sapien
acaagacttgctctacaatactggg

SEQ ID NO: 3172821 - DNA, 25 bp, Homo sapien
catgtcctcaatttcggcaagcctg

SEQ ID NO: 3172822 - DNA, 25 bp, Homo sapien
ggcaagcctgtcttccaaacttatg

SEQ ID NO: 3172823 - DNA, 25 bp, Homo sapien
cattcccaatttggacagggaggac

SEQ ID NO: 3172824 - DNA, 25 bp, Homo sapien
tttgtatcaagtccctgaatggaag

SEQ ID NO: 3172825 - DNA, 25 bp, Homo sapien
ccccagtattgtagagcaagtcttg

SEQ ID NO: 3172826 - DNA, 25 bp, Homo sapien
gaagtatgacgttgggtccctctga

SEQ ID NO: 3172827 - DNA, 25 bp, Homo sapien
gcaagtcttgtgttaaaagcccagt

SEQ ID NO: 3172828 - DNA, 25 bp, Homo sapien
caggcttgccgaaattgaggacatg

SEQ ID NO: 3172829 - DNA, 25 bp, Homo sapien
cataagtttggaagacaggcttgcc

SEQ ID NO: 3172830 - DNA, 25 bp, Homo sapien
tatgcttaatgttcaggacttcctc

SEQ ID NO: 3172831 - DNA, 25 bp, Homo sapien
tcccacttcaggttagcttttcaac

SEQ ID NO: 3172832 - DNA, 25 bp, Homo sapien
agagctgggccatttatatgcttaa

SEQ ID NO: 3172833 - DNA, 25 bp, Homo sapien
tcttaggtatatactgcgcttccca

SEQ ID NO: 3172834 - DNA, 25 bp, Homo sapien
tatatactgcgcttcccacttcagg

SEQ ID NO: 3172835 - DNA, 25 bp, Homo sapien
cagtgcagagtaagtcttaggtata

SEQ ID NO: 3172836 - DNA, 25 bp, Homo sapien
ttgaaaagctaacctgaagtgggaa

SEQ ID NO: 3172837 - DNA, 25 bp, Homo sapien
tacatgtaagttgaaaagctaacct

SEQ ID NO: 3172838 - DNA, 25 bp, Homo sapien
aagtgggaagcgcagtatataccta

SEQ ID NO: 3172839 - DNA, 25 bp, Homo sapien
tgaggaagtcctgaacattaagcat

SEQ ID NO: 3172840 - DNA, 25 bp, Homo sapien
ttaagcatataaatggcccagctct

SEQ ID NO: 3172841 - DNA, 25 bp, Homo sapien
tatacctaagacttactctgcactg

SEQ ID NO: 3172842 - DNA, 25 bp, Homo sapien
aaagtctcccttccgttttgcagag

SEQ ID NO: 3172843 - DNA, 25 bp, Homo sapien
tatccacagggtcttctaaaattag

SEQ ID NO: 3172844 - DNA, 25 bp, Homo sapien
gtctctaagcaagcacctaagtggc

SEQ ID NO: 3172845 - DNA, 25 bp, Homo sapien
catttttgccagatcaccagttgct

SEQ ID NO: 3172846 - DNA, 25 bp, Homo sapien
tatggctcagacatcactattatgc

SEQ ID NO: 3172847 - DNA, 25 bp, Homo sapien
cctaagtggctcgtctttgagacaa

SEQ ID NO: 3172848 - DNA, 25 bp, Homo sapien
cagcataatagtgatgtctgagcca

SEQ ID NO: 3172849 - DNA, 25 bp, Homo sapien
tactctgcaaaacggaagggagact

SEQ ID NO: 3172850 - DNA, 25 bp, Homo sapien
gccacttaggtgcttgcttagagac

SEQ ID NO: 3172851 - DNA, 25 bp, Homo sapien
tacgtttgtctcaaagacgagccac

SEQ ID NO: 3172852 - DNA, 25 bp, Homo sapien
tagaacagcaactggtgatctggca

SEQ ID NO: 3172853 - DNA, 25 bp, Homo sapien
gctaattttagaagaccctgtggat

SEQ ID NO: 3172854 - DNA, 25 bp, Homo sapien
gcccctaacgctgcaataagtttaa

SEQ ID NO: 3172855 - DNA, 25 bp, Homo sapien
ggaatttaggctcctttgtgggaca

SEQ ID NO: 3172856 - DNA, 25 bp, Homo sapien
gaccaagacttgttcaactagcaac

SEQ ID NO: 3172857 - DNA, 25 bp, Homo sapien
ggagccatgttaaaaacgaccaaga

SEQ ID NO: 3172858 - DNA, 25 bp, Homo sapien
tcagaaaataccctaaggagccatg

SEQ ID NO: 3172859 - DNA, 25 bp, Homo sapien
tcagcaccccaaggctgaatatggt

SEQ ID NO: 3172860 - DNA, 25 bp, Homo sapien
aagtgtttgcactacgcaggagtga

SEQ ID NO: 3172861 - DNA, 25 bp, Homo sapien
tgtcccacaaaggagcctaaattcc

SEQ ID NO: 3172862 - DNA, 25 bp, Homo sapien
gaaatgctttgtattcaaggcagca

SEQ ID NO: 3172863 - DNA, 25 bp, Homo sapien
ttgctagttgaacaagtcttggtcg

SEQ ID NO: 3172864 - DNA, 25 bp, Homo sapien
tcttggtcgtttttaacatggctcc

SEQ ID NO: 3172865 - DNA, 25 bp, Homo sapien
cacagctaggattaagatactcaac

SEQ ID NO: 3172866 - DNA, 25 bp, Homo sapien
caatttaggtatcaatgctgaagtc

SEQ ID NO: 3172867 - DNA, 25 bp, Homo sapien
gcacgagccactactttaattaact

SEQ ID NO: 3172868 - DNA, 25 bp, Homo sapien
tcactatcaaaatgcagtggctcca

SEQ ID NO: 3172869 - DNA, 25 bp, Homo sapien
gacttctgagtagccagtgattaca

SEQ ID NO: 3172870 - DNA, 25 bp, Homo sapien
tctgtaggagattcattccatgaca

SEQ ID NO: 3172871 - DNA, 25 bp, Homo sapien
tagaaatcctggcatgaaatgatcc

SEQ ID NO: 3172872 - DNA, 25 bp, Homo sapien
tgtaatcactggctactcagaagtc

SEQ ID NO: 3172873 - DNA, 25 bp, Homo sapien
gtagtaatctcagttaaccagaacc

SEQ ID NO: 3172874 - DNA, 25 bp, Homo sapien
agttaattaaagtagtggctcgtgc

SEQ ID NO: 3172875 - DNA, 25 bp, Homo sapien
catttcatgccaggatttctagacc

SEQ ID NO: 3172876 - DNA, 25 bp, Homo sapien
actgcattttgatagtgagacctgg

SEQ ID NO: 3172877 - DNA, 25 bp, Homo sapien
taggcaacataatatgacccctgtt

SEQ ID NO: 3172878 - DNA, 25 bp, Homo sapien
gcccttataatatccctcaaaatgg

SEQ ID NO: 3172879 - DNA, 25 bp, Homo sapien
taaccagtcttaccctcaatattga

SEQ ID NO: 3172880 - DNA, 25 bp, Homo sapien
cactagaggtgtaacaggcatgcct

SEQ ID NO: 3172881 - DNA, 25 bp, Homo sapien
ctgtagaaacatccactagaggtgt

SEQ ID NO: 3172882 - DNA, 25 bp, Homo sapien
tctaaagtcccatagtaaactgtag

SEQ ID NO: 3172883 - DNA, 25 bp, Homo sapien
gctgtccattcttacatgcaaaagg

SEQ ID NO: 3172884 - DNA, 25 bp, Homo sapien
tacagtttactatgggactttagaa

SEQ ID NO: 3172885 - DNA, 25 bp, Homo sapien
ggcatgcctgttacacctctagtgg

SEQ ID NO: 3172886 - DNA, 25 bp, Homo sapien
acacctctagtggatgtttctacag

SEQ ID NO: 3172887 - DNA, 25 bp, Homo sapien
ccttttgcatgtaagaatggacagc

SEQ ID NO: 3172888 - DNA, 25 bp, Homo sapien
cattttgagggatattataagggca

SEQ ID NO: 3172889 - DNA, 25 bp, Homo sapien
caatattgagggtaagactggttaa

SEQ ID NO: 3172890 - DNA, 25 bp, Homo sapien
ccaaggtaaagctggactgatttca

SEQ ID NO: 3172891 - DNA, 25 bp, Homo sapien
ggtaagagctgtagtggaaagccac

SEQ ID NO: 3172892 - DNA, 25 bp, Homo sapien
ccagtggtggtgtataaacccctga

SEQ ID NO: 3172893 - DNA, 25 bp, Homo sapien
tggaaagccacattagcccaccttt

SEQ ID NO: 3172894 - DNA, 25 bp, Homo sapien
ttagtggccttctactctccagtgg

SEQ ID NO: 3172895 - DNA, 25 bp, Homo sapien
gcctccaaagagaagtcatgcaatt

SEQ ID NO: 3172896 - DNA, 25 bp, Homo sapien
ggttgacatgtattcacaattgcat

SEQ ID NO: 3172897 - DNA, 25 bp, Homo sapien
cagttctttaagcagcactgtgtat

SEQ ID NO: 3172898 - DNA, 25 bp, Homo sapien
aaaggtgggctaatgtggctttcca

SEQ ID NO: 3172899 - DNA, 25 bp, Homo sapien
tgaaatcagtccagctttaccttgg

SEQ ID NO: 3172900 - DNA, 25 bp, Homo sapien
caccactggagagtagaaggccact

SEQ ID NO: 3172901 - DNA, 25 bp, Homo sapien
aattgcatgacttctctttggaggc

SEQ ID NO: 3172902 - DNA, 25 bp, Homo sapien
agtgtcgtggggaggagtttgaatg

SEQ ID NO: 3172903 - DNA, 25 bp, Homo sapien
agagtgtcgtggggaggagtttgaa

SEQ ID NO: 3172904 - DNA, 25 bp, Homo sapien
gagtgtcgtggggaggagtttgaat

SEQ ID NO: 3172905 - DNA, 25 bp, Homo sapien
attcaaactcctccccacgacactc

SEQ ID NO: 3172906 - DNA, 25 bp, Homo sapien
ttcaaactcctccccacgacactct

SEQ ID NO: 3172907 - DNA, 25 bp, Homo sapien
cattcaaactcctccccacgacact

SEQ ID NO: 3172908 - DNA, 25 bp, Homo sapien
agtgtcgtggggaggagtttgaatg

SEQ ID NO: 3172909 - DNA, 25 bp, Homo sapien
agagtgtcgtggggaggagtttgaa

SEQ ID NO: 3172910 - DNA, 25 bp, Homo sapien
gtgtcgtggggaggagtttgaatgg

SEQ ID NO: 3172911 - DNA, 25 bp, Homo sapien
tgtcgtggggaggagtttgaatggc

SEQ ID NO: 3172912 - DNA, 25 bp, Homo sapien
gagtgtcgtggggaggagtttgaat

SEQ ID NO: 3172913 - DNA, 25 bp, Homo sapien
cagagtgtcgtggggaggagtttga

SEQ ID NO: 3172914 - DNA, 25 bp, Homo sapien
cattcaaactcctccccacgacact

SEQ ID NO: 3172915 - DNA, 25 bp, Homo sapien
ccattcaaactcctccccacgacac

SEQ ID NO: 3172916 - DNA, 25 bp, Homo sapien
attcaaactcctccccacgacactc

SEQ ID NO: 3172917 - DNA, 25 bp, Homo sapien
ttcaaactcctccccacgacactct

SEQ ID NO: 3172918 - DNA, 25 bp, Homo sapien
gccattcaaactcctccccacgaca

SEQ ID NO: 3172919 - DNA, 25 bp, Homo sapien
tcaaactcctccccacgacactctg

SEQ ID NO: 3172920 - DNA, 25 bp, Homo sapien
acatagtgctagtgtctccgccgct

SEQ ID NO: 3172921 - DNA, 25 bp, Homo sapien
actagcagcaaagtaatccccgccg

SEQ ID NO: 3172922 - DNA, 25 bp, Homo sapien
cgaactgctcctccgacatagtgct

SEQ ID NO: 3172923 - DNA, 25 bp, Homo sapien
tcctcgttcttactggcgtcaatct

SEQ ID NO: 3172924 - DNA, 25 bp, Homo sapien
tacctcgcgaagcacacaagacagg

SEQ ID NO: 3172925 - DNA, 25 bp, Homo sapien
tgccgcgaaccgaaactagcagcaa

SEQ ID NO: 3172926 - DNA, 25 bp, Homo sapien
tactttgctgctagtttcggttcgc

SEQ ID NO: 3172927 - DNA, 25 bp, Homo sapien
agcggcggagacactagcactatgt

SEQ ID NO: 3172928 - DNA, 25 bp, Homo sapien
gaagattgacgccagtaagaacgag

SEQ ID NO: 3172929 - DNA, 25 bp, Homo sapien
tcttgtgtgcttcgcgaggtagagc

SEQ ID NO: 3172930 - DNA, 25 bp, Homo sapien
cactatgtcggaggagcagttcggc

SEQ ID NO: 3172931 - DNA, 25 bp, Homo sapien
tgacgccagtaagaacgaggaggat

SEQ ID NO: 3172932 - DNA, 25 bp, Homo sapien
cgcacactcccgctctctcccgctg

SEQ ID NO: 3172933 - DNA, 25 bp, Homo sapien
cttcgcctcccactctcgcgcggcg

SEQ ID NO: 3172934 - DNA, 25 bp, Homo sapien
gcgcgcgtggctgcaaaggctcctg

SEQ ID NO: 3172935 - DNA, 25 bp, Homo sapien
gcctcccactctcgcgcggcgcaca

SEQ ID NO: 3172936 - DNA, 25 bp, Homo sapien
ctcccgctctctcccgctgcactaa

SEQ ID NO: 3172937 - DNA, 25 bp, Homo sapien
cgcgcgcgtggctgcaaaggctcct

SEQ ID NO: 3172938 - DNA, 25 bp, Homo sapien
gcgccgcgcgagagtgggaggcgaa

SEQ ID NO: 3172939 - DNA, 25 bp, Homo sapien
cagcgggagagagcgggagtgtgcg

SEQ ID NO: 3172940 - DNA, 25 bp, Homo sapien
tgtgcgccgcgcgagagtgggaggc

SEQ ID NO: 3172941 - DNA, 25 bp, Homo sapien
ttagtgcagcgggagagagcgggag

SEQ ID NO: 3172942 - DNA, 25 bp, Homo sapien
aggagcctttgcagccacgcgcgcg

SEQ ID NO: 3172943 - DNA, 25 bp, Homo sapien
ccgcgcgagagtgggaggcgaaggg

SEQ ID NO: 3172944 - DNA, 25 bp, Homo sapien
cgcgtggctgcaaaggctcctgcgc

SEQ ID NO: 3172945 - DNA, 25 bp, Homo sapien
tggctgcaaaggctcctgcgcctct

SEQ ID NO: 3172946 - DNA, 25 bp, Homo sapien
cttcgcctcccactctcgcgcggcg

SEQ ID NO: 3172947 - DNA, 25 bp, Homo sapien
cgtggctgcaaaggctcctgcgcct

SEQ ID NO: 3172948 - DNA, 25 bp, Homo sapien
ctcccgctctctcccgctgcactaa

SEQ ID NO: 3172949 - DNA, 25 bp, Homo sapien
cgcgcgcgtggctgcaaaggctcct

SEQ ID NO: 3172950 - DNA, 25 bp, Homo sapien
tggtccgcggcggcgccattaaagc

SEQ ID NO: 3172951 - DNA, 25 bp, Homo sapien
gacgcgccgttcttccgtcggccat

SEQ ID NO: 3172952 - DNA, 25 bp, Homo sapien
cgtcggccattttaggtggtccgcg

SEQ ID NO: 3172953 - DNA, 25 bp, Homo sapien
ccattaaagcgaggaggaggcgaga

SEQ ID NO: 3172954 - DNA, 25 bp, Homo sapien
taaaaagaagccctatcggcccagc

SEQ ID NO: 3172955 - DNA, 25 bp, Homo sapien
taaatccaggcttaagccgccgcag

SEQ ID NO: 3172956 - DNA, 25 bp, Homo sapien
ccagcggcgatagacgaaaacctca

SEQ ID NO: 3172957 - DNA, 25 bp, Homo sapien
gctaattccctcctccagtgcgtaa

SEQ ID NO: 3172958 - DNA, 25 bp, Homo sapien
cataaacctcgtaaagatgactcac

SEQ ID NO: 3172959 - DNA, 25 bp, Homo sapien
taaagaacattaagcgaacccttga

SEQ ID NO: 3172960 - DNA, 25 bp, Homo sapien
taatgaaacgcctaacggtgttaca

SEQ ID NO: 3172961 - DNA, 25 bp, Homo sapien
gccaaacccgaacacaaactcataa

SEQ ID NO: 3172962 - DNA, 25 bp, Homo sapien
ggaagctgtcgtgattggctgacac

SEQ ID NO: 3172963 - DNA, 25 bp, Homo sapien
tcactaatgacttcggcttgaagca

SEQ ID NO: 3172964 - DNA, 25 bp, Homo sapien
caaagcaggcacttgcacggaagtc

SEQ ID NO: 3172965 - DNA, 25 bp, Homo sapien
gcagctgaaggattgtagaacattc

SEQ ID NO: 3172966 - DNA, 25 bp, Homo sapien
tcttgcaacaatccaaggagtactt

SEQ ID NO: 3172967 - DNA, 25 bp, Homo sapien
gaggagaagtggcaaaaatggtcaa

SEQ ID NO: 3172968 - DNA, 25 bp, Homo sapien
aatgaggagaagtggcaaaaatggt

SEQ ID NO: 3172969 - DNA, 25 bp, Homo sapien
tcagaactctggataatagtcttgc

SEQ ID NO: 3172970 - DNA, 25 bp, Homo sapien
gagtaccacccaatatagaaattta

SEQ ID NO: 3172971 - DNA, 25 bp, Homo sapien
tcctatgagtcgtgatgtaccaaga

SEQ ID NO: 3172972 - DNA, 25 bp, Homo sapien
tatgacattgtacaggttttatgga

SEQ ID NO: 3172973 - DNA, 25 bp, Homo sapien
tatggaatatagagagttatttccc

SEQ ID NO: 3172974 - DNA, 25 bp, Homo sapien
tctagtgtacaagacaccattgtgt

SEQ ID NO: 3172975 - DNA, 25 bp, Homo sapien
tagttgaacctctgaatatgggaag

SEQ ID NO: 3172976 - DNA, 25 bp, Homo sapien
tgtggagcctcattttaagtgttca

SEQ ID NO: 3172977 - DNA, 25 bp, Homo sapien
tacttgggttactagagatgcttct

SEQ ID NO: 3172978 - DNA, 25 bp, Homo sapien
gatactggcacaattggactttctg

SEQ ID NO: 3172979 - DNA, 25 bp, Homo sapien
ccattacatgatacaccgtggtgtg

SEQ ID NO: 3172980 - DNA, 25 bp, Homo sapien
tgtacctgtcttcggctttaatgga

SEQ ID NO: 3172981 - DNA, 25 bp, Homo sapien
gagtgagagacaagaacgcatcatt

SEQ ID NO: 3172982 - DNA, 25 bp, Homo sapien
tcactgggagatcaagaggatttgg

SEQ ID NO: 3172983 - DNA, 25 bp, Homo sapien
gacagagtacttgtctcgatttggg

SEQ ID NO: 3172984 - DNA, 25 bp, Homo sapien
gggaagttgtagactgcacaattaa

SEQ ID NO: 3172985 - DNA, 25 bp, Homo sapien
cttgagctgggatacaagcaaaaaa

SEQ ID NO: 3172986 - DNA, 25 bp, Homo sapien
ggatccaagatcaacgcgagcaaga

SEQ ID NO: 3172987 - DNA, 25 bp, Homo sapien
aatcagcaggatgacgggtaccgca

SEQ ID NO: 3172988 - DNA, 25 bp, Homo sapien
tatagaggaattcgcagagggatcc

SEQ ID NO: 3172989 - DNA, 25 bp, Homo sapien
tttctcagagtcgattccccgcgtg

SEQ ID NO: 3172990 - DNA, 25 bp, Homo sapien
agagacaaaggctcccaaggcaaga

SEQ ID NO: 3172991 - DNA, 25 bp, Homo sapien
gcctctctccttgccgggagggccg

SEQ ID NO: 3172992 - DNA, 25 bp, Homo sapien
cgcgatggaggtcccgcccaggctt

SEQ ID NO: 3172993 - DNA, 25 bp, Homo sapien
ccctgcgtcggctctgctcgggact

SEQ ID NO: 3172994 - DNA, 25 bp, Homo sapien
gaacaaagaagcgaacgcgggagca

SEQ ID NO: 3172995 - DNA, 25 bp, Homo sapien
catagatacagtcatctggccagcc

SEQ ID NO: 3172996 - DNA, 25 bp, Homo sapien
gatccgtcaaaatgggcctcgcgtg

SEQ ID NO: 3172997 - DNA, 25 bp, Homo sapien
tcaggcctcgaactggatccgtcaa

SEQ ID NO: 3172998 - DNA, 25 bp, Homo sapien
cttcgatatctaacaggatcacggt

SEQ ID NO: 3172999 - DNA, 25 bp, Homo sapien
tcggcggggaccgaaagcacgacca

SEQ ID NO: 3173000 - DNA, 25 bp, Homo sapien
aacaggatcacggtgacttcggcgg

SEQ ID NO: 3173001 - DNA, 25 bp, Homo sapien
tatctaacaggatcacggtgacttc

SEQ ID NO: 3173002 - DNA, 25 bp, Homo sapien
cttcacgaaagcaatcggggttgtg

SEQ ID NO: 3173003 - DNA, 25 bp, Homo sapien
ttcacgaaagcaatcggggttgtgg

SEQ ID NO: 3173004 - DNA, 25 bp, Homo sapien
cacgaaagcaatcggggttgtggta

SEQ ID NO: 3173005 - DNA, 25 bp, Homo sapien
tcacgaaagcaatcggggttgtggt

SEQ ID NO: 3173006 - DNA, 25 bp, Homo sapien
tagtgtcgcgaggaaaagcatcccc

SEQ ID NO: 3173007 - DNA, 25 bp, Homo sapien
atctggatccaaccaagcgcaaggg

SEQ ID NO: 3173008 - DNA, 25 bp, Homo sapien
taaggaccattaaatcgctgccgct

SEQ ID NO: 3173009 - DNA, 25 bp, Homo sapien
ttgagatcggaagctttaaggacca

SEQ ID NO: 3173010 - DNA, 25 bp, Homo sapien
cacagtgacatcctagaaggaatgc

SEQ ID NO: 3173011 - DNA, 25 bp, Homo sapien
gaatctagacgtgtcctatagctca

SEQ ID NO: 3173012 - DNA, 25 bp, Homo sapien
aaaaaatcagcgctatggaccacag

SEQ ID NO: 3173013 - DNA, 25 bp, Homo sapien
gaatccgctaagttgcaagctgagg

SEQ ID NO: 3173014 - DNA, 25 bp, Homo sapien
tcatctaactccctggatcttgaca

SEQ ID NO: 3173015 - DNA, 25 bp, Homo sapien
ctaactccctggatcttgacagcat

SEQ ID NO: 3173016 - DNA, 25 bp, Homo sapien
caggatcatctaactccctggatct

SEQ ID NO: 3173017 - DNA, 25 bp, Homo sapien
ggatcatctaactccctggatcttg

SEQ ID NO: 3173018 - DNA, 25 bp, Homo sapien
tcagcagttgtggtattagaattgc

SEQ ID NO: 3173019 - DNA, 25 bp, Homo sapien
gaccacagtaggagctatcaagaag

SEQ ID NO: 3173020 - DNA, 25 bp, Homo sapien
tcctgaagaccacagtaggagctat

SEQ ID NO: 3173021 - DNA, 25 bp, Homo sapien
ttttggagtggtccatgccatctgc

SEQ ID NO: 3173022 - DNA, 25 bp, Homo sapien
taacattttcttcgatgtaaggaaa

SEQ ID NO: 3173023 - DNA, 25 bp, Homo sapien
gtgtctgcagatactctttaacatt

SEQ ID NO: 3173024 - DNA, 25 bp, Homo sapien
caatgtgtctgcagatactctttaa

SEQ ID NO: 3173025 - DNA, 25 bp, Homo sapien
ctttaacattttcttcgatgtaagg

SEQ ID NO: 3173026 - DNA, 25 bp, Homo sapien
tttaagtcagaaacaacatgatgtt

SEQ ID NO: 3173027 - DNA, 25 bp, Homo sapien
ctttaagtcagaaacaacatgatgt

SEQ ID NO: 3173028 - DNA, 25 bp, Homo sapien
ccatccaggtgggcgtcctcttcag

SEQ ID NO: 3173029 - DNA, 25 bp, Homo sapien
ctgcagggataggaacagccccatc

SEQ ID NO: 3173030 - DNA, 25 bp, Homo sapien
gaacagccccatccaggtgggcgtc

SEQ ID NO: 3173031 - DNA, 25 bp, Homo sapien
ggataggaacagccccatccaggtg

SEQ ID NO: 3173032 - DNA, 25 bp, Homo sapien
catctgttgcagatcatccactcca

SEQ ID NO: 3173033 - DNA, 25 bp, Homo sapien
ttcatgcgcccagctgtgaatgccg

SEQ ID NO: 3173034 - DNA, 25 bp, Homo sapien
tttgagtgcagtggtctttcgatcc

SEQ ID NO: 3173035 - DNA, 25 bp, Homo sapien
gtgaatgccgccctccacatgtggc

SEQ ID NO: 3173036 - DNA, 25 bp, Homo sapien
tctctccacttcctgactgctggaa

SEQ ID NO: 3173037 - DNA, 25 bp, Homo sapien
tccacttcctgactgctggaactac

SEQ ID NO: 3173038 - DNA, 25 bp, Homo sapien
ttcctgactgctggaactacatctg

SEQ ID NO: 3173039 - DNA, 25 bp, Homo sapien
cctgactgctggaactacatctgca

SEQ ID NO: 3173040 - DNA, 25 bp, Homo sapien
ctcaagaatatctccctccgtagaa

SEQ ID NO: 3173041 - DNA, 25 bp, Homo sapien
tatctccctccgtagaatgcccgaa

SEQ ID NO: 3173042 - DNA, 25 bp, Homo sapien
cctccgtagaatgcccgaataacag

SEQ ID NO: 3173043 - DNA, 25 bp, Homo sapien
gaatatctccctccgtagaatgccc

SEQ ID NO: 3173044 - DNA, 25 bp, Homo sapien
tatataacaaccttatatagaagaa

SEQ ID NO: 3173045 - DNA, 25 bp, Homo sapien
actttatataacaaccttatataga

SEQ ID NO: 3173046 - DNA, 25 bp, Homo sapien
gcattctattagttccaattagttt

SEQ ID NO: 3173047 - DNA, 25 bp, Homo sapien
ttatgctttgatagcgtcaaaacaa

SEQ ID NO: 3173048 - DNA, 25 bp, Homo sapien
ctgtctgcaatctttcggtaacttt

SEQ ID NO: 3173049 - DNA, 25 bp, Homo sapien
tcggtaactttcactctctactttg

SEQ ID NO: 3173050 - DNA, 25 bp, Homo sapien
tgttgttggttgagcacccaatgct

SEQ ID NO: 3173051 - DNA, 25 bp, Homo sapien
ttgttggttgagcacccaatgctgt

SEQ ID NO: 3173052 - DNA, 25 bp, Homo sapien
ggctcagttcatatcctggagtata

SEQ ID NO: 3173053 - DNA, 25 bp, Homo sapien
tagtgccaggctcagttcatatcct

SEQ ID NO: 3173054 - DNA, 25 bp, Homo sapien
aggcaatgtatttgtagtgccaggc

SEQ ID NO: 3173055 - DNA, 25 bp, Homo sapien
cctggagtatataatataagaagtc

SEQ ID NO: 3173056 - DNA, 25 bp, Homo sapien
acatctgcttcctcagcagcactgg

SEQ ID NO: 3173057 - DNA, 25 bp, Homo sapien
accacagctacgtgcacatctgctt

SEQ ID NO: 3173058 - DNA, 25 bp, Homo sapien
tctgcttcctcagcagcactggcct

SEQ ID NO: 3173059 - DNA, 25 bp, Homo sapien
caccacagctacgtgcacatctgct

SEQ ID NO: 3173060 - DNA, 25 bp, Homo sapien
ttaatcctgcgttgcctggtctcac

SEQ ID NO: 3173061 - DNA, 25 bp, Homo sapien
aaggcaggtatagttcactgaagga

SEQ ID NO: 3173062 - DNA, 25 bp, Homo sapien
gttgaggaaggcaggtatagttcac

SEQ ID NO: 3173063 - DNA, 25 bp, Homo sapien
ttctcatcatctgttaatcctgcgt

SEQ ID NO: 3173064 - DNA, 25 bp, Homo sapien
gaacagggcggtctgccttaacaac

SEQ ID NO: 3173065 - DNA, 25 bp, Homo sapien
tcactggtaaggcaactgcttgctg

SEQ ID NO: 3173066 - DNA, 25 bp, Homo sapien
tctataatgataacacgtggcagga

SEQ ID NO: 3173067 - DNA, 25 bp, Homo sapien
ctagacactacagggacaactctgg

SEQ ID NO: 3173068 - DNA, 25 bp, Homo sapien
ggatagagttcaggaacctatataa

SEQ ID NO: 3173069 - DNA, 25 bp, Homo sapien
tgtggatagagttcaggaacctata

SEQ ID NO: 3173070 - DNA, 25 bp, Homo sapien
tctcttttgctatggcggcatgtgg

SEQ ID NO: 3173071 - DNA, 25 bp, Homo sapien
ctcttttgctatggcggcatgtgga

SEQ ID NO: 3173072 - DNA, 25 bp, Homo sapien
caaactactccaactcttgcaacat

SEQ ID NO: 3173073 - DNA, 25 bp, Homo sapien
aactcttgcaacatcaagcttttgg

SEQ ID NO: 3173074 - DNA, 25 bp, Homo sapien
caacatcaagcttttggcttgtaag

SEQ ID NO: 3173075 - DNA, 25 bp, Homo sapien
ttgaggaaaaggaatattagatagt

SEQ ID NO: 3173076 - DNA, 25 bp, Homo sapien
cctgtctctcagtgggggtggttac

SEQ ID NO: 3173077 - DNA, 25 bp, Homo sapien
ggcttttccccaccttcgctctgca

SEQ ID NO: 3173078 - DNA, 25 bp, Homo sapien
tgcctttgccggctcaaatgcctgg

SEQ ID NO: 3173079 - DNA, 25 bp, Homo sapien
cagtgggggtggttactctcatgct

SEQ ID NO: 3173080 - DNA, 25 bp, Homo sapien
taccgtacctagatcgataagcaac

SEQ ID NO: 3173081 - DNA, 25 bp, Homo sapien
gatgcgtttgtgaacagcccagtga

SEQ ID NO: 3173082 - DNA, 25 bp, Homo sapien
gagtgaccttgtccggtattccagt

SEQ ID NO: 3173083 - DNA, 25 bp, Homo sapien
tcattcctttgaggcgcaagttcca

SEQ ID NO: 3173084 - DNA, 25 bp, Homo sapien
cacactgcccgcttaaggttcaaat

SEQ ID NO: 3173085 - DNA, 25 bp, Homo sapien
acacactgcccgcttaaggttcaaa

SEQ ID NO: 3173086 - DNA, 25 bp, Homo sapien
ctcacttctgtccatattggctaca

SEQ ID NO: 3173087 - DNA, 25 bp, Homo sapien
ccatattggctacaaagtcgaaggg

SEQ ID NO: 3173088 - DNA, 25 bp, Homo sapien
gaaaacccagtcagatattatgcta

SEQ ID NO: 3173089 - DNA, 25 bp, Homo sapien
ttttagcagaaccaagcaatgactg

SEQ ID NO: 3173090 - DNA, 25 bp, Homo sapien
tattcattgggatctggccactaaa

SEQ ID NO: 3173091 - DNA, 25 bp, Homo sapien
gattcttccggacaccaattgagta

SEQ ID NO: 3173092 - DNA, 25 bp, Homo sapien
agaactcagaccgtaggtgtgggct

SEQ ID NO: 3173093 - DNA, 25 bp, Homo sapien
caagtggacagaccctccatgagtg

SEQ ID NO: 3173094 - DNA, 25 bp, Homo sapien
caaattcaaactgttggagtgagcc

SEQ ID NO: 3173095 - DNA, 25 bp, Homo sapien
tgagactgtgcttcatgaagaaaag

SEQ ID NO: 3173096 - DNA, 25 bp, Homo sapien
tcagtggtcggctgtgtggatccca

SEQ ID NO: 3173097 - DNA, 25 bp, Homo sapien
tctggacttgatgcactgtgactga

SEQ ID NO: 3173098 - DNA, 25 bp, Homo sapien
caaagggcttggaaccagctcgtga

SEQ ID NO: 3173099 - DNA, 25 bp, Homo sapien
ggatcccaggagagacatatgccac

SEQ ID NO: 3173100 - DNA, 25 bp, Homo sapien
ggcccaaagcatccacatgtatgca

SEQ ID NO: 3173101 - DNA, 25 bp, Homo sapien
cacatgtatgcagccagggtccagt

SEQ ID NO: 3173102 - DNA, 25 bp, Homo sapien
gcacctttgccgtggagttccggca

SEQ ID NO: 3173103 - DNA, 25 bp, Homo sapien
tccagttttaatgtggctgatgagg

SEQ ID NO: 3173104 - DNA, 25 bp, Homo sapien
agcccattctctagttagtggagta

SEQ ID NO: 3173105 - DNA, 25 bp, Homo sapien
gcccattctctagttagtggagtat

SEQ ID NO: 3173106 - DNA, 25 bp, Homo sapien
gagcccattctctagttagtggagt

SEQ ID NO: 3173107 - DNA, 25 bp, Homo sapien
cccattctctagttagtggagtatt

SEQ ID NO: 3173108 - DNA, 25 bp, Homo sapien
agaacccagtgggttaggatattct

SEQ ID NO: 3173109 - DNA, 25 bp, Homo sapien
cccagtgggttaggatattctgcca

SEQ ID NO: 3173110 - DNA, 25 bp, Homo sapien
ggttaggatattctgccagatcttc

SEQ ID NO: 3173111 - DNA, 25 bp, Homo sapien
cagtgggttaggatattctgccaga

SEQ ID NO: 3173112 - DNA, 25 bp, Homo sapien
caggctgcgctgacactcaaggtca

SEQ ID NO: 3173113 - DNA, 25 bp, Homo sapien
aattccacgggttattctgtcggca

SEQ ID NO: 3173114 - DNA, 25 bp, Homo sapien
tcaacatcaagaatgaaggacggag

SEQ ID NO: 3173115 - DNA, 25 bp, Homo sapien
tgtcggcatctatcactctctgtgt

SEQ ID NO: 3173116 - DNA, 25 bp, Homo sapien
aatagtgggagcctctgcagacctc

SEQ ID NO: 3173117 - DNA, 25 bp, Homo sapien
gccaggtcacaaagcgagcggtaga

SEQ ID NO: 3173118 - DNA, 25 bp, Homo sapien
acaaagagaactgcagggatgccag

SEQ ID NO: 3173119 - DNA, 25 bp, Homo sapien
gctatctgcagcttgaagacttcca

SEQ ID NO: 3173120 - DNA, 25 bp, Homo sapien
cactgtgacagtcgtggtcatgagt

SEQ ID NO: 3173121 - DNA, 25 bp, Homo sapien
gatgctcttggttcatgggcactgt

SEQ ID NO: 3173122 - DNA, 25 bp, Homo sapien
tcatgggcactgtgacagtcgtggt

SEQ ID NO: 3173123 - DNA, 25 bp, Homo sapien
tcatgagtgggcgactcgttcatca

SEQ ID NO: 3173124 - DNA, 25 bp, Homo sapien
ctggtataacacatccactgagcag

SEQ ID NO: 3173125 - DNA, 25 bp, Homo sapien
cctgaatttgcttctcgggtcccca

SEQ ID NO: 3173126 - DNA, 25 bp, Homo sapien
cattagccacataagattcaacctg

SEQ ID NO: 3173127 - DNA, 25 bp, Homo sapien
tagtcttcgtgttctaccattagcc

SEQ ID NO: 3173128 - DNA, 25 bp, Homo sapien
ggagcctttggagagccgctgaggg

SEQ ID NO: 3173129 - DNA, 25 bp, Homo sapien
gactgtcctatagaggtagcccagg

SEQ ID NO: 3173130 - DNA, 25 bp, Homo sapien
ccgggtctggtaagcaacactggag

SEQ ID NO: 3173131 - DNA, 25 bp, Homo sapien
acaaagcccagtgcatcccgggtct

SEQ ID NO: 3173132 - DNA, 25 bp, Homo sapien
tcatagggaagtagaggcggctgaa

SEQ ID NO: 3173133 - DNA, 25 bp, Homo sapien
gaaaatggtgtcaacgtatgatcca

SEQ ID NO: 3173134 - DNA, 25 bp, Homo sapien
aaaatggtgtcaacgtatgatccac

SEQ ID NO: 3173135 - DNA, 25 bp, Homo sapien
aaatggtgtcaacgtatgatccact

SEQ ID NO: 3173136 - DNA, 25 bp, Homo sapien
cagtgcccattgtctagaaactggg

SEQ ID NO: 3173137 - DNA, 25 bp, Homo sapien
tcctgaaaggtacaacagtgcccat

SEQ ID NO: 3173138 - DNA, 25 bp, Homo sapien
agtcctgaaaggtacaacagtgccc

SEQ ID NO: 3173139 - DNA, 25 bp, Homo sapien
gcaagtcctgaaaggtacaacagtg

SEQ ID NO: 3173140 - DNA, 25 bp, Homo sapien
gaaagctgcaagtaatttgtttgcg

SEQ ID NO: 3173141 - DNA, 25 bp, Homo sapien
tgcgatttaaaagaagtgggtagat

SEQ ID NO: 3173142 - DNA, 25 bp, Homo sapien
gggtcccaagacacatgtctctctt

SEQ ID NO: 3173143 - DNA, 25 bp, Homo sapien
tcacagctaaataatgaaacgtggg

SEQ ID NO: 3173144 - DNA, 25 bp, Homo sapien
ttccctgcacttcactttcacaagg

SEQ ID NO: 3173145 - DNA, 25 bp, Homo sapien
tcactttcacaaggtctccctgcat

SEQ ID NO: 3173146 - DNA, 25 bp, Homo sapien
acttcactttcacaaggtctccctg

SEQ ID NO: 3173147 - DNA, 25 bp, Homo sapien
cttccctgcacttcactttcacaag

SEQ ID NO: 3173148 - DNA, 25 bp, Homo sapien
ttgccagctacacctggacggtgag

SEQ ID NO: 3173149 - DNA, 25 bp, Homo sapien
ttgatgttgccagctacacctggac

SEQ ID NO: 3173150 - DNA, 25 bp, Homo sapien
taatagtggttcacactgacaagct

SEQ ID NO: 3173151 - DNA, 25 bp, Homo sapien
gggcagttaatatccgatcgttcgt

SEQ ID NO: 3173152 - DNA, 25 bp, Homo sapien
tcaattgagcaggttaggatcagca

SEQ ID NO: 3173153 - DNA, 25 bp, Homo sapien
tacatgtcttgggtcataaaatcaa

SEQ ID NO: 3173154 - DNA, 25 bp, Homo sapien
taatagaagtggtcactgtgcatcc

SEQ ID NO: 3173155 - DNA, 25 bp, Homo sapien
tgcctggctgttagtgttttcaaaa

SEQ ID NO: 3173156 - DNA, 25 bp, Homo sapien
gtcaggtttattccggccagaccgc

SEQ ID NO: 3173157 - DNA, 25 bp, Homo sapien
gaagtccatcttcccgagtgaaccc

SEQ ID NO: 3173158 - DNA, 25 bp, Homo sapien
catagctcaggtagaatggaagtcc

SEQ ID NO: 3173159 - DNA, 25 bp, Homo sapien
tgtgaccgcatgtgggaacatagct

SEQ ID NO: 3173160 - DNA, 25 bp, Homo sapien
catccccttggcatgagcaggttca

SEQ ID NO: 3173161 - DNA, 25 bp, Homo sapien
ccttggcatgagcaggttcattttg

SEQ ID NO: 3173162 - DNA, 25 bp, Homo sapien
agtcatccccttggcatgagcaggt

SEQ ID NO: 3173163 - DNA, 25 bp, Homo sapien
tccccttggcatgagcaggttcatt

SEQ ID NO: 3173164 - DNA, 25 bp, Homo sapien
tcatttgtggctctccctctgaaca

SEQ ID NO: 3173165 - DNA, 25 bp, Homo sapien
catttgtggctctccctctgaacac

SEQ ID NO: 3173166 - DNA, 25 bp, Homo sapien
aacaccagtcgcagatggctttgca

SEQ ID NO: 3173167 - DNA, 25 bp, Homo sapien
ccctctgaacaccagtcgcagatgg

SEQ ID NO: 3173168 - DNA, 25 bp, Homo sapien
ggtctgggttgctgttctcctcact

SEQ ID NO: 3173169 - DNA, 25 bp, Homo sapien
tcatcattctcaactccagagaggt

SEQ ID NO: 3173170 - DNA, 25 bp, Homo sapien
tcattctcaactccagagaggtctg

SEQ ID NO: 3173171 - DNA, 25 bp, Homo sapien
tttctatactgacggcatcatcatt

SEQ ID NO: 3173172 - DNA, 25 bp, Homo sapien
tcattccaccgccattcctagaggt

SEQ ID NO: 3173173 - DNA, 25 bp, Homo sapien
gaggtgtcaagatacccgccttcac

SEQ ID NO: 3173174 - DNA, 25 bp, Homo sapien
gatacccgccttcacctttatgcag

SEQ ID NO: 3173175 - DNA, 25 bp, Homo sapien
accgccattcctagaggtgtcaaga

SEQ ID NO: 3173176 - DNA, 25 bp, Homo sapien
tggcaaggggcttattggaaagcat

SEQ ID NO: 3173177 - DNA, 25 bp, Homo sapien
tctttcctcttcccacgtaacaggc

SEQ ID NO: 3173178 - DNA, 25 bp, Homo sapien
tgttcttgaagccttgaagacccgg

SEQ ID NO: 3173179 - DNA, 25 bp, Homo sapien
gggctctgtcctctgtaaatgtaat

SEQ ID NO: 3173180 - DNA, 25 bp, Homo sapien
tcttaacgtgtctgcagttgagtgg

SEQ ID NO: 3173181 - DNA, 25 bp, Homo sapien
tctgcagttgagtgggattctagcc

SEQ ID NO: 3173182 - DNA, 25 bp, Homo sapien
gaagcttcttaacgtgtctgcagtt

SEQ ID NO: 3173183 - DNA, 25 bp, Homo sapien
tactgtcaggtagaagcttcttaac

SEQ ID NO: 3173184 - DNA, 25 bp, Homo sapien
tattctaattgatcccagccactga

SEQ ID NO: 3173185 - DNA, 25 bp, Homo sapien
taaaggtgtataactctgacatgcc

SEQ ID NO: 3173186 - DNA, 25 bp, Homo sapien
agagagatttgttcactgcccagct

SEQ ID NO: 3173187 - DNA, 25 bp, Homo sapien
tactaatgtttcacctgcatgcagc

SEQ ID NO: 3173188 - DNA, 25 bp, Homo sapien
gaacgagtcaatgtggtttgggaat

SEQ ID NO: 3173189 - DNA, 25 bp, Homo sapien
aatatacgttgtcatgtgcttgaac

SEQ ID NO: 3173190 - DNA, 25 bp, Homo sapien
gagtgtggacatgtgatttaatcgc

SEQ ID NO: 3173191 - DNA, 25 bp, Homo sapien
tacgatttaacattagagtgtggac

SEQ ID NO: 3173192 - DNA, 25 bp, Homo sapien
tgtctgccgttgcaacctcggttca

SEQ ID NO: 3173193 - DNA, 25 bp, Homo sapien
gcaaacgggcaaccaagccgatgat

SEQ ID NO: 3173194 - DNA, 25 bp, Homo sapien
gcttgaacttggaacagccatccca

SEQ ID NO: 3173195 - DNA, 25 bp, Homo sapien
tactctgcgagtgaatttggcttaa

SEQ ID NO: 3173196 - DNA, 25 bp, Homo sapien
actttatctatgttgttgcccacgg

SEQ ID NO: 3173197 - DNA, 25 bp, Homo sapien
ttatctatgttgttgcccacgggca

SEQ ID NO: 3173198 - DNA, 25 bp, Homo sapien
tttatctatgttgttgcccacgggc

SEQ ID NO: 3173199 - DNA, 25 bp, Homo sapien
tatctatgttgttgcccacgggcat

SEQ ID NO: 3173200 - DNA, 25 bp, Homo sapien
tttagctttgttacatactcattgt

SEQ ID NO: 3173201 - DNA, 25 bp, Homo sapien
tcattgtaaccactccgaaaagtgc

SEQ ID NO: 3173202 - DNA, 25 bp, Homo sapien
ccactccgaaaagtgctgcttgatg

SEQ ID NO: 3173203 - DNA, 25 bp, Homo sapien
cttgatgctgcgtgctctttctgtg

SEQ ID NO: 3173204 - DNA, 25 bp, Homo sapien
tgtttgaaagctcagggaccattgt

SEQ ID NO: 3173205 - DNA, 25 bp, Homo sapien
cattgttgacgttgtccctgcttgt

SEQ ID NO: 3173206 - DNA, 25 bp, Homo sapien
cttgtggagccacaggtcctaccgg

SEQ ID NO: 3173207 - DNA, 25 bp, Homo sapien
cagctggtgcccatcgcttgtggag

SEQ ID NO: 3173208 - DNA, 25 bp, Homo sapien
tactttgacatagatttctgcttac

SEQ ID NO: 3173209 - DNA, 25 bp, Homo sapien
gcaaggacacctgagtctctgtact

SEQ ID NO: 3173210 - DNA, 25 bp, Homo sapien
ttctgcttacatcgggcagttctga

SEQ ID NO: 3173211 - DNA, 25 bp, Homo sapien
tgctttcatcaaccatgttcccgag

SEQ ID NO: 3173212 - DNA, 25 bp, Homo sapien
ggagctgcacaaatttcctcgatta

SEQ ID NO: 3173213 - DNA, 25 bp, Homo sapien
taccaagagctttgagtggatgtcg

SEQ ID NO: 3173214 - DNA, 25 bp, Homo sapien
caaaaactgcatctcggagctgcac

SEQ ID NO: 3173215 - DNA, 25 bp, Homo sapien
tacctacttggatctgatgctggga

SEQ ID NO: 3173216 - DNA, 25 bp, Homo sapien
tttttgcatttggccccaaagtcac

SEQ ID NO: 3173217 - DNA, 25 bp, Homo sapien
ttgcctgggaaatcgcagattgagg

SEQ ID NO: 3173218 - DNA, 25 bp, Homo sapien
agaagaatcagcaaggacaagaaca

SEQ ID NO: 3173219 - DNA, 25 bp, Homo sapien
gaacaggtacttagtgctatttgcc

SEQ ID NO: 3173220 - DNA, 25 bp, Homo sapien
cattggtgagctctctcctgtaatt

SEQ ID NO: 3173221 - DNA, 25 bp, Homo sapien
ttggtgagctctctcctgtaattgt

SEQ ID NO: 3173222 - DNA, 25 bp, Homo sapien
attggtgagctctctcctgtaattg

SEQ ID NO: 3173223 - DNA, 25 bp, Homo sapien
tgtgctagctagtttctgaatcccc

SEQ ID NO: 3173224 - DNA, 25 bp, Homo sapien
cattgtggtgggctcttcagagacc

SEQ ID NO: 3173225 - DNA, 25 bp, Homo sapien
ggcctggatccaactgggagtctca

SEQ ID NO: 3173226 - DNA, 25 bp, Homo sapien
ggaaaggttgctttccactccctga

SEQ ID NO: 3173227 - DNA, 25 bp, Homo sapien
cagtcaccttttgtttgtccagact

SEQ ID NO: 3173228 - DNA, 25 bp, Homo sapien
agtcaccttttgtttgtccagactt

SEQ ID NO: 3173229 - DNA, 25 bp, Homo sapien
acgtccctgtgcttccacctcacta

SEQ ID NO: 3173230 - DNA, 25 bp, Homo sapien
cgtccctgtgcttccacctcactaa

SEQ ID NO: 3173231 - DNA, 25 bp, Homo sapien
ggccttcgaggcttgtcacttctgc

SEQ ID NO: 3173232 - DNA, 25 bp, Homo sapien
gttttagcggctgtctctgtccatg

SEQ ID NO: 3173233 - DNA, 25 bp, Homo sapien
cttctgccgatataagaagtgaaat

SEQ ID NO: 3173234 - DNA, 25 bp, Homo sapien
gaaatataggtcagcctcacagatc

SEQ ID NO: 3173235 - DNA, 25 bp, Homo sapien
gagagatgctggtttccatattaca

SEQ ID NO: 3173236 - DNA, 25 bp, Homo sapien
tccatattacacctgcttagtgtga

SEQ ID NO: 3173237 - DNA, 25 bp, Homo sapien
attacacctgcttagtgtgatgtgc

SEQ ID NO: 3173238 - DNA, 25 bp, Homo sapien
gatgctggtttccatattacacctg

SEQ ID NO: 3173239 - DNA, 25 bp, Homo sapien
ttgggtgaccgagtgggtgatggtg

SEQ ID NO: 3173240 - DNA, 25 bp, Homo sapien
ggtgaccgagtgggtgatggtgcca

SEQ ID NO: 3173241 - DNA, 25 bp, Homo sapien
gtgatggtgccattgactgatgatt

SEQ ID NO: 3173242 - DNA, 25 bp, Homo sapien
caggaattttacttgggtgaccgag

SEQ ID NO: 3173243 - DNA, 25 bp, Homo sapien
ggtactagttctggcttcactttgc

SEQ ID NO: 3173244 - DNA, 25 bp, Homo sapien
caagtggcctcttattgtcatggca

SEQ ID NO: 3173245 - DNA, 25 bp, Homo sapien
tatctaacgtggaggtactagttct

SEQ ID NO: 3173246 - DNA, 25 bp, Homo sapien
tttgccgaatgttaggagactggac

SEQ ID NO: 3173247 - DNA, 25 bp, Homo sapien
aggatgacagtgaggcatggagagc

SEQ ID NO: 3173248 - DNA, 25 bp, Homo sapien
cttaggatgacagtgaggcatggag

SEQ ID NO: 3173249 - DNA, 25 bp, Homo sapien
taggatgacagtgaggcatggagag

SEQ ID NO: 3173250 - DNA, 25 bp, Homo sapien
ggatgacagtgaggcatggagagcc

SEQ ID NO: 3173251 - DNA, 25 bp, Homo sapien
cactacacctctcataatctgcctg

SEQ ID NO: 3173252 - DNA, 25 bp, Homo sapien
ccttcacactacacctctcataatc

SEQ ID NO: 3173253 - DNA, 25 bp, Homo sapien
ccaccttcacactacacctctcata

SEQ ID NO: 3173254 - DNA, 25 bp, Homo sapien
ttcacactacacctctcataatctg

SEQ ID NO: 3173255 - DNA, 25 bp, Homo sapien
catagggagcatgaagtcctgtgtc

SEQ ID NO: 3173256 - DNA, 25 bp, Homo sapien
gcatagggagcatgaagtcctgtgt

SEQ ID NO: 3173257 - DNA, 25 bp, Homo sapien
tcgaagctggcatagggagcatgaa

SEQ ID NO: 3173258 - DNA, 25 bp, Homo sapien
ccctcgaagctggcatagggagcat

SEQ ID NO: 3173259 - DNA, 25 bp, Homo sapien
aggagacaaagagaggcaggatgcc

SEQ ID NO: 3173260 - DNA, 25 bp, Homo sapien
ctaggagacaaagagaggcaggatg

SEQ ID NO: 3173261 - DNA, 25 bp, Homo sapien
taggagacaaagagaggcaggatgc

SEQ ID NO: 3173262 - DNA, 25 bp, Homo sapien
ccctgctgatttggagtagcgaaat

SEQ ID NO: 3173263 - DNA, 25 bp, Homo sapien
gagtagcgaaatgactgatgtgtgc

SEQ ID NO: 3173264 - DNA, 25 bp, Homo sapien
gctgatttggagtagcgaaatgact

SEQ ID NO: 3173265 - DNA, 25 bp, Homo sapien
aaatgactgatgtgtgctacttgga

SEQ ID NO: 3173266 - DNA, 25 bp, Homo sapien
ggtgggggtactcagtttagctggc

SEQ ID NO: 3173267 - DNA, 25 bp, Homo sapien
gggtactcagtttagctggctgaag

SEQ ID NO: 3173268 - DNA, 25 bp, Homo sapien
ggggtactcagtttagctggctgaa

SEQ ID NO: 3173269 - DNA, 25 bp, Homo sapien
tgggggtactcagtttagctggctg

SEQ ID NO: 3173270 - DNA, 25 bp, Homo sapien
gctcttattagtcactttaattgga

SEQ ID NO: 3173271 - DNA, 25 bp, Homo sapien
agaggaaagactggccgctgcagag

SEQ ID NO: 3173272 - DNA, 25 bp, Homo sapien
ccgctgcagagagtgggtccttggt

SEQ ID NO: 3173273 - DNA, 25 bp, Homo sapien
cctgttggtgcctctaaagctttgc

SEQ ID NO: 3173274 - DNA, 25 bp, Homo sapien
catgtgaatcctcggatgctttgaa

SEQ ID NO: 3173275 - DNA, 25 bp, Homo sapien
gtcaattccaagcaggaggttgagg

SEQ ID NO: 3173276 - DNA, 25 bp, Homo sapien
cacaggtcaattccaagcaggaggt

SEQ ID NO: 3173277 - DNA, 25 bp, Homo sapien
gaggttgaggatctgcatgtgaatc

SEQ ID NO: 3173278 - DNA, 25 bp, Homo sapien
ccagaaccggacaagcacactgatg

SEQ ID NO: 3173279 - DNA, 25 bp, Homo sapien
cccccagaaccggacaagcacactg

SEQ ID NO: 3173280 - DNA, 25 bp, Homo sapien
tattacccccagaaccggacaagca

SEQ ID NO: 3173281 - DNA, 25 bp, Homo sapien
ctgctatgggagtagttattacccc

SEQ ID NO: 3173282 - DNA, 25 bp, Homo sapien
ttttctaggattggtgtgaggacta

SEQ ID NO: 3173283 - DNA, 25 bp, Homo sapien
cttcttttctaggattggtgtgagg

SEQ ID NO: 3173284 - DNA, 25 bp, Homo sapien
tcttttctaggattggtgtgaggac

SEQ ID NO: 3173285 - DNA, 25 bp, Homo sapien
ccttcttttctaggattggtgtgag

SEQ ID NO: 3173286 - DNA, 25 bp, Homo sapien
aaacatttgttttgccctggcgtct

SEQ ID NO: 3173287 - DNA, 25 bp, Homo sapien
gaaacatttgttttgccctggcgtc

SEQ ID NO: 3173288 - DNA, 25 bp, Homo sapien
agaaacatttgttttgccctggcgt

SEQ ID NO: 3173289 - DNA, 25 bp, Homo sapien
cagctgattcccacgagcccacatt

SEQ ID NO: 3173290 - DNA, 25 bp, Homo sapien
tatctcgctgcccatttttgcaggt

SEQ ID NO: 3173291 - DNA, 25 bp, Homo sapien
tactagaaaggttggagggctctgt

SEQ ID NO: 3173292 - DNA, 25 bp, Homo sapien
cctgctgcttactagaaaggttgga

SEQ ID NO: 3173293 - DNA, 25 bp, Homo sapien
catcgggtagtctgtacctggtcct

SEQ ID NO: 3173294 - DNA, 25 bp, Homo sapien
gatgagctgtcttccgttgggcatc

SEQ ID NO: 3173295 - DNA, 25 bp, Homo sapien
agtgggattcagcatatggcaagga

SEQ ID NO: 3173296 - DNA, 25 bp, Homo sapien
acctggtcctgatgtcttcattggg

SEQ ID NO: 3173297 - DNA, 25 bp, Homo sapien
tgatctttgaaccacttcgcagccg

SEQ ID NO: 3173298 - DNA, 25 bp, Homo sapien
gccctggccgcaataactggttttg

SEQ ID NO: 3173299 - DNA, 25 bp, Homo sapien
cccggcacaggatagagtcttggtt

SEQ ID NO: 3173300 - DNA, 25 bp, Homo sapien
tacgcgcaccagatggaagataccg

SEQ ID NO: 3173301 - DNA, 25 bp, Homo sapien
tctgcgacgccaaggaagaaatccg

SEQ ID NO: 3173302 - DNA, 25 bp, Homo sapien
catcgtctggaggaatgtcgtcctg

SEQ ID NO: 3173303 - DNA, 25 bp, Homo sapien
gggaagatccctttctgcgacgcca

SEQ ID NO: 3173304 - DNA, 25 bp, Homo sapien
atccgtgccgggctcgaaagctctg

SEQ ID NO: 3173305 - DNA, 25 bp, Homo sapien
agccatgccaggcccggccaccgac

SEQ ID NO: 3173306 - DNA, 25 bp, Homo sapien
agacgccggccgccaagatctgcat

SEQ ID NO: 3173307 - DNA, 25 bp, Homo sapien
tcagcccgggcagccatatggggga

SEQ ID NO: 3173308 - DNA, 25 bp, Homo sapien
agatctgcatccctaggccacgcta

SEQ ID NO: 3173309 - DNA, 25 bp, Homo sapien
ggatacgccagcaacagacgccggc

SEQ ID NO: 3173310 - DNA, 25 bp, Homo sapien
gctgaaatgactggtcatacctggt

SEQ ID NO: 3173311 - DNA, 25 bp, Homo sapien
ccattatgaggacagccagctgaaa

SEQ ID NO: 3173312 - DNA, 25 bp, Homo sapien
cagctgaaatgactggtcatacctg

SEQ ID NO: 3173313 - DNA, 25 bp, Homo sapien
attatgaggacagccagctgaaatg

SEQ ID NO: 3173314 - DNA, 25 bp, Homo sapien
agcttatcgttggaaactctttcac

SEQ ID NO: 3173315 - DNA, 25 bp, Homo sapien
tggagcttatcgttggaaactcttt

SEQ ID NO: 3173316 - DNA, 25 bp, Homo sapien
tcaagtcccagatcccactcttggg

SEQ ID NO: 3173317 - DNA, 25 bp, Homo sapien
cttggagcttatcgttggaaactct

SEQ ID NO: 3173318 - DNA, 25 bp, Homo sapien
caaggtctgaatccctgtagcctac

SEQ ID NO: 3173319 - DNA, 25 bp, Homo sapien
tgtagcctacccagttatgcctctc

SEQ ID NO: 3173320 - DNA, 25 bp, Homo sapien
tatgcctctcttcacagtctgggac

SEQ ID NO: 3173321 - DNA, 25 bp, Homo sapien
tcctggccctgctagaattcattcc

SEQ ID NO: 3173322 - DNA, 25 bp, Homo sapien
aaggagcatctggttatgcataaag

SEQ ID NO: 3173323 - DNA, 25 bp, Homo sapien
taaagcagagctaaaactaaatttc

SEQ ID NO: 3173324 - DNA, 25 bp, Homo sapien
ggctttttgatttgttagtgtgcat

SEQ ID NO: 3173325 - DNA, 25 bp, Homo sapien
tataattcccgaggcaaagatgata

SEQ ID NO: 3173326 - DNA, 25 bp, Homo sapien
tctgcttccttatagagaatatcaa

SEQ ID NO: 3173327 - DNA, 25 bp, Homo sapien
tcttagcacagatatttgaataccc

SEQ ID NO: 3173328 - DNA, 25 bp, Homo sapien
caagccatggacactagtactgtag

SEQ ID NO: 3173329 - DNA, 25 bp, Homo sapien
tgtcatcctgcgaaaagctgtgcaa

SEQ ID NO: 3173330 - DNA, 25 bp, Homo sapien
gatagattcctttgtaccgacatag

SEQ ID NO: 3173331 - DNA, 25 bp, Homo sapien
tactgtaggagttctcttggctgcg

SEQ ID NO: 3173332 - DNA, 25 bp, Homo sapien
ggccaggcatgatgtttgcttatgc

SEQ ID NO: 3173333 - DNA, 25 bp, Homo sapien
tttagtctattacaagatgattgca

SEQ ID NO: 3173334 - DNA, 25 bp, Homo sapien
taaaactttgaactaggccaggcat

SEQ ID NO: 3173335 - DNA, 25 bp, Homo sapien
aagtggatctcctagagtttaatta

SEQ ID NO: 3173336 - DNA, 25 bp, Homo sapien
tttctaaaatgcatttcttcagttt

SEQ ID NO: 3173337 - DNA, 25 bp, Homo sapien
tctaaaatgcatttcttcagtttca

SEQ ID NO: 3173338 - DNA, 25 bp, Homo sapien
gcatttcttcagtttcatcatgcat

SEQ ID NO: 3173339 - DNA, 25 bp, Homo sapien
ctaacacaatttctaaaatgcattt

SEQ ID NO: 3173340 - DNA, 25 bp, Homo sapien
ctggtcccgaacttccggcctcaag

SEQ ID NO: 3173341 - DNA, 25 bp, Homo sapien
ctgcgcctggctaatagatgttttt

SEQ ID NO: 3173342 - DNA, 25 bp, Homo sapien
atctcagcttactgcaagctctgcc

SEQ ID NO: 3173343 - DNA, 25 bp, Homo sapien
gtcccgaacttccggcctcaagtga

SEQ ID NO: 3173344 - DNA, 25 bp, Homo sapien
cccaggccaaaactgggaccgcagc

SEQ ID NO: 3173345 - DNA, 25 bp, Homo sapien
gcccaggccaaaactgggaccgcag

SEQ ID NO: 3173346 - DNA, 25 bp, Homo sapien
caggccaaaactgggaccgcagcct

SEQ ID NO: 3173347 - DNA, 25 bp, Homo sapien
agcccaggccaaaactgggaccgca

SEQ ID NO: 3173348 - DNA, 25 bp, Homo sapien
ggagagtccgacgagcgctgcacta

SEQ ID NO: 3173349 - DNA, 25 bp, Homo sapien
actaacgcaggatccggctgccgaa

SEQ ID NO: 3173350 - DNA, 25 bp, Homo sapien
tgcggctgccacgttggaacggaac

SEQ ID NO: 3173351 - DNA, 25 bp, Homo sapien
ggaaagatgtcgctcccggaagtgt

SEQ ID NO: 3173352 - DNA, 25 bp, Homo sapien
tacagtatatagaaagagttggttt

SEQ ID NO: 3173353 - DNA, 25 bp, Homo sapien
aggctgctaagctttttatatacag

SEQ ID NO: 3173354 - DNA, 25 bp, Homo sapien
atatacagtatatagaaagagttgg

SEQ ID NO: 3173355 - DNA, 25 bp, Homo sapien
ccaggctgctaagctttttatatac

SEQ ID NO: 3173356 - DNA, 25 bp, Homo sapien
gaccaaaattgaggcgaatccagga

SEQ ID NO: 3173357 - DNA, 25 bp, Homo sapien
gaacctgccaatgggtctccgggtg

SEQ ID NO: 3173358 - DNA, 25 bp, Homo sapien
tatcttgtagctctccgatgcggag

SEQ ID NO: 3173359 - DNA, 25 bp, Homo sapien
tgaagacgtgcatttgaccgctcct

SEQ ID NO: 3173360 - DNA, 25 bp, Homo sapien
accttcggggttcccgcgacagcat

SEQ ID NO: 3173361 - DNA, 25 bp, Homo sapien
cttcggggttcccgcgacagcatga

SEQ ID NO: 3173362 - DNA, 25 bp, Homo sapien
tcggggttcccgcgacagcatgaat

SEQ ID NO: 3173363 - DNA, 25 bp, Homo sapien
caccttcggggttcccgcgacagca

SEQ ID NO: 3173364 - DNA, 25 bp, Homo sapien
ggtgctgcagcccactgcggagcaa

SEQ ID NO: 3173365 - DNA, 25 bp, Homo sapien
ccactgcggagcaacttcgggtcat

SEQ ID NO: 3173366 - DNA, 25 bp, Homo sapien
tgagcacggtgtcacgggtgctgca

SEQ ID NO: 3173367 - DNA, 25 bp, Homo sapien
gagaggccgcgctcccggctgagca

SEQ ID NO: 3173368 - DNA, 25 bp, Homo sapien
ctccttaaagcggtaggcggtgcga

SEQ ID NO: 3173369 - DNA, 25 bp, Homo sapien
tctgtactcgtgctcaggaagacgc

SEQ ID NO: 3173370 - DNA, 25 bp, Homo sapien
tgcgagaaccggctattcagaggta

SEQ ID NO: 3173371 - DNA, 25 bp, Homo sapien
tcaaatccagccagaatcggaccgg

SEQ ID NO: 3173372 - DNA, 25 bp, Homo sapien
tgtgaggatctattttacccacttt

SEQ ID NO: 3173373 - DNA, 25 bp, Homo sapien
gtaccctgaatactgaatgacctat

SEQ ID NO: 3173374 - DNA, 25 bp, Homo sapien
tttctacttgctagtgtaccctgaa

SEQ ID NO: 3173375 - DNA, 25 bp, Homo sapien
acttgctagtgtaccctgaatactg

SEQ ID NO: 3173376 - DNA, 25 bp, Homo sapien
gacccagagccaagtacagacatca

SEQ ID NO: 3173377 - DNA, 25 bp, Homo sapien
tactagcgtggtcctctgatgcaaa

SEQ ID NO: 3173378 - DNA, 25 bp, Homo sapien
gatgcaaagcttcccaacaggtatg

SEQ ID NO: 3173379 - DNA, 25 bp, Homo sapien
gagtagttacttgaaggcagcccca

SEQ ID NO: 3173380 - DNA, 25 bp, Homo sapien
gggtccacacgattaacagccctga

SEQ ID NO: 3173381 - DNA, 25 bp, Homo sapien
ggtccacacgattaacagccctgat

SEQ ID NO: 3173382 - DNA, 25 bp, Homo sapien
tgagcgctgtatggtatcagttgga

SEQ ID NO: 3173383 - DNA, 25 bp, Homo sapien
gccctgatccattttgagcgctgta

SEQ ID NO: 3173384 - DNA, 25 bp, Homo sapien
atgccatatgactcaaagtcacttt

SEQ ID NO: 3173385 - DNA, 25 bp, Homo sapien
cttatgccatatgactcaaagtcac

SEQ ID NO: 3173386 - DNA, 25 bp, Homo sapien
tatgccatatgactcaaagtcactt

SEQ ID NO: 3173387 - DNA, 25 bp, Homo sapien
ttcttatgccatatgactcaaagtc

SEQ ID NO: 3173388 - DNA, 25 bp, Homo sapien
ctggtgactcactcatagaaagttt

SEQ ID NO: 3173389 - DNA, 25 bp, Homo sapien
tggtgactcactcatagaaagtttc

SEQ ID NO: 3173390 - DNA, 25 bp, Homo sapien
tactggtgactcactcatagaaagt

SEQ ID NO: 3173391 - DNA, 25 bp, Homo sapien
gtgactcactcatagaaagtttcat

SEQ ID NO: 3173392 - DNA, 25 bp, Homo sapien
tatagttatggtcctcagtagcaac

SEQ ID NO: 3173393 - DNA, 25 bp, Homo sapien
caagtgcatcaattaatcgtaaacc

SEQ ID NO: 3173394 - DNA, 25 bp, Homo sapien
tacctttaagatgtacaccttgagg

SEQ ID NO: 3173395 - DNA, 25 bp, Homo sapien
tgaaaattgagctcgtagcagacac

SEQ ID NO: 3173396 - DNA, 25 bp, Homo sapien
atcatagactttgctactgcacaag

SEQ ID NO: 3173397 - DNA, 25 bp, Homo sapien
tagagtgtacatgcaaattgtttca

SEQ ID NO: 3173398 - DNA, 25 bp, Homo sapien
ttcatttctgcggagtactcatctg

SEQ ID NO: 3173399 - DNA, 25 bp, Homo sapien
gtttctctccaattatataactccc

SEQ ID NO: 3173400 - DNA, 25 bp, Homo sapien
atttgacatagtggactactccctc

SEQ ID NO: 3173401 - DNA, 25 bp, Homo sapien
gacatagtggactactccctccttg

SEQ ID NO: 3173402 - DNA, 25 bp, Homo sapien
aggccatcacaatctcctggttttc

SEQ ID NO: 3173403 - DNA, 25 bp, Homo sapien
aatactttctacacttggcttccag

SEQ ID NO: 3173404 - DNA, 25 bp, Homo sapien
ggactgggttggcatttggataacc

SEQ ID NO: 3173405 - DNA, 25 bp, Homo sapien
gactgggttggcatttggataacca

SEQ ID NO: 3173406 - DNA, 25 bp, Homo sapien
actgggttggcatttggataaccac

SEQ ID NO: 3173407 - DNA, 25 bp, Homo sapien
ctggactgggttggcatttggataa

SEQ ID NO: 3173408 - DNA, 25 bp, Homo sapien
ccattctctactcttcgttgaagaa

SEQ ID NO: 3173409 - DNA, 25 bp, Homo sapien
taacaatgaacagtattgatagagc

SEQ ID NO: 3173410 - DNA, 25 bp, Homo sapien
ttctctactcttcgttgaagaaaag

SEQ ID NO: 3173411 - DNA, 25 bp, Homo sapien
gtattgatagagctgatctccattc

SEQ ID NO: 3173412 - DNA, 25 bp, Homo sapien
gcaaactgtgactgctaggatccca

SEQ ID NO: 3173413 - DNA, 25 bp, Homo sapien
cgttgaactgtccaaagcgccaagt

SEQ ID NO: 3173414 - DNA, 25 bp, Homo sapien
tactaactccacgaggtgctgccaa

SEQ ID NO: 3173415 - DNA, 25 bp, Homo sapien
gtaagtttcaggcaacagaggccct

SEQ ID NO: 3173416 - DNA, 25 bp, Homo sapien
aatgctgcaagccataccaaaagta

SEQ ID NO: 3173417 - DNA, 25 bp, Homo sapien
cactgtgcagaatgcgcaatttata

SEQ ID NO: 3173418 - DNA, 25 bp, Homo sapien
tctattttagggtatcctgggacaa

SEQ ID NO: 3173419 - DNA, 25 bp, Homo sapien
ggctagtttgctcctactgacctac

SEQ ID NO: 3173420 - DNA, 25 bp, Homo sapien
tttccagattgcactccccagcgtg

SEQ ID NO: 3173421 - DNA, 25 bp, Homo sapien
gaaaattgtccttagtatgcttcca

SEQ ID NO: 3173422 - DNA, 25 bp, Homo sapien
gagctctttcaagtcaaactaagtg

SEQ ID NO: 3173423 - DNA, 25 bp, Homo sapien
catgtactttaccttctgcctgaca

SEQ ID NO: 3173424 - DNA, 25 bp, Homo sapien
caaagggcattagatactacacata

SEQ ID NO: 3173425 - DNA, 25 bp, Homo sapien
gagcttggatttatataagcaataa

SEQ ID NO: 3173426 - DNA, 25 bp, Homo sapien
cataaagatcaggtacagagcttgg

SEQ ID NO: 3173427 - DNA, 25 bp, Homo sapien
caaaacttaagcctctgtttgaggt

SEQ ID NO: 3173428 - DNA, 25 bp, Homo sapien
atctgtataccaaaggtgagctttt

SEQ ID NO: 3173429 - DNA, 25 bp, Homo sapien
tcttgttagggcttcttgaatgcac

SEQ ID NO: 3173430 - DNA, 25 bp, Homo sapien
ttgatcatgttgtatctcttaagca

SEQ ID NO: 3173431 - DNA, 25 bp, Homo sapien
acctccggccataactttgatcatg

SEQ ID NO: 3173432 - DNA, 25 bp, Homo sapien
tcccaagagttttgaggcaatctca

SEQ ID NO: 3173433 - DNA, 25 bp, Homo sapien
tgcaatatcagcttagaagccgtgc

SEQ ID NO: 3173434 - DNA, 25 bp, Homo sapien
gcataatcccatcagagtcggccag

SEQ ID NO: 3173435 - DNA, 25 bp, Homo sapien
caacttgcctttgaacctagtgtaa

SEQ ID NO: 3173436 - DNA, 25 bp, Homo sapien
actgggcgtggtacctgtggtccta

SEQ ID NO: 3173437 - DNA, 25 bp, Homo sapien
gcgtggtacctgtggtcctacgtgc

SEQ ID NO: 3173438 - DNA, 25 bp, Homo sapien
ggtacctgtggtcctacgtgctcag

SEQ ID NO: 3173439 - DNA, 25 bp, Homo sapien
ttaactgggcgtggtacctgtggtc

SEQ ID NO: 3173440 - DNA, 25 bp, Homo sapien
cccattgccttttgtcagaccaaag

SEQ ID NO: 3173441 - DNA, 25 bp, Homo sapien
gttctgctctgcctaagatgtttca

SEQ ID NO: 3173442 - DNA, 25 bp, Homo sapien
tcatttagcttttggggaattccca

SEQ ID NO: 3173443 - DNA, 25 bp, Homo sapien
tcaattaaaatgattgtggctccca

SEQ ID NO: 3173444 - DNA, 25 bp, Homo sapien
tgctggccagagctatcgtgcacgg

SEQ ID NO: 3173445 - DNA, 25 bp, Homo sapien
tcgtgcacgggcaaaacaagccccg

SEQ ID NO: 3173446 - DNA, 25 bp, Homo sapien
gggctcgggattgcccaggaccttc

SEQ ID NO: 3173447 - DNA, 25 bp, Homo sapien
tggagcgctccagtttggacaaact

SEQ ID NO: 3173448 - DNA, 25 bp, Homo sapien
gaagcccaccagccaaatgtcataa

SEQ ID NO: 3173449 - DNA, 25 bp, Homo sapien
tacaggctcttgttcgtgcgtgtcc

SEQ ID NO: 3173450 - DNA, 25 bp, Homo sapien
cgcgttcttcctatgcccctttgta

SEQ ID NO: 3173451 - DNA, 25 bp, Homo sapien
tgcgtgtccgttttcctcgcgaagc

SEQ ID NO: 3173452 - DNA, 25 bp, Homo sapien
ccgccggctttggtgagtgtcagcc

SEQ ID NO: 3173453 - DNA, 25 bp, Homo sapien
acaaaccctggtctgtgtctcggag

SEQ ID NO: 3173454 - DNA, 25 bp, Homo sapien
gctgttgacacgcacactgcgcgac

SEQ ID NO: 3173455 - DNA, 25 bp, Homo sapien
gctgggcgcgtgattttgaacaaac

SEQ ID NO: 3173456 - DNA, 25 bp, Homo sapien
cagcgcttaaactgcctgtggtaaa

SEQ ID NO: 3173457 - DNA, 25 bp, Homo sapien
cttcgatctttcaggcagcgcttaa

SEQ ID NO: 3173458 - DNA, 25 bp, Homo sapien
tagccggtacataaaacgactgcgt

SEQ ID NO: 3173459 - DNA, 25 bp, Homo sapien
aaagttccgtttctcacgtctgtgg

SEQ ID NO: 3173460 - DNA, 25 bp, Homo sapien
tgggccaaatcctgtcgcacggctg

SEQ ID NO: 3173461 - DNA, 25 bp, Homo sapien
gatctttatgagagccgctcgaatt

SEQ ID NO: 3173462 - DNA, 25 bp, Homo sapien
atgagagccgctcgaattcatgagc

SEQ ID NO: 3173463 - DNA, 25 bp, Homo sapien
ctgggccaaatcctgtcgcacggct

SEQ ID NO: 3173464 - DNA, 25 bp, Homo sapien
taaggccagggtagcagtcgtctct

SEQ ID NO: 3173465 - DNA, 25 bp, Homo sapien
tgtagacatcctgacccacgatatg

SEQ ID NO: 3173466 - DNA, 25 bp, Homo sapien
ttcaagtctatagcctcgaaggccc

SEQ ID NO: 3173467 - DNA, 25 bp, Homo sapien
tggtctggacgacatgacagcggcc

SEQ ID NO: 3173468 - DNA, 25 bp, Homo sapien
gaagcactgagaagcaagctgccat

SEQ ID NO: 3173469 - DNA, 25 bp, Homo sapien
tggaagcactgagaagcaagctgcc

SEQ ID NO: 3173470 - DNA, 25 bp, Homo sapien
gctggaagcactgagaagcaagctg

SEQ ID NO: 3173471 - DNA, 25 bp, Homo sapien
tgcgaatctgctggaagcactgaga

SEQ ID NO: 3173472 - DNA, 25 bp, Homo sapien
ctacaacaataccaaatgaaaataa

SEQ ID NO: 3173473 - DNA, 25 bp, Homo sapien
tacaacaataccaaatgaaaataat

SEQ ID NO: 3173474 - DNA, 25 bp, Homo sapien
aacaataccaaatgaaaataatgtt

SEQ ID NO: 3173475 - DNA, 25 bp, Homo sapien
caacaataccaaatgaaaataatgt

SEQ ID NO: 3173476 - DNA, 25 bp, Homo sapien
aaagcttctagttgttctgctccag

SEQ ID NO: 3173477 - DNA, 25 bp, Homo sapien
gcttctagttgttctgctccagata

SEQ ID NO: 3173478 - DNA, 25 bp, Homo sapien
ttcaaagcttctagttgttctgctc

SEQ ID NO: 3173479 - DNA, 25 bp, Homo sapien
ttctagttgttctgctccagataac

SEQ ID NO: 3173480 - DNA, 25 bp, Homo sapien
tgccgcgagatcacgagactgacat

SEQ ID NO: 3173481 - DNA, 25 bp, Homo sapien
aaatcagtcagcaactgccgcgaga

SEQ ID NO: 3173482 - DNA, 25 bp, Homo sapien
ggaagatgtgtgcaaaaatcagtca

SEQ ID NO: 3173483 - DNA, 25 bp, Homo sapien
gctatcaggcaagttaggaagatgt

SEQ ID NO: 3173484 - DNA, 25 bp, Homo sapien
tgtggattatggtacaatactgtag

SEQ ID NO: 3173485 - DNA, 25 bp, Homo sapien
tgttcctgcatacacgatgctggag

SEQ ID NO: 3173486 - DNA, 25 bp, Homo sapien
tagtgaacggaagcaacacatttct

SEQ ID NO: 3173487 - DNA, 25 bp, Homo sapien
cataaaatgtcgtttggcacactgt

SEQ ID NO: 3173488 - DNA, 25 bp, Homo sapien
ttctcatatatagatgcaagatgct

SEQ ID NO: 3173489 - DNA, 25 bp, Homo sapien
tgtcctgtttccaaaggaattccca

SEQ ID NO: 3173490 - DNA, 25 bp, Homo sapien
tagtgatgatattcggccaggtgca

SEQ ID NO: 3173491 - DNA, 25 bp, Homo sapien
gcttgctcccatcttagggcctttg

SEQ ID NO: 3173492 - DNA, 25 bp, Homo sapien
tataaaactccacataacctggtcc

SEQ ID NO: 3173493 - DNA, 25 bp, Homo sapien
tctcctctaagagtatctagtgatg

SEQ ID NO: 3173494 - DNA, 25 bp, Homo sapien
tgaaccgcataggtactcatctccc

SEQ ID NO: 3173495 - DNA, 25 bp, Homo sapien
tatcccttacatgtcactgcctttc

SEQ ID NO: 3173496 - DNA, 25 bp, Homo sapien
tagtatctcaaacccaacaatcctt

SEQ ID NO: 3173497 - DNA, 25 bp, Homo sapien
tctttacctagcctaactcctatgg

SEQ ID NO: 3173498 - DNA, 25 bp, Homo sapien
tagcaattatctgtgggtagtcaga

SEQ ID NO: 3173499 - DNA, 25 bp, Homo sapien
ggtagtcagattataggtggctttc

SEQ ID NO: 3173500 - DNA, 25 bp, Homo sapien
ggtcacattttatgccaggagtgca

SEQ ID NO: 3173501 - DNA, 25 bp, Homo sapien
acagagtttataattcacttggccc

SEQ ID NO: 3173502 - DNA, 25 bp, Homo sapien
ctcgatttatgtaagcctctgcctg

SEQ ID NO: 3173503 - DNA, 25 bp, Homo sapien
ttcattctgaagcaacgatgctcga

SEQ ID NO: 3173504 - DNA, 25 bp, Homo sapien
tgttcattggttgattcattctgaa

SEQ ID NO: 3173505 - DNA, 25 bp, Homo sapien
catcctccagatatagcctagcaat

SEQ ID NO: 3173506 - DNA, 25 bp, Homo sapien
tataatcaagaacacgtgcatagca

SEQ ID NO: 3173507 - DNA, 25 bp, Homo sapien
cactttcgtggactattgtcttgta

SEQ ID NO: 3173508 - DNA, 25 bp, Homo sapien
taagatcgtacagtgcaaagcatgt

SEQ ID NO: 3173509 - DNA, 25 bp, Homo sapien
tcttgtaagagagctcattgtacct

SEQ ID NO: 3173510 - DNA, 25 bp, Homo sapien
tcaaatttcacaatgttattttcac

SEQ ID NO: 3173511 - DNA, 25 bp, Homo sapien
tgaggcatcagcatggcagcaaatt

SEQ ID NO: 3173512 - DNA, 25 bp, Homo sapien
tctaggatcccataggcagcaagtt

SEQ ID NO: 3173513 - DNA, 25 bp, Homo sapien
ccttaaaaagagtagctagcatccg

SEQ ID NO: 3173514 - DNA, 25 bp, Homo sapien
cagcaagttgctggcacctttcatc

SEQ ID NO: 3173515 - DNA, 25 bp, Homo sapien
accatatacacataagacaggatca

SEQ ID NO: 3173516 - DNA, 25 bp, Homo sapien
ccatatacacataagacaggatcat

SEQ ID NO: 3173517 - DNA, 25 bp, Homo sapien
ggaagccaagatgggaggaactgct

SEQ ID NO: 3173518 - DNA, 25 bp, Homo sapien
aggaactgcttgagcccaggagttc

SEQ ID NO: 3173519 - DNA, 25 bp, Homo sapien
aagaccagcctgggcaaaatggaga

SEQ ID NO: 3173520 - DNA, 25 bp, Homo sapien
gcctgggcaaaatggagagatcctg

SEQ ID NO: 3173521 - DNA, 25 bp, Homo sapien
caataacagctctgtccaagatgct

SEQ ID NO: 3173522 - DNA, 25 bp, Homo sapien
aaaagagctccaagttcttcgaagg

SEQ ID NO: 3173523 - DNA, 25 bp, Homo sapien
attatataatttgcttgcagacaac

SEQ ID NO: 3173524 - DNA, 25 bp, Homo sapien
caacaaattgtgttcaataacagct

SEQ ID NO: 3173525 - DNA, 25 bp, Homo sapien
ccattcatacgtccttcggttatca

SEQ ID NO: 3173526 - DNA, 25 bp, Homo sapien
tcatttgagatgctatcttttccgc

SEQ ID NO: 3173527 - DNA, 25 bp, Homo sapien
tcaataaatccattcatacgtcctt

SEQ ID NO: 3173528 - DNA, 25 bp, Homo sapien
ccttcggttatcatttgagatgcta

SEQ ID NO: 3173529 - DNA, 25 bp, Homo sapien
catggatgaaccctaaagatactat

SEQ ID NO: 3173530 - DNA, 25 bp, Homo sapien
atccagactaggtaaatccagagac

SEQ ID NO: 3173531 - DNA, 25 bp, Homo sapien
gccaaaaggtcacatgtcacatatt

SEQ ID NO: 3173532 - DNA, 25 bp, Homo sapien
taaagatactatgctgagtggaatc

SEQ ID NO: 3173533 - DNA, 25 bp, Homo sapien
gaaacaaagtgattggatctgctta

SEQ ID NO: 3173534 - DNA, 25 bp, Homo sapien
ggtgctgtttgactaattttctcca

SEQ ID NO: 3173535 - DNA, 25 bp, Homo sapien
tctccaaaaggttattcacttggaa

SEQ ID NO: 3173536 - DNA, 25 bp, Homo sapien
cttgtgctgtccattctggtgctgt

SEQ ID NO: 3173537 - DNA, 25 bp, Homo sapien
cacagagaccctgaaatatatggga

SEQ ID NO: 3173538 - DNA, 25 bp, Homo sapien
tgagttagcttaatacacagagacc

SEQ ID NO: 3173539 - DNA, 25 bp, Homo sapien
tgctttggagatagtgaaactgatc

SEQ ID NO: 3173540 - DNA, 25 bp, Homo sapien
tgtcttctttaaacggaatccagca

SEQ ID NO: 3173541 - DNA, 25 bp, Homo sapien
tttattagaataaccacatttggag

SEQ ID NO: 3173542 - DNA, 25 bp, Homo sapien
ttagaataaccacatttggagaggc

SEQ ID NO: 3173543 - DNA, 25 bp, Homo sapien
tattagaataaccacatttggagag

SEQ ID NO: 3173544 - DNA, 25 bp, Homo sapien
attagaataaccacatttggagagg

SEQ ID NO: 3173545 - DNA, 25 bp, Homo sapien
tctctgtgtgctctagtagctggag

SEQ ID NO: 3173546 - DNA, 25 bp, Homo sapien
taactgaagagctactctctgtgtg

SEQ ID NO: 3173547 - DNA, 25 bp, Homo sapien
tacatgttggagctgatactaaaag

SEQ ID NO: 3173548 - DNA, 25 bp, Homo sapien
agtgttcctagcagtcactgaccag

SEQ ID NO: 3173549 - DNA, 25 bp, Homo sapien
ccatttaagaaaatatctaaataat

SEQ ID NO: 3173550 - DNA, 25 bp, Homo sapien
taccatttaagaaaatatctaaata

SEQ ID NO: 3173551 - DNA, 25 bp, Homo sapien
cactggtgtaagttccggagtccga

SEQ ID NO: 3173552 - DNA, 25 bp, Homo sapien
gagtccgaaggctggcaaacctgga

SEQ ID NO: 3173553 - DNA, 25 bp, Homo sapien
acggtgaggccatccgaaagctgga

SEQ ID NO: 3173554 - DNA, 25 bp, Homo sapien
tggagaccttgggataccggtagca

SEQ ID NO: 3173555 - DNA, 25 bp, Homo sapien
acaatcttgaatgttataatcccaa

SEQ ID NO: 3173556 - DNA, 25 bp, Homo sapien
cacgaagctgaatttgtgtaagcat

SEQ ID NO: 3173557 - DNA, 25 bp, Homo sapien
gttataatcccaaatgatgaaatcc

SEQ ID NO: 3173558 - DNA, 25 bp, Homo sapien
aaagtgcattatcacgaagctgaat

SEQ ID NO: 3173559 - DNA, 25 bp, Homo sapien
tggcctactgagcatttttatcttg

SEQ ID NO: 3173560 - DNA, 25 bp, Homo sapien
ctagagtcagttagggtgtgttccc

SEQ ID NO: 3173561 - DNA, 25 bp, Homo sapien
gattacatgcatacctggcctactg

SEQ ID NO: 3173562 - DNA, 25 bp, Homo sapien
gtttatgagagactgtagttttccc

SEQ ID NO: 3173563 - DNA, 25 bp, Homo sapien
ccttatctggtcttattagctagga

SEQ ID NO: 3173564 - DNA, 25 bp, Homo sapien
tctgtatatgattgatgaagatccc

SEQ ID NO: 3173565 - DNA, 25 bp, Homo sapien
gctaggattctggtatgatattaaa

SEQ ID NO: 3173566 - DNA, 25 bp, Homo sapien
ctctatttcaagtatactgagcatt

SEQ ID NO: 3173567 - DNA, 25 bp, Homo sapien
cccaggcagttatggtacatttagc

SEQ ID NO: 3173568 - DNA, 25 bp, Homo sapien
gactacagataactattcccaggca

SEQ ID NO: 3173569 - DNA, 25 bp, Homo sapien
ttgcagggttctagcttgagtccac

SEQ ID NO: 3173570 - DNA, 25 bp, Homo sapien
gatccgtcagcatcattttgccctg

SEQ ID NO: 3173571 - DNA, 25 bp, Homo sapien
ggtttcagaaactaagacttgggca

SEQ ID NO: 3173572 - DNA, 25 bp, Homo sapien
ggtttgcaggctcccagtaaatatg

SEQ ID NO: 3173573 - DNA, 25 bp, Homo sapien
aacaagtggacatttaaacggctag

SEQ ID NO: 3173574 - DNA, 25 bp, Homo sapien
aaagctgctctcactccgaatctaa

SEQ ID NO: 3173575 - DNA, 25 bp, Homo sapien
aaatcttgtttgctgtgggatccac

SEQ ID NO: 3173576 - DNA, 25 bp, Homo sapien
gcagtgaacggctattatggtacat

SEQ ID NO: 3173577 - DNA, 25 bp, Homo sapien
cacttactggaaccttcttttgcag

SEQ ID NO: 3173578 - DNA, 25 bp, Homo sapien
catgcacgccctgaatgatcggctc

SEQ ID NO: 3173579 - DNA, 25 bp, Homo sapien
aaaccagaatgaagtcgcttgtgct

SEQ ID NO: 3173580 - DNA, 25 bp, Homo sapien
tcagtcaacctcagtcagtgtagta

SEQ ID NO: 3173581 - DNA, 25 bp, Homo sapien
tatggactagcctcctgctctaggc

SEQ ID NO: 3173582 - DNA, 25 bp, Homo sapien
gggactacaagcctacgggcactta

SEQ ID NO: 3173583 - DNA, 25 bp, Homo sapien
gtccctacgggcacagaatttaaga

SEQ ID NO: 3173584 - DNA, 25 bp, Homo sapien
aagatccattattccccattctggg

SEQ ID NO: 3173585 - DNA, 25 bp, Homo sapien
gacatggccttgatgtaatttgacc

SEQ ID NO: 3173586 - DNA, 25 bp, Homo sapien
ttgctcccagcataccttaaaaaga

SEQ ID NO: 3173587 - DNA, 25 bp, Homo sapien
tctcttctgctgagtcctgcctctt

SEQ ID NO: 3173588 - DNA, 25 bp, Homo sapien
cttctgctgagtcctgcctcttcat

SEQ ID NO: 3173589 - DNA, 25 bp, Homo sapien
ctgtctcttctgctgagtcctgcct

SEQ ID NO: 3173590 - DNA, 25 bp, Homo sapien
tgtctcttctgctgagtcctgcctc

SEQ ID NO: 3173591 - DNA, 25 bp, Homo sapien
gctctgcagtataaggaggtttgcc

SEQ ID NO: 3173592 - DNA, 25 bp, Homo sapien
aaggctgtcagactgtggtgcaaaa

SEQ ID NO: 3173593 - DNA, 25 bp, Homo sapien
gccaaagccatcgagccaaagttaa

SEQ ID NO: 3173594 - DNA, 25 bp, Homo sapien
gaagagaaggctggttaaagcatcc

SEQ ID NO: 3173595 - DNA, 25 bp, Homo sapien
ttctgctccagcctatagataggaa

SEQ ID NO: 3173596 - DNA, 25 bp, Homo sapien
caggctgaatctttgcagtttctgc

SEQ ID NO: 3173597 - DNA, 25 bp, Homo sapien
cattttaagtgactgattacccagg

SEQ ID NO: 3173598 - DNA, 25 bp, Homo sapien
aagtgccagacaagcccgtgctgtc

SEQ ID NO: 3173599 - DNA, 25 bp, Homo sapien
ccatgggatacagcatgaccgggca

SEQ ID NO: 3173600 - DNA, 25 bp, Homo sapien
agggaaggactcaaaaccatgggat

SEQ ID NO: 3173601 - DNA, 25 bp, Homo sapien
tcttggtgagggaaggactcaaaac

SEQ ID NO: 3173602 - DNA, 25 bp, Homo sapien
gacaatccatttacttctgtctgta

SEQ ID NO: 3173603 - DNA, 25 bp, Homo sapien
ggtaccagatgagtaactccgaaat

SEQ ID NO: 3173604 - DNA, 25 bp, Homo sapien
actggtaccagatgagtaactccga

SEQ ID NO: 3173605 - DNA, 25 bp, Homo sapien
taccagatgagtaactccgaaatgc

SEQ ID NO: 3173606 - DNA, 25 bp, Homo sapien
cagatgagtaactccgaaatgccat

SEQ ID NO: 3173607 - DNA, 25 bp, Homo sapien
gtgcacagcaggtgtggcaagtcgg

SEQ ID NO: 3173608 - DNA, 25 bp, Homo sapien
gcacagcaggtgtggcaagtcggca

SEQ ID NO: 3173609 - DNA, 25 bp, Homo sapien
cacagcaggtgtggcaagtcggcac

SEQ ID NO: 3173610 - DNA, 25 bp, Homo sapien
cagcaggtgtggcaagtcggcacat

SEQ ID NO: 3173611 - DNA, 25 bp, Homo sapien
tatgtgcctgacatgtgtcacaaat

SEQ ID NO: 3173612 - DNA, 25 bp, Homo sapien
gctctggagcactagatgtataaga

SEQ ID NO: 3173613 - DNA, 25 bp, Homo sapien
gctttctgtgcttcaaggggaaaga

SEQ ID NO: 3173614 - DNA, 25 bp, Homo sapien
attcttgctgcaagctaattcttcc

SEQ ID NO: 3173615 - DNA, 25 bp, Homo sapien
taatggtattgttctgccagccagt

SEQ ID NO: 3173616 - DNA, 25 bp, Homo sapien
ggcagctcctactcggtctatgata

SEQ ID NO: 3173617 - DNA, 25 bp, Homo sapien
tgtctacgataccataggcagctcc

SEQ ID NO: 3173618 - DNA, 25 bp, Homo sapien
tgaggatcccttcacaaagatgtgt

SEQ ID NO: 3173619 - DNA, 25 bp, Homo sapien
catctcaaggtgtcctcacttggcc

SEQ ID NO: 3173620 - DNA, 25 bp, Homo sapien
tggcgggggtccaccatctcaaggt

SEQ ID NO: 3173621 - DNA, 25 bp, Homo sapien
gggtccaccatctcaaggtgtcctc

SEQ ID NO: 3173622 - DNA, 25 bp, Homo sapien
agctggcgggggtccaccatctcaa

SEQ ID NO: 3173623 - DNA, 25 bp, Homo sapien
tggttccactttggtagagagcctc

SEQ ID NO: 3173624 - DNA, 25 bp, Homo sapien
tcaggacccaggtagaaactgctgg

SEQ ID NO: 3173625 - DNA, 25 bp, Homo sapien
cattcagagtcagcgtggacacctg

SEQ ID NO: 3173626 - DNA, 25 bp, Homo sapien
catctgttagtttccctgagtctgg

SEQ ID NO: 3173627 - DNA, 25 bp, Homo sapien
tgacgggtgcagatggtgcacagag

SEQ ID NO: 3173628 - DNA, 25 bp, Homo sapien
ctgacgggtgcagatggtgcacaga

SEQ ID NO: 3173629 - DNA, 25 bp, Homo sapien
tctgacgggtgcagatggtgcacag

SEQ ID NO: 3173630 - DNA, 25 bp, Homo sapien
tgtgcacaactaagcagatgacaca

SEQ ID NO: 3173631 - DNA, 25 bp, Homo sapien
gggtcaccaccacgtatctcggtct

SEQ ID NO: 3173632 - DNA, 25 bp, Homo sapien
tgcatcagcttcaccgggtcaccac

SEQ ID NO: 3173633 - DNA, 25 bp, Homo sapien
tgcaggagaaaaccccgattggcca

SEQ ID NO: 3173634 - DNA, 25 bp, Homo sapien
tcacatgtaggtgcccctcagaagt

SEQ ID NO: 3173635 - DNA, 25 bp, Homo sapien
cagaagtgctggtcacaatcaagtc

SEQ ID NO: 3173636 - DNA, 25 bp, Homo sapien
tggtaaacagcaacagtgtcctctg

SEQ ID NO: 3173637 - DNA, 25 bp, Homo sapien
tgtcctgcatgaaggccaagtcttt

SEQ ID NO: 3173638 - DNA, 25 bp, Homo sapien
agagcagttcatgggcgcaaagggc

SEQ ID NO: 3173639 - DNA, 25 bp, Homo sapien
gcatcttgctgactgcgcccatctg

SEQ ID NO: 3173640 - DNA, 25 bp, Homo sapien
ttcatgggcgcaaagggcatcttgc

SEQ ID NO: 3173641 - DNA, 25 bp, Homo sapien
ggcatcttgctgactgcgcccatct

SEQ ID NO: 3173642 - DNA, 25 bp, Homo sapien
tattgcccatggtaatgactccttg

SEQ ID NO: 3173643 - DNA, 25 bp, Homo sapien
gagtggcctgagcccatattgccca

SEQ ID NO: 3173644 - DNA, 25 bp, Homo sapien
tgcaatgcgaataaccaaggtgagg

SEQ ID NO: 3173645 - DNA, 25 bp, Homo sapien
tagggacagtttgcatttatggaaa

SEQ ID NO: 3173646 - DNA, 25 bp, Homo sapien
tacaacagccctgcggcatagaacc

SEQ ID NO: 3173647 - DNA, 25 bp, Homo sapien
gcatagaaccggtggtgagcctgcc

SEQ ID NO: 3173648 - DNA, 25 bp, Homo sapien
agaaagcccagcctgtcctacaaca

SEQ ID NO: 3173649 - DNA, 25 bp, Homo sapien
tggaggccattattggataccaggg

SEQ ID NO: 3173650 - DNA, 25 bp, Homo sapien
cactggagctattctgatgcgtgga

SEQ ID NO: 3173651 - DNA, 25 bp, Homo sapien
tggagcattggtttggcagctgaac

SEQ ID NO: 3173652 - DNA, 25 bp, Homo sapien
tggagcaggctgtactattaatgac

SEQ ID NO: 3173653 - DNA, 25 bp, Homo sapien
cagattggtacatgctctccctctt

SEQ ID NO: 3173654 - DNA, 25 bp, Homo sapien
tctgaactttctttagccccaaatc

SEQ ID NO: 3173655 - DNA, 25 bp, Homo sapien
ttcaggatctgaactttctttagcc

SEQ ID NO: 3173656 - DNA, 25 bp, Homo sapien
gaccatttttcttcaggatctgaac

SEQ ID NO: 3173657 - DNA, 25 bp, Homo sapien
caaatcccttttctcttgtatccct

SEQ ID NO: 3173658 - DNA, 25 bp, Homo sapien
cagttctgcgctttttaccagtgaa

SEQ ID NO: 3173659 - DNA, 25 bp, Homo sapien
ttgttcagaaatgggtaatgtggcc

SEQ ID NO: 3173660 - DNA, 25 bp, Homo sapien
ggcttttaatgtacttgtcacctga

SEQ ID NO: 3173661 - DNA, 25 bp, Homo sapien
gtctctgagtaaccctttggaatgg

SEQ ID NO: 3173662 - DNA, 25 bp, Homo sapien
gcttggcaagctggactcagcaaaa

SEQ ID NO: 3173663 - DNA, 25 bp, Homo sapien
cctattatgcttggcaagctggact

SEQ ID NO: 3173664 - DNA, 25 bp, Homo sapien
caaaactgggaagtcagcagtttgt

SEQ ID NO: 3173665 - DNA, 25 bp, Homo sapien
actcagcaaaactgggaagtcagca

SEQ ID NO: 3173666 - DNA, 25 bp, Homo sapien
ggcacgtcatggaaacagaaatctt

SEQ ID NO: 3173667 - DNA, 25 bp, Homo sapien
tagtttgggcacctactcattgtag

SEQ ID NO: 3173668 - DNA, 25 bp, Homo sapien
tggcctgcacccttaaaacacatgt

SEQ ID NO: 3173669 - DNA, 25 bp, Homo sapien
tcattgcttagctagtggcctgcac

SEQ ID NO: 3173670 - DNA, 25 bp, Homo sapien
tcagagcagggactgcacaacagct

SEQ ID NO: 3173671 - DNA, 25 bp, Homo sapien
gaaatgtgtccacactgtttgcagt

SEQ ID NO: 3173672 - DNA, 25 bp, Homo sapien
gctgattctggataactcttgagtg

SEQ ID NO: 3173673 - DNA, 25 bp, Homo sapien
tacttgtaaaacatgccgcagaaca

SEQ ID NO: 3173674 - DNA, 25 bp, Homo sapien
catactttctattgagggtttgctg

SEQ ID NO: 3173675 - DNA, 25 bp, Homo sapien
tgtttgaagttgtttcatgacaccc

SEQ ID NO: 3173676 - DNA, 25 bp, Homo sapien
tgtttcatgacacccatactttcta

SEQ ID NO: 3173677 - DNA, 25 bp, Homo sapien
catgacacccatactttctattgag

SEQ ID NO: 3173678 - DNA, 25 bp, Homo sapien
cctactatcatggattggtctaaga

SEQ ID NO: 3173679 - DNA, 25 bp, Homo sapien
caagtgtttaggcagtgttttacca

SEQ ID NO: 3173680 - DNA, 25 bp, Homo sapien
gagacactggctaagtgatggaaac

SEQ ID NO: 3173681 - DNA, 25 bp, Homo sapien
tcaaggtaataagatggagacactg

SEQ ID NO: 3173682 - DNA, 25 bp, Homo sapien
cacacttagttgtatggacatttgg

SEQ ID NO: 3173683 - DNA, 25 bp, Homo sapien
tatacacctgtttgtcccatgtgtg

SEQ ID NO: 3173684 - DNA, 25 bp, Homo sapien
tattggctctgtcgtattcatagag

SEQ ID NO: 3173685 - DNA, 25 bp, Homo sapien
tgcagtagcacaaattcagctagct

SEQ ID NO: 3173686 - DNA, 25 bp, Homo sapien
tctacagctatgtctttagtaaagt

SEQ ID NO: 3173687 - DNA, 25 bp, Homo sapien
tgtgaagatgtgttattctacagct

SEQ ID NO: 3173688 - DNA, 25 bp, Homo sapien
aaaatgttaatgtctactatgtaaa

SEQ ID NO: 3173689 - DNA, 25 bp, Homo sapien
tgtagttcagatattggtgtataaa

SEQ ID NO: 3173690 - DNA, 25 bp, Homo sapien
tggtgatacaaacccggacctccta

SEQ ID NO: 3173691 - DNA, 25 bp, Homo sapien
caggtacggaggacttggaacttga

SEQ ID NO: 3173692 - DNA, 25 bp, Homo sapien
tcccagatgcaaagagttgaccagt

SEQ ID NO: 3173693 - DNA, 25 bp, Homo sapien
tctcgtccttggaggtggtgataca

SEQ ID NO: 3173694 - DNA, 25 bp, Homo sapien
ttccgaaaggccccttccgctgctc

SEQ ID NO: 3173695 - DNA, 25 bp, Homo sapien
tgtgggctcgagtaccccgttcaaa

SEQ ID NO: 3173696 - DNA, 25 bp, Homo sapien
ccgaaaggccccttccgctgctctt

SEQ ID NO: 3173697 - DNA, 25 bp, Homo sapien
cctgtgggctcgagtaccccgttca

SEQ ID NO: 3173698 - DNA, 25 bp, Homo sapien
ttcttcctccctagaccaccgcaaa

SEQ ID NO: 3173699 - DNA, 25 bp, Homo sapien
ctccctagaccaccgcaaacagcaa

SEQ ID NO: 3173700 - DNA, 25 bp, Homo sapien
gtgtgtcaacttcttcctccctaga

SEQ ID NO: 3173701 - DNA, 25 bp, Homo sapien
tgtgtcaacttcttcctccctagac

SEQ ID NO: 3173702 - DNA, 25 bp, Homo sapien
tggatacctgttgtgaacaacctct

SEQ ID NO: 3173703 - DNA, 25 bp, Homo sapien
ctggatacctgttgtgaacaacctc

SEQ ID NO: 3173704 - DNA, 25 bp, Homo sapien
tttagcctacggattaacgcatggg

SEQ ID NO: 3173705 - DNA, 25 bp, Homo sapien
tgaagcccatgactccctgtaatcg

SEQ ID NO: 3173706 - DNA, 25 bp, Homo sapien
caaattgttttgtcctacggcagaa

SEQ ID NO: 3173707 - DNA, 25 bp, Homo sapien
cttcaaatgaatgggactgtgtgcc

SEQ ID NO: 3173708 - DNA, 25 bp, Homo sapien
tctttataaggattttccattgaaa

SEQ ID NO: 3173709 - DNA, 25 bp, Homo sapien
tgtacattcttataatctacatgct

SEQ ID NO: 3173710 - DNA, 25 bp, Homo sapien
tctacatgctttccacacaagatac

SEQ ID NO: 3173711 - DNA, 25 bp, Homo sapien
cacacaagatacatttcttaagagg

SEQ ID NO: 3173712 - DNA, 25 bp, Homo sapien
ccagccaacatacagaattctagcg

SEQ ID NO: 3173713 - DNA, 25 bp, Homo sapien
aaagttctgaccctcaccaattgag

SEQ ID NO: 3173714 - DNA, 25 bp, Homo sapien
gcctgctataaactgacttgattct

SEQ ID NO: 3173715 - DNA, 25 bp, Homo sapien
tctagcgctattcacttgccccaaa

SEQ ID NO: 3173716 - DNA, 25 bp, Homo sapien
tttctgaatgtgtaaatttcaaaaa

SEQ ID NO: 3173717 - DNA, 25 bp, Homo sapien
ttctgaatgtgtaaatttcaaaaaa

SEQ ID NO: 3173718 - DNA, 25 bp, Homo sapien
tctgaatgtgtaaatttcaaaaaac

SEQ ID NO: 3173719 - DNA, 25 bp, Homo sapien
tatttctgaatgtgtaaatttcaaa

SEQ ID NO: 3173720 - DNA, 25 bp, Homo sapien
atggagaaacaaactgggacaaaag

SEQ ID NO: 3173721 - DNA, 25 bp, Homo sapien
tgtgccttccataaatgcatccagt

SEQ ID NO: 3173722 - DNA, 25 bp, Homo sapien
ctgtaatgtgccttccataaatgca

SEQ ID NO: 3173723 - DNA, 25 bp, Homo sapien
cataaatgcatccagtaaatggaga

SEQ ID NO: 3173724 - DNA, 25 bp, Homo sapien
tgcttttgtgatttctttctgtttc

SEQ ID NO: 3173725 - DNA, 25 bp, Homo sapien
tatttgagctctcttaattgctttt

SEQ ID NO: 3173726 - DNA, 25 bp, Homo sapien
cattatttgagctctcttaattgct

SEQ ID NO: 3173727 - DNA, 25 bp, Homo sapien
ccattatttgagctctcttaattgc

SEQ ID NO: 3173728 - DNA, 25 bp, Homo sapien
atgagcaaaatttcagctagctcaa

SEQ ID NO: 3173729 - DNA, 25 bp, Homo sapien
tcagctagctcaattcagttgttga

SEQ ID NO: 3173730 - DNA, 25 bp, Homo sapien
caaaatttcagctagctcaattcag

SEQ ID NO: 3173731 - DNA, 25 bp, Homo sapien
aatttcagctagctcaattcagttg

SEQ ID NO: 3173732 - DNA, 25 bp, Homo sapien
ggatccttgtatgtaactggcataa

SEQ ID NO: 3173733 - DNA, 25 bp, Homo sapien
ccttgagatatgcaggatccttgta

SEQ ID NO: 3173734 - DNA, 25 bp, Homo sapien
agggtccttgagatatgcaggatcc

SEQ ID NO: 3173735 - DNA, 25 bp, Homo sapien
ctttagggtccttgagatatgcagg

SEQ ID NO: 3173736 - DNA, 25 bp, Homo sapien
ttattcccgatatctgatgttacaa

SEQ ID NO: 3173737 - DNA, 25 bp, Homo sapien
tattcccgatatctgatgttacaaa

SEQ ID NO: 3173738 - DNA, 25 bp, Homo sapien
aagtttattagtggtaacgtgatag

SEQ ID NO: 3173739 - DNA, 25 bp, Homo sapien
tttattagtggtaacgtgatagaat

SEQ ID NO: 3173740 - DNA, 25 bp, Homo sapien
agtttattagtggtaacgtgataga

SEQ ID NO: 3173741 - DNA, 25 bp, Homo sapien
ataagtttattagtggtaacgtgat

SEQ ID NO: 3173742 - DNA, 25 bp, Homo sapien
tttattcaacatagataaaatgtga

SEQ ID NO: 3173743 - DNA, 25 bp, Homo sapien
gcaatctgcttaatggacattggta

SEQ ID NO: 3173744 - DNA, 25 bp, Homo sapien
tctgcttaatggacattggtatgaa

SEQ ID NO: 3173745 - DNA, 25 bp, Homo sapien
aataagcaatctgcttaatggacat

SEQ ID NO: 3173746 - DNA, 25 bp, Homo sapien
actggtttgagggtagactcgtcta

SEQ ID NO: 3173747 - DNA, 25 bp, Homo sapien
tgtctattaggtgtaaatcatctct

SEQ ID NO: 3173748 - DNA, 25 bp, Homo sapien
aaagggaagatatcttaaccaggca

SEQ ID NO: 3173749 - DNA, 25 bp, Homo sapien
agcaccactatccatcccaatgtaa

SEQ ID NO: 3173750 - DNA, 25 bp, Homo sapien
gggcaacgtattgagaccatgtcta

SEQ ID NO: 3173751 - DNA, 25 bp, Homo sapien
aatctggcagccttaattattacac

SEQ ID NO: 3173752 - DNA, 25 bp, Homo sapien
cctagtttagagtcctttgcatgaa

SEQ ID NO: 3173753 - DNA, 25 bp, Homo sapien
gaagtacattatggctagagttgcc

SEQ ID NO: 3173754 - DNA, 25 bp, Homo sapien
ttttatttggctgatgggtaaagcc

SEQ ID NO: 3173755 - DNA, 25 bp, Homo sapien
ggtgaatattcacggtctcctacat

SEQ ID NO: 3173756 - DNA, 25 bp, Homo sapien
tgtttttactatgttgagctacttg

SEQ ID NO: 3173757 - DNA, 25 bp, Homo sapien
cacagataactcttagtgcatttac

SEQ ID NO: 3173758 - DNA, 25 bp, Homo sapien
tgtgagaccccatcatagatgctgt

SEQ ID NO: 3173759 - DNA, 25 bp, Homo sapien
cagttatgagttgcttaatgaaggc

SEQ ID NO: 3173760 - DNA, 25 bp, Homo sapien
tatcaaacacgtcaaccacttctag

SEQ ID NO: 3173761 - DNA, 25 bp, Homo sapien
tagatgctgtcccttgttgaacgag

SEQ ID NO: 3173762 - DNA, 25 bp, Homo sapien
ttgagctgaggagttggagactagc

SEQ ID NO: 3173763 - DNA, 25 bp, Homo sapien
gcctgggcaacacagcaaaacccca

SEQ ID NO: 3173764 - DNA, 25 bp, Homo sapien
tgggcaacacagcaaaaccccatct

SEQ ID NO: 3173765 - DNA, 25 bp, Homo sapien
acttgagctgaggagttggagacta

SEQ ID NO: 3173766 - DNA, 25 bp, Homo sapien
tcactgagcaacattaggagacctc

SEQ ID NO: 3173767 - DNA, 25 bp, Homo sapien
tatacatgtactaatcaaaagagcc

SEQ ID NO: 3173768 - DNA, 25 bp, Homo sapien
gaggttgaagctgcattattgagcc

SEQ ID NO: 3173769 - DNA, 25 bp, Homo sapien
tattatactaagcacatttcacagc

SEQ ID NO: 3173770 - DNA, 25 bp, Homo sapien
caggagtgatggcatgcttctgtag

SEQ ID NO: 3173771 - DNA, 25 bp, Homo sapien
aggagtgatggcatgcttctgtagt

SEQ ID NO: 3173772 - DNA, 25 bp, Homo sapien
gtgatagaggcaaggcgtcatatac

SEQ ID NO: 3173773 - DNA, 25 bp, Homo sapien
agttcagacgagacatctcatggct

SEQ ID NO: 3173774 - DNA, 25 bp, Homo sapien
ccaaactcagcagtgatagaggcaa

SEQ ID NO: 3173775 - DNA, 25 bp, Homo sapien
gttcagacgagacatctcatggctt

SEQ ID NO: 3173776 - DNA, 25 bp, Homo sapien
catgaaacatccgtctatattttgt

SEQ ID NO: 3173777 - DNA, 25 bp, Homo sapien
tctaaacgttctacagataattgct

SEQ ID NO: 3173778 - DNA, 25 bp, Homo sapien
aaacaaagcatgaaacatccgtcta

SEQ ID NO: 3173779 - DNA, 25 bp, Homo sapien
tacaccttccgctttatagatccaa

SEQ ID NO: 3173780 - DNA, 25 bp, Homo sapien
aacaaagtgagttaaagttgtgtct

SEQ ID NO: 3173781 - DNA, 25 bp, Homo sapien
gagttaaagttgtgtcttccatcat

SEQ ID NO: 3173782 - DNA, 25 bp, Homo sapien
ccctctggttcatcacgtgagtgcc

SEQ ID NO: 3173783 - DNA, 25 bp, Homo sapien
cctgccacatcacctggattagagg

SEQ ID NO: 3173784 - DNA, 25 bp, Homo sapien
ttagaatacaaaaaagccctcatgt

SEQ ID NO: 3173785 - DNA, 25 bp, Homo sapien
gaatacaaaaaagccctcatgtttc

SEQ ID NO: 3173786 - DNA, 25 bp, Homo sapien
aaaaaagccctcatgtttccacatt

SEQ ID NO: 3173787 - DNA, 25 bp, Homo sapien
caaaaaagccctcatgtttccacat

SEQ ID NO: 3173788 - DNA, 25 bp, Homo sapien
taaagcctcttgagctactcatatg

SEQ ID NO: 3173789 - DNA, 25 bp, Homo sapien
cacttagaactttgccaaaatacat

SEQ ID NO: 3173790 - DNA, 25 bp, Homo sapien
tcagtgtcatccattagtatccatc

SEQ ID NO: 3173791 - DNA, 25 bp, Homo sapien
tgagaaccgaggtctataatatata

SEQ ID NO: 3173792 - DNA, 25 bp, Homo sapien
cgtgtacgccgcttctggcttccac

SEQ ID NO: 3173793 - DNA, 25 bp, Homo sapien
cagccgtgtacgccgcttctggctt

SEQ ID NO: 3173794 - DNA, 25 bp, Homo sapien
acgcagccgtgtacgccgcttctgg

SEQ ID NO: 3173795 - DNA, 25 bp, Homo sapien
cacgcagccgtgtacgccgcttctg

SEQ ID NO: 3173796 - DNA, 25 bp, Homo sapien
tgtgggtgtaaaacgaactcttgga

SEQ ID NO: 3173797 - DNA, 25 bp, Homo sapien
tctgggacgcttgaggtcttgtttg

SEQ ID NO: 3173798 - DNA, 25 bp, Homo sapien
tcttgtttgtgtgggtgtaaaacga

SEQ ID NO: 3173799 - DNA, 25 bp, Homo sapien
gaatgaactgctgacgtatctggga

SEQ ID NO: 3173800 - DNA, 25 bp, Homo sapien
ctttggcacaccggtcgccggcgga

SEQ ID NO: 3173801 - DNA, 25 bp, Homo sapien
gagcaccgcactttggcacaccggt

SEQ ID NO: 3173802 - DNA, 25 bp, Homo sapien
cctgcgggagcaccgcactttggca

SEQ ID NO: 3173803 - DNA, 25 bp, Homo sapien
gttccctgcgggagcaccgcacttt

SEQ ID NO: 3173804 - DNA, 25 bp, Homo sapien
cagaattacggcaatatccttcctt

SEQ ID NO: 3173805 - DNA, 25 bp, Homo sapien
gaattacggcaatatccttccttcc

SEQ ID NO: 3173806 - DNA, 25 bp, Homo sapien
aaactttcagaattacggcaatatc

SEQ ID NO: 3173807 - DNA, 25 bp, Homo sapien
ctttcagaattacggcaatatcctt

SEQ ID NO: 3173808 - DNA, 25 bp, Homo sapien
cagagcgccgagcccggcactcacc

SEQ ID NO: 3173809 - DNA, 25 bp, Homo sapien
cgcagtggagggccgagcgccacag

SEQ ID NO: 3173810 - DNA, 25 bp, Homo sapien
ccactcaggagaggtccgcagtgga

SEQ ID NO: 3173811 - DNA, 25 bp, Homo sapien
agagcgccgagcccggcactcacct

SEQ ID NO: 3173812 - DNA, 25 bp, Homo sapien
taaaaggatgaagccgagaaccagc

SEQ ID NO: 3173813 - DNA, 25 bp, Homo sapien
tcatgtagatctcggagatgcccag

SEQ ID NO: 3173814 - DNA, 25 bp, Homo sapien
gagacactccgaagaccgaaggtaa

SEQ ID NO: 3173815 - DNA, 25 bp, Homo sapien
agccgagaaccagcgtcagccaggt

SEQ ID NO: 3173816 - DNA, 25 bp, Homo sapien
ctgggagccacccaattagctgaga

SEQ ID NO: 3173817 - DNA, 25 bp, Homo sapien
aaagaagagcagataaagccacgtc

SEQ ID NO: 3173818 - DNA, 25 bp, Homo sapien
ggagccacccaattagctgagaaag

SEQ ID NO: 3173819 - DNA, 25 bp, Homo sapien
agaaagaagagcagataaagccacg

SEQ ID NO: 3173820 - DNA, 25 bp, Homo sapien
gctgtatgagagagcagttcaatca

SEQ ID NO: 3173821 - DNA, 25 bp, Homo sapien
aaagacattgctgtatgagagagca

SEQ ID NO: 3173822 - DNA, 25 bp, Homo sapien
aacaccagctgaagaggatcatctg

SEQ ID NO: 3173823 - DNA, 25 bp, Homo sapien
cattcttacacagggtataaattcc

SEQ ID NO: 3173824 - DNA, 25 bp, Homo sapien
caaggagtgatacaagggctaggcc

SEQ ID NO: 3173825 - DNA, 25 bp, Homo sapien
ggcagccgcaaccaacaaatcagag

SEQ ID NO: 3173826 - DNA, 25 bp, Homo sapien
cagaaatcactatgggatcacagct

SEQ ID NO: 3173827 - DNA, 25 bp, Homo sapien
tatagttgagaaaagcaatccaccg

SEQ ID NO: 3173828 - DNA, 25 bp, Homo sapien
ccatctcctgaaatgatagctctaa

SEQ ID NO: 3173829 - DNA, 25 bp, Homo sapien
atgatctgctcaaaagcactccatg

SEQ ID NO: 3173830 - DNA, 25 bp, Homo sapien
ggtctaccctgcataacacaattac

SEQ ID NO: 3173831 - DNA, 25 bp, Homo sapien
ttggcaccagacaagtttcagaatg

SEQ ID NO: 3173832 - DNA, 25 bp, Homo sapien
cattctagagaatcccaagggcttt

SEQ ID NO: 3173833 - DNA, 25 bp, Homo sapien
aacatcatagttcaaaaactgctag

SEQ ID NO: 3173834 - DNA, 25 bp, Homo sapien
ccttgaaggggcagagacaaaattt

SEQ ID NO: 3173835 - DNA, 25 bp, Homo sapien
tattgaacataagcacccttgaagg

SEQ ID NO: 3173836 - DNA, 25 bp, Homo sapien
tattaatttaaactgtcccacagac

SEQ ID NO: 3173837 - DNA, 25 bp, Homo sapien
actgtcccacagacacaacataaaa

SEQ ID NO: 3173838 - DNA, 25 bp, Homo sapien
cacagacacaacataaaacacttca

SEQ ID NO: 3173839 - DNA, 25 bp, Homo sapien
ttaatttaaactgtcccacagacac

SEQ ID NO: 3173840 - DNA, 25 bp, Homo sapien
gcagagtttttaagaatcgactcct

SEQ ID NO: 3173841 - DNA, 25 bp, Homo sapien
ttcctttttcaattcgtattgtggc

SEQ ID NO: 3173842 - DNA, 25 bp, Homo sapien
ctttttcaattcgtattgtggccca

SEQ ID NO: 3173843 - DNA, 25 bp, Homo sapien
caacagaagcagagtttttaagaat

SEQ ID NO: 3173844 - DNA, 25 bp, Homo sapien
agaagagtaagatatggcccggcac

SEQ ID NO: 3173845 - DNA, 25 bp, Homo sapien
catttgtcctatggctggagcaacc

SEQ ID NO: 3173846 - DNA, 25 bp, Homo sapien
taaaagttgctaggatctcagtcag

SEQ ID NO: 3173847 - DNA, 25 bp, Homo sapien
tatgagccgattcaaactccaacct

SEQ ID NO: 3173848 - DNA, 25 bp, Homo sapien
gaaccacttcatcctgctcattcat

SEQ ID NO: 3173849 - DNA, 25 bp, Homo sapien
atttcctgccagaaccacttcatcc

SEQ ID NO: 3173850 - DNA, 25 bp, Homo sapien
ttcctgccagaaccacttcatcctg

SEQ ID NO: 3173851 - DNA, 25 bp, Homo sapien
tgccagaaccacttcatcctgctca

SEQ ID NO: 3173852 - DNA, 25 bp, Homo sapien
tttggactaatgcagctaaatcacc

SEQ ID NO: 3173853 - DNA, 25 bp, Homo sapien
taatgcagctaaatcaccaaccaga

SEQ ID NO: 3173854 - DNA, 25 bp, Homo sapien
gcagctaaatcaccaaccagacctt

SEQ ID NO: 3173855 - DNA, 25 bp, Homo sapien
tgctgaggggttttggactaatgca

SEQ ID NO: 3173856 - DNA, 25 bp, Homo sapien
tggttgatctttgtcttgttcattc

SEQ ID NO: 3173857 - DNA, 25 bp, Homo sapien
gacaggcacttgcatacactcctag

SEQ ID NO: 3173858 - DNA, 25 bp, Homo sapien
actcctagtgggaactcatagcccc

SEQ ID NO: 3173859 - DNA, 25 bp, Homo sapien
aatcacacatgttctctgacagagc

SEQ ID NO: 3173860 - DNA, 25 bp, Homo sapien
taatagaggccattatggagggcag

SEQ ID NO: 3173861 - DNA, 25 bp, Homo sapien
ttttttggtccaaagagccaagcag

SEQ ID NO: 3173862 - DNA, 25 bp, Homo sapien
cttttttggtccaaagagccaagca

SEQ ID NO: 3173863 - DNA, 25 bp, Homo sapien
tttttggtccaaagagccaagcagc

SEQ ID NO: 3173864 - DNA, 25 bp, Homo sapien
catgacactagctcctctgaggaaa

SEQ ID NO: 3173865 - DNA, 25 bp, Homo sapien
catagtgagccgcagactgatgtac

SEQ ID NO: 3173866 - DNA, 25 bp, Homo sapien
gaggcagtaggacacaatagcgcac

SEQ ID NO: 3173867 - DNA, 25 bp, Homo sapien
cagagagccctttttccatgggtga

SEQ ID NO: 3173868 - DNA, 25 bp, Homo sapien
ccaagtttagttggcaggtagccac

SEQ ID NO: 3173869 - DNA, 25 bp, Homo sapien
gaatgaggcaagcataggccaccct

SEQ ID NO: 3173870 - DNA, 25 bp, Homo sapien
gatagtcttgtacactcccagagta

SEQ ID NO: 3173871 - DNA, 25 bp, Homo sapien
cagagtacacgaaccctgttttggg

SEQ ID NO: 3173872 - DNA, 25 bp, Homo sapien
gatcccaatgaaagccaaggtaacc

SEQ ID NO: 3173873 - DNA, 25 bp, Homo sapien
agctgcccaaccagtgtagttccta

SEQ ID NO: 3173874 - DNA, 25 bp, Homo sapien
gttcctataaccagcaaactgatcc

SEQ ID NO: 3173875 - DNA, 25 bp, Homo sapien
tctggcagctgcccaaccagtgtag

SEQ ID NO: 3173876 - DNA, 25 bp, Homo sapien
ggaccagttcactcagccagttttt

SEQ ID NO: 3173877 - DNA, 25 bp, Homo sapien
tgataatgaatggtaccagagaggg

SEQ ID NO: 3173878 - DNA, 25 bp, Homo sapien
acacagatccggcagcaagtcagat

SEQ ID NO: 3173879 - DNA, 25 bp, Homo sapien
tcagatggaccagttcactcagcca

SEQ ID NO: 3173880 - DNA, 25 bp, Homo sapien
ttcttcccaaccacttccaatgctt

SEQ ID NO: 3173881 - DNA, 25 bp, Homo sapien
tcttcccaaccacttccaatgcttc

SEQ ID NO: 3173882 - DNA, 25 bp, Homo sapien
aacacattggaagcactctgactcc

SEQ ID NO: 3173883 - DNA, 25 bp, Homo sapien
gtagagatgaacacattggaagcac

SEQ ID NO: 3173884 - DNA, 25 bp, Homo sapien
gagatgaacacattggaagcactct

SEQ ID NO: 3173885 - DNA, 25 bp, Homo sapien
gagaagtagagatgaacacattgga

SEQ ID NO: 3173886 - DNA, 25 bp, Homo sapien
catagcataacatccatccgttgtc

SEQ ID NO: 3173887 - DNA, 25 bp, Homo sapien
tatggttggcaacacaaatgcctcc

SEQ ID NO: 3173888 - DNA, 25 bp, Homo sapien
gggaagtatggttggcaacacaaat

SEQ ID NO: 3173889 - DNA, 25 bp, Homo sapien
catccgttgtcaagattaaaacatc

SEQ ID NO: 3173890 - DNA, 25 bp, Homo sapien
gatgtatcatagaattgagaaaatg

SEQ ID NO: 3173891 - DNA, 25 bp, Homo sapien
gcaagaaagaaccttaagagttgga

SEQ ID NO: 3173892 - DNA, 25 bp, Homo sapien
cagatttccaatgtaaatattagaa

SEQ ID NO: 3173893 - DNA, 25 bp, Homo sapien
catattgatattgttgggaaacagg

SEQ ID NO: 3173894 - DNA, 25 bp, Homo sapien
ccatagctctctgaataattcccat

SEQ ID NO: 3173895 - DNA, 25 bp, Homo sapien
ggtgtcgatccttcatttctgagcg

SEQ ID NO: 3173896 - DNA, 25 bp, Homo sapien
ctgagcgttcaaaccagacatgagg

SEQ ID NO: 3173897 - DNA, 25 bp, Homo sapien
tgaggacaagccttgaccatagctc

SEQ ID NO: 3173898 - DNA, 25 bp, Homo sapien
gaaaaatccaacagcaaacagggct

SEQ ID NO: 3173899 - DNA, 25 bp, Homo sapien
tctttggtagcaaggccaagattgg

SEQ ID NO: 3173900 - DNA, 25 bp, Homo sapien
tctggctaagacaggtgatttgcca

SEQ ID NO: 3173901 - DNA, 25 bp, Homo sapien
caagattggtcagcttttatgctac

SEQ ID NO: 3173902 - DNA, 25 bp, Homo sapien
cagcaaacacttaatcaatcatata

SEQ ID NO: 3173903 - DNA, 25 bp, Homo sapien
gtgataacaatcattcagcaaacac

SEQ ID NO: 3173904 - DNA, 25 bp, Homo sapien
tatatttagcaagtagttatcaaat

SEQ ID NO: 3173905 - DNA, 25 bp, Homo sapien
taagtgataacaatcattcagcaaa

SEQ ID NO: 3173906 - DNA, 25 bp, Homo sapien
tcttatcagcaatatgttcttttag

SEQ ID NO: 3173907 - DNA, 25 bp, Homo sapien
cttcaggaaaaattagtatgggtag

SEQ ID NO: 3173908 - DNA, 25 bp, Homo sapien
cttatcagcaatatgttcttttagt

SEQ ID NO: 3173909 - DNA, 25 bp, Homo sapien
tcttcttatcagcaatatgttcttt

SEQ ID NO: 3173910 - DNA, 25 bp, Homo sapien
ggatgtatggttcctccaatttcaa

SEQ ID NO: 3173911 - DNA, 25 bp, Homo sapien
actgaagtattgttgatgcaagttc

SEQ ID NO: 3173912 - DNA, 25 bp, Homo sapien
tttaaacatcatgactgaagtattg

SEQ ID NO: 3173913 - DNA, 25 bp, Homo sapien
taattgcaactggatgtatggttcc

SEQ ID NO: 3173914 - DNA, 25 bp, Homo sapien
caaaatgcatcaccgaactgagggt

SEQ ID NO: 3173915 - DNA, 25 bp, Homo sapien
ggcatgtaccacacgtcacagacga

SEQ ID NO: 3173916 - DNA, 25 bp, Homo sapien
tcatcattcgaagcaggtagctcac

SEQ ID NO: 3173917 - DNA, 25 bp, Homo sapien
gtcacagacgatggcccagctggtc

SEQ ID NO: 3173918 - DNA, 25 bp, Homo sapien
caggcctccttgtatagcaatagca

SEQ ID NO: 3173919 - DNA, 25 bp, Homo sapien
aatagcagacttaaccctgttagca

SEQ ID NO: 3173920 - DNA, 25 bp, Homo sapien
tagcaaactggactgcatcttctcc

SEQ ID NO: 3173921 - DNA, 25 bp, Homo sapien
gggaagttcagtcaggcctccttgt

SEQ ID NO: 3173922 - DNA, 25 bp, Homo sapien
tgctgctcttccttaaagatgtcct

SEQ ID NO: 3173923 - DNA, 25 bp, Homo sapien
tacgagctgcctacatataaatgcg

SEQ ID NO: 3173924 - DNA, 25 bp, Homo sapien
caaaaagggcacctgtaggttctgc

SEQ ID NO: 3173925 - DNA, 25 bp, Homo sapien
gatctaaaggctgtcatccgtcctc

SEQ ID NO: 3173926 - DNA, 25 bp, Homo sapien
gggtactaggtacagatctacagca

SEQ ID NO: 3173927 - DNA, 25 bp, Homo sapien
tgggcagcacccaacagtggcttct

SEQ ID NO: 3173928 - DNA, 25 bp, Homo sapien
cacttctgaggcctctattgtctgg

SEQ ID NO: 3173929 - DNA, 25 bp, Homo sapien
cctggaagaacccatgcacttctga

SEQ ID NO: 3173930 - DNA, 25 bp, Homo sapien
aagtgtgctatacagctcctggaag

SEQ ID NO: 3173931 - DNA, 25 bp, Homo sapien
tagaaatgccagtaggacaaccagt

SEQ ID NO: 3173932 - DNA, 25 bp, Homo sapien
aaatgagggatgtactcctagcacc

SEQ ID NO: 3173933 - DNA, 25 bp, Homo sapien
tcctagcacctaaaatgatacctga

SEQ ID NO: 3173934 - DNA, 25 bp, Homo sapien
gcttcatgagtaattggccctcaaa

SEQ ID NO: 3173935 - DNA, 25 bp, Homo sapien
gcttgtttctacacgggctattaca

SEQ ID NO: 3173936 - DNA, 25 bp, Homo sapien
ggtgcaacaggcgtcagcttgtttc

SEQ ID NO: 3173937 - DNA, 25 bp, Homo sapien
caggcgtcagcttgtttctacacgg

SEQ ID NO: 3173938 - DNA, 25 bp, Homo sapien
ttctacacgggctattacaacatct

SEQ ID NO: 3173939 - DNA, 25 bp, Homo sapien
cagagcctgccagagtagaggtatc

SEQ ID NO: 3173940 - DNA, 25 bp, Homo sapien
cacagtcactcatccagtgctcaga

SEQ ID NO: 3173941 - DNA, 25 bp, Homo sapien
gagccataggagcagctccaaacct

SEQ ID NO: 3173942 - DNA, 25 bp, Homo sapien
agtagaggtatcagctgggtcatcc

SEQ ID NO: 3173943 - DNA, 25 bp, Homo sapien
cagtgaagcatctgggtgtctctac

SEQ ID NO: 3173944 - DNA, 25 bp, Homo sapien
tcagtgaagcatctgggtgtctcta

SEQ ID NO: 3173945 - DNA, 25 bp, Homo sapien
tatattcctcaaaaacatatatgtc

SEQ ID NO: 3173946 - DNA, 25 bp, Homo sapien
tattcctcaaaaatatatgtcttat

SEQ ID NO: 3173947 - DNA, 25 bp, Homo sapien
atattcctcaaaaacatatatgtca

SEQ ID NO: 3173948 - DNA, 25 bp, Homo sapien
tattcctcaaaaacatatatgtcat

SEQ ID NO: 3173949 - DNA, 25 bp, Homo sapien
tatatgatcacatgacagatagcag

SEQ ID NO: 3173950 - DNA, 25 bp, Homo sapien
tgacagatagcagaccctgaagaaa

SEQ ID NO: 3173951 - DNA, 25 bp, Homo sapien
tagcagaccctgaagaaaatcaaaa

SEQ ID NO: 3173952 - DNA, 25 bp, Homo sapien
agatagcagaccctgaagaaaatca

SEQ ID NO: 3173953 - DNA, 25 bp, Homo sapien
ctgtgcatccgggaaggagatgtcc

SEQ ID NO: 3173954 - DNA, 25 bp, Homo sapien
cctgtgcatccgggaaggagatgtc

SEQ ID NO: 3173955 - DNA, 25 bp, Homo sapien
tgacctgtgcatccgggaaggagat

SEQ ID NO: 3173956 - DNA, 25 bp, Homo sapien
acctgtgcatccgggaaggagatgt

SEQ ID NO: 3173957 - DNA, 25 bp, Homo sapien
tcaggagtcatgtggtcagaggtca

SEQ ID NO: 3173958 - DNA, 25 bp, Homo sapien
gaactcctccttgctaagggaccca

SEQ ID NO: 3173959 - DNA, 25 bp, Homo sapien
taatgtcactattgggctgggcacc

SEQ ID NO: 3173960 - DNA, 25 bp, Homo sapien
cataggccaagttaaccatggaagg

SEQ ID NO: 3173961 - DNA, 25 bp, Homo sapien
ctggtccaatccaggtctaagcagg

SEQ ID NO: 3173962 - DNA, 25 bp, Homo sapien
ctggtacgcctgtttacattttggc

SEQ ID NO: 3173963 - DNA, 25 bp, Homo sapien
ggtccaatccaggtctaagcaggca

SEQ ID NO: 3173964 - DNA, 25 bp, Homo sapien
ggcatcccaatgtctggtacgcctg

SEQ ID NO: 3173965 - DNA, 25 bp, Homo sapien
tctggataattcaacaactgctcag

SEQ ID NO: 3173966 - DNA, 25 bp, Homo sapien
gagcctctggataattcaacaactg

SEQ ID NO: 3173967 - DNA, 25 bp, Homo sapien
ggataattcaacaactgctcagaaa

SEQ ID NO: 3173968 - DNA, 25 bp, Homo sapien
cttgagcctctggataattcaacaa

SEQ ID NO: 3173969 - DNA, 25 bp, Homo sapien
cctctccagctgagaaatcttgatc

SEQ ID NO: 3173970 - DNA, 25 bp, Homo sapien
cttgccaggagtccaggacccagtg

SEQ ID NO: 3173971 - DNA, 25 bp, Homo sapien
gccaggagtccaggacccagtgctc

SEQ ID NO: 3173972 - DNA, 25 bp, Homo sapien
tgccaggagtccaggacccagtgct

SEQ ID NO: 3173973 - DNA, 25 bp, Homo sapien
aggagtccaggacccagtgctccat

SEQ ID NO: 3173974 - DNA, 25 bp, Homo sapien
aacttctgcccagatcttggtagat

SEQ ID NO: 3173975 - DNA, 25 bp, Homo sapien
gaaacaggttagatagcagggatga

SEQ ID NO: 3173976 - DNA, 25 bp, Homo sapien
cttggtagatcttgagctgctctgg

SEQ ID NO: 3173977 - DNA, 25 bp, Homo sapien
ttcactcttagcaaagggcagtgtc

SEQ ID NO: 3173978 - DNA, 25 bp, Homo sapien
agatggaacggagaacagcacggtc

SEQ ID NO: 3173979 - DNA, 25 bp, Homo sapien
caactgaagggagaagcggtccttg

SEQ ID NO: 3173980 - DNA, 25 bp, Homo sapien
ttgagtccgctccttctcacagagg

SEQ ID NO: 3173981 - DNA, 25 bp, Homo sapien
gcagcagtgttctgcgcaactgaag

SEQ ID NO: 3173982 - DNA, 25 bp, Homo sapien
cttcattgagaaggggagccttctt

SEQ ID NO: 3173983 - DNA, 25 bp, Homo sapien
gagccttctttttttccttggcaga

SEQ ID NO: 3173984 - DNA, 25 bp, Homo sapien
gccttctttttttccttggcagatc

SEQ ID NO: 3173985 - DNA, 25 bp, Homo sapien
ttctttttttccttggcagatccac

SEQ ID NO: 3173986 - DNA, 25 bp, Homo sapien
tcttcttaccctgaaaatagcatga

SEQ ID NO: 3173987 - DNA, 25 bp, Homo sapien
cttcttaccctgaaaatagcatgat

SEQ ID NO: 3173988 - DNA, 25 bp, Homo sapien
ttcttaccctgaaaatagcatgatt

SEQ ID NO: 3173989 - DNA, 25 bp, Homo sapien
tcttaccctgaaaatagcatgattt

SEQ ID NO: 3173990 - DNA, 25 bp, Homo sapien
tgtgaaatccacattcagctttcca

SEQ ID NO: 3173991 - DNA, 25 bp, Homo sapien
atgtgaaatccacattcagctttcc

SEQ ID NO: 3173992 - DNA, 25 bp, Homo sapien
cattcagctttccaaatactatctc

SEQ ID NO: 3173993 - DNA, 25 bp, Homo sapien
tcagctttccaaatactatctccat

SEQ ID NO: 3173994 - DNA, 25 bp, Homo sapien
gacagtggctgtcaggatttctgtt

SEQ ID NO: 3173995 - DNA, 25 bp, Homo sapien
caatatgtctgatggcaccgctgga

SEQ ID NO: 3173996 - DNA, 25 bp, Homo sapien
aactattaccatggtgaaaaagcaa

SEQ ID NO: 3173997 - DNA, 25 bp, Homo sapien
ttctctatcttcgtaaaccgcagtg

SEQ ID NO: 3173998 - DNA, 25 bp, Homo sapien
ccgcagtgaattgatggaatgaccc

SEQ ID NO: 3173999 - DNA, 25 bp, Homo sapien
gatcatctcttccaataagtgtgct

SEQ ID NO: 3174000 - DNA, 25 bp, Homo sapien
atcatctcttccaataagtgtgctc

SEQ ID NO: 3174001 - DNA, 25 bp, Homo sapien
aatggctgttagtccctgacaaaac

SEQ ID NO: 3174002 - DNA, 25 bp, Homo sapien
tactgtagatgagaaggtaaatggc

SEQ ID NO: 3174003 - DNA, 25 bp, Homo sapien
atggctgttagtccctgacaaaacc

SEQ ID NO: 3174004 - DNA, 25 bp, Homo sapien
atgagaaggtaaatggctgttagtc

SEQ ID NO: 3174005 - DNA, 25 bp, Homo sapien
ggccatattcaattctgtatcaaat

SEQ ID NO: 3174006 - DNA, 25 bp, Homo sapien
aaggccatattcaattctgtatcaa

SEQ ID NO: 3174007 - DNA, 25 bp, Homo sapien
taaggccatattcaattctgtatca

SEQ ID NO: 3174008 - DNA, 25 bp, Homo sapien
cttaaggccatattcaattctgtat

SEQ ID NO: 3174009 - DNA, 25 bp, Homo sapien
tatactgctcataatagctggctcg

SEQ ID NO: 3174010 - DNA, 25 bp, Homo sapien
tttcctgcacccagagatttgtcat

SEQ ID NO: 3174011 - DNA, 25 bp, Homo sapien
gatgattatcatcttgcccgcctgg

SEQ ID NO: 3174012 - DNA, 25 bp, Homo sapien
tattgtggtgggcacatcaaggcag

SEQ ID NO: 3174013 - DNA, 25 bp, Homo sapien
gcagaatgggaagtgcccagcactg

SEQ ID NO: 3174014 - DNA, 25 bp, Homo sapien
gaacttggcagaatgggaagtgccc

SEQ ID NO: 3174015 - DNA, 25 bp, Homo sapien
agcactgtgtttaagatttcagtcg

SEQ ID NO: 3174016 - DNA, 25 bp, Homo sapien
cactgtgtttaagatttcagtcggg

SEQ ID NO: 3174017 - DNA, 25 bp, Homo sapien
gcatgacagaatcacttaagctgga

SEQ ID NO: 3174018 - DNA, 25 bp, Homo sapien
ttaagctggattcactaacatcagg

SEQ ID NO: 3174019 - DNA, 25 bp, Homo sapien
ttgacccctacagagtaggctctga

SEQ ID NO: 3174020 - DNA, 25 bp, Homo sapien
tagtttatgcaaataggatcagagg

SEQ ID NO: 3174021 - DNA, 25 bp, Homo sapien
aaaatctccttgcattggcctcctg

SEQ ID NO: 3174022 - DNA, 25 bp, Homo sapien
tattatgaagcaaatgaccagacat

SEQ ID NO: 3174023 - DNA, 25 bp, Homo sapien
aaaaatctccttgcattggcctcct

SEQ ID NO: 3174024 - DNA, 25 bp, Homo sapien
cctcctgagcctgttggagtaatat

SEQ ID NO: 3174025 - DNA, 25 bp, Homo sapien
aaaatagtcagaaatgttgatattc

SEQ ID NO: 3174026 - DNA, 25 bp, Homo sapien
aatagtcagaaatgttgatattcat

SEQ ID NO: 3174027 - DNA, 25 bp, Homo sapien
aaatagtcagaaatgttgatattca

SEQ ID NO: 3174028 - DNA, 25 bp, Homo sapien
caaaatagtcagaaatgttgatatt

SEQ ID NO: 3174029 - DNA, 25 bp, Homo sapien
gaggcttgcttacaccattcatagc

SEQ ID NO: 3174030 - DNA, 25 bp, Homo sapien
tgtttcaccaccagcaaaatctgct

SEQ ID NO: 3174031 - DNA, 25 bp, Homo sapien
tctgcttctccgtgaagctcttctc

SEQ ID NO: 3174032 - DNA, 25 bp, Homo sapien
caaaagaggcttgcttacaccattc

SEQ ID NO: 3174033 - DNA, 25 bp, Homo sapien
gtaccattttactggagggtatagc

SEQ ID NO: 3174034 - DNA, 25 bp, Homo sapien
tatttgtccagaacggagctgcttg

SEQ ID NO: 3174035 - DNA, 25 bp, Homo sapien
tattggaagtcctagattgctttgt

SEQ ID NO: 3174036 - DNA, 25 bp, Homo sapien
gggaagcctgaggtgcttcaatgcc

SEQ ID NO: 3174037 - DNA, 25 bp, Homo sapien
tcctgaattggatgcatgttctgca

SEQ ID NO: 3174038 - DNA, 25 bp, Homo sapien
tacttgtctgccctgaaactgttct

SEQ ID NO: 3174039 - DNA, 25 bp, Homo sapien
taaatttggctattgcatcgttttt

SEQ ID NO: 3174040 - DNA, 25 bp, Homo sapien
cgttttttatacttgtctgccctga

SEQ ID NO: 3174041 - DNA, 25 bp, Homo sapien
ttctgaggcttcagttgtgaccttg

SEQ ID NO: 3174042 - DNA, 25 bp, Homo sapien
agagaggttgttcgttcagctgatg

SEQ ID NO: 3174043 - DNA, 25 bp, Homo sapien
gttcagctgatgcacatttgcccct

SEQ ID NO: 3174044 - DNA, 25 bp, Homo sapien
agctgatgcacatttgcccctctga

SEQ ID NO: 3174045 - DNA, 25 bp, Homo sapien
gcccctctgattactgccagtgttc

SEQ ID NO: 3174046 - DNA, 25 bp, Homo sapien
taattcacttggtattgatcgggca

SEQ ID NO: 3174047 - DNA, 25 bp, Homo sapien
tggaataccaatgaccaggctggag

SEQ ID NO: 3174048 - DNA, 25 bp, Homo sapien
tcgggcagattcctaatgggatggc

SEQ ID NO: 3174049 - DNA, 25 bp, Homo sapien
cataaatgcataatccagtgcggcg

SEQ ID NO: 3174050 - DNA, 25 bp, Homo sapien
tgccacagtcgtcattttctgcatt

SEQ ID NO: 3174051 - DNA, 25 bp, Homo sapien
ttaaacattagaactgtgcagttgc

SEQ ID NO: 3174052 - DNA, 25 bp, Homo sapien
tctctgatgtgggtattgacaagca

SEQ ID NO: 3174053 - DNA, 25 bp, Homo sapien
tggattatatcctctgccacagtcg

SEQ ID NO: 3174054 - DNA, 25 bp, Homo sapien
caagaacatctactcgcagcacaac

SEQ ID NO: 3174055 - DNA, 25 bp, Homo sapien
gaacatctactcgcagcacaaccat

SEQ ID NO: 3174056 - DNA, 25 bp, Homo sapien
ccaagaacatctactcgcagcacaa

SEQ ID NO: 3174057 - DNA, 25 bp, Homo sapien
aagaacatctactcgcagcacaacc

SEQ ID NO: 3174058 - DNA, 25 bp, Homo sapien
cactggttacgatatctgtgggaca

SEQ ID NO: 3174059 - DNA, 25 bp, Homo sapien
ttacactggttacgatatctgtggg

SEQ ID NO: 3174060 - DNA, 25 bp, Homo sapien
acactggttacgatatctgtgggac

SEQ ID NO: 3174061 - DNA, 25 bp, Homo sapien
agttacactggttacgatatctgtg

SEQ ID NO: 3174062 - DNA, 25 bp, Homo sapien
ctgtcaaatcttcacataagattat

SEQ ID NO: 3174063 - DNA, 25 bp, Homo sapien
aatggtgtcttcactaagtgcatgc

SEQ ID NO: 3174064 - DNA, 25 bp, Homo sapien
ggtgtcttcactaagtgcatgcagg

SEQ ID NO: 3174065 - DNA, 25 bp, Homo sapien
cactaagtgcatgcaggtagtatac

SEQ ID NO: 3174066 - DNA, 25 bp, Homo sapien
tcttcactaagtgcatgcaggtagt

SEQ ID NO: 3174067 - DNA, 25 bp, Homo sapien
gctttagccacagaacaagtctgca

SEQ ID NO: 3174068 - DNA, 25 bp, Homo sapien
gggctttagccacagaacaagtctg

SEQ ID NO: 3174069 - DNA, 25 bp, Homo sapien
ctgggctttagccacagaacaagtc

SEQ ID NO: 3174070 - DNA, 25 bp, Homo sapien
tttctgggctttagccacagaacaa

SEQ ID NO: 3174071 - DNA, 25 bp, Homo sapien
ttccctgttccaaaagagtcgcctc

SEQ ID NO: 3174072 - DNA, 25 bp, Homo sapien
caaaagagtcgcctctgttatccaa

SEQ ID NO: 3174073 - DNA, 25 bp, Homo sapien
gcctctgttatccaaacctggacac

SEQ ID NO: 3174074 - DNA, 25 bp, Homo sapien
gagtcgcctctgttatccaaacctg

SEQ ID NO: 3174075 - DNA, 25 bp, Homo sapien
ccctttcttgctgataacctcctat

SEQ ID NO: 3174076 - DNA, 25 bp, Homo sapien
tctccctttcttgctgataacctcc

SEQ ID NO: 3174077 - DNA, 25 bp, Homo sapien
cttgctgataacctcctatcaggcc

SEQ ID NO: 3174078 - DNA, 25 bp, Homo sapien
ttcttgctgataacctcctatcagg

SEQ ID NO: 3174079 - DNA, 25 bp, Homo sapien
gatagacattgagaacgtataagtg

SEQ ID NO: 3174080 - DNA, 25 bp, Homo sapien
gagggtattaatagatagacattga

SEQ ID NO: 3174081 - DNA, 25 bp, Homo sapien
acgtataagtgaacgaggaaataca

SEQ ID NO: 3174082 - DNA, 25 bp, Homo sapien
aatgaaagtcactggtttgagggta

SEQ ID NO: 3174083 - DNA, 25 bp, Homo sapien
agcattagtatctgaccagctggta

SEQ ID NO: 3174084 - DNA, 25 bp, Homo sapien
gcagccagactaagtgggaacaatc

SEQ ID NO: 3174085 - DNA, 25 bp, Homo sapien
ccagctggtaaagggagaaaactga

SEQ ID NO: 3174086 - DNA, 25 bp, Homo sapien
gaaaagctggatctactggctggag

SEQ ID NO: 3174087 - DNA, 25 bp, Homo sapien
tcctcccttgacaggtcttgctttt

SEQ ID NO: 3174088 - DNA, 25 bp, Homo sapien
actgctgtctctggactttgaatac

SEQ ID NO: 3174089 - DNA, 25 bp, Homo sapien
tgcctggcttcgcagctgtgctgat

SEQ ID NO: 3174090 - DNA, 25 bp, Homo sapien
gactgctgtctctggactttgaata

SEQ ID NO: 3174091 - DNA, 25 bp, Homo sapien
ctggcttcgcagctgtgctgattgc

SEQ ID NO: 3174092 - DNA, 25 bp, Homo sapien
tagccaatgcttatttccagaccca

SEQ ID NO: 3174093 - DNA, 25 bp, Homo sapien
gcttagccaatgcttatttccagac

SEQ ID NO: 3174094 - DNA, 25 bp, Homo sapien
ctggtccaaccatgcttagccaatg

SEQ ID NO: 3174095 - DNA, 25 bp, Homo sapien
ggtccaaccatgcttagccaatgct

SEQ ID NO: 3174096 - DNA, 25 bp, Homo sapien
catgccatctggaacattggggata

SEQ ID NO: 3174097 - DNA, 25 bp, Homo sapien
atcatgtaatcctgctgcccatgcc

SEQ ID NO: 3174098 - DNA, 25 bp, Homo sapien
gaccagtgtagccacggtgactgct

SEQ ID NO: 3174099 - DNA, 25 bp, Homo sapien
gataattcactgaagaccagtgtag

SEQ ID NO: 3174100 - DNA, 25 bp, Homo sapien
agcttggcaaaaaggctcggggaag

SEQ ID NO: 3174101 - DNA, 25 bp, Homo sapien
ggaagattcaacacccctatccaac

SEQ ID NO: 3174102 - DNA, 25 bp, Homo sapien
ctatccaacctcctttcccatactc

SEQ ID NO: 3174103 - DNA, 25 bp, Homo sapien
ggcaaaaaggctcggggaagattca

SEQ ID NO: 3174104 - DNA, 25 bp, Homo sapien
ccggggttgttagaagtcattatat

SEQ ID NO: 3174105 - DNA, 25 bp, Homo sapien
cggggttgttagaagtcattatatc

SEQ ID NO: 3174106 - DNA, 25 bp, Homo sapien
tccggggttgttagaagtcattata

SEQ ID NO: 3174107 - DNA, 25 bp, Homo sapien
ccactagccagacatccaccgaatc

SEQ ID NO: 3174108 - DNA, 25 bp, Homo sapien
cactagccagacatccaccgaatca

SEQ ID NO: 3174109 - DNA, 25 bp, Homo sapien
ctagccagacatccaccgaatcagt

SEQ ID NO: 3174110 - DNA, 25 bp, Homo sapien
actagccagacatccaccgaatcag

SEQ ID NO: 3174111 - DNA, 25 bp, Homo sapien
gctcaatctcatagcttttggatta

SEQ ID NO: 3174112 - DNA, 25 bp, Homo sapien
tcttggctcaatctcatagcttttg

SEQ ID NO: 3174113 - DNA, 25 bp, Homo sapien
cttggctcaatctcatagcttttgg

SEQ ID NO: 3174114 - DNA, 25 bp, Homo sapien
tggctcaatctcatagcttttggat

SEQ ID NO: 3174115 - DNA, 25 bp, Homo sapien
ccccggtcacaccttgcagaatacc

SEQ ID NO: 3174116 - DNA, 25 bp, Homo sapien
aacaaactcaacctgatgcccgcat

SEQ ID NO: 3174117 - DNA, 25 bp, Homo sapien
ctatccaacaaactcaacctgatgc

SEQ ID NO: 3174118 - DNA, 25 bp, Homo sapien
ggtcacaccttgcagaataccacac

SEQ ID NO: 3174119 - DNA, 25 bp, Homo sapien
ccatctaggcccgataattccagta

SEQ ID NO: 3174120 - DNA, 25 bp, Homo sapien
tatttggagatcttgaatacaccat

SEQ ID NO: 3174121 - DNA, 25 bp, Homo sapien
taaatggaagaattgtggacctaca

SEQ ID NO: 3174122 - DNA, 25 bp, Homo sapien
tgtggacctacaaatagaaacagtc

SEQ ID NO: 3174123 - DNA, 25 bp, Homo sapien
ctggaggattctccatgatactcca

SEQ ID NO: 3174124 - DNA, 25 bp, Homo sapien
tgtccttgtcctccggtccttggca

SEQ ID NO: 3174125 - DNA, 25 bp, Homo sapien
gatactccagcaagtaatgtgtcct

SEQ ID NO: 3174126 - DNA, 25 bp, Homo sapien
gtacaaatcttcagttcgtctccca

SEQ ID NO: 3174127 - DNA, 25 bp, Homo sapien
cttcacatattcattgccattctgt

SEQ ID NO: 3174128 - DNA, 25 bp, Homo sapien
tcatccaatctgctatgaccaaggg

SEQ ID NO: 3174129 - DNA, 25 bp, Homo sapien
tatgaccaagggatcggactgatgg

SEQ ID NO: 3174130 - DNA, 25 bp, Homo sapien
tctgctatgaccaagggatcggact

SEQ ID NO: 3174131 - DNA, 25 bp, Homo sapien
caatctgctatgaccaagggatcgg

SEQ ID NO: 3174132 - DNA, 25 bp, Homo sapien
cgggctccatgagccgtccacagtg

SEQ ID NO: 3174133 - DNA, 25 bp, Homo sapien
tgtgccgggctccatgagccgtcca

SEQ ID NO: 3174134 - DNA, 25 bp, Homo sapien
gcagatctctgtgccgggctccatg

SEQ ID NO: 3174135 - DNA, 25 bp, Homo sapien
cagcagcagatctctgtgccgggct

SEQ ID NO: 3174136 - DNA, 25 bp, Homo sapien
gtatagaattcggaggtgctggcag

SEQ ID NO: 3174137 - DNA, 25 bp, Homo sapien
cgacttagactttggtgagtataga

SEQ ID NO: 3174138 - DNA, 25 bp, Homo sapien
ctggggagatttcatgaaaaaccca

SEQ ID NO: 3174139 - DNA, 25 bp, Homo sapien
aacccagtgttcgacttagactttg

SEQ ID NO: 3174140 - DNA, 25 bp, Homo sapien
gagtaagctgtagcccagaatgatc

SEQ ID NO: 3174141 - DNA, 25 bp, Homo sapien
tgcccattggaggtctcttccctct

SEQ ID NO: 3174142 - DNA, 25 bp, Homo sapien
ttccctctgagtaagctgtagccca

SEQ ID NO: 3174143 - DNA, 25 bp, Homo sapien
attggaggtctcttccctctgagta

SEQ ID NO: 3174144 - DNA, 25 bp, Homo sapien
cagagaattgggatcatcatggtca

SEQ ID NO: 3174145 - DNA, 25 bp, Homo sapien
gctcagagaattgggatcatcatgg

SEQ ID NO: 3174146 - DNA, 25 bp, Homo sapien
gagaattgggatcatcatggtcatc

SEQ ID NO: 3174147 - DNA, 25 bp, Homo sapien
tcagagaattgggatcatcatggtc

SEQ ID NO: 3174148 - DNA, 25 bp, Homo sapien
tgggtttatgatagcttgccctttg

SEQ ID NO: 3174149 - DNA, 25 bp, Homo sapien
tttatgatagcttgccctttggcca

SEQ ID NO: 3174150 - DNA, 25 bp, Homo sapien
cgagggatcaagtctgccttctctt

SEQ ID NO: 3174151 - DNA, 25 bp, Homo sapien
tgaggagtggatggccacgagggat

SEQ ID NO: 3174152 - DNA, 25 bp, Homo sapien
ggctccctcttgtgtgagtgtcgac

SEQ ID NO: 3174153 - DNA, 25 bp, Homo sapien
ggaagtcgggcaataggcagcaaca

SEQ ID NO: 3174154 - DNA, 25 bp, Homo sapien
gccagcctttatttacgtatgaagg

SEQ ID NO: 3174155 - DNA, 25 bp, Homo sapien
agccttggaagtcgggcaataggca

SEQ ID NO: 3174156 - DNA, 25 bp, Homo sapien
tcagaagatagtaacggcatgccct

SEQ ID NO: 3174157 - DNA, 25 bp, Homo sapien
cacatccgtgcatgcttttgggttt

SEQ ID NO: 3174158 - DNA, 25 bp, Homo sapien
aatgccaaaacagtgtcctctccag

SEQ ID NO: 3174159 - DNA, 25 bp, Homo sapien
tctccagtgcgcacatccgtgcatg

SEQ ID NO: 3174160 - DNA, 25 bp, Homo sapien
gtgggactctgcacatccatacctc

SEQ ID NO: 3174161 - DNA, 25 bp, Homo sapien
tcatgtgggactctgcacatccata

SEQ ID NO: 3174162 - DNA, 25 bp, Homo sapien
gatgggggaccatgtgttaacgctc

SEQ ID NO: 3174163 - DNA, 25 bp, Homo sapien
catgtgttaacgctcagaggcgtca

SEQ ID NO: 3174164 - DNA, 25 bp, Homo sapien
gggagatgattaatgtacctacctt

SEQ ID NO: 3174165 - DNA, 25 bp, Homo sapien
caagagattcatgacattgctcctg

SEQ ID NO: 3174166 - DNA, 25 bp, Homo sapien
gatcatgatgatgggctgtttattt

SEQ ID NO: 3174167 - DNA, 25 bp, Homo sapien
gaacctttgatacctgatcatgatg

SEQ ID NO: 3174168 - DNA, 25 bp, Homo sapien
aaaacaatctcttcgccgcactcgg

SEQ ID NO: 3174169 - DNA, 25 bp, Homo sapien
gaaaacaatctcttcgccgcactcg

SEQ ID NO: 3174170 - DNA, 25 bp, Homo sapien
tgagaaaggtttctccgaaatttca

SEQ ID NO: 3174171 - DNA, 25 bp, Homo sapien
tcatgggtctgcagatggttccgca

SEQ ID NO: 3174172 - DNA, 25 bp, Homo sapien
tgggtctgcagatggttccgcagat

SEQ ID NO: 3174173 - DNA, 25 bp, Homo sapien
ttgtaattcttaccgcactcagagc

SEQ ID NO: 3174174 - DNA, 25 bp, Homo sapien
gcccagcttcgtattgtaattctta

SEQ ID NO: 3174175 - DNA, 25 bp, Homo sapien
tgaggtcaccgctgctggcagcatg

SEQ ID NO: 3174176 - DNA, 25 bp, Homo sapien
catccttacgagtatagaaccgccg

SEQ ID NO: 3174177 - DNA, 25 bp, Homo sapien
tgggtactctcaaaggtctgcaggc

SEQ ID NO: 3174178 - DNA, 25 bp, Homo sapien
gtctgcaggcacaccttgcagctga

SEQ ID NO: 3174179 - DNA, 25 bp, Homo sapien
gggctctgtcttgatcttgagctgc

SEQ ID NO: 3174180 - DNA, 25 bp, Homo sapien
tctgtcttgatcttgagctgctcct

SEQ ID NO: 3174181 - DNA, 25 bp, Homo sapien
gtcttgatcttgagctgctcctgca

SEQ ID NO: 3174182 - DNA, 25 bp, Homo sapien
ggctctgtcttgatcttgagctgct

SEQ ID NO: 3174183 - DNA, 25 bp, Homo sapien
tgtgcatcagagagtgttgcacgcc

SEQ ID NO: 3174184 - DNA, 25 bp, Homo sapien
tcagagagtgttgcacgcccgtgct

SEQ ID NO: 3174185 - DNA, 25 bp, Homo sapien
cgtgttgtgcatcagagagtgttgc

SEQ ID NO: 3174186 - DNA, 25 bp, Homo sapien
agcgtgttgtgcatcagagagtgtt

SEQ ID NO: 3174187 - DNA, 25 bp, Homo sapien
agagataggtgaggattccagaggg

SEQ ID NO: 3174188 - DNA, 25 bp, Homo sapien
gaagagataggtgaggattccagag

SEQ ID NO: 3174189 - DNA, 25 bp, Homo sapien
ataggtgaggattccagagggcagc

SEQ ID NO: 3174190 - DNA, 25 bp, Homo sapien
agataggtgaggattccagagggca

SEQ ID NO: 3174191 - DNA, 25 bp, Homo sapien
gaagctccgccagaaaactatccac

SEQ ID NO: 3174192 - DNA, 25 bp, Homo sapien
tgcttcatctaggagggccgcagct

SEQ ID NO: 3174193 - DNA, 25 bp, Homo sapien
tgtcgggcaagtatgaggtagatcc

SEQ ID NO: 3174194 - DNA, 25 bp, Homo sapien
ggtagatccaagctggtattttgga

SEQ ID NO: 3174195 - DNA, 25 bp, Homo sapien
gtgcctctgcctgggagtagcccat

SEQ ID NO: 3174196 - DNA, 25 bp, Homo sapien
cgctcctggggaatcttgaggctga

SEQ ID NO: 3174197 - DNA, 25 bp, Homo sapien
ctgtgcctctgcctgggagtagccc

SEQ ID NO: 3174198 - DNA, 25 bp, Homo sapien
cttgaggctgagcttgcaaagtggt

SEQ ID NO: 3174199 - DNA, 25 bp, Homo sapien
gggtggtgctactcaggccagacgt

SEQ ID NO: 3174200 - DNA, 25 bp, Homo sapien
agggtggtgctactcaggccagacg

SEQ ID NO: 3174201 - DNA, 25 bp, Homo sapien
gtaccaggctgaggcagttccttgg

SEQ ID NO: 3174202 - DNA, 25 bp, Homo sapien
ccaggctgaggcagttccttggtag

SEQ ID NO: 3174203 - DNA, 25 bp, Homo sapien
actggtaccaggctgaggcagttcc

SEQ ID NO: 3174204 - DNA, 25 bp, Homo sapien
gaggactggtaccaggctgaggcag

SEQ ID NO: 3174205 - DNA, 25 bp, Homo sapien
ctaacagcccaggactttgtattct

SEQ ID NO: 3174206 - DNA, 25 bp, Homo sapien
tattctgcagccagaggcccaatgg

SEQ ID NO: 3174207 - DNA, 25 bp, Homo sapien
aacagcccaggactttgtattctgc

SEQ ID NO: 3174208 - DNA, 25 bp, Homo sapien
cagcccaggactttgtattctgcag

SEQ ID NO: 3174209 - DNA, 25 bp, Homo sapien
caaaggtgaaggtcaaggccaatcc

SEQ ID NO: 3174210 - DNA, 25 bp, Homo sapien
ccaaaggtgaaggtcaaggccaatc

SEQ ID NO: 3174211 - DNA, 25 bp, Homo sapien
aaggtgaaggtcaaggccaatccct

SEQ ID NO: 3174212 - DNA, 25 bp, Homo sapien
tttctaatggcacttatactttaca

SEQ ID NO: 3174213 - DNA, 25 bp, Homo sapien
ttctaatggcacttatactttacaa

SEQ ID NO: 3174214 - DNA, 25 bp, Homo sapien
agggactctgaactttgactctctg

SEQ ID NO: 3174215 - DNA, 25 bp, Homo sapien
gactctctgctgtatgatatatggc

SEQ ID NO: 3174216 - DNA, 25 bp, Homo sapien
gaatttatggctagattctgcctcc

SEQ ID NO: 3174217 - DNA, 25 bp, Homo sapien
aatagactattagaggagtaactgc

SEQ ID NO: 3174218 - DNA, 25 bp, Homo sapien
agtacacgcatttgtccagtgaata

SEQ ID NO: 3174219 - DNA, 25 bp, Homo sapien
tacacgcatttgtccagtgaatatc

SEQ ID NO: 3174220 - DNA, 25 bp, Homo sapien
cgcatttgtccagtgaatatctgag

SEQ ID NO: 3174221 - DNA, 25 bp, Homo sapien
catttgtccagtgaatatctgagaa

SEQ ID NO: 3174222 - DNA, 25 bp, Homo sapien
atctgtttacaactgatccccaaag

SEQ ID NO: 3174223 - DNA, 25 bp, Homo sapien
gcagccatgacacattgatagctac

SEQ ID NO: 3174224 - DNA, 25 bp, Homo sapien
acatgagcagccatgacacattgat

SEQ ID NO: 3174225 - DNA, 25 bp, Homo sapien
gatccccaaagagtgcattagactt

SEQ ID NO: 3174226 - DNA, 25 bp, Homo sapien
tgttacgtagctgagcaaaagcttg

SEQ ID NO: 3174227 - DNA, 25 bp, Homo sapien
gcttggacatcatttgttatctttg

SEQ ID NO: 3174228 - DNA, 25 bp, Homo sapien
tgtagagctcatagatgttacgtag

SEQ ID NO: 3174229 - DNA, 25 bp, Homo sapien
ttaaaagcgattgtagagctcatag

SEQ ID NO: 3174230 - DNA, 25 bp, Homo sapien
gctacatatgatttcacgcatctgt

SEQ ID NO: 3174231 - DNA, 25 bp, Homo sapien
tgtgttatcaccagggatttgtctg

SEQ ID NO: 3174232 - DNA, 25 bp, Homo sapien
gatttgtctggctacatatgatttc

SEQ ID NO: 3174233 - DNA, 25 bp, Homo sapien
gtcatctaaatcacagatccaaatg

SEQ ID NO: 3174234 - DNA, 25 bp, Homo sapien
ttggtatcttctgactgtgagctgc

SEQ ID NO: 3174235 - DNA, 25 bp, Homo sapien
gcatctaagaagctgttatcaagtc

SEQ ID NO: 3174236 - DNA, 25 bp, Homo sapien
ccttaggtaaatcttcagagtctaa

SEQ ID NO: 3174237 - DNA, 25 bp, Homo sapien
gaagtgaattcgttagcatctaaga

SEQ ID NO: 3174238 - DNA, 25 bp, Homo sapien
tacaaactcgaagaagcccgcagag

SEQ ID NO: 3174239 - DNA, 25 bp, Homo sapien
acaaactcgaagaagcccgcagagg

SEQ ID NO: 3174240 - DNA, 25 bp, Homo sapien
tgcatagcgatttattctacaagtg

SEQ ID NO: 3174241 - DNA, 25 bp, Homo sapien
aaaatctttattctcaccaatgtct

SEQ ID NO: 3174242 - DNA, 25 bp, Homo sapien
tctcaccaatgtctaaatcattgtt

SEQ ID NO: 3174243 - DNA, 25 bp, Homo sapien
agaagagtcacccccggactaaatg

SEQ ID NO: 3174244 - DNA, 25 bp, Homo sapien
gacttctgttgaggtgaacatcaag

SEQ ID NO: 3174245 - DNA, 25 bp, Homo sapien
ttgacttctgttgaggtgaacatca

SEQ ID NO: 3174246 - DNA, 25 bp, Homo sapien
atgagataataagtagatattgact

SEQ ID NO: 3174247 - DNA, 25 bp, Homo sapien
gataataagtagatattgacttctg

SEQ ID NO: 3174248 - DNA, 25 bp, Homo sapien
taaatcttgtacacaacaataggaa

SEQ ID NO: 3174249 - DNA, 25 bp, Homo sapien
cactgaaattaaagggtaagcacta

SEQ ID NO: 3174250 - DNA, 25 bp, Homo sapien
taaagggtaagcactaaatcttgta

SEQ ID NO: 3174251 - DNA, 25 bp, Homo sapien
ttctgacactgaaattaaagggtaa

SEQ ID NO: 3174252 - DNA, 25 bp, Homo sapien
tgacatctgctctcttgttctcagc

SEQ ID NO: 3174253 - DNA, 25 bp, Homo sapien
tcctgtctgctttgggtattctggg

SEQ ID NO: 3174254 - DNA, 25 bp, Homo sapien
ttgttctcagcccgccatactctgg

SEQ ID NO: 3174255 - DNA, 25 bp, Homo sapien
tatctcatatctcagggcagaggct

SEQ ID NO: 3174256 - DNA, 25 bp, Homo sapien
tgcctgtgacagcttcatgaagcac

SEQ ID NO: 3174257 - DNA, 25 bp, Homo sapien
catgaaattggcaacaaagccgagc

SEQ ID NO: 3174258 - DNA, 25 bp, Homo sapien
ggaggaacaattctctggcaggatg

SEQ ID NO: 3174259 - DNA, 25 bp, Homo sapien
cagcagcgggtattgtcctagtgac

SEQ ID NO: 3174260 - DNA, 25 bp, Homo sapien
tggcaggcgaatccagagtttacaa

SEQ ID NO: 3174261 - DNA, 25 bp, Homo sapien
caaatccaagaggataattttcacg

SEQ ID NO: 3174262 - DNA, 25 bp, Homo sapien
tagtcttttgtgctctggcaggcga

SEQ ID NO: 3174263 - DNA, 25 bp, Homo sapien
gaggaggagacttataggcaccttc

SEQ ID NO: 3174264 - DNA, 25 bp, Homo sapien
agatctagttgcagtctttctctgg

SEQ ID NO: 3174265 - DNA, 25 bp, Homo sapien
accaaacacccacaatcggcaaggg

SEQ ID NO: 3174266 - DNA, 25 bp, Homo sapien
cacaatcggcaagggtgagccacat

SEQ ID NO: 3174267 - DNA, 25 bp, Homo sapien
tgggctttagaatcatccagtcagc

SEQ ID NO: 3174268 - DNA, 25 bp, Homo sapien
aagatacttctttctctccctgact

SEQ ID NO: 3174269 - DNA, 25 bp, Homo sapien
tgaccttgtacttcaagatacttct

SEQ ID NO: 3174270 - DNA, 25 bp, Homo sapien
tctctacaagagtgaatggcttttt

SEQ ID NO: 3174271 - DNA, 25 bp, Homo sapien
ggctggtgcctttgacatggttgac

SEQ ID NO: 3174272 - DNA, 25 bp, Homo sapien
ctgactccttttcctcctcgtcttc

SEQ ID NO: 3174273 - DNA, 25 bp, Homo sapien
tcctcctcgtcttcctctaccatcc

SEQ ID NO: 3174274 - DNA, 25 bp, Homo sapien
ctcctcgtcttcctctaccatccat

SEQ ID NO: 3174275 - DNA, 25 bp, Homo sapien
tttcctcctcgtcttcctctaccat

SEQ ID NO: 3174276 - DNA, 25 bp, Homo sapien
tgcctttcactttgggctcgggaaa

SEQ ID NO: 3174277 - DNA, 25 bp, Homo sapien
cctgcctttcactttgggctcggga

SEQ ID NO: 3174278 - DNA, 25 bp, Homo sapien
tccctgcctttcactttgggctcgg

SEQ ID NO: 3174279 - DNA, 25 bp, Homo sapien
tttgtccctgcctttcactttgggc

SEQ ID NO: 3174280 - DNA, 25 bp, Homo sapien
ttagcaccaaccacatgagagccct

SEQ ID NO: 3174281 - DNA, 25 bp, Homo sapien
tgatgcctcgtaagtagaaccgcga

SEQ ID NO: 3174282 - DNA, 25 bp, Homo sapien
gccctgctctgaagtaacggccaaa

SEQ ID NO: 3174283 - DNA, 25 bp, Homo sapien
ccaaatgagcgtccactgagtgtct

SEQ ID NO: 3174284 - DNA, 25 bp, Homo sapien
tttctgacgcatcatctctttcctc

SEQ ID NO: 3174285 - DNA, 25 bp, Homo sapien
gccactggggatttggtaatattta

SEQ ID NO: 3174286 - DNA, 25 bp, Homo sapien
atgaggttgaaagggctttgggagc

SEQ ID NO: 3174287 - DNA, 25 bp, Homo sapien
gctttgggagccactggggatttgg

SEQ ID NO: 3174288 - DNA, 25 bp, Homo sapien
tcatgaggttgaaagggctttggga

SEQ ID NO: 3174289 - DNA, 25 bp, Homo sapien
tgcctttccctcagtcgtatctctg

SEQ ID NO: 3174290 - DNA, 25 bp, Homo sapien
aaggtgatagcaaggtttgaagggt

SEQ ID NO: 3174291 - DNA, 25 bp, Homo sapien
tccctcagtcgtatctctgatccat

SEQ ID NO: 3174292 - DNA, 25 bp, Homo sapien
tttccctcagtcgtatctctgatcc

SEQ ID NO: 3174293 - DNA, 25 bp, Homo sapien
gatgatgttgagttggttctgcttc

SEQ ID NO: 3174294 - DNA, 25 bp, Homo sapien
aattctggatccattattaagagag

SEQ ID NO: 3174295 - DNA, 25 bp, Homo sapien
gtaaccatggccaccccgatctgtt

SEQ ID NO: 3174296 - DNA, 25 bp, Homo sapien
cttggaataattctggatccattat

SEQ ID NO: 3174297 - DNA, 25 bp, Homo sapien
ttaaatcacacgatgaggccctttg

SEQ ID NO: 3174298 - DNA, 25 bp, Homo sapien
tttctttttgtgtgcaaagcagatc

SEQ ID NO: 3174299 - DNA, 25 bp, Homo sapien
taaatcacacgatgaggccctttgt

SEQ ID NO: 3174300 - DNA, 25 bp, Homo sapien
cttatttctttttgtgtgcaaagca

SEQ ID NO: 3174301 - DNA, 25 bp, Homo sapien
aggctgcggcatagtgttcactgaa

SEQ ID NO: 3174302 - DNA, 25 bp, Homo sapien
ggctgcggcatagtgttcactgaac

SEQ ID NO: 3174303 - DNA, 25 bp, Homo sapien
cactgttcctgtgattgtaaagccc

SEQ ID NO: 3174304 - DNA, 25 bp, Homo sapien
actccagggaaagctcacactgttc

SEQ ID NO: 3174305 - DNA, 25 bp, Homo sapien
ttccccgacagatccactccaggga

SEQ ID NO: 3174306 - DNA, 25 bp, Homo sapien
ttttctaatgcctgtggctgttcta

SEQ ID NO: 3174307 - DNA, 25 bp, Homo sapien
taggccgtaaataccttagtgacca

SEQ ID NO: 3174308 - DNA, 25 bp, Homo sapien
tcattaggccgtaaataccttagtg

SEQ ID NO: 3174309 - DNA, 25 bp, Homo sapien
ccgtaaataccttagtgaccagttg

SEQ ID NO: 3174310 - DNA, 25 bp, Homo sapien
taaataccttagtgaccagttgtgc

SEQ ID NO: 3174311 - DNA, 25 bp, Homo sapien
gtatcacatcaaggcccactctcag

SEQ ID NO: 3174312 - DNA, 25 bp, Homo sapien
gctgtacatgcctgagaactggact

SEQ ID NO: 3174313 - DNA, 25 bp, Homo sapien
gactgtcctttgagtacgctcagac

SEQ ID NO: 3174314 - DNA, 25 bp, Homo sapien
caattgatccttccttgtgtggacc

SEQ ID NO: 3174315 - DNA, 25 bp, Homo sapien
tgctctaagcttgcaaccttcttgg

SEQ ID NO: 3174316 - DNA, 25 bp, Homo sapien
atccacccactgatgattgaggcca

SEQ ID NO: 3174317 - DNA, 25 bp, Homo sapien
cttggcattccttttaatccaccca

SEQ ID NO: 3174318 - DNA, 25 bp, Homo sapien
taagcttgcaaccttcttggcattc

SEQ ID NO: 3174319 - DNA, 25 bp, Homo sapien
tagtacaatggccattgtgcatgtg

SEQ ID NO: 3174320 - DNA, 25 bp, Homo sapien
tgtccatgtgcctgtgagtgctgct

SEQ ID NO: 3174321 - DNA, 25 bp, Homo sapien
tgtttgtccatgtgcctgtgagtgc

SEQ ID NO: 3174322 - DNA, 25 bp, Homo sapien
aattttagtacaatggccattgtgc

SEQ ID NO: 3174323 - DNA, 25 bp, Homo sapien
agtggcagacctgatttggttccat

SEQ ID NO: 3174324 - DNA, 25 bp, Homo sapien
ttgccttcctctaccccacagtggc

SEQ ID NO: 3174325 - DNA, 25 bp, Homo sapien
ccacagtggcagacctgatttggtt

SEQ ID NO: 3174326 - DNA, 25 bp, Homo sapien
cttcctctaccccacagtggcagac

SEQ ID NO: 3174327 - DNA, 25 bp, Homo sapien
ttcttcttttgaggtcagttgttgc

SEQ ID NO: 3174328 - DNA, 25 bp, Homo sapien
tcttttgaggtcagttgttgcctcg

SEQ ID NO: 3174329 - DNA, 25 bp, Homo sapien
tctctctcggttaatatttgaggac

SEQ ID NO: 3174330 - DNA, 25 bp, Homo sapien
tgtattgtctctctcggttaatatt

SEQ ID NO: 3174331 - DNA, 25 bp, Homo sapien
tttggacaaacttagagaacagtga

SEQ ID NO: 3174332 - DNA, 25 bp, Homo sapien
ttcacagtaggagatgcttgctctg

SEQ ID NO: 3174333 - DNA, 25 bp, Homo sapien
tacagttaattcaggtttccaccag

SEQ ID NO: 3174334 - DNA, 25 bp, Homo sapien
gaaaatgtcctttggcattgaaagg

SEQ ID NO: 3174335 - DNA, 25 bp, Homo sapien
atgccaaaaggccattctggcagtc

SEQ ID NO: 3174336 - DNA, 25 bp, Homo sapien
tcttcctggtgaaatttattgccat

SEQ ID NO: 3174337 - DNA, 25 bp, Homo sapien
ggcagtcattacaataatctatcat

SEQ ID NO: 3174338 - DNA, 25 bp, Homo sapien
ggccattctggcagtcattacaata

SEQ ID NO: 3174339 - DNA, 25 bp, Homo sapien
tcatcatgattacccccagtgcagg

SEQ ID NO: 3174340 - DNA, 25 bp, Homo sapien
tcatcatgtcaccaacattaccttc

SEQ ID NO: 3174341 - DNA, 25 bp, Homo sapien
cctgtcatcatgattacccccagtg

SEQ ID NO: 3174342 - DNA, 25 bp, Homo sapien
agcatcatcatcatgtcaccaacat

SEQ ID NO: 3174343 - DNA, 25 bp, Homo sapien
ttgttctccagtgaaaaagtcaaag

SEQ ID NO: 3174344 - DNA, 25 bp, Homo sapien
gacagctgaaatgattgcacacaat

SEQ ID NO: 3174345 - DNA, 25 bp, Homo sapien
cagtcatgcgcccaaataaagtttg

SEQ ID NO: 3174346 - DNA, 25 bp, Homo sapien
tcatggaagagctctcccacatttc

SEQ ID NO: 3174347 - DNA, 25 bp, Homo sapien
cacacaattgccagtcagtcatgcg

SEQ ID NO: 3174348 - DNA, 25 bp, Homo sapien
ctagttctaggcttgttctgacgta

SEQ ID NO: 3174349 - DNA, 25 bp, Homo sapien
tcatgttgaactacagacaagataa

SEQ ID NO: 3174350 - DNA, 25 bp, Homo sapien
gcttgttctgacgtagatgtcaaat

SEQ ID NO: 3174351 - DNA, 25 bp, Homo sapien
gacgtagatgtcaaattcatgttga

SEQ ID NO: 3174352 - DNA, 25 bp, Homo sapien
gaagaagttcatgcacagggtggaa

SEQ ID NO: 3174353 - DNA, 25 bp, Homo sapien
ctggagatgtgggtacagactgatc

SEQ ID NO: 3174354 - DNA, 25 bp, Homo sapien
ggtggaaaccacagacgattctact

SEQ ID NO: 3174355 - DNA, 25 bp, Homo sapien
cctggtagcaataagagcatataac

SEQ ID NO: 3174356 - DNA, 25 bp, Homo sapien
cttcttgctttgacaaatgaatttt

SEQ ID NO: 3174357 - DNA, 25 bp, Homo sapien
ttgctttgacaaatgaattttatgc

SEQ ID NO: 3174358 - DNA, 25 bp, Homo sapien
gctttgacaaatgaattttatgcat

SEQ ID NO: 3174359 - DNA, 25 bp, Homo sapien
tcttgctttgacaaatgaattttat

SEQ ID NO: 3174360 - DNA, 25 bp, Homo sapien
tggcactcggggacgcccaagtttc

SEQ ID NO: 3174361 - DNA, 25 bp, Homo sapien
actggcactcggggacgcccaagtt

SEQ ID NO: 3174362 - DNA, 25 bp, Homo sapien
gcactggcactcggggacgcccaag

SEQ ID NO: 3174363 - DNA, 25 bp, Homo sapien
ctggcactcggggacgcccaagttt

SEQ ID NO: 3174364 - DNA, 25 bp, Homo sapien
taacatatgggcaacatgcactcag

SEQ ID NO: 3174365 - DNA, 25 bp, Homo sapien
gataaagtggcagggtcacatcgca

SEQ ID NO: 3174366 - DNA, 25 bp, Homo sapien
cgaaagggtgtcatgggcattaaca

SEQ ID NO: 3174367 - DNA, 25 bp, Homo sapien
tcacatcgcaggagcaaacacttaa

SEQ ID NO: 3174368 - DNA, 25 bp, Homo sapien
ctttttccttgcgagaaagctgttt

SEQ ID NO: 3174369 - DNA, 25 bp, Homo sapien
gagaaagctgtttgcatctgcgctg

SEQ ID NO: 3174370 - DNA, 25 bp, Homo sapien
atctgcgctgttgtcccgcagcgcg

SEQ ID NO: 3174371 - DNA, 25 bp, Homo sapien
tttgcatctgcgctgttgtcccgca

SEQ ID NO: 3174372 - DNA, 25 bp, Homo sapien
ggcacactgtgctagtttccgcggg

SEQ ID NO: 3174373 - DNA, 25 bp, Homo sapien
ctgtgctagtttccgcggggtagtt

SEQ ID NO: 3174374 - DNA, 25 bp, Homo sapien
ccaggcacactgtgctagtttccgc

SEQ ID NO: 3174375 - DNA, 25 bp, Homo sapien
actgtgctagtttccgcggggtagt

SEQ ID NO: 3174376 - DNA, 25 bp, Homo sapien
ttcgcagaccggtgcgggccctctt

SEQ ID NO: 3174377 - DNA, 25 bp, Homo sapien
ggaaggccgggccttgcaattcgca

SEQ ID NO: 3174378 - DNA, 25 bp, Homo sapien
ggacagcggataccagagcgtcgct

SEQ ID NO: 3174379 - DNA, 25 bp, Homo sapien
ctgggtcgcggaggtacagggaggg

SEQ ID NO: 3174380 - DNA, 25 bp, Homo sapien
gtggagccgcgaacgctgtcgccat

SEQ ID NO: 3174381 - DNA, 25 bp, Homo sapien
gagccgcgaacgctgtcgccatttt

SEQ ID NO: 3174382 - DNA, 25 bp, Homo sapien
gcccggggtaaatttgcacctctga

SEQ ID NO: 3174383 - DNA, 25 bp, Homo sapien
tgatgtggctaacgccctgcgcctc

SEQ ID NO: 3174384 - DNA, 25 bp, Homo sapien
tgcaggccgggcaggctctccaacg

SEQ ID NO: 3174385 - DNA, 25 bp, Homo sapien
ctgcaggccgggcaggctctccaac

SEQ ID NO: 3174386 - DNA, 25 bp, Homo sapien
gggtagagcccagcacagtacgctc

SEQ ID NO: 3174387 - DNA, 25 bp, Homo sapien
gagacgtagcctgagcttcccatgc

SEQ ID NO: 3174388 - DNA, 25 bp, Homo sapien
ttttcagcgcaagcttcggagacgt

SEQ ID NO: 3174389 - DNA, 25 bp, Homo sapien
gccagcgcgtggcttcgcagagaat

SEQ ID NO: 3174390 - DNA, 25 bp, Homo sapien
tactcgcagtggaaagggcgctaca

SEQ ID NO: 3174391 - DNA, 25 bp, Homo sapien
acaacctgtaaagcggctgcgccta

SEQ ID NO: 3174392 - DNA, 25 bp, Homo sapien
tatcgatggctttaagcccagacgg

SEQ ID NO: 3174393 - DNA, 25 bp, Homo sapien
gactaaggcaattagaacgctcggg

SEQ ID NO: 3174394 - DNA, 25 bp, Homo sapien
aaaaaatgcggttttgtctgtgttg

SEQ ID NO: 3174395 - DNA, 25 bp, Homo sapien
aaaatgagacaaatcggaattcgtc

SEQ ID NO: 3174396 - DNA, 25 bp, Homo sapien
taaatgaggagtcaaaaaatgcggt

SEQ ID NO: 3174397 - DNA, 25 bp, Homo sapien
cggaattcgtcttgattaaatgagg

SEQ ID NO: 3174398 - DNA, 25 bp, Homo sapien
tgtttcccataccctgcgtttctcg

SEQ ID NO: 3174399 - DNA, 25 bp, Homo sapien
ctctctgtgaagagcagggtcggta

SEQ ID NO: 3174400 - DNA, 25 bp, Homo sapien
gcagggtcggtataagagcagagaa

SEQ ID NO: 3174401 - DNA, 25 bp, Homo sapien
ctcgggcacaaaccagactctctgt

SEQ ID NO: 3174402 - DNA, 25 bp, Homo sapien
cccagttgcaactggccccataaaa

SEQ ID NO: 3174403 - DNA, 25 bp, Homo sapien
taatttacttccacgcagcactcca

SEQ ID NO: 3174404 - DNA, 25 bp, Homo sapien
tgggtggcagtcagagtcgggctct

SEQ ID NO: 3174405 - DNA, 25 bp, Homo sapien
tttccagttaatttacttccacgca

SEQ ID NO: 3174406 - DNA, 25 bp, Homo sapien
tctgagaagggtgaaagctgatgcc

SEQ ID NO: 3174407 - DNA, 25 bp, Homo sapien
gaggtgtaggaagaaacctctcgca

SEQ ID NO: 3174408 - DNA, 25 bp, Homo sapien
aaatcccttaggaagcgttcctctg

SEQ ID NO: 3174409 - DNA, 25 bp, Homo sapien
tgtgctcttcacctttccattctga

SEQ ID NO: 3174410 - DNA, 25 bp, Homo sapien
tgttacaaccgctctgggtctgaaa

SEQ ID NO: 3174411 - DNA, 25 bp, Homo sapien
ccctttgcaagaccagttaaatgta

SEQ ID NO: 3174412 - DNA, 25 bp, Homo sapien
aaaatgcgtgttaaagtaggtggtg

SEQ ID NO: 3174413 - DNA, 25 bp, Homo sapien
gaaattgcacagtcgtttgttgcta

SEQ ID NO: 3174414 - DNA, 25 bp, Homo sapien
actgctgtgcaactaaagtaacctg

SEQ ID NO: 3174415 - DNA, 25 bp, Homo sapien
tgctgtggaagggttcacgctcacc

SEQ ID NO: 3174416 - DNA, 25 bp, Homo sapien
tttgaagagcgactcaagccacacc

SEQ ID NO: 3174417 - DNA, 25 bp, Homo sapien
gaagcgtagaatagaatgtccccac

SEQ ID NO: 3174418 - DNA, 25 bp, Homo sapien
ttctggcccggagtgatgcagagcc

SEQ ID NO: 3174419 - DNA, 25 bp, Homo sapien
tggccggacgcccatcttctggccc

SEQ ID NO: 3174420 - DNA, 25 bp, Homo sapien
cctggagggacgcacgcctggcctg

SEQ ID NO: 3174421 - DNA, 25 bp, Homo sapien
gccggtaccccaagccgctggctga

SEQ ID NO: 3174422 - DNA, 25 bp, Homo sapien
ccactgtccaggagctggtacatct

SEQ ID NO: 3174423 - DNA, 25 bp, Homo sapien
actgtccaggagctggtacatctcc

SEQ ID NO: 3174424 - DNA, 25 bp, Homo sapien
caccactgtccaggagctggtacat

SEQ ID NO: 3174425 - DNA, 25 bp, Homo sapien
tgtccaggagctggtacatctccat

SEQ ID NO: 3174426 - DNA, 25 bp, Homo sapien
gaaggttatcgaagcggagtacgcc

SEQ ID NO: 3174427 - DNA, 25 bp, Homo sapien
ttgctgtagcgaccaccttccaatg

SEQ ID NO: 3174428 - DNA, 25 bp, Homo sapien
gcttggacccaaatgagcgctttga

SEQ ID NO: 3174429 - DNA, 25 bp, Homo sapien
aatagctaaactccatccgtcggtg

SEQ ID NO: 3174430 - DNA, 25 bp, Homo sapien
cctattctgccgattttgatacatt

SEQ ID NO: 3174431 - DNA, 25 bp, Homo sapien
tccatgtgtctgatatctaactctc

SEQ ID NO: 3174432 - DNA, 25 bp, Homo sapien
tgtgtctgatatctaactctcccat

SEQ ID NO: 3174433 - DNA, 25 bp, Homo sapien
ctttgtggcggttactgtcctattc

SEQ ID NO: 3174434 - DNA, 25 bp, Homo sapien
gaggtagaattaacacccagtagga

SEQ ID NO: 3174435 - DNA, 25 bp, Homo sapien
tgacttgaatcctctgcgtatcttt

SEQ ID NO: 3174436 - DNA, 25 bp, Homo sapien
caaatttgttgctctggtgaatgtc

SEQ ID NO: 3174437 - DNA, 25 bp, Homo sapien
cccagtaggacatcaacatttcttg

SEQ ID NO: 3174438 - DNA, 25 bp, Homo sapien
gttttcttctgaatgaactcccatc

SEQ ID NO: 3174439 - DNA, 25 bp, Homo sapien
ccgcagctttctctctgatcagaag

SEQ ID NO: 3174440 - DNA, 25 bp, Homo sapien
tctctctgatcagaagttttcttct

SEQ ID NO: 3174441 - DNA, 25 bp, Homo sapien
ttcttctgaatgaactcccatccat

SEQ ID NO: 3174442 - DNA, 25 bp, Homo sapien
tacaaaaatgcacaagaatatccgg

SEQ ID NO: 3174443 - DNA, 25 bp, Homo sapien
ctacaaaaatgcacaagaatatccg

SEQ ID NO: 3174444 - DNA, 25 bp, Homo sapien
acaaaaatgcacaagaatatccggt

SEQ ID NO: 3174445 - DNA, 25 bp, Homo sapien
gcatcttcaccgtttttgtcttcat

SEQ ID NO: 3174446 - DNA, 25 bp, Homo sapien
catcttcaccgtttttgtcttcatt

SEQ ID NO: 3174447 - DNA, 25 bp, Homo sapien
agcatcttcaccgtttttgtcttca

SEQ ID NO: 3174448 - DNA, 25 bp, Homo sapien
cagcatcttcaccgtttttgtcttc

SEQ ID NO: 3174449 - DNA, 25 bp, Homo sapien
agagaagaaagcgttcatggaacca

SEQ ID NO: 3174450 - DNA, 25 bp, Homo sapien
ggtgcagaccaaatggcgggttctg

SEQ ID NO: 3174451 - DNA, 25 bp, Homo sapien
tagaagagaagaaagcgttcatgga

SEQ ID NO: 3174452 - DNA, 25 bp, Homo sapien
tgcagaccaaatggcgggttctgga

SEQ ID NO: 3174453 - DNA, 25 bp, Homo sapien
cagaaactggcttattcatctttac

SEQ ID NO: 3174454 - DNA, 25 bp, Homo sapien
acccttctataggtaacaatgtttg

SEQ ID NO: 3174455 - DNA, 25 bp, Homo sapien
aaccacccttctataggtaacaatg

SEQ ID NO: 3174456 - DNA, 25 bp, Homo sapien
acagcagaaactggcttattcatct

SEQ ID NO: 3174457 - DNA, 25 bp, Homo sapien
ctttgcctagtcctctcatggcctc

SEQ ID NO: 3174458 - DNA, 25 bp, Homo sapien
cctagtcctctcatggcctctttga

SEQ ID NO: 3174459 - DNA, 25 bp, Homo sapien
tttgcctagtcctctcatggcctct

SEQ ID NO: 3174460 - DNA, 25 bp, Homo sapien
tgcctagtcctctcatggcctcttt

SEQ ID NO: 3174461 - DNA, 25 bp, Homo sapien
gcttgtcccggccccgcacacttct

SEQ ID NO: 3174462 - DNA, 25 bp, Homo sapien
ccggcttgtcccggccccgcacact

SEQ ID NO: 3174463 - DNA, 25 bp, Homo sapien
gagccggcttgtcccggccccgcac

SEQ ID NO: 3174464 - DNA, 25 bp, Homo sapien
ggagccggcttgtcccggccccgca

SEQ ID NO: 3174465 - DNA, 25 bp, Homo sapien
agaaaaggaggacgcttgacccgct

SEQ ID NO: 3174466 - DNA, 25 bp, Homo sapien
acgcttgacccgctttagcgcggct

SEQ ID NO: 3174467 - DNA, 25 bp, Homo sapien
ccaggtgcgcgtctccacgcagagg

SEQ ID NO: 3174468 - DNA, 25 bp, Homo sapien
agaaggcggagacgcggcctccggt

SEQ ID NO: 3174469 - DNA, 25 bp, Homo sapien
ctccaaaacggcatcaacgagagag

SEQ ID NO: 3174470 - DNA, 25 bp, Homo sapien
ccaaaacggcatcaacgagagagcg

SEQ ID NO: 3174471 - DNA, 25 bp, Homo sapien
tccaaaacggcatcaacgagagagc

SEQ ID NO: 3174472 - DNA, 25 bp, Homo sapien
catagagcggccgccgcgccggtca

SEQ ID NO: 3174473 - DNA, 25 bp, Homo sapien
atagagcggccgccgcgccggtcac

SEQ ID NO: 3174474 - DNA, 25 bp, Homo sapien
gccgcagccactaacgcggccccac

SEQ ID NO: 3174475 - DNA, 25 bp, Homo sapien
agccgcagccactaacgcggcccca

SEQ ID NO: 3174476 - DNA, 25 bp, Homo sapien
caagcagggttctgcaggcggggcg

SEQ ID NO: 3174477 - DNA, 25 bp, Homo sapien
ctgcaagcagggttctgcaggcggg

SEQ ID NO: 3174478 - DNA, 25 bp, Homo sapien
agcagggttctgcaggcggggcgcc

SEQ ID NO: 3174479 - DNA, 25 bp, Homo sapien
gcagggttctgcaggcggggcgccc

SEQ ID NO: 3174480 - DNA, 25 bp, Homo sapien
ggcggcctcctcaagcaccccgaaa

SEQ ID NO: 3174481 - DNA, 25 bp, Homo sapien
tcccgcgctgccgtggcggcctcct

SEQ ID NO: 3174482 - DNA, 25 bp, Homo sapien
cctcctcaagcaccccgaaacctga

SEQ ID NO: 3174483 - DNA, 25 bp, Homo sapien
tgccgtggcggcctcctcaagcacc

SEQ ID NO: 3174484 - DNA, 25 bp, Homo sapien
tctccctcgcggtgtggcggcgaca

SEQ ID NO: 3174485 - DNA, 25 bp, Homo sapien
ctggtgctctcggtttcgtggtcgc

SEQ ID NO: 3174486 - DNA, 25 bp, Homo sapien
tgtggcggcgacaccgcttccctgg

SEQ ID NO: 3174487 - DNA, 25 bp, Homo sapien
tctcggtttcgtggtcgccgccggc

SEQ ID NO: 3174488 - DNA, 25 bp, Homo sapien
tctcaagtgtcccgcttccaaccag

SEQ ID NO: 3174489 - DNA, 25 bp, Homo sapien
ctcaagtgtcccgcttccaaccagg

SEQ ID NO: 3174490 - DNA, 25 bp, Homo sapien
caagtgtcccgcttccaaccaggac

SEQ ID NO: 3174491 - DNA, 25 bp, Homo sapien
tcaagtgtcccgcttccaaccagga

SEQ ID NO: 3174492 - DNA, 25 bp, Homo sapien
actgtaagccgggttgagtggccca

SEQ ID NO: 3174493 - DNA, 25 bp, Homo sapien
cctgaagaagggaccggaagaggat

SEQ ID NO: 3174494 - DNA, 25 bp, Homo sapien
ctgggaacctcaccgccactgggat

SEQ ID NO: 3174495 - DNA, 25 bp, Homo sapien
ggttccctcctgattccagcgtcgg

SEQ ID NO: 3174496 - DNA, 25 bp, Homo sapien
gaatttccggaatatcagaatctgt

SEQ ID NO: 3174497 - DNA, 25 bp, Homo sapien
ctgaggatggtggaatttccggaat

SEQ ID NO: 3174498 - DNA, 25 bp, Homo sapien
ccggaatatcagaatctgttctgga

SEQ ID NO: 3174499 - DNA, 25 bp, Homo sapien
cttgaagataaaccagatagagctt

SEQ ID NO: 3174500 - DNA, 25 bp, Homo sapien
gagtgagaattccacgtatccacca

SEQ ID NO: 3174501 - DNA, 25 bp, Homo sapien
agttagagtgagaattccacgtatc

SEQ ID NO: 3174502 - DNA, 25 bp, Homo sapien
tagagtgagaattccacgtatccac

SEQ ID NO: 3174503 - DNA, 25 bp, Homo sapien
gagaattccacgtatccaccagttt

SEQ ID NO: 3174504 - DNA, 25 bp, Homo sapien
gaaggatcccatatagatgatcagg

SEQ ID NO: 3174505 - DNA, 25 bp, Homo sapien
cagcatgaaggatcccatatagatg

SEQ ID NO: 3174506 - DNA, 25 bp, Homo sapien
catcagcatgaaggatcccatatag

SEQ ID NO: 3174507 - DNA, 25 bp, Homo sapien
catgaaggatcccatatagatgatc

SEQ ID NO: 3174508 - DNA, 25 bp, Homo sapien
cctgttatacaaacttggtctctgc

SEQ ID NO: 3174509 - DNA, 25 bp, Homo sapien
tatgcttggcacaatgtcagacaca

SEQ ID NO: 3174510 - DNA, 25 bp, Homo sapien
tatctttgataaaatatgcttggca

SEQ ID NO: 3174511 - DNA, 25 bp, Homo sapien
cacatagatatgtacctgttataca

SEQ ID NO: 3174512 - DNA, 25 bp, Homo sapien
ggtggagttgctggaagacaaaggt

SEQ ID NO: 3174513 - DNA, 25 bp, Homo sapien
ggaactactaggagggtggagttgc

SEQ ID NO: 3174514 - DNA, 25 bp, Homo sapien
actactaggagggtggagttgctgg

SEQ ID NO: 3174515 - DNA, 25 bp, Homo sapien
gaactactaggagggtggagttgct

SEQ ID NO: 3174516 - DNA, 25 bp, Homo sapien
ggaggaggatctgcagagtcaccac

SEQ ID NO: 3174517 - DNA, 25 bp, Homo sapien
gggggtgggcaacggcagagccaga

SEQ ID NO: 3174518 - DNA, 25 bp, Homo sapien
gaggaggaggatctgcagagtcacc

SEQ ID NO: 3174519 - DNA, 25 bp, Homo sapien
gagggggtgggcaacggcagagcca

SEQ ID NO: 3174520 - DNA, 25 bp, Homo sapien
tgtagcatcacacccggtgcttgac

SEQ ID NO: 3174521 - DNA, 25 bp, Homo sapien
gatgtagcatcacacccggtgcttg

SEQ ID NO: 3174522 - DNA, 25 bp, Homo sapien
tcaagatgtagcatcacacccggtg

SEQ ID NO: 3174523 - DNA, 25 bp, Homo sapien
aatttctcaagatgtagcatcacac

SEQ ID NO: 3174524 - DNA, 25 bp, Homo sapien
aaaccatggtagatcataagaatga

SEQ ID NO: 3174525 - DNA, 25 bp, Homo sapien
ctaaaccatggtagatcataagaat

SEQ ID NO: 3174526 - DNA, 25 bp, Homo sapien
gaatgatagactctataacctatag

SEQ ID NO: 3174527 - DNA, 25 bp, Homo sapien
gatcataagaatgatagactctata

SEQ ID NO: 3174528 - DNA, 25 bp, Homo sapien
tggtagcgaatgaggaactgaagtt

SEQ ID NO: 3174529 - DNA, 25 bp, Homo sapien
ctgccagatagagggcaaatgatat

SEQ ID NO: 3174530 - DNA, 25 bp, Homo sapien
atctatggtagcgaatgaggaactg

SEQ ID NO: 3174531 - DNA, 25 bp, Homo sapien
gaatgaggaactgaagttgttcttc

SEQ ID NO: 3174532 - DNA, 25 bp, Homo sapien
agaattagaaggcctaggaactgaa

SEQ ID NO: 3174533 - DNA, 25 bp, Homo sapien
ttagaattagaaggcctaggaactg

SEQ ID NO: 3174534 - DNA, 25 bp, Homo sapien
aattagaaggcctaggaactgaagg

SEQ ID NO: 3174535 - DNA, 25 bp, Homo sapien
ttagaaggcctaggaactgaaggag

SEQ ID NO: 3174536 - DNA, 25 bp, Homo sapien
tacagttctctgacttagaggaagg

SEQ ID NO: 3174537 - DNA, 25 bp, Homo sapien
gattggttgcaggatccccaaagga

SEQ ID NO: 3174538 - DNA, 25 bp, Homo sapien
tgtctgactcctagatacagtaaga

SEQ ID NO: 3174539 - DNA, 25 bp, Homo sapien
tcctagcatagctgaggctaaatat

SEQ ID NO: 3174540 - DNA, 25 bp, Homo sapien
tatcaaggcaattctaccagtagag

SEQ ID NO: 3174541 - DNA, 25 bp, Homo sapien
gggtattactactctcaccaagcaa

SEQ ID NO: 3174542 - DNA, 25 bp, Homo sapien
gcctttcgctacttttggtgatcaa

SEQ ID NO: 3174543 - DNA, 25 bp, Homo sapien
gaatgaatactgaccccaatcctat

SEQ ID NO: 3174544 - DNA, 25 bp, Homo sapien
taaaactgcagacgataatgtttct

SEQ ID NO: 3174545 - DNA, 25 bp, Homo sapien
tataaaactgcagacgataatgttt

SEQ ID NO: 3174546 - DNA, 25 bp, Homo sapien
aactgcagacgataatgtttcttca

SEQ ID NO: 3174547 - DNA, 25 bp, Homo sapien
aaactgcagacgataatgtttcttc

SEQ ID NO: 3174548 - DNA, 25 bp, Homo sapien
gttatcagtaaagtgacatgagtcc

SEQ ID NO: 3174549 - DNA, 25 bp, Homo sapien
actgagtgacagttatcagtaaagt

SEQ ID NO: 3174550 - DNA, 25 bp, Homo sapien
gtaaagtgacatgagtccatgcgaa

SEQ ID NO: 3174551 - DNA, 25 bp, Homo sapien
gacagttatcagtaaagtgacatga

SEQ ID NO: 3174552 - DNA, 25 bp, Homo sapien
agtaactgccccatcaatgaaaagt

SEQ ID NO: 3174553 - DNA, 25 bp, Homo sapien
ttcagtaactgccccatcaatgaaa

SEQ ID NO: 3174554 - DNA, 25 bp, Homo sapien
cagtaactgccccatcaatgaaaag

SEQ ID NO: 3174555 - DNA, 25 bp, Homo sapien
tcagtaactgccccatcaatgaaaa

SEQ ID NO: 3174556 - DNA, 25 bp, Homo sapien
aacacttgatattggaacaaggaac

SEQ ID NO: 3174557 - DNA, 25 bp, Homo sapien
tatgtcattgcagataacacttgat

SEQ ID NO: 3174558 - DNA, 25 bp, Homo sapien
tccaaaaaggtaagcagttatgtca

SEQ ID NO: 3174559 - DNA, 25 bp, Homo sapien
aaaaggtaagcagttatgtcattgc

SEQ ID NO: 3174560 - DNA, 25 bp, Homo sapien
aaaccaccaatgaatccttcccaag

SEQ ID NO: 3174561 - DNA, 25 bp, Homo sapien
aaccaccaatgaatccttcccaagt

SEQ ID NO: 3174562 - DNA, 25 bp, Homo sapien
agaaaccaccaatgaatccttccca

SEQ ID NO: 3174563 - DNA, 25 bp, Homo sapien
gaaaccaccaatgaatccttcccaa

SEQ ID NO: 3174564 - DNA, 25 bp, Homo sapien
tctgtcacgaaggagtttacatcac

SEQ ID NO: 3174565 - DNA, 25 bp, Homo sapien
tcaagactgcctttagaaagggtgg

SEQ ID NO: 3174566 - DNA, 25 bp, Homo sapien
ggtatttggataacacataggcagc

SEQ ID NO: 3174567 - DNA, 25 bp, Homo sapien
cacttcggtattccactgggcagac

SEQ ID NO: 3174568 - DNA, 25 bp, Homo sapien
gacacagatcaggagggttccactg

SEQ ID NO: 3174569 - DNA, 25 bp, Homo sapien
tcaccagacctgatgacacagatca

SEQ ID NO: 3174570 - DNA, 25 bp, Homo sapien
cactcaccagacctgatgacacaga

SEQ ID NO: 3174571 - DNA, 25 bp, Homo sapien
acacagatcaggagggttccactgg

SEQ ID NO: 3174572 - DNA, 25 bp, Homo sapien
gcataccacctgatctaagaaccat

SEQ ID NO: 3174573 - DNA, 25 bp, Homo sapien
tagtaagtcaaagcacgcaccacat

SEQ ID NO: 3174574 - DNA, 25 bp, Homo sapien
tcaaactttaaggatcaaggaagaa

SEQ ID NO: 3174575 - DNA, 25 bp, Homo sapien
tgaaattgtatttgagcataccacc

SEQ ID NO: 3174576 - DNA, 25 bp, Homo sapien
gatctggaaagggtacaagctcact

SEQ ID NO: 3174577 - DNA, 25 bp, Homo sapien
gaaggctcttttgaatccactagca

SEQ ID NO: 3174578 - DNA, 25 bp, Homo sapien
ccactagcaaagaagcctccaaatg

SEQ ID NO: 3174579 - DNA, 25 bp, Homo sapien
caaatgggccaattaaagatgcaaa

SEQ ID NO: 3174580 - DNA, 25 bp, Homo sapien
gggaatggtagtaagcctctgcaaa

SEQ ID NO: 3174581 - DNA, 25 bp, Homo sapien
tagattcacatgtctgggtgcccag

SEQ ID NO: 3174582 - DNA, 25 bp, Homo sapien
ggaaatggacatgactaactgctct

SEQ ID NO: 3174583 - DNA, 25 bp, Homo sapien
aaattacagtgagcccatatgggac

SEQ ID NO: 3174584 - DNA, 25 bp, Homo sapien
accatgtccaggaatggtatttgca

SEQ ID NO: 3174585 - DNA, 25 bp, Homo sapien
acacatgtacaaaagttgccatcaa

SEQ ID NO: 3174586 - DNA, 25 bp, Homo sapien
tcccaccatgtccaggaatggtatt

SEQ ID NO: 3174587 - DNA, 25 bp, Homo sapien
gtccaggaatggtatttgcaaaatc

SEQ ID NO: 3174588 - DNA, 25 bp, Homo sapien
ttaactgctgttcaggttgaagcac

SEQ ID NO: 3174589 - DNA, 25 bp, Homo sapien
gctgttcaggttgaagcaccaacaa

SEQ ID NO: 3174590 - DNA, 25 bp, Homo sapien
ccaacaactgctgtagcactttgct

SEQ ID NO: 3174591 - DNA, 25 bp, Homo sapien
tgctgtagcactttgctgggatttg

SEQ ID NO: 3174592 - DNA, 25 bp, Homo sapien
tccagactacatgaggaggaagtgc

SEQ ID NO: 3174593 - DNA, 25 bp, Homo sapien
gacctatggtcaaaaagctggactg

SEQ ID NO: 3174594 - DNA, 25 bp, Homo sapien
tctacaaagggctgcactagaagcc

SEQ ID NO: 3174595 - DNA, 25 bp, Homo sapien
tcactaccctacagaaccatggaag

SEQ ID NO: 3174596 - DNA, 25 bp, Homo sapien
gtccacggataagaaatttactctc

SEQ ID NO: 3174597 - DNA, 25 bp, Homo sapien
ggaaaggtttggcattcgtgtgctt

SEQ ID NO: 3174598 - DNA, 25 bp, Homo sapien
caccaaaggaaaggtttggcattcg

SEQ ID NO: 3174599 - DNA, 25 bp, Homo sapien
tctggttagtgtccagtccaccaaa

SEQ ID NO: 3174600 - DNA, 25 bp, Homo sapien
taaaaaggtcaatcgagagctccat

SEQ ID NO: 3174601 - DNA, 25 bp, Homo sapien
tgaatgtacgtcaccacaacaagga

SEQ ID NO: 3174602 - DNA, 25 bp, Homo sapien
tggaacccaggtataacggcaatct

SEQ ID NO: 3174603 - DNA, 25 bp, Homo sapien
ggctgactgcatcagtggaacccag

SEQ ID NO: 3174604 - DNA, 25 bp, Homo sapien
gaactgagtcgccttttcagggtgc

SEQ ID NO: 3174605 - DNA, 25 bp, Homo sapien
cagggtgccgacaagtgctatgtat

SEQ ID NO: 3174606 - DNA, 25 bp, Homo sapien
gccacgatcagtaggaagccctctt

SEQ ID NO: 3174607 - DNA, 25 bp, Homo sapien
gtgctatgtattgtgaaaaagatgg

SEQ ID NO: 3174608 - DNA, 25 bp, Homo sapien
ggacaggtcactttccaatactttc

SEQ ID NO: 3174609 - DNA, 25 bp, Homo sapien
cccttcaagcgctcattaaaatgta

SEQ ID NO: 3174610 - DNA, 25 bp, Homo sapien
tgtgcccccttcaagcgctcattaa

SEQ ID NO: 3174611 - DNA, 25 bp, Homo sapien
aaccaaactgtatgccctctgtgcc

SEQ ID NO: 3174612 - DNA, 25 bp, Homo sapien
tctttggttataaacttgaggatcc

SEQ ID NO: 3174613 - DNA, 25 bp, Homo sapien
ctttggttataaacttgaggatcct

SEQ ID NO: 3174614 - DNA, 25 bp, Homo sapien
gcagtctttggttataaacttgagg

SEQ ID NO: 3174615 - DNA, 25 bp, Homo sapien
agtctttggttataaacttgaggat

SEQ ID NO: 3174616 - DNA, 25 bp, Homo sapien
ttcttaagtcaaagaggcacttgtg

SEQ ID NO: 3174617 - DNA, 25 bp, Homo sapien
gaacataccatccatagaaccatag

SEQ ID NO: 3174618 - DNA, 25 bp, Homo sapien
taaatcctgattcaagcaccagaga

SEQ ID NO: 3174619 - DNA, 25 bp, Homo sapien
tgtgtcactctacttaaggaccaag

SEQ ID NO: 3174620 - DNA, 25 bp, Homo sapien
cctcaaatttgactggacctgtgga

SEQ ID NO: 3174621 - DNA, 25 bp, Homo sapien
caagccccttctgggagacgtgacc

SEQ ID NO: 3174622 - DNA, 25 bp, Homo sapien
taaggaatattccagtgtcctgccc

SEQ ID NO: 3174623 - DNA, 25 bp, Homo sapien
tggcagtaaggagaagcaagcccct

SEQ ID NO: 3174624 - DNA, 25 bp, Homo sapien
tggcccaagataggccttcacacct

SEQ ID NO: 3174625 - DNA, 25 bp, Homo sapien
gaggcatcatgcaaaggacagcggc

SEQ ID NO: 3174626 - DNA, 25 bp, Homo sapien
ttcacaggtgcgaaaggaaaggcct

SEQ ID NO: 3174627 - DNA, 25 bp, Homo sapien
cattttcagaaacttagtgataaca

SEQ ID NO: 3174628 - DNA, 25 bp, Homo sapien
tttcaagttgcccacagtatctcca

SEQ ID NO: 3174629 - DNA, 25 bp, Homo sapien
gaataggagtccagccgtaagataa

SEQ ID NO: 3174630 - DNA, 25 bp, Homo sapien
aatatttgggcgtcttgtacctggc

SEQ ID NO: 3174631 - DNA, 25 bp, Homo sapien
tcttagcattgcagaaaggtggtca

SEQ ID NO: 3174632 - DNA, 25 bp, Homo sapien
taaggacttaactgcctgtaacatg

SEQ ID NO: 3174633 - DNA, 25 bp, Homo sapien
gagcaacactttcgacctccagttc

SEQ ID NO: 3174634 - DNA, 25 bp, Homo sapien
tatgaggtggttcctaggagcaaca

SEQ ID NO: 3174635 - DNA, 25 bp, Homo sapien
cagacgcgattcaggtgaacagcac

SEQ ID NO: 3174636 - DNA, 25 bp, Homo sapien
ctgtatcatttgggatttgaacaaa

SEQ ID NO: 3174637 - DNA, 25 bp, Homo sapien
tgagccacccttccaaaagtctggg

SEQ ID NO: 3174638 - DNA, 25 bp, Homo sapien
aaaactgactccaaactgattgtgg

SEQ ID NO: 3174639 - DNA, 25 bp, Homo sapien
tgttcacggcctttataatgccaag

SEQ ID NO: 3174640 - DNA, 25 bp, Homo sapien
tgtagttgtactcaccgtcctaaag

SEQ ID NO: 3174641 - DNA, 25 bp, Homo sapien
ctggcctctgttgggtcagtgacac

SEQ ID NO: 3174642 - DNA, 25 bp, Homo sapien
gttctgatgcagtcatcattcatcc

SEQ ID NO: 3174643 - DNA, 25 bp, Homo sapien
tggagccatgcttgccatgctggac

SEQ ID NO: 3174644 - DNA, 25 bp, Homo sapien
catctctgcagagttctgatgcagt

SEQ ID NO: 3174645 - DNA, 25 bp, Homo sapien
aaatgatatagttcccaaagagagg

SEQ ID NO: 3174646 - DNA, 25 bp, Homo sapien
ggtgtcagtgtcttgaaccgtcaag

SEQ ID NO: 3174647 - DNA, 25 bp, Homo sapien
aaccgtcaagttcaagaggccatca

SEQ ID NO: 3174648 - DNA, 25 bp, Homo sapien
tgaggattcagctctacacagggct

SEQ ID NO: 3174649 - DNA, 25 bp, Homo sapien
gagaaagccatcgttcaagaacagt

SEQ ID NO: 3174650 - DNA, 25 bp, Homo sapien
ttgagctgtccacccaagaatggct

SEQ ID NO: 3174651 - DNA, 25 bp, Homo sapien
gcaatgcgctatgagccagccaact

SEQ ID NO: 3174652 - DNA, 25 bp, Homo sapien
tcctgtcggtccttcgagaaagcca

SEQ ID NO: 3174653 - DNA, 25 bp, Homo sapien
catagtgaatataagctgctgaaag

SEQ ID NO: 3174654 - DNA, 25 bp, Homo sapien
tgaatataagctgctgaaagtagag

SEQ ID NO: 3174655 - DNA, 25 bp, Homo sapien
gtcttcaattgctgtggtgacaaga

SEQ ID NO: 3174656 - DNA, 25 bp, Homo sapien
gctgtggtgacaagaacatagtgaa

SEQ ID NO: 3174657 - DNA, 25 bp, Homo sapien
tgcctttatcgctgaaagcatcatt

SEQ ID NO: 3174658 - DNA, 25 bp, Homo sapien
tggcactgcctttatcgctgaaagc

SEQ ID NO: 3174659 - DNA, 25 bp, Homo sapien
cactgcctttatcgctgaaagcatc

SEQ ID NO: 3174660 - DNA, 25 bp, Homo sapien
ggcactgcctttatcgctgaaagca

SEQ ID NO: 3174661 - DNA, 25 bp, Homo sapien
tctcattgagaatagcagtggtagt

SEQ ID NO: 3174662 - DNA, 25 bp, Homo sapien
cacttgctgctggtaatcatatgcg

SEQ ID NO: 3174663 - DNA, 25 bp, Homo sapien
gaaatacttgtaacagaggcaggaa

SEQ ID NO: 3174664 - DNA, 25 bp, Homo sapien
ttagagtgtcagaatagcctttccc

SEQ ID NO: 3174665 - DNA, 25 bp, Homo sapien
tctggaagtgaaatttgacctagtt

SEQ ID NO: 3174666 - DNA, 25 bp, Homo sapien
aaagccaaaccatttcactgggtat

SEQ ID NO: 3174667 - DNA, 25 bp, Homo sapien
aatccagtcatgttgatactccaaa

SEQ ID NO: 3174668 - DNA, 25 bp, Homo sapien
aaggctgtatagttgtgtttctgga

SEQ ID NO: 3174669 - DNA, 25 bp, Homo sapien
ccatatctcaaaatttgatagagct

SEQ ID NO: 3174670 - DNA, 25 bp, Homo sapien
tttgttgtatttgtgatatgggagc

SEQ ID NO: 3174671 - DNA, 25 bp, Homo sapien
ttgtatttgtgatatgggagcacat

SEQ ID NO: 3174672 - DNA, 25 bp, Homo sapien
ttccatatctcaaaatttgatagag

SEQ ID NO: 3174673 - DNA, 25 bp, Homo sapien
tttctgaaagctaatttctttgtca

SEQ ID NO: 3174674 - DNA, 25 bp, Homo sapien
ctggtcaaacctgaagcatttctga

SEQ ID NO: 3174675 - DNA, 25 bp, Homo sapien
ctgaaagctaatttctttgtcagac

SEQ ID NO: 3174676 - DNA, 25 bp, Homo sapien
gcatttctgaaagctaatttctttg

SEQ ID NO: 3174677 - DNA, 25 bp, Homo sapien
taagtttgatctgctacattaatga

SEQ ID NO: 3174678 - DNA, 25 bp, Homo sapien
gatagttgagggataccaaggttgt

SEQ ID NO: 3174679 - DNA, 25 bp, Homo sapien
tggctgcaccaatctaccatgtatg

SEQ ID NO: 3174680 - DNA, 25 bp, Homo sapien
tcttaatccatttgatagttgaggg

SEQ ID NO: 3174681 - DNA, 25 bp, Homo sapien
ctgtgccttatgtccgtaggcagca

SEQ ID NO: 3174682 - DNA, 25 bp, Homo sapien
tgccttatgtccgtaggcagcaggc

SEQ ID NO: 3174683 - DNA, 25 bp, Homo sapien
gccttatgtccgtaggcagcaggcc

SEQ ID NO: 3174684 - DNA, 25 bp, Homo sapien
cttatgtccgtaggcagcaggccca

SEQ ID NO: 3174685 - DNA, 25 bp, Homo sapien
ggatgaagatgtttgtgtatacaaa

SEQ ID NO: 3174686 - DNA, 25 bp, Homo sapien
cagaggatgaagatgtttgtgtata

SEQ ID NO: 3174687 - DNA, 25 bp, Homo sapien
gaggatgaagatgtttgtgtataca

SEQ ID NO: 3174688 - DNA, 25 bp, Homo sapien
tcagaggatgaagatgtttgtgtat

SEQ ID NO: 3174689 - DNA, 25 bp, Homo sapien
caagaatgttggtatttttgtcctc

SEQ ID NO: 3174690 - DNA, 25 bp, Homo sapien
tacaagaatgttggtatttttgtcc

SEQ ID NO: 3174691 - DNA, 25 bp, Homo sapien
aatacaagaatgttggtatttttgt

SEQ ID NO: 3174692 - DNA, 25 bp, Homo sapien
aagaatgttggtatttttgtcctct

SEQ ID NO: 3174693 - DNA, 25 bp, Homo sapien
tctgggtccttgaaataatagcgat

SEQ ID NO: 3174694 - DNA, 25 bp, Homo sapien
tcccttgccagtagagagctgtgtc

SEQ ID NO: 3174695 - DNA, 25 bp, Homo sapien
ggtaggaccactagcctgtctggcg

SEQ ID NO: 3174696 - DNA, 25 bp, Homo sapien
caactaggtacatgtgaagccccag

SEQ ID NO: 3174697 - DNA, 25 bp, Homo sapien
cggagccacccggacctgagcgcag

SEQ ID NO: 3174698 - DNA, 25 bp, Homo sapien
gggcgtaggcggccctggctcgcag

SEQ ID NO: 3174699 - DNA, 25 bp, Homo sapien
acccggacctgagcgcagccgagcg

SEQ ID NO: 3174700 - DNA, 25 bp, Homo sapien
tcgcaggggtaggggatcaggccct

SEQ ID NO: 3174701 - DNA, 25 bp, Homo sapien
gtcggggtcacgggcggcgagcgga

SEQ ID NO: 3174702 - DNA, 25 bp, Homo sapien
ggtgggcggcctggccctagtcctc

SEQ ID NO: 3174703 - DNA, 25 bp, Homo sapien
gcctggccctagtcctccgctgcct

SEQ ID NO: 3174704 - DNA, 25 bp, Homo sapien
cggagcggagcggaaccgggatatt

SEQ ID NO: 3174705 - DNA, 25 bp, Homo sapien
aagaaacccgaggagcgccgaggct

SEQ ID NO: 3174706 - DNA, 25 bp, Homo sapien
acgcggcggagcagggacgggggca

SEQ ID NO: 3174707 - DNA, 25 bp, Homo sapien
cctgctgcctagcaccgctgcctgg

SEQ ID NO: 3174708 - DNA, 25 bp, Homo sapien
tgcctagcaccgctgcctggcccgg

SEQ ID NO: 3174709 - DNA, 25 bp, Homo sapien
agatggccaccaacagctgcgggaa

SEQ ID NO: 3174710 - DNA, 25 bp, Homo sapien
tgcgggaaacggcaacaacccctca

SEQ ID NO: 3174711 - DNA, 25 bp, Homo sapien
ctcactttccgggatggtccctgcg

SEQ ID NO: 3174712 - DNA, 25 bp, Homo sapien
tcagacagccagcgggaggtggaga

SEQ ID NO: 3174713 - DNA, 25 bp, Homo sapien
gaaggcagccgctgagagtgaggca

SEQ ID NO: 3174714 - DNA, 25 bp, Homo sapien
gagtgaggcaagagcgggaagccga

SEQ ID NO: 3174715 - DNA, 25 bp, Homo sapien
caggagggggtagaagctgagcggc

SEQ ID NO: 3174716 - DNA, 25 bp, Homo sapien
atccagcggcgctgtctgcagacag

SEQ ID NO: 3174717 - DNA, 25 bp, Homo sapien
gggaagaggcgcgtctggaaggcag

SEQ ID NO: 3174718 - DNA, 25 bp, Homo sapien
cggggaagaggcgcgtctggaaggc

SEQ ID NO: 3174719 - DNA, 25 bp, Homo sapien
gcggggaagaggcgcgtctggaagg

SEQ ID NO: 3174720 - DNA, 25 bp, Homo sapien
gaagaggcgcgtctggaaggcagtg

SEQ ID NO: 3174721 - DNA, 25 bp, Homo sapien
ctttgcgtttctccatcgcctctga

SEQ ID NO: 3174722 - DNA, 25 bp, Homo sapien
cagcatccagctaaagggtgtaggg

SEQ ID NO: 3174723 - DNA, 25 bp, Homo sapien
catccagctaaagggtgtagggtta

SEQ ID NO: 3174724 - DNA, 25 bp, Homo sapien
tgcgtttctccatcgcctctgacag

SEQ ID NO: 3174725 - DNA, 25 bp, Homo sapien
gtttgctgcacatgcctagatctct

SEQ ID NO: 3174726 - DNA, 25 bp, Homo sapien
cagtacttacgtttatgtggcttca

SEQ ID NO: 3174727 - DNA, 25 bp, Homo sapien
gcagaactgtttagaaatagccctt

SEQ ID NO: 3174728 - DNA, 25 bp, Homo sapien
gcctctgcacaaagggtttatccca

SEQ ID NO: 3174729 - DNA, 25 bp, Homo sapien
catgatccccagagactttcattgg

SEQ ID NO: 3174730 - DNA, 25 bp, Homo sapien
taattctattgttgcgtctagtagc

SEQ ID NO: 3174731 - DNA, 25 bp, Homo sapien
ccatctggtcctttcaaaccaggaa

SEQ ID NO: 3174732 - DNA, 25 bp, Homo sapien
ggttttcatagacactcaattccca

SEQ ID NO: 3174733 - DNA, 25 bp, Homo sapien
gaacaagggcaaaacgtgatactat

SEQ ID NO: 3174734 - DNA, 25 bp, Homo sapien
aaagagttgttcttgatgtctcagg

SEQ ID NO: 3174735 - DNA, 25 bp, Homo sapien
taaaagtctgaactctccatagaga

SEQ ID NO: 3174736 - DNA, 25 bp, Homo sapien
gaaacaatacatcgagctacacaca

SEQ ID NO: 3174737 - DNA, 25 bp, Homo sapien
ggtcttcttctagaaaggacattgt

SEQ ID NO: 3174738 - DNA, 25 bp, Homo sapien
cactaacgtagtggtttaggactat

SEQ ID NO: 3174739 - DNA, 25 bp, Homo sapien
cattacgcctatatgaaaggcatgc

SEQ ID NO: 3174740 - DNA, 25 bp, Homo sapien
aggacattgtactagttctctatcg

SEQ ID NO: 3174741 - DNA, 25 bp, Homo sapien
tctattcatataggcataatatcgc

SEQ ID NO: 3174742 - DNA, 25 bp, Homo sapien
gatttatctgaagcatgtgaggtta

SEQ ID NO: 3174743 - DNA, 25 bp, Homo sapien
taatatcgcaaaaatattatgggtt

SEQ ID NO: 3174744 - DNA, 25 bp, Homo sapien
tgtagagtactaagtatgaaatagc

SEQ ID NO: 3174745 - DNA, 25 bp, Homo sapien
ggattctacattagactctacatgg

SEQ ID NO: 3174746 - DNA, 25 bp, Homo sapien
ctcctggattctacattagactcta

SEQ ID NO: 3174747 - DNA, 25 bp, Homo sapien
cattagactctacatggagagtact

SEQ ID NO: 3174748 - DNA, 25 bp, Homo sapien
gagagtactggggagtcccataaac

SEQ ID NO: 3174749 - DNA, 25 bp, Homo sapien
tgcttccaaaatgttgcctcttgct

SEQ ID NO: 3174750 - DNA, 25 bp, Homo sapien
cttgaccatttttctgccatagatt

SEQ ID NO: 3174751 - DNA, 25 bp, Homo sapien
tgaccatttttctgccatagatttt

SEQ ID NO: 3174752 - DNA, 25 bp, Homo sapien
ccatttttctgccatagatttttaa

SEQ ID NO: 3174753 - DNA, 25 bp, Homo sapien
tccttgaccatttttctgccataga

SEQ ID NO: 3174754 - DNA, 25 bp, Homo sapien
tatttgaaaacgaattactgtgaaa

SEQ ID NO: 3174755 - DNA, 25 bp, Homo sapien
catttttatgcattctagtcaacaa

SEQ ID NO: 3174756 - DNA, 25 bp, Homo sapien
tttttatgcattctagtcaacaatg

SEQ ID NO: 3174757 - DNA, 25 bp, Homo sapien
tttatgcattctagtcaacaatggg

SEQ ID NO: 3174758 - DNA, 25 bp, Homo sapien
aaaatttctggtcaagggtatggca

SEQ ID NO: 3174759 - DNA, 25 bp, Homo sapien
cataacatgccacttcagttgggtg

SEQ ID NO: 3174760 - DNA, 25 bp, Homo sapien
ggtctattggtcagatccaggcaca

SEQ ID NO: 3174761 - DNA, 25 bp, Homo sapien
gactcagttttgacctcgcacatga

SEQ ID NO: 3174762 - DNA, 25 bp, Homo sapien
cactaaggaacctcgagggagcact

SEQ ID NO: 3174763 - DNA, 25 bp, Homo sapien
tgcttgctataggaacaccagactg

SEQ ID NO: 3174764 - DNA, 25 bp, Homo sapien
tatggtgacggcaaaggtggcattc

SEQ ID NO: 3174765 - DNA, 25 bp, Homo sapien
cacagtggtgtaaaacaggagctcc

SEQ ID NO: 3174766 - DNA, 25 bp, Homo sapien
cacagtcgtgataaatgcagcaaac

SEQ ID NO: 3174767 - DNA, 25 bp, Homo sapien
aactcaattgtaaggtcaggaccca

SEQ ID NO: 3174768 - DNA, 25 bp, Homo sapien
actcaattgtaaggtcaggacccat

SEQ ID NO: 3174769 - DNA, 25 bp, Homo sapien
tccacagtcgtgataaatgcagcaa

SEQ ID NO: 3174770 - DNA, 25 bp, Homo sapien
catggaaactcgtggctgctctgag

SEQ ID NO: 3174771 - DNA, 25 bp, Homo sapien
ctcatatagacaaagcatggaaact

SEQ ID NO: 3174772 - DNA, 25 bp, Homo sapien
aaagcatggaaactcgtggctgctc

SEQ ID NO: 3174773 - DNA, 25 bp, Homo sapien
gggtaaaagctcatatagacaaagc

SEQ ID NO: 3174774 - DNA, 25 bp, Homo sapien
tgtactttgctggtttctaccattg

SEQ ID NO: 3174775 - DNA, 25 bp, Homo sapien
caccaacatggaatcacttgataaa

SEQ ID NO: 3174776 - DNA, 25 bp, Homo sapien
tctaccattgacaggcaccaacatg

SEQ ID NO: 3174777 - DNA, 25 bp, Homo sapien
tttgctggtttctaccattgacagg

SEQ ID NO: 3174778 - DNA, 25 bp, Homo sapien
cccacaagtggcattcaaaggactg

SEQ ID NO: 3174779 - DNA, 25 bp, Homo sapien
tgccgcagatccacgtaaaataact

SEQ ID NO: 3174780 - DNA, 25 bp, Homo sapien
tccctcctggatagaatggcaattg

SEQ ID NO: 3174781 - DNA, 25 bp, Homo sapien
tactctactatggttagtcctgccc

SEQ ID NO: 3174782 - DNA, 25 bp, Homo sapien
aatcaatggggcgaaagatattgca

SEQ ID NO: 3174783 - DNA, 25 bp, Homo sapien
tgccaatcaatggggcgaaagatat

SEQ ID NO: 3174784 - DNA, 25 bp, Homo sapien
tagaaggggacatagctactcatat

SEQ ID NO: 3174785 - DNA, 25 bp, Homo sapien
tggaggttctagaaggggacatagc

SEQ ID NO: 3174786 - DNA, 25 bp, Homo sapien
cttggtatatgttctgtgggcactt

SEQ ID NO: 3174787 - DNA, 25 bp, Homo sapien
cctctttgacccatagattattaag

SEQ ID NO: 3174788 - DNA, 25 bp, Homo sapien
ttctgctatagttgaattcagtgct

SEQ ID NO: 3174789 - DNA, 25 bp, Homo sapien
tgtttcattgaggttaggtaaaaca

SEQ ID NO: 3174790 - DNA, 25 bp, Homo sapien
gtctggaagtcccaggaagagatca

SEQ ID NO: 3174791 - DNA, 25 bp, Homo sapien
cagcagctcctactgaggtctctgt

SEQ ID NO: 3174792 - DNA, 25 bp, Homo sapien
cctactgaggtctctgtgtctggaa

SEQ ID NO: 3174793 - DNA, 25 bp, Homo sapien
gaagagatcagcagagaagaaggtg

SEQ ID NO: 3174794 - DNA, 25 bp, Homo sapien
gaaagccttttagatgcgacagaac

SEQ ID NO: 3174795 - DNA, 25 bp, Homo sapien
ccttttagatgcgacagaacaaggt

SEQ ID NO: 3174796 - DNA, 25 bp, Homo sapien
agccttttagatgcgacagaacaag

SEQ ID NO: 3174797 - DNA, 25 bp, Homo sapien
ttttagatgcgacagaacaaggtcg

SEQ ID NO: 3174798 - DNA, 25 bp, Homo sapien
acggtctgtagagcaccgccgccat

SEQ ID NO: 3174799 - DNA, 25 bp, Homo sapien
agggaggcacggtctgtagagcacc

SEQ ID NO: 3174800 - DNA, 25 bp, Homo sapien
ggaggcacggtctgtagagcaccgc

SEQ ID NO: 3174801 - DNA, 25 bp, Homo sapien
ggcacggtctgtagagcaccgccgc

SEQ ID NO: 3174802 - DNA, 25 bp, Homo sapien
tgcgcaaatcgtggcacggtagtgc

SEQ ID NO: 3174803 - DNA, 25 bp, Homo sapien
caaatcgtggcacggtagtgccggc

SEQ ID NO: 3174804 - DNA, 25 bp, Homo sapien
gctctgcgcaaatcgtggcacggta

SEQ ID NO: 3174805 - DNA, 25 bp, Homo sapien
ccacctcttcgatggtcagggacta

SEQ ID NO: 3174806 - DNA, 25 bp, Homo sapien
ccataagttatagggaggacagcag

SEQ ID NO: 3174807 - DNA, 25 bp, Homo sapien
gcctgaagaaatttgttgccacatc

SEQ ID NO: 3174808 - DNA, 25 bp, Homo sapien
cagcagcagctatattaccttggcc

SEQ ID NO: 3174809 - DNA, 25 bp, Homo sapien
tctgccatcgccagcttgcacttct

SEQ ID NO: 3174810 - DNA, 25 bp, Homo sapien
ttgcacttctcgtcacttccagcag

SEQ ID NO: 3174811 - DNA, 25 bp, Homo sapien
gaatccttcaggctgccctgactgt

SEQ ID NO: 3174812 - DNA, 25 bp, Homo sapien
ctgtagttcacgctggactgcgcac

SEQ ID NO: 3174813 - DNA, 25 bp, Homo sapien
tgactgtagttcacgctggactgcg

SEQ ID NO: 3174814 - DNA, 25 bp, Homo sapien
tgccctgactgtagttcacgctgga

SEQ ID NO: 3174815 - DNA, 25 bp, Homo sapien
ctcccatgccaggcagcttcctcac

SEQ ID NO: 3174816 - DNA, 25 bp, Homo sapien
cctcccatgccaggcagcttcctca

SEQ ID NO: 3174817 - DNA, 25 bp, Homo sapien
gccctcccatgccaggcagcttcct

SEQ ID NO: 3174818 - DNA, 25 bp, Homo sapien
ctgccctcccatgccaggcagcttc

SEQ ID NO: 3174819 - DNA, 25 bp, Homo sapien
gttggctggtacagaagcaatgttt

SEQ ID NO: 3174820 - DNA, 25 bp, Homo sapien
cagaaggttggctggtacagaagca

SEQ ID NO: 3174821 - DNA, 25 bp, Homo sapien
agcaatgtttcctccagcaaatccc

SEQ ID NO: 3174822 - DNA, 25 bp, Homo sapien
gaaggttggctggtacagaagcaat

SEQ ID NO: 3174823 - DNA, 25 bp, Homo sapien
cagtacaggcccatagcagagatat

SEQ ID NO: 3174824 - DNA, 25 bp, Homo sapien
cacagtacaggcccatagcagagat

SEQ ID NO: 3174825 - DNA, 25 bp, Homo sapien
acagtacaggcccatagcagagata

SEQ ID NO: 3174826 - DNA, 25 bp, Homo sapien
agtacaggcccatagcagagatatt

SEQ ID NO: 3174827 - DNA, 25 bp, Homo sapien
cttggagaagacgggaaagttcatt

SEQ ID NO: 3174828 - DNA, 25 bp, Homo sapien
atatggttggatgcgcccttgctgg

SEQ ID NO: 3174829 - DNA, 25 bp, Homo sapien
cattccgacatatggttggatgcgc

SEQ ID NO: 3174830 - DNA, 25 bp, Homo sapien
cttgaaaaccattccgacatatggt

SEQ ID NO: 3174831 - DNA, 25 bp, Homo sapien
cttgctggcagtaccgaagcactga

SEQ ID NO: 3174832 - DNA, 25 bp, Homo sapien
ggatttcccctgtatcacatgaagg

SEQ ID NO: 3174833 - DNA, 25 bp, Homo sapien
ctgtatcacatgaaggaaggcatca

SEQ ID NO: 3174834 - DNA, 25 bp, Homo sapien
ttcccctgtatcacatgaaggaagg

SEQ ID NO: 3174835 - DNA, 25 bp, Homo sapien
ccctgtatcacatgaaggaaggcat

SEQ ID NO: 3174836 - DNA, 25 bp, Homo sapien
tctgctcggcttgaacctgaatgtg

SEQ ID NO: 3174837 - DNA, 25 bp, Homo sapien
cttctgctcggcttgaacctgaatg

SEQ ID NO: 3174838 - DNA, 25 bp, Homo sapien
gctcggcttgaacctgaatgtgtag

SEQ ID NO: 3174839 - DNA, 25 bp, Homo sapien
ggcttgaacctgaatgtgtagccat

SEQ ID NO: 3174840 - DNA, 25 bp, Homo sapien
atgatgactggcctatcctgacaag

SEQ ID NO: 3174841 - DNA, 25 bp, Homo sapien
tcctgacaagtgaagtttagcaact

SEQ ID NO: 3174842 - DNA, 25 bp, Homo sapien
ttgtggtccatgatgactggcctat

SEQ ID NO: 3174843 - DNA, 25 bp, Homo sapien
tgactggcctatcctgacaagtgaa

SEQ ID NO: 3174844 - DNA, 25 bp, Homo sapien
tgctgccaactggattgtaaccaga

SEQ ID NO: 3174845 - DNA, 25 bp, Homo sapien
cttgctgccaactggattgtaacca

SEQ ID NO: 3174846 - DNA, 25 bp, Homo sapien
tgccaactggattgtaaccagaaat

SEQ ID NO: 3174847 - DNA, 25 bp, Homo sapien
ccttgctgccaactggattgtaacc

SEQ ID NO: 3174848 - DNA, 25 bp, Homo sapien
tccaagctcggttcactgttttcca

SEQ ID NO: 3174849 - DNA, 25 bp, Homo sapien
gaatgatctaatgtatgtctccacc

SEQ ID NO: 3174850 - DNA, 25 bp, Homo sapien
gatttggcagactggctctatgcca

SEQ ID NO: 3174851 - DNA, 25 bp, Homo sapien
gaacttaggtatcagtcccaggtga

SEQ ID NO: 3174852 - DNA, 25 bp, Homo sapien
taattcttactggataggccctccc

SEQ ID NO: 3174853 - DNA, 25 bp, Homo sapien
caatggaggagtgaccccataggct

SEQ ID NO: 3174854 - DNA, 25 bp, Homo sapien
taattcatgtatcccctgaggtacg

SEQ ID NO: 3174855 - DNA, 25 bp, Homo sapien
ccctactgaggtcaccaggacttgg

SEQ ID NO: 3174856 - DNA, 25 bp, Homo sapien
gagtatattgcagctatccattaag

SEQ ID NO: 3174857 - DNA, 25 bp, Homo sapien
cattaaccaagggtagggcaattgt

SEQ ID NO: 3174858 - DNA, 25 bp, Homo sapien
gatagaaaagaacttctgagtgccc

SEQ ID NO: 3174859 - DNA, 25 bp, Homo sapien
tggtcaactttgtgctctcatggat

SEQ ID NO: 3174860 - DNA, 25 bp, Homo sapien
ccatgtcctcaacctccatgtcatc

SEQ ID NO: 3174861 - DNA, 25 bp, Homo sapien
ccccatgtcctcaacctccatgtca

SEQ ID NO: 3174862 - DNA, 25 bp, Homo sapien
caacctccatgtcatctcctcctag

SEQ ID NO: 3174863 - DNA, 25 bp, Homo sapien
caccccatgtcctcaacctccatgt

SEQ ID NO: 3174864 - DNA, 25 bp, Homo sapien
ctcacagagagcaggtccacaaaag

SEQ ID NO: 3174865 - DNA, 25 bp, Homo sapien
cagagagcaggtccacaaaagccat

SEQ ID NO: 3174866 - DNA, 25 bp, Homo sapien
ctgcagcaaaggaggtcagcagagc

SEQ ID NO: 3174867 - DNA, 25 bp, Homo sapien
aggaggtcagcagagctcacagaga

SEQ ID NO: 3174868 - DNA, 25 bp, Homo sapien
ctgaatcatgaattactggctctaa

SEQ ID NO: 3174869 - DNA, 25 bp, Homo sapien
tactcccatgggctgatactcccta

SEQ ID NO: 3174870 - DNA, 25 bp, Homo sapien
taattgcctctagaatcaaacctga

SEQ ID NO: 3174871 - DNA, 25 bp, Homo sapien
caggctgaactggtagcgatgagat

SEQ ID NO: 3174872 - DNA, 25 bp, Homo sapien
tcttcacaagatacttcttccttaa

SEQ ID NO: 3174873 - DNA, 25 bp, Homo sapien
aattcttgcccctcatggcggcaag

SEQ ID NO: 3174874 - DNA, 25 bp, Homo sapien
tctgaggggatgaatctcctagaaa

SEQ ID NO: 3174875 - DNA, 25 bp, Homo sapien
tcatggggtaggaattgcaactctg

SEQ ID NO: 3174876 - DNA, 25 bp, Homo sapien
ggaaaagccctatccctgagacata

SEQ ID NO: 3174877 - DNA, 25 bp, Homo sapien
ggcctaataggaaacacaagctgta

SEQ ID NO: 3174878 - DNA, 25 bp, Homo sapien
aaagaatggtctcactgcatccaga

SEQ ID NO: 3174879 - DNA, 25 bp, Homo sapien
tacacattgtaacatatctggcagg

SEQ ID NO: 3174880 - DNA, 25 bp, Homo sapien
tgctgcaggtaaccgaacattcttt

SEQ ID NO: 3174881 - DNA, 25 bp, Homo sapien
ctaatttagcaatctggactctcaa

SEQ ID NO: 3174882 - DNA, 25 bp, Homo sapien
gatgcttcgtgttctatgtaaacct

SEQ ID NO: 3174883 - DNA, 25 bp, Homo sapien
tataaaaatttctaaggatgcttcg

SEQ ID NO: 3174884 - DNA, 25 bp, Homo sapien
atagcagaggtaggaaacatttggc

SEQ ID NO: 3174885 - DNA, 25 bp, Homo sapien
acctacagagccttcgataagccag

SEQ ID NO: 3174886 - DNA, 25 bp, Homo sapien
aggaactgactatagcagaggtagg

SEQ ID NO: 3174887 - DNA, 25 bp, Homo sapien
cctacagagccttcgataagccagg

SEQ ID NO: 3174888 - DNA, 25 bp, Homo sapien
cagtggcaggaattgtcagtgtcca

SEQ ID NO: 3174889 - DNA, 25 bp, Homo sapien
ccaagacctggattgagctgagcca

SEQ ID NO: 3174890 - DNA, 25 bp, Homo sapien
gccagggctgttccaagacctggat

SEQ ID NO: 3174891 - DNA, 25 bp, Homo sapien
gccagtggcaggaattgtcagtgtc

SEQ ID NO: 3174892 - DNA, 25 bp, Homo sapien
caatcttgggatgatgccgagagtc

SEQ ID NO: 3174893 - DNA, 25 bp, Homo sapien
gaaatgcagggaacctcagcgtatg

SEQ ID NO: 3174894 - DNA, 25 bp, Homo sapien
gcgtatgcacaggtacaatcttggg

SEQ ID NO: 3174895 - DNA, 25 bp, Homo sapien
gatgaagtccagtctgaaatgcagg

SEQ ID NO: 3174896 - DNA, 25 bp, Homo sapien
actgagcagggagaatgatccccgg

SEQ ID NO: 3174897 - DNA, 25 bp, Homo sapien
tcagccctgccatgtccataacttg

SEQ ID NO: 3174898 - DNA, 25 bp, Homo sapien
cggactgacccgaacaaattcttca

SEQ ID NO: 3174899 - DNA, 25 bp, Homo sapien
tcataaaccctatcatcacatgttc

SEQ ID NO: 3174900 - DNA, 25 bp, Homo sapien
tcggtgtagtgttgctgtagtcccc

SEQ ID NO: 3174901 - DNA, 25 bp, Homo sapien
taggccggattgtaagatgagactc

SEQ ID NO: 3174902 - DNA, 25 bp, Homo sapien
tgaacttcagcctaagacactgatg

SEQ ID NO: 3174903 - DNA, 25 bp, Homo sapien
caagaatggcgagcttaggccggat

SEQ ID NO: 3174904 - DNA, 25 bp, Homo sapien
tgcccagagggttacttaaagctga

SEQ ID NO: 3174905 - DNA, 25 bp, Homo sapien
tacttagaaagaggtggaccattgc

SEQ ID NO: 3174906 - DNA, 25 bp, Homo sapien
cagcaaggagtctgttccaagagaa

SEQ ID NO: 3174907 - DNA, 25 bp, Homo sapien
taacctgaactagaaactgcgttgt

SEQ ID NO: 3174908 - DNA, 25 bp, Homo sapien
tgttgaactctatgcactgggctgc

SEQ ID NO: 3174909 - DNA, 25 bp, Homo sapien
cttgagaaatcctagcagttgcgca

SEQ ID NO: 3174910 - DNA, 25 bp, Homo sapien
cagttgcgcaaagagtcccagaagt

SEQ ID NO: 3174911 - DNA, 25 bp, Homo sapien
tgctgctccgaaggaaaaggctccc

SEQ ID NO: 3174912 - DNA, 25 bp, Homo sapien
aaatagactgtagaaaaaaggagat

SEQ ID NO: 3174913 - DNA, 25 bp, Homo sapien
gatcaaatggagtacaagaagagcc

SEQ ID NO: 3174914 - DNA, 25 bp, Homo sapien
aaggagatacgttcttttgtgaata

SEQ ID NO: 3174915 - DNA, 25 bp, Homo sapien
gcacaagtaacacccagatttttgg

SEQ ID NO: 3174916 - DNA, 25 bp, Homo sapien
taatggagtactagtgctcccaggg

SEQ ID NO: 3174917 - DNA, 25 bp, Homo sapien
gagggagcacctacgattcacaagg

SEQ ID NO: 3174918 - DNA, 25 bp, Homo sapien
taaattccctatggagttgcctcct

SEQ ID NO: 3174919 - DNA, 25 bp, Homo sapien
ctgaaacaggaatccccatgtggac

SEQ ID NO: 3174920 - DNA, 25 bp, Homo sapien
catagtgaaggcatgcaaaggccag

SEQ ID NO: 3174921 - DNA, 25 bp, Homo sapien
caatcaagggtgcttacggagcagg

SEQ ID NO: 3174922 - DNA, 25 bp, Homo sapien
ttgctaaggcaacacatgatccagt

SEQ ID NO: 3174923 - DNA, 25 bp, Homo sapien
tactgggtctgcaagtggttaggac

SEQ ID NO: 3174924 - DNA, 25 bp, Homo sapien
tacagagcaatttgtgactccacta

SEQ ID NO: 3174925 - DNA, 25 bp, Homo sapien
tgagacttaccaatagacggcaatg

SEQ ID NO: 3174926 - DNA, 25 bp, Homo sapien
gctaagtgaccctgttgctaactat

SEQ ID NO: 3174927 - DNA, 25 bp, Homo sapien
taaacatgcaatggctacagagcaa

SEQ ID NO: 3174928 - DNA, 25 bp, Homo sapien
gaatttgcacactgaaagcatcacc

SEQ ID NO: 3174929 - DNA, 25 bp, Homo sapien
cagagatcttgaatggccatgggtc

SEQ ID NO: 3174930 - DNA, 25 bp, Homo sapien
caagttaactaagggtcactgccag

SEQ ID NO: 3174931 - DNA, 25 bp, Homo sapien
cctaggccaccagttacagtaattc

SEQ ID NO: 3174932 - DNA, 25 bp, Homo sapien
gggcaatccataagccatctcctag

SEQ ID NO: 3174933 - DNA, 25 bp, Homo sapien
tatgttggactctagctaaaaggtt

SEQ ID NO: 3174934 - DNA, 25 bp, Homo sapien
gatgcagatgaaacccaactaaact

SEQ ID NO: 3174935 - DNA, 25 bp, Homo sapien
taagagtgtaaagccatctcacaag

SEQ ID NO: 3174936 - DNA, 25 bp, Homo sapien
tgctctgtccagtcaagttagtgtt

SEQ ID NO: 3174937 - DNA, 25 bp, Homo sapien
tcaatacaggtatctggacaaactc

SEQ ID NO: 3174938 - DNA, 25 bp, Homo sapien
tagtcttaaacacttcgctcaggcc

SEQ ID NO: 3174939 - DNA, 25 bp, Homo sapien
aatatacagctctgagaacaggccc

SEQ ID NO: 3174940 - DNA, 25 bp, Homo sapien
acatacagtagagagcactgaggca

SEQ ID NO: 3174941 - DNA, 25 bp, Homo sapien
tatcgcagtgaaacagtcaagacca

SEQ ID NO: 3174942 - DNA, 25 bp, Homo sapien
gccactctgtgtggatgaattaaca

SEQ ID NO: 3174943 - DNA, 25 bp, Homo sapien
catggtgttctagaagacctccaaa

SEQ ID NO: 3174944 - DNA, 25 bp, Homo sapien
ctagattttccctggatgcaatgaa

SEQ ID NO: 3174945 - DNA, 25 bp, Homo sapien
gattttccctggatgcaatgaatgc

SEQ ID NO: 3174946 - DNA, 25 bp, Homo sapien
tctagattttccctggatgcaatga

SEQ ID NO: 3174947 - DNA, 25 bp, Homo sapien
tttccctggatgcaatgaatgccat

SEQ ID NO: 3174948 - DNA, 25 bp, Homo sapien
gttctccgtggagtcattgttctcc

SEQ ID NO: 3174949 - DNA, 25 bp, Homo sapien
caaaccagcgagtatgccaagtctt

SEQ ID NO: 3174950 - DNA, 25 bp, Homo sapien
ttgatggcattctgccgcccttggc

SEQ ID NO: 3174951 - DNA, 25 bp, Homo sapien
tcttgacaaagcctccttgcttcct

SEQ ID NO: 3174952 - DNA, 25 bp, Homo sapien
atgctttacattttctcctactcac

SEQ ID NO: 3174953 - DNA, 25 bp, Homo sapien
taggcccttaatgctttacattttc

SEQ ID NO: 3174954 - DNA, 25 bp, Homo sapien
aggcccttaatgctttacattttct

SEQ ID NO: 3174955 - DNA, 25 bp, Homo sapien
ttaatgctttacattttctcctact

SEQ ID NO: 3174956 - DNA, 25 bp, Homo sapien
ttttattatctccaactcaaagcaa

SEQ ID NO: 3174957 - DNA, 25 bp, Homo sapien
tggtctcagtcccaatcggtttcta

SEQ ID NO: 3174958 - DNA, 25 bp, Homo sapien
tcttggcctcaattagcgattttat

SEQ ID NO: 3174959 - DNA, 25 bp, Homo sapien
ggtttctagcaaatccctctatttc

SEQ ID NO: 3174960 - DNA, 25 bp, Homo sapien
tgcggcgtaggaggaagattctttt

SEQ ID NO: 3174961 - DNA, 25 bp, Homo sapien
gatgccctgctgtgtcaaattctag

SEQ ID NO: 3174962 - DNA, 25 bp, Homo sapien
tactttcaaaaatggcctgcatgca

SEQ ID NO: 3174963 - DNA, 25 bp, Homo sapien
tatagtagtggcctgtgagtgacaa

SEQ ID NO: 3174964 - DNA, 25 bp, Homo sapien
cagaggtggattcaacaggattcca

SEQ ID NO: 3174965 - DNA, 25 bp, Homo sapien
tctaggacttaaaacaccagaggtg

SEQ ID NO: 3174966 - DNA, 25 bp, Homo sapien
taagaagagtacctctcccacagat

SEQ ID NO: 3174967 - DNA, 25 bp, Homo sapien
caagaagacagtccatggcacattt

SEQ ID NO: 3174968 - DNA, 25 bp, Homo sapien
ggagcaatgtcggttcaccgcaaca

SEQ ID NO: 3174969 - DNA, 25 bp, Homo sapien
cggcccaattctcaactttattaag

SEQ ID NO: 3174970 - DNA, 25 bp, Homo sapien
gcagtggagcaatgtcggttcaccg

SEQ ID NO: 3174971 - DNA, 25 bp, Homo sapien
gcctgagaatcccttatacgaatta

SEQ ID NO: 3174972 - DNA, 25 bp, Homo sapien
tcattatatgcccacatctctgagg

SEQ ID NO: 3174973 - DNA, 25 bp, Homo sapien
gatccagagtcattaactggccagg

SEQ ID NO: 3174974 - DNA, 25 bp, Homo sapien
actgctaggactctgacatcggcca

SEQ ID NO: 3174975 - DNA, 25 bp, Homo sapien
ctagtaagttttcaggcatggtccc

SEQ ID NO: 3174976 - DNA, 25 bp, Homo sapien
gtctgccaagagatactcatttccg

SEQ ID NO: 3174977 - DNA, 25 bp, Homo sapien
ggaaaggaactttccaatgcctgat

SEQ ID NO: 3174978 - DNA, 25 bp, Homo sapien
tccaatgcctgatatgttccatcaa

SEQ ID NO: 3174979 - DNA, 25 bp, Homo sapien
aacttctactgggtctctgcatgga

SEQ ID NO: 3174980 - DNA, 25 bp, Homo sapien
tttctaggaacaaaacgaactgagc

SEQ ID NO: 3174981 - DNA, 25 bp, Homo sapien
ctgagcgcaaaacaaacagaatgta

SEQ ID NO: 3174982 - DNA, 25 bp, Homo sapien
caaaacgaactgagcgcaaaacaaa

SEQ ID NO: 3174983 - DNA, 25 bp, Homo sapien
taggaacaaaacgaactgagcgcaa

SEQ ID NO: 3174984 - DNA, 25 bp, Homo sapien
tcattaccaggcagcaacttagtca

SEQ ID NO: 3174985 - DNA, 25 bp, Homo sapien
gagagcctagtccatcatccttcag

SEQ ID NO: 3174986 - DNA, 25 bp, Homo sapien
caacgcttaattgattcagagagcc

SEQ ID NO: 3174987 - DNA, 25 bp, Homo sapien
gacatgataattactgacctgcctt

SEQ ID NO: 3174988 - DNA, 25 bp, Homo sapien
gcatctcattcaagcctaatgagtt

SEQ ID NO: 3174989 - DNA, 25 bp, Homo sapien
ggaggcacttgtcacttcaacatgc

SEQ ID NO: 3174990 - DNA, 25 bp, Homo sapien
tccagtccagttttgacgtcatcag

SEQ ID NO: 3174991 - DNA, 25 bp, Homo sapien
tctaagcctgttactgaaaaacagg

SEQ ID NO: 3174992 - DNA, 25 bp, Homo sapien
tcacacagggagtaggtagagagcc

SEQ ID NO: 3174993 - DNA, 25 bp, Homo sapien
ggattcaaacctaagcagcctgtgc

SEQ ID NO: 3174994 - DNA, 25 bp, Homo sapien
ggtactatatgaagcacagggccac

SEQ ID NO: 3174995 - DNA, 25 bp, Homo sapien
ggctggttgccctaacaggtaacat

SEQ ID NO: 3174996 - DNA, 25 bp, Homo sapien
cattaaatgtgagtggtgggtatat

SEQ ID NO: 3174997 - DNA, 25 bp, Homo sapien
gaatggaaaggatagggctttagct

SEQ ID NO: 3174998 - DNA, 25 bp, Homo sapien
tggtagtgtatctgtggtcgcagct

SEQ ID NO: 3174999 - DNA, 25 bp, Homo sapien
gggtatcctctaaatatcttctaaa

SEQ ID NO: 3175000 - DNA, 25 bp, Homo sapien
aatataaaataacctcgccagctag

SEQ ID NO: 3175001 - DNA, 25 bp, Homo sapien
ttttgtgtaatagaagatccccaag

SEQ ID NO: 3175002 - DNA, 25 bp, Homo sapien
catggttcgctttttctctactaca

SEQ ID NO: 3175003 - DNA, 25 bp, Homo sapien
tggacagtgcaaatctagagcatct

SEQ ID NO: 3175004 - DNA, 25 bp, Homo sapien
tgtctccagacgttgtcaaatattc

SEQ ID NO: 3175005 - DNA, 25 bp, Homo sapien
gccagacactgtctccagacgttgt

SEQ ID NO: 3175006 - DNA, 25 bp, Homo sapien
acccacgagatatctgtggtatctt

SEQ ID NO: 3175007 - DNA, 25 bp, Homo sapien
ctgtggtatcttccccaactgtgac

SEQ ID NO: 3175008 - DNA, 25 bp, Homo sapien
gatccacagtgctcggccagatttt

SEQ ID NO: 3175009 - DNA, 25 bp, Homo sapien
atccacagtgctcggccagattttc

SEQ ID NO: 3175010 - DNA, 25 bp, Homo sapien
tccacagtgctcggccagattttct

SEQ ID NO: 3175011 - DNA, 25 bp, Homo sapien
tgctctggggacctgcactaaagcc

SEQ ID NO: 3175012 - DNA, 25 bp, Homo sapien
ttttctagtctccttctgaggatca

SEQ ID NO: 3175013 - DNA, 25 bp, Homo sapien
aagccccagaagaggtgttgacaca

SEQ ID NO: 3175014 - DNA, 25 bp, Homo sapien
ctccttctgaggatcagtgctctgg

SEQ ID NO: 3175015 - DNA, 25 bp, Homo sapien
ggttctgaaaatacgccctggcagt

SEQ ID NO: 3175016 - DNA, 25 bp, Homo sapien
taacttgttgggtaagtcgagagcc

SEQ ID NO: 3175017 - DNA, 25 bp, Homo sapien
gcccaggctagtgtaagacatcatg

SEQ ID NO: 3175018 - DNA, 25 bp, Homo sapien
tctactgaatcagccctccagatgg

SEQ ID NO: 3175019 - DNA, 25 bp, Homo sapien
gaggatatccacgttgctcaagagg

SEQ ID NO: 3175020 - DNA, 25 bp, Homo sapien
tcccacttggttagagttcagaccc

SEQ ID NO: 3175021 - DNA, 25 bp, Homo sapien
aagatgaatgggtactgcttggccc

SEQ ID NO: 3175022 - DNA, 25 bp, Homo sapien
tataaaatgtgggttgcctgccaag

SEQ ID NO: 3175023 - DNA, 25 bp, Homo sapien
tacatccttggtggtctgccaggtc

SEQ ID NO: 3175024 - DNA, 25 bp, Homo sapien
agtacatccttggtggtctgccagg

SEQ ID NO: 3175025 - DNA, 25 bp, Homo sapien
atgagtacatccttggtggtctgcc

SEQ ID NO: 3175026 - DNA, 25 bp, Homo sapien
ctggaaatatattctgaatgtgaaa

SEQ ID NO: 3175027 - DNA, 25 bp, Homo sapien
gtatctctgacctaaacagactagg

SEQ ID NO: 3175028 - DNA, 25 bp, Homo sapien
taggtgtacacatgacatcacttgc

SEQ ID NO: 3175029 - DNA, 25 bp, Homo sapien
gctcaaaggaattttaccactgaaa

SEQ ID NO: 3175030 - DNA, 25 bp, Homo sapien
caacaaacagttggcttgtgctcat

SEQ ID NO: 3175031 - DNA, 25 bp, Homo sapien
cactccatcccaacatggtgtagta

SEQ ID NO: 3175032 - DNA, 25 bp, Homo sapien
ggttagcatgtcaggaaggcgagtg

SEQ ID NO: 3175033 - DNA, 25 bp, Homo sapien
actccatcccaacatggtgtagtac

SEQ ID NO: 3175034 - DNA, 25 bp, Homo sapien
tagcatgtcaggaaggcgagtggca

SEQ ID NO: 3175035 - DNA, 25 bp, Homo sapien
ccactgtgctaaacaggaaggagcc

SEQ ID NO: 3175036 - DNA, 25 bp, Homo sapien
attgaccagccagcactggctccac

SEQ ID NO: 3175037 - DNA, 25 bp, Homo sapien
ctattgaccagccagcactggctcc

SEQ ID NO: 3175038 - DNA, 25 bp, Homo sapien
ctggctccactgtgctaaacaggaa

SEQ ID NO: 3175039 - DNA, 25 bp, Homo sapien
tgtactaaaatcagtagcagctggg

SEQ ID NO: 3175040 - DNA, 25 bp, Homo sapien
tccgcaacaaagactggatcaacat

SEQ ID NO: 3175041 - DNA, 25 bp, Homo sapien
tctgacaaaaggctcctagaactaa

SEQ ID NO: 3175042 - DNA, 25 bp, Homo sapien
taagtcctacacagactaatcaggc

SEQ ID NO: 3175043 - DNA, 25 bp, Homo sapien
catatctagttttctctggcctata

SEQ ID NO: 3175044 - DNA, 25 bp, Homo sapien
tctggcctatagatcccgtttccca

SEQ ID NO: 3175045 - DNA, 25 bp, Homo sapien
ttatcatatctagttttctctggcc

SEQ ID NO: 3175046 - DNA, 25 bp, Homo sapien
gttttctctggcctatagatcccgt

SEQ ID NO: 3175047 - DNA, 25 bp, Homo sapien
ggtgaggtgttggaggaattgcctt

SEQ ID NO: 3175048 - DNA, 25 bp, Homo sapien
gtgaggtgttggaggaattgccttt

SEQ ID NO: 3175049 - DNA, 25 bp, Homo sapien
ggttctcttcattgcagggatgctc

SEQ ID NO: 3175050 - DNA, 25 bp, Homo sapien
aggaacttccctgggttctcttcat

SEQ ID NO: 3175051 - DNA, 25 bp, Homo sapien
gctcagaaactttatttccaggcag

SEQ ID NO: 3175052 - DNA, 25 bp, Homo sapien
cagggatgctcagaaactttatttc

SEQ ID NO: 3175053 - DNA, 25 bp, Homo sapien
tgggcaaagcattcaacctataacc

SEQ ID NO: 3175054 - DNA, 25 bp, Homo sapien
tataaacctgcagtcattatctgcg

SEQ ID NO: 3175055 - DNA, 25 bp, Homo sapien
tcacatcacaagagcgctgtaaaat

SEQ ID NO: 3175056 - DNA, 25 bp, Homo sapien
tatctgcgtcaacactaaccaagcc

SEQ ID NO: 3175057 - DNA, 25 bp, Homo sapien
cattattggagataaagagtcaacc

SEQ ID NO: 3175058 - DNA, 25 bp, Homo sapien
tccttgcagctagcagactgaatgg

SEQ ID NO: 3175059 - DNA, 25 bp, Homo sapien
gactgaatggaaaagtagacctcta

SEQ ID NO: 3175060 - DNA, 25 bp, Homo sapien
caataccacgctgatttaaaagcca

SEQ ID NO: 3175061 - DNA, 25 bp, Homo sapien
ggctatgccccagcagtatcatctg

SEQ ID NO: 3175062 - DNA, 25 bp, Homo sapien
gagaggaaagtctgtaacgaccagt

SEQ ID NO: 3175063 - DNA, 25 bp, Homo sapien
aaatgcatctgtgaaagattcagcc

SEQ ID NO: 3175064 - DNA, 25 bp, Homo sapien
gtatcatctgtgtaggaagatctct

SEQ ID NO: 3175065 - DNA, 25 bp, Homo sapien
cactgaagctgataacccctggaga

SEQ ID NO: 3175066 - DNA, 25 bp, Homo sapien
gcatttcccttacgttgcaggccag

SEQ ID NO: 3175067 - DNA, 25 bp, Homo sapien
ctggagaaagtgacaagccaaagga

SEQ ID NO: 3175068 - DNA, 25 bp, Homo sapien
caacagtggaacagcctgcatttcc

SEQ ID NO: 3175069 - DNA, 25 bp, Homo sapien
gcctctgaagcttggcaagccactg

SEQ ID NO: 3175070 - DNA, 25 bp, Homo sapien
tcatgatggcctctgaagcttggca

SEQ ID NO: 3175071 - DNA, 25 bp, Homo sapien
tggcctctgaagcttggcaagccac

SEQ ID NO: 3175072 - DNA, 25 bp, Homo sapien
tgatggcctctgaagcttggcaagc

SEQ ID NO: 3175073 - DNA, 25 bp, Homo sapien
ttagattctttaggcacccatgtcc

SEQ ID NO: 3175074 - DNA, 25 bp, Homo sapien
taatattgattttaggcactgggtc

SEQ ID NO: 3175075 - DNA, 25 bp, Homo sapien
ggtctggaatattgacaattgccct

SEQ ID NO: 3175076 - DNA, 25 bp, Homo sapien
cagatgggccttttagggtctggaa

SEQ ID NO: 3175077 - DNA, 25 bp, Homo sapien
tggttggtgttaggaatctatgcct

SEQ ID NO: 3175078 - DNA, 25 bp, Homo sapien
tgcattccagcctacataaaccaag

SEQ ID NO: 3175079 - DNA, 25 bp, Homo sapien
taaaccaagcacactaggaatggca

SEQ ID NO: 3175080 - DNA, 25 bp, Homo sapien
tgttgctaagtatgagccagcttcc

SEQ ID NO: 3175081 - DNA, 25 bp, Homo sapien
taataaagaatatcggctgggtggg

SEQ ID NO: 3175082 - DNA, 25 bp, Homo sapien
ggtgactcacccctatataaggccg

SEQ ID NO: 3175083 - DNA, 25 bp, Homo sapien
acccctatataaggccgaggcaggc

SEQ ID NO: 3175084 - DNA, 25 bp, Homo sapien
tattgagtgccaaccacaagcaagc

SEQ ID NO: 3175085 - DNA, 25 bp, Homo sapien
tgaggatgattgcaaggaagagctt

SEQ ID NO: 3175086 - DNA, 25 bp, Homo sapien
taatgtaggactactgagctgcatc

SEQ ID NO: 3175087 - DNA, 25 bp, Homo sapien
tgcatagggaatctgtgtttctggg

SEQ ID NO: 3175088 - DNA, 25 bp, Homo sapien
ttccactcacacgaaggaaagaagg

SEQ ID NO: 3175089 - DNA, 25 bp, Homo sapien
tagtaagatagcaccatagagtctc

SEQ ID NO: 3175090 - DNA, 25 bp, Homo sapien
aatgcagaagtcatactcagagagc

SEQ ID NO: 3175091 - DNA, 25 bp, Homo sapien
tgtgcctagtgggaaacaaataacc

SEQ ID NO: 3175092 - DNA, 25 bp, Homo sapien
tgctatttcactggctggtgaccta

SEQ ID NO: 3175093 - DNA, 25 bp, Homo sapien
gccagtttcaacattgttgcccgcc

SEQ ID NO: 3175094 - DNA, 25 bp, Homo sapien
tgcctgtctccaagccatacacatg

SEQ ID NO: 3175095 - DNA, 25 bp, Homo sapien
acagttgccatcatctaccagcttt

SEQ ID NO: 3175096 - DNA, 25 bp, Homo sapien
catcacagttgccatcatctaccag

SEQ ID NO: 3175097 - DNA, 25 bp, Homo sapien
ccatgttgcacgataagagagagac

SEQ ID NO: 3175098 - DNA, 25 bp, Homo sapien
tcaagcttagctggatagacaggct

SEQ ID NO: 3175099 - DNA, 25 bp, Homo sapien
gacatcatcagtatctcggctcagt

SEQ ID NO: 3175100 - DNA, 25 bp, Homo sapien
caagtcacatggcaattggcctggg

SEQ ID NO: 3175101 - DNA, 25 bp, Homo sapien
taagaaacgtacaggctagctagtg

SEQ ID NO: 3175102 - DNA, 25 bp, Homo sapien
tccagggcccctgtaaatcataaag

SEQ ID NO: 3175103 - DNA, 25 bp, Homo sapien
tcattttaactgagatctggagtcc

SEQ ID NO: 3175104 - DNA, 25 bp, Homo sapien
tttgagatgggatcccgccttggcg

SEQ ID NO: 3175105 - DNA, 25 bp, Homo sapien
tcttggtggcaaccataggcaaatc

SEQ ID NO: 3175106 - DNA, 25 bp, Homo sapien
gttgcactcttgtgctaacttgcag

SEQ ID NO: 3175107 - DNA, 25 bp, Homo sapien
aacttgcagtcagtcttatttggcc

SEQ ID NO: 3175108 - DNA, 25 bp, Homo sapien
gcgtgtttccttgaatgagggagcc

SEQ ID NO: 3175109 - DNA, 25 bp, Homo sapien
ggctaattccctctaatgattggac

SEQ ID NO: 3175110 - DNA, 25 bp, Homo sapien
taaggacttaacaaacaaatggcat

SEQ ID NO: 3175111 - DNA, 25 bp, Homo sapien
catatgatattctgtaccgcctggc

SEQ ID NO: 3175112 - DNA, 25 bp, Homo sapien
aaggcttctgaaaatggagggcaca

SEQ ID NO: 3175113 - DNA, 25 bp, Homo sapien
tatattagtagttactggggtctct

SEQ ID NO: 3175114 - DNA, 25 bp, Homo sapien
cctgccacggcctcttgaagtactg

SEQ ID NO: 3175115 - DNA, 25 bp, Homo sapien
cagttgtgtaagcacagctcattga

SEQ ID NO: 3175116 - DNA, 25 bp, Homo sapien
tatatactacggtatatattagtag

SEQ ID NO: 3175117 - DNA, 25 bp, Homo sapien
tatgatgtctcgcgaagtccttccc

SEQ ID NO: 3175118 - DNA, 25 bp, Homo sapien
atgatgtctcgcgaagtccttcccc

SEQ ID NO: 3175119 - DNA, 25 bp, Homo sapien
tccttatgatgtctcgcgaagtcct

SEQ ID NO: 3175120 - DNA, 25 bp, Homo sapien
cttatgatgtctcgcgaagtccttc

SEQ ID NO: 3175121 - DNA, 25 bp, Homo sapien
tttctaacacgtccttgcctccagt

SEQ ID NO: 3175122 - DNA, 25 bp, Homo sapien
ccagacctggacaatttcgcctact

SEQ ID NO: 3175123 - DNA, 25 bp, Homo sapien
gccactgtccttttacacagcctaa

SEQ ID NO: 3175124 - DNA, 25 bp, Homo sapien
tgtctgtttcatgtaccacccttct

SEQ ID NO: 3175125 - DNA, 25 bp, Homo sapien
tatgatagcaattatggtccaaaca

SEQ ID NO: 3175126 - DNA, 25 bp, Homo sapien
gctaaagtgataggacttgaactct

SEQ ID NO: 3175127 - DNA, 25 bp, Homo sapien
gaatgcaatatgtaagaatggctaa

SEQ ID NO: 3175128 - DNA, 25 bp, Homo sapien
gtactgctccaaaggtaagtgtcac

SEQ ID NO: 3175129 - DNA, 25 bp, Homo sapien
tgttggttcagtgaaagctgtgctt

SEQ ID NO: 3175130 - DNA, 25 bp, Homo sapien
aatacagcggttactatggactcag

SEQ ID NO: 3175131 - DNA, 25 bp, Homo sapien
atccagaaggttaaagcgtttgtag

SEQ ID NO: 3175132 - DNA, 25 bp, Homo sapien
ccaggaaaagaacagccagcatcca

SEQ ID NO: 3175133 - DNA, 25 bp, Homo sapien
ctgtttatgtaagcgccccaggcat

SEQ ID NO: 3175134 - DNA, 25 bp, Homo sapien
gaaaatacaagacacagctgtttat

SEQ ID NO: 3175135 - DNA, 25 bp, Homo sapien
cagctgtttatgtaagcgccccagg

SEQ ID NO: 3175136 - DNA, 25 bp, Homo sapien
caagacacagctgtttatgtaagcg

SEQ ID NO: 3175137 - DNA, 25 bp, Homo sapien
ctcagtggttaaaagagctgcatca

SEQ ID NO: 3175138 - DNA, 25 bp, Homo sapien
taaaagagctgcatcaaacctgtgt

SEQ ID NO: 3175139 - DNA, 25 bp, Homo sapien
tgttttatctggttaatgatatcaa

SEQ ID NO: 3175140 - DNA, 25 bp, Homo sapien
atcaataccaagctcagtggttaaa

SEQ ID NO: 3175141 - DNA, 25 bp, Homo sapien
tgcgagcaaaggctaaatctttgca

SEQ ID NO: 3175142 - DNA, 25 bp, Homo sapien
caactcttgcgagcaaaggctaaat

SEQ ID NO: 3175143 - DNA, 25 bp, Homo sapien
ctgccaactcttgcgagcaaaggct

SEQ ID NO: 3175144 - DNA, 25 bp, Homo sapien
tcttgcgagcaaaggctaaatcttt

SEQ ID NO: 3175145 - DNA, 25 bp, Homo sapien
tataagtcactggtctggtctacgc

SEQ ID NO: 3175146 - DNA, 25 bp, Homo sapien
cattcctttcaaagcggtggtagct

SEQ ID NO: 3175147 - DNA, 25 bp, Homo sapien
ttttggcaaaaaagtacagagcttg

SEQ ID NO: 3175148 - DNA, 25 bp, Homo sapien
tggtctacgcacagctgttcccagt

SEQ ID NO: 3175149 - DNA, 25 bp, Homo sapien
actaagcttgacagttccttgggaa

SEQ ID NO: 3175150 - DNA, 25 bp, Homo sapien
cataaggttgtactaagaagcaccc

SEQ ID NO: 3175151 - DNA, 25 bp, Homo sapien
taaggtgttatcagtgaatgctaac

SEQ ID NO: 3175152 - DNA, 25 bp, Homo sapien
gcttctggagaattctcataaggtt

SEQ ID NO: 3175153 - DNA, 25 bp, Homo sapien
tattgactgtagatacccgatgctt

SEQ ID NO: 3175154 - DNA, 25 bp, Homo sapien
aagtcactgaaacaatgtaggtccc

SEQ ID NO: 3175155 - DNA, 25 bp, Homo sapien
tgtaggtccccaacaataggagcca

SEQ ID NO: 3175156 - DNA, 25 bp, Homo sapien
tattacctcttcaactgtccagaag

SEQ ID NO: 3175157 - DNA, 25 bp, Homo sapien
gccacatcctcgagaaaacagaagt

SEQ ID NO: 3175158 - DNA, 25 bp, Homo sapien
taggcttaagtccacagaccctgtg

SEQ ID NO: 3175159 - DNA, 25 bp, Homo sapien
caatggagcccatatcttagaacgg

SEQ ID NO: 3175160 - DNA, 25 bp, Homo sapien
cagtatgggctcagtttataaggca

SEQ ID NO: 3175161 - DNA, 25 bp, Homo sapien
tatctaattcccagtgctcgatgag

SEQ ID NO: 3175162 - DNA, 25 bp, Homo sapien
tccagccaacctgcggactgattct

SEQ ID NO: 3175163 - DNA, 25 bp, Homo sapien
catactctgtagcatcagatgttgg

SEQ ID NO: 3175164 - DNA, 25 bp, Homo sapien
taagaagagttttatccctgaactc

SEQ ID NO: 3175165 - DNA, 25 bp, Homo sapien
aaaaccatggccagaaatcaaagca

SEQ ID NO: 3175166 - DNA, 25 bp, Homo sapien
aaagttctgatacaactgagatgca

SEQ ID NO: 3175167 - DNA, 25 bp, Homo sapien
gatagacttgatattcaaacactgt

SEQ ID NO: 3175168 - DNA, 25 bp, Homo sapien
gattgatacgccatgcctgaaggct

SEQ ID NO: 3175169 - DNA, 25 bp, Homo sapien
gcattaaattaataggaaggctaat

SEQ ID NO: 3175170 - DNA, 25 bp, Homo sapien
gagtcaaggccatagcgtctccaga

SEQ ID NO: 3175171 - DNA, 25 bp, Homo sapien
taaactctatcatcagtagagggcg

SEQ ID NO: 3175172 - DNA, 25 bp, Homo sapien
aaagcagtttcgtagcagagtcctc

SEQ ID NO: 3175173 - DNA, 25 bp, Homo sapien
cagaaaattctatgggcacagcacc

SEQ ID NO: 3175174 - DNA, 25 bp, Homo sapien
gccagcctagaatgaaactacccag

SEQ ID NO: 3175175 - DNA, 25 bp, Homo sapien
tccaccttagctataaattaatcct

SEQ ID NO: 3175176 - DNA, 25 bp, Homo sapien
taccataatatggaggcagccagcc

SEQ ID NO: 3175177 - DNA, 25 bp, Homo sapien
gaatatttagatcagtccaccttag

SEQ ID NO: 3175178 - DNA, 25 bp, Homo sapien
tgcagcctctctcagtgtatacagc

SEQ ID NO: 3175179 - DNA, 25 bp, Homo sapien
ttaaaatctggtacacaaggtgtcc

SEQ ID NO: 3175180 - DNA, 25 bp, Homo sapien
caaaatctggacattaagtgtgctc

SEQ ID NO: 3175181 - DNA, 25 bp, Homo sapien
tctgacttcagtaccatagggtggt

SEQ ID NO: 3175182 - DNA, 25 bp, Homo sapien
taaagtcgtttggttagcgctacat

SEQ ID NO: 3175183 - DNA, 25 bp, Homo sapien
cgctacatagcaactggtggtcata

SEQ ID NO: 3175184 - DNA, 25 bp, Homo sapien
tcagtgcagcacagttaggtagaca

SEQ ID NO: 3175185 - DNA, 25 bp, Homo sapien
catattgggaaatcaagaagccagt

SEQ ID NO: 3175186 - DNA, 25 bp, Homo sapien
tttgtccgcatgtatctgcaactaa

SEQ ID NO: 3175187 - DNA, 25 bp, Homo sapien
tgttcttgttttgtccgcatgtatc

SEQ ID NO: 3175188 - DNA, 25 bp, Homo sapien
ttgttttgtccgcatgtatctgcaa

SEQ ID NO: 3175189 - DNA, 25 bp, Homo sapien
catgtatctgcaactaagatggtac

SEQ ID NO: 3175190 - DNA, 25 bp, Homo sapien
tctagaggtaatttcaaatgctgcc

SEQ ID NO: 3175191 - DNA, 25 bp, Homo sapien
attagtcacatctctagaggtaatt

SEQ ID NO: 3175192 - DNA, 25 bp, Homo sapien
tagtcacatctctagaggtaatttc

SEQ ID NO: 3175193 - DNA, 25 bp, Homo sapien
tagaggtaatttcaaatgctgccat

SEQ ID NO: 3175194 - DNA, 25 bp, Homo sapien
tgtgtttgctcactgcagtttctcc

SEQ ID NO: 3175195 - DNA, 25 bp, Homo sapien
caaacatacacttcagtggtcagtg

SEQ ID NO: 3175196 - DNA, 25 bp, Homo sapien
aactcaggtcctactgtgtttgctc

SEQ ID NO: 3175197 - DNA, 25 bp, Homo sapien
gctgctctgtcctgagtcgcttaaa

SEQ ID NO: 3175198 - DNA, 25 bp, Homo sapien
tggcaatttgtctccaaattaagaa

SEQ ID NO: 3175199 - DNA, 25 bp, Homo sapien
ggcaatttgtctccaaattaagaac

SEQ ID NO: 3175200 - DNA, 25 bp, Homo sapien
ctggcaatttgtctccaaattaaga

SEQ ID NO: 3175201 - DNA, 25 bp, Homo sapien
taaggtctgttaacccaagagcatg

SEQ ID NO: 3175202 - DNA, 25 bp, Homo sapien
taagtagccaacatacaaaactgac

SEQ ID NO: 3175203 - DNA, 25 bp, Homo sapien
aaactgacccacgattaaggtctgt

SEQ ID NO: 3175204 - DNA, 25 bp, Homo sapien
gtttatgggttcacttaagtagcca

SEQ ID NO: 3175205 - DNA, 25 bp, Homo sapien
gatagtgctgtaagccaatcccata

SEQ ID NO: 3175206 - DNA, 25 bp, Homo sapien
cttagtggccaaggtaaagagacat

SEQ ID NO: 3175207 - DNA, 25 bp, Homo sapien
gaaataatcacatcacgtaccctgc

SEQ ID NO: 3175208 - DNA, 25 bp, Homo sapien
gacatacaaatgacggatagtgctg

SEQ ID NO: 3175209 - DNA, 25 bp, Homo sapien
gtgactgtcagaacactgtggtctc

SEQ ID NO: 3175210 - DNA, 25 bp, Homo sapien
tgactgtcagaacactgtggtctca

SEQ ID NO: 3175211 - DNA, 25 bp, Homo sapien
gaatgacaggcagtcatattccagc

SEQ ID NO: 3175212 - DNA, 25 bp, Homo sapien
taatgactttagtgggtacctcctg

SEQ ID NO: 3175213 - DNA, 25 bp, Homo sapien
tgaggtcttccctagcataatggaa

SEQ ID NO: 3175214 - DNA, 25 bp, Homo sapien
cagggctcttgagcagacttgcaga

SEQ ID NO: 3175215 - DNA, 25 bp, Homo sapien
cacagctgggctagaatgatgaccc

SEQ ID NO: 3175216 - DNA, 25 bp, Homo sapien
taggctgactcaaattatagagcag

SEQ ID NO: 3175217 - DNA, 25 bp, Homo sapien
tcactcctaagggatgctctacagc

SEQ ID NO: 3175218 - DNA, 25 bp, Homo sapien
gaccccatacttgctatgtgcacat

SEQ ID NO: 3175219 - DNA, 25 bp, Homo sapien
gagttcacgacattttcaatcactt

SEQ ID NO: 3175220 - DNA, 25 bp, Homo sapien
agttcacgacattttcaatcactta

SEQ ID NO: 3175221 - DNA, 25 bp, Homo sapien
gttcacgacattttcaatcacttaa

SEQ ID NO: 3175222 - DNA, 25 bp, Homo sapien
tcacgacattttcaatcacttaaag

SEQ ID NO: 3175223 - DNA, 25 bp, Homo sapien
tcatgtaacatagactccacaacca

SEQ ID NO: 3175224 - DNA, 25 bp, Homo sapien
cccatgagaactgcaacctcggagt

SEQ ID NO: 3175225 - DNA, 25 bp, Homo sapien
cctcggagtcctctagggaagctgc

SEQ ID NO: 3175226 - DNA, 25 bp, Homo sapien
gaattacatctttagggacgtgcaa

SEQ ID NO: 3175227 - DNA, 25 bp, Homo sapien
tacaaagattgattcccacgtaggg

SEQ ID NO: 3175228 - DNA, 25 bp, Homo sapien
gcagaaatacaataccgatcgagga

SEQ ID NO: 3175229 - DNA, 25 bp, Homo sapien
ggctggcacctagtaataacacacg

SEQ ID NO: 3175230 - DNA, 25 bp, Homo sapien
taacagaaaggacgatcaagacagt

SEQ ID NO: 3175231 - DNA, 25 bp, Homo sapien
cacatttctgctattttggttcctt

SEQ ID NO: 3175232 - DNA, 25 bp, Homo sapien
gaggcacatttctgctattttggtt

SEQ ID NO: 3175233 - DNA, 25 bp, Homo sapien
tcaacagtttgagaggcacatttct

SEQ ID NO: 3175234 - DNA, 25 bp, Homo sapien
cagtttgagaggcacatttctgcta

SEQ ID NO: 3175235 - DNA, 25 bp, Homo sapien
tttgaccgattctggctctgtgcca

SEQ ID NO: 3175236 - DNA, 25 bp, Homo sapien
ttttgaccgattctggctctgtgcc

SEQ ID NO: 3175237 - DNA, 25 bp, Homo sapien
gtttttgaccgattctggctctgtg

SEQ ID NO: 3175238 - DNA, 25 bp, Homo sapien
ttgtttttgaccgattctggctctg

SEQ ID NO: 3175239 - DNA, 25 bp, Homo sapien
catggtcactaagttaggagtcttc

SEQ ID NO: 3175240 - DNA, 25 bp, Homo sapien
ccggatgtaagaaacatggtcacta

SEQ ID NO: 3175241 - DNA, 25 bp, Homo sapien
taagaaacatggtcactaagttagg

SEQ ID NO: 3175242 - DNA, 25 bp, Homo sapien
tagacatagccggatgtaagaaaca

SEQ ID NO: 3175243 - DNA, 25 bp, Homo sapien
accactgatgttacgtgtgctccat

SEQ ID NO: 3175244 - DNA, 25 bp, Homo sapien
tgctggttgatggtcagtaccactg

SEQ ID NO: 3175245 - DNA, 25 bp, Homo sapien
ggttgatggtcagtaccactgatgt

SEQ ID NO: 3175246 - DNA, 25 bp, Homo sapien
tgtgctccatcacatttagagccca

SEQ ID NO: 3175247 - DNA, 25 bp, Homo sapien
tattcttaaactggtatttcaatgt

SEQ ID NO: 3175248 - DNA, 25 bp, Homo sapien
atttttgctttcctacactaccctg

SEQ ID NO: 3175249 - DNA, 25 bp, Homo sapien
cagtcttgtgctattatattcttaa

SEQ ID NO: 3175250 - DNA, 25 bp, Homo sapien
cttaaactggtatttcaatgtaatg

SEQ ID NO: 3175251 - DNA, 25 bp, Homo sapien
aaataccattgattaagtacccact

SEQ ID NO: 3175252 - DNA, 25 bp, Homo sapien
taacatgtaatagacacagatttgg

SEQ ID NO: 3175253 - DNA, 25 bp, Homo sapien
tatatctagttctgaagcctatggc

SEQ ID NO: 3175254 - DNA, 25 bp, Homo sapien
caaccatagagttggaaagacaatc

SEQ ID NO: 3175255 - DNA, 25 bp, Homo sapien
ccttctggtgcactaattcttcatc

SEQ ID NO: 3175256 - DNA, 25 bp, Homo sapien
ttagtggtgattccataagcaacac

SEQ ID NO: 3175257 - DNA, 25 bp, Homo sapien
taagtgctcacctttacatgacatg

SEQ ID NO: 3175258 - DNA, 25 bp, Homo sapien
caacacacaagcctggtctatgatg

SEQ ID NO: 3175259 - DNA, 25 bp, Homo sapien
ccctggtgtgaaggttcctaatttg

SEQ ID NO: 3175260 - DNA, 25 bp, Homo sapien
ggttcctaatttgacatctccctct

SEQ ID NO: 3175261 - DNA, 25 bp, Homo sapien
tggtgtgaaggttcctaatttgaca

SEQ ID NO: 3175262 - DNA, 25 bp, Homo sapien
gaaggttcctaatttgacatctccc

SEQ ID NO: 3175263 - DNA, 25 bp, Homo sapien
tctaccttccctataaatagtgacc

SEQ ID NO: 3175264 - DNA, 25 bp, Homo sapien
ttcctcatcctgtccttttggtatg

SEQ ID NO: 3175265 - DNA, 25 bp, Homo sapien
tgaccctcttcttgtgtgagactct

SEQ ID NO: 3175266 - DNA, 25 bp, Homo sapien
gaagaatcttatttgctcctgtaag

SEQ ID NO: 3175267 - DNA, 25 bp, Homo sapien
tgaaatgattggccaacactgtcag

SEQ ID NO: 3175268 - DNA, 25 bp, Homo sapien
acatactctatcccttcacaagctg

SEQ ID NO: 3175269 - DNA, 25 bp, Homo sapien
tctgtatattacttagtttttcctg

SEQ ID NO: 3175270 - DNA, 25 bp, Homo sapien
aaatgcatactatttgtgtttgcca

SEQ ID NO: 3175271 - DNA, 25 bp, Homo sapien
ctattagaggatccgcaatacagga

SEQ ID NO: 3175272 - DNA, 25 bp, Homo sapien
tagaggatccgcaatacaggaagag

SEQ ID NO: 3175273 - DNA, 25 bp, Homo sapien
ccgcaatacaggaagagtagcagca

SEQ ID NO: 3175274 - DNA, 25 bp, Homo sapien
gatccgcaatacaggaagagtagca

SEQ ID NO: 3175275 - DNA, 25 bp, Homo sapien
tccaagctccgagacggttgccaaa

SEQ ID NO: 3175276 - DNA, 25 bp, Homo sapien
tttccaggctcactgcttgcaagta

SEQ ID NO: 3175277 - DNA, 25 bp, Homo sapien
cgagacggttgccaaaagaattgtc

SEQ ID NO: 3175278 - DNA, 25 bp, Homo sapien
ctcactgcttgcaagtaactctcca

SEQ ID NO: 3175279 - DNA, 25 bp, Homo sapien
agtgtctcttctgcagtgtagcttt

SEQ ID NO: 3175280 - DNA, 25 bp, Homo sapien
tctgcagtgtagctttttcaagttg

SEQ ID NO: 3175281 - DNA, 25 bp, Homo sapien
tgtctcttctgcagtgtagcttttt

SEQ ID NO: 3175282 - DNA, 25 bp, Homo sapien
ttctgcagtgtagctttttcaagtt

SEQ ID NO: 3175283 - DNA, 25 bp, Homo sapien
aaatgaataaactcagaattttgac

SEQ ID NO: 3175284 - DNA, 25 bp, Homo sapien
tgataaatgaataaactcagaattt

SEQ ID NO: 3175285 - DNA, 25 bp, Homo sapien
atgaataaactcagaattttgactt

SEQ ID NO: 3175286 - DNA, 25 bp, Homo sapien
ataaatgaataaactcagaattttg

SEQ ID NO: 3175287 - DNA, 25 bp, Homo sapien
caatgcagctgaagttgcatccaga

SEQ ID NO: 3175288 - DNA, 25 bp, Homo sapien
acaatgcagctgaagttgcatccag

SEQ ID NO: 3175289 - DNA, 25 bp, Homo sapien
ctcggcggattgacttcacccagtc

SEQ ID NO: 3175290 - DNA, 25 bp, Homo sapien
aaggtccccatatgactcggcggat

SEQ ID NO: 3175291 - DNA, 25 bp, Homo sapien
ttccatatcattctgggtgcttgcc

SEQ ID NO: 3175292 - DNA, 25 bp, Homo sapien
gatttgctgtcatccgatctcgatc

SEQ ID NO: 3175293 - DNA, 25 bp, Homo sapien
ttccatgattttaaagtacactcac

SEQ ID NO: 3175294 - DNA, 25 bp, Homo sapien
tctgtttttccatgattttaaagta

SEQ ID NO: 3175295 - DNA, 25 bp, Homo sapien
tgtttttccatgattttaaagtaca

SEQ ID NO: 3175296 - DNA, 25 bp, Homo sapien
ttttccatgattttaaagtacactc

SEQ ID NO: 3175297 - DNA, 25 bp, Homo sapien
tcgagtgcccattccaagaggctct

SEQ ID NO: 3175298 - DNA, 25 bp, Homo sapien
cggttgctcctcaccaaggctgtgg

SEQ ID NO: 3175299 - DNA, 25 bp, Homo sapien
tcagcaggtgcagtcacaacaggat

SEQ ID NO: 3175300 - DNA, 25 bp, Homo sapien
gggagaatgccacgctacggtacaa

SEQ ID NO: 3175301 - DNA, 25 bp, Homo sapien
ggttttgatcatccaggtcctggct

SEQ ID NO: 3175302 - DNA, 25 bp, Homo sapien
cctctggaaaggtcagcaaatagct

SEQ ID NO: 3175303 - DNA, 25 bp, Homo sapien
tcctggcttagggataagttaccac

SEQ ID NO: 3175304 - DNA, 25 bp, Homo sapien
tatttttgaagtgctgatccctaga

SEQ ID NO: 3175305 - DNA, 25 bp, Homo sapien
gattcttctgtatgtagttttaggg

SEQ ID NO: 3175306 - DNA, 25 bp, Homo sapien
gaaaggagttgaggctaaggcacca

SEQ ID NO: 3175307 - DNA, 25 bp, Homo sapien
cagccgggcaccccccagaattccg

SEQ ID NO: 3175308 - DNA, 25 bp, Homo sapien
tgaaaggagttgaggctaaggcacc

SEQ ID NO: 3175309 - DNA, 25 bp, Homo sapien
tacttagtttctacttaaacagcca

SEQ ID NO: 3175310 - DNA, 25 bp, Homo sapien
gaaaaaacaaccctagatgtcattc

SEQ ID NO: 3175311 - DNA, 25 bp, Homo sapien
gatgtcattcaactcagcacctgac

SEQ ID NO: 3175312 - DNA, 25 bp, Homo sapien
taattaatgggtggcaaatcaaaaa

SEQ ID NO: 3175313 - DNA, 25 bp, Homo sapien
ccctgagtgatgactgcagcaagag

SEQ ID NO: 3175314 - DNA, 25 bp, Homo sapien
tggaaaggaagcgtaaaaccgctga

SEQ ID NO: 3175315 - DNA, 25 bp, Homo sapien
tgtgggcacgcagcacttcaacaga

SEQ ID NO: 3175316 - DNA, 25 bp, Homo sapien
cctttctcctttcgacagaatacag

SEQ ID NO: 3175317 - DNA, 25 bp, Homo sapien
tgtcggataaagtccacgcactgct

SEQ ID NO: 3175318 - DNA, 25 bp, Homo sapien
caaaggcatcttggagctccttaac

SEQ ID NO: 3175319 - DNA, 25 bp, Homo sapien
cctggcctggcagtcgaaagagacc

SEQ ID NO: 3175320 - DNA, 25 bp, Homo sapien
ggagccagacggttcccatatctct

SEQ ID NO: 3175321 - DNA, 25 bp, Homo sapien
tctcagtgaagatggctagtaaaat

SEQ ID NO: 3175322 - DNA, 25 bp, Homo sapien
tcaaggttatgcctcctcagctcac

SEQ ID NO: 3175323 - DNA, 25 bp, Homo sapien
actgcatcctgtcagttgagtctga

SEQ ID NO: 3175324 - DNA, 25 bp, Homo sapien
gaaacaatgcaaactcctgtggcca

SEQ ID NO: 3175325 - DNA, 25 bp, Homo sapien
gtgccttgactgttattttccagaa

SEQ ID NO: 3175326 - DNA, 25 bp, Homo sapien
tccagaatccagaattttcagaaat

SEQ ID NO: 3175327 - DNA, 25 bp, Homo sapien
tcagacacggatttgccagtgcctt

SEQ ID NO: 3175328 - DNA, 25 bp, Homo sapien
gagatcaagtcctcatcagacacgg

SEQ ID NO: 3175329 - DNA, 25 bp, Homo sapien
cgtcctcaagaaggagacgggtatc

SEQ ID NO: 3175330 - DNA, 25 bp, Homo sapien
ccatatcataggtgtaacaggcctc

SEQ ID NO: 3175331 - DNA, 25 bp, Homo sapien
gcaagctaagctgttcctgtctcta

SEQ ID NO: 3175332 - DNA, 25 bp, Homo sapien
caggcctcttgtcattcgaatctca

SEQ ID NO: 3175333 - DNA, 25 bp, Homo sapien
tcagggtaaggactgaggttttcca

SEQ ID NO: 3175334 - DNA, 25 bp, Homo sapien
cagggtaaggactgaggttttccat

SEQ ID NO: 3175335 - DNA, 25 bp, Homo sapien
aaaaatcttcatacttcgcataagg

SEQ ID NO: 3175336 - DNA, 25 bp, Homo sapien
tacagcttaagaagtgatgccaccg

SEQ ID NO: 3175337 - DNA, 25 bp, Homo sapien
ttctggaagttctcggaggtacagc

SEQ ID NO: 3175338 - DNA, 25 bp, Homo sapien
tgatgccaccgtgtgtacatctgtg

SEQ ID NO: 3175339 - DNA, 25 bp, Homo sapien
tgtatacggaaagtctcagtgtgtg

SEQ ID NO: 3175340 - DNA, 25 bp, Homo sapien
gtaacaccgggatagggcaatggaa

SEQ ID NO: 3175341 - DNA, 25 bp, Homo sapien
tcaaaggatagtggagagtaacacc

SEQ ID NO: 3175342 - DNA, 25 bp, Homo sapien
gatcggaaatggtgcttgagctgta

SEQ ID NO: 3175343 - DNA, 25 bp, Homo sapien
caaactcttcacctgctttgctaat

SEQ ID NO: 3175344 - DNA, 25 bp, Homo sapien
gcaaatatacttgaggaggttgtaa

SEQ ID NO: 3175345 - DNA, 25 bp, Homo sapien
cctgctttgctaattccttaacacc

SEQ ID NO: 3175346 - DNA, 25 bp, Homo sapien
ggaggttgtaatttaccactggcaa

SEQ ID NO: 3175347 - DNA, 25 bp, Homo sapien
tttaaaatggactgggaagctatca

SEQ ID NO: 3175348 - DNA, 25 bp, Homo sapien
tcttaaacaggagcacatatatggc

SEQ ID NO: 3175349 - DNA, 25 bp, Homo sapien
gaagctatcatgtaagacaccctgc

SEQ ID NO: 3175350 - DNA, 25 bp, Homo sapien
caccctgcagtgacttgtagtgcca

SEQ ID NO: 3175351 - DNA, 25 bp, Homo sapien
ctttggggcgcaggatattaggacc

SEQ ID NO: 3175352 - DNA, 25 bp, Homo sapien
aaggatcttccactttggggcgcag

SEQ ID NO: 3175353 - DNA, 25 bp, Homo sapien
tgttaactcccgagtaggactgtac

SEQ ID NO: 3175354 - DNA, 25 bp, Homo sapien
tattaggaccaaagaccgttgccaa

SEQ ID NO: 3175355 - DNA, 25 bp, Homo sapien
tactggtggcacgactacttcgacc

SEQ ID NO: 3175356 - DNA, 25 bp, Homo sapien
gaaggacccattggtaactatccca

SEQ ID NO: 3175357 - DNA, 25 bp, Homo sapien
tgtacactgtgcgtgcccattttgg

SEQ ID NO: 3175358 - DNA, 25 bp, Homo sapien
gagtgtgtcgctgttcaaaatgccc

SEQ ID NO: 3175359 - DNA, 25 bp, Homo sapien
cattattgagcctattctgtaccag

SEQ ID NO: 3175360 - DNA, 25 bp, Homo sapien
gcctggcagatagaaggcactctct

SEQ ID NO: 3175361 - DNA, 25 bp, Homo sapien
tatgtcacctggctcttatggcctc

SEQ ID NO: 3175362 - DNA, 25 bp, Homo sapien
taacaggctcctaatgctctgtcca

SEQ ID NO: 3175363 - DNA, 25 bp, Homo sapien
ttagtaagctacaaaacaggtctga

SEQ ID NO: 3175364 - DNA, 25 bp, Homo sapien
tccagtattaggcaggcagaaaact

SEQ ID NO: 3175365 - DNA, 25 bp, Homo sapien
tattagtcttggatagaggccacag

SEQ ID NO: 3175366 - DNA, 25 bp, Homo sapien
tagaagcacacgaaggatattagtc

SEQ ID NO: 3175367 - DNA, 25 bp, Homo sapien
ggaataaagccctttcaatgattta

SEQ ID NO: 3175368 - DNA, 25 bp, Homo sapien
aaattggaataaagccctttcaatg

SEQ ID NO: 3175369 - DNA, 25 bp, Homo sapien
tatgatgcttaggaaattggaataa

SEQ ID NO: 3175370 - DNA, 25 bp, Homo sapien
tctaaactctttatgatgcttagga

SEQ ID NO: 3175371 - DNA, 25 bp, Homo sapien
gctcgctcggcatttcgcattttta

SEQ ID NO: 3175372 - DNA, 25 bp, Homo sapien
caaagtcaagtttcgctgttctaag

SEQ ID NO: 3175373 - DNA, 25 bp, Homo sapien
tcctgatccagttcatcatggaggc

SEQ ID NO: 3175374 - DNA, 25 bp, Homo sapien
tgtttcctctctcggttctcctggg

SEQ ID NO: 3175375 - DNA, 25 bp, Homo sapien
gccagagccatcagagacagcaggc

SEQ ID NO: 3175376 - DNA, 25 bp, Homo sapien
tagacttctgtacatccaggtgacc

SEQ ID NO: 3175377 - DNA, 25 bp, Homo sapien
accagccacctggttctaagtcata

SEQ ID NO: 3175378 - DNA, 25 bp, Homo sapien
tattccttcaccagttagacttctg

SEQ ID NO: 3175379 - DNA, 25 bp, Homo sapien
gaaagcaagctaaattgcaacaaca

SEQ ID NO: 3175380 - DNA, 25 bp, Homo sapien
aatattgatctataaaataagccga

SEQ ID NO: 3175381 - DNA, 25 bp, Homo sapien
aataagccgatgataacacaatgcc

SEQ ID NO: 3175382 - DNA, 25 bp, Homo sapien
cacatatccagttgtaacacttgac

SEQ ID NO: 3175383 - DNA, 25 bp, Homo sapien
caactttgccagctgtagtagggag

SEQ ID NO: 3175384 - DNA, 25 bp, Homo sapien
tcacgtgggcatggtttagcaagca

SEQ ID NO: 3175385 - DNA, 25 bp, Homo sapien
cacagacgcttgctcagtgggagag

SEQ ID NO: 3175386 - DNA, 25 bp, Homo sapien
gcaagcattgtttcccagtacctaa

SEQ ID NO: 3175387 - DNA, 25 bp, Homo sapien
aagggctttgtcctgggcaagtgac

SEQ ID NO: 3175388 - DNA, 25 bp, Homo sapien
gatcaagctatggtcagatgaataa

SEQ ID NO: 3175389 - DNA, 25 bp, Homo sapien
tcatatgtaatgagcaagatcaagc

SEQ ID NO: 3175390 - DNA, 25 bp, Homo sapien
agggctttgtcctgggcaagtgaca

SEQ ID NO: 3175391 - DNA, 25 bp, Homo sapien
ccgcctgcctgcgaaacccagcgtt

SEQ ID NO: 3175392 - DNA, 25 bp, Homo sapien
ggttgttgcaggtgactagccgcct

SEQ ID NO: 3175393 - DNA, 25 bp, Homo sapien
ctgggttgttgcaggtgactagccg

SEQ ID NO: 3175394 - DNA, 25 bp, Homo sapien
gttgcaggtgactagccgcctgcct

SEQ ID NO: 3175395 - DNA, 25 bp, Homo sapien
atctcctccatgtccaccgaccaga

SEQ ID NO: 3175396 - DNA, 25 bp, Homo sapien
atgtccaccgaccagaccctggcat

SEQ ID NO: 3175397 - DNA, 25 bp, Homo sapien
tccctccatcctcgtctgtcaatga

SEQ ID NO: 3175398 - DNA, 25 bp, Homo sapien
tcctcgtctgtcaatgacatctcct

SEQ ID NO: 3175399 - DNA, 25 bp, Homo sapien
tgattgatggactggacatccccta

SEQ ID NO: 3175400 - DNA, 25 bp, Homo sapien
cctatgtcagctgctctataaaggc

SEQ ID NO: 3175401 - DNA, 25 bp, Homo sapien
tcaccatttgatatgctcccctatg

SEQ ID NO: 3175402 - DNA, 25 bp, Homo sapien
taaaggcttgccaaatgattgatgg

SEQ ID NO: 3175403 - DNA, 25 bp, Homo sapien
ctggatcatccttgatccacccttt

SEQ ID NO: 3175404 - DNA, 25 bp, Homo sapien
cctggatcatccttgatccaccctt

SEQ ID NO: 3175405 - DNA, 25 bp, Homo sapien
ttcaggacatatatgccagaatgct

SEQ ID NO: 3175406 - DNA, 25 bp, Homo sapien
tagtacagcaatctgttaccacttc

SEQ ID NO: 3175407 - DNA, 25 bp, Homo sapien
ttcatagtacagcaatctgttacca

SEQ ID NO: 3175408 - DNA, 25 bp, Homo sapien
tctttcaggacatatatgccagaat

SEQ ID NO: 3175409 - DNA, 25 bp, Homo sapien
tcagatcttcggagttcctttactc

SEQ ID NO: 3175410 - DNA, 25 bp, Homo sapien
ttttcagatcttcggagttccttta

SEQ ID NO: 3175411 - DNA, 25 bp, Homo sapien
ctttttcagatcttcggagttcctt

SEQ ID NO: 3175412 - DNA, 25 bp, Homo sapien
gatcttcggagttcctttactccaa

SEQ ID NO: 3175413 - DNA, 25 bp, Homo sapien
tttattgtttcagccagccaagcca

SEQ ID NO: 3175414 - DNA, 25 bp, Homo sapien
caaagatgctagtgattgacccagc

SEQ ID NO: 3175415 - DNA, 25 bp, Homo sapien
tctggtatgacccagccgaagtgga

SEQ ID NO: 3175416 - DNA, 25 bp, Homo sapien
gaatatcagtggacgacgccttaca

SEQ ID NO: 3175417 - DNA, 25 bp, Homo sapien
gccctgttaggctattaggaggcca

SEQ ID NO: 3175418 - DNA, 25 bp, Homo sapien
cccgggataccgatctaggctcact

SEQ ID NO: 3175419 - DNA, 25 bp, Homo sapien
gagagaatcttatgagaatggtaca

SEQ ID NO: 3175420 - DNA, 25 bp, Homo sapien
ccagccctttctaagagcagaaaaa

SEQ ID NO: 3175421 - DNA, 25 bp, Homo sapien
tgagagtatcctagaaccatcagat

SEQ ID NO: 3175422 - DNA, 25 bp, Homo sapien
tctgagagtatcctagaaccatcag

SEQ ID NO: 3175423 - DNA, 25 bp, Homo sapien
ctctgagagtatcctagaaccatca

SEQ ID NO: 3175424 - DNA, 25 bp, Homo sapien
gagagtatcctagaaccatcagatt

SEQ ID NO: 3175425 - DNA, 25 bp, Homo sapien
gtggccaggcttttataaccacatg

SEQ ID NO: 3175426 - DNA, 25 bp, Homo sapien
gctacctatgaagagtgtgtaggct

SEQ ID NO: 3175427 - DNA, 25 bp, Homo sapien
tcatcagtcattgaatgaaggctac

SEQ ID NO: 3175428 - DNA, 25 bp, Homo sapien
tgtgtaggctaggttaggcagcttt

SEQ ID NO: 3175429 - DNA, 25 bp, Homo sapien
taatctttgtgtggtcttccccgtc

SEQ ID NO: 3175430 - DNA, 25 bp, Homo sapien
aaattgcctcgtgtctagagcagcc

SEQ ID NO: 3175431 - DNA, 25 bp, Homo sapien
gctgtgagacccacttgctgccttg

SEQ ID NO: 3175432 - DNA, 25 bp, Homo sapien
aattggacttgccttttgcctaggg

SEQ ID NO: 3175433 - DNA, 25 bp, Homo sapien
aactggagtctttgtgcctcagggt

SEQ ID NO: 3175434 - DNA, 25 bp, Homo sapien
ttgcaggtacaatgtgccaggagta

SEQ ID NO: 3175435 - DNA, 25 bp, Homo sapien
caaactggagtctttgtgcctcagg

SEQ ID NO: 3175436 - DNA, 25 bp, Homo sapien
caggagtagtcaaagccacaggaga

SEQ ID NO: 3175437 - DNA, 25 bp, Homo sapien
tttgaagtgaccatgacagaaactc

SEQ ID NO: 3175438 - DNA, 25 bp, Homo sapien
catgatgatttaagacacctgaaga

SEQ ID NO: 3175439 - DNA, 25 bp, Homo sapien
gtgggctggcagcaaatattaaatg

SEQ ID NO: 3175440 - DNA, 25 bp, Homo sapien
gggagcagaggaaaattataagcca

SEQ ID NO: 3175441 - DNA, 25 bp, Homo sapien
ggttgttctcttcttaccagcccat

SEQ ID NO: 3175442 - DNA, 25 bp, Homo sapien
tacaaagcacttatctgtagacggt

SEQ ID NO: 3175443 - DNA, 25 bp, Homo sapien
ggtttatgttaacagatattaaagc

SEQ ID NO: 3175444 - DNA, 25 bp, Homo sapien
cggttttcaatagatggttgttctc

SEQ ID NO: 3175445 - DNA, 25 bp, Homo sapien
gttgacggttggcagaattggcaat

SEQ ID NO: 3175446 - DNA, 25 bp, Homo sapien
ggcagttggttgacggttggcagaa

SEQ ID NO: 3175447 - DNA, 25 bp, Homo sapien
cggttggcagaattggcaattaaca

SEQ ID NO: 3175448 - DNA, 25 bp, Homo sapien
catggttggcagttggttgacggtt

SEQ ID NO: 3175449 - DNA, 25 bp, Homo sapien
ccaaatgttttttcttcctacacat

SEQ ID NO: 3175450 - DNA, 25 bp, Homo sapien
catagttatcttgccggtagcccca

SEQ ID NO: 3175451 - DNA, 25 bp, Homo sapien
cagtgtctgaacttatcggtacata

SEQ ID NO: 3175452 - DNA, 25 bp, Homo sapien
gcaaatatgcgaatcaagttccaga

SEQ ID NO: 3175453 - DNA, 25 bp, Homo sapien
taatcaatcttgatgatcccattgc

SEQ ID NO: 3175454 - DNA, 25 bp, Homo sapien
aagaatctcttccatgttagtctgg

SEQ ID NO: 3175455 - DNA, 25 bp, Homo sapien
gcttgagtgagtttaagattgggtt

SEQ ID NO: 3175456 - DNA, 25 bp, Homo sapien
tcttggaaatcacctgtccatcgtt

SEQ ID NO: 3175457 - DNA, 25 bp, Homo sapien
ttttaaacaatctccatatctccaa

SEQ ID NO: 3175458 - DNA, 25 bp, Homo sapien
ccaagatgggtttggctactggata

SEQ ID NO: 3175459 - DNA, 25 bp, Homo sapien
caagagtaatgccatcttgaagcag

SEQ ID NO: 3175460 - DNA, 25 bp, Homo sapien
tgtttggcgactggattctgtgttc

SEQ ID NO: 3175461 - DNA, 25 bp, Homo sapien
tactggatagtagccaatgatgact

SEQ ID NO: 3175462 - DNA, 25 bp, Homo sapien
tgagcctgagggctttacttatgaa

SEQ ID NO: 3175463 - DNA, 25 bp, Homo sapien
gggaatgactggctgctgtagaatt

SEQ ID NO: 3175464 - DNA, 25 bp, Homo sapien
ctgtagaatttggatgagcctgagg

SEQ ID NO: 3175465 - DNA, 25 bp, Homo sapien
gactggctgctgtagaatttggatg

SEQ ID NO: 3175466 - DNA, 25 bp, Homo sapien
cctccttatttctctttacagtttg

SEQ ID NO: 3175467 - DNA, 25 bp, Homo sapien
gaagcctttctcaccctcaggtaga

SEQ ID NO: 3175468 - DNA, 25 bp, Homo sapien
caccctcaggtagaactgtttcctc

SEQ ID NO: 3175469 - DNA, 25 bp, Homo sapien
tttctctttacagtttgtatattgc

SEQ ID NO: 3175470 - DNA, 25 bp, Homo sapien
cccaccagactgttccatgctccct

SEQ ID NO: 3175471 - DNA, 25 bp, Homo sapien
ctcccttgagcatatgccgccactt

SEQ ID NO: 3175472 - DNA, 25 bp, Homo sapien
accagactgttccatgctcccttga

SEQ ID NO: 3175473 - DNA, 25 bp, Homo sapien
agcatatgccgccacttccttatgg

SEQ ID NO: 3175474 - DNA, 25 bp, Homo sapien
tctcagacttgaggaaggcacacat

SEQ ID NO: 3175475 - DNA, 25 bp, Homo sapien
gctcctttagctttctcagacttga

SEQ ID NO: 3175476 - DNA, 25 bp, Homo sapien
tctagctcctttagctttctcagac

SEQ ID NO: 3175477 - DNA, 25 bp, Homo sapien
ttagctttctcagacttgaggaagg

SEQ ID NO: 3175478 - DNA, 25 bp, Homo sapien
tagtggtaggctgagatctgcccac

SEQ ID NO: 3175479 - DNA, 25 bp, Homo sapien
ctcactctggctgtgttatagaaca

SEQ ID NO: 3175480 - DNA, 25 bp, Homo sapien
ggagcggcacgatcctacttatgct

SEQ ID NO: 3175481 - DNA, 25 bp, Homo sapien
gagccacccattctcgagctggcaa

SEQ ID NO: 3175482 - DNA, 25 bp, Homo sapien
caatggtctttccttaggcagttca

SEQ ID NO: 3175483 - DNA, 25 bp, Homo sapien
tcttgaccttgaacacggaatttgg

SEQ ID NO: 3175484 - DNA, 25 bp, Homo sapien
cggaatttggtccttgacattctgc

SEQ ID NO: 3175485 - DNA, 25 bp, Homo sapien
aagactctaaaagcctttctgcctc

SEQ ID NO: 3175486 - DNA, 25 bp, Homo sapien
ccttccagaaccaaggcattggctt

SEQ ID NO: 3175487 - DNA, 25 bp, Homo sapien
ggcttcttcaggcacatctctggct

SEQ ID NO: 3175488 - DNA, 25 bp, Homo sapien
tccctctgggtctcctgtaaaggag

SEQ ID NO: 3175489 - DNA, 25 bp, Homo sapien
ttccagaaccaaggcattggcttct

SEQ ID NO: 3175490 - DNA, 25 bp, Homo sapien
tccagttcccatgtatatgggaacc

SEQ ID NO: 3175491 - DNA, 25 bp, Homo sapien
atccagttcccatgtatatgggaac

SEQ ID NO: 3175492 - DNA, 25 bp, Homo sapien
ccattgtgtagtgcaaagaactctg

SEQ ID NO: 3175493 - DNA, 25 bp, Homo sapien
cattgtgtagtgcaaagaactctgg

SEQ ID NO: 3175494 - DNA, 25 bp, Homo sapien
catctttgtctacttcggagccttt

SEQ ID NO: 3175495 - DNA, 25 bp, Homo sapien
gggtgggcagtaccgatcatctttg

SEQ ID NO: 3175496 - DNA, 25 bp, Homo sapien
tgtctacttcggagcctttctggga

SEQ ID NO: 3175497 - DNA, 25 bp, Homo sapien
tctaggattctaggctgaggtgagg

SEQ ID NO: 3175498 - DNA, 25 bp, Homo sapien
ccttgcagtaaagaggagtgtctgg

SEQ ID NO: 3175499 - DNA, 25 bp, Homo sapien
tcatagtcacaatcttcagaactgg

SEQ ID NO: 3175500 - DNA, 25 bp, Homo sapien
gtcatgagggtataacaaagctcca

SEQ ID NO: 3175501 - DNA, 25 bp, Homo sapien
tttttaactctggtgagcatgtagg

SEQ ID NO: 3175502 - DNA, 25 bp, Homo sapien
tgtacctcgctgcatcctcttgttg

SEQ ID NO: 3175503 - DNA, 25 bp, Homo sapien
tctccctactcacaaacatggaaga

SEQ ID NO: 3175504 - DNA, 25 bp, Homo sapien
gtttccctggattcttgctctgaac

SEQ ID NO: 3175505 - DNA, 25 bp, Homo sapien
catgtggacccagagtactgctgtc

SEQ ID NO: 3175506 - DNA, 25 bp, Homo sapien
tgtactttgtataggccacaaaagg

SEQ ID NO: 3175507 - DNA, 25 bp, Homo sapien
gacttcaggggtacctgttgtatca

SEQ ID NO: 3175508 - DNA, 25 bp, Homo sapien
gtatcatgtactttgtataggccac

SEQ ID NO: 3175509 - DNA, 25 bp, Homo sapien
tgcattataggcagattccaaatac

SEQ ID NO: 3175510 - DNA, 25 bp, Homo sapien
tcaccatgacatagtccccttgtat

SEQ ID NO: 3175511 - DNA, 25 bp, Homo sapien
tagtcaccatgacatagtccccttg

SEQ ID NO: 3175512 - DNA, 25 bp, Homo sapien
ccatgacatagtccccttgtattct

SEQ ID NO: 3175513 - DNA, 25 bp, Homo sapien
ctagtcaccatgacatagtcccctt

SEQ ID NO: 3175514 - DNA, 25 bp, Homo sapien
tccatttggcactgagactggccat

SEQ ID NO: 3175515 - DNA, 25 bp, Homo sapien
catgcccgcatagttccttgccaag

SEQ ID NO: 3175516 - DNA, 25 bp, Homo sapien
ggccattcagtgcatgcccgcatag

SEQ ID NO: 3175517 - DNA, 25 bp, Homo sapien
agtgcatgcccgcatagttccttgc

SEQ ID NO: 3175518 - DNA, 25 bp, Homo sapien
ttggtcctacttcccatggcctcaa

SEQ ID NO: 3175519 - DNA, 25 bp, Homo sapien
actccattggtcctacttcccatgg

SEQ ID NO: 3175520 - DNA, 25 bp, Homo sapien
tcatagggctgcactccattggtcc

SEQ ID NO: 3175521 - DNA, 25 bp, Homo sapien
tctatatgcctcatagggctgcact

SEQ ID NO: 3175522 - DNA, 25 bp, Homo sapien
agcacattgtcttcaggcagacaga

SEQ ID NO: 3175523 - DNA, 25 bp, Homo sapien
atgtttgggtcaacaatgaaatcaa

SEQ ID NO: 3175524 - DNA, 25 bp, Homo sapien
cagtggacttaaactataccctaga

SEQ ID NO: 3175525 - DNA, 25 bp, Homo sapien
cataacattaaatgcctacgttaaa

SEQ ID NO: 3175526 - DNA, 25 bp, Homo sapien
tccaagagatgccatatgataggct

SEQ ID NO: 3175527 - DNA, 25 bp, Homo sapien
gctgtttagttgctgccctcttggt

SEQ ID NO: 3175528 - DNA, 25 bp, Homo sapien
aatagtagtatcaacaataatagca

SEQ ID NO: 3175529 - DNA, 25 bp, Homo sapien
cagtgggtcgaggaagagattcttt

SEQ ID NO: 3175530 - DNA, 25 bp, Homo sapien
ccttcagaaaccagtgcttcctctt

SEQ ID NO: 3175531 - DNA, 25 bp, Homo sapien
ttgtggaccaggcaaggaaggacca

SEQ ID NO: 3175532 - DNA, 25 bp, Homo sapien
aaggaccaagccacaaggcagaggc

SEQ ID NO: 3175533 - DNA, 25 bp, Homo sapien
gaaagactctccagtgagtgactca

SEQ ID NO: 3175534 - DNA, 25 bp, Homo sapien
ctgtgggcccaagagtagtagtgct

SEQ ID NO: 3175535 - DNA, 25 bp, Homo sapien
tctcatgtcaagaaacctatttgga

SEQ ID NO: 3175536 - DNA, 25 bp, Homo sapien
ttttcctacatctgactttcttctc

SEQ ID NO: 3175537 - DNA, 25 bp, Homo sapien
ttggaaagaggccagtcccctcagg

SEQ ID NO: 3175538 - DNA, 25 bp, Homo sapien
gggacttttcctacatctgactttc

SEQ ID NO: 3175539 - DNA, 25 bp, Homo sapien
ctgcaaggaaggcatatctggtctt

SEQ ID NO: 3175540 - DNA, 25 bp, Homo sapien
tatgggtttgttctggacactgggc

SEQ ID NO: 3175541 - DNA, 25 bp, Homo sapien
gctgagaaccaactacccctggctt

SEQ ID NO: 3175542 - DNA, 25 bp, Homo sapien
tgcagagcaattactcccaggagtt

SEQ ID NO: 3175543 - DNA, 25 bp, Homo sapien
tttaatgtaattgggcttcttaatg

SEQ ID NO: 3175544 - DNA, 25 bp, Homo sapien
tgtaattgggcttcttaatgttatt

SEQ ID NO: 3175545 - DNA, 25 bp, Homo sapien
ggataatacttctatctctcaatat

SEQ ID NO: 3175546 - DNA, 25 bp, Homo sapien
ttttctggacattatggataatact

SEQ ID NO: 3175547 - DNA, 25 bp, Homo sapien
ggcaatgctaggttgtgaagtgtcc

SEQ ID NO: 3175548 - DNA, 25 bp, Homo sapien
ctggtgacaggcaatgctaggttgt

SEQ ID NO: 3175549 - DNA, 25 bp, Homo sapien
ggtgacaggcaatgctaggttgtga

SEQ ID NO: 3175550 - DNA, 25 bp, Homo sapien
gacaggcaatgctaggttgtgaagt

SEQ ID NO: 3175551 - DNA, 25 bp, Homo sapien
gctgatgccagcgacaagcactagc

SEQ ID NO: 3175552 - DNA, 25 bp, Homo sapien
tccctctatacgtgaaccttccttg

SEQ ID NO: 3175553 - DNA, 25 bp, Homo sapien
tgaggcagtgtgctcaaggtgcccc

SEQ ID NO: 3175554 - DNA, 25 bp, Homo sapien
tttgggttcttatgctggatctggg

SEQ ID NO: 3175555 - DNA, 25 bp, Homo sapien
tgaaaccacaaatcatgtcgatgcc

SEQ ID NO: 3175556 - DNA, 25 bp, Homo sapien
agaaagacaatccatcacctcttgg

SEQ ID NO: 3175557 - DNA, 25 bp, Homo sapien
tatactagtaagcaccagaaagaca

SEQ ID NO: 3175558 - DNA, 25 bp, Homo sapien
acctgtctccggcattctttgtggg

SEQ ID NO: 3175559 - DNA, 25 bp, Homo sapien
gaaatgactatttagatgtttgtgg

SEQ ID NO: 3175560 - DNA, 25 bp, Homo sapien
ttgaagcaactgacaagaaagagag

SEQ ID NO: 3175561 - DNA, 25 bp, Homo sapien
aatgactatttagatgtttgtggct

SEQ ID NO: 3175562 - DNA, 25 bp, Homo sapien
gagaaatgactatttagatgtttgt

SEQ ID NO: 3175563 - DNA, 25 bp, Homo sapien
ttagccctgtggatctagcacacca

SEQ ID NO: 3175564 - DNA, 25 bp, Homo sapien
cattgtcatactttaagggcgttga

SEQ ID NO: 3175565 - DNA, 25 bp, Homo sapien
agggcgttgaatctccctgtgagat

SEQ ID NO: 3175566 - DNA, 25 bp, Homo sapien
agtagttcactcttgggtataagcc

SEQ ID NO: 3175567 - DNA, 25 bp, Homo sapien
ttattcttattgtcttcccccctca

SEQ ID NO: 3175568 - DNA, 25 bp, Homo sapien
taaacctctaattttcttatgctgc

SEQ ID NO: 3175569 - DNA, 25 bp, Homo sapien
tgtagagctaccattaatcagatgc

SEQ ID NO: 3175570 - DNA, 25 bp, Homo sapien
gcatgatggcttgtacctttaatca

SEQ ID NO: 3175571 - DNA, 25 bp, Homo sapien
ggcggctcaactcctgtaggcgact

SEQ ID NO: 3175572 - DNA, 25 bp, Homo sapien
agaccgggtcctgctactggagcgc

SEQ ID NO: 3175573 - DNA, 25 bp, Homo sapien
gccgtgagcatggtgtgtcaccctc

SEQ ID NO: 3175574 - DNA, 25 bp, Homo sapien
caagagcttcgccaaaaccttctgg

SEQ ID NO: 3175575 - DNA, 25 bp, Homo sapien
tctacttcagggactcaaatttcat

SEQ ID NO: 3175576 - DNA, 25 bp, Homo sapien
tgctttgtgttcacggagattccga

SEQ ID NO: 3175577 - DNA, 25 bp, Homo sapien
gagattccgaaggtgtgggtttata

SEQ ID NO: 3175578 - DNA, 25 bp, Homo sapien
tatgttgagctacttaaagttccca

SEQ ID NO: 3175579 - DNA, 25 bp, Homo sapien
aaaacaccaaaagcaatggcaacaa

SEQ ID NO: 3175580 - DNA, 25 bp, Homo sapien
aggcatgggcaaggacttcatgtct

SEQ ID NO: 3175581 - DNA, 25 bp, Homo sapien
acccttggtattaccattcaggaca

SEQ ID NO: 3175582 - DNA, 25 bp, Homo sapien
caacagatgctggaaggggaagggg

SEQ ID NO: 3175583 - DNA, 25 bp, Homo sapien
ttccaatgatacttcatctggtctg

SEQ ID NO: 3175584 - DNA, 25 bp, Homo sapien
tttccaatgatacttcatctggtct

SEQ ID NO: 3175585 - DNA, 25 bp, Homo sapien
ctttccaatgatacttcatctggtc

SEQ ID NO: 3175586 - DNA, 25 bp, Homo sapien
tccaatgatacttcatctggtctgc

SEQ ID NO: 3175587 - DNA, 25 bp, Homo sapien
tgaataattcttggagactttcagc

SEQ ID NO: 3175588 - DNA, 25 bp, Homo sapien
gcactttgatttaatacagcccata

SEQ ID NO: 3175589 - DNA, 25 bp, Homo sapien
tgaagtggtccaccccgaacctcca

SEQ ID NO: 3175590 - DNA, 25 bp, Homo sapien
gggcctcagctagtgacacgtgcat

SEQ ID NO: 3175591 - DNA, 25 bp, Homo sapien
tcagtagcatgcttgcactcatatt

SEQ ID NO: 3175592 - DNA, 25 bp, Homo sapien
tgtcagtagcatgcttgcactcata

SEQ ID NO: 3175593 - DNA, 25 bp, Homo sapien
cagccccctcttataggaatgtcag

SEQ ID NO: 3175594 - DNA, 25 bp, Homo sapien
gaatgtcagtagcatgcttgcactc

SEQ ID NO: 3175595 - DNA, 25 bp, Homo sapien
taacagatttattccctaataagat

SEQ ID NO: 3175596 - DNA, 25 bp, Homo sapien
tattatttaacagatttattcccta

SEQ ID NO: 3175597 - DNA, 25 bp, Homo sapien
tagtagcaagataattttcctgaaa

SEQ ID NO: 3175598 - DNA, 25 bp, Homo sapien
aaacagaacataatattcactaaac

SEQ ID NO: 3175599 - DNA, 25 bp, Homo sapien
cacatgaagtgattttatagctcta

SEQ ID NO: 3175600 - DNA, 25 bp, Homo sapien
tatagctctaaataggtgtaagttc

SEQ ID NO: 3175601 - DNA, 25 bp, Homo sapien
ctatagaatctgaaatcatgtcacc

SEQ ID NO: 3175602 - DNA, 25 bp, Homo sapien
tctgctctgccaatactaactccta

SEQ ID NO: 3175603 - DNA, 25 bp, Homo sapien
catggattggactaatcaatattgc

SEQ ID NO: 3175604 - DNA, 25 bp, Homo sapien
tgaaggccagacgttgtagctcatg

SEQ ID NO: 3175605 - DNA, 25 bp, Homo sapien
ggattggactaatcaatattgctta

SEQ ID NO: 3175606 - DNA, 25 bp, Homo sapien
aacagtgatgaaggccagacgttgt

SEQ ID NO: 3175607 - DNA, 25 bp, Homo sapien
ccaggcagtgcattgaggagacaga

SEQ ID NO: 3175608 - DNA, 25 bp, Homo sapien
aagatggccagatagaaccctgagc

SEQ ID NO: 3175609 - DNA, 25 bp, Homo sapien
tccagcgagaagaacccagtttcag

SEQ ID NO: 3175610 - DNA, 25 bp, Homo sapien
ggagggagcattcagactaccagtg

SEQ ID NO: 3175611 - DNA, 25 bp, Homo sapien
gataaaatttagagtctgaattggc

SEQ ID NO: 3175612 - DNA, 25 bp, Homo sapien
tattggaaaacttctaagtatgctt

SEQ ID NO: 3175613 - DNA, 25 bp, Homo sapien
aaatgtggcttcagaaactgaggaa

SEQ ID NO: 3175614 - DNA, 25 bp, Homo sapien
tgtggttgtagtttgagactttgag

SEQ ID NO: 3175615 - DNA, 25 bp, Homo sapien
aattctggagttacgaatgcagggc

SEQ ID NO: 3175616 - DNA, 25 bp, Homo sapien
ggtagtttgctacaagtgtgtcata

SEQ ID NO: 3175617 - DNA, 25 bp, Homo sapien
ggcaagatgtagcatgtcaaagaca

SEQ ID NO: 3175618 - DNA, 25 bp, Homo sapien
cagggaacaaatgcgtaatttcaca

SEQ ID NO: 3175619 - DNA, 25 bp, Homo sapien
tctgggtggtaattgtatgagtgca

SEQ ID NO: 3175620 - DNA, 25 bp, Homo sapien
gtaaaagccttagtcacaaaatctg

SEQ ID NO: 3175621 - DNA, 25 bp, Homo sapien
tatgtcatagcagtgattacccttg

SEQ ID NO: 3175622 - DNA, 25 bp, Homo sapien
tctgaatgtctcacagaatgttgag

SEQ ID NO: 3175623 - DNA, 25 bp, Homo sapien
tgtaaacatgatctgtaggaactca

SEQ ID NO: 3175624 - DNA, 25 bp, Homo sapien
tgctgctattgacataactccctca

SEQ ID NO: 3175625 - DNA, 25 bp, Homo sapien
tatatctttgcagagcggaactggc

SEQ ID NO: 3175626 - DNA, 25 bp, Homo sapien
tttcattttactttcaagggcctga

SEQ ID NO: 3175627 - DNA, 25 bp, Homo sapien
acactaccagatggcagcaacagca

SEQ ID NO: 3175628 - DNA, 25 bp, Homo sapien
gacacactaccagatggcagcaaca

SEQ ID NO: 3175629 - DNA, 25 bp, Homo sapien
cacactaccagatggcagcaacagc

SEQ ID NO: 3175630 - DNA, 25 bp, Homo sapien
tgacacactaccagatggcagcaac

SEQ ID NO: 3175631 - DNA, 25 bp, Homo sapien
tgagagagaagttagtgactgattt

SEQ ID NO: 3175632 - DNA, 25 bp, Homo sapien
gaatgctcgaagatcctgattggaa

SEQ ID NO: 3175633 - DNA, 25 bp, Homo sapien
gtgcagtgaatgctcgaagatcctg

SEQ ID NO: 3175634 - DNA, 25 bp, Homo sapien
gagagaagttagtgactgattttga

SEQ ID NO: 3175635 - DNA, 25 bp, Homo sapien
cctctgagggtatgatggaacttag

SEQ ID NO: 3175636 - DNA, 25 bp, Homo sapien
gggagacccaccaactgcaaatggc

SEQ ID NO: 3175637 - DNA, 25 bp, Homo sapien
tacttactgtaggactaggaacacc

SEQ ID NO: 3175638 - DNA, 25 bp, Homo sapien
gatccattttggtgccctaagtact

SEQ ID NO: 3175639 - DNA, 25 bp, Homo sapien
aagtcctcagtagatgctccctgaa

SEQ ID NO: 3175640 - DNA, 25 bp, Homo sapien
tattgtcaaatgttccgtaggagag

SEQ ID NO: 3175641 - DNA, 25 bp, Homo sapien
gctgagacttggaacacagactatg

SEQ ID NO: 3175642 - DNA, 25 bp, Homo sapien
cagcctcctggtcctttgagagtaa

SEQ ID NO: 3175643 - DNA, 25 bp, Homo sapien
tctgaggcacttcataatcagcccc

SEQ ID NO: 3175644 - DNA, 25 bp, Homo sapien
ttggctctgaggcacttcataatca

SEQ ID NO: 3175645 - DNA, 25 bp, Homo sapien
ggctctgaggcacttcataatcagc

SEQ ID NO: 3175646 - DNA, 25 bp, Homo sapien
taatcagccccccaatacagtgtca

SEQ ID NO: 3175647 - DNA, 25 bp, Homo sapien
caaagagcatatgaaagggtggcca

SEQ ID NO: 3175648 - DNA, 25 bp, Homo sapien
aaacacacttcacatacttggagga

SEQ ID NO: 3175649 - DNA, 25 bp, Homo sapien
aaactcacatccaagctgacgggag

SEQ ID NO: 3175650 - DNA, 25 bp, Homo sapien
cattctaggaatcacaggaaccaca

SEQ ID NO: 3175651 - DNA, 25 bp, Homo sapien
gggtgcacaattgctattcctaatg

SEQ ID NO: 3175652 - DNA, 25 bp, Homo sapien
cacagtccgaacagaaactcgagcg

SEQ ID NO: 3175653 - DNA, 25 bp, Homo sapien
gcagtatgctgttgagatgatctcc

SEQ ID NO: 3175654 - DNA, 25 bp, Homo sapien
taatgtgggcactgcaagcatccag

SEQ ID NO: 3175655 - DNA, 25 bp, Homo sapien
cagaaagatttcccagaaccagttt

SEQ ID NO: 3175656 - DNA, 25 bp, Homo sapien
gattccctggatacactaggtagca

SEQ ID NO: 3175657 - DNA, 25 bp, Homo sapien
taacctgtgcaaggaagagggacca

SEQ ID NO: 3175658 - DNA, 25 bp, Homo sapien
catttgtctagaagatctgtgggcc

SEQ ID NO: 3175659 - DNA, 25 bp, Homo sapien
tctggcagggatacaagcatggatt

SEQ ID NO: 3175660 - DNA, 25 bp, Homo sapien
taggtcaaactccacactataaggg

SEQ ID NO: 3175661 - DNA, 25 bp, Homo sapien
cattctgtcagctactggaggcaac

SEQ ID NO: 3175662 - DNA, 25 bp, Homo sapien
gacgctctgagggataacaaattta

SEQ ID NO: 3175663 - DNA, 25 bp, Homo sapien
tgcctggccgagaaatgctaagtct

SEQ ID NO: 3175664 - DNA, 25 bp, Homo sapien
aactgtttacagaatgacactagtt

SEQ ID NO: 3175665 - DNA, 25 bp, Homo sapien
cagaatgacactagttacacagttt

SEQ ID NO: 3175666 - DNA, 25 bp, Homo sapien
taactgtttacagaatgacactagt

SEQ ID NO: 3175667 - DNA, 25 bp, Homo sapien
tggtaatccttttcctcgcaatcga

SEQ ID NO: 3175668 - DNA, 25 bp, Homo sapien
cgatcaggcttttgttcactgttac

SEQ ID NO: 3175669 - DNA, 25 bp, Homo sapien
tcgcaatcgatctcgaatagcctgg

SEQ ID NO: 3175670 - DNA, 25 bp, Homo sapien
tcactgttacaggaaagctgatctg

SEQ ID NO: 3175671 - DNA, 25 bp, Homo sapien
caatgggataaggttaaagcctaga

SEQ ID NO: 3175672 - DNA, 25 bp, Homo sapien
atttcaaagccaggtaagtataatt

SEQ ID NO: 3175673 - DNA, 25 bp, Homo sapien
cgtttacgttctaatcatagtctca

SEQ ID NO: 3175674 - DNA, 25 bp, Homo sapien
tagtctcaattaccagatttcaaag

SEQ ID NO: 3175675 - DNA, 25 bp, Homo sapien
ggcttttgtatgtctagtacatcag

SEQ ID NO: 3175676 - DNA, 25 bp, Homo sapien
gtctagtacatcagaagtagagctt

SEQ ID NO: 3175677 - DNA, 25 bp, Homo sapien
ctttgttaagaaaggtctgatgaga

SEQ ID NO: 3175678 - DNA, 25 bp, Homo sapien
tgtatgtctagtacatcagaagtag

SEQ ID NO: 3175679 - DNA, 25 bp, Homo sapien
tctcggattcggtccaaagcacttg

SEQ ID NO: 3175680 - DNA, 25 bp, Homo sapien
gaagtccgcactgttactgcctcag

SEQ ID NO: 3175681 - DNA, 25 bp, Homo sapien
tacaaagcaagtccatggatgaagc

SEQ ID NO: 3175682 - DNA, 25 bp, Homo sapien
gcctcagggtgacaacgacgatatg

SEQ ID NO: 3175683 - DNA, 25 bp, Homo sapien
tctttctcaaacatgcacagaatta

SEQ ID NO: 3175684 - DNA, 25 bp, Homo sapien
taaaatacttcaattctttctcaaa

SEQ ID NO: 3175685 - DNA, 25 bp, Homo sapien
tttaaaatacttcaattctttctca

SEQ ID NO: 3175686 - DNA, 25 bp, Homo sapien
attctttctcaaacatgcacagaat

SEQ ID NO: 3175687 - DNA, 25 bp, Homo sapien
tgttcagctccagagctatgcctga

SEQ ID NO: 3175688 - DNA, 25 bp, Homo sapien
cgtctttaatcagctatgtcctagg

SEQ ID NO: 3175689 - DNA, 25 bp, Homo sapien
taggatttgtctaggaagcaagggc

SEQ ID NO: 3175690 - DNA, 25 bp, Homo sapien
aaagtgcctaatctctctgctatca

SEQ ID NO: 3175691 - DNA, 25 bp, Homo sapien
tgggtaggttcttcatgagagcaaa

SEQ ID NO: 3175692 - DNA, 25 bp, Homo sapien
tcctatatcgaacaattgaaagcag

SEQ ID NO: 3175693 - DNA, 25 bp, Homo sapien
tgtgcatcctataacaaatacgaaa

SEQ ID NO: 3175694 - DNA, 25 bp, Homo sapien
tgtgcatacacattaactgagaaga

SEQ ID NO: 3175695 - DNA, 25 bp, Homo sapien
aattcttgaatcatgtgcaatggac

SEQ ID NO: 3175696 - DNA, 25 bp, Homo sapien
aaaattcttgaatcatgtgcaatgg

SEQ ID NO: 3175697 - DNA, 25 bp, Homo sapien
attacaaagttttctgaatgccaaa

SEQ ID NO: 3175698 - DNA, 25 bp, Homo sapien
tacaaagttttctgaatgccaaaat

SEQ ID NO: 3175699 - DNA, 25 bp, Homo sapien
actggaaattgagagttcacgcccc

SEQ ID NO: 3175700 - DNA, 25 bp, Homo sapien
gagtgacacgaagtgcacggcagta

SEQ ID NO: 3175701 - DNA, 25 bp, Homo sapien
tgctagtctgcaaacctgaggacag

SEQ ID NO: 3175702 - DNA, 25 bp, Homo sapien
ttcacgccccaagaaaggataagag

SEQ ID NO: 3175703 - DNA, 25 bp, Homo sapien
gaggaaataatagatggactttcac

SEQ ID NO: 3175704 - DNA, 25 bp, Homo sapien
tttcactggaggtactaaagacatc

SEQ ID NO: 3175705 - DNA, 25 bp, Homo sapien
agacatcaccatgataagttttgta

SEQ ID NO: 3175706 - DNA, 25 bp, Homo sapien
cttgtctgaaatctgattcagagga

SEQ ID NO: 3175707 - DNA, 25 bp, Homo sapien
atctacccctgggagaccactgctg

SEQ ID NO: 3175708 - DNA, 25 bp, Homo sapien
ccctgggagaccactgctggattca

SEQ ID NO: 3175709 - DNA, 25 bp, Homo sapien
taaggtttcatctacccctgggaga

SEQ ID NO: 3175710 - DNA, 25 bp, Homo sapien
gactggccttgacttaaggtttcat

SEQ ID NO: 3175711 - DNA, 25 bp, Homo sapien
cagcatgttagggatattatcagag

SEQ ID NO: 3175712 - DNA, 25 bp, Homo sapien
catgttagggatattatcagagtgt

SEQ ID NO: 3175713 - DNA, 25 bp, Homo sapien
gttagggatattatcagagtgtgtt

SEQ ID NO: 3175714 - DNA, 25 bp, Homo sapien
gcatgttagggatattatcagagtg

SEQ ID NO: 3175715 - DNA, 25 bp, Homo sapien
tagggcaatttctcttaacggatcc

SEQ ID NO: 3175716 - DNA, 25 bp, Homo sapien
gagactgtctaagggccattttggc

SEQ ID NO: 3175717 - DNA, 25 bp, Homo sapien
gatataggctcaaccgagactgtct

SEQ ID NO: 3175718 - DNA, 25 bp, Homo sapien
taacggatccctggtgatgtcaagc

SEQ ID NO: 3175719 - DNA, 25 bp, Homo sapien
agaatagaccgtggcaaatccaaag

SEQ ID NO: 3175720 - DNA, 25 bp, Homo sapien
aagaatagaccgtggcaaatccaaa

SEQ ID NO: 3175721 - DNA, 25 bp, Homo sapien
tggcaaatccaaagatataaatggt

SEQ ID NO: 3175722 - DNA, 25 bp, Homo sapien
gatgctctactaagccaatatgtgc

SEQ ID NO: 3175723 - DNA, 25 bp, Homo sapien
tcacaggtcagttccagtctttgcc

SEQ ID NO: 3175724 - DNA, 25 bp, Homo sapien
agcattatgtttactttccttcggt

SEQ ID NO: 3175725 - DNA, 25 bp, Homo sapien
ttccttcggttatcctcattcttcc

SEQ ID NO: 3175726 - DNA, 25 bp, Homo sapien
tttaagtcaggatcaacaaagaaat

SEQ ID NO: 3175727 - DNA, 25 bp, Homo sapien
ttttaagtcaggatcaacaaagaaa

SEQ ID NO: 3175728 - DNA, 25 bp, Homo sapien
gtattagactaacatcatccataaa

SEQ ID NO: 3175729 - DNA, 25 bp, Homo sapien
tgtattagactaacatcatccataa

SEQ ID NO: 3175730 - DNA, 25 bp, Homo sapien
aatatcttttcgaagctgaaggtaa

SEQ ID NO: 3175731 - DNA, 25 bp, Homo sapien
ttcgaagctgaaggtaatactgatg

SEQ ID NO: 3175732 - DNA, 25 bp, Homo sapien
ctctggttgataatctccatactca

SEQ ID NO: 3175733 - DNA, 25 bp, Homo sapien
aatactgatgacacgtcagagtatg

SEQ ID NO: 3175734 - DNA, 25 bp, Homo sapien
tctggcgggcaaatagtgctccatt

SEQ ID NO: 3175735 - DNA, 25 bp, Homo sapien
ttctaaagtaagacacaccatgaac

SEQ ID NO: 3175736 - DNA, 25 bp, Homo sapien
ggcaaatagtgctccattctaaagt

SEQ ID NO: 3175737 - DNA, 25 bp, Homo sapien
tagtgctccattctaaagtaagaca

SEQ ID NO: 3175738 - DNA, 25 bp, Homo sapien
ttctttgatataggataaatcaagt

SEQ ID NO: 3175739 - DNA, 25 bp, Homo sapien
tttgatataggataaatcaagtttc

SEQ ID NO: 3175740 - DNA, 25 bp, Homo sapien
gctcccacataggtattatgcaatt

SEQ ID NO: 3175741 - DNA, 25 bp, Homo sapien
ttttcagaagctcccacataggtat

SEQ ID NO: 3175742 - DNA, 25 bp, Homo sapien
gcaataaagcagatttacgaaagat

SEQ ID NO: 3175743 - DNA, 25 bp, Homo sapien
tacttaggctggaacccagtgacaa

SEQ ID NO: 3175744 - DNA, 25 bp, Homo sapien
tatagcaaaagtgtagccttagaag

SEQ ID NO: 3175745 - DNA, 25 bp, Homo sapien
taactatgcccagctcaactgcaca

SEQ ID NO: 3175746 - DNA, 25 bp, Homo sapien
aacagggcataacagtttggaaaat

SEQ ID NO: 3175747 - DNA, 25 bp, Homo sapien
gaacagactccaagcaatattcctg

SEQ ID NO: 3175748 - DNA, 25 bp, Homo sapien
tccctccatggaaagcgaaggacca

SEQ ID NO: 3175749 - DNA, 25 bp, Homo sapien
gacttcttctcagggtgcactcggt

SEQ ID NO: 3175750 - DNA, 25 bp, Homo sapien
cgaaggaccaatgtgcgcactccat

SEQ ID NO: 3175751 - DNA, 25 bp, Homo sapien
ttccatctgatgtattttgcaatgt

SEQ ID NO: 3175752 - DNA, 25 bp, Homo sapien
atcttactgttgtctgtctggaagc

SEQ ID NO: 3175753 - DNA, 25 bp, Homo sapien
tttattccatctgatgtattttgca

SEQ ID NO: 3175754 - DNA, 25 bp, Homo sapien
ggtgcagcaggtactggcatatctt

SEQ ID NO: 3175755 - DNA, 25 bp, Homo sapien
ggcatcttggttgctctgtcttgct

SEQ ID NO: 3175756 - DNA, 25 bp, Homo sapien
cttgctctcatctgtagctggaact

SEQ ID NO: 3175757 - DNA, 25 bp, Homo sapien
tgctctcatctgtagctggaactta

SEQ ID NO: 3175758 - DNA, 25 bp, Homo sapien
ctctcatctgtagctggaacttatg

SEQ ID NO: 3175759 - DNA, 25 bp, Homo sapien
ccaactctgcaacggtttgtggtgg

SEQ ID NO: 3175760 - DNA, 25 bp, Homo sapien
gccagtgctgattgctcgtcccata

SEQ ID NO: 3175761 - DNA, 25 bp, Homo sapien
ttttgcaatggctggtaaagcgaca

SEQ ID NO: 3175762 - DNA, 25 bp, Homo sapien
gattcaggctcctaaacgaagctct

SEQ ID NO: 3175763 - DNA, 25 bp, Homo sapien
cagggtcttcaatggatgaggagtc

SEQ ID NO: 3175764 - DNA, 25 bp, Homo sapien
gaggagtctgattcatgtttcctcc

SEQ ID NO: 3175765 - DNA, 25 bp, Homo sapien
caggacttctatttaaactcgcaac

SEQ ID NO: 3175766 - DNA, 25 bp, Homo sapien
gaacatatgcttgcccagggtcttc

SEQ ID NO: 3175767 - DNA, 25 bp, Homo sapien
agagtttccagaactatgcatagtc

SEQ ID NO: 3175768 - DNA, 25 bp, Homo sapien
gtttccagaactatgcatagtcatt

SEQ ID NO: 3175769 - DNA, 25 bp, Homo sapien
tttccagaactatgcatagtcattc

SEQ ID NO: 3175770 - DNA, 25 bp, Homo sapien
gagtttccagaactatgcatagtca

SEQ ID NO: 3175771 - DNA, 25 bp, Homo sapien
tccttctaattaatggttggcattt

SEQ ID NO: 3175772 - DNA, 25 bp, Homo sapien
gtacaggaaagagccgaacttttca

SEQ ID NO: 3175773 - DNA, 25 bp, Homo sapien
ctgtttgttacaccataatcaactc

SEQ ID NO: 3175774 - DNA, 25 bp, Homo sapien
gtttgttacaccataatcaactccc

SEQ ID NO: 3175775 - DNA, 25 bp, Homo sapien
taagactgtcagcttgttttaacaa

SEQ ID NO: 3175776 - DNA, 25 bp, Homo sapien
tgctcaggcattaagactgtcagct

SEQ ID NO: 3175777 - DNA, 25 bp, Homo sapien
aataaatataacatgctcaggcatt

SEQ ID NO: 3175778 - DNA, 25 bp, Homo sapien
tataacatgctcaggcattaagact

SEQ ID NO: 3175779 - DNA, 25 bp, Homo sapien
actaaggtgatctccctttctggtg

SEQ ID NO: 3175780 - DNA, 25 bp, Homo sapien
ctaaggtgatctccctttctggtga

SEQ ID NO: 3175781 - DNA, 25 bp, Homo sapien
aaggtgatctccctttctggtgaag

SEQ ID NO: 3175782 - DNA, 25 bp, Homo sapien
aggtgatctccctttctggtgaaga

SEQ ID NO: 3175783 - DNA, 25 bp, Homo sapien
cttctccccaccaataatttgaaat

SEQ ID NO: 3175784 - DNA, 25 bp, Homo sapien
ttctccccaccaataatttgaaatc

SEQ ID NO: 3175785 - DNA, 25 bp, Homo sapien
tccaggggcaactgaactgataaat

SEQ ID NO: 3175786 - DNA, 25 bp, Homo sapien
ctccaggggcaactgaactgataaa

SEQ ID NO: 3175787 - DNA, 25 bp, Homo sapien
gcatccatccaagtcagctggtcct

SEQ ID NO: 3175788 - DNA, 25 bp, Homo sapien
ccaggggcaactgaactgataaata

SEQ ID NO: 3175789 - DNA, 25 bp, Homo sapien
aaaatttcaattgcagcatggtggc

SEQ ID NO: 3175790 - DNA, 25 bp, Homo sapien
tggctgagagataacaagtgtcaca

SEQ ID NO: 3175791 - DNA, 25 bp, Homo sapien
ttggctgagagataacaagtgtcac

SEQ ID NO: 3175792 - DNA, 25 bp, Homo sapien
ttttggctgagagataacaagtgtc

SEQ ID NO: 3175793 - DNA, 25 bp, Homo sapien
agttgcatcaattttgtacacaatg

SEQ ID NO: 3175794 - DNA, 25 bp, Homo sapien
gttgcatcaattttgtacacaatga

SEQ ID NO: 3175795 - DNA, 25 bp, Homo sapien
tgaatccatttttgtgcgaatatca

SEQ ID NO: 3175796 - DNA, 25 bp, Homo sapien
tttgtgcgaatatcactaaaaagga

SEQ ID NO: 3175797 - DNA, 25 bp, Homo sapien
agatgtgcctcagggtaccacgtga

SEQ ID NO: 3175798 - DNA, 25 bp, Homo sapien
ccagtggtgatccttggaagaagaa

SEQ ID NO: 3175799 - DNA, 25 bp, Homo sapien
ccaaaggagttctccgagatgtgcc

SEQ ID NO: 3175800 - DNA, 25 bp, Homo sapien
tagcactgtcttgcatgtaggaaga

SEQ ID NO: 3175801 - DNA, 25 bp, Homo sapien
ttggttactatcagtgaaagtctct

SEQ ID NO: 3175802 - DNA, 25 bp, Homo sapien
ggtttggtcacctaaatggctggca

SEQ ID NO: 3175803 - DNA, 25 bp, Homo sapien
gaaagtctctttctcggtggctttg

SEQ ID NO: 3175804 - DNA, 25 bp, Homo sapien
tctcggtggctttggatattacaga

SEQ ID NO: 3175805 - DNA, 25 bp, Homo sapien
ctgttttggtgtttgatgatcctga

SEQ ID NO: 3175806 - DNA, 25 bp, Homo sapien
atgatcctgactgctggagtaagtg

SEQ ID NO: 3175807 - DNA, 25 bp, Homo sapien
ctccacggtctgagtaatcagttac

SEQ ID NO: 3175808 - DNA, 25 bp, Homo sapien
tgactgctggagtaagtggcttcat

SEQ ID NO: 3175809 - DNA, 25 bp, Homo sapien
gagcttgcttcaggtcaaactgcta

SEQ ID NO: 3175810 - DNA, 25 bp, Homo sapien
cccaggacaaagctggctagaatca

SEQ ID NO: 3175811 - DNA, 25 bp, Homo sapien
gatggaaacctatatagaacccagt

SEQ ID NO: 3175812 - DNA, 25 bp, Homo sapien
tatccagagattaaagagcttgctt

SEQ ID NO: 3175813 - DNA, 25 bp, Homo sapien
ttgttggatgtattcactgaagagg

SEQ ID NO: 3175814 - DNA, 25 bp, Homo sapien
cttgttggatgtattcactgaagag

SEQ ID NO: 3175815 - DNA, 25 bp, Homo sapien
tgttggatgtattcactgaagagga

SEQ ID NO: 3175816 - DNA, 25 bp, Homo sapien
cttaggaggtgatgaagaaaaagtt

SEQ ID NO: 3175817 - DNA, 25 bp, Homo sapien
cgtgacacttatccccaagctgtta

SEQ ID NO: 3175818 - DNA, 25 bp, Homo sapien
atttttagccagttcaacctcaaag

SEQ ID NO: 3175819 - DNA, 25 bp, Homo sapien
gacacttatccccaagctgttatca

SEQ ID NO: 3175820 - DNA, 25 bp, Homo sapien
gttcaacctcaaagatatctccagg

SEQ ID NO: 3175821 - DNA, 25 bp, Homo sapien
ggctgctggaaattaaagaagagaa

SEQ ID NO: 3175822 - DNA, 25 bp, Homo sapien
aataggctgctggaaattaaagaag

SEQ ID NO: 3175823 - DNA, 25 bp, Homo sapien
taggctgctggaaattaaagaagag

SEQ ID NO: 3175824 - DNA, 25 bp, Homo sapien
gctgctggaaattaaagaagagaaa

SEQ ID NO: 3175825 - DNA, 25 bp, Homo sapien
gtgaattctaccatcagactctgct

SEQ ID NO: 3175826 - DNA, 25 bp, Homo sapien
gccaccatgtctgacactcgtattc

SEQ ID NO: 3175827 - DNA, 25 bp, Homo sapien
aacagctttcacataaatgccacca

SEQ ID NO: 3175828 - DNA, 25 bp, Homo sapien
gtctgacactcgtattcacacctcc

SEQ ID NO: 3175829 - DNA, 25 bp, Homo sapien
catataattcccacataatataaac

SEQ ID NO: 3175830 - DNA, 25 bp, Homo sapien
tataattcccacataatataaacac

SEQ ID NO: 3175831 - DNA, 25 bp, Homo sapien
tacatataattcccacataatataa

SEQ ID NO: 3175832 - DNA, 25 bp, Homo sapien
ataattcccacataatataaacact

SEQ ID NO: 3175833 - DNA, 25 bp, Homo sapien
ccttctagactaactccattgacag

SEQ ID NO: 3175834 - DNA, 25 bp, Homo sapien
tcctgtatttctcagtgtttccaca

SEQ ID NO: 3175835 - DNA, 25 bp, Homo sapien
tatgggtggctccttctagactaac

SEQ ID NO: 3175836 - DNA, 25 bp, Homo sapien
ccattgacagctaggacgcgatcac

SEQ ID NO: 3175837 - DNA, 25 bp, Homo sapien
tcaggcttggtttcttgattagctg

SEQ ID NO: 3175838 - DNA, 25 bp, Homo sapien
caaaaacctccaaagaccattatag

SEQ ID NO: 3175839 - DNA, 25 bp, Homo sapien
tagctgacaaatttagagatctcaa

SEQ ID NO: 3175840 - DNA, 25 bp, Homo sapien
gaataagagtgaaaaccactagaaa

SEQ ID NO: 3175841 - DNA, 25 bp, Homo sapien
gagattgtcccttttctaataacag

SEQ ID NO: 3175842 - DNA, 25 bp, Homo sapien
gttaccgggacatgttctttagatg

SEQ ID NO: 3175843 - DNA, 25 bp, Homo sapien
ctttagatgttggagattgtccctt

SEQ ID NO: 3175844 - DNA, 25 bp, Homo sapien
cgggacatgttctttagatgttgga

SEQ ID NO: 3175845 - DNA, 25 bp, Homo sapien
gggcattctgatctgaaagggtaca

SEQ ID NO: 3175846 - DNA, 25 bp, Homo sapien
tgggagaaactcaggtatacagcgt

SEQ ID NO: 3175847 - DNA, 25 bp, Homo sapien
cactactatgtgaatatctgcccag

SEQ ID NO: 3175848 - DNA, 25 bp, Homo sapien
ccatgggtttgaaggcatctcagca

SEQ ID NO: 3175849 - DNA, 25 bp, Homo sapien
taaaagacactatggtcaggcacag

SEQ ID NO: 3175850 - DNA, 25 bp, Homo sapien
gctttttaacccttactatgctggc

SEQ ID NO: 3175851 - DNA, 25 bp, Homo sapien
tatcttctcgagaaaaactgaatcc

SEQ ID NO: 3175852 - DNA, 25 bp, Homo sapien
gctccggtataagattatcttctcg

SEQ ID NO: 3175853 - DNA, 25 bp, Homo sapien
tatgctggcattaatttgctccggt

SEQ ID NO: 3175854 - DNA, 25 bp, Homo sapien
tatactccacatgctaggggctcac

SEQ ID NO: 3175855 - DNA, 25 bp, Homo sapien
gctatactccacatgctaggggctc

SEQ ID NO: 3175856 - DNA, 25 bp, Homo sapien
tgggggtaccatgaatgacaaatga

SEQ ID NO: 3175857 - DNA, 25 bp, Homo sapien
tacagttaaaccagcattatgaaac

SEQ ID NO: 3175858 - DNA, 25 bp, Homo sapien
tttccggtagcacaccaggtggagg

SEQ ID NO: 3175859 - DNA, 25 bp, Homo sapien
agcacaccaggtggaggtctgcaga

SEQ ID NO: 3175860 - DNA, 25 bp, Homo sapien
gcagtatcaatttccggtagcacac

SEQ ID NO: 3175861 - DNA, 25 bp, Homo sapien
caaaagcgcagtatcaatttccggt

SEQ ID NO: 3175862 - DNA, 25 bp, Homo sapien
ggtgctttgctccacacatgatggc

SEQ ID NO: 3175863 - DNA, 25 bp, Homo sapien
ggaagtacttgtgctggagactgaa

SEQ ID NO: 3175864 - DNA, 25 bp, Homo sapien
tgctttgctccacacatgatggctg

SEQ ID NO: 3175865 - DNA, 25 bp, Homo sapien
gtgctttgctccacacatgatggct

SEQ ID NO: 3175866 - DNA, 25 bp, Homo sapien
gtaactgtctcttctggatggggac

SEQ ID NO: 3175867 - DNA, 25 bp, Homo sapien
gatggggacttgcactgttttttgc

SEQ ID NO: 3175868 - DNA, 25 bp, Homo sapien
ctgtctcttctggatggggacttgc

SEQ ID NO: 3175869 - DNA, 25 bp, Homo sapien
ggatggggacttgcactgttttttg

SEQ ID NO: 3175870 - DNA, 25 bp, Homo sapien
aaacatggtacaaatggtatcttct

SEQ ID NO: 3175871 - DNA, 25 bp, Homo sapien
tgaactccaggtcgaatttgatatg

SEQ ID NO: 3175872 - DNA, 25 bp, Homo sapien
ttgatatgtttgctggagctgtcac

SEQ ID NO: 3175873 - DNA, 25 bp, Homo sapien
taccatgttgcttagagtctgatgc

SEQ ID NO: 3175874 - DNA, 25 bp, Homo sapien
agccatatccggtggtagaggggaa

SEQ ID NO: 3175875 - DNA, 25 bp, Homo sapien
cccaggagccatatccggtggtaga

SEQ ID NO: 3175876 - DNA, 25 bp, Homo sapien
ccaggagccatatccggtggtagag

SEQ ID NO: 3175877 - DNA, 25 bp, Homo sapien
ctgcccaggagccatatccggtggt

SEQ ID NO: 3175878 - DNA, 25 bp, Homo sapien
tttcttgtctagttggttcagaaat

SEQ ID NO: 3175879 - DNA, 25 bp, Homo sapien
tgatacttatccatcgaactagagg

SEQ ID NO: 3175880 - DNA, 25 bp, Homo sapien
cgaactagaggaagcagattctgat

SEQ ID NO: 3175881 - DNA, 25 bp, Homo sapien
gatgtatatgatacttatccatcga

SEQ ID NO: 3175882 - DNA, 25 bp, Homo sapien
ctgatttaattagggtaatgaggag

SEQ ID NO: 3175883 - DNA, 25 bp, Homo sapien
catcatgaacataacaaccaattct

SEQ ID NO: 3175884 - DNA, 25 bp, Homo sapien
ggctggatcctgtatgacatcatga

SEQ ID NO: 3175885 - DNA, 25 bp, Homo sapien
aattctctgattgcctttggttact

SEQ ID NO: 3175886 - DNA, 25 bp, Homo sapien
tatgtccggtagcaaatgaggcaac

SEQ ID NO: 3175887 - DNA, 25 bp, Homo sapien
ggatgcagcccggagcagattaact

SEQ ID NO: 3175888 - DNA, 25 bp, Homo sapien
gagtcatattagtaacatctgtatc

SEQ ID NO: 3175889 - DNA, 25 bp, Homo sapien
tctgggtaattctagaactcgtcca

SEQ ID NO: 3175890 - DNA, 25 bp, Homo sapien
catattgtacaaagtttgacttttc

SEQ ID NO: 3175891 - DNA, 25 bp, Homo sapien
aaaatcatattgtacaaagtttgac

SEQ ID NO: 3175892 - DNA, 25 bp, Homo sapien
gaaaatcatattgtacaaagtttga

SEQ ID NO: 3175893 - DNA, 25 bp, Homo sapien
aatcatattgtacaaagtttgactt

SEQ ID NO: 3175894 - DNA, 25 bp, Homo sapien
gataaaggctgtcatgacctccaca

SEQ ID NO: 3175895 - DNA, 25 bp, Homo sapien
tatataccacttgataaaggctgtc

SEQ ID NO: 3175896 - DNA, 25 bp, Homo sapien
ccacttgataaaggctgtcatgacc

SEQ ID NO: 3175897 - DNA, 25 bp, Homo sapien
ggctgtcatgacctccacataagga

SEQ ID NO: 3175898 - DNA, 25 bp, Homo sapien
gaaggaagtgacatgtctaatgctc

SEQ ID NO: 3175899 - DNA, 25 bp, Homo sapien
aatagctggagattaccctcaatgg

SEQ ID NO: 3175900 - DNA, 25 bp, Homo sapien
tgctgactccgttcacataatggat

SEQ ID NO: 3175901 - DNA, 25 bp, Homo sapien
caatggctgcgacggaccttggatt

SEQ ID NO: 3175902 - DNA, 25 bp, Homo sapien
ccaagtgtaagttgaagctggtttg

SEQ ID NO: 3175903 - DNA, 25 bp, Homo sapien
tttgagtaaccaagtgtaagttgaa

SEQ ID NO: 3175904 - DNA, 25 bp, Homo sapien
tgatgtgataccaggcactgctttg

SEQ ID NO: 3175905 - DNA, 25 bp, Homo sapien
tgtgtgatgtgataccaggcactgc

SEQ ID NO: 3175906 - DNA, 25 bp, Homo sapien
ttccaaaacgctaggacaagtacca

SEQ ID NO: 3175907 - DNA, 25 bp, Homo sapien
tcctcttccaaaacgctaggacaag

SEQ ID NO: 3175908 - DNA, 25 bp, Homo sapien
ttgattggttggtttgatgggttcc

SEQ ID NO: 3175909 - DNA, 25 bp, Homo sapien
cattgtggaatttattctttgtttg

SEQ ID NO: 3175910 - DNA, 25 bp, Homo sapien
tattgatggcttatacaccaaaatg

SEQ ID NO: 3175911 - DNA, 25 bp, Homo sapien
gatggcttatacaccaaaatgcaaa

SEQ ID NO: 3175912 - DNA, 25 bp, Homo sapien
tttgctgaatattgatggcttatac

SEQ ID NO: 3175913 - DNA, 25 bp, Homo sapien
ggaaacacaagagcaaggtgctgag

SEQ ID NO: 3175914 - DNA, 25 bp, Homo sapien
tgcctttggttgactttggagctga

SEQ ID NO: 3175915 - DNA, 25 bp, Homo sapien
attgcctttggttgactttggagct

SEQ ID NO: 3175916 - DNA, 25 bp, Homo sapien
ctttggagctgaaacagcagacctc

SEQ ID NO: 3175917 - DNA, 25 bp, Homo sapien
ttggagctgaaacagcagacctctt

SEQ ID NO: 3175918 - DNA, 25 bp, Homo sapien
ggcaggctggctgcaagaccccaca

SEQ ID NO: 3175919 - DNA, 25 bp, Homo sapien
ctgcaagaccccacactgtaggaac

SEQ ID NO: 3175920 - DNA, 25 bp, Homo sapien
ctggctgcaagaccccacactgtag

SEQ ID NO: 3175921 - DNA, 25 bp, Homo sapien
aggctggctgcaagaccccacactg

SEQ ID NO: 3175922 - DNA, 25 bp, Homo sapien
ttgaacttgaaggttactactcgcc

SEQ ID NO: 3175923 - DNA, 25 bp, Homo sapien
gaacttgaaggttactactcgccaa

SEQ ID NO: 3175924 - DNA, 25 bp, Homo sapien
tgaaggttactactcgccaaaaata

SEQ ID NO: 3175925 - DNA, 25 bp, Homo sapien
gttactactcgccaaaaatagccca

SEQ ID NO: 3175926 - DNA, 25 bp, Homo sapien
tatctgataagtagaacattttcct

SEQ ID NO: 3175927 - DNA, 25 bp, Homo sapien
tcaagtttggtgatccctttatctg

SEQ ID NO: 3175928 - DNA, 25 bp, Homo sapien
ctttggggtacgatatttcatttat

SEQ ID NO: 3175929 - DNA, 25 bp, Homo sapien
gcagagtcaagtttggtgatccctt

SEQ ID NO: 3175930 - DNA, 25 bp, Homo sapien
ttattagggcatttagagtaattag

SEQ ID NO: 3175931 - DNA, 25 bp, Homo sapien
attagggcatttagagtaattagat

SEQ ID NO: 3175932 - DNA, 25 bp, Homo sapien
tattagggcatttagagtaattaga

SEQ ID NO: 3175933 - DNA, 25 bp, Homo sapien
gagactggataacttcagcttcttg

SEQ ID NO: 3175934 - DNA, 25 bp, Homo sapien
gtttaaaagattctgggcttcctca

SEQ ID NO: 3175935 - DNA, 25 bp, Homo sapien
cattattttcgtttaaaagattctg

SEQ ID NO: 3175936 - DNA, 25 bp, Homo sapien
tgttctctcttctgataacttccca

SEQ ID NO: 3175937 - DNA, 25 bp, Homo sapien
cttctgataacttcccattcatctt

SEQ ID NO: 3175938 - DNA, 25 bp, Homo sapien
tctcttctgataacttcccattcat

SEQ ID NO: 3175939 - DNA, 25 bp, Homo sapien
tctctcttctgataacttcccattc

SEQ ID NO: 3175940 - DNA, 25 bp, Homo sapien
taaaggtgaaccatcgcagtctgta

SEQ ID NO: 3175941 - DNA, 25 bp, Homo sapien
ggtaaaggtgaaccatcgcagtctg

SEQ ID NO: 3175942 - DNA, 25 bp, Homo sapien
ggtgaaccatcgcagtctgtatctt

SEQ ID NO: 3175943 - DNA, 25 bp, Homo sapien
aaggtgaaccatcgcagtctgtatc

SEQ ID NO: 3175944 - DNA, 25 bp, Homo sapien
atcctaggttgtttaggtattattg

SEQ ID NO: 3175945 - DNA, 25 bp, Homo sapien
catatcctaggttgtttaggtatta

SEQ ID NO: 3175946 - DNA, 25 bp, Homo sapien
atatcctaggttgtttaggtattat

SEQ ID NO: 3175947 - DNA, 25 bp, Homo sapien
tcatatcctaggttgtttaggtatt

SEQ ID NO: 3175948 - DNA, 25 bp, Homo sapien
gaatgcccataaagccagtcctaag

SEQ ID NO: 3175949 - DNA, 25 bp, Homo sapien
taggaggctcttacaagcacagggt

SEQ ID NO: 3175950 - DNA, 25 bp, Homo sapien
tcctaagatccaaccagtcaagcag

SEQ ID NO: 3175951 - DNA, 25 bp, Homo sapien
cttcaagttggtgatagcacagcac

SEQ ID NO: 3175952 - DNA, 25 bp, Homo sapien
ttcttcacaatattcttcacagcca

SEQ ID NO: 3175953 - DNA, 25 bp, Homo sapien
actttttcttcacaatattcttcac

SEQ ID NO: 3175954 - DNA, 25 bp, Homo sapien
tttttcttcacaatattcttcacag

SEQ ID NO: 3175955 - DNA, 25 bp, Homo sapien
ttactttttcttcacaatattcttc

SEQ ID NO: 3175956 - DNA, 25 bp, Homo sapien
cagaatcttcatggtttgttctctc

SEQ ID NO: 3175957 - DNA, 25 bp, Homo sapien
tttccccatgttatttcatcatcat

SEQ ID NO: 3175958 - DNA, 25 bp, Homo sapien
gttctctctattggcaactcatcat

SEQ ID NO: 3175959 - DNA, 25 bp, Homo sapien
tctattggcaactcatcatttcccc

SEQ ID NO: 3175960 - DNA, 25 bp, Homo sapien
tccaattcattatttttgaggaaaa

SEQ ID NO: 3175961 - DNA, 25 bp, Homo sapien
atttttccaattcattatttttgag

SEQ ID NO: 3175962 - DNA, 25 bp, Homo sapien
ttttccaattcattatttttgagga

SEQ ID NO: 3175963 - DNA, 25 bp, Homo sapien
ttccaattcattatttttgaggaaa

SEQ ID NO: 3175964 - DNA, 25 bp, Homo sapien
gatgcagctaagatataggcagcaa

SEQ ID NO: 3175965 - DNA, 25 bp, Homo sapien
gtcttgctatagactgcacaagtgt

SEQ ID NO: 3175966 - DNA, 25 bp, Homo sapien
tcttgctatagactgcacaagtgta

SEQ ID NO: 3175967 - DNA, 25 bp, Homo sapien
agcattttgatgatgcagctaagat

SEQ ID NO: 3175968 - DNA, 25 bp, Homo sapien
ttctttttacgaacagcttgattgc

SEQ ID NO: 3175969 - DNA, 25 bp, Homo sapien
tctcagtgcttcttaggttctcaaa

SEQ ID NO: 3175970 - DNA, 25 bp, Homo sapien
ccctggcactagtagagactgataa

SEQ ID NO: 3175971 - DNA, 25 bp, Homo sapien
taaaaagcacattctagatcacctg

SEQ ID NO: 3175972 - DNA, 25 bp, Homo sapien
aattgttccaacagagccaatggaa

SEQ ID NO: 3175973 - DNA, 25 bp, Homo sapien
ctttaaattgttccaacagagccaa

SEQ ID NO: 3175974 - DNA, 25 bp, Homo sapien
taaattgttccaacagagccaatgg

SEQ ID NO: 3175975 - DNA, 25 bp, Homo sapien
gttccaacagagccaatggaaccat

SEQ ID NO: 3175976 - DNA, 25 bp, Homo sapien
aaattggtatgtgttaagactaaca

SEQ ID NO: 3175977 - DNA, 25 bp, Homo sapien
aattggtatgtgttaagactaacaa

SEQ ID NO: 3175978 - DNA, 25 bp, Homo sapien
ttggtatgtgttaagactaacaaat

SEQ ID NO: 3175979 - DNA, 25 bp, Homo sapien
atgaaaaaattgcagcacatcaaac

SEQ ID NO: 3175980 - DNA, 25 bp, Homo sapien
tttaccagagggaagcactttgacg

SEQ ID NO: 3175981 - DNA, 25 bp, Homo sapien
gcgagctcatcgtttgtcagaaagg

SEQ ID NO: 3175982 - DNA, 25 bp, Homo sapien
tttgacgacagggagtacagcgagc

SEQ ID NO: 3175983 - DNA, 25 bp, Homo sapien
ttgatctagcaaaccccgcaggact

SEQ ID NO: 3175984 - DNA, 25 bp, Homo sapien
ctaaatgcatacactttgggagaga

SEQ ID NO: 3175985 - DNA, 25 bp, Homo sapien
cactattattgggatcctaatcaga

SEQ ID NO: 3175986 - DNA, 25 bp, Homo sapien
taccttaactatgaggcaggaagga

SEQ ID NO: 3175987 - DNA, 25 bp, Homo sapien
cagggaaatgtatcaagttccaagt

SEQ ID NO: 3175988 - DNA, 25 bp, Homo sapien
ccttagtttgcccaattagacactg

SEQ ID NO: 3175989 - DNA, 25 bp, Homo sapien
ttccttagtttgcccaattagacac

SEQ ID NO: 3175990 - DNA, 25 bp, Homo sapien
agacactgatccaaaggttttaatt

SEQ ID NO: 3175991 - DNA, 25 bp, Homo sapien
ttagtttgcccaattagacactgat

SEQ ID NO: 3175992 - DNA, 25 bp, Homo sapien
ctgtgaattttccaccacaaaacag

SEQ ID NO: 3175993 - DNA, 25 bp, Homo sapien
ccatatcatgcattttaaacaagag

SEQ ID NO: 3175994 - DNA, 25 bp, Homo sapien
caaaacagagccatccatatcatgc

SEQ ID NO: 3175995 - DNA, 25 bp, Homo sapien
accacaaaacagagccatccatatc

SEQ ID NO: 3175996 - DNA, 25 bp, Homo sapien
cttggcaggcaatgtaaacgaactc

SEQ ID NO: 3175997 - DNA, 25 bp, Homo sapien
tgcattctcacaagagccagtcgaa

SEQ ID NO: 3175998 - DNA, 25 bp, Homo sapien
gatgttgggccaatagcgctggcat

SEQ ID NO: 3175999 - DNA, 25 bp, Homo sapien
tccaacagttgtaggcagtggtcct

SEQ ID NO: 3176000 - DNA, 25 bp, Homo sapien
gtcactgcaacactacctaatctgg

SEQ ID NO: 3176001 - DNA, 25 bp, Homo sapien
tgactggaatggttttctcctcaga

SEQ ID NO: 3176002 - DNA, 25 bp, Homo sapien
ttttccacagcactatcaatactgg

SEQ ID NO: 3176003 - DNA, 25 bp, Homo sapien
tgtgcacagtttggtctcaggactt

SEQ ID NO: 3176004 - DNA, 25 bp, Homo sapien
gagaaggtgtatcatggtctggcca

SEQ ID NO: 3176005 - DNA, 25 bp, Homo sapien
cactgcagtgcgtaatgattgggcc

SEQ ID NO: 3176006 - DNA, 25 bp, Homo sapien
gcctgatctgtggatgtgtctcatg

SEQ ID NO: 3176007 - DNA, 25 bp, Homo sapien
caagatcctgactgattaatcccag

SEQ ID NO: 3176008 - DNA, 25 bp, Homo sapien
tctgtctgaaccattccgtgtcttt

SEQ ID NO: 3176009 - DNA, 25 bp, Homo sapien
gaaccattccgtgtctttgtagtct

SEQ ID NO: 3176010 - DNA, 25 bp, Homo sapien
catgcagcgcaccaaatcagagatg

SEQ ID NO: 3176011 - DNA, 25 bp, Homo sapien
tgtctttgtagtctcatgcagcgca

SEQ ID NO: 3176012 - DNA, 25 bp, Homo sapien
gaatttctgtagcaagaatgttacc

SEQ ID NO: 3176013 - DNA, 25 bp, Homo sapien
cagggaatttctgtagcaagaatgt

SEQ ID NO: 3176014 - DNA, 25 bp, Homo sapien
tcagggaatttctgtagcaagaatg

SEQ ID NO: 3176015 - DNA, 25 bp, Homo sapien
tctgtagcaagaatgttaccttcta

SEQ ID NO: 3176016 - DNA, 25 bp, Homo sapien
gcctgaaaggctcttgtccccagag

SEQ ID NO: 3176017 - DNA, 25 bp, Homo sapien
tacctgaacactcaagacccttgga

SEQ ID NO: 3176018 - DNA, 25 bp, Homo sapien
gacccttggacttccacacaggtgg

SEQ ID NO: 3176019 - DNA, 25 bp, Homo sapien
gccacattggctgtgaccatacctg

SEQ ID NO: 3176020 - DNA, 25 bp, Homo sapien
gagcagagatcacggactgtgctcc

SEQ ID NO: 3176021 - DNA, 25 bp, Homo sapien
tgcacatgtgtttaggacaaagaat

SEQ ID NO: 3176022 - DNA, 25 bp, Homo sapien
tgagcatgaaggagtgtgcacatgt

SEQ ID NO: 3176023 - DNA, 25 bp, Homo sapien
tttctattaagttgatggtgcagag

SEQ ID NO: 3176024 - DNA, 25 bp, Homo sapien
cataaaggatgacttgatagcagaa

SEQ ID NO: 3176025 - DNA, 25 bp, Homo sapien
tcttctgcttgaagacgtgtcagga

SEQ ID NO: 3176026 - DNA, 25 bp, Homo sapien
cgtgtcaggacataaaggatgactt

SEQ ID NO: 3176027 - DNA, 25 bp, Homo sapien
ggatgacttgatagcagaaaatata

SEQ ID NO: 3176028 - DNA, 25 bp, Homo sapien
caagattggtgcattaaaaatagac

SEQ ID NO: 3176029 - DNA, 25 bp, Homo sapien
aatgctgcctttaatcatccctaag

SEQ ID NO: 3176030 - DNA, 25 bp, Homo sapien
tgtctgctatcatcaaatgctgcct

SEQ ID NO: 3176031 - DNA, 25 bp, Homo sapien
taatgattacaaacagatgatgcag

SEQ ID NO: 3176032 - DNA, 25 bp, Homo sapien
gagctgaaattgaacgtttaccttg

SEQ ID NO: 3176033 - DNA, 25 bp, Homo sapien
acagctattggttgaagtcagtcag

SEQ ID NO: 3176034 - DNA, 25 bp, Homo sapien
ccttgggtatctgggcaactttggg

SEQ ID NO: 3176035 - DNA, 25 bp, Homo sapien
ggcaagtgacaatccctctggggtt

SEQ ID NO: 3176036 - DNA, 25 bp, Homo sapien
gtagctagaactacagtcacgtgcc

SEQ ID NO: 3176037 - DNA, 25 bp, Homo sapien
ccagtagctagaactacagtcacgt

SEQ ID NO: 3176038 - DNA, 25 bp, Homo sapien
tagaactacagtcacgtgccaccac

SEQ ID NO: 3176039 - DNA, 25 bp, Homo sapien
tagctagaactacagtcacgtgcca

SEQ ID NO: 3176040 - DNA, 25 bp, Homo sapien
cctgagctatgcctaagtggttgcc

SEQ ID NO: 3176041 - DNA, 25 bp, Homo sapien
ggttgccagtcttttccgcatggtc

SEQ ID NO: 3176042 - DNA, 25 bp, Homo sapien
agtcttttccgcatggtcttgctct

SEQ ID NO: 3176043 - DNA, 25 bp, Homo sapien
tatgcctaagtggttgccagtcttt

SEQ ID NO: 3176044 - DNA, 25 bp, Homo sapien
gtctgagtaaacagtctactttttc

SEQ ID NO: 3176045 - DNA, 25 bp, Homo sapien
tgagtaaacagtctactttttccat

SEQ ID NO: 3176046 - DNA, 25 bp, Homo sapien
tctgagtaaacagtctactttttcc

SEQ ID NO: 3176047 - DNA, 25 bp, Homo sapien
ctgagtaaacagtctactttttcca

SEQ ID NO: 3176048 - DNA, 25 bp, Homo sapien
tggtatttattaggctcccttgtaa

SEQ ID NO: 3176049 - DNA, 25 bp, Homo sapien
ctttggtatttattaggctcccttg

SEQ ID NO: 3176050 - DNA, 25 bp, Homo sapien
tggaagctttggtatttattaggct

SEQ ID NO: 3176051 - DNA, 25 bp, Homo sapien
gaagctttggtatttattaggctcc

SEQ ID NO: 3176052 - DNA, 25 bp, Homo sapien
ctatccaatctctggcagttctggg

SEQ ID NO: 3176053 - DNA, 25 bp, Homo sapien
ggccattttcagcaagtgtcctaaa

SEQ ID NO: 3176054 - DNA, 25 bp, Homo sapien
caatctctggcagttctgggccaca

SEQ ID NO: 3176055 - DNA, 25 bp, Homo sapien
gggcagcagggccattttcagcaag

SEQ ID NO: 3176056 - DNA, 25 bp, Homo sapien
gcttctcaaccttttcacccaccat

SEQ ID NO: 3176057 - DNA, 25 bp, Homo sapien
tttaggatctggcttctcaaccttt

SEQ ID NO: 3176058 - DNA, 25 bp, Homo sapien
ggcttctcaaccttttcacccacca

SEQ ID NO: 3176059 - DNA, 25 bp, Homo sapien
gatctggcttctcaaccttttcacc

SEQ ID NO: 3176060 - DNA, 25 bp, Homo sapien
ctgggtaccaccgttcttgtcacca

SEQ ID NO: 3176061 - DNA, 25 bp, Homo sapien
gtaccaccgttcttgtcaccaccaa

SEQ ID NO: 3176062 - DNA, 25 bp, Homo sapien
tgggtaccaccgttcttgtcaccac

SEQ ID NO: 3176063 - DNA, 25 bp, Homo sapien
ggtaccaccgttcttgtcaccacca

SEQ ID NO: 3176064 - DNA, 25 bp, Homo sapien
tcatgtgctgactgaacggtttttt

SEQ ID NO: 3176065 - DNA, 25 bp, Homo sapien
tgctgactgaacggtttttttgccg

SEQ ID NO: 3176066 - DNA, 25 bp, Homo sapien
tttctcatgtgctgactgaacggtt

SEQ ID NO: 3176067 - DNA, 25 bp, Homo sapien
tctcatgtgctgactgaacggtttt

SEQ ID NO: 3176068 - DNA, 25 bp, Homo sapien
cttgaagtaagcgtcagcaggatgt

SEQ ID NO: 3176069 - DNA, 25 bp, Homo sapien
cttcttgaagtaagcgtcagcagga

SEQ ID NO: 3176070 - DNA, 25 bp, Homo sapien
ttcttgaagtaagcgtcagcaggat

SEQ ID NO: 3176071 - DNA, 25 bp, Homo sapien
ttgaagtaagcgtcagcaggatgtt

SEQ ID NO: 3176072 - DNA, 25 bp, Homo sapien
gatcgatttggtgctgctctgtaat

SEQ ID NO: 3176073 - DNA, 25 bp, Homo sapien
tctgatcgatttggtgctgctctgt

SEQ ID NO: 3176074 - DNA, 25 bp, Homo sapien
cagctttctgatcgatttggtgctg

SEQ ID NO: 3176075 - DNA, 25 bp, Homo sapien
ctttctgatcgatttggtgctgctc

SEQ ID NO: 3176076 - DNA, 25 bp, Homo sapien
gctcatccagggagactacgcagaa

SEQ ID NO: 3176077 - DNA, 25 bp, Homo sapien
cagcctaaaaccttggctgacagca

SEQ ID NO: 3176078 - DNA, 25 bp, Homo sapien
tctaaactccagtgaattgcatgct

SEQ ID NO: 3176079 - DNA, 25 bp, Homo sapien
ttgagaaaagaatgaaccggatatc

SEQ ID NO: 3176080 - DNA, 25 bp, Homo sapien
tctcctttgcgcagcctgaagcgcg

SEQ ID NO: 3176081 - DNA, 25 bp, Homo sapien
tgcgcagcctgaagcgcggattgta

SEQ ID NO: 3176082 - DNA, 25 bp, Homo sapien
tttgcgcagcctgaagcgcggattg

SEQ ID NO: 3176083 - DNA, 25 bp, Homo sapien
cctttgcgcagcctgaagcgcggat

SEQ ID NO: 3176084 - DNA, 25 bp, Homo sapien
caatagcttcacacaatccgacatt

SEQ ID NO: 3176085 - DNA, 25 bp, Homo sapien
tgtacaatagcttcacacaatccga

SEQ ID NO: 3176086 - DNA, 25 bp, Homo sapien
cacacaatccgacatttctaatctt

SEQ ID NO: 3176087 - DNA, 25 bp, Homo sapien
gcttcacacaatccgacatttctaa

SEQ ID NO: 3176088 - DNA, 25 bp, Homo sapien
aattttcttctggttcattgaagaa

SEQ ID NO: 3176089 - DNA, 25 bp, Homo sapien
tctgtgtatgtaaagattttgcagg

SEQ ID NO: 3176090 - DNA, 25 bp, Homo sapien
ttctggttcattgaagaactgtctg

SEQ ID NO: 3176091 - DNA, 25 bp, Homo sapien
tgttcttctgtgtatgtaaagattt

SEQ ID NO: 3176092 - DNA, 25 bp, Homo sapien
accatacaatttcagaaagatacac

SEQ ID NO: 3176093 - DNA, 25 bp, Homo sapien
caccatacaatttcagaaagataca

SEQ ID NO: 3176094 - DNA, 25 bp, Homo sapien
cttcaccatacaatttcagaaagat

SEQ ID NO: 3176095 - DNA, 25 bp, Homo sapien
ttcaccatacaatttcagaaagata

SEQ ID NO: 3176096 - DNA, 25 bp, Homo sapien
gagtaaggagttgtgtctggtggtt

SEQ ID NO: 3176097 - DNA, 25 bp, Homo sapien
gccattatctgaattatcccgatat

SEQ ID NO: 3176098 - DNA, 25 bp, Homo sapien
tcagagtaaggagttgtgtctggtg

SEQ ID NO: 3176099 - DNA, 25 bp, Homo sapien
gaattatcccgatattttcttctat

SEQ ID NO: 3176100 - DNA, 25 bp, Homo sapien
aagtccagatcgcttggatgcagcc

SEQ ID NO: 3176101 - DNA, 25 bp, Homo sapien
tttgttgaggctcccgtgtgacgcg

SEQ ID NO: 3176102 - DNA, 25 bp, Homo sapien
tgtgagaacgctggcaacagggctt

SEQ ID NO: 3176103 - DNA, 25 bp, Homo sapien
ccaggaaaggtctggcttacagccc

SEQ ID NO: 3176104 - DNA, 25 bp, Homo sapien
caacacggtgttggagatgctgcac

SEQ ID NO: 3176105 - DNA, 25 bp, Homo sapien
gcaaattttgcactactgacatcgg

SEQ ID NO: 3176106 - DNA, 25 bp, Homo sapien
tcttttcgatgaccgaggctgcctg

SEQ ID NO: 3176107 - DNA, 25 bp, Homo sapien
tatgaggtgggcaagcaagattgtc

SEQ ID NO: 3176108 - DNA, 25 bp, Homo sapien
cctgggtgacagagcaagactcctc

SEQ ID NO: 3176109 - DNA, 25 bp, Homo sapien
tcaaaatcatgccactgcactccag

SEQ ID NO: 3176110 - DNA, 25 bp, Homo sapien
gtagaggttgcagttagtcaaaatc

SEQ ID NO: 3176111 - DNA, 25 bp, Homo sapien
gtgacagagcaagactcctcctcaa

SEQ ID NO: 3176112 - DNA, 25 bp, Homo sapien
tgtgagccaccccggccccacaaag

SEQ ID NO: 3176113 - DNA, 25 bp, Homo sapien
agccaccccggccccacaaagtgct

SEQ ID NO: 3176114 - DNA, 25 bp, Homo sapien
tccacctgccttggcgtgctgggat

SEQ ID NO: 3176115 - DNA, 25 bp, Homo sapien
tagatgtgagccaccccggccccac

SEQ ID NO: 3176116 - DNA, 25 bp, Homo sapien
cacctccaagattcaagtgattatc

SEQ ID NO: 3176117 - DNA, 25 bp, Homo sapien
ccacagcctccacctccaagattca

SEQ ID NO: 3176118 - DNA, 25 bp, Homo sapien
caccacagcctccacctccaagatt

SEQ ID NO: 3176119 - DNA, 25 bp, Homo sapien
ctcaccacagcctccacctccaaga

SEQ ID NO: 3176120 - DNA, 25 bp, Homo sapien
tgtctatcagtgtgaaattcacatc

SEQ ID NO: 3176121 - DNA, 25 bp, Homo sapien
catgctgacagttatatctggagga

SEQ ID NO: 3176122 - DNA, 25 bp, Homo sapien
tatcagtgtgaaattcacatcagca

SEQ ID NO: 3176123 - DNA, 25 bp, Homo sapien
ctggcaatggggttttcatgctgac

SEQ ID NO: 3176124 - DNA, 25 bp, Homo sapien
tcccctgacctgttgcggtgggaaa

SEQ ID NO: 3176125 - DNA, 25 bp, Homo sapien
tcaggacggaatacggcaatgaccg

SEQ ID NO: 3176126 - DNA, 25 bp, Homo sapien
actttacggcgagattaagctcagg

SEQ ID NO: 3176127 - DNA, 25 bp, Homo sapien
gtcgctcgctagctggctggcaagc

SEQ ID NO: 3176128 - DNA, 25 bp, Homo sapien
gactcctacctaacgtttctgtgct

SEQ ID NO: 3176129 - DNA, 25 bp, Homo sapien
agcaaaattctccacgcctctcaga

SEQ ID NO: 3176130 - DNA, 25 bp, Homo sapien
gccttaatttacaagtttgcactga

SEQ ID NO: 3176131 - DNA, 25 bp, Homo sapien
aatcttgcacaagcaaaattctcca

SEQ ID NO: 3176132 - DNA, 25 bp, Homo sapien
tcaatgcaaagtggctagtctgttc

SEQ ID NO: 3176133 - DNA, 25 bp, Homo sapien
cagtcaatgcaaagtggctagtctg

SEQ ID NO: 3176134 - DNA, 25 bp, Homo sapien
aatgcaaagtggctagtctgttcat

SEQ ID NO: 3176135 - DNA, 25 bp, Homo sapien
ccagtcaatgcaaagtggctagtct

SEQ ID NO: 3176136 - DNA, 25 bp, Homo sapien
tgttgactctttctgtaaatgccat

SEQ ID NO: 3176137 - DNA, 25 bp, Homo sapien
ggaagatcccataccccaccaagaa

SEQ ID NO: 3176138 - DNA, 25 bp, Homo sapien
tgccccaactacacctacgaggtgg

SEQ ID NO: 3176139 - DNA, 25 bp, Homo sapien
gatcggtttcgccatcatgacgcag

SEQ ID NO: 3176140 - DNA, 25 bp, Homo sapien
gctacctgaaggagttccgggacta

SEQ ID NO: 3176141 - DNA, 25 bp, Homo sapien
ccagctcggcaacttctccatccac

SEQ ID NO: 3176142 - DNA, 25 bp, Homo sapien
agctcggcaacttctccatccacat

SEQ ID NO: 3176143 - DNA, 25 bp, Homo sapien
cagctcggcaacttctccatccaca

SEQ ID NO: 3176144 - DNA, 25 bp, Homo sapien
gggaatcaacatcgtggcacacctg

SEQ ID NO: 3176145 - DNA, 25 bp, Homo sapien
cagaattccgtgacaggctaaccaa

SEQ ID NO: 3176146 - DNA, 25 bp, Homo sapien
tgtgttccgcttaaaagagccgaag

SEQ ID NO: 3176147 - DNA, 25 bp, Homo sapien
tgaaatcgtacaagtgccagcaaag

SEQ ID NO: 3176148 - DNA, 25 bp, Homo sapien
ttccaagggattccaatcaaaatgc

SEQ ID NO: 3176149 - DNA, 25 bp, Homo sapien
cacaggaaccaacatcagtaactaa

SEQ ID NO: 3176150 - DNA, 25 bp, Homo sapien
cagaacatgcaggttgtatacacat

SEQ ID NO: 3176151 - DNA, 25 bp, Homo sapien
tgaaaaatcacctccacgaaaatct

SEQ ID NO: 3176152 - DNA, 25 bp, Homo sapien
tgcccaggccaatcactatttcagg

SEQ ID NO: 3176153 - DNA, 25 bp, Homo sapien
aactcgaaaaggagagcttccaggg

SEQ ID NO: 3176154 - DNA, 25 bp, Homo sapien
cacccatttggtggtatagcctgaa

SEQ ID NO: 3176155 - DNA, 25 bp, Homo sapien
gactatgccacttgtagaagagtaa

SEQ ID NO: 3176156 - DNA, 25 bp, Homo sapien
aattgtcctccgttgagaactactg

SEQ ID NO: 3176157 - DNA, 25 bp, Homo sapien
tgctgctctggattaagactcaaga

SEQ ID NO: 3176158 - DNA, 25 bp, Homo sapien
agaactactgctatatcgaaacaag

SEQ ID NO: 3176159 - DNA, 25 bp, Homo sapien
ccaagaagtaggacatacatgcaac

SEQ ID NO: 3176160 - DNA, 25 bp, Homo sapien
tttcatttgcaaacgaggccctggc

SEQ ID NO: 3176161 - DNA, 25 bp, Homo sapien
taccggcactcctgggcaatttaac

SEQ ID NO: 3176162 - DNA, 25 bp, Homo sapien
ttgatgtgaaaagagtcagggccca

SEQ ID NO: 3176163 - DNA, 25 bp, Homo sapien
caacaatgagttcaaaaggcaccca

SEQ ID NO: 3176164 - DNA, 25 bp, Homo sapien
tgtttacaagtaatgagtccagcag

SEQ ID NO: 3176165 - DNA, 25 bp, Homo sapien
gcggcagctcccttgtaaccttaaa

SEQ ID NO: 3176166 - DNA, 25 bp, Homo sapien
aattcaaacgaagagcagccccatg

SEQ ID NO: 3176167 - DNA, 25 bp, Homo sapien
ggtaaatcctgggtaacagcggcag

SEQ ID NO: 3176168 - DNA, 25 bp, Homo sapien
ctgctgggccgtcctaggcacagca

SEQ ID NO: 3176169 - DNA, 25 bp, Homo sapien
tgctgggccgtcctaggcacagcat

SEQ ID NO: 3176170 - DNA, 25 bp, Homo sapien
gaaggtaggccttaactgcaagctg

SEQ ID NO: 3176171 - DNA, 25 bp, Homo sapien
tagggcttggactgactgcaacaga

SEQ ID NO: 3176172 - DNA, 25 bp, Homo sapien
caacgagagtttactgaaggtaggc

SEQ ID NO: 3176173 - DNA, 25 bp, Homo sapien
tttactgtaacaacgcagcggaacc

SEQ ID NO: 3176174 - DNA, 25 bp, Homo sapien
tgctcctttctcaagtcttacaact

SEQ ID NO: 3176175 - DNA, 25 bp, Homo sapien
cttacaacttgcttggaagataggc

SEQ ID NO: 3176176 - DNA, 25 bp, Homo sapien
ggaggatagcttgtctctgtcaacc

SEQ ID NO: 3176177 - DNA, 25 bp, Homo sapien
tctgatatcaaaggggaatggaagg

SEQ ID NO: 3176178 - DNA, 25 bp, Homo sapien
tcggtgatggaaggaagctagccac

SEQ ID NO: 3176179 - DNA, 25 bp, Homo sapien
tgtagccatgctgaaactatctccc

SEQ ID NO: 3176180 - DNA, 25 bp, Homo sapien
cataacctcatagggagttacgaga

SEQ ID NO: 3176181 - DNA, 25 bp, Homo sapien
tgccatatgactcagtagtgacccc

SEQ ID NO: 3176182 - DNA, 25 bp, Homo sapien
tctcaccacggcgatgaaaagggct

SEQ ID NO: 3176183 - DNA, 25 bp, Homo sapien
gataatctaaaacgagaactgctac

SEQ ID NO: 3176184 - DNA, 25 bp, Homo sapien
gctacaacttctaaccgttgagagg

SEQ ID NO: 3176185 - DNA, 25 bp, Homo sapien
gaggttgatttattaacagggcagc

SEQ ID NO: 3176186 - DNA, 25 bp, Homo sapien
tagtctgtgtctaatcaggagagag

SEQ ID NO: 3176187 - DNA, 25 bp, Homo sapien
gacaaataggtagcagtaaatcact

SEQ ID NO: 3176188 - DNA, 25 bp, Homo sapien
gcaacaataactccaatagcggcaa

SEQ ID NO: 3176189 - DNA, 25 bp, Homo sapien
ggttatttgcaaaacacagagatag

SEQ ID NO: 3176190 - DNA, 25 bp, Homo sapien
tactgtagtacctccatttagggtg

SEQ ID NO: 3176191 - DNA, 25 bp, Homo sapien
gagctacagtgctttcctggcttga

SEQ ID NO: 3176192 - DNA, 25 bp, Homo sapien
gaagaggaaggattgacagcaccgc

SEQ ID NO: 3176193 - DNA, 25 bp, Homo sapien
tgcagatgttggaatcacccactgg

SEQ ID NO: 3176194 - DNA, 25 bp, Homo sapien
gaacagctggttccaaggtaagcta

SEQ ID NO: 3176195 - DNA, 25 bp, Homo sapien
tgcatgctaggaaacggaaattccc

SEQ ID NO: 3176196 - DNA, 25 bp, Homo sapien
gaaaaacagagcaccgaagttgcca

SEQ ID NO: 3176197 - DNA, 25 bp, Homo sapien
agttgccactgggaaaactcaggac

SEQ ID NO: 3176198 - DNA, 25 bp, Homo sapien
tatctgccaggttaaacagaacagg

SEQ ID NO: 3176199 - DNA, 25 bp, Homo sapien
gcatcatctgacagcagatcttcaa

SEQ ID NO: 3176200 - DNA, 25 bp, Homo sapien
cataggtcatctttgatctatcaga

SEQ ID NO: 3176201 - DNA, 25 bp, Homo sapien
tattctcgtattctctcccataggt

SEQ ID NO: 3176202 - DNA, 25 bp, Homo sapien
atttgctcttctgctagagcgttta

SEQ ID NO: 3176203 - DNA, 25 bp, Homo sapien
ctgttttctatgatcctttaacact

SEQ ID NO: 3176204 - DNA, 25 bp, Homo sapien
tctgctagagcgtttatcacattgt

SEQ ID NO: 3176205 - DNA, 25 bp, Homo sapien
ttttctatgatcctttaacacttta

SEQ ID NO: 3176206 - DNA, 25 bp, Homo sapien
aaatctttatagcacggacacaggg

SEQ ID NO: 3176207 - DNA, 25 bp, Homo sapien
agtgtcggaagggaccaatatggtc

SEQ ID NO: 3176208 - DNA, 25 bp, Homo sapien
aacttaacgtgagcaaaacaccgtg

SEQ ID NO: 3176209 - DNA, 25 bp, Homo sapien
tattatagggtgcacaagagagaag

SEQ ID NO: 3176210 - DNA, 25 bp, Homo sapien
tacctggtcaaaacagaacaagcct

SEQ ID NO: 3176211 - DNA, 25 bp, Homo sapien
aaaccttgtaactaggcacctccag

SEQ ID NO: 3176212 - DNA, 25 bp, Homo sapien
gggaacacttcattggaccactaga

SEQ ID NO: 3176213 - DNA, 25 bp, Homo sapien
caaaggagacggtattcagtgattc

SEQ ID NO: 3176214 - DNA, 25 bp, Homo sapien
tgccactccgatagacaagatatga

SEQ ID NO: 3176215 - DNA, 25 bp, Homo sapien
gatttctagaagtgagcctggctga

SEQ ID NO: 3176216 - DNA, 25 bp, Homo sapien
cagtcatagtattttgcgttcccac

SEQ ID NO: 3176217 - DNA, 25 bp, Homo sapien
caaaagagttagattcctagggaga

SEQ ID NO: 3176218 - DNA, 25 bp, Homo sapien
aaagcaaggtacattcaggaaagtc

SEQ ID NO: 3176219 - DNA, 25 bp, Homo sapien
catgttgtcctataccttactttaa

SEQ ID NO: 3176220 - DNA, 25 bp, Homo sapien
tccaaagtaagccacaaagcaaggt

SEQ ID NO: 3176221 - DNA, 25 bp, Homo sapien
aaagtctagcttctatcgttctctc

SEQ ID NO: 3176222 - DNA, 25 bp, Homo sapien
tgtggtataacaagctagaagcaaa

SEQ ID NO: 3176223 - DNA, 25 bp, Homo sapien
tgactggttagagatcgtgatgcac

SEQ ID NO: 3176224 - DNA, 25 bp, Homo sapien
gaagcaaactttgtgctttatgaaa

SEQ ID NO: 3176225 - DNA, 25 bp, Homo sapien
gaccagtcaccaacaggctttaaga

SEQ ID NO: 3176226 - DNA, 25 bp, Homo sapien
aacttccaacattgaatcctttgct

SEQ ID NO: 3176227 - DNA, 25 bp, Homo sapien
agcaaactgttgtactccctgctaa

SEQ ID NO: 3176228 - DNA, 25 bp, Homo sapien
taatttctgacacaatgtgaacatc

SEQ ID NO: 3176229 - DNA, 25 bp, Homo sapien
cctgctaagtatggatcaacttcca

SEQ ID NO: 3176230 - DNA, 25 bp, Homo sapien
gttcatgcaattctcagtagctgag

SEQ ID NO: 3176231 - DNA, 25 bp, Homo sapien
aggcgccatctcggatcaatgcaac

SEQ ID NO: 3176232 - DNA, 25 bp, Homo sapien
ttcatgcaattctcagtagctgaga

SEQ ID NO: 3176233 - DNA, 25 bp, Homo sapien
cagaggcgccatctcggatcaatgc

SEQ ID NO: 3176234 - DNA, 25 bp, Homo sapien
ctttgcttattcagagagaggatgc

SEQ ID NO: 3176235 - DNA, 25 bp, Homo sapien
tcattaaatcacgagaagaggcaca

SEQ ID NO: 3176236 - DNA, 25 bp, Homo sapien
taactttaaataatggattcagggc

SEQ ID NO: 3176237 - DNA, 25 bp, Homo sapien
taattatgagttagttccctgccat

SEQ ID NO: 3176238 - DNA, 25 bp, Homo sapien
tatgttcagatcctgctcaggaggg

SEQ ID NO: 3176239 - DNA, 25 bp, Homo sapien
tataacagctagagcagagcacaga

SEQ ID NO: 3176240 - DNA, 25 bp, Homo sapien
tcatccagcgtgagccctgaagttc

SEQ ID NO: 3176241 - DNA, 25 bp, Homo sapien
ctagggtcaatcaggtcatccagcg

SEQ ID NO: 3176242 - DNA, 25 bp, Homo sapien
tgtgcctggccagactgaatgattt

SEQ ID NO: 3176243 - DNA, 25 bp, Homo sapien
tgaatgatttttaaaacacaaataa

SEQ ID NO: 3176244 - DNA, 25 bp, Homo sapien
actgtgcctggccagactgaatgat

SEQ ID NO: 3176245 - DNA, 25 bp, Homo sapien
agtacctgggactacgagcgtgtgc

SEQ ID NO: 3176246 - DNA, 25 bp, Homo sapien
tagagaaccatatgatggtcaccag

SEQ ID NO: 3176247 - DNA, 25 bp, Homo sapien
agtagagaaccatatgatggtcacc

SEQ ID NO: 3176248 - DNA, 25 bp, Homo sapien
gtttttactcaaatgtggtagctaa

SEQ ID NO: 3176249 - DNA, 25 bp, Homo sapien
atgtttttactcaaatgtggtagct

SEQ ID NO: 3176250 - DNA, 25 bp, Homo sapien
gattcctaggtacagtttcacagtc

SEQ ID NO: 3176251 - DNA, 25 bp, Homo sapien
attcctaggtacagtttcacagtct

SEQ ID NO: 3176252 - DNA, 25 bp, Homo sapien
ggattcctaggtacagtttcacagt

SEQ ID NO: 3176253 - DNA, 25 bp, Homo sapien
ttggattcctaggtacagtttcaca

SEQ ID NO: 3176254 - DNA, 25 bp, Homo sapien
cactaatggctagcagtgttgctca

SEQ ID NO: 3176255 - DNA, 25 bp, Homo sapien
tactccagggactcaagaacttagg

SEQ ID NO: 3176256 - DNA, 25 bp, Homo sapien
tctgtctcccacaagttaggcagtc

SEQ ID NO: 3176257 - DNA, 25 bp, Homo sapien
gatattaccaaagaagacggccaga

SEQ ID NO: 3176258 - DNA, 25 bp, Homo sapien
cactacgttggccaggcttgtctcg

SEQ ID NO: 3176259 - DNA, 25 bp, Homo sapien
agagtcttgctctggagtgcaatgg

SEQ ID NO: 3176260 - DNA, 25 bp, Homo sapien
gcgtgagccactgcgccggtttttt

SEQ ID NO: 3176261 - DNA, 25 bp, Homo sapien
cagagtcttgctctggagtgcaatg

SEQ ID NO: 3176262 - DNA, 25 bp, Homo sapien
taaagctcatgcaaccctataggaa

SEQ ID NO: 3176263 - DNA, 25 bp, Homo sapien
gaacttactcactcaaagaaagggc

SEQ ID NO: 3176264 - DNA, 25 bp, Homo sapien
tataggcaagccacaatgatcagta

SEQ ID NO: 3176265 - DNA, 25 bp, Homo sapien
tacctagcctgtcgtaaatgtgctg

SEQ ID NO: 3176266 - DNA, 25 bp, Homo sapien
aggcagaagggctcctcacatccca

SEQ ID NO: 3176267 - DNA, 25 bp, Homo sapien
ttccagactgggcagccaggcagaa

SEQ ID NO: 3176268 - DNA, 25 bp, Homo sapien
cacttcccagatgggatggcggcca

SEQ ID NO: 3176269 - DNA, 25 bp, Homo sapien
ttcccagatgggatggcggccaggc

SEQ ID NO: 3176270 - DNA, 25 bp, Homo sapien
gggcctctgtagcaaaatgctagca

SEQ ID NO: 3176271 - DNA, 25 bp, Homo sapien
tgttgtcattacaaggcagcccctt

SEQ ID NO: 3176272 - DNA, 25 bp, Homo sapien
ttgatactaaagctgtccacgcagt

SEQ ID NO: 3176273 - DNA, 25 bp, Homo sapien
aaatagagccctgttccattggttc

SEQ ID NO: 3176274 - DNA, 25 bp, Homo sapien
gaatgttcctctatctggttttggc

SEQ ID NO: 3176275 - DNA, 25 bp, Homo sapien
tccaagatgcaacccgaggtatcct

SEQ ID NO: 3176276 - DNA, 25 bp, Homo sapien
gaagtttaggctggctatcccgtag

SEQ ID NO: 3176277 - DNA, 25 bp, Homo sapien
tatgagcatgctctcacaggtattt

SEQ ID NO: 3176278 - DNA, 25 bp, Homo sapien
gaaaacaccattgtatccaacccac

SEQ ID NO: 3176279 - DNA, 25 bp, Homo sapien
gacttggatactgtatgtggctaaa

SEQ ID NO: 3176280 - DNA, 25 bp, Homo sapien
gattagaattacacctgagattccc

SEQ ID NO: 3176281 - DNA, 25 bp, Homo sapien
gtactgcaataccaacatgggcatt

SEQ ID NO: 3176282 - DNA, 25 bp, Homo sapien
gcaaaatgtggtcaaaccacctggg

SEQ ID NO: 3176283 - DNA, 25 bp, Homo sapien
cagactccagatcctagttgcagaa

SEQ ID NO: 3176284 - DNA, 25 bp, Homo sapien
gaggtcccaggaatacgcatttcaa

SEQ ID NO: 3176285 - DNA, 25 bp, Homo sapien
tcattctaaggaccataattggcca

SEQ ID NO: 3176286 - DNA, 25 bp, Homo sapien
cacaacgcgggccacagttagaaag

SEQ ID NO: 3176287 - DNA, 25 bp, Homo sapien
tgcggcgatctgcacttcagacgag

SEQ ID NO: 3176288 - DNA, 25 bp, Homo sapien
tgttacgggactacctgctctcgag

SEQ ID NO: 3176289 - DNA, 25 bp, Homo sapien
tattggctcgcgctaatcctgatgg

SEQ ID NO: 3176290 - DNA, 25 bp, Homo sapien
gagccaggggtcttccgtccatgag

SEQ ID NO: 3176291 - DNA, 25 bp, Homo sapien
gtcttccgtccatgagcgccttcac

SEQ ID NO: 3176292 - DNA, 25 bp, Homo sapien
ttcagcttatagagccaggggtctt

SEQ ID NO: 3176293 - DNA, 25 bp, Homo sapien
aattcagcttatagagccaggggtc

SEQ ID NO: 3176294 - DNA, 25 bp, Homo sapien
tagcattactcagggcaacgtggcc

SEQ ID NO: 3176295 - DNA, 25 bp, Homo sapien
gagcccagacacagcatacaatccg

SEQ ID NO: 3176296 - DNA, 25 bp, Homo sapien
aactacagggatgggaatacaccgc

SEQ ID NO: 3176297 - DNA, 25 bp, Homo sapien
caacgtggcccagctttagagtttc

SEQ ID NO: 3176298 - DNA, 25 bp, Homo sapien
aaagaaagcaagtttgttgcaattt

SEQ ID NO: 3176299 - DNA, 25 bp, Homo sapien
gcaagtttgttgcaatttccacaag

SEQ ID NO: 3176300 - DNA, 25 bp, Homo sapien
aagcaagtttgttgcaatttccaca

SEQ ID NO: 3176301 - DNA, 25 bp, Homo sapien
agcaagtttgttgcaatttccacaa

SEQ ID NO: 3176302 - DNA, 25 bp, Homo sapien
taacgtcacacatgcccctaaagat

SEQ ID NO: 3176303 - DNA, 25 bp, Homo sapien
tctttaactgaagtcggagtacacc

SEQ ID NO: 3176304 - DNA, 25 bp, Homo sapien
gagaacagcgcatttttgcccgaac

SEQ ID NO: 3176305 - DNA, 25 bp, Homo sapien
gagtacaccatcaagggagggcaca

SEQ ID NO: 3176306 - DNA, 25 bp, Homo sapien
gaagacttcatagtgtaggcaagat

SEQ ID NO: 3176307 - DNA, 25 bp, Homo sapien
acttctgatagactggtttcaagtt

SEQ ID NO: 3176308 - DNA, 25 bp, Homo sapien
aatcaaccaacacccttcagttcag

SEQ ID NO: 3176309 - DNA, 25 bp, Homo sapien
tcaagttgggatcccacggtttcaa

SEQ ID NO: 3176310 - DNA, 25 bp, Homo sapien
caatcattatgccacaaaggtctat

SEQ ID NO: 3176311 - DNA, 25 bp, Homo sapien
gatagcagtgtactcatatgaggct

SEQ ID NO: 3176312 - DNA, 25 bp, Homo sapien
tcatctcttagtccatggcagatca

SEQ ID NO: 3176313 - DNA, 25 bp, Homo sapien
tcttacatggtcgtgaaacattcat

SEQ ID NO: 3176314 - DNA, 25 bp, Homo sapien
atttcagtgattgcaccgtttgcca

SEQ ID NO: 3176315 - DNA, 25 bp, Homo sapien
taacacaagtatagaacgaaccctc

SEQ ID NO: 3176316 - DNA, 25 bp, Homo sapien
gaaacattctggctctagcctaggg

SEQ ID NO: 3176317 - DNA, 25 bp, Homo sapien
tagcctagggcctaaccttcatcac

SEQ ID NO: 3176318 - DNA, 25 bp, Homo sapien
tctgctttttgctctactgggaaac

SEQ ID NO: 3176319 - DNA, 25 bp, Homo sapien
caccattaatttacctgggaggaca

SEQ ID NO: 3176320 - DNA, 25 bp, Homo sapien
caataaagtagctcagaaacggcca

SEQ ID NO: 3176321 - DNA, 25 bp, Homo sapien
tcttcaaatggaggtagagtgaacc

SEQ ID NO: 3176322 - DNA, 25 bp, Homo sapien
tatctgacaaattacaacctgcccg

SEQ ID NO: 3176323 - DNA, 25 bp, Homo sapien
acaatgcctccaaggtgttgtgaag

SEQ ID NO: 3176324 - DNA, 25 bp, Homo sapien
tgatggaaagtgtgccaagcaggca

SEQ ID NO: 3176325 - DNA, 25 bp, Homo sapien
aatatacagtctttcagtgacagca

SEQ ID NO: 3176326 - DNA, 25 bp, Homo sapien
gaaacccatgaggtatgaaaccact

SEQ ID NO: 3176327 - DNA, 25 bp, Homo sapien
gggtgtttgcatccgtcttactcca

SEQ ID NO: 3176328 - DNA, 25 bp, Homo sapien
tttgcatccgtcttactccactcag

SEQ ID NO: 3176329 - DNA, 25 bp, Homo sapien
tagggtgtttgcatccgtcttactc

SEQ ID NO: 3176330 - DNA, 25 bp, Homo sapien
gcatccgtcttactccactcagatt

SEQ ID NO: 3176331 - DNA, 25 bp, Homo sapien
caaaattaaatgtcaaggatcctcc

SEQ ID NO: 3176332 - DNA, 25 bp, Homo sapien
tcaacaactgctacaaggagaaacc

SEQ ID NO: 3176333 - DNA, 25 bp, Homo sapien
tcaagctcattctatcatgggagag

SEQ ID NO: 3176334 - DNA, 25 bp, Homo sapien
gctgtggacacattcataaaaagag

SEQ ID NO: 3176335 - DNA, 25 bp, Homo sapien
tactaggatcaaccagagtgctggc

SEQ ID NO: 3176336 - DNA, 25 bp, Homo sapien
tgcctcattggcactgctcatttgg

SEQ ID NO: 3176337 - DNA, 25 bp, Homo sapien
caactgaccctgaaggaccacatct

SEQ ID NO: 3176338 - DNA, 25 bp, Homo sapien
cagaaatgtggatacgtgttggctc

SEQ ID NO: 3176339 - DNA, 25 bp, Homo sapien
aatacaaaagcaatgataacagcag

SEQ ID NO: 3176340 - DNA, 25 bp, Homo sapien
cagcagcctggccaaggaatgacat

SEQ ID NO: 3176341 - DNA, 25 bp, Homo sapien
acaaaagcaatgataacagcagcag

SEQ ID NO: 3176342 - DNA, 25 bp, Homo sapien
cagcagcagcctggccaaggaatga

SEQ ID NO: 3176343 - DNA, 25 bp, Homo sapien
ggtggaactcacaaaagctcctggg

SEQ ID NO: 3176344 - DNA, 25 bp, Homo sapien
tgttgagcctatacacatcactgtt

SEQ ID NO: 3176345 - DNA, 25 bp, Homo sapien
cacagagtagaggtaggctttgagc

SEQ ID NO: 3176346 - DNA, 25 bp, Homo sapien
gatgagttttatgaggtccaggctt

SEQ ID NO: 3176347 - DNA, 25 bp, Homo sapien
acaataaaatttatcagtctccaag

SEQ ID NO: 3176348 - DNA, 25 bp, Homo sapien
gtttcagatgccacaaaagaatgaa

SEQ ID NO: 3176349 - DNA, 25 bp, Homo sapien
ataaaatttatcagtctccaagttt

SEQ ID NO: 3176350 - DNA, 25 bp, Homo sapien
ctgtttcagatgccacaaaagaatg

SEQ ID NO: 3176351 - DNA, 25 bp, Homo sapien
tggtgggcttcctggttgcgtcttt

SEQ ID NO: 3176352 - DNA, 25 bp, Homo sapien
cttctctctaattcgaagcaggttt

SEQ ID NO: 3176353 - DNA, 25 bp, Homo sapien
tccttctctctaattcgaagcaggt

SEQ ID NO: 3176354 - DNA, 25 bp, Homo sapien
ggcttcctggttgcgtctttccttc

SEQ ID NO: 3176355 - DNA, 25 bp, Homo sapien
aacatgttctgtattcgactagaca

SEQ ID NO: 3176356 - DNA, 25 bp, Homo sapien
tttcagaagcatccaggcgatgagt

SEQ ID NO: 3176357 - DNA, 25 bp, Homo sapien
cgatgagtgtgagacttagtactaa

SEQ ID NO: 3176358 - DNA, 25 bp, Homo sapien
cgactagacagctcatcaccttttg

SEQ ID NO: 3176359 - DNA, 25 bp, Homo sapien
tggctgcgccatctttggattgtgg

SEQ ID NO: 3176360 - DNA, 25 bp, Homo sapien
tggctgtccggtgggccgcagcttt

SEQ ID NO: 3176361 - DNA, 25 bp, Homo sapien
ggccgcagcttttggcatggagact

SEQ ID NO: 3176362 - DNA, 25 bp, Homo sapien
gattgtggctaatgttgccaacaga

SEQ ID NO: 3176363 - DNA, 25 bp, Homo sapien
ctctggagccgaatctgtcaccgaa

SEQ ID NO: 3176364 - DNA, 25 bp, Homo sapien
tgtcaccgaagcacagtggtctccg

SEQ ID NO: 3176365 - DNA, 25 bp, Homo sapien
ttgtgatgactagagccgaacccct

SEQ ID NO: 3176366 - DNA, 25 bp, Homo sapien
cagctcttcggtcacctttcttgtg

SEQ ID NO: 3176367 - DNA, 25 bp, Homo sapien
tattgctgctgccatgaaccttgct

SEQ ID NO: 3176368 - DNA, 25 bp, Homo sapien
tgctgtcgatagtcctccggcagtg

SEQ ID NO: 3176369 - DNA, 25 bp, Homo sapien
tatcatggactttcactgctaggtc

SEQ ID NO: 3176370 - DNA, 25 bp, Homo sapien
atccatgggccggacataagccgtg

SEQ ID NO: 3176371 - DNA, 25 bp, Homo sapien
catcctccggacattttcatctcaa

SEQ ID NO: 3176372 - DNA, 25 bp, Homo sapien
cgtcttcgaattggaattccccaag

SEQ ID NO: 3176373 - DNA, 25 bp, Homo sapien
attttcatctcaaatccgtcttcga

SEQ ID NO: 3176374 - DNA, 25 bp, Homo sapien
caaatccgtcttcgaattggaattc

SEQ ID NO: 3176375 - DNA, 25 bp, Homo sapien
caatatctataatcagtcgtccatc

SEQ ID NO: 3176376 - DNA, 25 bp, Homo sapien
ctataatcagtcgtccatctcagat

SEQ ID NO: 3176377 - DNA, 25 bp, Homo sapien
taacaagatcctaaagccaaaaaga

SEQ ID NO: 3176378 - DNA, 25 bp, Homo sapien
gatctgagtttttcgcgggttatta

SEQ ID NO: 3176379 - DNA, 25 bp, Homo sapien
tgtaaaacatatctggatggcataa

SEQ ID NO: 3176380 - DNA, 25 bp, Homo sapien
tctttgagcaatggagatgcaaatt

SEQ ID NO: 3176381 - DNA, 25 bp, Homo sapien
caatagatgtaactaaaccatagac

SEQ ID NO: 3176382 - DNA, 25 bp, Homo sapien
tcaccttctggcattatgtaaaaca

SEQ ID NO: 3176383 - DNA, 25 bp, Homo sapien
tcagctcaagagctcagtgaggacg

SEQ ID NO: 3176384 - DNA, 25 bp, Homo sapien
cagtgaggacggcaccccaacctcc

SEQ ID NO: 3176385 - DNA, 25 bp, Homo sapien
ctccctcttctaaaccagaagctga

SEQ ID NO: 3176386 - DNA, 25 bp, Homo sapien
agaagctgacaccagaaagttacaa

SEQ ID NO: 3176387 - DNA, 25 bp, Homo sapien
ccccaaacaagtggtattcagaaga

SEQ ID NO: 3176388 - DNA, 25 bp, Homo sapien
tgagttctttattgcctgaattaga

SEQ ID NO: 3176389 - DNA, 25 bp, Homo sapien
ctcagtgcattaaatcttcttaagt

SEQ ID NO: 3176390 - DNA, 25 bp, Homo sapien
aatgttcaataaatggctcagtgca

SEQ ID NO: 3176391 - DNA, 25 bp, Homo sapien
tgtaccacctgccatgaagccaaaa

SEQ ID NO: 3176392 - DNA, 25 bp, Homo sapien
gattacctcagtatattagacccac

SEQ ID NO: 3176393 - DNA, 25 bp, Homo sapien
cagacgaataaactggtaacacagg

SEQ ID NO: 3176394 - DNA, 25 bp, Homo sapien
taccaagagttccatagtaggagta

SEQ ID NO: 3176395 - DNA, 25 bp, Homo sapien
tgttcgtgagcaacggcagttgaat

SEQ ID NO: 3176396 - DNA, 25 bp, Homo sapien
aatcttaagtgcaaatgaggtcacc

SEQ ID NO: 3176397 - DNA, 25 bp, Homo sapien
tacagtccactagtggctcctgccg

SEQ ID NO: 3176398 - DNA, 25 bp, Homo sapien
cctccaaaggagattaaggcacgta

SEQ ID NO: 3176399 - DNA, 25 bp, Homo sapien
tgtgcaacacctactagaaaagtcc

SEQ ID NO: 3176400 - DNA, 25 bp, Homo sapien
ttcaattaagatgcctgtgcaacac

SEQ ID NO: 3176401 - DNA, 25 bp, Homo sapien
aacattctgtgtgtgaagtgataca

SEQ ID NO: 3176402 - DNA, 25 bp, Homo sapien
agtgggcaggtggataacagaacct

SEQ ID NO: 3176403 - DNA, 25 bp, Homo sapien
ggagaagtgctgaaactcgggcctg

SEQ ID NO: 3176404 - DNA, 25 bp, Homo sapien
agaagtgctgaaactcgggcctggg

SEQ ID NO: 3176405 - DNA, 25 bp, Homo sapien
agtgctgaaactcgggcctgggcag

SEQ ID NO: 3176406 - DNA, 25 bp, Homo sapien
aggatgataccaagggagaagtgct

SEQ ID NO: 3176407 - DNA, 25 bp, Homo sapien
tgtgctaaacacaaaggacaaacaa

SEQ ID NO: 3176408 - DNA, 25 bp, Homo sapien
aaacaagcatatgagacacaattga

SEQ ID NO: 3176409 - DNA, 25 bp, Homo sapien
catatgagacacaattgacttctgc

SEQ ID NO: 3176410 - DNA, 25 bp, Homo sapien
gagacacaattgacttctgccctca

SEQ ID NO: 3176411 - DNA, 25 bp, Homo sapien
aattcttaagttactaggataccag

SEQ ID NO: 3176412 - DNA, 25 bp, Homo sapien
taatgataccgttgtggtctagaag

SEQ ID NO: 3176413 - DNA, 25 bp, Homo sapien
gagtgtatgccctacccatttggat

SEQ ID NO: 3176414 - DNA, 25 bp, Homo sapien
tctagaagagtgtatgccctaccca

SEQ ID NO: 3176415 - DNA, 25 bp, Homo sapien
agcctcctgaggattacaggcaccc

SEQ ID NO: 3176416 - DNA, 25 bp, Homo sapien
cagcctcctgaggattacaggcacc

SEQ ID NO: 3176417 - DNA, 25 bp, Homo sapien
aatgacgcgatctcgactttactgc

SEQ ID NO: 3176418 - DNA, 25 bp, Homo sapien
tgcaatgacgcgatctcgactttac

SEQ ID NO: 3176419 - DNA, 25 bp, Homo sapien
tctttgccgccactcacgtagacgt

SEQ ID NO: 3176420 - DNA, 25 bp, Homo sapien
tcatcctaagcaatatttgtgaaac

SEQ ID NO: 3176421 - DNA, 25 bp, Homo sapien
actcacgtagacgtgacctgctcct

SEQ ID NO: 3176422 - DNA, 25 bp, Homo sapien
aatgcaccacattaagacacataaa

SEQ ID NO: 3176423 - DNA, 25 bp, Homo sapien
catttattagacaagaagaaggaac

SEQ ID NO: 3176424 - DNA, 25 bp, Homo sapien
aggaaagtgctgataaaccttcagg

SEQ ID NO: 3176425 - DNA, 25 bp, Homo sapien
ggaaagtaaagacaggccatgtcag

SEQ ID NO: 3176426 - DNA, 25 bp, Homo sapien
agaatgcctccaagatacccctcaa

SEQ ID NO: 3176427 - DNA, 25 bp, Homo sapien
catggaaacggcttaaacacagtgc

SEQ ID NO: 3176428 - DNA, 25 bp, Homo sapien
tatccatagtggttctggctgtgca

SEQ ID NO: 3176429 - DNA, 25 bp, Homo sapien
taggtgcttatgagcaagattctcc

SEQ ID NO: 3176430 - DNA, 25 bp, Homo sapien
tttatgggaacaacttcagcagact

SEQ ID NO: 3176431 - DNA, 25 bp, Homo sapien
ctaatcggtgccactaggtcactgt

SEQ ID NO: 3176432 - DNA, 25 bp, Homo sapien
tgtctcgtgtgctggcggctgcaat

SEQ ID NO: 3176433 - DNA, 25 bp, Homo sapien
caatggcggcccttacaggaaagaa

SEQ ID NO: 3176434 - DNA, 25 bp, Homo sapien
ttcccacatggcaaaaaagctttcc

SEQ ID NO: 3176435 - DNA, 25 bp, Homo sapien
tggggcagctgtacactgtggggca

SEQ ID NO: 3176436 - DNA, 25 bp, Homo sapien
ggcagctgtacactgtggggcactc

SEQ ID NO: 3176437 - DNA, 25 bp, Homo sapien
gggcagctgtacactgtggggcact

SEQ ID NO: 3176438 - DNA, 25 bp, Homo sapien
tgtggggcagctgtacactgtgggg

SEQ ID NO: 3176439 - DNA, 25 bp, Homo sapien
gaacctccagctgctgcatacttac

SEQ ID NO: 3176440 - DNA, 25 bp, Homo sapien
tgaacctccagctgctgcatactta

SEQ ID NO: 3176441 - DNA, 25 bp, Homo sapien
ctgaacctccagctgctgcatactt

SEQ ID NO: 3176442 - DNA, 25 bp, Homo sapien
tgtttataaggtcatgcactaaacc

SEQ ID NO: 3176443 - DNA, 25 bp, Homo sapien
cttgtttataaggtcatgcactaaa

SEQ ID NO: 3176444 - DNA, 25 bp, Homo sapien
ttataaggtcatgcactaaaccaca

SEQ ID NO: 3176445 - DNA, 25 bp, Homo sapien
aaggtcatgcactaaaccacagagg

SEQ ID NO: 3176446 - DNA, 25 bp, Homo sapien
taaacgagcctgaaaagactgaaga

SEQ ID NO: 3176447 - DNA, 25 bp, Homo sapien
gagggtcaaccagcacaagtagatg

SEQ ID NO: 3176448 - DNA, 25 bp, Homo sapien
catgggagaacaatcctggagccac

SEQ ID NO: 3176449 - DNA, 25 bp, Homo sapien
caggcccctgagcagatcagtttta

SEQ ID NO: 3176450 - DNA, 25 bp, Homo sapien
tacatcagacttccagcaagactca

SEQ ID NO: 3176451 - DNA, 25 bp, Homo sapien
gatttactgatctggtgaaagcgaa

SEQ ID NO: 3176452 - DNA, 25 bp, Homo sapien
ctagggtctagaaaaagggctcaag

SEQ ID NO: 3176453 - DNA, 25 bp, Homo sapien
gactccatcattcgacaaacgccag

SEQ ID NO: 3176454 - DNA, 25 bp, Homo sapien
tctgctcacgaaaacctcagagtgt

SEQ ID NO: 3176455 - DNA, 25 bp, Homo sapien
tcagtgggactatcaatttgcaaag

SEQ ID NO: 3176456 - DNA, 25 bp, Homo sapien
ggatgaggccgaaagaaactgcagt

SEQ ID NO: 3176457 - DNA, 25 bp, Homo sapien
tatactctgaggaagcaatctgagc

SEQ ID NO: 3176458 - DNA, 25 bp, Homo sapien
tcagaatctcttcaacacaatggac

SEQ ID NO: 3176459 - DNA, 25 bp, Homo sapien
cttcagaatctcttcaacacaatgg

SEQ ID NO: 3176460 - DNA, 25 bp, Homo sapien
ttcagaatctcttcaacacaatgga

SEQ ID NO: 3176461 - DNA, 25 bp, Homo sapien
agtaagagctggaatggaccctgga

SEQ ID NO: 3176462 - DNA, 25 bp, Homo sapien
tatggcctgttcagtcctggacgtc

SEQ ID NO: 3176463 - DNA, 25 bp, Homo sapien
catttcgaggtaagcaaggattcac

SEQ ID NO: 3176464 - DNA, 25 bp, Homo sapien
gattcactaacgtgatcctgggtgg

SEQ ID NO: 3176465 - DNA, 25 bp, Homo sapien
tagccaaagacccagattgaatcct

SEQ ID NO: 3176466 - DNA, 25 bp, Homo sapien
tctgctttgttcaggacacaacagg

SEQ ID NO: 3176467 - DNA, 25 bp, Homo sapien
gaatttcaatactgcaccaaagaga

SEQ ID NO: 3176468 - DNA, 25 bp, Homo sapien
taccgtactgaatgaatactgcaca

SEQ ID NO: 3176469 - DNA, 25 bp, Homo sapien
gaacgtgaatgaatttaacaccctg

SEQ ID NO: 3176470 - DNA, 25 bp, Homo sapien
taaactgtacgtaacaggtactgcc

SEQ ID NO: 3176471 - DNA, 25 bp, Homo sapien
tactgccagagcttgtggagctgtg

SEQ ID NO: 3176472 - DNA, 25 bp, Homo sapien
aggtcacttgttccacttgggagag

SEQ ID NO: 3176473 - DNA, 25 bp, Homo sapien
tactaggcgtatgtattgctgtcaa

SEQ ID NO: 3176474 - DNA, 25 bp, Homo sapien
tggctcagctgtactaggcgtatgt

SEQ ID NO: 3176475 - DNA, 25 bp, Homo sapien
tgctgtcaaaggaggcggccatgaa

SEQ ID NO: 3176476 - DNA, 25 bp, Homo sapien
gaggcggccatgaatgggtcatttc

SEQ ID NO: 3176477 - DNA, 25 bp, Homo sapien
tatcatggaaaggaatagctctctc

SEQ ID NO: 3176478 - DNA, 25 bp, Homo sapien
tatcaatctgcctcacagcaatgcc

SEQ ID NO: 3176479 - DNA, 25 bp, Homo sapien
tacgcttttcactaaggtggatgca

SEQ ID NO: 3176480 - DNA, 25 bp, Homo sapien
cacagatctgaaggtgctatttcta

SEQ ID NO: 3176481 - DNA, 25 bp, Homo sapien
gttttgggttacagaactgacatgc

SEQ ID NO: 3176482 - DNA, 25 bp, Homo sapien
gggttacagaactgacatgctgaga

SEQ ID NO: 3176483 - DNA, 25 bp, Homo sapien
tttgggttacagaactgacatgctg

SEQ ID NO: 3176484 - DNA, 25 bp, Homo sapien
ttggttttgggttacagaactgaca

SEQ ID NO: 3176485 - DNA, 25 bp, Homo sapien
gagtttttgaagatgtatcatattg

SEQ ID NO: 3176486 - DNA, 25 bp, Homo sapien
gctgagaatttgagtgagtttttga

SEQ ID NO: 3176487 - DNA, 25 bp, Homo sapien
agaatttgagtgagtttttgaagat

SEQ ID NO: 3176488 - DNA, 25 bp, Homo sapien
gatgacgttccttgctgagaatttg

SEQ ID NO: 3176489 - DNA, 25 bp, Homo sapien
tgagcctggccgtagaatcctggca

SEQ ID NO: 3176490 - DNA, 25 bp, Homo sapien
aaactcttcgccgtccaggttcaag

SEQ ID NO: 3176491 - DNA, 25 bp, Homo sapien
ggtagatctccagcagttgtgacac

SEQ ID NO: 3176492 - DNA, 25 bp, Homo sapien
ccagaaataaggactgcccgtgcat

SEQ ID NO: 3176493 - DNA, 25 bp, Homo sapien
actgagctgaaggtcgtcttcgagc

SEQ ID NO: 3176494 - DNA, 25 bp, Homo sapien
ctgagctgaaggtcgtcttcgagca

SEQ ID NO: 3176495 - DNA, 25 bp, Homo sapien
tgagctgaaggtcgtcttcgagcat

SEQ ID NO: 3176496 - DNA, 25 bp, Homo sapien
cttggaggtgcagatgaggagggag

SEQ ID NO: 3176497 - DNA, 25 bp, Homo sapien
ggtgcagatgaggagggaggcttct

SEQ ID NO: 3176498 - DNA, 25 bp, Homo sapien
cagatgaggagggaggcttctctgg

SEQ ID NO: 3176499 - DNA, 25 bp, Homo sapien
tggaggtgcagatgaggagggaggc

SEQ ID NO: 3176500 - DNA, 25 bp, Homo sapien
gaactgctctcgctctctgagtctg

SEQ ID NO: 3176501 - DNA, 25 bp, Homo sapien
tctgagtctgaggaactgtctgagt

SEQ ID NO: 3176502 - DNA, 25 bp, Homo sapien
tggaatgtgctgatgccactggttc

SEQ ID NO: 3176503 - DNA, 25 bp, Homo sapien
tttctgactctgcactgctggaatg

SEQ ID NO: 3176504 - DNA, 25 bp, Homo sapien
ccctgcaggctggtccgtgaacctg

SEQ ID NO: 3176505 - DNA, 25 bp, Homo sapien
gattcagaatgctcctgactcgtgg

SEQ ID NO: 3176506 - DNA, 25 bp, Homo sapien
ctttggaagtctggtctcgggagcc

SEQ ID NO: 3176507 - DNA, 25 bp, Homo sapien
cgggcagaggccttgacaggttttt

SEQ ID NO: 3176508 - DNA, 25 bp, Homo sapien
cttgggttcgttgcttgctgcggcc

SEQ ID NO: 3176509 - DNA, 25 bp, Homo sapien
tgggttcgttgcttgctgcggcccg

SEQ ID NO: 3176510 - DNA, 25 bp, Homo sapien
gggttcgttgcttgctgcggcccgg

SEQ ID NO: 3176511 - DNA, 25 bp, Homo sapien
ttgggttcgttgcttgctgcggccc

SEQ ID NO: 3176512 - DNA, 25 bp, Homo sapien
tccacattgtccttcgcgggttctg

SEQ ID NO: 3176513 - DNA, 25 bp, Homo sapien
ttctgggcctgagagagccttagag

SEQ ID NO: 3176514 - DNA, 25 bp, Homo sapien
cttctcactggaggggggcactgct

SEQ ID NO: 3176515 - DNA, 25 bp, Homo sapien
gagcaaagtgctcaggggtcctgtc

SEQ ID NO: 3176516 - DNA, 25 bp, Homo sapien
ggccctggctctcagtcaggggaac

SEQ ID NO: 3176517 - DNA, 25 bp, Homo sapien
tggccaacttgcttgagctgtctga

SEQ ID NO: 3176518 - DNA, 25 bp, Homo sapien
ctgtctttgcggctgtcctcctgga

SEQ ID NO: 3176519 - DNA, 25 bp, Homo sapien
ggagtgtccctgagcggtgagagca

SEQ ID NO: 3176520 - DNA, 25 bp, Homo sapien
gggtatccgagagagcaggtctagg

SEQ ID NO: 3176521 - DNA, 25 bp, Homo sapien
ggaggatcgtttcaccccagaggta

SEQ ID NO: 3176522 - DNA, 25 bp, Homo sapien
gcaacgtgccattatcagcctatat

SEQ ID NO: 3176523 - DNA, 25 bp, Homo sapien
gagagttggcccttcttgtgacttt

SEQ ID NO: 3176524 - DNA, 25 bp, Homo sapien
tatggtcaacactttgcaacgtgcc

SEQ ID NO: 3176525 - DNA, 25 bp, Homo sapien
tagcactggatcccatcccactcaa

SEQ ID NO: 3176526 - DNA, 25 bp, Homo sapien
gatcccatcccactcaacttgcctg

SEQ ID NO: 3176527 - DNA, 25 bp, Homo sapien
tcccactcaacttgcctgctgcaaa

SEQ ID NO: 3176528 - DNA, 25 bp, Homo sapien
cactcaacttgcctgctgcaaacat

SEQ ID NO: 3176529 - DNA, 25 bp, Homo sapien
accaggtccatcacaattttctcca

SEQ ID NO: 3176530 - DNA, 25 bp, Homo sapien
tcctaaccaggtccatcacaatttt

SEQ ID NO: 3176531 - DNA, 25 bp, Homo sapien
ggtgtatcagctgcaggtatctttt

SEQ ID NO: 3176532 - DNA, 25 bp, Homo sapien
tcctgaagttttcccaggtgtatca

SEQ ID NO: 3176533 - DNA, 25 bp, Homo sapien
gagggacagactctaagaggccttt

SEQ ID NO: 3176534 - DNA, 25 bp, Homo sapien
taccactaatgtgaaggatcaagca

SEQ ID NO: 3176535 - DNA, 25 bp, Homo sapien
tcctctgactatatgctcagagttt

SEQ ID NO: 3176536 - DNA, 25 bp, Homo sapien
taaattttgtgccaagagagggaca

SEQ ID NO: 3176537 - DNA, 25 bp, Homo sapien
cacttttaagtctgaagtggattca

SEQ ID NO: 3176538 - DNA, 25 bp, Homo sapien
tgaagtggattcaaggatctgtaaa

SEQ ID NO: 3176539 - DNA, 25 bp, Homo sapien
tctataggtgccatgtctaatggct

SEQ ID NO: 3176540 - DNA, 25 bp, Homo sapien
aaaaacgtgtgcatttctataggtg

SEQ ID NO: 3176541 - DNA, 25 bp, Homo sapien
tatgtaaagaacacgacgtgaggtc

SEQ ID NO: 3176542 - DNA, 25 bp, Homo sapien
tctaaactgtaatcagactgatgaa

SEQ ID NO: 3176543 - DNA, 25 bp, Homo sapien
tgcgtatttaccctcacagttttct

SEQ ID NO: 3176544 - DNA, 25 bp, Homo sapien
cataagttggtattagaaaatctaa

SEQ ID NO: 3176545 - DNA, 25 bp, Homo sapien
ctgggacctcaggcatgcgctactg

SEQ ID NO: 3176546 - DNA, 25 bp, Homo sapien
gggacctcaggcatgcgctactgtg

SEQ ID NO: 3176547 - DNA, 25 bp, Homo sapien
gacctcaggcatgcgctactgtgcc

SEQ ID NO: 3176548 - DNA, 25 bp, Homo sapien
gagacagtgtctcacagagttgccc

SEQ ID NO: 3176549 - DNA, 25 bp, Homo sapien
gtgcgcctcttgagaatcctcccaa

SEQ ID NO: 3176550 - DNA, 25 bp, Homo sapien
gccagagccagtacgccgaccttgt

SEQ ID NO: 3176551 - DNA, 25 bp, Homo sapien
agtacgccgaccttgtgcgcctctt

SEQ ID NO: 3176552 - DNA, 25 bp, Homo sapien
gaccttgtgcgcctcttgagaatcc

SEQ ID NO: 3176553 - DNA, 25 bp, Homo sapien
ccagaactgacacttatttggtgcc

SEQ ID NO: 3176554 - DNA, 25 bp, Homo sapien
aaccaggagtttggctgtgaaggaa

SEQ ID NO: 3176555 - DNA, 25 bp, Homo sapien
ggtgccatagagattctagcagatg

SEQ ID NO: 3176556 - DNA, 25 bp, Homo sapien
cagacacttgtaggaagcagggaaa

SEQ ID NO: 3176557 - DNA, 25 bp, Homo sapien
cttccacaaagggaggctgccggct

SEQ ID NO: 3176558 - DNA, 25 bp, Homo sapien
aggctgccggctgacgaattggtcc

SEQ ID NO: 3176559 - DNA, 25 bp, Homo sapien
tccacaaagggaggctgccggctga

SEQ ID NO: 3176560 - DNA, 25 bp, Homo sapien
ccggctgacgaattggtcctcacag

SEQ ID NO: 3176561 - DNA, 25 bp, Homo sapien
cactcggtatttgtcagttggcaca

SEQ ID NO: 3176562 - DNA, 25 bp, Homo sapien
gaaagggtcattaacatgggagcca

SEQ ID NO: 3176563 - DNA, 25 bp, Homo sapien
tgcaggactgcattacaactttaag

SEQ ID NO: 3176564 - DNA, 25 bp, Homo sapien
aattccaagaacaagacctgccgta

SEQ ID NO: 3176565 - DNA, 25 bp, Homo sapien
ctagaagcagataatattctataag

SEQ ID NO: 3176566 - DNA, 25 bp, Homo sapien
aatatgctttatattgatatttagc

SEQ ID NO: 3176567 - DNA, 25 bp, Homo sapien
atgctttatattgatatttagcaac

SEQ ID NO: 3176568 - DNA, 25 bp, Homo sapien
ggaataatatgctttatattgatat

SEQ ID NO: 3176569 - DNA, 25 bp, Homo sapien
tggaataatatgctttatattgata

SEQ ID NO: 3176570 - DNA, 25 bp, Homo sapien
tggccacatgccaacaagaagcttg

SEQ ID NO: 3176571 - DNA, 25 bp, Homo sapien
gcatggacccatagcagatcctgga

SEQ ID NO: 3176572 - DNA, 25 bp, Homo sapien
ggcagaccttatagaccacacatga

SEQ ID NO: 3176573 - DNA, 25 bp, Homo sapien
aaaggcagtatagccggcccaagaa

SEQ ID NO: 3176574 - DNA, 25 bp, Homo sapien
ccaagttagaaatctgggacaccag

SEQ ID NO: 3176575 - DNA, 25 bp, Homo sapien
ttcctaagtgtcaggtcaccaagtt

SEQ ID NO: 3176576 - DNA, 25 bp, Homo sapien
catgtgcatttagaacgaaacttcc

SEQ ID NO: 3176577 - DNA, 25 bp, Homo sapien
caggtaagtgatgggtgagaccctt

SEQ ID NO: 3176578 - DNA, 25 bp, Homo sapien
gatttccttctccagtctgattttc

SEQ ID NO: 3176579 - DNA, 25 bp, Homo sapien
ccttctccagtctgattttcttgtt

SEQ ID NO: 3176580 - DNA, 25 bp, Homo sapien
tgattttcttgttatcacagtctct

SEQ ID NO: 3176581 - DNA, 25 bp, Homo sapien
tttcttgttatcacagtctctttct

SEQ ID NO: 3176582 - DNA, 25 bp, Homo sapien
ttttagaagattctttgtgggagga

SEQ ID NO: 3176583 - DNA, 25 bp, Homo sapien
ttagaagattctttgtgggaggatg

SEQ ID NO: 3176584 - DNA, 25 bp, Homo sapien
tagaagattctttgtgggaggatga

SEQ ID NO: 3176585 - DNA, 25 bp, Homo sapien
gaagattctttgtgggaggatgaag

SEQ ID NO: 3176586 - DNA, 25 bp, Homo sapien
aggtggttgctaatctctatactca

SEQ ID NO: 3176587 - DNA, 25 bp, Homo sapien
tgagtttattaatccactgattcta

SEQ ID NO: 3176588 - DNA, 25 bp, Homo sapien
ttctttgctatgtcaagacccaaga

SEQ ID NO: 3176589 - DNA, 25 bp, Homo sapien
cccaagaagtgttgatcaccgtaga

SEQ ID NO: 3176590 - DNA, 25 bp, Homo sapien
tccttctttgaggactgtgaggagg

SEQ ID NO: 3176591 - DNA, 25 bp, Homo sapien
gagcatttccttctttgaggactgt

SEQ ID NO: 3176592 - DNA, 25 bp, Homo sapien
ctgggaggacgaggacacgggtggc

SEQ ID NO: 3176593 - DNA, 25 bp, Homo sapien
gaggacacgggtggcggggggagca

SEQ ID NO: 3176594 - DNA, 25 bp, Homo sapien
gctcttggtactgctggcacttttg

SEQ ID NO: 3176595 - DNA, 25 bp, Homo sapien
acaggtgtctgcttcccgccttgac

SEQ ID NO: 3176596 - DNA, 25 bp, Homo sapien
cttgacctcttaagtgcaggcttgg

SEQ ID NO: 3176597 - DNA, 25 bp, Homo sapien
gcacttttgggagggtcctggccac

SEQ ID NO: 3176598 - DNA, 25 bp, Homo sapien
ttgtcaaacttcacttgaggcttcc

SEQ ID NO: 3176599 - DNA, 25 bp, Homo sapien
gatttgcagtatctccggaagaacc

SEQ ID NO: 3176600 - DNA, 25 bp, Homo sapien
cctggtttagagttaccatttggca

SEQ ID NO: 3176601 - DNA, 25 bp, Homo sapien
cctcatgtgaaggtctgcttgttgt

SEQ ID NO: 3176602 - DNA, 25 bp, Homo sapien
ttgcctccctcatgtgaaggtctgc

SEQ ID NO: 3176603 - DNA, 25 bp, Homo sapien
tccctcatgtgaaggtctgcttgtt

SEQ ID NO: 3176604 - DNA, 25 bp, Homo sapien
cctccctcatgtgaaggtctgcttg

SEQ ID NO: 3176605 - DNA, 25 bp, Homo sapien
cgcactcaatgaaggacaagacggc

SEQ ID NO: 3176606 - DNA, 25 bp, Homo sapien
gactctgtggcaattccgcactcaa

SEQ ID NO: 3176607 - DNA, 25 bp, Homo sapien
gacttggatgactggctttcagact

SEQ ID NO: 3176608 - DNA, 25 bp, Homo sapien
tagacagagtaagctgacttggatg

SEQ ID NO: 3176609 - DNA, 25 bp, Homo sapien
gcatctgagaaggattttaatgaca

SEQ ID NO: 3176610 - DNA, 25 bp, Homo sapien
tggcatctgagaaggattttaatga

SEQ ID NO: 3176611 - DNA, 25 bp, Homo sapien
ttctcttgtgttggcgctgtggcat

SEQ ID NO: 3176612 - DNA, 25 bp, Homo sapien
tctcttgtgttggcgctgtggcatc

SEQ ID NO: 3176613 - DNA, 25 bp, Homo sapien
tttttacaacgaaacatcgccatgt

SEQ ID NO: 3176614 - DNA, 25 bp, Homo sapien
tgcctgggcgactttggaagaactc

SEQ ID NO: 3176615 - DNA, 25 bp, Homo sapien
taagagtacgagaatactttattgc

SEQ ID NO: 3176616 - DNA, 25 bp, Homo sapien
tcgccatgttcaaaatggactggca

SEQ ID NO: 3176617 - DNA, 25 bp, Homo sapien
tcttggctgaatatctggacctgca

SEQ ID NO: 3176618 - DNA, 25 bp, Homo sapien
cacaataggtgctagaagtaggctc

SEQ ID NO: 3176619 - DNA, 25 bp, Homo sapien
catgatgttacacctgccgtttggg

SEQ ID NO: 3176620 - DNA, 25 bp, Homo sapien
gatgatggttcagcggcagtagcct

SEQ ID NO: 3176621 - DNA, 25 bp, Homo sapien
ggcaggagaaggcattggggaaaga

SEQ ID NO: 3176622 - DNA, 25 bp, Homo sapien
ggaaagaggggatggtgtgcctgtg

SEQ ID NO: 3176623 - DNA, 25 bp, Homo sapien
gggaaagaggggatggtgtgcctgt

SEQ ID NO: 3176624 - DNA, 25 bp, Homo sapien
aggagaaggcattggggaaagaggg

SEQ ID NO: 3176625 - DNA, 25 bp, Homo sapien
gccagcacttgactgggaccctacg

SEQ ID NO: 3176626 - DNA, 25 bp, Homo sapien
cagcacttgactgggaccctacgga

SEQ ID NO: 3176627 - DNA, 25 bp, Homo sapien
actgccagcacttgactgggaccct

SEQ ID NO: 3176628 - DNA, 25 bp, Homo sapien
tgccagcacttgactgggaccctac

SEQ ID NO: 3176629 - DNA, 25 bp, Homo sapien
caaaggcggtaagaacatgggatgt

SEQ ID NO: 3176630 - DNA, 25 bp, Homo sapien
aaaggtcaaaggcggtaagaacatg

SEQ ID NO: 3176631 - DNA, 25 bp, Homo sapien
gtcaaaggcggtaagaacatgggat

SEQ ID NO: 3176632 - DNA, 25 bp, Homo sapien
tattcttcctcgtgagggcctcggc

SEQ ID NO: 3176633 - DNA, 25 bp, Homo sapien
aactgctgttgagggccaaggtgca

SEQ ID NO: 3176634 - DNA, 25 bp, Homo sapien
caggtccaccaaactgctgttgagg

SEQ ID NO: 3176635 - DNA, 25 bp, Homo sapien
catttgtgctgagccgagcaaagaa

SEQ ID NO: 3176636 - DNA, 25 bp, Homo sapien
ccaaggtgcacacatttgtgctgag

SEQ ID NO: 3176637 - DNA, 25 bp, Homo sapien
tgaaaaccctgtcgtgtatagtgca

SEQ ID NO: 3176638 - DNA, 25 bp, Homo sapien
gctgaaaaccctgtcgtgtatagtg

SEQ ID NO: 3176639 - DNA, 25 bp, Homo sapien
gaaaaccctgtcgtgtatagtgcac

SEQ ID NO: 3176640 - DNA, 25 bp, Homo sapien
ctgctgaaaaccctgtcgtgtatag

SEQ ID NO: 3176641 - DNA, 25 bp, Homo sapien
taaccacagtgtccaaccaatgatc

SEQ ID NO: 3176642 - DNA, 25 bp, Homo sapien
caatgtgcaaaaatagttcccaagg

SEQ ID NO: 3176643 - DNA, 25 bp, Homo sapien
aaatgtcctggccatctcgtggtgc

SEQ ID NO: 3176644 - DNA, 25 bp, Homo sapien
tctgggaatggactagcgtggctac

SEQ ID NO: 3176645 - DNA, 25 bp, Homo sapien
cagcacagtaatgagaagtcagagc

SEQ ID NO: 3176646 - DNA, 25 bp, Homo sapien
cgtgggctgactttcagcacagtaa

SEQ ID NO: 3176647 - DNA, 25 bp, Homo sapien
ctccgacgtgggctgactttcagca

SEQ ID NO: 3176648 - DNA, 25 bp, Homo sapien
gctgactttcagcacagtaatgaga

SEQ ID NO: 3176649 - DNA, 25 bp, Homo sapien
gaaataaagcctgattctggtgcct

SEQ ID NO: 3176650 - DNA, 25 bp, Homo sapien
ggcaataacttacggagggccacag

SEQ ID NO: 3176651 - DNA, 25 bp, Homo sapien
aaaagcactttagccatctggtcag

SEQ ID NO: 3176652 - DNA, 25 bp, Homo sapien
tagtgacaaccaaagaacagtctgg

SEQ ID NO: 3176653 - DNA, 25 bp, Homo sapien
ctagggaatgataggacaaaagggg

SEQ ID NO: 3176654 - DNA, 25 bp, Homo sapien
gtggcttgccaacagaacacgcaca

SEQ ID NO: 3176655 - DNA, 25 bp, Homo sapien
gaacacaacccttcacaattgacag

SEQ ID NO: 3176656 - DNA, 25 bp, Homo sapien
ccttcacaattgacaggtggcttgt

SEQ ID NO: 3176657 - DNA, 25 bp, Homo sapien
gcacaatctgcatagaacctgccat

SEQ ID NO: 3176658 - DNA, 25 bp, Homo sapien
caatctgttttagagctggctgaga

SEQ ID NO: 3176659 - DNA, 25 bp, Homo sapien
taacaatacatgtcgatggcctgaa

SEQ ID NO: 3176660 - DNA, 25 bp, Homo sapien
catggcgaaacaaacacagcggtat

SEQ ID NO: 3176661 - DNA, 25 bp, Homo sapien
gatttgggacacatgcgtgcgtaca

SEQ ID NO: 3176662 - DNA, 25 bp, Homo sapien
aattctctcacagatcacatattct

SEQ ID NO: 3176663 - DNA, 25 bp, Homo sapien
aacaaaagatctgtggcacattgtc

SEQ ID NO: 3176664 - DNA, 25 bp, Homo sapien
gagaacaaaagatctgtggcacatt

SEQ ID NO: 3176665 - DNA, 25 bp, Homo sapien
cagagaacaaaagatctgtggcaca

SEQ ID NO: 3176666 - DNA, 25 bp, Homo sapien
cctaaccatggacagattacagttg

SEQ ID NO: 3176667 - DNA, 25 bp, Homo sapien
gtttaagactggctgcagattacat

SEQ ID NO: 3176668 - DNA, 25 bp, Homo sapien
ggtgttgcatccgttctgaacaggc

SEQ ID NO: 3176669 - DNA, 25 bp, Homo sapien
tcttgggctcacgtgtcatctgtaa

SEQ ID NO: 3176670 - DNA, 25 bp, Homo sapien
caaaaaatctttgaccaaaacagcg

SEQ ID NO: 3176671 - DNA, 25 bp, Homo sapien
gaccaaaacagcgtcctgaagtgtt

SEQ ID NO: 3176672 - DNA, 25 bp, Homo sapien
tttctgtattgtcccgtaagacctg

SEQ ID NO: 3176673 - DNA, 25 bp, Homo sapien
tggtgcttttgaagtcctacacaaa

SEQ ID NO: 3176674 - DNA, 25 bp, Homo sapien
gacagcactcacttcactataaaag

SEQ ID NO: 3176675 - DNA, 25 bp, Homo sapien
ttattagtcattcctgttctgtgaa

SEQ ID NO: 3176676 - DNA, 25 bp, Homo sapien
caatctgttaggtgtaaaatggtat

SEQ ID NO: 3176677 - DNA, 25 bp, Homo sapien
cttatgaatgtgacagcactcactt

SEQ ID NO: 3176678 - DNA, 25 bp, Homo sapien
tatctaacatactaagttggtaccc

SEQ ID NO: 3176679 - DNA, 25 bp, Homo sapien
tgtgggcaatcagaagcatagcctt

SEQ ID NO: 3176680 - DNA, 25 bp, Homo sapien
catagccttgaaggacctgacagca

SEQ ID NO: 3176681 - DNA, 25 bp, Homo sapien
cgcactccagcggtgaaacaagagt

SEQ ID NO: 3176682 - DNA, 25 bp, Homo sapien
gacttctacaatagtgtggaaagcc

SEQ ID NO: 3176683 - DNA, 25 bp, Homo sapien
tatttgcagtgcagtttggcacctc

SEQ ID NO: 3176684 - DNA, 25 bp, Homo sapien
tttattgtagttcaccgctggtcag

SEQ ID NO: 3176685 - DNA, 25 bp, Homo sapien
cgttgatccatccagccctaaagtt

SEQ ID NO: 3176686 - DNA, 25 bp, Homo sapien
tacatgactctaatgtgggcagtct

SEQ ID NO: 3176687 - DNA, 25 bp, Homo sapien
tattctggtgcccaattgagagacc

SEQ ID NO: 3176688 - DNA, 25 bp, Homo sapien
tgaaccagaggaaatattgaacaag

SEQ ID NO: 3176689 - DNA, 25 bp, Homo sapien
tattgattagttcaagcccatcacg

SEQ ID NO: 3176690 - DNA, 25 bp, Homo sapien
ttaacacaaggatacataagagact

SEQ ID NO: 3176691 - DNA, 25 bp, Homo sapien
ggacaccaaaagacctagctgggct

SEQ ID NO: 3176692 - DNA, 25 bp, Homo sapien
cagtttgaattgctaggacaccaaa

SEQ ID NO: 3176693 - DNA, 25 bp, Homo sapien
taaagatgttaacgtcaggcagtgg

SEQ ID NO: 3176694 - DNA, 25 bp, Homo sapien
tgtcacactcaaggtgagattgcct

SEQ ID NO: 3176695 - DNA, 25 bp, Homo sapien
tctcaggcctcttcagtgtaatatg

SEQ ID NO: 3176696 - DNA, 25 bp, Homo sapien
gaaaaggcaacaacagcaccagcaa

SEQ ID NO: 3176697 - DNA, 25 bp, Homo sapien
gaacagatcctcaattagtgatggt

SEQ ID NO: 3176698 - DNA, 25 bp, Homo sapien
attgcacccaaccttttgcccattt

SEQ ID NO: 3176699 - DNA, 25 bp, Homo sapien
tacagtcattcaccagccattgcac

SEQ ID NO: 3176700 - DNA, 25 bp, Homo sapien
gactacagtcattcaccagccattg

SEQ ID NO: 3176701 - DNA, 25 bp, Homo sapien
gggactacagtcattcaccagccat

SEQ ID NO: 3176702 - DNA, 25 bp, Homo sapien
ggatactgaagaagggctatacttc

SEQ ID NO: 3176703 - DNA, 25 bp, Homo sapien
tgcagggatcctgcaaccagtcctc

SEQ ID NO: 3176704 - DNA, 25 bp, Homo sapien
taccataccagtttatataagggac

SEQ ID NO: 3176705 - DNA, 25 bp, Homo sapien
cagtcctctgaggatactgaagaag

SEQ ID NO: 3176706 - DNA, 25 bp, Homo sapien
gctgtgtgtcaaatgggaggagcag

SEQ ID NO: 3176707 - DNA, 25 bp, Homo sapien
gttgactccggccatcaccttcact

SEQ ID NO: 3176708 - DNA, 25 bp, Homo sapien
actccggccatcaccttcactacct

SEQ ID NO: 3176709 - DNA, 25 bp, Homo sapien
ctgtgtgtcaaatgggaggagcaga

SEQ ID NO: 3176710 - DNA, 25 bp, Homo sapien
tagttgaggtcaatgaagcggtcat

SEQ ID NO: 3176711 - DNA, 25 bp, Homo sapien
gcggtcattgatggcgacaatatcc

SEQ ID NO: 3176712 - DNA, 25 bp, Homo sapien
tcaatgaagcggtcattgatggcga

SEQ ID NO: 3176713 - DNA, 25 bp, Homo sapien
aatgaagcggtcattgatggcgaca

SEQ ID NO: 3176714 - DNA, 25 bp, Homo sapien
cggtgcatggaatttgccataggta

SEQ ID NO: 3176715 - DNA, 25 bp, Homo sapien
tgcatggaatttgccataggtaaaa

SEQ ID NO: 3176716 - DNA, 25 bp, Homo sapien
tacggtgcatggaatttgccatagg

SEQ ID NO: 3176717 - DNA, 25 bp, Homo sapien
ctttacggtgcatggaatttgccat

SEQ ID NO: 3176718 - DNA, 25 bp, Homo sapien
ctgatgacaagcttcccattctcag

SEQ ID NO: 3176719 - DNA, 25 bp, Homo sapien
tgatgacaagcttcccattctcagc

SEQ ID NO: 3176720 - DNA, 25 bp, Homo sapien
ctggaagatggtaatgggatttcca

SEQ ID NO: 3176721 - DNA, 25 bp, Homo sapien
aacgtactcagcgtcagcattgccc

SEQ ID NO: 3176722 - DNA, 25 bp, Homo sapien
tgaccgacaccttggcagtggtgac

SEQ ID NO: 3176723 - DNA, 25 bp, Homo sapien
gcaggtcaggttaatgaccgacacc

SEQ ID NO: 3176724 - DNA, 25 bp, Homo sapien
taacatgggggcgtcaacaaagtgg

SEQ ID NO: 3176725 - DNA, 25 bp, Homo sapien
cttgagggggccctccgatgtctgc

SEQ ID NO: 3176726 - DNA, 25 bp, Homo sapien
agggggccctccgatgtctgcttca

SEQ ID NO: 3176727 - DNA, 25 bp, Homo sapien
gggggccctccgatgtctgcttcac

SEQ ID NO: 3176728 - DNA, 25 bp, Homo sapien
tgagggggccctccgatgtctgctt

SEQ ID NO: 3176729 - DNA, 25 bp, Homo sapien
aaattcatcgctataccaagaaatg

SEQ ID NO: 3176730 - DNA, 25 bp, Homo sapien
tagccaaattcatcgctataccaag

SEQ ID NO: 3176731 - DNA, 25 bp, Homo sapien
agccaaattcatcgctataccaaga

SEQ ID NO: 3176732 - DNA, 25 bp, Homo sapien
ccaaattcatcgctataccaagaaa

SEQ ID NO: 3176733 - DNA, 25 bp, Homo sapien
gggctggtggtctggtggtcttcct

SEQ ID NO: 3176734 - DNA, 25 bp, Homo sapien
gctggtggtctggtggtcttccttt

SEQ ID NO: 3176735 - DNA, 25 bp, Homo sapien
tggtctggtggtcttccttttggag

SEQ ID NO: 3176736 - DNA, 25 bp, Homo sapien
tggtggtctggtggtcttccttttg

SEQ ID NO: 3176737 - DNA, 25 bp, Homo sapien
ccgtcttgggtctccggtgtgcgga

SEQ ID NO: 3176738 - DNA, 25 bp, Homo sapien
tgtgcggaggaaattcgagccctcg

SEQ ID NO: 3176739 - DNA, 25 bp, Homo sapien
gagcaaccttccacggcttttgtcg

SEQ ID NO: 3176740 - DNA, 25 bp, Homo sapien
agtcgcaacaccgtcccgtcttggg

SEQ ID NO: 3176741 - DNA, 25 bp, Homo sapien
tgggacctgctctctggttgcaagc

SEQ ID NO: 3176742 - DNA, 25 bp, Homo sapien
gaaccttagcaactcttctgggacc

SEQ ID NO: 3176743 - DNA, 25 bp, Homo sapien
gcggtgttcaggctctttaagtacg

SEQ ID NO: 3176744 - DNA, 25 bp, Homo sapien
atagtggtcttgctggcggtgttca

SEQ ID NO: 3176745 - DNA, 25 bp, Homo sapien
tcaagccatcgcttccaggaagaaa

SEQ ID NO: 3176746 - DNA, 25 bp, Homo sapien
caatagttgcacttttagctgggct

SEQ ID NO: 3176747 - DNA, 25 bp, Homo sapien
actggattagtttcctttaagcagc

SEQ ID NO: 3176748 - DNA, 25 bp, Homo sapien
gggctttcagccatcctgctaacaa

SEQ ID NO: 3176749 - DNA, 25 bp, Homo sapien
tggctggaggaagtgttctcaaagt

SEQ ID NO: 3176750 - DNA, 25 bp, Homo sapien
ggctggaggaagtgttctcaaagtg

SEQ ID NO: 3176751 - DNA, 25 bp, Homo sapien
aggcaacctaagcaggttgctactg

SEQ ID NO: 3176752 - DNA, 25 bp, Homo sapien
tggaaggcaacctaagcaggttgct

SEQ ID NO: 3176753 - DNA, 25 bp, Homo sapien
cagcgtggaaggcaacctaagcagg

SEQ ID NO: 3176754 - DNA, 25 bp, Homo sapien
gcgtggaaggcaacctaagcaggtt

SEQ ID NO: 3176755 - DNA, 25 bp, Homo sapien
cttttatcatcaacaagtcattcat

SEQ ID NO: 3176756 - DNA, 25 bp, Homo sapien
agcagctcctattgccttaggtggg

SEQ ID NO: 3176757 - DNA, 25 bp, Homo sapien
ggcagaagcagctcctattgcctta

SEQ ID NO: 3176758 - DNA, 25 bp, Homo sapien
ctattgccttaggtggggactccat

SEQ ID NO: 3176759 - DNA, 25 bp, Homo sapien
ctcctattgccttaggtggggactc

SEQ ID NO: 3176760 - DNA, 25 bp, Homo sapien
tctagcctttctaccacagccagga

SEQ ID NO: 3176761 - DNA, 25 bp, Homo sapien
ccaggaatggtaagaggaaggcact

SEQ ID NO: 3176762 - DNA, 25 bp, Homo sapien
aattccatactgtgcagcatgaggt

SEQ ID NO: 3176763 - DNA, 25 bp, Homo sapien
cagcagattctcagtagtaattcca

SEQ ID NO: 3176764 - DNA, 25 bp, Homo sapien
catctcgttagggtctccatgctct

SEQ ID NO: 3176765 - DNA, 25 bp, Homo sapien
gctcttcataggaggtgctgtcctc

SEQ ID NO: 3176766 - DNA, 25 bp, Homo sapien
taacgtatcaccagaggtggctgca

SEQ ID NO: 3176767 - DNA, 25 bp, Homo sapien
tccatgctcttcataggaggtgctg

SEQ ID NO: 3176768 - DNA, 25 bp, Homo sapien
atggattaggaaatagattgcagaa

SEQ ID NO: 3176769 - DNA, 25 bp, Homo sapien
aatggattaggaaatagattgcaga

SEQ ID NO: 3176770 - DNA, 25 bp, Homo sapien
ctcctaggtcctggttgctgatgca

SEQ ID NO: 3176771 - DNA, 25 bp, Homo sapien
tgctgatgcatgctggttcctcttc

SEQ ID NO: 3176772 - DNA, 25 bp, Homo sapien
aagctctccacttagcactcctagg

SEQ ID NO: 3176773 - DNA, 25 bp, Homo sapien
caagtgatttgaagggaagagccaa

SEQ ID NO: 3176774 - DNA, 25 bp, Homo sapien
taacccaaaggagtctaatcctcac

SEQ ID NO: 3176775 - DNA, 25 bp, Homo sapien
tgtggcacttaacacaagtgactcc

SEQ ID NO: 3176776 - DNA, 25 bp, Homo sapien
ttcctttacgttttgattatgtggc

SEQ ID NO: 3176777 - DNA, 25 bp, Homo sapien
gttacttgtaactatgtcaacaaca

SEQ ID NO: 3176778 - DNA, 25 bp, Homo sapien
tcagtcatcaaaactatcctgtatt

SEQ ID NO: 3176779 - DNA, 25 bp, Homo sapien
agtcatcaaaactatcctgtattac

SEQ ID NO: 3176780 - DNA, 25 bp, Homo sapien
cagtcatcaaaactatcctgtatta

SEQ ID NO: 3176781 - DNA, 25 bp, Homo sapien
aaagttccccatttacacaggccat

SEQ ID NO: 3176782 - DNA, 25 bp, Homo sapien
taaagttccccatttacacaggcca

SEQ ID NO: 3176783 - DNA, 25 bp, Homo sapien
acacccatcccaggattgctgatgg

SEQ ID NO: 3176784 - DNA, 25 bp, Homo sapien
atgagccccgaaacacccatcccag

SEQ ID NO: 3176785 - DNA, 25 bp, Homo sapien
tcagggccccatttatagctcaact

SEQ ID NO: 3176786 - DNA, 25 bp, Homo sapien
gaactcctgttgctccttatatgca

SEQ ID NO: 3176787 - DNA, 25 bp, Homo sapien
actggcttactcctgtcatcctcag

SEQ ID NO: 3176788 - DNA, 25 bp, Homo sapien
cacctcctagtgttggcatacctgg

SEQ ID NO: 3176789 - DNA, 25 bp, Homo sapien
aactctcaatgggtaggtttcatcc

SEQ ID NO: 3176790 - DNA, 25 bp, Homo sapien
tctgtttcctgagagatacctcaca

SEQ ID NO: 3176791 - DNA, 25 bp, Homo sapien
cacagggaagctagaggtggataca

SEQ ID NO: 3176792 - DNA, 25 bp, Homo sapien
gagaattgagagaatgtacccacaa

SEQ ID NO: 3176793 - DNA, 25 bp, Homo sapien
tttacacgtgaggaatttaaactga

SEQ ID NO: 3176794 - DNA, 25 bp, Homo sapien
cagcattatgctcaaaaccaaagcg

SEQ ID NO: 3176795 - DNA, 25 bp, Homo sapien
tagcagttctacttccgcagtctct

SEQ ID NO: 3176796 - DNA, 25 bp, Homo sapien
gtaacacattgattccacaaaagaa

SEQ ID NO: 3176797 - DNA, 25 bp, Homo sapien
ggactgggtgccaaggttcatacct

SEQ ID NO: 3176798 - DNA, 25 bp, Homo sapien
ccaaatgcaagggactgggtgccaa

SEQ ID NO: 3176799 - DNA, 25 bp, Homo sapien
gttcatacctttgtggtagactgca

SEQ ID NO: 3176800 - DNA, 25 bp, Homo sapien
tggtagactgcagcaaccgagaaga

SEQ ID NO: 3176801 - DNA, 25 bp, Homo sapien
cgtgctgattacaggagctgggcat

SEQ ID NO: 3176802 - DNA, 25 bp, Homo sapien
gatcgagctaccctctaaaagcagt

SEQ ID NO: 3176803 - DNA, 25 bp, Homo sapien
tactgatcgtctgctccctagagtc

SEQ ID NO: 3176804 - DNA, 25 bp, Homo sapien
cgctcgcagccacaaaagggatgaa

SEQ ID NO: 3176805 - DNA, 25 bp, Homo sapien
gtagccccaagtccttttcctgatc

SEQ ID NO: 3176806 - DNA, 25 bp, Homo sapien
tagccccaagtccttttcctgatct

SEQ ID NO: 3176807 - DNA, 25 bp, Homo sapien
agtagccccaagtccttttcctgat

SEQ ID NO: 3176808 - DNA, 25 bp, Homo sapien
aggaaaagcatctcgtaaccacagc

SEQ ID NO: 3176809 - DNA, 25 bp, Homo sapien
ggaacttcttggctaggctcttgtg

SEQ ID NO: 3176810 - DNA, 25 bp, Homo sapien
taatttgaccacttgagtctcccgg

SEQ ID NO: 3176811 - DNA, 25 bp, Homo sapien
tctcccggattcgaggattataaag

SEQ ID NO: 3176812 - DNA, 25 bp, Homo sapien
ttaaaatttggacagtcccagcatt

SEQ ID NO: 3176813 - DNA, 25 bp, Homo sapien
gacagtcccagcatttggaccaggg

SEQ ID NO: 3176814 - DNA, 25 bp, Homo sapien
aaatttggacagtcccagcatttgg

SEQ ID NO: 3176815 - DNA, 25 bp, Homo sapien
tttggacagtcccagcatttggacc

SEQ ID NO: 3176816 - DNA, 25 bp, Homo sapien
tctgatatcccttactatcggacca

SEQ ID NO: 3176817 - DNA, 25 bp, Homo sapien
aagttctgatatcccttactatcgg

SEQ ID NO: 3176818 - DNA, 25 bp, Homo sapien
taataagttctgatatcccttacta

SEQ ID NO: 3176819 - DNA, 25 bp, Homo sapien
tgatatcccttactatcggaccagc

SEQ ID NO: 3176820 - DNA, 25 bp, Homo sapien
ctcgtaactttctctctgcgtaatg

SEQ ID NO: 3176821 - DNA, 25 bp, Homo sapien
tttctctctgcgtaatggcgcttta

SEQ ID NO: 3176822 - DNA, 25 bp, Homo sapien
taactttctctctgcgtaatggcgc

SEQ ID NO: 3176823 - DNA, 25 bp, Homo sapien
tctctctgcgtaatggcgctttacg

SEQ ID NO: 3176824 - DNA, 25 bp, Homo sapien
tgcctggggaaaccgcggccacgaa

SEQ ID NO: 3176825 - DNA, 25 bp, Homo sapien
cagcacgtgacgccgaagcctccag

SEQ ID NO: 3176826 - DNA, 25 bp, Homo sapien
cccagtgcatcgagaaaaatccaga

SEQ ID NO: 3176827 - DNA, 25 bp, Homo sapien
gacctgtctgccgttgggttcccga

SEQ ID NO: 3176828 - DNA, 25 bp, Homo sapien
ggtcgctcttagttggtgcctccgc

SEQ ID NO: 3176829 - DNA, 25 bp, Homo sapien
ttcccgaacgggagtagctgtgcct

SEQ ID NO: 3176830 - DNA, 25 bp, Homo sapien
gagagagagacaccgcggctaaagc

SEQ ID NO: 3176831 - DNA, 25 bp, Homo sapien
gagagacaccgcggctaaagccttt

SEQ ID NO: 3176832 - DNA, 25 bp, Homo sapien
gagagagacaccgcggctaaagcct

SEQ ID NO: 3176833 - DNA, 25 bp, Homo sapien
agagagagagacaccgcggctaaag

SEQ ID NO: 3176834 - DNA, 25 bp, Homo sapien
gaacgcctggatgccgcggcagcgc

SEQ ID NO: 3176835 - DNA, 25 bp, Homo sapien
tgaacgcctggatgccgcggcagcg

SEQ ID NO: 3176836 - DNA, 25 bp, Homo sapien
ctgaacgcctggatgccgcggcagc

SEQ ID NO: 3176837 - DNA, 25 bp, Homo sapien
aacgcctggatgccgcggcagcgcg

SEQ ID NO: 3176838 - DNA, 25 bp, Homo sapien
attaagatgaaaccaagaagatgaa

SEQ ID NO: 3176839 - DNA, 25 bp, Homo sapien
atgaaaccaagaagatgaaaacgag

SEQ ID NO: 3176840 - DNA, 25 bp, Homo sapien
ggtattaagatgaaaccaagaagat

SEQ ID NO: 3176841 - DNA, 25 bp, Homo sapien
tgaaaccaagaagatgaaaacgagt

SEQ ID NO: 3176842 - DNA, 25 bp, Homo sapien
tccgagccttattgtgagaattttc

SEQ ID NO: 3176843 - DNA, 25 bp, Homo sapien
tctttggaaccattagaaccagaca

SEQ ID NO: 3176844 - DNA, 25 bp, Homo sapien
cagagactgcagtgtattccacagg

SEQ ID NO: 3176845 - DNA, 25 bp, Homo sapien
tgaacctgggtaaggagacgtccga

SEQ ID NO: 3176846 - DNA, 25 bp, Homo sapien
tcatcctgttcttagtaacctggag

SEQ ID NO: 3176847 - DNA, 25 bp, Homo sapien
ctatgaatttagtgagagccccttc

SEQ ID NO: 3176848 - DNA, 25 bp, Homo sapien
tatacttgaaactcgctgagagtgg

SEQ ID NO: 3176849 - DNA, 25 bp, Homo sapien
aaatgttaatcaatgcggcacttct

SEQ ID NO: 3176850 - DNA, 25 bp, Homo sapien
caggaaggactaccagcagaagagc

SEQ ID NO: 3176851 - DNA, 25 bp, Homo sapien
cacaaagcagtgaatttgccccaca

SEQ ID NO: 3176852 - DNA, 25 bp, Homo sapien
caagaaggtctattagcaagaagga

SEQ ID NO: 3176853 - DNA, 25 bp, Homo sapien
gagctcctacctcatgctacaagaa

SEQ ID NO: 3176854 - DNA, 25 bp, Homo sapien
attttcaatctcatacaggccattc

SEQ ID NO: 3176855 - DNA, 25 bp, Homo sapien
tctcaacatgcccatccttttcgtt

SEQ ID NO: 3176856 - DNA, 25 bp, Homo sapien
caacatgcccatccttttcgttaaa

SEQ ID NO: 3176857 - DNA, 25 bp, Homo sapien
tctcatacaggccattcttgctctt

SEQ ID NO: 3176858 - DNA, 25 bp, Homo sapien
tgcagcgtgatttgggccccatcgc

SEQ ID NO: 3176859 - DNA, 25 bp, Homo sapien
cagcgtgatttgggccccatcgccc

SEQ ID NO: 3176860 - DNA, 25 bp, Homo sapien
gcagcgtgatttgggccccatcgcc

SEQ ID NO: 3176861 - DNA, 25 bp, Homo sapien
ctgcagcgtgatttgggccccatcg

SEQ ID NO: 3176862 - DNA, 25 bp, Homo sapien
gaccgggtgagaatgggtgcctctt

SEQ ID NO: 3176863 - DNA, 25 bp, Homo sapien
aaagtaacaatatgaggatatttgc

SEQ ID NO: 3176864 - DNA, 25 bp, Homo sapien
gtaacaatatgaggatatttgcatt

SEQ ID NO: 3176865 - DNA, 25 bp, Homo sapien
tattattatatctcagatcaaagaa

SEQ ID NO: 3176866 - DNA, 25 bp, Homo sapien
acctgccccggagcttctgaaaaag

SEQ ID NO: 3176867 - DNA, 25 bp, Homo sapien
ctctaggagagatgcctgggaatcc

SEQ ID NO: 3176868 - DNA, 25 bp, Homo sapien
tgaaaaagtttatgaaatcctgaac

SEQ ID NO: 3176869 - DNA, 25 bp, Homo sapien
aatcctgaacaacgctgttttgaat

SEQ ID NO: 3176870 - DNA, 25 bp, Homo sapien
ttgaacctggacaatctggttccag

SEQ ID NO: 3176871 - DNA, 25 bp, Homo sapien
ctatactatctacttaaactgaaca

SEQ ID NO: 3176872 - DNA, 25 bp, Homo sapien
tactatctacttaaactgaacaagc

SEQ ID NO: 3176873 - DNA, 25 bp, Homo sapien
actatctacttaaactgaacaagca

SEQ ID NO: 3176874 - DNA, 25 bp, Homo sapien
gctcatagtctagcagtggctctaa

SEQ ID NO: 3176875 - DNA, 25 bp, Homo sapien
tcctcccatgaaagagctcatagtc

SEQ ID NO: 3176876 - DNA, 25 bp, Homo sapien
taattagtacaagagggcacatctg

SEQ ID NO: 3176877 - DNA, 25 bp, Homo sapien
tcaagaaactgaatgttcatatggg

SEQ ID NO: 3176878 - DNA, 25 bp, Homo sapien
acaaattgtaagatatgcttcccag

SEQ ID NO: 3176879 - DNA, 25 bp, Homo sapien
cactaggtggtcttggctgaagagt

SEQ ID NO: 3176880 - DNA, 25 bp, Homo sapien
tttcagtgtggcactaatcttctct

SEQ ID NO: 3176881 - DNA, 25 bp, Homo sapien
tgaagagtttgtgcaacttttcctc

SEQ ID NO: 3176882 - DNA, 25 bp, Homo sapien
ttttcagtgtggcactaatcttctc

SEQ ID NO: 3176883 - DNA, 25 bp, Homo sapien
tatcagtgtttcgaggatcatcaac

SEQ ID NO: 3176884 - DNA, 25 bp, Homo sapien
ccatgcattatcagtgtttcgagga

SEQ ID NO: 3176885 - DNA, 25 bp, Homo sapien
cattatcagtgtttcgaggatcatc

SEQ ID NO: 3176886 - DNA, 25 bp, Homo sapien
tgtttcgaggatcatcaacatatcc

SEQ ID NO: 3176887 - DNA, 25 bp, Homo sapien
ctgtttcgtcatggtagttcacagc

SEQ ID NO: 3176888 - DNA, 25 bp, Homo sapien
tggtagttcacagcttctgtctcca

SEQ ID NO: 3176889 - DNA, 25 bp, Homo sapien
ggtagttcacagcttctgtctccat

SEQ ID NO: 3176890 - DNA, 25 bp, Homo sapien
tttcgtcatggtagttcacagcttc

SEQ ID NO: 3176891 - DNA, 25 bp, Homo sapien
gcatatctatgtcgtcaagtattct

SEQ ID NO: 3176892 - DNA, 25 bp, Homo sapien
atcatcattgtactagccggccaag

SEQ ID NO: 3176893 - DNA, 25 bp, Homo sapien
tattacatgaatatgaaaccttaca

SEQ ID NO: 3176894 - DNA, 25 bp, Homo sapien
taaaaactagaccattccatccctg

SEQ ID NO: 3176895 - DNA, 25 bp, Homo sapien
ccagcttctagcataagattatcca

SEQ ID NO: 3176896 - DNA, 25 bp, Homo sapien
cagagtcctcgctccagtgtgcatc

SEQ ID NO: 3176897 - DNA, 25 bp, Homo sapien
agtcctcgctccagtgtgcatctcg

SEQ ID NO: 3176898 - DNA, 25 bp, Homo sapien
ctcgctccagtgtgcatctcgtttc

SEQ ID NO: 3176899 - DNA, 25 bp, Homo sapien
tgggcctttggcttacacggagacc

SEQ ID NO: 3176900 - DNA, 25 bp, Homo sapien
caaagagctgaaaattttgtgttcc

SEQ ID NO: 3176901 - DNA, 25 bp, Homo sapien
taagccatgcttaaatcgaatacat

SEQ ID NO: 3176902 - DNA, 25 bp, Homo sapien
tactcatgttattctgatgcgaaac

SEQ ID NO: 3176903 - DNA, 25 bp, Homo sapien
tttgatgtggcaggaacatccttca

SEQ ID NO: 3176904 - DNA, 25 bp, Homo sapien
cagtggcggtactctgcctaaagga

SEQ ID NO: 3176905 - DNA, 25 bp, Homo sapien
gaaggcattgacaaacaagaactag

SEQ ID NO: 3176906 - DNA, 25 bp, Homo sapien
tgatctctattgactagtggctgaa

SEQ ID NO: 3176907 - DNA, 25 bp, Homo sapien
gtgctgaattactttgaccgttacg

SEQ ID NO: 3176908 - DNA, 25 bp, Homo sapien
gaccgttacgagcttactctttatg

SEQ ID NO: 3176909 - DNA, 25 bp, Homo sapien
tactttgaccgttacgagcttactc

SEQ ID NO: 3176910 - DNA, 25 bp, Homo sapien
gcttactctttatgaagagaatact

SEQ ID NO: 3176911 - DNA, 25 bp, Homo sapien
gatttagagtcatcgcatttctcgg

SEQ ID NO: 3176912 - DNA, 25 bp, Homo sapien
ggctggccttttgagcactgccact

SEQ ID NO: 3176913 - DNA, 25 bp, Homo sapien
aaatgatctcctaccccttcaattc

SEQ ID NO: 3176914 - DNA, 25 bp, Homo sapien
tccaggctcgacctttagaatgaaa

SEQ ID NO: 3176915 - DNA, 25 bp, Homo sapien
tgttcataatatcatgtgcacttca

SEQ ID NO: 3176916 - DNA, 25 bp, Homo sapien
ttcactctctgcattgacttatgag

SEQ ID NO: 3176917 - DNA, 25 bp, Homo sapien
gctactcttttgtggtttacgtgta

SEQ ID NO: 3176918 - DNA, 25 bp, Homo sapien
tgtgcacttcaagaaaatggaatgc

SEQ ID NO: 3176919 - DNA, 25 bp, Homo sapien
tagggcatgttgcttagcctcagtg

SEQ ID NO: 3176920 - DNA, 25 bp, Homo sapien
gaatactgtggtaaacccaggcaag

SEQ ID NO: 3176921 - DNA, 25 bp, Homo sapien
catgctaatcgtcagaaaaccctcc

SEQ ID NO: 3176922 - DNA, 25 bp, Homo sapien
cctccaagtgagactaacagggtaa

SEQ ID NO: 3176923 - DNA, 25 bp, Homo sapien
tcagtgtgtaagctcacccaggctc

SEQ ID NO: 3176924 - DNA, 25 bp, Homo sapien
tgcaaagcttctggcagctcttcag

SEQ ID NO: 3176925 - DNA, 25 bp, Homo sapien
tggcagctcttcagtgtgtaagctc

SEQ ID NO: 3176926 - DNA, 25 bp, Homo sapien
gctcttcagtgtgtaagctcaccca

SEQ ID NO: 3176927 - DNA, 25 bp, Homo sapien
gaaagtcagttcatcaaatgtcaga

SEQ ID NO: 3176928 - DNA, 25 bp, Homo sapien
tgcagctaagccgttaaagaaagtc

SEQ ID NO: 3176929 - DNA, 25 bp, Homo sapien
taagcagagagggtcagtccttttc

SEQ ID NO: 3176930 - DNA, 25 bp, Homo sapien
catgtttacaatatacccttgggat

SEQ ID NO: 3176931 - DNA, 25 bp, Homo sapien
gcttcaccctcaatgaatgggagct

SEQ ID NO: 3176932 - DNA, 25 bp, Homo sapien
ggagggtagatcagagtattctttc

SEQ ID NO: 3176933 - DNA, 25 bp, Homo sapien
tgggagctgtgggagggtagatcag

SEQ ID NO: 3176934 - DNA, 25 bp, Homo sapien
cttcaccctcaatgaatgggagctg

SEQ ID NO: 3176935 - DNA, 25 bp, Homo sapien
cctctacggatgagagactggctca

SEQ ID NO: 3176936 - DNA, 25 bp, Homo sapien
gactggctcaagaatatcctcatgc

SEQ ID NO: 3176937 - DNA, 25 bp, Homo sapien
tgaggaccactgtcataataatggg

SEQ ID NO: 3176938 - DNA, 25 bp, Homo sapien
tgtcagttgccagaagtcgttaagc

SEQ ID NO: 3176939 - DNA, 25 bp, Homo sapien
atggaacagagcagatggctcagaa

SEQ ID NO: 3176940 - DNA, 25 bp, Homo sapien
ccaatggaacagagcagatggctca

SEQ ID NO: 3176941 - DNA, 25 bp, Homo sapien
catatacagccatctgatatttgac

SEQ ID NO: 3176942 - DNA, 25 bp, Homo sapien
gaccaatggaacagagcagatggct

SEQ ID NO: 3176943 - DNA, 25 bp, Homo sapien
attgtaaagaccatcgacactatga

SEQ ID NO: 3176944 - DNA, 25 bp, Homo sapien
cagtcactgcaaaaacataccaaat

SEQ ID NO: 3176945 - DNA, 25 bp, Homo sapien
agctagcatcataatgacaggatca

SEQ ID NO: 3176946 - DNA, 25 bp, Homo sapien
gcatcaactaataggcaaaataacc

SEQ ID NO: 3176947 - DNA, 25 bp, Homo sapien
ttgaacaggagcagtaaacatagcc

SEQ ID NO: 3176948 - DNA, 25 bp, Homo sapien
ttattcacatcatcagttgaacagg

SEQ ID NO: 3176949 - DNA, 25 bp, Homo sapien
gagcagtaaacatagccaaggccta

SEQ ID NO: 3176950 - DNA, 25 bp, Homo sapien
taaccaacaagaaagtatcacaaag

SEQ ID NO: 3176951 - DNA, 25 bp, Homo sapien
tcattcaatagtctgggtcaagctt

SEQ ID NO: 3176952 - DNA, 25 bp, Homo sapien
tcagtgagctaggaacacatctggg

SEQ ID NO: 3176953 - DNA, 25 bp, Homo sapien
gagttaattcatctggcttcagtga

SEQ ID NO: 3176954 - DNA, 25 bp, Homo sapien
gggtctgttatcctgcaaggttcca

SEQ ID NO: 3176955 - DNA, 25 bp, Homo sapien
taaatgactttttactcatccaaga

SEQ ID NO: 3176956 - DNA, 25 bp, Homo sapien
aatctgtattttgtagtcagtgcac

SEQ ID NO: 3176957 - DNA, 25 bp, Homo sapien
tcatcatacttagcaaggacatcat

SEQ ID NO: 3176958 - DNA, 25 bp, Homo sapien
caccaaactcgaatgtctcaaaata

SEQ ID NO: 3176959 - DNA, 25 bp, Homo sapien
cagcaatgtagaaacggaacttttt

SEQ ID NO: 3176960 - DNA, 25 bp, Homo sapien
gagctaaagagattatggtaactca

SEQ ID NO: 3176961 - DNA, 25 bp, Homo sapien
gttaagatgctcacacatagaccta

SEQ ID NO: 3176962 - DNA, 25 bp, Homo sapien
taaagttattcaatctcctgagcct

SEQ ID NO: 3176963 - DNA, 25 bp, Homo sapien
tgcacaccagggagaagcatggtca

SEQ ID NO: 3176964 - DNA, 25 bp, Homo sapien
ttcctccgaggagattgctcaaccc

SEQ ID NO: 3176965 - DNA, 25 bp, Homo sapien
tatcctgattctagagacgtgagtg

SEQ ID NO: 3176966 - DNA, 25 bp, Homo sapien
gccaactaaggccaaatcctcagaa

SEQ ID NO: 3176967 - DNA, 25 bp, Homo sapien
tgcccatttggctcaatagttgagt

SEQ ID NO: 3176968 - DNA, 25 bp, Homo sapien
tagttgagtcttgtctggctgtagt

SEQ ID NO: 3176969 - DNA, 25 bp, Homo sapien
agttgagtcttgtctggctgtagtg

SEQ ID NO: 3176970 - DNA, 25 bp, Homo sapien
catttggctcaatagttgagtcttg

SEQ ID NO: 3176971 - DNA, 25 bp, Homo sapien
ctaattcagcaggagcacactggaa

SEQ ID NO: 3176972 - DNA, 25 bp, Homo sapien
gttaaaacagttccacacaggtgag

SEQ ID NO: 3176973 - DNA, 25 bp, Homo sapien
tagattgtttggtctggtaagccag

SEQ ID NO: 3176974 - DNA, 25 bp, Homo sapien
tttgtctcattatggccctgagagg

SEQ ID NO: 3176975 - DNA, 25 bp, Homo sapien
tttttcatcttctagtagcttttcc

SEQ ID NO: 3176976 - DNA, 25 bp, Homo sapien
tttcatcttctagtagcttttccat

SEQ ID NO: 3176977 - DNA, 25 bp, Homo sapien
agcataaactaacatgactttttca

SEQ ID NO: 3176978 - DNA, 25 bp, Homo sapien
ctgtttgttggggaaagcataaact

SEQ ID NO: 3176979 - DNA, 25 bp, Homo sapien
ccccaggtttagggctcttcctgct

SEQ ID NO: 3176980 - DNA, 25 bp, Homo sapien
tcctgcttccattgctggttcaacc

SEQ ID NO: 3176981 - DNA, 25 bp, Homo sapien
ccattgctggttcaaccagaaacat

SEQ ID NO: 3176982 - DNA, 25 bp, Homo sapien
catcctgtctctccccttgccccag

SEQ ID NO: 3176983 - DNA, 25 bp, Homo sapien
ccccactccactatgcgggtagcca

SEQ ID NO: 3176984 - DNA, 25 bp, Homo sapien
ctgtccccactccactatgcgggta

SEQ ID NO: 3176985 - DNA, 25 bp, Homo sapien
gtccccactccactatgcgggtagc

SEQ ID NO: 3176986 - DNA, 25 bp, Homo sapien
cccactccactatgcgggtagccat

SEQ ID NO: 3176987 - DNA, 25 bp, Homo sapien
tggtaacatgtggtacttccggctg

SEQ ID NO: 3176988 - DNA, 25 bp, Homo sapien
aacagaggagcaaaactggtaacat

SEQ ID NO: 3176989 - DNA, 25 bp, Homo sapien
taacatgtggtacttccggctgcat

SEQ ID NO: 3176990 - DNA, 25 bp, Homo sapien
aaactggtaacatgtggtacttccg

SEQ ID NO: 3176991 - DNA, 25 bp, Homo sapien
cacggtagtatttttcagtctgctg

SEQ ID NO: 3176992 - DNA, 25 bp, Homo sapien
tcctccaaaggatcagtgaattgag

SEQ ID NO: 3176993 - DNA, 25 bp, Homo sapien
cactgctgaatgcaagcccacggta

SEQ ID NO: 3176994 - DNA, 25 bp, Homo sapien
tgagcacctctattgggaccacagc

SEQ ID NO: 3176995 - DNA, 25 bp, Homo sapien
gaaaatccagaatttcttatctttc

SEQ ID NO: 3176996 - DNA, 25 bp, Homo sapien
tgaagactgaaagtggcccactgtc

SEQ ID NO: 3176997 - DNA, 25 bp, Homo sapien
aagactgaaagtggcccactgtcct

SEQ ID NO: 3176998 - DNA, 25 bp, Homo sapien
ctttgaagactgaaagtggcccact

SEQ ID NO: 3176999 - DNA, 25 bp, Homo sapien
tctttaggaataataataatcaatg

SEQ ID NO: 3177000 - DNA, 25 bp, Homo sapien
ttctttaggaataataataatcaat

SEQ ID NO: 3177001 - DNA, 25 bp, Homo sapien
tttctttaggaataataataatcaa

SEQ ID NO: 3177002 - DNA, 25 bp, Homo sapien
ctttaggaataataataatcaatgg

SEQ ID NO: 3177003 - DNA, 25 bp, Homo sapien
gcccaaatgcaaaaatatgtaatta

SEQ ID NO: 3177004 - DNA, 25 bp, Homo sapien
gctactgcccaaatgcaaaaatatg

SEQ ID NO: 3177005 - DNA, 25 bp, Homo sapien
ctgcccaaatgcaaaaatatgtaat

SEQ ID NO: 3177006 - DNA, 25 bp, Homo sapien
tactgcccaaatgcaaaaatatgta

SEQ ID NO: 3177007 - DNA, 25 bp, Homo sapien
ggatttttcgacatgtctctccagt

SEQ ID NO: 3177008 - DNA, 25 bp, Homo sapien
gatttttcgacatgtctctccagtg

SEQ ID NO: 3177009 - DNA, 25 bp, Homo sapien
tttttcgacatgtctctccagtggt

SEQ ID NO: 3177010 - DNA, 25 bp, Homo sapien
atttttcgacatgtctctccagtgg

SEQ ID NO: 3177011 - DNA, 25 bp, Homo sapien
tttgatcttgctaggagatgcaaat

SEQ ID NO: 3177012 - DNA, 25 bp, Homo sapien
acatttgatcttgctaggagatgca

SEQ ID NO: 3177013 - DNA, 25 bp, Homo sapien
catttgatcttgctaggagatgcaa

SEQ ID NO: 3177014 - DNA, 25 bp, Homo sapien
gatcttgctaggagatgcaaattca

SEQ ID NO: 3177015 - DNA, 25 bp, Homo sapien
cccctcttcgtttgctaatgtggaa

SEQ ID NO: 3177016 - DNA, 25 bp, Homo sapien
gcttccagctacttgaggtccatct

SEQ ID NO: 3177017 - DNA, 25 bp, Homo sapien
tcctcattgtgacctgcatcgccaa

SEQ ID NO: 3177018 - DNA, 25 bp, Homo sapien
aatgatgcttacttgtccctggatg

SEQ ID NO: 3177019 - DNA, 25 bp, Homo sapien
catcggaattatccaggccagcatc

SEQ ID NO: 3177020 - DNA, 25 bp, Homo sapien
taggactcccatcggaattatccag

SEQ ID NO: 3177021 - DNA, 25 bp, Homo sapien
attcccactaggactcccatcggaa

SEQ ID NO: 3177022 - DNA, 25 bp, Homo sapien
tcatctgctccattcccactaggac

SEQ ID NO: 3177023 - DNA, 25 bp, Homo sapien
gacctatgctactatcatgatcatc

SEQ ID NO: 3177024 - DNA, 25 bp, Homo sapien
tctatggttgagcttctgggtgtcc

SEQ ID NO: 3177025 - DNA, 25 bp, Homo sapien
tcctcactcttggaggtcttgtctc

SEQ ID NO: 3177026 - DNA, 25 bp, Homo sapien
tacgcgtttgctttctctatggttg

SEQ ID NO: 3177027 - DNA, 25 bp, Homo sapien
tgctgggacccttgatttctattcc

SEQ ID NO: 3177028 - DNA, 25 bp, Homo sapien
tgtattgctgtgtccaactttattt

SEQ ID NO: 3177029 - DNA, 25 bp, Homo sapien
ccttctatgttgacaacctctcctt

SEQ ID NO: 3177030 - DNA, 25 bp, Homo sapien
atttcctggttctgatttttggcca

SEQ ID NO: 3177031 - DNA, 25 bp, Homo sapien
tatcatcaaaatcataactgtcata

SEQ ID NO: 3177032 - DNA, 25 bp, Homo sapien
atcatcaaaatcataactgtcatat

SEQ ID NO: 3177033 - DNA, 25 bp, Homo sapien
tcctcggctactgctgttattgtca

SEQ ID NO: 3177034 - DNA, 25 bp, Homo sapien
catcagagttataagaagcatctcc

SEQ ID NO: 3177035 - DNA, 25 bp, Homo sapien
tagtgtctgatgtgctatcactgtc

SEQ ID NO: 3177036 - DNA, 25 bp, Homo sapien
gttattgtcactttctgaattagca

SEQ ID NO: 3177037 - DNA, 25 bp, Homo sapien
tcactgtcactgctatctgatttac

SEQ ID NO: 3177038 - DNA, 25 bp, Homo sapien
tgtcgctctctgatttgctgctgtc

SEQ ID NO: 3177039 - DNA, 25 bp, Homo sapien
tgctgtcgctctctgatttgctgct

SEQ ID NO: 3177040 - DNA, 25 bp, Homo sapien
cgctctctgatttgctgctgtctga

SEQ ID NO: 3177041 - DNA, 25 bp, Homo sapien
ctctctgatttgctgctgtctgact

SEQ ID NO: 3177042 - DNA, 25 bp, Homo sapien
gctgttgctgtcactgctgtctgac

SEQ ID NO: 3177043 - DNA, 25 bp, Homo sapien
tgctgtctgacttactgtcactatc

SEQ ID NO: 3177044 - DNA, 25 bp, Homo sapien
tcactgctgtctgacttactgtcac

SEQ ID NO: 3177045 - DNA, 25 bp, Homo sapien
tgtcactgctgtctgacttactgtc

SEQ ID NO: 3177046 - DNA, 25 bp, Homo sapien
ctgtcactatcgctgctgttactat

SEQ ID NO: 3177047 - DNA, 25 bp, Homo sapien
tgtcactatcgctgctgttactatt

SEQ ID NO: 3177048 - DNA, 25 bp, Homo sapien
ttgctgctgtcgctatcactgccgt

SEQ ID NO: 3177049 - DNA, 25 bp, Homo sapien
gctgtcgctatcactgccgtcactg

SEQ ID NO: 3177050 - DNA, 25 bp, Homo sapien
tattgctgctgtcgctatcactgcc

SEQ ID NO: 3177051 - DNA, 25 bp, Homo sapien
gctgctgtcgctatcactgccgtca

SEQ ID NO: 3177052 - DNA, 25 bp, Homo sapien
tatcgctgctgtcactactattact

SEQ ID NO: 3177053 - DNA, 25 bp, Homo sapien
tgtcactgctattgctgctgtcact

SEQ ID NO: 3177054 - DNA, 25 bp, Homo sapien
gtcactgctattgctgctgtcacta

SEQ ID NO: 3177055 - DNA, 25 bp, Homo sapien
tgtcactgctattgctgctgtcact

SEQ ID NO: 3177056 - DNA, 25 bp, Homo sapien
gctgctgtcactgctatcgctgctg

SEQ ID NO: 3177057 - DNA, 25 bp, Homo sapien
cgctgctgtcactgctatcgctgct

SEQ ID NO: 3177058 - DNA, 25 bp, Homo sapien
tatcgctgctgtcactgctatcgct

SEQ ID NO: 3177059 - DNA, 25 bp, Homo sapien
gctgtcactgctatcgctgctgtcg

SEQ ID NO: 3177060 - DNA, 25 bp, Homo sapien
tgtcactgctattgctgctgtcact

SEQ ID NO: 3177061 - DNA, 25 bp, Homo sapien
cactgctgtcactgctgttgctgct

SEQ ID NO: 3177062 - DNA, 25 bp, Homo sapien
tcactgctgtcactgctgtcactgc

SEQ ID NO: 3177063 - DNA, 25 bp, Homo sapien
tgctgctgtcactgctatcactgct

SEQ ID NO: 3177064 - DNA, 25 bp, Homo sapien
tttcactgctgtcactgctgtcact

SEQ ID NO: 3177065 - DNA, 25 bp, Homo sapien
ctctcatcattgctgtcagatgtgc

SEQ ID NO: 3177066 - DNA, 25 bp, Homo sapien
tgttgttaccgttaccagacttgct

SEQ ID NO: 3177067 - DNA, 25 bp, Homo sapien
ttactgtcactgccttcactgtcac

SEQ ID NO: 3177068 - DNA, 25 bp, Homo sapien
gtcacttccattgttgttaccgtta

SEQ ID NO: 3177069 - DNA, 25 bp, Homo sapien
taccaaaggtcatgcattcagagtc

SEQ ID NO: 3177070 - DNA, 25 bp, Homo sapien
agattattcccatagcccaggtagg

SEQ ID NO: 3177071 - DNA, 25 bp, Homo sapien
tttactcagcggtaagcagaccacc

SEQ ID NO: 3177072 - DNA, 25 bp, Homo sapien
gcagcacatggcacttaaattgaag

SEQ ID NO: 3177073 - DNA, 25 bp, Homo sapien
catgtgtcatttactggttaacatt

SEQ ID NO: 3177074 - DNA, 25 bp, Homo sapien
tgtcaatagttttagggactttgta

SEQ ID NO: 3177075 - DNA, 25 bp, Homo sapien
gtcatttactggttaacatttggag

SEQ ID NO: 3177076 - DNA, 25 bp, Homo sapien
tgtgtcatttactggttaacatttg

SEQ ID NO: 3177077 - DNA, 25 bp, Homo sapien
tctattctctatacacctttaagat

SEQ ID NO: 3177078 - DNA, 25 bp, Homo sapien
aatctctattctctatacaccttta

SEQ ID NO: 3177079 - DNA, 25 bp, Homo sapien
tcaatctctattctctatacacctt

SEQ ID NO: 3177080 - DNA, 25 bp, Homo sapien
tctctattctctatacacctttaag

SEQ ID NO: 3177081 - DNA, 25 bp, Homo sapien
ggagatttcaaagcgtcactactaa

SEQ ID NO: 3177082 - DNA, 25 bp, Homo sapien
ggacaaccccaatttatatctcctg

SEQ ID NO: 3177083 - DNA, 25 bp, Homo sapien
tcactctatagattttcagctttgc

SEQ ID NO: 3177084 - DNA, 25 bp, Homo sapien
tatgggttagggttatagtatctcc

SEQ ID NO: 3177085 - DNA, 25 bp, Homo sapien
cacaatgttgatctcttacctaagg

SEQ ID NO: 3177086 - DNA, 25 bp, Homo sapien
aaagaagtttagagtcatgacatga

SEQ ID NO: 3177087 - DNA, 25 bp, Homo sapien
tgatgtagtacaaacctggacattt

SEQ ID NO: 3177088 - DNA, 25 bp, Homo sapien
taaagtcttcaacaatactcctcac

SEQ ID NO: 3177089 - DNA, 25 bp, Homo sapien
tattataacaccgagatttatctcc

SEQ ID NO: 3177090 - DNA, 25 bp, Homo sapien
tatcttgtgtagtttacagagttcc

SEQ ID NO: 3177091 - DNA, 25 bp, Homo sapien
aatagttgtgacacatactagaagc

SEQ ID NO: 3177092 - DNA, 25 bp, Homo sapien
gacttagtgttcatagcaacctttt

SEQ ID NO: 3177093 - DNA, 25 bp, Homo sapien
gatctacttttgcgatgttcttttg

SEQ ID NO: 3177094 - DNA, 25 bp, Homo sapien
acttttgcgatgttcttttgtagtg

SEQ ID NO: 3177095 - DNA, 25 bp, Homo sapien
tgcgatgttcttttgtagtgtgtct

SEQ ID NO: 3177096 - DNA, 25 bp, Homo sapien
tctacttttgcgatgttcttttgta

SEQ ID NO: 3177097 - DNA, 25 bp, Homo sapien
catcaaacattcctctgaagatagt

SEQ ID NO: 3177098 - DNA, 25 bp, Homo sapien
tccatcaaacattcctctgaagata

SEQ ID NO: 3177099 - DNA, 25 bp, Homo sapien
caatagacatctagatttggacatt

SEQ ID NO: 3177100 - DNA, 25 bp, Homo sapien
catctagatttggacatttctccat

SEQ ID NO: 3177101 - DNA, 25 bp, Homo sapien
tagttgtcccaaagattggccaaga

SEQ ID NO: 3177102 - DNA, 25 bp, Homo sapien
aaccagggttgatagtccaaaacag

SEQ ID NO: 3177103 - DNA, 25 bp, Homo sapien
tagcagctgacagagccaatccaat

SEQ ID NO: 3177104 - DNA, 25 bp, Homo sapien
caatccaatgctagtagttgtccca

SEQ ID NO: 3177105 - DNA, 25 bp, Homo sapien
aaggtgactaaggacaaagtccaca

SEQ ID NO: 3177106 - DNA, 25 bp, Homo sapien
actccaaggtgactaaggacaaagt

SEQ ID NO: 3177107 - DNA, 25 bp, Homo sapien
ccaaggtgactaaggacaaagtcca

SEQ ID NO: 3177108 - DNA, 25 bp, Homo sapien
tccaaggtgactaaggacaaagtcc

SEQ ID NO: 3177109 - DNA, 25 bp, Homo sapien
aaaatcaggttgatgttctcaaaga

SEQ ID NO: 3177110 - DNA, 25 bp, Homo sapien
atcaggttgatgttctcaaagagga

SEQ ID NO: 3177111 - DNA, 25 bp, Homo sapien
agtctcaaaaatcaggttgatgttc

SEQ ID NO: 3177112 - DNA, 25 bp, Homo sapien
caaaaatcaggttgatgttctcaaa

SEQ ID NO: 3177113 - DNA, 25 bp, Homo sapien
cacaggataatccccaaaggaacat

SEQ ID NO: 3177114 - DNA, 25 bp, Homo sapien
agcacaggataatccccaaaggaac

SEQ ID NO: 3177115 - DNA, 25 bp, Homo sapien
aggataatccccaaaggaacatgag

SEQ ID NO: 3177116 - DNA, 25 bp, Homo sapien
caggataatccccaaaggaacatga

SEQ ID NO: 3177117 - DNA, 25 bp, Homo sapien
tcagattcattattttgatacctgg

SEQ ID NO: 3177118 - DNA, 25 bp, Homo sapien
tcagaatcctcagattcattatttt

SEQ ID NO: 3177119 - DNA, 25 bp, Homo sapien
ttccattcttcagaatcctcagatt

SEQ ID NO: 3177120 - DNA, 25 bp, Homo sapien
attcattattttgatacctggttac

SEQ ID NO: 3177121 - DNA, 25 bp, Homo sapien
caagggtggtgttggtgcctgagcc

SEQ ID NO: 3177122 - DNA, 25 bp, Homo sapien
gtgttggtgcctgagccaaatgacc

SEQ ID NO: 3177123 - DNA, 25 bp, Homo sapien
ggtggtgttggtgcctgagccaaat

SEQ ID NO: 3177124 - DNA, 25 bp, Homo sapien
tggtgttggtgcctgagccaaatga

SEQ ID NO: 3177125 - DNA, 25 bp, Homo sapien
tcctctgagctaactttactgcctt

SEQ ID NO: 3177126 - DNA, 25 bp, Homo sapien
cctctgagctaactttactgccttc

SEQ ID NO: 3177127 - DNA, 25 bp, Homo sapien
ctctgagctaactttactgccttct

SEQ ID NO: 3177128 - DNA, 25 bp, Homo sapien
tatatttagaactgtcgccaggtaa

SEQ ID NO: 3177129 - DNA, 25 bp, Homo sapien
gccagcataactcatagttagaaaa

SEQ ID NO: 3177130 - DNA, 25 bp, Homo sapien
tgtcgccaggtaatttaatctaaca

SEQ ID NO: 3177131 - DNA, 25 bp, Homo sapien
actctttagccagcataactcatag

SEQ ID NO: 3177132 - DNA, 25 bp, Homo sapien
cctcctctgactgagtgctgtcact

SEQ ID NO: 3177133 - DNA, 25 bp, Homo sapien
aggccctcctctgactgagtgctgt

SEQ ID NO: 3177134 - DNA, 25 bp, Homo sapien
ataaatgtattgatgatcatcagag

SEQ ID NO: 3177135 - DNA, 25 bp, Homo sapien
gagaagccaccagctagcctataaa

SEQ ID NO: 3177136 - DNA, 25 bp, Homo sapien
gggcactctcttcactggcttgtat

SEQ ID NO: 3177137 - DNA, 25 bp, Homo sapien
cactggtggtatcttgggcactgtc

SEQ ID NO: 3177138 - DNA, 25 bp, Homo sapien
tgggccactgtcatcgtcaccaaag

SEQ ID NO: 3177139 - DNA, 25 bp, Homo sapien
tgtccacccggtcctcattgtcaag

SEQ ID NO: 3177140 - DNA, 25 bp, Homo sapien
gggatgctccagcaattggctgcca

SEQ ID NO: 3177141 - DNA, 25 bp, Homo sapien
gagagtgtgtgcgagctgtcctcct

SEQ ID NO: 3177142 - DNA, 25 bp, Homo sapien
cactggattcgctgtctgcttgctc

SEQ ID NO: 3177143 - DNA, 25 bp, Homo sapien
tgctgggaccatctacgttttggct

SEQ ID NO: 3177144 - DNA, 25 bp, Homo sapien
ttcctcgctctgactctctgctgag

SEQ ID NO: 3177145 - DNA, 25 bp, Homo sapien
agaatggctttcctcgctctgactc

SEQ ID NO: 3177146 - DNA, 25 bp, Homo sapien
tgtcttgagagtcactgtcgtcttc

SEQ ID NO: 3177147 - DNA, 25 bp, Homo sapien
gtcttgagagtcactgtcgtcttcc

SEQ ID NO: 3177148 - DNA, 25 bp, Homo sapien
ccccaatgggtttgttgtgataggc

SEQ ID NO: 3177149 - DNA, 25 bp, Homo sapien
gcagtcattgtcatcttggtcccca

SEQ ID NO: 3177150 - DNA, 25 bp, Homo sapien
ctaatagccgtcttggcagtcattg

SEQ ID NO: 3177151 - DNA, 25 bp, Homo sapien
taggcatcaactgttaatttccggc

SEQ ID NO: 3177152 - DNA, 25 bp, Homo sapien
tgtgacaactgcttcttaggacagc

SEQ ID NO: 3177153 - DNA, 25 bp, Homo sapien
gaattaggaactatctcagctgcaa

SEQ ID NO: 3177154 - DNA, 25 bp, Homo sapien
tagaatttcccggtctccaatgagg

SEQ ID NO: 3177155 - DNA, 25 bp, Homo sapien
tcagtgttcccagatagatatcgtg

SEQ ID NO: 3177156 - DNA, 25 bp, Homo sapien
aagggtttgccatccatactctgaa

SEQ ID NO: 3177157 - DNA, 25 bp, Homo sapien
tattttttggacaatacccgtgaca

SEQ ID NO: 3177158 - DNA, 25 bp, Homo sapien
cataaatgaatactctgccctttct

SEQ ID NO: 3177159 - DNA, 25 bp, Homo sapien
gaatctgtagttgaagcagggcccc

SEQ ID NO: 3177160 - DNA, 25 bp, Homo sapien
tttgtagcctcttaatttcagcttt

SEQ ID NO: 3177161 - DNA, 25 bp, Homo sapien
tctgtacctaatggctgtgaagtag

SEQ ID NO: 3177162 - DNA, 25 bp, Homo sapien
tagcctcttaatttcagctttttca

SEQ ID NO: 3177163 - DNA, 25 bp, Homo sapien
ttctgtacctaatggctgtgaagta

SEQ ID NO: 3177164 - DNA, 25 bp, Homo sapien
ggcagtgagtggcacagattgagta

SEQ ID NO: 3177165 - DNA, 25 bp, Homo sapien
tctggcagtcctggagtgaggaagc

SEQ ID NO: 3177166 - DNA, 25 bp, Homo sapien
aagcaggctcaaggcagtgagtggc

SEQ ID NO: 3177167 - DNA, 25 bp, Homo sapien
tggcagtcctggagtgaggaagcag

SEQ ID NO: 3177168 - DNA, 25 bp, Homo sapien
ggtgatggcaatttcccatgaatac

SEQ ID NO: 3177169 - DNA, 25 bp, Homo sapien
agtggtgatggcaatttcccatgaa

SEQ ID NO: 3177170 - DNA, 25 bp, Homo sapien
tgatggcaatttcccatgaatacat

SEQ ID NO: 3177171 - DNA, 25 bp, Homo sapien
tagtggtgatggcaatttcccatga

SEQ ID NO: 3177172 - DNA, 25 bp, Homo sapien
cccaaaatgctgagcaaaattaaag

SEQ ID NO: 3177173 - DNA, 25 bp, Homo sapien
gaaagcacaggccattcccaaaatg

SEQ ID NO: 3177174 - DNA, 25 bp, Homo sapien
aaagcacaggccattcccaaaatgc

SEQ ID NO: 3177175 - DNA, 25 bp, Homo sapien
tgagaaagcacaggccattcccaaa

SEQ ID NO: 3177176 - DNA, 25 bp, Homo sapien
ttttgactcttcgatgcaaattttt

SEQ ID NO: 3177177 - DNA, 25 bp, Homo sapien
ctattttgactcttcgatgcaaatt

SEQ ID NO: 3177178 - DNA, 25 bp, Homo sapien
tattttgactcttcgatgcaaattt

SEQ ID NO: 3177179 - DNA, 25 bp, Homo sapien
ttgactcttcgatgcaaatttttca

SEQ ID NO: 3177180 - DNA, 25 bp, Homo sapien
aatatcgtggcctgtacttaaagac

SEQ ID NO: 3177181 - DNA, 25 bp, Homo sapien
agataatatcgtggcctgtacttaa

SEQ ID NO: 3177182 - DNA, 25 bp, Homo sapien
tgtaaagataatatcgtggcctgta

SEQ ID NO: 3177183 - DNA, 25 bp, Homo sapien
aagtaggcatgcttgtaaagataat

SEQ ID NO: 3177184 - DNA, 25 bp, Homo sapien
ctccattttcttcggatgagtcact

SEQ ID NO: 3177185 - DNA, 25 bp, Homo sapien
atctccattttcttcggatgagtca

SEQ ID NO: 3177186 - DNA, 25 bp, Homo sapien
ccattttcttcggatgagtcactac

SEQ ID NO: 3177187 - DNA, 25 bp, Homo sapien
tctccattttcttcggatgagtcac

SEQ ID NO: 3177188 - DNA, 25 bp, Homo sapien
catacacggatggtgagagtttacc

SEQ ID NO: 3177189 - DNA, 25 bp, Homo sapien
gaaatggcctcgagaaatgaatatg

SEQ ID NO: 3177190 - DNA, 25 bp, Homo sapien
gctggttgccatctactaaggttga

SEQ ID NO: 3177191 - DNA, 25 bp, Homo sapien
tgcctcagtagatttcgactccgaa

SEQ ID NO: 3177192 - DNA, 25 bp, Homo sapien
gttttgtttttgcagagtcatgctc

SEQ ID NO: 3177193 - DNA, 25 bp, Homo sapien
tagtgatatattattgcatgaaggt

SEQ ID NO: 3177194 - DNA, 25 bp, Homo sapien
tatattattgcatgaaggttttttg

SEQ ID NO: 3177195 - DNA, 25 bp, Homo sapien
gaaattcttagtgatatattattgc

SEQ ID NO: 3177196 - DNA, 25 bp, Homo sapien
caagatttactggagctgtgaatca

SEQ ID NO: 3177197 - DNA, 25 bp, Homo sapien
tattttacctggaagatagttcaag

SEQ ID NO: 3177198 - DNA, 25 bp, Homo sapien
gaaaaactttgcatccctcagctgg

SEQ ID NO: 3177199 - DNA, 25 bp, Homo sapien
caagagctcaactccaagttattga

SEQ ID NO: 3177200 - DNA, 25 bp, Homo sapien
gccaggcgtggcgtcctctccatag

SEQ ID NO: 3177201 - DNA, 25 bp, Homo sapien
tgtgccaggcgtggcgtcctctcca

SEQ ID NO: 3177202 - DNA, 25 bp, Homo sapien
gtgttgtagcagaaagtgtggtatt

SEQ ID NO: 3177203 - DNA, 25 bp, Homo sapien
tagcagaaagtgtggtattctcagc

SEQ ID NO: 3177204 - DNA, 25 bp, Homo sapien
cttgggaagctggattgcagctaac

SEQ ID NO: 3177205 - DNA, 25 bp, Homo sapien
cttcttgggaagctggattgcagct

SEQ ID NO: 3177206 - DNA, 25 bp, Homo sapien
tcttgggaagctggattgcagctaa

SEQ ID NO: 3177207 - DNA, 25 bp, Homo sapien
ttcttgggaagctggattgcagcta

SEQ ID NO: 3177208 - DNA, 25 bp, Homo sapien
tttggaggaataattccattgttac

SEQ ID NO: 3177209 - DNA, 25 bp, Homo sapien
cattttggaggaataattccattgt

SEQ ID NO: 3177210 - DNA, 25 bp, Homo sapien
attaatggtaataatttcattttgg

SEQ ID NO: 3177211 - DNA, 25 bp, Homo sapien
tcattttggaggaataattccattg

SEQ ID NO: 3177212 - DNA, 25 bp, Homo sapien
gccttgttcgttttcatccacttct

SEQ ID NO: 3177213 - DNA, 25 bp, Homo sapien
gccgtttatgccttgttcgttttca

SEQ ID NO: 3177214 - DNA, 25 bp, Homo sapien
tttatgccttgttcgttttcatcca

SEQ ID NO: 3177215 - DNA, 25 bp, Homo sapien
ctggtgccgtttatgccttgttcgt

SEQ ID NO: 3177216 - DNA, 25 bp, Homo sapien
tccgctgctgccgttgccgttttct

SEQ ID NO: 3177217 - DNA, 25 bp, Homo sapien
ctgctgccgttgccgttttctgcct

SEQ ID NO: 3177218 - DNA, 25 bp, Homo sapien
cgctgctgccgttgccgttttctgc

SEQ ID NO: 3177219 - DNA, 25 bp, Homo sapien
tctccattgtctcctccgctgctgc

SEQ ID NO: 3177220 - DNA, 25 bp, Homo sapien
taggttcaaacccaccatttggaga

SEQ ID NO: 3177221 - DNA, 25 bp, Homo sapien
agaggttgttgtcttcgaggtgccc

SEQ ID NO: 3177222 - DNA, 25 bp, Homo sapien
ttcataggctcggtaattgtcccca

SEQ ID NO: 3177223 - DNA, 25 bp, Homo sapien
cattgtcgtattcattggcgcccgt

SEQ ID NO: 3177224 - DNA, 25 bp, Homo sapien
cactggtggtggtagtaattctgac

SEQ ID NO: 3177225 - DNA, 25 bp, Homo sapien
tcactggtggtggtagtaattctga

SEQ ID NO: 3177226 - DNA, 25 bp, Homo sapien
gataaacctaatacacagtgttgca

SEQ ID NO: 3177227 - DNA, 25 bp, Homo sapien
cagaaaatctggaacggtagtacca

SEQ ID NO: 3177228 - DNA, 25 bp, Homo sapien
ttgaacttcgaaaatggtagccgga

SEQ ID NO: 3177229 - DNA, 25 bp, Homo sapien
ggtagccggatgcaaagccagaatg

SEQ ID NO: 3177230 - DNA, 25 bp, Homo sapien
tgtttacagtgcctcttagttttaa

SEQ ID NO: 3177231 - DNA, 25 bp, Homo sapien
gagccattcattcccctgacgtgta

SEQ ID NO: 3177232 - DNA, 25 bp, Homo sapien
agttatgttgatttagccaaaagaa

SEQ ID NO: 3177233 - DNA, 25 bp, Homo sapien
tatctggtaactctagtaagagcca

SEQ ID NO: 3177234 - DNA, 25 bp, Homo sapien
tgccagataaacgaagcactcagtt

SEQ ID NO: 3177235 - DNA, 25 bp, Homo sapien
tgtatatcagccctcctttgtgcgt

SEQ ID NO: 3177236 - DNA, 25 bp, Homo sapien
agccaagtagaagtaggattgccag

SEQ ID NO: 3177237 - DNA, 25 bp, Homo sapien
tgaacattgtctggctctgtagatg

SEQ ID NO: 3177238 - DNA, 25 bp, Homo sapien
agtggaataactcaggattggaaaa

SEQ ID NO: 3177239 - DNA, 25 bp, Homo sapien
tctaagtggaataactcaggattgg

SEQ ID NO: 3177240 - DNA, 25 bp, Homo sapien
attctaagtggaataactcaggatt

SEQ ID NO: 3177241 - DNA, 25 bp, Homo sapien
tgcatatttgaacacatgtatattt

SEQ ID NO: 3177242 - DNA, 25 bp, Homo sapien
tgagtatgtaaacatgttgtgatga

SEQ ID NO: 3177243 - DNA, 25 bp, Homo sapien
agtatgtaaacatgttgtgatgaaa

SEQ ID NO: 3177244 - DNA, 25 bp, Homo sapien
gagtatgtaaacatgttgtgatgaa

SEQ ID NO: 3177245 - DNA, 25 bp, Homo sapien
tctttctggtgtggatagctgccgg

SEQ ID NO: 3177246 - DNA, 25 bp, Homo sapien
tttctggtgtggatagctgccggca

SEQ ID NO: 3177247 - DNA, 25 bp, Homo sapien
ctctttctggtgtggatagctgccg

SEQ ID NO: 3177248 - DNA, 25 bp, Homo sapien
tcctctttctggtgtggatagctgc

SEQ ID NO: 3177249 - DNA, 25 bp, Homo sapien
gctcccctgcagctttatggtgctc

SEQ ID NO: 3177250 - DNA, 25 bp, Homo sapien
tctgtgtgaatgagggctcccctgc

SEQ ID NO: 3177251 - DNA, 25 bp, Homo sapien
catatatgaggtgtgcacgctggga

SEQ ID NO: 3177252 - DNA, 25 bp, Homo sapien
gctttcgtaagtggtcttgtgctgc

SEQ ID NO: 3177253 - DNA, 25 bp, Homo sapien
tgcaggattagaagtctctgggcat

SEQ ID NO: 3177254 - DNA, 25 bp, Homo sapien
ttcttgttgcaggattagaagtctc

SEQ ID NO: 3177255 - DNA, 25 bp, Homo sapien
tgttgcaggattagaagtctctggg

SEQ ID NO: 3177256 - DNA, 25 bp, Homo sapien
caggattagaagtctctgggcattt

SEQ ID NO: 3177257 - DNA, 25 bp, Homo sapien
tcacactgaaaaggagtagtcccac

SEQ ID NO: 3177258 - DNA, 25 bp, Homo sapien
actgaaaaggagtagtcccacacag

SEQ ID NO: 3177259 - DNA, 25 bp, Homo sapien
gaaaaggagtagtcccacacagaaa

SEQ ID NO: 3177260 - DNA, 25 bp, Homo sapien
ggtcacactgaaaaggagtagtccc

SEQ ID NO: 3177261 - DNA, 25 bp, Homo sapien
tgctcttccacacagctttgcttag

SEQ ID NO: 3177262 - DNA, 25 bp, Homo sapien
tctgctcttccacacagctttgctt

SEQ ID NO: 3177263 - DNA, 25 bp, Homo sapien
agctttgcttagttttctcagtctg

SEQ ID NO: 3177264 - DNA, 25 bp, Homo sapien
ttccacacagctttgcttagttttc

SEQ ID NO: 3177265 - DNA, 25 bp, Homo sapien
tcttaagctggcaacgttggccttt

SEQ ID NO: 3177266 - DNA, 25 bp, Homo sapien
tgaacattcaggctcttaagctggc

SEQ ID NO: 3177267 - DNA, 25 bp, Homo sapien
caggctcttaagctggcaacgttgg

SEQ ID NO: 3177268 - DNA, 25 bp, Homo sapien
gctggcaacgttggcctttgtaatt

SEQ ID NO: 3177269 - DNA, 25 bp, Homo sapien
ttctcatagtgacccttgtatgtta

SEQ ID NO: 3177270 - DNA, 25 bp, Homo sapien
aacataatgcccatgtttctcatag

SEQ ID NO: 3177271 - DNA, 25 bp, Homo sapien
aatgcccatgtttctcatagtgacc

SEQ ID NO: 3177272 - DNA, 25 bp, Homo sapien
catgtttctcatagtgacccttgta

SEQ ID NO: 3177273 - DNA, 25 bp, Homo sapien
gatgtgggccgaggcatgggatggg

SEQ ID NO: 3177274 - DNA, 25 bp, Homo sapien
gagcgagatgtgggccgaggcatgg

SEQ ID NO: 3177275 - DNA, 25 bp, Homo sapien
acaggtcctgaagcagagcgagatg

SEQ ID NO: 3177276 - DNA, 25 bp, Homo sapien
tgggacccagagttttgtagtagag

SEQ ID NO: 3177277 - DNA, 25 bp, Homo sapien
atttccagccctttggccgatgaat

SEQ ID NO: 3177278 - DNA, 25 bp, Homo sapien
ctaaaggatatcgatggcagaagaa

SEQ ID NO: 3177279 - DNA, 25 bp, Homo sapien
tcttagagatgtcatctaaaggata

SEQ ID NO: 3177280 - DNA, 25 bp, Homo sapien
tatttatagttaggtgtagtcttag

SEQ ID NO: 3177281 - DNA, 25 bp, Homo sapien
tctgaagggaaactattacttccat

SEQ ID NO: 3177282 - DNA, 25 bp, Homo sapien
cattctgtcttgttttacaataatt

SEQ ID NO: 3177283 - DNA, 25 bp, Homo sapien
tagcacctcccacattctgtcttgt

SEQ ID NO: 3177284 - DNA, 25 bp, Homo sapien
ttcttttctaactctaagatcctgg

SEQ ID NO: 3177285 - DNA, 25 bp, Homo sapien
ttttctaactctaagatcctggaga

SEQ ID NO: 3177286 - DNA, 25 bp, Homo sapien
tgtgttaaatgatttctgactgttc

SEQ ID NO: 3177287 - DNA, 25 bp, Homo sapien
gactgttcgatggtttatgtaccag

SEQ ID NO: 3177288 - DNA, 25 bp, Homo sapien
tatgtaccagttggctggctgcttt

SEQ ID NO: 3177289 - DNA, 25 bp, Homo sapien
taaatgatttctgactgttcgatgg

SEQ ID NO: 3177290 - DNA, 25 bp, Homo sapien
taatcacttggattaggattacgcc

SEQ ID NO: 3177291 - DNA, 25 bp, Homo sapien
gatttaggaggaacagtggtaagaa

SEQ ID NO: 3177292 - DNA, 25 bp, Homo sapien
ggtaagaaagaacatgtaggaggct

SEQ ID NO: 3177293 - DNA, 25 bp, Homo sapien
gaggcttttgcagtatccagtaatg

SEQ ID NO: 3177294 - DNA, 25 bp, Homo sapien
attctcttgcccaaatggtgaaaac

SEQ ID NO: 3177295 - DNA, 25 bp, Homo sapien
atggtgaaaaccaatattgtctttg

SEQ ID NO: 3177296 - DNA, 25 bp, Homo sapien
tgagtattctctttgttactgatac

SEQ ID NO: 3177297 - DNA, 25 bp, Homo sapien
cctcaggccattgtgagtattctct

SEQ ID NO: 3177298 - DNA, 25 bp, Homo sapien
caggagtttaatcgcagtcactggc

SEQ ID NO: 3177299 - DNA, 25 bp, Homo sapien
gcagtttcatccctagttccaatgg

SEQ ID NO: 3177300 - DNA, 25 bp, Homo sapien
tctgggatctcattataacctggct

SEQ ID NO: 3177301 - DNA, 25 bp, Homo sapien
gttatttctgatgagagctgcgcca

SEQ ID NO: 3177302 - DNA, 25 bp, Homo sapien
aaaattggtactacccatgatatcg

SEQ ID NO: 3177303 - DNA, 25 bp, Homo sapien
ctccttaaaattggtactacccatg

SEQ ID NO: 3177304 - DNA, 25 bp, Homo sapien
tactacccatgatatcgttgctgcc

SEQ ID NO: 3177305 - DNA, 25 bp, Homo sapien
atgatatcgttgctgccctctacaa

SEQ ID NO: 3177306 - DNA, 25 bp, Homo sapien
ggttgcttggttcctattagaatga

SEQ ID NO: 3177307 - DNA, 25 bp, Homo sapien
tcagctgcatcactactgccttctt

SEQ ID NO: 3177308 - DNA, 25 bp, Homo sapien
cattatagttggtactttcagctgc

SEQ ID NO: 3177309 - DNA, 25 bp, Homo sapien
tgatctacaccctttctggtactgc

SEQ ID NO: 3177310 - DNA, 25 bp, Homo sapien
ttatcaagaccacgagaaggaatgg

SEQ ID NO: 3177311 - DNA, 25 bp, Homo sapien
tattatattctcatgactggggcca

SEQ ID NO: 3177312 - DNA, 25 bp, Homo sapien
gactggggccattaaaggaatccat

SEQ ID NO: 3177313 - DNA, 25 bp, Homo sapien
tcattatcaagaccacgagaaggaa

SEQ ID NO: 3177314 - DNA, 25 bp, Homo sapien
ggcatacccttattccgtgtagaat

SEQ ID NO: 3177315 - DNA, 25 bp, Homo sapien
ccttattccgtgtagaattattttg

SEQ ID NO: 3177316 - DNA, 25 bp, Homo sapien
tcccttgtggcatacccttattccg

SEQ ID NO: 3177317 - DNA, 25 bp, Homo sapien
ccaggagcctttcccttgtggcata

SEQ ID NO: 3177318 - DNA, 25 bp, Homo sapien
tgtcatcccttctacgggaactaaa

SEQ ID NO: 3177319 - DNA, 25 bp, Homo sapien
tactgtcatcccttctacgggaact

SEQ ID NO: 3177320 - DNA, 25 bp, Homo sapien
actgtcatcccttctacgggaacta

SEQ ID NO: 3177321 - DNA, 25 bp, Homo sapien
ctgtcatcccttctacgggaactaa

SEQ ID NO: 3177322 - DNA, 25 bp, Homo sapien
tgaactgccactgtcagatgactca

SEQ ID NO: 3177323 - DNA, 25 bp, Homo sapien
ttgaactgccactgtcagatgactc

SEQ ID NO: 3177324 - DNA, 25 bp, Homo sapien
gaactgccactgtcagatgactcac

SEQ ID NO: 3177325 - DNA, 25 bp, Homo sapien
gtcttcagactgtcaccccgctggg

SEQ ID NO: 3177326 - DNA, 25 bp, Homo sapien
gtcaggtggctctcctctacatcaa

SEQ ID NO: 3177327 - DNA, 25 bp, Homo sapien
tacagagcaaacaacatagaaggca

SEQ ID NO: 3177328 - DNA, 25 bp, Homo sapien
actcacaggtgacgaggtcttcaga

SEQ ID NO: 3177329 - DNA, 25 bp, Homo sapien
atagtcgcttaaaaagagcattctt

SEQ ID NO: 3177330 - DNA, 25 bp, Homo sapien
aatagtcgcttaaaaagagcattct

SEQ ID NO: 3177331 - DNA, 25 bp, Homo sapien
gaagggcctttcatcaacccggatc

SEQ ID NO: 3177332 - DNA, 25 bp, Homo sapien
ttcacacttgtacgtcccttcttta

SEQ ID NO: 3177333 - DNA, 25 bp, Homo sapien
gatggtgcaactgaggggctcttcc

SEQ ID NO: 3177334 - DNA, 25 bp, Homo sapien
ccttctttattcatctggccctgat

SEQ ID NO: 3177335 - DNA, 25 bp, Homo sapien
ttggagactcgtttctcttggctac

SEQ ID NO: 3177336 - DNA, 25 bp, Homo sapien
ccagagtaagctgaaatgaggaagc

SEQ ID NO: 3177337 - DNA, 25 bp, Homo sapien
gatgaacaggccagagtaagctgaa

SEQ ID NO: 3177338 - DNA, 25 bp, Homo sapien
tcacatgcttttagtaagtgttaga

SEQ ID NO: 3177339 - DNA, 25 bp, Homo sapien
ttagtaagtgttagatgaacaggcc

SEQ ID NO: 3177340 - DNA, 25 bp, Homo sapien
gctcccatggtggtatccaacagtg

SEQ ID NO: 3177341 - DNA, 25 bp, Homo sapien
cacatccagtagtgaggagtggccg

SEQ ID NO: 3177342 - DNA, 25 bp, Homo sapien
tacgttgttgtgaatgacctaagtc

SEQ ID NO: 3177343 - DNA, 25 bp, Homo sapien
caggttgttcggataagcattggca

SEQ ID NO: 3177344 - DNA, 25 bp, Homo sapien
gcttttgtttggcttatgaacccac

SEQ ID NO: 3177345 - DNA, 25 bp, Homo sapien
ttggcttatgaacccacttgtaagt

SEQ ID NO: 3177346 - DNA, 25 bp, Homo sapien
ccatctggctcttgttcttactctt

SEQ ID NO: 3177347 - DNA, 25 bp, Homo sapien
tgtttggcttatgaacccacttgta

SEQ ID NO: 3177348 - DNA, 25 bp, Homo sapien
tctagttggaagatgtgcccagcga

SEQ ID NO: 3177349 - DNA, 25 bp, Homo sapien
agttggaagatgtgcccagcgaaca

SEQ ID NO: 3177350 - DNA, 25 bp, Homo sapien
cttacgaaagtctagttggaagatg

SEQ ID NO: 3177351 - DNA, 25 bp, Homo sapien
aaagtctagttggaagatgtgccca

SEQ ID NO: 3177352 - DNA, 25 bp, Homo sapien
ttgctggcattgtaggcccctcaca

SEQ ID NO: 3177353 - DNA, 25 bp, Homo sapien
gcctgctttatgacgtcattcacca

SEQ ID NO: 3177354 - DNA, 25 bp, Homo sapien
atccatgcagccttaatccagcctg

SEQ ID NO: 3177355 - DNA, 25 bp, Homo sapien
ttaaccctacctggggttgctggca

SEQ ID NO: 3177356 - DNA, 25 bp, Homo sapien
ctgattggatctggtgtatgtggcc

SEQ ID NO: 3177357 - DNA, 25 bp, Homo sapien
tgtggggcccttgtactgcccatat

SEQ ID NO: 3177358 - DNA, 25 bp, Homo sapien
aattgggaatctctgtactggtaac

SEQ ID NO: 3177359 - DNA, 25 bp, Homo sapien
tgtcttcatttggtacatggactga

SEQ ID NO: 3177360 - DNA, 25 bp, Homo sapien
ggcttacacgtactggagagcaatg

SEQ ID NO: 3177361 - DNA, 25 bp, Homo sapien
ttacacgtactggagagcaatgtga

SEQ ID NO: 3177362 - DNA, 25 bp, Homo sapien
gcttacacgtactggagagcaatgt

SEQ ID NO: 3177363 - DNA, 25 bp, Homo sapien
aaaggcttacacgtactggagagca

SEQ ID NO: 3177364 - DNA, 25 bp, Homo sapien
tattgatgatgagggatatgagttg

SEQ ID NO: 3177365 - DNA, 25 bp, Homo sapien
aaatctcctcgttggaatagaaggt

SEQ ID NO: 3177366 - DNA, 25 bp, Homo sapien
tcctgaaggaaaatctcctcgttgg

SEQ ID NO: 3177367 - DNA, 25 bp, Homo sapien
tctccatggtgcacttcctcaggca

SEQ ID NO: 3177368 - DNA, 25 bp, Homo sapien
caaggcatcagaagcattagagatc

SEQ ID NO: 3177369 - DNA, 25 bp, Homo sapien
ttgtccaaggcatcagaagcattag

SEQ ID NO: 3177370 - DNA, 25 bp, Homo sapien
ggcatcagaagcattagagatcaac

SEQ ID NO: 3177371 - DNA, 25 bp, Homo sapien
cttgtccaaggcatcagaagcatta

SEQ ID NO: 3177372 - DNA, 25 bp, Homo sapien
gctctttaccactgtccaactttga

SEQ ID NO: 3177373 - DNA, 25 bp, Homo sapien
caaagccagggtacgttcctgaggg

SEQ ID NO: 3177374 - DNA, 25 bp, Homo sapien
actttgaagggtctgtcaggctctc

SEQ ID NO: 3177375 - DNA, 25 bp, Homo sapien
gcctgtgtctaccaaagccagggta

SEQ ID NO: 3177376 - DNA, 25 bp, Homo sapien
ctgaagagcctccatgcatgcttta

SEQ ID NO: 3177377 - DNA, 25 bp, Homo sapien
ctccatgcatgctttagtaccagac

SEQ ID NO: 3177378 - DNA, 25 bp, Homo sapien
agcctccatgcatgctttagtacca

SEQ ID NO: 3177379 - DNA, 25 bp, Homo sapien
agagcctccatgcatgctttagtac

SEQ ID NO: 3177380 - DNA, 25 bp, Homo sapien
tgcccaatcatggagatgtctgcac

SEQ ID NO: 3177381 - DNA, 25 bp, Homo sapien
ctgcccaatcatggagatgtctgca

SEQ ID NO: 3177382 - DNA, 25 bp, Homo sapien
caggtaggcagaaaaaagccaacac

SEQ ID NO: 3177383 - DNA, 25 bp, Homo sapien
aggaacctccagcagaagactccca

SEQ ID NO: 3177384 - DNA, 25 bp, Homo sapien
cagcatgcacagtgaaggaacctcc

SEQ ID NO: 3177385 - DNA, 25 bp, Homo sapien
catgatcagcatgcacagtgaagga

SEQ ID NO: 3177386 - DNA, 25 bp, Homo sapien
aagcatactgttcatcatcgttgtg

SEQ ID NO: 3177387 - DNA, 25 bp, Homo sapien
tactctgtctgatcttctttaagat

SEQ ID NO: 3177388 - DNA, 25 bp, Homo sapien
ttctaagtactctgtctgatcttct

SEQ ID NO: 3177389 - DNA, 25 bp, Homo sapien
gaggatcactttggtacccctgcca

SEQ ID NO: 3177390 - DNA, 25 bp, Homo sapien
ttggtacccctgccaatgggctcac

SEQ ID NO: 3177391 - DNA, 25 bp, Homo sapien
actgagaatgcttcttcactacttc

SEQ ID NO: 3177392 - DNA, 25 bp, Homo sapien
gcctatgaactgagaatgcttcttc

SEQ ID NO: 3177393 - DNA, 25 bp, Homo sapien
gggatagcctatgaactgagaatgc

SEQ ID NO: 3177394 - DNA, 25 bp, Homo sapien
gatgggatagcctatgaactgagaa

SEQ ID NO: 3177395 - DNA, 25 bp, Homo sapien
tggtttctggtccaaataggcttgg

SEQ ID NO: 3177396 - DNA, 25 bp, Homo sapien
tgtcatcatggtttctggtccaaat

SEQ ID NO: 3177397 - DNA, 25 bp, Homo sapien
cttgggtgatgtcatcatggtttct

SEQ ID NO: 3177398 - DNA, 25 bp, Homo sapien
tctggtccaaataggcttggtcttg

SEQ ID NO: 3177399 - DNA, 25 bp, Homo sapien
cagtcactggtgaggctcttataga

SEQ ID NO: 3177400 - DNA, 25 bp, Homo sapien
gaggactgaatagcaatgccctgaa

SEQ ID NO: 3177401 - DNA, 25 bp, Homo sapien
catggataaaattgagatactctgg

SEQ ID NO: 3177402 - DNA, 25 bp, Homo sapien
cacacggcggacatacagtttgatg

SEQ ID NO: 3177403 - DNA, 25 bp, Homo sapien
ggagatgttcaggggcagatcctca

SEQ ID NO: 3177404 - DNA, 25 bp, Homo sapien
gagatgttcaggggcagatcctcag

SEQ ID NO: 3177405 - DNA, 25 bp, Homo sapien
tcgggagatgttcaggggcagatcc

SEQ ID NO: 3177406 - DNA, 25 bp, Homo sapien
cgggagatgttcaggggcagatcct

SEQ ID NO: 3177407 - DNA, 25 bp, Homo sapien
tcaagattttgctctgctggagcat

SEQ ID NO: 3177408 - DNA, 25 bp, Homo sapien
tttcaagattttgctctgctggagc

SEQ ID NO: 3177409 - DNA, 25 bp, Homo sapien
ttcaagattttgctctgctggagca

SEQ ID NO: 3177410 - DNA, 25 bp, Homo sapien
atttcttataatctccttgtcttct

SEQ ID NO: 3177411 - DNA, 25 bp, Homo sapien
tagaatttcttataatctccttgtc

SEQ ID NO: 3177412 - DNA, 25 bp, Homo sapien
agaatttcttataatctccttgtct

SEQ ID NO: 3177413 - DNA, 25 bp, Homo sapien
tcatctccagactgggaggtgtgac

SEQ ID NO: 3177414 - DNA, 25 bp, Homo sapien
ctacgacagagatgtcatctcatct

SEQ ID NO: 3177415 - DNA, 25 bp, Homo sapien
tacgacagagatgtcatctcatctc

SEQ ID NO: 3177416 - DNA, 25 bp, Homo sapien
atctcatctccagactgggaggtgt

SEQ ID NO: 3177417 - DNA, 25 bp, Homo sapien
tgggctcagtcatatataccacctc

SEQ ID NO: 3177418 - DNA, 25 bp, Homo sapien
tgtttccgcactcgctccacaaaag

SEQ ID NO: 3177419 - DNA, 25 bp, Homo sapien
ctcgtcaatgggctcagtcatatat

SEQ ID NO: 3177420 - DNA, 25 bp, Homo sapien
atatataccacctcgaagccctgtt

SEQ ID NO: 3177421 - DNA, 25 bp, Homo sapien
tggtaactgagaccaggcttttccc

SEQ ID NO: 3177422 - DNA, 25 bp, Homo sapien
tccttggtaactgagaccaggcttt

SEQ ID NO: 3177423 - DNA, 25 bp, Homo sapien
ggtagctccagaccctccttggtaa

SEQ ID NO: 3177424 - DNA, 25 bp, Homo sapien
gcttttcccatcaaactccttgagc

SEQ ID NO: 3177425 - DNA, 25 bp, Homo sapien
tattggagattgtcaccttctcaac

SEQ ID NO: 3177426 - DNA, 25 bp, Homo sapien
atttctttcatgagcttgcagaggt

SEQ ID NO: 3177427 - DNA, 25 bp, Homo sapien
ctattggagattgtcaccttctcaa

SEQ ID NO: 3177428 - DNA, 25 bp, Homo sapien
ctcaaccttcttatctaagatttct

SEQ ID NO: 3177429 - DNA, 25 bp, Homo sapien
aactgccttatcattcttgtcggcc

SEQ ID NO: 3177430 - DNA, 25 bp, Homo sapien
cttatcattcttgtcggcctcagcc

SEQ ID NO: 3177431 - DNA, 25 bp, Homo sapien
taactgccttatcattcttgtcggc

SEQ ID NO: 3177432 - DNA, 25 bp, Homo sapien
tgccttatcattcttgtcggcctca

SEQ ID NO: 3177433 - DNA, 25 bp, Homo sapien
ctaatcgacttcttccatgcgagac

SEQ ID NO: 3177434 - DNA, 25 bp, Homo sapien
tcttccatgcgagacgcatcctcat

SEQ ID NO: 3177435 - DNA, 25 bp, Homo sapien
aatcgacttcttccatgcgagacgc

SEQ ID NO: 3177436 - DNA, 25 bp, Homo sapien
gacttcttccatgcgagacgcatcc

SEQ ID NO: 3177437 - DNA, 25 bp, Homo sapien
cctgctgtcaagagtagagagggaa

SEQ ID NO: 3177438 - DNA, 25 bp, Homo sapien
caatacacaacatccaatcctgctg

SEQ ID NO: 3177439 - DNA, 25 bp, Homo sapien
gggacactatacaagggcacaagtt

SEQ ID NO: 3177440 - DNA, 25 bp, Homo sapien
gggcacaagttttccaactatgaac

SEQ ID NO: 3177441 - DNA, 25 bp, Homo sapien
aagcatatgggagtacctcatagcc

SEQ ID NO: 3177442 - DNA, 25 bp, Homo sapien
ctgtgggaaagcatatgggagtacc

SEQ ID NO: 3177443 - DNA, 25 bp, Homo sapien
tgggaaagcatatgggagtacctca

SEQ ID NO: 3177444 - DNA, 25 bp, Homo sapien
tgggagtacctcatagcctacaggc

SEQ ID NO: 3177445 - DNA, 25 bp, Homo sapien
gggattgattgttttgcgcactggc

SEQ ID NO: 3177446 - DNA, 25 bp, Homo sapien
tggccagcaacagcaccacttgcat

SEQ ID NO: 3177447 - DNA, 25 bp, Homo sapien
tctcgtagactggaaaatggactga

SEQ ID NO: 3177448 - DNA, 25 bp, Homo sapien
cactggcggtcagcagtctgctctc

SEQ ID NO: 3177449 - DNA, 25 bp, Homo sapien
tgtagtctctagctctagggttgcc

SEQ ID NO: 3177450 - DNA, 25 bp, Homo sapien
ctagctctagggttgccctgggatt

SEQ ID NO: 3177451 - DNA, 25 bp, Homo sapien
tgccattgatactgtagtctctagc

SEQ ID NO: 3177452 - DNA, 25 bp, Homo sapien
tgccctgggatttccatagacttca

SEQ ID NO: 3177453 - DNA, 25 bp, Homo sapien
catgtagcaagctcctgtgggagga

SEQ ID NO: 3177454 - DNA, 25 bp, Homo sapien
gccaaacaagtcatgaactgggctg

SEQ ID NO: 3177455 - DNA, 25 bp, Homo sapien
aaacgcttctgatttgggatgaaga

SEQ ID NO: 3177456 - DNA, 25 bp, Homo sapien
tccggcacatgtagcaagctcctgt

SEQ ID NO: 3177457 - DNA, 25 bp, Homo sapien
agcagcggcagccgctgcatgcata

SEQ ID NO: 3177458 - DNA, 25 bp, Homo sapien
cagcggcagccgctgcatgcataca

SEQ ID NO: 3177459 - DNA, 25 bp, Homo sapien
cggcagccgctgcatgcatacatga

SEQ ID NO: 3177460 - DNA, 25 bp, Homo sapien
gcggcagccgctgcatgcatacatg

SEQ ID NO: 3177461 - DNA, 25 bp, Homo sapien
tacagattcgatgccatccctatga

SEQ ID NO: 3177462 - DNA, 25 bp, Homo sapien
actaaaaactacaccacattgctga

SEQ ID NO: 3177463 - DNA, 25 bp, Homo sapien
cgtttagaggtcacgttcatcatca

SEQ ID NO: 3177464 - DNA, 25 bp, Homo sapien
cgaacgcctctgaccatatttgtag

SEQ ID NO: 3177465 - DNA, 25 bp, Homo sapien
tcagatttcattacccagagtaggg

SEQ ID NO: 3177466 - DNA, 25 bp, Homo sapien
ccacaatatgggttttctagaggca

SEQ ID NO: 3177467 - DNA, 25 bp, Homo sapien
cattttcccagtatgggtcacatga

SEQ ID NO: 3177468 - DNA, 25 bp, Homo sapien
ggtcaggcatatagggcttcgccat

SEQ ID NO: 3177469 - DNA, 25 bp, Homo sapien
ctccagccttatttctgcccaactt

SEQ ID NO: 3177470 - DNA, 25 bp, Homo sapien
ctggggtctggcattcttctgtctc

SEQ ID NO: 3177471 - DNA, 25 bp, Homo sapien
tgcccaacttctctccttgtactcc

SEQ ID NO: 3177472 - DNA, 25 bp, Homo sapien
ataacatgaggtcctctggggtctg

SEQ ID NO: 3177473 - DNA, 25 bp, Homo sapien
cttcccactcaacatcaaccacagc

SEQ ID NO: 3177474 - DNA, 25 bp, Homo sapien
gaccctgtgtccacattggagttga

SEQ ID NO: 3177475 - DNA, 25 bp, Homo sapien
ccacagcagcataaactcgagacct

SEQ ID NO: 3177476 - DNA, 25 bp, Homo sapien
gatgggtattctgggattggatcca

SEQ ID NO: 3177477 - DNA, 25 bp, Homo sapien
tcagctcctgacaaagtggtcgtac

SEQ ID NO: 3177478 - DNA, 25 bp, Homo sapien
cattatttatcacagggtagcaagc

SEQ ID NO: 3177479 - DNA, 25 bp, Homo sapien
taaagctaatcggaagcctagcacc

SEQ ID NO: 3177480 - DNA, 25 bp, Homo sapien
aattgttggtgattgcccactcagc

SEQ ID NO: 3177481 - DNA, 25 bp, Homo sapien
gtcccgacgatgctgtgctctgcct

SEQ ID NO: 3177482 - DNA, 25 bp, Homo sapien
ctgagacgagtctggtcccgacgat

SEQ ID NO: 3177483 - DNA, 25 bp, Homo sapien
gacaaccaagccctcccagaattta

SEQ ID NO: 3177484 - DNA, 25 bp, Homo sapien
tttggctgagaaggctgcaactggc

SEQ ID NO: 3177485 - DNA, 25 bp, Homo sapien
tgacatcttcataggttacaacagt

SEQ ID NO: 3177486 - DNA, 25 bp, Homo sapien
ttcataaggaatagctgacatcttc

SEQ ID NO: 3177487 - DNA, 25 bp, Homo sapien
cagtgatacctttttatactaccac

SEQ ID NO: 3177488 - DNA, 25 bp, Homo sapien
tatattgccacctattatccatctt

SEQ ID NO: 3177489 - DNA, 25 bp, Homo sapien
ggcaaaagcaaatcactgcaattct

SEQ ID NO: 3177490 - DNA, 25 bp, Homo sapien
ggaggcaaaagcaaatcactgcaat

SEQ ID NO: 3177491 - DNA, 25 bp, Homo sapien
taggaggcaaaagcaaatcactgca

SEQ ID NO: 3177492 - DNA, 25 bp, Homo sapien
caaaagcaaatcactgcaattctca

SEQ ID NO: 3177493 - DNA, 25 bp, Homo sapien
aacttccagaatcagcctgtttaac

SEQ ID NO: 3177494 - DNA, 25 bp, Homo sapien
gctggcacagtttcatctgttgtgg

SEQ ID NO: 3177495 - DNA, 25 bp, Homo sapien
caactggaattgaactctgtgtgcc

SEQ ID NO: 3177496 - DNA, 25 bp, Homo sapien
taagcagtctaattgcagtgacccc

SEQ ID NO: 3177497 - DNA, 25 bp, Homo sapien
ccccaaggcagctctattttggcct

SEQ ID NO: 3177498 - DNA, 25 bp, Homo sapien
gatgaaaaaacagccgggcgcagtg

SEQ ID NO: 3177499 - DNA, 25 bp, Homo sapien
gctcacgcctgtaatcccagcactt

SEQ ID NO: 3177500 - DNA, 25 bp, Homo sapien
ctactcaggagaatggggtgaacct

SEQ ID NO: 3177501 - DNA, 25 bp, Homo sapien
cagctactcaggagaatggggtgaa

SEQ ID NO: 3177502 - DNA, 25 bp, Homo sapien
gcagggttcaaacgcaggcaaacta

SEQ ID NO: 3177503 - DNA, 25 bp, Homo sapien
taatcttcattgtgtccagtccatg

SEQ ID NO: 3177504 - DNA, 25 bp, Homo sapien
gtagcacttactgtgggctaggcac

SEQ ID NO: 3177505 - DNA, 25 bp, Homo sapien
ggcaaactagctcttaacaccgaac

SEQ ID NO: 3177506 - DNA, 25 bp, Homo sapien
ctgtggggctaggagattctgcttc

SEQ ID NO: 3177507 - DNA, 25 bp, Homo sapien
gggctaggagattctgcttctgaga

SEQ ID NO: 3177508 - DNA, 25 bp, Homo sapien
tggggctaggagattctgcttctga

SEQ ID NO: 3177509 - DNA, 25 bp, Homo sapien
gctaggagattctgcttctgagatg

SEQ ID NO: 3177510 - DNA, 25 bp, Homo sapien
ttcatcactgtagtttaattatgag

SEQ ID NO: 3177511 - DNA, 25 bp, Homo sapien
ctttcatcactgtagtttaattatg

SEQ ID NO: 3177512 - DNA, 25 bp, Homo sapien
catcactgtagtttaattatgagaa

SEQ ID NO: 3177513 - DNA, 25 bp, Homo sapien
cactgtagtttaattatgagaagtt

SEQ ID NO: 3177514 - DNA, 25 bp, Homo sapien
attggtttcttcagaggacacagca

SEQ ID NO: 3177515 - DNA, 25 bp, Homo sapien
ctcttgtttaaagtcattggtttct

SEQ ID NO: 3177516 - DNA, 25 bp, Homo sapien
tggtttcttcagaggacacagcatt

SEQ ID NO: 3177517 - DNA, 25 bp, Homo sapien
tcattggtttcttcagaggacacag

SEQ ID NO: 3177518 - DNA, 25 bp, Homo sapien
tgcattcacagtacataccatggct

SEQ ID NO: 3177519 - DNA, 25 bp, Homo sapien
gaaaggtgactctgttatgcatgtg

SEQ ID NO: 3177520 - DNA, 25 bp, Homo sapien
ataaactgcagctcaaaactgccca

SEQ ID NO: 3177521 - DNA, 25 bp, Homo sapien
tataaccactttcctattaacatgg

SEQ ID NO: 3177522 - DNA, 25 bp, Homo sapien
tggtcatggctttcgttggacttac

SEQ ID NO: 3177523 - DNA, 25 bp, Homo sapien
tccatgtggtcatggctttcgttgg

SEQ ID NO: 3177524 - DNA, 25 bp, Homo sapien
catggctttcgttggacttacttgg

SEQ ID NO: 3177525 - DNA, 25 bp, Homo sapien
tggctttcgttggacttacttggaa

SEQ ID NO: 3177526 - DNA, 25 bp, Homo sapien
tacatcatcagagtcgttcgagtca

SEQ ID NO: 3177527 - DNA, 25 bp, Homo sapien
cagagtcgttcgagtcaatggagtc

SEQ ID NO: 3177528 - DNA, 25 bp, Homo sapien
tcatctacatcatcagagtcgttcg

SEQ ID NO: 3177529 - DNA, 25 bp, Homo sapien
cagtgtcatctacatcatcagagtc

SEQ ID NO: 3177530 - DNA, 25 bp, Homo sapien
tcggccatcatatgtgtctactgtg

SEQ ID NO: 3177531 - DNA, 25 bp, Homo sapien
tgtcaggtctgcgaaacttcttaga

SEQ ID NO: 3177532 - DNA, 25 bp, Homo sapien
tggtgagactcatcagactggtgag

SEQ ID NO: 3177533 - DNA, 25 bp, Homo sapien
aacttcggttgctggcaggtccgtg

SEQ ID NO: 3177534 - DNA, 25 bp, Homo sapien
gacttacaaaaaccgccaagcagaa

SEQ ID NO: 3177535 - DNA, 25 bp, Homo sapien
tgtattcaatggtcataaagtagaa

SEQ ID NO: 3177536 - DNA, 25 bp, Homo sapien
cttgagcgctagtcagaaccatcag

SEQ ID NO: 3177537 - DNA, 25 bp, Homo sapien
aaagtagaattgtgtttgagaatca

SEQ ID NO: 3177538 - DNA, 25 bp, Homo sapien
ggtctacaaccagcatatcttcatg

SEQ ID NO: 3177539 - DNA, 25 bp, Homo sapien
gggatggccttgtatgcaccattca

SEQ ID NO: 3177540 - DNA, 25 bp, Homo sapien
gggtttcagcactctggtcatccag

SEQ ID NO: 3177541 - DNA, 25 bp, Homo sapien
tgtcccaatcagaaggcgcgttcag

SEQ ID NO: 3177542 - DNA, 25 bp, Homo sapien
tcttttgactaaatgcaaagtgaga

SEQ ID NO: 3177543 - DNA, 25 bp, Homo sapien
tccatgaagccacaaactaaactaa

SEQ ID NO: 3177544 - DNA, 25 bp, Homo sapien
tgaacatagacataaccctgaagct

SEQ ID NO: 3177545 - DNA, 25 bp, Homo sapien
gttatttccagactcaaatagatac

SEQ ID NO: 3177546 - DNA, 25 bp, Homo sapien
tgctggacaaccgtgggaaaacaaa

SEQ ID NO: 3177547 - DNA, 25 bp, Homo sapien
ttttattaattgctggacaaccgtg

SEQ ID NO: 3177548 - DNA, 25 bp, Homo sapien
aacaaataagcaattgacaccacca

SEQ ID NO: 3177549 - DNA, 25 bp, Homo sapien
caaataagcaattgacaccaccaaa

SEQ ID NO: 3177550 - DNA, 25 bp, Homo sapien
gaggcaccgcgaggtccagcctggc

SEQ ID NO: 3177551 - DNA, 25 bp, Homo sapien
gaggggtctcaggaggcaccgcgag

SEQ ID NO: 3177552 - DNA, 25 bp, Homo sapien
ggaggcaccgcgaggtccagcctgg

SEQ ID NO: 3177553 - DNA, 25 bp, Homo sapien
ccgaggggtctcaggaggcaccgcg

SEQ ID NO: 3177554 - DNA, 25 bp, Homo sapien
tgttctgggatttggcatctctgct

SEQ ID NO: 3177555 - DNA, 25 bp, Homo sapien
tttgatgtaggcttatttccgtctc

SEQ ID NO: 3177556 - DNA, 25 bp, Homo sapien
tgtgttctgggatttggcatctctg

SEQ ID NO: 3177557 - DNA, 25 bp, Homo sapien
tatttcctgctcaattgtgttctgg

SEQ ID NO: 3177558 - DNA, 25 bp, Homo sapien
gcagtatgctgctaccacaaattac

SEQ ID NO: 3177559 - DNA, 25 bp, Homo sapien
tggtcatggtatctaccctgcctgg

SEQ ID NO: 3177560 - DNA, 25 bp, Homo sapien
tggaatagagaagccttgccctagg

SEQ ID NO: 3177561 - DNA, 25 bp, Homo sapien
cacagggatcagcaagtcttcagtg

SEQ ID NO: 3177562 - DNA, 25 bp, Homo sapien
tccaaggaacttctgaagctgaaga

SEQ ID NO: 3177563 - DNA, 25 bp, Homo sapien
aagctgaagatgtcctgaatagcac

SEQ ID NO: 3177564 - DNA, 25 bp, Homo sapien
ggattcttacagacacattccaaca

SEQ ID NO: 3177565 - DNA, 25 bp, Homo sapien
taagggttatggtgcctgtcatcca

SEQ ID NO: 3177566 - DNA, 25 bp, Homo sapien
tcgcccatccgccgcggcgcgctga

SEQ ID NO: 3177567 - DNA, 25 bp, Homo sapien
ccccgcctcgcccatccgccgcggc

SEQ ID NO: 3177568 - DNA, 25 bp, Homo sapien
cgcccatccgccgcggcgcgctgag

SEQ ID NO: 3177569 - DNA, 25 bp, Homo sapien
cctcgcccatccgccgcggcgcgct

SEQ ID NO: 3177570 - DNA, 25 bp, Homo sapien
gcgctcggcgctgtgcgcctcagga

SEQ ID NO: 3177571 - DNA, 25 bp, Homo sapien
gcgtccggcgcgcgggtgcgcggcg

SEQ ID NO: 3177572 - DNA, 25 bp, Homo sapien
cgctgtgcgcctcaggagccatgtt

SEQ ID NO: 3177573 - DNA, 25 bp, Homo sapien
tcggcgctgtgcgcctcaggagcca

SEQ ID NO: 3177574 - DNA, 25 bp, Homo sapien
gctgcacgcgactggagttcaccat

SEQ ID NO: 3177575 - DNA, 25 bp, Homo sapien
gatgcgctgcatctcgatctccagg

SEQ ID NO: 3177576 - DNA, 25 bp, Homo sapien
agcacgacgagagcggaggagaagg

SEQ ID NO: 3177577 - DNA, 25 bp, Homo sapien
cacgcctgccgggagcacgacgaga

SEQ ID NO: 3177578 - DNA, 25 bp, Homo sapien
cctcgaagccggggttatcgcggct

SEQ ID NO: 3177579 - DNA, 25 bp, Homo sapien
cggcctcgaagccggggttatcgcg

SEQ ID NO: 3177580 - DNA, 25 bp, Homo sapien
gcctcgaagccggggttatcgcggc

SEQ ID NO: 3177581 - DNA, 25 bp, Homo sapien
gggcgccactctacgtccatctcca

SEQ ID NO: 3177582 - DNA, 25 bp, Homo sapien
gggaggtggcgatgcagcgggtccc

SEQ ID NO: 3177583 - DNA, 25 bp, Homo sapien
ctcgcagcccgcgaaccagcctctc

SEQ ID NO: 3177584 - DNA, 25 bp, Homo sapien
gctccgcgcgcccacggagctcacg

SEQ ID NO: 3177585 - DNA, 25 bp, Homo sapien
actgggatttcagtgtaggcctgac

SEQ ID NO: 3177586 - DNA, 25 bp, Homo sapien
caagactttcaaaactgacagaagg

SEQ ID NO: 3177587 - DNA, 25 bp, Homo sapien
ccaaaaattgggtatcagagaggat

SEQ ID NO: 3177588 - DNA, 25 bp, Homo sapien
tactcacacaggttatccgaaaagg

SEQ ID NO: 3177589 - DNA, 25 bp, Homo sapien
tgctgctgacacaatttcctttcag

SEQ ID NO: 3177590 - DNA, 25 bp, Homo sapien
gccaagctctcctgtacaccatgct

SEQ ID NO: 3177591 - DNA, 25 bp, Homo sapien
taatatttagggctacattctcaat

SEQ ID NO: 3177592 - DNA, 25 bp, Homo sapien
ccttcctaatatttagggctacatt

SEQ ID NO: 3177593 - DNA, 25 bp, Homo sapien
tccttggcttcctttggtccaggcc

SEQ ID NO: 3177594 - DNA, 25 bp, Homo sapien
ttggcttcctttggtccaggccctc

SEQ ID NO: 3177595 - DNA, 25 bp, Homo sapien
catccttggcttcctttggtccagg

SEQ ID NO: 3177596 - DNA, 25 bp, Homo sapien
tcatccttggcttcctttggtccag

SEQ ID NO: 3177597 - DNA, 25 bp, Homo sapien
tagaattctggatacacggactgtg

SEQ ID NO: 3177598 - DNA, 25 bp, Homo sapien
tcaggtagctacaacagggagactc

SEQ ID NO: 3177599 - DNA, 25 bp, Homo sapien
tttgggcactactggcatatagcac

SEQ ID NO: 3177600 - DNA, 25 bp, Homo sapien
cggaaagtcacaacagtcgaaaggt

SEQ ID NO: 3177601 - DNA, 25 bp, Homo sapien
tcctcccatatctgggacctggcat

SEQ ID NO: 3177602 - DNA, 25 bp, Homo sapien
cccatatctgggacctggcattgca

SEQ ID NO: 3177603 - DNA, 25 bp, Homo sapien
tgcaatgacttacttatacctctgt

SEQ ID NO: 3177604 - DNA, 25 bp, Homo sapien
ctggccttatcctctctttgctgga

SEQ ID NO: 3177605 - DNA, 25 bp, Homo sapien
tttctaaattactctatctacttcc

SEQ ID NO: 3177606 - DNA, 25 bp, Homo sapien
ctttttctaaattactctatctact

SEQ ID NO: 3177607 - DNA, 25 bp, Homo sapien
ttttctaaattactctatctacttc

SEQ ID NO: 3177608 - DNA, 25 bp, Homo sapien
tctttttctaaattactctatctac

SEQ ID NO: 3177609 - DNA, 25 bp, Homo sapien
cggcaatttaattctagcctttgaa

SEQ ID NO: 3177610 - DNA, 25 bp, Homo sapien
gatggcctacggcaatttaattcta

SEQ ID NO: 3177611 - DNA, 25 bp, Homo sapien
ttcaagctaaacttgtgatggccta

SEQ ID NO: 3177612 - DNA, 25 bp, Homo sapien
taaacttgtgatggcctacggcaat

SEQ ID NO: 3177613 - DNA, 25 bp, Homo sapien
tggctgagtgaagatgacgtaaccc

SEQ ID NO: 3177614 - DNA, 25 bp, Homo sapien
ttcgccacaatcaagccacataggg

SEQ ID NO: 3177615 - DNA, 25 bp, Homo sapien
tgaccgcagttttggactcagccag

SEQ ID NO: 3177616 - DNA, 25 bp, Homo sapien
tggtggccatccaaagccccgttaa

SEQ ID NO: 3177617 - DNA, 25 bp, Homo sapien
cagaagctgtcctattaaaaaactc

SEQ ID NO: 3177618 - DNA, 25 bp, Homo sapien
agcagaagctgtcctattaaaaaac

SEQ ID NO: 3177619 - DNA, 25 bp, Homo sapien
aagctgtcctattaaaaaactccat

SEQ ID NO: 3177620 - DNA, 25 bp, Homo sapien
gaagctgtcctattaaaaaactcca

SEQ ID NO: 3177621 - DNA, 25 bp, Homo sapien
taacttttaggtcacccctgatgaa

SEQ ID NO: 3177622 - DNA, 25 bp, Homo sapien
cttcctatttgaggtggatacaacc

SEQ ID NO: 3177623 - DNA, 25 bp, Homo sapien
tgatcattttataggctcccaagcc

SEQ ID NO: 3177624 - DNA, 25 bp, Homo sapien
tggctccaatgttaccccaaacatg

SEQ ID NO: 3177625 - DNA, 25 bp, Homo sapien
tccatgagtcttgttccccagagac

SEQ ID NO: 3177626 - DNA, 25 bp, Homo sapien
atgtgaccagttcccgtaaaacact

SEQ ID NO: 3177627 - DNA, 25 bp, Homo sapien
ttaaggtatttctctcggttagtgc

SEQ ID NO: 3177628 - DNA, 25 bp, Homo sapien
gagaaaaaggaggtatgtgaccagt

SEQ ID NO: 3177629 - DNA, 25 bp, Homo sapien
gatctcggaaaaccacatatgtatt

SEQ ID NO: 3177630 - DNA, 25 bp, Homo sapien
cattatggaggctctgttagtagat

SEQ ID NO: 3177631 - DNA, 25 bp, Homo sapien
agtgattctaatgctcagtcagttt

SEQ ID NO: 3177632 - DNA, 25 bp, Homo sapien
tgctgaaattctagacttacgtaca

SEQ ID NO: 3177633 - DNA, 25 bp, Homo sapien
tatttatggaagtctactgcttttc

SEQ ID NO: 3177634 - DNA, 25 bp, Homo sapien
atatttatggaagtctactgctttt

SEQ ID NO: 3177635 - DNA, 25 bp, Homo sapien
aatatttatggaagtctactgcttt

SEQ ID NO: 3177636 - DNA, 25 bp, Homo sapien
tccatcttccagactcaagtcatcc

SEQ ID NO: 3177637 - DNA, 25 bp, Homo sapien
atcttccagactcaagtcatcctct

SEQ ID NO: 3177638 - DNA, 25 bp, Homo sapien
tctccatcttccagactcaagtcat

SEQ ID NO: 3177639 - DNA, 25 bp, Homo sapien
cagtctccatcttccagactcaagt

SEQ ID NO: 3177640 - DNA, 25 bp, Homo sapien
gaggagccctccagtcatagttgaa

SEQ ID NO: 3177641 - DNA, 25 bp, Homo sapien
gattttctgaaacgccctggagaca

SEQ ID NO: 3177642 - DNA, 25 bp, Homo sapien
ttcaggtgaactagagagcatggct

SEQ ID NO: 3177643 - DNA, 25 bp, Homo sapien
caatttatcagaaagggcgaggagc

SEQ ID NO: 3177644 - DNA, 25 bp, Homo sapien
ttcgggtgggcaccactaagcttct

SEQ ID NO: 3177645 - DNA, 25 bp, Homo sapien
gaaccagatatttatagggaatggc

SEQ ID NO: 3177646 - DNA, 25 bp, Homo sapien
gatgaggaggaattagaatgacaga

SEQ ID NO: 3177647 - DNA, 25 bp, Homo sapien
gtgggcccgaatggcagcacaactc

SEQ ID NO: 3177648 - DNA, 25 bp, Homo sapien
ctctccaggtgtcggcactgagagg

SEQ ID NO: 3177649 - DNA, 25 bp, Homo sapien
caagggcggtgaacgcatgagctgg

SEQ ID NO: 3177650 - DNA, 25 bp, Homo sapien
gactctccaggtgtcggcactgaga

SEQ ID NO: 3177651 - DNA, 25 bp, Homo sapien
catccctgcaagggcggtgaacgca

SEQ ID NO: 3177652 - DNA, 25 bp, Homo sapien
tgagaagtcctagtgaacaagaaat

SEQ ID NO: 3177653 - DNA, 25 bp, Homo sapien
atgagaagtcctagtgaacaagaaa

SEQ ID NO: 3177654 - DNA, 25 bp, Homo sapien
aaatgagaagtcctagtgaacaaga

SEQ ID NO: 3177655 - DNA, 25 bp, Homo sapien
aatgagaagtcctagtgaacaagaa

SEQ ID NO: 3177656 - DNA, 25 bp, Homo sapien
tataacttatggtatcctcacaggg

SEQ ID NO: 3177657 - DNA, 25 bp, Homo sapien
tgcaggtggcagctaaaagactcct

SEQ ID NO: 3177658 - DNA, 25 bp, Homo sapien
tgtcctctgcaaaagccgtctgtaa

SEQ ID NO: 3177659 - DNA, 25 bp, Homo sapien
tcaccaagggcaagcaacagattcc

SEQ ID NO: 3177660 - DNA, 25 bp, Homo sapien
ttggacaaattcacacaaggtcttc

SEQ ID NO: 3177661 - DNA, 25 bp, Homo sapien
gcagccttcacaaagggattgttcc

SEQ ID NO: 3177662 - DNA, 25 bp, Homo sapien
cagccttcacaaagggattgttcct

SEQ ID NO: 3177663 - DNA, 25 bp, Homo sapien
tgaacgccccaagggaaccggcaca

SEQ ID NO: 3177664 - DNA, 25 bp, Homo sapien
gatccaaatgaacgccccaagggaa

SEQ ID NO: 3177665 - DNA, 25 bp, Homo sapien
aagatccaaatgaacgccccaaggg

SEQ ID NO: 3177666 - DNA, 25 bp, Homo sapien
agaaagatccaaatgaacgccccaa

SEQ ID NO: 3177667 - DNA, 25 bp, Homo sapien
cattggagctcatcatgccgtaggt

SEQ ID NO: 3177668 - DNA, 25 bp, Homo sapien
catcatccgggtgtagtagtacaca

SEQ ID NO: 3177669 - DNA, 25 bp, Homo sapien
agctgtgacatcatccgggtgtagt

SEQ ID NO: 3177670 - DNA, 25 bp, Homo sapien
tgtagtagtacacattggagctcat

SEQ ID NO: 3177671 - DNA, 25 bp, Homo sapien
gtattcgtggaacccctaacagcag

SEQ ID NO: 3177672 - DNA, 25 bp, Homo sapien
gaaacttcggttgtcagcttcagtc

SEQ ID NO: 3177673 - DNA, 25 bp, Homo sapien
gggagccctatcttcactactgaca

SEQ ID NO: 3177674 - DNA, 25 bp, Homo sapien
ccagtacagcccatccaataaggag

SEQ ID NO: 3177675 - DNA, 25 bp, Homo sapien
gtgtatactggaaggtacaagaaga

SEQ ID NO: 3177676 - DNA, 25 bp, Homo sapien
ttcttatgggttctggtattaaata

SEQ ID NO: 3177677 - DNA, 25 bp, Homo sapien
tctggtattaaatagagtgtatact

SEQ ID NO: 3177678 - DNA, 25 bp, Homo sapien
aaatagagtgtatactggaaggtac

SEQ ID NO: 3177679 - DNA, 25 bp, Homo sapien
cgacgcaattaatatggaggaggaa

SEQ ID NO: 3177680 - DNA, 25 bp, Homo sapien
gacaagccaccctaacgacgcaatt

SEQ ID NO: 3177681 - DNA, 25 bp, Homo sapien
cagtccaatttgttagctgtgacac

SEQ ID NO: 3177682 - DNA, 25 bp, Homo sapien
ggagctgagagcgtcgacaagccac

SEQ ID NO: 3177683 - DNA, 25 bp, Homo sapien
taagttgcaatgattccccagtggc

SEQ ID NO: 3177684 - DNA, 25 bp, Homo sapien
tgacaaatccagataatagccagct

SEQ ID NO: 3177685 - DNA, 25 bp, Homo sapien
tcttgaggctagcaacttgtgcagc

SEQ ID NO: 3177686 - DNA, 25 bp, Homo sapien
tgttggcgttgtacactgagaagtc

SEQ ID NO: 3177687 - DNA, 25 bp, Homo sapien
tcatgtagctaactgcaggcaaagg

SEQ ID NO: 3177688 - DNA, 25 bp, Homo sapien
tttacgtgcctttggtagccctgag

SEQ ID NO: 3177689 - DNA, 25 bp, Homo sapien
tagccctgagcacgagcaggtaacc

SEQ ID NO: 3177690 - DNA, 25 bp, Homo sapien
caggtaacctgggtatcctactgag

SEQ ID NO: 3177691 - DNA, 25 bp, Homo sapien
tcacagaggggtcatcatggcaaca

SEQ ID NO: 3177692 - DNA, 25 bp, Homo sapien
ggtcatcatggcaacatcccaggat

SEQ ID NO: 3177693 - DNA, 25 bp, Homo sapien
cacagaggggtcatcatggcaacat

SEQ ID NO: 3177694 - DNA, 25 bp, Homo sapien
aggggtcatcatggcaacatcccag

SEQ ID NO: 3177695 - DNA, 25 bp, Homo sapien
gctgacatgtcccaagagccgagaa

SEQ ID NO: 3177696 - DNA, 25 bp, Homo sapien
cgagaacaatgcctagcccatatta

SEQ ID NO: 3177697 - DNA, 25 bp, Homo sapien
tagtctcctcctggttggatgcaag

SEQ ID NO: 3177698 - DNA, 25 bp, Homo sapien
tcctggttggatgcaagctctgcca

SEQ ID NO: 3177699 - DNA, 25 bp, Homo sapien
tgatgacaaagactattatgagaat

SEQ ID NO: 3177700 - DNA, 25 bp, Homo sapien
tctataattgatttaatgtggtact

SEQ ID NO: 3177701 - DNA, 25 bp, Homo sapien
gaattgaacttaacctcaagaatga

SEQ ID NO: 3177702 - DNA, 25 bp, Homo sapien
gaataaacacttcttatcttatgtg

SEQ ID NO: 3177703 - DNA, 25 bp, Homo sapien
tcaaaaactcaggagagcaactctg

SEQ ID NO: 3177704 - DNA, 25 bp, Homo sapien
aggtcattgtcaacatgctggcaca

SEQ ID NO: 3177705 - DNA, 25 bp, Homo sapien
gcaccgccatgaacgcacaagtgga

SEQ ID NO: 3177706 - DNA, 25 bp, Homo sapien
tgataactactactggactactggt

SEQ ID NO: 3177707 - DNA, 25 bp, Homo sapien
caccacctgttgctgggaattcaac

SEQ ID NO: 3177708 - DNA, 25 bp, Homo sapien
accacctgttgctgggaattcaacc

SEQ ID NO: 3177709 - DNA, 25 bp, Homo sapien
tcagctttaaaggctgaaattgcca

SEQ ID NO: 3177710 - DNA, 25 bp, Homo sapien
ggatcagctttaaaggctgaaattg

SEQ ID NO: 3177711 - DNA, 25 bp, Homo sapien
ccagacaattccagaaactcctgaa

SEQ ID NO: 3177712 - DNA, 25 bp, Homo sapien
cgaatttccaatatctcttccacca

SEQ ID NO: 3177713 - DNA, 25 bp, Homo sapien
caacgatcacaacatccagacaatt

SEQ ID NO: 3177714 - DNA, 25 bp, Homo sapien
tgtagtttgtgaatgcgaatttcca

SEQ ID NO: 3177715 - DNA, 25 bp, Homo sapien
gatactcttgttattagcgtggctg

SEQ ID NO: 3177716 - DNA, 25 bp, Homo sapien
catactcagcaaagttactcatgca

SEQ ID NO: 3177717 - DNA, 25 bp, Homo sapien
gcgtggctgagagcatactgtaaat

SEQ ID NO: 3177718 - DNA, 25 bp, Homo sapien
tatcaagatccacaatgctgaggag

SEQ ID NO: 3177719 - DNA, 25 bp, Homo sapien
tctgtaccatgaaaagcacccggaa

SEQ ID NO: 3177720 - DNA, 25 bp, Homo sapien
tgtatggccatcgtaaaagacggga

SEQ ID NO: 3177721 - DNA, 25 bp, Homo sapien
catatccatggcttgagaggcagtg

SEQ ID NO: 3177722 - DNA, 25 bp, Homo sapien
tggtacacctatgccaagcaaagct

SEQ ID NO: 3177723 - DNA, 25 bp, Homo sapien
gtgagattccagtagcccttccttg

SEQ ID NO: 3177724 - DNA, 25 bp, Homo sapien
ttaccctgtacaacctagcaagtgg

SEQ ID NO: 3177725 - DNA, 25 bp, Homo sapien
acactgtctgaattgttgtctggca

SEQ ID NO: 3177726 - DNA, 25 bp, Homo sapien
caggacaaatggctgactgatgcag

SEQ ID NO: 3177727 - DNA, 25 bp, Homo sapien
tagaacagtggcaagtacatagtag

SEQ ID NO: 3177728 - DNA, 25 bp, Homo sapien
tgcattgttacatcactcctgagtt

SEQ ID NO: 3177729 - DNA, 25 bp, Homo sapien
taaatgaattagtcgggccaggcgc

SEQ ID NO: 3177730 - DNA, 25 bp, Homo sapien
gaaaacactcgctgaataaatgaat

SEQ ID NO: 3177731 - DNA, 25 bp, Homo sapien
ggcttctcctgagatgaggagctca

SEQ ID NO: 3177732 - DNA, 25 bp, Homo sapien
taggcttctcctgagatgaggagct

SEQ ID NO: 3177733 - DNA, 25 bp, Homo sapien
ctgcagtgggaataggcttctcctg

SEQ ID NO: 3177734 - DNA, 25 bp, Homo sapien
aataggcttctcctgagatgaggag

SEQ ID NO: 3177735 - DNA, 25 bp, Homo sapien
gattctcatagcaaagaccagcttg

SEQ ID NO: 3177736 - DNA, 25 bp, Homo sapien
tctcttcttaggaatcatggccaga

SEQ ID NO: 3177737 - DNA, 25 bp, Homo sapien
caggtgctgcgatctttgctgtcca

SEQ ID NO: 3177738 - DNA, 25 bp, Homo sapien
catggccagagaccacttcattagc

SEQ ID NO: 3177739 - DNA, 25 bp, Homo sapien
taattcctatagctaccactgacag

SEQ ID NO: 3177740 - DNA, 25 bp, Homo sapien
gatcttccagaaactgtagtagcac

SEQ ID NO: 3177741 - DNA, 25 bp, Homo sapien
tgtagtagcacctccacatttgatg

SEQ ID NO: 3177742 - DNA, 25 bp, Homo sapien
aatactgtgacagcagctatattgt

SEQ ID NO: 3177743 - DNA, 25 bp, Homo sapien
tcctagacagtagccattgaacact

SEQ ID NO: 3177744 - DNA, 25 bp, Homo sapien
gaagcagtgtctgttccaaccttaa

SEQ ID NO: 3177745 - DNA, 25 bp, Homo sapien
tggccagtaggaccaaggaactgcg

SEQ ID NO: 3177746 - DNA, 25 bp, Homo sapien
tctacctggaaaagaggcgatccct

SEQ ID NO: 3177747 - DNA, 25 bp, Homo sapien
ccaagtctatgtcttgtgataaacc

SEQ ID NO: 3177748 - DNA, 25 bp, Homo sapien
gtcttgtgataaacctcaggtcttc

SEQ ID NO: 3177749 - DNA, 25 bp, Homo sapien
tgcgcctggtccaagtctatgtctt

SEQ ID NO: 3177750 - DNA, 25 bp, Homo sapien
gataaacctcaggtcttctaggtat

SEQ ID NO: 3177751 - DNA, 25 bp, Homo sapien
tgttaaaattgatgaatttgaagag

SEQ ID NO: 3177752 - DNA, 25 bp, Homo sapien
ctgttaaaattgatgaatttgaaga

SEQ ID NO: 3177753 - DNA, 25 bp, Homo sapien
tactgaagtcatcgacctgagtgcc

SEQ ID NO: 3177754 - DNA, 25 bp, Homo sapien
cataatagcaaagccaaacaggtct

SEQ ID NO: 3177755 - DNA, 25 bp, Homo sapien
gacatggttgtcgagagctggctca

SEQ ID NO: 3177756 - DNA, 25 bp, Homo sapien
ctgagtgccaaagacaaggtatgcc

SEQ ID NO: 3177757 - DNA, 25 bp, Homo sapien
tagcttgggcgatggaacgagactc

SEQ ID NO: 3177758 - DNA, 25 bp, Homo sapien
ctagcttgggcgatggaacgagact

SEQ ID NO: 3177759 - DNA, 25 bp, Homo sapien
caatctctgcaaagttgatatcgcc

SEQ ID NO: 3177760 - DNA, 25 bp, Homo sapien
aattggtcccaaaactcgattagct

SEQ ID NO: 3177761 - DNA, 25 bp, Homo sapien
tcgcccaaaatgatacggaattgag

SEQ ID NO: 3177762 - DNA, 25 bp, Homo sapien
caaatgtagtgaaataaattggtcc

SEQ ID NO: 3177763 - DNA, 25 bp, Homo sapien
atcctgtctcccgaggttccctgaa

SEQ ID NO: 3177764 - DNA, 25 bp, Homo sapien
ccctgaattatcagatggacatctg

SEQ ID NO: 3177765 - DNA, 25 bp, Homo sapien
ttatcagatggacatctgcaccagg

SEQ ID NO: 3177766 - DNA, 25 bp, Homo sapien
tcccgaggttccctgaattatcaga

SEQ ID NO: 3177767 - DNA, 25 bp, Homo sapien
cacttcagagtaagtatcattgatg

SEQ ID NO: 3177768 - DNA, 25 bp, Homo sapien
gatttcacttcagagtaagtatcat

SEQ ID NO: 3177769 - DNA, 25 bp, Homo sapien
ttctgataagatctgagagttccat

SEQ ID NO: 3177770 - DNA, 25 bp, Homo sapien
tgctgtgccaagtcagatttcactt

SEQ ID NO: 3177771 - DNA, 25 bp, Homo sapien
tctgaaatgtcatccacggtatttt

SEQ ID NO: 3177772 - DNA, 25 bp, Homo sapien
tagtttgaccaaagctttatggtag

SEQ ID NO: 3177773 - DNA, 25 bp, Homo sapien
tcttgtcgaagttcgtcaaagttta

SEQ ID NO: 3177774 - DNA, 25 bp, Homo sapien
ccttgccgcagactctctgaaatgt

SEQ ID NO: 3177775 - DNA, 25 bp, Homo sapien
catgttcggtcagttcttggtctcc

SEQ ID NO: 3177776 - DNA, 25 bp, Homo sapien
ccatcttggtcgtactttgtgaata

SEQ ID NO: 3177777 - DNA, 25 bp, Homo sapien
tctctcatctgctgatgttcatgtt

SEQ ID NO: 3177778 - DNA, 25 bp, Homo sapien
ttgtgaatattgcctcaatctctgc

SEQ ID NO: 3177779 - DNA, 25 bp, Homo sapien
tgaaactcttcgtaagaaacgccac

SEQ ID NO: 3177780 - DNA, 25 bp, Homo sapien
ggaaacttcggctgctcatgggacg

SEQ ID NO: 3177781 - DNA, 25 bp, Homo sapien
catccaggcttcgagggaaacttcg

SEQ ID NO: 3177782 - DNA, 25 bp, Homo sapien
gctatgtccgctatcttcatcgtca

SEQ ID NO: 3177783 - DNA, 25 bp, Homo sapien
cttggacactatgctgccgatggaa

SEQ ID NO: 3177784 - DNA, 25 bp, Homo sapien
tcctcttcagtttggctcgctccat

SEQ ID NO: 3177785 - DNA, 25 bp, Homo sapien
gatcacggcgtcaatcttggacact

SEQ ID NO: 3177786 - DNA, 25 bp, Homo sapien
aatctctagcttcacgatcacggcg

SEQ ID NO: 3177787 - DNA, 25 bp, Homo sapien
cggccaccccatccaacagccttcc

SEQ ID NO: 3177788 - DNA, 25 bp, Homo sapien
gccaccccatccaacagccttccca

SEQ ID NO: 3177789 - DNA, 25 bp, Homo sapien
ggccaccccatccaacagccttccc

SEQ ID NO: 3177790 - DNA, 25 bp, Homo sapien
ggatttcactgtcacgacccagcct

SEQ ID NO: 3177791 - DNA, 25 bp, Homo sapien
gcgtgcctaaaccatgactgatctg

SEQ ID NO: 3177792 - DNA, 25 bp, Homo sapien
catgccttctgtagattgggaggaa

SEQ ID NO: 3177793 - DNA, 25 bp, Homo sapien
ggttgaccatttagtcccactggcg

SEQ ID NO: 3177794 - DNA, 25 bp, Homo sapien
tggcaactgggcgtaccgctcaata

SEQ ID NO: 3177795 - DNA, 25 bp, Homo sapien
taaactgagtgacaacttagggctc

SEQ ID NO: 3177796 - DNA, 25 bp, Homo sapien
ctagcatcctatggtggtcagggca

SEQ ID NO: 3177797 - DNA, 25 bp, Homo sapien
gcattaaacgacaggattctcttgg

SEQ ID NO: 3177798 - DNA, 25 bp, Homo sapien
gccaaccattcgctatagtaataga

SEQ ID NO: 3177799 - DNA, 25 bp, Homo sapien
gaaatagaattagggccaaccattc

SEQ ID NO: 3177800 - DNA, 25 bp, Homo sapien
taatagatactatgtcaaatgtggc

SEQ ID NO: 3177801 - DNA, 25 bp, Homo sapien
ggtaacttactagagctgcacactg

SEQ ID NO: 3177802 - DNA, 25 bp, Homo sapien
cgtgcaggtgcatacagatctggcc

SEQ ID NO: 3177803 - DNA, 25 bp, Homo sapien
tgcaggtgcatacagatctggccaa

SEQ ID NO: 3177804 - DNA, 25 bp, Homo sapien
ccacgtgcaggtgcatacagatctg

SEQ ID NO: 3177805 - DNA, 25 bp, Homo sapien
acgtgcaggtgcatacagatctggc

SEQ ID NO: 3177806 - DNA, 25 bp, Homo sapien
gatttgtgtttgatagcagcatcac

SEQ ID NO: 3177807 - DNA, 25 bp, Homo sapien
gcatcaccattcagatagtcatcta

SEQ ID NO: 3177808 - DNA, 25 bp, Homo sapien
ctaagtcactataacctgatttcct

SEQ ID NO: 3177809 - DNA, 25 bp, Homo sapien
agtcatctacattccaaaaaagctg

SEQ ID NO: 3177810 - DNA, 25 bp, Homo sapien
aagtatccatgagaaaggccttttt

SEQ ID NO: 3177811 - DNA, 25 bp, Homo sapien
ttttggctgtagtatttccagtctt

SEQ ID NO: 3177812 - DNA, 25 bp, Homo sapien
tggctgtagtatttccagtctttct

SEQ ID NO: 3177813 - DNA, 25 bp, Homo sapien
tttcctgtttaagtatccatgagaa

SEQ ID NO: 3177814 - DNA, 25 bp, Homo sapien
tgtccctacccatgaccaaagtcag

SEQ ID NO: 3177815 - DNA, 25 bp, Homo sapien
ttcagggagctctcataggctatgg

SEQ ID NO: 3177816 - DNA, 25 bp, Homo sapien
gagtgatcctttaaaccaagcttgt

SEQ ID NO: 3177817 - DNA, 25 bp, Homo sapien
ggcaggcgattttgcagaacatgca

SEQ ID NO: 3177818 - DNA, 25 bp, Homo sapien
tcttcccacagtgccaatttggtgg

SEQ ID NO: 3177819 - DNA, 25 bp, Homo sapien
cttcccacagtgccaatttggtgga

SEQ ID NO: 3177820 - DNA, 25 bp, Homo sapien
gtgcttcggcgctccggccagtgac

SEQ ID NO: 3177821 - DNA, 25 bp, Homo sapien
ttgtgactgggcaacctgtgcgtca

SEQ ID NO: 3177822 - DNA, 25 bp, Homo sapien
cttgctctgggtgcgagcagcgctt

SEQ ID NO: 3177823 - DNA, 25 bp, Homo sapien
ctgtgcgtcagcgtccccggtgctt

SEQ ID NO: 3177824 - DNA, 25 bp, Homo sapien
gtttatggcagaatagcccttcttc

SEQ ID NO: 3177825 - DNA, 25 bp, Homo sapien
tcgtttatggcagaatagcccttct

SEQ ID NO: 3177826 - DNA, 25 bp, Homo sapien
ctcgtttatggcagaatagcccttc

SEQ ID NO: 3177827 - DNA, 25 bp, Homo sapien
cgtttatggcagaatagcccttctt

SEQ ID NO: 3177828 - DNA, 25 bp, Homo sapien
tgttgaacctggtattaacacacac

SEQ ID NO: 3177829 - DNA, 25 bp, Homo sapien
cacagatgcggtatggaacattcct

SEQ ID NO: 3177830 - DNA, 25 bp, Homo sapien
cacacagatgcggtatggaacattc

SEQ ID NO: 3177831 - DNA, 25 bp, Homo sapien
acctggtattaacacacacatctgg

SEQ ID NO: 3177832 - DNA, 25 bp, Homo sapien
tatctttgtgtagggcgccgtgcta

SEQ ID NO: 3177833 - DNA, 25 bp, Homo sapien
attatctttgtgtagggcgccgtgc

SEQ ID NO: 3177834 - DNA, 25 bp, Homo sapien
tctttgtgtagggcgccgtgctaat

SEQ ID NO: 3177835 - DNA, 25 bp, Homo sapien
ttatctttgtgtagggcgccgtgct

SEQ ID NO: 3177836 - DNA, 25 bp, Homo sapien
ctggcatacctttggtccagctgtg

SEQ ID NO: 3177837 - DNA, 25 bp, Homo sapien
tctggtacaaaagtagagagtaagt

SEQ ID NO: 3177838 - DNA, 25 bp, Homo sapien
tagagagtaagtatttcagggtaat

SEQ ID NO: 3177839 - DNA, 25 bp, Homo sapien
ggagctggcatacctttggtccagc

SEQ ID NO: 3177840 - DNA, 25 bp, Homo sapien
catctttagtgatttcaccacactg

SEQ ID NO: 3177841 - DNA, 25 bp, Homo sapien
aaagcccaagtactaacatctttag

SEQ ID NO: 3177842 - DNA, 25 bp, Homo sapien
tgctggagtgtttggaagacttttc

SEQ ID NO: 3177843 - DNA, 25 bp, Homo sapien
taagactgtcctgagacttggaaga

SEQ ID NO: 3177844 - DNA, 25 bp, Homo sapien
gccctcgggcctgacaacaagcaca

SEQ ID NO: 3177845 - DNA, 25 bp, Homo sapien
cctacttcatggcatccaactatca

SEQ ID NO: 3177846 - DNA, 25 bp, Homo sapien
caacaagcacacagttaaggcattg

SEQ ID NO: 3177847 - DNA, 25 bp, Homo sapien
aaggttaacacttctcttgacaagg

SEQ ID NO: 3177848 - DNA, 25 bp, Homo sapien
gtatatttgctgctaaaaggaacat

SEQ ID NO: 3177849 - DNA, 25 bp, Homo sapien
agtatatttgctgctaaaaggaaca

SEQ ID NO: 3177850 - DNA, 25 bp, Homo sapien
tcatctgccaactctctggacccat

SEQ ID NO: 3177851 - DNA, 25 bp, Homo sapien
atctgccaactctctggacccattt

SEQ ID NO: 3177852 - DNA, 25 bp, Homo sapien
taccatcatctgccaactctctgga

SEQ ID NO: 3177853 - DNA, 25 bp, Homo sapien
catcatctgccaactctctggaccc

SEQ ID NO: 3177854 - DNA, 25 bp, Homo sapien
caatgttccctggtagctgcaggat

SEQ ID NO: 3177855 - DNA, 25 bp, Homo sapien
tctactttgggggctgccaagtttc

SEQ ID NO: 3177856 - DNA, 25 bp, Homo sapien
aggatctactttgggggctgccaag

SEQ ID NO: 3177857 - DNA, 25 bp, Homo sapien
tggtagctgcaggatctactttggg

SEQ ID NO: 3177858 - DNA, 25 bp, Homo sapien
gaaatttcataccaaggtttgtcta

SEQ ID NO: 3177859 - DNA, 25 bp, Homo sapien
aaagaagtttagatatatccacaga

SEQ ID NO: 3177860 - DNA, 25 bp, Homo sapien
catgaggaaagagggagtcttacca

SEQ ID NO: 3177861 - DNA, 25 bp, Homo sapien
gcattttgtactttctcttccggga

SEQ ID NO: 3177862 - DNA, 25 bp, Homo sapien
gaagctctcgttcaatcagttctag

SEQ ID NO: 3177863 - DNA, 25 bp, Homo sapien
gcagcacagctgacaaaatatgaca

SEQ ID NO: 3177864 - DNA, 25 bp, Homo sapien
ctaaatggagtaggtgggcccagca

SEQ ID NO: 3177865 - DNA, 25 bp, Homo sapien
gagtcttcttaggtcctgccaagaa

SEQ ID NO: 3177866 - DNA, 25 bp, Homo sapien
gattacagcactgtgccctcctagg

SEQ ID NO: 3177867 - DNA, 25 bp, Homo sapien
tctttagaaggtgaacaagccaact

SEQ ID NO: 3177868 - DNA, 25 bp, Homo sapien
gaaatggtgcgttggtggtcatact

SEQ ID NO: 3177869 - DNA, 25 bp, Homo sapien
cagttgggatgagaacaattgactc

SEQ ID NO: 3177870 - DNA, 25 bp, Homo sapien
tgactctgctttatccgggaaagct

SEQ ID NO: 3177871 - DNA, 25 bp, Homo sapien
tatgcatgtattaggatactggaaa

SEQ ID NO: 3177872 - DNA, 25 bp, Homo sapien
gattgccaggttcgacaaagaggaa

SEQ ID NO: 3177873 - DNA, 25 bp, Homo sapien
gatatagggtagacttgactctgct

SEQ ID NO: 3177874 - DNA, 25 bp, Homo sapien
tacctttaggaacatggagaatttc

SEQ ID NO: 3177875 - DNA, 25 bp, Homo sapien
tgaggaaccaaagggaggcaactaa

SEQ ID NO: 3177876 - DNA, 25 bp, Homo sapien
cagaaatgtggaagctacctttagg

SEQ ID NO: 3177877 - DNA, 25 bp, Homo sapien
gcgggaaaccatcttgctttttcta

SEQ ID NO: 3177878 - DNA, 25 bp, Homo sapien
taactgtaccaaggaataagtatga

SEQ ID NO: 3177879 - DNA, 25 bp, Homo sapien
tgtattctggaccacttactggtga

SEQ ID NO: 3177880 - DNA, 25 bp, Homo sapien
tgaattttgacagctattcaatatg

SEQ ID NO: 3177881 - DNA, 25 bp, Homo sapien
agctattcaatatgtgatctccaag

SEQ ID NO: 3177882 - DNA, 25 bp, Homo sapien
tacttaggcagagtttactatgtgc

SEQ ID NO: 3177883 - DNA, 25 bp, Homo sapien
tatagtgtaggcttccaaaactggc

SEQ ID NO: 3177884 - DNA, 25 bp, Homo sapien
gtctatagatatcccacatcgtgtg

SEQ ID NO: 3177885 - DNA, 25 bp, Homo sapien
taaagcatacagaggtcaatgcacc

SEQ ID NO: 3177886 - DNA, 25 bp, Homo sapien
tgcatccaatcagccagcatcacct

SEQ ID NO: 3177887 - DNA, 25 bp, Homo sapien
gcacccaatcaatcagcatcacttg

SEQ ID NO: 3177888 - DNA, 25 bp, Homo sapien
acaatcagcatcacctgcatccaat

SEQ ID NO: 3177889 - DNA, 25 bp, Homo sapien
gcatcacctgcacccaagcaatcag

SEQ ID NO: 3177890 - DNA, 25 bp, Homo sapien
tgtgaatagctttgaatacctgact

SEQ ID NO: 3177891 - DNA, 25 bp, Homo sapien
tcagtgtaggacagataagtgcttc

SEQ ID NO: 3177892 - DNA, 25 bp, Homo sapien
catgagataacctatgagaagcatt

SEQ ID NO: 3177893 - DNA, 25 bp, Homo sapien
gaagcatttactcccatcagtgtag

SEQ ID NO: 3177894 - DNA, 25 bp, Homo sapien
tctaaattctgtgacagcagagctc

SEQ ID NO: 3177895 - DNA, 25 bp, Homo sapien
taaattctgtgacagcagagctcat

SEQ ID NO: 3177896 - DNA, 25 bp, Homo sapien
ttattctaaattctgtgacagcaga

SEQ ID NO: 3177897 - DNA, 25 bp, Homo sapien
ctttattctaaattctgtgacagca

SEQ ID NO: 3177898 - DNA, 25 bp, Homo sapien
cagggagcgctgtagtactcaaggc

SEQ ID NO: 3177899 - DNA, 25 bp, Homo sapien
aatgaggctgtccttcggtttcaga

SEQ ID NO: 3177900 - DNA, 25 bp, Homo sapien
tcatcggttctttccgtcagggcgg

SEQ ID NO: 3177901 - DNA, 25 bp, Homo sapien
gcagtctcaaaagctccacgggctt

SEQ ID NO: 3177902 - DNA, 25 bp, Homo sapien
gctggttttgatccgaagacttggg

SEQ ID NO: 3177903 - DNA, 25 bp, Homo sapien
aggaggtccggcatcgtgaaggatg

SEQ ID NO: 3177904 - DNA, 25 bp, Homo sapien
cccggctggttttgatccgaagact

SEQ ID NO: 3177905 - DNA, 25 bp, Homo sapien
gcatcgtgaaggatgcacagccccg

SEQ ID NO: 3177906 - DNA, 25 bp, Homo sapien
ggctcgttcccatcggcatctgtga

SEQ ID NO: 3177907 - DNA, 25 bp, Homo sapien
tgcgaagtcaaatagcagccgcggg

SEQ ID NO: 3177908 - DNA, 25 bp, Homo sapien
ccatctggtcaactgcgggagaaaa

SEQ ID NO: 3177909 - DNA, 25 bp, Homo sapien
gtcagtcagcgggaacagacttctc

SEQ ID NO: 3177910 - DNA, 25 bp, Homo sapien
ggcagtgaaatcagatgcctttcaa

SEQ ID NO: 3177911 - DNA, 25 bp, Homo sapien
aactctaagcctaagcagtattggc

SEQ ID NO: 3177912 - DNA, 25 bp, Homo sapien
aagcagtattggcattccgttctcg

SEQ ID NO: 3177913 - DNA, 25 bp, Homo sapien
taagcctaagcagtattggcattcc

SEQ ID NO: 3177914 - DNA, 25 bp, Homo sapien
tgttcagccacgaagaagactgcac

SEQ ID NO: 3177915 - DNA, 25 bp, Homo sapien
ctgttcagccacgaagaagactgca

SEQ ID NO: 3177916 - DNA, 25 bp, Homo sapien
ttcagccacgaagaagactgcactg

SEQ ID NO: 3177917 - DNA, 25 bp, Homo sapien
gttcagccacgaagaagactgcact

SEQ ID NO: 3177918 - DNA, 25 bp, Homo sapien
ttggttgcttgacaaccagtgacaa

SEQ ID NO: 3177919 - DNA, 25 bp, Homo sapien
ccagtgacaaacaggcttttcatca

SEQ ID NO: 3177920 - DNA, 25 bp, Homo sapien
gcttgacaaccagtgacaaacaggc

SEQ ID NO: 3177921 - DNA, 25 bp, Homo sapien
tgacaaccagtgacaaacaggcttt

SEQ ID NO: 3177922 - DNA, 25 bp, Homo sapien
caaaataaggcggtgtgtttgtacg

SEQ ID NO: 3177923 - DNA, 25 bp, Homo sapien
ccactcggtacaaaataaggcggtg

SEQ ID NO: 3177924 - DNA, 25 bp, Homo sapien
taaggcggtgtgtttgtacgtgcat

SEQ ID NO: 3177925 - DNA, 25 bp, Homo sapien
ctcggtacaaaataaggcggtgtgt

SEQ ID NO: 3177926 - DNA, 25 bp, Homo sapien
aatagaaaagcagttcagcacctac

SEQ ID NO: 3177927 - DNA, 25 bp, Homo sapien
caatagaaaagcagttcagcaccta

SEQ ID NO: 3177928 - DNA, 25 bp, Homo sapien
tccagcttcctatcacttcgtatgg

SEQ ID NO: 3177929 - DNA, 25 bp, Homo sapien
ccagcttcctatcacttcgtatggt

SEQ ID NO: 3177930 - DNA, 25 bp, Homo sapien
aaaaaaactgaaggggcacatgaag

SEQ ID NO: 3177931 - DNA, 25 bp, Homo sapien
tggtatatagctgggctgataaaaa

SEQ ID NO: 3177932 - DNA, 25 bp, Homo sapien
aaaaaactgaaggggcacatgaagg

SEQ ID NO: 3177933 - DNA, 25 bp, Homo sapien
ctgtggtatatagctgggctgataa

SEQ ID NO: 3177934 - DNA, 25 bp, Homo sapien
tggtggccacaatggaagactcctt

SEQ ID NO: 3177935 - DNA, 25 bp, Homo sapien
agctgtggtggccacaatggaagac

SEQ ID NO: 3177936 - DNA, 25 bp, Homo sapien
tgtggtggccacaatggaagactcc

SEQ ID NO: 3177937 - DNA, 25 bp, Homo sapien
ggtggccacaatggaagactccttc

SEQ ID NO: 3177938 - DNA, 25 bp, Homo sapien
cgaagtgggaggattgcttcagccc

SEQ ID NO: 3177939 - DNA, 25 bp, Homo sapien
gccaagcatggcaggtggctcatgt

SEQ ID NO: 3177940 - DNA, 25 bp, Homo sapien
tcaaaaccagtctaggcaacatagc

SEQ ID NO: 3177941 - DNA, 25 bp, Homo sapien
ctgatatcccagcactttgagaggc

SEQ ID NO: 3177942 - DNA, 25 bp, Homo sapien
ttctctcatggcagaaagttgatga

SEQ ID NO: 3177943 - DNA, 25 bp, Homo sapien
ttgatgtctagtgagaacctgcttc

SEQ ID NO: 3177944 - DNA, 25 bp, Homo sapien
aaagttgatgagaaagctccttggg

SEQ ID NO: 3177945 - DNA, 25 bp, Homo sapien
gagaacctgcttcctagttcccagt

SEQ ID NO: 3177946 - DNA, 25 bp, Homo sapien
taagatgtacaatggttcagttcag

SEQ ID NO: 3177947 - DNA, 25 bp, Homo sapien
cctgaaaacataagctcaaggtggt

SEQ ID NO: 3177948 - DNA, 25 bp, Homo sapien
cagttatgagtgactaatggcccat

SEQ ID NO: 3177949 - DNA, 25 bp, Homo sapien
aattgggggcttccacgtcacaggc

SEQ ID NO: 3177950 - DNA, 25 bp, Homo sapien
tttgccagtatcctccttgtactgg

SEQ ID NO: 3177951 - DNA, 25 bp, Homo sapien
tcctccttgtactggcgtgactcca

SEQ ID NO: 3177952 - DNA, 25 bp, Homo sapien
tccagtccaggtccttccatgtttc

SEQ ID NO: 3177953 - DNA, 25 bp, Homo sapien
ttgtactggcgtgactccagtccag

SEQ ID NO: 3177954 - DNA, 25 bp, Homo sapien
gccacatttctcagaactaagggga

SEQ ID NO: 3177955 - DNA, 25 bp, Homo sapien
cacatttctcagaactaaggggaac

SEQ ID NO: 3177956 - DNA, 25 bp, Homo sapien
agaacagcacagcaatagccccgag

SEQ ID NO: 3177957 - DNA, 25 bp, Homo sapien
agcacagcaatagccccgaggagca

SEQ ID NO: 3177958 - DNA, 25 bp, Homo sapien
tgatgtggttcatacaggtcagcct

SEQ ID NO: 3177959 - DNA, 25 bp, Homo sapien
gacagtcccagtactttgatgaaag

SEQ ID NO: 3177960 - DNA, 25 bp, Homo sapien
tacaaacatgggaagggtgcaggaa

SEQ ID NO: 3177961 - DNA, 25 bp, Homo sapien
gcacattcgaattaggacagtccca

SEQ ID NO: 3177962 - DNA, 25 bp, Homo sapien
agtcagagatcagcaaacttcttct

SEQ ID NO: 3177963 - DNA, 25 bp, Homo sapien
taagtcagagatcagcaaacttctt

SEQ ID NO: 3177964 - DNA, 25 bp, Homo sapien
ctaagtcagagatcagcaaacttct

SEQ ID NO: 3177965 - DNA, 25 bp, Homo sapien
aagtcagagatcagcaaacttcttc

SEQ ID NO: 3177966 - DNA, 25 bp, Homo sapien
ctgaaagcattgtgaggagaacaca

SEQ ID NO: 3177967 - DNA, 25 bp, Homo sapien
aggaataatctgagcttgatgctaa

SEQ ID NO: 3177968 - DNA, 25 bp, Homo sapien
gcattgtgaggagaacacaaatgaa

SEQ ID NO: 3177969 - DNA, 25 bp, Homo sapien
tgtctaagaccttctgaccagggtc

SEQ ID NO: 3177970 - DNA, 25 bp, Homo sapien
caagggcaactttaatcagaatagc

SEQ ID NO: 3177971 - DNA, 25 bp, Homo sapien
gccagctctacagacacattacaga

SEQ ID NO: 3177972 - DNA, 25 bp, Homo sapien
tatcatgcacgcctttctgttcagg

SEQ ID NO: 3177973 - DNA, 25 bp, Homo sapien
tttagccgggtgctcaaagtagcag

SEQ ID NO: 3177974 - DNA, 25 bp, Homo sapien
gctggccgcctgcagtagctcagcc

SEQ ID NO: 3177975 - DNA, 25 bp, Homo sapien
tgcagctccctggagtcggcgcccc

SEQ ID NO: 3177976 - DNA, 25 bp, Homo sapien
gattccgtcggtcccgctgcgacag

SEQ ID NO: 3177977 - DNA, 25 bp, Homo sapien
aacagaagtacatcccgcttctgcg

SEQ ID NO: 3177978 - DNA, 25 bp, Homo sapien
cctgcacctggggccccccgctcac

SEQ ID NO: 3177979 - DNA, 25 bp, Homo sapien
tgctcttcggtagcacagggcacca

SEQ ID NO: 3177980 - DNA, 25 bp, Homo sapien
gaggaagttgctcttcggtagcaca

SEQ ID NO: 3177981 - DNA, 25 bp, Homo sapien
cccgaggaatccaaggctcccagca

SEQ ID NO: 3177982 - DNA, 25 bp, Homo sapien
gaaaacgaaactgaggaagttgctc

SEQ ID NO: 3177983 - DNA, 25 bp, Homo sapien
ctccaggtagaaccgcgcaggcgag

SEQ ID NO: 3177984 - DNA, 25 bp, Homo sapien
cagagcagcgctgaccaggttagtt

SEQ ID NO: 3177985 - DNA, 25 bp, Homo sapien
ggctctcagtttcgctttgaacttg

SEQ ID NO: 3177986 - DNA, 25 bp, Homo sapien
accgcgcaggcgaggatttatctgc

SEQ ID NO: 3177987 - DNA, 25 bp, Homo sapien
gaaggatcatccagatttcttgtct

SEQ ID NO: 3177988 - DNA, 25 bp, Homo sapien
accttaagtccattctaaatgtctg

SEQ ID NO: 3177989 - DNA, 25 bp, Homo sapien
tgaatcaagaccttaagtccattct

SEQ ID NO: 3177990 - DNA, 25 bp, Homo sapien
cctccaatggtcttttgaatcaaga

SEQ ID NO: 3177991 - DNA, 25 bp, Homo sapien
gcagctcacgagatcaacaattagg

SEQ ID NO: 3177992 - DNA, 25 bp, Homo sapien
ttcccgcagctcacgagatcaacaa

SEQ ID NO: 3177993 - DNA, 25 bp, Homo sapien
cacgagatcaacaattagggtttcc

SEQ ID NO: 3177994 - DNA, 25 bp, Homo sapien
cacacagccagggagtgctccttcc

SEQ ID NO: 3177995 - DNA, 25 bp, Homo sapien
tctttgtatcctggcatcttgcaca

SEQ ID NO: 3177996 - DNA, 25 bp, Homo sapien
tgaaggagtgggttgaaacacttac

SEQ ID NO: 3177997 - DNA, 25 bp, Homo sapien
agctggcctgtcatagtcgtctttg

SEQ ID NO: 3177998 - DNA, 25 bp, Homo sapien
gcctggcacatggtactatatatat

SEQ ID NO: 3177999 - DNA, 25 bp, Homo sapien
tgtattatttttatatcattcagag

SEQ ID NO: 3178000 - DNA, 25 bp, Homo sapien
tattatttttatatcattcagagtc

SEQ ID NO: 3178001 - DNA, 25 bp, Homo sapien
ttatttttatatcattcagagtcat

SEQ ID NO: 3178002 - DNA, 25 bp, Homo sapien
ttgtattatttttatatcattcaga

SEQ ID NO: 3178003 - DNA, 25 bp, Homo sapien
atgccagggagtggtagtgtccaca

SEQ ID NO: 3178004 - DNA, 25 bp, Homo sapien
ataatgccagggagtggtagtgtcc

SEQ ID NO: 3178005 - DNA, 25 bp, Homo sapien
tttgataatgccagggagtggtagt

SEQ ID NO: 3178006 - DNA, 25 bp, Homo sapien
ttttgataatgccagggagtggtag

SEQ ID NO: 3178007 - DNA, 25 bp, Homo sapien
cccaagcccagctgcccatggctgt

SEQ ID NO: 3178008 - DNA, 25 bp, Homo sapien
ccaagcccagctgcccatggctgtt

SEQ ID NO: 3178009 - DNA, 25 bp, Homo sapien
tggctgttctttccccacgaaaaca

SEQ ID NO: 3178010 - DNA, 25 bp, Homo sapien
cccatggctgttctttccccacgaa

SEQ ID NO: 3178011 - DNA, 25 bp, Homo sapien
gggacattacgcccactgagggcca

SEQ ID NO: 3178012 - DNA, 25 bp, Homo sapien
ctgggacattacgcccactgagggc

SEQ ID NO: 3178013 - DNA, 25 bp, Homo sapien
ctgttacttccccagccaaacgaag

SEQ ID NO: 3178014 - DNA, 25 bp, Homo sapien
caaacgaagtcccacagagagacag

SEQ ID NO: 3178015 - DNA, 25 bp, Homo sapien
gtgcaccgactgagagaggcttgtt

SEQ ID NO: 3178016 - DNA, 25 bp, Homo sapien
ggtaagcaccgcagtgtgtgcatca

SEQ ID NO: 3178017 - DNA, 25 bp, Homo sapien
gcatcaccacagctgatataaacca

SEQ ID NO: 3178018 - DNA, 25 bp, Homo sapien
ctgatataaaccacacctagattct

SEQ ID NO: 3178019 - DNA, 25 bp, Homo sapien
agtaaaaccaacatttaagtatgag

SEQ ID NO: 3178020 - DNA, 25 bp, Homo sapien
aaaccaacatttaagtatgaggttg

SEQ ID NO: 3178021 - DNA, 25 bp, Homo sapien
ccaacatttaagtatgaggttgaat

SEQ ID NO: 3178022 - DNA, 25 bp, Homo sapien
agagtaaaaccaacatttaagtatg

SEQ ID NO: 3178023 - DNA, 25 bp, Homo sapien
tctgcgaaactaggccatcaattct

SEQ ID NO: 3178024 - DNA, 25 bp, Homo sapien
tcccagctgtccagagcgattgtct

SEQ ID NO: 3178025 - DNA, 25 bp, Homo sapien
caattctttccacaagttgtggacc

SEQ ID NO: 3178026 - DNA, 25 bp, Homo sapien
gagcgattgtctccaaatgtgaaca

SEQ ID NO: 3178027 - DNA, 25 bp, Homo sapien
ccagtggtgtgcacatatgccaggg

SEQ ID NO: 3178028 - DNA, 25 bp, Homo sapien
gaccaaaagataccacctgaccagt

SEQ ID NO: 3178029 - DNA, 25 bp, Homo sapien
cctccggatgagttggcttgcttgt

SEQ ID NO: 3178030 - DNA, 25 bp, Homo sapien
tcagcagaaatcaggcagctaatgt

SEQ ID NO: 3178031 - DNA, 25 bp, Homo sapien
aaagaaagtcataaatccatgctta

SEQ ID NO: 3178032 - DNA, 25 bp, Homo sapien
agaaagtcataaatccatgcttaga

SEQ ID NO: 3178033 - DNA, 25 bp, Homo sapien
aagaaagtcataaatccatgcttag

SEQ ID NO: 3178034 - DNA, 25 bp, Homo sapien
tgtcacaaagttggcatatgttcca

SEQ ID NO: 3178035 - DNA, 25 bp, Homo sapien
tgagttgtcacaaagttggcatatg

SEQ ID NO: 3178036 - DNA, 25 bp, Homo sapien
ctgatgagttgtcacaaagttggca

SEQ ID NO: 3178037 - DNA, 25 bp, Homo sapien
aagttggcatatgttccagcaaaaa

SEQ ID NO: 3178038 - DNA, 25 bp, Homo sapien
tcaacaaacacacttacccataaag

SEQ ID NO: 3178039 - DNA, 25 bp, Homo sapien
gctgttgacacaagttacatgtgta

SEQ ID NO: 3178040 - DNA, 25 bp, Homo sapien
tgtatgtgcatttacatgatgcaaa

SEQ ID NO: 3178041 - DNA, 25 bp, Homo sapien
agctgctgttgacacaagttacatg

SEQ ID NO: 3178042 - DNA, 25 bp, Homo sapien
aatcctcctactgaaggaggtgcca

SEQ ID NO: 3178043 - DNA, 25 bp, Homo sapien
ccaggacatgtcagaaacccttcct

SEQ ID NO: 3178044 - DNA, 25 bp, Homo sapien
tggacagggaaaattcagttccctc

SEQ ID NO: 3178045 - DNA, 25 bp, Homo sapien
ggcaatcctcctactgaaggaggtg

SEQ ID NO: 3178046 - DNA, 25 bp, Homo sapien
tacatatttatggtccggccctgcc

SEQ ID NO: 3178047 - DNA, 25 bp, Homo sapien
agacaaagtgttgccctgtgcgcca

SEQ ID NO: 3178048 - DNA, 25 bp, Homo sapien
catgccgggcctctaatacaatctt

SEQ ID NO: 3178049 - DNA, 25 bp, Homo sapien
gaagaacttcgattgctgcctgaca

SEQ ID NO: 3178050 - DNA, 25 bp, Homo sapien
gccatggactggctaattcggctta

SEQ ID NO: 3178051 - DNA, 25 bp, Homo sapien
ctaattcggcttatttctggcaggg

SEQ ID NO: 3178052 - DNA, 25 bp, Homo sapien
cgggagcacgtgtggaactagtatc

SEQ ID NO: 3178053 - DNA, 25 bp, Homo sapien
tttcccgggagcacgtgtggaacta

SEQ ID NO: 3178054 - DNA, 25 bp, Homo sapien
ttctttaaaaaacttgcagtcagac

SEQ ID NO: 3178055 - DNA, 25 bp, Homo sapien
aaacttgcagtcagacaagcaggag

SEQ ID NO: 3178056 - DNA, 25 bp, Homo sapien
agacaagcaggagatgaaaatatca

SEQ ID NO: 3178057 - DNA, 25 bp, Homo sapien
aaaaacttgcagtcagacaagcagg

SEQ ID NO: 3178058 - DNA, 25 bp, Homo sapien
gaaatgcaagaaaccacataaacat

SEQ ID NO: 3178059 - DNA, 25 bp, Homo sapien
cataaacataaggaaagggatattt

SEQ ID NO: 3178060 - DNA, 25 bp, Homo sapien
agaaatgcaagaaaccacataaaca

SEQ ID NO: 3178061 - DNA, 25 bp, Homo sapien
agaaaccacataaacataaggaaag

SEQ ID NO: 3178062 - DNA, 25 bp, Homo sapien
aacttcttgaaggtatctcttgcca

SEQ ID NO: 3178063 - DNA, 25 bp, Homo sapien
tcttgaaggtatctcttgccatttc

SEQ ID NO: 3178064 - DNA, 25 bp, Homo sapien
cttcttgaaggtatctcttgccatt

SEQ ID NO: 3178065 - DNA, 25 bp, Homo sapien
taacttcttgaaggtatctcttgcc

SEQ ID NO: 3178066 - DNA, 25 bp, Homo sapien
ctatatctaaagtaagtattggcta

SEQ ID NO: 3178067 - DNA, 25 bp, Homo sapien
gcaatcgtatttgttctatatctaa

SEQ ID NO: 3178068 - DNA, 25 bp, Homo sapien
tgttctatatctaaagtaagtattg

SEQ ID NO: 3178069 - DNA, 25 bp, Homo sapien
aataaactgcaatcgtatttgttct

SEQ ID NO: 3178070 - DNA, 25 bp, Homo sapien
tgagcagatcatcctcgagacacgt

SEQ ID NO: 3178071 - DNA, 25 bp, Homo sapien
agcagatcatcctcgagacacgtag

SEQ ID NO: 3178072 - DNA, 25 bp, Homo sapien
gatcatcctcgagacacgtagttat

SEQ ID NO: 3178073 - DNA, 25 bp, Homo sapien
ctctgagcagatcatcctcgagaca

SEQ ID NO: 3178074 - DNA, 25 bp, Homo sapien
ggacttgcaaagattgtttactcat

SEQ ID NO: 3178075 - DNA, 25 bp, Homo sapien
tccagttcttagaatcatgcatcac

SEQ ID NO: 3178076 - DNA, 25 bp, Homo sapien
ttcttagaatcatgcatcacaggac

SEQ ID NO: 3178077 - DNA, 25 bp, Homo sapien
tgcaaatggaaccaccaggttcttc

SEQ ID NO: 3178078 - DNA, 25 bp, Homo sapien
cccttattaagtatcattagaattt

SEQ ID NO: 3178079 - DNA, 25 bp, Homo sapien
attggttaatggctcacatttatgc

SEQ ID NO: 3178080 - DNA, 25 bp, Homo sapien
tgcacaacagttactgctcacagat

SEQ ID NO: 3178081 - DNA, 25 bp, Homo sapien
caaattcaggatttgaagaaattgg

SEQ ID NO: 3178082 - DNA, 25 bp, Homo sapien
ctgggggtgtaaaattagccatgat

SEQ ID NO: 3178083 - DNA, 25 bp, Homo sapien
taaaattagccatgataaatatgtt

SEQ ID NO: 3178084 - DNA, 25 bp, Homo sapien
tgggggtgtaaaattagccatgata

SEQ ID NO: 3178085 - DNA, 25 bp, Homo sapien
gtgtaaaattagccatgataaatat

SEQ ID NO: 3178086 - DNA, 25 bp, Homo sapien
tgttcggttttagtctgatgaagca

SEQ ID NO: 3178087 - DNA, 25 bp, Homo sapien
ggatcagcggattcagagaagattc

SEQ ID NO: 3178088 - DNA, 25 bp, Homo sapien
acagtgatcctgttcggttttagtc

SEQ ID NO: 3178089 - DNA, 25 bp, Homo sapien
tgatggctgctttaagcatctggat

SEQ ID NO: 3178090 - DNA, 25 bp, Homo sapien
gactaccacccaaagcagaatgagg

SEQ ID NO: 3178091 - DNA, 25 bp, Homo sapien
ttaagaagtgctgccctaggtgcct

SEQ ID NO: 3178092 - DNA, 25 bp, Homo sapien
tgaggatgatgtaaccacgcccagt

SEQ ID NO: 3178093 - DNA, 25 bp, Homo sapien
tagagctgtcctattgccgtccagg

SEQ ID NO: 3178094 - DNA, 25 bp, Homo sapien
gtattttctggtagtcgacagttag

SEQ ID NO: 3178095 - DNA, 25 bp, Homo sapien
tctggtagtcgacagttagctttgt

SEQ ID NO: 3178096 - DNA, 25 bp, Homo sapien
gtagtcgacagttagctttgtttac

SEQ ID NO: 3178097 - DNA, 25 bp, Homo sapien
aggtggttatcccgaaagagctgtc

SEQ ID NO: 3178098 - DNA, 25 bp, Homo sapien
ttaattttggatagcgaattaaaga

SEQ ID NO: 3178099 - DNA, 25 bp, Homo sapien
tgtgaatcagcttgcaataatttaa

SEQ ID NO: 3178100 - DNA, 25 bp, Homo sapien
ttttggatagcgaattaaagataaa

SEQ ID NO: 3178101 - DNA, 25 bp, Homo sapien
ctttatatgtgaatcagcttgcaat

SEQ ID NO: 3178102 - DNA, 25 bp, Homo sapien
ttgacttaattgacgcagagcatct

SEQ ID NO: 3178103 - DNA, 25 bp, Homo sapien
ccaggcgacttcgtctgactctaag

SEQ ID NO: 3178104 - DNA, 25 bp, Homo sapien
cagaagtcagtagcttcagcttgac

SEQ ID NO: 3178105 - DNA, 25 bp, Homo sapien
tgactctaagtataaatctgggtga

SEQ ID NO: 3178106 - DNA, 25 bp, Homo sapien
tcaaacatacagtggaagaactctg

SEQ ID NO: 3178107 - DNA, 25 bp, Homo sapien
tccatattctggcttggtcatctct

SEQ ID NO: 3178108 - DNA, 25 bp, Homo sapien
caggaacccatttcaggatacatga

SEQ ID NO: 3178109 - DNA, 25 bp, Homo sapien
tgaactaacccctccagactcagga

SEQ ID NO: 3178110 - DNA, 25 bp, Homo sapien
cacaacttgggtgtgcttagaggga

SEQ ID NO: 3178111 - DNA, 25 bp, Homo sapien
tgcagcacagtagatcaacagcctg

SEQ ID NO: 3178112 - DNA, 25 bp, Homo sapien
gatgagcctcgcatgagtggcagcc

SEQ ID NO: 3178113 - DNA, 25 bp, Homo sapien
tgactgacgctagggaccaagaagg

SEQ ID NO: 3178114 - DNA, 25 bp, Homo sapien
taaattgaataaggagagtccacac

SEQ ID NO: 3178115 - DNA, 25 bp, Homo sapien
aattgaataaggagagtccacacag

SEQ ID NO: 3178116 - DNA, 25 bp, Homo sapien
atttaaattgaataaggagagtcca

SEQ ID NO: 3178117 - DNA, 25 bp, Homo sapien
agtgggaaaggaaggttagcaacat

SEQ ID NO: 3178118 - DNA, 25 bp, Homo sapien
aagcgtatgcagagcgcatctccaa

SEQ ID NO: 3178119 - DNA, 25 bp, Homo sapien
gtatgcagagcgcatctccaatgtc

SEQ ID NO: 3178120 - DNA, 25 bp, Homo sapien
tatgcagagcgcatctccaatgtca

SEQ ID NO: 3178121 - DNA, 25 bp, Homo sapien
agaaaagcgtatgcagagcgcatct

SEQ ID NO: 3178122 - DNA, 25 bp, Homo sapien
taagtcaacatcattttggtcccag

SEQ ID NO: 3178123 - DNA, 25 bp, Homo sapien
caacatcattttggtcccagtgtat

SEQ ID NO: 3178124 - DNA, 25 bp, Homo sapien
gatcccatttggaattaagtcaaca

SEQ ID NO: 3178125 - DNA, 25 bp, Homo sapien
tgttggtttggtccacaggtatgga

SEQ ID NO: 3178126 - DNA, 25 bp, Homo sapien
gtttccagtcataatcagtatttcc

SEQ ID NO: 3178127 - DNA, 25 bp, Homo sapien
gggtagaaatgtctaagtatctcct

SEQ ID NO: 3178128 - DNA, 25 bp, Homo sapien
tctcacagactctataaaatcctct

SEQ ID NO: 3178129 - DNA, 25 bp, Homo sapien
tacagagacgttgaaaatgtaatca

SEQ ID NO: 3178130 - DNA, 25 bp, Homo sapien
gatgtgatttttggtatccttgctc

SEQ ID NO: 3178131 - DNA, 25 bp, Homo sapien
tcttttcatccaaggttagtttgtg

SEQ ID NO: 3178132 - DNA, 25 bp, Homo sapien
ggtatccttgctcatactttgaatt

SEQ ID NO: 3178133 - DNA, 25 bp, Homo sapien
tcatccaaggttagtttgtggaaag

SEQ ID NO: 3178134 - DNA, 25 bp, Homo sapien
ccagagattcgtgccctatgcggat

SEQ ID NO: 3178135 - DNA, 25 bp, Homo sapien
tggaatatcgggctgcaaacataga

SEQ ID NO: 3178136 - DNA, 25 bp, Homo sapien
taagaaagaagcaccatggagtagc

SEQ ID NO: 3178137 - DNA, 25 bp, Homo sapien
tgcggatggtacacctggtcctaac

SEQ ID NO: 3178138 - DNA, 25 bp, Homo sapien
ggatctgtggacaagttggaattgt

SEQ ID NO: 3178139 - DNA, 25 bp, Homo sapien
tatagagaaataggttggatctgtg

SEQ ID NO: 3178140 - DNA, 25 bp, Homo sapien
aggcagcttgggcttatagagaaat

SEQ ID NO: 3178141 - DNA, 25 bp, Homo sapien
gtggacaagttggaattgtcctcca

SEQ ID NO: 3178142 - DNA, 25 bp, Homo sapien
gttgggtgatctctttcactgaaag

SEQ ID NO: 3178143 - DNA, 25 bp, Homo sapien
gcctcttgcatgcagcctatcacgt

SEQ ID NO: 3178144 - DNA, 25 bp, Homo sapien
caagttattgatgttgggtgatctc

SEQ ID NO: 3178145 - DNA, 25 bp, Homo sapien
cactgaaagtttcaggacagcgaaa

SEQ ID NO: 3178146 - DNA, 25 bp, Homo sapien
catgggtgagacaaatcctctgttg

SEQ ID NO: 3178147 - DNA, 25 bp, Homo sapien
ctgtgtgagcatgggtgagacaaat

SEQ ID NO: 3178148 - DNA, 25 bp, Homo sapien
tgagcatgggtgagacaaatcctct

SEQ ID NO: 3178149 - DNA, 25 bp, Homo sapien
ttatgactgtgtgagcatgggtgag

SEQ ID NO: 3178150 - DNA, 25 bp, Homo sapien
gactgaggtgaattggctcacagcc

SEQ ID NO: 3178151 - DNA, 25 bp, Homo sapien
ccaagactggtgtggtttgactcct

SEQ ID NO: 3178152 - DNA, 25 bp, Homo sapien
ggatttattggagcacaaggcagtg

SEQ ID NO: 3178153 - DNA, 25 bp, Homo sapien
tcacagccaattagagactgaggtg

SEQ ID NO: 3178154 - DNA, 25 bp, Homo sapien
gcgagaggagagaacgcctggtccc

SEQ ID NO: 3178155 - DNA, 25 bp, Homo sapien
ctggtcccgggactgagcgcgccca

SEQ ID NO: 3178156 - DNA, 25 bp, Homo sapien
agcgcgcccactgcctcaggcgttg

SEQ ID NO: 3178157 - DNA, 25 bp, Homo sapien
ttgcgctgcagagcgggaaccagct

SEQ ID NO: 3178158 - DNA, 25 bp, Homo sapien
gagcagcagagttggcgcgtcacct

SEQ ID NO: 3178159 - DNA, 25 bp, Homo sapien
agcagctggtgaacctggacgcccg

SEQ ID NO: 3178160 - DNA, 25 bp, Homo sapien
aggcccgcggcgctgggaaagagcc

SEQ ID NO: 3178161 - DNA, 25 bp, Homo sapien
agagctgtgcgcccggagacttcgc

SEQ ID NO: 3178162 - DNA, 25 bp, Homo sapien
aagacagctcaggtgcgccgtcggc

SEQ ID NO: 3178163 - DNA, 25 bp, Homo sapien
caggcgcgcgtctgcggccttctgg

SEQ ID NO: 3178164 - DNA, 25 bp, Homo sapien
tcggcgaaactatccgagccaggcg

SEQ ID NO: 3178165 - DNA, 25 bp, Homo sapien
tcaggtgcgccgtcggcgaaactat

SEQ ID NO: 3178166 - DNA, 25 bp, Homo sapien
ccttggtccacggaatgtatcttca

SEQ ID NO: 3178167 - DNA, 25 bp, Homo sapien
tagatgtttcatgctatagttgtca

SEQ ID NO: 3178168 - DNA, 25 bp, Homo sapien
ggttttccatctgatgagagaatca

SEQ ID NO: 3178169 - DNA, 25 bp, Homo sapien
gctatagttgtcatactcaaatggt

SEQ ID NO: 3178170 - DNA, 25 bp, Homo sapien
gagagtgcaagagaatggtaatctc

SEQ ID NO: 3178171 - DNA, 25 bp, Homo sapien
gtgcaagagaatggtaatctccaca

SEQ ID NO: 3178172 - DNA, 25 bp, Homo sapien
caagagaatggtaatctccacatgt

SEQ ID NO: 3178173 - DNA, 25 bp, Homo sapien
gagtgcaagagaatggtaatctcca

SEQ ID NO: 3178174 - DNA, 25 bp, Homo sapien
ctgtccccaggcaaaaagctcacca

SEQ ID NO: 3178175 - DNA, 25 bp, Homo sapien
tgtccccaggcaaaaagctcaccac

SEQ ID NO: 3178176 - DNA, 25 bp, Homo sapien
tgctgtgggcttctccggcagaaat

SEQ ID NO: 3178177 - DNA, 25 bp, Homo sapien
tcctgcgaggtgctccacaatctgt

SEQ ID NO: 3178178 - DNA, 25 bp, Homo sapien
gaaatctgagccaagggtactcctg

SEQ ID NO: 3178179 - DNA, 25 bp, Homo sapien
ggcccaggcctagttgtccacattc

SEQ ID NO: 3178180 - DNA, 25 bp, Homo sapien
tatctgttggtaataggaatctgag

SEQ ID NO: 3178181 - DNA, 25 bp, Homo sapien
atatctgttggtaataggaatctga

SEQ ID NO: 3178182 - DNA, 25 bp, Homo sapien
tctgttggtaataggaatctgagaa

SEQ ID NO: 3178183 - DNA, 25 bp, Homo sapien
ctgttggtaataggaatctgagaat

SEQ ID NO: 3178184 - DNA, 25 bp, Homo sapien
tgcttctcaacccagcgacaacagt

SEQ ID NO: 3178185 - DNA, 25 bp, Homo sapien
tcaacccagcgacaacagttctcat

SEQ ID NO: 3178186 - DNA, 25 bp, Homo sapien
ctcaacccagcgacaacagttctca

SEQ ID NO: 3178187 - DNA, 25 bp, Homo sapien
tctcaacccagcgacaacagttctc

SEQ ID NO: 3178188 - DNA, 25 bp, Homo sapien
gagagccaccacaagcgacaaattc

SEQ ID NO: 3178189 - DNA, 25 bp, Homo sapien
gccaccacaagcgacaaattcaact

SEQ ID NO: 3178190 - DNA, 25 bp, Homo sapien
tagtccttcaataagggatggatca

SEQ ID NO: 3178191 - DNA, 25 bp, Homo sapien
aactttctgattgtctagtccttca

SEQ ID NO: 3178192 - DNA, 25 bp, Homo sapien
gaccaagttgcccatgttttccagc

SEQ ID NO: 3178193 - DNA, 25 bp, Homo sapien
tccacatgctatctgagtcactcta

SEQ ID NO: 3178194 - DNA, 25 bp, Homo sapien
cagccaccaaacagggtcttagctc

SEQ ID NO: 3178195 - DNA, 25 bp, Homo sapien
tccagcaccgaaagtaaacagcagc

SEQ ID NO: 3178196 - DNA, 25 bp, Homo sapien
tggaagcggcatcagctggtcacgt

SEQ ID NO: 3178197 - DNA, 25 bp, Homo sapien
gttcttcacttgatgatactttcac

SEQ ID NO: 3178198 - DNA, 25 bp, Homo sapien
cagctggtcacgtgttccaccattt

SEQ ID NO: 3178199 - DNA, 25 bp, Homo sapien
actttcactggaagcggcatcagct

SEQ ID NO: 3178200 - DNA, 25 bp, Homo sapien
ataactctgttcgttttcctacaag

SEQ ID NO: 3178201 - DNA, 25 bp, Homo sapien
taactctgttcgttttcctacaaga

SEQ ID NO: 3178202 - DNA, 25 bp, Homo sapien
taactccttttctgaggtatggctt

SEQ ID NO: 3178203 - DNA, 25 bp, Homo sapien
ttaactccttttctgaggtatggct

SEQ ID NO: 3178204 - DNA, 25 bp, Homo sapien
attaactccttttctgaggtatggc

SEQ ID NO: 3178205 - DNA, 25 bp, Homo sapien
aactccttttctgaggtatggcttt

SEQ ID NO: 3178206 - DNA, 25 bp, Homo sapien
gtgctctgccaccgtttagtctcca

SEQ ID NO: 3178207 - DNA, 25 bp, Homo sapien
agcaatccatctctttacagtccct

SEQ ID NO: 3178208 - DNA, 25 bp, Homo sapien
tgtcctcttcagattaacatatgaa

SEQ ID NO: 3178209 - DNA, 25 bp, Homo sapien
gtcccttcattcagagtaggaattg

SEQ ID NO: 3178210 - DNA, 25 bp, Homo sapien
agacaagcaggagatgaaaatatct

SEQ ID NO: 3178211 - DNA, 25 bp, Homo sapien
gttagacaagcaggagatgaaaata

SEQ ID NO: 3178212 - DNA, 25 bp, Homo sapien
taaaaaacttccagttagacaagca

SEQ ID NO: 3178213 - DNA, 25 bp, Homo sapien
caggagatgaaaatatctcttggat

SEQ ID NO: 3178214 - DNA, 25 bp, Homo sapien
ccttgaagatgtttcttgctttatt

SEQ ID NO: 3178215 - DNA, 25 bp, Homo sapien
tgctttatttaagtccaaataaaca

SEQ ID NO: 3178216 - DNA, 25 bp, Homo sapien
catgttagtaatccagtccttttgg

SEQ ID NO: 3178217 - DNA, 25 bp, Homo sapien
atgttagtaatccagtccttttggg

SEQ ID NO: 3178218 - DNA, 25 bp, Homo sapien
aaagagaagagggatatgaacacag

SEQ ID NO: 3178219 - DNA, 25 bp, Homo sapien
gagtagaacagaaagtagtatcccc

SEQ ID NO: 3178220 - DNA, 25 bp, Homo sapien
taaacgaagcatgcagtaagccgag

SEQ ID NO: 3178221 - DNA, 25 bp, Homo sapien
gagagatcaaagattgagagggaaa

SEQ ID NO: 3178222 - DNA, 25 bp, Homo sapien
tgagaaaacttgcagctgaaataga

SEQ ID NO: 3178223 - DNA, 25 bp, Homo sapien
aaaggagcgaatgagaaaacttgca

SEQ ID NO: 3178224 - DNA, 25 bp, Homo sapien
gagaaaacttgcagctgaaatagaa

SEQ ID NO: 3178225 - DNA, 25 bp, Homo sapien
cttgaaagaaaggagcgaatgagaa

SEQ ID NO: 3178226 - DNA, 25 bp, Homo sapien
cacagacgcacaaaagggcttctat

SEQ ID NO: 3178227 - DNA, 25 bp, Homo sapien
cagcactaagtgttgtagggtccca

SEQ ID NO: 3178228 - DNA, 25 bp, Homo sapien
ttaatgatgaactgatccaatccct

SEQ ID NO: 3178229 - DNA, 25 bp, Homo sapien
tctgggttgttgatacaggcagcac

SEQ ID NO: 3178230 - DNA, 25 bp, Homo sapien
tttctaaagcttcttggggtggaga

SEQ ID NO: 3178231 - DNA, 25 bp, Homo sapien
gattatctttgaggcaggtggttat

SEQ ID NO: 3178232 - DNA, 25 bp, Homo sapien
ttttgagcagattatctttgaggca

SEQ ID NO: 3178233 - DNA, 25 bp, Homo sapien
gaatgaaatggaagtcttttgagca

SEQ ID NO: 3178234 - DNA, 25 bp, Homo sapien
ttgttggaaatatgcatcataggac

SEQ ID NO: 3178235 - DNA, 25 bp, Homo sapien
tcattttacaaacaacctttgcaaa

SEQ ID NO: 3178236 - DNA, 25 bp, Homo sapien
ttggaaatatgcatcataggacatt

SEQ ID NO: 3178237 - DNA, 25 bp, Homo sapien
agaaccagtgaagactggtcactca

SEQ ID NO: 3178238 - DNA, 25 bp, Homo sapien
ccaactggcatatgacggctgtttt

SEQ ID NO: 3178239 - DNA, 25 bp, Homo sapien
caacatttctaggagagcttgaaca

SEQ ID NO: 3178240 - DNA, 25 bp, Homo sapien
catctggaccagtttgctgaaagtg

SEQ ID NO: 3178241 - DNA, 25 bp, Homo sapien
ggattcttgcagagttgcccaatac

SEQ ID NO: 3178242 - DNA, 25 bp, Homo sapien
actttcaggtagttgacatttcacc

SEQ ID NO: 3178243 - DNA, 25 bp, Homo sapien
gcaagagttcgtctacttggaaaat

SEQ ID NO: 3178244 - DNA, 25 bp, Homo sapien
aaaattgagacggtgcaagagttcg

SEQ ID NO: 3178245 - DNA, 25 bp, Homo sapien
tcattttccacaagtaccttctgca

SEQ ID NO: 3178246 - DNA, 25 bp, Homo sapien
tgtatgtagtagtttaattttcgac

SEQ ID NO: 3178247 - DNA, 25 bp, Homo sapien
gaatatgacgcagcattgtacattt

SEQ ID NO: 3178248 - DNA, 25 bp, Homo sapien
aattttcgacagattattaaagata

SEQ ID NO: 3178249 - DNA, 25 bp, Homo sapien
aatggaaagtgactgaatatgacgc

SEQ ID NO: 3178250 - DNA, 25 bp, Homo sapien
ttctcaaattgacttagctgattca

SEQ ID NO: 3178251 - DNA, 25 bp, Homo sapien
gctgccgacctaagataagctttat

SEQ ID NO: 3178252 - DNA, 25 bp, Homo sapien
ggcctcaaagcgaattcagactctc

SEQ ID NO: 3178253 - DNA, 25 bp, Homo sapien
gactgttagatcaaacgtgggcctc

SEQ ID NO: 3178254 - DNA, 25 bp, Homo sapien
ggtcatacccaatttctccactaaa

SEQ ID NO: 3178255 - DNA, 25 bp, Homo sapien
ttcaggatacatgaacatcccatat

SEQ ID NO: 3178256 - DNA, 25 bp, Homo sapien
cccatattccggctggatcatctct

SEQ ID NO: 3178257 - DNA, 25 bp, Homo sapien
tctttcttgactcctccgaggtcat

SEQ ID NO: 3178258 - DNA, 25 bp, Homo sapien
ggaaaggaaggttggcaacattgca

SEQ ID NO: 3178259 - DNA, 25 bp, Homo sapien
ttgaacagggaaagtccacatagaa

SEQ ID NO: 3178260 - DNA, 25 bp, Homo sapien
attgaacagggaaagtccacataga

SEQ ID NO: 3178261 - DNA, 25 bp, Homo sapien
ggaaggttggcaacattgcaattga

SEQ ID NO: 3178262 - DNA, 25 bp, Homo sapien
atacttcctcaaagttatcaccttc

SEQ ID NO: 3178263 - DNA, 25 bp, Homo sapien
cctcaaagttatcaccttcatcatc

SEQ ID NO: 3178264 - DNA, 25 bp, Homo sapien
ttcctcaaagttatcaccttcatca

SEQ ID NO: 3178265 - DNA, 25 bp, Homo sapien
tcatcatccagaagtgtttgcaaat

SEQ ID NO: 3178266 - DNA, 25 bp, Homo sapien
ttgttagtctggttgacagttatgc

SEQ ID NO: 3178267 - DNA, 25 bp, Homo sapien
gaattaagtttgtgtcgtttctgtc

SEQ ID NO: 3178268 - DNA, 25 bp, Homo sapien
gacagttatgctacttccattagga

SEQ ID NO: 3178269 - DNA, 25 bp, Homo sapien
ttgtgtcgtttctgtcccagtgcac

SEQ ID NO: 3178270 - DNA, 25 bp, Homo sapien
atttgataatgtcttcgtcgcacat

SEQ ID NO: 3178271 - DNA, 25 bp, Homo sapien
cgcctttacagagtcgttgaaaatg

SEQ ID NO: 3178272 - DNA, 25 bp, Homo sapien
aattcttcataaaccgcctttacag

SEQ ID NO: 3178273 - DNA, 25 bp, Homo sapien
catccttcagttcttcggggtggaa

SEQ ID NO: 3178274 - DNA, 25 bp, Homo sapien
atttaatcaacttagacttgatgat

SEQ ID NO: 3178275 - DNA, 25 bp, Homo sapien
aatttaatcaacttagacttgatga

SEQ ID NO: 3178276 - DNA, 25 bp, Homo sapien
gggatgtgaactgttatatcctggt

SEQ ID NO: 3178277 - DNA, 25 bp, Homo sapien
caaaacatcactatggtgggatgtg

SEQ ID NO: 3178278 - DNA, 25 bp, Homo sapien
tcttccagagtcaatttgtggaaag

SEQ ID NO: 3178279 - DNA, 25 bp, Homo sapien
tatatcctggttcataacgtgcatt

SEQ ID NO: 3178280 - DNA, 25 bp, Homo sapien
gaaacatgtcagtgctcttataggg

SEQ ID NO: 3178281 - DNA, 25 bp, Homo sapien
aactttcaggacagcaaaatgttat

SEQ ID NO: 3178282 - DNA, 25 bp, Homo sapien
gctcttatagggtctctttcattcc

SEQ ID NO: 3178283 - DNA, 25 bp, Homo sapien
tggcttcttgaagcgcttcttcaac

SEQ ID NO: 3178284 - DNA, 25 bp, Homo sapien
cagtcacgggttctaaccggccagt

SEQ ID NO: 3178285 - DNA, 25 bp, Homo sapien
taaggaatatgatgtaggcataggg

SEQ ID NO: 3178286 - DNA, 25 bp, Homo sapien
aataaggctgttggacaagcaagct

SEQ ID NO: 3178287 - DNA, 25 bp, Homo sapien
ttcccaaaagaggtaaggaatatga

SEQ ID NO: 3178288 - DNA, 25 bp, Homo sapien
ataaagtagaggacatatgcacagc

SEQ ID NO: 3178289 - DNA, 25 bp, Homo sapien
taaagtagaggacatatgcacagcc

SEQ ID NO: 3178290 - DNA, 25 bp, Homo sapien
tataaagtagaggacatatgcacag

SEQ ID NO: 3178291 - DNA, 25 bp, Homo sapien
atataaagtagaggacatatgcaca

SEQ ID NO: 3178292 - DNA, 25 bp, Homo sapien
ggtcaaccagcccaatagtgtagag

SEQ ID NO: 3178293 - DNA, 25 bp, Homo sapien
ctgttgggtcaaccagcccaatagt

SEQ ID NO: 3178294 - DNA, 25 bp, Homo sapien
aaccagcccaatagtgtagagattt

SEQ ID NO: 3178295 - DNA, 25 bp, Homo sapien
ttgggtcaaccagcccaatagtgta

SEQ ID NO: 3178296 - DNA, 25 bp, Homo sapien
tgattggcttgtcaaaaccaactcc

SEQ ID NO: 3178297 - DNA, 25 bp, Homo sapien
gattggcttgtcaaaaccaactcct

SEQ ID NO: 3178298 - DNA, 25 bp, Homo sapien
aaggtggaagatctagagctttctg

SEQ ID NO: 3178299 - DNA, 25 bp, Homo sapien
ctgatcaaggtgagatgatctatct

SEQ ID NO: 3178300 - DNA, 25 bp, Homo sapien
caagttatccaaagtgacagccatt

SEQ ID NO: 3178301 - DNA, 25 bp, Homo sapien
aagagtcagcaacaagaagttccag

SEQ ID NO: 3178302 - DNA, 25 bp, Homo sapien
gaggctttgctttgcgcatatcagg

SEQ ID NO: 3178303 - DNA, 25 bp, Homo sapien
tgaaggctctgacttataactgctg

SEQ ID NO: 3178304 - DNA, 25 bp, Homo sapien
ttagtttgcgggaaagaggctttgc

SEQ ID NO: 3178305 - DNA, 25 bp, Homo sapien
tagctcttgggcatcgatctctgaa

SEQ ID NO: 3178306 - DNA, 25 bp, Homo sapien
tgaagagttgggaatagcttatcca

SEQ ID NO: 3178307 - DNA, 25 bp, Homo sapien
ggatgacacgtcaaagtaagaagca

SEQ ID NO: 3178308 - DNA, 25 bp, Homo sapien
tatgaagcatcaacaaacgaattga

SEQ ID NO: 3178309 - DNA, 25 bp, Homo sapien
taatatgataccacaggcagctagg

SEQ ID NO: 3178310 - DNA, 25 bp, Homo sapien
cgcgacttcgatccggcgctgctgg

SEQ ID NO: 3178311 - DNA, 25 bp, Homo sapien
ggagttcctggtgtgcccgctctcc

SEQ ID NO: 3178312 - DNA, 25 bp, Homo sapien
gtcgcccgtaggtgcctgcacgcgt

SEQ ID NO: 3178313 - DNA, 25 bp, Homo sapien
ggcaagaagactgaggagccgcccc

SEQ ID NO: 3178314 - DNA, 25 bp, Homo sapien
tcctccggactatagatgacgcccg

SEQ ID NO: 3178315 - DNA, 25 bp, Homo sapien
ccggactatagatgacgcccgtggg

SEQ ID NO: 3178316 - DNA, 25 bp, Homo sapien
ggctgtcctccggactatagatgac

SEQ ID NO: 3178317 - DNA, 25 bp, Homo sapien
ggagcagaagcaccctcggaaccaa

SEQ ID NO: 3178318 - DNA, 25 bp, Homo sapien
aatctttgagtcttcggacatggaa

SEQ ID NO: 3178319 - DNA, 25 bp, Homo sapien
caaagtgtgaaatgataatgcccag

SEQ ID NO: 3178320 - DNA, 25 bp, Homo sapien
caggttgatattcagcagaacggag

SEQ ID NO: 3178321 - DNA, 25 bp, Homo sapien
ttatttttacattggagtggaagag

SEQ ID NO: 3178322 - DNA, 25 bp, Homo sapien
tgaacaaggacataagcaggcacct

SEQ ID NO: 3178323 - DNA, 25 bp, Homo sapien
gatgacaagcacattgcccggcatg

SEQ ID NO: 3178324 - DNA, 25 bp, Homo sapien
caaactgttgtggatcagcgggtac

SEQ ID NO: 3178325 - DNA, 25 bp, Homo sapien
caggaaggcaaccaccgtgataatg

SEQ ID NO: 3178326 - DNA, 25 bp, Homo sapien
cttctcctttcgtccaatcatcaaa

SEQ ID NO: 3178327 - DNA, 25 bp, Homo sapien
cctttcgtccaatcatcaaacactg

SEQ ID NO: 3178328 - DNA, 25 bp, Homo sapien
tcactcttctcctttcgtccaatca

SEQ ID NO: 3178329 - DNA, 25 bp, Homo sapien
cgtccaatcatcaaacactgtcgtt

SEQ ID NO: 3178330 - DNA, 25 bp, Homo sapien
cgttttcggcgtcacaataataagg

SEQ ID NO: 3178331 - DNA, 25 bp, Homo sapien
ataaggaagtttccccgcaagcctg

SEQ ID NO: 3178332 - DNA, 25 bp, Homo sapien
aatgcgctgggtgaatggcttcgca

SEQ ID NO: 3178333 - DNA, 25 bp, Homo sapien
cacgggtgtgtcagccgaaatcgga

SEQ ID NO: 3178334 - DNA, 25 bp, Homo sapien
ctctcggtctggttgccctggtttg

SEQ ID NO: 3178335 - DNA, 25 bp, Homo sapien
tcctctcggtctggttgccctggtt

SEQ ID NO: 3178336 - DNA, 25 bp, Homo sapien
cctctcggtctggttgccctggttt

SEQ ID NO: 3178337 - DNA, 25 bp, Homo sapien
gctcctctcggtctggttgccctgg

SEQ ID NO: 3178338 - DNA, 25 bp, Homo sapien
cacacttggcattggactagaagcc

SEQ ID NO: 3178339 - DNA, 25 bp, Homo sapien
acacacttggcattggactagaagc

SEQ ID NO: 3178340 - DNA, 25 bp, Homo sapien
cttgttctcttcactatcttagagc

SEQ ID NO: 3178341 - DNA, 25 bp, Homo sapien
aggcactgagatttgtttaggtccc

SEQ ID NO: 3178342 - DNA, 25 bp, Homo sapien
gcagcaggaaggcactgagatttgt

SEQ ID NO: 3178343 - DNA, 25 bp, Homo sapien
ctcttcactatcttagagcagcagg

SEQ ID NO: 3178344 - DNA, 25 bp, Homo sapien
aaaaccttcagtgctttgcagatac

SEQ ID NO: 3178345 - DNA, 25 bp, Homo sapien
gcaggaaaagacaatgtccaaaacc

SEQ ID NO: 3178346 - DNA, 25 bp, Homo sapien
tgttgtatatatgaagagggtctct

SEQ ID NO: 3178347 - DNA, 25 bp, Homo sapien
caggaaaagacaatgtccaaaacct

SEQ ID NO: 3178348 - DNA, 25 bp, Homo sapien
gttcttatctttcagggaatcatgt

SEQ ID NO: 3178349 - DNA, 25 bp, Homo sapien
ttcttatctttcagggaatcatgta

SEQ ID NO: 3178350 - DNA, 25 bp, Homo sapien
tcttatctttcagggaatcatgtag

SEQ ID NO: 3178351 - DNA, 25 bp, Homo sapien
cttatctttcagggaatcatgtagc

SEQ ID NO: 3178352 - DNA, 25 bp, Homo sapien
tctcatggcccagttgccccttggt

SEQ ID NO: 3178353 - DNA, 25 bp, Homo sapien
tcagatatgaacccacacacctggg

SEQ ID NO: 3178354 - DNA, 25 bp, Homo sapien
tcagccacaattccctgcaggttgg

SEQ ID NO: 3178355 - DNA, 25 bp, Homo sapien
gttggcccagagaccaatatcccca

SEQ ID NO: 3178356 - DNA, 25 bp, Homo sapien
atcaagacagataaggtgcacttac

SEQ ID NO: 3178357 - DNA, 25 bp, Homo sapien
aatcaagacagataaggtgcactta

SEQ ID NO: 3178358 - DNA, 25 bp, Homo sapien
cctgaaaaccgaacacttggtggag

SEQ ID NO: 3178359 - DNA, 25 bp, Homo sapien
tcaaaagagcctccctgaaaaccga

SEQ ID NO: 3178360 - DNA, 25 bp, Homo sapien
aattagacacaagggttccaaacag

SEQ ID NO: 3178361 - DNA, 25 bp, Homo sapien
ggaatccctgcaccgttcaaaagag

SEQ ID NO: 3178362 - DNA, 25 bp, Homo sapien
taaaaagtcttgtggtggcgcatgt

SEQ ID NO: 3178363 - DNA, 25 bp, Homo sapien
gcagggaaactacggaacatggtca

SEQ ID NO: 3178364 - DNA, 25 bp, Homo sapien
gaatgaagttcctaaatcctggctg

SEQ ID NO: 3178365 - DNA, 25 bp, Homo sapien
taagaaacccctgactagaacatgg

SEQ ID NO: 3178366 - DNA, 25 bp, Homo sapien
cacacctctagcttgggattcttgc

SEQ ID NO: 3178367 - DNA, 25 bp, Homo sapien
acaagcatgggctggattccgaggc

SEQ ID NO: 3178368 - DNA, 25 bp, Homo sapien
ttattccaaatttagatcacaagca

SEQ ID NO: 3178369 - DNA, 25 bp, Homo sapien
tggcacacctctagcttgggattct

SEQ ID NO: 3178370 - DNA, 25 bp, Homo sapien
taagggaatctataaaagtgaccaa

SEQ ID NO: 3178371 - DNA, 25 bp, Homo sapien
aatagctagtacttgctttggcagc

SEQ ID NO: 3178372 - DNA, 25 bp, Homo sapien
catcagatcctgtagtattaaggga

SEQ ID NO: 3178373 - DNA, 25 bp, Homo sapien
taagacatgtagagtttaagcaact

SEQ ID NO: 3178374 - DNA, 25 bp, Homo sapien
ttcaggagcaccataaagtagtccc

SEQ ID NO: 3178375 - DNA, 25 bp, Homo sapien
gctaggagccagtggattgcactct

SEQ ID NO: 3178376 - DNA, 25 bp, Homo sapien
acagtgcccacagcgacctaatttg

SEQ ID NO: 3178377 - DNA, 25 bp, Homo sapien
gtaactgcccaaagatttcagctgg

SEQ ID NO: 3178378 - DNA, 25 bp, Homo sapien
tacttgaaactgcaagcatagcgac

SEQ ID NO: 3178379 - DNA, 25 bp, Homo sapien
aaatcttacacccacactagtaggc

SEQ ID NO: 3178380 - DNA, 25 bp, Homo sapien
tgaccctggctggtaaagcacttgg

SEQ ID NO: 3178381 - DNA, 25 bp, Homo sapien
gatgggaaacacatgaggcaactgt

SEQ ID NO: 3178382 - DNA, 25 bp, Homo sapien
caggggacttgctgcctaagggcat

SEQ ID NO: 3178383 - DNA, 25 bp, Homo sapien
aaaccaggggacttgctgcctaagg

SEQ ID NO: 3178384 - DNA, 25 bp, Homo sapien
ccaggggacttgctgcctaagggca

SEQ ID NO: 3178385 - DNA, 25 bp, Homo sapien
ggaaaccaggggacttgctgcctaa

SEQ ID NO: 3178386 - DNA, 25 bp, Homo sapien
catacaagaactagagtgtaagctc

SEQ ID NO: 3178387 - DNA, 25 bp, Homo sapien
tacaaccacggcctgcttgggtaca

SEQ ID NO: 3178388 - DNA, 25 bp, Homo sapien
tgtaaaactacagcaccggcttcca

SEQ ID NO: 3178389 - DNA, 25 bp, Homo sapien
ttgggtacatacaagaactagagtg

SEQ ID NO: 3178390 - DNA, 25 bp, Homo sapien
tattttgcatggtaattgatgccgt

SEQ ID NO: 3178391 - DNA, 25 bp, Homo sapien
catggtaattgatgccgtttcttca

SEQ ID NO: 3178392 - DNA, 25 bp, Homo sapien
ttccactttccatttgctggataca

SEQ ID NO: 3178393 - DNA, 25 bp, Homo sapien
tccactttccatttgctggatacat

SEQ ID NO: 3178394 - DNA, 25 bp, Homo sapien
tgtttagttagtagggtatctatta

SEQ ID NO: 3178395 - DNA, 25 bp, Homo sapien
agttagtagggtatctattactgac

SEQ ID NO: 3178396 - DNA, 25 bp, Homo sapien
tctctggtcttggactttgtttagt

SEQ ID NO: 3178397 - DNA, 25 bp, Homo sapien
tagtagggtatctattactgactca

SEQ ID NO: 3178398 - DNA, 25 bp, Homo sapien
ctctttgaaccttccacagcaacac

SEQ ID NO: 3178399 - DNA, 25 bp, Homo sapien
ccaagaggcctaaatgttgagtgga

SEQ ID NO: 3178400 - DNA, 25 bp, Homo sapien
tgttccatccaagaggcctaaatgt

SEQ ID NO: 3178401 - DNA, 25 bp, Homo sapien
cagggagaagcctgtactatttgga

SEQ ID NO: 3178402 - DNA, 25 bp, Homo sapien
tatttggagatgttccatccaagag

SEQ ID NO: 3178403 - DNA, 25 bp, Homo sapien
atgtacaacccagaaacaggaatac

SEQ ID NO: 3178404 - DNA, 25 bp, Homo sapien
ccagaaacaggaatactgctaccat

SEQ ID NO: 3178405 - DNA, 25 bp, Homo sapien
gaggaggaaaatgtacaacccagaa

SEQ ID NO: 3178406 - DNA, 25 bp, Homo sapien
gaaaatgtacaacccagaaacagga

SEQ ID NO: 3178407 - DNA, 25 bp, Homo sapien
tgccacagaatcctcagtagtcatg

SEQ ID NO: 3178408 - DNA, 25 bp, Homo sapien
cactgagggccagactgtgggactc

SEQ ID NO: 3178409 - DNA, 25 bp, Homo sapien
gaatgatatgctgatctgccagagc

SEQ ID NO: 3178410 - DNA, 25 bp, Homo sapien
aaaacagctggcctcggtcactgag

SEQ ID NO: 3178411 - DNA, 25 bp, Homo sapien
gagccaagcaatgccagttgccaca

SEQ ID NO: 3178412 - DNA, 25 bp, Homo sapien
agccaagcaatgccagttgccacag

SEQ ID NO: 3178413 - DNA, 25 bp, Homo sapien
aatctagttattagggtcatttgcc

SEQ ID NO: 3178414 - DNA, 25 bp, Homo sapien
cataaaatgatacaagctccacaca

SEQ ID NO: 3178415 - DNA, 25 bp, Homo sapien
caacaccaaacccacccaagagcaa

SEQ ID NO: 3178416 - DNA, 25 bp, Homo sapien
gaacagagatacttcatgctatcag

SEQ ID NO: 3178417 - DNA, 25 bp, Homo sapien
agacagggcaaagctgtgagcccct

SEQ ID NO: 3178418 - DNA, 25 bp, Homo sapien
agagagacagggcaaagctgtgagc

SEQ ID NO: 3178419 - DNA, 25 bp, Homo sapien
gctggcttgggaggggaactccttc

SEQ ID NO: 3178420 - DNA, 25 bp, Homo sapien
agagacagggcaaagctgtgagccc

SEQ ID NO: 3178421 - DNA, 25 bp, Homo sapien
actgagccctagctgcccggcatta

SEQ ID NO: 3178422 - DNA, 25 bp, Homo sapien
tgagccctagctgcccggcattatt

SEQ ID NO: 3178423 - DNA, 25 bp, Homo sapien
tagctgcccggcattattcatcccc

SEQ ID NO: 3178424 - DNA, 25 bp, Homo sapien
tcactgagccctagctgcccggcat

SEQ ID NO: 3178425 - DNA, 25 bp, Homo sapien
tgttcttctccacaactaatataga

SEQ ID NO: 3178426 - DNA, 25 bp, Homo sapien
tttacatggcatggagattctcgat

SEQ ID NO: 3178427 - DNA, 25 bp, Homo sapien
atagacaactttttgcgtgcgtaag

SEQ ID NO: 3178428 - DNA, 25 bp, Homo sapien
agacaactttttgcgtgcgtaagag

SEQ ID NO: 3178429 - DNA, 25 bp, Homo sapien
ctagggttaacctcatcattcatgg

SEQ ID NO: 3178430 - DNA, 25 bp, Homo sapien
tcgtgtccaagttgcccacaggaac

SEQ ID NO: 3178431 - DNA, 25 bp, Homo sapien
ctgccacaagcaatttgagttactt

SEQ ID NO: 3178432 - DNA, 25 bp, Homo sapien
tgagttacttcactacccatcagct

SEQ ID NO: 3178433 - DNA, 25 bp, Homo sapien
tccagaagaaggcacgaaggctagg

SEQ ID NO: 3178434 - DNA, 25 bp, Homo sapien
gctcgggctgaaagctggccactgt

SEQ ID NO: 3178435 - DNA, 25 bp, Homo sapien
tgggcagcccagtaacccttgacag

SEQ ID NO: 3178436 - DNA, 25 bp, Homo sapien
ccttgacaggagatgggcacttaac

SEQ ID NO: 3178437 - DNA, 25 bp, Homo sapien
taaattccagagacaatcattctta

SEQ ID NO: 3178438 - DNA, 25 bp, Homo sapien
acctttaaattccagagacaatcat

SEQ ID NO: 3178439 - DNA, 25 bp, Homo sapien
aatacctttaaattccagagacaat

SEQ ID NO: 3178440 - DNA, 25 bp, Homo sapien
aaattccagagacaatcattcttac

SEQ ID NO: 3178441 - DNA, 25 bp, Homo sapien
tgagtgacaagttcatgccaggtcc

SEQ ID NO: 3178442 - DNA, 25 bp, Homo sapien
gcaagaacggcctaacacaacagta

SEQ ID NO: 3178443 - DNA, 25 bp, Homo sapien
tgtaaaaagtatggcacctcctctc

SEQ ID NO: 3178444 - DNA, 25 bp, Homo sapien
gatggctgcatcatgctccctgtag

SEQ ID NO: 3178445 - DNA, 25 bp, Homo sapien
gatctgcttaacgatatgatattta

SEQ ID NO: 3178446 - DNA, 25 bp, Homo sapien
agtacaaaagtctggtctcctccag

SEQ ID NO: 3178447 - DNA, 25 bp, Homo sapien
gcaaagtacaaaagtctggtctcct

SEQ ID NO: 3178448 - DNA, 25 bp, Homo sapien
tccagagaagatctgcttaacgata

SEQ ID NO: 3178449 - DNA, 25 bp, Homo sapien
cctccaagagagtataaggatccat

SEQ ID NO: 3178450 - DNA, 25 bp, Homo sapien
tggtttccacagttgctcattatct

SEQ ID NO: 3178451 - DNA, 25 bp, Homo sapien
tatcaaactaatagagaaagtttcc

SEQ ID NO: 3178452 - DNA, 25 bp, Homo sapien
tgcaccactcggagctggtcctgtt

SEQ ID NO: 3178453 - DNA, 25 bp, Homo sapien
ctgaagtcaacagcaggagaataat

SEQ ID NO: 3178454 - DNA, 25 bp, Homo sapien
tgaagtcaacagcaggagaataatt

SEQ ID NO: 3178455 - DNA, 25 bp, Homo sapien
tctccaaactgctatggtttcatca

SEQ ID NO: 3178456 - DNA, 25 bp, Homo sapien
tgcattgttgtgttctgagagtttt

SEQ ID NO: 3178457 - DNA, 25 bp, Homo sapien
ggtataatgtgcttggttcatagtc

SEQ ID NO: 3178458 - DNA, 25 bp, Homo sapien
tattaaactggtataatgtgcttgg

SEQ ID NO: 3178459 - DNA, 25 bp, Homo sapien
tgcatacactaaaacccatgggagt

SEQ ID NO: 3178460 - DNA, 25 bp, Homo sapien
ccatgggagttaaccataacgctaa

SEQ ID NO: 3178461 - DNA, 25 bp, Homo sapien
caatatgcaagtacggaaaatcaca

SEQ ID NO: 3178462 - DNA, 25 bp, Homo sapien
aacaaggcaggttgaggcatatact

SEQ ID NO: 3178463 - DNA, 25 bp, Homo sapien
tccattccaacaggctgcagaagat

SEQ ID NO: 3178464 - DNA, 25 bp, Homo sapien
ggctgcagaagataatatctgaaca

SEQ ID NO: 3178465 - DNA, 25 bp, Homo sapien
caacaggctgcagaagataatatct

SEQ ID NO: 3178466 - DNA, 25 bp, Homo sapien
tccaacaggctgcagaagataatat

SEQ ID NO: 3178467 - DNA, 25 bp, Homo sapien
tgagatacagtctctctcggtaatc

SEQ ID NO: 3178468 - DNA, 25 bp, Homo sapien
ctctcggtaatctgcttttctgcca

SEQ ID NO: 3178469 - DNA, 25 bp, Homo sapien
tacagtctctctcggtaatctgctt

SEQ ID NO: 3178470 - DNA, 25 bp, Homo sapien
tctctctcggtaatctgcttttctg

SEQ ID NO: 3178471 - DNA, 25 bp, Homo sapien
catggagtgctgagagttcattaac

SEQ ID NO: 3178472 - DNA, 25 bp, Homo sapien
tgagttcaggtcaatcccagggatt

SEQ ID NO: 3178473 - DNA, 25 bp, Homo sapien
attaacttctcaaataacaccctag

SEQ ID NO: 3178474 - DNA, 25 bp, Homo sapien
ttctagaatcatggagtgctgagag

SEQ ID NO: 3178475 - DNA, 25 bp, Homo sapien
gggaatagtcaatgttatataatac

SEQ ID NO: 3178476 - DNA, 25 bp, Homo sapien
gtagtattaaatagattctcatggc

SEQ ID NO: 3178477 - DNA, 25 bp, Homo sapien
ggaatcagacaactttcaaaactgt

SEQ ID NO: 3178478 - DNA, 25 bp, Homo sapien
catggcttcaacatctggtggtgag

SEQ ID NO: 3178479 - DNA, 25 bp, Homo sapien
ctgatatcgaggttagcaaattcac

SEQ ID NO: 3178480 - DNA, 25 bp, Homo sapien
taaaaccactgatatcgaggttagc

SEQ ID NO: 3178481 - DNA, 25 bp, Homo sapien
ccataaaaccactgatatcgaggtt

SEQ ID NO: 3178482 - DNA, 25 bp, Homo sapien
ccactgatatcgaggttagcaaatt

SEQ ID NO: 3178483 - DNA, 25 bp, Homo sapien
taaaaacatttcaggtgctactccc

SEQ ID NO: 3178484 - DNA, 25 bp, Homo sapien
ggaaggtttttatctcagcaaagtg

SEQ ID NO: 3178485 - DNA, 25 bp, Homo sapien
taaaaagccaggtgatagacttcct

SEQ ID NO: 3178486 - DNA, 25 bp, Homo sapien
aaagtgtccggagcctgcaaaaatc

SEQ ID NO: 3178487 - DNA, 25 bp, Homo sapien
aaatatttcgggcatacctgagacc

SEQ ID NO: 3178488 - DNA, 25 bp, Homo sapien
tcagtagataaaggactgcaccttt

SEQ ID NO: 3178489 - DNA, 25 bp, Homo sapien
tagaggtttaccagcttcatgaaat

SEQ ID NO: 3178490 - DNA, 25 bp, Homo sapien
gggcatacctgagaccaccagttat

SEQ ID NO: 3178491 - DNA, 25 bp, Homo sapien
cctgaatgtccacgagattggaaat

SEQ ID NO: 3178492 - DNA, 25 bp, Homo sapien
ttggaaatctcaggaatgtaaaatg

SEQ ID NO: 3178493 - DNA, 25 bp, Homo sapien
gaaccacatgaggtagtcttcctga

SEQ ID NO: 3178494 - DNA, 25 bp, Homo sapien
cttgatgcaagaaccacatgaggta

SEQ ID NO: 3178495 - DNA, 25 bp, Homo sapien
ccagatttggaagcgggctgatctt

SEQ ID NO: 3178496 - DNA, 25 bp, Homo sapien
tgaaggaacccagatttggaagcgg

SEQ ID NO: 3178497 - DNA, 25 bp, Homo sapien
cccagaggtgaaggaacccagattt

SEQ ID NO: 3178498 - DNA, 25 bp, Homo sapien
gaacccagatttggaagcgggctga

SEQ ID NO: 3178499 - DNA, 25 bp, Homo sapien
catctgtagttcagcatctgtctgt

SEQ ID NO: 3178500 - DNA, 25 bp, Homo sapien
tctgtaacattttggtcttggcttg

SEQ ID NO: 3178501 - DNA, 25 bp, Homo sapien
tgtctgtaacattttggtcttggct

SEQ ID NO: 3178502 - DNA, 25 bp, Homo sapien
tctgtctgtaacattttggtcttgg

SEQ ID NO: 3178503 - DNA, 25 bp, Homo sapien
cctgcgaacgtgaaggaccaggaag

SEQ ID NO: 3178504 - DNA, 25 bp, Homo sapien
agctctcttagggcatctccaacaa

SEQ ID NO: 3178505 - DNA, 25 bp, Homo sapien
aacaaggttgttcctgcgaacgtga

SEQ ID NO: 3178506 - DNA, 25 bp, Homo sapien
caatatcagaatgaatgctcagctc

SEQ ID NO: 3178507 - DNA, 25 bp, Homo sapien
gtaaacattccatagatgggattca

SEQ ID NO: 3178508 - DNA, 25 bp, Homo sapien
agtaggtaaacattccatagatggg

SEQ ID NO: 3178509 - DNA, 25 bp, Homo sapien
tttgtaacaccaccggcatccactg

SEQ ID NO: 3178510 - DNA, 25 bp, Homo sapien
gagatttgaatcttgatagtaggta

SEQ ID NO: 3178511 - DNA, 25 bp, Homo sapien
ctagtccacaggttataccaatcaa

SEQ ID NO: 3178512 - DNA, 25 bp, Homo sapien
gtccacaggttataccaatcaagtg

SEQ ID NO: 3178513 - DNA, 25 bp, Homo sapien
caggttataccaatcaagtgaaacc

SEQ ID NO: 3178514 - DNA, 25 bp, Homo sapien
ccacaggttataccaatcaagtgaa

SEQ ID NO: 3178515 - DNA, 25 bp, Homo sapien
caagccaggctttacattgagtaac

SEQ ID NO: 3178516 - DNA, 25 bp, Homo sapien
aacttcttgtagagagccaatggga

SEQ ID NO: 3178517 - DNA, 25 bp, Homo sapien
tcgaccacagtggagttgtagatag

SEQ ID NO: 3178518 - DNA, 25 bp, Homo sapien
atgggaagtggagatcgaccacagt

SEQ ID NO: 3178519 - DNA, 25 bp, Homo sapien
taatcctcatgccagaggcagccac

SEQ ID NO: 3178520 - DNA, 25 bp, Homo sapien
taccaatcgccttttagctttgtac

SEQ ID NO: 3178521 - DNA, 25 bp, Homo sapien
agataccaatcgccttttagctttg

SEQ ID NO: 3178522 - DNA, 25 bp, Homo sapien
ttaatcctcatgccagaggcagcca

SEQ ID NO: 3178523 - DNA, 25 bp, Homo sapien
ggtaatctaaaagctcttggagact

SEQ ID NO: 3178524 - DNA, 25 bp, Homo sapien
gttgaggcagaaagtctcctccaca

SEQ ID NO: 3178525 - DNA, 25 bp, Homo sapien
tccacatcctccccggggtaatcta

SEQ ID NO: 3178526 - DNA, 25 bp, Homo sapien
aggcagaaagtctcctccacatcct

SEQ ID NO: 3178527 - DNA, 25 bp, Homo sapien
tagaactcaaatgactgagagaggc

SEQ ID NO: 3178528 - DNA, 25 bp, Homo sapien
gaacccctataacactcaagacact

SEQ ID NO: 3178529 - DNA, 25 bp, Homo sapien
ggagaataatcagaacttgagtcag

SEQ ID NO: 3178530 - DNA, 25 bp, Homo sapien
aagatggtaagagagacagccacaa

SEQ ID NO: 3178531 - DNA, 25 bp, Homo sapien
agttacattatctcccccaggtatc

SEQ ID NO: 3178532 - DNA, 25 bp, Homo sapien
acagttacattatctcccccaggta

SEQ ID NO: 3178533 - DNA, 25 bp, Homo sapien
acacagttacattatctcccccagg

SEQ ID NO: 3178534 - DNA, 25 bp, Homo sapien
gcacacagttacattatctccccca

SEQ ID NO: 3178535 - DNA, 25 bp, Homo sapien
cagtatctgcaacagtccaaggtca

SEQ ID NO: 3178536 - DNA, 25 bp, Homo sapien
tagcagtatctgcaacagtccaagg

SEQ ID NO: 3178537 - DNA, 25 bp, Homo sapien
gaagtagcagtatctgcaacagtcc

SEQ ID NO: 3178538 - DNA, 25 bp, Homo sapien
atgaagtagcagtatctgcaacagt

SEQ ID NO: 3178539 - DNA, 25 bp, Homo sapien
tgaagtctgccagcggtcctgaagt

SEQ ID NO: 3178540 - DNA, 25 bp, Homo sapien
ggaggatgggaactcttgagcccca

SEQ ID NO: 3178541 - DNA, 25 bp, Homo sapien
catatgctggtacccatggagcgca

SEQ ID NO: 3178542 - DNA, 25 bp, Homo sapien
taacgttgaacaagagacttatgcc

SEQ ID NO: 3178543 - DNA, 25 bp, Homo sapien
tcatgagtactctgaaatagcattt

SEQ ID NO: 3178544 - DNA, 25 bp, Homo sapien
cattccattccatatgtatattagt

SEQ ID NO: 3178545 - DNA, 25 bp, Homo sapien
ggcagtcactattaagggcattcat

SEQ ID NO: 3178546 - DNA, 25 bp, Homo sapien
tttttgaaaacattacctagtcagc

SEQ ID NO: 3178547 - DNA, 25 bp, Homo sapien
ttaattccatttcacccctgagacc

SEQ ID NO: 3178548 - DNA, 25 bp, Homo sapien
taaagtagcctatgtgtgaaagaaa

SEQ ID NO: 3178549 - DNA, 25 bp, Homo sapien
tattttagaggtaaacagcagtaaa

SEQ ID NO: 3178550 - DNA, 25 bp, Homo sapien
actgtgtagactatgtaaagtagcc

SEQ ID NO: 3178551 - DNA, 25 bp, Homo sapien
tgaacctgcagcactaggtgagccg

SEQ ID NO: 3178552 - DNA, 25 bp, Homo sapien
tctagcttagagaattgttggccac

SEQ ID NO: 3178553 - DNA, 25 bp, Homo sapien
tacagggatgtttgtgacgtcaagc

SEQ ID NO: 3178554 - DNA, 25 bp, Homo sapien
acctaatgctgcgtgttcctgaacc

SEQ ID NO: 3178555 - DNA, 25 bp, Homo sapien
tgtgtgagccagtgatctataaaga

SEQ ID NO: 3178556 - DNA, 25 bp, Homo sapien
tatccagcgttatgtactttgcgcc

SEQ ID NO: 3178557 - DNA, 25 bp, Homo sapien
tatgtaaagcatgtgtatccagcgt

SEQ ID NO: 3178558 - DNA, 25 bp, Homo sapien
tactgcttgaggacagatgcataca

SEQ ID NO: 3178559 - DNA, 25 bp, Homo sapien
ttaaagcaattagatcctggccagc

SEQ ID NO: 3178560 - DNA, 25 bp, Homo sapien
ccgagatgcctgatgacgccaagaa

SEQ ID NO: 3178561 - DNA, 25 bp, Homo sapien
tagcagatgcgaagtaaagaacgtc

SEQ ID NO: 3178562 - DNA, 25 bp, Homo sapien
cctggccagctcgattcaaatttga

SEQ ID NO: 3178563 - DNA, 25 bp, Homo sapien
gcctgcctaattcggtgaaatgccg

SEQ ID NO: 3178564 - DNA, 25 bp, Homo sapien
aatgactttatcgagagcctgccta

SEQ ID NO: 3178565 - DNA, 25 bp, Homo sapien
agatccaagagctcaccggcgagat

SEQ ID NO: 3178566 - DNA, 25 bp, Homo sapien
gaagcgatgcgataagatagaagcc

SEQ ID NO: 3178567 - DNA, 25 bp, Homo sapien
gaaggctgtgtaccattcatgaact

SEQ ID NO: 3178568 - DNA, 25 bp, Homo sapien
ttaggaagccactagagaaggctgt

SEQ ID NO: 3178569 - DNA, 25 bp, Homo sapien
accacacacctttaggaagccacta

SEQ ID NO: 3178570 - DNA, 25 bp, Homo sapien
cataattcacataagcatccacaaa

SEQ ID NO: 3178571 - DNA, 25 bp, Homo sapien
ttcccagttgtagttgctgttcccc

SEQ ID NO: 3178572 - DNA, 25 bp, Homo sapien
cccagttgtagttgctgttccccac

SEQ ID NO: 3178573 - DNA, 25 bp, Homo sapien
tcttcccagttgtagttgctgttcc

SEQ ID NO: 3178574 - DNA, 25 bp, Homo sapien
gttcttcccagttgtagttgctgtt

SEQ ID NO: 3178575 - DNA, 25 bp, Homo sapien
tgcttcgccggagttaaaggagtta

SEQ ID NO: 3178576 - DNA, 25 bp, Homo sapien
gagttaaaggatcttttgtgcttac

SEQ ID NO: 3178577 - DNA, 25 bp, Homo sapien
aaggagttaaaggatcttttgtgct

SEQ ID NO: 3178578 - DNA, 25 bp, Homo sapien
tgctgctgcttcgccggagttaaag

SEQ ID NO: 3178579 - DNA, 25 bp, Homo sapien
tgggatgtgtggccgagtaatctcc

SEQ ID NO: 3178580 - DNA, 25 bp, Homo sapien
ggatgtgtggccgagtaatctccct

SEQ ID NO: 3178581 - DNA, 25 bp, Homo sapien
acagtgggatgtgtggccgagtaat

SEQ ID NO: 3178582 - DNA, 25 bp, Homo sapien
atgtgtggccgagtaatctcccttg

SEQ ID NO: 3178583 - DNA, 25 bp, Homo sapien
aggaaggcatgacaccctgtggctt

SEQ ID NO: 3178584 - DNA, 25 bp, Homo sapien
gatgcctgtaccaccttgtctacgg

SEQ ID NO: 3178585 - DNA, 25 bp, Homo sapien
ggcttgcatgagaagtacaattaca

SEQ ID NO: 3178586 - DNA, 25 bp, Homo sapien
cttgtgacatgcactgtgacttggc

SEQ ID NO: 3178587 - DNA, 25 bp, Homo sapien
tccccgctggctgtggactggatga

SEQ ID NO: 3178588 - DNA, 25 bp, Homo sapien
caagtgtgggccaccggcaagtact

SEQ ID NO: 3178589 - DNA, 25 bp, Homo sapien
gatgggaatccgatcgctgcctgtc

SEQ ID NO: 3178590 - DNA, 25 bp, Homo sapien
cagactggccatgccgtagatggga

SEQ ID NO: 3178591 - DNA, 25 bp, Homo sapien
aaggtgatgttctcgcatgcgcaga

SEQ ID NO: 3178592 - DNA, 25 bp, Homo sapien
gctgcatgcatccactagaaggaga

SEQ ID NO: 3178593 - DNA, 25 bp, Homo sapien
tgcaacttgctccaaaagcgagagt

SEQ ID NO: 3178594 - DNA, 25 bp, Homo sapien
attaggctcagctgcaacgaatgct

SEQ ID NO: 3178595 - DNA, 25 bp, Homo sapien
tcttatgcaggaatcaaatctgacc

SEQ ID NO: 3178596 - DNA, 25 bp, Homo sapien
tacgacctaatgcttctactaaaag

SEQ ID NO: 3178597 - DNA, 25 bp, Homo sapien
taaatatgccccaatgtttgagcct

SEQ ID NO: 3178598 - DNA, 25 bp, Homo sapien
tattagattatctgagtatacgacc

SEQ ID NO: 3178599 - DNA, 25 bp, Homo sapien
ggctcaggtcttatcaccctcaagt

SEQ ID NO: 3178600 - DNA, 25 bp, Homo sapien
acttttggtgtgcttaaatggccta

SEQ ID NO: 3178601 - DNA, 25 bp, Homo sapien
taaatgaaccagtctctgatccacc

SEQ ID NO: 3178602 - DNA, 25 bp, Homo sapien
tccagtgttaggctagttcctcagc

SEQ ID NO: 3178603 - DNA, 25 bp, Homo sapien
ggcaaataagcccaaacagttgttc

SEQ ID NO: 3178604 - DNA, 25 bp, Homo sapien
agtctggtctcataaggattggtca

SEQ ID NO: 3178605 - DNA, 25 bp, Homo sapien
aattgcctcattacaccgtcattga

SEQ ID NO: 3178606 - DNA, 25 bp, Homo sapien
caagagactttcacatggagtagat

SEQ ID NO: 3178607 - DNA, 25 bp, Homo sapien
tctttgcagatacgtggaactcagt

SEQ ID NO: 3178608 - DNA, 25 bp, Homo sapien
tatgtggtcaaagaagttacctgcc

SEQ ID NO: 3178609 - DNA, 25 bp, Homo sapien
taatggtcaagtccaggtcccacta

SEQ ID NO: 3178610 - DNA, 25 bp, Homo sapien
tctttgcagatacgtggaactcggt

SEQ ID NO: 3178611 - DNA, 25 bp, Homo sapien
gggagctaagaaagttgctctcatg

SEQ ID NO: 3178612 - DNA, 25 bp, Homo sapien
ggagctaagaaagttgctctcatgg

SEQ ID NO: 3178613 - DNA, 25 bp, Homo sapien
ggatggaactggaggtcacgatgtt

SEQ ID NO: 3178614 - DNA, 25 bp, Homo sapien
atggaactggaggtcacgatgttaa

SEQ ID NO: 3178615 - DNA, 25 bp, Homo sapien
gatggaactggaggtcacgatgtta

SEQ ID NO: 3178616 - DNA, 25 bp, Homo sapien
agcatggccaacatggcaaaatccc

SEQ ID NO: 3178617 - DNA, 25 bp, Homo sapien
catggccaacatggcaaaatcccat

SEQ ID NO: 3178618 - DNA, 25 bp, Homo sapien
gccaagagtttaagaccagcatggc

SEQ ID NO: 3178619 - DNA, 25 bp, Homo sapien
tggccaacatggcaaaatcccatct

SEQ ID NO: 3178620 - DNA, 25 bp, Homo sapien
atacagctttcagcagacttctcag

SEQ ID NO: 3178621 - DNA, 25 bp, Homo sapien
cacatccaatacagctttcagcaga

SEQ ID NO: 3178622 - DNA, 25 bp, Homo sapien
aatacagctttcagcagacttctca

SEQ ID NO: 3178623 - DNA, 25 bp, Homo sapien
tccaatacagctttcagcagacttc

SEQ ID NO: 3178624 - DNA, 25 bp, Homo sapien
taccctatgtcccaagattgtacag

SEQ ID NO: 3178625 - DNA, 25 bp, Homo sapien
ccaactgtgtgctgatggtctccca

SEQ ID NO: 3178626 - DNA, 25 bp, Homo sapien
caattagaccttgggacagacatca

SEQ ID NO: 3178627 - DNA, 25 bp, Homo sapien
gctttttgccaactattgaggcctc

SEQ ID NO: 3178628 - DNA, 25 bp, Homo sapien
gcaaatccatgcctgatcagtgtgg

SEQ ID NO: 3178629 - DNA, 25 bp, Homo sapien
gaggaaataaagcaccaaagcctgg

SEQ ID NO: 3178630 - DNA, 25 bp, Homo sapien
cagtctgtgttagcatccctaagga

SEQ ID NO: 3178631 - DNA, 25 bp, Homo sapien
gactagctaatccacgggagaggct

SEQ ID NO: 3178632 - DNA, 25 bp, Homo sapien
cattttgggaggtccagatctgctc

SEQ ID NO: 3178633 - DNA, 25 bp, Homo sapien
gatggcagctgagaccaacatggaa

SEQ ID NO: 3178634 - DNA, 25 bp, Homo sapien
accctctgatccttgtttgtgtgaa

SEQ ID NO: 3178635 - DNA, 25 bp, Homo sapien
gctagcaggatgagcaaggttccat

SEQ ID NO: 3178636 - DNA, 25 bp, Homo sapien
gcggtacccatgtaatcaggtgatt

SEQ ID NO: 3178637 - DNA, 25 bp, Homo sapien
ctttttctgaaaagcggtacccatg

SEQ ID NO: 3178638 - DNA, 25 bp, Homo sapien
atgactgtaaagtgaccacacagta

SEQ ID NO: 3178639 - DNA, 25 bp, Homo sapien
tccttaatagatgatggtagatggg

SEQ ID NO: 3178640 - DNA, 25 bp, Homo sapien
aagggtgactccgtgttatgctgca

SEQ ID NO: 3178641 - DNA, 25 bp, Homo sapien
gcacatttgacaacaccctcggagg

SEQ ID NO: 3178642 - DNA, 25 bp, Homo sapien
cattcctccgtagtggcagaaagca

SEQ ID NO: 3178643 - DNA, 25 bp, Homo sapien
actttaaatagagggtgcagactgc

SEQ ID NO: 3178644 - DNA, 25 bp, Homo sapien
gaggagaggcatgccctcccaatgg

SEQ ID NO: 3178645 - DNA, 25 bp, Homo sapien
cctcttccagccatggattctgaat

SEQ ID NO: 3178646 - DNA, 25 bp, Homo sapien
aatggagacccacacagggtggggg

SEQ ID NO: 3178647 - DNA, 25 bp, Homo sapien
ttactacctcttccagccatggatt

SEQ ID NO: 3178648 - DNA, 25 bp, Homo sapien
tacatgacatgtaagcagaaggcat

SEQ ID NO: 3178649 - DNA, 25 bp, Homo sapien
tttaagtggtgaccaacacagcaca

SEQ ID NO: 3178650 - DNA, 25 bp, Homo sapien
agagtcacgtataaatgctgggcac

SEQ ID NO: 3178651 - DNA, 25 bp, Homo sapien
gagatcacgtgtgtgcctcaaaaca

SEQ ID NO: 3178652 - DNA, 25 bp, Homo sapien
cggaatagcctcttgcagggtgtgc

SEQ ID NO: 3178653 - DNA, 25 bp, Homo sapien
tgcaagatttaggataagggacagc

SEQ ID NO: 3178654 - DNA, 25 bp, Homo sapien
ttttggtgacctcccaaatgaggga

SEQ ID NO: 3178655 - DNA, 25 bp, Homo sapien
caggtgtgacatttccagccaagga

SEQ ID NO: 3178656 - DNA, 25 bp, Homo sapien
ggtcgtgagaaactggctggtccaa

SEQ ID NO: 3178657 - DNA, 25 bp, Homo sapien
gcttgagctatgtgttggaagtgcc

SEQ ID NO: 3178658 - DNA, 25 bp, Homo sapien
tcttaatcgtatggaagcttgagct

SEQ ID NO: 3178659 - DNA, 25 bp, Homo sapien
tgctgaagtgaggtagcagctctct

SEQ ID NO: 3178660 - DNA, 25 bp, Homo sapien
ttttatcgtcaaacaccaagccagg

SEQ ID NO: 3178661 - DNA, 25 bp, Homo sapien
aaagaagtcatgctgtgtggccaat

SEQ ID NO: 3178662 - DNA, 25 bp, Homo sapien
gacaggtaaatgtagccctcagagc

SEQ ID NO: 3178663 - DNA, 25 bp, Homo sapien
taagtcagcctgcatacagaggatc

SEQ ID NO: 3178664 - DNA, 25 bp, Homo sapien
gcccacgatggcagtgcagtcatca

SEQ ID NO: 3178665 - DNA, 25 bp, Homo sapien
tggtccctgcctaggaccgggtcat

SEQ ID NO: 3178666 - DNA, 25 bp, Homo sapien
tcagctgacaaggaattttggtccc

SEQ ID NO: 3178667 - DNA, 25 bp, Homo sapien
ttcaggatgtttcttcaggacttcc

SEQ ID NO: 3178668 - DNA, 25 bp, Homo sapien
caggactttattctatagagcaaac

SEQ ID NO: 3178669 - DNA, 25 bp, Homo sapien
tgcgccttcctcacgtgtgtgaaag

SEQ ID NO: 3178670 - DNA, 25 bp, Homo sapien
taactgcaaacgtgcattggagccc

SEQ ID NO: 3178671 - DNA, 25 bp, Homo sapien
gagcaaacttgctgtggagggccat

SEQ ID NO: 3178672 - DNA, 25 bp, Homo sapien
gcactcctatggctgaagaatacag

SEQ ID NO: 3178673 - DNA, 25 bp, Homo sapien
tgtccagaaggaagaccgcactcct

SEQ ID NO: 3178674 - DNA, 25 bp, Homo sapien
cacataaaggcgaaactgaggctcc

SEQ ID NO: 3178675 - DNA, 25 bp, Homo sapien
ggagctttcctaacactagcagaga

SEQ ID NO: 3178676 - DNA, 25 bp, Homo sapien
ctatcagatcatgggtacaaagtac

SEQ ID NO: 3178677 - DNA, 25 bp, Homo sapien
tccagccccagtcttgagaccaagg

SEQ ID NO: 3178678 - DNA, 25 bp, Homo sapien
tgtagaattacgcaaaccacccagg

SEQ ID NO: 3178679 - DNA, 25 bp, Homo sapien
gggccactcggcaacactgattcta

SEQ ID NO: 3178680 - DNA, 25 bp, Homo sapien
ggaccaattcgaagatgacgctgat

SEQ ID NO: 3178681 - DNA, 25 bp, Homo sapien
gacgatagcaatgtgaagccagact

SEQ ID NO: 3178682 - DNA, 25 bp, Homo sapien
gaaaaccgatttcagtgcacgatgc

SEQ ID NO: 3178683 - DNA, 25 bp, Homo sapien
tgtaatgaaagtctgccccaaaaag

SEQ ID NO: 3178684 - DNA, 25 bp, Homo sapien
gactacagccgaagtgttcttgtgg

SEQ ID NO: 3178685 - DNA, 25 bp, Homo sapien
cgtgtctgccggatatactcctgtg

SEQ ID NO: 3178686 - DNA, 25 bp, Homo sapien
caggcaggaacccttagtgtcccta

SEQ ID NO: 3178687 - DNA, 25 bp, Homo sapien
tgaaggtgcaacagagaagtcagct

SEQ ID NO: 3178688 - DNA, 25 bp, Homo sapien
tatttcgtgtataccatgggagacg

SEQ ID NO: 3178689 - DNA, 25 bp, Homo sapien
atttgtatacacagagaccacctag

SEQ ID NO: 3178690 - DNA, 25 bp, Homo sapien
ttctaacacattaaagggcttcagg

SEQ ID NO: 3178691 - DNA, 25 bp, Homo sapien
gatggccctgccgttagccacaaag

SEQ ID NO: 3178692 - DNA, 25 bp, Homo sapien
aaatcctctgacgtactttgaccag

SEQ ID NO: 3178693 - DNA, 25 bp, Homo sapien
tataacatggcgtgaactggaatcc

SEQ ID NO: 3178694 - DNA, 25 bp, Homo sapien
gaaattaatccctgtgtagttgcct

SEQ ID NO: 3178695 - DNA, 25 bp, Homo sapien
tagttgcctcagacctgaatcttgg

SEQ ID NO: 3178696 - DNA, 25 bp, Homo sapien
ctgggaaagctggtcagcaatggca

SEQ ID NO: 3178697 - DNA, 25 bp, Homo sapien
cggaagtagatccagccacaagcag

SEQ ID NO: 3178698 - DNA, 25 bp, Homo sapien
gccatggagcggatagggctgggaa

SEQ ID NO: 3178699 - DNA, 25 bp, Homo sapien
ggcatattcagtttggtggttaatt

SEQ ID NO: 3178700 - DNA, 25 bp, Homo sapien
cattcactttccagttgctgctcat

SEQ ID NO: 3178701 - DNA, 25 bp, Homo sapien
tcattcactttccagttgctgctca

SEQ ID NO: 3178702 - DNA, 25 bp, Homo sapien
cactttccagttgctgctcatcatc

SEQ ID NO: 3178703 - DNA, 25 bp, Homo sapien
ttcactttccagttgctgctcatca

SEQ ID NO: 3178704 - DNA, 25 bp, Homo sapien
tctttagcctttcttagcgtattgt

SEQ ID NO: 3178705 - DNA, 25 bp, Homo sapien
tcttagcgtattgtgagagtgtata

SEQ ID NO: 3178706 - DNA, 25 bp, Homo sapien
tattgtgagagtgtatagaagatac

SEQ ID NO: 3178707 - DNA, 25 bp, Homo sapien
tgtatagaagatacgttgttactgc

SEQ ID NO: 3178708 - DNA, 25 bp, Homo sapien
agcaagtagcgaggggcagattcaa

SEQ ID NO: 3178709 - DNA, 25 bp, Homo sapien
agggaggagaagcaagtagcgaggg

SEQ ID NO: 3178710 - DNA, 25 bp, Homo sapien
aagggaggagaagcaagtagcgagg

SEQ ID NO: 3178711 - DNA, 25 bp, Homo sapien
gagaagcaagtagcgaggggcagat

SEQ ID NO: 3178712 - DNA, 25 bp, Homo sapien
ttaagttcctcgtagactcaatatt

SEQ ID NO: 3178713 - DNA, 25 bp, Homo sapien
gttcctcgtagactcaatattagac

SEQ ID NO: 3178714 - DNA, 25 bp, Homo sapien
aagttcctcgtagactcaatattag

SEQ ID NO: 3178715 - DNA, 25 bp, Homo sapien
tcctcgtagactcaatattagacct

SEQ ID NO: 3178716 - DNA, 25 bp, Homo sapien
gtctcttcatgatccgatcacgtgt

SEQ ID NO: 3178717 - DNA, 25 bp, Homo sapien
tcttcatgatccgatcacgtgtcat

SEQ ID NO: 3178718 - DNA, 25 bp, Homo sapien
tctcttcatgatccgatcacgtgtc

SEQ ID NO: 3178719 - DNA, 25 bp, Homo sapien
ctcttcatgatccgatcacgtgtca

SEQ ID NO: 3178720 - DNA, 25 bp, Homo sapien
tgcagcgtcctcaaagtctccttcc

SEQ ID NO: 3178721 - DNA, 25 bp, Homo sapien
ccttctgtccaaaatgcagcgtcct

SEQ ID NO: 3178722 - DNA, 25 bp, Homo sapien
ttccctcgcccttctgtccaaaatg

SEQ ID NO: 3178723 - DNA, 25 bp, Homo sapien
tcctgctgcgatgttccttccctcg

SEQ ID NO: 3178724 - DNA, 25 bp, Homo sapien
tatagtaaatgtattgtggtgcttc

SEQ ID NO: 3178725 - DNA, 25 bp, Homo sapien
tattgtggtgcttcacagattcttg

SEQ ID NO: 3178726 - DNA, 25 bp, Homo sapien
tgtggtgcttcacagattcttgaaa

SEQ ID NO: 3178727 - DNA, 25 bp, Homo sapien
aatgtattgtggtgcttcacagatt

SEQ ID NO: 3178728 - DNA, 25 bp, Homo sapien
tgtccagtaaacgaaatccctcctg

SEQ ID NO: 3178729 - DNA, 25 bp, Homo sapien
gcttcatgtccacttagcatggcag

SEQ ID NO: 3178730 - DNA, 25 bp, Homo sapien
gcagataattcgtactctacactct

SEQ ID NO: 3178731 - DNA, 25 bp, Homo sapien
caatgaaaagaagctgtccagtaaa

SEQ ID NO: 3178732 - DNA, 25 bp, Homo sapien
catattaactataagatgcgggata

SEQ ID NO: 3178733 - DNA, 25 bp, Homo sapien
aattataagcacacgatagtttcgg

SEQ ID NO: 3178734 - DNA, 25 bp, Homo sapien
tcaataatgagatgacatgtcacag

SEQ ID NO: 3178735 - DNA, 25 bp, Homo sapien
cagttatggagtagaagcaattgtt

SEQ ID NO: 3178736 - DNA, 25 bp, Homo sapien
gagtcggctttagctattctcagtt

SEQ ID NO: 3178737 - DNA, 25 bp, Homo sapien
caaaattatagtgaatgggtatctg

SEQ ID NO: 3178738 - DNA, 25 bp, Homo sapien
caagacagctgtaaggttctgggca

SEQ ID NO: 3178739 - DNA, 25 bp, Homo sapien
tctcagtttttgagtcttctcattt

SEQ ID NO: 3178740 - DNA, 25 bp, Homo sapien
ttttcctctcacgttgcattgtaaa

SEQ ID NO: 3178741 - DNA, 25 bp, Homo sapien
tttctccttctgttagaacattctg

SEQ ID NO: 3178742 - DNA, 25 bp, Homo sapien
ttttttttcctctcacgttgcattg

SEQ ID NO: 3178743 - DNA, 25 bp, Homo sapien
tcctctcacgttgcattgtaaattt

SEQ ID NO: 3178744 - DNA, 25 bp, Homo sapien
tgctaacgcataacatgggtgacct

SEQ ID NO: 3178745 - DNA, 25 bp, Homo sapien
cataggttgttagaaataagccaca

SEQ ID NO: 3178746 - DNA, 25 bp, Homo sapien
cacaaattccctaaagcatgagcag

SEQ ID NO: 3178747 - DNA, 25 bp, Homo sapien
cagagtgcagccaagttccttgcta

SEQ ID NO: 3178748 - DNA, 25 bp, Homo sapien
tagtgcattccgcagaccccaagct

SEQ ID NO: 3178749 - DNA, 25 bp, Homo sapien
taactctgaactctccccattttag

SEQ ID NO: 3178750 - DNA, 25 bp, Homo sapien
actctgaactctccccattttagtg

SEQ ID NO: 3178751 - DNA, 25 bp, Homo sapien
ccattttagtgcattccgcagaccc

SEQ ID NO: 3178752 - DNA, 25 bp, Homo sapien
tgaccttcattgtatcatttgcctt

SEQ ID NO: 3178753 - DNA, 25 bp, Homo sapien
catttgccttgatgtggcccatgtg

SEQ ID NO: 3178754 - DNA, 25 bp, Homo sapien
gaaaaagcaaattcggattttggca

SEQ ID NO: 3178755 - DNA, 25 bp, Homo sapien
catgtgtgcacagagtccgttgtta

SEQ ID NO: 3178756 - DNA, 25 bp, Homo sapien
gatcactaagtttagcatcccccat

SEQ ID NO: 3178757 - DNA, 25 bp, Homo sapien
caggaatcgatgaatctgtcttcca

SEQ ID NO: 3178758 - DNA, 25 bp, Homo sapien
aaagccgctgatgtagaggacgctc

SEQ ID NO: 3178759 - DNA, 25 bp, Homo sapien
gaacagggattcaagaagtaaatta

SEQ ID NO: 3178760 - DNA, 25 bp, Homo sapien
tccagtgggtgaatccaggaatcga

SEQ ID NO: 3178761 - DNA, 25 bp, Homo sapien
cattcacttacatggtgtgtagcac

SEQ ID NO: 3178762 - DNA, 25 bp, Homo sapien
caagaatgtcacgttaaatcctggc

SEQ ID NO: 3178763 - DNA, 25 bp, Homo sapien
tgtgtagcacactaagctggaaatc

SEQ ID NO: 3178764 - DNA, 25 bp, Homo sapien
tcattatcttctgccgtaaaccagc

SEQ ID NO: 3178765 - DNA, 25 bp, Homo sapien
cagtaagcactatgtcaggcatgga

SEQ ID NO: 3178766 - DNA, 25 bp, Homo sapien
ctacgtagacaaacacaagcccctt

SEQ ID NO: 3178767 - DNA, 25 bp, Homo sapien
taacaatttggcatgaaggtaaact

SEQ ID NO: 3178768 - DNA, 25 bp, Homo sapien
aacatttactgtacacctgtgatac

SEQ ID NO: 3178769 - DNA, 25 bp, Homo sapien
ctttatcttcctcatttcttttctt

SEQ ID NO: 3178770 - DNA, 25 bp, Homo sapien
actttatcttcctcatttcttttct

SEQ ID NO: 3178771 - DNA, 25 bp, Homo sapien
tactttatcttcctcatttcttttc

SEQ ID NO: 3178772 - DNA, 25 bp, Homo sapien
ctactttatcttcctcatttctttt

SEQ ID NO: 3178773 - DNA, 25 bp, Homo sapien
cattctttagaggagccctcaattc

SEQ ID NO: 3178774 - DNA, 25 bp, Homo sapien
tctgtcccaggttggtaaggtcagg

SEQ ID NO: 3178775 - DNA, 25 bp, Homo sapien
taaggtcaggttaactgagagccca

SEQ ID NO: 3178776 - DNA, 25 bp, Homo sapien
gcccattgtgcgtcacaccactcat

SEQ ID NO: 3178777 - DNA, 25 bp, Homo sapien
tcttggttggctggtggatggtagg

SEQ ID NO: 3178778 - DNA, 25 bp, Homo sapien
taagttacaatactgaaagatagtg

SEQ ID NO: 3178779 - DNA, 25 bp, Homo sapien
ttgagtcatgtagatgcccagtggg

SEQ ID NO: 3178780 - DNA, 25 bp, Homo sapien
tgaaagatagtgagttctgagactc

SEQ ID NO: 3178781 - DNA, 25 bp, Homo sapien
cccagagtcagcgcgcgtggaaagt

SEQ ID NO: 3178782 - DNA, 25 bp, Homo sapien
gtccaggtgtcggagcccagagtca

SEQ ID NO: 3178783 - DNA, 25 bp, Homo sapien
ggaaagcggaggatcctcgcgtgcc

SEQ ID NO: 3178784 - DNA, 25 bp, Homo sapien
cgtgtttacaaacagcagccgcgcc

SEQ ID NO: 3178785 - DNA, 25 bp, Homo sapien
gctctgccgacgaggctcttttctc

SEQ ID NO: 3178786 - DNA, 25 bp, Homo sapien
ccggctctgccgacgaggctctttt

SEQ ID NO: 3178787 - DNA, 25 bp, Homo sapien
gtttcggggccgcagtgcctccctg

SEQ ID NO: 3178788 - DNA, 25 bp, Homo sapien
gggaggcacacgctcgccttgtcct

SEQ ID NO: 3178789 - DNA, 25 bp, Homo sapien
ctggacgccggcgaccaggatgtca

SEQ ID NO: 3178790 - DNA, 25 bp, Homo sapien
ccccgcagaacgttgtgccggcgag

SEQ ID NO: 3178791 - DNA, 25 bp, Homo sapien
gccgcttggcacagggaacgccagt

SEQ ID NO: 3178792 - DNA, 25 bp, Homo sapien
cacactaagcgcaaatggagtctcc

SEQ ID NO: 3178793 - DNA, 25 bp, Homo sapien
gctgtagagatactcggaggctccg

SEQ ID NO: 3178794 - DNA, 25 bp, Homo sapien
tcctggtgaaagacgatcctcgatg

SEQ ID NO: 3178795 - DNA, 25 bp, Homo sapien
gaccaacagaagcagttcctgtggg

SEQ ID NO: 3178796 - DNA, 25 bp, Homo sapien
gatgatgttacaataatcctggtga

SEQ ID NO: 3178797 - DNA, 25 bp, Homo sapien
tgcatcggtggaaatgaggacccaa

SEQ ID NO: 3178798 - DNA, 25 bp, Homo sapien
tgacccggacagaagtgaacagtgc

SEQ ID NO: 3178799 - DNA, 25 bp, Homo sapien
cacggactctgctataggttgcgca

SEQ ID NO: 3178800 - DNA, 25 bp, Homo sapien
taaacctactagatttggcagctgg

SEQ ID NO: 3178801 - DNA, 25 bp, Homo sapien
cactagaggctagaaactgtactgg

SEQ ID NO: 3178802 - DNA, 25 bp, Homo sapien
gaaaatgagttcgtaagattcctcc

SEQ ID NO: 3178803 - DNA, 25 bp, Homo sapien
cctgacaaggtctacgtgaatctac

SEQ ID NO: 3178804 - DNA, 25 bp, Homo sapien
tctagggcctagatggatagtgacc

SEQ ID NO: 3178805 - DNA, 25 bp, Homo sapien
gattcaccaattccgtacaccacgg

SEQ ID NO: 3178806 - DNA, 25 bp, Homo sapien
ttttgaaagagatgccttcctcaag

SEQ ID NO: 3178807 - DNA, 25 bp, Homo sapien
agcttgtccttaattgtcaacacca

SEQ ID NO: 3178808 - DNA, 25 bp, Homo sapien
atatcacgaactgtggattcaccaa

SEQ ID NO: 3178809 - DNA, 25 bp, Homo sapien
tcatagatttacgtttggatactcc

SEQ ID NO: 3178810 - DNA, 25 bp, Homo sapien
tatcataactctatcaagctcctcg

SEQ ID NO: 3178811 - DNA, 25 bp, Homo sapien
atgttgatgacttcatagatttacg

SEQ ID NO: 3178812 - DNA, 25 bp, Homo sapien
agctcctcgtatgttgatgacttca

SEQ ID NO: 3178813 - DNA, 25 bp, Homo sapien
gttccggacactggaatcccatctg

SEQ ID NO: 3178814 - DNA, 25 bp, Homo sapien
tgttttgcacaaatcgttccggaca

SEQ ID NO: 3178815 - DNA, 25 bp, Homo sapien
gcacaaatcgttccggacactggaa

SEQ ID NO: 3178816 - DNA, 25 bp, Homo sapien
aatcgttccggacactggaatccca

SEQ ID NO: 3178817 - DNA, 25 bp, Homo sapien
gtaaacctgtggcatttgcgcaaca

SEQ ID NO: 3178818 - DNA, 25 bp, Homo sapien
gcagcctttggaataccatggcgct

SEQ ID NO: 3178819 - DNA, 25 bp, Homo sapien
tgacctacacccagaagtactttgg

SEQ ID NO: 3178820 - DNA, 25 bp, Homo sapien
ccatggcgctgcttaaatcgagtta

SEQ ID NO: 3178821 - DNA, 25 bp, Homo sapien
tttacagtggctagaactccctggc

SEQ ID NO: 3178822 - DNA, 25 bp, Homo sapien
cattggttgaatcagacttgtgaca

SEQ ID NO: 3178823 - DNA, 25 bp, Homo sapien
catttcttcatttggacgtgctggg

SEQ ID NO: 3178824 - DNA, 25 bp, Homo sapien
tatttctggagaagtcctgctcgat

SEQ ID NO: 3178825 - DNA, 25 bp, Homo sapien
aattagctgctaaaatggctccttc

SEQ ID NO: 3178826 - DNA, 25 bp, Homo sapien
cttgagtcactgctccgagagtcga

SEQ ID NO: 3178827 - DNA, 25 bp, Homo sapien
tcagtcagcacctgacagcttgagt

SEQ ID NO: 3178828 - DNA, 25 bp, Homo sapien
taaattgcatccaacactgtcaagt

SEQ ID NO: 3178829 - DNA, 25 bp, Homo sapien
ttattatggtccgaagcctccttaa

SEQ ID NO: 3178830 - DNA, 25 bp, Homo sapien
tcttattatggtccgaagcctcctt

SEQ ID NO: 3178831 - DNA, 25 bp, Homo sapien
ttatggtccgaagcctccttaatac

SEQ ID NO: 3178832 - DNA, 25 bp, Homo sapien
ttttcttattatggtccgaagcctc

SEQ ID NO: 3178833 - DNA, 25 bp, Homo sapien
gcatgggcctttattagacacgcca

SEQ ID NO: 3178834 - DNA, 25 bp, Homo sapien
aatccacaggacttcaaacaagcaa

SEQ ID NO: 3178835 - DNA, 25 bp, Homo sapien
tcactgcagatagtcacaaagatgc

SEQ ID NO: 3178836 - DNA, 25 bp, Homo sapien
gacaagttacacgtcaatgcccaat

SEQ ID NO: 3178837 - DNA, 25 bp, Homo sapien
atgtaagttttattgagtgcctata

SEQ ID NO: 3178838 - DNA, 25 bp, Homo sapien
taagttttattgagtgcctatagtg

SEQ ID NO: 3178839 - DNA, 25 bp, Homo sapien
tcataaaaatgtaagttttattgag

SEQ ID NO: 3178840 - DNA, 25 bp, Homo sapien
aaaatgtaagttttattgagtgcct

SEQ ID NO: 3178841 - DNA, 25 bp, Homo sapien
tggcactttcacagtctattttgtg

SEQ ID NO: 3178842 - DNA, 25 bp, Homo sapien
caggacaccaggttcaaaccaagga

SEQ ID NO: 3178843 - DNA, 25 bp, Homo sapien
tgtccagacaatcaaaaacgaggaa

SEQ ID NO: 3178844 - DNA, 25 bp, Homo sapien
aaattctaagaaactagtacagcca

SEQ ID NO: 3178845 - DNA, 25 bp, Homo sapien
gcaccttactcgcatcacattgcaa

SEQ ID NO: 3178846 - DNA, 25 bp, Homo sapien
actcttgattttcacgtgacacccc

SEQ ID NO: 3178847 - DNA, 25 bp, Homo sapien
tactagaacatgacctgcactcttg

SEQ ID NO: 3178848 - DNA, 25 bp, Homo sapien
taacactgttacttctaattgcacc

SEQ ID NO: 3178849 - DNA, 25 bp, Homo sapien
catcagaaatgagggcaatcttgta

SEQ ID NO: 3178850 - DNA, 25 bp, Homo sapien
caatgaggtgtgtccaatgcccact

SEQ ID NO: 3178851 - DNA, 25 bp, Homo sapien
cattcagtctgtcgggaggcttagg

SEQ ID NO: 3178852 - DNA, 25 bp, Homo sapien
ccgtttggccaagagcgggtccatt

SEQ ID NO: 3178853 - DNA, 25 bp, Homo sapien
tatggtcaacatatgccagaggcac

SEQ ID NO: 3178854 - DNA, 25 bp, Homo sapien
tgacaacatgttggctgaacttaca

SEQ ID NO: 3178855 - DNA, 25 bp, Homo sapien
gatgtacacataccactcagtctta

SEQ ID NO: 3178856 - DNA, 25 bp, Homo sapien
tcatagggctgaggatttgtttcca

SEQ ID NO: 3178857 - DNA, 25 bp, Homo sapien
tatcaatcgtgcttggaggtcctgt

SEQ ID NO: 3178858 - DNA, 25 bp, Homo sapien
catgtataagttggtcataaggtca

SEQ ID NO: 3178859 - DNA, 25 bp, Homo sapien
catacagttagataagcatgtataa

SEQ ID NO: 3178860 - DNA, 25 bp, Homo sapien
gggtgatgtgctccatctaggtact

SEQ ID NO: 3178861 - DNA, 25 bp, Homo sapien
cataaggtcatggtataaggcagtg

SEQ ID NO: 3178862 - DNA, 25 bp, Homo sapien
tatggctatgctggactaaagtggg

SEQ ID NO: 3178863 - DNA, 25 bp, Homo sapien
catgaatgtcctaagccagtgtgta

SEQ ID NO: 3178864 - DNA, 25 bp, Homo sapien
ccaacacagagctattagggtacat

SEQ ID NO: 3178865 - DNA, 25 bp, Homo sapien
tacctagacctcatttagagatggc

SEQ ID NO: 3178866 - DNA, 25 bp, Homo sapien
ctcagtctgctgaatgtgtatcttc

SEQ ID NO: 3178867 - DNA, 25 bp, Homo sapien
catctcagtctgctgaatgtgtatc

SEQ ID NO: 3178868 - DNA, 25 bp, Homo sapien
tctcagtctgctgaatgtgtatctt

SEQ ID NO: 3178869 - DNA, 25 bp, Homo sapien
cagtctgctgaatgtgtatcttcag

SEQ ID NO: 3178870 - DNA, 25 bp, Homo sapien
ttcctggaaagttgctcattttggt

SEQ ID NO: 3178871 - DNA, 25 bp, Homo sapien
tggaaagttgctcattttggttaac

SEQ ID NO: 3178872 - DNA, 25 bp, Homo sapien
tgctttcctggaaagttgctcattt

SEQ ID NO: 3178873 - DNA, 25 bp, Homo sapien
cctggaaagttgctcattttggtta

SEQ ID NO: 3178874 - DNA, 25 bp, Homo sapien
gacattctccatgtgacaccattaa

SEQ ID NO: 3178875 - DNA, 25 bp, Homo sapien
tagtccggcattctcttgggcatga

SEQ ID NO: 3178876 - DNA, 25 bp, Homo sapien
gggcatgatcaacattctcctcaag

SEQ ID NO: 3178877 - DNA, 25 bp, Homo sapien
gaaaatctgcaagagtcacactgga

SEQ ID NO: 3178878 - DNA, 25 bp, Homo sapien
gatacataaaccactaaacacagca

SEQ ID NO: 3178879 - DNA, 25 bp, Homo sapien
ataaaccactaaacacagcaatatg

SEQ ID NO: 3178880 - DNA, 25 bp, Homo sapien
tacataaaccactaaacacagcaat

SEQ ID NO: 3178881 - DNA, 25 bp, Homo sapien
cataaaccactaaacacagcaatat

SEQ ID NO: 3178882 - DNA, 25 bp, Homo sapien
ttggctgagtaaaccaaaacacctc

SEQ ID NO: 3178883 - DNA, 25 bp, Homo sapien
taatgcctttgtgccagacgttttg

SEQ ID NO: 3178884 - DNA, 25 bp, Homo sapien
tgtggtaaatatctgggcttggaat

SEQ ID NO: 3178885 - DNA, 25 bp, Homo sapien
tacaatttgtcaatggcacagatac

SEQ ID NO: 3178886 - DNA, 25 bp, Homo sapien
ctccttgaatatcttcaattcatca

SEQ ID NO: 3178887 - DNA, 25 bp, Homo sapien
tgaatatcttcaattcatcaaggat

SEQ ID NO: 3178888 - DNA, 25 bp, Homo sapien
ccttgaatatcttcaattcatcaag

SEQ ID NO: 3178889 - DNA, 25 bp, Homo sapien
ttgaatatcttcaattcatcaagga

SEQ ID NO: 3178890 - DNA, 25 bp, Homo sapien
tccagatattgaccaataaaacttc

SEQ ID NO: 3178891 - DNA, 25 bp, Homo sapien
cagatattgaccaataaaacttcat

SEQ ID NO: 3178892 - DNA, 25 bp, Homo sapien
cctccagatattgaccaataaaact

SEQ ID NO: 3178893 - DNA, 25 bp, Homo sapien
ccagatattgaccaataaaacttca

SEQ ID NO: 3178894 - DNA, 25 bp, Homo sapien
cacaacaaaataacctctctcaaaa

SEQ ID NO: 3178895 - DNA, 25 bp, Homo sapien
ctctctcaaaataaatccagtgcat

SEQ ID NO: 3178896 - DNA, 25 bp, Homo sapien
gccacaacaaaataacctctctcaa

SEQ ID NO: 3178897 - DNA, 25 bp, Homo sapien
ttgccacaacaaaataacctctctc

SEQ ID NO: 3178898 - DNA, 25 bp, Homo sapien
ggccctttttggttgattctctcca

SEQ ID NO: 3178899 - DNA, 25 bp, Homo sapien
tgtgcgtggccctttttggttgatt

SEQ ID NO: 3178900 - DNA, 25 bp, Homo sapien
ttcctgatgttgtgcgtggcccttt

SEQ ID NO: 3178901 - DNA, 25 bp, Homo sapien
tctctccaaattcgggtcagctgct

SEQ ID NO: 3178902 - DNA, 25 bp, Homo sapien
cagtgggaccagtactcaagagagc

SEQ ID NO: 3178903 - DNA, 25 bp, Homo sapien
gaagacgatctaggagagccacagg

SEQ ID NO: 3178904 - DNA, 25 bp, Homo sapien
tgccaatggcttttcaggtgcccct

SEQ ID NO: 3178905 - DNA, 25 bp, Homo sapien
tttgtgagcatgagaccacccaacc

SEQ ID NO: 3178906 - DNA, 25 bp, Homo sapien
tcctgtacgtttgacatttggcaga

SEQ ID NO: 3178907 - DNA, 25 bp, Homo sapien
tttatgcacaagaccctgcactgtg

SEQ ID NO: 3178908 - DNA, 25 bp, Homo sapien
taacaatggtgcgaaaacagtgcat

SEQ ID NO: 3178909 - DNA, 25 bp, Homo sapien
acagacgaccaaccaacctgtagga

SEQ ID NO: 3178910 - DNA, 25 bp, Homo sapien
gaccagcacgaatccatcatcactg

SEQ ID NO: 3178911 - DNA, 25 bp, Homo sapien
gcgtagaccagcacgaatccatcat

SEQ ID NO: 3178912 - DNA, 25 bp, Homo sapien
aaagggtgttgaagcgtagaccagc

SEQ ID NO: 3178913 - DNA, 25 bp, Homo sapien
tgttgaagcgtagaccagcacgaat

SEQ ID NO: 3178914 - DNA, 25 bp, Homo sapien
ggcaaagccaagctgtagacctggt

SEQ ID NO: 3178915 - DNA, 25 bp, Homo sapien
gcctgaaggtcagcattgtccactg

SEQ ID NO: 3178916 - DNA, 25 bp, Homo sapien
gatgtccacatcaggtgactcagca

SEQ ID NO: 3178917 - DNA, 25 bp, Homo sapien
cagcagccagggatagtgaacagga

SEQ ID NO: 3178918 - DNA, 25 bp, Homo sapien
tacattcaccggttctaggtggacc

SEQ ID NO: 3178919 - DNA, 25 bp, Homo sapien
tccaacacagtagagagcattcagg

SEQ ID NO: 3178920 - DNA, 25 bp, Homo sapien
ttgaaaggctctggaggacctaaca

SEQ ID NO: 3178921 - DNA, 25 bp, Homo sapien
ggacctaacaagagacatgaagctt

SEQ ID NO: 3178922 - DNA, 25 bp, Homo sapien
gatctccactggttccccggaagct

SEQ ID NO: 3178923 - DNA, 25 bp, Homo sapien
atctccactggttccccggaagctt

SEQ ID NO: 3178924 - DNA, 25 bp, Homo sapien
agatctccactggttccccggaagc

SEQ ID NO: 3178925 - DNA, 25 bp, Homo sapien
agtgggagagctaatacaaagaacc

SEQ ID NO: 3178926 - DNA, 25 bp, Homo sapien
tgggctgagtatcaaaatagaaata

SEQ ID NO: 3178927 - DNA, 25 bp, Homo sapien
agtctagtgggagagctaatacaaa

SEQ ID NO: 3178928 - DNA, 25 bp, Homo sapien
tgaatgtgggctgagtatcaaaata

SEQ ID NO: 3178929 - DNA, 25 bp, Homo sapien
aaaattagccaatactagattagcc

SEQ ID NO: 3178930 - DNA, 25 bp, Homo sapien
gttatttgcaaatccctgcacttgg

SEQ ID NO: 3178931 - DNA, 25 bp, Homo sapien
caatttagcccttggtaaagcaaga

SEQ ID NO: 3178932 - DNA, 25 bp, Homo sapien
tctaatctgatcacatagaagcatt

SEQ ID NO: 3178933 - DNA, 25 bp, Homo sapien
catgctgctcatgaactatgtttaa

SEQ ID NO: 3178934 - DNA, 25 bp, Homo sapien
ggatgctagcccataaaaggagaaa

SEQ ID NO: 3178935 - DNA, 25 bp, Homo sapien
tggtacaaaaccaccatagaggatg

SEQ ID NO: 3178936 - DNA, 25 bp, Homo sapien
tcagatctaagacagtggtacaaaa

SEQ ID NO: 3178937 - DNA, 25 bp, Homo sapien
ctttcttggagtttgatctttgcct

SEQ ID NO: 3178938 - DNA, 25 bp, Homo sapien
actttcttggagtttgatctttgcc

SEQ ID NO: 3178939 - DNA, 25 bp, Homo sapien
gcttcattcagctcttggtgtcttt

SEQ ID NO: 3178940 - DNA, 25 bp, Homo sapien
cattttcttggtgggcttcattcag

SEQ ID NO: 3178941 - DNA, 25 bp, Homo sapien
tctctggaatagaacaattttgtga

SEQ ID NO: 3178942 - DNA, 25 bp, Homo sapien
tgtgttcctgaacattttcttggtg

SEQ ID NO: 3178943 - DNA, 25 bp, Homo sapien
gactgagaaaacttgaacgggcaac

SEQ ID NO: 3178944 - DNA, 25 bp, Homo sapien
agatttaaaccgaaaatgactgaga

SEQ ID NO: 3178945 - DNA, 25 bp, Homo sapien
aagatttaaaccgaaaatgactgag

SEQ ID NO: 3178946 - DNA, 25 bp, Homo sapien
tgagaaaacttgaacgggcaactta

SEQ ID NO: 3178947 - DNA, 25 bp, Homo sapien
cactgatgggtgtatcttgaagttc

SEQ ID NO: 3178948 - DNA, 25 bp, Homo sapien
ttcacggatatcaggagagaggtaa

SEQ ID NO: 3178949 - DNA, 25 bp, Homo sapien
taataggatcttcacggatatcagg

SEQ ID NO: 3178950 - DNA, 25 bp, Homo sapien
ctgtttcagcttgccggggccacag

SEQ ID NO: 3178951 - DNA, 25 bp, Homo sapien
tccctttcctctgaatgctaggcat

SEQ ID NO: 3178952 - DNA, 25 bp, Homo sapien
cttccctttcctctgaatgctaggc

SEQ ID NO: 3178953 - DNA, 25 bp, Homo sapien
tgcattatacagcatttgtcttgac

SEQ ID NO: 3178954 - DNA, 25 bp, Homo sapien
cttgcattatacagcatttgtcttg

SEQ ID NO: 3178955 - DNA, 25 bp, Homo sapien
gaactgctgccaagtcaaattttta

SEQ ID NO: 3178956 - DNA, 25 bp, Homo sapien
ggtattgcctgctccaatagtgaga

SEQ ID NO: 3178957 - DNA, 25 bp, Homo sapien
ggatctattgctaccacatctgctt

SEQ ID NO: 3178958 - DNA, 25 bp, Homo sapien
tttgttgtaagcagagaagttatcc

SEQ ID NO: 3178959 - DNA, 25 bp, Homo sapien
gaaggttactagtgtctctacagct

SEQ ID NO: 3178960 - DNA, 25 bp, Homo sapien
gctgaggccaccaatgattgattga

SEQ ID NO: 3178961 - DNA, 25 bp, Homo sapien
cattgttgctgaaaagtccgaggaa

SEQ ID NO: 3178962 - DNA, 25 bp, Homo sapien
ttacctgggcctcaagagtgttgcc

SEQ ID NO: 3178963 - DNA, 25 bp, Homo sapien
cagggaacagatgtcttccatccag

SEQ ID NO: 3178964 - DNA, 25 bp, Homo sapien
acagatgtcttccatccagcagagg

SEQ ID NO: 3178965 - DNA, 25 bp, Homo sapien
gaggaaaagtcccatcaccacaggc

SEQ ID NO: 3178966 - DNA, 25 bp, Homo sapien
gcagaggaaaagtcccatcaccaca

SEQ ID NO: 3178967 - DNA, 25 bp, Homo sapien
ttatacacaacttcaggtctgccac

SEQ ID NO: 3178968 - DNA, 25 bp, Homo sapien
gccactaaagcagcctaagtcactt

SEQ ID NO: 3178969 - DNA, 25 bp, Homo sapien
atggaccttcatcaacttggcccca

SEQ ID NO: 3178970 - DNA, 25 bp, Homo sapien
tccttctttttcaggatactaagga

SEQ ID NO: 3178971 - DNA, 25 bp, Homo sapien
ggttcccaggagcacaggcattaga

SEQ ID NO: 3178972 - DNA, 25 bp, Homo sapien
gaatttaccagaagtcacctcagag

SEQ ID NO: 3178973 - DNA, 25 bp, Homo sapien
ggcattagaactacctcccaggaga

SEQ ID NO: 3178974 - DNA, 25 bp, Homo sapien
gagaaaccctgttcacccactaaga

SEQ ID NO: 3178975 - DNA, 25 bp, Homo sapien
tgaaaccctgtggaagtgctacttt

SEQ ID NO: 3178976 - DNA, 25 bp, Homo sapien
aaccctgtggaagtgctactttctc

SEQ ID NO: 3178977 - DNA, 25 bp, Homo sapien
ttttgaaaccctgtggaagtgctac

SEQ ID NO: 3178978 - DNA, 25 bp, Homo sapien
ctgtggaagtgctactttctctgtg

SEQ ID NO: 3178979 - DNA, 25 bp, Homo sapien
gtaataggcaactctggacaatcac

SEQ ID NO: 3178980 - DNA, 25 bp, Homo sapien
caggtttgtaatatgtaggagcaga

SEQ ID NO: 3178981 - DNA, 25 bp, Homo sapien
tatttctgaattcgacaaatgtgtc

SEQ ID NO: 3178982 - DNA, 25 bp, Homo sapien
aatgtgtccagccagtaataggcaa

SEQ ID NO: 3178983 - DNA, 25 bp, Homo sapien
ccaggcccttgttctatcaggtatc

SEQ ID NO: 3178984 - DNA, 25 bp, Homo sapien
tctatcaggtatctctgaacctctc

SEQ ID NO: 3178985 - DNA, 25 bp, Homo sapien
cttgttctatcaggtatctctgaac

SEQ ID NO: 3178986 - DNA, 25 bp, Homo sapien
ctgcccaggcccttgttctatcagg

SEQ ID NO: 3178987 - DNA, 25 bp, Homo sapien
taagtggcctaagtctgtctcatca

SEQ ID NO: 3178988 - DNA, 25 bp, Homo sapien
gtgattcacatagtttctttgcctc

SEQ ID NO: 3178989 - DNA, 25 bp, Homo sapien
ccatttgtggatccatgtagttgta

SEQ ID NO: 3178990 - DNA, 25 bp, Homo sapien
gattggttcagataagtggcctaag

SEQ ID NO: 3178991 - DNA, 25 bp, Homo sapien
tattttgcttgagttccacattcat

SEQ ID NO: 3178992 - DNA, 25 bp, Homo sapien
cttaatctggatattttgcttgagt

SEQ ID NO: 3178993 - DNA, 25 bp, Homo sapien
ggatattttgcttgagttccacatt

SEQ ID NO: 3178994 - DNA, 25 bp, Homo sapien
aatctggatattttgcttgagttcc

SEQ ID NO: 3178995 - DNA, 25 bp, Homo sapien
gaagagttttttgtgtctctgtctc

SEQ ID NO: 3178996 - DNA, 25 bp, Homo sapien
ttgaagagttttttgtgtctctgtc

SEQ ID NO: 3178997 - DNA, 25 bp, Homo sapien
tgaagagttttttgtgtctctgtct

SEQ ID NO: 3178998 - DNA, 25 bp, Homo sapien
aagagttttttgtgtctctgtctcc

SEQ ID NO: 3178999 - DNA, 25 bp, Homo sapien
taacgcggcgcatctgaagttcttc

SEQ ID NO: 3179000 - DNA, 25 bp, Homo sapien
tcctactgatattcggatgtgttcc

SEQ ID NO: 3179001 - DNA, 25 bp, Homo sapien
tggaatattctgaggccagctgcgt

SEQ ID NO: 3179002 - DNA, 25 bp, Homo sapien
tgcgtctatgatagaaacaggaagc

SEQ ID NO: 3179003 - DNA, 25 bp, Homo sapien
gaattaaggtaatagagaacattcc

SEQ ID NO: 3179004 - DNA, 25 bp, Homo sapien
taaggtaatagagaacattccttac

SEQ ID NO: 3179005 - DNA, 25 bp, Homo sapien
attaaggtaatagagaacattcctt

SEQ ID NO: 3179006 - DNA, 25 bp, Homo sapien
ggaattaaggtaatagagaacattc

SEQ ID NO: 3179007 - DNA, 25 bp, Homo sapien
caagatcaacactaaggttgagtcc

SEQ ID NO: 3179008 - DNA, 25 bp, Homo sapien
aacatctgtttgtgggtagaccaca

SEQ ID NO: 3179009 - DNA, 25 bp, Homo sapien
gagtcctgcataggcctgtggaacc

SEQ ID NO: 3179010 - DNA, 25 bp, Homo sapien
tgggtagaccacagaccaatcaaga

SEQ ID NO: 3179011 - DNA, 25 bp, Homo sapien
caaccatgccagcagggaatcggca

SEQ ID NO: 3179012 - DNA, 25 bp, Homo sapien
aatgtcacaacagctttgggtcacc

SEQ ID NO: 3179013 - DNA, 25 bp, Homo sapien
ttgccatgatccaaccatgccagca

SEQ ID NO: 3179014 - DNA, 25 bp, Homo sapien
aagctacatcttccctaatgaggca

SEQ ID NO: 3179015 - DNA, 25 bp, Homo sapien
tctccagatgtagtcttatagcctc

SEQ ID NO: 3179016 - DNA, 25 bp, Homo sapien
ttatagcctcatttaccacttccat

SEQ ID NO: 3179017 - DNA, 25 bp, Homo sapien
acttccataccgctgctatcactag

SEQ ID NO: 3179018 - DNA, 25 bp, Homo sapien
tcttcaactgccatatgctttatct

SEQ ID NO: 3179019 - DNA, 25 bp, Homo sapien
tgcatatagtggtccctctggaagt

SEQ ID NO: 3179020 - DNA, 25 bp, Homo sapien
tgacttcttcttggtgactcgttgt

SEQ ID NO: 3179021 - DNA, 25 bp, Homo sapien
tggaagttacctcccttcagcccat

SEQ ID NO: 3179022 - DNA, 25 bp, Homo sapien
tctgtgttagctacaagtgacttct

SEQ ID NO: 3179023 - DNA, 25 bp, Homo sapien
tggatcagtccatgtgtcacagatg

SEQ ID NO: 3179024 - DNA, 25 bp, Homo sapien
tatctatccagtcaacacagctatc

SEQ ID NO: 3179025 - DNA, 25 bp, Homo sapien
gtttatggatagtttgctggtttcc

SEQ ID NO: 3179026 - DNA, 25 bp, Homo sapien
gctatcccaggattcttgtttggaa

SEQ ID NO: 3179027 - DNA, 25 bp, Homo sapien
ctaacagtctaagctagtgatctga

SEQ ID NO: 3179028 - DNA, 25 bp, Homo sapien
taacagtctaagctagtgatctgag

SEQ ID NO: 3179029 - DNA, 25 bp, Homo sapien
acagtctaagctagtgatctgagag

SEQ ID NO: 3179030 - DNA, 25 bp, Homo sapien
aacagtctaagctagtgatctgaga

SEQ ID NO: 3179031 - DNA, 25 bp, Homo sapien
taaatcaaacaaatatgtcgtgagg

SEQ ID NO: 3179032 - DNA, 25 bp, Homo sapien
caaatatgtcgtgaggtgtgagttt

SEQ ID NO: 3179033 - DNA, 25 bp, Homo sapien
caaacaaatatgtcgtgaggtgtga

SEQ ID NO: 3179034 - DNA, 25 bp, Homo sapien
cataccccccagtcattcctcttta

SEQ ID NO: 3179035 - DNA, 25 bp, Homo sapien
tgtcttctgcataacatgatccatg

SEQ ID NO: 3179036 - DNA, 25 bp, Homo sapien
taatcaaggcattagtttctgccat

SEQ ID NO: 3179037 - DNA, 25 bp, Homo sapien
tgatgctaggaattaccccactgtg

SEQ ID NO: 3179038 - DNA, 25 bp, Homo sapien
caagtcgcatataaattggacatgg

SEQ ID NO: 3179039 - DNA, 25 bp, Homo sapien
cacagtgtacactgatacgggtggc

SEQ ID NO: 3179040 - DNA, 25 bp, Homo sapien
ggatctggcgatgtgattttcagaa

SEQ ID NO: 3179041 - DNA, 25 bp, Homo sapien
tcaaagcatcactatggatcggtca

SEQ ID NO: 3179042 - DNA, 25 bp, Homo sapien
tatggatcggtcagccacagtgtac

SEQ ID NO: 3179043 - DNA, 25 bp, Homo sapien
aaatgggcataatcacatctaccag

SEQ ID NO: 3179044 - DNA, 25 bp, Homo sapien
tctacagagcttcatagttttcata

SEQ ID NO: 3179045 - DNA, 25 bp, Homo sapien
tttcatactcattactgcatcaaga

SEQ ID NO: 3179046 - DNA, 25 bp, Homo sapien
ctgacaatatagtagttcttcaagt

SEQ ID NO: 3179047 - DNA, 25 bp, Homo sapien
tgcatagtacgacttctgctgtact

SEQ ID NO: 3179048 - DNA, 25 bp, Homo sapien
ctgtcagattgaatctccaacttct

SEQ ID NO: 3179049 - DNA, 25 bp, Homo sapien
caatgtggcttgcatagtacgactt

SEQ ID NO: 3179050 - DNA, 25 bp, Homo sapien
tgttctagttacagatctgtcagat

SEQ ID NO: 3179051 - DNA, 25 bp, Homo sapien
cctagggaagaagtctcaagacaat

SEQ ID NO: 3179052 - DNA, 25 bp, Homo sapien
ttctggttagttgatcagatcccta

SEQ ID NO: 3179053 - DNA, 25 bp, Homo sapien
tagttgatcagatccctagggaaga

SEQ ID NO: 3179054 - DNA, 25 bp, Homo sapien
cttggtcagataagtagattccaga

SEQ ID NO: 3179055 - DNA, 25 bp, Homo sapien
caagaaggaaagattgaatctcctt

SEQ ID NO: 3179056 - DNA, 25 bp, Homo sapien
gatcccttctatagagtagaccaca

SEQ ID NO: 3179057 - DNA, 25 bp, Homo sapien
ctcctttcaagatgaggttcaaagc

SEQ ID NO: 3179058 - DNA, 25 bp, Homo sapien
ccctctgttgatattaggagcaaga

SEQ ID NO: 3179059 - DNA, 25 bp, Homo sapien
tagccttgctagtggtctacgaatt

SEQ ID NO: 3179060 - DNA, 25 bp, Homo sapien
ccttgctagtggtctacgaattttg

SEQ ID NO: 3179061 - DNA, 25 bp, Homo sapien
ttattagccttgctagtggtctacg

SEQ ID NO: 3179062 - DNA, 25 bp, Homo sapien
tattagccttgctagtggtctacga

SEQ ID NO: 3179063 - DNA, 25 bp, Homo sapien
atcaatttagtgtgtcaagtgccgg

SEQ ID NO: 3179064 - DNA, 25 bp, Homo sapien
gactagaagacaatcttgcacttcc

SEQ ID NO: 3179065 - DNA, 25 bp, Homo sapien
tcaagtgccggtgactagaagacaa

SEQ ID NO: 3179066 - DNA, 25 bp, Homo sapien
gcacttcccagtacagagatattat

SEQ ID NO: 3179067 - DNA, 25 bp, Homo sapien
aatgccgggtttaaaatggatgtgc

SEQ ID NO: 3179068 - DNA, 25 bp, Homo sapien
gtcatcatcctattcaagcagaggt

SEQ ID NO: 3179069 - DNA, 25 bp, Homo sapien
tcaagcagaggtcacattcccacat

SEQ ID NO: 3179070 - DNA, 25 bp, Homo sapien
tatggagcacaaatgccgggtttaa

SEQ ID NO: 3179071 - DNA, 25 bp, Homo sapien
tttctgcaagccacgattagcttta

SEQ ID NO: 3179072 - DNA, 25 bp, Homo sapien
tagctttattatactacttgatcac

SEQ ID NO: 3179073 - DNA, 25 bp, Homo sapien
tactacttgatcacaatcgtaccag

SEQ ID NO: 3179074 - DNA, 25 bp, Homo sapien
aatcgtaccagaatctgatttttgg

SEQ ID NO: 3179075 - DNA, 25 bp, Homo sapien
ggatctccattatattagctctagg

SEQ ID NO: 3179076 - DNA, 25 bp, Homo sapien
tttcagggatctccattatattagc

SEQ ID NO: 3179077 - DNA, 25 bp, Homo sapien
ccattatattagctctaggtacata

SEQ ID NO: 3179078 - DNA, 25 bp, Homo sapien
aactttttcagggatctccattata

SEQ ID NO: 3179079 - DNA, 25 bp, Homo sapien
tccttgtatgaggtgactgtcaccc

SEQ ID NO: 3179080 - DNA, 25 bp, Homo sapien
tggaagcttcaacccagcagtcacc

SEQ ID NO: 3179081 - DNA, 25 bp, Homo sapien
caattggtatacatggggatcaggg

SEQ ID NO: 3179082 - DNA, 25 bp, Homo sapien
ggagcaatctggcagttgggccaca

SEQ ID NO: 3179083 - DNA, 25 bp, Homo sapien
tgctccagagttcaactaaaatccg

SEQ ID NO: 3179084 - DNA, 25 bp, Homo sapien
aagaaagctctcagcgaaaataaaa

SEQ ID NO: 3179085 - DNA, 25 bp, Homo sapien
cagacaccttgaaaggtaaggatgg

SEQ ID NO: 3179086 - DNA, 25 bp, Homo sapien
gctctcagcgaaaataaaaagaggg

SEQ ID NO: 3179087 - DNA, 25 bp, Homo sapien
tatgaaaagggatcagtagggtcct

SEQ ID NO: 3179088 - DNA, 25 bp, Homo sapien
tgtgaaatgcccaaatactaggaat

SEQ ID NO: 3179089 - DNA, 25 bp, Homo sapien
caacaaatgggagaattcttgacca

SEQ ID NO: 3179090 - DNA, 25 bp, Homo sapien
ggcagcacaagacctagcagataga

SEQ ID NO: 3179091 - DNA, 25 bp, Homo sapien
ttgtacctcactagctaagctctgt

SEQ ID NO: 3179092 - DNA, 25 bp, Homo sapien
tctaggaattaccaaggcccggaga

SEQ ID NO: 3179093 - DNA, 25 bp, Homo sapien
ggaagactatatagaggcctgtgac

SEQ ID NO: 3179094 - DNA, 25 bp, Homo sapien
ggcctgtgactataacctaatgcat

SEQ ID NO: 3179095 - DNA, 25 bp, Homo sapien
cataagattctcataaggctaagga

SEQ ID NO: 3179096 - DNA, 25 bp, Homo sapien
ggattatggatacctttagtgtgcc

SEQ ID NO: 3179097 - DNA, 25 bp, Homo sapien
cctatcagattatagcaatcctggc

SEQ ID NO: 3179098 - DNA, 25 bp, Homo sapien
tattgtcaaacagactcgatttccc

SEQ ID NO: 3179099 - DNA, 25 bp, Homo sapien
attataaggtagcatcttgctttgc

SEQ ID NO: 3179100 - DNA, 25 bp, Homo sapien
tacgtagtggtacaggaagtccatc

SEQ ID NO: 3179101 - DNA, 25 bp, Homo sapien
gcagaaggtccctttggagtcaaca

SEQ ID NO: 3179102 - DNA, 25 bp, Homo sapien
ggctggcactcatgcactacgtagt

SEQ ID NO: 3179103 - DNA, 25 bp, Homo sapien
gattgaatgccaactgaagcactga

SEQ ID NO: 3179104 - DNA, 25 bp, Homo sapien
catggttcaactcagcacaatatcc

SEQ ID NO: 3179105 - DNA, 25 bp, Homo sapien
tacctgaacgggatattagctacat

SEQ ID NO: 3179106 - DNA, 25 bp, Homo sapien
ttttgacatgaaggagctaatctag

SEQ ID NO: 3179107 - DNA, 25 bp, Homo sapien
caggcacaacccaaagcaatcagag

SEQ ID NO: 3179108 - DNA, 25 bp, Homo sapien
aatcacagtagcctgcccagcaggg

SEQ ID NO: 3179109 - DNA, 25 bp, Homo sapien
tattatagccagctgctacccctag

SEQ ID NO: 3179110 - DNA, 25 bp, Homo sapien
tgaaaccaattagcaagggaatctg

SEQ ID NO: 3179111 - DNA, 25 bp, Homo sapien
gaggtagcagccagtcacaatgaca

SEQ ID NO: 3179112 - DNA, 25 bp, Homo sapien
ttattttagaagactcatggggagg

SEQ ID NO: 3179113 - DNA, 25 bp, Homo sapien
gtagcagccagtcacaatgacaccc

SEQ ID NO: 3179114 - DNA, 25 bp, Homo sapien
cattctctggaagcatggggaagat

SEQ ID NO: 3179115 - DNA, 25 bp, Homo sapien
tcagacttctgtgtagataccttca

SEQ ID NO: 3179116 - DNA, 25 bp, Homo sapien
cctctggtaaccgtctatctgttct

SEQ ID NO: 3179117 - DNA, 25 bp, Homo sapien
tctgtgcttagtaaaaaatttggtc

SEQ ID NO: 3179118 - DNA, 25 bp, Homo sapien
taaactacccactatgtagtaggtg

SEQ ID NO: 3179119 - DNA, 25 bp, Homo sapien
ggcaaccatttttggcacgatttcg

SEQ ID NO: 3179120 - DNA, 25 bp, Homo sapien
tctataatcacatttcccagaggca

SEQ ID NO: 3179121 - DNA, 25 bp, Homo sapien
caagcctacctaatttgaaataagc

SEQ ID NO: 3179122 - DNA, 25 bp, Homo sapien
cacgatttcgtgctatagtagttat

SEQ ID NO: 3179123 - DNA, 25 bp, Homo sapien
gagtctctcggaattaggatcaaaa

SEQ ID NO: 3179124 - DNA, 25 bp, Homo sapien
ggatcaaaaaagaacgcatgagctg

SEQ ID NO: 3179125 - DNA, 25 bp, Homo sapien
gaagcaatgtttacctgacaatttc

SEQ ID NO: 3179126 - DNA, 25 bp, Homo sapien
gtagggcagtgcatacttgtccttt

SEQ ID NO: 3179127 - DNA, 25 bp, Homo sapien
taatgtgatatatattgggcgctgg

SEQ ID NO: 3179128 - DNA, 25 bp, Homo sapien
catcgttggaactaccagagtcacc

SEQ ID NO: 3179129 - DNA, 25 bp, Homo sapien
gagtgactataaggatggttaccat

SEQ ID NO: 3179130 - DNA, 25 bp, Homo sapien
agatctattaactccccatgggtgc

SEQ ID NO: 3179131 - DNA, 25 bp, Homo sapien
catcctgtacaagtgctcagttcca

SEQ ID NO: 3179132 - DNA, 25 bp, Homo sapien
ttacagtgtatctcgaagtcttcca

SEQ ID NO: 3179133 - DNA, 25 bp, Homo sapien
tcagttccaatgtgcccagtcatga

SEQ ID NO: 3179134 - DNA, 25 bp, Homo sapien
tgattgaagtatctgtacctgcccc

SEQ ID NO: 3179135 - DNA, 25 bp, Homo sapien
caacatcgaggtcgtaaaccctatt

SEQ ID NO: 3179136 - DNA, 25 bp, Homo sapien
acatcgaggtcgtaaaccctattgt

SEQ ID NO: 3179137 - DNA, 25 bp, Homo sapien
aacatcgaggtcgtaaaccctattg

SEQ ID NO: 3179138 - DNA, 25 bp, Homo sapien
aaaaaaagtctacagctattccagg

SEQ ID NO: 3179139 - DNA, 25 bp, Homo sapien
tctacagctattccagggatagggc

SEQ ID NO: 3179140 - DNA, 25 bp, Homo sapien
tatttcactgttcgtaaaacaatcc

SEQ ID NO: 3179141 - DNA, 25 bp, Homo sapien
tcactgttcgtaaaacaatcccatt

SEQ ID NO: 3179142 - DNA, 25 bp, Homo sapien
tagcctttccaaaacaagacctcaa

SEQ ID NO: 3179143 - DNA, 25 bp, Homo sapien
cacatagatctcttaaaaaggcaga

SEQ ID NO: 3179144 - DNA, 25 bp, Homo sapien
caataattcgtttaagacccagagt

SEQ ID NO: 3179145 - DNA, 25 bp, Homo sapien
gatttatgacctcaagagaaatcag

SEQ ID NO: 3179146 - DNA, 25 bp, Homo sapien
ctctaaggtgattgccaagactaaa

SEQ ID NO: 3179147 - DNA, 25 bp, Homo sapien
tctctaaggtgattgccaagactaa

SEQ ID NO: 3179148 - DNA, 25 bp, Homo sapien
tctaaggtgattgccaagactaaag

SEQ ID NO: 3179149 - DNA, 25 bp, Homo sapien
taagatacctgggtactcgacacca

SEQ ID NO: 3179150 - DNA, 25 bp, Homo sapien
cctggaggagaaacctggcaacaaa

SEQ ID NO: 3179151 - DNA, 25 bp, Homo sapien
tcaaaaatgggatagggaaaccaca

SEQ ID NO: 3179152 - DNA, 25 bp, Homo sapien
tacaaactagctggaaagccaccct

SEQ ID NO: 3179153 - DNA, 25 bp, Homo sapien
gcacatatgcctaagcatgggcccc

SEQ ID NO: 3179154 - DNA, 25 bp, Homo sapien
tgaaagccccttttgcaagaaagta

SEQ ID NO: 3179155 - DNA, 25 bp, Homo sapien
ccagtaataaaagatgggaccatca

SEQ ID NO: 3179156 - DNA, 25 bp, Homo sapien
ttcagtaccgtatattgtgcattcc

SEQ ID NO: 3179157 - DNA, 25 bp, Homo sapien
ttctcaaagatcaccaaagtatata

SEQ ID NO: 3179158 - DNA, 25 bp, Homo sapien
agcaggatcccatgggatatgggtt

SEQ ID NO: 3179159 - DNA, 25 bp, Homo sapien
aaaatgcctgtaataggttaaatgc

SEQ ID NO: 3179160 - DNA, 25 bp, Homo sapien
cttttcattgaactcctattcagga

SEQ ID NO: 3179161 - DNA, 25 bp, Homo sapien
aaattctataataagggccaggcgc

SEQ ID NO: 3179162 - DNA, 25 bp, Homo sapien
agtttgcactgagcctactctccag

SEQ ID NO: 3179163 - DNA, 25 bp, Homo sapien
aaaaatgtgcaatgtatgcccaaaa

SEQ ID NO: 3179164 - DNA, 25 bp, Homo sapien
tggtattattgaagcacaattagaa

SEQ ID NO: 3179165 - DNA, 25 bp, Homo sapien
ggcaaactactacctttctcggcaa

SEQ ID NO: 3179166 - DNA, 25 bp, Homo sapien
cagaagtgccccaatacctgacctt

SEQ ID NO: 3179167 - DNA, 25 bp, Homo sapien
tatgaggacgaataatccaccaggc

SEQ ID NO: 3179168 - DNA, 25 bp, Homo sapien
acttgaccttacgatagtgactggg

SEQ ID NO: 3179169 - DNA, 25 bp, Homo sapien
ctttccccgccgattgctgctgcag

SEQ ID NO: 3179170 - DNA, 25 bp, Homo sapien
cctttccccgccgattgctgctgca

SEQ ID NO: 3179171 - DNA, 25 bp, Homo sapien
tcattgaaatcattttcaatgtctc

SEQ ID NO: 3179172 - DNA, 25 bp, Homo sapien
tgaaatcattttcaatgtctctcat

SEQ ID NO: 3179173 - DNA, 25 bp, Homo sapien
attgaaatcattttcaatgtctctc

SEQ ID NO: 3179174 - DNA, 25 bp, Homo sapien
cttttaactgttcattgaaatcatt

SEQ ID NO: 3179175 - DNA, 25 bp, Homo sapien
aaaatctgtctgcccgctctcttgg

SEQ ID NO: 3179176 - DNA, 25 bp, Homo sapien
gtctgcccgctctcttggtttttct

SEQ ID NO: 3179177 - DNA, 25 bp, Homo sapien
aatctgtctgcccgctctcttggtt

SEQ ID NO: 3179178 - DNA, 25 bp, Homo sapien
aaatctgtctgcccgctctcttggt

SEQ ID NO: 3179179 - DNA, 25 bp, Homo sapien
gaaacgcgaggatgctccatggagc

SEQ ID NO: 3179180 - DNA, 25 bp, Homo sapien
aaagagacttgacctggctttcgtc

SEQ ID NO: 3179181 - DNA, 25 bp, Homo sapien
aaatcctggagaacgccggatggga

SEQ ID NO: 3179182 - DNA, 25 bp, Homo sapien
tccacaagggctgagagattaggct

SEQ ID NO: 3179183 - DNA, 25 bp, Homo sapien
gaaagaggaagaggcatcatcccta

SEQ ID NO: 3179184 - DNA, 25 bp, Homo sapien
cacaagagtgctcgtgaccctaaac

SEQ ID NO: 3179185 - DNA, 25 bp, Homo sapien
aacttaacgtgaggcgcaaaagcgc

SEQ ID NO: 3179186 - DNA, 25 bp, Homo sapien
tctcccagggcgactctgacgaggg

SEQ ID NO: 3179187 - DNA, 25 bp, Homo sapien
gatatttgaactaaagcgaccccta

SEQ ID NO: 3179188 - DNA, 25 bp, Homo sapien
gattaagagcaaacgaaaaccttga

SEQ ID NO: 3179189 - DNA, 25 bp, Homo sapien
ctagattaagagcaaacgaaaacct

SEQ ID NO: 3179190 - DNA, 25 bp, Homo sapien
aagagcaaacgaaaaccttgaagat

SEQ ID NO: 3179191 - DNA, 25 bp, Homo sapien
tccactgatgggaaaatcagcgtct

SEQ ID NO: 3179192 - DNA, 25 bp, Homo sapien
gatggtccggtaggctaaatcacgc

SEQ ID NO: 3179193 - DNA, 25 bp, Homo sapien
taaagggaggtctgcaaagtaagtc

SEQ ID NO: 3179194 - DNA, 25 bp, Homo sapien
tctagagcgaaaagccttaggaccg

SEQ ID NO: 3179195 - DNA, 25 bp, Homo sapien
taatcttccgaatccaggcacagaa

SEQ ID NO: 3179196 - DNA, 25 bp, Homo sapien
tccattctggtgtgatccaggaaca

SEQ ID NO: 3179197 - DNA, 25 bp, Homo sapien
ttctccattctggtgtgatccagga

SEQ ID NO: 3179198 - DNA, 25 bp, Homo sapien
ttccagtgcttaactaatcttccga

SEQ ID NO: 3179199 - DNA, 25 bp, Homo sapien
gatttactgaagaccatgctgtcca

SEQ ID NO: 3179200 - DNA, 25 bp, Homo sapien
tatgcacatgaaggtacaaggtaac

SEQ ID NO: 3179201 - DNA, 25 bp, Homo sapien
tttccaaagggcagaccaatagttc

SEQ ID NO: 3179202 - DNA, 25 bp, Homo sapien
cttatggatgagacatgatcagcca

SEQ ID NO: 3179203 - DNA, 25 bp, Homo sapien
agagttgcagagttgcgtgtatttc

SEQ ID NO: 3179204 - DNA, 25 bp, Homo sapien
gtatttcttgggctcattaatgtgt

SEQ ID NO: 3179205 - DNA, 25 bp, Homo sapien
tgcagagttgcgtgtatttcttggg

SEQ ID NO: 3179206 - DNA, 25 bp, Homo sapien
tgcgtgtatttcttgggctcattaa

SEQ ID NO: 3179207 - DNA, 25 bp, Homo sapien
tttgcttacccatactaagtgagag

SEQ ID NO: 3179208 - DNA, 25 bp, Homo sapien
tgatccctatcaatgctccttgagc

SEQ ID NO: 3179209 - DNA, 25 bp, Homo sapien
gggaaggcatcagatatctcacgtg

SEQ ID NO: 3179210 - DNA, 25 bp, Homo sapien
cacaacttccatccctggttggaaa

SEQ ID NO: 3179211 - DNA, 25 bp, Homo sapien
taaaaacactaggtcacagcctggg

SEQ ID NO: 3179212 - DNA, 25 bp, Homo sapien
tgagtatccaacacaattcagagga

SEQ ID NO: 3179213 - DNA, 25 bp, Homo sapien
tgaggcagaacaaaagagcacgtgg

SEQ ID NO: 3179214 - DNA, 25 bp, Homo sapien
tgggtcctcggcctcaaactatggc

SEQ ID NO: 3179215 - DNA, 25 bp, Homo sapien
cctttcagtgtagctaggatcctag

SEQ ID NO: 3179216 - DNA, 25 bp, Homo sapien
aacctgaaggtttagctgccaccat

SEQ ID NO: 3179217 - DNA, 25 bp, Homo sapien
tcctagagctcttactaaaaagtgt

SEQ ID NO: 3179218 - DNA, 25 bp, Homo sapien
ctaaaaagtgttatacaacctgaag

SEQ ID NO: 3179219 - DNA, 25 bp, Homo sapien
cttaatattctttgcccgtggttat

SEQ ID NO: 3179220 - DNA, 25 bp, Homo sapien
ttgcccgtggttataaccaaatgct

SEQ ID NO: 3179221 - DNA, 25 bp, Homo sapien
aaccaaatgctaacatcaatagaag

SEQ ID NO: 3179222 - DNA, 25 bp, Homo sapien
tattctttgcccgtggttataacca

SEQ ID NO: 3179223 - DNA, 25 bp, Homo sapien
ttcttgttggacaacttgcagattt

SEQ ID NO: 3179224 - DNA, 25 bp, Homo sapien
aaattcttgttggacaacttgcaga

SEQ ID NO: 3179225 - DNA, 25 bp, Homo sapien
gtaaattcttgttggacaacttgca

SEQ ID NO: 3179226 - DNA, 25 bp, Homo sapien
tgttggacaacttgcagattttctg

SEQ ID NO: 3179227 - DNA, 25 bp, Homo sapien
atattcttctggacagcagcgatta

SEQ ID NO: 3179228 - DNA, 25 bp, Homo sapien
tattcttctggacagcagcgattat

SEQ ID NO: 3179229 - DNA, 25 bp, Homo sapien
ttgcttactgaatacaacatatata

SEQ ID NO: 3179230 - DNA, 25 bp, Homo sapien
atcttttgcttactgaatacaacat

SEQ ID NO: 3179231 - DNA, 25 bp, Homo sapien
cagtagtttgaagcaaggtagctca

SEQ ID NO: 3179232 - DNA, 25 bp, Homo sapien
tttgtagcgtactcaggaagttcgg

SEQ ID NO: 3179233 - DNA, 25 bp, Homo sapien
tctatggaagtgctgaagggtctct

SEQ ID NO: 3179234 - DNA, 25 bp, Homo sapien
tatggcctttttgatagctgcttcc

SEQ ID NO: 3179235 - DNA, 25 bp, Homo sapien
ttactgttgttaagcccaatgcccc

SEQ ID NO: 3179236 - DNA, 25 bp, Homo sapien
ggagttgtagctatctccgccgaca

SEQ ID NO: 3179237 - DNA, 25 bp, Homo sapien
tcaggtatagtccaagaatgcttac

SEQ ID NO: 3179238 - DNA, 25 bp, Homo sapien
acccgagtggttggcagtatttgca

SEQ ID NO: 3179239 - DNA, 25 bp, Homo sapien
ctgagggaggcagtgttgatttaag

SEQ ID NO: 3179240 - DNA, 25 bp, Homo sapien
tggatgtgagagtttgatttctcac

SEQ ID NO: 3179241 - DNA, 25 bp, Homo sapien
ggatgtgagagtttgatttctcaca

SEQ ID NO: 3179242 - DNA, 25 bp, Homo sapien
gatgtgagagtttgatttctcacac

SEQ ID NO: 3179243 - DNA, 25 bp, Homo sapien
gtggatgtgagagtttgatttctca

SEQ ID NO: 3179244 - DNA, 25 bp, Homo sapien
tggttgggagggtaagattctgtaa

SEQ ID NO: 3179245 - DNA, 25 bp, Homo sapien
aagattctgtaacttgaccactcct

SEQ ID NO: 3179246 - DNA, 25 bp, Homo sapien
tctgtaacttgaccactccttctgc

SEQ ID NO: 3179247 - DNA, 25 bp, Homo sapien
ctagcgttggttgggagggtaagat

SEQ ID NO: 3179248 - DNA, 25 bp, Homo sapien
atttcagtgtagaattggaaaggac

SEQ ID NO: 3179249 - DNA, 25 bp, Homo sapien
aaatttcagtgtagaattggaaagg

SEQ ID NO: 3179250 - DNA, 25 bp, Homo sapien
ttcagtgtagaattggaaaggacca

SEQ ID NO: 3179251 - DNA, 25 bp, Homo sapien
cagtgtagaattggaaaggaccact

SEQ ID NO: 3179252 - DNA, 25 bp, Homo sapien
tgtttagagaagttgcttgttcatt

SEQ ID NO: 3179253 - DNA, 25 bp, Homo sapien
tttagagaagttgcttgttcatttg

SEQ ID NO: 3179254 - DNA, 25 bp, Homo sapien
tagagaagttgcttgttcatttgac

SEQ ID NO: 3179255 - DNA, 25 bp, Homo sapien
tgtgtttagagaagttgcttgttca

SEQ ID NO: 3179256 - DNA, 25 bp, Homo sapien
ggctcgatttcccacgcctccagtg

SEQ ID NO: 3179257 - DNA, 25 bp, Homo sapien
tcctctagttgtttcgaaatttgat

SEQ ID NO: 3179258 - DNA, 25 bp, Homo sapien
tcaccccggctgaggtatgtttccc

SEQ ID NO: 3179259 - DNA, 25 bp, Homo sapien
tttggtagtcagttctttggctgga

SEQ ID NO: 3179260 - DNA, 25 bp, Homo sapien
gatagacagagaaagaacaaaaaga

SEQ ID NO: 3179261 - DNA, 25 bp, Homo sapien
tgatagacagagaaagaacaaaaag

SEQ ID NO: 3179262 - DNA, 25 bp, Homo sapien
tagacagagaaagaacaaaaagaaa

SEQ ID NO: 3179263 - DNA, 25 bp, Homo sapien
ctgatagacagagaaagaacaaaaa

SEQ ID NO: 3179264 - DNA, 25 bp, Homo sapien
caccgtggtgctagtttgcttggca

SEQ ID NO: 3179265 - DNA, 25 bp, Homo sapien
tggcaatgactattctaagtaaaac

SEQ ID NO: 3179266 - DNA, 25 bp, Homo sapien
taaatatgatccaatttcatcttga

SEQ ID NO: 3179267 - DNA, 25 bp, Homo sapien
cctctataagtgagtagaaaagtga

SEQ ID NO: 3179268 - DNA, 25 bp, Homo sapien
aaaatttgagttgttgagcacctat

SEQ ID NO: 3179269 - DNA, 25 bp, Homo sapien
tgtgaggagcatgcatctaagcact

SEQ ID NO: 3179270 - DNA, 25 bp, Homo sapien
aatcatggtactagcaaaatttgag

SEQ ID NO: 3179271 - DNA, 25 bp, Homo sapien
cccaagacatgtctggtgtcttgac

SEQ ID NO: 3179272 - DNA, 25 bp, Homo sapien
ttttacagtaagctgggattgttcc

SEQ ID NO: 3179273 - DNA, 25 bp, Homo sapien
ttccaaagtccaccaagtgaatact

SEQ ID NO: 3179274 - DNA, 25 bp, Homo sapien
ccaaagtgaacatattgtaatctgt

SEQ ID NO: 3179275 - DNA, 25 bp, Homo sapien
ggcaaatctacttgtcccaaagtga

SEQ ID NO: 3179276 - DNA, 25 bp, Homo sapien
tgacctggttgtccaatatcactgt

SEQ ID NO: 3179277 - DNA, 25 bp, Homo sapien
gagataacctggtatgtacataagc

SEQ ID NO: 3179278 - DNA, 25 bp, Homo sapien
caatatcactgtgggagataacctg

SEQ ID NO: 3179279 - DNA, 25 bp, Homo sapien
cactgtgggagataacctggtatgt

SEQ ID NO: 3179280 - DNA, 25 bp, Homo sapien
caggatccaccggtccagccacaag

SEQ ID NO: 3179281 - DNA, 25 bp, Homo sapien
aggatccaccggtccagccacaagg

SEQ ID NO: 3179282 - DNA, 25 bp, Homo sapien
ggatccaccggtccagccacaaggt

SEQ ID NO: 3179283 - DNA, 25 bp, Homo sapien
gatccaccggtccagccacaaggtc

SEQ ID NO: 3179284 - DNA, 25 bp, Homo sapien
tttatgttgcatcctatagacagga

SEQ ID NO: 3179285 - DNA, 25 bp, Homo sapien
catttcggcccactgtatccaggac

SEQ ID NO: 3179286 - DNA, 25 bp, Homo sapien
tccaatccaatgaggtgacaatttt

SEQ ID NO: 3179287 - DNA, 25 bp, Homo sapien
gacaggattggatatcttctgagat

SEQ ID NO: 3179288 - DNA, 25 bp, Homo sapien
tgtggcttgaggagacagatttcca

SEQ ID NO: 3179289 - DNA, 25 bp, Homo sapien
cagatttccagctgatccctcaata

SEQ ID NO: 3179290 - DNA, 25 bp, Homo sapien
tcagaaccagaaaaccttcctgtgt

SEQ ID NO: 3179291 - DNA, 25 bp, Homo sapien
tgcatggtgaatgttcggtgtacat

SEQ ID NO: 3179292 - DNA, 25 bp, Homo sapien
ctttgtttgttgactggagttcagt

SEQ ID NO: 3179293 - DNA, 25 bp, Homo sapien
tgtttgttgactggagttcagtact

SEQ ID NO: 3179294 - DNA, 25 bp, Homo sapien
actggagttcagtacttgcattcat

SEQ ID NO: 3179295 - DNA, 25 bp, Homo sapien
tgttgactggagttcagtacttgca

SEQ ID NO: 3179296 - DNA, 25 bp, Homo sapien
ctttcagcctggttggtgtgtatca

SEQ ID NO: 3179297 - DNA, 25 bp, Homo sapien
tttcagcctggttggtgtgtatcaa

SEQ ID NO: 3179298 - DNA, 25 bp, Homo sapien
actttcagcctggttggtgtgtatc

SEQ ID NO: 3179299 - DNA, 25 bp, Homo sapien
ttcagcctggttggtgtgtatcaaa

SEQ ID NO: 3179300 - DNA, 25 bp, Homo sapien
gtcagagatgatagtaattacaatc

SEQ ID NO: 3179301 - DNA, 25 bp, Homo sapien
cattgacaataattgggtcagagat

SEQ ID NO: 3179302 - DNA, 25 bp, Homo sapien
ttgggtcagagatgatagtaattac

SEQ ID NO: 3179303 - DNA, 25 bp, Homo sapien
aatagcattgacaataattgggtca

SEQ ID NO: 3179304 - DNA, 25 bp, Homo sapien
ttttatcttcgctgacttttccttc

SEQ ID NO: 3179305 - DNA, 25 bp, Homo sapien
aatattgtcaatcttcttctgcaga

SEQ ID NO: 3179306 - DNA, 25 bp, Homo sapien
tagaagagattgaaattctctgctt

SEQ ID NO: 3179307 - DNA, 25 bp, Homo sapien
cattgcctggtagttcacctgatca

SEQ ID NO: 3179308 - DNA, 25 bp, Homo sapien
gcttagcatttaaccagtcacccat

SEQ ID NO: 3179309 - DNA, 25 bp, Homo sapien
aaaaaataggctccacatgtctcca

SEQ ID NO: 3179310 - DNA, 25 bp, Homo sapien
tagtaatcaatatgacacacagcct

SEQ ID NO: 3179311 - DNA, 25 bp, Homo sapien
caccctaaagatccatgttgccaga

SEQ ID NO: 3179312 - DNA, 25 bp, Homo sapien
cattgtctgtctgagtgatgctccc

SEQ ID NO: 3179313 - DNA, 25 bp, Homo sapien
tttgctgggctgctattgaaaccac

SEQ ID NO: 3179314 - DNA, 25 bp, Homo sapien
caaagtgggccgattctcttgcacc

SEQ ID NO: 3179315 - DNA, 25 bp, Homo sapien
caagcaagggttgaaggatctccat

SEQ ID NO: 3179316 - DNA, 25 bp, Homo sapien
gactaccaggcaacgatcgatctat

SEQ ID NO: 3179317 - DNA, 25 bp, Homo sapien
tagaatcattcagacggtggaactg

SEQ ID NO: 3179318 - DNA, 25 bp, Homo sapien
ggtcttggcgacttgcaaaacaaag

SEQ ID NO: 3179319 - DNA, 25 bp, Homo sapien
tccacttagggatggtagcattcag

SEQ ID NO: 3179320 - DNA, 25 bp, Homo sapien
tatcaggactgtggtaagatttacc

SEQ ID NO: 3179321 - DNA, 25 bp, Homo sapien
caggatatattatgttgtccgtgtt

SEQ ID NO: 3179322 - DNA, 25 bp, Homo sapien
gtttctttgagtccggcctatcagg

SEQ ID NO: 3179323 - DNA, 25 bp, Homo sapien
tgttgtccgtgtttctttgagtccg

SEQ ID NO: 3179324 - DNA, 25 bp, Homo sapien
tgttgatctcaaatcgtagtttgca

SEQ ID NO: 3179325 - DNA, 25 bp, Homo sapien
ctcaaatcgtagtttgcagcagaat

SEQ ID NO: 3179326 - DNA, 25 bp, Homo sapien
tgatctcaaatcgtagtttgcagca

SEQ ID NO: 3179327 - DNA, 25 bp, Homo sapien
gatctcaaatcgtagtttgcagcag

SEQ ID NO: 3179328 - DNA, 25 bp, Homo sapien
atttatgcacgtgcccccattttgg

SEQ ID NO: 3179329 - DNA, 25 bp, Homo sapien
aagcttgatagtgcagttgtcacca

SEQ ID NO: 3179330 - DNA, 25 bp, Homo sapien
attttggcacggatgccgactacag

SEQ ID NO: 3179331 - DNA, 25 bp, Homo sapien
taaaaggatgtctgcaggcacaggt

SEQ ID NO: 3179332 - DNA, 25 bp, Homo sapien
taaatgactcgatggtgtacttgaa

SEQ ID NO: 3179333 - DNA, 25 bp, Homo sapien
ccaccatgggtgcatatctgtaaga

SEQ ID NO: 3179334 - DNA, 25 bp, Homo sapien
gataggaccaggtatagtcattcca

SEQ ID NO: 3179335 - DNA, 25 bp, Homo sapien
gttccttttgcaagtcgtaaccaga

SEQ ID NO: 3179336 - DNA, 25 bp, Homo sapien
caataaaggtgatagtctgtttttc

SEQ ID NO: 3179337 - DNA, 25 bp, Homo sapien
tctttaggatcaagaactctttcat

SEQ ID NO: 3179338 - DNA, 25 bp, Homo sapien
gaaagaaaactgtgactgataatat

SEQ ID NO: 3179339 - DNA, 25 bp, Homo sapien
aacactggctgtttctcaataaagg

SEQ ID NO: 3179340 - DNA, 25 bp, Homo sapien
tgcctcagccctatgagctcatggg

SEQ ID NO: 3179341 - DNA, 25 bp, Homo sapien
gaagggcagatctgtaggtactacc

SEQ ID NO: 3179342 - DNA, 25 bp, Homo sapien
cagaaacacgttgtcagatatccaa

SEQ ID NO: 3179343 - DNA, 25 bp, Homo sapien
ggtaatcatgcccactttacaaggg

SEQ ID NO: 3179344 - DNA, 25 bp, Homo sapien
tcttcccattttgtgacactagtat

SEQ ID NO: 3179345 - DNA, 25 bp, Homo sapien
tttgtgacactagtattgaaaccgc

SEQ ID NO: 3179346 - DNA, 25 bp, Homo sapien
gacactagtattgaaaccgcctttg

SEQ ID NO: 3179347 - DNA, 25 bp, Homo sapien
ttaaatggaggcataatcccagtcc

SEQ ID NO: 3179348 - DNA, 25 bp, Homo sapien
cgcttctgggtgtgacgctcgaaaa

SEQ ID NO: 3179349 - DNA, 25 bp, Homo sapien
tcctgttgggcataagcacctgagc

SEQ ID NO: 3179350 - DNA, 25 bp, Homo sapien
tcaatgtcaagagcctgatgccctt

SEQ ID NO: 3179351 - DNA, 25 bp, Homo sapien
tttgaactggccttgcagcacagca

SEQ ID NO: 3179352 - DNA, 25 bp, Homo sapien
tagtggctactggtgttcctcggct

SEQ ID NO: 3179353 - DNA, 25 bp, Homo sapien
taatagtatcacttggccaaaagca

SEQ ID NO: 3179354 - DNA, 25 bp, Homo sapien
cataatcccttggtaggctccaggg

SEQ ID NO: 3179355 - DNA, 25 bp, Homo sapien
tcctcggcttgtggttgcatcattc

SEQ ID NO: 3179356 - DNA, 25 bp, Homo sapien
gacaggaggtctagggctataattt

SEQ ID NO: 3179357 - DNA, 25 bp, Homo sapien
ttgttggcaccagccacgtcagcag

SEQ ID NO: 3179358 - DNA, 25 bp, Homo sapien
catcaagtgttcttgacaggaggtc

SEQ ID NO: 3179359 - DNA, 25 bp, Homo sapien
tgaatctgaaagaggcattttgcct

SEQ ID NO: 3179360 - DNA, 25 bp, Homo sapien
caaaaatatcccataagtccaacag

SEQ ID NO: 3179361 - DNA, 25 bp, Homo sapien
ggagcatagctcacaacaagttgac

SEQ ID NO: 3179362 - DNA, 25 bp, Homo sapien
tcttctacatatgagcggcacacac

SEQ ID NO: 3179363 - DNA, 25 bp, Homo sapien
tgaccgtgaatcactaatatgaggg

SEQ ID NO: 3179364 - DNA, 25 bp, Homo sapien
agtcctccactctgcctttctctgc

SEQ ID NO: 3179365 - DNA, 25 bp, Homo sapien
ctgcagtcctccactctgcctttct

SEQ ID NO: 3179366 - DNA, 25 bp, Homo sapien
cagtcctccactctgcctttctctg

SEQ ID NO: 3179367 - DNA, 25 bp, Homo sapien
ctttctctgccctcagccagctcca

SEQ ID NO: 3179368 - DNA, 25 bp, Homo sapien
aatgatggctgtggaagaggtcacc

SEQ ID NO: 3179369 - DNA, 25 bp, Homo sapien
ccttctgaatgatggctgtggaaga

SEQ ID NO: 3179370 - DNA, 25 bp, Homo sapien
tggctgtggaagaggtcacctgtac

SEQ ID NO: 3179371 - DNA, 25 bp, Homo sapien
gagccttctgaatgatggctgtgga

SEQ ID NO: 3179372 - DNA, 25 bp, Homo sapien
tggaagaaattgggatatagtctat

SEQ ID NO: 3179373 - DNA, 25 bp, Homo sapien
gatatagtctatccacccactcaga

SEQ ID NO: 3179374 - DNA, 25 bp, Homo sapien
tttggaagaaattgggatatagtct

SEQ ID NO: 3179375 - DNA, 25 bp, Homo sapien
gggatatagtctatccacccactca

SEQ ID NO: 3179376 - DNA, 25 bp, Homo sapien
atagccatccgaggctctgtcagca

SEQ ID NO: 3179377 - DNA, 25 bp, Homo sapien
aaatagccatccgaggctctgtcag

SEQ ID NO: 3179378 - DNA, 25 bp, Homo sapien
gggagtccaaatagccatccgaggc

SEQ ID NO: 3179379 - DNA, 25 bp, Homo sapien
tccaaatagccatccgaggctctgt

SEQ ID NO: 3179380 - DNA, 25 bp, Homo sapien
tcttccttacttctccggagacaag

SEQ ID NO: 3179381 - DNA, 25 bp, Homo sapien
ccttacttctccggagacaaggagg

SEQ ID NO: 3179382 - DNA, 25 bp, Homo sapien
cttccttacttctccggagacaagg

SEQ ID NO: 3179383 - DNA, 25 bp, Homo sapien
ttccttacttctccggagacaagga

SEQ ID NO: 3179384 - DNA, 25 bp, Homo sapien
ttcaatgtgcatagccttggcttag

SEQ ID NO: 3179385 - DNA, 25 bp, Homo sapien
taaatgccagcgtggagaagcacaa

SEQ ID NO: 3179386 - DNA, 25 bp, Homo sapien
gaagcacaagtagtatcagcagagt

SEQ ID NO: 3179387 - DNA, 25 bp, Homo sapien
gagttttcatatcacccaaagatag

SEQ ID NO: 3179388 - DNA, 25 bp, Homo sapien
aatgaaacaactgggcctgctcccc

SEQ ID NO: 3179389 - DNA, 25 bp, Homo sapien
gcgaatggatagaaagccaccttgg

SEQ ID NO: 3179390 - DNA, 25 bp, Homo sapien
ggcatctatactccatctctagatg

SEQ ID NO: 3179391 - DNA, 25 bp, Homo sapien
gtcctttgcagcgaatggatagaaa

SEQ ID NO: 3179392 - DNA, 25 bp, Homo sapien
gaaagtcataccactctactctgct

SEQ ID NO: 3179393 - DNA, 25 bp, Homo sapien
cagcagtcagcatagagtatgggaa

SEQ ID NO: 3179394 - DNA, 25 bp, Homo sapien
aaggtgaccttgaatactgtatctg

SEQ ID NO: 3179395 - DNA, 25 bp, Homo sapien
ctgtatctgacaatccttgtttgga

SEQ ID NO: 3179396 - DNA, 25 bp, Homo sapien
ttcacgaaactgaaagccagtgcac

SEQ ID NO: 3179397 - DNA, 25 bp, Homo sapien
ggcggattggcagtaggtcggcgac

SEQ ID NO: 3179398 - DNA, 25 bp, Homo sapien
ttggcagtaggtcggcgactatttg

SEQ ID NO: 3179399 - DNA, 25 bp, Homo sapien
gagaggcggattggcagtaggtcgg

SEQ ID NO: 3179400 - DNA, 25 bp, Homo sapien
agaggagaggcggattggcagtagg

SEQ ID NO: 3179401 - DNA, 25 bp, Homo sapien
ctgcccgagccaccgcttcccagtc

SEQ ID NO: 3179402 - DNA, 25 bp, Homo sapien
tgctctgcccgagccaccgcttccc

SEQ ID NO: 3179403 - DNA, 25 bp, Homo sapien
ctctgcccgagccaccgcttcccag

SEQ ID NO: 3179404 - DNA, 25 bp, Homo sapien
gcccgagccaccgcttcccagtcag

SEQ ID NO: 3179405 - DNA, 25 bp, Homo sapien
gggctccgtgcgcttgttaaggctc

SEQ ID NO: 3179406 - DNA, 25 bp, Homo sapien
gcactcagggatttatgtcttcggg

SEQ ID NO: 3179407 - DNA, 25 bp, Homo sapien
cccgggcactcagggatttatgtct

SEQ ID NO: 3179408 - DNA, 25 bp, Homo sapien
ttgttaaggctcctcccgggcactc

SEQ ID NO: 3179409 - DNA, 25 bp, Homo sapien
gatacacctgtgacatatagtccaa

SEQ ID NO: 3179410 - DNA, 25 bp, Homo sapien
cagtcatacagtggacgagattaca

SEQ ID NO: 3179411 - DNA, 25 bp, Homo sapien
ccaatagggaaatcatgcagaagct

SEQ ID NO: 3179412 - DNA, 25 bp, Homo sapien
ggtaccaattaacagataggctagt

SEQ ID NO: 3179413 - DNA, 25 bp, Homo sapien
ttgttcttcaaagggcaatgaaatg

SEQ ID NO: 3179414 - DNA, 25 bp, Homo sapien
atttcatcaatattagactcccatt

SEQ ID NO: 3179415 - DNA, 25 bp, Homo sapien
tcttcaaagggcaatgaaatggctt

SEQ ID NO: 3179416 - DNA, 25 bp, Homo sapien
aatttcatcaatattagactcccat

SEQ ID NO: 3179417 - DNA, 25 bp, Homo sapien
gggcttatactcaatagatccatgg

SEQ ID NO: 3179418 - DNA, 25 bp, Homo sapien
aatcgaattccaaagggcttatact

SEQ ID NO: 3179419 - DNA, 25 bp, Homo sapien
tactcaatagatccatggagaacta

SEQ ID NO: 3179420 - DNA, 25 bp, Homo sapien
ggagaactaatttggtatatccaaa

SEQ ID NO: 3179421 - DNA, 25 bp, Homo sapien
cataagtgtgacatctaaatcatca

SEQ ID NO: 3179422 - DNA, 25 bp, Homo sapien
taaatcatcagccagtttagccctg

SEQ ID NO: 3179423 - DNA, 25 bp, Homo sapien
tccagacagactgtcagtgtcacat

SEQ ID NO: 3179424 - DNA, 25 bp, Homo sapien
cagagcccaaacacgtgatttcaat

SEQ ID NO: 3179425 - DNA, 25 bp, Homo sapien
atggaagtcatcatcacgtaagtgt

SEQ ID NO: 3179426 - DNA, 25 bp, Homo sapien
tcttttccatccagcggatttgaca

SEQ ID NO: 3179427 - DNA, 25 bp, Homo sapien
catcatcacgtaagtgttcagtgtt

SEQ ID NO: 3179428 - DNA, 25 bp, Homo sapien
ggaagtcatcatcacgtaagtgttc

SEQ ID NO: 3179429 - DNA, 25 bp, Homo sapien
agagtttctggatatcgacaggtgg

SEQ ID NO: 3179430 - DNA, 25 bp, Homo sapien
aaattttggacctatcacactatca

SEQ ID NO: 3179431 - DNA, 25 bp, Homo sapien
caggtggtccaaaagtaagacaact

SEQ ID NO: 3179432 - DNA, 25 bp, Homo sapien
aataatacttggaatggttctggga

SEQ ID NO: 3179433 - DNA, 25 bp, Homo sapien
aggtagtttttctattgcaccagga

SEQ ID NO: 3179434 - DNA, 25 bp, Homo sapien
taatgggcacagtacccaaacaggt

SEQ ID NO: 3179435 - DNA, 25 bp, Homo sapien
cattttgtaacccaagtaatgggca

SEQ ID NO: 3179436 - DNA, 25 bp, Homo sapien
ggcttacttccattcgcatgtcaag

SEQ ID NO: 3179437 - DNA, 25 bp, Homo sapien
cctggacaacacggcaaaaccctat

SEQ ID NO: 3179438 - DNA, 25 bp, Homo sapien
ctatctctactaaaaataccaaagt

SEQ ID NO: 3179439 - DNA, 25 bp, Homo sapien
tagccaggcatggtgacgggtgcct

SEQ ID NO: 3179440 - DNA, 25 bp, Homo sapien
gtaatcccagctattcaggaggctg

SEQ ID NO: 3179441 - DNA, 25 bp, Homo sapien
cataggccattcatgcagaagcagt

SEQ ID NO: 3179442 - DNA, 25 bp, Homo sapien
tgtcttgactaacccatgtggcact

SEQ ID NO: 3179443 - DNA, 25 bp, Homo sapien
ggaagaactgctagctaaccaggca

SEQ ID NO: 3179444 - DNA, 25 bp, Homo sapien
tgaccttagcttgaatcctgcagag

SEQ ID NO: 3179445 - DNA, 25 bp, Homo sapien
cagcagcactaatgacagcagcggt

SEQ ID NO: 3179446 - DNA, 25 bp, Homo sapien
gcttgtctatggaatcaccctggga

SEQ ID NO: 3179447 - DNA, 25 bp, Homo sapien
gcagacaacagtagaagccgcagca

SEQ ID NO: 3179448 - DNA, 25 bp, Homo sapien
tcatgacgggatggaacttacagcc

SEQ ID NO: 3179449 - DNA, 25 bp, Homo sapien
tatcaaaaatgagctcaccatagat

SEQ ID NO: 3179450 - DNA, 25 bp, Homo sapien
tctcattcgtccacttttgctttag

SEQ ID NO: 3179451 - DNA, 25 bp, Homo sapien
taacttgttgtgatctcattcgtcc

SEQ ID NO: 3179452 - DNA, 25 bp, Homo sapien
caaaaatgagctcaccatagatgta

SEQ ID NO: 3179453 - DNA, 25 bp, Homo sapien
ggctctttaaggcttggatgctgtc

SEQ ID NO: 3179454 - DNA, 25 bp, Homo sapien
tctttaaggcttggatgctgtctac

SEQ ID NO: 3179455 - DNA, 25 bp, Homo sapien
ccagattcattagtcctctcgtcac

SEQ ID NO: 3179456 - DNA, 25 bp, Homo sapien
cattagtcctctcgtcacacttcat

SEQ ID NO: 3179457 - DNA, 25 bp, Homo sapien
cttgcactgtgaaagccaactttgc

SEQ ID NO: 3179458 - DNA, 25 bp, Homo sapien
aggcttgcactgtgaaagccaactt

SEQ ID NO: 3179459 - DNA, 25 bp, Homo sapien
aaaggcttgcactgtgaaagccaac

SEQ ID NO: 3179460 - DNA, 25 bp, Homo sapien
tcaaaggcttgcactgtgaaagcca

SEQ ID NO: 3179461 - DNA, 25 bp, Homo sapien
tgaatattggcaaccgggagaccag

SEQ ID NO: 3179462 - DNA, 25 bp, Homo sapien
gaatatgctcctccgtttacctgtg

SEQ ID NO: 3179463 - DNA, 25 bp, Homo sapien
gagattgtaaagagcttcctgcccg

SEQ ID NO: 3179464 - DNA, 25 bp, Homo sapien
gaacaggatggcgaagctcttacta

SEQ ID NO: 3179465 - DNA, 25 bp, Homo sapien
tgtccccagcattgtttcaccattt

SEQ ID NO: 3179466 - DNA, 25 bp, Homo sapien
cactatctgctggtaggttactctc

SEQ ID NO: 3179467 - DNA, 25 bp, Homo sapien
cacacttgtagcaggtagttcagca

SEQ ID NO: 3179468 - DNA, 25 bp, Homo sapien
tgattagcagcagaggtttccggta

SEQ ID NO: 3179469 - DNA, 25 bp, Homo sapien
aatatgatgatcaccagaagtaggt

SEQ ID NO: 3179470 - DNA, 25 bp, Homo sapien
tgaatctgaaataggatggatccct

SEQ ID NO: 3179471 - DNA, 25 bp, Homo sapien
ccgctattgctttatgttgctcata

SEQ ID NO: 3179472 - DNA, 25 bp, Homo sapien
gcaggatttgcttcatatccatgtg

SEQ ID NO: 3179473 - DNA, 25 bp, Homo sapien
tggtttccattcatgagatggaata

SEQ ID NO: 3179474 - DNA, 25 bp, Homo sapien
taattcatatcatttgttatacaaa

SEQ ID NO: 3179475 - DNA, 25 bp, Homo sapien
tccattcatgagatggaataagaaa

SEQ ID NO: 3179476 - DNA, 25 bp, Homo sapien
aatgtggtttccattcatgagatgg

SEQ ID NO: 3179477 - DNA, 25 bp, Homo sapien
agaggctgcttcttagttatggata

SEQ ID NO: 3179478 - DNA, 25 bp, Homo sapien
cttagttatggataacataagtgag

SEQ ID NO: 3179479 - DNA, 25 bp, Homo sapien
taaacaccgtaactaagaggctgct

SEQ ID NO: 3179480 - DNA, 25 bp, Homo sapien
ttttcagcataacacaattgatgta

SEQ ID NO: 3179481 - DNA, 25 bp, Homo sapien
tgtcagaggcagagttgaaacctgt

SEQ ID NO: 3179482 - DNA, 25 bp, Homo sapien
ctccagcttccaaagataggttttt

SEQ ID NO: 3179483 - DNA, 25 bp, Homo sapien
tccaaagttgcacagttagttaatg

SEQ ID NO: 3179484 - DNA, 25 bp, Homo sapien
tctgtagccatattacagtaatgga

SEQ ID NO: 3179485 - DNA, 25 bp, Homo sapien
ggatcgcagtctcctctctataaat

SEQ ID NO: 3179486 - DNA, 25 bp, Homo sapien
cagtgccttctgacgaggatcgcag

SEQ ID NO: 3179487 - DNA, 25 bp, Homo sapien
gaaatggactgagactactggcaag

SEQ ID NO: 3179488 - DNA, 25 bp, Homo sapien
gaagatgaagaacctgctctttgct

SEQ ID NO: 3179489 - DNA, 25 bp, Homo sapien
tttattagaggcagacatatgtata

SEQ ID NO: 3179490 - DNA, 25 bp, Homo sapien
gactaagagtggtactggagtaagt

SEQ ID NO: 3179491 - DNA, 25 bp, Homo sapien
tctacagggactaagagtggtactg

SEQ ID NO: 3179492 - DNA, 25 bp, Homo sapien
ggtactggagtaagtgtgatttaca

SEQ ID NO: 3179493 - DNA, 25 bp, Homo sapien
cgaggatagggtctacagggactaa

SEQ ID NO: 3179494 - DNA, 25 bp, Homo sapien
aaagaccaggacagtgtgaagcaca

SEQ ID NO: 3179495 - DNA, 25 bp, Homo sapien
cacaaagaccaggacagtgtgaagc

SEQ ID NO: 3179496 - DNA, 25 bp, Homo sapien
caaagtcagggcccattaaatgact

SEQ ID NO: 3179497 - DNA, 25 bp, Homo sapien
tcaaccacaaagaccaggacagtgt

SEQ ID NO: 3179498 - DNA, 25 bp, Homo sapien
tttactgaaggtcaattctgtgctg

SEQ ID NO: 3179499 - DNA, 25 bp, Homo sapien
ttctgtgctgcaaattgtgaagcat

SEQ ID NO: 3179500 - DNA, 25 bp, Homo sapien
gactgtcacctcagaacaggtagtt

SEQ ID NO: 3179501 - DNA, 25 bp, Homo sapien
gatggtcagagatctgtcgcagacc

SEQ ID NO: 3179502 - DNA, 25 bp, Homo sapien
gaagaaatgcattggactcacttta

SEQ ID NO: 3179503 - DNA, 25 bp, Homo sapien
tcttggaagacataatgcccagttt

SEQ ID NO: 3179504 - DNA, 25 bp, Homo sapien
cagtttctggctcatggtagtccac

SEQ ID NO: 3179505 - DNA, 25 bp, Homo sapien
tccacaacgttcactgaagaaatgc

SEQ ID NO: 3179506 - DNA, 25 bp, Homo sapien
tcccggttacaactgtgtaggcaag

SEQ ID NO: 3179507 - DNA, 25 bp, Homo sapien
tgtcttgtcttgaaccactcccggt

SEQ ID NO: 3179508 - DNA, 25 bp, Homo sapien
gagcaccctatgtaaaaggcatggc

SEQ ID NO: 3179509 - DNA, 25 bp, Homo sapien
tcaccaggaatgagataaattgaca

SEQ ID NO: 3179510 - DNA, 25 bp, Homo sapien
gttctcacccattctcagttcaaca

SEQ ID NO: 3179511 - DNA, 25 bp, Homo sapien
cttgttctcacccattctcagttca

SEQ ID NO: 3179512 - DNA, 25 bp, Homo sapien
tcagttcaacattatctttcttgga

SEQ ID NO: 3179513 - DNA, 25 bp, Homo sapien
acccattctcagttcaacattatct

SEQ ID NO: 3179514 - DNA, 25 bp, Homo sapien
tccaacttgagatttctccatagaa

SEQ ID NO: 3179515 - DNA, 25 bp, Homo sapien
ctccatagaaatcttgcatgctttg

SEQ ID NO: 3179516 - DNA, 25 bp, Homo sapien
tcatttcttcaagtgtatggtatca

SEQ ID NO: 3179517 - DNA, 25 bp, Homo sapien
tgttacagcttctcatggcttcata

SEQ ID NO: 3179518 - DNA, 25 bp, Homo sapien
ttaatgagatagactagaagaatca

SEQ ID NO: 3179519 - DNA, 25 bp, Homo sapien
tggcactgagggattaaagaaagct

SEQ ID NO: 3179520 - DNA, 25 bp, Homo sapien
gaaacaaggagagtaatatggcact

SEQ ID NO: 3179521 - DNA, 25 bp, Homo sapien
gagtcttatccagaagtcttcagtc

SEQ ID NO: 3179522 - DNA, 25 bp, Homo sapien
tacttagaagttctagaaagctacc

SEQ ID NO: 3179523 - DNA, 25 bp, Homo sapien
atggactccatagcatacttagaag

SEQ ID NO: 3179524 - DNA, 25 bp, Homo sapien
gattgacatcttcacggaaactgca

SEQ ID NO: 3179525 - DNA, 25 bp, Homo sapien
aaaacatactcctctatgtgggaag

SEQ ID NO: 3179526 - DNA, 25 bp, Homo sapien
gttatctgacgcgagggaaaattta

SEQ ID NO: 3179527 - DNA, 25 bp, Homo sapien
attgttatctgacgcgagggaaaat

SEQ ID NO: 3179528 - DNA, 25 bp, Homo sapien
tatctgacgcgagggaaaatttatt

SEQ ID NO: 3179529 - DNA, 25 bp, Homo sapien
tgttatctgacgcgagggaaaattt

SEQ ID NO: 3179530 - DNA, 25 bp, Homo sapien
agttcctctgttcttgctacattca

SEQ ID NO: 3179531 - DNA, 25 bp, Homo sapien
ctgggtgccatcagtgcccaactct

SEQ ID NO: 3179532 - DNA, 25 bp, Homo sapien
tcataggaggcacatgctttagcat

SEQ ID NO: 3179533 - DNA, 25 bp, Homo sapien
tcactgaacaatccttgctcatagg

SEQ ID NO: 3179534 - DNA, 25 bp, Homo sapien
gggtaaagttgatcgtattattcat

SEQ ID NO: 3179535 - DNA, 25 bp, Homo sapien
gagggtaaagttgatcgtattattc

SEQ ID NO: 3179536 - DNA, 25 bp, Homo sapien
taaagtgagggtaaagttgatcgta

SEQ ID NO: 3179537 - DNA, 25 bp, Homo sapien
ttgctgtaaagtgagggtaaagttg

SEQ ID NO: 3179538 - DNA, 25 bp, Homo sapien
cttacaattaattacatttgccttt

SEQ ID NO: 3179539 - DNA, 25 bp, Homo sapien
cgatcaggtgctgccaagatataca

SEQ ID NO: 3179540 - DNA, 25 bp, Homo sapien
cttacgatcaggtgctgccaagata

SEQ ID NO: 3179541 - DNA, 25 bp, Homo sapien
gatcaggtgctgccaagatatacat

SEQ ID NO: 3179542 - DNA, 25 bp, Homo sapien
tacgatcaggtgctgccaagatata

SEQ ID NO: 3179543 - DNA, 25 bp, Homo sapien
agttcacaagatcccaaattattca

SEQ ID NO: 3179544 - DNA, 25 bp, Homo sapien
aaaattcaagatcaagcattagatc

SEQ ID NO: 3179545 - DNA, 25 bp, Homo sapien
catccagttcacaagatcccaaatt

SEQ ID NO: 3179546 - DNA, 25 bp, Homo sapien
gatcaagcattagatcatcttcatc

SEQ ID NO: 3179547 - DNA, 25 bp, Homo sapien
gtggcggtgatccaattccttcaaa

SEQ ID NO: 3179548 - DNA, 25 bp, Homo sapien
tgtggcggtgatccaattccttcaa

SEQ ID NO: 3179549 - DNA, 25 bp, Homo sapien
agcctgtggcggtgatccaattcct

SEQ ID NO: 3179550 - DNA, 25 bp, Homo sapien
cctgtggcggtgatccaattccttc

SEQ ID NO: 3179551 - DNA, 25 bp, Homo sapien
ccaagcagccagtgaccagaactga

SEQ ID NO: 3179552 - DNA, 25 bp, Homo sapien
gccagtgaccagaactgagaacttg

SEQ ID NO: 3179553 - DNA, 25 bp, Homo sapien
ggaccacgagcctcccattgagaaa

SEQ ID NO: 3179554 - DNA, 25 bp, Homo sapien
agcactgagtctattttccaagcag

SEQ ID NO: 3179555 - DNA, 25 bp, Homo sapien
ttaatctacgagggtcatatatttc

SEQ ID NO: 3179556 - DNA, 25 bp, Homo sapien
gtttaatctacgagggtcatatatt

SEQ ID NO: 3179557 - DNA, 25 bp, Homo sapien
aatctacgagggtcatatatttcca

SEQ ID NO: 3179558 - DNA, 25 bp, Homo sapien
tctacgagggtcatatatttccagg

SEQ ID NO: 3179559 - DNA, 25 bp, Homo sapien
tcgcacagctatccttatatctaag

SEQ ID NO: 3179560 - DNA, 25 bp, Homo sapien
tccttatatctaagtagtcttttgc

SEQ ID NO: 3179561 - DNA, 25 bp, Homo sapien
attaggaaagcctttcgcacagcta

SEQ ID NO: 3179562 - DNA, 25 bp, Homo sapien
gaaagcctttcgcacagctatcctt

SEQ ID NO: 3179563 - DNA, 25 bp, Homo sapien
tgtaatgttacccaaagtcgcctgc

SEQ ID NO: 3179564 - DNA, 25 bp, Homo sapien
aagatgcttctgtaatgttacccaa

SEQ ID NO: 3179565 - DNA, 25 bp, Homo sapien
tatccatttgagacacagcctgaag

SEQ ID NO: 3179566 - DNA, 25 bp, Homo sapien
ctaaaccttatcccgaatatccatt

SEQ ID NO: 3179567 - DNA, 25 bp, Homo sapien
tatgacatcacagtaactgcagtat

SEQ ID NO: 3179568 - DNA, 25 bp, Homo sapien
taactgcagtattgtcatttaccat

SEQ ID NO: 3179569 - DNA, 25 bp, Homo sapien
gccatcatagaatatgacatcacag

SEQ ID NO: 3179570 - DNA, 25 bp, Homo sapien
ctgccatcatagaatatgacatcac

SEQ ID NO: 3179571 - DNA, 25 bp, Homo sapien
tgagacgacagagtgatatgagtcc

SEQ ID NO: 3179572 - DNA, 25 bp, Homo sapien
gagtgatatgagtcctcccggcaaa

SEQ ID NO: 3179573 - DNA, 25 bp, Homo sapien
ctgcggcacatgagacgacagagtg

SEQ ID NO: 3179574 - DNA, 25 bp, Homo sapien
gacagagtgatatgagtcctcccgg

SEQ ID NO: 3179575 - DNA, 25 bp, Homo sapien
cattggttccataggagtaagaact

SEQ ID NO: 3179576 - DNA, 25 bp, Homo sapien
tatcattggttccataggagtaaga

SEQ ID NO: 3179577 - DNA, 25 bp, Homo sapien
atttctatcattggttccataggag

SEQ ID NO: 3179578 - DNA, 25 bp, Homo sapien
ttctatcattggttccataggagta

SEQ ID NO: 3179579 - DNA, 25 bp, Homo sapien
tcagttatctaattgattttacaag

SEQ ID NO: 3179580 - DNA, 25 bp, Homo sapien
gttatctaattgattttacaaggcc

SEQ ID NO: 3179581 - DNA, 25 bp, Homo sapien
taattgattttacaaggccttgaaa

SEQ ID NO: 3179582 - DNA, 25 bp, Homo sapien
tctaattgattttacaaggccttga

SEQ ID NO: 3179583 - DNA, 25 bp, Homo sapien
gagcttattatctagtaaaaagaca

SEQ ID NO: 3179584 - DNA, 25 bp, Homo sapien
gaaaaatggtaggtacatcaagata

SEQ ID NO: 3179585 - DNA, 25 bp, Homo sapien
ggtggtcagcccaaaatccttggca

SEQ ID NO: 3179586 - DNA, 25 bp, Homo sapien
caagatatatcttccgccttactcc

SEQ ID NO: 3179587 - DNA, 25 bp, Homo sapien
tggagatcagctagtaatattattc

SEQ ID NO: 3179588 - DNA, 25 bp, Homo sapien
tgcagagtgccaaaaacaaagcaga

SEQ ID NO: 3179589 - DNA, 25 bp, Homo sapien
aaggaaaattggagatcagctagta

SEQ ID NO: 3179590 - DNA, 25 bp, Homo sapien
tttcaacacaaaacccctagcacta

SEQ ID NO: 3179591 - DNA, 25 bp, Homo sapien
tggacagagtgagtggtgaaggcat

SEQ ID NO: 3179592 - DNA, 25 bp, Homo sapien
ctggacagagtgagtggtgaaggca

SEQ ID NO: 3179593 - DNA, 25 bp, Homo sapien
agtgattgactgttcctccgcagcc

SEQ ID NO: 3179594 - DNA, 25 bp, Homo sapien
gcagcccatgggttgtgcgttatgt

SEQ ID NO: 3179595 - DNA, 25 bp, Homo sapien
tggtcctccagagggtaggacctag

SEQ ID NO: 3179596 - DNA, 25 bp, Homo sapien
gacctagggccatttgagcagcgat

SEQ ID NO: 3179597 - DNA, 25 bp, Homo sapien
ctctggtacactggtgttaatgacc

SEQ ID NO: 3179598 - DNA, 25 bp, Homo sapien
tacttgaggtcatataccatttctc

SEQ ID NO: 3179599 - DNA, 25 bp, Homo sapien
ttaatacttgaggtcatataccatt

SEQ ID NO: 3179600 - DNA, 25 bp, Homo sapien
gaggtcatataccatttctctatgc

SEQ ID NO: 3179601 - DNA, 25 bp, Homo sapien
tgatagtctcctagccagactaata

SEQ ID NO: 3179602 - DNA, 25 bp, Homo sapien
gcaccatagtagaacccagaaaagg

SEQ ID NO: 3179603 - DNA, 25 bp, Homo sapien
tctttgtggttaagccatcccctct

SEQ ID NO: 3179604 - DNA, 25 bp, Homo sapien
tgttgcccagtttgccgaccttgtc

SEQ ID NO: 3179605 - DNA, 25 bp, Homo sapien
tctgtgaccacatatctacggaaaa

SEQ ID NO: 3179606 - DNA, 25 bp, Homo sapien
gtaacatcagatcacaccaaccgct

SEQ ID NO: 3179607 - DNA, 25 bp, Homo sapien
tcccacgattctctcaaatggcagc

SEQ ID NO: 3179608 - DNA, 25 bp, Homo sapien
gattattctgcctcctacctctgta

SEQ ID NO: 3179609 - DNA, 25 bp, Homo sapien
tccttgcacttgtaggcagcataga

SEQ ID NO: 3179610 - DNA, 25 bp, Homo sapien
tattatatcagaggtgcactgggat

SEQ ID NO: 3179611 - DNA, 25 bp, Homo sapien
cattatagcaaaagtctaatgagcc

SEQ ID NO: 3179612 - DNA, 25 bp, Homo sapien
taaaaaagccttttgatcgctattc

SEQ ID NO: 3179613 - DNA, 25 bp, Homo sapien
atgtattcctgccaagacttgtata

SEQ ID NO: 3179614 - DNA, 25 bp, Homo sapien
tcaattggccatctcaactctaagg

SEQ ID NO: 3179615 - DNA, 25 bp, Homo sapien
tttgcttcacccaccatgtagttag

SEQ ID NO: 3179616 - DNA, 25 bp, Homo sapien
cattgtacctaaaaggcaggtgtcc

SEQ ID NO: 3179617 - DNA, 25 bp, Homo sapien
tgtgtgacaccaagtagcctataaa

SEQ ID NO: 3179618 - DNA, 25 bp, Homo sapien
aggcagccagatttcatcaaatctc

SEQ ID NO: 3179619 - DNA, 25 bp, Homo sapien
tcaatgcaagtgtataaaggccaag

SEQ ID NO: 3179620 - DNA, 25 bp, Homo sapien
gctgggactacaatggccggctatt

SEQ ID NO: 3179621 - DNA, 25 bp, Homo sapien
cagcccttttcagagtcagccgaag

SEQ ID NO: 3179622 - DNA, 25 bp, Homo sapien
tccagactgagtattgacaggacaa

SEQ ID NO: 3179623 - DNA, 25 bp, Homo sapien
tattctctaaaagtgcaccaaggga

SEQ ID NO: 3179624 - DNA, 25 bp, Homo sapien
gactgggcattttggagccaaccgg

SEQ ID NO: 3179625 - DNA, 25 bp, Homo sapien
aacaaagtgctattaagggcccctg

SEQ ID NO: 3179626 - DNA, 25 bp, Homo sapien
ttgtcaaactgcacaaaaggccaac

SEQ ID NO: 3179627 - DNA, 25 bp, Homo sapien
cagctatgaatgaaattactctcca

SEQ ID NO: 3179628 - DNA, 25 bp, Homo sapien
gaactataaatgactttagccatct

SEQ ID NO: 3179629 - DNA, 25 bp, Homo sapien
caaccacggaattaactgagtggga

SEQ ID NO: 3179630 - DNA, 25 bp, Homo sapien
ccttgcaggtagtcattattagata

SEQ ID NO: 3179631 - DNA, 25 bp, Homo sapien
caatctggccactttgtaatgtaga

SEQ ID NO: 3179632 - DNA, 25 bp, Homo sapien
tctctgaaagagactgcaccttctg

SEQ ID NO: 3179633 - DNA, 25 bp, Homo sapien
taatgtagatattccagtgatctga

SEQ ID NO: 3179634 - DNA, 25 bp, Homo sapien
cgtacctggccaatcttctttattt

SEQ ID NO: 3179635 - DNA, 25 bp, Homo sapien
tagtgttccaataaacatacacgtt

SEQ ID NO: 3179636 - DNA, 25 bp, Homo sapien
atttagactcccatcaatagagtaa

SEQ ID NO: 3179637 - DNA, 25 bp, Homo sapien
caatcaggcaaacgaaggaaattgt

SEQ ID NO: 3179638 - DNA, 25 bp, Homo sapien
tcaatagagtaaaagtgcttctatt

SEQ ID NO: 3179639 - DNA, 25 bp, Homo sapien
tttatgcagccatacatgtgccatg

SEQ ID NO: 3179640 - DNA, 25 bp, Homo sapien
cctcttcctgtgttaatgtgctgag

SEQ ID NO: 3179641 - DNA, 25 bp, Homo sapien
gacagacccccgtgtgtaatgtttc

SEQ ID NO: 3179642 - DNA, 25 bp, Homo sapien
ttatggcagcgtggcattccgtggt

SEQ ID NO: 3179643 - DNA, 25 bp, Homo sapien
tcactagtacatcaccaagggtttt

SEQ ID NO: 3179644 - DNA, 25 bp, Homo sapien
ttattctaattcaactgtcactagt

SEQ ID NO: 3179645 - DNA, 25 bp, Homo sapien
actgtcactagtacatcaccaaggg

SEQ ID NO: 3179646 - DNA, 25 bp, Homo sapien
gtacatcaccaagggttttaagctg

SEQ ID NO: 3179647 - DNA, 25 bp, Homo sapien
gatgcccctgggctatctcagagta

SEQ ID NO: 3179648 - DNA, 25 bp, Homo sapien
tataataacaactaggactctcccc

SEQ ID NO: 3179649 - DNA, 25 bp, Homo sapien
cacgtcaagtgtgggactgtaccat

SEQ ID NO: 3179650 - DNA, 25 bp, Homo sapien
cataagattataaacgagctgcctc

SEQ ID NO: 3179651 - DNA, 25 bp, Homo sapien
atgtttaagacaagaagattgggca

SEQ ID NO: 3179652 - DNA, 25 bp, Homo sapien
tgtttaagacaagaagattgggcat

SEQ ID NO: 3179653 - DNA, 25 bp, Homo sapien
tgtagtacaaggttcttccagtgcc

SEQ ID NO: 3179654 - DNA, 25 bp, Homo sapien
catgcccctttgtgatctctgagtt

SEQ ID NO: 3179655 - DNA, 25 bp, Homo sapien
ccgttgggtgtattcctgtcatgcc

SEQ ID NO: 3179656 - DNA, 25 bp, Homo sapien
tccagtgcctgtgtaccgttgggtg

SEQ ID NO: 3179657 - DNA, 25 bp, Homo sapien
ccattaatgtcatgagtatttttct

SEQ ID NO: 3179658 - DNA, 25 bp, Homo sapien
gccattaatgtcatgagtatttttc

SEQ ID NO: 3179659 - DNA, 25 bp, Homo sapien
atgtcatgagtatttttctctccca

SEQ ID NO: 3179660 - DNA, 25 bp, Homo sapien
ttaatgtcatgagtatttttctctc

SEQ ID NO: 3179661 - DNA, 25 bp, Homo sapien
aggtaggagggcttcaggaaaacat

SEQ ID NO: 3179662 - DNA, 25 bp, Homo sapien
gacattgttggctgcctacccacta

SEQ ID NO: 3179663 - DNA, 25 bp, Homo sapien
aaggctggttctcctatgactcaga

SEQ ID NO: 3179664 - DNA, 25 bp, Homo sapien
tgttcaaggtctattaaaaatggta

SEQ ID NO: 3179665 - DNA, 25 bp, Homo sapien
tgtagaggccaatccgcagatggac

SEQ ID NO: 3179666 - DNA, 25 bp, Homo sapien
gcattcggctgatgtgggaacacct

SEQ ID NO: 3179667 - DNA, 25 bp, Homo sapien
taataacgtcttgactgccgtgcag

SEQ ID NO: 3179668 - DNA, 25 bp, Homo sapien
cagatggactgttgggcattcggct

SEQ ID NO: 3179669 - DNA, 25 bp, Homo sapien
aggacattaatcttagaggaaacca

SEQ ID NO: 3179670 - DNA, 25 bp, Homo sapien
gaaggacattaatcttagaggaaac

SEQ ID NO: 3179671 - DNA, 25 bp, Homo sapien
gacattaatcttagaggaaaccatt

SEQ ID NO: 3179672 - DNA, 25 bp, Homo sapien
cattaatcttagaggaaaccattac

SEQ ID NO: 3179673 - DNA, 25 bp, Homo sapien
tcttaatgtcggatttagcccatcg

SEQ ID NO: 3179674 - DNA, 25 bp, Homo sapien
gctgacgactcaagtattccttgga

SEQ ID NO: 3179675 - DNA, 25 bp, Homo sapien
aaacccatcagaagcgctgacgact

SEQ ID NO: 3179676 - DNA, 25 bp, Homo sapien
tgcagggtgccgtctgctgtatacc

SEQ ID NO: 3179677 - DNA, 25 bp, Homo sapien
cagttcttggtgatggctctcttcc

SEQ ID NO: 3179678 - DNA, 25 bp, Homo sapien
cagattcagttcttggtgatggctc

SEQ ID NO: 3179679 - DNA, 25 bp, Homo sapien
tgaaggggctggcagattcagttct

SEQ ID NO: 3179680 - DNA, 25 bp, Homo sapien
gattcagttcttggtgatggctctc

SEQ ID NO: 3179681 - DNA, 25 bp, Homo sapien
gctagaaaagatacagacagttttc

SEQ ID NO: 3179682 - DNA, 25 bp, Homo sapien
agttttccaataacagaagccacag

SEQ ID NO: 3179683 - DNA, 25 bp, Homo sapien
ttactgtgactactatacctagaaa

SEQ ID NO: 3179684 - DNA, 25 bp, Homo sapien
atttactgtgactactatacctaga

SEQ ID NO: 3179685 - DNA, 25 bp, Homo sapien
ttaaatataaatggactaaattctg

SEQ ID NO: 3179686 - DNA, 25 bp, Homo sapien
tataaatggactaaattctgcaatt

SEQ ID NO: 3179687 - DNA, 25 bp, Homo sapien
taaatataaatggactaaattctgc

SEQ ID NO: 3179688 - DNA, 25 bp, Homo sapien
aatataaatggactaaattctgcaa

SEQ ID NO: 3179689 - DNA, 25 bp, Homo sapien
acctcatccgcacaagtgacacttt

SEQ ID NO: 3179690 - DNA, 25 bp, Homo sapien
gcacaagtgacactttactgagttt

SEQ ID NO: 3179691 - DNA, 25 bp, Homo sapien
caagtgacactttactgagttttaa

SEQ ID NO: 3179692 - DNA, 25 bp, Homo sapien
catccgcacaagtgacactttactg

SEQ ID NO: 3179693 - DNA, 25 bp, Homo sapien
gtagataatccaactctaacttgta

SEQ ID NO: 3179694 - DNA, 25 bp, Homo sapien
cgactagtctcaccctgccaatgaa

SEQ ID NO: 3179695 - DNA, 25 bp, Homo sapien
cctctcttcgtaatgtagataatcc

SEQ ID NO: 3179696 - DNA, 25 bp, Homo sapien
gtctagttttacaatcactttcctc

SEQ ID NO: 3179697 - DNA, 25 bp, Homo sapien
gacgtggtactgcttgctggactca

SEQ ID NO: 3179698 - DNA, 25 bp, Homo sapien
taagaggactaacaggaagtgacgt

SEQ ID NO: 3179699 - DNA, 25 bp, Homo sapien
aggaagtgacgtggtactgcttgct

SEQ ID NO: 3179700 - DNA, 25 bp, Homo sapien
ggctcttcagtaagaggactaacag

SEQ ID NO: 3179701 - DNA, 25 bp, Homo sapien
cctttggctcttctataatgatgca

SEQ ID NO: 3179702 - DNA, 25 bp, Homo sapien
gcagtggcatgtgtcagaccatatg

SEQ ID NO: 3179703 - DNA, 25 bp, Homo sapien
tgtgtacagttgatataatgctgaa

SEQ ID NO: 3179704 - DNA, 25 bp, Homo sapien
tgcaaaattggttatcctttggctc

SEQ ID NO: 3179705 - DNA, 25 bp, Homo sapien
gagaagcttggagtttctttagact

SEQ ID NO: 3179706 - DNA, 25 bp, Homo sapien
tgccctggctgatttaaggagagaa

SEQ ID NO: 3179707 - DNA, 25 bp, Homo sapien
gcttggagtttctttagactaaaga

SEQ ID NO: 3179708 - DNA, 25 bp, Homo sapien
gaagcttggagtttctttagactaa

SEQ ID NO: 3179709 - DNA, 25 bp, Homo sapien
aattaatatattgccgacactggca

SEQ ID NO: 3179710 - DNA, 25 bp, Homo sapien
cactggcatatggatagttgaataa

SEQ ID NO: 3179711 - DNA, 25 bp, Homo sapien
ttgaaattaatatattgccgacact

SEQ ID NO: 3179712 - DNA, 25 bp, Homo sapien
atatattgccgacactggcatatgg

SEQ ID NO: 3179713 - DNA, 25 bp, Homo sapien
ggccagagcaattacctcgtttagt

SEQ ID NO: 3179714 - DNA, 25 bp, Homo sapien
ttctatggaatcaagccggaaggct

SEQ ID NO: 3179715 - DNA, 25 bp, Homo sapien
gtttagttcagtatgtgcaacctgg

SEQ ID NO: 3179716 - DNA, 25 bp, Homo sapien
ccaagtttgaatgatacacagggtg

SEQ ID NO: 3179717 - DNA, 25 bp, Homo sapien
caatcttcaattgatgttagtcagg

SEQ ID NO: 3179718 - DNA, 25 bp, Homo sapien
gtggatcatctaggcctcctgaacc

SEQ ID NO: 3179719 - DNA, 25 bp, Homo sapien
ccccaatcttcaattgatgttagtc

SEQ ID NO: 3179720 - DNA, 25 bp, Homo sapien
acttttgaataagtcatggtggatc

SEQ ID NO: 3179721 - DNA, 25 bp, Homo sapien
gtattcttggagcaaggaggcctcc

SEQ ID NO: 3179722 - DNA, 25 bp, Homo sapien
ccaggattccacagatacagtacaa

SEQ ID NO: 3179723 - DNA, 25 bp, Homo sapien
gaagattacacactcagttccatgg

SEQ ID NO: 3179724 - DNA, 25 bp, Homo sapien
catgtcgagttgtgatccccagtgc

SEQ ID NO: 3179725 - DNA, 25 bp, Homo sapien
tcatcaaagtgtgcgggattcccta

SEQ ID NO: 3179726 - DNA, 25 bp, Homo sapien
taccgtaagaacctgatgggatccc

SEQ ID NO: 3179727 - DNA, 25 bp, Homo sapien
taagtgggcctgtatccctgggctg

SEQ ID NO: 3179728 - DNA, 25 bp, Homo sapien
aattacagctggtcttaagtgggcc

SEQ ID NO: 3179729 - DNA, 25 bp, Homo sapien
tgtaaatatgattcctgttcttcca

SEQ ID NO: 3179730 - DNA, 25 bp, Homo sapien
tcaatgtaaatatgattcctgttct

SEQ ID NO: 3179731 - DNA, 25 bp, Homo sapien
tatccagctgcacaacatctagcat

SEQ ID NO: 3179732 - DNA, 25 bp, Homo sapien
attgccacttgaactttatccagct

SEQ ID NO: 3179733 - DNA, 25 bp, Homo sapien
taaacactggtatcagggattctgc

SEQ ID NO: 3179734 - DNA, 25 bp, Homo sapien
cttaaacactggtatcagggattct

SEQ ID NO: 3179735 - DNA, 25 bp, Homo sapien
ttaaacactggtatcagggattctg

SEQ ID NO: 3179736 - DNA, 25 bp, Homo sapien
cctgaagttgggaaatgagttcatc

SEQ ID NO: 3179737 - DNA, 25 bp, Homo sapien
ctgaagttgggaaatgagttcatcc

SEQ ID NO: 3179738 - DNA, 25 bp, Homo sapien
aattcttgaatcaccaattacatac

SEQ ID NO: 3179739 - DNA, 25 bp, Homo sapien
aaaattcttgaatcaccaattacat

SEQ ID NO: 3179740 - DNA, 25 bp, Homo sapien
cttgaatcaccaattacatacttct

SEQ ID NO: 3179741 - DNA, 25 bp, Homo sapien
ttcttgaatcaccaattacatactt

SEQ ID NO: 3179742 - DNA, 25 bp, Homo sapien
caaaattttccgtggatgcaagggg

SEQ ID NO: 3179743 - DNA, 25 bp, Homo sapien
gtttgtattggcctacatgattggc

SEQ ID NO: 3179744 - DNA, 25 bp, Homo sapien
ggcctacatgattggcatttcttat

SEQ ID NO: 3179745 - DNA, 25 bp, Homo sapien
tgcaaggggtttgtattggcctaca

SEQ ID NO: 3179746 - DNA, 25 bp, Homo sapien
aggatactgtcacattcacactcta

SEQ ID NO: 3179747 - DNA, 25 bp, Homo sapien
tctgtcttacagagctgactaggag

SEQ ID NO: 3179748 - DNA, 25 bp, Homo sapien
gagtaattactgctgagataagcct

SEQ ID NO: 3179749 - DNA, 25 bp, Homo sapien
tgtcacattcacactctacatctgt

SEQ ID NO: 3179750 - DNA, 25 bp, Homo sapien
tcagtcttcagcaaaggtagtgtag

SEQ ID NO: 3179751 - DNA, 25 bp, Homo sapien
taatggcatctcttcgcatatcaca

SEQ ID NO: 3179752 - DNA, 25 bp, Homo sapien
gtagtgtagaaccacactgacgcat

SEQ ID NO: 3179753 - DNA, 25 bp, Homo sapien
ggcatctcttcgcatatcacacata

SEQ ID NO: 3179754 - DNA, 25 bp, Homo sapien
gaacacttgatgaagtccaccagag

SEQ ID NO: 3179755 - DNA, 25 bp, Homo sapien
gcaacatctgatttagatcattctc

SEQ ID NO: 3179756 - DNA, 25 bp, Homo sapien
gggatgaacacttgatgaagtccac

SEQ ID NO: 3179757 - DNA, 25 bp, Homo sapien
caaagttaggggatgaacacttgat

SEQ ID NO: 3179758 - DNA, 25 bp, Homo sapien
aaatctagagtaaaaccaagctggc

SEQ ID NO: 3179759 - DNA, 25 bp, Homo sapien
gaaggaaagaacttgcatgttggtg

SEQ ID NO: 3179760 - DNA, 25 bp, Homo sapien
ggaaagaacttgcatgttggtgaag

SEQ ID NO: 3179761 - DNA, 25 bp, Homo sapien
aagaacttgcatgttggtgaaggaa

SEQ ID NO: 3179762 - DNA, 25 bp, Homo sapien
tactgacaacgaaggccgcgcctgc

SEQ ID NO: 3179763 - DNA, 25 bp, Homo sapien
catcaaagaactactgacaacgaag

SEQ ID NO: 3179764 - DNA, 25 bp, Homo sapien
tgcaaagaggttggatcaagtttaa

SEQ ID NO: 3179765 - DNA, 25 bp, Homo sapien
cactcttcccatagattgtcaaggg

SEQ ID NO: 3179766 - DNA, 25 bp, Homo sapien
tacttggctgaatggtactgaaggc

SEQ ID NO: 3179767 - DNA, 25 bp, Homo sapien
tatcgacttgcagtagactagtccc

SEQ ID NO: 3179768 - DNA, 25 bp, Homo sapien
tcatcacatggtaggaggtatcaca

SEQ ID NO: 3179769 - DNA, 25 bp, Homo sapien
tgtgcattgaccttcgctcttcttt

SEQ ID NO: 3179770 - DNA, 25 bp, Homo sapien
cttcgctcttcttttgaatcggcag

SEQ ID NO: 3179771 - DNA, 25 bp, Homo sapien
cttttgaatcggcagtatggctcat

SEQ ID NO: 3179772 - DNA, 25 bp, Homo sapien
tcctgtgcattgaccttcgctcttc

SEQ ID NO: 3179773 - DNA, 25 bp, Homo sapien
ggaatttggctaggaacaaagatca

SEQ ID NO: 3179774 - DNA, 25 bp, Homo sapien
tatatgtgcacaacttaaccaggcc

SEQ ID NO: 3179775 - DNA, 25 bp, Homo sapien
gacagagctgaataacgcaaaacaa

SEQ ID NO: 3179776 - DNA, 25 bp, Homo sapien
gaacctaataggtctgacagagctg

SEQ ID NO: 3179777 - DNA, 25 bp, Homo sapien
agctagtgtgcgtggctctctcgga

SEQ ID NO: 3179778 - DNA, 25 bp, Homo sapien
tgagtagaaacttggcaactccctg

SEQ ID NO: 3179779 - DNA, 25 bp, Homo sapien
aagtggccagatgtacattggtgcc

SEQ ID NO: 3179780 - DNA, 25 bp, Homo sapien
tgccttcaatggtgatacctccagg

SEQ ID NO: 3179781 - DNA, 25 bp, Homo sapien
ttttcaacacagggccatgcgctca

SEQ ID NO: 3179782 - DNA, 25 bp, Homo sapien
tttcaacacagggccatgcgctcat

SEQ ID NO: 3179783 - DNA, 25 bp, Homo sapien
tgttgcctcggcattttcaacacag

SEQ ID NO: 3179784 - DNA, 25 bp, Homo sapien
agtatttgttgcctcggcattttca

SEQ ID NO: 3179785 - DNA, 25 bp, Homo sapien
tcaagaaacacagccaagcaaataa

SEQ ID NO: 3179786 - DNA, 25 bp, Homo sapien
ttcaagaaacacagccaagcaaata

SEQ ID NO: 3179787 - DNA, 25 bp, Homo sapien
agctcatgcttggtgcgctacaccc

SEQ ID NO: 3179788 - DNA, 25 bp, Homo sapien
cagctcatgcttggtgcgctacacc

SEQ ID NO: 3179789 - DNA, 25 bp, Homo sapien
tcagctcatgcttggtgcgctacac

SEQ ID NO: 3179790 - DNA, 25 bp, Homo sapien
ttcagctcatgcttggtgcgctaca

SEQ ID NO: 3179791 - DNA, 25 bp, Homo sapien
actttcaaaaacttggaacatgatg

SEQ ID NO: 3179792 - DNA, 25 bp, Homo sapien
ctacgtgtagtagtttgctttagaa

SEQ ID NO: 3179793 - DNA, 25 bp, Homo sapien
gaacatgatggcctacgtgtagtag

SEQ ID NO: 3179794 - DNA, 25 bp, Homo sapien
caaaaacttggaacatgatggccta

SEQ ID NO: 3179795 - DNA, 25 bp, Homo sapien
agcaaaagccttctgtaaatgccgg

SEQ ID NO: 3179796 - DNA, 25 bp, Homo sapien
gccttctgtaaatgccggacttttc

SEQ ID NO: 3179797 - DNA, 25 bp, Homo sapien
tatctactcttgaagcaaaagcctt

SEQ ID NO: 3179798 - DNA, 25 bp, Homo sapien
gttcagtctgtgtggatttatctac

SEQ ID NO: 3179799 - DNA, 25 bp, Homo sapien
acacagcagccgcagaggtcaataa

SEQ ID NO: 3179800 - DNA, 25 bp, Homo sapien
atggacacagcagccgcagaggtca

SEQ ID NO: 3179801 - DNA, 25 bp, Homo sapien
gcagccgcagaggtcaataagctgt

SEQ ID NO: 3179802 - DNA, 25 bp, Homo sapien
ccgcagaggtcaataagctgtggag

SEQ ID NO: 3179803 - DNA, 25 bp, Homo sapien
caacaagtatttcgcactaacagaa

SEQ ID NO: 3179804 - DNA, 25 bp, Homo sapien
taaattgccctagtcttctaatgca

SEQ ID NO: 3179805 - DNA, 25 bp, Homo sapien
gcacggcaacacaaaagtagcatcc

SEQ ID NO: 3179806 - DNA, 25 bp, Homo sapien
cattggtatgccagttggtgcctgt

SEQ ID NO: 3179807 - DNA, 25 bp, Homo sapien
tcttgagacggaacaacattgtttc

SEQ ID NO: 3179808 - DNA, 25 bp, Homo sapien
accgcgctgggctctaagtgtttct

SEQ ID NO: 3179809 - DNA, 25 bp, Homo sapien
tgtccgcaacaacgccaggctaatt

SEQ ID NO: 3179810 - DNA, 25 bp, Homo sapien
tggaattacagttgtccgcaacaac

SEQ ID NO: 3179811 - DNA, 25 bp, Homo sapien
cactataccaagctttctggattca

SEQ ID NO: 3179812 - DNA, 25 bp, Homo sapien
ttcatattcatgttagcagtgatga

SEQ ID NO: 3179813 - DNA, 25 bp, Homo sapien
catcactataccaagctttctggat

SEQ ID NO: 3179814 - DNA, 25 bp, Homo sapien
gaaagtaaatacattgcgcaaataa

SEQ ID NO: 3179815 - DNA, 25 bp, Homo sapien
gccaccgggtcacttgataattaaa

SEQ ID NO: 3179816 - DNA, 25 bp, Homo sapien
ggtagaactctcagtaaaacctgct

SEQ ID NO: 3179817 - DNA, 25 bp, Homo sapien
tcatgagtgccttgtagccaccggg

SEQ ID NO: 3179818 - DNA, 25 bp, Homo sapien
tcaggaagcaattcaagtccaggcc

SEQ ID NO: 3179819 - DNA, 25 bp, Homo sapien
cagcatgtcccaggttaaggactta

SEQ ID NO: 3179820 - DNA, 25 bp, Homo sapien
tctgctgtgtgaggtaattccaaaa

SEQ ID NO: 3179821 - DNA, 25 bp, Homo sapien
tatggatttatgagcatggcactct

SEQ ID NO: 3179822 - DNA, 25 bp, Homo sapien
gtcctgcaggtcaatagactaatag

SEQ ID NO: 3179823 - DNA, 25 bp, Homo sapien
tatcatgctcagagtgaatggtgga

SEQ ID NO: 3179824 - DNA, 25 bp, Homo sapien
ttgtcttcacgagaaagaaaacagg

SEQ ID NO: 3179825 - DNA, 25 bp, Homo sapien
tagcaactgatttgtcttcacgaga

SEQ ID NO: 3179826 - DNA, 25 bp, Homo sapien
cattcatgtcaatggtgtatatcat

SEQ ID NO: 3179827 - DNA, 25 bp, Homo sapien
gctttgtgttaagggcatgctgtca

SEQ ID NO: 3179828 - DNA, 25 bp, Homo sapien
gccacaggattcatgacgttaacgc

SEQ ID NO: 3179829 - DNA, 25 bp, Homo sapien
tggacaagagtactagaggaaaagc

SEQ ID NO: 3179830 - DNA, 25 bp, Homo sapien
taaacaaatccagagccttgaggga

SEQ ID NO: 3179831 - DNA, 25 bp, Homo sapien
atttgcctgctcaaatatactgttg

SEQ ID NO: 3179832 - DNA, 25 bp, Homo sapien
gcactttcgtttagttctttagaca

SEQ ID NO: 3179833 - DNA, 25 bp, Homo sapien
tagacatggcttccatcacttctta

SEQ ID NO: 3179834 - DNA, 25 bp, Homo sapien
tatactgttgagtccatgaaggtac

SEQ ID NO: 3179835 - DNA, 25 bp, Homo sapien
gctggcatcaactcgaagaacaaat

SEQ ID NO: 3179836 - DNA, 25 bp, Homo sapien
ggtaggaattcactacgctttcagt

SEQ ID NO: 3179837 - DNA, 25 bp, Homo sapien
taacagtgcttttgtccatgggaga

SEQ ID NO: 3179838 - DNA, 25 bp, Homo sapien
aaatcatggattaagagggtctctc

SEQ ID NO: 3179839 - DNA, 25 bp, Homo sapien
catagtgttatgtttccttgagttt

SEQ ID NO: 3179840 - DNA, 25 bp, Homo sapien
aaaactattatgttctgtcatagtg

SEQ ID NO: 3179841 - DNA, 25 bp, Homo sapien
tgaagatgtaacttcctgtagaatt

SEQ ID NO: 3179842 - DNA, 25 bp, Homo sapien
aaataccttcaccaatcagcctgga

SEQ ID NO: 3179843 - DNA, 25 bp, Homo sapien
catatccctctcaagatttggcaca

SEQ ID NO: 3179844 - DNA, 25 bp, Homo sapien
cactgctgcatcagataattatgac

SEQ ID NO: 3179845 - DNA, 25 bp, Homo sapien
tatctcactctcctagactggaagc

SEQ ID NO: 3179846 - DNA, 25 bp, Homo sapien
tagtttacacactaccactgctgca

SEQ ID NO: 3179847 - DNA, 25 bp, Homo sapien
caaaaataacaatgacaatgataac

SEQ ID NO: 3179848 - DNA, 25 bp, Homo sapien
atagtaactggattttcatctgttt

SEQ ID NO: 3179849 - DNA, 25 bp, Homo sapien
tcatctgtttagcaacaaaaataac

SEQ ID NO: 3179850 - DNA, 25 bp, Homo sapien
aaataacaatgacaatgataaccat

SEQ ID NO: 3179851 - DNA, 25 bp, Homo sapien
cagcttcacttagccaagggagatg

SEQ ID NO: 3179852 - DNA, 25 bp, Homo sapien
tattctgccttcgcctttcctgctg

SEQ ID NO: 3179853 - DNA, 25 bp, Homo sapien
agagccttcagcttcacttagccaa

SEQ ID NO: 3179854 - DNA, 25 bp, Homo sapien
ttccaatccaaaacctgtcaggcaa

SEQ ID NO: 3179855 - DNA, 25 bp, Homo sapien
tttccttgcatgtaatctacttcag

SEQ ID NO: 3179856 - DNA, 25 bp, Homo sapien
tctacttcagttgaagataaccaca

SEQ ID NO: 3179857 - DNA, 25 bp, Homo sapien
taatctacttcagttgaagataacc

SEQ ID NO: 3179858 - DNA, 25 bp, Homo sapien
gcatgtaatctacttcagttgaaga

SEQ ID NO: 3179859 - DNA, 25 bp, Homo sapien
taggactctaactccttgtgatgag

SEQ ID NO: 3179860 - DNA, 25 bp, Homo sapien
tccttgtgatgagcagaatagcagc

SEQ ID NO: 3179861 - DNA, 25 bp, Homo sapien
tgagcagaatagcagcttatcacgg

SEQ ID NO: 3179862 - DNA, 25 bp, Homo sapien
cagaatagcagcttatcacggtagc

SEQ ID NO: 3179863 - DNA, 25 bp, Homo sapien
ggaggtatccagagctgatcttact

SEQ ID NO: 3179864 - DNA, 25 bp, Homo sapien
gagttaggaggtatccagagctgat

SEQ ID NO: 3179865 - DNA, 25 bp, Homo sapien
ttgggcctccacttctccctcatca

SEQ ID NO: 3179866 - DNA, 25 bp, Homo sapien
ccagagctgatcttacttcgttttc

SEQ ID NO: 3179867 - DNA, 25 bp, Homo sapien
accgattctgttctctttcccatcc

SEQ ID NO: 3179868 - DNA, 25 bp, Homo sapien
tgttctctttcccatccttccccat

SEQ ID NO: 3179869 - DNA, 25 bp, Homo sapien
ctccaccgattctgttctctttccc

SEQ ID NO: 3179870 - DNA, 25 bp, Homo sapien
ccaccgattctgttctctttcccat

SEQ ID NO: 3179871 - DNA, 25 bp, Homo sapien
caaagggcaacatatcattcaagaa

SEQ ID NO: 3179872 - DNA, 25 bp, Homo sapien
aagaaataagtgtacatatctttgc

SEQ ID NO: 3179873 - DNA, 25 bp, Homo sapien
gaaataagtgtacatatctttgcaa

SEQ ID NO: 3179874 - DNA, 25 bp, Homo sapien
agggcaacatatcattcaagaaata

SEQ ID NO: 3179875 - DNA, 25 bp, Homo sapien
gacttcaggtagtatccacaggatt

SEQ ID NO: 3179876 - DNA, 25 bp, Homo sapien
gctttgccacaaaatgacttcaggt

SEQ ID NO: 3179877 - DNA, 25 bp, Homo sapien
tgaattcccagggttcctgaagccc

SEQ ID NO: 3179878 - DNA, 25 bp, Homo sapien
acatcatctaaaagtgccagcacag

SEQ ID NO: 3179879 - DNA, 25 bp, Homo sapien
caagaatactttgctagccgccata

SEQ ID NO: 3179880 - DNA, 25 bp, Homo sapien
tcattaatgtatgcacagacctact

SEQ ID NO: 3179881 - DNA, 25 bp, Homo sapien
gaaagaccagaattacctgtatacc

SEQ ID NO: 3179882 - DNA, 25 bp, Homo sapien
tgggaacatttactaacgtagcaac

SEQ ID NO: 3179883 - DNA, 25 bp, Homo sapien
aaaaatcttggctgcgaaggaggcc

SEQ ID NO: 3179884 - DNA, 25 bp, Homo sapien
tgttgtctaacaccataggaaaaat

SEQ ID NO: 3179885 - DNA, 25 bp, Homo sapien
caggtgaatccccaaggtttactgc

SEQ ID NO: 3179886 - DNA, 25 bp, Homo sapien
caccataggaaaaatcttggctgcg

SEQ ID NO: 3179887 - DNA, 25 bp, Homo sapien
gtatgtgtcagcatacacagtcttt

SEQ ID NO: 3179888 - DNA, 25 bp, Homo sapien
tatgtgtcagcatacacagtctttc

SEQ ID NO: 3179889 - DNA, 25 bp, Homo sapien
tgtatgtgtcagcatacacagtctt

SEQ ID NO: 3179890 - DNA, 25 bp, Homo sapien
atgtgtcagcatacacagtctttcc

SEQ ID NO: 3179891 - DNA, 25 bp, Homo sapien
actgcgctggcatacagacccactt

SEQ ID NO: 3179892 - DNA, 25 bp, Homo sapien
caaatttgtcttgcattctagtaac

SEQ ID NO: 3179893 - DNA, 25 bp, Homo sapien
gcattctagtaactgcatgaacacc

SEQ ID NO: 3179894 - DNA, 25 bp, Homo sapien
catgaacacccctggtaactgcgct

SEQ ID NO: 3179895 - DNA, 25 bp, Homo sapien
tccctccttgtactgtctctagtct

SEQ ID NO: 3179896 - DNA, 25 bp, Homo sapien
tctctccctccttgtactgtctcta

SEQ ID NO: 3179897 - DNA, 25 bp, Homo sapien
tctccctccttgtactgtctctagt

SEQ ID NO: 3179898 - DNA, 25 bp, Homo sapien
cctccttgtactgtctctagtcttt

SEQ ID NO: 3179899 - DNA, 25 bp, Homo sapien
agctgtaaaaggttctgagatcttc

SEQ ID NO: 3179900 - DNA, 25 bp, Homo sapien
caaagctgtaaaaggttctgagatc

SEQ ID NO: 3179901 - DNA, 25 bp, Homo sapien
gaccatattcttatcatcttgctct

SEQ ID NO: 3179902 - DNA, 25 bp, Homo sapien
tactgatgaccatattcttatcatc

SEQ ID NO: 3179903 - DNA, 25 bp, Homo sapien
taaggactgaagactagtgaggact

SEQ ID NO: 3179904 - DNA, 25 bp, Homo sapien
ccaggaagtgaccagcctgacgtgt

SEQ ID NO: 3179905 - DNA, 25 bp, Homo sapien
tgacgtgtgctatgacccctctgaa

SEQ ID NO: 3179906 - DNA, 25 bp, Homo sapien
gacgcttgtgctgtcattaatagaa

SEQ ID NO: 3179907 - DNA, 25 bp, Homo sapien
ttaatgcagactagacatggatctc

SEQ ID NO: 3179908 - DNA, 25 bp, Homo sapien
gattttactgttaagtgagcttctc

SEQ ID NO: 3179909 - DNA, 25 bp, Homo sapien
cactgtgggaattcttgatatgtaa

SEQ ID NO: 3179910 - DNA, 25 bp, Homo sapien
agaagcaagttttaatcccatgtaa

SEQ ID NO: 3179911 - DNA, 25 bp, Homo sapien
tcctgtccacttcaagtttctgcat

SEQ ID NO: 3179912 - DNA, 25 bp, Homo sapien
aatcctgaaaaaccaatcctgtcca

SEQ ID NO: 3179913 - DNA, 25 bp, Homo sapien
aaaccaatcctgtccacttcaagtt

SEQ ID NO: 3179914 - DNA, 25 bp, Homo sapien
atcctgaaaaaccaatcctgtccac

SEQ ID NO: 3179915 - DNA, 25 bp, Homo sapien
ttgcttttgtggttctacttgcctc

SEQ ID NO: 3179916 - DNA, 25 bp, Homo sapien
gttgcttttgtggttctacttgcct

SEQ ID NO: 3179917 - DNA, 25 bp, Homo sapien
gagctctttggccaaccatatttct

SEQ ID NO: 3179918 - DNA, 25 bp, Homo sapien
tgcgatgatacatagttctgtttgt

SEQ ID NO: 3179919 - DNA, 25 bp, Homo sapien
tgagtcaaatacaaagagctgtttc

SEQ ID NO: 3179920 - DNA, 25 bp, Homo sapien
ctgattgtactttgtatgcgatgat

SEQ ID NO: 3179921 - DNA, 25 bp, Homo sapien
gacagcatctggctatgctacccag

SEQ ID NO: 3179922 - DNA, 25 bp, Homo sapien
gagacagcatctggctatgctaccc

SEQ ID NO: 3179923 - DNA, 25 bp, Homo sapien
ggatcctcctaactctgggtgaaga

SEQ ID NO: 3179924 - DNA, 25 bp, Homo sapien
gagtgaaatgttgcaggagtgcagt

SEQ ID NO: 3179925 - DNA, 25 bp, Homo sapien
ggatgctcttctcactacttgggtg

SEQ ID NO: 3179926 - DNA, 25 bp, Homo sapien
gggtgacaggtccaatcatatcaca

SEQ ID NO: 3179927 - DNA, 25 bp, Homo sapien
agacactgggtactataaaaactgg

SEQ ID NO: 3179928 - DNA, 25 bp, Homo sapien
ttctaaatctggaagaccaagagct

SEQ ID NO: 3179929 - DNA, 25 bp, Homo sapien
aaacaccatcggtatgtcacaatca

SEQ ID NO: 3179930 - DNA, 25 bp, Homo sapien
ctgcagctgacggtcttcactgtta

SEQ ID NO: 3179931 - DNA, 25 bp, Homo sapien
aatcagagtgccttcaaaggaatgc

SEQ ID NO: 3179932 - DNA, 25 bp, Homo sapien
gacggtcttcactgttagaaggaaa

SEQ ID NO: 3179933 - DNA, 25 bp, Homo sapien
taaatgagcacttaaaactgcgcct

SEQ ID NO: 3179934 - DNA, 25 bp, Homo sapien
tcatctcatatgcatagttactggt

SEQ ID NO: 3179935 - DNA, 25 bp, Homo sapien
aataataaacattggccttggaaga

SEQ ID NO: 3179936 - DNA, 25 bp, Homo sapien
tgggagattgccttaatatagtaca

SEQ ID NO: 3179937 - DNA, 25 bp, Homo sapien
tcaatttacggatttacataaagta

SEQ ID NO: 3179938 - DNA, 25 bp, Homo sapien
cccttctacctataaacattaagca

SEQ ID NO: 3179939 - DNA, 25 bp, Homo sapien
aaaaatgcatgtgtaatcacaattc

SEQ ID NO: 3179940 - DNA, 25 bp, Homo sapien
tacagattgctttgtgtttaataac

SEQ ID NO: 3179941 - DNA, 25 bp, Homo sapien
tttaacctaggctccactgtaaatc

SEQ ID NO: 3179942 - DNA, 25 bp, Homo sapien
tcaaattttaacctaggctccactg

SEQ ID NO: 3179943 - DNA, 25 bp, Homo sapien
gggtgagcagccataatttgtttgt

SEQ ID NO: 3179944 - DNA, 25 bp, Homo sapien
taatgataaacatggcaaggtagaa

SEQ ID NO: 3179945 - DNA, 25 bp, Homo sapien
tccctgtggccttccacagtgtttg

SEQ ID NO: 3179946 - DNA, 25 bp, Homo sapien
gggtcataggataatagtggagaca

SEQ ID NO: 3179947 - DNA, 25 bp, Homo sapien
cataggataatagtggagacaaggt

SEQ ID NO: 3179948 - DNA, 25 bp, Homo sapien
tcataggataatagtggagacaagg

SEQ ID NO: 3179949 - DNA, 25 bp, Homo sapien
catagtgactacaacagtgggacaa

SEQ ID NO: 3179950 - DNA, 25 bp, Homo sapien
tacagaatgggcttcgccacggtgg

SEQ ID NO: 3179951 - DNA, 25 bp, Homo sapien
tgccacaggaccaactatgaacagg

SEQ ID NO: 3179952 - DNA, 25 bp, Homo sapien
caagaaaatgggataggcaactagc

SEQ ID NO: 3179953 - DNA, 25 bp, Homo sapien
tatgtgatatgacgttgcaagggtc

SEQ ID NO: 3179954 - DNA, 25 bp, Homo sapien
caagggtcataggttttcttatatc

SEQ ID NO: 3179955 - DNA, 25 bp, Homo sapien
caatgcatccacatgaaaaattcca

SEQ ID NO: 3179956 - DNA, 25 bp, Homo sapien
tctctctgtaacactctggttgaac

SEQ ID NO: 3179957 - DNA, 25 bp, Homo sapien
tacaagactgaaatcatttgggcaa

SEQ ID NO: 3179958 - DNA, 25 bp, Homo sapien
cctttactaatttctatgacctaca

SEQ ID NO: 3179959 - DNA, 25 bp, Homo sapien
tagtcaaaagtcaataagtatatgt

SEQ ID NO: 3179960 - DNA, 25 bp, Homo sapien
tttgggcaaacatttgctctattgt

SEQ ID NO: 3179961 - DNA, 25 bp, Homo sapien
tttctgtaggaaaggcatatgcata

SEQ ID NO: 3179962 - DNA, 25 bp, Homo sapien
gaaaggcatatgcatacagtctcag

SEQ ID NO: 3179963 - DNA, 25 bp, Homo sapien
ttctgtaggaaaggcatatgcatac

SEQ ID NO: 3179964 - DNA, 25 bp, Homo sapien
gtaggaaaggcatatgcatacagtc

SEQ ID NO: 3179965 - DNA, 25 bp, Homo sapien
tttataaagcttacagtaatgccta

SEQ ID NO: 3179966 - DNA, 25 bp, Homo sapien
catgactgcggatttttctttacag

SEQ ID NO: 3179967 - DNA, 25 bp, Homo sapien
cagtaatgcctaatacatggattaa

SEQ ID NO: 3179968 - DNA, 25 bp, Homo sapien
catggattaacagagtatgggcagg

SEQ ID NO: 3179969 - DNA, 25 bp, Homo sapien
gctttacctcattagctcaagacaa

SEQ ID NO: 3179970 - DNA, 25 bp, Homo sapien
tcaaactctttctatagaagcaccc

SEQ ID NO: 3179971 - DNA, 25 bp, Homo sapien
tagaagcacccttaaaaacagcaga

SEQ ID NO: 3179972 - DNA, 25 bp, Homo sapien
catataatcctacagttttgtcaga

SEQ ID NO: 3179973 - DNA, 25 bp, Homo sapien
taggattctaatcaccctggttggt

SEQ ID NO: 3179974 - DNA, 25 bp, Homo sapien
aacagataggccagtgttggtcact

SEQ ID NO: 3179975 - DNA, 25 bp, Homo sapien
tactgtgggtgaaggatcgatgcaa

SEQ ID NO: 3179976 - DNA, 25 bp, Homo sapien
tgtcctaaagcaagagaagggctct

SEQ ID NO: 3179977 - DNA, 25 bp, Homo sapien
gcagactccttgcattggccacaca

SEQ ID NO: 3179978 - DNA, 25 bp, Homo sapien
cattggcccgctctacagcttgctg

SEQ ID NO: 3179979 - DNA, 25 bp, Homo sapien
cagcttgctgttgccaaactggtta

SEQ ID NO: 3179980 - DNA, 25 bp, Homo sapien
actggttatagaatgctcccaaagc

SEQ ID NO: 3179981 - DNA, 25 bp, Homo sapien
tcctcgttcatcacaaattggcagc

SEQ ID NO: 3179982 - DNA, 25 bp, Homo sapien
ctttcctcgttcatcacaaattggc

SEQ ID NO: 3179983 - DNA, 25 bp, Homo sapien
ttcctcgttcatcacaaattggcag

SEQ ID NO: 3179984 - DNA, 25 bp, Homo sapien
tttcctcgttcatcacaaattggca

SEQ ID NO: 3179985 - DNA, 25 bp, Homo sapien
gttagagtcatattgcccattagca

SEQ ID NO: 3179986 - DNA, 25 bp, Homo sapien
taatttattttgaagttgcctgtaa

SEQ ID NO: 3179987 - DNA, 25 bp, Homo sapien
tgatagaggtctcaggttagagtca

SEQ ID NO: 3179988 - DNA, 25 bp, Homo sapien
caaggttttgtgtgcgaatgtgttc

SEQ ID NO: 3179989 - DNA, 25 bp, Homo sapien
ttttgcagcgacatgactgaggtcc

SEQ ID NO: 3179990 - DNA, 25 bp, Homo sapien
ggttctctgctaaggttttcacaca

SEQ ID NO: 3179991 - DNA, 25 bp, Homo sapien
tcttctgattgggtaagatccaccc

SEQ ID NO: 3179992 - DNA, 25 bp, Homo sapien
taatggactctctatccccagaggc

SEQ ID NO: 3179993 - DNA, 25 bp, Homo sapien
gaaccagggcttagagtctgtaacc

SEQ ID NO: 3179994 - DNA, 25 bp, Homo sapien
tacactacaatacgaagtccttccc

SEQ ID NO: 3179995 - DNA, 25 bp, Homo sapien
gatgttctagactacagtggctaag

SEQ ID NO: 3179996 - DNA, 25 bp, Homo sapien
ggctaagctggcacttacactacaa

SEQ ID NO: 3179997 - DNA, 25 bp, Homo sapien
cctgtggtcaaagctcacgaattct

SEQ ID NO: 3179998 - DNA, 25 bp, Homo sapien
aaatggcctgtggtcaaagctcacg

SEQ ID NO: 3179999 - DNA, 25 bp, Homo sapien
tggcctgtggtcaaagctcacgaat

SEQ ID NO: 3180000 - DNA, 25 bp, Homo sapien
tatctgataggatactgaaattttc

SEQ ID NO: 3180001 - DNA, 25 bp, Homo sapien
taaccgcatcatggaatgctactcc

SEQ ID NO: 3180002 - DNA, 25 bp, Homo sapien
tgttgaatttgtatggccctaatgc

SEQ ID NO: 3180003 - DNA, 25 bp, Homo sapien
tatgcttacttgctatccgtgtgtg

SEQ ID NO: 3180004 - DNA, 25 bp, Homo sapien
actatcaggttttggactttagcca

SEQ ID NO: 3180005 - DNA, 25 bp, Homo sapien
gaacactggctctcaaccatggcta

SEQ ID NO: 3180006 - DNA, 25 bp, Homo sapien
gatcgacagtcaaagctaatgctag

SEQ ID NO: 3180007 - DNA, 25 bp, Homo sapien
ggagcaaggcatttagaacactggc

SEQ ID NO: 3180008 - DNA, 25 bp, Homo sapien
caagcactaatggtaaggagcaagg

SEQ ID NO: 3180009 - DNA, 25 bp, Homo sapien
ttatatactaatcataaactggttg

SEQ ID NO: 3180010 - DNA, 25 bp, Homo sapien
ctaatcataaactggttgaaaaaga

SEQ ID NO: 3180011 - DNA, 25 bp, Homo sapien
acagaaagagctaaagactccacca

SEQ ID NO: 3180012 - DNA, 25 bp, Homo sapien
aatcagtagtgttatatactaatca

SEQ ID NO: 3180013 - DNA, 25 bp, Homo sapien
taggctcccacatacggcatcatat

SEQ ID NO: 3180014 - DNA, 25 bp, Homo sapien
ggtggctgacacataggctcccaca

SEQ ID NO: 3180015 - DNA, 25 bp, Homo sapien
caggaatggtggctgacacataggc

SEQ ID NO: 3180016 - DNA, 25 bp, Homo sapien
catacggcatcatattctgctatgt

SEQ ID NO: 3180017 - DNA, 25 bp, Homo sapien
ggagttcacataactacactgtcta

SEQ ID NO: 3180018 - DNA, 25 bp, Homo sapien
tttgtgctggaccataaaaggaacc

SEQ ID NO: 3180019 - DNA, 25 bp, Homo sapien
gaaaaccagtgcaacctagctttca

SEQ ID NO: 3180020 - DNA, 25 bp, Homo sapien
gaatttcattgactccaagctcagc

SEQ ID NO: 3180021 - DNA, 25 bp, Homo sapien
tcccttgggagcctaagccagcaat

SEQ ID NO: 3180022 - DNA, 25 bp, Homo sapien
cagagggagaacatggcaaagcaag

SEQ ID NO: 3180023 - DNA, 25 bp, Homo sapien
acaatgagggtctgaaactgagctt

SEQ ID NO: 3180024 - DNA, 25 bp, Homo sapien
aggagttcaccctgtattcaaggag

SEQ ID NO: 3180025 - DNA, 25 bp, Homo sapien
tctgaatgccaatctcagaaacgct

SEQ ID NO: 3180026 - DNA, 25 bp, Homo sapien
gaaacgctcatgtgctaataaatcg

SEQ ID NO: 3180027 - DNA, 25 bp, Homo sapien
tattatgggaaatctctctgaatgc

SEQ ID NO: 3180028 - DNA, 25 bp, Homo sapien
gaagacaaggagctactgcactatg

SEQ ID NO: 3180029 - DNA, 25 bp, Homo sapien
catgtatgatgcacgcatggatgta

SEQ ID NO: 3180030 - DNA, 25 bp, Homo sapien
ctttgatggaagtagtgtgcactat

SEQ ID NO: 3180031 - DNA, 25 bp, Homo sapien
tcaggtcagcccattaatacatcac

SEQ ID NO: 3180032 - DNA, 25 bp, Homo sapien
gcctcgaacactatactttgatgga

SEQ ID NO: 3180033 - DNA, 25 bp, Homo sapien
gtagcttcgactacaggttcaatcc

SEQ ID NO: 3180034 - DNA, 25 bp, Homo sapien
gcttcgactacaggttcaatccacc

SEQ ID NO: 3180035 - DNA, 25 bp, Homo sapien
ttcaatccaccataacaagcgaact

SEQ ID NO: 3180036 - DNA, 25 bp, Homo sapien
ccaccataacaagcgaactttgcat

SEQ ID NO: 3180037 - DNA, 25 bp, Homo sapien
cactccatgactgcatactgacaga

SEQ ID NO: 3180038 - DNA, 25 bp, Homo sapien
gatgactttagcgttgcacttcaca

SEQ ID NO: 3180039 - DNA, 25 bp, Homo sapien
aatgatttcagtgtttctgcctgca

SEQ ID NO: 3180040 - DNA, 25 bp, Homo sapien
gctaaatattgttggcaccgggaga

SEQ ID NO: 3180041 - DNA, 25 bp, Homo sapien
caagataaggtactctgctgggatg

SEQ ID NO: 3180042 - DNA, 25 bp, Homo sapien
aagataaggtactctgctgggatgg

SEQ ID NO: 3180043 - DNA, 25 bp, Homo sapien
agataaggtactctgctgggatggc

SEQ ID NO: 3180044 - DNA, 25 bp, Homo sapien
caagtcactgtttaccaattttcga

SEQ ID NO: 3180045 - DNA, 25 bp, Homo sapien
tctttatgatttagtctcggcaggt

SEQ ID NO: 3180046 - DNA, 25 bp, Homo sapien
tgtaggcattggtcacagcttccct

SEQ ID NO: 3180047 - DNA, 25 bp, Homo sapien
ccttacccattattgatcagttcag

SEQ ID NO: 3180048 - DNA, 25 bp, Homo sapien
tgtgtgggtttacttacaggctcac

SEQ ID NO: 3180049 - DNA, 25 bp, Homo sapien
gaattagtacatgtgatgtctccag

SEQ ID NO: 3180050 - DNA, 25 bp, Homo sapien
ttatcgtcgatgctactgtaactga

SEQ ID NO: 3180051 - DNA, 25 bp, Homo sapien
tatatgttgtaagacaagggtccag

SEQ ID NO: 3180052 - DNA, 25 bp, Homo sapien
tgaatttgatcctggttattttgct

SEQ ID NO: 3180053 - DNA, 25 bp, Homo sapien
tttgaatgttggcgtgccttgctag

SEQ ID NO: 3180054 - DNA, 25 bp, Homo sapien
acaatttggcgtgattttgcagtgg

SEQ ID NO: 3180055 - DNA, 25 bp, Homo sapien
tacaatttggcgtgattttgcagtg

SEQ ID NO: 3180056 - DNA, 25 bp, Homo sapien
cattgatcgaatcagcttctgaagc

SEQ ID NO: 3180057 - DNA, 25 bp, Homo sapien
ttcttcccattgatcgaatcagctt

SEQ ID NO: 3180058 - DNA, 25 bp, Homo sapien
ttcccattgatcgaatcagcttctg

SEQ ID NO: 3180059 - DNA, 25 bp, Homo sapien
cccattgatcgaatcagcttctgaa

SEQ ID NO: 3180060 - DNA, 25 bp, Homo sapien
tgggtcacggtgaacctgaatgatc

SEQ ID NO: 3180061 - DNA, 25 bp, Homo sapien
gtctgggtccagcaattcatttggg

SEQ ID NO: 3180062 - DNA, 25 bp, Homo sapien
tcatgacaaccgtgagagtagcaca

SEQ ID NO: 3180063 - DNA, 25 bp, Homo sapien
gagtagcacatccagatccatccag

SEQ ID NO: 3180064 - DNA, 25 bp, Homo sapien
tttatcagatagagtatgacactat

SEQ ID NO: 3180065 - DNA, 25 bp, Homo sapien
ttttatcagatagagtatgacacta

SEQ ID NO: 3180066 - DNA, 25 bp, Homo sapien
tatcagatagagtatgacactattt

SEQ ID NO: 3180067 - DNA, 25 bp, Homo sapien
tcagatagagtatgacactatttac

SEQ ID NO: 3180068 - DNA, 25 bp, Homo sapien
tagcttctgtatgtaccatcagcat

SEQ ID NO: 3180069 - DNA, 25 bp, Homo sapien
tctagcttctgtatgtaccatcagc

SEQ ID NO: 3180070 - DNA, 25 bp, Homo sapien
ctctagcttctgtatgtaccatcag

SEQ ID NO: 3180071 - DNA, 25 bp, Homo sapien
ttctctagcttctgtatgtaccatc

SEQ ID NO: 3180072 - DNA, 25 bp, Homo sapien
agcaaggcctttaagtcaggcccat

SEQ ID NO: 3180073 - DNA, 25 bp, Homo sapien
aatcccttcattctgacctcagacc

SEQ ID NO: 3180074 - DNA, 25 bp, Homo sapien
cattgctagaaatgtaacatcaaat

SEQ ID NO: 3180075 - DNA, 25 bp, Homo sapien
gacctcagaccattacattgctaga

SEQ ID NO: 3180076 - DNA, 25 bp, Homo sapien
tcatatttattcccaaaggatttaa

SEQ ID NO: 3180077 - DNA, 25 bp, Homo sapien
tcccaaaggatttaaatcattgttg

SEQ ID NO: 3180078 - DNA, 25 bp, Homo sapien
ctatttgtatgcaatgatcttcata

SEQ ID NO: 3180079 - DNA, 25 bp, Homo sapien
cattgttgtttcgattttttgcttc

SEQ ID NO: 3180080 - DNA, 25 bp, Homo sapien
cattgtcttcatattgcagacaatc

SEQ ID NO: 3180081 - DNA, 25 bp, Homo sapien
cataatcaatcttaaggatcttcct

SEQ ID NO: 3180082 - DNA, 25 bp, Homo sapien
catattgcagacaatcacataatca

SEQ ID NO: 3180083 - DNA, 25 bp, Homo sapien
caatcttaaggatcttccttccagc

SEQ ID NO: 3180084 - DNA, 25 bp, Homo sapien
tgactgcatcaaaggagagttttcc

SEQ ID NO: 3180085 - DNA, 25 bp, Homo sapien
gaaaagggtggatattattgccaac

SEQ ID NO: 3180086 - DNA, 25 bp, Homo sapien
tgcagtttgttttcgggaggcataa

SEQ ID NO: 3180087 - DNA, 25 bp, Homo sapien
ttattgtgtagaggaagcttttagc

SEQ ID NO: 3180088 - DNA, 25 bp, Homo sapien
ggtagtacattgcaaagtcctccat

SEQ ID NO: 3180089 - DNA, 25 bp, Homo sapien
ctggtagtacattgcaaagtcctcc

SEQ ID NO: 3180090 - DNA, 25 bp, Homo sapien
tcctggtagtacattgcaaagtcct

SEQ ID NO: 3180091 - DNA, 25 bp, Homo sapien
atttcctggtagtacattgcaaagt

SEQ ID NO: 3180092 - DNA, 25 bp, Homo sapien
attttctgcacgatggtttggtgaa

SEQ ID NO: 3180093 - DNA, 25 bp, Homo sapien
tttctgcacgatggtttggtgaaca

SEQ ID NO: 3180094 - DNA, 25 bp, Homo sapien
tctgcacgatggtttggtgaacata

SEQ ID NO: 3180095 - DNA, 25 bp, Homo sapien
gcacgatggtttggtgaacataata

SEQ ID NO: 3180096 - DNA, 25 bp, Homo sapien
gacctgcaggttaagatacacaatg

SEQ ID NO: 3180097 - DNA, 25 bp, Homo sapien
tatggataattcacactgagaaatg

SEQ ID NO: 3180098 - DNA, 25 bp, Homo sapien
tgcccattacagtacccaggtgata

SEQ ID NO: 3180099 - DNA, 25 bp, Homo sapien
aagaatagacacatttacctctgcc

SEQ ID NO: 3180100 - DNA, 25 bp, Homo sapien
tgtcgggccgtagcaacttggtcct

SEQ ID NO: 3180101 - DNA, 25 bp, Homo sapien
tctctaggttacatgcaagcaagcc

SEQ ID NO: 3180102 - DNA, 25 bp, Homo sapien
ttcagagagctctgcccaacggtgg

SEQ ID NO: 3180103 - DNA, 25 bp, Homo sapien
tgtacatgtgtaaagagattggccc

SEQ ID NO: 3180104 - DNA, 25 bp, Homo sapien
gggtgtatggttattatctctatta

SEQ ID NO: 3180105 - DNA, 25 bp, Homo sapien
cataaacccagattaatcatgaaaa

SEQ ID NO: 3180106 - DNA, 25 bp, Homo sapien
gggcaactatgcctacaaattaata

SEQ ID NO: 3180107 - DNA, 25 bp, Homo sapien
gaatttcctataatgggagttcaac

SEQ ID NO: 3180108 - DNA, 25 bp, Homo sapien
ggtcttaacgagatcaaatgtattg

SEQ ID NO: 3180109 - DNA, 25 bp, Homo sapien
tatattacgccttctacagcctaga

SEQ ID NO: 3180110 - DNA, 25 bp, Homo sapien
tgtatgcagtttaacatggtgaaac

SEQ ID NO: 3180111 - DNA, 25 bp, Homo sapien
tttgggctgcatgccttggaaatag

SEQ ID NO: 3180112 - DNA, 25 bp, Homo sapien
agttttagagttttagagatgatga

SEQ ID NO: 3180113 - DNA, 25 bp, Homo sapien
tctaatcaccatgcttaaatatatc

SEQ ID NO: 3180114 - DNA, 25 bp, Homo sapien
aatatgcatatttttctaatcacca

SEQ ID NO: 3180115 - DNA, 25 bp, Homo sapien
tatctttctcactaaagttttagag

SEQ ID NO: 3180116 - DNA, 25 bp, Homo sapien
gttactaaggactgtggtggcagct

SEQ ID NO: 3180117 - DNA, 25 bp, Homo sapien
tgttgagatccttagtggcaatgac

SEQ ID NO: 3180118 - DNA, 25 bp, Homo sapien
agctgttgttgagatccttagtggc

SEQ ID NO: 3180119 - DNA, 25 bp, Homo sapien
tctgcacaacaggttactaaggact

SEQ ID NO: 3180120 - DNA, 25 bp, Homo sapien
ttggttacctcagttcctaaagctc

SEQ ID NO: 3180121 - DNA, 25 bp, Homo sapien
gttcctaaagctcccagtatcctct

SEQ ID NO: 3180122 - DNA, 25 bp, Homo sapien
ccactgaagtagagctctgttgtga

SEQ ID NO: 3180123 - DNA, 25 bp, Homo sapien
agagcactccactgaagtagagctc

SEQ ID NO: 3180124 - DNA, 25 bp, Homo sapien
tagtccctggatggtgcaatagcag

SEQ ID NO: 3180125 - DNA, 25 bp, Homo sapien
gtgtgtgcagatccaccatggcttc

SEQ ID NO: 3180126 - DNA, 25 bp, Homo sapien
tgaggcaaaggcactcatagagtgc

SEQ ID NO: 3180127 - DNA, 25 bp, Homo sapien
cagaattcagagtgtgcattgggag

SEQ ID NO: 3180128 - DNA, 25 bp, Homo sapien
gcaccaaatttcatgggtgtccgtg

SEQ ID NO: 3180129 - DNA, 25 bp, Homo sapien
caaatttcatgggtgtccgtgtgaa

SEQ ID NO: 3180130 - DNA, 25 bp, Homo sapien
gcaacatagctgtttattttacctg

SEQ ID NO: 3180131 - DNA, 25 bp, Homo sapien
ctcatggagcacagaacaggagtac

SEQ ID NO: 3180132 - DNA, 25 bp, Homo sapien
tctctggtggacaggagtggggggt

SEQ ID NO: 3180133 - DNA, 25 bp, Homo sapien
tcacaagatgctcagtggggttgct

SEQ ID NO: 3180134 - DNA, 25 bp, Homo sapien
ctggtggacaggagtggggggtcac

SEQ ID NO: 3180135 - DNA, 25 bp, Homo sapien
acaagatgctcagtggggttgcttt

SEQ ID NO: 3180136 - DNA, 25 bp, Homo sapien
cctctgtgctctagcagaatcctgc

SEQ ID NO: 3180137 - DNA, 25 bp, Homo sapien
ctggcctctgtgctctagcagaatc

SEQ ID NO: 3180138 - DNA, 25 bp, Homo sapien
tccttaaagatgtatctggcctctg

SEQ ID NO: 3180139 - DNA, 25 bp, Homo sapien
gcctctgtgctctagcagaatcctg

SEQ ID NO: 3180140 - DNA, 25 bp, Homo sapien
tccataatccacacggatgccaagc

SEQ ID NO: 3180141 - DNA, 25 bp, Homo sapien
tgtttagaatcccacttgagcaagc

SEQ ID NO: 3180142 - DNA, 25 bp, Homo sapien
tgtaaaatagatgaccgctttccat

SEQ ID NO: 3180143 - DNA, 25 bp, Homo sapien
tgcatcatgaaatccatgtactgtt

SEQ ID NO: 3180144 - DNA, 25 bp, Homo sapien
ctttttctgttactctgcagggtga

SEQ ID NO: 3180145 - DNA, 25 bp, Homo sapien
actctgcagggtgaataaggtcttc

SEQ ID NO: 3180146 - DNA, 25 bp, Homo sapien
cagggtgaataaggtcttcttatca

SEQ ID NO: 3180147 - DNA, 25 bp, Homo sapien
ctgcagggtgaataaggtcttctta

SEQ ID NO: 3180148 - DNA, 25 bp, Homo sapien
tttgtacatgcagtcttgctttttc

SEQ ID NO: 3180149 - DNA, 25 bp, Homo sapien
ttgtacatgcagtcttgctttttca

SEQ ID NO: 3180150 - DNA, 25 bp, Homo sapien
tctttgtacatgcagtcttgctttt

SEQ ID NO: 3180151 - DNA, 25 bp, Homo sapien
ctttgtacatgcagtcttgcttttt

SEQ ID NO: 3180152 - DNA, 25 bp, Homo sapien
caggtattgtctcagcacagttcac

SEQ ID NO: 3180153 - DNA, 25 bp, Homo sapien
tgtctcagcacagttcacctttaga

SEQ ID NO: 3180154 - DNA, 25 bp, Homo sapien
gcttgtaacaggtattgtctcagca

SEQ ID NO: 3180155 - DNA, 25 bp, Homo sapien
tgataatccctctgcttgtaacagg

SEQ ID NO: 3180156 - DNA, 25 bp, Homo sapien
tctcagacaaatgttgccatattaa

SEQ ID NO: 3180157 - DNA, 25 bp, Homo sapien
gcttttagccatgttactggaggac

SEQ ID NO: 3180158 - DNA, 25 bp, Homo sapien
tgtatagcaagccaaaaatgacaca

SEQ ID NO: 3180159 - DNA, 25 bp, Homo sapien
cttcaaggtctttaatgctgtatag

SEQ ID NO: 3180160 - DNA, 25 bp, Homo sapien
attagtagtagcaatggtagaggca

SEQ ID NO: 3180161 - DNA, 25 bp, Homo sapien
ggcattagtatcatcaattttgttg

SEQ ID NO: 3180162 - DNA, 25 bp, Homo sapien
tagcaatggtagaggcattagtatc

SEQ ID NO: 3180163 - DNA, 25 bp, Homo sapien
ggtagaggcattagtatcatcaatt

SEQ ID NO: 3180164 - DNA, 25 bp, Homo sapien
cactcccctggagagttgcaaagta

SEQ ID NO: 3180165 - DNA, 25 bp, Homo sapien
gcatcctgaaaacactcccctggag

SEQ ID NO: 3180166 - DNA, 25 bp, Homo sapien
gcaaagtaggcattcccatggctct

SEQ ID NO: 3180167 - DNA, 25 bp, Homo sapien
tcccatggctctcaaccactttgtg

SEQ ID NO: 3180168 - DNA, 25 bp, Homo sapien
caaaggaagtcctctaaacagtaag

SEQ ID NO: 3180169 - DNA, 25 bp, Homo sapien
gaatcatagtgggtttcacatcagg

SEQ ID NO: 3180170 - DNA, 25 bp, Homo sapien
caaggaaggcaaaatcaaggctttc

SEQ ID NO: 3180171 - DNA, 25 bp, Homo sapien
tcatgtcgtcatgtcccagaaggaa

SEQ ID NO: 3180172 - DNA, 25 bp, Homo sapien
gcagtaaccgtgaatgtcttcgttc

SEQ ID NO: 3180173 - DNA, 25 bp, Homo sapien
gacatattcagcctttcaacctggt

SEQ ID NO: 3180174 - DNA, 25 bp, Homo sapien
gagtctgaggcatcggcagtaaccg

SEQ ID NO: 3180175 - DNA, 25 bp, Homo sapien
gcttcagtgatccatactcttgaca

SEQ ID NO: 3180176 - DNA, 25 bp, Homo sapien
attatatcctcagatactctaaaag

SEQ ID NO: 3180177 - DNA, 25 bp, Homo sapien
aattatatcctcagatactctaaaa

SEQ ID NO: 3180178 - DNA, 25 bp, Homo sapien
ttcagtaacacagctatcaaatctg

SEQ ID NO: 3180179 - DNA, 25 bp, Homo sapien
cttcagtaacacagctatcaaatct

SEQ ID NO: 3180180 - DNA, 25 bp, Homo sapien
gagcactaaatgagctagaatcagt

SEQ ID NO: 3180181 - DNA, 25 bp, Homo sapien
cagagcactaaatgagctagaatca

SEQ ID NO: 3180182 - DNA, 25 bp, Homo sapien
gttgacccttggcttcatagttgga

SEQ ID NO: 3180183 - DNA, 25 bp, Homo sapien
ttggaaactccaccatcagtggagc

SEQ ID NO: 3180184 - DNA, 25 bp, Homo sapien
tgtatgtgctttgctttacgaccct

SEQ ID NO: 3180185 - DNA, 25 bp, Homo sapien
tgaaactgtagcgaaaacatagatg

SEQ ID NO: 3180186 - DNA, 25 bp, Homo sapien
tactgagaacttgaggaaatggaaa

SEQ ID NO: 3180187 - DNA, 25 bp, Homo sapien
gactgtggattcagactcctgatag

SEQ ID NO: 3180188 - DNA, 25 bp, Homo sapien
gctgtggccacacacttggcagctg

SEQ ID NO: 3180189 - DNA, 25 bp, Homo sapien
tttgcccttgtgtactttcagcttc

SEQ ID NO: 3180190 - DNA, 25 bp, Homo sapien
tcttgtgttcttgaccacacttccc

SEQ ID NO: 3180191 - DNA, 25 bp, Homo sapien
ggcagctggcaagctaacacccaga

SEQ ID NO: 3180192 - DNA, 25 bp, Homo sapien
catgggtgatccaataggtcctggc

SEQ ID NO: 3180193 - DNA, 25 bp, Homo sapien
catgtgaactattgcaagggcttcc

SEQ ID NO: 3180194 - DNA, 25 bp, Homo sapien
tctttatagtacagccagagataac

SEQ ID NO: 3180195 - DNA, 25 bp, Homo sapien
aaatgggcttgtaatgttcctagtc

SEQ ID NO: 3180196 - DNA, 25 bp, Homo sapien
gcaaacagccttgaaacataataaa

SEQ ID NO: 3180197 - DNA, 25 bp, Homo sapien
tctctctcgggcaaagttgaggttt

SEQ ID NO: 3180198 - DNA, 25 bp, Homo sapien
tgagcagaagcattgacagctttcg

SEQ ID NO: 3180199 - DNA, 25 bp, Homo sapien
ggtttctcagattcagggttcgttg

SEQ ID NO: 3180200 - DNA, 25 bp, Homo sapien
tagctggcttcctacattcatcatg

SEQ ID NO: 3180201 - DNA, 25 bp, Homo sapien
gatgcataaggccatgggcagcagt

SEQ ID NO: 3180202 - DNA, 25 bp, Homo sapien
tacatcctggcaagtaatagattga

SEQ ID NO: 3180203 - DNA, 25 bp, Homo sapien
tgctgatcgtgttttagtttttcac

SEQ ID NO: 3180204 - DNA, 25 bp, Homo sapien
tcatcatcaacctttaaagagtttt

SEQ ID NO: 3180205 - DNA, 25 bp, Homo sapien
tgcaggtgcatttaattgtctgagc

SEQ ID NO: 3180206 - DNA, 25 bp, Homo sapien
gcaggtgcatttaattgtctgagct

SEQ ID NO: 3180207 - DNA, 25 bp, Homo sapien
ctgcaggtgcatttaattgtctgag

SEQ ID NO: 3180208 - DNA, 25 bp, Homo sapien
caactctagcacctcattgtggcag

SEQ ID NO: 3180209 - DNA, 25 bp, Homo sapien
aggaacagcaactctagcacctcat

SEQ ID NO: 3180210 - DNA, 25 bp, Homo sapien
ttataagaatacaccttgcagatct

SEQ ID NO: 3180211 - DNA, 25 bp, Homo sapien
cattgtggcagttataagaatacac

SEQ ID NO: 3180212 - DNA, 25 bp, Homo sapien
agcactaggggatatcccagtgaat

SEQ ID NO: 3180213 - DNA, 25 bp, Homo sapien
atcacagagaaagaagcactagggg

SEQ ID NO: 3180214 - DNA, 25 bp, Homo sapien
cactaggggatatcccagtgaattt

SEQ ID NO: 3180215 - DNA, 25 bp, Homo sapien
cacagagaaagaagcactaggggat

SEQ ID NO: 3180216 - DNA, 25 bp, Homo sapien
tagtgggattgttactgtctaggtc

SEQ ID NO: 3180217 - DNA, 25 bp, Homo sapien
cctgaggtttctacgcctctcaata

SEQ ID NO: 3180218 - DNA, 25 bp, Homo sapien
tgtctaggtccatttcctcgtgggc

SEQ ID NO: 3180219 - DNA, 25 bp, Homo sapien
tttcggagaccattcatcttagtgg

SEQ ID NO: 3180220 - DNA, 25 bp, Homo sapien
ttttgcagaagtaaagaccgactca

SEQ ID NO: 3180221 - DNA, 25 bp, Homo sapien
tttgcagaagtaaagaccgactcat

SEQ ID NO: 3180222 - DNA, 25 bp, Homo sapien
agctcattgaggcttcaggggcttt

SEQ ID NO: 3180223 - DNA, 25 bp, Homo sapien
gctcattgaggcttcaggggctttc

SEQ ID NO: 3180224 - DNA, 25 bp, Homo sapien
ctttctcattcagtgtcttggtttt

SEQ ID NO: 3180225 - DNA, 25 bp, Homo sapien
gaatcactggtcttcgctgccagaa

SEQ ID NO: 3180226 - DNA, 25 bp, Homo sapien
gcaaagccttttatcgtcgccgaga

SEQ ID NO: 3180227 - DNA, 25 bp, Homo sapien
tcacggtggagtttagcgcagcttt

SEQ ID NO: 3180228 - DNA, 25 bp, Homo sapien
gattccaaacggagcagccagattc

SEQ ID NO: 3180229 - DNA, 25 bp, Homo sapien
gagtcccaggttcgagaccaccaga

SEQ ID NO: 3180230 - DNA, 25 bp, Homo sapien
gatcgaatccgcattcgccgagtcc

SEQ ID NO: 3180231 - DNA, 25 bp, Homo sapien
ccaccagacggacaaaaccaagaga

SEQ ID NO: 3180232 - DNA, 25 bp, Homo sapien
cgatgtgaatgatcgaatccgcatt

SEQ ID NO: 3180233 - DNA, 25 bp, Homo sapien
ctagtaagggatagcaaaagctgta

SEQ ID NO: 3180234 - DNA, 25 bp, Homo sapien
aatgtatttatcatgcagaccacag

SEQ ID NO: 3180235 - DNA, 25 bp, Homo sapien
aatgtgattatagccactctgacag

SEQ ID NO: 3180236 - DNA, 25 bp, Homo sapien
tgaaacaatttgctagcctcatgac

SEQ ID NO: 3180237 - DNA, 25 bp, Homo sapien
ggaatcatggctaactaagcactct

SEQ ID NO: 3180238 - DNA, 25 bp, Homo sapien
gccaaagaatacgtgttcagaaaca

SEQ ID NO: 3180239 - DNA, 25 bp, Homo sapien
ataacactaggccaaggaatcatgg

SEQ ID NO: 3180240 - DNA, 25 bp, Homo sapien
tgtcttgcggattagaggacaacaa

SEQ ID NO: 3180241 - DNA, 25 bp, Homo sapien
caataaaagaaaagcaaagcgccat

SEQ ID NO: 3180242 - DNA, 25 bp, Homo sapien
ctcaataaaagaaaagcaaagcgcc

SEQ ID NO: 3180243 - DNA, 25 bp, Homo sapien
tcaataaaagaaaagcaaagcgcca

SEQ ID NO: 3180244 - DNA, 25 bp, Homo sapien
cctcaataaaagaaaagcaaagcgc

SEQ ID NO: 3180245 - DNA, 25 bp, Homo sapien
gagaatcacatgcaatggtttaatg

SEQ ID NO: 3180246 - DNA, 25 bp, Homo sapien
gtcacatgctgtactcctagtgcag

SEQ ID NO: 3180247 - DNA, 25 bp, Homo sapien
ctgacaagagaatcacatgcaatgg

SEQ ID NO: 3180248 - DNA, 25 bp, Homo sapien
gtactcctagtgcagcaatatctgt

SEQ ID NO: 3180249 - DNA, 25 bp, Homo sapien
tcagttgctcctcagaaactaaaat

SEQ ID NO: 3180250 - DNA, 25 bp, Homo sapien
gagagattctaatctcaatctgcca

SEQ ID NO: 3180251 - DNA, 25 bp, Homo sapien
gcttggcaaatcagttgctcctcag

SEQ ID NO: 3180252 - DNA, 25 bp, Homo sapien
tcagggctaaaaagctgacaccagc

SEQ ID NO: 3180253 - DNA, 25 bp, Homo sapien
gattaaattgtaaaagagcccttgc

SEQ ID NO: 3180254 - DNA, 25 bp, Homo sapien
gaatcctgtacttgctccttactag

SEQ ID NO: 3180255 - DNA, 25 bp, Homo sapien
tctttgcagggaaagcctttaggta

SEQ ID NO: 3180256 - DNA, 25 bp, Homo sapien
catatagtgaccacggcccatgaca

SEQ ID NO: 3180257 - DNA, 25 bp, Homo sapien
tggaagacaaaaggctgtactggca

SEQ ID NO: 3180258 - DNA, 25 bp, Homo sapien
aattccaaagccttttacatggaag

SEQ ID NO: 3180259 - DNA, 25 bp, Homo sapien
ttccaaagccttttacatggaagac

SEQ ID NO: 3180260 - DNA, 25 bp, Homo sapien
catggaagacaaaaggctgtactgg

SEQ ID NO: 3180261 - DNA, 25 bp, Homo sapien
taaatgtccagagtaagcaaatgca

SEQ ID NO: 3180262 - DNA, 25 bp, Homo sapien
cacacatgcaatacgtaaagtaact

SEQ ID NO: 3180263 - DNA, 25 bp, Homo sapien
tgagacaggttatagctgcaatact

SEQ ID NO: 3180264 - DNA, 25 bp, Homo sapien
tgaaataatatgctctgcccaactg

SEQ ID NO: 3180265 - DNA, 25 bp, Homo sapien
tgtgcggtttccctctcgctcacac

SEQ ID NO: 3180266 - DNA, 25 bp, Homo sapien
cctgtgcggtttccctctcgctcac

SEQ ID NO: 3180267 - DNA, 25 bp, Homo sapien
tgcggtttccctctcgctcacacct

SEQ ID NO: 3180268 - DNA, 25 bp, Homo sapien
cggtttccctctcgctcacacctca

SEQ ID NO: 3180269 - DNA, 25 bp, Homo sapien
tgagaaatcattggagatgtcacac

SEQ ID NO: 3180270 - DNA, 25 bp, Homo sapien
ttgacactgtgatgatcctcagaaa

SEQ ID NO: 3180271 - DNA, 25 bp, Homo sapien
aaggaaactcataaatcctgagaaa

SEQ ID NO: 3180272 - DNA, 25 bp, Homo sapien
cactgtgatgatcctcagaaatgca

SEQ ID NO: 3180273 - DNA, 25 bp, Homo sapien
aagagtaatacttctctacttccag

SEQ ID NO: 3180274 - DNA, 25 bp, Homo sapien
tcttaaaatagaagagtaatacttc

SEQ ID NO: 3180275 - DNA, 25 bp, Homo sapien
tagaagagtaatacttctctacttc

SEQ ID NO: 3180276 - DNA, 25 bp, Homo sapien
aatagaagagtaatacttctctact

SEQ ID NO: 3180277 - DNA, 25 bp, Homo sapien
taagctgatggtgatgcattaccca

SEQ ID NO: 3180278 - DNA, 25 bp, Homo sapien
tggcaatcacgctttatcctaaggc

SEQ ID NO: 3180279 - DNA, 25 bp, Homo sapien
tcctaaggccaacgggagtcaatga

SEQ ID NO: 3180280 - DNA, 25 bp, Homo sapien
cacttgagtttagagcagctgacac

SEQ ID NO: 3180281 - DNA, 25 bp, Homo sapien
ttggagaagactacacagctgaaac

SEQ ID NO: 3180282 - DNA, 25 bp, Homo sapien
gaaaccccccattagttgacatgct

SEQ ID NO: 3180283 - DNA, 25 bp, Homo sapien
acacagctgaaaccccccattagtt

SEQ ID NO: 3180284 - DNA, 25 bp, Homo sapien
ccccattagttgacatgctctccat

SEQ ID NO: 3180285 - DNA, 25 bp, Homo sapien
agtaaacctgcttgtactgatcaat

SEQ ID NO: 3180286 - DNA, 25 bp, Homo sapien
ctagtaaacctgcttgtactgatca

SEQ ID NO: 3180287 - DNA, 25 bp, Homo sapien
tactgatcaatttcaaggtgccaga

SEQ ID NO: 3180288 - DNA, 25 bp, Homo sapien
ccagaatcctgtgacaaaatgtgtt

SEQ ID NO: 3180289 - DNA, 25 bp, Homo sapien
gattctctgcagcatacgttaagca

SEQ ID NO: 3180290 - DNA, 25 bp, Homo sapien
gcctctgaactagtcacataggata

SEQ ID NO: 3180291 - DNA, 25 bp, Homo sapien
taacaagattgtagcagctgtacca

SEQ ID NO: 3180292 - DNA, 25 bp, Homo sapien
ggactctccatatgagcctgactat

SEQ ID NO: 3180293 - DNA, 25 bp, Homo sapien
gatgagtctcatggtcttgctactg

SEQ ID NO: 3180294 - DNA, 25 bp, Homo sapien
caaggtcagccatcaccctaggtga

SEQ ID NO: 3180295 - DNA, 25 bp, Homo sapien
taagtgctcctctatggttaaacaa

SEQ ID NO: 3180296 - DNA, 25 bp, Homo sapien
cctgcttatggtgccgtgtcatcat

SEQ ID NO: 3180297 - DNA, 25 bp, Homo sapien
cgtcccaagagaattcatctactgt

SEQ ID NO: 3180298 - DNA, 25 bp, Homo sapien
tcagcgttggtttctggcattcatt

SEQ ID NO: 3180299 - DNA, 25 bp, Homo sapien
catccccgaccgaagttcagcgttg

SEQ ID NO: 3180300 - DNA, 25 bp, Homo sapien
gcattcattcttttgactcacgtcc

SEQ ID NO: 3180301 - DNA, 25 bp, Homo sapien
acaagggcaatctggttattgccaa

SEQ ID NO: 3180302 - DNA, 25 bp, Homo sapien
tgccaaaacttcaatgcctagggca

SEQ ID NO: 3180303 - DNA, 25 bp, Homo sapien
gataatgatgaattatgattagtcc

SEQ ID NO: 3180304 - DNA, 25 bp, Homo sapien
aatgcctagggcagtcctttctata

SEQ ID NO: 3180305 - DNA, 25 bp, Homo sapien
ctccatacagttgccaactcaaagt

SEQ ID NO: 3180306 - DNA, 25 bp, Homo sapien
catacagttgccaactcaaagtata

SEQ ID NO: 3180307 - DNA, 25 bp, Homo sapien
atactccatacagttgccaactcaa

SEQ ID NO: 3180308 - DNA, 25 bp, Homo sapien
cagttgccaactcaaagtatatcat

SEQ ID NO: 3180309 - DNA, 25 bp, Homo sapien
tattgcatcacacaacaaggcatta

SEQ ID NO: 3180310 - DNA, 25 bp, Homo sapien
agatccaaagtcttgaaaacgttag

SEQ ID NO: 3180311 - DNA, 25 bp, Homo sapien
gaatagttcgtatgaggcactgtcc

SEQ ID NO: 3180312 - DNA, 25 bp, Homo sapien
tacacattcagataatatcagcctg

SEQ ID NO: 3180313 - DNA, 25 bp, Homo sapien
gatgtaaggcttccatccacagcat

SEQ ID NO: 3180314 - DNA, 25 bp, Homo sapien
tcacgactgtgacagaagcttttgg

SEQ ID NO: 3180315 - DNA, 25 bp, Homo sapien
gctttgttttggcattcaccagtga

SEQ ID NO: 3180316 - DNA, 25 bp, Homo sapien
tccacagcattcctaatcacgactg

SEQ ID NO: 3180317 - DNA, 25 bp, Homo sapien
tttctctcagacgatttgcatttaa

SEQ ID NO: 3180318 - DNA, 25 bp, Homo sapien
catttctctcagacgatttgcattt

SEQ ID NO: 3180319 - DNA, 25 bp, Homo sapien
atttctctcagacgatttgcattta

SEQ ID NO: 3180320 - DNA, 25 bp, Homo sapien
gaaaaagaagcatccctgtacactc

SEQ ID NO: 3180321 - DNA, 25 bp, Homo sapien
tatttactatgccaagggctggacc

SEQ ID NO: 3180322 - DNA, 25 bp, Homo sapien
gtctatttcctcacagagcatgtag

SEQ ID NO: 3180323 - DNA, 25 bp, Homo sapien
gctgggatccatcctaagactagga

SEQ ID NO: 3180324 - DNA, 25 bp, Homo sapien
agaataatgactctggggcatcatt

SEQ ID NO: 3180325 - DNA, 25 bp, Homo sapien
acacaatgctaattgttctccactc

SEQ ID NO: 3180326 - DNA, 25 bp, Homo sapien
acaagtctccaaacattcgaagatt

SEQ ID NO: 3180327 - DNA, 25 bp, Homo sapien
caagtctccaaacattcgaagattt

SEQ ID NO: 3180328 - DNA, 25 bp, Homo sapien
ccaaacattcgaagatttttctcct

SEQ ID NO: 3180329 - DNA, 25 bp, Homo sapien
gtctccaaacattcgaagatttttc

SEQ ID NO: 3180330 - DNA, 25 bp, Homo sapien
aataacataaatattctgtcatccc

SEQ ID NO: 3180331 - DNA, 25 bp, Homo sapien
aaagaagtgaattttgccattaaat

SEQ ID NO: 3180332 - DNA, 25 bp, Homo sapien
taacataaatattctgtcatcccct

SEQ ID NO: 3180333 - DNA, 25 bp, Homo sapien
ctagaaagaagtgaattttgccatt

SEQ ID NO: 3180334 - DNA, 25 bp, Homo sapien
gcttggaaagggttgttgccatcaa

SEQ ID NO: 3180335 - DNA, 25 bp, Homo sapien
agatctcctcattctggttaaggtc

SEQ ID NO: 3180336 - DNA, 25 bp, Homo sapien
ttaaggtcaccaaccgcagtgcgaa

SEQ ID NO: 3180337 - DNA, 25 bp, Homo sapien
tgccatcaacaaacgtcactgaaaa

SEQ ID NO: 3180338 - DNA, 25 bp, Homo sapien
tctacaaaacagtgatctccaagga

SEQ ID NO: 3180339 - DNA, 25 bp, Homo sapien
ctccaaggaaaataatgccctatta

SEQ ID NO: 3180340 - DNA, 25 bp, Homo sapien
tgccacttgaattgaaccaaaaaac

SEQ ID NO: 3180341 - DNA, 25 bp, Homo sapien
tcaaaactggaatacaagattaaca

SEQ ID NO: 3180342 - DNA, 25 bp, Homo sapien
tgtatgtagtgtccaagggtttttc

SEQ ID NO: 3180343 - DNA, 25 bp, Homo sapien
tgtcatcccaagttgtaacaatacc

SEQ ID NO: 3180344 - DNA, 25 bp, Homo sapien
cccaaggtggcagttatctcagaga

SEQ ID NO: 3180345 - DNA, 25 bp, Homo sapien
tacatttgtcatgagttcacctgat

SEQ ID NO: 3180346 - DNA, 25 bp, Homo sapien
tatagcgtaggtcagtatgttagag

SEQ ID NO: 3180347 - DNA, 25 bp, Homo sapien
ggtgcctcgtagagagtaaaattta

SEQ ID NO: 3180348 - DNA, 25 bp, Homo sapien
gctttaatatttggtgcctcgtaga

SEQ ID NO: 3180349 - DNA, 25 bp, Homo sapien
tactttgcaccaatgaaaaaattta

SEQ ID NO: 3180350 - DNA, 25 bp, Homo sapien
ctaatcctatccatgaggacagagc

SEQ ID NO: 3180351 - DNA, 25 bp, Homo sapien
attcagtttcaacctatgcagcggg

SEQ ID NO: 3180352 - DNA, 25 bp, Homo sapien
acctcttaataccaccagaatggga

SEQ ID NO: 3180353 - DNA, 25 bp, Homo sapien
aataagtttcaacagtagccagtgc

SEQ ID NO: 3180354 - DNA, 25 bp, Homo sapien
caatttgctttcagtgccgtcacgt

SEQ ID NO: 3180355 - DNA, 25 bp, Homo sapien
tacctagtggtctctatctgggaac

SEQ ID NO: 3180356 - DNA, 25 bp, Homo sapien
gccgtcacgtcactattgcaagata

SEQ ID NO: 3180357 - DNA, 25 bp, Homo sapien
caataactggtggagaacatcctgt

SEQ ID NO: 3180358 - DNA, 25 bp, Homo sapien
gcaatcacttataattgtatcattg

SEQ ID NO: 3180359 - DNA, 25 bp, Homo sapien
ttgatgatgctatttgttcaaggat

SEQ ID NO: 3180360 - DNA, 25 bp, Homo sapien
tcattaggagtgctaatatataagc

SEQ ID NO: 3180361 - DNA, 25 bp, Homo sapien
aacaggcagagggatcaaaaccatg

SEQ ID NO: 3180362 - DNA, 25 bp, Homo sapien
tagctatgactcagcgccttattta

SEQ ID NO: 3180363 - DNA, 25 bp, Homo sapien
gcgccttatttacttcaccgattgt

SEQ ID NO: 3180364 - DNA, 25 bp, Homo sapien
caccgattgtattaagcctacacaa

SEQ ID NO: 3180365 - DNA, 25 bp, Homo sapien
tttacttcaccgattgtattaagcc

SEQ ID NO: 3180366 - DNA, 25 bp, Homo sapien
cagtccagatgtatgggagtgcccc

SEQ ID NO: 3180367 - DNA, 25 bp, Homo sapien
cacagtgcacttcctctaccaaggg

SEQ ID NO: 3180368 - DNA, 25 bp, Homo sapien
tttcagcaacttcaggcaggagtgt

SEQ ID NO: 3180369 - DNA, 25 bp, Homo sapien
tgtggtctccatggatcaacagact

SEQ ID NO: 3180370 - DNA, 25 bp, Homo sapien
tccttgagaggctatttatgactgc

SEQ ID NO: 3180371 - DNA, 25 bp, Homo sapien
ttattatttcagcaggtggtctaca

SEQ ID NO: 3180372 - DNA, 25 bp, Homo sapien
gtgtttttcatgtctctccctccag

SEQ ID NO: 3180373 - DNA, 25 bp, Homo sapien
ctgtggggtcagtgacagtatcttt

SEQ ID NO: 3180374 - DNA, 25 bp, Homo sapien
tgccactcagtatctccaacatcat

SEQ ID NO: 3180375 - DNA, 25 bp, Homo sapien
tgctgccactcagtatctccaacat

SEQ ID NO: 3180376 - DNA, 25 bp, Homo sapien
aggggtgctgccactcagtatctcc

SEQ ID NO: 3180377 - DNA, 25 bp, Homo sapien
gggtgctgccactcagtatctccaa

SEQ ID NO: 3180378 - DNA, 25 bp, Homo sapien
gatcaatggaagacacgagtattct

SEQ ID NO: 3180379 - DNA, 25 bp, Homo sapien
gaattgttactaatttcccagcatg

SEQ ID NO: 3180380 - DNA, 25 bp, Homo sapien
gcaactggcaagctgacaccaatat

SEQ ID NO: 3180381 - DNA, 25 bp, Homo sapien
ggttaaattggatttccccatgcca

SEQ ID NO: 3180382 - DNA, 25 bp, Homo sapien
ttccataaaaactgaatcacatggt

SEQ ID NO: 3180383 - DNA, 25 bp, Homo sapien
ttattccataaaaactgaatcacat

SEQ ID NO: 3180384 - DNA, 25 bp, Homo sapien
tattccataaaaactgaatcacatg

SEQ ID NO: 3180385 - DNA, 25 bp, Homo sapien
attccataaaaactgaatcacatgg

SEQ ID NO: 3180386 - DNA, 25 bp, Homo sapien
cacagttttcataggaaggcaaaga

SEQ ID NO: 3180387 - DNA, 25 bp, Homo sapien
cttgacaaagtcctacaatagtgga

SEQ ID NO: 3180388 - DNA, 25 bp, Homo sapien
tgttgttagcaatgcgaataacgcc

SEQ ID NO: 3180389 - DNA, 25 bp, Homo sapien
gaataacgcctccatactgtcatgt

SEQ ID NO: 3180390 - DNA, 25 bp, Homo sapien
ggtccaaacctcaagctgaccttgg

SEQ ID NO: 3180391 - DNA, 25 bp, Homo sapien
tcatgaagccaatgtttacctaatg

SEQ ID NO: 3180392 - DNA, 25 bp, Homo sapien
cagtaattgacaggacagattttga

SEQ ID NO: 3180393 - DNA, 25 bp, Homo sapien
tgaagttgaacagtctcaggtccaa

SEQ ID NO: 3180394 - DNA, 25 bp, Homo sapien
gatactggtcttgatcaccctagaa

SEQ ID NO: 3180395 - DNA, 25 bp, Homo sapien
tctgctgtgtggtcgagttcctaac

SEQ ID NO: 3180396 - DNA, 25 bp, Homo sapien
ttttaggcccactgttgagatgtag

SEQ ID NO: 3180397 - DNA, 25 bp, Homo sapien
tgctcgcaagtcaccttctgctgtg

SEQ ID NO: 3180398 - DNA, 25 bp, Homo sapien
taaaagggccttatggctgatgtag

SEQ ID NO: 3180399 - DNA, 25 bp, Homo sapien
taagggtgactccagtaaacatatg

SEQ ID NO: 3180400 - DNA, 25 bp, Homo sapien
ggaacatcactgaagatcaaaccag

SEQ ID NO: 3180401 - DNA, 25 bp, Homo sapien
caggtgcccattaagcatgctgtga

SEQ ID NO: 3180402 - DNA, 25 bp, Homo sapien
taatttcctcttgtcatgtcccttt

SEQ ID NO: 3180403 - DNA, 25 bp, Homo sapien
tcatgtcccttttctaacaaggcca

SEQ ID NO: 3180404 - DNA, 25 bp, Homo sapien
gtcatgtcccttttctaacaaggcc

SEQ ID NO: 3180405 - DNA, 25 bp, Homo sapien
ctgctgcaaggtaacaagaggctca

SEQ ID NO: 3180406 - DNA, 25 bp, Homo sapien
gcgttcaaatgtaggaagtgcacac

SEQ ID NO: 3180407 - DNA, 25 bp, Homo sapien
gtatgaaggtatcatcaggaacagc

SEQ ID NO: 3180408 - DNA, 25 bp, Homo sapien
cacaagggtcattgagagaaaggta

SEQ ID NO: 3180409 - DNA, 25 bp, Homo sapien
tgcaattaccgggcttctgccacct

SEQ ID NO: 3180410 - DNA, 25 bp, Homo sapien
tgttaagaagattcattgaacctct

SEQ ID NO: 3180411 - DNA, 25 bp, Homo sapien
tctatagtcaaaaagccagacctcc

SEQ ID NO: 3180412 - DNA, 25 bp, Homo sapien
ctaccaaagaaatgtgcccaccgtt

SEQ ID NO: 3180413 - DNA, 25 bp, Homo sapien
tcaaaagctacatctcataccaggc

SEQ ID NO: 3180414 - DNA, 25 bp, Homo sapien
gcccaccgtttggatacagcatttg

SEQ ID NO: 3180415 - DNA, 25 bp, Homo sapien
tatcaccagtataaagcacagtggc

SEQ ID NO: 3180416 - DNA, 25 bp, Homo sapien
gcaacaaactgcgaatagcgtatca

SEQ ID NO: 3180417 - DNA, 25 bp, Homo sapien
taatggcccatgatgtacaggactc

SEQ ID NO: 3180418 - DNA, 25 bp, Homo sapien
gtaaggacattacttgccagacaca

SEQ ID NO: 3180419 - DNA, 25 bp, Homo sapien
aacaccatgtaaacaagtacacagt

SEQ ID NO: 3180420 - DNA, 25 bp, Homo sapien
gcacatttaaggttgattacacatg

SEQ ID NO: 3180421 - DNA, 25 bp, Homo sapien
cacatttgctattatagagttatct

SEQ ID NO: 3180422 - DNA, 25 bp, Homo sapien
tccataattacccttttactggcaa

SEQ ID NO: 3180423 - DNA, 25 bp, Homo sapien
tacactgcatctgatttagccattg

SEQ ID NO: 3180424 - DNA, 25 bp, Homo sapien
cagtccactgtccagaaaccatttt

SEQ ID NO: 3180425 - DNA, 25 bp, Homo sapien
caggctaccacctttcattctggga

SEQ ID NO: 3180426 - DNA, 25 bp, Homo sapien
gctgagtatctctatgaatcttttg

SEQ ID NO: 3180427 - DNA, 25 bp, Homo sapien
tcttcattcactaccagcttctact

SEQ ID NO: 3180428 - DNA, 25 bp, Homo sapien
ttcttcattcactaccagcttctac

SEQ ID NO: 3180429 - DNA, 25 bp, Homo sapien
cttcttcattcactaccagcttcta

SEQ ID NO: 3180430 - DNA, 25 bp, Homo sapien
gccttcttcattcactaccagcttc

SEQ ID NO: 3180431 - DNA, 25 bp, Homo sapien
ggccatcagtatccatgctttcagt

SEQ ID NO: 3180432 - DNA, 25 bp, Homo sapien
ttgtagcatgcactccatgatggct

SEQ ID NO: 3180433 - DNA, 25 bp, Homo sapien
gcctcatactcttctaaagtgtttg

SEQ ID NO: 3180434 - DNA, 25 bp, Homo sapien
tccatgatggctggccatcagtatc

SEQ ID NO: 3180435 - DNA, 25 bp, Homo sapien
ggctggtgcaagctatacaaagtaa

SEQ ID NO: 3180436 - DNA, 25 bp, Homo sapien
ttgtaatgtgagaggcatgaggcca

SEQ ID NO: 3180437 - DNA, 25 bp, Homo sapien
cagaaccagggaaagtggctacatc

SEQ ID NO: 3180438 - DNA, 25 bp, Homo sapien
taccaacgtcttaaagtgtggctgg

SEQ ID NO: 3180439 - DNA, 25 bp, Homo sapien
ctaggcgtattcaggatctgcagag

SEQ ID NO: 3180440 - DNA, 25 bp, Homo sapien
tgcttctaactatggtggtgagtgg

SEQ ID NO: 3180441 - DNA, 25 bp, Homo sapien
tctgcagagttgtaacagtgatgct

SEQ ID NO: 3180442 - DNA, 25 bp, Homo sapien
gtaacagtgatgcttctaactatgg

SEQ ID NO: 3180443 - DNA, 25 bp, Homo sapien
tgatctcttccttctataaacttta

SEQ ID NO: 3180444 - DNA, 25 bp, Homo sapien
tttactctctttgtaagaggtggcc

SEQ ID NO: 3180445 - DNA, 25 bp, Homo sapien
ctttactctctttgtaagaggtggc

SEQ ID NO: 3180446 - DNA, 25 bp, Homo sapien
gtgaaaattatatgacctaccagtg

SEQ ID NO: 3180447 - DNA, 25 bp, Homo sapien
gggacatagacagctgagcaaaggc

SEQ ID NO: 3180448 - DNA, 25 bp, Homo sapien
ttgaaaacatttgaacggacagaca

SEQ ID NO: 3180449 - DNA, 25 bp, Homo sapien
tacacacaaacatttcgagccagag

SEQ ID NO: 3180450 - DNA, 25 bp, Homo sapien
tactctaaatcaaatgagcatatta

SEQ ID NO: 3180451 - DNA, 25 bp, Homo sapien
tgctgtcagactaggacatttggac

SEQ ID NO: 3180452 - DNA, 25 bp, Homo sapien
caagtttccactcatgttatgtttc

SEQ ID NO: 3180453 - DNA, 25 bp, Homo sapien
tggacactacaagtttccactcatg

SEQ ID NO: 3180454 - DNA, 25 bp, Homo sapien
acaagagcaatcatcagggacccag

SEQ ID NO: 3180455 - DNA, 25 bp, Homo sapien
gttacaggcaagttagcaaggcacc

SEQ ID NO: 3180456 - DNA, 25 bp, Homo sapien
tatgtctacattcaagcccactgga

SEQ ID NO: 3180457 - DNA, 25 bp, Homo sapien
gactttgcatagctccaagggaagg

SEQ ID NO: 3180458 - DNA, 25 bp, Homo sapien
cttctctctagtttgcaatcatgtc

SEQ ID NO: 3180459 - DNA, 25 bp, Homo sapien
ttttcccactcatcatgtattacgc

SEQ ID NO: 3180460 - DNA, 25 bp, Homo sapien
catgtattacgcacactcttctctc

SEQ ID NO: 3180461 - DNA, 25 bp, Homo sapien
tctctctagtttgcaatcatgtctt

SEQ ID NO: 3180462 - DNA, 25 bp, Homo sapien
gaaaaatacttctccatgagaaaat

SEQ ID NO: 3180463 - DNA, 25 bp, Homo sapien
ggatcaatgatagcttgaaaagaaa

SEQ ID NO: 3180464 - DNA, 25 bp, Homo sapien
tactgccacgcttgaagacagaaaa

SEQ ID NO: 3180465 - DNA, 25 bp, Homo sapien
attactttcacatggatcatatttg

SEQ ID NO: 3180466 - DNA, 25 bp, Homo sapien
tttatacagcctaaaagccacgagg

SEQ ID NO: 3180467 - DNA, 25 bp, Homo sapien
tcttctatcaccgtaggaggcagca

SEQ ID NO: 3180468 - DNA, 25 bp, Homo sapien
gacttaatgctagaataccccagag

SEQ ID NO: 3180469 - DNA, 25 bp, Homo sapien
tattaggcctagatcaccctcttgg

SEQ ID NO: 3180470 - DNA, 25 bp, Homo sapien
tgggtctacaattcagtgccaagga

SEQ ID NO: 3180471 - DNA, 25 bp, Homo sapien
aaagtagcattctgaactacacaag

SEQ ID NO: 3180472 - DNA, 25 bp, Homo sapien
tagaccatatctccaagaaccatat

SEQ ID NO: 3180473 - DNA, 25 bp, Homo sapien
gctctataaatctatagtatcacaa

SEQ ID NO: 3180474 - DNA, 25 bp, Homo sapien
cattttctcagggaagagagttcct

SEQ ID NO: 3180475 - DNA, 25 bp, Homo sapien
tctaagcataaagaagtacgtcacg

SEQ ID NO: 3180476 - DNA, 25 bp, Homo sapien
tagatgatccttactggtactgcct

SEQ ID NO: 3180477 - DNA, 25 bp, Homo sapien
tacagattttctaaggcgaagcctt

SEQ ID NO: 3180478 - DNA, 25 bp, Homo sapien
tcagcaatttgtccaccagccagtg

SEQ ID NO: 3180479 - DNA, 25 bp, Homo sapien
gagtgctgctggttaggatcctccc

SEQ ID NO: 3180480 - DNA, 25 bp, Homo sapien
aaagtttggatatcagccttgcagg

SEQ ID NO: 3180481 - DNA, 25 bp, Homo sapien
gatggcaccccttagatggctttga

SEQ ID NO: 3180482 - DNA, 25 bp, Homo sapien
cccagccccaatgttatcctttaag

SEQ ID NO: 3180483 - DNA, 25 bp, Homo sapien
cagaaatcaacatgtgttagtacaa

SEQ ID NO: 3180484 - DNA, 25 bp, Homo sapien
tataacattcaaagatggaaactaa

SEQ ID NO: 3180485 - DNA, 25 bp, Homo sapien
tgtttttaactagctgataccaaga

SEQ ID NO: 3180486 - DNA, 25 bp, Homo sapien
tcagtggcactagaagataatgaca

SEQ ID NO: 3180487 - DNA, 25 bp, Homo sapien
gataatgacagcttaaccattctat

SEQ ID NO: 3180488 - DNA, 25 bp, Homo sapien
ccaaggtatatcagtttaaatgtca

SEQ ID NO: 3180489 - DNA, 25 bp, Homo sapien
taaatgtcaggcaatatggcattga

SEQ ID NO: 3180490 - DNA, 25 bp, Homo sapien
cagtcttttatgcactgtatcatta

SEQ ID NO: 3180491 - DNA, 25 bp, Homo sapien
ccatgttaagatgtaggtagcagtt

SEQ ID NO: 3180492 - DNA, 25 bp, Homo sapien
tgtatcattaatcgtcagagccatg

SEQ ID NO: 3180493 - DNA, 25 bp, Homo sapien
tacactaatcattgctgaaacagtc

SEQ ID NO: 3180494 - DNA, 25 bp, Homo sapien
tctaatacacatcccctaaatgcct

SEQ ID NO: 3180495 - DNA, 25 bp, Homo sapien
ctctctcagatctttagatactcat

SEQ ID NO: 3180496 - DNA, 25 bp, Homo sapien
catttcttaccacacctgatgtttg

SEQ ID NO: 3180497 - DNA, 25 bp, Homo sapien
caagtaaagattaggcctggcatgg

SEQ ID NO: 3180498 - DNA, 25 bp, Homo sapien
ccttttacctgcctttgacaactgc

SEQ ID NO: 3180499 - DNA, 25 bp, Homo sapien
taaatccccaagtcaaagaatacat

SEQ ID NO: 3180500 - DNA, 25 bp, Homo sapien
gccattgaaataatcatctagcctc

SEQ ID NO: 3180501 - DNA, 25 bp, Homo sapien
gctgacaatgtgaggtaactatcaa

SEQ ID NO: 3180502 - DNA, 25 bp, Homo sapien
ctgtatggacatacttagtaattct

SEQ ID NO: 3180503 - DNA, 25 bp, Homo sapien
tgtcaccagcttatcatctacattg

SEQ ID NO: 3180504 - DNA, 25 bp, Homo sapien
cattgatagtaccattctcagaaca

SEQ ID NO: 3180505 - DNA, 25 bp, Homo sapien
tcatctacattgatagtaccattct

SEQ ID NO: 3180506 - DNA, 25 bp, Homo sapien
tacctgctgtgcacttgcaataata

SEQ ID NO: 3180507 - DNA, 25 bp, Homo sapien
ggtttaacatgtgtgactgtcagca

SEQ ID NO: 3180508 - DNA, 25 bp, Homo sapien
gcttggttgactgggcaaattcgaa

SEQ ID NO: 3180509 - DNA, 25 bp, Homo sapien
taatatcaccacataccactggcag

SEQ ID NO: 3180510 - DNA, 25 bp, Homo sapien
catttgtttgcgtcctctcatttcc

SEQ ID NO: 3180511 - DNA, 25 bp, Homo sapien
ttcttatccatgagcatgcgatata

SEQ ID NO: 3180512 - DNA, 25 bp, Homo sapien
ttatccatgagcatgcgatatattt

SEQ ID NO: 3180513 - DNA, 25 bp, Homo sapien
gatatatttccatttgtttgcgtcc

SEQ ID NO: 3180514 - DNA, 25 bp, Homo sapien
tagcccttgaatacatattgcctgg

SEQ ID NO: 3180515 - DNA, 25 bp, Homo sapien
caaggtgtgttctcgactacatcag

SEQ ID NO: 3180516 - DNA, 25 bp, Homo sapien
tatggaattgtataaacctcagcac

SEQ ID NO: 3180517 - DNA, 25 bp, Homo sapien
tcacgttgaatacaaccccagaggg

SEQ ID NO: 3180518 - DNA, 25 bp, Homo sapien
tcctccataaacctgatctttgtga

SEQ ID NO: 3180519 - DNA, 25 bp, Homo sapien
ccttgacgagggctaggactaatta

SEQ ID NO: 3180520 - DNA, 25 bp, Homo sapien
ggactaattacaagcaactctcctc

SEQ ID NO: 3180521 - DNA, 25 bp, Homo sapien
tctttgtgaccctgttctttatcta

SEQ ID NO: 3180522 - DNA, 25 bp, Homo sapien
aggcttaaaaatctgcgtagagatg

SEQ ID NO: 3180523 - DNA, 25 bp, Homo sapien
aatctgcgtagagatgtgtaagcta

SEQ ID NO: 3180524 - DNA, 25 bp, Homo sapien
gcttaaaaatctgcgtagagatgtg

SEQ ID NO: 3180525 - DNA, 25 bp, Homo sapien
taaaaatctgcgtagagatgtgtaa

SEQ ID NO: 3180526 - DNA, 25 bp, Homo sapien
gttattttgtttagtgggaccatca

SEQ ID NO: 3180527 - DNA, 25 bp, Homo sapien
tgcagaatgtctacataaccgtaaa

SEQ ID NO: 3180528 - DNA, 25 bp, Homo sapien
tcgcttcttatttacttggaccaaa

SEQ ID NO: 3180529 - DNA, 25 bp, Homo sapien
tagtgggaccatcagtcgcttctta

SEQ ID NO: 3180530 - DNA, 25 bp, Homo sapien
ggaaccaggatcacaggcaacaaat

SEQ ID NO: 3180531 - DNA, 25 bp, Homo sapien
gcattgcatcggaatacatcaggga

SEQ ID NO: 3180532 - DNA, 25 bp, Homo sapien
caaatttcagacagagccgacgtca

SEQ ID NO: 3180533 - DNA, 25 bp, Homo sapien
gacagagtggatcaataagcaagac

SEQ ID NO: 3180534 - DNA, 25 bp, Homo sapien
acgtcaggagatcgagaccatcctg

SEQ ID NO: 3180535 - DNA, 25 bp, Homo sapien
gtaatcccagcactttggaaggctg

SEQ ID NO: 3180536 - DNA, 25 bp, Homo sapien
cggccggacgcggtggcttacgcct

SEQ ID NO: 3180537 - DNA, 25 bp, Homo sapien
aggcgggcagatcacgacgtcagga

SEQ ID NO: 3180538 - DNA, 25 bp, Homo sapien
aacactttagcatgtagaacaccca

SEQ ID NO: 3180539 - DNA, 25 bp, Homo sapien
ttctcatgtgtctactccagctgaa

SEQ ID NO: 3180540 - DNA, 25 bp, Homo sapien
gtggtgatcaggcatgcagtttcca

SEQ ID NO: 3180541 - DNA, 25 bp, Homo sapien
accaccctggttctttatgctgtag

SEQ ID NO: 3180542 - DNA, 25 bp, Homo sapien
ctaatgaggacagatatgtaatata

SEQ ID NO: 3180543 - DNA, 25 bp, Homo sapien
gcctgctgtattccaactaatgagg

SEQ ID NO: 3180544 - DNA, 25 bp, Homo sapien
agcctgctgtattccaactaatgag

SEQ ID NO: 3180545 - DNA, 25 bp, Homo sapien
tccaactaatgaggacagatatgta

SEQ ID NO: 3180546 - DNA, 25 bp, Homo sapien
tgcagtgtcacctactctgtcctga

SEQ ID NO: 3180547 - DNA, 25 bp, Homo sapien
tatacgtagaagactgacaccaact

SEQ ID NO: 3180548 - DNA, 25 bp, Homo sapien
ttctaccttgatgaaacccatgcag

SEQ ID NO: 3180549 - DNA, 25 bp, Homo sapien
tataaaacaacagaatgattcgcca

SEQ ID NO: 3180550 - DNA, 25 bp, Homo sapien
tgatgacttgttggtaaattggcat

SEQ ID NO: 3180551 - DNA, 25 bp, Homo sapien
cttttgatgacttgttggtaaattg

SEQ ID NO: 3180552 - DNA, 25 bp, Homo sapien
ttgatgacttgttggtaaattggca

SEQ ID NO: 3180553 - DNA, 25 bp, Homo sapien
tttgatgacttgttggtaaattggc

SEQ ID NO: 3180554 - DNA, 25 bp, Homo sapien
gcatactctgtgaccactcttagga

SEQ ID NO: 3180555 - DNA, 25 bp, Homo sapien
ctgctgacgtgcagccaatggagct

SEQ ID NO: 3180556 - DNA, 25 bp, Homo sapien
catgcaagtagacaggtgggcgaac

SEQ ID NO: 3180557 - DNA, 25 bp, Homo sapien
tagtcatcattcctgttgctccggg

SEQ ID NO: 3180558 - DNA, 25 bp, Homo sapien
caaatatcagcttacaaaacctaaa

SEQ ID NO: 3180559 - DNA, 25 bp, Homo sapien
gcaaatatcagcttacaaaacctaa

SEQ ID NO: 3180560 - DNA, 25 bp, Homo sapien
tactgggccagaagcattaatccga

SEQ ID NO: 3180561 - DNA, 25 bp, Homo sapien
gataggtcagcctgttttgtcccaa

SEQ ID NO: 3180562 - DNA, 25 bp, Homo sapien
cacttagaacagaggctggatatag

SEQ ID NO: 3180563 - DNA, 25 bp, Homo sapien
tactggaagttacctgacctcccac

SEQ ID NO: 3180564 - DNA, 25 bp, Homo sapien
cataacaaggatcgctcgcctaaga

SEQ ID NO: 3180565 - DNA, 25 bp, Homo sapien
catccattccctgctgagagacttt

SEQ ID NO: 3180566 - DNA, 25 bp, Homo sapien
catggtgtcaaagagagtggtaatc

SEQ ID NO: 3180567 - DNA, 25 bp, Homo sapien
gagtgtctcgatagcgattcagttc

SEQ ID NO: 3180568 - DNA, 25 bp, Homo sapien
gtttcaaactctgggtgtcctctac

SEQ ID NO: 3180569 - DNA, 25 bp, Homo sapien
tcctctacaatctgcagaggtgcag

SEQ ID NO: 3180570 - DNA, 25 bp, Homo sapien
caatctgcagaggtgcagaacatag

SEQ ID NO: 3180571 - DNA, 25 bp, Homo sapien
tgggtgtcctctacaatctgcagag

SEQ ID NO: 3180572 - DNA, 25 bp, Homo sapien
ttaataccagtgttctttacaggat

SEQ ID NO: 3180573 - DNA, 25 bp, Homo sapien
tttaataccagtgttctttacagga

SEQ ID NO: 3180574 - DNA, 25 bp, Homo sapien
atttaataccagtgttctttacagg

SEQ ID NO: 3180575 - DNA, 25 bp, Homo sapien
tactttattagagagcaacggcatg

SEQ ID NO: 3180576 - DNA, 25 bp, Homo sapien
tacaaacattcttgatcaccccaag

SEQ ID NO: 3180577 - DNA, 25 bp, Homo sapien
tccaatggagattaagggatggcag

SEQ ID NO: 3180578 - DNA, 25 bp, Homo sapien
ggatggcagagacgatcaaaccctt

SEQ ID NO: 3180579 - DNA, 25 bp, Homo sapien
tatttactccaattgtcacgtaagt

SEQ ID NO: 3180580 - DNA, 25 bp, Homo sapien
ctttatttactccaattgtcacgta

SEQ ID NO: 3180581 - DNA, 25 bp, Homo sapien
ttgtcacgtaagtgtctgtgctctg

SEQ ID NO: 3180582 - DNA, 25 bp, Homo sapien
actccaattgtcacgtaagtgtctg

SEQ ID NO: 3180583 - DNA, 25 bp, Homo sapien
gaagagtcataacaggcacaccaag

SEQ ID NO: 3180584 - DNA, 25 bp, Homo sapien
cttttggaagagtcataacaggcac

SEQ ID NO: 3180585 - DNA, 25 bp, Homo sapien
cctattctgattctctgctgtcaac

SEQ ID NO: 3180586 - DNA, 25 bp, Homo sapien
ccaagttttcctattctgattctct

SEQ ID NO: 3180587 - DNA, 25 bp, Homo sapien
gccttaatgaaatcgtagataacta

SEQ ID NO: 3180588 - DNA, 25 bp, Homo sapien
aatgaaatcgtagataactatgtaa

SEQ ID NO: 3180589 - DNA, 25 bp, Homo sapien
ccagccttaatgaaatcgtagataa

SEQ ID NO: 3180590 - DNA, 25 bp, Homo sapien
cttaatgaaatcgtagataactatg

SEQ ID NO: 3180591 - DNA, 25 bp, Homo sapien
ctctctaactccaggcagtattatc

SEQ ID NO: 3180592 - DNA, 25 bp, Homo sapien
caggcagtattatcccaacccttat

SEQ ID NO: 3180593 - DNA, 25 bp, Homo sapien
aacccttatgcttgcctgacactct

SEQ ID NO: 3180594 - DNA, 25 bp, Homo sapien
tatcccaacccttatgcttgcctga

SEQ ID NO: 3180595 - DNA, 25 bp, Homo sapien
ccaaagttatttcataaacggatat

SEQ ID NO: 3180596 - DNA, 25 bp, Homo sapien
ttatttcataaacggatatgctaga

SEQ ID NO: 3180597 - DNA, 25 bp, Homo sapien
aaagttatttcataaacggatatgc

SEQ ID NO: 3180598 - DNA, 25 bp, Homo sapien
ttcataaacggatatgctagattta

SEQ ID NO: 3180599 - DNA, 25 bp, Homo sapien
tcacttgttttctttagctggttat

SEQ ID NO: 3180600 - DNA, 25 bp, Homo sapien
tgttttctttagctggttattgttg

SEQ ID NO: 3180601 - DNA, 25 bp, Homo sapien
ttcttcacttgttttctttagctgg

SEQ ID NO: 3180602 - DNA, 25 bp, Homo sapien
tttctttagctggttattgttgctg

SEQ ID NO: 3180603 - DNA, 25 bp, Homo sapien
taagacacgttcttctgatttatgc

SEQ ID NO: 3180604 - DNA, 25 bp, Homo sapien
ttctaagacacgttcttctgattta

SEQ ID NO: 3180605 - DNA, 25 bp, Homo sapien
atattctaagacacgttcttctgat

SEQ ID NO: 3180606 - DNA, 25 bp, Homo sapien
ctaagacacgttcttctgatttatg

SEQ ID NO: 3180607 - DNA, 25 bp, Homo sapien
cagtgacagtcaaaagcaaccaaat

SEQ ID NO: 3180608 - DNA, 25 bp, Homo sapien
aagcaaccaaattagtctccacaac

SEQ ID NO: 3180609 - DNA, 25 bp, Homo sapien
gtcaaaagcaaccaaattagtctcc

SEQ ID NO: 3180610 - DNA, 25 bp, Homo sapien
taatgatccagtgacagtcaaaagc

SEQ ID NO: 3180611 - DNA, 25 bp, Homo sapien
gaactggaaatgtctgccgaataat

SEQ ID NO: 3180612 - DNA, 25 bp, Homo sapien
ttgccacggaaacaccgctgactta

SEQ ID NO: 3180613 - DNA, 25 bp, Homo sapien
tgaagatattcgatggttgccacgg

SEQ ID NO: 3180614 - DNA, 25 bp, Homo sapien
gatcctttggatcacacaatgttga

SEQ ID NO: 3180615 - DNA, 25 bp, Homo sapien
gatacatgacagacttgccatgctg

SEQ ID NO: 3180616 - DNA, 25 bp, Homo sapien
tgatggtctccaacatggagcgccc

SEQ ID NO: 3180617 - DNA, 25 bp, Homo sapien
gaagcaccgtgtcatatatgtaaag

SEQ ID NO: 3180618 - DNA, 25 bp, Homo sapien
tcttatgaaaagcattagcaagcag

SEQ ID NO: 3180619 - DNA, 25 bp, Homo sapien
ctctccagtcaacccactaactcca

SEQ ID NO: 3180620 - DNA, 25 bp, Homo sapien
tggttccaaggatttcaaagtggac

SEQ ID NO: 3180621 - DNA, 25 bp, Homo sapien
tcgaacacctctgccaagctcttct

SEQ ID NO: 3180622 - DNA, 25 bp, Homo sapien
gctcttctccatagttggttccaag

SEQ ID NO: 3180623 - DNA, 25 bp, Homo sapien
taggaaaaagcgtattaatcagtgt

SEQ ID NO: 3180624 - DNA, 25 bp, Homo sapien
caaaaccatagtataggaaaaagcg

SEQ ID NO: 3180625 - DNA, 25 bp, Homo sapien
agcgtattaatcagtgtgtcttgtc

SEQ ID NO: 3180626 - DNA, 25 bp, Homo sapien
caatcaagcaaaaccatagtatagg

SEQ ID NO: 3180627 - DNA, 25 bp, Homo sapien
atcaaggtctaaattacttgcacac

SEQ ID NO: 3180628 - DNA, 25 bp, Homo sapien
tcatcaaggtctaaattacttgcac

SEQ ID NO: 3180629 - DNA, 25 bp, Homo sapien
catcaaggtctaaattacttgcaca

SEQ ID NO: 3180630 - DNA, 25 bp, Homo sapien
ggctctaataggatacctgagactg

SEQ ID NO: 3180631 - DNA, 25 bp, Homo sapien
tgtacttacagtgtgtcttagtcca

SEQ ID NO: 3180632 - DNA, 25 bp, Homo sapien
tctgggaagttcaagaagcatgaca

SEQ ID NO: 3180633 - DNA, 25 bp, Homo sapien
tcagcaatcagggttttcaagagaa

SEQ ID NO: 3180634 - DNA, 25 bp, Homo sapien
cagattttcccagtagagccctgtg

SEQ ID NO: 3180635 - DNA, 25 bp, Homo sapien
gagccctgtggtctgattctttcat

SEQ ID NO: 3180636 - DNA, 25 bp, Homo sapien
ccagattttcccagtagagccctgt

SEQ ID NO: 3180637 - DNA, 25 bp, Homo sapien
agccctgtggtctgattctttcatt

SEQ ID NO: 3180638 - DNA, 25 bp, Homo sapien
tctccaaaacccaacactacacgta

SEQ ID NO: 3180639 - DNA, 25 bp, Homo sapien
acacgtacttctgggctttcattca

SEQ ID NO: 3180640 - DNA, 25 bp, Homo sapien
aaacccaacactacacgtacttctg

SEQ ID NO: 3180641 - DNA, 25 bp, Homo sapien
cactacacgtacttctgggctttca

SEQ ID NO: 3180642 - DNA, 25 bp, Homo sapien
tgcagtatgagaccagcgaaggacc

SEQ ID NO: 3180643 - DNA, 25 bp, Homo sapien
aatgcagtatgagaccagcgaagga

SEQ ID NO: 3180644 - DNA, 25 bp, Homo sapien
gcagtatgagaccagcgaaggacca

SEQ ID NO: 3180645 - DNA, 25 bp, Homo sapien
gaaatgcagtatgagaccagcgaag

SEQ ID NO: 3180646 - DNA, 25 bp, Homo sapien
tttgcttgtacttctgcaacaactt

SEQ ID NO: 3180647 - DNA, 25 bp, Homo sapien
tttttgcttgtacttctgcaacaac

SEQ ID NO: 3180648 - DNA, 25 bp, Homo sapien
attttttgcttgtacttctgcaaca

SEQ ID NO: 3180649 - DNA, 25 bp, Homo sapien
gcttgtacttctgcaacaacttcat

SEQ ID NO: 3180650 - DNA, 25 bp, Homo sapien
acagctttatgatgtaataagtagc

SEQ ID NO: 3180651 - DNA, 25 bp, Homo sapien
cacatgccctaatgcattccaataa

SEQ ID NO: 3180652 - DNA, 25 bp, Homo sapien
tacggcatcccgataaggtctggat

SEQ ID NO: 3180653 - DNA, 25 bp, Homo sapien
gtctggatttgccacatgccctaat

SEQ ID NO: 3180654 - DNA, 25 bp, Homo sapien
gactagtatgatagtgggcacgtct

SEQ ID NO: 3180655 - DNA, 25 bp, Homo sapien
tatactgactatacaagggagagtc

SEQ ID NO: 3180656 - DNA, 25 bp, Homo sapien
ttgtgcagtagtaaagtcagggcct

SEQ ID NO: 3180657 - DNA, 25 bp, Homo sapien
tcctggattggatactagacagcct

SEQ ID NO: 3180658 - DNA, 25 bp, Homo sapien
cggaaggttaatttcttggcctgca

SEQ ID NO: 3180659 - DNA, 25 bp, Homo sapien
tcaggcaacataagtaaatcctctt

SEQ ID NO: 3180660 - DNA, 25 bp, Homo sapien
ctaaaaatccatcaaattatcaaga

SEQ ID NO: 3180661 - DNA, 25 bp, Homo sapien
tactttcttcgtgtttatctcaggc

SEQ ID NO: 3180662 - DNA, 25 bp, Homo sapien
tgtacagttgttcttcttcttaata

SEQ ID NO: 3180663 - DNA, 25 bp, Homo sapien
atacatcctttgataacagcatttg

SEQ ID NO: 3180664 - DNA, 25 bp, Homo sapien
ttttttccgcctgactcatacatcc

SEQ ID NO: 3180665 - DNA, 25 bp, Homo sapien
tctccttttttttccgcctgactca

SEQ ID NO: 3180666 - DNA, 25 bp, Homo sapien
tgaaagataagacaactttggtcat

SEQ ID NO: 3180667 - DNA, 25 bp, Homo sapien
gaaagataagacaactttggtcatt

SEQ ID NO: 3180668 - DNA, 25 bp, Homo sapien
ctgaaagataagacaactttggtca

SEQ ID NO: 3180669 - DNA, 25 bp, Homo sapien
aaagataagacaactttggtcattt

SEQ ID NO: 3180670 - DNA, 25 bp, Homo sapien
tagaaccactccacgcatgttattc

SEQ ID NO: 3180671 - DNA, 25 bp, Homo sapien
gtcagtcagtgacccattcagacct

SEQ ID NO: 3180672 - DNA, 25 bp, Homo sapien
tattctccaatttcttgtcagtcag

SEQ ID NO: 3180673 - DNA, 25 bp, Homo sapien
gaacagttactacacgtagaaccac

SEQ ID NO: 3180674 - DNA, 25 bp, Homo sapien
ccacacgtagaatcgctccttgcat

SEQ ID NO: 3180675 - DNA, 25 bp, Homo sapien
gcagttaccacacgtagaatcgctc

SEQ ID NO: 3180676 - DNA, 25 bp, Homo sapien
gttaccacacgtagaatcgctcctt

SEQ ID NO: 3180677 - DNA, 25 bp, Homo sapien
cagagcagttaccacacgtagaatc

SEQ ID NO: 3180678 - DNA, 25 bp, Homo sapien
ttgagtagaagaagcttgcaaggcc

SEQ ID NO: 3180679 - DNA, 25 bp, Homo sapien
taagagtcatgaaggtgaacctggg

SEQ ID NO: 3180680 - DNA, 25 bp, Homo sapien
taaagcctcaagattcgggagttgc

SEQ ID NO: 3180681 - DNA, 25 bp, Homo sapien
tgttactcaactggcacccaactga

SEQ ID NO: 3180682 - DNA, 25 bp, Homo sapien
taatggagggcaacgaagccatatt

SEQ ID NO: 3180683 - DNA, 25 bp, Homo sapien
tcagcaactggaacaaacgaagctt

SEQ ID NO: 3180684 - DNA, 25 bp, Homo sapien
cccagatgacaggagattatggctt

SEQ ID NO: 3180685 - DNA, 25 bp, Homo sapien
tgacagatgctctaagcacaagcct

SEQ ID NO: 3180686 - DNA, 25 bp, Homo sapien
actggtactgacaggacaacaaaga

SEQ ID NO: 3180687 - DNA, 25 bp, Homo sapien
tggtactgacaggacaacaaagaaa

SEQ ID NO: 3180688 - DNA, 25 bp, Homo sapien
gtactgacaggacaacaaagaaata

SEQ ID NO: 3180689 - DNA, 25 bp, Homo sapien
aactggtactgacaggacaacaaag

SEQ ID NO: 3180690 - DNA, 25 bp, Homo sapien
tgtgggcttccgtatttgtgatccg

SEQ ID NO: 3180691 - DNA, 25 bp, Homo sapien
tgtgatccggtgctacgtaaatttc

SEQ ID NO: 3180692 - DNA, 25 bp, Homo sapien
aacccaggtagttagataaggcatc

SEQ ID NO: 3180693 - DNA, 25 bp, Homo sapien
atcaatggagaagccctggtatttc

SEQ ID NO: 3180694 - DNA, 25 bp, Homo sapien
ttgatcccagcagctagggcacggg

SEQ ID NO: 3180695 - DNA, 25 bp, Homo sapien
tctggcagatacaatcaactgacac

SEQ ID NO: 3180696 - DNA, 25 bp, Homo sapien
gacacatcagtaacacttgatatct

SEQ ID NO: 3180697 - DNA, 25 bp, Homo sapien
cagcagtggcagtaggcgattcttg

SEQ ID NO: 3180698 - DNA, 25 bp, Homo sapien
gcttctctatcattgcacctagtgc

SEQ ID NO: 3180699 - DNA, 25 bp, Homo sapien
tctcataaattttggcctgctttcc

SEQ ID NO: 3180700 - DNA, 25 bp, Homo sapien
taagtgtctagtttaacctctgtgt

SEQ ID NO: 3180701 - DNA, 25 bp, Homo sapien
tgtgtctgtcagtagacgtccttca

SEQ ID NO: 3180702 - DNA, 25 bp, Homo sapien
gagagtagtagacgtcattgatccc

SEQ ID NO: 3180703 - DNA, 25 bp, Homo sapien
caatgcaagcccatagagagagatc

SEQ ID NO: 3180704 - DNA, 25 bp, Homo sapien
tgtaacgtgtcgtaaagtccaccac

SEQ ID NO: 3180705 - DNA, 25 bp, Homo sapien
caagaggtagaccagtagacccacc

SEQ ID NO: 3180706 - DNA, 25 bp, Homo sapien
tagaagttagcaagtcagatgaagg

SEQ ID NO: 3180707 - DNA, 25 bp, Homo sapien
tgtctccattgtagcaaacatcctc

SEQ ID NO: 3180708 - DNA, 25 bp, Homo sapien
tgtgtagagcttgcaagagactatc

SEQ ID NO: 3180709 - DNA, 25 bp, Homo sapien
gcaatagtctcaagtaaggaatgca

SEQ ID NO: 3180710 - DNA, 25 bp, Homo sapien
tattaatgaaagaactaaaagtgtc

SEQ ID NO: 3180711 - DNA, 25 bp, Homo sapien
ctacttagatagtgtggattaaata

SEQ ID NO: 3180712 - DNA, 25 bp, Homo sapien
cactaattgcttaggaaagttctac

SEQ ID NO: 3180713 - DNA, 25 bp, Homo sapien
tacagtaacaggtaagcttagagcc

SEQ ID NO: 3180714 - DNA, 25 bp, Homo sapien
caatgcgtgtaatagtgaggaaagc

SEQ ID NO: 3180715 - DNA, 25 bp, Homo sapien
cagagtcgtgtacgggacttccccg

SEQ ID NO: 3180716 - DNA, 25 bp, Homo sapien
tcatcattcgggtagccagagtcgt

SEQ ID NO: 3180717 - DNA, 25 bp, Homo sapien
gaaagcagcgaggtttgccgtgtaa

SEQ ID NO: 3180718 - DNA, 25 bp, Homo sapien
caaaattgcatgtgaaacgcagcct

SEQ ID NO: 3180719 - DNA, 25 bp, Homo sapien
gcagcctaaacagagtcatttccag

SEQ ID NO: 3180720 - DNA, 25 bp, Homo sapien
tgcattagacacctttaacggcctc

SEQ ID NO: 3180721 - DNA, 25 bp, Homo sapien
tcctctccagagataaagttgtctt

SEQ ID NO: 3180722 - DNA, 25 bp, Homo sapien
cattgcttcggttgatcatccgcca

SEQ ID NO: 3180723 - DNA, 25 bp, Homo sapien
tccgccacatttgggaatacatgct

SEQ ID NO: 3180724 - DNA, 25 bp, Homo sapien
catataccgcagagtctaggactgt

SEQ ID NO: 3180725 - DNA, 25 bp, Homo sapien
ctaggactgtgccataagggatttc

SEQ ID NO: 3180726 - DNA, 25 bp, Homo sapien
gctctcagaagaatgatatcaatat

SEQ ID NO: 3180727 - DNA, 25 bp, Homo sapien
taaagacatcattaatacttgaaga

SEQ ID NO: 3180728 - DNA, 25 bp, Homo sapien
gaggatagaggccattgctaacatc

SEQ ID NO: 3180729 - DNA, 25 bp, Homo sapien
tgactgcaagaattactaggctgac

SEQ ID NO: 3180730 - DNA, 25 bp, Homo sapien
tagaaatgagtgtgtaaccccttaa

SEQ ID NO: 3180731 - DNA, 25 bp, Homo sapien
caggatctacgcaagcatggcttca

SEQ ID NO: 3180732 - DNA, 25 bp, Homo sapien
gatcactgcttctaggaaaggagaa

SEQ ID NO: 3180733 - DNA, 25 bp, Homo sapien
gagaccactcgcattttggcaaatg

SEQ ID NO: 3180734 - DNA, 25 bp, Homo sapien
tcttaaattaggacttggtgttggc

SEQ ID NO: 3180735 - DNA, 25 bp, Homo sapien
caatatcactcgctgagcatggcag

SEQ ID NO: 3180736 - DNA, 25 bp, Homo sapien
gagcatggcagttttcaattactaa

SEQ ID NO: 3180737 - DNA, 25 bp, Homo sapien
tggtgttggcaatatcactcgctga

SEQ ID NO: 3180738 - DNA, 25 bp, Homo sapien
tatccccgatcagcaacagtatttc

SEQ ID NO: 3180739 - DNA, 25 bp, Homo sapien
tgtgaaaaaacatctcggtaaggac

SEQ ID NO: 3180740 - DNA, 25 bp, Homo sapien
ccaatacagctgcatcccatacgaa

SEQ ID NO: 3180741 - DNA, 25 bp, Homo sapien
caatctgggtcattgatagccacat

SEQ ID NO: 3180742 - DNA, 25 bp, Homo sapien
ttgttgttgttgtttattgtgcttc

SEQ ID NO: 3180743 - DNA, 25 bp, Homo sapien
ttttgttgttgttgtttattgtgct

SEQ ID NO: 3180744 - DNA, 25 bp, Homo sapien
gttgttgttgtttattgtgcttctc

SEQ ID NO: 3180745 - DNA, 25 bp, Homo sapien
ctacttataactatcttttttgttg

SEQ ID NO: 3180746 - DNA, 25 bp, Homo sapien
cacactgatgatcgccaggtcctgc

SEQ ID NO: 3180747 - DNA, 25 bp, Homo sapien
aatcaggatgcagggtgtcgttacc

SEQ ID NO: 3180748 - DNA, 25 bp, Homo sapien
tagcgagaggttttgggtgataaat

SEQ ID NO: 3180749 - DNA, 25 bp, Homo sapien
gggtgataaattaatgtggcacatg

SEQ ID NO: 3180750 - DNA, 25 bp, Homo sapien
ggattccagaggctagtccttatct

SEQ ID NO: 3180751 - DNA, 25 bp, Homo sapien
tagatgtgtattatatgagaaaaga

SEQ ID NO: 3180752 - DNA, 25 bp, Homo sapien
gctagtccttatctaaatagatgtg

SEQ ID NO: 3180753 - DNA, 25 bp, Homo sapien
gctctgaaataggaatagcatattc

SEQ ID NO: 3180754 - DNA, 25 bp, Homo sapien
aagtcctcagtgacctacaaagaga

SEQ ID NO: 3180755 - DNA, 25 bp, Homo sapien
agtcctcagtgacctacaaagagac

SEQ ID NO: 3180756 - DNA, 25 bp, Homo sapien
cataaagcaagtcctcagtgaccta

SEQ ID NO: 3180757 - DNA, 25 bp, Homo sapien
aagcaagtcctcagtgacctacaaa

SEQ ID NO: 3180758 - DNA, 25 bp, Homo sapien
catgcactgaaggtcaaaagagttc

SEQ ID NO: 3180759 - DNA, 25 bp, Homo sapien
taatcaatgataacagggagaagct

SEQ ID NO: 3180760 - DNA, 25 bp, Homo sapien
tagaggtagccagttttcagagaaa

SEQ ID NO: 3180761 - DNA, 25 bp, Homo sapien
aaactaggacgtagcattctgcata

SEQ ID NO: 3180762 - DNA, 25 bp, Homo sapien
tcattctgacaaatatgtgtcagaa

SEQ ID NO: 3180763 - DNA, 25 bp, Homo sapien
tagctgagcagtcaaagtatgaact

SEQ ID NO: 3180764 - DNA, 25 bp, Homo sapien
tgcatacaaatggaagttttagctg

SEQ ID NO: 3180765 - DNA, 25 bp, Homo sapien
ctgacaacataatgtgtgaagcaga

SEQ ID NO: 3180766 - DNA, 25 bp, Homo sapien
ttgactaaaatccttccagtgcttc

SEQ ID NO: 3180767 - DNA, 25 bp, Homo sapien
cttttgactaaaatccttccagtgc

SEQ ID NO: 3180768 - DNA, 25 bp, Homo sapien
ttttgactaaaatccttccagtgct

SEQ ID NO: 3180769 - DNA, 25 bp, Homo sapien
gactaaaatccttccagtgcttcat

SEQ ID NO: 3180770 - DNA, 25 bp, Homo sapien
ctgcagcaacgtcttatagcctgag

SEQ ID NO: 3180771 - DNA, 25 bp, Homo sapien
gcagcaacgtcttatagcctgagtg

SEQ ID NO: 3180772 - DNA, 25 bp, Homo sapien
tgcagcaacgtcttatagcctgagt

SEQ ID NO: 3180773 - DNA, 25 bp, Homo sapien
cttcttctttcacctcaacttgcct

SEQ ID NO: 3180774 - DNA, 25 bp, Homo sapien
caaatgctttttgcaataacagtat

SEQ ID NO: 3180775 - DNA, 25 bp, Homo sapien
tctttcacctcaacttgccttttaa

SEQ ID NO: 3180776 - DNA, 25 bp, Homo sapien
tcagcaacaggtataaaacactatg

SEQ ID NO: 3180777 - DNA, 25 bp, Homo sapien
gactgaccgtaatagcataggatga

SEQ ID NO: 3180778 - DNA, 25 bp, Homo sapien
ggatgaatgaagttctatcagcaac

SEQ ID NO: 3180779 - DNA, 25 bp, Homo sapien
tggtaatgactgaccgtaatagcat

SEQ ID NO: 3180780 - DNA, 25 bp, Homo sapien
gacaatttttggtcctttgacacaa

SEQ ID NO: 3180781 - DNA, 25 bp, Homo sapien
tgacacaaaaatacctgttgctcat

SEQ ID NO: 3180782 - DNA, 25 bp, Homo sapien
cctttgacacaaaaatacctgttgc

SEQ ID NO: 3180783 - DNA, 25 bp, Homo sapien
ggacaatttttggtcctttgacaca

SEQ ID NO: 3180784 - DNA, 25 bp, Homo sapien
tctcatgaaggctgcaatcaataat

SEQ ID NO: 3180785 - DNA, 25 bp, Homo sapien
aataatgccacaggagcatttcccc

SEQ ID NO: 3180786 - DNA, 25 bp, Homo sapien
gaagcaacacagtaaatcattgtcc

SEQ ID NO: 3180787 - DNA, 25 bp, Homo sapien
cagtaaatcattgtccttctcatga

SEQ ID NO: 3180788 - DNA, 25 bp, Homo sapien
acggaaggccctgtcactgtacagc

SEQ ID NO: 3180789 - DNA, 25 bp, Homo sapien
gatgccacggaaggccctgtcactg

SEQ ID NO: 3180790 - DNA, 25 bp, Homo sapien
caagttgagacagaggatgccacgg

SEQ ID NO: 3180791 - DNA, 25 bp, Homo sapien
gacagaggatgccacggaaggccct

SEQ ID NO: 3180792 - DNA, 25 bp, Homo sapien
taagaccacacgtgacgatctcagt

SEQ ID NO: 3180793 - DNA, 25 bp, Homo sapien
tgtgaattaataagaccacacgtga

SEQ ID NO: 3180794 - DNA, 25 bp, Homo sapien
tgagggtcattgtggtgtgaattaa

SEQ ID NO: 3180795 - DNA, 25 bp, Homo sapien
cgatctcagtgagcaagatgcatga

SEQ ID NO: 3180796 - DNA, 25 bp, Homo sapien
caccattctgctgaagctccaggat

SEQ ID NO: 3180797 - DNA, 25 bp, Homo sapien
accattctgctgaagctccaggatc

SEQ ID NO: 3180798 - DNA, 25 bp, Homo sapien
tcaccattctgctgaagctccagga

SEQ ID NO: 3180799 - DNA, 25 bp, Homo sapien
gtcaccattctgctgaagctccagg

SEQ ID NO: 3180800 - DNA, 25 bp, Homo sapien
tgatggaacccgggagcctttcctc

SEQ ID NO: 3180801 - DNA, 25 bp, Homo sapien
agctctttatgtccagggcgcctcc

SEQ ID NO: 3180802 - DNA, 25 bp, Homo sapien
cgtctccagcatggctatgaagcag

SEQ ID NO: 3180803 - DNA, 25 bp, Homo sapien
ctttgtgtccactgacgagtacagg

SEQ ID NO: 3180804 - DNA, 25 bp, Homo sapien
tcattacccagattgagccccaggg

SEQ ID NO: 3180805 - DNA, 25 bp, Homo sapien
tatttacacgtctatggaggtgctc

SEQ ID NO: 3180806 - DNA, 25 bp, Homo sapien
cctaaaagggccagttcggtgctca

SEQ ID NO: 3180807 - DNA, 25 bp, Homo sapien
gaggtgcctcggtctggatcattac

SEQ ID NO: 3180808 - DNA, 25 bp, Homo sapien
catcaatagttcttaagggctccca

SEQ ID NO: 3180809 - DNA, 25 bp, Homo sapien
tttaacacaatagaggcttctgcca

SEQ ID NO: 3180810 - DNA, 25 bp, Homo sapien
tctaactgaaaagaacccctgcact

SEQ ID NO: 3180811 - DNA, 25 bp, Homo sapien
gttaaaggacactcaacagcagtgg

SEQ ID NO: 3180812 - DNA, 25 bp, Homo sapien
gacatcgtggtctactgtgcctctg

SEQ ID NO: 3180813 - DNA, 25 bp, Homo sapien
ctctctgacacaaagcccatattcc

SEQ ID NO: 3180814 - DNA, 25 bp, Homo sapien
tctctgacacaaagcccatattcca

SEQ ID NO: 3180815 - DNA, 25 bp, Homo sapien
ccagacatcgtggtctactgtgcct

SEQ ID NO: 3180816 - DNA, 25 bp, Homo sapien
tgtcaccacattgaagggcagtttg

SEQ ID NO: 3180817 - DNA, 25 bp, Homo sapien
ggagacactggacctatttcaagat

SEQ ID NO: 3180818 - DNA, 25 bp, Homo sapien
gctgcctggttctagtgagtctaaa

SEQ ID NO: 3180819 - DNA, 25 bp, Homo sapien
caattctgagtattcgccatgtggg

SEQ ID NO: 3180820 - DNA, 25 bp, Homo sapien
aagttgtccctatgcaaacaacagg

SEQ ID NO: 3180821 - DNA, 25 bp, Homo sapien
cagtctgtgtcccatttgtaacgct

SEQ ID NO: 3180822 - DNA, 25 bp, Homo sapien
tgtaggtgtgggttattaaagtgtc

SEQ ID NO: 3180823 - DNA, 25 bp, Homo sapien
aacaggttgaatattgtaggtgtgg

SEQ ID NO: 3180824 - DNA, 25 bp, Homo sapien
gttcttttgatgtgtttcagggcac

SEQ ID NO: 3180825 - DNA, 25 bp, Homo sapien
ttgtagaacttggttcttttgatgt

SEQ ID NO: 3180826 - DNA, 25 bp, Homo sapien
tttgtagaacttggttcttttgatg

SEQ ID NO: 3180827 - DNA, 25 bp, Homo sapien
cttttgatgtgtttcagggcacgcc

SEQ ID NO: 3180828 - DNA, 25 bp, Homo sapien
attccttctttcagatattgtagtt

SEQ ID NO: 3180829 - DNA, 25 bp, Homo sapien
ttccttctttcagatattgtagttt

SEQ ID NO: 3180830 - DNA, 25 bp, Homo sapien
tccttctttcagatattgtagtttc

SEQ ID NO: 3180831 - DNA, 25 bp, Homo sapien
ccttctttcagatattgtagtttca

SEQ ID NO: 3180832 - DNA, 25 bp, Homo sapien
tgggtggcgggtactctgagtctct

SEQ ID NO: 3180833 - DNA, 25 bp, Homo sapien
tgcttggtctgacatttcagcaaca

SEQ ID NO: 3180834 - DNA, 25 bp, Homo sapien
gcttggtctgacatttcagcaacag

SEQ ID NO: 3180835 - DNA, 25 bp, Homo sapien
tcagtgcctttgaccttgggtggcg

SEQ ID NO: 3180836 - DNA, 25 bp, Homo sapien
ctgtctcccattcaagtattaacca

SEQ ID NO: 3180837 - DNA, 25 bp, Homo sapien
cattcaagtattaaccaggcgcaaa

SEQ ID NO: 3180838 - DNA, 25 bp, Homo sapien
ccattcaagtattaaccaggcgcaa

SEQ ID NO: 3180839 - DNA, 25 bp, Homo sapien
tcaagtattaaccaggcgcaaacct

SEQ ID NO: 3180840 - DNA, 25 bp, Homo sapien
cactcggagatcacacaccaggtcg

SEQ ID NO: 3180841 - DNA, 25 bp, Homo sapien
agatcacacaccaggtcgcgtgcaa

SEQ ID NO: 3180842 - DNA, 25 bp, Homo sapien
aggctcaggatcggaggcagcactg

SEQ ID NO: 3180843 - DNA, 25 bp, Homo sapien
ccgggtctcttctgcaacgtcttat

SEQ ID NO: 3180844 - DNA, 25 bp, Homo sapien
tttgcgccatcatcgctgtcagggc

SEQ ID NO: 3180845 - DNA, 25 bp, Homo sapien
tcagggcgctgtcctcgaaagtcga

SEQ ID NO: 3180846 - DNA, 25 bp, Homo sapien
taacattgcgcagctggtcgaaggc

SEQ ID NO: 3180847 - DNA, 25 bp, Homo sapien
tgtagcagctcggacaaggcgttga

SEQ ID NO: 3180848 - DNA, 25 bp, Homo sapien
atctgaagccaagtcgttgctaaac

SEQ ID NO: 3180849 - DNA, 25 bp, Homo sapien
ggcttcccgcgcactgggaaagggc

SEQ ID NO: 3180850 - DNA, 25 bp, Homo sapien
gttgctaaacaacgaccatcgcaga

SEQ ID NO: 3180851 - DNA, 25 bp, Homo sapien
acgaccatcgcagagcaaaaattaa

SEQ ID NO: 3180852 - DNA, 25 bp, Homo sapien
ttttagcagcgtattggcagcaggg

SEQ ID NO: 3180853 - DNA, 25 bp, Homo sapien
taaaagacgccaacgttctcgcgat

SEQ ID NO: 3180854 - DNA, 25 bp, Homo sapien
tgagtgcgcaacacacaaggatgga

SEQ ID NO: 3180855 - DNA, 25 bp, Homo sapien
tctcgcgatcggatgcacatactgg

SEQ ID NO: 3180856 - DNA, 25 bp, Homo sapien
taagcatgcttaacttgcacacata

SEQ ID NO: 3180857 - DNA, 25 bp, Homo sapien
tttgtttgggtgatattaagcatgc

SEQ ID NO: 3180858 - DNA, 25 bp, Homo sapien
gtatcttggatacttggatctgact

SEQ ID NO: 3180859 - DNA, 25 bp, Homo sapien
cacacatagttgattcctttgctag

SEQ ID NO: 3180860 - DNA, 25 bp, Homo sapien
agacgctccgcaccgcggccaggag

SEQ ID NO: 3180861 - DNA, 25 bp, Homo sapien
gcctctgccagaccctctattgtca

SEQ ID NO: 3180862 - DNA, 25 bp, Homo sapien
gccagaccctctattgtcaaccgtt

SEQ ID NO: 3180863 - DNA, 25 bp, Homo sapien
cgctccagacgctccgcaccgcggc

SEQ ID NO: 3180864 - DNA, 25 bp, Homo sapien
atgatggtgttaaatgtggccgcac

SEQ ID NO: 3180865 - DNA, 25 bp, Homo sapien
gatggtgttaaatgtggccgcacag

SEQ ID NO: 3180866 - DNA, 25 bp, Homo sapien
aaatgtggccgcacagctccccggg

SEQ ID NO: 3180867 - DNA, 25 bp, Homo sapien
ggtgttaaatgtggccgcacagctc

SEQ ID NO: 3180868 - DNA, 25 bp, Homo sapien
tttggctgaataaccaagcctcctt

SEQ ID NO: 3180869 - DNA, 25 bp, Homo sapien
ttggctgaataaccaagcctccttg

SEQ ID NO: 3180870 - DNA, 25 bp, Homo sapien
tgctgtgttccctgtctaggatgaa

SEQ ID NO: 3180871 - DNA, 25 bp, Homo sapien
gatccggtttccctagctctctgat

SEQ ID NO: 3180872 - DNA, 25 bp, Homo sapien
aaggggtgatgcctgcgctgctcct

SEQ ID NO: 3180873 - DNA, 25 bp, Homo sapien
cactgacaggagatccggtttccct

SEQ ID NO: 3180874 - DNA, 25 bp, Homo sapien
actgcagggagcttcagatgctgcc

SEQ ID NO: 3180875 - DNA, 25 bp, Homo sapien
taactagctggtgacagaaagctct

SEQ ID NO: 3180876 - DNA, 25 bp, Homo sapien
taatcacaggatcgaactgcaggga

SEQ ID NO: 3180877 - DNA, 25 bp, Homo sapien
gatgctgcctaagaccagaaaggca

SEQ ID NO: 3180878 - DNA, 25 bp, Homo sapien
tgaccccagtctgttgctgaacgac

SEQ ID NO: 3180879 - DNA, 25 bp, Homo sapien
gaccccagtctgttgctgaacgaca

SEQ ID NO: 3180880 - DNA, 25 bp, Homo sapien
gctgaccccagtctgttgctgaacg

SEQ ID NO: 3180881 - DNA, 25 bp, Homo sapien
tgtgctgaccccagtctgttgctga

SEQ ID NO: 3180882 - DNA, 25 bp, Homo sapien
ggaaggtcctcccattcttcaccag

SEQ ID NO: 3180883 - DNA, 25 bp, Homo sapien
gtggggaaggtcctcccattcttca

SEQ ID NO: 3180884 - DNA, 25 bp, Homo sapien
tcttcaccaggcaccacttccaaag

SEQ ID NO: 3180885 - DNA, 25 bp, Homo sapien
cgacaagtggggaaggtcctcccat

SEQ ID NO: 3180886 - DNA, 25 bp, Homo sapien
cacctttgtatgagggtgacaggac

SEQ ID NO: 3180887 - DNA, 25 bp, Homo sapien
cattccgacaatccctgccagttat

SEQ ID NO: 3180888 - DNA, 25 bp, Homo sapien
ccagttatgctctgggtccgatcct

SEQ ID NO: 3180889 - DNA, 25 bp, Homo sapien
gacctttgggaagtacattccgaca

SEQ ID NO: 3180890 - DNA, 25 bp, Homo sapien
atgtgatagtaacgaagaaattctg

SEQ ID NO: 3180891 - DNA, 25 bp, Homo sapien
tatgtgatagtaacgaagaaattct

SEQ ID NO: 3180892 - DNA, 25 bp, Homo sapien
actgcctttgtttatgagaaggaag

SEQ ID NO: 3180893 - DNA, 25 bp, Homo sapien
catatgtgatagtaacgaagaaatt

SEQ ID NO: 3180894 - DNA, 25 bp, Homo sapien
tggggaaataacatttcttctgtaa

SEQ ID NO: 3180895 - DNA, 25 bp, Homo sapien
cagaaactctggggaaataacattt

SEQ ID NO: 3180896 - DNA, 25 bp, Homo sapien
catttcttctgtaatacacttccat

SEQ ID NO: 3180897 - DNA, 25 bp, Homo sapien
tgcattgttgatcagaaactctggg

SEQ ID NO: 3180898 - DNA, 25 bp, Homo sapien
aattcttcaccaagaagggtcctgc

SEQ ID NO: 3180899 - DNA, 25 bp, Homo sapien
gatgtaaataaactgtctcggaaaa

SEQ ID NO: 3180900 - DNA, 25 bp, Homo sapien
gttacatgggtcctttgagaaccac

SEQ ID NO: 3180901 - DNA, 25 bp, Homo sapien
tgctttgccatccaagttacatggg

SEQ ID NO: 3180902 - DNA, 25 bp, Homo sapien
tatttgctacctaaaattgtcagca

SEQ ID NO: 3180903 - DNA, 25 bp, Homo sapien
gggtatttgctacctaaaattgtca

SEQ ID NO: 3180904 - DNA, 25 bp, Homo sapien
tcctcctcagggtatttgctaccta

SEQ ID NO: 3180905 - DNA, 25 bp, Homo sapien
cctcagggtatttgctacctaaaat

SEQ ID NO: 3180906 - DNA, 25 bp, Homo sapien
attggggaagttgtcttggatagta

SEQ ID NO: 3180907 - DNA, 25 bp, Homo sapien
gaagttgtcttggatagtatcctgc

SEQ ID NO: 3180908 - DNA, 25 bp, Homo sapien
agattggggaagttgtcttggatag

SEQ ID NO: 3180909 - DNA, 25 bp, Homo sapien
gggaagttgtcttggatagtatcct

SEQ ID NO: 3180910 - DNA, 25 bp, Homo sapien
tctttggtgcagtcaagggatagcc

SEQ ID NO: 3180911 - DNA, 25 bp, Homo sapien
tgtacttacaccaatgacactgtgg

SEQ ID NO: 3180912 - DNA, 25 bp, Homo sapien
tagccatgtgatttaaacctgaccg

SEQ ID NO: 3180913 - DNA, 25 bp, Homo sapien
aacctgaccgattacagactttctc

SEQ ID NO: 3180914 - DNA, 25 bp, Homo sapien
gctcctagaggatgtatatgcattt

SEQ ID NO: 3180915 - DNA, 25 bp, Homo sapien
gttgcgatggtttgttttacttctg

SEQ ID NO: 3180916 - DNA, 25 bp, Homo sapien
gactcttttaatcttgtaagaacca

SEQ ID NO: 3180917 - DNA, 25 bp, Homo sapien
gaaccagatccagcaatgaatcaca

SEQ ID NO: 3180918 - DNA, 25 bp, Homo sapien
gaaagaggcaagtttcagctaaagc

SEQ ID NO: 3180919 - DNA, 25 bp, Homo sapien
tttcagctaaagcagcagtagggag

SEQ ID NO: 3180920 - DNA, 25 bp, Homo sapien
caattttgtgaaatgccaatgtaag

SEQ ID NO: 3180921 - DNA, 25 bp, Homo sapien
aactggaaaatggagtagaacgcct

SEQ ID NO: 3180922 - DNA, 25 bp, Homo sapien
gaacttgctcactatccctacatag

SEQ ID NO: 3180923 - DNA, 25 bp, Homo sapien
tacatagtgtatccggaattgttgg

SEQ ID NO: 3180924 - DNA, 25 bp, Homo sapien
actatccctacatagtgtatccgga

SEQ ID NO: 3180925 - DNA, 25 bp, Homo sapien
cccagggggtttgccactgctggct

SEQ ID NO: 3180926 - DNA, 25 bp, Homo sapien
tggggcgacggtagccgtgccggga

SEQ ID NO: 3180927 - DNA, 25 bp, Homo sapien
gatcttgtagcctcagtgctatgta

SEQ ID NO: 3180928 - DNA, 25 bp, Homo sapien
atttcctagcgtggggcgacggtag

SEQ ID NO: 3180929 - DNA, 25 bp, Homo sapien
ctagcgtggggcgacggtagccgtg

SEQ ID NO: 3180930 - DNA, 25 bp, Homo sapien
tttttaacgttcaatcgctcgcttg

SEQ ID NO: 3180931 - DNA, 25 bp, Homo sapien
gtggagtgcatgctaaggcatcttt

SEQ ID NO: 3180932 - DNA, 25 bp, Homo sapien
aacgttcaatcgctcgcttgttctt

SEQ ID NO: 3180933 - DNA, 25 bp, Homo sapien
aaggcatctttttaacgttcaatcg

SEQ ID NO: 3180934 - DNA, 25 bp, Homo sapien
cccggaagttgacgcggcgcgatcc

SEQ ID NO: 3180935 - DNA, 25 bp, Homo sapien
gcatccgcccggaagttgacgcggc

SEQ ID NO: 3180936 - DNA, 25 bp, Homo sapien
cgtgctggcgggcatccgcccggaa

SEQ ID NO: 3180937 - DNA, 25 bp, Homo sapien
ttgacgcggcgcgatcccagctgag

SEQ ID NO: 3180938 - DNA, 25 bp, Homo sapien
gcgcaggcacgttccccagtataac

SEQ ID NO: 3180939 - DNA, 25 bp, Homo sapien
tgcctcgagaaaggacctgccaggg

SEQ ID NO: 3180940 - DNA, 25 bp, Homo sapien
gaagctccctgtgctaccgtgcccc

SEQ ID NO: 3180941 - DNA, 25 bp, Homo sapien
cagtataaccccctagcgggcctcg

SEQ ID NO: 3180942 - DNA, 25 bp, Homo sapien
gcgcttcattgttaggccgcaacaa

SEQ ID NO: 3180943 - DNA, 25 bp, Homo sapien
ggactgttatggctgcgcttcattg

SEQ ID NO: 3180944 - DNA, 25 bp, Homo sapien
ccgcaacaattagaaggtggacggg

SEQ ID NO: 3180945 - DNA, 25 bp, Homo sapien
tgttaggccgcaacaattagaaggt

SEQ ID NO: 3180946 - DNA, 25 bp, Homo sapien
gtagaaagcaccaccttgcagggat

SEQ ID NO: 3180947 - DNA, 25 bp, Homo sapien
gaaagcaccaccttgcagggatggg

SEQ ID NO: 3180948 - DNA, 25 bp, Homo sapien
ccttgcagggatgggggctttaaat

SEQ ID NO: 3180949 - DNA, 25 bp, Homo sapien
attggtagaaagcaccaccttgcag

SEQ ID NO: 3180950 - DNA, 25 bp, Homo sapien
ctcaaagcgaaaacggtccaggttg

SEQ ID NO: 3180951 - DNA, 25 bp, Homo sapien
agtgtttgccctgctaacttcccct

SEQ ID NO: 3180952 - DNA, 25 bp, Homo sapien
gcttcgggcgcttcctcaatcttat

SEQ ID NO: 3180953 - DNA, 25 bp, Homo sapien
taagagaaattggtgaagaagggcc

SEQ ID NO: 3180954 - DNA, 25 bp, Homo sapien
aaatccttcagttgttccctatagc

SEQ ID NO: 3180955 - DNA, 25 bp, Homo sapien
gaagcttctatggactcgaaatccc

SEQ ID NO: 3180956 - DNA, 25 bp, Homo sapien
cctgaactatctaactacagaggaa

SEQ ID NO: 3180957 - DNA, 25 bp, Homo sapien
aatgataacttgcagaggatctgcc

SEQ ID NO: 3180958 - DNA, 25 bp, Homo sapien
tgccattatttcaatccctccaaac

SEQ ID NO: 3180959 - DNA, 25 bp, Homo sapien
cataaaatatagtaggatctctctt

SEQ ID NO: 3180960 - DNA, 25 bp, Homo sapien
ttcataaaatatagtaggatctctc

SEQ ID NO: 3180961 - DNA, 25 bp, Homo sapien
aaaatatagtaggatctctcttccc

SEQ ID NO: 3180962 - DNA, 25 bp, Homo sapien
ggagtttctggaacactagaatctt

SEQ ID NO: 3180963 - DNA, 25 bp, Homo sapien
ttttctcttgaactgtattggagca

SEQ ID NO: 3180964 - DNA, 25 bp, Homo sapien
attggagcaatttggggaaacgaca

SEQ ID NO: 3180965 - DNA, 25 bp, Homo sapien
ggggaaacgacatcttcactatcag

SEQ ID NO: 3180966 - DNA, 25 bp, Homo sapien
gacatctccatttagacgtctagga

SEQ ID NO: 3180967 - DNA, 25 bp, Homo sapien
aaatccagagttcccctagcctcag

SEQ ID NO: 3180968 - DNA, 25 bp, Homo sapien
tcagacatgtaatctctccccagaa

SEQ ID NO: 3180969 - DNA, 25 bp, Homo sapien
tcaaaaggtgtttgcccacccacag

SEQ ID NO: 3180970 - DNA, 25 bp, Homo sapien
acttgacagacaaaacctagcaggg

SEQ ID NO: 3180971 - DNA, 25 bp, Homo sapien
caactactgagtgaaagctggctag

SEQ ID NO: 3180972 - DNA, 25 bp, Homo sapien
catgcctcaaggtgatatgacacac

SEQ ID NO: 3180973 - DNA, 25 bp, Homo sapien
tgacacactgaggacgacacaagat

SEQ ID NO: 3180974 - DNA, 25 bp, Homo sapien
tttagcatctttaaggtcttccaat

SEQ ID NO: 3180975 - DNA, 25 bp, Homo sapien
ggaaggccttgggactcttcatctt

SEQ ID NO: 3180976 - DNA, 25 bp, Homo sapien
ttccgaaaggtcttccagttctgaa

SEQ ID NO: 3180977 - DNA, 25 bp, Homo sapien
tatcatcatttctacgtgccatggt

SEQ ID NO: 3180978 - DNA, 25 bp, Homo sapien
taaaatactttagccctcatgtcta

SEQ ID NO: 3180979 - DNA, 25 bp, Homo sapien
gctctggagtgtgtgatatactaaa

SEQ ID NO: 3180980 - DNA, 25 bp, Homo sapien
agctctttccttattactgctttaa

SEQ ID NO: 3180981 - DNA, 25 bp, Homo sapien
gatttggccctttatgttgaatatt

SEQ ID NO: 3180982 - DNA, 25 bp, Homo sapien
aatcaagtagcctcaaatcaaagtg

SEQ ID NO: 3180983 - DNA, 25 bp, Homo sapien
gcatattcttagcaagcttagaact

SEQ ID NO: 3180984 - DNA, 25 bp, Homo sapien
tgcatatattgcttgcatgacatca

SEQ ID NO: 3180985 - DNA, 25 bp, Homo sapien
tactgctcgagataaatgggatagg

SEQ ID NO: 3180986 - DNA, 25 bp, Homo sapien
aggcagcagcaattgctccatccat

SEQ ID NO: 3180987 - DNA, 25 bp, Homo sapien
ccatccatagtgcttgttgattcaa

SEQ ID NO: 3180988 - DNA, 25 bp, Homo sapien
attgctccatccatagtgcttgttg

SEQ ID NO: 3180989 - DNA, 25 bp, Homo sapien
gcagcaattgctccatccatagtgc

SEQ ID NO: 3180990 - DNA, 25 bp, Homo sapien
tacaagatttgattggtagaaaagc

SEQ ID NO: 3180991 - DNA, 25 bp, Homo sapien
caagcccctgaaacatgaaaaaata

SEQ ID NO: 3180992 - DNA, 25 bp, Homo sapien
aactggacacgcttctatattgcaa

SEQ ID NO: 3180993 - DNA, 25 bp, Homo sapien
aaggaatgttgattaccagctacgc

SEQ ID NO: 3180994 - DNA, 25 bp, Homo sapien
tgaagaagaagataattttcttttc

SEQ ID NO: 3180995 - DNA, 25 bp, Homo sapien
ctgaagaagaagataattttctttt

SEQ ID NO: 3180996 - DNA, 25 bp, Homo sapien
agaagaagataattttcttttcctg

SEQ ID NO: 3180997 - DNA, 25 bp, Homo sapien
ttttttatagattgatcatcattaa

SEQ ID NO: 3180998 - DNA, 25 bp, Homo sapien
ttaaattcatcttcctcatatggct

SEQ ID NO: 3180999 - DNA, 25 bp, Homo sapien
gatccagtcttgtcttttttataga

SEQ ID NO: 3181000 - DNA, 25 bp, Homo sapien
cattaaattcatcttcctcatatgg

SEQ ID NO: 3181001 - DNA, 25 bp, Homo sapien
catacagccataagcagcaagttgc

SEQ ID NO: 3181002 - DNA, 25 bp, Homo sapien
gactgctccgagtccaaactgtttt

SEQ ID NO: 3181003 - DNA, 25 bp, Homo sapien
tgtcatggcatacacagacttctga

SEQ ID NO: 3181004 - DNA, 25 bp, Homo sapien
tagatcatcaggacaggaccctaga

SEQ ID NO: 3181005 - DNA, 25 bp, Homo sapien
ccaattactgctagattctgcagac

SEQ ID NO: 3181006 - DNA, 25 bp, Homo sapien
cccaattactgctagattctgcaga

SEQ ID NO: 3181007 - DNA, 25 bp, Homo sapien
tcccaattactgctagattctgcag

SEQ ID NO: 3181008 - DNA, 25 bp, Homo sapien
tctgtgtacatccattcatgttcct

SEQ ID NO: 3181009 - DNA, 25 bp, Homo sapien
cagagtcttcaacaactctctttgg

SEQ ID NO: 3181010 - DNA, 25 bp, Homo sapien
tgaactaccgacatcagaacctgaa

SEQ ID NO: 3181011 - DNA, 25 bp, Homo sapien
cgtttcttgttaaagccattttgtg

SEQ ID NO: 3181012 - DNA, 25 bp, Homo sapien
gaacctcactttgtgatacatattg

SEQ ID NO: 3181013 - DNA, 25 bp, Homo sapien
caactattaaagggccggagttctg

SEQ ID NO: 3181014 - DNA, 25 bp, Homo sapien
agggccggagttctgttatcttctg

SEQ ID NO: 3181015 - DNA, 25 bp, Homo sapien
ttttctgagaacactgaggaatcaa

SEQ ID NO: 3181016 - DNA, 25 bp, Homo sapien
tcaaagtaagttcaccaattgaagc

SEQ ID NO: 3181017 - DNA, 25 bp, Homo sapien
tatatgtactttattcacgggctca

SEQ ID NO: 3181018 - DNA, 25 bp, Homo sapien
ctgaaattagattaccaagtaggta

SEQ ID NO: 3181019 - DNA, 25 bp, Homo sapien
taaaatgagggtgactaaaatcttg

SEQ ID NO: 3181020 - DNA, 25 bp, Homo sapien
taccttgaaaacaacccaatgatct

SEQ ID NO: 3181021 - DNA, 25 bp, Homo sapien
aataatatcccctccctactgtgtg

SEQ ID NO: 3181022 - DNA, 25 bp, Homo sapien
tgtgcaaggctagacaaaaatccag

SEQ ID NO: 3181023 - DNA, 25 bp, Homo sapien
tgacatggactaaacctgagttgct

SEQ ID NO: 3181024 - DNA, 25 bp, Homo sapien
ggttgagttactgatgcatgtcgca

SEQ ID NO: 3181025 - DNA, 25 bp, Homo sapien
tatgaacggcaacatttagagtggt

SEQ ID NO: 3181026 - DNA, 25 bp, Homo sapien
ttagagtggtagatgtaagaagttc

SEQ ID NO: 3181027 - DNA, 25 bp, Homo sapien
tgaccaatcactttgagagctggaa

SEQ ID NO: 3181028 - DNA, 25 bp, Homo sapien
ggtcatttggaagccacaagaaagg

SEQ ID NO: 3181029 - DNA, 25 bp, Homo sapien
gccttataactacatctctttcttg

SEQ ID NO: 3181030 - DNA, 25 bp, Homo sapien
catttccagtaagcatggtaacttg

SEQ ID NO: 3181031 - DNA, 25 bp, Homo sapien
tctgataagccattagttttggaca

SEQ ID NO: 3181032 - DNA, 25 bp, Homo sapien
tacagtgccatatcaaatcttctga

SEQ ID NO: 3181033 - DNA, 25 bp, Homo sapien
taaaatcagcaactaaggcaattaa

SEQ ID NO: 3181034 - DNA, 25 bp, Homo sapien
ccaatgatcagcaaatatgctttga

SEQ ID NO: 3181035 - DNA, 25 bp, Homo sapien
cccaatctgccaacaacatgcaaaa

SEQ ID NO: 3181036 - DNA, 25 bp, Homo sapien
catggttttgccactataaatatca

SEQ ID NO: 3181037 - DNA, 25 bp, Homo sapien
tagatgctatataatcatatttccc

SEQ ID NO: 3181038 - DNA, 25 bp, Homo sapien
tatcacggaactgctgccaattaca

SEQ ID NO: 3181039 - DNA, 25 bp, Homo sapien
agctttgttgcttactatcacggaa

SEQ ID NO: 3181040 - DNA, 25 bp, Homo sapien
tcccatctattttgacgcttcacag

SEQ ID NO: 3181041 - DNA, 25 bp, Homo sapien
tgggcaacattgacaaaacgctatc

SEQ ID NO: 3181042 - DNA, 25 bp, Homo sapien
tcaggatgtcgatctcactccaaag

SEQ ID NO: 3181043 - DNA, 25 bp, Homo sapien
gctacaaagtgttaagactaagatt

SEQ ID NO: 3181044 - DNA, 25 bp, Homo sapien
gaacatctattatacataggcacag

SEQ ID NO: 3181045 - DNA, 25 bp, Homo sapien
gagttaccaaatattacacatctat

SEQ ID NO: 3181046 - DNA, 25 bp, Homo sapien
taaaatgcctaggtctaatcttacc

SEQ ID NO: 3181047 - DNA, 25 bp, Homo sapien
gttagatgctatgtacacctactta

SEQ ID NO: 3181048 - DNA, 25 bp, Homo sapien
cttttaactgttagatgctatgtac

SEQ ID NO: 3181049 - DNA, 25 bp, Homo sapien
ccaaccttctgatagggcttgagtg

SEQ ID NO: 3181050 - DNA, 25 bp, Homo sapien
aaccaaccttctgatagggcttgag

SEQ ID NO: 3181051 - DNA, 25 bp, Homo sapien
caaaccaaccttctgatagggcttg

SEQ ID NO: 3181052 - DNA, 25 bp, Homo sapien
atgccagccaattcaaaccaacctt

SEQ ID NO: 3181053 - DNA, 25 bp, Homo sapien
gcaatggcttgaatagtttttccta

SEQ ID NO: 3181054 - DNA, 25 bp, Homo sapien
tagaggtatgccagaaatgcaatgg

SEQ ID NO: 3181055 - DNA, 25 bp, Homo sapien
ggaccattattaccctcctgataga

SEQ ID NO: 3181056 - DNA, 25 bp, Homo sapien
gctggaacaacgatcaaatgaggac

SEQ ID NO: 3181057 - DNA, 25 bp, Homo sapien
agtaacagaggaccttcaaagtagg

SEQ ID NO: 3181058 - DNA, 25 bp, Homo sapien
tagtaacagaggaccttcaaagtag

SEQ ID NO: 3181059 - DNA, 25 bp, Homo sapien
aacagaggaccttcaaagtagggca

SEQ ID NO: 3181060 - DNA, 25 bp, Homo sapien
agaggaccttcaaagtagggcacca

SEQ ID NO: 3181061 - DNA, 25 bp, Homo sapien
tactatgaatgttaaatctaatttg

SEQ ID NO: 3181062 - DNA, 25 bp, Homo sapien
tatctactatgaatgttaaatctaa

SEQ ID NO: 3181063 - DNA, 25 bp, Homo sapien
tctactatgaatgttaaatctaatt

SEQ ID NO: 3181064 - DNA, 25 bp, Homo sapien
atatctactatgaatgttaaatcta

SEQ ID NO: 3181065 - DNA, 25 bp, Homo sapien
cagactacggtcatcagaactgctg

SEQ ID NO: 3181066 - DNA, 25 bp, Homo sapien
gccctcatcaaaaattgcgtaatta

SEQ ID NO: 3181067 - DNA, 25 bp, Homo sapien
tgctggtagcgaatggagcccatat

SEQ ID NO: 3181068 - DNA, 25 bp, Homo sapien
tttcagccgtcgaaacagactacgg

SEQ ID NO: 3181069 - DNA, 25 bp, Homo sapien
caaaattcaacagcgacatgagttc

SEQ ID NO: 3181070 - DNA, 25 bp, Homo sapien
gcctgtgagcagcaaacggttattt

SEQ ID NO: 3181071 - DNA, 25 bp, Homo sapien
aacattcttcgtatttcactggtgc

SEQ ID NO: 3181072 - DNA, 25 bp, Homo sapien
ggtgctactactaaacatgtgtggc

SEQ ID NO: 3181073 - DNA, 25 bp, Homo sapien
tttgcatgtgctattctctcctttt

SEQ ID NO: 3181074 - DNA, 25 bp, Homo sapien
ttgcatgtgctattctctccttttc

SEQ ID NO: 3181075 - DNA, 25 bp, Homo sapien
gttttgcatgtgctattctctcctt

SEQ ID NO: 3181076 - DNA, 25 bp, Homo sapien
ttttgcatgtgctattctctccttt

SEQ ID NO: 3181077 - DNA, 25 bp, Homo sapien
ccaaatagagttgctcctgcttctc

SEQ ID NO: 3181078 - DNA, 25 bp, Homo sapien
acaactcaattcgatctttcttggg

SEQ ID NO: 3181079 - DNA, 25 bp, Homo sapien
tgcttctccgacattgcacacaact

SEQ ID NO: 3181080 - DNA, 25 bp, Homo sapien
tttcaatctgttgaaaagacccaaa

SEQ ID NO: 3181081 - DNA, 25 bp, Homo sapien
taatattggcgatgtaataaaggat

SEQ ID NO: 3181082 - DNA, 25 bp, Homo sapien
aataaaggatgattggccattttcc

SEQ ID NO: 3181083 - DNA, 25 bp, Homo sapien
tttcctcaactgcatcatgacattg

SEQ ID NO: 3181084 - DNA, 25 bp, Homo sapien
ctttagcataagctgagacatttcc

SEQ ID NO: 3181085 - DNA, 25 bp, Homo sapien
taatgtgtcggtactgtttacaaag

SEQ ID NO: 3181086 - DNA, 25 bp, Homo sapien
caaagtacatgtagttcgaagtctg

SEQ ID NO: 3181087 - DNA, 25 bp, Homo sapien
cagggttagcctcacaatgtgtagg

SEQ ID NO: 3181088 - DNA, 25 bp, Homo sapien
gacaagatgcatcctaaaactcgaa

SEQ ID NO: 3181089 - DNA, 25 bp, Homo sapien
tatccagcatcatggtaaattggct

SEQ ID NO: 3181090 - DNA, 25 bp, Homo sapien
taatagaacctctaagatatccagc

SEQ ID NO: 3181091 - DNA, 25 bp, Homo sapien
taaattggctaaataacacaactct

SEQ ID NO: 3181092 - DNA, 25 bp, Homo sapien
tccatctaatctgaggtacctatgc

SEQ ID NO: 3181093 - DNA, 25 bp, Homo sapien
gaagtcagatttattcctaatccac

SEQ ID NO: 3181094 - DNA, 25 bp, Homo sapien
ttagtctggcctactctatggcatc

SEQ ID NO: 3181095 - DNA, 25 bp, Homo sapien
tcgtgaagtataacaacatttgctg

SEQ ID NO: 3181096 - DNA, 25 bp, Homo sapien
tataaggattacagtcaatatcgtg

SEQ ID NO: 3181097 - DNA, 25 bp, Homo sapien
tatcttcacctctttacagtgctgt

SEQ ID NO: 3181098 - DNA, 25 bp, Homo sapien
tcttcacctctttacagtgctgtga

SEQ ID NO: 3181099 - DNA, 25 bp, Homo sapien
cacctctttacagtgctgtgaccaa

SEQ ID NO: 3181100 - DNA, 25 bp, Homo sapien
accgtgcccggctatcttcacctct

SEQ ID NO: 3181101 - DNA, 25 bp, Homo sapien
tactgtagtcatatcctgttctagt

SEQ ID NO: 3181102 - DNA, 25 bp, Homo sapien
ttcaatcgtcccttggcttattagt

SEQ ID NO: 3181103 - DNA, 25 bp, Homo sapien
atggattcttcaatcgtcccttggc

SEQ ID NO: 3181104 - DNA, 25 bp, Homo sapien
cttcatctactgtagtcatatcctg

SEQ ID NO: 3181105 - DNA, 25 bp, Homo sapien
tataaacaacattctgagcacagca

SEQ ID NO: 3181106 - DNA, 25 bp, Homo sapien
gaggccccagtataagcacttacag

SEQ ID NO: 3181107 - DNA, 25 bp, Homo sapien
ggcagataatctagccatccctgat

SEQ ID NO: 3181108 - DNA, 25 bp, Homo sapien
caagggctagtttgcttcagtgtca

SEQ ID NO: 3181109 - DNA, 25 bp, Homo sapien
tttttagtaatgtggctatatctgc

SEQ ID NO: 3181110 - DNA, 25 bp, Homo sapien
atatctgctggcatactcccttcat

SEQ ID NO: 3181111 - DNA, 25 bp, Homo sapien
tcacaggcccattgatgtttttagt

SEQ ID NO: 3181112 - DNA, 25 bp, Homo sapien
cacaggcccattgatgtttttagta

SEQ ID NO: 3181113 - DNA, 25 bp, Homo sapien
ggatgttagtatatggaatgccacc

SEQ ID NO: 3181114 - DNA, 25 bp, Homo sapien
tcaggcggtcctgtactggaaattc

SEQ ID NO: 3181115 - DNA, 25 bp, Homo sapien
agcaaaagccgggagagggaaatca

SEQ ID NO: 3181116 - DNA, 25 bp, Homo sapien
tatttccatgcagtacctaatgctg

SEQ ID NO: 3181117 - DNA, 25 bp, Homo sapien
tccaaatccagagggtcgtactacc

SEQ ID NO: 3181118 - DNA, 25 bp, Homo sapien
taatagcgcattacaggaagaaccc

SEQ ID NO: 3181119 - DNA, 25 bp, Homo sapien
gaagactccttttagccctgtaatg

SEQ ID NO: 3181120 - DNA, 25 bp, Homo sapien
tcgtactacctagcatcttagcaag

SEQ ID NO: 3181121 - DNA, 25 bp, Homo sapien
atctctctcatcagataagacagct

SEQ ID NO: 3181122 - DNA, 25 bp, Homo sapien
tcgctaactggataaaacgaaggcc

SEQ ID NO: 3181123 - DNA, 25 bp, Homo sapien
caaactctagctgatccatgttgcc

SEQ ID NO: 3181124 - DNA, 25 bp, Homo sapien
taagacagctacatcagcctgccag

SEQ ID NO: 3181125 - DNA, 25 bp, Homo sapien
ccagagtatgtctcacatgtgtgta

SEQ ID NO: 3181126 - DNA, 25 bp, Homo sapien
catgtgtgtaagaacaagtctggtc

SEQ ID NO: 3181127 - DNA, 25 bp, Homo sapien
gactgacagttattagcatccctct

SEQ ID NO: 3181128 - DNA, 25 bp, Homo sapien
ttttttgtaacatccccagagtatg

SEQ ID NO: 3181129 - DNA, 25 bp, Homo sapien
agaccgcaaaatggcttggacaaca

SEQ ID NO: 3181130 - DNA, 25 bp, Homo sapien
tatagaccgcaaaatggcttggaca

SEQ ID NO: 3181131 - DNA, 25 bp, Homo sapien
tagaccgcaaaatggcttggacaac

SEQ ID NO: 3181132 - DNA, 25 bp, Homo sapien
cttatagaccgcaaaatggcttgga

SEQ ID NO: 3181133 - DNA, 25 bp, Homo sapien
gtgctccctttggttccagagaccc

SEQ ID NO: 3181134 - DNA, 25 bp, Homo sapien
agaagagctgtgtgctccctttggt

SEQ ID NO: 3181135 - DNA, 25 bp, Homo sapien
cttcaattttaagaagagctgtgtg

SEQ ID NO: 3181136 - DNA, 25 bp, Homo sapien
tgctccctttggttccagagacccc

SEQ ID NO: 3181137 - DNA, 25 bp, Homo sapien
gctttagcggtaaggttgctttgga

SEQ ID NO: 3181138 - DNA, 25 bp, Homo sapien
ccaatagctttagcggtaaggttgc

SEQ ID NO: 3181139 - DNA, 25 bp, Homo sapien
ctgtgtccaatagctttagcggtaa

SEQ ID NO: 3181140 - DNA, 25 bp, Homo sapien
tgtccaatagctttagcggtaaggt

SEQ ID NO: 3181141 - DNA, 25 bp, Homo sapien
taaatggcgtacaagacacttcgat

SEQ ID NO: 3181142 - DNA, 25 bp, Homo sapien
ttcgatatttgtaccagagttgaga

SEQ ID NO: 3181143 - DNA, 25 bp, Homo sapien
gtgtattttctaacatatcattatc

SEQ ID NO: 3181144 - DNA, 25 bp, Homo sapien
catgtttctcataaatggcgtacaa

SEQ ID NO: 3181145 - DNA, 25 bp, Homo sapien
caagaatgagttgccagttactcca

SEQ ID NO: 3181146 - DNA, 25 bp, Homo sapien
caaaatgaaaggtctattggacatc

SEQ ID NO: 3181147 - DNA, 25 bp, Homo sapien
taaaagatctaggtcactgttgttc

SEQ ID NO: 3181148 - DNA, 25 bp, Homo sapien
gttactccatcaactccactgtcat

SEQ ID NO: 3181149 - DNA, 25 bp, Homo sapien
tgcctccgcctcagacaagggctga

SEQ ID NO: 3181150 - DNA, 25 bp, Homo sapien
caagggctgacaagtgactcgcggt

SEQ ID NO: 3181151 - DNA, 25 bp, Homo sapien
cagacaagggctgacaagtgactcg

SEQ ID NO: 3181152 - DNA, 25 bp, Homo sapien
gtgactcgcggtgagggcgccgtcc

SEQ ID NO: 3181153 - DNA, 25 bp, Homo sapien
cccaccggagatccgagaggcgcat

SEQ ID NO: 3181154 - DNA, 25 bp, Homo sapien
tcccttctcgcgttcggcgcacagc

SEQ ID NO: 3181155 - DNA, 25 bp, Homo sapien
gttcggcgcacagcggccggttctt

SEQ ID NO: 3181156 - DNA, 25 bp, Homo sapien
cttctcccaccggagatccgagagg

SEQ ID NO: 3181157 - DNA, 25 bp, Homo sapien
cgccgctccgcgcccagaaagcacc

SEQ ID NO: 3181158 - DNA, 25 bp, Homo sapien
gctccgcgcccagaaagcacctgag

SEQ ID NO: 3181159 - DNA, 25 bp, Homo sapien
ccgcgcccagaaagcacctgaggag

SEQ ID NO: 3181160 - DNA, 25 bp, Homo sapien
cccagaaagcacctgaggagccatc

SEQ ID NO: 3181161 - DNA, 25 bp, Homo sapien
taatggctcaaagtccaatgacaga

SEQ ID NO: 3181162 - DNA, 25 bp, Homo sapien
ggttctaatggctcaaagtccaatg

SEQ ID NO: 3181163 - DNA, 25 bp, Homo sapien
tctaatggctcaaagtccaatgaca

SEQ ID NO: 3181164 - DNA, 25 bp, Homo sapien
aatggctcaaagtccaatgacagaa

SEQ ID NO: 3181165 - DNA, 25 bp, Homo sapien
gccctgcagccggaaaccccaagga

SEQ ID NO: 3181166 - DNA, 25 bp, Homo sapien
ctgcagccggaaaccccaaggagct

SEQ ID NO: 3181167 - DNA, 25 bp, Homo sapien
ggagctgggccaaccagtgacacac

SEQ ID NO: 3181168 - DNA, 25 bp, Homo sapien
caaggagctgggccaaccagtgaca

SEQ ID NO: 3181169 - DNA, 25 bp, Homo sapien
gtcagaggcatgttgaaatccttac

SEQ ID NO: 3181170 - DNA, 25 bp, Homo sapien
actagagattgtcagaggcatgttg

SEQ ID NO: 3181171 - DNA, 25 bp, Homo sapien
tagagattgtcagaggcatgttgaa

SEQ ID NO: 3181172 - DNA, 25 bp, Homo sapien
gagattgtcagaggcatgttgaaat

SEQ ID NO: 3181173 - DNA, 25 bp, Homo sapien
tcccaggagcaatgataataagtag

SEQ ID NO: 3181174 - DNA, 25 bp, Homo sapien
aattaaacaactcagcccgaggact

SEQ ID NO: 3181175 - DNA, 25 bp, Homo sapien
taataagtagagtacaggtcaacag

SEQ ID NO: 3181176 - DNA, 25 bp, Homo sapien
cagcccgaggactaagcactgaatg

SEQ ID NO: 3181177 - DNA, 25 bp, Homo sapien
tggctatcacctccaccagaaagtg

SEQ ID NO: 3181178 - DNA, 25 bp, Homo sapien
tacctactggtgatgaaagtgaaac

SEQ ID NO: 3181179 - DNA, 25 bp, Homo sapien
cataggctatctagttggagctcca

SEQ ID NO: 3181180 - DNA, 25 bp, Homo sapien
catttcctcttcaagggtaagtagc

SEQ ID NO: 3181181 - DNA, 25 bp, Homo sapien
aatagtattttcatgcgttgcacaa

SEQ ID NO: 3181182 - DNA, 25 bp, Homo sapien
aagccagctcttccatacagtcatg

SEQ ID NO: 3181183 - DNA, 25 bp, Homo sapien
cagcacagcataactgttggaaagc

SEQ ID NO: 3181184 - DNA, 25 bp, Homo sapien
tacagtcatgtgagcgcacagcaca

SEQ ID NO: 3181185 - DNA, 25 bp, Homo sapien
caagaaacaaaggagactccgttag

SEQ ID NO: 3181186 - DNA, 25 bp, Homo sapien
gaaattgatgataaattaaagataa

SEQ ID NO: 3181187 - DNA, 25 bp, Homo sapien
atccacagccaagaaacaaaggaga

SEQ ID NO: 3181188 - DNA, 25 bp, Homo sapien
acagccaagaaacaaaggagactcc

SEQ ID NO: 3181189 - DNA, 25 bp, Homo sapien
tacttggagtcaagcaatggcaaga

SEQ ID NO: 3181190 - DNA, 25 bp, Homo sapien
ttgaggactgaaagtctttctgtct

SEQ ID NO: 3181191 - DNA, 25 bp, Homo sapien
tctttctgtcttccggtaggaggga

SEQ ID NO: 3181192 - DNA, 25 bp, Homo sapien
gagaatcgctcaactacattcacag

SEQ ID NO: 3181193 - DNA, 25 bp, Homo sapien
tctttacaaatcatagagcagaaaa

SEQ ID NO: 3181194 - DNA, 25 bp, Homo sapien
gatacaaaagtcctgcctaccagta

SEQ ID NO: 3181195 - DNA, 25 bp, Homo sapien
cttattttatccaaaccctacatcg

SEQ ID NO: 3181196 - DNA, 25 bp, Homo sapien
ctccatcagatacaaaagtcctgcc

SEQ ID NO: 3181197 - DNA, 25 bp, Homo sapien
aagaatcagtagacaccatggtcac

SEQ ID NO: 3181198 - DNA, 25 bp, Homo sapien
ccatggtcactgctctttagttact

SEQ ID NO: 3181199 - DNA, 25 bp, Homo sapien
tagtggcccaacacatagaatacct

SEQ ID NO: 3181200 - DNA, 25 bp, Homo sapien
aaacaaagtacgctagaaaagtgat

SEQ ID NO: 3181201 - DNA, 25 bp, Homo sapien
gggacatttactacaactgcttagc

SEQ ID NO: 3181202 - DNA, 25 bp, Homo sapien
tctcctctatttacgcctattaggg

SEQ ID NO: 3181203 - DNA, 25 bp, Homo sapien
gggagtccagttactaaatgccaac

SEQ ID NO: 3181204 - DNA, 25 bp, Homo sapien
tgccaacaaggttggtgaactctgt

SEQ ID NO: 3181205 - DNA, 25 bp, Homo sapien
caaggtctgttgaaacttaggctag

SEQ ID NO: 3181206 - DNA, 25 bp, Homo sapien
aactggcccatctgattggaaatga

SEQ ID NO: 3181207 - DNA, 25 bp, Homo sapien
ctcatattatgagcaggagtgtctc

SEQ ID NO: 3181208 - DNA, 25 bp, Homo sapien
tatgacaaatccaaacacagtgtag

SEQ ID NO: 3181209 - DNA, 25 bp, Homo sapien
cacttgaaaacacagaaaatccttt

SEQ ID NO: 3181210 - DNA, 25 bp, Homo sapien
ttgaaaacacagaaaatcctttgta

SEQ ID NO: 3181211 - DNA, 25 bp, Homo sapien
tttgtaaaatacttgtgactgagcc

SEQ ID NO: 3181212 - DNA, 25 bp, Homo sapien
cacagaaaatcctttgtaaaatact

SEQ ID NO: 3181213 - DNA, 25 bp, Homo sapien
tcctcggaccatagtgaacacctca

SEQ ID NO: 3181214 - DNA, 25 bp, Homo sapien
tccaaaaagtctatgacagggcact

SEQ ID NO: 3181215 - DNA, 25 bp, Homo sapien
tactaacaaaagctctggacgaaag

SEQ ID NO: 3181216 - DNA, 25 bp, Homo sapien
caaaatggaacccaactggtgcagg

SEQ ID NO: 3181217 - DNA, 25 bp, Homo sapien
gcaactataccccaaaactcacaga

SEQ ID NO: 3181218 - DNA, 25 bp, Homo sapien
aaaaagtctcacgaaacctgatggg

SEQ ID NO: 3181219 - DNA, 25 bp, Homo sapien
aaatcttttacgaaactatctctca

SEQ ID NO: 3181220 - DNA, 25 bp, Homo sapien
gtagactttatggtgtattgtgtta

SEQ ID NO: 3181221 - DNA, 25 bp, Homo sapien
gtatctaaggtctcaagtgtctctc

SEQ ID NO: 3181222 - DNA, 25 bp, Homo sapien
caatgggaatccagaagccgggtcc

SEQ ID NO: 3181223 - DNA, 25 bp, Homo sapien
tggtaacacacttcactaacagcgt

SEQ ID NO: 3181224 - DNA, 25 bp, Homo sapien
gagacatgcaggaaacgtatctaag

SEQ ID NO: 3181225 - DNA, 25 bp, Homo sapien
tttcttcttaattttaacatcttca

SEQ ID NO: 3181226 - DNA, 25 bp, Homo sapien
cttcttaattttaacatcttcaaat

SEQ ID NO: 3181227 - DNA, 25 bp, Homo sapien
tcttcttaattttaacatcttcaaa

SEQ ID NO: 3181228 - DNA, 25 bp, Homo sapien
ttcttcttaattttaacatcttcaa

SEQ ID NO: 3181229 - DNA, 25 bp, Homo sapien
aagataatccatatgttacatagtt

SEQ ID NO: 3181230 - DNA, 25 bp, Homo sapien
tacttattctgacatataaacaaag

SEQ ID NO: 3181231 - DNA, 25 bp, Homo sapien
tgcctccaaagttcgtattttcaaa

SEQ ID NO: 3181232 - DNA, 25 bp, Homo sapien
tagtgatccacgcaaagtaaattaa

SEQ ID NO: 3181233 - DNA, 25 bp, Homo sapien
tcaacttactgctcaggaggacaga

SEQ ID NO: 3181234 - DNA, 25 bp, Homo sapien
caagaggtgtgaaagctgctaacta

SEQ ID NO: 3181235 - DNA, 25 bp, Homo sapien
caccagtaagcaccatgaagtctcc

SEQ ID NO: 3181236 - DNA, 25 bp, Homo sapien
gggttacattcagctgcccatagca

SEQ ID NO: 3181237 - DNA, 25 bp, Homo sapien
taccaaaatgccaccgaattataca

SEQ ID NO: 3181238 - DNA, 25 bp, Homo sapien
gggagtaaatactcaatgggtacca

SEQ ID NO: 3181239 - DNA, 25 bp, Homo sapien
catgcacactgcatgtggaagatcc

SEQ ID NO: 3181240 - DNA, 25 bp, Homo sapien
gtaattagatagaggtggtcacaca

SEQ ID NO: 3181241 - DNA, 25 bp, Homo sapien
tataaaacatggtcgggccgggcat

SEQ ID NO: 3181242 - DNA, 25 bp, Homo sapien
gatttggtccaagcataaagttagt

SEQ ID NO: 3181243 - DNA, 25 bp, Homo sapien
aacagtggtcagttctagaattcag

SEQ ID NO: 3181244 - DNA, 25 bp, Homo sapien
gaatataatactgacgggaaacctg

SEQ ID NO: 3181245 - DNA, 25 bp, Homo sapien
gacatgccctcataatgctgagcaa

SEQ ID NO: 3181246 - DNA, 25 bp, Homo sapien
tgctgagcaacatcattagggatac

SEQ ID NO: 3181247 - DNA, 25 bp, Homo sapien
tacaaaagccatcaaggaaaagtgc

SEQ ID NO: 3181248 - DNA, 25 bp, Homo sapien
tctggaactacttcaatgtacaggc

SEQ ID NO: 3181249 - DNA, 25 bp, Homo sapien
gagaacaagaattcactaccagaag

SEQ ID NO: 3181250 - DNA, 25 bp, Homo sapien
gtaacagcccagaagcactcaaata

SEQ ID NO: 3181251 - DNA, 25 bp, Homo sapien
ggcagagtatttctccagcacactg

SEQ ID NO: 3181252 - DNA, 25 bp, Homo sapien
caaatataaggataaggctaaagcc

SEQ ID NO: 3181253 - DNA, 25 bp, Homo sapien
gcagtggtggaccatgtgttcctgt

SEQ ID NO: 3181254 - DNA, 25 bp, Homo sapien
tggtggaccatgtgttcctgtgctc

SEQ ID NO: 3181255 - DNA, 25 bp, Homo sapien
cagtggtggaccatgtgttcctgtg

SEQ ID NO: 3181256 - DNA, 25 bp, Homo sapien
agtggtggaccatgtgttcctgtgc

SEQ ID NO: 3181257 - DNA, 25 bp, Homo sapien
taataaggccctattcccataaggc

SEQ ID NO: 3181258 - DNA, 25 bp, Homo sapien
caaaggtatttagtcaacaggctac

SEQ ID NO: 3181259 - DNA, 25 bp, Homo sapien
taatgagaccaaagccgtaacagaa

SEQ ID NO: 3181260 - DNA, 25 bp, Homo sapien
tatttagggctatcatacacagacg

SEQ ID NO: 3181261 - DNA, 25 bp, Homo sapien
taacattcccgaatggtggccccat

SEQ ID NO: 3181262 - DNA, 25 bp, Homo sapien
tccatcttaacattcccgaatggtg

SEQ ID NO: 3181263 - DNA, 25 bp, Homo sapien
catcttaacattcccgaatggtggc

SEQ ID NO: 3181264 - DNA, 25 bp, Homo sapien
ttcttccatcttaacattcccgaat

SEQ ID NO: 3181265 - DNA, 25 bp, Homo sapien
aatatatttcattaggagtgtcact

SEQ ID NO: 3181266 - DNA, 25 bp, Homo sapien
gtaataaatatatttcattaggagt

SEQ ID NO: 3181267 - DNA, 25 bp, Homo sapien
ataaatatatttcattaggagtgtc

SEQ ID NO: 3181268 - DNA, 25 bp, Homo sapien
tgtaataaatatatttcattaggag

SEQ ID NO: 3181269 - DNA, 25 bp, Homo sapien
cctattcttacatttgcctgggctg

SEQ ID NO: 3181270 - DNA, 25 bp, Homo sapien
gctgagaaccacatcgcctattctt

SEQ ID NO: 3181271 - DNA, 25 bp, Homo sapien
catattcaaagagcctgtacaaccc

SEQ ID NO: 3181272 - DNA, 25 bp, Homo sapien
tgtacaacccttaatcttattctgg

SEQ ID NO: 3181273 - DNA, 25 bp, Homo sapien
tcaaatgatgggatgctcaaaatac

SEQ ID NO: 3181274 - DNA, 25 bp, Homo sapien
cccagcctatttccctcttaaagat

SEQ ID NO: 3181275 - DNA, 25 bp, Homo sapien
tacctcgtatatgatcaagctacct

SEQ ID NO: 3181276 - DNA, 25 bp, Homo sapien
taaaatctccataactacctcgtat

SEQ ID NO: 3181277 - DNA, 25 bp, Homo sapien
taaagctgaaggttcacagctaccc

SEQ ID NO: 3181278 - DNA, 25 bp, Homo sapien
gagaaaacttaaggagagaatggtc

SEQ ID NO: 3181279 - DNA, 25 bp, Homo sapien
agagagaaaacttaaggagagaatg

SEQ ID NO: 3181280 - DNA, 25 bp, Homo sapien
tttgatataagagagaaaacttaag

SEQ ID NO: 3181281 - DNA, 25 bp, Homo sapien
ttgatataagagagaaaacttaagg

SEQ ID NO: 3181282 - DNA, 25 bp, Homo sapien
aaaacgctgctctagatccctggcc

SEQ ID NO: 3181283 - DNA, 25 bp, Homo sapien
gatactcatgcaattccctgggaaa

SEQ ID NO: 3181284 - DNA, 25 bp, Homo sapien
aaggcagcgccaccactattgagtt

SEQ ID NO: 3181285 - DNA, 25 bp, Homo sapien
tacagtgctagcaggaaaaggcagc

SEQ ID NO: 3181286 - DNA, 25 bp, Homo sapien
tacaatggattccatactaatactt

SEQ ID NO: 3181287 - DNA, 25 bp, Homo sapien
tcttgaagtactttacaatggattc

SEQ ID NO: 3181288 - DNA, 25 bp, Homo sapien
aatggattccatactaatacttatc

SEQ ID NO: 3181289 - DNA, 25 bp, Homo sapien
cttgaagtactttacaatggattcc

SEQ ID NO: 3181290 - DNA, 25 bp, Homo sapien
ctgacttccctcgctgtttctccct

SEQ ID NO: 3181291 - DNA, 25 bp, Homo sapien
ttctccctctttccctcagtcacac

SEQ ID NO: 3181292 - DNA, 25 bp, Homo sapien
ccctctttccctcagtcacacccat

SEQ ID NO: 3181293 - DNA, 25 bp, Homo sapien
tgacttccctcgctgtttctccctc

SEQ ID NO: 3181294 - DNA, 25 bp, Homo sapien
tatttttggtctgtgcgtcccaact

SEQ ID NO: 3181295 - DNA, 25 bp, Homo sapien
tcagtctctcccttcctgcgagtgt

SEQ ID NO: 3181296 - DNA, 25 bp, Homo sapien
ctcatataaagctatacctgaggca

SEQ ID NO: 3181297 - DNA, 25 bp, Homo sapien
tggtctgtgcgtcccaactcatata

SEQ ID NO: 3181298 - DNA, 25 bp, Homo sapien
cagctgtcttccggcctgggatttt

SEQ ID NO: 3181299 - DNA, 25 bp, Homo sapien
gaccaatcagtaaagagactcccag

SEQ ID NO: 3181300 - DNA, 25 bp, Homo sapien
gaagccggagagaatagcaggctct

SEQ ID NO: 3181301 - DNA, 25 bp, Homo sapien
tgtgacctaatgtagatcaaatgaa

SEQ ID NO: 3181302 - DNA, 25 bp, Homo sapien
ccatccatcagtaaatgtgacctaa

SEQ ID NO: 3181303 - DNA, 25 bp, Homo sapien
aaagagacactttagccactcgagc

SEQ ID NO: 3181304 - DNA, 25 bp, Homo sapien
cactcgagcagtccatagaatctac

SEQ ID NO: 3181305 - DNA, 25 bp, Homo sapien
catagaatctactgattaggaagag

SEQ ID NO: 3181306 - DNA, 25 bp, Homo sapien
tctactgattaggaagagatccaaa

SEQ ID NO: 3181307 - DNA, 25 bp, Homo sapien
tcctagagggaatgtgatcctgcca

SEQ ID NO: 3181308 - DNA, 25 bp, Homo sapien
tctcctagagggaatgtgatcctgc

SEQ ID NO: 3181309 - DNA, 25 bp, Homo sapien
gattctcctagagggaatgtgatcc

SEQ ID NO: 3181310 - DNA, 25 bp, Homo sapien
ttctcctagagggaatgtgatcctg

SEQ ID NO: 3181311 - DNA, 25 bp, Homo sapien
tatgatccgacaatcccactcttgg

SEQ ID NO: 3181312 - DNA, 25 bp, Homo sapien
ctcatagaggcacagaatagaatgg

SEQ ID NO: 3181313 - DNA, 25 bp, Homo sapien
aagatggtgattatacttaacaaca

SEQ ID NO: 3181314 - DNA, 25 bp, Homo sapien
ggatatgaaatttcagttaggtagg

SEQ ID NO: 3181315 - DNA, 25 bp, Homo sapien
gaagagacaagctgaccaaggaggc

SEQ ID NO: 3181316 - DNA, 25 bp, Homo sapien
taagaatatgtaccgctcttgagcc

SEQ ID NO: 3181317 - DNA, 25 bp, Homo sapien
gatgcgcagctcctagtcataatgc

SEQ ID NO: 3181318 - DNA, 25 bp, Homo sapien
gaaacccttagcgtactgctagtgg

SEQ ID NO: 3181319 - DNA, 25 bp, Homo sapien
tcctagattatccagtgggcctact

SEQ ID NO: 3181320 - DNA, 25 bp, Homo sapien
taaaagcaccctcaatgactagatg

SEQ ID NO: 3181321 - DNA, 25 bp, Homo sapien
tccacaatgtaggagtgcagtcacc

SEQ ID NO: 3181322 - DNA, 25 bp, Homo sapien
catgcagaagggaatttagggtacc

SEQ ID NO: 3181323 - DNA, 25 bp, Homo sapien
caatttcctgttgtagacctctaag

SEQ ID NO: 3181324 - DNA, 25 bp, Homo sapien
cctctaagagggtgaagcaaaatga

SEQ ID NO: 3181325 - DNA, 25 bp, Homo sapien
tcaccactggcaaggtaactacata

SEQ ID NO: 3181326 - DNA, 25 bp, Homo sapien
taggcaaaacacttgtgagtcaggt

SEQ ID NO: 3181327 - DNA, 25 bp, Homo sapien
caaattgccctctaacatgtgtgta

SEQ ID NO: 3181328 - DNA, 25 bp, Homo sapien
tacatacaaataggcaatctacagg

SEQ ID NO: 3181329 - DNA, 25 bp, Homo sapien
taggtcagagggtataaccattccc

SEQ ID NO: 3181330 - DNA, 25 bp, Homo sapien
taaccctacagacgtcctatcgaag

SEQ ID NO: 3181331 - DNA, 25 bp, Homo sapien
tgagtagctgggtaactcccgagta

SEQ ID NO: 3181332 - DNA, 25 bp, Homo sapien
tagctgggtaactcccgagtaactg

SEQ ID NO: 3181333 - DNA, 25 bp, Homo sapien
gagtagctgggtaactcccgagtaa

SEQ ID NO: 3181334 - DNA, 25 bp, Homo sapien
agtcaatcagtccttctgtagagaa

SEQ ID NO: 3181335 - DNA, 25 bp, Homo sapien
taataatccgttcctcatatacagg

SEQ ID NO: 3181336 - DNA, 25 bp, Homo sapien
caatttacgctcaactacacaggaa

SEQ ID NO: 3181337 - DNA, 25 bp, Homo sapien
ttatgggtcatataccagacacagt

SEQ ID NO: 3181338 - DNA, 25 bp, Homo sapien
caaaaaacagttgtcactaaatgga

SEQ ID NO: 3181339 - DNA, 25 bp, Homo sapien
tataatccctttcataatgcaagct

SEQ ID NO: 3181340 - DNA, 25 bp, Homo sapien
aaacctctcaagattctgaaaatag

SEQ ID NO: 3181341 - DNA, 25 bp, Homo sapien
caaccacaagaatgttgcccacatt

SEQ ID NO: 3181342 - DNA, 25 bp, Homo sapien
aaatgtgctagaatattgatgagta

SEQ ID NO: 3181343 - DNA, 25 bp, Homo sapien
taaagagatcagcagttaaatgtgc

SEQ ID NO: 3181344 - DNA, 25 bp, Homo sapien
gatcagcagttaaatgtgctagaat

SEQ ID NO: 3181345 - DNA, 25 bp, Homo sapien
gttctaaagagatcagcagttaaat

SEQ ID NO: 3181346 - DNA, 25 bp, Homo sapien
atgcacaacatctaagagtttggct

SEQ ID NO: 3181347 - DNA, 25 bp, Homo sapien
gaggaaaattgaacttgcattataa

SEQ ID NO: 3181348 - DNA, 25 bp, Homo sapien
ctttgttccagtttcgacatgcaca

SEQ ID NO: 3181349 - DNA, 25 bp, Homo sapien
taatgttgagatccatatttgagga

SEQ ID NO: 3181350 - DNA, 25 bp, Homo sapien
ccaacttcaatcaggtagataaaaa

SEQ ID NO: 3181351 - DNA, 25 bp, Homo sapien
caacttcaatcaggtagataaaaaa

SEQ ID NO: 3181352 - DNA, 25 bp, Homo sapien
tccaacttcaatcaggtagataaaa

SEQ ID NO: 3181353 - DNA, 25 bp, Homo sapien
aacttcaatcaggtagataaaaaat

SEQ ID NO: 3181354 - DNA, 25 bp, Homo sapien
tgggacccataaacactagggtaca

SEQ ID NO: 3181355 - DNA, 25 bp, Homo sapien
cactcaagagtgcagaaggatgtct

SEQ ID NO: 3181356 - DNA, 25 bp, Homo sapien
tttggatccactgaccttgggaccc

SEQ ID NO: 3181357 - DNA, 25 bp, Homo sapien
gagctcttgtctaagtttcccacag

SEQ ID NO: 3181358 - DNA, 25 bp, Homo sapien
aaaatccctgatgcattataaccag

SEQ ID NO: 3181359 - DNA, 25 bp, Homo sapien
aatccctgatgcattataaccagtt

SEQ ID NO: 3181360 - DNA, 25 bp, Homo sapien
aaaaatccctgatgcattataacca

SEQ ID NO: 3181361 - DNA, 25 bp, Homo sapien
aaatccctgatgcattataaccagt

SEQ ID NO: 3181362 - DNA, 25 bp, Homo sapien
gccactgttcaggagtaagccacga

SEQ ID NO: 3181363 - DNA, 25 bp, Homo sapien
gacggtgatataccagtgcctcagc

SEQ ID NO: 3181364 - DNA, 25 bp, Homo sapien
taatttggttagctatggcaagcac

SEQ ID NO: 3181365 - DNA, 25 bp, Homo sapien
cacactagctggaggataacacacc

SEQ ID NO: 3181366 - DNA, 25 bp, Homo sapien
ttgaacaggaaccggctcaggcttg

SEQ ID NO: 3181367 - DNA, 25 bp, Homo sapien
ttttgaacaggaaccggctcaggct

SEQ ID NO: 3181368 - DNA, 25 bp, Homo sapien
tttgaacaggaaccggctcaggctt

SEQ ID NO: 3181369 - DNA, 25 bp, Homo sapien
cttttgaacaggaaccggctcaggc

SEQ ID NO: 3181370 - DNA, 25 bp, Homo sapien
gtagctcagcaaggacaatcaagtg

SEQ ID NO: 3181371 - DNA, 25 bp, Homo sapien
tagtgcccacacgaatcaatacagg

SEQ ID NO: 3181372 - DNA, 25 bp, Homo sapien
tctttgtagaatgcaggagcatccc

SEQ ID NO: 3181373 - DNA, 25 bp, Homo sapien
gaaaaataagtagcttagtgcccac

SEQ ID NO: 3181374 - DNA, 25 bp, Homo sapien
taacgtgcatgctaactagtcccaa

SEQ ID NO: 3181375 - DNA, 25 bp, Homo sapien
cagtgtcaacctaggcatattccaa

SEQ ID NO: 3181376 - DNA, 25 bp, Homo sapien
aactatcagaaagcctaaagcccct

SEQ ID NO: 3181377 - DNA, 25 bp, Homo sapien
caaacacaatcaggttagcagctca

SEQ ID NO: 3181378 - DNA, 25 bp, Homo sapien
gatgtaatgggcacaggtttaacta

SEQ ID NO: 3181379 - DNA, 25 bp, Homo sapien
gacacagcaggagatgtaatgggca

SEQ ID NO: 3181380 - DNA, 25 bp, Homo sapien
caggagatgtaatgggcacaggttt

SEQ ID NO: 3181381 - DNA, 25 bp, Homo sapien
aatgggcacaggtttaactacttct

SEQ ID NO: 3181382 - DNA, 25 bp, Homo sapien
gccgtgggacattaactgcagtttt

SEQ ID NO: 3181383 - DNA, 25 bp, Homo sapien
tgcagtccagatgcagcgaacaggg

SEQ ID NO: 3181384 - DNA, 25 bp, Homo sapien
cacagaaccaaaaggccgtggtgcc

SEQ ID NO: 3181385 - DNA, 25 bp, Homo sapien
gactggtcagcactaagattggcat

SEQ ID NO: 3181386 - DNA, 25 bp, Homo sapien
cctgagaagtctcggaacacacgct

SEQ ID NO: 3181387 - DNA, 25 bp, Homo sapien
tttgctgtttactgtcaccctggga

SEQ ID NO: 3181388 - DNA, 25 bp, Homo sapien
tcggaacacacgctggtgactgtgg

SEQ ID NO: 3181389 - DNA, 25 bp, Homo sapien
ctctgctagctcctgagaagtctcg

SEQ ID NO: 3181390 - DNA, 25 bp, Homo sapien
tcaatgctgtgtcgggacttacaaa

SEQ ID NO: 3181391 - DNA, 25 bp, Homo sapien
ccctatgtatataaaggccatatgt

SEQ ID NO: 3181392 - DNA, 25 bp, Homo sapien
agcagaaagcaccttagccacctac

SEQ ID NO: 3181393 - DNA, 25 bp, Homo sapien
gctttgcagaaagtaccctatgtat

SEQ ID NO: 3181394 - DNA, 25 bp, Homo sapien
actgtaaccactgtttgaacttttg

SEQ ID NO: 3181395 - DNA, 25 bp, Homo sapien
gtaaggtgacagcaactgtaaccac

SEQ ID NO: 3181396 - DNA, 25 bp, Homo sapien
gatgagttgtgtaaggtgacagcaa

SEQ ID NO: 3181397 - DNA, 25 bp, Homo sapien
ctgtaaccactgtttgaacttttgg

SEQ ID NO: 3181398 - DNA, 25 bp, Homo sapien
tctcacggccaacttaaatccttgc

SEQ ID NO: 3181399 - DNA, 25 bp, Homo sapien
tcaaagtgttctgctaacatgtatg

SEQ ID NO: 3181400 - DNA, 25 bp, Homo sapien
taattgaaggttgctgaaaaacaga

SEQ ID NO: 3181401 - DNA, 25 bp, Homo sapien
cattatatttgaaccgaaagtgtta

SEQ ID NO: 3181402 - DNA, 25 bp, Homo sapien
caaatgttcaatggtgtggtggagc

SEQ ID NO: 3181403 - DNA, 25 bp, Homo sapien
tgctaacatgatagccaggtgatct

SEQ ID NO: 3181404 - DNA, 25 bp, Homo sapien
ggcaaactgcaatctacagaagcct

SEQ ID NO: 3181405 - DNA, 25 bp, Homo sapien
gaatagtccatcatacacagcagtg

SEQ ID NO: 3181406 - DNA, 25 bp, Homo sapien
tccccggaagatgaacaacagacaa

SEQ ID NO: 3181407 - DNA, 25 bp, Homo sapien
gatgcgatagagtagagaagacatt

SEQ ID NO: 3181408 - DNA, 25 bp, Homo sapien
aagacattgatgttccccggaagat

SEQ ID NO: 3181409 - DNA, 25 bp, Homo sapien
gtgaagatgttacacaaacatcatg

SEQ ID NO: 3181410 - DNA, 25 bp, Homo sapien
aaggaaagttacagagacaattaca

SEQ ID NO: 3181411 - DNA, 25 bp, Homo sapien
acaaagtgaatcattggttaagtac

SEQ ID NO: 3181412 - DNA, 25 bp, Homo sapien
agtgaatcattggttaagtacttac

SEQ ID NO: 3181413 - DNA, 25 bp, Homo sapien
agttacagagacaattacaaagtga

SEQ ID NO: 3181414 - DNA, 25 bp, Homo sapien
tctggactagcagactactggcaca

SEQ ID NO: 3181415 - DNA, 25 bp, Homo sapien
tgtgagtggcaacacctgccaggtt

SEQ ID NO: 3181416 - DNA, 25 bp, Homo sapien
aatcatagtgctatccgcaggccac

SEQ ID NO: 3181417 - DNA, 25 bp, Homo sapien
tactggcacaagatacgagtacaga

SEQ ID NO: 3181418 - DNA, 25 bp, Homo sapien
tataaacagtttgctttgcaagtat

SEQ ID NO: 3181419 - DNA, 25 bp, Homo sapien
caagtatattcggtctcaagttttt

SEQ ID NO: 3181420 - DNA, 25 bp, Homo sapien
ctttgcaagtatattcggtctcaag

SEQ ID NO: 3181421 - DNA, 25 bp, Homo sapien
tctatctaaaataggcggggcacgg

SEQ ID NO: 3181422 - DNA, 25 bp, Homo sapien
tccagtccttggacgccagtcttca

SEQ ID NO: 3181423 - DNA, 25 bp, Homo sapien
gaaagagcgagactgagttgttcca

SEQ ID NO: 3181424 - DNA, 25 bp, Homo sapien
gataaaactctgtatagcgctccac

SEQ ID NO: 3181425 - DNA, 25 bp, Homo sapien
tgatctgggcaaggattcggaaaga

SEQ ID NO: 3181426 - DNA, 25 bp, Homo sapien
tgttcaacttccatggagccactaa

SEQ ID NO: 3181427 - DNA, 25 bp, Homo sapien
ggagccactaaaacgaattccatag

SEQ ID NO: 3181428 - DNA, 25 bp, Homo sapien
gccactaaaacgaattccatagtag

SEQ ID NO: 3181429 - DNA, 25 bp, Homo sapien
atcaatatcaaatgttcaacttcca

SEQ ID NO: 3181430 - DNA, 25 bp, Homo sapien
taataagcaatatccaatattagtt

SEQ ID NO: 3181431 - DNA, 25 bp, Homo sapien
agcaatatccaatattagtttgttt

SEQ ID NO: 3181432 - DNA, 25 bp, Homo sapien
aagcaatatccaatattagtttgtt

SEQ ID NO: 3181433 - DNA, 25 bp, Homo sapien
ataagcaatatccaatattagtttg

SEQ ID NO: 3181434 - DNA, 25 bp, Homo sapien
ttgtattatcggcttcagattcttt

SEQ ID NO: 3181435 - DNA, 25 bp, Homo sapien
gccttctttgtattatcggcttcag

SEQ ID NO: 3181436 - DNA, 25 bp, Homo sapien
tctttgtattatcggcttcagattc

SEQ ID NO: 3181437 - DNA, 25 bp, Homo sapien
gtattatcggcttcagattctttca

SEQ ID NO: 3181438 - DNA, 25 bp, Homo sapien
tctgcaagttgtacatttaggtcac

SEQ ID NO: 3181439 - DNA, 25 bp, Homo sapien
gaaatgccataccattatacttgac

SEQ ID NO: 3181440 - DNA, 25 bp, Homo sapien
ttctagctgcaaagacgaaatgcca

SEQ ID NO: 3181441 - DNA, 25 bp, Homo sapien
taaattgagaccattcgtgaaagga

SEQ ID NO: 3181442 - DNA, 25 bp, Homo sapien
tagaaatatagcaattaatccacag

SEQ ID NO: 3181443 - DNA, 25 bp, Homo sapien
aggttctagactaattccatcatgc

SEQ ID NO: 3181444 - DNA, 25 bp, Homo sapien
tccacagatccctcttggaaacata

SEQ ID NO: 3181445 - DNA, 25 bp, Homo sapien
taattccatcatgcagaaaacatgc

SEQ ID NO: 3181446 - DNA, 25 bp, Homo sapien
cttcatggtgccagtcacgtaattt

SEQ ID NO: 3181447 - DNA, 25 bp, Homo sapien
taagagcacgtgctgaaacttcatg

SEQ ID NO: 3181448 - DNA, 25 bp, Homo sapien
tgtatttgggactaaagacgtgaag

SEQ ID NO: 3181449 - DNA, 25 bp, Homo sapien
ggtgccagtcacgtaattttgtgta

SEQ ID NO: 3181450 - DNA, 25 bp, Homo sapien
tacactatattacaaggcagaaagc

SEQ ID NO: 3181451 - DNA, 25 bp, Homo sapien
catttgtgagctaccaactagcaca

SEQ ID NO: 3181452 - DNA, 25 bp, Homo sapien
gatacctaaatctacaatgcacgca

SEQ ID NO: 3181453 - DNA, 25 bp, Homo sapien
agcagtgcacagtagtttacgtcac

SEQ ID NO: 3181454 - DNA, 25 bp, Homo sapien
gcactgtgtctagcctcaaggaaac

SEQ ID NO: 3181455 - DNA, 25 bp, Homo sapien
aataagtcctggatggcactgtgtc

SEQ ID NO: 3181456 - DNA, 25 bp, Homo sapien
ctgtaataagtcctggatggcactg

SEQ ID NO: 3181457 - DNA, 25 bp, Homo sapien
atggcactgtgtctagcctcaagga

SEQ ID NO: 3181458 - DNA, 25 bp, Homo sapien
tactcacataggatactacatattg

SEQ ID NO: 3181459 - DNA, 25 bp, Homo sapien
tttatgttactcacataggatacta

SEQ ID NO: 3181460 - DNA, 25 bp, Homo sapien
gatactacatattgtaataattcag

SEQ ID NO: 3181461 - DNA, 25 bp, Homo sapien
agggggaaaatcaaacatgatcctt

SEQ ID NO: 3181462 - DNA, 25 bp, Homo sapien
cagctacagttgcatccaggaagaa

SEQ ID NO: 3181463 - DNA, 25 bp, Homo sapien
ggaccctgacccaatagaactgatg

SEQ ID NO: 3181464 - DNA, 25 bp, Homo sapien
tccattagagatagtgtgtgccacg

SEQ ID NO: 3181465 - DNA, 25 bp, Homo sapien
tgagacagtggccatacacaaccgt

SEQ ID NO: 3181466 - DNA, 25 bp, Homo sapien
cggtttcccggctcaacataactgt

SEQ ID NO: 3181467 - DNA, 25 bp, Homo sapien
tggtgctagaagatagcctacaaga

SEQ ID NO: 3181468 - DNA, 25 bp, Homo sapien
tggccttcagccagaaatcatgtgg

SEQ ID NO: 3181469 - DNA, 25 bp, Homo sapien
gggaagccatatcataccttataat

SEQ ID NO: 3181470 - DNA, 25 bp, Homo sapien
tatcaggctagggaataattcctgc

SEQ ID NO: 3181471 - DNA, 25 bp, Homo sapien
gatggcgacctttacattgtagtca

SEQ ID NO: 3181472 - DNA, 25 bp, Homo sapien
taagtactagtctcacaaggaactg

SEQ ID NO: 3181473 - DNA, 25 bp, Homo sapien
tacttatgttcaacagatggcgacc

SEQ ID NO: 3181474 - DNA, 25 bp, Homo sapien
ggcatattacgaacactgactttta

SEQ ID NO: 3181475 - DNA, 25 bp, Homo sapien
gggattatgaaagccaacttggcat

SEQ ID NO: 3181476 - DNA, 25 bp, Homo sapien
tattctgggattatgaaagccaact

SEQ ID NO: 3181477 - DNA, 25 bp, Homo sapien
gccaacttggcatattacgaacact

SEQ ID NO: 3181478 - DNA, 25 bp, Homo sapien
gaaagtgaagatgtctaaatatcca

SEQ ID NO: 3181479 - DNA, 25 bp, Homo sapien
gaagtctgcctatcatcaatgctct

SEQ ID NO: 3181480 - DNA, 25 bp, Homo sapien
tgaaatacataaactagaatagcag

SEQ ID NO: 3181481 - DNA, 25 bp, Homo sapien
tgcaggagtcttcttcaatactgag

SEQ ID NO: 3181482 - DNA, 25 bp, Homo sapien
gaccgaagtgtggtgtgtggtcgtg

SEQ ID NO: 3181483 - DNA, 25 bp, Homo sapien
cacgaccacacaccacacttcggtc

SEQ ID NO: 3181484 - DNA, 25 bp, Homo sapien
gtttcttcactggatcattctgatc

SEQ ID NO: 3181485 - DNA, 25 bp, Homo sapien
cagtttcttcactggatcattctga

SEQ ID NO: 3181486 - DNA, 25 bp, Homo sapien
catcagtttcttcactggatcattc

SEQ ID NO: 3181487 - DNA, 25 bp, Homo sapien
tcagtttcttcactggatcattctg

SEQ ID NO: 3181488 - DNA, 25 bp, Homo sapien
taacatgggtcagcaaaccacggca

SEQ ID NO: 3181489 - DNA, 25 bp, Homo sapien
ccacggcatgctggccaaattcagg

SEQ ID NO: 3181490 - DNA, 25 bp, Homo sapien
tacacagctaccagagtgaactctg

SEQ ID NO: 3181491 - DNA, 25 bp, Homo sapien
cctgctctaggtgatcttgggctac

SEQ ID NO: 3181492 - DNA, 25 bp, Homo sapien
ccacttggctaccaatagttaacac

SEQ ID NO: 3181493 - DNA, 25 bp, Homo sapien
gctactttagaaagtgtggccactt

SEQ ID NO: 3181494 - DNA, 25 bp, Homo sapien
tgaggtccactcttaggtaggtctt

SEQ ID NO: 3181495 - DNA, 25 bp, Homo sapien
caatagttaacacctgaggagttgc

SEQ ID NO: 3181496 - DNA, 25 bp, Homo sapien
tcttccacatttcctgtggagctgc

SEQ ID NO: 3181497 - DNA, 25 bp, Homo sapien
gtagcagctgcgctgctcagaactg

SEQ ID NO: 3181498 - DNA, 25 bp, Homo sapien
gaatcttccacatttcctgtggagc

SEQ ID NO: 3181499 - DNA, 25 bp, Homo sapien
cgctgctcagaactgcagcactata

SEQ ID NO: 3181500 - DNA, 25 bp, Homo sapien
gagacagggctgatgcaaagtgcat

SEQ ID NO: 3181501 - DNA, 25 bp, Homo sapien
ccaggagtgagtgatatctttcagg

SEQ ID NO: 3181502 - DNA, 25 bp, Homo sapien
gttttcttaacatggatagagccag

SEQ ID NO: 3181503 - DNA, 25 bp, Homo sapien
gatttccttgaggactgcagatagg

SEQ ID NO: 3181504 - DNA, 25 bp, Homo sapien
gatctatagctcttaccgggtccta

SEQ ID NO: 3181505 - DNA, 25 bp, Homo sapien
tctcactaagttagcaagggtctcc

SEQ ID NO: 3181506 - DNA, 25 bp, Homo sapien
tactaatactcgctctagaggtggg

SEQ ID NO: 3181507 - DNA, 25 bp, Homo sapien
gcatgtatatgcacgcaggcacttt

SEQ ID NO: 3181508 - DNA, 25 bp, Homo sapien
gaaacaacccttgcctaacagaaca

SEQ ID NO: 3181509 - DNA, 25 bp, Homo sapien
tatcgaaacaataaacctaggagtg

SEQ ID NO: 3181510 - DNA, 25 bp, Homo sapien
ccaaacgttggttgtgctatgcact

SEQ ID NO: 3181511 - DNA, 25 bp, Homo sapien
aataaatcttagtcaggagtgcaac

SEQ ID NO: 3181512 - DNA, 25 bp, Homo sapien
cttggtttggccgttgccagcttgg

SEQ ID NO: 3181513 - DNA, 25 bp, Homo sapien
gccagcttggtgacttgatgacgcc

SEQ ID NO: 3181514 - DNA, 25 bp, Homo sapien
taacccctggtctgccagaggttgg

SEQ ID NO: 3181515 - DNA, 25 bp, Homo sapien
catgctccgtgtggaagctaccgag

SEQ ID NO: 3181516 - DNA, 25 bp, Homo sapien
aagcaagacgcaagagatttctctg

SEQ ID NO: 3181517 - DNA, 25 bp, Homo sapien
ttacgaaaagcaagacgcaagagat

SEQ ID NO: 3181518 - DNA, 25 bp, Homo sapien
cgaaaagcaagacgcaagagatttc

SEQ ID NO: 3181519 - DNA, 25 bp, Homo sapien
aaaagcaagacgcaagagatttctc

SEQ ID NO: 3181520 - DNA, 25 bp, Homo sapien
agatggtttagtgcaaccaagcaca

SEQ ID NO: 3181521 - DNA, 25 bp, Homo sapien
gaagggtgggatagtcaagcatcca

SEQ ID NO: 3181522 - DNA, 25 bp, Homo sapien
ctgagaagttagtaggggccaaagt

SEQ ID NO: 3181523 - DNA, 25 bp, Homo sapien
caaagtataaaaggtcctaaatgat

SEQ ID NO: 3181524 - DNA, 25 bp, Homo sapien
aatttcaagtttggcaggaggacag

SEQ ID NO: 3181525 - DNA, 25 bp, Homo sapien
aatgcttcaagaagagtggagctcc

SEQ ID NO: 3181526 - DNA, 25 bp, Homo sapien
tctaatagcagcctttggcagacag

SEQ ID NO: 3181527 - DNA, 25 bp, Homo sapien
ggtactgctcatgttcacgatctta

SEQ ID NO: 3181528 - DNA, 25 bp, Homo sapien
caatgcatagattaaacacctggcc

SEQ ID NO: 3181529 - DNA, 25 bp, Homo sapien
tgttgctagtgtcttctaaggcagc

SEQ ID NO: 3181530 - DNA, 25 bp, Homo sapien
tggttggattagagcagtgactgcc

SEQ ID NO: 3181531 - DNA, 25 bp, Homo sapien
tcttgccaccaacaaaaaagtcagt

SEQ ID NO: 3181532 - DNA, 25 bp, Homo sapien
tgggacataatccatctggcccatg

SEQ ID NO: 3181533 - DNA, 25 bp, Homo sapien
aaaaggctctaagttctaccgctat

SEQ ID NO: 3181534 - DNA, 25 bp, Homo sapien
gctctaaagtactgagtcactgaga

SEQ ID NO: 3181535 - DNA, 25 bp, Homo sapien
catgcctcaaggagaaggtatacgg

SEQ ID NO: 3181536 - DNA, 25 bp, Homo sapien
tctaacacctgttattatctttaaa

SEQ ID NO: 3181537 - DNA, 25 bp, Homo sapien
tttctccaggacgttttcaactcta

SEQ ID NO: 3181538 - DNA, 25 bp, Homo sapien
tcaactctaacacctgttattatct

SEQ ID NO: 3181539 - DNA, 25 bp, Homo sapien
ctccaggacgttttcaactctaaca

SEQ ID NO: 3181540 - DNA, 25 bp, Homo sapien
cactgatcctgagtaagtagcgctg

SEQ ID NO: 3181541 - DNA, 25 bp, Homo sapien
atcggagttcgtttccctgctggaa

SEQ ID NO: 3181542 - DNA, 25 bp, Homo sapien
agtagcgctgtttgagattcttcca

SEQ ID NO: 3181543 - DNA, 25 bp, Homo sapien
ttacaatgggcgcacatcggagttc

SEQ ID NO: 3181544 - DNA, 25 bp, Homo sapien
taattactgttacatgatcttgaca

SEQ ID NO: 3181545 - DNA, 25 bp, Homo sapien
caggcaaatgtgctatgttaattac

SEQ ID NO: 3181546 - DNA, 25 bp, Homo sapien
gctgcttaagcatttgagcaccagg

SEQ ID NO: 3181547 - DNA, 25 bp, Homo sapien
gatcttgacatgaactaatccccat

SEQ ID NO: 3181548 - DNA, 25 bp, Homo sapien
ttttgggaatccagtagaataatac

SEQ ID NO: 3181549 - DNA, 25 bp, Homo sapien
gaataatatcaatcctctggagtta

SEQ ID NO: 3181550 - DNA, 25 bp, Homo sapien
tcctatgtagtggtagttaaaagca

SEQ ID NO: 3181551 - DNA, 25 bp, Homo sapien
tcttggcatgataccaatcaagttc

SEQ ID NO: 3181552 - DNA, 25 bp, Homo sapien
ggtcttccctcaatatgtgtcagtg

SEQ ID NO: 3181553 - DNA, 25 bp, Homo sapien
tccccttagtgtatagatggccatc

SEQ ID NO: 3181554 - DNA, 25 bp, Homo sapien
caagatgtcaagagggcttctcccc

SEQ ID NO: 3181555 - DNA, 25 bp, Homo sapien
catggtgccagtatggtaacttgca

SEQ ID NO: 3181556 - DNA, 25 bp, Homo sapien
tagtttgatctttttctagagtctt

SEQ ID NO: 3181557 - DNA, 25 bp, Homo sapien
ttgatctttttctagagtcttaagg

SEQ ID NO: 3181558 - DNA, 25 bp, Homo sapien
tctaagttttggacttagtttgatc

SEQ ID NO: 3181559 - DNA, 25 bp, Homo sapien
gatctttttctagagtcttaaggta

SEQ ID NO: 3181560 - DNA, 25 bp, Homo sapien
gtatttttgcagtgagcgcagttga

SEQ ID NO: 3181561 - DNA, 25 bp, Homo sapien
tccccagtgccactaagaatggtcc

SEQ ID NO: 3181562 - DNA, 25 bp, Homo sapien
ttccccagtgccactaagaatggtc

SEQ ID NO: 3181563 - DNA, 25 bp, Homo sapien
agtgagcgcagttgaattcttctgg

SEQ ID NO: 3181564 - DNA, 25 bp, Homo sapien
cctttctcctctacaaatccaatgt

SEQ ID NO: 3181565 - DNA, 25 bp, Homo sapien
tcttcctttggcatcgaccacattc

SEQ ID NO: 3181566 - DNA, 25 bp, Homo sapien
cctctacaaatccaatgtaggccat

SEQ ID NO: 3181567 - DNA, 25 bp, Homo sapien
cctttggcatcgaccacattcaggg

SEQ ID NO: 3181568 - DNA, 25 bp, Homo sapien
gactcgaatgtgtaaaatttggacc

SEQ ID NO: 3181569 - DNA, 25 bp, Homo sapien
ttctagtcagcaatggcccaatggt

SEQ ID NO: 3181570 - DNA, 25 bp, Homo sapien
tcactactgaaggacaatgggaaga

SEQ ID NO: 3181571 - DNA, 25 bp, Homo sapien
aagttctggcccatctccaaggcaa

SEQ ID NO: 3181572 - DNA, 25 bp, Homo sapien
agtttgtttcaacgcactgatgact

SEQ ID NO: 3181573 - DNA, 25 bp, Homo sapien
gccaagtttgtttcaacgcactgat

SEQ ID NO: 3181574 - DNA, 25 bp, Homo sapien
caagtttgtttcaacgcactgatga

SEQ ID NO: 3181575 - DNA, 25 bp, Homo sapien
tttgtttcaacgcactgatgacttc

SEQ ID NO: 3181576 - DNA, 25 bp, Homo sapien
cattgttccgaatgggctttccaca

SEQ ID NO: 3181577 - DNA, 25 bp, Homo sapien
tgaaaaacattgttccgaatgggct

SEQ ID NO: 3181578 - DNA, 25 bp, Homo sapien
cacagtagggttcaccatcctccaa

SEQ ID NO: 3181579 - DNA, 25 bp, Homo sapien
gggttcaccatcctccaagtgaaaa

SEQ ID NO: 3181580 - DNA, 25 bp, Homo sapien
tgggagacagtctggaatatatcca

SEQ ID NO: 3181581 - DNA, 25 bp, Homo sapien
ggagacagtctggaatatatccagg

SEQ ID NO: 3181582 - DNA, 25 bp, Homo sapien
agcccatggggtacttcactggaat

SEQ ID NO: 3181583 - DNA, 25 bp, Homo sapien
tcactggaatttctggggttcctgg

SEQ ID NO: 3181584 - DNA, 25 bp, Homo sapien
cagaccaagttgattagatgtgaca

SEQ ID NO: 3181585 - DNA, 25 bp, Homo sapien
gaatatagaggaatcgccgcagaaa

SEQ ID NO: 3181586 - DNA, 25 bp, Homo sapien
gaaggaaggatctcagcatgttcag

SEQ ID NO: 3181587 - DNA, 25 bp, Homo sapien
tatacgttggaggtagagctgccag

SEQ ID NO: 3181588 - DNA, 25 bp, Homo sapien
tgggaaattcacatccatggcatat

SEQ ID NO: 3181589 - DNA, 25 bp, Homo sapien
gtgtcatgccaggtgtagcccagag

SEQ ID NO: 3181590 - DNA, 25 bp, Homo sapien
catggcatatagtaccaaagagggc

SEQ ID NO: 3181591 - DNA, 25 bp, Homo sapien
gcttccaggaacatgtcaccagctt

SEQ ID NO: 3181592 - DNA, 25 bp, Homo sapien
ttcccagtgttaatccaatagccga

SEQ ID NO: 3181593 - DNA, 25 bp, Homo sapien
tctctaaggactaaggatctcactg

SEQ ID NO: 3181594 - DNA, 25 bp, Homo sapien
gaatccatcctaatcattaaacata

SEQ ID NO: 3181595 - DNA, 25 bp, Homo sapien
cacgtttattggaccatagtctcaa

SEQ ID NO: 3181596 - DNA, 25 bp, Homo sapien
tggagaaaaaggtctgaccttccaa

SEQ ID NO: 3181597 - DNA, 25 bp, Homo sapien
ttggagaaaaaggtctgaccttcca

SEQ ID NO: 3181598 - DNA, 25 bp, Homo sapien
aatgagcatgtttcttacacagggg

SEQ ID NO: 3181599 - DNA, 25 bp, Homo sapien
atgagcatgtttcttacacaggggc

SEQ ID NO: 3181600 - DNA, 25 bp, Homo sapien
attccttcagggccactattatttt

SEQ ID NO: 3181601 - DNA, 25 bp, Homo sapien
tttattccttcagggccactattat

SEQ ID NO: 3181602 - DNA, 25 bp, Homo sapien
ttattccttcagggccactattatt

SEQ ID NO: 3181603 - DNA, 25 bp, Homo sapien
tattccttcagggccactattattt

SEQ ID NO: 3181604 - DNA, 25 bp, Homo sapien
accgcgctcagcctacaagcaattt

SEQ ID NO: 3181605 - DNA, 25 bp, Homo sapien
caaaccgtctctttactttatgaag

SEQ ID NO: 3181606 - DNA, 25 bp, Homo sapien
cataactacctaacaaggaaagaag

SEQ ID NO: 3181607 - DNA, 25 bp, Homo sapien
gatgaatttaatagtccatcaggaa

SEQ ID NO: 3181608 - DNA, 25 bp, Homo sapien
tggtccacccaccttggcctcccaa

SEQ ID NO: 3181609 - DNA, 25 bp, Homo sapien
gtggtccacccaccttggcctccca

SEQ ID NO: 3181610 - DNA, 25 bp, Homo sapien
aggcgcgtgccactgcgtccggcta

SEQ ID NO: 3181611 - DNA, 25 bp, Homo sapien
gcgcgtgccactgcgtccggctaat

SEQ ID NO: 3181612 - DNA, 25 bp, Homo sapien
tacatgttcagcaaaggcgcaacca

SEQ ID NO: 3181613 - DNA, 25 bp, Homo sapien
aacagatataaagcttcgccacgga

SEQ ID NO: 3181614 - DNA, 25 bp, Homo sapien
tgaatcacagatgcgaagcctatgg

SEQ ID NO: 3181615 - DNA, 25 bp, Homo sapien
ggcaaatagcaacaggatccacagt

SEQ ID NO: 3181616 - DNA, 25 bp, Homo sapien
catgcacggcataagaacagagaga

SEQ ID NO: 3181617 - DNA, 25 bp, Homo sapien
aaatatcatactagaagggttcttc

SEQ ID NO: 3181618 - DNA, 25 bp, Homo sapien
cctaacctgtgaatatggaacttga

SEQ ID NO: 3181619 - DNA, 25 bp, Homo sapien
cattgggtacattctacatgcacgg

SEQ ID NO: 3181620 - DNA, 25 bp, Homo sapien
ttgcttcatgacatgggtactgtgt

SEQ ID NO: 3181621 - DNA, 25 bp, Homo sapien
catgggtactgtgtattccaggcct

SEQ ID NO: 3181622 - DNA, 25 bp, Homo sapien
cacagcggcacccaactctttctgt

SEQ ID NO: 3181623 - DNA, 25 bp, Homo sapien
tcatgacatgggtactgtgtattcc

SEQ ID NO: 3181624 - DNA, 25 bp, Homo sapien
tctcttcctggatctaggtgttgca

SEQ ID NO: 3181625 - DNA, 25 bp, Homo sapien
tgtgtggtccatcagagcgcatgtg

SEQ ID NO: 3181626 - DNA, 25 bp, Homo sapien
ccaaggtagcagaaggactattcca

SEQ ID NO: 3181627 - DNA, 25 bp, Homo sapien
tactgacttgcacatccaaattgca

SEQ ID NO: 3181628 - DNA, 25 bp, Homo sapien
cgccaacagcccatgcaggatctgt

SEQ ID NO: 3181629 - DNA, 25 bp, Homo sapien
gctggcatttagtgttctggctccg

SEQ ID NO: 3181630 - DNA, 25 bp, Homo sapien
ttagtgttctggctccgccaacagc

SEQ ID NO: 3181631 - DNA, 25 bp, Homo sapien
gttttacttttcactagtgtcatag

SEQ ID NO: 3181632 - DNA, 25 bp, Homo sapien
caagcaggtttagtgggaaaagtat

SEQ ID NO: 3181633 - DNA, 25 bp, Homo sapien
tcagtggagtacagcattcatgttg

SEQ ID NO: 3181634 - DNA, 25 bp, Homo sapien
gagtacagcattcatgttggcctct

SEQ ID NO: 3181635 - DNA, 25 bp, Homo sapien
gttggcctctgtccaagcaggttta

SEQ ID NO: 3181636 - DNA, 25 bp, Homo sapien
cctttcgggagcatcgtgtgggaaa

SEQ ID NO: 3181637 - DNA, 25 bp, Homo sapien
tggcagcgtgtttgccatctggttc

SEQ ID NO: 3181638 - DNA, 25 bp, Homo sapien
gtgctctttggcagcgtgtttgcca

SEQ ID NO: 3181639 - DNA, 25 bp, Homo sapien
cacaacagccctttcgggagcatcg

SEQ ID NO: 3181640 - DNA, 25 bp, Homo sapien
tcaacgtgagcgcattcacgatgtt

SEQ ID NO: 3181641 - DNA, 25 bp, Homo sapien
tccacactctcaacgtgagcgcatt

SEQ ID NO: 3181642 - DNA, 25 bp, Homo sapien
cattcacgatgttttgaggactctc

SEQ ID NO: 3181643 - DNA, 25 bp, Homo sapien
atcaagcccagcacaccgagacagt

SEQ ID NO: 3181644 - DNA, 25 bp, Homo sapien
tatttgcactaagttcccatgatgt

SEQ ID NO: 3181645 - DNA, 25 bp, Homo sapien
caatatctgtccaccagaggtttct

SEQ ID NO: 3181646 - DNA, 25 bp, Homo sapien
tcaatatctgtccaccagaggtttc

SEQ ID NO: 3181647 - DNA, 25 bp, Homo sapien
ggagatttatttgcactaagttccc

SEQ ID NO: 3181648 - DNA, 25 bp, Homo sapien
ttgctgcagcaggtggatcagctcc

SEQ ID NO: 3181649 - DNA, 25 bp, Homo sapien
cagagaacagggctcttgctgcagc

SEQ ID NO: 3181650 - DNA, 25 bp, Homo sapien
tcagtagtcagcagagaacagggct

SEQ ID NO: 3181651 - DNA, 25 bp, Homo sapien
cttgctgcagcaggtggatcagctc

SEQ ID NO: 3181652 - DNA, 25 bp, Homo sapien
tcatggacaccagctgatcagaatg

SEQ ID NO: 3181653 - DNA, 25 bp, Homo sapien
tagccttcaagttgttggacagtgc

SEQ ID NO: 3181654 - DNA, 25 bp, Homo sapien
tagaagcaatagctgaggactgagc

SEQ ID NO: 3181655 - DNA, 25 bp, Homo sapien
gagttaacaactggtgctgcctcat

SEQ ID NO: 3181656 - DNA, 25 bp, Homo sapien
ccagtagcaccggaaagcagttcca

SEQ ID NO: 3181657 - DNA, 25 bp, Homo sapien
tcagcacaaaaagccgcagagacct

SEQ ID NO: 3181658 - DNA, 25 bp, Homo sapien
gaggccctgttgtaccctcaggcag

SEQ ID NO: 3181659 - DNA, 25 bp, Homo sapien
ttatgaaaaattgccgcttcggagc

SEQ ID NO: 3181660 - DNA, 25 bp, Homo sapien
cagccaagaaatcatagaattcttt

SEQ ID NO: 3181661 - DNA, 25 bp, Homo sapien
ccagccaagaaatcatagaattctt

SEQ ID NO: 3181662 - DNA, 25 bp, Homo sapien
tctacctggtcctcaatccaatttt

SEQ ID NO: 3181663 - DNA, 25 bp, Homo sapien
gatttcaacttttcggggccataga

SEQ ID NO: 3181664 - DNA, 25 bp, Homo sapien
ggggccatagacacttttcagaaat

SEQ ID NO: 3181665 - DNA, 25 bp, Homo sapien
gatataatgtcgtggatttcaactt

SEQ ID NO: 3181666 - DNA, 25 bp, Homo sapien
aagggctcgcagagatgatataatg

SEQ ID NO: 3181667 - DNA, 25 bp, Homo sapien
acttctcaacgcacttggagcggcc

SEQ ID NO: 3181668 - DNA, 25 bp, Homo sapien
gtacttagcggagggattacacttc

SEQ ID NO: 3181669 - DNA, 25 bp, Homo sapien
caagatttccctcatgggtcctgtc

SEQ ID NO: 3181670 - DNA, 25 bp, Homo sapien
ccactagtgattggagactgagagc

SEQ ID NO: 3181671 - DNA, 25 bp, Homo sapien
ccgcgaggccccgccgactccgcgc

SEQ ID NO: 3181672 - DNA, 25 bp, Homo sapien
cgcggtctccgcactgcccggcgtc

SEQ ID NO: 3181673 - DNA, 25 bp, Homo sapien
gcgccgcggtctccgcactgcccgg

SEQ ID NO: 3181674 - DNA, 25 bp, Homo sapien
tcagcgccgcggtctccgcactgcc

SEQ ID NO: 3181675 - DNA, 25 bp, Homo sapien
caggcaactgaagcagagacggagc

SEQ ID NO: 3181676 - DNA, 25 bp, Homo sapien
gagaatgaaagacccagaacttgag

SEQ ID NO: 3181677 - DNA, 25 bp, Homo sapien
tctaataactcaagggaactgcagc

SEQ ID NO: 3181678 - DNA, 25 bp, Homo sapien
tctaaagaagtaagacccgcaccac

SEQ ID NO: 3181679 - DNA, 25 bp, Homo sapien
tcactggcacctttgtggccgctcg

SEQ ID NO: 3181680 - DNA, 25 bp, Homo sapien
tggccgctcgtagtcactgacctca

SEQ ID NO: 3181681 - DNA, 25 bp, Homo sapien
cctttgtggccgctcgtagtcactg

SEQ ID NO: 3181682 - DNA, 25 bp, Homo sapien
cactgacctcaccttgctggaaagg

SEQ ID NO: 3181683 - DNA, 25 bp, Homo sapien
gctggaagtcgttttctgggtagtg

SEQ ID NO: 3181684 - DNA, 25 bp, Homo sapien
tggaagtcgttttctgggtagtgaa

SEQ ID NO: 3181685 - DNA, 25 bp, Homo sapien
ctggaagtcgttttctgggtagtga

SEQ ID NO: 3181686 - DNA, 25 bp, Homo sapien
tcttaacatacttcacagaatggtg

SEQ ID NO: 3181687 - DNA, 25 bp, Homo sapien
tagtaagtgtcaaaagtcaaatcgt

SEQ ID NO: 3181688 - DNA, 25 bp, Homo sapien
gttacagtccttgtaccaagcatat

SEQ ID NO: 3181689 - DNA, 25 bp, Homo sapien
aatatatcccatgctgatcacaaag

SEQ ID NO: 3181690 - DNA, 25 bp, Homo sapien
gaatgatggagttagtaaagaaact

SEQ ID NO: 3181691 - DNA, 25 bp, Homo sapien
taagactatgcctacaaaataccaa

SEQ ID NO: 3181692 - DNA, 25 bp, Homo sapien
gaaactgttgatattcacaatagaa

SEQ ID NO: 3181693 - DNA, 25 bp, Homo sapien
tagtaacttccaatcagagaatgat

SEQ ID NO: 3181694 - DNA, 25 bp, Homo sapien
ggaaggtgctggaagtagccttaac

SEQ ID NO: 3181695 - DNA, 25 bp, Homo sapien
gatgtaaaagaggaaatatagatta

SEQ ID NO: 3181696 - DNA, 25 bp, Homo sapien
gggctaacctacaagatctccaaaa

SEQ ID NO: 3181697 - DNA, 25 bp, Homo sapien
agtcagtgggctaacctacaagatc

SEQ ID NO: 3181698 - DNA, 25 bp, Homo sapien
gcagggctaatcatgtctcggtaag

SEQ ID NO: 3181699 - DNA, 25 bp, Homo sapien
gcctcaagggagaaaccagtcaata

SEQ ID NO: 3181700 - DNA, 25 bp, Homo sapien
taagttaaaacttgtgtagagcctc

SEQ ID NO: 3181701 - DNA, 25 bp, Homo sapien
ccagtcaatataatccactggattt

SEQ ID NO: 3181702 - DNA, 25 bp, Homo sapien
cagaggtcacatcgttaaatccagt

SEQ ID NO: 3181703 - DNA, 25 bp, Homo sapien
taagctggatcattagtgaagcaaa

SEQ ID NO: 3181704 - DNA, 25 bp, Homo sapien
ggaaatacccttgacatgcataaca

SEQ ID NO: 3181705 - DNA, 25 bp, Homo sapien
cacaaagtcgcagaacagaggtcac

SEQ ID NO: 3181706 - DNA, 25 bp, Homo sapien
tcaactgcataacacttcaacctgg

SEQ ID NO: 3181707 - DNA, 25 bp, Homo sapien
taaaagagacttcctgtgggagtca

SEQ ID NO: 3181708 - DNA, 25 bp, Homo sapien
gataaccaatgagatacacagggaa

SEQ ID NO: 3181709 - DNA, 25 bp, Homo sapien
ttctcaaagagggaaccagttcaac

SEQ ID NO: 3181710 - DNA, 25 bp, Homo sapien
ggctctgcaatagtgtaaactgatc

SEQ ID NO: 3181711 - DNA, 25 bp, Homo sapien
ccaaactggatcacggtttacacag

SEQ ID NO: 3181712 - DNA, 25 bp, Homo sapien
cactaatgctaaagttaaccagaca

SEQ ID NO: 3181713 - DNA, 25 bp, Homo sapien
agacatttcataattcatccaaggg

SEQ ID NO: 3181714 - DNA, 25 bp, Homo sapien
tcaacgttgaccattccacagtcgt

SEQ ID NO: 3181715 - DNA, 25 bp, Homo sapien
tcaatcggattgtgatgtgcaacga

SEQ ID NO: 3181716 - DNA, 25 bp, Homo sapien
tatactagaagttgacaaagcactc

SEQ ID NO: 3181717 - DNA, 25 bp, Homo sapien
cacagtcgttcagcgtttaaagcaa

SEQ ID NO: 3181718 - DNA, 25 bp, Homo sapien
ccagcatccaaaccaagtcatgagc

SEQ ID NO: 3181719 - DNA, 25 bp, Homo sapien
tggaattccagcatccaaaccaagt

SEQ ID NO: 3181720 - DNA, 25 bp, Homo sapien
tcaaagctttcactgctctactcat

SEQ ID NO: 3181721 - DNA, 25 bp, Homo sapien
ccaaaccaagtcatgagctttcaaa

SEQ ID NO: 3181722 - DNA, 25 bp, Homo sapien
gattataacaggtatcatccctcct

SEQ ID NO: 3181723 - DNA, 25 bp, Homo sapien
attataacaggtatcatccctcctt

SEQ ID NO: 3181724 - DNA, 25 bp, Homo sapien
tggaagagctgctactgttgagtgc

SEQ ID NO: 3181725 - DNA, 25 bp, Homo sapien
gttcataaggttctaaactacacca

SEQ ID NO: 3181726 - DNA, 25 bp, Homo sapien
ccatcctggtgaaccgttttattgg

SEQ ID NO: 3181727 - DNA, 25 bp, Homo sapien
taatcagtgatccagaaagtgtaaa

SEQ ID NO: 3181728 - DNA, 25 bp, Homo sapien
tttggaaatccagcatacccctcta

SEQ ID NO: 3181729 - DNA, 25 bp, Homo sapien
aactatcttggtctgactgatgaaa

SEQ ID NO: 3181730 - DNA, 25 bp, Homo sapien
tctacgaggacggtaactatcttgg

SEQ ID NO: 3181731 - DNA, 25 bp, Homo sapien
gaaatttgcagactctactgtgttt

SEQ ID NO: 3181732 - DNA, 25 bp, Homo sapien
gggaccacgaatccacaatatatta

SEQ ID NO: 3181733 - DNA, 25 bp, Homo sapien
tgtaatcagtgataccaatctgggt

SEQ ID NO: 3181734 - DNA, 25 bp, Homo sapien
tctgggtttgcaggtccccggagtc

SEQ ID NO: 3181735 - DNA, 25 bp, Homo sapien
tttcgaattagtactctgaccaaga

SEQ ID NO: 3181736 - DNA, 25 bp, Homo sapien
tgctgttttctatgacttacgctgc

SEQ ID NO: 3181737 - DNA, 25 bp, Homo sapien
gatgcagtagtcagctgctccccct

SEQ ID NO: 3181738 - DNA, 25 bp, Homo sapien
ttctatgacttacgctgctagctgg

SEQ ID NO: 3181739 - DNA, 25 bp, Homo sapien
tctcccaggttcttgctgttttcta

SEQ ID NO: 3181740 - DNA, 25 bp, Homo sapien
gttctctcatctcccaatttagttg

SEQ ID NO: 3181741 - DNA, 25 bp, Homo sapien
tacccattctaacataaagagtggc

SEQ ID NO: 3181742 - DNA, 25 bp, Homo sapien
aagagtggcctcttgaagctcagtt

SEQ ID NO: 3181743 - DNA, 25 bp, Homo sapien
cccaatttagttggctctagacagt

SEQ ID NO: 3181744 - DNA, 25 bp, Homo sapien
tcctttcacatctaagaaagagtag

SEQ ID NO: 3181745 - DNA, 25 bp, Homo sapien
catctaagaaagagtaggctgaact

SEQ ID NO: 3181746 - DNA, 25 bp, Homo sapien
tcacatctaagaaagagtaggctga

SEQ ID NO: 3181747 - DNA, 25 bp, Homo sapien
taagaaagagtaggctgaactccac

SEQ ID NO: 3181748 - DNA, 25 bp, Homo sapien
aggtgagctcagtcacttttcgaag

SEQ ID NO: 3181749 - DNA, 25 bp, Homo sapien
ttttcgaagtctattttcaaggctc

SEQ ID NO: 3181750 - DNA, 25 bp, Homo sapien
tcagatgcacatcactttataataa

SEQ ID NO: 3181751 - DNA, 25 bp, Homo sapien
gatacagttctctcatcagtggaag

SEQ ID NO: 3181752 - DNA, 25 bp, Homo sapien
tataacttaggcatagcacttacaa

SEQ ID NO: 3181753 - DNA, 25 bp, Homo sapien
gacctgcttggtcaatcattaacag

SEQ ID NO: 3181754 - DNA, 25 bp, Homo sapien
catgcttacagatttaagacctgct

SEQ ID NO: 3181755 - DNA, 25 bp, Homo sapien
tatcaagtgcagtatttgtagagct

SEQ ID NO: 3181756 - DNA, 25 bp, Homo sapien
tgaaggtggtatttccctccattga

SEQ ID NO: 3181757 - DNA, 25 bp, Homo sapien
tttttggtcaatctggcaaattcca

SEQ ID NO: 3181758 - DNA, 25 bp, Homo sapien
gagtcctccaagtttgtggttctcc

SEQ ID NO: 3181759 - DNA, 25 bp, Homo sapien
tcattgccaaagaatcgctcttcgt

SEQ ID NO: 3181760 - DNA, 25 bp, Homo sapien
caactgccagcagtaataaactgcc

SEQ ID NO: 3181761 - DNA, 25 bp, Homo sapien
cacactcaactgccagcagtaataa

SEQ ID NO: 3181762 - DNA, 25 bp, Homo sapien
cactcaactgccagcagtaataaac

SEQ ID NO: 3181763 - DNA, 25 bp, Homo sapien
ctcaactgccagcagtaataaactg

SEQ ID NO: 3181764 - DNA, 25 bp, Homo sapien
ggtgccgtggagttagcctctaact

SEQ ID NO: 3181765 - DNA, 25 bp, Homo sapien
catgctatggactctagggtgccgt

SEQ ID NO: 3181766 - DNA, 25 bp, Homo sapien
ccaaatatctgcgaatacaggtgca

SEQ ID NO: 3181767 - DNA, 25 bp, Homo sapien
gtttcccaggctagtatacaagttg

SEQ ID NO: 3181768 - DNA, 25 bp, Homo sapien
ttcctatgagggtgttggcaaacaa

SEQ ID NO: 3181769 - DNA, 25 bp, Homo sapien
cattcatccgtgcagtggtttctga

SEQ ID NO: 3181770 - DNA, 25 bp, Homo sapien
ggagacacaataggccccacaatct

SEQ ID NO: 3181771 - DNA, 25 bp, Homo sapien
gaccctgaaggtgtgcaaagcctgt

SEQ ID NO: 3181772 - DNA, 25 bp, Homo sapien
catgatcaccaaatttaacaaggtg

SEQ ID NO: 3181773 - DNA, 25 bp, Homo sapien
tatagccaaataactcatgaaactc

SEQ ID NO: 3181774 - DNA, 25 bp, Homo sapien
ccagagtatccattcaaaatgacag

SEQ ID NO: 3181775 - DNA, 25 bp, Homo sapien
caaactcctctaagctaatattgtg

SEQ ID NO: 3181776 - DNA, 25 bp, Homo sapien
tcttcataaactcaaacatcaattt

SEQ ID NO: 3181777 - DNA, 25 bp, Homo sapien
gactacttgatccttcaataataat

SEQ ID NO: 3181778 - DNA, 25 bp, Homo sapien
tgtttcttcataaactcaaacatca

SEQ ID NO: 3181779 - DNA, 25 bp, Homo sapien
caaaagactacttgatccttcaata

SEQ ID NO: 3181780 - DNA, 25 bp, Homo sapien
ttgtcatggctcaaaccatagtgcc

SEQ ID NO: 3181781 - DNA, 25 bp, Homo sapien
gactagctagagatctcagaacccc

SEQ ID NO: 3181782 - DNA, 25 bp, Homo sapien
caacatggccatgagttccctaaat

SEQ ID NO: 3181783 - DNA, 25 bp, Homo sapien
gatagaatcagcacaatgcatacct

SEQ ID NO: 3181784 - DNA, 25 bp, Homo sapien
taattcaaggatgaaagccttgaag

SEQ ID NO: 3181785 - DNA, 25 bp, Homo sapien
ctgcgagagcaagcaggaatttcgg

SEQ ID NO: 3181786 - DNA, 25 bp, Homo sapien
aggactgcgagagcaagcaggaatt

SEQ ID NO: 3181787 - DNA, 25 bp, Homo sapien
aaaatccagtaattcaaggatgaaa

SEQ ID NO: 3181788 - DNA, 25 bp, Homo sapien
tggaatcatttaagaggctcatcat

SEQ ID NO: 3181789 - DNA, 25 bp, Homo sapien
cactcaaaccatcaacataaataca

SEQ ID NO: 3181790 - DNA, 25 bp, Homo sapien
tccagtgaattgattatagttttcc

SEQ ID NO: 3181791 - DNA, 25 bp, Homo sapien
gagaagagttcatgttatccagtga

SEQ ID NO: 3181792 - DNA, 25 bp, Homo sapien
tttttaatcaagacctcctctggca

SEQ ID NO: 3181793 - DNA, 25 bp, Homo sapien
tatgctctcttaacgtaccatgcca

SEQ ID NO: 3181794 - DNA, 25 bp, Homo sapien
gcaacagagggttcaaacttctcag

SEQ ID NO: 3181795 - DNA, 25 bp, Homo sapien
ttcacaggaagtgccacgtgtagac

SEQ ID NO: 3181796 - DNA, 25 bp, Homo sapien
tcccaggaccccacaggaaaatcat

SEQ ID NO: 3181797 - DNA, 25 bp, Homo sapien
tagtatgagaagtattggctgctca

SEQ ID NO: 3181798 - DNA, 25 bp, Homo sapien
taaatccggaaaccatagcaaagaa

SEQ ID NO: 3181799 - DNA, 25 bp, Homo sapien
tatgacatcacataaaccaaatggc

SEQ ID NO: 3181800 - DNA, 25 bp, Homo sapien
ttatgtaatgagacattcttcaggg

SEQ ID NO: 3181801 - DNA, 25 bp, Homo sapien
cccggccgtgaatgatttcaaaata

SEQ ID NO: 3181802 - DNA, 25 bp, Homo sapien
tcgcacccggccgtgaatgatttca

SEQ ID NO: 3181803 - DNA, 25 bp, Homo sapien
tagttgtgaatactacaaatttatg

SEQ ID NO: 3181804 - DNA, 25 bp, Homo sapien
gaacaccgtggtaatactccggcaa

SEQ ID NO: 3181805 - DNA, 25 bp, Homo sapien
tcccgttttctctctatgcaaggca

SEQ ID NO: 3181806 - DNA, 25 bp, Homo sapien
tatgcaaggcagctacgtagtggtc

SEQ ID NO: 3181807 - DNA, 25 bp, Homo sapien
aatattgaccctgacacttgctcag

SEQ ID NO: 3181808 - DNA, 25 bp, Homo sapien
tcttgtcatagctcagagccaaatg

SEQ ID NO: 3181809 - DNA, 25 bp, Homo sapien
tagctcagagccaaatggttatgaa

SEQ ID NO: 3181810 - DNA, 25 bp, Homo sapien
ggttatgaatcagcagaagtctgaa

SEQ ID NO: 3181811 - DNA, 25 bp, Homo sapien
cttctcacttatggcaggcttgctt

SEQ ID NO: 3181812 - DNA, 25 bp, Homo sapien
gacgctgggcacaattaaggaggca

SEQ ID NO: 3181813 - DNA, 25 bp, Homo sapien
taattagtatgaagtccgaggtgcc

SEQ ID NO: 3181814 - DNA, 25 bp, Homo sapien
tcaaaatagattggcgccacctgcc

SEQ ID NO: 3181815 - DNA, 25 bp, Homo sapien
tatgaagcggtattcgacagttgca

SEQ ID NO: 3181816 - DNA, 25 bp, Homo sapien
tgaaccttgcaattactcagcaggc

SEQ ID NO: 3181817 - DNA, 25 bp, Homo sapien
tatccataaataccccttgacagtc

SEQ ID NO: 3181818 - DNA, 25 bp, Homo sapien
gagtaaacacaattccagccatggg

SEQ ID NO: 3181819 - DNA, 25 bp, Homo sapien
gggagacaagaatgaccagttcaag

SEQ ID NO: 3181820 - DNA, 25 bp, Homo sapien
tgccttaacttaggccattccctca

SEQ ID NO: 3181821 - DNA, 25 bp, Homo sapien
tctgccttaacttaggccattccct

SEQ ID NO: 3181822 - DNA, 25 bp, Homo sapien
aagattctgccttaacttaggccat

SEQ ID NO: 3181823 - DNA, 25 bp, Homo sapien
gattctgccttaacttaggccattc

SEQ ID NO: 3181824 - DNA, 25 bp, Homo sapien
ggtcattcatgctaactgttggtgg

SEQ ID NO: 3181825 - DNA, 25 bp, Homo sapien
tagctaggacatgagtacaggactg

SEQ ID NO: 3181826 - DNA, 25 bp, Homo sapien
tgggaggtagcactccactaacacg

SEQ ID NO: 3181827 - DNA, 25 bp, Homo sapien
tccaaatcatatgtacccgtcccag

SEQ ID NO: 3181828 - DNA, 25 bp, Homo sapien
gttctacacatcttattacggttag

SEQ ID NO: 3181829 - DNA, 25 bp, Homo sapien
cggttagtcagaactcttatgtggt

SEQ ID NO: 3181830 - DNA, 25 bp, Homo sapien
gttatgtctgtaccgccaaacaccc

SEQ ID NO: 3181831 - DNA, 25 bp, Homo sapien
cttatgtggttatgtctgtaccgcc

SEQ ID NO: 3181832 - DNA, 25 bp, Homo sapien
tgccagtttagttcttccagccaac

SEQ ID NO: 3181833 - DNA, 25 bp, Homo sapien
cagcagcagagcagtcaatgtgccc

SEQ ID NO: 3181834 - DNA, 25 bp, Homo sapien
cccttgtgtgcatagagagaagaat

SEQ ID NO: 3181835 - DNA, 25 bp, Homo sapien
tgtcagatcttctcgcaagcctgcc

SEQ ID NO: 3181836 - DNA, 25 bp, Homo sapien
aaacacattggccaactgttatatt

SEQ ID NO: 3181837 - DNA, 25 bp, Homo sapien
gaaacccagctgcttaagctcaata

SEQ ID NO: 3181838 - DNA, 25 bp, Homo sapien
cattggccaactgttatattattgt

SEQ ID NO: 3181839 - DNA, 25 bp, Homo sapien
cagctgcttaagctcaataccagat

SEQ ID NO: 3181840 - DNA, 25 bp, Homo sapien
cagctaatttgtactcaatggccat

SEQ ID NO: 3181841 - DNA, 25 bp, Homo sapien
aactcacaattacggtggaagggca

SEQ ID NO: 3181842 - DNA, 25 bp, Homo sapien
ctcacaattacggtggaagggcaaa

SEQ ID NO: 3181843 - DNA, 25 bp, Homo sapien
cacaattacggtggaagggcaaagg

SEQ ID NO: 3181844 - DNA, 25 bp, Homo sapien
tcacaattacggtggaagggcaaag

SEQ ID NO: 3181845 - DNA, 25 bp, Homo sapien
tgaagaaagcaaacaacgttcattg

SEQ ID NO: 3181846 - DNA, 25 bp, Homo sapien
caaacaacgttcattgcaggactcc

SEQ ID NO: 3181847 - DNA, 25 bp, Homo sapien
agatattttcttgaaccgtcttcaa

SEQ ID NO: 3181848 - DNA, 25 bp, Homo sapien
tgaaccgtcttcaattattaggaaa

SEQ ID NO: 3181849 - DNA, 25 bp, Homo sapien
ttaatgcataacaaaatcactgagg

SEQ ID NO: 3181850 - DNA, 25 bp, Homo sapien
gttcccatgtaatgccactgcaggg

SEQ ID NO: 3181851 - DNA, 25 bp, Homo sapien
tcacacaagcttctggcactgcata

SEQ ID NO: 3181852 - DNA, 25 bp, Homo sapien
tgcctgttattcacctgccattgaa

SEQ ID NO: 3181853 - DNA, 25 bp, Homo sapien
taagaacttctatgctcctgcagga

SEQ ID NO: 3181854 - DNA, 25 bp, Homo sapien
gtaaggccactagactaactcaagg

SEQ ID NO: 3181855 - DNA, 25 bp, Homo sapien
cacagtgagttacatatgggtcctc

SEQ ID NO: 3181856 - DNA, 25 bp, Homo sapien
tcttacctgattgacggcacagcct

SEQ ID NO: 3181857 - DNA, 25 bp, Homo sapien
gcagagagaccattagttatgacat

SEQ ID NO: 3181858 - DNA, 25 bp, Homo sapien
cctcactagcaggaaagtataagca

SEQ ID NO: 3181859 - DNA, 25 bp, Homo sapien
gacatggagactctagctgataatg

SEQ ID NO: 3181860 - DNA, 25 bp, Homo sapien
aaaaagccttgtcctataggcacca

SEQ ID NO: 3181861 - DNA, 25 bp, Homo sapien
aataactgtcaatatgggctctccc

SEQ ID NO: 3181862 - DNA, 25 bp, Homo sapien
tctgggatgctatgtgagaaataat

SEQ ID NO: 3181863 - DNA, 25 bp, Homo sapien
ttaaatgaccaaagtgatcccaaac

SEQ ID NO: 3181864 - DNA, 25 bp, Homo sapien
tttaagccacaccaacataaggtag

SEQ ID NO: 3181865 - DNA, 25 bp, Homo sapien
tgaaagaagaaatagtgagagttag

SEQ ID NO: 3181866 - DNA, 25 bp, Homo sapien
aaatagtgagagttaggcatctgtg

SEQ ID NO: 3181867 - DNA, 25 bp, Homo sapien
aagaaatagtgagagttaggcatct

SEQ ID NO: 3181868 - DNA, 25 bp, Homo sapien
aaagaagaaatagtgagagttaggc

SEQ ID NO: 3181869 - DNA, 25 bp, Homo sapien
gggctgtactctcaccatcctcttt

SEQ ID NO: 3181870 - DNA, 25 bp, Homo sapien
tggtggtggcatttacaacgcaaga

SEQ ID NO: 3181871 - DNA, 25 bp, Homo sapien
atttacaacgcaagacctttggacg

SEQ ID NO: 3181872 - DNA, 25 bp, Homo sapien
taattttcctgcacttcgcaaaagc

SEQ ID NO: 3181873 - DNA, 25 bp, Homo sapien
tgtgaacattctgctgcctggttgc

SEQ ID NO: 3181874 - DNA, 25 bp, Homo sapien
attggcctatgtgaacattctgctg

SEQ ID NO: 3181875 - DNA, 25 bp, Homo sapien
cattggcctatgtgaacattctgct

SEQ ID NO: 3181876 - DNA, 25 bp, Homo sapien
gaacattctgctgcctggttgccat

SEQ ID NO: 3181877 - DNA, 25 bp, Homo sapien
gtcctaggcaaccagaagtgaccac

SEQ ID NO: 3181878 - DNA, 25 bp, Homo sapien
ccgacactgaaaatctgagccttct

SEQ ID NO: 3181879 - DNA, 25 bp, Homo sapien
tcctaggcaaccagaagtgaccaca

SEQ ID NO: 3181880 - DNA, 25 bp, Homo sapien
ctgagccttctagtcctaggcaacc

SEQ ID NO: 3181881 - DNA, 25 bp, Homo sapien
gtgtagggtgtaggtctttattaca

SEQ ID NO: 3181882 - DNA, 25 bp, Homo sapien
tttattacattcgttcctttctgtg

SEQ ID NO: 3181883 - DNA, 25 bp, Homo sapien
ttcaattgatcttctttgatgagga

SEQ ID NO: 3181884 - DNA, 25 bp, Homo sapien
tgtttttcaatggaggcagtgtagg

SEQ ID NO: 3181885 - DNA, 25 bp, Homo sapien
aaatcaatcatgaaaaatcacttta

SEQ ID NO: 3181886 - DNA, 25 bp, Homo sapien
aaagtcatgaaattccattatgttt

SEQ ID NO: 3181887 - DNA, 25 bp, Homo sapien
ttgtcacaaaattctagctgggtgt

SEQ ID NO: 3181888 - DNA, 25 bp, Homo sapien
aagatttaggacttaaaactctgca

SEQ ID NO: 3181889 - DNA, 25 bp, Homo sapien
aaatatagttattgacacggtgctc

SEQ ID NO: 3181890 - DNA, 25 bp, Homo sapien
tattcctaatacctagcatgttgcc

SEQ ID NO: 3181891 - DNA, 25 bp, Homo sapien
gctggtgaggctttgatgtgaatca

SEQ ID NO: 3181892 - DNA, 25 bp, Homo sapien
tatatacttagcctatcctgcctta

SEQ ID NO: 3181893 - DNA, 25 bp, Homo sapien
catactcctgtagttagcaaatggc

SEQ ID NO: 3181894 - DNA, 25 bp, Homo sapien
tgtttcatactcctgtagttagcaa

SEQ ID NO: 3181895 - DNA, 25 bp, Homo sapien
tgctgtttcatactcctgtagttag

SEQ ID NO: 3181896 - DNA, 25 bp, Homo sapien
tcatgctgtttcatactcctgtagt

SEQ ID NO: 3181897 - DNA, 25 bp, Homo sapien
tcacagatataagtaaagccctgtg

SEQ ID NO: 3181898 - DNA, 25 bp, Homo sapien
gtggtgtataggtccatcaacaaaa

SEQ ID NO: 3181899 - DNA, 25 bp, Homo sapien
ccctgtggtgtataggtccatcaac

SEQ ID NO: 3181900 - DNA, 25 bp, Homo sapien
cagacagtcacagatataagtaaag

SEQ ID NO: 3181901 - DNA, 25 bp, Homo sapien
gttctaacccaatgctgtatcgagg

SEQ ID NO: 3181902 - DNA, 25 bp, Homo sapien
tgagctctgagactgctcaattaag

SEQ ID NO: 3181903 - DNA, 25 bp, Homo sapien
gactgctcaattaagtctctcaggg

SEQ ID NO: 3181904 - DNA, 25 bp, Homo sapien
gctgtatcgaggtctggtttcttgt

SEQ ID NO: 3181905 - DNA, 25 bp, Homo sapien
aaatgttttcatgcctcatcaacac

SEQ ID NO: 3181906 - DNA, 25 bp, Homo sapien
gaacactttcacagctaccttttcg

SEQ ID NO: 3181907 - DNA, 25 bp, Homo sapien
tctgcttagctatagtcctttggac

SEQ ID NO: 3181908 - DNA, 25 bp, Homo sapien
tctgtctctctgaaccagctggctt

SEQ ID NO: 3181909 - DNA, 25 bp, Homo sapien
tgattaggtacaactgggtccagga

SEQ ID NO: 3181910 - DNA, 25 bp, Homo sapien
ccactgacagaagagtaggctaact

SEQ ID NO: 3181911 - DNA, 25 bp, Homo sapien
tcagcattgatttagcgtctagggt

SEQ ID NO: 3181912 - DNA, 25 bp, Homo sapien
tcagatctcgatgggcaattgctgg

SEQ ID NO: 3181913 - DNA, 25 bp, Homo sapien
tgttattaaatcacacctcagcctt

SEQ ID NO: 3181914 - DNA, 25 bp, Homo sapien
tcagttctggccgaaaataccaatc

SEQ ID NO: 3181915 - DNA, 25 bp, Homo sapien
tggtgaagaccttcatatatttggg

SEQ ID NO: 3181916 - DNA, 25 bp, Homo sapien
tgctcctctccatgtattacagagt

SEQ ID NO: 3181917 - DNA, 25 bp, Homo sapien
gatttctgttcaagctctcgtccaa

SEQ ID NO: 3181918 - DNA, 25 bp, Homo sapien
tcccaaaggatgaggccaaaactat

SEQ ID NO: 3181919 - DNA, 25 bp, Homo sapien
gccatgatgtaagactggaagtgat

SEQ ID NO: 3181920 - DNA, 25 bp, Homo sapien
ctcgagtgttaggtggtatgtcaac

SEQ ID NO: 3181921 - DNA, 25 bp, Homo sapien
ggtgtccgaccccacatttatggcc

SEQ ID NO: 3181922 - DNA, 25 bp, Homo sapien
gaatttactcgaagacagactgtag

SEQ ID NO: 3181923 - DNA, 25 bp, Homo sapien
gcttgaaaaagcagggtaggctgac

SEQ ID NO: 3181924 - DNA, 25 bp, Homo sapien
gatttcatcgagcaactgctggagg

SEQ ID NO: 3181925 - DNA, 25 bp, Homo sapien
ctgctccaccggtttgggaatgagg

SEQ ID NO: 3181926 - DNA, 25 bp, Homo sapien
catcactgctccaccggtttgggaa

SEQ ID NO: 3181927 - DNA, 25 bp, Homo sapien
aatctccctcatgtcctcataagag

SEQ ID NO: 3181928 - DNA, 25 bp, Homo sapien
aatgaggggcgtaacttcttgatgc

SEQ ID NO: 3181929 - DNA, 25 bp, Homo sapien
ctgtcccccctttgcagtgctttgg

SEQ ID NO: 3181930 - DNA, 25 bp, Homo sapien
tggtacgtttgataagagcctgttt

SEQ ID NO: 3181931 - DNA, 25 bp, Homo sapien
tgcagtgctttggtacgtttgataa

SEQ ID NO: 3181932 - DNA, 25 bp, Homo sapien
aactcatcttgaacattccagtctg

SEQ ID NO: 3181933 - DNA, 25 bp, Homo sapien
ttagtaaccagacacaaaaccaatg

SEQ ID NO: 3181934 - DNA, 25 bp, Homo sapien
cacagcttgctggaaaacgtatata

SEQ ID NO: 3181935 - DNA, 25 bp, Homo sapien
gatatcaagtaacaccaaaagccca

SEQ ID NO: 3181936 - DNA, 25 bp, Homo sapien
tctcggtctgtcgagtgcagtgtca

SEQ ID NO: 3181937 - DNA, 25 bp, Homo sapien
aagagaaatgttagaaaaatgtatc

SEQ ID NO: 3181938 - DNA, 25 bp, Homo sapien
gaaaaatgtatcatctgcaaggctg

SEQ ID NO: 3181939 - DNA, 25 bp, Homo sapien
tagaaaaatgtatcatctgcaaggc

SEQ ID NO: 3181940 - DNA, 25 bp, Homo sapien
aaatgtatcatctgcaaggctggca

SEQ ID NO: 3181941 - DNA, 25 bp, Homo sapien
agggctgtcagccttgatgcaggat

SEQ ID NO: 3181942 - DNA, 25 bp, Homo sapien
gccttgatgcaggattgtgagccca

SEQ ID NO: 3181943 - DNA, 25 bp, Homo sapien
gtcctgggactctgacattttggca

SEQ ID NO: 3181944 - DNA, 25 bp, Homo sapien
gttttcttaacccgcagggctgtca

SEQ ID NO: 3181945 - DNA, 25 bp, Homo sapien
tgcccacaaacagaagagtacctgt

SEQ ID NO: 3181946 - DNA, 25 bp, Homo sapien
tctccgtcctacaaacagacatgga

SEQ ID NO: 3181947 - DNA, 25 bp, Homo sapien
gcaggacgatgttcaaggcttgtac

SEQ ID NO: 3181948 - DNA, 25 bp, Homo sapien
ggcaatcacaaaatacagggctttc

SEQ ID NO: 3181949 - DNA, 25 bp, Homo sapien
ccaaagtggtctgaggaggccaaga

SEQ ID NO: 3181950 - DNA, 25 bp, Homo sapien
cctgcaggaattccaaatgtggtcc

SEQ ID NO: 3181951 - DNA, 25 bp, Homo sapien
tgcattcacattaccatagcggccc

SEQ ID NO: 3181952 - DNA, 25 bp, Homo sapien
cctagacaggcggtgtttgtaccca

SEQ ID NO: 3181953 - DNA, 25 bp, Homo sapien
taaattagcctgacggatgtttcct

SEQ ID NO: 3181954 - DNA, 25 bp, Homo sapien
tgaatgagagatcaaaagcatgcac

SEQ ID NO: 3181955 - DNA, 25 bp, Homo sapien
catatataagatacaagccatctgc

SEQ ID NO: 3181956 - DNA, 25 bp, Homo sapien
aagcatgcacaggtcaatcctctgc

SEQ ID NO: 3181957 - DNA, 25 bp, Homo sapien
gctgcaaaccgacttcagaagtgag

SEQ ID NO: 3181958 - DNA, 25 bp, Homo sapien
ggatgaacaagttaccagctgcaaa

SEQ ID NO: 3181959 - DNA, 25 bp, Homo sapien
tgtggcctctactaactgtcctctg

SEQ ID NO: 3181960 - DNA, 25 bp, Homo sapien
cacagcagcccataacagtttgtgg

SEQ ID NO: 3181961 - DNA, 25 bp, Homo sapien
tgagcaactataatcgctaagtggg

SEQ ID NO: 3181962 - DNA, 25 bp, Homo sapien
tcaaggctcagatgattagtcacac

SEQ ID NO: 3181963 - DNA, 25 bp, Homo sapien
tgtgaaacagacaacgaaaccccta

SEQ ID NO: 3181964 - DNA, 25 bp, Homo sapien
gagcagtgctttccaggaggtcaaa

SEQ ID NO: 3181965 - DNA, 25 bp, Homo sapien
gaatgaatcctatcttcgttgtctc

SEQ ID NO: 3181966 - DNA, 25 bp, Homo sapien
catgcttggtgcatggattatgtca

SEQ ID NO: 3181967 - DNA, 25 bp, Homo sapien
gcatgataaaccagtaccctgaatg

SEQ ID NO: 3181968 - DNA, 25 bp, Homo sapien
tccatgacctgttgctgcgtttgca

SEQ ID NO: 3181969 - DNA, 25 bp, Homo sapien
ctgagtagaaacaaggaagctaccc

SEQ ID NO: 3181970 - DNA, 25 bp, Homo sapien
tagaaacaaggaagctaccctgaga

SEQ ID NO: 3181971 - DNA, 25 bp, Homo sapien
gctaccctgagatatagtcagctgc

SEQ ID NO: 3181972 - DNA, 25 bp, Homo sapien
acaaggaagctaccctgagatatag

SEQ ID NO: 3181973 - DNA, 25 bp, Homo sapien
gcacagcaagcccaccaattattag

SEQ ID NO: 3181974 - DNA, 25 bp, Homo sapien
tactccgcaagtgtactggcacagc

SEQ ID NO: 3181975 - DNA, 25 bp, Homo sapien
tcccaggttgggaatctctgcagaa

SEQ ID NO: 3181976 - DNA, 25 bp, Homo sapien
ttgcctactgaagggacctgtccag

SEQ ID NO: 3181977 - DNA, 25 bp, Homo sapien
taaacccatatccatacaggccagg

SEQ ID NO: 3181978 - DNA, 25 bp, Homo sapien
gcagactaagtctagccatgagctt

SEQ ID NO: 3181979 - DNA, 25 bp, Homo sapien
aatctttagaactttgcctctgggc

SEQ ID NO: 3181980 - DNA, 25 bp, Homo sapien
tctgtggtaggatattaacgggctc

SEQ ID NO: 3181981 - DNA, 25 bp, Homo sapien
caggacaccctgaaactatgcgacc

SEQ ID NO: 3181982 - DNA, 25 bp, Homo sapien
tgtaatccacgtatgcagaagggag

SEQ ID NO: 3181983 - DNA, 25 bp, Homo sapien
ggacaagtcatcagtttcatgtgga

SEQ ID NO: 3181984 - DNA, 25 bp, Homo sapien
caagaactggacaacttttgggtga

SEQ ID NO: 3181985 - DNA, 25 bp, Homo sapien
caagtttttcatgtgataagggtcc

SEQ ID NO: 3181986 - DNA, 25 bp, Homo sapien
taaattagagacatgtggcagactg

SEQ ID NO: 3181987 - DNA, 25 bp, Homo sapien
ggtaagttattgaacctctctggcc

SEQ ID NO: 3181988 - DNA, 25 bp, Homo sapien
gcagactggttaggtacatggattc

SEQ ID NO: 3181989 - DNA, 25 bp, Homo sapien
ccctggtgggtacccaatccatgca

SEQ ID NO: 3181990 - DNA, 25 bp, Homo sapien
acccacctgtgcttggtaccctggt

SEQ ID NO: 3181991 - DNA, 25 bp, Homo sapien
ctacaagtgcatgggttagaattcg

SEQ ID NO: 3181992 - DNA, 25 bp, Homo sapien
tagaattcgttcaacaaatgcaagg

SEQ ID NO: 3181993 - DNA, 25 bp, Homo sapien
tataggaccttcgagcagcttgcat

SEQ ID NO: 3181994 - DNA, 25 bp, Homo sapien
cttataggaccttcgagcagcttgc

SEQ ID NO: 3181995 - DNA, 25 bp, Homo sapien
ttataggaccttcgagcagcttgca

SEQ ID NO: 3181996 - DNA, 25 bp, Homo sapien
ggtgtgccacgttctgtgaggagcg

SEQ ID NO: 3181997 - DNA, 25 bp, Homo sapien
gtctgtatggcctacgggagaccct

SEQ ID NO: 3181998 - DNA, 25 bp, Homo sapien
cacatggctctattcttgtcgtgga

SEQ ID NO: 3181999 - DNA, 25 bp, Homo sapien
gactcaaggctggatgggtctgtat

SEQ ID NO: 3182000 - DNA, 25 bp, Homo sapien
taccagttgccactttgcgggaagg

SEQ ID NO: 3182001 - DNA, 25 bp, Homo sapien
ctatgtcatgaacgtctttagtgca

SEQ ID NO: 3182002 - DNA, 25 bp, Homo sapien
tctttagtgcaacgataccagttgc

SEQ ID NO: 3182003 - DNA, 25 bp, Homo sapien
ggtaaggttactgaatccttcactg

SEQ ID NO: 3182004 - DNA, 25 bp, Homo sapien
cagtctgaggcctgcaagccggaga

SEQ ID NO: 3182005 - DNA, 25 bp, Homo sapien
tgacagcagcgtcgccgaaaagctg

SEQ ID NO: 3182006 - DNA, 25 bp, Homo sapien
agcgtcgccgaaaagctggcagaga

SEQ ID NO: 3182007 - DNA, 25 bp, Homo sapien
gggctgacagcagcgtcgccgaaaa

SEQ ID NO: 3182008 - DNA, 25 bp, Homo sapien
cagacgtggcttgttacagggagaa

SEQ ID NO: 3182009 - DNA, 25 bp, Homo sapien
gctgtgaccttaccgaactctgaac

SEQ ID NO: 3182010 - DNA, 25 bp, Homo sapien
cgttcttgggccacagtcatggaca

SEQ ID NO: 3182011 - DNA, 25 bp, Homo sapien
gcatttcctcggcaagctgtgacct

SEQ ID NO: 3182012 - DNA, 25 bp, Homo sapien
ggtgctttacactcttttcaggcaa

SEQ ID NO: 3182013 - DNA, 25 bp, Homo sapien
tggaggctccgccaaatgtgcagca

SEQ ID NO: 3182014 - DNA, 25 bp, Homo sapien
tatagtcgtgataaacagggaacag

SEQ ID NO: 3182015 - DNA, 25 bp, Homo sapien
ttttaagctgatactgacagggcag

SEQ ID NO: 3182016 - DNA, 25 bp, Homo sapien
caacacggacccagtaaagcaggca

SEQ ID NO: 3182017 - DNA, 25 bp, Homo sapien
gccaccgtgcagaagcagatctgca

SEQ ID NO: 3182018 - DNA, 25 bp, Homo sapien
cacggacccagtaaagcaggcattt

SEQ ID NO: 3182019 - DNA, 25 bp, Homo sapien
ccaccgtgcagaagcagatctgcat

SEQ ID NO: 3182020 - DNA, 25 bp, Homo sapien
taagtgtctgacagtcagaagcaaa

SEQ ID NO: 3182021 - DNA, 25 bp, Homo sapien
ggttaagtgtctgacagtcagaagc

SEQ ID NO: 3182022 - DNA, 25 bp, Homo sapien
gtctgacagtcagaagcaaaaggct

SEQ ID NO: 3182023 - DNA, 25 bp, Homo sapien
ctttcttggttaagtgtctgacagt

SEQ ID NO: 3182024 - DNA, 25 bp, Homo sapien
tcgtgtgtgcaaaccaataaatcac

SEQ ID NO: 3182025 - DNA, 25 bp, Homo sapien
tcttccggggaacagcaggatggct

SEQ ID NO: 3182026 - DNA, 25 bp, Homo sapien
ggatttcctctcgatcgtgtgtgca

SEQ ID NO: 3182027 - DNA, 25 bp, Homo sapien
atggctcctccggatttcctctcga

SEQ ID NO: 3182028 - DNA, 25 bp, Homo sapien
ctgtgttattgaatagggatctagg

SEQ ID NO: 3182029 - DNA, 25 bp, Homo sapien
tgaatagggatctagggaatgcctg

SEQ ID NO: 3182030 - DNA, 25 bp, Homo sapien
tctagggaatgcctgatagaggagc

SEQ ID NO: 3182031 - DNA, 25 bp, Homo sapien
cctgatagaggagctgtgcaagcat

SEQ ID NO: 3182032 - DNA, 25 bp, Homo sapien
gaaggcccagatcattagaaagagc

SEQ ID NO: 3182033 - DNA, 25 bp, Homo sapien
gacattacccagtgctgaaggccca

SEQ ID NO: 3182034 - DNA, 25 bp, Homo sapien
aactactaaactgcctccaaagtgc

SEQ ID NO: 3182035 - DNA, 25 bp, Homo sapien
taaacagccattatgccttttcctg

SEQ ID NO: 3182036 - DNA, 25 bp, Homo sapien
ctggctctgcatagcgctcattttc

SEQ ID NO: 3182037 - DNA, 25 bp, Homo sapien
tctgcatagcgctcattttcctcct

SEQ ID NO: 3182038 - DNA, 25 bp, Homo sapien
ctgtgacagccattccgtctcattc

SEQ ID NO: 3182039 - DNA, 25 bp, Homo sapien
ctgcactgtgacagccattccgtct

SEQ ID NO: 3182040 - DNA, 25 bp, Homo sapien
tcctttgtgggacaccattccgcat

SEQ ID NO: 3182041 - DNA, 25 bp, Homo sapien
caggtcccagggattcagacataga

SEQ ID NO: 3182042 - DNA, 25 bp, Homo sapien
taaggtaactataaatggaacaggc

SEQ ID NO: 3182043 - DNA, 25 bp, Homo sapien
cttaatatgacagtgcaggagggaa

SEQ ID NO: 3182044 - DNA, 25 bp, Homo sapien
catgtgcattgatatttagaacatg

SEQ ID NO: 3182045 - DNA, 25 bp, Homo sapien
ttcatgtgcattgatatttagaaca

SEQ ID NO: 3182046 - DNA, 25 bp, Homo sapien
tcatgtgcattgatatttagaacat

SEQ ID NO: 3182047 - DNA, 25 bp, Homo sapien
atgtgcattgatatttagaacatgt

SEQ ID NO: 3182048 - DNA, 25 bp, Homo sapien
gacttcacttcctaaaacatcataa

SEQ ID NO: 3182049 - DNA, 25 bp, Homo sapien
gctgtaggatattccactgaaccaa

SEQ ID NO: 3182050 - DNA, 25 bp, Homo sapien
gccctttgtgacaggaccagatagt

SEQ ID NO: 3182051 - DNA, 25 bp, Homo sapien
accagatagtgggttggcagtactt

SEQ ID NO: 3182052 - DNA, 25 bp, Homo sapien
tcttattctgatggctgcggagagc

SEQ ID NO: 3182053 - DNA, 25 bp, Homo sapien
gagagctgatctaccaccatgtgaa

SEQ ID NO: 3182054 - DNA, 25 bp, Homo sapien
tatcgcgcctaagaagtaccaagcc

SEQ ID NO: 3182055 - DNA, 25 bp, Homo sapien
gaactaacgaaagcctgaggcagcg

SEQ ID NO: 3182056 - DNA, 25 bp, Homo sapien
atgaaaaatatccctctggaacaaa

SEQ ID NO: 3182057 - DNA, 25 bp, Homo sapien
tattattattaatgtggcatgttta

SEQ ID NO: 3182058 - DNA, 25 bp, Homo sapien
taaagcaaatgtgcttactcattga

SEQ ID NO: 3182059 - DNA, 25 bp, Homo sapien
aaatagttcatctctgctaggtagt

SEQ ID NO: 3182060 - DNA, 25 bp, Homo sapien
ttgtaaaagaaaggtcacaataatc

SEQ ID NO: 3182061 - DNA, 25 bp, Homo sapien
aaaagaaaggtcacaataatctcca

SEQ ID NO: 3182062 - DNA, 25 bp, Homo sapien
gaaaggtcacaataatctccaaaat

SEQ ID NO: 3182063 - DNA, 25 bp, Homo sapien
agaaaggtcacaataatctccaaaa

SEQ ID NO: 3182064 - DNA, 25 bp, Homo sapien
gctgcatttgactgctgagagccat

SEQ ID NO: 3182065 - DNA, 25 bp, Homo sapien
gaaatcctttgctggcagccagctg

SEQ ID NO: 3182066 - DNA, 25 bp, Homo sapien
ttgagtaggcataaatagcattcac

SEQ ID NO: 3182067 - DNA, 25 bp, Homo sapien
agccagctgcatttgactgctgaga

SEQ ID NO: 3182068 - DNA, 25 bp, Homo sapien
ctgcagcatttctggtttatgtaca

SEQ ID NO: 3182069 - DNA, 25 bp, Homo sapien
cctgccatacagaaacagccagtgg

SEQ ID NO: 3182070 - DNA, 25 bp, Homo sapien
tcctgccatacagaaacagccagtg

SEQ ID NO: 3182071 - DNA, 25 bp, Homo sapien
tctcctgccatacagaaacagccag

SEQ ID NO: 3182072 - DNA, 25 bp, Homo sapien
tttctcctgccatacagaaacagcc

SEQ ID NO: 3182073 - DNA, 25 bp, Homo sapien
gggtctatcatcatgataaaaggaa

SEQ ID NO: 3182074 - DNA, 25 bp, Homo sapien
tagtcttgggtctatcatcatgata

SEQ ID NO: 3182075 - DNA, 25 bp, Homo sapien
ttaggctgcatatagtcttgggtct

SEQ ID NO: 3182076 - DNA, 25 bp, Homo sapien
ggaaagctgctttcaatgtaatttt

SEQ ID NO: 3182077 - DNA, 25 bp, Homo sapien
cgtagccttggatcaaatggcccca

SEQ ID NO: 3182078 - DNA, 25 bp, Homo sapien
ggcgtagccttggatcaaatggccc

SEQ ID NO: 3182079 - DNA, 25 bp, Homo sapien
ctggcgtagccttggatcaaatggc

SEQ ID NO: 3182080 - DNA, 25 bp, Homo sapien
gtagccttggatcaaatggccccat

SEQ ID NO: 3182081 - DNA, 25 bp, Homo sapien
ttgttaccaggtatggatgttccct

SEQ ID NO: 3182082 - DNA, 25 bp, Homo sapien
agttgagggcttaactggtttgctg

SEQ ID NO: 3182083 - DNA, 25 bp, Homo sapien
tggtttgctgttttgagaagggcca

SEQ ID NO: 3182084 - DNA, 25 bp, Homo sapien
tgtacataaatagaattccagagat

SEQ ID NO: 3182085 - DNA, 25 bp, Homo sapien
cacgaccatgtttcaagagctatca

SEQ ID NO: 3182086 - DNA, 25 bp, Homo sapien
agacacgaccatgtttcaagagcta

SEQ ID NO: 3182087 - DNA, 25 bp, Homo sapien
catgtttcaagagctatcacggtca

SEQ ID NO: 3182088 - DNA, 25 bp, Homo sapien
gaccatgtttcaagagctatcacgg

SEQ ID NO: 3182089 - DNA, 25 bp, Homo sapien
cattatcttgtatggtagtgtctgc

SEQ ID NO: 3182090 - DNA, 25 bp, Homo sapien
tcagtgccattaacatacatctggg

SEQ ID NO: 3182091 - DNA, 25 bp, Homo sapien
ctttcctctggataacacgtcacat

SEQ ID NO: 3182092 - DNA, 25 bp, Homo sapien
agtgtctgctgttcgcttctcagtg

SEQ ID NO: 3182093 - DNA, 25 bp, Homo sapien
tcctgaacgcccttcctcttagcgg

SEQ ID NO: 3182094 - DNA, 25 bp, Homo sapien
gaacgcccttcctcttagcggcaga

SEQ ID NO: 3182095 - DNA, 25 bp, Homo sapien
cacgacttcttcctgaacgcccttc

SEQ ID NO: 3182096 - DNA, 25 bp, Homo sapien
tcttagcggcagagccttcttgttc

SEQ ID NO: 3182097 - DNA, 25 bp, Homo sapien
tcagtgacagcgacattatagagtt

SEQ ID NO: 3182098 - DNA, 25 bp, Homo sapien
cttgatgctcccaaacaatgtcagt

SEQ ID NO: 3182099 - DNA, 25 bp, Homo sapien
gcgacattatagagtttggacacat

SEQ ID NO: 3182100 - DNA, 25 bp, Homo sapien
tttgatataagccaaaatggtctgg

SEQ ID NO: 3182101 - DNA, 25 bp, Homo sapien
ttcaagaatttcagtatatttccca

SEQ ID NO: 3182102 - DNA, 25 bp, Homo sapien
gaatttcagtatatttcccatgttt

SEQ ID NO: 3182103 - DNA, 25 bp, Homo sapien
agtatatttcccatgttttacacat

SEQ ID NO: 3182104 - DNA, 25 bp, Homo sapien
gtatatttcccatgttttacacata

SEQ ID NO: 3182105 - DNA, 25 bp, Homo sapien
tcaaaacattcctgatgggacagtg

SEQ ID NO: 3182106 - DNA, 25 bp, Homo sapien
gaatgctctcaagtaaccatggtga

SEQ ID NO: 3182107 - DNA, 25 bp, Homo sapien
gctgcttggatagaagcaatacctg

SEQ ID NO: 3182108 - DNA, 25 bp, Homo sapien
cagtgaccaggtctgcagttgccta

SEQ ID NO: 3182109 - DNA, 25 bp, Homo sapien
catgattgattgcatgaaaagtgca

SEQ ID NO: 3182110 - DNA, 25 bp, Homo sapien
tcatgattgattgcatgaaaagtgc

SEQ ID NO: 3182111 - DNA, 25 bp, Homo sapien
gacatctttgcaggcggtaatgcac

SEQ ID NO: 3182112 - DNA, 25 bp, Homo sapien
catatttagcaaccatgacgagacc

SEQ ID NO: 3182113 - DNA, 25 bp, Homo sapien
gaggttgtgatgctaactgctacca

SEQ ID NO: 3182114 - DNA, 25 bp, Homo sapien
agatttgtcaaaccacttgtggagg

SEQ ID NO: 3182115 - DNA, 25 bp, Homo sapien
tctgtgtgtgttcctcacaggcgag

SEQ ID NO: 3182116 - DNA, 25 bp, Homo sapien
cactgagattggagaccagagcgcc

SEQ ID NO: 3182117 - DNA, 25 bp, Homo sapien
tctccgccggcgtgagaacactgag

SEQ ID NO: 3182118 - DNA, 25 bp, Homo sapien
cggagagcagtccagacttcggcgt

SEQ ID NO: 3182119 - DNA, 25 bp, Homo sapien
gccctactctaggatgtgaacctcc

SEQ ID NO: 3182120 - DNA, 25 bp, Homo sapien
tgcgccctactctaggatgtgaacc

SEQ ID NO: 3182121 - DNA, 25 bp, Homo sapien
ccgtgcgccctactctaggatgtga

SEQ ID NO: 3182122 - DNA, 25 bp, Homo sapien
actctaggatgtgaacctccttggc

SEQ ID NO: 3182123 - DNA, 25 bp, Homo sapien
agaaggacttcagttcgagcccgca

SEQ ID NO: 3182124 - DNA, 25 bp, Homo sapien
ggtcatacgcgctcagaacataaag

SEQ ID NO: 3182125 - DNA, 25 bp, Homo sapien
tacttgtagagagcaggaaacttgc

SEQ ID NO: 3182126 - DNA, 25 bp, Homo sapien
cagagtagttatgaccacagccaaa

SEQ ID NO: 3182127 - DNA, 25 bp, Homo sapien
gggtatagagcactgaatgtattag

SEQ ID NO: 3182128 - DNA, 25 bp, Homo sapien
tgtacaaggtattgttccaggttct

SEQ ID NO: 3182129 - DNA, 25 bp, Homo sapien
caggttctgggtatagagcactgaa

SEQ ID NO: 3182130 - DNA, 25 bp, Homo sapien
caaggtattgttccaggttctgggt

SEQ ID NO: 3182131 - DNA, 25 bp, Homo sapien
taagagaagggcaatcgtagaagga

SEQ ID NO: 3182132 - DNA, 25 bp, Homo sapien
cattctgaaacaaccttgagaggta

SEQ ID NO: 3182133 - DNA, 25 bp, Homo sapien
taacaaatattcctagccctccagg

SEQ ID NO: 3182134 - DNA, 25 bp, Homo sapien
ggtccacattagctcaatccaagtt

SEQ ID NO: 3182135 - DNA, 25 bp, Homo sapien
gatcgagcttgggtttcagtatgac

SEQ ID NO: 3182136 - DNA, 25 bp, Homo sapien
gcttgggtttcagtatgacggctca

SEQ ID NO: 3182137 - DNA, 25 bp, Homo sapien
aagtagagatgatcgagcttgggtt

SEQ ID NO: 3182138 - DNA, 25 bp, Homo sapien
agatgatcgagcttgggtttcagta

SEQ ID NO: 3182139 - DNA, 25 bp, Homo sapien
aactcaaactttgtgacgcagatgc

SEQ ID NO: 3182140 - DNA, 25 bp, Homo sapien
cagtgaactcaatgaaatcgagcca

SEQ ID NO: 3182141 - DNA, 25 bp, Homo sapien
tggatatgagctgatgacaacagtg

SEQ ID NO: 3182142 - DNA, 25 bp, Homo sapien
cacgtggagtggagataagacagcc

SEQ ID NO: 3182143 - DNA, 25 bp, Homo sapien
cacacactctatgacaggaaaaatg

SEQ ID NO: 3182144 - DNA, 25 bp, Homo sapien
tacttccacacactctatgacagga

SEQ ID NO: 3182145 - DNA, 25 bp, Homo sapien
cttacttccacacactctatgacag

SEQ ID NO: 3182146 - DNA, 25 bp, Homo sapien
caggaaaaatgtggtgttctctcat

SEQ ID NO: 3182147 - DNA, 25 bp, Homo sapien
tacatatcctgctacgtcttccaaa

SEQ ID NO: 3182148 - DNA, 25 bp, Homo sapien
ccctgaatcctggtcacactggtcc

SEQ ID NO: 3182149 - DNA, 25 bp, Homo sapien
tcagttacatatcctgctacgtctt

SEQ ID NO: 3182150 - DNA, 25 bp, Homo sapien
tatcctgctacgtcttccaaatgcc

SEQ ID NO: 3182151 - DNA, 25 bp, Homo sapien
tgtgaggtcttagctgttataagca

SEQ ID NO: 3182152 - DNA, 25 bp, Homo sapien
ggaatgaatgatgcatttttgcgaa

SEQ ID NO: 3182153 - DNA, 25 bp, Homo sapien
tatgcatacacatgtgcctgaaaga

SEQ ID NO: 3182154 - DNA, 25 bp, Homo sapien
tataagcataatatagtcagtgact

SEQ ID NO: 3182155 - DNA, 25 bp, Homo sapien
aatgtcaaggcaggtgaaatataac

SEQ ID NO: 3182156 - DNA, 25 bp, Homo sapien
tgaggactggtcttaaaggcctgag

SEQ ID NO: 3182157 - DNA, 25 bp, Homo sapien
aaaaaggcggaagacctgaggactg

SEQ ID NO: 3182158 - DNA, 25 bp, Homo sapien
taactccggtgtaaaatagatctgt

SEQ ID NO: 3182159 - DNA, 25 bp, Homo sapien
cctttctcgctccccggtcatcttg

SEQ ID NO: 3182160 - DNA, 25 bp, Homo sapien
ctgctcctgactgggggccatcctg

SEQ ID NO: 3182161 - DNA, 25 bp, Homo sapien
tctcgctccccggtcatcttgacag

SEQ ID NO: 3182162 - DNA, 25 bp, Homo sapien
cgctccccggtcatcttgacagctg

SEQ ID NO: 3182163 - DNA, 25 bp, Homo sapien
gaatcaagtgttagcctgcttctcc

SEQ ID NO: 3182164 - DNA, 25 bp, Homo sapien
tccaagagttgttctaggtgaatca

SEQ ID NO: 3182165 - DNA, 25 bp, Homo sapien
ttccttggatatggagggagcccca

SEQ ID NO: 3182166 - DNA, 25 bp, Homo sapien
tagattctttgtctatgtagcccca

SEQ ID NO: 3182167 - DNA, 25 bp, Homo sapien
taacaagatctaagacaaggttgaa

SEQ ID NO: 3182168 - DNA, 25 bp, Homo sapien
aatttgtaaagcaatccaggaaatg

SEQ ID NO: 3182169 - DNA, 25 bp, Homo sapien
gaagcttaacaagatctaagacaag

SEQ ID NO: 3182170 - DNA, 25 bp, Homo sapien
aattgaaaggaagcttaacaagatc

SEQ ID NO: 3182171 - DNA, 25 bp, Homo sapien
gaggtcttcatctaagctttggatg

SEQ ID NO: 3182172 - DNA, 25 bp, Homo sapien
ctgccttgagcactccagaactgcg

SEQ ID NO: 3182173 - DNA, 25 bp, Homo sapien
ctgagttaatctacatgaggtcttc

SEQ ID NO: 3182174 - DNA, 25 bp, Homo sapien
taatgcccatagcagcagtggtttg

SEQ ID NO: 3182175 - DNA, 25 bp, Homo sapien
aatcatatcaacaatggggaagtca

SEQ ID NO: 3182176 - DNA, 25 bp, Homo sapien
taatcaatcatatcaacaatgggga

SEQ ID NO: 3182177 - DNA, 25 bp, Homo sapien
tggggaagtcactcatcactaggtt

SEQ ID NO: 3182178 - DNA, 25 bp, Homo sapien
ataatcaatcatatcaacaatgggg

SEQ ID NO: 3182179 - DNA, 25 bp, Homo sapien
tctactaaacgtgacagccagccaa

SEQ ID NO: 3182180 - DNA, 25 bp, Homo sapien
tcagagtctactaaacgtgacagcc

SEQ ID NO: 3182181 - DNA, 25 bp, Homo sapien
agggtcctcagagtctactaaacgt

SEQ ID NO: 3182182 - DNA, 25 bp, Homo sapien
ctagagtttggctggagggtcctca

SEQ ID NO: 3182183 - DNA, 25 bp, Homo sapien
gggcaatgctcctctcgttcagaga

SEQ ID NO: 3182184 - DNA, 25 bp, Homo sapien
tgggcaatgctcctctcgttcagag

SEQ ID NO: 3182185 - DNA, 25 bp, Homo sapien
cagttgctgcattaggtggacaggt

SEQ ID NO: 3182186 - DNA, 25 bp, Homo sapien
tgtttattgtgtcacgtgcagttgc

SEQ ID NO: 3182187 - DNA, 25 bp, Homo sapien
gaagtctgaggatgagtaactccca

SEQ ID NO: 3182188 - DNA, 25 bp, Homo sapien
tcggaatgagcttgagaagtctgag

SEQ ID NO: 3182189 - DNA, 25 bp, Homo sapien
gaaggcaaggacctacaagtctgaa

SEQ ID NO: 3182190 - DNA, 25 bp, Homo sapien
ttaggagaccctagtagcagatgac

SEQ ID NO: 3182191 - DNA, 25 bp, Homo sapien
tcagccagaccagtgtgaaatcttc

SEQ ID NO: 3182192 - DNA, 25 bp, Homo sapien
tcaagactcaatacacctggtgtgt

SEQ ID NO: 3182193 - DNA, 25 bp, Homo sapien
catcaatgttgactccttcccagtg

SEQ ID NO: 3182194 - DNA, 25 bp, Homo sapien
ttctcatcaatgttgactccttccc

SEQ ID NO: 3182195 - DNA, 25 bp, Homo sapien
ttaaacctctcagtcagaccactcg

SEQ ID NO: 3182196 - DNA, 25 bp, Homo sapien
cccagtgagttggtggcttaaacct

SEQ ID NO: 3182197 - DNA, 25 bp, Homo sapien
ttcgcatcagagagttcactcccca

SEQ ID NO: 3182198 - DNA, 25 bp, Homo sapien
cattcgcatcagagagttcactccc

SEQ ID NO: 3182199 - DNA, 25 bp, Homo sapien
tcaggcattcgcatcagagagttca

SEQ ID NO: 3182200 - DNA, 25 bp, Homo sapien
ggcattcgcatcagagagttcactc

SEQ ID NO: 3182201 - DNA, 25 bp, Homo sapien
tagtatatggacacagctgttcgcc

SEQ ID NO: 3182202 - DNA, 25 bp, Homo sapien
tatatggacacagctgttcgccagt

SEQ ID NO: 3182203 - DNA, 25 bp, Homo sapien
caattatagtatatggacacagctg

SEQ ID NO: 3182204 - DNA, 25 bp, Homo sapien
ttatagtatatggacacagctgttc

SEQ ID NO: 3182205 - DNA, 25 bp, Homo sapien
cacccacaacaatgcttagttcctt

SEQ ID NO: 3182206 - DNA, 25 bp, Homo sapien
tgcttagttcctttcgaaataaagc

SEQ ID NO: 3182207 - DNA, 25 bp, Homo sapien
cacaacaatgcttagttcctttcga

SEQ ID NO: 3182208 - DNA, 25 bp, Homo sapien
tctgccacccacaacaatgcttagt

SEQ ID NO: 3182209 - DNA, 25 bp, Homo sapien
attcttccattcaagcccaaattca

SEQ ID NO: 3182210 - DNA, 25 bp, Homo sapien
tctctctattgttatccttaattct

SEQ ID NO: 3182211 - DNA, 25 bp, Homo sapien
ccttaattcttccattcaagcccaa

SEQ ID NO: 3182212 - DNA, 25 bp, Homo sapien
cattcaagcccaaattcacatgctg

SEQ ID NO: 3182213 - DNA, 25 bp, Homo sapien
ggctgaaacagctaatcctttcagt

SEQ ID NO: 3182214 - DNA, 25 bp, Homo sapien
agtccctggctgaaacagctaatcc

SEQ ID NO: 3182215 - DNA, 25 bp, Homo sapien
gctctgctcgagagagtccctggct

SEQ ID NO: 3182216 - DNA, 25 bp, Homo sapien
tctgctcgagagagtccctggctga

SEQ ID NO: 3182217 - DNA, 25 bp, Homo sapien
ctgcctgcaacatcgtgaaccttga

SEQ ID NO: 3182218 - DNA, 25 bp, Homo sapien
tgaggcccatagtctgcctgatttt

SEQ ID NO: 3182219 - DNA, 25 bp, Homo sapien
aaccagcagttttgctgaggcccat

SEQ ID NO: 3182220 - DNA, 25 bp, Homo sapien
gctctgcctgcaacatcgtgaacct

SEQ ID NO: 3182221 - DNA, 25 bp, Homo sapien
caagtcttctctcacacataaagct

SEQ ID NO: 3182222 - DNA, 25 bp, Homo sapien
aagtcttctctcacacataaagctt

SEQ ID NO: 3182223 - DNA, 25 bp, Homo sapien
tctcacacataaagctttgcttcac

SEQ ID NO: 3182224 - DNA, 25 bp, Homo sapien
ttctctcacacataaagctttgctt

SEQ ID NO: 3182225 - DNA, 25 bp, Homo sapien
gttatagcatatacgccaccttctg

SEQ ID NO: 3182226 - DNA, 25 bp, Homo sapien
cagtatccgatccagaatttgcagt

SEQ ID NO: 3182227 - DNA, 25 bp, Homo sapien
gggttgtctagtaacatagccacca

SEQ ID NO: 3182228 - DNA, 25 bp, Homo sapien
tgtgaatcagcaccatagacctgtg

SEQ ID NO: 3182229 - DNA, 25 bp, Homo sapien
ccaggtattggagatctccagggag

SEQ ID NO: 3182230 - DNA, 25 bp, Homo sapien
tctttgatagttagcctgtctctgc

SEQ ID NO: 3182231 - DNA, 25 bp, Homo sapien
agatctccagggagcattatctcca

SEQ ID NO: 3182232 - DNA, 25 bp, Homo sapien
ctctttgatagttagcctgtctctg

SEQ ID NO: 3182233 - DNA, 25 bp, Homo sapien
tgagctgactgatttgtacagtgcc

SEQ ID NO: 3182234 - DNA, 25 bp, Homo sapien
gagctgactgatttgtacagtgcct

SEQ ID NO: 3182235 - DNA, 25 bp, Homo sapien
cacacgggtgatagaggcaggtcct

SEQ ID NO: 3182236 - DNA, 25 bp, Homo sapien
tcttcacggagtgctgtagatggca

SEQ ID NO: 3182237 - DNA, 25 bp, Homo sapien
ccttccggtgctccaatgcgcttgg

SEQ ID NO: 3182238 - DNA, 25 bp, Homo sapien
gcttggcaccatccgggcagtgcac

SEQ ID NO: 3182239 - DNA, 25 bp, Homo sapien
ctcgcctcaacacgcgggagatgaa

SEQ ID NO: 3182240 - DNA, 25 bp, Homo sapien
ctgatttctgggcaactcgcctcaa

SEQ ID NO: 3182241 - DNA, 25 bp, Homo sapien
tgggcaactcgcctcaacacgcggg

SEQ ID NO: 3182242 - DNA, 25 bp, Homo sapien
acgcgggagatgaaggcggccagca

SEQ ID NO: 3182243 - DNA, 25 bp, Homo sapien
gaaagtccccgagtatagcacacac

SEQ ID NO: 3182244 - DNA, 25 bp, Homo sapien
tcagctctgcgagaatggatcggac

SEQ ID NO: 3182245 - DNA, 25 bp, Homo sapien
tttacaggccagagcaatgccagcg

SEQ ID NO: 3182246 - DNA, 25 bp, Homo sapien
catttgaggagttacgggatgccac

SEQ ID NO: 3182247 - DNA, 25 bp, Homo sapien
tagtataaagctaaatcaaatggaa

SEQ ID NO: 3182248 - DNA, 25 bp, Homo sapien
tgaccatgaacattccattgagaga

SEQ ID NO: 3182249 - DNA, 25 bp, Homo sapien
cctccttgagttgagaacacagttt

SEQ ID NO: 3182250 - DNA, 25 bp, Homo sapien
tgataaattcacacgtagcctccct

SEQ ID NO: 3182251 - DNA, 25 bp, Homo sapien
tgatcaactcattcactgatgccac

SEQ ID NO: 3182252 - DNA, 25 bp, Homo sapien
tgtagaattacatgaacagacttag

SEQ ID NO: 3182253 - DNA, 25 bp, Homo sapien
taagatgagcaaacctgatcaactc

SEQ ID NO: 3182254 - DNA, 25 bp, Homo sapien
gacttagttcaaagcggtagtaaga

SEQ ID NO: 3182255 - DNA, 25 bp, Homo sapien
tgctagcctcccattcagttaagtg

SEQ ID NO: 3182256 - DNA, 25 bp, Homo sapien
caagtgaaattactcagccaaaggc

SEQ ID NO: 3182257 - DNA, 25 bp, Homo sapien
tcttgatgagcagaatacatgaact

SEQ ID NO: 3182258 - DNA, 25 bp, Homo sapien
gagaattttatatacccaccagcaa

SEQ ID NO: 3182259 - DNA, 25 bp, Homo sapien
cacaggacaggaactcagtacaggg

SEQ ID NO: 3182260 - DNA, 25 bp, Homo sapien
acaggaactcagtacagggactgtg

SEQ ID NO: 3182261 - DNA, 25 bp, Homo sapien
ggacaggaactcagtacagggactg

SEQ ID NO: 3182262 - DNA, 25 bp, Homo sapien
caggacaggaactcagtacagggac

SEQ ID NO: 3182263 - DNA, 25 bp, Homo sapien
acatatgcagatgaacattggcttg

SEQ ID NO: 3182264 - DNA, 25 bp, Homo sapien
acatgagatatcagttaacatatgc

SEQ ID NO: 3182265 - DNA, 25 bp, Homo sapien
gacatgagatatcagttaacatatg

SEQ ID NO: 3182266 - DNA, 25 bp, Homo sapien
aaagaacattgcgacacttgtatca

SEQ ID NO: 3182267 - DNA, 25 bp, Homo sapien
aaggtaaagaacattgcgacacttg

SEQ ID NO: 3182268 - DNA, 25 bp, Homo sapien
gcgacacttgtatcatgctcttcct

SEQ ID NO: 3182269 - DNA, 25 bp, Homo sapien
cattgcgacacttgtatcatgctct

SEQ ID NO: 3182270 - DNA, 25 bp, Homo sapien
gtccctgaagtgggcattgctccca

SEQ ID NO: 3182271 - DNA, 25 bp, Homo sapien
gattgtaggccatgggccctgaact

SEQ ID NO: 3182272 - DNA, 25 bp, Homo sapien
acagtgctaggtggccccgtgtaga

SEQ ID NO: 3182273 - DNA, 25 bp, Homo sapien
gaactcggccatctggagtgttagg

SEQ ID NO: 3182274 - DNA, 25 bp, Homo sapien
aaggcacaggaacccgacatcctca

SEQ ID NO: 3182275 - DNA, 25 bp, Homo sapien
ggaggccctggatacaaaacacaaa

SEQ ID NO: 3182276 - DNA, 25 bp, Homo sapien
taagctcctccagaacatgggtcca

SEQ ID NO: 3182277 - DNA, 25 bp, Homo sapien
gcttccacagcatgagaggaggccc

SEQ ID NO: 3182278 - DNA, 25 bp, Homo sapien
taaattatcccacattgccaggctg

SEQ ID NO: 3182279 - DNA, 25 bp, Homo sapien
taccaagggtgaaccacacctacca

SEQ ID NO: 3182280 - DNA, 25 bp, Homo sapien
cactgcactaatgtggcccatttta

SEQ ID NO: 3182281 - DNA, 25 bp, Homo sapien
tgactctagatataactttgccttc

SEQ ID NO: 3182282 - DNA, 25 bp, Homo sapien
tccccatgacgaaagaggttagctg

SEQ ID NO: 3182283 - DNA, 25 bp, Homo sapien
gctggtctttttagccattggaggg

SEQ ID NO: 3182284 - DNA, 25 bp, Homo sapien
cattggagggctagcttcttgtact

SEQ ID NO: 3182285 - DNA, 25 bp, Homo sapien
gcaatgacgtggttacagtggcttg

SEQ ID NO: 3182286 - DNA, 25 bp, Homo sapien
tatagcaatgacgtggttacagtgg

SEQ ID NO: 3182287 - DNA, 25 bp, Homo sapien
gaaggatttaacacagatctgcatg

SEQ ID NO: 3182288 - DNA, 25 bp, Homo sapien
gtttcttgtcaattcgatagctgcc

SEQ ID NO: 3182289 - DNA, 25 bp, Homo sapien
tcatcttacatgtccagtgggcctc

SEQ ID NO: 3182290 - DNA, 25 bp, Homo sapien
tagaaatagtgctacctctccagct

SEQ ID NO: 3182291 - DNA, 25 bp, Homo sapien
ctttcagtcatgcagttaacgtgca

SEQ ID NO: 3182292 - DNA, 25 bp, Homo sapien
tgtggtgcagaattcccctctttca

SEQ ID NO: 3182293 - DNA, 25 bp, Homo sapien
cctctttcagtcatgcagttaacgt

SEQ ID NO: 3182294 - DNA, 25 bp, Homo sapien
tgcagaattcccctctttcagtcat

SEQ ID NO: 3182295 - DNA, 25 bp, Homo sapien
caattgtgttatccgaacgtgggct

SEQ ID NO: 3182296 - DNA, 25 bp, Homo sapien
gttatccgaacgtgggctatatggg

SEQ ID NO: 3182297 - DNA, 25 bp, Homo sapien
gcaactgagcactccaattgtgtta

SEQ ID NO: 3182298 - DNA, 25 bp, Homo sapien
gagcactccaattgtgttatccgaa

SEQ ID NO: 3182299 - DNA, 25 bp, Homo sapien
taaagctggctcgaacgaatgttcc

SEQ ID NO: 3182300 - DNA, 25 bp, Homo sapien
gctggctcgaacgaatgttcctttc

SEQ ID NO: 3182301 - DNA, 25 bp, Homo sapien
cgaacgaatgttcctttccattgcc

SEQ ID NO: 3182302 - DNA, 25 bp, Homo sapien
taaattaaagctggctcgaacgaat

SEQ ID NO: 3182303 - DNA, 25 bp, Homo sapien
gaaagtgaattgctccgttgtaaca

SEQ ID NO: 3182304 - DNA, 25 bp, Homo sapien
ttgagctatgcaggccttactacag

SEQ ID NO: 3182305 - DNA, 25 bp, Homo sapien
cgttgtaacaccgagcttgaagcca

SEQ ID NO: 3182306 - DNA, 25 bp, Homo sapien
gccaagttggctgattaattcctag

SEQ ID NO: 3182307 - DNA, 25 bp, Homo sapien
tagactggtactggcaaagacaact

SEQ ID NO: 3182308 - DNA, 25 bp, Homo sapien
aaaacatattttcggaagagacaca

SEQ ID NO: 3182309 - DNA, 25 bp, Homo sapien
caacacacaattgtctcccagtaga

SEQ ID NO: 3182310 - DNA, 25 bp, Homo sapien
tcttattgaaaaggcagctgcccaa

SEQ ID NO: 3182311 - DNA, 25 bp, Homo sapien
ggcacttcaaagcttcaattcctgt

SEQ ID NO: 3182312 - DNA, 25 bp, Homo sapien
aaggcacttcaaagcttcaattcct

SEQ ID NO: 3182313 - DNA, 25 bp, Homo sapien
cacttcaaagcttcaattcctgtca

SEQ ID NO: 3182314 - DNA, 25 bp, Homo sapien
acttcaaagcttcaattcctgtcat

SEQ ID NO: 3182315 - DNA, 25 bp, Homo sapien
tattgtctgctttagggtcatccct

SEQ ID NO: 3182316 - DNA, 25 bp, Homo sapien
cacaattttctgatgtggcagaaac

SEQ ID NO: 3182317 - DNA, 25 bp, Homo sapien
aagatgtttggaccatattgtctgc

SEQ ID NO: 3182318 - DNA, 25 bp, Homo sapien
ccctgaagccattagctatcataat

SEQ ID NO: 3182319 - DNA, 25 bp, Homo sapien
tcatttggaccaagaaagaaataaa

SEQ ID NO: 3182320 - DNA, 25 bp, Homo sapien
tattgtggacttttcagatgccaga

SEQ ID NO: 3182321 - DNA, 25 bp, Homo sapien
aacagatccgcagttttcagcacca

SEQ ID NO: 3182322 - DNA, 25 bp, Homo sapien
catttttctattgtggacttttcag

SEQ ID NO: 3182323 - DNA, 25 bp, Homo sapien
agccataacagatccgcagttttca

SEQ ID NO: 3182324 - DNA, 25 bp, Homo sapien
ggtgactttcaagcgactgctgcct

SEQ ID NO: 3182325 - DNA, 25 bp, Homo sapien
caagactggctacgtgattggtgga

SEQ ID NO: 3182326 - DNA, 25 bp, Homo sapien
ggagtagcccgctgaacaagcagtg

SEQ ID NO: 3182327 - DNA, 25 bp, Homo sapien
ttaactactagtgagcaagactggc

SEQ ID NO: 3182328 - DNA, 25 bp, Homo sapien
gtcagtgtagtacacattattatta

SEQ ID NO: 3182329 - DNA, 25 bp, Homo sapien
caccactgtcagtgtagtacacatt

SEQ ID NO: 3182330 - DNA, 25 bp, Homo sapien
ttgccccacagactttaccaccact

SEQ ID NO: 3182331 - DNA, 25 bp, Homo sapien
cccacagactttaccaccactgtca

SEQ ID NO: 3182332 - DNA, 25 bp, Homo sapien
tagtcaaagtggtgatatcaatcac

SEQ ID NO: 3182333 - DNA, 25 bp, Homo sapien
tcagccttggtatcaaagcaggaca

SEQ ID NO: 3182334 - DNA, 25 bp, Homo sapien
tatcaatcacctcatcatgtctcag

SEQ ID NO: 3182335 - DNA, 25 bp, Homo sapien
tctttgtccttactgaatgcgaacc

SEQ ID NO: 3182336 - DNA, 25 bp, Homo sapien
gactgaaaatctaccagatggtctg

SEQ ID NO: 3182337 - DNA, 25 bp, Homo sapien
gatggtctggcagcaaggttacagt

SEQ ID NO: 3182338 - DNA, 25 bp, Homo sapien
aatctaccagatggtctggcagcaa

SEQ ID NO: 3182339 - DNA, 25 bp, Homo sapien
ttgatgactgaaaatctaccagatg

SEQ ID NO: 3182340 - DNA, 25 bp, Homo sapien
tcacttaatccagattgtaactcct

SEQ ID NO: 3182341 - DNA, 25 bp, Homo sapien
tctgctacagacccctcacttaatc

SEQ ID NO: 3182342 - DNA, 25 bp, Homo sapien
ctacagacccctcacttaatccaga

SEQ ID NO: 3182343 - DNA, 25 bp, Homo sapien
cacttaatccagattgtaactcctt

SEQ ID NO: 3182344 - DNA, 25 bp, Homo sapien
ctctattacatttgtactgttcata

SEQ ID NO: 3182345 - DNA, 25 bp, Homo sapien
cctctattacatttgtactgttcat

SEQ ID NO: 3182346 - DNA, 25 bp, Homo sapien
cagcatctctgataacaagcatagg

SEQ ID NO: 3182347 - DNA, 25 bp, Homo sapien
tcaaacactttatcaagttttggca

SEQ ID NO: 3182348 - DNA, 25 bp, Homo sapien
ttctccagtattgtccacggtacag

SEQ ID NO: 3182349 - DNA, 25 bp, Homo sapien
ccacggtacagagtcataatcatca

SEQ ID NO: 3182350 - DNA, 25 bp, Homo sapien
cattattcaggttcttgtagaccat

SEQ ID NO: 3182351 - DNA, 25 bp, Homo sapien
gacgctagctttcatgctatcattt

SEQ ID NO: 3182352 - DNA, 25 bp, Homo sapien
gtagaccatcttgctgttactctcc

SEQ ID NO: 3182353 - DNA, 25 bp, Homo sapien
ggtgggtcactgagctactgacgct

SEQ ID NO: 3182354 - DNA, 25 bp, Homo sapien
tcaagattctgggaactatctccca

SEQ ID NO: 3182355 - DNA, 25 bp, Homo sapien
atatcaagattctgggaactatctc

SEQ ID NO: 3182356 - DNA, 25 bp, Homo sapien
ctgggaactatctcccagccaatgg

SEQ ID NO: 3182357 - DNA, 25 bp, Homo sapien
agattctgggaactatctcccagcc

SEQ ID NO: 3182358 - DNA, 25 bp, Homo sapien
ggagttggctgttcctttccagtac

SEQ ID NO: 3182359 - DNA, 25 bp, Homo sapien
agttggctgttcctttccagtacct

SEQ ID NO: 3182360 - DNA, 25 bp, Homo sapien
aaggagttggctgttcctttccagt

SEQ ID NO: 3182361 - DNA, 25 bp, Homo sapien
taagaaggagttggctgttcctttc

SEQ ID NO: 3182362 - DNA, 25 bp, Homo sapien
cactgcagatataaatctgtgctta

SEQ ID NO: 3182363 - DNA, 25 bp, Homo sapien
tccaccgggcatgactcgaggatgg

SEQ ID NO: 3182364 - DNA, 25 bp, Homo sapien
ttcaaatgaactggaacattagcat

SEQ ID NO: 3182365 - DNA, 25 bp, Homo sapien
tataaatctgtgcttagtctcctct

SEQ ID NO: 3182366 - DNA, 25 bp, Homo sapien
tctagacagttcgttctgagtgtag

SEQ ID NO: 3182367 - DNA, 25 bp, Homo sapien
tgctgcatagtttgactctagacag

SEQ ID NO: 3182368 - DNA, 25 bp, Homo sapien
gccagttactgcctcctgctaagtt

SEQ ID NO: 3182369 - DNA, 25 bp, Homo sapien
tagggcagggagaaattaggtgaac

SEQ ID NO: 3182370 - DNA, 25 bp, Homo sapien
tccacctcccgtgttcacggccatt

SEQ ID NO: 3182371 - DNA, 25 bp, Homo sapien
cacctcccgtgttcacggccattct

SEQ ID NO: 3182372 - DNA, 25 bp, Homo sapien
cacgctccacctcccgtgttcacgg

SEQ ID NO: 3182373 - DNA, 25 bp, Homo sapien
cgctccacctcccgtgttcacggcc

SEQ ID NO: 3182374 - DNA, 25 bp, Homo sapien
tcgtaagttttccctcaatatgcct

SEQ ID NO: 3182375 - DNA, 25 bp, Homo sapien
tcaatatgcctgattttccatttac

SEQ ID NO: 3182376 - DNA, 25 bp, Homo sapien
cctcaatatgcctgattttccattt

SEQ ID NO: 3182377 - DNA, 25 bp, Homo sapien
cgtaagttttccctcaatatgcctg

SEQ ID NO: 3182378 - DNA, 25 bp, Homo sapien
attgtgctccttgatcataagatat

SEQ ID NO: 3182379 - DNA, 25 bp, Homo sapien
gatatatcctgttctgagtgcacat

SEQ ID NO: 3182380 - DNA, 25 bp, Homo sapien
aagatatatcctgttctgagtgcac

SEQ ID NO: 3182381 - DNA, 25 bp, Homo sapien
tccttgatcataagatatatcctgt

SEQ ID NO: 3182382 - DNA, 25 bp, Homo sapien
tgtaataacacaatagcatgtttgg

SEQ ID NO: 3182383 - DNA, 25 bp, Homo sapien
tagtacttagaagattgtcaatatg

SEQ ID NO: 3182384 - DNA, 25 bp, Homo sapien
aataaaataacctagtatcatcaag

SEQ ID NO: 3182385 - DNA, 25 bp, Homo sapien
gttgtttagaaaatggctgctaaaa

SEQ ID NO: 3182386 - DNA, 25 bp, Homo sapien
tttactttgtatctagtggcgttaa

SEQ ID NO: 3182387 - DNA, 25 bp, Homo sapien
tttgtatctagtggcgttaaatgta

SEQ ID NO: 3182388 - DNA, 25 bp, Homo sapien
actttgtatctagtggcgttaaatg

SEQ ID NO: 3182389 - DNA, 25 bp, Homo sapien
tactttgtatctagtggcgttaaat

SEQ ID NO: 3182390 - DNA, 25 bp, Homo sapien
gctgcaaacaaccagatgagctttg

SEQ ID NO: 3182391 - DNA, 25 bp, Homo sapien
ctgcaaacaaccagatgagctttgt

SEQ ID NO: 3182392 - DNA, 25 bp, Homo sapien
tgtgcgcatgcacgcccctgcttac

SEQ ID NO: 3182393 - DNA, 25 bp, Homo sapien
gtgtgcgcatgcacgcccctgctta

SEQ ID NO: 3182394 - DNA, 25 bp, Homo sapien
tgctgctatgtctggtggtctctct

SEQ ID NO: 3182395 - DNA, 25 bp, Homo sapien
gccttgtcctttcacggtgctgact

SEQ ID NO: 3182396 - DNA, 25 bp, Homo sapien
ttgctgctatgtctggtggtctctc

SEQ ID NO: 3182397 - DNA, 25 bp, Homo sapien
gtcctttcacggtgctgacttcctt

SEQ ID NO: 3182398 - DNA, 25 bp, Homo sapien
taaatgttcttacacccttcttgaa

SEQ ID NO: 3182399 - DNA, 25 bp, Homo sapien
tctaaggtcactatgattcacccct

SEQ ID NO: 3182400 - DNA, 25 bp, Homo sapien
tcaagcttgaattggctggccacaa

SEQ ID NO: 3182401 - DNA, 25 bp, Homo sapien
tgcatcataccagtgttctcggctc

SEQ ID NO: 3182402 - DNA, 25 bp, Homo sapien
acaacttgacccagagataatggag

SEQ ID NO: 3182403 - DNA, 25 bp, Homo sapien
aaacaacttgacccagagataatgg

SEQ ID NO: 3182404 - DNA, 25 bp, Homo sapien
caacttgacccagagataatggaga

SEQ ID NO: 3182405 - DNA, 25 bp, Homo sapien
aacaacttgacccagagataatgga

SEQ ID NO: 3182406 - DNA, 25 bp, Homo sapien
agtagctgagattgctgtgttccac

SEQ ID NO: 3182407 - DNA, 25 bp, Homo sapien
taagcattactgcacttggataagc

SEQ ID NO: 3182408 - DNA, 25 bp, Homo sapien
gttgtaagcattactgcacttggat

SEQ ID NO: 3182409 - DNA, 25 bp, Homo sapien
agcattactgcacttggataagcca

SEQ ID NO: 3182410 - DNA, 25 bp, Homo sapien
aagtgaatcagtgagagtaaagaaa

SEQ ID NO: 3182411 - DNA, 25 bp, Homo sapien
caatgtcttgagtagtactttgaaa

SEQ ID NO: 3182412 - DNA, 25 bp, Homo sapien
tcttgagtagtactttgaaacttgg

SEQ ID NO: 3182413 - DNA, 25 bp, Homo sapien
ttgagtagtactttgaaacttgggc

SEQ ID NO: 3182414 - DNA, 25 bp, Homo sapien
ctgtgacaatgtcttgagtagtact

SEQ ID NO: 3182415 - DNA, 25 bp, Homo sapien
ttctccccagctgtagcatgatggg

SEQ ID NO: 3182416 - DNA, 25 bp, Homo sapien
ggatccatcaatccctcacttgtca

SEQ ID NO: 3182417 - DNA, 25 bp, Homo sapien
cagctgtagcatgatgggatccatc

SEQ ID NO: 3182418 - DNA, 25 bp, Homo sapien
gatgggatccatcaatccctcactt

SEQ ID NO: 3182419 - DNA, 25 bp, Homo sapien
agggactgagttgcctggaatatac

SEQ ID NO: 3182420 - DNA, 25 bp, Homo sapien
aagggactgagttgcctggaatata

SEQ ID NO: 3182421 - DNA, 25 bp, Homo sapien
ctgaaagggactgagttgcctggaa

SEQ ID NO: 3182422 - DNA, 25 bp, Homo sapien
gaaagggactgagttgcctggaata

SEQ ID NO: 3182423 - DNA, 25 bp, Homo sapien
caggtccagcacatggagaggagac

SEQ ID NO: 3182424 - DNA, 25 bp, Homo sapien
caagggctattgtctccaggtccag

SEQ ID NO: 3182425 - DNA, 25 bp, Homo sapien
gagcttataaccagctgtgtcagaa

SEQ ID NO: 3182426 - DNA, 25 bp, Homo sapien
cagtagtgtccatccatacagagct

SEQ ID NO: 3182427 - DNA, 25 bp, Homo sapien
ttccattgtctgttttgtggcattt

SEQ ID NO: 3182428 - DNA, 25 bp, Homo sapien
tgtggcattttcaaagtgaattctt

SEQ ID NO: 3182429 - DNA, 25 bp, Homo sapien
atttttccattgtctgttttgtggc

SEQ ID NO: 3182430 - DNA, 25 bp, Homo sapien
attctttcagcaggctattttcatg

SEQ ID NO: 3182431 - DNA, 25 bp, Homo sapien
tatgtcctatatggcaactcagagt

SEQ ID NO: 3182432 - DNA, 25 bp, Homo sapien
aaagggcttccggactatctggcag

SEQ ID NO: 3182433 - DNA, 25 bp, Homo sapien
ctaactgtccctgcaaactctggaa

SEQ ID NO: 3182434 - DNA, 25 bp, Homo sapien
tgcaaactggcacacaagttgtcct

SEQ ID NO: 3182435 - DNA, 25 bp, Homo sapien
cagggcagcttgacatctatcacag

SEQ ID NO: 3182436 - DNA, 25 bp, Homo sapien
gcagaaaatctggtggcatctctcc

SEQ ID NO: 3182437 - DNA, 25 bp, Homo sapien
gagattccgaattggctcctggcct

SEQ ID NO: 3182438 - DNA, 25 bp, Homo sapien
catccctatgtgtatctgaaagaga

SEQ ID NO: 3182439 - DNA, 25 bp, Homo sapien
ccagcatagccggataataattcat

SEQ ID NO: 3182440 - DNA, 25 bp, Homo sapien
gtatctacctacagtcctctgagag

SEQ ID NO: 3182441 - DNA, 25 bp, Homo sapien
tcttgaaggctgctagggaatgaac

SEQ ID NO: 3182442 - DNA, 25 bp, Homo sapien
tgtgctgccctagatcacagtgctt

SEQ ID NO: 3182443 - DNA, 25 bp, Homo sapien
tgattggtaggtgctcatggaagat

SEQ ID NO: 3182444 - DNA, 25 bp, Homo sapien
gtgtttgtaaccactgctatttgtg

SEQ ID NO: 3182445 - DNA, 25 bp, Homo sapien
agtagcagattgtgtttgtaaccac

SEQ ID NO: 3182446 - DNA, 25 bp, Homo sapien
ttctgattggtaggtgctcatggaa

SEQ ID NO: 3182447 - DNA, 25 bp, Homo sapien
cattttctgagtgatgacataacag

SEQ ID NO: 3182448 - DNA, 25 bp, Homo sapien
gaaactaacagctttagcactgggt

SEQ ID NO: 3182449 - DNA, 25 bp, Homo sapien
tgatgacataacagaaatgttgagc

SEQ ID NO: 3182450 - DNA, 25 bp, Homo sapien
gacttgtggccaaaactgtatgatg

SEQ ID NO: 3182451 - DNA, 25 bp, Homo sapien
acctgagctggagtacattggcgca

SEQ ID NO: 3182452 - DNA, 25 bp, Homo sapien
actaagttggccaggctgctctcaa

SEQ ID NO: 3182453 - DNA, 25 bp, Homo sapien
taagttggccaggctgctctcaaac

SEQ ID NO: 3182454 - DNA, 25 bp, Homo sapien
tcacctgagctggagtacattggcg

SEQ ID NO: 3182455 - DNA, 25 bp, Homo sapien
tgtgttgttgtaacctccagggcca

SEQ ID NO: 3182456 - DNA, 25 bp, Homo sapien
gatgatcaatgataccctccattcc

SEQ ID NO: 3182457 - DNA, 25 bp, Homo sapien
ctttagggggatgatcaatgatacc

SEQ ID NO: 3182458 - DNA, 25 bp, Homo sapien
catttgggattaagctaaatcctgg

SEQ ID NO: 3182459 - DNA, 25 bp, Homo sapien
ttattctactccttcagcagtacat

SEQ ID NO: 3182460 - DNA, 25 bp, Homo sapien
ttgccctgttccacaatttgatggg

SEQ ID NO: 3182461 - DNA, 25 bp, Homo sapien
tccttgttgcttttggccaattcat

SEQ ID NO: 3182462 - DNA, 25 bp, Homo sapien
ttccacaatttgatgggtatcattc

SEQ ID NO: 3182463 - DNA, 25 bp, Homo sapien
tggccaattcatgtgatttgcattc

SEQ ID NO: 3182464 - DNA, 25 bp, Homo sapien
tatataagtgaccaaagggtgggag

SEQ ID NO: 3182465 - DNA, 25 bp, Homo sapien
tctccttgaggacgaaatctactta

SEQ ID NO: 3182466 - DNA, 25 bp, Homo sapien
atattacaatctccttgaggacgaa

SEQ ID NO: 3182467 - DNA, 25 bp, Homo sapien
aagtttgggcaatatataagtgacc

SEQ ID NO: 3182468 - DNA, 25 bp, Homo sapien
cttcttgaaaatacgtccgggtctg

SEQ ID NO: 3182469 - DNA, 25 bp, Homo sapien
aacatctgacattataatgaactct

SEQ ID NO: 3182470 - DNA, 25 bp, Homo sapien
catctgacattataatgaactcttc

SEQ ID NO: 3182471 - DNA, 25 bp, Homo sapien
cttgaaaatacgtccgggtctgcat

SEQ ID NO: 3182472 - DNA, 25 bp, Homo sapien
ctggtcacctccatatctgaggcca

SEQ ID NO: 3182473 - DNA, 25 bp, Homo sapien
tctggtcacctccatatctgaggcc

SEQ ID NO: 3182474 - DNA, 25 bp, Homo sapien
ctttcttcaactctggtcacctcca

SEQ ID NO: 3182475 - DNA, 25 bp, Homo sapien
aactctggtcacctccatatctgag

SEQ ID NO: 3182476 - DNA, 25 bp, Homo sapien
tctggatccgataggcacatttaaa

SEQ ID NO: 3182477 - DNA, 25 bp, Homo sapien
tcaaggtggcttatagccaaagtcc

SEQ ID NO: 3182478 - DNA, 25 bp, Homo sapien
tctttgagactaacactggagatcc

SEQ ID NO: 3182479 - DNA, 25 bp, Homo sapien
cttgattgtcatacttctttgagac

SEQ ID NO: 3182480 - DNA, 25 bp, Homo sapien
tagatatccaagtgacaacacagct

SEQ ID NO: 3182481 - DNA, 25 bp, Homo sapien
taatcgtatgcactttgccaaaacc

SEQ ID NO: 3182482 - DNA, 25 bp, Homo sapien
caatattctagggagcaatgtaaca

SEQ ID NO: 3182483 - DNA, 25 bp, Homo sapien
caaagtttcggtctatgacttggta

SEQ ID NO: 3182484 - DNA, 25 bp, Homo sapien
aattgccagttgcacacttcttgtt

SEQ ID NO: 3182485 - DNA, 25 bp, Homo sapien
ggatcttttcaagaccatgccaaag

SEQ ID NO: 3182486 - DNA, 25 bp, Homo sapien
tcaggagctctaagtacaaaaccag

SEQ ID NO: 3182487 - DNA, 25 bp, Homo sapien
gatagcaatcgttgaagtcaatctg

SEQ ID NO: 3182488 - DNA, 25 bp, Homo sapien
gaacatctgaagtcgtactcttgct

SEQ ID NO: 3182489 - DNA, 25 bp, Homo sapien
ccatttccgaacatctgaagtcgta

SEQ ID NO: 3182490 - DNA, 25 bp, Homo sapien
catctgaagtcgtactcttgctgta

SEQ ID NO: 3182491 - DNA, 25 bp, Homo sapien
gaagtcgtactcttgctgtagtgac

SEQ ID NO: 3182492 - DNA, 25 bp, Homo sapien
agatttacattaggttctgtccctt

SEQ ID NO: 3182493 - DNA, 25 bp, Homo sapien
acttaggaggatctaggtggatgtg

SEQ ID NO: 3182494 - DNA, 25 bp, Homo sapien
cacttaggaggatctaggtggatgt

SEQ ID NO: 3182495 - DNA, 25 bp, Homo sapien
cagatttacattaggttctgtccct

SEQ ID NO: 3182496 - DNA, 25 bp, Homo sapien
actgggtcgcagtaactaagtgtac

SEQ ID NO: 3182497 - DNA, 25 bp, Homo sapien
aatcctccaaatgaaggatactggg

SEQ ID NO: 3182498 - DNA, 25 bp, Homo sapien
ggtatcacatctaggattccaaaag

SEQ ID NO: 3182499 - DNA, 25 bp, Homo sapien
catctaggattccaaaagtagggta

SEQ ID NO: 3182500 - DNA, 25 bp, Homo sapien
tatttcagattcttctttttggaag

SEQ ID NO: 3182501 - DNA, 25 bp, Homo sapien
tttcagattcttctttttggaagga

SEQ ID NO: 3182502 - DNA, 25 bp, Homo sapien
atttcagattcttctttttggaagg

SEQ ID NO: 3182503 - DNA, 25 bp, Homo sapien
ctatttcagattcttctttttggaa

SEQ ID NO: 3182504 - DNA, 25 bp, Homo sapien
gagaagacctggtgaatcttgcctg

SEQ ID NO: 3182505 - DNA, 25 bp, Homo sapien
ctgcagatctaaagagagaagacct

SEQ ID NO: 3182506 - DNA, 25 bp, Homo sapien
cctggtgaatcttgcctgaatccag

SEQ ID NO: 3182507 - DNA, 25 bp, Homo sapien
tgcagatctaaagagagaagacctg

SEQ ID NO: 3182508 - DNA, 25 bp, Homo sapien
agccctccatggcaagctgactccc

SEQ ID NO: 3182509 - DNA, 25 bp, Homo sapien
cctgttaactatctctgcccacttg

SEQ ID NO: 3182510 - DNA, 25 bp, Homo sapien
tctccctgttaactatctctgccca

SEQ ID NO: 3182511 - DNA, 25 bp, Homo sapien
ttaactatctctgcccacttgctgc

SEQ ID NO: 3182512 - DNA, 25 bp, Homo sapien
cacagagcttttccgctccttcatg

SEQ ID NO: 3182513 - DNA, 25 bp, Homo sapien
ccacagagcttttccgctccttcat

SEQ ID NO: 3182514 - DNA, 25 bp, Homo sapien
gtcccacagagcttttccgctcctt

SEQ ID NO: 3182515 - DNA, 25 bp, Homo sapien
cccacagagcttttccgctccttca

SEQ ID NO: 3182516 - DNA, 25 bp, Homo sapien
tgaatttcatcccaacaaggggtat

SEQ ID NO: 3182517 - DNA, 25 bp, Homo sapien
caacaaggggtatcttgccacaact

SEQ ID NO: 3182518 - DNA, 25 bp, Homo sapien
cacccacgtgatgtagatttgaatt

SEQ ID NO: 3182519 - DNA, 25 bp, Homo sapien
gtgtgggtcacccacgtgatgtaga

SEQ ID NO: 3182520 - DNA, 25 bp, Homo sapien
tcattggacttcaacaaccaccatg

SEQ ID NO: 3182521 - DNA, 25 bp, Homo sapien
ttggacttcaacaaccaccatgtgc

SEQ ID NO: 3182522 - DNA, 25 bp, Homo sapien
cattggacttcaacaaccaccatgt

SEQ ID NO: 3182523 - DNA, 25 bp, Homo sapien
attggacttcaacaaccaccatgtg

SEQ ID NO: 3182524 - DNA, 25 bp, Homo sapien
attgaagtcactcctttattgggaa

SEQ ID NO: 3182525 - DNA, 25 bp, Homo sapien
aagtcactcctttattgggaaatga

SEQ ID NO: 3182526 - DNA, 25 bp, Homo sapien
aatgtgaaccaagtgattgctggga

SEQ ID NO: 3182527 - DNA, 25 bp, Homo sapien
atgattgaagtcactcctttattgg

SEQ ID NO: 3182528 - DNA, 25 bp, Homo sapien
gtcaataaatattgatccccaaaga

SEQ ID NO: 3182529 - DNA, 25 bp, Homo sapien
aataaatattgatccccaaagaaga

SEQ ID NO: 3182530 - DNA, 25 bp, Homo sapien
caataaatattgatccccaaagaag

SEQ ID NO: 3182531 - DNA, 25 bp, Homo sapien
agtcaataaatattgatccccaaag

SEQ ID NO: 3182532 - DNA, 25 bp, Homo sapien
tccaacccctatggcagtaacatta

SEQ ID NO: 3182533 - DNA, 25 bp, Homo sapien
ggcagtaacattataccctacatag

SEQ ID NO: 3182534 - DNA, 25 bp, Homo sapien
tggcagtaacattataccctacata

SEQ ID NO: 3182535 - DNA, 25 bp, Homo sapien
tcctgttttccaacccctatggcag

SEQ ID NO: 3182536 - DNA, 25 bp, Homo sapien
catagtaaggctaggaaaggtgata

SEQ ID NO: 3182537 - DNA, 25 bp, Homo sapien
taaggctaggaaaggtgataagaga

SEQ ID NO: 3182538 - DNA, 25 bp, Homo sapien
gagaactaagataatcgaagatttc

SEQ ID NO: 3182539 - DNA, 25 bp, Homo sapien
gtaacaacatagtaaggctaggaaa

SEQ ID NO: 3182540 - DNA, 25 bp, Homo sapien
tggatagagagaggccctgagttta

SEQ ID NO: 3182541 - DNA, 25 bp, Homo sapien
gagagaggccctgagtttaataagt

SEQ ID NO: 3182542 - DNA, 25 bp, Homo sapien
tggagtagacaaaactcagaagaca

SEQ ID NO: 3182543 - DNA, 25 bp, Homo sapien
ttaataagttttccatggagtagac

SEQ ID NO: 3182544 - DNA, 25 bp, Homo sapien
cttctagcttgccatatgcatgtat

SEQ ID NO: 3182545 - DNA, 25 bp, Homo sapien
agtgacagtgcaattgtactgacaa

SEQ ID NO: 3182546 - DNA, 25 bp, Homo sapien
tatgcatgtattactctgttgctgc

SEQ ID NO: 3182547 - DNA, 25 bp, Homo sapien
tgcaattgtactgacaatggtcatc

SEQ ID NO: 3182548 - DNA, 25 bp, Homo sapien
cactttactgggcatgttacctgca

SEQ ID NO: 3182549 - DNA, 25 bp, Homo sapien
tgtgcaagaccagtaaccaggatac

SEQ ID NO: 3182550 - DNA, 25 bp, Homo sapien
tgtctcaatttagcgtcatccgtaa

SEQ ID NO: 3182551 - DNA, 25 bp, Homo sapien
tctgtcaggtaggattaggccaagg

SEQ ID NO: 3182552 - DNA, 25 bp, Homo sapien
ccatatttctttcagatttagcctg

SEQ ID NO: 3182553 - DNA, 25 bp, Homo sapien
ctttcagatttagcctgctctggtg

SEQ ID NO: 3182554 - DNA, 25 bp, Homo sapien
tatttctttcagatttagcctgctc

SEQ ID NO: 3182555 - DNA, 25 bp, Homo sapien
gatttagcctgctctggtgtagttc

SEQ ID NO: 3182556 - DNA, 25 bp, Homo sapien
cactcttgtggtgtgaggtgaaaca

SEQ ID NO: 3182557 - DNA, 25 bp, Homo sapien
tgcactcttgtggtgtgaggtgaaa

SEQ ID NO: 3182558 - DNA, 25 bp, Homo sapien
gtggtgtgaggtgaaacaggtctag

SEQ ID NO: 3182559 - DNA, 25 bp, Homo sapien
gttgcactcttgtggtgtgaggtga

SEQ ID NO: 3182560 - DNA, 25 bp, Homo sapien
ggcttatggaatacttcttttcctg

SEQ ID NO: 3182561 - DNA, 25 bp, Homo sapien
gcggaaccatagataattggcttat

SEQ ID NO: 3182562 - DNA, 25 bp, Homo sapien
cttttcctgaagctaactgtgggta

SEQ ID NO: 3182563 - DNA, 25 bp, Homo sapien
ctgtgggtagaaaacgtaacttgca

SEQ ID NO: 3182564 - DNA, 25 bp, Homo sapien
caacagtcactaaaatgctatcttc

SEQ ID NO: 3182565 - DNA, 25 bp, Homo sapien
tactatttttatcatgacttgcaat

SEQ ID NO: 3182566 - DNA, 25 bp, Homo sapien
tgcaatttgaggtaagagagcctcc

SEQ ID NO: 3182567 - DNA, 25 bp, Homo sapien
gtgcctccaacagtcactaaaatgc

SEQ ID NO: 3182568 - DNA, 25 bp, Homo sapien
tataatctgggcatttgatgaagaa

SEQ ID NO: 3182569 - DNA, 25 bp, Homo sapien
ccagagcgtttcagtaatatcccca

SEQ ID NO: 3182570 - DNA, 25 bp, Homo sapien
cttctacaattttataatctgggca

SEQ ID NO: 3182571 - DNA, 25 bp, Homo sapien
agaaattgaaaccagagcgtttcag

SEQ ID NO: 3182572 - DNA, 25 bp, Homo sapien
gatctggacgtttcaccttcactgt

SEQ ID NO: 3182573 - DNA, 25 bp, Homo sapien
gcaaaggctctacggactggctttc

SEQ ID NO: 3182574 - DNA, 25 bp, Homo sapien
gtctcctgcaaaggctctacggact

SEQ ID NO: 3182575 - DNA, 25 bp, Homo sapien
ttcttctgatctggacgtttcacct

SEQ ID NO: 3182576 - DNA, 25 bp, Homo sapien
tgatgacagagagaccagaagactg

SEQ ID NO: 3182577 - DNA, 25 bp, Homo sapien
tgacagagagaccagaagactgcca

SEQ ID NO: 3182578 - DNA, 25 bp, Homo sapien
gagagaccagaagactgccagtggt

SEQ ID NO: 3182579 - DNA, 25 bp, Homo sapien
cagaagactgccagtggtagtccac

SEQ ID NO: 3182580 - DNA, 25 bp, Homo sapien
cgtgtgttgccctgtgctgcctcag

SEQ ID NO: 3182581 - DNA, 25 bp, Homo sapien
gctgcctcaggactgtgcagaaagt

SEQ ID NO: 3182582 - DNA, 25 bp, Homo sapien
tgtgctgcctcaggactgtgcagaa

SEQ ID NO: 3182583 - DNA, 25 bp, Homo sapien
ccctgtgctgcctcaggactgtgca

SEQ ID NO: 3182584 - DNA, 25 bp, Homo sapien
aatcaaagaaagctcaaatgtgcac

SEQ ID NO: 3182585 - DNA, 25 bp, Homo sapien
gctgattataatggaggtccttgac

SEQ ID NO: 3182586 - DNA, 25 bp, Homo sapien
tgtgcagtttaaccagattgttgat

SEQ ID NO: 3182587 - DNA, 25 bp, Homo sapien
cagtttaatctgtccagttgctcat

SEQ ID NO: 3182588 - DNA, 25 bp, Homo sapien
caactgtttggaaggcacttagtga

SEQ ID NO: 3182589 - DNA, 25 bp, Homo sapien
tgagtctactaagaaaactgaggac

SEQ ID NO: 3182590 - DNA, 25 bp, Homo sapien
gacctaacttaatgtctatagccaa

SEQ ID NO: 3182591 - DNA, 25 bp, Homo sapien
atatgttttatatcactctgtgcca

SEQ ID NO: 3182592 - DNA, 25 bp, Homo sapien
aaccaactggtaaaactgatgacat

SEQ ID NO: 3182593 - DNA, 25 bp, Homo sapien
gaaagataggttcttcgaaaatata

SEQ ID NO: 3182594 - DNA, 25 bp, Homo sapien
tcttcgaaaatataaccaactggta

SEQ ID NO: 3182595 - DNA, 25 bp, Homo sapien
tataaccaactggtaaaactgatga

SEQ ID NO: 3182596 - DNA, 25 bp, Homo sapien
gatctgatgattccaggaaagcagc

SEQ ID NO: 3182597 - DNA, 25 bp, Homo sapien
taactgcttccaatggacggtcttg

SEQ ID NO: 3182598 - DNA, 25 bp, Homo sapien
taaggctaccaactgtggatctgat

SEQ ID NO: 3182599 - DNA, 25 bp, Homo sapien
gcaggtcatcatgagtaaggctacc

SEQ ID NO: 3182600 - DNA, 25 bp, Homo sapien
gaaaagttagccatagcatttatga

SEQ ID NO: 3182601 - DNA, 25 bp, Homo sapien
tgaaaagttagccatagcatttatg

SEQ ID NO: 3182602 - DNA, 25 bp, Homo sapien
agatgaaaagttagccatagcattt

SEQ ID NO: 3182603 - DNA, 25 bp, Homo sapien
gatgaaaagttagccatagcattta

SEQ ID NO: 3182604 - DNA, 25 bp, Homo sapien
tgtcctcatcatgtcccgtatctcc

SEQ ID NO: 3182605 - DNA, 25 bp, Homo sapien
ctcatcatgtcccgtatctcccttg

SEQ ID NO: 3182606 - DNA, 25 bp, Homo sapien
tcctcatcatgtcccgtatctccct

SEQ ID NO: 3182607 - DNA, 25 bp, Homo sapien
catcatgtcccgtatctcccttgtc

SEQ ID NO: 3182608 - DNA, 25 bp, Homo sapien
gtgaagaaaggctcagactcttttt

SEQ ID NO: 3182609 - DNA, 25 bp, Homo sapien
tgaagaaaggctcagactctttttt

SEQ ID NO: 3182610 - DNA, 25 bp, Homo sapien
ctgtttgtgaagaaaggctcagact

SEQ ID NO: 3182611 - DNA, 25 bp, Homo sapien
tttgtgaagaaaggctcagactctt

SEQ ID NO: 3182612 - DNA, 25 bp, Homo sapien
tataccactaagttgccacttcggc

SEQ ID NO: 3182613 - DNA, 25 bp, Homo sapien
tgccacttcggcatctcttgttcct

SEQ ID NO: 3182614 - DNA, 25 bp, Homo sapien
tattcataggcacaactgtcacgct

SEQ ID NO: 3182615 - DNA, 25 bp, Homo sapien
caatccatataccactaagttgcca

SEQ ID NO: 3182616 - DNA, 25 bp, Homo sapien
tatgagtaagatccactgttttgtc

SEQ ID NO: 3182617 - DNA, 25 bp, Homo sapien
ccactgttttgtctggactgtttac

SEQ ID NO: 3182618 - DNA, 25 bp, Homo sapien
atgagtaagatccactgttttgtct

SEQ ID NO: 3182619 - DNA, 25 bp, Homo sapien
tatatgagtaagatccactgttttg

SEQ ID NO: 3182620 - DNA, 25 bp, Homo sapien
tctgcaacagtgatccctacattta

SEQ ID NO: 3182621 - DNA, 25 bp, Homo sapien
gttcagatgtgtctatttcaatgtg

SEQ ID NO: 3182622 - DNA, 25 bp, Homo sapien
ttcagattgcttaggcagccaggat

SEQ ID NO: 3182623 - DNA, 25 bp, Homo sapien
gccaggatgcccttttaaactctcc

SEQ ID NO: 3182624 - DNA, 25 bp, Homo sapien
ttcacgctgtcactgctccccttct

SEQ ID NO: 3182625 - DNA, 25 bp, Homo sapien
cccttctcccatggaatctcctcat

SEQ ID NO: 3182626 - DNA, 25 bp, Homo sapien
catcatccactggaaggtgtgacat

SEQ ID NO: 3182627 - DNA, 25 bp, Homo sapien
catcatcatccactggaaggtgtga

SEQ ID NO: 3182628 - DNA, 25 bp, Homo sapien
tacggccagatataagttgaaattg

SEQ ID NO: 3182629 - DNA, 25 bp, Homo sapien
aatatgatattacatgaattacggc

SEQ ID NO: 3182630 - DNA, 25 bp, Homo sapien
tattacatgaattacggccagatat

SEQ ID NO: 3182631 - DNA, 25 bp, Homo sapien
gaattacggccagatataagttgaa

SEQ ID NO: 3182632 - DNA, 25 bp, Homo sapien
agacatgaaagtctgccacagtgtg

SEQ ID NO: 3182633 - DNA, 25 bp, Homo sapien
gaagacatgaaagtctgccacagtg

SEQ ID NO: 3182634 - DNA, 25 bp, Homo sapien
caggaagcagtagtagaactggaag

SEQ ID NO: 3182635 - DNA, 25 bp, Homo sapien
tcaggaagcagtagtagaactggaa

SEQ ID NO: 3182636 - DNA, 25 bp, Homo sapien
cttttacagccaatgacaggcgcca

SEQ ID NO: 3182637 - DNA, 25 bp, Homo sapien
tcagcagtgtctgggtccgcaatgc

SEQ ID NO: 3182638 - DNA, 25 bp, Homo sapien
aatgccaagaaagcttatggcagta

SEQ ID NO: 3182639 - DNA, 25 bp, Homo sapien
tggcagtaaataagatggcagctgt

SEQ ID NO: 3182640 - DNA, 25 bp, Homo sapien
cttcaccagtgttaaccaagtcttt

SEQ ID NO: 3182641 - DNA, 25 bp, Homo sapien
tctctatttccttacagaatatcat

SEQ ID NO: 3182642 - DNA, 25 bp, Homo sapien
ttctctatttccttacagaatatca

SEQ ID NO: 3182643 - DNA, 25 bp, Homo sapien
caccagtgttaaccaagtctttatt

SEQ ID NO: 3182644 - DNA, 25 bp, Homo sapien
gtcagaagcagcatagcaccaggaa

SEQ ID NO: 3182645 - DNA, 25 bp, Homo sapien
ttcaaagggatcactgtgtcagaag

SEQ ID NO: 3182646 - DNA, 25 bp, Homo sapien
taagcgtactcctctccatacagtt

SEQ ID NO: 3182647 - DNA, 25 bp, Homo sapien
gtgtcagaagcagcatagcaccagg

SEQ ID NO: 3182648 - DNA, 25 bp, Homo sapien
tcagcactccttctcatgaaagaag

SEQ ID NO: 3182649 - DNA, 25 bp, Homo sapien
ttcctctctatgggtggtcaagaac

SEQ ID NO: 3182650 - DNA, 25 bp, Homo sapien
ctctctatgggtggtcaagaacacc

SEQ ID NO: 3182651 - DNA, 25 bp, Homo sapien
ttcagcactccttctcatgaaagaa

SEQ ID NO: 3182652 - DNA, 25 bp, Homo sapien
atagtaggggcaaagaatgaggtcc

SEQ ID NO: 3182653 - DNA, 25 bp, Homo sapien
cagagccctgatagtaggggcaaag

SEQ ID NO: 3182654 - DNA, 25 bp, Homo sapien
ccacagagccctgatagtaggggca

SEQ ID NO: 3182655 - DNA, 25 bp, Homo sapien
gccctgatagtaggggcaaagaatg

SEQ ID NO: 3182656 - DNA, 25 bp, Homo sapien
ttcctgaaatatcccctctgagttt

SEQ ID NO: 3182657 - DNA, 25 bp, Homo sapien
tccaaagactatctctcatattctc

SEQ ID NO: 3182658 - DNA, 25 bp, Homo sapien
tatcagtcaactgccaaatgccatg

SEQ ID NO: 3182659 - DNA, 25 bp, Homo sapien
catattctcataagtattatcagtc

SEQ ID NO: 3182660 - DNA, 25 bp, Homo sapien
ccaaaataccagttcctggatttat

SEQ ID NO: 3182661 - DNA, 25 bp, Homo sapien
caggagtacaatttcttgtcccaag

SEQ ID NO: 3182662 - DNA, 25 bp, Homo sapien
tacaatttcttgtcccaagcctgaa

SEQ ID NO: 3182663 - DNA, 25 bp, Homo sapien
gtcccaagcctgaaccatcgagcat

SEQ ID NO: 3182664 - DNA, 25 bp, Homo sapien
ttcttgtcccaagcctgaaccatcg

SEQ ID NO: 3182665 - DNA, 25 bp, Homo sapien
gaattgccctctggtaagtgtctga

SEQ ID NO: 3182666 - DNA, 25 bp, Homo sapien
tatcatcatacatccagaattgccc

SEQ ID NO: 3182667 - DNA, 25 bp, Homo sapien
tttgatggccttgactgaagcccac

SEQ ID NO: 3182668 - DNA, 25 bp, Homo sapien
cactccttttgcctaaatatgcagt

SEQ ID NO: 3182669 - DNA, 25 bp, Homo sapien
aaccccctgccgtcaagagtctgtg

SEQ ID NO: 3182670 - DNA, 25 bp, Homo sapien
tctacttgtaaagcacaaccccctg

SEQ ID NO: 3182671 - DNA, 25 bp, Homo sapien
tcatcaccagatctacttgtaaagc

SEQ ID NO: 3182672 - DNA, 25 bp, Homo sapien
ccttcatcaccagatctacttgtaa

SEQ ID NO: 3182673 - DNA, 25 bp, Homo sapien
ggattttaaggcttgcaaaaccaca

SEQ ID NO: 3182674 - DNA, 25 bp, Homo sapien
taaggcttgcaaaaccacatagcat

SEQ ID NO: 3182675 - DNA, 25 bp, Homo sapien
catctcctttacttcaccaagggat

SEQ ID NO: 3182676 - DNA, 25 bp, Homo sapien
ccacatagcatttgacaatacaaaa

SEQ ID NO: 3182677 - DNA, 25 bp, Homo sapien
tcatagatttgtggcagctgtttcc

SEQ ID NO: 3182678 - DNA, 25 bp, Homo sapien
aataacattggcgtattctctgtca

SEQ ID NO: 3182679 - DNA, 25 bp, Homo sapien
tattctctgtcatagatttgtggca

SEQ ID NO: 3182680 - DNA, 25 bp, Homo sapien
agctgtttccacacttgttactccc

SEQ ID NO: 3182681 - DNA, 25 bp, Homo sapien
tatattcatcttgtcccacaagagg

SEQ ID NO: 3182682 - DNA, 25 bp, Homo sapien
ttatattcatcttgtcccacaagag

SEQ ID NO: 3182683 - DNA, 25 bp, Homo sapien
atattcatcttgtcccacaagaggc

SEQ ID NO: 3182684 - DNA, 25 bp, Homo sapien
attatattcatcttgtcccacaaga

SEQ ID NO: 3182685 - DNA, 25 bp, Homo sapien
ctttccaagatcagctatggcttct

SEQ ID NO: 3182686 - DNA, 25 bp, Homo sapien
caagatcagctatggcttctcccat

SEQ ID NO: 3182687 - DNA, 25 bp, Homo sapien
ccaagatcagctatggcttctccca

SEQ ID NO: 3182688 - DNA, 25 bp, Homo sapien
ttccaagatcagctatggcttctcc

SEQ ID NO: 3182689 - DNA, 25 bp, Homo sapien
aatgaccagttggaccttatctctt

SEQ ID NO: 3182690 - DNA, 25 bp, Homo sapien
taatgaccagttggaccttatctct

SEQ ID NO: 3182691 - DNA, 25 bp, Homo sapien
caatagattttggatgccacgtggg

SEQ ID NO: 3182692 - DNA, 25 bp, Homo sapien
tccggttgcctcctactgctcacac

SEQ ID NO: 3182693 - DNA, 25 bp, Homo sapien
tgtttttggactccaatagattttg

SEQ ID NO: 3182694 - DNA, 25 bp, Homo sapien
tggggcctccggttgcctcctactg

SEQ ID NO: 3182695 - DNA, 25 bp, Homo sapien
catgacgctgataccttggaataat

SEQ ID NO: 3182696 - DNA, 25 bp, Homo sapien
ttatccagattctatgcctaaaact

SEQ ID NO: 3182697 - DNA, 25 bp, Homo sapien
tccgctaaagccatgacgctgatac

SEQ ID NO: 3182698 - DNA, 25 bp, Homo sapien
taaaacttcactctccgctaaagcc

SEQ ID NO: 3182699 - DNA, 25 bp, Homo sapien
aagaaattgttggaagaaatctgct

SEQ ID NO: 3182700 - DNA, 25 bp, Homo sapien
tataaacgtaagctgacagttctct

SEQ ID NO: 3182701 - DNA, 25 bp, Homo sapien
cagctgctcacaggaacataattgc

SEQ ID NO: 3182702 - DNA, 25 bp, Homo sapien
tgttgataatgtcctccatcagctg

SEQ ID NO: 3182703 - DNA, 25 bp, Homo sapien
aagtacttccatgttgataatgtcc

SEQ ID NO: 3182704 - DNA, 25 bp, Homo sapien
cagtttggaggctgtaataaccgac

SEQ ID NO: 3182705 - DNA, 25 bp, Homo sapien
ggtttctattacagcgggatcctgc

SEQ ID NO: 3182706 - DNA, 25 bp, Homo sapien
taggtggcctatcctgcaaagtagc

SEQ ID NO: 3182707 - DNA, 25 bp, Homo sapien
tgagtaactttagacctgttcccac

SEQ ID NO: 3182708 - DNA, 25 bp, Homo sapien
ttagtaagggctgtctatagctgct

SEQ ID NO: 3182709 - DNA, 25 bp, Homo sapien
gagatgataagcacccttcccacca

SEQ ID NO: 3182710 - DNA, 25 bp, Homo sapien
gaagacagtactgatgtcctccact

SEQ ID NO: 3182711 - DNA, 25 bp, Homo sapien
gaccttgatgccttccagggcaagc

SEQ ID NO: 3182712 - DNA, 25 bp, Homo sapien
tgatgccttccagggcaagcagatg

SEQ ID NO: 3182713 - DNA, 25 bp, Homo sapien
gcaatctatcaattttgtggatctt

SEQ ID NO: 3182714 - DNA, 25 bp, Homo sapien
gttctttgccactttctcttgtggg

SEQ ID NO: 3182715 - DNA, 25 bp, Homo sapien
tgtcaattttagttctttgccactt

SEQ ID NO: 3182716 - DNA, 25 bp, Homo sapien
gggtgtcaattttagttctttgcca

SEQ ID NO: 3182717 - DNA, 25 bp, Homo sapien
taagtagaaaagattgagacttgtg

SEQ ID NO: 3182718 - DNA, 25 bp, Homo sapien
gaaaagattgagacttgtggaggac

SEQ ID NO: 3182719 - DNA, 25 bp, Homo sapien
ttgagacttgtggaggacaaatgac

SEQ ID NO: 3182720 - DNA, 25 bp, Homo sapien
agacttgtggaggacaaatgacttg

SEQ ID NO: 3182721 - DNA, 25 bp, Homo sapien
tgttgaaatatgtctatatctgttg

SEQ ID NO: 3182722 - DNA, 25 bp, Homo sapien
ctgttgttgaaatatgtctatatct

SEQ ID NO: 3182723 - DNA, 25 bp, Homo sapien
tgttgttgaaatatgtctatatctg

SEQ ID NO: 3182724 - DNA, 25 bp, Homo sapien
gttgttgaaatatgtctatatctgt

SEQ ID NO: 3182725 - DNA, 25 bp, Homo sapien
cctttcaggatgagaggatgataga

SEQ ID NO: 3182726 - DNA, 25 bp, Homo sapien
taggccacattctcacgatcacatt

SEQ ID NO: 3182727 - DNA, 25 bp, Homo sapien
ttaactgtagtcaaggtgcctttca

SEQ ID NO: 3182728 - DNA, 25 bp, Homo sapien
gaggatgatagataggccacattct

SEQ ID NO: 3182729 - DNA, 25 bp, Homo sapien
atcttccagatcttcgctcttgaca

SEQ ID NO: 3182730 - DNA, 25 bp, Homo sapien
gctcttgacactctgtgatgtatac

SEQ ID NO: 3182731 - DNA, 25 bp, Homo sapien
ttcacagtacaaccaaaatcttcca

SEQ ID NO: 3182732 - DNA, 25 bp, Homo sapien
tattgggcaacatcactctcaaaaa

SEQ ID NO: 3182733 - DNA, 25 bp, Homo sapien
tatagaccaccacaagatcaagcct

SEQ ID NO: 3182734 - DNA, 25 bp, Homo sapien
tcccatggtactcctgacataggca

SEQ ID NO: 3182735 - DNA, 25 bp, Homo sapien
tacttttccacactgacactcttat

SEQ ID NO: 3182736 - DNA, 25 bp, Homo sapien
tcctgacataggcactttgtgctcc

SEQ ID NO: 3182737 - DNA, 25 bp, Homo sapien
actgtcaattaggtttcaatttgtg

SEQ ID NO: 3182738 - DNA, 25 bp, Homo sapien
actccaagagatactgtcaattagg

SEQ ID NO: 3182739 - DNA, 25 bp, Homo sapien
gactttactggaactccaagagata

SEQ ID NO: 3182740 - DNA, 25 bp, Homo sapien
ttgtgactttactggaactccaaga

SEQ ID NO: 3182741 - DNA, 25 bp, Homo sapien
tgaaaattgaggggatgatttttct

SEQ ID NO: 3182742 - DNA, 25 bp, Homo sapien
ctgacagcagtaagtttttttactc

SEQ ID NO: 3182743 - DNA, 25 bp, Homo sapien
tcctgacagcagtaagtttttttac

SEQ ID NO: 3182744 - DNA, 25 bp, Homo sapien
gacagcagtaagtttttttactctg

SEQ ID NO: 3182745 - DNA, 25 bp, Homo sapien
tataaggctgcagccattatactat

SEQ ID NO: 3182746 - DNA, 25 bp, Homo sapien
aataggagctatggtggcccagaga

SEQ ID NO: 3182747 - DNA, 25 bp, Homo sapien
cccagattgtgttctatgtttggag

SEQ ID NO: 3182748 - DNA, 25 bp, Homo sapien
attctgtctctcttgccacagtgat

SEQ ID NO: 3182749 - DNA, 25 bp, Homo sapien
ttgtcattctggcccaagaagacac

SEQ ID NO: 3182750 - DNA, 25 bp, Homo sapien
gccatgtgctttgaggctcctcaaa

SEQ ID NO: 3182751 - DNA, 25 bp, Homo sapien
ttttgtcattctggcccaagaagac

SEQ ID NO: 3182752 - DNA, 25 bp, Homo sapien
ccatgtgctttgaggctcctcaaat

SEQ ID NO: 3182753 - DNA, 25 bp, Homo sapien
gtttaaaaggaaccacatagagcat

SEQ ID NO: 3182754 - DNA, 25 bp, Homo sapien
agtttaaaaggaaccacatagagca

SEQ ID NO: 3182755 - DNA, 25 bp, Homo sapien
taatcagtttaaaaggaaccacata

SEQ ID NO: 3182756 - DNA, 25 bp, Homo sapien
tcagtttaaaaggaaccacatagag

SEQ ID NO: 3182757 - DNA, 25 bp, Homo sapien
gatgggggtaattacatttgcagta

SEQ ID NO: 3182758 - DNA, 25 bp, Homo sapien
tacagatgggggtaattacatttgc

SEQ ID NO: 3182759 - DNA, 25 bp, Homo sapien
gggggtaattacatttgcagtagtc

SEQ ID NO: 3182760 - DNA, 25 bp, Homo sapien
gaatacagatgggggtaattacatt

SEQ ID NO: 3182761 - DNA, 25 bp, Homo sapien
tatcactaagtgtttccaagcatgg

SEQ ID NO: 3182762 - DNA, 25 bp, Homo sapien
tcctgtatcactaagtgtttccaag

SEQ ID NO: 3182763 - DNA, 25 bp, Homo sapien
caagcatggtattcagttttaccct

SEQ ID NO: 3182764 - DNA, 25 bp, Homo sapien
aagtgtttccaagcatggtattcag

SEQ ID NO: 3182765 - DNA, 25 bp, Homo sapien
gctgcacagactattatatccctgt

SEQ ID NO: 3182766 - DNA, 25 bp, Homo sapien
gcacagactattatatccctgtcta

SEQ ID NO: 3182767 - DNA, 25 bp, Homo sapien
taggccatccttcataccatatttt

SEQ ID NO: 3182768 - DNA, 25 bp, Homo sapien
atgctgcacagactattatatccct

SEQ ID NO: 3182769 - DNA, 25 bp, Homo sapien
gtaaaggcacccggcggaccatcaa

SEQ ID NO: 3182770 - DNA, 25 bp, Homo sapien
gcaggtaaaggcacccggcggacca

SEQ ID NO: 3182771 - DNA, 25 bp, Homo sapien
gcacccggcggaccatcaatgcttt

SEQ ID NO: 3182772 - DNA, 25 bp, Homo sapien
aggcacccggcggaccatcaatgct

SEQ ID NO: 3182773 - DNA, 25 bp, Homo sapien
cttgagggggcttgctttcttttga

SEQ ID NO: 3182774 - DNA, 25 bp, Homo sapien
catgagctttcctatacatctccat

SEQ ID NO: 3182775 - DNA, 25 bp, Homo sapien
ctcctgagctcttgagggggcttgc

SEQ ID NO: 3182776 - DNA, 25 bp, Homo sapien
ggggcttgctttcttttgagctacc

SEQ ID NO: 3182777 - DNA, 25 bp, Homo sapien
tgtggatccctgagttgagtctgcg

SEQ ID NO: 3182778 - DNA, 25 bp, Homo sapien
catagtctgtggtccctgtggatcc

SEQ ID NO: 3182779 - DNA, 25 bp, Homo sapien
catggtagagccagaaagcaagcgg

SEQ ID NO: 3182780 - DNA, 25 bp, Homo sapien
gccaagccagaccatagagcaacta

SEQ ID NO: 3182781 - DNA, 25 bp, Homo sapien
tcatgcagtgaatattgggcagggc

SEQ ID NO: 3182782 - DNA, 25 bp, Homo sapien
gagtctggctcctcgctaattcaaa

SEQ ID NO: 3182783 - DNA, 25 bp, Homo sapien
tttcaggacccgaagaagtcatcag

SEQ ID NO: 3182784 - DNA, 25 bp, Homo sapien
ggttgttgcagtgatagcctcacag

SEQ ID NO: 3182785 - DNA, 25 bp, Homo sapien
catgggatctttctctaggcaagga

SEQ ID NO: 3182786 - DNA, 25 bp, Homo sapien
agagaaaatgcatgggaaaaatgtc

SEQ ID NO: 3182787 - DNA, 25 bp, Homo sapien
gatctttctctaggcaaggagagaa

SEQ ID NO: 3182788 - DNA, 25 bp, Homo sapien
gagaaaatgcatgggaaaaatgtct

SEQ ID NO: 3182789 - DNA, 25 bp, Homo sapien
ggcacttcagtctcttgccatatgg

SEQ ID NO: 3182790 - DNA, 25 bp, Homo sapien
gtctcttgccatatggtgctctctg

SEQ ID NO: 3182791 - DNA, 25 bp, Homo sapien
tatgctcccgaataagtctctttcc

SEQ ID NO: 3182792 - DNA, 25 bp, Homo sapien
tctttccattgagtacagctgctgt

SEQ ID NO: 3182793 - DNA, 25 bp, Homo sapien
agtttatttcagataatccaggacc

SEQ ID NO: 3182794 - DNA, 25 bp, Homo sapien
gtttatttcagataatccaggacca

SEQ ID NO: 3182795 - DNA, 25 bp, Homo sapien
gccatagtctacaaaaccgggagaa

SEQ ID NO: 3182796 - DNA, 25 bp, Homo sapien
aaggaggccatagtctacaaaaccg

SEQ ID NO: 3182797 - DNA, 25 bp, Homo sapien
ctacaggttaagatcagaggtgcct

SEQ ID NO: 3182798 - DNA, 25 bp, Homo sapien
actaggttctgttgagtcgggaagc

SEQ ID NO: 3182799 - DNA, 25 bp, Homo sapien
ttgcggaaccccaagctctctgctt

SEQ ID NO: 3182800 - DNA, 25 bp, Homo sapien
gtcgggaagcagatcaaggtcaagt

SEQ ID NO: 3182801 - DNA, 25 bp, Homo sapien
tctttaagagttcctctgtaggaat

SEQ ID NO: 3182802 - DNA, 25 bp, Homo sapien
gtattaccattgagaaaccatttac

SEQ ID NO: 3182803 - DNA, 25 bp, Homo sapien
gacacaaccttcaacagtctccggt

SEQ ID NO: 3182804 - DNA, 25 bp, Homo sapien
ttcctgtaagaaaccgctgcccact

SEQ ID NO: 3182805 - DNA, 25 bp, Homo sapien
taaggacaatcttatttacccaata

SEQ ID NO: 3182806 - DNA, 25 bp, Homo sapien
ggacaatcttatttacccaatattc

SEQ ID NO: 3182807 - DNA, 25 bp, Homo sapien
aggacaatcttatttacccaatatt

SEQ ID NO: 3182808 - DNA, 25 bp, Homo sapien
aaggacaatcttatttacccaatat

SEQ ID NO: 3182809 - DNA, 25 bp, Homo sapien
ttaaaatctccagcataattctcat

SEQ ID NO: 3182810 - DNA, 25 bp, Homo sapien
tggccaaatagcccatagtagcagc

SEQ ID NO: 3182811 - DNA, 25 bp, Homo sapien
ctttaaaatctccagcataattctc

SEQ ID NO: 3182812 - DNA, 25 bp, Homo sapien
tttaaaatctccagcataattctca

SEQ ID NO: 3182813 - DNA, 25 bp, Homo sapien
aatccagtccaatttagcaatgggg

SEQ ID NO: 3182814 - DNA, 25 bp, Homo sapien
atccagtccaatttagcaatggggg

SEQ ID NO: 3182815 - DNA, 25 bp, Homo sapien
caactttagtgacaacagtgttaat

SEQ ID NO: 3182816 - DNA, 25 bp, Homo sapien
gtgacaacagtgttaataaattctg

SEQ ID NO: 3182817 - DNA, 25 bp, Homo sapien
tccttcttggtgctagtggacaaca

SEQ ID NO: 3182818 - DNA, 25 bp, Homo sapien
cattcacgaatatttgtgtgtcctt

SEQ ID NO: 3182819 - DNA, 25 bp, Homo sapien
tggtgctagtggacaacatgcctgt

SEQ ID NO: 3182820 - DNA, 25 bp, Homo sapien
tagtggacaacatgcctgttctttc

SEQ ID NO: 3182821 - DNA, 25 bp, Homo sapien
cattgggacacttaaggctgctcta

SEQ ID NO: 3182822 - DNA, 25 bp, Homo sapien
tattgagcccgatctgctagcagag

SEQ ID NO: 3182823 - DNA, 25 bp, Homo sapien
ttagaaacaaaggtcccggcagcga

SEQ ID NO: 3182824 - DNA, 25 bp, Homo sapien
cgatagcaggcgtgtcattgggaca

SEQ ID NO: 3182825 - DNA, 25 bp, Homo sapien
cgccccgccctccccaccgagcatg

SEQ ID NO: 3182826 - DNA, 25 bp, Homo sapien
agcgccccgccctccccaccgagca

SEQ ID NO: 3182827 - DNA, 25 bp, Homo sapien
cgagcgccccgccctccccaccgag

SEQ ID NO: 3182828 - DNA, 25 bp, Homo sapien
tcgcagcccacgagcgccccgccct

SEQ ID NO: 3182829 - DNA, 25 bp, Homo sapien
ccgtctctcccgcagccagggaggg

SEQ ID NO: 3182830 - DNA, 25 bp, Homo sapien
ctccgtctctcccgcagccagggag

SEQ ID NO: 3182831 - DNA, 25 bp, Homo sapien
cgcagccagggagggacccgcgggg

SEQ ID NO: 3182832 - DNA, 25 bp, Homo sapien
gtctctcccgcagccagggagggac

SEQ ID NO: 3182833 - DNA, 25 bp, Homo sapien
gaggcgaaggtctgtggtgcgggcg

SEQ ID NO: 3182834 - DNA, 25 bp, Homo sapien
gcgaggcgaaggtctgtggtgcggg

SEQ ID NO: 3182835 - DNA, 25 bp, Homo sapien
gggcgaggcgaaggtctgtggtgcg

SEQ ID NO: 3182836 - DNA, 25 bp, Homo sapien
aggcgaaggtctgtggtgcgggcgg

SEQ ID NO: 3182837 - DNA, 25 bp, Homo sapien
catgacttgaagcatgtagtgtgat

SEQ ID NO: 3182838 - DNA, 25 bp, Homo sapien
cactacagctttgtaacatgacttg

SEQ ID NO: 3182839 - DNA, 25 bp, Homo sapien
tcactttcagtactatgaacattgt

SEQ ID NO: 3182840 - DNA, 25 bp, Homo sapien
ctgtagatcactttcagtactatga

SEQ ID NO: 3182841 - DNA, 25 bp, Homo sapien
taatcagttacatttgagtttggga

SEQ ID NO: 3182842 - DNA, 25 bp, Homo sapien
tatgtctaaggagtaaaacaatcag

SEQ ID NO: 3182843 - DNA, 25 bp, Homo sapien
gaaccctgctctaggtaatggaaaa

SEQ ID NO: 3182844 - DNA, 25 bp, Homo sapien
tgtctttgttatagcagagaaatgt

SEQ ID NO: 3182845 - DNA, 25 bp, Homo sapien
ttggatgaatccttagtattagctt

SEQ ID NO: 3182846 - DNA, 25 bp, Homo sapien
gaatccttagtattagcttcttcat

SEQ ID NO: 3182847 - DNA, 25 bp, Homo sapien
tggatgaatccttagtattagcttc

SEQ ID NO: 3182848 - DNA, 25 bp, Homo sapien
gatgaatccttagtattagcttctt

SEQ ID NO: 3182849 - DNA, 25 bp, Homo sapien
tattttgagccagggcttgaagcag

SEQ ID NO: 3182850 - DNA, 25 bp, Homo sapien
tgaagcagacaatccaagcatcctt

SEQ ID NO: 3182851 - DNA, 25 bp, Homo sapien
tgagccagggcttgaagcagacaat

SEQ ID NO: 3182852 - DNA, 25 bp, Homo sapien
cagggcttgaagcagacaatccaag

SEQ ID NO: 3182853 - DNA, 25 bp, Homo sapien
aatgactactgatttgattttcttc

SEQ ID NO: 3182854 - DNA, 25 bp, Homo sapien
ttctttggaatttgagtaaacataa

SEQ ID NO: 3182855 - DNA, 25 bp, Homo sapien
tttctgaatgactactgatttgatt

SEQ ID NO: 3182856 - DNA, 25 bp, Homo sapien
tggaatttgagtaaacataatgaaa

SEQ ID NO: 3182857 - DNA, 25 bp, Homo sapien
gggcaacctctacagatgaccaaga

SEQ ID NO: 3182858 - DNA, 25 bp, Homo sapien
ctaggagacaaatgggcaacctcta

SEQ ID NO: 3182859 - DNA, 25 bp, Homo sapien
ttcatgtccttcagtatctaaagca

SEQ ID NO: 3182860 - DNA, 25 bp, Homo sapien
gatgaccaagaatatgacccttcat

SEQ ID NO: 3182861 - DNA, 25 bp, Homo sapien
caacttcatctctttgtcttccagt

SEQ ID NO: 3182862 - DNA, 25 bp, Homo sapien
ttcatctctttgtcttccagtcttc

SEQ ID NO: 3182863 - DNA, 25 bp, Homo sapien
tcatttcccttcaacttcatctctt

SEQ ID NO: 3182864 - DNA, 25 bp, Homo sapien
acttcatctctttgtcttccagtct

SEQ ID NO: 3182865 - DNA, 25 bp, Homo sapien
tgactaaccaccacctaatcagggt

SEQ ID NO: 3182866 - DNA, 25 bp, Homo sapien
tgtagtctactgagtgtgcaagagc

SEQ ID NO: 3182867 - DNA, 25 bp, Homo sapien
aaaagatacccgtagcatgcaatgc

SEQ ID NO: 3182868 - DNA, 25 bp, Homo sapien
gatgatctttcctcaatgctgaatg

SEQ ID NO: 3182869 - DNA, 25 bp, Homo sapien
agaatgatcaataaatactaaaaaa

SEQ ID NO: 3182870 - DNA, 25 bp, Homo sapien
ccaagaatgatcaataaatactaaa

SEQ ID NO: 3182871 - DNA, 25 bp, Homo sapien
ccctctccgagaaacacccaagaat

SEQ ID NO: 3182872 - DNA, 25 bp, Homo sapien
cctctccgagaaacacccaagaatg

SEQ ID NO: 3182873 - DNA, 25 bp, Homo sapien
catctgctggtactgggatgacagc

SEQ ID NO: 3182874 - DNA, 25 bp, Homo sapien
ggatgacagcaagagtctggcataa

SEQ ID NO: 3182875 - DNA, 25 bp, Homo sapien
gagtctggcataaggcatgaatcat

SEQ ID NO: 3182876 - DNA, 25 bp, Homo sapien
gcaagagtctggcataaggcatgaa

SEQ ID NO: 3182877 - DNA, 25 bp, Homo sapien
tgtggagtcaacagacttgcaaaca

SEQ ID NO: 3182878 - DNA, 25 bp, Homo sapien
gaagtattccacttgcttggatttt

SEQ ID NO: 3182879 - DNA, 25 bp, Homo sapien
ctgtggagtcaacagacttgcaaac

SEQ ID NO: 3182880 - DNA, 25 bp, Homo sapien
aaacagctgaagtattccacttgct

SEQ ID NO: 3182881 - DNA, 25 bp, Homo sapien
gtaagatgtaaaactgaagacgttc

SEQ ID NO: 3182882 - DNA, 25 bp, Homo sapien
agtaagatgtaaaactgaagacgtt

SEQ ID NO: 3182883 - DNA, 25 bp, Homo sapien
aagtaagatgtaaaactgaagacgt

SEQ ID NO: 3182884 - DNA, 25 bp, Homo sapien
tcatattctctggttcatacaatct

SEQ ID NO: 3182885 - DNA, 25 bp, Homo sapien
catattctctggttcatacaatctt

SEQ ID NO: 3182886 - DNA, 25 bp, Homo sapien
attctctggttcatacaatcttttt

SEQ ID NO: 3182887 - DNA, 25 bp, Homo sapien
atattctctggttcatacaatcttt

SEQ ID NO: 3182888 - DNA, 25 bp, Homo sapien
cgttatcaaactcagtagtactaag

SEQ ID NO: 3182889 - DNA, 25 bp, Homo sapien
tcattgacgttatcaaactcagtag

SEQ ID NO: 3182890 - DNA, 25 bp, Homo sapien
tagtactaagtatcctactactcat

SEQ ID NO: 3182891 - DNA, 25 bp, Homo sapien
gagcttatcattgacgttatcaaac

SEQ ID NO: 3182892 - DNA, 25 bp, Homo sapien
tccacacatggaattcgcataaact

SEQ ID NO: 3182893 - DNA, 25 bp, Homo sapien
gaaatcaatccagcatccacacatg

SEQ ID NO: 3182894 - DNA, 25 bp, Homo sapien
gcccgtttgaagcagcacttcctgg

SEQ ID NO: 3182895 - DNA, 25 bp, Homo sapien
cctggtctttgctatttagcagctg

SEQ ID NO: 3182896 - DNA, 25 bp, Homo sapien
catttagctatgacttccattgaac

SEQ ID NO: 3182897 - DNA, 25 bp, Homo sapien
caggtaatattctctatgttcaaac

SEQ ID NO: 3182898 - DNA, 25 bp, Homo sapien
agacatttattaccctaacttcaag

SEQ ID NO: 3182899 - DNA, 25 bp, Homo sapien
ttcataacttaaaggatatccatag

SEQ ID NO: 3182900 - DNA, 25 bp, Homo sapien
aatgaggaatgccacaaagacagct

SEQ ID NO: 3182901 - DNA, 25 bp, Homo sapien
tctgacctcaggcagtaatatccac

SEQ ID NO: 3182902 - DNA, 25 bp, Homo sapien
cttcctcggtgtataaaaaggcaca

SEQ ID NO: 3182903 - DNA, 25 bp, Homo sapien
gaagtgtaaataggccaaaggcatg

SEQ ID NO: 3182904 - DNA, 25 bp, Homo sapien
gaaaatgcaccctacttgtagcaag

SEQ ID NO: 3182905 - DNA, 25 bp, Homo sapien
ttttcatatttcctcaccgccaagg

SEQ ID NO: 3182906 - DNA, 25 bp, Homo sapien
gaattattcacttttacgtagcatt

SEQ ID NO: 3182907 - DNA, 25 bp, Homo sapien
ttcctcaccgccaaggaaaatgcac

SEQ ID NO: 3182908 - DNA, 25 bp, Homo sapien
gctcaattactctacttctataagg

SEQ ID NO: 3182909 - DNA, 25 bp, Homo sapien
cagcttaaataacatccacagagag

SEQ ID NO: 3182910 - DNA, 25 bp, Homo sapien
ccttgatgtcagtcatcacaatcta

SEQ ID NO: 3182911 - DNA, 25 bp, Homo sapien
tcaagcagcccttgagccttgccat

SEQ ID NO: 3182912 - DNA, 25 bp, Homo sapien
gagtcagaaagagattcatagccat

SEQ ID NO: 3182913 - DNA, 25 bp, Homo sapien
ggagtcagaaagagattcatagcca

SEQ ID NO: 3182914 - DNA, 25 bp, Homo sapien
cccatggtcaatggtagcatgaaaa

SEQ ID NO: 3182915 - DNA, 25 bp, Homo sapien
caaactaaacaagtgggagtgggat

SEQ ID NO: 3182916 - DNA, 25 bp, Homo sapien
gcaaatggtctaacctaagtgtaca

SEQ ID NO: 3182917 - DNA, 25 bp, Homo sapien
aagtgtacagtagtcagtagtcccc

SEQ ID NO: 3182918 - DNA, 25 bp, Homo sapien
caagagcttctcattggcgggatct

SEQ ID NO: 3182919 - DNA, 25 bp, Homo sapien
aatctgtgcaccacctgcttggtca

SEQ ID NO: 3182920 - DNA, 25 bp, Homo sapien
ctgcacagtgaccttaaatggtcaa

SEQ ID NO: 3182921 - DNA, 25 bp, Homo sapien
tagttcatcagcatgccacaaaaga

SEQ ID NO: 3182922 - DNA, 25 bp, Homo sapien
gatctctacagttgctctgaacttg

SEQ ID NO: 3182923 - DNA, 25 bp, Homo sapien
tatatgccacttacgaattctttgt

SEQ ID NO: 3182924 - DNA, 25 bp, Homo sapien
tattcgaagtaaacctagcatctag

SEQ ID NO: 3182925 - DNA, 25 bp, Homo sapien
taaatcatactatagggctgtggag

SEQ ID NO: 3182926 - DNA, 25 bp, Homo sapien
aatgtccaagcccaaatgcagttaa

SEQ ID NO: 3182927 - DNA, 25 bp, Homo sapien
caacaagggccaaatatcagtagcc

SEQ ID NO: 3182928 - DNA, 25 bp, Homo sapien
gcttaaaactggtagcccttggaca

SEQ ID NO: 3182929 - DNA, 25 bp, Homo sapien
tatttggccaaaccgtcatacagaa

SEQ ID NO: 3182930 - DNA, 25 bp, Homo sapien
gaacacttctctacacactgggata

SEQ ID NO: 3182931 - DNA, 25 bp, Homo sapien
gatgatgatagttacaagtttcgca

SEQ ID NO: 3182932 - DNA, 25 bp, Homo sapien
ctgggataccctataatattatggg

SEQ ID NO: 3182933 - DNA, 25 bp, Homo sapien
gacactcgtgacagacaaaatgtaa

SEQ ID NO: 3182934 - DNA, 25 bp, Homo sapien
gtgtcaacaagcttttctacagcca

SEQ ID NO: 3182935 - DNA, 25 bp, Homo sapien
gcaatgttttggcattgggtaacca

SEQ ID NO: 3182936 - DNA, 25 bp, Homo sapien
cacttacctgagtattaactgcttc

SEQ ID NO: 3182937 - DNA, 25 bp, Homo sapien
caaactgaatgtcaaagtgtcaaca

SEQ ID NO: 3182938 - DNA, 25 bp, Homo sapien
cagctcaatgcttacttcaacatca

SEQ ID NO: 3182939 - DNA, 25 bp, Homo sapien
ttttgaaaggccaaacagctcaatg

SEQ ID NO: 3182940 - DNA, 25 bp, Homo sapien
tgaaaggccaaacagctcaatgctt

SEQ ID NO: 3182941 - DNA, 25 bp, Homo sapien
gccaaacagctcaatgcttacttca

SEQ ID NO: 3182942 - DNA, 25 bp, Homo sapien
ggactactgccagctgttgcttaag

SEQ ID NO: 3182943 - DNA, 25 bp, Homo sapien
cagcactgctgagataaagaccaca

SEQ ID NO: 3182944 - DNA, 25 bp, Homo sapien
ctctgaatggactttgtaaatggcc

SEQ ID NO: 3182945 - DNA, 25 bp, Homo sapien
tgtacagcaagttaagctaatgcca

SEQ ID NO: 3182946 - DNA, 25 bp, Homo sapien
ggtcacactcatggaaactccaaag

SEQ ID NO: 3182947 - DNA, 25 bp, Homo sapien
gaagatctcaagttgaggaaccttt

SEQ ID NO: 3182948 - DNA, 25 bp, Homo sapien
ctggagagaagatctcaagttgagg

SEQ ID NO: 3182949 - DNA, 25 bp, Homo sapien
gtcacactcatggaaactccaaaga

SEQ ID NO: 3182950 - DNA, 25 bp, Homo sapien
tatgtaagcgtgagcactagcgcat

SEQ ID NO: 3182951 - DNA, 25 bp, Homo sapien
tatagcgcttaatacaatctttggc

SEQ ID NO: 3182952 - DNA, 25 bp, Homo sapien
tacttaccagtagatagggctcttt

SEQ ID NO: 3182953 - DNA, 25 bp, Homo sapien
gaaaaagttagcatagccaaatggc

SEQ ID NO: 3182954 - DNA, 25 bp, Homo sapien
aattaccaaatgcaacaagacacat

SEQ ID NO: 3182955 - DNA, 25 bp, Homo sapien
ttggcagtggatgcccagtaatttc

SEQ ID NO: 3182956 - DNA, 25 bp, Homo sapien
cacccatattgataagctgagcttg

SEQ ID NO: 3182957 - DNA, 25 bp, Homo sapien
ttcactaaggtaggaataacaccca

SEQ ID NO: 3182958 - DNA, 25 bp, Homo sapien
aattgccatccctcatgtaaaaaga

SEQ ID NO: 3182959 - DNA, 25 bp, Homo sapien
ttttacccgtggacatacaattgcc

SEQ ID NO: 3182960 - DNA, 25 bp, Homo sapien
taggatgtgtttccagcattggtct

SEQ ID NO: 3182961 - DNA, 25 bp, Homo sapien
tgaagaaccttagtctaacgttaga

SEQ ID NO: 3182962 - DNA, 25 bp, Homo sapien
tgtaactacggtatttagctatgac

SEQ ID NO: 3182963 - DNA, 25 bp, Homo sapien
actacggtatttagctatgacaaaa

SEQ ID NO: 3182964 - DNA, 25 bp, Homo sapien
taactacggtatttagctatgacaa

SEQ ID NO: 3182965 - DNA, 25 bp, Homo sapien
ttgttgtaactacggtatttagcta

SEQ ID NO: 3182966 - DNA, 25 bp, Homo sapien
tgaatagaggtggtctacgcagcct

SEQ ID NO: 3182967 - DNA, 25 bp, Homo sapien
tacaacctagctattacatgggcat

SEQ ID NO: 3182968 - DNA, 25 bp, Homo sapien
tgaacctgggctgaactaaattagc

SEQ ID NO: 3182969 - DNA, 25 bp, Homo sapien
tgtccaatgaaaactccctgatgtg

SEQ ID NO: 3182970 - DNA, 25 bp, Homo sapien
tctctcttatcatgttctatttgtt

SEQ ID NO: 3182971 - DNA, 25 bp, Homo sapien
tcagcaatgtttgtactggcaaact

SEQ ID NO: 3182972 - DNA, 25 bp, Homo sapien
gaagagttttactagctcttcagca

SEQ ID NO: 3182973 - DNA, 25 bp, Homo sapien
cattttctgccaatggagcaagaac

SEQ ID NO: 3182974 - DNA, 25 bp, Homo sapien
tgcactggatacttcttacaataca

SEQ ID NO: 3182975 - DNA, 25 bp, Homo sapien
atacaatgttaaatggaagcgggga

SEQ ID NO: 3182976 - DNA, 25 bp, Homo sapien
caatgttaaatggaagcggggatga

SEQ ID NO: 3182977 - DNA, 25 bp, Homo sapien
tgttaaatggaagcggggatgatcc

SEQ ID NO: 3182978 - DNA, 25 bp, Homo sapien
caagccctctgtcagttatatgtta

SEQ ID NO: 3182979 - DNA, 25 bp, Homo sapien
tatacactgtatacacaagccctct

SEQ ID NO: 3182980 - DNA, 25 bp, Homo sapien
ttgccaacaactcaggaagcctatc

SEQ ID NO: 3182981 - DNA, 25 bp, Homo sapien
cagtaatggttacagctgtcttcat

SEQ ID NO: 3182982 - DNA, 25 bp, Homo sapien
caaggacaagtatctttatcaccac

SEQ ID NO: 3182983 - DNA, 25 bp, Homo sapien
ttagcaagacattctgccaaagcag

SEQ ID NO: 3182984 - DNA, 25 bp, Homo sapien
ctaccttaattaggattagcaagac

SEQ ID NO: 3182985 - DNA, 25 bp, Homo sapien
tatataggaggcttaaactacctta

SEQ ID NO: 3182986 - DNA, 25 bp, Homo sapien
tctactaggcctgcttcaaccagct

SEQ ID NO: 3182987 - DNA, 25 bp, Homo sapien
cactatccactttttgctgaacaat

SEQ ID NO: 3182988 - DNA, 25 bp, Homo sapien
gagatctgaaccagttttgagctca

SEQ ID NO: 3182989 - DNA, 25 bp, Homo sapien
gctgaacaatctctagtagacactc

SEQ ID NO: 3182990 - DNA, 25 bp, Homo sapien
gccaatgctccagcaagctgtagct

SEQ ID NO: 3182991 - DNA, 25 bp, Homo sapien
atccataagtttttctacaatccca

SEQ ID NO: 3182992 - DNA, 25 bp, Homo sapien
tcccattgtctaccatatgaataca

SEQ ID NO: 3182993 - DNA, 25 bp, Homo sapien
ccaggtttctgagggcacttagtgc

SEQ ID NO: 3182994 - DNA, 25 bp, Homo sapien
tgcatgctgtactgttacatttcca

SEQ ID NO: 3182995 - DNA, 25 bp, Homo sapien
gaccccagctgataacatctttgct

SEQ ID NO: 3182996 - DNA, 25 bp, Homo sapien
tgtgaccccagctgataacatcttt

SEQ ID NO: 3182997 - DNA, 25 bp, Homo sapien
tttgaactgaacaggaggcatttca

SEQ ID NO: 3182998 - DNA, 25 bp, Homo sapien
cagaagtttgaactgaacaggaggc

SEQ ID NO: 3182999 - DNA, 25 bp, Homo sapien
accaaacgctccactaacttaacat

SEQ ID NO: 3183000 - DNA, 25 bp, Homo sapien
actgtgtcgtataagggcagacagc

SEQ ID NO: 3183001 - DNA, 25 bp, Homo sapien
tccactaacttaacattctttccca

SEQ ID NO: 3183002 - DNA, 25 bp, Homo sapien
cagcatgatctttggcttcacacca

SEQ ID NO: 3183003 - DNA, 25 bp, Homo sapien
acaattcgttttccaatatggccca

SEQ ID NO: 3183004 - DNA, 25 bp, Homo sapien
cttcaaatgccacaggtgtttgagt

SEQ ID NO: 3183005 - DNA, 25 bp, Homo sapien
tccaaatgattgtatacccctgcaa

SEQ ID NO: 3183006 - DNA, 25 bp, Homo sapien
caaaccaatggtggagattctcttg

SEQ ID NO: 3183007 - DNA, 25 bp, Homo sapien
cagatgccaggatcatgtctgtaaa

SEQ ID NO: 3183008 - DNA, 25 bp, Homo sapien
tgccaaaactctaaaccaagcgtgt

SEQ ID NO: 3183009 - DNA, 25 bp, Homo sapien
taagaagctgggatgtatcttcctg

SEQ ID NO: 3183010 - DNA, 25 bp, Homo sapien
tagattaatcaaggtttccacgagc

SEQ ID NO: 3183011 - DNA, 25 bp, Homo sapien
gcaacaagagcttcattctgcatta

SEQ ID NO: 3183012 - DNA, 25 bp, Homo sapien
tctaaagctgctattaatgccaaag

SEQ ID NO: 3183013 - DNA, 25 bp, Homo sapien
tggtaactagatgcttgatgccacc

SEQ ID NO: 3183014 - DNA, 25 bp, Homo sapien
tgcattattacatgttcactagttg

SEQ ID NO: 3183015 - DNA, 25 bp, Homo sapien
gctagcagtctatgtaaaatctgta

SEQ ID NO: 3183016 - DNA, 25 bp, Homo sapien
tctctcatctgctagcagtctatgt

SEQ ID NO: 3183017 - DNA, 25 bp, Homo sapien
tatcaggaccatggaattatatttg

SEQ ID NO: 3183018 - DNA, 25 bp, Homo sapien
cagatcccataagagcacatatcag

SEQ ID NO: 3183019 - DNA, 25 bp, Homo sapien
tttaatatttaatgtgaaccatatg

SEQ ID NO: 3183020 - DNA, 25 bp, Homo sapien
gaaccatatgtttatggacatcaaa

SEQ ID NO: 3183021 - DNA, 25 bp, Homo sapien
ttaatatttaatgtgaaccatatgt

SEQ ID NO: 3183022 - DNA, 25 bp, Homo sapien
tgtgaaccatatgtttatggacatc

SEQ ID NO: 3183023 - DNA, 25 bp, Homo sapien
acattttagggttcatgagacttac

SEQ ID NO: 3183024 - DNA, 25 bp, Homo sapien
tggcatacaaaatcagaacctgtgc

SEQ ID NO: 3183025 - DNA, 25 bp, Homo sapien
tccttagttaatattatggcataca

SEQ ID NO: 3183026 - DNA, 25 bp, Homo sapien
gagacttactgattttgcaatactg

SEQ ID NO: 3183027 - DNA, 25 bp, Homo sapien
taggtaaatctacagtgggagactt

SEQ ID NO: 3183028 - DNA, 25 bp, Homo sapien
taaaggaaacttgacactagtacca

SEQ ID NO: 3183029 - DNA, 25 bp, Homo sapien
gaaagcacagcaatcctaaaggtgt

SEQ ID NO: 3183030 - DNA, 25 bp, Homo sapien
tcagataaagttgacgagagcaaag

SEQ ID NO: 3183031 - DNA, 25 bp, Homo sapien
gctgtatacaggaaactcacttcaa

SEQ ID NO: 3183032 - DNA, 25 bp, Homo sapien
gagaaaagatcatgtgaatgttatt

SEQ ID NO: 3183033 - DNA, 25 bp, Homo sapien
tggtctaaatacacaaaagggactg

SEQ ID NO: 3183034 - DNA, 25 bp, Homo sapien
tacagcagattgaaactaaaagagt

SEQ ID NO: 3183035 - DNA, 25 bp, Homo sapien
aacagaaaacaaaaataagattgca

SEQ ID NO: 3183036 - DNA, 25 bp, Homo sapien
atgtgacaaacagaaaacaaaaata

SEQ ID NO: 3183037 - DNA, 25 bp, Homo sapien
gaaatgtgacaaacagaaaacaaaa

SEQ ID NO: 3183038 - DNA, 25 bp, Homo sapien
tgacaaacagaaaacaaaaataaga

SEQ ID NO: 3183039 - DNA, 25 bp, Homo sapien
gtttggatacgacatctagaaaagc

SEQ ID NO: 3183040 - DNA, 25 bp, Homo sapien
ttgttctcatgactgcgaagtttgg

SEQ ID NO: 3183041 - DNA, 25 bp, Homo sapien
gactgcgaagtttggatacgacatc

SEQ ID NO: 3183042 - DNA, 25 bp, Homo sapien
tctcatgactgcgaagtttggatac

SEQ ID NO: 3183043 - DNA, 25 bp, Homo sapien
gaagaagccgctggatggaggacag

SEQ ID NO: 3183044 - DNA, 25 bp, Homo sapien
tcttcaattggtattagaacatcac

SEQ ID NO: 3183045 - DNA, 25 bp, Homo sapien
gaacatcacatgcatgcacaagtgg

SEQ ID NO: 3183046 - DNA, 25 bp, Homo sapien
gaaattagagatgggatgatgccgt

SEQ ID NO: 3183047 - DNA, 25 bp, Homo sapien
aacggttatgggtggagacttgcct

SEQ ID NO: 3183048 - DNA, 25 bp, Homo sapien
tcttattagggaggtacctacagcg

SEQ ID NO: 3183049 - DNA, 25 bp, Homo sapien
tctaggtaccatggatttgacatca

SEQ ID NO: 3183050 - DNA, 25 bp, Homo sapien
ctttaataagctagacagatcctgc

SEQ ID NO: 3183051 - DNA, 25 bp, Homo sapien
gccttttaggccagtagtggtcaaa

SEQ ID NO: 3183052 - DNA, 25 bp, Homo sapien
aatgaactggactggctactatggc

SEQ ID NO: 3183053 - DNA, 25 bp, Homo sapien
ggtggcaaactctaacagcgattgg

SEQ ID NO: 3183054 - DNA, 25 bp, Homo sapien
agagtacactatatttcgccaaggg

SEQ ID NO: 3183055 - DNA, 25 bp, Homo sapien
gcagtccttctatatcgaagcccat

SEQ ID NO: 3183056 - DNA, 25 bp, Homo sapien
tagattatccacagagatgtgtagc

SEQ ID NO: 3183057 - DNA, 25 bp, Homo sapien
tagtaagtgtagcatacgtactcac

SEQ ID NO: 3183058 - DNA, 25 bp, Homo sapien
gaacagatatgcaacattacagatg

SEQ ID NO: 3183059 - DNA, 25 bp, Homo sapien
ccttatttggacatcaaagggaaca

SEQ ID NO: 3183060 - DNA, 25 bp, Homo sapien
gcagaatatgattcattaacacctc

SEQ ID NO: 3183061 - DNA, 25 bp, Homo sapien
cctctaacttctgctgggtactagg

SEQ ID NO: 3183062 - DNA, 25 bp, Homo sapien
catggacactctgctgtgttacttc

SEQ ID NO: 3183063 - DNA, 25 bp, Homo sapien
tgggatatgatgaatctacatggac

SEQ ID NO: 3183064 - DNA, 25 bp, Homo sapien
tttggcctgaggagaagggctatat

SEQ ID NO: 3183065 - DNA, 25 bp, Homo sapien
ttatataagatcccctgactcatgg

SEQ ID NO: 3183066 - DNA, 25 bp, Homo sapien
taaatccctgcagtcccacaagctg

SEQ ID NO: 3183067 - DNA, 25 bp, Homo sapien
tcctgatccagctaagggactttct

SEQ ID NO: 3183068 - DNA, 25 bp, Homo sapien
gaggttgtggcatgtcctcccagtc

SEQ ID NO: 3183069 - DNA, 25 bp, Homo sapien
tgcatgacctgtgaatctgaatcca

SEQ ID NO: 3183070 - DNA, 25 bp, Homo sapien
gagaccagctgtaccatccaaatgc

SEQ ID NO: 3183071 - DNA, 25 bp, Homo sapien
tatttggtcagcacttatttcctag

SEQ ID NO: 3183072 - DNA, 25 bp, Homo sapien
tgtatttcatgtgcaccgagcaagg

SEQ ID NO: 3183073 - DNA, 25 bp, Homo sapien
catcttccgtaattggagggctggg

SEQ ID NO: 3183074 - DNA, 25 bp, Homo sapien
cgagcacacttggtctatcctggaa

SEQ ID NO: 3183075 - DNA, 25 bp, Homo sapien
cagcaagtcacttgggcgagcacac

SEQ ID NO: 3183076 - DNA, 25 bp, Homo sapien
acttggacagcggtgtctgtggcat

SEQ ID NO: 3183077 - DNA, 25 bp, Homo sapien
ggatagttgtctgcctgtgatgaag

SEQ ID NO: 3183078 - DNA, 25 bp, Homo sapien
gtggcattcatgtatatggcaggac

SEQ ID NO: 3183079 - DNA, 25 bp, Homo sapien
ctgaaaagtcgggtaggctgagctt

SEQ ID NO: 3183080 - DNA, 25 bp, Homo sapien
attaagcggaagtctccccttggct

SEQ ID NO: 3183081 - DNA, 25 bp, Homo sapien
ctacattaagcggaagtctcccctt

SEQ ID NO: 3183082 - DNA, 25 bp, Homo sapien
tacattaagcggaagtctccccttg

SEQ ID NO: 3183083 - DNA, 25 bp, Homo sapien
cattaagcggaagtctccccttggc

SEQ ID NO: 3183084 - DNA, 25 bp, Homo sapien
gctgtttcctttgcacccctcccca

SEQ ID NO: 3183085 - DNA, 25 bp, Homo sapien
tagacaaatactgccagatctacag

SEQ ID NO: 3183086 - DNA, 25 bp, Homo sapien
acataagactgggacatcttcgaag

SEQ ID NO: 3183087 - DNA, 25 bp, Homo sapien
cagtacttggcaccctagacaaata

SEQ ID NO: 3183088 - DNA, 25 bp, Homo sapien
aatcaggaactctagggaaacctga

SEQ ID NO: 3183089 - DNA, 25 bp, Homo sapien
gggtcctggtcatactcatctgttg

SEQ ID NO: 3183090 - DNA, 25 bp, Homo sapien
tcctgtagcctgattgggtcctggt

SEQ ID NO: 3183091 - DNA, 25 bp, Homo sapien
ctcatctgttgccactatttcatca

SEQ ID NO: 3183092 - DNA, 25 bp, Homo sapien
ctatttcatcagtttcggcctccat

SEQ ID NO: 3183093 - DNA, 25 bp, Homo sapien
ttgaggcatctcagtgctccagtgc

SEQ ID NO: 3183094 - DNA, 25 bp, Homo sapien
tgaggcatctcagtgctccagtgct

SEQ ID NO: 3183095 - DNA, 25 bp, Homo sapien
gttattcccaacttttgttgacaca

SEQ ID NO: 3183096 - DNA, 25 bp, Homo sapien
cctgttaccacagttattcccaact

SEQ ID NO: 3183097 - DNA, 25 bp, Homo sapien
cagttattcccaacttttgttgaca

SEQ ID NO: 3183098 - DNA, 25 bp, Homo sapien
gtaatatttcctgttaccacagtta

SEQ ID NO: 3183099 - DNA, 25 bp, Homo sapien
cttcatttgctgaggaaggatgggg

SEQ ID NO: 3183100 - DNA, 25 bp, Homo sapien
ttcatttgctgaggaaggatgggga

SEQ ID NO: 3183101 - DNA, 25 bp, Homo sapien
ggaaggatggggatggtggagattt

SEQ ID NO: 3183102 - DNA, 25 bp, Homo sapien
ctgaggaaggatggggatggtggag

SEQ ID NO: 3183103 - DNA, 25 bp, Homo sapien
gaaagcctttgcgttggagactcgt

SEQ ID NO: 3183104 - DNA, 25 bp, Homo sapien
ccaaatgtgcctgtcagcatggagc

SEQ ID NO: 3183105 - DNA, 25 bp, Homo sapien
tatatagggttgttgaatgtagcca

SEQ ID NO: 3183106 - DNA, 25 bp, Homo sapien
cttggcactctgatgggcgtctgaa

SEQ ID NO: 3183107 - DNA, 25 bp, Homo sapien
agacagtgagctgtaccaaaggcac

SEQ ID NO: 3183108 - DNA, 25 bp, Homo sapien
ggaggtcaccctatctacaggcaag

SEQ ID NO: 3183109 - DNA, 25 bp, Homo sapien
ccagttgtgcctccttaataagtac

SEQ ID NO: 3183110 - DNA, 25 bp, Homo sapien
gagagctctctagccctgattccca

SEQ ID NO: 3183111 - DNA, 25 bp, Homo sapien
gttcattttgggatttgcagggtgc

SEQ ID NO: 3183112 - DNA, 25 bp, Homo sapien
cattttgggatttgcagggtgcatt

SEQ ID NO: 3183113 - DNA, 25 bp, Homo sapien
ttcattttgggatttgcagggtgca

SEQ ID NO: 3183114 - DNA, 25 bp, Homo sapien
tcattttgggatttgcagggtgcat

SEQ ID NO: 3183115 - DNA, 25 bp, Homo sapien
ctcccagggagttctgtccaacatc

SEQ ID NO: 3183116 - DNA, 25 bp, Homo sapien
tacatgttggaaaactgaccccaca

SEQ ID NO: 3183117 - DNA, 25 bp, Homo sapien
catccccgtgccttgttgtgtgttc

SEQ ID NO: 3183118 - DNA, 25 bp, Homo sapien
catcaccgatctcggcggctttgac

SEQ ID NO: 3183119 - DNA, 25 bp, Homo sapien
cacacaaggcttttgggatctcagc

SEQ ID NO: 3183120 - DNA, 25 bp, Homo sapien
gcctaataaaggtctcccatggagc

SEQ ID NO: 3183121 - DNA, 25 bp, Homo sapien
cttgtaggtgtttgtagccggaccg

SEQ ID NO: 3183122 - DNA, 25 bp, Homo sapien
ccatggagctcaagagtagatcctg

SEQ ID NO: 3183123 - DNA, 25 bp, Homo sapien
tattattgttcgtaagttgacaccc

SEQ ID NO: 3183124 - DNA, 25 bp, Homo sapien
atcctattattgttcgtaagttgac

SEQ ID NO: 3183125 - DNA, 25 bp, Homo sapien
ctattattgttcgtaagttgacacc

SEQ ID NO: 3183126 - DNA, 25 bp, Homo sapien
aacagaggtatccttgctcctggtt

SEQ ID NO: 3183127 - DNA, 25 bp, Homo sapien
cagccactggaaggtcactccagag

SEQ ID NO: 3183128 - DNA, 25 bp, Homo sapien
ggtgactgacaaccagtgtgccagt

SEQ ID NO: 3183129 - DNA, 25 bp, Homo sapien
ccactgaacagccagatctaacggg

SEQ ID NO: 3183130 - DNA, 25 bp, Homo sapien
gcatgtgcatagaaacctctttcaa

SEQ ID NO: 3183131 - DNA, 25 bp, Homo sapien
gcatagaaacctctttcaagaagaa

SEQ ID NO: 3183132 - DNA, 25 bp, Homo sapien
gaagaagctgcttaaattccagaga

SEQ ID NO: 3183133 - DNA, 25 bp, Homo sapien
cagagacagctgaatgaataaggca

SEQ ID NO: 3183134 - DNA, 25 bp, Homo sapien
ttttctccaggacatactcatctgg

SEQ ID NO: 3183135 - DNA, 25 bp, Homo sapien
gcctgtcctcacctacttctgatac

SEQ ID NO: 3183136 - DNA, 25 bp, Homo sapien
acatactcatctgggagcgaggtca

SEQ ID NO: 3183137 - DNA, 25 bp, Homo sapien
tgcaggcagccctatctgacagcgt

SEQ ID NO: 3183138 - DNA, 25 bp, Homo sapien
tggactgtgggcatggaatgaaaaa

SEQ ID NO: 3183139 - DNA, 25 bp, Homo sapien
ttgggaataacatttcttggaattg

SEQ ID NO: 3183140 - DNA, 25 bp, Homo sapien
ttcttggaattggactgtgggcatg

SEQ ID NO: 3183141 - DNA, 25 bp, Homo sapien
taacatttcttggaattggactgtg

SEQ ID NO: 3183142 - DNA, 25 bp, Homo sapien
ctttggaaggcatgatcaaagaggg

SEQ ID NO: 3183143 - DNA, 25 bp, Homo sapien
aaggcatgatcaaagagggacatcc

SEQ ID NO: 3183144 - DNA, 25 bp, Homo sapien
gagggacatccaaggctctacatgc

SEQ ID NO: 3183145 - DNA, 25 bp, Homo sapien
ctctacatgcccctcgctgacctgg

SEQ ID NO: 3183146 - DNA, 25 bp, Homo sapien
gaagcccttgcccagtgggcaggtc

SEQ ID NO: 3183147 - DNA, 25 bp, Homo sapien
cccttgcccagtgggcaggtctcgg

SEQ ID NO: 3183148 - DNA, 25 bp, Homo sapien
gcccttgcccagtgggcaggtctcg

SEQ ID NO: 3183149 - DNA, 25 bp, Homo sapien
aagcccttgcccagtgggcaggtct

SEQ ID NO: 3183150 - DNA, 25 bp, Homo sapien
cagttgggatagtaaaacgagaaat

SEQ ID NO: 3183151 - DNA, 25 bp, Homo sapien
acttgttttggatctgaaatgtaaa

SEQ ID NO: 3183152 - DNA, 25 bp, Homo sapien
gagaaatctttctgaacactttcca

SEQ ID NO: 3183153 - DNA, 25 bp, Homo sapien
aatgaaatagctctctgaccagggc

SEQ ID NO: 3183154 - DNA, 25 bp, Homo sapien
aatactgcgtcagggaaaataacca

SEQ ID NO: 3183155 - DNA, 25 bp, Homo sapien
gcttcagcattggaaagtcagccat

SEQ ID NO: 3183156 - DNA, 25 bp, Homo sapien
caggagggacagtgaatactgcgtc

SEQ ID NO: 3183157 - DNA, 25 bp, Homo sapien
tcaagcagaggccttcggcaggaac

SEQ ID NO: 3183158 - DNA, 25 bp, Homo sapien
cctgcaagtggatgtgtggctgaat

SEQ ID NO: 3183159 - DNA, 25 bp, Homo sapien
taatgccaaccaactcttgtgggaa

SEQ ID NO: 3183160 - DNA, 25 bp, Homo sapien
cagttacctctagaacagctgcaag

SEQ ID NO: 3183161 - DNA, 25 bp, Homo sapien
gcatgaaagcaattgatctggtctc

SEQ ID NO: 3183162 - DNA, 25 bp, Homo sapien
tgtaggaaacaccattcagctcatt

SEQ ID NO: 3183163 - DNA, 25 bp, Homo sapien
tctgtacaatgtctgaagctttgaa

SEQ ID NO: 3183164 - DNA, 25 bp, Homo sapien
taacaagaagtcagtgtactctgag

SEQ ID NO: 3183165 - DNA, 25 bp, Homo sapien
gcacataggccacgggagcgtgtaa

SEQ ID NO: 3183166 - DNA, 25 bp, Homo sapien
taagcattatgctaccactgtaaat

SEQ ID NO: 3183167 - DNA, 25 bp, Homo sapien
tgcacaaaacttccctgctgactga

SEQ ID NO: 3183168 - DNA, 25 bp, Homo sapien
tcagcggtttactttcccatggcga

SEQ ID NO: 3183169 - DNA, 25 bp, Homo sapien
caagggcaaactgtgggcttccagc

SEQ ID NO: 3183170 - DNA, 25 bp, Homo sapien
ttgggagcgggttgcctctcgccat

SEQ ID NO: 3183171 - DNA, 25 bp, Homo sapien
tacccttgggagcgggttgcctctc

SEQ ID NO: 3183172 - DNA, 25 bp, Homo sapien
ttgaaagccgtagaattagagtttg

SEQ ID NO: 3183173 - DNA, 25 bp, Homo sapien
tagaattagagtttgtgtgtttacc

SEQ ID NO: 3183174 - DNA, 25 bp, Homo sapien
tagtgatgacatccgggcttttaac

SEQ ID NO: 3183175 - DNA, 25 bp, Homo sapien
ctcacagttgttcccggaggtaggt

SEQ ID NO: 3183176 - DNA, 25 bp, Homo sapien
gattacaccgttagtcctcacagtt

SEQ ID NO: 3183177 - DNA, 25 bp, Homo sapien
taggtaggatcagacagagcacgta

SEQ ID NO: 3183178 - DNA, 25 bp, Homo sapien
aagctgtcctgtgagtttccacatc

SEQ ID NO: 3183179 - DNA, 25 bp, Homo sapien
ctccgagcttgggctctggtgctgt

SEQ ID NO: 3183180 - DNA, 25 bp, Homo sapien
ctgcatggacctcattagcgctcac

SEQ ID NO: 3183181 - DNA, 25 bp, Homo sapien
gtcctgtgagtttccacatcagccg

SEQ ID NO: 3183182 - DNA, 25 bp, Homo sapien
atgtgcctgcccacagctaatcttc

SEQ ID NO: 3183183 - DNA, 25 bp, Homo sapien
gacggtgtagtgaccccactagcat

SEQ ID NO: 3183184 - DNA, 25 bp, Homo sapien
gctggaatttcaggacgcagcgacg

SEQ ID NO: 3183185 - DNA, 25 bp, Homo sapien
taatcttcctggacagtgtctgctg

SEQ ID NO: 3183186 - DNA, 25 bp, Homo sapien
catctctgcttgctctggcagttcc

SEQ ID NO: 3183187 - DNA, 25 bp, Homo sapien
ggcataacatggctcacagagaagt

SEQ ID NO: 3183188 - DNA, 25 bp, Homo sapien
tgcagaggctttggcataacatggc

SEQ ID NO: 3183189 - DNA, 25 bp, Homo sapien
agaggctttggcataacatggctca

SEQ ID NO: 3183190 - DNA, 25 bp, Homo sapien
tgcctgcagaggctttggcataaca

SEQ ID NO: 3183191 - DNA, 25 bp, Homo sapien
cactttgtgtttagcacaatcagca

SEQ ID NO: 3183192 - DNA, 25 bp, Homo sapien
tcttgttctgcttgggctctgttca

SEQ ID NO: 3183193 - DNA, 25 bp, Homo sapien
aaggtttttacaagccaagctagag

SEQ ID NO: 3183194 - DNA, 25 bp, Homo sapien
caatcagcacacataattcttgttc

SEQ ID NO: 3183195 - DNA, 25 bp, Homo sapien
gaggcagacccatctgcgattacat

SEQ ID NO: 3183196 - DNA, 25 bp, Homo sapien
atcttctctgacctcctgtggtact

SEQ ID NO: 3183197 - DNA, 25 bp, Homo sapien
tctctgacctcctgtggtacttgag

SEQ ID NO: 3183198 - DNA, 25 bp, Homo sapien
atcccaaccgtgctgtgttgctttg

SEQ ID NO: 3183199 - DNA, 25 bp, Homo sapien
gggtccacgcggttcttcacaccgc

SEQ ID NO: 3183200 - DNA, 25 bp, Homo sapien
ttgcttttgtcagtagggctagtgg

SEQ ID NO: 3183201 - DNA, 25 bp, Homo sapien
ccctttatgtgatgtgtgtcccctc

SEQ ID NO: 3183202 - DNA, 25 bp, Homo sapien
tcagtagggctagtggccagcccat

SEQ ID NO: 3183203 - DNA, 25 bp, Homo sapien
ctgcacttgggcataggtttgtgga

SEQ ID NO: 3183204 - DNA, 25 bp, Homo sapien
tttataggtaaaatgctgcacttgg

SEQ ID NO: 3183205 - DNA, 25 bp, Homo sapien
tggagggtgagtattgtttctcttc

SEQ ID NO: 3183206 - DNA, 25 bp, Homo sapien
cctgtgatgaagattgatggcattc

SEQ ID NO: 3183207 - DNA, 25 bp, Homo sapien
caggtcggcttgttccactatcacc

SEQ ID NO: 3183208 - DNA, 25 bp, Homo sapien
tttccaggtcggcttgttccactat

SEQ ID NO: 3183209 - DNA, 25 bp, Homo sapien
ggtcggcttgttccactatcaccca

SEQ ID NO: 3183210 - DNA, 25 bp, Homo sapien
tccaggtcggcttgttccactatca

SEQ ID NO: 3183211 - DNA, 25 bp, Homo sapien
tcttgctgtagttgccacgtgccct

SEQ ID NO: 3183212 - DNA, 25 bp, Homo sapien
ggttttaatctccaagagggaagca

SEQ ID NO: 3183213 - DNA, 25 bp, Homo sapien
gggccttgtagaaccacctagtgct

SEQ ID NO: 3183214 - DNA, 25 bp, Homo sapien
caagggccaagtgggttgagctaac

SEQ ID NO: 3183215 - DNA, 25 bp, Homo sapien
ggactgttgaccatggctcctactg

SEQ ID NO: 3183216 - DNA, 25 bp, Homo sapien
gaatcataagggagcttcctcaggt

SEQ ID NO: 3183217 - DNA, 25 bp, Homo sapien
tctggactgggatgactccaagacc

SEQ ID NO: 3183218 - DNA, 25 bp, Homo sapien
tagacttcctcacgactgggtggcc

SEQ ID NO: 3183219 - DNA, 25 bp, Homo sapien
tgtatatagacaacccctccaggga

SEQ ID NO: 3183220 - DNA, 25 bp, Homo sapien
tgattgcagtgcctgtgcctacagc

SEQ ID NO: 3183221 - DNA, 25 bp, Homo sapien
catggagagcgctcgcatgacttcc

SEQ ID NO: 3183222 - DNA, 25 bp, Homo sapien
aatggaggtcttttcacccttcaga

SEQ ID NO: 3183223 - DNA, 25 bp, Homo sapien
gtgttgtcaacagccagccccaggt

SEQ ID NO: 3183224 - DNA, 25 bp, Homo sapien
caacagccagccccaggtgattctc

SEQ ID NO: 3183225 - DNA, 25 bp, Homo sapien
ctgtgttgtcaacagccagccccag

SEQ ID NO: 3183226 - DNA, 25 bp, Homo sapien
acagccagccccaggtgattctcat

SEQ ID NO: 3183227 - DNA, 25 bp, Homo sapien
ggctgttcgtgagtgatgcagattt

SEQ ID NO: 3183228 - DNA, 25 bp, Homo sapien
tgggctgttcgtgagtgatgcagat

SEQ ID NO: 3183229 - DNA, 25 bp, Homo sapien
gctgttcgtgagtgatgcagatttc

SEQ ID NO: 3183230 - DNA, 25 bp, Homo sapien
gttcgtgagtgatgcagatttcttc

SEQ ID NO: 3183231 - DNA, 25 bp, Homo sapien
ttccagtagaactgtgataatgcct

SEQ ID NO: 3183232 - DNA, 25 bp, Homo sapien
tccagtagaactgtgataatgcctt

SEQ ID NO: 3183233 - DNA, 25 bp, Homo sapien
ccagtagaactgtgataatgccttt

SEQ ID NO: 3183234 - DNA, 25 bp, Homo sapien
tttttttcaagttctggcatcttgt

SEQ ID NO: 3183235 - DNA, 25 bp, Homo sapien
tgccttccgtgttcctgcctacggt

SEQ ID NO: 3183236 - DNA, 25 bp, Homo sapien
tgtctgccttccgtgttcctgccta

SEQ ID NO: 3183237 - DNA, 25 bp, Homo sapien
ttccgtgttcctgcctacggttcat

SEQ ID NO: 3183238 - DNA, 25 bp, Homo sapien
tgctgtctgccttccgtgttcctgc

SEQ ID NO: 3183239 - DNA, 25 bp, Homo sapien
tgccctcatgagtccaaccagtgcc

SEQ ID NO: 3183240 - DNA, 25 bp, Homo sapien
tttgccctcatgagtccaaccagtg

SEQ ID NO: 3183241 - DNA, 25 bp, Homo sapien
ccctcatgagtccaaccagtgccct

SEQ ID NO: 3183242 - DNA, 25 bp, Homo sapien
ttgccctcatgagtccaaccagtgc

SEQ ID NO: 3183243 - DNA, 25 bp, Homo sapien
cactctccagctggtctccactggg

SEQ ID NO: 3183244 - DNA, 25 bp, Homo sapien
agggtccactctccagctggtctcc

SEQ ID NO: 3183245 - DNA, 25 bp, Homo sapien
ccagggtccactctccagctggtct

SEQ ID NO: 3183246 - DNA, 25 bp, Homo sapien
ctaagaaacctcacaccagggtcca

SEQ ID NO: 3183247 - DNA, 25 bp, Homo sapien
aaggcgcaagggtggtcagacatct

SEQ ID NO: 3183248 - DNA, 25 bp, Homo sapien
tcatggcatcaggagcgtagacagc

SEQ ID NO: 3183249 - DNA, 25 bp, Homo sapien
aggcagaggcaaggcgcaagggtgg

SEQ ID NO: 3183250 - DNA, 25 bp, Homo sapien
gccccactgggcacgaattataacc

SEQ ID NO: 3183251 - DNA, 25 bp, Homo sapien
tggaggagagtgtatctccatgctt

SEQ ID NO: 3183252 - DNA, 25 bp, Homo sapien
gtgtagccatagctgtccaccacgt

SEQ ID NO: 3183253 - DNA, 25 bp, Homo sapien
ttcctttggcaactggatctgaggg

SEQ ID NO: 3183254 - DNA, 25 bp, Homo sapien
cctttggcaactggatctgagggtt

SEQ ID NO: 3183255 - DNA, 25 bp, Homo sapien
ggcttttggttcactgtcacctggg

SEQ ID NO: 3183256 - DNA, 25 bp, Homo sapien
cttgttagaaaagtgtaccctgtat

SEQ ID NO: 3183257 - DNA, 25 bp, Homo sapien
taccctgtataatagaacttgtcac

SEQ ID NO: 3183258 - DNA, 25 bp, Homo sapien
gaaaaggtgttgtcagtgtccggac

SEQ ID NO: 3183259 - DNA, 25 bp, Homo sapien
taattgagggaccagtaggtgaccc

SEQ ID NO: 3183260 - DNA, 25 bp, Homo sapien
attgagggaccagtaggtgacccac

SEQ ID NO: 3183261 - DNA, 25 bp, Homo sapien
ataattgagggaccagtaggtgacc

SEQ ID NO: 3183262 - DNA, 25 bp, Homo sapien
tgataattgagggaccagtaggtga

SEQ ID NO: 3183263 - DNA, 25 bp, Homo sapien
gatgtgtgcacgctgaattgtccaa

SEQ ID NO: 3183264 - DNA, 25 bp, Homo sapien
gatgaagtcggcacttggcctgtgt

SEQ ID NO: 3183265 - DNA, 25 bp, Homo sapien
ccactaaatggttttggcgcagtcg

SEQ ID NO: 3183266 - DNA, 25 bp, Homo sapien
ggcgcagtcgttttgattaacatca

SEQ ID NO: 3183267 - DNA, 25 bp, Homo sapien
tccaaaattgagaagacagagcttt

SEQ ID NO: 3183268 - DNA, 25 bp, Homo sapien
tagggaagctaaacctctttcttgc

SEQ ID NO: 3183269 - DNA, 25 bp, Homo sapien
cttctttctgtgattctaattccaa

SEQ ID NO: 3183270 - DNA, 25 bp, Homo sapien
tctttcttgctctaagaaggttgac

SEQ ID NO: 3183271 - DNA, 25 bp, Homo sapien
gattcattaatcaacctcatggtcc

SEQ ID NO: 3183272 - DNA, 25 bp, Homo sapien
tcatggtcctcagatgggttgtgac

SEQ ID NO: 3183273 - DNA, 25 bp, Homo sapien
ggttgtgactccctgttgcgtaaac

SEQ ID NO: 3183274 - DNA, 25 bp, Homo sapien
ccctaaaactgctggtttagattca

SEQ ID NO: 3183275 - DNA, 25 bp, Homo sapien
gcctcttccatataactgggctcag

SEQ ID NO: 3183276 - DNA, 25 bp, Homo sapien
ctgacacaggagacgtgggctgtca

SEQ ID NO: 3183277 - DNA, 25 bp, Homo sapien
gttgcctcttccatataactgggct

SEQ ID NO: 3183278 - DNA, 25 bp, Homo sapien
ctcttccatataactgggctcagct

SEQ ID NO: 3183279 - DNA, 25 bp, Homo sapien
cctctagggcataatgggatgcgat

SEQ ID NO: 3183280 - DNA, 25 bp, Homo sapien
gcataatgggatgcgatgagagctt

SEQ ID NO: 3183281 - DNA, 25 bp, Homo sapien
gatgcgatgagagcttgtgcttttt

SEQ ID NO: 3183282 - DNA, 25 bp, Homo sapien
ggcttctcctctagggcataatggg

SEQ ID NO: 3183283 - DNA, 25 bp, Homo sapien
tatgctcagtttgtaggaggggagt

SEQ ID NO: 3183284 - DNA, 25 bp, Homo sapien
gacaggttcattgaattccctctgc

SEQ ID NO: 3183285 - DNA, 25 bp, Homo sapien
ttttcccatatccaaacttgcagca

SEQ ID NO: 3183286 - DNA, 25 bp, Homo sapien
tttctgcgtcaaggtctgcatgaca

SEQ ID NO: 3183287 - DNA, 25 bp, Homo sapien
ttctggggctttctcgttggcctcc

SEQ ID NO: 3183288 - DNA, 25 bp, Homo sapien
ccccatccactgttgctgttccttt

SEQ ID NO: 3183289 - DNA, 25 bp, Homo sapien
tttctcgttggcctccagccctgac

SEQ ID NO: 3183290 - DNA, 25 bp, Homo sapien
ccatccactgttgctgttcctttca

SEQ ID NO: 3183291 - DNA, 25 bp, Homo sapien
attgtgatgcccagctgagtttgag

SEQ ID NO: 3183292 - DNA, 25 bp, Homo sapien
ggcctctccttcccgttgctccctg

SEQ ID NO: 3183293 - DNA, 25 bp, Homo sapien
ctccttcccgttgctccctggaggg

SEQ ID NO: 3183294 - DNA, 25 bp, Homo sapien
ttcctgcaggtcattgtgatgccca

SEQ ID NO: 3183295 - DNA, 25 bp, Homo sapien
tgggagatctggttcagtaggtcca

SEQ ID NO: 3183296 - DNA, 25 bp, Homo sapien
tgtgcccaaagccttcctctcagat

SEQ ID NO: 3183297 - DNA, 25 bp, Homo sapien
tcctctcctctctgtgcccaaagcc

SEQ ID NO: 3183298 - DNA, 25 bp, Homo sapien
cctctctgtgcccaaagccttcctc

SEQ ID NO: 3183299 - DNA, 25 bp, Homo sapien
aagccttcctctcagatactccctc

SEQ ID NO: 3183300 - DNA, 25 bp, Homo sapien
tgtaattgcacgtaaataacgtttc

SEQ ID NO: 3183301 - DNA, 25 bp, Homo sapien
taacgtttcctgcacgctctcctct

SEQ ID NO: 3183302 - DNA, 25 bp, Homo sapien
ctgtaattgcacgtaaataacgttt

SEQ ID NO: 3183303 - DNA, 25 bp, Homo sapien
aataacgtttcctgcacgctctcct

SEQ ID NO: 3183304 - DNA, 25 bp, Homo sapien
taacaacgatctgattggacgaggg

SEQ ID NO: 3183305 - DNA, 25 bp, Homo sapien
tgtatcttcttgcaccatctcgggc

SEQ ID NO: 3183306 - DNA, 25 bp, Homo sapien
catctcgggctttgtgtaggatgca

SEQ ID NO: 3183307 - DNA, 25 bp, Homo sapien
gatgcagatgccgtggtatatggtc

SEQ ID NO: 3183308 - DNA, 25 bp, Homo sapien
aattggatttgctctcggtgggata

SEQ ID NO: 3183309 - DNA, 25 bp, Homo sapien
cagataaaagaaagggttcggcagt

SEQ ID NO: 3183310 - DNA, 25 bp, Homo sapien
taatagggaaggctaatcgggcacg

SEQ ID NO: 3183311 - DNA, 25 bp, Homo sapien
gaaatgagcaaccacacgaattgga

SEQ ID NO: 3183312 - DNA, 25 bp, Homo sapien
tattgtggccgatcgattcgcgacg

SEQ ID NO: 3183313 - DNA, 25 bp, Homo sapien
tgcgcgttggagagataaacattta

SEQ ID NO: 3183314 - DNA, 25 bp, Homo sapien
cggagcagcatagaggcattcgcct

SEQ ID NO: 3183315 - DNA, 25 bp, Homo sapien
tccgcctttccagcttgcgcgttgg

SEQ ID NO: 3183316 - DNA, 25 bp, Homo sapien
tgaagtcagttgttgcatcaaatac

SEQ ID NO: 3183317 - DNA, 25 bp, Homo sapien
caagggtcctgaagtcagttgttgc

SEQ ID NO: 3183318 - DNA, 25 bp, Homo sapien
tacaagggtcctgaagtcagttgtt

SEQ ID NO: 3183319 - DNA, 25 bp, Homo sapien
ggtcctgaagtcagttgttgcatca

SEQ ID NO: 3183320 - DNA, 25 bp, Homo sapien
aacccagaggatgtccgggaagcac

SEQ ID NO: 3183321 - DNA, 25 bp, Homo sapien
tcatgaacccagaggatgtccggga

SEQ ID NO: 3183322 - DNA, 25 bp, Homo sapien
tgaacccagaggatgtccgggaagc

SEQ ID NO: 3183323 - DNA, 25 bp, Homo sapien
catgaacccagaggatgtccgggaa

SEQ ID NO: 3183324 - DNA, 25 bp, Homo sapien
gacgcgggcgctcgctttgtgttcg

SEQ ID NO: 3183325 - DNA, 25 bp, Homo sapien
tagcgtcggcgaggcttgagcttgc

SEQ ID NO: 3183326 - DNA, 25 bp, Homo sapien
cggccccgtgcggtgtccctgagct

SEQ ID NO: 3183327 - DNA, 25 bp, Homo sapien
ggctgctccgagcaacggtgcttcg

SEQ ID NO: 3183328 - DNA, 25 bp, Homo sapien
ttccttctccctctcgcctgcggtc

SEQ ID NO: 3183329 - DNA, 25 bp, Homo sapien
tgccagcctgctccccgggcgccct

SEQ ID NO: 3183330 - DNA, 25 bp, Homo sapien
cgaggagcgaccctctcgcccgcgt

SEQ ID NO: 3183331 - DNA, 25 bp, Homo sapien
gtccctccagagctgcgccgctcat

SEQ ID NO: 3183332 - DNA, 25 bp, Homo sapien
ctagccacataagcctgttgtggag

SEQ ID NO: 3183333 - DNA, 25 bp, Homo sapien
cttttccattcagcgaagtccacga

SEQ ID NO: 3183334 - DNA, 25 bp, Homo sapien
cattcagcgaagtccacgacgactt

SEQ ID NO: 3183335 - DNA, 25 bp, Homo sapien
gcgaagtccacgacgactttccttc

SEQ ID NO: 3183336 - DNA, 25 bp, Homo sapien
tcccacttcccgtggctcttttctc

SEQ ID NO: 3183337 - DNA, 25 bp, Homo sapien
ctcccacttcccgtggctcttttct

SEQ ID NO: 3183338 - DNA, 25 bp, Homo sapien
ggagcctccgagacattgaacaaaa

SEQ ID NO: 3183339 - DNA, 25 bp, Homo sapien
gcagcctttaagtgccgggatggaa

SEQ ID NO: 3183340 - DNA, 25 bp, Homo sapien
ggtcacaccctagaaggagtcacag

SEQ ID NO: 3183341 - DNA, 25 bp, Homo sapien
actacaaggaattggatatcacccc

SEQ ID NO: 3183342 - DNA, 25 bp, Homo sapien
cacagtgggcggtaaatcctgagga

SEQ ID NO: 3183343 - DNA, 25 bp, Homo sapien
tatttacgagacagatatgccccat

SEQ ID NO: 3183344 - DNA, 25 bp, Homo sapien
gattcttaaaagtgaaacaactgtg

SEQ ID NO: 3183345 - DNA, 25 bp, Homo sapien
tgctcacttttcgactaaggaacag

SEQ ID NO: 3183346 - DNA, 25 bp, Homo sapien
tgtgttgaattctcatgcgaggctt

SEQ ID NO: 3183347 - DNA, 25 bp, Homo sapien
aattctcatgcgaggcttgagaggg

SEQ ID NO: 3183348 - DNA, 25 bp, Homo sapien
cagctgtgttgaattctcatgcgag

SEQ ID NO: 3183349 - DNA, 25 bp, Homo sapien
gttgaattctcatgcgaggcttgag

SEQ ID NO: 3183350 - DNA, 25 bp, Homo sapien
tgatacggattatattaaaccactt

SEQ ID NO: 3183351 - DNA, 25 bp, Homo sapien
caaatgctttgatacggattatatt

SEQ ID NO: 3183352 - DNA, 25 bp, Homo sapien
ccattatcctaggtgtgaattatac

SEQ ID NO: 3183353 - DNA, 25 bp, Homo sapien
caatgtgacagaatgatccattatc

SEQ ID NO: 3183354 - DNA, 25 bp, Homo sapien
tattgcaaaggagacattgttttcc

SEQ ID NO: 3183355 - DNA, 25 bp, Homo sapien
gcatgatcctgtagttttccagccc

SEQ ID NO: 3183356 - DNA, 25 bp, Homo sapien
ttcaataaactctgcaagaatgcct

SEQ ID NO: 3183357 - DNA, 25 bp, Homo sapien
tgctgcttgtttgttatcagaggaa

SEQ ID NO: 3183358 - DNA, 25 bp, Homo sapien
tttacttgaccttgtttgggtgatg

SEQ ID NO: 3183359 - DNA, 25 bp, Homo sapien
ccttgtttgggtgatgtctgttctt

SEQ ID NO: 3183360 - DNA, 25 bp, Homo sapien
cttgaccttgtttgggtgatgtctg

SEQ ID NO: 3183361 - DNA, 25 bp, Homo sapien
gatgtctgttctttgtaaccaacag

SEQ ID NO: 3183362 - DNA, 25 bp, Homo sapien
aatccataatgtggccaaaattcca

SEQ ID NO: 3183363 - DNA, 25 bp, Homo sapien
caatccataatgtggccaaaattcc

SEQ ID NO: 3183364 - DNA, 25 bp, Homo sapien
cagggagcaccacatctgagtcccc

SEQ ID NO: 3183365 - DNA, 25 bp, Homo sapien
gaaccagggagcaccacatctgagt

SEQ ID NO: 3183366 - DNA, 25 bp, Homo sapien
ctgcctcccttggacagagttattc

SEQ ID NO: 3183367 - DNA, 25 bp, Homo sapien
tccagtatcatgtgacccacactca

SEQ ID NO: 3183368 - DNA, 25 bp, Homo sapien
cagagttattccagtatcatgtgac

SEQ ID NO: 3183369 - DNA, 25 bp, Homo sapien
gcctcccttggacagagttattcca

SEQ ID NO: 3183370 - DNA, 25 bp, Homo sapien
cagtagtagtggcttcctgcctatc

SEQ ID NO: 3183371 - DNA, 25 bp, Homo sapien
cttcccctcaaacagtagtagtggc

SEQ ID NO: 3183372 - DNA, 25 bp, Homo sapien
tatcttaaccttatcttcaccctga

SEQ ID NO: 3183373 - DNA, 25 bp, Homo sapien
tgtacaaccacagctcttcaagttc

SEQ ID NO: 3183374 - DNA, 25 bp, Homo sapien
agcaacatttctctaccaaagatcg

SEQ ID NO: 3183375 - DNA, 25 bp, Homo sapien
caacatttctctaccaaagatcgct

SEQ ID NO: 3183376 - DNA, 25 bp, Homo sapien
gcagtaaatgcacagcaacatttct

SEQ ID NO: 3183377 - DNA, 25 bp, Homo sapien
tacctccttgttagcagtaaatgca

SEQ ID NO: 3183378 - DNA, 25 bp, Homo sapien
aggctgcagtagcttttcaagggca

SEQ ID NO: 3183379 - DNA, 25 bp, Homo sapien
agagatgttaagtctctgacatttc

SEQ ID NO: 3183380 - DNA, 25 bp, Homo sapien
tggtcttccttgtgcataggcagat

SEQ ID NO: 3183381 - DNA, 25 bp, Homo sapien
tccttgtgcataggcagatgcttgt

SEQ ID NO: 3183382 - DNA, 25 bp, Homo sapien
tgagagatgttaagtctctgacatt

SEQ ID NO: 3183383 - DNA, 25 bp, Homo sapien
gttcagttgctcctcatctactttt

SEQ ID NO: 3183384 - DNA, 25 bp, Homo sapien
aggtgtccctggtttcctttccatg

SEQ ID NO: 3183385 - DNA, 25 bp, Homo sapien
cagttgctcctcatctacttttgac

SEQ ID NO: 3183386 - DNA, 25 bp, Homo sapien
ctttccatgttcagttgctcctcat

SEQ ID NO: 3183387 - DNA, 25 bp, Homo sapien
tcaggattgcagctaagggtagaca

SEQ ID NO: 3183388 - DNA, 25 bp, Homo sapien
caggattgcagctaagggtagacat

SEQ ID NO: 3183389 - DNA, 25 bp, Homo sapien
atcaggattgcagctaagggtagac

SEQ ID NO: 3183390 - DNA, 25 bp, Homo sapien
catcaggattgcagctaagggtaga

SEQ ID NO: 3183391 - DNA, 25 bp, Homo sapien
tgatggagagttaaagtcttgacaa

SEQ ID NO: 3183392 - DNA, 25 bp, Homo sapien
gatggagagttaaagtcttgacaac

SEQ ID NO: 3183393 - DNA, 25 bp, Homo sapien
ctgatggagagttaaagtcttgaca

SEQ ID NO: 3183394 - DNA, 25 bp, Homo sapien
atggagagttaaagtcttgacaaca

SEQ ID NO: 3183395 - DNA, 25 bp, Homo sapien
tgggtgactctcctctgttccatgc

SEQ ID NO: 3183396 - DNA, 25 bp, Homo sapien
ctttccaggagatgtgggtgactct

SEQ ID NO: 3183397 - DNA, 25 bp, Homo sapien
ttatctctgcatccctttccaggag

SEQ ID NO: 3183398 - DNA, 25 bp, Homo sapien
tctgttccatgcaccaagtgctggt

SEQ ID NO: 3183399 - DNA, 25 bp, Homo sapien
tgcagtttggcgagttttcctggtt

SEQ ID NO: 3183400 - DNA, 25 bp, Homo sapien
tttcctggttcatgatcatttcttt

SEQ ID NO: 3183401 - DNA, 25 bp, Homo sapien
cctggttcatgatcatttctttcat

SEQ ID NO: 3183402 - DNA, 25 bp, Homo sapien
ctgcagtttggcgagttttcctggt

SEQ ID NO: 3183403 - DNA, 25 bp, Homo sapien
gctgttctatggaagaccttcttct

SEQ ID NO: 3183404 - DNA, 25 bp, Homo sapien
gcctcagcatgacctgttatggtga

SEQ ID NO: 3183405 - DNA, 25 bp, Homo sapien
ctatggaagaccttcttctttctgt

SEQ ID NO: 3183406 - DNA, 25 bp, Homo sapien
ctttgcctcagcatgacctgttatg

SEQ ID NO: 3183407 - DNA, 25 bp, Homo sapien
tcttcttcagaagtcgactcaattc

SEQ ID NO: 3183408 - DNA, 25 bp, Homo sapien
tatcttcttcagaagtcgactcaat

SEQ ID NO: 3183409 - DNA, 25 bp, Homo sapien
cttcttcagaagtcgactcaattca

SEQ ID NO: 3183410 - DNA, 25 bp, Homo sapien
tttatcttcttcagaagtcgactca

SEQ ID NO: 3183411 - DNA, 25 bp, Homo sapien
agcaggcttatgtaaatttccccag

SEQ ID NO: 3183412 - DNA, 25 bp, Homo sapien
tgagcccctacttctagcaggctta

SEQ ID NO: 3183413 - DNA, 25 bp, Homo sapien
cctacttctagcaggcttatgtaaa

SEQ ID NO: 3183414 - DNA, 25 bp, Homo sapien
tctagcaggcttatgtaaatttccc

SEQ ID NO: 3183415 - DNA, 25 bp, Homo sapien
ctttgtgggtgccttggtgtgcact

SEQ ID NO: 3183416 - DNA, 25 bp, Homo sapien
ttgtgggtgccttggtgtgcacttg

SEQ ID NO: 3183417 - DNA, 25 bp, Homo sapien
tttgtgggtgccttggtgtgcactt

SEQ ID NO: 3183418 - DNA, 25 bp, Homo sapien
gagtttccactatcccaatcaaaga

SEQ ID NO: 3183419 - DNA, 25 bp, Homo sapien
tcctggcccactctgtaatagttca

SEQ ID NO: 3183420 - DNA, 25 bp, Homo sapien
aatggctcaagtagaaaagcagtcc

SEQ ID NO: 3183421 - DNA, 25 bp, Homo sapien
catgtgaacagcataagtttggagc

SEQ ID NO: 3183422 - DNA, 25 bp, Homo sapien
catttctgtgaattccgttgagtga

SEQ ID NO: 3183423 - DNA, 25 bp, Homo sapien
tgtgcttgcttatctctgtcagagc

SEQ ID NO: 3183424 - DNA, 25 bp, Homo sapien
tcttgggtctctaggtatagcaggg

SEQ ID NO: 3183425 - DNA, 25 bp, Homo sapien
cagggaatctgttatgtagtagaca

SEQ ID NO: 3183426 - DNA, 25 bp, Homo sapien
gaggtgagataattgcttgaaccca

SEQ ID NO: 3183427 - DNA, 25 bp, Homo sapien
tgaactgagatcgcgccattgcctg

SEQ ID NO: 3183428 - DNA, 25 bp, Homo sapien
ggaggtgcaggttgcagtgaactga

SEQ ID NO: 3183429 - DNA, 25 bp, Homo sapien
aactgagatcgcgccattgcctgcc

SEQ ID NO: 3183430 - DNA, 25 bp, Homo sapien
taaatagtagccagctatgtgcact

SEQ ID NO: 3183431 - DNA, 25 bp, Homo sapien
taatagagatttgtgcatatacagc

SEQ ID NO: 3183432 - DNA, 25 bp, Homo sapien
tcaaacattactgggataaataaac

SEQ ID NO: 3183433 - DNA, 25 bp, Homo sapien
ttcacttaatatgtcttgtagagca

SEQ ID NO: 3183434 - DNA, 25 bp, Homo sapien
gcactgtaccccttgccgccccttc

SEQ ID NO: 3183435 - DNA, 25 bp, Homo sapien
cgcgggacggcgttcccggcgcgca

SEQ ID NO: 3183436 - DNA, 25 bp, Homo sapien
ccggcgcgcactgtaccccttgccg

SEQ ID NO: 3183437 - DNA, 25 bp, Homo sapien
ctgactgggggactccgcgggacgg

SEQ ID NO: 3183438 - DNA, 25 bp, Homo sapien
caaatgaagccttattgtgtgtgct

SEQ ID NO: 3183439 - DNA, 25 bp, Homo sapien
ggcgacaaagggcacagtaggcttg

SEQ ID NO: 3183440 - DNA, 25 bp, Homo sapien
gatgggaggacagggcgacaaaggg

SEQ ID NO: 3183441 - DNA, 25 bp, Homo sapien
tgcctggcagtaagtgtgaccgcag

SEQ ID NO: 3183442 - DNA, 25 bp, Homo sapien
ttgcctaaacgactctgcatcgccg

SEQ ID NO: 3183443 - DNA, 25 bp, Homo sapien
gaaatggcaacgaatgaccaccagc

SEQ ID NO: 3183444 - DNA, 25 bp, Homo sapien
cgtccgtcccctttcgcagaaatgg

SEQ ID NO: 3183445 - DNA, 25 bp, Homo sapien
gacagtaaaagctgtcgtccctccc

SEQ ID NO: 3183446 - DNA, 25 bp, Homo sapien
gaaacatatttggtgaggtagaagg

SEQ ID NO: 3183447 - DNA, 25 bp, Homo sapien
cattcatctaggagcaattatcagg

SEQ ID NO: 3183448 - DNA, 25 bp, Homo sapien
cctattcaataatgataagtgtcac

SEQ ID NO: 3183449 - DNA, 25 bp, Homo sapien
taaggttgtccttgaggttatgtat

SEQ ID NO: 3183450 - DNA, 25 bp, Homo sapien
tcctctctaggccatcaacttcatc

SEQ ID NO: 3183451 - DNA, 25 bp, Homo sapien
cttcattgtgtcatcactaacaaag

SEQ ID NO: 3183452 - DNA, 25 bp, Homo sapien
cattgtgtcatcactaacaaagagg

SEQ ID NO: 3183453 - DNA, 25 bp, Homo sapien
ttccttgtatcactcccagttctac

SEQ ID NO: 3183454 - DNA, 25 bp, Homo sapien
tttactgaggcttagcgttttgaaa

SEQ ID NO: 3183455 - DNA, 25 bp, Homo sapien
cctttactgaggcttagcgttttga

SEQ ID NO: 3183456 - DNA, 25 bp, Homo sapien
ctttactgaggcttagcgttttgaa

SEQ ID NO: 3183457 - DNA, 25 bp, Homo sapien
tcctttactgaggcttagcgttttg

SEQ ID NO: 3183458 - DNA, 25 bp, Homo sapien
ccaattcggcaaggggatactaggc

SEQ ID NO: 3183459 - DNA, 25 bp, Homo sapien
ctccacgtcaccaattcggcaaggg

SEQ ID NO: 3183460 - DNA, 25 bp, Homo sapien
tcggcaaggggatactaggccctga

SEQ ID NO: 3183461 - DNA, 25 bp, Homo sapien
ctctccacgtcaccaattcggcaag

SEQ ID NO: 3183462 - DNA, 25 bp, Homo sapien
tatgtcacagtcagctataggccag

SEQ ID NO: 3183463 - DNA, 25 bp, Homo sapien
aattgtgcatgagatttgacaggcc

SEQ ID NO: 3183464 - DNA, 25 bp, Homo sapien
tcaatgaccacatcttattctgagg

SEQ ID NO: 3183465 - DNA, 25 bp, Homo sapien
tgacaggccaaacctaggagtgatg

SEQ ID NO: 3183466 - DNA, 25 bp, Homo sapien
cgctccttggagaacagtcccttgg

SEQ ID NO: 3183467 - DNA, 25 bp, Homo sapien
tcgtcttcactgacgaacacccagg

SEQ ID NO: 3183468 - DNA, 25 bp, Homo sapien
tgacattgtcgggtctgaggcctaa

SEQ ID NO: 3183469 - DNA, 25 bp, Homo sapien
ggaccaccgctcattcacagaaagg

SEQ ID NO: 3183470 - DNA, 25 bp, Homo sapien
aagagcgcctcaccgaggaagaggc

SEQ ID NO: 3183471 - DNA, 25 bp, Homo sapien
gctgcctgcccgctggaagagcgcc

SEQ ID NO: 3183472 - DNA, 25 bp, Homo sapien
ctgcctgcccgctggaagagcgcct

SEQ ID NO: 3183473 - DNA, 25 bp, Homo sapien
ctggaagagcgcctcaccgaggaag

SEQ ID NO: 3183474 - DNA, 25 bp, Homo sapien
tctgtctcgcacacccgcgtctcca

SEQ ID NO: 3183475 - DNA, 25 bp, Homo sapien
agccgtctgtctcgcacacccgcgt

SEQ ID NO: 3183476 - DNA, 25 bp, Homo sapien
tgctgcagccgtctgtctcgcacac

SEQ ID NO: 3183477 - DNA, 25 bp, Homo sapien
tgcagccgtctgtctcgcacacccg

SEQ ID NO: 3183478 - DNA, 25 bp, Homo sapien
agcagaagtacgagccctggatgcc

SEQ ID NO: 3183479 - DNA, 25 bp, Homo sapien
ctgcgagcagaagtacgagccctgg

SEQ ID NO: 3183480 - DNA, 25 bp, Homo sapien
ccagcttgatgcaagtgggacactg

SEQ ID NO: 3183481 - DNA, 25 bp, Homo sapien
ctggatgcccagcttgatgcaagtg

SEQ ID NO: 3183482 - DNA, 25 bp, Homo sapien
tttaaaagctgaccataggaggtgg

SEQ ID NO: 3183483 - DNA, 25 bp, Homo sapien
taaaggacgtgtactaggtctaaca

SEQ ID NO: 3183484 - DNA, 25 bp, Homo sapien
tataacagcatttcacgttccttgg

SEQ ID NO: 3183485 - DNA, 25 bp, Homo sapien
caagatcgcacaataactggcaagg

SEQ ID NO: 3183486 - DNA, 25 bp, Homo sapien
gcaatgagggatacgcataatcaga

SEQ ID NO: 3183487 - DNA, 25 bp, Homo sapien
agcaatgagggatacgcataatcag

SEQ ID NO: 3183488 - DNA, 25 bp, Homo sapien
gacacttcggaaaggaaagaatgta

SEQ ID NO: 3183489 - DNA, 25 bp, Homo sapien
tgatttcagaagacaggtgacactt

SEQ ID NO: 3183490 - DNA, 25 bp, Homo sapien
gaaagaatgtaaacatagcctttgg

SEQ ID NO: 3183491 - DNA, 25 bp, Homo sapien
tagcctttggctagagcaagaggct

SEQ ID NO: 3183492 - DNA, 25 bp, Homo sapien
gcttagaataagttacagtgacttg

SEQ ID NO: 3183493 - DNA, 25 bp, Homo sapien
tataaagcgcttagaataagttaca

SEQ ID NO: 3183494 - DNA, 25 bp, Homo sapien
ataagttacagtgacttgatcaagg

SEQ ID NO: 3183495 - DNA, 25 bp, Homo sapien
gcgcttagaataagttacagtgact

SEQ ID NO: 3183496 - DNA, 25 bp, Homo sapien
gatggagctgtgattcaaacacagc

SEQ ID NO: 3183497 - DNA, 25 bp, Homo sapien
aaaaacagacattctcggccgggca

SEQ ID NO: 3183498 - DNA, 25 bp, Homo sapien
tactgcatacagagcatcatactgg

SEQ ID NO: 3183499 - DNA, 25 bp, Homo sapien
gaacaagataggatcattcatgaag

SEQ ID NO: 3183500 - DNA, 25 bp, Homo sapien
tacctgaaggcaagtgtctaacccc

SEQ ID NO: 3183501 - DNA, 25 bp, Homo sapien
cacattagcagatagcagaccccaa

SEQ ID NO: 3183502 - DNA, 25 bp, Homo sapien
ttccggaggcccaaactcgtgactg

SEQ ID NO: 3183503 - DNA, 25 bp, Homo sapien
ggcttgagcctgtgacccagataaa

SEQ ID NO: 3183504 - DNA, 25 bp, Homo sapien
tatcatgcttctttagatcccgtgg

SEQ ID NO: 3183505 - DNA, 25 bp, Homo sapien
ggatatggaatacctcttggatgag

SEQ ID NO: 3183506 - DNA, 25 bp, Homo sapien
caggcaccaagaatcaggcacaaga

SEQ ID NO: 3183507 - DNA, 25 bp, Homo sapien
ggaaaacaatctggtatcatcaaag

SEQ ID NO: 3183508 - DNA, 25 bp, Homo sapien
atagaatgatcatgactacccaggc

SEQ ID NO: 3183509 - DNA, 25 bp, Homo sapien
gtttctagaccagtgtctctggtga

SEQ ID NO: 3183510 - DNA, 25 bp, Homo sapien
cagacattttattgtgtttctagac

SEQ ID NO: 3183511 - DNA, 25 bp, Homo sapien
gacattttattgtgtttctagacca

SEQ ID NO: 3183512 - DNA, 25 bp, Homo sapien
ctgagggcccggaaagcagcacagc

SEQ ID NO: 3183513 - DNA, 25 bp, Homo sapien
gggcccggaaagcagcacagccagt

SEQ ID NO: 3183514 - DNA, 25 bp, Homo sapien
gccagtagggtgtgaatgggctcac

SEQ ID NO: 3183515 - DNA, 25 bp, Homo sapien
ccggaaagcagcacagccagtaggg

SEQ ID NO: 3183516 - DNA, 25 bp, Homo sapien
tggaatggggacaatgctttcttgc

SEQ ID NO: 3183517 - DNA, 25 bp, Homo sapien
ctcaggccaagtgtgagaccatctt

SEQ ID NO: 3183518 - DNA, 25 bp, Homo sapien
cttgctgttgatggggatcttgctc

SEQ ID NO: 3183519 - DNA, 25 bp, Homo sapien
gttgatggggatcttgctcacccag

SEQ ID NO: 3183520 - DNA, 25 bp, Homo sapien
gagcgccaggtgtgcacacaggcag

SEQ ID NO: 3183521 - DNA, 25 bp, Homo sapien
ctttgagcgccaggtgtgcacacag

SEQ ID NO: 3183522 - DNA, 25 bp, Homo sapien
cgccaggtgtgcacacaggcagcac

SEQ ID NO: 3183523 - DNA, 25 bp, Homo sapien
tttgagcgccaggtgtgcacacagg

SEQ ID NO: 3183524 - DNA, 25 bp, Homo sapien
taatgaaattaggtcgtgctgctcg

SEQ ID NO: 3183525 - DNA, 25 bp, Homo sapien
ggacagaccagacactagatgtgga

SEQ ID NO: 3183526 - DNA, 25 bp, Homo sapien
gcaaccttctcagtgcctatggtga

SEQ ID NO: 3183527 - DNA, 25 bp, Homo sapien
gccgcaacagagcaaaggcgctgga

SEQ ID NO: 3183528 - DNA, 25 bp, Homo sapien
ttcctaggcataggccaaacttgtt

SEQ ID NO: 3183529 - DNA, 25 bp, Homo sapien
tcctactgaaatcgctactgcaaaa

SEQ ID NO: 3183530 - DNA, 25 bp, Homo sapien
tattaccgcattaccgggtggagcc

SEQ ID NO: 3183531 - DNA, 25 bp, Homo sapien
tatttccagtactgtgaatcactga

SEQ ID NO: 3183532 - DNA, 25 bp, Homo sapien
taactacgtcctcagaagctttacc

SEQ ID NO: 3183533 - DNA, 25 bp, Homo sapien
cgttataactacgtcctcagaagct

SEQ ID NO: 3183534 - DNA, 25 bp, Homo sapien
ctacgtcctcagaagctttacccat

SEQ ID NO: 3183535 - DNA, 25 bp, Homo sapien
tataactacgtcctcagaagcttta

SEQ ID NO: 3183536 - DNA, 25 bp, Homo sapien
tagtaacttgtgagtagcccaactt

SEQ ID NO: 3183537 - DNA, 25 bp, Homo sapien
tatgtagtaacttgtgagtagccca

SEQ ID NO: 3183538 - DNA, 25 bp, Homo sapien
tcttatgtagtaacttgtgagtagc

SEQ ID NO: 3183539 - DNA, 25 bp, Homo sapien
taacttgtgagtagcccaacttcct

SEQ ID NO: 3183540 - DNA, 25 bp, Homo sapien
actgagtcacatcatttttcctcat

SEQ ID NO: 3183541 - DNA, 25 bp, Homo sapien
catggtcacaaagtttggtggagcc

SEQ ID NO: 3183542 - DNA, 25 bp, Homo sapien
ggtggagccagtttaagacattaca

SEQ ID NO: 3183543 - DNA, 25 bp, Homo sapien
cttggaggtgagacttagaataacc

SEQ ID NO: 3183544 - DNA, 25 bp, Homo sapien
caaacctatgattccagcatcttgg

SEQ ID NO: 3183545 - DNA, 25 bp, Homo sapien
taagtagccggaatacaagtccctc

SEQ ID NO: 3183546 - DNA, 25 bp, Homo sapien
tgatgtcaacatactggctgcacct

SEQ ID NO: 3183547 - DNA, 25 bp, Homo sapien
cacagaagacactctttggtgcctg

SEQ ID NO: 3183548 - DNA, 25 bp, Homo sapien
agtccctcgtagaccaagtattggc

SEQ ID NO: 3183549 - DNA, 25 bp, Homo sapien
cagtggataatgtggtctgagttta

SEQ ID NO: 3183550 - DNA, 25 bp, Homo sapien
caggaagacacttctcgcttcgcct

SEQ ID NO: 3183551 - DNA, 25 bp, Homo sapien
gacacttctcgcttcgccttttcat

SEQ ID NO: 3183552 - DNA, 25 bp, Homo sapien
agtatatcgataacctgcccatggg

SEQ ID NO: 3183553 - DNA, 25 bp, Homo sapien
ctggtctttgaatataacttggcac

SEQ ID NO: 3183554 - DNA, 25 bp, Homo sapien
tctggtctttgaatataacttggca

SEQ ID NO: 3183555 - DNA, 25 bp, Homo sapien
aacacgtgcaaagaacttagcacag

SEQ ID NO: 3183556 - DNA, 25 bp, Homo sapien
aaatggagtaacacgtgcaaagaac

SEQ ID NO: 3183557 - DNA, 25 bp, Homo sapien
aagtgttaaatggagtaacacgtgc

SEQ ID NO: 3183558 - DNA, 25 bp, Homo sapien
gagtaacacgtgcaaagaacttagc

SEQ ID NO: 3183559 - DNA, 25 bp, Homo sapien
gatgctcaaccttactcataatttt

SEQ ID NO: 3183560 - DNA, 25 bp, Homo sapien
ggtcatagagccatacacactgtaa

SEQ ID NO: 3183561 - DNA, 25 bp, Homo sapien
tatttaactccttatgccaagtaag

SEQ ID NO: 3183562 - DNA, 25 bp, Homo sapien
taataaccaggtatccttctgagaa

SEQ ID NO: 3183563 - DNA, 25 bp, Homo sapien
aaaaaatgtcaacaggataattttg

SEQ ID NO: 3183564 - DNA, 25 bp, Homo sapien
aacaggataattttgagaaccagac

SEQ ID NO: 3183565 - DNA, 25 bp, Homo sapien
tataaatttaatactatcccaataa

SEQ ID NO: 3183566 - DNA, 25 bp, Homo sapien
tgtcaacaggataattttgagaacc

SEQ ID NO: 3183567 - DNA, 25 bp, Homo sapien
gtacctttaagagcctgttcagatt

SEQ ID NO: 3183568 - DNA, 25 bp, Homo sapien
ccttctatatcttcagatgagagta

SEQ ID NO: 3183569 - DNA, 25 bp, Homo sapien
ctacatacaagtcgcatcccttcta

SEQ ID NO: 3183570 - DNA, 25 bp, Homo sapien
ctgagaagtacctttaagagcctgt

SEQ ID NO: 3183571 - DNA, 25 bp, Homo sapien
tgtacagcgtgatctatttcttcag

SEQ ID NO: 3183572 - DNA, 25 bp, Homo sapien
agcaacatccaaaacttctctagca

SEQ ID NO: 3183573 - DNA, 25 bp, Homo sapien
ttcttcagtagttacacctggttta

SEQ ID NO: 3183574 - DNA, 25 bp, Homo sapien
taatcatgccggcagcaacatccaa

SEQ ID NO: 3183575 - DNA, 25 bp, Homo sapien
tggcccacagagcatactcaaaatg

SEQ ID NO: 3183576 - DNA, 25 bp, Homo sapien
tagctcaagatagattgtcaaatcc

SEQ ID NO: 3183577 - DNA, 25 bp, Homo sapien
tacaatagtacctaccctcaagagg

SEQ ID NO: 3183578 - DNA, 25 bp, Homo sapien
tgtaaaagaagcacttgagtacctg

SEQ ID NO: 3183579 - DNA, 25 bp, Homo sapien
ttcaggggagaagggtagcaatttc

SEQ ID NO: 3183580 - DNA, 25 bp, Homo sapien
caggggagaagggtagcaatttctt

SEQ ID NO: 3183581 - DNA, 25 bp, Homo sapien
gaagggtagcaatttcttgcaatac

SEQ ID NO: 3183582 - DNA, 25 bp, Homo sapien
ctttgggaaattataataattcagg

SEQ ID NO: 3183583 - DNA, 25 bp, Homo sapien
cttcattcactgaggtacaacaaga

SEQ ID NO: 3183584 - DNA, 25 bp, Homo sapien
ggccttctgtctggtattccatggc

SEQ ID NO: 3183585 - DNA, 25 bp, Homo sapien
taagggccttctgtctggtattcca

SEQ ID NO: 3183586 - DNA, 25 bp, Homo sapien
ttgtaagggccttctgtctggtatt

SEQ ID NO: 3183587 - DNA, 25 bp, Homo sapien
attcaggtccccatgataaccattg

SEQ ID NO: 3183588 - DNA, 25 bp, Homo sapien
ggtccccatgataaccattgcgata

SEQ ID NO: 3183589 - DNA, 25 bp, Homo sapien
ccattgcgataaagagtgatatcca

SEQ ID NO: 3183590 - DNA, 25 bp, Homo sapien
catgataaccattgcgataaagagt

SEQ ID NO: 3183591 - DNA, 25 bp, Homo sapien
gtctgaacaagtttccgtgctccat

SEQ ID NO: 3183592 - DNA, 25 bp, Homo sapien
caatggcttgcatcaggcactcata

SEQ ID NO: 3183593 - DNA, 25 bp, Homo sapien
tctgaacaagtttccgtgctccatc

SEQ ID NO: 3183594 - DNA, 25 bp, Homo sapien
aatggcttgcatcaggcactcatat

SEQ ID NO: 3183595 - DNA, 25 bp, Homo sapien
cttggcccatcaacacacaggactg

SEQ ID NO: 3183596 - DNA, 25 bp, Homo sapien
tgctaacaaccaaagctaactcagg

SEQ ID NO: 3183597 - DNA, 25 bp, Homo sapien
caacctggaaggtacaaggaatgca

SEQ ID NO: 3183598 - DNA, 25 bp, Homo sapien
gactgccaataggtgctcaacactg

SEQ ID NO: 3183599 - DNA, 25 bp, Homo sapien
gcccacaatagcttcgaacaactga

SEQ ID NO: 3183600 - DNA, 25 bp, Homo sapien
ctgaaaacccatttgcttgggcatg

SEQ ID NO: 3183601 - DNA, 25 bp, Homo sapien
caattctctgtaccgaacaccaggc

SEQ ID NO: 3183602 - DNA, 25 bp, Homo sapien
gcatgcttctggataatgtttccca

SEQ ID NO: 3183603 - DNA, 25 bp, Homo sapien
cctaataagggtatcagctaagtga

SEQ ID NO: 3183604 - DNA, 25 bp, Homo sapien
tgaatgactgcaatgcccaacctga

SEQ ID NO: 3183605 - DNA, 25 bp, Homo sapien
tccagatgaatagctatcgtgctgc

SEQ ID NO: 3183606 - DNA, 25 bp, Homo sapien
aaattacagtgaccagacctgccat

SEQ ID NO: 3183607 - DNA, 25 bp, Homo sapien
ggctcaattgtaaatacatggcccg

SEQ ID NO: 3183608 - DNA, 25 bp, Homo sapien
aaatcattggctcaattgtaaatac

SEQ ID NO: 3183609 - DNA, 25 bp, Homo sapien
aattgtaaatacatggcccgacttc

SEQ ID NO: 3183610 - DNA, 25 bp, Homo sapien
aatacatggcccgacttcatcactc

SEQ ID NO: 3183611 - DNA, 25 bp, Homo sapien
tctcggtgaggagccctaattgtga

SEQ ID NO: 3183612 - DNA, 25 bp, Homo sapien
taaccagaaagctccattaccagaa

SEQ ID NO: 3183613 - DNA, 25 bp, Homo sapien
gtctcctatcactgctacaagcctg

SEQ ID NO: 3183614 - DNA, 25 bp, Homo sapien
gagccctaattgtgactcccagtct

SEQ ID NO: 3183615 - DNA, 25 bp, Homo sapien
gaccaggagggtgtgctcaaactga

SEQ ID NO: 3183616 - DNA, 25 bp, Homo sapien
ttgtcaccgcagtccaaccatctgg

SEQ ID NO: 3183617 - DNA, 25 bp, Homo sapien
gcactgtcaagtcgccgggttagga

SEQ ID NO: 3183618 - DNA, 25 bp, Homo sapien
cacagccagtgtctgtgaccaggag

SEQ ID NO: 3183619 - DNA, 25 bp, Homo sapien
aatgcatagcacagtaagaaggtac

SEQ ID NO: 3183620 - DNA, 25 bp, Homo sapien
taagaaggtactgagatgtgccatc

SEQ ID NO: 3183621 - DNA, 25 bp, Homo sapien
gacacacatcaaatgctgtagtcct

SEQ ID NO: 3183622 - DNA, 25 bp, Homo sapien
tctgtactctcaataaaatgcatag

SEQ ID NO: 3183623 - DNA, 25 bp, Homo sapien
ttaatagcccacttgacctcctggg

SEQ ID NO: 3183624 - DNA, 25 bp, Homo sapien
caaggatgcccagtaatcaagtaca

SEQ ID NO: 3183625 - DNA, 25 bp, Homo sapien
gcaacagtcagccaccacttggaaa

SEQ ID NO: 3183626 - DNA, 25 bp, Homo sapien
tctgaggcactctgggaaagatgtt

SEQ ID NO: 3183627 - DNA, 25 bp, Homo sapien
taatgacagacactgaataagccca

SEQ ID NO: 3183628 - DNA, 25 bp, Homo sapien
cactctactgagtttatgtacagcc

SEQ ID NO: 3183629 - DNA, 25 bp, Homo sapien
aatatggttgcatctcaaatgctgc

SEQ ID NO: 3183630 - DNA, 25 bp, Homo sapien
ctaagaaaagcattatcaccagtgt

SEQ ID NO: 3183631 - DNA, 25 bp, Homo sapien
tctcagtctcaagagtagctaatgc

SEQ ID NO: 3183632 - DNA, 25 bp, Homo sapien
gcacaccatgctctgacttgttttg

SEQ ID NO: 3183633 - DNA, 25 bp, Homo sapien
ggcagaatgatgaaactaggtgttt

SEQ ID NO: 3183634 - DNA, 25 bp, Homo sapien
tagctaatgctacaggctcgcacac

SEQ ID NO: 3183635 - DNA, 25 bp, Homo sapien
taccatgagggtagaggttaagcaa

SEQ ID NO: 3183636 - DNA, 25 bp, Homo sapien
gaaatcgcttacagataccatgagg

SEQ ID NO: 3183637 - DNA, 25 bp, Homo sapien
tagtagggtgaagtacgatgttgct

SEQ ID NO: 3183638 - DNA, 25 bp, Homo sapien
tatttcactgtactatactttcaac

SEQ ID NO: 3183639 - DNA, 25 bp, Homo sapien
ggtgatctctgacccaactactgaa

SEQ ID NO: 3183640 - DNA, 25 bp, Homo sapien
ggtgatttgttctcctagccacaga

SEQ ID NO: 3183641 - DNA, 25 bp, Homo sapien
gaaaagcagcaaacacgtagccagg

SEQ ID NO: 3183642 - DNA, 25 bp, Homo sapien
gaacattatggtgacaaagcagcgt

SEQ ID NO: 3183643 - DNA, 25 bp, Homo sapien
tgttctccagttgaaggcatgaagt

SEQ ID NO: 3183644 - DNA, 25 bp, Homo sapien
tgcattgggctcactgcgtgttacc

SEQ ID NO: 3183645 - DNA, 25 bp, Homo sapien
cattaattttagtcctgtgtagcag

SEQ ID NO: 3183646 - DNA, 25 bp, Homo sapien
gcgtgttacctaagacgtatcacag

SEQ ID NO: 3183647 - DNA, 25 bp, Homo sapien
cgtgatgtgataggagcagcttaac

SEQ ID NO: 3183648 - DNA, 25 bp, Homo sapien
gctactccagaaaatagggttatgt

SEQ ID NO: 3183649 - DNA, 25 bp, Homo sapien
acagcctcgtagagcttcacagcta

SEQ ID NO: 3183650 - DNA, 25 bp, Homo sapien
taatgtccatcctgtcgtgatgtga

SEQ ID NO: 3183651 - DNA, 25 bp, Homo sapien
caacaaagcctttgaactgatgcat

SEQ ID NO: 3183652 - DNA, 25 bp, Homo sapien
aagcctttgaactgatgcattctgg

SEQ ID NO: 3183653 - DNA, 25 bp, Homo sapien
atcaacaaagcctttgaactgatgc

SEQ ID NO: 3183654 - DNA, 25 bp, Homo sapien
caaagcctttgaactgatgcattct

SEQ ID NO: 3183655 - DNA, 25 bp, Homo sapien
aagtaacttgtgcagctctcaaggg

SEQ ID NO: 3183656 - DNA, 25 bp, Homo sapien
tatgcctcaccctggtctcatcttg

SEQ ID NO: 3183657 - DNA, 25 bp, Homo sapien
tgtagaggtggctgatttaagtaac

SEQ ID NO: 3183658 - DNA, 25 bp, Homo sapien
gcccagctgtggtaccctatgttaa

SEQ ID NO: 3183659 - DNA, 25 bp, Homo sapien
gaagcattcgccagtggagcacaaa

SEQ ID NO: 3183660 - DNA, 25 bp, Homo sapien
gattttagcaatgaaaccggcgccg

SEQ ID NO: 3183661 - DNA, 25 bp, Homo sapien
tctccctatgacgagtcccttgagg

SEQ ID NO: 3183662 - DNA, 25 bp, Homo sapien
ttcaggaactgctggaatgggagct

SEQ ID NO: 3183663 - DNA, 25 bp, Homo sapien
aagcccttagcatactgtaaaaaat

SEQ ID NO: 3183664 - DNA, 25 bp, Homo sapien
cacaactggccatttaagacctgca

SEQ ID NO: 3183665 - DNA, 25 bp, Homo sapien
cagagtctgtatttggtccatgaaa

SEQ ID NO: 3183666 - DNA, 25 bp, Homo sapien
caaccgtatcctttccagagtctgt

SEQ ID NO: 3183667 - DNA, 25 bp, Homo sapien
ttcattctgccaacagacaggctgt

SEQ ID NO: 3183668 - DNA, 25 bp, Homo sapien
gacagatttcatagctcttccagtg

SEQ ID NO: 3183669 - DNA, 25 bp, Homo sapien
aatccaccctggtgaaggagtgagg

SEQ ID NO: 3183670 - DNA, 25 bp, Homo sapien
cctgaactgaacgaaatcttggaca

SEQ ID NO: 3183671 - DNA, 25 bp, Homo sapien
tcatccaattaaaacttctcgcctc

SEQ ID NO: 3183672 - DNA, 25 bp, Homo sapien
tctgaggcagcaaaactgatctggt

SEQ ID NO: 3183673 - DNA, 25 bp, Homo sapien
ggtcttggacacatacttctttggt

SEQ ID NO: 3183674 - DNA, 25 bp, Homo sapien
tccgcagtccacagctttcaacttg

SEQ ID NO: 3183675 - DNA, 25 bp, Homo sapien
tgctgccccaatgaattaatcatgc

SEQ ID NO: 3183676 - DNA, 25 bp, Homo sapien
gccactacgtttacaagcccactga

SEQ ID NO: 3183677 - DNA, 25 bp, Homo sapien
tcctgtccaagagggctcacagaaa

SEQ ID NO: 3183678 - DNA, 25 bp, Homo sapien
gggtccatgcttatatccacggcca

SEQ ID NO: 3183679 - DNA, 25 bp, Homo sapien
aatcagaccttttggtgagaagcac

SEQ ID NO: 3183680 - DNA, 25 bp, Homo sapien
tataggagatccgagaacagtgact

SEQ ID NO: 3183681 - DNA, 25 bp, Homo sapien
ccactgagtaacaaggacgctgcct

SEQ ID NO: 3183682 - DNA, 25 bp, Homo sapien
tctgattgaatgtgaacctgcctgg

SEQ ID NO: 3183683 - DNA, 25 bp, Homo sapien
gatgggatacaatgactgactagcc

SEQ ID NO: 3183684 - DNA, 25 bp, Homo sapien
tgtaaacttagtatataagccctgc

SEQ ID NO: 3183685 - DNA, 25 bp, Homo sapien
cactgacatgaactccccaatttgc

SEQ ID NO: 3183686 - DNA, 25 bp, Homo sapien
cataaggaatgctaagtggcagcca

SEQ ID NO: 3183687 - DNA, 25 bp, Homo sapien
ccaatttgcaaacgtgtcagtcaca

SEQ ID NO: 3183688 - DNA, 25 bp, Homo sapien
gttatacagtgctcccatgtcaggg

SEQ ID NO: 3183689 - DNA, 25 bp, Homo sapien
tgcatagaaatgttccacctggaag

SEQ ID NO: 3183690 - DNA, 25 bp, Homo sapien
tctgtggcagggatcagacatgtaa

SEQ ID NO: 3183691 - DNA, 25 bp, Homo sapien
catgtaaaggatgccccaactgtct

SEQ ID NO: 3183692 - DNA, 25 bp, Homo sapien
ttcaatctggatgcactggtgaccc

SEQ ID NO: 3183693 - DNA, 25 bp, Homo sapien
tcccaaagctggtcactgactataa

SEQ ID NO: 3183694 - DNA, 25 bp, Homo sapien
gaggcatttgacctaatgaaccaag

SEQ ID NO: 3183695 - DNA, 25 bp, Homo sapien
tggtgacccataccctgccttttga

SEQ ID NO: 3183696 - DNA, 25 bp, Homo sapien
cattgaacatgggtatgcacatctc

SEQ ID NO: 3183697 - DNA, 25 bp, Homo sapien
gaagagattctagctgctaagccac

SEQ ID NO: 3183698 - DNA, 25 bp, Homo sapien
tcaaagtcgacctaaatttccagga

SEQ ID NO: 3183699 - DNA, 25 bp, Homo sapien
taagccacctcatgagatcctcaga

SEQ ID NO: 3183700 - DNA, 25 bp, Homo sapien
ggttgatctagtagccaagatacca

SEQ ID NO: 3183701 - DNA, 25 bp, Homo sapien
tctagtagccaagataccaaagtat

SEQ ID NO: 3183702 - DNA, 25 bp, Homo sapien
caataagaggttgatctagtagcca

SEQ ID NO: 3183703 - DNA, 25 bp, Homo sapien
cagcctcaccacaataagaggttga

SEQ ID NO: 3183704 - DNA, 25 bp, Homo sapien
ctggcacataacaggagcttgataa

SEQ ID NO: 3183705 - DNA, 25 bp, Homo sapien
gggcaagaactctctgttgttcatt

SEQ ID NO: 3183706 - DNA, 25 bp, Homo sapien
tattgtactatttgttccttgaggg

SEQ ID NO: 3183707 - DNA, 25 bp, Homo sapien
gcttgataatttttcaacgaatgaa

SEQ ID NO: 3183708 - DNA, 25 bp, Homo sapien
taatcctcatttggcaggccagatg

SEQ ID NO: 3183709 - DNA, 25 bp, Homo sapien
ggaatatgggctatgtaatcctcat

SEQ ID NO: 3183710 - DNA, 25 bp, Homo sapien
aaggagtctggccaatataatccct

SEQ ID NO: 3183711 - DNA, 25 bp, Homo sapien
gccagatgaaccgtgccactctttt

SEQ ID NO: 3183712 - DNA, 25 bp, Homo sapien
tgttaactaggcactcaatgagggt

SEQ ID NO: 3183713 - DNA, 25 bp, Homo sapien
taggctgatcgaatgggtgaccaca

SEQ ID NO: 3183714 - DNA, 25 bp, Homo sapien
tagggagattacagcgcagtgcaat

SEQ ID NO: 3183715 - DNA, 25 bp, Homo sapien
taatcgtaagggcaaaggctggtct

SEQ ID NO: 3183716 - DNA, 25 bp, Homo sapien
ttagtgctggctgtttgtgaaggtc

SEQ ID NO: 3183717 - DNA, 25 bp, Homo sapien
aaattagtgctggctgtttgtgaag

SEQ ID NO: 3183718 - DNA, 25 bp, Homo sapien
gtgctggctgtttgtgaaggtcttc

SEQ ID NO: 3183719 - DNA, 25 bp, Homo sapien
tagtgctggctgtttgtgaaggtct

SEQ ID NO: 3183720 - DNA, 25 bp, Homo sapien
taaactttggatgaccttgggagac

SEQ ID NO: 3183721 - DNA, 25 bp, Homo sapien
cttactaacagtgagaacttggagg

SEQ ID NO: 3183722 - DNA, 25 bp, Homo sapien
tagaggagatgggtgctatgaaacc

SEQ ID NO: 3183723 - DNA, 25 bp, Homo sapien
tctatttcctgacagcagctaaggc

SEQ ID NO: 3183724 - DNA, 25 bp, Homo sapien
tcttcccatggcttatttaatcttc

SEQ ID NO: 3183725 - DNA, 25 bp, Homo sapien
tttttacccttggagtttcatgtca

SEQ ID NO: 3183726 - DNA, 25 bp, Homo sapien
ttacccttggagtttcatgtcattt

SEQ ID NO: 3183727 - DNA, 25 bp, Homo sapien
aaaatcttcccatggcttatttaat

SEQ ID NO: 3183728 - DNA, 25 bp, Homo sapien
ttgaggcaagtaaacgggacaggct

SEQ ID NO: 3183729 - DNA, 25 bp, Homo sapien
aattaattctcctctgtagtaccag

SEQ ID NO: 3183730 - DNA, 25 bp, Homo sapien
caggaacactcaaggcaaggtccac

SEQ ID NO: 3183731 - DNA, 25 bp, Homo sapien
ttagatatagattcactgctcccca

SEQ ID NO: 3183732 - DNA, 25 bp, Homo sapien
tcgaagcagccatggcccactaaat

SEQ ID NO: 3183733 - DNA, 25 bp, Homo sapien
ggtcaaaatcaagcgagtagccagc

SEQ ID NO: 3183734 - DNA, 25 bp, Homo sapien
gagatccttatttcctcaccagtgg

SEQ ID NO: 3183735 - DNA, 25 bp, Homo sapien
gtggtcggctccctgaaattgctca

SEQ ID NO: 3183736 - DNA, 25 bp, Homo sapien
cacattaaaatatgcccaacctcag

SEQ ID NO: 3183737 - DNA, 25 bp, Homo sapien
aatggagagatgtggtcaaatggta

SEQ ID NO: 3183738 - DNA, 25 bp, Homo sapien
aaaacccagtatgacaatggaccaa

SEQ ID NO: 3183739 - DNA, 25 bp, Homo sapien
tataaaatttctgctagataggaaa

SEQ ID NO: 3183740 - DNA, 25 bp, Homo sapien
tatagattgcaagagtaggcacgtg

SEQ ID NO: 3183741 - DNA, 25 bp, Homo sapien
taggcacgtgggtacagaaagcatg

SEQ ID NO: 3183742 - DNA, 25 bp, Homo sapien
tactacaagagatgcaagcccaggc

SEQ ID NO: 3183743 - DNA, 25 bp, Homo sapien
gaccacaggaagctctacatttaga

SEQ ID NO: 3183744 - DNA, 25 bp, Homo sapien
catgactgccatagtagctgtcaaa

SEQ ID NO: 3183745 - DNA, 25 bp, Homo sapien
cacaaatttggtgagatttcattgg

SEQ ID NO: 3183746 - DNA, 25 bp, Homo sapien
accagactcatgctagcaaagagag

SEQ ID NO: 3183747 - DNA, 25 bp, Homo sapien
ttcagctgctcaaggatgtccacat

SEQ ID NO: 3183748 - DNA, 25 bp, Homo sapien
agttacacttgaccttagagagagg

SEQ ID NO: 3183749 - DNA, 25 bp, Homo sapien
agagaggagcgtctgccattactga

SEQ ID NO: 3183750 - DNA, 25 bp, Homo sapien
gaccttagagagaggagcgtctgcc

SEQ ID NO: 3183751 - DNA, 25 bp, Homo sapien
ctgaaaagaaggcttaagccaggga

SEQ ID NO: 3183752 - DNA, 25 bp, Homo sapien
caatgtatggcttcttatcatcatc

SEQ ID NO: 3183753 - DNA, 25 bp, Homo sapien
acaatgtatggcttcttatcatcat

SEQ ID NO: 3183754 - DNA, 25 bp, Homo sapien
atgtcttacaatgtatggcttctta

SEQ ID NO: 3183755 - DNA, 25 bp, Homo sapien
tcttacaatgtatggcttcttatca

SEQ ID NO: 3183756 - DNA, 25 bp, Homo sapien
tgctggatcaaacacatccctctgg

SEQ ID NO: 3183757 - DNA, 25 bp, Homo sapien
ctttgctgtgattgattgggtgtcg

SEQ ID NO: 3183758 - DNA, 25 bp, Homo sapien
ggtgactagctctctgctttatttg

SEQ ID NO: 3183759 - DNA, 25 bp, Homo sapien
gggtgtcgattctctgctatgaaga

SEQ ID NO: 3183760 - DNA, 25 bp, Homo sapien
aatagaaatgtcaggcacagtgagc

SEQ ID NO: 3183761 - DNA, 25 bp, Homo sapien
aattttaggtagaatagaaatgtca

SEQ ID NO: 3183762 - DNA, 25 bp, Homo sapien
gctcagtcaatgctgattaatttta

SEQ ID NO: 3183763 - DNA, 25 bp, Homo sapien
cctagggagatgctcagtcaatgct

SEQ ID NO: 3183764 - DNA, 25 bp, Homo sapien
aaacatttcttcacacgtatgttag

SEQ ID NO: 3183765 - DNA, 25 bp, Homo sapien
tcttcacacgtatgttagctttcta

SEQ ID NO: 3183766 - DNA, 25 bp, Homo sapien
catttcttcacacgtatgttagctt

SEQ ID NO: 3183767 - DNA, 25 bp, Homo sapien
tttcttcacacgtatgttagctttc

SEQ ID NO: 3183768 - DNA, 25 bp, Homo sapien
gtctcttcgaagataaccctttcta

SEQ ID NO: 3183769 - DNA, 25 bp, Homo sapien
cctttctgaagcgtctcttcgaaga

SEQ ID NO: 3183770 - DNA, 25 bp, Homo sapien
ctctctcctttctgaagcgtctctt

SEQ ID NO: 3183771 - DNA, 25 bp, Homo sapien
gaagcgtctcttcgaagataaccct

SEQ ID NO: 3183772 - DNA, 25 bp, Homo sapien
tacagtctggagctaaaaatgggag

SEQ ID NO: 3183773 - DNA, 25 bp, Homo sapien
ccttaatgttcatatccggagtaga

SEQ ID NO: 3183774 - DNA, 25 bp, Homo sapien
tgcaggaccaatgcttagtcatctt

SEQ ID NO: 3183775 - DNA, 25 bp, Homo sapien
tgggaggtacaattgttgcaggacc

SEQ ID NO: 3183776 - DNA, 25 bp, Homo sapien
aacaaaaagaggctgaattcatctt

SEQ ID NO: 3183777 - DNA, 25 bp, Homo sapien
ccacccataatggtagagcctcctg

SEQ ID NO: 3183778 - DNA, 25 bp, Homo sapien
ttaaccccacccataatggtagagc

SEQ ID NO: 3183779 - DNA, 25 bp, Homo sapien
cccataatggtagagcctcctggcc

SEQ ID NO: 3183780 - DNA, 25 bp, Homo sapien
ccaacatgtgttgagaggcttcttg

SEQ ID NO: 3183781 - DNA, 25 bp, Homo sapien
tatggaggtgccaacatgtgttgag

SEQ ID NO: 3183782 - DNA, 25 bp, Homo sapien
gaatttcaatatggaggtgccaaca

SEQ ID NO: 3183783 - DNA, 25 bp, Homo sapien
tgccaacatgtgttgagaggcttct

SEQ ID NO: 3183784 - DNA, 25 bp, Homo sapien
taaccgacaacattcttgaggaggg

SEQ ID NO: 3183785 - DNA, 25 bp, Homo sapien
taatagtgtttctttggcactcaca

SEQ ID NO: 3183786 - DNA, 25 bp, Homo sapien
tatatctaacttctgccttctagct

SEQ ID NO: 3183787 - DNA, 25 bp, Homo sapien
cctgcatttacatgaggcacaactg

SEQ ID NO: 3183788 - DNA, 25 bp, Homo sapien
gaagctggctatcaagggatttcag

SEQ ID NO: 3183789 - DNA, 25 bp, Homo sapien
caaagatcatccagtcgcctggttc

SEQ ID NO: 3183790 - DNA, 25 bp, Homo sapien
gatttcagcaatcgagagtcccttc

SEQ ID NO: 3183791 - DNA, 25 bp, Homo sapien
catttaattggcatgggctgtgacc

SEQ ID NO: 3183792 - DNA, 25 bp, Homo sapien
ccacgtggttagtggtaccatggtg

SEQ ID NO: 3183793 - DNA, 25 bp, Homo sapien
cattcaggaaacatgatggttcacc

SEQ ID NO: 3183794 - DNA, 25 bp, Homo sapien
gtaccatggtgaccccacttcctgt

SEQ ID NO: 3183795 - DNA, 25 bp, Homo sapien
tgactacagtcaaaccaggtacagg

SEQ ID NO: 3183796 - DNA, 25 bp, Homo sapien
tacttccaagtattctgatatttat

SEQ ID NO: 3183797 - DNA, 25 bp, Homo sapien
tcacatcataggcacctgataatca

SEQ ID NO: 3183798 - DNA, 25 bp, Homo sapien
gataatcaggaactcctactattag

SEQ ID NO: 3183799 - DNA, 25 bp, Homo sapien
taggcacctgataatcaggaactcc

SEQ ID NO: 3183800 - DNA, 25 bp, Homo sapien
aatacacctgctttatgcacttgag

SEQ ID NO: 3183801 - DNA, 25 bp, Homo sapien
cagggaagaaatccacaaggactca

SEQ ID NO: 3183802 - DNA, 25 bp, Homo sapien
agggaagaaatccacaaggactcac

SEQ ID NO: 3183803 - DNA, 25 bp, Homo sapien
cacctgctttatgcacttgagcagg

SEQ ID NO: 3183804 - DNA, 25 bp, Homo sapien
tctgccaggtcccaaaaagcatgcc

SEQ ID NO: 3183805 - DNA, 25 bp, Homo sapien
caaagctggagcttaatgcagataa

SEQ ID NO: 3183806 - DNA, 25 bp, Homo sapien
gaatgaccactgtgggactaagaga

SEQ ID NO: 3183807 - DNA, 25 bp, Homo sapien
caaaaatgcttagcagggtgagcac

SEQ ID NO: 3183808 - DNA, 25 bp, Homo sapien
tctcttatgttatctatttcactag

SEQ ID NO: 3183809 - DNA, 25 bp, Homo sapien
ctctctgtccttcgttttcagaagt

SEQ ID NO: 3183810 - DNA, 25 bp, Homo sapien
ttcactagatattttctcattcaca

SEQ ID NO: 3183811 - DNA, 25 bp, Homo sapien
attctctctgtccttcgttttcaga

SEQ ID NO: 3183812 - DNA, 25 bp, Homo sapien
ttctgtttatgactggtctcacatt

SEQ ID NO: 3183813 - DNA, 25 bp, Homo sapien
tttctcttatccgattgctctaaga

SEQ ID NO: 3183814 - DNA, 25 bp, Homo sapien
tatgactggtctcacatttattgac

SEQ ID NO: 3183815 - DNA, 25 bp, Homo sapien
tcttatccgattgctctaagacttg

SEQ ID NO: 3183816 - DNA, 25 bp, Homo sapien
gatctgcgggtaggcacatctccgt

SEQ ID NO: 3183817 - DNA, 25 bp, Homo sapien
catctaggatctgcgggtaggcaca

SEQ ID NO: 3183818 - DNA, 25 bp, Homo sapien
tctgttgcaaacatggccatctagg

SEQ ID NO: 3183819 - DNA, 25 bp, Homo sapien
ggcacatctccgtctttgatctcag

SEQ ID NO: 3183820 - DNA, 25 bp, Homo sapien
ggagtcacatcttcgcactgctcat

SEQ ID NO: 3183821 - DNA, 25 bp, Homo sapien
ggctttggagtcacatcttcgcact

SEQ ID NO: 3183822 - DNA, 25 bp, Homo sapien
gttacagtattctttgtcaggccca

SEQ ID NO: 3183823 - DNA, 25 bp, Homo sapien
aattatggacctctgcggaaaagaa

SEQ ID NO: 3183824 - DNA, 25 bp, Homo sapien
tgctaattgagtagggattgatggc

SEQ ID NO: 3183825 - DNA, 25 bp, Homo sapien
taattgagtagggattgatggcttt

SEQ ID NO: 3183826 - DNA, 25 bp, Homo sapien
attgagtagggattgatggctttga

SEQ ID NO: 3183827 - DNA, 25 bp, Homo sapien
aatgctaattgagtagggattgatg

SEQ ID NO: 3183828 - DNA, 25 bp, Homo sapien
tgcaagaccagcaagtatttccgct

SEQ ID NO: 3183829 - DNA, 25 bp, Homo sapien
catgctcttcttggcaggattccag

SEQ ID NO: 3183830 - DNA, 25 bp, Homo sapien
tcccttcacaggaggaatgtaagca

SEQ ID NO: 3183831 - DNA, 25 bp, Homo sapien
tatttccgctccctcgacatcttgg

SEQ ID NO: 3183832 - DNA, 25 bp, Homo sapien
ttttatattgcgacaaacataccat

SEQ ID NO: 3183833 - DNA, 25 bp, Homo sapien
tacttttatattgcgacaaacatac

SEQ ID NO: 3183834 - DNA, 25 bp, Homo sapien
tagatacttttatattgcgacaaac

SEQ ID NO: 3183835 - DNA, 25 bp, Homo sapien
tttagatacttttatattgcgacaa

SEQ ID NO: 3183836 - DNA, 25 bp, Homo sapien
taacatcatcatgggacactacctg

SEQ ID NO: 3183837 - DNA, 25 bp, Homo sapien
catcatcatgggacactacctgttg

SEQ ID NO: 3183838 - DNA, 25 bp, Homo sapien
tcatcatgggacactacctgttgct

SEQ ID NO: 3183839 - DNA, 25 bp, Homo sapien
catcatgggacactacctgttgctg

SEQ ID NO: 3183840 - DNA, 25 bp, Homo sapien
gagcagaaatcttgccactgcacag

SEQ ID NO: 3183841 - DNA, 25 bp, Homo sapien
cacagcagcctaggcgacaagagca

SEQ ID NO: 3183842 - DNA, 25 bp, Homo sapien
aggtcaagacgggtggatgacctga

SEQ ID NO: 3183843 - DNA, 25 bp, Homo sapien
cagaaatcttgccactgcacagcag

SEQ ID NO: 3183844 - DNA, 25 bp, Homo sapien
tcctggtaaaggaggtagctgtctc

SEQ ID NO: 3183845 - DNA, 25 bp, Homo sapien
gacccttttacttgccctgaacata

SEQ ID NO: 3183846 - DNA, 25 bp, Homo sapien
tttagtcatcgaatcccagtggagg

SEQ ID NO: 3183847 - DNA, 25 bp, Homo sapien
catttacaagtagtgaaggtccaag

SEQ ID NO: 3183848 - DNA, 25 bp, Homo sapien
ccatactagatgtgctaccagagca

SEQ ID NO: 3183849 - DNA, 25 bp, Homo sapien
taaattatcaattctttcaggcaag

SEQ ID NO: 3183850 - DNA, 25 bp, Homo sapien
taatatgggaacctacctcttagtg

SEQ ID NO: 3183851 - DNA, 25 bp, Homo sapien
tttgaatcccaacactccatactag

SEQ ID NO: 3183852 - DNA, 25 bp, Homo sapien
tacttaccctagctgaatccaacaa

SEQ ID NO: 3183853 - DNA, 25 bp, Homo sapien
cctattctgctggagtcaaattacg

SEQ ID NO: 3183854 - DNA, 25 bp, Homo sapien
ctggaatggagcaccttttctaaac

SEQ ID NO: 3183855 - DNA, 25 bp, Homo sapien
ggctaagaagttttcactggatgcg

SEQ ID NO: 3183856 - DNA, 25 bp, Homo sapien
catgtggaatgtatagcataggtga

SEQ ID NO: 3183857 - DNA, 25 bp, Homo sapien
gttgctttagcctgtagattcaccc

SEQ ID NO: 3183858 - DNA, 25 bp, Homo sapien
caacaatttttcttgatcatgtgga

SEQ ID NO: 3183859 - DNA, 25 bp, Homo sapien
taactaggacattgccataccatca

SEQ ID NO: 3183860 - DNA, 25 bp, Homo sapien
cctgtgattttaggccatgaggcag

SEQ ID NO: 3183861 - DNA, 25 bp, Homo sapien
tggctgtaggaatctgtcacacaga

SEQ ID NO: 3183862 - DNA, 25 bp, Homo sapien
gatgaccacgtggttagtggcaacc

SEQ ID NO: 3183863 - DNA, 25 bp, Homo sapien
cacgtggttagtggcaacctggtga

SEQ ID NO: 3183864 - DNA, 25 bp, Homo sapien
cctaaggcttatgaagttcgcatta

SEQ ID NO: 3183865 - DNA, 25 bp, Homo sapien
cacctcctaaggcttatgaagttcg

SEQ ID NO: 3183866 - DNA, 25 bp, Homo sapien
ttttccattgaggatgtggaggttg

SEQ ID NO: 3183867 - DNA, 25 bp, Homo sapien
aggttgcacctcctaaggcttatga

SEQ ID NO: 3183868 - DNA, 25 bp, Homo sapien
gggtccattatgatacaattcaggg

SEQ ID NO: 3183869 - DNA, 25 bp, Homo sapien
tctgcattgtgtgacaaacaggctc

SEQ ID NO: 3183870 - DNA, 25 bp, Homo sapien
caatttaaaggttctgaggcttctc

SEQ ID NO: 3183871 - DNA, 25 bp, Homo sapien
caatttgaatcacttagcactagga

SEQ ID NO: 3183872 - DNA, 25 bp, Homo sapien
gaaacaatacagatgccttcccttg

SEQ ID NO: 3183873 - DNA, 25 bp, Homo sapien
tgcagtatccgtaccgtcctgacgt

SEQ ID NO: 3183874 - DNA, 25 bp, Homo sapien
cttgacccaaatgcatagggatggg

SEQ ID NO: 3183875 - DNA, 25 bp, Homo sapien
cacagagagattttcactaagtcac

SEQ ID NO: 3183876 - DNA, 25 bp, Homo sapien
aaccagaagacactattgagcaaca

SEQ ID NO: 3183877 - DNA, 25 bp, Homo sapien
catgacttggtcaaaatcatcaggt

SEQ ID NO: 3183878 - DNA, 25 bp, Homo sapien
ggcaaatagagatgaccaaaaccag

SEQ ID NO: 3183879 - DNA, 25 bp, Homo sapien
caaacaacgctcagtgtcagtctca

SEQ ID NO: 3183880 - DNA, 25 bp, Homo sapien
tatgacattatctccttctaagacc

SEQ ID NO: 3183881 - DNA, 25 bp, Homo sapien
tggccagagaaatatcgatcaagat

SEQ ID NO: 3183882 - DNA, 25 bp, Homo sapien
aacattcatatgattggtggccaga

SEQ ID NO: 3183883 - DNA, 25 bp, Homo sapien
taagaccttcttctcaattgacccg

SEQ ID NO: 3183884 - DNA, 25 bp, Homo sapien
catatgggtacacaaggctatttgc

SEQ ID NO: 3183885 - DNA, 25 bp, Homo sapien
tgatacagtagaattgcaagtccct

SEQ ID NO: 3183886 - DNA, 25 bp, Homo sapien
tttaaagtcttgtgagcacctggga

SEQ ID NO: 3183887 - DNA, 25 bp, Homo sapien
cggtcctgacgttttgagatccaaa

SEQ ID NO: 3183888 - DNA, 25 bp, Homo sapien
gtgactgagttcctggcaaagaaat

SEQ ID NO: 3183889 - DNA, 25 bp, Homo sapien
gacctggaccagttgataactcatg

SEQ ID NO: 3183890 - DNA, 25 bp, Homo sapien
tcagtgaaggatttgagctgctcaa

SEQ ID NO: 3183891 - DNA, 25 bp, Homo sapien
gatgtcccaaaactagtgactgagt

SEQ ID NO: 3183892 - DNA, 25 bp, Homo sapien
ttcactggacgcacatggaagggat

SEQ ID NO: 3183893 - DNA, 25 bp, Homo sapien
gccaagatgctcacctatgacccga

SEQ ID NO: 3183894 - DNA, 25 bp, Homo sapien
catgaactatgggaccagcgtggtt

SEQ ID NO: 3183895 - DNA, 25 bp, Homo sapien
tgatgccctggcatcctgccacatg

SEQ ID NO: 3183896 - DNA, 25 bp, Homo sapien
cagctggtgcatctaggatcattgg

SEQ ID NO: 3183897 - DNA, 25 bp, Homo sapien
aacccatcagtgaggtgctgtcaga

SEQ ID NO: 3183898 - DNA, 25 bp, Homo sapien
gagtgtatcagtcccaaggactcta

SEQ ID NO: 3183899 - DNA, 25 bp, Homo sapien
tcagaaatgacaggcaacaacgtgg

SEQ ID NO: 3183900 - DNA, 25 bp, Homo sapien
tggagtactggctgatggcaccacc

SEQ ID NO: 3183901 - DNA, 25 bp, Homo sapien
gctcctcctgagaaagtctgtttaa

SEQ ID NO: 3183902 - DNA, 25 bp, Homo sapien
gatatggcgctgctgttaaaactgg

SEQ ID NO: 3183903 - DNA, 25 bp, Homo sapien
tggcaccaccagatttacatgcaag

SEQ ID NO: 3183904 - DNA, 25 bp, Homo sapien
tgtcgcaacccagatggcaaccttt

SEQ ID NO: 3183905 - DNA, 25 bp, Homo sapien
tctgccacaatgtagagaatgcaat

SEQ ID NO: 3183906 - DNA, 25 bp, Homo sapien
gaatgcaatgcttgtcgcaacccag

SEQ ID NO: 3183907 - DNA, 25 bp, Homo sapien
gatggcaacctttgcattaggagcg

SEQ ID NO: 3183908 - DNA, 25 bp, Homo sapien
tttccagtgattgtgggacatgagg

SEQ ID NO: 3183909 - DNA, 25 bp, Homo sapien
ccaagtttccagtgattgtgggaca

SEQ ID NO: 3183910 - DNA, 25 bp, Homo sapien
gtccaagtttccagtgattgtggga

SEQ ID NO: 3183911 - DNA, 25 bp, Homo sapien
agtttccagtgattgtgggacatga

SEQ ID NO: 3183912 - DNA, 25 bp, Homo sapien
ccaccaaagactaaagaagttcgca

SEQ ID NO: 3183913 - DNA, 25 bp, Homo sapien
gaggaaatagaagttgccccaccaa

SEQ ID NO: 3183914 - DNA, 25 bp, Homo sapien
tagaagttgccccaccaaagactaa

SEQ ID NO: 3183915 - DNA, 25 bp, Homo sapien
accaaagactaaagaagttcgcatt

SEQ ID NO: 3183916 - DNA, 25 bp, Homo sapien
acaaagacaggatgggcactgctgg

SEQ ID NO: 3183917 - DNA, 25 bp, Homo sapien
cagaaaaagtctatgtttgcagaaa

SEQ ID NO: 3183918 - DNA, 25 bp, Homo sapien
caaagacaggatgggcactgctgga

SEQ ID NO: 3183919 - DNA, 25 bp, Homo sapien
gaactgagcatcagtcagaaaaagt

SEQ ID NO: 3183920 - DNA, 25 bp, Homo sapien
tggctccctggttgttaagatatgt

SEQ ID NO: 3183921 - DNA, 25 bp, Homo sapien
ggtagagacagaccaatctcgaacg

SEQ ID NO: 3183922 - DNA, 25 bp, Homo sapien
tcttactccaaggagcctgtgtggc

SEQ ID NO: 3183923 - DNA, 25 bp, Homo sapien
tcaagtctgttgataccctcccagc

SEQ ID NO: 3183924 - DNA, 25 bp, Homo sapien
ctaacttgattgacctcacttccag

SEQ ID NO: 3183925 - DNA, 25 bp, Homo sapien
cactgttgtcacaaaagtttttggg

SEQ ID NO: 3183926 - DNA, 25 bp, Homo sapien
ttcactgttgtcacaaaagtttttg

SEQ ID NO: 3183927 - DNA, 25 bp, Homo sapien
tttggggtctaacttgattgacctc

SEQ ID NO: 3183928 - DNA, 25 bp, Homo sapien
tctagccataatatggctgcctttg

SEQ ID NO: 3183929 - DNA, 25 bp, Homo sapien
gcctttgccctcgatctgaagagca

SEQ ID NO: 3183930 - DNA, 25 bp, Homo sapien
tgccctcgatctgaagagcagatgt

SEQ ID NO: 3183931 - DNA, 25 bp, Homo sapien
tagccataatatggctgcctttgcc

SEQ ID NO: 3183932 - DNA, 25 bp, Homo sapien
ctttgatgtggcagactcttctggg

SEQ ID NO: 3183933 - DNA, 25 bp, Homo sapien
tttgatgtggcagactcttctggga

SEQ ID NO: 3183934 - DNA, 25 bp, Homo sapien
tgatgtggcagactcttctgggatg

SEQ ID NO: 3183935 - DNA, 25 bp, Homo sapien
atgtggcagactcttctgggatgag

SEQ ID NO: 3183936 - DNA, 25 bp, Homo sapien
taagttcctatttgagactcagaca

SEQ ID NO: 3183937 - DNA, 25 bp, Homo sapien
ccaatgtgcatctctactcctaagt

SEQ ID NO: 3183938 - DNA, 25 bp, Homo sapien
tattctaggtttgggactgtgggca

SEQ ID NO: 3183939 - DNA, 25 bp, Homo sapien
tttggatgcctgatgttactacaca

SEQ ID NO: 3183940 - DNA, 25 bp, Homo sapien
tggcgacattcctcttacagggctc

SEQ ID NO: 3183941 - DNA, 25 bp, Homo sapien
gcaattggcaaatggtatcctgttc

SEQ ID NO: 3183942 - DNA, 25 bp, Homo sapien
cgtggaggcactttggcaccgtttg

SEQ ID NO: 3183943 - DNA, 25 bp, Homo sapien
taagtagttagactggccaactccc

SEQ ID NO: 3183944 - DNA, 25 bp, Homo sapien
taattactaagggattctcactgga

SEQ ID NO: 3183945 - DNA, 25 bp, Homo sapien
ttaattactaagggattctcactgg

SEQ ID NO: 3183946 - DNA, 25 bp, Homo sapien
aattactaagggattctcactggaa

SEQ ID NO: 3183947 - DNA, 25 bp, Homo sapien
tttaattactaagggattctcactg

SEQ ID NO: 3183948 - DNA, 25 bp, Homo sapien
agtagagcatgcctttggaggtgat

SEQ ID NO: 3183949 - DNA, 25 bp, Homo sapien
caggagtagagcatgcctttggagg

SEQ ID NO: 3183950 - DNA, 25 bp, Homo sapien
ggagtagagcatgcctttggaggtg

SEQ ID NO: 3183951 - DNA, 25 bp, Homo sapien
gccaggagtagagcatgcctttgga

SEQ ID NO: 3183952 - DNA, 25 bp, Homo sapien
cacatcattcttggtacttgtcatc

SEQ ID NO: 3183953 - DNA, 25 bp, Homo sapien
ttcacatcattcttggtacttgtca

SEQ ID NO: 3183954 - DNA, 25 bp, Homo sapien
tatttcctgatccagatagtttggt

SEQ ID NO: 3183955 - DNA, 25 bp, Homo sapien
tagtttggtatgcaaatggtgtttg

SEQ ID NO: 3183956 - DNA, 25 bp, Homo sapien
tgtcttgcaactctcactgatgata

SEQ ID NO: 3183957 - DNA, 25 bp, Homo sapien
tcctataggagcattcgagccagca

SEQ ID NO: 3183958 - DNA, 25 bp, Homo sapien
tacctctaggtatgggaaaactcaa

SEQ ID NO: 3183959 - DNA, 25 bp, Homo sapien
gaaaactcaaggcaaccagggtctg

SEQ ID NO: 3183960 - DNA, 25 bp, Homo sapien
cttttgaagttgcatgaagcagcca

SEQ ID NO: 3183961 - DNA, 25 bp, Homo sapien
aaaatgctacagagctttgccagga

SEQ ID NO: 3183962 - DNA, 25 bp, Homo sapien
ccagagaatcagtatgcaaaatgct

SEQ ID NO: 3183963 - DNA, 25 bp, Homo sapien
gaagcagccactgtaaaacttctgc

SEQ ID NO: 3183964 - DNA, 25 bp, Homo sapien
gctgctgccaaagatataaggatac

SEQ ID NO: 3183965 - DNA, 25 bp, Homo sapien
ggctgctgccaaagatataaggata

SEQ ID NO: 3183966 - DNA, 25 bp, Homo sapien
ggcaatttaactgtgggtggtgatt

SEQ ID NO: 3183967 - DNA, 25 bp, Homo sapien
gatccccttctgtatctctggtcag

SEQ ID NO: 3183968 - DNA, 25 bp, Homo sapien
cttctgtgatgagttaacaggttta

SEQ ID NO: 3183969 - DNA, 25 bp, Homo sapien
gtggtgatttaactgtgggtggctt

SEQ ID NO: 3183970 - DNA, 25 bp, Homo sapien
ttcttcagatccttgacttgacact

SEQ ID NO: 3183971 - DNA, 25 bp, Homo sapien
cagtgaaattatttaactccattaa

SEQ ID NO: 3183972 - DNA, 25 bp, Homo sapien
agtgaaattatttaactccattaag

SEQ ID NO: 3183973 - DNA, 25 bp, Homo sapien
ccagtgaaattatttaactccatta

SEQ ID NO: 3183974 - DNA, 25 bp, Homo sapien
tgaaatattctgcaacaggtatttt

SEQ ID NO: 3183975 - DNA, 25 bp, Homo sapien
cttcttataagtagtggaggcttgt

SEQ ID NO: 3183976 - DNA, 25 bp, Homo sapien
ttataagtagtggaggcttgtgctc

SEQ ID NO: 3183977 - DNA, 25 bp, Homo sapien
aaatattctgcaacaggtattttca

SEQ ID NO: 3183978 - DNA, 25 bp, Homo sapien
ccggtgtgttgaaggataacatgct

SEQ ID NO: 3183979 - DNA, 25 bp, Homo sapien
ataacatgctctttggggacagagg

SEQ ID NO: 3183980 - DNA, 25 bp, Homo sapien
tattcttgtatactccttgctgaca

SEQ ID NO: 3183981 - DNA, 25 bp, Homo sapien
cactggttttgctgatccactctcc

SEQ ID NO: 3183982 - DNA, 25 bp, Homo sapien
aaagaattcacccagtctagaactt

SEQ ID NO: 3183983 - DNA, 25 bp, Homo sapien
tgtaaatgtgaagctcatattcatg

SEQ ID NO: 3183984 - DNA, 25 bp, Homo sapien
tgatgatgtaaatgtgaagctcata

SEQ ID NO: 3183985 - DNA, 25 bp, Homo sapien
cataaagaggaccacttgattcctc

SEQ ID NO: 3183986 - DNA, 25 bp, Homo sapien
catttgtctcagtgcacctggctta

SEQ ID NO: 3183987 - DNA, 25 bp, Homo sapien
tatcaggttagcatcatttttgttg

SEQ ID NO: 3183988 - DNA, 25 bp, Homo sapien
cttattgtatagtgtagacagtgcg

SEQ ID NO: 3183989 - DNA, 25 bp, Homo sapien
tagacagtgcgagttggtagatatc

SEQ ID NO: 3183990 - DNA, 25 bp, Homo sapien
gtgaacaaagggcttttcgctcctc

SEQ ID NO: 3183991 - DNA, 25 bp, Homo sapien
cctctgcccaaaaggcttgacaact

SEQ ID NO: 3183992 - DNA, 25 bp, Homo sapien
gcccaaaaggcttgacaactgaagt

SEQ ID NO: 3183993 - DNA, 25 bp, Homo sapien
gcttttcgctcctccacgtttagtc

SEQ ID NO: 3183994 - DNA, 25 bp, Homo sapien
ggctgacgtcgctgaactctctgaa

SEQ ID NO: 3183995 - DNA, 25 bp, Homo sapien
ctgcaaagggctgacgtcgctgaac

SEQ ID NO: 3183996 - DNA, 25 bp, Homo sapien
tttttcctgcaaagggctgacgtcg

SEQ ID NO: 3183997 - DNA, 25 bp, Homo sapien
gggctgacgtcgctgaactctctga

SEQ ID NO: 3183998 - DNA, 25 bp, Homo sapien
tctgtactctaaagggccggaaagc

SEQ ID NO: 3183999 - DNA, 25 bp, Homo sapien
cggaaagcgtgttatggccctgcca

SEQ ID NO: 3184000 - DNA, 25 bp, Homo sapien
tttgcaaagaatcagtgggaaatct

SEQ ID NO: 3184001 - DNA, 25 bp, Homo sapien
cacttcgtggctagagaccgtgggc

SEQ ID NO: 3184002 - DNA, 25 bp, Homo sapien
tctgaaatgcgtttgctggctggga

SEQ ID NO: 3184003 - DNA, 25 bp, Homo sapien
gctgctccctggttcgccagagaca

SEQ ID NO: 3184004 - DNA, 25 bp, Homo sapien
tagaagggatagtgggcgaggctcc

SEQ ID NO: 3184005 - DNA, 25 bp, Homo sapien
gcttaatcccgtctctgaaatgcgt

SEQ ID NO: 3184006 - DNA, 25 bp, Homo sapien
cctactagcaacaagggcttccggg

SEQ ID NO: 3184007 - DNA, 25 bp, Homo sapien
tatggtattctctggacgcaaaggg

SEQ ID NO: 3184008 - DNA, 25 bp, Homo sapien
taagtgtcctggcactggttggcgc

SEQ ID NO: 3184009 - DNA, 25 bp, Homo sapien
aaggaagcgtgagccgtaaccaggc

SEQ ID NO: 3184010 - DNA, 25 bp, Homo sapien
gaaatggccgcagttcgatgacgta

SEQ ID NO: 3184011 - DNA, 25 bp, Homo sapien
gtagcctccactgcgtaactaccgc

SEQ ID NO: 3184012 - DNA, 25 bp, Homo sapien
acgtaagacgcaaccgccgtagcct

SEQ ID NO: 3184013 - DNA, 25 bp, Homo sapien
ctttcttccattgcgggttcgaaat

SEQ ID NO: 3184014 - DNA, 25 bp, Homo sapien
cactcccaaaacactaactccagac

SEQ ID NO: 3184015 - DNA, 25 bp, Homo sapien
aggagcctttcttcgttgttttgca

SEQ ID NO: 3184016 - DNA, 25 bp, Homo sapien
tcttgaacgggaaaaaacagacatc

SEQ ID NO: 3184017 - DNA, 25 bp, Homo sapien
gaatacacgtctgcaggtacacact

SEQ ID NO: 3184018 - DNA, 25 bp, Homo sapien
tgcatttttaacagtgggactatct

SEQ ID NO: 3184019 - DNA, 25 bp, Homo sapien
agccagtcttctattcaagatgcaa

SEQ ID NO: 3184020 - DNA, 25 bp, Homo sapien
aattctttctatatgagaagccagt

SEQ ID NO: 3184021 - DNA, 25 bp, Homo sapien
gccagtcttctattcaagatgcaaa

SEQ ID NO: 3184022 - DNA, 25 bp, Homo sapien
agtcttctattcaagatgcaaacct

SEQ ID NO: 3184023 - DNA, 25 bp, Homo sapien
aaaatttaagggcttatggcaagag

SEQ ID NO: 3184024 - DNA, 25 bp, Homo sapien
gactcacaacagtgttatagctgat

SEQ ID NO: 3184025 - DNA, 25 bp, Homo sapien
tcacaacagtgttatagctgataca

SEQ ID NO: 3184026 - DNA, 25 bp, Homo sapien
ttaagggcttatggcaagagtgact

SEQ ID NO: 3184027 - DNA, 25 bp, Homo sapien
gccagcctgaatttaatgacctaca

SEQ ID NO: 3184028 - DNA, 25 bp, Homo sapien
tttgccctcatatggaggcagctga

SEQ ID NO: 3184029 - DNA, 25 bp, Homo sapien
taacagatcagaagtggatccagac

SEQ ID NO: 3184030 - DNA, 25 bp, Homo sapien
gatccagacttttttgccagtgctc

SEQ ID NO: 3184031 - DNA, 25 bp, Homo sapien
gagaagtggactctttcaatggcag

SEQ ID NO: 3184032 - DNA, 25 bp, Homo sapien
agaagtggactctttcaatggcagc

SEQ ID NO: 3184033 - DNA, 25 bp, Homo sapien
acagaagctgaatatgaggaaatga

SEQ ID NO: 3184034 - DNA, 25 bp, Homo sapien
cagaagctgaatatgaggaaatgaa

SEQ ID NO: 3184035 - DNA, 25 bp, Homo sapien
agaagctgaatatgaggaaatgaag

SEQ ID NO: 3184036 - DNA, 25 bp, Homo sapien
tctgaggatttaccaaacagttgca

SEQ ID NO: 3184037 - DNA, 25 bp, Homo sapien
tcagttgttacaagggcaaagaatc

SEQ ID NO: 3184038 - DNA, 25 bp, Homo sapien
agatgagttttgaggcaatgaggca

SEQ ID NO: 3184039 - DNA, 25 bp, Homo sapien
ggtaaactcttcacaagttgtttgc

SEQ ID NO: 3184040 - DNA, 25 bp, Homo sapien
caattcagtttacctagcccaaaga

SEQ ID NO: 3184041 - DNA, 25 bp, Homo sapien
agtagaggacccaccaggaattggt

SEQ ID NO: 3184042 - DNA, 25 bp, Homo sapien
tacaaatctgtactgtgagccaaga

SEQ ID NO: 3184043 - DNA, 25 bp, Homo sapien
catttcagcgttgcacatatgtaac

SEQ ID NO: 3184044 - DNA, 25 bp, Homo sapien
tcaggattcctccatagtaaggcca

SEQ ID NO: 3184045 - DNA, 25 bp, Homo sapien
taaggccacatccacgttggaggaa

SEQ ID NO: 3184046 - DNA, 25 bp, Homo sapien
gcagttttcctttgccccgatcaag

SEQ ID NO: 3184047 - DNA, 25 bp, Homo sapien
tacgtgagcttgtacagccggtcat

SEQ ID NO: 3184048 - DNA, 25 bp, Homo sapien
atttggatcaactggtcatcatcac

SEQ ID NO: 3184049 - DNA, 25 bp, Homo sapien
ctggagtaacagaaagaaagctgtt

SEQ ID NO: 3184050 - DNA, 25 bp, Homo sapien
aaaaaacttcctatatctgtcttca

SEQ ID NO: 3184051 - DNA, 25 bp, Homo sapien
ggagtaacagaaagaaagctgttaa

SEQ ID NO: 3184052 - DNA, 25 bp, Homo sapien
aacttcctatatctgtcttcatcag

SEQ ID NO: 3184053 - DNA, 25 bp, Homo sapien
agatgaaggagcgtaggtctttgca

SEQ ID NO: 3184054 - DNA, 25 bp, Homo sapien
tttccatggattagatgaaggagcg

SEQ ID NO: 3184055 - DNA, 25 bp, Homo sapien
ggagcgtaggtctttgcagagcttc

SEQ ID NO: 3184056 - DNA, 25 bp, Homo sapien
ctttcccattattttagatgggctt

SEQ ID NO: 3184057 - DNA, 25 bp, Homo sapien
tggagaaaaagttgtggaatctaaa

SEQ ID NO: 3184058 - DNA, 25 bp, Homo sapien
atgaagttggagaaaaagttgtgga

SEQ ID NO: 3184059 - DNA, 25 bp, Homo sapien
agttggagaaaaagttgtggaatct

SEQ ID NO: 3184060 - DNA, 25 bp, Homo sapien
agggaagaaaaatatgaagttggag

SEQ ID NO: 3184061 - DNA, 25 bp, Homo sapien
taaatgtaagggaactcagggcatt

SEQ ID NO: 3184062 - DNA, 25 bp, Homo sapien
gaatcaagccataagtaatgcacac

SEQ ID NO: 3184063 - DNA, 25 bp, Homo sapien
taatctcagttggatcatttcagtc

SEQ ID NO: 3184064 - DNA, 25 bp, Homo sapien
tgatgacttgctttgttacattacg

SEQ ID NO: 3184065 - DNA, 25 bp, Homo sapien
cactgcctcattttgatatgagtag

SEQ ID NO: 3184066 - DNA, 25 bp, Homo sapien
ctcattggtggttccagagcttaac

SEQ ID NO: 3184067 - DNA, 25 bp, Homo sapien
ggctagccagacctctcttgatatt

SEQ ID NO: 3184068 - DNA, 25 bp, Homo sapien
actgtgtctgaaataggctagccag

SEQ ID NO: 3184069 - DNA, 25 bp, Homo sapien
gggtcgtaaatccagacctcgctat

SEQ ID NO: 3184070 - DNA, 25 bp, Homo sapien
tgatgagcctggtaggtcactttac

SEQ ID NO: 3184071 - DNA, 25 bp, Homo sapien
gaatccaaggccttaattttgatca

SEQ ID NO: 3184072 - DNA, 25 bp, Homo sapien
gctattttgcatgaatccaaggcct

SEQ ID NO: 3184073 - DNA, 25 bp, Homo sapien
gctgtcttctatcttataggtggtg

SEQ ID NO: 3184074 - DNA, 25 bp, Homo sapien
ttcagcaagcacagctataacaaag

SEQ ID NO: 3184075 - DNA, 25 bp, Homo sapien
cttataggtggtgacagatgtagct

SEQ ID NO: 3184076 - DNA, 25 bp, Homo sapien
tagcttttgaactgacacccaagac

SEQ ID NO: 3184077 - DNA, 25 bp, Homo sapien
ggccgtgtactttgaatcaactgct

SEQ ID NO: 3184078 - DNA, 25 bp, Homo sapien
gaaggacatcctttacagtggctct

SEQ ID NO: 3184079 - DNA, 25 bp, Homo sapien
aatcttgggcctgcttcggttgtct

SEQ ID NO: 3184080 - DNA, 25 bp, Homo sapien
cacaatgggaatggccgtgtacttt

SEQ ID NO: 3184081 - DNA, 25 bp, Homo sapien
gtatttcctggtggaccgccagagc

SEQ ID NO: 3184082 - DNA, 25 bp, Homo sapien
agcctcagccttggaaaggttgtca

SEQ ID NO: 3184083 - DNA, 25 bp, Homo sapien
ttctttcttcgcagtcctgaggtgc

SEQ ID NO: 3184084 - DNA, 25 bp, Homo sapien
tgcaggtatttcctggtggaccgcc

SEQ ID NO: 3184085 - DNA, 25 bp, Homo sapien
aacctctcctggaggataatgctgc

SEQ ID NO: 3184086 - DNA, 25 bp, Homo sapien
tccaaaatggcttctaatgagtctg

SEQ ID NO: 3184087 - DNA, 25 bp, Homo sapien
gagaagcaaatccacaggcatagag

SEQ ID NO: 3184088 - DNA, 25 bp, Homo sapien
tggcttctaatgagtctgaggtctg

SEQ ID NO: 3184089 - DNA, 25 bp, Homo sapien
ctctgatgtcactgctaccaataga

SEQ ID NO: 3184090 - DNA, 25 bp, Homo sapien
gacaagtgtcccagtgatgatcata

SEQ ID NO: 3184091 - DNA, 25 bp, Homo sapien
gctaccaatagaacctttgaactta

SEQ ID NO: 3184092 - DNA, 25 bp, Homo sapien
ttctgacacaactttctgacaagtg

SEQ ID NO: 3184093 - DNA, 25 bp, Homo sapien
gcttctgcatacttcagaagacttg

SEQ ID NO: 3184094 - DNA, 25 bp, Homo sapien
tggagagcagtggtagccaggtggc

SEQ ID NO: 3184095 - DNA, 25 bp, Homo sapien
agggagatcatatctctggagagca

SEQ ID NO: 3184096 - DNA, 25 bp, Homo sapien
gtagccaggtggctgatgggccctt

SEQ ID NO: 3184097 - DNA, 25 bp, Homo sapien
gggaagctccccaatagacagcagg

SEQ ID NO: 3184098 - DNA, 25 bp, Homo sapien
gcagtgcgcacagtcttttcatgaa

SEQ ID NO: 3184099 - DNA, 25 bp, Homo sapien
ggatgttcttgacgtccatgtagga

SEQ ID NO: 3184100 - DNA, 25 bp, Homo sapien
cgtaggatgtcttgaacaatggcga

SEQ ID NO: 3184101 - DNA, 25 bp, Homo sapien
aattgtgagcgaccatttccttcag

SEQ ID NO: 3184102 - DNA, 25 bp, Homo sapien
catttccttcagaactcgacggaca

SEQ ID NO: 3184103 - DNA, 25 bp, Homo sapien
cttcagaactcgacggacaattttg

SEQ ID NO: 3184104 - DNA, 25 bp, Homo sapien
tggagaaacggtcataattgtgagc

SEQ ID NO: 3184105 - DNA, 25 bp, Homo sapien
taactgtaatttaatagcagttcca

SEQ ID NO: 3184106 - DNA, 25 bp, Homo sapien
cacacaataactgtaatttaatagc

SEQ ID NO: 3184107 - DNA, 25 bp, Homo sapien
ctgatgacacacaataactgtaatt

SEQ ID NO: 3184108 - DNA, 25 bp, Homo sapien
aatgctaagttgtggggtatggaag

SEQ ID NO: 3184109 - DNA, 25 bp, Homo sapien
tggctaccgtgaagaccagccttcc

SEQ ID NO: 3184110 - DNA, 25 bp, Homo sapien
tgccagaacccgagtagagaatgtc

SEQ ID NO: 3184111 - DNA, 25 bp, Homo sapien
tctaggctgtaagtagatgccgaac

SEQ ID NO: 3184112 - DNA, 25 bp, Homo sapien
gccttcccaatgtactgaaagatgt

SEQ ID NO: 3184113 - DNA, 25 bp, Homo sapien
cccattccatgtcaaacttttctcc

SEQ ID NO: 3184114 - DNA, 25 bp, Homo sapien
gttcatgacgcaagctccctgcctg

SEQ ID NO: 3184115 - DNA, 25 bp, Homo sapien
atgttcatgacgcaagctccctgcc

SEQ ID NO: 3184116 - DNA, 25 bp, Homo sapien
taatgttcatgacgcaagctccctg

SEQ ID NO: 3184117 - DNA, 25 bp, Homo sapien
atataatgttcatgacgcaagctcc

SEQ ID NO: 3184118 - DNA, 25 bp, Homo sapien
tagggtcgccagatgctgacagcat

SEQ ID NO: 3184119 - DNA, 25 bp, Homo sapien
caaagaggatggctgacataccagc

SEQ ID NO: 3184120 - DNA, 25 bp, Homo sapien
taccagcataggagtcaaggttctc

SEQ ID NO: 3184121 - DNA, 25 bp, Homo sapien
ggtggctgcgattaaggcttccagt

SEQ ID NO: 3184122 - DNA, 25 bp, Homo sapien
tttccaatggcacatttgacctcct

SEQ ID NO: 3184123 - DNA, 25 bp, Homo sapien
ttttagactcacgataccacaagct

SEQ ID NO: 3184124 - DNA, 25 bp, Homo sapien
tatcaatagctagaccaccctggac

SEQ ID NO: 3184125 - DNA, 25 bp, Homo sapien
caccctggacctctatattggcttt

SEQ ID NO: 3184126 - DNA, 25 bp, Homo sapien
aactccattgcacctgaaatatcaa

SEQ ID NO: 3184127 - DNA, 25 bp, Homo sapien
tccccactgaagacaacaaaagagg

SEQ ID NO: 3184128 - DNA, 25 bp, Homo sapien
taggtactgacctgctcataagaag

SEQ ID NO: 3184129 - DNA, 25 bp, Homo sapien
tcttggctgagtcatattaggtact

SEQ ID NO: 3184130 - DNA, 25 bp, Homo sapien
gtggaataccaaaagaagatgaacc

SEQ ID NO: 3184131 - DNA, 25 bp, Homo sapien
gagataaactccaagcctgcttctg

SEQ ID NO: 3184132 - DNA, 25 bp, Homo sapien
tctgcatgcaaactaagaatgggta

SEQ ID NO: 3184133 - DNA, 25 bp, Homo sapien
tcacaaaagaggagtccactgtgat

SEQ ID NO: 3184134 - DNA, 25 bp, Homo sapien
ctgtgatgtcagtggttattaccac

SEQ ID NO: 3184135 - DNA, 25 bp, Homo sapien
tgtggacagcctttcgtactttttc

SEQ ID NO: 3184136 - DNA, 25 bp, Homo sapien
cgctggaagtactatccggctgagg

SEQ ID NO: 3184137 - DNA, 25 bp, Homo sapien
gaattcacatcctgctaatacgctt

SEQ ID NO: 3184138 - DNA, 25 bp, Homo sapien
tctcttgatggagcgggaattcaca

SEQ ID NO: 3184139 - DNA, 25 bp, Homo sapien
tcccgtcatgcttaaggaagtccta

SEQ ID NO: 3184140 - DNA, 25 bp, Homo sapien
taaatatgtaaacgctgtgctctca

SEQ ID NO: 3184141 - DNA, 25 bp, Homo sapien
gacgctgtgggtagcatactgcata

SEQ ID NO: 3184142 - DNA, 25 bp, Homo sapien
gaatgtctttggaacaacctcacta

SEQ ID NO: 3184143 - DNA, 25 bp, Homo sapien
aatttacaacaaatagtgggctagc

SEQ ID NO: 3184144 - DNA, 25 bp, Homo sapien
ttattttatcacacttcgttttcaa

SEQ ID NO: 3184145 - DNA, 25 bp, Homo sapien
caaatagtgggctagctaaactttc

SEQ ID NO: 3184146 - DNA, 25 bp, Homo sapien
tgggctagctaaactttcatttcat

SEQ ID NO: 3184147 - DNA, 25 bp, Homo sapien
catgtagcctaattcaaatatcacc

SEQ ID NO: 3184148 - DNA, 25 bp, Homo sapien
tagcagttggttaagtagcagctgg

SEQ ID NO: 3184149 - DNA, 25 bp, Homo sapien
gatgtcgtggacagtaatggaagct

SEQ ID NO: 3184150 - DNA, 25 bp, Homo sapien
ttgaggtaaagtacccatgtagcct

SEQ ID NO: 3184151 - DNA, 25 bp, Homo sapien
gacaacatgtgtccctgagagtcca

SEQ ID NO: 3184152 - DNA, 25 bp, Homo sapien
gtaatgtggtcgtccctctcaaaaa

SEQ ID NO: 3184153 - DNA, 25 bp, Homo sapien
cccagaaagtaatgtggtcgtccct

SEQ ID NO: 3184154 - DNA, 25 bp, Homo sapien
ggaacacctaccaaggtgtctgaca

SEQ ID NO: 3184155 - DNA, 25 bp, Homo sapien
aacaaatattacctgtaggccactc

SEQ ID NO: 3184156 - DNA, 25 bp, Homo sapien
cacatgagccttcttaatccctaac

SEQ ID NO: 3184157 - DNA, 25 bp, Homo sapien
tactctgagtgcatataattggcta

SEQ ID NO: 3184158 - DNA, 25 bp, Homo sapien
gaattaaaatgtcccttgccttgct

SEQ ID NO: 3184159 - DNA, 25 bp, Homo sapien
aatgagaggtctccaaattcacaat

SEQ ID NO: 3184160 - DNA, 25 bp, Homo sapien
agcaaatgagaggtctccaaattca

SEQ ID NO: 3184161 - DNA, 25 bp, Homo sapien
caaatgagaggtctccaaattcaca

SEQ ID NO: 3184162 - DNA, 25 bp, Homo sapien
tgagaggtctccaaattcacaatgg

SEQ ID NO: 3184163 - DNA, 25 bp, Homo sapien
aatccttgtatccacattgaaatta

SEQ ID NO: 3184164 - DNA, 25 bp, Homo sapien
cgttgtacttggagcccacgcaagt

SEQ ID NO: 3184165 - DNA, 25 bp, Homo sapien
tcttgaagcgttgtacttggagccc

SEQ ID NO: 3184166 - DNA, 25 bp, Homo sapien
gaatgttcttgaagcgttgtacttg

SEQ ID NO: 3184167 - DNA, 25 bp, Homo sapien
gagcccacgcaagtcatctgaagga

SEQ ID NO: 3184168 - DNA, 25 bp, Homo sapien
tacgagccactgtgtactccctgtt

SEQ ID NO: 3184169 - DNA, 25 bp, Homo sapien
cacatacggataacacaaattaggg

SEQ ID NO: 3184170 - DNA, 25 bp, Homo sapien
aattaggggcctacactccagcagg

SEQ ID NO: 3184171 - DNA, 25 bp, Homo sapien
tccagcaggagtgtagacttgtaca

SEQ ID NO: 3184172 - DNA, 25 bp, Homo sapien
tcttcctatcaggtttgtacttggt

SEQ ID NO: 3184173 - DNA, 25 bp, Homo sapien
tatcaggtttgtacttggtgcttgg

SEQ ID NO: 3184174 - DNA, 25 bp, Homo sapien
ggtttgtacttggtgcttggcccca

SEQ ID NO: 3184175 - DNA, 25 bp, Homo sapien
tctatcttcctatcaggtttgtact

SEQ ID NO: 3184176 - DNA, 25 bp, Homo sapien
ttgtgaccaaacatagccttgctgt

SEQ ID NO: 3184177 - DNA, 25 bp, Homo sapien
caggaaggtttgcataaaaagggat

SEQ ID NO: 3184178 - DNA, 25 bp, Homo sapien
tcatttgattctgcagatggactcc

SEQ ID NO: 3184179 - DNA, 25 bp, Homo sapien
cataaaaagggattgattttcattt

SEQ ID NO: 3184180 - DNA, 25 bp, Homo sapien
tattctagaagtagaccctttgttc

SEQ ID NO: 3184181 - DNA, 25 bp, Homo sapien
gggaaaggctgagatacatgcacct

SEQ ID NO: 3184182 - DNA, 25 bp, Homo sapien
ttgggaaaggctgagatacatgcac

SEQ ID NO: 3184183 - DNA, 25 bp, Homo sapien
tctagaagtagaccctttgttcaca

SEQ ID NO: 3184184 - DNA, 25 bp, Homo sapien
cttacaagtacccaagtgcccgcct

SEQ ID NO: 3184185 - DNA, 25 bp, Homo sapien
catggggtcttttagacatctgatt

SEQ ID NO: 3184186 - DNA, 25 bp, Homo sapien
cacttacaagtacccaagtgcccgc

SEQ ID NO: 3184187 - DNA, 25 bp, Homo sapien
ggcacttacaagtacccaagtgccc

SEQ ID NO: 3184188 - DNA, 25 bp, Homo sapien
actatattaatcccttttcatgctg

SEQ ID NO: 3184189 - DNA, 25 bp, Homo sapien
tactggcaccaatttactatattaa

SEQ ID NO: 3184190 - DNA, 25 bp, Homo sapien
aatgctccactctactggcaccaat

SEQ ID NO: 3184191 - DNA, 25 bp, Homo sapien
tcagcaatgctccactctactggca

SEQ ID NO: 3184192 - DNA, 25 bp, Homo sapien
cgatgaaccaagtgagctctccttt

SEQ ID NO: 3184193 - DNA, 25 bp, Homo sapien
gcatatttacttaaaacgatgaacc

SEQ ID NO: 3184194 - DNA, 25 bp, Homo sapien
ccttcccaattcattctccacaagg

SEQ ID NO: 3184195 - DNA, 25 bp, Homo sapien
tacttaaaacgatgaaccaagtgag

SEQ ID NO: 3184196 - DNA, 25 bp, Homo sapien
ttaaattttggctccaatgtctctt

SEQ ID NO: 3184197 - DNA, 25 bp, Homo sapien
tagagccacatttgagagtaaggac

SEQ ID NO: 3184198 - DNA, 25 bp, Homo sapien
gagaaaaatctggattggagcagga

SEQ ID NO: 3184199 - DNA, 25 bp, Homo sapien
tggagcaggaaaggacttaacccta

SEQ ID NO: 3184200 - DNA, 25 bp, Homo sapien
gttctgatgtgcaaaggtttagagc

SEQ ID NO: 3184201 - DNA, 25 bp, Homo sapien
ctggttccatgtccatatgaaaccg

SEQ ID NO: 3184202 - DNA, 25 bp, Homo sapien
ttttaagtgtctgggttactctcca

SEQ ID NO: 3184203 - DNA, 25 bp, Homo sapien
tatgaaaccgcatgtattcccattt

SEQ ID NO: 3184204 - DNA, 25 bp, Homo sapien
cttcactttgagtacttttaagtgt

SEQ ID NO: 3184205 - DNA, 25 bp, Homo sapien
tgggtgggatccaggcatatagggg

SEQ ID NO: 3184206 - DNA, 25 bp, Homo sapien
gggtgggatccaggcatataggggg

SEQ ID NO: 3184207 - DNA, 25 bp, Homo sapien
ctgggtgggatccaggcatataggg

SEQ ID NO: 3184208 - DNA, 25 bp, Homo sapien
tcctagcttgtttctggccccagtt

SEQ ID NO: 3184209 - DNA, 25 bp, Homo sapien
tgtccactaataggagtgatgcatg

SEQ ID NO: 3184210 - DNA, 25 bp, Homo sapien
ctaataggagtgatgcatgaatgaa

SEQ ID NO: 3184211 - DNA, 25 bp, Homo sapien
ctcagggctgaaggttctgcattct

SEQ ID NO: 3184212 - DNA, 25 bp, Homo sapien
gatgttcaggactatagaagaaact

SEQ ID NO: 3184213 - DNA, 25 bp, Homo sapien
atggggtcttgtatcctagtgccag

SEQ ID NO: 3184214 - DNA, 25 bp, Homo sapien
gagaagatgccaatgatggggtctt

SEQ ID NO: 3184215 - DNA, 25 bp, Homo sapien
gaaacttgaacagacaaatataatt

SEQ ID NO: 3184216 - DNA, 25 bp, Homo sapien
aagaacagcagaggccatggcatgg

SEQ ID NO: 3184217 - DNA, 25 bp, Homo sapien
aaagaacagcagaggccatggcatg

SEQ ID NO: 3184218 - DNA, 25 bp, Homo sapien
ctgcaaagaacagcagaggccatgg

SEQ ID NO: 3184219 - DNA, 25 bp, Homo sapien
aacagcagaggccatggcatggatg

SEQ ID NO: 3184220 - DNA, 25 bp, Homo sapien
tcgttccaagaggtttcaagacgaa

SEQ ID NO: 3184221 - DNA, 25 bp, Homo sapien
tccaagaggtttcaagacgaacttg

SEQ ID NO: 3184222 - DNA, 25 bp, Homo sapien
ttaaacatcgttccaagaggtttca

SEQ ID NO: 3184223 - DNA, 25 bp, Homo sapien
agaggtttcaagacgaacttgctgc

SEQ ID NO: 3184224 - DNA, 25 bp, Homo sapien
taagtgccatgtggtgttgaataga

SEQ ID NO: 3184225 - DNA, 25 bp, Homo sapien
tgctttagggtagagttccataaat

SEQ ID NO: 3184226 - DNA, 25 bp, Homo sapien
ttagggtagagttccataaatatct

SEQ ID NO: 3184227 - DNA, 25 bp, Homo sapien
attgtgtcggagtctagtctctttg

SEQ ID NO: 3184228 - DNA, 25 bp, Homo sapien
caggctgcccattgcagaggtgtgc

SEQ ID NO: 3184229 - DNA, 25 bp, Homo sapien
tgtgcctttgctcctaaggcaggtc

SEQ ID NO: 3184230 - DNA, 25 bp, Homo sapien
tgcccattgcagaggtgtgccacct

SEQ ID NO: 3184231 - DNA, 25 bp, Homo sapien
ctaaggcaggtcttacaggctgccc

SEQ ID NO: 3184232 - DNA, 25 bp, Homo sapien
ttctcgctctgtgagacagcagcct

SEQ ID NO: 3184233 - DNA, 25 bp, Homo sapien
accttctcgctctgtgagacagcag

SEQ ID NO: 3184234 - DNA, 25 bp, Homo sapien
ggctgctcctgacaccttctcgctc

SEQ ID NO: 3184235 - DNA, 25 bp, Homo sapien
ccttctcgctctgtgagacagcagc

SEQ ID NO: 3184236 - DNA, 25 bp, Homo sapien
ccttctagaagttctgctctgccca

SEQ ID NO: 3184237 - DNA, 25 bp, Homo sapien
tcccttctagaagttctgctctgcc

SEQ ID NO: 3184238 - DNA, 25 bp, Homo sapien
cttctagaagttctgctctgcccat

SEQ ID NO: 3184239 - DNA, 25 bp, Homo sapien
cttcccttctagaagttctgctctg

SEQ ID NO: 3184240 - DNA, 25 bp, Homo sapien
ccatcggatctgctccacagatctg

SEQ ID NO: 3184241 - DNA, 25 bp, Homo sapien
ctcagcctctccatcggatctgctc

SEQ ID NO: 3184242 - DNA, 25 bp, Homo sapien
agctcagcctctccatcggatctgc

SEQ ID NO: 3184243 - DNA, 25 bp, Homo sapien
gctcagcctctccatcggatctgct

SEQ ID NO: 3184244 - DNA, 25 bp, Homo sapien
ggcaacaaggcactgaagatagtca

SEQ ID NO: 3184245 - DNA, 25 bp, Homo sapien
gctagaaactcttgaacagcgcatt

SEQ ID NO: 3184246 - DNA, 25 bp, Homo sapien
tacaagcgagactgttgcaggaact

SEQ ID NO: 3184247 - DNA, 25 bp, Homo sapien
gaattagccccagacaagaagatac

SEQ ID NO: 3184248 - DNA, 25 bp, Homo sapien
cctggattgttggtactgaaaggct

SEQ ID NO: 3184249 - DNA, 25 bp, Homo sapien
tgaagcagaaattttatcctcttcc

SEQ ID NO: 3184250 - DNA, 25 bp, Homo sapien
tgtttgaagcagaaattttatcctc

SEQ ID NO: 3184251 - DNA, 25 bp, Homo sapien
tactgaaaggctcaaagttggctct

SEQ ID NO: 3184252 - DNA, 25 bp, Homo sapien
aatgactccacctacctatgcttac

SEQ ID NO: 3184253 - DNA, 25 bp, Homo sapien
gctccaatgactccacctacctatg

SEQ ID NO: 3184254 - DNA, 25 bp, Homo sapien
tctgggtcccttcttaaagacagag

SEQ ID NO: 3184255 - DNA, 25 bp, Homo sapien
gtcccttcttaaagacagagctcca

SEQ ID NO: 3184256 - DNA, 25 bp, Homo sapien
agatccttctgttcggtccccaggg

SEQ ID NO: 3184257 - DNA, 25 bp, Homo sapien
gacagagccactacttgcgggaggg

SEQ ID NO: 3184258 - DNA, 25 bp, Homo sapien
tactgagatccttctgttcggtccc

SEQ ID NO: 3184259 - DNA, 25 bp, Homo sapien
actgtactgagatccttctgttcgg

SEQ ID NO: 3184260 - DNA, 25 bp, Homo sapien
tcagaaggtagctgccgtcacatcc

SEQ ID NO: 3184261 - DNA, 25 bp, Homo sapien
gcgtgtgaggttgccgtgataccac

SEQ ID NO: 3184262 - DNA, 25 bp, Homo sapien
agagagagtacagcccggtggtctc

SEQ ID NO: 3184263 - DNA, 25 bp, Homo sapien
ccggtggtctcattgctgtccctca

SEQ ID NO: 3184264 - DNA, 25 bp, Homo sapien
caaagatgagaattcattaaagcca

SEQ ID NO: 3184265 - DNA, 25 bp, Homo sapien
tgtctcgcttccaatcaaaggctga

SEQ ID NO: 3184266 - DNA, 25 bp, Homo sapien
tccagtatattcaacatgaaagtgt

SEQ ID NO: 3184267 - DNA, 25 bp, Homo sapien
atcaaaggctgatttgcaaaatgct

SEQ ID NO: 3184268 - DNA, 25 bp, Homo sapien
gagtttagtttagagttcatgcaca

SEQ ID NO: 3184269 - DNA, 25 bp, Homo sapien
tacaagaggctacgacaaaattaat

SEQ ID NO: 3184270 - DNA, 25 bp, Homo sapien
gcctgttaggtgattacagtcacaa

SEQ ID NO: 3184271 - DNA, 25 bp, Homo sapien
tgaagccttaggaagttcgtgtcct

SEQ ID NO: 3184272 - DNA, 25 bp, Homo sapien
aaactgagaacattttgtatttttg

SEQ ID NO: 3184273 - DNA, 25 bp, Homo sapien
ctgagaacattttgtatttttggca

SEQ ID NO: 3184274 - DNA, 25 bp, Homo sapien
tgagaacattttgtatttttggcaa

SEQ ID NO: 3184275 - DNA, 25 bp, Homo sapien
actgagaacattttgtatttttggc

SEQ ID NO: 3184276 - DNA, 25 bp, Homo sapien
cataaatggagggttcttccacttt

SEQ ID NO: 3184277 - DNA, 25 bp, Homo sapien
gcattgctgtgtgaacccggacaga

SEQ ID NO: 3184278 - DNA, 25 bp, Homo sapien
gaacccggacagattcataaatgga

SEQ ID NO: 3184279 - DNA, 25 bp, Homo sapien
tgggtagggatgttttagaaccatc

SEQ ID NO: 3184280 - DNA, 25 bp, Homo sapien
aagatgttgccaaagctaaggaaac

SEQ ID NO: 3184281 - DNA, 25 bp, Homo sapien
caaaatactggaaaagggcaacgtg

SEQ ID NO: 3184282 - DNA, 25 bp, Homo sapien
gaaagtatccaagaagaggaactat

SEQ ID NO: 3184283 - DNA, 25 bp, Homo sapien
cctcctgcagagttagccttctcag

SEQ ID NO: 3184284 - DNA, 25 bp, Homo sapien
tggtgaggtaaccttctttggtgcc

SEQ ID NO: 3184285 - DNA, 25 bp, Homo sapien
ttggtgaggtaaccttctttggtgc

SEQ ID NO: 3184286 - DNA, 25 bp, Homo sapien
ctgtttggtgaggtaaccttctttg

SEQ ID NO: 3184287 - DNA, 25 bp, Homo sapien
gttcattcctgtgcagagtaaacca

SEQ ID NO: 3184288 - DNA, 25 bp, Homo sapien
cctgtgcagagtaaaccatcttgtt

SEQ ID NO: 3184289 - DNA, 25 bp, Homo sapien
cagagtaaaccatcttgttttccag

SEQ ID NO: 3184290 - DNA, 25 bp, Homo sapien
tttgaagtatttcagttcattcctg

SEQ ID NO: 3184291 - DNA, 25 bp, Homo sapien
tcttgtgaataatcgaattgtacag

SEQ ID NO: 3184292 - DNA, 25 bp, Homo sapien
ctaggatccgaattggttctggtga

SEQ ID NO: 3184293 - DNA, 25 bp, Homo sapien
gaataatcgaattgtacagctgaac

SEQ ID NO: 3184294 - DNA, 25 bp, Homo sapien
attctgttaggtctaggatccgaat

SEQ ID NO: 3184295 - DNA, 25 bp, Homo sapien
cattgtttggtactccctatgggag

SEQ ID NO: 3184296 - DNA, 25 bp, Homo sapien
tctgctgcagggaataagaactttc

SEQ ID NO: 3184297 - DNA, 25 bp, Homo sapien
gcttgcttcaacgaggataactctg

SEQ ID NO: 3184298 - DNA, 25 bp, Homo sapien
tctgtgcatagaagctaatacctgg

SEQ ID NO: 3184299 - DNA, 25 bp, Homo sapien
tcagcttctactccggtctttgcac

SEQ ID NO: 3184300 - DNA, 25 bp, Homo sapien
taatatcttgatccactcatcagct

SEQ ID NO: 3184301 - DNA, 25 bp, Homo sapien
caatttccagcgtaatatcttgatc

SEQ ID NO: 3184302 - DNA, 25 bp, Homo sapien
actcatcagcttctactccggtctt

SEQ ID NO: 3184303 - DNA, 25 bp, Homo sapien
tcaagacttgacatctgaaggctta

SEQ ID NO: 3184304 - DNA, 25 bp, Homo sapien
gacatctgaaggcttaaaaattctc

SEQ ID NO: 3184305 - DNA, 25 bp, Homo sapien
ttgacatctgaaggcttaaaaattc

SEQ ID NO: 3184306 - DNA, 25 bp, Homo sapien
catctgaaggcttaaaaattctcac

SEQ ID NO: 3184307 - DNA, 25 bp, Homo sapien
tcttctcctcgggagatatacagag

SEQ ID NO: 3184308 - DNA, 25 bp, Homo sapien
tcagtcttctcctcgggagatatac

SEQ ID NO: 3184309 - DNA, 25 bp, Homo sapien
tcctcgggagatatacagagagcag

SEQ ID NO: 3184310 - DNA, 25 bp, Homo sapien
tctcctcgggagatatacagagagc

SEQ ID NO: 3184311 - DNA, 25 bp, Homo sapien
ctatttaaagatgaacgaccgagat

SEQ ID NO: 3184312 - DNA, 25 bp, Homo sapien
agatcggatcgtgccttccccttgg

SEQ ID NO: 3184313 - DNA, 25 bp, Homo sapien
taaagatgaacgaccgagatcggat

SEQ ID NO: 3184314 - DNA, 25 bp, Homo sapien
tgaacgaccgagatcggatcgtgcc

SEQ ID NO: 3184315 - DNA, 25 bp, Homo sapien
gatcacagcgtcagggaaacattcc

SEQ ID NO: 3184316 - DNA, 25 bp, Homo sapien
tcatggaagggcagcaacgtgagtc

SEQ ID NO: 3184317 - DNA, 25 bp, Homo sapien
tgtcattagaagcaaaggacctgcc

SEQ ID NO: 3184318 - DNA, 25 bp, Homo sapien
cagcaacgtggtatatgggtcccaa

SEQ ID NO: 3184319 - DNA, 25 bp, Homo sapien
catatccgtgagtattcatttgtaa

SEQ ID NO: 3184320 - DNA, 25 bp, Homo sapien
tatcctatataatacaaacataaca

SEQ ID NO: 3184321 - DNA, 25 bp, Homo sapien
cgccgctcctggccagtaacttctt

SEQ ID NO: 3184322 - DNA, 25 bp, Homo sapien
tagcaaaatggtacatgcacagcaa

SEQ ID NO: 3184323 - DNA, 25 bp, Homo sapien
ctgatctgccgttggcacaaaacat

SEQ ID NO: 3184324 - DNA, 25 bp, Homo sapien
ctgctctgatctgccgttggcacaa

SEQ ID NO: 3184325 - DNA, 25 bp, Homo sapien
ctctgatctgccgttggcacaaaac

SEQ ID NO: 3184326 - DNA, 25 bp, Homo sapien
ccctgctctgatctgccgttggcac

SEQ ID NO: 3184327 - DNA, 25 bp, Homo sapien
ctgttagcagacagggtataatgca

SEQ ID NO: 3184328 - DNA, 25 bp, Homo sapien
atgcagatagcccactctcttttct

SEQ ID NO: 3184329 - DNA, 25 bp, Homo sapien
ggtataatgcagatagcccactctc

SEQ ID NO: 3184330 - DNA, 25 bp, Homo sapien
cagacagggtataatgcagatagcc

SEQ ID NO: 3184331 - DNA, 25 bp, Homo sapien
tctgagaataactgcgaatactttg

SEQ ID NO: 3184332 - DNA, 25 bp, Homo sapien
cgaatactttgtcttaatgataagc

SEQ ID NO: 3184333 - DNA, 25 bp, Homo sapien
taactgcgaatactttgtcttaatg

SEQ ID NO: 3184334 - DNA, 25 bp, Homo sapien
ctttgtcttaatgataagctcatac

SEQ ID NO: 3184335 - DNA, 25 bp, Homo sapien
aaccctggccattgttgctactgct

SEQ ID NO: 3184336 - DNA, 25 bp, Homo sapien
tgggatgattatgccccacaaccct

SEQ ID NO: 3184337 - DNA, 25 bp, Homo sapien
ctgaaactatatggcatctgccatt

SEQ ID NO: 3184338 - DNA, 25 bp, Homo sapien
ctctgggatgattatgccccacaac

SEQ ID NO: 3184339 - DNA, 25 bp, Homo sapien
taccaacgatgcatctggaactggg

SEQ ID NO: 3184340 - DNA, 25 bp, Homo sapien
ctgctggtctaacttctctggctcc

SEQ ID NO: 3184341 - DNA, 25 bp, Homo sapien
gtatgcctggatggctataccaacg

SEQ ID NO: 3184342 - DNA, 25 bp, Homo sapien
gaaataaccgtaggatgggatcagg

SEQ ID NO: 3184343 - DNA, 25 bp, Homo sapien
gattattcaataagtagggcaggca

SEQ ID NO: 3184344 - DNA, 25 bp, Homo sapien
aagtagggcaggcattctctatgcc

SEQ ID NO: 3184345 - DNA, 25 bp, Homo sapien
aagacgggatcacaatgggaaaagg

SEQ ID NO: 3184346 - DNA, 25 bp, Homo sapien
aacattgttataaagacgggatcac

SEQ ID NO: 3184347 - DNA, 25 bp, Homo sapien
tgtatgtaaacatgatagtacagcc

SEQ ID NO: 3184348 - DNA, 25 bp, Homo sapien
tctgctttctgtaaccaatcagtgt

SEQ ID NO: 3184349 - DNA, 25 bp, Homo sapien
ttctttgcattgagtgaggaacata

SEQ ID NO: 3184350 - DNA, 25 bp, Homo sapien
cagtttgattattctcagagggtgc

SEQ ID NO: 3184351 - DNA, 25 bp, Homo sapien
aatgatttgctgatttcagttgtca

SEQ ID NO: 3184352 - DNA, 25 bp, Homo sapien
caggtaagttcataattataaaatg

SEQ ID NO: 3184353 - DNA, 25 bp, Homo sapien
tataaaatgatttgctgatttcagt

SEQ ID NO: 3184354 - DNA, 25 bp, Homo sapien
taaaatgatttgctgatttcagttg

SEQ ID NO: 3184355 - DNA, 25 bp, Homo sapien
tagaacccataatctcctgatgtgt

SEQ ID NO: 3184356 - DNA, 25 bp, Homo sapien
caaagacacttggacttcttagcag

SEQ ID NO: 3184357 - DNA, 25 bp, Homo sapien
ggtttataatcttcggacattgccg

SEQ ID NO: 3184358 - DNA, 25 bp, Homo sapien
gacattgccgtccaaagtcggacat

SEQ ID NO: 3184359 - DNA, 25 bp, Homo sapien
ggagtttctcttccaggcgtggaga

SEQ ID NO: 3184360 - DNA, 25 bp, Homo sapien
gaccagggctgatctcgcgtattaa

SEQ ID NO: 3184361 - DNA, 25 bp, Homo sapien
cgtggagattgatcctgcgagagaa

SEQ ID NO: 3184362 - DNA, 25 bp, Homo sapien
atcatggcggatgtgagtgacaccc

SEQ ID NO: 3184363 - DNA, 25 bp, Homo sapien
ggcactccgactcccactgggctcg

SEQ ID NO: 3184364 - DNA, 25 bp, Homo sapien
tggggcactccgactcccactgggc

SEQ ID NO: 3184365 - DNA, 25 bp, Homo sapien
ggggtgctggggcactccgactccc

SEQ ID NO: 3184366 - DNA, 25 bp, Homo sapien
gggtgctggggcactccgactccca

SEQ ID NO: 3184367 - DNA, 25 bp, Homo sapien
ggtgggctgaggtaaggtgtgccag

SEQ ID NO: 3184368 - DNA, 25 bp, Homo sapien
gaggtaaggtgtgccagctgagtac

SEQ ID NO: 3184369 - DNA, 25 bp, Homo sapien
gggtgggctgaggtaaggtgtgcca

SEQ ID NO: 3184370 - DNA, 25 bp, Homo sapien
ctgaggtaaggtgtgccagctgagt

SEQ ID NO: 3184371 - DNA, 25 bp, Homo sapien
gagattcctattataaggcccatgc

SEQ ID NO: 3184372 - DNA, 25 bp, Homo sapien
taaaaactgggatgactagttgcca

SEQ ID NO: 3184373 - DNA, 25 bp, Homo sapien
aactgcatagcagatgacacctggc

SEQ ID NO: 3184374 - DNA, 25 bp, Homo sapien
cacactatgtttgcacagagcaggg

SEQ ID NO: 3184375 - DNA, 25 bp, Homo sapien
taaactactcagcttttgtgccagc

SEQ ID NO: 3184376 - DNA, 25 bp, Homo sapien
ccttagttcccaaatagactggtgc

SEQ ID NO: 3184377 - DNA, 25 bp, Homo sapien
gaacttcgcaatttcatcggctcat

SEQ ID NO: 3184378 - DNA, 25 bp, Homo sapien
tgccagctcaggtgttcataggaac

SEQ ID NO: 3184379 - DNA, 25 bp, Homo sapien
taactttgtgtaaaatcttatagta

SEQ ID NO: 3184380 - DNA, 25 bp, Homo sapien
cagtttaaattgatggaataaatgt

SEQ ID NO: 3184381 - DNA, 25 bp, Homo sapien
ccttatcaaggtgtcaaatatgtgg

SEQ ID NO: 3184382 - DNA, 25 bp, Homo sapien
gtattatcagcttagagggaattga

SEQ ID NO: 3184383 - DNA, 25 bp, Homo sapien
tacaatattgattaaagaaatcaga

SEQ ID NO: 3184384 - DNA, 25 bp, Homo sapien
aaagatgtcaagtcggctgggcacg

SEQ ID NO: 3184385 - DNA, 25 bp, Homo sapien
agtaaagatgtcaagtcggctgggc

SEQ ID NO: 3184386 - DNA, 25 bp, Homo sapien
gctatacaatattgattaaagaaat

SEQ ID NO: 3184387 - DNA, 25 bp, Homo sapien
gaactcctgtaagctaacattaaat

SEQ ID NO: 3184388 - DNA, 25 bp, Homo sapien
tttgatacatttcaccacccattca

SEQ ID NO: 3184389 - DNA, 25 bp, Homo sapien
agtttatttcaaggtagcaaagtca

SEQ ID NO: 3184390 - DNA, 25 bp, Homo sapien
cccacgattatattaatcagtggaa

SEQ ID NO: 3184391 - DNA, 25 bp, Homo sapien
tgtaatccaccacattaattaaaga

SEQ ID NO: 3184392 - DNA, 25 bp, Homo sapien
aatcattgccaggagttaattattt

SEQ ID NO: 3184393 - DNA, 25 bp, Homo sapien
cctcccctactgttgaatatgattt

SEQ ID NO: 3184394 - DNA, 25 bp, Homo sapien
cactttgttgatggtgctatttgat

SEQ ID NO: 3184395 - DNA, 25 bp, Homo sapien
gaaatcattgccaggagttaattat

SEQ ID NO: 3184396 - DNA, 25 bp, Homo sapien
cttgttatctcaggactctaaatac

SEQ ID NO: 3184397 - DNA, 25 bp, Homo sapien
actgtctaaaggatgcctggattcc

SEQ ID NO: 3184398 - DNA, 25 bp, Homo sapien
caacagaagactgtctaaaggatgc

SEQ ID NO: 3184399 - DNA, 25 bp, Homo sapien
tctcaggactctaaatactctaaca

SEQ ID NO: 3184400 - DNA, 25 bp, Homo sapien
gccattggtgggatgagcaatccga

SEQ ID NO: 3184401 - DNA, 25 bp, Homo sapien
ggatctcaccgtgggtccgattagc

SEQ ID NO: 3184402 - DNA, 25 bp, Homo sapien
cgcagtttgaatcgcggtgcgacga

SEQ ID NO: 3184403 - DNA, 25 bp, Homo sapien
gggaacattctgcagtataaaggga

SEQ ID NO: 3184404 - DNA, 25 bp, Homo sapien
ccaggcacgtgatcgcagccggctg

SEQ ID NO: 3184405 - DNA, 25 bp, Homo sapien
agcgtagctcgctctgtttcttccc

SEQ ID NO: 3184406 - DNA, 25 bp, Homo sapien
gagacttcacgtggtctctagagcc

SEQ ID NO: 3184407 - DNA, 25 bp, Homo sapien
tggtaactgcgctcctgcagcgtag

SEQ ID NO: 3184408 - DNA, 25 bp, Homo sapien
tgatatgaaaaggtcccaaacaacg

SEQ ID NO: 3184409 - DNA, 25 bp, Homo sapien
ctgcagcaatttcattaccaatttt

SEQ ID NO: 3184410 - DNA, 25 bp, Homo sapien
tgatgaccacaaagcaaagtttacc

SEQ ID NO: 3184411 - DNA, 25 bp, Homo sapien
aacaacggcaaactgatgaccacaa

SEQ ID NO: 3184412 - DNA, 25 bp, Homo sapien
tcggtaatcgggaataatcaaacca

SEQ ID NO: 3184413 - DNA, 25 bp, Homo sapien
tcaaaccacagaggatagcgcacaa

SEQ ID NO: 3184414 - DNA, 25 bp, Homo sapien
cagcacagcactcaaggtcggtaat

SEQ ID NO: 3184415 - DNA, 25 bp, Homo sapien
gcagggactgctccaatttcatttt

SEQ ID NO: 3184416 - DNA, 25 bp, Homo sapien
tgtctggcttggtagggactctcca

SEQ ID NO: 3184417 - DNA, 25 bp, Homo sapien
tcttctgatttatgcctgaggcaaa

SEQ ID NO: 3184418 - DNA, 25 bp, Homo sapien
cagtagtagaggacttttgtttgtt

SEQ ID NO: 3184419 - DNA, 25 bp, Homo sapien
tctgtcttcctcagtagtagaggac

SEQ ID NO: 3184420 - DNA, 25 bp, Homo sapien
catcagttgcttgggttcttccttg

SEQ ID NO: 3184421 - DNA, 25 bp, Homo sapien
tcgaagagtgtgtcttgtacttctg

SEQ ID NO: 3184422 - DNA, 25 bp, Homo sapien
ttccaagggtgtgtacatcagttgc

SEQ ID NO: 3184423 - DNA, 25 bp, Homo sapien
ttattccatgaattcgaagagtgtg

SEQ ID NO: 3184424 - DNA, 25 bp, Homo sapien
tgatgcccagaacaagttgacattg

SEQ ID NO: 3184425 - DNA, 25 bp, Homo sapien
gctcaatggattgatgcccagaaca

SEQ ID NO: 3184426 - DNA, 25 bp, Homo sapien
catgagaagcttgtagctcaatgga

SEQ ID NO: 3184427 - DNA, 25 bp, Homo sapien
gcccagaacaagttgacattgtcca

SEQ ID NO: 3184428 - DNA, 25 bp, Homo sapien
tgtctacttctcttcaggaagccct

SEQ ID NO: 3184429 - DNA, 25 bp, Homo sapien
tagcagtttgagcatgctgtctact

SEQ ID NO: 3184430 - DNA, 25 bp, Homo sapien
ctaaaagaaccagggccttagcagg

SEQ ID NO: 3184431 - DNA, 25 bp, Homo sapien
catagcctgagctgacaatatgagg

SEQ ID NO: 3184432 - DNA, 25 bp, Homo sapien
cagactgcttcgttcctaaagaggt

SEQ ID NO: 3184433 - DNA, 25 bp, Homo sapien
ggtcttggcaagccagtgggtccac

SEQ ID NO: 3184434 - DNA, 25 bp, Homo sapien
gtcttggcaagccagtgggtccaca

SEQ ID NO: 3184435 - DNA, 25 bp, Homo sapien
gactgcttcgttcctaaagaggtct

SEQ ID NO: 3184436 - DNA, 25 bp, Homo sapien
ttttcacgtatctttgcctaacaat

SEQ ID NO: 3184437 - DNA, 25 bp, Homo sapien
tacccaaaatgagcataaaaatgtg

SEQ ID NO: 3184438 - DNA, 25 bp, Homo sapien
tatctttgcctaacaatatgctgag

SEQ ID NO: 3184439 - DNA, 25 bp, Homo sapien
tacagccacatgtaaaggagagaga

SEQ ID NO: 3184440 - DNA, 25 bp, Homo sapien
ttctcttcatccttcactacaccag

SEQ ID NO: 3184441 - DNA, 25 bp, Homo sapien
taaaccaatgcattgccttctcttc

SEQ ID NO: 3184442 - DNA, 25 bp, Homo sapien
tcttcatccttcactacaccagctc

SEQ ID NO: 3184443 - DNA, 25 bp, Homo sapien
ctaaaccaatgcattgccttctctt

SEQ ID NO: 3184444 - DNA, 25 bp, Homo sapien
ccatggaggcagtcatgtttttcag

SEQ ID NO: 3184445 - DNA, 25 bp, Homo sapien
aaggcagcaccaggatggtcctgct

SEQ ID NO: 3184446 - DNA, 25 bp, Homo sapien
cagtgttcctactgcaaggttaaag

SEQ ID NO: 3184447 - DNA, 25 bp, Homo sapien
cctgcttccatggaggcagtcatgt

SEQ ID NO: 3184448 - DNA, 25 bp, Homo sapien
ccaggaagagcatgcaggcacacat

SEQ ID NO: 3184449 - DNA, 25 bp, Homo sapien
tggacaagtgagagcagaacatccc

SEQ ID NO: 3184450 - DNA, 25 bp, Homo sapien
cattttgcagcaacattaaggagca

SEQ ID NO: 3184451 - DNA, 25 bp, Homo sapien
gaactcctggttctttcagttggca

SEQ ID NO: 3184452 - DNA, 25 bp, Homo sapien
tattaccaaaggttcacgtgaagaa

SEQ ID NO: 3184453 - DNA, 25 bp, Homo sapien
taaaattgcatgtgaccatttcatg

SEQ ID NO: 3184454 - DNA, 25 bp, Homo sapien
gtgtaaacaaggcaatcaaaaggga

SEQ ID NO: 3184455 - DNA, 25 bp, Homo sapien
tcacgttggacaaagagaagattgc

SEQ ID NO: 3184456 - DNA, 25 bp, Homo sapien
gaagtacaatcccacccgacattgc

SEQ ID NO: 3184457 - DNA, 25 bp, Homo sapien
ggaggaactttggtagttgcctgac

SEQ ID NO: 3184458 - DNA, 25 bp, Homo sapien
tcagcccatatcgagaagcagtttg

SEQ ID NO: 3184459 - DNA, 25 bp, Homo sapien
actttggtagttgcctgacacatga

SEQ ID NO: 3184460 - DNA, 25 bp, Homo sapien
gctaactcctctttcggcaattaaa

SEQ ID NO: 3184461 - DNA, 25 bp, Homo sapien
taatcttcaattcagccctccaagc

SEQ ID NO: 3184462 - DNA, 25 bp, Homo sapien
taaagaagagagtgcaacaccacac

SEQ ID NO: 3184463 - DNA, 25 bp, Homo sapien
tctttcctcgcaatgatgaggccca

SEQ ID NO: 3184464 - DNA, 25 bp, Homo sapien
gactgacagagaagcatttgcatgt

SEQ ID NO: 3184465 - DNA, 25 bp, Homo sapien
cctccatgagccctgattttcatgg

SEQ ID NO: 3184466 - DNA, 25 bp, Homo sapien
catgggaacagctgtctcagtgact

SEQ ID NO: 3184467 - DNA, 25 bp, Homo sapien
cagtgactgcatacaaggtcccact

SEQ ID NO: 3184468 - DNA, 25 bp, Homo sapien
ctattttaaggcactgttgggtggg

SEQ ID NO: 3184469 - DNA, 25 bp, Homo sapien
gttctactagtttatccgttgtatc

SEQ ID NO: 3184470 - DNA, 25 bp, Homo sapien
tatcattttctcctacgttgaccat

SEQ ID NO: 3184471 - DNA, 25 bp, Homo sapien
tatccgttgtatctattttaaggca

SEQ ID NO: 3184472 - DNA, 25 bp, Homo sapien
accaaagaaagcagttagccagtcc

SEQ ID NO: 3184473 - DNA, 25 bp, Homo sapien
ccaaagaaagcagttagccagtcca

SEQ ID NO: 3184474 - DNA, 25 bp, Homo sapien
caccaaagaaagcagttagccagtc

SEQ ID NO: 3184475 - DNA, 25 bp, Homo sapien
caaagaaagcagttagccagtccat

SEQ ID NO: 3184476 - DNA, 25 bp, Homo sapien
gggaatgcaggctaatacctcagca

SEQ ID NO: 3184477 - DNA, 25 bp, Homo sapien
tacctcagcaacagaaactcgcctg

SEQ ID NO: 3184478 - DNA, 25 bp, Homo sapien
catggtccatgaaaaactctagcac

SEQ ID NO: 3184479 - DNA, 25 bp, Homo sapien
tctttgataaaccttgggaatgcag

SEQ ID NO: 3184480 - DNA, 25 bp, Homo sapien
ctgaagttctatattgaggtcatga

SEQ ID NO: 3184481 - DNA, 25 bp, Homo sapien
taactgaagttctatattgaggtca

SEQ ID NO: 3184482 - DNA, 25 bp, Homo sapien
aagttctatattgaggtcatgaagc

SEQ ID NO: 3184483 - DNA, 25 bp, Homo sapien
aggcactgtaggaggtctggtaact

SEQ ID NO: 3184484 - DNA, 25 bp, Homo sapien
ctttgctgccacattggctattgct

SEQ ID NO: 3184485 - DNA, 25 bp, Homo sapien
aactttgctgccacattggctattg

SEQ ID NO: 3184486 - DNA, 25 bp, Homo sapien
ttgctgccacattggctattgctac

SEQ ID NO: 3184487 - DNA, 25 bp, Homo sapien
tgctgccacattggctattgctaca

SEQ ID NO: 3184488 - DNA, 25 bp, Homo sapien
ttgttactgctatctcattttcttt

SEQ ID NO: 3184489 - DNA, 25 bp, Homo sapien
aatacatcagatgaacatatggttg

SEQ ID NO: 3184490 - DNA, 25 bp, Homo sapien
acatatggttgccagttgttactgc

SEQ ID NO: 3184491 - DNA, 25 bp, Homo sapien
ctgaggaagcctagaacttaaatat

SEQ ID NO: 3184492 - DNA, 25 bp, Homo sapien
gtttcattggcagatcctttcctgc

SEQ ID NO: 3184493 - DNA, 25 bp, Homo sapien
acagtgatggatgtattataataaa

SEQ ID NO: 3184494 - DNA, 25 bp, Homo sapien
atacagtgatggatgtattataata

SEQ ID NO: 3184495 - DNA, 25 bp, Homo sapien
tacagtgatggatgtattataataa

SEQ ID NO: 3184496 - DNA, 25 bp, Homo sapien
tgaaacaactgcgtcattctatagt

SEQ ID NO: 3184497 - DNA, 25 bp, Homo sapien
gaaacaactgcgtcattctatagtc

SEQ ID NO: 3184498 - DNA, 25 bp, Homo sapien
aacaactgcgtcattctatagtcaa

SEQ ID NO: 3184499 - DNA, 25 bp, Homo sapien
cttgaaacaactgcgtcattctata

SEQ ID NO: 3184500 - DNA, 25 bp, Homo sapien
cagcatcccatctgatctggctatt

SEQ ID NO: 3184501 - DNA, 25 bp, Homo sapien
tcagcatcccatctgatctggctat

SEQ ID NO: 3184502 - DNA, 25 bp, Homo sapien
aaataggaactctgtccagtcctcc

SEQ ID NO: 3184503 - DNA, 25 bp, Homo sapien
atcttctccaaataggaactctgtc

SEQ ID NO: 3184504 - DNA, 25 bp, Homo sapien
cgcttaacttctactataccttcca

SEQ ID NO: 3184505 - DNA, 25 bp, Homo sapien
tcaactgttatcagccctgagaatg

SEQ ID NO: 3184506 - DNA, 25 bp, Homo sapien
accttccattgtcagactaaggtgg

SEQ ID NO: 3184507 - DNA, 25 bp, Homo sapien
gccctgagaatgtttcgcttaactt

SEQ ID NO: 3184508 - DNA, 25 bp, Homo sapien
cctccattccagattacctatggaa

SEQ ID NO: 3184509 - DNA, 25 bp, Homo sapien
ctccattccagattacctatggaat

SEQ ID NO: 3184510 - DNA, 25 bp, Homo sapien
gcctccattccagattacctatgga

SEQ ID NO: 3184511 - DNA, 25 bp, Homo sapien
gccccttctggcaagcctctgacca

SEQ ID NO: 3184512 - DNA, 25 bp, Homo sapien
gagatcaaagctaactgtcccatat

SEQ ID NO: 3184513 - DNA, 25 bp, Homo sapien
tcttgtctcatatcttgggtgtagc

SEQ ID NO: 3184514 - DNA, 25 bp, Homo sapien
cctctgaccaggttagctagacatt

SEQ ID NO: 3184515 - DNA, 25 bp, Homo sapien
gtattttatttctatgagatgggca

SEQ ID NO: 3184516 - DNA, 25 bp, Homo sapien
ttatttctatgagatgggcactgaa

SEQ ID NO: 3184517 - DNA, 25 bp, Homo sapien
gcactgaaaccaatacacaacacat

SEQ ID NO: 3184518 - DNA, 25 bp, Homo sapien
tttctatgagatgggcactgaaacc

SEQ ID NO: 3184519 - DNA, 25 bp, Homo sapien
gaacttctattgtctcgggagaaca

SEQ ID NO: 3184520 - DNA, 25 bp, Homo sapien
tgggccctatattatgcactggata

SEQ ID NO: 3184521 - DNA, 25 bp, Homo sapien
gagtgcttactaggttctgggccct

SEQ ID NO: 3184522 - DNA, 25 bp, Homo sapien
cacaactaattgatgtgatcaggtg

SEQ ID NO: 3184523 - DNA, 25 bp, Homo sapien
tgactagtctgttgataagcaaact

SEQ ID NO: 3184524 - DNA, 25 bp, Homo sapien
tcatttttgcgtaatttatcttgac

SEQ ID NO: 3184525 - DNA, 25 bp, Homo sapien
gttttcacttcaaatctagcagaat

SEQ ID NO: 3184526 - DNA, 25 bp, Homo sapien
ctgttgataagcaaacttggttttc

SEQ ID NO: 3184527 - DNA, 25 bp, Homo sapien
tgagcacggccaagcttcttttgga

SEQ ID NO: 3184528 - DNA, 25 bp, Homo sapien
ctttgagcacggccaagcttctttt

SEQ ID NO: 3184529 - DNA, 25 bp, Homo sapien
tttggataatcttgactgctctcat

SEQ ID NO: 3184530 - DNA, 25 bp, Homo sapien
gagcacggccaagcttcttttggat

SEQ ID NO: 3184531 - DNA, 25 bp, Homo sapien
cagtaaatagctgtaactgtttatc

SEQ ID NO: 3184532 - DNA, 25 bp, Homo sapien
aaggtgccacagtaaatagctgtaa

SEQ ID NO: 3184533 - DNA, 25 bp, Homo sapien
tgccacagtaaatagctgtaactgt

SEQ ID NO: 3184534 - DNA, 25 bp, Homo sapien
aaatagctgtaactgtttatctggc

SEQ ID NO: 3184535 - DNA, 25 bp, Homo sapien
aattaaatgggagccaagtacgtct

SEQ ID NO: 3184536 - DNA, 25 bp, Homo sapien
caagacttaagggccagattattca

SEQ ID NO: 3184537 - DNA, 25 bp, Homo sapien
gacttaagggccagattattcactg

SEQ ID NO: 3184538 - DNA, 25 bp, Homo sapien
ttcactggggctcggtaggggtcac

SEQ ID NO: 3184539 - DNA, 25 bp, Homo sapien
cttaagggccagattattcactggg

SEQ ID NO: 3184540 - DNA, 25 bp, Homo sapien
taagcttggctacgagcaacaggtt

SEQ ID NO: 3184541 - DNA, 25 bp, Homo sapien
catggttccacaaaacactgcctgc

SEQ ID NO: 3184542 - DNA, 25 bp, Homo sapien
tgagctcagcggattgccataaaac

SEQ ID NO: 3184543 - DNA, 25 bp, Homo sapien
atccaaaatcgaggcaggcagccgc

SEQ ID NO: 3184544 - DNA, 25 bp, Homo sapien
ttagctcccaaagatccttgctgac

SEQ ID NO: 3184545 - DNA, 25 bp, Homo sapien
attagctcccaaagatccttgctga

SEQ ID NO: 3184546 - DNA, 25 bp, Homo sapien
taggcacaaggtgcatcaggacagc

SEQ ID NO: 3184547 - DNA, 25 bp, Homo sapien
tcaggacagcaagccgtagaggcaa

SEQ ID NO: 3184548 - DNA, 25 bp, Homo sapien
tgcaagtagtcaacggagccagagc

SEQ ID NO: 3184549 - DNA, 25 bp, Homo sapien
ccaacagggctagacataggcacaa

SEQ ID NO: 3184550 - DNA, 25 bp, Homo sapien
gaacatgatgcttcctgggtaatgc

SEQ ID NO: 3184551 - DNA, 25 bp, Homo sapien
tgggaatccatacacgaggcaagaa

SEQ ID NO: 3184552 - DNA, 25 bp, Homo sapien
tgggtaatgcttgtgcggccaaaga

SEQ ID NO: 3184553 - DNA, 25 bp, Homo sapien
cggccaaagaactgcttaagataat

SEQ ID NO: 3184554 - DNA, 25 bp, Homo sapien
tgctccaagaatatgagctgttggt

SEQ ID NO: 3184555 - DNA, 25 bp, Homo sapien
ctccaagaatatgagctgttggttc

SEQ ID NO: 3184556 - DNA, 25 bp, Homo sapien
tttgctccaagaatatgagctgttg

SEQ ID NO: 3184557 - DNA, 25 bp, Homo sapien
ttgctccaagaatatgagctgttgg

SEQ ID NO: 3184558 - DNA, 25 bp, Homo sapien
tgcaagccatgagtaggaggctgca

SEQ ID NO: 3184559 - DNA, 25 bp, Homo sapien
ctgcaagccatgagtaggaggctgc

SEQ ID NO: 3184560 - DNA, 25 bp, Homo sapien
gcaagccatgagtaggaggctgcat

SEQ ID NO: 3184561 - DNA, 25 bp, Homo sapien
cttctccttcctttgcaattaccat

SEQ ID NO: 3184562 - DNA, 25 bp, Homo sapien
ttactaatgacattcgagtatgtac

SEQ ID NO: 3184563 - DNA, 25 bp, Homo sapien
gctgtaagttactaatgacattcga

SEQ ID NO: 3184564 - DNA, 25 bp, Homo sapien
aagttactaatgacattcgagtatg

SEQ ID NO: 3184565 - DNA, 25 bp, Homo sapien
cttgctgtaagttactaatgacatt

SEQ ID NO: 3184566 - DNA, 25 bp, Homo sapien
aagccctgacggcaatgaagttttg

SEQ ID NO: 3184567 - DNA, 25 bp, Homo sapien
acaccaagccctgacggcaatgaag

SEQ ID NO: 3184568 - DNA, 25 bp, Homo sapien
ccctgacggcaatgaagttttgcag

SEQ ID NO: 3184569 - DNA, 25 bp, Homo sapien
accaagccctgacggcaatgaagtt

SEQ ID NO: 3184570 - DNA, 25 bp, Homo sapien
ggcagggatctccactatgtatgtt

SEQ ID NO: 3184571 - DNA, 25 bp, Homo sapien
ctggtggcagctttgtaacgtatga

SEQ ID NO: 3184572 - DNA, 25 bp, Homo sapien
tataatcaaggacaccaagcaagca

SEQ ID NO: 3184573 - DNA, 25 bp, Homo sapien
tcactttagaactgttgagcccatg

SEQ ID NO: 3184574 - DNA, 25 bp, Homo sapien
ccatttacaggagcgttcctaggaa

SEQ ID NO: 3184575 - DNA, 25 bp, Homo sapien
tcagaaagggacatacgattcacat

SEQ ID NO: 3184576 - DNA, 25 bp, Homo sapien
gaatttgtgagcagtgaatctgaca

SEQ ID NO: 3184577 - DNA, 25 bp, Homo sapien
ggctcgctgataggcatgactttcc

SEQ ID NO: 3184578 - DNA, 25 bp, Homo sapien
ggaacaatcaccaatgaattactta

SEQ ID NO: 3184579 - DNA, 25 bp, Homo sapien
aagatgaaggtgagtaatgattcat

SEQ ID NO: 3184580 - DNA, 25 bp, Homo sapien
cagccaccaccactattaatttcag

SEQ ID NO: 3184581 - DNA, 25 bp, Homo sapien
gaacatctgcattgtttctacttgc

SEQ ID NO: 3184582 - DNA, 25 bp, Homo sapien
ctgattctttgagtctgatgctgga

SEQ ID NO: 3184583 - DNA, 25 bp, Homo sapien
ctttatctcaaggatttctatttgg

SEQ ID NO: 3184584 - DNA, 25 bp, Homo sapien
tgatgctggagctttctattgcatt

SEQ ID NO: 3184585 - DNA, 25 bp, Homo sapien
agtcattgtattctttatctcaagg

SEQ ID NO: 3184586 - DNA, 25 bp, Homo sapien
tggtcatccttgttaaccgagagct

SEQ ID NO: 3184587 - DNA, 25 bp, Homo sapien
cactggtcatccttgttaaccgaga

SEQ ID NO: 3184588 - DNA, 25 bp, Homo sapien
tcatccttgttaaccgagagcttcc

SEQ ID NO: 3184589 - DNA, 25 bp, Homo sapien
gcactggtcatccttgttaaccgag

SEQ ID NO: 3184590 - DNA, 25 bp, Homo sapien
tctcaagctcctttctgaccaactg

SEQ ID NO: 3184591 - DNA, 25 bp, Homo sapien
gagtaggattctacaaagtggcttt

SEQ ID NO: 3184592 - DNA, 25 bp, Homo sapien
tcaagctcctttctgaccaactgta

SEQ ID NO: 3184593 - DNA, 25 bp, Homo sapien
atgccagtgtggagtaggattctac

SEQ ID NO: 3184594 - DNA, 25 bp, Homo sapien
gttaaactctgaatagatcattcgt

SEQ ID NO: 3184595 - DNA, 25 bp, Homo sapien
gcaagcatcgacgagtgcaatactt

SEQ ID NO: 3184596 - DNA, 25 bp, Homo sapien
gctccaggtctgcaagcatcgacga

SEQ ID NO: 3184597 - DNA, 25 bp, Homo sapien
gagtgcaatactttgccggcattgt

SEQ ID NO: 3184598 - DNA, 25 bp, Homo sapien
tacgggcaccatggaactgcttcaa

SEQ ID NO: 3184599 - DNA, 25 bp, Homo sapien
cctctggtggtacggattggaaatc

SEQ ID NO: 3184600 - DNA, 25 bp, Homo sapien
gaaatcactagtaggtgactcagcc

SEQ ID NO: 3184601 - DNA, 25 bp, Homo sapien
tcagtttactttcagggatcttccc

SEQ ID NO: 3184602 - DNA, 25 bp, Homo sapien
gagatagaaaagatgtatgcagggc

SEQ ID NO: 3184603 - DNA, 25 bp, Homo sapien
tctcgaatgtccaacatgggttgaa

SEQ ID NO: 3184604 - DNA, 25 bp, Homo sapien
tgtatgcagggcaaggctgaagtcc

SEQ ID NO: 3184605 - DNA, 25 bp, Homo sapien
gctgaagtccaagggggatgaacct

SEQ ID NO: 3184606 - DNA, 25 bp, Homo sapien
tgagagctgccattgcccacccggg

SEQ ID NO: 3184607 - DNA, 25 bp, Homo sapien
tctgaattcagcaacggtggactcc

SEQ ID NO: 3184608 - DNA, 25 bp, Homo sapien
aaggactcctcgagcctctaggatg

SEQ ID NO: 3184609 - DNA, 25 bp, Homo sapien
ggtggactccgtgatttcctgccct

SEQ ID NO: 3184610 - DNA, 25 bp, Homo sapien
tccccaaaagctgctggtttgtcag

SEQ ID NO: 3184611 - DNA, 25 bp, Homo sapien
ccttaaaggactcctccaattctct

SEQ ID NO: 3184612 - DNA, 25 bp, Homo sapien
gttgtgttgagactgctggataaat

SEQ ID NO: 3184613 - DNA, 25 bp, Homo sapien
ttctgaaacgtactctcagtctttg

SEQ ID NO: 3184614 - DNA, 25 bp, Homo sapien
attctgaaacgtactctcagtcttt

SEQ ID NO: 3184615 - DNA, 25 bp, Homo sapien
tgtgctttccgatttcaatccatct

SEQ ID NO: 3184616 - DNA, 25 bp, Homo sapien
taggaatagctactttcaggtaggt

SEQ ID NO: 3184617 - DNA, 25 bp, Homo sapien
cttgaagatagatagggagtaggaa

SEQ ID NO: 3184618 - DNA, 25 bp, Homo sapien
tatcattactggaaatttgtcctcc

SEQ ID NO: 3184619 - DNA, 25 bp, Homo sapien
gcgtaaaactcaagtcagccaaatt

SEQ ID NO: 3184620 - DNA, 25 bp, Homo sapien
cagttcccttcctaggactctaaat

SEQ ID NO: 3184621 - DNA, 25 bp, Homo sapien
tcattttgcggattctctcttctga

SEQ ID NO: 3184622 - DNA, 25 bp, Homo sapien
agtgtctatcttaatggaactgtca

SEQ ID NO: 3184623 - DNA, 25 bp, Homo sapien
gtgtcacctcaatgttaccctcctg

SEQ ID NO: 3184624 - DNA, 25 bp, Homo sapien
aagaaatctacaacacaattgcgtt

SEQ ID NO: 3184625 - DNA, 25 bp, Homo sapien
tactccataacatttcacaacactt

SEQ ID NO: 3184626 - DNA, 25 bp, Homo sapien
gcgtttctgcatgacttcactgtct

SEQ ID NO: 3184627 - DNA, 25 bp, Homo sapien
gcaaatcctaggacccgcttctcta

SEQ ID NO: 3184628 - DNA, 25 bp, Homo sapien
gcttctctaggactccgaatcgtgg

SEQ ID NO: 3184629 - DNA, 25 bp, Homo sapien
caggaagtaatagctctcaagaatc

SEQ ID NO: 3184630 - DNA, 25 bp, Homo sapien
caagaatcaccaggtcagatttgtt

SEQ ID NO: 3184631 - DNA, 25 bp, Homo sapien
gaatgtttacagtgacccagtgaag

SEQ ID NO: 3184632 - DNA, 25 bp, Homo sapien
ttagtcaaagacaccccaggaatgt

SEQ ID NO: 3184633 - DNA, 25 bp, Homo sapien
tggactaccgacattctgcccttga

SEQ ID NO: 3184634 - DNA, 25 bp, Homo sapien
tccttgctgctggtaacaatctgca

SEQ ID NO: 3184635 - DNA, 25 bp, Homo sapien
catgtgaaaaaccatgacatttggg

SEQ ID NO: 3184636 - DNA, 25 bp, Homo sapien
taatatggctgcctccgtcacagac

SEQ ID NO: 3184637 - DNA, 25 bp, Homo sapien
cacattggctggacaataacttgga

SEQ ID NO: 3184638 - DNA, 25 bp, Homo sapien
gggccccatcatagaggaacttgta

SEQ ID NO: 3184639 - DNA, 25 bp, Homo sapien
aaagcatctgctctataggtgttta

SEQ ID NO: 3184640 - DNA, 25 bp, Homo sapien
catctgctctataggtgtttatcat

SEQ ID NO: 3184641 - DNA, 25 bp, Homo sapien
tgaaagcatctgctctataggtgtt

SEQ ID NO: 3184642 - DNA, 25 bp, Homo sapien
ttatgaaagcatctgctctataggt

SEQ ID NO: 3184643 - DNA, 25 bp, Homo sapien
gaaaagtgcaaaattatattctaga

SEQ ID NO: 3184644 - DNA, 25 bp, Homo sapien
tagtcttctccctcgacttccccat

SEQ ID NO: 3184645 - DNA, 25 bp, Homo sapien
gcaaaattatattctagaatgttct

SEQ ID NO: 3184646 - DNA, 25 bp, Homo sapien
ctctatttctgttgctttagtcttc

SEQ ID NO: 3184647 - DNA, 25 bp, Homo sapien
ccctggaggtggaccgttccatcaa

SEQ ID NO: 3184648 - DNA, 25 bp, Homo sapien
ggtggaccgttccatcaaagaacag

SEQ ID NO: 3184649 - DNA, 25 bp, Homo sapien
ctctctgagcaattgtcaatagctg

SEQ ID NO: 3184650 - DNA, 25 bp, Homo sapien
agcaattgtcaatagctgactgccc

SEQ ID NO: 3184651 - DNA, 25 bp, Homo sapien
ttactcctttgttgcatgcttttgg

SEQ ID NO: 3184652 - DNA, 25 bp, Homo sapien
tacacacagtgggaattactccttt

SEQ ID NO: 3184653 - DNA, 25 bp, Homo sapien
atcagctccagaaaggtacacacag

SEQ ID NO: 3184654 - DNA, 25 bp, Homo sapien
ccagaaaggtacacacagtgggaat

SEQ ID NO: 3184655 - DNA, 25 bp, Homo sapien
caacgtttcacatgcagtggcttta

SEQ ID NO: 3184656 - DNA, 25 bp, Homo sapien
cattgtcagtaacgtgaggactaaa

SEQ ID NO: 3184657 - DNA, 25 bp, Homo sapien
cagaggactagagagtaaatgacag

SEQ ID NO: 3184658 - DNA, 25 bp, Homo sapien
tattcaagcccacgcaagatacagg

SEQ ID NO: 3184659 - DNA, 25 bp, Homo sapien
taacaggcaactatgtccagcaagt

SEQ ID NO: 3184660 - DNA, 25 bp, Homo sapien
ctaacaggcaactatgtccagcaag

SEQ ID NO: 3184661 - DNA, 25 bp, Homo sapien
tagaggctttgccaacctgaagcag

SEQ ID NO: 3184662 - DNA, 25 bp, Homo sapien
gagaacctttcctggacccagcagc

SEQ ID NO: 3184663 - DNA, 25 bp, Homo sapien
atggcagtcctgtgggtggtgcccc

SEQ ID NO: 3184664 - DNA, 25 bp, Homo sapien
aaagtatgattctctgacagccaca

SEQ ID NO: 3184665 - DNA, 25 bp, Homo sapien
caaatccaaccacatgccggacagt

SEQ ID NO: 3184666 - DNA, 25 bp, Homo sapien
gcctattttgagaatcgaagccaag

SEQ ID NO: 3184667 - DNA, 25 bp, Homo sapien
gaggaccatgtcaagccactggaac

SEQ ID NO: 3184668 - DNA, 25 bp, Homo sapien
gccggacagtttcatgacgagtaga

SEQ ID NO: 3184669 - DNA, 25 bp, Homo sapien
gctccttttgtgtagaaaccattaa

SEQ ID NO: 3184670 - DNA, 25 bp, Homo sapien
tgctgtccccagttataagctgtgt

SEQ ID NO: 3184671 - DNA, 25 bp, Homo sapien
catgccagaaagttaacacactagg

SEQ ID NO: 3184672 - DNA, 25 bp, Homo sapien
tggctacacctgaaccactttggtt

SEQ ID NO: 3184673 - DNA, 25 bp, Homo sapien
gctttaatgattgacaggactgact

SEQ ID NO: 3184674 - DNA, 25 bp, Homo sapien
gccctctgtgttgccttccacatgt

SEQ ID NO: 3184675 - DNA, 25 bp, Homo sapien
agaagaagagtctctttacctcctc

SEQ ID NO: 3184676 - DNA, 25 bp, Homo sapien
tccacatgtccctcttctgggattt

SEQ ID NO: 3184677 - DNA, 25 bp, Homo sapien
tacctcctctcccaactacattcca

SEQ ID NO: 3184678 - DNA, 25 bp, Homo sapien
tggccacaccaatccagctgatgta

SEQ ID NO: 3184679 - DNA, 25 bp, Homo sapien
agggagagactcacatttaggagac

SEQ ID NO: 3184680 - DNA, 25 bp, Homo sapien
taactaggagtttccatgtagggcc

SEQ ID NO: 3184681 - DNA, 25 bp, Homo sapien
ggagactgagcactagatttctctt

SEQ ID NO: 3184682 - DNA, 25 bp, Homo sapien
caatgttcccatagcttctggaggc

SEQ ID NO: 3184683 - DNA, 25 bp, Homo sapien
ggcaatgttcccatagcttctggag

SEQ ID NO: 3184684 - DNA, 25 bp, Homo sapien
cagttcccaattagctgtggaggtt

SEQ ID NO: 3184685 - DNA, 25 bp, Homo sapien
tcactaataagccagttcccaatta

SEQ ID NO: 3184686 - DNA, 25 bp, Homo sapien
tcaaactcttgaaccacaagtctaa

SEQ ID NO: 3184687 - DNA, 25 bp, Homo sapien
aacagagttttgctgtactccaacc

SEQ ID NO: 3184688 - DNA, 25 bp, Homo sapien
caacctcttcatttcaaactcttga

SEQ ID NO: 3184689 - DNA, 25 bp, Homo sapien
gatatgcattgaaggtgggttgcca

SEQ ID NO: 3184690 - DNA, 25 bp, Homo sapien
aactgatatagaacgacaaaagacc

SEQ ID NO: 3184691 - DNA, 25 bp, Homo sapien
gaaaaggatgcctactttcaacgct

SEQ ID NO: 3184692 - DNA, 25 bp, Homo sapien
tggtatgaaggacaaaaacgatatg

SEQ ID NO: 3184693 - DNA, 25 bp, Homo sapien
gacagacagacccataggtagtatc

SEQ ID NO: 3184694 - DNA, 25 bp, Homo sapien
tccacatcttcgtggttttaactac

SEQ ID NO: 3184695 - DNA, 25 bp, Homo sapien
ttccacatcttcgtggttttaacta

SEQ ID NO: 3184696 - DNA, 25 bp, Homo sapien
cacatcttcgtggttttaactacct

SEQ ID NO: 3184697 - DNA, 25 bp, Homo sapien
atatagaagccaggatatacacaca

SEQ ID NO: 3184698 - DNA, 25 bp, Homo sapien
ctattgcatatagaagccaggatat

SEQ ID NO: 3184699 - DNA, 25 bp, Homo sapien
attgcatatagaagccaggatatac

SEQ ID NO: 3184700 - DNA, 25 bp, Homo sapien
gcatatagaagccaggatatacaca

SEQ ID NO: 3184701 - DNA, 25 bp, Homo sapien
tgccggtacctttctcgtttcctca

SEQ ID NO: 3184702 - DNA, 25 bp, Homo sapien
aacttttgctgaaccgctatcatct

SEQ ID NO: 3184703 - DNA, 25 bp, Homo sapien
tctctctcagcccattcaggcaatg

SEQ ID NO: 3184704 - DNA, 25 bp, Homo sapien
tcaggcactgttgttaatgtcatgt

SEQ ID NO: 3184705 - DNA, 25 bp, Homo sapien
cagctttcaaagaggcagaatatat

SEQ ID NO: 3184706 - DNA, 25 bp, Homo sapien
caatcatcacctgcttgcagtcagc

SEQ ID NO: 3184707 - DNA, 25 bp, Homo sapien
aatcatcacctgcttgcagtcagca

SEQ ID NO: 3184708 - DNA, 25 bp, Homo sapien
agctttcaaagaggcagaatatatc

SEQ ID NO: 3184709 - DNA, 25 bp, Homo sapien
gaataattgtcctctgcactgtcct

SEQ ID NO: 3184710 - DNA, 25 bp, Homo sapien
ctgaataattgtcctctgcactgtc

SEQ ID NO: 3184711 - DNA, 25 bp, Homo sapien
ataattgtcctctgcactgtccttc

SEQ ID NO: 3184712 - DNA, 25 bp, Homo sapien
aattgtcctctgcactgtccttcat

SEQ ID NO: 3184713 - DNA, 25 bp, Homo sapien
tcagtcggtattggtgtgcatctgt

SEQ ID NO: 3184714 - DNA, 25 bp, Homo sapien
tcggtattggtgtgcatctgttctt

SEQ ID NO: 3184715 - DNA, 25 bp, Homo sapien
cagtcggtattggtgtgcatctgtt

SEQ ID NO: 3184716 - DNA, 25 bp, Homo sapien
agtcggtattggtgtgcatctgttc

SEQ ID NO: 3184717 - DNA, 25 bp, Homo sapien
agcacgtcctgttcttgtactgtga

SEQ ID NO: 3184718 - DNA, 25 bp, Homo sapien
tgtactgtgatactgcatgagtaac

SEQ ID NO: 3184719 - DNA, 25 bp, Homo sapien
cctgttcttgtactgtgatactgca

SEQ ID NO: 3184720 - DNA, 25 bp, Homo sapien
gcaggagtggcaagcacgtcctgtt

SEQ ID NO: 3184721 - DNA, 25 bp, Homo sapien
catagggagatcttggaagtgattc

SEQ ID NO: 3184722 - DNA, 25 bp, Homo sapien
tgtgatttcatagggagatcttgga

SEQ ID NO: 3184723 - DNA, 25 bp, Homo sapien
tgccagaggacatgtgatttcatag

SEQ ID NO: 3184724 - DNA, 25 bp, Homo sapien
gatgttcaatctggtatgccagagg

SEQ ID NO: 3184725 - DNA, 25 bp, Homo sapien
agctccttctgtgtctaaggaccga

SEQ ID NO: 3184726 - DNA, 25 bp, Homo sapien
tctaaggaccgagtacagaatgaag

SEQ ID NO: 3184727 - DNA, 25 bp, Homo sapien
gcactgtgccggcatgtggaccaca

SEQ ID NO: 3184728 - DNA, 25 bp, Homo sapien
ccgagtacagaatgaagaaagatac

SEQ ID NO: 3184729 - DNA, 25 bp, Homo sapien
tcacagacagcctggtatgaatcat

SEQ ID NO: 3184730 - DNA, 25 bp, Homo sapien
tcatttaagggatcaatggtcacag

SEQ ID NO: 3184731 - DNA, 25 bp, Homo sapien
aaatgctgctttcatttaagggatc

SEQ ID NO: 3184732 - DNA, 25 bp, Homo sapien
gctgctttcatttaagggatcaatg

SEQ ID NO: 3184733 - DNA, 25 bp, Homo sapien
tgagtgcttcagatattccgtaggt

SEQ ID NO: 3184734 - DNA, 25 bp, Homo sapien
gagaaggtaggtgtagtcagaaaaa

SEQ ID NO: 3184735 - DNA, 25 bp, Homo sapien
gcaaagctgacttggttggaatctt

SEQ ID NO: 3184736 - DNA, 25 bp, Homo sapien
tccgtaggtgaagattgtgtatgcg

SEQ ID NO: 3184737 - DNA, 25 bp, Homo sapien
cctgtatgggactgtaatgcgctta

SEQ ID NO: 3184738 - DNA, 25 bp, Homo sapien
tattgtacgtttacagtcgcagcac

SEQ ID NO: 3184739 - DNA, 25 bp, Homo sapien
gctgaagggatttatgtgcacaacc

SEQ ID NO: 3184740 - DNA, 25 bp, Homo sapien
catgtgtcttctaggtgctggccca

SEQ ID NO: 3184741 - DNA, 25 bp, Homo sapien
tcttgatagaacagcagtcttcagg

SEQ ID NO: 3184742 - DNA, 25 bp, Homo sapien
caatagctgtcaactctagaaatag

SEQ ID NO: 3184743 - DNA, 25 bp, Homo sapien
gaccctaagtagaagaacagtgcag

SEQ ID NO: 3184744 - DNA, 25 bp, Homo sapien
cagtgcaggattcccaggtttatgg

SEQ ID NO: 3184745 - DNA, 25 bp, Homo sapien
aattgcggcaccctgtccttcctgc

SEQ ID NO: 3184746 - DNA, 25 bp, Homo sapien
gataaaatttccaattgcggcaccc

SEQ ID NO: 3184747 - DNA, 25 bp, Homo sapien
aaatttccaattgcggcaccctgtc

SEQ ID NO: 3184748 - DNA, 25 bp, Homo sapien
taaaatttccaattgcggcaccctg

SEQ ID NO: 3184749 - DNA, 25 bp, Homo sapien
tgccgggccagcattagtgtggtat

SEQ ID NO: 3184750 - DNA, 25 bp, Homo sapien
cattgaatttggaaactgccgggcc

SEQ ID NO: 3184751 - DNA, 25 bp, Homo sapien
cggagtccgaaatgtgtcaaagtta

SEQ ID NO: 3184752 - DNA, 25 bp, Homo sapien
aacattgaggactttagagatcgga

SEQ ID NO: 3184753 - DNA, 25 bp, Homo sapien
actgagatgctggtaaatgtcctca

SEQ ID NO: 3184754 - DNA, 25 bp, Homo sapien
tgactgagatgctggtaaatgtcct

SEQ ID NO: 3184755 - DNA, 25 bp, Homo sapien
gactgagatgctggtaaatgtcctc

SEQ ID NO: 3184756 - DNA, 25 bp, Homo sapien
ctgagatgctggtaaatgtcctcaa

SEQ ID NO: 3184757 - DNA, 25 bp, Homo sapien
ttggaagtggcagtgtgtcactctg

SEQ ID NO: 3184758 - DNA, 25 bp, Homo sapien
tgtcactctgtatcctattaacagg

SEQ ID NO: 3184759 - DNA, 25 bp, Homo sapien
aaaggtatgttgtggaatcctgaga

SEQ ID NO: 3184760 - DNA, 25 bp, Homo sapien
cctggatgttttggaacttcagtca

SEQ ID NO: 3184761 - DNA, 25 bp, Homo sapien
gaaataatcgaggttcagtccgcct

SEQ ID NO: 3184762 - DNA, 25 bp, Homo sapien
gaacacagggttctacaggtactat

SEQ ID NO: 3184763 - DNA, 25 bp, Homo sapien
tgtcaggcctgcatgtatgtcacag

SEQ ID NO: 3184764 - DNA, 25 bp, Homo sapien
cattcaccaagtaggagcaggccct

SEQ ID NO: 3184765 - DNA, 25 bp, Homo sapien
tctgcttatcttggagtaaacctca

SEQ ID NO: 3184766 - DNA, 25 bp, Homo sapien
cataaagacttctgttggtggtcct

SEQ ID NO: 3184767 - DNA, 25 bp, Homo sapien
cattgccctgagcaactttggcttt

SEQ ID NO: 3184768 - DNA, 25 bp, Homo sapien
tcttctgcctaagtggactagaccc

SEQ ID NO: 3184769 - DNA, 25 bp, Homo sapien
tacattgccgttttgaccatagtgg

SEQ ID NO: 3184770 - DNA, 25 bp, Homo sapien
tctgctggatggtgtttgctgttgc

SEQ ID NO: 3184771 - DNA, 25 bp, Homo sapien
tgccatacggtcttttacattgccg

SEQ ID NO: 3184772 - DNA, 25 bp, Homo sapien
cgttttgaccatagtgggtcctcct

SEQ ID NO: 3184773 - DNA, 25 bp, Homo sapien
cacctttattcccaagcacctgttg

SEQ ID NO: 3184774 - DNA, 25 bp, Homo sapien
ccaagcacctgttgaatgtccttag

SEQ ID NO: 3184775 - DNA, 25 bp, Homo sapien
tattcccaagcacctgttgaatgtc

SEQ ID NO: 3184776 - DNA, 25 bp, Homo sapien
cacctgttgaatgtccttagtcctt

SEQ ID NO: 3184777 - DNA, 25 bp, Homo sapien
ccaaattacttagatgtatacaata

SEQ ID NO: 3184778 - DNA, 25 bp, Homo sapien
gcaccaaattacttagatgtataca

SEQ ID NO: 3184779 - DNA, 25 bp, Homo sapien
aattacttagatgtatacaataaca

SEQ ID NO: 3184780 - DNA, 25 bp, Homo sapien
cagcaccaaattacttagatgtata

SEQ ID NO: 3184781 - DNA, 25 bp, Homo sapien
gaaatgtctttccttaaacatggga

SEQ ID NO: 3184782 - DNA, 25 bp, Homo sapien
ttccttaaacatgggataaatggca

SEQ ID NO: 3184783 - DNA, 25 bp, Homo sapien
tgtctttccttaaacatgggataaa

SEQ ID NO: 3184784 - DNA, 25 bp, Homo sapien
tggaaatgtctttccttaaacatgg

SEQ ID NO: 3184785 - DNA, 25 bp, Homo sapien
tagttaaaactaatgtaggatgatg

SEQ ID NO: 3184786 - DNA, 25 bp, Homo sapien
ttaaaactaatgtaggatgatgatc

SEQ ID NO: 3184787 - DNA, 25 bp, Homo sapien
ctagttaaaactaatgtaggatgat

SEQ ID NO: 3184788 - DNA, 25 bp, Homo sapien
gttaaaactaatgtaggatgatgat

SEQ ID NO: 3184789 - DNA, 25 bp, Homo sapien
cttgtttcctcctctaaatggtgtg

SEQ ID NO: 3184790 - DNA, 25 bp, Homo sapien
tgcttgacgattggagtgccttttc

SEQ ID NO: 3184791 - DNA, 25 bp, Homo sapien
tgaaatgcttgacgattggagtgcc

SEQ ID NO: 3184792 - DNA, 25 bp, Homo sapien
ctaaatggtgtgaaatgcttgacga

SEQ ID NO: 3184793 - DNA, 25 bp, Homo sapien
atgaggctggtgatgcaccaggagc

SEQ ID NO: 3184794 - DNA, 25 bp, Homo sapien
tgctgcttcccgtggggaatacaga

SEQ ID NO: 3184795 - DNA, 25 bp, Homo sapien
ccatttgtgatctgtctgaaataac

SEQ ID NO: 3184796 - DNA, 25 bp, Homo sapien
tcccgtggggaatacagatgaggct

SEQ ID NO: 3184797 - DNA, 25 bp, Homo sapien
tatagccaagtcaaatgtctgcctg

SEQ ID NO: 3184798 - DNA, 25 bp, Homo sapien
tttcccatttggcagcagacagctt

SEQ ID NO: 3184799 - DNA, 25 bp, Homo sapien
taaatgattcttaggactgccagtc

SEQ ID NO: 3184800 - DNA, 25 bp, Homo sapien
gagtattcacatagctatcccatag

SEQ ID NO: 3184801 - DNA, 25 bp, Homo sapien
ggtcatttgtagtagccttgggcat

SEQ ID NO: 3184802 - DNA, 25 bp, Homo sapien
gagtggtcatttgtagtagccttgg

SEQ ID NO: 3184803 - DNA, 25 bp, Homo sapien
gtggtcatttgtagtagccttgggc

SEQ ID NO: 3184804 - DNA, 25 bp, Homo sapien
tggtcatttgtagtagccttgggca

SEQ ID NO: 3184805 - DNA, 25 bp, Homo sapien
gtctcatgacatggtagcctggtaa

SEQ ID NO: 3184806 - DNA, 25 bp, Homo sapien
gcctggtaaatagcgccctctggag

SEQ ID NO: 3184807 - DNA, 25 bp, Homo sapien
ccacaggtggttgggcatgtctgca

SEQ ID NO: 3184808 - DNA, 25 bp, Homo sapien
gggcatgtctgcactacacgtctca

SEQ ID NO: 3184809 - DNA, 25 bp, Homo sapien
cagtgcccagaatctgtctttagaa

SEQ ID NO: 3184810 - DNA, 25 bp, Homo sapien
ttattattacactggcccaatggct

SEQ ID NO: 3184811 - DNA, 25 bp, Homo sapien
gttattattacactggcccaatggc

SEQ ID NO: 3184812 - DNA, 25 bp, Homo sapien
agaatctgggctgtgttattattac

SEQ ID NO: 3184813 - DNA, 25 bp, Homo sapien
gccttcaggcagttcagtcctggct

SEQ ID NO: 3184814 - DNA, 25 bp, Homo sapien
ctggctttgtgtttgacctggaggt

SEQ ID NO: 3184815 - DNA, 25 bp, Homo sapien
aaggccttcaggcagttcagtcctg

SEQ ID NO: 3184816 - DNA, 25 bp, Homo sapien
gacctggaggtcagatagctattct

SEQ ID NO: 3184817 - DNA, 25 bp, Homo sapien
cagtctgaaataccagtcactgact

SEQ ID NO: 3184818 - DNA, 25 bp, Homo sapien
tcattttcattttagcgaacatgct

SEQ ID NO: 3184819 - DNA, 25 bp, Homo sapien
caaaattttcactgatccagagtga

SEQ ID NO: 3184820 - DNA, 25 bp, Homo sapien
gactggttccgatccatgacaaaat

SEQ ID NO: 3184821 - DNA, 25 bp, Homo sapien
tgtagagcagccaaattaagaccgc

SEQ ID NO: 3184822 - DNA, 25 bp, Homo sapien
ccagtattatacgactacagtcaca

SEQ ID NO: 3184823 - DNA, 25 bp, Homo sapien
taagaccgctagatcagttttatac

SEQ ID NO: 3184824 - DNA, 25 bp, Homo sapien
ccatcattggtttgaagatacctaa

SEQ ID NO: 3184825 - DNA, 25 bp, Homo sapien
tttctacctctccccattcctactg

SEQ ID NO: 3184826 - DNA, 25 bp, Homo sapien
tctacctctccccattcctactgcc

SEQ ID NO: 3184827 - DNA, 25 bp, Homo sapien
cctctccccattcctactgcccttt

SEQ ID NO: 3184828 - DNA, 25 bp, Homo sapien
ttcctactgcccttttcaccctctc

SEQ ID NO: 3184829 - DNA, 25 bp, Homo sapien
ttgagataactttactgagaaagca

SEQ ID NO: 3184830 - DNA, 25 bp, Homo sapien
aaagggagtaatcaacagtgacatc

SEQ ID NO: 3184831 - DNA, 25 bp, Homo sapien
ggtcttgtcctatacttaagtggaa

SEQ ID NO: 3184832 - DNA, 25 bp, Homo sapien
cagtgacatcaaactgttttagtgc

SEQ ID NO: 3184833 - DNA, 25 bp, Homo sapien
gaatccctgatgtaattgagaacct

SEQ ID NO: 3184834 - DNA, 25 bp, Homo sapien
tacccttggtgcactacattttaac

SEQ ID NO: 3184835 - DNA, 25 bp, Homo sapien
actttgatgaggcagttttagccag

SEQ ID NO: 3184836 - DNA, 25 bp, Homo sapien
cttttcatgcctatggaatccctga

SEQ ID NO: 3184837 - DNA, 25 bp, Homo sapien
tcacttttagaaatgcgttcatctg

SEQ ID NO: 3184838 - DNA, 25 bp, Homo sapien
taaagggcgaaaagatcctcagaga

SEQ ID NO: 3184839 - DNA, 25 bp, Homo sapien
cctaagtatgtgcagaactatagca

SEQ ID NO: 3184840 - DNA, 25 bp, Homo sapien
cctctggaggaactctattgcatat

SEQ ID NO: 3184841 - DNA, 25 bp, Homo sapien
cattattgttttggagccactgcca

SEQ ID NO: 3184842 - DNA, 25 bp, Homo sapien
taatattccactgcaccagctactg

SEQ ID NO: 3184843 - DNA, 25 bp, Homo sapien
gccatggtcatcatcaacctttctg

SEQ ID NO: 3184844 - DNA, 25 bp, Homo sapien
ttttcctctggttttgagtcattat

SEQ ID NO: 3184845 - DNA, 25 bp, Homo sapien
tgggatttatcgatctccttggtga

SEQ ID NO: 3184846 - DNA, 25 bp, Homo sapien
cgatctccttggtgatcgtggtcca

SEQ ID NO: 3184847 - DNA, 25 bp, Homo sapien
gatcgtggtccatgtggcatccagg

SEQ ID NO: 3184848 - DNA, 25 bp, Homo sapien
gaatgaatgattgccttcctgtcaa

SEQ ID NO: 3184849 - DNA, 25 bp, Homo sapien
cactaactatgggagtaaggtggtc

SEQ ID NO: 3184850 - DNA, 25 bp, Homo sapien
tcttcttagcaaagtagccagccca

SEQ ID NO: 3184851 - DNA, 25 bp, Homo sapien
tacaagggccacagggttaaccatg

SEQ ID NO: 3184852 - DNA, 25 bp, Homo sapien
tcaggtggatagttagagctcacat

SEQ ID NO: 3184853 - DNA, 25 bp, Homo sapien
ggcatcaaggacttcactagcccac

SEQ ID NO: 3184854 - DNA, 25 bp, Homo sapien
tagggcatcaaggacttcactagcc

SEQ ID NO: 3184855 - DNA, 25 bp, Homo sapien
tcttatgtagggcatcaaggacttc

SEQ ID NO: 3184856 - DNA, 25 bp, Homo sapien
tatgtagggcatcaaggacttcact

SEQ ID NO: 3184857 - DNA, 25 bp, Homo sapien
caattcctaatgcccactgcctttt

SEQ ID NO: 3184858 - DNA, 25 bp, Homo sapien
attcctaatgcccactgccttttaa

SEQ ID NO: 3184859 - DNA, 25 bp, Homo sapien
gcaattcctaatgcccactgccttt

SEQ ID NO: 3184860 - DNA, 25 bp, Homo sapien
tcctaatgcccactgccttttaagt

SEQ ID NO: 3184861 - DNA, 25 bp, Homo sapien
tcaatcaggctgctcagttgaagct

SEQ ID NO: 3184862 - DNA, 25 bp, Homo sapien
tcagttgaagctgatgaatgactct

SEQ ID NO: 3184863 - DNA, 25 bp, Homo sapien
gatgaatgactctgcaagttatctt

SEQ ID NO: 3184864 - DNA, 25 bp, Homo sapien
aagttatcttttggagggctgtact

SEQ ID NO: 3184865 - DNA, 25 bp, Homo sapien
caaggatggtcatctagtgggttcc

SEQ ID NO: 3184866 - DNA, 25 bp, Homo sapien
gggttcctcttcctgacatcgcagg

SEQ ID NO: 3184867 - DNA, 25 bp, Homo sapien
ggttatatgcagaatccaatgccag

SEQ ID NO: 3184868 - DNA, 25 bp, Homo sapien
tgtctgggctggcatggttgactct

SEQ ID NO: 3184869 - DNA, 25 bp, Homo sapien
ctttgtgcagccgtagtaccaagct

SEQ ID NO: 3184870 - DNA, 25 bp, Homo sapien
tttgtgcagccgtagtaccaagctc

SEQ ID NO: 3184871 - DNA, 25 bp, Homo sapien
gttgcaggtcataggtttaggtgta

SEQ ID NO: 3184872 - DNA, 25 bp, Homo sapien
tgcaggtcataggtttaggtgtaag

SEQ ID NO: 3184873 - DNA, 25 bp, Homo sapien
gtagttgcaggtcataggtttaggt

SEQ ID NO: 3184874 - DNA, 25 bp, Homo sapien
gaggtagttgcaggtcataggttta

SEQ ID NO: 3184875 - DNA, 25 bp, Homo sapien
gaaccttgtttgattcactttgaga

SEQ ID NO: 3184876 - DNA, 25 bp, Homo sapien
tcataaacgcattttgaatccaact

SEQ ID NO: 3184877 - DNA, 25 bp, Homo sapien
tttgaatccaactgaaccttgtttg

SEQ ID NO: 3184878 - DNA, 25 bp, Homo sapien
cttgtgattcataaacgcattttga

SEQ ID NO: 3184879 - DNA, 25 bp, Homo sapien
gctgcgctaccccagatgtggttgt

SEQ ID NO: 3184880 - DNA, 25 bp, Homo sapien
ccagctgggcctttccaagctccat

SEQ ID NO: 3184881 - DNA, 25 bp, Homo sapien
agaagaccgctaaagctgcgctacc

SEQ ID NO: 3184882 - DNA, 25 bp, Homo sapien
tgtggttgtatgacttctggttaaa

SEQ ID NO: 3184883 - DNA, 25 bp, Homo sapien
ttcaggcccatcacgagtacaggct

SEQ ID NO: 3184884 - DNA, 25 bp, Homo sapien
agtacaggctgctcatgagtcacct

SEQ ID NO: 3184885 - DNA, 25 bp, Homo sapien
catcacgagtacaggctgctcatga

SEQ ID NO: 3184886 - DNA, 25 bp, Homo sapien
cttcaggcccatcacgagtacaggc

SEQ ID NO: 3184887 - DNA, 25 bp, Homo sapien
cttgcaactggaaattttgcttgtg

SEQ ID NO: 3184888 - DNA, 25 bp, Homo sapien
ctgtgaacttctgtctcttgcaact

SEQ ID NO: 3184889 - DNA, 25 bp, Homo sapien
gtctgtgaacttctgtctcttgcaa

SEQ ID NO: 3184890 - DNA, 25 bp, Homo sapien
tgtctcttgcaactggaaattttgc

SEQ ID NO: 3184891 - DNA, 25 bp, Homo sapien
tccacttaatgacccacactgatgc

SEQ ID NO: 3184892 - DNA, 25 bp, Homo sapien
ttctgaactccacttaatgacccac

SEQ ID NO: 3184893 - DNA, 25 bp, Homo sapien
gaactccacttaatgacccacactg

SEQ ID NO: 3184894 - DNA, 25 bp, Homo sapien
gaaggatgttgtcttaagcctgttt

SEQ ID NO: 3184895 - DNA, 25 bp, Homo sapien
catcctttttgtaacgggctgttgg

SEQ ID NO: 3184896 - DNA, 25 bp, Homo sapien
gattcctattattgcctcctcttcg

SEQ ID NO: 3184897 - DNA, 25 bp, Homo sapien
ggatgcactgaggttgctggcaaag

SEQ ID NO: 3184898 - DNA, 25 bp, Homo sapien
cgcctacgggatgataaactcctgg

SEQ ID NO: 3184899 - DNA, 25 bp, Homo sapien
gtcattgctcttaaagggttctcca

SEQ ID NO: 3184900 - DNA, 25 bp, Homo sapien
tgctcttaaagggttctccactcgt

SEQ ID NO: 3184901 - DNA, 25 bp, Homo sapien
tcttaaagggttctccactcgtgca

SEQ ID NO: 3184902 - DNA, 25 bp, Homo sapien
taaagggttctccactcgtgcacac

SEQ ID NO: 3184903 - DNA, 25 bp, Homo sapien
gcagctggagatgtccgagcccaag

SEQ ID NO: 3184904 - DNA, 25 bp, Homo sapien
caagttgtcgacgaccgacagggtg

SEQ ID NO: 3184905 - DNA, 25 bp, Homo sapien
cagggtggtgaaaggtaagcggagc

SEQ ID NO: 3184906 - DNA, 25 bp, Homo sapien
gagcccaaggcaattgatcccaagt

SEQ ID NO: 3184907 - DNA, 25 bp, Homo sapien
tgggtgctcgtgtgtgcgcttctcc

SEQ ID NO: 3184908 - DNA, 25 bp, Homo sapien
agacctccagccgagcggtttgcag

SEQ ID NO: 3184909 - DNA, 25 bp, Homo sapien
gatcggtcttaatcctggccgtgtg

SEQ ID NO: 3184910 - DNA, 25 bp, Homo sapien
gacgcgcggaaaaggcagcaacttt

SEQ ID NO: 3184911 - DNA, 25 bp, Homo sapien
gcgccctctagccaatgaacgcgag

SEQ ID NO: 3184912 - DNA, 25 bp, Homo sapien
gatgcgccctctagccaatgaacgc

SEQ ID NO: 3184913 - DNA, 25 bp, Homo sapien
atgaacgcgaggaactccggcgtcg

SEQ ID NO: 3184914 - DNA, 25 bp, Homo sapien
tctagccaatgaacgcgaggaactc

SEQ ID NO: 3184915 - DNA, 25 bp, Homo sapien
ggactggtccgtagaggcggcaggc

SEQ ID NO: 3184916 - DNA, 25 bp, Homo sapien
gcagggactggtccgtagaggcggc

SEQ ID NO: 3184917 - DNA, 25 bp, Homo sapien
ctgagcagggactggtccgtagagg

SEQ ID NO: 3184918 - DNA, 25 bp, Homo sapien
tgagcagggactggtccgtagaggc

SEQ ID NO: 3184919 - DNA, 25 bp, Homo sapien
ctctcctgccctaatctcggcctgc

SEQ ID NO: 3184920 - DNA, 25 bp, Homo sapien
cttgccaaagaggcgcgggtgtgtg

SEQ ID NO: 3184921 - DNA, 25 bp, Homo sapien
tgtgtgtgcggggtccgcgttcgga

SEQ ID NO: 3184922 - DNA, 25 bp, Homo sapien
tggccgcgacgccttgcccactctc

SEQ ID NO: 3184923 - DNA, 25 bp, Homo sapien
gcggcttaacccagccgacaaggca

SEQ ID NO: 3184924 - DNA, 25 bp, Homo sapien
tgcggcttaacccagccgacaaggc

SEQ ID NO: 3184925 - DNA, 25 bp, Homo sapien
ggcttaacccagccgacaaggcacg

SEQ ID NO: 3184926 - DNA, 25 bp, Homo sapien
ctgcggcttaacccagccgacaagg

SEQ ID NO: 3184927 - DNA, 25 bp, Homo sapien
cggagacaccctctgcacttggcta

SEQ ID NO: 3184928 - DNA, 25 bp, Homo sapien
gcaaggtaagttgtttattcgtcgc

SEQ ID NO: 3184929 - DNA, 25 bp, Homo sapien
gcatcgcagtcgtagctcttctccg

SEQ ID NO: 3184930 - DNA, 25 bp, Homo sapien
ttttggcgatcctccctggacagct

SEQ ID NO: 3184931 - DNA, 25 bp, Homo sapien
cttccgaccgtagggacaagtgtgg

SEQ ID NO: 3184932 - DNA, 25 bp, Homo sapien
gaagatgggtgtcaactgtcccggc

SEQ ID NO: 3184933 - DNA, 25 bp, Homo sapien
gacggagacccgcttttcagactct

SEQ ID NO: 3184934 - DNA, 25 bp, Homo sapien
caaccacgttgccagtccttgggtg

SEQ ID NO: 3184935 - DNA, 25 bp, Homo sapien
atggcttctgggaagttcaagcaca

SEQ ID NO: 3184936 - DNA, 25 bp, Homo sapien
ttctgggaagttcaagcacacatct

SEQ ID NO: 3184937 - DNA, 25 bp, Homo sapien
ggaagttcaagcacacatctatttc

SEQ ID NO: 3184938 - DNA, 25 bp, Homo sapien
ggcttctgggaagttcaagcacaca

SEQ ID NO: 3184939 - DNA, 25 bp, Homo sapien
caagagtaagtggtttgttaattct

SEQ ID NO: 3184940 - DNA, 25 bp, Homo sapien
gagaattcaagagtaagtggtttgt

SEQ ID NO: 3184941 - DNA, 25 bp, Homo sapien
ctagaagagaattcaagagtaagtg

SEQ ID NO: 3184942 - DNA, 25 bp, Homo sapien
gaattcaagagtaagtggtttgtta

SEQ ID NO: 3184943 - DNA, 25 bp, Homo sapien
ggatcccacatcctgagatcaattg

SEQ ID NO: 3184944 - DNA, 25 bp, Homo sapien
gagatcaattggaagtagtgatgcc

SEQ ID NO: 3184945 - DNA, 25 bp, Homo sapien
gtgtatgaggatcccacatcctgag

SEQ ID NO: 3184946 - DNA, 25 bp, Homo sapien
tgttcaaaatgtgtatgaggatccc

SEQ ID NO: 3184947 - DNA, 25 bp, Homo sapien
ttcaccatatgcaaatatgaattcc

SEQ ID NO: 3184948 - DNA, 25 bp, Homo sapien
cttcaccatatgcaaatatgaattc

SEQ ID NO: 3184949 - DNA, 25 bp, Homo sapien
ggatagttaactatgtcttcatcta

SEQ ID NO: 3184950 - DNA, 25 bp, Homo sapien
tctgttcatcaacggatagttaact

SEQ ID NO: 3184951 - DNA, 25 bp, Homo sapien
tcatcaacggatagttaactatgtc

SEQ ID NO: 3184952 - DNA, 25 bp, Homo sapien
atttctgttcatcaacggatagtta

SEQ ID NO: 3184953 - DNA, 25 bp, Homo sapien
catcagtcactgaatcaggatcaag

SEQ ID NO: 3184954 - DNA, 25 bp, Homo sapien
accagtccttaccattcaggtcaaa

SEQ ID NO: 3184955 - DNA, 25 bp, Homo sapien
caatctgacaggcacttatccatta

SEQ ID NO: 3184956 - DNA, 25 bp, Homo sapien
tcaagtttaggatcttcaagaaacc

SEQ ID NO: 3184957 - DNA, 25 bp, Homo sapien
catcgtgtctaagagttatagcagc

SEQ ID NO: 3184958 - DNA, 25 bp, Homo sapien
tttaaattcagtagccaagccatat

SEQ ID NO: 3184959 - DNA, 25 bp, Homo sapien
caagccatatccatcgtgtctaaga

SEQ ID NO: 3184960 - DNA, 25 bp, Homo sapien
tctaagagttatagcagcaatagaa

SEQ ID NO: 3184961 - DNA, 25 bp, Homo sapien
caaagaggagcaggtagggcagggc

SEQ ID NO: 3184962 - DNA, 25 bp, Homo sapien
aagaggagcaggtagggcagggcca

SEQ ID NO: 3184963 - DNA, 25 bp, Homo sapien
ttacacaggattcagagaaacaaag

SEQ ID NO: 3184964 - DNA, 25 bp, Homo sapien
aaacaaagaggagcaggtagggcag

SEQ ID NO: 3184965 - DNA, 25 bp, Homo sapien
tctcataagtgtttttctcaggctc

SEQ ID NO: 3184966 - DNA, 25 bp, Homo sapien
tgattagtctcataagtgtttttct

SEQ ID NO: 3184967 - DNA, 25 bp, Homo sapien
tcatgaagtcctgatgattagtctc

SEQ ID NO: 3184968 - DNA, 25 bp, Homo sapien
ttccaccagtcatgaagtcctgatg

SEQ ID NO: 3184969 - DNA, 25 bp, Homo sapien
gccaatgtatgtaaaacctatcatc

SEQ ID NO: 3184970 - DNA, 25 bp, Homo sapien
aatttctggtacactcagaagttca

SEQ ID NO: 3184971 - DNA, 25 bp, Homo sapien
tctggtacactcagaagttcagaaa

SEQ ID NO: 3184972 - DNA, 25 bp, Homo sapien
agaaacaagccaatgtatgtaaaac

SEQ ID NO: 3184973 - DNA, 25 bp, Homo sapien
gggcttcttatcagatacagttttg

SEQ ID NO: 3184974 - DNA, 25 bp, Homo sapien
cagatacagttttgtaccagaacag

SEQ ID NO: 3184975 - DNA, 25 bp, Homo sapien
tgcatagggcttcttatcagataca

SEQ ID NO: 3184976 - DNA, 25 bp, Homo sapien
gatacagttttgtaccagaacagag

SEQ ID NO: 3184977 - DNA, 25 bp, Homo sapien
gctctctcgagactgtaggatacat

SEQ ID NO: 3184978 - DNA, 25 bp, Homo sapien
ctctctcgagactgtaggatacatt

SEQ ID NO: 3184979 - DNA, 25 bp, Homo sapien
tgctctctcgagactgtaggataca

SEQ ID NO: 3184980 - DNA, 25 bp, Homo sapien
catgctctctcgagactgtaggata

SEQ ID NO: 3184981 - DNA, 25 bp, Homo sapien
tttgcccccttacaatctgctgata

SEQ ID NO: 3184982 - DNA, 25 bp, Homo sapien
tgcccccttacaatctgctgataat

SEQ ID NO: 3184983 - DNA, 25 bp, Homo sapien
tgaatttgcccccttacaatctgct

SEQ ID NO: 3184984 - DNA, 25 bp, Homo sapien
cccttacaatctgctgataatcaaa

SEQ ID NO: 3184985 - DNA, 25 bp, Homo sapien
gcatctttgacgagccagcgattgg

SEQ ID NO: 3184986 - DNA, 25 bp, Homo sapien
tcagatctaacgtgggaaccgcagt

SEQ ID NO: 3184987 - DNA, 25 bp, Homo sapien
gcgattggtcttctctgtacgtcag

SEQ ID NO: 3184988 - DNA, 25 bp, Homo sapien
tataccgcctcaattaatgtccaga

SEQ ID NO: 3184989 - DNA, 25 bp, Homo sapien
agctgacgttaccaatgtctttgca

SEQ ID NO: 3184990 - DNA, 25 bp, Homo sapien
ttagcaaagactgtagacaattcct

SEQ ID NO: 3184991 - DNA, 25 bp, Homo sapien
aagactgtagacaattccttggact

SEQ ID NO: 3184992 - DNA, 25 bp, Homo sapien
gatttttcagctgacgttaccaatg

SEQ ID NO: 3184993 - DNA, 25 bp, Homo sapien
cttgattgagttgaatgatttccat

SEQ ID NO: 3184994 - DNA, 25 bp, Homo sapien
tcttgattgagttgaatgatttcca

SEQ ID NO: 3184995 - DNA, 25 bp, Homo sapien
ctcttgattgagttgaatgatttcc

SEQ ID NO: 3184996 - DNA, 25 bp, Homo sapien
tgttttccttagatcccaatcctgc

SEQ ID NO: 3184997 - DNA, 25 bp, Homo sapien
tagatcccaatcctgcttgtgccag

SEQ ID NO: 3184998 - DNA, 25 bp, Homo sapien
tgtagagcagctgttctgatctttc

SEQ ID NO: 3184999 - DNA, 25 bp, Homo sapien
tcaccccagttttcagcagatgacc

SEQ ID NO: 3185000 - DNA, 25 bp, Homo sapien
caaatggcactttggtcatctctcc

SEQ ID NO: 3185001 - DNA, 25 bp, Homo sapien
aaatggcactttggtcatctctcct

SEQ ID NO: 3185002 - DNA, 25 bp, Homo sapien
ggaataagtcacaacaggagaggca

SEQ ID NO: 3185003 - DNA, 25 bp, Homo sapien
caggaataagtcacaacaggagagg

SEQ ID NO: 3185004 - DNA, 25 bp, Homo sapien
acaggaataagtcacaacaggagag

SEQ ID NO: 3185005 - DNA, 25 bp, Homo sapien
aggaataagtcacaacaggagaggc

SEQ ID NO: 3185006 - DNA, 25 bp, Homo sapien
agctgctctgagagcgatggacaca

SEQ ID NO: 3185007 - DNA, 25 bp, Homo sapien
gccttttgcaccatagctctgggag

SEQ ID NO: 3185008 - DNA, 25 bp, Homo sapien
tgagtggccctagcgaccccgcctt

SEQ ID NO: 3185009 - DNA, 25 bp, Homo sapien
cgaccccgccttttgcaccatagct

SEQ ID NO: 3185010 - DNA, 25 bp, Homo sapien
cccgccttttgcaccatagctctgg

SEQ ID NO: 3185011 - DNA, 25 bp, Homo sapien
tgggtaactaaatcagcagaaagtg

SEQ ID NO: 3185012 - DNA, 25 bp, Homo sapien
ccatgggtaactaaatcagcagaaa

SEQ ID NO: 3185013 - DNA, 25 bp, Homo sapien
catgggtaactaaatcagcagaaag

SEQ ID NO: 3185014 - DNA, 25 bp, Homo sapien
gaaagtgaagctggataagcagaga

SEQ ID NO: 3185015 - DNA, 25 bp, Homo sapien
tcttttctgtattgttccaattttc

SEQ ID NO: 3185016 - DNA, 25 bp, Homo sapien
aaaaatatggagcacttcacaaatt

SEQ ID NO: 3185017 - DNA, 25 bp, Homo sapien
aaatttgcatgtcctccttgtacag

SEQ ID NO: 3185018 - DNA, 25 bp, Homo sapien
gggccatgctaatcttttctgtatt

SEQ ID NO: 3185019 - DNA, 25 bp, Homo sapien
tagaatggtagtaaggtataggtcc

SEQ ID NO: 3185020 - DNA, 25 bp, Homo sapien
gaaactttggctccatgccaatctg

SEQ ID NO: 3185021 - DNA, 25 bp, Homo sapien
gagccctgtctctaagatacccatt

SEQ ID NO: 3185022 - DNA, 25 bp, Homo sapien
ttccactagggactcttctttgaca

SEQ ID NO: 3185023 - DNA, 25 bp, Homo sapien
tggcaaaaaggttcttgatggccaa

SEQ ID NO: 3185024 - DNA, 25 bp, Homo sapien
aaggttcttgatggccaatatcgtg

SEQ ID NO: 3185025 - DNA, 25 bp, Homo sapien
tcttgatggccaatatcgtggttcc

SEQ ID NO: 3185026 - DNA, 25 bp, Homo sapien
gatggccaatatcgtggttcctgag

SEQ ID NO: 3185027 - DNA, 25 bp, Homo sapien
gggcctcgttcaccaatagatgtta

SEQ ID NO: 3185028 - DNA, 25 bp, Homo sapien
tattgtgtagaacaccttgggtacc

SEQ ID NO: 3185029 - DNA, 25 bp, Homo sapien
tcctctgggggcaagcactctgtgg

SEQ ID NO: 3185030 - DNA, 25 bp, Homo sapien
tgcaggatacccagtgggcaagtag

SEQ ID NO: 3185031 - DNA, 25 bp, Homo sapien
aaaaagctatttgtttggccctgag

SEQ ID NO: 3185032 - DNA, 25 bp, Homo sapien
tacttagagatagatactgcaccac

SEQ ID NO: 3185033 - DNA, 25 bp, Homo sapien
acagtctccaaggtataggcaccca

SEQ ID NO: 3185034 - DNA, 25 bp, Homo sapien
tagccacagctgtcatacttagaga

SEQ ID NO: 3185035 - DNA, 25 bp, Homo sapien
caggaaacgcagccccggggctcat

SEQ ID NO: 3185036 - DNA, 25 bp, Homo sapien
ctcaggaaacgcagccccggggctc

SEQ ID NO: 3185037 - DNA, 25 bp, Homo sapien
tcaggaaacgcagccccggggctca

SEQ ID NO: 3185038 - DNA, 25 bp, Homo sapien
tgctgcccgccgagcgctacctgga

SEQ ID NO: 3185039 - DNA, 25 bp, Homo sapien
ctacctggactctcccggccagaga

SEQ ID NO: 3185040 - DNA, 25 bp, Homo sapien
cggttgaagccgaggggcctgcgca

SEQ ID NO: 3185041 - DNA, 25 bp, Homo sapien
ggccagagactccccgcgattttct

SEQ ID NO: 3185042 - DNA, 25 bp, Homo sapien
caagccccttgcctggcgctgctgg

SEQ ID NO: 3185043 - DNA, 25 bp, Homo sapien
ccttgcctggcgctgctggcagcat

SEQ ID NO: 3185044 - DNA, 25 bp, Homo sapien
tccgggctcccaagccccttgcctg

SEQ ID NO: 3185045 - DNA, 25 bp, Homo sapien
ctcccaagccccttgcctggcgctg

SEQ ID NO: 3185046 - DNA, 25 bp, Homo sapien
ctaacgatggcccgtggtctccgca

SEQ ID NO: 3185047 - DNA, 25 bp, Homo sapien
aagcccctccgaatgcgcgactacc

SEQ ID NO: 3185048 - DNA, 25 bp, Homo sapien
aacgatggcccgtggtctccgcaga

SEQ ID NO: 3185049 - DNA, 25 bp, Homo sapien
ccgtagcccggcctcggcgtcaagc

SEQ ID NO: 3185050 - DNA, 25 bp, Homo sapien
tttctctctacttgccctagaagat

SEQ ID NO: 3185051 - DNA, 25 bp, Homo sapien
tgcttttagaccctaatcacacttt

SEQ ID NO: 3185052 - DNA, 25 bp, Homo sapien
gatattatagttcactaaatattca

SEQ ID NO: 3185053 - DNA, 25 bp, Homo sapien
atttgcttttagaccctaatcacac

SEQ ID NO: 3185054 - DNA, 25 bp, Homo sapien
agcaaaaccagcaagcaagtagtcc

SEQ ID NO: 3185055 - DNA, 25 bp, Homo sapien
aaaacaaagaataggctgaatttct

SEQ ID NO: 3185056 - DNA, 25 bp, Homo sapien
catcagatgcaagcaaaaccagcaa

SEQ ID NO: 3185057 - DNA, 25 bp, Homo sapien
gaatttctactcatcagatgcaagc

SEQ ID NO: 3185058 - DNA, 25 bp, Homo sapien
cagcaactccaaatgccgaaaagag

SEQ ID NO: 3185059 - DNA, 25 bp, Homo sapien
gaaattctccaagcgatataacagg

SEQ ID NO: 3185060 - DNA, 25 bp, Homo sapien
tcctgttcagttgagatctcccatc

SEQ ID NO: 3185061 - DNA, 25 bp, Homo sapien
tgtaagacgttaagttcagcaactc

SEQ ID NO: 3185062 - DNA, 25 bp, Homo sapien
catataaacaatgctgtatgaagcc

SEQ ID NO: 3185063 - DNA, 25 bp, Homo sapien
gctgtatgaagcctataaatgtgga

SEQ ID NO: 3185064 - DNA, 25 bp, Homo sapien
tcaggggttgcaagcaaaccagcat

SEQ ID NO: 3185065 - DNA, 25 bp, Homo sapien
tggtgatattcagaaacggcagttg

SEQ ID NO: 3185066 - DNA, 25 bp, Homo sapien
ccactgctagtggtatggtgtttct

SEQ ID NO: 3185067 - DNA, 25 bp, Homo sapien
gctcgtaggtctgttggaatgttga

SEQ ID NO: 3185068 - DNA, 25 bp, Homo sapien
catggaatttcagtgggaagcacca

SEQ ID NO: 3185069 - DNA, 25 bp, Homo sapien
ttatttccccagaatgttttgctcg

SEQ ID NO: 3185070 - DNA, 25 bp, Homo sapien
ggccgtgttctaatgcgcttattac

SEQ ID NO: 3185071 - DNA, 25 bp, Homo sapien
tccaaagggctggccgtgttctaat

SEQ ID NO: 3185072 - DNA, 25 bp, Homo sapien
cagtatcaccaattacttcatctct

SEQ ID NO: 3185073 - DNA, 25 bp, Homo sapien
tctaatgcgcttattacttgatgta

SEQ ID NO: 3185074 - DNA, 25 bp, Homo sapien
acttggcttcactaacgtggttggg

SEQ ID NO: 3185075 - DNA, 25 bp, Homo sapien
aattggcgttcttagactattcact

SEQ ID NO: 3185076 - DNA, 25 bp, Homo sapien
tcacttttgatttacccgtgtctta

SEQ ID NO: 3185077 - DNA, 25 bp, Homo sapien
gggtcttgcttgttatccattctgg

SEQ ID NO: 3185078 - DNA, 25 bp, Homo sapien
cctgaatctgccattctgaataggc

SEQ ID NO: 3185079 - DNA, 25 bp, Homo sapien
gccattctgaataggcattcctttg

SEQ ID NO: 3185080 - DNA, 25 bp, Homo sapien
aacgattccatcacagtagacattg

SEQ ID NO: 3185081 - DNA, 25 bp, Homo sapien
tggttgtagctttaacgattccatc

SEQ ID NO: 3185082 - DNA, 25 bp, Homo sapien
tacttgctttggaattacaatatag

SEQ ID NO: 3185083 - DNA, 25 bp, Homo sapien
tatttcactacctgtcttaatgttt

SEQ ID NO: 3185084 - DNA, 25 bp, Homo sapien
tgaaaacttgtcagctacattatca

SEQ ID NO: 3185085 - DNA, 25 bp, Homo sapien
tagaggataaggtggacttgtcaca

SEQ ID NO: 3185086 - DNA, 25 bp, Homo sapien
acacagtgtgggctaggacaactcc

SEQ ID NO: 3185087 - DNA, 25 bp, Homo sapien
atatatataatctatgtgggagcaa

SEQ ID NO: 3185088 - DNA, 25 bp, Homo sapien
ggaaaaccaaatgccctgaaggaga

SEQ ID NO: 3185089 - DNA, 25 bp, Homo sapien
cctcgaggtcaaacaaatctaaaat

SEQ ID NO: 3185090 - DNA, 25 bp, Homo sapien
agtttccttcttaatgtccttattg

SEQ ID NO: 3185091 - DNA, 25 bp, Homo sapien
tccttattgatccactggccattca

SEQ ID NO: 3185092 - DNA, 25 bp, Homo sapien
taatgtccttattgatccactggcc

SEQ ID NO: 3185093 - DNA, 25 bp, Homo sapien
tatctcaaatttttgactgctctaa

SEQ ID NO: 3185094 - DNA, 25 bp, Homo sapien
atatggatgtaaggacaccatcaag

SEQ ID NO: 3185095 - DNA, 25 bp, Homo sapien
gtttgaagagactggaactcataat

SEQ ID NO: 3185096 - DNA, 25 bp, Homo sapien
catgtttgaatatggatgtaaggac

SEQ ID NO: 3185097 - DNA, 25 bp, Homo sapien
cataatatggtatctcatgtttgaa

SEQ ID NO: 3185098 - DNA, 25 bp, Homo sapien
tataattacagggtcctctattatt

SEQ ID NO: 3185099 - DNA, 25 bp, Homo sapien
tctataattacagggtcctctatta

SEQ ID NO: 3185100 - DNA, 25 bp, Homo sapien
taattacagggtcctctattatttc

SEQ ID NO: 3185101 - DNA, 25 bp, Homo sapien
atctataattacagggtcctctatt

SEQ ID NO: 3185102 - DNA, 25 bp, Homo sapien
gccaaattttgctgcacagtggaga

SEQ ID NO: 3185103 - DNA, 25 bp, Homo sapien
ctttgtgaccatgcctttcagcaat

SEQ ID NO: 3185104 - DNA, 25 bp, Homo sapien
catgcctttcagcaatatgtgcggg

SEQ ID NO: 3185105 - DNA, 25 bp, Homo sapien
caggttgctcctgaacattgaagca

SEQ ID NO: 3185106 - DNA, 25 bp, Homo sapien
tctacattttcttgaaggattccaa

SEQ ID NO: 3185107 - DNA, 25 bp, Homo sapien
cagctggagactgaatgttgtctcc

SEQ ID NO: 3185108 - DNA, 25 bp, Homo sapien
tcctctacattttcttgaaggattc

SEQ ID NO: 3185109 - DNA, 25 bp, Homo sapien
tttcttgaaggattccaaaccacat

SEQ ID NO: 3185110 - DNA, 25 bp, Homo sapien
agccatttgctaagtattcatgcca

SEQ ID NO: 3185111 - DNA, 25 bp, Homo sapien
gacagccctatataaacacctttgc

SEQ ID NO: 3185112 - DNA, 25 bp, Homo sapien
tggccattgaatacgctacctgtca

SEQ ID NO: 3185113 - DNA, 25 bp, Homo sapien
tcagtgtacattttccgggtgataa

SEQ ID NO: 3185114 - DNA, 25 bp, Homo sapien
gtgccagtggcatagccatgtaaaa

SEQ ID NO: 3185115 - DNA, 25 bp, Homo sapien
agtggcatagccatgtaaaactcca

SEQ ID NO: 3185116 - DNA, 25 bp, Homo sapien
cccttgtgtaatgggcagaaggtgc

SEQ ID NO: 3185117 - DNA, 25 bp, Homo sapien
tacagacataacaacccttgtgtaa

SEQ ID NO: 3185118 - DNA, 25 bp, Homo sapien
gtctgtttctcatcgtagcttctta

SEQ ID NO: 3185119 - DNA, 25 bp, Homo sapien
tccatcaaagggatgaagagtttct

SEQ ID NO: 3185120 - DNA, 25 bp, Homo sapien
tcttagtatgtcaaggtcacataca

SEQ ID NO: 3185121 - DNA, 25 bp, Homo sapien
tctccttcagtgaccacagtcatca

SEQ ID NO: 3185122 - DNA, 25 bp, Homo sapien
aggactttgggcctctagagctctc

SEQ ID NO: 3185123 - DNA, 25 bp, Homo sapien
tcaagatgcccactacaggctctgt

SEQ ID NO: 3185124 - DNA, 25 bp, Homo sapien
tttattagaggaatttcccactgtg

SEQ ID NO: 3185125 - DNA, 25 bp, Homo sapien
taacatagaatcgtctacagaggac

SEQ ID NO: 3185126 - DNA, 25 bp, Homo sapien
gatacagtgttgcaagtctgctgca

SEQ ID NO: 3185127 - DNA, 25 bp, Homo sapien
gatgcctcagttgtgggaaaattgc

SEQ ID NO: 3185128 - DNA, 25 bp, Homo sapien
cagttgggaacatttcgtccactac

SEQ ID NO: 3185129 - DNA, 25 bp, Homo sapien
tggatgaaagagcacgatcacctcc

SEQ ID NO: 3185130 - DNA, 25 bp, Homo sapien
gatatatattcccatgttaaccgta

SEQ ID NO: 3185131 - DNA, 25 bp, Homo sapien
ccagtaaatacaatgccagtgccag

SEQ ID NO: 3185132 - DNA, 25 bp, Homo sapien
gctcgcatgagcaacagctaatcta

SEQ ID NO: 3185133 - DNA, 25 bp, Homo sapien
ctgctcgcttggtctaatgtgctct

SEQ ID NO: 3185134 - DNA, 25 bp, Homo sapien
ttatggctaattgatggaacttgga

SEQ ID NO: 3185135 - DNA, 25 bp, Homo sapien
gaacttggatgtaagcacagactca

SEQ ID NO: 3185136 - DNA, 25 bp, Homo sapien
gatataaataagcactacactactg

SEQ ID NO: 3185137 - DNA, 25 bp, Homo sapien
tacactactgtgctcgttttacaga

SEQ ID NO: 3185138 - DNA, 25 bp, Homo sapien
ccatttggtatctagggagttagca

SEQ ID NO: 3185139 - DNA, 25 bp, Homo sapien
tgtgtcttgaatgcctaaaatacct

SEQ ID NO: 3185140 - DNA, 25 bp, Homo sapien
gaaactgaagctcagcaagatccat

SEQ ID NO: 3185141 - DNA, 25 bp, Homo sapien
tacctgtctcaaaggtcccatagca

SEQ ID NO: 3185142 - DNA, 25 bp, Homo sapien
caatagacgcagaaaggaccttcaa

SEQ ID NO: 3185143 - DNA, 25 bp, Homo sapien
aatagacgcagaaaggaccttcaaa

SEQ ID NO: 3185144 - DNA, 25 bp, Homo sapien
gctgataagcaacttagtaaagtgt

SEQ ID NO: 3185145 - DNA, 25 bp, Homo sapien
caacttagtaaagtgtcaggataca

SEQ ID NO: 3185146 - DNA, 25 bp, Homo sapien
gactggtcaaatcgaaatcagggag

SEQ ID NO: 3185147 - DNA, 25 bp, Homo sapien
caactcctgtgaatgccttaagcaa

SEQ ID NO: 3185148 - DNA, 25 bp, Homo sapien
tagaaggctattcatttcccgaagg

SEQ ID NO: 3185149 - DNA, 25 bp, Homo sapien
gaattgcatacctccttgttgtgaa

SEQ ID NO: 3185150 - DNA, 25 bp, Homo sapien
cctcccttccaagtacagaattaag

SEQ ID NO: 3185151 - DNA, 25 bp, Homo sapien
tgcatttatctaaacacagaggagc

SEQ ID NO: 3185152 - DNA, 25 bp, Homo sapien
gaattgtcatcaccacaagttgttg

SEQ ID NO: 3185153 - DNA, 25 bp, Homo sapien
gaacacctagcaatttcccacacag

SEQ ID NO: 3185154 - DNA, 25 bp, Homo sapien
aaaatgaggcaatatcctcttcata

SEQ ID NO: 3185155 - DNA, 25 bp, Homo sapien
gaaaatgaggcaatatcctcttcat

SEQ ID NO: 3185156 - DNA, 25 bp, Homo sapien
aaatgaggcaatatcctcttcataa

SEQ ID NO: 3185157 - DNA, 25 bp, Homo sapien
tgcactctgcccgtatgtcttcctg

SEQ ID NO: 3185158 - DNA, 25 bp, Homo sapien
tctgcccgtatgtcttcctgctttc

SEQ ID NO: 3185159 - DNA, 25 bp, Homo sapien
catctgcactctgcccgtatgtctt

SEQ ID NO: 3185160 - DNA, 25 bp, Homo sapien
cgtatgtcttcctgctttcatgatg

SEQ ID NO: 3185161 - DNA, 25 bp, Homo sapien
tgccaacctctagtgggctgtgttt

SEQ ID NO: 3185162 - DNA, 25 bp, Homo sapien
gaacacatacaagtcatcatactgg

SEQ ID NO: 3185163 - DNA, 25 bp, Homo sapien
aaggcattagctacaggtcgcggcg

SEQ ID NO: 3185164 - DNA, 25 bp, Homo sapien
tctggatcagcaccaggaatgaaca

SEQ ID NO: 3185165 - DNA, 25 bp, Homo sapien
tggtaaggtgaagtgaggtctttcc

SEQ ID NO: 3185166 - DNA, 25 bp, Homo sapien
gaagacccttgatagagtcgtttta

SEQ ID NO: 3185167 - DNA, 25 bp, Homo sapien
tcatgaagacccttgatagagtcgt

SEQ ID NO: 3185168 - DNA, 25 bp, Homo sapien
catgaagacccttgatagagtcgtt

SEQ ID NO: 3185169 - DNA, 25 bp, Homo sapien
gacccttgatagagtcgttttagac

SEQ ID NO: 3185170 - DNA, 25 bp, Homo sapien
ggtgtccatctgtcacttttttgag

SEQ ID NO: 3185171 - DNA, 25 bp, Homo sapien
ttcccaaggtggcttagtcaagtgc

SEQ ID NO: 3185172 - DNA, 25 bp, Homo sapien
ggaaacagtattagagaagagctcg

SEQ ID NO: 3185173 - DNA, 25 bp, Homo sapien
gaagagctcgtgactccaggagaat

SEQ ID NO: 3185174 - DNA, 25 bp, Homo sapien
tttcttgtctaacaccaggatgacc

SEQ ID NO: 3185175 - DNA, 25 bp, Homo sapien
ttcttgtctaacaccaggatgaccc

SEQ ID NO: 3185176 - DNA, 25 bp, Homo sapien
caggatgaccccagttttgacttct

SEQ ID NO: 3185177 - DNA, 25 bp, Homo sapien
actgtcatcaatctcagcaaaagta

SEQ ID NO: 3185178 - DNA, 25 bp, Homo sapien
tatactcagattggccaatatcatg

SEQ ID NO: 3185179 - DNA, 25 bp, Homo sapien
tttataatgaaagaccgactcccag

SEQ ID NO: 3185180 - DNA, 25 bp, Homo sapien
gagctatgtaaggtgtagtttcctc

SEQ ID NO: 3185181 - DNA, 25 bp, Homo sapien
ttaattcacttgcagctgcacccat

SEQ ID NO: 3185182 - DNA, 25 bp, Homo sapien
ttaggaagaccacagaacttgtcat

SEQ ID NO: 3185183 - DNA, 25 bp, Homo sapien
atcatcagattgtcttctggctgtc

SEQ ID NO: 3185184 - DNA, 25 bp, Homo sapien
gatgattaacacagcaccatttgtc

SEQ ID NO: 3185185 - DNA, 25 bp, Homo sapien
acagaaggtgattacaagtttggcc

SEQ ID NO: 3185186 - DNA, 25 bp, Homo sapien
tggccttcagagtataacagaattg

SEQ ID NO: 3185187 - DNA, 25 bp, Homo sapien
tcaggcttctgttaaagctcaggaa

SEQ ID NO: 3185188 - DNA, 25 bp, Homo sapien
tgaggactccagtgccatgtgaaac

SEQ ID NO: 3185189 - DNA, 25 bp, Homo sapien
gacactcactctatacaagaaggaa

SEQ ID NO: 3185190 - DNA, 25 bp, Homo sapien
cagtcctggctggtatcctaagaag

SEQ ID NO: 3185191 - DNA, 25 bp, Homo sapien
aggtggagtttttctgccgctacag

SEQ ID NO: 3185192 - DNA, 25 bp, Homo sapien
gaccatcagttagacagcccctgag

SEQ ID NO: 3185193 - DNA, 25 bp, Homo sapien
ttcctgaccatcagttagacagccc

SEQ ID NO: 3185194 - DNA, 25 bp, Homo sapien
catcagttagacagcccctgagagt

SEQ ID NO: 3185195 - DNA, 25 bp, Homo sapien
ttcttcctgaccatcagttagacag

SEQ ID NO: 3185196 - DNA, 25 bp, Homo sapien
ttaatcaaacagctatctagaactg

SEQ ID NO: 3185197 - DNA, 25 bp, Homo sapien
gaatatgaccgtgttatctctcact

SEQ ID NO: 3185198 - DNA, 25 bp, Homo sapien
atctctcactaaggaatatcaaggg

SEQ ID NO: 3185199 - DNA, 25 bp, Homo sapien
tagaactgggttctgaagcaatggg

SEQ ID NO: 3185200 - DNA, 25 bp, Homo sapien
acagatctctcctaccagtggtgcc

SEQ ID NO: 3185201 - DNA, 25 bp, Homo sapien
ggtctgcacctaaacacatgtgtat

SEQ ID NO: 3185202 - DNA, 25 bp, Homo sapien
tacatagtgatggtttgctgctgcc

SEQ ID NO: 3185203 - DNA, 25 bp, Homo sapien
caacgccagggattctacatgattc

SEQ ID NO: 3185204 - DNA, 25 bp, Homo sapien
ttttcccaataatgcagtctcgtag

SEQ ID NO: 3185205 - DNA, 25 bp, Homo sapien
cccaataatgcagtctcgtagttgt

SEQ ID NO: 3185206 - DNA, 25 bp, Homo sapien
agtctcgtagttgtcgtaatttctc

SEQ ID NO: 3185207 - DNA, 25 bp, Homo sapien
aatgcagtctcgtagttgtcgtaat

SEQ ID NO: 3185208 - DNA, 25 bp, Homo sapien
caacatctcaggttccgtctatagt

SEQ ID NO: 3185209 - DNA, 25 bp, Homo sapien
tattcttctgatgacggtagttctc

SEQ ID NO: 3185210 - DNA, 25 bp, Homo sapien
taggcaactcaattactgtcaagaa

SEQ ID NO: 3185211 - DNA, 25 bp, Homo sapien
gtttgctaagatcaacaacatccaa

SEQ ID NO: 3185212 - DNA, 25 bp, Homo sapien
gttagaactgttaactacatacttg

SEQ ID NO: 3185213 - DNA, 25 bp, Homo sapien
acatacttgtttcacctgcatttca

SEQ ID NO: 3185214 - DNA, 25 bp, Homo sapien
cttcccatgggcttatcaaatttat

SEQ ID NO: 3185215 - DNA, 25 bp, Homo sapien
tatttgaccctcatgttattttgaa

SEQ ID NO: 3185216 - DNA, 25 bp, Homo sapien
tccagccactgtgagtgaaaccatg

SEQ ID NO: 3185217 - DNA, 25 bp, Homo sapien
gctgccctgccttgatattccgcta

SEQ ID NO: 3185218 - DNA, 25 bp, Homo sapien
tatggccatgtacccaccaacttaa

SEQ ID NO: 3185219 - DNA, 25 bp, Homo sapien
cattaacacaagcttgctgccctgc

SEQ ID NO: 3185220 - DNA, 25 bp, Homo sapien
tggatggtgcacaatggtgagttta

SEQ ID NO: 3185221 - DNA, 25 bp, Homo sapien
ggatggtgcacaatggtgagtttat

SEQ ID NO: 3185222 - DNA, 25 bp, Homo sapien
acctggatggtgcacaatggtgagt

SEQ ID NO: 3185223 - DNA, 25 bp, Homo sapien
tacaaactcagttattacctcttta

SEQ ID NO: 3185224 - DNA, 25 bp, Homo sapien
aatacaaactcagttattacctctt

SEQ ID NO: 3185225 - DNA, 25 bp, Homo sapien
agaaatacaaactcagttattacct

SEQ ID NO: 3185226 - DNA, 25 bp, Homo sapien
gaaatacaaactcagttattacctc

SEQ ID NO: 3185227 - DNA, 25 bp, Homo sapien
cttattttcattgtgggcagtttcc

SEQ ID NO: 3185228 - DNA, 25 bp, Homo sapien
acttattttcattgtgggcagtttc

SEQ ID NO: 3185229 - DNA, 25 bp, Homo sapien
ctttcttgcaacagaaaccaaattc

SEQ ID NO: 3185230 - DNA, 25 bp, Homo sapien
ccttttcaacttggggtcgagcagg

SEQ ID NO: 3185231 - DNA, 25 bp, Homo sapien
taatgatctttcttgcaacagaaac

SEQ ID NO: 3185232 - DNA, 25 bp, Homo sapien
ttccttttcaacttggggtcgagca

SEQ ID NO: 3185233 - DNA, 25 bp, Homo sapien
cgtagattcgtgagtttcattataa

SEQ ID NO: 3185234 - DNA, 25 bp, Homo sapien
caccctgaaagcaaaatgtccgtag

SEQ ID NO: 3185235 - DNA, 25 bp, Homo sapien
aatgtccgtagattcgtgagtttca

SEQ ID NO: 3185236 - DNA, 25 bp, Homo sapien
aaagcaaaatgtccgtagattcgtg

SEQ ID NO: 3185237 - DNA, 25 bp, Homo sapien
gtatgaattcgctttaaagagagca

SEQ ID NO: 3185238 - DNA, 25 bp, Homo sapien
gagcaggcaatccaaattcaagctt

SEQ ID NO: 3185239 - DNA, 25 bp, Homo sapien
tagtaatatacccatatgaagcagg

SEQ ID NO: 3185240 - DNA, 25 bp, Homo sapien
tctgctgtcatagtatgaattcgct

SEQ ID NO: 3185241 - DNA, 25 bp, Homo sapien
tcagaaaatgaaccagctacttaaa

SEQ ID NO: 3185242 - DNA, 25 bp, Homo sapien
gaataatctgttgaggttagtgccc

SEQ ID NO: 3185243 - DNA, 25 bp, Homo sapien
tgtaacaataatgactggaactctg

SEQ ID NO: 3185244 - DNA, 25 bp, Homo sapien
tgctacaccgcatttaacttctctg

SEQ ID NO: 3185245 - DNA, 25 bp, Homo sapien
ttattggctaattcttataaattta

SEQ ID NO: 3185246 - DNA, 25 bp, Homo sapien
aaaggccgagaagcaattttattgg

SEQ ID NO: 3185247 - DNA, 25 bp, Homo sapien
tattggctaattcttataaatttac

SEQ ID NO: 3185248 - DNA, 25 bp, Homo sapien
ggccgagaagcaattttattggcta

SEQ ID NO: 3185249 - DNA, 25 bp, Homo sapien
tgtgttctaccacgaatccaagcat

SEQ ID NO: 3185250 - DNA, 25 bp, Homo sapien
ctttcctaacaacgagagcagtgag

SEQ ID NO: 3185251 - DNA, 25 bp, Homo sapien
acgagagcagtgaggaaagtgtgtt

SEQ ID NO: 3185252 - DNA, 25 bp, Homo sapien
aaagtgtgttctaccacgaatccaa

SEQ ID NO: 3185253 - DNA, 25 bp, Homo sapien
tggcataccctggagttgtttttct

SEQ ID NO: 3185254 - DNA, 25 bp, Homo sapien
ccctctcatctggtcatcatttttt

SEQ ID NO: 3185255 - DNA, 25 bp, Homo sapien
tgtggcataccctggagttgttttt

SEQ ID NO: 3185256 - DNA, 25 bp, Homo sapien
ctgagtggagagtttttatgcatcc

SEQ ID NO: 3185257 - DNA, 25 bp, Homo sapien
caataaagattttctcaatgttgat

SEQ ID NO: 3185258 - DNA, 25 bp, Homo sapien
gattttctcaatgttgatgatgatc

SEQ ID NO: 3185259 - DNA, 25 bp, Homo sapien
ttttctcaatgttgatgatgatcat

SEQ ID NO: 3185260 - DNA, 25 bp, Homo sapien
taaagattttctcaatgttgatgat

SEQ ID NO: 3185261 - DNA, 25 bp, Homo sapien
atccaagatctatttctgaaataca

SEQ ID NO: 3185262 - DNA, 25 bp, Homo sapien
aagatatggggatctcttggtgaaa

SEQ ID NO: 3185263 - DNA, 25 bp, Homo sapien
atacatttgtgtgccaagatatggg

SEQ ID NO: 3185264 - DNA, 25 bp, Homo sapien
ttctgaaatacatttgtgtgccaag

SEQ ID NO: 3185265 - DNA, 25 bp, Homo sapien
tcatctgggaacctccgaatgattg

SEQ ID NO: 3185266 - DNA, 25 bp, Homo sapien
tgggatgactaagtgtccactcagc

SEQ ID NO: 3185267 - DNA, 25 bp, Homo sapien
cctccgaatgattgatatgtccctg

SEQ ID NO: 3185268 - DNA, 25 bp, Homo sapien
tgtccctgttacacttcccaatggg

SEQ ID NO: 3185269 - DNA, 25 bp, Homo sapien
ctggccagaggataagcacaagtgt

SEQ ID NO: 3185270 - DNA, 25 bp, Homo sapien
gccagaggataagcacaagtgtaac

SEQ ID NO: 3185271 - DNA, 25 bp, Homo sapien
gataagcacaagtgtaacgggaggc

SEQ ID NO: 3185272 - DNA, 25 bp, Homo sapien
gcacaagtgtaacgggaggcttgca

SEQ ID NO: 3185273 - DNA, 25 bp, Homo sapien
caccaagcacacaaaggtcatctag

SEQ ID NO: 3185274 - DNA, 25 bp, Homo sapien
tctagagttctaggtgtcccttgac

SEQ ID NO: 3185275 - DNA, 25 bp, Homo sapien
tgtcccttgacttggatggctttgt

SEQ ID NO: 3185276 - DNA, 25 bp, Homo sapien
cacacaaaggtcatctagagttcta

SEQ ID NO: 3185277 - DNA, 25 bp, Homo sapien
ggaacaatgattagctctttaagta

SEQ ID NO: 3185278 - DNA, 25 bp, Homo sapien
ttgggaacaatgattagctctttaa

SEQ ID NO: 3185279 - DNA, 25 bp, Homo sapien
gggaacaatgattagctctttaagt

SEQ ID NO: 3185280 - DNA, 25 bp, Homo sapien
tgggaacaatgattagctctttaag

SEQ ID NO: 3185281 - DNA, 25 bp, Homo sapien
tgttagttggagataaaatggtaaa

SEQ ID NO: 3185282 - DNA, 25 bp, Homo sapien
tacaactgccacttggcgttccaag

SEQ ID NO: 3185283 - DNA, 25 bp, Homo sapien
ggcgttccaagtttccacacatgtg

SEQ ID NO: 3185284 - DNA, 25 bp, Homo sapien
ccacacatgtgttagttggagataa

SEQ ID NO: 3185285 - DNA, 25 bp, Homo sapien
cacctctgatatacttgatcaccat

SEQ ID NO: 3185286 - DNA, 25 bp, Homo sapien
cacacctctgatatacttgatcacc

SEQ ID NO: 3185287 - DNA, 25 bp, Homo sapien
ctcccacacctctgatatacttgat

SEQ ID NO: 3185288 - DNA, 25 bp, Homo sapien
cccacacctctgatatacttgatca

SEQ ID NO: 3185289 - DNA, 25 bp, Homo sapien
acaggcccacggactgaaaggaggt

SEQ ID NO: 3185290 - DNA, 25 bp, Homo sapien
gaggttgtagttgttattcggagat

SEQ ID NO: 3185291 - DNA, 25 bp, Homo sapien
cagtgagaagctagatctggaagag

SEQ ID NO: 3185292 - DNA, 25 bp, Homo sapien
acccggtgatgttcctgggactgga

SEQ ID NO: 3185293 - DNA, 25 bp, Homo sapien
cttgaactcctctaatctcttgctt

SEQ ID NO: 3185294 - DNA, 25 bp, Homo sapien
taaaatctaatattcacccctgcct

SEQ ID NO: 3185295 - DNA, 25 bp, Homo sapien
tggtttctgaagattaggctatgga

SEQ ID NO: 3185296 - DNA, 25 bp, Homo sapien
gggtcctcaatccacatttgcaaag

SEQ ID NO: 3185297 - DNA, 25 bp, Homo sapien
ctcttcgtcaaggtgaacagcatca

SEQ ID NO: 3185298 - DNA, 25 bp, Homo sapien
ttcgtcaaggtgaacagcatcactg

SEQ ID NO: 3185299 - DNA, 25 bp, Homo sapien
aaggtgaacagcatcactgcctttg

SEQ ID NO: 3185300 - DNA, 25 bp, Homo sapien
cgtcaaggtgaacagcatcactgcc

SEQ ID NO: 3185301 - DNA, 25 bp, Homo sapien
agaagtagggtgaggcagacacccc

SEQ ID NO: 3185302 - DNA, 25 bp, Homo sapien
tagaagtagggtgaggcagacaccc

SEQ ID NO: 3185303 - DNA, 25 bp, Homo sapien
gaagcgagagcggagcagaaacttc

SEQ ID NO: 3185304 - DNA, 25 bp, Homo sapien
tttagagtcagtgcaggaagcgaga

SEQ ID NO: 3185305 - DNA, 25 bp, Homo sapien
ggaagcgagagcggagcagaaactt

SEQ ID NO: 3185306 - DNA, 25 bp, Homo sapien
aagcgagagcggagcagaaacttcc

SEQ ID NO: 3185307 - DNA, 25 bp, Homo sapien
cttttctttccttcatctgagcact

SEQ ID NO: 3185308 - DNA, 25 bp, Homo sapien
tctttccttcatctgagcacttaac

SEQ ID NO: 3185309 - DNA, 25 bp, Homo sapien
tttctttccttcatctgagcactta

SEQ ID NO: 3185310 - DNA, 25 bp, Homo sapien
ccttttctttccttcatctgagcac

SEQ ID NO: 3185311 - DNA, 25 bp, Homo sapien
tcccaagtcacttaaggtgatttga

SEQ ID NO: 3185312 - DNA, 25 bp, Homo sapien
gacaaagcccaacaatgatctcagg

SEQ ID NO: 3185313 - DNA, 25 bp, Homo sapien
ttgaacatcctagattcacactccc

SEQ ID NO: 3185314 - DNA, 25 bp, Homo sapien
gaaaattggtctaaaattgaacatc

SEQ ID NO: 3185315 - DNA, 25 bp, Homo sapien
aagttcaggcttagaggcttatcgc

SEQ ID NO: 3185316 - DNA, 25 bp, Homo sapien
tctgacttatgttgtggttgcaccc

SEQ ID NO: 3185317 - DNA, 25 bp, Homo sapien
gctggactgctgtacatcaaggaca

SEQ ID NO: 3185318 - DNA, 25 bp, Homo sapien
ggttgcacccctcacaaatggcaga

SEQ ID NO: 3185319 - DNA, 25 bp, Homo sapien
gatgccctccacaatttcatcgatg

SEQ ID NO: 3185320 - DNA, 25 bp, Homo sapien
gggactcagtacttccatagcaatc

SEQ ID NO: 3185321 - DNA, 25 bp, Homo sapien
gatgataacgctctgcgatgccctc

SEQ ID NO: 3185322 - DNA, 25 bp, Homo sapien
aatagggacgattgcctggatgata

SEQ ID NO: 3185323 - DNA, 25 bp, Homo sapien
cacccagctgacaattgatgtctaa

SEQ ID NO: 3185324 - DNA, 25 bp, Homo sapien
cctgttttgcccatcttagtgatag

SEQ ID NO: 3185325 - DNA, 25 bp, Homo sapien
cactgaactaagctgtgaaactgga

SEQ ID NO: 3185326 - DNA, 25 bp, Homo sapien
tctacatgagttggcttacttcaga

SEQ ID NO: 3185327 - DNA, 25 bp, Homo sapien
gactccgatacctcatgctactgct

SEQ ID NO: 3185328 - DNA, 25 bp, Homo sapien
tgactctccacactggctgactctt

SEQ ID NO: 3185329 - DNA, 25 bp, Homo sapien
cctcatgctactgctcttcagggtc

SEQ ID NO: 3185330 - DNA, 25 bp, Homo sapien
tgcacagactccgatacctcatgct

SEQ ID NO: 3185331 - DNA, 25 bp, Homo sapien
ggcttccatcaggtctatcccatag

SEQ ID NO: 3185332 - DNA, 25 bp, Homo sapien
taatttctccggagtgattatgtca

SEQ ID NO: 3185333 - DNA, 25 bp, Homo sapien
tatcccatagacctaatttctccgg

SEQ ID NO: 3185334 - DNA, 25 bp, Homo sapien
aataggcttccatcaggtctatccc

SEQ ID NO: 3185335 - DNA, 25 bp, Homo sapien
gcttcaatttggtgtgtggtctgca

SEQ ID NO: 3185336 - DNA, 25 bp, Homo sapien
cagcttcaatttggtgtgtggtctg

SEQ ID NO: 3185337 - DNA, 25 bp, Homo sapien
tcaatttggtgtgtggtctgcatct

SEQ ID NO: 3185338 - DNA, 25 bp, Homo sapien
ttcagcttcaatttggtgtgtggtc

SEQ ID NO: 3185339 - DNA, 25 bp, Homo sapien
gggactgataagatgccgtgaagat

SEQ ID NO: 3185340 - DNA, 25 bp, Homo sapien
ttcagggactgataagatgccgtga

SEQ ID NO: 3185341 - DNA, 25 bp, Homo sapien
ggattcagggactgataagatgccg

SEQ ID NO: 3185342 - DNA, 25 bp, Homo sapien
ggtggtcagtgaatgcattcactgg

SEQ ID NO: 3185343 - DNA, 25 bp, Homo sapien
caagtagaagtaggtctgggtcaca

SEQ ID NO: 3185344 - DNA, 25 bp, Homo sapien
agtaggtctgggtcacaaagttcag

SEQ ID NO: 3185345 - DNA, 25 bp, Homo sapien
gaccaagtagaagtaggtctgggtc

SEQ ID NO: 3185346 - DNA, 25 bp, Homo sapien
tctgggtcacaaagttcagggtcat

SEQ ID NO: 3185347 - DNA, 25 bp, Homo sapien
atgtaacagcgtcctacctatctga

SEQ ID NO: 3185348 - DNA, 25 bp, Homo sapien
tgtaacagcgtcctacctatctgaa

SEQ ID NO: 3185349 - DNA, 25 bp, Homo sapien
ccctgcccagcacttactaatatat

SEQ ID NO: 3185350 - DNA, 25 bp, Homo sapien
gaatgttgcttcatcagtcattccc

SEQ ID NO: 3185351 - DNA, 25 bp, Homo sapien
gaggatgatgtgtccttctagcaca

SEQ ID NO: 3185352 - DNA, 25 bp, Homo sapien
cttgagaaagttacagtcatccatc

SEQ ID NO: 3185353 - DNA, 25 bp, Homo sapien
gaccatgactacattgtagacgcat

SEQ ID NO: 3185354 - DNA, 25 bp, Homo sapien
tatgaccaggggaccatgactacat

SEQ ID NO: 3185355 - DNA, 25 bp, Homo sapien
ctagttttatcaggtatgaccaggg

SEQ ID NO: 3185356 - DNA, 25 bp, Homo sapien
tctttccctagttttatcaggtatg

SEQ ID NO: 3185357 - DNA, 25 bp, Homo sapien
cattaagcttcgtccaccacagtga

SEQ ID NO: 3185358 - DNA, 25 bp, Homo sapien
tttcctcagtccatttcccatcaac

SEQ ID NO: 3185359 - DNA, 25 bp, Homo sapien
agtaaagttgcaaagcgagtcatta

SEQ ID NO: 3185360 - DNA, 25 bp, Homo sapien
caaagcgagtcattaagcttcgtcc

SEQ ID NO: 3185361 - DNA, 25 bp, Homo sapien
ggtatgcctgggatcagatgattct

SEQ ID NO: 3185362 - DNA, 25 bp, Homo sapien
ggtatcttcaaagtcaactctcgca

SEQ ID NO: 3185363 - DNA, 25 bp, Homo sapien
ttgtgcagcgtgtgtaccagctgcg

SEQ ID NO: 3185364 - DNA, 25 bp, Homo sapien
aactctcgcatccaaagcactgggc

SEQ ID NO: 3185365 - DNA, 25 bp, Homo sapien
cagcacttaagggaagacttcctgc

SEQ ID NO: 3185366 - DNA, 25 bp, Homo sapien
gcagactcagcacttaagggaagac

SEQ ID NO: 3185367 - DNA, 25 bp, Homo sapien
ttaaaagtgtgtttgtcgcggtgca

SEQ ID NO: 3185368 - DNA, 25 bp, Homo sapien
aaagtgtgtttgtcgcggtgcagac

SEQ ID NO: 3185369 - DNA, 25 bp, Homo sapien
caaactggtggatgagtcttttctg

SEQ ID NO: 3185370 - DNA, 25 bp, Homo sapien
tcaaactggtggatgagtcttttct

SEQ ID NO: 3185371 - DNA, 25 bp, Homo sapien
tgtcaaactggtggatgagtctttt

SEQ ID NO: 3185372 - DNA, 25 bp, Homo sapien
aactggtggatgagtcttttctgat

SEQ ID NO: 3185373 - DNA, 25 bp, Homo sapien
tctcccaaatcattatgttcaaagg

SEQ ID NO: 3185374 - DNA, 25 bp, Homo sapien
gtgagttaacaaacatggagtcatt

SEQ ID NO: 3185375 - DNA, 25 bp, Homo sapien
aacaaacatggagtcattgtggaac

SEQ ID NO: 3185376 - DNA, 25 bp, Homo sapien
ttcaaagggatcctctggaatgaga

SEQ ID NO: 3185377 - DNA, 25 bp, Homo sapien
ttagtatgaatttatgttgtttagg

SEQ ID NO: 3185378 - DNA, 25 bp, Homo sapien
tgttgtttaggggacaactgattac

SEQ ID NO: 3185379 - DNA, 25 bp, Homo sapien
atgttgtttaggggacaactgatta

SEQ ID NO: 3185380 - DNA, 25 bp, Homo sapien
ctgcctaaggtgaaagcgattagta

SEQ ID NO: 3185381 - DNA, 25 bp, Homo sapien
gtcttctaaggtgagaacactgaat

SEQ ID NO: 3185382 - DNA, 25 bp, Homo sapien
tgacacttatgtggtctctctccca

SEQ ID NO: 3185383 - DNA, 25 bp, Homo sapien
tgaatgaaggcttttgcacatagat

SEQ ID NO: 3185384 - DNA, 25 bp, Homo sapien
actgatgacacttatgtggtctctc

SEQ ID NO: 3185385 - DNA, 25 bp, Homo sapien
taaggattgaatataggctttccca

SEQ ID NO: 3185386 - DNA, 25 bp, Homo sapien
tgaaggtttaaggattgaatatagg

SEQ ID NO: 3185387 - DNA, 25 bp, Homo sapien
ctttgaaggtttaaggattgaatat

SEQ ID NO: 3185388 - DNA, 25 bp, Homo sapien
aaggattgaatataggctttcccac

SEQ ID NO: 3185389 - DNA, 25 bp, Homo sapien
catgtcatctaaggtcagaagatag

SEQ ID NO: 3185390 - DNA, 25 bp, Homo sapien
gggaagctgtcagcgcgtcgccggg

SEQ ID NO: 3185391 - DNA, 25 bp, Homo sapien
gccggtggctgcgtgcaggccgagg

SEQ ID NO: 3185392 - DNA, 25 bp, Homo sapien
tggcgagtccgcgttcggcctcctg

SEQ ID NO: 3185393 - DNA, 25 bp, Homo sapien
ggctcgctggtgcacttctctctct

SEQ ID NO: 3185394 - DNA, 25 bp, Homo sapien
cagcgcactccaaccttctcaccat

SEQ ID NO: 3185395 - DNA, 25 bp, Homo sapien
ccgcagcgcactccaaccttctcac

SEQ ID NO: 3185396 - DNA, 25 bp, Homo sapien
gcagcgcactccaaccttctcacca

SEQ ID NO: 3185397 - DNA, 25 bp, Homo sapien
agcgcactccaaccttctcaccatc

SEQ ID NO: 3185398 - DNA, 25 bp, Homo sapien
gacctctaagaacactacaagtgag

SEQ ID NO: 3185399 - DNA, 25 bp, Homo sapien
tgacttgcaggactatgccaaaacg

SEQ ID NO: 3185400 - DNA, 25 bp, Homo sapien
taagacccgaagatgcaaaagatga

SEQ ID NO: 3185401 - DNA, 25 bp, Homo sapien
tctgtggaccagaagagcataatct

SEQ ID NO: 3185402 - DNA, 25 bp, Homo sapien
cacccaggaacaacccctaatacag

SEQ ID NO: 3185403 - DNA, 25 bp, Homo sapien
ttgcacccaggaacaacccctaata

SEQ ID NO: 3185404 - DNA, 25 bp, Homo sapien
cccaggaacaacccctaatacagca

SEQ ID NO: 3185405 - DNA, 25 bp, Homo sapien
tgcacccaggaacaacccctaatac

SEQ ID NO: 3185406 - DNA, 25 bp, Homo sapien
ttcttaccagtttagcaaaaatatg

SEQ ID NO: 3185407 - DNA, 25 bp, Homo sapien
tctgccgaaaggttctatccaaggg

SEQ ID NO: 3185408 - DNA, 25 bp, Homo sapien
tatccaagggcaatctctcttactt

SEQ ID NO: 3185409 - DNA, 25 bp, Homo sapien
tccatgagatgagatatacaattta

SEQ ID NO: 3185410 - DNA, 25 bp, Homo sapien
catatctccaagatatgcttctgtc

SEQ ID NO: 3185411 - DNA, 25 bp, Homo sapien
ttcatatctccaagatatgcttctg

SEQ ID NO: 3185412 - DNA, 25 bp, Homo sapien
tatctccaagatatgcttctgtctt

SEQ ID NO: 3185413 - DNA, 25 bp, Homo sapien
tctccaagatatgcttctgtctttt

SEQ ID NO: 3185414 - DNA, 25 bp, Homo sapien
caaaagaggcaagtatagtagccaa

SEQ ID NO: 3185415 - DNA, 25 bp, Homo sapien
ttaggaagtaggaaggcaaataggc

SEQ ID NO: 3185416 - DNA, 25 bp, Homo sapien
tgttagagttctagtcaaagcccac

SEQ ID NO: 3185417 - DNA, 25 bp, Homo sapien
tatcttggtaattcagtgatcacac

SEQ ID NO: 3185418 - DNA, 25 bp, Homo sapien
ggaatcaatttggtgcactacaaca

SEQ ID NO: 3185419 - DNA, 25 bp, Homo sapien
tatacaacattcagctagtgagttc

SEQ ID NO: 3185420 - DNA, 25 bp, Homo sapien
gaatgtcaatccaacaggtatggca

SEQ ID NO: 3185421 - DNA, 25 bp, Homo sapien
catacaaagcttattaacaccgagt

SEQ ID NO: 3185422 - DNA, 25 bp, Homo sapien
cccaaatatggatcatcttctgcca

SEQ ID NO: 3185423 - DNA, 25 bp, Homo sapien
tcaggccttcccaaatatggatcat

SEQ ID NO: 3185424 - DNA, 25 bp, Homo sapien
ttcccaaatatggatcatcttctgc

SEQ ID NO: 3185425 - DNA, 25 bp, Homo sapien
ggccttcccaaatatggatcatctt

SEQ ID NO: 3185426 - DNA, 25 bp, Homo sapien
tctgtggcataaagaatcatctctt

SEQ ID NO: 3185427 - DNA, 25 bp, Homo sapien
tgttttcagcaggttttactcttct

SEQ ID NO: 3185428 - DNA, 25 bp, Homo sapien
cagcaggttttactcttctgtggca

SEQ ID NO: 3185429 - DNA, 25 bp, Homo sapien
cttctgtggcataaagaatcatctc

SEQ ID NO: 3185430 - DNA, 25 bp, Homo sapien
ttactgatgatcgcaaagatgccca

SEQ ID NO: 3185431 - DNA, 25 bp, Homo sapien
gttactgatgatcgcaaagatgccc

SEQ ID NO: 3185432 - DNA, 25 bp, Homo sapien
tactgatgatcgcaaagatgcccac

SEQ ID NO: 3185433 - DNA, 25 bp, Homo sapien
gttggcagtgccatctgtggttgaa

SEQ ID NO: 3185434 - DNA, 25 bp, Homo sapien
ctgtggttgaaatacttctggatta

SEQ ID NO: 3185435 - DNA, 25 bp, Homo sapien
tgtggttgaaatacttctggattaa

SEQ ID NO: 3185436 - DNA, 25 bp, Homo sapien
tgttggcagtgccatctgtggttga

SEQ ID NO: 3185437 - DNA, 25 bp, Homo sapien
cagggtaacagggatgagttttctt

SEQ ID NO: 3185438 - DNA, 25 bp, Homo sapien
cagactattaacaaatcctgcattt

SEQ ID NO: 3185439 - DNA, 25 bp, Homo sapien
gacagactattaacaaatcctgcat

SEQ ID NO: 3185440 - DNA, 25 bp, Homo sapien
gcattttactaagactgaaagcaga

SEQ ID NO: 3185441 - DNA, 25 bp, Homo sapien
tactatgacactgcaatgaagaggg

SEQ ID NO: 3185442 - DNA, 25 bp, Homo sapien
aaattaagaaaacgtctgcctcagg

SEQ ID NO: 3185443 - DNA, 25 bp, Homo sapien
aagatctcagacatggcagcctaaa

SEQ ID NO: 3185444 - DNA, 25 bp, Homo sapien
gctgacctagagctcaaattggaca

SEQ ID NO: 3185445 - DNA, 25 bp, Homo sapien
tctaatatttgaaggtatgggccat

SEQ ID NO: 3185446 - DNA, 25 bp, Homo sapien
ctgtttaggttgctctaatatttga

SEQ ID NO: 3185447 - DNA, 25 bp, Homo sapien
gcagattttgacagctttgagctca

SEQ ID NO: 3185448 - DNA, 25 bp, Homo sapien
gagattccagatctaaacacaaggg

SEQ ID NO: 3185449 - DNA, 25 bp, Homo sapien
ccaagtagggtcttgcagtctctga

SEQ ID NO: 3185450 - DNA, 25 bp, Homo sapien
tctgagcagtccaggtgccttgaac

SEQ ID NO: 3185451 - DNA, 25 bp, Homo sapien
tttgacctgagggtaagacttcttg

SEQ ID NO: 3185452 - DNA, 25 bp, Homo sapien
catacataacggaaacgaaatcctc

SEQ ID NO: 3185453 - DNA, 25 bp, Homo sapien
tccaccatgggatgggccttcacat

SEQ ID NO: 3185454 - DNA, 25 bp, Homo sapien
tttcactagaggcaccaggtagtcc

SEQ ID NO: 3185455 - DNA, 25 bp, Homo sapien
ccagcatgtcacgtagcagttcatt

SEQ ID NO: 3185456 - DNA, 25 bp, Homo sapien
atgagtcaacgagcccggccagatt

SEQ ID NO: 3185457 - DNA, 25 bp, Homo sapien
ccaaaagtatgttacaccctgaggg

SEQ ID NO: 3185458 - DNA, 25 bp, Homo sapien
tcacaactttgctgagggcctgctc

SEQ ID NO: 3185459 - DNA, 25 bp, Homo sapien
aaatactagagcaatagaagtaaac

SEQ ID NO: 3185460 - DNA, 25 bp, Homo sapien
cacaaaatactagagcaatagaagt

SEQ ID NO: 3185461 - DNA, 25 bp, Homo sapien
atactagagcaatagaagtaaacaa

SEQ ID NO: 3185462 - DNA, 25 bp, Homo sapien
caaaatactagagcaatagaagtaa

SEQ ID NO: 3185463 - DNA, 25 bp, Homo sapien
tagcctacacctatgcgaaacaggg

SEQ ID NO: 3185464 - DNA, 25 bp, Homo sapien
tggtggcgctctcacaaaggcatga

SEQ ID NO: 3185465 - DNA, 25 bp, Homo sapien
cagttaatcttcaatggcgtccagt

SEQ ID NO: 3185466 - DNA, 25 bp, Homo sapien
taagagggtctgtaagctagcctac

SEQ ID NO: 3185467 - DNA, 25 bp, Homo sapien
caaaccacgtgaatcagacaagtct

SEQ ID NO: 3185468 - DNA, 25 bp, Homo sapien
tgatatcctcaaatgccacagcaga

SEQ ID NO: 3185469 - DNA, 25 bp, Homo sapien
ggttctatacgcacacatagctgat

SEQ ID NO: 3185470 - DNA, 25 bp, Homo sapien
ggtagtctctattcgacctcgacag

SEQ ID NO: 3185471 - DNA, 25 bp, Homo sapien
ggagactccgcaagacagctgcatg

SEQ ID NO: 3185472 - DNA, 25 bp, Homo sapien
agggagactccgcaagacagctgca

SEQ ID NO: 3185473 - DNA, 25 bp, Homo sapien
ccagcagggagactccgcaagacag

SEQ ID NO: 3185474 - DNA, 25 bp, Homo sapien
ccaccagcagggagactccgcaaga

SEQ ID NO: 3185475 - DNA, 25 bp, Homo sapien
gtctaaattggaggcagggtttctg

SEQ ID NO: 3185476 - DNA, 25 bp, Homo sapien
ggttgctgcactggccctacagtat

SEQ ID NO: 3185477 - DNA, 25 bp, Homo sapien
tggttgctgcactggccctacagta

SEQ ID NO: 3185478 - DNA, 25 bp, Homo sapien
agaacactggtctaaattggaggca

SEQ ID NO: 3185479 - DNA, 25 bp, Homo sapien
aaaatggccaattgaatactatgca

SEQ ID NO: 3185480 - DNA, 25 bp, Homo sapien
acccattattacagatactgcatat

SEQ ID NO: 3185481 - DNA, 25 bp, Homo sapien
aaaaatggccaattgaatactatgc

SEQ ID NO: 3185482 - DNA, 25 bp, Homo sapien
ctaacacgagaacagaaaacccatt

SEQ ID NO: 3185483 - DNA, 25 bp, Homo sapien
ttgaatgaccaacagcatatatggc

SEQ ID NO: 3185484 - DNA, 25 bp, Homo sapien
taagaagttctcgtgagttacacag

SEQ ID NO: 3185485 - DNA, 25 bp, Homo sapien
tatatggctcatgatatcaggctgg

SEQ ID NO: 3185486 - DNA, 25 bp, Homo sapien
tctttacgtttggatggcctaatca

SEQ ID NO: 3185487 - DNA, 25 bp, Homo sapien
gctgccagtgactcatgtgctgttg

SEQ ID NO: 3185488 - DNA, 25 bp, Homo sapien
ctgccagtgactcatgtgctgttgg

SEQ ID NO: 3185489 - DNA, 25 bp, Homo sapien
tttgctggtcccacatagttgcaga

SEQ ID NO: 3185490 - DNA, 25 bp, Homo sapien
ggcatgcaggtggatattttttcca

SEQ ID NO: 3185491 - DNA, 25 bp, Homo sapien
caataacctttgctggtcccacata

SEQ ID NO: 3185492 - DNA, 25 bp, Homo sapien
tgggtccagcagttacagtgcagat

SEQ ID NO: 3185493 - DNA, 25 bp, Homo sapien
agctctctctctaggtttttcacac

SEQ ID NO: 3185494 - DNA, 25 bp, Homo sapien
aagccagattaactgggatttcagc

SEQ ID NO: 3185495 - DNA, 25 bp, Homo sapien
cctaggaacatgaaagcacaacctc

SEQ ID NO: 3185496 - DNA, 25 bp, Homo sapien
gaaacttgatcggaattcaaagcct

SEQ ID NO: 3185497 - DNA, 25 bp, Homo sapien
tatgcagatccttatcagtgccagg

SEQ ID NO: 3185498 - DNA, 25 bp, Homo sapien
tagaaggcaataagtgttatccaga

SEQ ID NO: 3185499 - DNA, 25 bp, Homo sapien
aaatgtcctagatgcttttgtcagc

SEQ ID NO: 3185500 - DNA, 25 bp, Homo sapien
gctagtgtgacaacggagaagaaac

SEQ ID NO: 3185501 - DNA, 25 bp, Homo sapien
tcacatgaagtatacccaggtttgc

SEQ ID NO: 3185502 - DNA, 25 bp, Homo sapien
tcattcgtgcttccagtgtttcaaa

SEQ ID NO: 3185503 - DNA, 25 bp, Homo sapien
caccttctgcttgcaaataggcaag

SEQ ID NO: 3185504 - DNA, 25 bp, Homo sapien
gagtccaggattatagccccttata

SEQ ID NO: 3185505 - DNA, 25 bp, Homo sapien
tgtagtgtggaatgccagagagcac

SEQ ID NO: 3185506 - DNA, 25 bp, Homo sapien
cagagagcacggaatggctggacca

SEQ ID NO: 3185507 - DNA, 25 bp, Homo sapien
tttgtaggcaaaacggagacacgga

SEQ ID NO: 3185508 - DNA, 25 bp, Homo sapien
cacggagcagcaacaagatacagaa

SEQ ID NO: 3185509 - DNA, 25 bp, Homo sapien
tctacagtaagagttaaaggcacac

SEQ ID NO: 3185510 - DNA, 25 bp, Homo sapien
gaataaccctactaggcaccagctg

SEQ ID NO: 3185511 - DNA, 25 bp, Homo sapien
tagggccatacagcacagtccattc

SEQ ID NO: 3185512 - DNA, 25 bp, Homo sapien
tcatgcccagggaagtgtgaacatt

SEQ ID NO: 3185513 - DNA, 25 bp, Homo sapien
cagtgctatccggaagaaaagctgt

SEQ ID NO: 3185514 - DNA, 25 bp, Homo sapien
tactgtcatagatggcgtctgatac

SEQ ID NO: 3185515 - DNA, 25 bp, Homo sapien
aaagctgtaaacatgagccgcacca

SEQ ID NO: 3185516 - DNA, 25 bp, Homo sapien
ccacgggttccaggcgccttgtgaa

SEQ ID NO: 3185517 - DNA, 25 bp, Homo sapien
cgccaaacccggcttgaaataggat

SEQ ID NO: 3185518 - DNA, 25 bp, Homo sapien
tgaagtcacatgctgtctatgctac

SEQ ID NO: 3185519 - DNA, 25 bp, Homo sapien
gaattacatgtattgagcccctctt

SEQ ID NO: 3185520 - DNA, 25 bp, Homo sapien
gagactacagggcatgacgccaaac

SEQ ID NO: 3185521 - DNA, 25 bp, Homo sapien
gattctgcggtatgagtctgtatca

SEQ ID NO: 3185522 - DNA, 25 bp, Homo sapien
cagttagttgttgtacttggagcac

SEQ ID NO: 3185523 - DNA, 25 bp, Homo sapien
gaaaatacctgtctaatcaatccta

SEQ ID NO: 3185524 - DNA, 25 bp, Homo sapien
caatgagtctgagtactatgcttgc

SEQ ID NO: 3185525 - DNA, 25 bp, Homo sapien
cttacaattttcaagttggatgcat

SEQ ID NO: 3185526 - DNA, 25 bp, Homo sapien
tacaattttcaagttggatgcattg

SEQ ID NO: 3185527 - DNA, 25 bp, Homo sapien
ttcaagttggatgcattgggggctt

SEQ ID NO: 3185528 - DNA, 25 bp, Homo sapien
caattttcaagttggatgcattggg

SEQ ID NO: 3185529 - DNA, 25 bp, Homo sapien
tcttcataaaatcgaatctggatgt

SEQ ID NO: 3185530 - DNA, 25 bp, Homo sapien
tatgaacatctgtgggggaaaaatc

SEQ ID NO: 3185531 - DNA, 25 bp, Homo sapien
ttgtctatgaacatctgtgggggaa

SEQ ID NO: 3185532 - DNA, 25 bp, Homo sapien
tcataaaatcgaatctggatgtcat

SEQ ID NO: 3185533 - DNA, 25 bp, Homo sapien
tacaatgctatgctaatgtactacg

SEQ ID NO: 3185534 - DNA, 25 bp, Homo sapien
tgtactacgaagctttattatttca

SEQ ID NO: 3185535 - DNA, 25 bp, Homo sapien
tcagaattctataccgatacatttt

SEQ ID NO: 3185536 - DNA, 25 bp, Homo sapien
taaaatcaaaatacaatgctatgct

SEQ ID NO: 3185537 - DNA, 25 bp, Homo sapien
ccaagtcagatttcctccgaagctg

SEQ ID NO: 3185538 - DNA, 25 bp, Homo sapien
cagatttcctccgaagctggacaaa

SEQ ID NO: 3185539 - DNA, 25 bp, Homo sapien
ctttgatttcaggatagtagaggaa

SEQ ID NO: 3185540 - DNA, 25 bp, Homo sapien
tcctccgaagctggacaaacacaga

SEQ ID NO: 3185541 - DNA, 25 bp, Homo sapien
tgaccaaacaatggagaggccacaa

SEQ ID NO: 3185542 - DNA, 25 bp, Homo sapien
cgttttctaaacactcctgtggcag

SEQ ID NO: 3185543 - DNA, 25 bp, Homo sapien
gcggtttccaacctcagcaaggatc

SEQ ID NO: 3185544 - DNA, 25 bp, Homo sapien
ccaccaggatatagagtgcactaca

SEQ ID NO: 3185545 - DNA, 25 bp, Homo sapien
gattatttcgatcgtctcccctgga

SEQ ID NO: 3185546 - DNA, 25 bp, Homo sapien
taatgtcttacctgatgatacccaa

SEQ ID NO: 3185547 - DNA, 25 bp, Homo sapien
ggtcaatcaataagtcagtccacag

SEQ ID NO: 3185548 - DNA, 25 bp, Homo sapien
cttatagatgaggatggatggcagc

SEQ ID NO: 3185549 - DNA, 25 bp, Homo sapien
tgaacttacaggcaagaaagctgct

SEQ ID NO: 3185550 - DNA, 25 bp, Homo sapien
caagggatctgtaacctctggtgac

SEQ ID NO: 3185551 - DNA, 25 bp, Homo sapien
gcggagcacccggagaatgaactta

SEQ ID NO: 3185552 - DNA, 25 bp, Homo sapien
caatacagtgatgccctctgagact

SEQ ID NO: 3185553 - DNA, 25 bp, Homo sapien
atttggtcccaccactagccacaga

SEQ ID NO: 3185554 - DNA, 25 bp, Homo sapien
gaaagaccactgattctaatggtat

SEQ ID NO: 3185555 - DNA, 25 bp, Homo sapien
cagaaagaccactgattctaatggt

SEQ ID NO: 3185556 - DNA, 25 bp, Homo sapien
tttggtcccaccactagccacagaa

SEQ ID NO: 3185557 - DNA, 25 bp, Homo sapien
tgggcatgagcttctgacgtttcct

SEQ ID NO: 3185558 - DNA, 25 bp, Homo sapien
cgaaactatccgaaaaattgggcat

SEQ ID NO: 3185559 - DNA, 25 bp, Homo sapien
gcttctgacgtttcctctgcacttc

SEQ ID NO: 3185560 - DNA, 25 bp, Homo sapien
aaaattgggcatgagcttctgacgt

SEQ ID NO: 3185561 - DNA, 25 bp, Homo sapien
ctccaccgccactaccaaacatgcc

SEQ ID NO: 3185562 - DNA, 25 bp, Homo sapien
accgccactaccaaacatgcctccg

SEQ ID NO: 3185563 - DNA, 25 bp, Homo sapien
gccactaccaaacatgcctccgcct

SEQ ID NO: 3185564 - DNA, 25 bp, Homo sapien
tccaccgccactaccaaacatgcct

SEQ ID NO: 3185565 - DNA, 25 bp, Homo sapien
tagatttagtagttccaggatggaa

SEQ ID NO: 3185566 - DNA, 25 bp, Homo sapien
ttcatcccagcattagatttagtag

SEQ ID NO: 3185567 - DNA, 25 bp, Homo sapien
caggatggaaagtaatcccaccata

SEQ ID NO: 3185568 - DNA, 25 bp, Homo sapien
taagtaggaaatccatagtgtggga

SEQ ID NO: 3185569 - DNA, 25 bp, Homo sapien
tacgttagagtgacctcaccattcc

SEQ ID NO: 3185570 - DNA, 25 bp, Homo sapien
cagggtcctttttagattcagtgtc

SEQ ID NO: 3185571 - DNA, 25 bp, Homo sapien
ttcctgttgcatacgttagagtgac

SEQ ID NO: 3185572 - DNA, 25 bp, Homo sapien
ccattcccaacggtggcctcgctgg

SEQ ID NO: 3185573 - DNA, 25 bp, Homo sapien
tgaccacaatcatagttgagtgttc

SEQ ID NO: 3185574 - DNA, 25 bp, Homo sapien
gaccacaatcatagttgagtgttcc

SEQ ID NO: 3185575 - DNA, 25 bp, Homo sapien
caatgaccacaatcatagttgagtg

SEQ ID NO: 3185576 - DNA, 25 bp, Homo sapien
ccacaatcatagttgagtgttccta

SEQ ID NO: 3185577 - DNA, 25 bp, Homo sapien
agtgagatggcgctggacggccagc

SEQ ID NO: 3185578 - DNA, 25 bp, Homo sapien
agcagcatcttcacgtctcctgtca

SEQ ID NO: 3185579 - DNA, 25 bp, Homo sapien
tgcatagccttctctagaaagaggt

SEQ ID NO: 3185580 - DNA, 25 bp, Homo sapien
ccgcgtagtcgaaaagggcattggc

SEQ ID NO: 3185581 - DNA, 25 bp, Homo sapien
gagaatgaaggtggatgattgctaa

SEQ ID NO: 3185582 - DNA, 25 bp, Homo sapien
ccagatgtgacttctagtagatccc

SEQ ID NO: 3185583 - DNA, 25 bp, Homo sapien
gatccctcacaagttgagaatgaag

SEQ ID NO: 3185584 - DNA, 25 bp, Homo sapien
ggtggatgattgctaagtgtaagac

SEQ ID NO: 3185585 - DNA, 25 bp, Homo sapien
caaaggatcctacatcataaagtaa

SEQ ID NO: 3185586 - DNA, 25 bp, Homo sapien
gatgttgtcaaggtatgtttcagta

SEQ ID NO: 3185587 - DNA, 25 bp, Homo sapien
tggcttgatggctgttatacccaca

SEQ ID NO: 3185588 - DNA, 25 bp, Homo sapien
aaagtaacattctcaactaatggga

SEQ ID NO: 3185589 - DNA, 25 bp, Homo sapien
gagagatacacgtgaaccagcaaac

SEQ ID NO: 3185590 - DNA, 25 bp, Homo sapien
aggagccccatacagcagactggtg

SEQ ID NO: 3185591 - DNA, 25 bp, Homo sapien
gtgcagtcgctcagccagaaaggct

SEQ ID NO: 3185592 - DNA, 25 bp, Homo sapien
tcaggagccgaaccccatcttggtt

SEQ ID NO: 3185593 - DNA, 25 bp, Homo sapien
gcacccagcctaaagcacattttaa

SEQ ID NO: 3185594 - DNA, 25 bp, Homo sapien
agcacattttaaagaatggaaataa

SEQ ID NO: 3185595 - DNA, 25 bp, Homo sapien
cagcctaaagcacattttaaagaat

SEQ ID NO: 3185596 - DNA, 25 bp, Homo sapien
aaagcacattttaaagaatggaaat

SEQ ID NO: 3185597 - DNA, 25 bp, Homo sapien
cactgcccattaatcagactggtgg

SEQ ID NO: 3185598 - DNA, 25 bp, Homo sapien
aaaatcatagctactggccagacgc

SEQ ID NO: 3185599 - DNA, 25 bp, Homo sapien
tgtgtttgacacctagaaggcatac

SEQ ID NO: 3185600 - DNA, 25 bp, Homo sapien
tagggaagccagaatcactgcccat

SEQ ID NO: 3185601 - DNA, 25 bp, Homo sapien
tcctgcttagtgatcactgccaagt

SEQ ID NO: 3185602 - DNA, 25 bp, Homo sapien
ctttggcagctaggtgcaaaacaga

SEQ ID NO: 3185603 - DNA, 25 bp, Homo sapien
gcaaaacagagttacccaagcggtc

SEQ ID NO: 3185604 - DNA, 25 bp, Homo sapien
caagcggtccagaaggctcaggtcg

SEQ ID NO: 3185605 - DNA, 25 bp, Homo sapien
tgggatggctaactcacaagatggc

SEQ ID NO: 3185606 - DNA, 25 bp, Homo sapien
gctaactcacaagatggcccttgtg

SEQ ID NO: 3185607 - DNA, 25 bp, Homo sapien
gatggctaactcacaagatggccct

SEQ ID NO: 3185608 - DNA, 25 bp, Homo sapien
aggatgggatggctaactcacaaga

SEQ ID NO: 3185609 - DNA, 25 bp, Homo sapien
gtgcagtgctgtgcgcccggacttc

SEQ ID NO: 3185610 - DNA, 25 bp, Homo sapien
tggcaggctattgctcatcatggct

SEQ ID NO: 3185611 - DNA, 25 bp, Homo sapien
caggcagcctgccaatgagatgttg

SEQ ID NO: 3185612 - DNA, 25 bp, Homo sapien
atgttgtcgtgctccacagccaggt

SEQ ID NO: 3185613 - DNA, 25 bp, Homo sapien
gttccatcgtaggtagtactgtcca

SEQ ID NO: 3185614 - DNA, 25 bp, Homo sapien
tcgtaggtagtactgtccacatggg

SEQ ID NO: 3185615 - DNA, 25 bp, Homo sapien
ggtgtggttccatcgtaggtagtac

SEQ ID NO: 3185616 - DNA, 25 bp, Homo sapien
cgtaggtagtactgtccacatgggc

SEQ ID NO: 3185617 - DNA, 25 bp, Homo sapien
tagtccaaacagtgccttatggcag

SEQ ID NO: 3185618 - DNA, 25 bp, Homo sapien
cataatgggtcttaatacatggccc

SEQ ID NO: 3185619 - DNA, 25 bp, Homo sapien
gaaaagaccctttgtcatgggagtc

SEQ ID NO: 3185620 - DNA, 25 bp, Homo sapien
aaaatgactatcagggtaaagccca

SEQ ID NO: 3185621 - DNA, 25 bp, Homo sapien
tgaggtcttacaatgttaacctggt

SEQ ID NO: 3185622 - DNA, 25 bp, Homo sapien
tcacactcctagtgcaagtgaccct

SEQ ID NO: 3185623 - DNA, 25 bp, Homo sapien
caatgttaacctggttggtctcaca

SEQ ID NO: 3185624 - DNA, 25 bp, Homo sapien
catcacgtctggctggttatagctt

SEQ ID NO: 3185625 - DNA, 25 bp, Homo sapien
tatatatcagagaaactgttacttg

SEQ ID NO: 3185626 - DNA, 25 bp, Homo sapien
gaccttttccacgacattaagatta

SEQ ID NO: 3185627 - DNA, 25 bp, Homo sapien
taagattaggacttggtttttcatc

SEQ ID NO: 3185628 - DNA, 25 bp, Homo sapien
agccaccacactcggacttaactga

SEQ ID NO: 3185629 - DNA, 25 bp, Homo sapien
tctggcctgatctatgaggcaataa

SEQ ID NO: 3185630 - DNA, 25 bp, Homo sapien
tagcttgatgtctaatgatgccatt

SEQ ID NO: 3185631 - DNA, 25 bp, Homo sapien
agactagagctagagttacttctca

SEQ ID NO: 3185632 - DNA, 25 bp, Homo sapien
tgccatttttgagggaggaacttgt

SEQ ID NO: 3185633 - DNA, 25 bp, Homo sapien
atccaggtcatagagaggctcaaag

SEQ ID NO: 3185634 - DNA, 25 bp, Homo sapien
catccaggtcatagagaggctcaaa

SEQ ID NO: 3185635 - DNA, 25 bp, Homo sapien
tcatccaggtcatagagaggctcaa

SEQ ID NO: 3185636 - DNA, 25 bp, Homo sapien
tccaggtcatagagaggctcaaagt

SEQ ID NO: 3185637 - DNA, 25 bp, Homo sapien
tctggctcatatggtttcccattta

SEQ ID NO: 3185638 - DNA, 25 bp, Homo sapien
gctagtaaatcatcagatgtaaact

SEQ ID NO: 3185639 - DNA, 25 bp, Homo sapien
taaactctggctcatatggtttccc

SEQ ID NO: 3185640 - DNA, 25 bp, Homo sapien
cagatgtaaactctggctcatatgg

SEQ ID NO: 3185641 - DNA, 25 bp, Homo sapien
gcattattaagtatccccagaccta

SEQ ID NO: 3185642 - DNA, 25 bp, Homo sapien
taatttctgcgccagagtagcccag

SEQ ID NO: 3185643 - DNA, 25 bp, Homo sapien
gaatttctagtaacttatacagctg

SEQ ID NO: 3185644 - DNA, 25 bp, Homo sapien
ggactcagccggaaggcattattaa

SEQ ID NO: 3185645 - DNA, 25 bp, Homo sapien
tccccgggtaatggctccactagga

SEQ ID NO: 3185646 - DNA, 25 bp, Homo sapien
tgaaaatcctgaccctctacgtagc

SEQ ID NO: 3185647 - DNA, 25 bp, Homo sapien
gaagctacacgttgattacagtcga

SEQ ID NO: 3185648 - DNA, 25 bp, Homo sapien
tacagtcgattgtttgctcagggcc

SEQ ID NO: 3185649 - DNA, 25 bp, Homo sapien
ggaggctgcctggatcacttcaatt

SEQ ID NO: 3185650 - DNA, 25 bp, Homo sapien
tgtagcccatttgtctcagggcctc

SEQ ID NO: 3185651 - DNA, 25 bp, Homo sapien
acttcaattgcttcggtgtagccca

SEQ ID NO: 3185652 - DNA, 25 bp, Homo sapien
gcaggcgagagaggcagcgagtggg

SEQ ID NO: 3185653 - DNA, 25 bp, Homo sapien
cctttctcaagtgcggacaatgacg

SEQ ID NO: 3185654 - DNA, 25 bp, Homo sapien
caaacgagtaaagcagggacacagt

SEQ ID NO: 3185655 - DNA, 25 bp, Homo sapien
aaaacacttgggaatggaggcgcag

SEQ ID NO: 3185656 - DNA, 25 bp, Homo sapien
tctgggttgttttccggcggataca

SEQ ID NO: 3185657 - DNA, 25 bp, Homo sapien
ggaatggccgggctctaaaaagctc

SEQ ID NO: 3185658 - DNA, 25 bp, Homo sapien
ggagaaagcacaaattcactggggg

SEQ ID NO: 3185659 - DNA, 25 bp, Homo sapien
ctgaggggagaaagcacaaattcac

SEQ ID NO: 3185660 - DNA, 25 bp, Homo sapien
cgggctctaaaaagctcatggacta

SEQ ID NO: 3185661 - DNA, 25 bp, Homo sapien
tgagtttgcggaaggatgtctccac

SEQ ID NO: 3185662 - DNA, 25 bp, Homo sapien
gaggtccttcctgcccataatcatg

SEQ ID NO: 3185663 - DNA, 25 bp, Homo sapien
gcaccactggtcagagactcggtaa

SEQ ID NO: 3185664 - DNA, 25 bp, Homo sapien
tgttgagagttagcagtgaggcacc

SEQ ID NO: 3185665 - DNA, 25 bp, Homo sapien
aaatcgagaatgattcaggcgggcc

SEQ ID NO: 3185666 - DNA, 25 bp, Homo sapien
ggcgaccgtgatacctttaatgaca

SEQ ID NO: 3185667 - DNA, 25 bp, Homo sapien
gctctctgagcacctttggatgcac

SEQ ID NO: 3185668 - DNA, 25 bp, Homo sapien
gacaataggaacgtagcagagggac

SEQ ID NO: 3185669 - DNA, 25 bp, Homo sapien
tttgcattttggttgggtacgtgac

SEQ ID NO: 3185670 - DNA, 25 bp, Homo sapien
cattttggttgggtacgtgacgact

SEQ ID NO: 3185671 - DNA, 25 bp, Homo sapien
gggtacgtgacgactccatcatctt

SEQ ID NO: 3185672 - DNA, 25 bp, Homo sapien
gacgactccatcatctttgtacagg

SEQ ID NO: 3185673 - DNA, 25 bp, Homo sapien
taatcctacgaaatgatcttgcctt

SEQ ID NO: 3185674 - DNA, 25 bp, Homo sapien
tgcaatcttcatgcttaatcctacg

SEQ ID NO: 3185675 - DNA, 25 bp, Homo sapien
gatggccatttaccatgattgcagg

SEQ ID NO: 3185676 - DNA, 25 bp, Homo sapien
tggccatttaccatgattgcaggtg

SEQ ID NO: 3185677 - DNA, 25 bp, Homo sapien
tgctactgtggtcgctggcagcagt

SEQ ID NO: 3185678 - DNA, 25 bp, Homo sapien
tgctcatctgtgagcatatatgcac

SEQ ID NO: 3185679 - DNA, 25 bp, Homo sapien
caggcctgagaggtttgctcatctg

SEQ ID NO: 3185680 - DNA, 25 bp, Homo sapien
gcacttcctgagcatatatggtctc

SEQ ID NO: 3185681 - DNA, 25 bp, Homo sapien
tacggaatactcaaataaagtgctt

SEQ ID NO: 3185682 - DNA, 25 bp, Homo sapien
tacaagaatgtgacatggcaggatc

SEQ ID NO: 3185683 - DNA, 25 bp, Homo sapien
gcaggatctatggaaccaaatggaa

SEQ ID NO: 3185684 - DNA, 25 bp, Homo sapien
tcagctttagcaggacatgaaccag

SEQ ID NO: 3185685 - DNA, 25 bp, Homo sapien
catacctgaggttggcaagtttagc

SEQ ID NO: 3185686 - DNA, 25 bp, Homo sapien
ggtacccaggtcaaataagattgga

SEQ ID NO: 3185687 - DNA, 25 bp, Homo sapien
cttaatatggaagttgagtgtcatc

SEQ ID NO: 3185688 - DNA, 25 bp, Homo sapien
ttgcttttgggcttcacgttcagaa

SEQ ID NO: 3185689 - DNA, 25 bp, Homo sapien
cagatgagctggaagatggctccca

SEQ ID NO: 3185690 - DNA, 25 bp, Homo sapien
tatgatgatggccagcacacagatg

SEQ ID NO: 3185691 - DNA, 25 bp, Homo sapien
ggaagagtccgtaccatagcaggtt

SEQ ID NO: 3185692 - DNA, 25 bp, Homo sapien
tccagaggtgagaagtctaggtcag

SEQ ID NO: 3185693 - DNA, 25 bp, Homo sapien
cttctgagctcagatggttcagcct

SEQ ID NO: 3185694 - DNA, 25 bp, Homo sapien
cacttctgagctcagatggttcagc

SEQ ID NO: 3185695 - DNA, 25 bp, Homo sapien
tctgagctcagatggttcagcctcc

SEQ ID NO: 3185696 - DNA, 25 bp, Homo sapien
tgagctcagatggttcagcctccac

SEQ ID NO: 3185697 - DNA, 25 bp, Homo sapien
ttcacagaaggaacagtagccttgg

SEQ ID NO: 3185698 - DNA, 25 bp, Homo sapien
cagaaggaacagtagccttgggctt

SEQ ID NO: 3185699 - DNA, 25 bp, Homo sapien
tcttgttcacagaaggaacagtagc

SEQ ID NO: 3185700 - DNA, 25 bp, Homo sapien
tgggcctcttgttcacagaaggaac

SEQ ID NO: 3185701 - DNA, 25 bp, Homo sapien
agtttggagactatagcttctgaat

SEQ ID NO: 3185702 - DNA, 25 bp, Homo sapien
gtttggagactatagcttctgaatg

SEQ ID NO: 3185703 - DNA, 25 bp, Homo sapien
ctgtgtaccctttgaagtaagaatc

SEQ ID NO: 3185704 - DNA, 25 bp, Homo sapien
tgtgtaccctttgaagtaagaatca

SEQ ID NO: 3185705 - DNA, 25 bp, Homo sapien
gtgtaccctttgaagtaagaatcat

SEQ ID NO: 3185706 - DNA, 25 bp, Homo sapien
agcaaattcagaggcggcagggatt

SEQ ID NO: 3185707 - DNA, 25 bp, Homo sapien
tagttggatccatagaggcactcac

SEQ ID NO: 3185708 - DNA, 25 bp, Homo sapien
gacatccctatgtccaacaattgtc

SEQ ID NO: 3185709 - DNA, 25 bp, Homo sapien
tctttccaaggaccggatttgagag

SEQ ID NO: 3185710 - DNA, 25 bp, Homo sapien
agcatgacctctgcagcacggtcgg

SEQ ID NO: 3185711 - DNA, 25 bp, Homo sapien
ctctgcagcacggtcgggctttcac

SEQ ID NO: 3185712 - DNA, 25 bp, Homo sapien
gcatgacctctgcagcacggtcggg

SEQ ID NO: 3185713 - DNA, 25 bp, Homo sapien
tgacctctgcagcacggtcgggctt

SEQ ID NO: 3185714 - DNA, 25 bp, Homo sapien
acaccaaagaatggtctttagttcg

SEQ ID NO: 3185715 - DNA, 25 bp, Homo sapien
ttactaatgtcacgcaacctgtatt

SEQ ID NO: 3185716 - DNA, 25 bp, Homo sapien
tatttgaagttagggacagtgacac

SEQ ID NO: 3185717 - DNA, 25 bp, Homo sapien
ccattttactaatgtcacgcaacct

SEQ ID NO: 3185718 - DNA, 25 bp, Homo sapien
tatagataagtaagaagaaggttgg

SEQ ID NO: 3185719 - DNA, 25 bp, Homo sapien
attttttttgacagctgttcatgtg

SEQ ID NO: 3185720 - DNA, 25 bp, Homo sapien
gatagtctctgtatgccaacattaa

SEQ ID NO: 3185721 - DNA, 25 bp, Homo sapien
catgtgactaatgcccccaacagtt

SEQ ID NO: 3185722 - DNA, 25 bp, Homo sapien
cctgatccaggtatggcgtgcggcc

SEQ ID NO: 3185723 - DNA, 25 bp, Homo sapien
ccgccgcggagctcagttacagctt

SEQ ID NO: 3185724 - DNA, 25 bp, Homo sapien
cgtgcacagcgccttgttccagcag

SEQ ID NO: 3185725 - DNA, 25 bp, Homo sapien
ttacagcttgcgtggcaactggagc

SEQ ID NO: 3185726 - DNA, 25 bp, Homo sapien
gggtacaattcagtcgatgttaata

SEQ ID NO: 3185727 - DNA, 25 bp, Homo sapien
catgaagtctaccattttaaagggt

SEQ ID NO: 3185728 - DNA, 25 bp, Homo sapien
tttcatcacattataaacaccgtac

SEQ ID NO: 3185729 - DNA, 25 bp, Homo sapien
tattcacgaggttgggcaatcatct

SEQ ID NO: 3185730 - DNA, 25 bp, Homo sapien
gaaatttcaggacttaggactagca

SEQ ID NO: 3185731 - DNA, 25 bp, Homo sapien
taagagacaccgttaagcaaatgaa

SEQ ID NO: 3185732 - DNA, 25 bp, Homo sapien
ctaattttgagatgcatcatggacc

SEQ ID NO: 3185733 - DNA, 25 bp, Homo sapien
tccatgagaccgaaaagtaccaacc

SEQ ID NO: 3185734 - DNA, 25 bp, Homo sapien
gagagagatcattttcccgaccgct

SEQ ID NO: 3185735 - DNA, 25 bp, Homo sapien
caactgaacgttggagactatggat

SEQ ID NO: 3185736 - DNA, 25 bp, Homo sapien
tccctggacggctgatctgacagag

SEQ ID NO: 3185737 - DNA, 25 bp, Homo sapien
taacatgcttggactctggccagtt

SEQ ID NO: 3185738 - DNA, 25 bp, Homo sapien
cattagcatcatgccactcatgtag

SEQ ID NO: 3185739 - DNA, 25 bp, Homo sapien
gcatgtagggtatttgccacttctt

SEQ ID NO: 3185740 - DNA, 25 bp, Homo sapien
catgtagtcgaccagaattatgttt

SEQ ID NO: 3185741 - DNA, 25 bp, Homo sapien
cttcttgctcataagtcacattagc

SEQ ID NO: 3185742 - DNA, 25 bp, Homo sapien
cataacaattagtggatgtgtccag

SEQ ID NO: 3185743 - DNA, 25 bp, Homo sapien
caacccttaggtatttacggagatg

SEQ ID NO: 3185744 - DNA, 25 bp, Homo sapien
tatgaaacacggtggatccctaact

SEQ ID NO: 3185745 - DNA, 25 bp, Homo sapien
gaataagccatagaggcttctccag

SEQ ID NO: 3185746 - DNA, 25 bp, Homo sapien
taaaccaatgagttagctgcctgga

SEQ ID NO: 3185747 - DNA, 25 bp, Homo sapien
tgtttaagccttccactgttagaga

SEQ ID NO: 3185748 - DNA, 25 bp, Homo sapien
gatgctcagttgtcacatcaaagga

SEQ ID NO: 3185749 - DNA, 25 bp, Homo sapien
tatgctcataactgatgtggctgga

SEQ ID NO: 3185750 - DNA, 25 bp, Homo sapien
gctatgtgatccaaacccagatgac

SEQ ID NO: 3185751 - DNA, 25 bp, Homo sapien
agatgaccccctagtgccagagatt

SEQ ID NO: 3185752 - DNA, 25 bp, Homo sapien
ccctagtgccagagattgcacggat

SEQ ID NO: 3185753 - DNA, 25 bp, Homo sapien
ctatgtgatccaaacccagatgacc

SEQ ID NO: 3185754 - DNA, 25 bp, Homo sapien
gcacagaagcgttggtaattaaaac

SEQ ID NO: 3185755 - DNA, 25 bp, Homo sapien
gatggtgtgcagaataaactaactc

SEQ ID NO: 3185756 - DNA, 25 bp, Homo sapien
tgtttaccacagtgcctactaggtc

SEQ ID NO: 3185757 - DNA, 25 bp, Homo sapien
taacctgattaaccacaactgctgg

SEQ ID NO: 3185758 - DNA, 25 bp, Homo sapien
aaaaaggtacttagccccatgagag

SEQ ID NO: 3185759 - DNA, 25 bp, Homo sapien
gattgtctcagcatatgttcaggca

SEQ ID NO: 3185760 - DNA, 25 bp, Homo sapien
agaatttaagacagttgagggcctc

SEQ ID NO: 3185761 - DNA, 25 bp, Homo sapien
aatgttgagctctctctggtctaag

SEQ ID NO: 3185762 - DNA, 25 bp, Homo sapien
gcatgagccacgtacctagtggtct

SEQ ID NO: 3185763 - DNA, 25 bp, Homo sapien
cctagtggtcttctgctgttcaaat

SEQ ID NO: 3185764 - DNA, 25 bp, Homo sapien
ccatgcctagctaacattttcgaag

SEQ ID NO: 3185765 - DNA, 25 bp, Homo sapien
tagctaacattttcgaagagacggg

SEQ ID NO: 3185766 - DNA, 25 bp, Homo sapien
tttctttgccctagtgacgccggta

SEQ ID NO: 3185767 - DNA, 25 bp, Homo sapien
tggtgtgagacgagacaatcctgcc

SEQ ID NO: 3185768 - DNA, 25 bp, Homo sapien
caaaaggcgcctgtgtctggcagag

SEQ ID NO: 3185769 - DNA, 25 bp, Homo sapien
cccgccgccgggataatcaagagtt

SEQ ID NO: 3185770 - DNA, 25 bp, Homo sapien
cccggcccctctgtacgcgtgggtg

SEQ ID NO: 3185771 - DNA, 25 bp, Homo sapien
ggcccctctgtacgcgtgggtgtgg

SEQ ID NO: 3185772 - DNA, 25 bp, Homo sapien
cccctctgtacgcgtgggtgtggac

SEQ ID NO: 3185773 - DNA, 25 bp, Homo sapien
cctctgtacgcgtgggtgtggacgg

SEQ ID NO: 3185774 - DNA, 25 bp, Homo sapien
gtgcgcgtgagccccgtagggccgg

SEQ ID NO: 3185775 - DNA, 25 bp, Homo sapien
tgcgcgtgagccccgtagggccggg

SEQ ID NO: 3185776 - DNA, 25 bp, Homo sapien
tgagccccgtagggccggggaggca

SEQ ID NO: 3185777 - DNA, 25 bp, Homo sapien
tgatccgcggcggtgaagaggcagg

SEQ ID NO: 3185778 - DNA, 25 bp, Homo sapien
cgtggcagctggcagtagttccgtc

SEQ ID NO: 3185779 - DNA, 25 bp, Homo sapien
ctggcagtagttccgtcagagcgga

SEQ ID NO: 3185780 - DNA, 25 bp, Homo sapien
gacggcggcgttggcggactgatcc

SEQ ID NO: 3185781 - DNA, 25 bp, Homo sapien
tctctgagcctaagggtttccgcca

SEQ ID NO: 3185782 - DNA, 25 bp, Homo sapien
acgtgggaagcaagccgtctggctt

SEQ ID NO: 3185783 - DNA, 25 bp, Homo sapien
taagaaggtgctgttccgagaagga

SEQ ID NO: 3185784 - DNA, 25 bp, Homo sapien
aagggcttgacacgtattcactcgg

SEQ ID NO: 3185785 - DNA, 25 bp, Homo sapien
gaagttctcgcgagagtcgtctcct

SEQ ID NO: 3185786 - DNA, 25 bp, Homo sapien
tcattgcagagctaccgcttcggtt

SEQ ID NO: 3185787 - DNA, 25 bp, Homo sapien
tctcctcgataccaagtgaggaaac

SEQ ID NO: 3185788 - DNA, 25 bp, Homo sapien
ggttagccagccacgaagttctcgc

SEQ ID NO: 3185789 - DNA, 25 bp, Homo sapien
gcgtctcgcgagaacttatgcattt

SEQ ID NO: 3185790 - DNA, 25 bp, Homo sapien
ttatgcattttggaggcggaacccc

SEQ ID NO: 3185791 - DNA, 25 bp, Homo sapien
caaccaccggcataagcattcaggg

SEQ ID NO: 3185792 - DNA, 25 bp, Homo sapien
cagttcgagccggtgccttactgcg

SEQ ID NO: 3185793 - DNA, 25 bp, Homo sapien
tcccggctcgagctagactaaaggt

SEQ ID NO: 3185794 - DNA, 25 bp, Homo sapien
gatacactagagagcataactgccg

SEQ ID NO: 3185795 - DNA, 25 bp, Homo sapien
actagacttcagcacgtgggagcgc

SEQ ID NO: 3185796 - DNA, 25 bp, Homo sapien
tagggtcagacgtgcactagacttc

SEQ ID NO: 3185797 - DNA, 25 bp, Homo sapien
gctaaaagcaaaggcatactcttag

SEQ ID NO: 3185798 - DNA, 25 bp, Homo sapien
taatggtgatgtgcaagatagtctg

SEQ ID NO: 3185799 - DNA, 25 bp, Homo sapien
tcctctatacaataggaaaccattg

SEQ ID NO: 3185800 - DNA, 25 bp, Homo sapien
taataactattacttagggacttga

SEQ ID NO: 3185801 - DNA, 25 bp, Homo sapien
tactataggagtctgagtcacctgc

SEQ ID NO: 3185802 - DNA, 25 bp, Homo sapien
ggttccagtcccatatgtagtgcac

SEQ ID NO: 3185803 - DNA, 25 bp, Homo sapien
catgctagaaggtgcaagatgaacc

SEQ ID NO: 3185804 - DNA, 25 bp, Homo sapien
caggtaccagtagcaagtcaagagg

SEQ ID NO: 3185805 - DNA, 25 bp, Homo sapien
ccactatttcctaggagctctgaag

SEQ ID NO: 3185806 - DNA, 25 bp, Homo sapien
tcttagtgggaacattagaatccta

SEQ ID NO: 3185807 - DNA, 25 bp, Homo sapien
atgatgatgggagcaccactatttc

SEQ ID NO: 3185808 - DNA, 25 bp, Homo sapien
tggtaaaccctgtagtggaactgag

SEQ ID NO: 3185809 - DNA, 25 bp, Homo sapien
gagtgatttatcacagagtgtccct

SEQ ID NO: 3185810 - DNA, 25 bp, Homo sapien
agtgtccctgtatccagcacccagg

SEQ ID NO: 3185811 - DNA, 25 bp, Homo sapien
tatgagagctcccagtaactatcct

SEQ ID NO: 3185812 - DNA, 25 bp, Homo sapien
tgatatttcagtgggctgtttccac

SEQ ID NO: 3185813 - DNA, 25 bp, Homo sapien
tagatacaagtctgaccgagtcact

SEQ ID NO: 3185814 - DNA, 25 bp, Homo sapien
tatattacactacctcccagagaac

SEQ ID NO: 3185815 - DNA, 25 bp, Homo sapien
catgtaaggtgtgggatctgaactg

SEQ ID NO: 3185816 - DNA, 25 bp, Homo sapien
caaagttcccaagtccactgtatca

SEQ ID NO: 3185817 - DNA, 25 bp, Homo sapien
aacatcttcatttgatactcctaga

SEQ ID NO: 3185818 - DNA, 25 bp, Homo sapien
cctagagatgccaaacctatttctt

SEQ ID NO: 3185819 - DNA, 25 bp, Homo sapien
tagagatgccaaacctatttcttgt

SEQ ID NO: 3185820 - DNA, 25 bp, Homo sapien
cttcatttgatactcctagagatgc

SEQ ID NO: 3185821 - DNA, 25 bp, Homo sapien
gtgaccacaatctcacattctggta

SEQ ID NO: 3185822 - DNA, 25 bp, Homo sapien
acattctggtacatttttactgcca

SEQ ID NO: 3185823 - DNA, 25 bp, Homo sapien
gcaattttactggtgaccacaatct

SEQ ID NO: 3185824 - DNA, 25 bp, Homo sapien
tcagcaattttactggtgaccacaa

SEQ ID NO: 3185825 - DNA, 25 bp, Homo sapien
gtaatgtcacttatctcaaatcagg

SEQ ID NO: 3185826 - DNA, 25 bp, Homo sapien
cctggccttgttactactctgtgaa

SEQ ID NO: 3185827 - DNA, 25 bp, Homo sapien
catattagggctttactcaacccag

SEQ ID NO: 3185828 - DNA, 25 bp, Homo sapien
tttgtgcatgagaaagggatctact

SEQ ID NO: 3185829 - DNA, 25 bp, Homo sapien
tttcttctcttagaggatctgtcat

SEQ ID NO: 3185830 - DNA, 25 bp, Homo sapien
tcgtttcttctcttagaggatctgt

SEQ ID NO: 3185831 - DNA, 25 bp, Homo sapien
tattcgtttcttctcttagaggatc

SEQ ID NO: 3185832 - DNA, 25 bp, Homo sapien
ctattcgtttcttctcttagaggat

SEQ ID NO: 3185833 - DNA, 25 bp, Homo sapien
ggaatctcgtgtgaaggtggccctc

SEQ ID NO: 3185834 - DNA, 25 bp, Homo sapien
ggtagcgaggccctcctcggaatct

SEQ ID NO: 3185835 - DNA, 25 bp, Homo sapien
cttgggcctttaacgtctgtagatg

SEQ ID NO: 3185836 - DNA, 25 bp, Homo sapien
gcggactgccgaggcgcgggaactg

SEQ ID NO: 3185837 - DNA, 25 bp, Homo sapien
tggccagcggcgtccactcctctcc

SEQ ID NO: 3185838 - DNA, 25 bp, Homo sapien
gtccactcctctcccgagccccctc

SEQ ID NO: 3185839 - DNA, 25 bp, Homo sapien
tccactcctctcccgagccccctcc

SEQ ID NO: 3185840 - DNA, 25 bp, Homo sapien
ctggccagcggcgtccactcctctc

SEQ ID NO: 3185841 - DNA, 25 bp, Homo sapien
tgtgagcctagcgaacccggtaatg

SEQ ID NO: 3185842 - DNA, 25 bp, Homo sapien
tgcagggagctgcaccttcacgata

SEQ ID NO: 3185843 - DNA, 25 bp, Homo sapien
tagcgaacccggtaatgctttcagg

SEQ ID NO: 3185844 - DNA, 25 bp, Homo sapien
gactgggagccgcttcagatatgca

SEQ ID NO: 3185845 - DNA, 25 bp, Homo sapien
caactccgaggacaaaagaccctgg

SEQ ID NO: 3185846 - DNA, 25 bp, Homo sapien
caaaaacctggtatcttgccacgga

SEQ ID NO: 3185847 - DNA, 25 bp, Homo sapien
gaatgacaccggagacaactccgag

SEQ ID NO: 3185848 - DNA, 25 bp, Homo sapien
atgaaagagactggcctgttcccaa

SEQ ID NO: 3185849 - DNA, 25 bp, Homo sapien
gcacttcttcctgccatgatgtgaa

SEQ ID NO: 3185850 - DNA, 25 bp, Homo sapien
acggaataatacggtagctaccaat

SEQ ID NO: 3185851 - DNA, 25 bp, Homo sapien
tgaaaacggaataatacggtagcta

SEQ ID NO: 3185852 - DNA, 25 bp, Homo sapien
gcagtatgaaaacggaataatacgg

SEQ ID NO: 3185853 - DNA, 25 bp, Homo sapien
aaaaattttacatgtgctagtctct

SEQ ID NO: 3185854 - DNA, 25 bp, Homo sapien
ttttacatgtgctagtctctataga

SEQ ID NO: 3185855 - DNA, 25 bp, Homo sapien
tctctatagatctgtttgatatatg

SEQ ID NO: 3185856 - DNA, 25 bp, Homo sapien
ctagtctctatagatctgtttgata

SEQ ID NO: 3185857 - DNA, 25 bp, Homo sapien
tccagcctgggtgacaagagcaaga

SEQ ID NO: 3185858 - DNA, 25 bp, Homo sapien
atcgcttgaattcaggaggcagggg

SEQ ID NO: 3185859 - DNA, 25 bp, Homo sapien
actccagcctgggtgacaagagcaa

SEQ ID NO: 3185860 - DNA, 25 bp, Homo sapien
cagcctgggtgacaagagcaagact

SEQ ID NO: 3185861 - DNA, 25 bp, Homo sapien
gagtacaccaaggaaaggcaataac

SEQ ID NO: 3185862 - DNA, 25 bp, Homo sapien
tagccaagaagtgcgagtacaccaa

SEQ ID NO: 3185863 - DNA, 25 bp, Homo sapien
tgcaaggtagccaagaagtgcgagt

SEQ ID NO: 3185864 - DNA, 25 bp, Homo sapien
agtgcgagtacaccaaggaaaggca

SEQ ID NO: 3185865 - DNA, 25 bp, Homo sapien
ttaagattaatcaagctatccttct

SEQ ID NO: 3185866 - DNA, 25 bp, Homo sapien
ttttagaacgccaacacctacaata

SEQ ID NO: 3185867 - DNA, 25 bp, Homo sapien
cattcactactttcggattttcctt

SEQ ID NO: 3185868 - DNA, 25 bp, Homo sapien
aacacctacaataagctgctttagt

SEQ ID NO: 3185869 - DNA, 25 bp, Homo sapien
ggcgaaacaatcctagcactgcaaa

SEQ ID NO: 3185870 - DNA, 25 bp, Homo sapien
taggaatatggtctttcaataccaa

SEQ ID NO: 3185871 - DNA, 25 bp, Homo sapien
taggtagtatctatcatgacatgaa

SEQ ID NO: 3185872 - DNA, 25 bp, Homo sapien
tagtgtacacgtaaacagacatctt

SEQ ID NO: 3185873 - DNA, 25 bp, Homo sapien
tgtttattatgtgaaccatcgcagg

SEQ ID NO: 3185874 - DNA, 25 bp, Homo sapien
tattatgtgaaccatcgcaggcagg

SEQ ID NO: 3185875 - DNA, 25 bp, Homo sapien
ttagtggacccacattatctcctgt

SEQ ID NO: 3185876 - DNA, 25 bp, Homo sapien
tcttcagtattagtggacccacatt

SEQ ID NO: 3185877 - DNA, 25 bp, Homo sapien
taagtgactgaatagacaaaggatc

SEQ ID NO: 3185878 - DNA, 25 bp, Homo sapien
tttctaattaagtgactgaatagac

SEQ ID NO: 3185879 - DNA, 25 bp, Homo sapien
gtgactgaatagacaaaggatcaaa

SEQ ID NO: 3185880 - DNA, 25 bp, Homo sapien
aattaagtgactgaatagacaaagg

SEQ ID NO: 3185881 - DNA, 25 bp, Homo sapien
gtgattttattgttggaagatacat

SEQ ID NO: 3185882 - DNA, 25 bp, Homo sapien
cagaagtgattttattgttggaaga

SEQ ID NO: 3185883 - DNA, 25 bp, Homo sapien
aatcagaagtgattttattgttgga

SEQ ID NO: 3185884 - DNA, 25 bp, Homo sapien
ttattgttggaagatacattaattc

SEQ ID NO: 3185885 - DNA, 25 bp, Homo sapien
gaaaaaaacacttcagattatcaaa

SEQ ID NO: 3185886 - DNA, 25 bp, Homo sapien
caagatcctgttgaaaatattgata

SEQ ID NO: 3185887 - DNA, 25 bp, Homo sapien
ttcctcaatggaactttttgtatcc

SEQ ID NO: 3185888 - DNA, 25 bp, Homo sapien
cagacacaagccttttgtaaagtaa

SEQ ID NO: 3185889 - DNA, 25 bp, Homo sapien
ttctccagtacgtttatttcacaaa

SEQ ID NO: 3185890 - DNA, 25 bp, Homo sapien
cagtccctagcgtatacaagggatg

SEQ ID NO: 3185891 - DNA, 25 bp, Homo sapien
tggaaccagtccctagcgtatacaa

SEQ ID NO: 3185892 - DNA, 25 bp, Homo sapien
tctccagtacgtttatttcacaaac

SEQ ID NO: 3185893 - DNA, 25 bp, Homo sapien
cacaggtgggaaaagatatgggcat

SEQ ID NO: 3185894 - DNA, 25 bp, Homo sapien
aatgtatccgaaaaagcacccagag

SEQ ID NO: 3185895 - DNA, 25 bp, Homo sapien
taagcagtttccagagtgcctagca

SEQ ID NO: 3185896 - DNA, 25 bp, Homo sapien
ttggttaatctgacagtgaggcccc

SEQ ID NO: 3185897 - DNA, 25 bp, Homo sapien
tcagagacagttgtatgcagaatcc

SEQ ID NO: 3185898 - DNA, 25 bp, Homo sapien
caaagggactatatggccaaccgga

SEQ ID NO: 3185899 - DNA, 25 bp, Homo sapien
tactccaacctctgtggtgcaaagg

SEQ ID NO: 3185900 - DNA, 25 bp, Homo sapien
tgttgagggagtcacagaactgctg

SEQ ID NO: 3185901 - DNA, 25 bp, Homo sapien
agttttgtaagcgaagaatcaagca

SEQ ID NO: 3185902 - DNA, 25 bp, Homo sapien
taacattatggctgatctatctgac

SEQ ID NO: 3185903 - DNA, 25 bp, Homo sapien
ttctcactagtacagggttatctct

SEQ ID NO: 3185904 - DNA, 25 bp, Homo sapien
tgtcatctctggttgaaaaacatag

SEQ ID NO: 3185905 - DNA, 25 bp, Homo sapien
aatccaacaaagactttgctgtcat

SEQ ID NO: 3185906 - DNA, 25 bp, Homo sapien
atccaacaaagactttgctgtcatt

SEQ ID NO: 3185907 - DNA, 25 bp, Homo sapien
ttaatccaacaaagactttgctgtc

SEQ ID NO: 3185908 - DNA, 25 bp, Homo sapien
taatccaacaaagactttgctgtca

SEQ ID NO: 3185909 - DNA, 25 bp, Homo sapien
tgccattctacttctttctgagctt

SEQ ID NO: 3185910 - DNA, 25 bp, Homo sapien
tctttctgagcttgaccaacatcaa

SEQ ID NO: 3185911 - DNA, 25 bp, Homo sapien
catctgccattctacttctttctga

SEQ ID NO: 3185912 - DNA, 25 bp, Homo sapien
tctacttctttctgagcttgaccaa

SEQ ID NO: 3185913 - DNA, 25 bp, Homo sapien
gcttgatcttttcaaatttgcacac

SEQ ID NO: 3185914 - DNA, 25 bp, Homo sapien
tgcttgatcttttcaaatttgcaca

SEQ ID NO: 3185915 - DNA, 25 bp, Homo sapien
tactaaatgtagtgagctaggagtg

SEQ ID NO: 3185916 - DNA, 25 bp, Homo sapien
tactactaaatgtagtgagctagga

SEQ ID NO: 3185917 - DNA, 25 bp, Homo sapien
taaatgtagtgagctaggagtggct

SEQ ID NO: 3185918 - DNA, 25 bp, Homo sapien
tctcttactactaaatgtagtgagc

SEQ ID NO: 3185919 - DNA, 25 bp, Homo sapien
cagcaggctgctgcacggtaacttg

SEQ ID NO: 3185920 - DNA, 25 bp, Homo sapien
aatggtgcaaacagcaggagtatct

SEQ ID NO: 3185921 - DNA, 25 bp, Homo sapien
gctgtgcatgaaactgccattgagg

SEQ ID NO: 3185922 - DNA, 25 bp, Homo sapien
cagtagcggcaactgcagaatgtgc

SEQ ID NO: 3185923 - DNA, 25 bp, Homo sapien
caccagtggcaccattaactgcttt

SEQ ID NO: 3185924 - DNA, 25 bp, Homo sapien
aattggaacaccagtggcaccatta

SEQ ID NO: 3185925 - DNA, 25 bp, Homo sapien
gtacagctatacctttgtcaacctt

SEQ ID NO: 3185926 - DNA, 25 bp, Homo sapien
tggaacaccagtggcaccattaact

SEQ ID NO: 3185927 - DNA, 25 bp, Homo sapien
cagctccaaatggagctctacttat

SEQ ID NO: 3185928 - DNA, 25 bp, Homo sapien
gctccaaatggagctctacttatgg

SEQ ID NO: 3185929 - DNA, 25 bp, Homo sapien
ccaaatggagctctacttatgggca

SEQ ID NO: 3185930 - DNA, 25 bp, Homo sapien
tccaaatggagctctacttatgggc

SEQ ID NO: 3185931 - DNA, 25 bp, Homo sapien
ataaccttctacaactgggagaaca

SEQ ID NO: 3185932 - DNA, 25 bp, Homo sapien
atgtagaatcctggtacattaaata

SEQ ID NO: 3185933 - DNA, 25 bp, Homo sapien
aatcaggatgtgattgatgcagctc

SEQ ID NO: 3185934 - DNA, 25 bp, Homo sapien
atacacagtatcacctacaatcagg

SEQ ID NO: 3185935 - DNA, 25 bp, Homo sapien
aatacacagtatcacctacaatcag

SEQ ID NO: 3185936 - DNA, 25 bp, Homo sapien
tacacagtatcacctacaatcagga

SEQ ID NO: 3185937 - DNA, 25 bp, Homo sapien
attatgaacttctcctggttgatca

SEQ ID NO: 3185938 - DNA, 25 bp, Homo sapien
cctggttgatcacattgatacctgt

SEQ ID NO: 3185939 - DNA, 25 bp, Homo sapien
tcctggttgatcacattgatacctg

SEQ ID NO: 3185940 - DNA, 25 bp, Homo sapien
ttatgaacttctcctggttgatcac

SEQ ID NO: 3185941 - DNA, 25 bp, Homo sapien
gggacagttttgtattcatcaacaa

SEQ ID NO: 3185942 - DNA, 25 bp, Homo sapien
tgggacagttttgtattcatcaaca

SEQ ID NO: 3185943 - DNA, 25 bp, Homo sapien
aagaacaacattcttatacagtgga

SEQ ID NO: 3185944 - DNA, 25 bp, Homo sapien
agaacaacattcttatacagtggac

SEQ ID NO: 3185945 - DNA, 25 bp, Homo sapien
gatggattaccacctgaacctctgc

SEQ ID NO: 3185946 - DNA, 25 bp, Homo sapien
ggattaccacctgaacctctgcaaa

SEQ ID NO: 3185947 - DNA, 25 bp, Homo sapien
tgaacctctgcaaacttaggtttga

SEQ ID NO: 3185948 - DNA, 25 bp, Homo sapien
gtgcatgtgatggattaccacctga

SEQ ID NO: 3185949 - DNA, 25 bp, Homo sapien
tagtagggaaatagatgggaacaca

SEQ ID NO: 3185950 - DNA, 25 bp, Homo sapien
aagcatttcttggacttctctcaca

SEQ ID NO: 3185951 - DNA, 25 bp, Homo sapien
tcctaaacgtgcttctacaatactc

SEQ ID NO: 3185952 - DNA, 25 bp, Homo sapien
ctgtaatataatgggctctcaatga

SEQ ID NO: 3185953 - DNA, 25 bp, Homo sapien
gatcgtttccttgcggtaggccgca

SEQ ID NO: 3185954 - DNA, 25 bp, Homo sapien
ccctttggcgctagtcccgggtctg

SEQ ID NO: 3185955 - DNA, 25 bp, Homo sapien
cagttcaatgggattcttgggctct

SEQ ID NO: 3185956 - DNA, 25 bp, Homo sapien
tagtcccgggtctgccgcgatcgtt

SEQ ID NO: 3185957 - DNA, 25 bp, Homo sapien
tcaagtccattcacgtgttcagctg

SEQ ID NO: 3185958 - DNA, 25 bp, Homo sapien
gaaatgtactatggacccaggcaga

SEQ ID NO: 3185959 - DNA, 25 bp, Homo sapien
tttgctatcccctaagaccttggag

SEQ ID NO: 3185960 - DNA, 25 bp, Homo sapien
gagtccttagtttccaggcaacgga

SEQ ID NO: 3185961 - DNA, 25 bp, Homo sapien
gcgctgtgctcctctcgcggtgtct

SEQ ID NO: 3185962 - DNA, 25 bp, Homo sapien
cgcggtgtctcgtcatctccgggaa

SEQ ID NO: 3185963 - DNA, 25 bp, Homo sapien
tgggtccgcgctctctgggtaagct

SEQ ID NO: 3185964 - DNA, 25 bp, Homo sapien
ataagcagctgaaagaccgcgcggt

SEQ ID NO: 3185965 - DNA, 25 bp, Homo sapien
gtttgtgatctagaccaagtcaccc

SEQ ID NO: 3185966 - DNA, 25 bp, Homo sapien
tatctatgaggttttggaccgggca

SEQ ID NO: 3185967 - DNA, 25 bp, Homo sapien
gaccaaatggtatgatgcacactga

SEQ ID NO: 3185968 - DNA, 25 bp, Homo sapien
aaaggacattttgactagcattcag

SEQ ID NO: 3185969 - DNA, 25 bp, Homo sapien
taatttcaggactaggcatggtagc

SEQ ID NO: 3185970 - DNA, 25 bp, Homo sapien
gggcactacccttatgacctgatta

SEQ ID NO: 3185971 - DNA, 25 bp, Homo sapien
taatcctgttcatgagggcactacc

SEQ ID NO: 3185972 - DNA, 25 bp, Homo sapien
taggatgtcaacacatgactctggg

SEQ ID NO: 3185973 - DNA, 25 bp, Homo sapien
tgaacctggttacgaagaaaactca

SEQ ID NO: 3185974 - DNA, 25 bp, Homo sapien
tgatgtcactgtttgcaagagtctg

SEQ ID NO: 3185975 - DNA, 25 bp, Homo sapien
tctccttcctgttaatcacatgtta

SEQ ID NO: 3185976 - DNA, 25 bp, Homo sapien
ccttcctatccacagtgaacctggt

SEQ ID NO: 3185977 - DNA, 25 bp, Homo sapien
tgggtgattcatccagagtccctac

SEQ ID NO: 3185978 - DNA, 25 bp, Homo sapien
gagtccctacatagtgtcacgaaga

SEQ ID NO: 3185979 - DNA, 25 bp, Homo sapien
ctatggtagccatgggattgtcccc

SEQ ID NO: 3185980 - DNA, 25 bp, Homo sapien
ccttaagctggcaaagtgcttgtac

SEQ ID NO: 3185981 - DNA, 25 bp, Homo sapien
catattcaacatacacaagagagga

SEQ ID NO: 3185982 - DNA, 25 bp, Homo sapien
catgaaaatggctactgggaaaact

SEQ ID NO: 3185983 - DNA, 25 bp, Homo sapien
gaattcacagtccaaaactaggagc

SEQ ID NO: 3185984 - DNA, 25 bp, Homo sapien
tcaagttgaaggacaaggacagcag

SEQ ID NO: 3185985 - DNA, 25 bp, Homo sapien
tatacacaagttttctggatctgga

SEQ ID NO: 3185986 - DNA, 25 bp, Homo sapien
tagacataaggaaacagtaccagag

SEQ ID NO: 3185987 - DNA, 25 bp, Homo sapien
cagcctggaggaacctatagatcat

SEQ ID NO: 3185988 - DNA, 25 bp, Homo sapien
gagtccccacagatagataaagcat

SEQ ID NO: 3185989 - DNA, 25 bp, Homo sapien
ggatgtgcctgagtgcaaaactcag

SEQ ID NO: 3185990 - DNA, 25 bp, Homo sapien
aactcagtagactcctctttgtcac

SEQ ID NO: 3185991 - DNA, 25 bp, Homo sapien
atccctggtaatgatgttgtagtgc

SEQ ID NO: 3185992 - DNA, 25 bp, Homo sapien
ccttggcacgcctcctcaggcaagg

SEQ ID NO: 3185993 - DNA, 25 bp, Homo sapien
tgaaatggagcaactaaagaaacaa

SEQ ID NO: 3185994 - DNA, 25 bp, Homo sapien
aacttaaggcaaatgaacatcaact

SEQ ID NO: 3185995 - DNA, 25 bp, Homo sapien
aagcttaactctgagtaaattagaa

SEQ ID NO: 3185996 - DNA, 25 bp, Homo sapien
tgaacatcaacttattacgttaaaa

SEQ ID NO: 3185997 - DNA, 25 bp, Homo sapien
aatacaagaggaactaagaattgct

SEQ ID NO: 3185998 - DNA, 25 bp, Homo sapien
actaagaattgctcacatgcatctg

SEQ ID NO: 3185999 - DNA, 25 bp, Homo sapien
ctgagaagacagataaactatcaaa

SEQ ID NO: 3186000 - DNA, 25 bp, Homo sapien
gaattgctcacatgcatctgaaaga

SEQ ID NO: 3186001 - DNA, 25 bp, Homo sapien
gcctggaatgtaactctggaaagtg

SEQ ID NO: 3186002 - DNA, 25 bp, Homo sapien
ggagcaagaccaacttagggaaggc

SEQ ID NO: 3186003 - DNA, 25 bp, Homo sapien
ggaaactatgtatcaaacaggtcag

SEQ ID NO: 3186004 - DNA, 25 bp, Homo sapien
tagggaaggccttagagaaatagaa

SEQ ID NO: 3186005 - DNA, 25 bp, Homo sapien
tccaagaacttcaggagaaagaaca

SEQ ID NO: 3186006 - DNA, 25 bp, Homo sapien
atccaagaacttcaggagaaagaac

SEQ ID NO: 3186007 - DNA, 25 bp, Homo sapien
aggagcaccaagaaactattgataa

SEQ ID NO: 3186008 - DNA, 25 bp, Homo sapien
gataaactaagagggattgtttcag

SEQ ID NO: 3186009 - DNA, 25 bp, Homo sapien
aggacttagaacactcaaatgatgc

SEQ ID NO: 3186010 - DNA, 25 bp, Homo sapien
acttagaacactcaaatgatgcctt

SEQ ID NO: 3186011 - DNA, 25 bp, Homo sapien
gacagctgtcaatgagactcaggag

SEQ ID NO: 3186012 - DNA, 25 bp, Homo sapien
taaggttgactcagatactacatga

SEQ ID NO: 3186013 - DNA, 25 bp, Homo sapien
gagagaccagctcaaggaaaacctt

SEQ ID NO: 3186014 - DNA, 25 bp, Homo sapien
tgaaggagcaatttgagacccagaa

SEQ ID NO: 3186015 - DNA, 25 bp, Homo sapien
tagaaagtaagatgctcgagttgac

SEQ ID NO: 3186016 - DNA, 25 bp, Homo sapien
caaggagcatcgcaaagccaaggat

SEQ ID NO: 3186017 - DNA, 25 bp, Homo sapien
aaggattcagcactacaaagtatag

SEQ ID NO: 3186018 - DNA, 25 bp, Homo sapien
acaggaggcccttcagatagagaga

SEQ ID NO: 3186019 - DNA, 25 bp, Homo sapien
agaggaacttaaagttgctcattgt

SEQ ID NO: 3186020 - DNA, 25 bp, Homo sapien
ctattaatgagttaagagtgaatct

SEQ ID NO: 3186021 - DNA, 25 bp, Homo sapien
gagttaagagtgaatctttcagaga

SEQ ID NO: 3186022 - DNA, 25 bp, Homo sapien
gaagcaatcaatgataaattacaga

SEQ ID NO: 3186023 - DNA, 25 bp, Homo sapien
taacagaacagtccacaaccaagga

SEQ ID NO: 3186024 - DNA, 25 bp, Homo sapien
caaggactcaacaacactggcaaga

SEQ ID NO: 3186025 - DNA, 25 bp, Homo sapien
ttgaagttaaacatgaccagctgaa

SEQ ID NO: 3186026 - DNA, 25 bp, Homo sapien
gaggaacaagagttactgcctaatg

SEQ ID NO: 3186027 - DNA, 25 bp, Homo sapien
atcccataccaaattacaagaagag

SEQ ID NO: 3186028 - DNA, 25 bp, Homo sapien
gaaactattgatgaactaagaagaa

SEQ ID NO: 3186029 - DNA, 25 bp, Homo sapien
gcgtatctgagaagacagctcaaat

SEQ ID NO: 3186030 - DNA, 25 bp, Homo sapien
gatgaactaagaagaagcgtatctg

SEQ ID NO: 3186031 - DNA, 25 bp, Homo sapien
gaggcttgagttggctcagaaactt

SEQ ID NO: 3186032 - DNA, 25 bp, Homo sapien
tatgaggaagtgaaatctataacca

SEQ ID NO: 3186033 - DNA, 25 bp, Homo sapien
cagcaacaacttcttaatgtacaag

SEQ ID NO: 3186034 - DNA, 25 bp, Homo sapien
ttgacattggaacatatggaaacag

SEQ ID NO: 3186035 - DNA, 25 bp, Homo sapien
ttctaggacctgtgacagactggca

SEQ ID NO: 3186036 - DNA, 25 bp, Homo sapien
gaaagaaggagagctttctaggacc

SEQ ID NO: 3186037 - DNA, 25 bp, Homo sapien
caacaagagatagttgcacaagaaa

SEQ ID NO: 3186038 - DNA, 25 bp, Homo sapien
caagaaaagaaccatgccataaaga

SEQ ID NO: 3186039 - DNA, 25 bp, Homo sapien
ccaacaaatgttagagagtgttata

SEQ ID NO: 3186040 - DNA, 25 bp, Homo sapien
caaacactaactgcagatgttaagg

SEQ ID NO: 3186041 - DNA, 25 bp, Homo sapien
ggataatgagataattgagcaacaa

SEQ ID NO: 3186042 - DNA, 25 bp, Homo sapien
ggaacaattgaagactgacctaaag

SEQ ID NO: 3186043 - DNA, 25 bp, Homo sapien
tacaggagaaactaaagatgaattt

SEQ ID NO: 3186044 - DNA, 25 bp, Homo sapien
acaggagaaactaaagatgaatttc

SEQ ID NO: 3186045 - DNA, 25 bp, Homo sapien
aatacaggagaaactaaagatgaat

SEQ ID NO: 3186046 - DNA, 25 bp, Homo sapien
aaatacaggagaaactaaagatgaa

SEQ ID NO: 3186047 - DNA, 25 bp, Homo sapien
ggtagaattagctcaacacagcact

SEQ ID NO: 3186048 - DNA, 25 bp, Homo sapien
cctgcaaagattgtggctctggagt

SEQ ID NO: 3186049 - DNA, 25 bp, Homo sapien
cagtgtggaatagcttgatactcac

SEQ ID NO: 3186050 - DNA, 25 bp, Homo sapien
ggaagtagcccaatgaaagacctag

SEQ ID NO: 3186051 - DNA, 25 bp, Homo sapien
ggtctacagcttccagcgtgggcga

SEQ ID NO: 3186052 - DNA, 25 bp, Homo sapien
ggaacagttccggtctacagcttcc

SEQ ID NO: 3186053 - DNA, 25 bp, Homo sapien
cagttccggtctacagcttccagcg

SEQ ID NO: 3186054 - DNA, 25 bp, Homo sapien
ccggtctacagcttccagcgtgggc

SEQ ID NO: 3186055 - DNA, 25 bp, Homo sapien
tgcagtgtgttatgatctccattca

SEQ ID NO: 3186056 - DNA, 25 bp, Homo sapien
gggtggagtgcagtgtgttatgatc

SEQ ID NO: 3186057 - DNA, 25 bp, Homo sapien
gcagtgtgttatgatctccattcac

SEQ ID NO: 3186058 - DNA, 25 bp, Homo sapien
gagtgcagtgtgttatgatctccat

SEQ ID NO: 3186059 - DNA, 25 bp, Homo sapien
gagcaactagtgtgggccgctctca

SEQ ID NO: 3186060 - DNA, 25 bp, Homo sapien
gattccggccaagataaatgactag

SEQ ID NO: 3186061 - DNA, 25 bp, Homo sapien
tatcctgcgctggagatggtgcctg

SEQ ID NO: 3186062 - DNA, 25 bp, Homo sapien
tcaacagtgtaagcaagaatcagcc

SEQ ID NO: 3186063 - DNA, 25 bp, Homo sapien
catggaagaagtgttacccttgaac

SEQ ID NO: 3186064 - DNA, 25 bp, Homo sapien
gatgccaggcttcacaattgagctc

SEQ ID NO: 3186065 - DNA, 25 bp, Homo sapien
agaagtgttacccttgaacaaggca

SEQ ID NO: 3186066 - DNA, 25 bp, Homo sapien
ggcaatctgagcataatttgaacta

SEQ ID NO: 3186067 - DNA, 25 bp, Homo sapien
gagaggacccagaattgtgtcttcc

SEQ ID NO: 3186068 - DNA, 25 bp, Homo sapien
gcactaccacccaacttgccttgac

SEQ ID NO: 3186069 - DNA, 25 bp, Homo sapien
tcacagggctcccttggccaccagc

SEQ ID NO: 3186070 - DNA, 25 bp, Homo sapien
accacccaacttgccttgactgtgt

SEQ ID NO: 3186071 - DNA, 25 bp, Homo sapien
tgcaaatctgtgacaggagtctgaa

SEQ ID NO: 3186072 - DNA, 25 bp, Homo sapien
gggcaccccaagcacagtaataatg

SEQ ID NO: 3186073 - DNA, 25 bp, Homo sapien
tgagaaggccttccaagtattaaaa

SEQ ID NO: 3186074 - DNA, 25 bp, Homo sapien
tctgggtttgtttgcgcccatcctc

SEQ ID NO: 3186075 - DNA, 25 bp, Homo sapien
cacatttcagaagacatctatgagc

SEQ ID NO: 3186076 - DNA, 25 bp, Homo sapien
tcctgctgaggttttatgacaaacg

SEQ ID NO: 3186077 - DNA, 25 bp, Homo sapien
actccaatctcctgctgaggtttta

SEQ ID NO: 3186078 - DNA, 25 bp, Homo sapien
gagctaagtccttcaggctggattg

SEQ ID NO: 3186079 - DNA, 25 bp, Homo sapien
gagaactccacaaccaaaaggctcg

SEQ ID NO: 3186080 - DNA, 25 bp, Homo sapien
gagaatcctatctgccatcgttgag

SEQ ID NO: 3186081 - DNA, 25 bp, Homo sapien
cattggtcgcttgggatagagctga

SEQ ID NO: 3186082 - DNA, 25 bp, Homo sapien
tgaacatccttgcaagcctctctga

SEQ ID NO: 3186083 - DNA, 25 bp, Homo sapien
taaattttcccaatatccagagtca

SEQ ID NO: 3186084 - DNA, 25 bp, Homo sapien
tagcatcaagttaataggaaaagtt

SEQ ID NO: 3186085 - DNA, 25 bp, Homo sapien
ttcccaatatccagagtcagtctcc

SEQ ID NO: 3186086 - DNA, 25 bp, Homo sapien
taagtagcatcaagttaataggaaa

SEQ ID NO: 3186087 - DNA, 25 bp, Homo sapien
atgtggaatcttagtcaaactcata

SEQ ID NO: 3186088 - DNA, 25 bp, Homo sapien
tagagagtggaatggtgattactag

SEQ ID NO: 3186089 - DNA, 25 bp, Homo sapien
agagtggaatggtgattactagggt

SEQ ID NO: 3186090 - DNA, 25 bp, Homo sapien
gtagagagtggaatggtgattacta

SEQ ID NO: 3186091 - DNA, 25 bp, Homo sapien
cacaataggattttgaatgactgct

SEQ ID NO: 3186092 - DNA, 25 bp, Homo sapien
caataggattttgaatgactgctat

SEQ ID NO: 3186093 - DNA, 25 bp, Homo sapien
gcacaataggattttgaatgactgc

SEQ ID NO: 3186094 - DNA, 25 bp, Homo sapien
acaataggattttgaatgactgcta

SEQ ID NO: 3186095 - DNA, 25 bp, Homo sapien
ctcattatgtccccacatgtctttt

SEQ ID NO: 3186096 - DNA, 25 bp, Homo sapien
acatgtcttttcctctgtatgtgcc

SEQ ID NO: 3186097 - DNA, 25 bp, Homo sapien
ccacatgtcttttcctctgtatgtg

SEQ ID NO: 3186098 - DNA, 25 bp, Homo sapien
cattatgtccccacatgtcttttcc

SEQ ID NO: 3186099 - DNA, 25 bp, Homo sapien
gcatcctcttctggtaatgaataac

SEQ ID NO: 3186100 - DNA, 25 bp, Homo sapien
cacaactggcttggatcttgcatcc

SEQ ID NO: 3186101 - DNA, 25 bp, Homo sapien
tcatatctagaacacactaatgggt

SEQ ID NO: 3186102 - DNA, 25 bp, Homo sapien
cagaacagaattttacttcttggcc

SEQ ID NO: 3186103 - DNA, 25 bp, Homo sapien
cttacccctctggccttctcatctt

SEQ ID NO: 3186104 - DNA, 25 bp, Homo sapien
gccttctcatcttccttggccttac

SEQ ID NO: 3186105 - DNA, 25 bp, Homo sapien
tctcatcttccttggccttacccat

SEQ ID NO: 3186106 - DNA, 25 bp, Homo sapien
ttctcatcttccttggccttaccca

SEQ ID NO: 3186107 - DNA, 25 bp, Homo sapien
gatcatactcatcttgccctaacac

SEQ ID NO: 3186108 - DNA, 25 bp, Homo sapien
tcatcttgccctaacacctctggtt

SEQ ID NO: 3186109 - DNA, 25 bp, Homo sapien
tctggttgtaccaccctcgccttat

SEQ ID NO: 3186110 - DNA, 25 bp, Homo sapien
tgccctaacacctctggttgtacca

SEQ ID NO: 3186111 - DNA, 25 bp, Homo sapien
tgcctgtgttggtgtagattagaaa

SEQ ID NO: 3186112 - DNA, 25 bp, Homo sapien
ttagggataaggcaaggctgcagcc

SEQ ID NO: 3186113 - DNA, 25 bp, Homo sapien
gccagagattccgaccaggcaggag

SEQ ID NO: 3186114 - DNA, 25 bp, Homo sapien
tgttggtgtagattagaaattgatc

SEQ ID NO: 3186115 - DNA, 25 bp, Homo sapien
tacccttctagtaagggtcttgctg

SEQ ID NO: 3186116 - DNA, 25 bp, Homo sapien
cccttctagtaagggtcttgctggt

SEQ ID NO: 3186117 - DNA, 25 bp, Homo sapien
actctctgccgcaagagaacagctg

SEQ ID NO: 3186118 - DNA, 25 bp, Homo sapien
ttggccagctaactctctgccgcaa

SEQ ID NO: 3186119 - DNA, 25 bp, Homo sapien
tcactctctagttctctctggagaa

SEQ ID NO: 3186120 - DNA, 25 bp, Homo sapien
attcactctctagttctctctggag

SEQ ID NO: 3186121 - DNA, 25 bp, Homo sapien
cccattcactctctagttctctctg

SEQ ID NO: 3186122 - DNA, 25 bp, Homo sapien
cattcactctctagttctctctgga

SEQ ID NO: 3186123 - DNA, 25 bp, Homo sapien
aggaacccactgcttggctccttta

SEQ ID NO: 3186124 - DNA, 25 bp, Homo sapien
tgtcttctaggtgtaatgctcctaa

SEQ ID NO: 3186125 - DNA, 25 bp, Homo sapien
tacagggtaaactagtactgccatg

SEQ ID NO: 3186126 - DNA, 25 bp, Homo sapien
ccatgataggtgtttaaaagcagcc

SEQ ID NO: 3186127 - DNA, 25 bp, Homo sapien
tgaaccagcaacattgtgattttct

SEQ ID NO: 3186128 - DNA, 25 bp, Homo sapien
taattccctgcttagttggttcttg

SEQ ID NO: 3186129 - DNA, 25 bp, Homo sapien
accattgtcaacaaacaaggtcttt

SEQ ID NO: 3186130 - DNA, 25 bp, Homo sapien
ggtgttgtcgttgaccacaatagaa

SEQ ID NO: 3186131 - DNA, 25 bp, Homo sapien
agactttgcagaacctccagattta

SEQ ID NO: 3186132 - DNA, 25 bp, Homo sapien
gaatacttcacctctgggaagactt

SEQ ID NO: 3186133 - DNA, 25 bp, Homo sapien
ccagatcagcctgaatacttcacct

SEQ ID NO: 3186134 - DNA, 25 bp, Homo sapien
ttgcagaacctccagatttatgcca

SEQ ID NO: 3186135 - DNA, 25 bp, Homo sapien
agtggtaacagtgcccagattgctc

SEQ ID NO: 3186136 - DNA, 25 bp, Homo sapien
gcccagtggtaacagtgcccagatt

SEQ ID NO: 3186137 - DNA, 25 bp, Homo sapien
ccagtggtaacagtgcccagattgc

SEQ ID NO: 3186138 - DNA, 25 bp, Homo sapien
ctgcccagtggtaacagtgcccaga

SEQ ID NO: 3186139 - DNA, 25 bp, Homo sapien
cagggagctgaaacaatagtagttt

SEQ ID NO: 3186140 - DNA, 25 bp, Homo sapien
gttttgacagggagctgaaacaata

SEQ ID NO: 3186141 - DNA, 25 bp, Homo sapien
ttgacagggagctgaaacaatagta

SEQ ID NO: 3186142 - DNA, 25 bp, Homo sapien
gacagggagctgaaacaatagtagt

SEQ ID NO: 3186143 - DNA, 25 bp, Homo sapien
caggattataagcagcttgagtcca

SEQ ID NO: 3186144 - DNA, 25 bp, Homo sapien
gcttgagtccagtgaatataccatt

SEQ ID NO: 3186145 - DNA, 25 bp, Homo sapien
agcttgagtccagtgaatataccat

SEQ ID NO: 3186146 - DNA, 25 bp, Homo sapien
aagagggcatggccgccatgtcatt

SEQ ID NO: 3186147 - DNA, 25 bp, Homo sapien
tgaagagggcatggccgccatgtca

SEQ ID NO: 3186148 - DNA, 25 bp, Homo sapien
tcatgaagagggcatggccgccatg

SEQ ID NO: 3186149 - DNA, 25 bp, Homo sapien
catgaagagggcatggccgccatgt

SEQ ID NO: 3186150 - DNA, 25 bp, Homo sapien
tgtcccagtgatagatcacaacaag

SEQ ID NO: 3186151 - DNA, 25 bp, Homo sapien
gtcccagtgatagatcacaacaaga

SEQ ID NO: 3186152 - DNA, 25 bp, Homo sapien
tcccagtgatagatcacaacaagag

SEQ ID NO: 3186153 - DNA, 25 bp, Homo sapien
atctgattgcaaggaacctgaactc

SEQ ID NO: 3186154 - DNA, 25 bp, Homo sapien
caaaatttcaacttgacaatcacag

SEQ ID NO: 3186155 - DNA, 25 bp, Homo sapien
aacctgaactccctgacttgaacac

SEQ ID NO: 3186156 - DNA, 25 bp, Homo sapien
caatcacagatgactgctgaagcag

SEQ ID NO: 3186157 - DNA, 25 bp, Homo sapien
tactgatgaccaaagctaagcacct

SEQ ID NO: 3186158 - DNA, 25 bp, Homo sapien
tagccatcttatcaggtgtgtaaaa

SEQ ID NO: 3186159 - DNA, 25 bp, Homo sapien
aaaacaagtattgccgcttaaggtg

SEQ ID NO: 3186160 - DNA, 25 bp, Homo sapien
taaaattcaacattggactcaagac

SEQ ID NO: 3186161 - DNA, 25 bp, Homo sapien
cttgatatttttgccctctaccagg

SEQ ID NO: 3186162 - DNA, 25 bp, Homo sapien
tgcaatctcagtatctacagccatg

SEQ ID NO: 3186163 - DNA, 25 bp, Homo sapien
gaaactggggagagtcaatgccttg

SEQ ID NO: 3186164 - DNA, 25 bp, Homo sapien
aatgccttgattggcttattcacca

SEQ ID NO: 3186165 - DNA, 25 bp, Homo sapien
gaacagtagtaaacagtctgaagta

SEQ ID NO: 3186166 - DNA, 25 bp, Homo sapien
gaatcgaacagtagtaaacagtctg

SEQ ID NO: 3186167 - DNA, 25 bp, Homo sapien
ggaaaaatagaatcgaacagtagta

SEQ ID NO: 3186168 - DNA, 25 bp, Homo sapien
aatagaatcgaacagtagtaaacag

SEQ ID NO: 3186169 - DNA, 25 bp, Homo sapien
ctggtccagcccaagcacattttca

SEQ ID NO: 3186170 - DNA, 25 bp, Homo sapien
atctgaataggccaggtctaggcca

SEQ ID NO: 3186171 - DNA, 25 bp, Homo sapien
tctgattatctgaataggccaggtc

SEQ ID NO: 3186172 - DNA, 25 bp, Homo sapien
gcacattttcaatcaccacatgact

SEQ ID NO: 3186173 - DNA, 25 bp, Homo sapien
gacttagtgcttgaatcattaggag

SEQ ID NO: 3186174 - DNA, 25 bp, Homo sapien
catgattatcaaaccctccccttga

SEQ ID NO: 3186175 - DNA, 25 bp, Homo sapien
tcaccacatgctaatttgccaaagc

SEQ ID NO: 3186176 - DNA, 25 bp, Homo sapien
cacaccagtgactgttttcaccaca

SEQ ID NO: 3186177 - DNA, 25 bp, Homo sapien
gaagaaatcatgagcgagcatctgt

SEQ ID NO: 3186178 - DNA, 25 bp, Homo sapien
aacttttctatgtatctgaggctca

SEQ ID NO: 3186179 - DNA, 25 bp, Homo sapien
tgtatgtccttaggccaagtagcac

SEQ ID NO: 3186180 - DNA, 25 bp, Homo sapien
ggaggcatggtatcttgttcaactt

SEQ ID NO: 3186181 - DNA, 25 bp, Homo sapien
cctgagggtaactggtgaagagctt

SEQ ID NO: 3186182 - DNA, 25 bp, Homo sapien
ctgagggtaactggtgaagagcttc

SEQ ID NO: 3186183 - DNA, 25 bp, Homo sapien
tgagggtaactggtgaagagcttct

SEQ ID NO: 3186184 - DNA, 25 bp, Homo sapien
gttttctacacatcttgtatggcca

SEQ ID NO: 3186185 - DNA, 25 bp, Homo sapien
tggccaatgccatatacatattctt

SEQ ID NO: 3186186 - DNA, 25 bp, Homo sapien
gatatttatgttcccctcattaaag

SEQ ID NO: 3186187 - DNA, 25 bp, Homo sapien
ggtccagtcctcttactgctactgc

SEQ ID NO: 3186188 - DNA, 25 bp, Homo sapien
ctattttgtcagtagcctctggcac

SEQ ID NO: 3186189 - DNA, 25 bp, Homo sapien
caccttcaccactgtgtctgctgct

SEQ ID NO: 3186190 - DNA, 25 bp, Homo sapien
aacggctggcaccactattttgtca

SEQ ID NO: 3186191 - DNA, 25 bp, Homo sapien
gcaccactattttgtcagtagcctc

SEQ ID NO: 3186192 - DNA, 25 bp, Homo sapien
ttttcttcttgtggaaccttgagct

SEQ ID NO: 3186193 - DNA, 25 bp, Homo sapien
tttcttcttgtggaaccttgagctc

SEQ ID NO: 3186194 - DNA, 25 bp, Homo sapien
tttttcttcttgtggaaccttgagc

SEQ ID NO: 3186195 - DNA, 25 bp, Homo sapien
ttcttcttgtggaaccttgagctcc

SEQ ID NO: 3186196 - DNA, 25 bp, Homo sapien
cagcatatgcaatcatggtaacagc

SEQ ID NO: 3186197 - DNA, 25 bp, Homo sapien
tatgcaagcgtaatgagcggagaga

SEQ ID NO: 3186198 - DNA, 25 bp, Homo sapien
gagagttggcagtatgcatgactga

SEQ ID NO: 3186199 - DNA, 25 bp, Homo sapien
tggtaacagcaaattctgagcaccc

SEQ ID NO: 3186200 - DNA, 25 bp, Homo sapien
tatttacaccctttgcatatgtgat

SEQ ID NO: 3186201 - DNA, 25 bp, Homo sapien
tcaagttgtggtaattatattgaat

SEQ ID NO: 3186202 - DNA, 25 bp, Homo sapien
tgtttaatgtatttacaccctttgc

SEQ ID NO: 3186203 - DNA, 25 bp, Homo sapien
gtattttcaagttgtggtaattata

SEQ ID NO: 3186204 - DNA, 25 bp, Homo sapien
cacttctaacagtaacaatttccta

SEQ ID NO: 3186205 - DNA, 25 bp, Homo sapien
gaaaaataaatgctggccagctcaa

SEQ ID NO: 3186206 - DNA, 25 bp, Homo sapien
gaaatccagaatgacatggaccatg

SEQ ID NO: 3186207 - DNA, 25 bp, Homo sapien
gtacctggtaaactatttcatcaaa

SEQ ID NO: 3186208 - DNA, 25 bp, Homo sapien
attttttaccaagtacagcacactg

SEQ ID NO: 3186209 - DNA, 25 bp, Homo sapien
tttcagagtgaaccccgcccttaca

SEQ ID NO: 3186210 - DNA, 25 bp, Homo sapien
ccccgcccttacaaagcacataaag

SEQ ID NO: 3186211 - DNA, 25 bp, Homo sapien
tccaaatcctgccaatgtcttagaa

SEQ ID NO: 3186212 - DNA, 25 bp, Homo sapien
gaggcacaggctttatctttcaaga

SEQ ID NO: 3186213 - DNA, 25 bp, Homo sapien
ggatgattcttctatgggccaactt

SEQ ID NO: 3186214 - DNA, 25 bp, Homo sapien
cactttataaagcatcccacattaa

SEQ ID NO: 3186215 - DNA, 25 bp, Homo sapien
tagatgccccaaataatgatcttgg

SEQ ID NO: 3186216 - DNA, 25 bp, Homo sapien
ggaattggtcctcaaccactatatt

SEQ ID NO: 3186217 - DNA, 25 bp, Homo sapien
ctgcttgctactgagctccataact

SEQ ID NO: 3186218 - DNA, 25 bp, Homo sapien
gctccataactccacagcaatgcag

SEQ ID NO: 3186219 - DNA, 25 bp, Homo sapien
gctactgagctccataactccacag

SEQ ID NO: 3186220 - DNA, 25 bp, Homo sapien
gcagttcttctctggtacctgaata

SEQ ID NO: 3186221 - DNA, 25 bp, Homo sapien
cattctccagtaagatgtggcagtc

SEQ ID NO: 3186222 - DNA, 25 bp, Homo sapien
ttagaactagtggaataatgcactg

SEQ ID NO: 3186223 - DNA, 25 bp, Homo sapien
tgtatgcctctcaagcctgtcttta

SEQ ID NO: 3186224 - DNA, 25 bp, Homo sapien
taatgcactgtgattactttatccc

SEQ ID NO: 3186225 - DNA, 25 bp, Homo sapien
ccttaagatttggaaatcctcatgc

SEQ ID NO: 3186226 - DNA, 25 bp, Homo sapien
tcctcatgcttgttggccaccatca

SEQ ID NO: 3186227 - DNA, 25 bp, Homo sapien
agatttggaaatcctcatgcttgtt

SEQ ID NO: 3186228 - DNA, 25 bp, Homo sapien
ttggaaatcctcatgcttgttggcc

SEQ ID NO: 3186229 - DNA, 25 bp, Homo sapien
ctaaatcattgagccttattaagga

SEQ ID NO: 3186230 - DNA, 25 bp, Homo sapien
gtagccctcgagtggctgaacaagt

SEQ ID NO: 3186231 - DNA, 25 bp, Homo sapien
ttctgcttccgtggcctccaacact

SEQ ID NO: 3186232 - DNA, 25 bp, Homo sapien
ggcctccaacactcaagctctaaat

SEQ ID NO: 3186233 - DNA, 25 bp, Homo sapien
tccatgacggccattgcggtggaca

SEQ ID NO: 3186234 - DNA, 25 bp, Homo sapien
tcatagcgagtggtactttggcgcc

SEQ ID NO: 3186235 - DNA, 25 bp, Homo sapien
catggccgccttcaacacgttggtc

SEQ ID NO: 3186236 - DNA, 25 bp, Homo sapien
gcccacaagcgcatgaggactgtca

SEQ ID NO: 3186237 - DNA, 25 bp, Homo sapien
agaggagtctcgtcttgggctgccc

SEQ ID NO: 3186238 - DNA, 25 bp, Homo sapien
agctgcatcccctaaccagcaggga

SEQ ID NO: 3186239 - DNA, 25 bp, Homo sapien
agactccggcaccaaagtgaccagg

SEQ ID NO: 3186240 - DNA, 25 bp, Homo sapien
caagcgcctctgagaaagtgcagct

SEQ ID NO: 3186241 - DNA, 25 bp, Homo sapien
cactacaacctttgcctcccgagtt

SEQ ID NO: 3186242 - DNA, 25 bp, Homo sapien
ctggcctcaagcaatccaccagtct

SEQ ID NO: 3186243 - DNA, 25 bp, Homo sapien
ttctggcctcaagcaatccaccagt

SEQ ID NO: 3186244 - DNA, 25 bp, Homo sapien
acttctggcctcaagcaatccacca

SEQ ID NO: 3186245 - DNA, 25 bp, Homo sapien
caatgatgtctgcatagtggaaagg

SEQ ID NO: 3186246 - DNA, 25 bp, Homo sapien
acaatgatgtctgcatagtggaaag

SEQ ID NO: 3186247 - DNA, 25 bp, Homo sapien
aatgatgtctgcatagtggaaaggg

SEQ ID NO: 3186248 - DNA, 25 bp, Homo sapien
gatgaaaattgatgttctgctatgg

SEQ ID NO: 3186249 - DNA, 25 bp, Homo sapien
tgaaatcactgggataggttaaact

SEQ ID NO: 3186250 - DNA, 25 bp, Homo sapien
tgtaggtggtagaatacaaagtaga

SEQ ID NO: 3186251 - DNA, 25 bp, Homo sapien
gatgttctgctatggggtagtcaaa

SEQ ID NO: 3186252 - DNA, 25 bp, Homo sapien
ttgtagaatccatagagtgtacaac

SEQ ID NO: 3186253 - DNA, 25 bp, Homo sapien
tagaatccatagagtgtacaacatc

SEQ ID NO: 3186254 - DNA, 25 bp, Homo sapien
atttgtagaatccatagagtgtaca

SEQ ID NO: 3186255 - DNA, 25 bp, Homo sapien
gtagaatccatagagtgtacaacat

SEQ ID NO: 3186256 - DNA, 25 bp, Homo sapien
cagaacccttgccttgacagtagtt

SEQ ID NO: 3186257 - DNA, 25 bp, Homo sapien
ggaaaccttgttgcatgattatctg

SEQ ID NO: 3186258 - DNA, 25 bp, Homo sapien
tgggagtggtgtctacacctggaac

SEQ ID NO: 3186259 - DNA, 25 bp, Homo sapien
atggctgggagtggtgtctacacct

SEQ ID NO: 3186260 - DNA, 25 bp, Homo sapien
ggctttgctgctcaatagagtagta

SEQ ID NO: 3186261 - DNA, 25 bp, Homo sapien
gtgttattagcccaattatcatggc

SEQ ID NO: 3186262 - DNA, 25 bp, Homo sapien
tagcccaattatcatggcctttgtg

SEQ ID NO: 3186263 - DNA, 25 bp, Homo sapien
tgctgctcaatagagtagtataaaa

SEQ ID NO: 3186264 - DNA, 25 bp, Homo sapien
taaaggctgtcttcatggtcatgtg

SEQ ID NO: 3186265 - DNA, 25 bp, Homo sapien
attaggagagctgtgggaacaagca

SEQ ID NO: 3186266 - DNA, 25 bp, Homo sapien
tgtaaaagatgagtcatggctgtgg

SEQ ID NO: 3186267 - DNA, 25 bp, Homo sapien
gcttcaaaagctgcaactgtaaaag

SEQ ID NO: 3186268 - DNA, 25 bp, Homo sapien
atttccgaaattcatgccccttcct

SEQ ID NO: 3186269 - DNA, 25 bp, Homo sapien
tatgacatctagttgctgtcgtttc

SEQ ID NO: 3186270 - DNA, 25 bp, Homo sapien
tctgctgctgtaaattatgacatct

SEQ ID NO: 3186271 - DNA, 25 bp, Homo sapien
tccccatttccgaaattcatgcccc

SEQ ID NO: 3186272 - DNA, 25 bp, Homo sapien
ttcaaatgccttgacagttttgtca

SEQ ID NO: 3186273 - DNA, 25 bp, Homo sapien
attttcaaatgccttgacagttttg

SEQ ID NO: 3186274 - DNA, 25 bp, Homo sapien
cattcatgatccaattgatattttc

SEQ ID NO: 3186275 - DNA, 25 bp, Homo sapien
gatattttcctcctacgccagcaga

SEQ ID NO: 3186276 - DNA, 25 bp, Homo sapien
gagttccctcgcatattttacctta

SEQ ID NO: 3186277 - DNA, 25 bp, Homo sapien
taacacttccaaattggagcccctc

SEQ ID NO: 3186278 - DNA, 25 bp, Homo sapien
gaagcttgagagttggttccatctg

SEQ ID NO: 3186279 - DNA, 25 bp, Homo sapien
ccagggtctcacaatggcaacaaga

SEQ ID NO: 3186280 - DNA, 25 bp, Homo sapien
tctctagtgtttgggcataatcagt

SEQ ID NO: 3186281 - DNA, 25 bp, Homo sapien
acatctgaaagcagccaactttctt

SEQ ID NO: 3186282 - DNA, 25 bp, Homo sapien
tccaagggtagaagataggtaactc

SEQ ID NO: 3186283 - DNA, 25 bp, Homo sapien
gcatactgaacagggcatatccatg

SEQ ID NO: 3186284 - DNA, 25 bp, Homo sapien
tgcagttgcagaaattgtccagaga

SEQ ID NO: 3186285 - DNA, 25 bp, Homo sapien
ttgcagttgcagaaattgtccagag

SEQ ID NO: 3186286 - DNA, 25 bp, Homo sapien
catagtaatatcgaaccaaaaattt

SEQ ID NO: 3186287 - DNA, 25 bp, Homo sapien
taatcaagggttacatagtaatatc

SEQ ID NO: 3186288 - DNA, 25 bp, Homo sapien
tcaaagctgtaagcacaactgggta

SEQ ID NO: 3186289 - DNA, 25 bp, Homo sapien
aagctgtaagcacaactgggtaagt

SEQ ID NO: 3186290 - DNA, 25 bp, Homo sapien
agttccacagcgtaggcattcagta

SEQ ID NO: 3186291 - DNA, 25 bp, Homo sapien
tgggtaagttccacagcgtaggcat

SEQ ID NO: 3186292 - DNA, 25 bp, Homo sapien
attacccaacactccacatacaaag

SEQ ID NO: 3186293 - DNA, 25 bp, Homo sapien
taaggctcgtagagccaagcagctg

SEQ ID NO: 3186294 - DNA, 25 bp, Homo sapien
cacatacaaaggttgctgattctcc

SEQ ID NO: 3186295 - DNA, 25 bp, Homo sapien
caagcagctggttctaacctgtttg

SEQ ID NO: 3186296 - DNA, 25 bp, Homo sapien
cagagggcatggatctgaggactat

SEQ ID NO: 3186297 - DNA, 25 bp, Homo sapien
tgatctggtaagaatgaaaccctgc

SEQ ID NO: 3186298 - DNA, 25 bp, Homo sapien
aatccgcccctgctaggagtacaag

SEQ ID NO: 3186299 - DNA, 25 bp, Homo sapien
gagcaatggctcctggattacaacc

SEQ ID NO: 3186300 - DNA, 25 bp, Homo sapien
tctgctggattccattgattttgtt

SEQ ID NO: 3186301 - DNA, 25 bp, Homo sapien
ctcctaagttctgctggattccatt

SEQ ID NO: 3186302 - DNA, 25 bp, Homo sapien
gctggattccattgattttgttcat

SEQ ID NO: 3186303 - DNA, 25 bp, Homo sapien
tcctaagttctgctggattccattg

SEQ ID NO: 3186304 - DNA, 25 bp, Homo sapien
tggttcacaaggtcttgcatttaga

SEQ ID NO: 3186305 - DNA, 25 bp, Homo sapien
tgcatttagattatcatcttgaagg

SEQ ID NO: 3186306 - DNA, 25 bp, Homo sapien
gaccacatggttcacaaggtcttgc

SEQ ID NO: 3186307 - DNA, 25 bp, Homo sapien
tcttgaaggacgaagtctttgtccc

SEQ ID NO: 3186308 - DNA, 25 bp, Homo sapien
tattgctggcaaatagtctctggaa

SEQ ID NO: 3186309 - DNA, 25 bp, Homo sapien
tgcaaattacccattggcaatgtga

SEQ ID NO: 3186310 - DNA, 25 bp, Homo sapien
aatctgggcattgctgtattccagc

SEQ ID NO: 3186311 - DNA, 25 bp, Homo sapien
gatgaggaaaagatgcgacatgttc

SEQ ID NO: 3186312 - DNA, 25 bp, Homo sapien
ctttacagtatctaaaagggtcata

SEQ ID NO: 3186313 - DNA, 25 bp, Homo sapien
cagtatctaaaagggtcatatttac

SEQ ID NO: 3186314 - DNA, 25 bp, Homo sapien
tacagtatctaaaagggtcatattt

SEQ ID NO: 3186315 - DNA, 25 bp, Homo sapien
aaagggtcatatttactttcttcat

SEQ ID NO: 3186316 - DNA, 25 bp, Homo sapien
tgtggtatgtcgttggtcacgacac

SEQ ID NO: 3186317 - DNA, 25 bp, Homo sapien
gctgcagacctatgtggtatgtcgt

SEQ ID NO: 3186318 - DNA, 25 bp, Homo sapien
cctatgtggtatgtcgttggtcacg

SEQ ID NO: 3186319 - DNA, 25 bp, Homo sapien
tgatgctgtagctgcagacctatgt

SEQ ID NO: 3186320 - DNA, 25 bp, Homo sapien
gagctttttcccagattctgacaat

SEQ ID NO: 3186321 - DNA, 25 bp, Homo sapien
tttttcccagattctgacaatgggt

SEQ ID NO: 3186322 - DNA, 25 bp, Homo sapien
ctttttcccagattctgacaatggg

SEQ ID NO: 3186323 - DNA, 25 bp, Homo sapien
gctttttcccagattctgacaatgg

SEQ ID NO: 3186324 - DNA, 25 bp, Homo sapien
cactatgattttctgaggtgtttgg

SEQ ID NO: 3186325 - DNA, 25 bp, Homo sapien
actatgattttctgaggtgtttgga

SEQ ID NO: 3186326 - DNA, 25 bp, Homo sapien
ccactatgattttctgaggtgtttg

SEQ ID NO: 3186327 - DNA, 25 bp, Homo sapien
gctggggactcaacaggagccctga

SEQ ID NO: 3186328 - DNA, 25 bp, Homo sapien
caggagccctgagaaaaattcctct

SEQ ID NO: 3186329 - DNA, 25 bp, Homo sapien
aggctggggactcaacaggagccct

SEQ ID NO: 3186330 - DNA, 25 bp, Homo sapien
gctagttagttgaaattccagaacc

SEQ ID NO: 3186331 - DNA, 25 bp, Homo sapien
tgaaacataggagctaggataactc

SEQ ID NO: 3186332 - DNA, 25 bp, Homo sapien
cttcatctgaagtatcagcctctga

SEQ ID NO: 3186333 - DNA, 25 bp, Homo sapien
aatgtcctccataatgataatcaag

SEQ ID NO: 3186334 - DNA, 25 bp, Homo sapien
gctaggataactctgatttgggaaa

SEQ ID NO: 3186335 - DNA, 25 bp, Homo sapien
aaccatgtggataagctctccttga

SEQ ID NO: 3186336 - DNA, 25 bp, Homo sapien
ggagagaaccatgtggataagctct

SEQ ID NO: 3186337 - DNA, 25 bp, Homo sapien
agaaccatgtggataagctctcctt

SEQ ID NO: 3186338 - DNA, 25 bp, Homo sapien
agagaaccatgtggataagctctcc

SEQ ID NO: 3186339 - DNA, 25 bp, Homo sapien
ctaggtcttgcttgactcatctctg

SEQ ID NO: 3186340 - DNA, 25 bp, Homo sapien
gaagtgaaaacctgatgtaccacct

SEQ ID NO: 3186341 - DNA, 25 bp, Homo sapien
agtgaaaacctgatgtaccaccttc

SEQ ID NO: 3186342 - DNA, 25 bp, Homo sapien
tttctaggtcttgcttgactcatct

SEQ ID NO: 3186343 - DNA, 25 bp, Homo sapien
cttctattcaagttttcagttgatt

SEQ ID NO: 3186344 - DNA, 25 bp, Homo sapien
gttttcagttgattagatgagggtt

SEQ ID NO: 3186345 - DNA, 25 bp, Homo sapien
ctattcaagttttcagttgattaga

SEQ ID NO: 3186346 - DNA, 25 bp, Homo sapien
tcaagttttcagttgattagatgag

SEQ ID NO: 3186347 - DNA, 25 bp, Homo sapien
tatgtagccaaagttcactccaagc

SEQ ID NO: 3186348 - DNA, 25 bp, Homo sapien
ttaaaaatgtacaccatccagagta

SEQ ID NO: 3186349 - DNA, 25 bp, Homo sapien
caaagttcactccaagcatatagga

SEQ ID NO: 3186350 - DNA, 25 bp, Homo sapien
gaaataaggccagctatgtagccaa

SEQ ID NO: 3186351 - DNA, 25 bp, Homo sapien
gcattgatgcaaagataggagttat

SEQ ID NO: 3186352 - DNA, 25 bp, Homo sapien
ggagaacttttacgaaatggcactg

SEQ ID NO: 3186353 - DNA, 25 bp, Homo sapien
cttgtgtattacagagtccactgca

SEQ ID NO: 3186354 - DNA, 25 bp, Homo sapien
aaagttggagaaccaatgctaccag

SEQ ID NO: 3186355 - DNA, 25 bp, Homo sapien
ggtgatttgatgcacctctcttgat

SEQ ID NO: 3186356 - DNA, 25 bp, Homo sapien
aagatttctgccgagaagtccactg

SEQ ID NO: 3186357 - DNA, 25 bp, Homo sapien
taagaagaatacaagtagggcccta

SEQ ID NO: 3186358 - DNA, 25 bp, Homo sapien
ggtctgatgagtatatgccttgatg

SEQ ID NO: 3186359 - DNA, 25 bp, Homo sapien
cagataaccatttcccaacttccca

SEQ ID NO: 3186360 - DNA, 25 bp, Homo sapien
tactatatgagaagatgtaggctcc

SEQ ID NO: 3186361 - DNA, 25 bp, Homo sapien
ggctccgcaaatactactatcacag

SEQ ID NO: 3186362 - DNA, 25 bp, Homo sapien
ctaaggccgtaggtgacagcagaag

SEQ ID NO: 3186363 - DNA, 25 bp, Homo sapien
taattgcagttggtgaactctaagg

SEQ ID NO: 3186364 - DNA, 25 bp, Homo sapien
tttgccatttccaatttcctccttc

SEQ ID NO: 3186365 - DNA, 25 bp, Homo sapien
tgccatttccaatttcctccttcat

SEQ ID NO: 3186366 - DNA, 25 bp, Homo sapien
ttgccatttccaatttcctccttca

SEQ ID NO: 3186367 - DNA, 25 bp, Homo sapien
ctttgccatttccaatttcctcctt

SEQ ID NO: 3186368 - DNA, 25 bp, Homo sapien
aacagtttcgcagtgacattttggc

SEQ ID NO: 3186369 - DNA, 25 bp, Homo sapien
ttgttaaacagtttcgcagtgacat

SEQ ID NO: 3186370 - DNA, 25 bp, Homo sapien
gtttcgcagtgacattttggccatc

SEQ ID NO: 3186371 - DNA, 25 bp, Homo sapien
gttaaacagtttcgcagtgacattt

SEQ ID NO: 3186372 - DNA, 25 bp, Homo sapien
gtgtggaaggtgaattgattgcaat

SEQ ID NO: 3186373 - DNA, 25 bp, Homo sapien
agatgaaagtgtaattgtgtggaag

SEQ ID NO: 3186374 - DNA, 25 bp, Homo sapien
cctcaggacttaccctcaggctggg

SEQ ID NO: 3186375 - DNA, 25 bp, Homo sapien
gtgccaccagggccataatacatag

SEQ ID NO: 3186376 - DNA, 25 bp, Homo sapien
tggagaaacccctttgagagatctg

SEQ ID NO: 3186377 - DNA, 25 bp, Homo sapien
cttgctgaattatacgggcctcttc

SEQ ID NO: 3186378 - DNA, 25 bp, Homo sapien
agcttgctgaattatacgggcctct

SEQ ID NO: 3186379 - DNA, 25 bp, Homo sapien
tgctgaattatacgggcctcttctg

SEQ ID NO: 3186380 - DNA, 25 bp, Homo sapien
cagtagaagtagacacacttaaatc

SEQ ID NO: 3186381 - DNA, 25 bp, Homo sapien
cctcggactgcattgtgcattgcaa

SEQ ID NO: 3186382 - DNA, 25 bp, Homo sapien
acttaaatccctgctgagcgccagg

SEQ ID NO: 3186383 - DNA, 25 bp, Homo sapien
aatgttagaaatcctcggactgcat

SEQ ID NO: 3186384 - DNA, 25 bp, Homo sapien
gtcacagagtgcatacagattagct

SEQ ID NO: 3186385 - DNA, 25 bp, Homo sapien
gcttcagaggaccaaggcactagtg

SEQ ID NO: 3186386 - DNA, 25 bp, Homo sapien
tgacaccaagcagcagtgaaagccc

SEQ ID NO: 3186387 - DNA, 25 bp, Homo sapien
tatttagcagggttcgctgcgagga

SEQ ID NO: 3186388 - DNA, 25 bp, Homo sapien
taagtggctgcacaacgtaatcctg

SEQ ID NO: 3186389 - DNA, 25 bp, Homo sapien
tgggtagcaccaccaggaatacact

SEQ ID NO: 3186390 - DNA, 25 bp, Homo sapien
tatgacaaaacctttttctccagtg

SEQ ID NO: 3186391 - DNA, 25 bp, Homo sapien
ctctgctgaagcagctaagtggctg

SEQ ID NO: 3186392 - DNA, 25 bp, Homo sapien
taaggtgtatgtatgcttgtgcaat

SEQ ID NO: 3186393 - DNA, 25 bp, Homo sapien
cagctactatattaggagggattcc

SEQ ID NO: 3186394 - DNA, 25 bp, Homo sapien
ggaacatgggccacaaaatgtactc

SEQ ID NO: 3186395 - DNA, 25 bp, Homo sapien
cacaaaatgtactcctttcacagtg

SEQ ID NO: 3186396 - DNA, 25 bp, Homo sapien
tgtacagatagcagcttgtattttg

SEQ ID NO: 3186397 - DNA, 25 bp, Homo sapien
ttgtgtgtttagacacaaggagaca

SEQ ID NO: 3186398 - DNA, 25 bp, Homo sapien
gtgtttcagtactgtaaactgtaca

SEQ ID NO: 3186399 - DNA, 25 bp, Homo sapien
caaggagacaatcatgtctgagcat

SEQ ID NO: 3186400 - DNA, 25 bp, Homo sapien
gcagactgcccgcagaatcattcct

SEQ ID NO: 3186401 - DNA, 25 bp, Homo sapien
gacagtgcgtttcaaattgccaatc

SEQ ID NO: 3186402 - DNA, 25 bp, Homo sapien
gcctcagcagccgtcacagacagtg

SEQ ID NO: 3186403 - DNA, 25 bp, Homo sapien
gggagctggcggagccaacccagcc

SEQ ID NO: 3186404 - DNA, 25 bp, Homo sapien
accgaaacgactcccagaggctggg

SEQ ID NO: 3186405 - DNA, 25 bp, Homo sapien
cagagccgtcgttgcaaatggcaaa

SEQ ID NO: 3186406 - DNA, 25 bp, Homo sapien
agataatgaatctccccgagcgcgt

SEQ ID NO: 3186407 - DNA, 25 bp, Homo sapien
gaacaagctcaaatgcggcgctgct

SEQ ID NO: 3186408 - DNA, 25 bp, Homo sapien
accgccatgctctggggcagcggcg

SEQ ID NO: 3186409 - DNA, 25 bp, Homo sapien
ccgccaccgccatgctctggggcag

SEQ ID NO: 3186410 - DNA, 25 bp, Homo sapien
ggggcggcaggaaatcctcctccgc

SEQ ID NO: 3186411 - DNA, 25 bp, Homo sapien
tggtgggggcggcaggaaatcctcc

SEQ ID NO: 3186412 - DNA, 25 bp, Homo sapien
ttcagtacttcatttgctaatttcc

SEQ ID NO: 3186413 - DNA, 25 bp, Homo sapien
gtttatactcggatgtattgtagac

SEQ ID NO: 3186414 - DNA, 25 bp, Homo sapien
cagtacttcatttgctaatttcctg

SEQ ID NO: 3186415 - DNA, 25 bp, Homo sapien
cggatgtattgtagactttttcagt

SEQ ID NO: 3186416 - DNA, 25 bp, Homo sapien
ctggatactgggcataatcattttc

SEQ ID NO: 3186417 - DNA, 25 bp, Homo sapien
acctggatactgggcataatcattt

SEQ ID NO: 3186418 - DNA, 25 bp, Homo sapien
cctggatactgggcataatcatttt

SEQ ID NO: 3186419 - DNA, 25 bp, Homo sapien
ttttctacagtttctggtggtatta

SEQ ID NO: 3186420 - DNA, 25 bp, Homo sapien
cccttaatgcctatctgttcccagt

SEQ ID NO: 3186421 - DNA, 25 bp, Homo sapien
tgaattccccttaatgcctatctgt

SEQ ID NO: 3186422 - DNA, 25 bp, Homo sapien
ctgccagtgaattccccttaatgcc

SEQ ID NO: 3186423 - DNA, 25 bp, Homo sapien
tgcctatctgttcccagttccacat

SEQ ID NO: 3186424 - DNA, 25 bp, Homo sapien
aaaagccaatgcgtgtatacctggg

SEQ ID NO: 3186425 - DNA, 25 bp, Homo sapien
ggttcggcaaaagccaatgcgtgta

SEQ ID NO: 3186426 - DNA, 25 bp, Homo sapien
tcggcaaaagccaatgcgtgtatac

SEQ ID NO: 3186427 - DNA, 25 bp, Homo sapien
ctgaaggttcggcaaaagccaatgc

SEQ ID NO: 3186428 - DNA, 25 bp, Homo sapien
gcttggagccgccaattctgcttct

SEQ ID NO: 3186429 - DNA, 25 bp, Homo sapien
ggagccgccaattctgcttcttcat

SEQ ID NO: 3186430 - DNA, 25 bp, Homo sapien
ttggagccgccaattctgcttcttc

SEQ ID NO: 3186431 - DNA, 25 bp, Homo sapien
gctgctactgatcccctgccccagt

SEQ ID NO: 3186432 - DNA, 25 bp, Homo sapien
tcagtcacagctctcctcacatctt

SEQ ID NO: 3186433 - DNA, 25 bp, Homo sapien
cagtcacagctctcctcacatcttc

SEQ ID NO: 3186434 - DNA, 25 bp, Homo sapien
tctcctttagttgatatgttcaagg

SEQ ID NO: 3186435 - DNA, 25 bp, Homo sapien
gagctagtataagtctggaaactga

SEQ ID NO: 3186436 - DNA, 25 bp, Homo sapien
tatatattaaacagtactcttgttg

SEQ ID NO: 3186437 - DNA, 25 bp, Homo sapien
actgagaggtcgtgattttccattg

SEQ ID NO: 3186438 - DNA, 25 bp, Homo sapien
cttgtatggtggcattctgtaaaac

SEQ ID NO: 3186439 - DNA, 25 bp, Homo sapien
tcttgtcgaaaacgacatggtatca

SEQ ID NO: 3186440 - DNA, 25 bp, Homo sapien
tatggtggcattctgtaaaacccta

SEQ ID NO: 3186441 - DNA, 25 bp, Homo sapien
cattcacattcttgtcgaaaacgac

SEQ ID NO: 3186442 - DNA, 25 bp, Homo sapien
ctgtagaggtaaacatgtgggtctt

SEQ ID NO: 3186443 - DNA, 25 bp, Homo sapien
tagaggtaaacatgtgggtcttgtt

SEQ ID NO: 3186444 - DNA, 25 bp, Homo sapien
taaacatgtgggtcttgttaccaga

SEQ ID NO: 3186445 - DNA, 25 bp, Homo sapien
gaggtaaacatgtgggtcttgttac

SEQ ID NO: 3186446 - DNA, 25 bp, Homo sapien
gacaggagaattcacccattttggt

SEQ ID NO: 3186447 - DNA, 25 bp, Homo sapien
aaactgaactttacctgagagtgga

SEQ ID NO: 3186448 - DNA, 25 bp, Homo sapien
tggaatgattagagagtgatgcaca

SEQ ID NO: 3186449 - DNA, 25 bp, Homo sapien
gcacagtatcagaatgaggttggca

SEQ ID NO: 3186450 - DNA, 25 bp, Homo sapien
tcaaaatctagactatttgaggtct

SEQ ID NO: 3186451 - DNA, 25 bp, Homo sapien
tcttcaaaatctagactatttgagg

SEQ ID NO: 3186452 - DNA, 25 bp, Homo sapien
ctggcctcatctcagccaaagcagg

SEQ ID NO: 3186453 - DNA, 25 bp, Homo sapien
tctgtctgcaattctcctcaggcaa

SEQ ID NO: 3186454 - DNA, 25 bp, Homo sapien
ttggtagtcagcttctacctgtagc

SEQ ID NO: 3186455 - DNA, 25 bp, Homo sapien
tctcctttggtagtcagcttctacc

SEQ ID NO: 3186456 - DNA, 25 bp, Homo sapien
ggtagtcagcttctacctgtagctt

SEQ ID NO: 3186457 - DNA, 25 bp, Homo sapien
cagccttctcctttggtagtcagct

SEQ ID NO: 3186458 - DNA, 25 bp, Homo sapien
cagttggtctgattgggattttccc

SEQ ID NO: 3186459 - DNA, 25 bp, Homo sapien
tacatgtcctttagagaccctagtc

SEQ ID NO: 3186460 - DNA, 25 bp, Homo sapien
tagaccatatctccagaaatgaggt

SEQ ID NO: 3186461 - DNA, 25 bp, Homo sapien
tgtgacttgaccatcgattatgacc

SEQ ID NO: 3186462 - DNA, 25 bp, Homo sapien
tcaacaatgtcttacttaatacata

SEQ ID NO: 3186463 - DNA, 25 bp, Homo sapien
atcaacaatgtcttacttaatacat

SEQ ID NO: 3186464 - DNA, 25 bp, Homo sapien
catcaacaatgtcttacttaataca

SEQ ID NO: 3186465 - DNA, 25 bp, Homo sapien
caacaatgtcttacttaatacatag

SEQ ID NO: 3186466 - DNA, 25 bp, Homo sapien
cggcctgggcgacagaatgagactt

SEQ ID NO: 3186467 - DNA, 25 bp, Homo sapien
tccggcctgggcgacagaatgagac

SEQ ID NO: 3186468 - DNA, 25 bp, Homo sapien
actccggcctgggcgacagaatgag

SEQ ID NO: 3186469 - DNA, 25 bp, Homo sapien
ggcctgggcgacagaatgagacttc

SEQ ID NO: 3186470 - DNA, 25 bp, Homo sapien
gaagaatttaatatagactagaaag

SEQ ID NO: 3186471 - DNA, 25 bp, Homo sapien
ttctgcacagttgtactgattgcct

SEQ ID NO: 3186472 - DNA, 25 bp, Homo sapien
cacgagccaattcttgaaaaggtaa

SEQ ID NO: 3186473 - DNA, 25 bp, Homo sapien
taatatagactagaaagtgattttt

SEQ ID NO: 3186474 - DNA, 25 bp, Homo sapien
ttttaattaaacatgggctgctggt

SEQ ID NO: 3186475 - DNA, 25 bp, Homo sapien
tcaagatcatactagatggggaaaa

SEQ ID NO: 3186476 - DNA, 25 bp, Homo sapien
aactggaacactggaaaggatgtcc

SEQ ID NO: 3186477 - DNA, 25 bp, Homo sapien
gaactggaacactggaaaggatgtc

SEQ ID NO: 3186478 - DNA, 25 bp, Homo sapien
cgtcaagatcatactagatggggaa

SEQ ID NO: 3186479 - DNA, 25 bp, Homo sapien
ctgtctggctttgtctaaggtagaa

SEQ ID NO: 3186480 - DNA, 25 bp, Homo sapien
tctaaggtagaaagtatatcataag

SEQ ID NO: 3186481 - DNA, 25 bp, Homo sapien
tcagtatagaacattctctgttata

SEQ ID NO: 3186482 - DNA, 25 bp, Homo sapien
tacagaggccacataacaccttcct

SEQ ID NO: 3186483 - DNA, 25 bp, Homo sapien
gtataatggtaagttgaaactagaa

SEQ ID NO: 3186484 - DNA, 25 bp, Homo sapien
ctcaggcaaacaagaactcagaaat

SEQ ID NO: 3186485 - DNA, 25 bp, Homo sapien
gaaaatactttcaggaagtataatg

SEQ ID NO: 3186486 - DNA, 25 bp, Homo sapien
attctcaggcaaacaagaactcaga

SEQ ID NO: 3186487 - DNA, 25 bp, Homo sapien
taaagctgcttttccgtcagcatgg

SEQ ID NO: 3186488 - DNA, 25 bp, Homo sapien
tatggatactgctaagtgctctaca

SEQ ID NO: 3186489 - DNA, 25 bp, Homo sapien
tgatagtatcccagacaccaggttc

SEQ ID NO: 3186490 - DNA, 25 bp, Homo sapien
tatagggcatgttcccatgtttcca

SEQ ID NO: 3186491 - DNA, 25 bp, Homo sapien
gaataacgagatgttacaaacccac

SEQ ID NO: 3186492 - DNA, 25 bp, Homo sapien
cttccagatctgttccttcaggaat

SEQ ID NO: 3186493 - DNA, 25 bp, Homo sapien
caaacccacaggaactgggtatttg

SEQ ID NO: 3186494 - DNA, 25 bp, Homo sapien
atttttgggcttacagaaaagtctg

SEQ ID NO: 3186495 - DNA, 25 bp, Homo sapien
acttatcagactgcccgtcattaat

SEQ ID NO: 3186496 - DNA, 25 bp, Homo sapien
atcagactgcccgtcattaattttc

SEQ ID NO: 3186497 - DNA, 25 bp, Homo sapien
cagactgcccgtcattaattttcac

SEQ ID NO: 3186498 - DNA, 25 bp, Homo sapien
aaacttatcagactgcccgtcatta

SEQ ID NO: 3186499 - DNA, 25 bp, Homo sapien
gtggtccactctgtgcccacgtgtg

SEQ ID NO: 3186500 - DNA, 25 bp, Homo sapien
tgtggtccactctgtgcccacgtgt

SEQ ID NO: 3186501 - DNA, 25 bp, Homo sapien
actgtggtccactctgtgcccacgt

SEQ ID NO: 3186502 - DNA, 25 bp, Homo sapien
tcactgtggtccactctgtgcccac

SEQ ID NO: 3186503 - DNA, 25 bp, Homo sapien
tgcaccagtgtgacacaagcaccca

SEQ ID NO: 3186504 - DNA, 25 bp, Homo sapien
ccagtgtggtaaggctattttctga

SEQ ID NO: 3186505 - DNA, 25 bp, Homo sapien
cataatgtaggggaatacatcttca

SEQ ID NO: 3186506 - DNA, 25 bp, Homo sapien
gacacaagcacccagtgtggtaagg

SEQ ID NO: 3186507 - DNA, 25 bp, Homo sapien
cagagttttcctatagttaacagcc

SEQ ID NO: 3186508 - DNA, 25 bp, Homo sapien
tctcagagttttcctatagttaaca

SEQ ID NO: 3186509 - DNA, 25 bp, Homo sapien
gctctgacttggcagtcctgatccc

SEQ ID NO: 3186510 - DNA, 25 bp, Homo sapien
tggcagtcctgatcccaactgattc

SEQ ID NO: 3186511 - DNA, 25 bp, Homo sapien
actcagcttttccttaaggcacccg

SEQ ID NO: 3186512 - DNA, 25 bp, Homo sapien
tacaaggtttgagttgctcttctcc

SEQ ID NO: 3186513 - DNA, 25 bp, Homo sapien
catggcaatcattgggggcatctct

SEQ ID NO: 3186514 - DNA, 25 bp, Homo sapien
tctttccctgggacaactcatggca

SEQ ID NO: 3186515 - DNA, 25 bp, Homo sapien
cgtcaacagcgtactgaatgtggaa

SEQ ID NO: 3186516 - DNA, 25 bp, Homo sapien
attcttgagattttcgtcaacagcg

SEQ ID NO: 3186517 - DNA, 25 bp, Homo sapien
tggaaaggagtggtcctgtagacaa

SEQ ID NO: 3186518 - DNA, 25 bp, Homo sapien
aaggagtggtcctgtagacaaagag

SEQ ID NO: 3186519 - DNA, 25 bp, Homo sapien
catcatgtcttggtggttcattttc

SEQ ID NO: 3186520 - DNA, 25 bp, Homo sapien
tcatgtcttggtggttcattttcat

SEQ ID NO: 3186521 - DNA, 25 bp, Homo sapien
catgtcttggtggttcattttcatc

SEQ ID NO: 3186522 - DNA, 25 bp, Homo sapien
atcatgtcttggtggttcattttca

SEQ ID NO: 3186523 - DNA, 25 bp, Homo sapien
cttgggtgggaagccagaggggaag

SEQ ID NO: 3186524 - DNA, 25 bp, Homo sapien
tggagccctgtggtatcaccagcaa

SEQ ID NO: 3186525 - DNA, 25 bp, Homo sapien
tgcatgctgggcataggagctgaat

SEQ ID NO: 3186526 - DNA, 25 bp, Homo sapien
cccatgatgtaataactcccccata

SEQ ID NO: 3186527 - DNA, 25 bp, Homo sapien
actcccccataccaccaggttgtgc

SEQ ID NO: 3186528 - DNA, 25 bp, Homo sapien
taagagtactgggtatccttccgat

SEQ ID NO: 3186529 - DNA, 25 bp, Homo sapien
tagatacccagaagataagttcgga

SEQ ID NO: 3186530 - DNA, 25 bp, Homo sapien
taagttcggatccactgtagtactg

SEQ ID NO: 3186531 - DNA, 25 bp, Homo sapien
actgggagcctagtagtaagagtac

SEQ ID NO: 3186532 - DNA, 25 bp, Homo sapien
taaatgtaagttgatggagaggaca

SEQ ID NO: 3186533 - DNA, 25 bp, Homo sapien
atctgacaggtgatactctatgtct

SEQ ID NO: 3186534 - DNA, 25 bp, Homo sapien
cagctatttcagcttgggtctgaca

SEQ ID NO: 3186535 - DNA, 25 bp, Homo sapien
aatttagagtaaggtatgaggcata

SEQ ID NO: 3186536 - DNA, 25 bp, Homo sapien
tgttgcggcaggaatgtattaccag

SEQ ID NO: 3186537 - DNA, 25 bp, Homo sapien
gaaatccgattctggagagctgagg

SEQ ID NO: 3186538 - DNA, 25 bp, Homo sapien
tattaccaggacacttagaaggtgg

SEQ ID NO: 3186539 - DNA, 25 bp, Homo sapien
ggaagcgaatgtctctgtgtagaga

SEQ ID NO: 3186540 - DNA, 25 bp, Homo sapien
tcgacatttgtaagtaaaagccggc

SEQ ID NO: 3186541 - DNA, 25 bp, Homo sapien
tggattgctgcaggactaggtgtct

SEQ ID NO: 3186542 - DNA, 25 bp, Homo sapien
gaccttgactttgtgggaggcatca

SEQ ID NO: 3186543 - DNA, 25 bp, Homo sapien
gacatggtccaaagtgactctggta

SEQ ID NO: 3186544 - DNA, 25 bp, Homo sapien
caatggcttgcaacttgtgactgga

SEQ ID NO: 3186545 - DNA, 25 bp, Homo sapien
gaaacccttcaatcggcatgtgaga

SEQ ID NO: 3186546 - DNA, 25 bp, Homo sapien
tgaatgccacagaggcaagcaggtg

SEQ ID NO: 3186547 - DNA, 25 bp, Homo sapien
ttcaaagccgttgagccacagcaag

SEQ ID NO: 3186548 - DNA, 25 bp, Homo sapien
acagattctgtgacattcccataga

SEQ ID NO: 3186549 - DNA, 25 bp, Homo sapien
agattctgtgacattcccatagaaa

SEQ ID NO: 3186550 - DNA, 25 bp, Homo sapien
cagattctgtgacattcccatagaa

SEQ ID NO: 3186551 - DNA, 25 bp, Homo sapien
cacagattctgtgacattcccatag

SEQ ID NO: 3186552 - DNA, 25 bp, Homo sapien
catgaggctgactcacattcaagtg

SEQ ID NO: 3186553 - DNA, 25 bp, Homo sapien
caaatgcaactgtcctcatgaggct

SEQ ID NO: 3186554 - DNA, 25 bp, Homo sapien
aattgagggtccagacctggcagga

SEQ ID NO: 3186555 - DNA, 25 bp, Homo sapien
atcataggcatgagaataggcggga

SEQ ID NO: 3186556 - DNA, 25 bp, Homo sapien
cccacgcagacagagtagtcactat

SEQ ID NO: 3186557 - DNA, 25 bp, Homo sapien
tccattgcaggttggctaagtgctg

SEQ ID NO: 3186558 - DNA, 25 bp, Homo sapien
tctacgtgtccattgcaggttggct

SEQ ID NO: 3186559 - DNA, 25 bp, Homo sapien
ggttggctaagtgctgtgctctgca

SEQ ID NO: 3186560 - DNA, 25 bp, Homo sapien
atgaggtagtcaccacacaccatgc

SEQ ID NO: 3186561 - DNA, 25 bp, Homo sapien
gggcaagtctaggccagagcctttc

SEQ ID NO: 3186562 - DNA, 25 bp, Homo sapien
caccagtgtcagtcaagagccagaa

SEQ ID NO: 3186563 - DNA, 25 bp, Homo sapien
ccatgcaggaccacagggggaaagc

SEQ ID NO: 3186564 - DNA, 25 bp, Homo sapien
tttgaaaccttttcagtgatatctc

SEQ ID NO: 3186565 - DNA, 25 bp, Homo sapien
tgaaaccttttcagtgatatctcct

SEQ ID NO: 3186566 - DNA, 25 bp, Homo sapien
catttctagagattatggctttgtt

SEQ ID NO: 3186567 - DNA, 25 bp, Homo sapien
acatttctagagattatggctttgt

SEQ ID NO: 3186568 - DNA, 25 bp, Homo sapien
accccttttgtaaatcatcctctct

SEQ ID NO: 3186569 - DNA, 25 bp, Homo sapien
aacaggcattcttaggtactatgac

SEQ ID NO: 3186570 - DNA, 25 bp, Homo sapien
gggcaatagctctgtgttaaaaact

SEQ ID NO: 3186571 - DNA, 25 bp, Homo sapien
aaactcttcacctaggaaacaggca

SEQ ID NO: 3186572 - DNA, 25 bp, Homo sapien
tcctaacgtcctgccatggttgaga

SEQ ID NO: 3186573 - DNA, 25 bp, Homo sapien
ccatggttgagaaatcttgctttgt

SEQ ID NO: 3186574 - DNA, 25 bp, Homo sapien
tacagatgatcctaacgtcctgcca

SEQ ID NO: 3186575 - DNA, 25 bp, Homo sapien
aagttctacagatgatcctaacgtc

SEQ ID NO: 3186576 - DNA, 25 bp, Homo sapien
taccactggacttcaaccaatgtga

SEQ ID NO: 3186577 - DNA, 25 bp, Homo sapien
actggacttcaaccaatgtgaactt

SEQ ID NO: 3186578 - DNA, 25 bp, Homo sapien
atttaccactggacttcaaccaatg

SEQ ID NO: 3186579 - DNA, 25 bp, Homo sapien
ccactggacttcaaccaatgtgaac

SEQ ID NO: 3186580 - DNA, 25 bp, Homo sapien
tgcgtcatccttgcagaagagccat

SEQ ID NO: 3186581 - DNA, 25 bp, Homo sapien
ttgtgcgtcatccttgcagaagagc

SEQ ID NO: 3186582 - DNA, 25 bp, Homo sapien
tgtgcgtcatccttgcagaagagcc

SEQ ID NO: 3186583 - DNA, 25 bp, Homo sapien
atttgtgcgtcatccttgcagaaga

SEQ ID NO: 3186584 - DNA, 25 bp, Homo sapien
tagtgaacaactacgaaggccttgg

SEQ ID NO: 3186585 - DNA, 25 bp, Homo sapien
taactttattcgctgctgggtggct

SEQ ID NO: 3186586 - DNA, 25 bp, Homo sapien
taccttgctgcacccaaagaaatgc

SEQ ID NO: 3186587 - DNA, 25 bp, Homo sapien
tacacattggaatcacccgggaagc

SEQ ID NO: 3186588 - DNA, 25 bp, Homo sapien
tataaataggcacattaaaggcaga

SEQ ID NO: 3186589 - DNA, 25 bp, Homo sapien
gaacctggcatatatcaggtaccag

SEQ ID NO: 3186590 - DNA, 25 bp, Homo sapien
cactatgactatgctatgagaactg

SEQ ID NO: 3186591 - DNA, 25 bp, Homo sapien
ctagcatcttgcatagaacctggca

SEQ ID NO: 3186592 - DNA, 25 bp, Homo sapien
cctggttctatgttgagagggtgta

SEQ ID NO: 3186593 - DNA, 25 bp, Homo sapien
ggtgtatatgcccaggaactaatcc

SEQ ID NO: 3186594 - DNA, 25 bp, Homo sapien
caggaactaatccatgtcttctata

SEQ ID NO: 3186595 - DNA, 25 bp, Homo sapien
tgttgatctttttaagggtgtctct

SEQ ID NO: 3186596 - DNA, 25 bp, Homo sapien
gcagatggcggatgactcattggta

SEQ ID NO: 3186597 - DNA, 25 bp, Homo sapien
aagcagatggcggatgactcattgg

SEQ ID NO: 3186598 - DNA, 25 bp, Homo sapien
agatggcggatgactcattggtaca

SEQ ID NO: 3186599 - DNA, 25 bp, Homo sapien
gagaagcagatggcggatgactcat

SEQ ID NO: 3186600 - DNA, 25 bp, Homo sapien
gacttttgtgaagtcaccattctct

SEQ ID NO: 3186601 - DNA, 25 bp, Homo sapien
ttcactgtttccacttcttctttat

SEQ ID NO: 3186602 - DNA, 25 bp, Homo sapien
attgacttttgtgaagtcaccattc

SEQ ID NO: 3186603 - DNA, 25 bp, Homo sapien
tctttattgacttttgtgaagtcac

SEQ ID NO: 3186604 - DNA, 25 bp, Homo sapien
aaacaagagcagcacaaaatcctcc

SEQ ID NO: 3186605 - DNA, 25 bp, Homo sapien
gtcaggctggtaaagtgatacctta

SEQ ID NO: 3186606 - DNA, 25 bp, Homo sapien
tgataccttaaattccaggaatact

SEQ ID NO: 3186607 - DNA, 25 bp, Homo sapien
aacaatggggaacttgtggtcaggc

SEQ ID NO: 3186608 - DNA, 25 bp, Homo sapien
gcagggtcagtaaatttagtatcca

SEQ ID NO: 3186609 - DNA, 25 bp, Homo sapien
gtaaatttagtatccagggagaggc

SEQ ID NO: 3186610 - DNA, 25 bp, Homo sapien
aggcagggtcagtaaatttagtatc

SEQ ID NO: 3186611 - DNA, 25 bp, Homo sapien
ggtcagtaaatttagtatccaggga

SEQ ID NO: 3186612 - DNA, 25 bp, Homo sapien
ctttttgaagacatgcacgggttga

SEQ ID NO: 3186613 - DNA, 25 bp, Homo sapien
tgaggactcatcaatcttctcggtc

SEQ ID NO: 3186614 - DNA, 25 bp, Homo sapien
catgcacgggttgaggactcatcaa

SEQ ID NO: 3186615 - DNA, 25 bp, Homo sapien
ttgaagacatgcacgggttgaggac

SEQ ID NO: 3186616 - DNA, 25 bp, Homo sapien
tcattttgtttgttactcataacag

SEQ ID NO: 3186617 - DNA, 25 bp, Homo sapien
ttgtttgttactcataacagtattc

SEQ ID NO: 3186618 - DNA, 25 bp, Homo sapien
cttggcacttaagcagaaaagcttc

SEQ ID NO: 3186619 - DNA, 25 bp, Homo sapien
ccatcttggcacttaagcagaaaag

SEQ ID NO: 3186620 - DNA, 25 bp, Homo sapien
tgtaaccctacataacccgtgagtg

SEQ ID NO: 3186621 - DNA, 25 bp, Homo sapien
ttcatgtaaccctacataacccgtg

SEQ ID NO: 3186622 - DNA, 25 bp, Homo sapien
cctacataacccgtgagtgactgat

SEQ ID NO: 3186623 - DNA, 25 bp, Homo sapien
tcattgattggtgacttcatgtaac

SEQ ID NO: 3186624 - DNA, 25 bp, Homo sapien
ccagaattgtctgagcatccctgaa

SEQ ID NO: 3186625 - DNA, 25 bp, Homo sapien
ctgaagtccagaattgtctgagcat

SEQ ID NO: 3186626 - DNA, 25 bp, Homo sapien
tgacagaatgggatgtctatttctc

SEQ ID NO: 3186627 - DNA, 25 bp, Homo sapien
gcatccctgaaattctcctcagctt

SEQ ID NO: 3186628 - DNA, 25 bp, Homo sapien
ttcaggatatcagcaagaaatctac

SEQ ID NO: 3186629 - DNA, 25 bp, Homo sapien
cctctcctaacaatcttcaggatat

SEQ ID NO: 3186630 - DNA, 25 bp, Homo sapien
taacaatcttcaggatatcagcaag

SEQ ID NO: 3186631 - DNA, 25 bp, Homo sapien
tcttcaggatatcagcaagaaatct

SEQ ID NO: 3186632 - DNA, 25 bp, Homo sapien
ttcttcattataggcaggcaggagc

SEQ ID NO: 3186633 - DNA, 25 bp, Homo sapien
catatcgtaggcaattgcaatgtga

SEQ ID NO: 3186634 - DNA, 25 bp, Homo sapien
gaatccgtgcagatgcatatcgtag

SEQ ID NO: 3186635 - DNA, 25 bp, Homo sapien
tgtgactcacacaccgaggttggga

SEQ ID NO: 3186636 - DNA, 25 bp, Homo sapien
ttcagcatccggacacgttgtcgca

SEQ ID NO: 3186637 - DNA, 25 bp, Homo sapien
cagcttttcagcatccggacacgtt

SEQ ID NO: 3186638 - DNA, 25 bp, Homo sapien
ctgccagcttttcagcatccggaca

SEQ ID NO: 3186639 - DNA, 25 bp, Homo sapien
gcttttcagcatccggacacgttgt

SEQ ID NO: 3186640 - DNA, 25 bp, Homo sapien
caggtgttgtgtgcaacagcccaga

SEQ ID NO: 3186641 - DNA, 25 bp, Homo sapien
ggcaatgcagatagtagtatactcc

SEQ ID NO: 3186642 - DNA, 25 bp, Homo sapien
cagcccagaaatcattaatgttgga

SEQ ID NO: 3186643 - DNA, 25 bp, Homo sapien
cagaaagtccttcgtgtagcagggc

SEQ ID NO: 3186644 - DNA, 25 bp, Homo sapien
aaccagctaggttaggataggagga

SEQ ID NO: 3186645 - DNA, 25 bp, Homo sapien
tattcctgagccgtaaaaattctct

SEQ ID NO: 3186646 - DNA, 25 bp, Homo sapien
cagcagacagtaacttctttcacct

SEQ ID NO: 3186647 - DNA, 25 bp, Homo sapien
gataggaggagctatttcccaacac

SEQ ID NO: 3186648 - DNA, 25 bp, Homo sapien
gagccttgaacctctctcaacatgt

SEQ ID NO: 3186649 - DNA, 25 bp, Homo sapien
catgtctctaggaagtgcagttttg

SEQ ID NO: 3186650 - DNA, 25 bp, Homo sapien
cagttttgtagctatcagttggtgg

SEQ ID NO: 3186651 - DNA, 25 bp, Homo sapien
caaaagggtaagttctgttgagcct

SEQ ID NO: 3186652 - DNA, 25 bp, Homo sapien
tctcttggcactggttggtgtcatt

SEQ ID NO: 3186653 - DNA, 25 bp, Homo sapien
tcagttgtgcttatctggtggtgga

SEQ ID NO: 3186654 - DNA, 25 bp, Homo sapien
tttgcttataattctgtgaatcagg

SEQ ID NO: 3186655 - DNA, 25 bp, Homo sapien
caggaatttaggcaaagtgtagttg

SEQ ID NO: 3186656 - DNA, 25 bp, Homo sapien
ttgtgactaattgtgtaacagggta

SEQ ID NO: 3186657 - DNA, 25 bp, Homo sapien
tttttttgcacccatgctttgattg

SEQ ID NO: 3186658 - DNA, 25 bp, Homo sapien
ctaattgtgtaacagggtattttag

SEQ ID NO: 3186659 - DNA, 25 bp, Homo sapien
tgactaattgtgtaacagggtattt

SEQ ID NO: 3186660 - DNA, 25 bp, Homo sapien
tggttttacaacaggccctgaacat

SEQ ID NO: 3186661 - DNA, 25 bp, Homo sapien
agaggcccgcgtctctatctccctt

SEQ ID NO: 3186662 - DNA, 25 bp, Homo sapien
tatctccctttagatcccgttgccc

SEQ ID NO: 3186663 - DNA, 25 bp, Homo sapien
gctcccctgtttcaccgagggcatg

SEQ ID NO: 3186664 - DNA, 25 bp, Homo sapien
gagggcatgcccttagtgctttagg

SEQ ID NO: 3186665 - DNA, 25 bp, Homo sapien
gcctagcctccgcatcaatattcat

SEQ ID NO: 3186666 - DNA, 25 bp, Homo sapien
ttctctacgaaagcagcctagcctc

SEQ ID NO: 3186667 - DNA, 25 bp, Homo sapien
caatattcataaggcagtttgacgt

SEQ ID NO: 3186668 - DNA, 25 bp, Homo sapien
gcagtcgggtctcctttctaacaaa

SEQ ID NO: 3186669 - DNA, 25 bp, Homo sapien
gtttcgcggcataagagaagcgctc

SEQ ID NO: 3186670 - DNA, 25 bp, Homo sapien
cctggaagcccgagaaaaagcgaag

SEQ ID NO: 3186671 - DNA, 25 bp, Homo sapien
gtgggtgacactacagggtttgctc

SEQ ID NO: 3186672 - DNA, 25 bp, Homo sapien
ttgttcaggataaacgggagactcg

SEQ ID NO: 3186673 - DNA, 25 bp, Homo sapien
aattccactccctgtgacattcact

SEQ ID NO: 3186674 - DNA, 25 bp, Homo sapien
gtgtactccaattccactccctgtg

SEQ ID NO: 3186675 - DNA, 25 bp, Homo sapien
tgtgacattcacttcgtacagcccc

SEQ ID NO: 3186676 - DNA, 25 bp, Homo sapien
ccctgtgacattcacttcgtacagc

SEQ ID NO: 3186677 - DNA, 25 bp, Homo sapien
agctgattcgggagaagcacaaagc

SEQ ID NO: 3186678 - DNA, 25 bp, Homo sapien
gagaagcacaaagccgggacacaga

SEQ ID NO: 3186679 - DNA, 25 bp, Homo sapien
caaacgaagctgattcgggagaagc

SEQ ID NO: 3186680 - DNA, 25 bp, Homo sapien
caaggaaccaaacgaagctgattcg

SEQ ID NO: 3186681 - DNA, 25 bp, Homo sapien
gcttgggagatattctattgctgct

SEQ ID NO: 3186682 - DNA, 25 bp, Homo sapien
ttggcttgggagatattctattgct

SEQ ID NO: 3186683 - DNA, 25 bp, Homo sapien
ccagataaccaccagctctacttgg

SEQ ID NO: 3186684 - DNA, 25 bp, Homo sapien
gctctacttggcaactggtctttcc

SEQ ID NO: 3186685 - DNA, 25 bp, Homo sapien
gatcagagctcactataagttagaa

SEQ ID NO: 3186686 - DNA, 25 bp, Homo sapien
gacacatttaactacatgtcattac

SEQ ID NO: 3186687 - DNA, 25 bp, Homo sapien
agctcactataagttagaacacttg

SEQ ID NO: 3186688 - DNA, 25 bp, Homo sapien
ctttttgaagtatgacacatttaac

SEQ ID NO: 3186689 - DNA, 25 bp, Homo sapien
tgaccctgtttctcactttgtcctg

SEQ ID NO: 3186690 - DNA, 25 bp, Homo sapien
cctgtttctcactttgtcctggcat

SEQ ID NO: 3186691 - DNA, 25 bp, Homo sapien
accctgtttctcactttgtcctggc

SEQ ID NO: 3186692 - DNA, 25 bp, Homo sapien
tctgaccctgtttctcactttgtcc

SEQ ID NO: 3186693 - DNA, 25 bp, Homo sapien
ctgtaagtggtttgtagaagttctg

SEQ ID NO: 3186694 - DNA, 25 bp, Homo sapien
gaagttctgctggtatttgtaaata

SEQ ID NO: 3186695 - DNA, 25 bp, Homo sapien
gtaagtggtttgtagaagttctgct

SEQ ID NO: 3186696 - DNA, 25 bp, Homo sapien
aagttctgctggtatttgtaaatac

SEQ ID NO: 3186697 - DNA, 25 bp, Homo sapien
caaaaatttatagtcagctgaggtg

SEQ ID NO: 3186698 - DNA, 25 bp, Homo sapien
tatcttgggcttgtcaaacatactc

SEQ ID NO: 3186699 - DNA, 25 bp, Homo sapien
aatcaaaatgttcctaatatgcgag

SEQ ID NO: 3186700 - DNA, 25 bp, Homo sapien
acaagtaagctagtcatttctccag

SEQ ID NO: 3186701 - DNA, 25 bp, Homo sapien
atgtgaccgcgtgtaactggaagga

SEQ ID NO: 3186702 - DNA, 25 bp, Homo sapien
cggtacccacgtgtcaaatgttgat

SEQ ID NO: 3186703 - DNA, 25 bp, Homo sapien
ggagagaaagcgtctacaatttcca

SEQ ID NO: 3186704 - DNA, 25 bp, Homo sapien
aatactgctgccacgtgcacggtac

SEQ ID NO: 3186705 - DNA, 25 bp, Homo sapien
aaagattaatcttagctgggcgcgg

SEQ ID NO: 3186706 - DNA, 25 bp, Homo sapien
tcacgtaaattacaagagcactgtg

SEQ ID NO: 3186707 - DNA, 25 bp, Homo sapien
ggcaggtatgcaaatctcacgtaaa

SEQ ID NO: 3186708 - DNA, 25 bp, Homo sapien
catgactagttgtttgctgcagggc

SEQ ID NO: 3186709 - DNA, 25 bp, Homo sapien
caattagcactgagaaatgaagcac

SEQ ID NO: 3186710 - DNA, 25 bp, Homo sapien
gaatacaggagttgacagaaggcag

SEQ ID NO: 3186711 - DNA, 25 bp, Homo sapien
taaatgcagacttagaaaggtactc

SEQ ID NO: 3186712 - DNA, 25 bp, Homo sapien
gtcactgtggaaactaagcaaccaa

SEQ ID NO: 3186713 - DNA, 25 bp, Homo sapien
ttacagtaaaattgattcacagtaa

SEQ ID NO: 3186714 - DNA, 25 bp, Homo sapien
ctttacagtaaaattgattcacagt

SEQ ID NO: 3186715 - DNA, 25 bp, Homo sapien
actttacagtaaaattgattcacag

SEQ ID NO: 3186716 - DNA, 25 bp, Homo sapien
aactttacagtaaaattgattcaca

SEQ ID NO: 3186717 - DNA, 25 bp, Homo sapien
ctcatgtgcacctgctgcctatcag

SEQ ID NO: 3186718 - DNA, 25 bp, Homo sapien
agccacactcatgtgcacctgctgc

SEQ ID NO: 3186719 - DNA, 25 bp, Homo sapien
acactcatgtgcacctgctgcctat

SEQ ID NO: 3186720 - DNA, 25 bp, Homo sapien
actcatgtgcacctgctgcctatca

SEQ ID NO: 3186721 - DNA, 25 bp, Homo sapien
tagcacaccctttgtgggtggcagg

SEQ ID NO: 3186722 - DNA, 25 bp, Homo sapien
gcttccaagcgttgtaactcaacag

SEQ ID NO: 3186723 - DNA, 25 bp, Homo sapien
ttccaagcgttgtaactcaacagga

SEQ ID NO: 3186724 - DNA, 25 bp, Homo sapien
gcaaaggcaagtaaacaatcttgag

SEQ ID NO: 3186725 - DNA, 25 bp, Homo sapien
agtaaacaatcttgagagggtgtgc

SEQ ID NO: 3186726 - DNA, 25 bp, Homo sapien
gctcagtcccttactgctcttcctg

SEQ ID NO: 3186727 - DNA, 25 bp, Homo sapien
gcagctcagtcccttactgctcttc

SEQ ID NO: 3186728 - DNA, 25 bp, Homo sapien
agctcagtcccttactgctcttcct

SEQ ID NO: 3186729 - DNA, 25 bp, Homo sapien
tcagtcccttactgctcttcctgga

SEQ ID NO: 3186730 - DNA, 25 bp, Homo sapien
ctacaagtgaagcaaaatggaggcg

SEQ ID NO: 3186731 - DNA, 25 bp, Homo sapien
tcacatagctgctcctgagatctgc

SEQ ID NO: 3186732 - DNA, 25 bp, Homo sapien
gaggtactcacttttcagatcagca

SEQ ID NO: 3186733 - DNA, 25 bp, Homo sapien
caagattgagacgaagtggctacaa

SEQ ID NO: 3186734 - DNA, 25 bp, Homo sapien
taactgtcttatatagttcaggcaa

SEQ ID NO: 3186735 - DNA, 25 bp, Homo sapien
aaatggtctgacaacccttaggttg

SEQ ID NO: 3186736 - DNA, 25 bp, Homo sapien
ttgggacactcagcaggtcatggca

SEQ ID NO: 3186737 - DNA, 25 bp, Homo sapien
agttccctacttctatacatgcata

SEQ ID NO: 3186738 - DNA, 25 bp, Homo sapien
atacaaggtcgcctttttcctgctt

SEQ ID NO: 3186739 - DNA, 25 bp, Homo sapien
catgaactttatacaaggtcgcctt

SEQ ID NO: 3186740 - DNA, 25 bp, Homo sapien
caacatgaactttatacaaggtcgc

SEQ ID NO: 3186741 - DNA, 25 bp, Homo sapien
tatacaaggtcgcctttttcctgct

SEQ ID NO: 3186742 - DNA, 25 bp, Homo sapien
gactagctgatgtctaatggttcca

SEQ ID NO: 3186743 - DNA, 25 bp, Homo sapien
gatactagctagaggcatggctata

SEQ ID NO: 3186744 - DNA, 25 bp, Homo sapien
gattgtcttaactgactcatgctga

SEQ ID NO: 3186745 - DNA, 25 bp, Homo sapien
tcagtatggagacctgggctagacc

SEQ ID NO: 3186746 - DNA, 25 bp, Homo sapien
taatcctgtgactcaaagaataaac

SEQ ID NO: 3186747 - DNA, 25 bp, Homo sapien
aagaataaactgctcaggcttgcta

SEQ ID NO: 3186748 - DNA, 25 bp, Homo sapien
ctgctcaggcttgctagaacaatga

SEQ ID NO: 3186749 - DNA, 25 bp, Homo sapien
gctagaacaatgactatggatttta

SEQ ID NO: 3186750 - DNA, 25 bp, Homo sapien
cactgtgcctttatccactcctatt

SEQ ID NO: 3186751 - DNA, 25 bp, Homo sapien
tatccactcctattttactcttctt

SEQ ID NO: 3186752 - DNA, 25 bp, Homo sapien
cttcttcatgctataagctagtaag

SEQ ID NO: 3186753 - DNA, 25 bp, Homo sapien
gctagtaagtaaagctgcgcatgct

SEQ ID NO: 3186754 - DNA, 25 bp, Homo sapien
tagatttggtgctccttatcagtac

SEQ ID NO: 3186755 - DNA, 25 bp, Homo sapien
tagatataaaatgcagccttgtcca

SEQ ID NO: 3186756 - DNA, 25 bp, Homo sapien
tggcatagccgacatgaggaagaag

SEQ ID NO: 3186757 - DNA, 25 bp, Homo sapien
gctaaaagaacgaaacggcatggca

SEQ ID NO: 3186758 - DNA, 25 bp, Homo sapien
aggcttgcttcggggccatccacaa

SEQ ID NO: 3186759 - DNA, 25 bp, Homo sapien
gcttgcttcggggccatccacaagg

SEQ ID NO: 3186760 - DNA, 25 bp, Homo sapien
ttgcttcggggccatccacaaggct

SEQ ID NO: 3186761 - DNA, 25 bp, Homo sapien
caggcttgcttcggggccatccaca

SEQ ID NO: 3186762 - DNA, 25 bp, Homo sapien
cagaggttctgtctggcaaatggga

SEQ ID NO: 3186763 - DNA, 25 bp, Homo sapien
tggacttagtctgttgccctcaaca

SEQ ID NO: 3186764 - DNA, 25 bp, Homo sapien
ttcttgatctgaaggagcccagaga

SEQ ID NO: 3186765 - DNA, 25 bp, Homo sapien
tcaggactcacacgactattctggc

SEQ ID NO: 3186766 - DNA, 25 bp, Homo sapien
tttaaataccgttcagagctgccac

SEQ ID NO: 3186767 - DNA, 25 bp, Homo sapien
ggacaactcattagtagcctgactg

SEQ ID NO: 3186768 - DNA, 25 bp, Homo sapien
gacgctagctttgtggttccctgga

SEQ ID NO: 3186769 - DNA, 25 bp, Homo sapien
tctgtgcggaattgatctgccctga

SEQ ID NO: 3186770 - DNA, 25 bp, Homo sapien
acttggtacatttgtgacttgtgct

SEQ ID NO: 3186771 - DNA, 25 bp, Homo sapien
ttggtacatttgtgacttgtgctcc

SEQ ID NO: 3186772 - DNA, 25 bp, Homo sapien
tggtacatttgtgacttgtgctcca

SEQ ID NO: 3186773 - DNA, 25 bp, Homo sapien
gattcatttcaacttggtacatttg

SEQ ID NO: 3186774 - DNA, 25 bp, Homo sapien
tgaaaatggctcagtctctgaagcc

SEQ ID NO: 3186775 - DNA, 25 bp, Homo sapien
tagtctggccaaagaatgatccttc

SEQ ID NO: 3186776 - DNA, 25 bp, Homo sapien
gagtctcgaactcgcttgattttga

SEQ ID NO: 3186777 - DNA, 25 bp, Homo sapien
cccatttggacattatgagtctcga

SEQ ID NO: 3186778 - DNA, 25 bp, Homo sapien
tgactatggcaagactcagtttggg

SEQ ID NO: 3186779 - DNA, 25 bp, Homo sapien
cttatggtcaaataacgacttggcg

SEQ ID NO: 3186780 - DNA, 25 bp, Homo sapien
taagagatgccaccttagagcagca

SEQ ID NO: 3186781 - DNA, 25 bp, Homo sapien
cgacttggcgtgaaactgcttcaga

SEQ ID NO: 3186782 - DNA, 25 bp, Homo sapien
ctgaagataaatttgctaattctgg

SEQ ID NO: 3186783 - DNA, 25 bp, Homo sapien
aatttgctaattctggataaacgcc

SEQ ID NO: 3186784 - DNA, 25 bp, Homo sapien
aatcccatatctgaagataaatttg

SEQ ID NO: 3186785 - DNA, 25 bp, Homo sapien
gataaacgccatgtgtctcagtaca

SEQ ID NO: 3186786 - DNA, 25 bp, Homo sapien
tcacaagacacaagcatcggtaact

SEQ ID NO: 3186787 - DNA, 25 bp, Homo sapien
cacagcgatcaatactgaagcacga

SEQ ID NO: 3186788 - DNA, 25 bp, Homo sapien
gattagcactcactaaaggcccaga

SEQ ID NO: 3186789 - DNA, 25 bp, Homo sapien
gacttccgtggagaggtcactgcag

SEQ ID NO: 3186790 - DNA, 25 bp, Homo sapien
cttctgatggatccgggcaaagtac

SEQ ID NO: 3186791 - DNA, 25 bp, Homo sapien
ccctgcttgtgtagagtaatggaac

SEQ ID NO: 3186792 - DNA, 25 bp, Homo sapien
ttaataaccacacgcaaagagggac

SEQ ID NO: 3186793 - DNA, 25 bp, Homo sapien
tgttagtctacagctgccaagatag

SEQ ID NO: 3186794 - DNA, 25 bp, Homo sapien
tagctgccacattaggacctgctcc

SEQ ID NO: 3186795 - DNA, 25 bp, Homo sapien
aggacctgctcctagatgggtataa

SEQ ID NO: 3186796 - DNA, 25 bp, Homo sapien
gatgggtataaaaaggaccttcatc

SEQ ID NO: 3186797 - DNA, 25 bp, Homo sapien
tttctctaatagctgccacattagg

SEQ ID NO: 3186798 - DNA, 25 bp, Homo sapien
cataagagtcttctacatgcaggag

SEQ ID NO: 3186799 - DNA, 25 bp, Homo sapien
ggataaacgttaatctgccctgtgc

SEQ ID NO: 3186800 - DNA, 25 bp, Homo sapien
tactgaatatgtcctagctgcccca

SEQ ID NO: 3186801 - DNA, 25 bp, Homo sapien
tgttggcaaccctagaatagctaag

SEQ ID NO: 3186802 - DNA, 25 bp, Homo sapien
tagatgactctttcaatcctaatag

SEQ ID NO: 3186803 - DNA, 25 bp, Homo sapien
ccacttagcaataggacatccctga

SEQ ID NO: 3186804 - DNA, 25 bp, Homo sapien
tctttaccagtatagatgactcttt

SEQ ID NO: 3186805 - DNA, 25 bp, Homo sapien
ctaatagctttacccttctgtccaa

SEQ ID NO: 3186806 - DNA, 25 bp, Homo sapien
aatgcccaagatttaagaccaaagg

SEQ ID NO: 3186807 - DNA, 25 bp, Homo sapien
taactggcatgagtctttgatctgg

SEQ ID NO: 3186808 - DNA, 25 bp, Homo sapien
ttgatctgggtaacccaattctcag

SEQ ID NO: 3186809 - DNA, 25 bp, Homo sapien
caattctcagggtcagatttacaaa

SEQ ID NO: 3186810 - DNA, 25 bp, Homo sapien
cattcaaggcacaccggcgattggt

SEQ ID NO: 3186811 - DNA, 25 bp, Homo sapien
tgagcgtgccgtatttcctcagcgt

SEQ ID NO: 3186812 - DNA, 25 bp, Homo sapien
tcagccagagacagcgggattcctt

SEQ ID NO: 3186813 - DNA, 25 bp, Homo sapien
tccgagtagagtttgtcagccagag

SEQ ID NO: 3186814 - DNA, 25 bp, Homo sapien
tcattttgcctttcagtcactcact

SEQ ID NO: 3186815 - DNA, 25 bp, Homo sapien
cagaaaagtgcacataattttacag

SEQ ID NO: 3186816 - DNA, 25 bp, Homo sapien
tgtctccctaacagtaacttctcta

SEQ ID NO: 3186817 - DNA, 25 bp, Homo sapien
caccatcagtagcttgttttgccta

SEQ ID NO: 3186818 - DNA, 25 bp, Homo sapien
aaaagagaaggaggcaccacaggtt

SEQ ID NO: 3186819 - DNA, 25 bp, Homo sapien
ggcaccacaggtttctggatccagc

SEQ ID NO: 3186820 - DNA, 25 bp, Homo sapien
gaggcaccacaggtttctggatcca

SEQ ID NO: 3186821 - DNA, 25 bp, Homo sapien
aaggaggcaccacaggtttctggat

SEQ ID NO: 3186822 - DNA, 25 bp, Homo sapien
cttaaacttccttgggatcttgctt

SEQ ID NO: 3186823 - DNA, 25 bp, Homo sapien
ctcttttgggtcatccccaagcagc

SEQ ID NO: 3186824 - DNA, 25 bp, Homo sapien
ttaaacttccttgggatcttgcttc

SEQ ID NO: 3186825 - DNA, 25 bp, Homo sapien
gtttcttatatgttggtgccataag

SEQ ID NO: 3186826 - DNA, 25 bp, Homo sapien
ctgattattatatgcatcaggtgca

SEQ ID NO: 3186827 - DNA, 25 bp, Homo sapien
tatgttggtgccataagagtggaca

SEQ ID NO: 3186828 - DNA, 25 bp, Homo sapien
tattatatgcatcaggtgcaagttt

SEQ ID NO: 3186829 - DNA, 25 bp, Homo sapien
cataaactaccgcacccagttaaag

SEQ ID NO: 3186830 - DNA, 25 bp, Homo sapien
aactaccgcacccagttaaagatga

SEQ ID NO: 3186831 - DNA, 25 bp, Homo sapien
cgtacccagcaaagacggaattctt

SEQ ID NO: 3186832 - DNA, 25 bp, Homo sapien
gcaaagacggaattcttaaagacag

SEQ ID NO: 3186833 - DNA, 25 bp, Homo sapien
agcacagaagtccaaacatgcagtg

SEQ ID NO: 3186834 - DNA, 25 bp, Homo sapien
tgccattctgcatgttgtgcaagtc

SEQ ID NO: 3186835 - DNA, 25 bp, Homo sapien
agaatggacggccttccttcagacc

SEQ ID NO: 3186836 - DNA, 25 bp, Homo sapien
agacccagacggcactctggtgctc

SEQ ID NO: 3186837 - DNA, 25 bp, Homo sapien
gtacctgaatggcaccactccgttt

SEQ ID NO: 3186838 - DNA, 25 bp, Homo sapien
tcctccaaattctcgattgtcttct

SEQ ID NO: 3186839 - DNA, 25 bp, Homo sapien
tgtcttctctagtgagagtgcatac

SEQ ID NO: 3186840 - DNA, 25 bp, Homo sapien
taaaggcagaacgtgaagctgctca

SEQ ID NO: 3186841 - DNA, 25 bp, Homo sapien
gccaactgtttagcctggcttgcgt

SEQ ID NO: 3186842 - DNA, 25 bp, Homo sapien
cctttgtcggcaagtcttgactggc

SEQ ID NO: 3186843 - DNA, 25 bp, Homo sapien
ctagtttcctttgtcggcaagtctt

SEQ ID NO: 3186844 - DNA, 25 bp, Homo sapien
ttcagtttgttttgtacgtgatggg

SEQ ID NO: 3186845 - DNA, 25 bp, Homo sapien
ctacaaatgctttacattaaattta

SEQ ID NO: 3186846 - DNA, 25 bp, Homo sapien
tacaaatgctttacattaaatttac

SEQ ID NO: 3186847 - DNA, 25 bp, Homo sapien
gactggtcctgaaagtcgcaaaagt

SEQ ID NO: 3186848 - DNA, 25 bp, Homo sapien
actggtcctgaaagtcgcaaaagtt

SEQ ID NO: 3186849 - DNA, 25 bp, Homo sapien
gaagcagaataagagttgacagact

SEQ ID NO: 3186850 - DNA, 25 bp, Homo sapien
atccagaagcagaataagagttgac

SEQ ID NO: 3186851 - DNA, 25 bp, Homo sapien
cagaagcagaataagagttgacaga

SEQ ID NO: 3186852 - DNA, 25 bp, Homo sapien
gattggtggatccagaagcagaata

SEQ ID NO: 3186853 - DNA, 25 bp, Homo sapien
tggataaggactaactggattgggc

SEQ ID NO: 3186854 - DNA, 25 bp, Homo sapien
gtttggataaggactaactggattg

SEQ ID NO: 3186855 - DNA, 25 bp, Homo sapien
taaggactaactggattgggccgtc

SEQ ID NO: 3186856 - DNA, 25 bp, Homo sapien
ctgaagtgtgtgaagagtttggata

SEQ ID NO: 3186857 - DNA, 25 bp, Homo sapien
tctgattcaaaagcccagggtaagg

SEQ ID NO: 3186858 - DNA, 25 bp, Homo sapien
gatacctatacagatccatcggctg

SEQ ID NO: 3186859 - DNA, 25 bp, Homo sapien
gaagtggccatccatctcatgagtg

SEQ ID NO: 3186860 - DNA, 25 bp, Homo sapien
catagggctggtgcttccatagata

SEQ ID NO: 3186861 - DNA, 25 bp, Homo sapien
gccacaccctggactagtgccaatg

SEQ ID NO: 3186862 - DNA, 25 bp, Homo sapien
ctcatcgttgtcctctgcaccagaa

SEQ ID NO: 3186863 - DNA, 25 bp, Homo sapien
catcacttaatttgtgtaagcctcc

SEQ ID NO: 3186864 - DNA, 25 bp, Homo sapien
ttggacacaagcagttctatcatgg

SEQ ID NO: 3186865 - DNA, 25 bp, Homo sapien
ttgtaaggccctgtgacccgagtga

SEQ ID NO: 3186866 - DNA, 25 bp, Homo sapien
gctggtaaaagacgagggagatcct

SEQ ID NO: 3186867 - DNA, 25 bp, Homo sapien
aattgacccatgagttggagccacg

SEQ ID NO: 3186868 - DNA, 25 bp, Homo sapien
gatgaaacgcaggtaagtgggctct

SEQ ID NO: 3186869 - DNA, 25 bp, Homo sapien
tacaaggacttcactggatgagcaa

SEQ ID NO: 3186870 - DNA, 25 bp, Homo sapien
tctgttgcacaccatacctgtaggt

SEQ ID NO: 3186871 - DNA, 25 bp, Homo sapien
ttacaagtaagtctctggccaacag

SEQ ID NO: 3186872 - DNA, 25 bp, Homo sapien
tattcaagggcactggagtacactg

SEQ ID NO: 3186873 - DNA, 25 bp, Homo sapien
gcaaatacctgatcagcctagtgca

SEQ ID NO: 3186874 - DNA, 25 bp, Homo sapien
tggagtacagtgattacccatggac

SEQ ID NO: 3186875 - DNA, 25 bp, Homo sapien
tgctacagttctggcctgggctagt

SEQ ID NO: 3186876 - DNA, 25 bp, Homo sapien
attgtcccctgctcatgagaggtca

SEQ ID NO: 3186877 - DNA, 25 bp, Homo sapien
ttcagctattgttacttgtgagtga

SEQ ID NO: 3186878 - DNA, 25 bp, Homo sapien
tcagctattgttacttgtgagtgat

SEQ ID NO: 3186879 - DNA, 25 bp, Homo sapien
ttgtgagtgattcatgaagttctcg

SEQ ID NO: 3186880 - DNA, 25 bp, Homo sapien
tttccaacgctgtttgtagttctac

SEQ ID NO: 3186881 - DNA, 25 bp, Homo sapien
cctgttgtagatgcttaattgagtt

SEQ ID NO: 3186882 - DNA, 25 bp, Homo sapien
tgtagatgcttaattgagttagcat

SEQ ID NO: 3186883 - DNA, 25 bp, Homo sapien
tccaacgctgtttgtagttctacca

SEQ ID NO: 3186884 - DNA, 25 bp, Homo sapien
catcctaagctgtgtcattggaact

SEQ ID NO: 3186885 - DNA, 25 bp, Homo sapien
atcctaagctgtgtcattggaactg

SEQ ID NO: 3186886 - DNA, 25 bp, Homo sapien
cctaagctgtgtcattggaactgag

SEQ ID NO: 3186887 - DNA, 25 bp, Homo sapien
tcctaagctgtgtcattggaactga

SEQ ID NO: 3186888 - DNA, 25 bp, Homo sapien
gttactgagtgggtccagctttcca

SEQ ID NO: 3186889 - DNA, 25 bp, Homo sapien
cagctttccagcgctttccaattta

SEQ ID NO: 3186890 - DNA, 25 bp, Homo sapien
gaccttgatgcctgcaaacacctgc

SEQ ID NO: 3186891 - DNA, 25 bp, Homo sapien
ctgcaaacacctgctttgattggag

SEQ ID NO: 3186892 - DNA, 25 bp, Homo sapien
tatgtgtacacaagctggccagttt

SEQ ID NO: 3186893 - DNA, 25 bp, Homo sapien
gacgcaaaaaagctacgcaaggagg

SEQ ID NO: 3186894 - DNA, 25 bp, Homo sapien
tgataagagatgagtggcacctgga

SEQ ID NO: 3186895 - DNA, 25 bp, Homo sapien
tgttgaaagtcaaaaaacgcgacgc

SEQ ID NO: 3186896 - DNA, 25 bp, Homo sapien
cttcagaagtaaagtcgcagacctt

SEQ ID NO: 3186897 - DNA, 25 bp, Homo sapien
gacttcagaagtaaagtcgcagacc

SEQ ID NO: 3186898 - DNA, 25 bp, Homo sapien
ttcagaagtaaagtcgcagaccttc

SEQ ID NO: 3186899 - DNA, 25 bp, Homo sapien
tgacttcagaagtaaagtcgcagac

SEQ ID NO: 3186900 - DNA, 25 bp, Homo sapien
acaccataaattgcatataagttag

SEQ ID NO: 3186901 - DNA, 25 bp, Homo sapien
atacaccataaattgcatataagtt

SEQ ID NO: 3186902 - DNA, 25 bp, Homo sapien
caccataaattgcatataagttagt

SEQ ID NO: 3186903 - DNA, 25 bp, Homo sapien
ccataaattgcatataagttagtta

SEQ ID NO: 3186904 - DNA, 25 bp, Homo sapien
tagtcattttggtgtataaacgtta

SEQ ID NO: 3186905 - DNA, 25 bp, Homo sapien
tcagagctgatttggaaaaatgatt

SEQ ID NO: 3186906 - DNA, 25 bp, Homo sapien
aaacgttacatatgctggttgagca

SEQ ID NO: 3186907 - DNA, 25 bp, Homo sapien
tactttgggatgtggtatattaaga

SEQ ID NO: 3186908 - DNA, 25 bp, Homo sapien
tctttgcagagaatgtaactggtca

SEQ ID NO: 3186909 - DNA, 25 bp, Homo sapien
tactgccagtatcaccattagatgc

SEQ ID NO: 3186910 - DNA, 25 bp, Homo sapien
tctgaaggtgaactctaaagaggta

SEQ ID NO: 3186911 - DNA, 25 bp, Homo sapien
tttgggaatgaaaacgtgtactgcc

SEQ ID NO: 3186912 - DNA, 25 bp, Homo sapien
ctcttccaggtggttagaggcatca

SEQ ID NO: 3186913 - DNA, 25 bp, Homo sapien
caggtggttagaggcatcaggccca

SEQ ID NO: 3186914 - DNA, 25 bp, Homo sapien
aggtggttagaggcatcaggcccat

SEQ ID NO: 3186915 - DNA, 25 bp, Homo sapien
ctctcttccaggtggttagaggcat

SEQ ID NO: 3186916 - DNA, 25 bp, Homo sapien
gatgatcacagtgttgatatgagtc

SEQ ID NO: 3186917 - DNA, 25 bp, Homo sapien
cgtgtccgatgatcacagtgttgat

SEQ ID NO: 3186918 - DNA, 25 bp, Homo sapien
tctacgtgtccgatgatcacagtgt

SEQ ID NO: 3186919 - DNA, 25 bp, Homo sapien
cgaatctacgtgtccgatgatcaca

SEQ ID NO: 3186920 - DNA, 25 bp, Homo sapien
actgtgtcggtgttgtggccaattt

SEQ ID NO: 3186921 - DNA, 25 bp, Homo sapien
atgctactgtgtcggtgttgtggcc

SEQ ID NO: 3186922 - DNA, 25 bp, Homo sapien
gctactgtgtcggtgttgtggccaa

SEQ ID NO: 3186923 - DNA, 25 bp, Homo sapien
aaatgctactgtgtcggtgttgtgg

SEQ ID NO: 3186924 - DNA, 25 bp, Homo sapien
gcacttggctccagcgtgttgtcac

SEQ ID NO: 3186925 - DNA, 25 bp, Homo sapien
ggcatgttagcacttggctccagcg

SEQ ID NO: 3186926 - DNA, 25 bp, Homo sapien
gttagcacttggctccagcgtgttg

SEQ ID NO: 3186927 - DNA, 25 bp, Homo sapien
catgttagcacttggctccagcgtg

SEQ ID NO: 3186928 - DNA, 25 bp, Homo sapien
tgcagtcaagagcctcaagcagcgt

SEQ ID NO: 3186929 - DNA, 25 bp, Homo sapien
ggagaggcaggcacaagggcttgtc

SEQ ID NO: 3186930 - DNA, 25 bp, Homo sapien
tggtggtaggatgcagtcaagagcc

SEQ ID NO: 3186931 - DNA, 25 bp, Homo sapien
acaagggcttgtcagttggacgagt

SEQ ID NO: 3186932 - DNA, 25 bp, Homo sapien
ccaggtttgagaacaccagtctcca

SEQ ID NO: 3186933 - DNA, 25 bp, Homo sapien
accaggtttgagaacaccagtctcc

SEQ ID NO: 3186934 - DNA, 25 bp, Homo sapien
cttcatggtgcatttcaacagattt

SEQ ID NO: 3186935 - DNA, 25 bp, Homo sapien
attcttgacattgaagcccacattg

SEQ ID NO: 3186936 - DNA, 25 bp, Homo sapien
cacattgtccccaggaagaacttca

SEQ ID NO: 3186937 - DNA, 25 bp, Homo sapien
aagcccacattgtccccaggaagaa

SEQ ID NO: 3186938 - DNA, 25 bp, Homo sapien
gcaacgttgccacgacgaacatcct

SEQ ID NO: 3186939 - DNA, 25 bp, Homo sapien
tcaccagcaacgttgccacgacgaa

SEQ ID NO: 3186940 - DNA, 25 bp, Homo sapien
accagcaacgttgccacgacgaaca

SEQ ID NO: 3186941 - DNA, 25 bp, Homo sapien
cagcaacgttgccacgacgaacatc

SEQ ID NO: 3186942 - DNA, 25 bp, Homo sapien
aatacaggggcatagccagcactta

SEQ ID NO: 3186943 - DNA, 25 bp, Homo sapien
agccgtgtggcaatccaatacaggg

SEQ ID NO: 3186944 - DNA, 25 bp, Homo sapien
ggggcatagccagcacttatttggc

SEQ ID NO: 3186945 - DNA, 25 bp, Homo sapien
cagaatggcgatcagtcttttcctt

SEQ ID NO: 3186946 - DNA, 25 bp, Homo sapien
aatttagggccatcttccagctttt

SEQ ID NO: 3186947 - DNA, 25 bp, Homo sapien
ttagggccatcttccagctttttac

SEQ ID NO: 3186948 - DNA, 25 bp, Homo sapien
gaatttagggccatcttccagcttt

SEQ ID NO: 3186949 - DNA, 25 bp, Homo sapien
cttcaagaatttagggccatcttcc

SEQ ID NO: 3186950 - DNA, 25 bp, Homo sapien
gaagctctcaacatacacgggcttg

SEQ ID NO: 3186951 - DNA, 25 bp, Homo sapien
acccaccgcaactgtctgtctgata

SEQ ID NO: 3186952 - DNA, 25 bp, Homo sapien
accgcaactgtctgtctgatatcat

SEQ ID NO: 3186953 - DNA, 25 bp, Homo sapien
ctctcaacatacacgggcttgccag

SEQ ID NO: 3186954 - DNA, 25 bp, Homo sapien
aaactgccacatgcaaagaaagaaa

SEQ ID NO: 3186955 - DNA, 25 bp, Homo sapien
cttaaaactgccacatgcaaagaaa

SEQ ID NO: 3186956 - DNA, 25 bp, Homo sapien
taaaactgccacatgcaaagaaaga

SEQ ID NO: 3186957 - DNA, 25 bp, Homo sapien
actgccacatgcaaagaaagaaaac

SEQ ID NO: 3186958 - DNA, 25 bp, Homo sapien
tctctgctgcacctccttctgaatt

SEQ ID NO: 3186959 - DNA, 25 bp, Homo sapien
ctgctgcacctccttctgaattcat

SEQ ID NO: 3186960 - DNA, 25 bp, Homo sapien
tccaccatttcctgaacagcagggc

SEQ ID NO: 3186961 - DNA, 25 bp, Homo sapien
catttcctgaacagcagggctctct

SEQ ID NO: 3186962 - DNA, 25 bp, Homo sapien
gctccctcttgtggtgtcgggtgat

SEQ ID NO: 3186963 - DNA, 25 bp, Homo sapien
ggatctactgttggctccctcttgt

SEQ ID NO: 3186964 - DNA, 25 bp, Homo sapien
ggtgattaccaaattatcacagtta

SEQ ID NO: 3186965 - DNA, 25 bp, Homo sapien
tcagtaaggatctactgttggctcc

SEQ ID NO: 3186966 - DNA, 25 bp, Homo sapien
tagagtgacgagtttatctgctccc

SEQ ID NO: 3186967 - DNA, 25 bp, Homo sapien
ctcagggtgagggttaaagctacta

SEQ ID NO: 3186968 - DNA, 25 bp, Homo sapien
caatggctgattgctaaggtgcctc

SEQ ID NO: 3186969 - DNA, 25 bp, Homo sapien
gcaaagacaagctttggaggcttgc

SEQ ID NO: 3186970 - DNA, 25 bp, Homo sapien
ggttgtattcagtcctgtcagattg

SEQ ID NO: 3186971 - DNA, 25 bp, Homo sapien
gtctagacctcaagaaggccagatt

SEQ ID NO: 3186972 - DNA, 25 bp, Homo sapien
cagagtggtccccagaaacactgct

SEQ ID NO: 3186973 - DNA, 25 bp, Homo sapien
tctctccagcatatagagtctagac

SEQ ID NO: 3186974 - DNA, 25 bp, Homo sapien
tctggaggaccacataacaagtacc

SEQ ID NO: 3186975 - DNA, 25 bp, Homo sapien
taaaatgctgcccaatatcaacatc

SEQ ID NO: 3186976 - DNA, 25 bp, Homo sapien
gaggcaagttctggaggaccacata

SEQ ID NO: 3186977 - DNA, 25 bp, Homo sapien
cacataacaagtaccgaagaaaaga

SEQ ID NO: 3186978 - DNA, 25 bp, Homo sapien
ggagactctgatagatgctgaatta

SEQ ID NO: 3186979 - DNA, 25 bp, Homo sapien
caaacttcgattaatattgggcaag

SEQ ID NO: 3186980 - DNA, 25 bp, Homo sapien
gctgaattagtgaaactcagacaga

SEQ ID NO: 3186981 - DNA, 25 bp, Homo sapien
gtaagcaaaaatttgtgaatagcaa

SEQ ID NO: 3186982 - DNA, 25 bp, Homo sapien
taataatgggtatcgtacaggccag

SEQ ID NO: 3186983 - DNA, 25 bp, Homo sapien
tgagggctctaaccagtccaggtgt

SEQ ID NO: 3186984 - DNA, 25 bp, Homo sapien
gagctttaggccatctatctgaggg

SEQ ID NO: 3186985 - DNA, 25 bp, Homo sapien
gcttccccagagagttagagcagtg

SEQ ID NO: 3186986 - DNA, 25 bp, Homo sapien
cctggcacatattctgtttttgctg

SEQ ID NO: 3186987 - DNA, 25 bp, Homo sapien
cttatctttcccaaccagactttga

SEQ ID NO: 3186988 - DNA, 25 bp, Homo sapien
gagcctctttggagtaaaggtcaga

SEQ ID NO: 3186989 - DNA, 25 bp, Homo sapien
cattgtaaccctcaagacacagcat

SEQ ID NO: 3186990 - DNA, 25 bp, Homo sapien
caacagttaacaagacagatagggt

SEQ ID NO: 3186991 - DNA, 25 bp, Homo sapien
tctatggctcccagtagaatggaaa

SEQ ID NO: 3186992 - DNA, 25 bp, Homo sapien
gctcttatttcaggccatggtgtct

SEQ ID NO: 3186993 - DNA, 25 bp, Homo sapien
catgcagtcctgaatagaccgtttc

SEQ ID NO: 3186994 - DNA, 25 bp, Homo sapien
gaaggtaccacagacacactaagaa

SEQ ID NO: 3186995 - DNA, 25 bp, Homo sapien
catagaggataaaggtaatcgaccc

SEQ ID NO: 3186996 - DNA, 25 bp, Homo sapien
tacagtagggtggttcatctttcgc

SEQ ID NO: 3186997 - DNA, 25 bp, Homo sapien
tattatttgagccacttgtccccac

SEQ ID NO: 3186998 - DNA, 25 bp, Homo sapien
gatagaaacatgcacaggaagctgg

SEQ ID NO: 3186999 - DNA, 25 bp, Homo sapien
caaagaacagacacgaacaaaaagg

SEQ ID NO: 3187000 - DNA, 25 bp, Homo sapien
aatttctgctccctgacagactgtc

SEQ ID NO: 3187001 - DNA, 25 bp, Homo sapien
tcttcatttggccttgaacaaaact

SEQ ID NO: 3187002 - DNA, 25 bp, Homo sapien
ggtgtcacattactgattcaaatac

SEQ ID NO: 3187003 - DNA, 25 bp, Homo sapien
cactgtagagtgtatgaaggcagat

SEQ ID NO: 3187004 - DNA, 25 bp, Homo sapien
cttcaaactatgacacacacctgtt

SEQ ID NO: 3187005 - DNA, 25 bp, Homo sapien
cacacacctgtttgtactggtgtca

SEQ ID NO: 3187006 - DNA, 25 bp, Homo sapien
acaaatttgaccctaagctcctagc

SEQ ID NO: 3187007 - DNA, 25 bp, Homo sapien
tagttaatataaaggccagggaaca

SEQ ID NO: 3187008 - DNA, 25 bp, Homo sapien
tgaccctaagctcctagcagctaaa

SEQ ID NO: 3187009 - DNA, 25 bp, Homo sapien
gctcctagcagctaaatatagtaaa

SEQ ID NO: 3187010 - DNA, 25 bp, Homo sapien
ctacatcactttaggtcggatggtc

SEQ ID NO: 3187011 - DNA, 25 bp, Homo sapien
tacatcactttaggtcggatggtca

SEQ ID NO: 3187012 - DNA, 25 bp, Homo sapien
acatcactttaggtcggatggtcag

SEQ ID NO: 3187013 - DNA, 25 bp, Homo sapien
gttccatgtatgaggaccagcataa

SEQ ID NO: 3187014 - DNA, 25 bp, Homo sapien
aggaccagcataatccctctgcctg

SEQ ID NO: 3187015 - DNA, 25 bp, Homo sapien
gacagggaggcatagagttcagttc

SEQ ID NO: 3187016 - DNA, 25 bp, Homo sapien
gcagaagagctggattcaaacttta

SEQ ID NO: 3187017 - DNA, 25 bp, Homo sapien
tatgtgcttagctccgaagcctggg

SEQ ID NO: 3187018 - DNA, 25 bp, Homo sapien
tcactccctgactggaactgtcgtg

SEQ ID NO: 3187019 - DNA, 25 bp, Homo sapien
gggaggactgaagacaatcttcact

SEQ ID NO: 3187020 - DNA, 25 bp, Homo sapien
gcttagaatttatcctatcctgttt

SEQ ID NO: 3187021 - DNA, 25 bp, Homo sapien
tttgcttagaatttatcctatcctg

SEQ ID NO: 3187022 - DNA, 25 bp, Homo sapien
cactgatagccacgttttgcttaga

SEQ ID NO: 3187023 - DNA, 25 bp, Homo sapien
ttccctaacacacagctctagatca

SEQ ID NO: 3187024 - DNA, 25 bp, Homo sapien
tcagctccttaatgatcttttcccg

SEQ ID NO: 3187025 - DNA, 25 bp, Homo sapien
cagctacagaacactcaccctgtgg

SEQ ID NO: 3187026 - DNA, 25 bp, Homo sapien
gggttaaggtctcagctacagaaca

SEQ ID NO: 3187027 - DNA, 25 bp, Homo sapien
tataaggtaaacttagtccatttga

SEQ ID NO: 3187028 - DNA, 25 bp, Homo sapien
catttgatacaaatgtggactaaga

SEQ ID NO: 3187029 - DNA, 25 bp, Homo sapien
cattttcatataaggtaaacttagt

SEQ ID NO: 3187030 - DNA, 25 bp, Homo sapien
cttagtccatttgatacaaatgtgg

SEQ ID NO: 3187031 - DNA, 25 bp, Homo sapien
ctagctttgaggtgtcatgacggtc

SEQ ID NO: 3187032 - DNA, 25 bp, Homo sapien
caggaagattcccatgacgtgctga

SEQ ID NO: 3187033 - DNA, 25 bp, Homo sapien
taaaaacatcggaagagagggcagg

SEQ ID NO: 3187034 - DNA, 25 bp, Homo sapien
cctgttgtataggacggcaatgggc

SEQ ID NO: 3187035 - DNA, 25 bp, Homo sapien
tagtatgtaagtttctatctttggc

SEQ ID NO: 3187036 - DNA, 25 bp, Homo sapien
caaaaatagtatgtaagtttctatc

SEQ ID NO: 3187037 - DNA, 25 bp, Homo sapien
taagcctggtggcaaagtcttgtta

SEQ ID NO: 3187038 - DNA, 25 bp, Homo sapien
tggtggcaaagtcttgttaactctt

SEQ ID NO: 3187039 - DNA, 25 bp, Homo sapien
cacagccgtattggtgcaggctcta

SEQ ID NO: 3187040 - DNA, 25 bp, Homo sapien
caagaattacgaaagaatccagact

SEQ ID NO: 3187041 - DNA, 25 bp, Homo sapien
tcatgcacacccttaacaaccagtg

SEQ ID NO: 3187042 - DNA, 25 bp, Homo sapien
atagtgactggtcaggccacagccg

SEQ ID NO: 3187043 - DNA, 25 bp, Homo sapien
attttaaatgccagcgcatgctgtc

SEQ ID NO: 3187044 - DNA, 25 bp, Homo sapien
ggagaagcactgtatttaggatgtt

SEQ ID NO: 3187045 - DNA, 25 bp, Homo sapien
acaaaaaacattgagctgatggaga

SEQ ID NO: 3187046 - DNA, 25 bp, Homo sapien
taaatgccagcgcatgctgtctcca

SEQ ID NO: 3187047 - DNA, 25 bp, Homo sapien
tgctaaacaagctatccacatccag

SEQ ID NO: 3187048 - DNA, 25 bp, Homo sapien
cacggactcaatgttgctaaacaag

SEQ ID NO: 3187049 - DNA, 25 bp, Homo sapien
caattacttgcatggccggttccac

SEQ ID NO: 3187050 - DNA, 25 bp, Homo sapien
gcagcttggctgatatctgatgcac

SEQ ID NO: 3187051 - DNA, 25 bp, Homo sapien
tcctgttgtattgtagaactcgaga

SEQ ID NO: 3187052 - DNA, 25 bp, Homo sapien
tgtattgtagaactcgagaagagaa

SEQ ID NO: 3187053 - DNA, 25 bp, Homo sapien
tgttgtattgtagaactcgagaaga

SEQ ID NO: 3187054 - DNA, 25 bp, Homo sapien
tattgtagaactcgagaagagaata

SEQ ID NO: 3187055 - DNA, 25 bp, Homo sapien
gggcataagatctaaaaaacattgt

SEQ ID NO: 3187056 - DNA, 25 bp, Homo sapien
tgatgggcataagatctaaaaaaca

SEQ ID NO: 3187057 - DNA, 25 bp, Homo sapien
ttgattgatgggcataagatctaaa

SEQ ID NO: 3187058 - DNA, 25 bp, Homo sapien
gaaatcagtaaagctattagaatat

SEQ ID NO: 3187059 - DNA, 25 bp, Homo sapien
gtgtcccccaaacctccgcactgac

SEQ ID NO: 3187060 - DNA, 25 bp, Homo sapien
ggtgtcccccaaacctccgcactga

SEQ ID NO: 3187061 - DNA, 25 bp, Homo sapien
cattttctccaaagcggacagcttt

SEQ ID NO: 3187062 - DNA, 25 bp, Homo sapien
tctttcttgtgaggattggtgtatc

SEQ ID NO: 3187063 - DNA, 25 bp, Homo sapien
ctttcctattacttctaacatttgc

SEQ ID NO: 3187064 - DNA, 25 bp, Homo sapien
tccttgatcctgaaaataccatttc

SEQ ID NO: 3187065 - DNA, 25 bp, Homo sapien
cccaacatgtgccacaccaaaccag

SEQ ID NO: 3187066 - DNA, 25 bp, Homo sapien
accaggtggcctttatagtattgtg

SEQ ID NO: 3187067 - DNA, 25 bp, Homo sapien
tgtgatcctgctccaagatgaattt

SEQ ID NO: 3187068 - DNA, 25 bp, Homo sapien
tatagtattgtgatcctgctccaag

SEQ ID NO: 3187069 - DNA, 25 bp, Homo sapien
ccaaaggccaagtacaacactggca

SEQ ID NO: 3187070 - DNA, 25 bp, Homo sapien
taagtactctaattgaaagtcattt

SEQ ID NO: 3187071 - DNA, 25 bp, Homo sapien
aaaattctgttgaggctctaataat

SEQ ID NO: 3187072 - DNA, 25 bp, Homo sapien
gatatttaagtactctaattgaaag

SEQ ID NO: 3187073 - DNA, 25 bp, Homo sapien
ggcttagatcacagacttagctgga

SEQ ID NO: 3187074 - DNA, 25 bp, Homo sapien
gcagcaagtcaacaacagtggacct

SEQ ID NO: 3187075 - DNA, 25 bp, Homo sapien
caggtagcaaatgggaactagtggc

SEQ ID NO: 3187076 - DNA, 25 bp, Homo sapien
ttagctggacgctcagcagcaagtc

SEQ ID NO: 3187077 - DNA, 25 bp, Homo sapien
cataggactccagtatactatgtgc

SEQ ID NO: 3187078 - DNA, 25 bp, Homo sapien
cagtatactatgtgcttcatcatgg

SEQ ID NO: 3187079 - DNA, 25 bp, Homo sapien
cctttaatctgcaagaatacttctc

SEQ ID NO: 3187080 - DNA, 25 bp, Homo sapien
gcttcatcatggtgatagcagtaga

SEQ ID NO: 3187081 - DNA, 25 bp, Homo sapien
cattaacccatgtgctccagtggtc

SEQ ID NO: 3187082 - DNA, 25 bp, Homo sapien
tcacataatccttgaactacgtggg

SEQ ID NO: 3187083 - DNA, 25 bp, Homo sapien
aagaagacggccatgcagagttgta

SEQ ID NO: 3187084 - DNA, 25 bp, Homo sapien
gagtctgtaagagagccactgggta

SEQ ID NO: 3187085 - DNA, 25 bp, Homo sapien
gggaaacgcctcctccagagtagta

SEQ ID NO: 3187086 - DNA, 25 bp, Homo sapien
ggctcattttaaactcactttcaga

SEQ ID NO: 3187087 - DNA, 25 bp, Homo sapien
cagacccaattctagccgggaaacg

SEQ ID NO: 3187088 - DNA, 25 bp, Homo sapien
ccagtagacggcaataaagttgaaa

SEQ ID NO: 3187089 - DNA, 25 bp, Homo sapien
gaagcaaatctgaaagaccctacta

SEQ ID NO: 3187090 - DNA, 25 bp, Homo sapien
ccatatgccatgtacagtttacaag

SEQ ID NO: 3187091 - DNA, 25 bp, Homo sapien
caatttcagaacgtattttaccatg

SEQ ID NO: 3187092 - DNA, 25 bp, Homo sapien
tccatcaaattgtctcaaagcatga

SEQ ID NO: 3187093 - DNA, 25 bp, Homo sapien
cacacgttgaattggtttgatcatc

SEQ ID NO: 3187094 - DNA, 25 bp, Homo sapien
ccagtgctctgtaatctgggtgaga

SEQ ID NO: 3187095 - DNA, 25 bp, Homo sapien
caaaggcatcgtccagtgctctgta

SEQ ID NO: 3187096 - DNA, 25 bp, Homo sapien
ttccgaagttcgcacagtaataggg

SEQ ID NO: 3187097 - DNA, 25 bp, Homo sapien
atttgtctttaagtgattcatcctc

SEQ ID NO: 3187098 - DNA, 25 bp, Homo sapien
tgtctttaagtgattcatcctcgtc

SEQ ID NO: 3187099 - DNA, 25 bp, Homo sapien
tctttaagtgattcatcctcgtcat

SEQ ID NO: 3187100 - DNA, 25 bp, Homo sapien
tttaagtgattcatcctcgtcattc

SEQ ID NO: 3187101 - DNA, 25 bp, Homo sapien
gaggaacctcttacatgcaatggac

SEQ ID NO: 3187102 - DNA, 25 bp, Homo sapien
attatagttccacgttgagaagagg

SEQ ID NO: 3187103 - DNA, 25 bp, Homo sapien
tccacgttgagaagaggaacctctt

SEQ ID NO: 3187104 - DNA, 25 bp, Homo sapien
cttacatgcaatggacccagttagc

SEQ ID NO: 3187105 - DNA, 25 bp, Homo sapien
tctctgttaaaggtattgtctttaa

SEQ ID NO: 3187106 - DNA, 25 bp, Homo sapien
agacagagtgaaatgttcttcacac

SEQ ID NO: 3187107 - DNA, 25 bp, Homo sapien
atgttcttcacacaaagcctcacag

SEQ ID NO: 3187108 - DNA, 25 bp, Homo sapien
gagtgaaatgttcttcacacaaagc

SEQ ID NO: 3187109 - DNA, 25 bp, Homo sapien
gaatagtccatctcatcgtctttgt

SEQ ID NO: 3187110 - DNA, 25 bp, Homo sapien
aaagtcatgacacgaatttaaggca

SEQ ID NO: 3187111 - DNA, 25 bp, Homo sapien
tgaaatctcctgaaggtccatcaca

SEQ ID NO: 3187112 - DNA, 25 bp, Homo sapien
aggcattacttagggtctcagaata

SEQ ID NO: 3187113 - DNA, 25 bp, Homo sapien
cacaagtgtggagtaagcctgctgt

SEQ ID NO: 3187114 - DNA, 25 bp, Homo sapien
cacgagcatcaggtccctaaggagg

SEQ ID NO: 3187115 - DNA, 25 bp, Homo sapien
cctaaggagggtaatgaagctgcat

SEQ ID NO: 3187116 - DNA, 25 bp, Homo sapien
tctcccgttgatcgctgcaggtagc

SEQ ID NO: 3187117 - DNA, 25 bp, Homo sapien
tcctctcaataaaggtggcactgtt

SEQ ID NO: 3187118 - DNA, 25 bp, Homo sapien
agtttcctctcaataaaggtggcac

SEQ ID NO: 3187119 - DNA, 25 bp, Homo sapien
gatctcttctagtacttgattctga

SEQ ID NO: 3187120 - DNA, 25 bp, Homo sapien
aaattttggatctcttctagtactt

SEQ ID NO: 3187121 - DNA, 25 bp, Homo sapien
gaagtttggagcgatgaatgtcagt

SEQ ID NO: 3187122 - DNA, 25 bp, Homo sapien
tggatagaagtttggagcgatgaat

SEQ ID NO: 3187123 - DNA, 25 bp, Homo sapien
gagcgatgaatgtcagtttgatgtg

SEQ ID NO: 3187124 - DNA, 25 bp, Homo sapien
tttggagcgatgaatgtcagtttga

SEQ ID NO: 3187125 - DNA, 25 bp, Homo sapien
cttccagaagattgatgtcatattc

SEQ ID NO: 3187126 - DNA, 25 bp, Homo sapien
ttcctgtgtccacaagccacctgct

SEQ ID NO: 3187127 - DNA, 25 bp, Homo sapien
acctgcttgtactccccagtggatc

SEQ ID NO: 3187128 - DNA, 25 bp, Homo sapien
tcttgtgtagcattgcacttgcgct

SEQ ID NO: 3187129 - DNA, 25 bp, Homo sapien
gaagacacgaagaggctgatgttct

SEQ ID NO: 3187130 - DNA, 25 bp, Homo sapien
tgtgacactgtcactagctggccgt

SEQ ID NO: 3187131 - DNA, 25 bp, Homo sapien
tgaaaactgtcaacatcagtaccat

SEQ ID NO: 3187132 - DNA, 25 bp, Homo sapien
cacatgtgccactaagagatgagct

SEQ ID NO: 3187133 - DNA, 25 bp, Homo sapien
gctgagttcatggtcactccgtgct

SEQ ID NO: 3187134 - DNA, 25 bp, Homo sapien
tccgtgcttgaaaagcatgaactgc

SEQ ID NO: 3187135 - DNA, 25 bp, Homo sapien
gttagctggcacgtatcctttctgc

SEQ ID NO: 3187136 - DNA, 25 bp, Homo sapien
gccacttaggtcacaaaacctgagt

SEQ ID NO: 3187137 - DNA, 25 bp, Homo sapien
cattcatgcaataatcctgttagga

SEQ ID NO: 3187138 - DNA, 25 bp, Homo sapien
ggtagtcaatcaacaacttgctgga

SEQ ID NO: 3187139 - DNA, 25 bp, Homo sapien
cagtattcctgaaaacccagtacag

SEQ ID NO: 3187140 - DNA, 25 bp, Homo sapien
tagttgatagttgaagcttgggtca

SEQ ID NO: 3187141 - DNA, 25 bp, Homo sapien
gacattcctgtagttgacctggtga

SEQ ID NO: 3187142 - DNA, 25 bp, Homo sapien
cagattaccagagtgtgcctcctga

SEQ ID NO: 3187143 - DNA, 25 bp, Homo sapien
tggcaaccaatgtggctcctcgtgg

SEQ ID NO: 3187144 - DNA, 25 bp, Homo sapien
tagagagagtcgacaaagcagttgc

SEQ ID NO: 3187145 - DNA, 25 bp, Homo sapien
ataacagttaatgtaacctccatac

SEQ ID NO: 3187146 - DNA, 25 bp, Homo sapien
ctcagctccgcaactataacagtta

SEQ ID NO: 3187147 - DNA, 25 bp, Homo sapien
actataacagttaatgtaacctcca

SEQ ID NO: 3187148 - DNA, 25 bp, Homo sapien
aaaaactcagctccgcaactataac

SEQ ID NO: 3187149 - DNA, 25 bp, Homo sapien
atcctacagagacttttgctttgag

SEQ ID NO: 3187150 - DNA, 25 bp, Homo sapien
tgtctgtttaccctatatgtaaata

SEQ ID NO: 3187151 - DNA, 25 bp, Homo sapien
aatgaattatctcaatcctacagag

SEQ ID NO: 3187152 - DNA, 25 bp, Homo sapien
cataattgtttatagttcaaaacca

SEQ ID NO: 3187153 - DNA, 25 bp, Homo sapien
tggttctcaatgagatcttcagaag

SEQ ID NO: 3187154 - DNA, 25 bp, Homo sapien
attctaatgatttccatagtgtgtg

SEQ ID NO: 3187155 - DNA, 25 bp, Homo sapien
aaacaatgattagaatgactggttc

SEQ ID NO: 3187156 - DNA, 25 bp, Homo sapien
cattttaaatcaatcttcaacattt

SEQ ID NO: 3187157 - DNA, 25 bp, Homo sapien
gaaatagtggaacatcaggacctag

SEQ ID NO: 3187158 - DNA, 25 bp, Homo sapien
gaaactcaagaagtaatgtggccaa

SEQ ID NO: 3187159 - DNA, 25 bp, Homo sapien
gctatgaagcgattacagatggtca

SEQ ID NO: 3187160 - DNA, 25 bp, Homo sapien
ggacctagtggaagtactaccagca

SEQ ID NO: 3187161 - DNA, 25 bp, Homo sapien
acaatgtcagcaaagtaggtcttcc

SEQ ID NO: 3187162 - DNA, 25 bp, Homo sapien
tcagttagttgtgacaatgtcagca

SEQ ID NO: 3187163 - DNA, 25 bp, Homo sapien
ggtaaaactggccttagtcgctcag

SEQ ID NO: 3187164 - DNA, 25 bp, Homo sapien
gccttagtcgctcagttagttgtga

SEQ ID NO: 3187165 - DNA, 25 bp, Homo sapien
tggtctggcaacatcatccaaaggt

SEQ ID NO: 3187166 - DNA, 25 bp, Homo sapien
ggttccaataacagcactacgccca

SEQ ID NO: 3187167 - DNA, 25 bp, Homo sapien
tctagtgccagcgtttcctcgtcag

SEQ ID NO: 3187168 - DNA, 25 bp, Homo sapien
taactagtggcttaactggatgggc

SEQ ID NO: 3187169 - DNA, 25 bp, Homo sapien
caagagcccaaaatatcatccagtc

SEQ ID NO: 3187170 - DNA, 25 bp, Homo sapien
ttcatcttttaggatgtggagccac

SEQ ID NO: 3187171 - DNA, 25 bp, Homo sapien
acatttccattaagcaagagcccaa

SEQ ID NO: 3187172 - DNA, 25 bp, Homo sapien
gccacccaaaatttcaagcacaaaa

SEQ ID NO: 3187173 - DNA, 25 bp, Homo sapien
ctgcttgatgaatctttggctcggg

SEQ ID NO: 3187174 - DNA, 25 bp, Homo sapien
tccagttaccgtccatctcaaaagg

SEQ ID NO: 3187175 - DNA, 25 bp, Homo sapien
ttcagagaactgttacaccacatag

SEQ ID NO: 3187176 - DNA, 25 bp, Homo sapien
catctcaaaacaatctctgccgaaa

SEQ ID NO: 3187177 - DNA, 25 bp, Homo sapien
tgtcaggaataagaaggaaatttac

SEQ ID NO: 3187178 - DNA, 25 bp, Homo sapien
ctgtcaggaataagaaggaaattta

SEQ ID NO: 3187179 - DNA, 25 bp, Homo sapien
gaaaactgatactgctagttgtttc

SEQ ID NO: 3187180 - DNA, 25 bp, Homo sapien
ccatcgatatggatacacagaaaac

SEQ ID NO: 3187181 - DNA, 25 bp, Homo sapien
actgatactgctagttgtttcaggg

SEQ ID NO: 3187182 - DNA, 25 bp, Homo sapien
ctggatttaaaacgttaccatcgat

SEQ ID NO: 3187183 - DNA, 25 bp, Homo sapien
tttcctgcagctagacggtttcatc

SEQ ID NO: 3187184 - DNA, 25 bp, Homo sapien
gctttcctgcagctagacggtttca

SEQ ID NO: 3187185 - DNA, 25 bp, Homo sapien
tcctgcagctagacggtttcatctg

SEQ ID NO: 3187186 - DNA, 25 bp, Homo sapien
cctgcagctagacggtttcatctgg

SEQ ID NO: 3187187 - DNA, 25 bp, Homo sapien
ggggttacaacagtaggcaagacca

SEQ ID NO: 3187188 - DNA, 25 bp, Homo sapien
ttccaggaactctgccagacagggg

SEQ ID NO: 3187189 - DNA, 25 bp, Homo sapien
caggaactctgccagacaggggtta

SEQ ID NO: 3187190 - DNA, 25 bp, Homo sapien
gacaggggttacaacagtaggcaag

SEQ ID NO: 3187191 - DNA, 25 bp, Homo sapien
ctgggcatggttacggtggtgcatg

SEQ ID NO: 3187192 - DNA, 25 bp, Homo sapien
tatgaaatggcaacgataatactgc

SEQ ID NO: 3187193 - DNA, 25 bp, Homo sapien
caagagcttgcgaagtcatgaagaa

SEQ ID NO: 3187194 - DNA, 25 bp, Homo sapien
ggcacgtgcatatgatcaactttgg

SEQ ID NO: 3187195 - DNA, 25 bp, Homo sapien
tcttttgagattgccaggtagggtg

SEQ ID NO: 3187196 - DNA, 25 bp, Homo sapien
ttttcctgctttcggagccggccag

SEQ ID NO: 3187197 - DNA, 25 bp, Homo sapien
gaacggtgagttatgctgagcgact

SEQ ID NO: 3187198 - DNA, 25 bp, Homo sapien
gagttatgctgagcgactctgctcc

SEQ ID NO: 3187199 - DNA, 25 bp, Homo sapien
ccaccgggaacagacggatcggcag

SEQ ID NO: 3187200 - DNA, 25 bp, Homo sapien
ggagaaaaacgacagccaccttatg

SEQ ID NO: 3187201 - DNA, 25 bp, Homo sapien
tatgtggaaaatactcgcgccggcc

SEQ ID NO: 3187202 - DNA, 25 bp, Homo sapien
cgtcattcataatccggcggaccgg

SEQ ID NO: 3187203 - DNA, 25 bp, Homo sapien
gagctggaattccaaggctgcctct

SEQ ID NO: 3187204 - DNA, 25 bp, Homo sapien
gagaagttagtgtgacccaagaggt

SEQ ID NO: 3187205 - DNA, 25 bp, Homo sapien
ccaagaggtcttgaagtaacactta

SEQ ID NO: 3187206 - DNA, 25 bp, Homo sapien
catcccaaaaccaggtagaaagttg

SEQ ID NO: 3187207 - DNA, 25 bp, Homo sapien
gaatttatgacaaggaatgggatcc

SEQ ID NO: 3187208 - DNA, 25 bp, Homo sapien
acgaagtgtgtaatctctctggaga

SEQ ID NO: 3187209 - DNA, 25 bp, Homo sapien
gccacaaacgaagtgtgtaatctct

SEQ ID NO: 3187210 - DNA, 25 bp, Homo sapien
cttagccacaaacgaagtgtgtaat

SEQ ID NO: 3187211 - DNA, 25 bp, Homo sapien
caaacgaagtgtgtaatctctctgg

SEQ ID NO: 3187212 - DNA, 25 bp, Homo sapien
taaacctgcctaaattctctcctac

SEQ ID NO: 3187213 - DNA, 25 bp, Homo sapien
gcccctcaacagatagatagcagcc

SEQ ID NO: 3187214 - DNA, 25 bp, Homo sapien
aacgtgaaacccttaatccatgtgc

SEQ ID NO: 3187215 - DNA, 25 bp, Homo sapien
tgaaagccagggaatcatgaaatgg

SEQ ID NO: 3187216 - DNA, 25 bp, Homo sapien
ttctgtaagacttttctttatggct

SEQ ID NO: 3187217 - DNA, 25 bp, Homo sapien
cagtcacagtaagataacagaaata

SEQ ID NO: 3187218 - DNA, 25 bp, Homo sapien
ctctttggtgacaactaagcaaatt

SEQ ID NO: 3187219 - DNA, 25 bp, Homo sapien
ttacagatgtatgaagaggaaagat

SEQ ID NO: 3187220 - DNA, 25 bp, Homo sapien
gttacagatgtatgaagaggaaaga

SEQ ID NO: 3187221 - DNA, 25 bp, Homo sapien
tgatcgttctactactgcaggcaaa

SEQ ID NO: 3187222 - DNA, 25 bp, Homo sapien
tgtctcaatacaacagcaagtcctg

SEQ ID NO: 3187223 - DNA, 25 bp, Homo sapien
aattttggactattggtgggagctc

SEQ ID NO: 3187224 - DNA, 25 bp, Homo sapien
gcaagtcctgctctacaaaaattgt

SEQ ID NO: 3187225 - DNA, 25 bp, Homo sapien
gaaatgatggatacagggcaagagc

SEQ ID NO: 3187226 - DNA, 25 bp, Homo sapien
tatgcactctaacaggctcactaag

SEQ ID NO: 3187227 - DNA, 25 bp, Homo sapien
ttctcaatagccaaagggatggtga

SEQ ID NO: 3187228 - DNA, 25 bp, Homo sapien
tggtgagttcacatagcctggtcca

SEQ ID NO: 3187229 - DNA, 25 bp, Homo sapien
taactttcctagcagcatattgaca

SEQ ID NO: 3187230 - DNA, 25 bp, Homo sapien
gacgtccaacggagtatccattgca

SEQ ID NO: 3187231 - DNA, 25 bp, Homo sapien
taatgtgtacagtccagatgaaacc

SEQ ID NO: 3187232 - DNA, 25 bp, Homo sapien
cagagccgacttggaccttctacta

SEQ ID NO: 3187233 - DNA, 25 bp, Homo sapien
cacctcaatgtatgttaatgcaagc

SEQ ID NO: 3187234 - DNA, 25 bp, Homo sapien
tatgtccttgactttattcctgcga

SEQ ID NO: 3187235 - DNA, 25 bp, Homo sapien
tgaccttgattacggatgttgaact

SEQ ID NO: 3187236 - DNA, 25 bp, Homo sapien
ggcttgccaacataaccactatatg

SEQ ID NO: 3187237 - DNA, 25 bp, Homo sapien
gccaggccactctactaatatccag

SEQ ID NO: 3187238 - DNA, 25 bp, Homo sapien
tggaaggccatctgtatttactgag

SEQ ID NO: 3187239 - DNA, 25 bp, Homo sapien
acagaaccaatggatatggaaggcc

SEQ ID NO: 3187240 - DNA, 25 bp, Homo sapien
gattaccaaatagttacctggctca

SEQ ID NO: 3187241 - DNA, 25 bp, Homo sapien
tacacaatgaggtaaggagaacatt

SEQ ID NO: 3187242 - DNA, 25 bp, Homo sapien
gaaactaccttctctgtatgtgtga

SEQ ID NO: 3187243 - DNA, 25 bp, Homo sapien
gagaggcaacaaatgtttccgtaga

SEQ ID NO: 3187244 - DNA, 25 bp, Homo sapien
cacaataatatcagagcatgagaca

SEQ ID NO: 3187245 - DNA, 25 bp, Homo sapien
tcctctataatcaactgcattccaa

SEQ ID NO: 3187246 - DNA, 25 bp, Homo sapien
tctggaaaccctttcatctataatt

SEQ ID NO: 3187247 - DNA, 25 bp, Homo sapien
tgataagttcttaacacactgcata

SEQ ID NO: 3187248 - DNA, 25 bp, Homo sapien
tgttcctgaccctctatatacttga

SEQ ID NO: 3187249 - DNA, 25 bp, Homo sapien
taccaagaggctagcaatggaaatt

SEQ ID NO: 3187250 - DNA, 25 bp, Homo sapien
cctctggtaccaagaggctagcaat

SEQ ID NO: 3187251 - DNA, 25 bp, Homo sapien
gaggctagcaatggaaattctacca

SEQ ID NO: 3187252 - DNA, 25 bp, Homo sapien
tgctgtttttactcctggcacttcc

SEQ ID NO: 3187253 - DNA, 25 bp, Homo sapien
ttcacataagtttggatgctgttca

SEQ ID NO: 3187254 - DNA, 25 bp, Homo sapien
gttgaggttgtcaacaactttggta

SEQ ID NO: 3187255 - DNA, 25 bp, Homo sapien
tggatgctgttcagttgaggttgtc

SEQ ID NO: 3187256 - DNA, 25 bp, Homo sapien
gctgttcagttgaggttgtcaacaa

SEQ ID NO: 3187257 - DNA, 25 bp, Homo sapien
cctataaataaaggatcgctttgct

SEQ ID NO: 3187258 - DNA, 25 bp, Homo sapien
ataaataaaggatcgctttgctctt

SEQ ID NO: 3187259 - DNA, 25 bp, Homo sapien
ctataaataaaggatcgctttgctc

SEQ ID NO: 3187260 - DNA, 25 bp, Homo sapien
tcctataaataaaggatcgctttgc

SEQ ID NO: 3187261 - DNA, 25 bp, Homo sapien
tgctaccttggtcaatatcctgaat

SEQ ID NO: 3187262 - DNA, 25 bp, Homo sapien
tatttaacttgcaatcattatccaa

SEQ ID NO: 3187263 - DNA, 25 bp, Homo sapien
acttacttggctccaaaaatacata

SEQ ID NO: 3187264 - DNA, 25 bp, Homo sapien
taaaatagtatacttgaccaggtat

SEQ ID NO: 3187265 - DNA, 25 bp, Homo sapien
tgctgcagggagaacattccaatca

SEQ ID NO: 3187266 - DNA, 25 bp, Homo sapien
agaaaacatcacttcaatgcccttt

SEQ ID NO: 3187267 - DNA, 25 bp, Homo sapien
ttcctttgggctgactgctgcaggg

SEQ ID NO: 3187268 - DNA, 25 bp, Homo sapien
atcaagagtccaagtagggcaaggg

SEQ ID NO: 3187269 - DNA, 25 bp, Homo sapien
tcagtgatctacacaaagagttaga

SEQ ID NO: 3187270 - DNA, 25 bp, Homo sapien
tatcccaagcaatgtcatctgctag

SEQ ID NO: 3187271 - DNA, 25 bp, Homo sapien
ttcctaatgttaagggtcagttcat

SEQ ID NO: 3187272 - DNA, 25 bp, Homo sapien
tactaagaggataatctgccactag

SEQ ID NO: 3187273 - DNA, 25 bp, Homo sapien
ggtaggccgtgaccctatttccagc

SEQ ID NO: 3187274 - DNA, 25 bp, Homo sapien
tgtcctgggaattaagactttgccc

SEQ ID NO: 3187275 - DNA, 25 bp, Homo sapien
ttttttcctaggaagcatgtttgca

SEQ ID NO: 3187276 - DNA, 25 bp, Homo sapien
tatttccctaggacatggaagtatt

SEQ ID NO: 3187277 - DNA, 25 bp, Homo sapien
taaaggtgtgcagaatcaaggagcc

SEQ ID NO: 3187278 - DNA, 25 bp, Homo sapien
tacttactaatgtccatagggccag

SEQ ID NO: 3187279 - DNA, 25 bp, Homo sapien
gttaatgagcccttgacaactacag

SEQ ID NO: 3187280 - DNA, 25 bp, Homo sapien
aagtcaacttcacggaaatgccagg

SEQ ID NO: 3187281 - DNA, 25 bp, Homo sapien
gaatcaacttttaaaagcttatgtg

SEQ ID NO: 3187282 - DNA, 25 bp, Homo sapien
aactgagaatcaacttttaaaagct

SEQ ID NO: 3187283 - DNA, 25 bp, Homo sapien
atcaacttttaaaagcttatgtggg

SEQ ID NO: 3187284 - DNA, 25 bp, Homo sapien
gagaatcaacttttaaaagcttatg

SEQ ID NO: 3187285 - DNA, 25 bp, Homo sapien
acagagccaggccatatcagggaca

SEQ ID NO: 3187286 - DNA, 25 bp, Homo sapien
gatctcttagttgcgctgtttcaag

SEQ ID NO: 3187287 - DNA, 25 bp, Homo sapien
tgcatatgcacctgattttcatggg

SEQ ID NO: 3187288 - DNA, 25 bp, Homo sapien
gagcccaacctcaacaatgtagcaa

SEQ ID NO: 3187289 - DNA, 25 bp, Homo sapien
ggcttccagtagttttgaccaatga

SEQ ID NO: 3187290 - DNA, 25 bp, Homo sapien
gggtttcagtaacactgcctccagc

SEQ ID NO: 3187291 - DNA, 25 bp, Homo sapien
taaagcttatctagacagtcctctc

SEQ ID NO: 3187292 - DNA, 25 bp, Homo sapien
ttgtttcccatagtgtctccagcag

SEQ ID NO: 3187293 - DNA, 25 bp, Homo sapien
tttcagccaatcacatgcggtcaac

SEQ ID NO: 3187294 - DNA, 25 bp, Homo sapien
cattgcatccgagtttcagccaatc

SEQ ID NO: 3187295 - DNA, 25 bp, Homo sapien
tcacatgcggtcaactgttcaaacc

SEQ ID NO: 3187296 - DNA, 25 bp, Homo sapien
gtctcagccaatcattgcatccgag

SEQ ID NO: 3187297 - DNA, 25 bp, Homo sapien
gggagatccgaaattcacatttgtc

SEQ ID NO: 3187298 - DNA, 25 bp, Homo sapien
ggaatacaacatgcttggcagtctt

SEQ ID NO: 3187299 - DNA, 25 bp, Homo sapien
gatgtgtatcttaaaccctaaggaa

SEQ ID NO: 3187300 - DNA, 25 bp, Homo sapien
actatgtgtcagttaggtacctgca

SEQ ID NO: 3187301 - DNA, 25 bp, Homo sapien
gacttagaacactatataaacattg

SEQ ID NO: 3187302 - DNA, 25 bp, Homo sapien
tttagaagttctattgtgacctgcc

SEQ ID NO: 3187303 - DNA, 25 bp, Homo sapien
acattgttgataaagtagcagcagg

SEQ ID NO: 3187304 - DNA, 25 bp, Homo sapien
gttctattgtgacctgcctggccaa

SEQ ID NO: 3187305 - DNA, 25 bp, Homo sapien
tagccctacaatgaccctaagtgtt

SEQ ID NO: 3187306 - DNA, 25 bp, Homo sapien
tgttcaatgaaaacagtcacatgtc

SEQ ID NO: 3187307 - DNA, 25 bp, Homo sapien
attattttggggagccacgaaccat

SEQ ID NO: 3187308 - DNA, 25 bp, Homo sapien
gggcatccctatttcctaagacaca

SEQ ID NO: 3187309 - DNA, 25 bp, Homo sapien
cacctattaaggacacagtgttgat

SEQ ID NO: 3187310 - DNA, 25 bp, Homo sapien
taaacttgacacctattaaggacac

SEQ ID NO: 3187311 - DNA, 25 bp, Homo sapien
cacttcagtaaacttgacacctatt

SEQ ID NO: 3187312 - DNA, 25 bp, Homo sapien
aggacacagtgttgatcatcagaca

SEQ ID NO: 3187313 - DNA, 25 bp, Homo sapien
ttattcaactctataccaactgtta

SEQ ID NO: 3187314 - DNA, 25 bp, Homo sapien
actctataccaactgttacaagtct

SEQ ID NO: 3187315 - DNA, 25 bp, Homo sapien
tattcaactctataccaactgttac

SEQ ID NO: 3187316 - DNA, 25 bp, Homo sapien
tcaactctataccaactgttacaag

SEQ ID NO: 3187317 - DNA, 25 bp, Homo sapien
caaaaataatgaagtagcttgcttt

SEQ ID NO: 3187318 - DNA, 25 bp, Homo sapien
taacagctcaatgaggttgggtact

SEQ ID NO: 3187319 - DNA, 25 bp, Homo sapien
cttgctttggtcacatagttactcc

SEQ ID NO: 3187320 - DNA, 25 bp, Homo sapien
cctgctggtctcagttcaaggtgtg

SEQ ID NO: 3187321 - DNA, 25 bp, Homo sapien
tgttaccacatagacaaggttgttc

SEQ ID NO: 3187322 - DNA, 25 bp, Homo sapien
aggttgttcaactgttgctgcttcc

SEQ ID NO: 3187323 - DNA, 25 bp, Homo sapien
gcttcctcaaagctcgatcactgga

SEQ ID NO: 3187324 - DNA, 25 bp, Homo sapien
gaaatccacaattctgtcaccaggt

SEQ ID NO: 3187325 - DNA, 25 bp, Homo sapien
ctaaaaaggatgaaaggagagataa

SEQ ID NO: 3187326 - DNA, 25 bp, Homo sapien
taaaaaggatgaaaggagagataaa

SEQ ID NO: 3187327 - DNA, 25 bp, Homo sapien
aaaaggatgaaaggagagataaaat

SEQ ID NO: 3187328 - DNA, 25 bp, Homo sapien
aaggatgaaaggagagataaaatac

SEQ ID NO: 3187329 - DNA, 25 bp, Homo sapien
cagtaagacaaacaagttagctttg

SEQ ID NO: 3187330 - DNA, 25 bp, Homo sapien
taagacaaacaagttagctttggtc

SEQ ID NO: 3187331 - DNA, 25 bp, Homo sapien
tatagaaaagtctcataatcttaga

SEQ ID NO: 3187332 - DNA, 25 bp, Homo sapien
caagttagctttggtccccacagct

SEQ ID NO: 3187333 - DNA, 25 bp, Homo sapien
catgtgagcaaggacaattccaaca

SEQ ID NO: 3187334 - DNA, 25 bp, Homo sapien
gtgagcaaggacaattccaacatgg

SEQ ID NO: 3187335 - DNA, 25 bp, Homo sapien
ctgacatgatggcagcatgtgagca

SEQ ID NO: 3187336 - DNA, 25 bp, Homo sapien
gcatgtgagcaaggacaattccaac

SEQ ID NO: 3187337 - DNA, 25 bp, Homo sapien
aagaaaagacaatgcctgtgccaca

SEQ ID NO: 3187338 - DNA, 25 bp, Homo sapien
ctccaagagcgggataaaccaaatt

SEQ ID NO: 3187339 - DNA, 25 bp, Homo sapien
catatttgacttgggtgagtgacta

SEQ ID NO: 3187340 - DNA, 25 bp, Homo sapien
aaccaaatttggctagctgaactgt

SEQ ID NO: 3187341 - DNA, 25 bp, Homo sapien
caaatgttgcttaaacccagttcat

SEQ ID NO: 3187342 - DNA, 25 bp, Homo sapien
cacttctcttcttagcacgaattaa

SEQ ID NO: 3187343 - DNA, 25 bp, Homo sapien
aatgttgcttaaacccagttcatca

SEQ ID NO: 3187344 - DNA, 25 bp, Homo sapien
tcttagcacgaattaatgataattc

SEQ ID NO: 3187345 - DNA, 25 bp, Homo sapien
cgtgtctgcaaaggaaacgaatagc

SEQ ID NO: 3187346 - DNA, 25 bp, Homo sapien
atcgtgtctgcaaaggaaacgaata

SEQ ID NO: 3187347 - DNA, 25 bp, Homo sapien
tgcaaaggaaacgaatagcatattt

SEQ ID NO: 3187348 - DNA, 25 bp, Homo sapien
tgtctgcaaaggaaacgaatagcat

SEQ ID NO: 3187349 - DNA, 25 bp, Homo sapien
agagatctatccttcagtatgcaga

SEQ ID NO: 3187350 - DNA, 25 bp, Homo sapien
tttaattctcatgattgtggaaatg

SEQ ID NO: 3187351 - DNA, 25 bp, Homo sapien
tgtggttctggaattagaaggcaga

SEQ ID NO: 3187352 - DNA, 25 bp, Homo sapien
tcttggtatggcacatcaccattgc

SEQ ID NO: 3187353 - DNA, 25 bp, Homo sapien
tttcaagacgtcctttcttgttctc

SEQ ID NO: 3187354 - DNA, 25 bp, Homo sapien
tccctaagacccttgattatgtttg

SEQ ID NO: 3187355 - DNA, 25 bp, Homo sapien
tccttgtttcactaatgtattatct

SEQ ID NO: 3187356 - DNA, 25 bp, Homo sapien
attatatccttgtttcactaatgta

SEQ ID NO: 3187357 - DNA, 25 bp, Homo sapien
tgagccacatagaagtcaacaatct

SEQ ID NO: 3187358 - DNA, 25 bp, Homo sapien
gagccacatagaagtcaacaatctc

SEQ ID NO: 3187359 - DNA, 25 bp, Homo sapien
taaatagttctcatttggccatacc

SEQ ID NO: 3187360 - DNA, 25 bp, Homo sapien
ataaaaccaggccttagcactaagt

SEQ ID NO: 3187361 - DNA, 25 bp, Homo sapien
ggaccacttagctacacatatcaat

SEQ ID NO: 3187362 - DNA, 25 bp, Homo sapien
taagttccctcttaactcacagtgc

SEQ ID NO: 3187363 - DNA, 25 bp, Homo sapien
cagcaagggcatgtgacgaaggaag

SEQ ID NO: 3187364 - DNA, 25 bp, Homo sapien
cagtgctcaatcaccatgtctgttg

SEQ ID NO: 3187365 - DNA, 25 bp, Homo sapien
catgtctgttgccactccacaagca

SEQ ID NO: 3187366 - DNA, 25 bp, Homo sapien
gcccgtgttttgatacagtgctcaa

SEQ ID NO: 3187367 - DNA, 25 bp, Homo sapien
tgtgtcctggcttatacccatgttg

SEQ ID NO: 3187368 - DNA, 25 bp, Homo sapien
tttgtgtcctggcttatacccatgt

SEQ ID NO: 3187369 - DNA, 25 bp, Homo sapien
tgtcctggcttatacccatgttggt

SEQ ID NO: 3187370 - DNA, 25 bp, Homo sapien
tcctggcttatacccatgttggtgt

SEQ ID NO: 3187371 - DNA, 25 bp, Homo sapien
gtatgataaagttttcttgaattgt

SEQ ID NO: 3187372 - DNA, 25 bp, Homo sapien
tgtatgataaagttttcttgaattg

SEQ ID NO: 3187373 - DNA, 25 bp, Homo sapien
cttgtatgataaagttttcttgaat

SEQ ID NO: 3187374 - DNA, 25 bp, Homo sapien
tgataaagttttcttgaattgttca

SEQ ID NO: 3187375 - DNA, 25 bp, Homo sapien
ctatgagccttcgttggggtgggag

SEQ ID NO: 3187376 - DNA, 25 bp, Homo sapien
ctgcaaatctgcacagaatcatgtg

SEQ ID NO: 3187377 - DNA, 25 bp, Homo sapien
tatgagccttcgttggggtgggagc

SEQ ID NO: 3187378 - DNA, 25 bp, Homo sapien
agctgtctggtctgcaaatctgcac

SEQ ID NO: 3187379 - DNA, 25 bp, Homo sapien
gcagctcttgctcgatccagatcca

SEQ ID NO: 3187380 - DNA, 25 bp, Homo sapien
tggggactcccacaatcatgttatt

SEQ ID NO: 3187381 - DNA, 25 bp, Homo sapien
tctctggctccatggatatcacttg

SEQ ID NO: 3187382 - DNA, 25 bp, Homo sapien
cacttgaacggagtatccacattct

SEQ ID NO: 3187383 - DNA, 25 bp, Homo sapien
tcacattggcaagatcagaggagct

SEQ ID NO: 3187384 - DNA, 25 bp, Homo sapien
taaaataaaggctgtaagtgcgctg

SEQ ID NO: 3187385 - DNA, 25 bp, Homo sapien
tatgccaagaacctcctgaatgcca

SEQ ID NO: 3187386 - DNA, 25 bp, Homo sapien
catttgtgatgctttgcagggagcc

SEQ ID NO: 3187387 - DNA, 25 bp, Homo sapien
tagatcagtgagcagtagccttgca

SEQ ID NO: 3187388 - DNA, 25 bp, Homo sapien
caaccttcggagagatagatcagtg

SEQ ID NO: 3187389 - DNA, 25 bp, Homo sapien
cagacatcacagctggagaatgcca

SEQ ID NO: 3187390 - DNA, 25 bp, Homo sapien
tcttgaaccatggaatgggcaactc

SEQ ID NO: 3187391 - DNA, 25 bp, Homo sapien
taaccatgccaacttagtagccatc

SEQ ID NO: 3187392 - DNA, 25 bp, Homo sapien
gccggaaatgcctatagcacatgcc

SEQ ID NO: 3187393 - DNA, 25 bp, Homo sapien
gatcttggaacatatcttctgctga

SEQ ID NO: 3187394 - DNA, 25 bp, Homo sapien
ggttcagtaccattccaggattcag

SEQ ID NO: 3187395 - DNA, 25 bp, Homo sapien
caggatcctgatcaagggtctaagg

SEQ ID NO: 3187396 - DNA, 25 bp, Homo sapien
gatcctgatcaagggtctaagggtg

SEQ ID NO: 3187397 - DNA, 25 bp, Homo sapien
gacaggatcctgatcaagggtctaa

SEQ ID NO: 3187398 - DNA, 25 bp, Homo sapien
ggatcctgatcaagggtctaagggt

SEQ ID NO: 3187399 - DNA, 25 bp, Homo sapien
gttgtggatgttatctgatgcatcc

SEQ ID NO: 3187400 - DNA, 25 bp, Homo sapien
gactgttgtggatgttatctgatgc

SEQ ID NO: 3187401 - DNA, 25 bp, Homo sapien
gaaagactgttgtggatgttatctg

SEQ ID NO: 3187402 - DNA, 25 bp, Homo sapien
cttctgaaagactgttgtggatgtt

SEQ ID NO: 3187403 - DNA, 25 bp, Homo sapien
aataaattgtcgttctacccttctg

SEQ ID NO: 3187404 - DNA, 25 bp, Homo sapien
aattgtcgttctacccttctggact

SEQ ID NO: 3187405 - DNA, 25 bp, Homo sapien
tcgttctacccttctggactccaaa

SEQ ID NO: 3187406 - DNA, 25 bp, Homo sapien
tcataataaattgtcgttctaccct

SEQ ID NO: 3187407 - DNA, 25 bp, Homo sapien
gctgtgtaaagtgttccaccaaaga

SEQ ID NO: 3187408 - DNA, 25 bp, Homo sapien
ttccaccaaagagacacaattgatg

SEQ ID NO: 3187409 - DNA, 25 bp, Homo sapien
tgtgtaaagtgggtcacatcttaca

SEQ ID NO: 3187410 - DNA, 25 bp, Homo sapien
aagagacacaattgatgctacactg

SEQ ID NO: 3187411 - DNA, 25 bp, Homo sapien
gcaaagcagccagttcttgcctgag

SEQ ID NO: 3187412 - DNA, 25 bp, Homo sapien
gttcttgcctgagttcatctttctt

SEQ ID NO: 3187413 - DNA, 25 bp, Homo sapien
caaagcagccagttcttgcctgagt

SEQ ID NO: 3187414 - DNA, 25 bp, Homo sapien
tgcaggggtagctgcaccgcccgcg

SEQ ID NO: 3187415 - DNA, 25 bp, Homo sapien
tgagagtctcgaggaacccccagcc

SEQ ID NO: 3187416 - DNA, 25 bp, Homo sapien
ggctactgctgccgctcccggagga

SEQ ID NO: 3187417 - DNA, 25 bp, Homo sapien
gcagtggcgcgcgaggaacaggttg

SEQ ID NO: 3187418 - DNA, 25 bp, Homo sapien
gcgccgatgggaggcgcccctctga

SEQ ID NO: 3187419 - DNA, 25 bp, Homo sapien
tcccgtcgaactcggcggccgcctg

SEQ ID NO: 3187420 - DNA, 25 bp, Homo sapien
cctgcaggtagagcgaggataccag

SEQ ID NO: 3187421 - DNA, 25 bp, Homo sapien
cgcctgcaggtagagcgaggatacc

SEQ ID NO: 3187422 - DNA, 25 bp, Homo sapien
caggtagagcgaggataccagcacc

SEQ ID NO: 3187423 - DNA, 25 bp, Homo sapien
cctcagtcctaattcccgagccggg

SEQ ID NO: 3187424 - DNA, 25 bp, Homo sapien
gccacgctgtgcggtggcccaactt

SEQ ID NO: 3187425 - DNA, 25 bp, Homo sapien
ctcggcgtaggtggctaaaccgcgc

SEQ ID NO: 3187426 - DNA, 25 bp, Homo sapien
taaaccgcgccctcagagccgagat

SEQ ID NO: 3187427 - DNA, 25 bp, Homo sapien
ccgtagcccagtcgctgactcgcac

SEQ ID NO: 3187428 - DNA, 25 bp, Homo sapien
gcccaccctccggtcctcattttga

SEQ ID NO: 3187429 - DNA, 25 bp, Homo sapien
agaaaaccaaatggagaggcccaca

SEQ ID NO: 3187430 - DNA, 25 bp, Homo sapien
tcgcacccactctctgtgtgagcgg

SEQ ID NO: 3187431 - DNA, 25 bp, Homo sapien
taaaacctcttttcgcagcagccat

SEQ ID NO: 3187432 - DNA, 25 bp, Homo sapien
aggcgaccgggcgacggtgtgcgcc

SEQ ID NO: 3187433 - DNA, 25 bp, Homo sapien
agaggtcgctgaaggaaggcgaccg

SEQ ID NO: 3187434 - DNA, 25 bp, Homo sapien
gacggtgtgcgccagagtaaaacct

SEQ ID NO: 3187435 - DNA, 25 bp, Homo sapien
gattaaaggtaaaacaggtgcggca

SEQ ID NO: 3187436 - DNA, 25 bp, Homo sapien
gaattgattcgttccaagattaaag

SEQ ID NO: 3187437 - DNA, 25 bp, Homo sapien
gcctccgggtacaagaaagcgaatc

SEQ ID NO: 3187438 - DNA, 25 bp, Homo sapien
tatttcctccgaccaggtagtgaac

SEQ ID NO: 3187439 - DNA, 25 bp, Homo sapien
gggtgaaagccaggtttgactgatt

SEQ ID NO: 3187440 - DNA, 25 bp, Homo sapien
aagccaggtttgactgattcaccat

SEQ ID NO: 3187441 - DNA, 25 bp, Homo sapien
tgaaagccaggtttgactgattcac

SEQ ID NO: 3187442 - DNA, 25 bp, Homo sapien
ccaggtttgactgattcaccataaa

SEQ ID NO: 3187443 - DNA, 25 bp, Homo sapien
cgatgacactatttgcctgggccac

SEQ ID NO: 3187444 - DNA, 25 bp, Homo sapien
tgacactgtccccaagactggcgag

SEQ ID NO: 3187445 - DNA, 25 bp, Homo sapien
tcccaccataacgacataggccaat

SEQ ID NO: 3187446 - DNA, 25 bp, Homo sapien
aacgacataggccaatcgatgacac

SEQ ID NO: 3187447 - DNA, 25 bp, Homo sapien
tgaagtccccaggcttgatactcac

SEQ ID NO: 3187448 - DNA, 25 bp, Homo sapien
ctgaagtccccaggcttgatactca

SEQ ID NO: 3187449 - DNA, 25 bp, Homo sapien
actgaagtccccaggcttgatactc

SEQ ID NO: 3187450 - DNA, 25 bp, Homo sapien
gagctgcttggctagaccctttgca

SEQ ID NO: 3187451 - DNA, 25 bp, Homo sapien
gtgcgagctgcttggctagaccctt

SEQ ID NO: 3187452 - DNA, 25 bp, Homo sapien
tgcttggctagaccctttgcacggg

SEQ ID NO: 3187453 - DNA, 25 bp, Homo sapien
tgcgagctgcttggctagacccttt

SEQ ID NO: 3187454 - DNA, 25 bp, Homo sapien
cttggtcccagtgtgtacatgcgtg

SEQ ID NO: 3187455 - DNA, 25 bp, Homo sapien
tcaagcagcatatccctgtggcagg

SEQ ID NO: 3187456 - DNA, 25 bp, Homo sapien
tacatgcgtgggcaacttcaagcag

SEQ ID NO: 3187457 - DNA, 25 bp, Homo sapien
gacagatctagttgctgaactggca

SEQ ID NO: 3187458 - DNA, 25 bp, Homo sapien
ttcagaactacatgcagtaaaacca

SEQ ID NO: 3187459 - DNA, 25 bp, Homo sapien
tcccactccgtaaagggccacgtga

SEQ ID NO: 3187460 - DNA, 25 bp, Homo sapien
ggccacgtgaaagtcttcgttcaga

SEQ ID NO: 3187461 - DNA, 25 bp, Homo sapien
taattcctcccacataacttgtttg

SEQ ID NO: 3187462 - DNA, 25 bp, Homo sapien
tattgcctagggcttcaagagtaca

SEQ ID NO: 3187463 - DNA, 25 bp, Homo sapien
gagtacatgagaatcagcccttccg

SEQ ID NO: 3187464 - DNA, 25 bp, Homo sapien
tatccatgtatcagcatcagtaggg

SEQ ID NO: 3187465 - DNA, 25 bp, Homo sapien
caccccagtgaaaagatgacttagg

SEQ ID NO: 3187466 - DNA, 25 bp, Homo sapien
ctttgagctggcaccttatcctggc

SEQ ID NO: 3187467 - DNA, 25 bp, Homo sapien
attctctgccttaagacgtagaaag

SEQ ID NO: 3187468 - DNA, 25 bp, Homo sapien
tttgagctggcaccttatcctggct

SEQ ID NO: 3187469 - DNA, 25 bp, Homo sapien
tcctggctattctctgccttaagac

SEQ ID NO: 3187470 - DNA, 25 bp, Homo sapien
ccttatatccgtgtctcctgtgaga

SEQ ID NO: 3187471 - DNA, 25 bp, Homo sapien
tctcaccaggttgacttcctacagg

SEQ ID NO: 3187472 - DNA, 25 bp, Homo sapien
gagctccacagggaaatgaggcaca

SEQ ID NO: 3187473 - DNA, 25 bp, Homo sapien
tgatagactcctcgcagcaatgcag

SEQ ID NO: 3187474 - DNA, 25 bp, Homo sapien
tcttgtctgctacactaatatctag

SEQ ID NO: 3187475 - DNA, 25 bp, Homo sapien
atggaatgccattccccctcttgtc

SEQ ID NO: 3187476 - DNA, 25 bp, Homo sapien
tgtcagtttgaccattatatcaccc

SEQ ID NO: 3187477 - DNA, 25 bp, Homo sapien
taatatctagacaggcttcacctgt

SEQ ID NO: 3187478 - DNA, 25 bp, Homo sapien
gattggtcatgtaagtgatggcaca

SEQ ID NO: 3187479 - DNA, 25 bp, Homo sapien
ggacctccctaacccatgatttcag

SEQ ID NO: 3187480 - DNA, 25 bp, Homo sapien
aaatcaattttgttactgggcctcg

SEQ ID NO: 3187481 - DNA, 25 bp, Homo sapien
tgaactattgttagagggacctccc

SEQ ID NO: 3187482 - DNA, 25 bp, Homo sapien
tcctccagcaggtaagtctagtaag

SEQ ID NO: 3187483 - DNA, 25 bp, Homo sapien
gaaacgccccagtgtctaagacact

SEQ ID NO: 3187484 - DNA, 25 bp, Homo sapien
gagaaaggtttacaagcatagatgc

SEQ ID NO: 3187485 - DNA, 25 bp, Homo sapien
taccactcgggaaatgtgcaaccta

SEQ ID NO: 3187486 - DNA, 25 bp, Homo sapien
taacatgtagaaggaacggcgaaat

SEQ ID NO: 3187487 - DNA, 25 bp, Homo sapien
gaggagttccactgactagatttgg

SEQ ID NO: 3187488 - DNA, 25 bp, Homo sapien
ctagatttgggattgtttgagcatc

SEQ ID NO: 3187489 - DNA, 25 bp, Homo sapien
catgtgaaaagaatagaagctggct

SEQ ID NO: 3187490 - DNA, 25 bp, Homo sapien
ctgtgaaaagaagatggcatgcatt

SEQ ID NO: 3187491 - DNA, 25 bp, Homo sapien
tgtgaaaagaagatggcatgcatta

SEQ ID NO: 3187492 - DNA, 25 bp, Homo sapien
gtgaaaagaagatggcatgcattat

SEQ ID NO: 3187493 - DNA, 25 bp, Homo sapien
gaaaagaagatggcatgcattattt

SEQ ID NO: 3187494 - DNA, 25 bp, Homo sapien
cttgtttggcccgatacattcacca

SEQ ID NO: 3187495 - DNA, 25 bp, Homo sapien
acttgtttggcccgatacattcacc

SEQ ID NO: 3187496 - DNA, 25 bp, Homo sapien
ttgtttggcccgatacattcaccat

SEQ ID NO: 3187497 - DNA, 25 bp, Homo sapien
ccagcataaccaggatgacacttgc

SEQ ID NO: 3187498 - DNA, 25 bp, Homo sapien
gatagaggtgtcttcgattgtgtat

SEQ ID NO: 3187499 - DNA, 25 bp, Homo sapien
cgattgtgtatttatgtcagactgt

SEQ ID NO: 3187500 - DNA, 25 bp, Homo sapien
cttcgattgtgtatttatgtcagac

SEQ ID NO: 3187501 - DNA, 25 bp, Homo sapien
ttaatttgggagtgatagaggtgtc

SEQ ID NO: 3187502 - DNA, 25 bp, Homo sapien
aaaaatagccatggaaagtagtttg

SEQ ID NO: 3187503 - DNA, 25 bp, Homo sapien
caatttgtttaattgtcctttgata

SEQ ID NO: 3187504 - DNA, 25 bp, Homo sapien
tacaatttgtttaattgtcctttga

SEQ ID NO: 3187505 - DNA, 25 bp, Homo sapien
atacaatttgtttaattgtcctttg

SEQ ID NO: 3187506 - DNA, 25 bp, Homo sapien
tgtttaattgtcctttgataaaaga

SEQ ID NO: 3187507 - DNA, 25 bp, Homo sapien
tgaacattggcatccaataaccaga

SEQ ID NO: 3187508 - DNA, 25 bp, Homo sapien
tagcaaagcagtcaactttcagatg

SEQ ID NO: 3187509 - DNA, 25 bp, Homo sapien
gatgtaactagtccacaaaattagt

SEQ ID NO: 3187510 - DNA, 25 bp, Homo sapien
taaagcccttagatttttgtgctta

SEQ ID NO: 3187511 - DNA, 25 bp, Homo sapien
tgtaggtaaccaccttaatattaga

SEQ ID NO: 3187512 - DNA, 25 bp, Homo sapien
cgcccggctggaaccatacatcttt

SEQ ID NO: 3187513 - DNA, 25 bp, Homo sapien
acggcgcccggctggaaccatacat

SEQ ID NO: 3187514 - DNA, 25 bp, Homo sapien
ggcgcccggctggaaccatacatct

SEQ ID NO: 3187515 - DNA, 25 bp, Homo sapien
cccggctggaaccatacatctttca

SEQ ID NO: 3187516 - DNA, 25 bp, Homo sapien
aaagaggctgttcactgccttggtc

SEQ ID NO: 3187517 - DNA, 25 bp, Homo sapien
ggcaggtgtctcctaaaaacttcac

SEQ ID NO: 3187518 - DNA, 25 bp, Homo sapien
gcaggtgtctcctaaaaacttcaca

SEQ ID NO: 3187519 - DNA, 25 bp, Homo sapien
tgatggtctggatgatattccctga

SEQ ID NO: 3187520 - DNA, 25 bp, Homo sapien
tctggatgatattccctgacagctg

SEQ ID NO: 3187521 - DNA, 25 bp, Homo sapien
ttccctgacagctgactggtgttaa

SEQ ID NO: 3187522 - DNA, 25 bp, Homo sapien
tgactggtgttaatatccctagtga

SEQ ID NO: 3187523 - DNA, 25 bp, Homo sapien
tattaacgggcatataagtatccaa

SEQ ID NO: 3187524 - DNA, 25 bp, Homo sapien
ggcatataagtatccaaaacatgga

SEQ ID NO: 3187525 - DNA, 25 bp, Homo sapien
gttattaacgggcatataagtatcc

SEQ ID NO: 3187526 - DNA, 25 bp, Homo sapien
taacgggcatataagtatccaaaac

SEQ ID NO: 3187527 - DNA, 25 bp, Homo sapien
taaagggccccttaggattgctatg

SEQ ID NO: 3187528 - DNA, 25 bp, Homo sapien
tattcataatctggactggagctgc

SEQ ID NO: 3187529 - DNA, 25 bp, Homo sapien
gttttagagaatggcttcgaccgaa

SEQ ID NO: 3187530 - DNA, 25 bp, Homo sapien
tctacaatttggctccagtctgggc

SEQ ID NO: 3187531 - DNA, 25 bp, Homo sapien
tacatgtcagttaagtatccctagg

SEQ ID NO: 3187532 - DNA, 25 bp, Homo sapien
gcagctcataaacaaggagtattta

SEQ ID NO: 3187533 - DNA, 25 bp, Homo sapien
gaaacttttgtgagttcctgatggg

SEQ ID NO: 3187534 - DNA, 25 bp, Homo sapien
ttcggtgtttacagtttcaggcagc

SEQ ID NO: 3187535 - DNA, 25 bp, Homo sapien
tctggaaccaccagcataagtaccc

SEQ ID NO: 3187536 - DNA, 25 bp, Homo sapien
caccagcataagtacccatttagca

SEQ ID NO: 3187537 - DNA, 25 bp, Homo sapien
gaaccaccagcataagtacccattt

SEQ ID NO: 3187538 - DNA, 25 bp, Homo sapien
tggaaccaccagcataagtacccat

SEQ ID NO: 3187539 - DNA, 25 bp, Homo sapien
ggggcttcaggccacactcatttag

SEQ ID NO: 3187540 - DNA, 25 bp, Homo sapien
ggcttcaggccacactcatttagat

SEQ ID NO: 3187541 - DNA, 25 bp, Homo sapien
ctgtgcttacagggccggggcttca

SEQ ID NO: 3187542 - DNA, 25 bp, Homo sapien
gtgcttacagggccggggcttcagg

SEQ ID NO: 3187543 - DNA, 25 bp, Homo sapien
ccgttgagacagtagcacttgtagc

SEQ ID NO: 3187544 - DNA, 25 bp, Homo sapien
ttgagcaggaaccatccggcatgag

SEQ ID NO: 3187545 - DNA, 25 bp, Homo sapien
cagtagcacttgtagctgccgtaag

SEQ ID NO: 3187546 - DNA, 25 bp, Homo sapien
gcatgagcatatatccgttgagaca

SEQ ID NO: 3187547 - DNA, 25 bp, Homo sapien
cctttaacaacatcacagccatact

SEQ ID NO: 3187548 - DNA, 25 bp, Homo sapien
caacatcacagccatactgacagtt

SEQ ID NO: 3187549 - DNA, 25 bp, Homo sapien
gcaccgtatttgtcctttaacaaca

SEQ ID NO: 3187550 - DNA, 25 bp, Homo sapien
gatgggcactggcaccgtatttgtc

SEQ ID NO: 3187551 - DNA, 25 bp, Homo sapien
tgcctaaatctagggcaggaggctc

SEQ ID NO: 3187552 - DNA, 25 bp, Homo sapien
ttgcagatgtagctcccaaaagtgt

SEQ ID NO: 3187553 - DNA, 25 bp, Homo sapien
ggaggctcttcctgtagcacattca

SEQ ID NO: 3187554 - DNA, 25 bp, Homo sapien
gaagcctttatgacacttgcagatg

SEQ ID NO: 3187555 - DNA, 25 bp, Homo sapien
tgttataacatcgagcaaagctgct

SEQ ID NO: 3187556 - DNA, 25 bp, Homo sapien
catcaccctggtatccttctttaca

SEQ ID NO: 3187557 - DNA, 25 bp, Homo sapien
tacatttgcacttgtaggacccacg

SEQ ID NO: 3187558 - DNA, 25 bp, Homo sapien
gctgcactgatactgaccaagtgag

SEQ ID NO: 3187559 - DNA, 25 bp, Homo sapien
tatagttgtcagtccggtggttggc

SEQ ID NO: 3187560 - DNA, 25 bp, Homo sapien
aatatatggtgtcttcggaggccac

SEQ ID NO: 3187561 - DNA, 25 bp, Homo sapien
tgttgtcaactgtaatccctcctgg

SEQ ID NO: 3187562 - DNA, 25 bp, Homo sapien
ggaggccaccaagtacttccaacat

SEQ ID NO: 3187563 - DNA, 25 bp, Homo sapien
actgaaatagtgctaaggttcctta

SEQ ID NO: 3187564 - DNA, 25 bp, Homo sapien
ttttctcagggcaacaacgcacata

SEQ ID NO: 3187565 - DNA, 25 bp, Homo sapien
gaaggagactgccaaatagtggcca

SEQ ID NO: 3187566 - DNA, 25 bp, Homo sapien
cctgtctcggagaataaggatgatt

SEQ ID NO: 3187567 - DNA, 25 bp, Homo sapien
aaagaaagggaatgtacaggtactg

SEQ ID NO: 3187568 - DNA, 25 bp, Homo sapien
agaaagggaatgtacaggtactgaa

SEQ ID NO: 3187569 - DNA, 25 bp, Homo sapien
tctgcataaactaaaagaaagggaa

SEQ ID NO: 3187570 - DNA, 25 bp, Homo sapien
gtacaggtactgaagcaagtgacag

SEQ ID NO: 3187571 - DNA, 25 bp, Homo sapien
aggggatgaggcaaccccactctct

SEQ ID NO: 3187572 - DNA, 25 bp, Homo sapien
ttttatagcccagctgactgacagc

SEQ ID NO: 3187573 - DNA, 25 bp, Homo sapien
catacttgcaatatacccagctggg

SEQ ID NO: 3187574 - DNA, 25 bp, Homo sapien
cacagctgactgtggatacccaggg

SEQ ID NO: 3187575 - DNA, 25 bp, Homo sapien
agtaataatcccagaacgtttgcac

SEQ ID NO: 3187576 - DNA, 25 bp, Homo sapien
gccaaggaatactcccttctctttg

SEQ ID NO: 3187577 - DNA, 25 bp, Homo sapien
cgatgttcctattgtttttagcaaa

SEQ ID NO: 3187578 - DNA, 25 bp, Homo sapien
ggagatgtagaacactatgaaacag

SEQ ID NO: 3187579 - DNA, 25 bp, Homo sapien
cttcatcgtctgcactgactcctct

SEQ ID NO: 3187580 - DNA, 25 bp, Homo sapien
tttgcttcatcgtctgcactgactc

SEQ ID NO: 3187581 - DNA, 25 bp, Homo sapien
tgcttcatcgtctgcactgactcct

SEQ ID NO: 3187582 - DNA, 25 bp, Homo sapien
aagtcatttgaaggttgccgtggaa

SEQ ID NO: 3187583 - DNA, 25 bp, Homo sapien
cacaaagtccatggtcaaaattaca

SEQ ID NO: 3187584 - DNA, 25 bp, Homo sapien
cctgatccatccacaaagtccatgg

SEQ ID NO: 3187585 - DNA, 25 bp, Homo sapien
gattggttcccagtgcaagtcattg

SEQ ID NO: 3187586 - DNA, 25 bp, Homo sapien
ggttcccagtgcaagtcattgtctt

SEQ ID NO: 3187587 - DNA, 25 bp, Homo sapien
aattccttgtagctatcagtggcag

SEQ ID NO: 3187588 - DNA, 25 bp, Homo sapien
ttttagtggtaactctgggcgaggc

SEQ ID NO: 3187589 - DNA, 25 bp, Homo sapien
cagtggcagacagagtgctgagtca

SEQ ID NO: 3187590 - DNA, 25 bp, Homo sapien
tgttctccagagatcaaggttccag

SEQ ID NO: 3187591 - DNA, 25 bp, Homo sapien
ggagggtaaataatagatgctgcaa

SEQ ID NO: 3187592 - DNA, 25 bp, Homo sapien
gatacaagttggaacattaactaag

SEQ ID NO: 3187593 - DNA, 25 bp, Homo sapien
cagtttacagtatcacaatatctca

SEQ ID NO: 3187594 - DNA, 25 bp, Homo sapien
attgattcagtgtcaagcaagttac

SEQ ID NO: 3187595 - DNA, 25 bp, Homo sapien
tgataacgttgtccaacacccctgg

SEQ ID NO: 3187596 - DNA, 25 bp, Homo sapien
gctcatggaaagtacaagtaatgcc

SEQ ID NO: 3187597 - DNA, 25 bp, Homo sapien
tgaccctcaccagtttatgataacg

SEQ ID NO: 3187598 - DNA, 25 bp, Homo sapien
taaagggccctatatctgcttattc

SEQ ID NO: 3187599 - DNA, 25 bp, Homo sapien
gctttggctgccgacactgtcagat

SEQ ID NO: 3187600 - DNA, 25 bp, Homo sapien
caggtcccctgaatgcatgaggcgg

SEQ ID NO: 3187601 - DNA, 25 bp, Homo sapien
tgatgtcagcccctcgcaaggtgat

SEQ ID NO: 3187602 - DNA, 25 bp, Homo sapien
gccgagaggtagcaccaagcgtgca

SEQ ID NO: 3187603 - DNA, 25 bp, Homo sapien
aattcagatcccagagttctcctat

SEQ ID NO: 3187604 - DNA, 25 bp, Homo sapien
tggatctttaccagggttagggaga

SEQ ID NO: 3187605 - DNA, 25 bp, Homo sapien
cacaggttgcaatgaagaaggatga

SEQ ID NO: 3187606 - DNA, 25 bp, Homo sapien
ctcctatgaaaggaaaacgtcccag

SEQ ID NO: 3187607 - DNA, 25 bp, Homo sapien
cagtgtgaccacgccttttttcacc

SEQ ID NO: 3187608 - DNA, 25 bp, Homo sapien
agtgtgaccacgccttttttcacct

SEQ ID NO: 3187609 - DNA, 25 bp, Homo sapien
ccagtgtgaccacgccttttttcac

SEQ ID NO: 3187610 - DNA, 25 bp, Homo sapien
cccagtgtgaccacgccttttttca

SEQ ID NO: 3187611 - DNA, 25 bp, Homo sapien
cagagcagtggccttttttcaagct

SEQ ID NO: 3187612 - DNA, 25 bp, Homo sapien
agcagtggccttttttcaagctcac

SEQ ID NO: 3187613 - DNA, 25 bp, Homo sapien
ttagcgttcttcagagcagtggcct

SEQ ID NO: 3187614 - DNA, 25 bp, Homo sapien
tcttcagagcagtggccttttttca

SEQ ID NO: 3187615 - DNA, 25 bp, Homo sapien
aaaagaggatagagcaacataggag

SEQ ID NO: 3187616 - DNA, 25 bp, Homo sapien
agatgagaattggaaaaagaggata

SEQ ID NO: 3187617 - DNA, 25 bp, Homo sapien
gagttcattgttagttctggagttg

SEQ ID NO: 3187618 - DNA, 25 bp, Homo sapien
caacataggagttcattgttagttc

SEQ ID NO: 3187619 - DNA, 25 bp, Homo sapien
cattgggattgcacaaaagcaggcc

SEQ ID NO: 3187620 - DNA, 25 bp, Homo sapien
tctgcgatgcccctgtatttcaagg

SEQ ID NO: 3187621 - DNA, 25 bp, Homo sapien
tactactaaggagggattacgtgcc

SEQ ID NO: 3187622 - DNA, 25 bp, Homo sapien
gatggtatggctcacgcatgctgaa

SEQ ID NO: 3187623 - DNA, 25 bp, Homo sapien
gccacactaggacattactgagata

SEQ ID NO: 3187624 - DNA, 25 bp, Homo sapien
agtattctaacaatggcccctgcca

SEQ ID NO: 3187625 - DNA, 25 bp, Homo sapien
taacttgtcacacacgaagcagaga

SEQ ID NO: 3187626 - DNA, 25 bp, Homo sapien
cttagtgcatatggagaacagctgg

SEQ ID NO: 3187627 - DNA, 25 bp, Homo sapien
agcagatcccgaacaccagagtggg

SEQ ID NO: 3187628 - DNA, 25 bp, Homo sapien
ctacaaatcacgagtgtctgcaagc

SEQ ID NO: 3187629 - DNA, 25 bp, Homo sapien
caaatcacgagtgtctgcaagcaga

SEQ ID NO: 3187630 - DNA, 25 bp, Homo sapien
tctgcaagcagatcccgaacaccag

SEQ ID NO: 3187631 - DNA, 25 bp, Homo sapien
caagcccaagagacctgaatccctc

SEQ ID NO: 3187632 - DNA, 25 bp, Homo sapien
tgtatctgcttctcaagcatgcctt

SEQ ID NO: 3187633 - DNA, 25 bp, Homo sapien
acaagcccaagagacctgaatccct

SEQ ID NO: 3187634 - DNA, 25 bp, Homo sapien
cacaagcccaagagacctgaatccc

SEQ ID NO: 3187635 - DNA, 25 bp, Homo sapien
ctggtggcccacatcccaagtgccc

SEQ ID NO: 3187636 - DNA, 25 bp, Homo sapien
tgaaagcaggaagaactaaacttgg

SEQ ID NO: 3187637 - DNA, 25 bp, Homo sapien
gaactaaacttggcctggtggccca

SEQ ID NO: 3187638 - DNA, 25 bp, Homo sapien
aggaagaactaaacttggcctggtg

SEQ ID NO: 3187639 - DNA, 25 bp, Homo sapien
agctttggcctagctcctgtgcttg

SEQ ID NO: 3187640 - DNA, 25 bp, Homo sapien
ggtttcacaggcctggcgtcctgcc

SEQ ID NO: 3187641 - DNA, 25 bp, Homo sapien
caccagagctttggcctagctcctg

SEQ ID NO: 3187642 - DNA, 25 bp, Homo sapien
caggcctgttttagcaggtttcaca

SEQ ID NO: 3187643 - DNA, 25 bp, Homo sapien
ttgaaaccaaggcttaacaggagga

SEQ ID NO: 3187644 - DNA, 25 bp, Homo sapien
ctaacgtgcagggttatgttaccag

SEQ ID NO: 3187645 - DNA, 25 bp, Homo sapien
cagctccctaacgtgcagggttatg

SEQ ID NO: 3187646 - DNA, 25 bp, Homo sapien
cagggttatgttaccagtggtgatg

SEQ ID NO: 3187647 - DNA, 25 bp, Homo sapien
ggcactaagtaacaccagattgtta

SEQ ID NO: 3187648 - DNA, 25 bp, Homo sapien
gagcaggcactaagtaacaccagat

SEQ ID NO: 3187649 - DNA, 25 bp, Homo sapien
aagtaacaccagattgttatttctg

SEQ ID NO: 3187650 - DNA, 25 bp, Homo sapien
ctagagcaggcactaagtaacacca

SEQ ID NO: 3187651 - DNA, 25 bp, Homo sapien
tctgcgagtctctgtggatgcgtac

SEQ ID NO: 3187652 - DNA, 25 bp, Homo sapien
ccaattgttgagctttctgcgagtc

SEQ ID NO: 3187653 - DNA, 25 bp, Homo sapien
tgccactctgagctcggaccaattg

SEQ ID NO: 3187654 - DNA, 25 bp, Homo sapien
gatgcgtactgctttgtattcactt

SEQ ID NO: 3187655 - DNA, 25 bp, Homo sapien
tctctgctctttggcctaaatttcc

SEQ ID NO: 3187656 - DNA, 25 bp, Homo sapien
ccaaatggaatcatcctgtgtacag

SEQ ID NO: 3187657 - DNA, 25 bp, Homo sapien
ttggcctaaatttccaaatggaatc

SEQ ID NO: 3187658 - DNA, 25 bp, Homo sapien
cctgtgtacagtaacctgtgtctga

SEQ ID NO: 3187659 - DNA, 25 bp, Homo sapien
cagtattatctatattgactataga

SEQ ID NO: 3187660 - DNA, 25 bp, Homo sapien
ttgtcttttgtacttataaatatga

SEQ ID NO: 3187661 - DNA, 25 bp, Homo sapien
atataaacgtgtgttttacaacata

SEQ ID NO: 3187662 - DNA, 25 bp, Homo sapien
aatatgaaatttgtatataaacgtg

SEQ ID NO: 3187663 - DNA, 25 bp, Homo sapien
aatctcagacacatggagaactaca

SEQ ID NO: 3187664 - DNA, 25 bp, Homo sapien
gagaactacaccttgtctccagttg

SEQ ID NO: 3187665 - DNA, 25 bp, Homo sapien
ggctgatttgatctggaaccacaat

SEQ ID NO: 3187666 - DNA, 25 bp, Homo sapien
gctacaagtcaagtccacctgcatg

SEQ ID NO: 3187667 - DNA, 25 bp, Homo sapien
aacccctgtgcccaagtgtgctgct

SEQ ID NO: 3187668 - DNA, 25 bp, Homo sapien
tgagctgacggccaacccctgtgcc

SEQ ID NO: 3187669 - DNA, 25 bp, Homo sapien
gctgacggccaacccctgtgcccaa

SEQ ID NO: 3187670 - DNA, 25 bp, Homo sapien
cagtgagctgacggccaacccctgt

SEQ ID NO: 3187671 - DNA, 25 bp, Homo sapien
cttggttaatgtgttcataaagact

SEQ ID NO: 3187672 - DNA, 25 bp, Homo sapien
gactttcattgatttgttcctttaa

SEQ ID NO: 3187673 - DNA, 25 bp, Homo sapien
ctcatttaacttagatttgtgttta

SEQ ID NO: 3187674 - DNA, 25 bp, Homo sapien
aatctcatttaacttagatttgtgt

SEQ ID NO: 3187675 - DNA, 25 bp, Homo sapien
tgagggacattgctccatcttccct

SEQ ID NO: 3187676 - DNA, 25 bp, Homo sapien
tcctccccttgtactgcatgataaa

SEQ ID NO: 3187677 - DNA, 25 bp, Homo sapien
ccaagtggtatcttccatttcacct

SEQ ID NO: 3187678 - DNA, 25 bp, Homo sapien
catttcaccttgaatgagctctctt

SEQ ID NO: 3187679 - DNA, 25 bp, Homo sapien
gaacagacagtcctgtcgattgtgt

SEQ ID NO: 3187680 - DNA, 25 bp, Homo sapien
cacactgccacataaagcccaagaa

SEQ ID NO: 3187681 - DNA, 25 bp, Homo sapien
ttgccctgaaaaagctgtcctccat

SEQ ID NO: 3187682 - DNA, 25 bp, Homo sapien
gctgtcctccattgtactgaacaga

SEQ ID NO: 3187683 - DNA, 25 bp, Homo sapien
cagacaaaactagatgtccagattg

SEQ ID NO: 3187684 - DNA, 25 bp, Homo sapien
ctctcagacaaaactagatgtccag

SEQ ID NO: 3187685 - DNA, 25 bp, Homo sapien
caaaactagatgtccagattgttgc

SEQ ID NO: 3187686 - DNA, 25 bp, Homo sapien
aaactagatgtccagattgttgcat

SEQ ID NO: 3187687 - DNA, 25 bp, Homo sapien
tgaagaaccaagagtgtgactgcca

SEQ ID NO: 3187688 - DNA, 25 bp, Homo sapien
cctcaaatatgaagaaccaagagtg

SEQ ID NO: 3187689 - DNA, 25 bp, Homo sapien
gccaaaacttagtgtggcatcagca

SEQ ID NO: 3187690 - DNA, 25 bp, Homo sapien
aaaacttagtgtggcatcagcacca

SEQ ID NO: 3187691 - DNA, 25 bp, Homo sapien
gattcccatctgttagctctaagag

SEQ ID NO: 3187692 - DNA, 25 bp, Homo sapien
gctctaagagaggataggatgtgaa

SEQ ID NO: 3187693 - DNA, 25 bp, Homo sapien
cagccgtttgaatctctgtggagcc

SEQ ID NO: 3187694 - DNA, 25 bp, Homo sapien
cattagttactatcaaggattccca

SEQ ID NO: 3187695 - DNA, 25 bp, Homo sapien
tactgactgaagtctcaggattttc

SEQ ID NO: 3187696 - DNA, 25 bp, Homo sapien
tgcttaaggacaataaccctagtaa

SEQ ID NO: 3187697 - DNA, 25 bp, Homo sapien
gattttctgagaaccttccataatg

SEQ ID NO: 3187698 - DNA, 25 bp, Homo sapien
gaaatctctgtatgatactgactga

SEQ ID NO: 3187699 - DNA, 25 bp, Homo sapien
gaatctatgcgtttgcaaagtgttg

SEQ ID NO: 3187700 - DNA, 25 bp, Homo sapien
tctcacattccatttggggacaagt

SEQ ID NO: 3187701 - DNA, 25 bp, Homo sapien
gttcaccatgaacaccataaagccg

SEQ ID NO: 3187702 - DNA, 25 bp, Homo sapien
catttgaatctatgcgtttgcaaag

SEQ ID NO: 3187703 - DNA, 25 bp, Homo sapien
catggatgccatacacttctaacct

SEQ ID NO: 3187704 - DNA, 25 bp, Homo sapien
ggtaataatcccagtcatggatgcc

SEQ ID NO: 3187705 - DNA, 25 bp, Homo sapien
gtaatatatggcctaaagaaatccc

SEQ ID NO: 3187706 - DNA, 25 bp, Homo sapien
ccactcaagaactgcctgcctatgg

SEQ ID NO: 3187707 - DNA, 25 bp, Homo sapien
cgggcactgctcgcattccggcttt

SEQ ID NO: 3187708 - DNA, 25 bp, Homo sapien
gcgggcactgctcgcattccggctt

SEQ ID NO: 3187709 - DNA, 25 bp, Homo sapien
ggacctggctgcttatagaccccga

SEQ ID NO: 3187710 - DNA, 25 bp, Homo sapien
actggtcaagaacccctagtctgga

SEQ ID NO: 3187711 - DNA, 25 bp, Homo sapien
tatccagtgaaaaagcgggctagag

SEQ ID NO: 3187712 - DNA, 25 bp, Homo sapien
gacagtacaattggagagctcacaa

SEQ ID NO: 3187713 - DNA, 25 bp, Homo sapien
gccctaactctctttggttctgtaa

SEQ ID NO: 3187714 - DNA, 25 bp, Homo sapien
ttctgtaaggccatgagagatcagg

SEQ ID NO: 3187715 - DNA, 25 bp, Homo sapien
ggaagtaatcccaaaatctagcaac

SEQ ID NO: 3187716 - DNA, 25 bp, Homo sapien
agccttcagttggaagaagatacca

SEQ ID NO: 3187717 - DNA, 25 bp, Homo sapien
tcctatgaaagcagtggaaagtggg

SEQ ID NO: 3187718 - DNA, 25 bp, Homo sapien
tgcagacagtcaacaccatcctatg

SEQ ID NO: 3187719 - DNA, 25 bp, Homo sapien
gactgtagaaaaggcataactgtgg

SEQ ID NO: 3187720 - DNA, 25 bp, Homo sapien
gggaaatgttgggtcagaactccca

SEQ ID NO: 3187721 - DNA, 25 bp, Homo sapien
ctgggataccttactacttgggaat

SEQ ID NO: 3187722 - DNA, 25 bp, Homo sapien
tctgggataccttactacttgggaa

SEQ ID NO: 3187723 - DNA, 25 bp, Homo sapien
ctctgggataccttactacttggga

SEQ ID NO: 3187724 - DNA, 25 bp, Homo sapien
gccagtggtataattgagagtctag

SEQ ID NO: 3187725 - DNA, 25 bp, Homo sapien
tatgctgtttgaaagctggataccc

SEQ ID NO: 3187726 - DNA, 25 bp, Homo sapien
gatacaaatcccagtctaaaggcag

SEQ ID NO: 3187727 - DNA, 25 bp, Homo sapien
ttttagtctgttatgaagcatcctg

SEQ ID NO: 3187728 - DNA, 25 bp, Homo sapien
ggtactgtctccatccctagctaca

SEQ ID NO: 3187729 - DNA, 25 bp, Homo sapien
ccgagctgtggagccgcttgctgat

SEQ ID NO: 3187730 - DNA, 25 bp, Homo sapien
ttcagaatagatagagaaccgagct

SEQ ID NO: 3187731 - DNA, 25 bp, Homo sapien
ttcctgtaaatcaggttcacctgag

SEQ ID NO: 3187732 - DNA, 25 bp, Homo sapien
actatcaggagcagtgagtggcccc

SEQ ID NO: 3187733 - DNA, 25 bp, Homo sapien
taatccagttttccgtgtcgtagtg

SEQ ID NO: 3187734 - DNA, 25 bp, Homo sapien
tagaggactatcaggagcagtgagt

SEQ ID NO: 3187735 - DNA, 25 bp, Homo sapien
ttgtctttgtgcttgcctgcgtccc

SEQ ID NO: 3187736 - DNA, 25 bp, Homo sapien
cagcgtctggtgcactaagccgtag

SEQ ID NO: 3187737 - DNA, 25 bp, Homo sapien
tgaaatgcagcgtctggtgcactaa

SEQ ID NO: 3187738 - DNA, 25 bp, Homo sapien
gcactaagccgtagcggcagcagca

SEQ ID NO: 3187739 - DNA, 25 bp, Homo sapien
gctggggccctgtgtagaagctcca

SEQ ID NO: 3187740 - DNA, 25 bp, Homo sapien
agcgtctgagctcccggcgttccag

SEQ ID NO: 3187741 - DNA, 25 bp, Homo sapien
ttggctcgcgagcaaagggcagcgt

SEQ ID NO: 3187742 - DNA, 25 bp, Homo sapien
ggcgttccaggagtggcctcttttg

SEQ ID NO: 3187743 - DNA, 25 bp, Homo sapien
agctcccggcgttccaggagtggcc

SEQ ID NO: 3187744 - DNA, 25 bp, Homo sapien
tgaaaagctcggatctgtgtttggg

SEQ ID NO: 3187745 - DNA, 25 bp, Homo sapien
tccgcgaaggttaaccttggctgac

SEQ ID NO: 3187746 - DNA, 25 bp, Homo sapien
agggtgaaaagctcggatctgtgtt

SEQ ID NO: 3187747 - DNA, 25 bp, Homo sapien
ggaaggccaggcttgcgctcctcgc

SEQ ID NO: 3187748 - DNA, 25 bp, Homo sapien
ctttctctctcgctatatgtccttt

SEQ ID NO: 3187749 - DNA, 25 bp, Homo sapien
cacaagtcggggtctttcctcagcg

SEQ ID NO: 3187750 - DNA, 25 bp, Homo sapien
tctttcctcagcgttgggtcgcggt

SEQ ID NO: 3187751 - DNA, 25 bp, Homo sapien
tctctcgctatatgtcctttcgtgg

SEQ ID NO: 3187752 - DNA, 25 bp, Homo sapien
tcacccagtattttcaatcgacccc

SEQ ID NO: 3187753 - DNA, 25 bp, Homo sapien
cattccctcacccagtattttcaat

SEQ ID NO: 3187754 - DNA, 25 bp, Homo sapien
tccctcacccagtattttcaatcga

SEQ ID NO: 3187755 - DNA, 25 bp, Homo sapien
ctcacccagtattttcaatcgaccc

SEQ ID NO: 3187756 - DNA, 25 bp, Homo sapien
gaggtgtccttgctgaaagcctgag

SEQ ID NO: 3187757 - DNA, 25 bp, Homo sapien
gacccaatgaggtgtccttgctgaa

SEQ ID NO: 3187758 - DNA, 25 bp, Homo sapien
tgagaaaggacccaatgaggtgtcc

SEQ ID NO: 3187759 - DNA, 25 bp, Homo sapien
ctatagcagtgagaaaggacccaat

SEQ ID NO: 3187760 - DNA, 25 bp, Homo sapien
atgaagcggaggaccacgggttccg

SEQ ID NO: 3187761 - DNA, 25 bp, Homo sapien
gaggaccacgggttccgagacagcc

SEQ ID NO: 3187762 - DNA, 25 bp, Homo sapien
acgggttccgagacagccacagcag

SEQ ID NO: 3187763 - DNA, 25 bp, Homo sapien
accacgggttccgagacagccacag

SEQ ID NO: 3187764 - DNA, 25 bp, Homo sapien
ccgagtgagtgacccgccacgacgt

SEQ ID NO: 3187765 - DNA, 25 bp, Homo sapien
tacgatcgcaatcggcgatccccga

SEQ ID NO: 3187766 - DNA, 25 bp, Homo sapien
gcaatcggcgatccccgagtgagtg

SEQ ID NO: 3187767 - DNA, 25 bp, Homo sapien
tcggcgatccccgagtgagtgaccc

SEQ ID NO: 3187768 - DNA, 25 bp, Homo sapien
tcaagtaccacatagcaaagccatg

SEQ ID NO: 3187769 - DNA, 25 bp, Homo sapien
tgcaatggctggtccctctgtctga

SEQ ID NO: 3187770 - DNA, 25 bp, Homo sapien
gaacggactacccattagcagcgca

SEQ ID NO: 3187771 - DNA, 25 bp, Homo sapien
gttaagatttgcagactagacccat

SEQ ID NO: 3187772 - DNA, 25 bp, Homo sapien
gtttaaaggatggctataaggaatg

SEQ ID NO: 3187773 - DNA, 25 bp, Homo sapien
tttaaaggatggctataaggaatga

SEQ ID NO: 3187774 - DNA, 25 bp, Homo sapien
ctggagggtttaaaggatggctata

SEQ ID NO: 3187775 - DNA, 25 bp, Homo sapien
tggagggtttaaaggatggctataa

SEQ ID NO: 3187776 - DNA, 25 bp, Homo sapien
acagcctgctttccctttactgatg

SEQ ID NO: 3187777 - DNA, 25 bp, Homo sapien
agacagcctgctttccctttactga

SEQ ID NO: 3187778 - DNA, 25 bp, Homo sapien
ctgctttccctttactgatgaggac

SEQ ID NO: 3187779 - DNA, 25 bp, Homo sapien
tttactgatgaggacatagggggtc

SEQ ID NO: 3187780 - DNA, 25 bp, Homo sapien
gccccacgatgacaacattgggaat

SEQ ID NO: 3187781 - DNA, 25 bp, Homo sapien
taggaacgctacacaaatttgaaag

SEQ ID NO: 3187782 - DNA, 25 bp, Homo sapien
tgaatcaactgacccaatgctttct

SEQ ID NO: 3187783 - DNA, 25 bp, Homo sapien
taatcatacgatgcctctaatgcag

SEQ ID NO: 3187784 - DNA, 25 bp, Homo sapien
aggtctgtctgatgctgcagttagc

SEQ ID NO: 3187785 - DNA, 25 bp, Homo sapien
tatttgtagaacatgcgctatggct

SEQ ID NO: 3187786 - DNA, 25 bp, Homo sapien
taatgttacgcttagggcacagtga

SEQ ID NO: 3187787 - DNA, 25 bp, Homo sapien
tttctagggatcacaaactagcctg

SEQ ID NO: 3187788 - DNA, 25 bp, Homo sapien
gacaggatgacggccgggaagaggt

SEQ ID NO: 3187789 - DNA, 25 bp, Homo sapien
gctcttcacatctcagacggggcga

SEQ ID NO: 3187790 - DNA, 25 bp, Homo sapien
ttcacatctcagacggggcgacggg

SEQ ID NO: 3187791 - DNA, 25 bp, Homo sapien
tcttcacatctcagacggggcgacg

SEQ ID NO: 3187792 - DNA, 25 bp, Homo sapien
acccttagtggacacagcacgtttc

SEQ ID NO: 3187793 - DNA, 25 bp, Homo sapien
ctgccgccttctgcagtgtttgtcc

SEQ ID NO: 3187794 - DNA, 25 bp, Homo sapien
taacccttagtggacacagcacgtt

SEQ ID NO: 3187795 - DNA, 25 bp, Homo sapien
ccgccttctgcagtgtttgtccctg

SEQ ID NO: 3187796 - DNA, 25 bp, Homo sapien
ttttgccaagagacggcagaaaatc

SEQ ID NO: 3187797 - DNA, 25 bp, Homo sapien
gtagagaaacttgctgcttaagata

SEQ ID NO: 3187798 - DNA, 25 bp, Homo sapien
tctgcacccttctgctccagtctct

SEQ ID NO: 3187799 - DNA, 25 bp, Homo sapien
tattcaatgatttgatctgcctctg

SEQ ID NO: 3187800 - DNA, 25 bp, Homo sapien
ctcttcagaacagcatcattatttg

SEQ ID NO: 3187801 - DNA, 25 bp, Homo sapien
tctgcctgaattagctcttgtttca

SEQ ID NO: 3187802 - DNA, 25 bp, Homo sapien
ttgaatttctgcctgaattagctct

SEQ ID NO: 3187803 - DNA, 25 bp, Homo sapien
agcattttcaactcgaagtttcttc

SEQ ID NO: 3187804 - DNA, 25 bp, Homo sapien
cagtttagcattttcaactcgaagt

SEQ ID NO: 3187805 - DNA, 25 bp, Homo sapien
ctgctgtagactgtatcacattttc

SEQ ID NO: 3187806 - DNA, 25 bp, Homo sapien
gaattagcgtgcagtggagtaccag

SEQ ID NO: 3187807 - DNA, 25 bp, Homo sapien
tctttggtaccagaagatacggttg

SEQ ID NO: 3187808 - DNA, 25 bp, Homo sapien
gatacggttgttactgctgtagact

SEQ ID NO: 3187809 - DNA, 25 bp, Homo sapien
tgcaaccaattcgaagatccagacg

SEQ ID NO: 3187810 - DNA, 25 bp, Homo sapien
gagtcggcacttccagctattgatt

SEQ ID NO: 3187811 - DNA, 25 bp, Homo sapien
gaggaacatgattcaccaggccact

SEQ ID NO: 3187812 - DNA, 25 bp, Homo sapien
gatccagacgggaaacatctattgg

SEQ ID NO: 3187813 - DNA, 25 bp, Homo sapien
atttccagagctatgctagatttat

SEQ ID NO: 3187814 - DNA, 25 bp, Homo sapien
catttccagagctatgctagattta

SEQ ID NO: 3187815 - DNA, 25 bp, Homo sapien
ggaacagacccatttggaggagcca

SEQ ID NO: 3187816 - DNA, 25 bp, Homo sapien
gaacagacccatttggaggagccaa

SEQ ID NO: 3187817 - DNA, 25 bp, Homo sapien
aggaacagacccatttggaggagcc

SEQ ID NO: 3187818 - DNA, 25 bp, Homo sapien
caaaatgcactgagtactactagga

SEQ ID NO: 3187819 - DNA, 25 bp, Homo sapien
gatgggatcattcctatactaaact

SEQ ID NO: 3187820 - DNA, 25 bp, Homo sapien
gaagccattgtcctaagtaacccaa

SEQ ID NO: 3187821 - DNA, 25 bp, Homo sapien
tgagagctaaacctaaacattgcgt

SEQ ID NO: 3187822 - DNA, 25 bp, Homo sapien
atggaaaaacattgtacactcatgg

SEQ ID NO: 3187823 - DNA, 25 bp, Homo sapien
aggaatgaacctaatgaaggaggtg

SEQ ID NO: 3187824 - DNA, 25 bp, Homo sapien
cagagttaatactattactatcaaa

SEQ ID NO: 3187825 - DNA, 25 bp, Homo sapien
tatacactaaagttcaagctgagag

SEQ ID NO: 3187826 - DNA, 25 bp, Homo sapien
taaaatctacctccctttatgataa

SEQ ID NO: 3187827 - DNA, 25 bp, Homo sapien
aaagcaatataccacaatcaagtag

SEQ ID NO: 3187828 - DNA, 25 bp, Homo sapien
taaaaccctcaatagactaggcatc

SEQ ID NO: 3187829 - DNA, 25 bp, Homo sapien
tcaaaaagcaatataccacaatcaa

SEQ ID NO: 3187830 - DNA, 25 bp, Homo sapien
cagttaagcaactaggaggatggaa

SEQ ID NO: 3187831 - DNA, 25 bp, Homo sapien
gagttcatttggcagctatctagct

SEQ ID NO: 3187832 - DNA, 25 bp, Homo sapien
tatgttcagaaggtagagccactag

SEQ ID NO: 3187833 - DNA, 25 bp, Homo sapien
gaagaatgggatatgtgtccttccc

SEQ ID NO: 3187834 - DNA, 25 bp, Homo sapien
tcctttaaggacgtttgattcgaca

SEQ ID NO: 3187835 - DNA, 25 bp, Homo sapien
tattgtgtggcaaagcaggcactcc

SEQ ID NO: 3187836 - DNA, 25 bp, Homo sapien
tactgttcagggagacctaagcact

SEQ ID NO: 3187837 - DNA, 25 bp, Homo sapien
ttctcagatctagaaagaaagtgcc

SEQ ID NO: 3187838 - DNA, 25 bp, Homo sapien
cctcaaagggaactcctttgtatgt

SEQ ID NO: 3187839 - DNA, 25 bp, Homo sapien
atcttcttcttaggattcagctcct

SEQ ID NO: 3187840 - DNA, 25 bp, Homo sapien
actgttgctcatggtttgagcccta

SEQ ID NO: 3187841 - DNA, 25 bp, Homo sapien
tgattccactgttgctcatggtttg

SEQ ID NO: 3187842 - DNA, 25 bp, Homo sapien
tgctcatggtttgagccctacatac

SEQ ID NO: 3187843 - DNA, 25 bp, Homo sapien
tttgattccactgttgctcatggtt

SEQ ID NO: 3187844 - DNA, 25 bp, Homo sapien
tctaatgtcttttggtagtggaagc

SEQ ID NO: 3187845 - DNA, 25 bp, Homo sapien
taatgtcttttggtagtggaagcat

SEQ ID NO: 3187846 - DNA, 25 bp, Homo sapien
tctctaatgtcttttggtagtggaa

SEQ ID NO: 3187847 - DNA, 25 bp, Homo sapien
tttctctaatgtcttttggtagtgg

SEQ ID NO: 3187848 - DNA, 25 bp, Homo sapien
tagaaaaacttcaagccagtaggaa

SEQ ID NO: 3187849 - DNA, 25 bp, Homo sapien
tattagaaactactgtggcaactgt

SEQ ID NO: 3187850 - DNA, 25 bp, Homo sapien
tattagtcagggttactctggcagc

SEQ ID NO: 3187851 - DNA, 25 bp, Homo sapien
tgaaatttcatgcatcctgtgccta

SEQ ID NO: 3187852 - DNA, 25 bp, Homo sapien
ataatctttaaaaagaagctagaat

SEQ ID NO: 3187853 - DNA, 25 bp, Homo sapien
caaataatctttaaaaagaagctag

SEQ ID NO: 3187854 - DNA, 25 bp, Homo sapien
aagatataaattatcctttattagg

SEQ ID NO: 3187855 - DNA, 25 bp, Homo sapien
gatataaattatcctttattaggta

SEQ ID NO: 3187856 - DNA, 25 bp, Homo sapien
ccaacaattgttaatgacgctcagt

SEQ ID NO: 3187857 - DNA, 25 bp, Homo sapien
gtgtgtaagcccaaatcatcagtaa

SEQ ID NO: 3187858 - DNA, 25 bp, Homo sapien
tataatatatcctggcctaccagag

SEQ ID NO: 3187859 - DNA, 25 bp, Homo sapien
cctgtaaaggtaaggcccagattct

SEQ ID NO: 3187860 - DNA, 25 bp, Homo sapien
aatataattgagaaaaattagagca

SEQ ID NO: 3187861 - DNA, 25 bp, Homo sapien
cattagataatttgatctggggtac

SEQ ID NO: 3187862 - DNA, 25 bp, Homo sapien
gtttgatgaacgatttaatcatcag

SEQ ID NO: 3187863 - DNA, 25 bp, Homo sapien
ctacctaggtagttgaaatattatt

SEQ ID NO: 3187864 - DNA, 25 bp, Homo sapien
tgcaggccagtggaagtttgttagc

SEQ ID NO: 3187865 - DNA, 25 bp, Homo sapien
catattgatccttttagcagtttct

SEQ ID NO: 3187866 - DNA, 25 bp, Homo sapien
catctttgcacacactattcccttt

SEQ ID NO: 3187867 - DNA, 25 bp, Homo sapien
cacactattccctttccctaaaatg

SEQ ID NO: 3187868 - DNA, 25 bp, Homo sapien
gtttctggaataagctacattttct

SEQ ID NO: 3187869 - DNA, 25 bp, Homo sapien
gtgctgaagctgatacctgggattc

SEQ ID NO: 3187870 - DNA, 25 bp, Homo sapien
gccattctctccagcagttaaatat

SEQ ID NO: 3187871 - DNA, 25 bp, Homo sapien
tgaagctgatacctgggattctgag

SEQ ID NO: 3187872 - DNA, 25 bp, Homo sapien
aaatatgtttgaagaattgtggctc

SEQ ID NO: 3187873 - DNA, 25 bp, Homo sapien
cctgttggaaatgcttctgacatca

SEQ ID NO: 3187874 - DNA, 25 bp, Homo sapien
gccctgttggaaatgcttctgacat

SEQ ID NO: 3187875 - DNA, 25 bp, Homo sapien
gaaatgcttctgacatcaacctcaa

SEQ ID NO: 3187876 - DNA, 25 bp, Homo sapien
gttggaaatgcttctgacatcaacc

SEQ ID NO: 3187877 - DNA, 25 bp, Homo sapien
tgtggacacattttgattaggcatc

SEQ ID NO: 3187878 - DNA, 25 bp, Homo sapien
tgcttcttctgtcaagggccaagaa

SEQ ID NO: 3187879 - DNA, 25 bp, Homo sapien
gggactgttgatccctgcctgtgta

SEQ ID NO: 3187880 - DNA, 25 bp, Homo sapien
tgtgtattaccatccatcacccctg

SEQ ID NO: 3187881 - DNA, 25 bp, Homo sapien
actgtgaagaatgtgcttgcccaga

SEQ ID NO: 3187882 - DNA, 25 bp, Homo sapien
tcagtgccaaccatgcagtgggtaa

SEQ ID NO: 3187883 - DNA, 25 bp, Homo sapien
gactgaggttaatgcctcgggcaac

SEQ ID NO: 3187884 - DNA, 25 bp, Homo sapien
catacaaaggtggtgattaaagcca

SEQ ID NO: 3187885 - DNA, 25 bp, Homo sapien
ttgaatattttttccgtataggctg

SEQ ID NO: 3187886 - DNA, 25 bp, Homo sapien
attttttccgtataggctgctaggg

SEQ ID NO: 3187887 - DNA, 25 bp, Homo sapien
gacctttagccctataatatttgaa

SEQ ID NO: 3187888 - DNA, 25 bp, Homo sapien
aatattttttccgtataggctgcta

SEQ ID NO: 3187889 - DNA, 25 bp, Homo sapien
caagggctcttaggaatacaactac

SEQ ID NO: 3187890 - DNA, 25 bp, Homo sapien
ggaccaacagactaattctcaaagt

SEQ ID NO: 3187891 - DNA, 25 bp, Homo sapien
gatggaaacctcaaagcagtgaatt

SEQ ID NO: 3187892 - DNA, 25 bp, Homo sapien
tggtttatgctaactcaagggctct

SEQ ID NO: 3187893 - DNA, 25 bp, Homo sapien
acaggagagtgctcagggacggtcc

SEQ ID NO: 3187894 - DNA, 25 bp, Homo sapien
gaggaaaactaccagagagtgcagc

SEQ ID NO: 3187895 - DNA, 25 bp, Homo sapien
gggcatagccccaaagcccacttga

SEQ ID NO: 3187896 - DNA, 25 bp, Homo sapien
cccatggagaataatagataagagg

SEQ ID NO: 3187897 - DNA, 25 bp, Homo sapien
tcaaacatgtggttcagggtgcttc

SEQ ID NO: 3187898 - DNA, 25 bp, Homo sapien
aaacatgtggttcagggtgcttctc

SEQ ID NO: 3187899 - DNA, 25 bp, Homo sapien
tttttcaaacatgtggttcagggtg

SEQ ID NO: 3187900 - DNA, 25 bp, Homo sapien
aattctgagctcatataattcctct

SEQ ID NO: 3187901 - DNA, 25 bp, Homo sapien
tcttataccactcatattatctttt

SEQ ID NO: 3187902 - DNA, 25 bp, Homo sapien
tctccaggattttgatgggcctgtc

SEQ ID NO: 3187903 - DNA, 25 bp, Homo sapien
gcctgtcttcctgaggtaaaactta

SEQ ID NO: 3187904 - DNA, 25 bp, Homo sapien
tcttttaaatacactcggggagcag

SEQ ID NO: 3187905 - DNA, 25 bp, Homo sapien
acacaataccttcagtgttcttgca

SEQ ID NO: 3187906 - DNA, 25 bp, Homo sapien
ctacacaataccttcagtgttcttg

SEQ ID NO: 3187907 - DNA, 25 bp, Homo sapien
tacacaataccttcagtgttcttgc

SEQ ID NO: 3187908 - DNA, 25 bp, Homo sapien
tttggctcttgtcctcgtacacacc

SEQ ID NO: 3187909 - DNA, 25 bp, Homo sapien
tcttgtcctcgtacacaccaccact

SEQ ID NO: 3187910 - DNA, 25 bp, Homo sapien
ggctcttgtcctcgtacacaccacc

SEQ ID NO: 3187911 - DNA, 25 bp, Homo sapien
ttggctcttgtcctcgtacacacca

SEQ ID NO: 3187912 - DNA, 25 bp, Homo sapien
tcggagttgctgaccataaatgttg

SEQ ID NO: 3187913 - DNA, 25 bp, Homo sapien
gaccataaatgttggtgtagagatt

SEQ ID NO: 3187914 - DNA, 25 bp, Homo sapien
caagcagttcggagttgctgaccat

SEQ ID NO: 3187915 - DNA, 25 bp, Homo sapien
caaaatcatcctacaagcagttcgg

SEQ ID NO: 3187916 - DNA, 25 bp, Homo sapien
aactgtggcaatggaagcatggagt

SEQ ID NO: 3187917 - DNA, 25 bp, Homo sapien
aagcatggagttctgcacaggagca

SEQ ID NO: 3187918 - DNA, 25 bp, Homo sapien
caatggaagcatggagttctgcaca

SEQ ID NO: 3187919 - DNA, 25 bp, Homo sapien
tggcaatggaagcatggagttctgc

SEQ ID NO: 3187920 - DNA, 25 bp, Homo sapien
tcaggatgaggtgcacatattggag

SEQ ID NO: 3187921 - DNA, 25 bp, Homo sapien
caattctcttttggagtcatctttt

SEQ ID NO: 3187922 - DNA, 25 bp, Homo sapien
gagagctggacgacatcctctctgg

SEQ ID NO: 3187923 - DNA, 25 bp, Homo sapien
tcctctctggatgttgccaattctc

SEQ ID NO: 3187924 - DNA, 25 bp, Homo sapien
ttaagaaggccacaaattgtccctg

SEQ ID NO: 3187925 - DNA, 25 bp, Homo sapien
ctggttggaactgtgaagactggac

SEQ ID NO: 3187926 - DNA, 25 bp, Homo sapien
tagactcattatcctttctagcaga

SEQ ID NO: 3187927 - DNA, 25 bp, Homo sapien
gaagcagcataactgacgtagtttg

SEQ ID NO: 3187928 - DNA, 25 bp, Homo sapien
cacttaaagccagcatggcactggg

SEQ ID NO: 3187929 - DNA, 25 bp, Homo sapien
ctggacctgggagctatgctgcctg

SEQ ID NO: 3187930 - DNA, 25 bp, Homo sapien
tgtcttccagcaactagggcctgaa

SEQ ID NO: 3187931 - DNA, 25 bp, Homo sapien
cccatggtgagtactgcctgatatt

SEQ ID NO: 3187932 - DNA, 25 bp, Homo sapien
caattggatggctctgagtttagta

SEQ ID NO: 3187933 - DNA, 25 bp, Homo sapien
ccataagtgttctattaagcgcaag

SEQ ID NO: 3187934 - DNA, 25 bp, Homo sapien
taagcgcaagtaatacagttaattt

SEQ ID NO: 3187935 - DNA, 25 bp, Homo sapien
tctgttaattcaaactctagttctt

SEQ ID NO: 3187936 - DNA, 25 bp, Homo sapien
tcttttcactggaaatgtcaaagcc

SEQ ID NO: 3187937 - DNA, 25 bp, Homo sapien
aaatggttgtactacctgaccccat

SEQ ID NO: 3187938 - DNA, 25 bp, Homo sapien
ggaaatgtcaaagccacgaacacag

SEQ ID NO: 3187939 - DNA, 25 bp, Homo sapien
caaagccacgaacacagttattagg

SEQ ID NO: 3187940 - DNA, 25 bp, Homo sapien
cagttgtgaactggtagcagccagg

SEQ ID NO: 3187941 - DNA, 25 bp, Homo sapien
tttggcatttctccagagcaagtac

SEQ ID NO: 3187942 - DNA, 25 bp, Homo sapien
cagcatctctgggtgacatagtttt

SEQ ID NO: 3187943 - DNA, 25 bp, Homo sapien
cctctagcattggaaagggatctgc

SEQ ID NO: 3187944 - DNA, 25 bp, Homo sapien
atcatacactggacctgttggtggg

SEQ ID NO: 3187945 - DNA, 25 bp, Homo sapien
tggaactgatcaaaatgcccatcaa

SEQ ID NO: 3187946 - DNA, 25 bp, Homo sapien
caaagacttggaactgatcaaaatg

SEQ ID NO: 3187947 - DNA, 25 bp, Homo sapien
catacactggacctgttggtgggta

SEQ ID NO: 3187948 - DNA, 25 bp, Homo sapien
tctccacgaactctcctatagatcc

SEQ ID NO: 3187949 - DNA, 25 bp, Homo sapien
tccacgaactctcctatagatcctt

SEQ ID NO: 3187950 - DNA, 25 bp, Homo sapien
cacgaactctcctatagatccttct

SEQ ID NO: 3187951 - DNA, 25 bp, Homo sapien
cttctccacgaactctcctatagat

SEQ ID NO: 3187952 - DNA, 25 bp, Homo sapien
tttgtgtttaatggccagtcagtct

SEQ ID NO: 3187953 - DNA, 25 bp, Homo sapien
gtgtttaatggccagtcagtctcca

SEQ ID NO: 3187954 - DNA, 25 bp, Homo sapien
cattttgtgtttaatggccagtcag

SEQ ID NO: 3187955 - DNA, 25 bp, Homo sapien
gtttaatggccagtcagtctccagg

SEQ ID NO: 3187956 - DNA, 25 bp, Homo sapien
tgcaaagtatggaaagatgccacct

SEQ ID NO: 3187957 - DNA, 25 bp, Homo sapien
tctgtaccaaacaacgcaagaaggg

SEQ ID NO: 3187958 - DNA, 25 bp, Homo sapien
caagaagggttctcatgggctggaa

SEQ ID NO: 3187959 - DNA, 25 bp, Homo sapien
aattttccagcgttgcgactgtgcg

SEQ ID NO: 3187960 - DNA, 25 bp, Homo sapien
ttgctgccaccagttaattccaaag

SEQ ID NO: 3187961 - DNA, 25 bp, Homo sapien
tgccaccagttaattccaaagagtt

SEQ ID NO: 3187962 - DNA, 25 bp, Homo sapien
cttttgctgccaccagttaattcca

SEQ ID NO: 3187963 - DNA, 25 bp, Homo sapien
gctgccaccagttaattccaaagag

SEQ ID NO: 3187964 - DNA, 25 bp, Homo sapien
tttcatatacccaatgagctccagg

SEQ ID NO: 3187965 - DNA, 25 bp, Homo sapien
ttctgacagctttaagactgtaatt

SEQ ID NO: 3187966 - DNA, 25 bp, Homo sapien
gttctgacagctttaagactgtaat

SEQ ID NO: 3187967 - DNA, 25 bp, Homo sapien
gtttcatatacccaatgagctccag

SEQ ID NO: 3187968 - DNA, 25 bp, Homo sapien
cttctcgtttctgaggagaaaatcc

SEQ ID NO: 3187969 - DNA, 25 bp, Homo sapien
cagccgtgcccgtaaactctggaaa

SEQ ID NO: 3187970 - DNA, 25 bp, Homo sapien
taggaggttaacatctctatacagc

SEQ ID NO: 3187971 - DNA, 25 bp, Homo sapien
actctggaaacgttgttgaagttct

SEQ ID NO: 3187972 - DNA, 25 bp, Homo sapien
tgatgctgctgttttgcgcgctctc

SEQ ID NO: 3187973 - DNA, 25 bp, Homo sapien
cgccccagagatccgagtttccttg

SEQ ID NO: 3187974 - DNA, 25 bp, Homo sapien
acaacacaagtgtcaacccctggca

SEQ ID NO: 3187975 - DNA, 25 bp, Homo sapien
ccagccggctgaaggttggttgaga

SEQ ID NO: 3187976 - DNA, 25 bp, Homo sapien
gggcactgggaatcatgacagctcc

SEQ ID NO: 3187977 - DNA, 25 bp, Homo sapien
actgggaatcatgacagctccccct

SEQ ID NO: 3187978 - DNA, 25 bp, Homo sapien
ttgtgggaagccaaaactgagaaag

SEQ ID NO: 3187979 - DNA, 25 bp, Homo sapien
ggaatcatgacagctcccccttccg

SEQ ID NO: 3187980 - DNA, 25 bp, Homo sapien
actcggtaccagttgtggctggcgc

SEQ ID NO: 3187981 - DNA, 25 bp, Homo sapien
agcgcgcacactcggtaccagttgt

SEQ ID NO: 3187982 - DNA, 25 bp, Homo sapien
cacactcggtaccagttgtggctgg

SEQ ID NO: 3187983 - DNA, 25 bp, Homo sapien
cgcacactcggtaccagttgtggct

SEQ ID NO: 3187984 - DNA, 25 bp, Homo sapien
gaattgtacataaatcacccggaag

SEQ ID NO: 3187985 - DNA, 25 bp, Homo sapien
caggacactgaaggcgtttttgaga

SEQ ID NO: 3187986 - DNA, 25 bp, Homo sapien
gtaggcgccagcgatacagcaggac

SEQ ID NO: 3187987 - DNA, 25 bp, Homo sapien
gatgacaatgacagcgtcgtaggcg

SEQ ID NO: 3187988 - DNA, 25 bp, Homo sapien
cattcggcggcagtaagaagggcaa

SEQ ID NO: 3187989 - DNA, 25 bp, Homo sapien
tcttgcaacattcggagcgtggccc

SEQ ID NO: 3187990 - DNA, 25 bp, Homo sapien
tgtaccaaggactggcattcggcgg

SEQ ID NO: 3187991 - DNA, 25 bp, Homo sapien
gccaatcgatctgcgggcatgtacc

SEQ ID NO: 3187992 - DNA, 25 bp, Homo sapien
gccaaactcaactccatcaagtcct

SEQ ID NO: 3187993 - DNA, 25 bp, Homo sapien
agatcggcagttcgcgggccaaact

SEQ ID NO: 3187994 - DNA, 25 bp, Homo sapien
ggccaaactcaactccatcaagtcc

SEQ ID NO: 3187995 - DNA, 25 bp, Homo sapien
ggcagttcgcgggccaaactcaact

SEQ ID NO: 3187996 - DNA, 25 bp, Homo sapien
cggagcaaggattcgtcctgctgcc

SEQ ID NO: 3187997 - DNA, 25 bp, Homo sapien
ctcgccgggagatggccgcgttgat

SEQ ID NO: 3187998 - DNA, 25 bp, Homo sapien
atggccgcgttgatgcggagcaagg

SEQ ID NO: 3187999 - DNA, 25 bp, Homo sapien
cctccgggctttgcgtcttcctggg

SEQ ID NO: 3188000 - DNA, 25 bp, Homo sapien
tcagatctcgaggattcggtccggg

SEQ ID NO: 3188001 - DNA, 25 bp, Homo sapien
ggacgtctcctgatcccctactaaa

SEQ ID NO: 3188002 - DNA, 25 bp, Homo sapien
agcgattcgctgtctcttgtgagtc

SEQ ID NO: 3188003 - DNA, 25 bp, Homo sapien
cgcctgctaactttgaaaaggagca

SEQ ID NO: 3188004 - DNA, 25 bp, Homo sapien
cccagtccctcagagacatagacat

SEQ ID NO: 3188005 - DNA, 25 bp, Homo sapien
ttcccagtccctcagagacatagac

SEQ ID NO: 3188006 - DNA, 25 bp, Homo sapien
tcccagtccctcagagacatagaca

SEQ ID NO: 3188007 - DNA, 25 bp, Homo sapien
tgcccccgttcattcctatctggga

SEQ ID NO: 3188008 - DNA, 25 bp, Homo sapien
aggaagacaggatctcaaaggctcc

SEQ ID NO: 3188009 - DNA, 25 bp, Homo sapien
gctccctgcccccgttcattcctat

SEQ ID NO: 3188010 - DNA, 25 bp, Homo sapien
gacaggatctcaaaggctccctgcc

SEQ ID NO: 3188011 - DNA, 25 bp, Homo sapien
cagcgcgtcccagtcgttcccggag

SEQ ID NO: 3188012 - DNA, 25 bp, Homo sapien
agcagccttcgaccttcggccgaag

SEQ ID NO: 3188013 - DNA, 25 bp, Homo sapien
tggctcgctgaacggctgccactgg

SEQ ID NO: 3188014 - DNA, 25 bp, Homo sapien
tcggccgaagggaattggacctgga

SEQ ID NO: 3188015 - DNA, 25 bp, Homo sapien
acacttcgcgtcttggctttttgtg

SEQ ID NO: 3188016 - DNA, 25 bp, Homo sapien
actacccatcacacttcgcgtcttg

SEQ ID NO: 3188017 - DNA, 25 bp, Homo sapien
gctttttgtggtttcagcaacctca

SEQ ID NO: 3188018 - DNA, 25 bp, Homo sapien
ggctttttgtggtttcagcaacctc

SEQ ID NO: 3188019 - DNA, 25 bp, Homo sapien
gacaacatggcctccatgatctggc

SEQ ID NO: 3188020 - DNA, 25 bp, Homo sapien
tggcttctgtctacatcttcactca

SEQ ID NO: 3188021 - DNA, 25 bp, Homo sapien
ctggcttctgtctacatcttcactc

SEQ ID NO: 3188022 - DNA, 25 bp, Homo sapien
aacatggcctccatgatctggcttc

SEQ ID NO: 3188023 - DNA, 25 bp, Homo sapien
gttgacagccattggattccttgaa

SEQ ID NO: 3188024 - DNA, 25 bp, Homo sapien
gacagccattggattccttgaatgt

SEQ ID NO: 3188025 - DNA, 25 bp, Homo sapien
cagccattggattccttgaatgttt

SEQ ID NO: 3188026 - DNA, 25 bp, Homo sapien
tgacagccattggattccttgaatg

SEQ ID NO: 3188027 - DNA, 25 bp, Homo sapien
cacagcttgagagtgctaagcctag

SEQ ID NO: 3188028 - DNA, 25 bp, Homo sapien
gttcagatccccagtgaagctggag

SEQ ID NO: 3188029 - DNA, 25 bp, Homo sapien
agtcccagtgcccaagggatgtggt

SEQ ID NO: 3188030 - DNA, 25 bp, Homo sapien
tgctaagcctagatctgtggctggc

SEQ ID NO: 3188031 - DNA, 25 bp, Homo sapien
catgaagcttctggcgcagagcatg

SEQ ID NO: 3188032 - DNA, 25 bp, Homo sapien
cagctccggattcaagagaggatct

SEQ ID NO: 3188033 - DNA, 25 bp, Homo sapien
catggatgctttgggcagctccgga

SEQ ID NO: 3188034 - DNA, 25 bp, Homo sapien
aatatattggacctgccgcttgtgc

SEQ ID NO: 3188035 - DNA, 25 bp, Homo sapien
ttccctgcataatcttgtgcgtcaa

SEQ ID NO: 3188036 - DNA, 25 bp, Homo sapien
tgcataatcttgtgcgtcaaacctc

SEQ ID NO: 3188037 - DNA, 25 bp, Homo sapien
tcttgtgcgtcaaacctctggcatc

SEQ ID NO: 3188038 - DNA, 25 bp, Homo sapien
taatcttgtgcgtcaaacctctggc

SEQ ID NO: 3188039 - DNA, 25 bp, Homo sapien
cctttctatgtggatgttagtgacc

SEQ ID NO: 3188040 - DNA, 25 bp, Homo sapien
cagaaatccaactggacccctggat

SEQ ID NO: 3188041 - DNA, 25 bp, Homo sapien
tggccaaagagcatcattttcatga

SEQ ID NO: 3188042 - DNA, 25 bp, Homo sapien
tgtggatgttagtgacccagaaatc

SEQ ID NO: 3188043 - DNA, 25 bp, Homo sapien
cacttctgtagaattctgggtgcac

SEQ ID NO: 3188044 - DNA, 25 bp, Homo sapien
ctgggtgcactgatatagcgattct

SEQ ID NO: 3188045 - DNA, 25 bp, Homo sapien
gcttcttgagagattgggccatgca

SEQ ID NO: 3188046 - DNA, 25 bp, Homo sapien
tagcgattctactccactaggcact

SEQ ID NO: 3188047 - DNA, 25 bp, Homo sapien
tttttcccaattagccaccctctca

SEQ ID NO: 3188048 - DNA, 25 bp, Homo sapien
cttcattgtcactcctttttcccaa

SEQ ID NO: 3188049 - DNA, 25 bp, Homo sapien
cccaattagccaccctctcacccat

SEQ ID NO: 3188050 - DNA, 25 bp, Homo sapien
gtcactcctttttcccaattagcca

SEQ ID NO: 3188051 - DNA, 25 bp, Homo sapien
tgctatggaaacaaccagaacccca

SEQ ID NO: 3188052 - DNA, 25 bp, Homo sapien
tctcataaacactccaattatgttc

SEQ ID NO: 3188053 - DNA, 25 bp, Homo sapien
tattcttgaaatttcgtagctgaac

SEQ ID NO: 3188054 - DNA, 25 bp, Homo sapien
aatttcgtagctgaacataatttgt

SEQ ID NO: 3188055 - DNA, 25 bp, Homo sapien
gcatccccatgtttagctgtggtca

SEQ ID NO: 3188056 - DNA, 25 bp, Homo sapien
gtcatgtcgagtatcagcccacacc

SEQ ID NO: 3188057 - DNA, 25 bp, Homo sapien
tagctgtggtcatgtcgagtatcag

SEQ ID NO: 3188058 - DNA, 25 bp, Homo sapien
cctctgtcatgtgcatccccatgtt

SEQ ID NO: 3188059 - DNA, 25 bp, Homo sapien
cttcatcaaccatggtaaaataatc

SEQ ID NO: 3188060 - DNA, 25 bp, Homo sapien
gggatacagttgctcaagaagatta

SEQ ID NO: 3188061 - DNA, 25 bp, Homo sapien
gcttatgggatacagttgctcaaga

SEQ ID NO: 3188062 - DNA, 25 bp, Homo sapien
gacggagctgtaggtgaaacttcct

SEQ ID NO: 3188063 - DNA, 25 bp, Homo sapien
gctgtaggtgaaacttcctactgat

SEQ ID NO: 3188064 - DNA, 25 bp, Homo sapien
agatcacttacaaaagtgggcagta

SEQ ID NO: 3188065 - DNA, 25 bp, Homo sapien
agtctacttgtccttgtatctgatt

SEQ ID NO: 3188066 - DNA, 25 bp, Homo sapien
caaaagtgggcagtatccacaagtc

SEQ ID NO: 3188067 - DNA, 25 bp, Homo sapien
ttccatatctggacatctctgagta

SEQ ID NO: 3188068 - DNA, 25 bp, Homo sapien
tcaaactcccaattgtcacattctg

SEQ ID NO: 3188069 - DNA, 25 bp, Homo sapien
tcaagtgccacaaaatgaactctca

SEQ ID NO: 3188070 - DNA, 25 bp, Homo sapien
aatgaactctcaaatctaatattgt

SEQ ID NO: 3188071 - DNA, 25 bp, Homo sapien
ccatcaaactcccaattgtcacatt

SEQ ID NO: 3188072 - DNA, 25 bp, Homo sapien
catataaatcagcaagattattgca

SEQ ID NO: 3188073 - DNA, 25 bp, Homo sapien
tctatggacttgtggttgaaaggct

SEQ ID NO: 3188074 - DNA, 25 bp, Homo sapien
gattattgcaaacagatctatggac

SEQ ID NO: 3188075 - DNA, 25 bp, Homo sapien
tggacttgtggttgaaaggcttgaa

SEQ ID NO: 3188076 - DNA, 25 bp, Homo sapien
ctatcattagaagagtattgtaaga

SEQ ID NO: 3188077 - DNA, 25 bp, Homo sapien
aaagatggaactatcattagaagag

SEQ ID NO: 3188078 - DNA, 25 bp, Homo sapien
atgagggctttgtgtttgatagcct

SEQ ID NO: 3188079 - DNA, 25 bp, Homo sapien
tcataaagatggaactatcattaga

SEQ ID NO: 3188080 - DNA, 25 bp, Homo sapien
gattggcagctccatgaattcactt

SEQ ID NO: 3188081 - DNA, 25 bp, Homo sapien
tatctggattaacactacagtttct

SEQ ID NO: 3188082 - DNA, 25 bp, Homo sapien
agctcttcaatgtcttatctggatt

SEQ ID NO: 3188083 - DNA, 25 bp, Homo sapien
tgtcttatctggattaacactacag

SEQ ID NO: 3188084 - DNA, 25 bp, Homo sapien
cttcaatgtcttatctggattaaca

SEQ ID NO: 3188085 - DNA, 25 bp, Homo sapien
aaggtatgcctgtaagcaccgttga

SEQ ID NO: 3188086 - DNA, 25 bp, Homo sapien
cttttatgtgcgctgggaaacccaa

SEQ ID NO: 3188087 - DNA, 25 bp, Homo sapien
tcttggtagcattcagatccattca

SEQ ID NO: 3188088 - DNA, 25 bp, Homo sapien
tgtggtgttctagaactaaatctgc

SEQ ID NO: 3188089 - DNA, 25 bp, Homo sapien
actcctccaccaacatgctgttctc

SEQ ID NO: 3188090 - DNA, 25 bp, Homo sapien
aggatgacaaacttaatctataaac

SEQ ID NO: 3188091 - DNA, 25 bp, Homo sapien
aactttgtatgctgactcctccacc

SEQ ID NO: 3188092 - DNA, 25 bp, Homo sapien
agtcccaaaaactgtccatatagga

SEQ ID NO: 3188093 - DNA, 25 bp, Homo sapien
gaatgtcaatccaaaggccattcac

SEQ ID NO: 3188094 - DNA, 25 bp, Homo sapien
gccagcagaactgttgtgggatttg

SEQ ID NO: 3188095 - DNA, 25 bp, Homo sapien
cagcccttgggactcagagcacttt

SEQ ID NO: 3188096 - DNA, 25 bp, Homo sapien
gcttgttgtaagttgactagtatga

SEQ ID NO: 3188097 - DNA, 25 bp, Homo sapien
atttcacagtctgtagtgtttctcc

SEQ ID NO: 3188098 - DNA, 25 bp, Homo sapien
tcttccacggaatcaggcttctgcc

SEQ ID NO: 3188099 - DNA, 25 bp, Homo sapien
ttccatttccaagttgcatctcttc

SEQ ID NO: 3188100 - DNA, 25 bp, Homo sapien
ccttgatttcacagtctgtagtgtt

SEQ ID NO: 3188101 - DNA, 25 bp, Homo sapien
aagagggatgcaagcacgggaagta

SEQ ID NO: 3188102 - DNA, 25 bp, Homo sapien
tggggagtggcctggaacagaaacc

SEQ ID NO: 3188103 - DNA, 25 bp, Homo sapien
gagcgggatcggaaaagctggaaga

SEQ ID NO: 3188104 - DNA, 25 bp, Homo sapien
aaccacagccggagggaaggcacag

SEQ ID NO: 3188105 - DNA, 25 bp, Homo sapien
gacagggtgtcccagatgtctctgc

SEQ ID NO: 3188106 - DNA, 25 bp, Homo sapien
tcttcctgggtagccattgcttggg

SEQ ID NO: 3188107 - DNA, 25 bp, Homo sapien
ggctttctgagctcacgtgccacat

SEQ ID NO: 3188108 - DNA, 25 bp, Homo sapien
agatgccagcatccagtgactcgat

SEQ ID NO: 3188109 - DNA, 25 bp, Homo sapien
atgagtggtctttaaggctatggtg

SEQ ID NO: 3188110 - DNA, 25 bp, Homo sapien
tggtctttaaggctatggtgaaaag

SEQ ID NO: 3188111 - DNA, 25 bp, Homo sapien
gagtggtctttaaggctatggtgaa

SEQ ID NO: 3188112 - DNA, 25 bp, Homo sapien
tctttaaggctatggtgaaaagaaa

SEQ ID NO: 3188113 - DNA, 25 bp, Homo sapien
catcagcaggtaggtcatctaacag

SEQ ID NO: 3188114 - DNA, 25 bp, Homo sapien
ggatgagctcatcagcaggtaggtc

SEQ ID NO: 3188115 - DNA, 25 bp, Homo sapien
aggtaggtcatctaacagctcagcc

SEQ ID NO: 3188116 - DNA, 25 bp, Homo sapien
gctcatcagcaggtaggtcatctaa

SEQ ID NO: 3188117 - DNA, 25 bp, Homo sapien
tggatgtctttctcctcgttctatg

SEQ ID NO: 3188118 - DNA, 25 bp, Homo sapien
gaagtaatacagtagcaggtcctct

SEQ ID NO: 3188119 - DNA, 25 bp, Homo sapien
aactctgtgaagtctgaacatctgc

SEQ ID NO: 3188120 - DNA, 25 bp, Homo sapien
tcacaaagtcatttgcagctacagg

SEQ ID NO: 3188121 - DNA, 25 bp, Homo sapien
ttgcaaagggacaagctaatcttta

SEQ ID NO: 3188122 - DNA, 25 bp, Homo sapien
tgcaaagggacaagctaatctttat

SEQ ID NO: 3188123 - DNA, 25 bp, Homo sapien
gcaaagggacaagctaatctttata

SEQ ID NO: 3188124 - DNA, 25 bp, Homo sapien
caaagggacaagctaatctttatat

SEQ ID NO: 3188125 - DNA, 25 bp, Homo sapien
gaggcaaagatctgcacagtttgtc

SEQ ID NO: 3188126 - DNA, 25 bp, Homo sapien
aaatctcctctccagtagatgtttc

SEQ ID NO: 3188127 - DNA, 25 bp, Homo sapien
ttcctggtgggcaagaatgtgaggc

SEQ ID NO: 3188128 - DNA, 25 bp, Homo sapien
ctccacttccataggtatgttcaca

SEQ ID NO: 3188129 - DNA, 25 bp, Homo sapien
tgagtaagcttccaaggtaccagag

SEQ ID NO: 3188130 - DNA, 25 bp, Homo sapien
tgcttataactgagtaagcttccaa

SEQ ID NO: 3188131 - DNA, 25 bp, Homo sapien
tataactgagtaagcttccaaggta

SEQ ID NO: 3188132 - DNA, 25 bp, Homo sapien
taactgagtaagcttccaaggtacc

SEQ ID NO: 3188133 - DNA, 25 bp, Homo sapien
ccgtttccagtaaataaattcagat

SEQ ID NO: 3188134 - DNA, 25 bp, Homo sapien
cagtaaataaattcagatcctcaga

SEQ ID NO: 3188135 - DNA, 25 bp, Homo sapien
tccagtaaataaattcagatcctca

SEQ ID NO: 3188136 - DNA, 25 bp, Homo sapien
taaataaattcagatcctcagaaac

SEQ ID NO: 3188137 - DNA, 25 bp, Homo sapien
ccaaaatggaatttcaacagggttg

SEQ ID NO: 3188138 - DNA, 25 bp, Homo sapien
ggtccctttcgttgtgacctgagca

SEQ ID NO: 3188139 - DNA, 25 bp, Homo sapien
tgtgggtaaaagtgtcttccataca

SEQ ID NO: 3188140 - DNA, 25 bp, Homo sapien
tcaacagggttgagataggttctcc

SEQ ID NO: 3188141 - DNA, 25 bp, Homo sapien
tcttgagtgattatagcaatggttg

SEQ ID NO: 3188142 - DNA, 25 bp, Homo sapien
tagacctcagactcaacctcattaa

SEQ ID NO: 3188143 - DNA, 25 bp, Homo sapien
aatggttgagctctgtatcctcaca

SEQ ID NO: 3188144 - DNA, 25 bp, Homo sapien
tatcctcacaatgactaggccccag

SEQ ID NO: 3188145 - DNA, 25 bp, Homo sapien
ctctagccaattgcgttctgagctg

SEQ ID NO: 3188146 - DNA, 25 bp, Homo sapien
gaactgctggaaatcctatgatgag

SEQ ID NO: 3188147 - DNA, 25 bp, Homo sapien
gccaattgcgttctgagctgtccag

SEQ ID NO: 3188148 - DNA, 25 bp, Homo sapien
tcctatgatgagtactgactgcatg

SEQ ID NO: 3188149 - DNA, 25 bp, Homo sapien
gagactgtaaatggctttgcctgct

SEQ ID NO: 3188150 - DNA, 25 bp, Homo sapien
tctcactgtactttcgggatgatct

SEQ ID NO: 3188151 - DNA, 25 bp, Homo sapien
tcactgtactttcgggatgatctac

SEQ ID NO: 3188152 - DNA, 25 bp, Homo sapien
tgtctcactgtactttcgggatgat

SEQ ID NO: 3188153 - DNA, 25 bp, Homo sapien
atgtctcactgtactttcgggatga

SEQ ID NO: 3188154 - DNA, 25 bp, Homo sapien
ttcagaggattgcatcgtttctcca

SEQ ID NO: 3188155 - DNA, 25 bp, Homo sapien
tagttccatttcctcgggcagctgc

SEQ ID NO: 3188156 - DNA, 25 bp, Homo sapien
ttattatcagtagccatggtggctg

SEQ ID NO: 3188157 - DNA, 25 bp, Homo sapien
gcaatttgttgttcccacacttcag

SEQ ID NO: 3188158 - DNA, 25 bp, Homo sapien
tcacacttaaacttgattcccatct

SEQ ID NO: 3188159 - DNA, 25 bp, Homo sapien
tcttaagtgtcgttagaaagctatc

SEQ ID NO: 3188160 - DNA, 25 bp, Homo sapien
ttgattcccatcttaagtgtcgtta

SEQ ID NO: 3188161 - DNA, 25 bp, Homo sapien
tgtcgttagaaagctatcactttgg

SEQ ID NO: 3188162 - DNA, 25 bp, Homo sapien
tatattctcgtgtgtcataaatctt

SEQ ID NO: 3188163 - DNA, 25 bp, Homo sapien
attctcgtgtgtcataaatcttcac

SEQ ID NO: 3188164 - DNA, 25 bp, Homo sapien
tttatcttatattctcgtgtgtcat

SEQ ID NO: 3188165 - DNA, 25 bp, Homo sapien
cttatattctcgtgtgtcataaatc

SEQ ID NO: 3188166 - DNA, 25 bp, Homo sapien
gttatctggtatgctttggttgttg

SEQ ID NO: 3188167 - DNA, 25 bp, Homo sapien
cacttgctgttatctggtatgcttt

SEQ ID NO: 3188168 - DNA, 25 bp, Homo sapien
tttcctaaagtaactggagtatcac

SEQ ID NO: 3188169 - DNA, 25 bp, Homo sapien
aagtaactggagtatcacacttgct

SEQ ID NO: 3188170 - DNA, 25 bp, Homo sapien
acaggtgggtgcatgcatgggatgg

SEQ ID NO: 3188171 - DNA, 25 bp, Homo sapien
catgcatgggatggttgggtgggac

SEQ ID NO: 3188172 - DNA, 25 bp, Homo sapien
agcagccacaggtgggtgcatgcat

SEQ ID NO: 3188173 - DNA, 25 bp, Homo sapien
tgggtgggacagctccctgttcccc

SEQ ID NO: 3188174 - DNA, 25 bp, Homo sapien
cattgaatttctgggttgcttcttg

SEQ ID NO: 3188175 - DNA, 25 bp, Homo sapien
aaaggtgatcctatcttacaagccc

SEQ ID NO: 3188176 - DNA, 25 bp, Homo sapien
gaggaaagcccaggtagtccgatgt

SEQ ID NO: 3188177 - DNA, 25 bp, Homo sapien
ggttcctatagacagctccagattc

SEQ ID NO: 3188178 - DNA, 25 bp, Homo sapien
cacgactttaagttagcagacatca

SEQ ID NO: 3188179 - DNA, 25 bp, Homo sapien
aacttggctagaccttgttttgagg

SEQ ID NO: 3188180 - DNA, 25 bp, Homo sapien
ttcttatgatctgtgtaagctctga

SEQ ID NO: 3188181 - DNA, 25 bp, Homo sapien
caagacctttgtagcgattagattt

SEQ ID NO: 3188182 - DNA, 25 bp, Homo sapien
ttccagtcagctattggtctttcca

SEQ ID NO: 3188183 - DNA, 25 bp, Homo sapien
caaacttgctcgagaaggccagaaa

SEQ ID NO: 3188184 - DNA, 25 bp, Homo sapien
tcaggaacacgaatgcgcaaacttg

SEQ ID NO: 3188185 - DNA, 25 bp, Homo sapien
gcttaggctgttaacccagtcactc

SEQ ID NO: 3188186 - DNA, 25 bp, Homo sapien
ggcttggaccgtgctgacagaatac

SEQ ID NO: 3188187 - DNA, 25 bp, Homo sapien
tttttcctggttgtggatggctgcc

SEQ ID NO: 3188188 - DNA, 25 bp, Homo sapien
ataaggggattaatcccatcatagg

SEQ ID NO: 3188189 - DNA, 25 bp, Homo sapien
gctgtgtccttatgtagaggaaaga

SEQ ID NO: 3188190 - DNA, 25 bp, Homo sapien
aagagcaagaatctcctgtctcttt

SEQ ID NO: 3188191 - DNA, 25 bp, Homo sapien
cccaacaatgactacatagggcata

SEQ ID NO: 3188192 - DNA, 25 bp, Homo sapien
agggcatatttctttatgtgcacac

SEQ ID NO: 3188193 - DNA, 25 bp, Homo sapien
ttaaccccaacaatgactacatagg

SEQ ID NO: 3188194 - DNA, 25 bp, Homo sapien
aaatagcagtgatatttgtctgagt

SEQ ID NO: 3188195 - DNA, 25 bp, Homo sapien
ccttgaaaatttatgtggtctgcca

SEQ ID NO: 3188196 - DNA, 25 bp, Homo sapien
cagaactcatattgccctgataggg

SEQ ID NO: 3188197 - DNA, 25 bp, Homo sapien
ctatcaaaattgttggtcctgggca

SEQ ID NO: 3188198 - DNA, 25 bp, Homo sapien
tatccccataaactattgctgaagc

SEQ ID NO: 3188199 - DNA, 25 bp, Homo sapien
aaaaatatgtctagaataggccaag

SEQ ID NO: 3188200 - DNA, 25 bp, Homo sapien
catgttttagtcaaggctaatagaa

SEQ ID NO: 3188201 - DNA, 25 bp, Homo sapien
aagtctatctaaaaaagtgtattca

SEQ ID NO: 3188202 - DNA, 25 bp, Homo sapien
tggaaattgatgaagtctatctaaa

SEQ ID NO: 3188203 - DNA, 25 bp, Homo sapien
acactaacagaatgtagggcaaaaa

SEQ ID NO: 3188204 - DNA, 25 bp, Homo sapien
taaaggtgatgcaccacactaacag

SEQ ID NO: 3188205 - DNA, 25 bp, Homo sapien
taataaaggtgatgcaccacactaa

SEQ ID NO: 3188206 - DNA, 25 bp, Homo sapien
ggtgatgcaccacactaacagaatg

SEQ ID NO: 3188207 - DNA, 25 bp, Homo sapien
tccctgaatttccatagctccagcc

SEQ ID NO: 3188208 - DNA, 25 bp, Homo sapien
ttctgtccatatcatacatcctcat

SEQ ID NO: 3188209 - DNA, 25 bp, Homo sapien
gaatttccatagctccagcccaact

SEQ ID NO: 3188210 - DNA, 25 bp, Homo sapien
aactccctgaatttccatagctcca

SEQ ID NO: 3188211 - DNA, 25 bp, Homo sapien
cctgcataccttggagtggcctgaa

SEQ ID NO: 3188212 - DNA, 25 bp, Homo sapien
cgtgaactggcgcttgctgaaacct

SEQ ID NO: 3188213 - DNA, 25 bp, Homo sapien
tcagtgtgaaaggagagtacccaac

SEQ ID NO: 3188214 - DNA, 25 bp, Homo sapien
tgaaacctccgggtgctgaaacctg

SEQ ID NO: 3188215 - DNA, 25 bp, Homo sapien
gcgcgctccgcggtcatggagatcc

SEQ ID NO: 3188216 - DNA, 25 bp, Homo sapien
gaaagtcaaactgagcaataacgcg

SEQ ID NO: 3188217 - DNA, 25 bp, Homo sapien
atccccgggagcctgtgcaagaaag

SEQ ID NO: 3188218 - DNA, 25 bp, Homo sapien
gcaataacgcgcagaactgggtaag

SEQ ID NO: 3188219 - DNA, 25 bp, Homo sapien
tattcgagtaaatttccttggtgga

SEQ ID NO: 3188220 - DNA, 25 bp, Homo sapien
tataccttcacagttttgctgagtc

SEQ ID NO: 3188221 - DNA, 25 bp, Homo sapien
ttggtggagaaggtataccttcaca

SEQ ID NO: 3188222 - DNA, 25 bp, Homo sapien
ttcgagtaaatttccttggtggaga

SEQ ID NO: 3188223 - DNA, 25 bp, Homo sapien
caattggtgatgaagaacattccaa

SEQ ID NO: 3188224 - DNA, 25 bp, Homo sapien
attccaaatcttcatcacttttatc

SEQ ID NO: 3188225 - DNA, 25 bp, Homo sapien
tggtgatgaagaacattccaaatct

SEQ ID NO: 3188226 - DNA, 25 bp, Homo sapien
aaatcttcatcacttttatcaagcc

SEQ ID NO: 3188227 - DNA, 25 bp, Homo sapien
aataaggaggactgatgggactggc

SEQ ID NO: 3188228 - DNA, 25 bp, Homo sapien
ttaaataaggaggactgatgggact

SEQ ID NO: 3188229 - DNA, 25 bp, Homo sapien
aaataaggaggactgatgggactgg

SEQ ID NO: 3188230 - DNA, 25 bp, Homo sapien
taaataaggaggactgatgggactg

SEQ ID NO: 3188231 - DNA, 25 bp, Homo sapien
cagaacgcgttcaactccagagaaa

SEQ ID NO: 3188232 - DNA, 25 bp, Homo sapien
aactccagagaaaattgggctctct

SEQ ID NO: 3188233 - DNA, 25 bp, Homo sapien
aaaatactggtaatccagaacgcgt

SEQ ID NO: 3188234 - DNA, 25 bp, Homo sapien
ggtaatccagaacgcgttcaactcc

SEQ ID NO: 3188235 - DNA, 25 bp, Homo sapien
ccaagattgaaggaaccataagcat

SEQ ID NO: 3188236 - DNA, 25 bp, Homo sapien
tctcaaagctcggtgtatataatcc

SEQ ID NO: 3188237 - DNA, 25 bp, Homo sapien
tctattcaagttgccaagattgaag

SEQ ID NO: 3188238 - DNA, 25 bp, Homo sapien
taatccaaaacgtgcaagtcaggag

SEQ ID NO: 3188239 - DNA, 25 bp, Homo sapien
tttcctagacactgggagacttgaa

SEQ ID NO: 3188240 - DNA, 25 bp, Homo sapien
agacactgggagacttgaatactct

SEQ ID NO: 3188241 - DNA, 25 bp, Homo sapien
cactgggagacttgaatactctttc

SEQ ID NO: 3188242 - DNA, 25 bp, Homo sapien
aaactcgtttcctagacactgggag

SEQ ID NO: 3188243 - DNA, 25 bp, Homo sapien
ggaaaatgccggtgcaaaggtgaaa

SEQ ID NO: 3188244 - DNA, 25 bp, Homo sapien
gaaaatgccggtgcaaaggtgaaag

SEQ ID NO: 3188245 - DNA, 25 bp, Homo sapien
ctaggaaaatgccggtgcaaaggtg

SEQ ID NO: 3188246 - DNA, 25 bp, Homo sapien
aggaaaatgccggtgcaaaggtgaa

SEQ ID NO: 3188247 - DNA, 25 bp, Homo sapien
ccttcggagggaatgagtgcccaga

SEQ ID NO: 3188248 - DNA, 25 bp, Homo sapien
agtagtgctctgcaaaatcctgtgg

SEQ ID NO: 3188249 - DNA, 25 bp, Homo sapien
gagtgactgccgctggcacaatcct

SEQ ID NO: 3188250 - DNA, 25 bp, Homo sapien
gacagcgatatctgctaagggacag

SEQ ID NO: 3188251 - DNA, 25 bp, Homo sapien
tgcactccatgtacatcctatctga

SEQ ID NO: 3188252 - DNA, 25 bp, Homo sapien
tacttttgcggtatgtgcaaccacc

SEQ ID NO: 3188253 - DNA, 25 bp, Homo sapien
tctgactattgataagggccattct

SEQ ID NO: 3188254 - DNA, 25 bp, Homo sapien
gcaatgactagccatcaaagcgttt

SEQ ID NO: 3188255 - DNA, 25 bp, Homo sapien
ccactctctgtggccaccagactct

SEQ ID NO: 3188256 - DNA, 25 bp, Homo sapien
ctggttttatcactatcctgcttaa

SEQ ID NO: 3188257 - DNA, 25 bp, Homo sapien
ctctctgtggccaccagactctaag

SEQ ID NO: 3188258 - DNA, 25 bp, Homo sapien
tctggttttatcactatcctgctta

SEQ ID NO: 3188259 - DNA, 25 bp, Homo sapien
tcttgccatctgagtccgtgatcat

SEQ ID NO: 3188260 - DNA, 25 bp, Homo sapien
tcttcttgccatctgagtccgtgat

SEQ ID NO: 3188261 - DNA, 25 bp, Homo sapien
caactgaattggctctgactttcac

SEQ ID NO: 3188262 - DNA, 25 bp, Homo sapien
tgccatctgagtccgtgatcatctt

SEQ ID NO: 3188263 - DNA, 25 bp, Homo sapien
tggagcaaagcttgctgttgtagtg

SEQ ID NO: 3188264 - DNA, 25 bp, Homo sapien
tgctgttgtagtggcagtacaaatc

SEQ ID NO: 3188265 - DNA, 25 bp, Homo sapien
ttgctgttgtagtggcagtacaaat

SEQ ID NO: 3188266 - DNA, 25 bp, Homo sapien
atggagcaaagcttgctgttgtagt

SEQ ID NO: 3188267 - DNA, 25 bp, Homo sapien
ccctcgcggctgtttaaggtgcaga

SEQ ID NO: 3188268 - DNA, 25 bp, Homo sapien
gcagtgcccgttcctgctgccgtgg

SEQ ID NO: 3188269 - DNA, 25 bp, Homo sapien
aaacctgcgcgacttcttaagaaga

SEQ ID NO: 3188270 - DNA, 25 bp, Homo sapien
gagtggagctcgaaaaacctgcgcg

SEQ ID NO: 3188271 - DNA, 25 bp, Homo sapien
ccacaaaatcgaggaagcatgccct

SEQ ID NO: 3188272 - DNA, 25 bp, Homo sapien
aggaaggagactaaggcacacatct

SEQ ID NO: 3188273 - DNA, 25 bp, Homo sapien
ggattagagccacgtccccgcttcg

SEQ ID NO: 3188274 - DNA, 25 bp, Homo sapien
ggtacccgaaatgggttgcaaatga

SEQ ID NO: 3188275 - DNA, 25 bp, Homo sapien
gaagcctaagctctgtgagggacag

SEQ ID NO: 3188276 - DNA, 25 bp, Homo sapien
cctgtgtggccttaagtacgtgact

SEQ ID NO: 3188277 - DNA, 25 bp, Homo sapien
tagattccacaagcaacagtgcagt

SEQ ID NO: 3188278 - DNA, 25 bp, Homo sapien
taactgggtggttcaacaactcgct

SEQ ID NO: 3188279 - DNA, 25 bp, Homo sapien
gcaacctcaagtgtacaagctactc

SEQ ID NO: 3188280 - DNA, 25 bp, Homo sapien
catcatgtgacgttaggtgtggaat

SEQ ID NO: 3188281 - DNA, 25 bp, Homo sapien
tgttttaactacgacccatcatgtg

SEQ ID NO: 3188282 - DNA, 25 bp, Homo sapien
aatgctgttaggacaggaggcctga

SEQ ID NO: 3188283 - DNA, 25 bp, Homo sapien
gatacccttctggtactagtgaagc

SEQ ID NO: 3188284 - DNA, 25 bp, Homo sapien
gatactggcacgacaaagcaaacta

SEQ ID NO: 3188285 - DNA, 25 bp, Homo sapien
cattgacagtactgggttcttggga

SEQ ID NO: 3188286 - DNA, 25 bp, Homo sapien
cacattggtccggagtctgctcttt

SEQ ID NO: 3188287 - DNA, 25 bp, Homo sapien
ggcccagacaattggcaatcttgtt

SEQ ID NO: 3188288 - DNA, 25 bp, Homo sapien
agacaattggcaatcttgttctttc

SEQ ID NO: 3188289 - DNA, 25 bp, Homo sapien
ccagacaattggcaatcttgttctt

SEQ ID NO: 3188290 - DNA, 25 bp, Homo sapien
gcccagacaattggcaatcttgttc

SEQ ID NO: 3188291 - DNA, 25 bp, Homo sapien
ctacagtttctgttaggtcttccat

SEQ ID NO: 3188292 - DNA, 25 bp, Homo sapien
tggagaagagtgttatagggccaca

SEQ ID NO: 3188293 - DNA, 25 bp, Homo sapien
tggtccttgcagcagtcaacactcc

SEQ ID NO: 3188294 - DNA, 25 bp, Homo sapien
cttggtccttgcagcagtcaacact

SEQ ID NO: 3188295 - DNA, 25 bp, Homo sapien
cttgcagcagtcaacactcccagtc

SEQ ID NO: 3188296 - DNA, 25 bp, Homo sapien
tgtttccagatggtagcacagcaat

SEQ ID NO: 3188297 - DNA, 25 bp, Homo sapien
gtttccagatggtagcacagcaatt

SEQ ID NO: 3188298 - DNA, 25 bp, Homo sapien
tttccagatggtagcacagcaattc

SEQ ID NO: 3188299 - DNA, 25 bp, Homo sapien
taagttagactcatgctatagcagc

SEQ ID NO: 3188300 - DNA, 25 bp, Homo sapien
gatgtaagttagactcatgctatag

SEQ ID NO: 3188301 - DNA, 25 bp, Homo sapien
gttagactcatgctatagcagcagg

SEQ ID NO: 3188302 - DNA, 25 bp, Homo sapien
agctgatgtaagttagactcatgct

SEQ ID NO: 3188303 - DNA, 25 bp, Homo sapien
cagccctgctatgtcagaagaacca

SEQ ID NO: 3188304 - DNA, 25 bp, Homo sapien
tttggtagctctgactcggcaggct

SEQ ID NO: 3188305 - DNA, 25 bp, Homo sapien
ggaaatgggatagcacagccctgct

SEQ ID NO: 3188306 - DNA, 25 bp, Homo sapien
gaaaagcgtcgcaaatgagcacaca

SEQ ID NO: 3188307 - DNA, 25 bp, Homo sapien
ttggctctcgtgcttcaggtctcag

SEQ ID NO: 3188308 - DNA, 25 bp, Homo sapien
tacaaggcttttcataatctggccc

SEQ ID NO: 3188309 - DNA, 25 bp, Homo sapien
gacttgcttacacacttggctctcg

SEQ ID NO: 3188310 - DNA, 25 bp, Homo sapien
tttttggaagcagtctcagagacca

SEQ ID NO: 3188311 - DNA, 25 bp, Homo sapien
tgtaccctgggttgaatgaaaaaca

SEQ ID NO: 3188312 - DNA, 25 bp, Homo sapien
gataccagtacttgccggttaaata

SEQ ID NO: 3188313 - DNA, 25 bp, Homo sapien
tactattgctgatagcctagaaggt

SEQ ID NO: 3188314 - DNA, 25 bp, Homo sapien
agaaagctggctcccgtcctcaagg

SEQ ID NO: 3188315 - DNA, 25 bp, Homo sapien
gaccattcatatacagtctatacta

SEQ ID NO: 3188316 - DNA, 25 bp, Homo sapien
tgaagtaataaacaatgtagaccat

SEQ ID NO: 3188317 - DNA, 25 bp, Homo sapien
ccacccttcggtaggtgggcagcag

SEQ ID NO: 3188318 - DNA, 25 bp, Homo sapien
ctccacccttcggtaggtgggcagc

SEQ ID NO: 3188319 - DNA, 25 bp, Homo sapien
ttcctgctcctagtgacacaggaga

SEQ ID NO: 3188320 - DNA, 25 bp, Homo sapien
aaagcagcccgagaaacttcttttg

SEQ ID NO: 3188321 - DNA, 25 bp, Homo sapien
tgtgggccaggaagataatccattt

SEQ ID NO: 3188322 - DNA, 25 bp, Homo sapien
gtaagagttcttggcaaggcttccc

SEQ ID NO: 3188323 - DNA, 25 bp, Homo sapien
ctcctagtcttatgttcatgtggga

SEQ ID NO: 3188324 - DNA, 25 bp, Homo sapien
cttccatatgtgctcctagtcttat

SEQ ID NO: 3188325 - DNA, 25 bp, Homo sapien
agaagcttgtgattttgaaactcca

SEQ ID NO: 3188326 - DNA, 25 bp, Homo sapien
actccatttcacagtggatgtacag

SEQ ID NO: 3188327 - DNA, 25 bp, Homo sapien
aaagacccaggcctttgacatccca

SEQ ID NO: 3188328 - DNA, 25 bp, Homo sapien
catgaactgctacttctaacggagg

SEQ ID NO: 3188329 - DNA, 25 bp, Homo sapien
taacggaggtccgaagcactaacac

SEQ ID NO: 3188330 - DNA, 25 bp, Homo sapien
caggcccaggcttgacagtgtcttg

SEQ ID NO: 3188331 - DNA, 25 bp, Homo sapien
catgcagctatatgctgtaccttca

SEQ ID NO: 3188332 - DNA, 25 bp, Homo sapien
gtcttcagatcaaaaaggagatggt

SEQ ID NO: 3188333 - DNA, 25 bp, Homo sapien
tacaaaatgtagaaggtagccatcc

SEQ ID NO: 3188334 - DNA, 25 bp, Homo sapien
tagccatccgattactgtttcttcc

SEQ ID NO: 3188335 - DNA, 25 bp, Homo sapien
tcttcaacaggttcagcgggtcttg

SEQ ID NO: 3188336 - DNA, 25 bp, Homo sapien
taagctcttgggtttaccattgcca

SEQ ID NO: 3188337 - DNA, 25 bp, Homo sapien
cagccactgggtgatccataatcca

SEQ ID NO: 3188338 - DNA, 25 bp, Homo sapien
gggaccctctcatgtacaactgtga

SEQ ID NO: 3188339 - DNA, 25 bp, Homo sapien
gcacaggtagagtagtaacatacat

SEQ ID NO: 3188340 - DNA, 25 bp, Homo sapien
cattgtaatgcagcgatacaggtat

SEQ ID NO: 3188341 - DNA, 25 bp, Homo sapien
acagaatctgcgtcccactattgac

SEQ ID NO: 3188342 - DNA, 25 bp, Homo sapien
cgatacaggtataaagttccaataa

SEQ ID NO: 3188343 - DNA, 25 bp, Homo sapien
aatccgttgaacttttgcctgagag

SEQ ID NO: 3188344 - DNA, 25 bp, Homo sapien
aaataagtcagtgtcagcgtaaccg

SEQ ID NO: 3188345 - DNA, 25 bp, Homo sapien
tgtgaccgctgaagaggaagtctcc

SEQ ID NO: 3188346 - DNA, 25 bp, Homo sapien
ccagaaatcaatcgtagaatccgtt

SEQ ID NO: 3188347 - DNA, 25 bp, Homo sapien
gaagaaaataatcggtattggcaaa

SEQ ID NO: 3188348 - DNA, 25 bp, Homo sapien
aatcggtattggcaaaatggtccat

SEQ ID NO: 3188349 - DNA, 25 bp, Homo sapien
aaaataatcggtattggcaaaatgg

SEQ ID NO: 3188350 - DNA, 25 bp, Homo sapien
gagaagaaaataatcggtattggca

SEQ ID NO: 3188351 - DNA, 25 bp, Homo sapien
cagcagccagcagattaaatgatac

SEQ ID NO: 3188352 - DNA, 25 bp, Homo sapien
tggccattgaatggtaccaccaaaa

SEQ ID NO: 3188353 - DNA, 25 bp, Homo sapien
taagcaatgatcacatcgatagtgt

SEQ ID NO: 3188354 - DNA, 25 bp, Homo sapien
gataccaccagaagtgacgaggcga

SEQ ID NO: 3188355 - DNA, 25 bp, Homo sapien
ttcttaaattgtcattcactgtaac

SEQ ID NO: 3188356 - DNA, 25 bp, Homo sapien
ttttcttaaattgtcattcactgta

SEQ ID NO: 3188357 - DNA, 25 bp, Homo sapien
tattttcttaaattgtcattcactg

SEQ ID NO: 3188358 - DNA, 25 bp, Homo sapien
ttattttcttaaattgtcattcact

SEQ ID NO: 3188359 - DNA, 25 bp, Homo sapien
gggaaccaccatgctcgagataaga

SEQ ID NO: 3188360 - DNA, 25 bp, Homo sapien
ccatgctcgagataagaaattagtc

SEQ ID NO: 3188361 - DNA, 25 bp, Homo sapien
taaaagatggggaaccaccatgctc

SEQ ID NO: 3188362 - DNA, 25 bp, Homo sapien
cgagataagaaattagtctgtgaag

SEQ ID NO: 3188363 - DNA, 25 bp, Homo sapien
caccaatcttctgaacccgtgaata

SEQ ID NO: 3188364 - DNA, 25 bp, Homo sapien
tctgaacccgtgaatactttttgca

SEQ ID NO: 3188365 - DNA, 25 bp, Homo sapien
cccgtgaatactttttgcatgatga

SEQ ID NO: 3188366 - DNA, 25 bp, Homo sapien
gaggccaagacagcggccaggagaa

SEQ ID NO: 3188367 - DNA, 25 bp, Homo sapien
actcttttggtgtaagagctgatgc

SEQ ID NO: 3188368 - DNA, 25 bp, Homo sapien
cgttaactcttttggtgtaagagct

SEQ ID NO: 3188369 - DNA, 25 bp, Homo sapien
ttacagcgttaactcttttggtgta

SEQ ID NO: 3188370 - DNA, 25 bp, Homo sapien
gtaagagctgatgcctttgttttgc

SEQ ID NO: 3188371 - DNA, 25 bp, Homo sapien
cacattcttctgaccttgggctgaa

SEQ ID NO: 3188372 - DNA, 25 bp, Homo sapien
taccagtcagttctcctaaaataaa

SEQ ID NO: 3188373 - DNA, 25 bp, Homo sapien
ctttggcacctctttaacaagctca

SEQ ID NO: 3188374 - DNA, 25 bp, Homo sapien
agaaaaccagtcaaagggcaatact

SEQ ID NO: 3188375 - DNA, 25 bp, Homo sapien
atatgtagcgcattgggtggcagca

SEQ ID NO: 3188376 - DNA, 25 bp, Homo sapien
taggcagttctatttacacagtggc

SEQ ID NO: 3188377 - DNA, 25 bp, Homo sapien
tactttcgtgtttacttggatcagc

SEQ ID NO: 3188378 - DNA, 25 bp, Homo sapien
cgtgacagggtagaaacaaaattca

SEQ ID NO: 3188379 - DNA, 25 bp, Homo sapien
gatccaaatttacagggcagacagc

SEQ ID NO: 3188380 - DNA, 25 bp, Homo sapien
ttgacacacacgtgttttcagcctg

SEQ ID NO: 3188381 - DNA, 25 bp, Homo sapien
cccaagtggtgtgaacctcagttga

SEQ ID NO: 3188382 - DNA, 25 bp, Homo sapien
tttcagcctgtgctagaagagttga

SEQ ID NO: 3188383 - DNA, 25 bp, Homo sapien
caccagtgttaggagagcaaaatcc

SEQ ID NO: 3188384 - DNA, 25 bp, Homo sapien
ttttctttacaatcgggcaacagga

SEQ ID NO: 3188385 - DNA, 25 bp, Homo sapien
gtaactaacacactgattccgagag

SEQ ID NO: 3188386 - DNA, 25 bp, Homo sapien
caattgcggcatatgtccttaggac

SEQ ID NO: 3188387 - DNA, 25 bp, Homo sapien
ggacttcctcaactcgatgacagag

SEQ ID NO: 3188388 - DNA, 25 bp, Homo sapien
cgtgtaaagacatggcagcggcaat

SEQ ID NO: 3188389 - DNA, 25 bp, Homo sapien
gacagagctatacgacacatgcgtg

SEQ ID NO: 3188390 - DNA, 25 bp, Homo sapien
tcaagtggactcaggaaaggatgct

SEQ ID NO: 3188391 - DNA, 25 bp, Homo sapien
ccgccgccactcagcgacgcctggg

SEQ ID NO: 3188392 - DNA, 25 bp, Homo sapien
ttggcgggctagcaggcgggggacc

SEQ ID NO: 3188393 - DNA, 25 bp, Homo sapien
gctgcctggcggagggggttggcgg

SEQ ID NO: 3188394 - DNA, 25 bp, Homo sapien
ctcagcgacgcctgggcggaacctg

SEQ ID NO: 3188395 - DNA, 25 bp, Homo sapien
tgtaggaacgcccccggattggctg

SEQ ID NO: 3188396 - DNA, 25 bp, Homo sapien
tctgctctggaaggtcgggggcggg

SEQ ID NO: 3188397 - DNA, 25 bp, Homo sapien
gcctggaggagacgcgcacgcagct

SEQ ID NO: 3188398 - DNA, 25 bp, Homo sapien
cggcctcgggttccccttgctgcct

SEQ ID NO: 3188399 - DNA, 25 bp, Homo sapien
agcagcgctacgaggccgcatagca

SEQ ID NO: 3188400 - DNA, 25 bp, Homo sapien
aagatgctgccgtacacgcgggcta

SEQ ID NO: 3188401 - DNA, 25 bp, Homo sapien
ggcagcagcacgtgaccgaagttgc

SEQ ID NO: 3188402 - DNA, 25 bp, Homo sapien
tatgaccgagggatcaatccctgcg

SEQ ID NO: 3188403 - DNA, 25 bp, Homo sapien
acccgcgggcggtcgctgaagacct

SEQ ID NO: 3188404 - DNA, 25 bp, Homo sapien
tccttggtcacgatggagatgagcg

SEQ ID NO: 3188405 - DNA, 25 bp, Homo sapien
tcgcgcacgctgtggaagtcgctga

SEQ ID NO: 3188406 - DNA, 25 bp, Homo sapien
ggtcgctgaagacctcggcctgctg

SEQ ID NO: 3188407 - DNA, 25 bp, Homo sapien
ggcatccgcgtacccacagcccacg

SEQ ID NO: 3188408 - DNA, 25 bp, Homo sapien
tacccacagcccacgacctcccgct

SEQ ID NO: 3188409 - DNA, 25 bp, Homo sapien
gagactcatccgcggcatccgcgta

SEQ ID NO: 3188410 - DNA, 25 bp, Homo sapien
ctggagactcatccgcggcatccgc

SEQ ID NO: 3188411 - DNA, 25 bp, Homo sapien
tgagctgtcctcaagtcttgctgag

SEQ ID NO: 3188412 - DNA, 25 bp, Homo sapien
gagtgaaacgctcctttggtagcct

SEQ ID NO: 3188413 - DNA, 25 bp, Homo sapien
tgatctgggaagtccactcacacct

SEQ ID NO: 3188414 - DNA, 25 bp, Homo sapien
tagcctctctttgcgttatgaaaca

SEQ ID NO: 3188415 - DNA, 25 bp, Homo sapien
aaagcacattgtcttaattactgtt

SEQ ID NO: 3188416 - DNA, 25 bp, Homo sapien
ggatccacagagcataggaggcatt

SEQ ID NO: 3188417 - DNA, 25 bp, Homo sapien
gcacattgtcttaattactgttact

SEQ ID NO: 3188418 - DNA, 25 bp, Homo sapien
cacagagcataggaggcatttgctg

SEQ ID NO: 3188419 - DNA, 25 bp, Homo sapien
taaaatgtctgttgtcggcagcagc

SEQ ID NO: 3188420 - DNA, 25 bp, Homo sapien
taactggcaggtaatctaaaatgtc

SEQ ID NO: 3188421 - DNA, 25 bp, Homo sapien
tagcccaactagattagaactactg

SEQ ID NO: 3188422 - DNA, 25 bp, Homo sapien
gaaataaagaccctgctccatggtt

SEQ ID NO: 3188423 - DNA, 25 bp, Homo sapien
ggttcagcgacatatacagcaggca

SEQ ID NO: 3188424 - DNA, 25 bp, Homo sapien
tctccagacgggaccataatgtgca

SEQ ID NO: 3188425 - DNA, 25 bp, Homo sapien
tattagtgtaatcaaagcgctggcc

SEQ ID NO: 3188426 - DNA, 25 bp, Homo sapien
tcagtcccagcaataaagagatccc

SEQ ID NO: 3188427 - DNA, 25 bp, Homo sapien
ccttgtctgtgagggaaggagctcg

SEQ ID NO: 3188428 - DNA, 25 bp, Homo sapien
agggaaggagctcggttggcgccaa

SEQ ID NO: 3188429 - DNA, 25 bp, Homo sapien
cggttggcgccaatgactctttcaa

SEQ ID NO: 3188430 - DNA, 25 bp, Homo sapien
caccacagttagcctctgcacttcc

SEQ ID NO: 3188431 - DNA, 25 bp, Homo sapien
tcatatgaggaatggcaagcggcac

SEQ ID NO: 3188432 - DNA, 25 bp, Homo sapien
ttctctgaggtcatatgaggaatgg

SEQ ID NO: 3188433 - DNA, 25 bp, Homo sapien
ctctgaggtcatatgaggaatggca

SEQ ID NO: 3188434 - DNA, 25 bp, Homo sapien
tgaggtcatatgaggaatggcaagc

SEQ ID NO: 3188435 - DNA, 25 bp, Homo sapien
ggcattcaaagaggaagaccctgga

SEQ ID NO: 3188436 - DNA, 25 bp, Homo sapien
agggcattcaaagaggaagaccctg

SEQ ID NO: 3188437 - DNA, 25 bp, Homo sapien
tcaagggcattcaaagaggaagacc

SEQ ID NO: 3188438 - DNA, 25 bp, Homo sapien
gcattcaaagaggaagaccctggac

SEQ ID NO: 3188439 - DNA, 25 bp, Homo sapien
ctagtaaaactaagcagtagtagaa

SEQ ID NO: 3188440 - DNA, 25 bp, Homo sapien
ccagtataattgtgtatgctctgaa

SEQ ID NO: 3188441 - DNA, 25 bp, Homo sapien
gcctttgtcaattctggagcttttt

SEQ ID NO: 3188442 - DNA, 25 bp, Homo sapien
gctacagaactactagtaaaactaa

SEQ ID NO: 3188443 - DNA, 25 bp, Homo sapien
catccagaaatcgattagggtagaa

SEQ ID NO: 3188444 - DNA, 25 bp, Homo sapien
gggtaagatcaatgtgcctttagga

SEQ ID NO: 3188445 - DNA, 25 bp, Homo sapien
atcgattagggtagaaatcctccgg

SEQ ID NO: 3188446 - DNA, 25 bp, Homo sapien
tctatgtactgaccacaggttgggt

SEQ ID NO: 3188447 - DNA, 25 bp, Homo sapien
taggctcacaaacattaggaataat

SEQ ID NO: 3188448 - DNA, 25 bp, Homo sapien
gttgttctcccatacacacccgctt

SEQ ID NO: 3188449 - DNA, 25 bp, Homo sapien
ttgccagttgttctcccatacacac

SEQ ID NO: 3188450 - DNA, 25 bp, Homo sapien
ggtaaagcaaatgcgaaactctgca

SEQ ID NO: 3188451 - DNA, 25 bp, Homo sapien
aatggatgtggggctaaagttagac

SEQ ID NO: 3188452 - DNA, 25 bp, Homo sapien
gaccaaatcttccagtcaggagggg

SEQ ID NO: 3188453 - DNA, 25 bp, Homo sapien
attaaatggatgtggggctaaagtt

SEQ ID NO: 3188454 - DNA, 25 bp, Homo sapien
tggatgtggggctaaagttagacca

SEQ ID NO: 3188455 - DNA, 25 bp, Homo sapien
gaaatgagaagattggcccatcggt

SEQ ID NO: 3188456 - DNA, 25 bp, Homo sapien
gcccatcggtggaagccactgcaag

SEQ ID NO: 3188457 - DNA, 25 bp, Homo sapien
tgagcccagcttggatccactgagt

SEQ ID NO: 3188458 - DNA, 25 bp, Homo sapien
taaaatggctgaagtatcctgctga

SEQ ID NO: 3188459 - DNA, 25 bp, Homo sapien
tcattcacaagacaactgggcatcc

SEQ ID NO: 3188460 - DNA, 25 bp, Homo sapien
cctgttatgggatcaagtggtggca

SEQ ID NO: 3188461 - DNA, 25 bp, Homo sapien
cagggacgctaggacaggaatgttc

SEQ ID NO: 3188462 - DNA, 25 bp, Homo sapien
gggcatccactaagaccaaggcact

SEQ ID NO: 3188463 - DNA, 25 bp, Homo sapien
ggtgatcagttatagaaggccaaac

SEQ ID NO: 3188464 - DNA, 25 bp, Homo sapien
gatatggcctagtctccaggtggtg

SEQ ID NO: 3188465 - DNA, 25 bp, Homo sapien
tctatcagtatgaacagcgtagctg

SEQ ID NO: 3188466 - DNA, 25 bp, Homo sapien
cagctaaggcatcgttctaagtttg

SEQ ID NO: 3188467 - DNA, 25 bp, Homo sapien
aggttagggagatctggtgtctcca

SEQ ID NO: 3188468 - DNA, 25 bp, Homo sapien
gaggttagggagatctggtgtctcc

SEQ ID NO: 3188469 - DNA, 25 bp, Homo sapien
gagcttgcaaaagtctgcctaggaa

SEQ ID NO: 3188470 - DNA, 25 bp, Homo sapien
tggaatgccattcccagactgagat

SEQ ID NO: 3188471 - DNA, 25 bp, Homo sapien
tctcccgcccaaggtacagtgtaat

SEQ ID NO: 3188472 - DNA, 25 bp, Homo sapien
caaaactgtgctaacgatgagaatc

SEQ ID NO: 3188473 - DNA, 25 bp, Homo sapien
aacaaaattttgcatagcaattaaa

SEQ ID NO: 3188474 - DNA, 25 bp, Homo sapien
aaattttgcatagcaattaaatcaa

SEQ ID NO: 3188475 - DNA, 25 bp, Homo sapien
gcatagcaattaaatcaaaacaaaa

SEQ ID NO: 3188476 - DNA, 25 bp, Homo sapien
ttttgcatagcaattaaatcaaaac

SEQ ID NO: 3188477 - DNA, 25 bp, Homo sapien
gttcaagccccaaccataattctaa

SEQ ID NO: 3188478 - DNA, 25 bp, Homo sapien
ggttcaagccccaaccataattcta

SEQ ID NO: 3188479 - DNA, 25 bp, Homo sapien
tcaagccccaaccataattctaatc

SEQ ID NO: 3188480 - DNA, 25 bp, Homo sapien
ttcaagccccaaccataattctaat

SEQ ID NO: 3188481 - DNA, 25 bp, Homo sapien
cagaggtgtctaaattgtcttcaca

SEQ ID NO: 3188482 - DNA, 25 bp, Homo sapien
acacagctaagtcttcccagggaag

SEQ ID NO: 3188483 - DNA, 25 bp, Homo sapien
gaccagttctttaggtttcacaata

SEQ ID NO: 3188484 - DNA, 25 bp, Homo sapien
ctgaagatgaaatcacagaggtgtc

SEQ ID NO: 3188485 - DNA, 25 bp, Homo sapien
tggccccttgttctatgaagtgagt

SEQ ID NO: 3188486 - DNA, 25 bp, Homo sapien
gctgtaacgtcccagcgttgagcgg

SEQ ID NO: 3188487 - DNA, 25 bp, Homo sapien
aatgctatcctttgatgacatgtgc

SEQ ID NO: 3188488 - DNA, 25 bp, Homo sapien
gaagtgagtggtgttgactctgtaa

SEQ ID NO: 3188489 - DNA, 25 bp, Homo sapien
ggcgtccccgtgacgccacaaggcg

SEQ ID NO: 3188490 - DNA, 25 bp, Homo sapien
gggcggggacctacgcggccctgca

SEQ ID NO: 3188491 - DNA, 25 bp, Homo sapien
gcagccgcggaaagccagactctgg

SEQ ID NO: 3188492 - DNA, 25 bp, Homo sapien
cgggcagccgcggaaagccagactc

SEQ ID NO: 3188493 - DNA, 25 bp, Homo sapien
gacacggaacgcatgaactgcctgg

SEQ ID NO: 3188494 - DNA, 25 bp, Homo sapien
gcttgacgattatcttcttggccga

SEQ ID NO: 3188495 - DNA, 25 bp, Homo sapien
acgaggaggacacggaacgcatgaa

SEQ ID NO: 3188496 - DNA, 25 bp, Homo sapien
gccgatgaccgtcacgtgcttgacg

SEQ ID NO: 3188497 - DNA, 25 bp, Homo sapien
gcagccagaattttccaaacgagga

SEQ ID NO: 3188498 - DNA, 25 bp, Homo sapien
agccagaattttccaaacgaggaag

SEQ ID NO: 3188499 - DNA, 25 bp, Homo sapien
gggcagccagaattttccaaacgag

SEQ ID NO: 3188500 - DNA, 25 bp, Homo sapien
ggggcagccagaattttccaaacga

SEQ ID NO: 3188501 - DNA, 25 bp, Homo sapien
ttatgcctgaaccttgtgcacatac

SEQ ID NO: 3188502 - DNA, 25 bp, Homo sapien
tgcattcaccgccactctccatgga

SEQ ID NO: 3188503 - DNA, 25 bp, Homo sapien
tttcttctcttgcacggcccgcttc

SEQ ID NO: 3188504 - DNA, 25 bp, Homo sapien
aaatgcattcaccgccactctccat

SEQ ID NO: 3188505 - DNA, 25 bp, Homo sapien
ctcagcagaacaatggaaaagccct

SEQ ID NO: 3188506 - DNA, 25 bp, Homo sapien
tcagctaggatacgaaaaccatggt

SEQ ID NO: 3188507 - DNA, 25 bp, Homo sapien
gcacaactgagcctgaaccacagct

SEQ ID NO: 3188508 - DNA, 25 bp, Homo sapien
ggtaatcaatcactcgcacaactga

SEQ ID NO: 3188509 - DNA, 25 bp, Homo sapien
gataagcaacaactcgggaagtagg

SEQ ID NO: 3188510 - DNA, 25 bp, Homo sapien
taatagagggtggttctacatccca

SEQ ID NO: 3188511 - DNA, 25 bp, Homo sapien
tgagagaacaaatccagtggctggg

SEQ ID NO: 3188512 - DNA, 25 bp, Homo sapien
aaaggagagcttacagccaggtaac

SEQ ID NO: 3188513 - DNA, 25 bp, Homo sapien
catcttcagagtacatgtggctgga

SEQ ID NO: 3188514 - DNA, 25 bp, Homo sapien
taactttgagtccagagccaaggag

SEQ ID NO: 3188515 - DNA, 25 bp, Homo sapien
ccaaggagacgtcaacctgggatgt

SEQ ID NO: 3188516 - DNA, 25 bp, Homo sapien
tgagtttgagtctaccatgggcaga

SEQ ID NO: 3188517 - DNA, 25 bp, Homo sapien
tgatggacactttccgggtagagga

SEQ ID NO: 3188518 - DNA, 25 bp, Homo sapien
tccctggaagatgttgctatgatgg

SEQ ID NO: 3188519 - DNA, 25 bp, Homo sapien
taaagggataaccagacatgtcaac

SEQ ID NO: 3188520 - DNA, 25 bp, Homo sapien
taataacccagataacctctcccag

SEQ ID NO: 3188521 - DNA, 25 bp, Homo sapien
caactggtctggtgactggtctccc

SEQ ID NO: 3188522 - DNA, 25 bp, Homo sapien
aggctgcagcgccttaacagcaagg

SEQ ID NO: 3188523 - DNA, 25 bp, Homo sapien
tgtgcctagacattacaaggagggc

SEQ ID NO: 3188524 - DNA, 25 bp, Homo sapien
tttctccgaagcacaacttgagtgg

SEQ ID NO: 3188525 - DNA, 25 bp, Homo sapien
tgtacactgagaacctagaccctgc

SEQ ID NO: 3188526 - DNA, 25 bp, Homo sapien
tccactgctgtagctgatggcctct

SEQ ID NO: 3188527 - DNA, 25 bp, Homo sapien
gatggcctctcctgataacgtaacc

SEQ ID NO: 3188528 - DNA, 25 bp, Homo sapien
gaactcctctactgtaggctcctga

SEQ ID NO: 3188529 - DNA, 25 bp, Homo sapien
gaagtcttgctagctgctcacatcc

SEQ ID NO: 3188530 - DNA, 25 bp, Homo sapien
gattcagcttcgacataaattttgg

SEQ ID NO: 3188531 - DNA, 25 bp, Homo sapien
tctgctgcatctagatggtgccatg

SEQ ID NO: 3188532 - DNA, 25 bp, Homo sapien
ggcaaagttggtctctcaagcccct

SEQ ID NO: 3188533 - DNA, 25 bp, Homo sapien
tatgtggagaaacaagcctatagtt

SEQ ID NO: 3188534 - DNA, 25 bp, Homo sapien
taaattacttggtggcatggtgata

SEQ ID NO: 3188535 - DNA, 25 bp, Homo sapien
ggctggcctttgctttaccaccaaa

SEQ ID NO: 3188536 - DNA, 25 bp, Homo sapien
gatcctccttaatcacctgaggctg

SEQ ID NO: 3188537 - DNA, 25 bp, Homo sapien
caagtttggattattcattcacagc

SEQ ID NO: 3188538 - DNA, 25 bp, Homo sapien
cagctgcactggagtataccacaac

SEQ ID NO: 3188539 - DNA, 25 bp, Homo sapien
taccacaacttggacagcaaggaag

SEQ ID NO: 3188540 - DNA, 25 bp, Homo sapien
ggcttccagttactcctcctgaata

SEQ ID NO: 3188541 - DNA, 25 bp, Homo sapien
cagctgcttcttttgaccttaaaaa

SEQ ID NO: 3188542 - DNA, 25 bp, Homo sapien
aaatctcttttccatctaacttctc

SEQ ID NO: 3188543 - DNA, 25 bp, Homo sapien
tcttgaaagaattatccctcattgc

SEQ ID NO: 3188544 - DNA, 25 bp, Homo sapien
tgaaagaattatccctcattgctgc

SEQ ID NO: 3188545 - DNA, 25 bp, Homo sapien
cccttaacatctccgcagggtcatg

SEQ ID NO: 3188546 - DNA, 25 bp, Homo sapien
gctcagctctcccaacccttaacat

SEQ ID NO: 3188547 - DNA, 25 bp, Homo sapien
tgaagtgtagtaactcctaaggctg

SEQ ID NO: 3188548 - DNA, 25 bp, Homo sapien
cagacacccaggtcttgaagtgtag

SEQ ID NO: 3188549 - DNA, 25 bp, Homo sapien
taacaccaacattatcaagtgcctg

SEQ ID NO: 3188550 - DNA, 25 bp, Homo sapien
attgtgaggccccattctttagcat

SEQ ID NO: 3188551 - DNA, 25 bp, Homo sapien
tagcattcgaagtcctaacaccaac

SEQ ID NO: 3188552 - DNA, 25 bp, Homo sapien
ttatcaagtgcctgtaattgctcca

SEQ ID NO: 3188553 - DNA, 25 bp, Homo sapien
aacactactgtgtgaccagttgctg

SEQ ID NO: 3188554 - DNA, 25 bp, Homo sapien
ttggattttgccaggatgtcctctg

SEQ ID NO: 3188555 - DNA, 25 bp, Homo sapien
acactactgtgtgaccagttgctgc

SEQ ID NO: 3188556 - DNA, 25 bp, Homo sapien
gattctccacgatggcttccaccac

SEQ ID NO: 3188557 - DNA, 25 bp, Homo sapien
ctgcatccgtgctggtcgctatggt

SEQ ID NO: 3188558 - DNA, 25 bp, Homo sapien
tgctgtggacaacggaggctgcatc

SEQ ID NO: 3188559 - DNA, 25 bp, Homo sapien
ggtcgctatggtgctcagggtcttc

SEQ ID NO: 3188560 - DNA, 25 bp, Homo sapien
agctatgcttgtaatctgcaaggag

SEQ ID NO: 3188561 - DNA, 25 bp, Homo sapien
tgaagaaatggaggccagcgaatcg

SEQ ID NO: 3188562 - DNA, 25 bp, Homo sapien
tcggtcttgtctggtggtggcatta

SEQ ID NO: 3188563 - DNA, 25 bp, Homo sapien
cacaagtttcatgacaggcactggg

SEQ ID NO: 3188564 - DNA, 25 bp, Homo sapien
agaaacaggatgctttcctagggct

SEQ ID NO: 3188565 - DNA, 25 bp, Homo sapien
gggctttgctaaagtctaccaaaga

SEQ ID NO: 3188566 - DNA, 25 bp, Homo sapien
tctggctggtcattggtgttttaat

SEQ ID NO: 3188567 - DNA, 25 bp, Homo sapien
aatgtcttctggctggtcattggtg

SEQ ID NO: 3188568 - DNA, 25 bp, Homo sapien
ttcttaccctggatcatgtttgccc

SEQ ID NO: 3188569 - DNA, 25 bp, Homo sapien
gtgaagtcaccaaattgccccttct

SEQ ID NO: 3188570 - DNA, 25 bp, Homo sapien
tgccccttcttaccctggatcatgt

SEQ ID NO: 3188571 - DNA, 25 bp, Homo sapien
gaagtcaccaaattgccccttctta

SEQ ID NO: 3188572 - DNA, 25 bp, Homo sapien
caggaggcggttcacaataaaccca

SEQ ID NO: 3188573 - DNA, 25 bp, Homo sapien
gcttccatgaggtatggaaccagga

SEQ ID NO: 3188574 - DNA, 25 bp, Homo sapien
cgttcatacagcctgattgcttcca

SEQ ID NO: 3188575 - DNA, 25 bp, Homo sapien
ctcgttcatacagcctgattgcttc

SEQ ID NO: 3188576 - DNA, 25 bp, Homo sapien
ggcccgacccctcctagagacactg

SEQ ID NO: 3188577 - DNA, 25 bp, Homo sapien
tcctccattgtgcacggcccgaccc

SEQ ID NO: 3188578 - DNA, 25 bp, Homo sapien
gcagctgagctcacaaagctagaaa

SEQ ID NO: 3188579 - DNA, 25 bp, Homo sapien
ccgacccctcctagagacactgaga

SEQ ID NO: 3188580 - DNA, 25 bp, Homo sapien
gagatccaggatatcaatctgggcc

SEQ ID NO: 3188581 - DNA, 25 bp, Homo sapien
ggatatcaatctgggccggccatgc

SEQ ID NO: 3188582 - DNA, 25 bp, Homo sapien
tgggccggccatgcaattgctctgg

SEQ ID NO: 3188583 - DNA, 25 bp, Homo sapien
aaaagcagagatccaggatatcaat

SEQ ID NO: 3188584 - DNA, 25 bp, Homo sapien
cctatgcagaaagggaccacagaca

SEQ ID NO: 3188585 - DNA, 25 bp, Homo sapien
caagctaagagcatgtcctgaggcc

SEQ ID NO: 3188586 - DNA, 25 bp, Homo sapien
tgataggctgttgaagcccatgccc

SEQ ID NO: 3188587 - DNA, 25 bp, Homo sapien
gcaattgcttccataaaccatagag

SEQ ID NO: 3188588 - DNA, 25 bp, Homo sapien
gggaaagaaaacacctgccatgcca

SEQ ID NO: 3188589 - DNA, 25 bp, Homo sapien
cagcaccttgggacatatgaagatg

SEQ ID NO: 3188590 - DNA, 25 bp, Homo sapien
gaacaacagaggcacttagcaacaa

SEQ ID NO: 3188591 - DNA, 25 bp, Homo sapien
tcatcagcagctgcctatgtgcccg

SEQ ID NO: 3188592 - DNA, 25 bp, Homo sapien
aagcattaagaagtcaatcagatca

SEQ ID NO: 3188593 - DNA, 25 bp, Homo sapien
gagagaaactacttaaacatcgata

SEQ ID NO: 3188594 - DNA, 25 bp, Homo sapien
caacaggtggctatctagaattttg

SEQ ID NO: 3188595 - DNA, 25 bp, Homo sapien
gaggcctttatggagaacaatctgt

SEQ ID NO: 3188596 - DNA, 25 bp, Homo sapien
cgagttagaatcaccacacgtttgg

SEQ ID NO: 3188597 - DNA, 25 bp, Homo sapien
aaacccgagttagaatcaccacacg

SEQ ID NO: 3188598 - DNA, 25 bp, Homo sapien
gcccaaacccgagttagaatcacca

SEQ ID NO: 3188599 - DNA, 25 bp, Homo sapien
ttagaatcaccacacgtttggaagt

SEQ ID NO: 3188600 - DNA, 25 bp, Homo sapien
cacacaaaccttttagtcaagatac

SEQ ID NO: 3188601 - DNA, 25 bp, Homo sapien
aatgctacagcatatttttgattta

SEQ ID NO: 3188602 - DNA, 25 bp, Homo sapien
gtatgtatagttattgtatgtattc

SEQ ID NO: 3188603 - DNA, 25 bp, Homo sapien
tacaagtaaggagtattcccctggc

SEQ ID NO: 3188604 - DNA, 25 bp, Homo sapien
agaattttatatgcttgcacaataa

SEQ ID NO: 3188605 - DNA, 25 bp, Homo sapien
taaagtacatgccaaagaggtcata

SEQ ID NO: 3188606 - DNA, 25 bp, Homo sapien
caggattagccccagaattactaga

SEQ ID NO: 3188607 - DNA, 25 bp, Homo sapien
tccctatcacaggattagccccaga

SEQ ID NO: 3188608 - DNA, 25 bp, Homo sapien
ggtaaccggctcctaatttcatagc

SEQ ID NO: 3188609 - DNA, 25 bp, Homo sapien
tcaatgtcttctttggatgcgtcac

SEQ ID NO: 3188610 - DNA, 25 bp, Homo sapien
cagtccgacataatctagaagctca

SEQ ID NO: 3188611 - DNA, 25 bp, Homo sapien
gaacttcgtagtatccagtccgaca

SEQ ID NO: 3188612 - DNA, 25 bp, Homo sapien
tccagtcttcttgccgaacttgttc

SEQ ID NO: 3188613 - DNA, 25 bp, Homo sapien
ttctctgctaccagcttatttaagg

SEQ ID NO: 3188614 - DNA, 25 bp, Homo sapien
ggctgggctgatgtaatgggttctc

SEQ ID NO: 3188615 - DNA, 25 bp, Homo sapien
gatgtaatgggttctctgcatccat

SEQ ID NO: 3188616 - DNA, 25 bp, Homo sapien
tctgaccaaagagcattcccacagg

SEQ ID NO: 3188617 - DNA, 25 bp, Homo sapien
ttctcagagccggagaagctgcaca

SEQ ID NO: 3188618 - DNA, 25 bp, Homo sapien
aaactgtactgtgtgagggaatgtc

SEQ ID NO: 3188619 - DNA, 25 bp, Homo sapien
ggctggaaagcgctctcaggtgttc

SEQ ID NO: 3188620 - DNA, 25 bp, Homo sapien
aatgtagggcaagactcaaagctgc

SEQ ID NO: 3188621 - DNA, 25 bp, Homo sapien
caacagtgagcatggtgcactcgca

SEQ ID NO: 3188622 - DNA, 25 bp, Homo sapien
tgtttgctccaaggcaccaagggtg

SEQ ID NO: 3188623 - DNA, 25 bp, Homo sapien
tactttcccgttgatgagagaagga

SEQ ID NO: 3188624 - DNA, 25 bp, Homo sapien
tcttaagcctactccctgctgctgt

SEQ ID NO: 3188625 - DNA, 25 bp, Homo sapien
aacccgatgaacataggttactggg

SEQ ID NO: 3188626 - DNA, 25 bp, Homo sapien
tgctctgaatcttaagcctactccc

SEQ ID NO: 3188627 - DNA, 25 bp, Homo sapien
tgttcagggctgtcatctgtaaccc

SEQ ID NO: 3188628 - DNA, 25 bp, Homo sapien
cccttgtaaggtgttcagtagagct

SEQ ID NO: 3188629 - DNA, 25 bp, Homo sapien
taacagatgcgttcagcagactggt

SEQ ID NO: 3188630 - DNA, 25 bp, Homo sapien
aacccactctgttggtagcaattgg

SEQ ID NO: 3188631 - DNA, 25 bp, Homo sapien
tgtaacacatagtggcttctccgcc

SEQ ID NO: 3188632 - DNA, 25 bp, Homo sapien
gctgtgcactttgtgagcactttaa

SEQ ID NO: 3188633 - DNA, 25 bp, Homo sapien
tgtgctgtgcactttgtgagcactt

SEQ ID NO: 3188634 - DNA, 25 bp, Homo sapien
gcagttcccattccatagatcacca

SEQ ID NO: 3188635 - DNA, 25 bp, Homo sapien
ggcaggtgtcctcgcagttcccatt

SEQ ID NO: 3188636 - DNA, 25 bp, Homo sapien
gctctttgatcctcctgcgtgcaag

SEQ ID NO: 3188637 - DNA, 25 bp, Homo sapien
tctttctccgtagaaaggcagggtc

SEQ ID NO: 3188638 - DNA, 25 bp, Homo sapien
cagggtccttcgtagctctttgatc

SEQ ID NO: 3188639 - DNA, 25 bp, Homo sapien
aagatccatacctctgtgggcctgg

SEQ ID NO: 3188640 - DNA, 25 bp, Homo sapien
gcatgtgttgcctcctctcgttctg

SEQ ID NO: 3188641 - DNA, 25 bp, Homo sapien
tgtgtcgtgtgaagttggaacagca

SEQ ID NO: 3188642 - DNA, 25 bp, Homo sapien
cagaaatggtcccaacctgtatgga

SEQ ID NO: 3188643 - DNA, 25 bp, Homo sapien
agtatgaatcttgcttgctgccccg

SEQ ID NO: 3188644 - DNA, 25 bp, Homo sapien
atgatgttcgagagcctgatgaggt

SEQ ID NO: 3188645 - DNA, 25 bp, Homo sapien
ctttgatgatgatgttcgagagcct

SEQ ID NO: 3188646 - DNA, 25 bp, Homo sapien
tgatgatgatgttcgagagcctgat

SEQ ID NO: 3188647 - DNA, 25 bp, Homo sapien
ttcgagagcctgatgaggtggttaa

SEQ ID NO: 3188648 - DNA, 25 bp, Homo sapien
aatgttaaattaccagctctgccac

SEQ ID NO: 3188649 - DNA, 25 bp, Homo sapien
tttaaactgtaagcagaactgcctg

SEQ ID NO: 3188650 - DNA, 25 bp, Homo sapien
tcaaattggagtacgagacagaaag

SEQ ID NO: 3188651 - DNA, 25 bp, Homo sapien
agggctcgacctaatgcctaatggc

SEQ ID NO: 3188652 - DNA, 25 bp, Homo sapien
acaaggcttgtgaataatatactga

SEQ ID NO: 3188653 - DNA, 25 bp, Homo sapien
ttgacatcccatttatcagcttgtc

SEQ ID NO: 3188654 - DNA, 25 bp, Homo sapien
aataatatactgattgattgtactg

SEQ ID NO: 3188655 - DNA, 25 bp, Homo sapien
tcacaaggcttgtgaataatatact

SEQ ID NO: 3188656 - DNA, 25 bp, Homo sapien
cctagctgtcagttcaccggcatgc

SEQ ID NO: 3188657 - DNA, 25 bp, Homo sapien
ccccagagagtcagattgatgccat

SEQ ID NO: 3188658 - DNA, 25 bp, Homo sapien
agcctagaagacagtgcggactccc

SEQ ID NO: 3188659 - DNA, 25 bp, Homo sapien
gatgccatttatggaactccagaga

SEQ ID NO: 3188660 - DNA, 25 bp, Homo sapien
tcgctggcttgcttccactggacac

SEQ ID NO: 3188661 - DNA, 25 bp, Homo sapien
ggacactgaaaatgaagcccatcat

SEQ ID NO: 3188662 - DNA, 25 bp, Homo sapien
cactggacactgaaaatgaagccca

SEQ ID NO: 3188663 - DNA, 25 bp, Homo sapien
catattgtcgctggcttgcttccac

SEQ ID NO: 3188664 - DNA, 25 bp, Homo sapien
ttaaaagctgtgtatcaaggttgag

SEQ ID NO: 3188665 - DNA, 25 bp, Homo sapien
caaggttgaggtcctttgtaactat

SEQ ID NO: 3188666 - DNA, 25 bp, Homo sapien
gaaacctcaaagtcgaagcacactg

SEQ ID NO: 3188667 - DNA, 25 bp, Homo sapien
gaaaggaaacctcaaagtcgaagca

SEQ ID NO: 3188668 - DNA, 25 bp, Homo sapien
tcattatgtgttctttcatttggtg

SEQ ID NO: 3188669 - DNA, 25 bp, Homo sapien
aggggctctgtttgcatcattaaca

SEQ ID NO: 3188670 - DNA, 25 bp, Homo sapien
gggctctgtttgcatcattaacatg

SEQ ID NO: 3188671 - DNA, 25 bp, Homo sapien
gctctgtttgcatcattaacatgaa

SEQ ID NO: 3188672 - DNA, 25 bp, Homo sapien
cttgcatttcttcatttgtccttac

SEQ ID NO: 3188673 - DNA, 25 bp, Homo sapien
ctgggcacatcttgcatttcttcat

SEQ ID NO: 3188674 - DNA, 25 bp, Homo sapien
catcttgcatttcttcatttgtcct

SEQ ID NO: 3188675 - DNA, 25 bp, Homo sapien
acatcttgcatttcttcatttgtcc

SEQ ID NO: 3188676 - DNA, 25 bp, Homo sapien
ttcctctttagtgaactgtatggca

SEQ ID NO: 3188677 - DNA, 25 bp, Homo sapien
tctcaaaatgctatctggttccatg

SEQ ID NO: 3188678 - DNA, 25 bp, Homo sapien
tggttccatgtagctttctttctga

SEQ ID NO: 3188679 - DNA, 25 bp, Homo sapien
tcttcctctttagtgaactgtatgg

SEQ ID NO: 3188680 - DNA, 25 bp, Homo sapien
ggaggtcctgttgaattcttcgaag

SEQ ID NO: 3188681 - DNA, 25 bp, Homo sapien
agacttgggtttagggtgctgtgat

SEQ ID NO: 3188682 - DNA, 25 bp, Homo sapien
tcgaagagcagatttgtagttgttg

SEQ ID NO: 3188683 - DNA, 25 bp, Homo sapien
ctcccatttgaaggagtgccaggga

SEQ ID NO: 3188684 - DNA, 25 bp, Homo sapien
gcttgtgtgttgtttctgcaataac

SEQ ID NO: 3188685 - DNA, 25 bp, Homo sapien
ttttcttgttaacataagatgcttg

SEQ ID NO: 3188686 - DNA, 25 bp, Homo sapien
ctgcaataaccactttctggaaggg

SEQ ID NO: 3188687 - DNA, 25 bp, Homo sapien
gcaataaccactttctggaagggcc

SEQ ID NO: 3188688 - DNA, 25 bp, Homo sapien
caggccagtgggagcacaattcgga

SEQ ID NO: 3188689 - DNA, 25 bp, Homo sapien
gcacaattcggatgctcgtctcctc

SEQ ID NO: 3188690 - DNA, 25 bp, Homo sapien
cataagtgctgctcgggataattcc

SEQ ID NO: 3188691 - DNA, 25 bp, Homo sapien
tccgttccttttaggcagcagctcc

SEQ ID NO: 3188692 - DNA, 25 bp, Homo sapien
tcacaccctaatgtacataccaaag

SEQ ID NO: 3188693 - DNA, 25 bp, Homo sapien
cagtggagagattgctaaaactgac

SEQ ID NO: 3188694 - DNA, 25 bp, Homo sapien
ttcagaacatagttatgaccactag

SEQ ID NO: 3188695 - DNA, 25 bp, Homo sapien
tgaccactagactcaggaataggac

SEQ ID NO: 3188696 - DNA, 25 bp, Homo sapien
ttgtttatgaagtggaacatgctgg

SEQ ID NO: 3188697 - DNA, 25 bp, Homo sapien
tttttgttctctatctggaattttc

SEQ ID NO: 3188698 - DNA, 25 bp, Homo sapien
agagaatgagcagaacaaccttagt

SEQ ID NO: 3188699 - DNA, 25 bp, Homo sapien
gagcagaacaaccttagtttcgttg

SEQ ID NO: 3188700 - DNA, 25 bp, Homo sapien
cagacacagatcattcatggtggag

SEQ ID NO: 3188701 - DNA, 25 bp, Homo sapien
attaagttgtaagacgtgcagcccc

SEQ ID NO: 3188702 - DNA, 25 bp, Homo sapien
tatgtgtgccctatctaaaacctga

SEQ ID NO: 3188703 - DNA, 25 bp, Homo sapien
gcttcactgcgaaaatacaaatgtg

SEQ ID NO: 3188704 - DNA, 25 bp, Homo sapien
gtgggaataactccctccaccttca

SEQ ID NO: 3188705 - DNA, 25 bp, Homo sapien
ttcttgccggctagcagacacagca

SEQ ID NO: 3188706 - DNA, 25 bp, Homo sapien
tgctagaggctctccatagacaaag

SEQ ID NO: 3188707 - DNA, 25 bp, Homo sapien
ggcgttgttgcctagaggcccctgt

SEQ ID NO: 3188708 - DNA, 25 bp, Homo sapien
gcagagaacactggagtcccgctga

SEQ ID NO: 3188709 - DNA, 25 bp, Homo sapien
gagaacactggagtcccgctgacat

SEQ ID NO: 3188710 - DNA, 25 bp, Homo sapien
cacatctcgatgacaattatagaca

SEQ ID NO: 3188711 - DNA, 25 bp, Homo sapien
ccgctgacatgccacatctcgatga

SEQ ID NO: 3188712 - DNA, 25 bp, Homo sapien
gaatgctggcagaatgtaatgcagc

SEQ ID NO: 3188713 - DNA, 25 bp, Homo sapien
tgccactcgcttgcattgaaaaaag

SEQ ID NO: 3188714 - DNA, 25 bp, Homo sapien
ggctttccatattcccagggcgcac

SEQ ID NO: 3188715 - DNA, 25 bp, Homo sapien
gcacaactgcttgcggccttggctt

SEQ ID NO: 3188716 - DNA, 25 bp, Homo sapien
gttccatgtggcccatttgaagcat

SEQ ID NO: 3188717 - DNA, 25 bp, Homo sapien
tcagttccatgtggcccatttgaag

SEQ ID NO: 3188718 - DNA, 25 bp, Homo sapien
ctttcagttccatgtggcccatttg

SEQ ID NO: 3188719 - DNA, 25 bp, Homo sapien
ctgctttcagttccatgtggcccat

SEQ ID NO: 3188720 - DNA, 25 bp, Homo sapien
ggttgccaaagagatgagtgtcctt

SEQ ID NO: 3188721 - DNA, 25 bp, Homo sapien
aggttgccaaagagatgagtgtcct

SEQ ID NO: 3188722 - DNA, 25 bp, Homo sapien
ttccttgtagagagtgcatgaggtg

SEQ ID NO: 3188723 - DNA, 25 bp, Homo sapien
gatgagtgtccttccttgtagagag

SEQ ID NO: 3188724 - DNA, 25 bp, Homo sapien
aagtgcacacgctatctcttggtag

SEQ ID NO: 3188725 - DNA, 25 bp, Homo sapien
tagggctgaataacgctactgataa

SEQ ID NO: 3188726 - DNA, 25 bp, Homo sapien
tctctgcaaaagtgcgttaaaccac

SEQ ID NO: 3188727 - DNA, 25 bp, Homo sapien
ccgtgctttaaagcgagtagggctg

SEQ ID NO: 3188728 - DNA, 25 bp, Homo sapien
ccttcaaggacgagggcgatcctca

SEQ ID NO: 3188729 - DNA, 25 bp, Homo sapien
tcccgaagaggaaggcgatttagct

SEQ ID NO: 3188730 - DNA, 25 bp, Homo sapien
tgaacgagtctgaaatcatcccggc

SEQ ID NO: 3188731 - DNA, 25 bp, Homo sapien
ccggctgagggtcccgagtagatcc

SEQ ID NO: 3188732 - DNA, 25 bp, Homo sapien
caagggtccctttcagttcgcagtc

SEQ ID NO: 3188733 - DNA, 25 bp, Homo sapien
taaaacggacatctccagcgtgggt

SEQ ID NO: 3188734 - DNA, 25 bp, Homo sapien
gatgatgaagtcaagccactgcggc

SEQ ID NO: 3188735 - DNA, 25 bp, Homo sapien
taactacagtggagagggtttccgc

SEQ ID NO: 3188736 - DNA, 25 bp, Homo sapien
tccgcgaagtccgttaaactgaaga

SEQ ID NO: 3188737 - DNA, 25 bp, Homo sapien
cacagctttcgtctccgggtgaagc

SEQ ID NO: 3188738 - DNA, 25 bp, Homo sapien
caaagtcgtagctgggagagagtcc

SEQ ID NO: 3188739 - DNA, 25 bp, Homo sapien
gggttccgcctctggagtcacatta

SEQ ID NO: 3188740 - DNA, 25 bp, Homo sapien
tcctgtggcccgcaaaatgactcca

SEQ ID NO: 3188741 - DNA, 25 bp, Homo sapien
tgtggcccgcaaaatgactccagct

SEQ ID NO: 3188742 - DNA, 25 bp, Homo sapien
gtggcccgcaaaatgactccagctc

SEQ ID NO: 3188743 - DNA, 25 bp, Homo sapien
agtcctgtggcccgcaaaatgactc

SEQ ID NO: 3188744 - DNA, 25 bp, Homo sapien
agccgccgcgacttcaaaggccgcg

SEQ ID NO: 3188745 - DNA, 25 bp, Homo sapien
cgccgcgacttcaaaggccgcgccg

SEQ ID NO: 3188746 - DNA, 25 bp, Homo sapien
cgcgacttcaaaggccgcgccgccg

SEQ ID NO: 3188747 - DNA, 25 bp, Homo sapien
agaaaggatgaaagcggcagccgcc

SEQ ID NO: 3188748 - DNA, 25 bp, Homo sapien
ttgccaaatttagtcacacaaaggg

SEQ ID NO: 3188749 - DNA, 25 bp, Homo sapien
gaacccttggccttctcagctggga

SEQ ID NO: 3188750 - DNA, 25 bp, Homo sapien
agagaacccttggccttctcagctg

SEQ ID NO: 3188751 - DNA, 25 bp, Homo sapien
ttcttgccaaatttagtcacacaaa

SEQ ID NO: 3188752 - DNA, 25 bp, Homo sapien
gaaagaaagagagctatatagagag

SEQ ID NO: 3188753 - DNA, 25 bp, Homo sapien
tcaattcacatttcagatccagctc

SEQ ID NO: 3188754 - DNA, 25 bp, Homo sapien
cagctccccaaactctttgatcttt

SEQ ID NO: 3188755 - DNA, 25 bp, Homo sapien
gctatatagagagccggcctctgct

SEQ ID NO: 3188756 - DNA, 25 bp, Homo sapien
atggtcatagcatggacgcgagagc

SEQ ID NO: 3188757 - DNA, 25 bp, Homo sapien
gggtaacaactgcttcagtgatttt

SEQ ID NO: 3188758 - DNA, 25 bp, Homo sapien
gagagcgtaacactgtccccatttg

SEQ ID NO: 3188759 - DNA, 25 bp, Homo sapien
tgtaacacaactgatggaggcgtgg

SEQ ID NO: 3188760 - DNA, 25 bp, Homo sapien
aagttgaccagtgaacttgatcagc

SEQ ID NO: 3188761 - DNA, 25 bp, Homo sapien
gaagttgaccagtgaacttgatcag

SEQ ID NO: 3188762 - DNA, 25 bp, Homo sapien
tgaagttgaccagtgaacttgatca

SEQ ID NO: 3188763 - DNA, 25 bp, Homo sapien
ccccccaaaagcaagatagaatcct

SEQ ID NO: 3188764 - DNA, 25 bp, Homo sapien
tagaatccttgaactatcttcctct

SEQ ID NO: 3188765 - DNA, 25 bp, Homo sapien
caaaagcaagatagaatccttgaac

SEQ ID NO: 3188766 - DNA, 25 bp, Homo sapien
attgccccccaaaagcaagatagaa

SEQ ID NO: 3188767 - DNA, 25 bp, Homo sapien
gataaacaatgagactaacgacctt

SEQ ID NO: 3188768 - DNA, 25 bp, Homo sapien
cctcaaaccaggcattacgtgcttg

SEQ ID NO: 3188769 - DNA, 25 bp, Homo sapien
caaaggcaggctgcaaccactgtag

SEQ ID NO: 3188770 - DNA, 25 bp, Homo sapien
tacgtgcttgcccaatgccaacaga

SEQ ID NO: 3188771 - DNA, 25 bp, Homo sapien
ccacgcttcactgtgcctgtgtagg

SEQ ID NO: 3188772 - DNA, 25 bp, Homo sapien
cacgcttcactgtgcctgtgtagga

SEQ ID NO: 3188773 - DNA, 25 bp, Homo sapien
gtcaatcaggtactttcctggagca

SEQ ID NO: 3188774 - DNA, 25 bp, Homo sapien
ctgggcattggatgtagatcttgtc

SEQ ID NO: 3188775 - DNA, 25 bp, Homo sapien
gtttatttactttgatggaactcac

SEQ ID NO: 3188776 - DNA, 25 bp, Homo sapien
tggtttatttactttgatggaactc

SEQ ID NO: 3188777 - DNA, 25 bp, Homo sapien
ggtttatttactttgatggaactca

SEQ ID NO: 3188778 - DNA, 25 bp, Homo sapien
gactgtcagtcgttaagacaacaga

SEQ ID NO: 3188779 - DNA, 25 bp, Homo sapien
ggtccttagtcacttgctcccctaa

SEQ ID NO: 3188780 - DNA, 25 bp, Homo sapien
tgtctggagcaaaccaagacctctt

SEQ ID NO: 3188781 - DNA, 25 bp, Homo sapien
aagacctcttccgactgtcagtcgt

SEQ ID NO: 3188782 - DNA, 25 bp, Homo sapien
tctaacttacgtagccaccaggcaa

SEQ ID NO: 3188783 - DNA, 25 bp, Homo sapien
ccacatgctgtagggttgacgaaga

SEQ ID NO: 3188784 - DNA, 25 bp, Homo sapien
tcaggtgaccttctggcaccaattc

SEQ ID NO: 3188785 - DNA, 25 bp, Homo sapien
tgggagccctaagataacagccttg

SEQ ID NO: 3188786 - DNA, 25 bp, Homo sapien
ggaagctctttaagagcccccacag

SEQ ID NO: 3188787 - DNA, 25 bp, Homo sapien
tagaaaatctccctctagcaacata

SEQ ID NO: 3188788 - DNA, 25 bp, Homo sapien
caaagttacccttagtggaagctct

SEQ ID NO: 3188789 - DNA, 25 bp, Homo sapien
aactagaaaatctccctctagcaac

SEQ ID NO: 3188790 - DNA, 25 bp, Homo sapien
tgctctgctctgtgtcgacaggttc

SEQ ID NO: 3188791 - DNA, 25 bp, Homo sapien
gaaacctggccttatcttgctctgc

SEQ ID NO: 3188792 - DNA, 25 bp, Homo sapien
tctttgtgtataatataccatgtct

SEQ ID NO: 3188793 - DNA, 25 bp, Homo sapien
tttgatggtaaacagctattctttc

SEQ ID NO: 3188794 - DNA, 25 bp, Homo sapien
caatgtaggcacttcgtgccttacc

SEQ ID NO: 3188795 - DNA, 25 bp, Homo sapien
ctttggtgcaatgtaggcacttcgt

SEQ ID NO: 3188796 - DNA, 25 bp, Homo sapien
acttcgtgccttaccatgctgaatg

SEQ ID NO: 3188797 - DNA, 25 bp, Homo sapien
tattcacaggtctttggtgcaatgt

SEQ ID NO: 3188798 - DNA, 25 bp, Homo sapien
tcacttgaacagagtgcaagccaat

SEQ ID NO: 3188799 - DNA, 25 bp, Homo sapien
tgtcctaaggctgtcttcttgaact

SEQ ID NO: 3188800 - DNA, 25 bp, Homo sapien
cctcaagcagttccatcaagggatg

SEQ ID NO: 3188801 - DNA, 25 bp, Homo sapien
caatgttttcgaggagaatatgctg

SEQ ID NO: 3188802 - DNA, 25 bp, Homo sapien
tcctaagtaatttcagaagattaac

SEQ ID NO: 3188803 - DNA, 25 bp, Homo sapien
taggaaacttcataggccgagcagg

SEQ ID NO: 3188804 - DNA, 25 bp, Homo sapien
cagaagattaacttttagataggaa

SEQ ID NO: 3188805 - DNA, 25 bp, Homo sapien
cttttagataggaaacttcataggc

SEQ ID NO: 3188806 - DNA, 25 bp, Homo sapien
ggtaattaattagcaggcaccccac

SEQ ID NO: 3188807 - DNA, 25 bp, Homo sapien
gacagagaaagatggtaaaggtgca

SEQ ID NO: 3188808 - DNA, 25 bp, Homo sapien
ggagtgatatacttagtcctttttg

SEQ ID NO: 3188809 - DNA, 25 bp, Homo sapien
agtgatatacttagtcctttttgtt

SEQ ID NO: 3188810 - DNA, 25 bp, Homo sapien
agggctgaatgctatttgccagtac

SEQ ID NO: 3188811 - DNA, 25 bp, Homo sapien
atataattaagcaggaaatagggct

SEQ ID NO: 3188812 - DNA, 25 bp, Homo sapien
taattaagcaggaaatagggctgaa

SEQ ID NO: 3188813 - DNA, 25 bp, Homo sapien
aaatagggctgaatgctatttgcca

SEQ ID NO: 3188814 - DNA, 25 bp, Homo sapien
taatattggcttatccctgaggata

SEQ ID NO: 3188815 - DNA, 25 bp, Homo sapien
ccttaatattggcttatccctgagg

SEQ ID NO: 3188816 - DNA, 25 bp, Homo sapien
cattctccttaatattggcttatcc

SEQ ID NO: 3188817 - DNA, 25 bp, Homo sapien
ttggcttatccctgaggataccatt

SEQ ID NO: 3188818 - DNA, 25 bp, Homo sapien
tgactgaacccaaggccattcgcct

SEQ ID NO: 3188819 - DNA, 25 bp, Homo sapien
gccattcgcctttccttgacttttg

SEQ ID NO: 3188820 - DNA, 25 bp, Homo sapien
aaactttctaggctcctgtctgcct

SEQ ID NO: 3188821 - DNA, 25 bp, Homo sapien
tggtataaactttctaggctcctgt

SEQ ID NO: 3188822 - DNA, 25 bp, Homo sapien
gcaccacaggtagttgcactgcagt

SEQ ID NO: 3188823 - DNA, 25 bp, Homo sapien
catgaactgtccttttggatagacg

SEQ ID NO: 3188824 - DNA, 25 bp, Homo sapien
ttctgtagaagtaagaggatgaggt

SEQ ID NO: 3188825 - DNA, 25 bp, Homo sapien
catggtggtccacacaagctttctg

SEQ ID NO: 3188826 - DNA, 25 bp, Homo sapien
ggatttataacattccttgacggag

SEQ ID NO: 3188827 - DNA, 25 bp, Homo sapien
cattccttgacggagagtggaccca

SEQ ID NO: 3188828 - DNA, 25 bp, Homo sapien
ctgagccacattggcttctccagcc

SEQ ID NO: 3188829 - DNA, 25 bp, Homo sapien
agggacaccacgtggatttataaca

SEQ ID NO: 3188830 - DNA, 25 bp, Homo sapien
cttgtcctgtccaaaataactcgtt

SEQ ID NO: 3188831 - DNA, 25 bp, Homo sapien
tcctgtccaaaataactcgttctgg

SEQ ID NO: 3188832 - DNA, 25 bp, Homo sapien
tgtccaaaataactcgttctggagc

SEQ ID NO: 3188833 - DNA, 25 bp, Homo sapien
tgtcctgtccaaaataactcgttct

SEQ ID NO: 3188834 - DNA, 25 bp, Homo sapien
tgccattgcttctccagtatctaat

SEQ ID NO: 3188835 - DNA, 25 bp, Homo sapien
ggaaattggtcttggtcgtttcaga

SEQ ID NO: 3188836 - DNA, 25 bp, Homo sapien
aatatgtcgtgtacctgaacactgg

SEQ ID NO: 3188837 - DNA, 25 bp, Homo sapien
cgtttcagagaatatgtcgtgtacc

SEQ ID NO: 3188838 - DNA, 25 bp, Homo sapien
gaatgcaagctccttggaagctgag

SEQ ID NO: 3188839 - DNA, 25 bp, Homo sapien
cactttgttgcagaatccggtacaa

SEQ ID NO: 3188840 - DNA, 25 bp, Homo sapien
gcagaatccggtacaagagctttat

SEQ ID NO: 3188841 - DNA, 25 bp, Homo sapien
taatttacactttgttgcagaatcc

SEQ ID NO: 3188842 - DNA, 25 bp, Homo sapien
ttgttgcagaatccggtacaagagc

SEQ ID NO: 3188843 - DNA, 25 bp, Homo sapien
tgaggttattggagaaacagaacgg

SEQ ID NO: 3188844 - DNA, 25 bp, Homo sapien
gaacgggggcatgccccatttcttc

SEQ ID NO: 3188845 - DNA, 25 bp, Homo sapien
acagggcagcgatgggaagagaagg

SEQ ID NO: 3188846 - DNA, 25 bp, Homo sapien
ctgctagtgacagggcagcgatggg

SEQ ID NO: 3188847 - DNA, 25 bp, Homo sapien
gctgtttcttacacgacacagcata

SEQ ID NO: 3188848 - DNA, 25 bp, Homo sapien
gtgctgtttcttacacgacacagca

SEQ ID NO: 3188849 - DNA, 25 bp, Homo sapien
ctgtgctgtttcttacacgacacag

SEQ ID NO: 3188850 - DNA, 25 bp, Homo sapien
ctgtttcttacacgacacagcatac

SEQ ID NO: 3188851 - DNA, 25 bp, Homo sapien
gcaggtcagcccactgacctctaga

SEQ ID NO: 3188852 - DNA, 25 bp, Homo sapien
tttcccacggctcgctgcacatggt

SEQ ID NO: 3188853 - DNA, 25 bp, Homo sapien
tgttagtgcctgagagtggtctgcc

SEQ ID NO: 3188854 - DNA, 25 bp, Homo sapien
gacctctagagctgattctagtgac

SEQ ID NO: 3188855 - DNA, 25 bp, Homo sapien
agccagcttggtgagacttgtccac

SEQ ID NO: 3188856 - DNA, 25 bp, Homo sapien
catgaggaaatcactgtgggaacac

SEQ ID NO: 3188857 - DNA, 25 bp, Homo sapien
gatgtcactatcatgctggccggtg

SEQ ID NO: 3188858 - DNA, 25 bp, Homo sapien
aagtttcgatttttgaggagcagcc

SEQ ID NO: 3188859 - DNA, 25 bp, Homo sapien
ctctgtttgtccagatataggcata

SEQ ID NO: 3188860 - DNA, 25 bp, Homo sapien
agacctgtctggaaactcagggacc

SEQ ID NO: 3188861 - DNA, 25 bp, Homo sapien
tgagcaaagacctgtctggaaactc

SEQ ID NO: 3188862 - DNA, 25 bp, Homo sapien
tataggcataagctggtgagcaaag

SEQ ID NO: 3188863 - DNA, 25 bp, Homo sapien
tctgtcgttgttaggcacatttcac

SEQ ID NO: 3188864 - DNA, 25 bp, Homo sapien
atttgtctggactagcattttgttg

SEQ ID NO: 3188865 - DNA, 25 bp, Homo sapien
gaaaatgtatatgtgaccatttgaa

SEQ ID NO: 3188866 - DNA, 25 bp, Homo sapien
catgtcatggaaatctgtgaaaatg

SEQ ID NO: 3188867 - DNA, 25 bp, Homo sapien
ccattaagtgtatggagggtctgca

SEQ ID NO: 3188868 - DNA, 25 bp, Homo sapien
catcgtaataataccaagctctcca

SEQ ID NO: 3188869 - DNA, 25 bp, Homo sapien
aaagatgtcaactcatcctccaaca

SEQ ID NO: 3188870 - DNA, 25 bp, Homo sapien
tgcaaatcacatgagctcatcctag

SEQ ID NO: 3188871 - DNA, 25 bp, Homo sapien
tgggtccagcaaaatggtttcccca

SEQ ID NO: 3188872 - DNA, 25 bp, Homo sapien
agttgagtatcagtcctggctctac

SEQ ID NO: 3188873 - DNA, 25 bp, Homo sapien
aaggccgagaagtgacagtagccac

SEQ ID NO: 3188874 - DNA, 25 bp, Homo sapien
cttggacaaattactggaactctgt

SEQ ID NO: 3188875 - DNA, 25 bp, Homo sapien
gaaaactgcgtttcacaagctgata

SEQ ID NO: 3188876 - DNA, 25 bp, Homo sapien
ctggaatgaattgaggtatgtaaaa

SEQ ID NO: 3188877 - DNA, 25 bp, Homo sapien
gaacttgaagggtatgaaatgccag

SEQ ID NO: 3188878 - DNA, 25 bp, Homo sapien
agggtatgaaatgccagtggaattc

SEQ ID NO: 3188879 - DNA, 25 bp, Homo sapien
aatgccagtggaattcttcacaatg

SEQ ID NO: 3188880 - DNA, 25 bp, Homo sapien
cagctgtatgatgtagaacttgaag

SEQ ID NO: 3188881 - DNA, 25 bp, Homo sapien
taagatggctgcctgccacatggcc

SEQ ID NO: 3188882 - DNA, 25 bp, Homo sapien
tgtaagatggctgcctgccacatgg

SEQ ID NO: 3188883 - DNA, 25 bp, Homo sapien
ctgtaagatggctgcctgccacatg

SEQ ID NO: 3188884 - DNA, 25 bp, Homo sapien
agatggctgcctgccacatggccat

SEQ ID NO: 3188885 - DNA, 25 bp, Homo sapien
tctgcacggctgtttttagaggcag

SEQ ID NO: 3188886 - DNA, 25 bp, Homo sapien
agctctcgagcaggcctagaggcct

SEQ ID NO: 3188887 - DNA, 25 bp, Homo sapien
cagtgtctcctgattagcccggaga

SEQ ID NO: 3188888 - DNA, 25 bp, Homo sapien
tgttaaaccctctgcttaggctcgt

SEQ ID NO: 3188889 - DNA, 25 bp, Homo sapien
gaaaagaacacagaaggtcaagagc

SEQ ID NO: 3188890 - DNA, 25 bp, Homo sapien
aaagaacacagaaggtcaagagcat

SEQ ID NO: 3188891 - DNA, 25 bp, Homo sapien
cgaaaagaacacagaaggtcaagag

SEQ ID NO: 3188892 - DNA, 25 bp, Homo sapien
ctcgaaaagaacacagaaggtcaag

SEQ ID NO: 3188893 - DNA, 25 bp, Homo sapien
tgtctgtgcactacccaggcccaac

SEQ ID NO: 3188894 - DNA, 25 bp, Homo sapien
cctgccaagccatctcgagtggttt

SEQ ID NO: 3188895 - DNA, 25 bp, Homo sapien
tctcgagtggtttcttcagtgaaga

SEQ ID NO: 3188896 - DNA, 25 bp, Homo sapien
acagagcgtggctcctgccaagcca

SEQ ID NO: 3188897 - DNA, 25 bp, Homo sapien
tataagactgggagttactggatcc

SEQ ID NO: 3188898 - DNA, 25 bp, Homo sapien
tattctggatcttagtataagactg

SEQ ID NO: 3188899 - DNA, 25 bp, Homo sapien
gactgggagttactggatccaagta

SEQ ID NO: 3188900 - DNA, 25 bp, Homo sapien
gagttactggatccaagtacaagaa

SEQ ID NO: 3188901 - DNA, 25 bp, Homo sapien
cgaggtccactgaggctgcctcaag

SEQ ID NO: 3188902 - DNA, 25 bp, Homo sapien
gctgcctcaagtgacaaggagtcac

SEQ ID NO: 3188903 - DNA, 25 bp, Homo sapien
ggagtcaccctcaccagctgaagga

SEQ ID NO: 3188904 - DNA, 25 bp, Homo sapien
agcttcccccgtgcaaggacgaggt

SEQ ID NO: 3188905 - DNA, 25 bp, Homo sapien
gtttactgacctgtaaattactcca

SEQ ID NO: 3188906 - DNA, 25 bp, Homo sapien
tgctccggcatctccaggaaagtgt

SEQ ID NO: 3188907 - DNA, 25 bp, Homo sapien
caaatcccatattatctgtaccaaa

SEQ ID NO: 3188908 - DNA, 25 bp, Homo sapien
ggactgatattctgagtcacaacaa

SEQ ID NO: 3188909 - DNA, 25 bp, Homo sapien
tccctcacggcatctgtttcttttc

SEQ ID NO: 3188910 - DNA, 25 bp, Homo sapien
aatttctccctcacggcatctgttt

SEQ ID NO: 3188911 - DNA, 25 bp, Homo sapien
caatttctccctcacggcatctgtt

SEQ ID NO: 3188912 - DNA, 25 bp, Homo sapien
ccctcacggcatctgtttcttttcc

SEQ ID NO: 3188913 - DNA, 25 bp, Homo sapien
taaatcactgatgtcaaatcatttc

SEQ ID NO: 3188914 - DNA, 25 bp, Homo sapien
atcactgatgtcaaatcatttccat

SEQ ID NO: 3188915 - DNA, 25 bp, Homo sapien
taagtagcgaaatagtttgagtgaa

SEQ ID NO: 3188916 - DNA, 25 bp, Homo sapien
ttccccagttttgctagtaagtagc

SEQ ID NO: 3188917 - DNA, 25 bp, Homo sapien
gagccactgtgaaaggtagttattt

SEQ ID NO: 3188918 - DNA, 25 bp, Homo sapien
ccttgcaatgggtagcgcaggtggc

SEQ ID NO: 3188919 - DNA, 25 bp, Homo sapien
ttataatgtctggtggcttttgatc

SEQ ID NO: 3188920 - DNA, 25 bp, Homo sapien
taaggagccgttatgggagaaactg

SEQ ID NO: 3188921 - DNA, 25 bp, Homo sapien
gatttcatgggaacaccacactttg

SEQ ID NO: 3188922 - DNA, 25 bp, Homo sapien
aacgcatgctggcttaaatggtgac

SEQ ID NO: 3188923 - DNA, 25 bp, Homo sapien
cacactcttatcaagcactcagatg

SEQ ID NO: 3188924 - DNA, 25 bp, Homo sapien
tgacagctgcatgcaacgggcttgc

SEQ ID NO: 3188925 - DNA, 25 bp, Homo sapien
tggtcagtgaaagcaaacgtcggac

SEQ ID NO: 3188926 - DNA, 25 bp, Homo sapien
gtcagtgaaagcaaacgtcggaccc

SEQ ID NO: 3188927 - DNA, 25 bp, Homo sapien
cagtgaaagcaaacgtcggaccctc

SEQ ID NO: 3188928 - DNA, 25 bp, Homo sapien
gtgaaagcaaacgtcggaccctcca

SEQ ID NO: 3188929 - DNA, 25 bp, Homo sapien
ggaatgagccaaccctgctctaggt

SEQ ID NO: 3188930 - DNA, 25 bp, Homo sapien
gtaggaatgagccaaccctgctcta

SEQ ID NO: 3188931 - DNA, 25 bp, Homo sapien
cctgctctaggtttcactggactca

SEQ ID NO: 3188932 - DNA, 25 bp, Homo sapien
ctgctctaggtttcactggactcaa

SEQ ID NO: 3188933 - DNA, 25 bp, Homo sapien
agcctcccgccaccaaagtgtcagt

SEQ ID NO: 3188934 - DNA, 25 bp, Homo sapien
gcctcccgccaccaaagtgtcagtg

SEQ ID NO: 3188935 - DNA, 25 bp, Homo sapien
ctttgtaaagcagcgtggacttccc

SEQ ID NO: 3188936 - DNA, 25 bp, Homo sapien
ctgagactgtgccaagccggctgag

SEQ ID NO: 3188937 - DNA, 25 bp, Homo sapien
gctctttgtaaagcagcgtggactt

SEQ ID NO: 3188938 - DNA, 25 bp, Homo sapien
gcagcgtggacttcccagagctgag

SEQ ID NO: 3188939 - DNA, 25 bp, Homo sapien
tcaagccctgtgttcgtctactgct

SEQ ID NO: 3188940 - DNA, 25 bp, Homo sapien
tgcagtgttgagctttctcgcccac

SEQ ID NO: 3188941 - DNA, 25 bp, Homo sapien
aaagcagtgccgatccttttgaggg

SEQ ID NO: 3188942 - DNA, 25 bp, Homo sapien
gtctactgcttcagaaatccttcta

SEQ ID NO: 3188943 - DNA, 25 bp, Homo sapien
tcctccttctgccgaaggaggaaga

SEQ ID NO: 3188944 - DNA, 25 bp, Homo sapien
ctcctccttctgccgaaggaggaag

SEQ ID NO: 3188945 - DNA, 25 bp, Homo sapien
cctccttctgccgaaggaggaagac

SEQ ID NO: 3188946 - DNA, 25 bp, Homo sapien
ccttctgccgaaggaggaagacttg

SEQ ID NO: 3188947 - DNA, 25 bp, Homo sapien
aagggctcgggtagaaggagcatcc

SEQ ID NO: 3188948 - DNA, 25 bp, Homo sapien
agcagtgcggcatccgtacttggtt

SEQ ID NO: 3188949 - DNA, 25 bp, Homo sapien
tgcggcatccgtacttggttaccgg

SEQ ID NO: 3188950 - DNA, 25 bp, Homo sapien
gcatcccgtgtgtcctgcatctgct

SEQ ID NO: 3188951 - DNA, 25 bp, Homo sapien
ggtcgtgctacttctcaggcctgac

SEQ ID NO: 3188952 - DNA, 25 bp, Homo sapien
gggcagagacaaatacaacatgcag

SEQ ID NO: 3188953 - DNA, 25 bp, Homo sapien
aatacaacatgcagaggtcgtgcta

SEQ ID NO: 3188954 - DNA, 25 bp, Homo sapien
catgcagaggtcgtgctacttctca

SEQ ID NO: 3188955 - DNA, 25 bp, Homo sapien
caggagcccgcagcgggagtcttct

SEQ ID NO: 3188956 - DNA, 25 bp, Homo sapien
ttcccctcaggagcccgcagcggga

SEQ ID NO: 3188957 - DNA, 25 bp, Homo sapien
gattgacgttcaccctttccaagat

SEQ ID NO: 3188958 - DNA, 25 bp, Homo sapien
cctcaggagcccgcagcgggagtct

SEQ ID NO: 3188959 - DNA, 25 bp, Homo sapien
gaggatgtggccagcttctgctcac

SEQ ID NO: 3188960 - DNA, 25 bp, Homo sapien
ctgggaccaggatgatagcaccagc

SEQ ID NO: 3188961 - DNA, 25 bp, Homo sapien
cctttgctgttccttaactggggtg

SEQ ID NO: 3188962 - DNA, 25 bp, Homo sapien
gttcttaatggccagggtttttgca

SEQ ID NO: 3188963 - DNA, 25 bp, Homo sapien
ccaggatgatagcaccagcttcctt

SEQ ID NO: 3188964 - DNA, 25 bp, Homo sapien
tggtgggtgggagttggatttctgt

SEQ ID NO: 3188965 - DNA, 25 bp, Homo sapien
gtgggtgggagttggatttctgtct

SEQ ID NO: 3188966 - DNA, 25 bp, Homo sapien
cttcagggggatggtgggtgggagt

SEQ ID NO: 3188967 - DNA, 25 bp, Homo sapien
gatggtgggtgggagttggatttct

SEQ ID NO: 3188968 - DNA, 25 bp, Homo sapien
tggccgcacagtgacaaagcgcgtc

SEQ ID NO: 3188969 - DNA, 25 bp, Homo sapien
tttggaagttcataaatagatccac

SEQ ID NO: 3188970 - DNA, 25 bp, Homo sapien
aagcgcgtcacaccttccagatttg

SEQ ID NO: 3188971 - DNA, 25 bp, Homo sapien
tccggctgctgccagagtgctggcc

SEQ ID NO: 3188972 - DNA, 25 bp, Homo sapien
agaacacaatctgccataaacggga

SEQ ID NO: 3188973 - DNA, 25 bp, Homo sapien
taattcgcatagttacctcctggct

SEQ ID NO: 3188974 - DNA, 25 bp, Homo sapien
agttggcttgttccctacctggtgt

SEQ ID NO: 3188975 - DNA, 25 bp, Homo sapien
taaacgggaaagctttgtgcgctcc

SEQ ID NO: 3188976 - DNA, 25 bp, Homo sapien
agacagatctatagctgccaactga

SEQ ID NO: 3188977 - DNA, 25 bp, Homo sapien
agctgccaactgaccctggagtaca

SEQ ID NO: 3188978 - DNA, 25 bp, Homo sapien
tgccaactgaccctggagtacagaa

SEQ ID NO: 3188979 - DNA, 25 bp, Homo sapien
tctatagctgccaactgaccctgga

SEQ ID NO: 3188980 - DNA, 25 bp, Homo sapien
tgacatctgacataatggttgctgg

SEQ ID NO: 3188981 - DNA, 25 bp, Homo sapien
gagcacctgtgggaagtcatacctg

SEQ ID NO: 3188982 - DNA, 25 bp, Homo sapien
ggtgtggcactatttcccctgagca

SEQ ID NO: 3188983 - DNA, 25 bp, Homo sapien
tggttgctggcctatgaggtcctgc

SEQ ID NO: 3188984 - DNA, 25 bp, Homo sapien
gtctacttctatccacacagacccg

SEQ ID NO: 3188985 - DNA, 25 bp, Homo sapien
tatccacacagacccggcaaccatc

SEQ ID NO: 3188986 - DNA, 25 bp, Homo sapien
acttctatccacacagacccggcaa

SEQ ID NO: 3188987 - DNA, 25 bp, Homo sapien
ttctatccacacagacccggcaacc

SEQ ID NO: 3188988 - DNA, 25 bp, Homo sapien
ctgaactacatactccctcttgaca

SEQ ID NO: 3188989 - DNA, 25 bp, Homo sapien
gaactacatactccctcttgacact

SEQ ID NO: 3188990 - DNA, 25 bp, Homo sapien
tgaactacatactccctcttgacac

SEQ ID NO: 3188991 - DNA, 25 bp, Homo sapien
tcttggaaacaatgcgcttgatggc

SEQ ID NO: 3188992 - DNA, 25 bp, Homo sapien
ccctcaggcgccaatagagctatga

SEQ ID NO: 3188993 - DNA, 25 bp, Homo sapien
ggccaatataagtgcccctcaggcg

SEQ ID NO: 3188994 - DNA, 25 bp, Homo sapien
gactttagcgctgtgttattcaggc

SEQ ID NO: 3188995 - DNA, 25 bp, Homo sapien
tccactttcaggattagaccctgga

SEQ ID NO: 3188996 - DNA, 25 bp, Homo sapien
gggctgctcatagccccaaagttgc

SEQ ID NO: 3188997 - DNA, 25 bp, Homo sapien
agcaggacgctgatgtagtaaactg

SEQ ID NO: 3188998 - DNA, 25 bp, Homo sapien
tctctcaggactagtctggggctgc

SEQ ID NO: 3188999 - DNA, 25 bp, Homo sapien
ggacttgcatgctgctcacatccaa

SEQ ID NO: 3189000 - DNA, 25 bp, Homo sapien
aacccaggcccaatgcagttacagc

SEQ ID NO: 3189001 - DNA, 25 bp, Homo sapien
cacatccaaattcccatgaagatga

SEQ ID NO: 3189002 - DNA, 25 bp, Homo sapien
cagttacagccttggctgcttgtca

SEQ ID NO: 3189003 - DNA, 25 bp, Homo sapien
tttcctccggcttttctggcctctg

SEQ ID NO: 3189004 - DNA, 25 bp, Homo sapien
tggcctctgactcagttacacccat

SEQ ID NO: 3189005 - DNA, 25 bp, Homo sapien
ctgcttccttccttttcctccggct

SEQ ID NO: 3189006 - DNA, 25 bp, Homo sapien
ttctggcctctgactcagttacacc

SEQ ID NO: 3189007 - DNA, 25 bp, Homo sapien
tcttcatctagaaaaatggagaaca

SEQ ID NO: 3189008 - DNA, 25 bp, Homo sapien
tccctagtcttcatctagaaaaatg

SEQ ID NO: 3189009 - DNA, 25 bp, Homo sapien
tagtcttcatctagaaaaatggaga

SEQ ID NO: 3189010 - DNA, 25 bp, Homo sapien
cttcatctagaaaaatggagaacat

SEQ ID NO: 3189011 - DNA, 25 bp, Homo sapien
ctgtgggatgacttgtgggtttggg

SEQ ID NO: 3189012 - DNA, 25 bp, Homo sapien
tctcaaggcagggatagtagctgtg

SEQ ID NO: 3189013 - DNA, 25 bp, Homo sapien
tctgtcacacgaattgctttctgtt

SEQ ID NO: 3189014 - DNA, 25 bp, Homo sapien
tcaaggttctgtcacacgaattgct

SEQ ID NO: 3189015 - DNA, 25 bp, Homo sapien
taggaaactgggtgccaatggtaat

SEQ ID NO: 3189016 - DNA, 25 bp, Homo sapien
gggctctatatgactggcagggcta

SEQ ID NO: 3189017 - DNA, 25 bp, Homo sapien
gggctatgtgccaaaatgtaatcaa

SEQ ID NO: 3189018 - DNA, 25 bp, Homo sapien
caattgaagattgctccagcatagg

SEQ ID NO: 3189019 - DNA, 25 bp, Homo sapien
tatatgactgatttaaggctgcgca

SEQ ID NO: 3189020 - DNA, 25 bp, Homo sapien
tctccgttgttcttggtgcagtgta

SEQ ID NO: 3189021 - DNA, 25 bp, Homo sapien
ggctgcgcaaaacagaattctccgt

SEQ ID NO: 3189022 - DNA, 25 bp, Homo sapien
attcctccccagttgagtaccttct

SEQ ID NO: 3189023 - DNA, 25 bp, Homo sapien
tgagggcatggtaaccaaccagggc

SEQ ID NO: 3189024 - DNA, 25 bp, Homo sapien
tgtccctgagggcatggtaaccaac

SEQ ID NO: 3189025 - DNA, 25 bp, Homo sapien
tgtcaatgatccatgttgtaacggc

SEQ ID NO: 3189026 - DNA, 25 bp, Homo sapien
tgatccatgttgtaacggcagctct

SEQ ID NO: 3189027 - DNA, 25 bp, Homo sapien
gactggaccgggagcctttccgatc

SEQ ID NO: 3189028 - DNA, 25 bp, Homo sapien
tatttagggccacatgagttcttgt

SEQ ID NO: 3189029 - DNA, 25 bp, Homo sapien
tctgagagcgattgttcaggaacgt

SEQ ID NO: 3189030 - DNA, 25 bp, Homo sapien
tgtttctgaagtcgcattgtaatcc

SEQ ID NO: 3189031 - DNA, 25 bp, Homo sapien
caaatctgtcgaggttcatgttttc

SEQ ID NO: 3189032 - DNA, 25 bp, Homo sapien
agctgaagataacatgaaccacaaa

SEQ ID NO: 3189033 - DNA, 25 bp, Homo sapien
ttaatgtttcataaccgtgtgctct

SEQ ID NO: 3189034 - DNA, 25 bp, Homo sapien
ttcataaccgtgtgctcttttccag

SEQ ID NO: 3189035 - DNA, 25 bp, Homo sapien
ccccagagagcttaaggatatccct

SEQ ID NO: 3189036 - DNA, 25 bp, Homo sapien
gggagcccagaggactatagatgac

SEQ ID NO: 3189037 - DNA, 25 bp, Homo sapien
ccaggaaagggtcgtccgagagata

SEQ ID NO: 3189038 - DNA, 25 bp, Homo sapien
aacctaatatcacaggcaaggctgc

SEQ ID NO: 3189039 - DNA, 25 bp, Homo sapien
gaagaataagaagttggtctcactt

SEQ ID NO: 3189040 - DNA, 25 bp, Homo sapien
gaataagaagttggtctcacttcag

SEQ ID NO: 3189041 - DNA, 25 bp, Homo sapien
aataagaagttggtctcacttcagc

SEQ ID NO: 3189042 - DNA, 25 bp, Homo sapien
agaataagaagttggtctcacttca

SEQ ID NO: 3189043 - DNA, 25 bp, Homo sapien
tttctgggacagcattagcaatgcc

SEQ ID NO: 3189044 - DNA, 25 bp, Homo sapien
cacgggtccttgcagaatcttcagc

SEQ ID NO: 3189045 - DNA, 25 bp, Homo sapien
ctgctgatcagaaggcttaagggac

SEQ ID NO: 3189046 - DNA, 25 bp, Homo sapien
tgtgggaatactgatgcacgggtcc

SEQ ID NO: 3189047 - DNA, 25 bp, Homo sapien
atgctttgatcattagtcccttgag

SEQ ID NO: 3189048 - DNA, 25 bp, Homo sapien
caattcaatctctattgctttaatc

SEQ ID NO: 3189049 - DNA, 25 bp, Homo sapien
ttgtctgcaattcaatctctattgc

SEQ ID NO: 3189050 - DNA, 25 bp, Homo sapien
ctttgatcattagtcccttgagtct

SEQ ID NO: 3189051 - DNA, 25 bp, Homo sapien
atttgtacagccctctgttaagtga

SEQ ID NO: 3189052 - DNA, 25 bp, Homo sapien
tttttatttgtacagccctctgtta

SEQ ID NO: 3189053 - DNA, 25 bp, Homo sapien
tttatttgtacagccctctgttaag

SEQ ID NO: 3189054 - DNA, 25 bp, Homo sapien
tgtacagccctctgttaagtgactt

SEQ ID NO: 3189055 - DNA, 25 bp, Homo sapien
aggaactcgggtatgggtggcaccg

SEQ ID NO: 3189056 - DNA, 25 bp, Homo sapien
aactcgggtatgggtggcaccgtct

SEQ ID NO: 3189057 - DNA, 25 bp, Homo sapien
tcgggtatgggtggcaccgtctgtt

SEQ ID NO: 3189058 - DNA, 25 bp, Homo sapien
ggaggaactcgggtatgggtggcac

SEQ ID NO: 3189059 - DNA, 25 bp, Homo sapien
tttgtagccttatatcccttatctc

SEQ ID NO: 3189060 - DNA, 25 bp, Homo sapien
gaacagctggtattcagttacatga

SEQ ID NO: 3189061 - DNA, 25 bp, Homo sapien
tgggcacctgataggccattttaag

SEQ ID NO: 3189062 - DNA, 25 bp, Homo sapien
tgagttgtattccatcttatttata

SEQ ID NO: 3189063 - DNA, 25 bp, Homo sapien
gaatcctgagagactttctgctgaa

SEQ ID NO: 3189064 - DNA, 25 bp, Homo sapien
ctcagaatatggacttccatgaatc

SEQ ID NO: 3189065 - DNA, 25 bp, Homo sapien
cagaatatggacttccatgaatcct

SEQ ID NO: 3189066 - DNA, 25 bp, Homo sapien
tgctgaatctgggccttgcattcat

SEQ ID NO: 3189067 - DNA, 25 bp, Homo sapien
ccagggatgtcaagctgagcctgct

SEQ ID NO: 3189068 - DNA, 25 bp, Homo sapien
taattgcgtctgactggatccagta

SEQ ID NO: 3189069 - DNA, 25 bp, Homo sapien
ttagtctgcgtggtagaaattccag

SEQ ID NO: 3189070 - DNA, 25 bp, Homo sapien
cgtttctttgaagttaggaactgag

SEQ ID NO: 3189071 - DNA, 25 bp, Homo sapien
gggttcataccattctcctgactaa

SEQ ID NO: 3189072 - DNA, 25 bp, Homo sapien
tcataccattctcctgactaagcct

SEQ ID NO: 3189073 - DNA, 25 bp, Homo sapien
gttcataccattctcctgactaagc

SEQ ID NO: 3189074 - DNA, 25 bp, Homo sapien
cataccattctcctgactaagcctc

SEQ ID NO: 3189075 - DNA, 25 bp, Homo sapien
ctctttgcggcttttcatttgcgtt

SEQ ID NO: 3189076 - DNA, 25 bp, Homo sapien
ggcttttcatttgcgtttgtttcca

SEQ ID NO: 3189077 - DNA, 25 bp, Homo sapien
ctttgcggcttttcatttgcgtttg

SEQ ID NO: 3189078 - DNA, 25 bp, Homo sapien
cctttgctctttgcggcttttcatt

SEQ ID NO: 3189079 - DNA, 25 bp, Homo sapien
ttttcatttgcgtttgtttccacag

SEQ ID NO: 3189080 - DNA, 25 bp, Homo sapien
cacctttgctctttgcggcttttca

SEQ ID NO: 3189081 - DNA, 25 bp, Homo sapien
tggaaacaaacgcaaatgaaaagcc

SEQ ID NO: 3189082 - DNA, 25 bp, Homo sapien
tgaaaagccgcaaagagcaaaggtg

SEQ ID NO: 3189083 - DNA, 25 bp, Homo sapien
aatgaaaagccgcaaagagcaaagg

SEQ ID NO: 3189084 - DNA, 25 bp, Homo sapien
caaacgcaaatgaaaagccgcaaag

SEQ ID NO: 3189085 - DNA, 25 bp, Homo sapien
ctgtggaaacaaacgcaaatgaaaa

SEQ ID NO: 3189086 - DNA, 25 bp, Homo sapien
gaaacaaacgcaaatgaaaagccgc

SEQ ID NO: 3189087 - DNA, 25 bp, Homo sapien
cagacagctagtgtgaatccccgcc

SEQ ID NO: 3189088 - DNA, 25 bp, Homo sapien
gacgcaacttcctgtcctgcgcaat

SEQ ID NO: 3189089 - DNA, 25 bp, Homo sapien
tctgcgtggccttgacacagacagc

SEQ ID NO: 3189090 - DNA, 25 bp, Homo sapien
gtacaacacggatactctctctctg

SEQ ID NO: 3189091 - DNA, 25 bp, Homo sapien
cgtacaacgtggtggttccctgcat

SEQ ID NO: 3189092 - DNA, 25 bp, Homo sapien
gaggtgcgtcggcttccgtacaaca

SEQ ID NO: 3189093 - DNA, 25 bp, Homo sapien
gtgttgtacggaagccgacgcacct

SEQ ID NO: 3189094 - DNA, 25 bp, Homo sapien
tgcagggaaccaccacgttgtacgg

SEQ ID NO: 3189095 - DNA, 25 bp, Homo sapien
cagagagagagtatccgtgttgtac

SEQ ID NO: 3189096 - DNA, 25 bp, Homo sapien
cgttgtacggcaaccaacgtgccgc

SEQ ID NO: 3189097 - DNA, 25 bp, Homo sapien
tagctgtctgtgtcaaggccacgca

SEQ ID NO: 3189098 - DNA, 25 bp, Homo sapien
tcaaatagaattgcgcaggacagga

SEQ ID NO: 3189099 - DNA, 25 bp, Homo sapien
tatttccttaccaatcggctgccat

SEQ ID NO: 3189100 - DNA, 25 bp, Homo sapien
tctttatttccttaccaatcggctg

SEQ ID NO: 3189101 - DNA, 25 bp, Homo sapien
caatcggctgccatccgaggagctg

SEQ ID NO: 3189102 - DNA, 25 bp, Homo sapien
aagcagtcctttgagctggtgtagg

SEQ ID NO: 3189103 - DNA, 25 bp, Homo sapien
atcggctgccatccgaggagctgag

SEQ ID NO: 3189104 - DNA, 25 bp, Homo sapien
taccaatcggctgccatccgaggag

SEQ ID NO: 3189105 - DNA, 25 bp, Homo sapien
ctcagctcctcggatggcagccgat

SEQ ID NO: 3189106 - DNA, 25 bp, Homo sapien
cagccgattggtaaggaaataaaga

SEQ ID NO: 3189107 - DNA, 25 bp, Homo sapien
cctcggatggcagccgattggtaag

SEQ ID NO: 3189108 - DNA, 25 bp, Homo sapien
agctcctcggatggcagccgattgg

SEQ ID NO: 3189109 - DNA, 25 bp, Homo sapien
cctacaccagctcaaaggactgctt

SEQ ID NO: 3189110 - DNA, 25 bp, Homo sapien
gatggcagccgattggtaaggaaat

SEQ ID NO: 3189111 - DNA, 25 bp, Homo sapien
tgaggaagttccttactttgatctt

SEQ ID NO: 3189112 - DNA, 25 bp, Homo sapien
gtggtgaggaagttccttactttga

SEQ ID NO: 3189113 - DNA, 25 bp, Homo sapien
ggtgaggaagttccttactttgatc

SEQ ID NO: 3189114 - DNA, 25 bp, Homo sapien
aggaagttccttactttgatctttg

SEQ ID NO: 3189115 - DNA, 25 bp, Homo sapien
gtgaggaagttccttactttgatct

SEQ ID NO: 3189116 - DNA, 25 bp, Homo sapien
ttgttcctggtggcacctccaaagc

SEQ ID NO: 3189117 - DNA, 25 bp, Homo sapien
gctttggaggtgccaccaggaacaa

SEQ ID NO: 3189118 - DNA, 25 bp, Homo sapien
tcaaagtaaggaacttcctcaccac

SEQ ID NO: 3189119 - DNA, 25 bp, Homo sapien
caaagatcaaagtaaggaacttcct

SEQ ID NO: 3189120 - DNA, 25 bp, Homo sapien
gatcaaagtaaggaacttcctcacc

SEQ ID NO: 3189121 - DNA, 25 bp, Homo sapien
aagatcaaagtaaggaacttcctca

SEQ ID NO: 3189122 - DNA, 25 bp, Homo sapien
agatcaaagtaaggaacttcctcac

SEQ ID NO: 3189123 - DNA, 25 bp, Homo sapien
cgtttggagactaacgagttgtggt

SEQ ID NO: 3189124 - DNA, 25 bp, Homo sapien
ctgcattccaagtgtagcgtttgga

SEQ ID NO: 3189125 - DNA, 25 bp, Homo sapien
ccaagtgtagcgtttggagactaac

SEQ ID NO: 3189126 - DNA, 25 bp, Homo sapien
tcaccacccgggactttgctgcatt

SEQ ID NO: 3189127 - DNA, 25 bp, Homo sapien
ttcatattttacacccacgttttca

SEQ ID NO: 3189128 - DNA, 25 bp, Homo sapien
ctggaaaatcgccaaacgttttcat

SEQ ID NO: 3189129 - DNA, 25 bp, Homo sapien
gttagtctccaaacgctacacttgg

SEQ ID NO: 3189130 - DNA, 25 bp, Homo sapien
atgaaaacgtttggcgattttccag

SEQ ID NO: 3189131 - DNA, 25 bp, Homo sapien
tccaaacgctacacttggaatgcag

SEQ ID NO: 3189132 - DNA, 25 bp, Homo sapien
aatgcagcaaagtcccgggtggtga

SEQ ID NO: 3189133 - DNA, 25 bp, Homo sapien
caaaccacaactcgttagtctccaa

SEQ ID NO: 3189134 - DNA, 25 bp, Homo sapien
tgaaaacgtgggtgtaaaatatgaa

SEQ ID NO: 3189135 - DNA, 25 bp, Homo sapien
tggcttcataaatcactcgcactgg

SEQ ID NO: 3189136 - DNA, 25 bp, Homo sapien
gctaaggattcgacttcagagctca

SEQ ID NO: 3189137 - DNA, 25 bp, Homo sapien
tatttggcttctgcgtccaaggccc

SEQ ID NO: 3189138 - DNA, 25 bp, Homo sapien
gaaagcaggtgccataacccaaaga

SEQ ID NO: 3189139 - DNA, 25 bp, Homo sapien
cattgtgttgggacggatagcccac

SEQ ID NO: 3189140 - DNA, 25 bp, Homo sapien
catcacgatgtttccagaagtggga

SEQ ID NO: 3189141 - DNA, 25 bp, Homo sapien
ccagtgcgagtgatttatgaagcca

SEQ ID NO: 3189142 - DNA, 25 bp, Homo sapien
acatgggccttggacgcagaagcca

SEQ ID NO: 3189143 - DNA, 25 bp, Homo sapien
tcattaggattaaacgacgtgggct

SEQ ID NO: 3189144 - DNA, 25 bp, Homo sapien
tataaagggcaaggagctagcctcc

SEQ ID NO: 3189145 - DNA, 25 bp, Homo sapien
taaagcaccacctgcgtaaaggcat

SEQ ID NO: 3189146 - DNA, 25 bp, Homo sapien
aaaagtgagctctgaagtcgaatcc

SEQ ID NO: 3189147 - DNA, 25 bp, Homo sapien
ctgggctcgtggcacttttctggac

SEQ ID NO: 3189148 - DNA, 25 bp, Homo sapien
cggtgtttctccaactgggctcgtg

SEQ ID NO: 3189149 - DNA, 25 bp, Homo sapien
tctccaactgggctcgtggcacttt

SEQ ID NO: 3189150 - DNA, 25 bp, Homo sapien
tgtttctccaactgggctcgtggca

SEQ ID NO: 3189151 - DNA, 25 bp, Homo sapien
aactgggctcgtggcacttttctgg

SEQ ID NO: 3189152 - DNA, 25 bp, Homo sapien
ccaactgggctcgtggcacttttct

SEQ ID NO: 3189153 - DNA, 25 bp, Homo sapien
gtccagaaaagtgccacgagcccag

SEQ ID NO: 3189154 - DNA, 25 bp, Homo sapien
gccacgagcccagttggagaaacac

SEQ ID NO: 3189155 - DNA, 25 bp, Homo sapien
aaagtgccacgagcccagttggaga

SEQ ID NO: 3189156 - DNA, 25 bp, Homo sapien
cacgagcccagttggagaaacaccg

SEQ ID NO: 3189157 - DNA, 25 bp, Homo sapien
agaaaagtgccacgagcccagttgg

SEQ ID NO: 3189158 - DNA, 25 bp, Homo sapien
gtgccacgagcccagttggagaaac

SEQ ID NO: 3189159 - DNA, 25 bp, Homo sapien
aaagctaacattcttggcctcttgt

SEQ ID NO: 3189160 - DNA, 25 bp, Homo sapien
catcagaacgttaaggaagtgccac

SEQ ID NO: 3189161 - DNA, 25 bp, Homo sapien
gcctcttgtttatcagtcaccttta

SEQ ID NO: 3189162 - DNA, 25 bp, Homo sapien
gaagtgccacgtttgattaccatca

SEQ ID NO: 3189163 - DNA, 25 bp, Homo sapien
tagaccacatgatactgttttgaga

SEQ ID NO: 3189164 - DNA, 25 bp, Homo sapien
caatggaaagatttgatgttactct

SEQ ID NO: 3189165 - DNA, 25 bp, Homo sapien
gatggtaatcaaacgtggcacttcc

SEQ ID NO: 3189166 - DNA, 25 bp, Homo sapien
taaaggtgactgataaacaagaggc

SEQ ID NO: 3189167 - DNA, 25 bp, Homo sapien
tagctttcctgatggtaatcaaacg

SEQ ID NO: 3189168 - DNA, 25 bp, Homo sapien
tctcaaaacagtatcatgtggtcta

SEQ ID NO: 3189169 - DNA, 25 bp, Homo sapien
ggcacttccttaacgttctgatgac

SEQ ID NO: 3189170 - DNA, 25 bp, Homo sapien
aacaagaggccaagaatgttagctt

SEQ ID NO: 3189171 - DNA, 25 bp, Homo sapien
ggtccagcgtttgacataccgacgt

SEQ ID NO: 3189172 - DNA, 25 bp, Homo sapien
gacataccgacgtaggctttcctac

SEQ ID NO: 3189173 - DNA, 25 bp, Homo sapien
cagcgtttgacataccgacgtaggc

SEQ ID NO: 3189174 - DNA, 25 bp, Homo sapien
gtttgacataccgacgtaggctttc

SEQ ID NO: 3189175 - DNA, 25 bp, Homo sapien
tttgacataccgacgtaggctttcc

SEQ ID NO: 3189176 - DNA, 25 bp, Homo sapien
agcgtttgacataccgacgtaggct

SEQ ID NO: 3189177 - DNA, 25 bp, Homo sapien
agcctacgtcggtatgtcaaacgct

SEQ ID NO: 3189178 - DNA, 25 bp, Homo sapien
gtaggaaagcctacgtcggtatgtc

SEQ ID NO: 3189179 - DNA, 25 bp, Homo sapien
gaaagcctacgtcggtatgtcaaac

SEQ ID NO: 3189180 - DNA, 25 bp, Homo sapien
ggaaagcctacgtcggtatgtcaaa

SEQ ID NO: 3189181 - DNA, 25 bp, Homo sapien
gcctacgtcggtatgtcaaacgctg

SEQ ID NO: 3189182 - DNA, 25 bp, Homo sapien
acgtcggtatgtcaaacgctggacc

SEQ ID NO: 3189183 - DNA, 25 bp, Homo sapien
atgctgacctactgactgtttcact

SEQ ID NO: 3189184 - DNA, 25 bp, Homo sapien
agtgaaacagtcagtaggtcagcat

SEQ ID NO: 3189185 - DNA, 25 bp, Homo sapien
tacaaaatgctgacctactgactgt

SEQ ID NO: 3189186 - DNA, 25 bp, Homo sapien
tctacaaaatgctgacctactgact

SEQ ID NO: 3189187 - DNA, 25 bp, Homo sapien
gctgacctactgactgtttcacttt

SEQ ID NO: 3189188 - DNA, 25 bp, Homo sapien
atgctgacctactgactgtttcact

SEQ ID NO: 3189189 - DNA, 25 bp, Homo sapien
acctactgactgtttcactttctag

SEQ ID NO: 3189190 - DNA, 25 bp, Homo sapien
tactctacaaaatgctgacctactg

SEQ ID NO: 3189191 - DNA, 25 bp, Homo sapien
aaagtgaaacagtcagtaggtcagc

SEQ ID NO: 3189192 - DNA, 25 bp, Homo sapien
cagtcagtaggtcagcattttgtag

SEQ ID NO: 3189193 - DNA, 25 bp, Homo sapien
cagtaggtcagcattttgtagagta

SEQ ID NO: 3189194 - DNA, 25 bp, Homo sapien
ctagaaagtgaaacagtcagtaggt

SEQ ID NO: 3189195 - DNA, 25 bp, Homo sapien
tagaaagtgaaacagtcagtaggtc

SEQ ID NO: 3189196 - DNA, 25 bp, Homo sapien
agtgaaacagtcagtaggtcagcat

SEQ ID NO: 3189197 - DNA, 25 bp, Homo sapien
accaaaatctgcatgtggtgtgtgc

SEQ ID NO: 3189198 - DNA, 25 bp, Homo sapien
ccaaaatctgcatgtggtgtgtgcc

SEQ ID NO: 3189199 - DNA, 25 bp, Homo sapien
ggtgtgtgcccaggcagacttcgag

SEQ ID NO: 3189200 - DNA, 25 bp, Homo sapien
gaaagcaccaaaatctgcatgtggt

SEQ ID NO: 3189201 - DNA, 25 bp, Homo sapien
tggtgtgtgcccaggcagacttcga

SEQ ID NO: 3189202 - DNA, 25 bp, Homo sapien
tgtgtgcccaggcagacttcgaggg

SEQ ID NO: 3189203 - DNA, 25 bp, Homo sapien
tcgaagtctgcctgggcacacacca

SEQ ID NO: 3189204 - DNA, 25 bp, Homo sapien
gcacacaccacatgcagattttggt

SEQ ID NO: 3189205 - DNA, 25 bp, Homo sapien
cagattttggtgctttcccaacctt

SEQ ID NO: 3189206 - DNA, 25 bp, Homo sapien
ctcgaagtctgcctgggcacacacc

SEQ ID NO: 3189207 - DNA, 25 bp, Homo sapien
ggcacacaccacatgcagattttgg

SEQ ID NO: 3189208 - DNA, 25 bp, Homo sapien
ccctcgaagtctgcctgggcacaca

SEQ ID NO: 3189209 - DNA, 25 bp, Homo sapien
gagaggttaccactaagagggttca

SEQ ID NO: 3189210 - DNA, 25 bp, Homo sapien
gctttcatcccttgacgatggaatg

SEQ ID NO: 3189211 - DNA, 25 bp, Homo sapien
tgagccaaatctgccacgaacatag

SEQ ID NO: 3189212 - DNA, 25 bp, Homo sapien
taaacattcatgagccaaatctgcc

SEQ ID NO: 3189213 - DNA, 25 bp, Homo sapien
tttactgtgtgcagcctaacaagtc

SEQ ID NO: 3189214 - DNA, 25 bp, Homo sapien
taacaagtcttgaacttactgagct

SEQ ID NO: 3189215 - DNA, 25 bp, Homo sapien
cgtggcagatttggctcatgaatgt

SEQ ID NO: 3189216 - DNA, 25 bp, Homo sapien
caagacttgttaggctgcacacagt

SEQ ID NO: 3189217 - DNA, 25 bp, Homo sapien
taaaaagtctatgttcgtggcagat

SEQ ID NO: 3189218 - DNA, 25 bp, Homo sapien
gaaagctcagtaagttcaagacttg

SEQ ID NO: 3189219 - DNA, 25 bp, Homo sapien
cattccatcgtcaagggatgaaagc

SEQ ID NO: 3189220 - DNA, 25 bp, Homo sapien
tagtaattctgaaccctcttagtgg

SEQ ID NO: 3189221 - DNA, 25 bp, Homo sapien
atgagattgtccaaaacaaagaaac

SEQ ID NO: 3189222 - DNA, 25 bp, Homo sapien
tgtaagacctaaagttcttatgaga

SEQ ID NO: 3189223 - DNA, 25 bp, Homo sapien
tcgtgctgtaagacctaaagttctt

SEQ ID NO: 3189224 - DNA, 25 bp, Homo sapien
ttcgtgctgtaagacctaaagttct

SEQ ID NO: 3189225 - DNA, 25 bp, Homo sapien
gttcgtgctgtaagacctaaagttc

SEQ ID NO: 3189226 - DNA, 25 bp, Homo sapien
tatgagattgtccaaaacaaagaaa

SEQ ID NO: 3189227 - DNA, 25 bp, Homo sapien
gtttctttgttttggacaatctcat

SEQ ID NO: 3189228 - DNA, 25 bp, Homo sapien
aagaactttaggtcttacagcacga

SEQ ID NO: 3189229 - DNA, 25 bp, Homo sapien
taagaactttaggtcttacagcacg

SEQ ID NO: 3189230 - DNA, 25 bp, Homo sapien
agaactttaggtcttacagcacgaa

SEQ ID NO: 3189231 - DNA, 25 bp, Homo sapien
gaactttaggtcttacagcacgaac

SEQ ID NO: 3189232 - DNA, 25 bp, Homo sapien
tctcataagaactttaggtcttaca

SEQ ID NO: 3189233 - DNA, 25 bp, Homo sapien
cagggcctatggtggttccatgtgt

SEQ ID NO: 3189234 - DNA, 25 bp, Homo sapien
agcagggcctatggtggttccatgt

SEQ ID NO: 3189235 - DNA, 25 bp, Homo sapien
ggcctatggtggttccatgtgtgct

SEQ ID NO: 3189236 - DNA, 25 bp, Homo sapien
gcctatggtggttccatgtgtgcta

SEQ ID NO: 3189237 - DNA, 25 bp, Homo sapien
tgtgtgctaaatgtgttcgtgacag

SEQ ID NO: 3189238 - DNA, 25 bp, Homo sapien
tcagcagggcctatggtggttccat

SEQ ID NO: 3189239 - DNA, 25 bp, Homo sapien
atggaaccaccataggccctgctga

SEQ ID NO: 3189240 - DNA, 25 bp, Homo sapien
tagcacacatggaaccaccataggc

SEQ ID NO: 3189241 - DNA, 25 bp, Homo sapien
acacatggaaccaccataggccctg

SEQ ID NO: 3189242 - DNA, 25 bp, Homo sapien
ctgtcacgaacacatttagcacaca

SEQ ID NO: 3189243 - DNA, 25 bp, Homo sapien
agcacacatggaaccaccataggcc

SEQ ID NO: 3189244 - DNA, 25 bp, Homo sapien
acatggaaccaccataggccctgct

SEQ ID NO: 3189245 - DNA, 25 bp, Homo sapien
gctatggataattgatgctgcacaa

SEQ ID NO: 3189246 - DNA, 25 bp, Homo sapien
tctcatgtgcggaaggtgttaaaag

SEQ ID NO: 3189247 - DNA, 25 bp, Homo sapien
gaaaagccagattatggccaggtgt

SEQ ID NO: 3189248 - DNA, 25 bp, Homo sapien
tctgctgatcagtacaatggtgaag

SEQ ID NO: 3189249 - DNA, 25 bp, Homo sapien
gatggacaacaaaggtagaaaagcc

SEQ ID NO: 3189250 - DNA, 25 bp, Homo sapien
tattctcatgagcatagggttgcag

SEQ ID NO: 3189251 - DNA, 25 bp, Homo sapien
cacaataatttgctaaggaaagccc

SEQ ID NO: 3189252 - DNA, 25 bp, Homo sapien
cttttaacaccttccgcacatgaga

SEQ ID NO: 3189253 - DNA, 25 bp, Homo sapien
tcaccattgtactgatcagcagaca

SEQ ID NO: 3189254 - DNA, 25 bp, Homo sapien
gcaaccctatgctcatgagaataca

SEQ ID NO: 3189255 - DNA, 25 bp, Homo sapien
ttgtgcagcatcaattatccatagc

SEQ ID NO: 3189256 - DNA, 25 bp, Homo sapien
tctttgtccaaaccactaacagaga

SEQ ID NO: 3189257 - DNA, 25 bp, Homo sapien
taaactccctgttaaatacgtgtga

SEQ ID NO: 3189258 - DNA, 25 bp, Homo sapien
gctttaaactctggtggtaactctg

SEQ ID NO: 3189259 - DNA, 25 bp, Homo sapien
taggtcctgtgcaacactgtaatga

SEQ ID NO: 3189260 - DNA, 25 bp, Homo sapien
cataaaatgcactcctagatggagg

SEQ ID NO: 3189261 - DNA, 25 bp, Homo sapien
tgataaccaggtttaccaatgggaa

SEQ ID NO: 3189262 - DNA, 25 bp, Homo sapien
aaattctcgggccttatctcctgaa

SEQ ID NO: 3189263 - DNA, 25 bp, Homo sapien
gaatggcatttgagttggaacctaa

SEQ ID NO: 3189264 - DNA, 25 bp, Homo sapien
tccaggcaaggaaagtacggactga

SEQ ID NO: 3189265 - DNA, 25 bp, Homo sapien
tacggactgatctggcacattgtgg

SEQ ID NO: 3189266 - DNA, 25 bp, Homo sapien
tgtacattggagataagtcatgagt

SEQ ID NO: 3189267 - DNA, 25 bp, Homo sapien
tggaacctaaatgatgggcaaattt

SEQ ID NO: 3189268 - DNA, 25 bp, Homo sapien
taagtcatgagttttaagctgaaga

SEQ ID NO: 3189269 - DNA, 25 bp, Homo sapien
aaatttgcccatcatttaggttcca

SEQ ID NO: 3189270 - DNA, 25 bp, Homo sapien
ttaggttccaactcaaatgccattc

SEQ ID NO: 3189271 - DNA, 25 bp, Homo sapien
tcagtccgtactttccttgcctgga

SEQ ID NO: 3189272 - DNA, 25 bp, Homo sapien
ccacaatgtgccagatcagtccgta

SEQ ID NO: 3189273 - DNA, 25 bp, Homo sapien
tcttcagcttaaaactcatgactta

SEQ ID NO: 3189274 - DNA, 25 bp, Homo sapien
ctcatgacttatctccaatgtacac

SEQ ID NO: 3189275 - DNA, 25 bp, Homo sapien
agtttcacacgtatttaacagggag

SEQ ID NO: 3189276 - DNA, 25 bp, Homo sapien
gttaaatcagagttaccaccagagt

SEQ ID NO: 3189277 - DNA, 25 bp, Homo sapien
taacttactcaaagcacagaccaca

SEQ ID NO: 3189278 - DNA, 25 bp, Homo sapien
cattacagtgttgcacaggacctag

SEQ ID NO: 3189279 - DNA, 25 bp, Homo sapien
tgagcctccatctaggagtgcattt

SEQ ID NO: 3189280 - DNA, 25 bp, Homo sapien
ttcaggagataaggcccgagaattt

SEQ ID NO: 3189281 - DNA, 25 bp, Homo sapien
tagagctctcataagtggtctcctg

SEQ ID NO: 3189282 - DNA, 25 bp, Homo sapien
gaaataccactattcctggatccta

SEQ ID NO: 3189283 - DNA, 25 bp, Homo sapien
tgtatcctgtagtttcctgggttcc

SEQ ID NO: 3189284 - DNA, 25 bp, Homo sapien
gaaggaggacagataactactggca

SEQ ID NO: 3189285 - DNA, 25 bp, Homo sapien
cctggatcctaacaataaattagag

SEQ ID NO: 3189286 - DNA, 25 bp, Homo sapien
ttgctttgcttggttctttaccatg

SEQ ID NO: 3189287 - DNA, 25 bp, Homo sapien
ggaacccaggaaactacaggataca

SEQ ID NO: 3189288 - DNA, 25 bp, Homo sapien
caggagaccacttatgagagctcta

SEQ ID NO: 3189289 - DNA, 25 bp, Homo sapien
tcatgccagtagttatctgtcctcc

SEQ ID NO: 3189290 - DNA, 25 bp, Homo sapien
catggtaaagaaccaagcaaagcaa

SEQ ID NO: 3189291 - DNA, 25 bp, Homo sapien
taggatccaggaatagtggtatttc

SEQ ID NO: 3189292 - DNA, 25 bp, Homo sapien
gctctaatttattgttaggatccag

SEQ ID NO: 3189293 - DNA, 25 bp, Homo sapien
gatcaagcgtgctttccttatcgag

SEQ ID NO: 3189294 - DNA, 25 bp, Homo sapien
agcgtgctttccttatcgaggagca

SEQ ID NO: 3189295 - DNA, 25 bp, Homo sapien
ccttatcgaggagcagaaaatcgtt

SEQ ID NO: 3189296 - DNA, 25 bp, Homo sapien
gcgtgctttccttatcgaggagcag

SEQ ID NO: 3189297 - DNA, 25 bp, Homo sapien
aaagtgttgaaggcacaagcacaga

SEQ ID NO: 3189298 - DNA, 25 bp, Homo sapien
caagcgtgctttccttatcgaggag

SEQ ID NO: 3189299 - DNA, 25 bp, Homo sapien
aacgattttctgctcctcgataagg

SEQ ID NO: 3189300 - DNA, 25 bp, Homo sapien
tctgtgcttgtgccttcaacacttt

SEQ ID NO: 3189301 - DNA, 25 bp, Homo sapien
ctcgataaggaaagcacgcttgatc

SEQ ID NO: 3189302 - DNA, 25 bp, Homo sapien
tgctcctcgataaggaaagcacgct

SEQ ID NO: 3189303 - DNA, 25 bp, Homo sapien
ctcctcgataaggaaagcacgcttg

SEQ ID NO: 3189304 - DNA, 25 bp, Homo sapien
ctgctcctcgataaggaaagcacgc

SEQ ID NO: 3189305 - DNA, 25 bp, Homo sapien
tcagcttctgcattccatgatggct

SEQ ID NO: 3189306 - DNA, 25 bp, Homo sapien
atgaaccacggcgtccagccagaaa

SEQ ID NO: 3189307 - DNA, 25 bp, Homo sapien
tagctaagcggtaactctcctctgc

SEQ ID NO: 3189308 - DNA, 25 bp, Homo sapien
tagttacatcatgccagttagtagg

SEQ ID NO: 3189309 - DNA, 25 bp, Homo sapien
gcctgtgtccagtcatgttgttcta

SEQ ID NO: 3189310 - DNA, 25 bp, Homo sapien
gctagttcccaccagctagagcctg

SEQ ID NO: 3189311 - DNA, 25 bp, Homo sapien
tcaaaaactagactggcctacagag

SEQ ID NO: 3189312 - DNA, 25 bp, Homo sapien
gcctacagagcagccaattagttta

SEQ ID NO: 3189313 - DNA, 25 bp, Homo sapien
aaaatgactgagtagtggcccagcg

SEQ ID NO: 3189314 - DNA, 25 bp, Homo sapien
gactgagtagtggcccagcgtggtg

SEQ ID NO: 3189315 - DNA, 25 bp, Homo sapien
tgactgagtagtggcccagcgtggt

SEQ ID NO: 3189316 - DNA, 25 bp, Homo sapien
aatgactgagtagtggcccagcgtg

SEQ ID NO: 3189317 - DNA, 25 bp, Homo sapien
catagaactggattcaataagagct

SEQ ID NO: 3189318 - DNA, 25 bp, Homo sapien
taggaacctgtcaagaatactttgt

SEQ ID NO: 3189319 - DNA, 25 bp, Homo sapien
cccagaagagttatagaatccattt

SEQ ID NO: 3189320 - DNA, 25 bp, Homo sapien
gggtcacttggacagagtcgttact

SEQ ID NO: 3189321 - DNA, 25 bp, Homo sapien
cttactctgtgaggattatatgtga

SEQ ID NO: 3189322 - DNA, 25 bp, Homo sapien
taatggcagaataattattaccggc

SEQ ID NO: 3189323 - DNA, 25 bp, Homo sapien
gcatagtttacagtgaaagttggac

SEQ ID NO: 3189324 - DNA, 25 bp, Homo sapien
tagccctgactatcaaaattctgga

SEQ ID NO: 3189325 - DNA, 25 bp, Homo sapien
tagagaactggattcaataaaaggc

SEQ ID NO: 3189326 - DNA, 25 bp, Homo sapien
tagtatttaacctccagctctctgg

SEQ ID NO: 3189327 - DNA, 25 bp, Homo sapien
gacgtcactggatgcaaaactggaa

SEQ ID NO: 3189328 - DNA, 25 bp, Homo sapien
ggaaagagatgcacacaactggctc

SEQ ID NO: 3189329 - DNA, 25 bp, Homo sapien
tcccttaggatgaaaagtagccctg

SEQ ID NO: 3189330 - DNA, 25 bp, Homo sapien
taaatatcccctaatgtagaggagg

SEQ ID NO: 3189331 - DNA, 25 bp, Homo sapien
gcagggtcccaaactatgagctaag

SEQ ID NO: 3189332 - DNA, 25 bp, Homo sapien
gaaagagagaccctatggcctgtga

SEQ ID NO: 3189333 - DNA, 25 bp, Homo sapien
gctctaaattagtatgggccataag

SEQ ID NO: 3189334 - DNA, 25 bp, Homo sapien
taacttagctaagctgaactacatc

SEQ ID NO: 3189335 - DNA, 25 bp, Homo sapien
ccagaatcccttcattgcagagctc

SEQ ID NO: 3189336 - DNA, 25 bp, Homo sapien
aaaatcaagccaaatgtggttcaga

SEQ ID NO: 3189337 - DNA, 25 bp, Homo sapien
ggtggcagcaagggccgttctcggc

SEQ ID NO: 3189338 - DNA, 25 bp, Homo sapien
gtggcagcaagggccgttctcggcc

SEQ ID NO: 3189339 - DNA, 25 bp, Homo sapien
ttctcggcctcaagccccacgcgcc

SEQ ID NO: 3189340 - DNA, 25 bp, Homo sapien
agccccacgcgcctcccggaaacag

SEQ ID NO: 3189341 - DNA, 25 bp, Homo sapien
cagtcatggccgacggcatgtgcaa

SEQ ID NO: 3189342 - DNA, 25 bp, Homo sapien
cggcatgtgcaaccagggcggcttc

SEQ ID NO: 3189343 - DNA, 25 bp, Homo sapien
atggccgacggcatgtgcaaccagg

SEQ ID NO: 3189344 - DNA, 25 bp, Homo sapien
tcgagcactaagaacgggacacggt

SEQ ID NO: 3189345 - DNA, 25 bp, Homo sapien
ggaagtaagacaccaccaccagagc

SEQ ID NO: 3189346 - DNA, 25 bp, Homo sapien
tgatgaggaagtaagacaccaccac

SEQ ID NO: 3189347 - DNA, 25 bp, Homo sapien
cggtgatgaggaagtaagacaccac

SEQ ID NO: 3189348 - DNA, 25 bp, Homo sapien
ctccggtgatgaggaagtaagacac

SEQ ID NO: 3189349 - DNA, 25 bp, Homo sapien
tcttgaccaaccatggaagcggagt

SEQ ID NO: 3189350 - DNA, 25 bp, Homo sapien
gcggagttggccaaattagaccttc

SEQ ID NO: 3189351 - DNA, 25 bp, Homo sapien
tctcttaagacagggcgtgaaggcg

SEQ ID NO: 3189352 - DNA, 25 bp, Homo sapien
tctgaaaagactagccggattgcca

SEQ ID NO: 3189353 - DNA, 25 bp, Homo sapien
ccttcagtgccaactattctcacaa

SEQ ID NO: 3189354 - DNA, 25 bp, Homo sapien
aacaattatatggccactcccttaa

SEQ ID NO: 3189355 - DNA, 25 bp, Homo sapien
aagtagaactacttttgctatccca

SEQ ID NO: 3189356 - DNA, 25 bp, Homo sapien
ttgctatcccaaatccgtagcttta

SEQ ID NO: 3189357 - DNA, 25 bp, Homo sapien
catggtaatcttctccctatcattc

SEQ ID NO: 3189358 - DNA, 25 bp, Homo sapien
gccatggtaatcttctccctatcat

SEQ ID NO: 3189359 - DNA, 25 bp, Homo sapien
cgaatttgcgagtcattcttgcaca

SEQ ID NO: 3189360 - DNA, 25 bp, Homo sapien
gggccatggtaatcttctccctatc

SEQ ID NO: 3189361 - DNA, 25 bp, Homo sapien
ttcaaactcctgcaccatagtccca

SEQ ID NO: 3189362 - DNA, 25 bp, Homo sapien
gcttacatatcatttcctcaggaat

SEQ ID NO: 3189363 - DNA, 25 bp, Homo sapien
tagcatatcctttccccgaactctt

SEQ ID NO: 3189364 - DNA, 25 bp, Homo sapien
ggaatcatatcgaatccaatccaga

SEQ ID NO: 3189365 - DNA, 25 bp, Homo sapien
ttcatcagtcatagaaccgacactt

SEQ ID NO: 3189366 - DNA, 25 bp, Homo sapien
tcagtcatagaaccgacacttggag

SEQ ID NO: 3189367 - DNA, 25 bp, Homo sapien
cacttggaggttcaacaataacatc

SEQ ID NO: 3189368 - DNA, 25 bp, Homo sapien
catcagtcatagaaccgacacttgg

SEQ ID NO: 3189369 - DNA, 25 bp, Homo sapien
taggacacagacgaatccaatgaac

SEQ ID NO: 3189370 - DNA, 25 bp, Homo sapien
gacgaatccaatgaacagaagaagg

SEQ ID NO: 3189371 - DNA, 25 bp, Homo sapien
gacacagacgaatccaatgaacaga

SEQ ID NO: 3189372 - DNA, 25 bp, Homo sapien
gaaaaaactcaataggacacagacg

SEQ ID NO: 3189373 - DNA, 25 bp, Homo sapien
tgtgtgtaatacaggccaacagtcc

SEQ ID NO: 3189374 - DNA, 25 bp, Homo sapien
ggtaccaggcattaggagctgcaga

SEQ ID NO: 3189375 - DNA, 25 bp, Homo sapien
caaaggcatctcttgctaaaggtaa

SEQ ID NO: 3189376 - DNA, 25 bp, Homo sapien
ccctggaggttatcatggtgcatct

SEQ ID NO: 3189377 - DNA, 25 bp, Homo sapien
cagtgtccagcaagtaacagttatc

SEQ ID NO: 3189378 - DNA, 25 bp, Homo sapien
gaaagagggtctgtcgaaaatgaat

SEQ ID NO: 3189379 - DNA, 25 bp, Homo sapien
tgaactgatcccatgatctcaggat

SEQ ID NO: 3189380 - DNA, 25 bp, Homo sapien
gacttgcctgaatgtaggaacccat

SEQ ID NO: 3189381 - DNA, 25 bp, Homo sapien
aacctgaggccaagagagttcacag

SEQ ID NO: 3189382 - DNA, 25 bp, Homo sapien
gagttcacagaactaatccaaagtc

SEQ ID NO: 3189383 - DNA, 25 bp, Homo sapien
ctgtggccataatctaacttgaaac

SEQ ID NO: 3189384 - DNA, 25 bp, Homo sapien
tattaagtggcaggccaaaactgga

SEQ ID NO: 3189385 - DNA, 25 bp, Homo sapien
tagtagaagttacccaacagctagc

SEQ ID NO: 3189386 - DNA, 25 bp, Homo sapien
taatgcctgatgtgtcacaaaaagg

SEQ ID NO: 3189387 - DNA, 25 bp, Homo sapien
gggtgacccatgcttgtcaacctat

SEQ ID NO: 3189388 - DNA, 25 bp, Homo sapien
ttccttgtaactagtgggtgaccca

SEQ ID NO: 3189389 - DNA, 25 bp, Homo sapien
gattacacgcgtgaagcccggcaaa

SEQ ID NO: 3189390 - DNA, 25 bp, Homo sapien
tacacgcgtgaagcccggcaaagtt

SEQ ID NO: 3189391 - DNA, 25 bp, Homo sapien
cacgcgtgaagcccggcaaagtttt

SEQ ID NO: 3189392 - DNA, 25 bp, Homo sapien
attacacgcgtgaagcccggcaaag

SEQ ID NO: 3189393 - DNA, 25 bp, Homo sapien
caacatcattggtatagcaataggc

SEQ ID NO: 3189394 - DNA, 25 bp, Homo sapien
tgatattatagttgtagatatggaa

SEQ ID NO: 3189395 - DNA, 25 bp, Homo sapien
attggtatagcaataggccagcagg

SEQ ID NO: 3189396 - DNA, 25 bp, Homo sapien
aaattctgtgataaacttgtctctt

SEQ ID NO: 3189397 - DNA, 25 bp, Homo sapien
acactctagttaaaggcaaagcacc

SEQ ID NO: 3189398 - DNA, 25 bp, Homo sapien
ggccttcagtcgagcggtggcatca

SEQ ID NO: 3189399 - DNA, 25 bp, Homo sapien
gaggtgccatccattacccaaaggc

SEQ ID NO: 3189400 - DNA, 25 bp, Homo sapien
tcagtcgagcggtggcatcatgctg

SEQ ID NO: 3189401 - DNA, 25 bp, Homo sapien
aggtgccatccattacccaaaggca

SEQ ID NO: 3189402 - DNA, 25 bp, Homo sapien
gacatgactccatcgtaaattgagg

SEQ ID NO: 3189403 - DNA, 25 bp, Homo sapien
taatgggtttattcggacatgactc

SEQ ID NO: 3189404 - DNA, 25 bp, Homo sapien
catgagagtccatcaactttgagac

SEQ ID NO: 3189405 - DNA, 25 bp, Homo sapien
cctgaaagtagactgaactcactca

SEQ ID NO: 3189406 - DNA, 25 bp, Homo sapien
tcatcctccgggtacctccatgaaa

SEQ ID NO: 3189407 - DNA, 25 bp, Homo sapien
tgtacaccaagggggaatatgcctt

SEQ ID NO: 3189408 - DNA, 25 bp, Homo sapien
ttgactcatcctccgggtacctcca

SEQ ID NO: 3189409 - DNA, 25 bp, Homo sapien
tccgggtacctccatgaaaaagcat

SEQ ID NO: 3189410 - DNA, 25 bp, Homo sapien
ggtgctagaatttgtaccgactgcc

SEQ ID NO: 3189411 - DNA, 25 bp, Homo sapien
gactgcctcttttaggcaggtgcta

SEQ ID NO: 3189412 - DNA, 25 bp, Homo sapien
attccccataccttggctggtgtgg

SEQ ID NO: 3189413 - DNA, 25 bp, Homo sapien
aaaattcaaagtttaggcaggtgct

SEQ ID NO: 3189414 - DNA, 25 bp, Homo sapien
ccaaaacaaggagtattcctcttcg

SEQ ID NO: 3189415 - DNA, 25 bp, Homo sapien
taggatcccgcatagtatttagttg

SEQ ID NO: 3189416 - DNA, 25 bp, Homo sapien
gacatcaaggcaatttatccctaaa

SEQ ID NO: 3189417 - DNA, 25 bp, Homo sapien
tggctcagccattagaaccatttga

SEQ ID NO: 3189418 - DNA, 25 bp, Homo sapien
caagatgcgatgtccagagttacag

SEQ ID NO: 3189419 - DNA, 25 bp, Homo sapien
gattattagttcagactctagcctg

SEQ ID NO: 3189420 - DNA, 25 bp, Homo sapien
tagagagcaaagtataacaggtgcc

SEQ ID NO: 3189421 - DNA, 25 bp, Homo sapien
cattcactgctcagtaagaggctca

SEQ ID NO: 3189422 - DNA, 25 bp, Homo sapien
gtggaagaaggatagcgctccgcca

SEQ ID NO: 3189423 - DNA, 25 bp, Homo sapien
gatgacggccaatagccctagcaga

SEQ ID NO: 3189424 - DNA, 25 bp, Homo sapien
tagcagacaccattccagggatggg

SEQ ID NO: 3189425 - DNA, 25 bp, Homo sapien
tagggaacaaacgatgcgctgcagc

SEQ ID NO: 3189426 - DNA, 25 bp, Homo sapien
tgtcaagtgttgactttggaaaaca

SEQ ID NO: 3189427 - DNA, 25 bp, Homo sapien
caaaagagccttcctacttcttcct

SEQ ID NO: 3189428 - DNA, 25 bp, Homo sapien
ttgaacatactggtacaaaagagcc

SEQ ID NO: 3189429 - DNA, 25 bp, Homo sapien
catactggtacaaaagagccttcct

SEQ ID NO: 3189430 - DNA, 25 bp, Homo sapien
cagaagccaatggttcccaggcatg

SEQ ID NO: 3189431 - DNA, 25 bp, Homo sapien
tcacatggctagcagatggtagagc

SEQ ID NO: 3189432 - DNA, 25 bp, Homo sapien
ttatggctgaaaaactaagtggctc

SEQ ID NO: 3189433 - DNA, 25 bp, Homo sapien
tgatgaatacaagagacaggcctgg

SEQ ID NO: 3189434 - DNA, 25 bp, Homo sapien
gattcaatcttacatgcgacagcct

SEQ ID NO: 3189435 - DNA, 25 bp, Homo sapien
atctgggcttagatcttccggtggc

SEQ ID NO: 3189436 - DNA, 25 bp, Homo sapien
tccagaacccttgacagggactggg

SEQ ID NO: 3189437 - DNA, 25 bp, Homo sapien
tgcaggagccgccttgggcagatct

SEQ ID NO: 3189438 - DNA, 25 bp, Homo sapien
tcccatgaatctaccgtgtacccga

SEQ ID NO: 3189439 - DNA, 25 bp, Homo sapien
taccgtgtacccgaaagcagtgcag

SEQ ID NO: 3189440 - DNA, 25 bp, Homo sapien
aacacctcccatgaatctaccgtgt

SEQ ID NO: 3189441 - DNA, 25 bp, Homo sapien
cctctgtggctggagaatacggagc

SEQ ID NO: 3189442 - DNA, 25 bp, Homo sapien
tggaattcctatttcgtgcattcat

SEQ ID NO: 3189443 - DNA, 25 bp, Homo sapien
tgctctcggggaatggttggaaact

SEQ ID NO: 3189444 - DNA, 25 bp, Homo sapien
gttggaaacttaatgagcatccaca

SEQ ID NO: 3189445 - DNA, 25 bp, Homo sapien
tgattcaccagctgttgctctcggg

SEQ ID NO: 3189446 - DNA, 25 bp, Homo sapien
cagggaagctttgattcaccagctg

SEQ ID NO: 3189447 - DNA, 25 bp, Homo sapien
ttctcgccatctgacggagatacca

SEQ ID NO: 3189448 - DNA, 25 bp, Homo sapien
tgacggagataccaatgtgcagtga

SEQ ID NO: 3189449 - DNA, 25 bp, Homo sapien
aatgaaatatgggagtttcttctct

SEQ ID NO: 3189450 - DNA, 25 bp, Homo sapien
cctctttctcgccatctgacggaga

SEQ ID NO: 3189451 - DNA, 25 bp, Homo sapien
aatgtatcctgcatgcttcatggta

SEQ ID NO: 3189452 - DNA, 25 bp, Homo sapien
aatgccaacaatgtatcctgcatgc

SEQ ID NO: 3189453 - DNA, 25 bp, Homo sapien
cctgcatgcttcatggtaatctgca

SEQ ID NO: 3189454 - DNA, 25 bp, Homo sapien
aaagattaggtgggttggaatgcca

SEQ ID NO: 3189455 - DNA, 25 bp, Homo sapien
ggctttttctaactcgacatcatta

SEQ ID NO: 3189456 - DNA, 25 bp, Homo sapien
gacatcattaacctctgacttcatc

SEQ ID NO: 3189457 - DNA, 25 bp, Homo sapien
tctaactcgacatcattaacctctg

SEQ ID NO: 3189458 - DNA, 25 bp, Homo sapien
ctctgacttcatctgttgaaccttg

SEQ ID NO: 3189459 - DNA, 25 bp, Homo sapien
cccatttccattcctatgtgtattc

SEQ ID NO: 3189460 - DNA, 25 bp, Homo sapien
tccattcctatgtgtattcacactg

SEQ ID NO: 3189461 - DNA, 25 bp, Homo sapien
tgtgtattcacactgtcttcatctt

SEQ ID NO: 3189462 - DNA, 25 bp, Homo sapien
cctatgtgtattcacactgtcttca

SEQ ID NO: 3189463 - DNA, 25 bp, Homo sapien
tctgttggttcaaaagctctgcctt

SEQ ID NO: 3189464 - DNA, 25 bp, Homo sapien
gacagctgccttgcggttcctgaga

SEQ ID NO: 3189465 - DNA, 25 bp, Homo sapien
tgattcggactgaactgggcatgac

SEQ ID NO: 3189466 - DNA, 25 bp, Homo sapien
tacatggaaatgtcggcaatgcccc

SEQ ID NO: 3189467 - DNA, 25 bp, Homo sapien
gccactgcagggttaacatttctcc

SEQ ID NO: 3189468 - DNA, 25 bp, Homo sapien
gagagaagccgatttcctaggatgt

SEQ ID NO: 3189469 - DNA, 25 bp, Homo sapien
gggatgcaagtaggagctaaagact

SEQ ID NO: 3189470 - DNA, 25 bp, Homo sapien
tacttttgcgtgttacacagcttcc

SEQ ID NO: 3189471 - DNA, 25 bp, Homo sapien
agactactgaactgctacacacaga

SEQ ID NO: 3189472 - DNA, 25 bp, Homo sapien
cttctgtcctaagctggcaggtgcc

SEQ ID NO: 3189473 - DNA, 25 bp, Homo sapien
tggcaggtgccaggacgccatactg

SEQ ID NO: 3189474 - DNA, 25 bp, Homo sapien
gacgccatactgtctgctcagaaac

SEQ ID NO: 3189475 - DNA, 25 bp, Homo sapien
ttctgtcctaagctggcaggtgcca

SEQ ID NO: 3189476 - DNA, 25 bp, Homo sapien
tgttaatccaagtgcacaagtcggg

SEQ ID NO: 3189477 - DNA, 25 bp, Homo sapien
tccaagtgcacaagtcggggccgga

SEQ ID NO: 3189478 - DNA, 25 bp, Homo sapien
ctgctgttaatccaagtgcacaagt

SEQ ID NO: 3189479 - DNA, 25 bp, Homo sapien
gctgttaatccaagtgcacaagtcg

SEQ ID NO: 3189480 - DNA, 25 bp, Homo sapien
gccttactcctggatatctttcaag

SEQ ID NO: 3189481 - DNA, 25 bp, Homo sapien
tactcctggatatctttcaagagcc

SEQ ID NO: 3189482 - DNA, 25 bp, Homo sapien
tttctgctctgtactcccacaacac

SEQ ID NO: 3189483 - DNA, 25 bp, Homo sapien
tcttccatcgccttactcctggata

SEQ ID NO: 3189484 - DNA, 25 bp, Homo sapien
tcctccctgtgagattgtgaacatc

SEQ ID NO: 3189485 - DNA, 25 bp, Homo sapien
ggacggcttgtacagcagactatct

SEQ ID NO: 3189486 - DNA, 25 bp, Homo sapien
tgctgtgctcctagaggacggcttg

SEQ ID NO: 3189487 - DNA, 25 bp, Homo sapien
gaagatccacatcagacgtgcggtg

SEQ ID NO: 3189488 - DNA, 25 bp, Homo sapien
cattgacatttgtgcacactgtgca

SEQ ID NO: 3189489 - DNA, 25 bp, Homo sapien
tccacttgcctagctgggagcctgg

SEQ ID NO: 3189490 - DNA, 25 bp, Homo sapien
ggcagcgagcttcatctggatggaa

SEQ ID NO: 3189491 - DNA, 25 bp, Homo sapien
taactgatccagtcccaatttgggc

SEQ ID NO: 3189492 - DNA, 25 bp, Homo sapien
accttgattgccaatcctgattcca

SEQ ID NO: 3189493 - DNA, 25 bp, Homo sapien
ccttgattgccaatcctgattccat

SEQ ID NO: 3189494 - DNA, 25 bp, Homo sapien
aagtaaaggatagaggatccgaact

SEQ ID NO: 3189495 - DNA, 25 bp, Homo sapien
aggaagtaaaggatagaggatccga

SEQ ID NO: 3189496 - DNA, 25 bp, Homo sapien
gaagtaaaggatagaggatccgaac

SEQ ID NO: 3189497 - DNA, 25 bp, Homo sapien
tgaggaagtaaaggatagaggatcc

SEQ ID NO: 3189498 - DNA, 25 bp, Homo sapien
gatgtgatacactgagctgccttct

SEQ ID NO: 3189499 - DNA, 25 bp, Homo sapien
gacttccgtgaaatgatgacccagg

SEQ ID NO: 3189500 - DNA, 25 bp, Homo sapien
tctggagatgcactagaggctattc

SEQ ID NO: 3189501 - DNA, 25 bp, Homo sapien
gcctctctccatagttcaggtgtgg

SEQ ID NO: 3189502 - DNA, 25 bp, Homo sapien
tcttctcctctctctgtaattcctt

SEQ ID NO: 3189503 - DNA, 25 bp, Homo sapien
ttctcctctctctgtaattccttcc

SEQ ID NO: 3189504 - DNA, 25 bp, Homo sapien
ctcctctctctgtaattccttcctc

SEQ ID NO: 3189505 - DNA, 25 bp, Homo sapien
cttcacacttgtctttcatggcttt

SEQ ID NO: 3189506 - DNA, 25 bp, Homo sapien
aagtctccactgtcctactggaaat

SEQ ID NO: 3189507 - DNA, 25 bp, Homo sapien
ctaagtctccactgtcctactggaa

SEQ ID NO: 3189508 - DNA, 25 bp, Homo sapien
ctccactgtcctactggaaataatt

SEQ ID NO: 3189509 - DNA, 25 bp, Homo sapien
gtctccactgtcctactggaaataa

SEQ ID NO: 3189510 - DNA, 25 bp, Homo sapien
gtttttctgctgatagaatttactg

SEQ ID NO: 3189511 - DNA, 25 bp, Homo sapien
ttttctgctgatagaatttactgag

SEQ ID NO: 3189512 - DNA, 25 bp, Homo sapien
ctgctgatagaatttactgagaatt

SEQ ID NO: 3189513 - DNA, 25 bp, Homo sapien
ttctgctgatagaatttactgagaa

SEQ ID NO: 3189514 - DNA, 25 bp, Homo sapien
agttagcaagaactctttctgaagc

SEQ ID NO: 3189515 - DNA, 25 bp, Homo sapien
aatctggttttgtcgtctctctctg

SEQ ID NO: 3189516 - DNA, 25 bp, Homo sapien
cctgaattttctaatcctgaagagc

SEQ ID NO: 3189517 - DNA, 25 bp, Homo sapien
gcatgaatagtaccaattgtcctga

SEQ ID NO: 3189518 - DNA, 25 bp, Homo sapien
tttggtaattcacctgatgagccag

SEQ ID NO: 3189519 - DNA, 25 bp, Homo sapien
gaaatattatactcttaggagtgga

SEQ ID NO: 3189520 - DNA, 25 bp, Homo sapien
gaagggtattccagctacttccaat

SEQ ID NO: 3189521 - DNA, 25 bp, Homo sapien
tcacgatcatgtgagggcccatgga

SEQ ID NO: 3189522 - DNA, 25 bp, Homo sapien
cctttactttgctgtgacgtctcca

SEQ ID NO: 3189523 - DNA, 25 bp, Homo sapien
cccagtgtgcgtccatcaagagggc

SEQ ID NO: 3189524 - DNA, 25 bp, Homo sapien
ttttctgccctttactttgctgtga

SEQ ID NO: 3189525 - DNA, 25 bp, Homo sapien
ccagtgtgcgtccatcaagagggct

SEQ ID NO: 3189526 - DNA, 25 bp, Homo sapien
ggcagctgtagtgctgattgcgaaa

SEQ ID NO: 3189527 - DNA, 25 bp, Homo sapien
tggtgcggagcagtataaagtttta

SEQ ID NO: 3189528 - DNA, 25 bp, Homo sapien
tcagggcaactcatgttggaggttg

SEQ ID NO: 3189529 - DNA, 25 bp, Homo sapien
ataagacatcttggtgagagtggag

SEQ ID NO: 3189530 - DNA, 25 bp, Homo sapien
attcttattaggaatcacatgcaaa

SEQ ID NO: 3189531 - DNA, 25 bp, Homo sapien
ttcttattaggaatcacatgcaaag

SEQ ID NO: 3189532 - DNA, 25 bp, Homo sapien
tattcttattaggaatcacatgcaa

SEQ ID NO: 3189533 - DNA, 25 bp, Homo sapien
cttgacaaatgactctgataggtga

SEQ ID NO: 3189534 - DNA, 25 bp, Homo sapien
cctttggccagtgtgttaattgtgc

SEQ ID NO: 3189535 - DNA, 25 bp, Homo sapien
ggccagtgtgttaattgtgcattat

SEQ ID NO: 3189536 - DNA, 25 bp, Homo sapien
atgtttttgagctaaacactcagca

SEQ ID NO: 3189537 - DNA, 25 bp, Homo sapien
cacacactgggtggttgataggcag

SEQ ID NO: 3189538 - DNA, 25 bp, Homo sapien
tggttgataggcaggtccgtattca

SEQ ID NO: 3189539 - DNA, 25 bp, Homo sapien
tcatccctttgtactcatacttgca

SEQ ID NO: 3189540 - DNA, 25 bp, Homo sapien
gcaggtccgtattcatccctttgta

SEQ ID NO: 3189541 - DNA, 25 bp, Homo sapien
ggctcagccttacctgtgcattcct

SEQ ID NO: 3189542 - DNA, 25 bp, Homo sapien
ccgagggctcagccttacctgtgca

SEQ ID NO: 3189543 - DNA, 25 bp, Homo sapien
gagggctcagccttacctgtgcatt

SEQ ID NO: 3189544 - DNA, 25 bp, Homo sapien
agggctcagccttacctgtgcattc

SEQ ID NO: 3189545 - DNA, 25 bp, Homo sapien
cttaagggcaagtgccagagctctt

SEQ ID NO: 3189546 - DNA, 25 bp, Homo sapien
ttctgtttccttgggagaaccatcc

SEQ ID NO: 3189547 - DNA, 25 bp, Homo sapien
gaaccatccttaagggcaagtgcca

SEQ ID NO: 3189548 - DNA, 25 bp, Homo sapien
cttgggagaaccatccttaagggca

SEQ ID NO: 3189549 - DNA, 25 bp, Homo sapien
ccagagctgcaaaacaatttgtttc

SEQ ID NO: 3189550 - DNA, 25 bp, Homo sapien
cttcccagagctgcaaaacaatttg

SEQ ID NO: 3189551 - DNA, 25 bp, Homo sapien
cacaatgtccaggatacagggtctg

SEQ ID NO: 3189552 - DNA, 25 bp, Homo sapien
tattgcagctctgcacaatgtccag

SEQ ID NO: 3189553 - DNA, 25 bp, Homo sapien
tctgtctgtacactggcctctggag

SEQ ID NO: 3189554 - DNA, 25 bp, Homo sapien
ttggacagagctcttcaaaaaccta

SEQ ID NO: 3189555 - DNA, 25 bp, Homo sapien
caaatcccctaagtatcaagtgtgg

SEQ ID NO: 3189556 - DNA, 25 bp, Homo sapien
taatgtcggcccttcaactttggac

SEQ ID NO: 3189557 - DNA, 25 bp, Homo sapien
tctgtccttgataacattcacagct

SEQ ID NO: 3189558 - DNA, 25 bp, Homo sapien
tctttctgtccttgataacattcac

SEQ ID NO: 3189559 - DNA, 25 bp, Homo sapien
tttctgtccttgataacattcacag

SEQ ID NO: 3189560 - DNA, 25 bp, Homo sapien
gtctttctgtccttgataacattca

SEQ ID NO: 3189561 - DNA, 25 bp, Homo sapien
agaggcacacaaatcaggatcaggg

SEQ ID NO: 3189562 - DNA, 25 bp, Homo sapien
caggatcagggagatacaggggttt

SEQ ID NO: 3189563 - DNA, 25 bp, Homo sapien
atcaggatcagggagatacaggggt

SEQ ID NO: 3189564 - DNA, 25 bp, Homo sapien
catttgtgtgtcagaggcacacaaa

SEQ ID NO: 3189565 - DNA, 25 bp, Homo sapien
cagccagtgaccacgggcacagaaa

SEQ ID NO: 3189566 - DNA, 25 bp, Homo sapien
agccagtgaccacgggcacagaaac

SEQ ID NO: 3189567 - DNA, 25 bp, Homo sapien
tcagccagtgaccacgggcacagaa

SEQ ID NO: 3189568 - DNA, 25 bp, Homo sapien
tcacaaaaatcgatcaaggcgtttg

SEQ ID NO: 3189569 - DNA, 25 bp, Homo sapien
ctttggtttagcacctagctgtgca

SEQ ID NO: 3189570 - DNA, 25 bp, Homo sapien
tggaggcgtcagcattatcatgaaa

SEQ ID NO: 3189571 - DNA, 25 bp, Homo sapien
gaaaaggaatagagccctcttgtga

SEQ ID NO: 3189572 - DNA, 25 bp, Homo sapien
tggaagtcgtccagatctaggtcct

SEQ ID NO: 3189573 - DNA, 25 bp, Homo sapien
agtcgtccagatctaggtcctgtgg

SEQ ID NO: 3189574 - DNA, 25 bp, Homo sapien
ggaggctggaagtcgtccagatcta

SEQ ID NO: 3189575 - DNA, 25 bp, Homo sapien
ggctggaagtcgtccagatctaggt

SEQ ID NO: 3189576 - DNA, 25 bp, Homo sapien
ttctctaatcaaatgaactcctggg

SEQ ID NO: 3189577 - DNA, 25 bp, Homo sapien
tagtccagttttcggtcacagaaga

SEQ ID NO: 3189578 - DNA, 25 bp, Homo sapien
gaccttggacctcctcagaaacatt

SEQ ID NO: 3189579 - DNA, 25 bp, Homo sapien
tgatgtcgaatgcatgaccttggac

SEQ ID NO: 3189580 - DNA, 25 bp, Homo sapien
cataaaaccagatggtttttgtggt

SEQ ID NO: 3189581 - DNA, 25 bp, Homo sapien
cactttgcctgcaagctttaggtgt

SEQ ID NO: 3189582 - DNA, 25 bp, Homo sapien
gcctgcaagctttaggtgttcctcc

SEQ ID NO: 3189583 - DNA, 25 bp, Homo sapien
tgccataaaaccagatggtttttgt

SEQ ID NO: 3189584 - DNA, 25 bp, Homo sapien
gcaacaggggactcctactcagcat

SEQ ID NO: 3189585 - DNA, 25 bp, Homo sapien
gactcttggagctcatctgtgttac

SEQ ID NO: 3189586 - DNA, 25 bp, Homo sapien
ctacaagttctgagtaagaacctgg

SEQ ID NO: 3189587 - DNA, 25 bp, Homo sapien
ctggtagaagacgtcttttcctgat

SEQ ID NO: 3189588 - DNA, 25 bp, Homo sapien
gaggagggtctcatgctgtattcat

SEQ ID NO: 3189589 - DNA, 25 bp, Homo sapien
tgtggaaggcattcttaggtaacaa

SEQ ID NO: 3189590 - DNA, 25 bp, Homo sapien
tagaaaagatcgctttgaggagggt

SEQ ID NO: 3189591 - DNA, 25 bp, Homo sapien
tcctcccaatatgtgctaagtgctt

SEQ ID NO: 3189592 - DNA, 25 bp, Homo sapien
ctgggtgacttctgaaatcaacgac

SEQ ID NO: 3189593 - DNA, 25 bp, Homo sapien
gcaaattggttgtattaagaactgg

SEQ ID NO: 3189594 - DNA, 25 bp, Homo sapien
gacttctgaaatcaacgacagtcat

SEQ ID NO: 3189595 - DNA, 25 bp, Homo sapien
ctgcaaattggttgtattaagaact

SEQ ID NO: 3189596 - DNA, 25 bp, Homo sapien
tctgtttgtaaacgaacaagcacaa

SEQ ID NO: 3189597 - DNA, 25 bp, Homo sapien
agggatctctgtttgtaaacgaaca

SEQ ID NO: 3189598 - DNA, 25 bp, Homo sapien
gaacaagcacaaaacacaggaccat

SEQ ID NO: 3189599 - DNA, 25 bp, Homo sapien
aaacgaacaagcacaaaacacagga

SEQ ID NO: 3189600 - DNA, 25 bp, Homo sapien
tggggtgcaagttggcagaccctct

SEQ ID NO: 3189601 - DNA, 25 bp, Homo sapien
taaatattggtaatggatgcctgaa

SEQ ID NO: 3189602 - DNA, 25 bp, Homo sapien
ggaccaaggatatacagagaatggg

SEQ ID NO: 3189603 - DNA, 25 bp, Homo sapien
tctggaccaaggatatacagagaat

SEQ ID NO: 3189604 - DNA, 25 bp, Homo sapien
gcagattcctatatttggctataac

SEQ ID NO: 3189605 - DNA, 25 bp, Homo sapien
cagattcctatatttggctataaca

SEQ ID NO: 3189606 - DNA, 25 bp, Homo sapien
tgcagattcctatatttggctataa

SEQ ID NO: 3189607 - DNA, 25 bp, Homo sapien
tccagggcatattttgtgcattttc

SEQ ID NO: 3189608 - DNA, 25 bp, Homo sapien
cattttccacgtaagcttgaagata

SEQ ID NO: 3189609 - DNA, 25 bp, Homo sapien
ggcatattttgtgcattttccacgt

SEQ ID NO: 3189610 - DNA, 25 bp, Homo sapien
ttgtgcattttccacgtaagcttga

SEQ ID NO: 3189611 - DNA, 25 bp, Homo sapien
ccctcattaatcagctgttcaccgg

SEQ ID NO: 3189612 - DNA, 25 bp, Homo sapien
gactgatgtctgacaaacttgatcc

SEQ ID NO: 3189613 - DNA, 25 bp, Homo sapien
caccggagagctggactgatgtctg

SEQ ID NO: 3189614 - DNA, 25 bp, Homo sapien
gctgttcaccggagagctggactga

SEQ ID NO: 3189615 - DNA, 25 bp, Homo sapien
tgtcgtaaactaaatcaccattttc

SEQ ID NO: 3189616 - DNA, 25 bp, Homo sapien
cgcctgtttgtcgtaaactaaatca

SEQ ID NO: 3189617 - DNA, 25 bp, Homo sapien
ctcttccagcaaagcatgcaatgca

SEQ ID NO: 3189618 - DNA, 25 bp, Homo sapien
gactcttccagcaaagcatgcaatg

SEQ ID NO: 3189619 - DNA, 25 bp, Homo sapien
ttgagaaagagtttgcatcgcctgc

SEQ ID NO: 3189620 - DNA, 25 bp, Homo sapien
tggtacagctgcaccttgactcata

SEQ ID NO: 3189621 - DNA, 25 bp, Homo sapien
tgcaccttgactcataaatgggaat

SEQ ID NO: 3189622 - DNA, 25 bp, Homo sapien
gagaaagagtttgcatcgcctgcat

SEQ ID NO: 3189623 - DNA, 25 bp, Homo sapien
gcaccacagcgagatagcaacagct

SEQ ID NO: 3189624 - DNA, 25 bp, Homo sapien
tcagacgtcggccagacactttgcc

SEQ ID NO: 3189625 - DNA, 25 bp, Homo sapien
tcagtagagatagagcgtgccgctt

SEQ ID NO: 3189626 - DNA, 25 bp, Homo sapien
taagccaaagttgccgcctcttgcg

SEQ ID NO: 3189627 - DNA, 25 bp, Homo sapien
ttctttactcccatagttcggtgag

SEQ ID NO: 3189628 - DNA, 25 bp, Homo sapien
ccttctgaagacctggacgagcctc

SEQ ID NO: 3189629 - DNA, 25 bp, Homo sapien
actcccatagttcggtgagtgagag

SEQ ID NO: 3189630 - DNA, 25 bp, Homo sapien
agacctggacgagcctccagaaatg

SEQ ID NO: 3189631 - DNA, 25 bp, Homo sapien
taaagttgatacttccctccagagg

SEQ ID NO: 3189632 - DNA, 25 bp, Homo sapien
gaaaacctgcatgtatgagacctca

SEQ ID NO: 3189633 - DNA, 25 bp, Homo sapien
caccacagattggacagggtcgagc

SEQ ID NO: 3189634 - DNA, 25 bp, Homo sapien
gacatgagtaaaaacgaggtctccc

SEQ ID NO: 3189635 - DNA, 25 bp, Homo sapien
taatggaccacaccgagagctttga

SEQ ID NO: 3189636 - DNA, 25 bp, Homo sapien
ccttgggttaagcagattccgtaga

SEQ ID NO: 3189637 - DNA, 25 bp, Homo sapien
caaacaagctttcacgaggcctaca

SEQ ID NO: 3189638 - DNA, 25 bp, Homo sapien
tgttgacttacacaacggctgcccg

SEQ ID NO: 3189639 - DNA, 25 bp, Homo sapien
tggtgatgagctgctaggaagcccc

SEQ ID NO: 3189640 - DNA, 25 bp, Homo sapien
agcccctgtcggcaagctcgttgga

SEQ ID NO: 3189641 - DNA, 25 bp, Homo sapien
aacaattcacggttgcacagtagcg

SEQ ID NO: 3189642 - DNA, 25 bp, Homo sapien
gcggctttgcggtttggtcctcaga

SEQ ID NO: 3189643 - DNA, 25 bp, Homo sapien
gccgcatcccgtttgctgcaaagtg

SEQ ID NO: 3189644 - DNA, 25 bp, Homo sapien
cgtttgctgcaaagtggcaatgcat

SEQ ID NO: 3189645 - DNA, 25 bp, Homo sapien
aatcttggcccggttgcaaactcat

SEQ ID NO: 3189646 - DNA, 25 bp, Homo sapien
tgcaaactcatattgccgcatcccg

SEQ ID NO: 3189647 - DNA, 25 bp, Homo sapien
gattctcaaataagagccatgtggc

SEQ ID NO: 3189648 - DNA, 25 bp, Homo sapien
ttcttcactgaaagggtttgaacag

SEQ ID NO: 3189649 - DNA, 25 bp, Homo sapien
tgtaaaagactattgctcaccatac

SEQ ID NO: 3189650 - DNA, 25 bp, Homo sapien
atatttgcttgcaacaaaggcagcc

SEQ ID NO: 3189651 - DNA, 25 bp, Homo sapien
tgagaggcatgaggagtgtgaagtg

SEQ ID NO: 3189652 - DNA, 25 bp, Homo sapien
tttatgttggaacttcatgacatta

SEQ ID NO: 3189653 - DNA, 25 bp, Homo sapien
tgttggaacttcatgacattaaagg

SEQ ID NO: 3189654 - DNA, 25 bp, Homo sapien
aaggtaaaggagacggtgaagtgag

SEQ ID NO: 3189655 - DNA, 25 bp, Homo sapien
agctgtagccatgtcttgtaaggac

SEQ ID NO: 3189656 - DNA, 25 bp, Homo sapien
catgtcttgtaaggacatggcattc

SEQ ID NO: 3189657 - DNA, 25 bp, Homo sapien
ttaggtcgagtgtttacccacagcc

SEQ ID NO: 3189658 - DNA, 25 bp, Homo sapien
aggtcgagtgtttacccacagccca

SEQ ID NO: 3189659 - DNA, 25 bp, Homo sapien
gaagcctcatccatgtttttctggc

SEQ ID NO: 3189660 - DNA, 25 bp, Homo sapien
aaatctaggccatttgacccatggg

SEQ ID NO: 3189661 - DNA, 25 bp, Homo sapien
gacccatgggcataccagtgaattg

SEQ ID NO: 3189662 - DNA, 25 bp, Homo sapien
ttttctggctctggagatcaactgg

SEQ ID NO: 3189663 - DNA, 25 bp, Homo sapien
atataaaagtgaaccctgtttctca

SEQ ID NO: 3189664 - DNA, 25 bp, Homo sapien
ctgtttctcatggagggcttattgg

SEQ ID NO: 3189665 - DNA, 25 bp, Homo sapien
attggtaagatttctggtggccaac

SEQ ID NO: 3189666 - DNA, 25 bp, Homo sapien
tctcatggagggcttattggtaaga

SEQ ID NO: 3189667 - DNA, 25 bp, Homo sapien
taatctcgacccaggtggcttggtg

SEQ ID NO: 3189668 - DNA, 25 bp, Homo sapien
caagctatataaggagcctcagccc

SEQ ID NO: 3189669 - DNA, 25 bp, Homo sapien
taagcccttcgtgtcggccaaaaca

SEQ ID NO: 3189670 - DNA, 25 bp, Homo sapien
tgtaaacgaatgagacctaagccct

SEQ ID NO: 3189671 - DNA, 25 bp, Homo sapien
tgtgcacaatcttcagtgccatctg

SEQ ID NO: 3189672 - DNA, 25 bp, Homo sapien
tcagtaagaattgcattattgagaa

SEQ ID NO: 3189673 - DNA, 25 bp, Homo sapien
tttcccactgataaagtagggaaga

SEQ ID NO: 3189674 - DNA, 25 bp, Homo sapien
gaaaatagggtaagggaatgctgga

SEQ ID NO: 3189675 - DNA, 25 bp, Homo sapien
atgctggaagacaaactttaaactt

SEQ ID NO: 3189676 - DNA, 25 bp, Homo sapien
ccaaaggaaatatagcattcaagcg

SEQ ID NO: 3189677 - DNA, 25 bp, Homo sapien
aaaggaaatatagcattcaagcgcc

SEQ ID NO: 3189678 - DNA, 25 bp, Homo sapien
cctttcttgattccaaaggaaatat

SEQ ID NO: 3189679 - DNA, 25 bp, Homo sapien
aggaaatatagcattcaagcgccat

SEQ ID NO: 3189680 - DNA, 25 bp, Homo sapien
ccttcctcgaagaggaacaatggct

SEQ ID NO: 3189681 - DNA, 25 bp, Homo sapien
ttcctcgaagaggaacaatggcttg

SEQ ID NO: 3189682 - DNA, 25 bp, Homo sapien
tcctcgaagaggaacaatggcttgg

SEQ ID NO: 3189683 - DNA, 25 bp, Homo sapien
cttcctcgaagaggaacaatggctt

SEQ ID NO: 3189684 - DNA, 25 bp, Homo sapien
gccgcgggttgatgttcggagctca

SEQ ID NO: 3189685 - DNA, 25 bp, Homo sapien
ggctgggcccagcattactgggagg

SEQ ID NO: 3189686 - DNA, 25 bp, Homo sapien
gggaacttgagagccgcgggttgat

SEQ ID NO: 3189687 - DNA, 25 bp, Homo sapien
ggagctcaggcgacgactgaccacc

SEQ ID NO: 3189688 - DNA, 25 bp, Homo sapien
caggcctgagtctggcccggggttc

SEQ ID NO: 3189689 - DNA, 25 bp, Homo sapien
gccttcgtgttgaggcgaaaggact

SEQ ID NO: 3189690 - DNA, 25 bp, Homo sapien
aggtgccttcgtgttgaggcgaaag

SEQ ID NO: 3189691 - DNA, 25 bp, Homo sapien
ggcgaaaggactgggcctcagtggg

SEQ ID NO: 3189692 - DNA, 25 bp, Homo sapien
cggggatcctgggtcgctccgcctt

SEQ ID NO: 3189693 - DNA, 25 bp, Homo sapien
gcgcggggatcctgggtcgctccgc

SEQ ID NO: 3189694 - DNA, 25 bp, Homo sapien
tccgccttgacccacgcgccccacg

SEQ ID NO: 3189695 - DNA, 25 bp, Homo sapien
gggatcctgggtcgctccgccttga

SEQ ID NO: 3189696 - DNA, 25 bp, Homo sapien
gggaccgcggctcaggtacccaagc

SEQ ID NO: 3189697 - DNA, 25 bp, Homo sapien
aggaaggaacgcgcctggcgtcact

SEQ ID NO: 3189698 - DNA, 25 bp, Homo sapien
aaggaacgcgcctggcgtcactgag

SEQ ID NO: 3189699 - DNA, 25 bp, Homo sapien
gctcaggtacccaagcttctccgcg

SEQ ID NO: 3189700 - DNA, 25 bp, Homo sapien
gggcgctgcggctcctgagacggcc

SEQ ID NO: 3189701 - DNA, 25 bp, Homo sapien
ctccgccgaacttgggcgggatccg

SEQ ID NO: 3189702 - DNA, 25 bp, Homo sapien
tgagacggccgctccgccgaacttg

SEQ ID NO: 3189703 - DNA, 25 bp, Homo sapien
cgttctgctggtgcggcgccgggcc

SEQ ID NO: 3189704 - DNA, 25 bp, Homo sapien
taactgttccagtcaccgctggcgg

SEQ ID NO: 3189705 - DNA, 25 bp, Homo sapien
ttcccaagctctgagagaaatgttt

SEQ ID NO: 3189706 - DNA, 25 bp, Homo sapien
taaactgcaaatatacctgaggatg

SEQ ID NO: 3189707 - DNA, 25 bp, Homo sapien
caaggataacagttatagagcttct

SEQ ID NO: 3189708 - DNA, 25 bp, Homo sapien
tctcccttagattctctagaaggga

SEQ ID NO: 3189709 - DNA, 25 bp, Homo sapien
gaatgcagccctgtagatgccttgg

SEQ ID NO: 3189710 - DNA, 25 bp, Homo sapien
ctcagacagatgcaatgttgctggc

SEQ ID NO: 3189711 - DNA, 25 bp, Homo sapien
caggtggacttctaacctataggtg

SEQ ID NO: 3189712 - DNA, 25 bp, Homo sapien
aaataaatgtctgggcgtagtggca

SEQ ID NO: 3189713 - DNA, 25 bp, Homo sapien
atatgaccatgctgacactctctca

SEQ ID NO: 3189714 - DNA, 25 bp, Homo sapien
gatagagggccctcattagaatatg

SEQ ID NO: 3189715 - DNA, 25 bp, Homo sapien
aggtggatagagggccctcattaga

SEQ ID NO: 3189716 - DNA, 25 bp, Homo sapien
tatatacagcattggattatagccc

SEQ ID NO: 3189717 - DNA, 25 bp, Homo sapien
gaaggttagggatgcagcaagccat

SEQ ID NO: 3189718 - DNA, 25 bp, Homo sapien
gcaaatctcccttataagaaacagg

SEQ ID NO: 3189719 - DNA, 25 bp, Homo sapien
taaaatgggattaaatgggcaaatc

SEQ ID NO: 3189720 - DNA, 25 bp, Homo sapien
agtgactgatctggcatatccatgc

SEQ ID NO: 3189721 - DNA, 25 bp, Homo sapien
gatctggcatatccatgctacatga

SEQ ID NO: 3189722 - DNA, 25 bp, Homo sapien
gactgatctggcatatccatgctac

SEQ ID NO: 3189723 - DNA, 25 bp, Homo sapien
tagtgactgatctggcatatccatg

SEQ ID NO: 3189724 - DNA, 25 bp, Homo sapien
gatatgaaacactaggatacgcggc

SEQ ID NO: 3189725 - DNA, 25 bp, Homo sapien
tacgcggcattagaaacagttgaca

SEQ ID NO: 3189726 - DNA, 25 bp, Homo sapien
tgaccacaagtagagggaaatccct

SEQ ID NO: 3189727 - DNA, 25 bp, Homo sapien
ggacccctgctgtacaactgctgtg

SEQ ID NO: 3189728 - DNA, 25 bp, Homo sapien
tggaagtggcgatggatggctgata

SEQ ID NO: 3189729 - DNA, 25 bp, Homo sapien
tagctgtattttgaccagagaatga

SEQ ID NO: 3189730 - DNA, 25 bp, Homo sapien
gtcggagcattctgtgaggtaaaca

SEQ ID NO: 3189731 - DNA, 25 bp, Homo sapien
tttaactggcctaacagtcggagca

SEQ ID NO: 3189732 - DNA, 25 bp, Homo sapien
gattgtcttgagtcgatggaaggcc

SEQ ID NO: 3189733 - DNA, 25 bp, Homo sapien
gagatgaccacgttagagtactgta

SEQ ID NO: 3189734 - DNA, 25 bp, Homo sapien
ttgttcgctacagccagggatcctg

SEQ ID NO: 3189735 - DNA, 25 bp, Homo sapien
gagtactgtatcctgaaagactttg

SEQ ID NO: 3189736 - DNA, 25 bp, Homo sapien
tcattcggttcaaaagcagattctg

SEQ ID NO: 3189737 - DNA, 25 bp, Homo sapien
gttaaattcaagtcacaaattgaat

SEQ ID NO: 3189738 - DNA, 25 bp, Homo sapien
ttcattcggttcaaaagcagattct

SEQ ID NO: 3189739 - DNA, 25 bp, Homo sapien
tctgttaaattcaagtcacaaattg

SEQ ID NO: 3189740 - DNA, 25 bp, Homo sapien
ctctggagaggggataacagctaaa

SEQ ID NO: 3189741 - DNA, 25 bp, Homo sapien
tggagaggggataacagctaaagcc

SEQ ID NO: 3189742 - DNA, 25 bp, Homo sapien
agaaattgaggctgatactctggag

SEQ ID NO: 3189743 - DNA, 25 bp, Homo sapien
aattgaggctgatactctggagagg

SEQ ID NO: 3189744 - DNA, 25 bp, Homo sapien
tctgatagtgccaacaccttgctta

SEQ ID NO: 3189745 - DNA, 25 bp, Homo sapien
gcccaagttatcatccttcacctag

SEQ ID NO: 3189746 - DNA, 25 bp, Homo sapien
tccagctcgttttcctgatctaggt

SEQ ID NO: 3189747 - DNA, 25 bp, Homo sapien
gctgattacatataggacaaggagt

SEQ ID NO: 3189748 - DNA, 25 bp, Homo sapien
cattttgcataacaggacaggataa

SEQ ID NO: 3189749 - DNA, 25 bp, Homo sapien
ggctgaacattttgcataacaggac

SEQ ID NO: 3189750 - DNA, 25 bp, Homo sapien
gaacattttgcataacaggacagga

SEQ ID NO: 3189751 - DNA, 25 bp, Homo sapien
gaggctgaacattttgcataacagg

SEQ ID NO: 3189752 - DNA, 25 bp, Homo sapien
tgtgtaactgaggtcacaggctcaa

SEQ ID NO: 3189753 - DNA, 25 bp, Homo sapien
tcacaggctcaactgggtgatttgc

SEQ ID NO: 3189754 - DNA, 25 bp, Homo sapien
aatagctctgatggctgtgtaactg

SEQ ID NO: 3189755 - DNA, 25 bp, Homo sapien
cttgttgatgaggatcctgaggatc

SEQ ID NO: 3189756 - DNA, 25 bp, Homo sapien
caattgtttagtgggcaaaccattt

SEQ ID NO: 3189757 - DNA, 25 bp, Homo sapien
gataggatggtatttatagtaagat

SEQ ID NO: 3189758 - DNA, 25 bp, Homo sapien
taattgcaattgtttagtgggcaaa

SEQ ID NO: 3189759 - DNA, 25 bp, Homo sapien
taggatggtatttatagtaagatgg

SEQ ID NO: 3189760 - DNA, 25 bp, Homo sapien
gatgagaaagtaagacagatagaaa

SEQ ID NO: 3189761 - DNA, 25 bp, Homo sapien
catgtgatgagaaagtaagacagat

SEQ ID NO: 3189762 - DNA, 25 bp, Homo sapien
taaggtaagacatgtaacctttcta

SEQ ID NO: 3189763 - DNA, 25 bp, Homo sapien
cgcccggccaactctgtaggtctta

SEQ ID NO: 3189764 - DNA, 25 bp, Homo sapien
ccaccgaatggagaaggaatgttat

SEQ ID NO: 3189765 - DNA, 25 bp, Homo sapien
aaaatatgacatcctttcccagagc

SEQ ID NO: 3189766 - DNA, 25 bp, Homo sapien
gagctcagcctgaaacccactgtag

SEQ ID NO: 3189767 - DNA, 25 bp, Homo sapien
catggcgccctgctctaggttgggt

SEQ ID NO: 3189768 - DNA, 25 bp, Homo sapien
gaagctttgatctttcaacaatgac

SEQ ID NO: 3189769 - DNA, 25 bp, Homo sapien
aaaagtcatggaaaaatctgctagc

SEQ ID NO: 3189770 - DNA, 25 bp, Homo sapien
ggttcaggtaatgcaagaaacaaac

SEQ ID NO: 3189771 - DNA, 25 bp, Homo sapien
tatcggtaaaatagcagtatcccaa

SEQ ID NO: 3189772 - DNA, 25 bp, Homo sapien
catcggaagttgatgacaagggagt

SEQ ID NO: 3189773 - DNA, 25 bp, Homo sapien
acaagggagttggtgcggagctagc

SEQ ID NO: 3189774 - DNA, 25 bp, Homo sapien
tgcggagctagcttggttattaaca

SEQ ID NO: 3189775 - DNA, 25 bp, Homo sapien
ttaacatattcaccatactgcacgc

SEQ ID NO: 3189776 - DNA, 25 bp, Homo sapien
gaacagatcagaagaatagctcaga

SEQ ID NO: 3189777 - DNA, 25 bp, Homo sapien
tatctccaaacagtgctacagaggg

SEQ ID NO: 3189778 - DNA, 25 bp, Homo sapien
caagcaatatgggtcaacaaaggca

SEQ ID NO: 3189779 - DNA, 25 bp, Homo sapien
taacagttgagggaaaatggacacc

SEQ ID NO: 3189780 - DNA, 25 bp, Homo sapien
cctccttccagggcatcataactgt

SEQ ID NO: 3189781 - DNA, 25 bp, Homo sapien
gagaagcactgcttgtggtagaaga

SEQ ID NO: 3189782 - DNA, 25 bp, Homo sapien
ccccaagttgaaggtagcatctatt

SEQ ID NO: 3189783 - DNA, 25 bp, Homo sapien
agagagatcaggtacagttgtcagg

SEQ ID NO: 3189784 - DNA, 25 bp, Homo sapien
taaaagtgatgtctccaaaacctac

SEQ ID NO: 3189785 - DNA, 25 bp, Homo sapien
tactcctgtacttgaatgtaatggc

SEQ ID NO: 3189786 - DNA, 25 bp, Homo sapien
ttcaggggcgggatcaggagcagga

SEQ ID NO: 3189787 - DNA, 25 bp, Homo sapien
aggactgcttgctgatgaagaaagc

SEQ ID NO: 3189788 - DNA, 25 bp, Homo sapien
ggatcaggttcaggggcgggatcag

SEQ ID NO: 3189789 - DNA, 25 bp, Homo sapien
aggagcaggactgcttgctgatgaa

SEQ ID NO: 3189790 - DNA, 25 bp, Homo sapien
taccgggttactgggctgtactcca

SEQ ID NO: 3189791 - DNA, 25 bp, Homo sapien
tgttggatagccatagccaaaaggc

SEQ ID NO: 3189792 - DNA, 25 bp, Homo sapien
tgtagcattctgataaccaggctga

SEQ ID NO: 3189793 - DNA, 25 bp, Homo sapien
tgtactccagaaataagtggtgctg

SEQ ID NO: 3189794 - DNA, 25 bp, Homo sapien
aatgtgtgtatatgactgaatacat

SEQ ID NO: 3189795 - DNA, 25 bp, Homo sapien
gttttataactgttacaatgtgtgt

SEQ ID NO: 3189796 - DNA, 25 bp, Homo sapien
aggtacaaatcccaccagtaacttg

SEQ ID NO: 3189797 - DNA, 25 bp, Homo sapien
ccaccagtaacttgtcagaattaag

SEQ ID NO: 3189798 - DNA, 25 bp, Homo sapien
gagctctttcattgcactacattag

SEQ ID NO: 3189799 - DNA, 25 bp, Homo sapien
cattaggtacaacatttaaaggcat

SEQ ID NO: 3189800 - DNA, 25 bp, Homo sapien
agatattattaccctacctggaact

SEQ ID NO: 3189801 - DNA, 25 bp, Homo sapien
tcattgcactacattaggtacaaca

SEQ ID NO: 3189802 - DNA, 25 bp, Homo sapien
gactgtatgcatgtgcgtttatgta

SEQ ID NO: 3189803 - DNA, 25 bp, Homo sapien
agcacatgactgtatgcatgtgcgt

SEQ ID NO: 3189804 - DNA, 25 bp, Homo sapien
agcttaaaatgatgttgattttgaa

SEQ ID NO: 3189805 - DNA, 25 bp, Homo sapien
gcgtttatgtatgataaagtatgtg

SEQ ID NO: 3189806 - DNA, 25 bp, Homo sapien
aggctggtgtgcactgctgcaattt

SEQ ID NO: 3189807 - DNA, 25 bp, Homo sapien
ggtgtgcactgctgcaattttggct

SEQ ID NO: 3189808 - DNA, 25 bp, Homo sapien
tggtgtgcactgctgcaattttggc

SEQ ID NO: 3189809 - DNA, 25 bp, Homo sapien
gctggtgtgcactgctgcaattttg

SEQ ID NO: 3189810 - DNA, 25 bp, Homo sapien
cgtcgcttaatgatgaggacatgtt

SEQ ID NO: 3189811 - DNA, 25 bp, Homo sapien
cctgtacagcactgttactgtgttg

SEQ ID NO: 3189812 - DNA, 25 bp, Homo sapien
tagttaaggcaaatgcacaaattgt

SEQ ID NO: 3189813 - DNA, 25 bp, Homo sapien
tgtgtgtgtagtcacgtcgcttaat

SEQ ID NO: 3189814 - DNA, 25 bp, Homo sapien
tcctctcgtattctcagtgcctaga

SEQ ID NO: 3189815 - DNA, 25 bp, Homo sapien
tatgcacctcggataaaatctaagc

SEQ ID NO: 3189816 - DNA, 25 bp, Homo sapien
tcaatttccgaattagggcagaact

SEQ ID NO: 3189817 - DNA, 25 bp, Homo sapien
tcccaccaaccttcttaagagcagg

SEQ ID NO: 3189818 - DNA, 25 bp, Homo sapien
tgtggttatgtaagaaatgctgtcc

SEQ ID NO: 3189819 - DNA, 25 bp, Homo sapien
aaggcatttttgaaacagtctggaa

SEQ ID NO: 3189820 - DNA, 25 bp, Homo sapien
tgatcacatggattaatagcagcat

SEQ ID NO: 3189821 - DNA, 25 bp, Homo sapien
ttaaaatcctcagcaagaaaagtgg

SEQ ID NO: 3189822 - DNA, 25 bp, Homo sapien
cattcaagttaggtacaggagccca

SEQ ID NO: 3189823 - DNA, 25 bp, Homo sapien
gatagctggttcacaccaggatact

SEQ ID NO: 3189824 - DNA, 25 bp, Homo sapien
gagtaaggtttacaggtctcaggct

SEQ ID NO: 3189825 - DNA, 25 bp, Homo sapien
gactcaatcctcctatactggagga

SEQ ID NO: 3189826 - DNA, 25 bp, Homo sapien
gagacattttcgcaaaacacacata

SEQ ID NO: 3189827 - DNA, 25 bp, Homo sapien
agtttcacagctacttaggtctgct

SEQ ID NO: 3189828 - DNA, 25 bp, Homo sapien
tacagtgttatgatcttggatcgcc

SEQ ID NO: 3189829 - DNA, 25 bp, Homo sapien
taggtctgctcaactctaaagcctg

SEQ ID NO: 3189830 - DNA, 25 bp, Homo sapien
tatttgtcaaagtacaccgaaatga

SEQ ID NO: 3189831 - DNA, 25 bp, Homo sapien
caacaatcctaaaggaagcttagct

SEQ ID NO: 3189832 - DNA, 25 bp, Homo sapien
ttattcagtaaagcctgtgtctgtg

SEQ ID NO: 3189833 - DNA, 25 bp, Homo sapien
tctctgaagggatgtaacaacaatc

SEQ ID NO: 3189834 - DNA, 25 bp, Homo sapien
cgtttactctatagcacaaattgca

SEQ ID NO: 3189835 - DNA, 25 bp, Homo sapien
gggttaatatacgttcgacaggatc

SEQ ID NO: 3189836 - DNA, 25 bp, Homo sapien
cgttgatcaatgaaggatacaaagg

SEQ ID NO: 3189837 - DNA, 25 bp, Homo sapien
gatcggcacctcacaatggtatttg

SEQ ID NO: 3189838 - DNA, 25 bp, Homo sapien
tctggtcgtttatgaggctctccat

SEQ ID NO: 3189839 - DNA, 25 bp, Homo sapien
tgtaatctgaagaagcaatgaactc

SEQ ID NO: 3189840 - DNA, 25 bp, Homo sapien
ggctctccataagatcgggtaaggg

SEQ ID NO: 3189841 - DNA, 25 bp, Homo sapien
tgaattctgaacttctggtcgttta

SEQ ID NO: 3189842 - DNA, 25 bp, Homo sapien
ccactgcattatgagacacatctaa

SEQ ID NO: 3189843 - DNA, 25 bp, Homo sapien
tatccagcttccactgcattatgag

SEQ ID NO: 3189844 - DNA, 25 bp, Homo sapien
tagattttctaggagtgactggcac

SEQ ID NO: 3189845 - DNA, 25 bp, Homo sapien
ggcacaaaattgtcaaatatccagc

SEQ ID NO: 3189846 - DNA, 25 bp, Homo sapien
tcttgttcgtgaatctccaggaagc

SEQ ID NO: 3189847 - DNA, 25 bp, Homo sapien
catctatatcagacacaatcaacat

SEQ ID NO: 3189848 - DNA, 25 bp, Homo sapien
tgaatagtgctatcaaaggtcatga

SEQ ID NO: 3189849 - DNA, 25 bp, Homo sapien
catttgaggctgtgataatccttct

SEQ ID NO: 3189850 - DNA, 25 bp, Homo sapien
ctttactttcatatagattcacaag

SEQ ID NO: 3189851 - DNA, 25 bp, Homo sapien
caagtaaactatccggtgtaggtag

SEQ ID NO: 3189852 - DNA, 25 bp, Homo sapien
tcacaagtaaactatccggtgtagg

SEQ ID NO: 3189853 - DNA, 25 bp, Homo sapien
ctctttactttcatatagattcaca

SEQ ID NO: 3189854 - DNA, 25 bp, Homo sapien
gatctctgattaggatcttctctgg

SEQ ID NO: 3189855 - DNA, 25 bp, Homo sapien
tggattgcagaagtcctgcacccaa

SEQ ID NO: 3189856 - DNA, 25 bp, Homo sapien
acattaatttaaaggcagcctgaag

SEQ ID NO: 3189857 - DNA, 25 bp, Homo sapien
gaaatacagacacacggccacctgt

SEQ ID NO: 3189858 - DNA, 25 bp, Homo sapien
tgcaaatacaggtctggctcacatc

SEQ ID NO: 3189859 - DNA, 25 bp, Homo sapien
ttgagtagctaaggtaacaggcagg

SEQ ID NO: 3189860 - DNA, 25 bp, Homo sapien
tgagtagctaaggtaacaggcaggt

SEQ ID NO: 3189861 - DNA, 25 bp, Homo sapien
aaatagtgcaaatacaggtctggct

SEQ ID NO: 3189862 - DNA, 25 bp, Homo sapien
aatgccagctacacttgttgatgag

SEQ ID NO: 3189863 - DNA, 25 bp, Homo sapien
tctataaagggtgaaatatggtgcc

SEQ ID NO: 3189864 - DNA, 25 bp, Homo sapien
gtaatgggtcaacgaactaaatgcc

SEQ ID NO: 3189865 - DNA, 25 bp, Homo sapien
tgaaactttagagtcctaggcagac

SEQ ID NO: 3189866 - DNA, 25 bp, Homo sapien
aagcaagatcagaatactgtgaact

SEQ ID NO: 3189867 - DNA, 25 bp, Homo sapien
tataaaaatcagttgcagggccaag

SEQ ID NO: 3189868 - DNA, 25 bp, Homo sapien
tcccgagcaatctaatgcaagtttc

SEQ ID NO: 3189869 - DNA, 25 bp, Homo sapien
cactgcagtttgctgtcccgagcaa

SEQ ID NO: 3189870 - DNA, 25 bp, Homo sapien
aatgatggataataatagatgcacc

SEQ ID NO: 3189871 - DNA, 25 bp, Homo sapien
tagtacaccttattctcataacagc

SEQ ID NO: 3189872 - DNA, 25 bp, Homo sapien
ctgcttgtgaaggattgtgagtata

SEQ ID NO: 3189873 - DNA, 25 bp, Homo sapien
tcttgtgagataccgttttaggtct

SEQ ID NO: 3189874 - DNA, 25 bp, Homo sapien
ccgtgaaaagtgtgcattgaaagac

SEQ ID NO: 3189875 - DNA, 25 bp, Homo sapien
tgcttgatgtatataatagggctgt

SEQ ID NO: 3189876 - DNA, 25 bp, Homo sapien
tgcaccgcaaatccagcatcaggat

SEQ ID NO: 3189877 - DNA, 25 bp, Homo sapien
tcagtagaacggacaaagaagttac

SEQ ID NO: 3189878 - DNA, 25 bp, Homo sapien
aaggcagatggcagcttgtacatcc

SEQ ID NO: 3189879 - DNA, 25 bp, Homo sapien
taccactggcaaacaaagtgtatgt

SEQ ID NO: 3189880 - DNA, 25 bp, Homo sapien
tcccgcatatacatctgctagtgaa

SEQ ID NO: 3189881 - DNA, 25 bp, Homo sapien
agtgtatgtactctaattctccgct

SEQ ID NO: 3189882 - DNA, 25 bp, Homo sapien
tgtttaagtattgacagttcattcc

SEQ ID NO: 3189883 - DNA, 25 bp, Homo sapien
gagaggcatccatgtttgtttaagt

SEQ ID NO: 3189884 - DNA, 25 bp, Homo sapien
tatgagtgtaccatggattgtgcat

SEQ ID NO: 3189885 - DNA, 25 bp, Homo sapien
taagagaaaatcctagcttcagttt

SEQ ID NO: 3189886 - DNA, 25 bp, Homo sapien
gagcccacctggaatgagctcatta

SEQ ID NO: 3189887 - DNA, 25 bp, Homo sapien
agtggcgagacctcggctcggctca

SEQ ID NO: 3189888 - DNA, 25 bp, Homo sapien
cctggaatgagctcattacaggcat

SEQ ID NO: 3189889 - DNA, 25 bp, Homo sapien
caaagtgttgggaatgagcccacct

SEQ ID NO: 3189890 - DNA, 25 bp, Homo sapien
cagacttgatgaaacggaccgatcc

SEQ ID NO: 3189891 - DNA, 25 bp, Homo sapien
tgagacagttgagccatatgcagac

SEQ ID NO: 3189892 - DNA, 25 bp, Homo sapien
tgggcgccatcaatgcagagtgctg

SEQ ID NO: 3189893 - DNA, 25 bp, Homo sapien
catagagaggaaacaacttgaggga

SEQ ID NO: 3189894 - DNA, 25 bp, Homo sapien
agccgtgtgcttgtacccgttctaa

SEQ ID NO: 3189895 - DNA, 25 bp, Homo sapien
tatacacgatcatccagccgtgtgc

SEQ ID NO: 3189896 - DNA, 25 bp, Homo sapien
ggctgagactttatctgacacatgg

SEQ ID NO: 3189897 - DNA, 25 bp, Homo sapien
cattagatgaacaagtggctgagac

SEQ ID NO: 3189898 - DNA, 25 bp, Homo sapien
ggaaagcaccttctcttgtcagctt

SEQ ID NO: 3189899 - DNA, 25 bp, Homo sapien
aggtggctgtggtacaatcctgtca

SEQ ID NO: 3189900 - DNA, 25 bp, Homo sapien
cagacaatttttgaagaggtggctg

SEQ ID NO: 3189901 - DNA, 25 bp, Homo sapien
tctgcagacaatttttgaagaggtg

SEQ ID NO: 3189902 - DNA, 25 bp, Homo sapien
aattagtatatccaagcacatcctc

SEQ ID NO: 3189903 - DNA, 25 bp, Homo sapien
gcacatcctctatgaagttattgtc

SEQ ID NO: 3189904 - DNA, 25 bp, Homo sapien
agttattgtcacagcctttcccaac

SEQ ID NO: 3189905 - DNA, 25 bp, Homo sapien
tccaagcacatcctctatgaagtta

SEQ ID NO: 3189906 - DNA, 25 bp, Homo sapien
tgacataaggagtaaggttactact

SEQ ID NO: 3189907 - DNA, 25 bp, Homo sapien
tactactgattcctactcaggaggc

SEQ ID NO: 3189908 - DNA, 25 bp, Homo sapien
gaggaccacttaagtatgggaggtc

SEQ ID NO: 3189909 - DNA, 25 bp, Homo sapien
gctatagtgagccattactgagcca

SEQ ID NO: 3189910 - DNA, 25 bp, Homo sapien
attaggaaactttcctttctcatag

SEQ ID NO: 3189911 - DNA, 25 bp, Homo sapien
taggaaactttcctttctcatagac

SEQ ID NO: 3189912 - DNA, 25 bp, Homo sapien
caattaggaaactttcctttctcat

SEQ ID NO: 3189913 - DNA, 25 bp, Homo sapien
gaaactttcctttctcatagacttc

SEQ ID NO: 3189914 - DNA, 25 bp, Homo sapien
tctctaagccaagttatgaaggatc

SEQ ID NO: 3189915 - DNA, 25 bp, Homo sapien
ctatgtgaaggattggacttaatgg

SEQ ID NO: 3189916 - DNA, 25 bp, Homo sapien
ggacttaatggtctgctgtctctaa

SEQ ID NO: 3189917 - DNA, 25 bp, Homo sapien
ctgatgaaagtgtatctagctctgg

SEQ ID NO: 3189918 - DNA, 25 bp, Homo sapien
aattctgctttggcaggactctcat

SEQ ID NO: 3189919 - DNA, 25 bp, Homo sapien
agcctctgtccggtcttcaatcaaa

SEQ ID NO: 3189920 - DNA, 25 bp, Homo sapien
gcctctgtccggtcttcaatcaaat

SEQ ID NO: 3189921 - DNA, 25 bp, Homo sapien
ctctgtccggtcttcaatcaaatgc

SEQ ID NO: 3189922 - DNA, 25 bp, Homo sapien
tacttggtgaaacagcatcatcgtt

SEQ ID NO: 3189923 - DNA, 25 bp, Homo sapien
gagttgtcatccaacaatgcagcac

SEQ ID NO: 3189924 - DNA, 25 bp, Homo sapien
cagacagagtgctgtgcgttgcatc

SEQ ID NO: 3189925 - DNA, 25 bp, Homo sapien
gccagcttgcaatgaacagagcact

SEQ ID NO: 3189926 - DNA, 25 bp, Homo sapien
tgcacttccccaattagtaaattca

SEQ ID NO: 3189927 - DNA, 25 bp, Homo sapien
cctggcctgattcatatatattact

SEQ ID NO: 3189928 - DNA, 25 bp, Homo sapien
taaattcaatacatcctgtatgtaa

SEQ ID NO: 3189929 - DNA, 25 bp, Homo sapien
tgaaatgcagtatcactgcacttcc

SEQ ID NO: 3189930 - DNA, 25 bp, Homo sapien
aattttcttgctataagtgtgcagg

SEQ ID NO: 3189931 - DNA, 25 bp, Homo sapien
taagtacttggtaatgtccacagac

SEQ ID NO: 3189932 - DNA, 25 bp, Homo sapien
gatggcaatcttaaagtcaattaaa

SEQ ID NO: 3189933 - DNA, 25 bp, Homo sapien
gaatgagaggtttcttgatcagaag

SEQ ID NO: 3189934 - DNA, 25 bp, Homo sapien
ccgcttgctttggtccctcaaagtg

SEQ ID NO: 3189935 - DNA, 25 bp, Homo sapien
tggtcagagctcattgcgaccttga

SEQ ID NO: 3189936 - DNA, 25 bp, Homo sapien
gcttgctttggtccctcaaagtgct

SEQ ID NO: 3189937 - DNA, 25 bp, Homo sapien
tgtggtcagagctcattgcgacctt

SEQ ID NO: 3189938 - DNA, 25 bp, Homo sapien
gcatggtatagggacaagtatggtc

SEQ ID NO: 3189939 - DNA, 25 bp, Homo sapien
gattctctcttgctagaggcagcat

SEQ ID NO: 3189940 - DNA, 25 bp, Homo sapien
aggcagcatggtatagggacaagta

SEQ ID NO: 3189941 - DNA, 25 bp, Homo sapien
agattctctcttgctagaggcagca

SEQ ID NO: 3189942 - DNA, 25 bp, Homo sapien
gaaaatgcttgagtactgaccgtag

SEQ ID NO: 3189943 - DNA, 25 bp, Homo sapien
ccagttataatacggcagttggctt

SEQ ID NO: 3189944 - DNA, 25 bp, Homo sapien
tagcttctgtgtcccctgattatgg

SEQ ID NO: 3189945 - DNA, 25 bp, Homo sapien
cagggaccaggcatcttataagtag

SEQ ID NO: 3189946 - DNA, 25 bp, Homo sapien
cctgtttccacttgtcggctctcta

SEQ ID NO: 3189947 - DNA, 25 bp, Homo sapien
tccctgtttccacttgtcggctctc

SEQ ID NO: 3189948 - DNA, 25 bp, Homo sapien
gtttccacttgtcggctctctacgc

SEQ ID NO: 3189949 - DNA, 25 bp, Homo sapien
acttgtcggctctctacgcatccgg

SEQ ID NO: 3189950 - DNA, 25 bp, Homo sapien
gctcccgcaggcgtcagcggcgcat

SEQ ID NO: 3189951 - DNA, 25 bp, Homo sapien
ctcgtcagcgcctggtggctccgag

SEQ ID NO: 3189952 - DNA, 25 bp, Homo sapien
cgtgcgccacggccagaggcccctc

SEQ ID NO: 3189953 - DNA, 25 bp, Homo sapien
ggtgccaggggtcggcagcagccgc

SEQ ID NO: 3189954 - DNA, 25 bp, Homo sapien
gcactgatcaccaagagggaaccgg

SEQ ID NO: 3189955 - DNA, 25 bp, Homo sapien
ggcgcagcggctttggaaacttgct

SEQ ID NO: 3189956 - DNA, 25 bp, Homo sapien
cgttcatcgtttccgggctccttag

SEQ ID NO: 3189957 - DNA, 25 bp, Homo sapien
tctctcgggtgtctgaacaaaacgc

SEQ ID NO: 3189958 - DNA, 25 bp, Homo sapien
aaactctaattttgctacagatacg

SEQ ID NO: 3189959 - DNA, 25 bp, Homo sapien
tacagatacgatactgagccaaact

SEQ ID NO: 3189960 - DNA, 25 bp, Homo sapien
tttcatacatcaaccagccattcag

SEQ ID NO: 3189961 - DNA, 25 bp, Homo sapien
tattggtttatgagcacttaggagg

SEQ ID NO: 3189962 - DNA, 25 bp, Homo sapien
caaatgccacgtcttacatgtagca

SEQ ID NO: 3189963 - DNA, 25 bp, Homo sapien
cctaatgctatgtggtggtcctgct

SEQ ID NO: 3189964 - DNA, 25 bp, Homo sapien
taaagttggcaataacacacagctc

SEQ ID NO: 3189965 - DNA, 25 bp, Homo sapien
aagttggcttcccttcctcgataca

SEQ ID NO: 3189966 - DNA, 25 bp, Homo sapien
gataaagaagtgtgaggattcctgc

SEQ ID NO: 3189967 - DNA, 25 bp, Homo sapien
gaaagaaacacaagatgttcctagc

SEQ ID NO: 3189968 - DNA, 25 bp, Homo sapien
tatctaagatatgataaggcagttc

SEQ ID NO: 3189969 - DNA, 25 bp, Homo sapien
ttttggatctgtatcaactagagga

SEQ ID NO: 3189970 - DNA, 25 bp, Homo sapien
tatggatggactattgggccctgct

SEQ ID NO: 3189971 - DNA, 25 bp, Homo sapien
caacctagaatcaaggtcggctggg

SEQ ID NO: 3189972 - DNA, 25 bp, Homo sapien
ggcacctctgcacatatggatggac

SEQ ID NO: 3189973 - DNA, 25 bp, Homo sapien
cctgctctgtcaacctagaatcaag

SEQ ID NO: 3189974 - DNA, 25 bp, Homo sapien
caagatgttttcaatcgcataagac

SEQ ID NO: 3189975 - DNA, 25 bp, Homo sapien
ggtcttcataactcccaagatgttt

SEQ ID NO: 3189976 - DNA, 25 bp, Homo sapien
tttcctgtcgtttcggtggtcttca

SEQ ID NO: 3189977 - DNA, 25 bp, Homo sapien
gtttcggtggtcttcataactccca

SEQ ID NO: 3189978 - DNA, 25 bp, Homo sapien
tcctcacttcccaaacgtggtggcc

SEQ ID NO: 3189979 - DNA, 25 bp, Homo sapien
cagccggacagaggcgctcctcagt

SEQ ID NO: 3189980 - DNA, 25 bp, Homo sapien
ctcagatggggcagccggacagagg

SEQ ID NO: 3189981 - DNA, 25 bp, Homo sapien
ctcacttcccaaacgtggtggccgg

SEQ ID NO: 3189982 - DNA, 25 bp, Homo sapien
tggaggtacttccttttcttgtcca

SEQ ID NO: 3189983 - DNA, 25 bp, Homo sapien
tacttccttttcttgtccaaaatga

SEQ ID NO: 3189984 - DNA, 25 bp, Homo sapien
tccttttcttgtccaaaatgaacat

SEQ ID NO: 3189985 - DNA, 25 bp, Homo sapien
ttccttttcttgtccaaaatgaaca

SEQ ID NO: 3189986 - DNA, 25 bp, Homo sapien
ggcatctgtctgacattggttgtgc

SEQ ID NO: 3189987 - DNA, 25 bp, Homo sapien
taaatttacattgcagttagaagta

SEQ ID NO: 3189988 - DNA, 25 bp, Homo sapien
taatcgaggcatctgtctgacattg

SEQ ID NO: 3189989 - DNA, 25 bp, Homo sapien
cattgcagttagaagtaatcgaggc

SEQ ID NO: 3189990 - DNA, 25 bp, Homo sapien
tgtaggacactggtcaacagaaacc

SEQ ID NO: 3189991 - DNA, 25 bp, Homo sapien
tgtagcgacagagatgatagcacct

SEQ ID NO: 3189992 - DNA, 25 bp, Homo sapien
gaaactgcattcctcagaacgatga

SEQ ID NO: 3189993 - DNA, 25 bp, Homo sapien
tctgagctttaacactgaggacgaa

SEQ ID NO: 3189994 - DNA, 25 bp, Homo sapien
tgttctctagaccagccctcttggt

SEQ ID NO: 3189995 - DNA, 25 bp, Homo sapien
cagtgtaaacaggaccaagctgttc

SEQ ID NO: 3189996 - DNA, 25 bp, Homo sapien
gcatcagcgccaaagagccagaggt

SEQ ID NO: 3189997 - DNA, 25 bp, Homo sapien
gaggaaaccagccagaagactgggc

SEQ ID NO: 3189998 - DNA, 25 bp, Homo sapien
ctagatttctgcgtagaatcattcc

SEQ ID NO: 3189999 - DNA, 25 bp, Homo sapien
gcgtagaatcattccgaattccaaa

SEQ ID NO: 3190000 - DNA, 25 bp, Homo sapien
aattttagtgcctggtcaagcgtta

SEQ ID NO: 3190001 - DNA, 25 bp, Homo sapien
ttagtgcctggtcaagcgttactgc

SEQ ID NO: 3190002 - DNA, 25 bp, Homo sapien
gctgccccaggcttcgtggcaacat

SEQ ID NO: 3190003 - DNA, 25 bp, Homo sapien
ctgctgccccaggcttcgtggcaac

SEQ ID NO: 3190004 - DNA, 25 bp, Homo sapien
tgctgccccaggcttcgtggcaaca

SEQ ID NO: 3190005 - DNA, 25 bp, Homo sapien
tgaggccccctgaaaatcctagagt

SEQ ID NO: 3190006 - DNA, 25 bp, Homo sapien
gatccctaaattggggtatgaggcc

SEQ ID NO: 3190007 - DNA, 25 bp, Homo sapien
tactttcagtatttcctttcaggta

SEQ ID NO: 3190008 - DNA, 25 bp, Homo sapien
gtatgaggccccctgaaaatcctag

SEQ ID NO: 3190009 - DNA, 25 bp, Homo sapien
cacggtactataatggtgtgactgg

SEQ ID NO: 3190010 - DNA, 25 bp, Homo sapien
ggtggcaccacggtactataatggt

SEQ ID NO: 3190011 - DNA, 25 bp, Homo sapien
catcaggtggcaccacggtactata

SEQ ID NO: 3190012 - DNA, 25 bp, Homo sapien
ttccacacagcttcacacgcaaaac

SEQ ID NO: 3190013 - DNA, 25 bp, Homo sapien
tggtttgactacgaattgacaacgt

SEQ ID NO: 3190014 - DNA, 25 bp, Homo sapien
tctagatggcaaggtaagtgttacc

SEQ ID NO: 3190015 - DNA, 25 bp, Homo sapien
gtttgactacgaattgacaacgttc

SEQ ID NO: 3190016 - DNA, 25 bp, Homo sapien
tgacaacgttcttttctagatggca

SEQ ID NO: 3190017 - DNA, 25 bp, Homo sapien
gatggctgcagttttgataccctta

SEQ ID NO: 3190018 - DNA, 25 bp, Homo sapien
aagatggctgcagttttgataccct

SEQ ID NO: 3190019 - DNA, 25 bp, Homo sapien
gaagatggctgcagttttgataccc

SEQ ID NO: 3190020 - DNA, 25 bp, Homo sapien
atggctgcagttttgatacccttat

SEQ ID NO: 3190021 - DNA, 25 bp, Homo sapien
ctgtgctggaatccaggtagtgccc

SEQ ID NO: 3190022 - DNA, 25 bp, Homo sapien
tgctggaatccaggtagtgcccttg

SEQ ID NO: 3190023 - DNA, 25 bp, Homo sapien
ggtagtgcccttggtgaaactgcat

SEQ ID NO: 3190024 - DNA, 25 bp, Homo sapien
aatccaggtagtgcccttggtgaaa

SEQ ID NO: 3190025 - DNA, 25 bp, Homo sapien
ctgcacatcatatgctattttatta

SEQ ID NO: 3190026 - DNA, 25 bp, Homo sapien
acactgcacatcatatgctatttta

SEQ ID NO: 3190027 - DNA, 25 bp, Homo sapien
gacactgcacatcatatgctatttt

SEQ ID NO: 3190028 - DNA, 25 bp, Homo sapien
cactgcacatcatatgctattttat

SEQ ID NO: 3190029 - DNA, 25 bp, Homo sapien
tactcttaacaaggactgtccacaa

SEQ ID NO: 3190030 - DNA, 25 bp, Homo sapien
taaccgattgggatttcattagagc

SEQ ID NO: 3190031 - DNA, 25 bp, Homo sapien
tattttcccagagcctaaccgattg

SEQ ID NO: 3190032 - DNA, 25 bp, Homo sapien
cgcctggccaaattctgttactctt

SEQ ID NO: 3190033 - DNA, 25 bp, Homo sapien
tgtaacttaggcataatgggactac

SEQ ID NO: 3190034 - DNA, 25 bp, Homo sapien
tatcagagtaggatagtaaagcaac

SEQ ID NO: 3190035 - DNA, 25 bp, Homo sapien
gaactgtgggacaattgcacaagtg

SEQ ID NO: 3190036 - DNA, 25 bp, Homo sapien
gctcatcagtagactacacactggg

SEQ ID NO: 3190037 - DNA, 25 bp, Homo sapien
gaagaatctccctagagcgaaaaaa

SEQ ID NO: 3190038 - DNA, 25 bp, Homo sapien
atctccctagagcgaaaaaacctct

SEQ ID NO: 3190039 - DNA, 25 bp, Homo sapien
ctccctagagcgaaaaaacctctca

SEQ ID NO: 3190040 - DNA, 25 bp, Homo sapien
ttgaagaatctccctagagcgaaaa

SEQ ID NO: 3190041 - DNA, 25 bp, Homo sapien
cgaataagtttggatccctgatatt

SEQ ID NO: 3190042 - DNA, 25 bp, Homo sapien
tgctattccaatgggtacgaatggt

SEQ ID NO: 3190043 - DNA, 25 bp, Homo sapien
gatattcctcatatgaaggaagaga

SEQ ID NO: 3190044 - DNA, 25 bp, Homo sapien
aacctgctattccaatgggtacgaa

SEQ ID NO: 3190045 - DNA, 25 bp, Homo sapien
gcccagaattcccgatacatggaat

SEQ ID NO: 3190046 - DNA, 25 bp, Homo sapien
taggttttgcccagaattcccgata

SEQ ID NO: 3190047 - DNA, 25 bp, Homo sapien
attcccgatacatggaatagcccat

SEQ ID NO: 3190048 - DNA, 25 bp, Homo sapien
tcccgatacatggaatagcccatac

SEQ ID NO: 3190049 - DNA, 25 bp, Homo sapien
acttcaataatgagacgtctaacta

SEQ ID NO: 3190050 - DNA, 25 bp, Homo sapien
taacttcaataatgagacgtctaac

SEQ ID NO: 3190051 - DNA, 25 bp, Homo sapien
caataatgagacgtctaactaaagc

SEQ ID NO: 3190052 - DNA, 25 bp, Homo sapien
tcaataatgagacgtctaactaaag

SEQ ID NO: 3190053 - DNA, 25 bp, Homo sapien
tgttcagttcaatgtttacaattct

SEQ ID NO: 3190054 - DNA, 25 bp, Homo sapien
tgacatgggtcacttactttaataa

SEQ ID NO: 3190055 - DNA, 25 bp, Homo sapien
tttaataacaatacatataccatgt

SEQ ID NO: 3190056 - DNA, 25 bp, Homo sapien
cacaagtgtgatagccttctgtata

SEQ ID NO: 3190057 - DNA, 25 bp, Homo sapien
ctccatgggtttataagtccatata

SEQ ID NO: 3190058 - DNA, 25 bp, Homo sapien
gaagtccctcagattgatacccttc

SEQ ID NO: 3190059 - DNA, 25 bp, Homo sapien
tataagtccatataaaattaggctc

SEQ ID NO: 3190060 - DNA, 25 bp, Homo sapien
ttaggctctgctatgagaagtccct

SEQ ID NO: 3190061 - DNA, 25 bp, Homo sapien
tgttcccgcagggtgtgtaaatctt

SEQ ID NO: 3190062 - DNA, 25 bp, Homo sapien
aagccagtcaccacattgttcccgc

SEQ ID NO: 3190063 - DNA, 25 bp, Homo sapien
acattgttcccgcagggtgtgtaaa

SEQ ID NO: 3190064 - DNA, 25 bp, Homo sapien
cagtcaccacattgttcccgcaggg

SEQ ID NO: 3190065 - DNA, 25 bp, Homo sapien
tgaaccaaagatttcatgtgttcca

SEQ ID NO: 3190066 - DNA, 25 bp, Homo sapien
gtgaaccaaagatttcatgtgttcc

SEQ ID NO: 3190067 - DNA, 25 bp, Homo sapien
agactcttctaaatgcaagattgta

SEQ ID NO: 3190068 - DNA, 25 bp, Homo sapien
gctgttccttcaggtggtcaatttt

SEQ ID NO: 3190069 - DNA, 25 bp, Homo sapien
gactcttctaaatgcaagattgtaa

SEQ ID NO: 3190070 - DNA, 25 bp, Homo sapien
cttcaggtggtcaattttctccagt

SEQ ID NO: 3190071 - DNA, 25 bp, Homo sapien
cctgaatggacagcagtgccaatcc

SEQ ID NO: 3190072 - DNA, 25 bp, Homo sapien
gttttggcttccgaatgagcttcta

SEQ ID NO: 3190073 - DNA, 25 bp, Homo sapien
cacaggagtccactggttttggctt

SEQ ID NO: 3190074 - DNA, 25 bp, Homo sapien
agtgccccaccctgaatggacagca

SEQ ID NO: 3190075 - DNA, 25 bp, Homo sapien
gtcgagtgactataaagtatgcaaa

SEQ ID NO: 3190076 - DNA, 25 bp, Homo sapien
ctgtcgagtgactataaagtatgca

SEQ ID NO: 3190077 - DNA, 25 bp, Homo sapien
tgtcgagtgactataaagtatgcaa

SEQ ID NO: 3190078 - DNA, 25 bp, Homo sapien
catgagagtaagcataagccaacac

SEQ ID NO: 3190079 - DNA, 25 bp, Homo sapien
gaatgaacataatgcctctgcaaga

SEQ ID NO: 3190080 - DNA, 25 bp, Homo sapien
tctgcaagaaagatacttgactcag

SEQ ID NO: 3190081 - DNA, 25 bp, Homo sapien
taaataaccatgaggcaaagctgat

SEQ ID NO: 3190082 - DNA, 25 bp, Homo sapien
gatttcttgtggaagaactgaagaa

SEQ ID NO: 3190083 - DNA, 25 bp, Homo sapien
gaaattgcctactcttaacagctga

SEQ ID NO: 3190084 - DNA, 25 bp, Homo sapien
cttagcaaggtcttcttttaacttg

SEQ ID NO: 3190085 - DNA, 25 bp, Homo sapien
tgttgtattgctgcacatcaaagtg

SEQ ID NO: 3190086 - DNA, 25 bp, Homo sapien
agaatgacgcgcctgtttcagggat

SEQ ID NO: 3190087 - DNA, 25 bp, Homo sapien
gacgcgcctgtttcagggattcttt

SEQ ID NO: 3190088 - DNA, 25 bp, Homo sapien
gagaatgacgcgcctgtttcaggga

SEQ ID NO: 3190089 - DNA, 25 bp, Homo sapien
aatgacgcgcctgtttcagggattc

SEQ ID NO: 3190090 - DNA, 25 bp, Homo sapien
taattcttttcattgagttcttcta

SEQ ID NO: 3190091 - DNA, 25 bp, Homo sapien
tcttttcattgagttcttctacttg

SEQ ID NO: 3190092 - DNA, 25 bp, Homo sapien
tttcattgagttcttctacttgcat

SEQ ID NO: 3190093 - DNA, 25 bp, Homo sapien
attcttttcattgagttcttctact

SEQ ID NO: 3190094 - DNA, 25 bp, Homo sapien
gggactcaaaaacatcctaagttgc

SEQ ID NO: 3190095 - DNA, 25 bp, Homo sapien
cctaagttgcaaaatcaatacataa

SEQ ID NO: 3190096 - DNA, 25 bp, Homo sapien
tacataatggaaaatctgacgacat

SEQ ID NO: 3190097 - DNA, 25 bp, Homo sapien
aacaatcaaaatgaaccatgggact

SEQ ID NO: 3190098 - DNA, 25 bp, Homo sapien
gaataaacgtgggacaagctgacaa

SEQ ID NO: 3190099 - DNA, 25 bp, Homo sapien
gcagccaccgttgctttgatagacg

SEQ ID NO: 3190100 - DNA, 25 bp, Homo sapien
taactgttttggcttcgatacctga

SEQ ID NO: 3190101 - DNA, 25 bp, Homo sapien
taatgacaagacgattccgtgggag

SEQ ID NO: 3190102 - DNA, 25 bp, Homo sapien
atccaggaattaaatcatcccttaa

SEQ ID NO: 3190103 - DNA, 25 bp, Homo sapien
ttgaaatccaggaattaaatcatcc

SEQ ID NO: 3190104 - DNA, 25 bp, Homo sapien
tttttgaaatccaggaattaaatca

SEQ ID NO: 3190105 - DNA, 25 bp, Homo sapien
aaatccaggaattaaatcatccctt

SEQ ID NO: 3190106 - DNA, 25 bp, Homo sapien
gaatttatcgtcacagtcctggagc

SEQ ID NO: 3190107 - DNA, 25 bp, Homo sapien
taactaatgagctactgtgggaaga

SEQ ID NO: 3190108 - DNA, 25 bp, Homo sapien
tatagggtgaccataacaaagtacc

SEQ ID NO: 3190109 - DNA, 25 bp, Homo sapien
ggtaaaaagagcacctgcctcatgg

SEQ ID NO: 3190110 - DNA, 25 bp, Homo sapien
ggaagaatcaagtcatcctgtcagt

SEQ ID NO: 3190111 - DNA, 25 bp, Homo sapien
cacgattgagatatgagggcaaacc

SEQ ID NO: 3190112 - DNA, 25 bp, Homo sapien
ttcatagaccacagcttgggaagta

SEQ ID NO: 3190113 - DNA, 25 bp, Homo sapien
cgtgagactcactggcaggcttgtt

SEQ ID NO: 3190114 - DNA, 25 bp, Homo sapien
aaccagccatctgcctaaaaaataa

SEQ ID NO: 3190115 - DNA, 25 bp, Homo sapien
tgtagtgactgttgctatatttgaa

SEQ ID NO: 3190116 - DNA, 25 bp, Homo sapien
aaaccagccatctgcctaaaaaata

SEQ ID NO: 3190117 - DNA, 25 bp, Homo sapien
ccttatgtagtgactgttgctatat

SEQ ID NO: 3190118 - DNA, 25 bp, Homo sapien
ttagcctctggtctgtgatagttcc

SEQ ID NO: 3190119 - DNA, 25 bp, Homo sapien
tagaatccctagaatcaacccctgc

SEQ ID NO: 3190120 - DNA, 25 bp, Homo sapien
cagtcactaagtccagtcatgggag

SEQ ID NO: 3190121 - DNA, 25 bp, Homo sapien
aataccagaggtgaaggtccttctc

SEQ ID NO: 3190122 - DNA, 25 bp, Homo sapien
taattaatgcttatcggctgggcac

SEQ ID NO: 3190123 - DNA, 25 bp, Homo sapien
tccaacttgaattggtggcagctgt

SEQ ID NO: 3190124 - DNA, 25 bp, Homo sapien
tggagatatgtcattgccgggaacc

SEQ ID NO: 3190125 - DNA, 25 bp, Homo sapien
gcacatgtatgccttgtggctaagt

SEQ ID NO: 3190126 - DNA, 25 bp, Homo sapien
tgcgattcagaagcatagccactcc

SEQ ID NO: 3190127 - DNA, 25 bp, Homo sapien
tgataacctcgtagggagcaacccc

SEQ ID NO: 3190128 - DNA, 25 bp, Homo sapien
gcaaccccaggatagctaagtgtta

SEQ ID NO: 3190129 - DNA, 25 bp, Homo sapien
tctgtagcccgttgagcatatgagt

SEQ ID NO: 3190130 - DNA, 25 bp, Homo sapien
tacttctggagtaccgtagttcatc

SEQ ID NO: 3190131 - DNA, 25 bp, Homo sapien
cagcaggcagaatgcgtggtcttgt

SEQ ID NO: 3190132 - DNA, 25 bp, Homo sapien
tagccttaggctttgcccaagtaaa

SEQ ID NO: 3190133 - DNA, 25 bp, Homo sapien
tatgaaccctatctggcaagtgacc

SEQ ID NO: 3190134 - DNA, 25 bp, Homo sapien
agttataaccactagccctgtttgg

SEQ ID NO: 3190135 - DNA, 25 bp, Homo sapien
gattgggtaagcagggaaagcctct

SEQ ID NO: 3190136 - DNA, 25 bp, Homo sapien
tctaggtgagcaagactaagtcctt

SEQ ID NO: 3190137 - DNA, 25 bp, Homo sapien
gaaatgacattaggagtttgccttg

SEQ ID NO: 3190138 - DNA, 25 bp, Homo sapien
gaaggacctaaaagatttgctgatg

SEQ ID NO: 3190139 - DNA, 25 bp, Homo sapien
caaaagacgggtgattttgctcagg

SEQ ID NO: 3190140 - DNA, 25 bp, Homo sapien
aaaatggaagcagggtgacgcatgc

SEQ ID NO: 3190141 - DNA, 25 bp, Homo sapien
ctcaggttggtagcaacagaggtaa

SEQ ID NO: 3190142 - DNA, 25 bp, Homo sapien
taagatagacacgtacctgaacgcc

SEQ ID NO: 3190143 - DNA, 25 bp, Homo sapien
cctgaagaccatccggaacggcgtt

SEQ ID NO: 3190144 - DNA, 25 bp, Homo sapien
ggaacggcgttcataagatagacac

SEQ ID NO: 3190145 - DNA, 25 bp, Homo sapien
acacgtacctgaacgccgccttgga

SEQ ID NO: 3190146 - DNA, 25 bp, Homo sapien
gaggcgtggatatggagctggctgc

SEQ ID NO: 3190147 - DNA, 25 bp, Homo sapien
ggcggttcacgtaaagacagcgaga

SEQ ID NO: 3190148 - DNA, 25 bp, Homo sapien
aagacagcgagatcctgagggccag

SEQ ID NO: 3190149 - DNA, 25 bp, Homo sapien
ctgcctgcccgaggcggttcacgta

SEQ ID NO: 3190150 - DNA, 25 bp, Homo sapien
gacgcaaggaggaaaagccctgctc

SEQ ID NO: 3190151 - DNA, 25 bp, Homo sapien
aatggaaccacgtcttcaagccgga

SEQ ID NO: 3190152 - DNA, 25 bp, Homo sapien
tagcatttagctcgtcctgattaga

SEQ ID NO: 3190153 - DNA, 25 bp, Homo sapien
gactctgcccacattgccaatggaa

SEQ ID NO: 3190154 - DNA, 25 bp, Homo sapien
ccctctgaagcgactctatgtgaca

SEQ ID NO: 3190155 - DNA, 25 bp, Homo sapien
gtctgcacagtgacctagcatctgg

SEQ ID NO: 3190156 - DNA, 25 bp, Homo sapien
agccttgaagggtgaaagtcagccc

SEQ ID NO: 3190157 - DNA, 25 bp, Homo sapien
agcgctcctaattccagactacaga

SEQ ID NO: 3190158 - DNA, 25 bp, Homo sapien
ctccacagagtttatgccatattgg

SEQ ID NO: 3190159 - DNA, 25 bp, Homo sapien
agtttatgccatattggaattttgt

SEQ ID NO: 3190160 - DNA, 25 bp, Homo sapien
tccacagagtttatgccatattgga

SEQ ID NO: 3190161 - DNA, 25 bp, Homo sapien
ggcacttaccaaaatgacatcgctt

SEQ ID NO: 3190162 - DNA, 25 bp, Homo sapien
agtagactggatacaccccgacctt

SEQ ID NO: 3190163 - DNA, 25 bp, Homo sapien
gacatcgctttgattgaaatgaaaa

SEQ ID NO: 3190164 - DNA, 25 bp, Homo sapien
catcgttaccaaatatggacaacag

SEQ ID NO: 3190165 - DNA, 25 bp, Homo sapien
tgttggattctgactgctgcacatt

SEQ ID NO: 3190166 - DNA, 25 bp, Homo sapien
gctgttggattctgactgctgcaca

SEQ ID NO: 3190167 - DNA, 25 bp, Homo sapien
ttggtggctgttggattctgactgc

SEQ ID NO: 3190168 - DNA, 25 bp, Homo sapien
ttggattctgactgctgcacattgt

SEQ ID NO: 3190169 - DNA, 25 bp, Homo sapien
gatatgcattcatgtttacccaaca

SEQ ID NO: 3190170 - DNA, 25 bp, Homo sapien
tcctttagtgattctgagagtcaca

SEQ ID NO: 3190171 - DNA, 25 bp, Homo sapien
tgttgaagtatctggatgtgaatcc

SEQ ID NO: 3190172 - DNA, 25 bp, Homo sapien
ttacccaacacttggaaccctgctg

SEQ ID NO: 3190173 - DNA, 25 bp, Homo sapien
gtgcaagtcagagaaccctgcatac

SEQ ID NO: 3190174 - DNA, 25 bp, Homo sapien
gagaaccctgcatactgcagtgaaa

SEQ ID NO: 3190175 - DNA, 25 bp, Homo sapien
agtcagagaaccctgcatactgcag

SEQ ID NO: 3190176 - DNA, 25 bp, Homo sapien
gactacaccacttcattcaaacctg

SEQ ID NO: 3190177 - DNA, 25 bp, Homo sapien
tgtctcaagtctgcttctgatgaac

SEQ ID NO: 3190178 - DNA, 25 bp, Homo sapien
tctgcttctgatgaacccaactgtg

SEQ ID NO: 3190179 - DNA, 25 bp, Homo sapien
ctcaagtctgcttctgatgaaccca

SEQ ID NO: 3190180 - DNA, 25 bp, Homo sapien
tctgatgaacccaactgtgtcagca

SEQ ID NO: 3190181 - DNA, 25 bp, Homo sapien
ttcttttgtcctatggtctcaacta

SEQ ID NO: 3190182 - DNA, 25 bp, Homo sapien
gtcctatggtctcaactaattaaag

SEQ ID NO: 3190183 - DNA, 25 bp, Homo sapien
tatggtctcaactaattaaaggaag

SEQ ID NO: 3190184 - DNA, 25 bp, Homo sapien
taaagaaactatgctgtcttataga

SEQ ID NO: 3190185 - DNA, 25 bp, Homo sapien
gacggaagcgtttatctgagtttct

SEQ ID NO: 3190186 - DNA, 25 bp, Homo sapien
gccgacggaagcgtttatctgagtt

SEQ ID NO: 3190187 - DNA, 25 bp, Homo sapien
cagccgacggaagcgtttatctgag

SEQ ID NO: 3190188 - DNA, 25 bp, Homo sapien
cacagccgacggaagcgtttatctg

SEQ ID NO: 3190189 - DNA, 25 bp, Homo sapien
gagccgcgctatgtccagtagatct

SEQ ID NO: 3190190 - DNA, 25 bp, Homo sapien
tggctgcaaaatggcccgcaacagc

SEQ ID NO: 3190191 - DNA, 25 bp, Homo sapien
gctaacttcaggaactgtgcggaca

SEQ ID NO: 3190192 - DNA, 25 bp, Homo sapien
ttcttgaagtccgtgctgactggct

SEQ ID NO: 3190193 - DNA, 25 bp, Homo sapien
cgctgagccgtggaagtgacgtata

SEQ ID NO: 3190194 - DNA, 25 bp, Homo sapien
gagccgtggaagtgacgtataacag

SEQ ID NO: 3190195 - DNA, 25 bp, Homo sapien
ccgtggaagtgacgtataacagcgg

SEQ ID NO: 3190196 - DNA, 25 bp, Homo sapien
tgacgctgagccgtggaagtgacgt

SEQ ID NO: 3190197 - DNA, 25 bp, Homo sapien
aatcacccgcggaacaagcaacact

SEQ ID NO: 3190198 - DNA, 25 bp, Homo sapien
tggttccaaaacagcctttagcgct

SEQ ID NO: 3190199 - DNA, 25 bp, Homo sapien
ggcaataatagataaccttaaccac

SEQ ID NO: 3190200 - DNA, 25 bp, Homo sapien
taaagaccagaaacttgaataactg

SEQ ID NO: 3190201 - DNA, 25 bp, Homo sapien
cccgcggggtacttccgccgcgctg

SEQ ID NO: 3190202 - DNA, 25 bp, Homo sapien
gcggggtacttccgccgcgctggaa

SEQ ID NO: 3190203 - DNA, 25 bp, Homo sapien
cgcggggtacttccgccgcgctgga

SEQ ID NO: 3190204 - DNA, 25 bp, Homo sapien
cgcacacacccacccgcggggtact

SEQ ID NO: 3190205 - DNA, 25 bp, Homo sapien
ccacggtcagacagccagtgaccac

SEQ ID NO: 3190206 - DNA, 25 bp, Homo sapien
atggtctcgtgagcgccgaccgacc

SEQ ID NO: 3190207 - DNA, 25 bp, Homo sapien
gagtttacttctccatggtctcgtg

SEQ ID NO: 3190208 - DNA, 25 bp, Homo sapien
aacctgatgggtgaagagtttactt

SEQ ID NO: 3190209 - DNA, 25 bp, Homo sapien
accacctcgattaaagcctccacga

SEQ ID NO: 3190210 - DNA, 25 bp, Homo sapien
cacgacctccgcctcgaaaagacat

SEQ ID NO: 3190211 - DNA, 25 bp, Homo sapien
acctcggttgaagccgccacctcca

SEQ ID NO: 3190212 - DNA, 25 bp, Homo sapien
ttgctgctgccacctcggttgaagc

SEQ ID NO: 3190213 - DNA, 25 bp, Homo sapien
cttggcctttgttaaagcctccgcg

SEQ ID NO: 3190214 - DNA, 25 bp, Homo sapien
tggcctttgttaaagcctccgcggc

SEQ ID NO: 3190215 - DNA, 25 bp, Homo sapien
aagctaaatactgaagactgcatac

SEQ ID NO: 3190216 - DNA, 25 bp, Homo sapien
tcaaataagctaaatactgaagact

SEQ ID NO: 3190217 - DNA, 25 bp, Homo sapien
aaataagctaaatactgaagactgc

SEQ ID NO: 3190218 - DNA, 25 bp, Homo sapien
taagctaaatactgaagactgcata

SEQ ID NO: 3190219 - DNA, 25 bp, Homo sapien
tcagctatatcactaattgatcact

SEQ ID NO: 3190220 - DNA, 25 bp, Homo sapien
cctgtatttcagctatatcactaat

SEQ ID NO: 3190221 - DNA, 25 bp, Homo sapien
cttatcactaaccttatgaccccag

SEQ ID NO: 3190222 - DNA, 25 bp, Homo sapien
cactaattgatcacttatcactaac

SEQ ID NO: 3190223 - DNA, 25 bp, Homo sapien
taagtaaacaggagcattgaaataa

SEQ ID NO: 3190224 - DNA, 25 bp, Homo sapien
ctaagtaaacaggagcattgaaata

SEQ ID NO: 3190225 - DNA, 25 bp, Homo sapien
tctaagtaaacaggagcattgaaat

SEQ ID NO: 3190226 - DNA, 25 bp, Homo sapien
aagtaaacaggagcattgaaataag

SEQ ID NO: 3190227 - DNA, 25 bp, Homo sapien
tcaggccttccaatgaaaaaggata

SEQ ID NO: 3190228 - DNA, 25 bp, Homo sapien
caggccttccaatgaaaaaggatac

SEQ ID NO: 3190229 - DNA, 25 bp, Homo sapien
tttaaaggatgaagccttcatgttt

SEQ ID NO: 3190230 - DNA, 25 bp, Homo sapien
ttttttaaaggatgaagccttcatg

SEQ ID NO: 3190231 - DNA, 25 bp, Homo sapien
atgaagccttcatgttttctgacaa

SEQ ID NO: 3190232 - DNA, 25 bp, Homo sapien
tgaagccttcatgttttctgacaac

SEQ ID NO: 3190233 - DNA, 25 bp, Homo sapien
gatagagtcaaaactgcctgggttc

SEQ ID NO: 3190234 - DNA, 25 bp, Homo sapien
ctggaaacataatagaagcaattag

SEQ ID NO: 3190235 - DNA, 25 bp, Homo sapien
cattaagaagctacatgatagagtc

SEQ ID NO: 3190236 - DNA, 25 bp, Homo sapien
caatcctaccactttctactacata

SEQ ID NO: 3190237 - DNA, 25 bp, Homo sapien
ggcagcagcttatatgggtctatat

SEQ ID NO: 3190238 - DNA, 25 bp, Homo sapien
tggaggtcgaggtaaaaacctctgc

SEQ ID NO: 3190239 - DNA, 25 bp, Homo sapien
ctggaggtcgaggtaaaaacctctg

SEQ ID NO: 3190240 - DNA, 25 bp, Homo sapien
cagtggcagcagcttatatgggtct

SEQ ID NO: 3190241 - DNA, 25 bp, Homo sapien
caccacctcttggaggtcctttctc

SEQ ID NO: 3190242 - DNA, 25 bp, Homo sapien
accacctcttggaggtcctttctca

SEQ ID NO: 3190243 - DNA, 25 bp, Homo sapien
gccaccacctcttggaggtcctttc

SEQ ID NO: 3190244 - DNA, 25 bp, Homo sapien
ctgccaccacctcttggaggtcctt

SEQ ID NO: 3190245 - DNA, 25 bp, Homo sapien
tcctcttcctcctcctcggcctccc

SEQ ID NO: 3190246 - DNA, 25 bp, Homo sapien
gcctctgccaccacctctgccacct

SEQ ID NO: 3190247 - DNA, 25 bp, Homo sapien
cctcctcttcctcctcctcggcctc

SEQ ID NO: 3190248 - DNA, 25 bp, Homo sapien
tgccaccacctctgccacctcctcc

SEQ ID NO: 3190249 - DNA, 25 bp, Homo sapien
caaagctaaattgtattgtatgaat

SEQ ID NO: 3190250 - DNA, 25 bp, Homo sapien
gcattattattatggacaatctgcc

SEQ ID NO: 3190251 - DNA, 25 bp, Homo sapien
tgccaatattggaaagcagctttaa

SEQ ID NO: 3190252 - DNA, 25 bp, Homo sapien
ccataagggaggtttgctatgtaca

SEQ ID NO: 3190253 - DNA, 25 bp, Homo sapien
tcatctatctcaaaaggtttcgctg

SEQ ID NO: 3190254 - DNA, 25 bp, Homo sapien
gggaaaggcatacatcaaaacaggc

SEQ ID NO: 3190255 - DNA, 25 bp, Homo sapien
tcagcatgcagtctacactcaataa

SEQ ID NO: 3190256 - DNA, 25 bp, Homo sapien
caggcatacatcaaaataccccaaa

SEQ ID NO: 3190257 - DNA, 25 bp, Homo sapien
tcatcacctagctgtccataatgat

SEQ ID NO: 3190258 - DNA, 25 bp, Homo sapien
atcacctagctgtccataatgatga

SEQ ID NO: 3190259 - DNA, 25 bp, Homo sapien
cacctagctgtccataatgatgaat

SEQ ID NO: 3190260 - DNA, 25 bp, Homo sapien
tcacctagctgtccataatgatgaa

SEQ ID NO: 3190261 - DNA, 25 bp, Homo sapien
tgtagtagtttaccaactgggcaac

SEQ ID NO: 3190262 - DNA, 25 bp, Homo sapien
ggcaacaggctaaaaccccagatta

SEQ ID NO: 3190263 - DNA, 25 bp, Homo sapien
ttatcctaacaacaaagggtggcag

SEQ ID NO: 3190264 - DNA, 25 bp, Homo sapien
tccagtaacaaaagctgtccaagcc

SEQ ID NO: 3190265 - DNA, 25 bp, Homo sapien
taacaatagaatataataatcatta

SEQ ID NO: 3190266 - DNA, 25 bp, Homo sapien
ttcctcctctgaagcccccacctcc

SEQ ID NO: 3190267 - DNA, 25 bp, Homo sapien
cccacctccacctcctcttccacct

SEQ ID NO: 3190268 - DNA, 25 bp, Homo sapien
ctctgaaaccaccacctcttcctcc

SEQ ID NO: 3190269 - DNA, 25 bp, Homo sapien
ctcttcctcctctgaagcccccacc

SEQ ID NO: 3190270 - DNA, 25 bp, Homo sapien
taaaatcagcattagttccaataat

SEQ ID NO: 3190271 - DNA, 25 bp, Homo sapien
tgtttagcaaacatactttaccaaa

SEQ ID NO: 3190272 - DNA, 25 bp, Homo sapien
tttaactgtcattcatattacacct

SEQ ID NO: 3190273 - DNA, 25 bp, Homo sapien
atagtattataacctaaatctcaag

SEQ ID NO: 3190274 - DNA, 25 bp, Homo sapien
ggttaatgcagaagtcaactggtga

SEQ ID NO: 3190275 - DNA, 25 bp, Homo sapien
gatcatgcaggttaatgcagaagtc

SEQ ID NO: 3190276 - DNA, 25 bp, Homo sapien
actggtgatgtctgtcaactgtttc

SEQ ID NO: 3190277 - DNA, 25 bp, Homo sapien
gaaacaagtttccaatccatagtag

SEQ ID NO: 3190278 - DNA, 25 bp, Homo sapien
tgacattttagatccattgtcataa

SEQ ID NO: 3190279 - DNA, 25 bp, Homo sapien
gctgacattttagatccattgtcat

SEQ ID NO: 3190280 - DNA, 25 bp, Homo sapien
ctgacattttagatccattgtcata

SEQ ID NO: 3190281 - DNA, 25 bp, Homo sapien
aagataccgaaacacccttcataat

SEQ ID NO: 3190282 - DNA, 25 bp, Homo sapien
taccgaaacacccttcataataagc

SEQ ID NO: 3190283 - DNA, 25 bp, Homo sapien
ggaagataccgaaacacccttcata

SEQ ID NO: 3190284 - DNA, 25 bp, Homo sapien
gataccgaaacacccttcataataa

SEQ ID NO: 3190285 - DNA, 25 bp, Homo sapien
ctgttgcctaaattatttcttagca

SEQ ID NO: 3190286 - DNA, 25 bp, Homo sapien
tgttgcctaaattatttcttagcat

SEQ ID NO: 3190287 - DNA, 25 bp, Homo sapien
tgaaaagaccgagccatcttcattt

SEQ ID NO: 3190288 - DNA, 25 bp, Homo sapien
gccatcttcatttttagagtctgaa

SEQ ID NO: 3190289 - DNA, 25 bp, Homo sapien
agccatcttcatttttagagtctga

SEQ ID NO: 3190290 - DNA, 25 bp, Homo sapien
ctgtgaaaagaccgagccatcttca

SEQ ID NO: 3190291 - DNA, 25 bp, Homo sapien
ctgccataatcaagtaagttgcaac

SEQ ID NO: 3190292 - DNA, 25 bp, Homo sapien
taagttgcaacaatattgtgttcag

SEQ ID NO: 3190293 - DNA, 25 bp, Homo sapien
cataatcaagtaagttgcaacaata

SEQ ID NO: 3190294 - DNA, 25 bp, Homo sapien
tcaagtaagttgcaacaatattgtg

SEQ ID NO: 3190295 - DNA, 25 bp, Homo sapien
taaaatcgcaaaacttaactgagga

SEQ ID NO: 3190296 - DNA, 25 bp, Homo sapien
gaagtaatacgctgaattataagga

SEQ ID NO: 3190297 - DNA, 25 bp, Homo sapien
caatttccagtactagaagtaatac

SEQ ID NO: 3190298 - DNA, 25 bp, Homo sapien
tattcaaatgaacgagataacgtca

SEQ ID NO: 3190299 - DNA, 25 bp, Homo sapien
gaagatgcccagaactattatgttg

SEQ ID NO: 3190300 - DNA, 25 bp, Homo sapien
tgtccgaagttccttgtacttaatg

SEQ ID NO: 3190301 - DNA, 25 bp, Homo sapien
tctgaggcagcagacatgggatagc

SEQ ID NO: 3190302 - DNA, 25 bp, Homo sapien
gacagcctgcgtatccaaatttcca

SEQ ID NO: 3190303 - DNA, 25 bp, Homo sapien
aaaaaaatattcaatccagcataaa

SEQ ID NO: 3190304 - DNA, 25 bp, Homo sapien
aaaaaatattcaatccagcataaac

SEQ ID NO: 3190305 - DNA, 25 bp, Homo sapien
tccaaaaaaaatattcaatccagca

SEQ ID NO: 3190306 - DNA, 25 bp, Homo sapien
caaaaaaaatattcaatccagcata

SEQ ID NO: 3190307 - DNA, 25 bp, Homo sapien
ggtatcggtccacagccacgaccgt

SEQ ID NO: 3190308 - DNA, 25 bp, Homo sapien
gcagatggtcaggtatcggtccaca

SEQ ID NO: 3190309 - DNA, 25 bp, Homo sapien
gaccgtgagtaatccaatgcttgcc

SEQ ID NO: 3190310 - DNA, 25 bp, Homo sapien
ggtccacagccacgaccgtgagtaa

SEQ ID NO: 3190311 - DNA, 25 bp, Homo sapien
tcccagaatcaagccgatgtaagtg

SEQ ID NO: 3190312 - DNA, 25 bp, Homo sapien
gccattgatccaggctcccagaatc

SEQ ID NO: 3190313 - DNA, 25 bp, Homo sapien
cataactagcccaccctatgatagg

SEQ ID NO: 3190314 - DNA, 25 bp, Homo sapien
gtacacgtagcaccagtaggatctg

SEQ ID NO: 3190315 - DNA, 25 bp, Homo sapien
aatgtgcaaatattggaagggtgat

SEQ ID NO: 3190316 - DNA, 25 bp, Homo sapien
gggtgattggtaccctgcattgctg

SEQ ID NO: 3190317 - DNA, 25 bp, Homo sapien
tattggaagggtgattggtaccctg

SEQ ID NO: 3190318 - DNA, 25 bp, Homo sapien
caaatattggaagggtgattggtac

SEQ ID NO: 3190319 - DNA, 25 bp, Homo sapien
ctcagtgcagtcactggtagtgtga

SEQ ID NO: 3190320 - DNA, 25 bp, Homo sapien
gatagcgtgacatggtaatagcagt

SEQ ID NO: 3190321 - DNA, 25 bp, Homo sapien
tctgaccagtctctgttgagggact

SEQ ID NO: 3190322 - DNA, 25 bp, Homo sapien
aaatttatcgcaataactgtcatgg

SEQ ID NO: 3190323 - DNA, 25 bp, Homo sapien
cataccagtcagaatagctgctaat

SEQ ID NO: 3190324 - DNA, 25 bp, Homo sapien
tggacatgacatggaattaacctaa

SEQ ID NO: 3190325 - DNA, 25 bp, Homo sapien
tcacaatagcaatcatggacatgac

SEQ ID NO: 3190326 - DNA, 25 bp, Homo sapien
ggaagattgtgtgtggcaattcctc

SEQ ID NO: 3190327 - DNA, 25 bp, Homo sapien
gaaacatgcagatcatgatcacaga

SEQ ID NO: 3190328 - DNA, 25 bp, Homo sapien
gattttgcaaacagtggagctatga

SEQ ID NO: 3190329 - DNA, 25 bp, Homo sapien
ccataagcacacgatggaataaggg

SEQ ID NO: 3190330 - DNA, 25 bp, Homo sapien
tctttgggtcaccaaaagaagccca

SEQ ID NO: 3190331 - DNA, 25 bp, Homo sapien
ggtgagtctgacatttgaacatggc

SEQ ID NO: 3190332 - DNA, 25 bp, Homo sapien
tgaacatggcaagcattgccctccg

SEQ ID NO: 3190333 - DNA, 25 bp, Homo sapien
agccaatgggttttgagatacatcc

SEQ ID NO: 3190334 - DNA, 25 bp, Homo sapien
tccatgggtaaaatacttgtcacag

SEQ ID NO: 3190335 - DNA, 25 bp, Homo sapien
gaggagcttacactctcataggaca

SEQ ID NO: 3190336 - DNA, 25 bp, Homo sapien
cagagaagcatacactacagcagcc

SEQ ID NO: 3190337 - DNA, 25 bp, Homo sapien
gcttttattctaatggaggagccag

SEQ ID NO: 3190338 - DNA, 25 bp, Homo sapien
cagtacagtgtaatgcatgccataa

SEQ ID NO: 3190339 - DNA, 25 bp, Homo sapien
atggaagcaagacgtgccaaattga

SEQ ID NO: 3190340 - DNA, 25 bp, Homo sapien
tggaagcaagacgtgccaaattgag

SEQ ID NO: 3190341 - DNA, 25 bp, Homo sapien
gcaagacgtgccaaattgagcatag

SEQ ID NO: 3190342 - DNA, 25 bp, Homo sapien
agcaagacgtgccaaattgagcata

SEQ ID NO: 3190343 - DNA, 25 bp, Homo sapien
gaaggacacaaacagcccactcctt

SEQ ID NO: 3190344 - DNA, 25 bp, Homo sapien
acacaaacagcccactccttccaaa

SEQ ID NO: 3190345 - DNA, 25 bp, Homo sapien
cacaaacagcccactccttccaaaa

SEQ ID NO: 3190346 - DNA, 25 bp, Homo sapien
ctgtgaaggacacaaacagcccact

SEQ ID NO: 3190347 - DNA, 25 bp, Homo sapien
tgagccgtcatttctgccgtgataa

SEQ ID NO: 3190348 - DNA, 25 bp, Homo sapien
ttctgccgtgataatcacaggtgca

SEQ ID NO: 3190349 - DNA, 25 bp, Homo sapien
acacttagtaacaagcagaggagca

SEQ ID NO: 3190350 - DNA, 25 bp, Homo sapien
tggttcaaatctaaccaaggtctaa

SEQ ID NO: 3190351 - DNA, 25 bp, Homo sapien
ctagtgtcacaacatgaacaatgtg

SEQ ID NO: 3190352 - DNA, 25 bp, Homo sapien
gccgaggagggccttggttcaaatc

SEQ ID NO: 3190353 - DNA, 25 bp, Homo sapien
acatgaacaatgtgaggaaactcac

SEQ ID NO: 3190354 - DNA, 25 bp, Homo sapien
gccacggaattgtaagtcacccaga

SEQ ID NO: 3190355 - DNA, 25 bp, Homo sapien
tatgcgaagcttcacagtgtccacg

SEQ ID NO: 3190356 - DNA, 25 bp, Homo sapien
ttgttattgtgcaagtccagggtcc

SEQ ID NO: 3190357 - DNA, 25 bp, Homo sapien
taatagaaggcctccgcagagattc

SEQ ID NO: 3190358 - DNA, 25 bp, Homo sapien
tatctggcacccatcttttggaaaa

SEQ ID NO: 3190359 - DNA, 25 bp, Homo sapien
catgttttgcggttatgggaattcc

SEQ ID NO: 3190360 - DNA, 25 bp, Homo sapien
gaaagagccccattgcattgtggtt

SEQ ID NO: 3190361 - DNA, 25 bp, Homo sapien
tgggaattcctagtgagctcaaaac

SEQ ID NO: 3190362 - DNA, 25 bp, Homo sapien
gaactaccaatacatgcgacagcat

SEQ ID NO: 3190363 - DNA, 25 bp, Homo sapien
gaggcaagattgactggaaagaaac

SEQ ID NO: 3190364 - DNA, 25 bp, Homo sapien
tacataacattctagagcaggcaca

SEQ ID NO: 3190365 - DNA, 25 bp, Homo sapien
tattatggccccaaactcgaaacac

SEQ ID NO: 3190366 - DNA, 25 bp, Homo sapien
taaatgctagagctttttacagccg

SEQ ID NO: 3190367 - DNA, 25 bp, Homo sapien
ttttctcatcggcaaaatgggagag

SEQ ID NO: 3190368 - DNA, 25 bp, Homo sapien
tttacagccgtaacgttctatcagc

SEQ ID NO: 3190369 - DNA, 25 bp, Homo sapien
tgggtgatgcaaccttgctgagcct

SEQ ID NO: 3190370 - DNA, 25 bp, Homo sapien
actttactgtgcctgggttcctgat

SEQ ID NO: 3190371 - DNA, 25 bp, Homo sapien
tgtgcctgggttcctgatgaggctc

SEQ ID NO: 3190372 - DNA, 25 bp, Homo sapien
tgggttcctgatgaggctcaaccat

SEQ ID NO: 3190373 - DNA, 25 bp, Homo sapien
cctgggttcctgatgaggctcaacc

SEQ ID NO: 3190374 - DNA, 25 bp, Homo sapien
ccagtggcatcacaccgcagtagaa

SEQ ID NO: 3190375 - DNA, 25 bp, Homo sapien
aacaaaattcctgtgaggcgctcag

SEQ ID NO: 3190376 - DNA, 25 bp, Homo sapien
gaagcactatagcagggtcaacgac

SEQ ID NO: 3190377 - DNA, 25 bp, Homo sapien
gacaatgctccaattcagcccgctg

SEQ ID NO: 3190378 - DNA, 25 bp, Homo sapien
cttcaaagcttagtaaactcctttg

SEQ ID NO: 3190379 - DNA, 25 bp, Homo sapien
caacacatgatgttaacttcaaagc

SEQ ID NO: 3190380 - DNA, 25 bp, Homo sapien
cttagtaaactcctttgatcatggg

SEQ ID NO: 3190381 - DNA, 25 bp, Homo sapien
tcatggggctgaattaagaaaatac

SEQ ID NO: 3190382 - DNA, 25 bp, Homo sapien
aatgcctgtcaagctcattatggac

SEQ ID NO: 3190383 - DNA, 25 bp, Homo sapien
tgactccttcctctggagattcttg

SEQ ID NO: 3190384 - DNA, 25 bp, Homo sapien
gctcattatggaccatctgactcct

SEQ ID NO: 3190385 - DNA, 25 bp, Homo sapien
taatccccagcgtctttggaagaaa

SEQ ID NO: 3190386 - DNA, 25 bp, Homo sapien
catcccagccagatttttggcctta

SEQ ID NO: 3190387 - DNA, 25 bp, Homo sapien
acatcccagccagatttttggcctt

SEQ ID NO: 3190388 - DNA, 25 bp, Homo sapien
atcccagccagatttttggccttac

SEQ ID NO: 3190389 - DNA, 25 bp, Homo sapien
gaggaccaaagatatgatgatgcgc

SEQ ID NO: 3190390 - DNA, 25 bp, Homo sapien
ggctggacatcccactcaggatgat

SEQ ID NO: 3190391 - DNA, 25 bp, Homo sapien
ttgtggtaatgccaagcactgtcac

SEQ ID NO: 3190392 - DNA, 25 bp, Homo sapien
gatgatgcgctagatacagatgtag

SEQ ID NO: 3190393 - DNA, 25 bp, Homo sapien
tcaccacgagaaggagagaccattg

SEQ ID NO: 3190394 - DNA, 25 bp, Homo sapien
caggccatgtattgcccaccgggtt

SEQ ID NO: 3190395 - DNA, 25 bp, Homo sapien
tcacctacactttgagacctgggaa

SEQ ID NO: 3190396 - DNA, 25 bp, Homo sapien
gataacaacacaggcagtactggtc

SEQ ID NO: 3190397 - DNA, 25 bp, Homo sapien
caataatactctggtctggaacctt

SEQ ID NO: 3190398 - DNA, 25 bp, Homo sapien
gcaataatactctggtctggaacct

SEQ ID NO: 3190399 - DNA, 25 bp, Homo sapien
ttagcaataatactctggtctggaa

SEQ ID NO: 3190400 - DNA, 25 bp, Homo sapien
agcaataatactctggtctggaacc

SEQ ID NO: 3190401 - DNA, 25 bp, Homo sapien
cataggccggatatagtcagaggtc

SEQ ID NO: 3190402 - DNA, 25 bp, Homo sapien
taggagagcttctatttgaggaccg

SEQ ID NO: 3190403 - DNA, 25 bp, Homo sapien
caagtagtttattccagcagtgctc

SEQ ID NO: 3190404 - DNA, 25 bp, Homo sapien
gaaagtctgtccaaaagtcatccaa

SEQ ID NO: 3190405 - DNA, 25 bp, Homo sapien
ccctatgatttggatgtgctgctca

SEQ ID NO: 3190406 - DNA, 25 bp, Homo sapien
agaagccgcactgtctcactgggag

SEQ ID NO: 3190407 - DNA, 25 bp, Homo sapien
gaacagggatggcagcaacatgccc

SEQ ID NO: 3190408 - DNA, 25 bp, Homo sapien
catgcccgttggtgatttggtgact

SEQ ID NO: 3190409 - DNA, 25 bp, Homo sapien
tcccatctttggagatagctgccag

SEQ ID NO: 3190410 - DNA, 25 bp, Homo sapien
tgcttgccaggccataaacagccat

SEQ ID NO: 3190411 - DNA, 25 bp, Homo sapien
gaatagcttctgtcacgtctgcctg

SEQ ID NO: 3190412 - DNA, 25 bp, Homo sapien
tagctgccagctgttgtattcttgg

SEQ ID NO: 3190413 - DNA, 25 bp, Homo sapien
ggtgacatttctcgggcacagaaac

SEQ ID NO: 3190414 - DNA, 25 bp, Homo sapien
aacaatgatatccacagctatttcc

SEQ ID NO: 3190415 - DNA, 25 bp, Homo sapien
aaggtgacatttctcgggcacagaa

SEQ ID NO: 3190416 - DNA, 25 bp, Homo sapien
caatgatatccacagctatttcccc

SEQ ID NO: 3190417 - DNA, 25 bp, Homo sapien
cctgttttgggtcacagctgtccat

SEQ ID NO: 3190418 - DNA, 25 bp, Homo sapien
aaattccacgtgtaaggtatatctg

SEQ ID NO: 3190419 - DNA, 25 bp, Homo sapien
taaaattccacgtgtaaggtatatc

SEQ ID NO: 3190420 - DNA, 25 bp, Homo sapien
gtttgagaaatgaagtattcttctt

SEQ ID NO: 3190421 - DNA, 25 bp, Homo sapien
attccacgtgtaaggtatatctggc

SEQ ID NO: 3190422 - DNA, 25 bp, Homo sapien
tcattaatgttgagtacaagctccc

SEQ ID NO: 3190423 - DNA, 25 bp, Homo sapien
tgacggagtcaacagaggtatagca

SEQ ID NO: 3190424 - DNA, 25 bp, Homo sapien
caaaatcataggacagagctaccca

SEQ ID NO: 3190425 - DNA, 25 bp, Homo sapien
caagctccctaggagatgacggagt

SEQ ID NO: 3190426 - DNA, 25 bp, Homo sapien
tttcagcatgagcatgataaaacat

SEQ ID NO: 3190427 - DNA, 25 bp, Homo sapien
ctttcagcatgagcatgataaaaca

SEQ ID NO: 3190428 - DNA, 25 bp, Homo sapien
ctgggagagaggagttgggggctgt

SEQ ID NO: 3190429 - DNA, 25 bp, Homo sapien
gggcagaactgggagagaggagttg

SEQ ID NO: 3190430 - DNA, 25 bp, Homo sapien
agttgggggctgtggaggtgctcat

SEQ ID NO: 3190431 - DNA, 25 bp, Homo sapien
aaatatcctgggcagaactgggaga

SEQ ID NO: 3190432 - DNA, 25 bp, Homo sapien
gctgacttcactgtgacagagcaag

SEQ ID NO: 3190433 - DNA, 25 bp, Homo sapien
tttcacagagtttaacagccctgct

SEQ ID NO: 3190434 - DNA, 25 bp, Homo sapien
ggcaaggtgagtatgattgacccca

SEQ ID NO: 3190435 - DNA, 25 bp, Homo sapien
ggaagccagtaagaaatacctgaca

SEQ ID NO: 3190436 - DNA, 25 bp, Homo sapien
caacagaatgataagagtgagcagc

SEQ ID NO: 3190437 - DNA, 25 bp, Homo sapien
acagaatgataagagtgagcagcat

SEQ ID NO: 3190438 - DNA, 25 bp, Homo sapien
ctggcaacagaatgataagagtgag

SEQ ID NO: 3190439 - DNA, 25 bp, Homo sapien
tggcaacagaatgataagagtgagc

SEQ ID NO: 3190440 - DNA, 25 bp, Homo sapien
ccacacaagtagaattcccatttcc

SEQ ID NO: 3190441 - DNA, 25 bp, Homo sapien
cctgcgagagtaccttcaggacagc

SEQ ID NO: 3190442 - DNA, 25 bp, Homo sapien
ccagtgctgcggtgctgagagacta

SEQ ID NO: 3190443 - DNA, 25 bp, Homo sapien
gcggtgctgagagactaacaaaact

SEQ ID NO: 3190444 - DNA, 25 bp, Homo sapien
cagacatagggcgttgaccaaagat

SEQ ID NO: 3190445 - DNA, 25 bp, Homo sapien
aaagctgaggcctaacatgacatgc

SEQ ID NO: 3190446 - DNA, 25 bp, Homo sapien
ttgcctgtgtgacaagatcaaccca

SEQ ID NO: 3190447 - DNA, 25 bp, Homo sapien
gcaagcgtaacactagaaccatctg

SEQ ID NO: 3190448 - DNA, 25 bp, Homo sapien
taaaatatgtcatcatgagtcctac

SEQ ID NO: 3190449 - DNA, 25 bp, Homo sapien
tgagtcctactaaatgaagtaaaac

SEQ ID NO: 3190450 - DNA, 25 bp, Homo sapien
cactaaacactcaactttctaaagg

SEQ ID NO: 3190451 - DNA, 25 bp, Homo sapien
aactagttgggtgtgctggcgtaca

SEQ ID NO: 3190452 - DNA, 25 bp, Homo sapien
cgcagacacaagaatttttaacagg

SEQ ID NO: 3190453 - DNA, 25 bp, Homo sapien
tctttggtggacatctccagttagg

SEQ ID NO: 3190454 - DNA, 25 bp, Homo sapien
tccagttaggaatgccccacagtcc

SEQ ID NO: 3190455 - DNA, 25 bp, Homo sapien
taaatgttttaaaagcgcagacaca

SEQ ID NO: 3190456 - DNA, 25 bp, Homo sapien
gcaaggtgtgcatgtttgaacagct

SEQ ID NO: 3190457 - DNA, 25 bp, Homo sapien
caagaactctgtaaacactgatgtg

SEQ ID NO: 3190458 - DNA, 25 bp, Homo sapien
tctagggaacacaaaccttaaggca

SEQ ID NO: 3190459 - DNA, 25 bp, Homo sapien
gtgagtctgagggagtgccccacac

SEQ ID NO: 3190460 - DNA, 25 bp, Homo sapien
taaatttgaattccacatatattgc

SEQ ID NO: 3190461 - DNA, 25 bp, Homo sapien
gaccctgttatctttaccacataaa

SEQ ID NO: 3190462 - DNA, 25 bp, Homo sapien
taaaaggtcttagacggaagcagga

SEQ ID NO: 3190463 - DNA, 25 bp, Homo sapien
gttatctttaccacataaatacagg

SEQ ID NO: 3190464 - DNA, 25 bp, Homo sapien
tgtggaaaggatttatataagtgta

SEQ ID NO: 3190465 - DNA, 25 bp, Homo sapien
cattttggaaatggactccttgggt

SEQ ID NO: 3190466 - DNA, 25 bp, Homo sapien
tgtaaattagaactaaaattacaga

SEQ ID NO: 3190467 - DNA, 25 bp, Homo sapien
cacccatcatattctattgtggaaa

SEQ ID NO: 3190468 - DNA, 25 bp, Homo sapien
ccaatgacaaccaacacaagcagaa

SEQ ID NO: 3190469 - DNA, 25 bp, Homo sapien
gaagaaagagaccaaactgtatact

SEQ ID NO: 3190470 - DNA, 25 bp, Homo sapien
tacttcccaatgacaaccaacacaa

SEQ ID NO: 3190471 - DNA, 25 bp, Homo sapien
ggaagaaagagaccaaactgtatac

SEQ ID NO: 3190472 - DNA, 25 bp, Homo sapien
catgggagaaaattaagaagggtgc

SEQ ID NO: 3190473 - DNA, 25 bp, Homo sapien
ctatttccatgggagaaaattaaga

SEQ ID NO: 3190474 - DNA, 25 bp, Homo sapien
ccatgggagaaaattaagaagggtg

SEQ ID NO: 3190475 - DNA, 25 bp, Homo sapien
gagaaaattaagaagggtgcaggac

SEQ ID NO: 3190476 - DNA, 25 bp, Homo sapien
ggttccttctgtgtcaatcctaaag

SEQ ID NO: 3190477 - DNA, 25 bp, Homo sapien
ataatgaaaatccatgatcactgag

SEQ ID NO: 3190478 - DNA, 25 bp, Homo sapien
tgatcactgagacaccagcatccac

SEQ ID NO: 3190479 - DNA, 25 bp, Homo sapien
gtctttctaaatccacccaatagat

SEQ ID NO: 3190480 - DNA, 25 bp, Homo sapien
tcctttcatatctgttactgtaatg

SEQ ID NO: 3190481 - DNA, 25 bp, Homo sapien
tttatccaatttattgccattccag

SEQ ID NO: 3190482 - DNA, 25 bp, Homo sapien
cctgttgatttgaccaaataacttc

SEQ ID NO: 3190483 - DNA, 25 bp, Homo sapien
tatttcctttcatatctgttactgt

SEQ ID NO: 3190484 - DNA, 25 bp, Homo sapien
ccacaccatcgagatctgctctata

SEQ ID NO: 3190485 - DNA, 25 bp, Homo sapien
ccatcataatcacaggagcaaataa

SEQ ID NO: 3190486 - DNA, 25 bp, Homo sapien
gaatccaaaacagccgcttatcaag

SEQ ID NO: 3190487 - DNA, 25 bp, Homo sapien
gcaaataagagaattgcttccttct

SEQ ID NO: 3190488 - DNA, 25 bp, Homo sapien
tgatgaatggaggttaattctaacc

SEQ ID NO: 3190489 - DNA, 25 bp, Homo sapien
tctaaccatgtcctttccagtgtgt

SEQ ID NO: 3190490 - DNA, 25 bp, Homo sapien
tcatcttctgccttgggttgtgcaa

SEQ ID NO: 3190491 - DNA, 25 bp, Homo sapien
tgttgaatagaagatacggtcacca

SEQ ID NO: 3190492 - DNA, 25 bp, Homo sapien
aggccctgcgcaaggtcaacgatga

SEQ ID NO: 3190493 - DNA, 25 bp, Homo sapien
tcaggccctgcgcaaggtcaacgat

SEQ ID NO: 3190494 - DNA, 25 bp, Homo sapien
caggccctgcgcaaggtcaacgatg

SEQ ID NO: 3190495 - DNA, 25 bp, Homo sapien
ccttgccttggccagacagtcttca

SEQ ID NO: 3190496 - DNA, 25 bp, Homo sapien
gacaacctgaatctacaaggcaagg

SEQ ID NO: 3190497 - DNA, 25 bp, Homo sapien
caggacccggagcttggaaggtaca

SEQ ID NO: 3190498 - DNA, 25 bp, Homo sapien
cattgggctgatgacactagaggga

SEQ ID NO: 3190499 - DNA, 25 bp, Homo sapien
tcaccaatggtagaagtggctgcgt

SEQ ID NO: 3190500 - DNA, 25 bp, Homo sapien
cccagatgtagccttaaccttgcat

SEQ ID NO: 3190501 - DNA, 25 bp, Homo sapien
tctttcttactaatcccagatgtag

SEQ ID NO: 3190502 - DNA, 25 bp, Homo sapien
gcattccagactgccagtgtcaacg

SEQ ID NO: 3190503 - DNA, 25 bp, Homo sapien
caagcccttgagctatgcagagcaa

SEQ ID NO: 3190504 - DNA, 25 bp, Homo sapien
tgaaacaatgcacttgggattccgt

SEQ ID NO: 3190505 - DNA, 25 bp, Homo sapien
ggagtttaatgtccaccaccaactg

SEQ ID NO: 3190506 - DNA, 25 bp, Homo sapien
tactatagcccagtgaatctgtaga

SEQ ID NO: 3190507 - DNA, 25 bp, Homo sapien
ctgttcttatcatgatcatccccat

SEQ ID NO: 3190508 - DNA, 25 bp, Homo sapien
tctgttcttatcatgatcatcccca

SEQ ID NO: 3190509 - DNA, 25 bp, Homo sapien
cagaggacactgctaaatcttttcc

SEQ ID NO: 3190510 - DNA, 25 bp, Homo sapien
gagatgtcatttcttaggttgcgaa

SEQ ID NO: 3190511 - DNA, 25 bp, Homo sapien
cagctgcatctctcacggaggcaaa

SEQ ID NO: 3190512 - DNA, 25 bp, Homo sapien
ccaaaacctctcaggattgggcatc

SEQ ID NO: 3190513 - DNA, 25 bp, Homo sapien
cccacacacagtgctgctgcagttt

SEQ ID NO: 3190514 - DNA, 25 bp, Homo sapien
gcagtttcctttcctcaatttgcaa

SEQ ID NO: 3190515 - DNA, 25 bp, Homo sapien
ctttcctcaatttgcaaagtttctg

SEQ ID NO: 3190516 - DNA, 25 bp, Homo sapien
ttgcccacacacagtgctgctgcag

SEQ ID NO: 3190517 - DNA, 25 bp, Homo sapien
cagtacttccggtctcgacttaggg

SEQ ID NO: 3190518 - DNA, 25 bp, Homo sapien
tccggtctcgacttagggcgtatcc

SEQ ID NO: 3190519 - DNA, 25 bp, Homo sapien
cttagggcgtatccctctgcacaca

SEQ ID NO: 3190520 - DNA, 25 bp, Homo sapien
cttcacagtacttccggtctcgact

SEQ ID NO: 3190521 - DNA, 25 bp, Homo sapien
tcctcccctcaagcagcgactcttc

SEQ ID NO: 3190522 - DNA, 25 bp, Homo sapien
cacccaagagtacagccatgattcc

SEQ ID NO: 3190523 - DNA, 25 bp, Homo sapien
gatgacatcgtttcccatcaggaag

SEQ ID NO: 3190524 - DNA, 25 bp, Homo sapien
gcagaacaaatcctacagggcacgt

SEQ ID NO: 3190525 - DNA, 25 bp, Homo sapien
gcacgtgcagtaataggatccaggg

SEQ ID NO: 3190526 - DNA, 25 bp, Homo sapien
cataagggaccttctgatgtcagaa

SEQ ID NO: 3190527 - DNA, 25 bp, Homo sapien
tggctgcattcagacacattgcgtg

SEQ ID NO: 3190528 - DNA, 25 bp, Homo sapien
gacacattgcgtggacaggaaacaa

SEQ ID NO: 3190529 - DNA, 25 bp, Homo sapien
gcactgagccttcaggacagaaaca

SEQ ID NO: 3190530 - DNA, 25 bp, Homo sapien
catccagttgtaggtcatacccagg

SEQ ID NO: 3190531 - DNA, 25 bp, Homo sapien
gaacgcagagctggctacatccacc

SEQ ID NO: 3190532 - DNA, 25 bp, Homo sapien
tcatacccaggaaagcaatcacatt

SEQ ID NO: 3190533 - DNA, 25 bp, Homo sapien
catccaccattatcgggtgaggaac

SEQ ID NO: 3190534 - DNA, 25 bp, Homo sapien
tgatctagggcataaaccattccca

SEQ ID NO: 3190535 - DNA, 25 bp, Homo sapien
attttccacagggtcatgatctagg

SEQ ID NO: 3190536 - DNA, 25 bp, Homo sapien
gtctgttccatcaaaatgcatgtgt

SEQ ID NO: 3190537 - DNA, 25 bp, Homo sapien
tgtgtcgaatatcttgagaattggc

SEQ ID NO: 3190538 - DNA, 25 bp, Homo sapien
aataagcctttctcgctgggaacca

SEQ ID NO: 3190539 - DNA, 25 bp, Homo sapien
gggaaccatccatattagctctctc

SEQ ID NO: 3190540 - DNA, 25 bp, Homo sapien
tctgtctgtccaatagaatctacgg

SEQ ID NO: 3190541 - DNA, 25 bp, Homo sapien
ccacttcagggctgtatgggcaaag

SEQ ID NO: 3190542 - DNA, 25 bp, Homo sapien
gatgttctccttagtgattattttg

SEQ ID NO: 3190543 - DNA, 25 bp, Homo sapien
ttcctcgtggttgagagatgttctc

SEQ ID NO: 3190544 - DNA, 25 bp, Homo sapien
tttaaatcactccttccaatcagag

SEQ ID NO: 3190545 - DNA, 25 bp, Homo sapien
atgaacagcaattcctcgtggttga

SEQ ID NO: 3190546 - DNA, 25 bp, Homo sapien
catcattctgggtaagtcttcggcg

SEQ ID NO: 3190547 - DNA, 25 bp, Homo sapien
ggcgttttgaaccatccagattggc

SEQ ID NO: 3190548 - DNA, 25 bp, Homo sapien
gatcagagctggctataaccagacg

SEQ ID NO: 3190549 - DNA, 25 bp, Homo sapien
gtcaatcgttattccactgggccag

SEQ ID NO: 3190550 - DNA, 25 bp, Homo sapien
taaagtctaaggttgtgcataagca

SEQ ID NO: 3190551 - DNA, 25 bp, Homo sapien
gcataagcatatcacttattgtgaa

SEQ ID NO: 3190552 - DNA, 25 bp, Homo sapien
aatgtgtcaataaatacccctgaag

SEQ ID NO: 3190553 - DNA, 25 bp, Homo sapien
catatttgttttaccctccactgta

SEQ ID NO: 3190554 - DNA, 25 bp, Homo sapien
ggttttgccaatggatgaaccacaa

SEQ ID NO: 3190555 - DNA, 25 bp, Homo sapien
tcttgtttactctcattactgatgg

SEQ ID NO: 3190556 - DNA, 25 bp, Homo sapien
tactgatggcatagcccaatctgag

SEQ ID NO: 3190557 - DNA, 25 bp, Homo sapien
tgctgccttggagacgtactctatc

SEQ ID NO: 3190558 - DNA, 25 bp, Homo sapien
cttcacgacacgaacaccaagcagt

SEQ ID NO: 3190559 - DNA, 25 bp, Homo sapien
tcataaaaccttcacgacacgaaca

SEQ ID NO: 3190560 - DNA, 25 bp, Homo sapien
aaaccttcacgacacgaacaccaag

SEQ ID NO: 3190561 - DNA, 25 bp, Homo sapien
acgacacgaacaccaagcagttcca

SEQ ID NO: 3190562 - DNA, 25 bp, Homo sapien
ctgatgaccatccagagccagacac

SEQ ID NO: 3190563 - DNA, 25 bp, Homo sapien
aacagctgatgaccatccagagcca

SEQ ID NO: 3190564 - DNA, 25 bp, Homo sapien
tgccaacagctgatgaccatccaga

SEQ ID NO: 3190565 - DNA, 25 bp, Homo sapien
agctgatgaccatccagagccagac

SEQ ID NO: 3190566 - DNA, 25 bp, Homo sapien
ctgatatggcaaaaggaatgtgggc

SEQ ID NO: 3190567 - DNA, 25 bp, Homo sapien
aaaaagtcatgatttaatacaggca

SEQ ID NO: 3190568 - DNA, 25 bp, Homo sapien
gcataagattctcgcactgcccact

SEQ ID NO: 3190569 - DNA, 25 bp, Homo sapien
actgtgatccacagaaccctgggct

SEQ ID NO: 3190570 - DNA, 25 bp, Homo sapien
agtcttggacaagatgtccaatggt

SEQ ID NO: 3190571 - DNA, 25 bp, Homo sapien
cagccactagcatgtgttgagattc

SEQ ID NO: 3190572 - DNA, 25 bp, Homo sapien
cactagcatgtgttgagattctgta

SEQ ID NO: 3190573 - DNA, 25 bp, Homo sapien
tggacaagatgtccaatggtgttac

SEQ ID NO: 3190574 - DNA, 25 bp, Homo sapien
tgaagggcagtgacctaaagtgaaa

SEQ ID NO: 3190575 - DNA, 25 bp, Homo sapien
gaaaaaccactgacctcctaggtga

SEQ ID NO: 3190576 - DNA, 25 bp, Homo sapien
acctcctaggtgaatatggaacaag

SEQ ID NO: 3190577 - DNA, 25 bp, Homo sapien
gggcagtgacctaaagtgaaaggat

SEQ ID NO: 3190578 - DNA, 25 bp, Homo sapien
tacatattaggccttcctgagaggc

SEQ ID NO: 3190579 - DNA, 25 bp, Homo sapien
tatcacactagaagagacccaaggt

SEQ ID NO: 3190580 - DNA, 25 bp, Homo sapien
gacacacaggacgttgaagggctaa

SEQ ID NO: 3190581 - DNA, 25 bp, Homo sapien
aaaggctttctgagccagagggcga

SEQ ID NO: 3190582 - DNA, 25 bp, Homo sapien
gaaatacaccgagcatacatgctgc

SEQ ID NO: 3190583 - DNA, 25 bp, Homo sapien
cactgacatgtggcatcctctccct

SEQ ID NO: 3190584 - DNA, 25 bp, Homo sapien
ctctgaaatacaccgagcatacatg

SEQ ID NO: 3190585 - DNA, 25 bp, Homo sapien
tccctctgaaatacaccgagcatac

SEQ ID NO: 3190586 - DNA, 25 bp, Homo sapien
caccttcggtgttgatgcacttgga

SEQ ID NO: 3190587 - DNA, 25 bp, Homo sapien
ggggggcacactgggacacccatct

SEQ ID NO: 3190588 - DNA, 25 bp, Homo sapien
tgggacacccatctcacattcatct

SEQ ID NO: 3190589 - DNA, 25 bp, Homo sapien
tctgagcaccggcagacataaccac

SEQ ID NO: 3190590 - DNA, 25 bp, Homo sapien
gatgcgatgctactgacacctggaa

SEQ ID NO: 3190591 - DNA, 25 bp, Homo sapien
tacgtcagtttgagcaggtcgcaca

SEQ ID NO: 3190592 - DNA, 25 bp, Homo sapien
tagggcagtaataacacaagggcac

SEQ ID NO: 3190593 - DNA, 25 bp, Homo sapien
gtatgagacatccacgacgcgaact

SEQ ID NO: 3190594 - DNA, 25 bp, Homo sapien
ggggccatgctaatcttctctgtat

SEQ ID NO: 3190595 - DNA, 25 bp, Homo sapien
cacgaatttgcatgtcctccttgcg

SEQ ID NO: 3190596 - DNA, 25 bp, Homo sapien
tatatgtgctgccaaagcgagcaca

SEQ ID NO: 3190597 - DNA, 25 bp, Homo sapien
cattccaattttagtatatgtgctg

SEQ ID NO: 3190598 - DNA, 25 bp, Homo sapien
agacaggcgtccagcacacatgcag

SEQ ID NO: 3190599 - DNA, 25 bp, Homo sapien
gcctccctctgtatttgtgcagctg

SEQ ID NO: 3190600 - DNA, 25 bp, Homo sapien
catgcaggtatagcctccctctgta

SEQ ID NO: 3190601 - DNA, 25 bp, Homo sapien
cagggcaaatcagtcctggttcaga

SEQ ID NO: 3190602 - DNA, 25 bp, Homo sapien
ctgaggtgagggggtggagtagagt

SEQ ID NO: 3190603 - DNA, 25 bp, Homo sapien
tacggaatagtggtggtcatcttcc

SEQ ID NO: 3190604 - DNA, 25 bp, Homo sapien
cattcagagtcactatttcttacgg

SEQ ID NO: 3190605 - DNA, 25 bp, Homo sapien
ccaatgcttcaatatacatgcacac

SEQ ID NO: 3190606 - DNA, 25 bp, Homo sapien
tcatggaggcagtacccatcgtggg

SEQ ID NO: 3190607 - DNA, 25 bp, Homo sapien
aggaggagcagcatgacaagcacca

SEQ ID NO: 3190608 - DNA, 25 bp, Homo sapien
tagtgggccccccacaggctcagga

SEQ ID NO: 3190609 - DNA, 25 bp, Homo sapien
gtggccagcgtggcgcagttcccac

SEQ ID NO: 3190610 - DNA, 25 bp, Homo sapien
accacttcaggtctcggtactgaca

SEQ ID NO: 3190611 - DNA, 25 bp, Homo sapien
ctcaaggagacaggcattcccctgg

SEQ ID NO: 3190612 - DNA, 25 bp, Homo sapien
atcactacgcctgttactttttgcc

SEQ ID NO: 3190613 - DNA, 25 bp, Homo sapien
gcatcactacgcctgttactttttg

SEQ ID NO: 3190614 - DNA, 25 bp, Homo sapien
tttcacgttttaaatgtagtatgta

SEQ ID NO: 3190615 - DNA, 25 bp, Homo sapien
ggtacagttgagtatgacatggcaa

SEQ ID NO: 3190616 - DNA, 25 bp, Homo sapien
gaggtaagcaggtacactgatcaga

SEQ ID NO: 3190617 - DNA, 25 bp, Homo sapien
tcactcaggaagaattgtacaactc

SEQ ID NO: 3190618 - DNA, 25 bp, Homo sapien
caaacgtagttatgcacatagctga

SEQ ID NO: 3190619 - DNA, 25 bp, Homo sapien
taactttagatgtttaaggcagtct

SEQ ID NO: 3190620 - DNA, 25 bp, Homo sapien
actgcttttgctactaaaatttaag

SEQ ID NO: 3190621 - DNA, 25 bp, Homo sapien
tgatgatcagggacaactaactgct

SEQ ID NO: 3190622 - DNA, 25 bp, Homo sapien
agataactaggaacataactttaga

SEQ ID NO: 3190623 - DNA, 25 bp, Homo sapien
gaggacatcccatcctcagtgtcag

SEQ ID NO: 3190624 - DNA, 25 bp, Homo sapien
catctctgctcgactcctcataagg

SEQ ID NO: 3190625 - DNA, 25 bp, Homo sapien
gtgtcagcaggcctgcgactcctca

SEQ ID NO: 3190626 - DNA, 25 bp, Homo sapien
cgactcctcataaggattctttggg

SEQ ID NO: 3190627 - DNA, 25 bp, Homo sapien
ccattcttgaggtcttggtgttctt

SEQ ID NO: 3190628 - DNA, 25 bp, Homo sapien
attcttgaggtcttggtgttctttt

SEQ ID NO: 3190629 - DNA, 25 bp, Homo sapien
cattcttgaggtcttggtgttcttt

SEQ ID NO: 3190630 - DNA, 25 bp, Homo sapien
gcatagtcagctgcccctagcatgt

SEQ ID NO: 3190631 - DNA, 25 bp, Homo sapien
gaggccaagacagcaatgagccatg

SEQ ID NO: 3190632 - DNA, 25 bp, Homo sapien
tagagacagcgttccaccatagaga

SEQ ID NO: 3190633 - DNA, 25 bp, Homo sapien
gaacctgacacattgctctttagct

SEQ ID NO: 3190634 - DNA, 25 bp, Homo sapien
agcccttatcactggatactggaat

SEQ ID NO: 3190635 - DNA, 25 bp, Homo sapien
ccttatcactggatactggaatcca

SEQ ID NO: 3190636 - DNA, 25 bp, Homo sapien
ttatcactggatactggaatccagc

SEQ ID NO: 3190637 - DNA, 25 bp, Homo sapien
gcccttatcactggatactggaatc

SEQ ID NO: 3190638 - DNA, 25 bp, Homo sapien
cataatgggttagctgataggagag

SEQ ID NO: 3190639 - DNA, 25 bp, Homo sapien
ataggagggcatatgaaagcttcgc

SEQ ID NO: 3190640 - DNA, 25 bp, Homo sapien
tcgacacccccttcaagggtctgtg

SEQ ID NO: 3190641 - DNA, 25 bp, Homo sapien
agctccatttggtgtggtgggtcca

SEQ ID NO: 3190642 - DNA, 25 bp, Homo sapien
gtgtgactgtctgctttaaccccta

SEQ ID NO: 3190643 - DNA, 25 bp, Homo sapien
taagaaactccgaagcctcctgtgt

SEQ ID NO: 3190644 - DNA, 25 bp, Homo sapien
gcacaactacgtatctgtctccagg

SEQ ID NO: 3190645 - DNA, 25 bp, Homo sapien
gaaaagatactgtgcatcgacatag

SEQ ID NO: 3190646 - DNA, 25 bp, Homo sapien
caaatcaggcaatttacttacaatc

SEQ ID NO: 3190647 - DNA, 25 bp, Homo sapien
aattcatcgttgtctataatgaaaa

SEQ ID NO: 3190648 - DNA, 25 bp, Homo sapien
tctgtgcaatcacaccaagagggaa

SEQ ID NO: 3190649 - DNA, 25 bp, Homo sapien
ataattagaagaaattcatcgttgt

SEQ ID NO: 3190650 - DNA, 25 bp, Homo sapien
ccatatcaggttgtgttatctgtag

SEQ ID NO: 3190651 - DNA, 25 bp, Homo sapien
tgtctggtatcaccaaagtacaagg

SEQ ID NO: 3190652 - DNA, 25 bp, Homo sapien
taccagcacgaccttgcttgaggcc

SEQ ID NO: 3190653 - DNA, 25 bp, Homo sapien
tataatctaatacgttgggaggctg

SEQ ID NO: 3190654 - DNA, 25 bp, Homo sapien
cagaagctcaatcaggcgttgcgcg

SEQ ID NO: 3190655 - DNA, 25 bp, Homo sapien
tagtcaaggacttagcagggtccca

SEQ ID NO: 3190656 - DNA, 25 bp, Homo sapien
tgcgcgcaatgagacgatgagagtt

SEQ ID NO: 3190657 - DNA, 25 bp, Homo sapien
tttctttaatccgaccaggagctgg

SEQ ID NO: 3190658 - DNA, 25 bp, Homo sapien
tcggcactccgatgcaatgggatgc

SEQ ID NO: 3190659 - DNA, 25 bp, Homo sapien
tcccaagtggaagggagcgtccagt

SEQ ID NO: 3190660 - DNA, 25 bp, Homo sapien
tatctatggaaggatgctgcgtctg

SEQ ID NO: 3190661 - DNA, 25 bp, Homo sapien
gaacaaagtcactgatcggcactcc

SEQ ID NO: 3190662 - DNA, 25 bp, Homo sapien
cagcccgaatgaatgcaaagaatgt

SEQ ID NO: 3190663 - DNA, 25 bp, Homo sapien
agcaggcatgctccgtggcttcagg

SEQ ID NO: 3190664 - DNA, 25 bp, Homo sapien
ggtccagagttgagcaaacccagcc

SEQ ID NO: 3190665 - DNA, 25 bp, Homo sapien
tgaaacatgggaatccagcaggcat

SEQ ID NO: 3190666 - DNA, 25 bp, Homo sapien
caagagaagaaggagagcagaacag

SEQ ID NO: 3190667 - DNA, 25 bp, Homo sapien
agagaagaaggagagcagaacagac

SEQ ID NO: 3190668 - DNA, 25 bp, Homo sapien
tcacttcgccaagagaagaaggaga

SEQ ID NO: 3190669 - DNA, 25 bp, Homo sapien
gccaagagaagaaggagagcagaac

SEQ ID NO: 3190670 - DNA, 25 bp, Homo sapien
taaggtaggattattatcagaggtg

SEQ ID NO: 3190671 - DNA, 25 bp, Homo sapien
gggtataaggtaggattattatcag

SEQ ID NO: 3190672 - DNA, 25 bp, Homo sapien
tgtttagatgagtcttagtccaggg

SEQ ID NO: 3190673 - DNA, 25 bp, Homo sapien
taggattattatcagaggtgttaac

SEQ ID NO: 3190674 - DNA, 25 bp, Homo sapien
gaagtagcctaacagtcctccctgg

SEQ ID NO: 3190675 - DNA, 25 bp, Homo sapien
taactggtcccataagtcagggtca

SEQ ID NO: 3190676 - DNA, 25 bp, Homo sapien
tagacatattcaggcaggaggttgc

SEQ ID NO: 3190677 - DNA, 25 bp, Homo sapien
ttataacccattcgggccggccatg

SEQ ID NO: 3190678 - DNA, 25 bp, Homo sapien
caactcatagctaaagaggccggta

SEQ ID NO: 3190679 - DNA, 25 bp, Homo sapien
ggtaggtcccagtttgccaatgagc

SEQ ID NO: 3190680 - DNA, 25 bp, Homo sapien
caaaacaagtgtcagtgcagtcaca

SEQ ID NO: 3190681 - DNA, 25 bp, Homo sapien
taaacatctgcgagccatatggcac

SEQ ID NO: 3190682 - DNA, 25 bp, Homo sapien
cctcccaaatagctgaggttacagg

SEQ ID NO: 3190683 - DNA, 25 bp, Homo sapien
ccaaatagctgaggttacaggcgcc

SEQ ID NO: 3190684 - DNA, 25 bp, Homo sapien
tttgaggtggattcttgctgttgtt

SEQ ID NO: 3190685 - DNA, 25 bp, Homo sapien
tcccaaatagctgaggttacaggcg

SEQ ID NO: 3190686 - DNA, 25 bp, Homo sapien
catgtgtcaatgtttctagtatttc

SEQ ID NO: 3190687 - DNA, 25 bp, Homo sapien
gcttaatgattaggcaaactagatg

SEQ ID NO: 3190688 - DNA, 25 bp, Homo sapien
gaagcaattatgtaaagttgttcaa

SEQ ID NO: 3190689 - DNA, 25 bp, Homo sapien
atagattacacgcacatagccacgc

SEQ ID NO: 3190690 - DNA, 25 bp, Homo sapien
tactcttactatgccttgcgggcgg

SEQ ID NO: 3190691 - DNA, 25 bp, Homo sapien
tcttggtactcctacaaagacatgg

SEQ ID NO: 3190692 - DNA, 25 bp, Homo sapien
tggtggtcaaggatctcacgtacct

SEQ ID NO: 3190693 - DNA, 25 bp, Homo sapien
gactatgaactatggcgtgcacgcc

SEQ ID NO: 3190694 - DNA, 25 bp, Homo sapien
tgaagtacaatagggtgacaacttt

SEQ ID NO: 3190695 - DNA, 25 bp, Homo sapien
ggtgacaactttcaggctgcctttg

SEQ ID NO: 3190696 - DNA, 25 bp, Homo sapien
tgacaactttcaggctgcctttgag

SEQ ID NO: 3190697 - DNA, 25 bp, Homo sapien
ggctttgaagtacaatagggtgaca

SEQ ID NO: 3190698 - DNA, 25 bp, Homo sapien
tctgcttcccgctgtagaaactgat

SEQ ID NO: 3190699 - DNA, 25 bp, Homo sapien
tccttagaggagaattagtgccttg

SEQ ID NO: 3190700 - DNA, 25 bp, Homo sapien
acaggcacaagcaggagcgcagctt

SEQ ID NO: 3190701 - DNA, 25 bp, Homo sapien
tgaactggtttagctttgtgcacaa

SEQ ID NO: 3190702 - DNA, 25 bp, Homo sapien
aaaccagctccggacactgtctgac

SEQ ID NO: 3190703 - DNA, 25 bp, Homo sapien
aggactcctaaaccagctccggaca

SEQ ID NO: 3190704 - DNA, 25 bp, Homo sapien
gctatatagagataaaggactccta

SEQ ID NO: 3190705 - DNA, 25 bp, Homo sapien
ctaagctatatagagataaaggact

SEQ ID NO: 3190706 - DNA, 25 bp, Homo sapien
aagtgctcagaacacctccatcagt

SEQ ID NO: 3190707 - DNA, 25 bp, Homo sapien
gtgctcagaacacctccatcagtac

SEQ ID NO: 3190708 - DNA, 25 bp, Homo sapien
agtgctcagaacacctccatcagta

SEQ ID NO: 3190709 - DNA, 25 bp, Homo sapien
tcaagtgctcagaacacctccatca

SEQ ID NO: 3190710 - DNA, 25 bp, Homo sapien
gctcttacagtatgttctgccatta

SEQ ID NO: 3190711 - DNA, 25 bp, Homo sapien
ctaagctcttacagtatgttctgcc

SEQ ID NO: 3190712 - DNA, 25 bp, Homo sapien
tctgccattaagcagtcaagggtat

SEQ ID NO: 3190713 - DNA, 25 bp, Homo sapien
gggtatacggctgccagtatatagc

SEQ ID NO: 3190714 - DNA, 25 bp, Homo sapien
ctccagttgggagggtacagatgca

SEQ ID NO: 3190715 - DNA, 25 bp, Homo sapien
aggaacttcctgtaaccgcactgcc

SEQ ID NO: 3190716 - DNA, 25 bp, Homo sapien
gaaggcactcgatggacttcataca

SEQ ID NO: 3190717 - DNA, 25 bp, Homo sapien
catttaacgagttgctctgaaatga

SEQ ID NO: 3190718 - DNA, 25 bp, Homo sapien
gtaatgttttatttcccgatctcca

SEQ ID NO: 3190719 - DNA, 25 bp, Homo sapien
ttttctctatcctgccacaatacat

SEQ ID NO: 3190720 - DNA, 25 bp, Homo sapien
tttatttcatgttgttccttcattc

SEQ ID NO: 3190721 - DNA, 25 bp, Homo sapien
gatctccacttttctctatcctgcc

SEQ ID NO: 3190722 - DNA, 25 bp, Homo sapien
tagcctggaatataaggcccttcat

SEQ ID NO: 3190723 - DNA, 25 bp, Homo sapien
tttagcctggaatataaggcccttc

SEQ ID NO: 3190724 - DNA, 25 bp, Homo sapien
ttagcctggaatataaggcccttca

SEQ ID NO: 3190725 - DNA, 25 bp, Homo sapien
caccaagttgtctgtggtgcctggc

SEQ ID NO: 3190726 - DNA, 25 bp, Homo sapien
agtgtaagtgaggaaatggcatgat

SEQ ID NO: 3190727 - DNA, 25 bp, Homo sapien
caactctatcattgtaatgtttgaa

SEQ ID NO: 3190728 - DNA, 25 bp, Homo sapien
agggcacacctgacaactctatcat

SEQ ID NO: 3190729 - DNA, 25 bp, Homo sapien
tgtaatgtttgaattgtacatactg

SEQ ID NO: 3190730 - DNA, 25 bp, Homo sapien
cctgacaactctatcattgtaatgt

SEQ ID NO: 3190731 - DNA, 25 bp, Homo sapien
caggtgttaagtctaggatctctca

SEQ ID NO: 3190732 - DNA, 25 bp, Homo sapien
ccaagcatctatcccataggtcaaa

SEQ ID NO: 3190733 - DNA, 25 bp, Homo sapien
taggtcaaacccaaatactgatctt

SEQ ID NO: 3190734 - DNA, 25 bp, Homo sapien
tctcttaatgggcaggcatgtcaaa

SEQ ID NO: 3190735 - DNA, 25 bp, Homo sapien
ttttgagagacgaaggattgtcttt

SEQ ID NO: 3190736 - DNA, 25 bp, Homo sapien
ccttttgagagacgaaggattgtct

SEQ ID NO: 3190737 - DNA, 25 bp, Homo sapien
tttgagagacgaaggattgtctttg

SEQ ID NO: 3190738 - DNA, 25 bp, Homo sapien
cttttgagagacgaaggattgtctt

SEQ ID NO: 3190739 - DNA, 25 bp, Homo sapien
cacaggttgtgctgcctgatcatca

SEQ ID NO: 3190740 - DNA, 25 bp, Homo sapien
gaccagtgtttatactcacggaggg

SEQ ID NO: 3190741 - DNA, 25 bp, Homo sapien
aaaaccatacccaaaggcacatcaa

SEQ ID NO: 3190742 - DNA, 25 bp, Homo sapien
aaaagaagtggttcgtcaactactg

SEQ ID NO: 3190743 - DNA, 25 bp, Homo sapien
ctctaggttccctaggctagtctcg

SEQ ID NO: 3190744 - DNA, 25 bp, Homo sapien
ggagaatcacatcctaattctaggt

SEQ ID NO: 3190745 - DNA, 25 bp, Homo sapien
taggtcacttgttacctaatcctct

SEQ ID NO: 3190746 - DNA, 25 bp, Homo sapien
taagattttagatggaggtcagtcc

SEQ ID NO: 3190747 - DNA, 25 bp, Homo sapien
ttattgaattatagactgtgcacac

SEQ ID NO: 3190748 - DNA, 25 bp, Homo sapien
taggttgttctttactgtagttatc

SEQ ID NO: 3190749 - DNA, 25 bp, Homo sapien
caatggtccactaggttgttcttta

SEQ ID NO: 3190750 - DNA, 25 bp, Homo sapien
tattgaattatagactgtgcacaca

SEQ ID NO: 3190751 - DNA, 25 bp, Homo sapien
tctgtgccttgacagcctgagttca

SEQ ID NO: 3190752 - DNA, 25 bp, Homo sapien
ctgtgccttgacagcctgagttcat

SEQ ID NO: 3190753 - DNA, 25 bp, Homo sapien
ttactgcctacttctgtgccttgac

SEQ ID NO: 3190754 - DNA, 25 bp, Homo sapien
cattactgcctacttctgtgccttg

SEQ ID NO: 3190755 - DNA, 25 bp, Homo sapien
ccgcagctgcgaaaagggggtttca

SEQ ID NO: 3190756 - DNA, 25 bp, Homo sapien
ggctggtccgggccccaatggccat

SEQ ID NO: 3190757 - DNA, 25 bp, Homo sapien
agccccctggagtcgccggccagtg

SEQ ID NO: 3190758 - DNA, 25 bp, Homo sapien
gccagtgtcgggaggcccggccgcc

SEQ ID NO: 3190759 - DNA, 25 bp, Homo sapien
tcaggcggatgccccctttttagta

SEQ ID NO: 3190760 - DNA, 25 bp, Homo sapien
tccttgcagcgctcctacttcaccg

SEQ ID NO: 3190761 - DNA, 25 bp, Homo sapien
tgcagcgctcctacttcaccgtcct

SEQ ID NO: 3190762 - DNA, 25 bp, Homo sapien
agcgctcctacttcaccgtcctcct

SEQ ID NO: 3190763 - DNA, 25 bp, Homo sapien
tcccgcaaccggagtgtgaaaggca

SEQ ID NO: 3190764 - DNA, 25 bp, Homo sapien
tgcacagggtgatgtctgcgcgaca

SEQ ID NO: 3190765 - DNA, 25 bp, Homo sapien
tagatttgggttttctcgcttggcc

SEQ ID NO: 3190766 - DNA, 25 bp, Homo sapien
tgtgaaccgcggctacataggcatc

SEQ ID NO: 3190767 - DNA, 25 bp, Homo sapien
ctgggcgtgaatggagcgatgaatc

SEQ ID NO: 3190768 - DNA, 25 bp, Homo sapien
gcagccagctgatcgctgagttctc

SEQ ID NO: 3190769 - DNA, 25 bp, Homo sapien
tgagttctcgggtctcccgggtgca

SEQ ID NO: 3190770 - DNA, 25 bp, Homo sapien
tggagcgatgaatcgcgggcagcca

SEQ ID NO: 3190771 - DNA, 25 bp, Homo sapien
cctgatactgttcccgggagccctg

SEQ ID NO: 3190772 - DNA, 25 bp, Homo sapien
ggagccctgcgcgtcttcccggagt

SEQ ID NO: 3190773 - DNA, 25 bp, Homo sapien
tgatgctttcgcctgatactgttcc

SEQ ID NO: 3190774 - DNA, 25 bp, Homo sapien
gtgccttaatgtcggtattccctgc

SEQ ID NO: 3190775 - DNA, 25 bp, Homo sapien
gatcagccccaatgaacatgtcagt

SEQ ID NO: 3190776 - DNA, 25 bp, Homo sapien
ccaatggatgcaggaaaactggtac

SEQ ID NO: 3190777 - DNA, 25 bp, Homo sapien
cagttcaacgagaatgaagccatcc

SEQ ID NO: 3190778 - DNA, 25 bp, Homo sapien
acacgtagcgactccgaagatcagc

SEQ ID NO: 3190779 - DNA, 25 bp, Homo sapien
acggtggatgcggacgccgggagga

SEQ ID NO: 3190780 - DNA, 25 bp, Homo sapien
ctacggtggatgcggacgccgggag

SEQ ID NO: 3190781 - DNA, 25 bp, Homo sapien
ggtggatgcggacgccgggaggagg

SEQ ID NO: 3190782 - DNA, 25 bp, Homo sapien
tggatgcggacgccgggaggaggag

SEQ ID NO: 3190783 - DNA, 25 bp, Homo sapien
gaggagatttccctgtagacgagta

SEQ ID NO: 3190784 - DNA, 25 bp, Homo sapien
gagaggtcgcgctctttcgcacact

SEQ ID NO: 3190785 - DNA, 25 bp, Homo sapien
tgatggacaaacgtgcgggcactaa

SEQ ID NO: 3190786 - DNA, 25 bp, Homo sapien
acttcattcaaagcaaggcggccca

SEQ ID NO: 3190787 - DNA, 25 bp, Homo sapien
agactacacagggaacgaaggagta

SEQ ID NO: 3190788 - DNA, 25 bp, Homo sapien
taaactttccacttctgaggtagta

SEQ ID NO: 3190789 - DNA, 25 bp, Homo sapien
tcttcctgagttaatgaagaaacag

SEQ ID NO: 3190790 - DNA, 25 bp, Homo sapien
gagcctctgattcacacatcagtgc

SEQ ID NO: 3190791 - DNA, 25 bp, Homo sapien
ttgtagctgttggttgctgcttcat

SEQ ID NO: 3190792 - DNA, 25 bp, Homo sapien
tccaagcccagtctaatataaactg

SEQ ID NO: 3190793 - DNA, 25 bp, Homo sapien
tctgcataagattgtccaccaccac

SEQ ID NO: 3190794 - DNA, 25 bp, Homo sapien
taaactgaacgattgctagcatttc

SEQ ID NO: 3190795 - DNA, 25 bp, Homo sapien
caacataaatctgcataagattgtc

SEQ ID NO: 3190796 - DNA, 25 bp, Homo sapien
tgcaggggccatgccaattttcttt

SEQ ID NO: 3190797 - DNA, 25 bp, Homo sapien
caattttctttgtatcgttccaact

SEQ ID NO: 3190798 - DNA, 25 bp, Homo sapien
actttagtatatgcactgctgaagt

SEQ ID NO: 3190799 - DNA, 25 bp, Homo sapien
caactttagtatatgcactgctgaa

SEQ ID NO: 3190800 - DNA, 25 bp, Homo sapien
tcaggatcacctctctgaccctcca

SEQ ID NO: 3190801 - DNA, 25 bp, Homo sapien
gcttcttcaggatcacctctctgac

SEQ ID NO: 3190802 - DNA, 25 bp, Homo sapien
ctggcttcttcaggatcacctctct

SEQ ID NO: 3190803 - DNA, 25 bp, Homo sapien
caaaaggcgttggctggcttcttca

SEQ ID NO: 3190804 - DNA, 25 bp, Homo sapien
tcaggcaccggaacccacatacagg

SEQ ID NO: 3190805 - DNA, 25 bp, Homo sapien
ttcaggcaccggaacccacatacag

SEQ ID NO: 3190806 - DNA, 25 bp, Homo sapien
cttcaggcaccggaacccacataca

SEQ ID NO: 3190807 - DNA, 25 bp, Homo sapien
ggccctgcactccttgatgttgatg

SEQ ID NO: 3190808 - DNA, 25 bp, Homo sapien
gaagagcaccggcatgatggtttcc

SEQ ID NO: 3190809 - DNA, 25 bp, Homo sapien
gatggtttccgctgtgttcttttcg

SEQ ID NO: 3190810 - DNA, 25 bp, Homo sapien
ttgccatagtcggtggtggccctgc

SEQ ID NO: 3190811 - DNA, 25 bp, Homo sapien
tgtctgcttctccacaagagcatgt

SEQ ID NO: 3190812 - DNA, 25 bp, Homo sapien
tgctggaagtagtccaccggtggac

SEQ ID NO: 3190813 - DNA, 25 bp, Homo sapien
gagagcaggctctccagtttaggga

SEQ ID NO: 3190814 - DNA, 25 bp, Homo sapien
gagctggaaagcctgctgatgccag

SEQ ID NO: 3190815 - DNA, 25 bp, Homo sapien
gatggtgggatacttcaaggcagac

SEQ ID NO: 3190816 - DNA, 25 bp, Homo sapien
agcccctggatggtggaccacttgg

SEQ ID NO: 3190817 - DNA, 25 bp, Homo sapien
caaggcagacagtatcttggccact

SEQ ID NO: 3190818 - DNA, 25 bp, Homo sapien
ttcagatacaccagggatgacgcac

SEQ ID NO: 3190819 - DNA, 25 bp, Homo sapien
ctagcaggtcttgtagagctccttg

SEQ ID NO: 3190820 - DNA, 25 bp, Homo sapien
tcttgtagagctccttggcaatcac

SEQ ID NO: 3190821 - DNA, 25 bp, Homo sapien
caggtcttgtagagctccttggcaa

SEQ ID NO: 3190822 - DNA, 25 bp, Homo sapien
ggtcttgtagagctccttggcaatc

SEQ ID NO: 3190823 - DNA, 25 bp, Homo sapien
tgcctctcgaagacaagcaggaagg

SEQ ID NO: 3190824 - DNA, 25 bp, Homo sapien
ttttccggcaaagggtagatcttgc

SEQ ID NO: 3190825 - DNA, 25 bp, Homo sapien
tctttgacgttgtccaggaggcctt

SEQ ID NO: 3190826 - DNA, 25 bp, Homo sapien
tgagcttcttcacgggacgtttttc

SEQ ID NO: 3190827 - DNA, 25 bp, Homo sapien
gcacaatggctaagtcaagatggaa

SEQ ID NO: 3190828 - DNA, 25 bp, Homo sapien
aaggagactgatgccgctgcctttc

SEQ ID NO: 3190829 - DNA, 25 bp, Homo sapien
gatgccgctgcctttcagtggtttc

SEQ ID NO: 3190830 - DNA, 25 bp, Homo sapien
caaggtggttgcttgcacaatggct

SEQ ID NO: 3190831 - DNA, 25 bp, Homo sapien
tccacgtctactgccagttcaagtt

SEQ ID NO: 3190832 - DNA, 25 bp, Homo sapien
tactgccagttcaagttcaggctct

SEQ ID NO: 3190833 - DNA, 25 bp, Homo sapien
gtctactgccagttcaagttcaggc

SEQ ID NO: 3190834 - DNA, 25 bp, Homo sapien
ctccacgtctactgccagttcaagt

SEQ ID NO: 3190835 - DNA, 25 bp, Homo sapien
tctgcctgcaggatagtcactgtcc

SEQ ID NO: 3190836 - DNA, 25 bp, Homo sapien
ccaacaagtcgaaccagccactaag

SEQ ID NO: 3190837 - DNA, 25 bp, Homo sapien
tgcctgcaggatagtcactgtcctt

SEQ ID NO: 3190838 - DNA, 25 bp, Homo sapien
ccagccactaagtcctggacattct

SEQ ID NO: 3190839 - DNA, 25 bp, Homo sapien
ttaaccacttcccataaatcaggca

SEQ ID NO: 3190840 - DNA, 25 bp, Homo sapien
aaccacttcccataaatcaggcatt

SEQ ID NO: 3190841 - DNA, 25 bp, Homo sapien
taaccacttcccataaatcaggcat

SEQ ID NO: 3190842 - DNA, 25 bp, Homo sapien
tcagactagttcatacgggctcaca

SEQ ID NO: 3190843 - DNA, 25 bp, Homo sapien
tcatacgggctcacaagaacaatgt

SEQ ID NO: 3190844 - DNA, 25 bp, Homo sapien
tgtagctgtctacaatgttagctgc

SEQ ID NO: 3190845 - DNA, 25 bp, Homo sapien
ggctcacaagaacaatgtagctgtc

SEQ ID NO: 3190846 - DNA, 25 bp, Homo sapien
tttgtctggtagtctgagcaattgc

SEQ ID NO: 3190847 - DNA, 25 bp, Homo sapien
tccttcttccgagttgaaagaaatc

SEQ ID NO: 3190848 - DNA, 25 bp, Homo sapien
ccgagttgaaagaaatccgcaaagt

SEQ ID NO: 3190849 - DNA, 25 bp, Homo sapien
gggccaacttggcttttgtctggta

SEQ ID NO: 3190850 - DNA, 25 bp, Homo sapien
ctgcagtggtctttgggtttggcct

SEQ ID NO: 3190851 - DNA, 25 bp, Homo sapien
ggctgcagtggtctttgggtttggc

SEQ ID NO: 3190852 - DNA, 25 bp, Homo sapien
tgggctgcagtggtctttgggtttg

SEQ ID NO: 3190853 - DNA, 25 bp, Homo sapien
gcagtggtctttgggtttggccttg

SEQ ID NO: 3190854 - DNA, 25 bp, Homo sapien
ctggactgctgatagaagtttgaac

SEQ ID NO: 3190855 - DNA, 25 bp, Homo sapien
tgtacccttacaccaacatcaatgt

SEQ ID NO: 3190856 - DNA, 25 bp, Homo sapien
tagtcctgttttgcgaactctgaag

SEQ ID NO: 3190857 - DNA, 25 bp, Homo sapien
gcaccttcagaaggttgtaccctta

SEQ ID NO: 3190858 - DNA, 25 bp, Homo sapien
aaaattcgagctttgggattcgaca

SEQ ID NO: 3190859 - DNA, 25 bp, Homo sapien
tgcacaatccgatggagaaatggtt

SEQ ID NO: 3190860 - DNA, 25 bp, Homo sapien
gatgtgccgtcaagcattgtcgtgg

SEQ ID NO: 3190861 - DNA, 25 bp, Homo sapien
tgtagaggatcataaccggcagcag

SEQ ID NO: 3190862 - DNA, 25 bp, Homo sapien
caattgtggcaataatcaatagttt

SEQ ID NO: 3190863 - DNA, 25 bp, Homo sapien
taacaggatctgcaattgtggcaat

SEQ ID NO: 3190864 - DNA, 25 bp, Homo sapien
caggatctgcaattgtggcaataat

SEQ ID NO: 3190865 - DNA, 25 bp, Homo sapien
tgcaattgtggcaataatcaatagt

SEQ ID NO: 3190866 - DNA, 25 bp, Homo sapien
ttaaagagctatccacagactctag

SEQ ID NO: 3190867 - DNA, 25 bp, Homo sapien
aaagagctatccacagactctaggt

SEQ ID NO: 3190868 - DNA, 25 bp, Homo sapien
gagctatccacagactctaggttcc

SEQ ID NO: 3190869 - DNA, 25 bp, Homo sapien
agagctatccacagactctaggttc

SEQ ID NO: 3190870 - DNA, 25 bp, Homo sapien
atccctatgtggaacacttccccat

SEQ ID NO: 3190871 - DNA, 25 bp, Homo sapien
aatccctatgtggaacacttcccca

SEQ ID NO: 3190872 - DNA, 25 bp, Homo sapien
tccctatgtggaacacttccccatt

SEQ ID NO: 3190873 - DNA, 25 bp, Homo sapien
tgattaccaattttctgttcagtct

SEQ ID NO: 3190874 - DNA, 25 bp, Homo sapien
aagcatcattgatagactggtccac

SEQ ID NO: 3190875 - DNA, 25 bp, Homo sapien
cttcccatacttattagaaagatgg

SEQ ID NO: 3190876 - DNA, 25 bp, Homo sapien
aatatgtgcagttcaggcagatgca

SEQ ID NO: 3190877 - DNA, 25 bp, Homo sapien
ctatggtggcatgcaaggtattact

SEQ ID NO: 3190878 - DNA, 25 bp, Homo sapien
tatggtggcatgcaaggtattactt

SEQ ID NO: 3190879 - DNA, 25 bp, Homo sapien
tggcatgcaaggtattacttctcat

SEQ ID NO: 3190880 - DNA, 25 bp, Homo sapien
ggtggcatgcaaggtattacttctc

SEQ ID NO: 3190881 - DNA, 25 bp, Homo sapien
agggatgacttctgattgaaggtct

SEQ ID NO: 3190882 - DNA, 25 bp, Homo sapien
ttgaaggtcttgctacactcattac

SEQ ID NO: 3190883 - DNA, 25 bp, Homo sapien
tctgattgaaggtcttgctacactc

SEQ ID NO: 3190884 - DNA, 25 bp, Homo sapien
ctatgacagcattgaagggatgact

SEQ ID NO: 3190885 - DNA, 25 bp, Homo sapien
tttcaagttgtgatctgcaactgta

SEQ ID NO: 3190886 - DNA, 25 bp, Homo sapien
ttgtgatctgcaactgtaaactttg

SEQ ID NO: 3190887 - DNA, 25 bp, Homo sapien
ttctcctatgtgtttcaagttgtga

SEQ ID NO: 3190888 - DNA, 25 bp, Homo sapien
ctcctatgtgtttcaagttgtgatc

SEQ ID NO: 3190889 - DNA, 25 bp, Homo sapien
aggtttctttccattatgaaatgcc

SEQ ID NO: 3190890 - DNA, 25 bp, Homo sapien
tgttgtgcaaggcatgaatcatgcc

SEQ ID NO: 3190891 - DNA, 25 bp, Homo sapien
caaggcatgaatcatgccagaaaac

SEQ ID NO: 3190892 - DNA, 25 bp, Homo sapien
tacaagacctgaattttgagcaaag

SEQ ID NO: 3190893 - DNA, 25 bp, Homo sapien
gtgttgactgcccactaaaggcttt

SEQ ID NO: 3190894 - DNA, 25 bp, Homo sapien
tgcaaggtttgattgttgattagac

SEQ ID NO: 3190895 - DNA, 25 bp, Homo sapien
caaggtttgattgttgattagacac

SEQ ID NO: 3190896 - DNA, 25 bp, Homo sapien
catggattgcttgatgatgaataag

SEQ ID NO: 3190897 - DNA, 25 bp, Homo sapien
gcaaggtatgatcgatatctgaaaa

SEQ ID NO: 3190898 - DNA, 25 bp, Homo sapien
caaggtatgatcgatatctgaaaaa

SEQ ID NO: 3190899 - DNA, 25 bp, Homo sapien
ctgcaaggtatgatcgatatctgaa

SEQ ID NO: 3190900 - DNA, 25 bp, Homo sapien
aggtatgatcgatatctgaaaaatt

SEQ ID NO: 3190901 - DNA, 25 bp, Homo sapien
gcttgactgaagaccttgccgcaat

SEQ ID NO: 3190902 - DNA, 25 bp, Homo sapien
agcttgactgaagaccttgccgcaa

SEQ ID NO: 3190903 - DNA, 25 bp, Homo sapien
actgaagaccttgccgcaatcatca

SEQ ID NO: 3190904 - DNA, 25 bp, Homo sapien
tgactgaagaccttgccgcaatcat

SEQ ID NO: 3190905 - DNA, 25 bp, Homo sapien
taacagtccaccaatcagtatccgg

SEQ ID NO: 3190906 - DNA, 25 bp, Homo sapien
ttaaaacggatgaagcatccctgtg

SEQ ID NO: 3190907 - DNA, 25 bp, Homo sapien
catcagtaacagtccaccaatcagt

SEQ ID NO: 3190908 - DNA, 25 bp, Homo sapien
caccaatcagtatccggaggatcca

SEQ ID NO: 3190909 - DNA, 25 bp, Homo sapien
tgggatacccagactgatgctcata

SEQ ID NO: 3190910 - DNA, 25 bp, Homo sapien
gccatttggatcactctagagagaa

SEQ ID NO: 3190911 - DNA, 25 bp, Homo sapien
taatgtctctcaccactaatccctg

SEQ ID NO: 3190912 - DNA, 25 bp, Homo sapien
taatccctgaatgccaggagatgtc

SEQ ID NO: 3190913 - DNA, 25 bp, Homo sapien
ctcaggatgaatgcggaaacaaggg

SEQ ID NO: 3190914 - DNA, 25 bp, Homo sapien
ggaaggaatcccctgatttggcagc

SEQ ID NO: 3190915 - DNA, 25 bp, Homo sapien
tgcactgcagcgagttaaatataaa

SEQ ID NO: 3190916 - DNA, 25 bp, Homo sapien
tataaaacagggcttcgcttatcag

SEQ ID NO: 3190917 - DNA, 25 bp, Homo sapien
tagagccctctctctccgcaaagtt

SEQ ID NO: 3190918 - DNA, 25 bp, Homo sapien
gagccctctctctccgcaaagttca

SEQ ID NO: 3190919 - DNA, 25 bp, Homo sapien
agccctctctctccgcaaagttcat

SEQ ID NO: 3190920 - DNA, 25 bp, Homo sapien
cttagagccctctctctccgcaaag

SEQ ID NO: 3190921 - DNA, 25 bp, Homo sapien
acatgtttcgtttgaatgcagtatc

SEQ ID NO: 3190922 - DNA, 25 bp, Homo sapien
acagagaatggccacatgtttcgtt

SEQ ID NO: 3190923 - DNA, 25 bp, Homo sapien
agcccacggcaagtcccactattaa

SEQ ID NO: 3190924 - DNA, 25 bp, Homo sapien
ggcaagtcccactattaatcctaca

SEQ ID NO: 3190925 - DNA, 25 bp, Homo sapien
ggcccgccgtccccgctggagtcac

SEQ ID NO: 3190926 - DNA, 25 bp, Homo sapien
cggcccgccgtccccgctggagtca

SEQ ID NO: 3190927 - DNA, 25 bp, Homo sapien
aggtgggaaggagctggcgcagtgc

SEQ ID NO: 3190928 - DNA, 25 bp, Homo sapien
caggtgggaaggagctggcgcagtg

SEQ ID NO: 3190929 - DNA, 25 bp, Homo sapien
ggacctgaggggctggccgtggaag

SEQ ID NO: 3190930 - DNA, 25 bp, Homo sapien
gaggacctgaggggctggccgtgga

SEQ ID NO: 3190931 - DNA, 25 bp, Homo sapien
ctgaggggctggccgtggaagaagg

SEQ ID NO: 3190932 - DNA, 25 bp, Homo sapien
acctgaggggctggccgtggaagaa

SEQ ID NO: 3190933 - DNA, 25 bp, Homo sapien
tcagctccgggagccgggtgatcct

SEQ ID NO: 3190934 - DNA, 25 bp, Homo sapien
tccgttctccgtgtaggtggttcta

SEQ ID NO: 3190935 - DNA, 25 bp, Homo sapien
cttcacgtgcaggtcgtagtggact

SEQ ID NO: 3190936 - DNA, 25 bp, Homo sapien
ggttgacgaagtccggcagtcgaaa

SEQ ID NO: 3190937 - DNA, 25 bp, Homo sapien
catatttgaaagtgctccgtattct

SEQ ID NO: 3190938 - DNA, 25 bp, Homo sapien
atttgaaagtgctccgtattctttg

SEQ ID NO: 3190939 - DNA, 25 bp, Homo sapien
tggcatatttgaaagtgctccgtat

SEQ ID NO: 3190940 - DNA, 25 bp, Homo sapien
tttgaaagtgctccgtattctttgg

SEQ ID NO: 3190941 - DNA, 25 bp, Homo sapien
ccaaaggtatggtcaccaaagtcag

SEQ ID NO: 3190942 - DNA, 25 bp, Homo sapien
ctacatcaaacaccaaaggtatggt

SEQ ID NO: 3190943 - DNA, 25 bp, Homo sapien
tcaaacaccaaaggtatggtcacca

SEQ ID NO: 3190944 - DNA, 25 bp, Homo sapien
ctggtgtagcggaacattggcttct

SEQ ID NO: 3190945 - DNA, 25 bp, Homo sapien
gactgactgaattacacactgtatc

SEQ ID NO: 3190946 - DNA, 25 bp, Homo sapien
gaccataatatttcagagtactgca

SEQ ID NO: 3190947 - DNA, 25 bp, Homo sapien
gctgattcgactggcagtagggcaa

SEQ ID NO: 3190948 - DNA, 25 bp, Homo sapien
aacagactcgtgctcagatatttgc

SEQ ID NO: 3190949 - DNA, 25 bp, Homo sapien
tttacagagtcaaattgatgtacag

SEQ ID NO: 3190950 - DNA, 25 bp, Homo sapien
acttctcaaaagttgttcgagtcca

SEQ ID NO: 3190951 - DNA, 25 bp, Homo sapien
tattctctttacagagtcaaattga

SEQ ID NO: 3190952 - DNA, 25 bp, Homo sapien
caaaagttgttcgagtccatttatc

SEQ ID NO: 3190953 - DNA, 25 bp, Homo sapien
gtgagggaaggttgaagggacaaga

SEQ ID NO: 3190954 - DNA, 25 bp, Homo sapien
tgagggaaggttgaagggacaagac

SEQ ID NO: 3190955 - DNA, 25 bp, Homo sapien
gatcaacagagccaaacaatcagag

SEQ ID NO: 3190956 - DNA, 25 bp, Homo sapien
tcagagaatatatagctacagccca

SEQ ID NO: 3190957 - DNA, 25 bp, Homo sapien
gattttgaaagcatcctcccttgtg

SEQ ID NO: 3190958 - DNA, 25 bp, Homo sapien
tgtcgtttaaagctccaacatggtt

SEQ ID NO: 3190959 - DNA, 25 bp, Homo sapien
gctctggctggacataaattgtaag

SEQ ID NO: 3190960 - DNA, 25 bp, Homo sapien
catattcggctgtgtgcttttgctc

SEQ ID NO: 3190961 - DNA, 25 bp, Homo sapien
gtttgcagcatattcggctgtgtgc

SEQ ID NO: 3190962 - DNA, 25 bp, Homo sapien
cacacttttagttatgtttgcagca

SEQ ID NO: 3190963 - DNA, 25 bp, Homo sapien
tctgtacgtgatgagtccccagttc

SEQ ID NO: 3190964 - DNA, 25 bp, Homo sapien
tgcacaagttcatgggcaaccacag

SEQ ID NO: 3190965 - DNA, 25 bp, Homo sapien
cagtggccaccctctgttggtttga

SEQ ID NO: 3190966 - DNA, 25 bp, Homo sapien
gattccttagggtcataaagcaggt

SEQ ID NO: 3190967 - DNA, 25 bp, Homo sapien
aaacaagctgattcagtgctaagat

SEQ ID NO: 3190968 - DNA, 25 bp, Homo sapien
aaaaaacaagctgattcagtgctaa

SEQ ID NO: 3190969 - DNA, 25 bp, Homo sapien
acaagctgattcagtgctaagattc

SEQ ID NO: 3190970 - DNA, 25 bp, Homo sapien
taaaaaaacaagctgattcagtgct

SEQ ID NO: 3190971 - DNA, 25 bp, Homo sapien
tctgcatggtttactcccagaaact

SEQ ID NO: 3190972 - DNA, 25 bp, Homo sapien
aagtcttcccaccagtccatggtca

SEQ ID NO: 3190973 - DNA, 25 bp, Homo sapien
gcatggtttactcccagaaactcaa

SEQ ID NO: 3190974 - DNA, 25 bp, Homo sapien
gtttctgcatggtttactcccagaa

SEQ ID NO: 3190975 - DNA, 25 bp, Homo sapien
taattggatgcgaagacatcaaaga

SEQ ID NO: 3190976 - DNA, 25 bp, Homo sapien
gaacaggtaatacatcttcaagtaa

SEQ ID NO: 3190977 - DNA, 25 bp, Homo sapien
gtaatacatcttcaagtaacatttg

SEQ ID NO: 3190978 - DNA, 25 bp, Homo sapien
gcgaagacatcaaagaatcatcctc

SEQ ID NO: 3190979 - DNA, 25 bp, Homo sapien
gctataggatattccatcaaaaaca

SEQ ID NO: 3190980 - DNA, 25 bp, Homo sapien
agatgttatttcatcaggggttgtc

SEQ ID NO: 3190981 - DNA, 25 bp, Homo sapien
cttgctataggatattccatcaaaa

SEQ ID NO: 3190982 - DNA, 25 bp, Homo sapien
aggatattccatcaaaaacagatgt

SEQ ID NO: 3190983 - DNA, 25 bp, Homo sapien
caagcattctcaaaatagaagatcc

SEQ ID NO: 3190984 - DNA, 25 bp, Homo sapien
gtttttgcattcttgaattggtatt

SEQ ID NO: 3190985 - DNA, 25 bp, Homo sapien
aagtttttgcattcttgaattggta

SEQ ID NO: 3190986 - DNA, 25 bp, Homo sapien
cagaagtttttgcattcttgaattg

SEQ ID NO: 3190987 - DNA, 25 bp, Homo sapien
gaagtttttgcattcttgaattggt

SEQ ID NO: 3190988 - DNA, 25 bp, Homo sapien
gaagggttagctcttgggtccaaca

SEQ ID NO: 3190989 - DNA, 25 bp, Homo sapien
acttctttcactggtagcctacttg

SEQ ID NO: 3190990 - DNA, 25 bp, Homo sapien
caccgttcacgttaagcacaggata

SEQ ID NO: 3190991 - DNA, 25 bp, Homo sapien
gtccaacaaaaagcgtttctgtgtg

SEQ ID NO: 3190992 - DNA, 25 bp, Homo sapien
acaagcccactgtattttttcctgg

SEQ ID NO: 3190993 - DNA, 25 bp, Homo sapien
tcctggagccattgccagatttctg

SEQ ID NO: 3190994 - DNA, 25 bp, Homo sapien
tggagccattgccagatttctgaga

SEQ ID NO: 3190995 - DNA, 25 bp, Homo sapien
tttcctggagccattgccagatttc

SEQ ID NO: 3190996 - DNA, 25 bp, Homo sapien
cagggagtatacagacactccctga

SEQ ID NO: 3190997 - DNA, 25 bp, Homo sapien
tggtgctgccatgtaaactcacatt

SEQ ID NO: 3190998 - DNA, 25 bp, Homo sapien
tcttctttccccaatgccaatctga

SEQ ID NO: 3190999 - DNA, 25 bp, Homo sapien
tatatacctcacttgcactggtctg

SEQ ID NO: 3191000 - DNA, 25 bp, Homo sapien
actggtctgctgaattggtgctgcc

SEQ ID NO: 3191001 - DNA, 25 bp, Homo sapien
gtcatttttgtacaccttggatacc

SEQ ID NO: 3191002 - DNA, 25 bp, Homo sapien
tgcctacaatcaatacctgggtctc

SEQ ID NO: 3191003 - DNA, 25 bp, Homo sapien
atcaatacctgggtctctctgacag

SEQ ID NO: 3191004 - DNA, 25 bp, Homo sapien
ttccctgcctacaatcaatacctgg

SEQ ID NO: 3191005 - DNA, 25 bp, Homo sapien
tgttatattatcttcagtccattta

SEQ ID NO: 3191006 - DNA, 25 bp, Homo sapien
ttgttatattatcttcagtccattt

SEQ ID NO: 3191007 - DNA, 25 bp, Homo sapien
actagggtagatgaattattcacgc

SEQ ID NO: 3191008 - DNA, 25 bp, Homo sapien
ccaaatattctaaggagtacataac

SEQ ID NO: 3191009 - DNA, 25 bp, Homo sapien
ttcacgctttcaaacttgtaaacag

SEQ ID NO: 3191010 - DNA, 25 bp, Homo sapien
caaacagctgccgagatattcttcc

SEQ ID NO: 3191011 - DNA, 25 bp, Homo sapien
ctcactcatgtagaatttctctttc

SEQ ID NO: 3191012 - DNA, 25 bp, Homo sapien
tcatgtagaatttctctttctttgt

SEQ ID NO: 3191013 - DNA, 25 bp, Homo sapien
tgtagaatttctctttctttgtcat

SEQ ID NO: 3191014 - DNA, 25 bp, Homo sapien
tcactcatgtagaatttctctttct

SEQ ID NO: 3191015 - DNA, 25 bp, Homo sapien
aggattagaggagttcaaagtgatt

SEQ ID NO: 3191016 - DNA, 25 bp, Homo sapien
ctaggattagaggagttcaaagtga

SEQ ID NO: 3191017 - DNA, 25 bp, Homo sapien
taggattagaggagttcaaagtgat

SEQ ID NO: 3191018 - DNA, 25 bp, Homo sapien
ggattagaggagttcaaagtgattc

SEQ ID NO: 3191019 - DNA, 25 bp, Homo sapien
tttacacgataaaacccaatatgat

SEQ ID NO: 3191020 - DNA, 25 bp, Homo sapien
cttgtggttcaaggagagcgctgta

SEQ ID NO: 3191021 - DNA, 25 bp, Homo sapien
cccaatatgatctgggtttattttg

SEQ ID NO: 3191022 - DNA, 25 bp, Homo sapien
tatcgagtcccaagttgctacttca

SEQ ID NO: 3191023 - DNA, 25 bp, Homo sapien
gacttgcacgatctgctgaagaaaa

SEQ ID NO: 3191024 - DNA, 25 bp, Homo sapien
taagacttgcacgatctgctgaaga

SEQ ID NO: 3191025 - DNA, 25 bp, Homo sapien
catcaataagacttgcacgatctgc

SEQ ID NO: 3191026 - DNA, 25 bp, Homo sapien
tcaataagacttgcacgatctgctg

SEQ ID NO: 3191027 - DNA, 25 bp, Homo sapien
caaagccaccttataatctagaagt

SEQ ID NO: 3191028 - DNA, 25 bp, Homo sapien
ctcaatcataggatatagctcttta

SEQ ID NO: 3191029 - DNA, 25 bp, Homo sapien
catgctaatgatgtaggttacagct

SEQ ID NO: 3191030 - DNA, 25 bp, Homo sapien
gagatacttggtcaagttcaaagcc

SEQ ID NO: 3191031 - DNA, 25 bp, Homo sapien
cagagaatctgcaataggcttcact

SEQ ID NO: 3191032 - DNA, 25 bp, Homo sapien
ctgcaataggcttcacttgaccttg

SEQ ID NO: 3191033 - DNA, 25 bp, Homo sapien
gtgacatggtctccagcatcattcc

SEQ ID NO: 3191034 - DNA, 25 bp, Homo sapien
agcatcattccatcccagagaatct

SEQ ID NO: 3191035 - DNA, 25 bp, Homo sapien
aatccagggccttaagcacttttca

SEQ ID NO: 3191036 - DNA, 25 bp, Homo sapien
cacaaatccagggccttaagcactt

SEQ ID NO: 3191037 - DNA, 25 bp, Homo sapien
acaaatccagggccttaagcacttt

SEQ ID NO: 3191038 - DNA, 25 bp, Homo sapien
caaatccagggccttaagcactttt

SEQ ID NO: 3191039 - DNA, 25 bp, Homo sapien
actgctcaaataacgaggaagcatt

SEQ ID NO: 3191040 - DNA, 25 bp, Homo sapien
atcttgcacgcaaaccctaacacgg

SEQ ID NO: 3191041 - DNA, 25 bp, Homo sapien
taacgaggaagcattgttcaaggct

SEQ ID NO: 3191042 - DNA, 25 bp, Homo sapien
gcacgcaaaccctaacacggaggaa

SEQ ID NO: 3191043 - DNA, 25 bp, Homo sapien
cagagttctgcatcccataccgata

SEQ ID NO: 3191044 - DNA, 25 bp, Homo sapien
tcactgatgctaatccatacagcag

SEQ ID NO: 3191045 - DNA, 25 bp, Homo sapien
caagagtgtagttccatgaaatctc

SEQ ID NO: 3191046 - DNA, 25 bp, Homo sapien
aaagagtaacgttcttcactgatgc

SEQ ID NO: 3191047 - DNA, 25 bp, Homo sapien
aataaggttcgtgtccttgagcaaa

SEQ ID NO: 3191048 - DNA, 25 bp, Homo sapien
catcctgagttttaataaggttcgt

SEQ ID NO: 3191049 - DNA, 25 bp, Homo sapien
cccagttgagttgtatccaattcca

SEQ ID NO: 3191050 - DNA, 25 bp, Homo sapien
gaatgactgtaaacacatcctgagt

SEQ ID NO: 3191051 - DNA, 25 bp, Homo sapien
cagcagaccatcatcagatcatccc

SEQ ID NO: 3191052 - DNA, 25 bp, Homo sapien
acagcagaccatcatcagatcatcc

SEQ ID NO: 3191053 - DNA, 25 bp, Homo sapien
aacagcagaccatcatcagatcatc

SEQ ID NO: 3191054 - DNA, 25 bp, Homo sapien
aaacagcagaccatcatcagatcat

SEQ ID NO: 3191055 - DNA, 25 bp, Homo sapien
tgagaactaattacccacacatgcc

SEQ ID NO: 3191056 - DNA, 25 bp, Homo sapien
cagacaggatactggcctggcctca

SEQ ID NO: 3191057 - DNA, 25 bp, Homo sapien
cagaagcacgctaacaacttggacc

SEQ ID NO: 3191058 - DNA, 25 bp, Homo sapien
tcaggagtctaaccatagtgagaac

SEQ ID NO: 3191059 - DNA, 25 bp, Homo sapien
gaaattgcttgcctagacttcctgg

SEQ ID NO: 3191060 - DNA, 25 bp, Homo sapien
tcatagctagatgtccacaggtaac

SEQ ID NO: 3191061 - DNA, 25 bp, Homo sapien
tgagcgccctgctagagactgtttc

SEQ ID NO: 3191062 - DNA, 25 bp, Homo sapien
gtttctcaggctctctcatagctag

SEQ ID NO: 3191063 - DNA, 25 bp, Homo sapien
ttcggccaaggtttctgttattgag

SEQ ID NO: 3191064 - DNA, 25 bp, Homo sapien
acaattcggccaaggtttctgttat

SEQ ID NO: 3191065 - DNA, 25 bp, Homo sapien
gctctgctattgtgacaattcggcc

SEQ ID NO: 3191066 - DNA, 25 bp, Homo sapien
attgtgacaattcggccaaggtttc

SEQ ID NO: 3191067 - DNA, 25 bp, Homo sapien
ctccagcttgtggatattttgcaaa

SEQ ID NO: 3191068 - DNA, 25 bp, Homo sapien
gctccagcttgtggatattttgcaa

SEQ ID NO: 3191069 - DNA, 25 bp, Homo sapien
ttttagccactctatattgtttttc

SEQ ID NO: 3191070 - DNA, 25 bp, Homo sapien
aggaatccctgagtatattaagtac

SEQ ID NO: 3191071 - DNA, 25 bp, Homo sapien
tatgaagtacacttagaaggaatcc

SEQ ID NO: 3191072 - DNA, 25 bp, Homo sapien
tattggtccctcaagtactggtatt

SEQ ID NO: 3191073 - DNA, 25 bp, Homo sapien
tctccatcgtgcttgtaaattaggc

SEQ ID NO: 3191074 - DNA, 25 bp, Homo sapien
gatctaggaggtatcaagtgccata

SEQ ID NO: 3191075 - DNA, 25 bp, Homo sapien
cacacttagattgctaggtgaggtc

SEQ ID NO: 3191076 - DNA, 25 bp, Homo sapien
tttcagagtacatgattagggcaca

SEQ ID NO: 3191077 - DNA, 25 bp, Homo sapien
gagcagagttaagcactatgttccc

SEQ ID NO: 3191078 - DNA, 25 bp, Homo sapien
gtttttctggtaagttatgatgtta

SEQ ID NO: 3191079 - DNA, 25 bp, Homo sapien
tttaagttaatcttatgaggatagt

SEQ ID NO: 3191080 - DNA, 25 bp, Homo sapien
tcataatatgtcctacttgaaacaa

SEQ ID NO: 3191081 - DNA, 25 bp, Homo sapien
catagacttcaagtgctggttctga

SEQ ID NO: 3191082 - DNA, 25 bp, Homo sapien
tcttgtaggcaagttgaaatctgtt

SEQ ID NO: 3191083 - DNA, 25 bp, Homo sapien
taggcaagttgaaatctgttttatt

SEQ ID NO: 3191084 - DNA, 25 bp, Homo sapien
cttgtaggcaagttgaaatctgttt

SEQ ID NO: 3191085 - DNA, 25 bp, Homo sapien
tgtaggcaagttgaaatctgtttta

SEQ ID NO: 3191086 - DNA, 25 bp, Homo sapien
gaaacacggagaacatggcaaacca

SEQ ID NO: 3191087 - DNA, 25 bp, Homo sapien
gaattcaggctcatagtgcggcctc

SEQ ID NO: 3191088 - DNA, 25 bp, Homo sapien
tatgctgcagtaacagacaacctca

SEQ ID NO: 3191089 - DNA, 25 bp, Homo sapien
ctggaatactgctgcatctaggagc

SEQ ID NO: 3191090 - DNA, 25 bp, Homo sapien
tccccctgcactgtcatgggaagaa

SEQ ID NO: 3191091 - DNA, 25 bp, Homo sapien
tgggaagaagaatagcctcttctct

SEQ ID NO: 3191092 - DNA, 25 bp, Homo sapien
tcatttccttccgaatctcatacga

SEQ ID NO: 3191093 - DNA, 25 bp, Homo sapien
tacgactgcgcatcatcagcggaac

SEQ ID NO: 3191094 - DNA, 25 bp, Homo sapien
caataagagggagcagcaataggca

SEQ ID NO: 3191095 - DNA, 25 bp, Homo sapien
caaatggcttgctcagacaccagga

SEQ ID NO: 3191096 - DNA, 25 bp, Homo sapien
tctggctgaatgctcacgtggaggc

SEQ ID NO: 3191097 - DNA, 25 bp, Homo sapien
tatcagtagcagtggtgaggcaacc

SEQ ID NO: 3191098 - DNA, 25 bp, Homo sapien
catcctagagggaacggcgctctga

SEQ ID NO: 3191099 - DNA, 25 bp, Homo sapien
gaagcctgaggcttcgtcctcgtcc

SEQ ID NO: 3191100 - DNA, 25 bp, Homo sapien
tccaaggccaagtgcgccatttatt

SEQ ID NO: 3191101 - DNA, 25 bp, Homo sapien
acgctggacgcacggaatcctgaga

SEQ ID NO: 3191102 - DNA, 25 bp, Homo sapien
cctcgaggcagaaatctcggtgggc

SEQ ID NO: 3191103 - DNA, 25 bp, Homo sapien
ctgctccgcaaggtcctcgaggcag

SEQ ID NO: 3191104 - DNA, 25 bp, Homo sapien
agaaatctcggtgggcggaacccag

SEQ ID NO: 3191105 - DNA, 25 bp, Homo sapien
tgggcggaacccagttcgatgctgt

SEQ ID NO: 3191106 - DNA, 25 bp, Homo sapien
agaagcctcgtgtcccgcacgctgg

SEQ ID NO: 3191107 - DNA, 25 bp, Homo sapien
tacagtctcgtctttcaagtgaagg

SEQ ID NO: 3191108 - DNA, 25 bp, Homo sapien
tttccatggagacgtgaccaagtcc

SEQ ID NO: 3191109 - DNA, 25 bp, Homo sapien
gggttcactggaccccgccaagagc

SEQ ID NO: 3191110 - DNA, 25 bp, Homo sapien
gcctgtatagtgatcctgagaattt

SEQ ID NO: 3191111 - DNA, 25 bp, Homo sapien
ctccgcgccttcactcccgagcagc

SEQ ID NO: 3191112 - DNA, 25 bp, Homo sapien
ccccgccacatcccttctcaccctt

SEQ ID NO: 3191113 - DNA, 25 bp, Homo sapien
cccccgccacatcccttctcaccct

SEQ ID NO: 3191114 - DNA, 25 bp, Homo sapien
cccgccacatcccttctcacccttt

SEQ ID NO: 3191115 - DNA, 25 bp, Homo sapien
ctggcgggcctcctcgtgggcggtc

SEQ ID NO: 3191116 - DNA, 25 bp, Homo sapien
cggccttgctgctgcgcctccaaag

SEQ ID NO: 3191117 - DNA, 25 bp, Homo sapien
cctcgtgggcggtctgggctcagcc

SEQ ID NO: 3191118 - DNA, 25 bp, Homo sapien
ggccttgctgctgcgcctccaaaga

SEQ ID NO: 3191119 - DNA, 25 bp, Homo sapien
ctaaggttgcagactacggatcact

SEQ ID NO: 3191120 - DNA, 25 bp, Homo sapien
tggcccgggcactagaagtttgcac

SEQ ID NO: 3191121 - DNA, 25 bp, Homo sapien
tcccttagaacgacccgaggtgcag

SEQ ID NO: 3191122 - DNA, 25 bp, Homo sapien
tccgtgacatcgaaggagacgttct

SEQ ID NO: 3191123 - DNA, 25 bp, Homo sapien
tatgtcctcccggatcgaatgcagg

SEQ ID NO: 3191124 - DNA, 25 bp, Homo sapien
tgcctgcatttggttgcccacgagt

SEQ ID NO: 3191125 - DNA, 25 bp, Homo sapien
gaacggcttgctgcacccaatagaa

SEQ ID NO: 3191126 - DNA, 25 bp, Homo sapien
gacttgggacccataccagtggcag

SEQ ID NO: 3191127 - DNA, 25 bp, Homo sapien
gaaatggcccgctgatgctgggacc

SEQ ID NO: 3191128 - DNA, 25 bp, Homo sapien
tgggacctgacgtacccacactaag

SEQ ID NO: 3191129 - DNA, 25 bp, Homo sapien
tagttcttctagtcttacggcaaaa

SEQ ID NO: 3191130 - DNA, 25 bp, Homo sapien
gactttgatggatctttccagacct

SEQ ID NO: 3191131 - DNA, 25 bp, Homo sapien
tactgtgtttgggatgcataacttc

SEQ ID NO: 3191132 - DNA, 25 bp, Homo sapien
ggaggacttcccattgttgactgtc

SEQ ID NO: 3191133 - DNA, 25 bp, Homo sapien
gttactctgcagaagaatggctata

SEQ ID NO: 3191134 - DNA, 25 bp, Homo sapien
tcaggttctagcagatgaacccagg

SEQ ID NO: 3191135 - DNA, 25 bp, Homo sapien
tgtaaataaaacgtgcggcgctggg

SEQ ID NO: 3191136 - DNA, 25 bp, Homo sapien
tcccaaaccgcatggaaatctgagc

SEQ ID NO: 3191137 - DNA, 25 bp, Homo sapien
gggtctgtaaaccacgcgcgtgtgc

SEQ ID NO: 3191138 - DNA, 25 bp, Homo sapien
taaaagtgaatgtgccgctgcagtg

SEQ ID NO: 3191139 - DNA, 25 bp, Homo sapien
acgtcagtcgcacccggagaagggt

SEQ ID NO: 3191140 - DNA, 25 bp, Homo sapien
agatgttaggccaacagggaagcgc

SEQ ID NO: 3191141 - DNA, 25 bp, Homo sapien
tgattggtgcggagccacgtcagtc

SEQ ID NO: 3191142 - DNA, 25 bp, Homo sapien
ggagccgcagatctggtccgtcgct

SEQ ID NO: 3191143 - DNA, 25 bp, Homo sapien
tctgaggcgactttttattcttgta

SEQ ID NO: 3191144 - DNA, 25 bp, Homo sapien
gtataaatccagagtgaaccaccaa

SEQ ID NO: 3191145 - DNA, 25 bp, Homo sapien
ttctgtctggggactaataagcatc

SEQ ID NO: 3191146 - DNA, 25 bp, Homo sapien
taagcatcacagagaacgtgatctg

SEQ ID NO: 3191147 - DNA, 25 bp, Homo sapien
gctgcagcagtaagcttgacacagc

SEQ ID NO: 3191148 - DNA, 25 bp, Homo sapien
tggttctgaacaagatatttcccag

SEQ ID NO: 3191149 - DNA, 25 bp, Homo sapien
agcagtaagcttgacacagcaccag

SEQ ID NO: 3191150 - DNA, 25 bp, Homo sapien
agcctgaagtgtatggttctgaaca

SEQ ID NO: 3191151 - DNA, 25 bp, Homo sapien
tcccatccccctgtgaagaataaag

SEQ ID NO: 3191152 - DNA, 25 bp, Homo sapien
caatattcataatttgatgtcagcc

SEQ ID NO: 3191153 - DNA, 25 bp, Homo sapien
tgatgtcagccggattcctttctct

SEQ ID NO: 3191154 - DNA, 25 bp, Homo sapien
aaatgcaagcttgttaagaacttaa

SEQ ID NO: 3191155 - DNA, 25 bp, Homo sapien
aggaacctgtacaaagaaggctggg

SEQ ID NO: 3191156 - DNA, 25 bp, Homo sapien
acaggaacctgtacaaagaaggctg

SEQ ID NO: 3191157 - DNA, 25 bp, Homo sapien
ctgtacaaagaaggctgggcaccca

SEQ ID NO: 3191158 - DNA, 25 bp, Homo sapien
gaaggaacaggaacctgtacaaaga

SEQ ID NO: 3191159 - DNA, 25 bp, Homo sapien
ttgttctgaagcatttgcaggctga

SEQ ID NO: 3191160 - DNA, 25 bp, Homo sapien
aaggttgttctgaagcatttgcagg

SEQ ID NO: 3191161 - DNA, 25 bp, Homo sapien
ggttgttctgaagcatttgcaggct

SEQ ID NO: 3191162 - DNA, 25 bp, Homo sapien
gttgttctgaagcatttgcaggctg

SEQ ID NO: 3191163 - DNA, 25 bp, Homo sapien
tcagatcaagacagctgagttgaag

SEQ ID NO: 3191164 - DNA, 25 bp, Homo sapien
ggcccaagcaggtagactgtggtac

SEQ ID NO: 3191165 - DNA, 25 bp, Homo sapien
cagaaggcccaagcaggtagactgt

SEQ ID NO: 3191166 - DNA, 25 bp, Homo sapien
aataatcaccagaaggcccaagcag

SEQ ID NO: 3191167 - DNA, 25 bp, Homo sapien
tatctgtaggcatcactgctgacca

SEQ ID NO: 3191168 - DNA, 25 bp, Homo sapien
atctgtaggcatcactgctgaccat

SEQ ID NO: 3191169 - DNA, 25 bp, Homo sapien
tctgtttgccagtccgcaaaaggga

SEQ ID NO: 3191170 - DNA, 25 bp, Homo sapien
ccgtgtcacagaagatgggcatgtc

SEQ ID NO: 3191171 - DNA, 25 bp, Homo sapien
gaataaaagtatgcacaagccttca

SEQ ID NO: 3191172 - DNA, 25 bp, Homo sapien
catatactttctcaaccgtgtcaca

SEQ ID NO: 3191173 - DNA, 25 bp, Homo sapien
ctggcataggcctgggacgtcaggg

SEQ ID NO: 3191174 - DNA, 25 bp, Homo sapien
agagccttcaaggaccttatagggc

SEQ ID NO: 3191175 - DNA, 25 bp, Homo sapien
ttcagagccttcaaggaccttatag

SEQ ID NO: 3191176 - DNA, 25 bp, Homo sapien
ggacgtcaggggtttcagagccttc

SEQ ID NO: 3191177 - DNA, 25 bp, Homo sapien
aggacgaccaagatcaggagtgtag

SEQ ID NO: 3191178 - DNA, 25 bp, Homo sapien
ggggctgggatgtggttgtaaagga

SEQ ID NO: 3191179 - DNA, 25 bp, Homo sapien
acaaggacgaccaagatcaggagtg

SEQ ID NO: 3191180 - DNA, 25 bp, Homo sapien
atcaggagtgtaggggctgggatgt

SEQ ID NO: 3191181 - DNA, 25 bp, Homo sapien
cacacgaagagcaaaccccggaagc

SEQ ID NO: 3191182 - DNA, 25 bp, Homo sapien
caccagcactgttgtccacacgaag

SEQ ID NO: 3191183 - DNA, 25 bp, Homo sapien
ccaggcctccgatgtggagctcagc

SEQ ID NO: 3191184 - DNA, 25 bp, Homo sapien
tgtgccaggcctccgatgtggagct

SEQ ID NO: 3191185 - DNA, 25 bp, Homo sapien
gaagtctccaatgaggacacctggc

SEQ ID NO: 3191186 - DNA, 25 bp, Homo sapien
gtgaagtctccaatgaggacacctg

SEQ ID NO: 3191187 - DNA, 25 bp, Homo sapien
aaggtgaagtctccaatgaggacac

SEQ ID NO: 3191188 - DNA, 25 bp, Homo sapien
aaaaaggtgaagtctccaatgagga

SEQ ID NO: 3191189 - DNA, 25 bp, Homo sapien
gatttctggatctggtccacattca

SEQ ID NO: 3191190 - DNA, 25 bp, Homo sapien
tagggtgaattggtggaacggattg

SEQ ID NO: 3191191 - DNA, 25 bp, Homo sapien
ttagtttgtgtcgtagggtgaattg

SEQ ID NO: 3191192 - DNA, 25 bp, Homo sapien
ggaacggattgtgggagtcggtgct

SEQ ID NO: 3191193 - DNA, 25 bp, Homo sapien
gttcaaggaggaattggtaccattc

SEQ ID NO: 3191194 - DNA, 25 bp, Homo sapien
gaggttcaaggaggaattggtacca

SEQ ID NO: 3191195 - DNA, 25 bp, Homo sapien
agcaagactaacaaagaagaaaaca

SEQ ID NO: 3191196 - DNA, 25 bp, Homo sapien
taccagaggttcaaggaggaattgg

SEQ ID NO: 3191197 - DNA, 25 bp, Homo sapien
agacttttgtcaggcttaacatatt

SEQ ID NO: 3191198 - DNA, 25 bp, Homo sapien
aaagacttttgtcaggcttaacata

SEQ ID NO: 3191199 - DNA, 25 bp, Homo sapien
acttttgtcaggcttaacatatttc

SEQ ID NO: 3191200 - DNA, 25 bp, Homo sapien
aaaagacttttgtcaggcttaacat

SEQ ID NO: 3191201 - DNA, 25 bp, Homo sapien
tttgccactgggacggaaagaagag

SEQ ID NO: 3191202 - DNA, 25 bp, Homo sapien
cagacagagctgaagtttgccactg

SEQ ID NO: 3191203 - DNA, 25 bp, Homo sapien
gaaagaagaggagcatgcaaaaggt

SEQ ID NO: 3191204 - DNA, 25 bp, Homo sapien
ggatggttgataagactggagcctc

SEQ ID NO: 3191205 - DNA, 25 bp, Homo sapien
tccaaggcagcttcgtacaatatct

SEQ ID NO: 3191206 - DNA, 25 bp, Homo sapien
gcgaaagtccatcggctaaatctat

SEQ ID NO: 3191207 - DNA, 25 bp, Homo sapien
tgctactgacaacctaaatgaacct

SEQ ID NO: 3191208 - DNA, 25 bp, Homo sapien
cagttttcctgaattgcgaaagtcc

SEQ ID NO: 3191209 - DNA, 25 bp, Homo sapien
ttggcagtctcagcagagagaggcc

SEQ ID NO: 3191210 - DNA, 25 bp, Homo sapien
ctggttggcagtctcagcagagaga

SEQ ID NO: 3191211 - DNA, 25 bp, Homo sapien
tggttggcagtctcagcagagagag

SEQ ID NO: 3191212 - DNA, 25 bp, Homo sapien
agaatccccgaagtctggcagcctc

SEQ ID NO: 3191213 - DNA, 25 bp, Homo sapien
tgctgtttgcaggagtctgatgatc

SEQ ID NO: 3191214 - DNA, 25 bp, Homo sapien
gtgtcagaagcaaacaatagatcac

SEQ ID NO: 3191215 - DNA, 25 bp, Homo sapien
acagctggcattaattggcagcacc

SEQ ID NO: 3191216 - DNA, 25 bp, Homo sapien
gaaacggctgttatgcaccactcat

SEQ ID NO: 3191217 - DNA, 25 bp, Homo sapien
tgtcctgggatttgtatgtagaaga

SEQ ID NO: 3191218 - DNA, 25 bp, Homo sapien
cactatttgatagcctcagagctga

SEQ ID NO: 3191219 - DNA, 25 bp, Homo sapien
aagtgagggctgttaagagctgttc

SEQ ID NO: 3191220 - DNA, 25 bp, Homo sapien
ctaactgccttctcatagctatgat

SEQ ID NO: 3191221 - DNA, 25 bp, Homo sapien
ctcatagctatgattcctttatcca

SEQ ID NO: 3191222 - DNA, 25 bp, Homo sapien
tgccttctcatagctatgattcctt

SEQ ID NO: 3191223 - DNA, 25 bp, Homo sapien
ctgagtaactaactgccttctcata

SEQ ID NO: 3191224 - DNA, 25 bp, Homo sapien
gcagcctcctctaaatgattcctag

SEQ ID NO: 3191225 - DNA, 25 bp, Homo sapien
tccggcaatgacaacagcaagcagc

SEQ ID NO: 3191226 - DNA, 25 bp, Homo sapien
taagcttcctctgttcttacaggtc

SEQ ID NO: 3191227 - DNA, 25 bp, Homo sapien
tctctctttaggtgctctatcagca

SEQ ID NO: 3191228 - DNA, 25 bp, Homo sapien
taccagacaccactctaagaacttg

SEQ ID NO: 3191229 - DNA, 25 bp, Homo sapien
gacaccactctaagaacttgaaaac

SEQ ID NO: 3191230 - DNA, 25 bp, Homo sapien
tctaccagacaccactctaagaact

SEQ ID NO: 3191231 - DNA, 25 bp, Homo sapien
cagacaccactctaagaacttgaaa

SEQ ID NO: 3191232 - DNA, 25 bp, Homo sapien
cagcgaaatgcatttggcacaggcc

SEQ ID NO: 3191233 - DNA, 25 bp, Homo sapien
gtaaagttgattcccttccagctgc

SEQ ID NO: 3191234 - DNA, 25 bp, Homo sapien
gaagttgtgcttttgtaaagttgat

SEQ ID NO: 3191235 - DNA, 25 bp, Homo sapien
tgcatttggcacaggccctagggtg

SEQ ID NO: 3191236 - DNA, 25 bp, Homo sapien
tcaacgcgccagatttgggagtggc

SEQ ID NO: 3191237 - DNA, 25 bp, Homo sapien
ttagtgagaagtatctgctgcaggg

SEQ ID NO: 3191238 - DNA, 25 bp, Homo sapien
ggtgtgacctggtcaacgcgccaga

SEQ ID NO: 3191239 - DNA, 25 bp, Homo sapien
cctgaagtgatgacagccagtctgc

SEQ ID NO: 3191240 - DNA, 25 bp, Homo sapien
ggaacactatcctctgaagtgtttt

SEQ ID NO: 3191241 - DNA, 25 bp, Homo sapien
gaagttgtgccagttgagtctgtag

SEQ ID NO: 3191242 - DNA, 25 bp, Homo sapien
gtgttttgaagttgtgccagttgag

SEQ ID NO: 3191243 - DNA, 25 bp, Homo sapien
tgcaatatctctttggaacactatc

SEQ ID NO: 3191244 - DNA, 25 bp, Homo sapien
tgtgaaatgtgaatgcgctgtgtga

SEQ ID NO: 3191245 - DNA, 25 bp, Homo sapien
aatgtgaatgcgctgtgtgacacag

SEQ ID NO: 3191246 - DNA, 25 bp, Homo sapien
aaatgtgaatgcgctgtgtgacaca

SEQ ID NO: 3191247 - DNA, 25 bp, Homo sapien
tgaaatgtgaatgcgctgtgtgaca

SEQ ID NO: 3191248 - DNA, 25 bp, Homo sapien
tctgacctgtgcaactaaattcccc

SEQ ID NO: 3191249 - DNA, 25 bp, Homo sapien
aatctgacctgtgcaactaaattcc

SEQ ID NO: 3191250 - DNA, 25 bp, Homo sapien
ataaatctgacctgtgcaactaaat

SEQ ID NO: 3191251 - DNA, 25 bp, Homo sapien
actccttcccaataaatctgacctg

SEQ ID NO: 3191252 - DNA, 25 bp, Homo sapien
cagaatcaacaatcagctgagtgga

SEQ ID NO: 3191253 - DNA, 25 bp, Homo sapien
caggtacatgctgaataagttcaca

SEQ ID NO: 3191254 - DNA, 25 bp, Homo sapien
caatcagctgagtggaatatctacc

SEQ ID NO: 3191255 - DNA, 25 bp, Homo sapien
ggaatatctaccaggtacatgctga

SEQ ID NO: 3191256 - DNA, 25 bp, Homo sapien
ccactccagtcacggagttgaggtg

SEQ ID NO: 3191257 - DNA, 25 bp, Homo sapien
tgatctgggacatctgcgcctcaaa

SEQ ID NO: 3191258 - DNA, 25 bp, Homo sapien
tctgggacatctgcgcctcaaacag

SEQ ID NO: 3191259 - DNA, 25 bp, Homo sapien
cactaccactccagtcacggagttg

SEQ ID NO: 3191260 - DNA, 25 bp, Homo sapien
gaagtgtatttactgcagaggagac

SEQ ID NO: 3191261 - DNA, 25 bp, Homo sapien
ggctgagtctcctcaaaagcagata

SEQ ID NO: 3191262 - DNA, 25 bp, Homo sapien
gagacagtcggctgagtctcctcaa

SEQ ID NO: 3191263 - DNA, 25 bp, Homo sapien
tgggtaattcttgcagaccagtgag

SEQ ID NO: 3191264 - DNA, 25 bp, Homo sapien
gcagatagctagacgacacccatta

SEQ ID NO: 3191265 - DNA, 25 bp, Homo sapien
gaactttatatttggctgagcctga

SEQ ID NO: 3191266 - DNA, 25 bp, Homo sapien
ccaatgttcaagcactaagaggaga

SEQ ID NO: 3191267 - DNA, 25 bp, Homo sapien
caagagtgcaaatgactgggtgtca

SEQ ID NO: 3191268 - DNA, 25 bp, Homo sapien
tcttgaccacaagaatctatttgct

SEQ ID NO: 3191269 - DNA, 25 bp, Homo sapien
gcttttccactccactattgccact

SEQ ID NO: 3191270 - DNA, 25 bp, Homo sapien
taaatctccctattaaaacttgcat

SEQ ID NO: 3191271 - DNA, 25 bp, Homo sapien
tatttgctccagctgaataactagc

SEQ ID NO: 3191272 - DNA, 25 bp, Homo sapien
tctgctgtgaatgcgtctgccaaga

SEQ ID NO: 3191273 - DNA, 25 bp, Homo sapien
tcatgggacacacctaacatttacc

SEQ ID NO: 3191274 - DNA, 25 bp, Homo sapien
tctgaagagtttgagtagacctact

SEQ ID NO: 3191275 - DNA, 25 bp, Homo sapien
gctaatggatggctgaaactataca

SEQ ID NO: 3191276 - DNA, 25 bp, Homo sapien
gagctttgtctagatccccttggca

SEQ ID NO: 3191277 - DNA, 25 bp, Homo sapien
cttggcagaccacccagaagctttc

SEQ ID NO: 3191278 - DNA, 25 bp, Homo sapien
caagcctttgtgacctccagaccag

SEQ ID NO: 3191279 - DNA, 25 bp, Homo sapien
ttatggagcttgtcctcagatccca

SEQ ID NO: 3191280 - DNA, 25 bp, Homo sapien
tgcattgagacaaccaagagaagtc

SEQ ID NO: 3191281 - DNA, 25 bp, Homo sapien
tggtagccccatgggcaaggtcatg

SEQ ID NO: 3191282 - DNA, 25 bp, Homo sapien
tattgctgccctcagatgatgacac

SEQ ID NO: 3191283 - DNA, 25 bp, Homo sapien
tcttctagtggatgcatctggccta

SEQ ID NO: 3191284 - DNA, 25 bp, Homo sapien
agtgtaatgtcactgagtttatcca

SEQ ID NO: 3191285 - DNA, 25 bp, Homo sapien
gtaatgtcactgagtttatccaaag

SEQ ID NO: 3191286 - DNA, 25 bp, Homo sapien
tgtaatgtcactgagtttatccaaa

SEQ ID NO: 3191287 - DNA, 25 bp, Homo sapien
taatgtcactgagtttatccaaagc

SEQ ID NO: 3191288 - DNA, 25 bp, Homo sapien
tcatggatgaggttattcattcctt

SEQ ID NO: 3191289 - DNA, 25 bp, Homo sapien
tccttcatggatgaggttattcatt

SEQ ID NO: 3191290 - DNA, 25 bp, Homo sapien
catggatgaggttattcattccttc

SEQ ID NO: 3191291 - DNA, 25 bp, Homo sapien
cttcatggatgaggttattcattcc

SEQ ID NO: 3191292 - DNA, 25 bp, Homo sapien
tgtcctctttactatatgtggctcc

SEQ ID NO: 3191293 - DNA, 25 bp, Homo sapien
atttctccttgtcgtctgatccaga

SEQ ID NO: 3191294 - DNA, 25 bp, Homo sapien
taaccaggccatgctctcttaaagc

SEQ ID NO: 3191295 - DNA, 25 bp, Homo sapien
ttccacattaaccaggccatgctct

SEQ ID NO: 3191296 - DNA, 25 bp, Homo sapien
ccttaacaacttgccagcaaaggca

SEQ ID NO: 3191297 - DNA, 25 bp, Homo sapien
gggacagtaaagtgtgctttctctc

SEQ ID NO: 3191298 - DNA, 25 bp, Homo sapien
tgttaaccactccagagaatactgt

SEQ ID NO: 3191299 - DNA, 25 bp, Homo sapien
cagtggataatcctgcggtgcaact

SEQ ID NO: 3191300 - DNA, 25 bp, Homo sapien
taaagttttgtatgaaacatctgtt

SEQ ID NO: 3191301 - DNA, 25 bp, Homo sapien
ggtaaaggagacaaatcctgctttg

SEQ ID NO: 3191302 - DNA, 25 bp, Homo sapien
gctttgtctaaagagcccatcttga

SEQ ID NO: 3191303 - DNA, 25 bp, Homo sapien
tcaacttgtccatcttgaatgggca

SEQ ID NO: 3191304 - DNA, 25 bp, Homo sapien
tcatgcccaattgtaaagaccactg

SEQ ID NO: 3191305 - DNA, 25 bp, Homo sapien
cactacaaaatcatgcccaattgta

SEQ ID NO: 3191306 - DNA, 25 bp, Homo sapien
cagccactacaaaatcatgcccaat

SEQ ID NO: 3191307 - DNA, 25 bp, Homo sapien
gccactacaaaatcatgcccaattg

SEQ ID NO: 3191308 - DNA, 25 bp, Homo sapien
aggaccaagagtcaattgccgggac

SEQ ID NO: 3191309 - DNA, 25 bp, Homo sapien
ggaccaagagtcaattgccgggaca

SEQ ID NO: 3191310 - DNA, 25 bp, Homo sapien
gaccaagagtcaattgccgggacat

SEQ ID NO: 3191311 - DNA, 25 bp, Homo sapien
cacaaaggtcgcaggaaatattttt

SEQ ID NO: 3191312 - DNA, 25 bp, Homo sapien
gagatgccacaaaggtcgcaggaaa

SEQ ID NO: 3191313 - DNA, 25 bp, Homo sapien
aagagatgccacaaaggtcgcagga

SEQ ID NO: 3191314 - DNA, 25 bp, Homo sapien
tgccacaaaggtcgcaggaaatatt

SEQ ID NO: 3191315 - DNA, 25 bp, Homo sapien
cagagttttagcaggttccaaatcc

SEQ ID NO: 3191316 - DNA, 25 bp, Homo sapien
gagttttagcaggttccaaatccat

SEQ ID NO: 3191317 - DNA, 25 bp, Homo sapien
agagttttagcaggttccaaatcca

SEQ ID NO: 3191318 - DNA, 25 bp, Homo sapien
taataaatggctgcatacttcgtac

SEQ ID NO: 3191319 - DNA, 25 bp, Homo sapien
ctaattgtacaagttaataaatggc

SEQ ID NO: 3191320 - DNA, 25 bp, Homo sapien
acaagttaataaatggctgcatact

SEQ ID NO: 3191321 - DNA, 25 bp, Homo sapien
ttgtacaagttaataaatggctgca

SEQ ID NO: 3191322 - DNA, 25 bp, Homo sapien
ggaccaggctaaacacatcaatttg

SEQ ID NO: 3191323 - DNA, 25 bp, Homo sapien
tcaatttgctccttacctgaaacac

SEQ ID NO: 3191324 - DNA, 25 bp, Homo sapien
aaatctggaagccagtccgggacca

SEQ ID NO: 3191325 - DNA, 25 bp, Homo sapien
tgttccactctcacctcaatcgttt

SEQ ID NO: 3191326 - DNA, 25 bp, Homo sapien
tctaccaacagttattttgattgct

SEQ ID NO: 3191327 - DNA, 25 bp, Homo sapien
ctctgtttcctctaataatctttta

SEQ ID NO: 3191328 - DNA, 25 bp, Homo sapien
atttgttctcctacttttacaagag

SEQ ID NO: 3191329 - DNA, 25 bp, Homo sapien
cctacttttacaagagacattttct

SEQ ID NO: 3191330 - DNA, 25 bp, Homo sapien
tttataccttggttcctggagccat

SEQ ID NO: 3191331 - DNA, 25 bp, Homo sapien
gagccatgaatcctgcccatcagag

SEQ ID NO: 3191332 - DNA, 25 bp, Homo sapien
gcccggcctgttgtatctcttgttg

SEQ ID NO: 3191333 - DNA, 25 bp, Homo sapien
taaacactttgctaggaggacactg

SEQ ID NO: 3191334 - DNA, 25 bp, Homo sapien
gccataacttggttgtatacttcta

SEQ ID NO: 3191335 - DNA, 25 bp, Homo sapien
ttgccataacttggttgtatacttc

SEQ ID NO: 3191336 - DNA, 25 bp, Homo sapien
taatttgccataacttggttgtata

SEQ ID NO: 3191337 - DNA, 25 bp, Homo sapien
aacttggttgtatacttctatttgc

SEQ ID NO: 3191338 - DNA, 25 bp, Homo sapien
gagatgagtcaagaaggcatcctcc

SEQ ID NO: 3191339 - DNA, 25 bp, Homo sapien
aattttgcctgaggaggacaatcta

SEQ ID NO: 3191340 - DNA, 25 bp, Homo sapien
caatctattatgagagatgagtcaa

SEQ ID NO: 3191341 - DNA, 25 bp, Homo sapien
gacattgaccctgcagacttattga

SEQ ID NO: 3191342 - DNA, 25 bp, Homo sapien
cctgctgcataggagatgaattcag

SEQ ID NO: 3191343 - DNA, 25 bp, Homo sapien
agagagaagcaacaacaagcaaaat

SEQ ID NO: 3191344 - DNA, 25 bp, Homo sapien
aagagagaagcaacaacaagcaaaa

SEQ ID NO: 3191345 - DNA, 25 bp, Homo sapien
tgtccctgctgcataggagatgaat

SEQ ID NO: 3191346 - DNA, 25 bp, Homo sapien
gggatgatgcatattccaacagata

SEQ ID NO: 3191347 - DNA, 25 bp, Homo sapien
ttattgaattggcatctcccaacac

SEQ ID NO: 3191348 - DNA, 25 bp, Homo sapien
cataactgaagtgaggggatgatgc

SEQ ID NO: 3191349 - DNA, 25 bp, Homo sapien
tgatctgcatatttttgtgatgcca

SEQ ID NO: 3191350 - DNA, 25 bp, Homo sapien
tgcaaactgtaaaagaggtccccaa

SEQ ID NO: 3191351 - DNA, 25 bp, Homo sapien
attttctgtgaatgcaaactgtaaa

SEQ ID NO: 3191352 - DNA, 25 bp, Homo sapien
atgcaaactgtaaaagaggtcccca

SEQ ID NO: 3191353 - DNA, 25 bp, Homo sapien
tattttctgtgaatgcaaactgtaa

SEQ ID NO: 3191354 - DNA, 25 bp, Homo sapien
cttaaagcacgttctgcagtagcta

SEQ ID NO: 3191355 - DNA, 25 bp, Homo sapien
gaaatgtccgttagatgcaaccgaa

SEQ ID NO: 3191356 - DNA, 25 bp, Homo sapien
ttaaagcacgttctgcagtagctat

SEQ ID NO: 3191357 - DNA, 25 bp, Homo sapien
aagtcataagaaatgtccgttagat

SEQ ID NO: 3191358 - DNA, 25 bp, Homo sapien
ccatcatttagcaggggctatgcta

SEQ ID NO: 3191359 - DNA, 25 bp, Homo sapien
tgccatcatttagcaggggctatgc

SEQ ID NO: 3191360 - DNA, 25 bp, Homo sapien
tgcatgccatcatttagcaggggct

SEQ ID NO: 3191361 - DNA, 25 bp, Homo sapien
catgccatcatttagcaggggctat

SEQ ID NO: 3191362 - DNA, 25 bp, Homo sapien
caggaggaggttcccattgaatctc

SEQ ID NO: 3191363 - DNA, 25 bp, Homo sapien
cagttgttcagttgggctgtacagg

SEQ ID NO: 3191364 - DNA, 25 bp, Homo sapien
tctgcacacaggtagtagcttctgt

SEQ ID NO: 3191365 - DNA, 25 bp, Homo sapien
tctctggtggagaattatgcacttg

SEQ ID NO: 3191366 - DNA, 25 bp, Homo sapien
cttcagcactacaggtgtgcttact

SEQ ID NO: 3191367 - DNA, 25 bp, Homo sapien
tcagcactacaggtgtgcttactaa

SEQ ID NO: 3191368 - DNA, 25 bp, Homo sapien
gcactacaggtgtgcttactaacca

SEQ ID NO: 3191369 - DNA, 25 bp, Homo sapien
cagcactacaggtgtgcttactaac

SEQ ID NO: 3191370 - DNA, 25 bp, Homo sapien
acttgattatacctgtctctggctg

SEQ ID NO: 3191371 - DNA, 25 bp, Homo sapien
actataagctgtccttgtacttctg

SEQ ID NO: 3191372 - DNA, 25 bp, Homo sapien
caactataagctgtccttgtacttc

SEQ ID NO: 3191373 - DNA, 25 bp, Homo sapien
gatgcctttctaacttgattatacc

SEQ ID NO: 3191374 - DNA, 25 bp, Homo sapien
aactcttggcccgtataaagatgat

SEQ ID NO: 3191375 - DNA, 25 bp, Homo sapien
ttggcccgtataaagatgatgtaac

SEQ ID NO: 3191376 - DNA, 25 bp, Homo sapien
tctcagtcagaagggctgtcagcag

SEQ ID NO: 3191377 - DNA, 25 bp, Homo sapien
gcttcacgaaggccatctggggaaa

SEQ ID NO: 3191378 - DNA, 25 bp, Homo sapien
caagacgtaatcataatcaggagac

SEQ ID NO: 3191379 - DNA, 25 bp, Homo sapien
gctgcagctgccgtccttattaata

SEQ ID NO: 3191380 - DNA, 25 bp, Homo sapien
aaattgaacagattgctgcagctgc

SEQ ID NO: 3191381 - DNA, 25 bp, Homo sapien
cagagggccagagctaatttgcata

SEQ ID NO: 3191382 - DNA, 25 bp, Homo sapien
cagttatggaacatattaccgtaag

SEQ ID NO: 3191383 - DNA, 25 bp, Homo sapien
aaggcatttgttcatggcgtgacaa

SEQ ID NO: 3191384 - DNA, 25 bp, Homo sapien
cgtgacaatgattggcccttggcca

SEQ ID NO: 3191385 - DNA, 25 bp, Homo sapien
catattaccgtaaggcatttgttca

SEQ ID NO: 3191386 - DNA, 25 bp, Homo sapien
cttagctgcttcctggtttaccaca

SEQ ID NO: 3191387 - DNA, 25 bp, Homo sapien
attccaagggtatccccaagttctg

SEQ ID NO: 3191388 - DNA, 25 bp, Homo sapien
ggcttccgtttgatcttataagagc

SEQ ID NO: 3191389 - DNA, 25 bp, Homo sapien
acaatgtagttgatgtgacctctcc

SEQ ID NO: 3191390 - DNA, 25 bp, Homo sapien
gaatgcctttgcagctgttttgcag

SEQ ID NO: 3191391 - DNA, 25 bp, Homo sapien
tcaagccacggaggaaagtactgtt

SEQ ID NO: 3191392 - DNA, 25 bp, Homo sapien
tgagctctgcctgacattcgtcaca

SEQ ID NO: 3191393 - DNA, 25 bp, Homo sapien
agtactgttggatcacttctggctc

SEQ ID NO: 3191394 - DNA, 25 bp, Homo sapien
gtggactgattaaacccagagagag

SEQ ID NO: 3191395 - DNA, 25 bp, Homo sapien
atatgattcagctccatgttgacag

SEQ ID NO: 3191396 - DNA, 25 bp, Homo sapien
gctccatgttgacagctgtggttga

SEQ ID NO: 3191397 - DNA, 25 bp, Homo sapien
tgattcagctccatgttgacagctg

SEQ ID NO: 3191398 - DNA, 25 bp, Homo sapien
ctccatgttgacagctgtggttgat

SEQ ID NO: 3191399 - DNA, 25 bp, Homo sapien
tctatgcactcaagccttggcccaa

SEQ ID NO: 3191400 - DNA, 25 bp, Homo sapien
ggctctatgcactcaagccttggcc

SEQ ID NO: 3191401 - DNA, 25 bp, Homo sapien
tatgcactcaagccttggcccaatc

SEQ ID NO: 3191402 - DNA, 25 bp, Homo sapien
gctctatgcactcaagccttggccc

SEQ ID NO: 3191403 - DNA, 25 bp, Homo sapien
gagttagtgaaaatgccgtcgacta

SEQ ID NO: 3191404 - DNA, 25 bp, Homo sapien
tgccgtcgactagtttcatgagaca

SEQ ID NO: 3191405 - DNA, 25 bp, Homo sapien
taacatagctattatcatgagcgca

SEQ ID NO: 3191406 - DNA, 25 bp, Homo sapien
tcatgagcgcaagagttagtgaaaa

SEQ ID NO: 3191407 - DNA, 25 bp, Homo sapien
tctcttttgcttattacagcttttg

SEQ ID NO: 3191408 - DNA, 25 bp, Homo sapien
attacagcttttgaacatattgaca

SEQ ID NO: 3191409 - DNA, 25 bp, Homo sapien
tttgcttattacagcttttgaacat

SEQ ID NO: 3191410 - DNA, 25 bp, Homo sapien
tattacagcttttgaacatattgac

SEQ ID NO: 3191411 - DNA, 25 bp, Homo sapien
tctcaaaaccgtcgtactccttgac

SEQ ID NO: 3191412 - DNA, 25 bp, Homo sapien
ctcaaaaccgtcgtactccttgact

SEQ ID NO: 3191413 - DNA, 25 bp, Homo sapien
accgtcgtactccttgacttttgag

SEQ ID NO: 3191414 - DNA, 25 bp, Homo sapien
ttctcaaaaccgtcgtactccttga

SEQ ID NO: 3191415 - DNA, 25 bp, Homo sapien
tattatccttttctcctcgctgttc

SEQ ID NO: 3191416 - DNA, 25 bp, Homo sapien
ttttctcctcgctgttctctttttc

SEQ ID NO: 3191417 - DNA, 25 bp, Homo sapien
tcctctattatccttttctcctcgc

SEQ ID NO: 3191418 - DNA, 25 bp, Homo sapien
ctgctcttttcctctattatccttt

SEQ ID NO: 3191419 - DNA, 25 bp, Homo sapien
aagaaggagattctgtaactcccac

SEQ ID NO: 3191420 - DNA, 25 bp, Homo sapien
agattctgtaactcccacagcagca

SEQ ID NO: 3191421 - DNA, 25 bp, Homo sapien
tgcaaagggcccaagttgaagaagg

SEQ ID NO: 3191422 - DNA, 25 bp, Homo sapien
caaagggcccaagttgaagaaggag

SEQ ID NO: 3191423 - DNA, 25 bp, Homo sapien
cggagtctcactctacttctcaggc

SEQ ID NO: 3191424 - DNA, 25 bp, Homo sapien
atgatctcggctcactgtaacctcc

SEQ ID NO: 3191425 - DNA, 25 bp, Homo sapien
tggagtgcagcggcatgatctcggc

SEQ ID NO: 3191426 - DNA, 25 bp, Homo sapien
gcctcctgggttcaagtgattctct

SEQ ID NO: 3191427 - DNA, 25 bp, Homo sapien
gatgctcagcaactgcagtgaagta

SEQ ID NO: 3191428 - DNA, 25 bp, Homo sapien
taggatgctcagcaactgcagtgaa

SEQ ID NO: 3191429 - DNA, 25 bp, Homo sapien
tttaggatgctcagcaactgcagtg

SEQ ID NO: 3191430 - DNA, 25 bp, Homo sapien
ttgcttttaggatgctcagcaactg

SEQ ID NO: 3191431 - DNA, 25 bp, Homo sapien
ttgttcttaacgtgcactgcatgtg

SEQ ID NO: 3191432 - DNA, 25 bp, Homo sapien
gactattgttcttaacgtgcactgc

SEQ ID NO: 3191433 - DNA, 25 bp, Homo sapien
tattgttcttaacgtgcactgcatg

SEQ ID NO: 3191434 - DNA, 25 bp, Homo sapien
actattgttcttaacgtgcactgca

SEQ ID NO: 3191435 - DNA, 25 bp, Homo sapien
agagaaaatggctcaatgcggtagc

SEQ ID NO: 3191436 - DNA, 25 bp, Homo sapien
caatgcggtagcaatgatttggaga

SEQ ID NO: 3191437 - DNA, 25 bp, Homo sapien
caatcccttgatttaggcgacaggt

SEQ ID NO: 3191438 - DNA, 25 bp, Homo sapien
gatttggagaataccaatcccttga

SEQ ID NO: 3191439 - DNA, 25 bp, Homo sapien
gtggggagtaagacgatgtaaataa

SEQ ID NO: 3191440 - DNA, 25 bp, Homo sapien
tgtggggagtaagacgatgtaaata

SEQ ID NO: 3191441 - DNA, 25 bp, Homo sapien
aggctccagctcaattcttctcatg

SEQ ID NO: 3191442 - DNA, 25 bp, Homo sapien
cagcttggctgtccatacaaaacaa

SEQ ID NO: 3191443 - DNA, 25 bp, Homo sapien
tggaaaaccgtccatttcactttgc

SEQ ID NO: 3191444 - DNA, 25 bp, Homo sapien
agtgatggcaaaaggctccagctca

SEQ ID NO: 3191445 - DNA, 25 bp, Homo sapien
acttcgcaccctgaaaagtctctgt

SEQ ID NO: 3191446 - DNA, 25 bp, Homo sapien
gttctgcctgccttcggttttctta

SEQ ID NO: 3191447 - DNA, 25 bp, Homo sapien
gtagagggcaccatgcgtaacttcg

SEQ ID NO: 3191448 - DNA, 25 bp, Homo sapien
tctgcctgccttcggttttcttaag

SEQ ID NO: 3191449 - DNA, 25 bp, Homo sapien
ctgttgctggtcgtccataggcctc

SEQ ID NO: 3191450 - DNA, 25 bp, Homo sapien
ttctgccaattactttgaacttcag

SEQ ID NO: 3191451 - DNA, 25 bp, Homo sapien
tcaccaatacaatggaacaagaaca

SEQ ID NO: 3191452 - DNA, 25 bp, Homo sapien
gcctctactcccatactgcccaaag

SEQ ID NO: 3191453 - DNA, 25 bp, Homo sapien
tgaggccctccccaaaatggcgaag

SEQ ID NO: 3191454 - DNA, 25 bp, Homo sapien
cgaccaagattgataagatagcctc

SEQ ID NO: 3191455 - DNA, 25 bp, Homo sapien
gaagttttattactgctcagggcgt

SEQ ID NO: 3191456 - DNA, 25 bp, Homo sapien
tagagcttcgaatatatcaatggac

SEQ ID NO: 3191457 - DNA, 25 bp, Homo sapien
tgcagatgtcaacctcaaaactggg

SEQ ID NO: 3191458 - DNA, 25 bp, Homo sapien
tcttctcaggcagattaagctacag

SEQ ID NO: 3191459 - DNA, 25 bp, Homo sapien
tttccagagcggtcaaaattgttca

SEQ ID NO: 3191460 - DNA, 25 bp, Homo sapien
taacaaaactggaccactgctagct

SEQ ID NO: 3191461 - DNA, 25 bp, Homo sapien
gacttgcctaattctgcactctcat

SEQ ID NO: 3191462 - DNA, 25 bp, Homo sapien
tctctgacttgcctaattctgcact

SEQ ID NO: 3191463 - DNA, 25 bp, Homo sapien
tttccctgtggtcgctctttctctg

SEQ ID NO: 3191464 - DNA, 25 bp, Homo sapien
tgtggtcgctctttctctgacttgc

SEQ ID NO: 3191465 - DNA, 25 bp, Homo sapien
tgtttgaaacgtgcacaattaaaaa

SEQ ID NO: 3191466 - DNA, 25 bp, Homo sapien
ctgtttgaaacgtgcacaattaaaa

SEQ ID NO: 3191467 - DNA, 25 bp, Homo sapien
gccgtgatggaccagggcaccattc

SEQ ID NO: 3191468 - DNA, 25 bp, Homo sapien
ttagaagacagccagatagcccacc

SEQ ID NO: 3191469 - DNA, 25 bp, Homo sapien
tgctgtcaagccttcagtgccgtga

SEQ ID NO: 3191470 - DNA, 25 bp, Homo sapien
atagcccaccctgctgtcaagcctt

SEQ ID NO: 3191471 - DNA, 25 bp, Homo sapien
aaatattgcactaaggaaatgccgc

SEQ ID NO: 3191472 - DNA, 25 bp, Homo sapien
aagtttacaaaatattgcactaagg

SEQ ID NO: 3191473 - DNA, 25 bp, Homo sapien
aaggaaatgccgctgacactgagac

SEQ ID NO: 3191474 - DNA, 25 bp, Homo sapien
cagatctcctattgaaatctgttga

SEQ ID NO: 3191475 - DNA, 25 bp, Homo sapien
tttgaatgcgaggaaaacgaaggtg

SEQ ID NO: 3191476 - DNA, 25 bp, Homo sapien
tgaatgcgaggaaaacgaaggtgtt

SEQ ID NO: 3191477 - DNA, 25 bp, Homo sapien
tgcgaggaaaacgaaggtgtttatg

SEQ ID NO: 3191478 - DNA, 25 bp, Homo sapien
tgctttgaatgcgaggaaaacgaag

SEQ ID NO: 3191479 - DNA, 25 bp, Homo sapien
cctagataagcagagggaaatgtgt

SEQ ID NO: 3191480 - DNA, 25 bp, Homo sapien
tgatcccaatgaatggaagagagcc

SEQ ID NO: 3191481 - DNA, 25 bp, Homo sapien
gaatggaagagagccctagataagc

SEQ ID NO: 3191482 - DNA, 25 bp, Homo sapien
ctaaacactgatcccaatgaatgga

SEQ ID NO: 3191483 - DNA, 25 bp, Homo sapien
cagacgacatactcaatgacatgca

SEQ ID NO: 3191484 - DNA, 25 bp, Homo sapien
gacatactcaatgacatgcagtaga

SEQ ID NO: 3191485 - DNA, 25 bp, Homo sapien
tcaatgacatgcagtagatacacat

SEQ ID NO: 3191486 - DNA, 25 bp, Homo sapien
agccaaacacagacgacatactcaa

SEQ ID NO: 3191487 - DNA, 25 bp, Homo sapien
tgtttgcactacagcggtcttcagt

SEQ ID NO: 3191488 - DNA, 25 bp, Homo sapien
gtcttcagtgaagcgaacccttaat

SEQ ID NO: 3191489 - DNA, 25 bp, Homo sapien
gaagcctcggtctgatgaaaggctg

SEQ ID NO: 3191490 - DNA, 25 bp, Homo sapien
gctgtgaagcctcggtctgatgaaa

SEQ ID NO: 3191491 - DNA, 25 bp, Homo sapien
ggatttactcactatattctttagg

SEQ ID NO: 3191492 - DNA, 25 bp, Homo sapien
actcactatattctttaggctctca

SEQ ID NO: 3191493 - DNA, 25 bp, Homo sapien
ttacttgtacctttactatagcatg

SEQ ID NO: 3191494 - DNA, 25 bp, Homo sapien
gtacctttactatagcatgtgtcat

SEQ ID NO: 3191495 - DNA, 25 bp, Homo sapien
gattcccgctcaaggtctcatcact

SEQ ID NO: 3191496 - DNA, 25 bp, Homo sapien
gctcaaggtctcatcactcaacttt

SEQ ID NO: 3191497 - DNA, 25 bp, Homo sapien
tcatcactcaactttctcatgacag

SEQ ID NO: 3191498 - DNA, 25 bp, Homo sapien
tcattgatgattcccgctcaaggtc

SEQ ID NO: 3191499 - DNA, 25 bp, Homo sapien
agaagtcagctgatctgggatgcag

SEQ ID NO: 3191500 - DNA, 25 bp, Homo sapien
gagaagtcagctgatctgggatgca

SEQ ID NO: 3191501 - DNA, 25 bp, Homo sapien
agaggcctggaaacacggacttggg

SEQ ID NO: 3191502 - DNA, 25 bp, Homo sapien
tggaaacacggacttgggtagagga

SEQ ID NO: 3191503 - DNA, 25 bp, Homo sapien
ggtaagcttagaccagtccctggag

SEQ ID NO: 3191504 - DNA, 25 bp, Homo sapien
taggagggcgagatattcaggtcaa

SEQ ID NO: 3191505 - DNA, 25 bp, Homo sapien
taagcatggtgttccaaggcacgct

SEQ ID NO: 3191506 - DNA, 25 bp, Homo sapien
tgttggaattcaaggcacatcagtc

SEQ ID NO: 3191507 - DNA, 25 bp, Homo sapien
gacctgctgatttaacccctacttc

SEQ ID NO: 3191508 - DNA, 25 bp, Homo sapien
ctgctgatttaacccctacttccct

SEQ ID NO: 3191509 - DNA, 25 bp, Homo sapien
tgcttagacaaatcctgctacctgt

SEQ ID NO: 3191510 - DNA, 25 bp, Homo sapien
tgtcagccctcctgtgggtgccaaa

SEQ ID NO: 3191511 - DNA, 25 bp, Homo sapien
tgccaaaccggctgccaggttaacc

SEQ ID NO: 3191512 - DNA, 25 bp, Homo sapien
ggcagcctgcttagacaaatcctgc

SEQ ID NO: 3191513 - DNA, 25 bp, Homo sapien
gacattagaggacacctgtatgttt

SEQ ID NO: 3191514 - DNA, 25 bp, Homo sapien
cacttctctctcgagtgcacgcaca

SEQ ID NO: 3191515 - DNA, 25 bp, Homo sapien
tggagaggcagaatgtggacattag

SEQ ID NO: 3191516 - DNA, 25 bp, Homo sapien
ggcaatcagaattcataagttcctg

SEQ ID NO: 3191517 - DNA, 25 bp, Homo sapien
tgcctctctcgtagccagtgtcctg

SEQ ID NO: 3191518 - DNA, 25 bp, Homo sapien
caccactgcctctctcgtagccagt

SEQ ID NO: 3191519 - DNA, 25 bp, Homo sapien
ctccaccactgcctctctcgtagcc

SEQ ID NO: 3191520 - DNA, 25 bp, Homo sapien
actgcctctctcgtagccagtgtcc

SEQ ID NO: 3191521 - DNA, 25 bp, Homo sapien
tatctttcagcagtactttatccat

SEQ ID NO: 3191522 - DNA, 25 bp, Homo sapien
ggctatcattatttcttgcaggtag

SEQ ID NO: 3191523 - DNA, 25 bp, Homo sapien
tcttgcaggtagcattcaaaaagtt

SEQ ID NO: 3191524 - DNA, 25 bp, Homo sapien
tgaaatagaacctgacatttttatt

SEQ ID NO: 3191525 - DNA, 25 bp, Homo sapien
ttctggctatcattatttcttgcag

SEQ ID NO: 3191526 - DNA, 25 bp, Homo sapien
ccaggtccaggattctactgtacta

SEQ ID NO: 3191527 - DNA, 25 bp, Homo sapien
ggtgttacaccgctctccagattca

SEQ ID NO: 3191528 - DNA, 25 bp, Homo sapien
acaacttgagttgggcagttcacca

SEQ ID NO: 3191529 - DNA, 25 bp, Homo sapien
tggccccacctcatagaaagcaacg

SEQ ID NO: 3191530 - DNA, 25 bp, Homo sapien
tcagcaccactatctcaagtaaggg

SEQ ID NO: 3191531 - DNA, 25 bp, Homo sapien
tgccggtttcaactaatactgtagc

SEQ ID NO: 3191532 - DNA, 25 bp, Homo sapien
ggaggcccttttcagcaccactatc

SEQ ID NO: 3191533 - DNA, 25 bp, Homo sapien
tcaaggtgttcccctgccggtttca

SEQ ID NO: 3191534 - DNA, 25 bp, Homo sapien
gctaaaggtttagggcattgtaaga

SEQ ID NO: 3191535 - DNA, 25 bp, Homo sapien
tgtaagacagtgtagaagatctgac

SEQ ID NO: 3191536 - DNA, 25 bp, Homo sapien
gatctgactaggatacacctgctcc

SEQ ID NO: 3191537 - DNA, 25 bp, Homo sapien
aagaagttaagcttgtttgagcata

SEQ ID NO: 3191538 - DNA, 25 bp, Homo sapien
tctgcatgaactgtactggaaagcc

SEQ ID NO: 3191539 - DNA, 25 bp, Homo sapien
catgaacagtactggaaagcacttc

SEQ ID NO: 3191540 - DNA, 25 bp, Homo sapien
taatatcagagggtccaatactgga

SEQ ID NO: 3191541 - DNA, 25 bp, Homo sapien
tcaggaaatagtcaagggcgtcttg

SEQ ID NO: 3191542 - DNA, 25 bp, Homo sapien
ctcaagaagaagaatgttaacactg

SEQ ID NO: 3191543 - DNA, 25 bp, Homo sapien
gtatatatctgtatgctcaagaaga

SEQ ID NO: 3191544 - DNA, 25 bp, Homo sapien
taacactggttatccagtgtgggag

SEQ ID NO: 3191545 - DNA, 25 bp, Homo sapien
gggtgaaatcattaactcttcatgc

SEQ ID NO: 3191546 - DNA, 25 bp, Homo sapien
gcactaggggtcacaaacttcagag

SEQ ID NO: 3191547 - DNA, 25 bp, Homo sapien
tcacaaggcactaggggtcacaaac

SEQ ID NO: 3191548 - DNA, 25 bp, Homo sapien
cagataaacgttcttctaaggctgc

SEQ ID NO: 3191549 - DNA, 25 bp, Homo sapien
aatattcagtagaatcttcagataa

SEQ ID NO: 3191550 - DNA, 25 bp, Homo sapien
tctgtggatccgagtgatggagtca

SEQ ID NO: 3191551 - DNA, 25 bp, Homo sapien
tgttgtgctggtaagcaggctcctc

SEQ ID NO: 3191552 - DNA, 25 bp, Homo sapien
tagaataggcagagtgtcatgttcc

SEQ ID NO: 3191553 - DNA, 25 bp, Homo sapien
ttagctggctcgtgtggcaggaaca

SEQ ID NO: 3191554 - DNA, 25 bp, Homo sapien
ttagctagaagagcagcataagcca

SEQ ID NO: 3191555 - DNA, 25 bp, Homo sapien
taagccagtatcaacccatagggag

SEQ ID NO: 3191556 - DNA, 25 bp, Homo sapien
gtcaccatcaacagactgtcaggat

SEQ ID NO: 3191557 - DNA, 25 bp, Homo sapien
ccagtatcaacccatagggagccat

SEQ ID NO: 3191558 - DNA, 25 bp, Homo sapien
gaagcaaatatagagactgagtagg

SEQ ID NO: 3191559 - DNA, 25 bp, Homo sapien
gggaaatcatcagattgcgatgcca

SEQ ID NO: 3191560 - DNA, 25 bp, Homo sapien
gccatctgatggagcccaacaggga

SEQ ID NO: 3191561 - DNA, 25 bp, Homo sapien
caagagtgaagaacgcagaaatggg

SEQ ID NO: 3191562 - DNA, 25 bp, Homo sapien
acacaaagtggttgtgagtcatggt

SEQ ID NO: 3191563 - DNA, 25 bp, Homo sapien
caaagtggttgtgagtcatggttaa

SEQ ID NO: 3191564 - DNA, 25 bp, Homo sapien
ggttgtgagtcatggttaagtgatt

SEQ ID NO: 3191565 - DNA, 25 bp, Homo sapien
aacaacaatcaatttcatgtaggtg

SEQ ID NO: 3191566 - DNA, 25 bp, Homo sapien
ttccatctactggtcactctaggca

SEQ ID NO: 3191567 - DNA, 25 bp, Homo sapien
aatttccatctactggtcactctag

SEQ ID NO: 3191568 - DNA, 25 bp, Homo sapien
caatcactggagcaatgtcacagct

SEQ ID NO: 3191569 - DNA, 25 bp, Homo sapien
tccatttctagctcaatcactggag

SEQ ID NO: 3191570 - DNA, 25 bp, Homo sapien
ctaccatcattgttcctccaaagcc

SEQ ID NO: 3191571 - DNA, 25 bp, Homo sapien
taccatcattgttcctccaaagcca

SEQ ID NO: 3191572 - DNA, 25 bp, Homo sapien
tctgcctgggtttagaatcagagcc

SEQ ID NO: 3191573 - DNA, 25 bp, Homo sapien
tgcctgacagactagaatggttggt

SEQ ID NO: 3191574 - DNA, 25 bp, Homo sapien
taatctgactataagcttgccccac

SEQ ID NO: 3191575 - DNA, 25 bp, Homo sapien
caggaatagctgacacaagttgggt

SEQ ID NO: 3191576 - DNA, 25 bp, Homo sapien
gtgtccctttgaagtcataaataat

SEQ ID NO: 3191577 - DNA, 25 bp, Homo sapien
ttgcaggagggttttcccctgttgc

SEQ ID NO: 3191578 - DNA, 25 bp, Homo sapien
catttctaatctgagggtcacagcc

SEQ ID NO: 3191579 - DNA, 25 bp, Homo sapien
tgggtggtgatgtgtactgggcaaa

SEQ ID NO: 3191580 - DNA, 25 bp, Homo sapien
gtgggtggtgatgtgtactgggcaa

SEQ ID NO: 3191581 - DNA, 25 bp, Homo sapien
ttttgttcctgataatgtcgttttc

SEQ ID NO: 3191582 - DNA, 25 bp, Homo sapien
tgttcctgataatgtcgttttcttt

SEQ ID NO: 3191583 - DNA, 25 bp, Homo sapien
ttcctgataatgtcgttttctttct

SEQ ID NO: 3191584 - DNA, 25 bp, Homo sapien
tttgttcctgataatgtcgttttct

SEQ ID NO: 3191585 - DNA, 25 bp, Homo sapien
tgaacaattgactagatagctatgt

SEQ ID NO: 3191586 - DNA, 25 bp, Homo sapien
atagctatgttccaagtcagcagga

SEQ ID NO: 3191587 - DNA, 25 bp, Homo sapien
ctgctttgctgaacaattgactaga

SEQ ID NO: 3191588 - DNA, 25 bp, Homo sapien
tgttccaagtcagcaggataaaata

SEQ ID NO: 3191589 - DNA, 25 bp, Homo sapien
tccaggaaaccttgttgaacttcca

SEQ ID NO: 3191590 - DNA, 25 bp, Homo sapien
tgtttatcactctcgcctttccctt

SEQ ID NO: 3191591 - DNA, 25 bp, Homo sapien
gccctgcatttaactcttgcctaac

SEQ ID NO: 3191592 - DNA, 25 bp, Homo sapien
tataacactatagtcctgtattgtc

SEQ ID NO: 3191593 - DNA, 25 bp, Homo sapien
ccaaattgagtccatttgatttaat

SEQ ID NO: 3191594 - DNA, 25 bp, Homo sapien
ttttagtccaaattgagtccatttg

SEQ ID NO: 3191595 - DNA, 25 bp, Homo sapien
tagtccaaattgagtccatttgatt

SEQ ID NO: 3191596 - DNA, 25 bp, Homo sapien
gtcattttagtccaaattgagtcca

SEQ ID NO: 3191597 - DNA, 25 bp, Homo sapien
gagggctatgtggttctttccgcca

SEQ ID NO: 3191598 - DNA, 25 bp, Homo sapien
gagtctgaagtactgcccatatagt

SEQ ID NO: 3191599 - DNA, 25 bp, Homo sapien
tgtcagcagacgcagaatgttcctc

SEQ ID NO: 3191600 - DNA, 25 bp, Homo sapien
tatagtatctgcactgcacatgcac

SEQ ID NO: 3191601 - DNA, 25 bp, Homo sapien
tcacagaaatttcgctgtggttgtc

SEQ ID NO: 3191602 - DNA, 25 bp, Homo sapien
tccacagggcctagctcatggacat

SEQ ID NO: 3191603 - DNA, 25 bp, Homo sapien
ttccctctgattaatgcagtaagtg

SEQ ID NO: 3191604 - DNA, 25 bp, Homo sapien
aatgcagtaagtggcctccacaggg

SEQ ID NO: 3191605 - DNA, 25 bp, Homo sapien
tctatccatacttccctaattgtgg

SEQ ID NO: 3191606 - DNA, 25 bp, Homo sapien
acatctatccatacttccctaattg

SEQ ID NO: 3191607 - DNA, 25 bp, Homo sapien
catacttccctaattgtggtcttga

SEQ ID NO: 3191608 - DNA, 25 bp, Homo sapien
tccatacttccctaattgtggtctt

SEQ ID NO: 3191609 - DNA, 25 bp, Homo sapien
gattctggtgttatatctccacgag

SEQ ID NO: 3191610 - DNA, 25 bp, Homo sapien
ttcgttaggtcctgaaactctcctg

SEQ ID NO: 3191611 - DNA, 25 bp, Homo sapien
cctgcaatggagtagattctctgga

SEQ ID NO: 3191612 - DNA, 25 bp, Homo sapien
tctcctttgctggactattaaggtt

SEQ ID NO: 3191613 - DNA, 25 bp, Homo sapien
agacctgaccggcagtcttttgttt

SEQ ID NO: 3191614 - DNA, 25 bp, Homo sapien
tattttggacactgtacttctcctc

SEQ ID NO: 3191615 - DNA, 25 bp, Homo sapien
tagcacttgagagacagtatttaaa

SEQ ID NO: 3191616 - DNA, 25 bp, Homo sapien
tgccaagtgacccagaagacctgac

SEQ ID NO: 3191617 - DNA, 25 bp, Homo sapien
actcctgtgattatagctttcataa

SEQ ID NO: 3191618 - DNA, 25 bp, Homo sapien
ccactcctgtgattatagctttcat

SEQ ID NO: 3191619 - DNA, 25 bp, Homo sapien
cccactcctgtgattatagctttca

SEQ ID NO: 3191620 - DNA, 25 bp, Homo sapien
cactcctgtgattatagctttcata

SEQ ID NO: 3191621 - DNA, 25 bp, Homo sapien
tgcatcgttgtattggctgcccctc

SEQ ID NO: 3191622 - DNA, 25 bp, Homo sapien
agtgatttggagatacggtacagtc

SEQ ID NO: 3191623 - DNA, 25 bp, Homo sapien
ttctcagaaggtcctgtagatccag

SEQ ID NO: 3191624 - DNA, 25 bp, Homo sapien
ggtacagtccataagttttctcaga

SEQ ID NO: 3191625 - DNA, 25 bp, Homo sapien
ataaaaatggacaggaaatgctcca

SEQ ID NO: 3191626 - DNA, 25 bp, Homo sapien
cttgaccaatatggcataaaaatgg

SEQ ID NO: 3191627 - DNA, 25 bp, Homo sapien
gaccaatatggcataaaaatggaca

SEQ ID NO: 3191628 - DNA, 25 bp, Homo sapien
taaaaatggacaggaaatgctccac

SEQ ID NO: 3191629 - DNA, 25 bp, Homo sapien
actgcagatccgcttggccacatct

SEQ ID NO: 3191630 - DNA, 25 bp, Homo sapien
ttattgaatgtttcttgtgtagcac

SEQ ID NO: 3191631 - DNA, 25 bp, Homo sapien
taattgcatgcacatttattgaatg

SEQ ID NO: 3191632 - DNA, 25 bp, Homo sapien
cacagatagtataattgcatgcaca

SEQ ID NO: 3191633 - DNA, 25 bp, Homo sapien
taacaaccatctttgagtctgtttc

SEQ ID NO: 3191634 - DNA, 25 bp, Homo sapien
tgcgtgttgagcgtgctttgctgct

SEQ ID NO: 3191635 - DNA, 25 bp, Homo sapien
gattttgctggaacagtgcgtgttg

SEQ ID NO: 3191636 - DNA, 25 bp, Homo sapien
gaattccttaacaaccatctttgag

SEQ ID NO: 3191637 - DNA, 25 bp, Homo sapien
tctccataagcaagaacgatgtctc

SEQ ID NO: 3191638 - DNA, 25 bp, Homo sapien
aacgatgtctcagatcggatgtacc

SEQ ID NO: 3191639 - DNA, 25 bp, Homo sapien
taagcaagaacgatgtctcagatcg

SEQ ID NO: 3191640 - DNA, 25 bp, Homo sapien
ttgctcttctccataagcaagaacg

SEQ ID NO: 3191641 - DNA, 25 bp, Homo sapien
gagaagagtcacttgagtgccccac

SEQ ID NO: 3191642 - DNA, 25 bp, Homo sapien
cacctttacactaggtgcacagaat

SEQ ID NO: 3191643 - DNA, 25 bp, Homo sapien
tgccagccacctttacactaggtgc

SEQ ID NO: 3191644 - DNA, 25 bp, Homo sapien
atatggtaattaggcccccatggcc

SEQ ID NO: 3191645 - DNA, 25 bp, Homo sapien
gccccggctggtcagcaggataaag

SEQ ID NO: 3191646 - DNA, 25 bp, Homo sapien
agaaagtggtgttgtagggctccac

SEQ ID NO: 3191647 - DNA, 25 bp, Homo sapien
gactgagaaagtggtgttgtagggc

SEQ ID NO: 3191648 - DNA, 25 bp, Homo sapien
tgagctggtagactgagaaagtggt

SEQ ID NO: 3191649 - DNA, 25 bp, Homo sapien
ggcagtcatcatagtcttggcatca

SEQ ID NO: 3191650 - DNA, 25 bp, Homo sapien
gcagtcatcatagtcttggcatcaa

SEQ ID NO: 3191651 - DNA, 25 bp, Homo sapien
agtcatcatagtcttggcatcaaac

SEQ ID NO: 3191652 - DNA, 25 bp, Homo sapien
cggcagtcatcatagtcttggcatc

SEQ ID NO: 3191653 - DNA, 25 bp, Homo sapien
ctccctccgggacatgtggcccctg

SEQ ID NO: 3191654 - DNA, 25 bp, Homo sapien
cattaggtagcagccttgcaggggt

SEQ ID NO: 3191655 - DNA, 25 bp, Homo sapien
ggcagctgccattaggtagcagcct

SEQ ID NO: 3191656 - DNA, 25 bp, Homo sapien
ctccgggacatgtggcccctgaaaa

SEQ ID NO: 3191657 - DNA, 25 bp, Homo sapien
cacattgtgggggatccagtcagca

SEQ ID NO: 3191658 - DNA, 25 bp, Homo sapien
tcacagaaagctgttttcacattgt

SEQ ID NO: 3191659 - DNA, 25 bp, Homo sapien
acagaaagctgttttcacattgtgg

SEQ ID NO: 3191660 - DNA, 25 bp, Homo sapien
gatgtcacagaaagctgttttcaca

SEQ ID NO: 3191661 - DNA, 25 bp, Homo sapien
ggtactgttggtactcaaacatcag

SEQ ID NO: 3191662 - DNA, 25 bp, Homo sapien
ctgaacacggcagtgaactgctttg

SEQ ID NO: 3191663 - DNA, 25 bp, Homo sapien
gcctgaacacggcagtgaactgctt

SEQ ID NO: 3191664 - DNA, 25 bp, Homo sapien
ctgttggtactcaaacatcaggttg

SEQ ID NO: 3191665 - DNA, 25 bp, Homo sapien
ccagggtgccatagttctccataag

SEQ ID NO: 3191666 - DNA, 25 bp, Homo sapien
ctccaaaactgggtcgagcaggcct

SEQ ID NO: 3191667 - DNA, 25 bp, Homo sapien
cagatgactgtggatcgatagcagc

SEQ ID NO: 3191668 - DNA, 25 bp, Homo sapien
cagatacaatgttctgctggtgggc

SEQ ID NO: 3191669 - DNA, 25 bp, Homo sapien
cggcctgggcgcctgaagtaccagc

SEQ ID NO: 3191670 - DNA, 25 bp, Homo sapien
acccgccgctgacaggagccgccgg

SEQ ID NO: 3191671 - DNA, 25 bp, Homo sapien
tcctgtcactggctcgcccaacccc

SEQ ID NO: 3191672 - DNA, 25 bp, Homo sapien
gctgccctgggatccgccgcacccg

SEQ ID NO: 3191673 - DNA, 25 bp, Homo sapien
acagccgccggaggaccacgccgcg

SEQ ID NO: 3191674 - DNA, 25 bp, Homo sapien
agccaactcctaccgccccggacag

SEQ ID NO: 3191675 - DNA, 25 bp, Homo sapien
cccggacagccgccggaggaccacg

SEQ ID NO: 3191676 - DNA, 25 bp, Homo sapien
ccgcagccaactcctaccgccccgg

SEQ ID NO: 3191677 - DNA, 25 bp, Homo sapien
ctcgtcgcgttccccgccgtcgccg

SEQ ID NO: 3191678 - DNA, 25 bp, Homo sapien
cgctctccttcggccgctgtccgcg

SEQ ID NO: 3191679 - DNA, 25 bp, Homo sapien
gatcccacccggtccctgccgcctc

SEQ ID NO: 3191680 - DNA, 25 bp, Homo sapien
ctccttcggccgctgtccgcgccgc

SEQ ID NO: 3191681 - DNA, 25 bp, Homo sapien
gctctccttcggccgctgtccgcgc

SEQ ID NO: 3191682 - DNA, 25 bp, Homo sapien
ttcctctcaatacccatgaggctat

SEQ ID NO: 3191683 - DNA, 25 bp, Homo sapien
atttcctctcaatacccatgaggct

SEQ ID NO: 3191684 - DNA, 25 bp, Homo sapien
ctctaatttcctctcaatacccatg

SEQ ID NO: 3191685 - DNA, 25 bp, Homo sapien
tctcaatacccatgaggctatccat

SEQ ID NO: 3191686 - DNA, 25 bp, Homo sapien
attttttgctcaaatggagtagcat

SEQ ID NO: 3191687 - DNA, 25 bp, Homo sapien
gataattatatacctagaagatgca

SEQ ID NO: 3191688 - DNA, 25 bp, Homo sapien
gagctactagtatttattagtacca

SEQ ID NO: 3191689 - DNA, 25 bp, Homo sapien
gagatacgtgtatacatgtgagtgg

SEQ ID NO: 3191690 - DNA, 25 bp, Homo sapien
gctccatacttcatacaatatagaa

SEQ ID NO: 3191691 - DNA, 25 bp, Homo sapien
ctttagttgcctgtacttgtctgta

SEQ ID NO: 3191692 - DNA, 25 bp, Homo sapien
tgtacttgtctgtattacttaagaa

SEQ ID NO: 3191693 - DNA, 25 bp, Homo sapien
ttcatagtttgagatgttaaatttc

SEQ ID NO: 3191694 - DNA, 25 bp, Homo sapien
catctttatttctgtgcagcttttt

SEQ ID NO: 3191695 - DNA, 25 bp, Homo sapien
gttgtgtcctcttttatttcgttga

SEQ ID NO: 3191696 - DNA, 25 bp, Homo sapien
tcctgctcgggacatgactcatgct

SEQ ID NO: 3191697 - DNA, 25 bp, Homo sapien
gatccacccattagtcgcttagtag

SEQ ID NO: 3191698 - DNA, 25 bp, Homo sapien
tcgacagatcacaagaagggtgact

SEQ ID NO: 3191699 - DNA, 25 bp, Homo sapien
tccaacgatcatggaaaggctgcct

SEQ ID NO: 3191700 - DNA, 25 bp, Homo sapien
acacttcgtacagaaagtccagtgg

SEQ ID NO: 3191701 - DNA, 25 bp, Homo sapien
tctgcttcttgtcgtaacaccgctt

SEQ ID NO: 3191702 - DNA, 25 bp, Homo sapien
gcttcttgtcgtaacaccgctttcc

SEQ ID NO: 3191703 - DNA, 25 bp, Homo sapien
tcttgtactgtgtcattttgtgggg

SEQ ID NO: 3191704 - DNA, 25 bp, Homo sapien
aattggcttagcttgtcccccatag

SEQ ID NO: 3191705 - DNA, 25 bp, Homo sapien
ccagaaaattggcttagcttgtccc

SEQ ID NO: 3191706 - DNA, 25 bp, Homo sapien
tggcttagcttgtcccccatagtca

SEQ ID NO: 3191707 - DNA, 25 bp, Homo sapien
ttatttccagaaaattggcttagct

SEQ ID NO: 3191708 - DNA, 25 bp, Homo sapien
actgaatcacttgggcctttctttc

SEQ ID NO: 3191709 - DNA, 25 bp, Homo sapien
acaaaagatgacacttagaactgaa

SEQ ID NO: 3191710 - DNA, 25 bp, Homo sapien
cacttagaactgaatcacttgggcc

SEQ ID NO: 3191711 - DNA, 25 bp, Homo sapien
aactcaagattttatagtcttcata

SEQ ID NO: 3191712 - DNA, 25 bp, Homo sapien
cagtgatactctttttttggtccat

SEQ ID NO: 3191713 - DNA, 25 bp, Homo sapien
gcagtgatactctttttttggtcca

SEQ ID NO: 3191714 - DNA, 25 bp, Homo sapien
caaagcagtgatactctttttttgg

SEQ ID NO: 3191715 - DNA, 25 bp, Homo sapien
aagcagtgatactctttttttggtc

SEQ ID NO: 3191716 - DNA, 25 bp, Homo sapien
taatggtagagtaggaaagccaacc

SEQ ID NO: 3191717 - DNA, 25 bp, Homo sapien
gaattaaatgtctggacactgacct

SEQ ID NO: 3191718 - DNA, 25 bp, Homo sapien
tgatctttgcaacaatctgtaaagg

SEQ ID NO: 3191719 - DNA, 25 bp, Homo sapien
agtattcaagcagaaaagttgctca

SEQ ID NO: 3191720 - DNA, 25 bp, Homo sapien
tctaaaggatacaaagactggtgtg

SEQ ID NO: 3191721 - DNA, 25 bp, Homo sapien
aaagggtgtcagtttccaggcaggc

SEQ ID NO: 3191722 - DNA, 25 bp, Homo sapien
taggatatcctctcaaataacacag

SEQ ID NO: 3191723 - DNA, 25 bp, Homo sapien
ggctaatgcctaaaagtaacatatc

SEQ ID NO: 3191724 - DNA, 25 bp, Homo sapien
gggagtgtcacaaaatcatctgcca

SEQ ID NO: 3191725 - DNA, 25 bp, Homo sapien
caaagcttgatcatttcagtcatcg

SEQ ID NO: 3191726 - DNA, 25 bp, Homo sapien
tcagtatgactttaagaaatgggct

SEQ ID NO: 3191727 - DNA, 25 bp, Homo sapien
taccattaagtatgccgtataggcc

SEQ ID NO: 3191728 - DNA, 25 bp, Homo sapien
catgcgttagaatccgctggagggc

SEQ ID NO: 3191729 - DNA, 25 bp, Homo sapien
taaggccaaatgtctacccagtagt

SEQ ID NO: 3191730 - DNA, 25 bp, Homo sapien
tatgatgctgatctggtgaccatgc

SEQ ID NO: 3191731 - DNA, 25 bp, Homo sapien
tgccaatagagggaccagcgtgaca

SEQ ID NO: 3191732 - DNA, 25 bp, Homo sapien
tactggttccactattcgttctcca

SEQ ID NO: 3191733 - DNA, 25 bp, Homo sapien
tagtccaagggcttgcaggccaagg

SEQ ID NO: 3191734 - DNA, 25 bp, Homo sapien
ttcttgtagtcatctccaaccggct

SEQ ID NO: 3191735 - DNA, 25 bp, Homo sapien
tgtgaagcccatgttgataaggttt

SEQ ID NO: 3191736 - DNA, 25 bp, Homo sapien
caacattaggtactggtggaaccag

SEQ ID NO: 3191737 - DNA, 25 bp, Homo sapien
catggctagccaattactgatgtga

SEQ ID NO: 3191738 - DNA, 25 bp, Homo sapien
tatataccctattaacaccagtgtg

SEQ ID NO: 3191739 - DNA, 25 bp, Homo sapien
taccatagggtgcagtcaactaggc

SEQ ID NO: 3191740 - DNA, 25 bp, Homo sapien
tatttgatgtactgaccaataatat

SEQ ID NO: 3191741 - DNA, 25 bp, Homo sapien
aaatattatttgatgtactgaccaa

SEQ ID NO: 3191742 - DNA, 25 bp, Homo sapien
ttgatgtactgaccaataatatatg

SEQ ID NO: 3191743 - DNA, 25 bp, Homo sapien
tgtactgaccaataatatatgtaga

SEQ ID NO: 3191744 - DNA, 25 bp, Homo sapien
tatttcaggatattagtataatctg

SEQ ID NO: 3191745 - DNA, 25 bp, Homo sapien
ttcaggatattagtataatctgcat

SEQ ID NO: 3191746 - DNA, 25 bp, Homo sapien
ttatttcaggatattagtataatct

SEQ ID NO: 3191747 - DNA, 25 bp, Homo sapien
cccagcacttttatagggatgagcc

SEQ ID NO: 3191748 - DNA, 25 bp, Homo sapien
catgaaccataatacccacaaggga

SEQ ID NO: 3191749 - DNA, 25 bp, Homo sapien
tatgaaccacacgaatagcctttga

SEQ ID NO: 3191750 - DNA, 25 bp, Homo sapien
tggtgacagcctagagagattttct

SEQ ID NO: 3191751 - DNA, 25 bp, Homo sapien
ccatgctctttgtgcacagtaagta

SEQ ID NO: 3191752 - DNA, 25 bp, Homo sapien
ccatgagtagatgaagtgggtttac

SEQ ID NO: 3191753 - DNA, 25 bp, Homo sapien
tatacttttggagtcaaagaacttc

SEQ ID NO: 3191754 - DNA, 25 bp, Homo sapien
gaacttcaaagtacaaccagctcta

SEQ ID NO: 3191755 - DNA, 25 bp, Homo sapien
ttacaaaatggcagaaaattttcgc

SEQ ID NO: 3191756 - DNA, 25 bp, Homo sapien
gtgaacaggcaacttacaaaatggc

SEQ ID NO: 3191757 - DNA, 25 bp, Homo sapien
atatccagaatctacaatgaactca

SEQ ID NO: 3191758 - DNA, 25 bp, Homo sapien
aacctactcatctgacaaagggcta

SEQ ID NO: 3191759 - DNA, 25 bp, Homo sapien
ggagcctaaaacaccacgcttcgat

SEQ ID NO: 3191760 - DNA, 25 bp, Homo sapien
ttaacacatatgtctgggctactag

SEQ ID NO: 3191761 - DNA, 25 bp, Homo sapien
catatgtctgggctactaggacact

SEQ ID NO: 3191762 - DNA, 25 bp, Homo sapien
cacgcttcgatacttgagaatttct

SEQ ID NO: 3191763 - DNA, 25 bp, Homo sapien
tctgtgcttgaacctatccagctcc

SEQ ID NO: 3191764 - DNA, 25 bp, Homo sapien
ctacgtctgtgcttgaacctatcca

SEQ ID NO: 3191765 - DNA, 25 bp, Homo sapien
gatggtttgtcctgatatcttgtga

SEQ ID NO: 3191766 - DNA, 25 bp, Homo sapien
cagctcccatgacatgccctaatga

SEQ ID NO: 3191767 - DNA, 25 bp, Homo sapien
gccattgaaaatcttatttcgaaca

SEQ ID NO: 3191768 - DNA, 25 bp, Homo sapien
acatcagttccaatagtgctttggg

SEQ ID NO: 3191769 - DNA, 25 bp, Homo sapien
aatcttatttcgaacatgctccaaa

SEQ ID NO: 3191770 - DNA, 25 bp, Homo sapien
ggtgggggcacagcatatgatttct

SEQ ID NO: 3191771 - DNA, 25 bp, Homo sapien
tccaggcatcaccggatttccccat

SEQ ID NO: 3191772 - DNA, 25 bp, Homo sapien
atccaggcatcaccggatttcccca

SEQ ID NO: 3191773 - DNA, 25 bp, Homo sapien
cttctctggcgaccggcctgtgcgt

SEQ ID NO: 3191774 - DNA, 25 bp, Homo sapien
gttggaccttgacctgactaggaaa

SEQ ID NO: 3191775 - DNA, 25 bp, Homo sapien
gtttcgggcatcctcgtccggagca

SEQ ID NO: 3191776 - DNA, 25 bp, Homo sapien
tctgcctgcgagacggttcaattcc

SEQ ID NO: 3191777 - DNA, 25 bp, Homo sapien
cagcgtgagtgaccgcctccagctg

SEQ ID NO: 3191778 - DNA, 25 bp, Homo sapien
gctcctagcccagcgtgagtgaccg

SEQ ID NO: 3191779 - DNA, 25 bp, Homo sapien
cttctcgcctcagctcctagcccag

SEQ ID NO: 3191780 - DNA, 25 bp, Homo sapien
ctcagctcctagcccagcgtgagtg

SEQ ID NO: 3191781 - DNA, 25 bp, Homo sapien
aggagcaccgggctcaaggctctgg

SEQ ID NO: 3191782 - DNA, 25 bp, Homo sapien
gggaggagcaccgggctcaaggctc

SEQ ID NO: 3191783 - DNA, 25 bp, Homo sapien
ctctggactccctcgccgtccgcat

SEQ ID NO: 3191784 - DNA, 25 bp, Homo sapien
gcaccgggctcaaggctctggactc

SEQ ID NO: 3191785 - DNA, 25 bp, Homo sapien
cacgagccgaaatggggttcaagga

SEQ ID NO: 3191786 - DNA, 25 bp, Homo sapien
tcctcccgctcaatgcccaaaccca

SEQ ID NO: 3191787 - DNA, 25 bp, Homo sapien
gcatccgcacggcacgagccgaaat

SEQ ID NO: 3191788 - DNA, 25 bp, Homo sapien
gcacggggcgacgaaagacgaggcg

SEQ ID NO: 3191789 - DNA, 25 bp, Homo sapien
ccgcttccttgcgaagcagtccgaa

SEQ ID NO: 3191790 - DNA, 25 bp, Homo sapien
agccgccccgcttccttgcgaagca

SEQ ID NO: 3191791 - DNA, 25 bp, Homo sapien
ccgccccgcttccttgcgaagcagt

SEQ ID NO: 3191792 - DNA, 25 bp, Homo sapien
agcagtccgaagcactgcgtccagc

SEQ ID NO: 3191793 - DNA, 25 bp, Homo sapien
ttaacgttcatgaatccagtcacat

SEQ ID NO: 3191794 - DNA, 25 bp, Homo sapien
tatctgctgatagatgcaaatctgt

SEQ ID NO: 3191795 - DNA, 25 bp, Homo sapien
gctcaagtaattctgggactcccaa

SEQ ID NO: 3191796 - DNA, 25 bp, Homo sapien
ggcgcaatcctgactcattgcagct

SEQ ID NO: 3191797 - DNA, 25 bp, Homo sapien
tacccagcctggtcgcaaattcttg

SEQ ID NO: 3191798 - DNA, 25 bp, Homo sapien
tcacctcttgagcatgttctaaaat

SEQ ID NO: 3191799 - DNA, 25 bp, Homo sapien
aagtgctcacctcttgagcatgttc

SEQ ID NO: 3191800 - DNA, 25 bp, Homo sapien
gtgctcacctcttgagcatgttcta

SEQ ID NO: 3191801 - DNA, 25 bp, Homo sapien
gctcacctcttgagcatgttctaaa

SEQ ID NO: 3191802 - DNA, 25 bp, Homo sapien
ttcaatcaaattaaggactacttac

SEQ ID NO: 3191803 - DNA, 25 bp, Homo sapien
taacagtcctacaaaatggccaaga

SEQ ID NO: 3191804 - DNA, 25 bp, Homo sapien
gtggtagttactatccccaaataca

SEQ ID NO: 3191805 - DNA, 25 bp, Homo sapien
aatacaatgtctttctagagatagg

SEQ ID NO: 3191806 - DNA, 25 bp, Homo sapien
taacttgataagtaaccacctgaaa

SEQ ID NO: 3191807 - DNA, 25 bp, Homo sapien
tcatcactttctactagattctcaa

SEQ ID NO: 3191808 - DNA, 25 bp, Homo sapien
ttcatcactttctactagattctca

SEQ ID NO: 3191809 - DNA, 25 bp, Homo sapien
catcactttctactagattctcaaa

SEQ ID NO: 3191810 - DNA, 25 bp, Homo sapien
ctatgactgcttcctgggctctccc

SEQ ID NO: 3191811 - DNA, 25 bp, Homo sapien
tatgactgcttcctgggctctcccc

SEQ ID NO: 3191812 - DNA, 25 bp, Homo sapien
tcgagaatctatctcccagaccagg

SEQ ID NO: 3191813 - DNA, 25 bp, Homo sapien
tcccagtgtctagcacggtgcttgg

SEQ ID NO: 3191814 - DNA, 25 bp, Homo sapien
aaaatcccagtgtctagcacggtgc

SEQ ID NO: 3191815 - DNA, 25 bp, Homo sapien
ggcacacgacagttgcttaataaat

SEQ ID NO: 3191816 - DNA, 25 bp, Homo sapien
cattctgaccctgggtcatttccat

SEQ ID NO: 3191817 - DNA, 25 bp, Homo sapien
tcacttggtttactcacattctgac

SEQ ID NO: 3191818 - DNA, 25 bp, Homo sapien
ttggtttactcacattctgaccctg

SEQ ID NO: 3191819 - DNA, 25 bp, Homo sapien
tccatattcacttggtttactcaca

SEQ ID NO: 3191820 - DNA, 25 bp, Homo sapien
cttaatcctcctattttatcctgct

SEQ ID NO: 3191821 - DNA, 25 bp, Homo sapien
ttctcagtctatctgtcccagtcat

SEQ ID NO: 3191822 - DNA, 25 bp, Homo sapien
cctcctattttatcctgcttaatca

SEQ ID NO: 3191823 - DNA, 25 bp, Homo sapien
tatcctgcttaatcactctggcttc

SEQ ID NO: 3191824 - DNA, 25 bp, Homo sapien
ttgtttttcggcaatggaatcataa

SEQ ID NO: 3191825 - DNA, 25 bp, Homo sapien
ggcaatggaatcataatgcctttct

SEQ ID NO: 3191826 - DNA, 25 bp, Homo sapien
tttttcggcaatggaatcataatgc

SEQ ID NO: 3191827 - DNA, 25 bp, Homo sapien
tttcggcaatggaatcataatgcct

SEQ ID NO: 3191828 - DNA, 25 bp, Homo sapien
attataggccatttcaataaacaca

SEQ ID NO: 3191829 - DNA, 25 bp, Homo sapien
gaactatgaccaccaagcccggtct

SEQ ID NO: 3191830 - DNA, 25 bp, Homo sapien
ccacttattgtgaaacagggtaatt

SEQ ID NO: 3191831 - DNA, 25 bp, Homo sapien
tccatttagtttagtgggtgcaaaa

SEQ ID NO: 3191832 - DNA, 25 bp, Homo sapien
aaaaatcagaacctgtctaactgct

SEQ ID NO: 3191833 - DNA, 25 bp, Homo sapien
ctgtacatgaacaaaacgataagga

SEQ ID NO: 3191834 - DNA, 25 bp, Homo sapien
cagaacctgtctaactgctctaaaa

SEQ ID NO: 3191835 - DNA, 25 bp, Homo sapien
gataaggattaacaaaaatcagaac

SEQ ID NO: 3191836 - DNA, 25 bp, Homo sapien
tcacgctgtgcagcgtataaagctt

SEQ ID NO: 3191837 - DNA, 25 bp, Homo sapien
gtgcagcgtataaagcttcttcttc

SEQ ID NO: 3191838 - DNA, 25 bp, Homo sapien
cttcttctagtcttaacttctcttc

SEQ ID NO: 3191839 - DNA, 25 bp, Homo sapien
gctgtgcagcgtataaagcttcttc

SEQ ID NO: 3191840 - DNA, 25 bp, Homo sapien
tccattgttggaaggatgatattgc

SEQ ID NO: 3191841 - DNA, 25 bp, Homo sapien
gatattctccattgttggaaggatg

SEQ ID NO: 3191842 - DNA, 25 bp, Homo sapien
gatattgctgcacaattctctgcct

SEQ ID NO: 3191843 - DNA, 25 bp, Homo sapien
ggaaggatgatattgctgcacaatt

SEQ ID NO: 3191844 - DNA, 25 bp, Homo sapien
taattttttaatatattcatggtag

SEQ ID NO: 3191845 - DNA, 25 bp, Homo sapien
tacttcgaaaaacttcatactgtga

SEQ ID NO: 3191846 - DNA, 25 bp, Homo sapien
gaaaaacttcatactgtgacttcat

SEQ ID NO: 3191847 - DNA, 25 bp, Homo sapien
aaacaagattcgaagtcatcttctg

SEQ ID NO: 3191848 - DNA, 25 bp, Homo sapien
tactacttcgaaaaacttcatactg

SEQ ID NO: 3191849 - DNA, 25 bp, Homo sapien
tgctgtcgtcatttccactagttga

SEQ ID NO: 3191850 - DNA, 25 bp, Homo sapien
ctagatctaaggatgtgctgtcgtc

SEQ ID NO: 3191851 - DNA, 25 bp, Homo sapien
cactagttgatttagttttggtcat

SEQ ID NO: 3191852 - DNA, 25 bp, Homo sapien
tccactagttgatttagttttggtc

SEQ ID NO: 3191853 - DNA, 25 bp, Homo sapien
tttcaggtaaaattgtgaattataa

SEQ ID NO: 3191854 - DNA, 25 bp, Homo sapien
ggtagatttacataaatcaacacag

SEQ ID NO: 3191855 - DNA, 25 bp, Homo sapien
cacagattacgttaaatttttcagg

SEQ ID NO: 3191856 - DNA, 25 bp, Homo sapien
aagaccaaggtagatttacataaat

SEQ ID NO: 3191857 - DNA, 25 bp, Homo sapien
ctcagaacagataataaagctatat

SEQ ID NO: 3191858 - DNA, 25 bp, Homo sapien
atctcagaacagataataaagctat

SEQ ID NO: 3191859 - DNA, 25 bp, Homo sapien
tctcagaacagataataaagctata

SEQ ID NO: 3191860 - DNA, 25 bp, Homo sapien
taagtgctgcccgtagaatgtcttc

SEQ ID NO: 3191861 - DNA, 25 bp, Homo sapien
gatttacaaatccagaatactcgga

SEQ ID NO: 3191862 - DNA, 25 bp, Homo sapien
gaatcagacagttctaatacaggat

SEQ ID NO: 3191863 - DNA, 25 bp, Homo sapien
tgtcagaatgccttatgccagaatc

SEQ ID NO: 3191864 - DNA, 25 bp, Homo sapien
tgcttccttcacatcggctgagaat

SEQ ID NO: 3191865 - DNA, 25 bp, Homo sapien
aaataatgctggaaacgggaacact

SEQ ID NO: 3191866 - DNA, 25 bp, Homo sapien
tagagtcatctacccacatcaactg

SEQ ID NO: 3191867 - DNA, 25 bp, Homo sapien
gaatctgacgatccctcctcatgct

SEQ ID NO: 3191868 - DNA, 25 bp, Homo sapien
tacaatcgtagcttatgccaaacca

SEQ ID NO: 3191869 - DNA, 25 bp, Homo sapien
ctatccctggccttgtaaattgaca

SEQ ID NO: 3191870 - DNA, 25 bp, Homo sapien
catgcaccgtcattgttgcaagagg

SEQ ID NO: 3191871 - DNA, 25 bp, Homo sapien
ttttaagcacagcaagaactttagg

SEQ ID NO: 3191872 - DNA, 25 bp, Homo sapien
tgagaaattgcctcacggcagcctt

SEQ ID NO: 3191873 - DNA, 25 bp, Homo sapien
cctacgtggactatgtgcagtgagc

SEQ ID NO: 3191874 - DNA, 25 bp, Homo sapien
gaggatcacgatgttttctaccaag

SEQ ID NO: 3191875 - DNA, 25 bp, Homo sapien
gataaatggccctttgacagctcct

SEQ ID NO: 3191876 - DNA, 25 bp, Homo sapien
gcaattttcccttactgggctagca

SEQ ID NO: 3191877 - DNA, 25 bp, Homo sapien
tgttgcccatgagctcaagatgtct

SEQ ID NO: 3191878 - DNA, 25 bp, Homo sapien
gaggaaggccaaactctgccatctt

SEQ ID NO: 3191879 - DNA, 25 bp, Homo sapien
gattgagtacccagcttgacctttg

SEQ ID NO: 3191880 - DNA, 25 bp, Homo sapien
tcaaaagttctagtgttaccagtgg

SEQ ID NO: 3191881 - DNA, 25 bp, Homo sapien
tacatagttaaacgaaacctctggc

SEQ ID NO: 3191882 - DNA, 25 bp, Homo sapien
taccagtggtgagtatgggcacgct

SEQ ID NO: 3191883 - DNA, 25 bp, Homo sapien
tgggcacgctccatagtccttgatc

SEQ ID NO: 3191884 - DNA, 25 bp, Homo sapien
cagtagtcagaaggggggaaaagag

SEQ ID NO: 3191885 - DNA, 25 bp, Homo sapien
tatgaacaatcaactgagctaattc

SEQ ID NO: 3191886 - DNA, 25 bp, Homo sapien
gtgcagtagtcagaaggggggaaaa

SEQ ID NO: 3191887 - DNA, 25 bp, Homo sapien
ggaaaagagtagaacaagaaattca

SEQ ID NO: 3191888 - DNA, 25 bp, Homo sapien
ttctaggctagtgtctgcgcgtcac

SEQ ID NO: 3191889 - DNA, 25 bp, Homo sapien
caggttgttactggtgtttgcagcc

SEQ ID NO: 3191890 - DNA, 25 bp, Homo sapien
cagtactggaataggttctaggcta

SEQ ID NO: 3191891 - DNA, 25 bp, Homo sapien
tgcagcctgtcagtacttgcagtac

SEQ ID NO: 3191892 - DNA, 25 bp, Homo sapien
gattcccctcgctctgagccgggag

SEQ ID NO: 3191893 - DNA, 25 bp, Homo sapien
cctgcgcccagtctcctcgattccc

SEQ ID NO: 3191894 - DNA, 25 bp, Homo sapien
cgggagagccgaacagctgaagaga

SEQ ID NO: 3191895 - DNA, 25 bp, Homo sapien
ttttctgtttatcccgcaaagacag

SEQ ID NO: 3191896 - DNA, 25 bp, Homo sapien
gagcagcggccgggtgtccaccccc

SEQ ID NO: 3191897 - DNA, 25 bp, Homo sapien
agcagcggccgggtgtccaccccca

SEQ ID NO: 3191898 - DNA, 25 bp, Homo sapien
gcagcggccgggtgtccacccccat

SEQ ID NO: 3191899 - DNA, 25 bp, Homo sapien
ctgggtacctggtgagaaaggcgcc

SEQ ID NO: 3191900 - DNA, 25 bp, Homo sapien
gtacctggtgagaaaggcgccagct

SEQ ID NO: 3191901 - DNA, 25 bp, Homo sapien
cctggtgagaaaggcgccagctgcc

SEQ ID NO: 3191902 - DNA, 25 bp, Homo sapien
ggctgggtacctggtgagaaaggcg

SEQ ID NO: 3191903 - DNA, 25 bp, Homo sapien
gaggagaggccactcgtttgggaag

SEQ ID NO: 3191904 - DNA, 25 bp, Homo sapien
cactcgtttgggaaggcgcggtccg

SEQ ID NO: 3191905 - DNA, 25 bp, Homo sapien
tctctagctcgccaatcgggctgga

SEQ ID NO: 3191906 - DNA, 25 bp, Homo sapien
gtccgggtcggtgtaccgcgcacca

SEQ ID NO: 3191907 - DNA, 25 bp, Homo sapien
gggctctggccttattcaagctttt

SEQ ID NO: 3191908 - DNA, 25 bp, Homo sapien
gcctaatttagatatgagtgactta

SEQ ID NO: 3191909 - DNA, 25 bp, Homo sapien
taataaagcccatattacaaattac

SEQ ID NO: 3191910 - DNA, 25 bp, Homo sapien
gatatgagtgacttaaaattgcttc

SEQ ID NO: 3191911 - DNA, 25 bp, Homo sapien
ggtacagcctctctgaaacacactg

SEQ ID NO: 3191912 - DNA, 25 bp, Homo sapien
taagaccagcaaatctaactctgag

SEQ ID NO: 3191913 - DNA, 25 bp, Homo sapien
cactgtttctcataaacggcttcag

SEQ ID NO: 3191914 - DNA, 25 bp, Homo sapien
ctctgagcagagttaattctggtac

SEQ ID NO: 3191915 - DNA, 25 bp, Homo sapien
gctgatacagaatctatggtattca

SEQ ID NO: 3191916 - DNA, 25 bp, Homo sapien
ctgatacagaatctatggtattcat

SEQ ID NO: 3191917 - DNA, 25 bp, Homo sapien
cgctgatacagaatctatggtattc

SEQ ID NO: 3191918 - DNA, 25 bp, Homo sapien
ccgctgatacagaatctatggtatt

SEQ ID NO: 3191919 - DNA, 25 bp, Homo sapien
caaagtttcggttcattagatttca

SEQ ID NO: 3191920 - DNA, 25 bp, Homo sapien
tagtgtcgcttctaccactgtgaac

SEQ ID NO: 3191921 - DNA, 25 bp, Homo sapien
ctgccattagtgtcgcttctaccac

SEQ ID NO: 3191922 - DNA, 25 bp, Homo sapien
ttgcccttagtactctggaatggtg

SEQ ID NO: 3191923 - DNA, 25 bp, Homo sapien
tgtgaacttgcccttagtactctgg

SEQ ID NO: 3191924 - DNA, 25 bp, Homo sapien
gatgcaagctaaatctgggtaacct

SEQ ID NO: 3191925 - DNA, 25 bp, Homo sapien
cagtctgggtgttaatgaggatgcc

SEQ ID NO: 3191926 - DNA, 25 bp, Homo sapien
gtgacactctacacaacagaacagg

SEQ ID NO: 3191927 - DNA, 25 bp, Homo sapien
tagtgttcaaagaaggtaagatgcc

SEQ ID NO: 3191928 - DNA, 25 bp, Homo sapien
tgggtttgcccactacgtagcaggt

SEQ ID NO: 3191929 - DNA, 25 bp, Homo sapien
tagagaggctttacagcacagtgga

SEQ ID NO: 3191930 - DNA, 25 bp, Homo sapien
gcacagtggaaggaactctgagttt

SEQ ID NO: 3191931 - DNA, 25 bp, Homo sapien
aaactttgctagtagttgtcatgcc

SEQ ID NO: 3191932 - DNA, 25 bp, Homo sapien
cacttgcttggactgtgtagggcag

SEQ ID NO: 3191933 - DNA, 25 bp, Homo sapien
tacgatgaaccgtgaaccccactgt

SEQ ID NO: 3191934 - DNA, 25 bp, Homo sapien
aggtctcagcacgtcagtccctgtg

SEQ ID NO: 3191935 - DNA, 25 bp, Homo sapien
cactgtctgaatttaccaggtctca

SEQ ID NO: 3191936 - DNA, 25 bp, Homo sapien
aaagcaggtgaactctaagacgaca

SEQ ID NO: 3191937 - DNA, 25 bp, Homo sapien
agatggccctctcttgcagctgata

SEQ ID NO: 3191938 - DNA, 25 bp, Homo sapien
gcattcactagtcacaaagcaggtg

SEQ ID NO: 3191939 - DNA, 25 bp, Homo sapien
tcatttgaccggaggagatggccct

SEQ ID NO: 3191940 - DNA, 25 bp, Homo sapien
cacagcgaggataatatgatttttc

SEQ ID NO: 3191941 - DNA, 25 bp, Homo sapien
gaatgtggcttacaagctatttgta

SEQ ID NO: 3191942 - DNA, 25 bp, Homo sapien
gcagcgaggttagcactttattgtt

SEQ ID NO: 3191943 - DNA, 25 bp, Homo sapien
agctatttgtataccacagcgagga

SEQ ID NO: 3191944 - DNA, 25 bp, Homo sapien
gacgaactattagcctggcccacat

SEQ ID NO: 3191945 - DNA, 25 bp, Homo sapien
tggcccacatagctggaagagcgac

SEQ ID NO: 3191946 - DNA, 25 bp, Homo sapien
gaagagcgacatctcaggtcaaggt

SEQ ID NO: 3191947 - DNA, 25 bp, Homo sapien
tcagccatggtgacatctgacgaac

SEQ ID NO: 3191948 - DNA, 25 bp, Homo sapien
tcccgctcggtccagcttctgctcg

SEQ ID NO: 3191949 - DNA, 25 bp, Homo sapien
tcggtccagcttctgctcgtgtcgc

SEQ ID NO: 3191950 - DNA, 25 bp, Homo sapien
agcttctgctcgtgtcgctgtctcc

SEQ ID NO: 3191951 - DNA, 25 bp, Homo sapien
tccagcttctgctcgtgtcgctgtc

SEQ ID NO: 3191952 - DNA, 25 bp, Homo sapien
tccaggaccttggtcatgtactcct

SEQ ID NO: 3191953 - DNA, 25 bp, Homo sapien
gacattccaggaccttggtcatgta

SEQ ID NO: 3191954 - DNA, 25 bp, Homo sapien
aagggaagtctacggtcacaccatt

SEQ ID NO: 3191955 - DNA, 25 bp, Homo sapien
cacaccattcaggactatcttgggc

SEQ ID NO: 3191956 - DNA, 25 bp, Homo sapien
tcggcaaaattgcaggcaaagatgg

SEQ ID NO: 3191957 - DNA, 25 bp, Homo sapien
tatcggcaaaattgcaggcaaagat

SEQ ID NO: 3191958 - DNA, 25 bp, Homo sapien
cggcaaaattgcaggcaaagatggt

SEQ ID NO: 3191959 - DNA, 25 bp, Homo sapien
cctatcggcaaaattgcaggcaaag

SEQ ID NO: 3191960 - DNA, 25 bp, Homo sapien
ctaaggggtctccattatcagcagc

SEQ ID NO: 3191961 - DNA, 25 bp, Homo sapien
gcagcattgccccaggatgacaaag

SEQ ID NO: 3191962 - DNA, 25 bp, Homo sapien
cagcagcattgccccaggatgacaa

SEQ ID NO: 3191963 - DNA, 25 bp, Homo sapien
tgccccaggatgacaaaggcctgat

SEQ ID NO: 3191964 - DNA, 25 bp, Homo sapien
agtgggtcctaaaggcgtaaatgat

SEQ ID NO: 3191965 - DNA, 25 bp, Homo sapien
tgtgtgagttgcgagtgggtcctaa

SEQ ID NO: 3191966 - DNA, 25 bp, Homo sapien
tgcgagtgggtcctaaaggcgtaaa

SEQ ID NO: 3191967 - DNA, 25 bp, Homo sapien
tgagttgcgagtgggtcctaaaggc

SEQ ID NO: 3191968 - DNA, 25 bp, Homo sapien
ctcaggccggtaggaggtgttctga

SEQ ID NO: 3191969 - DNA, 25 bp, Homo sapien
aggccggtaggaggtgttctgaatt

SEQ ID NO: 3191970 - DNA, 25 bp, Homo sapien
aggtgttctgaattttgttgatgac

SEQ ID NO: 3191971 - DNA, 25 bp, Homo sapien
gaggtgttctgaattttgttgatga

SEQ ID NO: 3191972 - DNA, 25 bp, Homo sapien
ctcagggtggatgcacagctgctcc

SEQ ID NO: 3191973 - DNA, 25 bp, Homo sapien
atgcacagctgctcccgggagccca

SEQ ID NO: 3191974 - DNA, 25 bp, Homo sapien
tggatgcacagctgctcccgggagc

SEQ ID NO: 3191975 - DNA, 25 bp, Homo sapien
agggtggatgcacagctgctcccgg

SEQ ID NO: 3191976 - DNA, 25 bp, Homo sapien
taagggcatactccgtgcttgcttc

SEQ ID NO: 3191977 - DNA, 25 bp, Homo sapien
taataagggcatactccgtgcttgc

SEQ ID NO: 3191978 - DNA, 25 bp, Homo sapien
cgggacaggtaataagggcatactc

SEQ ID NO: 3191979 - DNA, 25 bp, Homo sapien
gacaggtaataagggcatactccgt

SEQ ID NO: 3191980 - DNA, 25 bp, Homo sapien
tccttcacacgtcttcttcaccttg

SEQ ID NO: 3191981 - DNA, 25 bp, Homo sapien
tatgacgtccagtcccgaactcggg

SEQ ID NO: 3191982 - DNA, 25 bp, Homo sapien
tccagtcccgaactcgggtcatggg

SEQ ID NO: 3191983 - DNA, 25 bp, Homo sapien
tgccaatccttcacacgtcttcttc

SEQ ID NO: 3191984 - DNA, 25 bp, Homo sapien
ttcagctttgcaatgtcttccagct

SEQ ID NO: 3191985 - DNA, 25 bp, Homo sapien
cttcagctttgcaatgtcttccagc

SEQ ID NO: 3191986 - DNA, 25 bp, Homo sapien
tcagctttgcaatgtcttccagctc

SEQ ID NO: 3191987 - DNA, 25 bp, Homo sapien
agctttgcaatgtcttccagctcca

SEQ ID NO: 3191988 - DNA, 25 bp, Homo sapien
tctggacaatatccgccagcttctg

SEQ ID NO: 3191989 - DNA, 25 bp, Homo sapien
cagggccattctcggaggggtctac

SEQ ID NO: 3191990 - DNA, 25 bp, Homo sapien
tgtgttggcgaacaccccagcacgt

SEQ ID NO: 3191991 - DNA, 25 bp, Homo sapien
gccattctcggaggggtctacactg

SEQ ID NO: 3191992 - DNA, 25 bp, Homo sapien
gatggatgtgcactttataggcccc

SEQ ID NO: 3191993 - DNA, 25 bp, Homo sapien
atggatgtgcactttataggccccc

SEQ ID NO: 3191994 - DNA, 25 bp, Homo sapien
ggatgtgcactttataggcccccag

SEQ ID NO: 3191995 - DNA, 25 bp, Homo sapien
ggatggatgtgcactttataggccc

SEQ ID NO: 3191996 - DNA, 25 bp, Homo sapien
tgccctgacagaccagcttgcgcat

SEQ ID NO: 3191997 - DNA, 25 bp, Homo sapien
gataaagcagatgccctgacagacc

SEQ ID NO: 3191998 - DNA, 25 bp, Homo sapien
ggtgaggatgataaagcagatgccc

SEQ ID NO: 3191999 - DNA, 25 bp, Homo sapien
cagatgccctgacagaccagcttgc

SEQ ID NO: 3192000 - DNA, 25 bp, Homo sapien
ggaaagggatctgcaactccagggc

SEQ ID NO: 3192001 - DNA, 25 bp, Homo sapien
atctggtgcttgtcgatgatgtgtg

SEQ ID NO: 3192002 - DNA, 25 bp, Homo sapien
gtgcttgtcgatgatgtgtgggttc

SEQ ID NO: 3192003 - DNA, 25 bp, Homo sapien
ttgtcgatgatgtgtgggttctcca

SEQ ID NO: 3192004 - DNA, 25 bp, Homo sapien
gcttgtcgatgatgtgtgggttctc

SEQ ID NO: 3192005 - DNA, 25 bp, Homo sapien
ccttccccaaagaggacaagcactc

SEQ ID NO: 3192006 - DNA, 25 bp, Homo sapien
ttccccaaagaggacaagcactcct

SEQ ID NO: 3192007 - DNA, 25 bp, Homo sapien
caaagaggacaagcactccttggaa

SEQ ID NO: 3192008 - DNA, 25 bp, Homo sapien
cccaaagaggacaagcactccttgg

SEQ ID NO: 3192009 - DNA, 25 bp, Homo sapien
tccatgatgggatatgaagggaaga

SEQ ID NO: 3192010 - DNA, 25 bp, Homo sapien
aagtagtgggcctgccagaactcca

SEQ ID NO: 3192011 - DNA, 25 bp, Homo sapien
gcctccatcttcctagccaagtagt

SEQ ID NO: 3192012 - DNA, 25 bp, Homo sapien
ccatggtctcagagaagctgccttt

SEQ ID NO: 3192013 - DNA, 25 bp, Homo sapien
tgtttccccggcataccgccaggaa

SEQ ID NO: 3192014 - DNA, 25 bp, Homo sapien
tcgctagtgtttccccggcataccg

SEQ ID NO: 3192015 - DNA, 25 bp, Homo sapien
ccctcgctagtgtttccccggcata

SEQ ID NO: 3192016 - DNA, 25 bp, Homo sapien
tccagcccctcgctagtgtttcccc

SEQ ID NO: 3192017 - DNA, 25 bp, Homo sapien
gaggcccgtgatgatcacactactg

SEQ ID NO: 3192018 - DNA, 25 bp, Homo sapien
tggcccttcatctcgcatcttaagg

SEQ ID NO: 3192019 - DNA, 25 bp, Homo sapien
ctatggaggcccgtgatgatcacac

SEQ ID NO: 3192020 - DNA, 25 bp, Homo sapien
tctcgcatcttaaggacaaccaggg

SEQ ID NO: 3192021 - DNA, 25 bp, Homo sapien
ctggcagtgccagatcacttgcccg

SEQ ID NO: 3192022 - DNA, 25 bp, Homo sapien
atcacttgcccgatggcctggttca

SEQ ID NO: 3192023 - DNA, 25 bp, Homo sapien
gacagccctgttgtcctggcagtgc

SEQ ID NO: 3192024 - DNA, 25 bp, Homo sapien
ggtcacagaggaagacagccctgtt

SEQ ID NO: 3192025 - DNA, 25 bp, Homo sapien
gttgtacaccctgacgtagggacgc

SEQ ID NO: 3192026 - DNA, 25 bp, Homo sapien
tggccgaagttgtacaccctgacgt

SEQ ID NO: 3192027 - DNA, 25 bp, Homo sapien
cttggatgacatggccgaagttgta

SEQ ID NO: 3192028 - DNA, 25 bp, Homo sapien
gacatggccgaagttgtacaccctg

SEQ ID NO: 3192029 - DNA, 25 bp, Homo sapien
gggccagttgacttagtcaccctga

SEQ ID NO: 3192030 - DNA, 25 bp, Homo sapien
tcttctgcctcacgcaaactgggtg

SEQ ID NO: 3192031 - DNA, 25 bp, Homo sapien
taaggacgtgcaggtcgagactctt

SEQ ID NO: 3192032 - DNA, 25 bp, Homo sapien
ctctgcttcaggctaaggacgtgca

SEQ ID NO: 3192033 - DNA, 25 bp, Homo sapien
agagcttggccgtgttcatctgtgc

SEQ ID NO: 3192034 - DNA, 25 bp, Homo sapien
ggctcctccgagtggctgaccagct

SEQ ID NO: 3192035 - DNA, 25 bp, Homo sapien
ccttccttgcggctcctctgccagc

SEQ ID NO: 3192036 - DNA, 25 bp, Homo sapien
gccacgggctcctccgagtggctga

SEQ ID NO: 3192037 - DNA, 25 bp, Homo sapien
tggctcagctcctacttcatggcca

SEQ ID NO: 3192038 - DNA, 25 bp, Homo sapien
cttggctcagctcctacttcatggc

SEQ ID NO: 3192039 - DNA, 25 bp, Homo sapien
tggcaaagttggcttggctcagctc

SEQ ID NO: 3192040 - DNA, 25 bp, Homo sapien
aaggtggcaaagttggcttggctca

SEQ ID NO: 3192041 - DNA, 25 bp, Homo sapien
ggcagcaaagtcatcggaacccttg

SEQ ID NO: 3192042 - DNA, 25 bp, Homo sapien
gacaggtcgccagggcagcaaagtc

SEQ ID NO: 3192043 - DNA, 25 bp, Homo sapien
gaggccaagacaggtcgccagggca

SEQ ID NO: 3192044 - DNA, 25 bp, Homo sapien
tcggaacccttgtggtcctgcaggg

SEQ ID NO: 3192045 - DNA, 25 bp, Homo sapien
ttgtcctgttagctgtatacagacc

SEQ ID NO: 3192046 - DNA, 25 bp, Homo sapien
ccttgtcctgttagctgtatacaga

SEQ ID NO: 3192047 - DNA, 25 bp, Homo sapien
gccttgtcctgttagctgtatacag

SEQ ID NO: 3192048 - DNA, 25 bp, Homo sapien
tgtcctgttagctgtatacagacct

SEQ ID NO: 3192049 - DNA, 25 bp, Homo sapien
gccctgcaggcatcttccaggtagg

SEQ ID NO: 3192050 - DNA, 25 bp, Homo sapien
cctggttgaggtgctctctgggatc

SEQ ID NO: 3192051 - DNA, 25 bp, Homo sapien
tccaggtaggcgctcatggcatgct

SEQ ID NO: 3192052 - DNA, 25 bp, Homo sapien
tacagcctgtagactccagggccct

SEQ ID NO: 3192053 - DNA, 25 bp, Homo sapien
catcatcctgcttgtaggctgtcag

SEQ ID NO: 3192054 - DNA, 25 bp, Homo sapien
ccaggcttcttgcaccatgagcggt

SEQ ID NO: 3192055 - DNA, 25 bp, Homo sapien
tctcaggcttcgcagtggtcagggc

SEQ ID NO: 3192056 - DNA, 25 bp, Homo sapien
ccaggtctgtgcatgtcggcaagaa

SEQ ID NO: 3192057 - DNA, 25 bp, Homo sapien
gatgcacgaacatgctgaacctctg

SEQ ID NO: 3192058 - DNA, 25 bp, Homo sapien
cagatactgcatgcccgtgggaaag

SEQ ID NO: 3192059 - DNA, 25 bp, Homo sapien
actcagatactgcatgcccgtggga

SEQ ID NO: 3192060 - DNA, 25 bp, Homo sapien
caggggactggcttcgccctgcagc

SEQ ID NO: 3192061 - DNA, 25 bp, Homo sapien
ctgcatgcccgtgggaaagtccagg

SEQ ID NO: 3192062 - DNA, 25 bp, Homo sapien
tcaggctttttagtgtagacattta

SEQ ID NO: 3192063 - DNA, 25 bp, Homo sapien
caggctttttagtgtagacatttaa

SEQ ID NO: 3192064 - DNA, 25 bp, Homo sapien
ttcaggctttttagtgtagacattt

SEQ ID NO: 3192065 - DNA, 25 bp, Homo sapien
ggctttttagtgtagacatttaatg

SEQ ID NO: 3192066 - DNA, 25 bp, Homo sapien
gattgagaagattttcaaggttgtc

SEQ ID NO: 3192067 - DNA, 25 bp, Homo sapien
ttcttgggttcttggtcaagaagtc

SEQ ID NO: 3192068 - DNA, 25 bp, Homo sapien
acagattgagaagattttcaaggtt

SEQ ID NO: 3192069 - DNA, 25 bp, Homo sapien
ggtggtatcacataatggctaaaat

SEQ ID NO: 3192070 - DNA, 25 bp, Homo sapien
gtgtgttcatagcttagcatccact

SEQ ID NO: 3192071 - DNA, 25 bp, Homo sapien
agatttaggtgaaccccatcacccg

SEQ ID NO: 3192072 - DNA, 25 bp, Homo sapien
ttaggtgaaccccatcacccgaaca

SEQ ID NO: 3192073 - DNA, 25 bp, Homo sapien
tttgtgtgttcatagcttagcatcc

SEQ ID NO: 3192074 - DNA, 25 bp, Homo sapien
cagttaatattctgatgtatagtct

SEQ ID NO: 3192075 - DNA, 25 bp, Homo sapien
gatcccaacactagaaataaccagt

SEQ ID NO: 3192076 - DNA, 25 bp, Homo sapien
cagttgggatcaaccgtgtatacac

SEQ ID NO: 3192077 - DNA, 25 bp, Homo sapien
tattctgatgtatagtctactgttc

SEQ ID NO: 3192078 - DNA, 25 bp, Homo sapien
gaatttgaagccacaaagtccataa

SEQ ID NO: 3192079 - DNA, 25 bp, Homo sapien
gcttcaaagaattcccacccataaa

SEQ ID NO: 3192080 - DNA, 25 bp, Homo sapien
cataaaatactaagacgcatgagct

SEQ ID NO: 3192081 - DNA, 25 bp, Homo sapien
gattaggttagtagtgttcccagtc

SEQ ID NO: 3192082 - DNA, 25 bp, Homo sapien
cttctctgagcacccatagacataa

SEQ ID NO: 3192083 - DNA, 25 bp, Homo sapien
tctctgagcacccatagacataaac

SEQ ID NO: 3192084 - DNA, 25 bp, Homo sapien
ttctctgagcacccatagacataaa

SEQ ID NO: 3192085 - DNA, 25 bp, Homo sapien
ctctgagcacccatagacataaact

SEQ ID NO: 3192086 - DNA, 25 bp, Homo sapien
taatcaggcaccaagcaatgacaat

SEQ ID NO: 3192087 - DNA, 25 bp, Homo sapien
ggtctctaatgtacaacaagaatac

SEQ ID NO: 3192088 - DNA, 25 bp, Homo sapien
gaaaaggtattctggtctctaatgt

SEQ ID NO: 3192089 - DNA, 25 bp, Homo sapien
acatttctctaatcaggcaccaagc

SEQ ID NO: 3192090 - DNA, 25 bp, Homo sapien
actgccaggaacattaccaagtaaa

SEQ ID NO: 3192091 - DNA, 25 bp, Homo sapien
ctgccaggaacattaccaagtaaaa

SEQ ID NO: 3192092 - DNA, 25 bp, Homo sapien
ctaggagaagacattgattctcaat

SEQ ID NO: 3192093 - DNA, 25 bp, Homo sapien
gaagacattgattctcaataaagga

SEQ ID NO: 3192094 - DNA, 25 bp, Homo sapien
cattgattctcaataaaggagcccc

SEQ ID NO: 3192095 - DNA, 25 bp, Homo sapien
ggagaagacattgattctcaataaa

SEQ ID NO: 3192096 - DNA, 25 bp, Homo sapien
ttacgatgaattgggtgtccctggg

SEQ ID NO: 3192097 - DNA, 25 bp, Homo sapien
tccctgggtctagggtgatcaatta

SEQ ID NO: 3192098 - DNA, 25 bp, Homo sapien
tgtccctgggtctagggtgatcaat

SEQ ID NO: 3192099 - DNA, 25 bp, Homo sapien
ggtgtccctgggtctagggtgatca

SEQ ID NO: 3192100 - DNA, 25 bp, Homo sapien
agagctgatccagcacttgcttgca

SEQ ID NO: 3192101 - DNA, 25 bp, Homo sapien
caacaagagctgatccagcacttgc

SEQ ID NO: 3192102 - DNA, 25 bp, Homo sapien
ctctgcagcgctggtcctcgctctt

SEQ ID NO: 3192103 - DNA, 25 bp, Homo sapien
tgcactcttgcagtagcacagctac

SEQ ID NO: 3192104 - DNA, 25 bp, Homo sapien
gcccgcagcccatgtcccattcatg

SEQ ID NO: 3192105 - DNA, 25 bp, Homo sapien
cagcaattcagtgcaacaaagtggg

SEQ ID NO: 3192106 - DNA, 25 bp, Homo sapien
cctagaaatccactcatctctcggt

SEQ ID NO: 3192107 - DNA, 25 bp, Homo sapien
acagcaattcagtgcaacaaagtgg

SEQ ID NO: 3192108 - DNA, 25 bp, Homo sapien
tactgccacttttcaggcacgaagg

SEQ ID NO: 3192109 - DNA, 25 bp, Homo sapien
catccttcaggtttgttttgtcctc

SEQ ID NO: 3192110 - DNA, 25 bp, Homo sapien
gtaactgctgcaacccggcgccaat

SEQ ID NO: 3192111 - DNA, 25 bp, Homo sapien
tgggcccacggcttgtttgtactgc

SEQ ID NO: 3192112 - DNA, 25 bp, Homo sapien
ggatatcagaggaacaggtggtgtg

SEQ ID NO: 3192113 - DNA, 25 bp, Homo sapien
gaacaggtggtgtggctcttcctac

SEQ ID NO: 3192114 - DNA, 25 bp, Homo sapien
tggggatatcagaggaacaggtggt

SEQ ID NO: 3192115 - DNA, 25 bp, Homo sapien
aggaacaggtggtgtggctcttcct

SEQ ID NO: 3192116 - DNA, 25 bp, Homo sapien
tcctgagctgcaatctgagttcctg

SEQ ID NO: 3192117 - DNA, 25 bp, Homo sapien
tcagggaaggaatatgccagacttc

SEQ ID NO: 3192118 - DNA, 25 bp, Homo sapien
tcacattagtcaatctggcagagct

SEQ ID NO: 3192119 - DNA, 25 bp, Homo sapien
caatcttccgagagaatgtgggtaa

SEQ ID NO: 3192120 - DNA, 25 bp, Homo sapien
tttcaagctcttcacttggtgcttc

SEQ ID NO: 3192121 - DNA, 25 bp, Homo sapien
ttttcaagctcttcacttggtgctt

SEQ ID NO: 3192122 - DNA, 25 bp, Homo sapien
gccactaggctaattccacaaggga

SEQ ID NO: 3192123 - DNA, 25 bp, Homo sapien
tcactaccagctttgaatgcagggc

SEQ ID NO: 3192124 - DNA, 25 bp, Homo sapien
taaaccccagttatagtgatgtgcc

SEQ ID NO: 3192125 - DNA, 25 bp, Homo sapien
caaaaagtgttactggatggcctac

SEQ ID NO: 3192126 - DNA, 25 bp, Homo sapien
gtgtcaggcgatatacaattaaatg

SEQ ID NO: 3192127 - DNA, 25 bp, Homo sapien
ctaatactaataatacaggtcaaag

SEQ ID NO: 3192128 - DNA, 25 bp, Homo sapien
ggtcaaagtgtcaggcgatatacaa

SEQ ID NO: 3192129 - DNA, 25 bp, Homo sapien
ctaataatacaggtcaaagtgtcag

SEQ ID NO: 3192130 - DNA, 25 bp, Homo sapien
ttgtatctccgtgagtgggcaccac

SEQ ID NO: 3192131 - DNA, 25 bp, Homo sapien
aaatgatcttgtatctccgtgagtg

SEQ ID NO: 3192132 - DNA, 25 bp, Homo sapien
ggcaccacagtaaatccagggctga

SEQ ID NO: 3192133 - DNA, 25 bp, Homo sapien
tgtcctcagactgtgcttttagtgc

SEQ ID NO: 3192134 - DNA, 25 bp, Homo sapien
gaatcataatctaaacagcacctgt

SEQ ID NO: 3192135 - DNA, 25 bp, Homo sapien
tgagctcacgagttagtcacactag

SEQ ID NO: 3192136 - DNA, 25 bp, Homo sapien
tgaaagccccaaagcatataagatg

SEQ ID NO: 3192137 - DNA, 25 bp, Homo sapien
ttcttttgctaaagtctctcctcca

SEQ ID NO: 3192138 - DNA, 25 bp, Homo sapien
ggaaggcagaaatttgctagctaca

SEQ ID NO: 3192139 - DNA, 25 bp, Homo sapien
catcttcagagcagaggactaattc

SEQ ID NO: 3192140 - DNA, 25 bp, Homo sapien
tgtgaatttgtaatcatagctgacc

SEQ ID NO: 3192141 - DNA, 25 bp, Homo sapien
catgcaattgacattagggaaggca

SEQ ID NO: 3192142 - DNA, 25 bp, Homo sapien
tactcttttgtatctgtctttcaac

SEQ ID NO: 3192143 - DNA, 25 bp, Homo sapien
tatagtcataaaagttactcttttg

SEQ ID NO: 3192144 - DNA, 25 bp, Homo sapien
ttttgtatctgtctttcaactggtt

SEQ ID NO: 3192145 - DNA, 25 bp, Homo sapien
tgttttatagtcataaaagttactc

SEQ ID NO: 3192146 - DNA, 25 bp, Homo sapien
gagggtacattctggcctgttctgc

SEQ ID NO: 3192147 - DNA, 25 bp, Homo sapien
gggagagggtacattctggcctgtt

SEQ ID NO: 3192148 - DNA, 25 bp, Homo sapien
aggggagagggtacattctggcctg

SEQ ID NO: 3192149 - DNA, 25 bp, Homo sapien
gagagggtacattctggcctgttct

SEQ ID NO: 3192150 - DNA, 25 bp, Homo sapien
ctggctcagaccttcctctctcttc

SEQ ID NO: 3192151 - DNA, 25 bp, Homo sapien
cttaaggtttatgcccagggcctgt

SEQ ID NO: 3192152 - DNA, 25 bp, Homo sapien
gggcctgtaaacatttcattggcct

SEQ ID NO: 3192153 - DNA, 25 bp, Homo sapien
aaacatttcattggcctttctttca

SEQ ID NO: 3192154 - DNA, 25 bp, Homo sapien
tcttaaggtttatgcccagggcctg

SEQ ID NO: 3192155 - DNA, 25 bp, Homo sapien
tcatcatcctgggaatcttcccaaa

SEQ ID NO: 3192156 - DNA, 25 bp, Homo sapien
tcatttgctgccaagtaaggggata

SEQ ID NO: 3192157 - DNA, 25 bp, Homo sapien
cttcccaaaatgtatgccggggagg

SEQ ID NO: 3192158 - DNA, 25 bp, Homo sapien
aggggatagtaaattcctcagcagc

SEQ ID NO: 3192159 - DNA, 25 bp, Homo sapien
gagaatggctaaacctctcattttt

SEQ ID NO: 3192160 - DNA, 25 bp, Homo sapien
cccagagaatggctaaacctctcat

SEQ ID NO: 3192161 - DNA, 25 bp, Homo sapien
tcttctcttcaccaactccgaggat

SEQ ID NO: 3192162 - DNA, 25 bp, Homo sapien
ctccgaggattgatgttactggaaa

SEQ ID NO: 3192163 - DNA, 25 bp, Homo sapien
tgaagaggtgtgacacctttcctct

SEQ ID NO: 3192164 - DNA, 25 bp, Homo sapien
aagaggtgtgacacctttcctcttc

SEQ ID NO: 3192165 - DNA, 25 bp, Homo sapien
ggtgaagaggtgtgacacctttcct

SEQ ID NO: 3192166 - DNA, 25 bp, Homo sapien
agggtgaagaggtgtgacacctttc

SEQ ID NO: 3192167 - DNA, 25 bp, Homo sapien
tcatcaatcaggtaatgcctgccaa

SEQ ID NO: 3192168 - DNA, 25 bp, Homo sapien
ccatgtgacggaagctcaatgaccg

SEQ ID NO: 3192169 - DNA, 25 bp, Homo sapien
tctcgatgtttccttccatgtgacg

SEQ ID NO: 3192170 - DNA, 25 bp, Homo sapien
tgtgatagaattgccaactgttggg

SEQ ID NO: 3192171 - DNA, 25 bp, Homo sapien
tagaaaagtccagttcaattgtgca

SEQ ID NO: 3192172 - DNA, 25 bp, Homo sapien
gcgataaatgcatacttcccgttgt

SEQ ID NO: 3192173 - DNA, 25 bp, Homo sapien
tcaaacaatactaaagcgcataggg

SEQ ID NO: 3192174 - DNA, 25 bp, Homo sapien
ctaaagcgcatagggtaaaaagtag

SEQ ID NO: 3192175 - DNA, 25 bp, Homo sapien
agggccaggcttagcgtgggaggca

SEQ ID NO: 3192176 - DNA, 25 bp, Homo sapien
caggcggaaacgctggcaggctgag

SEQ ID NO: 3192177 - DNA, 25 bp, Homo sapien
ggcttagcgtgggaggcattttcat

SEQ ID NO: 3192178 - DNA, 25 bp, Homo sapien
cagcgtggaacatcgtgagccaggc

SEQ ID NO: 3192179 - DNA, 25 bp, Homo sapien
gaagttttccagagacgtcgagccc

SEQ ID NO: 3192180 - DNA, 25 bp, Homo sapien
ggcttggcgaataaccacctgcggg

SEQ ID NO: 3192181 - DNA, 25 bp, Homo sapien
caacttgtggagacctttggcgacc

SEQ ID NO: 3192182 - DNA, 25 bp, Homo sapien
ctgagttcacggagattcgggcttg

SEQ ID NO: 3192183 - DNA, 25 bp, Homo sapien
ctacattgagtgtttggctggatgg

SEQ ID NO: 3192184 - DNA, 25 bp, Homo sapien
tctgacatcccactacattgagtgt

SEQ ID NO: 3192185 - DNA, 25 bp, Homo sapien
catcccactacattgagtgtttggc

SEQ ID NO: 3192186 - DNA, 25 bp, Homo sapien
tgcttctgacatcccactacattga

SEQ ID NO: 3192187 - DNA, 25 bp, Homo sapien
caagcgtccttgtaacttctctggg

SEQ ID NO: 3192188 - DNA, 25 bp, Homo sapien
tacttctcacatgggcacaaggcaa

SEQ ID NO: 3192189 - DNA, 25 bp, Homo sapien
cagtctccttttgtagcctgtgcaa

SEQ ID NO: 3192190 - DNA, 25 bp, Homo sapien
ggagaagattctgcacgtgctcagt

SEQ ID NO: 3192191 - DNA, 25 bp, Homo sapien
ctgctttgtgggcagagtaaattca

SEQ ID NO: 3192192 - DNA, 25 bp, Homo sapien
tcctgctttgtgggcagagtaaatt

SEQ ID NO: 3192193 - DNA, 25 bp, Homo sapien
ttcctgctttgtgggcagagtaaat

SEQ ID NO: 3192194 - DNA, 25 bp, Homo sapien
cctgctttgtgggcagagtaaattc

SEQ ID NO: 3192195 - DNA, 25 bp, Homo sapien
tataattttaatgtaaggtcatctt

SEQ ID NO: 3192196 - DNA, 25 bp, Homo sapien
tctctagagtatagttttgcatttg

SEQ ID NO: 3192197 - DNA, 25 bp, Homo sapien
aattttaatgtaaggtcatctttag

SEQ ID NO: 3192198 - DNA, 25 bp, Homo sapien
cctgggtgtggatacttctctagag

SEQ ID NO: 3192199 - DNA, 25 bp, Homo sapien
gctagtcaagcaaggttcacagaac

SEQ ID NO: 3192200 - DNA, 25 bp, Homo sapien
tagtggtcattagtcccaggtgggc

SEQ ID NO: 3192201 - DNA, 25 bp, Homo sapien
caggccgtaccagagatctactgaa

SEQ ID NO: 3192202 - DNA, 25 bp, Homo sapien
tattgcaggcgtacatttccggtag

SEQ ID NO: 3192203 - DNA, 25 bp, Homo sapien
gctgagactacagctacatgtcacc

SEQ ID NO: 3192204 - DNA, 25 bp, Homo sapien
tagagatgagatcatcctgtgttgc

SEQ ID NO: 3192205 - DNA, 25 bp, Homo sapien
gatgagatcatcctgtgttgcccag

SEQ ID NO: 3192206 - DNA, 25 bp, Homo sapien
accacacctggttgattttgtttat

SEQ ID NO: 3192207 - DNA, 25 bp, Homo sapien
ttttcactagccaagccctcattac

SEQ ID NO: 3192208 - DNA, 25 bp, Homo sapien
tcattactctaatcccctgaaatag

SEQ ID NO: 3192209 - DNA, 25 bp, Homo sapien
aattctttgtattgaactttcctgt

SEQ ID NO: 3192210 - DNA, 25 bp, Homo sapien
tctaatcccctgaaatagtaattct

SEQ ID NO: 3192211 - DNA, 25 bp, Homo sapien
gactttgtattcaccaaccttgctg

SEQ ID NO: 3192212 - DNA, 25 bp, Homo sapien
ggagtattctatgtgttcagccata

SEQ ID NO: 3192213 - DNA, 25 bp, Homo sapien
ccagggaagtatcaaatagaagcag

SEQ ID NO: 3192214 - DNA, 25 bp, Homo sapien
tcttattgccttgagaggacttcca

SEQ ID NO: 3192215 - DNA, 25 bp, Homo sapien
tacgtagacatacactctggctgtg

SEQ ID NO: 3192216 - DNA, 25 bp, Homo sapien
tctatggacacctgttggaaacaca

SEQ ID NO: 3192217 - DNA, 25 bp, Homo sapien
ctcgtttgcaatgatgacctggcca

SEQ ID NO: 3192218 - DNA, 25 bp, Homo sapien
ggcctccttatcatcccttgggtag

SEQ ID NO: 3192219 - DNA, 25 bp, Homo sapien
ggaactgtaacctcctttggaagca

SEQ ID NO: 3192220 - DNA, 25 bp, Homo sapien
gtgggaagttggacagtatctgaaa

SEQ ID NO: 3192221 - DNA, 25 bp, Homo sapien
taagactgatatattgcagcaggaa

SEQ ID NO: 3192222 - DNA, 25 bp, Homo sapien
gcaaccaaatgccacacaattagct

SEQ ID NO: 3192223 - DNA, 25 bp, Homo sapien
tgctccattgttgcttattagactg

SEQ ID NO: 3192224 - DNA, 25 bp, Homo sapien
gctcagaatatactctgcttttaaa

SEQ ID NO: 3192225 - DNA, 25 bp, Homo sapien
tattagactgctcagaatatactct

SEQ ID NO: 3192226 - DNA, 25 bp, Homo sapien
tgttgcttattagactgctcagaat

SEQ ID NO: 3192227 - DNA, 25 bp, Homo sapien
acagagacacagagatgtaagctgc

SEQ ID NO: 3192228 - DNA, 25 bp, Homo sapien
gagccagccccagatagctctggaa

SEQ ID NO: 3192229 - DNA, 25 bp, Homo sapien
ttattaaatgagtgctctgttcggg

SEQ ID NO: 3192230 - DNA, 25 bp, Homo sapien
ctggaaacatctaaggtatagtaac

SEQ ID NO: 3192231 - DNA, 25 bp, Homo sapien
tctgatctgtatacagaccgactgc

SEQ ID NO: 3192232 - DNA, 25 bp, Homo sapien
tgtatacagaccgactgcaccagga

SEQ ID NO: 3192233 - DNA, 25 bp, Homo sapien
accaggaccttgtcactttcatttc

SEQ ID NO: 3192234 - DNA, 25 bp, Homo sapien
gcttttgcagaatctgccctctgat

SEQ ID NO: 3192235 - DNA, 25 bp, Homo sapien
taaggtgtcaccatatcacatggag

SEQ ID NO: 3192236 - DNA, 25 bp, Homo sapien
tgaacgaaaacagtgtcacggtggg

SEQ ID NO: 3192237 - DNA, 25 bp, Homo sapien
gtcagatgctagaaataacactggg

SEQ ID NO: 3192238 - DNA, 25 bp, Homo sapien
taggcttagattagattgacacagc

SEQ ID NO: 3192239 - DNA, 25 bp, Homo sapien
aatggaggcccatattaactctgct

SEQ ID NO: 3192240 - DNA, 25 bp, Homo sapien
ctttttatccggctgaggaagtgcc

SEQ ID NO: 3192241 - DNA, 25 bp, Homo sapien
aaatatcctacaatggaggcccata

SEQ ID NO: 3192242 - DNA, 25 bp, Homo sapien
tgaggaagtgccaaatatcctacaa

SEQ ID NO: 3192243 - DNA, 25 bp, Homo sapien
ttcataatcgttcttgctcatggaa

SEQ ID NO: 3192244 - DNA, 25 bp, Homo sapien
gtatacctagcgacgtggagaggcc

SEQ ID NO: 3192245 - DNA, 25 bp, Homo sapien
atgtctgccagtatacctagcgacg

SEQ ID NO: 3192246 - DNA, 25 bp, Homo sapien
aacttttcataatcgttcttgctca

SEQ ID NO: 3192247 - DNA, 25 bp, Homo sapien
tacaggtgatgccactcagtgttat

SEQ ID NO: 3192248 - DNA, 25 bp, Homo sapien
acaggtgatgccactcagtgttatg

SEQ ID NO: 3192249 - DNA, 25 bp, Homo sapien
caccaaggacacgattgacaatttt

SEQ ID NO: 3192250 - DNA, 25 bp, Homo sapien
gacacgattgacaattttacaggtg

SEQ ID NO: 3192251 - DNA, 25 bp, Homo sapien
ttgaagccagattaattgatttctg

SEQ ID NO: 3192252 - DNA, 25 bp, Homo sapien
taattgatttctgcacgctcttggc

SEQ ID NO: 3192253 - DNA, 25 bp, Homo sapien
ttttgaagccagattaattgatttc

SEQ ID NO: 3192254 - DNA, 25 bp, Homo sapien
ttctgcacgctcttggcaaagagcc

SEQ ID NO: 3192255 - DNA, 25 bp, Homo sapien
ttgggtgagcttctttggaggacgg

SEQ ID NO: 3192256 - DNA, 25 bp, Homo sapien
ctttggaggacggtggcagttcttt

SEQ ID NO: 3192257 - DNA, 25 bp, Homo sapien
tgagcttctttggaggacggtggca

SEQ ID NO: 3192258 - DNA, 25 bp, Homo sapien
aggacggtggcagttctttgttcaa

SEQ ID NO: 3192259 - DNA, 25 bp, Homo sapien
aagaccacaaggtgttgactttcct

SEQ ID NO: 3192260 - DNA, 25 bp, Homo sapien
cagtgtaaagaaagagtaagtgggt

SEQ ID NO: 3192261 - DNA, 25 bp, Homo sapien
gagtaagtgggtctaaagaccacaa

SEQ ID NO: 3192262 - DNA, 25 bp, Homo sapien
tgggtctaaagaccacaaggtgttg

SEQ ID NO: 3192263 - DNA, 25 bp, Homo sapien
ttgcaggcttctgcagcggacagca

SEQ ID NO: 3192264 - DNA, 25 bp, Homo sapien
cgaagagcggcgtataggcactgaa

SEQ ID NO: 3192265 - DNA, 25 bp, Homo sapien
ccagcttgcaggcttctgcagcgga

SEQ ID NO: 3192266 - DNA, 25 bp, Homo sapien
cacagctgtgagcacgaagagcggc

SEQ ID NO: 3192267 - DNA, 25 bp, Homo sapien
gggggtttgaggagcggctgcattc

SEQ ID NO: 3192268 - DNA, 25 bp, Homo sapien
tgggggtttgaggagcggctgcatt

SEQ ID NO: 3192269 - DNA, 25 bp, Homo sapien
gtgggggtttgaggagcggctgcat

SEQ ID NO: 3192270 - DNA, 25 bp, Homo sapien
tctcactggttacatcagaaagcac

SEQ ID NO: 3192271 - DNA, 25 bp, Homo sapien
ccttctcactggttacatcagaaag

SEQ ID NO: 3192272 - DNA, 25 bp, Homo sapien
ttcccttctcactggttacatcaga

SEQ ID NO: 3192273 - DNA, 25 bp, Homo sapien
ttctcactggttacatcagaaagca

SEQ ID NO: 3192274 - DNA, 25 bp, Homo sapien
gattttgatgtgcactcaggcttgg

SEQ ID NO: 3192275 - DNA, 25 bp, Homo sapien
caggcttgggaaccattgcttcaca

SEQ ID NO: 3192276 - DNA, 25 bp, Homo sapien
tgccactgatgagacacaaagcctg

SEQ ID NO: 3192277 - DNA, 25 bp, Homo sapien
gacaacaatctacccttgggctgaa

SEQ ID NO: 3192278 - DNA, 25 bp, Homo sapien
gctttgacaaagctgtgaagctcct

SEQ ID NO: 3192279 - DNA, 25 bp, Homo sapien
taagtttatccaacctgcactcgaa

SEQ ID NO: 3192280 - DNA, 25 bp, Homo sapien
agctgacttgctgcatggaccgtcc

SEQ ID NO: 3192281 - DNA, 25 bp, Homo sapien
gaaactctcgggaacataagatctg

SEQ ID NO: 3192282 - DNA, 25 bp, Homo sapien
tcgaaatgcatcagaatgggtccag

SEQ ID NO: 3192283 - DNA, 25 bp, Homo sapien
taaaccctgataagttgctccaagc

SEQ ID NO: 3192284 - DNA, 25 bp, Homo sapien
cacatcttgatccaaggagactcga

SEQ ID NO: 3192285 - DNA, 25 bp, Homo sapien
ccattgctgtagtccgatggctcag

SEQ ID NO: 3192286 - DNA, 25 bp, Homo sapien
tattatgaggcgagaagggtgtcaa

SEQ ID NO: 3192287 - DNA, 25 bp, Homo sapien
tgaatgcatagctctgccttccctg

SEQ ID NO: 3192288 - DNA, 25 bp, Homo sapien
aagaagcagaacgatatgagggtct

SEQ ID NO: 3192289 - DNA, 25 bp, Homo sapien
ccaaattgtcattgttgggttcctg

SEQ ID NO: 3192290 - DNA, 25 bp, Homo sapien
cctgtgaaagtctaagggtgcatct

SEQ ID NO: 3192291 - DNA, 25 bp, Homo sapien
tttttggactgaaggatgtgtgccc

SEQ ID NO: 3192292 - DNA, 25 bp, Homo sapien
gggcctgcgcctctttcactaattt

SEQ ID NO: 3192293 - DNA, 25 bp, Homo sapien
gacatcgcagttggtttctggaaac

SEQ ID NO: 3192294 - DNA, 25 bp, Homo sapien
aaagtcatcaggttgcaaggtgcga

SEQ ID NO: 3192295 - DNA, 25 bp, Homo sapien
tgttaccgcttacagaggaattggg

SEQ ID NO: 3192296 - DNA, 25 bp, Homo sapien
tatgagagccgtgcccatttgtgca

SEQ ID NO: 3192297 - DNA, 25 bp, Homo sapien
caaggtgcgagcctcaaggatctct

SEQ ID NO: 3192298 - DNA, 25 bp, Homo sapien
tctacataccaagctcttcagagtg

SEQ ID NO: 3192299 - DNA, 25 bp, Homo sapien
ttcatgagctttaagtgatctacat

SEQ ID NO: 3192300 - DNA, 25 bp, Homo sapien
tttaagtgatctacataccaagctc

SEQ ID NO: 3192301 - DNA, 25 bp, Homo sapien
agctcttcagagtgccccaacacag

SEQ ID NO: 3192302 - DNA, 25 bp, Homo sapien
tgggccgtccacagttcagattttt

SEQ ID NO: 3192303 - DNA, 25 bp, Homo sapien
cttcacagtcaagtagtcccccaaa

SEQ ID NO: 3192304 - DNA, 25 bp, Homo sapien
ttcctgggccgtccacagttcagat

SEQ ID NO: 3192305 - DNA, 25 bp, Homo sapien
acagtcaagtagtcccccaaataga

SEQ ID NO: 3192306 - DNA, 25 bp, Homo sapien
gggatcatcaatctgagaacagaag

SEQ ID NO: 3192307 - DNA, 25 bp, Homo sapien
tactggctactggagcatttcctga

SEQ ID NO: 3192308 - DNA, 25 bp, Homo sapien
tccagtcttaggcaggggatcatca

SEQ ID NO: 3192309 - DNA, 25 bp, Homo sapien
aacattctgccagaagacctccagt

SEQ ID NO: 3192310 - DNA, 25 bp, Homo sapien
catctgtcgctccacatcagtgaag

SEQ ID NO: 3192311 - DNA, 25 bp, Homo sapien
tcatctgtcgctccacatcagtgaa

SEQ ID NO: 3192312 - DNA, 25 bp, Homo sapien
tagtattgtggatgggatgtagaat

SEQ ID NO: 3192313 - DNA, 25 bp, Homo sapien
tgttaaattctgtcacatagtgctg

SEQ ID NO: 3192314 - DNA, 25 bp, Homo sapien
cagtagtattgtggatgggatgtag

SEQ ID NO: 3192315 - DNA, 25 bp, Homo sapien
aattctgtcacatagtgctgtgcgg

SEQ ID NO: 3192316 - DNA, 25 bp, Homo sapien
tgtaaatcgaccacaacatctctat

SEQ ID NO: 3192317 - DNA, 25 bp, Homo sapien
tgtaaggctccacactgatacatcc

SEQ ID NO: 3192318 - DNA, 25 bp, Homo sapien
gatacatccctttattgtcttgtcc

SEQ ID NO: 3192319 - DNA, 25 bp, Homo sapien
cataggccaagccatattctgtggc

SEQ ID NO: 3192320 - DNA, 25 bp, Homo sapien
ttctccattgaaggtctagtcaaag

SEQ ID NO: 3192321 - DNA, 25 bp, Homo sapien
tccacatgctggttattaaagaagt

SEQ ID NO: 3192322 - DNA, 25 bp, Homo sapien
tgaaaactttctgatcaacggagtg

SEQ ID NO: 3192323 - DNA, 25 bp, Homo sapien
aaagacgatggcagatttcattaca

SEQ ID NO: 3192324 - DNA, 25 bp, Homo sapien
tttgcgagcatcaccagatatttga

SEQ ID NO: 3192325 - DNA, 25 bp, Homo sapien
tgagagcatcactaaggtctgtcac

SEQ ID NO: 3192326 - DNA, 25 bp, Homo sapien
gaaccagatatttgcgagcatcacc

SEQ ID NO: 3192327 - DNA, 25 bp, Homo sapien
gtcacattaccaatccatacagcct

SEQ ID NO: 3192328 - DNA, 25 bp, Homo sapien
tcttgtgctgccaattaaatgcagg

SEQ ID NO: 3192329 - DNA, 25 bp, Homo sapien
ttgcaggacttatgcccagaagcag

SEQ ID NO: 3192330 - DNA, 25 bp, Homo sapien
gatactgatcaattcctcttgcaaa

SEQ ID NO: 3192331 - DNA, 25 bp, Homo sapien
agaagcagcggtctcctgacccatt

SEQ ID NO: 3192332 - DNA, 25 bp, Homo sapien
gaaagaaactcagagtataaggagg

SEQ ID NO: 3192333 - DNA, 25 bp, Homo sapien
tgaattcgtatcacaaaggctcaca

SEQ ID NO: 3192334 - DNA, 25 bp, Homo sapien
ggaaaagccccagtagtatcagtct

SEQ ID NO: 3192335 - DNA, 25 bp, Homo sapien
gacagatagtgacaaaaagctctaa

SEQ ID NO: 3192336 - DNA, 25 bp, Homo sapien
taggaggtaattgaggcagtttttc

SEQ ID NO: 3192337 - DNA, 25 bp, Homo sapien
cactcttccatcttactttttacag

SEQ ID NO: 3192338 - DNA, 25 bp, Homo sapien
gattaatacacatagtgttccatgg

SEQ ID NO: 3192339 - DNA, 25 bp, Homo sapien
tgttgtgcgaattacttcatcaccc

SEQ ID NO: 3192340 - DNA, 25 bp, Homo sapien
gctgtttcctaaacctgtgtgaaga

SEQ ID NO: 3192341 - DNA, 25 bp, Homo sapien
gtaagatcatggaggagctgtttcc

SEQ ID NO: 3192342 - DNA, 25 bp, Homo sapien
tctttcagtaagatcatggaggagc

SEQ ID NO: 3192343 - DNA, 25 bp, Homo sapien
agctgtttcctaaacctgtgtgaag

SEQ ID NO: 3192344 - DNA, 25 bp, Homo sapien
tcatactgctgaatgctcctcctta

SEQ ID NO: 3192345 - DNA, 25 bp, Homo sapien
caacattaaccccaaagagtcaagc

SEQ ID NO: 3192346 - DNA, 25 bp, Homo sapien
cagattgactgaagtgtgagtagca

SEQ ID NO: 3192347 - DNA, 25 bp, Homo sapien
aaaggtcactctctcaattaatagc

SEQ ID NO: 3192348 - DNA, 25 bp, Homo sapien
ctacaaatggagattgacaaacttt

SEQ ID NO: 3192349 - DNA, 25 bp, Homo sapien
tctttgcccattgttgctcctcctt

SEQ ID NO: 3192350 - DNA, 25 bp, Homo sapien
ctttgcccattgttgctcctccttt

SEQ ID NO: 3192351 - DNA, 25 bp, Homo sapien
ttctttgcccattgttgctcctcct

SEQ ID NO: 3192352 - DNA, 25 bp, Homo sapien
tttgcccattgttgctcctcctttt

SEQ ID NO: 3192353 - DNA, 25 bp, Homo sapien
tgcaaaactataataagccagggct

SEQ ID NO: 3192354 - DNA, 25 bp, Homo sapien
tagcaagaggcacaaggccgagttc

SEQ ID NO: 3192355 - DNA, 25 bp, Homo sapien
tgttctatggacaggccacatggtg

SEQ ID NO: 3192356 - DNA, 25 bp, Homo sapien
tgacccacagccaacaaggaagagg

SEQ ID NO: 3192357 - DNA, 25 bp, Homo sapien
tgttgggaacatagcccttcaaagc

SEQ ID NO: 3192358 - DNA, 25 bp, Homo sapien
gctgtcctgcccaagggaacactgc

SEQ ID NO: 3192359 - DNA, 25 bp, Homo sapien
gagaatgttccctattgaaatcatg

SEQ ID NO: 3192360 - DNA, 25 bp, Homo sapien
gatccaggtgctcagtccagagaga

SEQ ID NO: 3192361 - DNA, 25 bp, Homo sapien
ttagcacaaggaggtaaagcagttg

SEQ ID NO: 3192362 - DNA, 25 bp, Homo sapien
ctggagctgtatctcaatctaattt

SEQ ID NO: 3192363 - DNA, 25 bp, Homo sapien
aatgccaaaggaccaatgcgcttaa

SEQ ID NO: 3192364 - DNA, 25 bp, Homo sapien
caatgcgcttaacgcgtctggagct

SEQ ID NO: 3192365 - DNA, 25 bp, Homo sapien
ggctgccaaagtgaactaacaatct

SEQ ID NO: 3192366 - DNA, 25 bp, Homo sapien
gccttattaacaaccaagtgccagg

SEQ ID NO: 3192367 - DNA, 25 bp, Homo sapien
gaggcagaggcataaacaagtaatt

SEQ ID NO: 3192368 - DNA, 25 bp, Homo sapien
gaggtcctaccgtaaaggtctgtga

SEQ ID NO: 3192369 - DNA, 25 bp, Homo sapien
caggaagaggtgtgacggccctgtg

SEQ ID NO: 3192370 - DNA, 25 bp, Homo sapien
tgacggccctgtgattgtcaggtaa

SEQ ID NO: 3192371 - DNA, 25 bp, Homo sapien
gtgacggccctgtgattgtcaggta

SEQ ID NO: 3192372 - DNA, 25 bp, Homo sapien
ctgacaggaagaggtgtgacggccc

SEQ ID NO: 3192373 - DNA, 25 bp, Homo sapien
tgtctggaccccatactgggctgaa

SEQ ID NO: 3192374 - DNA, 25 bp, Homo sapien
caaccacatctgagacagccaatga

SEQ ID NO: 3192375 - DNA, 25 bp, Homo sapien
atcaagccatgggtcatgcccacag

SEQ ID NO: 3192376 - DNA, 25 bp, Homo sapien
cagccaatgagggatcagaatccaa

SEQ ID NO: 3192377 - DNA, 25 bp, Homo sapien
tcagatgtcatgtctatcattagta

SEQ ID NO: 3192378 - DNA, 25 bp, Homo sapien
ttcctatagagtggtttaagtccat

SEQ ID NO: 3192379 - DNA, 25 bp, Homo sapien
agtcagatgtcatgtctatcattag

SEQ ID NO: 3192380 - DNA, 25 bp, Homo sapien
caccccgtaagctcaaacccagttg

SEQ ID NO: 3192381 - DNA, 25 bp, Homo sapien
cactcctggttgtcttcgtaagcag

SEQ ID NO: 3192382 - DNA, 25 bp, Homo sapien
tgggtcaacagtagccatagaaggt

SEQ ID NO: 3192383 - DNA, 25 bp, Homo sapien
ggtggtgctggatccaattccgctg

SEQ ID NO: 3192384 - DNA, 25 bp, Homo sapien
gatccaattccgctgtttccacagt

SEQ ID NO: 3192385 - DNA, 25 bp, Homo sapien
aacttggtgatattgggctgacccc

SEQ ID NO: 3192386 - DNA, 25 bp, Homo sapien
ttggtaataatcaacttggtgatat

SEQ ID NO: 3192387 - DNA, 25 bp, Homo sapien
ggatgaaagggtggagttaacaaca

SEQ ID NO: 3192388 - DNA, 25 bp, Homo sapien
gcctggtttgccacataggatgaaa

SEQ ID NO: 3192389 - DNA, 25 bp, Homo sapien
tggaggcagttgcatagaagcaaca

SEQ ID NO: 3192390 - DNA, 25 bp, Homo sapien
gcagttgcatagaagcaacagtagc

SEQ ID NO: 3192391 - DNA, 25 bp, Homo sapien
gttgcatagaagcaacagtagcagc

SEQ ID NO: 3192392 - DNA, 25 bp, Homo sapien
ttgcatagaagcaacagtagcagct

SEQ ID NO: 3192393 - DNA, 25 bp, Homo sapien
aatggtaacttgctgctgagtcagg

SEQ ID NO: 3192394 - DNA, 25 bp, Homo sapien
tgcagaatggtaacttgctgctgag

SEQ ID NO: 3192395 - DNA, 25 bp, Homo sapien
agaatggtaacttgctgctgagtca

SEQ ID NO: 3192396 - DNA, 25 bp, Homo sapien
ctgctgcagaatggtaacttgctgc

SEQ ID NO: 3192397 - DNA, 25 bp, Homo sapien
tctgaggtggaggctgttgcatggc

SEQ ID NO: 3192398 - DNA, 25 bp, Homo sapien
tttctgaggtggaggctgttgcatg

SEQ ID NO: 3192399 - DNA, 25 bp, Homo sapien
ttctgaggtggaggctgttgcatgg

SEQ ID NO: 3192400 - DNA, 25 bp, Homo sapien
ttgatctgcagaggaggtagctgtt

SEQ ID NO: 3192401 - DNA, 25 bp, Homo sapien
tgatctgcagaggaggtagctgttg

SEQ ID NO: 3192402 - DNA, 25 bp, Homo sapien
tcttgatctgcagaggaggtagctg

SEQ ID NO: 3192403 - DNA, 25 bp, Homo sapien
cttgatctgcagaggaggtagctgt

SEQ ID NO: 3192404 - DNA, 25 bp, Homo sapien
catctgagaagaagactcaacctca

SEQ ID NO: 3192405 - DNA, 25 bp, Homo sapien
atctgagaagaagactcaacctcag

SEQ ID NO: 3192406 - DNA, 25 bp, Homo sapien
tctgagaagaagactcaacctcagg

SEQ ID NO: 3192407 - DNA, 25 bp, Homo sapien
gtgtttgaatttctagaggctaccc

SEQ ID NO: 3192408 - DNA, 25 bp, Homo sapien
cccagtccttactcacaatgggagg

SEQ ID NO: 3192409 - DNA, 25 bp, Homo sapien
actgtgtttgaatttctagaggcta

SEQ ID NO: 3192410 - DNA, 25 bp, Homo sapien
gtcccagtccttactcacaatggga

SEQ ID NO: 3192411 - DNA, 25 bp, Homo sapien
catgaacggacatcatgggctgtga

SEQ ID NO: 3192412 - DNA, 25 bp, Homo sapien
tcctctgctattaccactggtattt

SEQ ID NO: 3192413 - DNA, 25 bp, Homo sapien
aaacaggctcttagacatgttccca

SEQ ID NO: 3192414 - DNA, 25 bp, Homo sapien
aggggggaaacatgaacggacatca

SEQ ID NO: 3192415 - DNA, 25 bp, Homo sapien
ctctcattatcttcattgcagtgct

SEQ ID NO: 3192416 - DNA, 25 bp, Homo sapien
tgagttagtgtaggcagacatacac

SEQ ID NO: 3192417 - DNA, 25 bp, Homo sapien
cagacatacactgggtttgggtttt

SEQ ID NO: 3192418 - DNA, 25 bp, Homo sapien
cattgcagtgctagctctgaatttc

SEQ ID NO: 3192419 - DNA, 25 bp, Homo sapien
ttgcttgaaacagtcaccaggaact

SEQ ID NO: 3192420 - DNA, 25 bp, Homo sapien
ccgtagttgcttgaaacagtcacca

SEQ ID NO: 3192421 - DNA, 25 bp, Homo sapien
taacaaatcatcaacccgtagttgc

SEQ ID NO: 3192422 - DNA, 25 bp, Homo sapien
catcaacccgtagttgcttgaaaca

SEQ ID NO: 3192423 - DNA, 25 bp, Homo sapien
aatacgtcttcatgcacggccgctt

SEQ ID NO: 3192424 - DNA, 25 bp, Homo sapien
tcccatctctcaagaatacgtcttc

SEQ ID NO: 3192425 - DNA, 25 bp, Homo sapien
ttcttgtcatatttggcctttgtgg

SEQ ID NO: 3192426 - DNA, 25 bp, Homo sapien
tgcacggccgctttcttgtcatatt

SEQ ID NO: 3192427 - DNA, 25 bp, Homo sapien
caaatgcagcttgattggggctcac

SEQ ID NO: 3192428 - DNA, 25 bp, Homo sapien
gcttgtatgctgctgcaatgaggca

SEQ ID NO: 3192429 - DNA, 25 bp, Homo sapien
ctcgtggcttgtatgctgctgcaat

SEQ ID NO: 3192430 - DNA, 25 bp, Homo sapien
caggtaacctcgtggcttgtatgct

SEQ ID NO: 3192431 - DNA, 25 bp, Homo sapien
gatggctcaggtaacctcgtggctt

SEQ ID NO: 3192432 - DNA, 25 bp, Homo sapien
tatctaaatgatactgatggttaat

SEQ ID NO: 3192433 - DNA, 25 bp, Homo sapien
aaaagtcattgtctaacctcttatc

SEQ ID NO: 3192434 - DNA, 25 bp, Homo sapien
taatggcttgataatcaaaaagcct

SEQ ID NO: 3192435 - DNA, 25 bp, Homo sapien
aaagaggtacatctgttggaacaaa

SEQ ID NO: 3192436 - DNA, 25 bp, Homo sapien
acatgatggtctggtgcgctgaaga

SEQ ID NO: 3192437 - DNA, 25 bp, Homo sapien
ttaacatgatggtctggtgcgctga

SEQ ID NO: 3192438 - DNA, 25 bp, Homo sapien
tattaacatgatggtctggtgcgct

SEQ ID NO: 3192439 - DNA, 25 bp, Homo sapien
taacatgatggtctggtgcgctgaa

SEQ ID NO: 3192440 - DNA, 25 bp, Homo sapien
tgtgacacgaagatcgcgcctctgt

SEQ ID NO: 3192441 - DNA, 25 bp, Homo sapien
cttggttagcactgcctgggtttct

SEQ ID NO: 3192442 - DNA, 25 bp, Homo sapien
ctctcttcggtaggatgttcgtcaa

SEQ ID NO: 3192443 - DNA, 25 bp, Homo sapien
tgttcgtcaaatccgagaccttgga

SEQ ID NO: 3192444 - DNA, 25 bp, Homo sapien
cagcgagcgctagcggcgctcctga

SEQ ID NO: 3192445 - DNA, 25 bp, Homo sapien
cagcagggtcacagcgagcgctagc

SEQ ID NO: 3192446 - DNA, 25 bp, Homo sapien
ggcaggacccggctgactggcagca

SEQ ID NO: 3192447 - DNA, 25 bp, Homo sapien
ggagggcaggacccggctgactggc

SEQ ID NO: 3192448 - DNA, 25 bp, Homo sapien
agccgagcgcgagccaccaatcaca

SEQ ID NO: 3192449 - DNA, 25 bp, Homo sapien
ttagcggcacgctccagccgagcgc

SEQ ID NO: 3192450 - DNA, 25 bp, Homo sapien
acaacagccgcagcttgagcctctg

SEQ ID NO: 3192451 - DNA, 25 bp, Homo sapien
ggccgctgcggcttcgccagctccg

SEQ ID NO: 3192452 - DNA, 25 bp, Homo sapien
catttctgcacttctaacacatgaa

SEQ ID NO: 3192453 - DNA, 25 bp, Homo sapien
gaagaactgcaatgggtaatgctcc

SEQ ID NO: 3192454 - DNA, 25 bp, Homo sapien
tctaaaatagtcgaggaggaaactg

SEQ ID NO: 3192455 - DNA, 25 bp, Homo sapien
gttcatgatagacagaaacccaaag

SEQ ID NO: 3192456 - DNA, 25 bp, Homo sapien
gaagtgtgtagtttaccttaataca

SEQ ID NO: 3192457 - DNA, 25 bp, Homo sapien
ccattactaagcatctgtgtaggat

SEQ ID NO: 3192458 - DNA, 25 bp, Homo sapien
tgcattattaacttatcactcacag

SEQ ID NO: 3192459 - DNA, 25 bp, Homo sapien
ctcacagacagtatagaaggtttgg

SEQ ID NO: 3192460 - DNA, 25 bp, Homo sapien
tagagaccgttgatgtaaaagatgt

SEQ ID NO: 3192461 - DNA, 25 bp, Homo sapien
cctgcagcgaagaactagagaccgt

SEQ ID NO: 3192462 - DNA, 25 bp, Homo sapien
agaactcactcggaggattaggatt

SEQ ID NO: 3192463 - DNA, 25 bp, Homo sapien
tctggaagctgcgtttctagcctgc

SEQ ID NO: 3192464 - DNA, 25 bp, Homo sapien
ggctggcgcagtgaagcgcagttca

SEQ ID NO: 3192465 - DNA, 25 bp, Homo sapien
ggcgcagtgaagcgcagttcagtga

SEQ ID NO: 3192466 - DNA, 25 bp, Homo sapien
gctggcgcagtgaagcgcagttcag

SEQ ID NO: 3192467 - DNA, 25 bp, Homo sapien
ctggcgcagtgaagcgcagttcagt

SEQ ID NO: 3192468 - DNA, 25 bp, Homo sapien
cttgtgtgtcaagccgaatcccgga

SEQ ID NO: 3192469 - DNA, 25 bp, Homo sapien
caccagagcacgtcgtgcgggcttg

SEQ ID NO: 3192470 - DNA, 25 bp, Homo sapien
cgattcctcggacgcgatgaaaata

SEQ ID NO: 3192471 - DNA, 25 bp, Homo sapien
tgtctgctgtggtggatgccgattc

SEQ ID NO: 3192472 - DNA, 25 bp, Homo sapien
tcacgcgctggctgttcttttcccc

SEQ ID NO: 3192473 - DNA, 25 bp, Homo sapien
acgcgctggctgttcttttcccctt

SEQ ID NO: 3192474 - DNA, 25 bp, Homo sapien
cgcgctggctgttcttttcccctta

SEQ ID NO: 3192475 - DNA, 25 bp, Homo sapien
gcgctggctgttcttttccccttac

SEQ ID NO: 3192476 - DNA, 25 bp, Homo sapien
tcctccgccgagagctgtactagca

SEQ ID NO: 3192477 - DNA, 25 bp, Homo sapien
tagcaactgcgttatcgcagggtcg

SEQ ID NO: 3192478 - DNA, 25 bp, Homo sapien
tggcactcggtaggcgctcgagaaa

SEQ ID NO: 3192479 - DNA, 25 bp, Homo sapien
cagggtcgtttctaccaggcaggcc

SEQ ID NO: 3192480 - DNA, 25 bp, Homo sapien
gtttctttcggcttttgaaactgca

SEQ ID NO: 3192481 - DNA, 25 bp, Homo sapien
cttggcaactatcagaaccctaggg

SEQ ID NO: 3192482 - DNA, 25 bp, Homo sapien
caggtgaggacgtggctgggcactg

SEQ ID NO: 3192483 - DNA, 25 bp, Homo sapien
aaacttggcaactatcagaacccta

SEQ ID NO: 3192484 - DNA, 25 bp, Homo sapien
atttccttccaatgtttgacagaga

SEQ ID NO: 3192485 - DNA, 25 bp, Homo sapien
ctctgaactgaaatttccttccaat

SEQ ID NO: 3192486 - DNA, 25 bp, Homo sapien
cccacttcagacatctctgaactga

SEQ ID NO: 3192487 - DNA, 25 bp, Homo sapien
ccacttcagacatctctgaactgaa

SEQ ID NO: 3192488 - DNA, 25 bp, Homo sapien
agaaacaagctggaccactctgctg

SEQ ID NO: 3192489 - DNA, 25 bp, Homo sapien
ctgctgtcatcaggtttctgctgac

SEQ ID NO: 3192490 - DNA, 25 bp, Homo sapien
ccactctgctgtcatcaggtttctg

SEQ ID NO: 3192491 - DNA, 25 bp, Homo sapien
gaaacaagctggaccactctgctgt

SEQ ID NO: 3192492 - DNA, 25 bp, Homo sapien
agccagctcctgtccttattcaaaa

SEQ ID NO: 3192493 - DNA, 25 bp, Homo sapien
tgttgaacagtctataccttcctgg

SEQ ID NO: 3192494 - DNA, 25 bp, Homo sapien
aaatgtatagctgaactggtgattc

SEQ ID NO: 3192495 - DNA, 25 bp, Homo sapien
tgtagtttgctacttaatgcaagag

SEQ ID NO: 3192496 - DNA, 25 bp, Homo sapien
aggatcgtgtgagccccaggagttt

SEQ ID NO: 3192497 - DNA, 25 bp, Homo sapien
gtttgaggccagcctaagcaacagc

SEQ ID NO: 3192498 - DNA, 25 bp, Homo sapien
cagcctaagcaacagcgagaccctg

SEQ ID NO: 3192499 - DNA, 25 bp, Homo sapien
gaggccagcctaagcaacagcgaga

SEQ ID NO: 3192500 - DNA, 25 bp, Homo sapien
agtaatcactactcattatagaaag

SEQ ID NO: 3192501 - DNA, 25 bp, Homo sapien
gggagggtcatatgaatccaggagt

SEQ ID NO: 3192502 - DNA, 25 bp, Homo sapien
tatagaaagtgtggaaactacagaa

SEQ ID NO: 3192503 - DNA, 25 bp, Homo sapien
tactcattatagaaagtgtggaaac

SEQ ID NO: 3192504 - DNA, 25 bp, Homo sapien
ctgagaagtctaagacctggggacc

SEQ ID NO: 3192505 - DNA, 25 bp, Homo sapien
ggggccttcttgcttcgttgtcatc

SEQ ID NO: 3192506 - DNA, 25 bp, Homo sapien
aggggccttcttgcttcgttgtcat

SEQ ID NO: 3192507 - DNA, 25 bp, Homo sapien
agacctggggacctgcatttggcag

SEQ ID NO: 3192508 - DNA, 25 bp, Homo sapien
tcagataactgaaccggcctctctc

SEQ ID NO: 3192509 - DNA, 25 bp, Homo sapien
tggatgagtgtagtcagataactga

SEQ ID NO: 3192510 - DNA, 25 bp, Homo sapien
tccttcccattgcaaggtaacctaa

SEQ ID NO: 3192511 - DNA, 25 bp, Homo sapien
tgatcttaaatttcctgtagttgtg

SEQ ID NO: 3192512 - DNA, 25 bp, Homo sapien
tttaccaccggttgatttgtgggca

SEQ ID NO: 3192513 - DNA, 25 bp, Homo sapien
accggttgatttgtgggcagtctgc

SEQ ID NO: 3192514 - DNA, 25 bp, Homo sapien
ccaccggttgatttgtgggcagtct

SEQ ID NO: 3192515 - DNA, 25 bp, Homo sapien
cggttgatttgtgggcagtctgcct

SEQ ID NO: 3192516 - DNA, 25 bp, Homo sapien
gcctgtaacgatgaggtttcttcac

SEQ ID NO: 3192517 - DNA, 25 bp, Homo sapien
agtaccaggcctgtaacgatgaggt

SEQ ID NO: 3192518 - DNA, 25 bp, Homo sapien
taccaggcctgtaacgatgaggttt

SEQ ID NO: 3192519 - DNA, 25 bp, Homo sapien
caggcctgtaacgatgaggtttctt

SEQ ID NO: 3192520 - DNA, 25 bp, Homo sapien
ttagcgaatcagaagttcagtggac

SEQ ID NO: 3192521 - DNA, 25 bp, Homo sapien
tgcaaagcaccgatagctgcgctct

SEQ ID NO: 3192522 - DNA, 25 bp, Homo sapien
tcctgcaaagcaccgatagctgcgc

SEQ ID NO: 3192523 - DNA, 25 bp, Homo sapien
aagcaccgatagctgcgctctggaa

SEQ ID NO: 3192524 - DNA, 25 bp, Homo sapien
gcaccgatagctgcgctctggaagt

SEQ ID NO: 3192525 - DNA, 25 bp, Homo sapien
caacgtatgtggcatgctagctgga

SEQ ID NO: 3192526 - DNA, 25 bp, Homo sapien
tcaacgtatgtggcatgctagctgg

SEQ ID NO: 3192527 - DNA, 25 bp, Homo sapien
ggatgtcttttggcataattgttac

SEQ ID NO: 3192528 - DNA, 25 bp, Homo sapien
gctagctggatgtcttttggcataa

SEQ ID NO: 3192529 - DNA, 25 bp, Homo sapien
gtgattcccccaccttagcctcctg

SEQ ID NO: 3192530 - DNA, 25 bp, Homo sapien
tgggactacaggtacacaccaccaa

SEQ ID NO: 3192531 - DNA, 25 bp, Homo sapien
ggactacaggtacacaccaccaaac

SEQ ID NO: 3192532 - DNA, 25 bp, Homo sapien
actacaggtacacaccaccaaacct

SEQ ID NO: 3192533 - DNA, 25 bp, Homo sapien
gatagtctcggttactttcgcgtca

SEQ ID NO: 3192534 - DNA, 25 bp, Homo sapien
ccaattgagaaagacgggcccggag

SEQ ID NO: 3192535 - DNA, 25 bp, Homo sapien
taggatgagcgacaacgttttccgg

SEQ ID NO: 3192536 - DNA, 25 bp, Homo sapien
agggtcaagtactgcggccttcgga

SEQ ID NO: 3192537 - DNA, 25 bp, Homo sapien
gctccaatctgcgaaatacggcact

SEQ ID NO: 3192538 - DNA, 25 bp, Homo sapien
caatctgcgaaatacggcactctct

SEQ ID NO: 3192539 - DNA, 25 bp, Homo sapien
cgaaatacggcactctctttattga

SEQ ID NO: 3192540 - DNA, 25 bp, Homo sapien
gctcagctccaatctgcgaaatacg

SEQ ID NO: 3192541 - DNA, 25 bp, Homo sapien
tgataattttagaatataaatcctc

SEQ ID NO: 3192542 - DNA, 25 bp, Homo sapien
gatgataattttagaatataaatcc

SEQ ID NO: 3192543 - DNA, 25 bp, Homo sapien
ataattttagaatataaatcctcac

SEQ ID NO: 3192544 - DNA, 25 bp, Homo sapien
ctgcaaaagaagatgataattttag

SEQ ID NO: 3192545 - DNA, 25 bp, Homo sapien
tagcaagtgttagttcccttccgta

SEQ ID NO: 3192546 - DNA, 25 bp, Homo sapien
catatctagcaagtgttagttccct

SEQ ID NO: 3192547 - DNA, 25 bp, Homo sapien
tctagcaagtgttagttcccttccg

SEQ ID NO: 3192548 - DNA, 25 bp, Homo sapien
tatctagcaagtgttagttcccttc

SEQ ID NO: 3192549 - DNA, 25 bp, Homo sapien
ttctttgcaaacgcactctgcacac

SEQ ID NO: 3192550 - DNA, 25 bp, Homo sapien
tttctttgcaaacgcactctgcaca

SEQ ID NO: 3192551 - DNA, 25 bp, Homo sapien
tctgaatcttctcgtctaaatttcc

SEQ ID NO: 3192552 - DNA, 25 bp, Homo sapien
aactcaagtccctcaacacgtagtg

SEQ ID NO: 3192553 - DNA, 25 bp, Homo sapien
tcaacacgtagtggcctgtgtgttc

SEQ ID NO: 3192554 - DNA, 25 bp, Homo sapien
gctttgtctgaatcttctcgtctaa

SEQ ID NO: 3192555 - DNA, 25 bp, Homo sapien
tacatgcacgttttcctgagaagct

SEQ ID NO: 3192556 - DNA, 25 bp, Homo sapien
cctgagaagctaatccatataatta

SEQ ID NO: 3192557 - DNA, 25 bp, Homo sapien
aaatgttttaataggtacatgcacg

SEQ ID NO: 3192558 - DNA, 25 bp, Homo sapien
caaaagaagtgtgccacaacaggtt

SEQ ID NO: 3192559 - DNA, 25 bp, Homo sapien
actgtcatacatgcggtctgtcggt

SEQ ID NO: 3192560 - DNA, 25 bp, Homo sapien
gtcatacatgcggtctgtcggtatg

SEQ ID NO: 3192561 - DNA, 25 bp, Homo sapien
tacatgcggtctgtcggtatgtggt

SEQ ID NO: 3192562 - DNA, 25 bp, Homo sapien
ccactgtcatacatgcggtctgtcg

SEQ ID NO: 3192563 - DNA, 25 bp, Homo sapien
tctatcacaattcttgccaacaggc

SEQ ID NO: 3192564 - DNA, 25 bp, Homo sapien
gagagacttacctctttccgctcaa

SEQ ID NO: 3192565 - DNA, 25 bp, Homo sapien
ccttactgtggttgactggatctta

SEQ ID NO: 3192566 - DNA, 25 bp, Homo sapien
tgctaaagccattcccacttcaggg

SEQ ID NO: 3192567 - DNA, 25 bp, Homo sapien
taagggacgtggacactctccatcg

SEQ ID NO: 3192568 - DNA, 25 bp, Homo sapien
ttacacctttatctcactaagctgc

SEQ ID NO: 3192569 - DNA, 25 bp, Homo sapien
tcactaagctgcacttttaagtcag

SEQ ID NO: 3192570 - DNA, 25 bp, Homo sapien
taagtcagtaagtgaaaagtgtaag

SEQ ID NO: 3192571 - DNA, 25 bp, Homo sapien
gttagggatcatagctttagtttct

SEQ ID NO: 3192572 - DNA, 25 bp, Homo sapien
tgttagggatcatagctttagtttc

SEQ ID NO: 3192573 - DNA, 25 bp, Homo sapien
tatgttagggatcatagctttagtt

SEQ ID NO: 3192574 - DNA, 25 bp, Homo sapien
tctatgttagggatcatagctttag

SEQ ID NO: 3192575 - DNA, 25 bp, Homo sapien
tctgagagaataatggactcacatt

SEQ ID NO: 3192576 - DNA, 25 bp, Homo sapien
cacatttggccatcagaagacaaac

SEQ ID NO: 3192577 - DNA, 25 bp, Homo sapien
taaatcaccacaatagctaatatag

SEQ ID NO: 3192578 - DNA, 25 bp, Homo sapien
aaatatttagattagcctttaactg

SEQ ID NO: 3192579 - DNA, 25 bp, Homo sapien
tcctgatttccactttcagtttcca

SEQ ID NO: 3192580 - DNA, 25 bp, Homo sapien
cttttcctgatttccactttcagtt

SEQ ID NO: 3192581 - DNA, 25 bp, Homo sapien
cctgatttccactttcagtttccat

SEQ ID NO: 3192582 - DNA, 25 bp, Homo sapien
tttcctgatttccactttcagtttc

SEQ ID NO: 3192583 - DNA, 25 bp, Homo sapien
caacttcttttttcttttcagtgct

SEQ ID NO: 3192584 - DNA, 25 bp, Homo sapien
tcaacttcttttttcttttcagtgc

SEQ ID NO: 3192585 - DNA, 25 bp, Homo sapien
tcttttcagtgctttcttcttccat

SEQ ID NO: 3192586 - DNA, 25 bp, Homo sapien
ttttcttttcagtgctttcttcttc

SEQ ID NO: 3192587 - DNA, 25 bp, Homo sapien
gaagtccacttgcttagcaatatct

SEQ ID NO: 3192588 - DNA, 25 bp, Homo sapien
ttttctatctgttctcgaagaaatc

SEQ ID NO: 3192589 - DNA, 25 bp, Homo sapien
ccttgtgaagatttgcatccccaaa

SEQ ID NO: 3192590 - DNA, 25 bp, Homo sapien
cacttgcttagcaatatctgcaagc

SEQ ID NO: 3192591 - DNA, 25 bp, Homo sapien
gttaaaagacacaagtagtgatata

SEQ ID NO: 3192592 - DNA, 25 bp, Homo sapien
ggcaattaacttcccatcagtagtc

SEQ ID NO: 3192593 - DNA, 25 bp, Homo sapien
acagctgaacttctcaatgctctgg

SEQ ID NO: 3192594 - DNA, 25 bp, Homo sapien
aagacacaagtagtgatatatcaac

SEQ ID NO: 3192595 - DNA, 25 bp, Homo sapien
tataataatcattacgttaacattc

SEQ ID NO: 3192596 - DNA, 25 bp, Homo sapien
aatcattacgttaacattctttata

SEQ ID NO: 3192597 - DNA, 25 bp, Homo sapien
tataattgtaagctataatcatata

SEQ ID NO: 3192598 - DNA, 25 bp, Homo sapien
taataatcattacgttaacattctt

SEQ ID NO: 3192599 - DNA, 25 bp, Homo sapien
atacactgtgcgttcatcctcatcc

SEQ ID NO: 3192600 - DNA, 25 bp, Homo sapien
tacactgtgcgttcatcctcatcct

SEQ ID NO: 3192601 - DNA, 25 bp, Homo sapien
cacatacactgtgcgttcatcctca

SEQ ID NO: 3192602 - DNA, 25 bp, Homo sapien
catacactgtgcgttcatcctcatc

SEQ ID NO: 3192603 - DNA, 25 bp, Homo sapien
attatattgtttctgtgccagtttc

SEQ ID NO: 3192604 - DNA, 25 bp, Homo sapien
agcaatattagagtttttcacaatc

SEQ ID NO: 3192605 - DNA, 25 bp, Homo sapien
tgccagtttctgactggggacccgg

SEQ ID NO: 3192606 - DNA, 25 bp, Homo sapien
caatattagagtttttcacaatcag

SEQ ID NO: 3192607 - DNA, 25 bp, Homo sapien
cacaaacgcaaatccctttggatct

SEQ ID NO: 3192608 - DNA, 25 bp, Homo sapien
aaacgcaaatccctttggatctcca

SEQ ID NO: 3192609 - DNA, 25 bp, Homo sapien
acgcaaatccctttggatctccagt

SEQ ID NO: 3192610 - DNA, 25 bp, Homo sapien
acaaacgcaaatccctttggatctc

SEQ ID NO: 3192611 - DNA, 25 bp, Homo sapien
tgaaatgattgcaaaagttactatt

SEQ ID NO: 3192612 - DNA, 25 bp, Homo sapien
gattgcaaaagttactattttaata

SEQ ID NO: 3192613 - DNA, 25 bp, Homo sapien
gaaatgattgcaaaagttactattt

SEQ ID NO: 3192614 - DNA, 25 bp, Homo sapien
ctgaaatgattgcaaaagttactat

SEQ ID NO: 3192615 - DNA, 25 bp, Homo sapien
ttaggaaatatgccaggttttcttg

SEQ ID NO: 3192616 - DNA, 25 bp, Homo sapien
ctgttttaggaaatatgccaggttt

SEQ ID NO: 3192617 - DNA, 25 bp, Homo sapien
taggaaatatgccaggttttcttgg

SEQ ID NO: 3192618 - DNA, 25 bp, Homo sapien
cattattagttcatcttacttcaac

SEQ ID NO: 3192619 - DNA, 25 bp, Homo sapien
tgccatcattattagttcatcttac

SEQ ID NO: 3192620 - DNA, 25 bp, Homo sapien
catcattattagttcatcttacttc

SEQ ID NO: 3192621 - DNA, 25 bp, Homo sapien
tacttcaactacacctatttaaata

SEQ ID NO: 3192622 - DNA, 25 bp, Homo sapien
tttggcttggatattgtcttccttt

SEQ ID NO: 3192623 - DNA, 25 bp, Homo sapien
tctttggcttggatattgtcttcct

SEQ ID NO: 3192624 - DNA, 25 bp, Homo sapien
ctttggcttggatattgtcttcctt

SEQ ID NO: 3192625 - DNA, 25 bp, Homo sapien
tcagagccctcagatgtgggtctgg

SEQ ID NO: 3192626 - DNA, 25 bp, Homo sapien
gccctcagatgtgggtctggatctt

SEQ ID NO: 3192627 - DNA, 25 bp, Homo sapien
gggttcagtggactcaatgtcagag

SEQ ID NO: 3192628 - DNA, 25 bp, Homo sapien
tggactcaatgtcagagccctcaga

SEQ ID NO: 3192629 - DNA, 25 bp, Homo sapien
tctttacttttgatcggggagctag

SEQ ID NO: 3192630 - DNA, 25 bp, Homo sapien
gatgcttcaactctgtcccgttttt

SEQ ID NO: 3192631 - DNA, 25 bp, Homo sapien
caggtaagctagatgcttcaactct

SEQ ID NO: 3192632 - DNA, 25 bp, Homo sapien
cttttgatcggggagctagggattc

SEQ ID NO: 3192633 - DNA, 25 bp, Homo sapien
aaatgggtgaaacagaagccaatta

SEQ ID NO: 3192634 - DNA, 25 bp, Homo sapien
tgggtgaaacagaagccaattaaaa

SEQ ID NO: 3192635 - DNA, 25 bp, Homo sapien
ctgtgaaatgggtgaaacagaagcc

SEQ ID NO: 3192636 - DNA, 25 bp, Homo sapien
tgaaacagaagccaattaaaaccta

SEQ ID NO: 3192637 - DNA, 25 bp, Homo sapien
aaaagctctccgttaagacatgggg

SEQ ID NO: 3192638 - DNA, 25 bp, Homo sapien
tcctcttcagtagagatttctatat

SEQ ID NO: 3192639 - DNA, 25 bp, Homo sapien
cttttcctcttcagtagagatttct

SEQ ID NO: 3192640 - DNA, 25 bp, Homo sapien
ttcctcttcagtagagatttctata
